(19) United States
(12) Patent Application Publication
(10) Pub. No.: US 2026/0125700 A1
(43) Pub. Date: May 7, 2026

(54) COMPOSITIONS AND METHODS FOR CHIMERIC LIGAND RECEPTOR (CLR)-MEDIATED CONDITIONAL GENE EXPRESSION

(71) Applicant: Poseida Therapeutics, Inc., San Diego, CA (US)

(72) Inventors: Eric M. OSTERTAG, San Diego, CA (US); Devon SHEDLOCK, San Diego, CA (US)

(21) Appl. No.: 19/257,090

(22) Filed: Jul. 1, 2025

Related U.S. Application Data
(63) Continuation of application No. 16/640,788, now Pat. No. 12,385,061.
(60) Provisional application No. 62/556,310, filed on Sep. 8, 2017.

(51) Int. Cl. C12N 15/85; A61K 40/11; A61K 40/31; A61K 40/40; A61K 40/42; A61P 7/04; C07K 14/725; C07K 16/28; C12N 9/06; C12N 9/64

(52) U.S. Cl. CPC C12N 15/85; A61K 40/11; A61K 40/31; A61K 40/40; A61K 40/4215; A61P 7/04; C07K 14/7051; C07K 16/2878; C12N 9/003; C12N 9/644; C12Y 105/01003; C12Y 304/21022; C07K 2319/02; C07K 2319/03; C12N 2830/002

(57) ABSTRACT

Disclosed are composition comprising (a) an inducible transgene construct, comprising a sequence encoding an inducible promoter and a sequence encoding a transgene, and (b) a receptor construct, comprising a sequence encoding a constitutive promoter and a sequence encoding an exogenous receptor, wherein, upon integration of the construct of (a) and the construct of (b) into a genomic sequence of a cell, the exogenous reporter is expressed, and wherein the exogenous reporter, upon binding a ligand, transduces an intracellular signal that targets the inducible promoter of (a) to modify gene expression. Methods for introducing compositions into cells and the use of the resultant cells in adoptive cell therapies are also provided.

### CROSS-REFERENCE TO RELATED APPLICATIONS

[0001] This application is a continuation of U.S. patent application Ser. No. 16/640,788, filed Feb. 21, 2020, which is a U.S. National Phase Application, filed under 35 U.S.C. § 371, of International Patent Application No. PCT/2018/050288, filed Sep. 10, 2018, which claims the benefit of provisional application U.S. Ser. No. 62/556,310, filed Sep. 8, 2017, the contents of each of these applications are herein incorporated by reference in their entireties.

### INCORPORATION OF SEQUENCE LISTING

[0002] The instant application contains a Sequence Listing, which has been submitted electronically in XML file format, and is hereby incorporated by reference into the specification in its entirety. The XML file containing the Sequence Listing XML is named “000218-0106-302-SL.xml,” was created on Jul. 1, 2025, and is 21,480,788 bytes in size.

### FIELD OF THE DISCLOSURE

[0003] The disclosure is directed to molecular biology, and more, specifically, to compositions and methods for use in a conditional gene expression system responsive to a chimeric ligand receptor (CLR)-mediated signal.

### BACKGROUND

[0004] There has been a long-felt but unmet need in the art for a method of controlling gene expression in genetically modified cells for the long-term delivery of therapeutic agents. The disclosure provides a solution by genetically modified cells that conditionally express genes upon activation of a cell-surface receptor.

### SUMMARY

[0005] The disclosure provides a composition comprising (a) an inducible transgene construct, comprising a sequence encoding an inducible promoter and a sequence encoding a transgene, and (b) a receptor construct, comprising a sequence encoding a constitutive promoter and a sequence encoding an exogenous receptor, wherein, upon integration of the construct of (a) and the construct of (b) into a genomic sequence of a cell, the exogenous reporter is expressed, and wherein the exogenous reporter, upon binding a ligand, transduces an intracellular signal that targets the inducible promoter of (a) to modify gene expression. In certain embodiments, the composition modifies gene expression by increasing gene expression. In certain embodiments, the composition modifies gene expression by decreasing gene expression. In certain embodiments, the composition modifies gene expression by transiently modifying gene expression (e.g. for the duration of binding of the ligand to the exogenous receptor). In certain embodiments, the composition modifies gene expression acutely (e.g. the ligand reversibly binds to the exogenous receptor). In certain embodiments, the composition modifies gene expression chronically (e.g. the ligand irreversibly binds to the exogenous receptor).

[0006] In certain embodiments of the compositions of the disclosure, the cell may be a prokaryotic cell. Prokaryotic cells of the disclosure include, but are not limited to, bacteria and archaea. For example, bacteria of the disclosure include, but are not limited to, Listeria monocytogenes.

[0007] In certain embodiments of the compositions of the disclosure, the cell may be a eukaryotic cell. Eukaryotic cells of the disclosure include, but are not limited to, yeast, plants, algae, insects, mammals, amphibians, birds, reptiles, marsupials, rodents, and humans. Preferred eukaryotic cells of the disclosure include, but are not limited to, human cells. Exemplary human cells of the disclosure include but are not limited to, immune cells (e.g. T cells), myeloid cells and bone marrow cells (e.g. hematopoietic stem cells (HSCs)).

[0008] In certain embodiments of the compositions of the disclosure, the exogenous receptor of (b) comprises an endogenous receptor with respect to the genomic sequence of the cell. Exemplary receptors include, but are not limited to, intracellular receptors, cell-surface receptors, transmembrane receptors, ligand-gated ion channels, and G-protein coupled receptors.

[0009] In certain embodiments of the compositions of the disclosure, the exogenous receptor of (b) comprises a non-naturally occurring receptor. In certain embodiments, the non-naturally occurring receptor is a synthetic, modified, recombinant, mutant or chimeric receptor. In certain embodiments, the non-naturally occurring receptor comprises one or more sequences isolated or derived from a T-cell receptor (TCR). In certain embodiments, the non-naturally occurring receptor comprises one or more sequences isolated or derived from a scaffold protein. In certain embodiments, including those wherein the non-naturally occurring receptor does not comprise a transmembrane domain, the non-naturally occurring receptor interacts with a second transmembrane, membrane-bound and/or an intracellular receptor that, following contact with the non-naturally occurring receptor, transduces an intracellular signal.

[0010] In certain embodiments of the compositions of the disclosure, the exogenous receptor of (b) comprises a non-naturally occurring receptor. In certain embodiments, the non-naturally occurring receptor is a synthetic, modified, recombinant, mutant or chimeric receptor. In certain embodiments, the non-naturally occurring receptor comprises one or more sequences isolated or derived from a T-cell receptor (TCR). In certain embodiments, the non-naturally occurring receptor comprises one or more sequences isolated or derived from a scaffold protein. In certain embodiments, the non-naturally occurring receptor comprises a transmembrane domain. In certain embodiments, the non-naturally occurring receptor interacts with an intracellular receptor that transduces an intracellular signal. In certain embodiments, the non-naturally occurring receptor comprises an intracellular signalling domain. In certain embodiments, the non-naturally occurring receptor is a chimeric ligand receptor (CLR). In certain embodiments, the CLR is a chimeric antigen receptor.

[0011] In certain embodiments of the compositions of the disclosure, the exogenous receptor of (b) comprises a non-naturally occurring receptor. In certain embodiments, the CLR is a chimeric antigen receptor. In certain embodiments, the chimeric ligand receptor comprises (a) an ectodomain comprising a ligand recognition region, wherein the ligand recognition region comprises at least scaffold protein; (b) a transmembrane domain, and (c) an endodomain comprising at least one costimulatory domain. In certain embodiments, the ectodomain of (a) further comprises a signal peptide. In certain embodiments, the ectodomain of (a) further comprises a hinge between the ligand recognition region and the transmembrane domain. In certain embodiments, the signal peptide comprises a sequence encoding a human CD2, CD3δ, CD3ε, CD3γ, CD3ζ, CD4, CD8α, CD19, CD28, 4-1BB or GM-CSFR signal peptide. In certain embodiments, the signal peptide comprises a sequence encoding a human CD8α signal peptide. In certain embodiments, the signal peptide comprises an amino acid sequence comprising MALPVTALLLPLALLLHAARP (SEQ ID NO:17000). In certain embodiments, the signal peptide is encoded by a nucleic acid sequence comprising atggcactgccagtcaccgccctgctgctgcctctggctctgctgctgcacgcagctagacca (SEQ ID NO:17001). In certain embodiments, the transmembrane domain comprises a sequence encoding a human CD2, CD3δ, CD3ε, CD3γ, CD3ζ, CD4, CD8α, CD19, CD28, 4-1BB or GM-CSFR transmembrane domain. In certain embodiments, the transmembrane domain comprises a sequence encoding a human CD8a transmembrane domain. In certain embodiments, the transmembrane domain comprises an amino acid sequence comprising IYIWAPLAGTCGVLLLSLVITLYC (SEQ ID NO: 17002). In certain embodiments, the transmembrane domain is encoded by a nucleic acid sequence comprising atctacatttgggcaccactggccgggacctgtggagtgctgctgctgagcctggtcatcacactgtactgc (SEQ ID NO: 17003). In certain embodiments, the endodomain comprises a human CD33 endodomain. In certain embodiments, the at least one costimulatory domain comprises a human 4-1BB, CD28, CD3ζ, CD40, ICOS, MyD88, OX-40 intracellular segment, or any combination thereof. In certain embodiments, the at least one costimulatory domain comprises a human CD3 ζ and/or a 4-1BB costimulatory domain. In certain embodiments, the CD3ζ costimulatory domain comprises an amino acid sequence comprising RVKFSRSADAPAYKQGQNQLYNELNLGRREEYDVLDKRRGRDPEMGGKPRRKNPQEGL YNELQKDKMAEAYSEIGMKGERRRGKGHDGLYQGLSTATKDTYDALHMQALPPR (SEQ ID NO: 17004). In certain embodiments, the CD33 costimulatory domain is encoded by a nucleic acid sequence comprising cgcgtgaagtttagtcgatcagcagatgccccagcttacaaacagggacagaaccagctgtataacgagctgaatctgggccgccgagag gaatatgacgtgctggataagcggagaggacgcgaccccgaaatgggaggcaagcccaggcgcaaaaaccctcaggaaggcctgtat aacgagctgcagaaggacaaaatggcagaagcctattctgagatcggcatgaagggggagcgacggagaggcaaagggcacgatgg gctgtaccagggactgagcaccgccacaaaggacacctatgatgctctgcatatgcaggcactgcctccaagg (SEQ ID NO: 17005). In certain embodiments, the 4-1BB costimulatory domain comprises an amino acid sequence comprising KRGRKKLLYIFKQPFMRPVQTTQEEDGCSCRFPEEEEGGCEL (SEQ ID NO: 17006). In certain embodiments, the 4-1BB costimulatory domain is encoded by a nucleic acid sequence comprising aagagaggcaggaagaaactgctgtatattttcaaacagcccttcatgcgccccgtgcagactacccaggaggaagacgggtgctcctgtc gattccctgaggaagaggaaggcgggtgtgagctg (SEQ ID NO: 17007). In certain embodiments, the 4-1BB costimulatory domain is located between the transmembrane domain and the CD3ζ costimulatory domain. In certain embodiments, the hinge comprises a sequence derived from a human CD8α, IgG4, and/or CD4 sequence. In certain embodiments, the hinge comprises a sequence derived from a human CD8α sequence. In certain embodiments, the hinge comprises an amino acid sequence comprising TTTPAPRPPTPAPTIASQPLSLRPEACRPAAGGAVHTRGLDFACD (SEQ ID NO: 17008). In certain embodiments, the hinge is encoded by a nucleic acid sequence comprising actaccacaccagcacctagaccaccaactccagctccaaccatcgcgagtcagcccctgagtctgagacctgaggcctgcaggccagct gcaggaggagctgtgcacaccaggggcctggacttcgcctgcgac (SEQ ID NO: 17028). In certain embodiments, the hinge is encoded by a nucleic acid sequence comprising ACCACAACCCCTGCCCCCAGACCTCCCACACCCGCCCCTACCATCGCGAGTCAGCCC CTGAGTCTGAGACCTGAGGCCTGCAGGCCAGCTGCAGGAGGAGCTGTGCACACCAG GGGCCTGGACTTCGCCTGCGAC (SEQ ID NO: 17009). In certain embodiments, the at least one protein scaffold specifically binds the ligand.

[0012] In certain embodiments of the compositions of the disclosure, the exogenous receptor of (b) comprises a non-naturally occurring receptor. In certain embodiments, the CLR is a chimeric antigen receptor. In certain embodiments, the chimeric ligand receptor comprises (a) an ectodomain comprising a ligand recognition region, wherein the ligand recognition region comprises at least scaffold protein; (b) a transmembrane domain, and (c) an endodomain comprising at least one costimulatory domain. In certain embodiments, the at least one protein scaffold comprises an antibody, an antibody fragment, a single domain antibody, a single chain antibody, an antibody mimetic, or a Centyrin. In certain embodiments, the ligand recognition region comprises one or more of an antibody, an antibody fragment, a single domain antibody, a single chain antibody, an antibody mimetic, and a Centyrin. In certain embodiments, the single domain antibody comprises or consists of a VHH. In certain embodiments, the antibody mimetic comprises or consists of an affibody, an afflilin, an affimer, an affitin, an alphabody, an anticalin, an avimer, a DARPin, a Fynomer, a Kunitz domain peptide or a monobody. In certain embodiments, the Centyrin comprises or consists of a consensus sequence of at least one fibronectin type III (FN3) domain.

[0013] In certain embodiments of the compositions of the disclosure, the exogenous receptor of (b) comprises a non-naturally occurring receptor. In certain embodiments, the CLR is a chimeric antigen receptor. In certain embodiments, the chimeric ligand receptor comprises (a) an ectodomain comprising a ligand recognition region, wherein the ligand recognition region comprises at least scaffold protein; (b) a transmembrane domain, and (c) an endodomain comprising at least one costimulatory domain. In certain embodiments, the Centyrin comprises or consists of a consensus sequence of at least one fibronectin type III (FN3) domain. In certain embodiments, the at least one fibronectin type III (FN3) domain is derived from a human protein. In certain embodiments, the human protein is Tenascin-C. In certain embodiments, the consensus sequence comprises LPAPKNLVVSEVTEDSLRLSWTAPDAAFDSFLIQYQESEKVGEAINLTVPGSERSYDLTG LKPGTEYTVSIYGVKGGHRSNPLSAEFTT (SEQ ID NO: 17010). In certain embodiments, the consensus sequence comprises MLPAPKNLVVSEVTEDSLRLSWTAPDAAFDSFLIQYQESEKVGEAINLTVPGSERSYDLT GLKPGTEYTVSIYGVKGGHRSNPLSAEFTT (SEQ ID NO: 17011). In certain embodiments, the consensus sequence is modified at one or more positions within (a) a A-B loop comprising or consisting of the amino acid residues TEDS at positions 13-16 of the consensus sequence; (b) a B-C loop comprising or consisting of the amino acid residues TAPDAAF at positions 22-28 of the consensus sequence; (c) a C-D loop comprising or consisting of the amino acid residues SEKVGE at positions 38-43 of the consensus sequence; (d) a D-E loop comprising or consisting of the amino acid residues GSER at positions 51-54 of the consensus sequence; (e) a E-F loop comprising or consisting of the amino acid residues GLKPG at positions 60-64 of the consensus sequence; (f) a F-G loop comprising or consisting of the amino acid residues KGGHRSN at positions 75-81 of the consensus sequence; or (g) any combination of (a)-(f). In certain embodiments, the Centyrin comprises a consensus sequence of at least 5 fibronectin type III (FN3) domains. In certain embodiments, the Centyrin comprises a consensus sequence of at least 10 fibronectin type III (FN3) domains. In certain embodiments, the Centyrin comprises a consensus sequence of at least 15 fibronectin type III (FN3) domains. In certain embodiments, the scaffold binds an antigen with at least one affinity selected from a K_{D} of less than or equal to 10⁻⁹M, less than or equal to 10⁻¹⁰M, less than or equal to 10⁻¹¹M, less than or equal to 10⁻¹²M, less than or equal to 10⁻¹³M, less than or equal to 10⁻¹⁴M, and less than or equal to 10⁻¹⁵M. In certain embodiments, the K_{D} is determined by surface plasmon resonance. In certain embodiments of the compositions of the disclosure, the exogenous receptor of (b) comprises a non-naturally occurring receptor. In certain embodiments, the CLR is a chimeric antigen receptor. In certain embodiments, the chimeric ligand receptor comprises (a) an ectodomain comprising a ligand recognition region, wherein the ligand recognition region comprises at least a VHH antibody; (b) a transmembrane domain, and (c) an endodomain comprising at least one costimulatory domain. In certain embodiments, the VHH is camelid. Alternatively, or in addition, in certain embodiments, the VHH is humanized. In certain embodiments, the sequence comprises two heavy chain variable regions of an antibody, wherein the complementarity-determining regions (CDRs) of the VHH are human sequences.

[0014] In certain embodiments of the compositions of the disclosure, the sequence encoding the constitutive promoter of (b) comprises a sequence encoding an EF1α promoter. In certain embodiments of the compositions of the disclosure, the sequence encoding the constitutive promoter of (b) comprises a sequence encoding a CMV promoter, a U6 promoter, a SV40 promoter, a PGK1 promoter, a Ubc promoter, a human beta actin promoter, a CAG promoter, or an EF1α promoter.

[0015] In certain embodiments of the compositions of the disclosure, the sequence encoding the inducible promoter of (a) comprises a sequence encoding an NFκB promoter. In certain embodiments of the compositions of the disclosure, the sequence encoding the inducible promoter of (a) comprises a sequence encoding an interferon (IFN) promoter or a sequence encoding an interleukin-2 promoter. In certain embodiments of the compositions of the disclosure, the sequence encoding the inducible promoter of (a) comprises a sequence encoding a nuclear receptor subfamily 4 group A member 1 (NR4A1; also known as NUR77) promoter or a sequence encoding a NR4A1 promoter. In certain embodiments of the compositions of the disclosure, the sequence encoding the inducible promoter of (a) comprises a sequence encoding a T-cell surface glycoprotein CD5 (CD5) promoter or a sequence encoding a CD5 promoter. In certain embodiments, the interferon (IFN) promoter is an IFNγ promoter. In certain embodiments of the compositions of the disclosure, the inducible promoter is isolated or derived from the promoter of a cytokine or a chemokine. In certain embodiments, the cytokine or chemokine comprises IL2, IL3, IL4, IL5, IL6, IL10, IL12, IL13, IL17A/F, IL21, IL22, IL23, transforming growth factor beta (TGFβ), colony stimulating factor 2 (GM-CSF), interferon gamma (IFNγ), Tumor necrosis factor (TNFα), LTα, perforin, Granzyme C (Gzmc), Granzyme B (Gzmb), C-C motif chemokine ligand 5 (CCL5), C-C motif chemokine ligand 4 (CCL4), C-C motif chemokine ligand 3 (CCL3), X-C motif chemokine ligand 1 (XCL1) and LIF interleukin 6 family cytokine (Lif).

[0016] In certain embodiments of the compositions of the disclosure, including those wherein the sequence encoding the inducible promoter of (a) comprises a sequence encoding a NR4A1 promoter or a sequence encoding a NR4A1 promoter, the NR4A1 promoter is activated by T-cell Receptor (TCR) stimulation in T cells and by B-cell Receptor (BCR) stimulation in B cells, therefore, inducing expression of any sequence under control of the NR4A1 promoter upon activation of a T-cell or B-cell of the disclosure through a TCR or BCR, respectively.

[0017] In certain embodiments of the compositions of the disclosure, including those wherein the sequence encoding the inducible promoter of (a) comprises a sequence encoding a CD5 promoter or a sequence encoding a CD5 promoter, the CD5 promoter is activated by T-cell Receptor (TCR) stimulation in T cells, therefore, inducing expression of any sequence under control of the CD5 promoter upon activation of a T-cell of the disclosure through a TCR.

[0018] In certain embodiments of the compositions of the disclosure, the inducible promoter is isolated or derived from the promoter of a gene comprising a surface protein involved in cell differention, activation, exhaustion and function. In certain embodiments, the gene comprises CD69, CD71, CTLA4, PD-1, TIGIT, LAG3, TIM-3, GITR, MHCII, COX-2, FASL and 4-1BB.

[0019] In certain embodiments of the compositions of the disclosure, the inducible promoter is isolated or derived from the promoter of a gene involved in CD metabolism and differentiation. In certain embodiments of the compositions of the disclosure, the inducible promoter is isolated or derived from the promoter of Nr4a1, Nr4a3, Tnfrsf9 (4-1BB), Sema7a, Zfp3612, Gadd45b, Dusp5, Dusp6 and Neto2.

[0020] In certain embodiments of the compositions of the disclosure, the transgene comprises a sequence that is endogenous with respect to the genomic sequence of the cell.

[0021] In certain embodiments of the compositions of the disclosure, the transgene comprises a sequence that is exogenous with respect to the genomic sequence of the cell. In certain embodiments, the exogenous sequence is a sequence variant of an endogenous sequence within the genome of the cell. In certain embodiments, the exogenous sequence is a wild type sequence of gene that is entirely or partially absent in the cell, and wherein the gene is entirely present in the genome of a healthy cell. In certain embodiments, the exogenous sequence is a synthetic, modified, recombinant, chimeric or non-naturally occurring sequence with respect to the genome of the cell. In certain embodiments, the transgene encodes a secreted protein. In certain embodiments, the secreted protein is produced and/or secreted from the cell at a level that is therapeutically effective to treat a disease or disorder in a subject in need thereof.

[0022] In certain embodiments of the compositions of the disclosure, a first transposon comprises the inducible transgene construct of (a) and a second transposon comprises the receptor construct of (b). In certain embodiments of the compositions of the disclosure, a first vector comprises the first transposon and a second vector comprises the second transposon. In certain embodiments of the compositions of the disclosure, a vector comprises the first transposon and the second transposon. In certain embodiments, the first transposon and the second transposon are oriented in the same direction. In certain embodiments, the first transposon and the second transposon are oriented in opposite directions. In certain embodiments, the vector is a plasmid. In certain embodiments, the vector is a nanoplasmid.

[0023] In certain embodiments of the compositions of the disclosure, the vector is a viral vector. Viral vectors of the disclosure may comprise a sequence isolated or derived from a retrovirus, a lentivirus, an adenovirus, an adeno-associated virus or any combination thereof. The viral vector may comprise a sequence isolated or derived from an adeno-associated virus (AAV). The viral vector may comprise a recombinant AAV (rAAV). Exemplary adeno-associated viruses and recombinant adeno-associated viruses of the disclosure comprise two or more inverted terminal repeat (ITR) sequences located in cis next to a sequence encoding a construct of the disclosure. Exemplary adeno-associated viruses and recombinant adeno-associated viruses of the disclosure include, but are not limited to all serotypes (e.g. AAV1, AAV2, AAV3, AAV4, AAV5, AAV6, AAV7, AAV8, and AAV9). Exemplary adeno-associated viruses and recombinant adeno-associated viruses of the disclosure include, but are not limited to, self-complementary AAV (scAAV) and AAV hybrids containing the genome of one serotype and the capsid of another serotype (e.g. AAV2/5, AAV-DJ and AAV-DJ8). Exemplary adeno-associated viruses and recombinant adeno-associated viruses of the disclosure include, but are not limited to, rAAV-LK03 and AAVs with the NP-59 and NP-84 capsid variants.

[0024] In certain embodiments of the compositions of the disclosure, the vector is a nanoparticle. Exemplary nanoparticle vectors of the disclosure include, but are not limited to, nucleic acids (e.g. RNA, DNA, synthetic nucleotides, modified nucleotides or any combination thereof), amino acids (L-amino acids, D-amino acids, synthetic amino acids, modified amino acids, or any combination thereof), polymers (e.g. polymersomes), micelles, lipids (e.g. liposomes), organic molecules (e.g. carbon atoms, sheets, fibers, tubes), inorganic molecules (e.g. calcium phosphate or gold) or any combination thereof. A nanoparticle vector may be passively or actively transported across a cell membrane.

[0025] In certain embodiments of the compositions of the disclosure, first transposon or the second transposon is a piggyBac transposon. In certain embodiments, the first transposon and the second transposon is a piggyBac transposon. In certain embodiments, the composition further comprises a plasmid or a nanoplasmid comprising a sequence encoding a transposase enzyme. In certain embodiments, the sequence encoding a transposase enzyme is an mRNA sequence. In certain embodiments, the transposase is a piggyBac transposase. In certain embodiments, the piggyBac transposase comprises an amino acid sequence comprising SEQ ID NO: 1. In certain embodiments, the piggyBac transposase is a hyperactive variant and wherein the hyperactive variant comprises an amino acid substitution at one or more of positions 30, 165, 282 and 538 of SEQ ID NO: 1. In certain embodiments, the amino acid substitution at position 30 of SEQ ID NO: 1 is a substitution of a valine (V) for an isoleucine (I) (I30V). In certain embodiments, the amino acid substitution at position 165 of SEQ ID NO: 1 is a substitution of a serine(S) for a glycine (G) (G165S). In certain embodiments, the amino acid substitution at position 282 of SEQ ID NO: 1 is a substitution of a valine (V) for a methionine (M) (M282V). In certain embodiments, the amino acid substitution at position 538 of SEQ ID NO: 1 is a substitution of a lysine (K) for an asparagine (N) (N538K). In certain embodiments, the transposase is a Super piggyBac (SPB) transposase. In certain embodiments, the Super piggyBac (SPB) transposase comprises an amino acid sequence comprising SEQ ID NO: 2.

[0026] In certain embodiments of the disclosure, the transposase enzyme is a piggyBac™ (PB) transposase enzyme. The piggyBac (PB) transposase enzyme may comprise or consist of an amino acid sequence at least 75%, 80%, 85%, 90%, 95%, 99% or any percentage in between identical to:

(SEQ ID NO: 17029)

| | |
|---|---|
| 1 | MGSSLDDEHI LSALLQSDDE LVGEDSDSEI SDHVSEDDVQ |
| | SDTEEAFIDE VHEVQPTSSG |
| 61 | SEILDEQNVI EQPGSSLASN RILTLPQRTI RGKNKHCWST |
| | SKSTRRSRVS ALNIVRSQRG |
| 121 | PTRMCRNIYD PLDCFKLFFT DEIISEIVKW TNAEISLKRR |
| | ESMTGATFRD TNEDEIYAFF |
| 181 | GILVMTAVRK DNHMSTDDLF DRSLSMVYVS VMSRDRFDFL |
| | IRCLRMDDKS IRPTLRENDV |
| 241 | FTPVRKIWDL FIHQCIQNYT PQAHLTIDEQ LLGFRQRQPF |
| | RMYIPNKPSK YQIKILMMCD |
| 301 | SGYKYMINGM PYLGRGTQTN GVRLGEYYVK ELSKPVHGSC |
| | RNITCDNWFT SIPLAKNLLQ |
| 361 | EPYKLTIVGT VRSNKREIPE VLKNSRSRPV GTSMFCFDGP |
| | LTLVSYKPKP AKMVYLLSSC |
| 421 | DEDASINEST GKPQMVMYYN QTKGGVDTLD QMCSVMTCSR |
| | KTNRWRMALL YGMINIACIN |
| 481 | SFIIYSHNVS SKGEKVQSRK KFMRNLYMSL TSSFMRKRLE |
| | APTLKRYLRD NISNILPNEV |
| 541 | PGTSDDSTEE PVMKKRTYCT YCPSKIRRKA NASCKKCKKV |
| | ICREHNIDMC QSCF. |

[0027] In certain embodiments of the disclosure, the transposase enzyme is a piggyBac™ (PB) transposase enzyme that comprises or consists of an amino acid sequence having an amino acid substitution at one or more of positions 30, 165, 282, or 538 of the sequence:

(SEQ ID NO: 17029)

| | |
|---|---|
| 1 | MGSSLDDEHI LSALLQSDDE LVGEDSDSEI SDHVSEDDVQ |
| | SDTEEAFIDE VHEVQPTSSG |
| 61 | SEILDEQNVI EQPGSSLASN RILTLPQRTI RGKNKHCWST |
| | SKSTRRSRVS ALNIVRSQRG |
| 121 | PTRMCRNIYD PLLCFKLFFT DEIISEIVKW TNAEISLKRR |
| | ESMTGATFRD TNEDEIYAFF |
| 181 | GILVMTAVRK DNHMSTDDLF DRSLSMVYVS VMSRDRFDFL |
| | IRCLRMDDKS IRPTLRENDV |
| 241 | FTPVRKIWDL FIHQCIQNYT PGAHLTIDEQ LLGFRGRCPF |
| | RMYIPNKPSK YGIKILMMCD |
| 301 | SGYKYMINGM PYLGRGTQTN GVPLGEYYVK ELSKPVHGSC |
| | RNITCDNWFT SIPLAKNLLQ |
| 361 | EPYKLTIVGT VRSNKREIPE VLKNSRSRPV GTSMFCFDGP |
| | LTLVSYKPKP AKMVYLLSSC |
| 421 | DEDASINEST GKPQMVMYYN QTKGGVDTLD QMCSVMTCSR |
| | KTNRWPMALL YGMINIACIN |
| 481 | SFIIYSHNVS SKGEKVQSRK KFMRNLYMSL TSSFMRKRLE |
| | APTLKRYLRD NISNILPNEV |
| 541 | PGTSDDSTEE PVMKKRTYCT YCPSKIRRKA NASCKKCKKV |
| | ICREHNIDMC QSCF. |

[0028] In certain embodiments, the transposase enzyme is a piggyBac™ (PB) transposase enzyme that comprises or consists of an amino acid sequence having an amino acid substitution at two or more of positions 30, 165, 282, or 538 of the sequence of SEQ ID NO: 1. In certain embodiments, the transposase enzyme is a piggyBac™ (PB) transposase enzyme that comprises or consists of an amino acid sequence having an amino acid substitution at three or more of positions 30, 165, 282, or 538 of the sequence of SEQ ID NO: 1. In certain embodiments, the transposase enzyme is a piggyBac™ (PB) transposase enzyme that comprises or consists of an amino acid sequence having an amino acid substitution at each of the following positions 30, 165, 282, and 538 of the sequence of SEQ ID NO: 1. In certain embodiments, the amino acid substitution at position 30 of the sequence of SEQ ID NO: 1 is a substitution of a valine (V) for an isoleucine (I). In certain embodiments, the amino acid substitution at position 165 of the sequence of SEQ ID NO: 1 is a substitution of a serine(S) for a glycine (G). In certain embodiments, the amino acid substitution at position 282 of the sequence of SEQ ID NO: 1 is a substitution of a valine (V) for a methionine (M). In certain embodiments, the amino acid substitution at position 538 of the sequence of SEQ ID NO: 1 is a substitution of a lysine (K) for an asparagine (N).

[0029] In certain embodiments of the disclosure, the transposase enzyme is a Super piggyBac™ (SPB) transposase enzyme. In certain embodiments, the Super piggyBac™ (SPB) transposase enzymes of the disclosure may comprise or consist of the amino acid sequence of the sequence of SEQ ID NO: 1 wherein the amino acid substitution at position 30 is a substitution of a valine (V) for an isoleucine (I), the amino acid substitution at position 165 is a substitution of a serine(S) for a glycine (G), the amino acid substitution at position 282 is a substitution of a valine (V) for a methionine (M), and the amino acid substitution at position 538 is a substitution of a lysine (K) for an asparagine (N). In certain embodiments, the Super piggyBac™ (SPB) transposase enzyme may comprise or consist of an amino acid sequence at least 75%, 80%, 85%, 90%, 95%, 99% or any percentage in between identical to:

(SEQ ID NO: 17030)

| | |
|---|---|
| 1 | MGSSLDDEHI LSALLQSDDE LVGEDSDSEV SDHVSEDDVQ |
| | SDTEEAFIDE VHEVQPTSSG |
| 61 | SEILDEQNVI EQPGSSLASN RILTLPQRTI RGKNKHCWST |
| | SKSTRRSRVS ALNIVRSQRG |
| 121 | PTRMCRNIYD PLLCFKLFFT DEIISEIVKW TNAEISLKRR |
| | ESMTSATFRD TNEDEIYAFF |
| 181 | GILVMTAVRK DNHMSTDDLF DPSLSMVYVS VMSRDRFDFL |
| | IRCLRMDDKS IRPTLRENDV |
| 241 | FTPVRKIWDL FIHQCIQNYT PGAHLTIDEQ LLGFRGRCPF |
| | RVYIPNKPSK YGIKILMMCD |
| 301 | SGTKYMINGM PYLGRGTQTN GVPLGEYYVK ELSKPVHGSC |
| | RNITCDNWFT SIPLAKNLLQ |
| 361 | EPYKLTIVGT VRSNKREIPE VLKNSRSRPV GTSMFCFDGP |
| | LTLVSYKPKP AKMVYLLSSC |
| 421 | DEDASINEST GKPQMVMYYN QTKGGVDTLD QMCSVMTCSR |
| | KTNRWPMALL YGMINIACIN |
| 481 | SFIIYSHNVS SKGEKVQSRK KFMRNLYMSL TSSFMRKRLE |
| | APTLKRYLRD NISNILPKEV |
| 541 | PGTSDDSTEE PVMKKRTYCT YCRSKIRRKA NASCKKCKKV |
| | ICREHNIDMC QSCF. |

[0030] In certain embodiments of the disclosure, including those embodiments wherein the transposase comprises the above-described mutations at positions 30, 165, 282 and/or 538, the piggyBac™ or Super piggyBac™ transposase enzyme may further comprise an amino acid substitution at one or more of positions 3, 46, 82, 103, 119, 125, 177, 180, 185, 187, 200, 207, 209, 226, 235, 240, 241, 243, 258, 296, 298, 311, 315, 319, 327, 328, 340, 421, 436, 456, 470, 486, 503, 552, 570 and 591 of the sequence of SEQ ID NO: 1 or SEQ ID NO: 2. In certain embodiments, including those embodiments wherein the transposase comprises the above-described mutations at positions 30, 165, 282 and/or 538, the piggyBac™ or Super piggyBac™ transposase enzyme may further comprise an amino acid substitution at one or more of positions 46, 119, 125, 177, 180, 185, 187, 200, 207, 209, 226, 235, 240, 241, 243, 296, 298, 311, 315, 319, 327, 328, 340, 421, 436, 456, 470, 485, 503, 552 and 570. In certain embodiments, the amino acid substitution at position 3 of SEQ ID NO: 1 or SEQ ID NO: 2 is a substitution of an asparagine (N) for a serine(S). In certain embodiments, the amino acid substitution at position 46 of SEQ ID NO: 1 or SEQ ID NO: 2 is a substitution of a serine(S) for an alanine (A). In certain embodiments, the amino acid substitution at position 46 of SEQ ID NO: 1 or SEQ ID NO: 2 is a substitution of a threonine (T) for an alanine (A). In certain embodiments, the amino acid substitution at position 82 of SEQ ID NO: 1 or SEQ ID NO: 2 is a substitution of a tryptophan (W) for an isoleucine (I). In certain embodiments, the amino acid substitution at position 103 of SEQ ID NO: 1 or SEQ ID NO: 2 is a substitution of a proline (P) for a serine(S). In certain embodiments, the amino acid substitution at position 119 of SEQ ID NO: 1 or SEQ ID NO: 2 is a substitution of a proline (P) for an arginine (R). In certain embodiments, the amino acid substitution at position 125 of SEQ ID NO: 1 or SEQ ID NO: 2 is a substitution of an alanine (A) a cysteine (C). In certain embodiments, the amino acid substitution at position 125 of SEQ ID NO: 1 or SEQ ID NO: 2 is a substitution of a leucine (L) for a cysteine (C). In certain embodiments, the amino acid substitution at position 177 of SEQ ID NO: 1 or SEQ ID NO: 2 is a substitution of a lysine (K) for a tyrosine (Y). In certain embodiments, the amino acid substitution at position 177 of SEQ ID NO: 1 or SEQ ID NO: 2 is a substitution of a histidine (H) for a tyrosine (Y). In certain embodiments, the amino acid substitution at position 180 of SEQ ID NO: 1 or SEQ ID NO: 2 is a substitution of a leucine (L) for a phenylalanine (F). In certain embodiments, the amino acid substitution at position 180 of SEQ ID NO: 1 or SEQ ID NO: 2 is a substitution of an isoleucine (I) for a phenylalanine (F). In certain embodiments, the amino acid substitution at position 180 of SEQ ID NO: 1 or SEQ ID NO: 2 is a substitution of a valine (V) for a phenylalanine (F). In certain embodiments, the amino acid substitution at position 185 of SEQ ID NO: 1 or SEQ ID NO: 2 is a substitution of a leucine (L) for a methionine (M). In certain embodiments, the amino acid substitution at position 187 of SEQ ID NO: 1 or SEQ ID NO: 2 is a substitution of a glycine (G) for an alanine (A). In certain embodiments, the amino acid substitution at position 200 of SEQ ID NO: 1 or SEQ ID NO: 2 is a substitution of a tryptophan (W) for a phenylalanine (F). In certain embodiments, the amino acid substitution at position 207 of SEQ ID NO: 1 or SEQ ID NO: 2 is a substitution of a proline (P) for a valine (V). In certain embodiments, the amino acid substitution at position 209 of SEQ ID NO: 1 or SEQ ID NO: 2 is a substitution of a phenylalanine (F) for a valine (V). In certain embodiments, the amino acid substitution at position 226 of SEQ ID NO: 1 or SEQ ID NO: 2 is a substitution of a phenylalanine (F) for a methionine (M). In certain embodiments, the amino acid substitution at position 235 of SEQ ID NO: 1 or SEQ ID NO: 2 is a substitution of an arginine (R) for a leucine (L). In certain embodiments, the amino acid substitution at position 240 of SEQ ID NO: 1 or SEQ ID NO: 1 is a substitution of a lysine (K) for a valine (V). In certain embodiments, the amino acid substitution at position 241 of SEQ ID NO: 1 or SEQ ID NO: 2 is a substitution of a leucine (L) for a phenylalanine (F). In certain embodiments, the amino acid substitution at position 243 of SEQ ID NO: 1 or SEQ ID NO: 2 is a substitution of a lysine (K) for a proline (P). In certain embodiments, the amino acid substitution at position 258 of SEQ ID NO: 1 or SEQ ID NO: 2 is a substitution of a serine(S) for an asparagine (N). In certain embodiments, the amino acid substitution at position 296 of SEQ ID NO: 1 or SEQ ID NO: 2 is a substitution of a tryptophan (W) for a leucine (L). In certain embodiments, the amino acid substitution at position 296 of SEQ ID NO: 1 or SEQ ID NO: 2 is a substitution of a tyrosine (Y) for a leucine (L). In certain embodiments, the amino acid substitution at position 296 of SEQ ID NO: 1 or SEQ ID NO: 2 is a substitution of a phenylalanine (F) for a leucine (L). In certain embodiments, the amino acid substitution at position 298 of SEQ ID NO: 1 or SEQ ID NO: 2 is a substitution of a leucine (L) for a methionine (M). In certain embodiments, the amino acid substitution at position 298 of SEQ ID NO: 1 or SEQ ID NO: 2 is a substitution of an alanine (A) for a methionine (M). In certain embodiments, the amino acid substitution at position 298 of SEQ ID NO: 1 or SEQ ID NO: 2 is a substitution of a valine (V) for a methionine (M). In certain embodiments, the amino acid substitution at position 311 of SEQ ID NO: 1 or SEQ ID NO: 2 is a substitution of an isoleucine (I) for a proline (P). In certain embodiments, the amino acid substitution at position 311 of SEQ ID NO: 1 or SEQ ID NO: 2 is a substitution of a valine for a proline (P). In certain embodiments, the amino acid substitution at position 315 of SEQ ID NO: 1 or SEQ ID NO: 2 is a substitution of a lysine (K) for an arginine (R). In certain embodiments, the amino acid substitution at position 319 of SEQ ID NO: 1 or SEQ ID NO: 2 is a substitution of a glycine (G) for a threonine (T). In certain embodiments, the amino acid substitution at position 327 of SEQ ID NO: 1 or SEQ ID NO: 2 is a substitution of an arginine (R) for a tyrosine (Y). In certain embodiments, the amino acid substitution at position 328 of SEQ ID NO: 1 or SEQ ID NO: 2 is a substitution of a valine (V) for a tyrosine (Y). In certain embodiments, the amino acid substitution at position 340 of SEQ ID NO: 1 or SEQ ID NO: 2 is a substitution of a glycine (G) for a cysteine (C). In certain embodiments, the amino acid substitution at position 340 of SEQ ID NO: 1 or SEQ ID NO: 2 is a substitution of a leucine (L) for a cysteine (C). In certain embodiments, the amino acid substitution at position 421 of SEQ ID NO: 1 or SEQ ID NO: 2 is a substitution of a histidine (H) for the aspartic acid (D). In certain embodiments, the amino acid substitution at position 436 of SEQ ID NO: 1 or SEQ ID NO: 2 is a substitution of an isoleucine (I) for a valine (V). In certain embodiments, the amino acid substitution at position 456 of SEQ ID NO: 1 or SEQ ID NO: 2 is a substitution of a tyrosine (Y) for a methionine (M). In certain embodiments, the amino acid substitution at position 470 of SEQ ID NO: 1 or SEQ ID NO: 2 is a substitution of a phenylalanine (F) for a leucine (L). In certain embodiments, the amino acid substitution at position 485 of SEQ ID NO: 1 or SEQ ID NO: 2 is a substitution of a lysine (K) for a serine(S). In certain embodiments, the amino acid substitution at position 503 of SEQ ID NO: 1 or SEQ ID NO: 2 is a substitution of a leucine (L) for a methionine (M). In certain embodiments, the amino acid substitution at position 503 of SEQ ID NO: 1 or SEQ ID NO: 2 is a substitution of an isoleucine (I) for a methionine (M). In certain embodiments, the amino acid substitution at position 552 of SEQ ID NO: 1 or SEQ ID NO: 2 is a substitution of a lysine (K) for a valine (V). In certain embodiments, the amino acid substitution at position 570 of SEQ ID NO: 1 or SEQ ID NO: 2 is a substitution of a threonine (T) for an alanine (A). In certain embodiments, the amino acid substitution at position 591 of SEQ ID NO: 1 or SEQ ID NO: 2 is a substitution of a proline (P) for a glutamine (Q). In certain embodiments, the amino acid substitution at position 591 of SEQ ID NO: 1 or SEQ ID NO: 2 is a substitution of an arginine (R) for a glutamine (Q).

[0031] In certain embodiments of the disclosure, including those embodiments wherein the transposase comprises the above-described mutations at positions 30, 165, 282 and/or 538, the piggyBac™ transposase enzyme may comprise or the Super piggyBac™ transposase enzyme may further comprise an amino acid substitution at one or more of positions 103, 194, 372, 375, 450, 509 and 570 of the sequence of SEQ ID NO: 1 or SEQ ID NO: 2. In certain embodiments of the methods of the disclosure, including those embodiments wherein the transposase comprises the above-described mutations at positions 30, 165, 282 and/or 538, the piggyBac™ transposase enzyme may comprise or the Super piggyBac™ transposase enzyme may further comprise an amino acid substitution at two, three, four, five, six or more of positions 103, 194, 372, 375, 450, 509 and 570 of the sequence of SEQ ID NO: 1 or SEQ ID NO: 2. In certain embodiments, including those embodiments wherein the transposase comprises the above-described mutations at positions 30, 165, 282 and/or 538, the piggyBac™ transposase enzyme may comprise or the Super piggyBac™ transposase enzyme may further comprise an amino acid substitution at positions 103, 194, 372, 375, 450, 509 and 570 of the sequence of SEQ ID NO: 1 or SEQ ID NO: 2. In certain embodiments, the amino acid substitution at position 103 of SEQ ID NO: 1 or SEQ ID NO: 2 is a substitution of a proline (P) for a serine(S). In certain embodiments, the amino acid substitution at position 194 of SEQ ID NO: 1 or SEQ ID NO: 2 is a substitution of a valine (V) for a methionine (M). In certain embodiments, the amino acid substitution at position 372 of SEQ ID NO: 1 or SEQ ID NO: 2 is a substitution of an alanine (A) for an arginine (R). In certain embodiments, the amino acid substitution at position 375 of SEQ ID NO: 1 or SEQ ID NO: 2 is a substitution of an alanine (A) for a lysine (K). In certain embodiments, the amino acid substitution at position 450 of SEQ ID NO: 1 or SEQ ID NO: 2 is a substitution of an asparagine (N) for an aspartic acid (D). In certain embodiments, the amino acid substitution at position 509 of SEQ ID NO: 1 or SEQ ID NO: 2 is a substitution of a glycine (G) for a serine(S). In certain embodiments, the amino acid substitution at position 570 of SEQ ID NO: 1 or SEQ ID NO: 2 is a substitution of a serine(S) for an asparagine (N). In certain embodiments, the piggyBac™ transposase enzyme may comprise a substitution of a valine (V) for a methionine (M) at position 194 of SEQ ID NO: 1. In certain embodiments, including those embodiments wherein the piggyBac™ transposase enzyme may comprise a substitution of a valine (V) for a methionine (M) at position 194 of SEQ ID NO: 1, the piggyBac™ transposase enzyme may further comprise an amino acid substitution at positions 372, 375 and 450 of the sequence of SEQ ID NO: 1 or SEQ ID NO: 2. In certain embodiments, the piggyBac™ transposase enzyme may comprise a substitution of a valine (V) for a methionine (M) at position 194 of SEQ ID NO: 1, a substitution of an alanine (A) for an arginine (R) at position 372 of SEQ ID NO: 1, and a substitution of an alanine (A) for a lysine (K) at position 375 of SEQ ID NO: 1. In certain embodiments, the piggyBac™ transposase enzyme may comprise a substitution of a valine (V) for a methionine (M) at position 194 of SEQ ID NO: 1, a substitution of an alanine (A) for an arginine (R) at position 372 of SEQ ID NO: 1, a substitution of an alanine (A) for a lysine (K) at position 375 of SEQ ID NO: 1 and a substitution of an asparagine (N) for an aspartic acid (D) at position 450 of SEQ ID NO: 1.

[0032] In certain embodiments of the disclosure, the transposase enzyme is a Sleeping Beauty transposase enzyme (see, for example, U.S. Pat. No. 9,228,180, the contents of which are incorporated herein in their entirety). In certain embodiments, the Sleeping Beauty transposase is a hyperactive Sleeping Beauty (SB100X) transposase. In certain embodiments, the Sleeping Beauty transposase enzyme comprises an amino acid sequence at least 75% identical to:

(SEQ ID NO: 17031)
MGKSKEISQDLRKKIVDLHKSGSSLGAISKRLKVPRSSVQTIVRKYKHHG
TTQPSYRSGRRRYLSPRDERTLVRKVQINPRTTAKDLVKMLEETGTKVSI
STVKRVLYRHNLKGRSARKKPLLQNRHKKARLRFATAHGDKDRTFWRNVL
WSDETKIELFGHNDHRYVWRKKGEACKPKNTIPTVKHGGGSIMLWGCFAA
GGTGALHKIDGIMRKENYVDILKQHLKTSVRKLKLGRKWVFQMDNDPKHT
SKVVAKWLKDNKVKVLEWPSQSPDLNPIENLWAELKKRVRARRPTNLTQL
HQLCQEEWAKIHPTYCGKLVEGYPKRLTQVKQFKGNATKY.

[0033] In certain embodiments, including those wherein the Sleeping Beauty transposase is a hyperactive Sleeping Beauty (SB100X) transposase, the Sleeping Beauty transposase enzyme comprises an amino acid sequence at least 75% identical to:

(SEQ ID NO. 17032)
MGKSKEISQDLRKRIVDLHKSGSSLGAISKRLAVPRSSVQTIVRKYKHHG
TTQPSYRSGRRRYLSPRDERTLVRKVQINPRTTAKDLVKMLEETGTKVSI
STVKRVLYRHNLKGHSARKKPLLQNRHKKARLRFATAHGDKDRTFWRNVL
WSDETKIELFGHNDHRYVWRKKGEACKPKNTIPTVKHGGGSIMLWGCFAA
GGTGALHKIDGIMDAVQYVDILKQHLKTSVRKLKLGRKWVFQHDNDPKHT
SKVVAKWLKDNKVKVLEWPSQSPDLNPIENLWAELKKRVRARRPTNLTQL
HQLCQEEWAKIHPNYCGKLVEGYPKRLTQVKQFKGNATKY.

[0034] In certain embodiments of the compositions of the disclosure, the first transposon and/or the second transposon further comprises a selection gene. In certain embodiments, the selection gene comprises neo, DHFR (Dihydrofolate Reductase), TYMS (Thymidylate Synthetase), MGMT (O(6)-methylguanine-DNA methyltransferase), multidrug resistance gene (MDR1), ALDH1 (Aldehyde dehydrogenase 1 family, member A1), FRANCE, RAD51C (RAD51 Paralog C), GCS (glucosylceramide synthase), NKX2.2 (NK2 Homeobox 2) or any combination thereof. In certain embodiments, the selection gene comprises DHFR.

[0035] In certain embodiments of the compositions of the disclosure, the first transposon and or the second transposon comprises an inducible caspase polypeptide comprising (a) a ligand binding region, (b) a linker, and (c) a truncated caspase 9 polypeptide, wherein the inducible caspase polypeptide does not comprise a non-human sequence. In certain embodiments, the non-human sequence is a restriction site. In certain embodiments, the ligand binding region inducible caspase polypeptide comprises a FK506 binding protein 12 (FKBP12) polypeptide. In certain embodiments, the amino acid sequence of the FK506 binding protein 12 (FKBP12) polypeptide comprises a modification at position 36 of the sequence. In certain embodiments, the modification is a substitution of valine (V) for phenylalanine (F) at position 36 (F36V). In certain embodiments, the FKBP12 polypeptide is encoded by an amino acid sequence comprising

(SEQ ID NO: 17012)
GVQVETISPGDGRTFPKRGQTCVVHYTGMLEDGKKVDSSRDRNKPFKFML
GKQEVIRGWEEGVAQMSVGQRAKLTISPDYAYGATGHPGIIPPHATLVFD
VELLKLE.

In certain embodiments, the FKBP12 polypeptide is encoded by a nucleic acid sequence comprising

(SEQ ID NO: 17013)
GGGGTCCAGGTCGAGACTATTTCACCAGGGGATGGGCGAACATTTCCAAA
AAGGGGCCAGACTTGCGTCGTGCATTACACCGGGATGCTGGAGGACGGGA
AGAAAGTGGACAGCTCCAGGGATCGCAACAAGCCCTTCAAGTTCATGCTG
GGAAAGCAGGAAGTGATCCGAGGATGGGAGGAAGGCGTGGCACAGATGTC
AGTCGGCCAGCGGGCCAAACTGACCATTAGCCCTGACTACGCTTATGGAG
CAACAGGCCACCCAGGGATCATTCCCCCTCATGCCACCCTGGTCTTCGAT
GTGGAACTGCTGAAGCTGGAG.

[0036] In certain embodiments, the linker region of the inducible proapoptotic polypeptide is encoded by an amino acid comprising GGGGS (SEQ ID NO: 17014). In certain embodiments, the linker region of the inducible proapoptotic polypeptide is encoded by a nucleic acid sequence comprising GGAGGAGGAGGATCC (SEQ ID NO: 17015).

[0037] In certain embodiments, the truncated caspase 9 polypeptide of the inducible proapoptotic polypeptide is encoded by an amino acid sequence that does not comprise an arginine (R) at position 87 of the sequence. In certain embodiments, the truncated caspase 9 polypeptide of the inducible proapoptotic polypeptide is encoded by an amino acid sequence that does not comprise an alanine (A) at position 282 the sequence. In certain embodiments, the truncated caspase 9 polypeptide of the inducible proapoptotic polypeptide is encoded by an amino acid comprising GFGDVGALESLRGNADLAYILSMEPCGHCLIINNVNFCRESGLRTRTGSNIDCEKLRRRF SSLHFMVEVKGDLTAKKMVLALLELAQQDHGALDCCVVVILSHGCQASHLQFPGAVY GTDGCPVSVEKIVNIFNGTSCPSLGGKPKLFFIQACGGEQKDHGFEVASTSPEDESPGSNP EPDATPFQEGLRTFDQLDAISSLPTPSDIFVSYSTFPGFVSWRDPKSGSWYVETLDDIFEQ WAHSEDLQSLLLRVANAVSVKGIYKQMPGCFNFLRKKLFFKTS (SEQ ID NO: 17016). In certain embodiments, the truncated caspase 9 polypeptide of the inducible proapoptotic polypeptide is encoded by a nucleic acid sequence comprising

(SEQ ID NO: 17017)
TTTGGGGACGTGGGGGCCCTGGAGTCTCTGCGAGGAAATGCCGATCTGGC
TTACATCCTGAGCATGGAACCCTGCGGCCACTGTCTGATCATTAACAATG
TGAACTTCTGCAGAGAAAGCGGACTGCGAACACGGACTGGCTCCAATATT
GACTGTGAGAAGCTGCGGAGAAGGTTCTCTAGTCTGCACTTTATGGTCGA
AGTGAAAGGGGATCTGACCGCCAAGAAAATGGTGCTGGCCCTGCTGGAGC
TGGCTCAGCAGGACCATGGAGCTCTGGATTGCTGCGTGGTCGTGATCCTG
TCCCACGGGTGCCAGGCTTCTCATCTGCAGTTCCCCGGAGCAGTGTACGG
AACAGACGGCTGTCCTGTCAGCGTGGAGAAGATCGTCAACATCTTCAACG
GCACTTCTTGCCCTAGTCTGGGGGGAAAGCCAAAACTGTTCTTTATCCAG
GCCTGTGGCGGGGAACAGAAAGATCACGGCTTCGAGGTGGCCAGCACCAG
CCCTGAGGACGAATCACCAGGGAGCAACCCTGAACCAGATGCAACTCCAT
TCCAGGAGGGACTGAGGACCTTTGACCAGCTGGATGCTATCTCAAGCCTG
CCCACTCCTAGTGACATTTTCGTGTCTTACAGTACCTTCCCAGGCTTTGT
CTCATGGCGCGATCCCAAGTCAGGGAGCTGGTACGTGGAGACACTGGACG
ACATCTTTGAACAGTGGGCCCATTCAGAGGACCTGCAGAGCCTGCTGCTG
CGAGTGGCAAACGCTGTCTCTGTGAAGGGCATCTACAAACAGATGCCCGG
GTGCTTCAATTTTCTGAGAAAGAAACTGTTCTTTAAGACTTCC.

[0038] In certain embodiments, the inducible proapoptotic polypeptide is encoded by an amino acid sequence comprising GVQVETISPGDGRTFPKRGQTCVVHYTGMLEDGKKVDSSRDRNKPFKFMLGKQEVIRG WEEGVAQMSVGQRAKLTISPDYAYGATGHPGIIPPHATLVFDVELLKLEGGGGSGFGDV GALESLRGNADLAYILSMEPCGHCLIINNVNFCRESGLRTRTGSNIDCEKLRRRFSSLHF MVEVKGDLTAKKMVLALLELAQQDHGALDCCVVVILSHGCQASHLQFPGAVYGTDGC PVSVEKIVNIFNGTSCPSLGGKPKLFFIQACGGEQKDHGFEVASTSPEDESPGSNPEPDAT PFQEGLRTFDQLDAISSLPTPSDIFVSYSTFPGFVSWRDPKSGSWYVETLDDIFEQWAHSE DLQSLLLRVANAVSVKGIYKQMPGCFNFLRKKLFFKTS (SEQ ID NO: 17018). In certain embodiments, the inducible proapoptotic polypeptide is encoded by a nucleic acid sequence comprising

(SEQ ID NO: 17019)
Ggggtccaggtcgagactatttcaccaggggatgggcgaacatttccaaa
aaggggccagacttgcgtcgtgcattacaccgggatgctggaggacggga
agaaagtggacagctccagggatcgcaacaagcccttcaagttcatgctg
ggaaagcaggaagtgatccgaggatgggaggaaggcgtggcacagatgtc
agtcggccagcgggccaaactgaccattagccctgactacgcttatggag
caacaggccacccagggatcattccccctcatgccaccctggtcttcgat
gtggaactgctgaagctggagggaggaggaggatccggatttggggacgt
gggggccctggagtctctgcgaggaaatgccgatctggcttacatcctga
gcatggaaccctgcggccactgtctgatcattaacaatgtgaacttctgc
agagaaagcggactgcgaacacggactggctccaatattgactgtgagaa
gctgcggagaaggttctctagtctgcactttatggtcgaagtgaaagggg
atctgaccgccaagaaaatggtgctggccctgctggagctggctcagcag
gaccatggagctctggattgctgcgtggtcgtgatcctgtcccacgggtg
ccaggcttctcatctgcagttccccggagcagtgtacggaacagacggct
gtcctgtcagcgtggagaagatcgtcaacatcttcaacggcacttcttgc
cctagtctggggggaaagccaaaactgttctttatccaggcctgtggcgg
ggaacagaaagatcacggcttcgaggtggccagcaccagccctgaggacg
aatcaccagggagcaaccctgaaccagatgcaactccattccaggaggga
ctgaggacctttgaccagctggatgctatctcaagcctgcccactcctag
tgacattttcgtgtcttacagtaccttcccaggctttgtctcatggcgcg
atcccaagtcagggagctggtacgtggagacactggacgacatctttgaa
cagtgggcccattcagaggacctgcagagcctgctgctgcgagtggcaaa
cgctgtctctgtgaagggcatctacaaacagatgcccgggtgcttcaatt
ttctgagaaagaaactgttctttaagacttcc.

[0039] In certain embodiments of the compositions of the disclosure, the first transposon and/or the second transposon comprises at least one self-cleaving peptide. In certain embodiments, the at least one self-cleaving peptide comprises a T2A peptide, a GSG-T2A peptide, an E2A peptide, a GSG-E2A peptide, an F2A peptide, a GSG-F2A peptide, a P2A peptide, or a GSG-P2A peptide. In certain embodiments, the at least one self-cleaving peptide comprises a T2A peptide. In certain embodiments, the T2A peptide comprises an amino acid sequence comprising EGRGSLLTCGDVEENPGP (SEQ ID NO: 17020). In certain embodiments, the GSG-T2A peptide comprises an amino acid sequence comprising GSGEGRGSLLTCGDVEENPGP (SEQ ID NO: 17021). In certain embodiments, the E2A peptide comprises an amino acid sequence comprising QCTNYALLKLAGDVESNPGP (SEQ ID NO: 17022). In certain embodiments, the GSG-E2A peptide comprises an amino acid sequence comprising GSGQCTNYALLKLAGDVESNPGP (SEQ ID NO: 17023). In certain embodiments, the F2A peptide comprises an amino acid sequence comprising VKQTLNFDLLKLAGDVESNPGP (SEQ ID NO: 17024). In certain embodiments, the GSG-F2A peptide comprises an amino acid sequence comprising GSGVKQTLNFDLLKLAGDVESNPGP (SEQ ID NO: 17025). In certain embodiments, the P2A peptide comprises an amino acid sequence comprising ATNFSLLKQAGDVEENPGP (SEQ ID NO: 17026). In certain embodiments, the GSG-P2A peptide comprises an amino acid sequence comprising GSGATNFSLLKQAGDVEENPGP (SEQ ID NO: 17027). In certain embodiments, the at least one self-cleaving peptide is positioned between (a) the selection gene and the inducible transgene construct or (b) the inducible transgene construct and the inducible caspase polypeptide. In certain embodiments, the at least one self-cleaving peptide is positioned between (a) the selection gene and the reporter construct or (b) the reporter construct and the inducible caspase polypeptide.

[0040] The disclosure provides a cell comprising the composition of the disclosure.

[0041] The disclosure provides a method of inducing conditional gene expression in a cell comprising (a) contacting the cell with a composition of the disclosure, under conditions suitable to allow for integration of the inducible transgene construct into the genome of the cell and for the expression of the exogenous reporter and (b) contacting the exogenous receptor and a ligand that specifically binds thereto, to transduce an intracellular signal that targets the inducible promoter, thereby modifying gene expression. In certain embodiments, the cell is in vivo, ex vivo, in vitro or in situ. In certain embodiments, the cell is an immune cell. In certain embodiments, the immune cell is a T-cell, a Natural Killer (NK) cell, a Natural Killer (NK)-like cell, a hematopoeitic progenitor cell, a peripheral blood (PB) derived T cell or an umbilical cord blood (UCB) derived T-cell. In certain embodiments, the immune cell is a T-cell. In certain embodiments, the cell is autologous. In certain embodiments, the cell is allogeneic.

[0042] The disclosure provides a method of treating a disease or disorder in a subject in need thereof, comprising administering to the subject a composition of the disclosure, under conditions suitable to allow for integration of the inducible transgene construct into the genome of the cell and for the expression of the exogenous reporter, and administering a ligand to which the exogenous receptor selectively binds, wherein the binding of the ligand to the exogenous receptor transduces an intracellular signal to target the inducible promoter controlling the transgene, wherein the transgene is expressed, and wherein the product of the transgene is therapeutically-effective for treating the disease or disorder. In certain embodiments, the product of the transgene is a secreted protein. In certain embodiments, the secreted protein is a clotting factor. In certain embodiments, the clotting factor is factor IX. In certain embodiments, the disease or disorder is a clotting disorder.

[0043] In certain embodiments of the methods of the disclosure, conditions suitable to allow for integration of the inducible transgene construct into the genome of the cell and for the expression of the exogenous reporter comprise in vivo conditions. In certain embodiments, conditions suitable to allow for integration of the inducible transgene construct into the genome of the cell and for the expression of the exogenous reporter comprise a temperature substantially similar to an internal temperature of a human body, a CO₂ level substantially similar to an internal CO₂ levels of a human body, an O₂ level substantially similar to an internal O₂ levels of a human body, an aqueous or saline environment with a level of electrolytes substantially similar to a level of electrolytes of an interior of a human body.

[0044] In certain embodiments of the compositions and methods of the disclosure, the ligand to which the exogenous receptor specifically binds is non-naturally occurring. In certain embodiments, the ligand is a nucleic acid, an amino acid, a polymer, an organic small molecule, an inorganic small molecule, or a combination thereof. Exemplary ligands include, but are not limited to, synthetic, modified, recombinant, mutant, chimeric, endogenous or non-naturally occurring, proteins (soluble or membrane-bound), steroid hormones, gas particles, nucleic acids, growth factors, neurotransmitters, vitamins, and minerals.

[0045] The disclosure provides a composition comprising (a) an inducible transgene construct, comprising a sequence encoding an inducible promoter and a sequence encoding a transgene, and (b) a ligand construct, comprising a sequence encoding a constitutive promoter and a sequence encoding an exogenous ligand, wherein, upon integration of the construct of (a) and the construct of (b) into a genomic sequence of a cell, the exogenous ligand is expressed, and wherein the exogenous ligand, upon binding a receptor, transduces an intracellular signal that targets the inducible promoter of (a) to modify gene expression. In certain embodiments, the ligand comprises a non-natural or synthetic sequence. In certain embodiments, the ligand comprises a fusion protein. In certain embodiments, the ligand is bound to the surface of the cell. In certain embodiments, the ligand comprises an intracellular domain. In certain embodiments, the intracellular domain transduces a signal in the cell expressing the ligand. In certain embodiments, the structure of the ligand is substantially similar to the structure of the receptor of the compositions of the disclosure. In certain embodiments, the signal transduced by the ligand and the signal transduced by the receptor comprise a bi-directional signal.

### BRIEF DESCRIPTION OF THE DRAWINGS

[0046] The patent or application file contains at least one drawing executed in color. Copies of this patent or patent application publication with color drawing(s) will be provided by the Office upon request and payment of the necessary fee.

[0047] FIG. 1A-B is a pair of schematic diagrams depicting NF-KB inducible vectors for expression in T-cells. Two T cell activation NF-KB inducible vectors were developed; one with the gene expression system (GES) in the forward orientation (A) and the other in the complementary direction (B), both preceding the constitutive EF1a promoter. These vectors also direct expression of a CAR molecule and a DHFR selection gene, separated by a T2A sequence. Both the conditional NF-KB inducible system and the EF1a directed genes are a part of a piggyBac transposon which can be permanently integrated into T cells using electroporation (EP). Once integrated into the genome, the T cells will constitutively express the CAR on the membrane surface and the DHFR within the cell, while expression of the NF-KB inducible gene, GFP, will be expressed to the highest level only upon T cell activation.

[0048] FIG. 2 is a pair of graphs depicting NF-KB inducible expression of GFP in activated T cells. T cells were nucleofected with a piggyBac vector expressing an anti-BCMA CAR and a DHFR mutein gene under control of an EF1a promoter along with the absence (No GES control) or presence of an NF-KB inducible expression system driving GFP expression in either the forward (pNFKB-GFP forward) or reverse orientation (pNFKB-GFP reverse). Cells were cultured in the presence of methotrexate selection until the cells were almost completely resting (Day 19) and GFP expression was assessed at Day 5 and Day 19. At Day 5, all T cells are proliferating and highly stimulated, with cells harboring the NF-KB inducible expression cassette producing high levels of GFP due to strong NFκB activity. The No GES control cells did not express detectable levels of GFP. By Day 19, the GES T cells were almost fully resting and GFP expression was significantly lower than Day 5 (˜⅛ MFI), since NFκB activity is lower. GFP expression is still observed at Day 19, which may due to the long half-life of GFP protein (˜30 hr), or, basal level of NFκB activity through, for example, a TCR, a CAR, a cytokine receptor, or a growth factor receptor signal.

[0049] FIG. 3 is a series of graphs depicting anti-BCMA CAR-mediated activation of NF-KB inducible expression of GFP in presence of BCMA+ tumor cells. T cells were either unmodified (Mock T cells) or nucleofected with a piggyBac vector expressing an anti-BCMA CAR and a DHFR mutein gene under control of an EF1a promoter along with the absence (No GES control) or presence of an NF-KB inducible expression system driving GFP expression in either the forward (pNFKB-GFP forward) or reverse orientation (pNFKB-GFP reverse). All cells were cultured for 22 days, either with or without methotrexate selection (Mock T cells), until the cells were almost completely resting. Cells were then stimulated for 3 days in the absence (No stimulation) or presence of BCMA-(K562), BMCA+ (RPMI 8226), or positive control anti-CD3 anti-CD28 activation reagent (CD3/28 stimulation). GFP expression was undetectable under all conditions with the No GES control or Mock T cells. However, while pNFKB-GFP forward- and reverse-transposed cells exhibited little GFP expression over the No stimulation control when cultured with BCMA-K562 cells, they both demonstrated dramatic upregulation of gene expression either in the presence of BCMA+ tumor cells or under positive control conditions. Little difference in GFP expression was observed between the pNFKB-GFP forward- and reverse-transposed cells that were cocultured with BCMA+ tumor cells.

[0050] FIG. 4 is a series of graphs demonstrating that the Expression level of inducible gene can be regulated by number of response elements preceding the promoter T cells were nucleofected with a piggyBac vector encoding an anti-BCMA CARTyrin followed by a selection gene, both under control of a human EF1a promoter. Further, vectors either additionally encoded the conditional NF-KB inducible gene expression system driving expression of a truncated CD19 protein (dCD19) and included a number of NFKB response elements (RE) varying from 0-5, no GES (No GES), or received an electroporation pulse but no piggyBac nucleic acid (Mock). Data are shown for only the GES in the reverse (opposite) direction/orientation. All cells were cultured for 18 days and included selection for piggyBac-modified T cells using methotrexate addition. Cells were then stimulated for 3 days using anti-CD3 anti-CD28 bead activation reagent and dCD19 surface expression was assessed by FACS at Days 0, 3 and 18, and data are shown as FACS histograms and MFI of target protein staining. Surface dCD19 expression was detected at low levels at Day 0 in all T cells transposed with vectors encoding the GES. At 3 days post-stimulation, dramatic upregulation of dCD19 expression was observed for all T cells expressing the GES, with a greater fold increase in surface expression in those with higher numbers of REs. Thus, surface dCD19 expression was directly proportional with the number of REs encoded in the GES. No dCD19 was detected on the surface of T cells that did not harbor the GES:No GES and Mock controls.

[0051] FIG. 5 is a schematic diagram showing the human coagulation pathway leading to blood clotting. Contact activation, for example by damaging an endothelium, activates an intrinsic clotting pathway. Tissue factors activate an extrinsic clotting pathway, for example following trauma. Both pathways converge onto the conversion of Prothrombin into Thrombin, which catalyzes the conversion of fibrinogen into fibrin. Polymerized fibrin together with platelets forms a clot. In the absence of Factor IX (circled), clotting is defective. Factor VIII (FVIII) deficiency leads to development of Hemophilia A. Factor IX (FIX) deficiency leads to development of Hemophilia B. Prior to the compositions and methods of the disclosure, the standard treatment for hemophilia B involved an infusion of recombinant FIX every 2 to 3 days, at an expense of approximately $250,000 per year. In sharp contrast to this standard treatment option, T cells of the disclosure are maintained in humans for several decades.

[0052] FIG. 6 is a series of Fluorescence-Activated Cell Sorting (FACS plots) depicting FIX-secreting T cells. T cells encoding a human Factor IX transgene showed a T-cell phenotype in approximately 80% of cells. The 6 panels are described in order from left to right. (1) Forward scatter (FSC) on the x-axis versus side scatter (SSC) on the y-axis. The x-axis is from 0 to 250 thousand (abbreviated k) in increments of 50 k, the y-axis is for 0 to 250 k, in increments of 50 k. (2) FSC on the x-axis versus the cell viability marker 7 aminoactinomycin D (7AAD). The x-axis is labeled from 0 to 250 k in increments of 50 k. The y-axis reads, from top to bottom, −10³, 0, 10³, 10⁴, 10⁵. (3) On the x-axis is shown anti-CD56-APC conjugated to a Cy7 dye (CDC56-APC-Cy7), units from 0 to 10⁵ incrementing in powers of 10. On the y-axis is shown anti-CD3 conjugated to phycoerythrin (PE), units from 0 to 10⁵ incrementing in powers of 10. (4) On the x-axis is shown anti-CD8 conjugated to fluorescein isothiocyanate (FITC), units from 0 to 10⁵ incrementing in powers of 10. On the y-axis is shown anti-CD4 conjugated to Brilliant Violet 650 dye (BV650), units from 0 to 10⁵ incrementing in powers of 10. (5) On the x-axis is shown an anti CD62L antibody conjugated to a Brilliant Violet 421 dye (BV421), units from 0 to 10⁵ incrementing in powers of 10. On the y-axis is shown an anti-CD45RA antibody conjugated to PE and Cy7, units from 0 to 10⁵ incrementing in powers of 10. This panel is boxed. (6) On the x-axis is shown an anti-CCR7 antibody conjugated to Brilliant Violet 786 (BV786), units from 0 to 10⁵ incrementing in powers of 10. On the y-axis is shown anti-CD45RA conjugated to PE and Cy7, units from 0 to 10⁵ incrementing in powers of 10.

[0053] FIG. 7A is a graph showing human Factor IX secretion during production of modified T cells of the disclosure. On the y-axis, Factor IX concentration in nanograms (ng) per milliliter (mL) from 0 to 80 in increments of 20. On the x-axis are shown 9 day and 12 day T cells.

[0054] FIG. 7B is a graph showing the clotting activity of the secreted Factor IX produced by the T cells. On the y-axis is shown percent Factor IX activity relative to human plasma, from 0 to 8 in increments of 2. On the x-axis are 9 and 12 day T cells.

[0055] FIG. 8 is a series of graphs demonstrating that the expression level of inducible gene can be regulated by number of response elements preceding the promoter in CD4 positive cells. Truncated CD19 (dCD19) expressing CAR-T cells were stimulated by BCMA+H929 multiple myeloma cells at 2:1 CAR-T:H929 ratio. The expression of dCD19 was driven by the minimal promoter that enhanced by 0, 1, 2, 3, 4 or 5 repeats of the NF-kB response element. The expression of BCMA CAR was driven by human elongation factor-1 α (EF-1α) promoter, a constitutive promoter that is commonly used for gene expression in human T cells. Before tumor cell stimulation, the expression of CAR and dCD19 were both at basal levels compared to mock T cell control. The expression levels of CAR and dCD19 were both upregulated upon tumor stimulation (day 3) and then subsequently downregulated (day 9, 14) and eventually reached their respective basal levels when the cells resume a fully rested status again (day 20). However, CAR surface expression was equivalently up- or down-regulated in all the CAR-T cell samples during cell activation and resting process, while the expression levels of dCD19 were directly proportional to the number of NF-κB response elements (day 3, 9, 14). Data are shown as FACS histograms and MFI of target protein staining. Thus, surface dCD19 expression was directly proportional with the number of REs encoded in the GES. No dCD19 was detected on the surface of T cells that did not harbor the GES:No GES and Mock controls.

[0056] FIG. 9 is a series of graphs demonstrating that the expression level of inducible gene can be regulated by number of response elements preceding the promoter in CD8 positive cells. Truncated CD19 (dCD19) expressing CAR-T cells were stimulated by BCMA+H929 multiple myeloma cells at 2:1 CAR-T:H929 ratio. The expression of dCD19 was driven by the minimal promoter that enhanced by 0, 1, 2, 3, 4 or 5 repeats of the NF-kB response element. The expression of BCMA CAR was driven by human elongation factor-1 α (EF-1α) promoter, a constitutive promoter that is commonly used for gene expression in human T cells. Before tumor cell stimulation, the expression of CAR and dCD19 were both at basal levels compared to mock T cell control. The expression levels of CAR and dCD19 were both upregulated upon tumor stimulation (day 3) and then subsequently downregulated (day 9, 14) and eventually reached their respective basal levels when the cells resume a fully rested status again (day 20). However, CAR surface expression was equivalently up- or down-regulated in all the CAR-T cell samples during cell activation and resting process, while the expression levels of dCD19 were directly proportional to the number of NF-κB response elements (day 3, 9, 14). Data are shown as FACS histograms and MFI of target protein staining. Thus, surface dCD19 expression was directly proportional with the number of REs encoded in the GES. No dCD19 was detected on the surface of T cells that did not harbor the GES:No GES and Mock controls.

[0057] FIG. 10 is a bar graph depicting the knock out efficiency of targeting various checkpoint signaling proteins that could be used to armor T-cells. Cas-CLOVER was used to knockout the checkpoint receptors, PD-1, TGFBR2, LAG-3, TIM-3 and CTLA-4 in resting primary human pan T cells. Percent knock-out is shown on the y-axis. Gene editing resulted in 30-70% loss of protein expression at the cell surface as measured by flow cytometry.

[0058] FIG. 11 is a series of schematic diagrams of wildtype, null and switch receptors and their effects on intracellular signaling, either inhibitory or stimulatory, in primary T-cells. Binding of the wildtype inhibitory receptor expressed endogenously on a T-cell with its endogenous ligand results in transmission of an inhibitory signal which, in part, reduces T-cell effector function. However, mutation (Mutated null) or deletion (Truncated null) of the intracellular domain (ICD) of a checkpoint receptor protein, such as PD1 (top panel) or TGFBRII (bottom panel), reduces or eliminates its signaling capability when cognate ligand(s) is bound. Thus, expression of engineered mutated or truncated null receptors on the surface of modified T cells results in a competition with endogenously-expressed wildtype receptors for binding of the free endogenous ligand(s), effectively reducing or eliminating delivery of inhibitory signals by endogenously-expressed wildtype receptors. Specifically, any binding by a mutated or null receptor sequesters the endogenous ligand(s) from binding the wildtype receptor and results in dilution of the overall level of checkpoint signaling effectively delivered to the modified T-cell, thereby reducing or blocking checkpoint inhibition and functional exhaustion of the modified T cells. A switch receptor is created by replacement of the wildtype ICD with an ICD from either a co-stimulatory molecule (such as CD3z, CD28, 4-1BB) or a different inhibitory molecule (such as CTLA4, PD1, Lag3). In the former case, binding of the endogenous ligand(s) by the modified switch receptor results in the delivery of a positive signal to the T-cells, thereby helping to enhance stimulation of the modified T cell and potentially enhance target tumor cell killing. In the latter case, binding of the endogenous ligand(s) by the modified switch receptor results in the delivery of a negative signal to the T-cells, thereby eliminating stimulation of the modified T cell and potentially reducing target tumor cell killing. The signal peptide (purple arrow), extracellular domain (ECD) (bright green), transmembrane domain (yellow), intracellular signaling domain (ICD) (orange), and replacement ICD (green) are displayed in the receptor diagrams. “*” indicates a mutated ICD. “+” indicates the presence of a checkpoint signal. “−” indicates the absence of a checkpoint signal.

[0059] FIG. 12 is a schematic diagram showing an example of the design of null receptors with specific alterations that may help to increase expression of the receptor on the surface of modified T cells. Examples are shown for PD1 and TGFBRII null receptors and the signal peptide domain (SP), transmembrane domain TM and extracellular domain (ECD) of truncated null receptors for PD1 (top panel) and TGFBRII (bottom panel) are displayed. The first of the top four molecules is the wildtype PD-1 receptor, which encodes the wildtype PD-1 SP and TM. For the PD1 null receptor, replacement of PD1 wildtype SP or TM domain (green; light green) with the SP or TM domain of a human T cell CD8a receptor (red) is depicted. The second molecule encodes the CD8a SP along with the native PD-1 TM, the third encodes the wildtype PD-1 SP and the alternative CD8a TM, and the fourth encodes both the alternative CD8a SP and TM. Similarly, for the null receptor of TGFβRII, replacement of the wildtype TGFBRII SP (pink) with a SP domain of a human T cell CD8a receptor (red). The names of the constructs and the amino acid lengths (aa) of each construct protein is listed on the left of the diagram.

[0060] FIG. 13 is a series of histograms depicting the expression of the PD1 and TGFBRII null Receptors on the surface of modified primary human T cells as determined by flow cytometry. Each of the six truncated null constructs from FIG. 12 were expressed on the surface of primary human T cells. T cells were stained with either anti-PD1 (top; blue histograms) or anti-TGFβRII (bottom; blue histograms), or isotype control or secondary only (gray histograms). Cells staining positive for PD-1 or TGFβRII expression were gated (frequency shown above gate) and mean fluorescence intensity (MFI) value is displayed above each positive histogram. The names of the null receptor constructs are depicted above each plot. Both null receptor gene strategies, replacement of the wildtype SP with the alternative CD8a were successfully expressed. 02.8aSP-PD-1 and 02.8aSP-TGFβRII resulted in the highest level of expression at the T-cell surface. 02.8aSP-PD-1 null receptor exhibited an MFI of 43,680, which is 177-fold higher than endogenous T cell PD-1 expression and 2.8-fold higher than the wildtype PD-1 null receptor. 02.8aSP-TGFβRII null receptor exhibited an MFI of 13,809, which is 102-fold higher than endogenous T cell TGFβRII expression and 1.8-fold higher than the wildtype TGFβRII null receptor. Replacement of wildtype SP with the alternative CD8a SP for both PD1 and TGRBRII results in enhanced surface expression of the null or Switch receptor, which may help to maximize reduction or blockage of checkpoint inhibition upon binding and sequestration of the endogenous ligand(s).

[0061] FIG. 14 is a schematic depiction of the Csy4-T2A-Clo051-G4Slinker-dCas9 construct map (Embodiment 2).

[0062] FIG. 15 is a schematic depiction of the pRT1-Clo051-dCas9 Double NLS construct map (Embodiment 1).

[0063] FIG. 16 is a pair of graphs comparing the efficacy of knocking out expression of either B2M on the surface of Pan T-cells (left) or the α-chain of the T-cell Receptor on the surface of Jurkat cells (right) for either Embodiment 1 (pRT1-Clo051-dCas9 Double NLS, as shown in FIG. 15) or Embodiment 2 (Csy4-T2A-Clo051-G4Slinker-dCas9, as shown in FIG. 14) of a Cas-Clover fusion protein of the disclosure. For the right-hand graph, the fusion protein is provided at either 10 μg or 20 μg, as indicated.

[0064] FIG. 17 is a photograph of a gel electrophoresis analysis of mRNA encoding each of Embodiment 1 (Lane 2; pRT1-Clo051-dCas9 Double NLS, as shown in FIG. 15) or Embodiment 2 (Lane 3; Csy4-T2A-Clo051-G4Slinker-dCas9, as shown in FIG. 14). In addition, a previous preparation (“old version”) of mRNA encoding Embodiment 2 is included (Lane 4) for comparison. As shown, all mRNA samples encoding the two different embodiments migrate as distinct bands within the gel, are of high quality, and are similar in size, as expected.

### DETAILED DESCRIPTION

[0065] The disclosure provides a composition comprising (a) an inducible transgene construct, comprising a sequence encoding an inducible promoter and a sequence encoding a transgene, and (b) a receptor construct, comprising a sequence encoding a constitutive promoter and a sequence encoding an exogenous receptor, wherein, upon integration of the construct of (a) and the construct of (b) into a genomic sequence of a cell, the exogenous reporter is expressed, and wherein the exogenous reporter, upon binding a ligand, transduces an intracellular signal that targets the inducible promoter of (a) to modify gene expression.

### Exogenous Receptors

[0066] Exogenous receptors of the disclosure may comprise a non-naturally occurring receptor. In certain embodiments, the non-naturally occurring receptor is a synthetic, modified, recombinant, mutant or chimeric receptor. In certain embodiments, the non-naturally occurring receptor comprises one or more sequences isolated or derived from a T-cell receptor (TCR). In certain embodiments, the non-naturally occurring receptor comprises one or more sequences isolated or derived from a scaffold protein. In certain embodiments, the non-naturally occurring receptor comprises a transmembrane domain. In certain embodiments, the non-naturally occurring receptor interacts with an intracellular receptor that transduces an intracellular signal. In certain embodiments, the non-naturally occurring receptor comprises an intracellular signaling domain. In certain embodiments, the non-naturally occurring receptor is a chimeric ligand receptor (CLR). In certain embodiments, the CLR is a chimeric antigen receptor.

[0067] In certain embodiments of the compositions of the disclosure, the exogenous receptor of (b) comprises a non-naturally occurring receptor. In certain embodiments, the CLR is a chimeric antigen receptor. In certain embodiments, the chimeric ligand receptor comprises (a) an ectodomain comprising a ligand recognition region, wherein the ligand recognition region comprises at least scaffold protein; (b) a transmembrane domain, and (c) an endodomain comprising at least one costimulatory domain.

[0068] The disclosure provides chimeric receptors comprising at least one Centyrin. Chimeric ligand/antigen receptors (CLRs/CARs) of the disclosure may comprise more than one Centyrin, referred to herein as a CARTyrin.

[0069] The disclosure provides chimeric receptors comprising at least one VHH. Chimeric ligand/antigen receptors (CLRs/CARs) of the disclosure may comprise more than one VHH, referred to herein as a VCAR.

[0070] Chimeric receptors of the disclosure may comprise a signal peptide of human CD2, CD3δ, CD3ε, CD3γ, CD3ζ, CD4, CD8α, CD19, CD28, 4-1BB or GM-CSFR. A hinge/spacer domain of the disclosure may comprise a hinge/spacer/stalk of human CD8α, IgG4, and/or CD4. An intracellular domain or endodomain of the disclosure may comprise an intracellular signaling domain of human CD35 and may further comprise human 4-1BB, CD28, CD40, ICOS, MyD88, OX-40 intracellular segment, or any combination thereof. Exemplary transmembrane domains include, but are not limited to a human CD2, CD3δ, CD3ε, CD3γ, CD3ζ, CD4, CD8α, CD19, CD28, 4-1BB or GM-CSFR transmembrane domain.

[0071] The disclosure provides genetically modified cells, such as T cells, NK cells, hematopoietic progenitor cells, peripheral blood (PB) derived T cells (including T cells from G-CSF-mobilized peripheral blood), umbilical cord blood (UCB) derived T cells rendered specific for one or more ligands or antigens by introducing to these cells a CLR/CAR, CARTyrin and/or VCAR of the disclosure. Cells of the disclosure may be modified by electrotransfer of a transposon of the disclosure and a plasmid or a nanoplasmid comprising a sequence encoding a transposase of the disclosure (preferably, the sequence encoding a transposase of the disclosure is an mRNA sequence).

[0072] In some embodiments, the armored T-cell comprises a composition comprising (a) an inducible transgene construct, comprising a sequence encoding an inducible promoter and a sequence encoding a transgene, and (b) a receptor construct, comprising a sequence encoding a constitutive promoter and a sequence encoding an exogenous receptor, such as a CLR or CAR, wherein, upon integration of the construct of (a) and the construct of (b) into a genomic sequence of a cell, the exogenous receptor is expressed, and wherein the exogenous receptor, upon binding a ligand or antigen, transduces an intracellular signal that targets directly or indirectly the inducible promoter regulating expression of the inducible transgene (a) to modify gene expression.

### Chimeric Receptors

[0073] Chimeric antigen receptors (CARs) and/or chimeric ligand receptors (CLRs) of the disclosure may comprise (a) an ectodomain comprising an antigen/ligand recognition region, (b) a transmembrane domain, and (c) an endodomain comprising at least one costimulatory domain. In certain embodiments, the ectodomain may further comprise a signal peptide. Alternatively, or in addition, in certain embodiments, the ectodomain may further comprise a hinge between the antigen/ligand recognition region and the transmembrane domain. In certain embodiments of the CARs of the disclosure, the signal peptide may comprise a sequence encoding a human CD2, CD3δ, CD3ε, CD3γ, CD3ζ, CD4, CD8α, CD19, CD28, 4-1BB or GM-CSFR signal peptide. In certain embodiments of the CARs of the disclosure, the signal peptide may comprise a sequence encoding a human CD8α signal peptide. In certain embodiments, the transmembrane domain may comprise a sequence encoding a human CD2, CD3δ, CD3ε, CD3γ, CD3ζ, CD4, CD8α, CD19, CD28, 4-1BB or GM-CSFR transmembrane domain. In certain embodiments of the CARs of the disclosure, the transmembrane domain may comprise a sequence encoding a human CD8α transmembrane domain. In certain embodiments of the CARs/CLRs of the disclosure, the endodomain may comprise a human CD35 endodomain.

[0074] In certain embodiments of the CARs/CLRs of the disclosure, the at least one costimulatory domain may comprise a human 4-1BB, CD28, CD40, ICOS, MyD88, OX-40 intracellular segment, or any combination thereof. In certain embodiments of the CARs of the disclosure, the at least one costimulatory domain may comprise a CD28 and/or a 4-1BB costimulatory domain. In certain embodiments of the CARs of the disclosure, the hinge may comprise a sequence derived from a human CD8a, IgG4, and/or CD4 sequence. In certain embodiments of the CARs/CLRs of the disclosure, the hinge may comprise a sequence derived from a human CD8α sequence.

[0075] The CD28 costimulatory domain may comprise an amino acid sequence comprising RVKFSRSADAPAYKQGQNQLYNELNLGRREEYDVLDKRRGRDPEMGGKPRRKNPQEGL YNELQKDKMAEAYSEIGMKGERRRGKGHDGLYQGLSTATKDTYDALHMQALPPR (SEQ ID NO: 17004) or a sequence having at least 70%, 80%, 90%, 95%, or 99% identity to the amino acid sequence comprising RVKFSRSADAPAYKQGQNQLYNELNLGRREEYDVLDKRRGRDPEMGGKPRRKNPQEGL YNELQKDKMAEAYSEIGMKGERRRGKGHDGLYQGLSTATKDTYDALHMQALPPR (SEQ ID NO: 17004). The CD28 costimulatory domain may be encoded by the nucleic acid sequence comprising cgcgtgaagtttagtcgatcagcagatgccccagcttacaaacagggacagaaccagctgtataacgagctgaatctgggccgccgagag gaatatgacgtgctggataagcggagaggacgcgaccccgaaatgggaggcaagcccaggcgcaaaaaccctcaggaaggcctgtat aacgagctgcagaaggacaaaatggcagaagcctattctgagatcggcatgaagggggagcgacggagaggcaaagggcacgatgg gctgtaccagggactgagcaccgccacaaaggacacctatgatgctctgcatatgcaggcactgcctccaagg (SEQ ID NO: 17005). The 4-1BB costimulatory domain may comprise an amino acid sequence comprising KRGRKKLLYIFKQPFMRPVQTTQEEDGCSCRFPEEEEGGCEL (SEQ ID NO: 17006) or a sequence having at least 70%, 80%, 90%, 95%, or 99% identity to the amino acid sequence comprising KRGRKKLLYIFKQPFMRPVQTTQEEDGCSCRFPEEEEGGCEL (SEQ ID NO: 17006). The 4-1BB costimulatory domain may be encoded by the nucleic acid sequence comprising aagagaggcaggaagaaactgctgtatattttcaaacagcccttcatgcgccccgtgcagactacccaggaggaagacgggtgctcctgtc gattccctgaggaagaggaaggcgggtgtgagctg (SEQ ID NO: 17007). The 4-1BB costimulatory domain may be located between the transmembrane domain and the CD28 costimulatory domain.

[0076] In certain embodiments of the CARs/CLRs of the disclosure, the hinge may comprise a sequence derived from a human CD8a, IgG4, and/or CD4 sequence. In certain embodiments of the CARs/CLRs of the disclosure, the hinge may comprise a sequence derived from a human CD8α sequence. The hinge may comprise a human CD8α amino acid sequence comprising TTTPAPRPPTPAPTIASQPLSLRPEACRPAAGGAVHTRGLDFACD (SEQ ID NO: 17008) or a sequence having at least 70%, 80%, 90%, 95%, or 99% identity to the amino acid sequence comprising TTTPAPRPPTPAPTIASQPLSLRPEACRPAAGGAVHTRGLDFACD (SEQ ID NO: 17008). The human CD8α hinge amino acid sequence may be encoded by the nucleic acid sequence comprising

(SEQ ID NO: 17028)
actaccacaccagcacctagaccaccaactccagctccaaccatc
gcgagtcagcccctgagtctgagacctgaggcctgcaggccagct
gcaggaggagctgtgcacaccaggggcctggacttcgcctgcgac.

### ScFv

[0077] The disclosure provides single chain variable fragment (scFv) compositions and methods for use of these compositions to recognize and bind to a specific target protein. ScFv compositions comprise a heavy chain variable region and a light chain variable region of an antibody. ScFv compositions may be incorporated into an antigen/ligand recognition region of a CAR or CLR of the disclosure. An antigen/ligand recognition region of a CAR or CLR of the disclosure may comprise an ScFv or an ScFv composition of the disclosure. In some embodiments, ScFvs comprise fusion proteins of the variable regions of the heavy (VH) and light (VL) chains of an immunoglobulin, wherein the VH and VL domains are connected with a linker. ScFvs retain the specificity of the original immunoglobulin, despite removal of the constant regions and the introduction of the linker. An exemplary linker comprises a sequence of GGGGSGGGGSGGGGS (SEQ ID NO: 17033).

### Centyrins

[0078] Centyrins of the disclosure specifically bind to an antigen or a ligand of the disclosure. CARs and/or CLRs of the disclosure comprising one or more Centyrins that specifically bind an antigen may be used to direct the specificity of a cell, (e.g. a cytotoxic immune cell) towards a cell expressing the specific antigen. Alternatively or in addition, CLRs of the disclosure comprising a Centyrin that specifically binds a ligand antigen may transduce a signal intracellularly to induce expression of a sequence under the control of an inducible promoter.

[0079] Centyrins of the disclosure may comprise a protein scaffold, wherein the scaffold is capable of specifically binding an antigen or a ligand. Centyrins of the disclosure may comprise a protein scaffold comprising a consensus sequence of at least one fibronectin type III (FN3) domain, wherein the scaffold is capable of specifically binding an antigen or a ligand. The at least one fibronectin type III (FN3) domain may be derived from a human protein. The human protein may be Tenascin-C. The consensus sequence may comprise

(SEQ ID NO: 17010)
LPAPKNLVVSEVTEDSLRLSWTAPDAAFDSFLIQYQESEKVGEAI
NLTVPGSERSYDLTGLKPGTEYTVSIYGVKGGHRSNPLSAEFTT
or
(SEQ ID NO: 17011)
MLPAPKNLVVSEVTEDSLRLSWTAPDAAFDSFLIQYQESEKVGEA
INLTVPGSERSYDLTGLKPGTEYTVSFYGVKGGHRSNPLSAEFTT.

[0080] A Centyrin may comprise an amino sequence having at least 50%, 55%, 60%, 65%, 70%, 75%, 80%, 85%, 90%, 95%, 97%, 99% or any percentage in between of identity to the sequence of

(SEQ ID NO: 17010)
LPAPKNLVVSEVTEDSLRLSWTAPDAAFDSFLIQYQESEKVGEAI
NLTVPGSERSYDLTGLKPGTEYTVSIYGVKGGHRSNPLSAEFTT
or
(SEQ ID NO: 17011)
MLPAPKNLVVSEVTEDSLRLSWTAPDAAFDSFLIQYQESEKVGEA
INLTVPGSERSYDLTGLKPGTEYTVS1YGVKGGHRSNPLSAEFTT.

[0081] A Centyrin may comprise an amino sequence having at least 74% identity to the sequence of

(SEQ ID NO: 17010)
LPAPKNLVVSEVTEDSLRLSWTAPDAAFDSFLIQYQESEKVGEAI
NLTVPGSERSYDLTGLKPGTEYTVSIYGVKGGHRSNPLSAEFTT
or
(SEQ ID NO: 17011)
MLPAPKNLVVSEVTEDSLRLSWTAPDAAFDSFLIQYQESEKVGEA
INLTVPGSERSYDLTGLKPGTEYTVSIYGVKGGHRSNPLSAEFTT.

[0082] The consensus sequence may be modified at one or more positions within (a) a A-B loop comprising or consisting of the amino acid residues TEDS (SEQ ID NO: 17035) at positions 13-16 of the consensus sequence; (b) a B-C loop comprising or consisting of the amino acid residues TAPDAAF (SEQ ID NO: 17036) at positions 22-28 of the consensus sequence; (c) a C-D loop comprising or consisting of the amino acid residues SEKVGE (SEQ ID NO: 17037) at positions 38-43 of the consensus sequence; (d) a D-E loop comprising or consisting of the amino acid residues GSER (SEQ ID NO: 17038) at positions 51-54 of the consensus sequence; (e) a E-F loop comprising or consisting of the amino acid residues GLKPG (SEQ ID NO: 17039) at positions 60-64 of the consensus sequence; (f) a F-G loop comprising or consisting of the amino acid residues KGGHRSN (SEQ ID NO: 17040) at positions 75-81 of the consensus sequence; or (g) any combination of (a)-(f). Centyrins of the disclosure may comprise a consensus sequence of at least 5 fibronectin type III (FN3) domains, at least 10 fibronectin type III (FN3) domains or at least 15 fibronectin type III (FN3) domains.

[0083] The Centryrin may bind an antigen or a ligand with at least one affinity selected from a K_{D} of less than or equal to 10⁻⁹M, less than or equal to 10⁻¹⁰M, less than or equal to 10⁻¹¹M, less than or equal to 10⁻¹²M, less than or equal to 10⁻¹³M, less than or equal to 10⁻¹⁴M, and less than or equal to 10⁻¹⁵M. The K_{D} may be determined by surface plasmon resonance.

### Antibody Mimetic

[0084] The term “antibody mimetic” is intended to describe an organic compound that specifically binds a target sequence and has a structure distinct from a naturally-occurring antibody. Antibody mimetics may comprise a protein, a nucleic acid, or a small molecule. The target sequence to which an antibody mimetic of the disclosure specifically binds may be an antigen. Antibody mimetics may provide superior properties over antibodies including, but not limited to, superior solubility, tissue penetration, stability towards heat and enzymes (e.g. resistance to enzymatic degradation), and lower production costs. Exemplary antibody mimetics include, but are not limited to, an affibody, an afflilin, an affimer, an affitin, an alphabody, an anticalin, and avimer (also known as avidity multimer), a DARPin (Designed Ankyrin Repeat Protein), a Fynomer, a Kunitz domain peptide, and a monobody.

[0085] Affibody molecules of the disclosure comprise a protein scaffold comprising or consisting of one or more alpha helix without any disulfide bridges. Preferably, affibody molecules of the disclosure comprise or consist of three alpha helices. For example, an affibody molecule of the disclosure may comprise an immunoglobulin binding domain. An affibody molecule of the disclosure may comprise the Z domain of protein A.

[0086] Affilin molecules of the disclosure comprise a protein scaffold produced by modification of exposed amino acids of, for example, either gamma-B crystallin or ubiquitin. Affilin molecules functionally mimic an antibody's affinity to antigen, but do not structurally mimic an antibody. In any protein scaffold used to make an affilin, those amino acids that are accessible to solvent or possible binding partners in a properly-folded protein molecule are considered exposed amino acids. Any one or more of these exposed amino acids may be modified to specifically bind to a target sequence or antigen.

[0087] Affimer molecules of the disclosure comprise a protein scaffold comprising a highly stable protein engineered to display peptide loops that provide a high affinity binding site for a specific target sequence. Exemplary affimer molecules of the disclosure comprise a protein scaffold based upon a cystatin protein or tertiary structure thereof. Exemplary affimer molecules of the disclosure may share a common tertiary structure of comprising an alpha-helix lying on top of an anti-parallel beta-sheet.

[0088] Affitin molecules of the disclosure comprise an artificial protein scaffold, the structure of which may be derived, for example, from a DNA binding protein (e.g. the DNA binding protein Sac7d). Affitins of the disclosure selectively bind a target sequence, which may be the entirety or part of an antigen. Exemplary affitins of the disclosure are manufactured by randomizing one or more amino acid sequences on the binding surface of a DNA binding protein and subjecting the resultant protein to ribosome display and selection. Target sequences of affitins of the disclosure may be found, for example, in the genome or on the surface of a peptide, protein, virus, or bacteria. In certain embodiments of the disclosure, an affitin molecule may be used as a specific inhibitor of an enzyme. Affitin molecules of the disclosure may include heat-resistant proteins or derivatives thereof.

[0089] Alphabody molecules of the disclosure may also be referred to as Cell-Penetrating Alphabodies (CPAB). Alphabody molecules of the disclosure comprise small proteins (typically of less than 10 kDa) that bind to a variety of target sequences (including antigens). Alphabody molecules are capable of reaching and binding to intracellular target sequences. Structurally, alphabody molecules of the disclosure comprise an artificial sequence forming single chain alpha helix (similar to naturally occurring coiled-coil structures). Alphabody molecules of the disclosure may comprise a protein scaffold comprising one or more amino acids that are modified to specifically bind target proteins. Regardless of the binding specificity of the molecule, alphabody molecules of the disclosure maintain correct folding and thermostability.

[0090] Anticalin molecules of the disclosure comprise artificial proteins that bind to target sequences or sites in either proteins or small molecules. Anticalin molecules of the disclosure may comprise an artificial protein derived from a human lipocalin. Anticalin molecules of the disclosure may be used in place of, for example, monoclonal antibodies or fragments thereof. Anticalin molecules may demonstrate superior tissue penetration and thermostability than monoclonal antibodies or fragments thereof. Exemplary anticalin molecules of the disclosure may comprise about 180 amino acids, having a mass of approximately 20 kDa. Structurally, anticalin molecules of the disclosure comprise a barrel structure comprising antiparallel beta-strands pairwise connected by loops and an attached alpha helix. In preferred embodiments, anticalin molecules of the disclosure comprise a barrel structure comprising eight antiparallel beta-strands pairwise connected by loops and an attached alpha helix.

[0091] Avimer molecules of the disclosure comprise an artificial protein that specifically binds to a target sequence (which may also be an antigen). Avimers of the disclosure may recognize multiple binding sites within the same target or within distinct targets. When an avimer of the disclosure recognize more than one target, the avimer mimics function of a bi-specific antibody. The artificial protein avimer may comprise two or more peptide sequences of approximately 30-35 amino acids each. These peptides may be connected via one or more linker peptides. Amino acid sequences of one or more of the peptides of the avimer may be derived from an A domain of a membrane receptor. Avimers have a rigid structure that may optionally comprise disulfide bonds and/or calcium. Avimers of the disclosure may demonstrate greater heat stability compared to an antibody.

[0092] DARPins (Designed Ankyrin Repeat Proteins) of the disclosure comprise genetically-engineered, recombinant, or chimeric proteins having high specificity and high affinity for a target sequence. In certain embodiments, DARPins of the disclosure are derived from ankyrin proteins and, optionally, comprise at least three repeat motifs (also referred to as repetitive structural units) of the ankyrin protein. Ankyrin proteins mediate high-affinity protein-protein interactions. DARPins of the disclosure comprise a large target interaction surface.

[0093] Fynomers of the disclosure comprise small binding proteins (about 7 kDa) derived from the human Fyn SH3 domain and engineered to bind to target sequences and molecules with equal affinity and equal specificity as an antibody.

[0094] Kunitz domain peptides of the disclosure comprise a protein scaffold comprising a Kunitz domain. Kunitz domains comprise an active site for inhibiting protease activity. Structurally, Kunitz domains of the disclosure comprise a disulfide-rich alpha+beta fold. This structure is exemplified by the bovine pancreatic trypsin inhibitor. Kunitz domain peptides recognize specific protein structures and serve as competitive protease inhibitors. Kunitz domains of the disclosure may comprise Ecallantide (derived from a human lipoprotein-associated coagulation inhibitor (LACI)).

[0095] Monobodies of the disclosure are small proteins (comprising about 94 amino acids and having a mass of about 10 kDa) comparable in size to a single chain antibody. These genetically engineered proteins specifically bind target sequences including antigens. Monobodies of the disclosure may specifically target one or more distinct proteins or target sequences. In preferred embodiments, monobodies of the disclosure comprise a protein scaffold mimicking the structure of human fibronectin, and more preferably, mimicking the structure of the tenth extracellular type III domain of fibronectin. The tenth extracellular type III domain of fibronectin, as well as a monobody mimetic thereof, contains seven beta sheets forming a barrel and three exposed loops on each side corresponding to the three complementarity determining regions (CDRs) of an antibody. In contrast to the structure of the variable domain of an antibody, a monobody lacks any binding site for metal ions as well as a central disulfide bond. Multispecific monobodies may be optimized by modifying the loops BC and FG. Monobodies of the disclosure may comprise an adnectin.

### VHH

[0096] In certain embodiments of the compositions and methods of the disclosure, a CAR or a CLR comprises a single domain antibody (SdAb). In certain embodiments, the SdAb is a VHH.

[0097] The disclosure provides a CAR or a CLR comprising an antigen or ligand recognition region, respectively, that comprises at least one VHH (to produce a “VCAR” or “VCLR”). CARs and CLRs of the disclosure may comprise more than one VHH. For example, a bi-specific VCAR or VCLR may comprise two VHHs. In some embodiments of the bi-specific VCAR or VCLR, each VHH specifically binds a distinct antigen.

[0098] VHH proteins of the disclosure specifically bind an antigen or a ligand. CARs of the disclosure comprising one or more VHHs that specifically bind an antigen may be used to direct the specificity of a cell, (e.g. a cytotoxic immune cell) towards a target cell expressing the specific antigen. CLRs of the disclosure comprising one or more VHHs that specifically bind an antigen may transduce an intracellular signal upon binding a ligand of either VHH to activate expression of a sequence under the control of an inducible promoter.

[0099] Sequences encoding a VHH of the disclosure can be altered, added and/or deleted to reduce immunogenicity or reduce, enhance or modify binding, affinity, on-rate, off-rate, avidity, specificity, half-life, stability, solubility or any other suitable characteristic, as known in the art.

[0100] Optionally, VHH proteins can be engineered with retention of high affinity for the antigen or ligand and other favorable biological properties. To achieve this goal, the VHH proteins can be optionally prepared by a process of analysis of the parental sequences and various conceptual engineered products using three-dimensional models of the parental and engineered sequences. Three-dimensional models are commonly available and are familiar to those skilled in the art. Computer programs are available which illustrate and display probable three-dimensional conformational structures of selected candidate sequences and can measure possible immunogenicity (e.g., Immunofilter program of Xencor, Inc. of Monrovia, Calif.). Inspection of these displays permits analysis of the likely role of the residues in the functioning of the candidate sequence, i.e., the analysis of residues that influence the ability of the candidate VHH protein to bind its antigen/ligand. In this way, residues can be selected and combined from the parent and reference sequences so that the desired characteristic, such as affinity for the target antigen(s)/ligand(s), is achieved. Alternatively, or in addition to, the above procedures, other suitable methods of engineering can be used.

### VH

[0101] In certain embodiments of the compositions and methods of the disclosure, a CAR or a CLR comprises a single domain antibody (SdAb). In certain embodiments, the SdAb is a VH.

[0102] The disclosure provides CARs/CLRs comprising a single domain antibody (to produce a “VCAR” or a “VCLR”, respectively). In certain embodiments, the single domain antibody comprises a VH. In certain embodiments, the VH is isolated or derived from a human sequence. In certain embodiments, VH comprises a human CDR sequence and/or a human framework sequence and a non-human or humanized sequence (e.g. a rat Fc domain). In certain embodiments, the VH is a fully humanized VH. In certain embodiments, the VH s neither a naturally occurring antibody nor a fragment of a naturally occurring antibody. In certain embodiments, the VH is not a fragment of a monoclonal antibody. In certain embodiments, the VH is a UniDab™ antibody (TeneoBio).

[0103] In certain embodiments, the VH is fully engineered using the UniRat™ (TeneoBio) system and “NGS-based Discovery” to produce the VH. Using this method, the specific VH are not naturally-occurring and are generated using fully engineered systems. The VH are not derived from naturally-occurring monoclonal antibodies (mAbs) that were either isolated directly from the host (for example, a mouse, rat or human) or directly from a single clone of cells or cell line (hybridoma). These VHs were not subsequently cloned from said cell lines. Instead, VH sequences are fully-engineered using the UniRat™ system as transgenes that comprise human variable regions (VH domains) with a rat Fc domain, and are thus human/rat chimeras without a light chain and are unlike the standard mAb format. The native rat genes are knocked out and the only antibodies expressed in the rat are from transgenes with VH domains linked to a Rat Fc (UniAbs). These are the exclusive Abs expressed in the UniRat. Next generation sequencing (NGS) and bioinformatics are used to identify the full antigen-specific repertoire of the heavy-chain antibodies generated by UniRat™ after immunization. Then, a unique gene assembly method is used to convert the antibody repertoire sequence information into large collections of fully-human heavy-chain antibodies that can be screened in vitro for a variety of functions. In certain embodiments, fully humanized VH are generated by fusing the human VH domains with human Fcs in vitro (to generate a non-naturally occurring recombinant VH antibody). In certain embodiments, the VH are fully humanized, but they are expressed in vivo as human/rat chimera (human VH, rat Fc) without a light chain. Fully humanized VHs are expressed in vivo as human/rat chimera (human VH, rat Fc) without a light chain are about 80 kDa (vs 150 kDa).

[0104] VCARs/VCLRs of the disclosure may comprise at least one VH of the disclosure. In certain embodiments, the VH of the disclosure may be modified to remove an Fc domain or a portion thereof. In certain embodiments, a framework sequence of the VH of the disclosure may be modified to, for example, improve expression, decrease immunogenicity or to improve function.

### Transposons/Transposases

[0105] Exemplary transposon/transposase systems of the disclosure include, but are not limited to, piggyBac transposons and transposases, Sleeping Beauty transposons and transposases, Helraiser transposons and transposases and Tol2 transposons and transposases.

[0106] The piggyBac transposase recognizes transposon-specific inverted terminal repeat sequences (ITRs) on the ends of the transposon, and moves the contents between the ITRs into TTAA chromosomal sites. The piggyBac transposon system has no payload limit for the genes of interest that can be included between the ITRs. In certain embodiments, and, in particular, those embodiments wherein the transposon is a piggyBac transposon, the transposase is a piggyBac™ or a Super piggyBac™ (SPB) transposase. In certain embodiments, and, in particular, those embodiments wherein the transposase is a Super piggyBac™ (SPB) transposase, the sequence encoding the transposase is an mRNA sequence.

[0107] In certain embodiments of the methods of the disclosure, the transposase enzyme is a piggyBac™ (PB) transposase enzyme. The piggy Bac (PB) transposase enzyme may comprise or consist of an amino acid sequence at least 75%, 80%, 85%, 90%, 95%, 99% or any percentage in between identical to:

| (SEQ ID NO: 14487) | |
|---|---|
| 1 | MGSSLDDEHI LSALLQSDDE LVGEDSDSEI SDHVSEDDVQ SDTEEAFIDE VHEVQPTSSG |
| 61 | SEILDEQNVT EQPGSSLASN RILTLPQRTI RGKNKHCWST SKSTRRSRVS ALNIVRSQRG |
| 121 | PTRMCRNIYD PLLCFKLFFT DEIISEIVKW TNAEISLKRR ESMTGATFRD TNEDEIYAFF |
| 101 | GILVMTAVRK DNHMSTDDLF DRSLSMVYVS VMSRDRFDFD IRCLRMDDKS IRPTLRENDV |
| 241 | FTPVRKIWDL FIHQCIQNYT PGAHLTIDEQ LLGFRGRCPF RMYIPNKPSK YGIKILMMCD |
| 301 | SGTKYMINGM PYLGRGTQTN GVPLGEYYVK ELSKPVHGSC RNITCDNWFT SIPIAKNLLQ |
| 361 | EPYKLTIVGT VRSNKREIPE VLKNSRSRPV GTSMFCFDGP LTLVSYKPKP AKMVYLLSSC |
| 421 | DEDASINEST GKPQMVMYYN QTKGGVDTLD QMCSVMTCSR KTNRWPMALL YGMINIACIN |
| 481 | SFIIYSHNVS SKGEKVQSRK KFMRNLYMSL TSSFMRKRLE APTLKRYLRD NISNILPNEV |
| 541 | PGTSDDSTEE PVMKKRTYCT YCPSKIRRKA NASCKKCKKV ICREHNIDMC QSCF. |

[0108] In certain embodiments of the methods of the disclosure, the transposase enzyme is a piggyBac™ (PB) transposase enzyme that comprises or consists of an amino acid sequence having an amino acid substitution at one or more of positions 30, 165, 282, or 538 of the sequence:

| (SEQ ID NO: 14487) | |
|---|---|
| 1 | MGSSLDDEHI LSALLQSDDE LVGEDSDSEI SDHVSEDDVQ SDTEEAFIDE VHEVQPTSSG |
| 61 | SEILDEQNVI EQPGSSLASN RILTLPQRTI RGKNKHCWST SKSTRRSRVS ALNIVRSQRG |
| 121 | PTRMCRNIYD PLLCFKLFFT DEIISEIVKW TNAEISLKRR ESMTGATFRD TNEDEIYAFF |
| 181 | GILVMTAVRK DNHMSTDDLF DRSLSMVYVS VMSRDRFDFL IRCLRMDDKS IRPTLRENDV |
| 241 | FTPVRKIWDL FIHQCIQNYT PGAHLTIDEQ LLGFRGRCPF RMYIPNKPSK YGIKILMMCD |
| 301 | SGTKYMINGM PYLGRGTQTN GVPLGEYYVK ELSKPVHGSC RNITCDNWFT SIPLAKNLLQ |
| 361 | EPYKLTIVGT VRSNKREIPE VLKNSRSRPV GTSMFCFDGP LTLVSYKPKP AKMVYLLSSC |
| 421 | DEDASINEST GKPQMVMYYN QTKGGVDTLD QMCSVMTCSR KTNRWPMALL YGMINIACIN |
| 481 | SFIIYSHNVS SKGEKVQSRK KFMRNLYMSL TSSFMRKRLE APTLKRYLRD NISNILPNEV |
| 541 | PGTSDDSTEE PVMKKRTYCT YCPSKIRRKA NASCKKCKKV ICREHNIDMC QSCF. |

[0109] In certain embodiments, the transposase enzyme is a piggyBac™ (PB) transposase enzyme that comprises or consists of an amino acid sequence having an amino acid substitution at two or more of positions 30, 165, 282, or 538 of the sequence of SEQ ID NO: 14487. In certain embodiments, the transposase enzyme is a piggyBac™ (PB) transposase enzyme that comprises or consists of an amino acid sequence having an amino acid substitution at three or more of positions 30, 165, 282, or 538 of the sequence of SEQ ID NO: 14487. In certain embodiments, the transposase enzyme is a piggyBac™ (PB) transposase enzyme that comprises or consists of an amino acid sequence having an amino acid substitution at each of the following positions 30, 165, 282, and 538 of the sequence of SEQ ID NO: 14487. In certain embodiments, the amino acid substitution at position 30 of the sequence of SEQ ID NO: 14487 is a substitution of a valine (V) for an isoleucine (I). In certain embodiments, the amino acid substitution at position 165 of the sequence of SEQ ID NO: 14487 is a substitution of a serine(S) for a glycine (G). In certain embodiments, the amino acid substitution at position 282 of the sequence of SEQ ID NO: 14487 is a substitution of a valine (V) for a methionine (M). In certain embodiments, the amino acid substitution at position 538 of the sequence of SEQ ID NO: 14487 is a substitution of a lysine (K) for an asparagine (N).

[0110] In certain embodiments of the methods of the disclosure, the transposase enzyme is a Super piggyBac™ (SPB) transposase enzyme. In certain embodiments, the Super piggyBac™ (SPB) transposase enzymes of the disclosure may comprise or consist of the amino acid sequence of the sequence of SEQ ID NO: 14487 wherein the amino acid substitution at position 30 is a substitution of a valine (V) for an isoleucine (I), the amino acid substitution at position 165 is a substitution of a serine(S) for a glycine (G), the amino acid substitution at position 282 is a substitution of a valine (V) for a methionine (M), and the amino acid substitution at position 538 is a substitution of a lysine (K) for an asparagine (N). In certain embodiments, the Super piggyBac™ (SPB) transposase enzyme may comprise or consist of an amino acid sequence at least 75%, 80%, 85%, 90%, 95%, 99% or any percentage in between identical to:

| (SEQ ID NO: 14484) | |
|---|---|
| 1 | MGSSLDDEHI LSALLQSDDE LVGEDSDSEV SDHVSEDDVQ SDTEEAFIDE VHEVQPTSSG |
| 61 | SEILDEQNVI EQPGSSLASN RILTLPQRTI RGKNKHCWST SKSTRRSRVS ALNIVRSQRG |
| 121 | PTRMCRNIYD PLLCFKLFFT DEIISEIVKW TNAEISLKRR ESMTSATFRD TNEDEIYAFF |
| 181 | GILVMTAVRK DNHMSTDDLF DRSLSMVYVS VMSRDRFDFL IRCLRMDDKS IRPTLRENDV |
| 241 | FTPVRKIWDL FIHQCIQNYT PGAHLTIDEQ LLGFRGRCPF RVYIPNKPSK YGIKILMMCD |
| 301 | SGTKYMINGM PYLGRGTQTN GVPLGEYYVK ELSKPVHGSC RNITCDNWFT SIPLAKNLLQ |
| 361 | EPYKLTIVGT VRSNKREIPE VLKNSRSRPV GTSMFCFDGP LTLVSYKPKP AKMVYLLSSC |
| 421 | DEDASINEST GKPQMVMYYN QTKGGVDTLD QMCSVMTCSR KTNRWPMALL YGMINIACIN |
| 481 | SFIIYSHNVS SKGEKVQSRK KFMRNLYMSL TSSFMRKRLE APTLKRYLRD NISNILPKEV |
| 541 | PGTSDDSTEE PVMKKRTYCT YCPSKIRRKA NASCKKCKKV ICREHNIDMC QSCF. |

[0111] In certain embodiments of the methods of the disclosure, including those embodiments wherein the transposase comprises the above-described mutations at positions 30, 165, 282 and/or 538, the piggyBac™ or Super piggyBac™ transposase enzyme may further comprise an amino acid substitution at one or more of positions 3, 46, 82, 103, 119, 125, 177, 180, 185, 187, 200, 207, 209, 226, 235, 240, 241, 243, 258, 296, 298, 311, 315, 319, 327, 328, 340, 421, 436, 456, 470, 486, 503, 552, 570 and 591 of the sequence of SEQ ID NO: 14487 or SEQ ID NO: 14484. In certain embodiments, including those embodiments wherein the transposase comprises the above-described mutations at positions 30, 165, 282 and/or 538, the piggyBac™ or Super piggyBac™ transposase enzyme may further comprise an amino acid substitution at one or more of positions 46, 119, 125, 177, 180, 185, 187, 200, 207, 209, 226, 235, 240, 241, 243, 296, 298, 311, 315, 319, 327, 328, 340, 421, 436, 456, 470, 485, 503, 552 and 570. In certain embodiments, the amino acid substitution at position 3 of SEQ ID NO: 14487 or SEQ ID NO: 14484 is a substitution of an asparagine (N) for a serine(S). In certain embodiments, the amino acid substitution at position 46 of SEQ ID NO: 14487 or SEQ ID NO: 14484 is a substitution of a serine(S) for an alanine (A). In certain embodiments, the amino acid substitution at position 46 of SEQ ID NO: 14487 or SEQ ID NO: 14484 is a substitution of a threonine (T) for an alanine (A). In certain embodiments, the amino acid substitution at position 82 of SEQ ID NO: 14487 or SEQ ID NO: 14484 is a substitution of a tryptophan (W) for an isoleucine (I). In certain embodiments, the amino acid substitution at position 103 of SEQ ID NO: 14487 or SEQ ID NO: 14484 is a substitution of a proline (P) for a serine(S). In certain embodiments, the amino acid substitution at position 119 of SEQ ID NO: 14487 or SEQ ID NO: 14484 is a substitution of a proline (P) for an arginine (R). In certain embodiments, the amino acid substitution at position 125 of SEQ ID NO: 14487 or SEQ ID NO: 14484 is a substitution of an alanine (A) a cysteine (C). In certain embodiments, the amino acid substitution at position 125 of SEQ ID NO: 14487 or SEQ ID NO: 14484 is a substitution of a leucine (L) for a cysteine (C). In certain embodiments, the amino acid substitution at position 177 of SEQ ID NO: 14487 or SEQ ID NO: 14484 is a substitution of a lysine (K) for a tyrosine (Y). In certain embodiments, the amino acid substitution at position 177 of SEQ ID NO: 14487 or SEQ ID NO: 14484 is a substitution of a histidine (H) for a tyrosine (Y). In certain embodiments, the amino acid substitution at position 180 of SEQ ID NO: 14487 or SEQ ID NO: 14484 is a substitution of a leucine (L) for a phenylalanine (F). In certain embodiments, the amino acid substitution at position 180 of SEQ ID NO: 14487 or SEQ ID NO: 14484 is a substitution of an isoleucine (I) for a phenylalanine (F). In certain embodiments, the amino acid substitution at position 180 of SEQ ID NO: 14487 or SEQ ID NO: 14484 is a substitution of a valine (V) for a phenylalanine (F). In certain embodiments, the amino acid substitution at position 185 of SEQ ID NO: 14487 or SEQ ID NO: 14484 is a substitution of a leucine (L) for a methionine (M). In certain embodiments, the amino acid substitution at position 187 of SEQ ID NO: 14487 or SEQ ID NO: 14484 is a substitution of a glycine (G) for an alanine (A). In certain embodiments, the amino acid substitution at position 200 of SEQ ID NO: 14487 or SEQ ID NO: 14484 is a substitution of a tryptophan (W) for a phenylalanine (F). In certain embodiments, the amino acid substitution at position 207 of SEQ ID NO: 14487 or SEQ ID NO: 14484 is a substitution of a proline (P) for a valine (V). In certain embodiments, the amino acid substitution at position 209 of SEQ ID NO: 14487 or SEQ ID NO: 14484 is a substitution of a phenylalanine (F) for a valine (V). In certain embodiments, the amino acid substitution at position 226 of SEQ ID NO: 14487 or SEQ ID NO: 14484 is a substitution of a phenylalanine (F) for a methionine (M). In certain embodiments, the amino acid substitution at position 235 of SEQ ID NO: 14487 or SEQ ID NO: 14484 is a substitution of an arginine (R) for a leucine (L). In certain embodiments, the amino acid substitution at position 240 of SEQ ID NO: 14487 or SEQ ID NO: 14484 is a substitution of a lysine (K) for a valine (V). In certain embodiments, the amino acid substitution at position 241 of SEQ ID NO: 14487 or SEQ ID NO: 14484 is a substitution of a leucine (L) for a phenylalanine (F). In certain embodiments, the amino acid substitution at position 243 of SEQ ID NO: 14487 or SEQ ID NO: 14484 is a substitution of a lysine (K) for a proline (P). In certain embodiments, the amino acid substitution at position 258 of SEQ ID NO: 14487 or SEQ ID NO: 14484 is a substitution of a serine(S) for an asparagine (N). In certain embodiments, the amino acid substitution at position 296 of SEQ ID NO: 14487 or SEQ ID NO: 14484 is a substitution of a tryptophan (W) for a leucine (L). In certain embodiments, the amino acid substitution at position 296 of SEQ ID NO: 14487 or SEQ ID NO: 14484 is a substitution of a tyrosine (Y) for a leucine (L). In certain embodiments, the amino acid substitution at position 296 of SEQ ID NO: 14487 or SEQ ID NO: 14484 is a substitution of a phenylalanine (F) for a leucine (L). In certain embodiments, the amino acid substitution at position 298 of SEQ ID NO: 14487 or SEQ ID NO: 14484 is a substitution of a leucine (L) for a methionine (M). In certain embodiments, the amino acid substitution at position 298 of SEQ ID NO: 14487 or SEQ ID NO: 14484 is a substitution of an alanine (A) for a methionine (M). In certain embodiments, the amino acid substitution at position 298 of SEQ ID NO: 14487 or SEQ ID NO: 14484 is a substitution of a valine (V) for a methionine (M). In certain embodiments, the amino acid substitution at position 311 of SEQ ID NO: 14487 or SEQ ID NO: 14484 is a substitution of an isoleucine (I) for a proline (P). In certain embodiments, the amino acid substitution at position 311 of SEQ ID NO: 14487 or SEQ ID NO: 14484 is a substitution of a valine for a proline (P). In certain embodiments, the amino acid substitution at position 315 of SEQ ID NO: 14487 or SEQ ID NO: 14484 is a substitution of a lysine (K) for an arginine (R). In certain embodiments, the amino acid substitution at position 319 of SEQ ID NO: 14487 or SEQ ID NO: 14484 is a substitution of a glycine (G) for a threonine (T). In certain embodiments, the amino acid substitution at position 327 of SEQ ID NO: 14487 or SEQ ID NO: 14484 is a substitution of an arginine (R) for a tyrosine (Y). In certain embodiments, the amino acid substitution at position 328 of SEQ ID NO: 14487 or SEQ ID NO: 14484 is a substitution of a valine (V) for a tyrosine (Y). In certain embodiments, the amino acid substitution at position 340 of SEQ ID NO: 14487 or SEQ ID NO: 14484 is a substitution of a glycine (G) for a cysteine (C). In certain embodiments, the amino acid substitution at position 340 of SEQ ID NO: 14487 or SEQ ID NO: 14484 is a substitution of a leucine (L) for a cysteine (C). In certain embodiments, the amino acid substitution at position 421 of SEQ ID NO: 14487 or SEQ ID NO: 14484 is a substitution of a histidine (H) for the aspartic acid (D). In certain embodiments, the amino acid substitution at position 436 of SEQ ID NO: 14487 or SEQ ID NO: 14484 is a substitution of an isoleucine (I) for a valine (V). In certain embodiments, the amino acid substitution at position 456 of SEQ ID NO: 14487 or SEQ ID NO: 14484 is a substitution of a tyrosine (Y) for a methionine (M). In certain embodiments, the amino acid substitution at position 470 of SEQ ID NO: 14487 or SEQ ID NO: 14484 is a substitution of a phenylalanine (F) for a leucine (L). In certain embodiments, the amino acid substitution at position 485 of SEQ ID NO: 14487 or SEQ ID NO: 14484 is a substitution of a lysine (K) for a serine(S). In certain embodiments, the amino acid substitution at position 503 of SEQ ID NO: 14487 or SEQ ID NO: 14484 is a substitution of a leucine (L) for a methionine (M). In certain embodiments, the amino acid substitution at position 503 of SEQ ID NO: 14487 or SEQ ID NO: 14484 is a substitution of an isoleucine (I) for a methionine (M). In certain embodiments, the amino acid substitution at position 552 of SEQ ID NO: 14487 or SEQ ID NO: 14484 is a substitution of a lysine (K) for a valine (V). In certain embodiments, the amino acid substitution at position 570 of SEQ ID NO: 14487 or SEQ ID NO: 14484 is a substitution of a threonine (T) for an alanine (A). In certain embodiments, the amino acid substitution at position 591 of SEQ ID NO: 14487 or SEQ ID NO: 14484 is a substitution of a proline (P) for a glutamine (Q). In certain embodiments, the amino acid substitution at position 591 of SEQ ID NO: 14487 or SEQ ID NO: 14484 is a substitution of an arginine (R) for a glutamine (Q).

[0112] In certain embodiments of the methods of the disclosure, including those embodiments wherein the transposase comprises the above-described mutations at positions 30, 165, 282 and/or 538, the piggyBac™ transposase enzyme may comprise or the Super piggyBac™ transposase enzyme may further comprise an amino acid substitution at one or more of positions 103, 194, 372, 375, 450, 509 and 570 of the sequence of SEQ ID NO: 14487 or SEQ ID NO: 14484. In certain embodiments of the methods of the disclosure, including those embodiments wherein the transposase comprises the above-described mutations at positions 30, 165, 282 and/or 538, the piggyBac™ transposase enzyme may comprise or the Super piggyBac™ transposase enzyme may further comprise an amino acid substitution at two, three, four, five, six or more of positions 103, 194, 372, 375, 450, 509 and 570 of the sequence of SEQ ID NO: 14487 or SEQ ID NO: 14484. In certain embodiments, including those embodiments wherein the transposase comprises the above-described mutations at positions 30, 165, 282 and/or 538, the piggyBac™ transposase enzyme may comprise or the Super piggyBac™ transposase enzyme may further comprise an amino acid substitution at positions 103, 194, 372, 375, 450, 509 and 570 of the sequence of SEQ ID NO: 14487 or SEQ ID NO: 14484. In certain embodiments, the amino acid substitution at position 103 of SEQ ID NO: 14487 or SEQ ID NO: 14484 is a substitution of a proline (P) for a serine(S). In certain embodiments, the amino acid substitution at position 194 of SEQ ID NO: 14487 or SEQ ID NO: 14484 is a substitution of a valine (V) for a methionine (M). In certain embodiments, the amino acid substitution at position 372 of SEQ ID NO: 14487 or SEQ ID NO: 14484 is a substitution of an alanine (A) for an arginine (R). In certain embodiments, the amino acid substitution at position 375 of SEQ ID NO: 14487 or SEQ ID NO: 14484 is a substitution of an alanine (A) for a lysine (K). In certain embodiments, the amino acid substitution at position 450 of SEQ ID NO: 14487 or SEQ ID NO: 14484 is a substitution of an asparagine (N) for an aspartic acid (D). In certain embodiments, the amino acid substitution at position 509 of SEQ ID NO: 14487 or SEQ ID NO: 14484 is a substitution of a glycine (G) for a serine(S). In certain embodiments, the amino acid substitution at position 570 of SEQ ID NO: 14487 or SEQ ID NO: 14484 is a substitution of a serine(S) for an asparagine (N). In certain embodiments, the piggyBac™ transposase enzyme may comprise a substitution of a valine (V) for a methionine (M) at position 194 of SEQ ID NO: 14487. In certain embodiments, including those embodiments wherein the piggyBac™ transposase enzyme may comprise a substitution of a valine (V) for a methionine (M) at position 194 of SEQ ID NO: 14487, the piggyBac™ transposase enzyme may further comprise an amino acid substitution at positions 372, 375 and 450 of the sequence of SEQ ID NO: 14487 or SEQ ID NO: 14484. In certain embodiments, the piggyBac™ transposase enzyme may comprise a substitution of a valine (V) for a methionine (M) at position 194 of SEQ ID NO: 14487, a substitution of an alanine (A) for an arginine (R) at position 372 of SEQ ID NO: 14487, and a substitution of an alanine (A) for a lysine (K) at position 375 of SEQ ID NO: 14487. In certain embodiments, the piggyBac™ transposase enzyme may comprise a substitution of a valine (V) for a methionine (M) at position 194 of SEQ ID NO: 14487, a substitution of an alanine (A) for an arginine (R) at position 372 of SEQ ID NO: 14487, a substitution of an alanine (A) for a lysine (K) at position 375 of SEQ ID NO: 14487 and a substitution of an asparagine (N) for an aspartic acid (D) at position 450 of SEQ ID NO: 14487.

[0113] The sleeping beauty transposon is transposed into the target genome by the Sleeping Beauty transposase that recognizes ITRs, and moves the contents between the ITRs into TA chromosomal sites. In various embodiments, SB transposon-mediated gene transfer, or gene transfer using any of a number of similar transposons, may be used in the compositions and methods of the disclosure.

[0114] In certain embodiments, and, in particular, those embodiments wherein the transposon is a Sleeping Beauty transposon, the transposase is a Sleeping Beauty transposase or a hyperactive Sleeping Beauty transposase (SB100X).

[0115] In certain embodiments of the methods of the disclosure, the Sleeping Beauty transposase enzyme comprises an amino acid sequence at least 75%, 80%, 85%, 90%, 95%, 99% or any percentage in between identical to:

| (SEQ ID NO: 14485) | |
|---|---|
| 1 | MGKSKEISQD LRKKIVDLHK SGSSLGAISK RLKVPRSSVQ TIVRXYKHHG TTQPSYRSGR |
| 61 | RRVLSPRDER TLVRKVQINP RTTAKDLVKM LEETGTKVSI STVKRVLYRH NLKGRSARKK |
| 121 | PLLQNRHKKA RLRFATAHGD KDRTFWRNVL WSDETKIELF GHNDHRYVWR KKGEACKPKN |
| 181 | TIPTVKHGGG SIMLWGCFAA GGTGALHKID GIMRKENYVD ILKQHLKTSV RKLKLGRKWV |
| 241 | FQMDNDPKHT SKVVAKWLKD NKVKVLEWPS QSPDLNPIEN LWAELKKRVR ARRPTNLTQL |
| 301 | HQLCQEEWAK IHPTYCGKLV EGYPKRLTQV KQFKGNATKY. |

[0116] In certain embodiments of the methods of the disclosure, the hyperactive Sleeping Beauty (SB100X) transposase enzyme comprises an amino acid sequence at least 75%, 80%, 85%, 90%, 95%, 99% or any percentage in between identical to:

| (SEQ ID NO: 14486) | |
|---|---|
| 1 | KGKSKEISQD LRKRIVDLHK SGSSLGAISK RLAVPRSSVQ TIVRKYKHHG TTQPSYRSGR |
| 61 | RRVLSPRDER TLVRKVQINP RTTAKDLVKM LEETGTKVSI STVKRVLYRH NLKGHSARKK |
| 121 | PLLQNRHKKA RLRFATAHGD KDRTFWRNVL WSDETKIELF GHNDHRYVWR KKGEACKPKN |
| 181 | TIPTVKHGGG SIMLWGCFAA GGTGALHKID GIMDAVQYVD ILKQHLKTSV RKLKLGRKWV |
| 241 | FQHDNDPKHT SKVVAKWLKD NKVKVLEWPS QSPDLNPIEN LWAELKKRVR ARRPTNLTQL |
| 301 | HQLCQEEWAK IHPNYCGKLV EGYPKRLTQV KQFKGNATKY. |

[0117] The Helraiser transposon is transposed by the Helitron transposase. Helitron transposases mobilize the Helraiser transposon, an ancient element from the bat genome that was active about 30 to 36 million years ago. An exemplary Helraiser transposon of the disclosure includes Helibat1, which comprises a nucleic acid sequence comprising:

| (SEQ ID NO: 14652) | |
|---|---|
| 1 | TCCTATATAA TAAAAGAGAA ACATGCAAAT TGACCATCCC TCCGCTACGC TCAAGCCACG |
| 61 | CCCACCAGCC AATCAGAAGT GACTATGCAA ATTAACCCAA CAAAGATGGC AGTTAAATTT |
| 121 | GCATACGCAG GTGTCAAGCG CCCCAGGAGG CAACGGCGGC CGCGGGCTCC CAGGACCTTG |
| 181 | GCTGGCCCCG GGAGGCGAGG CCGGCCGCGC CTAGCCACAC CCGCGGGCTC CCGGGACCTT |
| 241 | CGCCAGCAGA GAGCAGAGCG GGAGAGCGGG CGGAGAGCGG GAGGTTTGGA GGACTTGGCA |
| 301 | GAGCAGGAGG CCGCTGGACA TAGAGCAGAG CGAGAGAGAG GGTGGCTTGG AGGGCGTGGC |
| 361 | TCCCTCTGTC ACCCCAGCTT CCTCATCACA GCTGTGaAAA CTGACAGCAG GGAGGAGGAA |
| 421 | GTCCCACCCC CACAGAATCA GCCAGAATCA GCCGTTGGTC AGACAGCTCT CAGCGGCCTG |
| 481 | ACAGCCAGGA CTCTCATTCA CCTGCATCTC AGACCGTGAC AGTAGAGAGG TGGGACTATG |
| 541 | TCTAAAGAAC AACTGTTGAT ACAACGTAGC TCTGCAGCCG AAAGATGCCG GCGTTATCGA |
| 601 | CAGAAAATGT CTGCAGAGCA ACGTGCGTCT GATCTTGAAA GAAGGCGGCG CCTGCAACAG |
| 661 | AATGTATCTG AAGAGCAGCT ACTGGAAAAA CGTCGCTCTG AAGCCGAAAA ACAGCGGCGT |
| 721 | CATCGACAGA AAATGTCTAA AGACCAACGT GCCTTTGAAG TTGAAAGAAG GCGGTGGCGA |
| 781 | CGACAGAATA TGTCTAGAGA ACAGTCATCA ACAAGTACTA CCAATACCGG TAGGAACTGC |
| 641 | CTTCTCAGCA AAAATGGAGT ACATGAGGAT GCAATTCTCG AACATAGTTG TGGTGGAATG |
| 901 | ACTGTTCGAT GTGAATTTTG CCTATCACTA AATTTCTCTG ATGAAAAACC ATCCGATGGG |
| 961 | AAATTTACTC GATGTTGTAG CAAAGGGAAA GTCTGTCCAA ATGATATACA TTTTCCAGAT |
| 1021 | TACCCGGCAT ATTTAAAAAG ATTAATGACA AACGAAGATT CTGACAGTAA AAATTTCATG |
| 1081 | GAAAATATTC GTTCCATAAA TAGTTCTTTT GCTTTTGCTT CCATGGGTGC AAATATTGCA |
| 1141 | TCGCCATCAG GATATGGGCC ATACTGTTTT AGAATACACG GACAAGTTTA TCACCGTACT |
| 1201 | GGAACTTTAC ATCCTTCGGA TGGTGTTTCT CGGAAGTTTG CTCAACTCTA TATTTTGGAT |
| 1261 | ACAGCCGAAG CTACAAGTAA AAGATTAGCA ATGCCAGAAA ACCAGGGCTG CTCAGAAAGA |
| 1321 | CTCATGATCA ACATCAACAA CCTCATGCAT GAAATAAATG AATTAAGAAA ATCGTACAAG |
| 1381 | ATGCTACATG AGGTAGAAAA GGAAGCCCAA TCTGAAGCAG CAGCAAAAGG TATTGCTCCC |
| 1441 | ACAGAAGTAA CAATGGCGAT TAAATACGAT CGTAACAGTG ACCCAGGTAG ATATAATTCT |
| 1501 | CCCCGTGTAA CCGAGGTTGC TGTCATATTC AGAAACGAAG ATGGAGAACC TCCTTTTGAA |
| 1561 | AGGGACTTGC TCATTCATTG TAAACCAGAT CCCAATAATC CAAATGCCAC TAAAATGAAA |
| 1621 | CAAATCAGTA TCCTGTTTCC TACATTAGAT GCAATGACAT ATCCTATTCT TTTTCCACAT |
| 1681 | GGTGAAAAAG GCTGGGGAAC AGATATTGCA TTAAGACTCA GAGACAACAG TGTAATCGAC |
| 1741 | AATAATACTA GACAAAATGT AAGGACACGA GTCACACAAA TGCAGTATTA TGGATTTCAT |
| 1601 | CTCTCTGTGC GGGACACGTT GAATCCTATT TTAAATGCAG GAAAATTAAC TCAACAGTTT |
| 1861 | ATTGTGGATT CATATTCAAA AATCGAGGCC AATCGGATAA ATTTCATCAA AGCAAACCAA |
| 1921 | TCTAAGTTGA GAGTTGAAAA ATATAGTGGT TTGATGGATT ATCTCAAATC TAGATCTGAA |
| 1981 | AATGACAATG TGCCGATTGG TAAAATGATA ATACTTCCAT CATCTTTTGA GGGTAGTCCC |
| 2041 | AGAAATATGC AGCAGCGATA TCAGGATGCT ATGGCAATTG TAACGAAGTA TGGCAAGCCC |
| 2101 | GATTTATTCA TAACCATGAC ATGCAACCCC AAATGGGCAG ATATTACAAA CAATTTACAA |
| 2161 | CGCTGGCAAA AAGTTGAAAA CAGACCTGAC TTGGTAGCCA GAGTTTTTAA TATTAAGCTG |
| 2221 | AATGCTCTTT TAAATGATAT ATGTAAATTC CATTTATTTG GGAAAGTAAT AGCTAAAATT |
| 2281 | CATGTCATTG AATTTCAGAA ACGCGGACTG CCTCACGCTC ACATATTATT GATATTAGAT |
| 2341 | AGTGAGTCCA AATTACGTTC AGAAGATGAC ATTGACCGTA TAGTTAAGGC AGAAATTCCA |
| 2401 | GATGAAGACC AGTGTCCTCG ACTTTTTCAA ATTGTAAAAT CAAATATGGT ACATGGACCA |
| 2461 | TGTGGAATAC AAAATCGAAA TAGTCCATGT ATGGAAAATG GAAAATGTTC AAAGGGATAT |
| 2521 | CCAAAAGAAT TTCAAAATGC GACCA1TGGA AATATTGATG GATATCCGAA ATACAAACGA |
| 2581 | AGATCTGGTA GCACCATGTC TATTGGAAAT AAAGTTGTCG ATAACACTTG GATTGTCCCT |
| 2641 | TATAACCCGT ATTTGTGCCT TAAATATAAC TGTCATATAA ATGTTGAAGT CTGTGCATCA |
| 2701 | ATTAAAAGTG TCAAATATTT ATTTAAATAC ATCTATAAAG GGCACGATTG TGCAAATATT |
| 2761 | CAAATTTCTG AAAAAAATAT TATCAATCAT GACGAAGTAC AGGACTTCAT TGACTCCAGG |
| 2821 | TATGTGAGCG CTCCTGAGGC TGTTTGGAGA CTTTTTGCAA TGCGAATGCA TGACCAATCT |
| 2881 | CATGCAATCA CAAGATTAGC TATTCATTTG CCAAATGATC AGAATTTGTA TTTTCATACC |
| 2941 | GATGATTTTG CTGAAGTTTT AGATAGGGCT AAAAGGCATA ACTCGACTTT GATGGCTTGG |
| 3001 | TTCTTATTGA ATAGAGAAGA TTCTGATGCA CGTAATTATT ATTATTGGGA GATTCCACAG |
| 3061 | CATTATGTCT TTAATAATTC TTTGTGGACA AAACGCCGAA AGGGTGGGAA TAAAGTATTA |
| 3121 | GGTAGACTGT TCACTGTGAG CTTTAGAGAA CCAGAACGAT ATTAGCTTAG ACTTTTGCTT |
| 3181 | CTGCATGTAA AAGGTGCGAT AAGTTTTGAG GATCTGCGAA CTGTAGGAGG TGTAACTTAT |
| 3241 | GATACATTTC ATGAAGCTGC TAAACACCGA GGATTATTAC TTGATGACAC TATCTGGAAA |
| 3301 | GATACGATTG ACGATGCAAT CATCCTTAAT ATGCCCAAAC AACTACGGCA ACTTTTTGCA |
| 3361 | TATATATGTG TGTTTGGATG TCCTTCTGCT GCAGACAAAT TATGGGATGA GAATAAATCT |
| 3421 | CATTTTATTG TTGATTTCTG TTGGAAATTA CACCGAAGAG AAGGTGCCTG TGTGAACTGT |
| 3481 | GAAATGCATG CCCTTAACGA AATTCAGGAG GTATTCACAT TGCATGGAAT GAAATGTTCA |
| 3541 | CATTTCAAAC TTCCGGACTA TCCTTTATTA ATGAATGCAA ATACATGTGA TCAATTGTAC |
| 3601 | GAGCAACAAC AGGCAGAGGT TTTGATAAAT TCTCTGAATG ATGAACAGTT GGCAGCCTTT |
| 3661 | CAGACTATAA CTTCAGCCAT CGAAGATCAA ACTGTACACC CCAAATGCTT TTTCTTGGAT |
| 3721 | GGTCCAGGTG GTAGTGGAAA AACATATCTG TATAAAGTTT TAACACATTA TATTAGAGGT |
| 3781 | CGTGGTGGTA CTGTTTTACC CACAGCATCT ACAGGAATTG CTGCAAATTT ACTTCTTGGT |
| 3841 | GGAAGAACCT TTGATTCCCA ATATAAATTA CCAATTCCAT TAAATGAAAC TTCAATTTCT |
| 3901 | AGACTCGATA TAAAGAGTGA AGTTGCTAAA ACCATTAAAA AGGCCCAACT TCTCATTATT |
| 3961 | GATGAATGCA CCATGGCATC CAGTCATGCT ATAAACGCCA TAGATAGATT ACTAAGAGAA |
| 4021 | ATTATGAATT TGAATGTTGC ATTTGGTGGG AAAGTTCTCC TTCTCGGAGG GGATTTTCGA |
| 4081 | CAATGTCTCA GTATTGTACC ACATGCTATG CGATCGGCCA TAGTACAAAC GAGTTTAAAG |
| 4141 | TACTGTAATG TTTGGGGATG TTTCAGAAAG TTGTCTCTTA AAACAAATAT GAGATCAGAG |
| 4201 | GATTCTGCTT ATAGTGAATG GTTAGTAAAA CTTGGAGATG GCAAACTTGA TAGCAGTTTT |
| 4261 | CATTTAGGAA TGGATATTAT TGAAATCCCC CATGAAATGA TTTGTAACCC ATCTATTATT |
| 4321 | GAAGCTACCT TTGGAAATAG TATATCTATA GATAATATTA AAAATATATC TAAACGTGCA |
| 4381 | ATTCTTTGTC CAAAAAATGA GCATGTTCAA AAATTAAATG AAGAAATTTT GGATATACTT |
| 4441 | GATGGAGATT TTCACACATA TTTGAGTGAT GATTCCATTG ATTCAACAGA TGATGCTGAA |
| 4501 | AAGGAAAATT TTCCCATCGA ATTTCTTAAT AGTATTACTC CTTCGGGAAT GCCGTGTCAT |
| 4561 | AAATTAAAAT TGAAAGTGGG TGCAATCATC ATGCTATTGA GAAATCTTAA TAGTAAATGG |
| 4621 | GGTCTTTGTA ATGGTACTAG ATTTATTATC AAAAGATTAC GACCTAACAT TATCGAAGCT |
| 4681 | GAAGTATTAA CAGGATCTGC AGAGGGAGAG GTTGTTCTGA TTCCAAGAAT TGATTTGTCC |
| 4741 | CCATCTGACA CTGGCCTCCC ATTTAAATTA ATTCGAAGAC AGTTTCCCGT GATGCCAGCA |
| 4801 | TTTGCGATGA CTATTAATAA ATCACAAGGA CAAACTCTAG ACAGAGTAGG AATATTCCTA |
| 4861 | CCTGAACCCG TTTTCGCACA TGGTCAGTTA TATGTTGCTT TCTCTCGAGT TCGAAGAGCA |
| 4921 | TGTGACGTTA AAGTTAAAGT TGTAAATACT TCATCACAAG GGAAATTAGT CAAGCACTCT |
| 4981 | GAAAGTGTTT TTACTCTTAA TGTGGTATAC AGGGAGATAT TAGAATAAGT TTAATCACTT |
| 5041 | TATCAGTCAT TGTTTGCATC AATGTTGTTT TTATATCATG TTTTTGTTGT TTTTATATCA |
| 5101 | TGTCTTTGTT GTTGTTATAT CATGTTGTTA TTGTTTATTT ATTAATAAAT TTATGTATTA |
| 5161 | TTTTCATATA CATTTTACTC ATTTCCTTTC ATCTCTCACA CTTCTATTAT AGAGAAAGGG |
| 5221 | CAAATAGCAA TATTAAAATA TTTCCTCTAA TTAATTCCCT TTCAATGTGC ACGAATTTCG |
| 5281 | TGCACCGGGC CACTAG. |

[0118] Unlike other transposases, the Helitron transposase does not contain an RNase-H like catalytic domain, but instead comprises a RepHel motif made up of a replication initiator domain (Rep) and a DNA helicase domain. The Rep domain is a nuclease domain of the HUH superfamily of nucleases.

[0119] An exemplary Helitron transposase of the disclosure comprises an amino acid sequence comprising:

| (SEQ ID NO: 14501) | |
|---|---|
| 1 | MSKEQLLXQR SSAAERCRRY RQKMSAEQRA SDLERRRRLQ QKVSEEQLLE KRRSEAEKQR |
| 61 | RHRQKMSKDQ RAFEVERRRW RRQNMSREQS STSTTNTGRN CLLSKNGVHE DAILEHSCGG |
| 121 | MTVRCEFCLS LNFSDEKPSD GKFTRCCSKG KVCPNDIHFP DYPAYLKRLM TNEDSDSKNF |
| 181 | MENIRSINSS FAFASMGANI ASPSGYGPYC FRIHGQVYHR TGTLHPSDGV SRKFAQLYIL |
| 241 | DTAEATSKRL AMPENQGCSE RLMININNLM HEINELTKSY KMLHEVEKEA QSEAAAKGIA |
| 301 | PTEVTMAIKY DRNSDPGRYN SPRVTEVAVI FRNEDGEPPF ERDLLIHCKP DPNNPNATKM |
| 361 | KQISILFPTL DAMTYPILFP HGEKGWGTDI ALRLRDNSVI DKNTRQMVRT RVTQMQYYGF |
| 421 | HLSVRDTFNP ILNAGKLTQQ FIVDSYSKME ANRINFIKAN QSKLRVEKYS GLMDYLKSRS |
| 481 | ENDNVPIGKM IILPSSFEGS PRNMQQRYQD AMAIVTKYSK PDLFITMTCN PKWADITNNL |
| 541 | QRWQKVENRP DLVARVFNIK LNALLNDICK FHLFGKVIAK IHVIEFQKRG LPHAHILLIL |
| 601 | DSESKLR8ED DIDRIYKAEI PDEDQCPRLF QIVKSMMVHG PCGIQNPNSP CMENGKCSKG |
| 661 | YPKEFQNATI GNIDGYPKYK RRSGSTMSIG NKVVDNTWIV PYNPYLCLKY NCHINVEVCA |
| 721 | SIKSVKYLFK YIYKGHDCAN IQISEKNIIN HDEVQDFIDS RYVSAPEAVW RLFAMRMHDQ |
| 781 | SHAITRLAIH LPMDQMLYFH TDDFAEVLDR AKRHNSTLMA WFLLNREDSD ARNYYYWEIP |
| 841 | QHYVFNNSLW TKRRKGGMKV LGRLFTVSFR EPERYYLRLL LLHVKGAISF EDLRTVGGVT |
| 901 | YDTFHEAAKH RGLLLDDTIW KDTIDDAIIL NMPKQLRQLF AYICVFGCPS AADKLWDENK |
| 561 | SHFIEDFCWK LHRREGACVN CEMHALNEIQ EVFTLHGMKC SHFKLPDYPL LMNANTCDQL |
| 1021 | YEQQQAEVLI NSLMDEQLAA FQTITSAIED QTVHPKCFFL DGPGGSGKTY LYKVLTHYIR |
| 1081 | GRGGTVLPTA STGIAANLLL GGRTFHSQYK LPIPLNETSI SRLDIKSEVA KTIKKAQLLI |
| 1141 | IDECTMASSH AINAIDRLLR EXMNLNVAFG GKVLLLGGDF RQCLSIVPHA MRSAIVQTSL |
| 1201 | KYCNVWGCFR KLSLKTNMRS EDSAYSEWLV KLGDGKLDSS FHLGMDIIEI PHEMICNGSI |
| 1261 | IEATFGNSIS IDNIKNISKR AILCPKNEHV QKLNEEILDI LDGDFHTYLS DDSIDSTDDA |
| 1321 | EKENFPIEFL NSITPSGMPC HKLKLKVGAI IMLLRNLNSK WGLCNGTRET IKRLRPNIIE |
| 1381 | AEVLTGSAEG EVVLIPRIDL SPSDTGLPFK LIRRQFPVMP AFAMTIMKSQ GQTLDRVGIF |
| 1441 | LPEPVFAHGQ LYVAFSRVRR ACDVKVKVVN TSSQGKLVKH SESVFTLNVV YREILE. |

[0120] In Helitron transpositions, a hairpin close to the 3′ end of the transposon functions as a terminator. However, this hairpin can be bypassed by the transposase, resulting in the transduction of flanking sequences. In addition, Helraiser transposition generates covalently closed circular intermediates. Furthermore, Helitron transpositions can lack target site duplications. In the Helraiser sequence, the transposase is flanked by left and right terminal sequences termed LTS and RTS. These sequences terminate with a conserved 5′-TC/CTAG-3′ motif. A 19 bp palindromic sequence with the potential to form the hairpin termination structure is located 11 nucleotides upstream of the RTS and consists of the sequence GTGCACGAATTTCGTGCACCGGGCCACTAG (SEQ ID NO: 14500).

[0121] Tol2 transposons may be isolated or derived from the genome of the medaka fish, and may be similar to transposons of the hAT family. Exemplary Tol2 transposons of the disclosure are encoded by a sequence comprising about 4.7 kilobases and contain a gene encoding the Tol2 transposase, which contains four exons. An exemplary Tol2 transposase of the disclosure comprises an amino acid sequence comprising the following:

| (SEQ ID NO: 14502) | |
|---|---|
| 1 | MEEVCDSSAA ASSTVQNQPQ DQEHPWPYLR EFFSLSGVNK DSFKMKCVLC LDLNKEISAF |
| 61 | KSSPSNLRKH IERMHPNYLK NYSKLTAQKR KIGTSTHASS SKQLKVDSVF PVKHVSPVTV |
| 121 | NKAILRYIIQ GLHPFSTVDL PSFKELISTL QPGISVITRP TLRSKIAEAA LIMKQKVTAA |
| 181 | MSEVEWIATT TDCWTARRKS FIGVTAHWIN PGSLERHSAA LACKRLMGSH TFEVLASAMN |
| 241 | DIHSEYEIRD KVVCTTTDSG SNFMKAFRVF GVENNDIETE ARRCESDDTD SEGCGEGSDG |
| 301 | VEFQDASRVL DQDDGFEFQL PKHQKCACHL LNLVSSVDAQ KALSNEHYKK LYRSVFGKCQ |
| 361 | ALWNKSSRSA LAAEAVESES RLQLLRPNQT RWNSTFMAVD RILQICKEAG EGALRNICTS |
| 421 | LEVPMFNPAE MLFLTEWANT MRPVAKVLDI LQAETNTQLG WLLPSVHQLS LKLQRLHHSL |
| 481 | RYCDPLVDAL QQGIQTRFKH MFEDPEIIAA AILLPKFRTS WTNDETIIKR GMDYIRVHLE |
| 541 | PLDHKKELAN SSSDDEDFFA SLKPTTHEAS KELDGYLACV SDTRESLLTF PAICSLSIKT |
| 601 | NTPLTASAAC ERLFSTAGLL FSPKRARLDT NNFENQLLLK LNLREYNFE |

[0122] An exemplary Tol2 transposon of the disclosure, including inverted repeats, subterminal sequences and the Tol2 transposase, is encoded by a nucleic acid sequence comprising the following:

| (SEQ ID NO: 17041) | |
|---|---|
| 1 | CAGAGGTGTA AAGTACTTGA GTAATTTTAC TTGATTACTG TACTTAAGTA TTATTTTTGG |
| 61 | GGATTTTTAC TTTACTTGAG TACAATTAAA AATCAATACT TTTACTTTTA CTTAATTACA |
| 121 | TTTTTTTAGA AAAAAAAGTA CTTTTTACTC CTTACAATTT TATTTACAGT CAAAAAGTAC |
| 181 | TTATTTTTTG GAGATCACTT CATTCTATTT TCCCTTGCTA TTACCAAACC AATTGAATTG |
| 241 | CGCTGATGCC CAGTTTAATT TAAATGTTAT TTATTCTGCC TATGAAAATC GTTTTCACAT |
| 301 | TATATGAAAT TGGTCAGACA TGTTCATTGG TCCTTTGGAA GTGACGTCAT GTCACATCTA |
| 361 | TTACCACAAT GCACAGCACC TTGACCTGGA AATTAGGGAA ATTATAACAG TCAATCAGTG |
| 421 | GAAGAAAATG GAGGAAGTAT GTGATTCATC AGCAGCTGCG AGCAGCACAG TCCAAAATCA |
| 481 | GCCACAGGAT CAAGAGCACC CGTGGCCGTA TCTTCGCGAA TTCTTTTCTT TAAGTGGTGT |
| 541 | AAATAAAGAT TCATTCAAGA TGAAATGTGT CCTCTGTCTC CCGCTTAATA AAGAAATATC |
| 601 | GGCCTTCAAA AGTTCGCCAT CAAACCTAAG GAAGCATATT GAGGTAAGTA CATTAAGTAT |
| 661 | TTTGTTTTAC TGATAGTTTT TTTTTTTTTT TTTTTTTTTT TTTTTGGGTG TGCATGTTTT |
| 721 | GACGTTGATG GCGCGCCTTT TATATGTGTA GTAGGCCTAT TTTCACTAAT GCATGCGATT |
| 781 | GACAATATAA GGCTCACGTA ATAAAATGCT AAAATGCATT TGTAATTGGT AACGTTAGGT |
| 841 | CCACGGGAAA TTTGGCGCCT ATTGCAGCTT TGAATAATCA TTATCATTCC GTGCTCTCAT |
| 901 | TGTGTTTCAA TTCATGCAAA ACACAAGAAA ACCAAGCGAG AAATTTTTTT CCAAACATGT |
| 961 | TGTATTGTCA AAACGGTAAC ACTTTACAAT GAGGTTGATT AGTTCATGTA TTAACTAACA |
| 1021 | TTAAATAACC ATGAGCAATA CATTTGTTAC TGTATCTGTT AATCTTTGTT AACGTTAGTT |
| 1081 | AATAGAAATA CAGATGTTCA TTGTTTGTTC ATGTTAGTTC ACAGTGCATT AACTAATGTT |
| 1141 | AACAAGATAT AAAGTATTAG TAAATGTTGA AATTAACATG TATACGTGCA GTTCATTATT |
| 1201 | AGTTCATGTT AACTAATGTA GTTAACTAAC GAACCTTATT GTAAAAGTGT TACCATCAAA |
| 1261 | ACTAATGTAA TGAAATCAAT TCACCCTGTC ATGTCAGCCT TACAGTCCTG TGTTTTTGTC |
| 1321 | AATATAATCA GAAATAAAAT TAATGTTTGA TTGTCACTAA ATGCTACTGT ATTTCTAAAA |
| 1381 | TCAACAAGTA TTTAACATTA TAAAGTGTGC AATTGGCTGC AAATGTCAGT TTTATTAAAG |
| 1441 | GGTTAGTTCA CCCAAAAATG AAAATAATGT CATTAATGAC TCGCCCTCAT GTCGTTCCAA |
| 1501 | GCCCGTAAGA CCTCCGTTCA TCTTCAGAAC ACAGTTTAAG ATATTTTAGA TTTAGTCCGA |
| 1561 | GAGCTTTCTG TGCCTCCATT GAGAATGTAT GTACGGTATA CTGTCCATGT CCAGAAAGGT |
| 1621 | AATAAAAACA TCAAAGTAGT CCATGTGACA TCAGTGGGTT AGTTAGAATT TTTTGAAGCA |
| 1681 | TCGAATACAT TTTGGTCCAA AAATAACAAA ACCTACGACT TTATTCGGCA TTGTATTCTC |
| 1741 | TTCCGGGTCT GTTGTCAATC CGCGTTCACG ACTTCGCAGT GACGCTACAA TGCTGAATAA |
| 1801 | AGTCGTAGGT TTTGTTATTT TTGGACCAAA ATGTATTTTC GATGCTTCAA ATAATTCTAC |
| 1861 | CTAACCCACT GATGTCAGAT GGACTACTTT GATGTTTTTA TTACCTTTCT GGACATGGAC |
| 1921 | AGTATACCGT ACATACATTT TCAGTGGAGG GACAGAAAGC TCTCGGACTA AATCTAAAAT |
| 1981 | ATCTTAAACT GTGTTCCGAA GATGAACGGA GGTGTTACGG GCTTGGAACG ACATGAGGGT |
| 2041 | GAGTCATTAA TGACATCTTT TCATTTTTGG GTGAACTAAC CCTTTAATGC TGTAATCAGA |
| 2101 | GACTGTATGT GTAATTGTTA CATTTATTCC ATACAATATA AATATTTATT TGTTGTTTTT |
| 2161 | ACAGAGAATG CACCCAAATT ACCTCAAAAA CTACTCTAAA TTGACAGCAC AGAAGAGAAA |
| 2221 | GATCGGGACC TCCACCCATG CTTCCAGCAG TAAGCAACTG AAAGTTGACT CAGTTTTCCC |
| 2281 | AGTCAAACAT GTGTCTCCAG TCACTGTGAA CAAAGCTATA TTAAGGTACA TCATTCAAGG |
| 2341 | ACTTCATCCT TTCAGCACTG TTGATCTGCC ATCATTTAAA GAGCTGATTA GTACACTGCA |
| 2401 | GCCTGGCATT TCTGTCATTA CAAGGCCTAC TTTACGCTCC AAGATAGCTG AAGCTGCTCT |
| 2461 | GATCATGAAA CAGAAAGTGA CTGCTGCCAT GAGTGAAGTT GAATGGATTG CAACCACAAC |
| 2521 | GGATTGTTGG ACTGCACGTA GAAAGTCATT CATTGGTGTA ACTGCTCACT GGATCAACCC |
| 2581 | TGGAAGTCTT GAAAGACATT CCGCTGCACT TGCCTGCAAA AGATTAATGG GCTCTCATAC |
| 2641 | TTTTGAGGTA CTGGCCAGTG CCATGAATGA TATCCACTCA GAGTATGAAA TACGTGACAA |
| 2701 | GGTTGTTTGC ACAACCACAG ACAGTGGTTC CAACTTTATG AAGGCTTTCA GAGTTTTTGG |
| 2761 | TGTGGAAAAC AATGATATCG AGACTGAGGC AAGAAGGTGT GAAAGTGATG ACACTGATTC |
| 2821 | TGAAGGCTGT GGTGAGGGAA GTGATGGTGT GGAATTCCAA GATGCCTCAC GAGTCCTGGA |
| 2881 | CCAAGACGAT GGCTTCGAAT TCCAGCTACC AAAACATCAA AAGTGTGCCT GTCACTTACT |
| 2941 | TAACCTAGTC TCAAGCGTTG ATGCCCAAAA AGCTCTCTCA AATGAACACT ACAAGAAACT |
| 3001 | CTACAGATCT GTCTTTGGCA AATGCCAAGC TTTATGGAAT AAAAGCAGCC GATCGGCTCT |
| 3061 | AGCAGCTGAA GCTGTTGAAT CAGAAAGCCG GCTTCAGCTT TTAAGGCCAA ACCAAACGCG |
| 3121 | GTGGAATTCA ACTTTTATGG CTGTTGACAG AATTCTTCAA ATTTGCAAAG AAGCAGGAGA |
| 3181 | AGGCGCACTT CGGAATATAT CCACCTCTCT TGAGGTTCCA ATGTAAGTGT TTTTCCCCTC |
| 3241 | TATCGATGTA AACAAATGTG GGTTGTTTTT GTTTAATACT CTTTGATTAT GCTGATTTCT |
| 3301 | CCTGTAGGTT TAATCCAGCA GAAATGCTCT TCTTGACACA CTCCGCCAAC ACAATCCGTC |
| 3361 | CAGTTGCAAA AGTACTCGAC ATCTTGCAAG CGGAAACGAA TACACAGCTG GGGTGGCTGC |
| 3421 | TGCCTAGTGT CCATCAGTTA AGCTTGAAAC TTCAGCGACT CCACCATTCT CTCAGGTACT |
| 3481 | GTGACCCACT TGTGGATGCC CTACAACAAG GAATCCAAAC ACGATTCAAG CATATGTTTG |
| 3541 | AAGATCCTGA GATCATAGCA GCTGCCATCC TTCTCCCTAA ATTTCGGACC TCTTGGACAA |
| 3601 | ATGATGAAAC CATCATAAAA CGAGGTAAAT GAATGCAAGC AACATACACT TGACGAATTG |
| 3661 | TAATCTGGGC AACCTTTGAG CCATACCAAA ATTATTCTTT TATTTATTTA TTTTTGCACT |
| 3721 | TTTTAGGAAT GTTATATCCC ATCTTTGGCT GTGATCTCAA TATGAATATT GNFGTAAAGT |
| 3781 | ATTCTTGCAG CAGGTTGTAG TTATCCCTCA GTGTTTCTTG AAACCAAACT CATATGTATG |
| 3841 | ATATGTGGTT TGGAAATGCA GTTAGATTTT ATGCTAAAAT AAGGGATTTG CATGATTTTA |
| 3901 | GATGTAGATG ACTGCACGTA AATGTAGTTA ATGACAAAAT CCATAAAATT TGTTCCCAGT |
| 3961 | CAGAAGCCCC TCAACCAAAC TTTTCTTTGT GTCTGCTCAC TGTGCTTGTA GGCATGGACT |
| 4021 | ACATCAGAGT GCATCTGGAG CCTTTGGACC ACAAGAAGGA ATTGGCCAAC AGTTCATCTG |
| 4081 | ATGATGAAGA TTTTTTCGCT TCTTTGAAAC CGACAACACA TGAAGCCAGC AAAGAGTTGG |
| 4141 | ATGGATATCT GGCCTGTGTT TCAGACACCA GGGAGTCTCT GCTCACGTTT CCTGCTATTT |
| 4201 | GCAGCCTCTC TATCAAGACT AATACACCTC TTCCCGCATC GGCTGCCTGT GAGAGGCTTT |
| 4261 | TCAGCACTGC AGGATTGCTT TTCAGCCCCA AAAGAGCTAG GCTTGACACT AACAATTTTG |
| 4321 | AGAATCAGCT TCTACTGAAG TTAAATCTGA GGTTTTACAA CTTTGAGTAG CGTGTACTGG |
| 4381 | CATTAGATTG TCTGTCTTAT AGTTTGATAA TTAAATACAA ACAGTTCTAA AGCAGGATAA |
| 4441 | AACCTTGTAT GCATTTCATT TAATGTTTTT TGAGATTAAA AGCTTAAACA AGAATCTCTA |
| 4501 | GTTTTCTTTC TTGCTTTTAC TTTTACTTCC TTAATACTCA AGTACAATTT TAATGGAGTA |
| 4561 | CTTTTTTACT TTTACTCAAG TAAGATTCTA GCCAGATACT TTTACTTTTA ATTGAGTAAA |
| 4621 | ATTTTCCCTA AGTACTTGTA CTTTCACTTG AGTAAAATTT TTGAGTACTT TTTACACCTC |
| 4681 | TG. |

[0123] Exemplary transposon/transposase systems of the disclosure include, but are not limited to, piggyBac and piggyBac-like transposons and transposases.

[0124] PiggyBac and piggyBac-like transposases recognizes transposon-specific inverted terminal repeat sequences (ITRs) on the ends of the transposon, and moves the contents between the ITRs into TTAA or TTAT chromosomal sites. The piggyBac or piggyBac-like transposon system has no payload limit for the genes of interest that can be included between the ITRs.

[0125] In certain embodiments, and, in particular, those embodiments wherein the transposon is a piggyBac transposon, the transposase is a piggyBac™, Super piggyBac™ (SPB) transposase. In certain embodiments, and, in particular, those embodiments wherein the transposase is a piggyBac™, Super piggyBac™ (SPB), the sequence encoding the transposase is an mRNA sequence.

[0126] In certain embodiments of the methods of the disclosure, the transposase enzyme is a piggyBac or piggyBac-like transposase enzyme.

[0127] In certain embodiments of the methods of the disclosure, the transposase enzyme is a piggyBac or a piggyBac-like transposase enzyme. The piggyBac (PB) or piggyBac-like transposase enzyme may comprise or consist of an amino acid sequence at least 5%, 10%, 15%, 20%, 25%, 30%, 35%, 40%, 45%, 50%, 55%, 60%, 65%, 70%, 75%, 80%, 85%, 90%, 95%, 99% or any percentage in between identical to:

| (SEQ ID NO: 14487) | |
|---|---|
| 1 | MGSSLDDEHI LSALLQSDDE LVGEDSDSEI SDHVSEDDVQ SDTEEAFIDE VHEVQPTSSG |
| 61 | SEILDEQNVI EQPGSSLASN RILTLPQRTI RGKNKHCWST SKSTRRSRVS ALNIVRSQRG |
| 121 | PTRMCRNIYD PLLCFKLFFT DEIISEIVKW TNAEISLKRR ESMTGATFRD TNEDEIYAFF |
| 181 | GILVMTAVRK DNHMSTDDLF DRSLSMVYVS VMSRDRFDFL IRCLRMDDKS IRPTLRENDV |
| 241 | FTPVRKIWDL FIHQCIQNYT PGAHLTIDEQ LLGFRGRCPF RMYIPNKPSK YGIKILMMCD |
| 301 | SGTKYMINGM PYLGRGTQTN GVPLGEYYVK ELSKPVHGSC RNITCDNWFT SIPLALNLLQ |
| 361 | EPYKLTIVGT VRSNKREIPE VLKNSRSRPV GTSMFCFDGP LTLVSYKPKP AKMVYLLSSC |
| 421 | DEDASINEST GKPQMVMYYN QTKGGVDTLD QMCSVMTCSR KTNRWPMALL YGMINIACIN |
| 481 | SFIIYSHNVS SKGEKVQSRK KFMRNLYMSL TSSFMRKRLE APTLKPYLRD NISNILPNEV |
| 541 | PGTSDDSTEE PVMKKRTYCT YCPSKIRRKA NASCKKCKKV ICREHNIDMC QSCF. |

[0128] In certain embodiments of the methods of the disclosure, the transposase enzyme is a piggyBac or piggyBac-like transposase enzyme that comprises or consists of an amino acid sequence having an amino acid substitution at one or more of positions 30, 165, 282, or 538 of the sequence:

| (SEQ ID NO: 14487) | |
|---|---|
| 1 | MGSSLDDEHI LSALLQSDDE LVGEDSDSEI SDHVSEDDVQ SDTEEAFIDE VHEVQPTSSG |
| 61 | SEILDEQNVI EQPGSSLASN RILTLPQRTI RGKNKHCWST SKSTRRSRVS ALNIVRSQRG |
| 121 | PTRMCRNIYD PLLCFKLFFT DEIISEIVKW TNAEISLKRR ESMTGATFRD TNEDEIYAFF |
| 181 | GILVMTAVRK DNHMSTDDLF DRSLSMVYVS VMSRDRFDFL IRCLRMDDKS IRPTLRENDV |
| 241 | FTPVRKIWDL FIHQCIQNYT PGAHLTIDEQ LLGERGRCPF RMYIPNKPSK YGIKILMMCD |
| 301 | SGTKYMINGM PYLGRGTQTN GVPLGEYYVK ELSKPVHGSC RNITCDNWFT SIPLAKNLLQ |
| 361 | EPYKLTIVGT VRSNKREIPE VLKNSRSRPV GTSMFCFDGP LTLVSYKPKP AKMVYLLSSC |
| 421 | DEDASINEST GKPQMVNYYN QTKGGVDTLD QMCSVMTCSR KTNRWPMALL YGMINIACIN |
| 481 | SFIIYSHNVS SKGEKVQSRK KFMRNLYMSL TSSFMRKRLE APTLKRYLRD NISNILPNEV |
| 541 | PGTSDDSTEE PVMKKRTYCT YCPSKIRRKA NASCKKCKKV ICREHNIDMC QSCF. |

[0129] In certain embodiments, the transposase enzyme is a piggyBac or piggyBac-like transposase enzyme that comprises or consists of an amino acid sequence having an amino acid substitution at two or more of positions 30, 165, 282, or 538 of the sequence of SEQ ID NO: 14487. In certain embodiments, the transposase enzyme is a piggyBac or piggyBac-like transposase enzyme that comprises or consists of an amino acid sequence having an amino acid substitution at three or more of positions 30, 165, 282, or 538 of the sequence of SEQ ID NO: 14487. In certain embodiments, the transposase enzyme is a piggyBac or piggyBac-like transposase enzyme that comprises or consists of an amino acid sequence having an amino acid substitution at each of the following positions 30, 165, 282, and 538 of the sequence of SEQ ID NO: 14487. In certain embodiments, the amino acid substitution at position 30 of the sequence of SEQ ID NO: 14487 is a substitution of a valine (V) for an isoleucine (I). In certain embodiments, the amino acid substitution at position 165 of the sequence of SEQ ID NO: 14487 is a substitution of a serine(S) for a glycine (G). In certain embodiments, the amino acid substitution at position 282 of the sequence of SEQ ID NO: 14487 is a substitution of a valine (V) for a methionine (M). In certain embodiments, the amino acid substitution at position 538 of the sequence of SEQ ID NO: 14487 is a substitution of a lysine (K) for an asparagine (N).

[0130] In certain embodiments of the methods of the disclosure, the transposase enzyme is a Super piggyBac™ (SPB) or piggyBac-like transposase enzyme. In certain embodiments, the Super piggyBac™ (SPB) or piggyBac-like transposase enzyme of the disclosure may comprise or consist of the amino acid sequence of the sequence of SEQ ID NO: 14487 wherein the amino acid substitution at position 30 is a substitution of a valine (V) for an isoleucine (I), the amino acid substitution at position 165 is a substitution of a serine(S) for a glycine (G), the amino acid substitution at position 282 is a substitution of a valine (V) for a methionine (M), and the amino acid substitution at position 538 is a substitution of a lysine (K) for an asparagine (N). In certain embodiments, the Super piggyBac™ (SPB) or piggyBac-like transposase enzyme may comprise or consist of an amino acid sequence at least 5%, 10%, 15%, 20%, 25%, 30%, 35%, 40%, 45%, 50%, 55%, 60%, 65%, 70%, 75%, 80%, 85%, 90%, 95%, 99% or any percentage in between identical to:

| (SEQ ID NO: 14484) | |
|---|---|
| 1 | MGSSLDDEHI LSALLQSDDE LVGEDSDSEV SDHVSEDDVQ SDTEEAFIDE VHEVQPTSSG |
| 61 | SEILDEQNVI EQPGSSLASN RILTLPQRTI RGKNKHCWST SKSTRRSRVS ALNIVRSQRG |
| 121 | PTRMCRNIYD PLLCFKLFFT DEIISEIVKW TNAEISLKRR ESMTSATFRD TNEDEIYAFF |
| 181 | GILVMTAVRK DNHMSTDDLF DRSLSMVYVS VMSRDRFDFL IRCLRMDDKS IRPTLRENDV |
| 241 | FTPVRKIWDL FIHQCIQNYT PGAHLTIDEQ LLGFRGRCPF RVYIPNKPSK YGIKILMMCD |
| 301 | SGTKYMINGM PYLGRGTQTN GVPLGEYYVK ELSKPVHGSC RNITCDNWFT SIPLAKNLLQ |
| 361 | EPYKLTIVGT VRSNKREIPE VLKNSRSRPV GTSMFCFDGP LTLVSYKPKP AKMVYLLSSC |
| 421 | DEDASINEST GKPQMVMYYN QTKGGVDTLD QMCSVMTCSR KTNRWPMALL YGMINIACIN |
| 481 | SFIIYSHNVS SKGEKVQSRK KFMRNLYMSL TSSFMRKRLE APTLKRYLRD NISNILPKEV |
| 541 | PGTSDDSTEE PVMKKRTYCT YCPSKIRRKA NASCKKCKKV ICREHNIDMC QSCF. |

[0131] In certain embodiments of the methods of the disclosure, including those embodiments wherein the transposase comprises the above-described mutations at positions 30, 165, 282 and/or 538, the piggyBac™, Super piggyBac™ or piggyBac-like transposase enzyme may further comprise an amino acid substitution at one or more of positions 3, 46, 82, 103, 119, 125, 177, 180, 185, 187, 200, 207, 209, 226, 235, 240, 241, 243, 258, 296, 298, 311, 315, 319, 327, 328, 340, 421, 436, 456, 470, 486, 503, 552, 570 and 591 of the sequence of SEQ ID NO: 14487 or SEQ ID NO: 14484. In certain embodiments, including those embodiments wherein the transposase comprises the above-described mutations at positions 30, 165, 282 and/or 538, the piggyBac™, Super piggyBac™ or piggyBac-like transposase enzyme may further comprise an amino acid substitution at one or more of positions 46, 119, 125, 177, 180, 185, 187, 200, 207, 209, 226, 235, 240, 241, 243, 296, 298, 311, 315, 319, 327, 328, 340, 421, 436, 456, 470, 485, 503, 552 and 570. In certain embodiments, the amino acid substitution at position 3 of SEQ ID NO: 14487 or SEQ ID NO: 14484 is a substitution of an asparagine (N) for a serine(S). In certain embodiments, the amino acid substitution at position 46 of SEQ ID NO: 14487 or SEQ ID NO: 14484 is a substitution of a serine(S) for an alanine (A). In certain embodiments, the amino acid substitution at position 46 of SEQ ID NO: 14487 or SEQ ID NO: 14484 is a substitution of a threonine (T) for an alanine (A). In certain embodiments, the amino acid substitution at position 82 of SEQ ID NO: 14487 or SEQ ID NO: 14484 is a substitution of a tryptophan (W) for an isoleucine (I). In certain embodiments, the amino acid substitution at position 103 of SEQ ID NO: 14487 or SEQ ID NO: 14484 is a substitution of a proline (P) for a serine(S). In certain embodiments, the amino acid substitution at position 119 of SEQ ID NO: 14487 or SEQ ID NO: 14484 is a substitution of a proline (P) for an arginine (R). In certain embodiments, the amino acid substitution at position 125 of SEQ ID NO: 14487 or SEQ ID NO: 14484 is a substitution of an alanine (A) a cysteine (C). In certain embodiments, the amino acid substitution at position 125 of SEQ ID NO: 14487 or SEQ ID NO: 14484 is a substitution of a leucine (L) for a cysteine (C). In certain embodiments, the amino acid substitution at position 177 of SEQ ID NO: 14487 or SEQ ID NO: 14484 is a substitution of a lysine (K) for a tyrosine (Y). In certain embodiments, the amino acid substitution at position 177 of SEQ ID NO: 14487 or SEQ ID NO: 14484 is a substitution of a histidine (H) for a tyrosine (Y). In certain embodiments, the amino acid substitution at position 180 of SEQ ID NO: 14487 or SEQ ID NO: 14484 is a substitution of a leucine (L) for a phenylalanine (F). In certain embodiments, the amino acid substitution at position 180 of SEQ ID NO: 14487 or SEQ ID NO: 14484 is a substitution of an isoleucine (I) for a phenylalanine (F). In certain embodiments, the amino acid substitution at position 180 of SEQ ID NO: 14487 or SEQ ID NO: 14484 is a substitution of a valine (V) for a phenylalanine (F). In certain embodiments, the amino acid substitution at position 185 of SEQ ID NO: 14487 or SEQ ID NO: 14484 is a substitution of a leucine (L) for a methionine (M). In certain embodiments, the amino acid substitution at position 187 of SEQ ID NO: 14487 or SEQ ID NO: 14484 is a substitution of a glycine (G) for an alanine (A). In certain embodiments, the amino acid substitution at position 200 of SEQ ID NO: 14487 or SEQ ID NO: 14484 is a substitution of a tryptophan (W) for a phenylalanine (F). In certain embodiments, the amino acid substitution at position 207 of SEQ ID NO: 14487 or SEQ ID NO: 14484 is a substitution of a proline (P) for a valine (V). In certain embodiments, the amino acid substitution at position 209 of SEQ ID NO: 14487 or SEQ ID NO: 14484 is a substitution of a phenylalanine (F) for a valine (V). In certain embodiments, the amino acid substitution at position 226 of SEQ ID NO: 14487 or SEQ ID NO: 14484 is a substitution of a phenylalanine (F) for a methionine (M). In certain embodiments, the amino acid substitution at position 235 of SEQ ID NO: 14487 or SEQ ID NO: 14484 is a substitution of an arginine (R) for a leucine (L). In certain embodiments, the amino acid substitution at position 240 of SEQ ID NO: 14487 or SEQ ID NO: 14484 is a substitution of a lysine (K) for a valine (V). In certain embodiments, the amino acid substitution at position 241 of SEQ ID NO: 14487 or SEQ ID NO: 14484 is a substitution of a leucine (L) for a phenylalanine (F). In certain embodiments, the amino acid substitution at position 243 of SEQ ID NO: 14487 or SEQ ID NO: 14484 is a substitution of a lysine (K) for a proline (P). In certain embodiments, the amino acid substitution at position 258 of SEQ ID NO: 14487 or SEQ ID NO: 14484 is a substitution of a serine(S) for an asparagine (N). In certain embodiments, the amino acid substitution at position 296 of SEQ ID NO: 14487 or SEQ ID NO: 14484 is a substitution of a tryptophan (W) for a leucine (L). In certain embodiments, the amino acid substitution at position 296 of SEQ ID NO: 14487 or SEQ ID NO: 14484 is a substitution of a tyrosine (Y) for a leucine (L). In certain embodiments, the amino acid substitution at position 296 of SEQ ID NO: 14487 or SEQ ID NO: 14484 is a substitution of a phenylalanine (F) for a leucine (L). In certain embodiments, the amino acid substitution at position 298 of SEQ ID NO: 14487 or SEQ ID NO: 14484 is a substitution of a leucine (L) for a methionine (M). In certain embodiments, the amino acid substitution at position 298 of SEQ ID NO: 14487 or SEQ ID NO: 14484 is a substitution of an alanine (A) for a methionine (M). In certain embodiments, the amino acid substitution at position 298 of SEQ ID NO: 14487 or SEQ ID NO: 14484 is a substitution of a valine (V) for a methionine (M). In certain embodiments, the amino acid substitution at position 311 of SEQ ID NO: 14487 or SEQ ID NO: 14484 is a substitution of an isoleucine (I) for a proline (P). In certain embodiments, the amino acid substitution at position 311 of SEQ ID NO: 14487 or SEQ ID NO: 14484 is a substitution of a valine for a proline (P). In certain embodiments, the amino acid substitution at position 315 of SEQ ID NO: 14487 or SEQ ID NO: 14484 is a substitution of a lysine (K) for an arginine (R). In certain embodiments, the amino acid substitution at position 319 of SEQ ID NO: 14487 or SEQ ID NO: 14484 is a substitution of a glycine (G) for a threonine (T). In certain embodiments, the amino acid substitution at position 327 of SEQ ID NO: 14487 or SEQ ID NO: 14484 is a substitution of an arginine (R) for a tyrosine (Y). In certain embodiments, the amino acid substitution at position 328 of SEQ ID NO: 14487 or SEQ ID NO: 14484 is a substitution of a valine (V) for a tyrosine (Y). In certain embodiments, the amino acid substitution at position 340 of SEQ ID NO: 14487 or SEQ ID NO: 14484 is a substitution of a glycine (G) for a cysteine (C). In certain embodiments, the amino acid substitution at position 340 of SEQ ID NO: 14487 or SEQ ID NO: 14484 is a substitution of a leucine (L) for a cysteine (C). In certain embodiments, the amino acid substitution at position 421 of SEQ ID NO: 14487 or SEQ ID NO: 14484 is a substitution of a histidine (H) for the aspartic acid (D). In certain embodiments, the amino acid substitution at position 436 of SEQ ID NO: 14487 or SEQ ID NO: 14484 is a substitution of an isoleucine (I) for a valine (V). In certain embodiments, the amino acid substitution at position 456 of SEQ ID NO: 14487 or SEQ ID NO: 14484 is a substitution of a tyrosine (Y) for a methionine (M). In certain embodiments, the amino acid substitution at position 470 of SEQ ID NO: 14487 or SEQ ID NO: 14484 is a substitution of a phenylalanine (F) for a leucine (L). In certain embodiments, the amino acid substitution at position 485 of SEQ ID NO: 14487 or SEQ ID NO: 14484 is a substitution of a lysine (K) for a serine(S). In certain embodiments, the amino acid substitution at position 503 of SEQ ID NO: 14487 or SEQ ID NO: 14484 is a substitution of a leucine (L) for a methionine (M). In certain embodiments, the amino acid substitution at position 503 of SEQ ID NO: 14487 or SEQ ID NO: 14484 is a substitution of an isoleucine (I) for a methionine (M). In certain embodiments, the amino acid substitution at position 552 of SEQ ID NO: 14487 or SEQ ID NO: 14484 is a substitution of a lysine (K) for a valine (V). In certain embodiments, the amino acid substitution at position 570 of SEQ ID NO: 14487 or SEQ ID NO: 14484 is a substitution of a threonine (T) for an alanine (A). In certain embodiments, the amino acid substitution at position 591 of SEQ ID NO: 14487 or SEQ ID NO: 14484 is a substitution of a proline (P) for a glutamine (Q). In certain embodiments, the amino acid substitution at position 591 of SEQ ID NO: 14487 or SEQ ID NO: 14484 is a substitution of an arginine (R) for a glutamine (Q).

[0132] In certain embodiments of the methods of the disclosure, including those embodiments wherein the transposase comprises the above-described mutations at positions 30, 165, 282 and/or 538, the piggyBac™ or piggyBac-like transposase enzyme or may comprise or the Super piggyBac™ transposase enzyme may further comprise an amino acid substitution at one or more of positions 103, 194, 372, 375, 450, 509 and 570 of the sequence of SEQ ID NO: 14487 or SEQ ID NO: 14484. In certain embodiments of the methods of the disclosure, including those embodiments wherein the transposase comprises the above-described mutations at positions 30, 165, 282 and/or 538, the piggyBac™ or piggyBac-like transposase enzyme may comprise or the Super piggyBac™ transposase enzyme may further comprise an amino acid substitution at two, three, four, five, six or more of positions 103, 194, 372, 375, 450, 509 and 570 of the sequence of SEQ ID NO: 14487 or SEQ ID NO: 14484. In certain embodiments, including those embodiments wherein the transposase comprises the above-described mutations at positions 30, 165, 282 and/or 538, the piggyBac™ or piggyBac-like transposase enzyme may comprise or the Super piggyBac™ transposase enzyme may further comprise an amino acid substitution at positions 103, 194, 372, 375, 450, 509 and 570 of the sequence of SEQ ID NO: 14487 or SEQ ID NO: 14484. In certain embodiments, the amino acid substitution at position 103 of SEQ ID NO: 14487 or SEQ ID NO: 14484 is a substitution of a proline (P) for a serine(S). In certain embodiments, the amino acid substitution at position 194 of SEQ ID NO: 14487 or SEQ ID NO: 14484 is a substitution of a valine (V) for a methionine (M). In certain embodiments, the amino acid substitution at position 372 of SEQ ID NO: 14487 or SEQ ID NO: 14484 is a substitution of an alanine (A) for an arginine (R). In certain embodiments, the amino acid substitution at position 375 of SEQ ID NO: 14487 or SEQ ID NO: 14484 is a substitution of an alanine (A) for a lysine (K). In certain embodiments, the amino acid substitution at position 450 of SEQ ID NO: 14487 or SEQ ID NO: 14484 is a substitution of an asparagine (N) for an aspartic acid (D). In certain embodiments, the amino acid substitution at position 509 of SEQ ID NO: 14487 or SEQ ID NO: 14484 is a substitution of a glycine (G) for a serine(S). In certain embodiments, the amino acid substitution at position 570 of SEQ ID NO: 14487 or SEQ ID NO: 14484 is a substitution of a serine(S) for an asparagine (N). In certain embodiments, the piggyBac™ or piggyBac-like transposase enzyme may comprise a substitution of a valine (V) for a methionine (M) at position 194 of SEQ ID NO: 14487. In certain embodiments, including those embodiments wherein the piggyBac™ or piggyBac-like transposase enzyme may comprise a substitution of a valine (V) for a methionine (M) at position 194 of SEQ ID NO: 14487, the piggyBac™ or piggyBac-like transposase enzyme may further comprise an amino acid substitution at positions 372, 375 and 450 of the sequence of SEQ ID NO: 14487 or SEQ ID NO: 14484. In certain embodiments, the piggyBac™ or piggyBac-like transposase enzyme may comprise a substitution of a valine (V) for a methionine (M) at position 194 of SEQ ID NO: 14487, a substitution of an alanine (A) for an arginine (R) at position 372 of SEQ ID NO: 14487, and a substitution of an alanine (A) for a lysine (K) at position 375 of SEQ ID NO: 14487. In certain embodiments, the piggyBac™ or piggyBac-like transposase enzyme may comprise a substitution of a valine (V) for a methionine (M) at position 194 of SEQ ID NO: 14487, a substitution of an alanine (A) for an arginine (R) at position 372 of SEQ ID NO: 14487, a substitution of an alanine (A) for a lysine (K) at position 375 of SEQ ID NO: 14487 and a substitution of an asparagine (N) for an aspartic acid (D) at position 450 of SEQ ID NO: 14487.

[0133] In certain embodiments, the piggyBac or piggyBac-like transposase enzyme is isolated or derived from an insect. In certain embodiments, the insect is Trichoplusia ni (GenBank Accession No. AAA87375; SEQ ID NO: 17083), Argyrogramma agnata (GenBank Accession No. GU477713; SEQ ID NO: 17084, SEQ ID NO: 17085), Anopheles gambiae (GenBank Accession No. XP_312615 (SEQ ID NO: 17086); GenBank Accession No. XP_320414 (SEQ ID NO: 17087); GenBank Accession No. XP_310729 (SEQ ID NO: 17088)), Aphis gossypii (GenBank Accession No. GU329918; SEQ ID NO: 17089, SEQ ID NO: 17090), Acyrthosiphon pisum (GenBank Accession No. XP_001948139; SEQ ID NO: 17091), Agrotis ipsilon (GenBank Accession No. GU477714; SEQ ID NO: 17092, SEQ ID NO: 17093), Bombyx mori (GenBank Accession No. BAD11135; SEQ ID NO: 17094), Chilo suppressalis (GenBank Accession No. JX294476; SEQ ID NO: 17095, SEQ ID NO: 17096), Drosophila melanogaster (GenBank Accession No. AAL39784; SEQ ID NO: 17097), Helicoverpa armigera (GenBank Accession No. ABS18391; SEQ ID NO: 17098), Heliothis virescens (GenBank Accession No. ABD76335; SEQ ID NO: 17099), Macdunnoughia crassisigna (GenBank Accession No. EU287451; SEQ ID NO: 17100, SEQ ID NO: 17101), Pectinophora gossypiella (GenBank Accession No. GU270322; SEQ ID NO: 17102, SEQ ID NO: 17103), Tribolium castaneum (GenBank Accession No. XP_001814566; SEQ ID NO: 17104), Ctenoplusia agnata (also called Argyrogramma agnata), Messour bouvieri, Megachile rotundata, Bombus impatiens, Mamestra brassicae, Mayetiola destructor or Apis mellifera.

[0134] In certain embodiments, the piggyBac or piggyBac-like transposase enzyme is isolated or derived from an insect. In certain embodiments, the insect is Trichoplusia ni (AAA87375).

[0135] In certain embodiments, the piggyBac or piggyBac-like transposase enzyme is isolated or derived from an insect. In certain embodiments, the insect is Bombyx mori (BAD11135).

[0136] In certain embodiments, the piggyBac or piggyBac-like transposase enzyme is isolated or derived from a crustacean. In certain embodiments, the crustacean is Daphnia pulicaria (AAM76342, SEQ ID NO: 17105).

[0137] In certain embodiments, the piggyBac or piggyBac-like transposase enzyme is isolated or derived from a vertebrate. In certain embodiments, the vertebrate is Xenopus tropicalis (GenBank Accession No. BAF82026; SEQ ID NO: 17106), Homo sapiens (GenBank Accession No. NP_689808; SEQ ID NO: 17107), Mus musculus (GenBank Accession No. NP_741958; SEQ ID NO: 17108), Macaca fascicularis (GenBank Accession No. AB179012; SEQ ID NO: 17108, SEQ ID NO: 17109), Rattus norvegicus (GenBank Accession No. XP_220453; SEQ ID NO: 17110) or Myotis lucifugus.

[0138] In certain embodiments, the piggyBac or piggyBac-like transposase enzyme is isolated or derived from a urochordate. In certain embodiments, the urochordate is Ciona intestinalis (GenBank Accession No. XP_002123602; SEQ ID NO: 17111).

[0139] In certain embodiments, the piggyBac or piggyBac-like transposase inserts a transposon at the sequence 5′-TTAT-3′ within a chromosomal site (a TTAT target sequence).

[0140] In certain embodiments, the piggyBac or piggyBac-like transposase inserts a transposon at the sequence 5′-TTAA-3′ within a chromosomal site (a TTAA target sequence).

[0141] In certain embodiments, the target sequence of the piggyBac or piggyBac-like transposon comprises or consists of 5′-CTAA-3′, 5′-TTAG-3′, 5′-ATAA-3′, 5′-TCAA-3′, 5′AGTT-3′, 5′-ATTA-3′, 5′-GTTA-3′, 5′-TTGA-3′, 5′-TTTA-3′, 5′-TTAC-3′, 5′-ACTA-3′, 5′-AGGG-3′, 5′-CTAG-3′, 5′-TGAA-3′, 5′-AGGT-3′, 5′-ATCA-3′, 5′-CTCC-3′, 5′-TAAA-3′, 5′-TCTC-3′, 5′TGAA-3′, 5′-AAAT-3′, 5′-AATC-3′, 5′-ACAA-3′, 5′-ACAT-3′, 5′-ACTC-3′, 5′-AGTG-3′, 5′-ATAG-3′, 5′-CAAA-3′, 5′-CACA-3′, 5′-CATA-3′, 5′-CCAG-3′, 5′-CCCA-3′, 5′-CGTA-3′, 5′-GTCC-3′, 5′-TAAG-3′, 5′-TCTA-3′, 5′-TGAG-3′, 5′-TGTT-3′, 5′-TTCA-3′5′-TTCT-3′ and 5′-TTTT-3′.

[0142] In certain embodiments of the methods of the disclosure, the transposase enzyme is a piggyBac or piggyBac-like transposase enzyme. In certain embodiments, the piggyBac or piggyBac-like transposase enzyme is isolated or derived from Bombyx mori. The piggyBac or piggyBac-like transposase enzyme may comprise or consist of an amino acid sequence at least 5%, 10%, 15%, 20%, 25%, 30%, 35%, 40%, 45%, 50%, 55%, 60%, 65%, 70%, 75%, 80%, 85%, 90%, 95%, 99% or any percentage in between identical to:

| (SEQ ID NO: 14504) | |
|---|---|
| 1 | MDIERQEERI RAMLEEELSD YSDESSSEDE TDHCSEHEVN YDTEEERIDS VDVPSNSRQE |
| 61 | EANAIIANES DSDPDDDLPL SLVRQRASAS RQVSGPFYTS KDGTKWYKNC QRPNVRLRSE |
| 121 | NIVTEQAQVK NIARDASTEY ECWNIFVTSD MLQEILTHTN SSIRHRQTKT AAENSSAETS |
| 181 | FYMQETTLCE LKALIALLYL AGLIKSNRQS LKDLWRTDGT GVDIFRTTMS LQRFQFLQNN |
| 241 | IRFDDKSTRD ERKQTDNMAA FRSIFDQFVQ CCQNAYSPSE FLTIDEMLLS FRGRCLFRVY |
| 301 | IPNKPAKYGI KILALVDAKN FDVVNLEVYA GKQPSGPYAV SNRPFEVVER LIQPVARSHR |
| 361 | NVTFDNWFTG YELMLHLLNE YRLTSVGTVR KNKRQIPESF IRTDRQPNSS VFGFQKDITL |
| 421 | VSYAPKKNKV VVVMSTMHHD NSIDESTGEK QKPEMITFYN STKAGVDVVD ELSANYNVSR |
| 481 | NSKRWPMTLF YGVLNMAAIN ACIIYRANKN VTIKRTEFIR SLGLSMIYEH LHSRNKKKNI |
| 541 | PTYLRQRIEK QLGEPSPRHV NVPGRYVRCQ DCPYKKDRKT KHSCNACAKP ICMEHAKFLC |
| 601 | ENCAELDSSL. |

[0143] The piggyBac (PB) or piggyBac-like transposase enzyme may comprise or consist of an amino acid sequence at least 5%, 10%, 15%, 20%, 25%, 30%, 35%, 40%, 45%, 50%, 55%, 60%, 65%, 70%, 75%, 80%, 85%, 90%, 95%, 99% or any percentage in between identical to:

| (SEQ ID NO: 14505) | |
|---|---|
| 1 | MDIERQEERI RAMLEEELSD YSDESSSEDE TDHCSEHEVN YDTEEERIDS VDVPSNSRQE |
| 61 | EANAIIANES DSDPDDDLPL SLVRQRASAS RQVSGPFYTS KDGTKWYKNC QRPNVRLRSE |
| 121 | NIVTEQAQVK NIARDASTEY ECWNIFVTSD MLQEILTHTN SSIRHRQTKT AAENSSAETS |
| 181 | FYMQETTLCE LKALIALLYL AGLIKSNRQS LKDLWRTDGT GVDIFRTTMS LQRFQFLQNN |
| 241 | IRFDDKSTRD ERKQTDNMAA FRSIFDQFVQ CCQNAYSPSE FLTIDEMLLS FRGRCLFRVY |
| 301 | IPNKPAKYGI KILALVDAKN FYVVNLEVYA GKQPSGPYAV SNRPFEVVER LIQPVARSHR |
| 361 | NVTFDNWFTG YELMLHLLNE YRLTSVGTVR KNKRQIPESF IRTDRQPNSS VFGFQKDITL |
| 421 | VSYAPKKNKV VVVMSTMHHD NSIDESTGEK QKPEMITFYN STKAGVDVVD ELCANYNVSR |
| 481 | NSKRWPMTLF YGVLNMAAIN ACIIYRTNKN VTIKRTEFIR SLGLSMIYEH LHSRNKKKNI |
| 541 | PTYLRQRIEK QLGEPSPRHV NVPGRYVRCQ DCPYKKDRKT KRSCNACAKP ICMEHAKFLC |
| 601 | ENCAELDSSL. |

[0144] In certain embodiments, the piggyBac or piggyBac-like transposase is fused to a nuclear localization signal. In certain embodiments, the amino acid sequence of the piggyBac or piggyBac-like transposase fused to a nuclear localization signal is encoded by a polynucleotide sequence comprising:

| (SEQ ID NO: 14629) | |
|---|---|
| 1 | atggcaccca aaaagaaacg taaagtgatg gacattgaaa gacaggaaga aagaatcagg |
| 61 | gcgatgctcg aagaagaact gagcgactac tccgacgaat cgtcatcaga ggatgaaacc |
| 121 | gaccactgta gcgagcatga ggttaactac gacaccgagg aggagagaat cgactctgtg |
| 181 | gatgtgccct ccaactcacg ccaagaagag gccaatgcaa ttatcgcaaa cgaatcggac |
| 241 | agcgatccag acgatgatct gccactgtcc ctcgtgcgcc agcgggccag cgcttcgaga |
| 301 | caagtgtcag gtccattcta cacttcgaag gacggcacta agtggtacaa gaattgccag |
| 361 | cgacctaacg tcagactccg ctccgagaat atcgtgaccg aacaggctca ggtcaagaat |
| 421 | atcgcccgcg acgcctcgac tgagtacgag tgttggaata tcttcgtgac ttcggacatg |
| 481 | ctgcaagaaa ttctgacgca caccaacagc tcgattaggc atcgccagac caagactgca |
| 541 | gcggagaact catcggccga aacctccttc tatatgcaag agactactct gtgcgaactg |
| 601 | aaggcgctga ttgcactgct gtacttggcc ggcctcatca aatcaaatag gcagagcctc |
| 661 | aaagatctct ggagaacgga tggaactgga gtggatatct ttcggacgac tatgagcttg |
| 721 | cagcggttcc agtttctgca aaacaatatc agattcgacg acaagtccac ccgggacgaa |
| 781 | aggaaacaga ctgacaacat ggctgcgttc cggtcaatat tcgatcagtt tgtgcagtgc |
| 841 | tgccaaaacg cttatagccc atcggaattc ctgaccatcg acgaaatgct tctctccttc |
| 901 | cgggggcgct gcctgttccg agtgtacatc ccgaacaagc cggctaaata cggaatcaaa |
| 961 | atcctggccc tggtggacgc caagaatttc tacgtcgtga atctcgaagt gtacgcagga |
| 1021 | aagcaaccgt cgggaccgta cgctgtttcg aaccgcccgt ttgaagtcgt cgagcggctt |
| 1081 | attcagccgg tggccagatc ccaccgcaat gttaccttcg acaattggtt caccggctac |
| 1141 | gagctgatgc ttcaccttat gaacgagtac cggctcacta gcgtggggac tgtcaggaag |
| 1201 | aacaagcggc agatcccaga atccttcatc cgcaccgacc gccagcctaa ctcgtccgtg |
| 1261 | ttcggatttc aaaaggatat cacgcttgtc tcgtacgccc ccaagaaaaa caaggtcgtg |
| 1321 | gtcgtgatga gcaccatgca tcacgacaac agcatcgacg agtcaaccgg agaaaagcaa |
| 1381 | aagcccgaga tgatcacctt ctacaattca actaaggccg gcgtcgacgt cgtggatgaa |
| 1441 | ctgtgcgcga actataacgt gtcccggaac tctaagcggt ggcctatgac tctcttctac |
| 1501 | ggagtgctga atatggccgc aatcaacgcg tgcatcatct accgcaccaa caagaacgtg |
| 1561 | accatcaagc gcaccgagtt catcagatcg ctgggtttga gcatgatcta cgagcacctc |
| 1621 | cattcacgga acaagaagaa gaatatccct acttacctga ggcagcgtat cgagaagcag |
| 1681 | ttgggagaac caagcccgcg ccacgtgaac gtgccggggc gctacgtgcg gtgccaagat |
| 1741 | tgcccgtaca aaaaggaccg caaaaccaaa agatcgtgta acgcgtgcgc caaacctatc |
| 1801 | tgcatggagc atgccaaatt tctgtgtgaa aattgtgctg aactcgattc ctccctg. |

[0145] In certain embodiments, the piggyBac or piggyBac-like transposase is hyperactive. A hyperactive piggyBac or piggyBac-like transposase is a transposase that is more active than the naturally occurring variant from which it is derived. In certain embodiments, the hyperactive piggyBac or piggyBac-like transposase enzyme is isolated or derived from Bombyx mori. In certain embodiments, the piggyBac or piggyBac-like transposase is a hyperactive variant of SEQ ID NO: 14505. In certain embodiments, the hyperactive piggyBac or piggyBac-like transposase comprises a sequence that is at least 90% identical to:

| (SEQ ID NO: 14576) | |
|---|---|
| 1 | MDIERQEERI RAMLEEELSD YSDESSSEDE TDHCSEHEVN YDTEEERIDS VDVPSNSRQE |
| 61 | EANAIIANES DSDPDDDLPL SLVRQRASAS RQMSGPHYTS KDGTKWYKNC QRPNVRLRSE |
| 121 | NIVTEQAQVK NIARDASTEY ECWNIFVTSD MLQEILTHTN SSIRWRQTKT AAENSSASTS |
| 181 | FYMQETTLCE LKALIGLLYI AGLIKSNRQS LKDLWRTDGT GVDIFRTTMS LQRFQFLQNN |
| 241 | IRFDDKSTRD ERKQTDNMAA FRSIFDQFVQ SCQNAYSPSE FLTIDEMLLS FRGRCLFRVY |
| 301 | IPNKPAKYGI KILALVDAKN FYVKNLEVYA GKQPSGPYAV SNRPFEVVER LIQPVARSHR |
| 361 | NVTFDNWFTG YELMLHLLNE YRLTSVGTVR KNKRQIPESF IRTDRQPNSS VFGFQKDITL |
| 421 | VSYARKKNKV VVVMSTMHHD NSIDESTGEK QKPEMITFYN STKAGVDVVD ELCANYNVSR |
| 481 | NSKRWPMTLF YGVLNMAAIN ACIIYRTNKN VTIKRTEFIR SLGLSMIYEH LHSRNKKKNI |
| 541 | PTYLKRQIEK QLGEPSPRHV NVPGRYVRCQ DCPYKKDRKT KRSCNACAKP ICMEHAKFLC |
| 601 | ENCAELDSHL. |

[0146] In certain embodiments, the hyperactive piggyBac or piggyBac-like transposase comprises SEQ ID NO: 14576. In certain embodiments, the hyperactive piggyBac or piggyBac-like transposase comprises a sequence of:

| (SEQ ID NO: 14630) | |
|---|---|
| 1 | MDIERQEERI RAMLEEELSD YSDESSSEDE TDHCSEHEVN YDTEEERIDS VDVPSNSRQE |
| 61 | EANAIIANES DSDPDDDLPL SLVRQRASAS RQVSGPFYTS KDGTKWYKNC QRPNVRLRSE |
| 121 | NIVTEQAQVK NIARDASTEY ECWNIFVTSD MLQEILTHTN SSIRWRQTKT AAENSSAFTS |
| 181 | FYMQETTLCE LKALIGLLYI AGLIKSNRQS LKDLWRTDGT GVDIFRTTMS LQRFQFLLNN |
| 241 | IRFDDKSTRD ERKQTDNMAA FRSIFDQFVQ SCQNAYSPSE FLTIDEMLLS FRGRCLFRVY |
| 301 | IPNKPAKYGI KILALVDAKN FYVHNLEVYA GKQPSGPYAV SNRPFEVVER LIQPVARSHR |
| 361 | NVTFDNWFTG YEVMLHLLNE YRLTSVGTVR KNKRQIPESF IRTDRQPNSS VEGFQKDITL |
| 421 | VSYAPKKNKV VVVMSTMHHD NSIDESTGEK QKPEMITFYN STKAGVDVVD ELCANYNVSR |
| 481 | NSKRWPMTLF YGVLNMAAIN ACIIYRTNKN VTIKRTEFIR SLGLSMIYEH LHSRNKKKNI |
| 541 | PTYLRQRIEK QLGEPSPRHV NVPGRYVRCQ DCPYKKDRKT KRSCNACAKP ICMEHAKFLC |
| 601 | ENCAHLDS. |

[0147] In certain embodiments, the hyperactive piggyBac or piggyBac-like transposase comprises a sequence of:

| (SEQ ID NO: 14631) | |
|---|---|
| 1 | MDIERQEERI RAMLEEELSD YSDESSSEDE TDHCSEHEVN YDTEEERIDS VDVPSNSRQE |
| 61 | EANAIIANES DSDPDDDLPL SLVRQRASAS RQVSGPFYTS KDGTKWYKNC QRPNVRLRSE |
| 121 | NIVTEQAQVK NIARDASTEY ECWNIFVTSD MLQEILTHTN SSIRWRQTKT AAENSSASTS |
| 181 | FYMQETTLCE LKALIGLLYI AGLIKSNRQS LKDLWRTDGT GVDIFRTTMS LQRFQFLLNN |
| 241 | IRFDDKSTRD ERKQTDNMAA FRSIFDQFVQ SCQNAYSPSE FLTIDEMLLS FRGRCLFRVY |
| 301 | IPNKPAKYGI KILALVDAKN FYVKNLEVYA GKQPSGPYAV SNRPFEVVER LIQPVARSHR |
| 361 | NVTFDNWFTG YELMLHLLNE YRLTSVGTVR KNKRQIPESF IRTDRQPNSS VFGFQKDITL |
| 421 | VSYAPKKNKV VVVMSTMHHD NSIDESTGEK QKPEMITFYN STKAGVDVVD ELCANYNVSR |
| 481 | NSKRWPMTLF YGVLNMAAIN ACIIYRTNKN VTIKRTEFIR SLGLSMIYEH LHSRNKKKNI |
| 541 | PTYLRQRIAM QLGEPSPRHV NVPGRYVRCQ DCPYKKDRKT KRSCNACAKP ICMEHAKFLC |
| 601 | ENCAELDSSL. |

[0148] In certain embodiments, the hyperactive piggyBac or piggyBac-like transposase comprises a sequence of:

| (SEQ ID NO: 14632) | |
|---|---|
| 1 | MDIERQEERI RAMLEEELSD YSDESSSEDE TDHCSEHEVN YDTEEERIDS VDVPSNSRQE |
| 61 | EANAIIANES DSDPDDDLPL SLVRQRASAS RQVSGPFYTS KDGTKWYKNC QRPNVRLRSE |
| 121 | NIVTEQAQVK NIARDASTEY ECWNIFVTSD MLQEILTHTN SSIRWRQTKT AAENSSAETS |
| 181 | FYMQETTLCE LKALIGLLYI AGLIKSNRQS LKDLWRTDGT GVDIFRTTMS LQRFQFLLNN |
| 241 | IRFDDKSTRD ERKQTDNMAA FRSIFDQFVQ SCQNAYSPSE FLTIDEMLLS FRGRCLFRVY |
| 301 | IPNKPAKYGI KILALVDAKN FYVKNLEVYA GKQPSGPYAV SNRPFEVVER LIQPVARSHR |
| 361 | NVTFDNWFTG YELMLHLLNE YRLTSVGTVR KNKTQIPENF IRTDRQPNSS VFGFQKDITL |
| 421 | VSYAPKKNKV VVVMSTMHHD NSIDESTGEK QKPEMITFYN STKAGVDVVD ELQANYNVSR |
| 481 | NSKRWPMTLF YGVLNMAAIN ACIIYRTNKN VTIKRTEFIR SLGLSMIYEH LHSRNKKKNI |
| 541 | PTYLRQRIEK QLGEPSPRHV NVPGRYVRCQ DCPYKKDRKT KRSCNACAKP ICMEHAKFLC |
| 601 | ENCAELDSSL. |

[0149] In certain embodiments, the hyperactive piggyBac or piggyBac-like transposase comprises a sequence of:

| (SEQ ID NO: 14633) | |
|---|---|
| 1 | MDIERQEERI RAMLEEELSD YSDESSSEDE TDHCSEHEVN YDTEEERIDS VDVPSNSRQE |
| 61 | EANAIIANES DSDPDDDLPL SLVRQRASAS RQVSGPFYTS KDGTKWYKNC QRPNVRLRSE |
| 121 | NIVTEQAQVK NIARDASTEY ECWNIFVTSD MLQEILTHTN SSIRWRQTKT AAENSSAETS |
| 181 | FYMQETTLCE LKALIGLLYI AGLIKSNRQS LKDLWRTDGT GVDIFRTTMS LQRFQFLQNN |
| 241 | IRFDDKSTRD ERKQTDNMAA FRSIFDQFVQ SCQNAYSPSE FLTIDEMLLS FRGRCLFRVY |
| 301 | IPNKPAKYGI KILALVDAKN FYVKNLEVYA GKQPSGPYAV SNRPFEVVER LIQPVARSHR |
| 361 | NVTFDNWFTG YELMLHLLNE YRLTSVGTVR KNKRQIPESF IRTDRQPNSS VFGFQKDITL |
| 421 | VSYAPKKNKV VVVMSTMHHD NSIDESTGEK QKPEMITFYN STKAGVDVVD ELCANYNVSR |
| 481 | NSKRWPMTLF YGVLNMAAIN ACIIYRTNKN VTIKRTEFIR SLGLSMIYEH LHSRNKKKNI |
| 541 | PTYLRQRIEK QLGEPSPRHV NVPGRYVRCQ DCPYKKDRKT KRSCNACAKP ICMEHAKFLC |
| 601 | ENCAELDSSL. |

[0150] In certain embodiments, the hyperactive piggyBac or piggyBac-like transposase comprises a sequence of:

| (SEQ ID NO: 14634) | |
|---|---|
| 1 | MDIERQEERI RAMLEEELSD YSDESSSEDE TDHCSEHEVN YDTEEERIDS VDVPSNSRQE |
| 61 | EANAIIANES DSDPDDDLPL SLVRQRASAS RQVSGPFYTS KDGTKWYKNC QRPNVRLRSE |
| 121 | NIVTEQAQVK NIARDASTEY ECWNIFVTSD MLQEILTHTN SSIRHRQTKT AAENSSAETS |
| 181 | FYMQETTLCE LKALIALLYL AGLIKSNRQS LKDLWRTDGT GVDIFRTTMS LQRFQFLQNN |
| 241 | IRFDDKSTRD ERKQTDNMAA FRSIFDQFVQ CCQNAYSPSE FLTIDEMLLS FRGRCLFRVY |
| 301 | IPNKPAKYGI KILALVDAKN DYVVNLEVYA GKQPSGPYAV SNRPFEVVER LIQPVARSHR |
| 361 | NVTFDNWFTG YELMLHLLNE YRLTSVGTVR KNKRQIPESF IRTDRQPNSS VFGFQKDITL |
| 421 | VSYAPKKNKV VVVMSTMHHD NSIDESTGEK QKPEMITFYN STKAGVDVVD ELCANYNVSR |
| 481 | NSKRWPMTLF YGVLNMAAIN ACIIYRTNKN VTIKPTEFIR SLGLSMIYEH LHSRNKKKNI |
| 541 | PTYLRQRIEK QLGEPSSRHV NVKGRYVRCQ DCPYKKDRKT KRSCNACAKP ICMEHAKFLC |
| 601 | ENCAELDSSL. |

[0151] In certain embodiments, the hyperactive piggyBac or piggyBac-like transposase is more active than the transposase of SEQ ID NO: 14505. In certain embodiments, the hyperactive piggyBac or piggyBac-like transposase is at least 90%, at least 95%, at least 96%, at least 97%, at least 98%, or at least 99% or any percentage in between identical to SEQ ID NO: 14505.

[0152] In certain embodiments, the hyperactive piggyBac or piggyBac-like transposase comprises an amino acid substitution at a position selected from 92, 93, 96, 97, 165, 178, 189, 196, 200, 201, 211, 215, 235, 238, 246, 253, 258, 261, 263, 271, 303, 321, 324, 330, 373, 389, 399, 402, 403, 404, 448, 473, 484, 507, 523, 527, 528, 543, 549, 550, 557, 601, 605, 607, 609, 610 or a combination thereof (relative to SEQ ID NO: 14505). In certain embodiments, the hyperactive piggyBac or piggyBac-like transposase comprises an amino acid substitution of Q92A, V93L, V93M, P96G, F97H, F97C, H165E, H165W, E178S, E178H, C189P, A196G, L200I, A201Q, L211A, W215Y, G219S, Q235Y, Q235G, Q238L, K246I, K253V, M258V, F261L, S263K, C271S, N303R, F321W, F321D, V324K, V324H, A330V, L373C, L373V, V389L, S399N, R402K, T403L, D404Q, D404S, D404M, N441R, G448W, E449A, V469T, C473Q, R484K T507C, G523A, I527M, Y528K Y543I, E549A, K550M, P557S, E601V, E605H, E605W, D607H, S609H, L610I or any combination thereof. In certain embodiments, the hyperactive piggyBac or piggyBac-like transposase comprises an amino acid substitution of Q92A, V93L, V93M, P96G, F97H, F97C, H165E, H165W, E178S, E178H, C189P, A196G, L200I, A201Q, L211A, W215Y, G219S, Q235Y, Q235G, Q238L, K246I, K253V, M258V, F261L, S263K, C271S, N303R, F321W, F321D, V324K, V324H, A330V, L373C, L373V, V389L, S399N, R402K, T403L, D404Q, D404S, D404M, N441R, G448W, E449A, V469T, C473Q, R484K T507C, G523A, I527M, Y528K Y543I, E549A, K550M, P557S, E601V, E605H, E605W, D607H, S609H and L610I.

[0153] In certain embodiments, the hyperactive piggyBac or piggyBac-like transposase comprises one or more substitutions of an amino acid that is not wild type, wherein the one or more substitutions a for wild type amino acid comprises a substitution of E4X, A12X, M13X, L14X, E15X, D20X, E24X, S25X, S26X, S27X, D32X, H33X, E36X, E44X, E45X, E46X, I48X, D49X, R58X, A62X, N63X, A64X, I65X, I66X, N68X, E69X, D71X, S72X, D76X, P79X, R84X, Q85X, A87X, S88X, Q92X, V93X, S94X, G95X, P96X, F97X, Y98X, T99X, I145X, S149X, D150X, L152X, E154X, T157X, N160X, S161X, S162X, H165X, R166X, T168X, K169X, T170X, A171X, E173X, S175X, S176X, E178X, T179X, M183X, Q184X, T186X, T187X, L188X, C189X, L194X, I195X, A196X, L198X, L200X, A201X, L203X, I204X, K205X, A206X, N207X, Q209X, S210X, L211X, K212X, D213X, L214X, W215X, R216X, T217X, G219X, V222X, D223X, I224X, T227X, M229X, Q235X, L237X, Q238X, N239X, N240X, P302X, N303X, P305X, A306X, K307X, Y308X, I310X, K311X, I312X, L313X, A314X, L315X, V316X, D317X, A318X, K319X, N320X, F321X, Y322X, V323X, V324X, L326X, E327X, V328X, A330X, Q333X, P334X, S335X, G336X, P337X, A339X, V340X, S341X, N342X, R343X, P344X, F345X, E346X, V347X, E349X, I352X, Q353X, V355X, A356X, R357X, N361X, D365X, W367X, T369X, G370X, L373X, M374X, L375X, H376X, N379X, E380X, R382X, V386X, V389X, N392X, R394X, Q395X, S399X, F400X, I401X, R402XT403X, D404X, R405X, Q406X, P407X, N408X, S409X, S410X, V411X, F412X, F414X, Q415X, I418X, T419X, L420X, N428XV432X, M434X, D440X, N441X, S442X, I443X, D444X, E445X, G448X, E449X, Q451X, K452X, M455X, I456X, T457X, F458X, S461X, A464X, V466X, Q468X, V469X, E471X, L472X, C473X, A474X, K483X, W485X, T488X, L489X, Y491X, G492X, V493X, M496X, I499X, C502X, I503X, T507X, K509X, N510X, V511X, T512X, I513X, R515X, E517X, S521X, G523X, L524X, S525X, I527X, Y528X, E529X, H532X, S533X, N535X, K536X, K537X, N539X, I540X, T542X, Y543X, Q546X, E549X, K550X, Q551X, G553X, E554X, P555X, S556X, P557X, R558X, H559X, V560X, N561X, V562X, P563X, G564X, R565X, Y566X, V567X, Q570X, D571X, P573X, Y574X, K576X, K581X, S583X, A586X, A588X, E594X, F598X, L599X, E601X, N602X, C603X, A604X, E605X, L606X, D607X, S608X, S609X or L610X (relative to SEQ ID NO: 14505). A list of hyperactive amino acid substitutions can be found in U.S. Pat. No. 10,041,077, the contents of which are incorporated herein by reference in their entirety.

[0154] In certain embodiments, the piggyBac or piggyBac-like transposase is integration deficient. In certain embodiments, an integration deficient piggyBac or piggyBac-like transposase is a transposase that can excise its corresponding transposon, but that integrates the excised transposon at a lower frequency than a corresponding wild type transposase. In certain embodiments, the piggyBac or piggyBac-like transposase is an integration deficient variant of SEQ ID NO: 14505.

[0155] In certain embodiments, the excision competent, integration deficient piggyBac or piggyBac-like transposase comprises one or more substitutions of an amino acid that is not wild type, wherein the one or more substitutions a for wild type amino acid comprises a substitution of R9X, A12X, M13X, D20X, Y21K, D23X, E24X, S25X, S26X, S27X, E28X, E30X, D32X, H33X, E36X, H37X, A39X, Y41X, D42X, T43X, E44X, E45X, E46X, R47X, D49X, S50X, S55X, A62X, N63X, A64X, I66X, A67X, N68X, E69X, D70X, D71X, S72X, D73X, P74X, D75X, D76X, D77X, I78X, S81X, V83X, R84X, Q85X, A87X, S88X, A89X, S90X, R91X, Q92X, V93X, S94X, G95X, P96X, F97X, Y98X, T99X, W012X, G103X, Y107X, K108X, L117X, I122X, Q128X, I312X, D135X, S137X, E139X, Y140X, I145X, S149X, D150X, Q153X, E154X, T157X, S161X, S162X, R164X, H165X, R166X, Q167X, T168X, K169X, T170X, A171X, A172X, E173X, R174X, S175X, S176X, A177X, E178X, T179X, S180X, Y182X, Q184X, E185X, T187X, L188X, C189X, L194X, I195X, A196X, L198X, L200X, A201X, L203X, I204X, K205X, N207X, Q209X, L211X, D213X, L214X, W215X, R216X, T217X, G219X, T220X, V222X, D223X, I224X, T227X, T228X, F234X, Q235X, L237X, Q238X, N239X, N240X, N303X, K304X, I310X, I312X, L313X, A314X, L315X, V316X, D317X, A318X, K319X, N320X, F321X, Y322X, V323X, V324X, N325X, L326X, E327X, V328X, A330X, G331X, K332X, Q333X, S335X, P337X, P344X, F345X, E349X, H359X, N361X, V362X, D365X, F368X, Y371X, E372X, L373X, H376X, E380X, R382X, R382X, V386X, G387X, T388X, V389X, K391X, N392X, R394X, Q395X, E398X, S399X, F400X, I401X, R402XT403X, D404X, R405X, Q406X, P407X, N408X, S409X, S410X, Q415X, K416X, A424X, K426X, N428X, V430X, V432X, V433X, M434X, D436X, D440X, N441X, S442X, I443X, D444X, E445X, S446X, T447X, G448X, E449X, K450X, Q451X, E454X, M455X, I456X, T457X, F458X, S461X, A464X, V466X, Q468X, V469X, C473X, A474X, N475X, N477X, K483X, R484X, P486X, T488X, L489X, G492X, V493X, M496X, 1499X, I503X, Y505X, T507X, N510X, V511X, T512X, I513X, K514X, T516X, E517X, S521X, G523X, L524X, S525X, I527X, Y528X, L531X, H532X, S533X, N535X, I540X, T542X, Y543X, R545X, Q546X, E549X, L552X, G553X, E554X, P555X, S556X, P557X, R558X, H559X, V560X, N561X, V562X, P563X, G564X, V567X, Q570X, D571X, P573X, Y574X, K575X, K576X, N585X, A586X, M593X, K596X, E601X, N602X, A604X, E605X, L606X, D607X, S608X, S609X or L610X (relative to SEQ ID NO: 14505). A list of integration deficient amino acid substitutions can be found in U.S. Pat. No. 10,041,077, the contents of which are incorporated by reference in their entirety.

[0156] In certain embodiments, the integration deficient piggyBac or piggyBac-like transposase comprises a sequence of:

| (SEQ ID NO: 14606) | |
|---|---|
| 1 | MDIERQEERI RAMLEEELSD YSDESSSEDE TDHCSEHEVN YDTEEERIDS VDVPSNSRQE |
| 61 | EANAIIANES DSDPDDDLPL SLVRQRASAS RQVSSPFYTS KDGTKWYKNC QRPNVRLRSE |
| 121 | NIVTEQAQVK NIARDASTEY ECWNIFVTSD MLQEILTHTN SSIRHRQTKT AAENSSAETS |
| 181 | FYMQETTLCE LKALIALLYL AGLIKSNRQS LKDLWRKDGT GVDIFRTTMS LQRFQFLLNN |
| 241 | IRFDDISTRD ERKQTDNMAA FRSIFDQFVQ CCQNAYSPSE FLTIDEMLLS FRGRCLFRVY |
| 301 | IPNKPAKYGI KILALVDAKN FYVVNLEVYA GKQPSGPYAV SNRPFEVVER LIQPVARSHR |
| 361 | NVTFDNWFTG YELMLHLLNE YRLTSVGTVR KNKRQIPESF IRTDRQPNSS VFGFQKDITL |
| 421 | VSYAPKKNKV VVVMSTMHHD NSIDESTGEK QKPEMITFYN STKAGVDVVD ELCANYNVSR |
| 481 | NSKKWPMTLF YGVLNMAAIN ACIIYRTNKN VTIKRTEFIR SLGLSMMYEH LHSRNKKKNI |
| 541 | PTYLQQRIEK QLGEPVPRHV NVPGRYVRCQ DCPYKKDRKT KRSCNACAKP ICMEHAKFLC |
| 601 | ENCAELDSSL. |

[0157] In certain embodiments, the integration deficient piggyBac or piggyBac-like transposase comprises a sequence of:

| (SEQ ID NO: 14607) | |
|---|---|
| 1 | MDIERQEERI RAMLEEELSD YSDESSSEDE TDHCSEHEVN YDTEEERIDS VDVPSNSRQE |
| 61 | EANAIIANES DSDPDDDLPL SDVRQRASAS RQVSGPFYTS KDGTKWYKNC QRPNVRLRSE |
| 121 | NIVTEQAQVK NIARDASTEY ECWNIFVTSD MLQEILTHTN SSIRHRQTKT AAENSSAETS |
| 181 | FYMQETTLCE LKALIGLLYL AGLIKSNRQS LKDLWRTDGT GVDIFRTTMS LQRFYFLQNN |
| 241 | IRFDDKSTLD ERKQTDNMAA FRSIFDQFVQ SCQNAYSPSE FLTIDEMLLS FRGRCLFRVY |
| 301 | IPNKPAKYGI KILALVDAKN FYVVNLEVYA GKQPSGPYAV SNPRFEVVER LIQPVARSHR |
| 361 | NVTFDNWFTG YELMLHLLNE YRLTSVGTVR KNKRQIPESF IRTDRQPNSS VFGFQKDITL |
| 421 | VSYAPKKNKV VVVMSTMHHD NSIDESTGEK QKPEMITFYN STKAGVDVVD ELCANYNVSR |
| 481 | NSKRWPMTLF YGVLNMAAIN ACIIYPTNKN VTIKRTEFIR SLGLSMIYEH LHSRNKKKNI |
| 541 | PTYLRQRIEK QLGEPSPRHV NYPGRYVRCQ DCPYKKDRKT KRSCNACAKP ICMEHAKFLC |
| 601 | VNCAELDSSL. |

[0158] In certain embodiments, the piggyBac or piggyBac-like transposase that is integration deficient comprises a sequence of:

| (SEQ ID NO: 14608) | |
|---|---|
| 1 | MDIERQEERI RAMLEEELSD YSDESSSEDE TDHCSEHEVN YDTEEERIDS VDVPSNSRQE |
| 61 | EANAIIANES DSDPDDDLPL SLVPQRASAS RQVSGPFYTS KDGTKWYKNC QPPNVLRRSE |
| 121 | NIVTEQAQVK NIARDASTEY ECWNIFVTSD MLQEILTHTN SSIRHRQTKT AAENSSAETS |
| 181 | FYMQETTLCE LKALIALLYL AGLIKSNRQS LKDLWRKDGT GVDIFRTTMS LQRFQFLLNN |
| 241 | IRFDDKSTRD ERKQTDNMAA FRSIFDQFVQ CCQNAYSPSE FLTIDEMLLS FRGRCLFRVY |
| 301 | IPNKPAKYGI KILALVDAKN DYVVNLEVYA GKQPSGPYAV SNRPFEVVER LIQPVARSHR |
| 361 | NVTFDNWFTG YECMLHLLNE YRLTSVGTVR KNKRQIPESF IRTDRQPNSS VFGFQKDITL |
| 421 | VSYAPKKNKV VVVMSTMHHD NSIDESTGEK QKPEMITFYN STKAGVDVVD ELCANYNVSR |
| 421 | NSKKWPMTLF YGVLNMAAIN ACIIYRTNKN VTIKRTEFIR SLGLSMIKEH LHSRNKKKNI |
| 541 | PTYLRQRIEK QLGEPSPRHV NVPGRYVRCQ DCPYRKDRKT KRSCNACAKP ICMEHAKFLC |
| 601 | ENCAELDSSL. |

[0159] In certain embodiments, the integration deficient transposase comprises a sequence that is at least 90% identical to SEQ ID NO: 14608.

[0160] In certain embodiments, the piggyBac or piggyBac-like transposon is isolated or derived from Bombyx mori. In certain embodiments, the piggyBac or piggyBac-like transposon comprises a sequence of:

| (SEQ ID NO: 14506) | |
|---|---|
| 1 | ttatcccggc gagcatgagg cagggtatct cataccatgg taaaatttta aagttgtgta |
| 61 | ttttataaaa ttttcgtctg acaacactag cgcgctcagt agctggaggc aggagcgtgc |
| 121 | gggaggggat agtggcgtga tcgcagtgtg gcacgggaca ccggcgagat attcgtgtgc |
| 181 | aaacctgttt cgggtatgtt ataccctgcc tcattgttga cgtatttttt ttatgtaatt |
| 241 | tttccgatta ttaatttcaa ctgttttatt ggtattttta tgttatccat tgttcttttt |
| 301 | ttatgattta ctgtatcggt tgtctttcgt tcctttagtt gagttttttt ttattatttt |
| 361 | cagtttttga tcaaa. |

[0161] In certain embodiments, the piggyBac or piggyBac-like transposon comprises a sequence of:

| | |
|---|---|
| 1 | tcatattttt agtttaaaaa aataattata tgttttataa tgaaaagaat ctcattatct |
| 61 | ttcagtatta ggttgattta tattccaaag aataatattt ttgttaaatt gttgattttt |
| 121 | gtaaacctct aaatgtttgt tgctaaaatt actgtgttta agaaaaagat taataaataa |
| 181 | taataatttc ataattaaaa acttctttca ttgaatgcca ttaaataaac cattatttta |
| 241 | caaaataaga tcaacataat tgagtaaata ataataagaa caatattata gtacaacaaa |
| 301 | atatgggtat gtcataccct gccacattct tgatgtaact ttttttcacc tcatgctcgc |
| 361 | cgggttat |

[0162] In certain embodiments, the piggyBac or piggyBac-like transposon comprises a sequence of:

| (SEQ ID NO: 14508) | |
|---|---|
| 1 | ttatcccggc gagcatgagg cagggtatct cataccctgg taaaatttta aagttgtgta |
| 61 | ttttataaaa ttttggtctg acaacactag cgcgctcagt aggtggaggc aggagcgtgg |
| 121 | gggaggggat agtggcgtga tggcagtgtg gcacgggaca ccggcgagat attcgtgtgc |
| 181 | aaacctgttt cgggtatgtt ataccctgcc tcat. |

[0163] In certain embodiments, the piggyBac™ (PB) or piggyBac-like transposon comprises a sequence of:

| (SEQ ID NO: 14509) | |
|---|---|
| 1 | taaataataa taatttcata attaaaaact tctttcattg aatgccatta aataaaccat |
| 61 | tattttacaa aataagatca acataattga gtaaataata ataagaacaa tattatagta |
| 121 | caacaaaata tgggtatgtc ataccctgcc acattcttga tgtaactttt tttcacctca |
| 181 | tgctcgccgg gttat. |

[0164] In certain embodiments, the piggyBac or piggyBac-like transposon comprises a left sequence corresponding to SEQ ID NO: 14506 and a right sequence corresponding to SEQ ID NO: 14507. In certain embodiments, one piggyBac or piggyBac-like transposon end is at least 85%, at least 90%, at least 95%, at least 98%, at least 99% identical or any percentage in between identical to SEQ ID NO: 14506 and the other piggyBac or piggyBac-like transposon end is at least 85%, at least 90%, at least 95%, at least 98%, at least 99% or any percentage in between identical to SEQ ID NO: 14507. In certain embodiments, the piggyBac or piggyBac-like transposon comprises SEQ ID NO: 14506 and SEQ ID NO: 14507 or SEQ ID NO: 14509. In certain embodiments, the piggyBac or piggyBac-like transposon comprises SEQ ID NO: 14508 and SEQ ID NO: 14507 or SEQ ID NO: 14509. In certain embodiments, the left and right transposon ends share a 16 bp repeat sequence at their ends of CCCGGCGAGCATGAGG (SEQ ID NO: 14510) immediately adjacent to the 5′-TTAT-3 target insertion site, which is inverted in the orientation in the two ends. In certain embodiments, left transposon end begins with a sequence comprising 5′-TTATCCCGGCGAGCATGAGG-3 (SEQ ID NO: 14511), and the right transposon ends with a sequence comprising the reverse complement of this sequence: 5′-CCTCATGCTCGCCGGGTTAT-3′ (SEQ ID NO: 14512).

[0165] In certain embodiments, the piggyBac or piggyBac-like transposon comprises one end comprising at least 14, 16, 18, 20, 30 or 40 contiguous nucleotides of SEQ ID NO: 14506 or SEQ ID NO: 14508. In certain embodiments, the piggyBac or piggyBac-like transposon comprises one end comprising at least 14, 16, 18, 20, 30 or 40 contiguous nucleotides of SEQ ID NO: 14507 or SEQ ID NO: 14509. In certain embodiments, the piggyBac or piggyBac-like transposon comprises one end with at least 90% identity to SEQ ID NO: 14506 or SEQ ID NO: 14508. In certain embodiments, the piggyBac or piggyBac-like transposon comprises one end with at least 90% identity to SEQ ID NO: 14507 or SEQ ID NO: 14509.

[0166] In certain embodiments, the piggyBac or piggyBac-like transposon comprises a sequence of:

| (SEQ ID NO: 14515) | |
|---|---|
| 1 | ttaacccggc gagcatgagg cagggtatct cataccctgg taaaatttta aagttgtgta |
| 61 | ttttataaaa ttttcgtctg acaacactag cgcgctcagt agctggaggc aggagcgtgc |
| 121 | gggaggggat agtggcgtga tcgcagtgtg gcacgggaca ccggcgagat attcgtgtgc |
| 181 | aaacctgttt cgggtatgtt ataccctgcc tcattgttga cgtatttttt ttatgtaatt |
| 241 | tttccgatta ttaatttcaa ctgttttatt ggtattttta tgttatccat tgttcttttt |
| 301 | ttatgattta ctgtatcggt tgtctttcgt tcctttagtt gagttttttt ttattatttt |
| 361 | cagtttttga tcaaa. |

[0167] In certain embodiments, the piggyBac or piggyBac-like transposon comprises a sequence of:

| (SEQ ID NO: 14516) | |
|---|---|
| 1 | tcatattttt agtttaaaaa aataattata tgttttataa tgaaaagaat ctcattatct |
| 61 | ttcagtatta ggttgattta tattccaaag aataatattt ttgttaaatt gttgattttt |
| 121 | gtaaacctct aaatgtttgc tgctaaaatt actgtgttta agaaaaagat taataaataa |
| 181 | taataatttc ataattaaaa acttctttca ttgaatgcca ttaaataatt cattatttta |
| 241 | caaaataaga tcaacataac tgagtaaata ataataagaa caatattata gtacaacaaa |
| 301 | atatgggtat gtcataccct tttttttttt tttttttttt ttctttcggg tagagggccg |
| 361 | aacctcctac gaggtccccg cgcaaaaggg gcgcgcgggg tatgtgagac tcaacgatct |
| 421 | gcatggtgtt gtgagcagac cgcgggccca aggattttag agcccaccca ctaaacgact |
| 481 | cctctgcact cttacacccg acgtccgatc ccctccgagg tcagaacccg gatgaggtag |
| 541 | gggggctacc gcggtcaaca ctacaaccag acggcgcggc tcaccccaag gacgcccagc |
| 601 | cgacggagcc ttcgaggcga atcgaaggct ctgaaacgtc ggccgtctcg gtacggcagc |
| 661 | ccgtcgggcc gcccagacgg tgccgctggt gtcccggaat accccgctgg accagaacca |
| 721 | gcctgccggg tcgggacgcg atacaccgtc gaccggtcgc tccaatcact ccacggcagc |
| 721 | gcgctagagt gctggta. |

[0168] In certain embodiments, the piggyBac or piggyBac-like transposon comprises a sequence of CCCGGCGAGCATGAGG (SEQ ID NO: 14510). In certain embodiments, the piggyBac or piggyBac-like transposon comprises an ITR sequence of SEQ ID NO: 14510. In certain embodiments, the piggyBac or piggyBac-like transposon comprises a sequence of TTATCCCGGCGAGCATGAGG (SEQ ID NO: 14511). In certain embodiments, the piggyBac or piggyBac-like transposon comprises at least 16 contiguous nucleotides from SEQ ID NO: 14511. In certain embodiments, the piggyBac or piggyBac-like transposon comprises a sequence of CCTCATGCTCGCCGGGTTAT (SEQ ID NO: 14512). In certain embodiments, the piggyBac or piggyBac-like transposon comprises at least 16 contiguous nucleotides from SEQ ID NO: 14512. In certain embodiments, the piggyBac or piggyBac-like transposon comprises one end comprising at least 16 contiguous nucleotides from SEQ ID NO: 14511 and one end comprising at least 16 contiguous nucleotides from SEQ ID NO: 14512. In certain embodiments, the piggyBac or piggyBac-like transposon comprises SEQ ID NO: 14511 and SEQ ID NO: 14512. In certain embodiments, the piggyBac or piggyBac-like transposon comprises a sequence of TTAACCCGGCGAGCATGAGG (SEQ ID NO: 14513). In certain embodiments, the piggyBac or piggyBac-like transposon comprises a sequence of

(SEQ ID NO: 14514)
CCTCATGCTCGCCGGGTTAA.

[0169] In certain embodiments, the piggyBac or piggyBac-like transposon may have ends comprising SEQ ID NO: 14506 and SEQ ID NO: 14507, or a variant of either or both of these having at least 90% sequence identity to SEQ ID NO: 14506 or SEQ ID NO: 14507, and the piggyBac or piggyBac-like transposase has the sequence of SEQ ID NO: 14504 or SEQ ID NO: 14505, or a sequence at least 5%, 10%, 15%, 20%, 25%, 30%, 35%, 40%, 45%, 50%, 55%, 60%, 65%, 70%, 75%, 80%, 85%, 90%, 95%, 99% or any percentage in between identity to SEQ ID NO: 14504 or SEQ ID NO: 14505. In certain embodiments, the piggyBac or piggyBac-like transposon comprises a heterologous polynucleotide inserted between a pair of inverted repeats, where the transposon is capable of transposition by a piggyBac or piggyBac-like transposase having at least 5%, 10%, 15%, 20%, 25%, 30%, 35%, 40%, 45%, 50%, 55%, 60%, 65%, 70%, 75%, 80%, 85%, 90%, 95%, 99% or any percentage in between identity to SEQ ID NO: 14504 or SEQ ID NO: 14505. In certain embodiments, the transposon comprises two transposon ends, each of which comprises SEQ ID NO: 14510 in inverted orientations in the two transposon ends. In certain embodiments, each inverted terminal repeat (ITR) is at least 90% identical to SEQ ID NO: 14510.

[0170] In certain embodiments, the piggyBac or piggyBac-like transposon is capable of insertion by a piggyBac or piggyBac-like transposase at the sequence 5′-TTAT-3 within a target nucleic acid. In certain embodiments, one end of the piggyBac or piggyBac-like transposon comprises at least 16 contiguous nucleotides from SEQ ID NO: 14506 and the other transposon end comprises at least 16 contiguous nucleotides from SEQ ID NO: 14507. In certain embodiments, one end of the piggyBac or piggyBac-like transposon comprises at least 17, at least 18, at least 19, at least 20, at least 22, at least 25, at least 30 contiguous nucleotides from SEQ ID NO: 14506 and the other transposon end comprises at least 17, at least 18, at least 19, at least 20, at least 22, at least 25, at least 30 contiguous nucleotides from SEQ ID NO: 14507.

[0171] In certain embodiments, the piggyBac or piggyBac-like transposon comprises transposon ends (each end comprising an ITR) corresponding to SEQ ID NO: 14506 and SEQ ID NO: 14507, and has a target sequence corresponding to 5′-TTAT3′. In certain embodiments, the piggyBac or piggyBac-like transposon also comprises a sequence encoding a transposase (e.g. SEQ ID NO: 14505). In certain embodiments, the piggyBac or piggyBac-like transposon comprises one transposon end corresponding to SEQ ID NO: 14506 and a second transposon end corresponding to SEQ ID NO: 14516. SEQ ID NO: 14516 is very similar to SEQ ID NO: 14507, but has a large insertion shortly before the ITR. Although the ITR sequences for the two transposon ends are identical (they are both identical to SEQ ID NO: 14510), they have different target sequences: the second transposon has a target sequence corresponding to 5′-TTAA-3′, providing evidence that no change in ITR sequence is necessary to modify the target sequence specificity. The piggyBac or piggyBac-like transposase (SEQ ID NO: 14504), which is associated with the 5′-TTAA-3′ target site differs from the 5′-TTAT-3′-associated transposase (SEQ ID NO: 14505) by only 4 amino acid changes (D322Y, S473C, A507T, H582R). In certain embodiments, the piggyBac or piggyBac-like transposase (SEQ ID NO: 14504), which is associated with the 5′-TTAA-3′ target site is less active than the 5′-TTAT-3′-associated piggyBac or piggy Bac-like transposase (SEQ ID NO: 14505) on the transposon with 5′-TTAT-3′ ends. In certain embodiments, piggyBac or piggyBac-like transposons with 5′-TTAA-3′ target sites can be converted to piggyBac or piggyBac-like transposases with 5′-TTAT-3 target sites by replacing 5′-TTAA-3′ target sites with 5′-TTAT-3′. Such transposons can be used either with a piggyBac or piggyBac-like transposase such as SEQ ID NO: 14504 which recognizes the 5′-TTAT-3′ target sequence, or with a variant of a transposase originally associated with the 5′-TTAA-3′ transposon. In certain embodiments, the high similarity between the 5′-TTAA-3′ and 5′-TTAT-3′ piggyBac or piggyBac-like transposases demonstrates that very few changes to the amino acid sequence of a piggyBac or piggyBac-like transposase alter target sequence specificity. In certain embodiments, modification of any piggyBac or piggyBac-like transposon-transposase gene transfer system, in which 5′-TTAA-3′ target sequences are replaced with 5′-TTAT-3′-target sequences, the ITRs remain the same, and the transposase is the original piggyBac or piggyBac-like transposase or a variant thereof resulting from using a low-level mutagenesis to introduce mutations into the transposase. In certain embodiments, piggyBac or piggyBac-like transposon transposase transfer systems can be formed by the modification of a 5′-TTAT-3′-active piggyBac or piggyBac-like transposon-transposase gene transfer systems in which 5′-TTAT-3′ target sequences are replaced with 5′-TTAA-3′-target sequences, the ITRs remain the same, and the piggyBac or piggyBac-like transposase is the original transposase or a variant thereof.

[0172] In certain embodiments, the piggyBac or piggyBac-like transposon is isolated or derived from Bombyx mori. In certain embodiments, the piggyBac or piggyBac-like transposon comprises a sequence of:

| (SEQ ID NO: 14577) | |
|---|---|
| 1 | cccggcgagc atgaggcagg gtatctcata ccctggtaaa attttaaagt tgtgtatttt |
| 61 | ataaaatttt cgtctgacaa cactagcgcg ctcagtagct ggaggcagga gcgtgcggga |
| 121 | ggggatagtg gcgtgatcgc agtgtggcac gggacaccgg cgagatattc gtgtgcaaac |
| 181 | ctgtttcggg tatgttatac cctgcctcat tgttgacgta t. |

In certain embodiments, the piggyBac or piggyBac-like transposon comprises a sequence of:

| (SEQ ID NO: 14578) | |
|---|---|
| 1 | tttaagaaaa agattaataa ataataataa tttcataatt aaaaacttct ttcattgaat |
| 61 | gccattaaat aaaccattat tttacaaaat aagatcaaca taattgagta aataataata |
| 121 | agaacaatat tatagtacaa caaaatatgg gtatgtcata ccctgccaca ttcttgatgt |
| 181 | aacttttttt cacctcatgc tcgccggg. |

In certain embodiments, the transposon comprises at least 16 contiguous bases from SEQ ID NO: 14577 and at least 16 contiguous bases from SEQ ID NO: 14578, and inverted terminal repeats that are at least 87% identical to CCCGGCGAGCATGAGG (SEQ ID NO: 14510). In certain embodiments, the piggyBac or piggyBac-like transposon comprises a sequence of:

| (SEQ ID NO: 14595) | |
|---|---|
| 1 | cccggcgagc atgaggcagg gtatctcata ccctggtaaa attttaaagt tgtgtatttt |
| 61 | ataaaatttt cgtctgacaa cactagcgcg ctcagtagct ggaggcagga gcgtgcggga |
| 121 | ggggatagtg gcgtgatcgc agtgtggcac gggacaccgg cgagatattc gtgtgcaaac |
| 181 | ctgtttccgg tatgttatac cctgcctcat tgttgacgta ttttttttat gtaatttttc |
| 241 | cgattattaa tttcaactgt tttattggta tttttatgtt atccattgtt ctttttttat |
| 301 | gatttactgt atcggttgtc tttcgttcct ttagttgagt ttttttttat tattttcagt |
| 361 | ttttgatcaa a. |

In certain embodiments, the piggyBac or piggyBac-like transposon comprises a sequence of:

| (SEQ ID NO: 14596) | |
|---|---|
| 1 | tcatattttt agtttaaaaa aataattata tgttttataa tgaaaagaat ctcattatct |
| 61 | ttcagtatta ggttgattta tattccaaag aataatattt ttgttaaatt gttgattttt |
| 121 | gtaaacctct aaatgtttgt tgctaaaatt actgtgttta agaaaaagat taataaataa |
| 181 | taataatttc ataattaaaa acttctttca ttgaatgcca ttaaataaac cattatttta |
| 241 | caaaataaga tcaacataat tgagtaaata ataataagaa caatattata gtacaacaaa |
| 301 | atatgggtat gtcataccct gccacattct tgatgtaact ttttttcacc tcatgctcgc |
| 361 | cggg. |

[0173] In certain embodiments, the piggyBac or piggyBac-like transposon comprises SEQ ID NO: 14595 and SEQ ID NO: 14596, and is transposed by the piggyBac or piggyBac-like transposase of SEQ ID NO: 14505. In certain embodiments, the ITRs of SEQ ID NO: 14595 and SEQ ID: 14596 are not flanked by a 5′-TTAA-3′ sequence. In certain embodiments, the ITRs of SEQ ID NO: 14595 and SEQ ID: 14596 are flanked by a 5′-TTAT-3′ sequence.

[0174] In certain embodiments, the piggyBac or piggyBac-like transposon comprises a sequence of:

| (SEQ ID NO: 14597) | |
|---|---|
| 1 | cccggcgagc atgaggcagg gtatctcata ccctggtaaa attttaaagt tgtgtatttt |
| 61 | ataaaatttt cgtctgacaa cactagcgcg ctcagtagct ggaggcagga gcgtgcggga |
| 121 | ggggatagtg gcgtgatcgc agtgtggcac gggacaccgg cgagatattc gtgtgcaaac |
| 181 | ctgtttcggg tatgttatac cctgcctcat tgttgacgta ttttttttat gtaatttttc |
| 241 | cgattattaa tttcaactgc tttattggta tttttatgtt atccattgtt ctttttttat |
| 301 | g. |

In certain embodiments, the piggyBac or piggyBac-like transposon comprises a sequence of:

| (SEQ ID NO: 14598) | |
|---|---|
| 1 | cagggtatct cataccctgg taaaatttta aagttgtgta ttttataaaa ttttcgtctg |
| 61 | acaacactag cgcgctcagt agctggaggc aggagcgtgc gggaggggat agtggcgtga |
| 121 | tcgcagtgtg gcacgggaca ccggcgagat attcgtgtgc aaacctgttt cgggtatgtt |
| 181 | ataccctgcc tcattgttga cgtatttttt ttatgtaatt tttccgatta ttaatttcaa |
| 241 | ctgttttatt ggtattttta tgttatccat tgttcttttt ttatg. |

In certain embodiments, the piggyBac or piggyBac-like transposon comprises a sequence of:

| (SEQ ID NO: 14599) | |
|---|---|
| 1 | cagggtatct cataccctgg taaaatttta aagttgtgta ttttataaaa ttttcgtctg |
| 61 | acaacactag cgcgctcagt agctggaggc aggagcgtgc gggaggggat agtggcgtga |
| 121 | tcgcagtgtg gcacgggaca ccggcgagat attcgtgtgc aaacctgttt cgggtatgtt |
| 181 | ataccctgcc tcattgttga cgtat. |

In certain embodiments, the left end of the piggyBac or piggyBac-like transposon comprises a sequence of SEQ ID NO: 14577, SEQ ID NO: 14595, or SEQ ID NOs: 14597-14599. In certain embodiments, the left end of the piggyBac or piggyBac-like transposon is preceded by a left target sequence.
In certain embodiments, the piggyBac or piggyBac-like transposon comprises a sequence of:

| (SEQ ID NO: 14600) | |
|---|---|
| 1 | tcatattttt agtttaaaaa aataattata tgttttataa tgaaaagaat ctcattatct |
| 61 | ttcagtatta ggttgattta tattccaaag aataatattt ttgttaaatt gttgattttt |
| 121 | gtaaacctct aaatgtttgt tgctaaaatt actgtgttta agaaaaagat taataaataa |
| 181 | taataatttc ataattaaaa acttctttca ttgaatgcca ttaaataaac cattatttta |
| 241 | caaaataaga tcaacataat tgagtaaata ataataagaa caatattata gtacaacaaa |
| 301 | atatgggtat gtcataccct gccacattct tgatgtaact ttttttcacc tcatgctcgc |
| 351 | cggg. |

In certain embodiments, the piggyBac or piggyBac-like transposon comprises a sequence of:

| (SEQ ID NO: 14601) | |
|---|---|
| 1 | tttaagaaaa agattaataa ataataataa tttcataatt aaaaacttct ttcattgaat |
| 61 | gccattaaat aaaccattat tttacaaaat aagatcaaca taattgagta aataataata |
| 121 | agaacaatat tatagtacaa caaaatatgg gtatgtcata ccctgccaca ttcttgatgt |
| 181 | aacttttttt ca. |

In certain embodiments, the piggyBac or piggyBac-like transposon comprises a sequence of:

| (SEQ ID NO: 14602) | |
|---|---|
| 1 | cccggcgagc atgaggcagg gtatctcata ccctggtaaa attttaaagt tgtgtatttt |
| 61 | ataaaatttt cgtctgacaa cactagcgcg ctcagtagct ggaggcagga gcgtgcggga |
| 121 | ggggatagtg gcgtgatcgc agtgtggcac gggacaccgg cgagatattc gtgtgcaaac |
| 181 | ctgtttcqgq tatgttatac cctqcctcat tgttgacqta ttttttttat gtaatttttc |
| 241 | cgattattaa tttcaactgt tttattggta tttttatgtt atccattgtt ctttttttat |
| 301 | gatttactgt atcggttgtc tttcgttcct ttagttgagt ttttttttat tattttcagt |
| 361 | ttttgatcaa a. |

[0175] In certain embodiments, the right end of the piggyBac or piggyBac-like transposon comprises a sequence of SEQ ID NO: 14578, SEQ ID NO: 14596, or SEQ ID NOs: 14600-14601. In certain embodiments, the right end of the piggyBac or piggyBac-like transposon is followed by a right target sequence. In certain embodiments, the transposon is transposed by the transposase of SEQ ID NO: 14505. In certain embodiments, the left and right ends of the piggyBac or piggyBac-like transposon share a 16 bp repeat sequence of SEQ ID NO: 14510 in inverted orientation and immediately adjacent to the target sequence. In certain embodiments, the left transposon end begins with SEQ ID NO: 14510, and the right transposon end ends with the reverse complement of SEQ ID NO: 14510, 5′-CCTCATGCTCGCCGGG-3′ (SEQ ID NO: 14603). In certain embodiments, the piggyBac or piggyBac-like transposon comprises an ITR with at least 93%, at least 87%, or at least 81% or any percentage in between identity to SEQ ID NO: 14510 or SEQ ID NO: 14603. In certain embodiments, the piggyBac or piggyBac-like transposon comprises a target sequence followed by a left transposon end comprising a sequence selected from SEQ ID NOs: 88, 105 or 107 and a right transposon end comprising SEQ ID NO: 14578 or 106 followed by a target sequence. in certain embodiments, the piggyBac or piggyBac like transposon comprises one end that comprises a sequence that is at least 90%, at least 95% or at least 99% or any percentage in between identical to SEQ ID NO: 14577 and one end that comprises a sequence that is at least 90%, at least 95% or at least 99% or any percentage in between identical to SEQ ID NO: 14578. In certain embodiments, one transposon end comprises at least 14, at least 16, at least 18 or at least 20 contiguous bases from SEQ ID NO: 14577 and one transposon end comprises at least 14, at least 16, at least 18 or at least 20 contiguous bases from SEQ ID NO: 14578.

[0176] In certain embodiments, the piggyBac or piggyBac-like transposon comprises two transposon ends wherein each transposon ends comprises a sequence that is at least 81% identical, at least 87% identical or at least 93% identical or any percentage in between identical to SEQ ID NO: 14510 in inverted orientation in the two transposon ends. One end may further comprise at least 14, at least 16, at least 18 or at least 20 contiguous bases from SEQ ID NO: 14599, and the other end may further comprise at least 14, at least 16, at least 18 or at least 20 contiguous bases from SEQ ID NO: 14601. The piggyBac or piggyBac-like transposon may be transposed by the transposase of SEQ ID NO: 14505, and the transposase may optionally be fused to a nuclear localization signal.

[0177] In certain embodiments, the piggyBac or piggyBac-like transposon comprises SEQ ID NO: 14595 and SEQ ID NO: 14596 and the piggyBac or piggyBac-like transposase comprises SEQ ID NO: 14504 or SEQ ID NO: 14505. In certain embodiments, the piggyBac or piggyBac-like transposon comprises SEQ ID NO: 14597 and SEQ ID NO: 14596 and the piggyBac or piggyBac-like transposase comprises SEQ ID NO: 14504 or SEQ ID NO: 14505. In certain embodiments, the piggyBac or piggyBac-like transposon comprises SEQ ID NO: 14595 and SEQ ID NO: 14578 and the piggyBac or piggyBac-like transposase comprises SEQ ID NO: 14504 or SEQ ID NO: 14505. In certain embodiments, the piggyBac or piggyBac-like transposon comprises SEQ ID NO: 14602 and SEQ ID NO: 14600 and the piggyBac or piggyBac-like transposase comprises SEQ ID NO: 14504 or SEQ ID NO: 14505.

[0178] In certain embodiments, the piggyBac or piggyBac-like transposon comprises a left end comprising 1, 2, 3, 4, 5, 6, or 7 sequences selected from ATGAGGCAGGGTAT (SEQ ID NO: 14614), ATACCCTGCCTCAT (SEQ ID NO: 14615), GGCAGGGTAT (SEQ ID NO: 14616), ATACCCTGCC (SEQ ID NO: 14617), TAAAATTTTA (SEQ ID NO: 14618), ATTTTATAAAAT (SEQ ID NO: 14619), TCATACCCTG (SEQ ID NO: 14620) and TAAATAATAATAA (SEQ ID NO: 14621). In certain embodiments, the piggyBac or piggyBac-like transposon comprises a right end comprising 1, 2 or 3 sequences selected from SEQ ID NO: 14617, SEQ ID NO: 14620 and SEQ ID NO: 14621.

[0179] In certain embodiments of the methods of the disclosure, the transposase enzyme is a piggyBac or piggyBac-like transposase enzyme. In certain embodiments, the piggyBac or piggyBac-like transposase enzyme is isolated or derived from Xenopus tropicalis. The piggyBac or piggyBac-like transposase enzyme may comprise or consist of an amino acid sequence at least 5%, 10%, 15%, 20%, 25%, 30%, 35%, 40%, 45%, 50%, 55%, 60%, 65%, 70%, 75%, 80%, 85%, 90%, 95%, 99% or any percentage in between identical to:

| (SEQ ID NO: 14317) | |
|---|---|
| 1 | MAKRFYSAEE AAAHCMASSS EEFSGSDSEY VPPASESDSS TEESWCSSST VSALEEPMEV |
| 61 | DEDVDDLEDQ EAGDRADAAA GGEPAWGPPC NFPPEIPPFT TVPGVKVDTS NEEPINFFQL |
| 121 | FMTEAILQDM VLYTNVYAEQ YLTQNPLPRY APAHAWHPTD IAEMKRFVGL TLAMGLIKAN |
| 181 | SLESYWDTTT VLSIPVFSAT MSRNRYQLLL RFLHFNNNAT AVPPDQPGHD RLHKLRPLID |
| 241 | SLSERFAAVY TPCQNICIDE SLLLFKGRLQ FRQYIPSKRA RYGIKFYKLC ESSSGYTSYF |
| 301 | LIYEGKDSKL DPPGCPPDLT VSGKIVWELI SPLLGQGFHL YVDNFYSSIP LFTALYCLDT |
| 361 | PACGTINRNR KGLPRALLDK KLNRGETYAL RKNELLAIKF FDKNNVFMLT SIHDESVIRE |
| 421 | QRVGRPPKNK PLCSKEYSKY MGGVDRTDQL QHYYNATRKT RAWYKKVGIY LIQMALRNSY |
| 481 | IVYKAAVPGP KLSYYKYQLQ ILPALLFGGV EEQTVPEMPP SDNVARLIGK HFIDTLPPTP |
| 541 | GKQRPQKGCK VCRKRGIRRD TRYYCPKCPR NPGLCFKPCF EIYETQLHY. |

[0180] In some embodiments, the piggyBac or piggyBac-like transposase is a hyperactive variant of SEQ ID NO: 14517. In certain embodiments, the piggyBac or piggyBac-like transposase is an integration defective variant of SEQ ID NO: 14517. The piggyBac or piggyBac-like transposase enzyme may comprise or consist of an amino acid sequence at least 5%, 10%, 15%, 20%, 25%, 30%, 35%, 40%, 45%, 50%, 55%, 60%, 65%, 70%, 75%, 80%, 85%, 90%, 95%, 99% or any percentage in between identical to:

| (SEQ ID NO: 14518) | |
|---|---|
| 1 | MAKRFYSAEE AAAHCMAPSS EEFSGSDSEY VRPASESDSS TEESWCSSST VSALEEPMEV |
| 61 | DEDVDDLEDQ EAGDRADAAA GGEPAWGPPC NFPPEIPPFT TVPGVKVDTS NFEPINFFQL |
| 121 | FMTEAILQDM VLYTNVYAEQ YLTQNPLPRY ARAHAWHPTD IAEMKRFVGL TLAMGLIKAN |
| 181 | SLESYWNTTT VLSIPVFSAT MSRNRYQLLL RFLHFNNNAT AVPPDQPDHD RLHKLRPLID |
| 241 | SLSERFAAVY TPCQNICIDE SLLLFKGRLR FRQYIPSKRA RYGIKFYKLC ESSSGYTSYF |
| 301 | LIYEGKDSKL DPPGCPPDLT VSGKIVWELI SPLLGQGFHL YVDNFYSSIP LFTALYCLDT |
| 361 | PACGTINRTR KGLPRALLDK KLNRGETYAL RKNELLAIKF FDKKNVFMLT SIHDESVIRE |
| 421 | QRVGRPPKNK PLCSKEYSKY MGGVDPTDQL QHYYNATRKT SAWYKKVGIY LIQMALRNSY |
| 481 | IVYKAAVPGP KLSYYKYQLQ ILPALLFGGV EEQTVPEMLP SDNVARLIGK HFIDTLPPTP |
| 541 | GKQRPQKGCK VCRKRGIRRD TRYYCPKCPR NPGLCFKPCF EIYHTQLHY. |

[0181] In certain embodiments, the piggyBac or piggyBac-like transposase is isolated or derived from Xenopus tropicalis. In certain embodiments, the piggyBac or piggyBac-like transposase is a hyperactive piggyBac or piggyBac-like transposase. In certain embodiments, the hyperactive piggyBac or piggyBac-like transposase comprises a sequence at least 90% identical to:

| (SEQ ID NO: 14572) | |
|---|---|
| 1 | MAKRFYSAEE AAAHCSASSS EEFSGSDSEY VPPASESDSS TEESWCSSST VSALEEPMEV |
| 61 | DEDVDDLEDQ EAGDRADAAA GGEPAWGPPC NFPPEIPPFT TVPGVKVDTS NFEPINFFQL |
| 121 | FMTEAILQDM VLYTNVYAEQ YLTQNPLTRG ARAHAWHPTD IAEMKRFVGL TLAMGLIKAN |
| 181 | SIESYWDTTT VLSIPVFGAT MSRNRYQLLL RFLHFNNNAT AVPPDQPGHD RLHKLRPLID |
| 241 | SLSERFANVY TPCQNICIDE SLMLFKGRLQ FRQYIPSKRA RYGIKFYKLC ESSTGYTSYF |
| 301 | LIYEGKDSKL DPPGCPPDLT VSGKIVWELI SPLLGQGFHL YVDNFYSSIP LFTALYCLNT |
| 361 | PACGTINRNR KGLPRALLDK KLNRGETYAL RKNELLAIKF FDKKNVFMLT SIHDESVIRE |
| 421 | QRVGRPPKNK PLCSKEYSKY MGGVDPTDQL QHYYNATRKT RHWYKKVGIY LIQMALRNSY |
| 481 | IVYKAAYPGP KLSYYKYQLQ ILPALLFGGV EEQTVPEMPD SDNVARLIGK HFIDTLPPTP |
| 541 | GKQRPQKGCK VCRKRGIRRD TRYYCPKCPR NPGLCRKPCF EIYHTQLHY. |

[0182] In certain embodiments, piggyBac or piggyBac-like transposase is a hyperactive piggyBac or piggyBac-like transposase. A hyperactive piggyBac or piggyBac-like transposase is a transposase that is more active than the naturally occurring variant from which it is derived. In certain embodiments, a hyperactive piggyBac or piggyBac-like transposase is more active than the transposase of SEQ ID NO: 14517. In certain embodiments, the hyperactive piggyBac or piggyBac-like transposase comprises a sequence of:

| (SEQ ID NO: 14572) | |
|---|---|
| 1 | MAKRFYSAEE AAAHCSASSS EEFSGSDSEY VPPASESDSS TEESWCSSST VSALEEPMEV |
| 61 | DEDVDDLEDQ EAGDRADAAA GGEPAWGPPC NFPPEIPPFT TVPGVKVDTS NFEPINFFQL |
| 121 | FMTEAILQDM VLYTNVYAEQ YLTQNPLTRG ARAHAWHPTD IAEMKRFVGL TLAMGLIKAN |
| 181 | SIESYWDTTT VLSIPVFGAT MSRNRYQLLL RFLHFNNNAT AVPPDQPGHD RLHKLRPLID |
| 241 | SLSERFANVY TPCQNICIDE SLMLFKGRLQ FRQYIPSKRA RYGIKFYKLC ESSTGYTSYF |
| 301 | LIYEGKDSKL DPPGCPPDLT VSGKIVWELI SPLLGQGFHL YVDNFYSSIP LFTALYCLNT |
| 361 | PACGTINRNR KGLPRALLDK KLNRGETYAL RKNELLAIKF FDKKNVFMLT SIHDESVIRE |
| 421 | QRVGRPPKNK PLCSKEYSKY MGGVDPTDQL QHYYNATRKT RHWYKKVGIY LIQMALRNSY |
| 481 | IVYKAAYPGP KLSYYKYQLQ ILPALLFGGV EEQTVPEMPD SDNVARLIGK HFIDTLPPTP |
| 541 | GKQRPQKGCK VCRKRGIRRD TRYYCPKCPR NPGLCRKPCF EIYHTQLHY. |

[0183] In certain embodiments, the hyperactive piggyBac or piggyBac-like transposase comprises a sequence of:

| (SEQ ID NO: 14624) | |
|---|---|
| 1 | MAKRFYSAEE AAAHCMASSS EEFSGSDSEY VPPASESDSS TEESWCSSST VSALEEPMEV |
| 61 | DEDVDDLEDQ EAGDRADAAA GGEPAWGPPC NFPPEIPPFT TVPGVKVDTS NFEPINFFQL |
| 121 | FMTEAILQDM VLYTNVYAEQ YLTQNPLTRY ARAHAWHPTD IAEMKRFVGL TLAMGLIKAN |
| 181 | SLESYWDTTT VLSIPVESAT MSRNRYQLLL RFLHFNNNAT AVPPDQPGHD RLHKLRPLID |
| 241 | SLSERFAAVY TPCQNICIDE SLLLFKGRLQ FRQYIPSKRA RYGIKFYKLC ESSSGYTSYF |
| 301 | LIYEGKDSKL DPPGCPPDLT VSGKIVWELI SPLLSQGFHL YVDNFYSSIP LFTALYCLNT |
| 361 | PACGTINRNR KGLPRALLDK KLNRGETYAL RKNELLAIKF FDKKNVFMLT SIHDESVIRE |
| 421 | QRVGRPPKNK PLCSKEYSKY MGGVDRTDQL QHYYNATRKT RHWYKKVGIY LIQMALRNSY |
| 481 | IVYKAAVPGP KLSYYKYQLQ ILPALLFGGV EEQTVPEMPP SDNVARLIGK HFIDTLPPTP |
| 541 | GKQRPQKGCK VCRKRGIRRD TRYYCPKCPR NPGLCRKPCF EIYHTQLHY. |

[0184] In certain embodiments, the hyperactive piggyBac or piggyBac-like transposase comprises a sequence of:

| (SEQ ID NO: 14625) | |
|---|---|
| 1 | MAKRFYSAEE AAAHCMASSS EEFSGSDSEY VPPASESDSS TEESVCSSST VSALEEPMEV |
| 61 | DEDVDDLEDQ EAGDRADAAA GGEPAWGPPC NFPPEIPPFT TVPGVKVDTS NFEPINFFQL |
| 121 | FMTEAILQDM VLYTNVYAEQ YLTQNPLPRY ARAHAWHPTD IAEMKRFVGL TLAMGLIKAN |
| 181 | SLESYWDTTT VLKIPVFSAT MSRNRYQLLL RFLHFNNNAT AVPPDQPGHD RLHKLRPLID |
| 241 | SLSERFAAVY TPCQNICIDE SLLIFKGRLQ FRQYIPSKRA RYGIKFYKLC ESSSGYTSYF |
| 301 | LIYEGKDSKL DPPGCPPDLT VSGKIVWELI SPLLGQGFHL YVDNFYSSIP LFTALYCLNT |
| 351 | PACGTINRNR KGLPRALLDK KLNRGETYAL RKNELLAIKF FDKKNVFMLT SIHDESVIRE |
| 421 | QRVGRPPKNK PLCSKEYSKY MGGVDRTDQL QHYYNATRKT RHWYKKVGIY LIQMALRNSY |
| 481 | IVYKAAVPGP KLSYYKYQLQ ILPALLFGGV EEQTVPEMPP SDNVARLIGK HFIDTLPPTP |
| 541 | GKQRPQKGCK VCRKRGIRRD TRYYCPKCPR NPGLCFKPCF EIYHTQLHY. |

[0185] In certain embodiments, the hyperactive piggyBac or piggyBac-like transposase comprises a sequence of:

| (SEQ ID NO: 14627) | |
|---|---|
| 1 | MAKRFYSAEE AAAHCMASSS EQTSGSDSEY VPPASESDSS TEESWCSSST VSALEEPMEV |
| 61 | DEDVDDLEDQ EAGDRADAAA GGEPAWGPPC NFPPEIPPFT TVPCVKVDTS NFEPINFFQL |
| 121 | FMTEAILQDM VLYTNVYAEQ YLTQNPLTRY ARAHAWHPTD IAEMKRFVGL TLAMGLIKAN |
| 181 | SIESYWDTTT VLSIPVFGAT MSRNRYQLLL RFLHFNNNAT AVPPDQPGHD RLHKLRPLID |
| 241 | SLSERFANVY TPCQNICIDE SLLLFKGRLQ FRQYIPSKRA RYGIKFYKLC ESSSGYTSYF |
| 301 | LIYEGKDSKL DPPGCPPDLT VSGKIVWELI SPLLGQGFHL YVDNFYSSIP LFTALYCLNT |
| 361 | PACGTINRNR KGLPRALLDK KLNRGETYAL RKNELLAIKF FDKKNVFMLT SIHDESVIRE |
| 421 | QRVGRKPKNK PLCSKEYSKY MGGVDRTDQL QHYYNATRKT RHWYKKVGIY LIQMALRNSY |
| 481 | IVYKAAVPGP KLSYYKYQLQ ILPALLFGGV EEQTVPEMPP SDNVARLIGK HFIDTLPPTP |
| 541 | GKQRPQKGCK VCRKRGIRRD TRYYCPKCPR NPGLCRKPCF EIYHTQLHY. |

[0186] In certain embodiments, the hyperactive piggyBac or piggyBac-like transposase comprises a sequence of:

| (SEQ ID NO: 14628) | |
|---|---|
| 1 | MAKRFYSAEE AAAHCSASSS EEFSGSDSEY VPPASESDSS TEESWCSSST VSALEEPMEV |
| 61 | DEDVDDLEDQ EAGDRADAAA GGEPAWGPPC NFPPEIPPFT TVPGVKVDTS NFEPINFFQL |
| 121 | FMTEAILQDM VLYTNVYAEQ YLTQNPLTRG ARAHAWHPTD IAEMKRFVGL TLAMGLIKAN |
| 181 | SLESYWDTTT VLSIPVFGAT MSRNRYQLLL RFLHFNNNAT AVPPDQPGHD RLHKLRPLID |
| 241 | SLSERFANVY TPCQNICIDE SLMLFKGRLQ FRQYIPSKRA RYGIKFYKLC ESSTGYTSYF |
| 301 | LIYEGKDSKL DPPGCPPDLT VSGKIVWELI SPLLGQGFHL YVDNFYSSIP LFTALYCLNT |
| 361 | PACGTINRNR KGLPRALLDK KLNRGETYAL RKNELLAIKF FDKKNVFMLT SIHDESVIRE |
| 421 | QRVGRPPKNK PLCSKEYSKY MGGVDRTDQL QHYYNATRKT RHWYKKVGIY LIQMALRNSY |
| 481 | IVYKAAVPGP KLSYYKYQLQ ILPALLFGGV EEQTVPEMPP SDNVARLIGK HFIDTLPPTP |
| 541 | GKQRPQKGCK VCRKRGIRRD TRYYCPKCPR NPGLCRKPCF EIYHTQLHY. |

[0187] In certain embodiments, the hyperactive piggyBac or piggyBac-like transposase comprises a sequence of:
[0188] (SEQ ID NO: 17042).

[0189] In certain embodiments, the hyperactive piggyBac or piggyBac-like transposase comprises an amino acid substitution at a position selected from amino acid 6, 7, 16, 19, 20, 21, 22, 23, 24, 26, 28, 31, 34, 67, 73, 76, 77, 88, 91, 141, 145, 146, 148, 150, 157, 162, 179, 182, 189, 192, 193, 196, 198, 200, 210, 212, 218, 248, 263, 270, 294, 297, 308, 310, 333, 336, 354, 357, 358, 359, 377, 423, 426, 428, 438, 447, 450, 462, 469, 472, 498, 502, 517, 520, 523, 533, 534, 576, 577, 582, 583 or 587 (relative to SEQ ID NO: 14517). In certain embodiments, the hyperactive piggyBac or piggyBac-like transposase comprises an amino acid substitution of Y6C, S7G, M16S, S19G, S20Q, S20G, S20D, E21D, E22Q, F23T, F23P, S24Y, S26V, S28Q, V31K, A34E, L67A, G73H, A76V, D77N, P88A, N91D, Y141Q, Y141A, N145E, N145V, P146T, P146V, P146K, P148T, P148H, Y150G, Y150S, Y150C, H157Y, A162C, A179K, L182I, L182V, T189G, L192H, S193N, S193K, V196I, S198G, T200W, L210H, F212N, N218E, A248N, L263M, Q270L, S294T, T297M, S308R, L310R, L333M, Q336M, A354H, C357V, L358F, D359N, L377I, V 423H, P426K, K428R, S438A, T447G, T447A, L450V, A462H, A462Q, I469V, I472L, Q498M, L502V, E517I, P520D, P520G, N523S, I533E, D534A, F576R, F576E, K577I, I582R, Y583F, L587Y or L587W, or any combination thereof including at least 1, 2, 3, 4, 5, 6, 7, 8, 9, 10 or all of these mutations (relative to SEQ ID NO: 14517).

[0190] In certain embodiments, the hyperactive piggyBac or piggyBac-like transposase comprises one or more substitutions of an amino acid that is not wild type, wherein the one or more substitutions a for wild type amino acid comprises a substitution of A2X, K3X, R4X, F5X, Y6X, S7X, A11X, A13X, C15X, M16X, A17X, S18X, S19X, S20X, E21X, E22X, F23X, S24X, G25X, 26X, D27X, S28X, E29X, E42X, E43X, S44X, C46X, S47X, S48X, S49X, T50X, V51X, S52X, A53X, L54X, E55X, E56X, P57X, M58X, E59X, E62X, D63X, V64X, D65X, D66X, L67X, E68X, D69X, Q70X, E71X, A72X, G73X, D74X, R75X, A76X, D77X, A78X, A79X, A80X, G81X, G82X, E83X, P84X, A85X, W86X, G87X, P88X, P89X, C90X, N91X, F92X, P93X, E95X, I96X, P97X, P98X, F99X, T100X, T101X, P103X, G104X, V105X, K106X, V107X, D108X, T109X, N111X, P114X, I115X, N116X, F117X, F118X, Q119X, M122X, T123X, E124X, A125X, I126X, L127X, Q128X, D129X, M130X, L132X, Y133X, V126X, Y127X, A138X, E139X, Q140X, Y141X, L142X, Q144X, N145X, P146X, L147X, P148X, Y150X, A151X, A155X, H157X, P158X, I161X, A162X, V168X, T171X, L172X, A173X, M174X, I177X, A179X, L182X, D187X, T188X, T189X, T190X, L192X, S193X, I194X, P195X, V196X, S198X, A199X, T200X, S202X, L208X, L209X, L210X, R211X, F212X, F215X, N217X, N218X, A219X, T220X, A221X, V222X, P224X, D225X, Q226X, P227X, H229X, R231X, H233X, L235X, P237X, I239X, D240X, L242X, S243X, E244X, R244X, F246X, A247X, A248X, V249X, Y250X, T251X, P252X, C253X, Q254X, I256X, C257X, I258X, D259X, E260X, S261X, L262X, L263X, L264X, F265X, K266X, G267X, R268X, L269X, Q270X, F271X, R272X, Q273X, Y274X, I275X, P276X, S277X, K278X, R279X, A280X, R281X, Y282X, G283X, I284X, K285X, F286X, Y287X, K288X, L289X, C290X, E291X, S292X, S293XS294X, G295X, Y296X, T297X, S298X, Y299X, F300X, E304X, L310X, P313X, G314X, P316X, P317X, D318X, L319X, T320X, V321X, K324X, E328X, 1330X, S331X, P332X, L333X, L334X, G335X, Q336X, F338X, L340X, D343X, N344X, F345X, Y346X, S347X, L351X, F352X, A354X, L355X, Y356X, C357X, L358X, D359X, T360X, R422X, Y423X, G424X, P426X, K428X, N429X, K430X, P431X, L432X, S434X, K435X, E436X, S438X, K439X, Y440X, G443X, R446X, T447X, L450X, Q451X, N455X, T460X, R461X, A462X, K465X, V467X, G468X, I469X, Y470X, L471X, I472X, M474X, A475X, L476X, R477X, S479X, Y480X, V482XY483X, K484X, A485X, A486X, V487X, P488X, P490X, K491X, S493X, Y494X, Y495X, K496X, Y497T, Q498X, L499X, Q500X, I501X, L502X, P503X, A504X, L505X, L506X, F507X, G508X, G509X, V510X, E511X, E512X, Q513X, T514X, V515X, E517X, M518X, P519X, P520X, S521X, D522X, N523X, V524X, A525X, L527X, I528X, K530X, H531X, F532X, I533X, D534X, T535X, L536X, T539X, P540X, Q546X, K550X, R553X, K554X, R555X, G556X, I557X, R558X, R559X, D560X, T561X, Y564X, P566X, K567X, P569X, R570X, N571X, L574X, C575X, F576X, K577X, P578X, F580X, E581X, I582X, Y583X, T585X, Q586X, L587X, H588X or Y589X (relative to SEQ ID NO: 14517). A list of hyperactive amino acid substitutions can be found in U.S. Pat. No. 10,041,077, the contents of which are incorporated by reference in their entirety.

[0191] In certain embodiments, the piggyBac or piggyBac-like transposase is integration deficient. In certain embodiments, an integration deficient piggyBac or piggyBac-like transposase is a transposase that can excise its corresponding transposon, but that integrates the excised transposon at a lower frequency than a corresponding naturally occurring transposase. In certain embodiments, the piggyBac or piggyBac-like transposase is an integration deficient variant of SEQ ID NO: 14517. In certain embodiments, the integration deficient piggyBac or piggyBac-like transposase is deficient relative to SEQ ID NO: 14517.

[0192] In certain embodiments, the piggyBac or piggyBac-like transposase is active for excision but deficient in integration. In certain embodiments, the integration deficient piggyBac or piggyBac-like transposase comprises a sequence that is at least 90% identical to a sequence of:

| (SEQ ID NO: 14605) | |
|---|---|
| 1 | MAKRFYSAEE AAAHCMASSS EEFSGSDSEY VPPASESDSS TEESWCSSST VSALEEPMEV |
| 61 | DEDVDDLEDQ EAGDRVDAAA GGEPAWGPPC NFPPEIPPFT TVPGVKVDTS NFEPINFFQL |
| 121 | FMTEAILQDM VLYTNVYAEQ YLTQNPLPRY ARAHAWHPTD IAEMKRFVGL TLAMGLIKAN |
| 181 | SLESYWDTTT VLSIPVFSAT MSRNRYQLLL KFLHFNNEAT AVPPDQPGHD RLHKLRPLID |
| 241 | SLSERFAAVY TPCQNICIDE SLLLFKGRLQ FRQYIPSKRA RYGIKFYKLC ESSSGYTSYF |
| 301 | LIYEGKDSKL DPPGCPPDLT VSGKIVWELI SPLLGQGFHL YVDNFYSSIP LFTALYCLDT |
| 361 | PACGTINRNR KGLPRALLDK KLNRGETYAL RKNELLAIKF FDKKNVFMLT SIHDESVIRE |
| 421 | QRVGRPPKNK PLCSKEYSKY MGGVDRTDQL QHYYNATRKT RAWYKKVGIY LIQMALRNSY |
| 481 | IVYKAAVPGP KLSYYKYQLQ ILPALLFGGV EEQTVPEMPP SDNVARLIGK HFIDTLPPTP |
| 541 | GKQRPQKGCK VCRKRGIRRD TRYYCPKCPR NPGLCFKPCF EIYHTQLHYG RR. |

[0193] In certain embodiments, the integration deficient piggyBac or piggyBac-like transposase comprises a sequence that is at least 90% identical to a sequence of:

| (SEQ ID NO: 14604) | |
|---|---|
| 1 | MAKRFYSAEE AAAHCMASSS EEFSGSDSEY VPPASESDSS TEESWCSSST VSALEEPMEV |
| 61 | DEDVDDLEDQ EAGDRADAAA GGEPAWGPPC NFPPEIPPFT TVPGVKVDTS NFEPINFFQL |
| 121 | FMTEAILQDM VLYTNVYAEQ YLTQVPLPRY ARAHAWHPTD IAEMKRFVGL TLAMGLIKAN |
| 181 | SLESYWDTTT VLNIPVFSAT MSRNRYQLLL RFLEFNNEAT AVPPDQPGHD RLHKLRPLID |
| 241 | SLSERFAAVY TPCQNICIDE SLLLFKGRLQ FRQYIPSKRA RYGIKFYKLC ESSSGYTSYF |
| 301 | LIYEGKDSKL DPPGCPPDLT VSGKIVWELI SPLLGQGFHL YVDNFYSSIP LFTALYCLDT |
| 361 | PACGTINRNR KGLPRALLDK KLNRGETYAL RKNELLAIKF FDKKNVFMLT SIHDESVIRE |
| 421 | QPVGRPPKNK PLCSKEYSKY MGGVDRTDQL QHYYNATRKT RAWYKKVGIY LIQMALRNSY |
| 481 | IVYKAAVPGP KLSYYKYQLQ ILPALLFGGV EEQTVPEMPP SDNVARLIGK HFIDTLPPTP |
| 541 | GKQRPQKGCK VCRKRGIRRD TRYYCPKCPR NPGLCFKPCF EIYHTQLHY. |

[0194] In certain embodiments, the integration deficient piggyBac or piggyBac-like transposase comprises a sequence that is at least 90% identical to a sequence of:

| (SEQ ID NO: 14611) | |
|---|---|
| 1 | MAKRFYSAEE AAAHCMASSS EEFSGSDSEY VPPASESDSS TEESWCSSST VSALEEPMEV |
| 61 | DEDVDDLEDQ EAGDRADAAA GGEPAWGPPC NFPPEIPPFT TVPGVKVDTS NFEPINFFQL |
| 121 | FMTEAILQDM VLYTNVYAEQ YLTQNVLPRY ARAHAWHPTD IAEMKRFVGL TLAMGLIKAN |
| 181 | SLESYWDTTT VLSIPVFSAT MSRNRYQLLL RFLHFNNDAT AVPPDQPGHD RLHKLRPLID |
| 241 | SLTERFAAVY TPCQNICIDE SLLLFKGRLQ FRQYIPSKRA RYGIKFYKLC ESSSGYTSYF |
| 301 | LIYEGKDSKL DPPGCPPDLT VSGKIVWELI SPLLGQGFHL YVDNFYSSIP LFTALYCLDT |
| 361 | PACGTINRNR KGLPRALLDK KLNRGETYAL RKNELLAIKF FDKKNVFMLT SIHDESVIRE |
| 421 | QRVGRPPKNK PLCSKEYSKY MGGVDRTDQL QHYYNATRKT RAWYKKVGIY LIQMALRNSY |
| 481 | IVYKAAYPGP KLSYYKYQLQ ILPALLFGGV EEQTVPEMPP SDNVARLIGK HFIDTLPPTP |
| 541 | GKQRPQKGCK VCRKRGIRRD TRYYCPKCPR NPGLCFKPCF EIYHTQLHYG RR. |

[0195] In certain embodiments, the integration deficient piggyBac or piggyBac-like transposase comprises SEQ ID NO: 14611. In certain embodiments, the integration deficient piggyBac or piggyBac-like transposase comprises a sequence that is at least 90% identical to a sequence of:

| (SEQ ID NO: 14612) | |
|---|---|
| 1 | MAKRFYSAEE ALAHCMASSS EEFSGSDSEY VPPASESDSS TEESWCSSST VSALEEPMEV |
| 61 | DEDVDDLEDQ EAGDRADAAP GGEPAWGPPC NFPPEIPPFT TVPGVKVDTS NFEPINFFQL |
| 121 | FMTEAILQDM VLYTNVYAEQ YLTQVPLPRY ARAHAWHPTD IAEMKRFVGL TLAMGLIKAN |
| 181 | SLESYWDTTT VLSIPVFSAT MSRNRYQLLL RFLHFNNEAT AVPPDQPGHD RLHKLRPLID |
| 241 | SLSERFAAVY TPCQNICIDE SLLLFKGRLQ FRQYIPSKRA RYGIYFYKLC ESSSGYTSYF |
| 301 | LIYEGKDSKL DPPGCPDDLT VSGKIVWELI SPLLGQGFHL YVDNFYSSIP LFTALYCLDT |
| 361 | PACGTINRNR KGLPRALLDK KLNRGETYAL RKNELLAIKF FDKKNVFMLT SIHDESVIRE |
| 421 | QRVGRPPKNK PLCSKEYSKY MGGVDRTDQL QHYYNATRKT RAWYKKVGIY LIQMALRNSY |
| 481 | IVYKAAVPGP KLSYYKYQLQ ILPALLFGGV EEQTVPEMPP SDNVARLIGK HFIDTLPPTP |
| 541 | GKQRPQKGCK VCRKRGIRRD TRYYCPKCPR NPGLCFKPCF EIYHTQLHYG RR. |

[0196] In certain embodiments, the integration deficient piggyBac or piggyBac-like transposase comprises SEQ ID NO: 14612. In certain embodiments, the integration deficient piggyBac or piggyBac-like transposase comprises a sequence that is at least 90% identical to a sequence of:

| (SEQ ID NO: 14613) | |
|---|---|
| 1 | MAKRFYSAEE AAAHCMASSS EEFSGSDSEY VPPASESDSS TEESWCSSST VSALEEPMEV |
| 61 | DEDVDDLEDQ EAGDRADAAA GGEPAWGPPC NFPPEIPPFT TVPGVKVDTS NFEPINFFQL |
| 121 | FMTEAILQDM VLYTNVYAEQ YLTQVPLPRY ARAHAWHPTD IAEMKRFVGL TLAMGLIKAN |
| 181 | SLESYWDTTT VLNIPVFSAT MSRNRYQLLL RFLEFNNNAT AVPPDQPGHD RLHKLRPLID |
| 241 | SLSERFAAVY TPCQNICIDE SLLLFKGRLQ FRQYIPSKRA RYGIKFYKLC ESSSGYTSYF |
| 301 | LIYEGKDSKL DPPGCPPDLT VSGKIVWELI SPLLGQGFHL YVDNEYSSIP LFTALYCLDT |
| 361 | PACGTINRNR KGLPRALLDK KLNRGETYAL RKNELLAIKF FDKKNVFMLT SIHDESVIRE |
| 421 | QRVGRPPKNK PLCSKEYSKY MGGVDRTDQL QHYYNATRKT RAWYKKVGIY LIQMALRNSY |
| 481 | IVYKAAVPGP KLSYYKYQLQ ILPALLFGGV EEQTVPEMPP SDNVARLIGK HFIDTLPPTP |
| 541 | GKQRPQKGCK VCRKRGIRRD TRYYCPKCPR NPGLCFKPCF EIYHTQLHYG RR. |

[0197] In certain embodiments, the integration deficient piggyBac or piggyBac-like transposase comprises SEQ ID NO: 14613. In certain embodiments, the integration deficient piggyBac or piggyBac-like transposase comprises an amino acid substitution wherein the Asn at position 218 is replaced by a Glu or an Asp (N218D or N218E) (relative to SEQ ID NO: 14517).

[0198] In certain embodiments, the excision competent, integration deficient piggyBac or piggyBac-like transposase comprises one or more substitutions of an amino acid that is not wild type, wherein the one or more substitutions a for wild type amino acid comprises a substitution of A2X, K3X, R4X, F5X, Y6X, S7X, A8X, E9X, E10X, A11X, A12X, A13X, H14X, C15X, M16X, A17X, S18X, S19X, S20X, E21X, E22X, F23X, S24X, G25X, 26X, D27X, S28X, E29X, V31X, P32X, P33X, A34X, S35X, E36X, S37X, D38X, S39X, S40X, T41X, E42X, E43X, S44X, W45X, C46X, S47X, S48X, S49X, T50X, V51X, S52X, A53X, L54X, E55X, E56X, P57X, M58X, E59X, V60X, M122X, T123X, E124X, A125X, L127X, Q128X, D129X, L132X, Y133X, V126X, Y127X, E139X, Q140X, Y141X, L142X, T143X, Q144X, N145X, P146X, L147X, P148X, R149X, Y150X, A151X, H154X, H157X, P158X, T159X, D160X, I161X, A162X, E163X, M164X, K165X, R166X, F167X, V168X, G169X, L170X, T171X, L172X, A173X, M174X, G175X, L176X, I177X, K178X, A179X, N180X, S181X, L182X, S184X, Y185X, D187X, T188X, T189X, T190X, V191X, L192X, S193X, I194X, P195X, V196X, F197X, S198X, A199X, T200X, M201X, S202X, R203X, N204X, R205X, Y206X, Q207X, L208X, L209X, L210X, R211X, F212X, L213X, H241X, F215X, N216X, N217X, N218X, A219X, T220X, A221X, V222X, P223X, P224X, D225X, Q226X, P227X, G228X, H229X, D230X, R231X, H233X, K234X, L235X, R236X, L238X, I239X, D240X, L242X, S243X, E244X, R244X, F246X, A247X, A248X, V249X, Y250X, T251X, P252X, C253X, Q254X, N255X, I256X, C257X, I258X, D259X, E260X, S261X, L262X, L263X, L264X, F265X, K266X, G267X, R268X, L269X, Q270X, F271X, R272X, Q273X, Y274X, I275X, P276X, S277X, K278X, R279X, A280X, R281X, Y282X, G283X, I284X, K285X, F286X, Y287X, K288X, L289X, C290X, E291X, S292X, S293X, S294X, G295X, Y296X, T297X, S298X, Y299X, F300X, I302X, E304X, G305X, K306X, D307X, S308X, K309X, L310X, D311X, P312X, P313X, G314X, C315X, P316X, P317X, D318X, L319X, T320X, V321X, S322X, G323X, K324X, I325X, V326X, W327X, E328X, L329X, I330X, S331X, P332X, L333X, L334X, G335X, Q336X, F338X, H339X, L340X, V342X, N344X, F345X, Y346X, S347X, S348X, I349X, L351X, T353X, A354X, Y356X, C357X, L358X, D359X, T360X, P361X, A362X, C363X, G364X, I366X, N367X, R368X, D369X, K371X, G372X, L373X, R375X, A376X, L377X, L378X, D379X, K380X, K381X, L382X, N383X, R384XG385X, T387X, Y388X, A389X, L390X, K392X, N393X, E394X, A397X, K399X, F400X, F401X, D402X, N405X, L406X, L409X, R422X, Y423X, G424X, E425X, P426X, K428X, N429X, K430X, P431X, L432X, S434X, K435X, E436X, S438X, K439X, Y440X, G442X, G443X, V444X, R446X, T447X, L450X, Q451X, H452X, N455X, T457X, R458X, T460X, R461X, A462X, Y464X, K465X, V467X, G468X, I469X, L471X, I472X, Q473X, M474X, L476X, R477X, N478X, S479X, Y480X, V482XY483X, K484X, A485X, A486X, V487X, P488X, G489X, P490X, K491X, L492X, S493X, Y494X, Y495X, K496X, Q498X, L499X, Q500X, 1501X, L502X, P503X, A504X, L505X, L506X, F507X, G508X, G509X, V510X, E511X, E512X, Q513X, T514X, V515X, E517X, M518X, P519X, P520X, S521X, D522X, N523X, V524X, A525X, L527X, I528X, G529X, K530X, F532X, I533X, D534X, T535X, L536X, P537X, P538X, T539X, P540X, G541X, F542X, Q543X, R544X, P545X, Q546X, K547X, G548X, C549X, K550X, V551X, C552X, R553X, K554X, R555X, G556X, I557X, R558X, R559X, D560X, T561X, R562X, Y563X, Y564X, C565X, P566X, K567X, C568X, P569X, R570X, N571X, P572X, G573X, L574X, C575X, F576X, K577X, P578X, C579X, F580X, E581X, I582X, Y583X, H584X, T585X, Q586X, L587X, H588X or Y589X (relative to SEQ ID NO: 14517). A list of excision competent, integration deficient amino acid substitutions can be found in U.S. Pat. No. 10,041,077, the contents of which are incorporated by reference in their entirety.

[0199] In certain embodiments, the piggyBac or piggyBac-like transposase is fused to a nuclear localization signal. In certain embodiments, SEQ ID NO: 14517 or SEQ ID NO: 14518 is fused to a nuclear localization signal. In certain embodiments, the amino acid sequence of the piggyBac or piggyBac like transposase fused to a nuclear localization signal is encoded by a polynucleotide sequence comprising:

| (SEQ ID NO: 14626) | |
|---|---|
| 1 | atggcaccca aaaagaaacg taaagtgatg gccaaaagat ttcacagcgc cgaagaagca |
| 61 | gcagcacatt gcatggcatc gtcatccgaa gaattctcgg ggagcgattc cgaatatgtc |
| 121 | ccaccggcct cggaaagcga ttcgagcact gaggagtcgt ggcgttcctc ctcaactgtc |
| 181 | tcggctcttg aggagccgac ggaagtggat gaggatgtgg acgacttgga ggaccaggaa |
| 241 | gccggagaca gggccgacgc tgccgcggga ggggagccgg cgcggggacc tccatgcaat |
| 301 | tttcctcccg aaatcccacc gttcactact gtgccgggag tgaaggtcga cacgtccaac |
| 361 | ttcgaaccga tcaatttctc tcaactcttc atgactgaag cgatcctgca agatatggtg |
| 421 | ctctacacta atgtgtacgc cgagcagtac ctgactcaaa acccgctgcc tcgctacgcg |
| 481 | agagcgcatg cgtggcaccc gaccgatatc gcggagatga agcggttcgt gggactgacc |
| 541 | ctcgcaatgg gcctgatcaa ggccaacagc ctcgagtcat accgggatac cacgactgtg |
| 601 | cttagcattc cggtgttctc cgctaccatg tcccgtaacc gccaccaact cctgctgcgg |
| 661 | ttcctccact tcaacaacaa tgcgaccgct gtgccacctg accagccagg acacgacaga |
| 721 | ctccacaagc tgcggccatc gatcgactcg ctgagcgagc gactcgccgc ggtgtacacc |
| 781 | ccttgccaaa acatttgcaa cgacgagtcg cttctgctgt ttaaaggccg gcttcagttc |
| 841 | cgccagtaca tcccatcgaa gcgcgctcgc tatggtatca aattctacaa actctgcgag |
| 901 | tcgtccagcg gctacacgtc atacttcttg atctacgagg ggaaggactc taagctggac |
| 951 | ccaccggggt gtccaccgga tcttactgtc tccggaaaaa tcgtgtggga actcatctca |
| 1021 | cctctcctcg gacaaggctc tcatctctac gtcgacaatt tccactcatc gatccctctg |
| 1081 | ttcaccgccc tctactgccc ggatactcca gcctgtggga ccattaacag aaaccggaag |
| 1141 | ggtctgccga gagcactgcc ggataagaag ttgaacaggg gagagactta cgcgctgaga |
| 1201 | aagaacgaac tcctcgccat caaattcttc gacaagaaaa atgtgtttat gctcacctcc |
| 1321 | ctgtgctcta aggaatactc caagtacatg gggggtgtcg accggaccga tcagctgcag |
| 1381 | cattactaca acgccactag aaagacccgg gcctggtaca agaaagtcgg catctacctg |
| 1441 | atccaaatgg cactgaggaa ttcgtatatt gtctacaagg ctgccgttcc gggcccgaaa |
| 1501 | ctgtcatact acaagtacca gcttcaaatc ctgccggcgc tgctgttcgg tggagtggaa |
| 1561 | gaacagactg tgcccgagat gccgccatcc gacaacgtgg cccggttgat cggaaagcac |
| 1621 | ttcattgata ccctgcctcc gacgcctgga aagcagcggc cacagaaggg atgcaaagtt |
| 1681 | tgccgcaagc gcggaatacg gcgcgatacc cgctactatt gcccgaagtg cccccgcaat |
| 1741 | cccggactgt gtttcaagcc ctgttttgaa atctaccaca cccagttgca ttac. |

[0200] In certain embodiments, the piggyBac or piggyBac-like transposon is isolated or derived from Xenopus tropicalis. In certain embodiments, the piggyBac or piggyBac-like transposon comprises a sequence of:

| (SEQ ID NO: 14519) | |
|---|---|
| 1 | ttaacctttt tactgccaat gacgcatggg atacgtcgtg gcagtaaaag ggcttaaatg |
| 61 | ccaacgacgc gtcccatacg ttgttggcat tttaagtctt ctatctgcag cggcagcatg |
| 121 | tgccgccgct gcagagagtt tctagcgatg acagcccctc tgggcaacga gccggggggg |
| 181 | ctgt. |

[0201] In certain embodiments, the piggyBac or piggyBac-like transposon comprises a sequence of:

| (SEQ ID NO: 14520) | |
|---|---|
| 1 | tttgcatttt tagacattta gaagcctata tcttgttaca gaattggaat tacacaaaaa |
| 61 | ttctaccata ttttgaaagc ttaggttgtt ctgaaaaaaa caatatattg ttttcctggg |
| 121 | taaactaaaa gtcccctcga ggaaaggccc ctaaagtgaa acagtgcaaa acgttcaaaa |
| 181 | actgtctggc aatacaagtt ccactttgac caaaacggct ggcagtaaaa gggttaa. |

[0202] In certain embodiments, the piggyBac or piggyBac-like transposon comprises SEQ ID NO: 14519 and SEQ ID NO: 14520. In certain embodiments, the piggyBac or piggyBac-like transposon comprises a sequence of:

| (SEQ ID NO: 14521) | |
|---|---|
| 1 | ttaacccttt gcctgccaat cacgcatggg atacgtcgtg gcagtaaaag ggcttaaatg |
| 61 | ccaacgacgc gtcccatacg ttgttggcat tttaagtctt ctctctgcag cggcagcatg |
| 121 | tgccgccgct gcagagagtt tctagcgatg acagcccctc tgggcaacga gccggggggg |
| 181 | ctgtc. |

[0203] In certain embodiments, the piggyBac or piggyBac-like transposon comprises a sequence of:

| (SEQ ID NO: 14522) | |
|---|---|
| 1 | tttgcatttt tagacattta gaagcctata tcttgttaca gaattggaat tacacaaaaa |
| 61 | ttctaccata ttttgaaagc ttaggttgtt ctgaaaaaaa caatatattg ttttcctggg |
| 121 | taaactaaaa gtcccctcga ggaaaggccc ctaaagtgaa acagtgcaaa acgttcaaaa |
| 181 | actgtctggc aatacaagtt ccactttggg acaaatcggc tggcagtgaa agggttaa. |

[0204] In certain embodiments, the piggyBac or piggyBac-like transposon comprises a sequence of:

| (SEQ ID NO: 14523) | |
|---|---|
| 1 | ttaacctttt tactgccaat gacgcatggg atacgtcgtg gcagtaaaag ggcttaaatg |
| 61 | ccaacgacgc gtcccatacg ttgttggcat tttaattctt ctctctgcag cggcagcatg |
| 121 | tgccgccgct gcagagagtt tctagcgatg acagcccctc tgggcaacga gccggggggg |
| 181 | ctgtc. |

[0205] In certain embodiments, the piggyBac or piggyBac-like transposon comprises SEQ ID NO: 14520 and SEQ ID NO: 14519, SEQ ID NO: 14521 or SEQ ID NO: 14523. In certain embodiments, the piggyBac or piggyBac-like transposon comprises SEQ ID NO: 14522 and SEQ ID NO: 14519, SEQ ID NO: 14521 or SEQ ID NO: 14523. In certain embodiments, the piggyBac or piggyBac-like transposon comprises one end comprising at least 14, 16, 18, 20, 30 or 40 contiguous nucleotides from SEQ ID NO: 14519, SEQ ID NO: 14521 or SEQ ID NO: 14523. In certain embodiments, the piggyBac or piggyBac-like transposon comprises one end comprising at least 14, 16, 18, 20, 30 or 40 contiguous nucleotides from SEQ ID NO: 14520 or SEQ ID NO: 14522. In certain embodiments, the piggyBac or piggyBac-like transposon comprises one end with at least 90% identity to SEQ ID NO: 14519, SEQ ID NO: 14521 or SEQ ID NO: 14523. In certain embodiments, the piggyBac or piggyBac-like transposon comprises one end with at least 90% identity to SEQ ID NO: 14520 or SEQ ID NO: 14522. In one embodiment, one transposon end is at least 90% identical to SEQ ID NO: 14519 and the other transposon end is at least 90% identical to SEQ ID NO: 14520.

[0206] In certain embodiments, the piggyBac or piggyBac-like transposon comprises a sequence of TTAACCTTTTTACTGCCA (SEQ ID NO: 14524). In certain embodiments, the piggyBac or piggyBac-like transposon comprises a sequence of TTAACCCTTTGCCTGCCA (SEQ ID NO: 14526). In certain embodiments, the piggyBac or piggyBac-like transposon comprises a sequence of TTAACCYTTTTACTGCCA (SEQ ID NO: 14527). In certain embodiments, the piggyBac or piggyBac-like transposon comprises a sequence of TGGCAGTAAAAGGGTTAA (SEQ ID NO: 14529). In certain embodiments, the piggy Bac or piggyBac-like transposon comprises a sequence of TGGCAGTGAAAGGGTTAA (SEQ ID NO: 14531). In certain embodiments, the piggyBac or piggyBac-like transposon comprises a sequence of TTAACCYTTTKMCTGCCA (SEQ ID NO: 14533). In certain embodiments, one end of the piggyBac or piggyBac-like transposon comprises a sequence selected from SEQ ID NO: 14524, SEQ ID NO: 14526 and SEQ ID NO: 14527. In certain embodiments, one end of the piggyBac™ (PB) or piggyBac-like transposon comprises a sequence selected from SEQ ID NO: 14529 and SEQ ID NO: 14531. In certain embodiments, each inverted terminal repeat of the piggyBac or piggyBac-like transposon comprises a sequence of ITR sequence of CCYTTTKMCTGCCA (SEQ ID NO: 14563). In certain embodiments, each end of the piggyBac™ (PB) or piggyBac-like transposon comprises SEQ ID NO: 14563 in inverted orientations. In certain embodiments, one ITR of the piggyBac or piggyBac-like transposon comprises a sequence selected from SEQ ID NO: 14524, SEQ ID NO: 14526 and SEQ ID NO: 14527. In certain embodiments, one ITR of the piggyBac or piggyBac-like transposon comprises a sequence selected from SEQ ID NO: 14529 and SEQ ID NO: 14531. In certain embodiments, the piggyBac or piggyBac like transposon comprises SEQ ID NO: 14533 in inverted orientation in the two transposon ends.

[0207] In certain embodiments, The piggyBac or piggyBac-like transposon may have ends comprising SEQ ID NO: 14519 and SEQ ID NO: 14520 or a variant of either or both of these having at least 90% sequence identity to SEQ ID NO: 14519 or SEQ ID NO: 14520, and the piggyBac or piggyBac-like transposase has the sequence of SEQ ID NO: 14517 or a variant showing at least %, 10%, 15%, 20%, 25%, 30%, 35%, 40%, 45%, 50%, 55%, 60%, 65%, 70%, 75%, 80%, 85%, 90%, 95%, 99% or any percentage in between sequence identity to SEQ ID NO: 14517 or SEQ ID NO: 14518. In certain embodiments, one piggyBac or piggyBac-like transposon end comprises at least 14 contiguous nucleotides from SEQ ID NO: 14519, SEQ ID NO: 14521 or SEQ ID NO: 14523, and the other transposon end comprises at least 14 contiguous nucleotides from SEQ ID NO: 14520 or SEQ ID NO: 14522. In certain embodiments, one transposon end comprises at least 15, at least 16, at least 17, at least 18, at least 19, at least 20, at least 22, at least 25, at least 30 contiguous nucleotides from SEQ ID NO: 14519, SEQ ID NO: 14521 or SEQ ID NO: 14523, and the other transposon end comprises at least 15, at least 16, at least 17, at least 18, at least 19, at least 20, at least 22, at least 25 or at least 30 contiguous nucleotides from SEQ ID NO: 14520 or SEQ ID NO: 14522.

[0208] In certain embodiments, the piggyBac or piggyBac-like transposase recognizes a transposon end with a left sequence corresponding to SEQ ID NO: 14519, and a right sequence corresponding to SEQ ID NO: 14520. It will excise the transposon from one DNA molecule by cutting the DNA at the 5′-TTAA-3′ sequence at the left end of one transposon end to the 5′-TTAA-3′ at the right end of the second transposon end, including any heterologous DNA that is placed between them, and insert the excised sequence into a second DNA molecule. In certain embodiments, truncated and modified versions of the left and right transposon ends will also function as part of a transposon that can be transposed by the piggyBac or piggyBac-like transposase. For example, the left transposon end can be replaced by a sequence corresponding to SEQ ID NO: 14521 or SEQ ID NO: 14523, the right transposon end can be replaced by a shorter sequence corresponding to SEQ ID NO: 14522. In certain embodiments, the left and right transposon ends share an 18 bp almost perfectly repeated sequence at their ends (5′-TTAACCYTTTKMCTGCCA: SEQ ID NO: 14533) that includes the 5′-TTAA-3′ insertion site, which sequence is inverted in the orientation in the two ends. That is in SEQ ID NO: 14519 and SEQ ID NO: 14523 the left transposon end begins with the sequence 5′-TTAACCTTTTTACTGCCA-3′ (SEQ ID NO: 14524), or in SEQ ID NO: 14521 the left transposon end begins with the sequence 5′-TTAACCCTTTGCCTGCCA-3′ (SEQ ID NO: 14526); the right transposon ends with approximately the reverse complement of this sequence: in SEQ ID NO: 14520 it ends 5′ TGGCAGTAAAAGGGTTAA-3′ (SEQ ID NO: 14529), in SEQ ID NO: 14522 it ends 5′-TGGCAGTGAAAGGGTTAA-3′ (SEQ ID NO: 14531.) One embodiment of the invention is a transposon that comprises a heterologous polynucleotide inserted between two transposon ends each comprising SEQ ID NO: 14533 in inverted orientations in the two transposon ends. In certain embodiments, one transposon end comprises a sequence selected from SEQ ID NOS: 14524, SEQ ID NO: 14526 and SEQ ID NO: 14527. In some embodiments, one transposon end comprises a sequence selected from SEQ ID NO: 14529 and SEQ ID NO: 14531.

[0209] In certain embodiments, the piggyBac™ (PB) or piggyBac-like transposon is isolated or derived from Xenopus tropicalis. In certain embodiments, the piggyBac or piggyBac-like transposon comprises at a sequence of:

| (SEQ ID NO: 14573) | |
|---|---|
| 1 | ccctttgcct gccaatcacg catgggatac gtcgtggcag taaaagggct taaatgccaa |
| 61 | cgacgcgtcc catacgtt. |

[0210] In certain embodiments, the piggyBac or piggyBac-like transposon comprises at a sequence of:

| (SEQ ID NO: 14574) | |
|---|---|
| 1 | cctgggtaaa ctaaaagtcc cctcgaggaa aggcccctaa agtgaaacag tgcaaaacgt |
| 61 | tcaaaaactg tctggcaata caagttccac tttgggacaa atcggctggc agtgaaaggg. |

[0211] In certain embodiments, the piggyBac or piggyBac-like transposon comprises at least 16 contiguous bases from SEQ ID NO: 14573 or SEQ ID NO: 14574, and inverted terminal repeat of CCYTTTBMCTGCCA (SEQ ID NO: 14575).

[0212] In certain embodiments, the piggyBac or piggyBac-like transposon comprises at a sequence of:

| (SEQ ID NO: 14579) | |
|---|---|
| 1 | ccctttgcct gccaatcacg catgggatac gtcgtggcag taaaagggct taaatgccaa |
| 61 | cgacgcgtcc catacgttgt tggcatttta agtcttctct ctgcagcggc agcatgtgcc |
| 121 | gccgctgcag agagtttcta gcgatgacag cccctctggg caacgagccg ggggggctgt |
| 181 | c. |

[0213] In certain embodiments, the piggyBac or piggyBac-like transposon comprises at a sequence of:

| (SEQ ID NO: 14580) | |
|---|---|
| 1 | cctttttact gccaatgacg catgggatac gtcgtggcag taaaagggct taaatgccaa |
| 61 | cgacgcgtcc catacgttgt tggcatttta attcttctct ctgcagcggc agcatgtgcc |
| 121 | gccgctgcag agagtttcta gcgatgacag cccctctggg caacgagccg ggggggctgt |
| 181 | c. |

[0214] In certain embodiments, the piggyBac or piggyBac-like transposon comprises at a sequence of:

| (SEQ ID NO: 14581) | |
|---|---|
| 1 | cctttttact gccaatgacg catgggatac gtcgtggcag taaaagggct taaatgccaa |
| 61 | cgacgcgtcc catacgttgt tggcatttta agtcttctct ctgcagcggc agcatgtgcc |
| 121 | gccgctgcag agagtttcta gcgatgacag cccctctggg caacgagccg ggggggctgt |
| 181 | c. |

[0215] In certain embodiments, the piggyBac or piggyBac-like transposon comprises at a sequence of:

| (SEQ ID NO: 14582) | |
|---|---|
| 1 | cctttttact gccaatgacg catgggatac gtcgtggcag taaaagggct taaatgccaa |
| 61 | cgacgcgtcc catacgttgt tggcatttta agtcttctct ctgcagcggc agcatgtgcc |
| 121 | gccgctgcag agag. |

[0216] In certain embodiments, the piggyBac or piggyBac-like transposon comprises at a sequence of:

| (SEQ ID NO: 14583) | |
|---|---|
| 1 | cctttttact gccaatgacg catgggatac gtcgtggcag taaaagggct taaatgccaa |
| 61 | cgacgcgtcc catacgttgt tggcatttta agtctt. |

[0217] In certain embodiments, the piggyBac or piggyBac-like transposon comprises at a sequence of:

| (SEQ ID NO: 14584) | |
|---|---|
| 1 | ccctttgcct gccaatcacg catgggatac gtcgtggcag taaaagggct taaatgccaa |
| 61 | cgacgcgtcc catacgttgt tggcatttta agtctt . |

[0218] In certain embodiments, the piggyBac or piggyBac-like transposon comprises at a sequence of:

| (SEQ ID NO: 14585) | |
|---|---|
| 1 | ttatcctttt tactgccaat gacgcatggg atacgtcgtg gcagtaaaag ggcttaaatg |
| 61 | ccaacgacgc gtcccatacg ttgttggcat tttaagtctt ctctctgcag cggcagcatg |
| 121 | tgccgccgct gcagagagtt tctagcgatg acagcccctc tgggcaacga gccggggggg |
| 181 | ctgtc. |

[0219] In certain embodiments, the piggyBac or piggyBac-like transposon comprises at a sequence of:

| (SEQ ID NO: 14586) | |
|---|---|
| 1 | tttgcatttt tagacattta gaagcctata tcttgttaca gaattggaat tacacaaaaa |
| 61 | ttctaccata ttttgaaagc ttaggttgtt ctgaaaaaaa caatatattg ttttcctggg |
| 121 | taaactaaaa gtcccctcga ggaaaggccc ctaaagtgaa acagtgcaaa acgttcaaaa |
| 181 | actgtctggc aatacaagtt ccactttggg acaaatcggc tggcagtgaa aggg. |

[0220] In certain embodiments, the piggyBac or piggyBac-like transposon comprises a left transposon end sequence selected from SEQ ID NO: 14573 and SEQ ID NOs: 14579-14585. In certain embodiments, the left transposon end sequence is preceded by a left target sequence. In certain embodiments, the piggyBac or piggyBac-like transposon comprises at a sequence of:

| (SEQ ID NO: 14587) | |
|---|---|
| 1 | tttgcatttt tagacattta gaagcctata tcttgttaca gaattggaat tacacaaaaa |
| 61 | ttctaccata ttttgaaagc ttaggttgtt ctgaaaaaaa caatatattg ttttcctggg |
| 121 | taaactaaaa gtcccctcga ggaaaggccc ctaaagtgaa acagtgcaaa acgttcaaaa |
| 181 | actgtctggc aatacaagtt ccactttgac caaaacggct ggcagtaaaa ggg. |

[0221] In certain embodiments, the piggyBac or piggyBac-like transposon comprises at a sequence of:

| (SEQ ID NO: 14588) | |
|---|---|
| 1 | ttgttctgaa aaaaacaata tattgttttc ctgggtaaac taaaagtccc ctcgaggaaa |
| 61 | ggcccctaaa gtgaaacagt gcaaaacgtt caaaaactgt ctggcaatac aagttccact |
| 121 | ttgaccaaaa cggctggcag taaaaggg. |

[0222] In certain embodiments, the piggyBac or piggyBac-like transposon comprises at a sequence of:

| (SEQ ID NO: 14589) | |
|---|---|
| 1 | tttgcatttt tagacattta gaagcctata tcttgttaca gaattggaat tacacaaaaa |
| 61 | ttctaccata ttttgaaagc ttaggttgtt ctgaaaaaaa caatatattg ttttcctggg |
| 121 | taaactaaaa gtcgcctcga ggaaaggccc ctaaagtgaa acagtgcaaa acgttcaaaa |
| 181 | actgtctggc aatacaagtt ccactttgac caaaacggct ggcagtaaaa gggttat. |

[0223] In certain embodiments, the piggyBac or piggyBac-like transposon comprises at a sequence of:

| (SEQ ID NO: 14590) | |
|---|---|
| 1 | ttgttctgaa aaaaacaata tattgttttc ctgggtaaac taaaagtccc ctcgaggaaa |
| 61 | ggcccctaaa gtgaaacagt gcaaaacgtt caaaaactgt ctggcaatac aagttccact |
| 121 | ttgggacaaa tcggctggca gtgaaaggg. |

[0224] In certain embodiments, the piggyBac or piggyBac-like transposon comprises a right transposon end sequence selected from SEQ ID NO: 14574 and SEQ ID NOs: 14587-14590. In certain embodiments, the right transposon end sequence is followed by a right target sequence. In certain embodiments, the left and right transposon ends share a 14 repeated sequence inverted in orientation in the two ends (SEQ ID NO: 14575) adjacent to the target sequence. In certain embodiments, the piggyBac or piggyBac-like transposon comprises a left transposon end comprising a target sequence and a sequence that is selected from SEQ ID NOs: 14582-14584 and 14573, and a right transposon end comprising a sequence selected from SEQ ID NOs: 14588-14590 and 14574 followed by a right target sequence.

[0225] In certain embodiments, the left transposon end of the piggyBac or piggyBac-like transposon comprises

| (SEQ ID NO: 14591) | |
|---|---|
| 1 | atcacgcatg ggatacgtcg tggcagtaaa agggcttaaa tgccaacgac gcgtcccata |
| 61 | cgtt, |

and an ITR. In certain embodiments, the left transposon end comprises

| (SEQ ID NO: 14592) | |
|---|---|
| 1 | atgacgcatg ggatacgtcg tggcagtaaa agggcttaaa tgccaacgac gcgtcccata |
| 61 | cgttgttggc attttaagtc tt |

and an ITR. In certain embodiments, the right transposon end of the piggyBac or piggyBac-like transposon comprises

| (SEQ ID NO: 14593) | |
|---|---|
| 1 | cctgggtaaa ctaaaagtcc cctcgaggaa aggcccctaa agtgaaacag tgcaaaacgt |
| 61 | tcaaaaactg tctggcaata caagttccac tttgggacaa atcggc |

and an ITR. In certain embodiments, the right transposon end comprises

| (SEQ ID NO: 14594) | |
|---|---|
| 1 | ttgttctgaa aaaaacaata tattgttttc ctgggtaaac taaaagtccc ctcgaggaaa |
| 61 | ggcccctaaa gtgaaacagt gcaaaacgtt caaaaactgt ctggcaatac aagttccact |
| 121 | ttgaccaaaa cggc |

### and an ITR.

[0226] In certain embodiments, one transposon end comprises a sequence that is at least 90%, at least 95%, at least 99% or any percentage in between identical to SEQ ID NO: 14573 and the other transposon end comprises a sequence that is at least 90%, at least 95%, at least 99% or any percentage in between identical to SEQ ID NO: 14574. In certain embodiments, one transposon end comprises at least 14, at least 16, at least 18, at least 20 or at least 25 contiguous nucleotides from SEQ ID NO: 14573 and one transposon end comprises at least 14, at least 16, at least 18, at least 20 or at least 25 contiguous nucleotides from SEQ ID NO: 14574. In certain embodiments, one transposon end comprises at least 14, at least 16, at least 18, at least 20 from SEQ ID NO: 14591, and the other end comprises at least 14, at least 16, at least 18, at least 20 from SEQ ID NO: 14593. In certain embodiments, each transposon end comprises SEQ ID NO: 14575 in inverted orientations.

[0227] In certain embodiments, the piggyBac or piggyBac-like transposon comprises a sequence selected from of SEQ ID NO: 14573, SEQ ID NO: 14579, SEQ ID NO: 14581, SEQ ID NO: 14582, SEQ ID NO: 14583, and SEQ ID NO: 14588, and a sequence selected from SEQ ID NO: 14587, SEQ ID NO: 14588, SEQ ID NO: 14589 and SEQ ID NO: 14586 and the piggyBac or piggyBac-like transposase comprises SEQ ID NO: 14517 or SEQ ID NO: 14518.

[0228] In certain embodiments, the piggyBac or piggyBac-like transposon comprises ITRs of CCCTTTGCCTGCCA (SEQ ID NO: 14622) (left ITR) and TGGCAGTGAAAGGG (SEQ ID NO: 14623) (right ITR) adjacent to the target sequences.

[0229] In certain embodiments of the methods of the disclosure, the transposase enzyme is a piggyBac or piggyBac-like transposase enzyme. In certain embodiments, the piggyBac or piggyBac-like transposase enzyme is isolated or derived from Helicoverpa armigera. The piggyBac or piggyBac-like transposase enzyme may comprise or consist of an amino acid sequence at least 5%, 10%, 15%, 20%, 25%, 30%, 35%, 40%, 45%, 50%, 55%, 60%, 65%, 70%, 75%, 80%, 85%, 90%, 95%, 99% or any percentage in between identical to:

| (SEQ ID NO: 14525) | |
|---|---|
| 1 | MASRQRLNHD EIATILENDD DYSPLDSESE KEDCVVEDDV WSDNEDAIVD FVEDTSAQED |
| 61 | PDNNIASRES PNLEVTSLTS HRIITLPQRS IRGKNNHVWS TTKGRTTGRT SAINIIRTNR |
| 121 | GPTRMCRNIV DPLLCFQLFI TDEIIHEIVK WTNVEIIVKR QNLKDISASY RDTNTMEIWA |
| 181 | LVGILTLTAV MKDNHLSTDE LFDATFSGTR YVSVMSRERF EFLIRCIRMD DKTLRPTLRS |
| 241 | DDAFLPVRKI WEIFINQCRQ NHVPGSNLTV DEQLLGFRGR CPFRMYIPNK PDKYGIKFPM |
| 301 | MCAAATKYMI DAIPYLGKST KTNGLPLGEF YVKDLTKTVH GTNRNITCDN WFTSIPLAKN |
| 361 | MLQAPYNLTI VGTIRSNKRE MPEEIKNSRS RPVGSSMFCF DGPLTLVSYK PKPSKMVFLL |
| 421 | SSCDENAVIN ESNGKPDMIL FYNQTKGGVD SFDQMCKSMS ANRKTNRWPM AVFYGMLNMA |
| 481 | FVNSYIIYCH NKINKQEKPI SRKEFMKKLS IQLTTPWMQE RLQAPTLKRT LRDNITNVLK |
| 541 | NVVPASSENI SNEPEPKKRR YCGVCSYKKR RMTKAQCCKC KKAICGEHNI DVCQDCI. |

[0230] In certain embodiments, the piggyBac or piggyBac-like transposon is isolated or derived from Helicoverpa armigera. In certain embodiments, the piggyBac or piggyBac-like transposon comprises a sequence of:

| (SEQ ID NO: 14570) | |
|---|---|
| 1 | ttaaccctag aagcccaatc tacgtaaatt tgacgtatac cgcggcgaaa tatctctgtc |
| 61 | tctttcatgt ttaccgtcgg atcgccgcta acttctgaac caactcagta gccattggga |
| 121 | cctcgcagga cacagttgcg tcatctcggt aagtgccgcc atcttgttgt actctctatt |
| 161 | acaacacacg tcacgtcacg tcgttgcacg tcattttgac gtataattgg gctttgtgta |
| 241 | acttttgaat ttgtttcaaa ttttttatgt ttgtgattta tttgagttaa tcgtattgtt |
| 301 | tcgttacatt tttcatataa taataatatt ttcaggttga gtacaaa. |

[0231] In certain embodiments, the piggyBac or piggyBac-like transposon comprises a sequence of:

| (SEQ ID NO: 14528) | |
|---|---|
| 1 | agactgtttt tttgtaagag acttctaaaa tattattacg agttgattta attttatgaa |
| 61 | aacatttaaa actagttgat tttttttata attacataat tttaagaaaa agtgttagag |
| 121 | gcttgatttt tttgttgatt ttttctaaga tttgattaaa gtgccataat agtattaata |
| 181 | aagagtattt tttaacttaa aatgtatttt atttattaat taaaacttca attatgataa |
| 241 | ctcatgcaaa aatatagttc attaacagaa aaaaatagga aaactttgaa gttttgtttt |
| 301 | tacacgtcat ttttacgtat gattgggctt tatagctagt taaatatgat tgggcttcta |
| 361 | gggttaa. |

[0232] In certain embodiments of the methods of the disclosure, the transposase enzyme is a piggyBac or piggyBac-like transposase enzyme. In certain embodiments, the piggyBac or piggyBac-like transposase enzyme is isolated or derived from Pectinophora gossypiella. The piggyBac or piggyBac-like transposase enzyme may comprise or consist of an amino acid sequence at least 5%, 10%, 15%, 20%, 25%, 30%, 35%, 40%, 45%, 50%, 55%, 60%, 65%, 70%, 75%, 80%, 85%, 90%, 95%, 99% or any percentage in between identical to:

| (SEQ ID NO: 14530) | |
|---|---|
| 1 | MDLRKQDEKI RQWLEQDIEE DSKGESDNSS SETEDIVEME VHKNTSSESE VSSESDYEPV |
| 61 | CPSKRQRTQI IESEESDNSE SIRPSRRQTS RVIDSDETDE DVMSSTPQNI PRNPNVIQPS |
| 121 | SRFLYGKNKH KWSSAAKPSS VRTSRRNIIH FIPGPKERAR EVSEPIDIFS LFISEDMLQQ |
| 181 | VVTFTNAEML IRKNKYKTET FTVSPTNLEE IRALLGLLFN AAAMKSNHLP TRMLFNTHRS |
| 241 | GTIFKACMSA ERLNFLIKCL RFDDKLTRNV RQRDDRFAPI RDLWQALISN FQKWYTPGSY |
| 301 | ITVDEQLVGF RGRCSFRMYI PNKPNKYGIK LVMAADVNSK YIVNAIPYLG KGTDPQNQPL |
| 361 | ATFFIKEITS TLHGTNRNIT MDNWFTSVPL ANELLMAPYN LTLVGTLRSN KREIPEKLKN |
| 421 | SKSRAIGTSM FCYDGDKTLV SYKAKSNKVV FILSTIHDQP DINQETGKPE MIHFYNSTKG |
| 481 | AVDTVDQMCS SISTNRKTQR WPLCVFYNML NLSIINAYVV YVYNNVRNNK KPMSRRDFVI |
| 541 | KLGDQLMEPW LRQRLQTVTL RRDIKVMIQD ILGESSDLEA PVPSVSNVRK IYYLCPSKAR |
| 601 | RMTKHRCIKC KQAICGPHNI DICSRCIE. |

[0233] In certain embodiments, the piggyBac or piggyBac-like transposon is isolated or derived from Pectinophora gossypiella. In certain embodiments, the piggyBac or piggyBac-like transposon comprises a sequence of:

| (SEQ ID NO: 14532) | |
|---|---|
| 1 | ttaaccctag ataactaaac attcgtccgc tcgacgacgc gctatgccgc gaaattgaag |
| 61 | tttacctatt attccgcgtc ccccgccccc gccgcttttt ctagcttcct gatttgcaaa |
| 121 | atagtgcatc gcgtgacacg ctcgaggtca cacgacaatt aggtcgaaag ttacaggaat |
| 181 | ttcgtcgtcc gctcgacgaa agtttagtaa ttacgtaagt ttggcaaagg taagtgaatg |
| 241 | aagtattttt ttataattat tttttaattc tttatagtga taacgtaagg tttatttaaa |
| 301 | tttattactt ttatagttac ttagccaatt gttataaatt ccttgttatt gctgaaaaat |
| 361 | ttgcctgttt tagtcaaaat ttattaactt ttcgatcgtt ttttag. |

[0234] In certain embodiments, the piggyBac or piggyBac-like transposon comprises a sequence of:

| (SEQ ID NO: 14571) | |
|---|---|
| 1 | tttcactaag taattttgtt cctatttagt agataagtaa cacataatta ttgtgatatt |
| 61 | caaaacttaa gaggtttaat aaataataat aaaaaaaaaa tggtttttat ttcgtagtct |
| 121 | gctcgacgaa tgtttagtta ttacgtaacc gtgaatatag tttagtagtc tagggttaa. |

[0235] In certain embodiments of the methods of the disclosure, the transposase enzyme is a piggyBac or piggyBac-like transposase enzyme. In certain embodiments, the piggyBac or piggyBac-like transposase enzyme is isolated or derived from Ctenoplusia agnata. The piggyBac or piggyBac-like transposase enzyme may comprise or consist of an amino acid sequence at least 5%, 10%, 15%, 20%, 25%, 30%, 35%, 40%, 45%, 50%, 55%, 60%, 65%, 70%, 75%, 80%, 85%, 90%, 95%, 99% or any percentage in between identical to:

| (SEQ ID NO: 14534) | |
|---|---|
| 1 | MASRQHLYQD EIAAILENED DYSPHDTDSE MEDCVTQDDV RSDVEDEMVD NIGNGTSPAS |
| 61 | RHEDPETPDP SSEASNLEVT LSSHRIIILP QRSIREKNNH IWSTTKGQSS GRTAAINIVR |
| 121 | TNRGPTRMCR NIVDPLLCFQ LFIKEEIVEE IVKWTNVEMV QKRVNLKDIS ASYRDTNEME |
| 181 | IWAIISMLTL SAVMKDNHLS TDELFNVSYG TRYVSVMSRE RFEFLLRLLR MGDKLLRPNL |
| 241 | RQEDAFTPVR KIWEIFINQC RLNYVPGTNL TVDEQLLGFR GRCPFRMYIP NKPDKYGIKF |
| 301 | PMVCDAATKY MVDAIPYLGK STKTQGLPLG EFYVKELTQT VHGTNRNVTC DNWFTSVPLA |
| 361 | KSLLNSPYNL TLVGTIRSNK REIPEEVKNS RSRQVGSSMF CFDGPLTLVS YKPKPSKMVF |
| 421 | LLSSCNEDAV VNQSNGKPDM ILFYNQTKGG VDSFDQMCSS MSTNRKTNRW PMAVFYGMLN |
| 481 | MAFVNSYIIY CHNMLAKKEK PLSRKDFMKK LSTDLTTPSM QKRLEAPTLK RSLPDNITNV |
| 541 | LKIVPQAAID TSFDEPEPKK RRYCGFCSYK KKRMTKTQCF KCKKPVCGEH NIDVCQDCI. |

[0236] In certain embodiments, the piggyBac or piggyBac-like transposon is isolated or derived from Ctenoplusia agnata. In certain embodiments, the piggyBac or piggyBac-like transposon comprises a sequence of:

| (SEQ ID NO: 14535) | |
|---|---|
| 1 | ttaaccctag aagcccaatc tacgtcattc tgacgtgtat gtcgccgaaa atactctgtc |
| 61 | tctttctcct gcacgatcgg attgccgcga acgctcgatt caacccagtt ggcgccgaga |
| 121 | tctattggag gactgcggcg ttgattcggt aagtcccgcc attttgtcat agtaacagta |
| 181 | ttgcacgtca gcttgacgta tatttgggct ttgtgttatt tttgtaaatt ttcaacgtta |
| 241 | gtttattatt gcatcttttt gttacattac tggtttattt gcatgtatta ctcaaatatt |
| 301 | atttttattt tagcgtagaa aataca. |

[0237] In certain embodiments, the piggyBac or piggyBac-like transposon comprises a sequence of:

| (SEQ ID NO: 14536) | |
|---|---|
| 1 | agactgtttt ttttgtattt gcattatata ttatattcta aagttgattt aattctaaga |
| 61 | aaaacattaa aataagtttc tttttgtaaa atttaattaa ttataagaaa aagtttaagt |
| 121 | tgatctcatt ttttataaaa atttgcaatg tttccaaagt tattattgta aaagaataaa |
| 181 | taaaagtaaa ctgagtttta attgatgttt tattatatca ttatactata tattacttaa |
| 241 | ataaaacaat aactgaatgt atttctaaaa ggaatcacta gaaaatatag tgatcaaaaa |
| 301 | tttacacgtc atttttgcgt atgattgggc tttataggtt ctaaaaatat gattgggcct |
| 361 | ctagggttaa. |

[0238] In certain embodiments, the piggyBac or piggyBac-like transposon comprises an ITR sequence of CCCTAGAAGCCCAATC (SEQ ID NO: 14564).

[0239] In certain embodiments of the methods of the disclosure, the transposase enzyme is a piggyBac or piggyBac-like transposase enzyme. In certain embodiments, the piggyBac or piggyBac-like transposase enzyme is isolated or derived from Agrotis ipsilon. The piggyBac (PB) or piggyBac-like transposase enzyme may comprise or consist of an amino acid sequence at least 5%, 10%, 15%, 20%, 25%, 30%, 35%, 40%, 45%, 50%, 55%, 60%, 65%, 70%, 75%, 80%, 85%, 90%, 95%, 99% or any percentage in between identical to:

| (SEQ ID NO: 14537) | |
|---|---|
| 1 | MESPQRLNQD EIATILENDD DYSPLDSDSE AEDRVVEDDV WSDNEDAMID YVEDTSRQED |
| 61 | PDNNIASQES ANLEVTSLTS HRIISLPQRS ICGKNNHVWS TTKGRTTGRT SAINIIRTNR |
| 121 | GPTRMCRNIV DPLICFQLFI TDEIIHEIVK WTNVEMIVKR QNLIDISASY RDTNTMEMWA |
| 181 | LVGILTLTAV MKDNHLSTDE LFDATFSGTR YVSVMSREPF EFLIRCMRMD DKTLRPTLRS |
| 241 | DDAFIPVRKL WEIFINQCRL NYVPGGNLTV DEQLLGFRGR CPFRMYIPNK PDKYGIRFPM |
| 301 | MCDAATKYMI DAIPYLGKST KTNGLPLGEF YVKELTKTVH GTNRNVTCDN WFTSIPLAKN |
| 361 | MLQAPYNLTI VGTIRSNKRE IPEEIKNSRS RPVGSSMFCF DGPLTLVSYK PKPSRMVFLL |
| 421 | SSCDENAVIN ESNGKPDMIL FYNQTKGGVD SFDQMCKSMS ANRKTNRWPM AVFYGMLNMA |
| 481 | FVNSYIIYCH NKINKQKKPI NRKEFMKNLS TDLTTPWMQE RLKAPTLKRT LRDNITNVLK |
| 541 | NVVPPSPANN SEEPGRKKRS YCGFCSYKKR RMTKTQFYKC KKAICGEHNI DVCQDCV. |

[0240] In certain embodiments, the piggyBac or piggyBac-like transposon is isolated or derived from Agrotis ipsilon. In certain embodiments, the piggyBac or piggyBac-like transposon comprises a sequence of:

| (SEQ ID NO: 14538) | |
|---|---|
| 1 | ttaaccctag aagcccaatc tacgtaaatt tgacgtatac cgcggcgaaa tatatctgtc |
| 61 | tctttcacgt ttaccgtcgg attcccgcta acttcggaac caactcagta gccattgaga |
| 121 | actcccagga cacagttgcg tcatctcggt aagtgccgcc attttgttgt aatagacagg |
| 181 | ttgcacgtca ttttgacgta taattgggct ttgtgtaact tttgaaatta tttataattt |
| 241 | ttattgatgt gatttatttg agttaatcgt attgtttcgt tacatttttc atatgatatt |
| 301 | aatattttca gattgaatat aaa. |

[0241] In certain embodiments, the piggyBac or piggyBac-like transposon comprises a sequence of:

| (SIQ ID NO: 14539) | |
|---|---|
| 1 | agactgtttt ttttaaaagg cttataaagt attactattg cgtgatttaa ttttataaaa |
| 61 | atatttaaaa ccagttgatt tttttaataa ttacctaatt ttaagaaaaa atgttagaag |
| 121 | cttgatattt ttgttgattt ttttctaaga tttgattaaa aggccataat tgtattaata |
| 181 | aagagtattt ttaacttcaa atttatttta tttattaatt aaaacttcaa ttatgataat |
| 241 | acatgcaaaa atatagttca tcaacagaaa aatataggaa aactctaata gttttatttt |
| 301 | tacacgtcat ttttacgtat gattgggctt tatagctagt caaatatgat tgggcttcta |
| 351 | gggttaa. |

[0242] In certain embodiments of the methods of the disclosure, the transposase enzyme is a piggyBac or piggyBac-like transposase enzyme. In certain embodiments, the piggyBac or piggyBac-like transposase enzyme is isolated or derived from Megachile rotundata. The piggyBac (PB) or piggyBac-like transposase enzyme may comprise or consist of an amino acid sequence at least 5%, 10%, 15%, 20%, 25%, 30%, 35%, 40%, 45%, 50%, 55%, 60%, 65%, 70%, 75%, 80%, 85%, 90%, 95%, 99% or any percentage in between identical to:

| (SEQ ID NO: 14540) | |
|---|---|
| 1 | MNGKDSLGEF YLDDLSDCLD CRSASSTDDE SDSSNIAIRK RCRIPLIYSD SEDEDMNNNV |
| 61 | EDNNHFVKES NRYHYQIVEK YKITSKTKKW KDVTVTEMKK FLGLIILMGQ VKKDVLYDYW |
| 121 | STDPSIETPF FSKVMSRNRF LQIMQSWHFY NNNDISPNSH RLVKIQPVID YFKEKFNNVY |
| 181 | KSDQQLSLDE CLIPWRGRLS IKTYNPAKIT KYGILVRVLS EARTGYVSNF CVYAADGKKI |
| 241 | EETVLSVIGP YKNMWHHVYQ DNYYNSVNIA KIFLKNKLRV CGTIRKNRSL PQILQTVKLS |
| 301 | RGQHQFLRNG HTLLEVWNNG KRNVNMISTI HSAQMAESRN RSRTSDCPIQ KPISIIDYNK |
| 361 | YMKGVDRADQ YLSYYSIFRK TKKWTKRVVM FFINCALFNS FKVYTTLNGQ KITYKNFLHK |
| 421 | AALSLIEDCG TEEQGTDLPN SEPTTTRTTS RVDHPGRLEN FGKHKLVNIV TSGQCKKPLR |
| 481 | QCRVCASKKK LSRTGFACKY CNVPLHKGDC FERYHSLKKY. |

[0243] In certain embodiments, the piggyBac or piggyBac-like transposon is isolated or derived from Megachile rotundata. In certain embodiments, the piggyBac or piggyBac-like transposon comprises a sequence of:

| (SEQ ID NO: 14541) | |
|---|---|
| 1 | ttaaataatg cccactctag atgaacttaa cactttaccg accggccgtc gattattcga |
| 61 | cgtttgctcc ccagcgctta ccgaccggcc atcgattatt cgacgtttgc ttcccagcgc |
| 121 | ttaccgaccg gtcatcgact tttgatcttt ccgttagatt tggttaggtc agattgacaa |
| 181 | gtagcaagca tttcgcattc tttattcaaa taatcggtgc tttttctaa gctttagcccc |
| 241 | ttagaa. |

In certain embodiments, the piggyBac or piggyBac-like transposon comprises a sequence of:

| (SEQ ID NO: 14542) | |
|---|---|
| 1 | acaacttctt ttttcaacaa atattgttat atggattatt tatttattta tttatttatg |
| 61 | gtatatttta tgtttattta tttatggtta ttatggtata ttttatgtaa ataataaact |
| 121 | gaaaacgatt gtaatagatg aaataaatat tgttttaaca ctaatataat taaagtaaaa |
| 181 | gattttaata aatttcgtta ccctacaata acacgaagcg tacaatttta ccagagttta |
| 241 | ttaa. |

[0244] In certain embodiments of the methods of the disclosure, the transposase enzyme is a piggyBac or piggyBac-like transposase enzyme. In certain embodiments, the piggyBac or piggyBac-like transposase enzyme is isolated or derived from Bombus impatiens. The piggyBac (PB) or piggyBac-like transposase enzyme may comprise or consist of an amino acid sequence at least 5%, 10%, 15%, 20%, 25%, 30%, 35%, 40%, 45%, 50%, 55%, 60%, 65%, 70%, 75%, 80%, 85%, 90%, 95%, 99% or any percentage in between identical to:

| (SEQ ID NO: 14543) | |
|---|---|
| 1 | MNEKNGIGEF YLDDLSDCPD SYSRSNSGDE SDGSDTIIRK RGSVLPPRYS DSEDDEINNV |
| 61 | EDNANNVENN DDIWSTNDEA IILEPFEGSP GLKIMPSSAE SVTDNVNLFF GDDFFEHLVR |
| 121 | ESNRYHYQVM EKYKIPSKAK KWTDITVPEM KKFLGLIVLM GQIKKDVLYD YWSTDPSIET |
| 181 | PFFSQVMSRN RFVQIMQSWH FCNNDNIPHD SHRLAKIQPV IDYFRRKFND VYKPCQQLSL |
| 241 | DESIIPWPGR LSIKTYNPAK ITKYGILVRV LSEAVTGYVC NFDVYAADGK KLEDTAVIEP |
| 301 | YKNIWHQIYQ DNYYNSVKMA RILLKNKVRV CGTIRKNRGL PRSLKTIQLS RGQYEFRRNH |
| 361 | QILLEVWNNG RRNVNMISTI HSAQLMESRS KSKRSDVPIQ KPNSIIDYNK YMKGVDRADQ |
| 421 | YLAYYSIFRK TKKWTKRVVM FFINCALFNS FRVYTILNGK NITYKNFLHK VAVSWIEDGE |
| 481 | TNCTEQDDNL PNSEPTRRAP RLDHPGRLSN YGKHKLINIV TSGRSLKPQR QCRVCAVQKK |
| 541 | RSRTCFVCKF CNVPLHKGDC FERYHTLKKY. |

[0245] In certain embodiments, the piggyBac or piggyBac-like transposon is isolated or derived from Bombus impatiens. In certain embodiments, the piggyBac or piggyBac-like transposon comprises a sequence of:

| (SEQ ID NO: 14544) | |
|---|---|
| 1 | ttaatttttt aacattttac cgaccgatag ccgattaatc gggtttttgc cgctgacgct |
| 61 | taccgaccga taacctatta atcggctttt tgtcgtcgaa gcttaccaac ctatagccta |
| 121 | cctatagtta atcggttgcc atggcgataa acaatctttc tcattatatg agcagtaatt |
| 181 | tgttatttag tactaaggta ccttgctcag ttgcgtcagt tgcgttgctt tgtaagctcc |
| 241 | cacagtttta taccaattcg aaaaacttac cgttcgcg. |

In certain embodiments, the piggyBac or piggyBac-like transposon comprises a sequence of:

| (SEQ ID NO: 14545) | |
|---|---|
| 1 | actatttcac atttgaacta aaaaccgttg taatagataa aataaatata atttagtatt |
| 61 | aatattatgg aaacaaaaga ttttattcaa tttaattatc ctatagtaac aaaaagcggc |
| 121 | caattttatc tgagcatacg aaaagcacag atactcccgc ccgacagtct aaaccgaaac |
| 181 | agagccggcg ccagggagaa tctgcgcctg agcagccggt cggacgtgcg tttgctgttg |
| 241 | aaccgctagt ggtcagtaaa ccagaaccag tcagtaagcc agtaactgat cagttaacta |
| 301 | gattgtatag ttcaaattga acttaatcta gtttttaagc gtatgaatgt tgtctaactt |
| 361 | cgttatatat tatattcttt ttaa. |

[0246] In certain embodiments of the methods of the disclosure, the transposase enzyme is a piggyBac or piggyBac-like transposase enzyme. In certain embodiments, the piggyBac or piggyBac-like transposase enzyme is isolated or derived from Mamestra brassicae. The piggyBac (PB) or piggyBac-like transposase enzyme may comprise or consist of an amino acid sequence at least 5%, 10%, 15%, 20%, 25%, 30%, 35%, 40%, 45%, 50%, 55%, 60%, 65%, 70%, 75%, 80%, 85%, 90%, 95%, 99% or any percentage in between identical to:

| (SEQ ID NO: 14546) | |
|---|---|
| 1 | MFSFVPNKEQ TRTVLIFCFH LKTTAAESHR PLVEAFGEQV PTVKTCERWF QRFKSGDFDV |
| 61 | DDKEHGKPPK RYEDAELQAL LDEDDAQTQK QLAEQLEVSQ QAVSNRLREG GKIQKVGRWV |
| 121 | PHELNERQRE RRKNTCEILL SRYKRKSFLH RIVTGEEKWI FFVNPKRKKS YVDPGQPATS |
| 181 | TARPNRFGKK TRLCVWWDQS GVIYYELLKP GETVNTARYQ QQLINLNRAL QRKRPEYQKR |
| 241 | QHRVIFLHDN APSHTARAVR DTLETLNWEV LPHAAYSPDL APSDYHLFAS MGHALAEQRF |
| 301 | DSYESVEEWL DEWFAAKDDE FYWRGIHKLP ERWDNCVASD GKYFE. |

[0247] In certain embodiments, the piggyBac or piggyBac-like transposon is isolated or derived from Mamestra brassicae. In certain embodiments, the piggyBac or piggyBac-like transposon comprises a sequence of:

| (SEQ ID NO: 14547) | |
|---|---|
| 1 | ttattgggtt gcccaaaaag taattgcgga tttttcatat acctgtcttt taaacgtaca |
| 61 | tagggatcga actcagtaaa actttgacct tgtgaaataa caaacttgac tgtccaacca |
| 121 | ccatagtttg gcgcgaattg agcgtcataa ttgttttgac tttttgcagt caac. |

In certain embodiments, the piggyBac or piggyBac-like transposon comprises a sequence of:

| (SEQ ID NO: 14548) | |
|---|---|
| 1 | atgatttttt ctttttaaac caattttaat tagttaattg atataaaaat ccgcaattac |
| 61 | tttttgggca acccaataa. |

[0248] In certain embodiments of the methods of the disclosure, the transposase enzyme is a piggyBac or piggyBac-like transposase enzyme. In certain embodiments, the piggyBac or piggyBac-like transposase enzyme is isolated or derived from Mayetiola destructor. The piggyBac (PB) or piggyBac-like transposase enzyme may comprise or consist of an amino acid sequence at least 5%, 10%, 15%, 20%, 25%, 30%, 35%, 40%, 45%, 50%, 55%, 60%, 65%, 70%, 75%, 80%, 85%, 90%, 95%, 99% or any percentage in between identical to:

| (SEQ ID NO: 14549) | |
|---|---|
| 1 | MENFENWRKR RHLREVLLGH FFAKKTAAES HRLLVEVYGE HALAKTQCFE WFQRFKSGDF |
| 61 | DTEDKERPGQ PKKFEDEELE ALLDEDCCQT QEELAKSLGV TQQAISKRLK AAGYIQKQGN |
| 121 | WVPHELKPRD VERRFCMSEM LLQRHKKKSF LSRIITGDEK WIHYDNSKRK KSYVKRGGRA |
| 181 | KSTPKSNLHG AKVMLCIWWD QRGVLYYELL EPGQTITGDL YRTQLIRLKQ ALAEKRPEYA |
| 241 | KRHGAVIFHH DNARPHVALP VKNYLENSGW EVLPHPPYSP DLAPSDYHLF RSMQNDLAGK |
| 301 | RFTSEQGIRK WLDSFLAAKP AKFFEKGIHE LSERWEKVIA SDGQYFE. |

[0249] In certain embodiments, the piggyBac or piggyBac-like transposon is isolated or derived from Mayetiola destructor. In certain embodiments, the piggyBac or piggyBac-like transposon comprises a sequence of:

(SEQ ID NO: 14550)

| | |
|---|---|
| 1 | taagacttcc aaaatttcca cccgaacttt |
| | accttccccg cgcattatgt ctctcttttc |
| 61 | accctctgat ccctggtatt gttgtcgagc |
| | acgatttata ttgggtgtac aacttaaaaa |
| 121 | ccggaattgg acgctagatg tccacactaa |
| | cgaatagtgt aaaagcacaa atttcatata |
| 181 | tacgtcattt tgaaggtaca tttgacagct |
| | atcaaaatca gtcaataaaa ctattctatc |
| 241 | tgtgtgcatc atattttttt attaact. |

In certain embodiments, the piggyBac or piggyBac-like transposon comprises a sequence of:

(SEQ ID NO: 14551)

| | |
|---|---|
| 1 | tgcattcatt cattttgtta tcgaaataaa |
| | gcattaattt ccactaaaaa attccggttt |
| 61 | ttaagttgta cacccaatat catccttagt |
| | gacaattttc aaatggcttt cccattgagc |
| 121 | tgaaaccgtg gctatagtaa gaaaaacgcc |
| | caacccgtca tcatatgcct tttttttctc |
| 181 | aacatccg. |

[0250] In certain embodiments of the methods of the disclosure, the transposase enzyme is a piggyBac or piggyBac-like transposase enzyme. In certain embodiments, the piggyBac or piggyBac-like transposase enzyme is isolated or derived from Apis mellifera. The piggyBac (PB) or piggyBac-like transposase enzyme may comprise or consist of an amino acid sequence at least 5%, 10%, 15%, 20%, 25%, 30%, 35%, 40%, 45%, 50%, 55%, 60%, 65%, 70%, 75%, 80%, 85%, 90%, 95%, 99% or any percentage in between identical to:

(SEQ ID NO: 14552)

| | |
|---|---|
| 1 | MENQKEHYRH ILLFYFRKGK NASQAHKKLC |
| | AVYGDEALKE RQCQNWFDKF RSGDFSLKDE |
| 61 | KRSGRPVEVD DDLIKAIIDS DRHSTTREIA |
| | EKLHVSHTCI ENHLKQLGYV QKLDTWVPHE |
| 121 | LKEKHLTQRI NSCDLLKKRN ENDPFLKRLI |
| | TGDEKWVVYN NIKRKRSWSR PREPAQTTSK |
| 181 | AGIHRKKVLL SVWWDYKGIV YFELLPPNRT |
| | INSVVYIEQL TKLNNAVEEK RPELTNRKGV |
| 241 | VFHHDNARPH TSLVTRQKLL ELGWDVLPHP |
| | PYSPDLAPSD YFLFRSLQNS LNGKNFNNDD |
| 301 | DIKSYLIQFF ANKNQKFYER GIMMLPERWQ |
| | KVIDQNGQHI TE. |

[0251] In certain embodiments, the piggyBac or piggyBac-like transposon is isolated or derived from Apis mellifera. In certain embodiments, the piggyBac or piggyBac-like transposon comprises a sequence of:

(SEQ ID NO: 14553)

| | |
|---|---|
| 1 | ttgggttggc aactaagtaa ttgcggattt |
| | cactcataga tggcttcagt tgaattttta |
| 61 | ggtttgctgg cgtagtccaa atgtaaaaca |
| | cattttgtta tttgatagtt ggcaactcag |
| 121 | ctgtcaatca gtaaaaaaag ttttttgatc |
| | ggttgcgtag ttttcgtttg gcgttcgttg |
| 181 | aaaa. |

In certain embodiments, the piggyBac or piggyBac-like transposon comprises a sequence of:

(SEQ ID NO: 14554)

| | |
|---|---|
| 1 | agttatttag ttccatgaaa aaattgtctt |
| | tgattttcta aaaaaaatcc gcaattactt |
| 61 | agttgccaat ccaa. |

[0252] In certain embodiments of the methods of the disclosure, the transposase enzyme is a piggyBac or piggyBac-like transposase enzyme. In certain embodiments, the piggyBac or piggyBac-like transposase enzyme is isolated or derived from Messor bouvieri. The piggyBac (PB) or piggyBac-like transposase enzyme may comprise or consist of an amino acid sequence at least 5%, 10%, 15%, 20%, 25%, 30%, 35%, 40%, 45%, 50%, 55%, 60%, 65%, 70%, 75%, 80%, 85%, 90%, 95%, 99% or any percentage in between identical to:

(SEQ ID NO: 14555)

| | |
|---|---|
| 1 | MSSFVPENVH LRHALLFLFH QKKRAAESHR |
| | LLVETYGEHA PTIRTCETWF RQFKCGDFNV |
| 61 | QDKERPGRPK TFEDAELQEL LDEDSTQTQK |
| | QLAEKLNVSR VAICERLQAM GKIQKMGRWV |
| 121 | PHELNDRQME NRKIVSEMLL QRYERKSFLH |
| | RIVTGDEKWI YFENPKRKKS WLSPGEAGPS |
| 181 | TARPNRFGRK TMLCVWWDQI GVVYYELLKP |
| | GETVNTDRYR QQMINLNCAL IEKRPQYAQR |
| 241 | HDKVILQHDN APSHTAKPVK EMLKSLGWEV |
| | LSHPPYSPDL APSDYHLFAS MGHALAEQHF |
| 301 | ADFEEVKKWL DEWFSSKEKL FFWNGIHKLS |
| | ERWTKCIESN GQYFE. |

[0253] In certain embodiments, the piggyBac or piggyBac-like transposon is isolated or derived from Messor bouvieri. In certain embodiments, the piggyBac or piggyBac-like transposon comprises a sequence of:

(SEQ ID NO: 14556)

| | |
|---|---|
| 1 | agtcagaaat gacacctcga tcgacgacta |
| | atcgacgtct aatcgacgtc gattttatgt |
| 61 | caacatgtta ccaggtgtgt cggtaattcc |
| | tttccggttt ttccggcaga tgtcactagc |
| 121 | cataagtatg aaatgttatg atttgataca |
| | tatgtcattt tattctactg acattaacct |
| 181 | taaaactaca caagttacgt tccgccaaaa |
| | taacagcgtt atagatttat aattttttga |
| 241 | aa. |

In certain embodiments, the piggyBac or piggyBac-like transposon comprises a sequence of:

(SEQ ID NO: 14557)

| | |
|---|---|
| 1 | ataaatttga actatccatt ctaagtaacg |
| | tgttttcttt aacgaaaaaa ccggaaaaaa |
| 61 | attaccgaca ctcctggtat gtaaacatgt |
| | tattttcgac attgaatcgc gtcgattcga |
| 121 | agtcgatcga ggtgtcattt ctgact. |

[0254] In certain embodiments of the methods of the disclosure, the transposase enzyme is a piggyBac or piggyBac-like transposase enzyme. In certain embodiments, the piggyBac or piggyBac-like transposase enzyme is isolated or derived from Trichoplusia ni. The piggyBac (PB) or piggyBac-like transposase enzyme may comprise or consist of an amino acid sequence at least 5%, 10%, 15%, 20%, 25%, 30%, 35%, 40%, 45%, 50%, 55%, 60%, 65%, 70%, 75%, 80%, 85%, 90%, 95%, 99% or any percentage in between identical to:

(SEQ ID NO: 14558)

| | |
|---|---|
| 1 | MGSSLDDEHI LSALLQSDDE LVGEDSDSEV |
| | SDHVSEDDVQ SDTEEAFIDE VHEVQPTSSG |
| 61 | SEILDEQNVI EQPGSSLASN RILTLPQRTI |
| | RGKNKHCWST SKSTRRSRVS ALNIVRSQRG |
| 121 | PTRMCRNIYD PLLCFKLFFT DEIISEIVKW |
| | TNAEISLKRR ESMTSATFRD TNEDEIYAFF |
| 181 | GILVMTAVRK DNHMSTDDLF DRSLSMVYVS |
| | VMSRDRFDFL IRCLRMDDKS IRPTLRENDV |
| 241 | FTPVRKIWDL FIHQCIQNYT PGAHLTIDEQ |
| | LLGFRGRCPF RVYIPNKPSK YGIKILMMCD |
| 301 | SGTKYMINGM PYLGRGTQTN GVPLGEYYVK |
| | ELSKPVHGSC RNITCDNWFT SIPLAKNLLQ |
| 361 | EPYKLTIVGT VRSNKREIPE VLKNSRSRPV |
| | GTSMECFDGP LTLVSYKPKP AKMVYLLSSC |
| 421 | DEDASINEST GKPQMVMYYN QTKGGVDTLD |
| | QMCSVNTCSR KTNPWPMALL YGMINIACIN |
| 481 | SFIIYSHNVS SKGEKVQSRK KFMRNLYMSL |
| | TSSFMRKRLE APTLKRYLRD NISNILPKEV |
| 541 | PGTSDDSTEE PVMKKRTYCT YCPSKIRRKA |
| | NASCKKCKKV ICREHNIDMC QSCF. |

[0255] In certain embodiments, the piggyBac or piggyBac-like transposon is isolated or derived from Trichoplusia ni. In certain embodiments, the piggyBac or piggyBac-like transposon comprises a sequence of:

(SEQ ID NO: 14559)

| | |
|---|---|
| 1 | ttaaccctag aaagatagtc tgcgtaaaat |
| | tgacgcatgc attcttgaaa tattgctctc |
| 61 | tctttctaaa tagcgcgaat ccgtcgctgt |
| | gcatttagga cacctcagtc gccgcttgga |
| 121 | gctcccgtga ggcgtgcttg tcaatgcggt |
| | aagtgtcact gattttgaac tataacgacc |
| 181 | gcgtgagtca aaatgacgca tgattatctt |
| | ttacgtgact tttaagattt aactcatacg |
| 241 | ataattatat tgttatttca tgttctactt |
| | acgtgataac ttattatata tatattttct |
| 301 | tgttatagat atc. |

In certain embodiments, the piggyBac or piggyBac-like transposon comprises a sequence of:

(SEQ ID NO: 14560)

| | |
|---|---|
| 1 | tttgttactt tatagaagaa attttgagtt |
| | tttgtttttt ttcaataaat aaataaacat |
| 61 | aaataaattg tttgttgaat ttattattag |
| | tatgtaagtg taaatataat aaaacttaat |
| 121 | atctattcaa attaataaat aaacctcgat |
| | atacagaccg ataaaacaca tgcgccaatt |
| 181 | tcacgcatga ttatcttcaa cgtacgtcac |
| | aatatgatta tctttccagg gttaa. |

In certain embodiments, the piggyBac or piggyBac-like transposon comprises a sequence of:

(SEQ ID NO: 14561)

| | |
|---|---|
| 1 | ccctagaaag atagtctgcg taaaattgac |
| | gcatgcattc ttgaaatatt gctctctctt |
| 61 | tctaaatagc gcgaatccgt cgctgtgcat |
| | ttaggacatc tcagtcgccg cttggagctc |
| 121 | ccgtgaggcg tgcttgtcaa tgcggtaagt |
| | gtcactgatt ttgaactata acgaccgcgt |
| 181 | gagtcaaaat gacgcatgat tatcttttac |
| | gtgactttta agatttaact catacgataa |
| 241 | ttatattgtt atttcatgtt ctacttacgt |
| | gataacttat tatatatata ttttcttgtt |
| 301 | atagatatc. |

In certain embodiments, the piggyBac or piggyBac-like transposon comprises a sequence of:

(SEQ ID NO: 14562)

| | |
|---|---|
| 1 | tttgttactt tatagaagaa attttgagtt |
| | tttgtttttt tttaataaat aaataaacat |
| 61 | aaataaattg tttgttgaat ttattattag |
| | tatgtaagtg taaatataat aaaacttaat |
| 121 | atctattcaa attaataaat aaacctcgat |
| | atacagaccg ataaaacaca tgcgtcaatt |
| 181 | ttacgcatga ttatctttaa cgtacgtcac |
| | aatatgatta tctttctagg g. |

In certain embodiments, the piggyBac or piggyBac-like transposon comprises a sequence of:

(SEQ ID NO: 14609)

| | |
|---|---|
| 1 | tctaaatagc gcgaatccgt cgctgtgcat |
| | ttaggacatc tcagtcgccg cttggagctc |
| 61 | ccgtgaggcg tgcttgtcaa tgcggtaagt |
| | gtcactgatt ttgaactata acgaccgcgt |
| 121 | gagtcaaaat gacgcatgat tatcttttac |
| | gtgactttta agatttaact catacgataa |
| 181 | ttatattgtt atttcatgtt ctacttacgt |
| | gataacttat tatatatata ttttcttgtt |
| 241 | atagatatc. |

In certain embodiments, the piggyBac or piggyBac-like transposon comprises a sequence of:

(SEQ ID NO: 14610)

| | |
|---|---|
| 1 | tttgttactt tatagaagaa attttgagtt |
| | tttgtttttt tttaataaat aaataaacat |
| 61 | aaataaattg tttgttgaat ttattattag |
| | tatgtaagtg taaatataat aaaacttaat |
| 121 | atccattcaa attaataaat aaacctcgat |
| | atacagaccg ataaaacaca tgcgtcaatt |
| 181 | ttacgcatga ttatctttaa cgtacgtcac |
| | aatatgatta tccttctagg g. |

[0256] In certain embodiments, the piggyBac or piggyBac-like transposon comprises SEQ ID NO: 14561 and SEQ ID NO: 14562, and the piggyBac or piggyBac-like transposase comprises SEQ ID NO: 14558. In certain embodiments, the piggyBac or piggyBac-like transposon comprises SEQ ID NO: 14609 and SEQ ID NO: 14610, and the piggyBac or piggyBac-like transposase comprises SEQ ID NO: 14558.

[0257] In certain embodiments, the piggyBac or piggyBac-like transposon is isolated or derived from Aphis gossypii. In certain embodiments, the piggyBac or piggyBac-like transposon comprises an ITR sequence of CCTTCCAGCGGGCGCGC (SEQ ID NO: 14565).

[0258] In certain embodiments, the piggyBac or piggyBac-like transposon is isolated or derived from Chilo suppressalis. In certain embodiments, the piggyBac or piggyBac-like transposon comprises an ITR sequence of CCCAGATTAGCCT (SEQ ID NO: 14566).

[0259] In certain embodiments, the piggyBac or piggyBac-like transposon is isolated or derived from Heliothis virescens. In certain embodiments, the piggyBac or piggyBac-like transposon comprises an ITR sequence of CCCTTAATTACTCGCG (SEQ ID NO: 14567).

[0260] In certain embodiments, the piggyBac or piggyBac-like transposon is isolated or derived from Pectinophora gossypiella. In certain embodiments, the piggyBac or piggyBac-like transposon comprises an ITR sequence of CCCTAGATAACTAAAC (SEQ ID NO: 14568).

[0261] In certain embodiments, the piggyBac or piggyBac-like transposon is isolated or derived from Anopheles stephensi. In certain embodiments, the piggyBac or piggyBac-like transposon comprises an ITR sequence of CCCTAGAAAGATA (SEQ ID NO: 14569).

### Immune and Immune Precursor Cells

[0262] In certain embodiments, immune cells of the disclosure comprise lymphoid progenitor cells, natural killer (NK) cells, T lymphocytes (T-cell), stem memory T cells (T_{SCM} cells), central memory T cells (T_{CM}), stem cell-like T cells, B lymphocytes (B-cells), myeloid progenitor cells, neutrophils, basophils, eosinophils, monocytes, macrophages, platelets, erythrocytes, red blood cells (RBCs), megakaryocytes or osteoclasts.

[0263] In certain embodiments, immune precursor cells comprise any cells which can differentiate into one or more types of immune cells. In certain embodiments, immune precursor cells comprise multipotent stem cells that can self renew and develop into immune cells. In certain embodiments, immune precursor cells comprise hematopoietic stem cells (HSCs) or descendants thereof. In certain embodiments, immune precursor cells comprise precursor cells that can develop into immune cells. In certain embodiments, the immune precursor cells comprise hematopoietic progenitor cells (HPCs).

### Hematopoietic Stem Cells (HSC's)

[0264] Hematopoietic stem cells (HSCs) are multipotent, self-renewing cells. All differentiated blood cells from the lymphoid and myeloid lineages arise from HSCs. HSCs can be found in adult bone marrow, peripheral blood, mobilized peripheral blood, peritoneal dialysis effluent and umbilical cord blood.

[0265] HSCs of the disclosure may be isolated or derived from a primary or cultured stem cell. HSCs of the disclosure may be isolated or derived from an embryonic stem cell, a multipotent stem cell, a pluripotent stem cell, an adult stem cell, or an induced pluripotent stem cell (iPSC).

[0266] Immune precursor cells of the disclosure may comprise an HSC or an HSC descendent cell. Exemplary HSC descendent cells of the disclosure include, but are not limited to, multipotent stem cells, lymphoid progenitor cells, natural killer (NK) cells, T lymphocyte cells (T-cells), B lymphocyte cells (B-cells), myeloid progenitor cells, neutrophils, basophils, eosinophils, monocytes, and macrophages.

[0267] HSCs produced by the methods of the disclosure may retain features of “primitive” stem cells that, while isolated or derived from an adult stem cell and while committed to a single lineage, share characteristics of embryonic stem cells. For example, the “primitive” HSCs produced by the methods of the disclosure retain their “stemness” following division and do not differentiate. Consequently, as an adoptive cell therapy, the “primitive” HSCs produced by the methods of the disclosure not only replenish their numbers, but expand in vivo. “Primitive” HSCs produced by the methods of the disclosure may be therapeutically-effective when administered as a single dose. In some embodiments, primitive HSCs of the disclosure are CD34+. In some embodiments, primitive HSCs of the disclosure are CD34+ and CD38−. In some embodiments, primitive HSCs of the disclosure are CD34+, CD38− and CD90+. In some embodiments, primitive HSCs of the disclosure are CD34+, CD38−, CD90+ and CD45RA−. In some embodiments, primitive HSCs of the disclosure are CD34+, CD38−, CD90+, CD45RA−, and CD49f+. In some embodiments, the most primitive HSCs of the disclosure are CD34+, CD38−, CD90+, CD45RA−, and CD49f+.

[0268] In some embodiments of the disclosure, primitive HSCs, HSCs, and/or HSC descendent cells may be modified according to the methods of the disclosure to express an exogenous sequence (e.g. a chimeric antigen receptor or therapeutic protein). In some embodiments of the disclosure, modified primitive HSCs, modified HSCs, and/or modified HSC descendent cells may be forward differentiated to produce a modified immune cell including, but not limited to, a modified T cell, a modified natural killer cell and/or a modified B-cell of the disclosure.

### T Cells

[0269] Modified T cells of the disclosure may be derived from modified hematopoietic stem and progenitor cells (HSPCs) or modified HSCs.

[0270] Unlike traditional biologics and chemotherapeutics, modified-T cells of the disclosure possess the capacity to rapidly reproduce upon antigen recognition, thereby potentially obviating the need for repeat treatments. To achieve this, in some embodiments, modified-T cells of the disclosure not only drive an initial response, but also persist in the patient as a stable population of viable memory T cells to prevent potential relapses. Alternatively, in some embodiments, when it is not desired, modified-T cells of the disclosure do not persist in the patient.

[0271] Intensive efforts have been focused on the development of antigen receptor molecules that do not cause T cell exhaustion through antigen-independent (tonic) signaling, as well as of a modified-T cell product containing early memory T cells, especially stem cell memory (T_{SCM}) or stem cell-like T cells. Stem cell-like modified-T cells of the disclosure exhibit the greatest capacity for self-renewal and multipotent capacity to derive central memory (T_{CM}) T cells or T_{CM} like cells, effector memory (T_{EM}) and effector T cells (T_{E}), thereby producing better tumor eradication and long-term modified-T cell engraftment. A linear pathway of differentiation may be responsible for generating these cells: Naïve T cells (T_{N})>T_{SCM}>T_{CM}>T_{EM}>T_{E}>T_{TE}, whereby T_{N} is the parent precursor cell that directly gives rise to T_{SCM}, which then, in turn, directly gives rise to T_{CM}, etc. Compositions of T cells of the disclosure may comprise one or more of each parental T cell subset with T_{SCM} cells being the most abundant (e.g. T_{SCM}>T_{CM}>T_{EM}>T_{E}>T_{TE}).

[0272] In some embodiments of the methods of the disclosure, the immune cell precursor is differentiated into or is capable of differentiating into an early memory T cell, a stem cell like T-cell, a Naïve T cells (T_{N}), a T_{SCM}, a T_{CM}, a T_{EM}, a T_{E}, or a T_{TE}. In some embodiments, the immune cell precursor is a primitive HSC, an HSC, or a HSC descendent cell of the disclosure.

[0273] In some embodiments of the methods of the disclosure, the immune cell is an early memory T cell, a stem cell like T-cell, a Naïve T cells (T_{N}), a T_{SCM}, a T_{CM}, a T_{EM}, a T_{E}, or a T_{TE}.

[0274] In some embodiments of the methods of the disclosure, the immune cell is an early memory T cell.

[0275] In some embodiments of the methods of the disclosure, the immune cell is a stem cell like T-cell.

[0276] In some embodiments of the methods of the disclosure, the immune cell is a T_{SCM}.

[0277] In some embodiments of the methods of the disclosure, the immune cell is a T_{CM}.

[0278] In some embodiments of the methods of the disclosure, the methods modify and/or the methods produce a plurality of modified T cells, wherein at least 2%, 5%, 10%, 15%, 20%, 25%, 30%, 35%, 40%, 45%, 50%, 60%, 65%, 70%, 75%, 80%, 85%, 90%, 95%, 99% or any percentage in between of the plurality of modified T cells expresses one or more cell-surface marker(s) of an early memory T cell. In certain embodiments, the plurality of modified early memory T cells comprises at least one modified stem cell-like T cell. In certain embodiments, the plurality of modified early memory T cells comprises at least one modified T_{SCM}. In certain embodiments, the plurality of modified early memory T cells comprises at least one modified T_{CM}.

[0279] In some embodiments of the methods of the disclosure, the methods modify and/or the methods produce a plurality of modified T cells, wherein at least 2%, 5%, 10%, 15%, 20%, 25%, 30%, 35%, 40%, 45%, 50%, 60%, 65%, 70%, 75%, 80%, 85%, 90%, 95%, 99% or any percentage in between of the plurality of modified T cells expresses one or more cell-surface marker(s) of a stem cell-like T cell. In certain embodiments, the plurality of modified stem cell-like T cells comprises at least one modified T_{SCM}. In certain embodiments, the plurality of modified stem cell-like T cells comprises at least one modified T_{CM}.

[0280] In some embodiments of the methods of the disclosure, the methods modify and/or the methods produce a plurality of modified T cells, wherein at least 2%, 5%, 10%, 15%, 20%, 25%, 30%, 35%, 40%, 45%, 50%, 60%, 65%, 70%, 75%, 80%, 85%, 90%, 95%, 99% or any percentage in between of the plurality of modified T cells expresses one or more cell-surface marker(s) of a stem memory T cell (T_{SCM}). In certain embodiments, the cell-surface markers comprise CD62L and CD45RA. In certain embodiments, the cell-surface markers comprise one or more of CD62L, CD45RA, CD28, CCR7, CD127, CD45RO, CD95, CD95 and IL-2Rβ. In certain embodiments, the cell-surface markers comprise one or more of CD45RA, CD95, IL-2Rβ, CCR7, and CD62L.

[0281] In some embodiments of the methods of the disclosure, the methods modify and/or the methods produce a plurality of modified T cells, wherein at least 2%, 5%, 10%, 15%, 20%, 25%, 30%, 35%, 40%, 45%, 50%, 60%, 65%, 70%, 75%, 80%, 85%, 90%, 95%, 99% or any percentage in between of the plurality of modified T cells expresses one or more cell-surface marker(s) of a central memory T cell (T_{CM}). In certain embodiments, the cell-surface markers comprise one or more of CD45RO, CD95, IL-2Rβ, CCR7, and CD62L.

[0282] In some embodiments of the methods of the disclosure, the methods modify and/or the methods produce a plurality of modified T cells, wherein at least 2%, 5%, 10%, 15%, 20%, 25%, 30%, 35%, 40%, 45%, 50%, 60%, 65%, 70%, 75%, 80%, 85%, 90%, 95%, 99% or any percentage in between of the plurality of modified T cells expresses one or more cell-surface marker(s) of a naïve T cell (T_{N}). In certain embodiments, the cell-surface markers comprise one or more of CD45RA, CCR7 and CD62L.

[0283] In some embodiments of the methods of the disclosure, the methods modify and/or the methods produce a plurality of modified T cells, wherein at least 2%, 5%, 10%, 15%, 20%, 25%, 30%, 35%, 40%, 45%, 50%, 60%, 65%, 70%, 75%, 80%, 85%, 90%, 95%, 99% or any percentage in between of the plurality of modified T cells expresses one or more cell-surface marker(s) of an effector T-cell (modified T_{EFF}). In certain embodiments, the cell-surface markers comprise one or more of CD45RA, CD95, and IL-2Rβ.

[0284] In some embodiments of the methods of the disclosure, the methods modify and/or the methods produce a plurality of modified T cells, wherein at least 2%, 5%, 10%, 15%, 20%, 25%, 30%, 35%, 40%, 45%, 50%, 60%, 65%, 70%, 75%, 80%, 85%, 90%, 95%, 99% or any percentage in between of the plurality of modified T cells expresses one or more cell-surface marker(s) of a stem cell-like T cell, a stem memory T cell (T_{SCM}) or a central memory T cell (T_{CM}).

[0285] In some embodiments of the methods of the disclosure, a buffer comprises the immune cell or precursor thereof. The buffer maintains or enhances a level of cell viability and/or a stem-like phenotype of the immune cell or precursor thereof, including T-cells. In certain embodiments, the buffer maintains or enhances a level of cell viability and/or a stem-like phenotype of the primary human T cells prior to the nucleofection. In certain embodiments, the buffer maintains or enhances a level of cell viability and/or a stem-like phenotype of the primary human T cells during the nucleofection. In certain embodiments, the buffer maintains or enhances a level of cell viability and/or a stem-like phenotype of the primary human T cells following the nucleofection. In certain embodiments, the buffer comprises one or more of KCl, MgCl₂, ClNa, Glucose and Ca(NO₃)₂ in any absolute or relative abundance or concentration, and, optionally, the buffer further comprises a supplement selected from the group consisting of HEPES, Tris/HCl, and a phosphate buffer. In certain embodiments, the buffer comprises 5 mM KCl, 15 mM MgCl₂, 90 mM ClNa, 10 mM Glucose and 0.4 mM Ca(NO₃)₂. In certain embodiments, the buffer comprises 5 mM KCl, 15 mM MgCl₂, 90 mM ClNa, 10 mM Glucose and 0.4 mM Ca(NO₃)₂ and a supplement comprising 20 mM HEPES and 75 mM Tris/HCl. In certain embodiments, the buffer comprises 5 mM KCl, 15 mM MgCl₂, 90 mM ClNa, 10 mM Glucose and 0.4 mM Ca(NO₃)₂ and a supplement comprising 40 mM Na₂HPO₄/NaH₂PO₄ at pH 7.2. In certain embodiments, the composition comprising primary human T cells comprises 100 μl of the buffer and between 5×10⁶ and 25×10⁶ cells. In certain embodiments, the composition comprises a scalable ratio of 250×10⁶ primary human T cells per milliliter of buffer or other media during the introduction step.

[0286] In some embodiments of the methods of the disclosure, the methods comprise contacting an immune cell of the disclosure, including a T cell of the disclosure, and a T-cell expansion composition. In some embodiments of the methods of the disclosure, the step of introducing a transposon and/or transposase of the disclosure into an immune cell of the disclosure may further comprise contacting the immune cell and a T-cell expansion composition. In some embodiments, including those in which the introducing step of the methods comprises an electroporation or a nucleofection step, the electroporation or a nucleofection step may be performed with the immune cell contacting T-cell expansion composition of the disclosure.

[0287] In some embodiments of the methods of the disclosure, the T-cell expansion composition comprises, consists essentially of or consists of phosphorus; one or more of an octanoic acid, a palmitic acid, a linoleic acid, and an oleic acid; a sterol; and an alkane.

[0288] In certain embodiments of the methods of producing a modified T cell of the disclosure, the expansion supplement comprises one or more cytokine(s). The one or more cytokine(s) may comprise any cytokine, including but not limited to, lymphokines. Exemplary lymphokines include, but are not limited to, interleukin-2 (IL-2), interleukin-3 (IL-3), interleukin-4 (IL-4), interleukin-5 (IL-5), interleukin-6 (IL-6), interleukin-7 (IL-7), interleukin-15 (IL-15), interleukin-21 (IL-21), granulocyte-macrophage colony-stimulating factor (GM-CSF) and interferon-gamma (INFγ). The one or more cytokine(s) may comprise IL-2.

[0289] In some embodiments of the methods of the disclosure, the T-cell expansion composition comprises human serum albumin, recombinant human insulin, human transferrin, 2-Mercaptoethanol, and an expansion supplement. In certain embodiments of this method, the T-cell expansion composition further comprises one or more of octanoic acid, nicotinamide, 2,4,7,9-tetramethyl-5-decyn-4,7-diol (TMDD), diisopropyl adipate (DIPA), n-butyl-benzenesulfonamide, 1,2-benzenedicarboxylic acid, bis(2-methylpropyl) ester, palmitic acid, linoleic acid, oleic acid, stearic acid hydrazide, oleamide, a sterol and an alkane. In certain embodiments of this method, the T-cell expansion composition further comprises one or more of octanoic acid, palmitic acid, linoleic acid, oleic acid and a sterol. In certain embodiments of this method, the T-cell expansion composition further comprises one or more of octanoic acid at a concentration of between 0.9 mg/kg to 90 mg/kg, inclusive of the endpoints; palmitic acid at a concentration of between 0.2 mg/kg to 20 mg/kg, inclusive of the endpoints; linoleic acid at a concentration of between 0.2 mg/kg to 20 mg/kg, inclusive of the endpoints; oleic acid at a concentration of 0.2 mg/kg to 20 mg/kg, inclusive of the endpoints; and a sterol at a concentration of about 0.1 mg/kg to 10 mg/kg, inclusive of the endpoints. In certain embodiments of this method, the T-cell expansion composition further comprises one or more of octanoic acid at a concentration of about 9 mg/kg, palmitic acid at a concentration of about 2 mg/kg, linoleic acid at a concentration of about 2 mg/kg, oleic acid at a concentration of about 2 mg/kg and a sterol at a concentration of about 1 mg/kg. In certain embodiments of this method, the T-cell expansion composition further comprises one or more of octanoic acid at a concentration of between 6.4 μmol/kg and 640 μmol/kg, inclusive of the endpoints; palmitic acid at a concentration of between 0.7 μmol/kg and 70 μmol/kg, inclusive of the endpoints; linoleic acid at a concentration of between 0.75 μmol/kg and 75 μmol/kg, inclusive of the endpoints; oleic acid at a concentration of between 0.75 μmol/kg and 75 μmol/kg, inclusive of the endpoints; and a sterol at a concentration of between 0.25 μmol/kg and 25 μmol/kg, inclusive of the endpoints. In certain embodiments of this method, the T-cell expansion composition further comprises one or more of octanoic acid at a concentration of about 64 μmol/kg, palmitic acid at a concentration of about 7 μmol/kg, linoleic acid at a concentration of about 7.5 μmol/kg, oleic acid at a concentration of about 7.5 μmol/kg and a sterol at a concentration of about 2.5 μmol/kg.

[0290] In certain embodiments, the T-cell expansion composition comprises one or more of human serum albumin, recombinant human insulin, human transferrin, 2-Mercaptoethanol, and an expansion supplement to produce a plurality of expanded modified T-cells, wherein at least 2% of the plurality of modified T-cells expresses one or more cell-surface marker(s) of an early memory T cell, a stem cell-like T cell, a stem memory T cell (T_{SCM}) and/or a central memory T cell (T_{CM}). In certain embodiments, the T-cell expansion composition comprises or further comprises one or more of octanoic acid, nicotinamide, 2,4,7,9-tetramethyl-5-decyn-4,7-diol (TMDD), diisopropyl adipate (DIPA), n-butyl-benzenesulfonamide, 1,2-benzenedicarboxylic acid, bis(2-methylpropyl) ester, palmitic acid, linoleic acid, oleic acid, stearic acid hydrazide, oleamide, a sterol and an alkane. In certain embodiments, the T-cell expansion composition comprises one or more of octanoic acid, palmitic acid, linoleic acid, oleic acid and a sterol (e.g. cholesterol). In certain embodiments, the T-cell expansion composition comprises one or more of octanoic acid at a concentration of between 0.9 mg/kg to 90 mg/kg, inclusive of the endpoints; palmitic acid at a concentration of between 0.2 mg/kg to 20 mg/kg, inclusive of the endpoints; linoleic acid at a concentration of between 0.2 mg/kg to 20 mg/kg, inclusive of the endpoints; oleic acid at a concentration of 0.2 mg/kg to 20 mg/kg, inclusive of the endpoints; and a sterol at a concentration of about 0.1 mg/kg to 10 mg/kg, inclusive of the endpoints (wherein mg/kg=parts per million). In certain embodiments, the T-cell expansion composition comprises one or more of octanoic acid at a concentration of about 9 mg/kg, palmitic acid at a concentration of about 2 mg/kg, linoleic acid at a concentration of about 2 mg/kg, oleic acid at a concentration of about 2 mg/kg, and a sterol at a concentration of about 1 mg/kg (wherein mg/kg=parts per million). In certain embodiments, the T-cell expansion composition comprises one or more of octanoic acid at a concentration of 9.19 mg/kg, palmitic acid at a concentration of 1.86 mg/kg, linoleic acid at a concentration of about 2.12 mg/kg, oleic acid at a concentration of about 2.13 mg/kg, and a sterol at a concentration of about 1.01 mg/kg (wherein mg/kg=parts per million). In certain embodiments, the T-cell expansion composition comprises octanoic acid at a concentration of 9.19 mg/kg, palmitic acid at a concentration of 1.86 mg/kg, linoleic acid at a concentration of 2.12 mg/kg, oleic acid at a concentration of about 2.13 mg/kg, and a sterol at a concentration of 1.01 mg/kg (wherein mg/kg=parts per million). In certain embodiments, the T-cell expansion composition comprises one or more of octanoic acid at a concentration of between 6.4 μmol/kg and 640 μmol/kg, inclusive of the endpoints; palmitic acid at a concentration of between 0.7 μmol/kg and 70 μmol/kg, inclusive of the endpoints; linoleic acid at a concentration of between 0.75 μmol/kg and 75 μmol/kg, inclusive of the endpoints; oleic acid at a concentration of between 0.75 μmol/kg and 75 μmol/kg, inclusive of the endpoints; and a sterol at a concentration of between 0.25 μmol/kg and 25 μmol/kg, inclusive of the endpoints. In certain embodiments, the T-cell expansion composition comprises one or more of octanoic acid at a concentration of about 64 μmol/kg, palmitic acid at a concentration of about 7 μmol/kg, linoleic acid at a concentration of about 7.5 μmol/kg, oleic acid at a concentration of about 7.5 μmol/kg and a sterol at a concentration of about 2.5 μmol/kg. In certain embodiments, the T-cell expansion composition comprises one or more of octanoic acid at a concentration of about 63.75 μmol/kg, palmitic acid at a concentration of about 7.27 μmol/kg, linoleic acid at a concentration of about 7.57 μmol/kg, oleic acid at a concentration of about 7.56 μmol/kg and a sterol at a concentration of about 2.61 μmol/kg. In certain embodiments, the T-cell expansion composition comprises octanoic acid at a concentration of about 63.75 μmol/kg, palmitic acid at a concentration of about 7.27 μmol/kg, linoleic acid at a concentration of about 7.57 μmol/kg, oleic acid at a concentration of 7.56 μmol/kg and a sterol at a concentration of 2.61 μmol/kg.

[0291] As used herein, the terms “supplemented T-cell expansion composition” or “T-cell expansion composition” may be used interchangeably with a media comprising one or more of human serum albumin, recombinant human insulin, human transferrin, 2-Mercaptoethanol, and an expansion supplement at 37° C. Alternatively, or in addition, the terms “supplemented T-cell expansion composition” or “T-cell expansion composition” may be used interchangeably with a media comprising one or more of phosphorus, an octanoic fatty acid, a palmitic fatty acid, a linoleic fatty acid and an oleic acid. In certain embodiments, the media comprises an amount of phosphorus that is 10-fold higher than may be found in, for example, Iscove's Modified Dulbecco's Medium ((IMDM); available at ThermoFisher Scientific as Catalog number 12440053).

[0292] As used herein, the terms “supplemented T-cell expansion composition” or “T-cell expansion composition” may be used interchangeably with a media comprising one or more of human serum albumin, recombinant human insulin, human transferrin, 2-Mercaptoethanol, Iscove's MDM, and an expansion supplement at 37° C. Alternatively, or in addition, the terms “supplemented T-cell expansion composition” or “T-cell expansion composition” may be used interchangeably with a media comprising one or more of the following elements: boron, sodium, magnesium, phosphorus, potassium, and calcium. In certain embodiments, the terms “supplemented T-cell expansion composition” or “T-cell expansion composition” may be used interchangeably with a media comprising one or more of the following elements present in the corresponding average concentrations: boron at 3.7 mg/L, sodium at 3000 mg/L, magnesium at 18 mg/L, phosphorus at 29 mg/L, potassium at 15 mg/L and calcium at 4 mg/L.

[0293] As used herein, the terms “supplemented T-cell expansion composition” or “T-cell expansion composition” may be used interchangeably with a media comprising one or more of human serum albumin, recombinant human insulin, human transferrin, 2-Mercaptoethanol, and an expansion supplement at 37° C. Alternatively, or in addition, the terms “supplemented T-cell expansion composition” or “T-cell expansion composition” may be used interchangeably with a media comprising one or more of the following components: octanoic acid (CAS No. 124-07-2), nicotinamide (CAS No. 98-92-0), 2,4,7,9-tetramethyl-5-decyn-4,7-diol (TMDD) (CAS No. 126-86-3), diisopropyl adipate (DIPA) (CAS No. 6938-94-9), n-butyl-benzenesulfonamide (CAS No. 3622-84-2), 1,2-benzenedicarboxylic acid, bis(2-methylpropyl) ester (CAS No. 84-69-5), palmitic acid (CAS No. 57-10-3), linoleic acid (CAS No. 60-33-3), oleic acid (CAS No. 112-80-1), stearic acid hydrazide (CAS No. 4130-54-5), oleamide (CAS No. 3322-62-1), sterol (e.g., cholesterol) (CAS No. 57-88-5), and alkanes (e.g., nonadecane) (CAS No. 629-92-5). In certain embodiments, the terms “supplemented T-cell expansion composition” or “T-cell expansion composition” may be used interchangeably with a media comprising one or more of the following components: octanoic acid (CAS No. 124-07-2), nicotinamide (CAS No. 98-92-0), 2,4,7,9-tetramethyl-5-decyn-4,7-diol (TMDD) (CAS No. 126-86-3), diisopropyl adipate (DIPA) (CAS No. 6938-94-9), n-butyl-benzenesulfonamide (CAS No. 3622-84-2), 1,2-benzenedicarboxylic acid, bis(2-methylpropyl) ester (CAS No. 84-69-5), palmitic acid (CAS No. 57-10-3), linoleic acid (CAS No. 60-33-3), oleic acid (CAS No. 112-80-1), stearic acid hydrazide (CAS No. 4130-54-5), oleamide (CAS No. 3322-62-1), sterol (e.g., cholesterol) (CAS No. 57-88-5), alkanes (e.g., nonadecane) (CAS No. 629-92-5), and phenol red (CAS No. 143-74-8). In certain embodiments, the terms “supplemented T-cell expansion composition” or “T-cell expansion composition” may be used interchangeably with a media comprising one or more of the following components: octanoic acid (CAS No. 124-07-2), nicotinamide (CAS No. 98-92-0), 2,4,7,9-tetramethyl-5-decyn-4,7-diol (TMDD) (CAS No. 126-86-3), diisopropyl adipate (DIPA) (CAS No. 6938-94-9), n-butyl-benzenesulfonamide (CAS No. 3622-84-2), 1,2-benzenedicarboxylic acid, bis(2-methylpropyl) ester (CAS No. 84-69-5), palmitic acid (CAS No. 57-10-3), linoleic acid (CAS No. 60-33-3), oleic acid (CAS No. 112-80-1), stearic acid hydrazide (CAS No. 4130-54-5), oleamide (CAS No. 3322-62-1), phenol red (CAS No. 143-74-8) and lanolin alcohol.

[0294] In certain embodiments, the terms “supplemented T-cell expansion composition” or “T-cell expansion composition” may be used interchangeably with a media comprising one or more of human serum albumin, recombinant human insulin, human transferrin, 2-Mercaptoethanol, and an expansion supplement at 37° C. Alternatively, or in addition, the terms “supplemented T-cell expansion composition” or “T-cell expansion composition” may be used interchangeably with a media comprising one or more of the following ions: sodium, ammonium, potassium, magnesium, calcium, chloride, sulfate and phosphate.

[0295] As used herein, the terms “supplemented T-cell expansion composition” or “T-cell expansion composition” may be used interchangeably with a media comprising one or more of human serum albumin, recombinant human insulin, human transferrin, 2-Mercaptoethanol, and an expansion supplement at 37° C. Alternatively, or in addition, the terms “supplemented T-cell expansion composition” or “T-cell expansion composition” may be used interchangeably with a media comprising one or more of the following free amino acids: histidine, asparagine, serine, glutamate, arginine, glycine, aspartic acid, glutamic acid, threonine, alanine, proline, cysteine, lysine, tyrosine, methionine, valine, isoleucine, leucine, phenylalanine and tryptophan. In certain embodiments, the terms “supplemented T-cell expansion composition” or “T-cell expansion composition” may be used interchangeably with a media comprising one or more of the following free amino acids in the corresponding average mole percentages: histidine (about 1%), asparagine (about 0.5%), serine (about 1.5%), glutamine (about 67%), arginine (about 1.5%), glycine (about 1.5%), aspartic acid (about 1%), glutamic acid (about 2%), threonine (about 2%), alanine (about 1%), proline (about 1.5%), cysteine (about 1.5%), lysine (about 3%), tyrosine (about 1.5%), methionine (about 1%), valine (about 3.5%), isoleucine (about 3%), leucine (about 3.5%), phenylalanine (about 1.5%) and tryptophan (about 0.5%). In certain embodiments, the terms “supplemented T-cell expansion composition” or “T-cell expansion composition” may be used interchangeably with a media comprising one or more of the following free amino acids in the corresponding average mole percentages: histidine (about 0.78%), asparagine (about 0.4%), serine (about 1.6%), glutamine (about 67.01%), arginine (about 1.67%), glycine (about 1.72%), aspartic acid (about 1.00%), glutamic acid (about 1.93%), threonine (about 2.38%), alanine (about 1.11%), proline (about 1.49%), cysteine (about 1.65%), lysine (about 2.84%), tyrosine (about 1.62%), methionine (about 0.85%), valine (about 3.45%), isoleucine (about 3.14%), leucine (about 3.3%), phenylalanine (about 1.64%) and tryptophan (about 0.37%).

[0296] As used herein, the terms “supplemented T-cell expansion composition” or “T-cell expansion composition” may be used interchangeably with a media comprising one or more of human serum albumin, recombinant human insulin, human transferrin, 2-Mercaptoethanol, Iscove's MDM, and an expansion supplement at 37° C. Alternatively, or in addition, the terms “supplemented T-cell expansion composition” or “T-cell expansion composition” may be used interchangeably with a media comprising one or more of phosphorus, an octanoic fatty acid, a palmitic fatty acid, a linoleic fatty acid and an oleic acid. In certain embodiments, the media comprises an amount of phosphorus that is 10-fold higher than may be found in, for example, Iscove's Modified Dulbecco's Medium ((IMDM); available at ThermoFisher Scientific as Catalog number 12440053).

[0297] In certain embodiments, the terms “supplemented T-cell expansion composition” or “T-cell expansion composition” may be used interchangeably with a media comprising one or more of octanoic acid, palmitic acid, linoleic acid, oleic acid and a sterol (e.g. cholesterol). In certain embodiments, the terms “supplemented T-cell expansion composition” or “T-cell expansion composition” may be used interchangeably with a media comprising one or more of octanoic acid at a concentration of between 0.9 mg/kg to 90 mg/kg, inclusive of the endpoints; palmitic acid at a concentration of between 0.2 mg/kg to 20 mg/kg, inclusive of the endpoints; linoleic acid at a concentration of between 0.2 mg/kg to 20 mg/kg, inclusive of the endpoints; oleic acid at a concentration of 0.2 mg/kg to 20 mg/kg, inclusive of the endpoints; and a sterol at a concentration of about 0.1 mg/kg to 10 mg/kg, inclusive of the endpoints (wherein mg/kg=parts per million). In certain embodiments, the terms “supplemented T-cell expansion composition” or “T-cell expansion composition” may be used interchangeably with a media comprising one or more of octanoic acid at a concentration of about 9 mg/kg, palmitic acid at a concentration of about 2 mg/kg, linoleic acid at a concentration of about 2 mg/kg, oleic acid at a concentration of about 2 mg/kg, and a sterol at a concentration of about 1 mg/kg (wherein mg/kg=parts per million). In certain embodiments, the terms “supplemented T-cell expansion composition” or “T-cell expansion composition” may be used interchangeably with a media comprising one or more of octanoic acid at a concentration of 9.19 mg/kg, palmitic acid at a concentration of 1.86 mg/kg, linoleic acid at a concentration of about 2.12 mg/kg, oleic acid at a concentration of about 2.13 mg/kg, and a sterol at a concentration of about 1.01 mg/kg (wherein mg/kg=parts per million). In certain embodiments, the terms “supplemented T-cell expansion composition” or “T-cell expansion composition” may be used interchangeably with a media comprising one or more of octanoic acid at a concentration of 9.19 mg/kg, palmitic acid at a concentration of 1.86 mg/kg, linoleic acid at a concentration of 2.12 mg/kg, oleic acid at a concentration of about 2.13 mg/kg, and a sterol at a concentration of 1.01 mg/kg (wherein mg/kg=parts per million). In certain embodiments, the terms “supplemented T-cell expansion composition” or “T-cell expansion composition” may be used interchangeably with a media comprising one or more of octanoic acid at a concentration of between 6.4 μmol/kg and 640 μmol/kg, inclusive of the endpoints; palmitic acid at a concentration of between 0.7 μmol/kg and 70 μmol/kg, inclusive of the endpoints; linoleic acid at a concentration of between 0.75 μmol/kg and 75 μmol/kg, inclusive of the endpoints; oleic acid at a concentration of between 0.75 μmol/kg and 75 μmol/kg, inclusive of the endpoints; and a sterol at a concentration of between 0.25 μmol/kg and 25 μmol/kg, inclusive of the endpoints. In certain embodiments, the terms “supplemented T-cell expansion composition” or “T-cell expansion composition” may be used interchangeably with a media comprising one or more of octanoic acid at a concentration of about 64 μmol/kg, palmitic acid at a concentration of about 7 μmol/kg, linoleic acid at a concentration of about 7.5 μmol/kg, oleic acid at a concentration of about 7.5 μmol/kg and a sterol at a concentration of about 2.5 μmol/kg.

[0298] In certain embodiments, the terms “supplemented T-cell expansion composition” or “T-cell expansion composition” may be used interchangeably with a media comprising one or more of octanoic acid at a concentration of about 63.75 μmol/kg, palmitic acid at a concentration of about 7.27 μmol/kg, linoleic acid at a concentration of about 7.57 μmol/kg, oleic acid at a concentration of about 7.56 μmol/kg and a sterol at a concentration of about 2.61 μmol/kg. In certain embodiments, the terms “supplemented T-cell expansion composition” or “T-cell expansion composition” may be used interchangeably with a media comprising one or more of octanoic acid at a concentration of about 63.75 μmol/kg, palmitic acid at a concentration of about 7.27 μmol/kg, linoleic acid at a concentration of about 7.57 μmol/kg, oleic acid at a concentration of 7.56 μmol/kg and a sterol at a concentration of 2.61 μmol/kg.

[0299] In certain embodiments of the methods of producing a modified T cell (e.g. a stem cell-like T cell, a T_{SCM} and/or a T_{CM}) of the disclosure, the method comprises contacting a modified T cell and an inhibitor of the PI3K-Akt-mTOR pathway. Modified T-cells of the disclosure, including modified stem cell-like T cells, T_{SCM} and/or T_{CM} of the disclosure, may be incubated, cultured, grown, stored, or otherwise, combined at any step in the methods of the procedure with a growth medium comprising one or more inhibitors a component of a PI3K pathway. Exemplary inhibitors a component of a PI3K pathway include, but are not limited to, an inhibitor of GSK3β such as TWS119 (also known as GSK 3B inhibitor XII; CAS Number 601514-19-6 having a chemical formula C₁₈H₁₄N₄O₂). Exemplary inhibitors of a component of a PI3K pathway include, but are not limited to, bb007 (BLUEBIRDBIO™). Additional Exemplary inhibitors of a component of a PI3K pathway include, but are not limited to, an allosteric Akt inhibitor VIII (also referred to as Akti-1/2 having Compound number 10196499), ATP competitive inhibitors (Orthosteric inhibitors targeting the ATP-binding pocket of the protein kinase B (Akt)), Isoquinoline-5-sulfonamides (H-8, H-89, and NL-71-101), Azepane derivatives (A series of structures derived from (−)-balanol), Aminofurazans (GSK690693), Heterocyclic rings (7-azaindole, 6-phenylpurine derivatives, pyrrolo[2,3-d]pyrimidine derivatives, CCT128930, 3-aminopyrrolidine, anilinotriazole derivatives, spiroindoline derivatives, AZD5363, ipatasertib (GDC-0068, RG7440), A-674563, and A-443654), Phenylpyrazole derivatives (AT7867 and AT13148), Thiophenecarboxamide derivatives (Afuresertib (GSK2110183), 2-pyrimidyl-5-amidothiophene derivative (DC120), uprosertib (GSK2141795)), Allosteric inhibitors (Superior to orthosteric inhibitors providing greater specificity, reduced side-effects and less toxicity), 2,3-diphenylquinoxaline analogues (2,3-diphenylquinoxaline derivatives, triazolo[3,4-f][1,6]naphthyridin-3 (2H)-one derivative (MK-2206)), Alkylphospholipids (Edelfosine (1-O-octadecyl-2-O-methyl-rac-glycero-3-phosphocholine, ET-18-OCH₃) ilmofosine (BM 41.440), miltefosine (hexadecylphosphocholine, HePC), perifosine (D-21266), erucylphosphocholine (ErPC), erufosine (ErPC3, erucylphosphohomocholine), Indole-3-carbinol analogues (Indole-3-carbinol, 3-chloroacetylindole, diindolylmethane, diethyl 6-methoxy-5,7-dihydroindolo[2,3-b]carbazole-2,10-dicarboxylate (SR13668), OSU-A9), Sulfonamide derivatives (PH-316 and PHT-427), Thiourea derivatives (PIT-1, PIT-2, DM-PIT-1, N-[(1-methyl-1H-pyrazol-4-yl) carbonyl]-N′-(3-bromophenyl)-thiourea), Purine derivatives (Triciribine (TCN, NSC 154020), triciribine mono-phosphate active analogue (TCN-P), 4-amino-pyrido[2,3-d]pyrimidine derivative API-1, 3-phenyl-3H-imidazo[4,5-b]pyridine derivatives, ARQ 092), BAY 1125976, 3-methyl-xanthine, quinoline-4-carboxamide and 2-[4-(cyclohexa-1,3-dien-1-yl)-1H-pyrazol-3-yl]phenol, 3-oxo-tirucallic acid, 3α- and 3β-acetoxy-tirucallic acids, acetoxy-tirucallic acid, and irreversible inhibitors (antibiotics, Lactoquinomycin, Frenolicin B, kalafungin, medermycin, Boc-Phe-vinyl ketone, 4-hydroxynonenal (4-HNE), 1,6-naphthyridinone derivatives, and imidazo-1,2-pyridine derivatives).

[0300] In certain embodiments of the methods of producing a modified T cell (e.g. a stem cell-like T cell, a T_{SCM} and/or a T_{CM}) of the disclosure, the method comprises contacting a modified T cell and an inhibitor of T cell effector differentiation. Exemplary inhibitors of T cell effector differentiation include, but are not limited to, a BET inhibitor (e.g. JQ1, a hienotriazolodiazepine) and/or an inhibitor of the BET family of proteins (e.g. BRD2, BRD3, BRD4, and BRDT).

[0301] In certain embodiments of the methods of producing a modified T cell (e.g. a stem cell-like T cell, a T_{SCM} and/or a T_{CM}) of the disclosure, the method comprises contacting a modified T cell and an agent that reduces nucleo-cytoplasmic Acetyl-CoA. Exemplary agents that reduce nucleo-cytoplasmic Acetyl-CoA include, but are not limited to, 2-hydroxy-citrate (2-HC) as well as agents that increase expression of Acss1.

[0302] In certain embodiments of the methods of producing a modified T cell (e.g. a stem cell-like T cell, a TSCM and/or a TCM) of the disclosure, the method comprises contacting a modified T cell and a composition comprising a histone deacetylase (HDAC) inhibitor. In some embodiments, the composition comprising an HDAC inhibitor comprises or consists of valproic acid, Sodium Phenylbutyrate (NaPB) or a combination thereof. In some embodiments, the composition comprising an HDAC inhibitor comprises or consists of valproic acid. In some embodiments, the composition comprising an HDAC inhibitor comprises or consists of Sodium Phenylbutyrate (NaPB).

[0303] In certain embodiments of the methods of producing a modified T cell (e.g. a stem cell-like T cell, a T_{SCM} and/or a T_{CM}) of the disclosure, the activation supplement may comprise one or more cytokine(s). The one or more cytokine(s) may comprise any cytokine, including but not limited to, lymphokines. Exemplary lymphokines include, but are not limited to, interleukin-2 (IL-2), interleukin-3 (IL-3), interleukin-4 (IL-4), interleukin-5 (IL-5), interleukin-6 (IL-6), interleukin-7 (IL-7), interleukin-15 (IL-15), interleukin-21 (IL-21), granulocyte-macrophage colony-stimulating factor (GM-CSF) and interferon-gamma (INFγ). The one or more cytokine(s) may comprise IL-2.

[0304] In certain embodiments of the methods of producing a modified T cell (e.g. a stem cell-like T cell, a T_{SCM} and/or a T_{CM}) of the disclosure, the activation supplement may comprise one or more activator complexes. Exemplary and nonlimiting activator complexes may comprise a monomeric, dimeric, trimeric or tetrameric antibody complex that binds one or more of CD3, CD28, and CD2. In some embodiments, the activation supplement comprises or consists of an activator complex that comprises a human, a humanized or a recombinant or a chimeric antibody. In some embodiments, the activation supplement comprises or consists of an activator complex that binds CD3 and CD28. In some embodiments, the activation supplement comprises or consists of an activator complex that binds CD3, CD28 and CD2.

### Natural Killer (NK) Cells

[0305] In certain embodiments, the modified immune or immune precursor cells of the disclosure are natural killer (NK) cells. In certain embodiments, NK cells are cytotoxic lymphocytes that differentiate from lymphoid progenitor cells.

[0306] Modified NK cells of the disclosure may be derived from modified hematopoietic stem and progenitor cells (HSPCs) or modified HSCs.

[0307] In certain embodiments, non-activated NK cells are derived from CD3-depleted leukopheresis (containing CD14/CD19/CD56+ cells).

[0308] In certain embodiments, NK cells are electroporated using a Lonza 4D nucleofector or BTX ECM 830 (500V, 700 usec pulse length, 0.2 mm electrode gap, one pulse). All Lonza 4D nucleofector programs are contemplated as within the scope of the methods of the disclosure.

[0309] In certain embodiments, 5×10E6 cells were electroporated per electroporation in 100 μL P3 buffer in cuvettes. However, this ratio of cells per volume is scalable for commercial manufacturing methods.

[0310] In certain embodiments, NK cells were stimulated by co-culture with an additional cell line. In certain embodiments, the additional cell line comprises artificial antigen presenting cells (aAPCs). In certain embodiments, stimulation occurs at day 1, 2, 3, 4, 5, 6, or 7 following electroporation. In certain embodiments, stimulation occurs at day 2 following electroporation. In certain embodiments, NK cells express CD56.

### B Cells

[0311] In certain embodiments, the modified immune or immune precursor cells of the disclosure are B cells. B cells are a type of lymphocyte that express B cell receptors on the cell surface. B cell receptors bind to specific antigens.

[0312] Modified B cells of the disclosure may be derived from modified hematopoietic stem and progenitor cells (HSPCs) or modified HSCs.

[0313] In certain embodiments, HSPCs are modified using the methods of the disclosure, and then primed for B cell differentiation in presence of human IL-3, Flt3L, TPO, SCF, and G-CSF for at least 3 days, at least 4 days, at least 5 days, at least 6 days or at least 7 days. In certain embodiments, HSPCs are modified using the methods of the disclosure, and then primed for B cell differentiation in presence of human IL-3, Flt3L, TPO, SCF, and G-CSF for 5 days.

[0314] In certain embodiments, following priming, modified HSPC cells are transferred to a layer of feeder cells and fed bi-weekly, along with transfer to a fresh layer of feeders once per week. In certain embodiments, the feeder cells are MS-5 feeder cells.

[0315] In certain embodiments, modified HSPC cells are cultured with MS-5 feeder cells for at least 7, 14, 21, 28, 30, 33, 35, 42 or 48 days. In certain embodiments, modified HSPC cells are cultured with MS-5 feeder cells for 33 days.

### Methods of Cell Modification

[0316] In some embodiments of the methods of the disclosure, a composition comprises a scalable ratio of 250×10⁶ primary human T cells per milliliter of buffer or other media during a delivery or an introduction step.

[0317] In some embodiments of the methods of the disclosure, a composition is delivered or introduced to a cell by electroporation or nucleofection. In some embodiments, a delivery or introduction step comprises electroporation or nucleofection.

[0318] In some embodiments of the methods of the disclosure, a composition is delivered or introduced to a cell by a method other than electroporation or nucleofection.

[0319] In some embodiments of the methods of the disclosure, a composition is delivered or introduced by one or more of topical delivery, adsorption, absorption, electroporation, spin-fection, co-culture, transfection, mechanical delivery, sonic delivery, vibrational delivery, magnetofection or by nanoparticle-mediated delivery. In some embodiments, a delivery or introduction step comprises one or more of topical delivery, adsorption, absorption, electroporation, spin-fection, co-culture, transfection, mechanical delivery, sonic delivery, vibrational delivery, magnetofection or by nanoparticle-mediated delivery.

[0320] In some embodiments of the methods of the disclosure, a composition is delivered or introduced by liposomal transfection, calcium phosphate transfection, fugene transfection, and dendrimer-mediated transfection. In some embodiments, a delivery or introduction step comprises one or more of liposomal transfection, calcium phosphate transfection, fugene transfection, and dendrimer-mediated transfection.

[0321] In some embodiments of the methods of the disclosure, a composition is delivered or introduced by mechanical transfection comprises cell squeezing, cell bombardment, or gene gun techniques. In some embodiments, a delivery or introduction step comprises one or more of mechanical transfection comprises cell squeezing, cell bombardment, or gene gun techniques.

[0322] In some embodiments of the methods of the disclosure, a composition is delivered or introduced by nanoparticle-mediated transfection comprises liposomal delivery, delivery by micelles, and delivery by polymerosomes. In some embodiments, a delivery or introduction step comprises one or more of liposomal delivery, delivery by micelles, and delivery by polymerosomes.

### Non-Transposition Methods of Delivery

[0323] In some embodiments of the compositions and methods of the disclosure, a modified cell of the disclosure may be produced by introducing a sequence into an HSC, an HSC descendent cell, an immune cell or an immune precursor cell of the disclosure. The introducing step may comprise delivery of a sequence and/or a gene editing composition via a non-transposition delivery system. The introduction step may be performed ex vivo, in vivo, in vitro or in situ.

[0324] In some embodiments of the compositions and methods of the disclosure, introducing a sequence and/or a gene editing composition into an HSC, an HSC descendent cell, an immune cell or an immune precursor cell of the disclosure comprises one or more of topical delivery, adsorption, absorption, electroporation, spin-fection, co-culture, transfection, mechanical delivery, sonic delivery, vibrational delivery, magnetofection and nanoparticle-mediated delivery.

[0325] In some embodiments of the compositions and methods of the disclosure, introducing a nucleic acid sequence and/or a gene editing construct into an HSC, an HSC descendent cell, an immune cell or an immune precursor cell of the disclosure comprises liposomal transfection, calcium phosphate transfection, fugene transfection, and dendrimer-mediated transfection.

[0326] In some embodiments of the compositions and methods of the disclosure, introducing a sequence and/or a gene editing composition into an HSC, an HSC descendent cell, an immune cell or an immune precursor cell of the disclosure by mechanical transfection comprises cell squeezing, cell bombardment, or gene gun techniques.

[0327] In some embodiments of the compositions and methods of the disclosure, introducing a sequence and/or a gene editing composition into an HSC, an HSC descendent cell, an immune cell or an immune precursor cell of the disclosure by nanoparticle-mediated transfection comprises one or more of a liposome, a micelle, a polymer and a polymerosome.

[0328] In some embodiments of the compositions and methods of the disclosure, introducing a sequence and/or a gene editing composition into an HSC, an HSC descendent cell, an immune cell or an immune precursor cell of the disclosure comprises a non-viral vector. In some embodiments, the non-viral vector comprises the sequence and/or the gene editing composition. In some embodiments, the non-viral vector comprises plasmid DNA, linear double-stranded DNA (dsDNA), linear single-stranded DNA (ssDNA), DoggyBone™ DNA, nanoplasmids, minicircle DNA, single-stranded oligodeoxynucleotides (ssODN), DDNA oligonucleotides, single-stranded mRNA (ssRNA), and double-stranded mRNA (dsRNA).

[0329] In some embodiments of the compositions and methods of the disclosure, introducing a sequence and/or a gene editing composition into an HSC, an HSC descendent cell, an immune cell or an immune precursor cell of the disclosure comprises a viral vector. In some embodiments, the viral vector is a non-integrating and/or non-chromosomal vector. Exemplary non-integrating non-chromosomal vectors include, but are not limited to, adeno-associated virus (AAV), adenovirus, and herpes viruses. In some embodiments, the viral vector is an integrating chromosomal vector. Integrating chromosomal vectors include, but are not limited to, adeno-associated vectors (AAV), Lentiviruses, and gamma-retroviruses. In some embodiments, the viral vector comprises the sequence and/or the gene editing composition.

[0330] In some embodiments of the compositions and methods of the disclosure, introducing a sequence and/or a gene editing composition into an HSC, an HSC descendent cell, an immune cell or an immune precursor cell of the disclosure comprises a combination of vectors of the disclosure. Exemplary, non-limiting vector combinations include: viral and non-viral vectors, a plurality of non-viral vectors, or a plurality of viral vectors. Exemplary but non-limiting vectors combinations include: a combination of a DNA-derived and an RNA-derived vector, a combination of non-viral expression vector and a viral delivery vector, a combination of a non-viral expression vector and a nanoparticle delivery vector, a combination of two distinct non-viral expression vectors, a combination of a non-viral expression vector and a mechanical or chemical method of transfection.

[0331] In some embodiments of the compositions and methods of the disclosure, introducing a sequence and/or a gene editing composition into an HSC, an HSC descendent cell, an immune cell or an immune precursor cell of the disclosure stably integrates a sequence, transiently integrates a sequence, produces site-specific integration of a sequence, or produces a biased integration of a sequence. In some embodiments, the sequence is a nucleic acid sequence. In some embodiments, the nucleic acid sequence comprises a transgene.

[0332] In some embodiments of the compositions and methods of the disclosure, introducing a sequence and/or a gene editing composition into an HSC, an HSC descendent cell, an immune cell or an immune precursor cell of the disclosure stably integrates a sequence. In some embodiments, the sequence is a nucleic acid sequence. In some embodiments, the stable chromosomal integration can be a random integration, a site-specific integration, or a biased integration. In some embodiments, the site-specific integration can be non-assisted or assisted. In some embodiments, the assisted site-specific integration is co-delivered with a site-directed nuclease. In some embodiments, the site-directed nuclease comprises a transgene with 5′ and 3′ nucleotide sequence extensions that contain a percentage homology to upstream and downstream regions of the site of genomic integration. In some embodiments, the transgene with homologous nucleotide extensions enable genomic integration by homologous recombination, microhomology-mediated end joining, or nonhomologous end-joining. In some embodiments the site-specific integration occurs at a safe harbor site. Genomic safe harbor sites are able to accommodate the integration of new genetic material in a manner that ensures that the newly inserted genetic elements function reliably (for example, are expressed at a therapeutically effective level of expression) and do not cause deleterious alterations to the host genome that cause a risk to the host organism. Potential genomic safe harbors include, but are not limited to, intronic sequences of the human albumin gene, the adeno-associated virus site 1 (AAVS1), a naturally occurring site of integration of AAV virus on chromosome 19, the site of the chemokine (C-C motif) receptor 5 (CCR5) gene and the site of the human ortholog of the mouse Rosa26 locus.

[0333] In some embodiments, the site-specific transgene integration occurs at a site that disrupts expression of a target gene. In some embodiments, disruption of target gene expression occurs by site-specific integration at introns, exons, promoters, genetic elements, enhancers, suppressors, start codons, stop codons, and response elements. In some embodiments, exemplary target genes targeted by site-specific integration include but are not limited to TRAC, TRAB, PDI, any immunosuppressive gene, and genes involved in allo-rejection.

[0334] In some embodiments of the compositions and methods of the disclosure, introducing a sequence and/or a gene editing composition into an HSC, an HSC descendent cell, an immune cell or an immune precursor cell of the disclosure site-specific transgene integration occurs at a site that results in enhanced expression of a target gene. In some embodiments, enhancement of target gene expression occurs by site-specific integration at introns, exons, promoters, genetic elements, enhancers, suppressors, start codons, stop codons, and response elements.

[0335] In some embodiments of the compositions and methods of the disclosure, introducing a sequence and/or a gene editing composition into an HSC, an HSC descendent cell, an immune cell or an immune precursor cell of the disclosure enzymes may be used to create strand breaks in the host genome to facilitate delivery or integration of the transgene. In some embodiments, enzymes create single-strand breaks. In some embodiments, enzymes create double-strand breaks. In some embodiments, examples of break-inducing enzymes include but are not limited to: transposases, integrases, endonucleases, CRISPR-Cas9, transcription activator-like effector nucleases (TALEN), zinc finger nucleases (ZFN), Cas-CLOVER™, and CPF1. In some embodiments, break-inducing enzymes can be delivered to the cell encoded in DNA, encoded in mRNA, as a protein, as a nucleoprotein complex with a guide RNA (gRNA).

[0336] In some embodiments of the compositions and methods of the disclosure, introducing a sequence and/or a gene editing composition into an HSC, an HSC descendent cell, an immune cell or an immune precursor cell of the disclosure site-specific transgene integration is controlled by a vector-mediated integration site bias. In some embodiments vector-mediated integration site bias is controlled by the chosen lentiviral vector. In some embodiments vector-mediated integration site bias is controlled by the chosen gamma-retroviral vector.

[0337] In some embodiments of the compositions and methods of the disclosure, introducing a sequence and/or a gene editing composition into an HSC, an HSC descendent cell, an immune cell or an immune precursor cell of the disclosure site-specific transgene integration site is a non-stable chromosomal insertion. In some embodiments, the integrated transgene may become silenced, removed, excised, or further modified.

[0338] In some embodiments of the compositions and methods of the disclosure, introducing a sequence and/or a gene editing composition into an HSC, an HSC descendent cell, an immune cell or an immune precursor cell of the disclosure genome modification comprises a non-stable integration of a transgene. In some embodiments, the non-stable integration can be a transient non-chromosomal integration, a semi-stable non chromosomal integration, a semi-persistent non-chromosomal insertion, or a non-stable chromosomal insertion. In some embodiments, the transient non-chromosomal insertion can be epi-chromosomal or cytoplasmic.

[0339] In some embodiments of the compositions and methods of the disclosure, introducing a sequence and/or a gene editing composition into an HSC, an HSC descendent cell, an immune cell or an immune precursor cell of the disclosure the transient non-chromosomal insertion of a transgene does not integrate into a chromosome and the modified genetic material is not replicated during cell division.

[0340] In some embodiments of the compositions and methods of the disclosure, introducing a sequence and/or a gene editing composition into an HSC, an HSC descendent cell, an immune cell or an immune precursor cell of the disclosure genome modification comprises a semi-stable or persistent non-chromosomal integration of a transgene. In some embodiments, a DNA vector encodes a Scaffold/matrix attachment region (S-MAR) module that binds to nuclear matrix proteins for episomal retention of a non-viral vector allowing for autonomous replication in the nucleus of dividing cells.

[0341] In some embodiments of the compositions and methods of the disclosure, introducing a sequence and/or a gene editing composition into an HSC, an HSC descendent cell, an immune cell or an immune precursor cell of the disclosure genome modification is a non-stable chromosomal integration of a transgene. In some embodiments, the integrated transgene may become silenced, removed, excised, or further modified.

[0342] In some embodiments of the compositions and methods of the disclosure, introducing a sequence and/or a gene editing composition into an HSC, an HSC descendent cell, an immune cell or an immune precursor cell of the disclosure modification to the genome by transgene insertion can occur via host cell-directed double-strand breakage repair (homology-directed repair) by homologous recombination (HR), microhomology-mediated end joining (MMEJ), nonhomologous end joining (NHEJ), transposase enzyme-mediated modification, integrase enzyme-mediated modification, endonuclease enzyme-mediated modification, or recombinant enzyme-mediated modification. In some embodiments, the modification to the genome by transgene insertion can occur via CRISPR-Cas9, TALEN, ZFNs, Cas-CLOVER, and cpf1.

### Nanoparticle Delivery

[0343] In some embodiments of the compositions and methods of the disclosure, introducing a sequence and/or a gene editing composition into an HSC, an HSC descendent cell, an immune cell or an immune precursor cell of the disclosure comprise a nanparticle vector. Nanoparticle vectors may encapsulate a composition of the disclosure. Alternatively, or in addition, a surface of a nanoparticle vector may comprise a composition of the disclosure. In some embodiments, the surface is an interior surface. In some embodiments, the surface is an exterior surface. In some embodiments, the surface comprises a composition of the disclosure integrated therein or thereon.

[0344] Nonlimiting examples of nanoparticle vectors of the disclosure may comprise one or more of a hydrophilic block, a hydrophobic block, and a charged block. In some embodiments, the hydrophilic block may be poly(ethylene oxide) (PEO), and the charged block may be poly(L-histidine).

[0345] The disclosure provides nanoparticle vectors comprising di-block and tri-block co-polymers. Exemplary di-block co-polymers may comprise one or more of a hydrophilic block, a hydrophobic block, and a charged block. In some embodiments, the hydrophilic block may be poly(ethylene oxide) (PEO), and the charged block may be poly(L-histidine). Exemplary tri-block co-polymers may comprise one or more of a hydrophilic block, a hydrophobic block, and a charged block. In some embodiments, the hydrophilic block may be poly(ethylene oxide) (PEO), and the charged block may be poly(L-histidine).

[0346] An exemplary tri-block copolymer that may be used in various embodiments is a PEO-b-PLA-b-PHIS, with variable numbers of repeating units in each block varying by design.

[0347] Poly(histidine) (i.e., poly(L-histidine)), is a pH-sensitive polymer due to the imidazole ring providing an electron lone pair on the unsaturated nitrogen. That is, poly(histidine) has amphoteric properties through protonation-deprotonation. The various embodiments enable intracellular delivery of compositions of the disclosure, including gene editing compositions, by, for example, complexing with poly(histidine)-based micelles.

[0348] Diblock copolymers that may be used as intermediates for making triblock copolymers of the embodiment micelles may have hydrophilic biocompatible poly(ethylene oxide) (PEO), which is chemically synonymous with PEG, coupled to various hydrophobic aliphatic poly(anhydrides), poly(nucleic acids), poly(esters), poly(ortho esters), poly(peptides), poly(phosphazenes) and poly(saccharides), including but not limited by poly(lactide) (PLA), poly(glycolide) (PLGA), poly(lactic-co-glycolic acid) (PLGA), poly(ε-caprolactone) (PCL), and poly(trimethylene carbonate) (PTMC).

[0349] Polymeric micelles comprised of 100% PEGylated surfaces possess improved in vitro chemical stability, augmented in vivo bioavailability, and prolonged blood circulatory half-lives. For example, aliphatic polyesters, constituting the polymeric micelle's membrane portions, are degraded by hydrolysis of their ester linkages in physiological conditions such as in the human body. Because of their biodegradable nature, aliphatic polyesters have received a great deal of attention for use as implantable biomaterials in drug delivery devices, bioresorbable sutures, adhesion barriers, and as scaffolds for injury repair via tissue engineering.

[0350] Without wishing to be bound by a particular theory, it is believed that believed that in the micelles that are formed by the various embodiment triblock copolymers, the hydrophobic blocks aggregate to form a core, leaving the hydrophilic blocks and poly(histidine) blocks on the ends to form one or more surrounding layer.

### Scaffold Proteins

[0351] Protein scaffolds of the disclosure may be derived from a fibronectin type III (FN3) repeat protein, encoding or complementary nucleic acids, vectors, host cells, compositions, combinations, formulations, devices, and methods of making and using them. In a preferred embodiment, the protein scaffold is comprised of a consensus sequence of multiple FN3 domains from human Tenascin-C (hereinafter “Tenascin”). In a further preferred embodiment, the protein scaffold of the present disclosure is a consensus sequence of 15 FN3 domains. The protein scaffolds of the disclosure can be designed to bind various molecules, for example, a cellular target protein. In a preferred embodiment, the protein scaffolds of the disclosure can be designed to bind an epitope of a wild type and/or variant form of a ligand or an antigen.

[0352] Protein scaffolds of the disclosure may include additional molecules or moieties, for example, the Fc region of an antibody, albumin binding domain, or other moiety influencing half-life. In further embodiments, the protein scaffolds of the disclosure may be bound to a nucleic acid molecule that may encode the protein scaffold.

[0353] The disclosure provides at least one method for expressing at least one protein scaffold based on a consensus sequence of multiple FN3 domains, in a host cell, comprising culturing a host cell as described herein under conditions wherein at least one protein scaffold is expressed in detectable and/or recoverable amounts.

[0354] The disclosure provides at least one composition comprising (a) a protein scaffold based on a consensus sequence of multiple FN3 domains and/or encoding nucleic acid as described herein; and (b) a suitable and/or pharmaceutically acceptable carrier or diluent.

[0355] The disclosure provides a method of generating libraries of a protein scaffold based on a fibronectin type III (FN3) repeat protein, preferably, a consensus sequence of multiple FN3 domains and, more preferably, a consensus sequence of multiple FN3 domains from human Tenascin. The library is formed by making successive generations of scaffolds by altering (by mutation) the amino acids or the number of amino acids in the molecules in particular positions in portions of the scaffold, e.g., loop regions. Libraries can be generated by altering the amino acid composition of a single loop or the simultaneous alteration of multiple loops or additional positions of the scaffold molecule. The loops that are altered can be lengthened or shortened accordingly. Such libraries can be generated to include all possible amino acids at each position, or a designed subset of amino acids. The library members can be used for screening by display, such as in vitro or CIS display (DNA, RNA, ribosome display, etc.), yeast, bacterial, and phage display.

[0356] Protein scaffolds of the disclosure provide enhanced biophysical properties, such as stability under reducing conditions and solubility at high concentrations; they may be expressed and folded in prokaryotic systems, such as E. coli, in eukaryotic systems, such as yeast, and in in vitro transcription/translation systems, such as the rabbit reticulocyte lysate system.

[0357] The disclosure provides a method of generating a scaffold molecule that binds to a particular target by panning the scaffold library of the invention with the target and detecting binders. In other related aspects, the disclosure comprises screening methods that may be used to generate or affinity mature protein scaffolds with the desired activity, e.g., capable of binding to target proteins with a certain affinity. Affinity maturation can be accomplished by iterative rounds of mutagenesis and selection using systems, such as phage display or in vitro display. Mutagenesis during this process may be the result of site directed mutagenesis to specific scaffold residues, random mutagenesis due to error-prone PCR, DNA shuffling, and/or a combination of these techniques.

[0358] The disclosure provides an isolated, recombinant and/or synthetic protein scaffold based on a consensus sequence of fibronectin type III (FN3) repeat protein, including, without limitation, mammalian-derived scaffold, as well as compositions and encoding nucleic acid molecules comprising at least one polynucleotide encoding protein scaffold based on the consensus FN3 sequence. The disclosure further includes, but is not limited to, methods of making and using such nucleic acids and protein scaffolds, including diagnostic and therapeutic compositions, methods and devices.

[0359] The protein scaffolds of the disclosure offer advantages over conventional therapeutics, such as ability to administer locally, orally, or cross the blood-brain barrier, ability to express in E. Coli allowing for increased expression of protein as a function of resources versus mammalian cell expression ability to be engineered into bispecific or tandem molecules that bind to multiple targets or multiple epitopes of the same target, ability to be conjugated to drugs, polymers, and probes, ability to be formulated to high concentrations, and the ability of such molecules to effectively penetrate diseased tissues and tumors.

[0360] Moreover, the protein scaffolds possess many of the properties of antibodies in relation to their fold that mimics the variable region of an antibody. This orientation enables the FN3 loops to be exposed similar to antibody complementarity determining regions (CDRs). They should be able to bind to cellular targets and the loops can be altered, e.g., affinity matured, to improve certain binding or related properties.

[0361] Three of the six loops of the protein scaffold of the disclosure correspond topologically to the complementarity determining regions (CDRs 1-3), i.e., antigen-binding regions, of an antibody, while the remaining three loops are surface exposed in a manner similar to antibody CDRs. These loops span at or about residues 13-16, 22-28, 38-43, 51-54, 60-64, and 75-81 of the consensus sequence. Preferably, the loop regions at or about residues 22-28, 51-54, and 75-81 are altered for binding specificity and affinity. One or more of these loop regions are randomized with other loop regions and/or other strands maintaining their sequence as backbone portions to populate a library and potent binders can be selected from the library having high affinity for a particular protein target. One or more of the loop regions can interact with a target protein similar to an antibody CDR interaction with the protein.

### Discovery of Antigen/Ligand Recognition Region Sequences

[0362] The disclosure provides a method of generating libraries of antigen/ligand recognition region (ARR/LRR) sequences for binding antigens and/or ligands of the disclosure. The library is formed by making successive generations of ARR/LRR sequences by altering (by mutation) the amino acids or the number of amino acids in the sequences at particular positions of the ARR/LRR. In some embodiments, the ARR/LRR comprises one or more of a protein scaffolded, an antibody mimetic, a Centyrin, a single chain antibody (scFv), a single domain antibody, a VHH and a VH of the disclosure. In some embodiments, the library is formed by making successive generations of ARR/LRR sequences by altering (by mutation) the amino acids or the number of amino acids in the sequences at particular positions of an antibody, an ScFv, VHH or VH, e.g., one or more complementarity determining regions (CDR) and/or framework regions of a variable domain.

[0363] Libraries can be generated by altering the amino acid composition of a single CDR or the simultaneous alteration of multiple CDRs or additional positions of an antibody, an scFv, VHH or VH (e.g. a framework sequence of the variable region). The CDR and/or framework sequence of the variable domain that are altered can be lengthened or shortened accordingly.

[0364] Libraries can be generated by altering the amino acid composition of a loop of a scaffold protein or a Centyrin. The loop sequences that are altered can be lengthened or shortened accordingly.

[0365] Libraries can be generated by altering the amino acid composition of an antigen or ligand-binding or specificity-determining region of an antibody mimetic.

[0366] Such libraries can be generated to include all possible amino acids at each position, or a designed subset of amino acids. The library members can be used for screening by display, such as in vitro or CIS display (DNA, RNA, ribosome display, etc.), yeast, bacterial, and phage display.

[0367] ARRs/LRRs of the disclosure provide enhanced biophysical properties, such as stability under reducing conditions and solubility at high concentrations; they may be expressed and folded in prokaryotic systems, such as E. coli, in eukaryotic systems, such as yeast, and in in vitro transcription/translation systems, such as the rabbit reticulocyte lysate system.

[0368] The disclosure provides a method of generating an ARR/LRR or a portion thereof that binds to a particular target by panning a library of the invention with the target and detecting binders. In other related aspects, the disclosure comprises screening methods that may be used to generate or affinity mature ARRs/LRRs with the desired activity, e.g., capable of binding to target proteins with a certain affinity. Affinity maturation can be accomplished by iterative rounds of mutagenesis and selection using systems, such as phage display or in vitro display. Mutagenesis during this process may be the result of site directed mutagenesis to specific protein residues, random mutagenesis due to error-prone PCR, DNA shuffling, and/or a combination of these techniques.

[0369] The disclosure provides an isolated, recombinant and/or synthetic protein scaffold comprising at least one VHH. The disclosure further includes, but is not limited to, methods of making and using such nucleic acids and protein scaffolds, including diagnostic and therapeutic compositions, methods and devices.

[0370] The compositions of the disclosure offer advantages over conventional therapeutics, such as ability to administer locally, orally, or cross the blood-brain barrier, ability to express in E. Coli allowing for increased expression of protein as a function of resources versus mammalian cell expression ability to be engineered into bispecific or tandem molecules that bind to multiple targets or multiple epitopes of the same target, ability to be conjugated to drugs, polymers, and probes, ability to be formulated to high concentrations, and the ability of such molecules to effectively penetrate diseased tissues and tumors.

### Production and Generation of Proteins

[0371] Proteins of the disclosure can be optionally produced by a cell line, a mixed cell line, an immortalized cell or clonal population of immortalized cells, as well known in the art. See, e.g., Ausubel, et al., ed., Current Protocols in Molecular Biology, John Wiley & Sons, Inc., NY, N.Y. (1987-2001); Sambrook, et al., Molecular Cloning: A Laboratory Manual, 2nd Edition, Cold Spring Harbor, N.Y. (1989); Harlow and Lane, Antibodies, a Laboratory Manual, Cold Spring Harbor, N.Y. (1989); Colligan, et al., eds., Current Protocols in Immunology, John Wiley & Sons, Inc., NY (1994-2001); Colligan et al., Current Protocols in Protein Science, John Wiley & Sons, NY, N.Y., (1997-2001).

[0372] Amino acids encoding a protein can be altered, added and/or deleted to reduce immunogenicity or reduce, enhance or modify binding, affinity, on-rate, off-rate, avidity, specificity, half-life, stability, solubility or any other suitable characteristic, as known in the art.

[0373] Proteins can be engineered with retention of high affinity for an antigen or a ligand as well as other favorable biological properties. To achieve this goal, the proteins can be optionally prepared by a process of analysis of the parental sequences and various conceptual engineered products using three-dimensional models of the parental and engineered sequences. Three-dimensional models are commonly available and are familiar to those skilled in the art. Computer programs are available which illustrate and display probable three-dimensional conformational structures of selected candidate sequences and can measure possible immunogenicity (e.g., Immunofilter program of Xencor, Inc. of Monrovia, Calif.). Inspection of these displays permits analysis of the likely role of the residues in the functioning of the candidate sequence, i.e., the analysis of residues that influence the ability of the protein to bind its antigen. In this way, residues can be selected and combined from the parent and reference sequences so that the desired characteristic, such as affinity for the target antigen(s)/ligand(s), is achieved. Alternatively, or in addition to, the above procedures, other suitable methods of engineering can be used.

### Screening of ARRs/LRRs

[0374] Screening protein ARRs/LRRs or any portion thereof for specific binding to similar proteins or fragments can be conveniently achieved using nucleotide (DNA or RNA display) or peptide display libraries, for example, in vitro display. This method involves the screening of large collections of peptides for individual members having the desired function or structure. The displayed nucleotide or peptide sequences can be from 3 to 5000 or more nucleotides or amino acids in length, frequently from 5-100 amino acids long, and often from about 8 to 25 amino acids long. In addition to direct chemical synthetic methods for generating peptide libraries, several recombinant DNA methods have been described. One type involves the display of a peptide sequence on the surface of a bacteriophage or cell. Each bacteriophage or cell contains the nucleotide sequence encoding the particular displayed peptide sequence. Such methods are described in PCT Patent Publication Nos. 91/17271, 91/18980, 91/19818, and 93/08278.

[0375] Other systems for generating libraries of peptides have aspects of both in vitro chemical synthesis and recombinant methods. See, PCT Patent Publication Nos. 92/05258, 92/14843, and 96/19256. See also, U.S. Pat. Nos. 5,658,754; and 5,643,768. Peptide display libraries, vector, and screening kits are commercially available from such suppliers as Invitrogen (Carlsbad, Calif.), and Cambridge Antibody Technologies (Cambridgeshire, UK). See, e.g., U.S. Pat. Nos. 4,704,692, 4,939,666, 4,946,778, 5,260,203, 5,455,030, 5,518,889, 5,534,621, 5,656,730, 5,763,733, 5,767,260, 5,856,456, assigned to Enzon; U.S. Pat. Nos. 5,223,409, 5,403,484, 5,571,698, 5,837,500, assigned to Dyax, U.S. Pat. Nos. 5,427,908, 5,580,717, assigned to Affymax; U.S. Pat. No. 5,885,793, assigned to Cambridge Antibody Technologies; U.S. Pat. No. 5,750,373, assigned to Genentech, U.S. Pat. Nos. 5,618,920, 5,595,898, 5,576, 195, 5,698,435, 5,693,493, 5,698,417, assigned to Xoma, Colligan, supra; Ausubel, supra; or Sambrook, supra.

[0376] The ARRs/LRRs of the disclosure comprising one or more of a protein scaffold, an antibody, an ScFv, a Centyrin, a single domain antibody, a VHH or a VH of the disclosure can bind human or other mammalian proteins with a wide range of affinities (K_{D}). In a preferred embodiment, at least one ARR/LRR can optionally bind to a target protein with high affinity, for example, with a K_{D} equal to or less than about 10⁻⁷ M, such as but not limited to, 0.1-9.9 (or any range or value therein)×10⁻⁸, 10⁻⁹, 10⁻¹⁰, 10⁻¹¹, 10⁻¹², 10⁻¹³, 10⁻¹⁴, 10⁻¹⁵ or any range or value therein, as determined by surface plasmon resonance or the Kinexa method, as practiced by those of skill in the art. In a preferred embodiment, at least one protein scaffold, antibody, ScFv, Centyrin, single domain antibody, VHH or VH of the disclosure can optionally bind to a target protein with high affinity, for example, with a KD equal to or less than about 10⁻⁷ M, such as but not limited to, 0.1-9.9 (or any range or value therein)×10⁻⁸, 10⁻⁹, 10⁻¹⁰, 10⁻¹¹, 10⁻¹², 10⁻¹³, 10⁻¹⁴, 10⁻¹⁵ or any range or value therein, as determined by surface plasmon resonance or the Kinexa method, as practiced by those of skill in the art.

[0377] The affinity or avidity of a protein scaffold, an antibody, an ScFv, a Centyrin, a single domain antibody, a VHH or a VH of the disclosure for an antigen/ligand can be determined experimentally using any suitable method. (See, for example, Berzofsky, et al., “Antibody-Antigen Interactions,” In Fundamental Immunology, Paul, W. E., Ed., Raven Press: New York, N.Y. (1984); Kuby, Janis Immunology, W.H. Freeman and Company: New York, N.Y. (1992); and methods described herein). The measured affinity of a particular protein-antigen/ligand interaction can vary if measured under different conditions (e.g., salt concentration, pH). Thus, measurements of affinity and other antigen-binding parameters (e.g., KD, Kₒₙ, K_{off}) are preferably made with standardized solutions of protein scaffold (e.g. VHH) and antigen, and a standardized buffer, such as the buffer described herein.

[0378] Competitive assays can be performed with the protein scaffold, antibody, ScFv, Centyrin, single domain antibody, VHH or VH of the disclosure in order to determine what proteins, antibodies, and other antagonists compete for binding to a target protein and/or share the epitope region. These assays as readily known to those of ordinary skill in the art evaluate competition between antagonists or ligands for a limited number of binding sites on a protein. The protein and/or antibody is immobilized or insolubilized before or after the competition and the sample bound to the target protein is separated from the unbound sample, for example, by decanting (where the protein/antibody was preinsolubilized) or by centrifuging (where the protein/antibody was precipitated after the competitive reaction). Also, the competitive binding may be determined by whether function is altered by the binding or lack of binding of the protein scaffold, antibody, ScFv, Centyrin, single domain antibody, VHH or VH to the target protein, e.g., whether protein scaffold, antibody, ScFv, Centyrin, single domain antibody, VHH or VH inhibits or potentiates the enzymatic activity of, for example, a label. ELISA and other functional assays may be used, as well known in the art.

### Therapeutic Proteins

[0379] In certain embodiments of the disclosure, T cells are modified to express therapeutic proteins, including secreted human proteins. These secreted proteins may be used as a monotherapy or in combination with another therapy in the treatment or prevention of any disease or disorder. These secreted proteins may be used as a monotherapy or in combination with another therapy for enzyme replacement and/or administration of biologic therapeutics. A database of human secreted proteins can be found at proteinatlas.org/search/protein_class:Predicted%20secreted%20proteins, the contents of which are incorporated herein by reference. Exemplary human therapeutic proteins can be found, but are not limited to the human proteins in Table 1.

TABLE 1
Exemplary therapeutic proteins (and proteins to enhance CAR-T efficacy). Compositions
of the disclosure may comprise a promoter of one or more of the proteins
of Table 1 driving expression of any sequence of the disclosure.

| Gene Name | Gene Description | Protein SEQ ID NO |
|---|---|---|
| A1BG | Alpha-1-B glycoprotein | SEQ ID NOS: 1-2 |
| A2M | Alpha-2-macroglobulin | SEQ ID NOS: 3-6 |
| A2ML1 | Alpha-2-macroglobulin-like 1 | SEQ ID NOS: 7-12 |
| A4GNT | Alpha-1,4-N-acetylglucosaminyltransferase | SEQ ID NO: 13 |
| AADACL2 | Arylacetamide deacetylase-like 2 | SEQ ID NOS: 14-15 |
| AANAT | Aralkylamine N-acetyltransferase | SEQ ID NOS: 16-19 |
| ABCG1 | ATP-binding cassette, sub-family G (WHITE), | SEQ ID NOS: 20-26 |
| | member 1 | |
| ABHD1 | Abhydrolase domain containing 1 | SEQ ID NOS: 27-31 |
| ABHD10 | Abhydrolase domain containing 10 | SEQ ID NOS: 32-35 |
| ABHD14A | Abhydrolase domain containing 14A | SEQ ID NOS: 36-40 |
| ABHD15 | Abhydrolase domain containing 15 | SEQ ID NO: 41 |
| ABI3BP | ABI family, member 3 (NESH) binding protein | SEQ ID NOS: 42-63 |
| FAM175A | Family with sequence similarity 175, member A | SEQ ID NOS: 64-71 |
| LA16c- | | SEQ ID NO: 72 |
| 380H5.3 | | |
| AC008641.1 | | SEQ ID NO: 73 |
| CTB- | | SEQ ID NOS: 74-75 |
| 60B18.6 | | |
| AC009133.22 | | SEQ ID NO: 76 |
| AC009491.2 | | SEQ ID NO: 77 |
| RP11- | | SEQ ID NOS: 78-80 |
| 977G19.10 | | |
| CTD- | | SEQ ID NOS: 81-84 |
| 2370N5.3 | | |
| RP11- | | SEQ ID NOS: 85-87 |
| 196G11.1 | | |
| AC136352.5 | | SEQ ID NO: 88 |
| RP11- | | SEQ ID NO: 89 |
| 812E19.9 | | |
| AC145212.4 | MaFF-interacting protein | SEQ ID NO: 90 |
| AC233755.1 | | SEQ ID NO: 91 |
| AC011513.3 | | SEQ ID NOS: 92-93 |
| ACACB | Acetyl-CoA carboxylase beta | SEQ ID NOS: 94-100 |
| ACAN | Aggrecan | SEQ ID NOS: 101-108 |
| ACE | Angiotensin I converting enzyme | SEQ ID NOS: 109-121 |
| ACHE | Acetylcholinesterase (Yt blood group) | SEQ ID NOS: 122-134 |
| ACP2 | Acid phosphatase 2, lysosomal | SEQ ID NOS: 135-142 |
| ACP5 | Acid phosphatase 5, tartrate resistant | SEQ ID NOS: 143-151 |
| ACP6 | Acid phosphatase 6, lysophosphatidic | SEQ ID NOS: 152-158 |
| PAPL | Iron/zinc purple acid phosphatase-like protein | SEQ ID NOS: 159-162 |
| ACPP | Acid phosphatase, prostate | SEQ ID NOS: 163-167 |
| ACR | Acrosin | SEQ ID NOS: 168-169 |
| ACRBP | Acrosin binding protein | SEQ ID NOS: 170-174 |
| ACRV1 | Acrosomal vesicle protein 1 | SEQ ID NOS: 175-178 |
| ACSF2 | Acyl-CoA synthetase family member 2 | SEQ ID NOS: 179-187 |
| ACTL10 | Actin-like 10 | SEQ ID NO: 188 |
| ACVR1 | Activin A receptor, type I | SEQ ID NOS: 189-197 |
| ACVR1C | Activin A receptor, type IC | SEQ ID NOS: 198-201 |
| ACVRL1 | Activin A receptor type II-like 1 | SEQ ID NOS: 202-207 |
| ACYP1 | Acylphosphatase 1, erythrocyte (common) type | SEQ ID NOS: 208-213 |
| ACYP2 | Acylphosphatase 2, muscle type | SEQ ID NOS: 214-221 |
| CECR1 | Cat eye syndrome chromosome region, candidate 1 | SEQ ID NOS: 222-229 |
| ADAM10 | ADAM metallopeptidase domain 10 | SEQ ID NOS: 230-237 |
| ADAM12 | ADAM metallopeptidase domain 12 | SEQ ID NOS: 238-240 |
| ADAM15 | ADAM metallopeptidase domain 15 | SEQ ID NOS: 241-252 |
| ADAM17 | ADAM metallopeptidase domain 17 | SEQ ID NOS: 253-255 |
| ADAM18 | ADAM metallopeptidase domain 18 | SEQ ID NOS: 256-260 |
| ADAM22 | ADAM metallopeptidase domain 22 | SEQ ID NOS: 261-269 |
| ADAM28 | ADAM metallopeptidase domain 28 | SEQ ID NOS: 270-275 |
| ADAM29 | ADAM metallopeptidase domain 29 | SEQ ID NOS: 276-284 |
| ADAM32 | ADAM metallopeptidase domain 32 | SEQ ID NOS: 285-291 |
| ADAM33 | ADAM metallopeptidase domain 33 | SEQ ID NOS: 292-296 |
| ADAM7 | ADAM metallopeptidase domain 7 | SEQ ID NOS: 297-300 |
| ADAM8 | ADAM metallopeptidase domain 8 | SEQ ID NOS: 301-305 |
| ADAM9 | ADAM metallopeptidase domain 9 | SEQ ID NOS: 306-311 |
| ADAMDEC1 | ADAM-like, decysin 1 | SEQ ID NOS: 312-314 |
| ADAMTS1 | ADAM metallopeptidase with thrombospondin | SEQ ID NOS: 315-318 |
| | type 1 motif, 1 | |
| ADAMTS10 | ADAM metallopeptidase with thrombospondin | SEQ ID NOS: 319-324 |
| | type 1 motif, 10 | |
| ADAMTS12 | ADAM metallopeptidase with thrombospondin | SEQ ID NOS: 325-327 |
| | type 1 motif, 12 | |
| ADAMTS13 | ADAM metallopeptidase with thrombospondin | SEQ ID NOS: 328-335 |
| | type 1 motif, 13 | |
| ADAMTS14 | ADAM metallopeptidase with thrombospondin | SEQ ID NOS: 336-337 |
| | type 1 motif, 14 | |
| ADAMTS15 | ADAM metallopeptidase with thrombospondin | SEQ ID NO: 338 |
| | type 1 motif, 15 | |
| ADAMTS16 | ADAM metallopeptidase with thrombospondin | SEQ ID NOS: 339-340 |
| | type 1 motif, 16 | |
| ADAMTS17 | ADAM metallopeptidase with thrombospondin | SEQ ID NOS: 341-344 |
| | type 1 motif, 17 | |
| ADAMTS18 | ADAM metallopeptidase with thrombospondin | SEQ ID NOS: 345-348 |
| | type 1 motif, 18 | |
| ADAMTS19 | ADAM metallopeptidase with thrombospondin | SEQ ID NOS: 349-352 |
| | type 1 motif, 19 | |
| ADAMTS2 | ADAM metallopeptidase with thrombospondin | SEQ ID NOS: 353-355 |
| | type 1 motif, 2 | |
| ADAMTS20 | ADAM metallopeptidase with thrombospondin | SEQ ID NOS: 356-359 |
| | type 1 motif, 20 | |
| ADAMTS3 | ADAM metallopeptidase with thrombospondin | SEQ ID NOS: 360-361 |
| | type 1 motif, 3 | |
| ADAMTS5 | ADAM metallopeptidase with thrombospondin | SEQ ID NO: 362 |
| | type 1 motif, 5 | |
| ADAMTS6 | ADAM metallopeptidase with thrombospondin | SEQ ID NOS: 363-364 |
| | type 1 motif, 6 | |
| ADAMTS7 | ADAM metallopeptidase with thrombospondin | SEQ ID NO: 365 |
| | type 1 motif, 7 | |
| ADAMTS8 | ADAM metallopeptidase with thrombospondin | SEQ ID NO: 366 |
| | type 1 motif, 8 | |
| ADAMTS9 | ADAM metallopeptidase with thrombospondin | SEQ ID NOS: 367-371 |
| | type 1 motif, 9 | |
| ADAMTSL1 | ADAMTS-like 1 | SEQ ID NOS: 372-382 |
| ADAMTSL2 | ADAMTS-like 2 | SEQ ID NOS: 383-385 |
| ADAMTSL3 | ADAMTS-like 3 | SEQ ID NOS: 386-387 |
| ADAMTSL4 | ADAMTS-like 4 | SEQ ID NOS: 388-391 |
| ADAMTSL5 | ADAMTS-like 5 | SEQ ID NOS: 392-397 |
| ADCK1 | AarF domain containing kinase 1 | SEQ ID NOS: 398-402 |
| ADCYAP1 | Adenylate cyclase activating polypeptide 1 | SEQ ID NOS: 403-404 |
| | (pituitary) | |
| ADCYAP1R1 | Adenylate cyclase activating polypeptide 1 | SEQ ID NOS: 405-411 |
| | (pituitary) receptor type I | |
| ADGRA3 | Adhesion G protein-coupled receptor A3 | SEQ ID NOS: 412-416 |
| ADGRB2 | Adhesion G protein-coupled receptor B2 | SEQ ID NOS: 417-425 |
| ADGRD1 | Adhesion G protein-coupled receptor D1 | SEQ ID NOS: 426-431 |
| ADGRE3 | Adhesion G protein-coupled receptor E3 | SEQ ID NOS: 432-436 |
| ADGRE5 | Adhesion G protein-coupled receptor E5 | SEQ ID NOS: 437-442 |
| ADGRF1 | Adhesion G protein-coupled receptor F1 | SEQ ID NOS: 443-447 |
| ADGRG1 | Adhesion G protein-coupled receptor G1 | SEQ ID NOS: 448-512 |
| ADGRG5 | Adhesion G protein-coupled receptor G5 | SEQ ID NOS: 513-515 |
| ADGRG6 | Adhesion G protein-coupled receptor G6 | SEQ ID NOS: 516-523 |
| ADGRV1 | Adhesion G protein-coupled receptor V1 | SEQ ID NOS: 524-540 |
| ADI1 | Acireductone dioxygenase 1 | SEQ ID NOS: 541-543 |
| ADIG | Adipogenin | SEQ ID NOS: 544-547 |
| ADIPOQ | Adiponectin, C1Q and collagen domain containing | SEQ ID NOS: 548-549 |
| ADM | Adrenomedullin | SEQ ID NOS: 550-557 |
| ADM2 | Adrenomedullin 2 | SEQ ID NOS: 558-559 |
| ADM5 | Adrenomedullin 5 (putative) | SEQ ID NO: 560 |
| ADPGK | ADP-dependent glucokinase | SEQ ID NOS: 561-570 |
| ADPRHL2 | ADP-ribosylhydrolase like 2 | SEQ ID NO: 571 |
| AEBP1 | AE binding protein 1 | SEQ ID NOS: 572-579 |
| LACE1 | Lactation elevated 1 | SEQ ID NOS: 580-583 |
| AFM | Afamin | SEQ ID NO: 584 |
| AFP | Alpha-fetoprotein | SEQ ID NOS: 585-586 |
| AGA | Aspartylglucosaminidase | SEQ ID NOS: 587-589 |
| AGER | Advanced glycosylation end product-specific | SEQ ID NOS: 590-600 |
| | receptor | |
| AGK | Acylglycerol kinase | SEQ ID NOS: 601-606 |
| AGPS | Alkylglycerone phosphate synthase | SEQ ID NOS: 607-610 |
| AGR2 | Anterior gradient 2, protein disulphide isomerase | SEQ ID NOS: 611-614 |
| | family member | |
| AGR3 | Anterior gradient 3, protein disulphide isomerase | SEQ ID NOS: 615-617 |
| | family member | |
| AGRN | Agrin | SEQ ID NOS: 618-621 |
| AGRP | Agouti related neuropeptide | SEQ ID NO: 622 |
| AGT | Angiotensinogen (serpin peptidase inhibitor, clade | SEQ ID NO: 623 |
| | A, member 8) | |
| AGTPBP1 | ATP/GTP binding protein 1 | SEQ ID NOS: 624-627 |
| AGTRAP | Angiotensin II receptor-associated protein | SEQ ID NOS: 628-635 |
| AHCYL2 | Adenosylhomocysteinase-like 2 | SEQ ID NOS: 636-642 |
| AHSG | Alpha-2-HS-glycoprotein | SEQ ID NOS: 643-644 |
| AIG1 | Androgen-induced 1 | SEQ ID NOS: 645-653 |
| AK4 | Adenylate kinase 4 | SEQ ID NOS: 654-657 |
| AKAP10 | A kinase (PRKA) anchor protein 10 | SEQ ID NOS: 658-666 |
| AKR1C1 | Aldo-keto reductase family 1, member C1 | SEQ ID NOS: 667-669 |
| RP4- | | SEQ ID NOS: 670-672 |
| 576H24.4 | | |
| SERPINA3 | Serpin peptidase inhibitor, clade A (alpha-1 | SEQ ID NO: 673 |
| | antiproteinase, antitrypsin), member 3 | |
| RP11- | | SEQ ID NOS: 674-675 |
| 14J7.7 | | |
| RP11- | | SEQ ID NO: 676 |
| 903H12.5 | | |
| AL356289.1 | | SEQ ID NO: 677 |
| AL589743.1 | | SEQ ID NO: 678 |
| XXbac- | | SEQ ID NOS: 679-680 |
| BPG116M5.17 | | |
| XXbac- | | SEQ ID NO: 681 |
| BPG181M17.5 | | |
| XXbac- | | SEQ ID NO: 682 |
| BPG32J3.20 | | |
| RP11- | | SEQ ID NO: 683 |
| 350O14.18 | | |
| ALAS2 | 5′-aminolevulinate synthase 2 | SEQ ID NOS: 684-691 |
| ALB | Albumin | SEQ ID NOS: 692-701 |
| ALDH9A1 | Aldehyde dehydrogenase 9 family, member A1 | SEQ ID NO: 702 |
| ALDOA | Aldolase A, fructose-bisphosphate | SEQ ID NOS: 703-717 |
| ALG1 | ALG1, chitobiosyldiphosphodolichol beta- | SEQ ID NOS: 718-723 |
| | mannosyltransferase | |
| ALG5 | ALG5, dolichyl-phosphate beta- | SEQ ID NOS: 724-725 |
| | glucosyltransferase | |
| ALG9 | ALG9, alpha-1,2-mannosyltransferase | SEQ ID NOS: 726-736 |
| FAM150A | Family with sequence similarity 150, member A | SEQ ID NOS: 737-738 |
| FAM150B | Family with sequence similarity 150, member B | SEQ ID NOS: 739-745 |
| ALKBH1 | AlkB homolog 1, histone H2A dioxygenase | SEQ ID NOS: 746-748 |
| ALKBH5 | AlkB homolog 5, RNA demethylase | SEQ ID NOS: 749-750 |
| ALP1 | Alkaline phosphatase, intestinal | SEQ ID NOS: 751-752 |
| ALPL | Alkaline phosphatase, liver/bone/kidney | SEQ ID NOS: 753-757 |
| ALPP | Alkaline phosphatase, placental | SEQ ID NO: 758 |
| ALPPL2 | Alkaline phosphatase, placental-like 2 | SEQ ID NO: 759 |
| AMBN | Ameloblastin (enamel matrix protein) | SEQ ID NOS: 760-762 |
| AMBP | Alpha-1-microglobulin/bikunin precursor | SEQ ID NOS: 763-765 |
| AMELX | Amelogenin, X-linked | SEQ ID NOS: 766-768 |
| AMELY | Amelogenin, Y-linked | SEQ ID NOS: 769-770 |
| AMH | Anti-Mnllerian hormone | SEQ ID NO: 771 |
| AMPD1 | Adenosine monophosphate deaminase 1 | SEQ ID NOS: 772-774 |
| AMTN | Amelotin | SEQ ID NOS: 775-776 |
| AMY1A | Amylase, alpha 1A (salivary) | SEQ ID NOS: 777-779 |
| AMY1B | Amylase, alpha 1B (salivary) | SEQ ID NOS: 780-783 |
| AMY1C | Amylase, alpha 1C (salivary) | SEQ ID NO: 784 |
| AMY2A | Amylase, alpha 2A (pancreatic) | SEQ ID NOS: 785-787 |
| AMY2B | Amylase, alpha 2B (pancreatic) | SEQ ID NOS: 788-792 |
| ANG | Angiogenin, ribonuclease, RNase A family, 5 | SEQ ID NOS: 793-794 |
| ANGEL1 | Angel homolog 1 (Drosophila) | SEQ ID NOS: 795-798 |
| ANGPT1 | Angiopoietin 1 | SEQ ID NOS: 799-803 |
| ANGPT2 | Angiopoietin 2 | SEQ ID NOS: 804-807 |
| ANGPT4 | Angiopoietin 4 | SEQ ID NO: 808 |
| ANGPTL1 | Angiopoietin-like 1 | SEQ ID NOS: 809-811 |
| ANGPTL2 | Angiopoietin-like 2 | SEQ ID NOS: 812-813 |
| ANGPTL3 | Angiopoietin-like 3 | SEQ ID NO: 814 |
| ANGPTL4 | Angiopoietin-like 4 | SEQ ID NOS: 815-822 |
| ANGPTL5 | Angiopoietin-like 5 | SEQ ID NOS: 823-824 |
| ANGPTL6 | Angiopoietin-like 6 | SEQ ID NOS: 825-827 |
| ANGPTL7 | Angiopoietin-like 7 | SEQ ID NO: 828 |
| C19orf80 | Chromosome 19 open reading frame 80 | SEQ ID NOS: 829-832 |
| ANK1 | Ankyrin 1, erythrocytic | SEQ ID NOS: 833-843 |
| ANKDD1A | Ankyrin repeat and death domain containing 1A | SEQ ID NOS: 844-850 |
| ANKRD54 | Ankyrin repeat domain 54 | SEQ ID NOS: 851-859 |
| ANKRD60 | Ankyrin repeat domain 60 | SEQ ID NO: 860 |
| ANO7 | Anoctamin 7 | SEQ ID NOS: 861-864 |
| ANOS1 | Anosmin 1 | SEQ ID NO: 865 |
| ANTXR1 | Anthrax toxin receptor 1 | SEQ ID NOS: 866-869 |
| AOAH | Acyloxyacyl hydrolase (neutrophil) | SEQ ID NOS: 870-874 |
| AOC1 | Amine oxidase, copper containing 1 | SEQ ID NOS: 875-880 |
| AOC2 | Amine oxidase, copper containing 2 (retina- | SEQ ID NOS: 881-882 |
| | specific) | |
| AOC3 | Amine oxidase, copper containing 3 | SEQ ID NOS: 883-889 |
| AP000721.4 | | SEQ ID NO: 890 |
| APBB1 | Amyloid beta (A4) precursor protein-binding, | SEQ ID NOS: 891-907 |
| | family B, member I (Fe65) | |
| APCDD1 | Adenomatosis polyposis coli down-regulated 1 | SEQ ID NOS: 908-913 |
| APCS | Amyloid P component, serum | SEQ ID NO: 914 |
| APELA | Apelin receptor early endogenous ligand | SEQ ID NOS: 915-917 |
| APLN | Apelin | SEQ ID NO: 918 |
| APLP2 | Amyloid beta (A4) precursor-like protein 2 | SEQ ID NOS: 919-928 |
| APOA1 | Apolipoprotein A-I | SEQ ID NOS: 929-933 |
| APOA2 | Apolipoprotein A-II | SEQ ID NOS: 934-942 |
| APOA4 | Apolipoprotein A-IV | SEQ ID NO: 943 |
| APOA5 | Apolipoprotein A-V | SEQ ID NOS: 944-946 |
| APOB | Apolipoprotein B | SEQ ID NOS: 947-948 |
| APOC1 | Apolipoprotein C-I | SEQ ID NOS: 949-957 |
| APOC2 | Apolipoprotein C-II | SEQ ID NOS: 958-962 |
| APOC3 | Apolipoprotein C-III | SEQ ID NOS: 963-966 |
| APOC4 | Apolipoprotein C-IV | SEQ ID NOS: 967-968 |
| APOC4- | APOC4-APOC2 readthrough (NMD candidate) | SEQ ID NOS: 969-970 |
| APOC2 | | |
| APOD | Apolipoprotein D | SEQ ID NOS: 971-974 |
| APOE | Apolipoprotein E | SEQ ID NOS: 975-978 |
| APOF | Apolipoprotein F | SEQ ID NO: 979 |
| APOH | Apolipoprotein H (beta-2-glycoprotein I) | SEQ ID NOS: 980-983 |
| APOL1 | Apolipoprotein L, 1 | SEQ ID NOS: 984-994 |
| APOL3 | Apolipoprotein L, 3 | SEQ ID NOS: 995-1009 |
| APOM | Apolipoprotein M | SEQ ID NOS: 1010-1012 |
| APOOL | Apolipoprotein O-like | SEQ ID NOS: 1013-1015 |
| ARCN1 | Archain 1 | SEQ ID NOS: 1016-1020 |
| ARFIP2 | ADP-ribosylation factor interacting protein 2 | SEQ ID NOS: 1021-1027 |
| ARHGAP36 | Rho GTPase activating protein 36 | SEQ ID NOS: 1028-1033 |
| HMHA1 | Histocompatibility (minor) HA-1 | SEQ ID NOS: 1034-1042 |
| ARHGAP6 | Rho GTPase activating protein 6 | SEQ ID NOS: 1043-1048 |
| ARIIGEF4 | Rho guanine nucleotide exchange factor (GEF) 4 | SEQ ID NOS: 1049-1059 |
| ARL16 | ADP-ribosylation factor-like 16 | SEQ ID NOS: 1060-1068 |
| ARMC5 | Armadillo repeat containing 5 | SEQ ID NOS: 1069-1075 |
| ARNTL | Aryl hydrocarbon receptor nuclear translocator-like | SEQ ID NOS: 1076-1090 |
| ARSA | Arylsulfatase A | SEQ ID NOS: 1091-1096 |
| ARSB | Arylsulfatase B | SEQ ID NOS: 1097-1100 |
| ARSE | Arylsulfatase E (chondrodysplasia punctata 1) | SEQ ID NOS: 1101-1104 |
| ARSG | Arylsulfatase G | SEQ ID NOS: 1105-1108 |
| ARSI | Arylsulfatase family, member I | SEQ ID NOS: 1109-1111 |
| ARSK | Arylsulfatase family, member K | SEQ ID NOS: 1112-1116 |
| ARTS | ADP-ribosyltransferase 3 | SEQ ID NOS: 1117-1124 |
| ART4 | ADP-ribosyltransferase 4 (Dombrock blood group) | SEQ ID NOS: 1125-1128 |
| ART5 | ADP-ribosyltransferase 5 | SEQ ID NOS: 1129-1133 |
| ARTN | Artemin | SEQ ID NOS: 1134-1144 |
| ASAH1 | N-acylsphingosine amidohydrolase (acid | SEQ ID NOS: 1145-1195 |
| | ceramidase) 1 | |
| ASAH2 | N-acylsphingosine amidohydrolase (non-lysosomal | SEQ ID NOS: 1196-1201 |
| | ceramidase) 2 | |
| ASCL1 | Achaete-scute family bHLH transcription factor 1 | SEQ ID NO: 1202 |
| ASIP | Agouti signaling protein | SEQ ID NOS: 1203-1204 |
| ASPN | Asporin | SEQ ID NOS: 1205-1206 |
| ASTL | Astacin-like metallo-endopeptidase (M12 family) | SEQ ID NO: 1207 |
| ATAD5 | ATPase family, AAA domain containing 5 | SEQ ID NOS: 1208-1209 |
| ATAT1 | Alpha tubulin acetyltransferase 1 | SEQ ID NOS: 1210-1215 |
| ATG2A | Autophagy related 2A | SEQ ID NOS: 1216-1218 |
| ATG5 | Autophagy related 5 | SEQ ID NOS: 1219-1227 |
| ATMIN | ATM interactor | SEQ ID NOS: 1228-1231 |
| ATP13A1 | ATPase type 13A1 | SEQ ID NOS: 1232-1234 |
| ATP5F1 | ATP synthase, H+ transporting, mitochondrial Fo | SEQ ID NOS: 1235-1236 |
| | complex, subunit B1 | |
| ATP6AP1 | ATPase, H+ transporting, lysosomal accessory | SEQ ID NOS: 1237-1244 |
| | protein 1 | |
| ATP6AP2 | ATPase, H+ transporting, lysosomal accessory | SEQ ID NOS: 1245-1267 |
| | protein 2 | |
| ATPAF1 | ATP synthase mitochondrial F1 complex assembly | SEQ ID NOS: 1268-1278 |
| | factor 1 | |
| AUH | AU RNA binding protein/enoyl-CoA hydratase | SEQ ID NOS: 1279-1280 |
| AVP | Arginine vasopressin | SEQ ID NO: 1281 |
| AX1N2 | Axin 2 | SEQ ID NOS: 1282-1289 |
| AZGP1 | Alpha-2-glycoprotein 1, zinc-binding | SEQ ID NOS: 1290-1292 |
| AZU1 | Azurocidin 1 | SEQ ID NOS: 1293-1294 |
| B2M | Beta-2-microglobulin | SEQ ID NOS: 1295-1301 |
| B3GALNT1 | Beta-1,3-N-acetylgalactosaminyltransferase 1 | SEQ ID NOS: 1302-1314 |
| | (globoside blood group) | |
| B3GALNT2 | Beta-1,3-N-acetylgalactosaminyltransferase 2 | SEQ ID NOS: 1315-1317 |
| B3GALT1 | UDP-Gal:betaGlcNAc beta 1,3- | SEQ ID NO: 1318 |
| | galactosyltransferase, polypeptide 1 | |
| B3GALT4 | UDP-Gal:betaGlcNAc beta 1,3- | SEQ ID NO: 1319 |
| | galactosyltransferase, polypeptide 4 | |
| B3GALT5 | UDP-Gal:betaGlcNAc beta 1,3- | SEQ ID NOS: 1320-1324 |
| | galactosyltransferase, polypeptide 5 | |
| B3GALT6 | UDP-Gal:betaGal beta 1,3-galactosyltransferase | SEQ ID NO: 1325 |
| | polypeptide 6 | |
| B3GAT3 | Beta-1,3-glucuronyltransferase 3 | SEQ ID NOS: 1326-1330 |
| B3GLCT | Beta 3-glucosyltransferase | SEQ ID NO: 1331 |
| B3GNT3 | UDP-GlcNAc:betaGal beta-1,3-N- | SEQ ID NOS: 1332-1335 |
| | acetylglucosaminyltransferase 3 | |
| B3GNT4 | UDP-GlcNAc:betaGal beta-1,3-N- | SEQ ID NOS: 1336-1339 |
| | acetylglucosaminyltransferase 4 | |
| B3GNT6 | UDP-GlcNAc:betaGal beta-1,3-N- | SEQ ID NOS: 1340-1341 |
| | acetylglucosaminyltransferase 6 | |
| B3GNT7 | UDP-GlcNAc:betaGal beta-1,3-N- | SEQ ID NO: 1342 |
| | acetylglucosaminyltransferase 7 | |
| B3GNT8 | UDP-GlcNAc:betaGal beta-1,3-N- | SEQ ID NO: 1343 |
| | acetylglucosaminyltransferase 8 | |
| B3GNT9 | UDP-GlcNAc:betaGal beta-1,3-N- | SEQ ID NO: 1344 |
| | acetylglucosaminyltransferase 9 | |
| B4GALNT1 | Beta-1,4-N-acetyl-galactosaminyl transferase 1 | SEQ ID NOS: 1345-1356 |
| B4GALNT3 | Beta-1,4-N-acetyl-galactosaminyl transferase 3 | SEQ ID NOS: 1357-1358 |
| B4GALNT4 | Beta-1,4-N-acetyl-galactosaminyl transferase 4 | SEQ ID NOS: 1359-1361 |
| B4GALT4 | UDP-Gal:betaGlcNAc beta 1,4- | SEQ ID NOS: 1362-1375 |
| | galactosyltransferase, polypeptide 4 | |
| B4GALT5 | UDP-Gal:betaGlcNAc beta 1,4- | SEQ ID NO: 1376 |
| | galactosyltransferase, polypeptide 5 | |
| B4GALT6 | UDP-Gal:betaGlcNAc beta 1,4- | SEQ ID NOS: 1377-1380 |
| | galactosyltransferase, polypeptide 6 | |
| B4GAT1 | Beta-1,4-glucuronyltransferase 1 | SEQ ID NO: 1381 |
| B9D1 | B9 protein domain 1 | SEQ ID NOS: 1382-1398 |
| BACE2 | Beta-site APP-cleaving enzyme 2 | SEQ ID NOS: 1399-1401 |
| BAGE5 | B melanoma antigen family, member 5 | SEQ ID NO: 1402 |
| BCAM | Basal cell adhesion molecule (Lutheran blood | SEQ ID NOS: 1403-1406 |
| | group) | |
| BCAN | Brevican | SEQ ID NOS: 1407-1413 |
| BCAP29 | B-cell receptor-associated protein 29 | SEQ ID NOS: 1414-1426 |
| BCAR1 | Breast cancer anti-estrogen resistance 1 | SEQ ID NOS: 1427-1444 |
| BCHE | Butyrylcholinesterase | SEQ ID NOS: 1445-1449 |
| BCKDHB | Branched chain keto acid dehydrogenase E1, beta | SEQ ID NOS: 1450-1452 |
| | polypeptide | |
| BDNF | Brain-derived neurotrophic factor | SEQ ID NOS: 1453-1470 |
| BGLAP | Bone gamma-carboxyglutamate (gla) protein | SEQ ID NO: 1471 |
| BGN | Biglycan | SEQ ID NOS: 1472-1473 |
| BLVRB | Biliverdin reductase B | SEQ ID NOS: 1474-1478 |
| BMP1 | Bone morphogenetic protein 1 | SEQ ID NOS: 1479-1490 |
| BMP10 | Bone morphogenetic protein 10 | SEQ ID NO: 1491 |
| BMP15 | Bone morphogenetic protein 15 | SEQ ID NO: 1492 |
| BMP2 | Bone morphogenetic protein 2 | SEQ ID NO: 1493 |
| BMP3 | Bone morphogenetic protein 3 | SEQ ID NO: 1494 |
| BMP4 | Bone morphogenetic protein 4 | SEQ ID NOS: 1495-1502 |
| BMP6 | Bone morphogenetic protein 6 | SEQ ID NO: 1503 |
| BMP7 | Bone morphogenetic protein 7 | SEQ ID NOS: 1504-1507 |
| BMP8A | Bone morphogenetic protein 8a | SEQ ID NO: 1508 |
| BMP8B | Bone morphogenetic protein 8b | SEQ ID NO: 1509 |
| BMPER | BMP binding endothelial regulator | SEQ ID NOS: 1510-1513 |
| BNC1 | Basonuclin 1 | SEQ ID NOS: 1514-1515 |
| BOC | BOC cell adhesion associated, oncogene regulated | SEQ ID NOS: 1516-1526 |
| BOD1 | Biorientation of chromosomes in cell division 1 | SEQ ID NOS: 1527-1531 |
| BOLA1 | BolA family member 1 | SEQ ID NOS: 1532-1534 |
| BPI | Bactericidal/permeability-increasing protein | SEQ ID NOS: 1535-1538 |
| BPIFA1 | BPI fold containing family A, member 1 | SEQ ID NOS: 1539-1542 |
| BPIFA2 | BPI fold containing family A, member 2 | SEQ ID NOS: 1543-1544 |
| BPIFA3 | BPI fold containing family A. member 3 | SEQ ID NOS: 1545-1546 |
| BPIFB1 | BPI fold containing family B, member 1 | SEQ ID NOS: 1547-1548 |
| BPIFB2 | BPI fold containing family B, member 2 | SEQ ID NO: 1549 |
| BPIFB3 | BPI fold containing family B, member 3 | SEQ ID NO: 1550 |
| BPIFB4 | BPI fold containing family B, member 4 | SEQ ID NOS: 1551-1552 |
| BPIFB6 | BPI fold containing family B, member 6 | SEQ ID NOS: 1553-1554 |
| BPIFC | BPI fold containing family C | SEQ ID NOS: 1555-1558 |
| BRF1 | BRF1, RNA polymerase III transcription initiation | SEQ ID NOS: 1559-1574 |
| | factor 90 kDa subunit | |
| BRINP1 | Bone morphogenetic protein/retinoic acid inducible | SEQ ID NOS: 1575-1576 |
| | neural-specific 1 | |
| BRINP2 | Bone morphogenetic protein/retinoic acid inducible | SEQ ID NO: 1577 |
| | neural-specific 2 | |
| BRINP3 | Bone morphogenetic protein/retinoic acid inducible | SEQ ID NOS: 1578-1580 |
| | neural-specific 3 | |
| BSG | Basigin (Ok blood group) | SEQ ID NOS: 1581-1591 |
| BSPH1 | Binder of sperm protein homolog 1 | SEQ ID NO: 1592 |
| BST1 | Bone marrow stromal cell antigen 1 | SEQ ID NOS: 1593-1597 |
| BTBD17 | BTB (POZ) domain containing 17 | SEQ ID NO: 1598 |
| BTD | Biotinidase | SEQ ID NOS: 1599-1608 |
| BTN2A2 | Butyrophilin, subfamily 2, member A2 | SEQ ID NOS: 1609-1622 |
| BTN3A1 | Butyrophilin, subfamily 3, member A1 | SEQ ID NOS: 1623-1629 |
| BTN3A2 | Butyrophilin, subfamily 3, member A2 | SEQ ID NOS: 1630-1640 |
| BTN3A3 | Butyrophilin, subfamily 3, member A3 | SEQ ID NOS: 1641-1649 |
| RP4- | Complement factor H-related protein 2 | SEQ ID NO: 1650 |
| 608O15.3 | | |
| C10orf99 | Chromosome 10 open reading frame 99 | SEQ ID NO: 1651 |
| C11orf1 | Chromosome 11 open reading frame 1 | SEQ ID NOS: 1652-1656 |
| C11orf24 | Chromosome 11 open reading frame 24 | SEQ ID NOS: 1657-1659 |
| C11orf45 | Chromosome 11 open reading frame 45 | SEQ ID NOS: 1660-1661 |
| C11orf94 | Chromosome 11 open reading frame 94 | SEQ ID NO: 1662 |
| C12orf10 | Chromosome 12 open reading frame 10 | SEQ ID NOS: 1663-1666 |
| C12orf49 | Chromosome 12 open reading frame 49 | SEQ ID NOS: 1667-1670 |
| C12orf73 | Chromosome 12 open reading frame 73 | SEQ ID NOS: 1671-1680 |
| C12orf76 | Chromosome 12 open reading frame 76 | SEQ ID NOS: 1681-1688 |
| C14orf93 | Chromosome 14 open reading frame 93 | SEQ ID NOS: 1689-1704 |
| C16orf89 | Chromosome 16 open reading frame 89 | SEQ ID NOS: 1705-1707 |
| C16orf90 | Chromosome 16 open reading frame 90 | SEQ ID NOS: 1708-1709 |
| C17orf67 | Chromosome 17 open reading frame 67 | SEQ ID NO: 1710 |
| C17orf75 | Chromosome 17 open reading frame 75 | SEQ ID NOS: 1711-1719 |
| C17orf99 | Chromosome 17 open reading frame 99 | SEQ ID NOS: 1720-1722 |
| C18orf54 | Chromosome 18 open reading frame 54 | SEQ ID NOS: 1723-1727 |
| C19orf47 | Chromosome 19 open reading frame 47 | SEQ ID NOS: 1728-1735 |
| C19orf70 | Chromosome 19 open reading frame 70 | SEQ ID NOS: 1736-1739 |
| C1GALT1 | Core 1 synthase, glycoprotein-N- | SEQ ID NOS: 1740-1744 |
| | acetylgalactosamine 3-beta-galactosyltransferase 1 | |
| C1orf127 | Chromosome 1 open reading frame 127 | SEQ ID NOS: 1745-1748 |
| C1orf159 | Chromosome 1 open reading frame 159 | SEQ ID NOS: 1749-1761 |
| C1orf198 | Chromosome 1 open reading frame 198 | SEQ ID NOS: 1762-1766 |
| C1orf54 | Chromosome 1 open reading frame 54 | SEQ ID NOS: 1767-1769 |
| C1orf56 | Chromosome 1 open reading frame 56 | SEQ ID NO: 1770 |
| C1QA | Complement component 1, q subcomponent, A | SEQ ID NOS: 1771-1773 |
| | chain | |
| C1QB | Complement component 1, q subcomponent, B | SEQ ID NOS: 1774-1777 |
| | chain | |
| C1QC | Complement component 1, q subcomponent, C | SEQ ID NOS: 1778-1780 |
| | chain | |
| C1QL1 | Complement component 1, q subcomponent-like 1 | SEQ ID NO: 1781 |
| C1QL2 | Complement component 1, q subcomponent-like 2 | SEQ ID NO: 1782 |
| C1QL3 | Complement component 1, q subcomponent-like 3 | SEQ ID NOS: 1783-1784 |
| C1QL4 | Complement component 1, q subcomponent-like 4 | SEQ ID NO: 1785 |
| C1QTNF1 | C1q and tumor necrosis factor related protein 1 | SEQ ID NOS: 1786-1795 |
| FAM132A | Family with sequence similarity 132, member A | SEQ ID NO: 1796 |
| C1QTNF2 | C1q and tumor necrosis factor related protein 2 | SEQ ID NO: 1797 |
| C1QTNF3 | C1q and tumor necrosis factor related protein 3 | SEQ ID NOS: 1798-1799 |
| C1QTNF4 | C1q and tumor necrosis factor related protein 4 | SEQ ID NOS: 1800-1801 |
| C1QTNF5 | C1q and tumor necrosis factor related protein 5 | SEQ ID NOS: 1802-1804 |
| C1QTNF7 | C1q and tumor necrosis factor related protein 7 | SEQ ID NOS: 1805-1809 |
| C1QTNF8 | C1q and tumor necrosis factor related protein 8 | SEQ ID NOS: 1810-1811 |
| C1QTNF9 | C1q and tumor necrosis factor related protein 9 | SEQ ID NOS: 1812-1813 |
| C1QTNF9B | C1q and tumor necrosis factor related protein 9B | SEQ ID NOS: 1814-1816 |
| C1R | Complement component 1, r subcomponent | SEQ ID NOS: 1817-1825 |
| C1RL | Complement component 1, r subcomponent-like | SEQ ID NOS: 1826-1834 |
| C1S | Complement component 1, s subcomponent | SEQ ID NOS: 1835-1844 |
| C2 | Complement component 2 | SEQ ID NOS: 1845-1859 |
| C21orf33 | Chromosome 21 open reading frame 33 | SEQ ID NOS: 1860-1868 |
| C21orf62 | Chromosome 21 open reading frame 62 | SEQ ID NOS: 1869-1872 |
| C22orf15 | Chromosome 22 open reading frame 15 | SEQ ID NOS: 1873-1875 |
| C22orf46 | Chromosome 22 open reading frame 46 | SEQ ID NO: 1876 |
| C2CD2 | C2 calcium-dependent domain containing 2 | SEQ ID NOS: 1877-1879 |
| C2orf40 | Chromosome 2 open reading frame 40 | SEQ ID NOS: 1880-1882 |
| C2orf66 | Chromosome 2 open reading frame 66 | SEQ ID NO: 1883 |
| C2orf69 | Chromosome 2 open reading frame 69 | SEQ ID NO: 1884 |
| C2orf78 | Chromosome 2 open reading frame 78 | SEQ ID NO: 1885 |
| C3 | Complement component 3 | SEQ ID NOS: 1886-1890 |
| C3orf33 | Chromosome 3 open reading frame 33 | SEQ ID NOS: 1891-1895 |
| C3orf58 | Chromosome 3 open reading frame 58 | SEQ ID NOS: 1896-1899 |
| C4A | Complement component 4A (Rodgers blood | SEQ ID NOS: 1900-1901 |
| | group) | |
| C4B | Complement component 4B (Chido blood group) | SEQ ID NOS: 1902-1903 |
| C4BPA | Complement component 4 binding protein, alpha | SEQ ID NOS: 1904-1906 |
| C4BPB | Complement component 4 binding protein, beta | SEQ ID NOS: 1907-1911 |
| C4orf48 | Chromosome 4 open reading frame 48 | SEQ ID NOS: 1912-1913 |
| C5 | Complement component 5 | SEQ ID NO: 1914 |
| C5orf46 | Chromosome 5 open reading frame 46 | SEQ ID NOS: 1915-1916 |
| C6 | Complement component 6 | SEQ ID NOS: 1917-1920 |
| C6orf120 | Chromosome 6 open reading frame 120 | SEQ ID NO: 1921 |
| C6orf15 | Chromosome 6 open reading frame 15 | SEQ ID NO: 1922 |
| C6orf58 | Chromosome 6 open reading frame 58 | SEQ ID NO: 1923 |
| C7 | Complement component 7 | SEQ ID NO: 1924 |
| C7orf57 | Chromosome 7 open reading frame 57 | SEQ ID NOS: 1925-1929 |
| C8A | Complement component 8, alpha polypeptide | SEQ ID NO: 1930 |
| C8B | Complement component 8, beta polypeptide | SEQ ID NOS: 1931-1933 |
| C8G | Complement component 8, gamma polypeptide | SEQ ID NOS: 1934-1935 |
| C9 | Complement component 9 | SEQ ID NO: 1936 |
| C9orf47 | Chromosome 9 open reading frame 47 | SEQ ID NOS: 1937-1939 |
| CA10 | Carbonic anhydrase X | SEQ ID NOS: 1940-1946 |
| CA11 | Carbonic anhydrase XI | SEQ ID NOS: 1947-1948 |
| CA6 | Carbonic anhydrase VI | SEQ ID NOS: 1949-1953 |
| CA9 | Carbonic anhydrase IX | SEQ ID NOS: 1954-1955 |
| CABLES1 | Cdk5 and Abl enzyme substrate 1 | SEQ ID NOS: 1956-1961 |
| CABP1 | Calcium binding protein 1 | SEQ ID NOS: 1962-1965 |
| CACNA2D1 | Calcium channel, voltage-dependent, alpha 2/delta | SEQ ID NOS: 1966-1969 |
| | subunit 1 | |
| CACNA2D4 | Calcium channel, voltage-dependent, alpha 2/delta | SEQ ID NOS: 1970-1983 |
| | subunit 4 | |
| CADM3 | Cell adhesion molecule 3 | SEQ ID NOS: 1984-1986 |
| CALCA | Calcitonin-related polypeptide alpha | SEQ ID NOS: 1987-1991 |
| CALCB | Calcitonin-related polypeptide beta | SEQ ID NOS: 1992-1994 |
| CALCR | Calcitonin receptor | SEQ ID NOS: 1995-2001 |
| CALCRL | Calcitonin receptor-like | SEQ ID NOS: 2002-2006 |
| FAM26D | Family with sequence similarity 26, member D | SEQ ID NOS: 2007-2011 |
| CALR | Calreticulin | SEQ ID NOS: 2012-2015 |
| CALR3 | Calreticulin 3 | SEQ ID NOS: 2016-2017 |
| CALU | Calumenin | SEQ ID NOS: 2018-2023 |
| CAMK2D | Calcium/calmodulin-dependent protein kinase II | SEQ ID NOS: 2024-2035 |
| | delta | |
| CAMP | Cathelicidin antimicrobial peptide | SEQ ID NO: 2036 |
| CANX | Calnexin | SEQ ID NOS: 2037-2051 |
| CARM1 | Coactivator-associated arginine methyltransferase | SEQ ID NOS: 2052-2059 |
| | 1 | |
| CARNS1 | Carnosine synthase 1 | SEQ ID NOS: 2060-2062 |
| CARTPT | CART prepropeptide | SEQ ID NO: 2063 |
| CASQ1 | Calsequestrin 1 (fast-twitch, skeletal muscle) | SEQ ID NOS: 2064-2065 |
| CASQ2 | Calsequestrin 2 (cardiac muscle) | SEQ ID NO: 2066 |
| CATSPERG | Catsper channel auxiliary subunit gamma | SEQ ID NOS: 2067-2074 |
| CBLN1 | Cerebellin 1 precursor | SEQ ID NOS: 2075-2077 |
| CBLN2 | Cerebellin 2 precursor | SEQ ID NOS: 2078-2081 |
| CBLN3 | Cerebellin 3 precursor | SEQ ID NOS: 2082-2083 |
| CBLN4 | Cerebellin 4 precursor | SEQ ID NO: 2084 |
| CCBE1 | Collagen and calcium binding EGF domains 1 | SEQ ID NOS: 2085-2087 |
| CCDC112 | Coiled-coil domain containing 112 | SEQ ID NOS: 2088-2091 |
| CCDC129 | Coiled-coil domain containing 129 | SEQ ID NOS: 2092-2099 |
| CCDC134 | Coiled-coil domain containing 134 | SEQ ID NOS: 2100-2101 |
| CCDC149 | Coiled-coil domain containing 149 | SEQ ID NOS: 2102-2105 |
| CCDC3 | Coiled-coil domain containing 3 | SEQ ID NOS: 2106-2107 |
| CCDC80 | Coiled-coil domain containing 80 | SEQ ID NOS: 2108-2111 |
| CCDC85A | Coiled-coil domain containing 85A | SEQ ID NO: 2112 |
| CCDC88B | Coiled-coil domain containing 88B | SEQ ID NOS: 2113-2115 |
| CCER2 | Coiled-coil glutamate-rich protein 2 | SEQ ID NOS: 2116-2117 |
| CCK | Cholecystokinin | SEQ ID NOS: 2118-2120 |
| CCL1 | Chemokine (C-C motif) ligand 1 | SEQ ID NO: 2121 |
| CCL11 | Chemokine (C-C motif) ligand 11 | SEQ ID NO: 2122 |
| CCL13 | Chemokine (C-C motif) ligand 13 | SEQ ID NOS: 2123-2124 |
| CCL14 | Chemokine (C-C motif) ligand 14 | SEQ ID NOS: 2125-2128 |
| CCL15 | Chemokine (C-C motif) ligand 15 | SEQ ID NOS: 2129-2130 |
| CCL16 | Chemokine (C-C motif) ligand 16 | SEQ ID NOS: 2131-2133 |
| CCL17 | Chemokine (C-C motif) ligand 17 | SEQ ID NOS: 2134-2135 |
| CCL18 | Chemokine (C-C motif) ligand 18 (pulmonary and | SEQ ID NO: 2136 |
| | activation-regulated) | |
| CCL19 | Chemokine (C-C motif) ligand 19 | SEQ ID NOS: 2137-2138 |
| CCL2 | Chemokine (C-C motif) ligand 2 | SEQ ID NOS: 2139-2140 |
| CCL20 | Chemokine (C-C motif) ligand 20 | SEQ ID NOS: 2141-2143 |
| CCL21 | Chemokine (C-C motif) ligand 21 | SEQ ID NOS: 2144-2145 |
| CCL22 | Chemokine (C-C motif) ligand 22 | SEQ ID NO: 2146 |
| CCL23 | Chemokine (C-C motif) ligand 23 | SEQ ID NOS: 2147-2149 |
| CCL24 | Chemokine (C-C motif) ligand 24 | SEQ ID NOS: 2150-2151 |
| CCL25 | Chemokine (C-C motif) ligand 25 | SEQ ID NOS: 2152-2155 |
| CCL26 | Chemokine (C-C motif) ligand 26 | SEQ ID NOS: 2156-2157 |
| CCL27 | Chemokine (C-C motif) ligand 27 | SEQ ID NO: 2158 |
| CCL28 | Chemokine (C-C motif) ligand 28 | SEQ ID NOS: 2159-2161 |
| CCL3 | Chemokine (C-C motif) ligand 3 | SEQ ID NO: 2162 |
| CCL3L3 | Chemokine (C-C motif) ligand 3-like 3 | SEQ ID NO: 2163 |
| CCL4 | Chemokine (C-C motif) ligand 4 | SEQ ID NOS: 2164-2165 |
| CCL4L2 | Chemokine (C-C motif) ligand 4-like 2 | SEQ ID NOS: 2166-2175 |
| CCL5 | Chemokine (C-C motif) ligand 5 | SEQ ID NOS: 2176-2178 |
| CCL7 | Chemokine (C-C motif) ligand 7 | SEQ ID NOS: 2179-2181 |
| CCL8 | Chemokine (C-C motif) ligand 8 | SEQ ID NO: 2182 |
| CCNB1IP1 | Cyclin B1 interacting protein 1, E3 ubiquitin | SEQ ID NOS: 2183-2194 |
| | protein ligase | |
| CCNL1 | Cyclin L1 | SEQ ID NOS: 2195-2203 |
| CCNL2 | Cyclin L2 | SEQ ID NOS: 2204-2211 |
| CD14 | CD14 molecule | SEQ ID NOS: 2212-2216 |
| CD160 | CD160 molecule | SEQ ID NOS: 2217-2221 |
| CD164 | CD164 molecule, sialomucin | SEQ ID NOS: 2222-2227 |
| CD177 | CD177 molecule | SEQ ID NOS: 2228-2230 |
| CD1E | CD1e molecule | SEQ ID NOS: 2231-2244 |
| CD2 | CD2 molecule | SEQ ID NOS: 2245-2246 |
| CD200 | CD200 molecule | SEQ ID NOS: 2247-2253 |
| CD200R1 | CD200 receptor 1 | SEQ ID NOS: 2254-2258 |
| CD22 | CD22 molecule | SEQ ID NOS: 2259-2276 |
| CD226 | CD226 molecule | SEQ ID NOS: 2277-2284 |
| CD24 | CD24 molecule | SEQ ID NOS: 2285-2291 |
| CD276 | CD276 molecule | SEQ ID NOS: 2292-2307 |
| CD300A | CD300a molecule | SEQ ID NOS: 2308-2312 |
| CD300LB | CD300 molecule-like family member b | SEQ ID NOS: 2313-2314 |
| CD300LF | CD300 molecule-like family member f | SEQ ID NOS: 2315-2323 |
| CD300LG | CD300 molecule-like family member g | SEQ ID NOS: 2324-2329 |
| CD3D | CD3d molecule, delta (CD3-TCR complex) | SEQ ID NOS: 2330-2333 |
| CD4 | CD4 molecule | SEQ ID NOS: 2334-2336 |
| CD40 | CD40 molecule, TNF receptor superfamily | SEQ ID NOS: 2337-2340 |
| | member 5 | |
| CD44 | CD44 molecule (Indian blood group) | SEQ ID NOS: 2341-2367 |
| CD48 | CD48 molecule | SEQ ID NOS: 2368-2370 |
| CD5 | CD5 molecule | SEQ ID NOS: 2371-2372 |
| CD55 | CD55 molecule, decay accelerating factor for | SEQ ID NOS: 2373-2383 |
| | complement (Cromer blood group) | |
| CD59 | CD59 molecule, complement regulatory protein | SEQ ID NOS: 2384-2394 |
| CD5L | CD5 molecule-like | SEQ ID NO: 2395 |
| CD6 | CD6 molecule | SEQ ID NOS: 2396-2403 |
| CD68 | CD68 molecule | SEQ ID NOS: 2404-2407 |
| CD7 | CD7 molecule | SEQ ID NOS: 2408-2413 |
| CD79A | CD79a molecule, immunoglobulin-associated | SEQ ID NOS: 2414-2416 |
| | alpha | |
| CD80 | CD80 molecule | SEQ ID NOS: 2417-2419 |
| CD86 | CD86 molecule | SEQ ID NOS: 2420-2426 |
| CD8A | CD8a molecule | SEQ ID NOS: 2427-2430 |
| CD8B | CD8b molecule | SEQ ID NOS: 2431-2436 |
| CD99 | CD99 molecule | SEQ ID NOS: 2437-2445 |
| CDC23 | Cell division cycle 23 | SEQ ID NOS: 2446-2450 |
| CDC40 | Cell division cycle 40 | SEQ ID NOS: 2451-2453 |
| CDC45 | Cell division cycle 45 | SEQ ID NOS: 2454-2460 |
| CDCP1 | CUB domain containing protein 1 | SEQ ID NOS: 2461-2462 |
| CDCP2 | CUB domain containing protein 2 | SEQ ID NOS: 2463-2464 |
| CDH1 | Cadherin 1, type 1 | SEQ ID NOS: 2465-2472 |
| CDH11 | Cadherin 11, type 2, OB-cadherin (osteoblast) | SEQ ID NOS: 2473-2482 |
| CDH13 | Cadherin 13 | SEQ ID NOS: 2483-2492 |
| CDH17 | Cadherin 17, LI cadherin (liver-intestine) | SEQ ID NOS: 2493-2497 |
| CDH18 | Cadherin 18, type 2 | SEQ ID NOS: 2498-2504 |
| CDH19 | Cadherin 19, type 2 | SEQ ID NOS: 2505-2509 |
| CDH23 | Cadherin-related 23 | SEQ ID NOS: 2510-2525 |
| CDH5 | Cadherin 5, type 2 (vascular endothelium) | SEQ ID NOS: 2526-2533 |
| CDHR1 | Cadherin-related family member 1 | SEQ ID NOS: 2534-2539 |
| CDHR4 | Cadherin-related family member 4 | SEQ ID NOS: 2540-2544 |
| CDHR5 | Cadherin-related family member 5 | SEQ ID NOS: 2545-2551 |
| CDKN2A | Cyclin-dependent kinase inhibitor 2A | SEQ ID NOS: 2552-2562 |
| CONF | Cerebral dopamine neurotrophic factor | SEQ ID NOS: 2563-2564 |
| CDON | Cell adhesion associated, oncogene regulated | SEQ ID NOS: 2565-2572 |
| CDSN | Corneodesmosin | SEQ ID NO: 2573 |
| CEACAM16 | Carcinoembryonic antigen-related cell adhesion | SEQ ID NOS: 2574-2575 |
| | molecule 16 | |
| CEACAM18 | Carcinoembryonic antigen-related cell adhesion | SEQ ID NO: 2576 |
| | molecule 18 | |
| CEACAM19 | Carcinoembryonic antigen-related cell adhesion | SEQ ID NOS: 2577-2583 |
| | molecule 19 | |
| CEACAM5 | Carcinoembryonic antigen-related cell adhesion | SEQ ID NOS: 2584-2591 |
| | molecule 5 | |
| CEACAM7 | Carcinoembryonic antigen-related cell adhesion | SEQ ID NOS: 2592-2594 |
| | molecule 7 | |
| CEACAM8 | Carcinoembryonic antigen-related cell adhesion | SEQ ID NOS: 2595-2596 |
| | molecule 8 | |
| CEL | Carboxyl ester lipase | SEQ ID NO: 2597 |
| CELA2A | Chymotrypsin-like elastase family, member 2A | SEQ ID NO: 2598 |
| CELA2B | Chymotrypsin-like elastase family, member 2B | SEQ ID NOS: 2599-2600 |
| CELA3A | Chymotrypsin-like elastase family, member 3A | SEQ ID NOS: 2601-2603 |
| CELA3B | Chymotrypsin-like elastase family, member 3B | SEQ ID NOS: 2604-2606 |
| CEMIP | Cell migration inducing protein, hyaluronan | SEQ ID NOS: 2607-2611 |
| | binding | |
| CEP89 | Centrosomal protein 89 kDa | SEQ ID NOS: 2612-2617 |
| CER1 | Cerberus 1, DAN family BMP antagonist | SEQ ID NO: 2618 |
| CERCAM | Cerebral endothelial cell adhesion molecule | SEQ ID NOS: 2619-2626 |
| CERS1 | Ceramide synthase 1 | SEQ ID NOS: 2627-2631 |
| CES1 | Carboxylesterase 1 | SEQ ID NOS: 2632-2637 |
| CES3 | Carboxylesterase 3 | SEQ ID NOS: 2638-2642 |
| CES4A | Carboxylesterase 4A | SEQ ID NOS: 2643-2648 |
| CES5A | Carboxylesterase 5A | SEQ ID NOS: 2649-2656 |
| CETP | Cholesteryl ester transfer protein, plasma | SEQ ID NOS: 2657-2659 |
| CCDC108 | Coiled-coil domain containing 108 | SEQ ID NOS: 2660-2669 |
| CFB | Complement factor B | SEQ ID NOS: 2670-2674 |
| CFC1 | Cripto, FRL-1, cryptic family 1 | SEQ ID NOS: 2675-2677 |
| CFC1B | Cripto, FRL-1, cryptic family 1B | SEQ ID NOS: 2678-2680 |
| CFD | Complement factor D (adipsin) | SEQ ID NOS: 2681-2682 |
| CFDP1 | Craniofacial development protein 1 | SEQ ID NOS: 2683-2686 |
| CFH | Complement factor H | SEQ ID NOS: 2687-2689 |
| CFHR1 | Complement factor H-related 1 | SEQ ID NOS: 2690-2691 |
| CFHR2 | Complement factor H-related 2 | SEQ ID NOS: 2692-2693 |
| CFHR3 | Complement factor H-related 3 | SEQ ID NOS: 2694-2698 |
| CFHR4 | Complement factor H-related 4 | SEQ ID NOS: 2699-2702 |
| CFHR5 | Complement factor H-related 5 | SEQ ID NO: 2703 |
| CFI | Complement factor I | SEQ ID NOS: 2704-2708 |
| CFP | Complement factor properdin | SEQ ID NOS: 2709-2712 |
| CGA | Glycoprotein hormones, alpha polypeptide | SEQ ID NOS: 2713-2717 |
| CGB1 | Chorionic gonadotropin, beta polypeptide 1 | SEQ ID NOS: 2718-2719 |
| CGB2 | Chorionic gonadotropin, beta polypeptide 2 | SEQ ID NOS: 2720-2721 |
| CGB | Chorionic gonadotropin, beta polypeptide | SEQ ID NO: 2722 |
| CGB5 | Chorionic gonadotropin, beta polypeptide 5 | SEQ ID NO: 2723 |
| CGB7 | Chorionic gonadotropin, beta polypeptide 7 | SEQ ID NOS: 2724-2726 |
| CGB8 | Chorionic gonadotropin, beta polypeptide 8 | SEQ ID NO: 2727 |
| CGREF1 | Cell growth regulator with EF-hand domain 1 | SEQ ID NOS: 2728-2735 |
| CHAD | Chondroadherin | SEQ ID NOS: 2736-2738 |
| CHADL | Chondroadherin-like | SEQ ID NOS: 2739-2741 |
| CHEK2 | Checkpoint kinase 2 | SEQ ID NOS: 2742-2763 |
| CHGA | Chromogranin A | SEQ ID NOS: 2764-2766 |
| CHGB | Chromogranin B | SEQ ID NOS: 2767-2768 |
| CHI3L1 | Chitinase 3-like 1 (cartilage glycoprotein-39) | SEQ ID NOS: 2769-2770 |
| CHI3L2 | Chitinase 3-like 2 | SEQ ID NOS: 2771-2784 |
| CHIA | Chitinase, acidic | SEQ ID NOS: 2785-2793 |
| CHID1 | Chitinase domain containing 1 | SEQ ID NOS: 2794-2812 |
| CHIT1 | Chitinase 1 (chitotriosidase) | SEQ ID NOS: 2813-2816 |
| CHL1 | Cell adhesion molecule L1-like | SEQ ID NOS: 2817-2825 |
| CHN1 | Chimerin 1 | SEQ ID NOS: 2826-2836 |
| CHPF | Chondroitin polymerizing factor | SEQ ID NOS: 2837-2839 |
| CHPF2 | Chondroitin polymerizing factor 2 | SEQ ID NOS: 2840-2843 |
| CHRD | Chordin | SEQ ID NOS: 2844-2849 |
| CHRDL1 | Chordin-like 1 | SEQ ID NOS: 2850-2854 |
| CHRDL2 | Chordin-like 2 | SEQ ID NOS: 2.855-2863 |
| CHRNA2 | Cholinergic receptor, nicotinic, alpha 2 (neuronal) | SEQ ID NOS: 2864-2872 |
| CHRNA5 | Cholinergic receptor, nicotinic, alpha 5 (neuronal) | SEQ ID NOS: 2873-2876 |
| CHRNB1 | Cholinergic receptor, nicotinic, beta 1 (muscle) | SEQ ID NOS: 2877-2882 |
| CHRND | Cholinergic receptor, nicotinic, delta (muscle) | SEQ ID NOS: 2883-2888 |
| CHST1 | Carbohydrate (keratan sulfate Gal-6) | SEQ ID NO: 2889 |
| | sulfotransferase 1 | |
| CHST10 | Carbohydrate sulfotransferase 10 | SEQ ID NOS: 2890-2897 |
| CHST11 | Carbohydrate (chondroitin 4) sulfotransferase 11 | SEQ ID NOS: 2898-2902 |
| CHST13 | Carbohydrate (chondroitin 4) sulfotransferase 13 | SEQ ID NOS: 2903-2904 |
| CHST4 | Carbohydrate (N-acetylglucosamine 6-O) | SEQ ID NOS: 2905-2906 |
| | sulfotransferase 4 | |
| CHST5 | Carbohydrate (N-acetylglucosamine 6-O) | SEQ ID NOS: 2907-2908 |
| | sulfotransferase 5 | |
| CHST6 | Carbohydrate (N-acetylglucosamine 6-O) | SEQ ID NOS: 2909-2910 |
| | sulfotransferase 6 | |
| CHST7 | Carbohydrate (N-acetylglucosamine 6-O) | SEQ ID NO: 2911 |
| | sulfotransferase 7 | |
| CHST8 | Carbohydrate (N-acetylgalactosamine 4-0) | SEQ ID NOS: 2912-2915 |
| | sulfotransferase 8 | |
| CHSY1 | Chondroitin sulfate synthase 1 | SEQ ID NOS: 2916-2917 |
| CHSY3 | Chondroitin sulfate synthase 3 | SEQ ID NO: 2918 |
| CHTF8 | Chromosome transmission fidelity factor 8 | SEQ ID NOS: 2919-2929 |
| CILP | Cartilage intermediate layer protein, nucleotide | SEQ ID NO: 2930 |
| | pyrophosphohydrolase | |
| CILP2 | Cartilage intermediate layer protein 2 | SEQ ID NOS: 2931-2932 |
| CKLF | Chemokine-like factor | SEQ ID NOS: 2933-2938 |
| CKMT1A | Creatine kinase, mitochondrial 1A | SEQ ID NOS: 2939-2944 |
| CKMT1B | Creatine kinase, mitochondrial 1B | SEQ ID NOS: 2945-2954 |
| CLCA1 | Chloride channel accessory 1 | SEQ ID NOS: 2955-2956 |
| CLCF1 | Cardiotrophin-like cytokine factor 1 | SEQ ID NOS: 2957-2958 |
| CLDN15 | Claudin 15 | SEQ ID NOS: 2959-2964 |
| CLDN7 | Claudin 7 | SEQ ID NOS: 2.965-2971 |
| CLDND1 | Claudin domain containing 1 | SEQ ID NOS: 2972-2997 |
| CLEC11A | C-type lectin domain family 11, member A | SEQ ID NOS: 2998-3000 |
| CLEC16A | C-type lectin domain family 16, member A | SEQ ID NOS: 3001-3006 |
| CLEC18A | C-type lectin domain family 18, member A | SEQ ID NOS: 3007-3012 |
| CLEC18B | C-type lectin domain family 18, member B | SEQ ID NOS: 3013-3016 |
| CLEC18C | C-type lectin domain family 18, member C | SEQ ID NOS: 3017-3023 |
| CLEC19A | C-type lectin domain family 19, member A | SEQ ID NOS: 3024-3027 |
| CLEC2B | C-type lectin domain family 2, member B | SEQ ID NOS: 3028-3029 |
| CLEC3A | C-type lectin domain family 3, member A | SEQ ID NOS: 3030-3031 |
| CLEC3B | C-type lectin domain family 3, member B | SEQ ID NOS: 3032-3033 |
| CLGN | Calmegin | SEQ ID NOS: 3034-3036 |
| CLN5 | Ceroid-lipofuscinosis, neuronal 5 | SEQ ID NOS: 3037-3048 |
| CLPS | Colipase, pancreatic | SEQ ID NOS: 3049-3051 |
| CLPSL1 | Colipase-like 1 | SEQ ID NOS: 3052-3053 |
| CLPSL2 | Colipase-like 2 | SEQ ID NOS: 3054-3055 |
| CLPX | Caseinolytic mitochondrial matrix peptidase | SEQ ID NOS: 3056-3058 |
| | chaperone subunit | |
| CLSTN3 | Calsyntenin 3 | SEQ ID NOS: 3059-3065 |
| CLU | Clusterin | SEQ ID NOS: 3066-3079 |
| CLUL1 | Clusterin-like 1 (retinal) | SEQ ID NOS: 3080-3087 |
| CMA1 | Chymase 1, mast cell | SEQ ID NOS: 3088-3089 |
| CMPK1 | Cytidine monophosphate (UMP-CMP) kinase 1, | SEQ ID NOS: 3090-3093 |
| | cytosolic | |
| CNBD1 | Cyclic nucleotide binding domain containing 1 | SEQ ID NOS: 3094-3097 |
| CNDP1 | Carnosine dipeptidase 1 (metallopeptidase M20 | SEQ ID NOS: 3098-3100 |
| | family) | |
| RQCD1 | RCD1 required for cell differentiation1 homolog | SEQ ID NOS: 3101-3107 |
| | (S. pombe) | |
| CNPY2 | Canopy FGF signaling regulator 2 | SEQ ID NOS: 3108-3112 |
| CNPY3 | Canopy FGF signaling regulator 3 | SEQ ID NOS: 3113-3114 |
| CNPY4 | Canopy FGF signaling regulator 4 | SEQ ID NOS: 3115-3117 |
| CNTFR | Ciliary neurotrophic factor receptor | SEQ ID NOS: 3118-3121 |
| CNTN1 | Contactin 1 | SEQ ID NOS: 3122-3131 |
| CNTN2 | Contactin 2 (axonal) | SEQ ID NOS: 3132-3143 |
| CNTN3 | Contactin 3 (plasmacytoma associated) | SEQ ID NO: 3144 |
| CNTN4 | Contactin 4 | SEQ ID NOS: 3145-3153 |
| CNTN5 | Contactin 5 | SEQ ID NOS: 3154-3159 |
| CNTNAP2 | Contactin associated protein-like 2 | SEQ ID NOS: 3160-3163 |
| CNTNAP3 | Contactin associated protein-like 3 | SEQ ID NOS: 3164-3168 |
| CNTNAP3B | Contactin associated protein-like 3B | SEQ ID NOS: 3169-3177 |
| COASY | CoA synthase | SEQ ID NOS: 3178-3187 |
| COCH | Cochlin | SEQ ID NOS: 3188-3199 |
| COG3 | Component of oligomeric golgi complex 3 | SEQ ID NOS: 3200-3203 |
| COL10A1 | Collagen, type X, alpha 1 | SEQ ID NOS: 3204-3207 |
| COL11A1 | Collagen, type XI, alpha 1 | SEQ ID NOS: 3208-3218 |
| COL11A2 | Collagen, type XI, alpha 2 | SEQ ID NOS: 3219-3223 |
| COL12A1 | Collagen, type XII, alpha 1 | SEQ ID NOS: 3224-3231 |
| COL14A1 | Collagen, type XIV, alpha 1 | SEQ ID NOS: 3232-3239 |
| COL15A1 | Collagen, type XV, alpha 1 | SEQ ID NOS: 3240-3241 |
| COL16A1 | Collagen, type XVI, alpha 1 | SEQ ID NOS: 3242-3246 |
| COL18A1 | Collagen, type XVIII, alpha 1 | SEQ ID NOS: 3247-3251 |
| COL19A1 | Collagen, type XIX, alpha 1 | SEQ ID NOS: 3252-3254 |
| COL1A1 | Collagen, type I, alpha 1 | SEQ ID NOS: 3255-3256 |
| COL1A2 | Collagen, type I, alpha 2 | SEQ ID NOS: 3257-3258 |
| COL20A1 | Collagen, type XX, alpha 1 | SEQ ID NOS: 3259-3262 |
| COL21A1 | Collagen, type XXI, alpha 1 | SEQ ID NOS: 3263-3268 |
| COL22A1 | Collagen, type XXII, alpha 1 | SEQ ID NOS: 3269-3271 |
| COL24A1 | Collagen, type XXIV, alpha 1 | SEQ ID NOS: 3272-3275 |
| COL26A1 | Collagen, type XXVI, alpha 1 | SEQ ID NOS: 3276-3277 |
| COL27A1 | Collagen, type XXVII, alpha 1 | SEQ ID NOS: 3278-3280 |
| COL28A1 | Collagen, type XXVIII, alpha 1 | SEQ ID NOS: 3281-3285 |
| COL2A1 | Collagen, type II, alpha 1 | SEQ ID NOS: 3286-3287 |
| COL3A1 | Collagen, type III, alpha 1 | SEQ ID NOS: 3288-3290 |
| COL4A1 | Collagen, type IV, alpha 1 | SEQ ID NOS: 3291-3293 |
| COL4A2 | Collagen, type IV, alpha 2 | SEQ ID NOS: 3294-3296 |
| COL4A3 | Collagen, type IV, alpha 3 (Goodpasture antigen) | SEQ ID NOS: 3297-3300 |
| COL4A4 | Collagen, type IV, alpha 4 | SEQ ID NOS: 3301-3302 |
| COL4A5 | Collagen, type IV, alpha 5 | SEQ ID NOS: 3303-3309 |
| COL4A6 | Collagen, type IV, alpha 6 | SEQ ID NOS: 3310-3315 |
| COL5A1 | Collagen, type V, alpha 1 | SEQ ID NOS: 3316-3318 |
| COL5A2 | Collagen, type V, alpha 2 | SEQ ID NOS: 3319-3320 |
| COL5A3 | Collagen, type V, alpha 3 | SEQ ID NO: 3321 |
| COL6A1 | Collagen, type VI, alpha 1 | SEQ ID NOS: 3322-3323 |
| COL6A2 | Collagen, type VI, alpha 2 | SEQ ID NOS: 3324-3329 |
| COL6A3 | Collagen, type VI, alpha 3 | SEQ ID NOS: 3330-3338 |
| COL6A5 | Collagen, type VI, alpha 5 | SEQ ID NOS: 3339-3343 |
| COL6A6 | Collagen, type VI, alpha 6 | SEQ ID NOS: 3344-3346 |
| COL7A1 | Collagen, type VII, alpha 1 | SEQ ID NOS: 3347-3348 |
| COL8A1 | Collagen, type VIII, alpha 1 | SEQ ID NOS: 3349-3352 |
| COL8A2 | Collagen, type VIII, alpha 2 | SEQ ID NOS: 3353-3355 |
| COL9A1 | Collagen, type IX, alpha 1 | SEQ ID NOS: 3356-3359 |
| COL9A2 | Collagen, type IX, alpha 2 | SEQ ID NOS: 3360-3363 |
| COL9A3 | Collagen, type IX, alpha 3 | SEQ ID NOS: 3364-3365 |
| COLEC10 | Colleclin sub-family member 10 (C-type lectin) | SEQ ID NO: 3366 |
| COLEC11 | Collectin sub-family member 11 | SEQ ID NOS: 3367-3376 |
| COLGALT1 | Collagen beta(1-O)galactosyltransferase 1 | SEQ ID NOS: 3377-3379 |
| COLGALT2 | Collagen beta(1-O)galactosyltransferase 2 | SEQ ID NOS: 3380-3382 |
| COLQ | Collagen-like tail subunit (single strand of | SEQ ID NOS: 3383-3387 |
| | homotrimer) of asymmetric acetylcholinesterase | |
| COMP | Cartilage oligomeric matrix protein | SEQ ID NOS: 3388-3390 |
| COPS6 | COP9 signalosome subunit 6 | SEQ ID NOS: 3391-3394 |
| COQ6 | Coenzyme Q6 monooxygenase | SEQ ID NOS: 3395-3402 |
| CORT | Cortistatin | SEQ ID NO: 3403 |
| CP | Ceruloplasmin (ferroxidase) | SEQ ID NOS: 3404-3408 |
| CPA1 | Carboxypeptidase A1 (pancreatic) | SEQ ID NOS: 3409-3413 |
| CPA2 | Carboxy peptidase A2 (pancreatic) | SEQ ID NOS: 3414-3415 |
| CPA3 | Carboxypeptidase A3 (mast cell) | SEQ ID NO: 3416 |
| CPA4 | Carboxypeptidase A4 | SEQ ID NOS: 3417-3422 |
| CPA6 | Carboxypeptidase A6 | SEQ ID NOS: 3423-3425 |
| CPAMD8 | C3 and PZP-like, alpha-2-macroglobulin domain | SEQ ID NOS: 3426-3431 |
| | containing 8 | |
| CPB1 | Carboxypeptidase B1 (tissue) | SEQ ID NOS: 3432-3436 |
| CPB2 | Carboxypeptidase B2 (plasma) | SEQ ID NOS: 3437-3439 |
| CPE | Carboxypeptidase E | SEQ ID NOS: 3440-3444 |
| CPM | Carboxypeptidase M | SEQ ID NOS: 3445-3454 |
| CPN1 | Carboxypeptidase N, polypeptide 1 | SEQ ID NOS: 3455-3456 |
| CPN2 | Carboxypeptidase N, polypeptide 2 | SEQ ID NOS: 3457-3458 |
| CPO | Carboxypeptidase O | SEQ ID NO: 3459 |
| CPQ | Carboxypeptidase Q | SEQ ID NOS: 3460-3465 |
| CPVL | Carboxypeptidase, vitellogenic-like | SEQ ID NOS: 3466-3476 |
| CPXM1 | Carboxypeptidase X (M14 family), member 1 | SEQ ID NO: 3477 |
| CPXM2 | Carboxypeptidase X (M14 family), member 2 | SEQ ID NOS: 3478-3479 |
| CPZ | Carboxypeptidase Z | SEQ ID NOS: 3480-3483 |
| CR1L | Complement component (3b/4b) receptor 1-like | SEQ ID NOS: 3484-3485 |
| CRB2 | Crumbs family member 2 | SEQ ID NOS: 3486-3488 |
| CREG1 | Cellular repressor of E1A-stimulated genes 1 | SEQ ID NO: 3489 |
| CREG2 | Cellular repressor of E1A-stimulated genes 2 | SEQ ID NO: 3490 |
| CRELD1 | Cysteine-rich with EGF-like domains 1 | SEQ ID NOS: 3491-3496 |
| CRELD2 | Cysteine-rich with EGF-like domains 2 | SEQ ID NOS: 3497-3501 |
| CRH | Corticotropin releasing hormone | SEQ ID NO: 3502 |
| CRHBP | Corticotropin releasing hormone binding protein | SEQ ID NOS: 3503-3504 |
| CRHR1 | Corticotropin releasing hormone receptor 1 | SEQ ID NOS: 3505-3516 |
| CRHR2 | Corticotropin releasing hormone receptor 2 | SEQ ID NOS: 3517-3523 |
| CRISP1 | Cysteine-rich secretory protein 1 | SEQ ID NOS: 3524-3527 |
| CRISP2 | Cysteine-rich secretory protein 2 | SEQ ID NOS: 3528-3530 |
| CRISP3 | Cysteine-rich secretory protein 3 | SEQ ID NOS: 3531-3534 |
| CRISPLD2 | Cysteine-rich secretory protein LCCL domain | SEQ ID NOS: 3535-3542 |
| | containing 2 | |
| CRLF1 | Cytokine receptor-like factor 1 | SEQ ID NOS: 3543-3544 |
| CRP | C-reactive protein, pentraxin-related | SEQ ID NOS: 3545-3549 |
| CRTAC1 | Cartilage acidic protein 1 | SEQ ID NOS: 3550-3554 |
| CRTAP | Cartilage associated protein | SEQ ID NOS: 3555-3556 |
| CRY2 | Cryptochrome circadian clock 2 | SEQ ID NOS: 3557-3560 |
| CSAD | Cysteine sulfinic acid decarboxylase | SEQ ID NOS: 3561-3573 |
| CSF1 | Colony stimulating factor 1 (macrophage) | SEQ ID NOS: 3574-3581 |
| CSF1R | Colony stimulating factor 1 receptor | SEQ ID NOS: 3582-3586 |
| CSF2 | Colony stimulating factor 2 (granulocyte- | SEQ ID NO: 3587 |
| | macrophage) | |
| CSF2RA | Colony stimulating factor 2 receptor, alpha, low- | SEQ ID NOS: 3588-3599 |
| | affinity (granulocyte-macrophage) | |
| CSF3 | Colony stimulating factor 3 (granulocyte) | SEQ ID NOS: 3600-3606 |
| CSGALNACT1 | Chondroitin sulfate N- | SEQ ID NOS: 3607-3615 |
| | acetylgalactosaminyltransferase 1 | |
| CSH1 | Chorionic somatomammotropin hormone 1 | SEQ ID NOS: 3616-3619 |
| | (placental lactogen) | |
| CSH2 | Chorionic somatomammotropin hormone 2. | SEQ ID NOS: 3620-3624 |
| CSHL1 | Chorionic somatomammotropin hormone-like 1 | SEQ ID NOS: 3625-3631 |
| CSN1S1 | Casein alpha s1 | SEQ ID NOS: 3632-3637 |
| CSN2 | Casein beta | SEQ ID NO: 3638 |
| CSN3 | Casein kappa | SEQ ID NO: 3639 |
| CST1 | Cystatin SN | SEQ ID NOS: 3640-3641 |
| CST11 | Cystatin 11 | SEQ ID NOS: 3642-3643 |
| CST2 | Cystatin SA | SEQ ID NO: 3644 |
| CST3 | Cystatin C | SEQ ID NOS: 3645-3647 |
| CST4 | Cystatin S | SEQ ID NO: 3648 |
| CST5 | Cystatin D | SEQ ID NO: 3649 |
| CST6 | Cystatin E/M | SEQ ID NO: 3650 |
| CST7 | Cystatin F (leukocystatin) | SEQ ID NO: 3651 |
| CST8 | Cystatin 8 (cystatin-related epididymal specific) | SEQ ID NOS: 3652-3653 |
| CST9 | Cystatin 9 (testatin) | SEQ ID NO: 3654 |
| CST9L | Cystatin 9-like | SEQ ID NO: 3655 |
| CSTL1 | Cystatin-like 1 | SEQ ID NOS: 3656-3658 |
| CT55 | Cancer/testis antigen 55 | SEQ ID NOS: 3659-3660 |
| CTBS | Chitobiase, di-N-acetyl- | SEQ ID NOS: 3661-3663 |
| CTGF | Connective tissue growth factor | SEQ ID NO: 3664 |
| CTHRC1 | Collagen triple helix repeat containing 1 | SEQ ID NOS: 3665-3668 |
| CTLA4 | Cytotoxic T-lymphocyte-associated protein 4 | SEQ ID NOS: 3669-3672 |
| CTNS | Cystinosin, lysosomal cystine transporter | SEQ ID NOS: 3673-3680 |
| CTRB1 | Chymotrypsinogen B1 | SEQ ID NOS: 3681-3683 |
| CTRB2 | Chymotrypsinogen B2 | SEQ ID NOS: 3684-3687 |
| CTRC | Chymotrypsin C (caldecrin) | SEQ ID NOS: 3688-3689 |
| CTRL | Chymotrypsin-like | SEQ ID NOS: 3690-3692 |
| CTSA | Cathepsin A | SEQ ID NOS: 3693-3701 |
| CTSB | Cathepsin B | SEQ ID NOS: 3702-3726 |
| CTSC | Cathepsin C | SEQ ID NOS: 3727-3731 |
| CTSD | Cathepsin D | SEQ ID NOS; 3732-3742 |
| CTSE | Cathepsin E | SEQ ID NOS: 3743-3744 |
| CTSF | Cathepsin F | SEQ ID NOS: 3745-3748 |
| CTSG | Cathepsin G | SEQ ID NO: 3749 |
| CTSH | Cathepsin H | SEQ ID NOS: 3750-3755 |
| CTSK | Cathepsin K | SEQ ID NOS: 3756-3757 |
| CTSL | Cathepsin L | SEQ ID NOS: 3758-3760 |
| CTSO | Cathepsin O | SEQ ID NO: 3761 |
| CTSS | Cathepsin S | SEQ ID NOS: 3762-3766 |
| CTSV | Cathepsin V | SEQ ID NOS: 3767-3768 |
| CTSW | Cathepsin W | SEQ ID NOS: 3769-3771 |
| CTSZ | Cathepsin Z | SEQ ID NO: 3772 |
| CUBN | Cubilin (intrinsic factor-cobalamin receptor) | SEQ ID NOS: 3773-3776 |
| CUTA | CutA divalent cation tolerance homolog (E. coli) | SEQ ID NOS: 3777-3786 |
| CX3CL1 | Chemokine (C-X3-C motif) ligand 1 | SEQ ID NOS: 3787-3790 |
| CXADR | Coxsackie virus and adenovirus receptor | SEQ ID NOS: 3791-3795 |
| CXCL1 | Chemokine (C-X-C motif) ligand 1 (melanoma | SEQ ID NO: 3796 |
| | growth stimulating activity, alpha) | |
| CXCL10 | Chemokine (C-X-C motif) ligand 10 | SEQ ID NO: 3797 |
| CXCL11 | Chemokine (C-X-C motif) ligand 11 | SEQ ID NOS: 3798-3799 |
| CXCL12 | Chemokine (C-X-C motif) ligand 12 | SEQ ID NOS: 3800-3805 |
| CXCL13 | Chemokine (C-X-C motif) ligand 13 | SEQ ID NO: 3806 |
| CXCL14 | Chemokine (C-X-C motif) ligand 14 | SEQ ID NOS: 3807-3808 |
| CXCL17 | Chemokine (C-X-C motif) ligand 17 | SEQ ID NOS: 3809-3810 |
| CXCL2 | Chemokine (C-X-C motif) ligand 2 | SEQ ID NO: 3811 |
| CXCL3 | Chemokine (C-X-C motif) ligand 3 | SEQ ID NO: 3812 |
| CXCL5 | Chemokine (C-X-C motif) ligand 5 | SEQ ID NO: 3813 |
| CXCL6 | Chemokine (C-X-C motif) ligand 6 | SEQ ID NOS: 3814-3815 |
| CXCL8 | Chemokine (C-X-C motif) ligand 8 | SEQ ID NOS: 3816-3817 |
| CXCL9 | Chemokine (C-X-C motif) ligand 9 | SEQ ID NO: 3818 |
| CXorf36 | Chromosome X open reading frame 36 | SEQ ID NOS: 3819-3820 |
| CYB5D2 | Cytochrome b5 domain containing 2 | SEQ ID NOS: 3821-3824 |
| CYHR1 | Cysteine/histidine-rich 1 | SEQ ID NOS: 3825-3832 |
| CYP17A1 | Cytochrome P450, family 17, subfamily A, | SEQ ID NOS: 3833-3837 |
| | polypeptide 1 | |
| CYP20A1 | Cytochrome P450, family 20, subfamily A, | SEQ ID NOS: 3838-3844 |
| | polypeptide 1 | |
| CYP21A2 | Cytochrome P450, family 21, subfamily A, | SEQ ID NOS: 3845-3852 |
| | polypeptide 2 | |
| CYP26B1 | Cytochrome P450, family 26, subfamily B, | SEQ ID NOS: 3853-3857 |
| | polypeptide 1 | |
| CYP2A6 | Cytochrome P450, family 2, subfamily A, | SEQ ID NOS: 3858-3859 |
| | polypeptide 6 | |
| CYP2A7 | Cytochrome P450, family 2, subfamily A, | SEQ ID NOS: 3860-3862 |
| | polypeptide 7 | |
| CYP2B6 | Cytochrome P450, family 2, subfamily B, | SEQ ID NOS: 3863-3866 |
| | polypeptide 6 | |
| CYP2C18 | Cytochrome P450, family 2, subfamily C, | SEQ ID NOS: 3867-3868 |
| | polypeptide 18 | |
| CYP2C19 | Cytochrome P450, family 2, subfamily C, | SEQ ID NOS: 3869-3870 |
| | polypeptide 19 | |
| CYP2C8 | Cytochrome P450, family 2, subfamily C, | SEQ ID NOS: 3871-3878 |
| | polypeptide 8 | |
| CYP2C9 | Cytochrome P450, family 2, subfamily C, | SEQ ID NOS: 3879-3881 |
| | polypeptide 9 | |
| CYP2E1 | Cytochrome P450, family 2, subfamily E, | SEQ ID NOS: 3882-3887 |
| | polypeptide 1 | |
| CYP2F1 | Cytochrome P450, family 2, subfamily F, | SEQ ID NOS: 3888-3891 |
| | polypeptide 1 | |
| CYP2J2 | Cytochrome P450, family 2, subfamily J, | SEQ ID NO: 3892 |
| | polypeptide 2 | |
| CYP2R1 | Cytochrome P450, family 2, subfamily R, | SEQ ID NOS: 3893-3898 |
| | polypeptide 1 | |
| CYP2S1 | Cytochrome P450, family 2, subfamily S, | SEQ ID NOS: 3899-3904 |
| | polypeptide 1 | |
| CYP2W1 | Cytochrome P450, family 2, subfamily W, | SEQ ID NOS: 3905-3907 |
| | polypeptide 1 | |
| CYP46A1 | Cytochrome P450, family 46, subfamily A, | SEQ ID NOS: 3908-3912 |
| | polypeptide 1 | |
| CYP4F11 | Cytochrome P450, family 4, subfamily F, | SEQID NOS: 3913-3917 |
| | polypeptide 11 | |
| CYP4F2 | Cytochrome P450, family 4, subfamily F, | SEQ ID NOS: 3918-3922 |
| | polypeptide 2 | |
| CYR61 | Cysteine-rich, angiogenic inducer, 61 | SEQ ID NO: 3923 |
| CYTL1 | Cytokine-like 1 | SEQ ID NOS: 3924-3926 |
| D2HGDH | D-2-hydroxyglutarate dehydrogenase | SEQ ID NOS: 3927-3935 |
| DAG1 | Dystroglycan 1 (dystrophin-associated | SEQ ID NOS: 3936-3950 |
| | glycoprotein 1) | |
| DAND5 | DAN domain family member 5, BMP antagonist | SEQ ID NOS: 3951-3952 |
| DAO | D-amino-acid oxidase | SEQ ID NOS: 3953-3958 |
| DAZAP2 | DAZ associated protein 2 | SEQ ID NOS: 3959-3967 |
| DBH | Dopamine beta-hydroxylase (dopamine beta- | SEQ ID NOS: 3968-3969 |
| | monooxygenase) | |
| DBNL | Drebrin-like | SEQ ID NOS: 3970-3987 |
| DCD | Dermcidin | SEQ ID NOS: 3988-3990 |
| DCN | Decorin | SEQ ID NOS: 3991-4009 |
| DD1AS | DNA damage-induced apoptosis suppressor | SEQ ID NOS: 4010-4019 |
| DDOST | Dolichyl-diphosphooligosaccharide--protein | SEQ ID NOS: 4020-4023 |
| | glycosyltransferase subunit (non-catalytic) | |
| DDR1 | Discoidin domain receptor tyrosine kinase 1 | SEQ ID NOS: 4024-4069 |
| DDR2 | Discoidin domain receptor tyrosine kinase 2 | SEQ ID NOS: 4070-4075 |
| DDT | D-dopachrome tautomerase | SEQ ID NOS: 4076-4081 |
| DDX17 | DEAD (Asp-Glu-Ala-Asp) box helicase 17 | SEQ ID NOS: 4082-4086 |
| DDX20 | DEAD (Asp-Glu-Ala-Asp) box polypeptide 20 | SEQ ID NOS: 4087-4089 |
| DDX25 | DEAD (Asp-Glu-Ala-Asp) box helicase 25 | SEQ ID NOS: 4090-4096 |
| DDX28 | DEAD (Asp-Glu-Ala-Asp) box polypeptide 28 | SEQ ID NO: 4097 |
| DEAE1 | DEAF1 transcription factor | SEQ ID NOS: 4098-4100 |
| DEF8 | Differentially expressed in FDCP 8 homolog | SEQ ID NOS: 4101-4120 |
| | (mouse) | |
| DEFA1 | Defensin, alpha 1 | SEQ ID NOS: 4121-4122 |
| DEFA1B | Defensin, alpha 1B | SEQ ID NO: 4123 |
| DEFA3 | Defensin, alpha 3, neutrophil-specific | SEQ ID NO: 4124 |
| DEFA4 | Defensin, alpha 4, corticostatin | SEQ ID NO: 4125 |
| DEFA5 | Defensin, alpha 5, Paneth cell-specific | SEQ ID NO: 4126 |
| DEFA6 | Defensin, alpha 6, Paneth cell-specific | SEQ ID NO: 4127 |
| DEFB1 | Defensin, beta 1 | SEQ ID NO: 4128 |
| DEFB103A | Defensin, beta 103A | SEQ ID NO: 4129 |
| DEFB103B | Defensin, beta 103B | SEQ ID NO: 4130 |
| DEFB104A | Defensin, beta 104A | SEQ ID NO: 4131 |
| DEFB104B | Defensin, beta 104B | SEQ ID NO: 4132 |
| DEFB105A | Defensin, beta 105A | SEQ ID NO: 4133 |
| DEFB105B | Defensin, beta 105B | SEQ ID NO: 4134 |
| DEFB106A | Defensin, beta 106A | SEQ ID NO: 4135 |
| DEFB106B | Defensin, beta 106B | SEQ ID NO: 4136 |
| DEFB107A | Defensin, beta 107A | SEQ ID NO: 4137 |
| DEFB107B | Defensin, beta 107B | SEQ ID NO: 4138 |
| DEFB108B | Defensin, beta 108B | SEQ ID NO: 4139 |
| DEFB110 | Defensin, beta 110 | SEQ ID NOS: 4140-4141 |
| DEFB113 | Defensin, beta 113 | SEQ ID NO: 4142 |
| DEFB114 | Defensin, beta 114 | SEQ ID NO: 4143 |
| DEFB115 | Defensin, beta 115 | SEQ ID NO: 4144 |
| DEFB116 | Defensin, beta 116 | SEQ ID NO: 4145 |
| DEFB118 | Defensin, beta 118 | SEQ ID NO: 4146 |
| DEFB119 | Defensin, beta 119 | SEQ ID NOS: 4147-4149 |
| DEFB121 | Defensin, beta 121 | SEQ ID NO: 4150 |
| DEEB123 | Defensin, beta 123 | SEQ ID NO: 4151 |
| DEFB124 | Defensin, beta 124 | SEQ ID NO: 4152 |
| DEFB125 | Defensin, beta 125 | SEQ ID NO: 4153 |
| DEFB126 | Defensin, beta 126 | SEQ ID NO: 4154 |
| DEFB127 | Defensin, beta 127 | SEQ ID NO: 4155 |
| DEEB128 | Defensin, beta 128 | SEQ ID NO: 4156 |
| DEFB129 | Defensin, beta 129 | SEQ ID NO: 4157 |
| DEFB130 | Defensin, beta 130 | SEQ ID NO: 4158 |
| RP11- | | SEQ ID NO: 4159 |
| 1236K1.1 | | |
| DEFB131 | Defensin, beta 131 | SEQ ID NO: 4160 |
| CTD- | | SEQ ID NO: 4161 |
| 2313N18.7 | | |
| DEFB132 | Defensin, beta 132 | SEQ ID NO: 4162 |
| DEFB133 | Defensin, beta 133 | SEQ ID NO: 4163 |
| DEFB134 | Defensin, beta 134 | SEQ ID NOS: 4164-4165 |
| DEFB135 | Defensin, beta 135 | SEQ ID NO: 4166 |
| DEEB136 | Defensin, beta 136 | SEQ ID NO: 4167 |
| DEFB4A | Defensin, beta 4A | SEQ ID NO: 4168 |
| DEFB4B | Defensin, beta 4B | SEQ ID NO: 4169 |
| C10orf10 | Chromosome 10 open reading frame 10 | SEQ ID NOS: 4170-4171 |
| DGCR2 | DiGeorge syndrome critical region gene 2 | SEQ ID NOS: 4172-4175 |
| DHH | Desert hedgehog | SEQ ID NO: 4176 |
| DHRS4 | Dehydrogenase/reductase (SDR family) member 4 | SEQ ID NOS: 4177-4184 |
| DHRS4L2 | Dehydrogenase/reductase (SDR family) member 4 | SEQ ID NOS: 4185-4194 |
| | like 2 | |
| DHRS7 | Dehydrogenase/reductase (SDR family) member 7 | SEQ ID NOS: 4195-4202 |
| DHRS7C | Dehvdrogenase/reductase (SDR family) member | SEQ ID NOS: 4203-4205 |
| | 7C | |
| DHRS9 | Dehydrogenase/reductase (SDR family) member 9 | SEQ ID NOS: 4206-4213 |
| DHRSX | Dehydrogenase/reductase (SDR family) X-linked | SEQ ID NOS: 4214-4218 |
| DHX29 | DEAH (Asp-Glu-Ala-His) box polypeptide 29 | SEQ ID NOS: 4219-4221 |
| DHX30 | DEAH (Asp-Glu-Ala-His) box helicase 30 | SEQ ID NOS: 4222-4229 |
| DHX8 | DEAH (Asp-Glu-Ala-His) box polypeptide 8 | SEQ ID NOS: 4230-4234 |
| DIO2 | Deiodinase, iodothyronine, type II | SEQ ID NOS: 4235-4244 |
| DIXDC1 | DIX domain containing 1 | SEQ ID NOS: 4245-4248 |
| DKK1 | Dickkopf WNT signaling pathway inhibitor 1 | SEQ ID NO: 4249 |
| DKK2 | Dickkopf WNT signaling pathway inhibitor 2 | SEQ ID NOS: 4250-4252 |
| DKK3 | Dickkopf WNT signaling pathway inhibitor 3 | SEQ ID NOS: 4253-4258 |
| DKK4 | Dickkopf WNT signaling pathway inhibitor 4 | SEQ ID NO: 4259 |
| DKKL1 | Dickkopf-like 1 | SEQ ID NOS: 4260-4265 |
| DLG4 | Discs, large homolog 4 (Drosophila) | SEQ ID NOS: 4266-4274 |
| DLK1 | Delta-like 1 homolog (Drosophila) | SEQ ID NOS: 4275-4278 |
| DLL1 | Delta-like 1 (Drosophila) | SEQ ID NOS: 4279-4280 |
| DLL3 | Delta-like 3 (Drosophila) | SEQ ID NOS: 4281-4283 |
| DMBT1 | Deleted in malignant brain tumors 1 | SEQ ID NOS: 4284-4290 |
| DMKN | Dermokine | SEQ ID NOS: 4291-4337 |
| DMP1 | Dentin matrix acidic phosphoprotein 1 | SEQ ID NOS: 4338-4339 |
| DMRTA2 | DMRT-like family A2 | SEQ ID NOS: 4340-4341 |
| DNAAF5 | Dynein, axonemal, assembly factor 5 | SEQ ID NOS: 4342-4345 |
| DNAH14 | Dynein, axonemal, heavy chain 14 | SEQ ID NOS: 4346-4360 |
| DNAJB11 | DnaJ (Hsp40) homolog, subfamily B, member 11 | SEQ ID NOS: 4361-4362 |
| DNAJB9 | DnaJ (Hsp40) homolog, subfamily B, member 9 | SEQ ID NO: 4363 |
| DNAJC25- | DNAJC25-GNG10 readthrough | SEQ ID NO: 4364 |
| GNG10 | | |
| DNAJC3 | DnaJ (Hsp40) homolog, subfamily C, member 3 | SEQ ID NOS: 4365-4366 |
| DNASE1 | Deoxyribonuclease I | SEQ ID NOS: 4367-4377 |
| DNASE1L1 | Deoxyribonuclease I-like 1 | SEQ ID NOS: 4378-4388 |
| DNASE1L2 | Deoxyribonuclease I-like 2 | SEQ ID NOS: 4389-4394 |
| DNASE1L3 | Deoxyribonuclease I-like 3 | SEQ ID NOS: 4395-4400 |
| DNASE2 | Deoxyribonuclease II, lysosomal | SEQ ID NOS: 4401-4402 |
| DNASE2B | Deoxyribonuclease II beta | SEQ ID NOS: 4403-4404 |
| DPEP1 | Dipeptidase 1 (renal) | SEQ ID NOS: 4405-4409 |
| DPEP2 | Dipeptidase 2 | SEQ ID NOS: 4410-4416 |
| DPEP3 | Dipeptidase 3 | SEQ ID NO: 4417 |
| DPF3 | D4, zinc and double PHD fingers, family 3 | SEQ ID NOS: 4418-4424 |
| DPP4 | Dipeptidyl-peptidase 4 | SEQ ID NOS: 4425-4429 |
| DPP7 | Dipeptidyl-peptidase 7 | SEQ ID NOS: 4430-4435 |
| DPT | Dermatopontin | SEQ ID NO: 4436 |
| DRAXIN | Dorsal inhibitory axon guidance protein | SEQ ID NO: 4437 |
| DSE | Dermatan sulfate epimerase | SEQ ID NOS: 4438-4446 |
| DSG2 | Desmoglein 2 | SEQ ID NOS: 4447-4448 |
| DSPP | Dentin sialophosphoprotein | SEQ ID NOS: 4449-4450 |
| DST | Dystonin | SEQ ID NOS: 4451-4469 |
| DUOX1 | Dual oxidase 1 | SEQ ID NOS: 4470-4474 |
| DYNLT3 | Dynein, light chain, Tctex-type 3 | SEQ ID NOS: 4475-4477 |
| E2F5 | E2F transcription factor 5, p130-binding | SEQ ID NOS: 4478-4484 |
| EBAG9 | Estrogen receptor binding site associated, antigen, | SEQ ID NOS: 4485-4493 |
| | 9 | |
| EBI3 | Epstein-Barr virus induced 3 | SEQ ID NO: 4494 |
| ECHDC1 | Ethylmalonyl-CoA decarboxylase 1 | SEQ ID NOS: 4495-4513 |
| ECM1 | Extracellular matrix protein 1 | SEQ ID NOS: 4514-4516 |
| ECM2 | Extracellular matrix protein 2, female organ and | SEQ ID NOS: 4517-4520 |
| | adipocyte specific | |
| ECSIT | ECSIT signalling integrator | SEQ ID NOS: 4521-4532 |
| EDDM3A | Epididymal protein 3A | SEQ ID NO: 4533 |
| EDDM3B | Epididymal protein 3B | SEQ ID NO: 4534 |
| EDEM2 | ER degradation enhancer, mamiosidase alpha-like | SEQ ID NOS: 4535-4536 |
| | 2 | |
| EDEM3 | ER degradation enhancer, mannosidase alpha-like | SEQ ID NOS: 4537-4539 |
| | 3 | |
| EDIL3 | EGF-like repeats and discoidin I-like domains 3 | SEQ ID NOS: 4540-4541 |
| EDN1 | Endothelin 1 | SEQ ID NO: 4542 |
| EDN2 | Endothelin 2 | SEQ ID NO: 4543 |
| EDN3 | Endothelin 3 | SEQ ID NOS: 4544-4549 |
| EDNRB | Endothelin receptor type B | SEQ ID NOS: 4550-4558 |
| EFEMP1 | EGF containing fibulin-likc extracellular matrix | SEQ ID NOS: 4559-4569 |
| | protein 1 | |
| EFEMP2 | EGF containing fibulin-like extracellular matrix | SEQ ID NOS: 4570-4581 |
| | protein 2 | |
| EFNA1 | Ephrin-A1 | SEQ ID NOS: 4582-4583 |
| EFNA2 | Ephrin-A2 | SEQ ID NO: 4584 |
| EFNA4 | Ephrin-A4 | SEQ ID NOS: 4585-4587 |
| EGFL6 | EGF-like-domain, multiple 6 | SEQ ID NOS: 4588-4589 |
| EGFL7 | EGF-like-domain, multiple 7 | SEQ ID NOS: 4590-4594 |
| EGFL8 | EGF-like-domain, multiple 8 | SEQ ID NOS: 4595-4597 |
| EGFLAM | EGF-like, fibronectin type III and laminin G | SEQ ID NOS: 4598-4606 |
| | domains | |
| EGFR | Epidermal growth factor receptor | SEQ ID NOS: 4607-4614 |
| EHBP1 | EH domain binding protein 1 | SEQ ID NOS: 4615-4626 |
| EHF | Ets homologous factor | SEQ ID NOS: 4627-4636 |
| EHMT1 | Euchromatic histone-lysine N-methyltransferase 1 | SEQ ID NOS: 4637-4662 |
| EHMT2 | Euchromatic histone-lysine N-methyltransferase 2 | SEQ ID NOS: 4663-4667 |
| EIF2AK1 | Eukaryotic translation initiation factor 2-alpha | SEQ ID NOS: 4668-4671 |
| | kinase 1 | |
| ELANE | Elastase, neutrophil expressed | SEQ ID NOS: 4672-4673 |
| ELN | Elastin | SEQ ID NOS: 4674-4696 |
| ELP2 | Elongator acetyltransferase complex subunit 2 | SEQ ID NOS: 4697-4709 |
| ELSPBP1 | Epididymal sperm binding protein 1 | SEQ ID NOS: 4710-4715 |
| EMC1 | ER membrane protein complex subunit 1 | SEQ ID NOS: 4716-4722 |
| EMC10 | ER membrane protein complex subunit 10 | SEQ ID NOS: 4723-4729 |
| EMC9 | ER membrane protein complex subunit 9 | SEQ ID NOS: 4730-4733 |
| EMCN | Endomucin | SEQ ID NOS: 4734-4738 |
| EMID1 | EMI domain containing 1 | SEQ ID NOS: 4739-4745 |
| EMILIN1 | Elastin microfibril interfacer 1 | SEQ ID NOS: 4746-4747 |
| EMILIN2 | Elastin microfibril interfacer 2 | SEQ ID NO: 4748 |
| EMILIN3 | Elastin microfibril interfacer 3 | SEQ ID NO: 4749 |
| ENAM | Enamelin | SEQ ID NO: 4750 |
| ENDOG | Endonuclease G | SEQ ID NO: 4751 |
| ENDOU | Endonuclease, polyU-specific | SEQ ID NOS: 4752-4754 |
| ENHO | Energy homeostasis associated | SEQ ID NO: 4755 |
| ENO4 | Enolase family member 4 | SEQ ID NOS: 4756-4760 |
| ENPP6 | Ectonucleotide pyrophosphatase/phosphodiesterase | SEQ ID NOS: 4761-4762 |
| | 6 | |
| ENPP7 | Ectonucleotide pyrophosphatase/phosphodiesterase | SEQ ID NOS: 4763-4764 |
| | 7 | |
| ENTPD5 | Ectonucleoside triphosphate diphosphohydrolase 5 | SEQ ID NOS: 4765-4769 |
| ENTPD8 | Ectonucleoside triphosphate diphosphohydrolase 8 | SEQ ID NOS: 4770-4773 |
| EOGT | EGF domain-specific O-linked N- | SEQ ID NOS: 4774-4781 |
| | acetylglucosamine (GlcNAc) transferase | |
| EPCAM | Epithelial cell adhesion molecule | SEQ ID NOS: 4782-4785 |
| EPDR1 | Ependymin related 1 | SEQ ID NOS: 4786-4789 |
| EPGN | Epithelial mitogen | SEQ ID NOS: 4790-4798 |
| EPHA10 | EPH receptor A10 | SEQ ID NOS: 4799-4806 |
| EPHA3 | EPH receptor A3 | SEQ ID NOS: 4807-4809 |
| EPHA4 | EPH receptor A4 | SEQ ID NOS: 4810-4819 |
| EPHA7 | EPH receptor A7 | SEQ ID NOS: 4820-4821 |
| EPHA8 | EPH receptor A8 | SEQ ID NOS: 4822-4823 |
| EPHB2 | EPH receptor B2 | SEQ ID NOS: 4824-4828 |
| EPHB4 | EPH receptor B4 | SEQ ID NOS: 4829-4831 |
| EPHX3 | Epoxide hydrolase 3 | SEQ ID NOS: 4832-4835 |
| EPO | Erythropoietin | SEQ ID NO: 4836 |
| EPPIN | Epididymal peptidase inhibitor | SEQ ID NOS: 4837-4839 |
| EPPIN- | EPPIN-WFDC6 readthrough | SEQ ID NO: 4840 |
| WFDC6 | | |
| EPS15 | Epidermal growth factor receptor pathway | SEQ ID NOS: 4841-4843 |
| | substrate 15 | |
| EPS8L1 | EPS8-like 1 | SEQ ID NOS: 4844-4849 |
| EPX | Eosinophil peroxidase | SEQ ID NO: 4850 |
| EPYC | Epiphycan | SEQ ID NOS: 4851-4852 |
| EQTN | Equatorin, sperm acrosome associated | SEQ ID NOS: 4853-4855 |
| ERAP1 | Endoplasmic reticulum aminopeptidase 1 | SEQ ID NOS: 4856-4861 |
| ERAP2 | Endoplasmic reticulum aminopeptidase 2 | SEQ ID NOS: 4862-4869 |
| ERBB3 | Erb-b2 receptor tyrosine kinase 3 | SEQ ID NOS: 4870-4883 |
| FAM132B | Family with sequence similarity 132, member B | SEQ ID NOS: 4884-4886 |
| ERLIN1 | ER lipid raft associated 1 | SEQ ID NOS: 4887-4889 |
| ERLIN2 | ER lipid raft associated 2 | SEQ ID NOS: 4890-4898 |
| ERN1 | Endoplasmic reticulum to nucleus signaling 1 | SEQ ID NOS: 4899-4900 |
| ERN2 | Endoplasmic reticulum to nucleus signaling 2 | SEQ ID NOS: 4901-4905 |
| ERO1A | Endoplasmic reticulum oxidoreductase alpha | SEQ ID NOS: 4906-4912 |
| ERO1B | Endoplasmic reticulum oxidoreductase beta | SEQ ID NOS: 4913-4915 |
| ERP27 | Endoplasmic reticulum protein 27 | SEQ ID NOS: 4916-4917 |
| ERP29 | Endoplasmic reticulum protein 29 | SEQ ID NOS: 4918-4921 |
| ERP44 | Endoplasmic reticulum protein 44 | SEQ ID NO: 4922 |
| ERV3-1 | Endogenous retrovirus group 3, member 1 | SEQ ID NO: 4923 |
| ESM1 | Endothelial cell-specific molecule 1 | SEQ ID NOS: 4924-4926 |
| ESRP1 | Epithelial splicing regulatory protein 1 | SEQ ID NOS: 4927-4935 |
| EXOG | Endo/exomiclease (5′-3′), endonuclease G-like | SEQ ID NOS: 4936-4949 |
| EXTL1 | Exostosin-like glycosyltransferase 1 | SEQ ID NO: 4950 |
| EXTL2 | Exostosin-like glycosyltransferase 2 | SEQ ID NOS: 4951-4955 |
| F10 | Coagulation factor X | SEQ ID NOS: 4956-4959 |
| F11 | Coagulation factor XI | SEQ ID NOS: 4960-4964 |
| F12 | Coagulation factor XII (Hageman factor) | SEQ ID NO: 4965 |
| F13B | Coagulation factor XIII, B polypeptide | SEQ ID NO: 4966 |
| F2 | Coagulation factor II (thrombin) | SEQ ID NOS: 4967-4969 |
| F2R | Coagulation factor II (thrombin) receptor | SEQ ID NOS: 4970-4971 |
| F2RL3 | Coagulation factor II (thrombin) receptor-like 3 | SEQ ID NOS: 4972-4973 |
| F5 | Coagulation factor V (proaccelerin, labile factor) | SEQ ID NOS: 4974-4975 |
| F7 | Coagulation factor VII (serum prothrombin | SEQ ID NOS: 4976-4979 |
| | conversion accelerator) | |
| F8 | Coagulation factor VIII, procoagulant component | SEQ ID NOS: 4980-4985 |
| F9 | Coagulation factor IX | SEQ ID NOS: 4986-4987 |
| FABP6 | Fatty acid binding protein 6, ileal | SEQ ID NOS: 4988-4990 |
| FAM107B | Family with sequence similarity 107, member B | SEQ ID NOS: 4991-5012 |
| FAM131A | Family with sequence similarity 131, member A | SEQ ID NOS: 5013-5021 |
| FAM171A1 | Family with sequence similarity 171, member A1 | SEQ ID NOS: 5022-5023 |
| FAM171B | Family with sequence similarity 171, member B | SEQ ID NOS: 5024-5025 |
| FAM172A | Family with sequence similarity 172, member A | SEQ ID NOS: 5026-5030 |
| FAM177A1 | Family with sequence similarity 177, member A1 | SEQ ID NOS: 5031-5040 |
| FAM180A | Family with sequence similarity 180, member A | SEQ ID NOS: 5041-5043 |
| FAM189A1 | Family with sequence similarity 189, member A1 | SEQ ID NOS: 5044-5045 |
| FAM198A | Family with sequence similarity 198, member A | SEQ ID NOS: 5046-5048 |
| FAM19A1 | Family with sequence similarity 19 (chemokine (C- | SEQ ID NOS: 5049-5051 |
| | C motif)-like), member A1 | |
| FAM19A2 | Family with sequence similarity 19 (chemokine (C- | SEQ ID NOS: 5052-5059 |
| | C motif)-like), member A2 | |
| FAM19A3 | Family with sequence similarity 19 (chemokine (C- | SEQ ID NOS: 5060-5061 |
| | C motif)-like), member A3 | |
| FAM19A4 | Family with sequence similarity 19 (chemokine (C- | SEQ ID NOS: 5062-5064 |
| | C motif)-like), member A4 | |
| FAM19A5 | Family with sequence similarity 19 (chemokine (C- | SEQ ID NOS: 5065-5068 |
| | C motif)-like), member A5 | |
| FAM20A | Family with sequence similarity 20, member A | SEQ ID NOS: 5069-5072 |
| FAM20C | Family with sequence similarity 20, member C | SEQ ID NO: 5073 |
| FAM213A | Family with sequence similarity 213, member A | SEQ ID NOS: 5074-5079 |
| FAM46B | Family with sequence similarity 46, member B | SEQ ID NO: 5080 |
| FAM57A | Family with sequence similarity 57, member A | SEQ ID NOS: 5081-5086 |
| FAM78A | Family with sequence similarity 78, member A | SEQ ID NOS: 5087-5089 |
| FAM96A | Family with sequence similarity 96, member A | SEQ ID NOS: 5090-5094 |
| FAM9B | Family with sequence similarity 9, member B | SEQ ID NOS: 5095-5098 |
| FAP | Fibroblast activation protein, alpha | SEQ ID NOS: 5099-5105 |
| FAS | Fas cell surface death receptor | SEQ ID NOS: 5106-5115 |
| FAT1 | FAT atypical cadherin 1 | SEQ ID NOS: 5116-5122 |
| FBLN1 | Fibulin 1 | SEQ ID NOS: 5123-5135 |
| FBLN2 | Fibulin 2 | SEQ ID NOS: 5136-5141 |
| FBLN5 | Fibulin 5 | SEQ ID NOS: 5142-5147 |
| FBLN7 | Fibulin 7 | SEQ ID NOS: 5148-5153 |
| FBN1 | Fibrillin 1 | SEQ ID NOS: 5154-5157 |
| FBN2 | Fibrillin 2 | SEQ ID NOS: 5158-5163 |
| FBN3 | Fibrillin 3 | SEQ ID NOS: 5164-5168 |
| FBXW7 | F-box and WD repeat domain containing 7, E3 | SEQ ID NOS: 5169-5179 |
| | ubiquitin protein ligase | |
| FCAR | Fc fragment of IgA receptor | SEQ ID NOS: 5180-5189 |
| FCGBP | Fc fragment of IgG binding protein | SEQ ID NOS: 5190-5192 |
| FCGR1B | Fc fragment of IgG, high affinity Ib, receptor | SEQ ID NOS: 5193-5198 |
| | (CD64) | |
| FCGR3A | Fc fragment of IgG, low affinity IIIa, receptor | SEQ ID NOS: 5199-5205 |
| | (CD16a) | |
| FCGRT | Fc fragment of IgG, receptor, transporter, alpha | SEQ ID NOS: 5206-5216 |
| FCMR | Fc fragment of IgM receptor | SEQ ID NOS: 5217-5223 |
| FCN1 | Ficolin (collagen/fibrinogen domain containing) 1 | SEQ ID NOS: 5224-5225 |
| FCN2 | Ficolin (collagen/fibrinogen domain containing | SEQ ID NOS: 5226-5227 |
| | lectin) 2 | |
| FCN3 | Ficolin (collagen/fibrinogen domain containing) 3 | SEQ ID NOS: 5228-5229 |
| FCRL1 | Fc receptor-like 1 | SEQ ID NOS: 5230-5232 |
| FCRL3 | Fc receptor-like 3 | SEQ ID NOS: 5233-5238 |
| FCRL5 | Fc receptor-like 5 | SEQ ID NOS: 5239-5241 |
| FCRLA | Fc receptor-like A | SEQ ID NOS: 5242-5253 |
| FCRLB | Fc receptor-like B | SEQ ID NOS: 5254-5258 |
| FDCSP | Follicular dendritic cell secreted protein | SEQ ID NO: 5259 |
| FETUB | Fetuin B | SEQ ID NOS: 5260-5266 |
| FGA | Fibrinogen alpha chain | SEQ ID NOS: 5267-5269 |
| FGB | Fibrinogen beta chain | SEQ ID NOS: 5270-5272 |
| FGF10 | Fibroblast growth factor 10 | SEQ ID NOS: 5273-5274 |
| FGF17 | Fibroblast growth factor 17 | SEQ ID NOS: 5275-5276 |
| FGF18 | Fibroblast growth factor 18 | SEQ ID NO: 5277 |
| FGF19 | Fibroblast growth factor 19 | SEQ ID NO: 5278 |
| FGF21 | Fibroblast growth factor 21 | SEQ ID NOS: 5279-5280 |
| FGF22 | Fibroblast growth factor 22 | SEQ ID NOS: 5281-5282 |
| FGF23 | Fibroblast growth factor 23 | SEQ ID NO: 5283 |
| FGF3 | Fibroblast growth factor 3 | SEQ ID NO: 5284 |
| FGF4 | Fibroblast growth factor 4 | SEQ ID NO: 5285 |
| FGF5 | Fibroblast growth factor 5 | SEQ ID NOS: 5286-5288 |
| FGF7 | Fibroblast growth factor 7 | SEQ ID NOS: 5289-5293 |
| FGF8 | Fibroblast growth factor 8 (androgcn-induccd) | SEQ ID NOS: 5294-5299 |
| FGFBP1 | Fibroblast growth factor binding protein 1 | SEQ ID NO: 5300 |
| FGFBP2 | Fibroblast growth factor binding protein 2 | SEQ ID NO: 5301 |
| FGFBP3 | Fibroblast growth factor binding protein 3 | SEQ ID NO: 5302 |
| FGFR1 | Fibroblast growth factor receptor 1 | SEQ ID NOS: 5303-5325 |
| FGFR2 | Fibroblast growth factor receptor 2 | SEQ ID NOS: 5326-5347 |
| FGFR3 | Fibroblast growth factor receptor 3 | SEQ ID NOS: 5348-5355 |
| FGFR4 | Fibroblast growth factor receptor 4 | SEQ ID NOS: 5356-5365 |
| FGFRL1 | Fibroblast growth factor receptor-like 1 | SEQ ID NOS: 5366-5371 |
| FGG | Fibrinogen gamma chain | SEQ ID NOS: 5372-5377 |
| FGL1 | Fibrinogen-like 1 | SEQ ID NOS: 5378-5384 |
| FGL2 | Fibrinogen-like 2 | SEQ ID NOS: 5385-5386 |
| FHL1 | Four and a half LIM domains 1 | SEQ ID NOS: 5387-5414 |
| FHOD3 | Formin homology 2 domain containing 3 | SEQ ID NOS: 5415-5421 |
| FIBIN | Fin bud initiation factor homolog (zebrafish) | SEQ ID NO: 5422 |
| FICD | FIC domain containing | SEQ ID NOS: 5423-5426 |
| FJX1 | Four jointed box 1 | SEQ ID NO: 5427 |
| FKBP10 | FK506 binding protein 10, 65 kDa | SEQ ID NOS: 5428-5433 |
| FKBP11 | FK506 binding protein 11, 19 kDa | SEQ ID NOS: 5434-5440 |
| FKBP14 | FK506 binding protein 14, 22 kDa | SEQ ID NOS: 5441-5443 |
| FKBP2 | FK506 binding protein 2, 13 kDa | SEQ ID NOS: 5444-5447 |
| FKBP7 | FK506 binding protein 7 | SEQ ID NOS: 5448-5453 |
| FKBP9 | FK506 binding protem 9, 63 kDa | SEQ ID NOS: 5454-5457 |
| FLT1 | Fms-related tyrosine kinase 1 | SEQ ID NOS: 5458-5466 |
| FLT4 | Fms-related tyrosine kinase 4 | SEQ ID NOS: 5467-5471 |
| FMO1 | Flavin containing monooxygenase 1 | SEQ ID NOS: 5472-5476 |
| FMO2 | Flavin containing monooxygenase 2 (non- | SEQ ID NOS: 5477-5479 |
| | functional) | |
| FMO3 | Flavin containing monooxygenase 3 | SEQ ID NOS: 5480-5482 |
| FMO5 | Flavin containing monooxygenase 5 | SEQ ID NOS: 5483-5489 |
| FMOD | Fibromodulin | SEQ ID NO: 5490 |
| FN1 | Fibronectin 1 | SEQ ID NOS: 5491-5503 |
| FNDC1 | Fibronectin type III domain containing 1 | SEQ ID NOS: 5504-5505 |
| FNDC7 | Fibronectin type III domain containing 7 | SEQ ID NOS: 5506-5507 |
| FOCAD | Focadhesin | SEQ ID NOS: 5508-5514 |
| FOLR2 | Folate receptor 2 (fetal) | SEQ ID NOS: 5515-5524 |
| FOLR3 | Folate receptor 3 (gamma) | SEQ ID NOS: 5525-5529 |
| FOXRED2 | FAD-dependent oxidoreductase domain containing | SEQ ID NOS: 5530-5533 |
| | 2 | |
| FP325331.1 | Uncharacterized protein UNQ6126/PRO20091 | SEQ ID NO: 5534 |
| CH507- | | SEQ ID NOS: 5535-5541 |
| 9B2.3 | | |
| FPGS | Folylpolyglutamate synthase | SEQ ID NOS: 5542-5548 |
| FRAS1 | Fraser extracellular matrix complex subunit 1 | SEQ ID NOS: 5549-5554 |
| FREM1 | FRAS1 related extracellular matrix 1 | SEQ ID NOS: 5555-5559 |
| FREM3 | FRAS1 related extracellular matrix 3 | SEQ ID NO: 5560 |
| FRMPD2 | FERM and PDZ domain containing 2 | SEQ ID NOS: 5561-5564 |
| FRZB | Frizzled-related protein | SEQ ID NO: 5565 |
| FSHB | Follicle stimulating hormone, beta polypeptide | SEQ ID NOS: 5566-5568 |
| FSHR | Follicle stimulating hormone receptor | SEQ ID NOS: 5569-5572 |
| FST | Follistatin | SEQ ID NOS: 5573-5576 |
| FSTL1 | Follistatin-like 1 | SEQ ID NOS: 5577-5580 |
| FSTL3 | Follistatin-like 3 (secreted glycoprotein) | SEQ ID NOS: 5581-5586 |
| FSTL4 | Follistatin-like 4 | SEQ ID NOS: 5587-5589 |
| FSTL5 | Follistatin-like 5 | SEQ ID NOS: 5590-5592 |
| FTCDNL1 | Formiminotransferase cyclodeaminase N-terminal | SEQ ID NOS: 5593-5596 |
| | like | |
| FUCA1 | Fucosidase, alpha-L-1, tissue | SEQ ID NO: 5597 |
| FUCA2 | Fucosidase, alpha-L-2, plasma | SEQ ID NOS: 5598-5599 |
| FURIN | Furin (paired basic amino acid cleaving enzyme) | SEQ ID NOS: 5600-5606 |
| FUT10 | Fucosyltransferase 10 (alpha (1,3) | SEQ ID NOS: 5607-5609 |
| | fucosyltransferase) | |
| FUT11 | Fucosyltransferase 11 (alpha (1,3) | SEQ ID NOS: 5610-5611 |
| | fucosyltransferase) | |
| FXN | Frataxin | SEQ ID NOS: 5612-5619 |
| FXR1 | Fragile X mental retardation, autosomal homolog 1 | SEQ ID NOS: 5620-5632 |
| FXYD3 | FXYD domain containing ion transport regulator 3 | SEQ ID NOS: 5633-5645 |
| GABBR1 | Gamma-aminobutyric acid (GABA) B receptor, 1 | SEQ ID NOS: 5646-5657 |
| GABRA1 | Gamma-aminobutyric acid (GABA) A receptor, | SEQ ID NOS: 5658-5673 |
| | alpha 1 | |
| GABRA2 | Gamma-aminobutyric acid (GABA) A receptor, | SEQ ID NOS: 5674-5688 |
| | alpha 2 | |
| GABRA5 | Gamma-aminobutyric acid (GABA) A receptor, | SEQ ID NOS: 5689-5697 |
| | alpha 5 | |
| GABRG3 | Gamma-aminobutyric acid (GABA) A receptor, | SEQ ID NOS: 5698-5703 |
| | gamma 3 | |
| GABRP | Gamma-aminobutyric acid (GABA) A receptor, pi | SEQ ID NOS: 5704-5712 |
| GAL | Galanin/GMAP prepropeptide | SEQ ID NO: 5713 |
| GAL3ST1 | Galactose-3-O-sulfotransferase 1 | SEQ ID NOS: 5714-5735 |
| GAL3ST2 | Galactose-3-O-sulfotransferase 2 | SEQ ID NO: 5736 |
| GAL3ST3 | Galactose-3-O-sulfotransferase 3 | SEQ ID NOS: 5737-5738 |
| GALC | Galactosylceramidase | SEQ ID NOS: 5739-5748 |
| GALNS | Galactosamine (N-acetyl)-6-sulfatase | SEQ ID NOS: 5749-5754 |
| GALNT10 | Polypeptide N-acetylgalactosaminyltransferase 10 | SEQ ID NOS: 5755-5758 |
| GALNT12 | Polypeptide N-acetylgalactosaminyltransferase 12 | SEQ ID NOS: 5759-5760 |
| GALNT15 | Polypeptide N-acetylgalactosaminyltransferase 15 | SEQ ID NOS: 5761-5764 |
| GALNT2 | Polypeptide N-acetylgalactosaminyltransferase 2 | SEQ ID NO: 5765 |
| GALNT6 | Polypeptide N-acetylgalactosaminyltransferase 6 | SEQ ID NOS: 5766-5777 |
| GALNT8 | Polypeptide N-acetylgalactosaminyltransferase 8 | SEQ ID NOS: 5778-5781 |
| GALNTL6 | Polypeptide N-acetylgalactosaminyltransferase- | SEQ ID NOS: 5782-5785 |
| | like 6 | |
| GALP | Galanin-like peptide | SEQ ID NOS: 5786-5788 |
| GANAB | Glucosidase, alpha; neutral AB | SEQ ID NOS: 5789-5797 |
| GARS | Glycyl-tRNA synthetase | SEQ ID NOS: 5798-5801 |
| GAS1 | Growth arrest-specific 1 | SEQ ID NO: 5802 |
| GAS6 | Growth arrest-specific 6 | SEQ ID NO: 5803 |
| GAST | Gastrin | SEQ ID NO: 5804 |
| PDDC1 | Parkinson disease 7 domain containing 1 | SEQ ID NOS: 5805-5813 |
| GBA | Glucosidase, beta, acid | SEQ ID NOS: 5814-5817 |
| GBGT1 | Globoside alpha-1,3-N- | SEQ ID NOS: 5818-5826 |
| | acetylgalactosaminyltransferase 1 | |
| GC | Group-specific component (vitamin D binding | SEQ ID NOS: 5827-5831 |
| | protein) | |
| GCG | Glucagon | SEQ ID NOS: 5832-5833 |
| GCGR | Glucagon receptor | SEQ ID NOS: 5834-5836 |
| GCNT7 | Glucosaminyl (N-acetyl) transferase family | SEQ ID NOS: 5837-5838 |
| | member 7 | |
| GCSH | Glycine cleavage system protein H (aminomethyl | SEQ ID NOS: 5839-5847 |
| | carrier) | |
| GDF1 | Growth differentiation factor 1 | SEQ ID NO: 5848 |
| GDF10 | Growth differentiation factor 10 | SEQ ID NO: 5849 |
| GDF11 | Growth differentiation factor 11 | SEQ ID NOS: 5850-5851 |
| GDF15 | Growth differentiation factor 15 | SEQ ID NOS: 5852-5854 |
| GDF2 | Growth differentiation factor 2 | SEQ ID NO: 5855 |
| GDF3 | Growth differentiation factor 3 | SEQ ID NO: 5856 |
| GDF5 | Growth differentiation factor 5 | SEQ ID NOS: 5857-5858 |
| GDF6 | Growth differentiation factor 6 | SEQ ID NOS: 5859-5861 |
| GDF7 | Growth differentiation factor 7 | SEQ ID NO: 5862 |
| GDF9 | Growth differentiation factor 9 | SEQ ID NOS: 5863-5867 |
| GDNF | Glial cell derived neurotrophic factor | SEQ ID NOS: 5868-5875 |
| GFOD2 | Glucose-fructose oxidoreductase domain | SEQ ID NOS: 5876-5881 |
| | containing 2 | |
| GFPT2 | Glutamine-fructose-6-phosphate transaminase 2 | SEQ ID NOS: 5882-5884 |
| GFRA2 | GDNF family receptor alpha 2 | SEQ ID NOS: 5885-5891 |
| GFRA4 | GDNF family receptor alpha 4 | SEQ ID NOS: 5892-5894 |
| GGA2 | Golgi-associated, gamma adaptin ear containing, | SEQ ID NOS: 5895-5903 |
| | ARF binding protein 2 | |
| GGH | Gamma-glutamyl hydrolase (conjugase, | SEQ ID NO: 5904 |
| | folylpolygammaglutamyl hydrolase) | |
| GGT1 | Gamma-glutamyltransferase 1 | SEQ ID NOS: 5905-5927 |
| GGT5 | Gamma-glutamyltransferase 5 | SEQ ID NOS: 5928-5932 |
| GH1 | Growth hormone 1 | SEQ ID NOS: 5933-5937 |
| GH2 | Growth hormone 2 | SEQ ID NOS: 5938-5942 |
| GHDC | GH3 domain containing | SEQ ID NOS: 5943-5950 |
| GHRH | Growth hormone releasing hormone | SEQ ID NOS: 5951-5953 |
| GHRHR | Growth hormone releasing hormone receptor | SEQ ID NOS: 5954-5959 |
| GHRL | Ghrelin/obestatin prepropeptide | SEQ ID NOS: 5960-5970 |
| GIF | Gastric intrinsic factor (vitamin B synthesis) | SEQ ID NOS: 5971-5972 |
| GIP | Gastric inhibitory polypeptide | SEQ ID NO: 5973 |
| GKN1 | Gastrokine 1 | SEQ ID NO: 5974 |
| GKN2 | Gastrokine 2 | SEQ ID NOS: 5975-5976 |
| GLA | Galactosidase, alpha | SEQ ID NOS: 5977-5978 |
| GLB1 | Galactosidase, beta 1 | SEQ ID NOS: 5979-5987 |
| GLB1L | Galactosidase, beta 1-like | SEQ ID NOS: 5988-5995 |
| GLB1L2 | Galactosidase, beta 1-like 2 | SEQ ID NOS: 5996-5997 |
| GLCE | Glucuronic acid epimerase | SEQ ID NOS: 5998-5999 |
| GLG1 | Golgi glycoprotein 1 | SEQ ID NOS: 6000-6007 |
| GLIPR1 | GLI pathogenesis-related 1 | SEQ ID NOS: 6008-6011 |
| GLIPR1L1 | GLI pathogenesis-related 1 like 1 | SEQ ID NOS: 6012-6015 |
| GLIS3 | GLIS family zinc finger 3 | SEQ ID NOS: 6016-6024 |
| GLMP | Glycosylated lysosomal membrane protein | SEQ ID NOS: 6025-6033 |
| GLRB | Glycine receptor, beta | SEQ ID NOS: 6034-6039 |
| GLS | Glutaminase | SEQ ID NOS: 6040-6047 |
| GLT6D1 | Glycosyltransferase 6 domain containing 1 | SEQ ID NOS: 6048-6049 |
| GLTPD2 | Glycolipid transfer protein domain containing 2 | SEQ ID NO: 6050 |
| GLUD1 | Glutamate dehydrogenase 1 | SEQ ID NO: 6051 |
| GM2A | GM2 ganglioside activator | SEQ ID NOS: 6052-6054 |
| GML | Glycosylphosphatidylinositol anchored molecule | SEQ ID NOS: 6055-6056 |
| | like | |
| GNAS | GNAS complex locus | SEQ ID NOS: 6057-6078 |
| GNLY | Granulysin | SEQ ID NOS: 6079-6082 |
| GNPTG | N-acetylglucosamine-1-phosphate transferase, | SEQ ID NOS: 6083-6087 |
| | gamma subunit | |
| GNRH1 | Gonadotropin-releasing hormone 1 (luteinizing- | SEQ ID NOS: 6088-6089 |
| | releasing hormone) | |
| GNRH2 | Gonadotropin-releasing hormone 2 | SEQ ID NOS: 6090-6093 |
| GNS | Glucosamine (N-acetyl)-6-sulfatase | SEQ ID NOS: 6094-6099 |
| GOLM1 | Golgi membrane protein 1 | SEQ ID NOS: 6100-6104 |
| GORAB | Golgin, RAB6-interacting | SEQ ID NOS: 6105-6107 |
| GOT2 | Glutamic-oxaloacetic transaminase 2, | SEQ ID NOS: 6108-6110 |
| | mitochondrial | |
| GP2 | Glycoprotein 2 (zymogen granule membrane) | SEQ ID NOS: 6111-6119 |
| GP6 | Glycoprotein VI (platelet) | SEQ ID NOS: 6120-6123 |
| GPC2 | Glypican 2 | SEQ ID NOS: 6124-6125 |
| GPC5 | Glypican 5 | SEQ ID NOS: 6126-6128 |
| GPC6 | Glypican 6 | SEQ ID NOS: 6129-6130 |
| GPD2 | Glycerol-3-phosphate dehydrogenase 2 | SEQ ID NOS: 6131-6139 |
| | (mitochondrial) | |
| GPER1 | G protein-coupled estrogen receptor 1 | SEQ ID NOS: 6140-6146 |
| GPHA2 | Glycoprotein hormone alpha 2 | SEQ ID NOS: 6147-6149 |
| GPHB5 | Glycoprotein hormone beta 5 | SEQ ID NOS: 6150-6151 |
| GPIHBP1 | Glycosylphosphatidylinositol anchored high | SEQ ID NO: 6152 |
| | density lipoprotein binding protein 1 | |
| GPLD1 | Glycosylphosphatidylinositol specific | SEQ ID NO: 6153 |
| | phospholipase D1 | |
| GPNMB | Glycoprotein (transmembrane) nmb | SEQ ID NOS: 6154-6156 |
| GPR162 | G protein-coupled receptor 162 | SEQ ID NOS: 6157-6160 |
| GPX3 | Glutathione peroxidase 3 | SEQ ID NOS: 6161-6168 |
| GPX4 | Glutathione peroxidase 4 | SEQ ID NOS: 6169-6179 |
| GPX5 | Glutathione peroxidase 5 | SEQ ID NOS: 6180-6181 |
| GPX6 | Glutathione peroxidase 6 | SEQ ID NOS: 6182-6184 |
| GPX7 | Glutathione peroxidase 7 | SEQ ID NO: 6185 |
| GREM1 | Gremlin 1, DAN family BMP antagonist | SEQ ID NOS: 6186-6188 |
| GREM2 | Gremlin 2, DAN family BMP antagonist | SEQ ID NO: 6189 |
| GRHL3 | Grainyhead-like transcription factor 3 | SEQ ID NOS: 6190-6195 |
| GRIA2 | Glutamate receptor, ionotropic, AMPA 2 | SEQ ID NOS: 6196-6207 |
| GRIA3 | Glutamate receptor, ionotropic, AMPA 3 | SEQ ID NOS: 6208-6213 |
| GRIA4 | Glutamate receptor, ionotropic, AMPA 4 | SEQ ID NOS: 6214-6225 |
| GRIK2 | Glutamate receptor, ionotropic, kainate 2 | SEQ ID NOS: 6226-6234 |
| GRIN2B | Glutamate receptor, ionotropic, N-methyl D- | SEQ ID NOS: 6235-6238 |
| | aspartate 2B | |
| GRM2 | Glutamate receptor, metabotropic 2 | SEQ ID NOS: 6239-6242 |
| GRM3 | Glutamate receptor, metabotropic 3 | SEQ ID NOS: 6243-6247 |
| GRM5 | Glutamate receptor, metabotropic 5 | SEQ ID NOS: 6248-6252 |
| GRN | Granulin | SEQ ID NOS: 6253-6268 |
| GRP | Gastrin-releasing peptide | SEQ ID NOS: 6269-6273 |
| DFNA5 | Deafness, autosomal dominant 5 | SEQ ID NOS: 6274-6282 |
| GSG1 | Germ cell associated 1 | SEQ ID NOS: 6283-6291 |
| GSN | Gelsolin | SEQ ID NOS: 6292-6300 |
| GTDC1 | Glycosyltransferase-like domain containing 1 | SEQ ID NOS: 6301-6314 |
| GTPBP10 | GTP-binding protein 10 (putative) | SEQ ID NOS: 6315-6323 |
| GUCA2A | Guanylatc cyclase activator 2A (guanylin) | SEQ ID NO: 6324 |
| GUCA2B | Guanylate cyclase activator 2B (uroguanylin) | SEQ ID NO: 6325 |
| GUSB | Glucuronidase, beta | SEQ ID NOS: 6326-6330 |
| GVQW1 | GVQW motif containing 1 | SEQ ID NO: 6331 |
| GXYLT1 | Glucoside xylosyltransferase 1 | SEQ ID NOS: 6332-6333 |
| GXYLT2 | Glucoside xylosyltransferase 2 | SEQ ID NOS: 6334-6336 |
| GYPB | Glycophorin B (MNS blood group) | SEQ ID NOS: 6337-6345 |
| GZMA | Granzyme A (granzyme 1, cytotoxic T- | SEQ ID NO: 6346 |
| | lymphocyte-associated serine esterase 3) | |
| GZMB | Granzyme B (granzyme 2, cytotoxic T- | SEQ ID NOS: 6347-6355 |
| | lymphocyte-associated serine esterase 1) | |
| GZMH | Granzyme H (cathepsin G-like 2, protein h-CCPX) | SEQ ID NOS: 6356-6358 |
| GZMK | Granzyme K (granzyme 3; tryptase II) | SEQ ID NO: 6359 |
| GZMM | Granzyme M (lymphocyte met-ase 1) | SEQ ID NOS: 6360-6361 |
| H6PD | Hexose-6-phosphate dehydrogenase (glucose 1- | SEQ ID NOS: 6362-6363 |
| | dehydrogenase) | |
| HABP2 | Hyaluronan binding protein 2 | SEQ ID NOS: 6364-6365 |
| HADHB | Hydroxyacyl-CoA dehydrogenase/3-ketoacyl-CoA | SEQ ID NOS: 6366-6372 |
| | thiolase/enoyl-CoA hydratase (trifunctional | |
| | protein), beta subunit | |
| HAMP | Hepcidin antimicrobial peptide | SEQ ID NOS: 6373-6374 |
| HAPLN1 | Hyaluronan and proteoglycan link protein 1 | SEQ ID NOS: 6375-6381 |
| HAPLN2 | Hyaluronan and proteoglycan link protein 2 | SEQ ID NOS: 6382-6383 |
| HAPLN3 | Hyaluronan and proteoglycan link protein 3 | SEQ ID NOS: 6384-6387 |
| HAPLN4 | Hyaluronan and proteoglycan link protein 4 | SEQ ID NO: 6388 |
| HARS2 | Histidyl-tRNA synthetase 2, mitochondrial | SEQ ID NOS: 6389-6404 |
| HAVCR1 | Hepatitis A virus cellular receptor 1 | SEQ ID NOS: 6405-6409 |
| HCCS | Holocytochrome c synthase | SEQ ID NOS: 6410-6412 |
| HCRT | Hypocretin (orexin) neuropeptide precursor | SEQ ID NO: 6413 |
| CECR5 | Cat eye syndrome chromosome region, candidate 5 | SEQ ID NOS: 6414-6416 |
| HEATR5A | HEAT repeat containing 5A | SEQ ID NOS: 6417-6423 |
| HEPH | Hephaestin | SEQ ID NOS: 6424-6431 |
| HEXA | Hexosaminidase A (alpha polypeptide) | SEQ ID NOS: 6432-6441 |
| HEXB | Hexosaminidase B (beta polypeptide) | SEQ ID NOS: 6442-6447 |
| HFE2 | Hemochromatosis type 2 (juvenile) | SEQ ID NOS: 6448-6454 |
| HGF | Hepatocyte growth factor (hepapoietin A; scatter | SEQ ID NOS: 6455-6465 |
| | factor) | |
| HGFAC | HGF activator | SEQ ID NOS: 6466-6467 |
| HHIP | Hedgehog interacting protein | SEQ ID NOS: 6468-6469 |
| HHIPL1 | HHIP-like 1 | SEQ ID NOS: 6470-6471 |
| HHIPL2 | HHIP-like 2 | SEQ ID NO: 6472 |
| HHLA1 | HERV-H LTR-associating 1 | SEQ ID NOS: 6473-6474 |
| HHLA2 | HERV-H LTR-associating 2 | SEQ ID NOS: 6475-6485 |
| HIBADH | 3-hydroxyisobutyrate dehydrogenase | SEQ ID NOS: 6486-6488 |
| HINT2 | Histidine triad nucleotide binding protein 2 | SEQ ID NO: 6489 |
| HLA-A | Major histocompatibility complex, class I, A | SEQ ID NOS: 6490-6494 |
| HLA-C | Major histocompatibility complex, class I, C | SEQ ID NOS: 6495-6499 |
| HLA- | Major histocompatibility complex, class II, DO | SEQ ID NOS: 6500-6501 |
| DOA | alpha | |
| HLA- | Major histocompatibility complex, class II, DP | SEQ ID NOS: 6502-6505 |
| DPA1 | alpha 1 | |
| HLA- | Major histocompatibility complex, class II, DQ | SEQ ID NOS: 6506-6511 |
| DQA1 | alpha 1 | |
| HLA- | Major histocompatibility complex, class II, DQ | SEQ ID NOS: 6512-6517 |
| DQB1 | beta 1 | |
| HLA- | Major histocompatibility complex, class II, DQ | SEQ ID NOS: 6518-6521 |
| DQB2 | beta 2 | |
| HMCN1 | Hemicentin 1 | SEQ ID NOS: 6522-6523 |
| HMCN2 | Hemicentin 2 | SEQ ID NOS: 6524-6527 |
| HMGCL | 3-hydroxymethyl-3-methylglutaryl-CoA lyase | SEQ ID NOS: 6528-6531 |
| HMSD | Histocompatibility (minor) serpin domain | SEQ ID NOS: 6532-6533 |
| | containing | |
| HP | Haptoglobin | SEQ ID NOS: 6534-6547 |
| HPR | Haptoglobin-related protein | SEQ ID NOS: 6548-6550 |
| HPSE | Heparanase | SEQ ID NOS: 6551-6557 |
| HPSE2 | Heparanase 2 (inactive) | SEQ ID NOS: 6558-6563 |
| HPX | Hemopexin | SEQ ID NOS: 6564-6565 |
| HRC | Histidine rich calcium binding protein | SEQ ID NOS: 6566-6568 |
| HRG | Histidine-rich glycoprotein | SEQ ID NO: 6569 |
| HS2ST1 | Heparan sulfate 2-O-sulfotransferase 1 | SEQ ID NOS: 6570-6572 |
| HS3ST1 | Heparan sulfate (glucosamine) 3-O- | SEQ ID NOS: 6573-6575 |
| | sulfotransferase 1 | |
| HS6ST1 | Heparan sulfate 6-O-sulfotransferase 1 | SEQ ID NO: 6576 |
| HS6ST3 | Heparan sulfate 6-O-sulfotransferase 3 | SEQ ID NOS: 6577-6578 |
| HSD11B1L | Hydroxysteroid (11-beta) dehydrogenase 1-like | SEQ ID NOS: 6579-6597 |
| HSD17B11 | Hydroxysteroid (17-beta) dehydrogenase 11 | SEQ ID NOS: 6598-6599 |
| HSD17B7 | Hydroxysteroid (17-beta) dehydrogenase 7 | SEQ ID NOS: 6600-6604 |
| HSP90B1 | Heat shock protein 90 kDa beta (Grp94), member 1 | SEQ ID NOS: 6605-6610 |
| HSPA13 | Heat shock protein 70 kDa family, member 13 | SEQ ID NO: 6611 |
| HSPA5 | Heat shock 70 kDa protein 5 (glucose-regulated | SEQ ID NO: 6612 |
| | protein, 78 kDa) | |
| HSPG2 | Heparan sulfate proteoglycan 2 | SEQ ID NOS: 6613-6617 |
| HTATIP2 | HIV-1 Tat interactive protein 2, 30 kDa | SEQ ID NOS: 6618-6625 |
| HTN1 | Histatin 1 | SEQ ID NOS: 6626-6628 |
| HTN3 | Histatin 3 | SEQ ID NOS: 6629-6631 |
| HTRA1 | HtrA serine peptidase 1 | SEQ ID NOS: 6632-6633 |
| HTRA3 | HtrA serine peptidase 3 | SEQ ID NOS: 6634-6635 |
| HTRA4 | HtrA serine peptidase 4 | SEQ ID NO: 6636 |
| HYAL1 | Hyaluronoglucosaminidase 1 | SEQ ID NOS: 6637-6645 |
| IIYAL2 | Hyaluronoglucosaminidase 2 | SEQ ID NOS: 6646-6654 |
| HYAL3 | Hyaluronoglucosaminidase 3 | SEQ ID NOS: 6655-6661 |
| HYOU1 | Hypoxia up-regulated 1 | SEQ ID NOS: 6662-6676 |
| IAPP | Islet amyloid polypeptide | SEQ ID NOS: 6677-6681 |
| IBSP | Integrin-binding sialoprotein | SEQ ID NO: 6682 |
| ICAM1 | Intercellular adhesion molecule 1 | SEQ ID NOS: 6683-6685 |
| ICAM2 | Intercellular adhesion molecule 2 | SEQ ID NOS: 6686-6696 |
| ICAM4 | Intercellular adhesion molecule 4 (Landsteiner- | SEQ ID NOS: 6697-6699 |
| | Wiener blood group) | |
| ID1 | Inhibitor of DNA binding 1, dominant negative | SEQ ID NOS: 6700-6701 |
| | helix-loop-helix protein | |
| IDE | Insulin-degrading enzyme | SEQ ID NOS: 6702-6705 |
| IDNK | IdnK, gluconokinase homolog (E. coli) | SEQ ID NOS: 6706-6711 |
| IDS | Iduronate 2-sulfatase | SEQ ID NOS: 6712-6717 |
| IDUA | Iduronidase, alpha-L- | SEQ ID NOS: 6718-6723 |
| IFI27L2 | Interferon, alpha-inducible protein 27-like 2 | SEQ ID NOS: 6724-6725 |
| IFI30 | Interferon, gamma-inducible protein 30 | SEQ ID NOS: 6726-6727 |
| IFNA1 | Interferon, alpha 1 | SEQ ID NO: 6728 |
| IFNA10 | Interferon, alpha 10 | SEQ ID NO: 6729 |
| IFNA13 | Interferon, alpha 13 | SEQ ID NOS: 6730-6731 |
| IFNA14 | Interferon, alpha 14 | SEQ ID NO: 6732 |
| IFNA16 | Interferon, alpha 16 | SEQ ID NO: 6733 |
| IFNA17 | Interferon, alpha 17 | SEQ ID NO: 6734 |
| IFNA2 | Interferon, alpha 2 | SEQ ID NO: 6735 |
| IFNA21 | Interferon, alpha 21 | SEQ ID NO: 6736 |
| IFNA4 | Interferon, alpha 4 | SEQ ID NO: 6737 |
| IFNA5 | Interferon, alpha 5 | SEQ ID NO: 6738 |
| IFNA6 | Interferon, alpha 6 | SEQ ID NOS: 6739-6740 |
| IFNA7 | Interferon, alpha 7 | SEQ ID NO: 6741 |
| IFNA8 | Interferon, alpha 8 | SEQ ID NO: 6742 |
| IFNAR1 | Interferon (alpha, beta and omega) receptor 1 | SEQ ID NOS: 6743-6744 |
| IFNB1 | Interferon, beta 1, fibroblast | SEQ ID NO: 6745 |
| IFNE | Interferon, epsilon | SEQ ID NO: 6746 |
| IFXG | Interferon, gamma | SEQ ID NO: 6747 |
| IFNGR1 | Interferon gamma receptor 1 | SEQ ID NOS: 6748-6758 |
| IFNL1 | Interferon, lambda 1 | SEQ ID NO: 6759 |
| IFNL2 | Interferon, lambda 2 | SEQ ID NO: 6760 |
| IFNL3 | Interferon, lambda 3 | SEQ ID NOS: 6761-6762 |
| IFNLR1 | Interferon, lambda receptor 1 | SEQ ID NOS: 6763-6767 |
| IFNW1 | Interferon, omega 1 | SEQ ID NO: 6768 |
| IGF1 | Insulin-like growth factor I (somatomedin C) | SEQ ID NOS: 6769-6774 |
| IGF2 | Insulin-like growth factor 2 | SEQ ID NOS: 6775-6782 |
| IGFALS | Insulin-like growth factor binding protein, acid | SEQ ID NOS: 6783-6785 |
| | labile subunit | |
| IGFBP1 | Insulin-like growth factor binding protein 1 | SEQ ID NOS: 6786-6788 |
| IGFBP2 | Insulin-like growth factor binding protein 2, 36 kDa | SEQ ID NOS: 6789-6792 |
| IGFBP3 | Insulin-like growth factor binding protein 3 | SEQ ID NOS: 6793-6800 |
| IGFBP4 | Insulin-like growth factor binding protein 4 | SEQ ID NO: 6801 |
| IGFBP5 | Insulin-like growth factor binding protein 5 | SEQ ID NOS: 6802-6803 |
| IGFBP6 | Insulin-like growth factor binding protein 6 | SEQ ID NOS: 6804-6806 |
| IGFBP7 | Insulin-like growth factor binding protein 7 | SEQ ID NOS: 6807-6808 |
| IGFBPL1 | Insulin-like growth factor binding protein-like 1 | SEQ ID NO: 6809 |
| IGFL1 | IGF-like family member 1 | SEQ ID NO: 6810 |
| IGFL2 | IGF-like family member 2 | SEQ ID NOS: 6811-6813 |
| IGFL3 | IGF-like family member 3 | SEQ ID NO: 6814 |
| IGFLR1 | IGF-like family receptor 1 | SEQ ID NOS: 6815-6823 |
| IGIP | IgA-inducing protein | SEQ ID NO: 6824 |
| IGLON5 | IgLON family member 5 | SEQ ID NO: 6825 |
| IGSF1 | Immunoglobulin superfamily, member 1 | SEQ ID NOS: 6826-6831 |
| IGSF10 | Immunoglobulin superfamily, member 10 | SEQ ID NOS: 6832-6833 |
| IGSF11 | Immunoglobulin superfamily, member 11 | SEQ ID NOS: 6834-6841 |
| IGSF21 | Immunoglobulin superfamily, member 21 | SEQ ID NO: 6842 |
| IGSF8 | Immunoglobulin superfamily, member 8 | SEQ ID NOS: 6843-6846 |
| IGSF9 | Immunoglobulin superfamily, member 9 | SEQ ID NOS: 6847-6849 |
| IHH | Indian hedgehog | SEQ ID NO: 6850 |
| IL10 | Interleukin 10 | SEQ ID NOS: 6851-6852 |
| IL11 | Interleukin 11 | SEQ ID NOS: 6853-6856 |
| IL11RA | Interleukin 11 receptor, alpha | SEQ ID NOS: 6857-6867 |
| IL12B | Interleukin 12B | SEQ ID NO: 6868 |
| IL12RB1 | Interleukin 12 receptor, beta 1 | SEQ ID NOS: 6869-6874 |
| IL12RB2 | Interleukin 12 receptor, beta 2 | SEQ ID NOS: 6875-6879 |
| IL13 | Interleukin 13 | SEQ ID NOS: 6880-6881 |
| IL13RA1 | Interleukin 13 receptor, alpha 1 | SEQ ID NOS: 6882-6883 |
| IL15RA | Interleukin 15 receptor, alpha | SEQ ID NOS: 6884-6901 |
| IL17A | Interleukin 17A | SEQ ID NO: 6902 |
| IL17B | Interleukin 17B | SEQ ID NO: 6903 |
| IL17C | Interleukin 17C | SEQ ID NO: 6904 |
| IL17D | Interleukin 17D | SEQ ID NOS: 6905-6907 |
| IL17F | Interleukin 17F | SEQ ID NO: 6908 |
| IL17RA | Interleukin 17 receptor A | SEQ ID NOS: 6909-6910 |
| IL17RC | Interleukin 17 receptor C | SEQ ID NOS: 6911-6926 |
| IL17RE | Interleukin 17 receptor E | SEQ ID NOS: 6927-6933 |
| 1L18BP | Interleukin 18 binding protein | SEQ ID NOS: 6934-6944 |
| IL18R1 | Interleukin 18 receptor 1 | SEQ ID NOS: 6945-6948 |
| IL18RAP | Interleukin 18 receptor accessory protein | SEQ ID NOS: 6949-6951 |
| IL19 | Interleukin 19 | SEQ ID NOS: 6952-6954 |
| IL1R1 | Interleukin 1 receptor, type I | SEQ ID NOS: 6955-6967 |
| IL1R2 | Interleukin 1 receptor, type II | SEQ ID NOS: 6968-6971 |
| IL1RAP | Interleukin 1 receptor accessory protein | SEQ ID NOS: 6972-6985 |
| IL1RL1 | Interleukin 1 receptor-like 1 | SEQ ID NOS: 6986-6991 |
| IL1RL2 | Interleukin 1 receptor-like 2 | SEQ ID NOS: 6992-6994 |
| IL1RN | Interleukin 1 receptor antagonist | SEQ ID NOS: 6995-6999 |
| IL2 | Interleukin 2 | SEQ ID NO: 7000 |
| IL20 | Interleukin 20 | SEQ ID NOS: 7001-7003 |
| IL20RA | Interleukin 20 receptor, alpha | SEQ ID NOS: 7004-7010 |
| IL21 | Interleukin 21 | SEQ ID NOS: 7011-7012 |
| IL22 | Interleukin 22 | SEQ ID NOS: 7013-7014 |
| IL22RA2 | Interleukin 22 receptor, alpha 2 | SEQ ID NOS: 7015-7017 |
| IL23A | Interleukin 23, alpha subunit p19 | SEQ ID NO: 7018 |
| IL24 | Interleukin 24 | SEQ ID NOS: 7019-7024 |
| IL25 | Interleukin 25 | SEQ ID NOS: 7025-7026 |
| 1L26 | Interleukin 26 | SEQ ID NO: 7027 |
| IL27 | Interleukin 27 | SEQ ID NOS: 7028-7029 |
| IL2RB | Interleukin 2 receptor, beta | SEQ ID NOS: 7030-7034 |
| IL3 | Interleukin 3 | SEQ ID NO: 7035 |
| IL31 | Interleukin 31 | SEQ ID NO: 7036 |
| IL31RA | Interleukin 31 receptor A | SEQ ID NOS: 7037-7044 |
| IL32 | Interleukin 32 | SEQ ID NOS: 7045-7074 |
| IL34 | Interleukin 34 | SEQ ID NOS: 7075-7078 |
| IL3RA | Interleukin 3 receptor, alpha (low affinity) | SEQ ID NOS: 7079-7081 |
| IL4 | Interleukin 4 | SEQ ID NOS: 7082-7084 |
| IL4I1 | Interleukin 4 induced 1 | SEQ ID NOS: 7085-7092 |
| IL4R | Interleukin 4 receptor | SEQ ID NOS: 7093-7106 |
| IL5 | Interleukin 5 | SEQ ID NOS: 7107-7108 |
| IL5RA | Interleukin 5 receptor, alpha | SEQ ID NOS: 7109-7118 |
| IL6 | Interleukin 6 | SEQ ID NOS: 7119-7125 |
| IL6R | Interleukin 6 receptor | SEQ ID NOS: 7126-7131 |
| IL6ST | Interleukin 6 signal transducer | SEQ ID NOS: 7132-7141 |
| IL7 | Interleukin 7 | SEQ ID NOS: 7142-7149 |
| IL7R | Interleukin 7 receptor | SEQ ID NOS: 7150-7156 |
| IL9 | Interleukin 9 | SEQ ID NO: 7157 |
| ILDR1 | Immunoglobulin-like domain containing receptor 1 | SEQ ID NOS: 7158-7162 |
| ILDR2 | Immunoglobulin-like domain containing receptor 2 | SEQ ID NOS: 7163-7169 |
| IMP4 | IMP4, U3 small nucleolar ribonucleoprotein | SEQ ID NOS: 7170-7175 |
| IMPG1 | Interphotoreceptor matrix proteoglycan 1 | SEQ ID NOS: 7176-7179 |
| INHA | Inhibin, alpha | SEQ ID NO: 7180 |
| INHBA | Inhibin, beta A | SEQ ID NOS: 7181-7183 |
| INHBB | Inhibin, beta B | SEQ ID NO: 7184 |
| INHBC | Inhibin, beta C | SEQ ID NO: 7185 |
| INHBE | Inhibin, beta E | SEQ ID NOS: 7186-7187 |
| INPP5A | Inositol polyphosphate-5-phosphatase A | SEQ ID NOS: 7188-7192 |
| INS | Insulin | SEQ ID NOS: 7193-7197 |
| INS- | INS-IGF2 readthrough | SEQ ID NOS: 7198-7199 |
| IGF2 | | |
| INSL3 | Insulin-like 3 (Leydig cell) | SEQ ID NOS: 7200-7202 |
| INSL4 | Insulin-like 4 (placenta) | SEQ ID NO: 7203 |
| INSL5 | Insulin-like 5 | SEQ ID NO: 7204 |
| INSL6 | Insulin-like 6 | SEQ ID NO: 7205 |
| INTS3 | Integrator complex subunit 3 | SEQ ID NOS: 7206-7211 |
| IPO11 | Importin 11 | SEQ ID NOS: 7212-7220 |
| IPO9 | Importin 9 | SEQ ID NOS: 7221-7222 |
| IQCF6 | IQ motif containing F6 | SEQ ID NOS: 7223-7224 |
| IRAK3 | Interleukin-1 receptor-associated kinase 3 | SEQ ID NOS: 7225-7227 |
| IRS4 | Insulin receptor substrate 4 | SEQ ID NO: 7228 |
| ISLR | Immunoglobulin superfamily containing leucine- | SEQ ID NOS: 7229-7232 |
| | rich repeat | |
| ISLR2 | Immunoglobulin superfamily containing leucine- | SEQ ID NOS: 7233-7242 |
| | rich repeat 2 | |
| ISM1 | Isthmin 1, angiogenesis inhibitor | SEQ ID NO: 7243 |
| ISM2 | Isthmin 2 | SEQ ID NOS: 7244-7249 |
| ITGA4 | Integrin, alpha 4 (antigen CD49D, alpha 4 subunit | SEQ ID NOS: 7250-7252 |
| | of VLA-4 receptor) | |
| ITGA9 | Integrin, alpha 9 | SEQ ID NOS: 7253-7255 |
| ITGAL | Integrity alpha L (antigen CD11A (p180), | SEQ ID NOS: 7256-7265 |
| | lymphocyte function-associated antigen 1; alpha | |
| | polypeptide) | |
| ITGAX | Integrin, alpha X (complement component 3 | SEQ ID NOS: 7266-7268 |
| | receptor 4 subunit) | |
| ITGB1 | Integrin, beta 1 (fibronectin receptor, beta | SEQ ID NOS: 7269-7284 |
| | polypeptide, antigen CD29 includes MDF2, | |
| | MSK12) | |
| ITGB2 | Integrin, beta 2 (complement component 3 receptor | SEQ ID NOS: 7285-7301 |
| | 3 and 4 subunit) | |
| ITGB3 | Integrin, beta 3 (platelet glycoprotein IIIa, antigen | SEQ ID NOS: 7302-7304 |
| | CD61) | |
| ITGB7 | Integrin, beta 7 | SEQ ID NOS: 7305-7312 |
| ITGBL1 | Integrin, beta-like 1 (with EGF-like repeat | SEQ ID NOS: 7313-7318 |
| | domains) | |
| ITIH1 | Inter-alpha-trypsin inhibitor heavy chain 1 | SEQ ID NOS: 7319-7324 |
| ITIH2 | Inter-alpha-trypsin inhibitor heavy chain 2 | SEQ ID NOS: 7325-7327 |
| ITIH3 | Inter-alpha-trypsin inhibitor heavy chain 3 | SEQ ID NOS: 7328-7330 |
| ITIH4 | Inter-alpha-trypsin inhibitor heavy chain family, | SEQ ID NOS: 7331-7334 |
| | member 4 | |
| ITIH5 | Inter-alpha-trypsin inhibitor heavy chain family, | SEQ ID NOS: 7335-7338 |
| | member 5 | |
| ITIH6 | Inter-alpha-trypsin inhibitor heavy chain family, | SEQ ID NO: 7339 |
| | member 6 | |
| ITLN1 | Intelectin 1 (galactofuranose binding) | SEQ ID NO: 7340 |
| ITLN2 | Intelectin 2 | SEQ ID NO: 7341 |
| IZUMO1R | IZUMO1 receptor, JUNO | SEQ ID NOS: 7342-7343 |
| IZUMO4 | IZUMO family member 4 | SEQ ID NOS: 7344-7350 |
| AMICA1 | Adhesion molecule, interacts with CXADR antigen | SEQ ID NOS: 7351-7359 |
| | 1 | |
| JCHAIN | Joining chain of multimeric IgA and IgM | SEQ ID NOS: 7360-7365 |
| JMJD8 | Jumonji domain containing 8 | SEQ ID NOS: 7366-7370 |
| JSRP1 | Junctional sarcoplasmic reticulum protein 1 | SEQ ID NO: 7371 |
| KANSL2 | KAT8 regulatory NSL complex subunit 2 | SEQ ID NOS: 7372-7382 |
| KAZALD1 | Kazal-type serine peptidase inhibitor domain 1 | SEQ ID NO: 7383 |
| KCNIP3 | Kv channel interacting protein 3, calsenilin | SEQ ID NOS: 7384-7386 |
| KCNK7 | Potassium channel, two pore domain subfamily K, | SEQ ID NOS: 7387-7392 |
| | member 7 | |
| KCNN4 | Potassium channel, calcium activated | SEQ ID NOS: 7393-7398 |
| | intermediate/small conductance subfamily N alpha, | |
| | member 4 | |
| KCNU1 | Potassium channel, subfamily U, member 1 | SEQ ID NOS: 7399-7403 |
| KCP | Kielin/chordin-like protein | SEQ ID NOS: 7404-7407 |
| KDELC1 | KDEL (Lys-Asp-Glu-Leu) containing 1 | SEQ ID NO: 7408 |
| KDELC2 | KDEL (Lys-Asp-Glu-Leu) containing 2 | SEQ ID NOS: 7409-7412 |
| KDM1A | Lysine (K)-specific demethylase 1A | SEQ ID NOS: 7413-7416 |
| KDM3B | Lysine (K)-specific demethylase 3B | SEQ ID NOS: 7417-7420 |
| KDM6A | Lysine (K)-specific demethylase 6A | SEQ ID NOS: 7421-7430 |
| KDM7A | Lysine (K)-specific demethylase 7A | SEQ ID NOS: 7431-7432 |
| KDSR | 3-ketodihydrosphingosine reductase | SEQ ID NOS: 7433-7439 |
| KERA | Keratocan | SEQ ID NO: 7440 |
| KIAA0100 | KIAA0100 | SEQ ID NOS: 7441-7446 |
| KIAA0319 | KIAA0319 | SEQ ID NOS: 7447-7452 |
| KIAA1324 | KIAA1324 | SEQ ID NOS: 7453-7461 |
| KIFC2 | Kinesin family member C2 | SEQ ID NOS: 7462-7464 |
| KIR2DL4 | Killer cell immunoglobulin-like receptor, two | SEQ ID NOS: 7465-7471 |
| | domains, long cytoplasmic tail, 4 | |
| KIR3DX1 | Killer cell immunoglobulin-like receptor, three | SEQ ID NOS: 7472-7476 |
| | domains, X1 | |
| KIRREL2 | Kin of IRRE like 2 (Drosophila) | SEQ ID NOS: 7477-7481 |
| KISS1 | KiSS-1 metastasis-suppressor | SEQ ID NOS: 7482-7483 |
| KLHL11 | Kelch-like family member 11 | SEQ ID NO: 7484 |
| KLHL22 | Kelch-like family member 22 | SEQ ID NOS: 7485-7491 |
| KLK1 | Kallikrein 1 | SEQ ID NOS: 7492-7493 |
| KLK10 | Kallikrein-related peptidase 10 | SEQ ID NOS: 7494-7498 |
| KLK11 | Kallikrein-related peptidase 11 | SEQ ID NOS: 7499-7507 |
| KLK12 | Kallikrein-related peptidase 12 | SEQ ID NOS: 7508-7514 |
| KLK13 | Kallikrein-related peptidase 13 | SEQ ID NOS: 7515-7523 |
| KLK14 | Kallikrein-related peptidase 14 | SEQ ID NOS: 7524-7525 |
| KLK15 | Kallikrein-related peptidase 15 | SEQ ID NOS: 7526-7530 |
| KLK2 | Kallikrein-related peptidase 2 | SEQ ID NOS: 7531-7543 |
| KLK3 | Kallikrein-related peptidase 3 | SEQ ID NOS: 7544-7555 |
| KLK4 | Kallikrein-related peptidase 4 | SEQ ID NOS: 7556-7560 |
| KLK5 | Kallikrein-related peptidase 5 | SEQ ID NOS: 7561-7564 |
| KLK6 | Kallikrein-related peptidase 6 | SEQ ID NOS: 7565-7571 |
| KLK7 | Kallikrein-related peptidase 7 | SEQ ID NOS: 7572-7576 |
| KLK8 | Kallikrein-related peptidase 8 | SEQ ID NOS: 7577-7584 |
| KLK9 | Kallikrein-related peptidase 9 | SEQ ID NOS: 7585-7586 |
| KLKB1 | Kallikrein B, plasma (Fletcher factor) 1 | SEQ ID NOS: 7587-7591 |
| SETD8 | SET domain containing (lysine methyltransferase) | SEQ ID NOS: 7592-7595 |
| | 8 | |
| KNDC1 | Kinase non-catalytic C-lobe domain (KIND) | SEQ ID NOS: 7596-7597 |
| | containing 1 | |
| KNG1 | Kininogen 1 | SEQ ID NOS: 7598-7602 |
| KRBA2 | KRAB-A domain containing 2 | SEQ ID NOS: 7603-7606 |
| KREMEN2 | Kringle containing transmembrane protein 2 | SEQ ID NOS: 7607-7612 |
| KRTDAP | Keratinocyte differentiation-associated protein | SEQ ID NOS: 7613-7614 |
| L1CAM | L1 cell adhesion molecule | SEQ ID NOS: 7615-7624 |
| L3MBTL2 | L(3)mbt-like 2 (Drosophila) | SEQ ID NOS: 7625-7629 |
| LACRT | Lacritin | SEQ ID NOS: 7630-7632 |
| LACTB | Lactamase, beta | SEQ ID NOS: 7633-7635 |
| LAG3 | Lymphocyte-activation gene 3 | SEQ ID NOS: 7636-7637 |
| LAIR2 | Leukocyte-associated immunoglobulin-like | SEQ ID NOS: 7638-7641 |
| | receptor 2 | |
| LALBA | Lactalbumin, alpha- | SEQ ID NOS: 7642-7643 |
| LAMA1 | Laminin, alpha 1 | SEQ ID NOS: 7644-7645 |
| LAMA2 | Laminin, alpha 2 | SEQ ID NOS: 7646-7649 |
| LAMA3 | Laminin, alpha 3 | SEQ ID NOS: 7650-7659 |
| LAMA4 | Laminin, alpha 4 | SEQ ID NOS: 7660-7674 |
| LAMA5 | Laminin, alpha 5 | SEQ ID NOS: 7675-7677 |
| LAMB1 | Laminin, beta 1 | SEQ ID NOS: 7678-7682 |
| LAMB2 | Laminin, beta 2 (laminin S) | SEQ ID NOS: 7683-7685 |
| LAMB3 | Laminin, beta 3 | SEQ ID NOS: 7686-7690 |
| LAMB4 | Laminin, beta 4 | SEQ ID NOS: 7691-7694 |
| LAMC1 | Laminin, gamma 1 (formerly LAMB2) | SEQ ID NOS: 7695-7696 |
| LAMC2 | Laminin, gamma 2 | SEQ ID NOS: 7697-7698 |
| LAMC3 | Laminin, gamma 3 | SEQ ID NOS: 7699-7700 |
| LAMP3 | Lysosomal-associated membrane protein 3 | SEQ ID NOS: 7701-7704 |
| GYLTL1B | Glycosyltransferase-like 1B | SEQ ID NOS: 7705-7710 |
| LAT | Linker for activation of T cells | SEQ ID NOS: 7711-7720 |
| LAT2 | Linker for activation of T cells family, member 2 | SEQ ID NOS: 7721-7729 |
| LBP | Lipopolysaccharide binding protein | SEQ ID NO: 7730 |
| LCAT | Lecithin-cholesterol acyltransferase | SEQ ID NOS: 7731-7737 |
| LCN1 | Lipocalin 1 | SEQ ID NOS: 7738-7739 |
| LCN10 | Lipocalin 10 | SEQ ID NOS: 7740-7745 |
| LCN12 | Lipocalin 12 | SEQ ID NOS: 7746-7748 |
| LCN15 | Lipocalin 15 | SEQ ID NO: 7749 |
| LCN2 | Lipocalin 2 | SEQ ID NOS: 7750-7752 |
| LCN6 | Lipocalin 6 | SEQ ID NOS: 7753-7754 |
| LCN8 | Lipocalin 8 | SEQ ID NOS: 7755-7756 |
| LCN9 | Lipocalin 9 | SEQ ID NOS: 7757-7758 |
| LCORL | Ligand dependent nuclear receptor corepressor-like | SEQ ID NOS: 7759-7764 |
| LDLR | Low density lipoprotein receptor | SEQ ID NOS: 7765-7773 |
| LDLRAD2 | Low density lipoprotein receptor class A domain | SEQ ID NOS: 7774-7775 |
| | containing 2 | |
| LEAP2 | Liver expressed antimicrobial peptide 2 | SEQ ID NO: 7776 |
| LECT2 | Leukocyte cell-derived chemotaxin 2 | SEQ ID NOS: 7777-7780 |
| LEFTY1 | Left-right determination factor 1 | SEQ ID NOS: 7781-7782 |
| LEFTY2 | Left-right determination factor 2 | SEQ ID NOS: 7783-7784 |
| LEP | Leptin | SEQ ID NO: 7785 |
| LFNG | LFNG O-fucosylpeptide 3-beta-N- | SEQ ID NOS: 7786-7791 |
| | acetylglucosaminyltransferase | |
| LGALS3BP | Lectin, galactoside-binding, soluble, 3 binding | SEQ ID NOS: 7792-7806 |
| | protein | |
| LGI1 | Leucine-rich, glioma inactivated 1 | SEQ ID NOS: 7807-7825 |
| LGI2 | Leucine-rich repeat LGI family, member 2 | SEQ ID NOS: 7826-7827 |
| LGI3 | Leucine-rich repeat LGI family, member 3 | SEQ ID NOS: 7828-7831 |
| LGI4 | Leucine-rich repeat LGI family, member 4 | SEQ ID NOS: 7832-7835 |
| LGMN | Legumain | SEQ ID NOS: 7836-7849 |
| LGR4 | Leucine-rich repeat containing G protein-coupled | SEQ ID NOS: 7850-7852 |
| | receptor 4 | |
| LHB | Luteinizing hormone beta polypeptide | SEQ ID NO: 7853 |
| LHCGR | Luteinizing hormone/choriogonadotropin receptor | SEQ ID NOS: 7854-7858 |
| LIF | Leukemia inhibitory factor | SEQ ID NOS: 7859-7860 |
| LIFR | Leukemia inhibitory factor receptor alpha | SEQ ID NOS: 7861-7865 |
| LILRA1 | Leukocyte immunoglobulin-like receptor, | SEQ ID NOS: 7866-7867 |
| | subfamily A (with TM domain), member 1 | |
| LILRA2 | Leukocyte immunoglobulin-like receptor, | SEQ ID NOS: 7868-7874 |
| | subfamily A (with TM domain), member 2 | |
| LILRB3 | Leukocyte immunoglobulin-like receptor, | SEQ ID NOS: 7875-7879 |
| | subfamily B (with TM and ITIM domains), | |
| | member 3 | |
| LIME1 | Lck interacting transmembrane adaptor 1 | SEQ ID NOS: 7880-7885 |
| LINGO1 | Leucine rich repeat and Ig domain containing 1 | SEQ ID NOS: 7886-7896 |
| LIPA | Lipase A, lysosomal acid, cholesterol esterase | SEQ ID NOS: 7897-7901 |
| LIPC | Lipase, hepatic | SEQ ID NOS: 7902-7905 |
| LIPF | Lipase, gastric | SEQ ID NOS: 7906-7909 |
| LIPG | Lipase, endothelial | SEQ ID NOS: 7910-7915 |
| LIPH | Lipase, member H | SEQ ID NOS: 7916-7920 |
| LIPK | Lipase, family member K | SEQ ID NO: 7921 |
| LIPM | Lipase, family member M | SEQ ID NOS: 7922-7923 |
| LIPN | Lipase, family member N | SEQ ID NO: 7924 |
| LMAN2 | Lectin, mannose-binding 2 | SEQ ID NOS: 7925-7929 |
| LMNTD1 | Lamin tail domain containing 1 | SEQ ID NOS: 7930-7940 |
| LNX1 | Ligand of numb-protein X 1, E3 ubiquitin protein | SEQ ID NOS: 7941-7947 |
| | ligase | |
| LOX | Lysyl oxidase | SEQ ID NOS: 7948-7950 |
| LOXL1 | Lysyl oxidase-like 1 | SEQ ID NOS: 7951-7952 |
| LOXL2 | Lysyl oxidase-like 2 | SEQ ID NOS: 7953-7961 |
| LOXL3 | Lysyl oxidase-like 3 | SEQ ID NOS: 7962-7968 |
| LOXL4 | Lysyl oxidase-like 4 | SEQ ID NO: 7969 |
| LPA | Lipoprotein, Lp(a) | SEQ ID NOS: 7970-7972 |
| LPL | Lipoprotein lipase | SEQ ID NOS: 7973-7977 |
| LPO | Lactoperoxidase | SEQ ID NOS: 7978-7984 |
| LRAT | Lecithin retinol acyltransferase | SEQ ID NOS: 7985-7987 |
| | (phosphatidylcholine--retinol O-acyltransferase) | |
| LRCH3 | Leucine-rich repeats and calponin homology (CH) | SEQ ID NOS: 7988-7996 |
| | domain containing 3 | |
| LRCOL1 | Leucine rich colipase-like 1 | SEQ ID NOS: 7997-8000 |
| LRFN4 | Leucine rich repeat and fibronectin type III domain | SEQ ID NOS: 8001-8002 |
| | containing 4 | |
| LRFN5 | Leucine rich repeat and fibronectin type III domain | SEQ ID NOS: 8003-8005 |
| | containing 5 | |
| LRG1 | Lcucinc-rich alpha-2-glycoprotcin 1 | SEQ ID NO: 8006 |
| LRP1 | Low density lipoprotein receptor-related protein 1 | SEQ ID NOS: 8007-8012 |
| LRP11 | Low density lipoprotein receptor-related protein 11 | SEQ ID NOS: 8013-8014 |
| LRP1B | Low density lipoprotein receptor-related protein | SEQ ID NOS: 8015-8018 |
| | 1B | |
| LRP2 | Low density lipoprotein receptor-related protein 2 | SEQ ID NOS: 8019-8020 |
| LRP4 | Low density lipoprotein receptor-related protein 4 | SEQ ID NOS: 8021-8022 |
| LRPAP1 | Low density lipoprotein receptor-related protein | SEQ ID NOS: 8023-8024 |
| | associated protein 1 | |
| LRRC17 | Leucine rich repeat containing 17 | SEQ ID NOS: 8025-8027 |
| LRRC32 | Leucine rich repeat containing 32 | SEQ ID NOS: 8028-8031 |
| LRRC3B | Leucine rich repeat containing 3B | SEQ ID NOS: 8032-8036 |
| LRRC4B | Leucine rich repeat containing 4B | SEQ ID NOS: 8037-8039 |
| LRRC70 | Leucine rich repeat containing 70 | SEQ ID NOS: 8040-8041 |
| LRRN3 | Leucine rich repeat neuronal 3 | SEQ ID NOS: 8042-8045 |
| LRRTM1 | Leucine rich repeat transmembrane neuronal 1 | SEQ ID NOS: 8046-8052 |
| LRRTM2 | Leucine rich repeat transmembrane neuronal 2 | SEQ ID NOS: 8053-8055 |
| LRRTM4 | Leucine rich repeat transmembrane neuronal 4 | SEQ ID NOS: 8056-8061 |
| LRTM2 | Leucine-rich repeats and transmembrane domains | SEQ ID NOS: 8062-8066 |
| | 2 | |
| LSR | Lipolysis stimulated lipoprotein receptor | SEQ ID NOS: 8067-8077 |
| LST1 | Leukocyte specific transcript 1 | SEQ ID NOS: 8078-8095 |
| LTA | Lymphotoxin alpha | SEQ ID NOS: 8096-8097 |
| LTBP1 | Latent transforming growth factor beta binding | SEQ ID NOS: 8098-8107 |
| | protein 1 | |
| LTBP2 | Latent transforming growth factor beta binding | SEQ ID NOS: 8108-8111 |
| | protein 2 | |
| LTBP3 | Latent transforming growth factor beta binding | SEQ ID NOS: 8112-8124 |
| | protein 3 | |
| LTBP4 | Latent transforming growth factor beta binding | SEQ ID NOS: 8125-8140 |
| | protein 4 | |
| LTBR | Lymphotoxin beta receptor (TNFR superfamily, | SEQ ID NOS: 8141-8146 |
| | member 3) | |
| LTF | Lactotransferrin | SEQ ID NOS: 8147-8151 |
| LTK | Leukocyte receptor tyrosine kinase | SEQ ID NOS: 8152-8155 |
| LUM | Lumican | SEQ ID NO: 8156 |
| LUZP2 | Leucine zipper protein 2 | SEQ ID NOS: 8157-8160 |
| LVRN | Laeverin | SEQ ID NOS: 8161-8166 |
| LY6E | Lymphocyte antigen 6 complex, locus E | SEQ ID NOS: 8167-8180 |
| LY6G5B | Lymphocyte antigen 6 complex, locus G5B | SEQ ID NOS: 8181-8182 |
| LY6G6D | Lymphocyte antigen 6 complex, locus G6D | SEQ ID NOS: 8183-8184 |
| LY6G6E | Lymphocyte antigen 6 complex, locus G6E | SEQ ID NOS: 8185-8188 |
| | (pseudogene) | |
| LY6H | Lymphocyte antigen 6 complex, locus H | SEQ ID NOS: 8189-8192 |
| LY6K | lymphocyte antigen 6 complex, locus K | SEQ ID NOS: 8193-8196 |
| RP11- | | SEQ ID NO: 8197 |
| 520P18.5 | | |
| LY86 | Lymphocyte antigen 86 | SEQ ID NOS: 8198-8199 |
| LY96 | Lymphocyte antigen 96 | SEQ ID NOS: 8200-8201 |
| LYG1 | Lysozyme G-like 1 | SEQ ID NOS: 8202-8203 |
| LYG2 | Lysozyme G-like 2 | SEQ ID NOS: 8204-8209 |
| LYNX1 | Ly6/neurotoxin 1 | SEQ ID NOS: 8210-8214 |
| LYPD1 | LY6/PLAUR domain containing 1 | SEQ ID NOS: 8215-8217 |
| LYPD2 | LY6/PLAUR domain containing 2 | SEQ ID NO: 8218 |
| LYPD4 | LY6/PLAUR domain containing 4 | SEQ ID NOS: 8219-8221 |
| LYPD6 | LY6/PLAUR domain containing 6 | SEQ ID NOS: 8222-8226 |
| LYPD6B | LY6/PLAUR domain containing 6B | SEQ ID NOS: 8227-8233 |
| LYPD8 | LY6/PLAUR domain containing 8 | SEQ ID NOS: 8234-8235 |
| LYZ | Lysozyme | SEQ ID NOS: 8236-8238 |
| LYZL4 | Lysozyme-like 4 | SEQ ID NOS: 8239-8240 |
| LYZL6 | Lysozyme-like 6 | SEQ ID NOS: 8241-8243 |
| M6PR | Mannose-6-phosphate receptor (cation dependent) | SEQ ID NOS: 8244-8254 |
| MAD1L1 | MAD1 mitotic arrest deficient-like 1 (yeast) | SEQ ID NOS: 8255-8267 |
| MAG | Myelin associated glycoprotein | SEQ ID NOS: 8268-8273 |
| MAGT1 | Magnesium transporter 1 | SEQ ID NOS: 8274-8277 |
| MALSU1 | Mitochondrial assembly of ribosomal large subunit | SEQ ID NO: 8278 |
| | 1 | |
| MAMDC2 | MAM domain containing 2 | SEQ ID NO: 8279 |
| MAN2B1 | Mannosidase, alpha, class 2B, member 1 | SEQ ID NOS: 8280-8285 |
| MAN2B2 | Mannosidase, alpha, class 2B, member 2 | SEQ ID NOS: 8286-8288 |
| MANBA | Mannosidase, beta A, lysosomal | SEQ ID NOS: 8289-8302 |
| MANEAL | Mannosidase, endo-alpha-like | SEQ ID NOS: 8303-8307 |
| MANF | Mesencephalic astrocyte-derived neurotrophic | SEQ ID NOS: 8308-8309 |
| | factor | |
| MANSC1 | MANSC domain containing 1 | SEQ ID NOS: 8310-8313 |
| MAP3K9 | Mitogen-activated protein kinase 9 | SEQ ID NOS: 8314-8319 |
| MASP1 | Mannan-binding lectin serine peptidase 1 (C4/C2 | SEQ ID NOS: 8320-8327 |
| | activating component of Ra-reactive factor) | |
| MASP2 | Mannan-binding lectin serine peptidase 2 | SEQ ID NOS: 8328-8329 |
| MATN1 | Matrilin 1, cartilage matrix protein | SEQ ID NO: 8330 |
| MATN2 | Matrilin 2 | SEQ ID NOS: 8331-8343 |
| MATN3 | Matrilin 3 | SEQ ID NOS: 8344-8345 |
| MATN4 | Matrilin 4 | SEQ ID NOS: 8346-8350 |
| MATR3 | Matrin 3 | SEQ ID NOS: 8351-8378 |
| MAU2 | MAU2 sister chromatid cohesion factor | SEQ ID NOS: 8379-8381 |
| MAZ | MYC-associated zinc finger protein (purine- | SEQ ID NOS: 8382-8396 |
| | binding transcription factor) | |
| MBD6 | Methyl-CpG binding domain protein 6 | SEQ ID NOS: 8397-8408 |
| MBL2 | Mannose-binding lectin (protein C) 2, soluble | SEQ ID NO: 8409 |
| MBNL1 | Muscleblind-like splicing regulator 1 | SEQ ID NOS: 8410-8428 |
| MCCC1 | Methylcrotonoyl-CoA carboxylase 1 (alpha) | SEQ ID NOS: 8429-8440 |
| MCCD1 | Mitochondrial coiled-coil domain 1 | SEQ ID NO: 8441 |
| MCEE | Methylmalonyl CoA epimerase | SEQ ID NOS: 8442-8445 |
| MCF2L | MCF.2 cell line derived transforming sequence- | SEQ ID NOS: 8446-8467 |
| | like | |
| MCFD2 | Multiple coagulation factor deficiency 2 | SEQ ID NOS: 8468-8479 |
| MDFIC | MyoD family inhibitor domain containing | SEQ ID NOS: 8480-8487 |
| MDGA1 | MAM domain containing | SEQ ID NOS: 8488-8493 |
| | glycosylphosphatidylinositol anchor 1 | |
| MDK | Midkine (neurite growth-promoting factor 2) | SEQ ID NOS: 8494-8503 |
| MED20 | Mediator complex subunit 20 | SEQ ID NOS: 8504-8508 |
| MEGF10 | Multiple EGF-like-domains 10 | SEQ ID NOS: 8509-8512 |
| MEGF6 | Multiple EGF-like-domains 6 | SEQ ID NOS: 8513-8516 |
| MEI1 | Meiotic double-stranded break formation protein 1 | SEQ ID NOS: 8517-8520 |
| MEI4 | Meiotic double-stranded break formation protein 4 | SEQ ID NO: 8521 |
| MEIS1 | Meis homeobox 1 | SEQ ID NOS: 8522-8527 |
| MEIS3 | Meis homeobox 3 | SEQ ID NOS: 8528-8537 |
| MFI2 | Antigen p97 (melanoma associated) identified by | SEQ ID NOS: 8538-8540 |
| | monoclonal antibodies 133.2 and 96.5 | |
| MEPE | Matrix extracellular phosphoglycoprotein | SEQ ID NOS: 8541-8547 |
| MESDC2 | Mesoderm development candidate 2 | SEQ ID NOS: 8548-8552 |
| MEST | Mesoderm specific transcript | SEQ ID NOS: 8553-8566 |
| MET | MET proto-oncogene, receptor tyrosine kinase | SEQ ID NOS: 8567-8572 |
| METRN | Meteorin, glial cell differentiation regulator | SEQ ID NOS: 8573-8577 |
| METRNL | Meteorin, glial cell differentiation regulator-like | SEQ ID NOS: 8578-8581 |
| METTL17 | Methyltransferase like 17 | SEQ ID NOS: 8582-8592 |
| METTL24 | Methyltransferase like 24 | SEQ ID NO: 8593 |
| METTL7B | Methyltransferase like 7B | SEQ ID NOS: 8594-8595 |
| METTL9 | Methyltransferase like 9 | SEQ ID NOS: 8596-8604 |
| MEX3C | Mex-3 RNA binding family member C | SEQ ID NOS: 8605-8607 |
| MFAP2 | Microfibrillar-associated protein 2 | SEQ ID NOS: 8608-8609 |
| MFAP3 | Microfibrillar-associated protein 3 | SEQ ID NOS: 8610-8614 |
| MFAP3L | Microfibrillar-associated protein 3-like | SEQ ID NOS: 8615-8624 |
| MFAP4 | Microfibrillar-associated protein 4 | SEQ ID NOS: 8625-8627 |
| MFAP5 | Microfibrillar associated protein 5 | SEQ ID NOS: 8628-8638 |
| MFGE8 | Milk fat globule-EGF factor 8 protein | SEQ ID NOS: 8639-8645 |
| MFNG | MFNG O-fucosylpeptide 3-beta-N- | SEQ ID NOS: 8646-8653 |
| | acetylglucosaminyltransferase | |
| MGA | MGA, MAX dimerization protein | SEQ ID NOS: 8654-8662 |
| MGAT2 | Mannosyl (alpha-1,6-)-glycoprotein beta-1,2-N- | SEQ ID NO: 8663 |
| | acetylglucosaminyltransferase | |
| MGAT3 | Mannosyl (beta-1,4-)-glycoprotein beta-1,4-N- | SEQ ID NOS: 8664-8666 |
| | acetylglucosaminyltransferase | |
| MGAT4A | Mannosyl (alpha-1,3-)-glycoprotein beta-1,4-N- | SEQ ID NOS: 8667-8671 |
| | acetylglucosaminyltransferase, isozyme A | |
| MGAT4B | Mannosyl (alpha-1,3-)-glycoprotein beta-1,4-N- | SEQ ID NOS: 8672-8682 |
| | acetylglucosaminyltransferase, isozyme B | |
| MGAT4D | MGAT4 family, member D | SEQ ID NOS: 8683-8688 |
| MGLL | Monoglyceride lipase | SEQ ID NOS: 8689-8698 |
| MGP | Matrix Gla protein | SEQ ID NOS: 8699-8701 |
| MGST2 | Microsomal glutathione S-transferase 2 | SEQ ID NOS: 8702-8705 |
| MIA | Melanoma inhibitory activity | SEQ ID NOS: 8706-8711 |
| MIA2 | Melanoma inhibitory activity 2 | SEQ ID NO: 8712 |
| MIA3 | Melanoma inhibitory activity family, member 3 | SEQ ID NOS: 8713-8717 |
| MICU1 | Mitochondrial calcium uptake 1 | SEQ ID NOS: 8718-8727 |
| M1ER1 | Mesoderm induction early response 1, | SEQ ID NOS: 8728-8736 |
| | transcriptional regulator | |
| MINOS1- | MINOS1-NBL1 readthrough | SEQ ID NOS: 8737-8739 |
| NBL1 | | |
| MINPP1 | Multiple inositol-polyphosphate phosphatase 1 | SEQ ID NOS: 8740-8742 |
| MLEC | Malectin | SEQ ID NOS: 8743-8746 |
| MLN | Motilin | SEQ ID NOS: 8747-8749 |
| MLXIP | MLX interacting protein | SEQ ID NOS: 8750-8755 |
| MLXIPL | MLX interacting protein-like | SEQ ID NOS: 8756-8763 |
| MMP1 | Matrix metallopeptidase 1 | SEQ ID NO: 8764 |
| MMP10 | Matrix metallopeptidase 10 | SEQ ID NOS: 8765-8766 |
| MMP11 | Matrix metallopeptidase 11 | SEQ ID NOS: 8767-8770 |
| MMP12 | Matrix metallopeptidase 12 | SEQ ID NO: 8771 |
| MMP13 | Matrix metallopeptidase 13 | SEQ ID NOS: 8772-8774 |
| MMP14 | Matrix metallopeptidase 14 (membrane-inserted) | SEQ ID NOS: 8775-8777 |
| MMP17 | Matrix metallopeptidase 17 (membrane-inserted) | SEQ ID NOS: 8778-8785 |
| MMP19 | Matrix metallopeptidase 19 | SEQ ID NOS: 8786-8791 |
| MMP2 | Matrix metallopeptidase 2 | SEQ ID NOS: 8792-8799 |
| MMP20 | Matrix metallopeptidase 20 | SEQ ID NO: 8800 |
| MMP21 | Matrix metallopeptidase 21 | SEQ ID NO: 8801 |
| MMP25 | Matrix metallopeptidase 25 | SEQ ID NOS: 8802-8803 |
| MMP26 | Matrix metallopeptidase 26 | SEQ ID NOS: 8804-8805 |
| MMP27 | Matrix metallopeptidase 27 | SEQ ID NO: 8806 |
| MMP28 | Matrix metallopeptidase 28 | SEQ ID NOS: 8807-8812 |
| MMP3 | Matrix metallopeptidase 3 | SEQ ID NOS: 8813-8815 |
| MMP7 | Matrix metallopeptidase 7 | SEQ ID NO: 8816 |
| MMP8 | Matrix metallopeptidase 8 | SEQ ID NOS: 8817-8822 |
| MMP9 | Matrix metallopeptidase 9 | SEQ ID NO: 8823 |
| MMRN1 | Multimerin 1 | SEQ ID NOS: 8824-8826 |
| MMRN2 | Multimerin 2 | SEQ ID NOS: 8827-8831 |
| MOXD1 | Monooxygenase, DBH-like 1 | SEQ ID NOS: 8832-8834 |
| C6orf25 | Chromosome 6 open reading frame 25 | SEQ ID NOS: 8835-8842 |
| MPO | Myeloperoxidase | SEQ ID NOS: 8843-8844 |
| MPPED1 | Metallophosphoesterase domain containing 1 | SEQ ID NOS: 8845-8848 |
| MPZL1 | Myelin protein zero-like 1 | SEQ ID NOS: 8849-8853 |
| MR1 | Major histocompatibility complex, class I-related | SEQ ID NOS: 8854-8859 |
| MRPL2 | Mitochondrial ribosomal protein L2 | SEQ ID NOS: 8860-8864 |
| MRPL21 | Mitochondrial ribosomal protein L21 | SEQ ID NOS: 8865-8871 |
| MRPL22 | Mitochondrial ribosomal protein L22 | SEQ ID NOS: 8872-8876 |
| MRPL24 | Mitochondrial ribosomal protein L24 | SEQ ID NOS: 8877-8881 |
| MRPL27 | Mitochondrial ribosomal protein L27 | SEQ ID NOS: 8882-8887 |
| MRPL32 | Mitochondrial ribosomal protein L32 | SEQ ID NOS: 8888-8890 |
| MRPL34 | Mitochondrial ribosomal protein L34 | SEQ ID NOS: 8891-8895 |
| MRPL35 | Mitochondrial ribosomal protein L35 | SEQ ID NOS: 8896-8899 |
| MRPL52 | Mitochondrial ribosomal protein L52 | SEQ ID NOS: 8900-8910 |
| MRPL55 | Mitochondrial ribosomal protein L55 | SEQ ID NOS: 8911-8936 |
| MRPS14 | Mitochondrial ribosomal protein S14 | SEQ ID NOS: 8937-8938 |
| MRPS22 | Mitochondrial ribosomal protein S22 | SEQ ID NOS: 8939-8947 |
| MRPS28 | Mitochondrial ribosomal protein S28 | SEQ ID NOS: 8948-8955 |
| MS4A14 | Membrane-spanning 4-domains, subfamily A, | SEQ ID NOS: 8956-8966 |
| | member 14 | |
| MS4A3 | Membrane-spanning 4-domains, subfamily A, | SEQ ID NOS: 8967-8971 |
| | member 3 (hematopoietic cell-specific) | |
| MSH3 | MutS homolog 3 | SEQ ID NO: 8972 |
| MSH5 | MutS homolog 5 | SEQ ID NOS: 8973-8984 |
| MSLN | Mesothelin | SEQ ID NOS: 8985-8992 |
| MSMB | Microseminoprotein, beta- | SEQ ID NOS: 8993-8994 |
| MSRA | Methionine sulfoxide reductase A | SEQ ID NOS: 8995-9002 |
| MSRB2 | Methionine sulfoxide reductase B2 | SEQ ID NOS: 9003-9004 |
| MSRB3 | Methionine sulfoxide reductase B3 | SEQ ID NOS: 9005-9018 |
| MST1 | Macrophage stimulating 1 | SEQ ID NOS: 9019-9020 |
| MSTN | Myostatin | SEQ ID NO: 9021 |
| MT1G | Metallothionein 1G | SEQ ID NOS: 9022-9025 |
| MTHFD2 | Methylenetettahydrofolate dehydrogenase | SEQ ID NOS: 9026-9030 |
| | (NADP+ dependent) 2, methenyltetrahydrofolate | |
| | cyclohydrolase | |
| MTMR14 | Myotubularin related protein 14 | SEQ ID NOS: 9031-9041 |
| MTRNR2L11 | MT-RNR2-like 11 (pseudogene) | SEQ ID NO: 9042 |
| MTRR | 5-methyltetrahydrofolate-homocysteine | SEQ ID NOS: 9043-9055 |
| | methyltransferase reductase | |
| MTTP | Microsomal triglyceride transfer protein | SEQ ID NOS: 9056-9066 |
| MTX2 | Metaxin 2 | SEQ ID NOS: 9067-9071 |
| MUC1 | Mucin 1, cell surface associated | SEQ ID NOS: 9072-9097 |
| MUC13 | Mucin 13, cell surface associated | SEQ ID NOS: 9098-9099 |
| MUC20 | Mucin 20, cell surface associated | SEQ ID NOS: 9100-9104 |
| MUC3A | Mucin 3A, cell surface associated | SEQ ID NOS: 9105-9107 |
| MUC5AC | Mucin 5AC, oligomeric mucus/gel-forming | SEQ ID NO: 9108 |
| MUC5B | Mucin 5B, oligomeric mucus/gel-forming | SEQ ID NOS: 9109-9110 |
| MUC6 | Mucin 6, oligomeric mucus/gel-forming | SEQ ID NOS: 9111-9114 |
| MUC7 | Mucin 7, secreted | SEQ ID NOS: 9115-9118 |
| MUCL1 | Mucin-like 1 | SEQ ID NOS: 9119-9121 |
| MXRA5 | Matrix-remodelling associated 5 | SEQ ID NO: 9122 |
| MXRA7 | Matrix-remodelling associated 7 | SEQ ID NOS: 9123-9129 |
| MYDGF | Myeloid-derived growth factor | SEQ ID NOS: 9130-9132 |
| MYL1 | Myosin, light chain 1, alkali; skeletal, fast | SEQ ID NOS: 9133-9134 |
| MYOC | Myocilin, trabecular meshwork inducible | SEQ ID NOS: 9135-9136 |
| | glucocorticoid response | |
| MYRFL | Myclin regulatory factor-like | SEQ ID NOS: 9137-9141 |
| MZB1 | Marginal zone B and B1 cell-specific protein | SEQ ID NOS: 9142-9146 |
| N4BP2L2 | NEDD4 binding protein 2-like 2 | SEQ ID NOS: 9147-9152 |
| NAA38 | N(alpha)-acetyltransferase 38, NatC auxiliary | SEQ ID NOS: 9153-9158 |
| | subunit | |
| NAAA | N-acylethanolamine acid amidase | SEQ ID NOS: 9159-9164 |
| NAGA | N-acetylgalactosaminidase, alpha- | SEQ ID NOS: 9165-9167 |
| NAGLU | N-acetylglucosarninidase, alpha | SEQ ID NOS: 9168-9172 |
| NAGS | N-acetylglutamate synthase | SEQ ID NOS: 9173-9174 |
| NAPSA | Napsin A aspartic peptidase | SEQ ID NOS: 9175-9177 |
| CARKD | Carbohydrate kinase domain containing | SEQ ID NOS: 9178-9179 |
| APOA1BP | Apolipoprotein A-I binding protein | SEQ ID NOS: 9180-9182 |
| NBL1 | Neuroblastoma 1, DAN family BMP antagonist | SEQ ID NOS: 9183-9196 |
| NCAM1 | Neural cell adhesion molecule 1 | SEQ ID NOS: 9197-9216 |
| NCAN | Neurocan | SEQ ID NOS: 9217-9218 |
| NCBP2-AS2 | NCBP2 antisense RNA 2 (head to head) | SEQ ID NO: 9219 |
| NCSTN | Nicastrin | SEQ ID NOS: 9220-9229 |
| NDNF | Neuron-derived neurotrophic factor | SEQ ID NOS: 9230-9232 |
| NDP | Norrie disease (pseudoglioma) | SEQ ID NOS: 9233-9235 |
| NDUFA10 | NADH dehydrogenase (ubiquinone) 1 alpha | SEQ ID NOS: 9236-9245 |
| | subcomplex, 10, 42 kDa | |
| NDUFB5 | NADH dehydrogenase (ubiquinone) 1 beta | SEQ ID NOS: 9246-9254 |
| | subcomplex, 5, 16 kDa | |
| NDUFS8 | NADH dehydrogenase (ubiquinone) Fe—S protein | SEQ ID NOS: 9255-9264 |
| | 8, 23 kDa (NADH-coenzyme Q reductase) | |
| NDUFV1 | NADH dehydrogenase (ubiquinone) flavoprotein | SEQ ID NOS: 9265-9278 |
| | 1, 51 kDa | |
| NECAB3 | N-terminal EF-hand calcium binding protein 3 | SEQ ID NOS: 9279-9288 |
| PVRL1 | Poliovirus receptor-related 1 (herpesvirus entry | SEQ ID NOS: 9289-92.91 |
| | mediator C) | |
| NELL1 | Neural EGFL like 1 | SEQ ID NOS: 9292-9295 |
| NELL2 | Neural EGFL like 2 | SEQ ID NOS: 9296-9310 |
| NENF | Neudesin neurotrophic factor | SEQ ID NO: 9311 |
| NETO1 | Neuropilin (NRP) and tolloid (TLL)-like 1 | SEQ ID NOS: 9312-9316 |
| NFASC | Neurofascin | SEQ ID NOS: 9317-9331 |
| NFE2L1 | Nuclear factor, erythroid 2-like 1 | SEQ ID NOS: 9332-9350 |
| NFE2L3 | Nuclear factor, erythroid 2-like 3 | SEQ ID NOS: 9351-9352 |
| NGEF | Neuronal guaninc nucleotide exchange factor | SEQ ID NOS: 9353-9358 |
| NGF | Nerve growth factor (beta polypeptide) | SEQ ID NO: 9359 |
| NGLY1 | N-glycanase 1 | SEQ ID NOS: 9360-9366 |
| NGRN | Neugrin, neurite outgrowth associated | SEQ ID NOS: 9367-9368 |
| NHLRC3 | NHL repeat containing 3 | SEQ ID NOS: 9369-9371 |
| NID1 | Nidogen 1 | SEQ ID NOS: 9372-9373 |
| NID2 | Nidogen 2 (osteonidogen) | SEQ ID NOS: 9374-9376 |
| NKG7 | Natural killer cell granule protein 7 | SEQ ID NOS: 9377-9381 |
| NLGN3 | Neuroligin 3 | SEQ ID NOS: 9382-9386 |
| NLGN4Y | Neuroligin 4, Y-linked | SEQ ID NOS: 9387-9393 |
| NLRP5 | NLR family, pyrin domain containing 5 | SEQ ID NOS: 9394-9396 |
| NMB | Neuromedin B | SEQ ID NOS: 9397-9398 |
| NME1 | NME/NM23 nucleoside diphosphate kinase 1 | SEQ ID NOS: 9399-9405 |
| NME1- | NME1-NME2 readthrough | SEQ ID NOS: 9406-9408 |
| NME2 | | |
| NME3 | NME/NM23 nucleoside diphosphate kinase 3 | SEQ ID NOS: 9409-9413 |
| NMS | Neuromedin S | SEQ ID NO: 9414 |
| NMU | Neuromedin U | SEQ ID NOS: 9415-9418 |
| NOA1 | Nitric oxide associated 1 | SEQ ID NO: 9419 |
| NODAL | Nodal growth differentiation factor | SEQ ID NOS: 9420-9421 |
| NOG | Noggin | SEQ ID NO: 9422 |
| NOMO3 | NODAL modulator 3 | SEQ ID NOS: 9423-9429 |
| NOS1AP | Nitric oxide synthase 1 (neuronal) adaptor protein | SEQ ID NOS: 9430-9434 |
| NOTCH3 | Notch 3 | SEQ ID NOS: 9435-9438 |
| NOTUM | Notum pectinacetylesterase homolog (Drosophila) | SEQ ID NOS: 9439-9441 |
| NOV | Nephroblastoma overexpressed | SEQ ID NO: 9442 |
| NPB | Neuropeptide B | SEQ ID NOS: 9443-9444 |
| NPC2 | Niemann-Pick disease, type C2 | SEQ ID NOS: 9445-9453 |
| NPFF | Neuropeptide FF-amide peptide precursor | SEQ ID NO: 9454 |
| NPFFR2 | Neuropeptide FF receptor 2 | SEQ ID NOS: 9455-9458 |
| NPHS1 | Nephrosis I, congenital, Finnish type (nephrin) | SEQ ID NOS: 9459-9460 |
| NPNT | Nephronectin | SEQ ID NOS: 9461-9471 |
| NPPA | Natriuretic peptide A | SEQ ID NOS: 9472-9474 |
| NPPB | Natriuretic peptide B | SEQ ID NO: 9475 |
| NPPC | Natriuretic peptide C | SEQ ID NOS: 9476-9477 |
| NPS | Neuropeptide S | SEQ ID NO: 9478 |
| NPTX1 | Neuronal pentraxin I | SEQ ID NO: 9479 |
| NPTX2 | Neuronal pentraxin II | SEQ ID NO: 9480 |
| NPTXR | Neuronal pentraxin receptor | SEQ ID NOS: 9481-9482 |
| NPVF | Neuropeptide VF precursor | SEQ ID NO: 9483 |
| NPW | Neuropeptide W | SEQ ID NOS: 9484-9486 |
| NPY | Neuropeptide Y | SEQ ID NOS: 9487-9489 |
| NQO2 | NAD(P)H dehydrogenase, quinone 2 | SEQ ID NOS: 9490-9498 |
| NRCAM | Neuronal cell adhesion molecule | SEQ ID NOS: 9499-9511 |
| NRG1 | Neuregulin 1 | SEQ ID NOS: 9512-9529 |
| NRN1L | Neuritin 1-like | SEQ ID NOS: 9530-9532 |
| NRP1 | Neuropilin 1 | SEQ ID NOS: 9533-9546 |
| NRP2 | Neuropilin 2 | SEQ ID NOS: 9547-9553 |
| NRTN | Neurturin | SEQ ID NO: 9554 |
| NRXN1 | Neurexin 1 | SEQ ID NOS: 9555-9585 |
| NRXN2 | Neurexin 2 | SEQ ID NOS: 9586-9594 |
| NT5C3A | 5′-nucleotidase, cytosolic IIIA | SEQ ID NOS: 9595-9605 |
| NT5DC3 | 5′-nucleotidase domain containing 3 | SEQ ID NOS: 9606-9608 |
| NT5E | 5′-nucleotidase, ecto (CD73) | SEQ ID NOS: 9609-9613 |
| NTF3 | Neurotrophin 3 | SEQ ID NOS: 9614-9615 |
| NTF4 | Neurotrophin 4 | SEQ ID NOS: 9616-9617 |
| NTM | Neurotrimin | SEQ ID NOS: 9618-9627 |
| NTN1 | Netrin 1 | SEQ ID NOS: 9628-9629 |
| NTN3 | Netrin 3 | SEQ ID NO; 9630 |
| NTN4 | Netrin 4 | SEQ ID NOS: 9631-9635 |
| NTN5 | Netrin 5 | SEQ ID NOS: 9636-9637 |
| NTNG1 | Netrin G1 | SEQ ID NOS: 9638-9644 |
| NTNG2 | Netrin G2 | SEQ ID NOS: 9645-9646 |
| NTS | Neurotensin | SEQ ID NOS: 9647-9648 |
| NUBPL | Nucleotide binding protein-like | SEQ ID NOS: 9649-9655 |
| NUCB1 | Nucleobindin 1 | SEQ ID NOS: 9656-9662 |
| NUCB2 | Nucleobindin 2 | SEQ ID NOS: 9663-9678 |
| NUDT19 | Nudix (nucleoside diphosphate linked moiety X)- | SEQ ID NO: 9679 |
| | type motif 19 | |
| NUDT9 | Nudix (nucleoside diphosphate linked moiety X)- | SEQ ID NOS: 9680-9684 |
| | type motif 9 | |
| NUP155 | Nucleoporin 155 kDa | SEQ ID NOS: 9685-9688 |
| NUP214 | Nucleoporin 214 kDa | SEQ ID NOS: 9689-9700 |
| NUP85 | Nucleoporin 85 kDa | SEQ ID NOS: 9701-9715 |
| NXPE3 | Neurexopbilin and PC-esterase domain family, | SEQ ID NOS: 9716-9721 |
| | member 3 | |
| NXPE4 | Neurexopbilin and PC-esterase domain family, | SEQ ID NOS: 9722-9723 |
| | member 4 | |
| NXPH1 | Neurexopbilin 1 | SEQ ID NOS: 9724-9727 |
| NXPH2 | Neurexophilin 2 | SEQ ID NO: 9728 |
| NXPH3 | Neurexophilin 3 | SEQ ID NOS: 9729-9730 |
| NXPH4 | Neurexophilin 4 | SEQ ID NOS: 9731-9732 |
| NYX | Nyctalopin | SEQ ID NOS: 9733-9734 |
| OAF | Out at first homolog | SEQ ID NOS: 9735-9736 |
| OBP2A | Odorant binding protein 2A | SEQ ID NOS: 9737-9743 |
| OBP2B | Odorant binding protein 2B | SEQ ID NOS: 9744-9747 |
| OC90 | Otoconin 90 | SEQ ID NO: 9748 |
| OCLN | Occludin | SEQ ID NOS: 9749-9751 |
| ODAM | Odontogenic, ameloblast asssociated | SEQ ID NOS: 9752-9755 |
| C4orf26 | Chromosome 4 open reading frame 26 | SEQ ID NOS: 9756-9759 |
| OGG1 | 8-oxoguanine DMA glycosylase | SEQ ID NOS: 9760-9773 |
| OGN | Osteoglycin | SEQ ID NOS: 9774-9776 |
| OIT3 | Oncoprotein induced transcript 3 | SEQ ID NOS: 9777-9778 |
| OLFM1 | Olfactomedin 1 | SEQ ID NOS: 9779-9789 |
| OLFM2 | Olfactomedin 2 | SEQ ID NOS: 9790-9793 |
| OLFM3 | Olfactomedin 3 | SEQ ID NOS: 9794-9796 |
| OLFM4 | Olfactomedin 4 | SEQ ID NO: 9797 |
| OLFML1 | Olfactomedin-like 1 | SEQ ID NOS: 9798-9801 |
| OLFML2A | Olfactomedin-like 2A | SEQ ID NOS: 9802-9804 |
| OLFML2B | Olfactomedin-like 2B | SEQ ID NOS: 9805-9809 |
| OLFML3 | Olfactomedin-like 3 | SEQ ID NOS: 9810-9812 |
| OMD | Osteomodulin | SEQ ID NO: 9813 |
| OMG | Oligodendrocyte myelin glycoprotein | SEQ ID NO: 9814 |
| OOSP2 | Oocyte secreted protein 2 | SEQ ID NOS: 9815-9816 |
| OPCML | Opioid binding protein/cell adhesion molecule-like | SEQ ID NOS: 9817-9821 |
| PROL1 | Proline rich, lacrimal 1 | SEQ ID NO: 9822 |
| OPTC | Opticin | SEQ ID NOS: 9823-9824 |
| ORAI1 | ORAI calcium release-activated calcium modulator | SEQ ID NO: 9825 |
| | 1 | |
| ORM1 | Orosomucoid 1 | SEQ ID NO: 9826 |
| ORM2 | Orosomucoid 2 | SEQ ID NO: 9827 |
| ORMDL2 | ORMDL sphingolipid biosynthesis regulator 2 | SEQ ID NOS: 9828-9831 |
| OS9 | Osteosarcoma amplified 9, endoplasmic reticulum | SEQ ID NOS: 9832-9846 |
| | lectin | |
| OSCAR | Osteoclast associated, immunoglobulin-like | SEQ ID NOS: 9847-9857 |
| | receptor | |
| OSM | Oncostatin M | SEQ ID NOS: 9858-9860 |
| OSMR | Oncostatin M receptor | SEQ ID NOS: 9861-9865 |
| OSTN | Osteocrin | SEQ ID NOS: 9866-9867 |
| OTOA | Otoancorin | SEQ ID NOS: 9868-9873 |
| OTOG | Otogelin | SEQ ID NOS: 9874-9876 |
| OTOGL | Otogelin-like | SEQ ID NOS: 9877-9883 |
| OTOL1 | Otolin 1 | SEQ ID NO: 9884 |
| OTOR | Otoraplin | SEQ ID NO: 9885 |
| OTOS | Otospiralin | SEQ ID NOS: 9886-9887 |
| OVCH1 | Ovochymase 1 | SEQ ID NOS: 9888-9890 |
| OVCH2 | Ovochymase 2 (gene/pseudogene) | SEQ ID NOS: 9891-9892 |
| OVGP1 | Oviductal glycoprotein 1, 120 kDa | SEQ ID NO: 9893 |
| OXCT1 | 3-oxoacid CoA transferase 1 | SEQ ID NOS: 9894-9897 |
| OXCT2 | 3-oxoacid CoA transferase 2 | SEQ ID NO: 9898 |
| OXNAD1 | Oxidoreductase NAD-binding domain containing 1 | SEQ ID NOS: 9899-9905 |
| OXT | Oxytocin/neurophysin I prepropeptide | SEQ ID NO: 9906 |
| P3H1 | Prolyl 3-hydroxylase 1 | SEQ ID NOS: 9907-9911 |
| P3H2 | Prolyl 3-hydroxylase 2 | SEQ ID NOS: 9912-9915 |
| P3H3 | Prolyl 3-hydroxylase 3 | SEQ ID NO: 9916 |
| P3H4 | Prolyl 3-hydroxylase family member 4 (non- | SEQ ID NOS: 9917-9921 |
| | enzymatic) | |
| P4HA1 | Prolyl 4-hydroxylase, alpha polypeptide I | SEQ ID NOS: 9922-9926 |
| P4HA2 | Prolyl 4-hydroxylase, alpha polypeptide II | SEQ ID NOS: 9927-9941 |
| P4HA3 | Prolyl 4-hydroxylase, alpha polypeptide III | SEQ ID NOS: 9942-9946 |
| P4HB | Prolyl 4-hydroxylase, beta polypeptide | SEQ ID NOS: 9947-9958 |
| PAEP | Progestagen-associated endometrial protein | SEQ ID NOS: 9959-9967 |
| PAM | Peplidylglycine alpha-amidating monooxygenase | SEQ ID NOS: 9968-9981 |
| PAMR1 | Peptidase domain containing associated with | SEQ ID NOS: 9982-9988 |
| | muscle regeneration 1 | |
| PAPLN | Papilin, proteoglycan-like sulfated glycoprotein | SEQ ID NOS: 9989-9996 |
| PAPPA | Pregnancy-associated plasma protein A, pappalysin | SEQ ID NO: 9997 |
| | 1 | |
| PAPPA2 | Pappalysin 2 | SEQ ID NOS: 9998-9999 |
| PARP15 | Poly (ADP-ribose) polymerase family, member 15 | SEQ ID NOS: 10000-10003 |
| PARVB | Parvin, beta | SEQ ID NOS: 10004-10008 |
| PATE1 | Prostate and testis expressed 1 | SEQ ID NOS: 10009-10010 |
| PATE2 | Prostate and testis expressed 2 | SEQ ID NOS: 10011-10012 |
| PATE3 | Prostate and testis expressed 3 | SEQ ID NO: 10013 |
| PATE4 | Prostate and testis expressed 4 | SEQ ID NOS: 10014-10015 |
| PATL2 | Protein associated with topoisomerase II homolog | SEQ ID NOS: 10016-10021 |
| | 2 (yeast) | |
| PAX2 | Paired box 2 | SEQ ID NOS: 10022-10027 |
| PAX4 | Paired box 4 | SEQ ID NOS: 10028-10034 |
| PCCB | Propionyl CoA carboxylase, beta polypeptide | SEQ ID NOS: 10035-10049 |
| PCDH1 | Protocadherin 1 | SEQ ID NOS: 10050-10055 |
| PCDH12 | Protocadherin 12 | SEQ ID NOS: 10056-10057 |
| PCDH15 | Protocadherin-related 15 | SEQ ID NOS: 10058-10091 |
| PCDHA1 | Protocadherin alpha 1 | SEQ ID NOS: 10092-10094 |
| PCDHA10 | Protocadherin alpha 10 | SEQ ID NOS: 10095-10097 |
| PCDHA11 | Protocadherin alpha 11 | SEQ ID NOS: 10098-10100 |
| PCDHA6 | Protocadherin alpha 6 | SEQ ID NOS: 10101-10103 |
| PCDHB12 | Protocadherin beta 12 | SEQ ID NOS: 10104-10106 |
| PCDHGA11 | Protocadherin gamma subfamily A, 11 | SEQ ID NOS: 10107-10109 |
| PCF11 | PCF11 cleavage and polyadenylation factor | SEQ ID NOS: 10110-10114 |
| | subunit | |
| PCOLCE | Procollagen C-endopeptidase enhancer | SEQ ID NO: 10115 |
| PCOLCE2 | Procollagen C-endopeptidase enhancer 2 | SEQ ID NOS: 10116-10119 |
| PCSK1 | Proprotein convertase subtilisin/kexin type 1 | SEQ ID NOS: 10120-10122 |
| PCSK1N | Proprotein convertase subtilisin/kexin type 1 | SEQ ID NO: 10123 |
| | inhibitor | |
| PCSK2 | Proprotein convertase subtilisin/kexin type 2 | SEQ ID NOS: 10124-10126 |
| PCSK4 | Proprotein convertase subtilisin/kexin type 4 | SEQ ID NOS: 10127-10129 |
| PCSK5 | Proprotein convertase subtilisin/kexin type 5 | SEQ ID NOS: 10130-10134 |
| PCSK9 | Proprotein convertase subtilisin/kexin type 9 | SEQ ID NO: 10135 |
| PCYOX1 | Prenylcysteine oxidase 1 | SEQ ID NOS: 10136-10140 |
| PCYOX1L | Prenylcysteine oxidase 1 like | SEQ ID NOS: 10141-10145 |
| PDE11A | Phosphodicsterase 11A | SEQ ID NOS: 10146-10151 |
| PDE2A | Phosphodiesterase 2A, cGMP-stimulated | SEQ ID NOS: 10152-10173 |
| PDE7A | Phosphodiesterase 7A | SEQ ID NOS: 10174-10177 |
| PDF | Peptide deformylase (mitochondrial) | SEQ ID NO: 10178 |
| PDGFA | Platelet-derived growth factor alpha polypeptide | SEQ ID NOS: 10179-10182 |
| PDGFB | Platelet-derived growth factor beta polypeptide | SEQ ID NOS: 10183-10186 |
| PDGFC | Platelet derived growth factor C | SEQ ID NOS: 10187-10190 |
| PDGFD | Platelet derived growth factor D | SEQ ID NOS: 10191-10193 |
| PDGFRA | Platelet-derived growth factor receptor, alpha | SEQ ID NOS: 10194-10200 |
| | polypeptide | |
| PDGFRB | Platelet-derived growth factor receptor, beta | SEQ ID NOS: 10201-10204 |
| | polypeptide | |
| PDGFRL | Platelet-derived growth factor receptor-like | SEQ ID NOS: 10205-10206 |
| PDHA1 | Pyruvate dehydrogenase (lipoamide) alpha 1 | SEQ ID NOS: 10207-10215 |
| PDIA2 | Protein disulfide isomerase family A, member 2 | SEQ ID NOS: 10216-10219 |
| PDIA3 | Protein disulfide isomerase family A, member 3 | SEQ ID NOS: 10220-10223 |
| PDIA4 | Protein disulfide isomerase family A, member 4 | SEQ ID NOS: 10224-10225 |
| PDIA5 | Protein disulfide isomerase family A, member 5 | SEQ ID NOS: 10226-10229 |
| PDIA6 | Protein disulfide isomerase family A, member 6 | SEQ ID NOS: 10230-10236 |
| PDILT | Protein disulfide isomerase-like, testis expressed | SEQ ID NOS: 10237-10238 |
| PDYN | Prodynorphin | SEQ ID NOS: 10239-10241 |
| PDZD8 | PDZ domain containing 8 | SEQ ID NO: 10242 |
| PDZRN4 | PDZ domain containing ring finger 4 | SEQ ID NOS: 10243-10245 |
| PEAR1 | Platelet endothelial aggregation receptor 1 | SEQ ID NOS: 10246-10249 |
| PEBP4 | Phosphatidylethanolamine-binding protein 4 | SEQ ID NOS: 10250-10251 |
| PECAM1 | Platelet/endothelial cell adhesion molecule 1 | SEQ ID NOS: 10252-10255 |
| PENK | Proenkephalin | SEQ ID NOS: 10256-10261 |
| PET117 | PET117 homolog | SEQ ID NO: 10262 |
| PF4 | Platelet factor 4 | SEQ ID NO: 10263 |
| PF4V1 | Platelet factor 4 variant 1 | SEQ ID NO: 10264 |
| PFKP | Phosphofructokinase, platelet | SEQ ID NOS: 10265-10273 |
| PFN1 | Profilin 1 | SEQ ID NOS: 10274-10276 |
| PGA3 | Pepsinogen 3, group I (pepsinogen A) | SEQ ID NOS: 10277-10280 |
| PGA4 | Pepsinogen 4, group I (pepsinogen A) | SEQ ID NOS: 10281-10283 |
| PGA5 | Pepsinogen 5, group I (pepsinogen A) | SEQ ID NOS: 10284-10286 |
| PGAM5 | PGAM family member 5, serine/threonine protein | SEQ ID NOS: 10287-10290 |
| | phosphatase, mitochondrial | |
| PGAP3 | Post-GPI attachment to proteins 3 | SEQ ID NOS: 10291-10298 |
| PGC | Progastricsin (pepsinogen C) | SEQ ID NOS: 10299-10302 |
| PGF | Placental growth factor | SEQ ID NOS: 10303-10306 |
| PGLYRP1 | Peptidoglycan recognition protein 1 | SEQ ID NO: 10307 |
| PGLYRP2 | Peptidoglycan recognition protein 2 | SEQ ID NOS: 10308-10311 |
| PGLYRP3 | Peptidoglycan recognition protein 3 | SEQ ID NO: 10312 |
| PGLYRP4 | Peptidoglycan recognition protein 4 | SEQ ID NOS: 10313-10314 |
| PHACTR1 | Phosphatase and actin regulator 1 | SEQ ID NOS: 10315-10321 |
| PHB | Prohibitin | SEQ ID NOS: 10322-10330 |
| PI15 | Peptidase inhibitor 15 | SEQ ID NOS: 10331-10332 |
| PI3 | Peptidase inhibitor 3, skin-derived | SEQ ID NO: 10333 |
| PIANP | PILR alpha associated neural protein | SEQ ID NOS: 10334-10339 |
| PICK | Phosphatidylinositol glycan anchor biosynthesis, | SEQ ID NOS: 10340-10343 |
| | class K | |
| PIGL | Phosphatidylinositol glycan anchor biosynthesis, | SEQ ID NOS: 10344-10351 |
| | class L | |
| PIGT | Phosphatidylinositol glycan anchor biosynthesis, | SEQ ID NOS: 10352-10406 |
| | class T | |
| PIGZ | Phosphatidylinositol glycan anchor biosynthesis, | SEQ ID NOS: 10407-10409 |
| | class Z | |
| PIK3AP1 | Phosphoinositide-3-kinase adaptor protein 1 | SEQ ID NOS: 10410-10412 |
| PIK3IP1 | Phosphoinositide-3-kinase interacting protein 1 | SEQ ID NOS: 10413-10416 |
| PILRA | Paired immunoglobin-like type 2 receptor alpha | SEQ ID NOS: 10417-10421 |
| PILRB | Paired immunoglobin-like type 2 receptor beta | SEQ ID NOS: 10422-10433 |
| PINLYP | Phospholipase A2 inhibitor and LY6/PLAUR | SEQ ID NOS: 10434-10438 |
| | domain containing | |
| PIP | Prolactin-induccd protein | SEQ ID NO: 10439 |
| PIWIL4 | Piwi-like RNA-mediated gene silencing 4 | SEQ ID NOS: 10440-10444 |
| PKDCC | Protein kinase domain containing, cytoplasmic | SEQ ID NOS: 10445-10446 |
| PKHD1 | Polycystic kidney and hepatic disease 1 (autosomal | SEQ ID NOS: 10447-10448 |
| | recessive) | |
| PLA1A | Phospholipase A1 member A | SEQ ID NOS: 10449-10453 |
| PLA2G10 | Phospholipase A2, group X | SEQ ID NOS: 10454-10455 |
| PLA2G12A | Phospholipase A2, group XIIA | SEQ ID NOS: 10456-10458 |
| PLA2G12B | Phospholipase A2, group XIIB | SEQ ID NO: 10459 |
| PLA2G15 | Phospholipase A2, group XV | SEQ ID NOS: 10460-10467 |
| PLA2G1B | Phospholipase A2, group IB (pancreas) | SEQ ID NOS: 10468-10470 |
| PLA2G2A | Phospholipase A2, group IIA (platelets, synovial | SEQ ID NOS: 10471-10472 |
| | fluid) | |
| PLA2G2C | Phospholipase A2, group IIC | SEQ ID NOS: 10473-10474 |
| PLA2G2D | Phospholipase A2, group IID | SEQ ID NOS: 10475-10476 |
| PLA2G2E | Phospholipase A2, group IIE | SEQ ID NO: 10477 |
| PLA2G3 | Phospholipase A2, group III | SEQ ID NO: 10478 |
| PLA2G5 | Phospholipase A2, group V | SEQ ID NO: 10479 |
| PLA2G7 | Phospholipase A2, group VII (platelet-activating | SEQ ID NOS: 10480-10481 |
| | factor acetylhydrolase, plasma) | |
| PLA2R1 | Phospholipase A2 receptor 1, 180 kDa | SEQ ID NOS: 10482-10483 |
| PLAC1 | Placenta-specific 1 | SEQ ID NO: 10484 |
| PLAC9 | Placenta-specific 9 | SEQ ID NOS: 10485-10487 |
| PLAT | Plasminogen activator, tissue | SEQ ID NOS: 10488-10496 |
| PLAU | Plasminogen activator, urokinase | SEQ ID NOS: 10497-10499 |
| PLAUR | Plasminogen activator, urokinase receptor | SEQ ID NOS: 10500-10511 |
| PLBD1 | Phospholipase B domain containing 1 | SEQ ID NOS: 10512-10514 |
| PLBD2 | Phospholipase B domain containing 2 | SEQ ID NOS: 10515-10517 |
| PLG | Plasminogen | SEQ ID NOS: 10518-10520 |
| PLGLB1 | Plasminogen-like B1 | SEQ ID NOS: 10521-10524 |
| PLGLB2 | Plasminogen-like B2 | SEQ ID NOS: 10525-10526 |
| PLOD1 | Procollagen-lysine, 2-oxoglutarate 5-dioxygenase 1 | SEQ ID NOS: 10527-10529 |
| PLOD2 | Procollagen-lysine, 2-oxoglutarate 5-dioxygenase 2 | SEQ ID NOS: 10530-10535 |
| PLOD3 | Procollagen-lysine, 2-oxoglutarate 5-dioxygenase 3 | SEQ ID NOS: 10536-10542 |
| PLTP | Phospholipid transfer protein | SEQ ID NOS: 10543-10547 |
| PLXNA4 | Plexin A4 | SEQ ID NOS: 10548-10551 |
| PLXNB2 | Plexin B2 | SEQ ID NOS: 10552-10560 |
| PM20D1 | Peptidase M20 domain containing 1 | SEQ ID NO: 10561 |
| PMCH | Pro-melanin-concentrating hormone | SEQ ID NO: 10562 |
| PMEL | Premelanosorne protein | SEQ ID NOS: 10563-10574 |
| PMEPA1 | Prostate transmembrane protein, androgen induced | SEQ ID NOS: 10575-10581 |
| | 1 | |
| PNLIP | Pancreatic lipase | SEQ ID NO: 10582 |
| PNLIPRP1 | Pancreatic lipase-related protein 1 | SEQ ID NOS: 10583-10591 |
| PNLIPRP3 | Pancreatic lipase-related protein 3 | SEQ ID NO: 10592 |
| FNOC | Prepronociceptin | SEQ ID NOS: 10593-10595 |
| PNP | Purine nucleoside phosphorylase | SEQ ID NOS: 10596-10599 |
| PNPLA4 | Patatin-like phospholipase domain containing 4 | SEQ ID NOS: 10600-10603 |
| PODNL1 | Podocan-like 1 | SEQ ID NOS: 10604-10615 |
| POFUT1 | Protein O-fucosyltransferase 1 | SEQ ID NOS: 10616-10617 |
| POFUT2 | Protein O-fucosyltransferase 2 | SEQ ID NOS: 10618-10623 |
| POGLUT1 | Protein O-glucosyltransferase 1 | SEQ ID NOS: 10624-10628 |
| POLL | Polymerase (DNA directed), lambda | SEQ ID NOS: 10629-10641 |
| POMC | Proopiomelanocortin | SEQ ED NOS: 10642-10646 |
| POMGNT2 | Protein O-linked mannose N- | SEQ ID NOS: 10647-10648 |
| | acetylglucosaminyltransferase 2 (beta 1,4-) | |
| PON1 | Paraoxonase 1 | SEQ ID NOS: 10649-10650 |
| PON2 | Paraoxonase 2 | SEQ ID NOS: 10651-10663 |
| PON3 | Paraoxonase 3 | SEQ ID NOS: 10664-10669 |
| POSTN | Periostin, osteoblast specific factor | SEQ ID NOS: 10670-10675 |
| PPBP | Pro-platelet basic protein (chemokine (C-X-C | SEQ ID NO: 10676 |
| | motif) ligand 7) | |
| PPIB | Peptidylprolyl isomerase B (cyclophilin B) | SEQ ID NO: 10677 |
| PPIC | Peptidylprolyl isomerase C (cyclophilin C) | SEQ ID NO: 10678 |
| PPOX | Protoporphyrinogen oxidase | SEQ ID NOS: 10679-10689 |
| PPP1CA | Protein phosphatase 1, catalytic subunit, alpha | SEQ ID NOS: 10690-10695 |
| | isozyme | |
| PPT1 | Palmitoyl-protein thioesterase 1 | SEQ ID NOS: 10696-10712 |
| PPT2 | Palmitoyl-protein thioesterase 2 | SEQ ID NOS: 10713-10720 |
| PPY | Pancreatic polypeptide | SEQ ID NOS: 10721-10725 |
| PRAC2 | Prostate cancer susceptibility candidate 2 | SEQ ID NOS: 10726-10727 |
| PRADC1 | Protease-associated domain containing 1 | SEQ ID NO: 10728 |
| PRAP1 | Proline-rich acidic protein 1 | SEQ ID NOS: 10729-10730 |
| PRB1 | Proline-rich protein BstNI subfamily 1 | SEQ ID NOS: 10731-10734 |
| PRB2 | Proline-rich protein BstNI subfamily 2 | SEQ ID NOS: 10735-10736 |
| PRB3 | Proline-rich protein BstNI subfamily 3 | SEQ ID NOS: 10737-10738 |
| PRB4 | Proline-rich protein BstNI subfamily 4 | SEQ ID NOS: 10739-10742 |
| PRCD | Progressive rod-cone degeneration | SEQ ID NOS: 10743-10744 |
| PRCP | Prolylcarboxypeptidase (angiotensinase C) | SEQ ID NOS: 10745-10756 |
| PRDM12 | PR domain containing 12 | SEQ ID NO: 10757 |
| PRDX4 | Peroxiredoxin 4 | SEQ ID NOS: 10758-10761 |
| PRELP | Proline/arginine-rich end leucine-rich repeat | SEQ ID NO: 10762 |
| | protein | |
| PRF1 | Perforin 1 (pore forming protein) | SEQ ID NOS: 10763-10765 |
| PRG2 | Proteoglycan 2, bone marrow (natural killer cell | SEQ ID NOS: 10766-10768 |
| | activator, eosinophil granule major basic protein) | |
| PRG3 | Proteoglycan 3 | SEQ ID NO: 10769 |
| PRG4 | Proteoglycan 4 | SEQ ID NOS: 10770-10775 |
| PRH1 | Proline-rich protein HaeIII subfamily 1 | SEQ ID NOS: 10776-10778 |
| PRH2 | Proline-rich protein HaeIII subfamily 2 | SEQ ID NOS: 10779-10780 |
| PRKAG1 | Protein kinase, AMP-activated, gamma 1 non- | SEQ ID NOS: 10781-10795 |
| | catalytic subunit | |
| PRKCSH | Protein kinase C substrate 80K-H | SEQ ID NOS: 10796-10805 |
| PRKD1 | Protein kinase D1 | SEQ ID NOS: 10806-10811 |
| PRL | Prolactin | SEQ ID NOS: 10812-10814 |
| PRLH | Prolactin releasing hormone | SEQ ID NO: 10815 |
| PRLR | Prolactin receptor | SEQ ID NOS: 10816-10834 |
| PRNP | Prion protein | SEQ ID NOS: 10835-10838 |
| PRNT | Prion protein (testis specific) | SEQ ID NO: 10839 |
| PROC | Protein C (inactivator of coagulation factors Va | SEQ ID NOS: 10840-10847 |
| | and VIIIa) | |
| PROK1 | Prokineticin 1 | SEQ ID NO: 10848 |
| PROK2 | Prokineticin 2 | SEQ ID NOS: 10849-10850 |
| PROM1 | Prominin 1 | SEQ ID NOS: 10851-10862 |
| PROS1 | Protein S (alpha) | SEQ ID NOS: 10863-10866 |
| PROZ | Protein Z, vitamin K-dependent plasma | SEQ ID NOS: 10867-10868 |
| | glycoprotein | |
| PRR27 | Proline rich 27 | SEQ ID NOS: 10869-10872 |
| PRR4 | Proline rich 4 (lacrimal) | SEQ ID NOS: 10873-10875 |
| PRRG2 | Proline rich Gla (G-carboxyglutamic acid) 2 | SEQ ID NOS: 10876-10878 |
| PRRT3 | Proline-rich transmembrane protein 3 | SEQ ID NOS: 10879-10881 |
| PRRT4 | Proline-rich transmembrane protein 4 | SEQ ID NOS: 10882-10888 |
| PRSS1 | Protease, serine, 1 (trypsin 1) | SEQ ID NOS: 10889-10892 |
| PRSS12 | Protease, serine, 12 (neurotrypsin, motopsin) | SEQ ID NO: 10893 |
| PRSS16 | Protease, serine, 16 (thymus) | SEQ ID NOS: 10894-10901 |
| PRSS2 | Protease, serine, 2 (trypsin 2) | SEQ ID NOS: 10902-10905 |
| PRSS21 | Protease, serine, 21 (testisin) | SEQ ID NOS: 10906-10911 |
| PRSS22 | Protease, serine, 22 | SEQ ID NOS: 10912-10914 |
| PRSS23 | Protease, serine. 23 | SEQ ID NOS: 10915-10918 |
| PRSS27 | Protease, serine 27 | SEQ ID NOS: 10919-10921 |
| PRSS3 | Protease, serine, 3 | SEQ ID NOS: 10922-10926 |
| PRSS33 | Protease, serine, 33 | SEQ ID NOS: 10927-10930 |
| PRSS35 | Protease, serine, 35 | SEQ ID NO: 10931 |
| PRSS36 | Protease, serine, 36 | SEQ ID NOS: 10932-10935 |
| PRSS37 | Protease, serine, 37 | SEQ ID NOS: 10936-10939 |
| PRSS38 | Protease, serine, 38 | SEQ ID NO: 10940 |
| PRSS42 | Protease, serine, 42 | SEQ ID NOS: 10941-10942 |
| PRSS48 | Protease, serine, 48 | SEQ ID NOS: 10943-10944 |
| PRSS50 | Protease, serine, 50 | SEQ ID NO: 10945 |
| PRSS53 | Protease, serine, 53 | SEQ ID NO: 10946 |
| PRSS54 | Protease, serine, 54 | SEQ ID NOS: 10947-10951 |
| PRSS55 | Protease, serine, 55 | SEQ ID NOS: 10952-10954 |
| PRSS56 | Protease, serine, 56 | SEQ ID NOS: 10955-10956 |
| PRSS57 | Protease, serine, 57 | SEQ ID NOS: 10957-10958 |
| PRSS58 | Protease, serine, 58 | SEQ ID NOS: 10959-10960 |
| PRSS8 | Protease, serine, 8 | SEQ ID NOS: 10961-10964 |
| PRTG | Protogenin | SEQ ID NOS: 10965-10968 |
| PRTN3 | Proteinase 3 | SEQ ID NOS: 10969-10970 |
| PSAP | Prosaposin | SEQ ID NOS: 10971-10974 |
| PSAPL1 | Prosaposin-like 1 (gene/pseudogene) | SEQ ID NO: 10975 |
| PSG1 | Pregnancy specific beta-1-glycoprotein 1 | SEQ ID NOS: 10976-10983 |
| PSG11 | Pregnancy specific beta-1-glycoprotein 11 | SEQ ID NOS: 10984-10988 |
| PSG2 | Pregnancy specific beta-1-glycoprotein 2 | SEQ ID NOS: 10989-10990 |
| PSG3 | Pregnancy specific beta-1-glycoprotein 3 | SEQ ID NOS: 10991-10994 |
| PSG4 | Pregnancy specific beta-1-glycoprotein 4 | SEQ ID NOS: 10995-11006 |
| PSG5 | Pregnancy specific beta-1-glycoprotein 5 | SEQ ID NOS: 11007-11012 |
| PSG6 | Pregnancy specific beta-1-glycoprotein 6 | SEQ ID NOS: 11013-11018 |
| PSG7 | Pregnancy specific beta-1-glycoprotein 7 | SEQ ID NOS: 11019-11021 |
| | (gene/pseudogene) | |
| PSG8 | Pregnancy specific beta-1-glycoprotein 8 | SEQ ID NOS: 11022-11026 |
| PSG9 | Pregnancy specific beta-1-glycoprotein 9 | SEQ ID NOS: 11027-11034 |
| PSMD1 | Proteasome 26S subunit, non-ATPase 1 | SEQ ID NOS: 11035-11042 |
| PSORS1C2 | Psoriasis susceptibility 1 candidate 2 | SEQ ID NO: 11043 |
| PSPN | Persephin | SEQ ID NOS: 11044-11045 |
| PTGDS | Prostaglandin D2 synthase 21 kDa (brain) | SEQ ID NOS: 11046-11050 |
| PTGIR | Prostaglandin I2 (prostacyclin) receptor (IP) | SEQ ID NOS: 11051-11055 |
| PTGS1 | Prostaglandin-endoperoxide synthase 1 | SEQ ID NOS: 11056-11064 |
| | (prostaglandin G/H synthase and cyclooxygenase) | |
| PTGS2 | Prostaglandin-endoperoxide synthase 2 | SEQ ID NOS: 11065-11066 |
| | (prostaglandin G/H synthase and cyclooxygenase) | |
| PTH | Parathyroid hormone | SEQ ID NOS: 11067-11068 |
| PTH2 | Parathyroid hormone 2 | SEQ ID NO: 11069 |
| PTHLH | Parathyroid hormone-like hormone | SEQ ID NOS: 11070-11078 |
| PTK7 | Protein tyrosine kinase 7 (inactive) | SEQ ID NOS: 11079-11094 |
| PTN | Pleiotrophin | SEQ ID NOS: 11095-11096 |
| PTPRA | Protein tyrosine phosphatase, receptor type, A | SEQ ID NOS: 11097-11104 |
| PTPRB | Protein tyrosine phosphatase, receptor type, B | SEQ ID NOS: 11105-11112 |
| PTPRC | Protein tyrosine phosphatase, receptor type, C | SEQ ID NOS: 11113-11123 |
| PTPRCAP | Protein tyrosine phosphatase, receptor type, C- | SEQ ID NO: 11124 |
| | associated protein | |
| PTPRD | Protein tyrosine phosphatase, receptor type, D | SEQ ID NOS: 11125-11136 |
| PTPRF | Protein tyrosine phosphatase, receptor type, F | SEQ ID NOS: 11137-11144 |
| PTPRJ | Protein tyrosine phosphatase, receptor type, J | SEQ ID NOS: 11145-11150 |
| PTPRO | Protein tyrosine phosphatase, receptor type. O | SEQ ID NOS: 11151-11159 |
| PTPRS | Protein tyrosine phosphatase, receptor type, S | SEQ ID NOS: 11160-11167 |
| PTTG1IP | Pituitary tumor-transforming 1 interacting protein | SEQ ID NOS: 11168-11171 |
| PTX3 | Pentraxin 3, long | SEQ ID NO: 11172 |
| PTX4 | Pentraxin 4, long | SEQ ID NOS: 11173-11175 |
| PVR | Poliovirus receptor | SEQ ID NOS: 11176-11181 |
| PXDN | Peroxidasin | SEQ ID NOS: 11182-11186 |
| PXDNL | Peroxidasin-like | SEQ ID NOS: 11187-11189 |
| PXYLP1 | 2-phosphoxylose phosphatase 1 | SEQ ID NOS: 11190-11202 |
| PYY | Peptide YY | SEQ ID NOS: 11203-11204 |
| PZP | Pregnancy-zone protein | SEQ ID NOS: 11205-11206 |
| QPCT | Glutaminyl-peplide cyclotransferase | SEQ ID NOS: 11207-11209 |
| QPRT | Quinolinate phosphoribosyltransferase | SEQ ID NOS: 11210-11211 |
| QRFP | Pyroglutamylated RFamide peptide | SEQ ID NOS: 11212-11213 |
| QSOX1 | Quiescin Q6 sulfhydryl oxidase 1 | SEQ ID NOS: 11214-11217 |
| R3HDML | R3H domain containing-like | SEQ ID NO: 11218 |
| RAB26 | RAB26, member RAS oncogene family | SEQ ID NOS: 11219-11222 |
| RAB36 | RAB36, member RAS oncogene family | SEQ ID NOS: 11223-11225 |
| RAB9B | RAB9B, member RAS oncogene family | SEQ ID NO: 11226 |
| RAET1E | Retinoic acid early transcript 1E | SEQ ID NOS: 11227-11232 |
| RAET1G | Retinoic acid early transcript 1G | SEQ ID NOS: 11233-11235 |
| RAMP2 | Receptor (G protein-coupled) activity modifying | SEQ ID NOS: 11236-11240 |
| | protein 2 | |
| RAPGEF5 | Rap guanine nucleotide exchange factor (GEF) 5 | SEQ ID NOS: 11241-11247 |
| RARRES1 | Retinoic acid receptor responder (tazarotene | SEQ ID NOS: 11248-11249 |
| | induced) 1 | |
| RARRES2 | Retinoic acid receptor responder (tazarotene | SEQ ID NOS: 11250-11253 |
| | induced) 2 | |
| RASA2 | RAS p21 protein activator 2 | SEQ ID NOS: 11254-11256 |
| RBM3 | RNA binding motif (RNP1, RRM) protein 3 | SEQ ID NOS: 11257-11259 |
| RBP3 | Retinol binding protein 3, interstitial | SEQ ID NO: 11260 |
| RBP4 | Retinol binding protein 4, plasma | SEQ ID NOS: 11261-11264 |
| RCN1 | Reticulocalbin 1, EF-hand calcium binding domain | SEQ ID NOS: 11265-11268 |
| RCN2 | Reticulocalbin 2, EF-hand calcium binding domain | SEQ ID NOS: 11269-11272 |
| RCN3 | Reticulocalbin 3, EF-hand calcium binding domain | SEQ ID NOS: 11273-11276 |
| RCOR1 | REST corepressor 1 | SEQ ID NOS: 11277-11278 |
| RDH11 | Retinol dehydrogenase 11 (all-trans/9-cis/11-cis) | SEQ ID NOS: 11279-11286 |
| RDH12 | Retinol dehydrogenase 12 (all-trans/9-cis/11-cis) | SEQ ID NOS: 11287-11288 |
| RDH13 | Retinol dehydrogenase 13 (all-trans/9-cis) | SEQ ID NOS: 11289-11297 |
| RDH5 | Retinol dehydrogenase 5 (11-cis/9-cis) | SEQ ID NOS: 11298-11302 |
| RDH8 | Retinol dehydrogenase 8 (all-trans) | SEQ ID NOS: 11303-11304 |
| REGIA | Regenerating islet-derived 1 alpha | SEQ ID NO: 11305 |
| REG1B | Regenerating islet-derived 1 beta | SEQ ID NOS: 11306-11307 |
| REG3A | Regenerating islet-derived 3 alpha | SEQ ID NOS: 11308-11310 |
| REG3G | Regenerating islet-derived 3 gamma | SEQ ID NOS: 11311-11313 |
| REG4 | Regenerating islet-derived family, member 4 | SEQ ID NOS: 11314-11317 |
| RELN | Reelin | SEQ ID NOS: 11318-11321 |
| RELT | RELT tumor necrosis factor receptor | SEQ ID NOS: 11322-11325 |
| REN | Renin | SEQ ID NOS: 11326-11327 |
| REPIN1 | Replication initiator 1 | SEQ ID NOS: 11328-11341 |
| REPS2 | RALBP1 associated Eps domain containing 2 | SEQ ID NOS: 11342-11343 |
| RET | Ret proto-oncogene | SEQ ID NOS: 11344-11349 |
| RETN | Resistin | SEQ ID NOS: 11350-11352 |
| RETNLB | Resistin like beta | SEQ ID NO: 11353 |
| RETSAT | Retinol saturase (all-trans-retinol 13,14-reductase) | SEQ ID NOS: 11354-11358 |
| RFNG | RFNG O-fucosylpeptide 3-beta-N- | SEQ ID NOS: 11359-11361 |
| | acetylglucosaminyltransferase | |
| RGCC | Regulator of cell cycle | SEQ ID NO: 11362 |
| RGL4 | Ral guanine nucleotide dissociation stimulator-like | SEQ ID NOS: 11363-11369 |
| | 4 | |
| RGMA | Repulsive guidance molecule family member a | SEQ ID NOS: 11370-11379 |
| RGMB | Repulsive guidance molecule family member b | SEQ ID NOS: 11380-11381 |
| RHOQ | Ras homolog family member Q | SEQ ID NOS: 11382-11386 |
| RIC3 | RIC3 acetylcholine receptor chaperone | SEQ ID NOS: 11387-11394 |
| HRSP12 | Heat-responsive protein 12 | SEQ ID NOS: 11395-11398 |
| RIMS1 | Regulating synaptic membrane exocytosis 1 | SEQ ID NOS: 11399-11414 |
| RIPPLY1 | Ripply transcriptional repressor 1 | SEQ ID NOS: 11415-11416 |
| RLN1 | Relaxin 1 | SEQ ID NO: 11417 |
| RLN2 | Relaxin 2 | SEQ ID NOS: 11418-11419 |
| RLN3 | Relaxin 3 | SEQ ID NOS: 11420-11421 |
| RMDN1 | Regulator of microtubule dynamics 1 | SEQ ID NOS: 11422-11435 |
| RNASE1 | Ribonuclease, RNase A family, 1 (pancreatic) | SEQ ID NOS: 11436-11440 |
| RNASE10 | Ribonuclease, RNase A family, 10 (non-active) | SEQ ID NOS: 11441-11442 |
| RNASE11 | Ribonuclease, RNase A family, 11 (non-active) | SEQ ID NOS: 11443-11453 |
| RNASE12 | Ribonuclease, RNase A family, 12 (non-active) | SEQ ID NO: 11454 |
| RNASE13 | Ribonuclease, RNase A family, 13 (non-active) | SEQ ID NO: 11455 |
| RNASE2 | Ribonuclease, RNase A family, 2 (liver, | SEQ ID NO: 11456 |
| | eosinophil-derived neurotoxin) | |
| RNASE3 | Ribonuclease, RNase A family, 3 | SEQ ID NO: 11457 |
| RNASE4 | Ribonuclease, RNase A family, 4 | SEQ ID NOS: 11458-11460 |
| RNASE6 | Ribonuclease, RNase A family, k6 | SEQ ID NO: 11461 |
| RNASE7 | Ribonuclease, RNase A family, 7 | SEQ ID NOS: 11462-11463 |
| RNASE8 | Ribonuclease, RNase A family, 8 | SEQ ID NO: 11464 |
| RNASE9 | Ribonuclease, RNase A family, 9 (non-active) | SEQ ID NOS: 11465-11475 |
| RNASEH1 | Ribonuclease H1 | SEQ ID NOS: 11476-11478 |
| RNASET2 | Ribonuclease T2 | SEQ ID NOS: 11479-11486 |
| RNF146 | Ring finger protein 146 | SEQ ID NOS: 11487-11498 |
| RNF148 | Ring finger protein 148 | SEQ ID NOS: 11499-11500 |
| RNF150 | Ring finger protein 150 | SEQ ID NOS: 11501-11505 |
| RNF167 | Ring finger protein 167 | SEQ ID NOS: 11506-11516 |
| RNF220 | Ring finger protein 220 | SEQ ID NOS: 11517-11523 |
| RNF34 | Ring finger protein 34, E3 ubiquitin protein ligase | SEQ ID NOS: 11524-11531 |
| RNLS | Renalase, FAD-dependent amine oxidase | SEQ ID NOS: 11532-11534 |
| RNPEP | Arginyl aminopeptidase (aminopeptidase B) | SEQ ID NOS: 11535-11540 |
| ROR1 | Receptor tyrosine kinase-like orphan receptor 1 | SEQ ID NOS: 11541-11543 |
| RPL3 | Ribosomal protein L3 | SEQ ID NOS: 11544-11549 |
| RPLP2 | Ribosomal protein, large, P2 | SEQ ID NOS: 11550-11552 |
| RPN2 | Ribophorin II | SEQ ID NOS: 11553-11559 |
| RPS27L | Ribosomal protein S27-like | SEQ ID NOS: 11560-11565 |
| RS1 | Retinoschisin 1 | SEQ ID NO: 11566 |
| RSF1 | Remodeling and spacing factor 1 | SEQ ID NOS: 11567-11573 |
| RSPO1 | R-spondin 1 | SEQ ID NOS: 11574-11577 |
| RSPO2 | R-spondin 2 | SEQ ID NOS: 11578-11585 |
| RSPO3 | R-spondin 3 | SEQ ID NOS: 11586-11587 |
| RSPO4 | R-spondin 4 | SEQ ID NOS: 11588-11589 |
| RSPRY1 | Ring finger and SPRY domain containing 1 | SEQ ID NOS: 11590-11596 |
| RTBDN | Retbindin | SEQ ID NOS: 11597-11609 |
| RTN4RL1 | Reticulon 4 receptor-like 1 | SEQ ID NO: 11610 |
| RTN4RL2 | Reticulon 4 receptor-like 2 | SEQ ID NOS: 11611-11613 |
| SAA1 | Seram amyloid A1 | SEQ ID NOS: 11614-11616 |
| SAA2 | Seram amyloid A2 | SEQ ID NOS: 11617-11622 |
| SAA4 | Serum amyloid A4, constitutive | SEQ ID NO: 11623 |
| SAP30 | Sin3A-associated protein, 30 kDa | SEQ ID NO: 11624 |
| SAR1A | Secretion associated, Ras related GTPase 1A | SEQ ID NOS: 11625-11631 |
| SARAF | Store-operated calcium entry-associated regulatory | SEQ ID NOS: 11632-11642 |
| | factor | |
| SARM1 | Sterile alpha and TIR motif containing 1 | SEQ ID NOS: 11643-11646 |
| SATB1 | SATB homeobox 1 | SEQ ID NOS: 11647-11659 |
| SAXO2 | Stabilizer of axonemal microtubules 2 | SEQ ID NOS: 11660-11664 |
| SBSN | Suprabasin | SEQ ID NOS: 11665-11667 |
| SBSPON | Somatomedin B and thrombospondin, type 1 | SEQ ID NO: 11668 |
| | domain containing | |
| SCARF1 | Scavenger receptor class F, member 1 | SEQ ID NOS: 11669-11673 |
| SCG2 | Secretogranin II | SEQ ID NOS: 11674-11676 |
| SCG3 | Secretogranin III | SEQ ID NOS: 11677-11679 |
| SCG5 | Secretogranin V | SEQ ID NOS: 11680-11684 |
| SCGB1A1 | Secretoglobin, family 1A, member 1 (uteroglobin) | SEQ ID NOS: 11685-11686 |
| SCGB1C1 | Secretoglobin, family 1C, member 1 | SEQ ID NO: 11687 |
| SCGB1C2 | Secretoglobin, family 1C, member 2 | SEQ ID NO: 11688 |
| SCGB1D1 | Secretoglobin, family 1D, member 1 | SEQ ID NO: 11689 |
| SCGB1D2 | Secretoglobin, family 1D, member 2 | SEQ ID NO: 11690 |
| SCGB1D4 | Secretoglobin, family 1D, member 4 | SEQ ID NO: 11691 |
| SCGB2A1 | Secretoglobin, family 2A, member 1 | SEQ ID NO: 11692 |
| SCGB2A2 | Secretoglobin, family 2A, member 2 | SEQ ID NOS: 11693-11694 |
| SCGB2B2 | Secretoglobin, family 2B, member 2 | SEQ ID NOS: 11695-11696 |
| SCGB3A1 | Secretoglobin, family 3A, member 1 | SEQ ID NO: 11697 |
| SCGB3A2 | Secretoglobin, family 3A, member 2 | SEQ ID NOS: 11698-11699 |
| SCN1B | Sodium channel, voltage gated, type I beta subunit | SEQ ID NOS: 11700-11705 |
| SCN3B | Sodium channel, voltage gated, type III beta | SEQ ID NOS: 11706-11710 |
| | subunit | |
| SCPEP1 | Serine carboxypeptidase 1 | SEQ ID NOS: 11711-11718 |
| SCRG1 | Stimulator of chondrogenesis 1 | SEQ ID NOS: 11719-11720 |
| SCT | Secretin | SEQ ID NO: 11721 |
| SCUBE1 | Signal peptide, CUB domain, EGF-like 1 | SEQ ID NOS: 11722-11725 |
| SCUBE2 | Signal peptide, CUB domain, EGF-like 2 | SEQ ID NOS: 11726-11732 |
| SCUBE3 | Signal peptide, CUB domain, EGF-like 3 | SEQ ID NO: 11733 |
| SDC1 | Syndecan 1 | SEQ ID NOS: 11734-11738 |
| SDF2 | Stromal cell-derived factor 2 | SEQ ID NOS: 11739-11741 |
| SDF2L1 | Stromal cell-derived factor 2-like 1 | SEQ ID NO: 11742 |
| SDF4 | Stromal cell derived factor 4 | SEQ ID NOS: 11743-11746 |
| SDHAF2 | Succinate dehydrogenase complex assembly factor | SEQ ID NOS: 11747-11754 |
| | 2 | |
| SDHAF4 | Succinate dehydrogenase complex assembly factor | SEQ ID NO: 11755 |
| | 4 | |
| SDHB | Succinate dehydrogenase complex, subunit B, iron | SEQ ID NOS: 11756-11758 |
| | sulfur (Ip) | |
| SDHD | Succinate dehydrogenase complex, subunit D, | SEQ ID NOS: 11759-11768 |
| | integral membrane protein | |
| SEC14L3 | SEC14-like lipid binding 3 | SEQ ID NOS: 11769-11775 |
| SEC16A | SEC16 homolog A, endoplasmic reticulum export | SEQ ID NOS: 11776-11782 |
| | factor | |
| SEC16B | SEC16 homolog B, endoplasmic reticulum export | SEQ ID NOS: 11783-11786 |
| | factor | |
| SEC22C | SEC22 homolog C, vesicle trafficking protein | SEQ ID NOS: 11787-11799 |
| SEC31A | SEC31 homolog A, COP1I coat complex | SEQ ID NOS: 11800-11829 |
| | component | |
| SECISBP2 | SECIS binding protein 2 | SEQ ID NOS: 11830-11834 |
| SECTM1 | Secreted and transmembrane 1 | SEQ ID NOS: 11835-11842 |
| SEL1L | Sel-1 suppressor of lin-12-like (C. elegans) | SEQ ID NOS: 11843-11845 |
| SEPT15 | 15 kDa selenoprotein | SEQ ID NOS: 11846-11852 |
| SELM | Selenoprotein M | SEQ ID NOS: 11853-11855 |
| SEPN1 | Selenoprotein N, 1 | SEQ ID NOS: 11856-11859 |
| SELO | Selenoprotein O | SEQ ID NOS: 11860-11861 |
| SEPP1 | Selenoprotein P, plasma, 1 | SEQ ID NOS: 11862-11867 |
| SEMA3A | Sema domain, immunoglobulin domain (Ig), short | SEQ ID NOS: 11868-11872 |
| | basic domain, secreted, (semaphorin) 3A | |
| SEMA3B | Sema domain, immunoglobulin domain (Ig), short | SEQ ID NOS: 11873-11879 |
| | basic domain, secreted, (semaphorin) 3B | |
| SEMA3C | Sema domain, immunoglobulin domain (Ig), short | SEQ ID NOS: 11880-11884 |
| | basic domain, secreted, (semaphorin) 3C | |
| SEMA3E | Sema domain, immunoglobulin domain (Ig), short | SEQ ID NOS: 11885-11889 |
| | basic domain, secreted, (semaphorin) 3E | |
| SEMA3F | Sema domain, immunoglobulin domain (Ig), short | SEQ ID NOS: 11890-11896 |
| | basic domain, secreted, (semaphorin) 3F | |
| SEMA3G | Sema domain, immunoglobulin domain (Ig), short | SEQ ID NOS: 11897-11899 |
| | basic domain, secreted, (semaphorin) 3G | |
| SEMA4A | Sema domain, immunoglobulin domain (Ig), | SEQ ID NOS: 11900-11908 |
| | transmembrane domain (TM) and short | |
| | cytoplasmic domain, (semaphorin) 4A | |
| SEMA4B | Sema domain, immunoglobulin domain (Ig), | SEQ ID NOS: 11909-11919 |
| | transmembrane domain (TM) and short | |
| | cytoplasmic domain, (semaphorin) 4B | |
| SEMA4C | Sema domain, immunoglobulin domain (Ig), | SEQ ID NOS: 11920-11922 |
| | transmembrane domain (TM) and short | |
| | cytoplasmic domain, (semaphorin) 4C | |
| SEMA4D | Sema domain, immunoglobulin domain (Ig), | SEQ ID NOS: 11923-11936 |
| | transmembrane domain (TM) and short | |
| | cytoplasmic domain, (semaphorin) 4D | |
| SEMA4F | Sema domain, immunoglobulin domain (Ig), | SEQ ID NOS: 11937-11945 |
| | transmembrane domain (TM) and short | |
| | cytoplasmic domain, (semaphorin) 4F | |
| SEMA4G | Sema domain, immunoglobulin domain (Ig), | SEQ ID NOS: 11946-11953 |
| | transmembrane domain (TM) and short | |
| | cytoplasmic domain, (semaphorin) 4G | |
| SEMA5A | Sema domain, seven thrombospondin repeats (type | SEQ ID NOS: 11954-11955 |
| | 1 and type 1-like), transmembrane domain (TM) | |
| | and short cytoplasmic domain, (semaphorin) 5A | |
| SEMA6A | Sema domain, transmembrane domain (TM), and | SEQ ID NOS: 11956-11963 |
| | cytoplasmic domain, (semaphorin) 6A | |
| SEMA6C | Sema domain, transmembrane domain (TM), and | SEQ ID NOS: 11964-11969 |
| | cytoplasmic domain, (semaphorin) 6C | |
| SEMA6D | Sema domain, transmembrane domain (TM), and | SEQ ID NOS: 11970-11983 |
| | cytoplasmic domain, (semaphorin) 6D | |
| SEMG1 | Semenogelin I | SEQ ID NO: 11984 |
| SEMG2 | Semenogelin II | SEQ ID NO: 11985 |
| SEPT9 | Septin 9 | SEQ ID NOS: 11986-12022 |
| SERPINA1 | Serpin peptidase inhibitor, clade A (alpha-1 | SEQ ID NOS: 12023-12039 |
| | antiproteinase, antitrypsin), member 1 | |
| SERPINA10 | Setpin peptidase inhibitor, clade A (alpha-1 | SEQ ID NOS: 12040-12043 |
| | antiprotcinasc, antitrypsin), member 10 | |
| SERPINA11 | Serpin peptidase inhibitor, clade A (alpha-1 | SEQ ID NO: 12044 |
| | anti proteinase, antitrypsin), member 11 | |
| SERPINA12 | Serpin peptidase inhibitor, clade A (alpha-1 | SEQ ID NOS: 12045-12046 |
| | antiproteinase, antitrypsin), member 12 | |
| SERPINA3 | Serpin peptidase inhibitor, clade A (alpha-1 | SEQ ID NOS: 12047-12053 |
| | antiproteinase, antitrypsin), member 3 | |
| SERPINA4 | Serpin peptidase inhibitor, clade A (alpha-1 | SEQ ID NOS: 12054-12056 |
| | antiproteinase, antitrypsin), member 4 | |
| SERPINA5 | Serpin peptidase inhibitor, clade A (alpha-1 | SEQ ID NOS: 12057-12068 |
| | antiproteinase, antitrypsin), member 5 | |
| SERPINA6 | Serpin peptidase inhibitor, clade A (alpha-1 | SEQ ID NOS: 12069-12071 |
| | antiproteinase, antitrypsin), member 6 | |
| SERPINA7 | Setpin peptidase inhibitor, clade A (alpha-1 | SEQ ID NOS: 12072-12073 |
| | antiproteinase, antitrypsin), member 7 | |
| SERPINA9 | Serpin peptidase inhibitor, clade A (alpha-1 | SEQ ID NOS: 12074-12080 |
| | antiproteinase, antitrypsin), member 9 | |
| SERPINB2 | Serpin peptidase inhibitor, clade B (ovalbumin), | SEQ ID NOS: 12081-12085 |
| | member 2 | |
| SERPINC1 | Serpin peptidase inhibitor, clade C (antithrombin), | SEQ ID NOS: 12086-12087 |
| | member 1 | |
| SERPIND1 | Serpin peptidase inhibitor, clade D (heparin | SEQ ID NOS: 12088-12089 |
| | cofactor), member 1 | |
| SERPINE1 | Serpin peptidase inhibitor, clade E (nexin, | SEQ ID NO: 12090 |
| | plasminogen activator inhibitor type 1), member 1 | |
| SERPINE2 | Serpin peptidase inhibitor, clade E (nexin, | SEQ ID NOS: 12091-12097 |
| | plasminogen activator inhibitor type 1), member 2 | |
| SERPINE3 | Serpin peptidase inhibitor, clade E (nexin, | SEQ ID NOS: 12098-12101 |
| | plasminogen activator inhibitor type 1), member 3 | |
| SERPINF1 | Serpin peptidase inhibitor, clade F (alpha-2 | SEQ ID NOS: 12102-12110 |
| | antiplasmin, pigment epithelium derived factor), | |
| | member 1 | |
| SERPINF2 | Serpin peptidase inhibitor, clade F (alpha-2 | SEQ ID NOS: 12111-12115 |
| | antiplasmin, pigment epithelium derived factor), | |
| | member 2 | |
| SERPING1 | Serpin peptidase inhibitor, clade G (C1 inhibitor), | SEQ ID NOS: 12116-12126 |
| | member 1 | |
| SERPINH1 | Serpin peptidase inhibitor, clade H (heat shock | SEQ ID NOS: 12127-12141 |
| | protein 47), member 1, (collagen binding protein 1) | |
| SERPINI1 | Serpin peptidase inhibitor, clade I (neuroserpin), | SEQ ID NOS: 12142-12146 |
| | member 1 | |
| SERPINI2 | Serpin peptidase inhibitor, clade I (panepin), | SEQ ID NOS: 12147-12153 |
| | member 2 | |
| SEZ6L2 | Seizure related 6 homolog (mouse)-like 2 | SEQ ID NOS: 12154-12160 |
| SFRP1 | Secreted frizzled-related protein 1 | SEQ ID NOS: 12161-12162 |
| SFRP2 | Secreted frizzled-related protein 2 | SEQ ID NO: 12163 |
| SFRP4 | Secreted frizzled-related protein 4 | SEQ ID NOS: 12164-12165 |
| SFRP5 | Secreted frizzled-related protein 5 | SEQ ID NO: 12166 |
| SFTA2 | Surfactant associated 2 | SEQ ID NOS: 12167-12168 |
| SFTPA1 | Surfactant protein A1 | SEQ ID NOS: 12169-12173 |
| SFTPA2 | Surfactant protein A2 | SEQ ID NOS: 12174-12178 |
| SFTPB | Surfactant protein B | SEQ ID NOS: 12179-12183 |
| SFTPD | Surfactant protein D | SEQ ID NOS: 12184-12185 |
| SFXN5 | Sideroflexin 5 | SEQ ID NOS: 12186-12190 |
| SGCA | Sarcoglycan, alpha (50 kDa dystrophin-associated | SEQ ID NOS: 12191-12198 |
| | glycoprotein) | |
| SGSH | N-sulfoglucosamine sulfohydrolase | SEQ ID NOS: 12199-12207 |
| SH3RF3 | SH3 domain containing ring finger 3 | SEQ ID NO: 12208 |
| SHBG | Sex hormone-binding globulin | SEQ ID NOS: 12209-12227 |
| SHE | Src homology 2 domain containing E | SEQ ID NOS: 12228-12230 |
| SHH | Sonic hedgehog | SEQ ID NOS: 12231-12234 |
| SHKBP1 | SH3KBP1 binding protein 1 | SEQ ID NOS: 12235-12250 |
| SIAE | Sialic acid acetylesterase | SEQ ID NOS: 12251-12253 |
| SIDT2 | SID1 transmembrane family, member 2 | SEQ ID NOS: 12254-12263 |
| SIGLEC10 | Sialic acid binding Ig-like lectin 10 | SEQ ID NOS: 12264-12272 |
| SIGLEC6 | Sialic acid binding Ig-like lectin 6 | SEQ ID NOS: 12273-12278 |
| SIGLEC7 | Sialic acid binding Ig-like lectin 7 | SEQ ID NOS: 12279-12283 |
| SIGLECL1 | SIGLEC family like 1 | SEQ ID NOS: 12284-12289 |
| SIGMAR1 | Sigma non-opioid intracellular receptor 1 | SEQ ID NOS: 12290-12293 |
| SIL1 | SIL1 nucleotide exchange factor | SEQ ID NOS: 12294-12302 |
| SIRPB1 | Signal-regulatory protein beta 1 | SEQ ID NOS: 12303-12315 |
| SIRPD | Signal-regulatory protein delta | SEQ ID NOS: 12316-12318 |
| SLAMF1 | Signaling lymphocytic activation molecule family | SEQ ID NOS: 12319-12321 |
| | member 1 | |
| SLAMF7 | SLAM family member 7 | SEQ ID NOS: 12322-12330 |
| SLC10A3 | Solute carrier family 10, member 3 | SEQ ID NOS: 12331-12335 |
| SLC15A3 | Solute carrier family 15 (oligopeptide transporter), | SEQ ID NOS: 12336-12341 |
| | member 3 | |
| SLC25A14 | Solute carrier family 25 (mitochondrial carrier, | SEQ ID NOS: 12342-12348 |
| | brain), member 14 | |
| SLC25A25 | Solute carrier family 25 (mitochondrial carrier; | SEQ ID NOS: 12349-12355 |
| | phosphate carrier), member 25 | |
| SLC2A5 | Solute carrier family 2 (facilitated glucose/fructose | SEQ ID NOS: 12356-12364 |
| | transporter), member 5 | |
| SLC35E3 | Solute carrier family 35, member E3 | SEQ ID NOS: 12365-12366 |
| SLC39A10 | Solute carrier family 39 (zinc transporter), member | SEQ ID NOS: 12367-12373 |
| | 10 | |
| SLC39A14 | Solute carrier family 39 (zinc transporter), member | SEQ ID NOS: 12374-12384 |
| | 14 | |
| SLC39A4 | Solute carrier family 39 (zinc transporter), member | SEQ ID NOS: 12385-12387 |
| | 4 | |
| SLC39A5 | Solute carrier family 39 (zinc transporter), member | SEQ ID NOS: 12388-12394 |
| | 5 | |
| SLC3A1 | Solute carrier family 3 (amino acid transporter | SEQ ID NOS: 12395-12404 |
| | heavy chain), member 1 | |
| SLC51A | Solute carrier family 51, alpha subunit | SEQ ID NOS: 12405-12409 |
| SLC52A2 | Solute carrier family 52 (riboflavin transporter), | SEQ ID NOS: 12410-12420 |
| | member 2 | |
| SLC5A6 | Solute carrier family 5 (sodium/multivitamin and | SEQ ID NOS: 12421-12431 |
| | iodide cotransporter), member 6 | |
| SLC6A9 | Solute carrier family 6 (neurotransmitter | SEQ ID NOS: 12432-12439 |
| | transporter, glycine), member 9 | |
| SLC8A1 | Solute carrier family 8 (sodium/calcium | SEQ ID NOS: 12440-12451 |
| | exchanger), member 1 | |
| SLC8B1 | Solute carrier family 8 (sodium/lithium/calcium | SEQ ID NOS: 12452-12462 |
| | exchanger), member B1 | |
| SLC9A6 | Solute carrier family 9, subfamily A (NHE6, cation | SEQ ID NOS: 12463-12474 |
| | proton antiporter 6), member 6 | |
| SLCO1A2 | Solute carrier organic anion transporter family, | SEQ ID NOS: 12475-12488 |
| | member 1A2 | |
| SLIT1 | Slit guidance ligand 1 | SEQ ID NOS: 12489-12492 |
| SLIT2 | Slit guidance ligand 2 | SEQ ID NOS: 12493-12501 |
| SLIT3 | Slit guidance ligand 3 | SEQ ID NOS: 12502-12504 |
| SLITRK3 | SLIT and NTRK-like family, member 3 | SEQ ID NOS: 12505-12507 |
| SLPI | Secretory leukocyte peptidase inhibitor | SEQ ID NO: 12508 |
| SLTM | SAFB-like, transcription modulator | SEQ ID NOS: 12509-12522 |
| SLURP1 | Secreted LY6/PLAUR domain containing 1 | SEQ ID NO: 12523 |
| SMARCA2 | SWI/SNF related, matrix associated, actin | SEQ ID NOS: 12524-12571 |
| | dependent regulator of chromatin, subfamily a, | |
| | member 2 | |
| SMG6 | SMG6 nonsense mediated mRNA decay factor | SEQ ID NOS: 12572-12583 |
| SMIM7 | Small integral membrane protein 7 | SEQ ID NOS: 12584-12600 |
| SMOC1 | SPARC related modular calcium binding 1 | SEQ ID NOS: 12601-12602 |
| SMOC2 | SPARC related modular calcium binding 2 | SEQ ID NOS: 12603-12607 |
| SMPDL3A | Sphingomyelin phosphodiesterase, acid-like 3A | SEQ ID NOS: 12608-12609 |
| SMPDL3B | Sphingomyelin phosphodiesterase, acid-like 3B | SEQ ID NOS: 12610-12614 |
| SMR3A | Submaxillary gland androgen regulated protein 3A | SEQ ID NO: 12615 |
| SMR3B | Submaxillary gland androgen regulated protein 3B | SEQ ID NOS: 12616-12618 |
| SNED1 | Sushi, nidogen and EGF-like domains 1 | SEQ ID NOS: 12619-12625 |
| SNTB1 | Syntrophin, beta 1 (dystrophin-associated protein | SEQ ID NOS: 12626-12628 |
| | A1, 59 kDa, basic component 1) | |
| SNTB2 | Syntrophin, beta 2 (dystrophin-associated protein | SEQ ID NOS: 12629-12633 |
| | A1, 59 kDa, basic component 2) | |
| SNX14 | Sorting nexin 14 | SEQ ID NOS: 12634-12645 |
| SOD3 | Superoxide dismutase 3, extracellular | SEQ ID NOS: 12646-12647 |
| SOST | Sclerostin | SEQ ID NO: 12648 |
| SOSTDC1 | Sclerostin domain containing 1 | SEQ ID NOS: 12649-12650 |
| SOWAHA | Sosondowah ankyrin repeat domain family | SEQ ID NO: 12651 |
| | member A | |
| SPACA3 | Sperm acrosome associated 3 | SEQ ID NOS: 12652-12654 |
| SPACA4 | Sperm acrosome associated 4 | SEQ ID NO: 12655 |
| SPACA5 | Sperm acrosome associated 5 | SEQ ID NOS: 12656-12657 |
| SPACA5B | Sperm acrosome associated 5B | SEQ ID NO: 12658 |
| SPACA7 | Sperm acrosome associated 7 | SEQ ID NOS: 12659-12662 |
| SPAG11A | Sperm associated antigen 11A | SEQ ID NOS: 12663-12671 |
| SPAG11B | Sperm associated antigen 11B | SEQ ID NOS: 12672-12680 |
| SPARC | Secreted protein, acidic, cystcinc-rich (osteonectin) | SEQ ID NOS: 12681-12685 |
| SPARCL1 | SPARC-like 1 (hevin) | SEQ ID NOS: 12686-12695 |
| SPATA20 | Spermatogenesis associated 20 | SEQ ID NOS: 12696-12709 |
| SPESP1 | Sperm equatorial segment protein 1 | SEQ ID NO: 12710 |
| SPINK1 | Serine peptidase inhibitor, Kazal type 1 | SEQ ID NOS: 12711-12712 |
| SPINK13 | Serine peptidase inhibitor, Kazal type 13 (putative) | SEQ ID NOS: 12713-12715 |
| SPINK14 | Serine peptidase inhibitor, Kazal type 14 (putative) | SEQ ID NOS: 12716-12717 |
| SPINK2 | Serine peptidase inhibitor, Kazal type 2 (acrosin- | SEQ ID NOS: 12718-12723 |
| | trypsin inhibitor) | |
| SPINK4 | Serine peptidase inhibitor, Kazal type 4 | SEQ ID NOS: 12724-12725 |
| SPINK5 | Serine peptidase inhibitor, Kazal type 5 | SEQ ID NOS: 12726-12731 |
| SPINK6 | Serine peptidase inhibitor, Kazal type 6 | SEQ ID NOS: 12732-12734 |
| SPINK7 | Serine peptidase inhibitor, Kazal type 7 (putative) | SEQ ID NOS: 12735-12736 |
| SPINK8 | Serine peptidase inhibitor, Kazal type 8 (putative) | SEQ ID NO: 12737 |
| SPINK9 | Serine peptidase inhibitor, Kazal type 9 | SEQ ID NOS: 12738-12739 |
| SPINT1 | Serine peptidase inhibitor, Kunitz type 1 | SEQ ID NOS: 12740-12747 |
| SPINT2 | Serine peptidase inhibitor, Kunitz type, 2 | SEQ ID NOS: 12748-12755 |
| SPINT3 | Serine peptidase inhibitor, Kunitz type, 3 | SEQ ID NO: 12756 |
| SPINT4 | Serine peptidase inhibitor, Kunitz type 4 | SEQ ID NO: 12757 |
| SPOCK1 | Sparc/osteonectin, cwcv and kazal-like domains | SEQ ID NOS: 12758-12761 |
| | proteoglycan (testican) 1 | |
| SPOCK2 | Sparc/osteonectin, cwcv and kazal-like domains | SEQ ID NOS: 12762-12765 |
| | proteoglycan (testican) 2 | |
| SPOCK3 | Sparc/osteonectin, cwcv and kazal-like domains | SEQ ID NOS: 12766-12791 |
| | proteoglycan (testican) 3 | |
| SPON1 | Spondin 1, extracellular matrix protein | SEQ ID NO: 12792 |
| SPON2 | Spondin 2, extracellular matrix protein | SEQ ID NOS: 12793-12802 |
| SPP1 | Secreted phosphoprotein 1 | SEQ ID NOS: 12803-12807 |
| SPP2 | Secreted phosphoprotein 2, 24 kDa | SEQ ID NOS: 12808-12810 |
| SPRN | Shadow of prion protein homolog (zebrafish) | SEQ ID NO: 12811 |
| SPRYD3 | SPRY domain containing 3 | SEQ ID NOS: 12812-12815 |
| SPRYD4 | SPRY domain containing 4 | SEQ ID NO: 12816 |
| SPTY2D1- | SPTY2D1 antisense RNA 1 | SEQ ID NOS: 12817-12822 |
| AS1 | | |
| SPX | Spexin hormone | SEQ ID NOS: 12823-12824 |
| SRGN | Serglycin | SEQ ID NO: 12825 |
| SRL | Sarcalumenin | SEQ ID NOS: 12826-12828 |
| SRP14 | Signal recognition particle 14 kDa (homologous | SEQ ID NOS: 12829-12832 |
| | Alu RNA binding protein) | |
| SRPX | Sushi-repeat containing protein, X-linked | SEQ ID NOS: 12833-12836 |
| SRPX2 | Sushi-repeat containing protein, X-linked 2 | SEQ ID NOS: 12837-12840 |
| SSC4D | Scavenger receptor cysteine rich family, 4 domains | SEQ ID NO: 12841 |
| SSC5D | Scavenger receptor cysteine rich family, 5 domains | SEQ ID NOS: 12842-12845 |
| SSPO | SCO-spondin | SEQ ID NO: 12846 |
| SSR2 | Signal sequence receptor, beta (translocon- | SEQ ID NOS: 12847-12856 |
| | associated protein beta) | |
| SST | Somatostatin | SEQ ID NO: 12857 |
| ST3GAL1 | ST3 beta-galactoside alpha-2,3-sialyltransferase 1 | SEQ ID NOS: 12858-12865 |
| ST3GAL4 | ST3 beta-galactoside alpha-2,3-sialyltransferase 4 | SEQ ID NOS: 12866-12881 |
| ST6GAL1 | ST6 beta-galactosamide alpha-2,6-sialyltranferase 1 | SEQ ID NOS: 12882-12897 |
| ST6GALNAC2 | ST6 (alpha-N-acetyl-neuraminyl-2,3-beta- | SEQ ID NOS: 12898-12902 |
| | galactosvl-1,3)-N-acetylgalactosaminide alpha-2,6- | |
| | sialyltransferase 2 | |
| ST6GALNAC5 | ST6 (alpha-N-acetyl-neuraminyl-2,3-beta- | SEQ ID NOS: 12903-12904 |
| | galactosyl-1,3)-N-acetylgalactosaminide alpha-2,6- | |
| | sialyltransferase 5 | |
| ST6GALNAC6 | ST6 (alpha-N-acetyl-neuraminyl-2,3-beta- | SEQ ID NOS: 12905-12912 |
| | galactosyl-1,3)-N-acelylgalaclosaminide alpha-2,6- | |
| | sialyltransferase 6 | |
| ST8SIA2 | ST8 alpha-N-acetyl-neuraminide alpha-2,8- | SEQ ID NOS: 12913-12915 |
| | sialyltransferase 2 | |
| ST8SIA4 | ST8 alpha-N-acetyl-neuraminide alpha-2,8- | SEQ ID NOS: 12916-12918 |
| | sialyltransferase 4 | |
| ST8SIA6 | ST8 alpha-N-acetyl-neuraminide alpha-2,8- | SEQ ID NOS: 12919-12920 |
| | sialyltransferase 6 | |
| STARD7 | StAR-related lipid transfer (START) domain | SEQ ID NOS: 12921-12922 |
| | containing 7 | |
| STATH | Statherin | SEQ ID NOS: 12923-12925 |
| STC1 | Stanniocalcin 1 | SEQ ID NOS: 12926-12927 |
| STC2 | Stanniocalcin 2 | SEQ ID NOS: 12928-12930 |
| STMND1 | Stathmin domain containing 1 | SEQ ID NOS: 12931-12932 |
| C7orf73 | Chromosome 7 open reading frame 73 | SEQ ID NOS: 12933-12934 |
| STOML2 | Stomatin (EPB72)-like 2 | SEQ ID NOS: 12935-12938 |
| STOX1 | Storkhead box 1 | SEQ ID NOS: 12939-12943 |
| STRC | Stereocilin | SEQ ID NOS: 12944-12949 |
| SUCLG1 | Succinate-CoA ligase, alpha subunit | SEQ ID NOS: 12950-12951 |
| SUDS3 | SDS3 homolog, SIN3A corepressor complex | SEQ ID NO: 12952 |
| | component | |
| SULF1 | Sulfatase 1 | SEQ ID NOS: 12953-12963 |
| SULF2 | Sulfatase 2 | SEQ ID NOS: 12964-12968 |
| SUMF1 | Sulfatase modifying factor 1 | SEQ ID NOS: 12969-12973 |
| SUMF2 | Sulfatase modifying factor 2 | SEQ ID NOS: 12974-12987 |
| SUSD1 | Sushi domain containing 1 | SEQ ID NOS: 12988-12993 |
| SUSD5 | Sushi domain containing 5 | SEQ ID NOS: 12994-12995 |
| SVEP1 | Sushi, von Willebrand factor type A, EGF and | SEQ ID NOS: 12996-12998 |
| | pentraxin domain containing 1 | |
| SWSAP1 | SWIM-type zinc finger 7 associated protein 1 | SEQ ID NO: 12999 |
| SYAP1 | Synapse associated protein 1 | SEQ ID NO: 13000 |
| SYCN | Syncoilin | SEQ ID NO: 13001 |
| TAC1 | Tachykinin, precursor 1 | SEQ ID NOS: 13002-13004 |
| TAC3 | Tachykinin 3 | SEQ ID NOS: 13005-13014 |
| TAC4 | Tachykinin 4 (hemokinin) | SEQ ID NOS: 13015-13020 |
| TAGLN2 | Transgelin 2 | SEQ ID NOS: 13021-13024 |
| TAPBP | TAP binding protein (tapasin) | SEQ ID NOS: 13025-13030 |
| TAPBPL | TAP binding protein-like | SEQ ID NOS: 13031-13032 |
| TBL2 | Transducin (beta)-like 2 | SEQ ID NOS: 13033-13045 |
| TBX10 | T-box 10 | SEQ ID NO: 13046 |
| TCF12 | Transcription factor 12 | SEQ ID NOS: 13047-13060 |
| TCN1 | Transcobalamin I (vitamin B12, binding protein, R | SEQ ID NO: 13061 |
| | binder family) | |
| TCN2 | Transcobalamin II | SEQ ID NOS: 13062-13065 |
| TCTN1 | Tectonic family member 1 | SEQ ID NOS: 13066-13084 |
| TCTN3 | Tectonic family member 3 | SEQ ID NOS: 13085-13089 |
| TDP2 | Tyrosyl-DNA phosphodiesterase 2 | SEQ ID NOS: 13090-13091 |
| C14orf80 | Chromosome 14 open reading frame 80 | SEQ ID NOS: 13092-13105 |
| TEK | TEK tyrosine kinase, endothelial | SEQ ID NOS: 13106-13110 |
| TEPP | Testis, prostate and placenta expressed | SEQ ID NOS: 13111-13112 |
| TEX101 | Testis expressed 101 | SEQ ID NOS: 13113-13114 |
| TEX264 | Testis expressed 264 | SEQ ID NOS: 13115-13126 |
| C1orf234 | Chromosome 1 open reading frame 234 | SEQ ID NOS: 13127-13129 |
| TF | Transferrin | SEQ ID NOS: 13130-13136 |
| TFAM | Transcription factor A, mitochondrial | SEQ ID NOS: 13137-13139 |
| TFF1 | Trefoil factor 1 | SEQ ID NO: 13140 |
| TFF2 | Trefoil factor 2 | SEQ ID NO: 13141 |
| TFF3 | Trefoil factor 3 (intestinal) | SEQ ID NOS: 13142-13144 |
| TFPI | Tissue factor pathway inhibitor (lipoprotein- | SEQ ID NOS: 13145-13154 |
| | associated coagulation inhibitor) | |
| TFPI2 | Tissue factor pathway inhibitor 2 | SEQ ID NOS: 13155-13156 |
| TG | Thyroglobulin | SEQ ID NOS: 13157-13166 |
| TGFB1 | Transforming growth factor, beta 1 | SEQ ID NOS: 13167-13168 |
| TGFB2 | Transforming growth factor, beta 2 | SEQ ID NOS: 13169-13170 |
| TGFB3 | Transforming growth factor, beta 3 | SEQ ID NOS: 13171-13172 |
| TGFBI | Transforming growth factor, beta-induced, 68 kDa | SEQ ID NOS: 13173-13180 |
| TGFBR1 | Transforming growth factor, beta receptor III | SEQ ID NOS: 13181-13190 |
| TGFBR3 | Transforming growth factor, beta receptor III | SEQ ID NOS: 13191-13197 |
| THBS1 | Thrombospondin 1 | SEQ ED NOS: 13198-13199 |
| THBS2 | Thrombospondin 2 | SEQ ID NOS: 13200-13202 |
| THBS3 | Thrombospondin 3 | SEQ ID NOS: 13203-13207 |
| THBS4 | Thrombospondin 4 | SEQ ID NOS: 13208-13209 |
| THOC3 | THO complex 3 | SEQ ID NOS: 13210-13219 |
| THPO | Thrombopoietin | SEQ ID NOS: 13220-13225 |
| THSD4 | Thrombospondin, type I, domain containing 4 | SEQ ID NOS: 13226-13229 |
| THY1 | Thy-1 cell surface antigen | SEQ ID NOS: 13230-13235 |
| TIE1 | Tyrosine kinase with immunoglobulin-like and | SEQ ID NOS: 13236-13237 |
| | EGF-like domains 1 | |
| TIMMDC1 | Translocase of inner mitochondrial membrane | SEQ ID NOS: 13238-13245 |
| | domain containing 1 | |
| TIMP1 | TIMP metallopeptidase inhibitor 1 | SEQ ID NOS: 13246-13250 |
| TIMP2 | TIMP metallopeptidase inhibitor 2 | SEQ ID NOS: 13251-13255 |
| TIMP3 | TIMP metallopeptidase inhibitor 3 | SEQ ID NO: 13256 |
| TIMP4 | TIMP metallopeptidase inhibitor 4 | SEQ ID NO: 13257 |
| TINAGL1 | Tubulointerstitial nephritis antigen-like 1 | SEQ ID NOS: 13258-13260 |
| TINF2 | TERF1 (TRF1)-interacting nuclear factor 2 | SEQ ID NOS: 13261-13270 |
| TLL2 | Tolloid-like 2 | SEQ ID NO: 13271 |
| TLR1 | Toll-like receptor 1 | SEQ ID NOS: 13272-13277 |
| TLR3 | Toll-like receptor 3 | SEQ ID NOS: 13278-13280 |
| TM2D2 | TM2 domain containing 2 | SEQ ID NOS: 13281-13286 |
| TM2D3 | TM2 domain containing 3 | SEQ ID NOS: 13287-13294 |
| TM7SF3 | Transmembrane 7 superfamily member 3 | SEQ ID NOS: 13295-13309 |
| TM9SF1 | Transmembrane 9 superfamily member 1 | SEQ ID NOS: 13310-13320 |
| TMCO6 | Transmembrane and coiled-coil domains 6 | SEQ ID NOS: 13321-13328 |
| TMED1 | Transmembrane p24 trafficking protein 1 | SEQ ID NOS: 13329-13335 |
| TMED2 | Transmembrane p24 trafficking protein 2 | SEQ ID NOS: 13336-13338 |
| TMED3 | Transmembrane p24 trafficking protein 3 | SEQ ID NOS: 13339-13342 |
| TMED4 | Transmembrane p24 trafficking protein 4 | SEQ ID NOS: 13343-13345 |
| TMED5 | Transmembrane p24 trafficking protein 5 | SEQ ID NOS: 13346-13349 |
| TMED7 | Transmembrane p24 trafficking protein 7 | SEQ ID NOS: 13350-13351 |
| TMED7- | TMED7-TICAM2 readthrough | SEQ ID NOS: 13352-13353 |
| TICAM2 | | |
| TMEM108 | Transmembrane protein 108 | SEQ ID NOS: 13354-13362 |
| TMEM116 | Transmembrane protein 116 | SEQ ID NOS: 13363-13374 |
| TMEM119 | Transmembrane protein 119 | SEQ ID NOS: 13375-13378 |
| TMEM155 | Transmembrane protein 155 | SEQ ID NOS: 13379-13382 |
| TMEM168 | Transmembrane protein 168 | SEQ ID NOS: 13383-13388 |
| TMEM178A | Transmembrane protein 178A | SEQ ID NOS: 13389-13390 |
| TMEM179 | Transmembrane protein 179 | SEQ ID NOS: 13391-13396 |
| TMEM196 | Transmembrane protein 196 | SEQ ID NOS: 13397-13401 |
| TMEM199 | Transmembrane protein 199 | SEQ ID NOS: 13402-13405 |
| TMEM205 | Transmembrane protein 205 | SEQ ID NOS: 13406-13419 |
| TMEM213 | Transmembrane protein 213 | SEQ ID NOS: 13420-13423 |
| TMEM25 | Transmembrane protein 25 | SEQ ID NOS: 13424-13440 |
| TMEM30C | Transmembrane protein 30C | SEQ ID NO: 13441 |
| TMEM38B | Transmembrane protein 38B | SEQ ID NOS: 13442-13446 |
| TMEM44 | Transmembrane protein 44 | SEQ ID NOS: 13447-13456 |
| TMEM52 | Transmembrane protein 52 | SEQ ID NOS: 13457-13461 |
| TMEM52B | Transmembrane protein 52B | SEQ ID NOS: 13462-13464 |
| TMEM59 | Transmembrane protein 59 | SEQ ID NOS: 13465-13472 |
| TMEM67 | Transmembrane protein 67 | SEQ ID NOS: 13473-13484 |
| TMEM70 | Transmembrane protein 70 | SEQ ID NOS: 13485-13487 |
| TMEM87A | Transmembrane protein 87A | SEQ ID NOS: 13488-13497 |
| TMEM94 | Transmembrane protein 94 | SEQ ID NOS: 13498-13513 |
| TMEM95 | Transmembrane protein 95 | SEQ ID NOS: 13514-13516 |
| TMIGD1 | Transmembrane and immunoglobulin domain | SEQ ID NOS: 13517-13518 |
| | containing 1 | |
| TMPRSS12 | Transmembrane (C-terminal) protease, serine 12 | SEQ ID NOS: 13519-13520 |
| TMPRSS5 | Transmembrane protease, serine 5 | SEQ ID NOS: 13521-13532 |
| TMUB1 | Transmembrane and ubiquitin-like domain | SEQ ID NOS: 13533-13539 |
| | containing 1 | |
| TMX2 | Thioredoxin-related transmembrane protein 2 | SEQ ID NOS: 13540-13547 |
| TMX3 | Thioredoxin-related transmembrane protein 3 | SEQ ID NOS: 13548-13555 |
| TNC | Tenascin C | SEQ ID NOS: 13556-13564 |
| TNFAIP6 | Tumor necrosis factor, alpha-induced protein 6 | SEQ ID NO: 13565 |
| TNFRSF11A | Tumor necrosis factor receptor superfamily, | SEQ ID NOS: 13566-13570 |
| | member 11a, NFKB activator | |
| TNFRSF11B | Tumor necrosis factor receptor superfamily, | SEQ ID NOS: 13571-13572 |
| | member 11b | |
| TNFRSF12A | Tumor necrosis factor receptor superfamily, | SEQ ID NOS: 13573-13578 |
| | member 12A | |
| TNFRSF14 | Tumor necrosis factor receptor superfamily, | SEQ ID NOS: 13579-13585 |
| | member 14 | |
| TNFRSF18 | Tumor necrosis factor receptor superfamily, | SEQ ID NOS: 13586-13589 |
| | member 18 | |
| TNFRSF1A | Tumor necrosis factor receptor superfamily, | SEQ ID NOS: 13590-13598 |
| | member 1A | |
| TNFRSF1B | Tumor necrosis factor receptor superfamily, | SEQ ID NOS: 13599-13600 |
| | member 1B | |
| TNFRSF25 | Tumor necrosis factor receptor superfamily, | SEQ ID NOS: 13601-13612 |
| | member 25 | |
| TNFRSF6B | Tumor necrosis factor receptor superfamily, | SEQ ID NO: 13613 |
| | member 6b, decoy | |
| TNFSF11 | Tumor necrosis factor (ligand) superfamily, | SEQ ID NOS: 13614-13618 |
| | member 11 | |
| TNFSF12 | Tumor necrosis factor (ligand) superfamily, | SEQ ID NOS: 13619-13620 |
| | member 12, | |
| TNFSF12- | TNFSF12-TNFSF13 readthrough | SEQ ID NO: 13621 |
| TNFSF13 | | |
| TNFSF15 | Tumor necrosis factor (ligand) superfamily, | SEQ ID NOS: 13622-13623 |
| | member 15 | |
| TNN | Tenascin N | SEQ ID NOS: 13624-13626 |
| TNR | Tenascin R | SEQ ID NOS: 13627-13629 |
| TNXB | Tenascin XB | SEQ ID NOS: 13630-13636 |
| FAM179B | Family with sequence similarity 179, member B | SEQ ID NOS: 13637-13642 |
| TOMM7 | Translocase of outer mitochondrial membrane 7 | SEQ ID NOS: 13643-13646 |
| | homolog (yeast) | |
| TOP1MT | Topoisomerase (DMA) I, mitochondrial | SEQ ID NOS: 13647-13661 |
| TOR1A | Torsin family 1, member A (torsin A) | SEQ ID NO: 13662 |
| TOR1B | Torsin family 1, member B (torsin B) | SEQ ID NOS: 13663-13664 |
| TOR2A | Torsin family 2, member A | SEQ ID NOS: 13665-13671 |
| TOR3A | Torsin family 3, member A | SEQ ID NOS: 13672-13676 |
| TPD52 | Tumor protein D52 | SEQ ID NOS: 13677-13689 |
| TPO | Thyroid peroxidase | SEQ ID NOS: 13690-13700 |
| TPP1 | Tripeptidyl peptidase I | SEQ ID NOS: 13701-13718 |
| TPSAB1 | Tryptase alpha/beta 1 | SEQ ID NOS: 13719-13721 |
| TPSB2 | Tryptase beta 2 (gene/pseudogene) | SEQ ID NOS: 13722-13724 |
| TPSD1 | Tryptase delta 1 | SEQ ID NOS: 13725-13726 |
| TPST1 | Tyrosylprotein sulfotransferase 1 | SEQ ID NOS: 13727-13729 |
| TPST2 | Tyrosylprotein sulfotransferase 2 | SEQ ID NOS: 13730-13738 |
| TRABD2A | TraB domain containing 2A | SEQ ID NOS: 13739-13741 |
| TRABD2B | TraB domain containing 2B | SEQ ID NO: 13742 |
| TREH | Trehalase (brush-border membrane glycoprotein) | SEQ ID NOS: 13743-13745 |
| TREM1 | Triggering receptor expressed on myeloid cells 1 | SEQ ID NOS: 13746-13749 |
| TREM2 | Triggering receptor expressed on myeloid cells 2 | SEQ ID NOS: 13750-13752 |
| TRH | Thyrotropin-releasing hormone | SEQ ID NOS: 13753-13754 |
| TRIM24 | Tripartite motif containing 24 | SEQ ID NOS: 13755-13756 |
| TRIM28 | Tripartite motif containing 28 | SEQ ID NOS: 13757-13762 |
| TRIO | Trio Rho guanine nucleotide exchange factor | SEQ ID NOS: 13763-13769 |
| TRNP1 | TMF1-regulated nuclear protein 1 | SEQ ID NOS: 13770-13771 |
| TSC22D4 | TSC22 domain family, member 4 | SEQ ID NOS: 13772-13775 |
| TSHB | Thyroid stimulating hormone, beta | SEQ ID NOS: 13776-13777 |
| TSHR | Thyroid stimulating hormone receptor | SEQ ID NOS: 13778-13785 |
| TSKU | Tsukushi, small leucine rich proteoglycan | SEQ ID NOS: 13786-13790 |
| TSLP | Thymic stromal lymphopoietin | SEQ ID NOS: 13791-13793 |
| TSPAN3 | Tetraspanin 3 | SEQ ID NOS: 13794-13799 |
| TSPAN31 | Tetraspanin 31 | SEQ ID NOS: 13800-13806 |
| TSPEAR | Thrombospondin-type laminin G domain and EAR | SEQ ID NOS: 13807-13810 |
| | repeats | |
| TTC13 | Tetratricopeptide repeat domain 13 | SEQ ID NOS: 13811-13817 |
| TTC19 | Tetratricopeptide repeat domain 19 | SEQ ID NOS: 13818-13823 |
| TTC9B | Tetratricopeptide repeat domain 9B | SEQ ID NO: 13824 |
| TTLL11 | Tubulin tyrosine ligase-like family member 11 | SEQ ID NOS: 13825-13829 |
| TTR | Transthyretin | SEQ ID NOS: 13830-13832 |
| TWSG1 | Twisted gastrulation BMP signaling modulator 1 | SEQ ID NOS: 13833-13835 |
| TXNDC12 | Thioredoxin domain containing 12 (endoplasmic | SEQ ID NOS: 13836-13838 |
| | reticulum) | |
| TXNDC15 | Thioredoxin domain containing 15 | SEQ ID NOS: 13839-13845 |
| TXNDC5 | Thioredoxin domain containing 5 (endoplasmic | SEQ ID NOS: 13846-13847 |
| | reticulum) | |
| TXNRD2 | Thioredoxin reductase 2 | SEQ ID NOS: 13848-13860 |
| TYRP1 | Tyrosinase-related protein 1 | SEQ ID NOS: 13861-13863 |
| UBAC2 | UBA domain containing 2 | SEQ ID NOS: 13864-13868 |
| UBALD1 | UBA-like domain containing 1 | SEQ ID NOS: 13869-13877 |
| UBAP2 | Ubiquitin associated protein 2 | SEQ ID NOS: 13878-13884 |
| UBXN8 | UBX domain protein 8 | SEQ ID NOS: 13885-13891 |
| UCMA | Upper zone of growth plate and cartilage matrix | SEQ ID NOS: 13892-13893 |
| | associated | |
| UCN | Urocortin | SEQ ID NO: 13894 |
| UCN2 | Urocortin 2 | SEQ ID NO: 13895 |
| UCN3 | Urocortin 3 | SEQ ID NO: 13896 |
| UGGT2 | UDP-glucose glycoprotein glucosyltransferase 2 | SEQ ID NOS: 13897-13902 |
| UGT1A10 | UDP glucuronosyltransferase 1 family, polypeptide | SEQ ID NOS: 13903-13904 |
| | A10 | |
| UGT2A1 | UDP glucuronosyltransferase 2 family, polypeptide | SEQ ID NOS: 13905-13909 |
| | A1, complex locus | |
| UGT2B11 | UDP glucuronosyltransferase 2 family, polypeptide | SEQ ID NO: 13910 |
| | B11 | |
| UGT2B28 | UDP glucuronosyltransferase 2 family, polypeptide | SEQ ID NOS: 13911-13912 |
| | B28 | |
| UGT2B4 | UDP glucuronosyltransferase 2 family, polypeptide | SEQ ID NOS: 13913-13916 |
| | B4 | |
| UGT2B7 | UDP glucuronosyltransferase 2 family, polypeptide | SEQ ID NOS: 13917-13920 |
| | B7 | |
| UGT3A1 | UDP glycosyltransferase 3 family, polypeptide A1 | SEQ ID NOS: 13921-13926 |
| UGT3A2 | UDP glycosyltransferase 3 family, polypeptide A2 | SEQ ID NOS: 13927-13930 |
| UGT8 | UDP glycosyltransfcrasc 8 | SEQ ID NOS: 13931-13933 |
| ULBP3 | UL16 binding protein 3 | SEQ ID NOS: 13934-13935 |
| UMOD | Uromodulin | SEQ ID NOS: 13936-13947 |
| UNC5C | Unc-5 netrin receptor C | SEQ ID NOS: 13948-13952 |
| UPK3B | Uroplakin 3B | SEQ ID NOS: 13953-13955 |
| USP11 | Ubiquitin specific peptidase 11 | SEQ ID NOS: 13956-13959 |
| USP14 | Ubiquitin specific peptidase 14 (tRNA-guanine | SEQ ID NOS: 13960-13966 |
| | transglycosylase) | |
| USP3 | Ubiquitin specific peptidase 3 | SEQ ID NOS: 13967-13982 |
| CIRH1A | Cirrhosis, autosomal recessive 1A (cirhin) | SEQ ID NOS: 13983-13992 |
| UTS2 | Urotensin 2 | SEQ ID NOS: 13993-13995 |
| UTS2B | Urotensin 2B | SEQ ID NOS: 13996-14001 |
| UTY | Ubiquitously transcribed tetratricopeptide repeat | SEQ ID NOS: 14002-14014 |
| | containing. Y-linked | |
| UXS1 | UDP-glucuronate decarboxylase 1 | SEQ ID NOS: 14015-14022 |
| VASH1 | Vasohibin 1 | SEQ ID NOS: 14023-14025 |
| VCAN | Versican | SEQ ID NOS: 14026-14032 |
| VEGFA | Vascular endothelial growth factor A | SEQ ID NOS: 14033-14058 |
| VEGFB | Vascular endothelial growth factor B | SEQ ID NOS: 14059-14061 |
| VEGFC | Vascular endothelial growth factor C | SEQ ID NO: 14062 |
| FIGF | C-fos induced growth factor (vascular endothelial | SEQ ID NO: 14063 |
| | growth factor D) | |
| VGF | VGF nerve growth factor inducible | SEQ ID NOS: 14064-14066 |
| VIP | Vasoactive intestinal peptide | SEQ ID NOS: 14067-14069 |
| VIPR2 | Vasoactive intestinal peptide receptor 2 | SEQ ID NOS: 14070-14073 |
| VIT | Vitrin | SEQ ID NOS: 14074-14081 |
| VKORC1 | Vitamin K epoxide reductase complex, subunit 1 | SEQ ID NOS: 14082-14089 |
| VLDLR | Very low density lipoprotein receptor | SEQ ID NOS: 14090-14092 |
| VMO1 | Vitelline membrane outer layer 1 homolog | SEQ ID NOS: 14093-14096 |
| | (chicken) | |
| VNN1 | Vanin 1 | SEQ ID NO: 14097 |
| VNN2 | Vanin 2 | SEQ ID NOS: 14098-14111 |
| VNN3 | Vanin 3 | SEQ ID NOS: 14112-14123 |
| VOPP1 | Vesicular, overexpressed in cancer, prosurvival | SEQ ID NOS: 14124-14136 |
| | protein 1 | |
| VPREB1 | Pre-B lymphocyte 1 | SEQ ID NOS: 14137-14138 |
| VPREB3 | Pre-B lymphocyte 3 | SEQ ID NOS: 14139-14140 |
| VPS37B | Vacuolar protein sorting 37 homolog B | SEQ ID NOS: 14141-14143 |
| | (S. cerevisiae) | |
| VPS51 | Vacuolar protein sorting 51 homolog | SEQ ID NOS: 14144-14155 |
| | (S. cerevisiae) | |
| VSIG1 | V-set and immunoglobulin domain containing 1 | SEQ ID NOS: 14156-14158 |
| VSIG10 | V-set and immunoglobulin domain containing 10 | SEQ ID NOS: 14159-14160 |
| VSTM1 | V-set and transmembrane domain containing 1 | SEQ ID NOS: 14161-14167 |
| VSTM2A | V-set and transmembrane domain containing 2A | SEQ ID NOS: 14168-14171 |
| VSTM2B | V-set and transmembrane domain containing 2B | SEQ ID NO: 14172 |
| VSTM2L | V-set and transmembrane domain containing 2 like | SEQ ID NOS: 14173-14175 |
| VSTM4 | V-set and transmembrane domain containing 4 | SEQ ID NOS: 14176-14177 |
| VTN | Vitronectin | SEQ ID NOS: 14178-14179 |
| VWA1 | Von Willebrand factor A domain containing 1 | SEQ ID NOS: 14180-14183 |
| VWA2 | Von Willebrand factor A domain containing 2 | SEQ ID NOS: 14184-14185 |
| VWA5B2 | Von Willebrand factor A domain containing 5B2 | SEQ ID NOS: 14186-14187 |
| VWA7 | Von Willebrand factor A domain containing 7 | SEQ ID NO: 14188 |
| VWC2 | Von Willebrand factor C domain containing 2 | SEQ ED NO: 14189 |
| VWC2L | Von Willebrand factor C domain containing | SEQ ID NOS: 14190-14191 |
| | protein 2-like | |
| VWCE | Von Willebrand factor C and EGF domains | SEQ ID NOS: 14192-14196 |
| VWDE | Von Willebrand factor D and EGF domains | SEQ ID NOS: 14197-14202 |
| VWF | Von Willebrand factor | SEQ ID NOS: 14203-14205 |
| WDR25 | WD repeat domain 25 | SEQ ID NOS: 14206-14212 |
| WDR81 | WD repeat domain 81 | SEQ ID NOS: 14213-14222 |
| WDR90 | WD repeat domain 90 | SEQ ID NOS: 14223-14230 |
| WFDC1 | WAP four-disulfide core domain 1 | SEQ ID NOS: 14231-14233 |
| WFDC10A | WAP four-disulfide core domain 10A | SEQ ID NO: 14234 |
| WFDC10B | WAP four-disulfide core domain 10B | SEQ ID NOS: 14235-14236 |
| WFDC11 | WAP four-disulfide core domain 11 | SEQ ID NOS: 14237-14239 |
| WFDC12 | WAP four-disulfide core domain 12 | SEQ ID NO: 14240 |
| WFDC13 | WAP four-disulfide core domain 13 | SEQ ID NO: 14241 |
| WFDC2 | WAP four-disulfide core domain 2 | SEQ ID NOS: 14242-14246 |
| WFDC3 | WAP four-disulfide core domain 3 | SEQ ID NOS: 14247-14250 |
| WFDC5 | WAP four-disulfide core domain 5 | SEQ ID NOS: 14251-14252 |
| WFDC6 | WAP four-disulfide core domain 6 | SEQ ID NOS: 14253-14254 |
| WFDC8 | WAP four-disulfide core domain 8 | SEQ ID NOS: 14255-14256 |
| WFIKKN1 | WAP, follistatin/kazal, immunoglobulin, kunitz | SEQ ID NO: 14257 |
| | and netrin domain containing 1 | |
| WFIKKN2 | WAP, follistatin/kazal, immunoglobulin, kunitz | SEQ ID NOS: 14258-14259 |
| | and netrin domain containing 2 | |
| DFNB31 | Deafness, autosomal recessive 31 | SEQ ID NOS: 14260-14263 |
| WIF1 | WNT inhibitory fac tor I | SEQ ID NOS: 14264-14266 |
| WISP1 | WNT1 inducible signaling pathway protein 1 | SEQ ID NOS: 14267-14271 |
| WISP2 | WNT1 inducible signaling pathway protein 2 | SEQ ID NOS: 14272-14274 |
| WISP3 | WNT1 inducible signaling pathway protein 3 | SEQ ID NOS: 14275-14282 |
| WNK1 | WNK lysine deficient protein kinase 1 | SEQ ID NOS: 14283-14296 |
| WNT1 | Wingless-type MMTV integration site family, | SEQ ID NOS: 14297-14298 |
| | member 1 | |
| WNT10B | Wingless-tvpe MMTV integration site family, | SEQ ID NOS: 14299-14303 |
| | member 10B | |
| WNT11 | Wingless-type MMTV integration site family, | SEQ ID NOS: 14304-14306 |
| | member 11 | |
| WNT16 | Wingless-type MMTV integration site family, | SEQ ID NOS: 14307-14308 |
| | member 16 | |
| WNT2 | Wingless-type MMTV integration site family | SEQ ID NOS: 14309-14311 |
| | member 2 | |
| WNT3 | Wingless-type MMTV integration site family, | SEQ ID NO: 14312 |
| | member 3 | |
| WNT3A | Wingless-type MMTV integration site family, | SEQ ID NO: 14313 |
| | member 3A | |
| WNT5A | Wingless-type MMTV integration site family, | SEQ ID NOS: 14314-14317 |
| | member 5A | |
| WNT5B | Wingless-type MMTV integration site family, | SEQ ID NOS: 14318-14324 |
| | member 5B | |
| WNT6 | Wingless-type MMTV integration site family, | SEQ ID NO: 14325 |
| | member 6 | |
| WNT7A | Wingless-type MMTV integration site family, | SEQ ID NO: 14326 |
| | member 7A | |
| WNT7B | Wingless-type MMTV integration site family, | SEQ ID NOS: 14327-14331 |
| | member 7B | |
| WNT8A | Wingless-type MMTV integration site family, | SEQ ID NOS: 14332-14335 |
| | member 8A | |
| WNT8B | Wingless-type MMTV integration site family, | SEQ ID NO: 14336 |
| | member 8B | |
| WNT9A | Wingless-type MMTV integration site family, | SEQ ID NO: 14337 |
| | member 9A | |
| WNT9B | Wingless-type MMTV integration site family, | SEQ ID NOS: 14338-14340 |
| | member 9B | |
| WSB1 | WD repeat and SOCS box containing 1 | SEQ ID NOS: 14341-14350 |
| WSCD1 | WSC domain containing 1 | SEQ ID NOS: 14351-14360 |
| WSCD2 | WSC domain containing 2 | SEQ ID NOS: 14361-14364 |
| XCL1 | Chemokine (C motif) ligand 1 | SEQ ID NO: 14365 |
| XCL2 | Chemokine (C motif) ligand 2 | SEQ ID NO: 14366 |
| XPNPEP2 | X-prolyl aminopeptidase (aminopeptidase P) 2, | SEQ ID NOS: 14367-14368 |
| | membrane-bound | |
| XXYLT1 | Xyloside xylosyltransferase I | SEQ ID NOS: 14369-14374 |
| XYLT1 | Xylosyltransferase I | SEQ ID NO: 14375 |
| XYLT2 | Xylosyltransferase II | SEQ ID NOS: 14376-14381 |
| ZFYVE21 | Zinc finger, FYVE domain containing 21 | SEQ ID NOS: 14382-14386 |
| ZG16 | Zymogen granule protein 16 | SEQ ID NO: 14387 |
| ZG16B | Zymogen granule protein 16B | SEQ ID NOS: 14388-14391 |
| ZIC4 | Zic family member 4 | SEQ ID NOS: 14392-14400 |
| ZNF207 | Zinc finger protein 207 | SEQ ID NOS: 14401-14411 |
| ZNF26 | Zinc finger protein 26 | SEQ ID NOS: 14412-14415 |
| ZNF34 | Zinc finger protein 34 | SEQ ID NOS: 14416-14419 |
| ZNF419 | Zinc finger protein 419 | SEQ ID NOS: 14420-14434 |
| ZNF433 | Zinc finger protein 433 | SEQ ID NOS: 14435-14444 |
| ZNF449 | Zinc finger protein 449 | SEQ ID NOS: 14445-14446 |
| ZNF488 | Zinc finger protein 488 | SEQ ID NOS: 14447-14448 |
| ZNF511 | Zinc finger protein 511 | SEQ ID NOS: 14449-14450 |
| ZNF570 | Zinc finger protein 570 | SEQ ID NOS: 14451-14456 |
| ZNF691 | Zinc finger protein 691 | SEQ ID NOS: 14457-14464 |
| ZNF98 | Zinc finger protein 98 | SEQ ID NOS: 14465-14468 |
| ZPBP | Zona pellucida binding protein | SEQ ID NOS: 14469-14472 |
| ZPBP2 | Zona pellucida binding protein 2 | SEQ ID NOS: 14473-14476 |
| ZSCAN29 | Zinc finger and SCAN domain containing 29 | SEQ ID NOS: 14477-14483 |

### Expression of Cell Markers

[0380] In certain embodiments of the disclosure, T cells are modified to express detectable markers or indicators. In some embodiments, these detectable markers include, but are not limited to, fluorescent proteins. Non-limiting examples of fluorescent proteins include TagBFP, mTagBFP2, Azurite, EBFP2, mKalama1, Sirius, Sapphire, T-Sapphire, ECFP, Cerulean, SCFP3A, m Turquoise, mTurquoise2, monomeric Midorishi-Cyan, TagCFP, mTFP1, EGFP, Emerald, Superfolder GFP, monomeric Azami Green, mUKG, mWasabi, Clover, mNeonGreen, EYFP, Citrine, Venus, SYFP2, TagYFP, monomeric Kusabira Orange, mKok, mKO2, mOrange, mOrange2, mRaspberry, mCherry, mStrawberry, mTangerine, tdTomato, TagRFP, TagFRP-T, mApple, mRuby, mRuby2, mPlum, HcRed-Tandem, mKate2, mNeptune, NiRFP, TagRFP657, IFP1.4, mRFP, mKeima Red, LSS-mKate1, LSS-mKate2, mBeRFPand spectrally shifted variants thereof. In some embodiments of the disclosure, the detectable marker or indicator comprises luciferase. In some embodiments, the detectable marker or indicator is codon optimized for expression in humans. In some embodiments, the detectable marker or indicator is an intracellular marker or indicator. In some embodiments, the detectable marker or indicator is a cytoplasmic marker or indicator. In some embodiments, the detectable marker or indicator is a nuclear marker or indicator. In some embodiments, the detectable marker or indicator is a mitochondrial marker or indicator. In some embodiments, the detectable marker or indicator is a cell surface marker. In some embodiments, particularly those embodiments where the markers or indicators are cell surface markers, the marker or indicator may be tethered to the membrane of the cell. Cells modified to express markers with the compositions and methods of the disclosure can be used as indicator cells in vivo, ex vivo, in vitro and in situ. In certain embodiments of the disclosure, a marker or indicator is under the control of an inducible promoter of the disclosure such that when the inducible promoter is targeted, the promoter induces expression of the marker or indicator.

### Inducible Promoters

[0381] In certain embodiments of the compositions of the disclosure, the sequence encoding the inducible promoter of (a) comprises a sequence encoding an NFκB promoter. In certain embodiments of the compositions of the disclosure, the sequence encoding the inducible promoter of (a) comprises a sequence encoding an interferon (IFN) promoter or a sequence encoding an interleukin-2 promoter. In certain embodiments, the interferon (IFN) promoter is an IFNγ promoter. In certain embodiments of the compositions of the disclosure, the inducible promoter is isolated or derived from the promoter of a cytokine or a chemokine. In certain embodiments, the cytokine or chemokine comprises IL2, IL3, IL4, IL5, IL6, IL10, IL12, IL13, IL17A/F, IL21, IL22, IL23, transforming growth factor beta (TGFβ), colony stimulating factor 2 (GM-CSF), interferon gamma (IFNγ), Tumor necrosis factor (TNFα), LTα, perforin, Granzyme C (Gzmc), Granzyme B (Gzmb), C-C motif chemokine ligand 5 (CCL5), C-C motif chemokine ligand 4 (Ccl4), C-C motif chemokine ligand 3 (Ccl3), X-C motif chemokine ligand 1 (Xcl1) and LIF interleukin 6 family cytokine (Lif).

[0382] In certain embodiments of the compositions of the disclosure, the inducible promoter is isolated or derived from the promoter of a gene comprising a surface protein involved in cell differentiation, activation, exhaustion and function. In certain embodiments, the gene comprises CD69, CD71, CTLA4, PD-1, TIGIT, LAG3, TIM-3, GITR, MHCII, COX-2, FASL and 4-1BB.

[0383] In certain embodiments of the compositions of the disclosure, the inducible promoter is isolated or derived from the promoter of a gene involved in CD metabolism and differentiation. In certain embodiments of the compositions of the disclosure, the inducible promoter is isolated or derived from the promoter of Nr4a1, Nr4a3, Tnfrsf9 (4-1BB), Sema7a, Zfp3612, Gadd45b, Dusp5, Dusp6 and Neto2.

### Nucleic Acid Molecules

[0384] Nucleic acid molecules of the disclosure encoding protein scaffolds can be in the form of RNA, such as mRNA, hnRNA, tRNA or any other form, or in the form of DNA, including, but not limited to, cDNA and genomic DNA obtained by cloning or produced synthetically, or any combinations thereof. The DNA can be triple-stranded, double-stranded or single-stranded, or any combination thereof. Any portion of at least one strand of the DNA or RNA can be the coding strand, also known as the sense strand, or it can be the non-coding strand, also referred to as the anti-sense strand.

[0385] Isolated nucleic acid molecules of the disclosure can include nucleic acid molecules comprising an open reading frame (ORF), optionally, with one or more introns, e.g., but not limited to, at least one specified portion of at least one protein scaffold; nucleic acid molecules comprising the coding sequence for a protein scaffold or loop region that binds to the target protein; and nucleic acid molecules which comprise a nucleotide sequence substantially different from those described above but which, due to the degeneracy of the genetic code, still encode the protein scaffold as described herein and/or as known in the art. Of course, the genetic code is well known in the art. Thus, it would be routine for one skilled in the art to generate such degenerate nucleic acid variants that code for specific protein scaffolds of the present invention. See, e.g., Ausubel, et al., supra, and such nucleic acid variants are included in the present invention.

[0386] As indicated herein, nucleic acid molecules of the disclosure which comprise a nucleic acid encoding a protein scaffold can include, but are not limited to, those encoding the amino acid sequence of a protein scaffold fragment, by itself; the coding sequence for the entire protein scaffold or a portion thereof; the coding sequence for a protein scaffold, fragment or portion, as well as additional sequences, such as the coding sequence of at least one signal leader or fusion peptide, with or without the aforementioned additional coding sequences, such as at least one intron, together with additional, non-coding sequences, including but not limited to, non-coding 5′ and 3′ sequences, such as the transcribed, non-translated sequences that play a role in transcription, mRNA processing, including splicing and polyadenylation signals (for example, ribosome binding and stability of mRNA); an additional coding sequence that codes for additional amino acids, such as those that provide additional functionalities. Thus, the sequence encoding a protein scaffold can be fused to a marker sequence, such as a sequence encoding a peptide that facilitates purification of the fused protein scaffold comprising a protein scaffold fragment or portion.

### Polynucleotides Selectively Hybridizing to a Polynucleotide as Described Herein

[0387] The disclosure provides isolated nucleic acids that hybridize under selective hybridization conditions to a polynucleotide disclosed herein. Thus, the polynucleotides of this embodiment can be used for isolating, detecting, and/or quantifying nucleic acids comprising such polynucleotides. For example, polynucleotides of the present invention can be used to identify, isolate, or amplify partial or full-length clones in a deposited library. In some embodiments, the polynucleotides are genomic or cDNA sequences isolated, or otherwise complementary to, a cDNA from a human or mammalian nucleic acid library.

[0388] Preferably, the cDNA library comprises at least 80% full-length sequences, preferably, at least 85% or 90% full-length sequences, and, more preferably, at least 95% full-length sequences. The cDNA libraries can be normalized to increase the representation of rare sequences. Low or moderate stringency hybridization conditions are typically, but not exclusively, employed with sequences having a reduced sequence identity relative to complementary sequences. Moderate and high stringency conditions can optionally be employed for sequences of greater identity. Low stringency conditions allow selective hybridization of sequences having about 70% sequence identity and can be employed to identify orthologous or paralogous sequences.

[0389] Optionally, polynucleotides of this invention will encode at least a portion of a protein scaffold encoded by the polynucleotides described herein. The polynucleotides of this invention embrace nucleic acid sequences that can be employed for selective hybridization to a polynucleotide encoding a protein scaffold of the present invention. See, e.g., Ausubel, supra; Colligan, supra, each entirely incorporated herein by reference.

### Construction of Nucleic Acids

[0390] The isolated nucleic acids of the disclosure can be made using (a) recombinant methods, (b) synthetic techniques, (c) purification techniques, and/or (d) combinations thereof, as well-known in the art.

[0391] The nucleic acids can conveniently comprise sequences in addition to a polynucleotide of the present invention. For example, a multi-cloning site comprising one or more endonuclease restriction sites can be inserted into the nucleic acid to aid in isolation of the polynucleotide. Also, translatable sequences can be inserted to aid in the isolation of the translated polynucleotide of the disclosure. For example, a hexa-histidine marker sequence provides a convenient means to purify the proteins of the disclosure. The nucleic acid of the disclosure, excluding the coding sequence, is optionally a vector, adapter, or linker for cloning and/or expression of a polynucleotide of the disclosure.

[0392] Additional sequences can be added to such cloning and/or expression sequences to optimize their function in cloning and/or expression, to aid in isolation of the polynucleotide, or to improve the introduction of the polynucleotide into a cell. Use of cloning vectors, expression vectors, adapters, and linkers is well known in the art. (See, e.g., Ausubel, supra; or Sambrook, supra).

### Recombinant Methods for Constructing Nucleic Acids

[0393] The isolated nucleic acid compositions of this disclosure, such as RNA, cDNA, genomic DNA, or any combination thereof, can be obtained from biological sources using any number of cloning methodologies known to those of skill in the art. In some embodiments, oligonucleotide probes that selectively hybridize, under stringent conditions, to the polynucleotides of the present invention are used to identify the desired sequence in a cDNA or genomic DNA library. The isolation of RNA, and construction of cDNA and genomic libraries are well known to those of ordinary skill in the art. (See, e.g., Ausubel, supra; or Sambrook, supra).

### Nucleic Acid Screening and Isolation Methods

[0394] A cDNA or genomic library can be screened using a probe based upon the sequence of a polynucleotide of the disclosure. Probes can be used to hybridize with genomic DNA or cDNA sequences to isolate homologous genes in the same or different organisms. Those of skill in the art will appreciate that various degrees of stringency of hybridization can be employed in the assay; and either the hybridization or the wash medium can be stringent. As the conditions for hybridization become more stringent, there must be a greater degree of complementarity between the probe and the target for duplex formation to occur. The degree of stringency can be controlled by one or more of temperature, ionic strength, pH and the presence of a partially denaturing solvent, such as formamide. For example, the stringency of hybridization is conveniently varied by changing the polarity of the reactant solution through, for example, manipulation of the concentration of formamide within the range of 0% to 50%. The degree of complementarity (sequence identity) required for detectable binding will vary in accordance with the stringency of the hybridization medium and/or wash medium. The degree of complementarity will optimally be 100%, or 70-100%, or any range or value therein. However, it should be understood that minor sequence variations in the probes and primers can be compensated for by reducing the stringency of the hybridization and/or wash medium.

[0395] Methods of amplification of RNA or DNA are well known in the art and can be used according to the disclosure without undue experimentation, based on the teaching and guidance presented herein.

[0396] Known methods of DNA or RNA amplification include, but are not limited to, polymerase chain reaction (PCR) and related amplification processes (see, e.g., U.S. Pat. Nos. 4,683,195, 4,683,202, 4,800,159, 4,965,188, to Mullis, et al.; 4,795,699 and 4,921,794 to Tabor, et al; U.S. Pat. No. 5,142,033 to Innis; U.S. Pat. No. 5,122,464 to Wilson, et al.; U.S. Pat. No. 5,091,310 to Innis; U.S. Pat. No. 5,066,584 to Gyllensten, et al; U.S. Pat. No. 4,889,818 to Gelfand, et al; U.S. Pat. No. 4,994,370 to Silver, et al; U.S. Pat. No. 4,766,067 to Biswas; U.S. Pat. No. 4,656,134 to Ringold) and RNA mediated amplification that uses anti-sense RNA to the target sequence as a template for double-stranded DNA synthesis (U.S. Pat. No. 5,130,238 to Malek, et al, with the tradename NASBA), the entire contents of which references are incorporated herein by reference. (See, e.g., Ausubel, supra; or Sambrook, supra.)

[0397] For instance, polymerase chain reaction (PCR) technology can be used to amplify the sequences of polynucleotides of the disclosure and related genes directly from genomic DNA or cDNA libraries. PCR and other in vitro amplification methods can also be useful, for example, to clone nucleic acid sequences that code for proteins to be expressed, to make nucleic acids to use as probes for detecting the presence of the desired mRNA in samples, for nucleic acid sequencing, or for other purposes. Examples of techniques sufficient to direct persons of skill through in vitro amplification methods are found in Berger, supra, Sambrook, supra, and Ausubel, supra, as well as Mullis, et al., U.S. Pat. No. 4,683,202 (1987); and Innis, et al., PCR Protocols A Guide to Methods and Applications, Eds., Academic Press Inc., San Diego, Calif. (1990). Commercially available kits for genomic PCR amplification are known in the art. See, e.g., Advantage-GC Genomic PCR Kit (Clontech). Additionally, e.g., the T4 gene 32 protein (Boehringer Mannheim) can be used to improve yield of long PCR products.

### Synthetic Methods for Constructing Nucleic Acids

[0398] The isolated nucleic acids of the disclosure can also be prepared by direct chemical synthesis by known methods (see, e.g., Ausubel, et al., supra). Chemical synthesis generally produces a single-stranded oligonucleotide, which can be converted into double-stranded DNA by hybridization with a complementary sequence, or by polymerization with a DNA polymerase using the single strand as a template. One of skill in the art will recognize that while chemical synthesis of DNA can be limited to sequences of about 100 or more bases, longer sequences can be obtained by the ligation of shorter sequences.

### Recombinant Expression Cassettes

[0399] The disclosure further provides recombinant expression cassettes comprising a nucleic acid of the disclosure. A nucleic acid sequence of the disclosure, for example, a cDNA or a genomic sequence encoding a protein scaffold of the disclosure, can be used to construct a recombinant expression cassette that can be introduced into at least one desired host cell. A recombinant expression cassette will typically comprise a polynucleotide of the disclosure operably linked to transcriptional initiation regulatory sequences that will direct the transcription of the polynucleotide in the intended host cell. Both heterologous and non-heterologous (i.e., endogenous) promoters can be employed to direct expression of the nucleic acids of the disclosure.

[0400] In some embodiments, isolated nucleic acids that serve as promoter, enhancer, or other elements can be introduced in the appropriate position (upstream, downstream or in the intron) of a non-heterologous form of a polynucleotide of the disclosure so as to up or down regulate expression of a polynucleotide of the disclosure. For example, endogenous promoters can be altered in vivo or in vitro by mutation, deletion and/or substitution.

### Vectors and Host Cells

[0401] The disclosure also relates to vectors that include isolated nucleic acid molecules of the disclosure, host cells that are genetically engineered with the recombinant vectors, and the production of at least one protein scaffold by recombinant techniques, as is well known in the art. See, e.g., Sambrook, et al., supra; Ausubel, et al., supra, each entirely incorporated herein by reference.

[0402] For example, the PB-EF1a vector may be used. The vector comprises the following nucleotide sequence:

(SEQ ID NO. 17073)
tgtacatagattaaccctagaaagataatcatattgtgacgtacgttaaagataatcatgcgtaaaattgacgcatgtgttttat
cggtctgtatatcgaggtttatttattaatttgaatagatattaagttttattatatttacacttacatactaataataaattca
acaaacaatttatttatgtttatttatttattaaaaaaaaacaaaaactcaaaatttcttctataaagtaacaaaacttttatcg
aatacctgcagcccgggggatgcagagggacagcccccccccaaagcccccagggatgtaattacgtccctcccccgctaggggg
cagcagcgagccgcccggggctccgctccggtccggcgctccccccgcatccccgagccggcagcgtgcggggacagcccgggca
cggggaaggtggcacgggatcgctttcctctgaacgcttctcgctgctctttgagcctgcagacacctggggggatacggggaaa
agttgactgtgcctttcgatcgaaccatggacagttagctttgcaaagatggataaagttttaaacagagaggaatctttgcagc
taatggaccttctaggtcttgaaaggagtgggaattggctccggtgcccgtcagtgggcagagcgcacatcgcccacagtccccg
agaagttggggggaggggtcggcaattgaaccggtgcctagagaaggtggcgcggggtaaactgggaaagtgatgtcgtgtactg
gctccgcctttttcccgagggtgggggagaaccgtatataagtgcagtagtcgccgtgaacgttctttttcgcaacgggtttgcc
gccagaacacaggtaagtgccgtgtgtggttcccgcgggcctggcctctttacgggttatggcccttgcgtgccttgaattactt
ccacctggctgcagtacgtgattcttgatcccgagcttcgggttggaagtgggtgggagagttcgaggccttgcgcttaaggagc
cccttcgcctcgtgcttgagttgaggcctggcctgggcgctggggccgccgcgtgcgaatctggtggcaccttcgcgcctgtctc
gctgctttcgataagtctctagccatttaaaatttttgatgacctgctgcgacgctttttttctggcaagatagtcttgtaaatg
cgggccaagatctgcacactggtatttcggtttttggggccgcgggcggcgacggggcccgtgcgtcccagcgcacatgttcggc
gaggcggggcctgcgagcgcggccaccgagaatcggacgggggtagtctcaagctggccggcctgctctggtgcctggcctcgcg
ccgccgtgtatcgccccgccctgggcggcaaggctggcccggtcggcaccagttgcgtgagcggaaagatggccgcttcccggcc
ctgctgcagggagctcaaaatggaggacgcggcgctcgggagagcgggcgggtgagtcacccacacaaaggaaaagggcctttcc
gtcctcagccgtcgcttcatgtgactccacggagtaccgggcgccgtccaggcacctcgattagttctcgagcttttggagtacg
tcgtctttaggttggggggaggggttttatgcgatggagtttccccacactgagtgggtggagactgaagttaggccagcttggc
acttgatgtaattctccttggaatttgccctttttgagtttggatcttggttcattctcaagcctcagacagtggttcaaagttt
ttttcttccatttcaggtgtcgtgagaattctaatacgactcactatagggtgtgctgtctcatcattttggcaaagattggcca
ccaagcttgtcctgcaggagggtcgacgcctctagacgggcggccgctccggatccacgggtaccgatcacatatgcctttaatt
aaacactagttctatagtgtcacctaaattccctttagtgagggttaatggccgtaggccgccagaattgggtccagacatgata
agatacattgatgagtttggacaaaccacaactagaatgcagtgaaaaaaatgctttatttgtgaaatttgtgatgctattgctt
tatttgtaaccattataagctgcaataaacaagttaacaacaacaattgcattcattttatgtttcaggttcagggggaggtgtg
ggaggttttttcggactctaggacctgcgcatgcgcttggcgtaatcatggtcatagctgtttcctgttttccccgtatcccccc
aggtgtctgcaggctcaaagagcagcgagaagcgttcagaggaaagcgatcccgtgccaccttccccgtgcccgggctgtccccg
cacgctgccggctcggggatgcggggggagcgccggaccggagcggagccccgggcggctcgctgctgccccctagcgggggagg
gacgtaattacatccctgggggctttgggggggggctgtccctctcaccgcggtggagctccagcttttgttcgaattggggccc
cccctcgagggtatcgatgatatctataacaagaaaatatatatataataagttatcacgtaagtagaacatgaaataacaatat
aattatcgtatgagttaaatcttaaaagtcacgtaaaagataatcatgcgtcattttgactcacgcggtcgttatagttcaaaat
cagtgacacttaccgcattgacaagcacgcctcacgggagctccaagcggcgactgagatgtcctaaatgcacagcgacggattc
gcgctatttagaaagagagagcaatatttcaagaatgcatgcgtcaattttacgcagactatctttctagggttaatctagctag
ccttaagsgcgcctattgcgttgcgctcactgcccgctttccagtcgggaaacctgtcgtgccagctgcattaatgaatcggcca
acgcgcggggagaggcggtttgcgtattgggcgctcttccgcttcctcgctcactgactcgctgcgctcggtcgttcggctgcgg
cgagcggtatcagctcactcaaaggcggtaatacggttatccacagaatcaggggataacgcaggaaagaacatgaccaaaatcc
cttaacgtgagttttcgttccactgagcgtcagaccccgtagaaaagatcaaaggatcttcttgagatcctttttttctgcgcgt
aatctgctgcttgcaaacaaaaaaaccaccgctaccagcggtggtttgtttgccggatcaagagctaccaactctttttccgaag
gtaactggcttcagcagagcgcagataccaaatactgttcttctagtgtagccgtagttaggccaccacttcaagaactctgtag
caccgcctacatacctcgctctgctaatcctgttaccagtggctgctgccagtggcgataagtcgtgtcttaccgggttggactc
aagacgatagttaccggataaggcgcagcggtcgggctgaacggggggttcgtgcacacagcccagcttggagcgaacgacctac
accgaactgagatacctacagcgtgagctatgagaaagcgccacgcttcccgaagggagaaaggcggacaggtatccggtaagcg
gcagggtcggaacaggagagcgcacgagggagcttccagggggaaacgcctggtatctttatagtcctgtcgggtttcgccacct
ctgacttgagcgtcgatttttgtgatgctcgtcaggggggcggagcctatggaaaaacgccagcaacgcggcctttttacggttc
ctggccttttgctggccttttgctcacatgagattatcaaaaaggatcttcacctagatccttttaaattaaaaatgaagtttta
aatcaatctaaagtatatatgagtaaacttggtctgacagtcagaagaactcgtcaagaaggcgatagaaggcgatgcgctgcga
atcgggagcggcgataccgtaaagcacgaggaagcggtcagcccattcgccgccaagctcttcagcaatatcacgggtagccaac
gctatgtcctgatagcggtccgccacacccagccggccacagtcgatgaatccagaaaagcggccattttccaccatgatattcg
gcaagcaggcatcgccatgggtcacgacgagatcctcgccgtcgggcatgctcgccttgagcctggcgaacagttcggctggcgc
gagcccctgatgctcttcgtccagatcatcctgatcgacaagaccggcttccatccgagtacgtgctcgctcgatgcgatgtttc
gcttggtggtcgaatgggcaggtagccggatcaagcgtatgcagccgccgcattgcatcagccatgatggatactttctcggcag
gagcaaggtgagatgacaggagatcctgccccggcacttcgcccaatagcagccagtcccttcccgcttcagtgacaacgtcgag
cacagctgcgcaaggaacgcccgtcgtggccagccacgatagccgcgctgcctcgtcttgcagttcattcagggcaccggacagg
tcggtcttgacaaaaagaaccgggcgcccctgcgctgacagccggaacacggcggcatcagagcagccgattgtctgttgtgccc
agtcatagccgaatagcctctccacccaagcggccggagaacctgcgtgcaatccatcttgttcaatcataatattattgaagca
tttatcagggttcgtctcgtcccggtctcctcccaatgcatgtcaatattggccattagccatattattcattggttatatagca
taaatcaatattggctattggccattgcatacgttgtatctatatcataata.

[0403] The polynucleotides can optionally be joined to a vector containing a selectable marker for propagation in a host. Generally, a plasmid or nanoplasmid vector is introduced in a precipitate, such as a calcium phosphate precipitate, or in a complex with a charged lipid. If the vector is a virus, it can be packaged in vitro using an appropriate packaging cell line and then transduced into host cells.

[0404] The DNA insert should be operatively linked to an appropriate promoter. The expression constructs will further contain sites for transcription initiation, termination and, in the transcribed region, a ribosome binding site for translation. The coding portion of the mature transcripts expressed by the constructs will preferably include a translation initiating at the beginning and a termination codon (e.g., UAA, UGA or UAG) appropriately positioned at the end of the mRNA to be translated, with UAA and UAG preferred for mammalian or eukaryotic cell expression.

[0405] Expression vectors will preferably but optionally include at least one selectable marker. Such markers include, e.g., but are not limited to, ampicillin, zeocin (Sh bla gene), puromycin (pac gene), hygromycin B (hygB gene), G418/Geneticin (neo gene), mycophenolic acid, or glutamine synthetase (GS, U.S. Pat. Nos. 5,122,464; 5,770,359; 5,827,739), blasticidin (bsd gene), resistance genes for eukaryotic cell culture as well as ampicillin, zeocin (Sh bla gene), puromycin (pac gene), hygromycin B (hygB gene), G418/Geneticin (neo gene), kanamycin, spectinomycin, streptomycin, carbenicillin, bleomycin, erythromycin, polymyxin B, or tetracycline resistance genes for culturing in E. coli and other bacteria or prokaryotics (the above patents are entirely incorporated hereby by reference). Appropriate culture mediums and conditions for the above-described host cells are known in the art. Suitable vectors will be readily apparent to the skilled artisan. Introduction of a vector construct into a host cell can be effected by calcium phosphate transfection, DEAE-dextran mediated transfection, cationic lipid-mediated transfection, electroporation, transduction, infection or other known methods. Such methods are described in the art, such as Sambrook, supra, Chapters 1-4 and 16-18; Ausubel, supra, Chapters 1, 9, 13, 15, 16.

[0406] Expression vectors will preferably but optionally include at least one selectable cell surface marker for isolation of cells modified by the compositions and methods of the disclosure. Selectable cell surface markers of the disclosure comprise surface proteins, glycoproteins, or group of proteins that distinguish a cell or subset of cells from another defined subset of cells. Preferably the selectable cell surface marker distinguishes those cells modified by a composition or method of the disclosure from those cells that are not modified by a composition or method of the disclosure. Such cell surface markers include, e.g., but are not limited to, “cluster of designation” or “classification determinant” proteins (often abbreviated as “CD”) such as a truncated or full length form of CD19, CD271, CD34, CD22, CD20, CD33, CD52, or any combination thereof. Cell surface markers further include the suicide gene marker RQR8 (Philip B et al. Blood. 2014 Aug. 21; 124(8): 1277-87).

[0407] Expression vectors will preferably but optionally include at least one selectable drug resistance marker for isolation of cells modified by the compositions and methods of the disclosure. Selectable drug resistance markers of the disclosure may comprise wild-type or mutant Neo, DHFR, TYMS, FRANCE, RAD51C, GCS, MDR1, ALDH1, NKX2.2, or any combination thereof.

[0408] At least one protein scaffold of the disclosure can be expressed in a modified form, such as a fusion protein, and can include not only secretion signals, but also additional heterologous functional regions. For instance, a region of additional amino acids, particularly charged amino acids, can be added to the N-terminus of a protein scaffold to improve stability and persistence in the host cell, during purification, or during subsequent handling and storage. Also, peptide moieties can be added to a protein scaffold of the disclosure to facilitate purification. Such regions can be removed prior to final preparation of a protein scaffold or at least one fragment thereof. Such methods are described in many standard laboratory manuals, such as Sambrook, supra, Chapters 17.29-17.42 and 18.1-18.74; Ausubel, supra, Chapters 16, 17 and 18.

[0409] Those of ordinary skill in the art are knowledgeable in the numerous expression systems available for expression of a nucleic acid encoding a protein of the disclosure. Alternatively, nucleic acids of the disclosure can be expressed in a host cell by turning on (by manipulation) in a host cell that contains endogenous DNA encoding a protein scaffold of the disclosure. Such methods are well known in the art, e.g., as described in U.S. Pat. Nos. 5,580,734, 5,641,670, 5,733,746, and 5,733,761, entirely incorporated herein by reference.

[0410] Illustrative of cell cultures useful for the production of the protein scaffolds, specified portions or variants thereof, are bacterial, yeast, and mammalian cells as known in the art. Mammalian cell systems often will be in the form of monolayers of cells although mammalian cell suspensions or bioreactors can also be used. A number of suitable host cell lines capable of expressing intact glycosylated proteins have been developed in the art, and include the COS-1 (e.g., ATCC CRL 1650), COS-7 (e.g., ATCC CRL-1651), HEK293, BHK21 (e.g., ATCC CRL-10), CHO (e.g., ATCC CRL 1610) and BSC-1 (e.g., ATCC CRL-26) cell lines, Cos-7 cells, CHO cells, hep G2 cells, P3X63Ag8.653, SP2/0-Ag14, 293 cells, HeLa cells and the like, which are readily available from, for example, American Type Culture Collection, Manassas, Va. (www.atcc.org). Preferred host cells include cells of lymphoid origin, such as myeloma and lymphoma cells. Particularly preferred host cells are P3X63Ag8.653 cells (ATCC Accession Number CRL-1580) and SP2/0-Ag14 cells (ATCC Accession Number CRL-1851). In a particularly preferred embodiment, the recombinant cell is a P3X63Ab8.653 or an SP2/0-Ag14 cell.

[0411] Expression vectors for these cells can include one or more of the following expression control sequences, such as, but not limited to, an origin of replication; a promoter (e.g., late or early SV40 promoters, the CMV promoter (U.S. Pat. Nos. 5,168,062; 5,385,839), an HSV tk promoter, a pgk (phosphoglycerate kinase) promoter, an EF-1 alpha promoter (U.S. Pat. No. 5,266,491), at least one human promoter; an enhancer, and/or processing information sites, such as ribosome binding sites, RNA splice sites, polyadenylation sites (e.g., an SV40 large T Ag poly A addition site), and transcriptional terminator sequences. See, e.g., Ausubel et al., supra; Sambrook, et al., supra. Other cells useful for production of nucleic acids or proteins of the present invention are known and/or available, for instance, from the American Type Culture Collection Catalogue of Cell Lines and Hybridomas (www.atcc.org) or other known or commercial sources.

[0412] When eukaryotic host cells are employed, polyadenlyation or transcription terminator sequences are typically incorporated into the vector. An example of a terminator sequence is the polyadenlyation sequence from the bovine growth hormone gene. Sequences for accurate splicing of the transcript can also be included. An example of a splicing sequence is the VP1 intron from SV40 (Sprague, et al., J. Virol. 45:773-781 (1983)). Additionally, gene sequences to control replication in the host cell can be incorporated into the vector, as known in the art.

### Amino Acid Codes

[0413] The amino acids that make up protein scaffolds of the disclosure are often abbreviated. The amino acid designations can be indicated by designating the amino acid by its single letter code, its three letter code, name, or three nucleotide codon(s) as is well understood in the art (see Alberts, B., et al., Molecular Biology of The Cell, Third Ed., Garland Publishing, Inc., New York, 1994). A protein scaffold of the disclosure can include one or more amino acid substitutions, deletions or additions, either from natural mutations or human manipulation, as specified herein. Amino acids in a protein scaffold of the disclosure that are essential for function can be identified by methods known in the art, such as site-directed mutagenesis or alanine-scanning mutagenesis (e.g., Ausubel, supra, Chapters 8, 15; Cunningham and Wells, Science 244:1081-1085 (1989)). The latter procedure introduces single alanine mutations at every residue in the molecule. The resulting mutant molecules are then tested for biological activity, such as, but not limited to, at least one neutralizing activity. Sites that are critical for protein scaffold binding can also be identified by structural analysis, such as crystallization, nuclear magnetic resonance or photoaffinity labeling (Smith, et al., J. Mol. Biol. 224:899-904 (1992) and de Vos, et al., Science 255:306-312 (1992)).

[0414] As those of skill will appreciate, the invention includes at least one biologically active protein scaffold of the disclosure. Biologically active protein scaffolds have a specific activity at least 20%, 30%, or 40%, and, preferably, at least 50%, 60%, or 70%, and, most preferably, at least 80%, 90%, or 95%-99% or more of the specific activity of the native (non-synthetic), endogenous or related and known protein scaffold. Methods of assaying and quantifying measures of enzymatic activity and substrate specificity are well known to those of skill in the art.

[0415] In another aspect, the disclosure relates to protein scaffolds and fragments, as described herein, which are modified by the covalent attachment of an organic moiety. Such modification can produce a protein scaffold fragment with improved pharmacokinetic properties (e.g., increased in vivo serum half-life). The organic moiety can be a linear or branched hydrophilic polymeric group, fatty acid group, or fatty acid ester group. In particular embodiments, the hydrophilic polymeric group can have a molecular weight of about 800 to about 120,000 Daltons and can be a polyalkane glycol (e.g., polyethylene glycol (PEG), polypropylene glycol (PPG)), carbohydrate polymer, amino acid polymer or polyvinyl pyrolidone, and the fatty acid or fatty acid ester group can comprise from about eight to about forty carbon atoms.

T Cell Isolation from a Leukapheresis Product

[0416] A leukapheresis product or blood may be collected from a subject at clinical site using a closed system and standard methods (e.g., a COBE Spectra Apheresis System). Preferably, the product is collected according to standard hospital or institutional Leukapheresis procedures in standard Leukapheresis collection bags. For example, in preferred embodiments of the methods of the disclosure, no additional anticoagulants or blood additives (heparin, etc.) are included beyond those normally used during leukapheresis.

[0417] Alternatively, white blood cells (WBC)/Peripheral Blood Mononuclear Cells (PBMC) (using Biosafe Sepax 2 (Closed/Automated)) or T cells (using CliniMACS® Prodigy (Closed/Automated)) may be isolated directly from whole blood. However, in certain subjects (e.g. those diagnosed and/or treated for cancer), the WBC/PBMC yield may be significantly lower when isolated from whole blood than when isolated by leukapheresis.

[0418] Either the leukapheresis procedure and/or the direct cell isolation procedure may be used for any subject of the disclosure.

[0419] The leukapheresis product, blood, WBC/PBMC composition and/or T-cell composition should be packed in insulated containers and should be kept at controlled room temperature (+19° C. to +25° C.) according to standard hospital of institutional blood collection procedures approved for use with the clinical protocol. The leukapheresis product, blood, WBC/PBMC composition and/or T-cell composition should not be refrigerated.

[0420] The cell concentration leukapheresis product, blood, WBC/PBMC composition and/or T-cell composition should not exceed 0.2×10⁹ cells per mL during transportation. Intense mixing of the leukapheresis product, blood, WBC/PBMC composition and/or T-cell composition should be avoided.

[0421] If the leukapheresis product, blood, WBC/PBMC composition and/or T-cell composition has to be stored, e.g. overnight, it should be kept at controlled room temperature (same as above). During storage, the concentration of the leukapheresis product, blood, WBC/PBMC composition and/or T-cell composition should never exceed 0.2×10⁹ cell per mL.

[0422] Preferably, cells of the leukapheresis product, blood, WBC/PBMC composition and/or T-cell composition should be stored in autologous plasma. In certain embodiments, if the cell concentration of the leukapheresis product, blood, WBC/PBMC composition and/or T-cell composition is higher than 0.2×10⁹ cell per mL, the product should be diluted with autologous plasma.

[0423] Preferably, the leukapheresis product, blood, WBC/PBMC composition and/or T-cell composition should not be older than 24 hours when starting the labeling and separation procedure. The leukapheresis product, blood, WBC/PBMC composition and/or T-cell composition may be processed and/or prepared for cell labeling using a closed and/or automated system (e.g., CliniMACS Prodigy).

[0424] An automated system may perform additional buffy coat isolation, possibly by ficolation, and/or washing of the cellular product (e.g., the leukapheresis product, blood, WBC/PBMC composition and/or T cell composition).

[0425] A closed and/or automated system may be used to prepare and label cells for T-Cell isolation (from, for example, the leukapheresis product, blood, WBC/PBMC composition and/or T cell composition).

[0426] Although WBC/PBMCs may be nucleofected directly (which is easier and saves additional steps), the methods of the disclosure may include first isolating T cells prior to nucleofection. The easier strategy of directly nucleofecting PBMC requires selective expansion of CAR+ cells that is mediated via CAR signaling, which by itself is proving to be an inferior expansion method that directly reduces the in vivo efficiency of the product by rendering T cells functionally exhausted. The product may be a heterogeneous composition of CAR+ cells including T cells, NK cells, NKT cells, monocytes, or any combination thereof, which increases the variability in product from patient to patient and makes dosing and CRS management more difficult. Since T cells are thought to be the primary effectors in tumor suppression and killing, T cell isolation for the manufacture of an autologous product may result in significant benefits over the other more heterogeneous composition.

[0427] T cells may be isolated directly, by enrichment of labeled cells or depletion of labeled cells in a one-way labeling procedure or, indirectly, in a two-step labeling procedure. According to certain enrichment strategies of the disclosure, T cells may be collected in a Cell Collection Bag and the non-labeled cells (non-target cells) in a Negative Fraction Bag. In contrast to an enrichment strategy of the disclosure, the non-labeled cells (target cells) are collected in a Cell Collection Bag and the labeled cells (non-target cells) are collected in a Negative Fraction Bag or in the Non-Target Cell Bag, respectively. Selection reagents may include, but are not limited to, antibody-coated beads. Antibody-coated beads may either be removed prior to a modification and/or an expansion step, or, retained on the cells prior to a modification and/or an expansion step. One or more of the following non-limiting examples of cellular markers may be used to isolate T-cells: CD3, CD4, CD8, CD25, anti-biotin, CD1c, CD3/CD19, CD3/CD56, CD14, CD19, CD34, CD45RA, CD56, CD62L, CD133, CD137, CD271, CD304, IFN-gamma, TCR alpha/beta, and/or any combination thereof. Methods for the isolation of T-cells may include one or more reagents that specifically bind and/or detectably-label one or more of the following non-limiting examples of cellular markers may be used to isolate T-cells: CD3, CD4, CD8, CD25, anti-biotin, CD1c, CD3/CD19, CD3/CD56, CD14, CD19, CD34, CD45RA, CD56, CD62L, CD133, CD137, CD271, CD304, IFN-gamma, TCR alpha/beta, and/or any combination thereof. These reagents may or may not be “Good Manufacturing Practices” (“GMP”) grade. Reagents may include, but are not limited to, Thermo DynaBeads and Miltenyi CliniMACS products. Methods of isolating T-cells of the disclosure may include multiple iterations of labeling and/or isolation steps. At any point in the methods of isolating T-cells of the disclosure, unwanted cells and/or unwanted cell types may be depleted from a T cell product composition of the disclosure by positively or negatively selecting for the unwanted cells and/or unwanted cell types. A T cell product composition of the disclosure may contain additional cell types that may express CD4, CD8, and/or another T cell marker(s).

[0428] Methods of the disclosure for nucleofection of T cells may eliminate the step of T cell isolation by, for example, a process for nucleofection of T cells in a population or composition of WBC/PBMCs that, following nucleofection, includes an isolation step or a selective expansion step via TCR signaling.

[0429] Certain cell populations may be depleted by positive or negative selection before or after T cell enrichment and/or sorting. Examples of cell compositions that may be depleted from a cell product composition may include myeloid cells, CD25+ regulatory T cells (T Regs), dendritic cells, macrophages, red blood cells, mast cells, gamma-delta T cells, natural killer (NK) cells, a Natural Killer (NK)-like cell (e.g. a Cytokine Induced Killer (CIK) cell), induced natural killer (iNK) T cells, NK T cells, B cells, or any combination thereof.

[0430] T cell product compositions of the disclosure may include CD4+ and CD8+ T-Cells. CD4+ and CD8+ T-Cells may be isolated into separate collection bags during an isolation or selection procedure. CD4+ T cells and CD8+ T cells may be further treated separately, or treated after reconstitution (combination into the same composition) at a particular ratio.

[0431] The particular ratio at which CD4+ T cells and CD8+ T cells may be reconstituted may depend upon the type and efficacy of expansion technology used, cell medium, and/or growth conditions utilized for expansion of T-cell product compositions. Examples of possible CD4+:CD8+ ratios include, but are not limited to, 50%:50%, 60%:40%, 40%:60% 75%:25% and 25%:75%.

[0432] CD8+ T cells exhibit a potent capacity for tumor cell killing, while CD4+ T cells provide many of the cytokines required to support CD8+ T cell proliferative capacity and function. Because T cells isolated from normal donors are predominantly CD4+, the T-cell product compositions are artificially adjusted in vitro with respect to the CD4+:CD8+ ratio to improve upon the ratio of CD4+ T cells to CD8+ T cells that would otherwise be present in vivo. An optimized ratio may also be used for the ex vivo expansion of the autologous T-cell product composition. In view of the artificially adjusted CD4+:CD8+ ratio of the T-cell product composition, it is important to note that the product compositions of the disclosure may be significantly different and provide significantly greater advantage than any endogenously-occurring population of T-cells.

[0433] Preferred methods for T cell isolation may include a negative selection strategy for yielding untouched pan T cell, meaning that the resultant T-cell composition includes T-cells that have not been manipulated and that contain an endogenously-occurring variety/ratio of T-cells.

[0434] Reagents that may be used for positive or negative selection include, but are not limited to, magnetic cell separation beads. Magnetic cell separation beads may or may not be removed or depleted from selected populations of CD4+ T cells, CD8+ T cells, or a mixed population of both CD4+ and CD8+ T cells before performing the next step in a T-cell isolation method of the disclosure.

[0435] T cell compositions and T cell product compositions may be prepared for cryopreservation, storage in standard T Cell Culture Medium, and/or genetic modification.

[0436] T cell compositions, T cell product compositions, unstimulated T cell compositions, resting T cell compositions or any portion thereof may be cryopreserved using a standard cryopreservation method optimized for storing and recovering human cells with high recovery, viability, phenotype, and/or functional capacity. Commercially-available cryopreservation media and/or protocols may be used. Cryopreservation methods of the disclosure may include a DMSO free cryopreservant (e.g. CryoSOfree™ DMSO-free Cryopreservation Medium) reduce freezing-related toxicity.

[0437] T cell compositions, T cell product compositions, unstimulated T cell compositions, resting T cell compositions or any portion thereof may be stored in a culture medium. T cell culture media of the disclosure may be optimized for cell storage, cell genetic modification, cell phenotype and/or cell expansion. T cell culture media of the disclosure may include one or more antibiotics. Because the inclusion of an antibiotic within a cell culture media may decrease transfection efficiency and/or cell yield following genetic modification via nucleofection, the specific antibiotics (or combinations thereof) and their respective concentration(s) may be altered for optimal transfection efficiency and/or cell yield following genetic modification via nucleofection.

[0438] T cell culture media of the disclosure may include serum, and, moreover, the serum composition and concentration may be altered for optimal cell outcomes. Human AB serum is preferred over FBS/FCS for culture of T cells because, although contemplated for use in T cell culture media of the disclosure, FBS/FCS may introduce xeno-proteins. Serum may be isolated form the blood of the subject for whom the T-cell composition in culture is intended for administration, thus, a T cell culture medium of the disclosure may comprise autologous serum. Serum-free media or serum-substitute may also be used in T-cell culture media of the disclosure. In certain embodiments of the T-cell culture media and methods of the disclosure, serum-free media or serum-substitute may provide advantages over supplementing the medium with xeno-serum, including, but not limited to, healthier cells that have greater viability, nucleofect with higher efficiency, exhibit greater viability post-nucleofection, display a more desirable cell phenotype, and/or greater/faster expansion upon addition of expansion technologies.

[0439] T cell culture media may include a commercially-available cell growth media. Exemplary commercially-available cell growth media include, but are not limited to, PBS, HBSS, OptiMEM, DMEM, RPMI 1640, AIM-V, X-VIVO 15, CellGro DC Medium, CTS OpTimizer T Cell Expansion SFM, TexMACS Medium, PRIME-XV T Cell Expansion Medium, ImmunoCult-XF T Cell Expansion Medium, or any combination thereof.

[0440] T cell compositions, T cell product compositions, unstimulated T cell compositions, resting T cell compositions or any portion thereof may be prepared for genetic modification. Preparation of T cell compositions, T cell product compositions, unstimulated T cell compositions, resting T cell compositions or any portion thereof for genetic modification may include cell washing and/or resuspension in a desired nucleofection buffer. Cryopreserved T-cell compositions may be thawed and prepared for genetic modification by nucleofection. Cryopreserved cells may be thawed according to standard or known protocols. Thawing and preparation of cryopreserved cells may be optimized to yield cells that have greater viability, nucleofect with higher efficiency, exhibit greater viability post-nucleofection, display a more desirable cell phenotype, and/or greater/faster expansion upon addition of expansion technologies. For example, Grifols Albutein (25% human albumin) may be used in the thawing and/or preparation process.

### Genetic Modification of an Autologous T Cell Product Composition

[0441] T cell compositions, T cell product compositions, unstimulated T cell compositions, resting T cell compositions or any portion thereof may be genetically modified using, for example, a nucleofection strategy such as electroporation. The total number of cells to be nucleofected, the total volume of the nucleofection reaction, and the precise timing of the preparation of the sample may be optimized to yield cells that have greater viability, nucleofect with higher efficiency, exhibit greater viability post-nucleofection, display a more desirable cell phenotype, and/or greater/faster expansion upon addition of expansion technologies.

[0442] Nucleofection and/or electroporation may be accomplished using, for example, Lonza Amaxa, MaxCyte PulseAgile, Harvard Apparatus BTX, and/or Invitrogen Neon. Non-metal electrode systems, including, but not limited to, plastic polymer electrodes, may be preferred for nucleofection.

[0443] Prior to genetic modification by nucleofection, T cell compositions, T cell product compositions, unstimulated T cell compositions, resting T cell compositions or any portion thereof may be resuspended in a nucleofection buffer. Nucleofection buffers of the disclosure include commercially-available nucleofection buffers. Nucleofection buffers of the disclosure may be optimized to yield cells that have greater viability, nucleofect with higher efficiency, exhibit greater viability post-nucleofection, display a more desirable cell phenotype, and/or greater/faster expansion upon addition of expansion technologies. Nucleofection buffers of the disclosure may include, but are not limited to, PBS, HBSS, OptiMEM, BTXpress, Amaxa Nucleofector, Human T cell nucleofection buffer and any combination thereof. Nucleofection buffers of the disclosure may comprise one or more supplemental factors to yield cells that have greater viability, nucleofect with higher efficiency, exhibit greater viability post-nucleofection, display a more desirable cell phenotype, and/or greater/faster expansion upon addition of expansion technologies. Exemplary supplemental factors include, but are not limited to, recombinant human cytokines, chemokines, interleukins and any combination thereof.

[0444] Exemplary cytokines, chemokines, and interleukins include, but are not limited to, IL2, IL7, IL12, IL 15, IL21, IL1, IL3, IL4, IL5, IL6, IL8, CXCL8, IL9, IL10, IL11, IL13, IL14, IL 16, IL17, IL18, IL 19, IL20, IL22, IL23, IL25, IL26, IL27, IL28, IL29, IL30, IL31, IL32, IL33, IL35, IL36, GM-CSF, IFN-gamma, IL-1 alpha/IL-1F1, IL-1 beta/IL-1F2, IL-12 p70, IL-12/IL-35 p35, IL-13, IL-17/IL-17A, IL-17A/F Heterodimer, IL-17F, IL-18/IL-1F4, IL-23, IL-24, IL-32, IL-32 beta, IL-32 gamma, IL-33, LAP (TGF-beta 1), Lymphotoxin-alpha/TNF-beta, TGF-beta, TNF-alpha, TRANCE/TNFSF11/RANK L and any combination thereof. Exemplary supplemental factors include, but are not limited to, salts, minerals, metabolites or any combination thereof. Exemplary salts, minerals, and metabolites include, but are not limited to, HEPES, Nicotinamide, Heparin, Sodium Pyruvate, L-Glutamine, MEM Non-Essential Amino Acid Solution, Ascorbic Acid, Nucleosides, FBS/FCS, Human serum, serum-substitute, anti-biotics, pH adjusters, Earle's Salts, 2-Mercaptoethanol, Human transferrin, Recombinant human insulin, Human serum albumin, Nucleofector PLUS Supplement, KCL, MgCl2, Na2HPO4, NAH2PO4, Sodium lactobionate, Manitol, Sodium succinate, Sodium Chloride, ClNa, Glucose, Ca(NO3)2, Tris/HCl, K2HPO4, KH2PO4, Polyethylenimine, Poly-ethylene-glycol, Poloxamer 188, Poloxamer 181, Poloxamer 407, Poly-vinylpyrrolidone, Pop313, Crown-5, and any combination thereof. Exemplary supplemental factors include, but are not limited to, media such as PBS, HBSS, OptiMEM, DMEM, RPMI 1640, AIM-V, X-VIVO 15, CellGro DC Medium, CTS OpTimizer T Cell Expansion SFM, TexMACS Medium, PRIME-XV T Cell Expansion Medium, ImmunoCult-XF T Cell Expansion Medium and any combination thereof. Exemplary supplemental factors include, but are not limited to, inhibitors of cellular DNA sensing, metabolism, differentiation, signal transduction, the apoptotic pathway and combinations thereof. Exemplary inhibitors include, but are not limited to, inhibitors of TLR9, MyD88, IRAK, TRAF6, TRAF3, IRF-7, NF-KB, Type 1 Interferons, pro-inflammatory cytokines, cGAS, STING, Sec5, TBK1, IRF-3, RNA pol III, RIG-1, IPS-1, FADD, RIP1, TRAF3, AIM2, ASC, Caspasel, Pro-ILIB, PI3K, Akt, Wnt3A, inhibitors of glycogen synthase kinase-3β (GSK-3 β) (e.g. TWS119), Bafilomycin, Chloroquine, Quinacrine, AC-YVAD-CMK, Z-VAD-FMK, Z-IETD-FMK and any combination thereof. Exemplary supplemental factors include, but are not limited to, reagents that modify or stabilize one or more nucleic acids in a way to enhance cellular delivery, enhance nuclear delivery or transport, enhance the facilitated transport of nucleic acid into the nucleus, enhance degradation of epi-chromosomal nucleic acid, and/or decrease DNA-mediated toxicity. Exemplary reagents that modify or stabilize one or more nucleic acids include, but are not limited to, pH modifiers, DNA-binding proteins, lipids, phospholipids, CaPO4, net neutral charge DNA binding peptides with or without NLS sequences, TREX1 enzyme, and any combination thereof.

[0445] Transposition reagents, including a transposon and a transposase, may be added to a nucleofection reaction of the disclosure prior to, simultaneously with, or after an addition of cells to a nucleofection buffer (optionally, contained within a nucleofection reaction vial or cuvette). Transposons of the disclosure may comprise plasmid DNA, nanoplasmid, linearized plasmid DNA, a PCR product, DOGGYBONET DNA, an mRNA template, a single or double-stranded DNA, a protein-nucleic acid combination or any combination thereof. Transposons of the disclosure may comprised one or more sequences that encode one or more TTAA site(s), one or more inverted terminal repeat(s) (ITRs), one or more long terminal repeat(s) (LTRs), one or more insulator(s), one or more promotor(s), one or more full-length or truncated gene(s), one or more poly A signal(s), one or more self-cleaving 2A peptide cleavage site(s), one or more internal ribosome entry site(s) (IRES), one or more enhancer(s), one or more regulator(s), one or more replication origin(s), and any combination thereof.

[0446] Transposons of the disclosure may comprise one or more sequences that encode one or more full-length or truncated gene(s). Full-length and/or truncated gene(s) introduced by transposons of the disclosure may encode one or more of a signal peptide, a Centyrin, a single chain variable fragment (scFv), a hinge, a transmembrane domain, a costimulatory domain, a chimeric antigen receptor (CAR), a chimeric T-cell receptor (CAR-T), a CARTyrin (a CAR-T comprising a Centyrin), a receptor, a ligand, a cytokine, a drug resistance gene, a tumor antigen, an allo or auto antigen, an enzyme, a protein, a peptide, a poly-peptide, a fluorescent protein, a mutein or any combination thereof.

[0447] Transposons of the disclosure may be prepared in water, TAE, TBE, PBS, HBSS, media, a supplemental factor of the disclosure or any combination thereof.

[0448] Transposons of the disclosure may be designed to optimize clinical safety and/or improve manufacturability. As a non-limiting example, transposons of the disclosure may be designed to optimize clinical safety and/or improve manufacturability by eliminating unnecessary sequences or regions and/or including a non-antibiotic selection marker. Transposons of the disclosure may or may not be GMP grade.

[0449] Transposase enzymes of the disclosure may be encoded by one or more sequences of plasmid DNA, nanoplasmid DNA, RNA, protein, protein-nucleic acid combination or any combination thereof.

[0450] Transposase enzymes of the disclosure may be prepared in water, TAE, TBE, PBS, HBSS, media, a supplemental factor of the disclosure or any combination thereof. Transposase enzymes of the disclosure or the sequences/constructs encoding or delivering them may or may not be GMP grade.

[0451] Transposons and transposase enzymes of the disclosure may be delivered to a cell by any means.

[0452] Although compositions and methods of the disclosure include delivery of a transposon and/or transposase of the disclosure to a cell by plasmid DNA (pDNA) or nanoplasmid DNA, the use of a plasmid or a nanoplasmid for delivery may allow the transposon and/or transposase to be integrated into the chromosomal DNA of the cell, which may lead to continued transposase expression. Accordingly, transposon and/or transposase enzymes of the disclosure may be delivered to a cell as either mRNA or protein to remove any possibility for chromosomal integration.

[0453] Transposons and transposases of the disclosure may be pre-incubated alone or in combination with one another prior to the introduction of the transposon and/or transposase into a nucleofection reaction. The absolute amounts of each of the transposon and the transposase, as well as the relative amounts, e.g., a ratio of transposon to transposase may be optimized.

[0454] Following preparation of nucleofection reaction, optionally, in a vial or cuvette, the reaction may be loaded into a nucleofector apparatus and activated for delivery of an electric pulse according to the manufacturer's protocol. Electric pulse conditions used for delivery of a transposon and/or a transposase of the disclosure (or a sequence encoding a transposon and/or a transposase of the disclosure) to a cell may be optimized for yielding cells with enhanced viability, higher nucleofection efficiency, greater viability post-nucleofection, desirable cell phenotype, and/or greater/faster expansion upon addition of expansion technologies. When using Amaxa nucleofector technology, each of the various nucleofection programs for the Amaxa 2B or 4D nucleofector are contemplated.

[0455] Following a nucleofection reaction of the disclosure, cells may be gently added to a cell medium. For example, when T cells undergo the nucleofection reaction, the T cells may be added to a T cell medium. Post-nucleofection cell media of the disclosure may comprise any one or more commercially-available media. Post-nucleofection cell media of the disclosure (including post-nucleofection T cell media of the disclosure) may be optimized to yield cells with greater viability, higher nucleofection efficiency, exhibit greater viability post-nucleofection, display a more desirable cell phenotype, and/or greater/faster expansion upon addition of expansion technologies. Post-nucleofection cell media of the disclosure (including post-nucleofection T cell media of the disclosure) may comprise PBS, HBSS, OptiMEM, DMEM, RPMI 1640, AIM-V, X-VIVO 15, CellGro DC Medium, CTS OpTimizer T Cell Expansion SFM, TexMACS Medium, PRIME-XV T Cell Expansion Medium, ImmunoCult-XF T Cell Expansion Medium and any combination thereof. Post-nucleofection cell media of the disclosure (including post-nucleofection T cell media of the disclosure) may comprise one or more supplemental factors of the disclosure to enhance viability, nucleofection efficiency, viability post-nucleofection, cell phenotype, and/or greater/faster expansion upon addition of expansion technologies. Exemplary supplemental factors include, but are not limited to, recombinant human cytokines, chemokines, interleukins and any combination thereof. Exemplary cytokines, chemokines, and interleukins include, but are not limited to, IL2, IL7, IL 12, IL15, IL21, IL1, IL3, IL4, IL5, IL6, IL8, CXCL8, IL9, IL10, IL11, IL13, IL 14, IL 16, IL17, IL18, IL19, IL20, IL22, IL23, IL25, IL26, IL27, IL28, IL29, IL30, IL31, IL32, IL33, IL35, IL36, GM-CSF, IFN-gamma, IL-1 alpha/IL-1F1, IL-1 beta/IL-1F2, IL-12 p70, IL-12/IL-35 p35, IL-13, IL-17/IL-17A, IL-17A/F Heterodimer, IL-17F, IL-18/IL-1F4, IL-23, IL-24, IL-32, IL-32 beta, IL-32 gamma, IL-33, LAP (TGF-beta 1), Lymphotoxin-alpha/TNF-beta, TGF-beta, TNF-alpha, TRANCE/TNFSF11/RANK L and any combination thereof. Exemplary supplemental factors include, but are not limited to, salts, minerals, metabolites or any combination thereof. Exemplary salts, minerals, and metabolites include, but are not limited to, HEPES, Nicotinamide, Heparin, Sodium Pyruvate, L-Glutamine, MEM Non-Essential Amino Acid Solution, Ascorbic Acid, Nucleosides, FBS/FCS, Human serum, serum-substitute, anti-biotics, pH adjusters, Earle's Salts, 2-Mercaptoethanol, Human transferrin, Recombinant human insulin, Human serum albumin, Nucleofector PLUS Supplement, KCL, MgCl2, Na2HPO4, NAH2PO4, Sodium lactobionate, Manitol, Sodium succinate, Sodium Chloride, ClNa, Glucose, Ca(NO3)2, Tris/HCl, K2HPO4, KH2PO4, Polyethylenimine, Poly-ethylene-glycol, Poloxamer 188, Poloxamer 181, Poloxamer 407, Poly-vinylpyrrolidone, Pop313, Crown-5, and any combination thereof. Exemplary supplemental factors include, but are not limited to, media such as PBS, HBSS, OptiMEM, DMEM, RPMI 1640, AIM-V, X-VIVO 15, CellGro DC Medium, CTS OpTimizer T Cell Expansion SFM, TexMACS Medium, PRIME-XV T Cell Expansion Medium, ImmunoCult-XF T Cell Expansion Medium and any combination thereof. Exemplary supplemental factors include, but are not limited to, inhibitors of cellular DNA sensing, metabolism, differentiation, signal transduction, the apoptotic pathway and combinations thereof. Exemplary inhibitors include, but are not limited to, inhibitors of TLR9, MyD88, IRAK, TRAF6, TRAF3, IRF-7, NF-KB, Type 1 Interferons, pro-inflammatory cytokines, cGAS, STING, Sec5, TBK1, IRF-3, RNA pol III, RIG-1, IPS-1, FADD, RIP1, TRAF3, AIM2, ASC, Caspasel, Pro-IL1B, PI3K, Akt, Wnt3A, inhibitors of glycogen synthase kinase-3β (GSK-3 β) (e.g. TWS119), Bafilomycin, Chloroquine, Quinacrine, AC-YVAD-CMK, Z-VAD-FMK, Z-IETD-FMK and any combination thereof. Exemplary supplemental factors include, but are not limited to, reagents that modify or stabilize one or more nucleic acids in a way to enhance cellular delivery, enhance nuclear delivery or transport, enhance the facilitated transport of nucleic acid into the nucleus, enhance degradation of epi-chromosomal nucleic acid, and/or decrease DNA-mediated toxicity. Exemplary reagents that modify or stabilize one or more nucleic acids include, but are not limited to, pH modifiers, DNA-binding proteins, lipids, phospholipids, CaPO4, net neutral charge DNA binding peptides with or without NLS sequences, TREX1 enzyme, and any combination thereof.

[0456] Post-nucleofection cell media of the disclosure (including post-nucleofection T cell media of the disclosure) may be used at room temperature or pre-warmed to, for example to between 32° C. to 37° C., inclusive of the endpoints. Post-nucleofection cell media of the disclosure (including post-nucleofection T cell media of the disclosure) may be pre-warmed to any temperature that maintains or enhances cell viability and/or expression of a transposon or portion thereof of the disclosure.

[0457] Post-nucleofection cell media of the disclosure (including post-nucleofection T cell media of the disclosure) may be contained in tissue culture flasks or dishes, G-Rex flasks, Bioreactor or cell culture bags, or any other standard receptacle. Post-nucleofection cell cultures of the disclosure (including post-nucleofection T cell cultures of the disclosure) may be kept still, or, alternatively, they may be perturbed (e.g. rocked, swirled, or shaken).

[0458] Post-nucleofection cell cultures may comprise genetically-modified cells. Post-nucleofection T cell cultures may comprise genetically-modified T cells. Genetically modified cells of the disclosure may be either rested for a defined period of time or stimulated for expansion by, for example, the addition of a T Cell Expander technology. In certain embodiments, genetically modified cells of the disclosure may be either rested for a defined period of time or immediately stimulated for expansion by, for example, the addition of a T Cell Expander technology. Genetically modified cells of the disclosure may be rested to allow them sufficient time to acclimate, time for transposition to occur, and/or time for positive or negative selection, resulting in cells with enhanced viability, higher nucleofection efficiency, greater viability post-nucleofection, desirable cell phenotype, and/or greater/faster expansion upon addition of expansion technologies. Genetically modified cells of the disclosure may be rested, for example, for 1, 2, 3, 4, 5, 6, 7, 8, 9, 10, 11, 12, 13, 14, 15, 16, 17, 18, 19, 20, 21, 22, 23, 24, or more hours. In certain embodiments, genetically modified cells of the disclosure may be rested, for example, for an overnight. In certain aspects, an overnight is about 12 hours. Genetically modified cells of the disclosure may be rested, for example, for 1, 2, 3, 4, 5, 6, 7, 8, 9, 10, 11, 12, 13, 14 or more days.

[0459] Genetically modified cells of the disclosure may be selected following a nucleofection reaction and prior to addition of an expander technology. For optimal selection of genetically-modified cells, the cells may be allowed to rest in a post-nucleofection cell medium for at least 2-14 days to facilitate identification of modified cells (e.g., differentiation of modified from non-modified cells).

[0460] As early as 24-hours post-nucleofection, expression of a CAR/CARTyrin and selection marker of the disclosure may be detectable in modified T cells upon successful nucleofection of a transposon of the disclosure. Due to epi-chromosomal expression of the transposon, expression of a selection marker alone may not differentiate modified T cells (those cells in which the transposon has been successfully integrated) from unmodified T cells (those cells in which the transposon was not successfully integrated). When epi-chromosomal expression of the transposon obscures the detection of modified cells by the selection marker, the nucleofected cells (both modified and unmodified cells) may be rested for a period of time (e.g. 2-14 days) to allow the cells to cease expression or lose all epi-chromosomal transposon expression. Following this extended resting period, only modified T cells should remain positive for expression of selection marker. The length of this extended resting period may be optimized for each nucleofection reaction and selection process. When epi-chromosomal expression of the transposon obscures the detection of modified cells by the selection marker, selection may be performed without this extended resting period, however, an additional selection step may be included at a later time point (e.g. either during or after the expansion stage).

[0461] Selection of genetically modified cells of the disclosure may be performed by any means. In certain embodiments of the methods of the disclosure, selection of genetically modified cells of the disclosure may be performed by isolating cells expressing a specific selection marker. Selection markers of the disclosure may be encoded by one or more sequences in the transposon. Selection markers of the disclosure may be expressed by the modified cell as a result of successful transposition (i.e., not encoded by one or more sequences in the transposon). In certain embodiments, genetically modified cells of the disclosure contain a selection marker that confers resistance to a deleterious compound of the post-nucleofection cell medium. The deleterious compound may comprise, for example, an antibiotic or a drug that, absent the resistance conferred by the selection marker to the modified cells, would result in cell death. Exemplary selection markers include, but are not limited to, wild type (WT) or mutant forms of one or more of the following genes: neo, DHFR, TYMS, ALDH, MDR1, MGMT, FANCF, RAD51C, GCS, and NKX2.2. Exemplary selection markers include, but are not limited to, a surface-expressed selection marker or surface-expressed tag may be targeted by Ab-coated magnetic bead technology or column selection, respectively. A cleavable tag such as those used in protein purification may be added to a selection marker of the disclosure for efficient column selection, washing, and elution. In certain embodiments, selection markers of the disclosure are not expressed by the modified cells (including modified T cells) endogenously and, therefore, may be useful in the physical isolation of modified cells (by, for example, cell sorting techniques). Exemplary selection markers of the disclosure are not expressed by the modified cells (including modified T cells) endogenously include, but are not limited to, full-length, mutated, or truncated forms of CD271, CD19 CD52, CD34, RQR8, CD22, CD20, CD33 and any combination thereof.

[0462] Genetically modified cells of the disclosure may be selective expanded following a nucleofection reaction. In certain embodiments, modified T cells comprising a CAR/CARTyrin may be selectively expanded by CAR/CARTyrin stimulation. Modified T cells comprising a CAR/CARTyrin may be stimulated by contact with a target-covered reagent (e.g. a tumor line or a normal cell line expressing a target or expander beads covered in a target). Alternatively, modified T cells comprising a CAR/CARTyrin may be stimulated by contact with an irradiated tumor cell, an irradiated allogeneic normal cell, an irradiated autologous PBMC. To minimize contamination of cell product compositions of the disclosure with a target-expressing cell used for stimulation, for example, when the cell product composition may be administered directly to a subject, the stimulation may be performed using expander beads coated with CAR/CARTyrin target protein. Selective expansion of modified T cells comprising a CAR/CARTyrin by CAR/CARTyrin stimulation may be optimized to avoid functionally-exhausting the modified T-cells.

[0463] Selected genetically-modified cells of the disclosure may be cryopreserved, rested for a defined period of time, or stimulated for expansion by the addition of a Cell Expander technology. Selected genetically-modified cells of the disclosure may be cryopreserved, rested for a defined period of time, or immediately stimulated for expansion by the addition of a Cell Expander technology. When the selected genetically-modified cells are T cells, the T cells may be stimulated for expansion by the addition of a T-Cell Expander technology. Selected genetically modified cells of the disclosure may be rested, for example, for 1, 2, 3, 4, 5, 6, 7, 8, 9, 10, 11, 12, 13, 14, 15, 16, 17, 18, 19, 20, 21, 22, 23, 24, or more hours. In certain embodiments, selected genetically modified cells of the disclosure may be rested, for example, for an overnight. In certain aspects, an overnight is about 12 hours. Selected genetically modified cells of the disclosure may be rested, for example, for 1, 2, 3, 4, 5, 6, 7, 8, 9, 10, 11, 12, 13, 14 or more days. Selected genetically modified cells of the disclosure may be rested for any period of time resulting in cells with enhanced viability, higher nucleofection efficiency, greater viability post-nucleofection, desirable cell phenotype, and/or greater/faster expansion upon addition of expansion technologies.

[0464] Selected genetically-modified cells (including selected genetically-modified T cells of the disclosure) may be cryopreserved using any standard cryopreservation method, which may be optimized for storing and/or recovering human cells with high recovery, viability, phenotype, and/or functional capacity. Cryopreservation methods of the disclosure may include commercially-available cryopreservation media and/or protocols.

[0465] A transposition efficiency of selected genetically-modified cells (including selected genetically-modified T cells of the disclosure) may be assessed by any means. For example, prior to the application of an expander technology, expression of the transposon by selected genetically-modified cells (including selected genetically-modified T cells of the disclosure) may be measured by fluorescence-activated cell sorting (FACS). Determination of a transposition efficiency of selected genetically-modified cells (including selected genetically-modified T cells of the disclosure) may include determining a percentage of selected cells expressing the transposon (e.g. a CAR). Alternatively, or in addition, a purity of T cells, a Mean Fluorescence Intensity (MFI) of the transposon expression (e.g. CAR expression), an ability of a CAR (delivered in the transposon) to mediate degranulation and/or killing of a target cell expressing the CAR ligand, and/or a phenotype of selected genetically-modified cells (including selected genetically-modified T cells of the disclosure) may be assessed by any means.

[0466] Cell product compositions of the disclosure may be released for administration to a subject upon meeting certain release criteria. Exemplary release criteria may include, but are not limited to, a particular percentage of modified, selected and/or expanded T cells expressing detectable levels of a CAR on the cell surface.

### Genetic Modification of an Autologous T Cell Product Composition

[0467] Genetically-modified cells (including genetically-modified T cells) of the disclosure may be expanded using an expander technology. Expander technologies of the disclosure may comprise a commercially-available expander technology. Exemplary expander technologies of the disclosure include stimulation a genetically-modified T cell of the disclosure via the TCR. While all means for stimulation of a genetically-modified T cell of the disclosure are contemplated, stimulation a genetically-modified T cell of the disclosure via the TCR is a preferred method, yielding a product with a superior level of killing capacity.

[0468] To stimulate a genetically-modified T cell of the disclosure via the TCR, Thermo Expander DynaBeads may be used at a 3:1 bead to T cell ratio. If the expander beads are not biodegradable, the beads may be removed from the expander composition. For example, the beads may be removed from the expander composition after about 5 days. To stimulate a genetically-modified T cell of the disclosure via the TCR, a Miltenyi T Cell Activation/Expansion Reagent may be used. To stimulate a genetically-modified T cell of the disclosure via the TCR, StemCell Technologies' ImmunoCult Human CD3/CD28 or CD3/CD28/CD2 T Cell Activator Reagent may be used. This technology may be preferred since the soluble tetrameric antibody complexes would degrade after a period and would not require removal from the process.

[0469] Artificial antigen presenting cells (APCs) may be engineered to co-express the target antigen and may be used to stimulate a cell or T-cell of the disclosure through a TCR and/or CAR of the disclosure. Artificial APCs may comprise or may be derived from a tumor cell line (including, for example, the immortalized myelogenous leukemia line K562) and may be engineered to co-express multiple costimulatory molecules or technologies (such as CD28, 4-1BBL, CD64, mbIL-21, mbIL-15, CAR target molecule, etc.). When artificial APCs of the disclosure are combined with costimulatory molecules, conditions may be optimized to prevent the development or emergence of an undesirable phenotype and functional capacity, namely terminally-differentiated effector T cells.

[0470] Irradiated PBMCs (auto or allo) may express some target antigens, such as CD19, and may be used to stimulate a cell or T-cell of the disclosure through a TCR and/or CAR of the disclosure. Alternatively, or in addition, irradiated tumor cells may express some target antigens and may be used to stimulate a cell or T-cell of the disclosure through a TCR and/or CAR of the disclosure.

[0471] Plate-bound and/or soluble anti-CD3, anti-CD2 and/or anti-CD28 stimulate may be used to stimulate a cell or T-cell of the disclosure through a TCR and/or CAR of the disclosure.

[0472] Antigen-coated beads may display target protein and may be used to stimulate a cell or T-cell of the disclosure through a TCR and/or CAR of the disclosure. Alternatively, or in addition, expander beads coated with a CAR/CARTyrin target protein may be used to stimulate a cell or T-cell of the disclosure through a TCR and/or CAR of the disclosure.

[0473] Expansion methods drawn to stimulation of a cell or T-cell of the disclosure through the TCR or CAR/CARTyrin and via surface-expressed CD2, CD3, CD28, 4-1BB, and/or other markers on genetically-modified T cells.

[0474] An expansion technology may be applied to a cell of the disclosure immediately post-nucleofection until approximately 24 hours post-nucleofection. While various cell media may be used during an expansion procedure, a desirable T Cell Expansion Media of the disclosure may yield cells with, for example, greater viability, cell phenotype, total expansion, or greater capacity for in vivo persistence, engraftment, and/or CAR-mediated killing. Cell media of the disclosure may be optimized to improve/enhance expansion, phenotype, and function of genetically-modified cells of the disclosure. A preferred phenotype of expanded T cells may include a mixture of T stem cell memory, T central, and T effector memory cells. Expander Dynabeads may yield mainly central memory T cells which may lead to superior performance in the clinic.

[0475] Exemplary T cell expansion media of the disclosure may include, in part or in total, PBS, HBSS, OptiMEM, DMEM, RPMI 1640, AIM-V, X-VIVO 15, CellGro DC Medium, CTS OpTimizer T Cell Expansion SFM, TexMACS Medium, PRIME-XV T Cell Expansion Medium, ImmunoCult-XF T Cell Expansion Medium, or any combination thereof. T cell expansion media of the disclosure may further include one or more supplemental factors. Supplemental factors that may be included in a T cell expansion media of the disclosure enhance viability, cell phenotype, total expansion, or increase capacity for in vivo persistence, engraftment, and/or CAR-mediated killing. Supplemental factors that may be included in a T cell expansion media of the disclosure include, but are not limited to, recombinant human cytokines, chemokines, and/or interleukins such as IL2, IL7, IL12, IL15, IL21, IL1, IL3, IL4, IL5, IL6, IL8, CXCL8, IL9, IL10, IL11, IL13, IL14, IL16, IL17, IL18, IL19, IL20, IL22, IL23, IL25, IL26, IL27, IL28, IL29, IL30, IL31, IL32, IL33, IL35, IL36, GM-CSF, IFN-gamma, IL-1 alpha/IL-1F1, IL-1 beta/IL-1F2, IL-12 p70, IL-12/IL-35 p35, IL-13, IL-17/IL-17A, IL-17A/F Heterodimer, IL-17F, IL-18/IL-1F4, IL-23, IL-24, IL-32, IL-32 beta, IL-32 gamma, IL-33, LAP (TGF-beta 1), Lymphotoxin-alpha/TNF-beta, TGF-beta, TNF-alpha, TRANCE/TNFSF11/RANK L, or any combination thereof. Supplemental factors that may be included in a T cell expansion media of the disclosure include, but are not limited to, salts, minerals, and/or metabolites such as HEPES, Nicotinamide, Heparin, Sodium Pyruvate, L-Glutamine, MEM Non-Essential Amino Acid Solution, Ascorbic Acid, Nucleosides, FBS/FCS, Human serum, serum-substitute, anti-biotics, pH adjusters, Earle's Salts, 2-Mercaptoethanol, Human transferrin, Recombinant human insulin, Human serum albumin, Nucleofector PLUS Supplement, KCL, MgCl2, Na2HPO4, NAH2PO4, Sodium lactobionate, Manitol, Sodium succinate, Sodium Chloride, ClNa, Glucose, Ca(NO3)2, Tris/HCl, K2HPO4, KH2PO4, Polyethylenimine, Poly-ethylene-glycol, Poloxamer 188, Poloxamer 181, Poloxamer 407, Poly-vinylpyrrolidone, Pop313, Crown-5 or any combination thereof. Supplemental factors that may be included in a T cell expansion media of the disclosure include, but are not limited to, inhibitors of cellular DNA sensing, metabolism, differentiation, signal transduction, and/or the apoptotic pathway such as inhibitors of TLR9, MyD88, IRAK, TRAF6, TRAF3, IRF-7, NF-KB, Type 1 Interferons, pro-inflammatory cytokines, cGAS, STING, Sec5, TBK1, IRF-3, RNA pol III, RIG-1, IPS-1, FADD, RIP1, TRAF3, AIM2, ASC, Caspasel, Pro-IL1B, PI3K, Akt, Wnt3A, inhibitors of glycogen synthase kinase-3β (GSK-3 β) (e.g. TWS119), Bafilomycin, Chloroquine, Quinacrine, AC-YVAD-CMK, Z-VAD-FMK, Z-IETD-FMK, or any combination thereof.

[0476] Supplemental factors that may be included in a T cell expansion media of the disclosure include, but are not limited to, reagents that modify or stabilize nucleic acids in a way to enhance cellular delivery, enhance nuclear delivery or transport, enhance the facilitated transport of nucleic acid into the nucleus, enhance degradation of epi-chromosomal nucleic acid, and/or decrease DNA-mediated toxicity, such as pH modifiers, DNA-binding proteins, lipids, phospholipids, CaPO4, net neutral charge DNA binding peptides with or without NLS sequences, TREX1 enzyme, or any combination thereof.

[0477] Genetically-modified cells of the disclosure may be selected during the expansion process by the use of selectable drugs or compounds. For example, in certain embodiments, when a transposon of the disclosure may encode a selection marker that confers to genetically-modified cells resistance to a drug added to the culture medium, selection may occur during the expansion process and may require approximately 1-14 days of culture for selection to occur. Examples of drug resistance genes that may be used as selection markers encoded by a transposon of the disclosure, include, but are not limited to, wild type (WT) or mutant forms of the genes neo, DHFR, TYMS, ALDH, MDR1, MGMT, FANCF, RAD51C, GCS, NKX2.2, or any combination thereof. Examples of corresponding drugs or compounds that may be added to the culture medium to which a selection marker may confer resistance include, but are not limited to, G418, Puromycin, Ampicillin, Kanamycin, Methotrexate, Mephalan, Temozolomide, Vincristine, Etoposide, Doxorubicin, Bendamustine, Fludarabine, Aredia (Pamidronate Disodium), Becenum (Carmustine), BiCNU (Carmustine), Bortezomib, Carfilzomib, Carmubris (Carmustine), Carmustine, Clafen (Cyclophosphamide), Cyclophosphamide, Cytoxan (Cyclophosphamide), Daratumumab, Darzalex (Daratumumab), Doxil (Doxorubicin Hydrochloride Liposome), Doxorubicin Hydrochloride Liposome, Dox-SL (Doxorubicin Hydrochloride Liposome), Elotuzumab, Empliciti (Elotuzumab), Evacet (Doxorubicin Hydrochloride Liposome), Farydak (Panobinostat), Ixazomib Citrate, Kyprolis (Carfilzomib), Lenalidomide, LipoDox (Doxorubicin Hydrochloride Liposome), Mozobil (Plerixafor), Neosar (Cyclophosphamide), Ninlaro (Ixazomib Citrate), Pamidronate Disodium, Panobinostat, Plerixafor, Pomalidomide, Pomalyst (Pomalidomide), Revlimid (Lenalidomide), Synovir (Thalidomide), Thalidomide, Thalomid (Thalidomide), Velcade (Bortezomib), Zoledronic Acid, Zometa (Zoledronic Acid), or any combination thereof.

[0478] A T-Cell Expansion process of the disclosure may occur in a cell culture bag in a WAVE Bioreactor, a G-Rex flask, or in any other suitable container and/or reactor.

[0479] A cell or T-cell culture of the disclosure may be kept steady, rocked, swirled, or shaken.

[0480] A cell or T-cell expansion process of the disclosure may optimize certain conditions, including, but not limited to culture duration, cell concentration, schedule for T cell medium addition/removal, cell size, total cell number, cell phenotype, purity of cell population, percentage of genetically-modified cells in growing cell population, use and composition of supplements, the addition/removal of expander technologies, or any combination thereof.

[0481] A cell or T-cell expansion process of the disclosure may continue until a predefined endpoint prior to formulation of the resultant expanded cell population. For example, a cell or T-cell expansion process of the disclosure may continue for a predetermined amount of time: at least, 2, 4, 6, 8, 10, 12, 14, 16, 18, 20, 22, 24 hours; at least 1, 2, 3, 4, 5, 6, 7, 8, 9, 10, 11, 12, 13, 14, 15, 16, 17, 18, 19, 20, 21, 22, 23, 24, 25, 26, 27, 28, 29, 30 days; at least 1, 2, 3, 4, 5, 6, 7, 8, 9, 10, 11, 12 weeks; at least 1, 2, 3, 4, 5, 6, months, or at least 1 year. A cell or T-cell expansion process of the disclosure may continue until the resultant culture reaches a predetermined overall cell density: 1, 10, 100, 1000, 104, 105, 106, 107, 108, 109, 1010 cells per volume (μl, ml, L) or any density in between. A cell or T-cell expansion process of the disclosure may continue until the genetically-modified cells of a resultant culture demonstrate a predetermined level of expression of a transposon of the disclosure: 1%, 10%, 20%, 30%, 40%, 50%, 60%, 70%, 80%, 90%, or 100% or any percentage in between of a threshold level of expression (a minimum, maximum or mean level of expression indicating the resultant genetically-modified cells are clinically-efficacious). A cell or T-cell expansion process of the disclosure may continue until the proportion of genetically-modified cells of a resultant culture to the proportion of unmodified cells reaches a predetermined threshold: at least 1:10, 1:9, 1:8, 1:7, 1:6, 1:5, 1:4, 1:3, 1:2, 1:1, 2:1, 2:1, 4:1, 5:1, 6:1, 7:1, 8:1, 9:1 10:1 or any ratio in between.

### Analysis of Genetically-Modified Autologous T Cells for Release

[0482] A percentage of genetically-modified cells may be assessed during or after an expansion process of the disclosure. Cellular expression of a transposon by a genetically-modified cell of the disclosure may be measured by fluorescence-activated cell sorting (FACS). For example, FACS may be used to determine a percentage of cells or T cells expressing a CAR of the disclosure. Alternatively, or in addition, a purity of genetically-modified cells or T cells, the Mean Fluorescence Intensity (MFI) of a CAR expressed by a genetically-modified cell or T cell of the disclosure, an ability of the CAR to mediate degranulation and/or killing of a target cell expressing the CAR ligand, and/or a phenotype of CAR+ T cells may be assessed.

[0483] Compositions of the disclosure intended for administration to a subject may be required to meet one or more “release criteria” that indicate that the composition is safe and efficacious for formulation as a pharmaceutical product and/or administration to a subject. Release criteria may include a requirement that a composition of the disclosure (e.g. a T-cell product of the disclosure) comprises a particular percentage of T cells expressing detectable levels of a CAR of the disclosure on their cell surface.

[0484] The expansion process should be continued until a specific criterion has been met (e.g. achieving a certain total number of cells, achieving a particular population of memory cells, achieving a population of a specific size).

[0485] Certain criterion signal a point at which the expansion process should end. For example, cells should be formulated, reactivated, or cryopreserved once they reach a cell size of 300 fL (otherwise, cells reaching a size above this threshold may start to die). Cryopreservation immediately once a population of cells reaches an average cell size of less than 300 fL may yield better cell recovery upon thawing and culture because the cells haven't yet reached a fully quiescent state prior to cryopreservation (a fully quiescent size is approximately 180 fL). Prior to expansion, T cells of the disclosure may have a cell size of about 180 fL, but may more than quadruple their cell size to approximately 900 fL at 3 days post-expansion. Over the next 6-12 days, the population of T-cells will slowly decrease cell size to full quiescence at 180 fL.

[0486] A process for preparing a cell population for formulation may include, but is not limited to the steps of, concentrating the cells of the cell population, washing the cells, and/or further selection of the cells via drug resistance or magnetic bead sorting against a particular surface-expressed marker. A process for preparing a cell population for formulation may further include a sorting step to ensure the safety and purity of the final product. For example, if a tumor cell from a patient has been used to stimulate a genetically-modified T-cell of the disclosure or that have been genetically-modified in order to stimulate a genetically-modified T-cell of the disclosure that is being prepared for formulation, it is critical that no tumor cells from the patient are included in the final product.

Cell Product Infusion and/or Cryopreservation for Infusion

[0487] A pharmaceutical formulation of the disclosure may be distributed into bags for infusion, cryopreservation, and/or storage.

[0488] A pharmaceutical formulation of the disclosure may be cryopreserved using a standard protocol and, optionally, an infusible cryopreservation medium. For example, a DMSO free cryopreservant (e.g. CryoSOfree™ DMSO-free Cryopreservation Medium) may be used to reduce freezing-related toxicity. A cryopreserved pharmaceutical formulation of the disclosure may be stored for infusion to a patient at a later date. An effective treatment may require multiple administrations of a pharmaceutical formulation of the disclosure and, therefore, pharmaceutical formulations may be packaged in pre-aliquoted “doses” that may be stored frozen but separated for thawing of individual doses.

[0489] A pharmaceutical formulation of the disclosure may be stored at room temperature. An effective treatment may require multiple administrations of a pharmaceutical formulation of the disclosure and, therefore, pharmaceutical formulations may be packaged in pre-aliquoted “doses” that may be stored together but separated for administration of individual doses.

[0490] A pharmaceutical formulation of the disclosure may be archived for subsequent re-expansion and/or selection for generation of additional doses to the same patient in the case of an allogenic therapy who may need an administration at a future date following, for example, a remission and relapse of a condition.

### Formulations

[0491] As noted above, the disclosure provides for stable formulations, which preferably comprise a phosphate buffer with saline or a chosen salt, as well as preserved solutions and formulations containing a preservative as well as multi-use preserved formulations suitable for pharmaceutical or veterinary use, comprising at least one protein scaffold in a pharmaceutically acceptable formulation. Preserved formulations contain at least one known preservative or optionally selected from the group consisting of at least one phenol, m-cresol, p-cresol, o-cresol, chlorocresol, benzyl alcohol, phenylmercuric nitrite, phenoxyethanol, formaldehyde, chlorobutanol, magnesium chloride (e.g., hexahydrate), alkylparaben (methyl, ethyl, propyl, butyl and the like), benzalkonium chloride, benzethonium chloride, sodium dehydroacetate and thimerosal, polymers, or mixtures thereof in an aqueous diluent. Any suitable concentration or mixture can be used as known in the art, such as about 0.0015%, or any range, value, or fraction therein. Non-limiting examples include, no preservative, about 0.1-2% m-cresol (e.g., 0.2, 0.3. 0.4, 0.5, 0.9, 1.0%), about 0.1-3% benzyl alcohol (e.g., 0.5, 0.9, 1.1, 1.5, 1.9, 2.0, 2.5%), about 0.001-0.5% thimerosal (e.g., 0.005, 0.01), about 0.001-2.0% phenol (e.g., 0.05, 0.25, 0.28, 0.5, 0.9, 1.0%), 0.0005-1.0% alkylparaben(s) (e.g., 0.00075, 0.0009, 0.001, 0.002, 0.005, 0.0075, 0.009, 0.01, 0.02, 0.05, 0.075, 0.09, 0.1, 0.2, 0.3, 0.5, 0.75, 0.9, 1.0%), and the like.

[0492] As noted above, the invention provides an article of manufacture, comprising packaging material and at least one vial comprising a solution of at least one protein scaffold with the prescribed buffers and/or preservatives, optionally in an aqueous diluent, wherein said packaging material comprises a label that indicates that such solution can be held over a period of 1, 2, 3, 4, 5, 6, 9, 12, 18, 20, 24, 30, 36, 40, 48, 54, 60, 66, 72 hours or greater. The invention further comprises an article of manufacture, comprising packaging material, a first vial comprising lyophilized at least one protein scaffold, and a second vial comprising an aqueous diluent of prescribed buffer or preservative, wherein said packaging material comprises a label that instructs a patient to reconstitute the at least one protein scaffold in the aqueous diluent to form a solution that can be held over a period of twenty-four hours or greater.

[0493] The at least one protein scaffold used in accordance with the present invention can be produced by recombinant means, including from mammalian cell or transgenic preparations, or can be purified from other biological sources, as described herein or as known in the art.

[0494] The range of at least one protein scaffold in the product of the present invention includes amounts yielding upon reconstitution, if in a wet/dry system, concentrations from about 1.0 μg/ml to about 1000 mg/ml, although lower and higher concentrations are operable and are dependent on the intended delivery vehicle, e.g., solution formulations will differ from transdermal patch, pulmonary, transmucosal, or osmotic or micro pump methods.

[0495] Preferably, the aqueous diluent optionally further comprises a pharmaceutically acceptable preservative. Preferred preservatives include those selected from the group consisting of phenol, m-cresol, p-cresol, o-cresol, chlorocresol, benzyl alcohol, alkylparaben (methyl, ethyl, propyl, butyl and the like), benzalkonium chloride, benzethonium chloride, sodium dehydroacetate and thimerosal, or mixtures thereof. The concentration of preservative used in the formulation is a concentration sufficient to yield an anti-microbial effect. Such concentrations are dependent on the preservative selected and are readily determined by the skilled artisan.

[0496] Other excipients, e.g., isotonicity agents, buffers, antioxidants, and preservative enhancers, can be optionally and preferably added to the diluent. An isotonicity agent, such as glycerin, is commonly used at known concentrations. A physiologically tolerated buffer is preferably added to provide improved pH control. The formulations can cover a wide range of pHs, such as from about pH 4 to about pH 10, and preferred ranges from about pH 5 to about pH 9, and a most preferred range of about 6.0 to about 8.0. Preferably, the formulations of the present invention have a pH between about 6.8 and about 7.8. Preferred buffers include phosphate buffers, most preferably, sodium phosphate, particularly, phosphate buffered saline (PBS).

[0497] Other additives, such as a pharmaceutically acceptable solubilizers like Tween 20 (polyoxyethylene (20) sorbitan monolaurate), Tween 40 (polyoxyethylene (20) sorbitan monopalmitate), Tween 80 (polyoxyethylene (20) sorbitan monooleate), Pluronic F68 (polyoxyethylene polyoxypropylene block copolymers), and PEG (polyethylene glycol) or non-ionic surfactants, such as polysorbate 20 or 80 or poloxamer 184 or 188, Pluronic® polyls, other block co-polymers, and chelators, such as EDTA and EGTA, can optionally be added to the formulations or compositions to reduce aggregation. These additives are particularly useful if a pump or plastic container is used to administer the formulation. The presence of pharmaceutically acceptable surfactant mitigates the propensity for the protein to aggregate.

[0498] The formulations of the present invention can be prepared by a process which comprises mixing at least one protein scaffold and a preservative selected from the group consisting of phenol, m-cresol, p-cresol, o-cresol, chlorocresol, benzyl alcohol, alkylparaben, (methyl, ethyl, propyl, butyl and the like), benzalkonium chloride, benzethonium chloride, sodium dehydroacetate and thimerosal or mixtures thereof in an aqueous diluent. Mixing the at least one protein scaffold and preservative in an aqueous diluent is carried out using conventional dissolution and mixing procedures. To prepare a suitable formulation, for example, a measured amount of at least one protein scaffold in buffered solution is combined with the desired preservative in a buffered solution in quantities sufficient to provide the protein and preservative at the desired concentrations. Variations of this process would be recognized by one of ordinary skill in the art. For example, the order the components are added, whether additional additives are used, the temperature and pH at which the formulation is prepared, are all factors that can be optimized for the concentration and means of administration used.

[0499] The claimed formulations can be provided to patients as clear solutions or as dual vials comprising a vial of lyophilized at least one protein scaffold that is reconstituted with a second vial containing water, a preservative and/or excipients, preferably, a phosphate buffer and/or saline and a chosen salt, in an aqueous diluent. Either a single solution vial or dual vial requiring reconstitution can be reused multiple times and can suffice for a single or multiple cycles of patient treatment and thus can provide a more convenient treatment regimen than currently available.

[0500] The present claimed articles of manufacture are useful for administration over a period ranging from immediate to twenty-four hours or greater. Accordingly, the presently claimed articles of manufacture offer significant advantages to the patient. Formulations of the invention can optionally be safely stored at temperatures of from about 2° C. to about 40° C. and retain the biological activity of the protein for extended periods of time, thus allowing a package label indicating that the solution can be held and/or used over a period of 6, 12, 18, 24, 36, 48, 72, or 96 hours or greater. If preserved diluent is used, such label can include use up to 1-12 months, one-half, one and a half, and/or two years.

[0501] The solutions of at least one protein scaffold of the invention can be prepared by a process that comprises mixing at least one protein scaffold in an aqueous diluent. Mixing is carried out using conventional dissolution and mixing procedures. To prepare a suitable diluent, for example, a measured amount of at least one protein scaffold in water or buffer is combined in quantities sufficient to provide the protein and, optionally, a preservative or buffer at the desired concentrations. Variations of this process would be recognized by one of ordinary skill in the art. For example, the order the components are added, whether additional additives are used, the temperature and pH at which the formulation is prepared, are all factors that can be optimized for the concentration and means of administration used.

[0502] The claimed products can be provided to patients as clear solutions or as dual vials comprising a vial of lyophilized at least one protein scaffold that is reconstituted with a second vial containing the aqueous diluent. Either a single solution vial or dual vial requiring reconstitution can be reused multiple times and can suffice for a single or multiple cycles of patient treatment and thus provides a more convenient treatment regimen than currently available.

[0503] The claimed products can be provided indirectly to patients by providing to pharmacies, clinics, or other such institutions and facilities, clear solutions or dual vials comprising a vial of lyophilized at least one protein scaffold that is reconstituted with a second vial containing the aqueous diluent. The clear solution in this case can be up to one liter or even larger in size, providing a large reservoir from which smaller portions of the at least one protein scaffold solution can be retrieved one or multiple times for transfer into smaller vials and provided by the pharmacy or clinic to their customers and/or patients.

[0504] Recognized devices comprising single vial systems include pen-injector devices for delivery of a solution, such as BD Pens, BD Autojector®, Humaject®, NovoPen®, B-D®Pen, AutoPen®, and OptiPen®, GenotropinPen®, Genotronorm Pen®, Humatro Pen®, Reco-Pen®, Roferon Pen®, Biojector®, Iject®, J-tip Needle-Free Injector®, Intraject®, Medi-Ject®, e.g., as made or developed by Becton Dickinson (Franklin Lakes, N.J., www.bectondickenson.com), Disetronic (Burgdorf, Switzerland, www.disetronic.com; Bioject, Portland, Oreg. (www.bioject.com); National Medical Products, Weston Medical (Peterborough, UK, www.weston-medical.com), Medi-Ject Corp (Minneapolis, Minn., www.mediject.com), and similarly suitable devices. Recognized devices comprising a dual vial system include those pen-injector systems for reconstituting a lyophilized drug in a cartridge for delivery of the reconstituted solution, such as the HumatroPen®. Examples of other devices suitable include pre-filled syringes, auto-injectors, needle free injectors and needle free IV infusion sets.

[0505] The products presently claimed include packaging material. The packaging material provides, in addition to the information required by the regulatory agencies, the conditions under which the product can be used. The packaging material of the present invention provides instructions to the patient to reconstitute at least one protein scaffold in the aqueous diluent to form a solution and to use the solution over a period of 2-24 hours or greater for the two vial, wet/dry, product. For the single vial, solution product, the label indicates that such solution can be used over a period of 2-24 hours or greater. The presently claimed products are useful for human pharmaceutical product use.

[0506] The formulations of the present invention can be prepared by a process that comprises mixing at least one protein scaffold and a selected buffer, preferably, a phosphate buffer containing saline or a chosen salt. Mixing at least one protein scaffold and buffer in an aqueous diluent is carried out using conventional dissolution and mixing procedures. To prepare a suitable formulation, for example, a measured amount of at least one protein scaffold in water or buffer is combined with the desired buffering agent in water in quantities sufficient to provide the protein and buffer at the desired concentrations. Variations of this process would be recognized by one of ordinary skill in the art. For example, the order the components are added, whether additional additives are used, the temperature and pH at which the formulation is prepared, are all factors that can be optimized for the concentration and means of administration used.

[0507] The claimed stable or preserved formulations can be provided to patients as clear solutions or as dual vials comprising a vial of lyophilized protein scaffold that is reconstituted with a second vial containing a preservative or buffer and excipients in an aqueous diluent. Either a single solution vial or dual vial requiring reconstitution can be reused multiple times and can suffice for a single or multiple cycles of patient treatment and thus provides a more convenient treatment regimen than currently available.

[0508] Other formulations or methods of stabilizing the protein scaffold may result in other than a clear solution of lyophilized powder comprising the protein scaffold. Among non-clear solutions are formulations comprising particulate suspensions, said particulates being a composition containing the protein scaffold in a structure of variable dimension and known variously as a microsphere, microparticle, nanoparticle, nanosphere, or liposome. Such relatively homogenous, essentially spherical, particulate formulations containing an active agent can be formed by contacting an aqueous phase containing the active agent and a polymer and a nonaqueous phase followed by evaporation of the nonaqueous phase to cause the coalescence of particles from the aqueous phase as taught in U.S. Pat. No. 4,589,330. Porous microparticles can be prepared using a first phase containing active agent and a polymer dispersed in a continuous solvent and removing said solvent from the suspension by freeze-drying or dilution-extraction-precipitation as taught in U.S. Pat. No. 4,818,542. Preferred polymers for such preparations are natural or synthetic copolymers or polymers selected from the group consisting of gelatin agar, starch, arabinogalactan, albumin, collagen, polyglycolic acid, polylactic aced, glycolide-L(−) lactide poly(episilon-caprolactone, poly(epsilon-caprolactone-CO-lactic acid), poly(epsilon-caprolactone-CO-glycolic acid), poly(β-hydroxy butyric acid), polyethylene oxide, polyethylene, poly(alkyl-2-cyanoacrylate), poly(hydroxyethyl methacrylate), polyamides, poly(amino acids), poly(2-hydroxyethyl DL-aspartamide), poly(ester urea), poly(L-phenylalanine/ethylene glycol/1,6-diisocyanatohexane) and poly(methyl methacrylate). Particularly preferred polymers are polyesters, such as polyglycolic acid, polylactic aced, glycolide-L(−) lactide poly(episilon-caprolactone, poly(epsilon-caprolactone-CO-lactic acid), and poly(epsilon-caprolactone-CO-glycolic acid. Solvents useful for dissolving the polymer and/or the active include: water, hexafluoroisopropanol, methylenechloride, tetrahydrofuran, hexane, benzene, or hexafluoroacetone sesquihydrate. The process of dispersing the active containing phase with a second phase may include pressure forcing said first phase through an orifice in a nozzle to affect droplet formation.

[0509] Dry powder formulations may result from processes other than lyophilization, such as by spray drying or solvent extraction by evaporation or by precipitation of a crystalline composition followed by one or more steps to remove aqueous or nonaqueous solvent. Preparation of a spray-dried protein scaffold preparation is taught in U.S. Pat. No. 6,019,968. The protein scaffold-based dry powder compositions may be produced by spray drying solutions or slurries of the protein scaffold and, optionally, excipients, in a solvent under conditions to provide a respirable dry powder. Solvents may include polar compounds, such as water and ethanol, which may be readily dried. Protein scaffold stability may be enhanced by performing the spray drying procedures in the absence of oxygen, such as under a nitrogen blanket or by using nitrogen as the drying gas. Another relatively dry formulation is a dispersion of a plurality of perforated microstructures dispersed in a suspension medium that typically comprises a hydrofluoroalkane propellant as taught in WO 9916419. The stabilized dispersions may be administered to the lung of a patient using a metered dose inhaler. Equipment useful in the commercial manufacture of spray dried medicaments are manufactured by Buchi Ltd. or Niro Corp.

[0510] At least one protein scaffold in either the stable or preserved formulations or solutions described herein, can be administered to a patient in accordance with the present invention via a variety of delivery methods including SC or IM injection; transdermal, pulmonary, transmucosal, implant, osmotic pump, cartridge, micro pump, or other means appreciated by the skilled artisan, as well-known in the art.

### Therapeutic Applications

[0511] The present invention also provides a method for modulating or treating a disease, in a cell, tissue, organ, animal, or patient, as known in the art or as described herein, using at least one protein scaffold of the present invention, e.g., administering or contacting the cell, tissue, organ, animal, or patient with a therapeutic effective amount of protein scaffold. The present invention also provides a method for modulating or treating a disease, in a cell, tissue, organ, animal, or patient.

[0512] Any method of the present invention can comprise administering an effective amount of a composition or pharmaceutical composition comprising at least one protein scaffold to a cell, tissue, organ, animal or patient in need of such modulation, treatment or therapy. Such a method can optionally further comprise co-administration or combination therapy for treating such diseases or disorders, wherein the administering of said at least one protein scaffold, specified portion or variant thereof, further comprises administering, before concurrently, and/or after, at least one selected from at least one of an alkylating agent, an a mitotic inhibitor, and a radiopharmaceutical. Suitable dosages are well known in the art. See, e.g., Wells et al., eds., Pharmacotherapy Handbook, 2nd Edition, Appleton and Lange, Stamford, Conn. (2000); PDR Pharmacopoeia, Tarascon Pocket Pharmacopoeia 2000, Deluxe Edition, Tarascon Publishing, Loma Linda, Calif. (2000); Nursing 2001 Handbook of Drugs, 21st edition, Springhouse Corp., Springhouse, Pa., 2001; Health Professional's Drug Guide 2001, ed., Shannon, Wilson, Stang, Prentice-Hall, Inc, Upper Saddle River, N.J. each of which references are entirely incorporated herein by reference.

[0513] Preferred doses can optionally include about 0.1-99 and/or 100-500 mg/kg/administration, or any range, value or fraction thereof, or to achieve a serum concentration of about 0.1-5000 μg/ml serum concentration per single or multiple administration, or any range, value or fraction thereof. A preferred dosage range for the protein scaffold of the present invention is from about 1 mg/kg, up to about 3, about 6 or about 12 mg/kg of body weight of the patient.

[0514] Alternatively, the dosage administered can vary depending upon known factors, such as the pharmacodynamic characteristics of the particular agent, and its mode and route of administration; age, health, and weight of the recipient; nature and extent of symptoms, kind of concurrent treatment, frequency of treatment, and the effect desired. Usually a dosage of active ingredient can be about 0.1 to 100 milligrams per kilogram of body weight. Ordinarily 0.1 to 50, and preferably, 0.1 to 10 milligrams per kilogram per administration or in sustained release form is effective to obtain desired results.

[0515] As a non-limiting example, treatment of humans or animals can be provided as a one-time or periodic dosage of at least one protein scaffold of the present invention about 0.1 to 100 mg/kg or any range, value or fraction thereof per day, on at least one of day 1-40, or, alternatively or additionally, at least one of week 1-52, or, alternatively or additionally, at least one of 1-20 years, or any combination thereof, using single, infusion or repeated doses.

[0516] Dosage forms (composition) suitable for internal administration generally contain from about 0.001 milligram to about 500 milligrams of active ingredient per unit or container. In these pharmaceutical compositions the active ingredient will ordinarily be present in an amount of about 0.5-99.999% by weight based on the total weight of the composition.

[0517] For parenteral administration, the protein scaffold can be formulated as a solution, suspension, emulsion, particle, powder, or lyophilized powder in association, or separately provided, with a pharmaceutically acceptable parenteral vehicle. Examples of such vehicles are water, saline, Ringer's solution, dextrose solution, and about 1-10% human serum albumin. Liposomes and nonaqueous vehicles, such as fixed oils, can also be used. The vehicle or lyophilized powder can contain additives that maintain isotonicity (e.g., sodium chloride, mannitol) and chemical stability (e.g., buffers and preservatives). The formulation is sterilized by known or suitable techniques.

[0518] Suitable pharmaceutical carriers are described in the most recent edition of Remington's Pharmaceutical Sciences, A. Osol, a standard reference text in this field.

### Alternative Administration

[0519] Many known and developed modes can be used according to the present invention for administering pharmaceutically effective amounts of at least one protein scaffold according to the present invention. While pulmonary administration is used in the following description, other modes of administration can be used according to the present invention with suitable results. Protein scaffolds of the present invention can be delivered in a carrier, as a solution, emulsion, colloid, or suspension, or as a dry powder, using any of a variety of devices and methods suitable for administration by inhalation or other modes described here within or known in the art.

### Parenteral Formulations and Administration

[0520] Formulations for parenteral administration can contain as common excipients sterile water or saline, polyalkylene glycols, such as polyethylene glycol, oils of vegetable origin, hydrogenated naphthalenes and the like. Aqueous or oily suspensions for injection can be prepared by using an appropriate emulsifier or humidifier and a suspending agent, according to known methods. Agents for injection can be a non-toxic, non-orally administrable diluting agent, such as aqueous solution, a sterile injectable solution or suspension in a solvent. As the usable vehicle or solvent, water, Ringer's solution, isotonic saline, etc. are allowed; as an ordinary solvent or suspending solvent, sterile involatile oil can be used. For these purposes, any kind of involatile oil and fatty acid can be used, including natural or synthetic or semisynthetic fatty oils or fatty acids; natural or synthetic or semisynthtetic mono- or di- or tri-glycerides. Parental administration is known in the art and includes, but is not limited to, conventional means of injections, a gas pressured needle-less injection device as described in U.S. Pat. No. 5,851,198, and a laser perforator device as described in U.S. Pat. No. 5,839,446 entirely incorporated herein by reference.

### Alternative Delivery

[0521] The invention further relates to the administration of at least one protein scaffold by parenteral, subcutaneous, intramuscular, intravenous, intrarticular, intrabronchial, intraabdominal, intracapsular, intracartilaginous, intracavitary, intracelial, intracerebellar, intracerebroventricular, intracolic, intracervical, intragastric, intrahepatic, intramyocardial, intraosteal, intrapelvic, intrapericardiac, intraperitoneal, intrapleural, intraprostatic, intrapulmonary, intrarectal, intrarenal, intraretinal, intraspinal, intrasynovial, intrathoracic, intrauterine, intravesical, intralesional, bolus, vaginal, rectal, buccal, sublingual, intranasal, or transdermal means. At least one protein scaffold composition can be prepared for use for parenteral (subcutaneous, intramuscular or intravenous) or any other administration particularly in the form of liquid solutions or suspensions; for use in vaginal or rectal administration particularly in semisolid forms, such as, but not limited to, creams and suppositories; for buccal, or sublingual administration, such as, but not limited to, in the form of tablets or capsules; or intranasally, such as, but not limited to, the form of powders, nasal drops or aerosols or certain agents; or transdermally, such as not limited to a gel, ointment, lotion, suspension or patch delivery system with chemical enhancers such as dimethyl sulfoxide to either modify the skin structure or to increase the drug concentration in the transdermal patch (Junginger, et al. In “Drug Permeation Enhancement;” Hsieh, D. S., Eds., pp. 59-90 (Marcel Dekker, Inc. New York 1994, entirely incorporated herein by reference), or with oxidizing agents that enable the application of formulations containing proteins and peptides onto the skin (WO 98/53847), or applications of electric fields to create transient transport pathways, such as electroporation, or to increase the mobility of charged drugs through the skin, such as iontophoresis, or application of ultrasound, such as sonophoresis (U.S. Pat. Nos. 4,309,989 and 4,767,402) (the above publications and patents being entirely incorporated herein by reference).

### Infusion of Modified Cells as Adoptive Cell Therapy

[0522] The disclosure provides modified cells that express one or more CARs and/or CARTyrins of the disclosure that have been selected and/or expanded for administration to a subject in need thereof. Modified cells of the disclosure may be formulated for storage at any temperature including room temperature and body temperature. Modified cells of the disclosure may be formulated for cryopreservation and subsequent thawing. Modified cells of the disclosure may be formulated in a pharmaceutically acceptable carrier for direct administration to a subject from sterile packaging. Modified cells of the disclosure may be formulated in a pharmaceutically acceptable carrier with an indicator of cell viability and/or CAR/CARTyrin expression level to ensure a minimal level of cell function and CAR/CARTyrin expression. Modified cells of the disclosure may be formulated in a pharmaceutically acceptable carrier at a prescribed density with one or more reagents to inhibit further expansion and/or prevent cell death.

[0523] In certain embodiments of the disclosure, modified cells of the disclosure are delivered to a patient via injection or intravenous infusion. In certain embodiments, a therapeutically effective dose of a composition of the disclosure or of compositions comprising modified cells of the disclosure comprises between 2×10⁵ and 5×10⁸ cells per kg of body weight of the patient per administration, or any range, value or fraction thereof.

[0524] In certain embodiments of the disclosure, modified cells of the disclosure are delivered to a patient via injection or intravenous infusion. In certain embodiments, a therapeutically effective dose of a composition of the disclosure or of compositions comprising modified cells of the disclosure comprises between 0.2×10⁶ to 20×10⁶ cells per kg of body weight of the patient per administration. In certain embodiments, a therapeutically effective dose of a composition of the disclosure or of compositions comprising modified cells of the disclosure comprises 0.2×10⁶ cells per kg of body weight of the patient per administration, 2×10⁶ cells per kg of body weight of the patient per administration, 20×10⁶ cells per kg of body weight of the patient per administration, or any cells per kg of body weight of the patient per administration in between.

[0525] In certain embodiments of the disclosure, modified cells of the disclosure are delivered to a patient via injection or intravenous infusion. In certain embodiments, a therapeutically effective dose of a composition of the disclosure or of compositions comprising modified cells of the disclosure comprises 1×10⁶ cells or about 1×10⁶ cells per kg of body weight of the patient per administration.

[0526] In certain embodiments of the disclosure, modified cells of the disclosure are delivered to a patient via injection or intravenous infusion. In certain embodiments, a therapeutically effective dose of a composition of the disclosure or of compositions comprising modified cells of the disclosure comprises 3×10⁶ cells or about 3×10⁶ cells per kg of body weight of the patient per administration.

[0527] In certain embodiments of the disclosure, modified cells of the disclosure are delivered to a patient via injection or intravenous infusion. In certain embodiments, a therapeutically effective dose of a composition of the disclosure or of compositions comprising modified cells of the disclosure comprises between 0.7×10⁶ to 6.7×10⁶ cells per kg of body weight of the patient per administration. In certain embodiments, a therapeutically effective dose of a composition of the disclosure or of compositions comprising modified cells of the disclosure comprises 0.7×10⁶ cells per kg of body weight of the patient per administration, 6.7×10⁶ cells per kg of body weight of the patient per administration or any cells per kg of body weight of the patient per administration in between.

[0528] In certain embodiments of the disclosure, modified cells of the disclosure are delivered to a patient via injection or intravenous infusion. In certain embodiments, a therapeutically effective dose of a composition of the disclosure or of compositions comprising modified cells of the disclosure comprises between 0.7×10⁶ to 16×10⁶ cells per kg of body weight of the patient per administration. In certain embodiments, a therapeutically effective dose of a composition of the disclosure or of compositions comprising modified cells of the disclosure comprises 0.7×10⁶ cells per kg of body weight of the patient per administration, 2×10⁶ cells per kg of body weight of the patient per administration, 6×10⁶ cells per kg of body weight of the patient per administration, 10.7×10⁶ cells per kg of body weight of the patient per administration, 16×10⁶ cells per kg of body weight of the patient per administration or any cells per kg of body weight of the patient per administration in between.

[0529] In certain embodiments of the disclosure, modified cells of the disclosure are delivered to a patient via injection or intravenous infusion. In certain embodiments, a therapeutically effective dose of a composition of the disclosure or of compositions comprising modified cells of the disclosure comprises 1.2×10⁶ to 7.1×10⁶ cells per kg of body weight of the patient per administration. In certain embodiments, a therapeutically effective dose of a composition of the disclosure or of compositions comprising modified cells of the disclosure comprises 1.2×10⁶ cells per kg of body weight of the patient per administration, 7.1×10⁶ cells per kg of body weight of the patient per administration or any number of cells per kg of body weight of the patient per administration. In certain embodiments, a therapeutically effective dose of a composition of the disclosure or of compositions comprising modified cells of the disclosure comprises between 2×10⁶ to 3×10⁶ cells per kg of body weight of the patient per administration.

[0530] In certain embodiments of the disclosure, modified cells of the disclosure are delivered to a patient via injection or intravenous infusion. In certain embodiments, a therapeutically effective dose of a composition of the disclosure or of compositions comprising modified cells of the disclosure comprises 1106×10⁶ to 2106×10⁶ cells per kg of body weight of the patient per administration. In certain embodiments, a therapeutically effective dose of a composition of the disclosure or of compositions comprising modified cells of the disclosure comprises 1106×10⁶ cells per kg of body weight of the patient per administration, 2106×10⁶ cells per kg of body weight of the patient per administration or any number of cells per kg of body weight of the patient per administration in between. In certain embodiments of the disclosure, modified cells of the disclosure are delivered to a patient via injection or intravenous infusion. In certain embodiments, a therapeutically effective dose of a composition of the disclosure or of compositions comprising modified cells of the disclosure comprises 0.7×10⁶ to 1.3×10⁶ cells per kg of body weight of the patient per administration. In certain embodiments, a therapeutically effective dose of a composition of the disclosure or of compositions comprising modified cells of the disclosure comprises 0.7×10⁶ cells per kg of body weight of the patient per administration, 1.3×10⁶ cells per kg of body weight of the patient per administration or any number of cells per kg of body weight of the patient per administration in between.

[0531] In certain embodiments of the disclosure, modified cells of the disclosure are delivered to a patient via injection or intravenous infusion. In certain embodiments, a therapeutically effective dose of a composition of the disclosure or of compositions comprising modified cells of the disclosure comprises a single or multiple doses. In certain embodiments, a therapeutically effective dose of a composition of the disclosure or of compositions comprising modified cells of the disclosure comprises a split dose. In certain embodiments, a therapeutically effective dose of a composition of the disclosure or of compositions comprising modified cells of the disclosure comprises an initial dose and a maintenance dose.

[0532] In certain embodiments of the disclosure, the modified cells are T cells and the T cells may be sorted according to T cell markers prior to either in vitro expansion or formulation with a pharmaceutically acceptable carrier. In some embodiments, modified T cells may be sorted on using CD8+ and/or CD4+ markers.

### Inducible Proapoptotic Polypeptides

[0533] Inducible proapoptotic polypeptides of the disclosure are superior to existing inducible polypeptides because the inducible proapoptotic polypeptides of the disclosure are far less immunogenic. While inducible proapoptotic polypeptides of the disclosure are recombinant polypeptides, and, therefore, non-naturally occurring, the sequences that are recombined to produce the inducible proapoptotic polypeptides of the disclosure do not comprise non-human sequences that the host human immune system could recognize as “non-self” and, consequently, induce an immune response in the subject receiving an inducible proapoptotic polypeptide of the disclosure, a cell comprising the inducible proapoptotic polypeptide or a composition comprising the inducible proapoptotic polypeptide or the cell comprising the inducible proapoptotic polypeptide.

[0534] The disclosure provides inducible proapoptotic polypeptides comprising a ligand binding region, a linker, and a proapoptotic peptide, wherein the inducible proapoptotic polypeptide does not comprise a non-human sequence. In certain embodiments, the non-human sequence comprises a restriction site. In certain embodiments, the proapoptotic peptide is a caspase polypeptide. In certain embodiments, the caspase polypeptide is a caspase 9 polypeptide. In certain embodiments, the caspase 9 polypeptide is a truncated caspase 9 polypeptide. Inducible proapoptotic polypeptides of the disclosure may be non-naturally occurring.

[0535] Caspase polypeptides of the disclosure include, but are not limited to, caspase 1, caspase 2, caspase 3, caspase 4, caspase 5, caspase 6, caspase 7, caspase 8, caspase 9, caspase 10, caspase 11, caspase 12, and caspase 14. Caspase polypeptides of the disclosure include, but are not limited to, those caspase polypeptides associated with apoptosis including caspase 2, caspase 3, caspase 6, caspase 7, caspase 8, caspase 9, and caspase 10. Caspase polypeptides of the disclosure include, but are not limited to, those caspase polypeptides that initiate apoptosis, including caspase 2, caspase 8, caspase 9, and caspase 10. Caspase polypeptides of the disclosure include, but are not limited to, those caspase polypeptides that execute apoptosis, including caspase 3, caspase 6, and caspase 7.

[0536] Caspase polypeptides of the disclosure may be encoded by an amino acid or a nucleic acid sequence having one or more modifications compared to a wild type amino acid or a nucleic acid sequence. The nucleic acid sequence encoding a caspase polypeptide of the disclosure may be codon optimized. The one or more modifications to an amino acid and/or nucleic acid sequence of a caspase polypeptide of the disclosure may increase an interaction, a cross-linking, a cross-activation, or an activation of the caspase polypeptide of the disclosure compared to a wild type amino acid or a nucleic acid sequence. Alternatively, or in addition, the one or more modifications to an amino acid and/or nucleic acid sequence of a caspase polypeptide of the disclosure may decrease the immunogenicity of the caspase polypeptide of the disclosure compared to a wild type amino acid or a nucleic acid sequence.

[0537] Caspase polypeptides of the disclosure may be truncated compared to a wild type caspase polypeptide. For example, a caspase polypeptide may be truncated to eliminate a sequence encoding a Caspase Activation and Recruitment Domain (CARD) to eliminate or minimize the possibility of activating a local inflammatory response in addition to initiating apoptosis in the cell comprising an inducible caspase polypeptide of the disclosure. The nucleic acid sequence encoding a caspase polypeptide of the disclosure may be spliced to form a variant amino acid sequence of the caspase polypeptide of the disclosure compared to a wild type caspase polypeptide. Caspase polypeptides of the disclosure may be encoded by recombinant and/or chimeric sequences. Recombinant and/or chimeric caspase polypeptides of the disclosure may include sequences from one or more different caspase polypeptides. Alternatively, or in addition, recombinant and/or chimeric caspase polypeptides of the disclosure may include sequences from one or more species (e.g. a human sequence and a non-human sequence). Caspase polypeptides of the disclosure may be non-naturally occurring.

[0538] The ligand binding region of an inducible proapoptotic polypeptide of the disclosure may include any polypeptide sequence that facilitates or promotes the dimerization of a first inducible proapoptotic polypeptide of the disclosure with a second inducible proapoptotic polypeptide of the disclosure, the dimerization of which activates or induces cross-linking of the proapoptotic polypeptides and initiation of apoptosis in the cell.

[0539] The ligand-binding (“dimerization”) region may comprise any polypeptide or functional domain thereof that will allow for induction using an endogenous or non-naturally occurring ligand (i.e. and induction agent), for example, a non-naturally occurring synthetic ligand. The ligand-binding region may be internal or external to the cellular membrane, depending upon the nature of the inducible proapoptotic polypeptide and the choice of ligand (i.e. induction agent). A wide variety of ligand-binding polypeptides and functional domains thereof, including receptors, are known. Ligand-binding regions of the disclosure may include one or more sequences from a receptor. Of particular interest are ligand-binding regions for which ligands (for example, small organic ligands) are known or may be readily produced. These ligand-binding regions or receptors may include, but are not limited to, the FKBPs and cyclophilin receptors, the steroid receptors, the tetracycline receptor, and the like, as well as “non-naturally occurring” receptors, which can be obtained from antibodies, particularly the heavy or light chain subunit, mutated sequences thereof, random amino acid sequences obtained by stochastic procedures, combinatorial syntheses, and the like. In certain embodiments, the ligand-binding region is selected from the group consisting of a FKBP ligand-binding region, a cyclophilin receptor ligand-binding region, a steroid receptor ligand-binding region, a cyclophilin receptors ligand-binding region, and a tetracycline receptor ligand-binding region.

[0540] The ligand-binding regions comprising one or more receptor domain(s) may be at least about 50 amino acids, and fewer than about 350 amino acids, usually fewer than 200 amino acids, either as the endogenous domain or truncated active portion thereof. The binding region may, for example, be small (<25 kDa, to allow efficient transfection in viral vectors), monomeric, nonimmunogenic, have synthetically accessible, cell permeable, nontoxic ligands that can be configured for dimerization.

[0541] The ligand-binding regions comprising one or more receptor domain(s) may be intracellular or extracellular depending upon the design of the inducible proapoptotic polypeptide and the availability of an appropriate ligand (i.e. induction agent). For hydrophobic ligands, the binding region can be on either side of the membrane, but for hydrophilic ligands, particularly protein ligands, the binding region will usually be external to the cell membrane, unless there is a transport system for internalizing the ligand in a form in which it is available for binding. For an intracellular receptor, the inducible proapoptotic polypeptide or a transposon or vector comprising the inducible proapoptotic polypeptide may encode a signal peptide and transmembrane domain 5′ or 3′ of the receptor domain sequence or may have a lipid attachment signal sequence 5′ of the receptor domain sequence. Where the receptor domain is between the signal peptide and the transmembrane domain, the receptor domain will be extracellular.

[0542] Antibodies and antibody subunits, e.g., heavy or light chain, particularly fragments, more particularly all or part of the variable region, or fusions of heavy and light chain to create high-affinity binding, can be used as a ligand binding region of the disclosure. Antibodies that are contemplated include ones that are an ectopically expressed human product, such as an extracellular domain that would not trigger an immune response and generally not expressed in the periphery (i.e., outside the CNS/brain area). Such examples, include, but are not limited to low affinity nerve growth factor receptor (LNGFR), and embryonic surface proteins (i.e., carcinoembryonic antigen). Yet further, antibodies can be prepared against haptenic molecules, which are physiologically acceptable, and the individual antibody subunits screened for binding affinity. The cDNA encoding the subunits can be isolated and modified by deletion of the constant region, portions of the variable region, mutagenesis of the variable region, or the like, to obtain a binding protein domain that has the appropriate affinity for the ligand. In this way, almost any physiologically acceptable haptenic compound can be employed as the ligand or to provide an epitope for the ligand. Instead of antibody units, endogenous receptors can be employed, where the binding region or domain is known and there is a useful or known ligand for binding.

[0543] For multimerizing the receptor, the ligand for the ligand-binding region/receptor domains of the inducible proapoptotic polypeptides may be multimeric in the sense that the ligand can have at least two binding sites, with each of the binding sites capable of binding to a ligand receptor region (i.e. a ligand having a first binding site capable of binding the ligand-binding region of a first inducible proapoptotic polypeptide and a second binding site capable of binding the ligand-binding region of a second inducible proapoptotic polypeptide, wherein the ligand-binding regions of the first and the second inducible proapoptotic polypeptides are either identical or distinct). Thus, as used herein, the term “multimeric ligand binding region” refers to a ligand-binding region of an inducible proapoptotic polypeptide of the disclosure that binds to a multimeric ligand. Multimeric ligands of the disclosure include dimeric ligands. A dimeric ligand of the disclosure may have two binding sites capable of binding to the ligand receptor domain. In certain embodiments, multimeric ligands of the disclosure are a dimer or higher order oligomer, usually not greater than about tetrameric, of small synthetic organic molecules, the individual molecules typically being at least about 150 Da and less than about 5 kDa, usually less than about 3 kDa. A variety of pairs of synthetic ligands and receptors can be employed. For example, in embodiments involving endogenous receptors, dimeric FK506 can be used with an FKBP12 receptor, dimerized cyclosporin A can be used with the cyclophilin receptor, dimerized estrogen with an estrogen receptor, dimerized glucocorticoids with a glucocorticoid receptor, dimerized tetracycline with the tetracycline receptor, dimerized vitamin D with the vitamin D receptor, and the like. Alternatively higher orders of the ligands, e.g., trimeric can be used. For embodiments involving non-naturally occurring receptors, e.g., antibody subunits, modified antibody subunits, single chain antibodies comprised of heavy and light chain variable regions in tandem, separated by a flexible linker, or modified receptors, and mutated sequences thereof, and the like, any of a large variety of compounds can be used. A significant characteristic of the units comprising a multimeric ligand of the disclosure is that each binding site is able to bind the receptor with high affinity, and preferably, that they are able to be dimerized chemically. Also, methods are available to balance the hydrophobicity/hydrophilicity of the ligands so that they are able to dissolve in serum at functional levels, yet diffuse across plasma membranes for most applications.

[0544] Activation of inducible proapoptotic polypeptides of the disclosure may be accomplished through, for example, chemically induced dimerization (CID) mediated by an induction agent to produce a conditionally controlled protein or polypeptide. Proapoptotic polypeptides of the disclosure not only inducible, but the induction of these polypeptides is also reversible, due to the degradation of the labile dimerizing agent or administration of a monomeric competitive inhibitor.

[0545] In certain embodiments, the ligand binding region comprises a FK506 binding protein 12 (FKBP12) polypeptide. In certain embodiments, the ligand binding region comprises a FKBP12 polypeptide having a substitution of valine (V) for phenylalanine (F) at position 36 (F36V). In certain embodiments, in which the ligand binding region comprises a FKBP12 polypeptide having a substitution of valine (V) for phenylalanine (F) at position 36 (F36V), the induction agent may comprise AP1903, a synthetic drug (CAS Index Name: 2-Piperidinecarboxylic acid, 1-[(2S)-1-oxo-2-(3,4,5-trimethoxyphenyl)butyl]-, 1,2-ethanediylbis[imino(2-oxo-2,1-ethanediyl)oxy-3,1-phenylene[(1R)-3-(3,4-dimethoxyphenyl)propylidene]]ester, [2S-[1 (R*),2R*[S*[S*[1 (R*),2R*]]]]]-(9Cl) CAS Registry Number: 195514-63-7; Molecular Formula: C78H98N4020; Molecular Weight: 1411.65)). In certain embodiments, in which the ligand binding region comprises a FKBP12 polypeptide having a substitution of valine (V) for phenylalanine (F) at position 36 (F36V), the induction agent may comprise AP20187 (CAS Registry Number: 195514-80-8 and Molecular Formula: C82H107N5020). In certain embodiments, the induction agent is an AP20187 analog, such as, for example, AP1510. As used herein, the induction agents AP20187, AP1903 and AP1510 may be used interchangeably.

[0546] AP1903 API is manufactured by Alphora Research Inc. and AP1903 Drug Product for Injection is made by Formatech Inc. It is formulated as a 5 mg/mL solution of AP1903 in a 25% solution of the non-ionic solubilizer Solutol HS 15 (250 mg/mL, BASF). At room temperature, this formulation is a clear, slightly yellow solution. Upon refrigeration, this formulation undergoes a reversible phase transition, resulting in a milky solution. This phase transition is reversed upon re-warming to room temperature. The fill is 2.33 mL in a 3 mL glass vial (approximately 10 mg AP1903 for Injection total per vial). Upon determining a need to administer AP1903, patients may be, for example, administered a single fixed dose of AP1903 for Injection (0.4 mg/kg) via IV infusion over 2 hours, using a non-DEHP, non-ethylene oxide sterilized infusion set. The dose of AP1903 is calculated individually for all patients, and is not be recalculated unless body weight fluctuates by ≥10%. The calculated dose is diluted in 100 mL in 0.9% normal saline before infusion. In a previous Phase I study of AP1903, 24 healthy volunteers were treated with single doses of AP1903 for Injection at dose levels of 0.01, 0.05, 0.1, 0.5 and 1.0 mg/kg infused IV over 2 hours. AP1903 plasma levels were directly proportional to dose, with mean Cmax values ranging from approximately 10-1275 ng/ml over the 0.01-1.0 mg/kg dose range. Following the initial infusion period, blood concentrations demonstrated a rapid distribution phase, with plasma levels reduced to approximately 18, 7, and 1% of maximal concentration at 0.5, 2 and 10 hours post-dose, respectively. AP1903 for Injection was shown to be safe and well tolerated at all dose levels and demonstrated a favorable pharmacokinetic profile. Iuliucci J D, et al., J Clin Pharmacol. 41:870-9, 2001.

[0547] The fixed dose of AP1903 for injection used, for example, may be 0.4 mg/kg intravenously infused over 2 hours. The amount of AP1903 needed in vitro for effective signaling of cells is 10-100 nM (1600 Da MW). This equates to 16-160 μg/L or ^{˜}0.016-1.6 μg/kg (1.6-160 μg/kg). Doses up to 1 mg/kg were well-tolerated in the Phase I study of AP1903 described above. Therefore, 0.4 mg/kg may be a safe and effective dose of AP1903 for this Phase I study in combination with the therapeutic cells.

[0548] The amino acid and/or nucleic acid sequence encoding ligand binding of the disclosure may contain sequence one or more modifications compared to a wild type amino acid or nucleic acid sequence. For example, the amino acid and/or nucleic acid sequence encoding ligand binding region of the disclosure may be a codon-optimized sequence. The one or more modifications may increase the binding affinity of a ligand (e.g. an induction agent) for the ligand binding region of the disclosure compared to a wild type polypeptide. Alternatively, or in addition, the one or more modifications may decrease the immunogenicity of the ligand binding region of the disclosure compared to a wild type polypeptide. Ligand binding regions of the disclosure and/or induction agents of the disclosure may be non-naturally occurring.

[0549] Inducible proapoptotic polypeptides of the disclosure comprise a ligand binding region, a linker and a proapoptotic peptide, wherein the inducible proapoptotic polypeptide does not comprise a non-human sequence. In certain embodiments, the non-human sequence comprises a restriction site. The linker may comprise any organic or inorganic material that permits, upon dimerization of the ligand binding region, interaction, cross-linking, cross-activation, or activation of the proapoptotic polypeptides such that the interaction or activation of the proapoptotic polypeptides initiates apoptosis in the cell. In certain embodiments, the linker is a polypeptide. In certain embodiments, the linker is a polypeptide comprising a G/S rich amino acid sequence (a “GS” linker). In certain embodiments, the linker is a polypeptide comprising the amino acid sequence GGGGS (SEQ ID NO: 17014). In preferred embodiments, the linker is a polypeptide and the nucleic acid encoding the polypeptide does not contain a restriction site for a restriction endonuclease. Linkers of the disclosure may be non-naturally occurring.

[0550] Inducible proapoptotic polypeptides of the disclosure may be expressed in a cell under the transcriptional regulation of any promoter capable of initiating and/or regulating the expression of an inducible proapoptotic polypeptide of the disclosure in that cell. The term “promoter” as used herein refers to a promoter that acts as the initial binding site for RNA polymerase to transcribe a gene. For example, inducible proapoptotic polypeptides of the disclosure may be expressed in a mammalian cell under the transcriptional regulation of any promoter capable of initiating and/or regulating the expression of an inducible proapoptotic polypeptide of the disclosure in a mammalian cell, including, but not limited to native, endogenous, exogenous, and heterologous promoters. Preferred mammalian cells include human cells. Thus, inducible proapoptotic polypeptides of the disclosure may be expressed in a human cell under the transcriptional regulation of any promoter capable of initiating and/or regulating the expression of an inducible proapoptotic polypeptide of the disclosure in a human cell, including, but not limited to, a human promoter or a viral promoter. Exemplary promoters for expression in human cells include, but are not limited to, a human cytomegalovirus (CMV) immediate early gene promoter, a SV40 early promoter, a Rous sarcoma virus long terminal repeat, β-actin promoter, a rat insulin promoter and a glyceraldehyde-3-phosphate dehydrogenase promoter, each of which may be used to obtain high-level expression of an inducible proapoptotic polypeptide of the disclosure. The use of other viral or mammalian cellular or bacterial phage promoters which are well known in the art to achieve expression of an inducible proapoptotic polypeptide of the disclosure is contemplated as well, provided that the levels of expression are sufficient for initiating apoptosis in a cell. By employing a promoter with well-known properties, the level and pattern of expression of the protein of interest following transfection or transformation can be optimized.

[0551] Selection of a promoter that is regulated in response to specific physiologic or synthetic signals can permit inducible expression of the inducible proapoptotic polypeptide of the disclosure. The ecdysone system (Invitrogen, Carlsbad, Calif.) is one such system. This system is designed to allow regulated expression of a gene of interest in mammalian cells. It consists of a tightly regulated expression mechanism that allows virtually no basal level expression of a transgene, but over 200-fold inducibility. The system is based on the heterodimeric ecdysone receptor of Drosophila, and when ecdysone or an analog such as muristerone A binds to the receptor, the receptor activates a promoter to turn on expression of the downstream transgene high levels of mRNA transcripts are attained. In this system, both monomers of the heterodimeric receptor are constitutively expressed from one vector, whereas the ecdysone-responsive promoter, which drives expression of the gene of interest, is on another plasmid. Engineering of this type of system into a vector of interest may therefore be useful. Another inducible system that may be useful is the Tet-Off™ or Tet-On™ system (Clontech, Palo Alto, Calif.) originally developed by Gossen and Bujard (Gossen and Bujard, Proc. Natl. Acad. Sci. USA, 89:5547-5551, 1992; Gossen et al., Science, 268:1766-1769, 1995). This system also allows high levels of gene expression to be regulated in response to tetracycline or tetracycline derivatives such as doxycycline. In the Tet-On™ system, gene expression is turned on in the presence of doxycycline, whereas in the Tet-Off™ system, gene expression is turned on in the absence of doxycycline. These systems are based on two regulatory elements derived from the tetracycline resistance operon of E. coli: the tetracycline operator sequence (to which the tetracycline repressor binds) and the tetracycline repressor protein. The gene of interest is cloned into a plasmid behind a promoter that has tetracycline-responsive elements present in it. A second plasmid contains a regulatory element called the tetracycline-controlled transactivator, which is composed, in the Tet-Off™ system, of the VP16 domain from the herpes simplex virus and the wild-type tetracycline repressor. Thus in the absence of doxycycline, transcription is constitutively on. In the Tet-On™ system, the tetracycline repressor is not wild type and in the presence of doxycycline activates transcription. For gene therapy vector production, the Tet-Off™ system may be used so that the producer cells could be grown in the presence of tetracycline or doxycycline and prevent expression of a potentially toxic transgene, but when the vector is introduced to the patient, the gene expression would be constitutively on.

[0552] In some circumstances, it is desirable to regulate expression of a transgene in a gene therapy vector. For example, different viral promoters with varying strengths of activity are utilized depending on the level of expression desired. In mammalian cells, the CMV immediate early promoter is often used to provide strong transcriptional activation. The CMV promoter is reviewed in Donnelly, J. J., et al., 1997. Annu. Rev. Immunol. 15:617-48. Modified versions of the CMV promoter that are less potent have also been used when reduced levels of expression of the transgene are desired. When expression of a transgene in hematopoietic cells is desired, retroviral promoters such as the LTRs from MLV or MMTV are often used. Other viral promoters that are used depending on the desired effect include SV40, RSV LTR, HIV-1 and HIV-2 LTR, adenovirus promoters such as from the E1A, E2A, or MLP region, AAV LTR, HSV-TK, and avian sarcoma virus.

[0553] In other examples, promoters may be selected that are developmentally regulated and are active in particular differentiated cells. Thus, for example, a promoter may not be active in a pluripotent stem cell, but, for example, where the pluripotent stem cell differentiates into a more mature cell, the promoter may then be activated.

[0554] Similarly tissue specific promoters are used to effect transcription in specific tissues or cells so as to reduce potential toxicity or undesirable effects to non-targeted tissues. These promoters may result in reduced expression compared to a stronger promoter such as the CMV promoter, but may also result in more limited expression, and immunogenicity (Bojak, A., et al., 2002. Vaccine. 20:1975-79; Cazeaux, N., et al., 2002. Vaccine 20:3322-31). For example, tissue specific promoters such as the PSA associated promoter or prostate-specific glandular kallikrein, or the muscle creatine kinase gene may be used where appropriate.

[0555] Examples of tissue specific or differentiation specific promoters include, but are not limited to, the following: B29 (B cells); CD14 (monocytic cells); CD43 (leukocytes and platelets); CD45 (hematopoietic cells); CD68 (macrophages); desmin (muscle); elastase-1 (pancreatic acinar cells); endoglin (endothelial cells); fibronectin (differentiating cells, healing tissues); and Flt-1 (endothelial cells); GFAP (astrocytes).

[0556] In certain indications, it is desirable to activate transcription at specific times after administration of the gene therapy vector. This is done with such promoters as those that are hormone or cytokine regulatable. Cytokine and inflammatory protein responsive promoters that can be used include K and T kininogen (Kageyama et al., (1987) J. Biol. Chem., 262, 2345-2351), c-fos, TNF-alpha, C-reactive protein (Arcone, et al., (1988) Nucl. Acids Res., 16 (8), 3195-3207), haptoglobin (Oliviero et al., (1987) EMBO J., 6, 1905-1912), serum amyloid A2, C/EBP alpha, IL-1, IL-6 (Poli and Cortese, (1989) Proc. Nat'l Acad. Sci. USA, 86, 8202-8206), Complement C3 (Wilson et al., (1990) Mol. Cell. Biol., 6181-6191), IL-8, alpha-1 acid glycoprotein (Prowse and Baumann, (1988) Mol Cell Biol, 8, 42-51), alpha-1 antitrypsin, lipoprotein lipase (Zechner et al., Mol. Cell. Biol., 2394-2401, 1988), angiotensinogen (Ron, et al., (1991) Mol. Cell. Biol., 2887-2895), fibrinogen, c-jun (inducible by phorbol esters, TNF-alpha, UV radiation, retinoic acid, and hydrogen peroxide), collagenase (induced by phorbol esters and retinoic acid), metallothionein (heavy metal and glucocorticoid inducible), Stromelysin (inducible by phorbol ester, interleukin-1 and EGF), alpha-2 macroglobulin and alpha-1 anti-chymotrypsin. Other promoters include, for example, SV40, MMTV, Human Immunodeficiency Virus (MV), Moloney virus, ALV, Epstein Barr virus, Rous Sarcoma virus, human actin, myosin, hemoglobin, and creatine.

[0557] It is envisioned that any of the above promoters alone or in combination with another can be useful depending on the action desired. Promoters, and other regulatory elements, are selected such that they are functional in the desired cells or tissue. In addition, this list of promoters should not be construed to be exhaustive or limiting; other promoters that are used in conjunction with the promoters and methods disclosed herein.

### Armored T-Cells “Knock Down” Strategy

[0558] T-cells of the disclosure may be genetically modified to enhance their therapeutic potential. Alternatively, or in addition, T-cells of the disclosure may be modified to render them less sensitive to immunologic and/or metabolic checkpoints. Modifications of this type “armor” the T cells of the disclosure, which, following the modification, may be referred to here as “armored” T cells. Armored T cells of the disclosure may be produced by, for example, blocking and/or diluting specific endogenous checkpoint signals delivered to the T-cells (i.e. checkpoint inhibition) within the tumor immunosuppressive microenvironment, for example.

[0559] In some embodiments, an armored T-cell of the disclosure is derived from a T cell, a NK cell, a hematopoietic progenitor cell, a peripheral blood (PB) derived T cell (including a T cell isolated or derived from G-CSF-mobilized peripheral blood), or an umbilical cord blood (UCB) derived T cell. In some embodiments, an armored T-cell of the disclosure comprises one or more of a chimeric ligand receptor (CLR comprising a protein scaffold, an antibody, an ScFv, or an antibody mimetic)/chimeric antigen receptor (CAR comprising a protein scaffold, an antibody, an ScFv, or an antibody mimetic), a CARTyrin (a CAR comprising a Centyrin), and/or a VCAR (a CAR comprising a camelid VHH or a single domain VH) of the disclosure. In some embodiments, an armored T-cell of the disclosure comprises an inducible proapoptotic polypeptide comprising (a) a ligand binding region, (b) a linker, and (c) a truncated caspase 9 polypeptide, wherein the inducible proapoptotic polypeptide does not comprise a non-human sequence. In some embodiments, the non-human sequence is a restriction site. In some embodiments, the ligand binding region inducible caspase polypeptide comprises a FK506 binding protein 12 (FKBP12) polypeptide. In some embodiments, the amino acid sequence of the FK506 binding protein 12 (FKBP12) polypeptide comprises a modification at position 36 of the sequence. In some embodiments, the modification is a substitution of valine (V) for phenylalanine (F) at position 36 (F36V). In some embodiments, an armored T-cell of the disclosure comprises an exogenous sequence. In some embodiments, the exogenous sequence comprises a sequence encoding a therapeutic protein. Exemplary therapeutic proteins may be nuclear, cytoplasmic, intracellular, transmembrane, cell-surface bound, or secreted proteins. Exemplary therapeutic proteins expressed by the armored T cell may modify an activity of the armored T cell or may modify an activity of a second cell. In some embodiments, an armored T-cell of the disclosure comprises a selection gene or a selection marker. In some embodiments, an armored T-cell of the disclosure comprises a synthetic gene expression cassette (also referred to herein as an inducible transgene construct).

[0560] In some embodiments, a T-cell of the disclosure is modified to silence or reduce expression one or more gene(s) encoding receptor(s) of inhibitory checkpoint signals to produce an armored T-cell of the disclosure. Examples of inhibitory checkpoint signals include, but are not limited to, a PD-L1 ligand binding to a PD-1 receptor on a CAR-T cell of the disclosure or a TGFβ cytokine binding to a TGFβRII receptor on a CAR-T cell. Receptors of inhibitory checkpoint signals are expressed on the cell surface or within the cytoplasm of a T-cell. Silencing or reducing expressing of the gene encoding the receptor of the inhibitory checkpoint signal results a loss of protein expression of the inhibitory checkpoint receptors on the surface or within the cytoplasm of an armored T-cell of the disclosure. Thus, armored T cells of the disclosure having silenced or reduced expression of one or more genes encoding an inhibitory checkpoint receptor is resistant, non-receptive or insensitive to checkpoint signals. The armored T cell's resistance or decreased sensitivity to inhibitory checkpoint signals enhances the armored T cell's therapeutic potential in the presence of these inhibitory checkpoint signals. Inhibitory checkpoint signals include but are not limited to the examples listed in Table 2. Exemplary inhibitory checkpoint signals that may be silenced in an armored T cell of the disclosure include, but are not limited to, PD-1 and TGFβRII.

TABLE 2
Exemplary Inhibitory Checkpoint Signals (and
proteins that induce immunosuppression).

| | | SEQ |
|---|---|---|
| Full Name | Abbreviation | ID NO: |
| Programmed cell death protein 1 | PD1 | 14643- |
| | | 14644 |
| transforming growth factor β Receptor 1 | TGFβR1 | 14645 |
| transforming growth factor β Receptor 2 | TGFβR2 | 14646 |
| T-cell immunoglobulin and mucin-domain | TIM3 | 14647 |
| containing-3 | | |
| Lymphocyte-activation gene 3 | LAG3 | 14648 |
| Cytotoxic T-lymphocyte protein 4 | CTLA4 | 14649 |
| B- and T-lymphocyte attenuator | BTLA | 14650 |
| Killer cell immunoglobulin-like receptor | KIR | 14651 |
| Alpha-2A adrenergic receptor | A2aR | 14652 |
| V-type immunoglobulin domain-containing | VISTA | 14653 |
| suppressor of T-cell activation | | |
| T-cell immunoreceptor with Ig and ITIM | TIGIT | 14654 |
| domains | | |
| Programmed cell death 1 ligand 1 | B7H1 or PD-L1 | 14655 |
| Programmed cell death 1 ligand 2 | B7DC or PD-L2 | 14656 |
| T-lymphocyte activation antigen CD80 | B7-1 or CD80 | 14657 |
| T-lymphocyte activation antigen CD86 | B7-2 or CD86 | 14658 |
| CD160 antigen | CD160 | 14659 |
| Leukocyte-associated immunoglobulin-like | LAIR1 | 14660 |
| receptor 1 | | |
| T-cell immunoglobulin and mucin domain- | TIM4 or | 14661 |
| containing protein 4 | TIMD4 | |
| Natural killer cell receptor 2B4 | 2B4 or CD244 | 14662 |
| Major Histocompatibility Complex type I | MHC I | 14663 |
| Major Histocompatibility Complex type II | MHC II | |
| Putative 2-methylcitrate | PDH1R | |
| dehydratase receptor | | |
| T-cell immunoglobulin and mucin | TIM1R | |
| domain 1 receptor | | |
| T-cell immunoglobulin and mucin | TIM4R | |
| domain 4 receptor | | |
| B7-H3 receptor | B7H3R or | |
| | CD176 | |
| | Receptor | |
| B7-H4 receptor | B7H4R | |
| Immunoglobulin-like transcript | ILT3R | |
| (ILT) 3 receptor | | |
| phosphoinositide 3-kinase, subunit alpha | PI3K alpha | 14664 |
| phosphoinositide 3-kinase, subunit gamma | PI3K gamma | 14665 |
| Tyrosine-protein phosphatase | SHP2 or | 14666 |
| non-receptor type 11 | PTPN11 | |
| Protein phosphatase 2, subunit gamma | PP2A gamma | 14667 |
| Protein phosphatase 2, subunit beta | PP2A beta | 14668 |
| Protein phosphatase 2, subunit delta | PP2A delta | 14669 |
| Protein phosphatase 2, subunit epsilon | PP2A epsilon | 14670 |
| Protein phosphatase 2, subunit alpha | PP2A alpha | 14671 |
| T-cell Receptor, subunit alpha | TCR alpha | 14672 |
| T-cell Receptor, subunit beta | TCR beta | 14673 |
| T-cell Receptor, subunit zeta | TCR zeta | 14674 |
| T-cell Receptor, subunit CD3 epsilon | TCR CD3 | 14675 |
| | epsilon | |
| T-cell Receptor, subunit CD3 gamma | TCR CD3 | 14676 |
| | gamma | |
| T-cell Receptor, subunit CD3 delta | TCR CD3 delta | 14677 |
| Cluster of Differentiation 28 | CD28 | 14678 |
| Galectins | Galectins | |
| Galectin 9 | Galectin 9 | 14679 |
| High Mobility Group Box 1 | HMGB1 | 14680 |
| Arginase 1 | ARG1 | 14681 |
| Prostaglandin-Endoperoxide Synthase 1 | PTGS1 | 14682 |
| Prostaglandin-Endoperoxide Synthase 2 | PTGS2 | 14683 |
| Mucin 1, Cell Surface Associated | MUC1 | 14684 |
| Mucin 2, Oligomeric Mucus/Gel-Forming | MUC2 | 14685 |
| Mucin 3A, Cell Surface Associated | MUC3A | 14686 |
| Mucin 3B, Cell Surface Associated | MUC3B | 14687 |
| Mucin 4, Cell Surface Associated | MUC4 | 14688 |
| Mucin 5AC, Oligomeric | MUC5AC | 14689 |
| Mucus/Gel-Forming | | |
| Mucin 5B, Oligomeric Mucus/Gel-Forming | MUC5B | 14690 |
| Mucin 6, Oligomeric Mucus/Gel-Forming | MUC6 | 14691 |
| Mucin 7, Secreted | MUC7 | 14692 |
| Mucin 8 | MUC8 | |
| Mucin 12, Cell Surface Associated | MUC12 | 14693 |
| Mucin 13, Cell Surface Associated | MUC13 | 14694 |
| Mucin 15, Cell Surface Associated | MUC15 | 14695 |
| Mucin 16, Cell Surface Associated | MUC16 | 14696 |
| Mucin 17, Cell Surface Associated | MUC17 | 14697 |
| Mucin 19, Oligomeric | MUC19 | 14698 |
| Mucin 20, Cell Surface Associated | MUC20 | 14699 |
| Mucin 21, Cell Surface Associated | MUC21 | 14700 |
| Mucin 22 | MUC22 | 14701 |
| Indoleamine 2,3-Dioxygenase 1 | IDO1 | 14702 |
| Indoleamine 2,3-Dioxygenase 2 | IDO2 | 14703 |
| Inducible T Cell Costimulator Ligand | ICOSLG | 14704 |
| ROS Proto-Oncogene 1, Receptor Tyrosine | ROS1 | 14705 |
| Kinase | | |
| Tumor Necrosis Factor Receptor | 4-1BB, CD137, | 14706 |
| Superfamily Member 9 | ILA or | |
| | TNFRSF9 | |
| 4-1BB Ligand | 4-1BB-L | 14707 |
| Glucocorticoid-induced TNFR | GITR | 14708 |
| family related gene | | |
| Glucocorticoid-induced TNFR | GITRL | 14709 |
| family related gene ligand | | |

[0561] In some embodiments, a T-cell of the disclosure is modified to silence or reduce expression of one or more gene(s) encoding intracellular proteins involved in checkpoint signaling to produce an armored T-cell of the disclosure. The activity of a T-cell of the disclosure may be enhanced by targeting any intracellular signaling protein involved in a checkpoint signaling pathway, thereby achieving checkpoint inhibition or interference to one or more checkpoint pathways. Intracellular signaling proteins involved in checkpoint signaling include, but are not limited to, exemplary intracellular signaling proteins listed in Table 3.

TABLE 3
Exemplary Intracellular Signaling Proteins.

| Full Name | Abbreviation | SEQ ID NO: |
|---|---|---|
| phosphoinositide 3-kinase, | PI3K alpha | 14710 |
| subunit alpha | | |
| phosphoinositide 3-kinase, | PI3K gamma | 14711 |
| subunit gamma | | |
| Tyrosine-protein phosphatase | SHP2 or | 14712 |
| non-receptor type 11 | PTPN11 | |
| Protein phosphatase 2, subunit gamma | PP2A gamma | 14713 |
| Protein phosphatase 2, subunit beta | PP2A beta | 14714 |
| Protein phosphatase 2, subunit delta | PP2A delta | 14715 |
| Protein phosphatase 2, subunit epsilon | PP2A epsilon | 14716 |
| Protein phosphatase 2, subunit alpha | PP2A alpha | 14717 |
| RAC-alpha serine/ | AKT or PKB | 14718 |
| threonine-protein kinase | | |
| Tyrosine-protein kinase ZAP-70 | ZAP70 | 14719 |
| Amino acid sequence | KIEELE-domain | |
| (KIEELE)-containing | containing | |
| domain protein | proteins | |
| BCL2 associated athanogene 6 | Bat3, Bag6 | 14720 |
| | or Scythe | |
| B-cell lymphoma-extra large | Bcl-xL | 14721 |
| Bcl-2-related protein A1 | Bfl-1 or BCL2A1 | 14722 |

[0562] In some embodiments, a T-cell of the disclosure is modified to silence or reduce expression of one or more gene(s) encoding a transcription factor that hinders the efficacy of a therapy to produce an armored T-cell of the disclosure. The activity of armored T-cells may be enhanced or modulated by silencing or reducing expression (or repressing a function) of a transcription factor that hinders the efficacy of a therapy. Exemplary transcription factors that may be modified to silence or reduce expression or to repress a function thereof include, but are not limited to, the exemplary transcription factors listed in Table 4. For example, expression of a FOXP3 gene may be silenced or reduced in an armored T cell of the disclosure to prevent or reduce the formation of T regulatory CAR-T-cells (CAR-Treg cells), the expression or activity of which may reduce efficacy of a therapy.

TABLE 4
Exemplary Transcription Factors.

| | | SEQ |
|---|---|---|
| | | ID |
| Full Name | Abbreviation | NO: |
| activity-dependent neuroprotector | ADNP | 14723 |
| homeobox | | |
| ADNP homeobox 2 | ADNP2 | 14724 |
| AE binding protein 1 | AEBP1 | 14725 |
| AE binding protein 2 | AEBP2 | 14726 |
| AF4/FMR2 family member 1 | AFF1 | 14727 |
| AF4/FMR2 family member 2 | AFF2 | 14728 |
| AF4/FMR2 family member 3 | AFF3 | 14729 |
| AF4/FMR2 family member 4 | AFF4 | 14730 |
| AT-hook containing | AHCTF1 | 14731 |
| transcription factor 1 | | |
| aryl hydrocarbon receptor | AHR | 14732 |
| aryl-hydrocarbon receptor repressor | AHRR | 14733 |
| autoimmune regulator | AIRE | 14734 |
| AT-hook transcription factor | AKNA | 14735 |
| ALX homeobox 1 | ALX1 | 14736 |
| ALX homeobox 3 | ALX3 | 14737 |
| ALX homeobox 4 | ALX4 | 14738 |
| ankyrin repeat and zinc finger | ANKZF1 | 14739 |
| domain containing 1 | | |
| adaptor related protein complex | AP5Z1 | 14740 |
| 5 zeta 1 subunit | | |
| androgen receptor | AR | 14741 |
| arginine-fifty homeobox | ARGFX | 14742 |
| Rho GTPase activating protein 35 | ARHGAP35 | 14743 |
| AT-rich interaction domain 1A | ARID1A | 14744 |
| AT-rich interaction domain 1B | ARID1B | 14745 |
| AT-rich interaction domain 2 | ARID2 | 14746 |
| AT-rich interaction domain 3A | ARID3A | 14747 |
| AT-rich interaction domain 3B | ARID3B | 14748 |
| AT-rich interaction domain 3C | ARID3C | 14749 |
| AT-rich interaction domain 4A | ARID4A | 14750 |
| AT-rich interaction domain 4B | ARID4B | 14751 |
| AT-rich interaction domain 5A | ARID5A | 14752 |
| AT-rich interaction domain 5B | ARID5B | 14753 |
| aryl hydrocarbon receptor nuclear | ARNT | 14754 |
| translocator | | |
| aryl hydrocarbon receptor nuclear | ARNT2 | 14755 |
| translocator 2 | | |
| aryl hydrocarbon receptor nuclear | ARNTL | 14756 |
| translocator like | | |
| aryl hydrocarbon receptor nuclear | ARNTL2 | 14757 |
| translocator like 2 | | |
| aristaless related homeobox | ARX | 14758 |
| achaete-scute family bHLH | ASCL1 | 14759 |
| transcription factor 1 | | |
| achaete-scute family bHLH | ASCL2 | 14760 |
| transcription factor 2 | | |
| achaete-scute family bHLH | ASCL3 | 14761 |
| transcription factor 3 | | |
| achaete-scute family bHLH | ASCL4 | 14762 |
| transcription factor 4 | | |
| achaete-scute family bHLH | ASCL5 | 14763 |
| transcription factor 5 | | |
| ash1 (absent, small, or homeotic)- | ASH1L | 14764 |
| like (Drosophila) | | |
| ash2 (absent, small, or homeotic)- | ASH2L | 14765 |
| like (Drosophila) | | |
| activating transcription factor 1 | ATF1 | 14766 |
| activating transcription factor 2 | ATF2 | 14767 |
| activating transcription factor 3 | ATF3 | 14768 |
| activating transcription factor 4 | ATF4 | 14769 |
| activating transcription factor 5 | ATF5 | 14770 |
| activating transcription factor 6 | ATF6 | 14771 |
| activating transcription factor 6 beta | ATF6B | 14772 |
| activating transcription factor 7 | ATF7 | 14773 |
| atonal bHLH transcription factor 1 | ATOH1 | 14774 |
| atonal bHLH transcription factor 7 | ATOH7 | 14775 |
| atonal bHLH transcription factor 8 | ATOH8 | 14776 |
| alpha thalassemia/mental | ATRX | 14777 |
| retardation syndrome X-linked | | |
| ataxin 7 | ATXN7 | 14778 |
| BTB and CNC homology 1, | BACH1 | 14779- |
| basic leucine zipper | | 14780 |
| transcription factor1 | | |
| BTB domain and CNC homolog 2 | BACH2 | 14781 |
| BarH like homeobox 1 | BARHL1 | 14782 |
| BarH like homeobox 2 | BARHL2 | 14783 |
| BARX homeobox 1 | BARX1 | 14784 |
| BARX homeobox 2 | BARX2 | 14785 |
| Basic Leucine Zipper ATF-Like | Batf | 14786 |
| Transcription Factor, | | |
| basic leucine zipper transcription | BATF | 14786 |
| factor, ATF-like | | |
| basic leucine zipper transcription | BATF2 | 14787 |
| factor, ATF-like 2 | | |
| basic leucine zipper transcription | BATF3 | 14788 |
| factor, ATF-like 3 | | |
| bobby sox homolog (Drosophila) | BBX | 14789 |
| B-cell CLL/lymphoma 11A | BCL11A | 14790 |
| B-cell CLL/lymphoma 11B | BCL11B | 14791 |
| B-cell CLL/lymphoma 3 | BCL3 | 14792 |
| B-cell CLL/lymphoma 6 | BCL6 | 14793 |
| B-cell CLL/lymphoma 6, member B | BCL6B | 14794 |
| BCL2 associated transcription factor 1 | BCLAF1 | 14795 |
| basic helix-loop-helix family member a15 | BHLHA15 | 14796 |
| basic helix-loop-helix family member a9 | BHLHA9 | 14797 |
| basic helix-loop-helix domain | BHLHB9 | 14798 |
| containing, class B, 9 | | |
| basic helix-loop-helix family member e22 | BHLHE22 | 14799 |
| basic helix-loop-helix family member e23 | BHLHE23 | 14800 |
| basic helix-loop-helix family member e40 | BHLHE40 | 14801 |
| basic helix-loop-helix family member e41 | BHLHE41 | 14802 |
| Beta-Interferon Gene Positive-Regulatory | Blimp-1 | 14803 |
| Domain I Binding Factor | | |
| bone morphogenetic protein 2 | BMP2 | 14804 |
| basonuclin 1 | BNC1 | 14805 |
| basonuclin 2 | BNC2 | 14806 |
| bolA family member 1 | BOLA1 | 14807 |
| bolA family member 2 | BOLA2 | 14808 |
| bolA family member 3 | BOLA3 | 14809 |
| bromodomain PHD finger | BPTF | 14810 |
| transcription factor | | |
| breast cancer 1 | BRCA1 | 14811 |
| brain specific homeobox | BSX | 14812 |
| chromosome 20 open reading frame 194 | C20orf194 | 14813 |
| calmodulin binding transcription activator 1 | CAMTA1 | 14814 |
| calmodulin binding transcription activator 2 | CAMTA2 | 14815 |
| calcium regulated heat stable protein 1 | CARHSP1 | 14816 |
| castor zinc finger 1 | CASZ1 | 14817 |
| core-binding factor, beta subunit | CBFB | 14818 |
| coiled-coil domain containing 79 | CCDC79 | 14819 |
| cell division cycle 5 like | CDC5L | 14820 |
| caudal type homeobox 1 | CDX1 | 14821 |
| caudal type homeobox 2 | CDX2 | 14822 |
| caudal type homeobox 4 | CDX4 | 14823 |
| CCAAT/enhancer binding protein alpha | CEBPA | 14824 |
| CCAAT/enhancer binding protein beta | CEBPB | 14825 |
| CCAAT/enhancer binding protein delta | CEBPD | 14826 |
| CCAAT/enhancer binding protein epsilon | CEBPE | 14827 |
| CCAAT/enhancer binding protein gamma | CEBPG | 14828 |
| CCAAT/enhancer binding protein zeta | CEBPZ | 14829 |
| centromere protein T | CENPT | 14830 |
| ceramide synthase 3 | CERS3 | 14831 |
| ceramide synthase 6 | CERS6 | 14832 |
| chromosome alignment maintaining | CHAMP1 | 14833 |
| phosphoprotein 1 | | |
| capicua transcriptional repressor | CIC | 14834 |
| CDKN1A interacting zinc finger protein 1 | CIZ1 | 14835 |
| clock circadian regulator | CLOCK | 14836 |
| CCR4-NOT transcription complex subunit 4 | CNOT4 | 14837 |
| CPX chromosome region, candidate 1 | CPXCR1 | 14838 |
| cramped chromatin regulator homolog 1 | CRAMP1 | 14839 |
| cAMP responsive element binding protein 1 | CREB1 | 14840 |
| cAMP responsive element binding protein 3 | CREB3 | 14841 |
| cAMP responsive element binding | CREB3L1 | 14842 |
| protein 3-like 1 | | |
| cAMP responsive element binding | CREB3L2 | 14843 |
| protein 3-like 2 | | |
| cAMP responsive element binding | CREB3L3 | 14844 |
| protein 3-like 3 | | |
| cAMP responsive element binding | CREB3L4 | 14845 |
| protein 3-like 4 | | |
| cAMP responsive element binding protein 5 | CREB5 | 14846 |
| CREB binding protein | CREBBP | 14847 |
| cAMP responsive element binding | CREBL2 | 14848 |
| protein-like 2 | | |
| CREB3 regulatory factor | CREBRF | 14849 |
| CREB/ATF bZIP transcription factor | CREBZF | 14850 |
| cAMP responsive element modulator | CREM | 14851 |
| cone-rod homeobox | CRX | 14852 |
| cysteine-serine-rich nuclear protein 1 | CSRNP1 | 14853 |
| cysteine-serine-rich nuclear protein 2 | CSRNP2 | 14854 |
| cysteine-serine-rich nuclear protein 3 | CSRNP3 | 14855 |
| CCCTC-binding factor (zinc finger protein) | CTCF | 14856 |
| CCCTC-binding factor like | CTCFL | 14857 |
| cut-like homeobox 1 | CUX1 | 14858- |
| | | 14859 |
| cut-like homeobox 2 | CUX2 | 14860 |
| CXXC finger protein 1 | CXXC1 | 14861 |
| dachshund family transcription factor 1 | DACH1 | 14862 |
| dachshund family transcription factor 2 | DACH2 | 14863 |
| D site of albumin promoter | DBP | 14864 |
| (albumin D-box) binding protein | | |
| developing brain homeobox 1 | DBX1 | 14865 |
| developing brain homeobox 2 | DBX2 | 14866 |
| damage specific DNA binding protein 2 | DDB2 | 14867 |
| DNA damage inducible transcript 3 | DDIT3 | 14868 |
| DEAF1, transcription factor | DEAF1 | 14869 |
| distal-less homeobox 1 | DLX1 | 14870 |
| distal-less homeobox 2 | DLX2 | 14871 |
| distal-less homeobox 3 | DLX3 | 14872 |
| distal-less homeobox 4 | DLX4 | 14873 |
| distal-less homeobox 5 | DLX5 | 14874 |
| distal-less homeobox 6 | DLX6 | 14875 |
| DNA methyltransferase 1 associated protein 1 | DMAP1 | 14876 |
| diencephalon/mesencephalon homeobox 1 | DMBX1 | 14877 |
| doublesex and mab-3 related | DMRT1 | 14878 |
| transcription factor 1 | | |
| doublesex and mab-3 related | DMRT2 | 14879 |
| transcription factor 2 | | |
| doublesex and mab-3 related | DMRT3 | 14880 |
| transcription factor 3 | | |
| DMRT like family A1 | DMRTA1 | 14881 |
| DMRT like family A2 | DMRTA2 | 14882 |
| DMRT like family B with | DMRTB1 | 14883 |
| proline rich C-terminal 1 | | |
| DMRT like family C1 | DMRTC1 | 14884 |
| DMRT like family C1B | DMRTC1B | 14884 |
| DMRT like family C2 | DMRTC2 | 14885 |
| cyclin D binding myb like | DMTF1 | 14886 |
| transcription factor 1 | | |
| DnaJ heat shock protein family | DNAJC1 | 14887 |
| (Hsp40) member C1 | | |
| DnaJ heat shock protein family | DNAJC2 | 14888 |
| (Hsp40) member C2 | | |
| DnaJ heat shock protein family | DNAJC21 | 14889 |
| (Hsp40) member C21 | | |
| DNA (cytosine-5-)-methyltransferase 1 | DNMT1 | 14890 |
| DNA (cytosine-5-)-methyltransferase | DNMT3A | 14891 |
| 3 alpha | | |
| DNA (cytosine-5-)-methyltransferase 3 beta | DNMT3B | 14892 |
| DNA (cytosine-5-)-methyltransferase 3-like | DNMT3L | 14893 |
| double PHD fingers 1 | DPF1 | 14894 |
| double PHD fingers 2 | DPF2 | 14895 |
| double PHD fingers 3 | DPF3 | 14896 |
| divergent-paired related homeobox | DPRX | 14897 |
| down-regulator of transcription 1 | DR1 | 14898 |
| DR1 associated protein 1 | DRAP1 | 14899 |
| dorsal root ganglia homeobox | DRGX | 14900 |
| double homeobox 4 | DUX4 | 14901 |
| double homeobox 4 like 9 | DUX4L9 | 14902 |
| double homeobox A | DUXA | 14903 |
| E2F transcription factor 1 | E2F1 | 14904 |
| E2F transcription factor 2 | E2F2 | 14905 |
| E2F transcription factor 3 | E2F3 | 14906 |
| E2F transcription factor 4 | E2F4 | 14907 |
| E2F transcription factor 5 | E2F5 | 14908 |
| E2F transcription factor 6 | E2F6 | 14909 |
| E2F transcription factor 7 | E2F7 | 14910 |
| E2F transcription factor 8 | E2F8 | 14911 |
| E4F transcription factor 1 | E4F1 | 14912 |
| early B-cell factor 1 | EBF1 | 14913 |
| early B-cell factor 2 | EBF2 | 14914 |
| early B-cell factor 3 | EBF3 | 14915 |
| early B-cell factor 4 | EBF4 | 14916 |
| early growth response 1 | EGR1 | 14917 |
| early growth response 2 | EGR2 | 14918 |
| early growth response 3 | EGR3 | 14919 |
| early growth response 4 | EGR4 | 14920 |
| ets homologous factor | EHF | 14921 |
| E74-like factor 1 (ets domain | ELF1 | 14922 |
| transcription factor) | | |
| E74-like factor 2 (ets domain | ELF2 | 14923 |
| transcription factor) | | |
| E74-like factor 3 (ets domain | ELF3 | 14924 |
| transcription factor, | | |
| epithelial-specific) | | |
| E74-like factor 4 (ets domain | ELF4 | 14925 |
| transcription factor) | | |
| E74-like factor 5 (ets domain | ELF5 | 14926 |
| transcription factor) | | |
| ELK1, member of ETS oncogene family | ELK1 | 14927 |
| ELK3, ETS-domain protein | ELK3 | 14928 |
| (SRF accessory protein 2) | | |
| ELK4, ETS-domain protein | ELKA | 14929 |
| (SRF accessory protein 1) | | |
| ELM2 and Myb/SANT-like | ELMSAN1 | 14930 |
| domain containing 1 | | |
| empty spiracles homeobox 1 | EMX1 | 14931 |
| empty spiracles homeobox 2 | EMX2 | 14932 |
| engrailed homeobox 1 | EN1 | 14933 |
| engrailed homeobox 2 | EN2 | 14934 |
| enolase 1, (alpha) | ENO1 | 14935 |
| eomesodermin | EOMES | 14936 |
| endothelial PAS domain protein 1 | EPAS1 | 14937 |
| Ets2 repressor factor | ERF | 14938 |
| v-ets avian erythroblastosis | ERG | 14939- |
| virus E26 oncogene | | 14940 |
| homolog | | |
| estrogen receptor 1 | ESR1 | 14941 |
| estrogen receptor 2 (ER beta) | ESR2 | 14942 |
| estrogen related receptor alpha | ESRRA | 14943 |
| estrogen related receptor beta | ESRRB | 14944 |
| estrogen related receptor gamma | ESRRG | 14945 |
| ESX homeobox 1 | ESX1 | 14946 |
| v-ets avian erythroblastosis virus | ETS1 | 14947 |
| E26 oncogene homolog 1 | | |
| v-ets avian erythroblastosis virus | ETS2 | 14948 |
| E26 oncogene homolog 2 | | |
| ets variant 1 | ETV1 | 14949 |
| ets variant 2 | ETV2 | 14950 |
| ets variant 3 | ETV3 | 14951 |
| ets variant 3-like | ETV3L | 14952 |
| ets variant 4 | ETV4 | 14953 |
| ets variant 5 | ETV5 | 14954 |
| ets variant 6 | ETV6 | 14955 |
| ets variant 7 | ETV7 | 14956 |
| even-skipped homeobox 1 | EVX1 | 14957 |
| even-skipped homeobox 2 | EVX2 | 14958 |
| enhancer of zeste 1 polycomb | EZH1 | 14959 |
| repressive complex 2 subunit | | |
| enhancer of zeste 2 polycomb | EZH2 | 14960 |
| repressive complex 2 subunit | | |
| family with sequence similarity | FAM170A | 14961 |
| 170 member A | | |
| Fer3-like bHLH transcription factor | FERD3L | 14962 |
| FEV (ETS oncogene family) | FEV | 14963 |
| FEZ family zinc finger 1 | FEZF1 | 14964 |
| FEZ family zinc finger 2 | FEZF2 | 14965 |
| folliculogenesis specific bHLH | FIGLA | 14966 |
| transcription factor | | |
| FLT3-interacting zinc finger 1 | FIZ1 | 14967 |
| Fli-1 proto-oncogene, ETS | FLI1 | 14968 |
| transcription factor | | |
| FBJ murine osteosarcoma viral | FOS | 14969 |
| oncogene homolog | | |
| FBJ murine osteosarcoma viral | FOSB | 14970 |
| oncogene homolog B | | |
| FOS like antigen 1 | FOSL1 | 14971 |
| FOS like antigen 2 | FOSL2 | 14972 |
| forkhead box A1 | FOXA1 | 14973 |
| forkhead box A2 | FOXA2 | 14974 |
| forkhead box A3 | FOXA3 | 14975 |
| forkhead box B1 | FOXB1 | 14976 |
| forkhead box B2 | FOXB2 | 14977 |
| forkhead box C1 | FOXC1 | 14978 |
| forkhead box C2 | FOXC2 | 14979 |
| forkhead box D1 | FOXD1 | 14980 |
| forkhead box D2 | FOXD2 | 14981 |
| forkhead box D3 | FOXD3 | 14982 |
| forkhead box D4 | FOXD4 | 14983 |
| forkhead box D4-like 1 | FOXD4L1 | 14984 |
| forkhead box D4-like 3 | FOXD4L3 | 14985 |
| forkhead box D4-like 4 | FOXD4L4 | 14986 |
| forkhead box D4-like 5 | FOXD4L5 | 14987 |
| forkhead box D4-like 6 | FOXD4L6 | 14988 |
| forkhead box E1 | FOXE1 | 14989 |
| forkhead box E3 | FOXE3 | 14990 |
| forkhead box F1 | FOXF1 | 14991 |
| forkhead box F2 | FOXF2 | 14992 |
| forkhead box G1 | FOXG1 | 14993 |
| forkhead box H1 | FOXH1 | 14994 |
| forkhead box I1 | FOXI1 | 14995 |
| forkhead box I2 | FOXI2 | 14996 |
| forkhead box I3 | FOXI3 | 14997 |
| forkhead box J1 | FOXJ1 | 14998 |
| forkhead box J2 | FOXJ2 | 14999 |
| forkhead box J3 | FOXJ3 | 15000 |
| forkhead box K1 | FOXK1 | 15001 |
| forkhead box K2 | FOXK2 | 15002 |
| forkhead box L1 | FOXL1 | 15003 |
| forkhead box L2 | FOXL2 | 15004 |
| forkhead box M1 | FOXM1 | 15005 |
| forkhead box N1 | FOXN1 | 15006 |
| forkhead box N2 | FOXN2 | 15007 |
| forkhead box N3 | FOXN3 | 15008 |
| forkhead box N4 | FOXN4 | 15009 |
| forkhead box O1 | FOXO1 | 15010 |
| forkhead box O3 | FOXO3 | 15011 |
| forkhead box O4 | FOXO4 | 15012 |
| forkhead box O6 | FOXO6 | 15013 |
| forkhead box P1 | FOXP1 | 15014 |
| forkhead box P2 | FOXP3 | 15015 |
| forkhead box P3 | FOXP4 | 15016 |
| forkhead box P4 | FOXQ1 | 15017 |
| forkhead box Q1 | FOXR1 | 15018 |
| forkhead box R1 | FOXR2 | 15019 |
| forkhead box R2 | FOXS1 | 15020 |
| forkhead box S1 | FOXP3 | 15021 |
| far upstream element binding protein 1 | FUBP1 | 15022 |
| far upstream element (FUSE) | FUBP3 | 15023 |
| binding protein 3 | | |
| GA binding protein transcription | GABPA | 15024 |
| factor alpha subunit | | |
| GA binding protein transcription | GABPB1 | 15025 |
| factor, beta subunit 1 | | |
| GA binding protein transcription | GABPB2 | 15026 |
| factor, beta subunit 2 | | |
| GATA binding protein 1 (globin | GATA1 | 15027 |
| transcription factor 1) | | |
| GATA binding protein 2 | GATA2 | 15028 |
| GATA binding protein 3 | GATA3 | 15029 |
| GATA binding protein 4 | GATA4 | 15030 |
| GATA binding protein 5 | GATA5 | 15031 |
| GATA binding protein 6 | GATA6 | 15032 |
| GATA zinc finger domain containing 1 | GATAD1 | 15033 |
| GATA zinc finger domain containing 2A | GATAD2A | 15034 |
| GATA zinc finger domain containing 2B | GATAD2B | 15035 |
| gastrulation brain homeobox 1 | GBX1 | 15036 |
| gastrulation brain homeobox 2 | GBX2 | 15037 |
| GC-rich sequence DNA-binding factor 2 | GCFC2 | 15038 |
| glial cells missing homolog 1 | GCM1 | 15039 |
| glial cells missing homolog 2 | GCM2 | 15040 |
| growth factor independent 1 | GFI1 | 15041 |
| transcription repressor | | |
| growth factor independent 1B | GFI1B | 15042 |
| transcription repressor | | |
| GLI family zinc finger 1 | GLI1 | 15043 |
| GLI family zinc finger 2 | GLI2 | 15044 |
| GLI family zinc finger 3 | GLI3 | 15045 |
| GLI family zinc finger 4 | GLI4 | 15046 |
| GLIS family zinc finger 1 | GLIS1 | 15047 |
| GLIS family zinc finger 2 | GLIS2 | 15048 |
| GLIS family zinc finger 3 | GLIS3 | 15049 |
| glucocorticoid modulatory | GMEB1 | 15050 |
| element binding protein 1 | | |
| glucocorticoid modulatory | GMEB2 | 15051 |
| element binding protein 2 | | |
| gon-4-like (C. elegans) | GON4L | 15052 |
| grainyhead like transcription factor 1 | GRHL1 | 15053 |
| grainyhead like transcription factor 2 | GRHL2 | 15054 |
| grainyhead like transcription factor 3 | GRHL3 | 15055 |
| goosecoid homeobox | GSC | 15056 |
| goosecoid homeobox 2 | GSC2 | 15057 |
| GS homeobox 1 | GSX1 | 15058 |
| GS homeobox 2 | GSX2 | 15059 |
| general transcription factor IIi | GTF2I | 15060 |
| general transcription factor IIIA | GTF3A | 15061 |
| GDNF inducible zinc finger protein 1 | GZF1 | 15062 |
| heart and neural crest derivatives | HAND1 | 15063 |
| expressed 1 | | |
| heart and neural crest derivatives | HAND2 | 15064 |
| expressed 2 | | |
| HMG-box transcription factor 1 | HBP1 | 15065- |
| | | 15066 |
| highly divergent homeobox | HDX | 15067 |
| helt bHLH transcription factor | HELT | 15068 |
| hes family bHLH transcription factor 1 | HES1 | 15069- |
| | | 15070 |
| hes family bHLH transcription factor 2 | HES2 | 15071 |
| hes family bHLH transcription factor 3 | HES3 | 15072 |
| hes family bHLH transcription factor 4 | HES4 | 15073 |
| hes family bHLH transcription factor 5 | HES5 | 15074 |
| hes family bHLH transcription factor 6 | HES6 | 15075 |
| hes family bHLH transcription factor 7 | HES7 | 15076 |
| HESX homeobox 1 | HESX1 | 15077 |
| hes-related family bHLH transcription | HEY1 | 15078 |
| factor with YRPW motif 1 | | |
| hes-related family bHLH transcription | HEY2 | 15079 |
| factor with YRPW motif 2 | | |
| hes-related family bHLH | HEYL | 15080 |
| transcription factor with | | |
| YRPW motif-like | | |
| hematopoietically expressed homeobox | HHEX | 15081 |
| hypermethylated in cancer 1 | HIC1 | 15082 |
| hypermethylated in cancer 2 | HIC2 | 15083 |
| hypoxia inducible factor 1, | HIF1A | 15084 |
| alpha subunit (basic helix- | | |
| loop-helix transcription factor) | | |
| hypoxia inducible factor 3, alpha subunit | HIF3A | 15085 |
| histone H4 transcription factor | HINFP | 15086 |
| human immunodeficiency virus type I enhancer | HIVEP1 | 15087 |
| binding protein 1 | | |
| human immunodeficiency virus type I enhancer | HIVEP2 | 15088 |
| binding protein 2 | | |
| human immunodeficiency virus type I enhancer | HIVEP3 | 15089 |
| binding protein 3 | | |
| HKR1, GLI-Kruppel zinc finger | HKR1 | 15090 |
| family member | | |
| hepatic leukemia factor | HLF | 15091 |
| helicase-like transcription factor | HLTF | 15092 |
| H2.0-like homeobox | HLX | 15093 |
| homeobox containing 1 | HMBOX1 | 15094 |
| high mobility group 20A | HMG20A | 15095 |
| high mobility group 20B | HMG20B | 15096 |
| high mobility group AT-hook 1 | HMGA1 | 15097 |
| high mobility group AT-hook 2 | HMGA2 | 15098 |
| HMG-box containing 3 | HMGXB3 | 15099 |
| HMG-box containing 4 | HMGXB4 | 15100 |
| H6 family homeobox 1 | HMX1 | 15101 |
| H6 family homeobox 2 | HMX2 | 15102 |
| H6 family homeobox 3 | HMX3 | 15103- |
| | | 15104 |
| HNF1 homeobox A | HNF1A | 15105 |
| HNF1 homeobox B | HNF1B | 15106 |
| hepatocyte nuclear factor 4 alpha | HNF4A | 15107 |
| hepatocyte nuclear factor 4 gamma | HNF4G | 15108 |
| heterogeneous nuclear ribonucleoprotein K | HNRNPK | 15109 |
| homeobox and leucine zipper encoding | HOMEZ | 15110 |
| HOP homeobox | HOPX | 15111 |
| homeobox A1 | HOXA1 | 15112 |
| homeobox A10 | HOXA10 | 15113 |
| homeobox A11 | HOXA11 | 15114 |
| homeobox A13 | HOXA13 | 15115 |
| homeobox A2 | HOXA2 | 15116 |
| homeobox A3 | HOXA3 | 15117 |
| homeobox A4 | HOXA4 | 15118 |
| homeobox A5 | HOXA5 | 15119 |
| homeobox A6 | HOXA6 | 15120 |
| homeobox A7 | HOXA7 | 15121 |
| homeobox A9 | HOXA9 | 15122 |
| homeobox B1 | HOXB1 | 15123 |
| homeobox B13 | HOXB13 | 15124 |
| homeobox B2 | HOXB2 | 15125 |
| homeobox B3 | HOXB3 | 15126 |
| homeobox B4 | HOXB4 | 15127 |
| homeobox B5 | HOXB5 | 15128 |
| homeobox B6 | HOXB6 | 15129 |
| homeobox B7 | HOXB7 | 15130 |
| homeobox B8 | HOXB8 | 15131 |
| homeobox B9 | HOXB9 | 15132 |
| homeobox C10 | HOXC10 | 15133 |
| homeobox C11 | HOXC11 | 15134 |
| homeobox C12 | HOXC12 | 15135 |
| homeobox C13 | HOXC13 | 15136 |
| homeobox C4 | HOXC4 | 15137 |
| homeobox C5 | HOXC5 | 15138 |
| homeobox C6 | HOXC6 | 15139 |
| homeobox C8 | HOXC8 | 15140 |
| homeobox C9 | HOXC9 | 15141 |
| homeobox D1 | HOXD1 | 15142 |
| homeobox D10 | HOXD10 | 15143 |
| homeobox D11 | HOXD11 | 15144 |
| homeobox D12 | HOXD12 | 15145 |
| homeobox D13 | HOXD13 | 15146 |
| homeobox D3 | HOXD3 | 15147 |
| homeobox D4 | HOXD4 | 15148 |
| homeobox D8 | HOXD8 | 15149 |
| homeobox D9 | HOXD9 | 15150 |
| heat shock transcription factor 1 | HSF1 | 15151 |
| heat shock transcription factor 2 | HSF2 | 15152 |
| heat shock transcription factor 4 | HSF4 | 15153 |
| heat shock transcription factor | HSF5 | 15154 |
| family member 5 | | |
| heat shock transcription factor | HSFX1 | 15155 |
| family, X-linked 1 | | |
| heat shock transcription factor, Y-linked 1 | HSFY1 | 15156 |
| heat shock transcription factor, Y-linked 2 | HSFY2 | 15156 |
| inhibitor of DNA binding 1, dominant | ID1 | 15157 |
| negative helix-loop-helix protein | | |
| inhibitor of DNA binding 2, dominant | ID2 | 15158 |
| negative helix-loop-helix protein | | |
| inhibitor of DNA binding 3, dominant | ID3 | 15159 |
| negative helix-loop-helix protein | | |
| inhibitor of DNA binding 4, dominant | ID4 | 15160 |
| negative helix-loop-helix protein | | |
| interferon, gamma-inducible protein 16 | IFI16 | 15161 |
| IKAROS family zinc finger 1 | IKZF1 | 15162 |
| IKAROS family zinc finger 2 | IKZF2 | 15163 |
| IKAROS family zinc finger 3 | IKZF3 | 15164 |
| IKAROS family zinc finger 4 | IKZF4 | 15165 |
| IKAROS family zinc finger 5 | IKZF5 | 15166 |
| insulinoma associated 1 | INSM1 | 15167 |
| insulinoma-associated 2 | INSM2 | 15168 |
| interferon regulatory factor 1 | IRF1 | 15169 |
| interferon regulatory factor 2 | IRF2 | 15170 |
| interferon regulatory factor 3 | IRF3 | 15171 |
| interferon regulatory factor 4 | IRF4 | 15172 |
| interferon regulatory factor 5 | IRF5 | 15173 |
| interferon regulatory factor 6 | IRF6 | 15174 |
| interferon regulatory factor 7 | IRF7 | 15175 |
| interferon regulatory factor 8 | IRF8 | 15176 |
| interferon regulatory factor 9 | IRF9 | 15177 |
| iroquois homeobox 1 | IRX1 | 15178 |
| iroquois homeobox 2 | IRX2 | 15179 |
| iroquois homeobox 3 | IRX3 | 15180 |
| iroquois homeobox 4 | IRX4 | 15181 |
| iroquois homeobox 5 | IRX5 | 15182 |
| iroquois homeobox 6 | IRX6 | 15183 |
| ISL LIM homeobox 1 | ISL1 | 15184 |
| ISL LIM homeobox 2 | ISL2 | 15185 |
| intestine specific homeobox | ISX | 15186 |
| jumonji and AT-rich interaction | JARID2 | 15187 |
| domain containing 2 | | |
| JAZF zinc finger 1 | JAZF1 | 15188 |
| Jun dimerization protein 2 | JDP2 | 15189 |
| jun proto-oncogene | JUN | 15190 |
| jun B proto-oncogene | JUNB | 15191 |
| jun D proto-oncogene | JUND | 15192 |
| K(lysine) acetyltransferase 5 | KAT5 | 15193 |
| lysine acetyltransferase 6A | KAT6A | 15194 |
| lysine acetyltransferase 6B | KAT6B | 15195 |
| lysine acetyltransferase 7 | KAT7 | 15196 |
| lysine acetyltransferase 8 | KAT8 | 15197 |
| potassium channel modulatory factor 1 | KCMF1 | 15198 |
| potassium voltage-gated channel | KCNIP3 | 15199 |
| interacting protein 3 | | |
| lysine demethylase 2A | KDM2A | 15200 |
| lysine demethylase 5A | KDM5A | 15201 |
| lysine demethylase 5B | KDM5B | 15202 |
| lysine demethylase 5C | KDM5C | 15203 |
| lysine demethylase 5D | KDM5D | 15204 |
| KH-type splicing regulatory protein | KHSRP | 15205 |
| KIAA1549 | KIAA1549 | 15206 |
| Kruppel-like factor 1 (erythroid) | KLF1 | 15207 |
| Kruppel-like factor 10 | KLF10 | 15208 |
| Kruppel-like factor 11 | KLF11 | 15209 |
| Kruppel-like factor 12 | KLF12 | 15210 |
| Kruppel-like factor 13 | KLF13 | 15211 |
| Kruppel-like factor 14 | KLF14 | 15212 |
| Kruppel-like factor 15 | KLF15 | 15213 |
| Kruppel-like factor 16 | KLF16 | 15214 |
| Kruppel-like factor 17 | KLF17 | 15215 |
| Kruppel-like factor 2 | KLF2 | 15216 |
| Kruppel-like factor 3 (basic) | KLF3 | 15217 |
| Kruppel-like factor 4 (gut) | KLF4 | 15218 |
| Kruppel-like factor 5 (intestinal) | KLF5 | 15219 |
| Kruppel-like factor 6 | KLF6 | 15220 |
| Kruppel-like factor 7 (ubiquitous) | KLF7 | 15221 |
| Kruppel-like factor 8 | KLF8 | 15222 |
| Kruppel-like factor 9 | KLF9 | 15223 |
| lysine methyltransferase 2A | KMT2A | 15224 |
| lysine methyltransferase 2B | KMT2B | 15225 |
| lysine methyltransferase 2C | KMT2C | 15226 |
| lysine methyltransferase 2E | KMT2E | 15227 |
| l(3)mbt-like 1 (Drosophila) | L3MBTL1 | 15228 |
| l(3)mbt-like 2 (Drosophila) | L3MBTL2 | 15229 |
| l(3)mbt-like 3 (Drosophila) | L3MBTL3 | 15230 |
| l(3)mbt-like 4 (Drosophila) | L3MBTL4 | 15231 |
| ladybird homeobox 1 | LBX1 | 15232 |
| ladybird homeobox 2 | LBX2 | 15233 |
| ligand dependent nuclear | LCOR | 15234 |
| receptor corepressor | | |
| ligand dependent nuclear receptor | LCORL | 15235 |
| corepressor like | | |
| lymphoid enhancer binding factor 1 | LEF1 | 15236 |
| leucine twenty homeobox | LEUTX | 15237 |
| LIM homeobox 1 | LHX1 | 15238 |
| LIM homeobox 2 | LHX2 | 15239 |
| LIM homeobox 3 | LHX3 | 15240 |
| LIM homeobox 4 | LHX4 | 15241 |
| LIM homeobox 5 | LHX5 | 15242 |
| LIM homeobox 6 | LHX6 | 15243 |
| LIM homeobox 8 | LHX8 | 15244 |
| LIM homeobox 9 | LHX9 | 15245 |
| LIM homeobox transcription factor 1, alpha | LMX1A | 15246 |
| LIM homeobox transcription factor 1, beta | LMX1B | 15247 |
| LOC730110 | LOC730110 | |
| leucine rich repeat (in FLII) | LRRFIP1 | 15248 |
| interacting protein 1 | | |
| leucine rich repeat (in FLII) | LRRFIP2 | 15249 |
| interacting protein 2 | | |
| Ly1 antibody reactive | LYAR | 15250 |
| lymphoblastic leukemia | LYL1 | 15251 |
| associated hematopoiesis | | |
| regulator 1 | | |
| maelstrom spermatogenic transposon silencer | MAEL | 15252 |
| v-maf avian musculoaponeurotic fibrosarcoma | MAF | 15253 |
| oncogene homolog | | |
| MAF1 homolog, negative regulator of RNA | MAF1 | 15254 |
| polymerase III | | |
| v-maf avian musculoaponeurotic fibrosarcoma | MAFA | 15255- |
| oncogene homolog A | | 15256 |
| v-maf avian musculoaponeurotic fibrosarcoma | MAFB | 15257 |
| oncogene homolog B | | |
| v-maf avian musculoaponeurotic fibrosarcoma | MAFF | 15258 |
| oncogene homolog F | | |
| v-maf avian musculoaponeurotic fibrosarcoma | MAFG | 15259 |
| oncogene homolog G | | |
| v-maf avian musculoaponeurotic fibrosarcoma | MAFK | 15260 |
| oncogene homolog K | | |
| matrin 3 | MATR3 | 15261 |
| MYC associated factor X | MAX | 15262 |
| MYC associated zinc finger protein | MAZ | 15263 |
| methyl-CpG binding domain protein 1 | MBD1 | 15264 |
| methyl-CpG binding domain protein 2 | MBD2 | 15265 |
| methyl-CpG binding domain protein 3 | MBD3 | 15266 |
| methyl-CpG binding domain protein 3-like 1 | MBD3L1 | 15267 |
| methyl-CpG binding domain protein 3-like 2 | MBD3L2 | 15268 |
| methyl-CpG binding domain 4 | MBD4 | 15269 |
| DNA glycosylase | | |
| methyl-CpG binding domain protein 5 | MBD5 | 15270 |
| methyl-CpG binding domain protein 6 | MBD6 | 15271 |
| muscleblind like splicing regulator 3 | MBNL3 | 15272 |
| MDS1 and EVI1 complex locus | MECOM | 15273 |
| methyl-CpG binding protein 2 | MECP2 | 15274 |
| myocyte enhancer factor 2A | MEF2A | 15275 |
| myocyte enhancer factor 2B | MEF2B | 15276 |
| myocyte enhancer factor 2C | MEF2C | 15277 |
| myocyte enhancer factor 2D | MEF2D | 15278 |
| Meis homeobox 1 | MEIS1 | 15279 |
| Meis homeobox 2 | MEIS2 | 15280 |
| Meis homeobox 3 | MEIS3 | 15281 |
| Meis homeobox 3 pseudogene 1 | MEIS3P1 | 15282 |
| Meis homeobox 3 pseudogene 2 | MEIS3P2 | 15283 |
| mesenchyme homeobox 1 | MEOX1 | 15284 |
| mesenchyme homeobox 2 | MEOX2 | 15285 |
| mesoderm posterior bHLH | MESP1 | 15286 |
| transcription factor 1 | | |
| mesoderm posterior bHLH | MESP2 | 15287 |
| transcription factor 2 | | |
| MGA, MAX dimerization protein | MGA | 15288- |
| | | 15289 |
| MIER1 transcriptional regulator | MIER1 | 15290 |
| MIER family member 2 | MIER2 | 15291 |
| MIER family member 3 | MIER3 | 15292 |
| MIS18 binding protein 1 | MIS18BP1 | 15293 |
| microphthalmia-associated transcription factor | MITF | 15294 |
| Mix paired-like homeobox | MIXL1 | 15295 |
| mohawk homeobox | MKX | 15296 |
| myeloid/lymphoid or mixed-lineage leukemia; | MLLT1 | 15297 |
| translocated to, 1 | | |
| myeloid/lymphoid or mixed-lineage leukemia; | MLLT10 | 15298 |
| translocated to, 10 | | |
| myeloid/lymphoid or mixed-lineage leukemia; | MLLT11 | 15299 |
| translocated to, 11 | | |
| myeloid/lymphoid or mixed-lineage leukemia; | MLLT3 | 15300 |
| translocated to, 3 | | |
| myeloid/lymphoid or mixed-lineage leukemia; | MLLT4 | 15301 |
| translocated to, 4 | | |
| myeloid/lymphoid or mixed-lineage leukemia; | MLLT6 | 15302 |
| translocated to, 6 | | |
| MLX, MAX dimerization protein | MLX | 15303 |
| MLX interacting protein | MLXIP | 15304 |
| MLX interacting protein-like | MLXIPL | 15305 |
| MAX network transcriptional repressor | MNT | 15306 |
| motor neuron and pancreas homeobox 1 | MNX1 | 15307 |
| musculin | MSC | 15308 |
| mesogenin 1 | MSGN1 | 15309 |
| msh homeobox 1 | MSX1 | 15310 |
| msh homeobox 2 | MSX2 | 15311 |
| metastasis associated 1 | MTA1 | 15312 |
| metastasis associated 1 family member 2 | MTA2 | 15313 |
| metastasis associated 1 family member 3 | MTA3 | 15314 |
| metal-regulatory transcription factor 1 | MTF1 | 15315 |
| metal response element binding | MTF2 | 15316 |
| transcription factor 2 | | |
| MAX dimerization protein 1 | MXD1 | 15317 |
| MAX dimerization protein 3 | MXD3 | 15318 |
| MAX dimerization protein 4 | MXD4 | 15319 |
| MAX interactor 1, dimerization protein | MXI1 | 15320 |
| v-myb avian myeloblastosis | MYB | 15321 |
| viral oncogene homolog | | |
| v-myb avian myeloblastosis viral | MYBL1 | 15322 |
| oncogene homolog-like 1 | | |
| v-myb avian myeloblastosis viral | MYBL2 | 15323 |
| oncogene homolog-like 2 | | |
| v-myc avian myelocytomatosis viral | MYC | 15324 |
| oncogene homolog | | |
| v-myc avian myelocytomatosis | MYCL | 15325 |
| viral oncogene lung | | |
| carcinoma derived homolog | | |
| MYCL pseudogene 1 | MYCLP1 | 15326 |
| v-myc avian myelocytomatosis | MYCN | 15327 |
| viral oncogene | | |
| neuroblastoma derived homolog | | |
| myogenic factor 5 | MYF5 | 15328 |
| myogenic factor 6 | MYF6 | 15329 |
| myoneurin | MYNN | 15330 |
| myogenic differentiation 1 | MYOD1 | 15331 |
| myogenin (myogenic factor 4) | MYOG | 15332 |
| myelin regulatory factor | MYRF | 15333 |
| Myb-like, SWIRM and MPN domains 1 | MYSM1 | 15334 |
| myelin transcription factor 1 | MYT1 | 15335- |
| | | 15336 |
| myelin transcription factor 1 like | MYT1L | 15337 |
| myeloid zinc finger 1 | MZF1 | 15338 |
| Nanog homeobox | NANOG | 15339 |
| NANOG neighbor homeobox | NANOGNB | 15340 |
| Nanog homeobox pseudogene 1 | NANOGP1 | 15341 |
| Nanog homeobox pseudogene 8 | NANOGP8 | 15342 |
| nuclear receptor coactivator 1 | NCOA1 | 15343 |
| nuclear receptor coactivator 2 | NCOA2 | 15344 |
| nuclear receptor coactivator 3 | NCOA3 | 15345 |
| nuclear receptor coactivator 4 | NCOA4 | 15346 |
| nuclear receptor coactivator 5 | NCOA5 | 15347 |
| nuclear receptor coactivator 6 | NCOA6 | 15348 |
| nuclear receptor coactivator 7 | NCOA7 | 15349 |
| nuclear receptor corepressor 1 | NCOR1 | 15350 |
| nuclear receptor corepressor 2 | NCOR2 | 15351 |
| neuronal differentiation 1 | NEUROD1 | 15352 |
| neuronal differentiation 2 | NEUROD2 | 15353 |
| neuronal differentiation 4 | NEUROD4 | 15354 |
| neuronal differentiation 6 | NEUROD6 | 15355 |
| neuro genin 1 | NEUROG1 | 15356 |
| neuro genin 2 | NEUROG2 | 15357 |
| neuro genin 3 | NEUROG3 | 15358 |
| nuclear factor of activated T-cells 5, | NFAT5 | 15359 |
| tonicity-responsive | | |
| nuclear factor of activated T-cells, cytoplasmic, | NFATC1 | 15360 |
| calcineurin-dependent 1 | | |
| nuclear factor of activated T-cells, cytoplasmic, | NFATC2 | 15361 |
| calcineurin-dependent 2 | | |
| nuclear factor of activated T-cells, cytoplasmic, | NFATC3 | 15362 |
| calcineurin-dependent 3 | | |
| nuclear factor of activated T-cells, cytoplasmic, | NFATC4 | 15363 |
| calcineurin-dependent 4 | | |
| nuclear factor, erythroid 2 | NFE2 | 15364 |
| nuclear factor, erythroid 2 like 1 | NFE2L1 | 15365 |
| nuclear factor, erythroid 2 like 2 | NFE2L2 | 15366 |
| nuclear factor, erythroid 2 like 3 | NFE2L3 | 15367 |
| nuclear factor I/A | NFIA | 15368 |
| nuclear factor I/B | NFIB | 15369 |
| nuclear factor I/C (CCAAT-binding | NFIC | 15370 |
| transcription factor) | | |
| nuclear factor, interleukin 3 regulated | NFIL3 | 15371 |
| nuclear factor I/X (CCAAT-binding | NFIX | 15372 |
| transcription factor) | | |
| nuclear factor of kappa light polypeptide gene | NFKB1 | 15373 |
| enhancer in B-cells 1 | | |
| nuclear factor of kappa light polypeptide gene | NFKB2 | 15374 |
| enhancer in B-cells 2 (p49/p100) | | |
| nuclear factor of kappa light polypeptide gene | NFKBIA | 15375 |
| enhancer in B-cells inhibitor, alpha | | |
| nuclear factor of kappa light polypeptide gene | NFKBIB | 15376 |
| enhancer in B-cells inhibitor, beta | | |
| nuclear factor of kappa light polypeptide gene | NFKBID | 15377 |
| enhancer in B-cells inhibitor, delta | | |
| nuclear factor of kappa light polypeptide gene | NFKBIE | 15378 |
| enhancer in B-cells inhibitor, epsilon | | |
| nuclear factor of kappa light polypeptide gene | NFKBIL1 | 15379 |
| enhancer in B-cells inhibitor-like 1 | | |
| nuclear factor of kappa light polypeptide gene | NFKBIZ | 15380 |
| enhancer in B-cells inhibitor, zeta | | |
| nuclear factor related to kappaB | NFRKB | 15381 |
| binding protein | | |
| nuclear transcription factor, | NFX1 | 15382 |
| X-box binding 1 | | |
| nuclear transcription factor, X-box | NFXL1 | 15383 |
| binding-like 1 | | |
| nuclear transcription factor Y subunit alpha | NFYA | 15384 |
| nuclear transcription factor Y subunit beta | NFYB | 15385 |
| nuclear transcription factor Y subunit gamma | NFYC | 15386 |
| nescient helix-loop-helix 1 | NHLH1 | 15387 |
| nescient helix-loop-helix 2 | NHLH2 | 15388 |
| NFKB repressing factor | NKRF | 15389 |
| NK1 homeobox 1 | NKX1-1 | 15390 |
| NK1 homeobox 2 | NKX1-2 | 15391 |
| NK2 homeobox 1 | NKX2-1 | 15392 |
| NK2 homeobox 2 | NKX2-2 | 15393 |
| NK2 homeobox 3 | NKX2-3 | 15394 |
| NK2 homeobox 4 | NKX2-4 | 15395 |
| NK2 homeobox 5 | NKX2-5 | 15396 |
| NK2 homeobox 6 | NKX2-6 | 15397 |
| NK2 homeobox 8 | NKX2-8 | 15398 |
| NK3 homeobox 1 | NKX3-1 | 15399 |
| NK3 homeobox 2 | NKX3-2 | 15400 |
| NK6 homeobox 1 | NKX6-1 | 15401 |
| NK6 homeobox 2 | NKX6-2 | 15402 |
| NK6 homeobox 3 | NKX6-3 | 15403 |
| NOBOX oogenesis homeobox | NOBOX | 15404 |
| NOC3 like DNA replication regulator | NOC3L | 15405 |
| nucleolar complex associated 4 homolog | NOC4L | 15406 |
| non-POU domain containing, octamer-binding | NONO | 15407 |
| notochord homeobox | NOTO | 15408 |
| neuronal PAS domain protein 1 | NPAS1 | 15409 |
| neuronal PAS domain protein 2 | NPAS2 | 15410 |
| neuronal PAS domain protein 3 | NPAS3 | 15411 |
| neuronal PAS domain protein 4 | NPAS4 | 15412 |
| nuclear receptor subfamily 0 group B member 1 | NR0B1 | 15413 |
| nuclear receptor subfamily 0 group B member 2 | NR0B2 | 15414 |
| nuclear receptor subfamily 1 group D member 1 | NR1D1 | 15415 |
| nuclear receptor subfamily 1 group D member 2 | NR1D2 | 15416 |
| nuclear receptor subfamily 1 group H member 2 | NR1H2 | 15417 |
| nuclear receptor subfamily 1 group H member 3 | NR1H3 | 15418 |
| nuclear receptor subfamily 1 group H member 4 | NR1H4 | 15419 |
| nuclear receptor subfamily 1 group I member 2 | NR1I2 | 15420 |
| nuclear receptor subfamily 1 group I member 3 | NR1I3 | 15421 |
| nuclear receptor subfamily 2 group C member 1 | NR2C1 | 15422 |
| nuclear receptor subfamily 2 group C member 2 | NR2C2 | 15423 |
| nuclear receptor subfamily 2 group E member 1 | NR2E1 | 15424 |
| nuclear receptor subfamily 2 group E member 3 | NR2E3 | 15425 |
| nuclear receptor subfamily 2 group F member 1 | NR2F1 | 15426 |
| nuclear receptor subfamily 2 group F member 2 | NR2F2 | 15427 |
| nuclear receptor subfamily 2 group F member 6 | NR2F6 | 15428 |
| nuclear receptor subfamily 3 group C member 1 | NR3C1 | 15429 |
| nuclear receptor subfamily 3 group C member 2 | NR3C2 | 15430 |
| nuclear receptor subfamily 4 group A member 1 | NR4A1 | 15431 |
| nuclear receptor subfamily 4 group A member 2 | NR4A2 | 15432 |
| nuclear receptor subfamily 4 group A member 3 | NR4A3 | 15433 |
| nuclear receptor subfamily 5 group A member 1 | NR5A1 | 15434 |
| nuclear receptor subfamily 5 group A member 2 | NR5A2 | 15435 |
| nuclear receptor subfamily 6 group A member 1 | NR6A1 | 15436 |
| nuclear respiratory factor 1 | NRF1 | 15437- |
| | | 15438 |
| neural retina leucine zipper | NRL | 15439 |
| oligodendrocyte transcription factor 1 | OLIG1 | 15440 |
| oligodendrocyte lineage transcription factor 2 | OLIG2 | 15441 |
| oligodendrocyte transcription factor 3 | OLIG3 | 15442 |
| one cut homeobox 1 | ONECUT1 | 15443 |
| one cut homeobox 2 | ONECUT2 | 15444 |
| one cut homeobox 3 | ONECUT3 | 15445 |
| odd-skipped related transciption factor 1 | OSR1 | 15446 |
| odd-skipped related transciption factor 2 | OSR2 | 15447 |
| orthopedia homeobox | OTP | 15448 |
| orthodenticle homeobox 1 | OTX1 | 15449 |
| orthodenticle homeobox 2 | OTX2 | 15450 |
| ovo like zinc finger 1 | OVOL1 | 15451 |
| ovo like zinc finger 2 | OVOL2 | 15452 |
| ovo like zinc finger 3 | OVOL3 | 15453 |
| poly(ADP-ribose) polymerase 1 | PARP1 | 15454 |
| poly(ADP-ribose) polymerase | PARP12 | 15455 |
| family member 12 | | |
| POZ/BTB and AT hook containing | PATZ1 | 15456 |
| zinc finger 1 | | |
| PRKC, apoptosis, WT1, regulator | PAWR | 15457 |
| paired box 1 | PAX1 | 15458 |
| paired box 2 | PAX2 | 15459 |
| paired box 3 | PAX3 | 15460 |
| paired box 4 | PAX4 | 15461 |
| paired box 5 | PAX5 | 15462 |
| paired box 6 | PAX6 | 15463 |
| paired box 7 | PAX7 | 15464 |
| paired box 8 | PAX8 | 15465 |
| paired box 9 | PAX9 | 15466 |
| PAX3 and PAX7 binding protein 1 | PAXBP1 | 15467 |
| polybromo 1 | PBRM1 | 15468 |
| pre-B-cell leukemia homeobox 1 | PBX1 | 15469 |
| pre-B-cell leukemia homeobox 2 | PBX2 | 15470 |
| pre-B-cell leukemia homeobox 3 | PBX3 | 15471 |
| pre-B-cell leukemia homeobox 4 | PBX4 | 15472 |
| poly(rC) binding protein 1 | PCBP1 | 15473 |
| poly(rC) binding protein 2 | PCBP2 | 15474 |
| poly(rC) binding protein 3 | PCBP3 | 15475 |
| poly(rC) binding protein 4 | PCBP4 | 15476 |
| poly comb group ring finger 6 | PCGF6 | 15477 |
| pancreatic and duodenal homeobox 1 | PDX1 | 15478- |
| | | 15479 |
| paternally expressed 3 | PEG3 | 15480 |
| progesterone receptor | PGR | 15481 |
| prohibitin | PHB | 15482 |
| prohibitin 2 | PHB2 | 15483 |
| PHD finger protein 20 | PHF20 | 15484 |
| PHD finger protein 5A | PHF5A | 15485 |
| paired like homeobox 2a | PHOX2A | 15486 |
| paired like homeobox 2b | PHOX2B | 15487 |
| putative homeodomain transcription factor 1 | PHTF1 | 15488 |
| putative homeodomain transcription factor 2 | PHTF2 | 15489 |
| paired like homeodomain 1 | PITX1 | 15490 |
| paired like homeodomain 2 | PITX2 | 15491 |
| paired like homeodomain 3 | PITX3 | 15492 |
| PBX/knotted 1 homeobox 1 | PKNOX1 | 15493 |
| PBX/knotted 1 homeobox 2 | PKNOX2 | 15494 |
| PLAG1 zinc finger | PLAG1 | 15495 |
| PLAG1 like zinc finger 1 | PLAGL1 | 15496 |
| PLAG1 like zinc finger 2 | PLAGL2 | 15497 |
| pleckstrin | PLEK | 15498 |
| promyelocytic leukaemia zinc finger | PLZF | 15499 |
| pogo transposable element with ZNF domain | POGZ | 15500 |
| POU class 1 homeobox 1 | POU1F1 | 15501 |
| POU class 2 associating factor 1 | POU2AF1 | 15502 |
| POU class 2 homeobox 1 | POU2F1 | 15503 |
| POU class 2 homeobox 2 | POU2F2 | 15504 |
| POU class 2 homeobox 3 | POU2F3 | 15505 |
| POU class 3 homeobox 1 | POU3F1 | 15506 |
| POU class 3 homeobox 2 | POU3F2 | 15507 |
| POU class 3 homeobox 3 | POU3F3 | 15508 |
| POU class 3 homeobox 4 | POU3F4 | 15509 |
| POU class 4 homeobox 1 | POU4F1 | 15510 |
| POU class 4 homeobox 2 | POU4F2 | 15511 |
| POU class 4 homeobox 3 | POU4F3 | 15512 |
| POU class 5 homeobox 1 | POU5F1 | 15513 |
| POU class 5 homeobox 1B | POU5F1B | 15514 |
| POU domain class 5, transcription factor 2 | POU5F2 | 15515 |
| POU class 6 homeobox 1 | POU6F1 | 15516 |
| POU class 6 homeobox 2 | POU6F2 | 15517 |
| peroxisome proliferator activated | PPARA | 15518 |
| receptor alpha | | |
| peroxisome proliferator activated | PPARD | 15519 |
| receptor delta | | |
| peroxisome proliferator activated | PPARG | 15520 |
| receptor gamma | | |
| protein phosphatase 1 regulatory | PPP1R13L | 15521 |
| subunit 13 like | | |
| PR domain 1 | PRDM1 | 15522 |
| PR domain 10 | PRDM10 | 15523 |
| PR domain 11 | PRDM11 | 15524 |
| PR domain 12 | PRDM12 | 15525 |
| PR domain 13 | PRDM13 | 15526 |
| PR domain 14 | PRDM14 | 15527 |
| PR domain 15 | PRDM15 | 15528 |
| PR domain 16 | PRDM16 | 15529 |
| PR domain 2 | PRDM2 | 15530 |
| PR domain 4 | PRDM4 | 15531 |
| PR domain 5 | PRDM5 | 15532 |
| PR domain 6 | PRDM6 | 15533 |
| PR domain 7 | PRDM7 | 15534 |
| PR domain 8 | PRDM8 | 15535 |
| PR domain 9 | PRDM9 | 15536 |
| prolactin regulatory element binding | PREB | 15537 |
| PROP paired-like homeobox 1 | PROP1 | 15538 |
| prospero homeobox 1 | PROX1 | 15539 |
| prospero homeobox 2 | PROX2 | 15540 |
| paired related homeobox 1 | PRRX1 | 15541 |
| paired related homeobox 2 | PRRX2 | 15542 |
| paraspeckle component 1 | PSPC1 | 15543 |
| pancreas specific transcription factor, 1a | PTF1A | 15544 |
| purine-rich element binding protein A | PURA | 15545 |
| purine-rich element binding protein B | PURB | 15546 |
| purine-rich element binding protein G | PURG | 15547 |
| retinoic acid receptor alpha | RARA | 15548 |
| retinoic acid receptor beta | RARB | 15549 |
| retinoic acid receptor gamma | RARG | 15550 |
| retina and anterior neural fold homeobox | RAX | 15551- |
| | | 15552 |
| retina and anterior neural fold homeobox 2 | RAX2 | 15553 |
| RB associated KRAB zinc finger | RBAK | 15554 |
| RNA binding motif protein 22 | RBM22 | 15555 |
| recombination signal binding protein for | RBPJ | 15556 |
| immunoglobulin kappa J region | | |
| recombination signal binding protein for | RBPJL | 15557 |
| immunoglobulin kappa J region-like | | |
| ring finger and CCCH-type domains 1 | RC3H1 | 15558 |
| ring finger and CCCH-type domains 2 | RC3H2 | 15559 |
| REST corepressor 1 | RCOR1 | 15560 |
| REST corepressor 2 | RCOR2 | 15561 |
| REST corepressor 3 | RCOR3 | 15562 |
| v-rel avian reticuloendothcliosis viral | REL | 15563 |
| oncogene homolog | | |
| v-rel avian reticuloendothcliosis viral | RELA | 15564 |
| oncogene homolog A | | |
| v-rel avian reticuloendothcliosis viral | RELB | 15565 |
| oncogene homolog B | | |
| arginine-glutamic acid di peptide (RE) repeats | RERE | 15566 |
| RE1-silencing transcription factor | REST | 15567 |
| regulatory factor X1 | RFX1 | 15568 |
| regulatory factor X2 | RFX2 | 15569 |
| regulatory factor X3 | RFX3 | 15570 |
| regulatory factor X4 | RFX4 | 15571 |
| regulatory factor X5 | RFX5 | 15572 |
| regulatory factor X6 | RFX6 | 15573 |
| regulatory factor X7 | RFX7 | 15574 |
| RFX family member 8, lacking RFX | RFX8 | 15575 |
| DNA binding domain | | |
| regulatory factor X associated ankyrin | RFXANK | 15576 |
| containing protein | | |
| regulatory factor X associated protein | RFXAP | 15577 |
| Rhox homeobox family member 1 | RHOXF1 | 15578 |
| Rhox homeobox family member 2 | RHOXF2 | 15579 |
| Rhox homeobox family member 2B | RHOXF2B | 15580 |
| rearranged L-myc fusion | RLF | 15581- |
| | | 15582 |
| RAR related orphan receptor A | RORA | 15583 |
| RAR related orphan receptor B | RORB | 15584 |
| RAR related orphan receptor C | RORC | 15585 |
| retinoic acid receptor-related orphan | RORgT | 15586 |
| nuclear receptor gamma | | |
| ras responsive element binding protein 1 | RREB1 | 15587 |
| runt related transcription factor 1 | RUNX1 | 15588 |
| runt related transcription factor 1; | RUNX1T1 | 15589 |
| translocated to, 1 (cyclin D related) | | |
| runt related transcription factor 2 | RUNX2 | 15590 |
| runt related transcription factor 3 | RUNX3 | 15591 |
| retinoid X receptor alpha | RXRA | 15592 |
| retinoid X receptor beta | RXRB | 15593 |
| retinoid X receptor gamma | RXRG | 15594 |
| spalt-like transcription factor 1 | SALL1 | 15595 |
| spalt-like transcription factor 2 | SALL2 | 15596 |
| spalt-like transcription factor 3 | SALL3 | 15597 |
| spalt-like transcription factor 4 | SALL4 | 15598 |
| SATB homeobox 1 | SATB1 | 15599 |
| SATB homeobox 2 | SATB2 | 15600 |
| S-phase cyclin A-associated protein in the ER | SCAPER | 15601 |
| scratch family zinc finger 1 | SCRT1 | 15602 |
| scratch family zinc finger 2 | SCRT2 | 15603 |
| scleraxis bHLH transcription factor | SCX | 15604 |
| SEBOX homeobox | SEBOX | 15605 |
| SET binding protein 1 | SETBP1 | 15606 |
| splicing factor proline/glutamine-rich | SFPQ | 15607 |
| short stature homeobox | SHOX | 15608 |
| short stature homeobox 2 | SHOX2 | 15609 |
| single-minded family bHLH | SIM1 | 15610 |
| transcription factor 1 | | |
| single-minded family bHLH | SIM2 | 15611 |
| transcription factor 2 | | |
| SIX homeobox 1 | SIX1 | 15612 |
| SIX homeobox 2 | SIX2 | 15613 |
| SIX homeobox 3 | SIX3 | 15614 |
| SIX homeobox 4 | SIX4 | 15615 |
| SIX homeobox 5 | SIX5 | 15616 |
| SIX homeobox 6 | SIX6 | 15617 |
| SKI proto-oncogene | SKI | 15618 |
| SKI-like proto-oncogene | SKIL | 15619 |
| SKI family transcriptional corepressor 1 | SKOR1 | 15620 |
| SKI family transcriptional corepressor 2 | SKOR2 | 15621 |
| solute carrier family 30 | SLC30A9 | 15622 |
| (zinc transporter), member 9 | | |
| SMAD family member 1 | SMAD1 | 15623 |
| SMAD family member 2 | SMAD2 | 15624 |
| SMAD family member 3 | SMAD3 | 15625 |
| SMAD family member 4 | SMAD4 | 15626 |
| SMAD family member 5 | SMAD5 | 15627 |
| SMAD family member 6 | SMAD6 | 15628 |
| SMAD family member 7 | SMAD7 | 15629 |
| SMAD family member 9 | SMAD9 | 15630 |
| SWI/SNF related, matrix | SMARCA1 | 15631 |
| associated, actin dependent | | |
| regulator of chromatin, subfamily a, member 1 | | |
| SWI/SNF related, matrix | SMARCA2 | 15632 |
| associated, actin dependent | | |
| regulator of chromatin, subfamily a, member 2 | | |
| SWI/SNF related, matrix | SMARCA4 | 15633 |
| associated, actin dependent | | |
| regulator of chromatin, subfamily a, member 4 | | |
| SWI/SNF related, matrix | SMARCA5 | 15634 |
| associated, actin dependent | | |
| regulator of chromatin, subfamily a, member 5 | | |
| SWI/SNF-related, matrix- | SMARCAD1 | 15635 |
| associated actin-dependent | | |
| regulator of chromatin, subfamily | | |
| a, containing DEAD/H box 1 | | |
| SWI/SNF related, matrix | SMARCAL1 | 15636 |
| associated, actin dependent | | |
| regulator of chromatin, subfamily a-like 1 | | |
| SWI/SNF related, matrix | SMARCB1 | 15637 |
| associated, actin dependent | | |
| regulator of chromatin, subfamily b, member 1 | | |
| SWI/SNF related, matrix | SMARCC1 | 15638 |
| associated, actin dependent | | |
| regulator of chromatin, subfamily c, member 1 | | |
| SWI/SNF related, matrix | SMARCC2 | 15639 |
| associated, actin dependent | | |
| regulator of chromatin, subfamily c, member 2 | | |
| SWI/SNF related, matrix | SMARCD1 | 15640 |
| associated, actin dependent | | |
| regulator of chromatin, subfamily d, member 1 | | |
| SWI/SNF related, matrix | SMARCD2 | 15641 |
| associated, actin dependent | | |
| regulator of chromatin, subfamily d, member 2 | | |
| SWI/SNF related, matrix | SMARCD3 | 15642 |
| associated, actin dependent | | |
| regulator of chromatin, subfamily d, member 3 | | |
| SWI/SNF related, matrix | SMARCE1 | 15643 |
| associated, actin dependent | | |
| regulator of chromatin, subfamily e, member 1 | | |
| snail family zinc finger 1 | SNAI1 | 15644 |
| snail family zinc finger 2 | SNAI2 | 15645 |
| snail family zinc finger 3 | SNAI3 | 15646 |
| small nuclear RNA activating | SNAPC4 | 15647 |
| complex polypeptide 4 | | |
| spermatogenesis and oogenesis | SOHLH1 | 15648 |
| specific basic helix-loop-helix 1 | | |
| spermatogenesis and oogenesis specific | SOHLH2 | 15649 |
| basic helix-loop-helix 2 | | |
| SRY-box 1 | SOX1 | 15650 |
| SRY-box 10 | SOX10 | 15651 |
| SRY-box 11 | SOX11 | 15652 |
| SRY-box 12 | SOX12 | 15653 |
| SRY-box 13 | SOX13 | 15654 |
| SRY-box 14 | SOX14 | 15655 |
| SRY-box 15 | SOX15 | 15656 |
| SRY-box 17 | SOX17 | 15657 |
| SRY-box 18 | SOX18 | 15658 |
| SRY-box 2 | SOX2 | 15659 |
| SRY-box 21 | SOX21 | 15660 |
| SRY-box 3 | SOX3 | 15661 |
| SRY-box 30 | SOX30 | 15662 |
| SRY-box 4 | SOX4 | 15663 |
| SRY-box 5 | SOX5 | 15664 |
| SRY-box 6 | SOX6 | 15665 |
| SRY-box 7 | SOX7 | 15666 |
| SRY-box 8 | SOX8 | 15667 |
| SRY-box 9 | SOX9 | 15668 |
| Sp1 transcription factor | SP1 | 15669- |
| | | 15670 |
| SP100 nuclear antigen | SP100 | 15671 |
| SP110 nuclear body protein | SP110 | 15672 |
| SP140 nuclear body protein | SP140 | 15673 |
| SP140 nuclear body protein like | SP140L | 15674 |
| Sp2 transcription factor | SP2 | 15675 |
| Sp3 transcription factor | SP3 | 15676 |
| Sp4 transcription factor | SP4 | 15677 |
| Sp5 transcription factor | SP5 | 15678 |
| Sp6 transcription factor | SP6 | 15679 |
| Sp7 transcription factor | SP7 | 15680 |
| Sp8 transcription factor | SP8 | 15681 |
| Sp9 transcription factor | SP9 | 15682 |
| SAM pointed domain containing | SPDEF | 15683 |
| ETS transcription factor | | |
| Spi-1 proto-oncogene | SPI1 | 15684 |
| Spi-B transcription factor | SPIB | 15685 |
| (Spi-1/PU.1 related) | | |
| Spi-C transcription factor | SPIC | 15686 |
| (Spi-1/PU.1 related) | | |
| spermatogenic leucine zipper 1 | SPZ1 | 15687 |
| sterol regulatory element binding | SREBF1 | 15688 |
| transcription factor 1 | | |
| sterol regulatory element binding | SREBF2 | 15689 |
| transcription factor 2 | | |
| serum response factor | SRF | 15690 |
| sex determining region Y | SRY | 15691 |
| structure specific recognition protein 1 | SSRP1 | 15692 |
| suppression of tumorigenicity 18, zinc finger | ST18 | 15693 |
| signal transducer and activator | STAT1 | 15694 |
| of transcription 1 | | |
| signal transducer and activator | STAT2 | 15695 |
| of transcription 2 | | |
| signal transducer and | STAT3 | 15696 |
| activator of transcription 3 | | |
| (acute-phase response factor) | | |
| signal transducer and activator | STAT4 | 15697 |
| of transcription 4 | | |
| signal transducer and activator | STAT5 | 15698 |
| of transcription 5 | | |
| signal transducer and activator | STAT5A | 15699 |
| of transcription 5A | | |
| signal transducer and activator | STAT5B | 15700 |
| of transcription 5B | | |
| signal transducer and activator of | STAT6 | 15701 |
| transcription 6, interleukin-4 induced | | |
| transcriptional adaptor 2A | TADA2A | 15702 |
| transcriptional adaptor 2B | TADA2B | 15703 |
| TATA-box binding protein associated factor 1 | TAF1 | 15704 |
| T-cell acute lymphocytic leukemia 1 | TAL1 | 15705 |
| T-cell acute lymphocytic leukemia 2 | TAL2 | 15706 |
| Tax1 (human T-cell leukemia virus | TAX1BP1 | 15707 |
| type I) binding protein 1 | | |
| Tax1 (human T-cell leukemia virus | TAX1BP3 | 15708 |
| type I) binding protein 3 | | |
| T-box transcription factor T-bet | Tbet | 15709 |
| TATA-box binding protein | TBP | 15710 |
| TATA-box binding protein like 1 | TBPL1 | 15711 |
| TATA-box binding protein like 2 | TBPL2 | 15712 |
| T-box, brain 1 | TBR1 | 15713 |
| T-box 1 | TBX1 | 15714 |
| T-box 10 | TBX10 | 15715 |
| T-box 15 | TBX15 | 15716 |
| T-box 18 | TBX18 | 15717 |
| T-box 19 | TBX19 | 15718 |
| T-box 2 | TBX2 | 15719 |
| T-box 20 | TBX20 | 15720 |
| T-box 21 | TBX21 | 15721 |
| T-box 22 | TBX22 | 15722 |
| T-box 3 | TBX3 | 15723 |
| T-box 4 | TBX4 | 15724 |
| T-box 5 | TBX5 | 15725 |
| T-box 6 | TBX6 | 15726 |
| transcription factor 12 | TCF12 | 15727 |
| transcription factor 15 (basic helix-loop-helix) | TCF15 | 15728 |
| transcription factor 19 | TCF19 | 15729 |
| transcription factor 20 (AR1) | TCF20 | 15730 |
| transcription factor 21 | TCF21 | 15731 |
| transcription factor 23 | TCF23 | 15732 |
| transcription factor 24 | TCF24 | 15733 |
| transcription factor 25 (basic helix-loop-helix) | TCF25 | 15734 |
| transcription factor 3 | TCF3 | 15735 |
| transcription factor 4 | TCF4 | 15736 |
| transcription factor 7 (T-cell specific, | TCF7 | 15737 |
| HMG-box, TCF1) | | |
| transcription factor 7 like 1 | TCF7L1 | 15738 |
| transcription factor 7 like 2 | TCF7L2 | 15739 |
| transcription factor-like 5 | TCFL5 | 15740 |
| (basic helix-loop-helix) | | |
| TEA domain transcription factor 1 | TEAD1 | 15741 |
| TEA domain transcription factor 2 | TEAD2 | 15742 |
| TEA domain transcription factor 3 | TEAD3 | 15743 |
| TEA domain transcription factor 4 | TEAD4 | 15744 |
| thyrotrophic embryonic factor | TEF | 15745 |
| telomeric repeat binding factor | TERF1 | 15746 |
| (NIMA-interacting) 1 | | |
| telomeric repeat binding factor 2 | TERF2 | 15747 |
| tet methylcytosine dioxygenase 1 | TET1 | 15748 |
| tet methylcytosine dioxygenase 2 | TET2 | 15749 |
| tet methylcytosine dioxygenase 3 | TET3 | 15750 |
| transcription factor A, mitochondrial | TFAM | 15751 |
| transcription factor AP-2 alpha (activating | TFAP2A | 15752 |
| enhancer binding protein 2 alpha) | | |
| transcription factor AP-2 beta (activating | TFAP2B | 15753 |
| enhancer binding protein 2 beta) | | |
| transcription factor AP-2 gamma (activating | TFAP2C | 15754 |
| enhancer binding protein 2 gamma) | | |
| transcription factor AP-2 delta (activating | TFAP2D | 15755 |
| enhancer binding protein 2 delta) | | |
| transcription factor AP-2 epsilon (activating | TFAP2E | 15756 |
| enhancer binding protein 2 epsilon) | | |
| transcription factor AP-4 (activating | TFAP4 | 15757 |
| enhancer binding protein 4) | | |
| transcription factor B1, mitochondrial | TFB1M | 15758 |
| transcription factor B2, mitochondrial | TFB2M | 15759 |
| transcription factor CP2 | TFCP2 | 15760 |
| transcription factor CP2-like 1 | TFCP2L1 | 15761 |
| transcription factor Dp-1 | TFDP1 | 15762 |
| transcription factor Dp-2 (E2F | TFDP2 | 15763 |
| dimerization partner 2) | | |
| transcription factor Dp family member 3 | TFDP3 | 15764 |
| transcription factor binding to | TFE3 | 15765 |
| IGHM enhancer 3 | | |
| transcription factor EB | TFEB | 15766 |
| transcription factor EC | TFEC | 15767 |
| TGFB induced factor homeobox 1 | TGIF1 | 15768 |
| TGFB induced factor homeobox 2 | TGIF2 | 15769 |
| TGFB induced factor homeobox 2 | TGIF2LX | 15770 |
| like, X-linked | | |
| TGFB induced factor homeobox 2 | TGIF2LY | 15771 |
| like, Y-linked | | |
| THAP domain containing, apoptosis | THAP1 | 15772 |
| associated protein 1 | | |
| THAP domain containing 10 | THAP10 | 15773 |
| THAP domain containing 11 | THAP11 | 15774 |
| THAP domain containing 12 | THAP12 | 15775 |
| THAP domain containing, apoptosis | THAP2 | 15776 |
| associated protein 2 | | |
| THAP domain containing, apoptosis | THAP3 | 15777 |
| associated protein 3 | | |
| THAP domain containing 4 | THAP4 | 15778 |
| THAP domain containing 5 | THAP5 | 15779 |
| THAP domain containing 6 | THAP6 | 15780 |
| THAP domain containing 7 | THAP7 | 15781 |
| THAP domain containing 8 | THAP8 | 15782 |
| THAP domain containing 9 | THAP9 | 15783 |
| Th inducing POZ-Kruppel Factor | ThPOK | 15784 |
| thyroid hormone receptor, alpha | THRA | 15785 |
| thyroid hormone receptor, beta | THRB | 15786 |
| T-cell leukemia homeobox 1 | TLX1 | 15787 |
| T-cell leukemia homeobox 2 | TLX2 | 15788 |
| T-cell leukemia homeobox 3 | TLX3 | 15789 |
| target of EGR1, member 1 (nuclear) | TOE1 | 15790 |
| tonsoku-like, DNA repair protein | TONSL | 15791 |
| topoisomerase I binding, arginine/ | TOPORS | 15792 |
| serine-rich, E3 ubiquitin protein ligase | | |
| thymocyte selection associated high | TOX | 15793 |
| mobility group box | | |
| TOX high mobility group box | TOX2 | 15794 |
| family member 2 | | |
| TOX high mobility group box | TOX3 | 15795 |
| family member 3 | | |
| TOX high mobility group box | TOX4 | 15796 |
| family member 4 | | |
| tumor protein p53 | TP53 | 15797 |
| tumor protein p63 | TP63 | 15798 |
| tumor protein p73 | TP73 | 15799 |
| tetra-peptide repeat homeobox 1 | TPRX1 | 15800 |
| tetra-peptide repeat homeobox-like | TPRXL | 15801 |
| transcriptional regulating factor 1 | TRERF1 | 15802 |
| trichorhinophalangeal syndrome I | TRPS1 | 15803 |
| TSC22 domain family member 1 | TSC22D1 | 15804 |
| TSC22 domain family member 2 | TSC22D2 | 15805 |
| TSC22 domain family member 3 | TSC22D3 | 15806 |
| TSC22 domain family member 4 | TSC22D4 | 15807 |
| teashirt zinc finger homeobox 1 | TSHZ1 | 15808 |
| teashirt zinc finger homeobox 2 | TSHZ2 | 15809 |
| teashirt zinc finger homeobox 3 | TSHZ3 | 15810 |
| transcription termination factor, | TTF1 | 15811- |
| RNA polymerase I | | 15812 |
| transcription termination factor, | TTF2 | 15813- |
| RNA polymerase II | | 15814 |
| tubby bipartite transcription factor | TUB | 15815 |
| twist family bHLH transcription factor 1 | TWIST1 | 15816 |
| twist family bHLH transcription factor 2 | TWIST2 | 15817 |
| upstream binding protein 1 (LBP-1a) | UBP1 | 15818 |
| upstream binding transcription factor, RNA | UBTF | 15819 |
| polymerase I | | |
| upstream binding transcription factor, RNA | UBTFL1 | 15820 |
| polymerase I-like 1 | | |
| upstream binding transcription factor, RNA | UBTFL6 | 15821 |
| polymerase I-like 6 (pseudogene) | | |
| UNC homeobox | UNCX | 15822 |
| unkempt family zinc finger | UNK | 15823 |
| unkempt family like zinc finger | UNKL | 15824 |
| upstream transcription factor 1 | USF1 | 15825 |
| upstream transcription factor 2, | USF2 | 15826 |
| c-fos interacting | | |
| upstream transcription factor | USF3 | 15827 |
| family member 3 | | |
| undifferentiated embryonic | UTF1 | 15828 |
| cell transcription factor 1 | | |
| ventral anterior homeobox 1 | VAX1 | 15829 |
| ventral anterior homeobox 2 | VAX2 | 15830 |
| vitamin D (1,25-dihydroxyvitamin | VDR | 15831 |
| D3) receptor | | |
| VENT homeobox | VENTX | 15832 |
| vascular endothelial zinc finger 1 | VEZF1 | 15833 |
| visual system homeobox 1 | VSX1 | 15834 |
| visual system homeobox 2 | VSX2 | 15835 |
| WD repeat and HMG-box DNA | WDHD1 | 15836 |
| binding protein 1 | | |
| Wolf-Hirschhorn syndrome candidate 1 | WHSC1 | 15837 |
| widely interspaced zinc finger motifs | WIZ | 15838 |
| Wilms tumor 1 | WT1 | 15839 |
| X-box binding protein 1 | XBP1 | 15840 |
| Y-box binding protein 1 | YBX1 | 15841 |
| Y-box binding protein 2 | YBX2 | 15842 |
| Y-box binding protein 3 | YBX3 | 15843 |
| YEATS domain containing 2 | YEATS2 | 15844 |
| YEATS domain containing 4 | YEATS4 | 15845 |
| YY1 transcription factor | YY1 | 15846 |
| YY2 transcription factor | YY2 | 15847 |
| zinc finger BED-type containing 1 | ZBED1 | 15848 |
| zinc finger BED-type containing 2 | ZBED2 | 15849 |
| zinc finger BED-type containing 3 | ZBED3 | 15850 |
| zinc finger BED-type containing 4 | ZBED4 | 15851 |
| zinc finger BED-type containing 5 | ZBED5 | 15852 |
| zinc finger, BED-type containing 6 | ZBED6 | 15853 |
| Z-DNA binding protein 1 | ZBP1 | 15854- |
| | | 15855 |
| zinc finger and BTB domain containing 1 | ZBTB1 | 15856 |
| zinc finger and BTB domain containing 10 | ZBTB10 | 15857 |
| zinc finger and BTB domain containing 11 | ZBTB11 | 15858 |
| zinc finger and BTB domain containing 12 | ZBTB12 | 15859 |
| zinc finger and BTB domain containing 14 | ZBTB14 | 15860 |
| zinc finger and BTB domain containing 16 | ZBTB16 | 15861 |
| zinc finger and BTB domain containing 17 | ZBTB17 | 15862 |
| zinc finger and BTB domain containing 18 | ZBTB18 | 15863 |
| zinc finger and BTB domain containing 2 | ZBTB2 | 15864 |
| zinc finger and BTB domain containing 20 | ZBTB20 | 15865 |
| zinc finger and BTB domain containing 21 | ZBTB21 | 15866 |
| zinc finger and BTB domain containing 22 | ZBTB22 | 15867 |
| zinc finger and BTB domain containing 24 | ZBTB24 | 15868 |
| zinc finger and BTB domain containing 25 | ZBTB25 | 15869 |
| zinc finger and BTB domain containing 26 | ZBTB26 | 15870 |
| zinc finger and BTB domain containing 3 | ZBTB3 | 15871 |
| zinc finger and BTB domain containing 32 | ZBTB32 | 15872 |
| zinc finger and BTB domain containing 33 | ZBTB33 | 15873 |
| zinc finger and BTB domain containing 34 | ZBTB34 | 15874 |
| zinc finger and BTB domain containing 37 | ZBTB37 | 15875 |
| zinc finger and BTB domain containing 38 | ZBTB38 | 15876 |
| zinc finger and BTB domain containing 39 | ZBTB39 | 15877 |
| zinc finger and BTB domain containing 4 | ZBTB4 | 15878 |
| zinc finger and BTB domain containing 40 | ZBTB40 | 15879 |
| zinc finger and BTB domain containing 41 | ZBTB41 | 15880 |
| zinc finger and BTB domain containing 42 | ZBTB42 | 15881 |
| zinc finger and BTB domain containing 43 | ZBTB43 | 15882 |
| zinc finger and BTB domain containing 44 | ZBTB44 | 15883 |
| zinc finger and BTB domain containing 45 | ZBTB45 | 15884 |
| zinc finger and BTB domain containing 46 | ZBTB46 | 15885 |
| zinc finger and BTB domain containing 47 | ZBTB47 | 15886 |
| zinc finger and BTB domain containing 48 | ZBTB48 | 15887 |
| zinc finger and BTB domain containing 49 | ZBTB49 | 15888 |
| zinc finger and BTB domain containing 5 | ZBTB5 | 15889 |
| zinc finger and BTB domain containing 6 | ZBTB6 | 15890 |
| zinc finger and BTB domain containing 7A | ZBTB7A | 15891 |
| zinc finger and BTB domain containing 7B | ZBTB7B | 15892 |
| zinc finger and BTB domain containing 7C | ZBTB7C | 15893 |
| zinc finger and BTB domain containing 8A | ZBTB8A | 15894 |
| zinc finger and BTB domain containing 9 | ZBTB9 | 15895 |
| zinc finger CCCH-type containing 10 | ZC3H10 | 15896 |
| zinc finger CCCH-type containing 11A | ZC3H11A | 15897 |
| zinc finger CCCH-type containing 12A | ZC3H12A | 15898 |
| zinc finger CCCH-type containing 12B | ZC3H12B | 15899 |
| zinc finger CCCH-type containing 13 | ZC3H13 | 15900 |
| zinc finger CCCH-type containing 14 | ZC3H14 | 15901 |
| zinc finger CCCH-type containing 15 | ZC3H15 | 15902 |
| zinc finger CCCH-type containing 18 | ZC3H18 | 15903 |
| zinc finger CCCH-type containing 3 | ZC3H3 | 15904 |
| zinc finger CCCH-type containing 4 | ZC3H4 | 15905 |
| zinc finger CCCH-type containing 6 | ZC3H6 | 15906 |
| zinc finger CCCH-type containing 7A | ZC3H7A | 15907 |
| zinc finger CCCH-type containing 7B | ZC3H7B | 15908 |
| zinc finger CCCH-type containing 8 | ZC3H8 | 15909 |
| zinc finger CCHC-type containing 11 | ZCCHC11 | 15910 |
| zinc finger CCHC-type containing 6 | ZCCHC6 | 15911 |
| zinc finger E-box binding homeobox 1 | ZEB1 | 15912 |
| zinc finger E-box binding homeobox 2 | ZEB2 | 15913 |
| zinc finger and AT-hook domain containing | ZFAT | 15914 |
| zinc finger homeobox 2 | ZFHX2 | 15915 |
| zinc finger homeobox 3 | ZFHX3 | 15916 |
| zinc finger homeobox 4 | ZFHX4 | 15917 |
| ZFP1 zinc finger protein | ZFP1 | 15918 |
| ZFP14 zinc finger protein | ZFP14 | 15919 |
| ZFP2 zinc finger protein | ZFP2 | 15920 |
| ZFP28 zinc finger protein | ZFP28 | 15921 |
| ZFP3 zinc finger protein | ZFP3 | 15922 |
| ZFP30 zinc finger protein | ZFP30 | 15923 |
| ZFP36 ring finger protein-like 1 | ZFP36L1 | 15924 |
| ZFP36 ring finger protein-like 2 | ZFP36L2 | 15925 |
| ZFP37 zinc finger protein | ZFP37 | 15926 |
| ZFP41 zinc finger protein | ZFP41 | 15927 |
| ZFP42 zinc finger protein | ZFP42 | 15928 |
| ZFP57 zinc finger protein | ZFP57 | 15929 |
| ZFP62 zinc finger protein | ZFP62 | 15930 |
| ZFP64 zinc finger protein | ZFP64 | 15931 |
| ZFP69 zinc finger protein | ZFP69 | 15932- |
| | | 15933 |
| ZFP69 zinc finger protein B | ZFP69B | 15934 |
| ZFP82 zinc finger protein | ZFP82 | 15935 |
| ZFP90 zinc finger protein | ZFP90 | 15936 |
| ZFP91 zinc finger protein | ZFP91 | 15937 |
| ZFP92 zinc finger protein | ZFP92 | 15938 |
| zinc finger protein, FOG family member 1 | ZFPM1 | 15939 |
| zinc finger protein, FOG family member 2 | ZFPM2 | 15940 |
| zinc finger protein, X-linked | ZFX | 15941 |
| zinc finger protein, Y-linked | ZFY | 15942 |
| zinc finger, FYVE domain containing 26 | ZFYVE26 | 15943 |
| zinc finger, GATA-like protein 1 | ZGLP1 | 15944 |
| zinc finger CCCH-type and G-patch domain | ZGPAT | 15945 |
| containing | | |
| zinc fingers and homeoboxes 1 | ZHX1 | 15946 |
| zinc fingers and homeoboxes 2 | ZHX2 | 15947 |
| zinc fingers and homeoboxes 3 | ZHX3 | 15948 |
| Zic family member 1 | ZIC1 | 15949 |
| Zic family member 2 | ZIC2 | 15950 |
| Zic family member 3 | ZIC3 | 15951 |
| Zic family member 4 | ZIC4 | 15952 |
| Zic family member 5 | ZIC5 | 15953 |
| zinc finger protein interacting | ZIK1 | 15954 |
| with K protein 1 | | |
| zinc finger, imprinted 2 | ZIM2 | 15955 |
| zinc finger, imprinted 3 | ZIM3 | 15956 |
| zinc finger with KRAB and SCAN domains 1 | ZKSCAN1 | 15957 |
| zinc finger with KRAB and SCAN domains 2 | ZKSCAN2 | 15958 |
| zinc finger with KRAB and SCAN domains 3 | ZKSCAN3 | 15959 |
| zinc finger with KRAB and SCAN domains 4 | ZKSCAN4 | 15960 |
| zinc finger with KRAB and SCAN domains 5 | ZKSCAN5 | 15961 |
| zinc finger with KRAB and SCAN domains 7 | ZKSCAN7 | 15962 |
| zinc finger with KRAB and SCAN domains 8 | ZKSCAN8 | 15963 |
| zinc finger matrin-type 1 | ZMAT1 | 15964 |
| zinc finger matrin-type 2 | ZMAT2 | 15965 |
| zinc finger matrin-type 3 | ZMAT3 | 15966 |
| zinc finger matrin-type 4 | ZMAT4 | 15967 |
| zinc finger matrin-type 5 | ZMAT5 | 15968 |
| zinc finger protein 10 | ZNF10 | 15969 |
| zinc finger protein 100 | ZNF100 | 15970 |
| zinc finger protein 101 | ZNF101 | 15971 |
| zinc finger protein 106 | ZNF106 | 15972 |
| zinc finger protein 107 | ZNF107 | 15973 |
| zinc finger protein 112 | ZNF112 | 15974 |
| zinc finger protein 114 | ZNF114 | 15975 |
| zinc finger protein 117 | ZNF117 | 15976 |
| zinc finger protein 12 | ZNF12 | 15977 |
| zinc finger protein 121 | ZNF121 | 15978 |
| zinc finger protein 124 | ZNF124 | 15979 |
| zinc finger protein 131 | ZNF131 | 15980 |
| zinc finger protein 132 | ZNF132 | 15981 |
| zinc finger protein 133 | ZNF133 | 15982 |
| zinc finger protein 134 | ZNF134 | 15983 |
| zinc finger protein 135 | ZNF135 | 15984 |
| zinc finger protein 136 | ZNF136 | 15985 |
| zinc finger protein 137, pseudogene | ZNF137P | 15986 |
| zinc finger protein 138 | ZNF138 | 15987 |
| zinc finger protein 14 | ZNF14 | 15988 |
| zinc finger protein 140 | ZNF140 | 15989 |
| zinc finger protein 141 | ZNF141 | 15990 |
| zinc finger protein 142 | ZNF142 | 15991 |
| zinc finger protein 143 | ZNF143 | 15992 |
| zinc finger protein 146 | ZNF146 | 15993 |
| zinc finger protein 148 | ZNF148 | 15994 |
| zinc finger protein 154 | ZNF154 | 15995 |
| zinc finger protein 155 | ZNF155 | 15996 |
| zinc finger protein 157 | ZNF157 | 15997 |
| zinc finger protein 16 | ZNF16 | 15998 |
| zinc finger protein 160 | ZNF160 | 15999 |
| zinc finger protein 165 | ZNF165 | 16000 |
| zinc finger protein 169 | ZNF169 | 16001 |
| zinc finger protein 17 | ZNF17 | 16002 |
| zinc finger protein 174 | ZNF174 | 16003 |
| zinc finger protein 175 | ZNF175 | 16004 |
| zinc finger protein 18 | ZNF18 | 16005 |
| zinc finger protein 180 | ZNF180 | 16006 |
| zinc finger protein 181 | ZNF181 | 16007 |
| zinc finger protein 182 | ZNF182 | 16008 |
| zinc finger protein 184 | ZNF184 | 16009 |
| zinc finger protein 189 | ZNF189 | 16010 |
| zinc finger protein 19 | ZNF19 | 16011 |
| zinc finger protein 195 | ZNF195 | 16012 |
| zinc finger protein 197 | ZNF197 | 16013 |
| zinc finger protein 2 | ZNF2 | 16014 |
| zinc finger protein 20 | ZNF20 | 16015- |
| | | 16016 |
| zinc finger protein 200 | ZNF200 | 16017 |
| zinc finger protein 202 | ZNF202 | 16018 |
| zinc finger protein 205 | ZNF205 | 16019 |
| zinc finger protein 207 | ZNF207 | 16020 |
| zinc finger protein 208 | ZNF208 | 16021 |
| zinc finger protein 211 | ZNF211 | 16022 |
| zinc finger protein 212 | ZNF212 | 16023 |
| zinc finger protein 213 | ZNF213 | 16024 |
| zinc finger protein 214 | ZNF214 | 16025 |
| zinc finger protein 215 | ZNF215 | 16026 |
| zinc finger protein 217 | ZNF217 | 16027 |
| zinc finger protein 219 | ZNF219 | 16028 |
| zinc finger protein 22 | ZNF22 | 16029 |
| zinc finger protein 221 | ZNF221 | 16030 |
| zinc finger protein 223 | ZNF223 | 16031 |
| zinc finger protein 224 | ZNF224 | 16032 |
| zinc finger protein 225 | ZNF225 | 16033- |
| | | 16034 |
| zinc finger protein 226 | ZNF226 | 16035 |
| zinc finger protein 227 | ZNF227 | 16036 |
| zinc finger protein 229 | ZNF229 | 16037 |
| zinc finger protein 23 | ZNF23 | 16038 |
| zinc finger protein 230 | ZNF230 | 16039- |
| | | 16040 |
| zinc finger protein 232 | ZNF232 | 16041 |
| zinc finger protein 233 | ZNF233 | 16042- |
| | | 16043 |
| zinc finger protein 234 | ZNF234 | 16044 |
| zinc finger protein 235 | ZNF235 | 16045 |
| zinc finger protein 236 | ZNF236 | 16046 |
| zinc finger protein 239 | ZNF239 | 16047 |
| zinc finger protein 24 | ZNF24 | 16048 |
| zinc finger protein 248 | ZNF248 | 16049 |
| zinc finger protein 25 | ZNF25 | 16050 |
| zinc finger protein 250 | ZNF250 | 16051 |
| zinc finger protein 251 | ZNF251 | 16052 |
| zinc finger protein 252, pseudogene | ZNF252P | 16053 |
| zinc finger protein 253 | ZNF253 | 16054 |
| zinc finger protein 254 | ZNF254 | 16055 |
| zinc finger protein 256 | ZNF256 | 16056 |
| zinc finger protein 257 | ZNF257 | 16057 |
| zinc finger protein 26 | ZNF26 | 16058 |
| zinc finger protein 260 | ZNF260 | 16059 |
| zinc finger protein 263 | ZNF263 | 16060 |
| zinc finger protein 264 | ZNF264 | 16061 |
| zinc finger protein 266 | ZNF266 | 16062 |
| zinc finger protein 267 | ZNF267 | 16063 |
| zinc finger protein 268 | ZNF268 | 16064 |
| zinc finger protein 273 | ZNF273 | 16065 |
| zinc finger protein 274 | ZNF274 | 16066 |
| zinc finger protein 275 | ZNF275 | 16067 |
| zinc finger protein 276 | ZNF276 | 16068 |
| zinc finger protein 277 | ZNF277 | 16069 |
| zinc finger protein 28 | ZNF28 | 16070 |
| zinc finger protein 280A | ZNF280A | 16071 |
| zinc finger protein 280B | ZNF280B | 16072 |
| zinc finger protein 280C | ZNF280C | 16073 |
| zinc finger protein 280D | ZNF280D | 16074 |
| zinc finger protein 281 | ZNF281 | 16075 |
| zinc finger protein 282 | ZNF282 | 16076 |
| zinc finger protein 283 | ZNF283 | 16077 |
| zinc finger protein 284 | ZNF284 | 16078 |
| zinc finger protein 285 | ZNF285 | 16079 |
| zinc finger protein 286A | ZNF286A | 16080 |
| zinc finger protein 286B | ZNF286B | 16081 |
| zinc finger protein 287 | ZNF287 | 16082 |
| zinc finger protein 292 | ZNF292 | 16083 |
| zinc finger protein 296 | ZNF296 | 16084 |
| zinc finger protein 3 | ZNF3 | 16085 |
| zinc finger protein 30 | ZNF30 | 16086 |
| zinc finger protein 300 | ZNF300 | 16087 |
| zinc finger protein 302 | ZNF302 | 16088 |
| zinc finger protein 304 | ZNF304 | 16089 |
| zinc finger protein 311 | ZNF311 | 16090 |
| zinc finger protein 316 | ZNF316 | 16091 |
| zinc finger protein 317 | ZNF317 | 16092 |
| zinc finger protein 318 | ZNF318 | 16093 |
| zinc finger protein 319 | ZNF319 | 16094 |
| zinc finger protein 32 | ZNF32 | 16095 |
| zinc finger protein 320 | ZNF320 | 16096 |
| zinc finger protein 322 | ZNF322 | 16097 |
| zinc finger protein 324 | ZNF324 | 16098 |
| zinc finger protein 324B | ZNF324B | 16099 |
| zinc finger protein 326 | ZNF326 | 16100 |
| zinc finger protein 329 | ZNF329 | 16101 |
| zinc finger protein 331 | ZNF331 | 16102 |
| zinc finger protein 333 | ZNF333 | 16103 |
| zinc finger protein 334 | ZNF334 | 16104 |
| zinc finger protein 335 | ZNF335 | 16105 |
| zinc finger protein 337 | ZNF337 | 16106 |
| zinc finger protein 33A | ZNF33A | 16107 |
| zinc finger protein 33B | ZNF33B | 16108 |
| zinc finger protein 34 | ZNF34 | 16109 |
| zinc finger protein 341 | ZNF341 | 16110 |
| zinc finger protein 343 | ZNF343 | 16111 |
| zinc finger protein 345 | ZNF345 | 16112 |
| zinc finger protein 346 | ZNF346 | 16113 |
| zinc finger protein 347 | ZNF347 | 16114 |
| zinc finger protein 35 | ZNF35 | 16115 |
| zinc finger protein 350 | ZNF350 | 16116 |
| zinc finger protein 354A | ZNF354A | 16117 |
| zinc finger protein 354B | ZNF354B | 16118 |
| zinc finger protein 354C | ZNF354C | 16119 |
| zinc finger protein 355, pseudogene | ZNF355P | 16120 |
| zinc finger protein 358 | ZNF358 | 16121 |
| zinc finger protein 362 | ZNF362 | 16122 |
| zinc finger protein 365 | ZNF365 | 16123- |
| | | 16124 |
| zinc finger protein 366 | ZNF366 | 16125 |
| zinc finger protein 367 | ZNF367 | 16126 |
| zinc finger protein 37A | ZNF37A | 16127 |
| zinc finger protein 382 | ZNF382 | 16128 |
| zinc finger protein 383 | ZNF383 | 16129 |
| zinc finger protein 384 | ZNF384 | 16130 |
| zinc finger protein 385A | ZNF385A | 16131 |
| zinc finger protein 385B | ZNF385B | 16132 |
| zinc finger protein 385C | ZNF385C | 16133 |
| zinc finger protein 385D | ZNF385D | 16134 |
| zinc finger protein 391 | ZNF391 | 16135 |
| zinc finger protein 394 | ZNF394 | 16136 |
| zinc finger protein 395 | ZNF395 | 16137 |
| zinc finger protein 396 | ZNF396 | 16138 |
| zinc finger protein 397 | ZNF397 | 16139 |
| zinc finger protein 398 | ZNF398 | 16140 |
| zinc finger protein 404 | ZNF404 | 16141 |
| zinc finger protein 407 | ZNF407 | 16142 |
| zinc finger protein 408 | ZNF408 | 16143 |
| zinc finger protein 41 | ZNF41 | 16144 |
| zinc finger protein 410 | ZNF410 | 16145 |
| zinc finger protein 414 | ZNF414 | 16146 |
| zinc finger protein 415 | ZNF415 | 16147 |
| zinc finger protein 416 | ZNF416 | 16148 |
| zinc finger protein 417 | ZNF417 | 16149 |
| zinc finger protein 418 | ZNF418 | 16150 |
| zinc finger protein 419 | ZNF419 | 16151 |
| zinc finger protein 420 | ZNF420 | 16152 |
| zinc finger protein 423 | ZNF423 | 16153 |
| zinc finger protein 425 | ZNF425 | 16154 |
| zinc finger protein 426 | ZNF426 | 16155 |
| zinc finger protein 428 | ZNF428 | 16156 |
| zinc finger protein 429 | ZNF429 | 16157 |
| zinc finger protein 43 | ZNF43 | 16158 |
| zinc finger protein 430 | ZNF430 | 16159 |
| zinc finger protein 431 | ZNF431 | 16160 |
| zinc finger protein 432 | ZNF432 | 16161 |
| zinc finger protein 433 | ZNF433 | 16162 |
| zinc finger protein 436 | ZNF436 | 16163 |
| zinc finger protein 438 | ZNF438 | 16164 |
| zinc finger protein 439 | ZNF439 | 16165 |
| zinc finger protein 44 | ZNF44 | 16166 |
| zinc finger protein 440 | ZNF440 | 16167 |
| zinc finger protein 441 | ZNF441 | 16168 |
| zinc finger protein 442 | ZNF442 | 16169 |
| zinc finger protein 443 | ZNF443 | 16170 |
| zinc finger protein 444 | ZNF444 | 16171 |
| zinc finger protein 445 | ZNF445 | 16172 |
| zinc finger protein 446 | ZNF446 | 16173 |
| zinc finger protein 449 | ZNF449 | 16174 |
| zinc finger protein 45 | ZNF45 | 16175 |
| zinc finger protein 451 | ZNF451 | 16176 |
| zinc finger protein 454 | ZNF454 | 16177 |
| zinc finger protein 460 | ZNF460 | 16178 |
| zinc finger protein 461 | ZNF461 | 16179 |
| zinc finger protein 462 | ZNF462 | 16180 |
| zinc finger protein 467 | ZNF467 | 16181 |
| zinc finger protein 468 | ZNF468 | 16182 |
| zinc finger protein 469 | ZNF469 | 16183 |
| zinc finger protein 470 | ZNF470 | 16184 |
| zinc finger protein 471 | ZNF471 | 16185 |
| zinc finger protein 473 | ZNF473 | 16186 |
| zinc finger protein 474 | ZNF474 | 16187- |
| | | 16188 |
| zinc finger protein 479 | ZNF479 | 16189 |
| zinc finger protein 48 | ZNF48 | 16190 |
| zinc finger protein 480 | ZNF480 | 16191 |
| zinc finger protein 483 | ZNF483 | 16192 |
| zinc finger protein 484 | ZNF484 | 16193 |
| zinc finger protein 485 | ZNF485 | 16194 |
| zinc finger protein 486 | ZNF486 | 16195 |
| zinc finger protein 487 | ZNF487 | 16196 |
| zinc finger protein 488 | ZNF488 | 16197 |
| zinc finger protein 490 | ZNF490 | 16198 |
| zinc finger protein 491 | ZNF491 | 16199 |
| zinc finger protein 492 | ZNF492 | 16200 |
| zinc finger protein 493 | ZNF493 | 16201 |
| zinc finger protein 496 | ZNF496 | 16202 |
| zinc finger protein 497 | ZNF497 | 16203 |
| zinc finger protein 500 | ZNF500 | 16204 |
| zinc finger protein 501 | ZNF501 | 16205 |
| zinc finger protein 502 | ZNF502 | 16206 |
| zinc finger protein 503 | ZNF503 | 16207 |
| zinc finger protein 506 | ZNF506 | 16208 |
| zinc finger protein 507 | ZNF507 | 16209 |
| zinc finger protein 510 | ZNF510 | 16210 |
| zinc finger protein 511 | ZNF511 | 16211 |
| zinc finger protein 512 | ZNF512 | 16212 |
| zinc finger protein 512B | ZNF512B | 16213 |
| zinc finger protein 513 | ZNF513 | 16214 |
| zinc finger protein 514 | ZNF514 | 16215 |
| zinc finger protein 516 | ZNF516 | 16216 |
| zinc finger protein 517 | ZNF517 | 16217 |
| zinc finger protein 518A | ZNF518A | 16218 |
| zinc finger protein 518B | ZNF518B | 16219 |
| zinc finger protein 519 | ZNF519 | 16220 |
| zinc finger protein 521 | ZNF521 | 16221 |
| zinc finger protein 524 | ZNF524 | 16222 |
| zinc finger protein 526 | ZNF526 | 16223 |
| zinc finger protein 527 | ZNF527 | 16224 |
| zinc finger protein 528 | ZNF528 | 16225 |
| zinc finger protein 529 | ZNF529 | 16226 |
| zinc finger protein 530 | ZNF530 | 16227 |
| zinc finger protein 532 | ZNF532 | 16228 |
| zinc finger protein 534 | ZNF534 | 16229 |
| zinc finger protein 536 | ZNF536 | 16230 |
| zinc finger protein 540 | ZNF540 | 16231 |
| zinc finger protein 541 | ZNF541 | 16232 |
| zinc finger protein 542, pseudogene | ZNF542P | 16233 |
| zinc finger protein 543 | ZNF543 | 16234 |
| zinc finger protein 544 | ZNF544 | 16235 |
| zinc finger protein 546 | ZNF546 | 16236 |
| zinc finger protein 547 | ZNF547 | 16237 |
| zinc finger protein 548 | ZNF548 | 16238 |
| zinc finger protein 549 | ZNF549 | 16239 |
| zinc finger protein 550 | ZNF550 | 16240 |
| zinc finger protein 552 | ZNF552 | 16241 |
| zinc finger protein 554 | ZNF554 | 16242 |
| zinc finger protein 555 | ZNF555 | 16243 |
| zinc finger protein 556 | ZNF556 | 16244 |
| zinc finger protein 557 | ZNF557 | 16245 |
| zinc finger protein 558 | ZNF558 | 16246 |
| zinc finger protein 559 | ZNF559 | 16247 |
| zinc finger protein 56 | ZNF56 | 16248 |
| zinc finger protein 560 | ZNF560 | 16249 |
| zinc finger protein 561 | ZNF561 | 16250 |
| zinc finger protein 562 | ZNF562 | 16251 |
| zinc finger protein 563 | ZNF563 | 16252 |
| zinc finger protein 564 | ZNF564 | 16253 |
| zinc finger protein 565 | ZNF565 | 16254 |
| zinc finger protein 566 | ZNF566 | 16255 |
| zinc finger protein 567 | ZNF567 | 16256 |
| zinc finger protein 568 | ZNF568 | 16257 |
| zinc finger protein 569 | ZNF569 | 16258 |
| zinc finger protein 57 | ZNF57 | 16259 |
| zinc finger protein 570 | ZNF570 | 16260 |
| zinc finger protein 571 | ZNF571 | 16261 |
| zinc finger protein 572 | ZNF572 | 16262 |
| zinc finger protein 573 | ZNF573 | 16263 |
| zinc finger protein 574 | ZNF574 | 16264 |
| zinc finger protein 575 | ZNF575 | 16265 |
| zinc finger protein 576 | ZNF576 | 16266- |
| | | 16267 |
| zinc finger protein 577 | ZNF577 | 16268 |
| zinc finger protein 578 | ZNF578 | 16269 |
| zinc finger protein 579 | ZNF579 | 16270 |
| zinc finger protein 580 | ZNF580 | 16271 |
| zinc finger protein 581 | ZNF581 | 16272 |
| zinc finger protein 582 | ZNF582 | 16273 |
| zinc finger protein 583 | ZNF583 | 16274 |
| zinc finger protein 584 | ZNF584 | 16275 |
| zinc finger protein 585A | ZNF585A | 16276 |
| zinc finger protein 585B | ZNF585B | 16277 |
| zinc finger protein 586 | ZNF586 | 16278 |
| zinc finger protein 587 | ZNF587 | 16279 |
| zinc finger protein 589 | ZNF589 | 16280 |
| zinc finger protein 592 | ZNF592 | 16281 |
| zinc finger protein 593 | ZNF593 | 16282 |
| zinc finger protein 594 | ZNF594 | 16283 |
| zinc finger protein 595 | ZNF595 | 16284 |
| zinc finger protein 596 | ZNF596 | 16285 |
| zinc finger protein 597 | ZNF597 | 16286 |
| zinc finger protein 598 | ZNF598 | 16287 |
| zinc finger protein 599 | ZNF599 | 16288 |
| zinc finger protein 600 | ZNF600 | 16289 |
| zinc finger protein 605 | ZNF605 | 16290 |
| zinc finger protein 606 | ZNF606 | 16291 |
| zinc finger protein 607 | ZNF607 | 16292 |
| zinc finger protein 608 | ZNF608 | 16293 |
| zinc finger protein 609 | ZNF609 | 16294 |
| zinc finger protein 610 | ZNF610 | 16295 |
| zinc finger protein 611 | ZNF611 | 16296 |
| zinc finger protein 613 | ZNF613 | 16297 |
| zinc finger protein 614 | ZNF614 | 16298 |
| zinc finger protein 615 | ZNF615 | 16299 |
| zinc finger protein 616 | ZNF616 | 16300 |
| zinc finger protein 618 | ZNF618 | 16301 |
| zinc finger protein 619 | ZNF619 | 16302 |
| zinc finger protein 620 | ZNF620 | 16303 |
| zinc finger protein 621 | ZNF621 | 16304 |
| zinc finger protein 622 | ZNF622 | 16305 |
| zinc finger protein 623 | ZNF623 | 16306 |
| zinc finger protein 624 | ZNF624 | 16307 |
| zinc finger protein 625 | ZNF625 | 16308 |
| zinc finger protein 626 | ZNF626 | 16309 |
| zinc finger protein 627 | ZNF627 | 16310 |
| zinc finger protein 628 | ZNF628 | 16311 |
| zinc finger protein 629 | ZNF629 | 16312 |
| zinc finger protein 639 | ZNF639 | 16313 |
| zinc finger protein 641 | ZNF641 | 16314 |
| zinc finger protein 644 | ZNF644 | 16315 |
| zinc finger protein 645 | ZNF645 | 16316 |
| zinc finger protein 646 | ZNF646 | 16317 |
| zinc finger protein 648 | ZNF648 | 16318 |
| zinc finger protein 649 | ZNF649 | 16319 |
| zinc finger protein 652 | ZNF652 | 16320 |
| zinc finger protein 653 | ZNF653 | 16321 |
| zinc finger protein 654 | ZNF654 | 16322 |
| zinc finger protein 655 | ZNF655 | 16323 |
| zinc finger protein 658 | ZNF658 | 16324 |
| zinc finger protein 658B (pseudogene) | ZNF658B | 16325 |
| zinc finger protein 66 | ZNF66 | 16326 |
| zinc finger protein 660 | ZNF660 | 16327 |
| zinc finger protein 662 | ZNF662 | 16328 |
| zinc finger protein 664 | ZNF664 | 16329 |
| zinc finger protein 665 | ZNF665 | 16330 |
| zinc finger protein 667 | ZNF667 | 16331 |
| zinc finger protein 668 | ZNF668 | 16332 |
| zinc finger protein 669 | ZNF669 | 16333 |
| zinc finger protein 670 | ZNF670 | 16334 |
| zinc finger protein 671 | ZNF671 | 16335 |
| zinc finger protein 672 | ZNF672 | 16336 |
| zinc finger protein 674 | ZNF674 | 16337 |
| zinc finger protein 675 | ZNF675 | 16338 |
| zinc finger protein 676 | ZNF676 | 16339 |
| zinc finger protein 677 | ZNF677 | 16340 |
| zinc finger protein 678 | ZNF678 | 16341 |
| zinc finger protein 679 | ZNF679 | 16342 |
| zinc finger protein 680 | ZNF680 | 16343 |
| zinc finger protein 681 | ZNF681 | 16344 |
| zinc finger protein 682 | ZNF682 | 16345 |
| zinc finger protein 683 | ZNF683 | 16346 |
| zinc finger protein 684 | ZNF684 | 16347 |
| zinc finger protein 687 | ZNF687 | 16348 |
| zinc finger protein 688 | ZNF688 | 16349 |
| zinc finger protein 689 | ZNF689 | 16350 |
| zinc finger protein 69 | ZNF69 | 16351 |
| zinc finger protein 691 | ZNF691 | 16352 |
| zinc finger protein 692 | ZNF692 | 16353 |
| zinc finger protein 695 | ZNF695 | 16354 |
| zinc finger protein 696 | ZNF696 | 16355 |
| zinc finger protein 697 | ZNF697 | 16356 |
| zinc finger protein 699 | ZNF699 | 16357 |
| zinc finger protein 7 | ZNF7 | 16358 |
| zinc finger protein 70 | ZNF70 | 16359 |
| zinc finger protein 701 | ZNF701 | 16360 |
| zinc finger protein 702, pseudogene | ZNF702P | 16361 |
| zinc finger protein 703 | ZNF703 | 16362 |
| zinc finger protein 704 | ZNF704 | 16363 |
| zinc finger protein 705A | ZNF705A | 16364 |
| zinc finger protein 705D | ZNF705D | 16365 |
| zinc finger protein 705E | ZNF705E | 16366 |
| zinc finger protein 705G | ZNF705G | 16367 |
| zinc finger protein 706 | ZNF706 | 16368 |
| zinc finger protein 707 | ZNF707 | 16369 |
| zinc finger protein 708 | ZNF708 | 16370 |
| zinc finger protein 709 | ZNF709 | 16371 |
| zinc finger protein 71 | ZNF71 | 16372 |
| zinc finger protein 710 | ZNF710 | 16373 |
| zinc finger protein 711 | ZNF711 | 16374 |
| zinc finger protein 713 | ZNF713 | 16375 |
| zinc finger protein 714 | ZNF714 | 16376 |
| zinc finger protein 716 | ZNF716 | 16377 |
| zinc finger protein 717 | ZNF717 | 16378 |
| zinc finger protein 718 | ZNF718 | 16379 |
| zinc finger protein 720 | ZNF720 | 16380 |
| zinc finger protein 721 | ZNF721 | 16381 |
| zinc finger protein 724, pseudogene | ZNF724P | 16382 |
| zinc finger protein 726 | ZNF726 | 16383 |
| zinc finger protein 727 | ZNF727 | 16384 |
| zinc finger protein 729 | ZNF729 | 16385 |
| zinc finger protein 730 | ZNF730 | 16386 |
| zinc finger protein 732 | ZNF732 | 16387 |
| zinc finger protein 735 | ZNF735 | 16388 |
| zinc finger protein 737 | ZNF737 | 16389 |
| zinc finger protein 74 | ZNF74 | 16390 |
| zinc finger protein 740 | ZNF740 | 16391 |
| zinc finger protein 746 | ZNF746 | 16392 |
| zinc finger protein 747 | ZNF747 | 16393 |
| zinc finger protein 749 | ZNF749 | 16394 |
| zinc finger protein 750 | ZNF750 | 16395 |
| zinc finger protein 75a | ZNF75A | 16396 |
| zinc finger protein 75D | ZNF75D | 16397 |
| zinc finger protein 76 | ZNF76 | 16398 |
| zinc finger protein 761 | ZNF761 | 16399 |
| zinc finger protein 763 | ZNF763 | 16400 |
| zinc finger protein 764 | ZNF764 | 16401 |
| zinc finger protein 765 | ZNF765 | 16402 |
| zinc finger protein 766 | ZNF766 | 16403 |
| zinc finger protein 768 | ZNF768 | 16404 |
| zinc finger protein 77 | ZNF77 | 16405 |
| zinc finger protein 770 | ZNF770 | 16406 |
| zinc finger protein 771 | ZNF771 | 16407 |
| zinc finger protein 772 | ZNF772 | 16408 |
| zinc finger protein 773 | ZNF773 | 16409 |
| zinc finger protein 774 | ZNF774 | 16410 |
| zinc finger protein 775 | ZNF775 | 16411 |
| zinc finger protein 776 | ZNF776 | 16412 |
| zinc finger protein 777 | ZNF777 | 16413 |
| zinc finger protein 778 | ZNF778 | 16414 |
| zinc finger protein 780A | ZNF780A | 16415 |
| zinc finger protein 780B | ZNF780B | 16416 |
| zinc finger protein 781 | ZNF781 | 16417 |
| zinc finger protein 782 | ZNF782 | 16418 |
| zinc finger family member 783 | ZNF783 | 16419 |
| zinc finger protein 784 | ZNF784 | 16420 |
| zinc finger protein 785 | ZNF785 | 16421 |
| zinc finger protein 786 | ZNF786 | 16422 |
| zinc finger protein 787 | ZNF787 | 16423 |
| zinc finger family member 788 | ZNF788 | 16424 |
| zinc finger protein 789 | ZNF789 | 16425 |
| zinc finger protein 79 | ZNF79 | 16426 |
| zinc finger protein 790 | ZNF790 | 16427 |
| zinc finger protein 791 | ZNF791 | 16428 |
| zinc finger protein 792 | ZNF792 | 16429 |
| zinc finger protein 793 | ZNF793 | 16430 |
| zinc finger protein 799 | ZNF799 | 16431 |
| zinc finger protein 8 | ZNF8 | 16432 |
| zinc finger protein 80 | ZNF80 | 16433 |
| zinc finger protein 800 | ZNF800 | 16434 |
| zinc finger protein 804A | ZNF804A | 16435 |
| zinc finger protein 804B | ZNF804B | 16436 |
| zinc finger protein 805 | ZNF805 | 16437 |
| zinc finger protein 806 | ZNF806 | 16438 |
| zinc finger protein 808 | ZNF808 | 16439 |
| zinc finger protein 81 | ZNF81 | 16440 |
| zinc finger protein 813 | ZNF813 | 16441 |
| zinc finger protein 814 | ZNF814 | 16442 |
| zinc finger protein 816 | ZNF816 | 16443 |
| zinc finger protein 821 | ZNF821 | 16444 |
| zinc finger protein 823 | ZNF823 | 16445 |
| zinc finger protein 827 | ZNF827 | 16446 |
| zinc finger protein 829 | ZNF829 | 16447 |
| zinc finger protein 83 | ZNF83 | 16448 |
| zinc finger protein 830 | ZNF830 | 16449 |
| zinc finger protein 831 | ZNF831 | 16450 |
| zinc finger protein 833, pseudogene | ZNF833P | 16451 |
| zinc finger protein 835 | ZNF835 | 16452 |
| zinc finger protein 836 | ZNF836 | 16453 |
| zinc finger protein 837 | ZNF837 | 16454 |
| zinc finger protein 839 | ZNF839 | 16455 |
| zinc finger protein 84 | ZNF84 | 16456 |
| zinc finger protein 840, pseudogene | ZNF840P | 16457 |
| zinc finger protein 841 | ZNF841 | 16458 |
| zinc finger protein 843 | ZNF843 | 16459 |
| zinc finger protein 844 | ZNF844 | 16460 |
| zinc finger protein 845 | ZNF845 | 16461 |
| zinc finger protein 846 | ZNF846 | 16462 |
| zinc finger protein 85 | ZNF85 | 16463 |
| zinc finger protein 853 | ZNF853 | 16464 |
| zinc finger protein 860 | ZNF860 | 16465 |
| zinc finger protein 876, pseudogene | ZNF876P | 16466 |
| zinc finger protein 878 | ZNF878 | 16467 |
| zinc finger protein 879 | ZNF879 | 16468 |
| zinc finger protein 880 | ZNF880 | 16469 |
| zinc finger protein 891 | ZNF891 | 16470 |
| zinc finger protein 90 | ZNF90 | 16471 |
| zinc finger protein 91 | ZNF91 | 16472 |
| zinc finger protein 92 | ZNF92 | 16473 |
| zinc finger protein 93 | ZNF93 | 16474 |
| zinc finger protein 98 | ZNF98 | 16475 |
| zinc finger protein 99 | ZNF99 | 16476 |
| zinc finger, NFX1-type containing 1 | ZNFX1 | 16477 |
| zinc finger and SCAN domain containing 1 | ZSCAN1 | 16478 |
| zinc finger and SCAN domain containing 10 | ZSCAN10 | 16479 |
| zinc finger and SCAN domain containing 12 | ZSCAN12 | 16480 |
| zinc finger and SCAN domain containing 16 | ZSCAN16 | 16481 |
| zinc finger and SCAN domain containing 18 | ZSCAN18 | 16482 |
| zinc finger and SCAN domain containing 2 | ZSCAN2 | 16483 |
| zinc finger and SCAN domain containing 20 | ZSCAN20 | 16484 |
| zinc finger and SCAN domain containing 21 | ZSCAN21 | 16485 |
| zinc finger and SCAN domain containing 22 | ZSCAN22 | 16486 |
| zinc finger and SCAN domain containing 23 | ZSCAN23 | 16487 |
| zinc finger and SCAN domain containing 25 | ZSCAN25 | 16488 |
| zinc finger and SCAN domain containing 26 | ZSCAN26 | 16489 |
| zinc finger and SCAN domain containing 29 | ZSCAN29 | 16490 |
| zinc finger and SCAN domain containing 30 | ZSCAN30 | 16491 |
| zinc finger and SCAN domain containing 31 | ZSCAN31 | 16492 |
| zinc finger and SCAN domain containing 32 | ZSCAN32 | 16493 |
| zinc finger and SCAN domain containing 4 | ZSCAN4 | 16494 |
| zinc finger and SCAN domain containing 5A | ZSCAN5A | 16495 |
| zinc finger and SCAN domain containing 5B | ZSCAN5B | 16496 |
| zinc finger and SCAN domain containing 5C, | ZSCAN5CP | 16497 |
| pseudogene | | |
| zinc finger and SCAN domain containing 9 | ZSCAN9 | 16498 |
| zinc finger with UFM1-specific | ZUFSP | 16499 |
| peptidase domain | | |
| zinc finger, X-linked, duplicated A | ZXDA | 16500 |
| zinc finger, X-linked, duplicated B | ZXDB | 16501 |
| ZXD family zinc finger C | ZXDC | 16502 |
| zinc finger ZZ-type containing 3 | ZZZ3 | 16503 |

[0563] In some embodiments, a T-cell of the disclosure is modified to silence or reduce expression of one or more gene(s) encoding a cell death or cell apoptosis receptor to produce an armored T-cell of the disclosure. Interaction of a death receptor and its endogenous ligand results in the initiation of apoptosis. Disruption of an expression, an activity, or an interaction of a cell death and/or cell apoptosis receptor and/or ligand render an armored T-cell of the disclosure less receptive to death signals, consequently, making the armored T cell of the disclosure more efficacious in a tumor environment. An exemplary cell death receptor which may be modified in an armored T cell of the disclosure is Fas (CD95). Exemplary cell death and/or cell apoptosis receptors and ligands of the disclosure include, but are not limited to, the exemplary receptors and ligands provided in Table 5.

TABLE 5
Exemplary Cell Death and/or Cell Apoptosis Receptors and Ligands.

| Full Name | Abbreviation | SEQ ID NO: |
|---|---|---|
| Cluster of Differentiation 120 | CD120a | 16504-16505 |
| Death receptor 3 | DR3 | 16506 |
| Death receptor 6 | DR6 | 16507 |
| first apoptosis signal (Fas) receptor | Fas (CD95/APO-1) | 16508-16509 |
| Fas Ligand | FasL | 16510 |
| cellular tumor antigen p53 | p53 | 16511 |
| Tumor necrosis factor receptor 1 | TNF-R1 | 16512 |
| Tumor necrosis factor receptor 2 | TNF-R2 | 16513 |
| Tumor necrosis factor-related apoptosis-inducing | TRAIL-R1 (DR4) | 16514 |
| ligand receptor 1 | | |
| Tumor necrosis factor-related apoptosis-inducing | TRAIL-R2 (DR5) | 16515 |
| ligand receptor 2 | | |
| Fas-associated protein with death domain | FADD | 16516 |
| Tumor necrosis factor receptor type 1-associated | TRADD | 16517 |
| DEATH domain protein | | |
| Bc1-2-associated X protein | Bax | 16518 |
| Bc1-2 homologous killer | BAK | 16519 |
| 14-3-3 protein | 14-3-3 | 16520 |
| B-cell lymphoma 2 | Bcl-2 | 16521 |
| Cytochrome C | Cyt C | 16522 |
| Second mitochondria-derived activator of caspase | Smac/Diablo | 16523 |
| High temperature requirement protein A2 | HTRA2/Omi | 16524 |
| Apoptosis inducing factor | AIF | 16525 |
| Endonuclease G | EXOG | 16526 |
| Caspase 9 | Cas9 | 16527 |
| Caspase 2 | Cas2 | 16528 |
| Caspase 8 | Cas8 | 16529 |
| Caspase 10 | Cas10 | 16530 |
| Caspase 3 | Cas3 | 16531 |
| Caspase 6 | Cas6 | 16532 |
| Caspase 7 | Cas7 | 16533 |
| Tumor Necrosis Factor alpha | TNF-alpha | 16534 |
| TNF-related weak inducer of apoptosis | TWEAK | 16535 |
| TNF-related weak inducer of apoptosis receptor | TWEAK-R | 16536 |
| Tumor necrosis factor-related apoptosis-inducing | TRAIL | 16537 |
| ligand | | |
| TNF ligand-related molecule 1 | TL1A | 16538 |
| Receptor-interacting serine/threonine-protein kinase 1 | RIP1 | 16539 |
| Cellular inhibitor of apoptosis 1 | cIAP-1 | 16540 |
| TNF receptor-associated factor 2 | TRAF-2 | 16541 |

[0564] In some embodiments, a T-cell of the disclosure is modified to silence or reduce expression of one or more gene(s) encoding a metabolic sensing protein to produce an armored T-cell of the disclosure. Disruption to the metabolic sensing of the immunosuppressive tumor microenvironment (characterized by low levels of oxygen, pH, glucose and other molecules) by an armored T-cell of the disclosure leads to extended retention of T-cell function and, consequently, more tumor cells killed per armored T cell. For example, HIF1a and VHL play a role in T-cell function while in a hypoxic environment. An armored T-cell of the disclosure may have silenced or reduced expression of one or more genes encoding HIF1a or VHL. Genes and proteins involved in metabolic sensing include, but are not limited to, the exemplary genes and proteins provided in Table 6.

TABLE 6
Exemplary Metabolic Sensing Genes (and encoded Proteins).

| Full Name | Metabolite | Abbreviation | SEQ ID NO: |
|---|---|---|---|
| hypoxia-inducible factor lα | Low oxygen | HIF-1α | 16542 |
| von Hippel−Lindau tumor suppressor | Low oxygen | VHL | 16543 |
| Prolyl-hydroxylase domain proteins | High oxygen | PHD proteins | |
| Glucose transporter 1 | glucose | GLUT1 | 16544 |
| Linker of Activated T cells | Amino acid (leucine) | LAT | 16545 |
| CD98 glycoprotein | Amino acid (leucine) | CD98 | 16546 |
| Alanine, serine, cysteine-preferring | Cationic Amino acid | ASCT2/Slc1a5 | 16547 |
| transporter 2 | (glutamine) | | |
| Solute carrier family 7 member 1 | Cationic Amino acids | Slc7a1 | 16548 |
| Solute carrier family 7 member 2 | Cationic Amino acids | Slc7a2 | 16549 |
| Solute carrier family 7 member 3 | Cationic Amino acids | Slc7a3 | 16550 |
| Solute carrier family 7 member 4 | Cationic Amino acids | Slc7a4 | 16551 |
| Solute carrier family 7 member 5 | Glycoprotein | Slc7a5 | 16552 |
| | associated Amino acids | | |
| Solute carrier family 7 member 6 | Glycoprotein | Slc7a6 | 16553 |
| | associated Amino acids | | |
| Solute carrier family 7 member 7 | Glycoprotein | Slc7a7 | 16554 |
| | associated Amino acids | | |
| Solute carrier family 7 member 8 | Glycoprotein | Slc7a8 | 16555 |
| | associated Amino acids | | |
| Solute carrier family 7 member 9 | Glycoprotein | S1c7a9 | 16556 |
| | associated Amino acids | | |
| Solute carrier family 7 member 10 | Glycoprotein | Slc7a10 | 16557 |
| | associated Amino acids | | |
| Solute carrier family 7 member 11 | Glycoprotein | Slc7a11 | 16558 |
| | associated Amino acids | | |
| Solute carrier family 7 member 13 | Glycoprotein | Slc7a13 | 16559 |
| | associated Amino acids | | |
| Solute carrier family 7 member 14 | Cationic Amino acids | Slc7a14 | 16560 |
| Solute carrier family 3 member 2 | Amino acid | Slc3a2 | 16561 |
| Calcium transport protein 2 | Cationic Amino acid | CAT2 | 16562 |
| | (arginine) | | |
| Calcium transport protein 3 | Cationic Amino acid | CAT3 | 16563 |
| | (arginine) | | |
| Calcium transport protein 4 | Cationic Amino acid | CAT4 | 16564 |
| | (arginine) | | |
| Bromodomain adjacent to zinc finger | Amino acid (arginine) | BAZ1B | 16565 |
| domain protein 1B | | | |
| PC4 and SFRS1-interacting protein | Amino acid (arginine) | PSIP1 | 16566 |
| Translin | Amino acid (arginine) | TSN | 16567 |
| G-protein-coupled receptors | Fatty Acid and | GPCRs | |
| | Cholesterol | | |
| T-cell Receptor, subunit alpha | Fatty Acid and | TCR alpha | 16568 |
| | Cholesterol | | |
| T-cell Receptor, subunit beta | Fatty Acid and | TCR beta | 16569 |
| | Cholesterol | | |
| T-cell Receptor, subunit zeta | Fatty Acid and | TCR zeta | 16570 |
| | Cholesterol | | |
| T-cell Receptor, subunit CD3 epsilon | Fatty Acid and | TCR CD3 epsilon | 16571 |
| | Cholesterol | | |
| T-cell Receptor, subunit CD3 gamma | Fatty Acid and | TCR CD3 gamma | 16572 |
| | Cholesterol | | |
| T-cell Receptor, subunit CD3 delta | Fatty Acid and | TCR CD3 delta | 16573 |
| | Cholesterol | | |
| peroxisome proliferator-activated | Fatty Acid and | PPARs | |
| receptors | Cholesterol | | |
| AMP-activated protein kinase | Energy homeostasis | AMPK | 16574-16575 |
| | (intracellular AMP to | | |
| | ATP ratio) | | |
| P2X purinoceptor 7 | Redox homeostasis | P2X7 | 16576 |

[0565] In some embodiments, a T-cell of the disclosure is modified to silence or reduce expression of one or more gene(s) encoding proteins that that confer sensitivity to a cancer therapy, including a monoclonal antibody, to produce an armored T-cell of the disclosure. Thus, an armored T-cell of the disclosure can function and may demonstrate superior function or efficacy whilst in the presence of a cancer therapy (e.g. a chemotherapy, a monoclonal antibody therapy, or another anti-tumor treatment). Proteins involved in conferring sensitivity to a cancer therapy include, but are not limited to, the exemplary proteins provided in Table 7.

TABLE 7
Exemplary Proteins that Confer Sensitivity to a Cancer Therapeutic.

| | | SEQ ID |
|---|---|---|
| Full Name | Abbreviation | NO: |
| Copper-transporting ATPase 2 | ATP7B | 16577 |
| Breakpoint cluster region protein | BCR | 16578 |
| Abelson tyrosine-protein kinase 1 | ABL | 16579 |
| Breast cancer resistance protein | BCRP | 16580 |
| Breast cancer type 1 susceptibility protein | BRCA1 | 16581 |
| Breast cancer type 2 susceptibility protein | BRCA2 | 16582 |
| CAMPATH-1 antigen | CD52 | 16583 |
| Cytochrome P450 2D6 | CYP2D6 | 16584 |
| Deoxycytidine kinase | dCK | 16585 |
| Dihydrofolate reductase | DHFR | 16586 |
| Dihydropyrimidine dehydrogenase [NADP(+)] | DPYD | 16587 |
| Epidermal growth factor receptor | EGFR | 16588 |
| DNA excision repair protein ERCC-1 | ERCC1 | 16589 |
| Estrogen Receptor | ESR | 16590 |
| Low affinity immunoglobulin gamma Fc region | FCGR3A | 16591 |
| receptor III-A | | |
| Receptor tyrosine-protein kinase erbB-2 | HER2 or | 16592 |
| | ERBB2 | |
| Insulin-like growth factor 1 receptor | IGF1R | 16593 |
| GTPase KRas | KRAS | 16594 |
| Multidrug resistance protein 1 | MDR1 or | 16595 |
| | ABCB1 | |
| Methylated-DNA-protein-cysteine | MGMT | 16596 |
| methyltransferase | | |
| Multidrug resistance-associated protein 1 | MRP1 or | 16597 |
| | ABCC1 | |
| Progesterone Receptor | PGR | 16598 |
| Regulator of G-protein signaling 10 | RGS10 | 16599 |
| Suppressor of cytokine signaling 3 | SOCS-3 | 16600 |
| Thymidylate synthase | TYMS | 16601 |
| UDP-glucuronosyltransferase 1-1 | UGT1A1 | 16602 |

[0566] In some embodiments, a T-cell of the disclosure is modified to silence or reduce expression of one or more gene(s) encoding a growth advantage factor to produce an armored T-cell. Silencing or reducing expression of an oncogene can confer a growth advantage for an armored T-cell of the disclosure. For example, silencing or reducing expression (e.g. disrupting expression) of a TET2 gene during a CAR-T manufacturing process results in the generation of an armored CAR-T with a significant capacity for expansion and subsequent eradication of a tumor when compared to a non-armored CAR-T lacking this capacity for expansion. This strategy may be coupled to a safety switch (e.g. an iC9 safety switch of the disclosure), which allows for the targeted disruption of an armored CAR-T-cell in the event of an adverse reaction from a subject or uncontrolled growth of the armored CAR-T. Exemplary growth advantage factors include, but are not limited to, the factors provided in Table 8.

TABLE 8
Exemplary Growth Advantage Factors.

| Full Name | Abbreviation | SEQ ID NO: |
|---|---|---|
| Ten Eleven Translocation 2 | TET2 | 16603 |
| DNA (cytosine-5)-methyltransferase 3A | DNMT3A | 16604 |
| Transforming protein RhoA | RHOA | 16605 |
| Proto-oncogene vav | VAV1 | 16606 |
| Rhombotin-2 | LMO2 | 16607 |
| T-cell acute lymphocytic leukemia protein 1 | TAL1 | 16608 |
| Suppressor of cytokine signaling 1 | SOCS1 | 16609 |
| herpes virus entry mediator | HVEM | 16610 |
| T cell death-associated gene 8 | TDAG8 | 16611 |
| BCL6 corepressor | BCOR | 16612 |
| B and T cell attenuator | BTLA | 16613 |
| SPARC-like protein 1 | SPARCL1 | 16614 |
| Msh homeobox 1-like protein | MSX1 | 16615 |

### Armored T-Cells “Null or Switch Receptor” Strategy

[0567] In some embodiments, a T-cell of the disclosure is modified to express a modified/chimeric checkpoint receptor to produce an armored T-cell of the disclosure.

[0568] In some embodiments, the modified/chimeric checkpoint receptor comprises a null receptor, decoy receptor or dominant negative receptor. A null receptor, decoy receptor or dominant negative receptor of the disclosure may be modified/chimeric receptor/protein. A null receptor, decoy receptor or dominant negative receptor of the disclosure may be truncated for expression of the intracellular signaling domain. Alternatively, or in addition, a null receptor, decoy receptor or dominant negative receptor of the disclosure may be mutated within an intracellular signaling domain at one or more amino acid positions that are determinative or required for effective signaling. Truncation or mutation of null receptor, decoy receptor or dominant negative receptor of the disclosure may result in loss of the receptor's capacity to convey or transduce a checkpoint signal to the cell or within the cell.

[0569] For example, a dilution or a blockage of an immunosuppressive checkpoint signal from a PD-L1 receptor expressed on the surface of a tumor cell may be achieved by expressing a modified/chimeric PD-1 null receptor on the surface of an armored T-cell of the disclosure, which effectively competes with the endogenous (non-modified) PD-1 receptors also expressed on the surface of the armored T-cell to reduce or inhibit the transduction of the immunosuppressive checkpoint signal through endogenous PD-1 receptors of the armored T cell. In this exemplary embodiment, competition between the two different receptors for binding to PD-L1 expressed on the tumor cell reduces or diminishes a level of effective checkpoint signaling, thereby enhancing a therapeutic potential of the armored T-cell expressing the PD-1 null receptor.

[0570] In some embodiments, the modified/chimeric checkpoint receptor comprises a null receptor, decoy receptor or dominant negative receptor that is a transmembrane receptor.

[0571] In some embodiments, the modified/chimeric checkpoint receptor comprises a null receptor, decoy receptor or dominant negative receptor that is a membrane-associated or membrane-linked receptor/protein.

[0572] In some embodiments, the modified/chimeric checkpoint receptor comprises a null receptor, decoy receptor or dominant negative receptor that is an intracellular receptor/protein.

[0573] In some embodiments, the modified/chimeric checkpoint receptor comprises a null receptor, decoy receptor or dominant negative receptor that is an intracellular receptor/protein. Exemplary null, decoy, or dominant negative intracellular receptors/proteins of the disclosure include, but are not limited to, signaling components downstream of an inhibitory checkpoint signal (as provided, for example, in Tables 2 and 3), a transcription factor (as provided, for example, in Table 4), a cytokine or a cytokine receptor, a chemokine or a chemokine receptor, a cell death or apoptosis receptor/ligand (as provided, for example, in Table 5), a metabolic sensing molecule (as provided, for example, in Table 6), a protein conferring sensitivity to a cancer therapy (as provided, for example, in Table 7), and an oncogene or a tumor suppressor gene (as provided, for example, in Table 8). Exemplary cytokines, cytokine receptors, chemokines and chemokine receptors of the disclosure include, but are not limited to, the cytokines and cytokine receptors as well as chemokines and chemokine receptors provided in Table 9.

TABLE 9
Exemplary Cytokines, Cytokine receptors, Chemokines
and Chemokine Receptors.

| Full Name | Abbreviation | SEQ ID NO: |
|---|---|---|
| 4-1BB Ligand | 4-1BBL | 16616 |
| Tumor necrosis factor receptor | Apo3 or | 16617 |
| superfamily member 25 | TNFRSF25 | |
| Tumor necrosis factor receptor | APRIL or | 16618 |
| superfamily member 13 | TNFRSF13 | |
| Bc12-associated agonist of | Bc1-xL or BAD | 16619 |
| cell death | | |
| Tumor necrosis factor receptor | BCMA or | 16620 |
| superfamily member 17 | TNFRS17 | |
| C-C motif chemokine 1 | CCL1 | 16621 |
| C-C motif chemokine 11 | CCL11 | 16622 |
| C-C motif chemokine 13 | CCL13 | 16623 |
| C-C motif chemokine 14 | CCL14 | 16624 |
| C-C motif chemokine 15 | CCL15 | 16625 |
| C-C motif chemokine 16 | CCL16 | 16626 |
| C-C motif chemokine 17 | CCL17 | 16627 |
| C-C motif chemokine 18 | CCL18 | 16628 |
| C-C motif chemokine 19 | CCL19 | 16629 |
| C-C motif chemokine 2 | CCL2 | 16630 |
| C-C motif chemokine 20 | CCL20 | 16631 |
| C-C motif chemokine 21 | CCL21 | 16632 |
| C-C motif chemokine 22 | CCL22 | 16633 |
| C-C motif chemokine 23 | CCL23 | 16634 |
| C-C motif chemokine 24 | CCL24 | 16635 |
| C-C motif chemokine 25 | CCL25 | 16636 |
| C-C motif chemokine 26 | CCL26 | 16637 |
| C-C motif chemokine 27 | CCL27 | 16638 |
| C-C motif chemokine 28 | CCL28 | 16639 |
| C-C motif chemokine 3 | CCL3 | 16640 |
| C-C motif chemokine 4 | CCL4 | 16641 |
| C-C motif chemokine 5 | CCL5 | 16642 |
| C-C motif chemokine 7 | CCL7 | 16643 |
| C-C motif chemokine 8 | CCL8 | 16644 |
| C-C chemokine receptor type 1 | CCR1 | 16645 |
| C-C chemokine receptor type 10 | CCR10 | 16646 |
| C-C chemokine receptor type 11 | CCR11 | 16647 |
| C-C chemokine receptor type 2 | CCR2 | 16648 |
| C-C chemokine receptor type 3 | CCR3 | 16649 |
| C-C chemokine receptor type 4 | CCR4 | 16650 |
| C-C chemokine receptor type 5 | CCR5 | 16651 |
| C-C chemokine receptor type 6 | CCR6 | 16652 |
| C-C chemokine receptor type 7 | CCR7 | 16653 |
| C-C chemokine receptor type 8 | CCR8 | 16654 |
| C-C chemokine receptor type 9 | CCR9 | 16655 |
| Granulocyte colony-stimulating | CD114 or CSF3R | 16656 |
| factor receptor | | |
| Macrophage colony-stimulating | CD115 or CSF1R | 16657 |
| factor 1 receptor | | |
| Granulocyte-macrophage colony- | CD116 or CSF2RA | 16658 |
| stimulating factor receptor | | |
| subunit alpha | | |
| Mast/stem cell growth factor | CD117 or KIT | 16659 |
| receptor Kit | | |
| Leukemia inhibitory factor | CD118 or LIFR | 16660 |
| receptor | | |
| Tumor necrosis factor receptor | CD120a or | 16661 |
| superfamily member 1A | TNFRSF1A | |
| Tumor necrosis factor receptor | CD120b or | 16662 |
| superfamily member 1B | TNFRSF1B | |
| Interleukin-1 receptor type 1 | CD121a or IL1R1 | 16663 |
| Interleukin-2 receptor subunit | CD122 or IL2RB | 16664 |
| beta | | |
| Interleukin-3 receptor subunit | CD123 or IL3RA | 16665 |
| alpha | | |
| Interleukin-4 receptor subunit | CD124 or IL4R | 16666 |
| alpha | | |
| Interleukin-6 receptor subunit | CD126 or IL6R | 16667 |
| alpha | | |
| Interleukin-7 receptor subunit | CD127 or IL7R | 16668 |
| alpha | | |
| Interleukin-6 receptor subunit | CD130 or IL6ST | 16669 |
| beta | | |
| Cytokine receptor common | CD132 or IL2RG | 16670 |
| subunit gamma | | |
| Tumor necrosis factor ligand | CD153 or TNFSF8 | 16671 |
| superfamily member 8 | | |
| CD40 ligand | CD154 or CD4OL | 16672 |
| Tumor necrosis factor ligand | CD178 or FASLG | 16673 |
| superfamily member 6 | | |
| Interleukin-12 receptor subunit | CD212 or | 16674 |
| beta-1 | IL12RB1 | |
| Interleukin-13 receptor subunit | CD213a1 or | 16675 |
| alpha-1 | IL13RA1 | |
| Interleukin-13 receptor subunit | CD213a2 or | 16676 |
| alpha-2 | IL13RA2 | |
| Interleukin-2 receptor subunit | CD25 or IL2RA | 16677 |
| alpha | | |
| CD27 antigen | CD27 | 16678 |
| Tumor necrosis factor receptor | CD30 or | 16679 |
| superfamily member 8 | TNTRSF | |
| T-cell surface glycoprotein CD4 | CD4 | 16680 |
| Tumor necrosis factor receptor | CD40 or | 16681 |
| superfamily member 5 | TNFRSF5 | |
| CD70 antigen | CD70 | 16682 |
| Tumor necrosis factor receptor | CD95 or FAS | 16683 |
| superfamily member 6 | or FNFRSF6 | |
| Granulocyte-macrophage colony- | CDw116 or | 16684 |
| stimulating factor receptor subunit | CSF2RA | |
| alpha | | |
| Interferon gamma receptor 1 | CDw119 or | 16685 |
| | IFNGR1 | |
| Interleukin-1 receptor type 2 | CDw12lb or | 16686 |
| | IL1R2 | |
| Interleukin-5 receptor subunit | CDw125 or | 16687 |
| alpha | IL5RA | |
| Cytokine receptor common | CDw131 or | 16688 |
| subunit beta | CSF2RB | |
| Tumor necrosis factor receptor | CDw137 or | 16689 |
| superfamily member 9 | TNFRSF9 | |
| Interleukin-10 receptor | CDw210 or | 16690 |
| | IL1OR | |
| Interleukin-17 receptor A | CDw217 or | 16691 |
| | IL17RA | |
| C-X3-C motif chemokine 1 | CX3CL1 | 16692 |
| C-X3-C chemokine receptor 1 | CX3CR1 | 16693 |
| C-X-C motif chemokine 1 | CXCL1 | 16694 |
| C-X-C motif chemokine 10 | CXCL10 | 16695 |
| C-X-C motif chemokine 11 | CXCL11 | 16696 |
| C-X-C motif chemokine 12 | CXCL12 | 16697 |
| C-X-C motif chemokine 13 | CXCL13 | 16698 |
| C-X-C motif chemokine 14 | CXCL14 | 16699 |
| C-X-C motif chemokine 16 | CXCL16 | 16700 |
| C-X-C motif chemokine 2 | CXCL2 | 16701 |
| C-X-C motif chemokine 3 | CXCL3 | 16702 |
| C-X-C motif chemokine 4 | CXCL4 | 16703 |
| C-X-C motif chemokine 5 | CXCL5 | 16704 |
| C-X-C motif chemokine 6 | CXCL6 | 16705 |
| C-X-C motif chemokine 7 | CXCL7 | 16706 |
| C-X-C motif chemokine 8 | CXCL8 | 16707 |
| C-X-C motif chemokine 9 | CXCL9 | 16708 |
| C-X-C chemokine receptor type 1 | CXCR1 | 16709 |
| C-X-C chemokine receptor type 2 | CXCR2 | 16710 |
| C-X-C chemokine receptor type 3 | C.XCR3 | 16711 |
| C-X-C chemokine receptor type 4 | CXCR4 | 16712 |
| C-X-C chemokine receptor type 5 | CXCR5 | 16713 |
| C-X-C chemokine receptor type 6 | CXCR6 | 16714 |
| C-X-C chemokine receptor type 7 | CXCR7 | 16715 |
| Atypical chemokine receptor 1 | DARC or | 16716 |
| | ACKR1 | |
| Erythropoietin | Epo | 16717 |
| Erythropoietin receptor | EpoR | 16718 |
| Receptor-type tyrosine-protein | Flt-3 | 16719 |
| kinase | | |
| FLT3 | | |
| FLT3 Ligand | Flt-3L | 16720 |
| Granulocyte colony-stimulating | G-CSF or | 16721 |
| factor receptor | GSF3R | |
| Tumor necrosis factor receptor | GITR or | 16722 |
| superfamily member 18 | TNERSFI8 | |
| GITR Ligand | GITRL | 16723 |
| Cytokine receptor common | GM-CSF or | 16724 |
| subunit beta | CSF2RB | |
| Interleukin-6 receptor subunit | gp130 or | 16725 |
| beta | IL6ST | |
| Tumor necrosis factor receptor | HVEM or | 16726 |
| superfarnily member 14 | TNFRSF14 | |
| Interferon gamma | IFNγ | 16727 |
| Interferon gamma receptor 2 | IFNGR2 | 16728 |
| Interferon-alpha | IFN-α | 16729 |
| Interferon-beta | IFN-β | 16730 |
| Interleukin-1 alpha | IL1 | 16731 |
| Interleukin-10 | IL10 | 16732 |
| Interleukin-10 receptor | IL10R | 16733 |
| Interleukin-11 | IL-11 | 16734 |
| Interleukin-11 receptor alpha | IL-11Ra | 16735 |
| Interleukin-12 | IL12 | 16736 |
| Interleukin-13 | IL13 | 16737 |
| Interleukin-13 receptor | IL13R | 16738 |
| Interleukin-14 | IL-14 | 16739 |
| Interleukin-15 | IL15 | 16740 |
| Interleukin-15 receptor alpha | IL-15Ra | 16741 |
| Interleukin-16 | IL-16 | 16742 |
| Interleukin-17 | IL17 | 16743 |
| Interleukin-17 receptor | IL17R | 16744 |
| Interleukin-18 | IL18 | 16745 |
| InterIeukin-1 receptor alpha | IL-1RA | 16746 |
| Interleukin-1 alpha | IL-lα | 16747 |
| Interleukin-l beta | IL-1β | 16748 |
| interleukin-2 | IL2 | 16749 |
| interleukin-20 | IL-20 | 16750 |
| Interleukin-20 receptor alpha | IL-20Rα | 16751 |
| Interleukin-20 receptor beta | IL-20Rβ | 16752 |
| Interleukin-21 | IL21 | 16753 |
| Interleukin-3 | IL-3 | 16754 |
| interleukin-35 | IL35 | 16755 |
| Interleukin-4 | IL4 | 16756 |
| Interleukin-4 receptor | IL4R | 16757 |
| Interleukin-5 | IL5 | 16758 |
| Interleukin-5 receptor | IL5R | 16759 |
| Interleukin-6 | IL6 | 16760 |
| Interleukin-6 receptor | IL6R | 16761 |
| Interleukin-7 | IL7 | 16762 |
| Interleukin-9 receptor | IL-9R | 16763 |
| Leukemia inhibitory factor | LIF | 16764 |
| Leukemia inhibitory factor | LIFR | 16765 |
| receptor | | |
| tumor necrosis factor superfamay | LIGHT or | 16766 |
| member 14 | TNFSF14 | |
| Tumor necrosis factor receptor | LTβR or | 16767 |
| superfamily member 3 | INFRSF3 | |
| Lymphotoxin-beta | LT-β | 16768 |
| Macrophage colony-stimulating | M-CSF | 16769 |
| factor 1 | | |
| Tumor necrosis factor receptor | OPG or | 16770 |
| superfamily member 11B | TNFRSF11B | |
| Oncostatin-M | OSM | 16771 |
| Oncostatin-M receptor | OSMR | 16772 |
| Tumor necrosis factor receptor | OX40 or | 16773 |
| superfamily member 4 | TNFRSF4 | |
| Tumor necrosis factor ligand | OX40L or | 16774 |
| superfamily member 4 | TNFSF4 | |
| Tumor necrosis factor receptor | RANK or | 16775 |
| superfamily member 11A | TNFRSF11A | |
| Kit Ligana | SCF or KITLG | 16776 |
| Tumor necrosis factor receptor | TACI or | 16777 |
| superfamay member 13B | TNFRSF13B | |
| Tumor necrosis factor ligand | TALL-I or | 16778 |
| superfamily member -13B | TNFSF13B | |
| TGF-beta receptor type-1 | TGF-βR1 | 16779 |
| TGF-beta receptor type-2 | TGF-βR2 | 16780 |
| TGF-beta receptor type-3 | TGF-βR3 | 16781 |
| Transforming growth factor | TGF-β1 | 16782 |
| beta-1 | | |
| Transforming growth factor | TGF-β2 | 16783 |
| beta-2 | | |
| Transforming growth factor | TGF-β3 | 16784 |
| beta-3 | | |
| Tumor necrosis factor alpha | TNF or TNF-α | 16785 |
| Tumor necrosis factor beta | TNF-β | 16786 |
| Thyroid peroxidase | Tpo | 16787 |
| Thyroid peroxidase receptor | TpoR | 16788 |
| Tumor necrosis factor ligand | TRAIL or | 16789 |
| superfamay member 10 | TNFSF10 | |
| Tumor necrosis factor receptor | TRAILR1 or | 16790 |
| superfamay member 10A | TNFRSF10A | |
| Tumor necrosis factor receptor | TRAILR2 or | 16791 |
| superfamily member 10B | TNFRSF10B | |
| Tumor necrosis factor ligand | TRANCE or | 16792 |
| superfamily member 11 | TNFSF11 | |
| Tumor necrosis factor ligand | TWEAK or | 16793 |
| superfamay member 12 | TNFSF11 | |
| Lymphotactin | XCL1 | 16794 |
| Cytokine SCM-1 beta | XCL2 | 16795 |

[0574] In some embodiments, the modified/chimeric checkpoint receptor comprises a switch receptor. Exemplary switch receptors may comprise a modified/chimeric receptor/protein of the disclosure wherein a native or wild type intracellular signaling domain is switched or replaced with a different intracellular signaling domain that is either non-native to the protein and/or not a wild-type domain. For example, replacement of an inhibitory signaling domain with a stimulatory signaling domain would switch an immunosuppressive signal into an immunostimulatory signal. Alternatively, replacement of an inhibitory signaling domain with a different inhibitory domain can reduce or enhance the level of inhibitory signaling. Expression or overexpression, of a switch receptor can result in the dilution and/or blockage of a cognate checkpoint signal via competition with an endogenous wildtype checkpoint receptor (not a switch receptor) for binding to the cognate checkpoint receptor expressed within the immunosuppressive tumor microenvironment. Armored T cells of the disclosure may comprise a sequence encoding switch receptors of the disclosure, leading to the expression of one or more switch receptors of the disclosure, and consequently, altering an activity of an armored T-cell of the disclosure. Armored T cells of the disclosure may express a switch receptor of the disclosure that targets an intracellularly expressed protein downstream of a checkpoint receptor, a transcription factor, a cytokine receptor, a death receptor, a metabolic sensing molecule, a cancer therapy, an oncogene, and/or a tumor suppressor protein or gene of the disclosure.

[0575] Exemplary switch receptors of the disclosure may comprise or may be derived from a protein including, but are not limited to, the signaling components downstream of an inhibitory checkpoint signal (as provided, for example, in Tables 2 and 3), a transcription factor (as provided, for example, in Table 4), a cytokine or a cytokine receptor, a chemokine or a chemokine receptor, a cell death or apoptosis receptor/ligand (as provided, for example, in Table 5), a metabolic sensing molecule (as provided, for example, in Table 6), a protein conferring sensitivity to a cancer therapy (as provided, for example, in Table 7), and an oncogene or a tumor suppressor gene (as provided, for example, in Table 8). Exemplary cytokines, cytokine receptors, chemokines and chemokine receptors of the disclosure include, but are not limited to, the cytokines and cytokine receptors as well as chemokines and chemokine receptors provided in Table 9.

### Armored T-Cells “Synthetic Gene Expression” Strategy

[0576] In some embodiments, a T-cell of the disclosure is modified to express chimeric ligand receptor (CLR) or a chimeric antigen receptor (CAR) that mediates conditional gene expression to produce an armored T-cell of the disclosure. The combination of the CLR/CAR and the condition gene expression system in the nucleus of the armored T cell constitutes a synthetic gene expression system that is conditionally activated upon binding of cognate ligand(s) with CLR or cognate antigen(s) with CAR. This system may help to ‘armor’ or enhance therapeutic potential of modified T cells by reducing or limiting synthetic gene expression at the site of ligand or antigen binding, at or within the tumor environment for example.

### Exogenous Receptors

[0577] In some embodiments, the armored T-cell comprises a composition comprising (a) an inducible transgene construct, comprising a sequence encoding an inducible promoter and a sequence encoding a transgene, and (b) a receptor construct, comprising a sequence encoding a constitutive promoter and a sequence encoding an exogenous receptor, such as a CLR or CAR, wherein, upon integration of the construct of (a) and the construct of (b) into a genomic sequence of a cell, the exogenous receptor is expressed, and wherein the exogenous receptor, upon binding a ligand or antigen, transduces an intracellular signal that targets directly or indirectly the inducible promoter regulating expression of the inducible transgene (a) to modify gene expression.

[0578] In some embodiments of a synthetic gene expression system of the disclosure, the composition modifies gene expression by decreasing gene expression. In some embodiments, the composition modifies gene expression by transiently modifying gene expression (e.g. for the duration of binding of the ligand to the exogenous receptor). In some embodiments, the composition modifies gene expression acutely (e.g. the ligand reversibly binds to the exogenous receptor). In some embodiments, the composition modifies gene expression chronically (e.g. the ligand irreversibly binds to the exogenous receptor).

[0579] In some embodiments of the compositions of the disclosure, the exogenous receptor of (b) comprises an endogenous receptor with respect to the genomic sequence of the cell. Exemplary receptors include, but are not limited to, intracellular receptors, cell-surface receptors, transmembrane receptors, ligand-gated ion channels, and G-protein coupled receptors.

[0580] In some embodiments of the compositions of the disclosure, the exogenous receptor of (b) comprises a non-naturally occurring receptor. In some embodiments, the non-naturally occurring receptor is a synthetic, modified, recombinant, mutant or chimeric receptor. In some embodiments, the non-naturally occurring receptor comprises one or more sequences isolated or derived from a T-cell receptor (TCR). In some embodiments, the non-naturally occurring receptor comprises one or more sequences isolated or derived from a scaffold protein. In some embodiments, including those wherein the non-naturally occurring receptor does not comprise a transmembrane domain, the non-naturally occurring receptor interacts with a second transmembrane, membrane-bound and/or an intracellular receptor that, following contact with the non-naturally occurring receptor, transduces an intracellular signal.

[0581] In some embodiments of the compositions of the disclosure, the exogenous receptor of (b) comprises a non-naturally occurring receptor. In some embodiments, the non-naturally occurring receptor is a synthetic, modified, recombinant, mutant or chimeric receptor. In some embodiments, the non-naturally occurring receptor comprises one or more sequences isolated or derived from a T-cell receptor (TCR). In some embodiments, the non-naturally occurring receptor comprises one or more sequences isolated or derived from a scaffold protein. In some embodiments, the non-naturally occurring receptor comprises a transmembrane domain. In some embodiments, the non-naturally occurring receptor interacts with an intracellular receptor that transduces an intracellular signal. In some embodiments, the non-naturally occurring receptor comprises an intracellular signalling domain. In some embodiments, the non-naturally occurring receptor is a chimeric ligand receptor (CLR). In some embodiments, the CLR is a chimeric antigen receptor (CAR).

[0582] In some embodiments of the compositions of the disclosure, the exogenous receptor of (b) comprises a non-naturally occurring receptor. In some embodiments, the CLR is a chimeric antigen receptor (CAR). In some embodiments, the chimeric ligand receptor comprises (a) an ectodomain comprising a ligand recognition region, wherein the ligand recognition region comprises at least scaffold protein; (b) a transmembrane domain, and (c) an endodomain comprising at least one costimulatory domain. In some embodiments, the ectodomain of (a) further comprises a signal peptide. In some embodiments, the ectodomain of (a) further comprises a hinge between the ligand recognition region and the transmembrane domain.

[0583] In some embodiments of the CLR/CARs of the disclosure, the signal peptide comprises a sequence encoding a human CD2, CD3δ, CD3ε, CD3γ, CD3ζ, CD4, CD8α, CD19, CD28, 4-1BB or GM-CSFR signal peptide. In some embodiments, the signal peptide comprises a sequence encoding a human CD8α signal peptide. In some embodiments, the signal peptide comprises an amino acid sequence comprising MALPVTALLLPLALLLHAARP (SEQ ID NO: 17000). In some embodiments, the signal peptide is encoded by a nucleic acid sequence comprising atggcactgccagtcaccgccctgctgctgcctctggctctgctgctgcacgcagctagacca (SEQ ID NO: 17001).

[0584] In some embodiments of the CLR/CARs of the disclosure, the transmembrane domain comprises a sequence encoding a human CD2, CD3δ, CD3ε, CD3γ, CD3ζ, CD4, CD8α, CD19, CD28, 4-1BB or GM-CSFR transmembrane domain. In some embodiments, the transmembrane domain comprises a sequence encoding a human CD8α transmembrane domain. In some embodiments, the transmembrane domain comprises an amino acid sequence comprising IYIWAPLAGTCGVLLLSLVITLYC (SEQ ID NO: 17002). In some embodiments, the transmembrane domain is encoded by a nucleic acid sequence comprising

(SEQ ID NO: 17003)
atctacatttgggcaccactggccgggacctgtggagtgctgctgctgag
cctggtcatcacactgtactgc.

[0585] In some embodiments of the CLR/CARs of the disclosure, the endodomain comprises a human CD3ζ endodomain. In some embodiments, the at least one costimulatory domain comprises a human 4-1BB, CD28, CD3ζ, CD40, ICOS, MyD88, OX-40 intracellular segment, or any combination thereof. In some embodiments, the at least one costimulatory domain comprises a human CD3ζ and/or a 4-1BB costimulatory domain. In some embodiments, the CD3ζ costimulatory domain comprises an amino acid sequence comprising RVKFSRSADAPAYKQGQNQLYNELNLGRREEYDVLDKRRGRDPEMGGKPRRKNPQEGL YNELQKDKMAEAYSEIGMKGERRRGKGHDGLYQGLSTATKDTYDALHMQALPPR (SEQ ID NO: 17004). In some embodiments, the CD33 costimulatory domain is encoded by a nucleic acid sequence comprising cgcgtgaagtttagtcgatcagcagatgccccagcttacaaacagggacagaaccagctgtataacgagctgaatctgggccgccgagag gaatatgacgtgctggataagcggagaggacgcgaccccgaaatgggaggcaagcccaggcgcaaaaaccctcaggaaggcctgtat aacgagctgcagaaggacaaaatggcagaagcctattctgagatcggcatgaagggggagcgacggagaggcaaagggcacgatgg gctgtaccagggactgagcaccgccacaaaggacacctatgatgctctgcatatgcaggcactgcctccaagg (SEQ ID NO: 17005). In some embodiments, the 4-1BB costimulatory domain comprises an amino acid sequence comprising KRGRKKLLYIFKQPFMRPVQTTQEEDGCSCRFPEEEEGGCEL (SEQ ID NO: 17006). In some embodiments, the 4-1BB costimulatory domain is encoded by a nucleic acid sequence comprising aagagaggcaggaagaaactgctgtatattttcaaacagcccttcatgcgccccgtgcagactacccaggaggaagacgggtgctcctgtc gattccctgaggaagaggaagggggtgtgagctg (SEQ ID NO: 17007). In some embodiments, the 4-1BB costimulatory domain is located between the transmembrane domain and the CD3 costimulatory domain.

[0586] In some embodiments of the CLR/CARs of the disclosure, the hinge comprises a sequence derived from a human CD8a, IgG4, and/or CD4 sequence. In some embodiments, the hinge comprises a sequence derived from a human CD8α sequence. In some embodiments, the hinge comprises an amino acid sequence comprising TTTPAPRPPTPAPTIASQPLSLRPEACRPAAGGAVHTRGLDFACD (SEQ ID NO: 17008). In some embodiments, the hinge is encoded by a nucleic acid sequence comprising actaccacaccagcacctagaccaccaactccagctccaaccategcgagtcagcccctgagtctgagacctgaggcctgcaggccagct gcaggaggagctgtgcacaccaggggcctggacttcgcctgcgac (SEQ ID NO: 17028). In some embodiments, the hinge is encoded by a nucleic acid sequence comprising ACCACAACCCCTGCCCCCAGACCTCCCACACCCGCCCCTACCATCGCGAGTCAGCCCCTGAGTCTGAGAC CTGAGGCCTGCAGGCCAGCTGCAGGAGGAGCTGTGCACACCAGGGGCCTGGACTTCGCCTGCGAC (SEQ ID NO: 17009). In some embodiments, the at least one protein scaffold specifically binds the ligand.

[0587] In some embodiments of the compositions of the disclosure, the exogenous receptor of (b) comprises a non-naturally occurring receptor. In some embodiments, the CLR is a chimeric antigen receptor (CAR). In some embodiments, the chimeric ligand receptor comprises (a) an ectodomain comprising a ligand recognition region, wherein the ligand recognition region comprises at least scaffold protein; (b) a transmembrane domain, and (c) an endodomain comprising at least one costimulatory domain. In some embodiments, the at least one protein scaffold comprises an antibody, an antibody fragment, a single domain antibody, a single chain antibody, an antibody mimetic, or a Centyrin (referred to herein as a CARTyrin). In some embodiments, the ligand recognition region comprises one or more of an antibody, an antibody fragment, a single domain antibody, a single chain antibody, an antibody mimetic, and a Centyrin. In some embodiments, the single domain antibody comprises or consists of a VHH or a VH (referred to herein as a VCAR). In some embodiments, the single domain antibody comprises or consists of a VHH or a VH comprising human complementarity determining regions (CDRs). In some embodiments, the VH is a recombinant or chimeric protein. In some embodiments, the VH is a recombinant or chimeric human protein. In some embodiments, the antibody mimetic comprises or consists of an affibody, an afflilin, an affimer, an affitin, an alphabody, an anticalin, an avimer, a DARPin, a Fynomer, a Kunitz domain peptide or a monobody. In some embodiments, the Centyrin comprises or consists of a consensus sequence of at least one fibronectin type III (FN3) domain.

[0588] In some embodiments of the compositions of the disclosure, the exogenous receptor of (b) comprises a non-naturally occurring receptor. In some embodiments, the CLR is a chimeric antigen receptor (CAR). In some embodiments, the chimeric ligand receptor comprises (a) an ectodomain comprising a ligand recognition region, wherein the ligand recognition region comprises at least scaffold protein; (b) a transmembrane domain, and (c) an endodomain comprising at least one costimulatory domain. In some embodiments, the Centyrin comprises or consists of a consensus sequence of at least one fibronectin type III (FN3) domain. In some embodiments, the at least one fibronectin type III (FN3) domain is derived from a human protein. In some embodiments, the human protein is Tenascin-C. In some embodiments, the consensus sequence comprises LPAPKNLVVSEVTEDSLRLSWTAPDAAFDSFLIQYQESEKVGEAINLTVPGSERSYDLTG LKPGTEYTVSIYGVKGGHRSNPLSAEFTT (SEQ ID NO: 17010). In some embodiments, the consensus sequence comprises MLPAPKNLVVSEVTEDSLRLSWTAPDAAFDSFLIQYQESEKVGEAINLTVPGSERSYDLT GLKPGTEYTVSIYGVKGGHRSNPLSAEFTT (SEQ ID NO: 17011). In some embodiments, the consensus sequence is modified at one or more positions within (a) a A-B loop comprising or consisting of the amino acid residues TEDS at positions 13-16 of the consensus sequence; (b) a B-C loop comprising or consisting of the amino acid residues TAPDAAF at positions 22-28 of the consensus sequence; (c) a C-D loop comprising or consisting of the amino acid residues SEKVGE at positions 38-43 of the consensus sequence; (d) a D-E loop comprising or consisting of the amino acid residues GSER at positions 51-54 of the consensus sequence; (e) a E-F loop comprising or consisting of the amino acid residues GLKPG at positions 60-64 of the consensus sequence; (f) a F-G loop comprising or consisting of the amino acid residues KGGHRSN at positions 75-81 of the consensus sequence; or (g) any combination of (a)-(f). In some embodiments, the Centyrin comprises a consensus sequence of at least 5 fibronectin type III (FN3) domains. In some embodiments, the Centyrin comprises a consensus sequence of at least 10 fibronectin type III (FN3) domains. In some embodiments, the Centyrin comprises a consensus sequence of at least 15 fibronectin type III (FN3) domains. In some embodiments, the scaffold binds an antigen with at least one affinity selected from a K_{D} of less than or equal to 10⁻⁹M, less than or equal to 10⁻¹⁰M, less than or equal to 10⁻¹¹M, less than or equal to 10⁻¹²M, less than or equal to 10⁻¹³M, less than or equal to 10⁻¹⁴M, and less than or equal to 10⁻¹⁵M. In some embodiments, the K_{D} is determined by surface plasmon resonance.

### Inducible Promoters

[0589] In certain embodiments of the compositions of the disclosure, the sequence encoding the inducible promoter of (a) comprises a sequence encoding an NFκB promoter. In certain embodiments of the compositions of the disclosure, the sequence encoding the inducible promoter of (a) comprises a sequence encoding an interferon (IFN) promoter or a sequence encoding an interleukin-2 promoter. In certain embodiments of the compositions of the disclosure, the sequence encoding the inducible promoter of (a) comprises a sequence encoding a nuclear receptor subfamily 4 group A member 1 (NR4A1; also known as NUR77) promoter or a sequence encoding a NR4A1 promoter. In certain embodiments of the compositions of the disclosure, the sequence encoding the inducible promoter of (a) comprises a sequence encoding a T-cell surface glycoprotein CD5 (CD5) promoter or a sequence encoding a CD5 promoter. In certain embodiments, the interferon (IFN) promoter is an IFNγ promoter. In certain embodiments of the compositions of the disclosure, the inducible promoter is isolated or derived from the promoter of a cytokine or a chemokine. In certain embodiments, the cytokine or chemokine comprises IL2, IL3, IL4, IL5, IL6, IL10, IL12, IL13, IL17A/F, IL21, IL22, IL23, transforming growth factor beta (TGFβ), colony stimulating factor 2 (GM-CSF), interferon gamma (IFNγ), Tumor necrosis factor (TNFα), LTα, perforin, Granzyme C (Gzmc), Granzyme B (Gzmb), C-C motif chemokine ligand 5 (CCL5), C-C motif chemokine ligand 4 (CCL4), C-C motif chemokine ligand 3 (CCL3), X-C motif chemokine ligand 1 (XCL1) and LIF interleukin 6 family cytokine (Lif).

[0590] In certain embodiments of the compositions of the disclosure, including those wherein the sequence encoding the inducible promoter of (a) comprises a sequence encoding a NR4A1 promoter or a sequence encoding a NR4A1 promoter, the NR4A1 promoter is activated by T-cell Receptor (TCR) stimulation in T cells and by B-cell Receptor (BCR) stimulation in B cells, therefore, inducing expression of any sequence under control of the NR4A1 promoter upon activation of a T-cell or B-cell of the disclosure through a TCR or BCR, respectively.

[0591] In certain embodiments of the compositions of the disclosure, including those wherein the sequence encoding the inducible promoter of (a) comprises a sequence encoding a CD5 promoter or a sequence encoding a CD5 promoter, the CD5 promoter is activated by T-cell Receptor (TCR) stimulation in T cells, therefore, inducing expression of any sequence under control of the CD5 promoter upon activation of a T-cell of the disclosure through a TCR.

[0592] In certain embodiments of the compositions of the disclosure, the inducible promoter is isolated or derived from the promoter of a gene comprising a surface protein involved in cell differention, activation, exhaustion and function. In certain embodiments, the gene comprises CD69, CD71, CTLA4, PD-1, TIGIT, LAG3, TIM-3, GITR, MHCII, COX-2, FASL and 4-1BB.

[0593] In some embodiments of the compositions of the disclosure, the inducible promoter is isolated or derived from the promoter of a gene involved in CD metabolism and differentiation. In some embodiments of the compositions of the disclosure, the inducible promoter is isolated or derived from the promoter of Nr4a1, Nr4a3, Tnfrsf9 (4-1BB), Sema7a, Zfp3612, Gadd45b, Dusp5, Dusp6 and Neto2.

### Inducible Transgene

[0594] In some embodiments, the inducible transgene construct comprises or drives expression of a signaling component downstream of an inhibitory checkpoint signal (as provided, for example, in Tables 2 and 3), a transcription factor (as provided, for example, in Table 4), a cytokine or a cytokine receptor, a chemokine or a chemokine receptor, a cell death or apoptosis receptor/ligand (as provided, for example, in Table 5), a metabolic sensing molecule (as provided, for example, in Table 6), a protein conferring sensitivity to a cancer therapy (as provided, for example, in Table 7 and/or 1), and an oncogene or a tumor suppressor gene (as provided, for example, in Table 8). Exemplary cytokines, cytokine receptors, chemokines and chemokine receptors of the disclosure include, but are not limited to, the cytokines and cytokine receptors as well as chemokines and chemokine receptors provided in Table 9.

### Cas-Clover

[0595] The disclosure provides a composition comprising a guide RNA and a fusion protein or a sequence encoding the fusion protein wherein the fusion protein comprises a dCas9 and a Clo051 endonuclease or a nuclease domain thereof.

### Small Cas9 (SaCas9)

[0596] The disclosure provides compositions comprising a small, Cas9 (Cas9) operatively-linked to an effector. In certain embodiments, the disclosure provides a fusion protein comprising, consisting essentially of or consisting of a DNA localization component and an effector molecule, wherein the effector comprises a small, Cas9 (Cas9). In certain embodiments, a small Cas9 construct of the disclosure may comprise an effector comprising a type IIS endonuclease.

[0597] Amino acid sequence of Staphylococcus aureus Cas9 with an active catalytic site.

| (SEQ ID NO: 17074) | |
|---|---|
| 1 | mkrnyilgld igitsvgygi idyetrdvid agvrlfkean vennegrrsk rgarrlkrrr |
| 61 | rhriqrvkkl lfdynlltdh selsginpye arvkglsqkl seeefsaall hlakrrgvhn |
| 121 | vneveedtgn elstkeqisr nskaleekyv aelqlerlkk dgevrgsinr fktsdyvkea |
| 181 | kgllkvqkay hqldqsfidt yidlletrrt yyegpgegsp fgwkdikewy emlmghctyf |
| 241 | peelrsvkya ynadlynaln dlnnlvitrd enekleyyek fqiienvfkq kkkptlkqia |
| 301 | keilvneedi kgvrvtstgk peftnlkvyh dikditarke iienaelldq iakiltivqs |
| 361 | sedigeeltn inseltqeei egisnikgyt gthnlslkai nlildelwht ndnqiaifnr |
| 421 | lklvpkkvdl sqqkeipttl vddfilspvv krsfiqsikv inaiikkygl pndiiielar |
| 461 | eknskdaqkm inemqkrnrq tnerieeiir ttgkenakyl iekiklhdmq egkclyslea |
| 541 | ipledllnnp fnyevdhiip rsvsfdnsfn nkvlvkqeen skkgnrtpfq ylsssdskis |
| 601 | yetfkkhiln lakgkgrisk tkkeylleer dinrfsvqkd finrnlvdtr yatrglmnll |
| 661 | rsyfrvnnld vkvksinggf tsflrrkwkf kkernkgykh haedaliian adfifkewkk |
| 721 | ldkakkvmen qmfeekqaes mpeieteqey keifitphqi khikdfkdyk yshrvdkkpn |
| 781 | relindtlys trkddkgntl ivnnlnglyd kdndklkkli nkspekllmv hhdpqtyqkl |
| 841 | klimeqygde knplykyyee tgnyltkysk kdngpvikki kyygnklnah lditddypns |
| 901 | rnkvvklslk pyrfdvyldn gvykfvtvkn ldvikkenyy evnskcyeea kklkkisnqa |
| 961 | efiasfynnd likingelyr vigvnndlln rievnmidit yreyienmnd krppriikti |
| 1021 | asktqsikky stdilgnlve vkskkhpqii kkg |

Inactivated, Small Cas9 (dSaCas9)

[0598] The disclosure provides compositions comprising an inactivated, small, Cas9 (dSaCas9) operatively-linked to an effector. In certain embodiments, the disclosure provides a fusion protein comprising, consisting essentially of or consisting of a DNA localization component and an effector molecule, wherein the effector comprises a small, inactivated Cas9 (dSaCas9). In certain embodiments, a small, inactivated Cas9 (dSaCas9) construct of the disclosure may comprise an effector comprising a type IIS endonuclease.

[0599] dSaCas9 Sequence: D10A and N580A mutations (bold, capitalized, and underlined) inactivate the catalytic site.

| (SEQ ID NO: 17075) | |
|---|---|
| 1 | mkrnviiglA igitsvgygi idyetrdvid agvrlfkean vennegrrsk rgarrlkrrr |
| 61 | rhrigrvkkl lfdvnlltdh selsginpye arvkglsqkl seeefsaall hlakrrgvhn |
| 121 | vneveedtgn elstkeqisr nskaleekyv aelqlerlkk dgevrgsinr fktsdyvkea |
| 181 | kgllkvqkay hqldqsfidt yidlletrrt yyegpgegsp fgwkdikewy emlmghctyf |
| 241 | peelrsvkya ynadlynaln dlnnlvitrd enekleyyek fqiienvfkg kkkptlkqia |
| 301 | keilvneedi kgyrvtstqk peftnlkvyh dikditarke iienaelldq iakiltiyqs |
| 361 | sediqeeltn lnseltqeei eqisnlkgyt gthnlslkai nlildelwht ndnqiaifnr |
| 421 | lklvpkkvdl sqqkeipttl vddfilspvv krsfiqsikv inaiikkygi pndiiielar |
| 481 | eknskdaqkm inemqkrnrq tnerieeiir ttgkenakyl iekiklhdmq egkclyslea |
| 541 | ipledllnnp fnyevdhiip rsvsfdnsfn nkvlvkqeeA skkgnrtpfq ylsssdskis |
| 601 | yetfkkhiln lakgkgrisk tkkeylleer dinrfsvqkd finrnlvdtr yatrglmnll |
| 661 | rsyfrvnnld vkvksinggf tsflrrkwkf kkernkgykh haedaliian adfifkewkk |
| 721 | ldkakkvmen qmfeekqaes mpeieteqey keifitphqi khikdfkdyk yshrvdkkpn |
| 781 | relindtlys trkddkgntl ivnnlnglyd kdndklkkli nkspekllmy hhdpqtyqkl |
| 841 | klimeqygde knplykyyee tgnyltkysk kdngpvikki kyygnklnah lditddypns |
| 901 | rnkvvklslk pyrfdvyldn gvykfvtvkn ldvikkenyy evnskcyeea kklkkisnqa |
| 961 | efiasfynnd likingelyr vigvnndlln rievnmidit yreylenmnd krppriikti |
| 1021 | asktgsikky stdilgnlye vkskkhpqii kkg |

Inactivated Cas9 (dCas9)

[0600] The disclosure provides compositions comprising an inactivated Cas9 (dCas9) operatively-linked to an effector. In certain embodiments, the disclosure provides a fusion protein comprising, consisting essentially of or consisting of a DNA localization component and an effector molecule, wherein the effector comprises an inactivated Cas9 (dCas9). In certain embodiments, an inactivated Cas9 (dCas9) construct of the disclosure may comprise an effector comprising a type IIS endonuclease.

[0601] In certain embodiments, the dCas9 of the disclosure comprises a dCas9 isolated or derived from Staphyloccocus pyogenes. In certain embodiments, the dCas9 comprises a dCas9 with substitutions at positions 10 and 840 of the amino acid sequence of the dCas9 which inactivate the catalytic site. In certain embodiments, these substitutions are D10A and H840A. In certain embodiments, the amino acid sequence of the dCas9 comprises the sequence of:

| (SEQ ID NO: 17076) | |
|---|---|
| 1 | XDKKYSIGLA IGTNSVGWAV ITDEYKVPSK KFKVLGNTDR HSIKKNLIGA LLFDSGETAE |
| 61 | ATRLKRTARR RYTRRKNRIC YLQEIFSNEM AKVDDSFFHR LEESFLVEED KKHERHPIFG |
| 121 | NIVDEVAYHE KYPTTYHLRK KLVDSTDKAD LRLIYLALAH MIKFRGHFLI EGDLNPDNSD |
| 181 | VDKLFIQLVQ TYNQLFEENP INASGVDAKA ILSARLSKSR RLENLIAQLP GEKKNGLFGN |
| 241 | LIALSLGLTP NFKSNFDLAE DAKLQLSKDT YDDDLDNLLA QIGDQYADLF LAAKNLSDAI |
| 301 | LLSDILRVNT EITKAPLSAS MIKRYDEHHQ DLTLLKALVR QQLPEKYKEI FFDQSKHGYA |
| 361 | GYIDGGASQE EFYKFIKPIL EKMDGTEELL VKLNREDLLR KQRTFDNGSI PHQIHLGELH |
| 421 | AILRRQEDFY PFLKDNREKI EKILTFRIPY YVGPLARGKS RFAWMTRKSE ETITPWNFEE |
| 481 | VVDKGASAQS FIERMTNFDK NLPNEKVLPK HSLLYEYFTV YNELTKVKYV TEGMRKPAFL |
| 541 | SGEQKKAIVD LLFKTNRKVT VKQLKEDYFK KIECFDSVEI SGVEDRFNAS LGTYHDLLKI |
| 601 | IKDKDFLDNE ENEDILEDIV LTLTLFEDRE MIEERLKTYA HLFDDKVMKQ LKRRRYTGWG |
| 661 | RLSRKLINGI RDKQSGKTIL DFLKSDGFAN RNFMQLIHDD SLTFKEDIQK AQVSGQGDSL |
| 721 | HEHIANLAGS PAIKKGILQT VKVVDELVKV MGRHKPENIV IEMARENQTT QKGQKNSRER |
| 781 | MKRIEEGIKE LGSQILKEHP VENTQLQNEK LYLYYLQNGR DMYVDQELDI NRLSDYDVDA |
| 841 | IVPQSFLKDD SIDNKVLTRS DKNRGKSDNV PSEEVVKKMK NYWRQLLNAK LITQRKFDNL |
| 901 | TKAERGGLSE LDKAGFIKRQ LVETRQITKH VAQILDSRMN TKYDENDKLI REVKVITLKS |
| 961 | KLVSDFRKDF QFYKVREINN YHHAHDAYLN AVVGTALIKK YPKLESEFVY GDYKVYDVRK |
| 1021 | MIAKSEQEIG KATAKYFFYS NIMNFFKTEI TLANGEIRKR PLIETNGETG EIVWDKGRDF |
| 1081 | ATVRKVLSMP QVNIVKKTEV QTGGFSKESI LPKRNSDKLI ARKKDWDPKK YGGFDSPTVA |
| 1141 | YSVLVVAKVE KGKSKKLKSV KELLGITIME RSSFEKNPID FLEAKGYKEV KKDLIIKLPK |
| 1201 | YSLFELENGR KRMLASAGEL QKGNELALPS KYVNFLYLAS HYEKLKGSPE DNEQKQLFVE |
| 1261 | QHKHYLDEII EQISEFSKRV ILADANLDKV LSAYNKHRDK PIREQAENII HLFTLTNLGA |
| 1321 | PAAFKYFDTT IDRKRYTSTK EVLDATLIHQ SITGLYETRI DLSQLGGD. |

[0602] In certain embodiments, the amino acid sequence of the dCas9 comprises the sequence of:

| (SEQ ID NO: 17077 | |
|---|---|
| 1 | MCKKYSIGLA IGTNSVGWAV ITDEYKVPSK KFKVLGNTDR HSIKKNLIGA LLFDSGETAE |
| 61 | ATRLRRTARR RYTRRKNRIC YLQEIFSNEM AKVDDSFFKR LEESFLVEED KKHERHPIFG |
| 121 | NIVDEVAYHE KYPTIYHLRK KLVDSTDKAD LRLIYLALAH MIKFRGHFLI EGDLNPDNSD |
| 181 | VDKLFIQLVQ TYNQLFEENP INASGVDAKA ILSARLSKSR RLENLIAQLP GEKKNGLFGN |
| 241 | LIALSLGLTP NFKSNFDLAE DAKLQLSKDT YDDDLDNLLA QIGDQYADLF LAAKNLSDAI |
| 301 | LLSDILRVNT EITKAPLSAS MIKRYDEHHQ DLTLLKALVR QQLPEKYKEI FFDQSKNGYA |
| 361 | GYIDGGASQE EFYKFIKPIL EKMDGTEELL VKLNREDLLR KQRTFDNGSI PKQIHLGELH |
| 421 | AILRRQEDFY PFLKDNREKI EKILTFRIPY YVGPLARGNS RFAWMTRKSE ETITPWNFEE |
| 481 | VVDKGASAQS FIERMTMFDK NLPNEKVLPK HSLLYEYFTV YNELTKVKYV TEGMRKPAFL |
| 541 | SGEQKKAIVD LLFKTNRKVT VKQLKEDYFK KIECFDSVEI SGVEDRFNAS LGTYHDLLKI |
| 601 | IKDKDFLDNE ENEDILEDIV LTLTLFEDRE MIEERLKTYA HLFDDKVMKQ LKRRRYTGWG |
| 661 | RLSRKLINGI RDKQSGKTIL DFLKSDGFAN RNFMQLIHDD SLTFKEDIQK AQVSGQGDSL |
| 721 | HEHIANLAGS PAIKKGILQT VKVVDELVKV MGRHKPENIV IEMARENQTT QKGQKNSRER |
| 781 | MKRIEEGIKE LGSQILKEHP VENTQLQNEK LYLYYLQNGR DMYVDQELDI NRLSDYDVDA |
| 841 | IVPQSFLKDD SIDNKVLTRS DKNRGKSDNV PSEEVVKKMK NYWRQLLNAK LITQRKFDNL |
| 901 | TKAERGGLSE LDKAGFIKRQ LVETRQITKH VAQILDSRMN TKYDENDKLI REVKVITLKS |
| 961 | KLVSDFRKDF QFYKVREINN YHHAHDAYLN AVVGTALIKK YPKLESEFVY GDYKVYDVRK |
| 1021 | MIAKSEQEIG KATAKYFFYS NIMNFFKTEI TLANGEIRKR PLIETNGETG EIVWDKGRDF |
| 1081 | ATVRKVLSMP QVNIVKKTEV QTGGFSKESI LPKRNSDKLI ARKKDWDPKK YGGFDSPTVA |
| 1141 | YSVLVVAKVE KGKSKKLKSV KELLGITIME RSSFEKNPID FLEAKGYKEV KKDLIIKLPK |
| 1201 | YSLFELENGR KRMLASAGEL QKGNELALPS KYVNFLYLAS HYEKLKGSPE DNEQKQLFVE |
| 1281 | QHKHYLDEII EQISEFSKRV ILADANLDKV LSAYNKHRDK PIREQAENII HLFTLTNLGA |
| 1321 | PAAFKYFDTT IDRKPYTSTK EVLDATLIHQ SITGLYETRI DLSQLGGD. |

### Clo051 Endonuclease

[0603] An exemplary Clo051 nuclease domain may comprise, consist essentially of or consist of, the amino acid sequence of:

(SEQ ID NO: 17078)
EGIKSNISLLKDELRGQISHISHEYLSLIDLAFDSKQNRLFEMKVLELLV
NEYGFKGRHLGGSRKPDGIVYSTTLEDNFGIIVDTKAYSEGYSLPISQAD
EMERYVRENSNRDEEVNPNKWWNFSEEVKKYYFVFISGSFKGKFEEQLRR
LSMTTGVNGSAVNWNLLLGAEKIRSGEMTIEELERAMFNNSEFILKY.

### Cas-Clover Fusion Protein

[0604] In certain embodiments, an exemplary dCas9-Clo051 fusion protein (embodiment 1) may comprise, consist essentially of or consist of, the amino acid sequence of (Clo051 sequence underlined, linker bold italics, dCas9 sequence (Streptoccocus pyogenes) in italics):

(SEQ ID NO: 17079)
MAPKKKRKVEGIKSNISLLKDELRGQISHISHEYLSLIDLAFDSKQNRL
FEMKVLELLVNEYGFKGRHLGGSRKPDGIVYSTTLEDNFGIIVDTKAYS
EGYSLPISQADEMERYVRENSNRDEEVNPNKWWENFSEEVKKYYFVFIS
GSFKGKFEEQLRRLSMTTGVNGSAVNVVNLLLGAEKIRSGEMTIEELER
AMFNNSEFILKY [symbol] DKKYSIGLAIGTNSVGWAVITDEYKVPSKKF
KVLGNTDRHSIKKNLIGALLFDSGETAEATRLKRTARRRYTRRKNRICYL
QEIFSNEMAKVDDSFFHRLEESFLVEEDKKHERHPIFGNIVDEVAYHEK
YPTIYHLRKKLVDSTDKADLRLIYLALAHMIKFRGHFLIEGDLNPDNSD
VDKLFIQLVQTYNQLFEENPINASGVDAKAILSARLSKSRRLENLIAQL
PGEKKNGLFGNLIALSLGLTPNFKSNFDLAEDAKLQLSKDTYDDDLDNL
LAQIGDQYADLFLAAKNLSDAILLSDILRVNTEITKAPLSASMIKRYDE
HHQDLTLLKALVRQQLPEKYKEIFFDQSKNGYAGYIDGGASQEEFYKFI
KPILEKMDGTEELLVKLNREDLLRKQRTFDNGSIPHQIHIGELHAILRR
QEDFYPFLKDNREKIEKILTFRIPYYVGPLARGNSRFAWMTRKSEETIT
PWNFEEVVDKGASAGSFIERMTNFDKNLPNEKVLPKHSLLYEYFTVYNE
LTKVKYVTEGMRKPAFLSGEQKKAIVDLLFKTNRKVTVKQLKEDYFKKI
ECFDSVEISGVEDRFNASLGTYHDLLKIIKDKDFLDNEENEDILEDIVL
TLTLFEDREMIEERLKTYAHLFDDKVMKQLKRRRYTGWGRLSRKLINGI
RDKQSGKTILDFLKSDGFANRNFMQLIHDDSLTFKEDIQKAQVSGQGDS
LHEHIANLAGSPAIKKGILQTVKVVDELVKVMGRHKPENIVIEMARENQ
TTQKGQKNSRERMKRIEEGIKELGSQILKEHPVENTQLQNEKLYLYYLQ
NGRDMYVDQELDINRLSDYDVDAIVPQSFLKDDSIDNKVLTRSDKNRGK
SDNVPSEEVVKKMKNYWRQLLNAKLITQRKFDNLTKAERGGLSELDKAG
FIKRQLVETRQITKHVAQILDSRMNTKYDENDKLIREVKVITLKSKLVS
DFRKDFQFYKVREINNYHHAHDAYLNAVVGTALIKKYPKLESEFVYGDY
KVYDVRKMIAKSEQEIGKATAKYFFYSNIMNFFKTEITLANGEIRKRPL
IETNGETGEIVWDXGRDFATVRKVLSMPQVNIVKKTEVQTGGFSKESIL
PKRNSDKLIARKKDWDPKKYGGFDSPTVAYSVLVVAKVEKGKSKKLKSV
KELLGITIMERSSFEKNPIDFLEAKGYKEVKKDLIIKLPKYSLFELENG
RKRMLASAGELQKGNELALPSKYVNFLYLASHYEKLKGSPEDNEQKQLF
VEQHKHYLDEIIEQISEFSKRVILADANLDKVLSAYNKHRDKPIREQAE
NIIHLFTLTNLGAPAAFKYFDTTIDRKRYTSTKEVLDATLIHQSITGLY
ETRIDLSQLGGDGSPKKKRKVSS.

[0605] In certain embodiments, an exemplary dCas9-Clo051 fusion protein (embodiment 1) may comprise, consist essentially of or consist of, the nucleic acid sequence of (dCas9 sequence derived from Streptoccocus pyogenes):

| (SEQ ID NO: 17080) | |
|---|---|
| 1 | atggcaccaa agaagaaaag aaaagtggag ggcatcaagt caaacatcag cctgctgaaa |
| 61 | gacgaactgc ggggacagat tagtcacatc agtcacgagt acctgtcact gattgatctg |
| 121 | gccttcgaca gcaagcagaa tagactgttt gagatgaaag tgctggaact gctggtcaac |
| 181 | gagtatggct tcaagggcag acatctgggc gggtctagga aacctgacgg catcgtgtac |
| 241 | agtaccacac tggaagacaa cttcggaatc attgtcgata ccaaggctta ttccgagggc |
| 301 | tactgtgtgc caattagtca ggcagatgag atggaaaggt acgtgcgcga aaactcaaat |
| 361 | agggacgagg aagtcaaccc caataagtgg tgggagaatt tcagcgagga agtgaagaaa |
| 421 | tactacttcg tctttatctc aggcagcttc aaagggaagt ttgaggaaca gctgcggaga |
| 481 | ctgtccatga ctaccggggt gaacggatct gctgtcaacg tggtcaatct gctgctgggc |
| 541 | gcagaaaaga tcaggtccgg ggagatgaca attgaggaac tggaacgcgc catgttcaac |
| 601 | aattctgagt ttatcctgaa gtatggaggc gggggaagcg ataagaaata ctccatcgga |
| 661 | ctggccattg gcaccaattc cgtgggctgg gctgtcatca cagacgagta caaggtgcca |
| 721 | agcaagaagt tcaaggtcct ggggaacacc gatcgccaca gtatcaagaa aaatctgatt |
| 781 | ggagccctgc tgttcgactc aggcgagact gctgaagcaa cccgactgaa gcggactgct |
| 841 | aggcgccgat atacccggag aaaaaatcgg atctgctacc tgcaggaaat tttcagcaac |
| 901 | gagatggcca aggtggacga tagtttcttt caccgcctgg aggaatcatt cctggtggag |
| 961 | gaagataaga aacacgagcg gcatcccatc tttggcaaca ttgtggacga agtcgcttat |
| 1021 | cacgagaagt accctactat ctatcatctg aggaagaaac tggtggactc caccgataag |
| 1081 | gcagacctgc gcctgatcta tctggccctg gctcacatga tcaagttccg ggggcatttt |
| 1141 | ctgatcgagg gagatctgaa ccctgacaat tctgatgtgg acaagctgtt catccagctg |
| 1201 | gtccagacat acaatcagct gtttgaggaa aacccaatta atgcctcagg cgtggacgca |
| 1261 | aaggccatcc tgagcgccag actgtccaaa tctaggcgcc tggaaaacct gatcgctcag |
| 1321 | ctgccaggag agaagaaaaa cggcctgttt gggaatctga ttgcactgtc cctgggcctg |
| 1381 | acacccaact tcaagtctaa ttttgatctg gccgaggacg ctaagctgca gctgtccaaa |
| 1441 | gacacttatg acgatgacct ggataacctg ctggctcaga tcggcgatca gtacgcagac |
| 1501 | ctgttcctgg ccgctaagaa tctgagtgac gccatcctgc tgtcagatat tctgcgcgtg |
| 1561 | aacacagaga ttactaaggc cccactgagt gcttcaatga tcaaaagata tgacgagcac |
| 1621 | catcaggatc tgaccctgct gaaggctctg gtgaggcagc agctgcccga gaaatacaag |
| 1681 | gaaatcttct ttgatcagag caagaatgga tacgccggct atattgacgg cggggcttcc |
| 1741 | caggaggagt tctacaagtt catcaagccc attctggaaa agatggacgg caccgaggaa |
| 1801 | ctgctggtga agctgaatcg ggaggacctg ctgagaaaac agaggacatt tgataacgga |
| 1861 | agcatccctc accagattca tctgggcgaa ctgcacgcca tcctgcgacg gcaggaggac |
| 1921 | ttctacccat ttctgaagga taaccgcgag aaaatcgaaa agatcctgac cttcagaatc |
| 1981 | ccctactatg tggggcctct ggcacgggga aatagtagat ttgcctggat gacaagaaag |
| 2041 | tcagaggaaa ctatcacccc ctggaacttc gaggaagtgg tcgataaagg cgctagcgca |
| 2101 | cagtccttca ttgaaaggat gacaaatttt gacaagaacc tgccaaatga gaaggtgctg |
| 2161 | cccaaacaca gcgtgctgta cgaatatttc acagtgtata acgagctgac taaagtgaag |
| 2221 | tacgtcaccg aagggatgcg caagcccgca ttcctgtccg gagagcagaa gaaagccatc |
| 2281 | gtggacctgc tgtttaagac aaatcggaaa gtgactgtca aacagctgaa ggaagactat |
| 2341 | ttcaagaaaa ttgagtgttt cgattcagtg gaaatcagcg gcgtcgagga caggtttaac |
| 2401 | gcctccctgg ggacctacca cgatctgctg aagatcatca aggataagga cttcctggac |
| 2461 | aacgaggaaa atgaggacat cctggaggac attgtgctga cactgactct gtttgaggat |
| 2521 | cgcgaaatga tcgaggaacg actgaagact tatgcccatc tgttcgatga caaagtgatg |
| 2581 | aagcagctga aaagaaggcg ctacaccgga tggggacgcc tgagccgaaa actgatcaat |
| 2641 | gggattagag acaagcagag cggaaaaact atcctggact ttctgaagtc cgatggcttc |
| 2701 | gccaacagga acttcatgca gctgattcac gatgactctc tgaccttcaa ggaggacatc |
| 2761 | cagaaagcac aggtgtctgg ccagggggac agtctgcacg agcatatcgc aaacctggcc |
| 2821 | ggcagccccg ccatcaagaa agggattctg cagaccgtga aggtggtgga cgaactggtc |
| 2881 | aaggtcatgg gacgacacaa acctgagaac atcgtgattg agatggcccg cgaaaatcag |
| 2941 | acaactcaga agggccagaa aaacagtcga gaacggatga agagaatcga ggaaggcatc |
| 3001 | aaggagctgg ggtcacagat cctgaaggag catcctgtgg aaaacactca gctgcagaat |
| 3061 | gagaaactgt atctgtacta tctgcagaat ggacgggata tgtacgtgga ccaggagctg |
| 3121 | gatattaaca gactgagtga ttatgacgtg gatgccatcg tccctcagag cttcctgaag |
| 3181 | gatgactcca ttgacaacaa ggtgctgacc aggtccgaca agaaccgcgg caaatcagat |
| 3241 | aatgtgccaa gcgaggaagt ggtcaagaaa atgaagaact actggaggca gctgctgaat |
| 3301 | gccaagctga tcacacagcg gaaatttgat aacctgacta aggcagaaag aggaggggtg |
| 3361 | tctgagctgg acaaggccgg cttcatcaag cggcagctgg tggagacaag acagatcact |
| 3421 | aagcacgtcg ctcagattct ggatagcaga atgaacacaa agtacgatga aaacgacaag |
| 3461 | ctgatcaggg aggtgaaagt cattactctg aaatccaagc tggtgtctga ctttagaaag |
| 3541 | gatttccagt tttataaagt cagggagatc aacaactacc accatgctca tgacgcatac |
| 3601 | ctgaacgcag tggtcgggac cgccctgatt aagaaatacc ccaagctgga gtccgagttc |
| 3661 | gtgtacggag actataaagt gtacgatgtc cggaagatga tcgccaaatc tgagcaggaa |
| 3721 | attggcaagg ccaccgctaa gtatttcttt tacagtaaca tcatgaattt ctttaagacc |
| 3781 | gaaatcacac tggcaaatgg ggagatcaga aaaaggcctc tgattgagac caacggggag |
| 3841 | acaggagaaa tcgtgtggga caagggaagg gattttgcta ccgtgcgcaa agtcctgtcc |
| 3901 | atgccccaag tgaatattgt caagaaaact gaagtgcaga ccgggggatt ctctaaggag |
| 3961 | agtattctgc ctaagcgaaa ctctgataaa ctgatcgccc ggaagaaaga ctgggacccc |
| 4021 | aagaagtatg gcgggttcga ctctccaaca gtggcttaca gtgtcctggt ggtcgcaaag |
| 4081 | gtggaaaagg ggaagtccaa gaaactgaag tctgtcaaag agctgctggg aatcactatt |
| 4141 | atggaacgca gctccttcga gaagaatcct atcgattttc tggaagccaa gggctataaa |
| 4201 | gaggtgaaga aagacctgat cattaagctg ccaaaatact cactgtttga gctggaaaac |
| 4261 | ggacgaaagc gaatgctggc aagcgccgga gaactgcaga agggcaatga gctggccctg |
| 4321 | ccctccaaat acgtgaactt cctgtatctg gctagccact acgagaaact gaaggggtcc |
| 4381 | cctgaggata acgaacagaa gcagctgttt gtggagcagc acaaacatta tctggacgag |
| 4441 | atcattgaac agatttcaga gttcagcaag agagtgatcc tggctgacgc aaatctggat |
| 4501 | aaagtcctga gcgcatacaa caagcaccga gacaaaccaa tccgggagca ggccgaaaat |
| 4561 | atcattcatc tgttcaccct gacaaacctg ggcgcccctg cagccttcaa gtattttgac |
| 4621 | accacaatcg atcggaagag atacacttct accaaagagg tgctggatgc taccctgatc |
| 4681 | caccagagta ttaccggcct gtatgagaca cgcatcgacc tgtcacagct gggaggcgat |
| 4741 | gggagcccca agaaaaagcg gaaggtgtct agttaa. |

[0606] In certain embodiments, the nucleic acid sequence encoding a dCas9-Clo051 fusion protein (embodiment 1) of the disclosure may comprise a DNA. In certain embodiments, the nucleic acid sequence encoding a dCas9-Clo051 fusion protein (embodiment 1) of the disclosure may comprise an RNA.

[0607] In certain embodiments, an exemplary dCas9-Clo051 fusion protein (embodiment 2) may comprise, consist essentially of or consist of, the amino acid sequence of (Clo051 sequence underlined, linker bold italics, dCas9 sequence (Streptoccocus pyogenes) in italics):

| (SEQ ID NO: 17081) | |
|---|---|
| 1 | MPKKKRKVEG IKSNISLLKD ELRGQISHIS HEYLSLIDLA FDSKQNPLFE MKVLELLVNE |
| 61 | YGFKGRHLGG SRKPDGIVYS TTLEDNFGII VDTKAYSEGY SLPISQADEM ERYVRENSNR |
| 121 | DEEVNPNKWW ENFSEEVKKY YFVFISGSFK GKFEEQLRRL SMTTGVNGSA VNVVNLLLGA |
| 181 | EKIRSGEMTI EELERAMFNN SEFILKY [symbol] DKKYSIGL AIGTNSVGWA VITDEYKVPS |
| 241 | KKFKVLGNTD RHSIKKNLIG ALLFDSGETA EATRLKRTAR RRYTRRFNRI CYLQEIFSNE |
| 301 | MAKVDDSFFH RLEESFLVEE DKKHERHPIF GNIVDEVAYH EKYPTIYHLR KKLVDSTDKA |
| 361 | DLRLIYLALA HMIKFRGHFL IEGDLNPDNS DVDKLFIQLV QTYNQLFEEN PINASGVDAK |
| 421 | AILSARLSKS RRLENLIAQL PGEKKNGLFG NLIALSLGLT PNFKSNFDLA EDAKLQLSKD |
| 481 | TYDDDLDNLL AQIGDQYADL FLAAKNLSDA ILLSDILRVN TEITKAPLSA SMIKRYDEHH |
| 541 | QDLTLLKALV RQQLPEKYKE IFFDQSKNGY AGYIDGGASQ EEFYKFIKPI LEKMDGTEEL |
| 601 | LVKLNREDLL RKQRTFDNGS IPHQIHLGEL HAILRRQEDF YPFLKDNREK IEKILTFRIP |
| 661 | YYVGPLARGN SRFAWMTRKS EETITPWNFE EVVDKGASAQ SFIERMTNFD KNLPNEKVLP |
| 721 | KHSLLYEYFT VYNELTKVKY VTEGMRKPAF LSGEQEEAIV DLLFKTNRKV TVKQLKEDYF |
| 781 | KKIECFDSVE ISGVEDRFNA SLGTYHDLLK IIKDKDFLDN EENEDILEDI VLTLTLFEDR |
| 841 | EMIEERLKTY AHLFDDKVMK QLKRRRYTGW GRLSRKLING IRDKQSGKTI LDFLKSDGFA |
| 901 | NRNFMQLIHD DSLTFKEDIQ KAQVSGQGDS LHEHIANLAG SPAIKKGILQ TVKVVDELVK |
| 961 | VMGRHKPENI VIEMARENQT TQKGQKNSRE RMKRIEEGIK ELGSQILKEH PVENTQLQNE |
| 1021 | KLYLYYLQNG RDMYVDQELD INRLSDYDVD AIVPQSFLKD DSIDNKVLTR SDKNRGKSDN |
| 1061 | VPSEEVVKKM KNYWRQLLNA KLITQRKFDN LTKAERGGLS ELDKAGFIKR QLVETRQITK |
| 1141 | HVAQILDSRM NTKYDENDKL IREVKVITLK SKLVSDFRKD FQFYKVREIN NYHHAHDAYL |
| 1201 | NAVVGTALIK KYPKLESEFV YGDYKVYDVR KMIAKSEQEI GKATAKYFFY SNIMNFFKTE |
| 1261 | ITLANGEIRK RPLIETNGET GEIVWDKGRD FATVRKVLSM PQVNIVKKTE VQTGGFSKES |
| 1321 | ILPKRNSDKL IARKKDWDPK KYGGFDSPTV AYSVLVVAKV EKGKSKKLKS VKELLGITIM |
| 1381 | ERSSFEKNPI DFLEAKGYKE VKKDLIIKLP KYSLFELENG RKRMLASAGE LQKGNELALP |
| 1441 | SKYVNFLYLA SHYEKLKGSP EDNEQKQLFV EQHKHYLDEI IEQISEFSKR VILADANLDK |
| 1501 | VLSAYNKHRD KPIREQAENI IHLFTLTNLG APAAFKYFDT TIDRKRYTST KEVLDATLIH |
| 1561 | QSITGLYETR IDLSQLGGDG SPKKKRKV. |

[0608] In certain embodiments, an exemplary dCas9-Clo051 fusion protein (embodiment 2) may comprise, consist essentially of or consist of, the nucleic acid sequence of (dCas9 sequence derived from Streptoccocus pyogenes):

| (SEQ ID NO: 17082) | |
|---|---|
| 1 | atgcctaaga agaagcggaa ggtggaaggc atcaaaagca acatctccct cctgaaagac |
| 61 | gaactccggg ggcagattag ccacattagt cacgaatacc tctccctcat cgacctggct |
| 121 | ttcgatagca agcagaacag gctctttgag atgaaagtgc tggaactgct cgtcaatgag |
| 181 | tacgggttca agggtcgaca cctcggcgga tctaggaaac cagacggcat cgtgtatagt |
| 211 | accacactgg aagacaactt tgggatcatt gtggatacca aggcatactc tgagggttat |
| 301 | agtctgccca tttcacaggc cgacgagatg gaacggtacg tgcgcgagaa ctcaaataga |
| 361 | gatgaggaag tcaaccctaa caagtggtgg gagaacttct ctgaggaagt gaagaaatac |
| 421 | tacttcgtct ttatcagcgg gtccttcaag ggtaaatttg aggaacagct caggagactg |
| 481 | agcatgacta ccggcgtgaa tggcagcgcc gtcaacgtgg tcaatctgct cctgggcgct |
| 541 | gaaaagattc ggagcggaga gatgaccatc gaagagctgg agagggcaat gtttaataat |
| 501 | agcgagttta tcctgaaata cggtggcggt ggatccgata aaaagtattc tattggttta |
| 661 | gccatcggca ctaattccga tggatgggct gtcataaccg atgaatacaa agtaccttca |
| 721 | aagaaattta aggtgttggg gaacacagac cgtcattcga ttaaaaagaa tcttatcggt |
| 781 | gccctcctat tcgatagtgg cgaaacggca gaggcgactc gcctgaaacg aaccgctcgg |
| 841 | agaaggtata cacgtcgcaa gaaccgaata tgttacttac aagaaatttt tagcaatgag |
| 901 | atggccaaag ttgacgattc tttctttcac cgtttggaag agtccttcct tgtcgaagag |
| 961 | gacaagaaac atgaacggca ccccatcttt ggaaacatag tagatgaggt ggcatatcat |
| 1021 | gaaaagtacc caacgattta tcacctcaga aaaaagctag ttgactcaac tgataaagcg |
| 1081 | gacctgaggt taatctactt ggctcttgcc catatgataa agttccgtgg gcactttctc |
| 1141 | attgagggtg atctaaatcc ggacaactcg gatgtcgaca aactgttcat ccagttagta |
| 1201 | caaacctata atcagttgtt tgaagagaac cctataaatg caagtggcgt ggatgcgaag |
| 1261 | gctattctta gcgcccgcct ctctaaatcc cgacggctag aaaacctgat cgcacaatta |
| 1321 | cccggagaga agaaaaatgg gttgttcggt aaccttatag cgctctcact aggcctgaca |
| 1381 | ccaaatttta agtcgaactt cgacttagct gaagatgcca aattgcagct tagtaaggac |
| 1441 | acgtacgatg acgatctcga caatctactg gcacaaattg gagatcagta tgcggactta |
| 1501 | tttttggctg ccaaaaacct tagcgatgca atcctcctat ctgacatact gagagttaat |
| 1561 | actgagatta ccaaggcgcc gttatccgct tcaatgatca aaaggtacga tgaacatcac |
| 1621 | caagacttga cacttctcaa ggccctagtc cgtcagcaac tgcctgagaa atataaggaa |
| 1681 | atattctttg atcagtcgaa aaacgggtac gcaggttata ttgacggcgg agcgagtcaa |
| 1741 | gaggaattct acaagtttat caaacccata ttagagaaga tggatgggac ggaagagttg |
| 1801 | cttgtaaaac tcaatcgcga agatctactg cgaaagcagc ggactttcga caacggtagc |
| 1861 | attccacatc aaatccactt aggcgaattg catgctatac ttagaaggca ggaggatttt |
| 1921 | tatccgttcc tcaaagacaa tcgtgaaaag attgagaaaa tcctaacctt tcgcatacct |
| 1981 | tactatgtgg gacccctggc ccgagggaac tctcggttcg catggatgac aagaaagtcc |
| 2041 | gaagaaacga ttactccatg gaattttgag gaagttgtcg ataaaggtgc gtcagctcaa |
| 2101 | tcgttcatcg agaggatgac caactttgac aagaatttac cgaacgaaaa agtattgcct |
| 2161 | aagcacagtt tactttacga gtatttcaca gtgtacaatg aactcacgaa agttaagtat |
| 2221 | gtcactaagg gcatgcgtaa acccgccttt ctaagcgaag aacagaagaa agcaatagta |
| 2281 | gatctgttat tcaagaccaa ccgcaaagtg acagttaagc aattgaaaga ggactacttt |
| 2341 | aagaaaattg aatgcttcga ttctgtcgag atctccgggg tagaagatcg atttaatgcg |
| 2401 | tcacttggta cgtatcatga cctcctaaag ataattaaag ataaggactt cctggataac |
| 2461 | gaagagaatg aagatatctt agaagatata gtgttgactc ttaccctctt tgaagatcgg |
| 2521 | gaaatgattg aggaaagact aaaaacatac gctcacctgt tcgacgataa ggttatgaaa |
| 2581 | cagttaaaga ggcgtcgcta tacgggctgg ggacgattgt cgcggaaact tatcaacggg |
| 2641 | ataagagaca agcaaagtgg taaaactatt ctcgattttc taaagagcga cggcttcgcc |
| 2701 | aataggaact ttatgcagct gatccatgat gactctttaa ccttcaaaga ggatatacaa |
| 2761 | aaggcacagg tttccggaca aggggactca ttgcacgaac atattgcgaa tcttgctggt |
| 2821 | tcgccagcca tcaaaaaggg catactccag acagtcaaag tagtggatga gctagttaag |
| 2881 | gtcatgggac gtcacaaacc ggaaaacatt gtaatcgaga tggcacgcga aaatcaaacg |
| 2941 | actcagaagg ggcaaaaaaa cagtcgagag cggatgaaga gaatagaaga gggtattaaa |
| 3001 | gaactgggca gccagatctt aaaggagcat cctgtggaaa atacccaatt gcagaacgag |
| 3061 | aaactttacc tctattacct acaaaatgga agggacatgt atgttgatca ggaactggac |
| 3121 | ataaaccgtt tatctgatta cgacgtcgat gccattgtac cccaatcctt tttgaaggac |
| 3181 | gattcaatcg acaataaagc gcttacacgc tcggataaga accgagggaa aagtgacaat |
| 3241 | gttccaagcg aggaagtcgt aaagaaaatg aagaactatt ggcggcagct cctaaatgcg |
| 3301 | aaactgataa cgcaaagaaa gttcgataac ttaactaaag ctgagagggg tggcttgtct |
| 3361 | gaacttgaca aggccggatt tattaaacgt cagctcgtgg aaacccgcca aatcacaaag |
| 3421 | catgttgcac agatactaga ttcccgaatg aatacgaaat acgacgagaa cgataagctg |
| 3481 | attcgggaag tcaaagtaat cactttaaag tcaaaattgg tgtcggactt cagaaaggat |
| 3541 | tttcaattct ataaagttag ggagataaat aactaccacc atgcgcacga cgcttatctt |
| 3601 | aatgccgtcg tagggaccgc actcattaag aaatacccga agctagaaag tgagtttgtg |
| 3661 | tatggtgatt acaaagttta tgacgtccgt aagatgatcg cgaaaagcga acaggagata |
| 3721 | ggcaaggcta cagccaaata cttcttttat tctaacatta tgaatttctt taagacggaa |
| 3781 | atcactctgg caaacggaga gatacgcaaa cgacctttaa ttgaaaccaa tggggagaca |
| 3841 | ggtgaaatcg tatgggataa gggccgggac ttcgcgacgg tgagaaaagt tttgtccatg |
| 3901 | ccccaagtca acatagtaaa gaaaactgag gtgcagaccg gagggttttc aaaggaatcg |
| 3961 | attcttccaa aaaggaatag tgataagctc atcgctcgta aaaaggactg ggacccgaaa |
| 4021 | aagtacggtg gcttcgatag ccctacagtt gcctattctg tcctagtagt ggcaaaagtt |
| 4081 | gagaagggaa aatccaagaa actgaagtca gtcaaagaat tattggggat aacgattatg |
| 4141 | gagcgctcgt cttttgaaaa gaaccccatc gacttccttg aggcgaaagg ttacaaggaa |
| 4201 | gtaaaaaagg atctcataat taaactacca aagtatagtc tgtttgagtt agaaaatggc |
| 4261 | cgaaaacgga tgttggctag cgccggagag cttcaaaagg ggaacgaact cgcactaccg |
| 4321 | tctaaatacg tgaatttcat gtatttagcg tcccattacg agaagttgaa aggttcacct |
| 4381 | gaagataacg aacagaagca actttttgtt gagcagcaca aacattatct cgacgaaatc |
| 4441 | atagagcaaa tttcggaatt cagtaagaga gtcatcctag ctgatgccaa tctggacaaa |
| 4501 | gtattaagcg catacaacaa gcacagggat aaacccatac gtgagcaggc ggaaaatatt |
| 4561 | atccatttgt ttactcttac caacctcggc gctccagccg cattcaagta ttttgacaca |
| 4621 | acgatagatc gcaaacgata cacttctacc aaggaggtgc tagacgcgac actgattcac |
| 4681 | caatccatca cgggattata tgaaactcgg atagatttgt cacagcttgg gggtgacgga |
| 4741 | tcccccaaga agaagaggaa agtctga. |

[0609] In certain embodiments, the nucleic acid sequence encoding a dCas9-Clo051 fusion protein (embodiment 2) of the disclosure may comprise a DNA. In certain embodiments, the nucleic acid sequence encoding a dCas9-Clo051 fusion protein (embodiment 2) of the disclosure may comprise an RNA.

### EXAMPLES

### Example 1: Design of NF-KB Inducible Vectors for Expression in Modified T-Cells

[0610] Two T cell activation NF-KB inducible vectors were developed (FIGS. 1A and B); one with the gene expression system (GES) in the forward orientation (A) and the other in the complementary direction (B), both preceding the constitutive EF1a promoter. These vectors also direct expression of a CAR molecule and a DHFR selection gene, separated by a T2A sequence. Both the conditional NF-KB inducible system and the EF1a directed genes are a part of a piggyBac transposon which can be permanently integrated into T cells using EP. Once integrated into the genome, the T cells constitutively express the CAR on the membrane surface and the DHFR within the cell, while expression of the NF-KB inducible gene, GFP, will be expressed to the highest level only upon T cell activation.

### Example 2: NF-KB Inducible Vectors for GFP Expression in Modified T-Cells

[0611] T cells were nucleofected with a piggyBac vector expressing an anti-BCMA CAR and a DHFR mutein gene under control of an EF1a promoter along with the absence (No gene expression system (GES) control) or presence of an NF-KB inducible expression system driving GFP expression in either the forward (pNFKB-GFP forward) or reverse orientation (pNFKB-GFP reverse). Cells were cultured in the presence of methotrexate selection until the cells were almost completely resting (Day 19) and GFP expression was assessed at Day 5 and Day 19. At Day 5, all T cells are proliferating and highly stimulated, with cells harboring the NF-KB inducible expression cassette producing high levels of GFP due to strong NFκB activity (see FIG. 2). The No GES control cells did not express detectable levels of GFP. By Day 19, the GES T cells were almost fully resting and GFP expression was significantly lower than Day 5 (˜⅛ MFI), since NFκB activity is lower. GFP expression is still observed at Day 19, which may due to the long half-life of GFP protein (˜30 hr), or, basal level of NFκB activity through, for example, a TCR, a CAR, a cytokine receptor, or a growth factor receptor signal.

### Example 3: NF-KB Inducible Vectors for Anti-BCMA CAR-Mediated GFP Expression in Modified T-Cells

[0612] T cells were either unmodified (Mock T cells) or nucleofected with a piggyBac vector expressing an anti-BCMA CAR and a DHFR mutein gene under control of an EF1a promoter along with the absence (No gene expression system (GES) control) or presence of an NF-KB inducible expression system driving GFP expression in either the forward (pNFKB-GFP forward) or reverse orientation (pNFKB-GFP reverse). All cells were cultured for 22 days, either with or without methotrexate selection (Mock T cells), until the cells were almost completely resting. Cells were then stimulated for 3 days in the absence (No stimulation) or presence of BCMA-(K562), BMCA+ (RPMI 8226), or positive control anti-CD3 anti-CD28 activation reagent (CD3/28 stimulation). GFP expression was undetectable under all conditions with the No GES control or Mock T cells. However, while pNFKB-GFP forward- and reverse-transposed cells exhibited little GFP expression over the No stimulation control when cultured with BCMA-K562 cells, they both demonstrated dramatic upregulation of gene expression either in the presence of BCMA+ tumor cells or under positive control conditions (FIG. 3). Little difference in GFP expression was observed between the pNFKB-GFP forward- and reverse-transposed cells that were cocultured with BCMA+ tumor cells.

### Example 4: Control of Anti-BCMA CAR-Mediated Expression in Modified T-Cells

[0613] The expression level of inducible gene can be regulated by the number of response elements upstream or preceding the inducible promoter. T cells were nucleofected with a piggyBac vector encoding an anti-BCMA CARTyrin followed by a selection gene, both under control of a human EF1a promoter (FIG. 4). Further, vectors either additionally encoded the conditional NF-KB inducible gene expression system driving expression of a truncated CD19 protein (dCD19) and included a number of NFKB response elements (RE) varying from 0-5, no GES (No GES), or received an electroporation pulse but no piggyBac nucleic acid (Mock). Data are shown for only the GES in the reverse (opposite) direction/orientation. All cells were cultured for 18 days and included selection for piggyBac-modified T cells using methotrexate addition. Cells were then stimulated for 3 days using anti-CD3 anti-CD28 bead activation reagent and dCD19 surface expression was assessed by FACS at Days 0, 3 and 18, and data are shown as FACS histograms and MFI of target protein staining. Surface dCD19 expression was detected at low levels at Day 0 in all T cells transposed with vectors encoding the GES. At 3 days post-stimulation, dramatic upregulation of dCD19 expression was observed for all T cells expressing the GES, with a greater fold increase in surface expression in those with higher numbers of REs. Thus, surface dCD19 expression was directly proportional with the number of REs encoded in the GES. No dCD19 was detected on the surface of T cells that did not harbor the GES:No GES and Mock controls.

### Example 5: Expression of Human Factor IX in Modified T-Cells

[0614] Genetic deficiencies in Factor IX (FIG. 5) lead to a life threatening disease called Hemophila B. Hemophila B is a rare disease that affects between 1 in 25,000 and 1 in 30,000 people. Prior to the development of the compositions and methods of the disclosure, the standard treatment for Hemophilia B involved an infusion of recombinant Factor IX protein every 2-3 days, at a cost of around $250,000 per year.

[0615] T cells are maintained in humans for several decades, and are therefore an ideal vehicle to secrete Factor IX, supplying the Factor IX missing in Hemophilia B patients without the need for frequent transfusions. T cells were transposed with PiggyBac to secrete Factor IX. When transgenic T cells encoding a human Factor IX transgene were examined for T cell markers using FACS (FIG. 6). These modified T cells were able to secrete human Factor IX (FIG. 7A), and this secreted Factor IX provided clotting activity (FIG. 7B).

### Example 6: Knock Down Efficiency of Checkpoint Signaling Proteins on Armored T-Cells

[0616] Another strategy to produce armored T-cells is to reduce or inhibit endogenous checkpoint signaling by expressing various modified/chimeric checkpoint receptors that have an altered or absent intracellular signaling domain. One mechanism to produce armored T-cells is to inhibit checkpoint signaling is to knockout various checkpoint receptors. The Cas-CLOVER™ platform was used to target and knockout the checkpoint receptors PD-1, TGFβR2, LAG-3, Tim-3, and CTLA-4 in resting (or quiescent) primary pan T cells. As measured by flow cytometry, gene editing resulted in 30-70% loss of protein expression at the cell surface (FIG. 10). These results show that Cas-CLOVER™ is able to efficiently target the knockout of these genes resulting in loss of target protein expression on the T-cell surface. Knockout efficiency can significantly be increased by further optimization of guide RNA pairs, or by using additional guide RNA pairs targeting the same gene and/or regulators or promoters of the target gene.

### Example 7: Strategies for the Expression of Null or Switch Intracellular Signaling Proteins on Armored T-Cells

[0617] Another strategy to produce armored T-cells is to reduce or inhibit endogenous checkpoint signaling by expressing various modified/chimeric checkpoint receptors that have an altered or absent intracellular signaling domain. Checkpoint signals that could be targeted using this strategy include PD-1 or TGFβRII of T-cells, which bind to the PD-L1 ligand and TGFβ cytokine, respectively. FIG. 11 shows a schematic diagram of various strategies for producing decoy/null/dominant negative receptor (Null receptors) for two different inhibitory receptors (PD-1 (top panel) and TGFβRII (bottom panel)). To design Null receptors, the intracellular domain (ICD) of PD1 or TGFβRII can be mutated (mutated null) or deleted (truncated null). As a result, binding of the cognate ligand(s) of the null receptor does not result in delivery of the checkpoint signal to the T-cells. Furthermore, since the Null receptor competes with wildtype receptors for binding of the endogenous ligand(s), any binding by the Null receptor sequesters endogenous ligand(s) from binding the wildtype receptor. This results in dilution of the overall level of checkpoint signaling effectively delivered to the T-cell, thus, reducing or blocking checkpoint inhibition. FIG. 11 also shows switch receptor design strategies for the inhibitory receptors PD-1 (top panel) and TGFβRII (bottom panel). In switch receptors, wildtype ICD is replaced with the ICD from either an immuno-stimulatory molecule (Co-stimulatory switch) or a different inhibitory molecule (Inhibitory switch). Immuno-stimulatory molecules include but are not limited to CD3z, CD28, 4-1BB and the examples listed in Table 2. Inhibitory molecules include but are not limited to CTLA4, PD1, Lag3 and the examples listed in Table 2. In the former case, binding of the endogenous ligand by the modified switch receptor results in the delivery of a positive signal to the T-cells, thereby helping to enhance stimulation of the T-cell, facilitating continuation of tumor targeting and killing. In the latter case, binding of the endogenous ligand by the modified switch receptor results in the delivery of a negative signal to the T-cells, thereby helping to reduce stimulation and activity of the T-cell.

### Example 8: Enhancing Surface Expression of PD1 and TGFβRII Null or Switch Intracellular Signaling Proteins on Armored T-Cells

[0618] To create armored T-cells, a number of truncated null receptors expressing alternative signal peptides (SP) and transmembrane domains TM were designed and tested for maximal expression on the surface of modified T-cells. FIG. 12 shows schematic diagrams of several null receptor constructs for PD-1 (top) and TGFβRII (bottom). Extracellular domains (ECD) of these proteins were modified such that the wildtype signal peptide (SP) and/or the transmembrane domains TM were replaced with that from the human T cell CD8α receptor (red arrows). Each of the six truncated null constructs shown in FIG. 12 were DNA synthesized and then subcloned into an mRNA IVT DNA vector (pRT). High quality mRNA was produced via IVT for each. Transfection of mRNA encoding each of the six molecules was performed using electroporation (EP) delivery into primary human T cells and FACS analysis was performed 24 hours post-EP to evaluate expression level of each construct on the cell surface (FIG. 13). By flow cytometry, replacement of the WT SP with the alternative CD8a (02.8aSP-PD-1 and 02.8aSP-TGFβRII) resulted in the highest level of expression at the T cell surface. 02.8aSP-PD-1 Null receptor exhibited an MFI of 43,680, which is 177-fold higher than endogenous T cell PD-1 expression and 2.8-fold higher than the WT PD-1 Null receptor. 02.8aSP-TGFβRII Null receptor exhibited an MFI of 13,809, which is 102-fold higher than endogenous T cell TGFβRII expression and 1.8-fold higher than the WT TGFβRII Null receptor. These results show that replacement of wildtype SP with the alternative CD8a SP for both PD1 and TGFβRII inhibitory proteins leads to enhanced surface expression of the Null or Switch receptor. This in turn will maximize checkpoint inhibition or co-stimulation, respectively, upon binding of the natural ligand(s).

### INCORPORATION BY REFERENCE

[0619] Every document cited herein, including any cross referenced or related patent or application is hereby incorporated herein by reference in its entirety unless expressly excluded or otherwise limited. The citation of any document is not an admission that it is prior art with respect to any invention disclosed or claimed herein or that it alone, or in any combination with any other reference or references, teaches, suggests or discloses any such invention. Further, to the extent that any meaning or definition of a term in this document conflicts with any meaning or definition of the same term in a document incorporated by reference, the meaning or definition assigned to that term in this document shall govern.

### OTHER EMBODIMENTS

[0620] While particular embodiments of the disclosure have been illustrated and described, various other changes and modifications can be made without departing from the spirit and scope of the disclosure. The scope of the appended claims includes all such changes and modifications that are within the scope of this disclosure.

1.-132. (canceled)

133. A TGFβRII null receptor comprising, in N-terminal to C-terminal order: (a) a CD8α signal peptide and (b) a truncated TGFbRII extracellular domain comprising amino acids 24-191 amino acids of SEQ ID NO: 14646.

134. The TGFβRII null receptor of claim 133, wherein the CD8α signal peptide comprises the sequence of SEQ ID NO: 17000.

135. The TGFβRII null receptor of claim 133, further comprising a TGFβRII transmembrane domain.

136. A cell comprising the TGFβRII null receptor of claim 133.

137. The cell of claim 136, wherein the cell is T-cell.

138. A method of inhibiting endogenous TGFβRII receptor signaling in a cell comprising introducing into the cell the TGFβRII null receptor of claim 133.

139. The method of claim 138, wherein the cell is a T-cell.

140. A method of decreasing exhaustion of a T-cell comprising introducing into the T-cell the TGFβRII null receptor of claim 133.

The application's sequence listing, which the Patent Office published only in electronic form, follows.

SEQUENCE LISTING (17111 sequences)

SEQ ID NO: 1 - protein, 306 aa, Homo sapiens
LTCQAHLETPDFQLFKNGVAQEPVHLDSPAIKHQFLLTGDTQGRYRCRSGLSTGWTQLSKLLELTGPKSLPAPWLSMAPVSWITPGLKTTAVCRGVLRGVTFLLRREGDHEFLEVPEAQEDVEATFPVHQPGNYSCSYRTDGEGALSEPSATVTIEELGPGPGSWPHGCLGLMVAKEFGQRMPKEWKAAPPPPVLMHHGESSQVLHPGNKVTLTCVAPLSGVDFQLRRGEKELLVPRSSTSPDRIFFHLNAVALGDGGHYTCRYRLHDNQNGWSGDSAPVELILSDETLPAPEFSPEPESGRALRL

SEQ ID NO: 2 - protein, 495 aa, Homo sapiens
MSMLVVFLLLWGVTWGPVTEAAIFYETQPSLWAESESLLKPLANVTLTCQAHLETPDFQLFKNGVAQEPVHLDSPAIKHQFLLTGDTQGRYRCRSGLSTGWTQLSKLLELTGPKSLPAPWLSMAPVSWITPGLKTTAVCRGVLRGVTFLLRREGDHEFLEVPEAQEDVEATFPVHQPGNYSCSYRTDGEGALSEPSATVTIEELAAPPPPVLMHHGESSQVLHPGNKVTLTCVAPLSGVDFQLRRGEKELLVPRSSTSPDRIFFHLNAVALGDGGHYTCRYRLHDNQNGWSGDSAPVELILSDETLPAPEFSPEPESGRALRLRCLAPLEGARFALVREDRGGRRVHRFQSPAGTEALFELHNISVADSANYSCVYVDLKPPFGGSAPSERLELHVDGPPPRPQLRATWSGAVLAGRDAVLRCEGPIPDVTFELLREGETKAVKTVRTPGAAANLELIFVGPQHAGNYRCRYRSWVPHTFESELSDPVELLVAES

SEQ ID NO: 3 - protein, 90 aa, Homo sapiens
MGKNKLLHPSLVLLLLVLLPTDASVSGKPQYMVLVPSLLHTETTEKGCVLLSYLNETVTVSASLESVRGNRSLFTDLEAENDVLHCVAFA

SEQ ID NO: 4 - protein, 168 aa, Homo sapiens
MGKNKLLHPSLVLLLLVLLPTDASVSGKPQYMVLVPSLLHTETTEKGCVLLSYLNETVTVSASLESVRGNRSLFTDLEAENDVLHCVAFAVPKSSSNEEVMFLTVQVKGPTQEFKKRTTVMVKNEDSLVFVQTDKSIYKPGQTVKFRVVSMDENFHPLNELIPLVYIQ

SEQ ID NO: 5 - protein, 1474 aa, Homo sapiens
MGKNKLLHPSLVLLLLVLLPTDASVSGKPQYMVLVPSLLHTETTEKGCVLLSYLNETVTVSASLESVRGNRSLFTDLEAENDVLHCVAFAVPKSSSNEEVMFLTVQVKGPTQEFKKRTTVMVKNEDSLVFVQTDKSIYKPGQTVKFRVVSMDENFHPLNELIPLVYIQDPKGNRIAQWQSFQLEGGLKQFSFPLSSEPFQGSYKVVVQKKSGGRTEHPFTVEEFVLPKFEVQVTVPKIITILEEEMNVSVCGLYTYGKPVPGHVTVSICRKYSDASDCHGEDSQAFCEKFSGQLNSHGCFYQQVKTKVFQLKRKEYEMKLHTEAQIQEEGTVVELTGRQSSEITRTITKLSFVKVDSHFRQGIPFFGQVRLVDGKGVPIPNKVIFIRGNEANYYSNATTDEHGLVQFSINTTNVMGTSLTVRVNYKDRSPCYGYQWVSEEHEEAHHTAYLVFSPSKSFVHLEPMSHELPCGHTQTVQAHYILNGGTLLGLKKLSFYYLIMAKGGIVRTGTHGLLVKQEDMKGHFSISIPVKSDIAPVARLLIYAVLPTGDVIGDSAKYDVENCLANKVDLSFSPSQSLPASHAHLRVTAAPQSVCALRAVDQSVLLMKPDAELSASSVYNLLPEKDLTGFPGPLNDQDNEDCINRHNVYINGITYTPVSSTNEKDMYSFLEDMGLKAFTNSKIRKPKMCPQLQQYEMHGPEGLRVGFYESDVMGRGHARLVHVEEPHTETVRKYFPETWIWDLVVVNSAGVAEVGVTVPDTITEWKAGAFCLSEDAGLGISSTASLRAFQPFFVELTMPYSVIRGEAFTLKATVLNYLPKCIRVSVQLEASPAFLAVPVEKEQAPHCICANGRQTVSWAVTPKSLGNVNFTVSAEALESQELCGTEVPSVPEHGRKDTVIKPLLVEPEGLEKETTFNSLLCPSGGEVSEELSLKLPPNVVEESARASVSVLGDILGSAMQNTQNLLQMPYGCGEQNMVLFAPNIYVLDYLNETQQLTPEIKSKAIGYLNTGYQRQLNYKHYDGSYSTFGERYGRNQGNTWLTAFVLKTFAQARAYIFIDEAHITQALIWLSQRQKDNGCFRSSGSLLNNAIKGGVEDEVTLSAYITIALLEIPLTVTHPVVRNALFCLESAWKTAQEGDHGSHVYTKALLAYAFALAGNQDKRKEVLKSLNEEAVKKDNSVHWERPQKPKAPVGHFYEPQAPSAEVEMTSYVLLAYLTAQPAPTSEDLTSATNIVKWITKQQNAQGGFSSTQDTVVALHALSKYGAATFTRTGKAAQVTIQSSGTFSSKFQVDNNNRLLLQQVSLPELPGEYSMKVTGEGCVYLQTSLKYNILPEKEEFPFALGVQTLPQTCDEPKAHTSFQISLSVSYTGSRSASNMAIVDVKMVSGFIPLKPTVKMLERSNHVSRTEVSSNHVLIYLDKVSNQTLSLFFTVLQDVPVRDLKPAIVKVYDYYETDEFAIAEYNAPCSKDLGNA

SEQ ID NO: 6 - protein, 73 aa, Homo sapiens
NGGTLLGLKKLSFYYLIMAKGGIVRTGTHGLLVKQEDMKGHFSISIPVKSDIAPVARFTTCYQKRTSLASLGL

SEQ ID NO: 7 - protein, 183 aa, Homo sapiens
MLGELIGKGSLVMEGQKHLNSKKKGLKASFSLSLTFTSRLAPDPSLVIYAIFPSGGVVADKIQFSVEMCFDNQVSLGFSPSQQLPGAEVELQLQAAPGSLCALRAVDESVLLLRPDRELSNRSVYGMFPFWYGHYPYQVAEYDQCPVSGPWDFPQPLIDPMPQGHSSQRSIIWRPSFSEGTDL

SEQ ID NO: 8 - protein, 963 aa, Homo sapiens
MLIGKGSLVMEGQKHLNSKKKGLKASFSLSLTFTSRLAPDPSLVIYAIFPSGGVVADKIQFSVEMCFDNQVSLGFSPSQQLPGAEVELQLQAAPGSLCALRAVDESVLLLRPDRELSNRSVYGMFPFWYGHYPYQVAEYDQCPVSGPWDFPQPLIDPMPQGHSSQRSIIWRPSFSEGTDLFSFFRDVGLKILSNAKIKKPVDCSHRSPEYSTAMGAGGGHPEAFESSTPLHQAEDSQVRQYFPETWLWDLFPIGNSGKEAVHVTVPDAITEWKAMSFCTSQSRGFGLSPTVGLTAFKPFFVDLTLPYSVVRGESFRLTATIFNYLKDCIRVQTDLAKSHEYQLESWADSQTSSCLCADDAKTHHWNITAVKLGHINFTISTKILDSNEPCGGQKGFVPQKGRSDTLIKPVLVKPEGVLVEKTHSSLLCPKGKVASESVSLELPVDIVPDSTKAYVTVLGDIMGTALQNLDGLVQMPSGCGEQNMVLFAPIIYVLQYLEKAGLLTEEIRSRAVGFLEIGYQKELMYKHSNGSYSAFGERDGNGNTWLTAFVTKCFGQAQKFIFIDPKNIQDALKWMAGNQLPSGCYANVGNLLHTAMKGGVDDEVSLTAYVTAALLEMGKDVDDPMVSQGLRCLKNSATSTTNLYTQALLAYIFSLAGEMDIRNILLKQLDQQAIISGESIYWSQKPTPSSNASPWSEPAAVDVELTAYALLAQLTKPSLTQKEIAKATSIVAWLAKQHNAYGGFSSTQDTVVALQALAKYATTAYMPSEEINLVVKSTENFQRTFNIQSVNRLVFQQDTLPNVPGMYTLEASGQGCVYVQTVLRYNILPPTNMKTFSLSVEIGKARCEQPTSPRSLTLTIHTSYVGSRSSSNMAIVEVKMLSGFSPMEGTNQLLLQQPLVKKVEFGTDTLNIYLDELIKNTQTYTFTISQSVLVTNLKPATIKVYDYYLPDEQATIQYSDPCE

SEQ ID NO: 9 - protein, 81 aa, Homo sapiens
MVRNNFYAVRLLPSTCVVLSQTSNCRRSHQDPLAASCICQASGCWLIGKGSLVMEGQKHLNSKKKGLKASFSLSLTFTSRL

SEQ ID NO: 10 - protein, 1454 aa, Homo sapiens
MWAQLLLGMLALSPAIAEELPNYLVTLPARLNFPSVQKVCLDLSPGYSDVKFTVTLETKDKTQKLLEYSGLKKRHLHCISFLVPPPAGGTEEVATIRVSGVGNNISFEEKKKVLIQRQGNGTFVQTDKPLYTPGQQVYFRIVTMDSNFVPVNDKYSMVELQDPNSNRIAQWLEVVPEQGIVDLSFQLAPEAMLGTYTVAVAEGKTFGTFSVEEYVLPKFKVEVVEPKELSTVQESFLVKICCRYTYGKPMLGAVQVSVCQKANTYWYREVEREQLPDKCRNLSGQTDKTGCFSAPVDMATFDLIGYAYSHQINIVATVVEEGTGVEANATQNIYISPQMGSMTFEDTSNFYHPNFPFSGKIRVRGHDDSFLKNHLVFLVIYGTNGTFNQTLVTDNNGLAPFTLETSGWNGTDVSLEGKFQMEDLVYNPEQVPRYYQNAYLHLRPFYSTTRSFLGIHRLNGPLKCGQPQEVLVDYYIDPADASPDQEISFSYYLIGKGSLVMEGQKHLNSKKKGLKASFSLSLTFTSRLAPDPSLVIYAIFPSGGVVADKIQFSVEMCFDNQVSLGFSPSQQLPGAEVELQLQAAPGSLCALRAVDESVLLLRPDRELSNRSVYGMFPFWYGHYPYQVAEYDQCPVSGPWDFPQPLIDPMPQGHSSQRSIIWRPSFSEGTDLFSFFRDVGLKILSNAKIKKPVDCSHRSPEYSTAMGAGGGHPEAFESSTPLHQAEDSQVRQYFPETWLWDLFPIGNSGKEAVHVTVPDAITEWKAMSFCTSQSRGFGLSPTVGLTAFKPFFVDLTLPYSVVRGESFRLTATIFNYLKDCIRVQTDLAKSHEYQLESWADSQTSSCLCADDAKTHHWNITAVKLGHINFTISTKILDSNEPCGGQKGFVPQKGRSDTLIKPVLVKPEGVLVEKTHSSLLCPKGKVASESVSLELPVDIVPDSTKAYVTVLGDIMGTALQNLDGLVQMPSGCGEQNMVLFAPIIYVLQYLEKAGLLTEEIRSRAVGFLEIGYQKELMYKHSNGSYSAFGERDGNGNTWLTAFVTKCFGQAQKFIFIDPKNIQDALKWMAGNQLPSGCYANVGNLLHTAMKGGVDDEVSLTAYVTAALLEMGKDVDDPMVSQGLRCLKNSATSTTNLYTQALLAYIFSLAGEMDIRNILLKQLDQQAIISGESIYWSQKPTPSSNASPWSEPAAVDVELTAYALLAQLTKPSLTQKEIAKATSIVAWLAKQHNAYGGFSSTQDTVVALQALAKYATTAYMPSEEINLVVKSTENFQRTFNIQSVNRLVFQQDTLPNVPGMYTLEASGQGCVYVQTVLRYNILPPTNMKTFSLSVEIGKARCEQPTSPRSLTLTIHTSYVGSRSSSNMAIVEVKMLSGFSPMEGTNQLLLQQPLVKKVEFGTDTLNIYLDELIKNTQTYTFTISQSVLVTNLKPATIKVYDYYLPDEQATIQYSDPCE

SEQ ID NO: 11 - protein, 1004 aa, Homo sapiens
SFLGIHRLNGPLKCGQPQEVLVDYYIDPADASPDQEISFSYYLIGKGSLVMEGQKHLNSKKKGLKASFSLSLTFTSRLAPDPSLVIYAIFPSGGVVADKIQFSVEMCFDNQVSLGFSPSQQLPGAEVELQLQAAPGSLCALRAVDESVLLLRPDRELSNRSVYGMFPFWYGHYPYQVAEYDQCPVSGPWDFPQPLIDPMPQGHSSQRSIIWRPSFSEGTDLFSFFRDVGLKILSNAKIKKPVDCSHRSPEYSTAMGAGGGHPEAFESSTPLHQAEDSQVRQYFPETWLWDLFPIGNSGKEAVHVTVPDAITEWKAMSFCTSQSRGFGLSPTVGLTAFKPFFVDLTLPYSVVRGESFRLTATIFNYLKDCIRVQTDLAKSHEYQLESWADSQTSSCLCADDAKTHHWNITAVKLGHINFTISTKILDSNEPCGGQKGFVPQKGRSDTLIKPVLVKPEGVLVEKTHSSLLCPKGKVASESVSLELPVDIVPDSTKAYVTVLGDIMGTALQNLDGLVQMPSGCGEQNMVLFAPIIYVLQYLEKAGLLTEEIRSRAVGFLEIGYQKELMYKHSNGSYSAFGERDGNGNTWLTAFVTKCFGQAQKFIFIDPKNIQDALKWMAGNQLPSGCYANVGNLLHTAMKGGVDDEVSLTAYVTAALLEMGKDVDDPMVSQGLRCLKNSATSTTNLYTQALLAYIFSLAGEMDIRNILLKQLDQQAIISGESIYWSQKPTPSSNASPWSEPAAVDVELTAYALLAQLTKPSLTQKEIAKATSIVAWLAKQHNAYGGFSSTQDTVVALQALAKYATTAYMPSEEINLVVKSTENFQRTFNIQSVNRLVFQQDTLPNVPGMYTLEASGQGCVYVQTVLRYNILPPTNMKTFSLSVEIGKARCEQPTSPRSLTLTIHTSYVGSRSSSNMAIVEVKMLSGFSPMEGTNQLLLQQPLVKKVEFGTDTLNIYLDELIKNTQTYTFTISQSVLVTNLKPATIKVYDYYLPDEQATIQYSDPCE

SEQ ID NO: 12 - protein, 182 aa, Homo sapiens
  VARIANT 1: note = misc_feature - Xaa can be any naturally occurring amino acid
XRTFNIQSVNRLVFQQDTLPNVPGMYTLEASGQGCVYVQTVLRYNILPPTNMKTFSLSVEIGKARCEQPTSPRSLTLTIHTSYVGSRSSSNMAIVEVKMLSGFSPMEGTNQLLLQQPLVKKVEFGTDTLNIYLDELIKNTQTYTFTISQSVLVTNLKPATIKVYDYYLPDEQATIQYSDPCE

SEQ ID NO: 13 - protein, 340 aa, Homo sapiens
MRKELQLSLSVTLLLVCGFLYQFTLKSSCLFCLPSFKSHQGLEALLSHRRGIVFLETSERMEPPHLVSCSVESAAKIYPEWPVVFFMKGLTDSTPMPSNSTYPAFSFLSAIDNVFLFPLDMKRLLEDTPLFSWYNQINASAERNWLHISSDASRLAIIWKYGGIYMDTDVISIRPIPEENFLAAQASRYSSNGIFGFLPHHPFLWECMENFVEHYNSAIWGNQGPELMTRMLRVWCKLEDFQEVSDLRCLNISFLHPQRFYPISYREWRRYYEVWDTEPSFNVSYALHLWNHMNQEGRAVIRGSNTLVENLYRKHCPRTYRDLIKGPEGSVTGELGPGNK

SEQ ID NO: 14 - protein, 401 aa, Homo sapiens
MGLKALCLGLLCVLFVSHFYTPMPDNIEESWKIMALDAIAKTCTFTAMCFENMRIMRYEEFISMIFRLDYTQPLSDEYITVTDTTFVDIPVRLYLPKRKSETRRRAVIYFHGGGFCFGSSKQRAFDFLNRWTANTLDAVVVGVDYRLAPQHHFPAQFEDGLAAVKFFLLEKILTKYGVDPTRICIAGDSSGGNLATAVTQQVQNDAEIKHKIKMQVLLYPGLQITDSYLPSHRENEHGIVLTRDVAIKLVSLYFTKDEALPWAMRRNQHMPLESRHLFKFVNWSILLPEKYRKDYVYTEPILGGLSYSLPGLTDSRALPLLANDSQLQNLPLTYILTCQHDLLRDDGLMYVTRLRNVGVQVVHEHIEDGIHGALSFMTSPFYLRLGLRIRDMYVSWLDKNL

SEQ ID NO: 15 - protein, 53 aa, Homo sapiens
MGLKALCLGLLCVLFVSHFYTPMPDNIEESWKIMALDAIAKTCTFTNRGLLTS

SEQ ID NO: 16 - protein, 252 aa, Homo sapiens
MEPQSMKGQKRPFGGPWRLKVLGGPPWLRRTLPKLGRPKEAPVARMSTQSTHPLKPEAPRLPPGIPESPSCQRRHTLPASEFRCLTPEDAVSAFEIEREAFISVLGVCPLYLDEIRHFLTLCPELSLGWFEEGCLVAFIIGSLWDKERLMQESLTLHRSGGHIAHLHVLAVHRAFRQQGRGPILLWRYLHHLGSQPAVRRAALMCEDALVPFYERFSFHAVGPCAITVGSLTFMELHCSLRGHPFLRRNSGC

SEQ ID NO: 17 - protein, 152 aa, Homo sapiens [sequence omitted]

SEQ ID NO: 18 - protein, 207 aa, Homo sapiens
MSTQSTHPLKPEAPRLPPGIPESPSCQRRHTLPASEFRCLTPEDAVSAFEIEREAFISVLGVCPLYLDEIRHFLTLCPELSLGWFEEGCLVAFIIGSLWDKERLMQESLTLHRSGGHIAHLHVLAVHRAFRQQGRGPILLWRYLHHLGSQPAVRRAALMCEDALVPFYERFSFHAVGPCAITVGSLTFMELHCSLRGHPFLRRNSGC

SEQ ID NO: 19 - protein, 92 aa, Homo sapiens
MSTQSTHPLKPEAPRLPPGIPESPSCQRRHTLPASEFRCLTPEDAVSAFEIEREDSGREAQRLPVTHLSLLPQPSSPSWASAPCTWMRSGTS

SEQ ID NO: 20 - protein, 257 aa, Homo sapiens
MACLMAAFSVGTAMNASSYSAEMTEPKSVCVSVDEVVSSNMEATETDLLNGHLKKVDNNLTEAQRFSSLPRRAAVNIEFRDLSYSVPEGPWWRKKGYKTLLKGISGKFNSGELVAIMGPSGAGKSTLMNILAGYRETGMKGAVLINGLPRDLRCFRKVSCYIMQDDMLLPHLTVQEAMMVKEILTALGLLSCANTRTGSLSGGQRKRLAIALELVNNPPVMFFDEPTSGLDSASCFQVVSLMKGLAQGGRSIICTIH

SEQ ID NO: 21 - protein, 678 aa, Homo sapiens
MACLMAAFSVGTAMNASSYSAEMTEPKSVCVSVDEVVSSNMEATETDLLNGHLKKVDNNLTEAQRFSSLPRRAAVNIEFRDLSYSVPEGPWWRKKGYKTLLKGISGKFNSGELVAIMGPSGAGKSTLMNILAGYRETGMKGAVLINGLPRDLRCFRKVSCYIMQDDMLLPHLTVQEAMMVSAHLKLQEKDEGRREMVKEILTALGLLSCANTRTGSLSGGQRKRLAIALELVNNPPVMFFDEPTSGLDSASCFQVVSLMKGLAQGGRSIICTIHQPSAKLFELFDQLYVLSQGQCVYRGKVCNLVPYLRDLGLNCPTYHNPADFVMEVASGEYGDQNSRLVRAVREGMCDSDHKRDLGGDAEVNPFLWHRPSEEVKQTKRLKGLRKDSSSMEGCHSFSASCLTQFCILFKRTFLSIMRDSVLTHLRITSHIGIGLLIGLLYLGIGNEAKKVLSNSGFLFFSMLFLMFAALMPTVLTFPLEMGVFLREHLNYWYSLKAYYLAKTMADVPFQIMFPVAYCSIVYWMTSQPSDAVRFVLFAALGTMTSLVAQSLGLLIGAASTSLQVATFVGPVTAIPVLLFSGFFVSFDTIPTYLQWMSYISYVRYGFEGVILSIYGLDREDLHCDIDETCHFQKSEAILRELDVENAKLYLDFIVLGIFFISLRLIAYFVLRYKIRAER

SEQ ID NO: 22 - protein, 666 aa, Homo sapiens
MACLMAAFSVGTAMNASSYSAEMTEPKSVCVSVDEVVSSNMEATETDLLNGHLKKVDNNLTEAQRFSSLPRRAAVNIEFRDLSYSVPEGPWWRKKGYKTLLKGISGKFNSGELVAIMGPSGAGKSTLMNILAGYRETGMKGAVLINGLPRDLRCFRKVSCYIMQDDMLLPHLTVQEAMMVSAHLKLQEKDEGRREMVKEILTALGLLSCANTRTGSLSGGQRKRLAIALELVNNPPVMFFDEPTSGLDSASCFQVVSLMKGLAQGGRSIICTIHQPSAKLFELFDQLYVLSQGQCVYRGKVCNLVPYLRDLGLNCPTYHNPADFVMEVASGEYGDQNSRLVRAVREGMCDSDHKRDLGGDAEVNPFLWHRPSEEDSSSMEGCHSFSASCLTQFCILFKRTFLSIMRDSVLTHLRITSHIGIGLLIGLLYLGIGNEAKKVLSNSGFLFFSMLFLMFAALMPTVLTFPLEMGVFLREHLNYWYSLKAYYLAKTMADVPFQIMFPVAYCSIVYWMTSQPSDAVRFVLFAALGTMTSLVAQSLGLLIGAASTSLQVATFVGPVTAIPVLLFSGFFVSFDTIPTYLQWMSYISYVRYGFEGVILSIYGLDREDLHCDIDETCHFQKSEAILRELDVENAKLYLDFIVLGIFFISLRLIAYFVLRYKIRAER

SEQ ID NO: 23 - protein, 663 aa, Homo sapiens
MIMRLPQPHGTNASSYSAEMTEPKSVCVSVDEVVSSNMEATETDLLNGHLKKVDNNLTEAQRFSSLPRRAAVNIEFRDLSYSVPEGPWWRKKGYKTLLKGISGKFNSGELVAIMGPSGAGKSTLMNILAGYRETGMKGAVLINGLPRDLRCFRKVSCYIMQDDMLLPHLTVQEAMMVSAHLKLQEKDEGRREMVKEILTALGLLSCANTRTGSLSGGQRKRLAIALELVNNPPVMFFDEPTSGLDSASCFQVVSLMKGLAQGGRSIICTIHQPSAKLFELFDQLYVLSQGQCVYRGKVCNLVPYLRDLGLNCPTYHNPADFVMEVASGEYGDQNSRLVRAVREGMCDSDHKRDLGGDAEVNPFLWHRPSEEDSSSMEGCHSFSASCLTQFCILFKRTFLSIMRDSVLTHLRITSHIGIGLLIGLLYLGIGNEAKKVLSNSGFLFFSMLFLMFAALMPTVLTFPLEMGVFLREHLNYWYSLKAYYLAKTMADVPFQIMFPVAYCSIVYWMTSQPSDAVRFVLFAALGTMTSLVAQSLGLLIGAASTSLQVATFVGPVTAIPVLLFSGFFVSFDTIPTYLQWMSYISYVRYGFEGVILSIYGLDREDLHCDIDETCHFQKSEAILRELDVENAKLYLDFIVLGIFFISLRLIAYFVLRYKIRAER

SEQ ID NO: 24 - protein, 824 aa, Homo sapiens
MLAVQQTEHLPACPPARRWSSNFCPESTEGGPSLLGLRDMVRRGWSVCTAILLARLWCLVPTHTFLSEYPEAAEYPHPGWVYWLQMAVAPGHLRAWVMRNNVTTNIPSAFSGTLTHEEKAVLTVFTGTATAVHVQVAALASAKLESSVFVTDCVSCKIENVCDSALQGKRVPMSGLQGSSIVIMPPSNRPLASAASCTWSVQVQGGPHHLGVVAISGKVLSAAHGAGRAYGWGFPGDPMEEGYKTLLKGISGKFNSGELVAIMGPSGAGKSTLMNILAGYRETGMKGAVLINGLPRDLRCFRKVSCYIMQDDMLLPHLTVQEAMMVSAHLKLQEKDEGRREMVKEILTALGLLSCANTRTGSLSGGQRKRLAIALELVNNPPVMFFDEPTSGLDSASCFQVVSLMKGLAQGGRSIICTIHQPSAKLFELFDQLYVLSQGQCVYRGKVCNLVPYLRDLGLNCPTYHNPADFVMEVASGEYGDQNSRLVRAVREGMCDSDHKRDLGGDAEVNPFLWHRPSEEVKQTKRLKGLRKDSSSMEGCHSFSASCLTQFCILFKRTFLSIMRDSVLTHLRITSHIGIGLLIGLLYLGIGNEAKKVLSNSGFLFFSMLFLMFAALMPTVLTFPLEMGVFLREHLNYWYSLKAYYLAKTMADVPFQIMFPVAYCSIVYWMTSQPSDAVRFVLFAALGTMTSLVAQSLGLLIGAASTSLQVATFVGPVTAIPVLLFSGFFVSFDTIPTYLQWMSYISYVRYGFEGVILSIYGLDREDLHCDIDETCHFQKSEAILRELDVENAKLYLDFIVLGIFFISLRLIAYFVLRYKIRAER

SEQ ID NO: 25 - protein, 668 aa, Homo sapiens
MLGTQGWTKQRKPCPQNASSYSAEMTEPKSVCVSVDEVVSSNMEATETDLLNGHLKKVDNNLTEAQRFSSLPRRAAVNIEFRDLSYSVPEGPWWRKKGYKTLLKGISGKFNSGELVAIMGPSGAGKSTLMNILAGYRETGMKGAVLINGLPRDLRCFRKVSCYIMQDDMLLPHLTVQEAMMVSAHLKLQEKDEGRREMVKEILTALGLLSCANTRTGSLSGGQRKRLAIALELVNNPPVMFFDEPTSGLDSASCFQVVSLMKGLAQGGRSIICTIHQPSAKLFELFDQLYVLSQGQCVYRGKVCNLVPYLRDLGLNCPTYHNPADFVMEVASGEYGDQNSRLVRAVREGMCDSDHKRDLGGDAEVNPFLWHRPSEEDSSSMEGCHSFSASCLTQFCILFKRTFLSIMRDSVLTHLRITSHIGIGLLIGLLYLGIGNEAKKVLSNSGFLFFSMLFLMFAALMPTVLTFPLEMGVFLREHLNYWYSLKAYYLAKTMADVPFQIMFPVAYCSIVYWMTSQPSDAVRFVLFAALGTMTSLVAQSLGLLIGAASTSLQVATFVGPVTAIPVLLFSGFFVSFDTIPTYLQWMSYISYVRYGFEGVILSIYGLDREDLHCDIDETCHFQKSEAILRELDVENAKLYLDFIVLGIFFISLRLIAYFVLRYKIRAER

SEQ ID NO: 26 - protein, 677 aa, Homo sapiens
MRISLPRAPERDGGVSASSLLDTVTNASSYSAEMTEPKSVCVSVDEVVSSNMEATETDLLNGHLKKVDNNLTEAQRFSSLPRRAAVNIEFRDLSYSVPEGPWWRKKGYKTLLKGISGKFNSGELVAIMGPSGAGKSTLMNILAGYRETGMKGAVLINGLPRDLRCFRKVSCYIMQDDMLLPHLTVQEAMMVSAHLKLQEKDEGRREMVKEILTALGLLSCANTRTGSLSGGQRKRLAIALELVNNPPVMFFDEPTSGLDSASCFQVVSLMKGLAQGGRSIICTIHQPSAKLFELFDQLYVLSQGQCVYRGKVCNLVPYLRDLGLNCPTYHNPADFVMEVASGEYGDQNSRLVRAVREGMCDSDHKRDLGGDAEVNPFLWHRPSEEDSSSMEGCHSFSASCLTQFCILFKRTFLSIMRDSVLTHLRITSHIGIGLLIGLLYLGIGNEAKKVLSNSGFLFFSMLFLMFAALMPTVLTFPLEMGVFLREHLNYWYSLKAYYLAKTMADVPFQIMFPVAYCSIVYWMTSQPSDAVRFVLFAALGTMTSLVAQSLGLLIGAASTSLQVATFVGPVTAIPVLLFSGFFVSFDTIPTYLQWMSYISYVRYGFEGVILSIYGLDREDLHCDIDETCHFQKSEAILRELDVENAKLYLDFIVLGIFFISLRLIAYFVLRYKIRAER

SEQ ID NO: 27 - protein, 177 aa, Homo sapiens
MAPGQTPSLCSWLLPLPSTWATTGHVCFSDILQTPDGGQLLLDWAKQPDSSQDPDPTTQPIVLLLPGITGSSQETYVLHLVNQALRDGYQAVVFNNRGCRGEELRTHRAFCASNTEDLETVVNHIKHRYPQAPLLAVGISFGGILVLNHLAQARQAAGLVAALTLSACWDSFETTRS

SEQ ID NO: 28 - protein, 102 aa, Homo sapiens
MAPGQTPSLCSWLLPLPSTWATTGHVCFSDILQTPDGGQLLLDWAKQPDSSQDPDPTTQPIVLLLPGITGSSQETYVLHLVNQALRDGYQPTGLFVPAILKI

SEQ ID NO: 29 - protein, 405 aa, Homo sapiens
MLSSFLSPQNGTWADTFSLLLALAVALYLGYYWACVLQRPRLVAGPQFLAFLEPHCSITTETFYPTLWCFEGRLQSIFQVLLQSQPLVLYQSDILQTPDGGQLLLDWAKQPDSSQDPDPTTQPIVLLLPGITGSSQETYVLHLVNQALRDGYQAVVFNNRGCRGEELRTHRAFCASNTEDLETVVNHIKHRYPQAPLLAVGISFGGILVLNHLAQARQAAGLVAALTLSACWDSFETTRSLETPLNSLLFNQPLTAGLCQLVERNRKVIEKVVDIDFVLQARTIRQFDERYTSVAFGYQDCVTYYKAASPRTKIDAIRIPVLYLSAADDPFSPVCALPIQAAQHSPYVALLITARGGHIGFLEGLLPWQHWYMSRLLHQYAKAIFQDPEGLPDLRALLPSEDRNS

SEQ ID NO: 30 - protein, 305 aa, Homo sapiens
MLSSFLSPQNGTWADTFSLLLALAVALYLGYYWACVLQRPRLVAGPQFLAFLEPHCSITTETFYPTLWCFEGRLQSIFQVLLQSQPLVLYQSDILQTPDGGQLLLDWAKQPDSSQDPDPTTQPIVLLLPGITGSSQETYVLHLVNQALRDGYQAVVFNNRGCRGEELRTHRAFCASNTEDLETVVNHIKHRYPQAPLLAVGISFGGILVLNHLAQARQAAGLVAALTLSACWDSFETTRSLETPLNSLLFNQPLTAGLCQLVERLSYGKTCRPVQSASLMSATHLWPLDIKTVLPTTKQQALEPR

SEQ ID NO: 31 - protein, 305 aa, Homo sapiens; identical to SEQ ID NO: 30

SEQ ID NO: 32 - protein, 205 aa, Homo sapiens
MAVARLAAVAAWVPCRSWGWAAVPFGPHRGLSVLLARIPQRAPRWLPACRQKTSLSFLNRPDLPNLAYKKLKGKSPGIIFIPGYLSYMNGTKALAIEEFCKSLGHACIRFDYSGVGSSDGNSEESTLGKWRKDVLSIIDDLADGPQILVGSSLGGWLMLHAAIARPEKVVALIGVATAADTLVTKFNQLPVEDSGRKNYISLHSA

SEQ ID NO: 33 - protein, 306 aa, Homo sapiens
MAVARLAAVAAWVPCRSWGWAAVPFGPHRGLSVLLARIPQRAPRWLPACRQKTSLSFLNRPDLPNLAYKKLKGKSPGIIFIPGYLSYMNGTKALAIEEFCKSLGHACIRFDYSGVGSSDGNSEESTLGKWRKDVLSIIDDLADGPQILVGSSLGGWLMLHAAIARPEKVVALIGVATAADTLVTKFNQLPVELKKEVEMKGVWSMPSKYSEEGVYNVQYSFIKEAEHHCLLHSPIPVNCPIRLLHGMKDDIVPWHTSMQVADRVLSTDVDVILRKHSDHRMREKADIQLLVYTIDDLIDKLSTIVN

SEQ ID NO: 34 - protein, 52 aa, Homo sapiens
MAVARLAAVAAWVPCRSWGWAAVPFGPHRGLSVLLARIPQRAPRWLPDSCWI

SEQ ID NO: 35 - protein, 75 aa, Homo sapiens
MAVARLAAVAAWVPCRSWGWAAVPFGPHRGLSVLLARIPQRAPRWLPGLITQELEVQMVTQRKAHWGNGEKMFFL

SEQ ID NO: 36 - protein, 229 aa, Homo sapiens [sequence omitted]

SEQ ID NO: 37 - protein, 225 aa, Homo sapiens [sequence omitted]

SEQ ID NO: 38 - protein, 153 aa, Homo sapiens [sequence omitted]

SEQ ID NO: 39 - protein, 124 aa, Homo sapiens
MVGALCGCWFRLGGARPLIPLGPTVVQTSMSRSQVALLGLSLLLMLLLYVGLPGPPEQTSCLWGDPNVTVLAGLTPGNSPIFYREVLPLNQAHRLQPLSCMESWTTSWLESHCGSSATCPTTLW

SEQ ID NO: 40 - protein, 271 aa, Homo sapiens
MVGALCGCWFRLGGARPLIPLGPTVVQTSMSRSQVALLGLSLLLMLLLYVGLPGPPEQTSCLWGDPNVTVLAGLTPGNSPIFYREVLPLNQAHRVEVVLLHGKAFNSHTWEQLGTLQLLSQRGYRAVALDLPGFGNSAPSKEASTEAGRAALLERALRDLEVQNAVLVSPSLSGHYALPFLMRGHHQLHGFVPIAPTSTQNYTQEQFWAVKTPTLILYGELDHILARESLRQLRHLPNHSVVKLRNAGHACYLHKPQDFHLVLLAFLDHLP

SEQ ID NO: 41 - protein, 468 aa, Homo sapiens
MPPWGAALALILAVLALLGLLGPRLRGPWGRAVGERTLPGAQDRDDGEEADGGGPADQFSDGREPLPGGCSLVCKPSALAQCLLRALRRSEALEAGPRSWFSGPHLQTLCHFVLPVAPGPELAREYLQLADDGLVALDWVVGPCVRGRRITSAGGLPAVLLVIPNAWGRLTRNVLGLCLLALERGYYPVIFHRRGHHGCPLVSPRLQPFGDPSDLKEAVTYIRFRHPAAPLFAVSEGSGSALLLSYLGECGSSSYVTGAACISPVLRCREWFEAGLPWPYERGFLLHQKIALSRYATALEDTVDTSRLFRSRSLREFEEALFCHTKSFPISWDTYWDRNDPLRDVDEAAVPVLCICSADDPVCGPPDHTLTTELFHSNPYFFLLLSRHGGHCGFLRQEPLPAWSHEVILESFRALTEFFRTEERIKGLSRHRASFLGGRRRGGALQRREVSSSSNLEEIFNWKRSYTR

SEQ ID NO: 42 - protein, 191 aa, Homo sapiens
CIVVLWYGWLHFYAEPKYLIVVRPAPPPSQKKSCSGKTRSRKPLQLVVGTLTPSSVFLSWGFLINPHHDWTLPSHCPNDRFYTIRYREKDKEKKWIFQICPATETIVENLKPNTVYEFGVKDNVEGGIWSKIFNHKTVVGSKKVNGKIQSTYDQDHTVPAYVPRKLIPITIIKQVIQNVTHKDSAKSPEKA

SEQ ID NO: 43 - protein, 60 aa, Homo sapiens
MRGGKCNMLSSLGCLLLCGSITLALGNAQKLPKANKRTELVIQHGWMSLIKMMLNERSQV

SEQ ID NO: 44 - protein, 161 aa, Homo sapiens
MRGGKCNMLSSLGCLLLCGSITLALGNAQKLPKDAEPKYLIVVRPAPPPSQKKSCSGKTRSRKPLQLVVGTLTPSSVFLSWGFLINPHHDWTLPSHCPNDRFYTIRYREKDKEKKWIFQICPATETIVENLKPNTVYEFGVKDNVEGGIWSKIFNHKTVVG

SEQ ID NO: 45 - protein, 1075 aa, Homo sapiens
MRGGKCNMLSSLGCLLLCGSITLALGNAQKLPKGKRPNLKVHINTTSDSILLKFLRPSPNVKLEGLLLGYGSNVSPNQYFPLPAEGKFTEAIVDAEPKYLIVVRPAPPPSQKKSCSGKTRSRKPLQLVVGTLTPSSVFLSWGFLINPHHDWTLPSHCPNDRFYTIRYREKDKEKKWIFQICPATETIVENLKPNTVYEFGVKDNVEGGIWSKIFNHKTVVGSKKVNGKIQSTYDQDHTVPAYVPRKLIPITIIKQVIQNVTHKDSAKSPEKAPLGGVILVHLIIPGLNETTVKLPASLMFEISDALKTQLAKNETLALPAESKTPEVEKISARPTTVTPETVPRSTKPTTSSALDVSETTLASSEKPWIVPTAKISEDSKVLQPQTATYDVFSSPTTSDEPEISDSYTATSDRILDSIPPKTSRTLEQPRATLAPSETPFVPQKLEIFTSPEMQPTTPAPQQTTSIPSTPKRRPRPKPPRTKPERTTSAGTITPKISKSPEPTWTTPAPGKTQFISLKPKIPLSPEVTHTKPAPKQTPRAPPKPKTSPRPRIPQTQPVPKVPQRVTAKPKTSPSPEVSYTTPAPKDVLLPHKPYPEVSQSEPAPLETRGIPFIPMISPSPSQEELQTTLEETDQSTQEPFTTKIPRTTELAKTTQAPHRFYTTVRPRTSDKPHIRPGVKQAPRPSGADRNVSVDSTHPTKKPGTRRPPLPPRPTHPRRKPLPPNNVTGKPGSAGIISSGPITTPPLRSTPRPTGTPLERIETDIKQPTVPASGEELENITDFSSSPTRETDPLGKPRFKGPHVRYIQKPDNSPCSITDSVKRFPKEEATEGNATSPPQNPPTNLTVVTVEGCPSFVILDWEKPLNDTVTEYEVISRENGSFSGKNKSIQMTNQTFSTVENLKPNTSYEFQVKPKNPLGEGPVSNTVAFSTESADPRVSEPVSAGRDAIWTERPFNSDSYSECKGKQYVKRTWYKKFVGVQLCNSLRYKIYLSDSLTGKFYNIGDQRGHGEDHCQFVDSFLDGRTGQQLTSDQLPIKEGYFRAVRQEPVQFGEIGGHTQINYVQWYECGTTIPGKW

SEQ ID NO: 46 - protein, 1777 aa, Homo sapiens
MRGGKCNMLSSLGCLLLCGSITLALGNAQKLPKGKRPNLKVHINTTSDSILLKFLRPSPNVKLEGLLLGYGSNVSPNQYFPLPAEGKFTEAIVDAEPKYLIVVRPAPPPSQKKSCSGKTRSRKPLQLVVGTLTPSSVFLSWGFLINPHHDWTLPSHCPNDRFYTIRYREKDKEKKWIFQICPATETIVENLKPNTVYEFGVKDNVEGGIWSKIFNHKTVVGSKKVNGKIQSTYDQDHTVPAYVPRKLIPITIIKQVIQNVTHKDSAKSPEKAPLGGVILVHLIIPGLNETTVKLPASLMFEISDALKTQLAKNETLALPAESKTPEVEKISARPTTVTPETVPRSTKPTTSSALDVSETTLVLSKRTPETLQTILIPQFELPLSTLAPKSLPEFPEAKTPFPFEKPRGTLASSEKPWIVPTAKISEDSKVLQPQTATYDVFSSPTTSDEPEISDSYTATSDRILDSIPPKTSRTLEQPRATLAPSETPFVPQKLEIFTSPEMQPTTPAPQQTTSIPSTPKRRPRPKPPRTKPERTTSAGTITPKISKSPEPTWTTPAPGKTQFISLKPKIPLSPEVTHTKPAPEPQTLLPSQSTIGPETPGTKPSTTLAPRKTKRPGRRPRPRPRPKTTPSPEVPKSKPALEPATIQPEPLVPTTASKPSERPKTTHRPDAPQIQPGSKPPKQLLPKPQTTAEPDMPPTKSVSEPVPFETEAPSMTIVPTTDIEPVTVRTEATVTTLAPKTSQRTRTRRPRPKHKTTPRPETLQTKLDFGPITPGTSSAPTTTTKRTRRPHPKPKTTPHPEVPQTKLVPATILEPVLRTEASGTTAAPKVPQRTHRPHPKPKTTLSPEELQTELVPATIFEPVSPIKEAPGTTFVPVTDLEPVTFRTEIPATTLATKTSKRTRPPRPRPKTTPSPQAPETKPVPATVLEPVTLRPEASTTLASKTSQRTRRPRLRTKTTPRPEAPESKPVPTAELKPVTLRTETWVTTQAPKTSQRTRRPRPKTKTTPSPEVPQTKLVPSTDLEPGTLRTEAPKTMVVTTVLEPDTFRTKFPETTLAPKTQRTRRPRPRPKTTSSPEVPQNKSVSVTGFEPVVHSTDAPGTTFALTELQTLILKPVTSPSLEMTESQPVSDVLESVTLSTESPKETIAPAKTDYVYPTAKAPLWPEEPKTEVVESITYVSEPPETTLETSPLPSQSITLPSPDEPQTEPAPKQTPRAPPKPKTSPRPRIPQTQPVPKVPQRVTAKPKTSPSPEVSYTTPAPKDVLLPHKPYPEVSQSEPAPLETRGIPFIPMISPSPSQEELQTTLEETDQSTQEPFTTKIPRTTELAKTTQAPHRFYTTVRPRTSDKPHIRPVLNRTTTRPTRPKPSGMPSGNGVGTGVKQAPRPSGADRNVSVDSTHPTKKPGTRRPPLPPRPTHPRRKPLPPNNVTGKPGSAGIISSGPITTPPLRSTPRPTGTPLERIETDIKQPTVPASGEELENITDFSSSPTRETDPLGKPRFKGPHVRYIQKPDNSPCSITDSVKRFPKEEATEGNATSPPQNPPTNLTVVTVEGCPSFVILDWEKPLNDTVTEYEVISRENGSFSGKNKSIQMTNQTFSTVENLKPNTSYEFQVKPKNPLGEGPVSNTVAFSTESADPRVSEPVSAGRDAIWTERPFNSDSYSECKGKQYVKRTWYKKFVGVQLCNSLRYKIYLSDSLTGKFYNIGDQRGHGEDHCQFVDSFLDGRTGQQLTSDQLPIKEGYFRAVRQEPVQFGEIGGHTQINYVQWYECGTTIPGKW

SEQ ID NO: 47 - protein, 1005 aa, Homo sapiens
MRGGKCNMLSSLGCLLLCGSITLALGNAQKLPKGKRPNLKVHINTTSDSILLKFLRPSPNVKLEGLLLGYGSNVSPNQYFPLPAEGKFTEAIVDAEPKYLIVVRPAPPPSQKKSCSGKTRSRKPLQLVVGTLTPSSVFLSWGFLINPHHDWTLPSHCPNDRFYTIRYREKDKEKKWIFQICPATETIVENLKPNTVYEFGVKDNVEGGIWSKIFNHKTVVGSKKVNGKIQSTYDQDHTVPAYVPRKLIPITIIKQVIQNVTHKDSAKSPEKAPLGGVILVHLIIPGLNETTVKLPASLMFEISDALKTQLAKNETLALPAESKTPEVEKISARPTTVTPETVPRSTKPTTSSALDVSETTLVLSKRTPETLQTILIPQFELPLSTLAPKSLPEFPEAKTPFPFEKPRGTLASSEKPWIVPTAKISEDSKVLQPQTATYDVFSSPTTSDEPEISDSYTATSDRILDSIPPKTSRTLEQPRATLAPSETPFVPQKLEIFTSPEMQPTTPAPQQTTSIPSTPKRRPRPKPPRTKPERTTSAGTITPKISKSPEPTWTTPAPGKTQFISLKPKIPLSPEVTHTKPAPEPQTLLPSQSTIGPETPGTKPSTTLAPRKTKRPGRRPRPRPRPKTTPSPEVPKSKPALEPATIQPEPLVPTTASKPSERPKTTHRPDAPQIQPGSKPPKQLLPKPQTTAEPDMPPTKSVSEPVPFETEAPSMTIVPTTDIEPVTVRTEATVTTLAPKTSQRTRTRRPRPKHKTTPRPETLQTKLDFGPITPGTSSAPTTTTKRTRRPHPKPKTTPHPEVPQTKLATKTSKRTRPPRPRPKTTPSPQAPETKPVPATVLEPVTLRPEASTTLASKTSQRTRRPRLRTKTTPRPEAPESKPVPTAELKPVTLRTETWVTTQAPKTSQRTRRPRPKTKTTPSPEVPQTKLVPSTDLEPGTLRTEAPKTMVVTTVLEPDTFRTKFPETTLAPKTQRTRRPRPRPKTTSSPEVPQNKSGKCMNPWLK

SEQ ID NO: 48 - protein, 188 aa, Homo sapiens [sequence omitted]

SEQ ID NO: 49 - protein, 233 aa, Homo sapiens
QRVTAKPKTSPSPEVSYTTPAPKDVLLPHKPYPEVSQSEPAPLETRGIPFIPMISPSPSQEELQTTLAPHRFYTTVRPRTSDKPHIRPGVKQAPRPSGADRNVSVDSTHPTKKPGTRRPPLPPRPTHPRRKPLPPNNVTGKPGSAGIISSGPITTPPLRSTPRPTGTPLERIETDIKQPTVPASGEELENITDFSSSPTRETDPLGKPRFKGPHVRYIQKPDNSPCSITDSVK

SEQ ID NO: 50 - protein, 158 aa, Homo sapiens
VSDVLESVTLSTESPKETIAPAKTDYVYPTAKAPLWPEEPKTEVVESITYVSEPPETTLETSPLPSQSITLPSPDEPQTEPAPKQTPRAPPKPKTSPRPRIPQTQPVPKVPQRVTAKPKTSPSPEVSYTTPAPLETRGIPFIPMISPSPSQEELQTTL

SEQ ID NO: 51 - protein, 84 aa, Homo sapiens
  VARIANT 1: note = misc_feature - Xaa can be any naturally occurring amino acid
XFEKPRGTLASSEKPWIVPTAKISEDSKVLQPQTATSDRILDSIPPKTSRTLEQPRATLAPSETPFVPQKLEIFTSPEMQPTTP

SEQ ID NO: 52 - protein, 187 aa, Homo sapiens
  VARIANT 1: note = misc_feature - Xaa can be any naturally occurring amino acid
XFISLKPKIPLSPEVTHTKPAPKTSQRTRTRRPRPKHKTTPRPETLQTKLDFGPITPGTSSAPTTTTKRTRRPHPKPKTTPHPEVPQTKLAPKQTPRAPPKPKTSPRPRIPQTQPVPKVPQRVTAKPKTSPSPEVSYTTPAPKDVLLPHKPYPEVSQSEPAPLETRGIPFIPMISPSPSQEELQTTL

SEQ ID NO: 53 - protein, 1131 aa, Homo sapiens
  VARIANT 1: note = misc_feature - Xaa can be any naturally occurring amino acid
XISLKPKIPLSPEVTHTKPAPEPQTLLPSQSTIGPETPGTKPSTTLALEPATIQPEPLVPTTASKPSERPKTTHRPDAPQIQPGSKPPKQLLPKPQTTAEPDMPPTKSVSEPVPFETEAPSMTIVPTTDIEPVTVRTEATVTTLAPKTSQRTRTRRPRPKHKTTPRPETLQTKLDFGPITPGTSSAPTTTTKRTRRPHPKPKTTPHPEVPQTKLVPATILEPVLRTEASGTTAVPATIFEPVSPIKEAPGTTFVPVTDLEPVTFRTEIPATTLATKTSKRTRPPRPRPKTTPSPQAPETKPVPATVLEPVTLRPEASTTLASKTSQRTRRPRLRTKTTPRPEAPESKPVPTAELKPVTLRTETWVTTQAPKTSQRTRRPRPKTKTTPSPEVPQTKLVPSTDLEPGTLRTEAPKTMVVTTVLEPDTFRTKFPETTLAPKTQRTRRPRPRPKTTSSPEVPQNKSVSVTGFEPVVHSTDAPGTTFALTELQTLILKPVTSPSLEMTESQPVSDVLESVTLSTESPKETIAPAKTDYVYPTAKAPLWPEEPKTEVVESITYVSEPPETTLETSPLPSQSITLPSPDEPQTEPAPKQTPRAPPKPKTSPRPRIPQTQPVPKVPQRVTAKPKTSPSPEVSYTTPAPKDVLLPHKPYPEVSQSEPAPLETRGIPFIPMISPSPSQEELQTTLEETDQSTQEPFTTKIPRTTELAKTTQAPHRFYTTVRPRTSDKPHIRPGVKQAPRPSGADRNVSVDSTHPTKKPGTRRPPLPPRPTHPRRKPLPPNNVTGKPGSAGIISSGPITTPPLRSTPRPTGTPLERIETDIKQPTVPASGEELENITDFSSSPTRETDPLGKPRFKGPHVRYIQKPDNSPCSITDSVKRFPKEEATEGNATSPPQNPPTNLTVVTVEGCPSFVILDWEKPLNDTVTEYEVISRENGSFSGKNKSIQMTNQTFSTVENLKPNTSYEFQVKPKNPLGEGPVSNTVAFSTESADPRVSEPVSAGRDAIWTERPFNSDSYSECKGKQYVKRTWYKKFVGVQLCNSLRYKIYLSDSLTGKFYNIGDQRGHGEDHCQFVDSFLDGRTGQQLTSDQLPIKEGYFRAVRQEPVQFGEIGGHTQINYVQWYECGTTIPGKW

SEQ ID NO: 54 - protein, 125 aa, Homo sapiens
  VARIANT 1: note = misc_feature - Xaa can be any naturally occurring amino acid
XKNETLALPAESKTPEVEKISARPTTVTPETVPRSTKPTTSSALDVSETTLAPKSLPEFPEAKTPFPFEKPRGTLASSEKPWIVPTAKISEDSKVLQPQTALTELQTLILKPVTSPSLEMTESQP

SEQ ID NO: 55 - protein, 187 aa, Homo sapiens
  VARIANT 1: note = misc_feature - Xaa can be any naturally occurring amino acid
XKTTPHPEVPQTKLAPKVPQRTHRPHPKPKTTLSPEELQTELVPATIFEPVSPIKEAPGTTFVPVTDLEPVTFRTEIPATTLATKTSKRTRPPRPRPKTTPSPQAPETKPAPKQTPRAPPKPKTSPRPRIPQTQPVPKVPQRVTAKPKTSPSPEVSYTTPAPLETRGIPFIPMISPSPSQEELQTTL

SEQ ID NO: 56 - protein, 187 aa, Homo sapiens
  VARIANT 1: note = misc_feature - Xaa can be any naturally occurring amino acid
XNGKIQSTYDQDHTVPAYVPRKLIPITIIKQVIQNVTHKDSAKSPEKAPLGGVILVHLIIPGLNETTVKLPASLMFEISDALKTQLAKNETLALPAESKTPEVEKISARPTTVTPETVPRSTKPTTSSALDVSETTLVLSKRTPETLQTILIPQFELPLSTLASSEKPWIVPTAKISEDSKVLQPQT

SEQ ID NO: 57 - protein, 150 aa, Homo sapiens
  VARIANT 1: note = misc_feature - Xaa can be any naturally occurring amino acid
XPETPGTKPSTTLAPRKTKRPGRRPRPRPRPKTTPSPEVPKSKPALEPATIQPEPLVPTTVPTTDIEPVTVRTEATVTTLAPKTSQRTRTRRPRPKHKTTPRPETLQTKLDFGPITPGTSSAPTTTTKRTRRPHPKPKTTPHPEVPQTKL

SEQ ID NO: 58 - protein, 308 aa, Homo sapiens
  VARIANT 1: note = misc_feature - Xaa can be any naturally occurring amino acid
XPKPKTTPHPEVPQTKLATKTSKRTRPPRPRPKTTPSPQAPETKPVPATVLEPVTLRPEASTTLASKTSQRTRRPRLRTKTTPRPEAPESKPVPTAELKPVTLRTETWVTTQAPKQTPRAPPKPKTSPRPRIPQTQPVPKVPQRVTAKPKTSPSPEVSYTTPAPKDVLLPHKPYPEVSQSEPAPLETRGIPFIPMISPSPSQEELQTTLEETDQSTQEPFTTKIPRTTELAKTTQAPHRFYTTVRPRTSDKPHIRPVLNRTTTRPTRPKPSGMPSGNGVGTGVKQAPRPSGADRNVSVDSTHPTKKPG

SEQ ID NO: 59 - protein, 87 aa, Homo sapiens
  VARIANT 1: note = misc_feature - Xaa can be any naturally occurring amino acid
XQTLLPSQSTIGPETPGTKPSTTLAPRKTKRPGRRPRPRPRPKTTPSPEVPKSKPALEPATIQPEPLVPTTVSEPVPFETEAPSMTI

SEQ ID NO: 60 - protein, 187 aa, Homo sapiens
  VARIANT 1: note = misc_feature - Xaa can be any naturally occurring amino acid
XRTTSAGTITPKISKSPEPTWTTPAPGKTQFISLKPKIPLSPEVTHTKPVPTTDIEPVTVRTEATVTTLAPKTSQRTRTRRPRPKHKTTPRPETLQTKLDFGPITPGTSSAPTTTTKRTRRPHPKPKTTPHPEVPQTKLAPKVPQRTHRPHPKPKTTLSPEELQTELVPATIFEPVSPIKEAPGTTF

SEQ ID NO: 61 - protein, 189 aa, Homo sapiens
  VARIANT 1: note = misc_feature - Xaa can be any naturally occurring amino acid
XTAKPKTSPSPEVSYTTPAPLETRGIPFIPMISPSPSQEELQTTLEETDQSTQEPFTTKIPRTTELAKTTQAPHRFYTTVRPRTSDKPHIRPVLNRTTTRPTRPKPSGMPSGNGVGTGVKQAPRPSGADRNVSVDSTHPTKKPGTRRPPLPPRPTHPRRKPLPPNNVTGKPGSAGIISSGPITTPPLRS

SEQ ID NO: 62 - protein, 303 aa, Homo sapiens
  VARIANT 1: note = misc_feature - Xaa can be any naturally occurring amino acid
XTPEVEKISARPTTVTPETVPRSTKPTTSSALDVSETTLASSEKPWIVPTAKISEDSKVLQPQTATYDVFSSPTTSDEPEISDSYTATSDRILDSIPPKTSRTLEQPRATLAPSETPFVPQKLEIFTSPEMQPTTPAPQQTTSIPSTPKRRPRPKPPRTKPERTTSAGTITPKISKSPEPTWTTPAPGKTQFISLKPKIPLSPEVTHTKPAPEPQTLLPSQSTIGPETPGTKPSTTLAPRKTKRPGRRPRPRPRPKTTPSPEVPKSKPALEPATIQPEPLVPTTASKPSERPKTTHRPDAPQI

SEQ ID NO: 63 - protein, 151 aa, Homo sapiens
  VARIANT 1: note = misc_feature - Xaa can be any naturally occurring amino acid
XVESITYVSEPPETTLETSPLPSQSITLPSPDEPQTEPAPKQTPRAPPKPKTSPRPRIPQTQPVPKVPQRVTAKPKTSPSPEVSYTTPAPKDVLLPHKPYPEVSQSEPVLQPVTFRFEPPKTTIAPLETRGIPFIPMISPSPSQEELQTTL

SEQ ID NO: 64 - protein, 198 aa, Homo sapiens
LLHKNLQEHFSNQDLVFLLLTPSIITESCSTHRLEHSLYKPQKGLFHRVPLVVANLGMSEQLGYKTVSGSCMSTGFSRAVQTHSSKFFEEDGSLKEVHKINEMYASLQEELKLYSFSECHLHPGSRLKEQPLFGTCPHGIRQRARKLVDYRREPPQLAHELIFQFISVYFQRTNWHDKSCINEKLHVKKHFTTYKAYL

SEQ ID NO: 65 - protein, 360 aa, Homo sapiens
MDDVEVVYTIDIQKYIPCYQLFSFYNSSGEVNEQALKKILSNVKKNVVGWYKFRRHSDQIMTFRERLLHKNLQEHFSNQDLVFLLLTPSIITESCSTHRLEHSLYKPQKGLFHRVPLVVANLGMSEQLGYKTVSGSCMSTGFSRAVQTHSSKFFEEDGSLKEVHKINEMYASLQEELKSICKKVEDSEQAVDKLVKDVNRLKREIEKRRGAQIQAAREKNIQKDPQENIFLCQALRTFFPNSEFLHSCVMSLKNRHVSKSSCNYNHHLDVVDNLTLMVEHTDIPEASPASTPQIIKHKALDLDDRWQFKRSRLLDTQDKRSKADTGSSNQDKASKMSSPETDEEIEKMKGFGEYSRSPTF

SEQ ID NO: 66 - protein, 74 aa, Homo sapiens
MEGESTSAVLSGFVLGALAFQHLNTDSDTEGFLLGEVKGEAKNSITDSQMDDVEVVYTIDIQKYIPCYQLFRMW

SEQ ID NO: 67 - protein, 409 aa, Homo sapiens
MEGESTSAVLSGFVLGALAFQHLNTDSDTEGFLLGEVKGEAKNSITDSQMDDVEVVYTIDIQKYIPCYQLFSFYNSSGEVNEQALKKILSNVKKNVVGWYKFRRHSDQIMTFRERLLHKNLQEHFSNQDLVFLLLTPSIITESCSTHRLEHSLYKPQKGLFHRVPLVVANLGMSEQLGYKTVSGSCMSTGFSRAVQTHSSKFFEEDGSLKEVHKINEMYASLQEELKSICKKVEDSEQAVDKLVKDVNRLKREIEKRRGAQIQAAREKNIQKDPQENIFLCQALRTFFPNSEFLHSCVMSLKNRHVSKSSCNYNHHLDVVDNLTLMVEHTDIPEASPASTPQIIKHKALDLDDRWQFKRSRLLDTQDKRSKADTGSSNQDKASKMSSPETDEEIEKMKGFGEYSRSPTF

SEQ ID NO: 68 - protein, 37 aa, Homo sapiens
MEGESTSAVLSGFVLGALAFQHLNTDSDTVGRGGSRL

SEQ ID NO: 69 - protein, 189 aa, Homo sapiens
MEGESTSAVLSGFVLGALAFQHLNTDSDTVSRGTGRGPASPGKSPARGLPPRCCSGPRPLPRRRRASSLRSRLCLLSPSAVPEEGFLLGEVKGEAKNSITDSQMDDVEVVYTIDIQKYIPCYQLFSFYNSSGEVNEQALKKILSNVKKNVVGWYKFRRHSDQIMTFRERLLHKNLQEHFSNQDLVFLLL

SEQ ID NO: 70 - protein, 220 aa, Homo sapiens
MKTSSPKENCLFLCFTSMKNGQEGFLLGEVKGEAKNSITDSQMDDVEVVYTIDIQKYIPCYQLFSFYNSSGEVNEQALKKILSNVKKNVVGWYKFRRHSDQIMTFRERLLHKNLQEHFSNQDLVFLLLTPSIITESCSTHRLEHSLYKPQKGLFHRVPLVVANLGMSEQLGYKTVSGSCMSTGFSRAVQTHSSKFFEEDGSLKEVHKINEMYASLQEELK

SEQ ID NO: 71 - protein, 82 aa, Homo sapiens
MMLKLFIQLMESHSVAQTGVKWHDLGSLQPLPLEVKRFSCLGLRSSWDYRHTQPCPANFFCIFSRDGVSPCWPGWSRTPDLK

SEQ ID NO: 72 - protein, 536 aa, Homo sapiens
MGAWAFPAALFLLCLTSESLQGGLPLLPPGLGKVYGPHSGLGAGYDGGVKPQKPGFVVRHGLGTQPDTEGGMKPQNLGFRTFAGAAAQPGYGNGLGAAAFPVAGAQSGPAAQNGFGPGFGGGGKPQKPGPTTQNGYRPGYVGAVKPQKPGFQYRIGLGAQPGFRGDMKAQEPGLGNGNGLSAQPVLTAQNRFGFGAGLGGNVKPLKPGYGKRLRAGAFPGAGTQPEYGHGNGPGVQPGLGAGMKPQMPGLGAPNGYGPGRGRAGVPGGPERRPWVPHLLPFSSPGYLGVMKAQKPGPLAQNGYRAGAGEGMKPQKPGLRGTLKPQKSGHGHENGPWPGPCNARVAPMLLPRLPTPGVPSDKEGGWGLKSQPPSAVQNGKLPAPMPAIQWGLKPQKAGHQPPNGYGPGAEPGFNGGLEPQKIGLGYGNGVLGARVFPEAHPQPGFHGANGFRNRDGVEALVYPKAAALAPEGNGQAGVLWNSRWPTLQAWGAGLKPGYQAGDEYAEARSQPGGPDVKRGSNGQLGNGYGGRCPLGKC

SEQ ID NO: 73 - protein, 195 aa, Homo sapiens
MPNFLGLHRARSFTVLCFWSTADVLNASGPRRQWHPLASCSSWSRPQSQGSTPGVLCKTGMGREPIPETQCHFANSMCSLHVSVPYFGNSPNISNFFRWSLALSPRQWCDLGSLQPPSPRFKGFSCLSLPSSWDYRRAPSPANFCILVEMGFHHVGQADLELLTSADLPTSASQSAGITGVSHHAWPQTLSLLLY

SEQ ID NO: 74 - protein, 130 aa, Homo sapiens
MGGTWASKEPLRPRCRPINATLAVEKEGCPVCITVNTTICAGYCPTMTRVLQGVLPALPQVVCNYRDVRFESIRLPGCPRGVNPVVSYAVALSCQCALCRRSTTDCGGPKDHPLTCDDPRFQDSSSSKAP

SEQ ID NO: 75 - protein, 77 aa, Homo sapiens
MSKGLLLLLLLSMGGTWASKEPLRPRCRPINATLAVEKEGCPVCITVNTTICAGYCPTMTRVLQGVLPALPQVVCNY

SEQ ID NO: 76 - protein, 165 aa, Homo sapiens
MDAEGLALLLPPVTLAALVDSWLREDCPGLNYAALVSGAGPSQAALWAKSPGVLAGQPFFDAIFTQLNCQVSWFLPEGSKLVPVARVAEVRGPAHCLLLGERVALNTLARCSGIASAAAAAVEAARGAGWTGHVAGTRKTTPGFRLVEKYGLLVGGAASHRYDLG

SEQ ID NO: 77 - protein, 210 aa, Homo sapiens [sequence omitted]

SEQ ID NO: 78 - protein, 83 aa, Homo sapiens [sequence omitted]

SEQ ID NO: 79 - protein, 105 aa, Homo sapiens
MKGWGWLALLLGALLGTAWARRSQDLHCGACRALVDELEWEIAQVDPKKTIQMGSFRINPDGSQSVVENASCLVLAARHASASSTNLKDILADLIPKEQARIKTF

SEQ ID NO: 80 - protein, 263 aa, Homo sapiens
MKGWGWLALLLGALLGTAWARRSQDLHCGACRALVDELEWEIAQVDPKKTIQMGSFRINPDGSQSVVEVPYARSEAHLTELLEEICDRMKEYGEQIDPSTHRKNYVRVVGRNGESSELDLQGIRIDSDISGTLKFACESIVEEYEDELIEFFSREADNVKDKLCSKRTDGGTSKNRDRKGKMDVTNSAEKSRRSPAMALLTAAARLLGTKNASCLVLAARHASASSTNLKDILADLIPKEQARIKTFRQQHGKTVVGQITVDM

SEQ ID NO: 81 - protein, 171 aa, Homo sapiens
MPETSHIVALTSKSEQELYIPSVVSNSPSTVQSIENTSKSHGEIFKKDVCAENNNNMAMLICLIIIAVLFLICTFLFLSTVVLANKVSSLRRSKQVGKRQPRSNGDFLASGLWPAESDTWKRTKQLTGPNLVMQSTGVLTATRERKDEEGTEKLTNKQIAKSPKCPVRTRI

SEQ ID NO: 82 - protein, 123 aa, Homo sapiens
  VARIANT 1: note = misc_feature - Xaa can be any naturally occurring amino acid
XCAENNNNMAMLICLIIIAVLFLICTFLFLSTVVLANKVSSLRRSKQVGKRQPRSNGDFLASGLWPAESDTWKRTKQLTGPNLVMQSTGVLTATRERKDEEGTEKLTNKQIAKSPKCPVRTRI

SEQ ID NO: 83 - protein, 117 aa, Homo sapiens
  VARIANT 1: note = misc_feature - Xaa can be any naturally occurring amino acid
XCAENNNNMAMLICLIIIAVLFLICTFLFLSTVVLANKVSSLRRSKQVGKRQPRSNGDFLASGLWPAESDTWKRTKQLTGPNLVMQSTGVLTATRERKDEEGTEKLTNKQIDNEEIF

SEQ ID NO: 84 - protein, 153 aa, Homo sapiens
  VARIANT 1: note = misc_feature - Xaa can be any naturally occurring amino acid
XCAENNNNMAMLICLIIIAVLFLICTFLFLSTVVLANKVSSLRRSKQVGKRQPRSNGDFLASGLWPAESDTWKRTKQLTGPNLVMQSTGVLTATRERKDEEGTEKLTNKQIEEETVTQKCRVLPKVIQVNRTHHSLLMRRNLTKLFQFARGTF

SEQ ID NO: 85 - protein, 104 aa, Homo sapiens
MGSTWGSPGWVRLALCLTGLVLSLYALHVKAARARDRDYRALCDVGTAISCSRVFSSRAAATELNSWSVVLGSLQREGLSPGAEEVGVAALQLPRAYNHYSQGS

SEQ ID NO: 86 - protein, 166 aa, Homo sapiens
MGSTWGSPGWVRLALCLTGLVLSLYALHVKAARARDRDYRALCDVGTAISCSRVFSSRWGRGFGLVEHVLGQDSILNQSNSIFGCIFYTLQLLLGLQAAQRACGQRGPGPPKPQEGNTVPGEWPWQASVRRQGAHICSGSLVADTWVLTAAHCFEKAAATELNSWS

SEQ ID NO: 87 - protein, 121 aa, Homo sapiens
  VARIANT 1: note = misc_feature - Xaa can be any naturally occurring amino acid
XDVGTAISCSRVFSSRWGRGFGLVEHVLGQDSILNQSNSIFGCIFYTLQLLLGCLRTRWASVLMLLSSLVSLAGSVYLAWILFFVLYDFCIVCITTYAINVSLMWLSFRKVQEPQGKAKRH

SEQ ID NO: 88 - protein, 199 aa, Homo sapiens
MALLLRFVLLCRVADFIRGWSITTPEQMIEKAKGETAYLPCKFTLSPEDQGPLDIEWLISPADNQKVDQVIILYSGDKIYDDYYPDLKGRVHFKSNDLKSGDASINVTNFQLSDIGTDQCKVKRAPGVANRKIQLVVLGKMCRLQRAARPLPEATAVIIHPWDPYLLPTWKDIPRLSINKYQVKTLNALLRVRLSHLLR

SEQ ID NO: 89 - protein, 116 aa, Homo sapiens
MEFGLNWVFLVAIIKGAQCEVQLVESGGGLVQPGGSLRLSCPDSGFTFSNHYMSWVRQAPGKGLEWISYISGDSGYTNYADSVKGRFTISRDNANNSPYLQMNSLRAEDTAVYYCV

SEQ ID NO: 90 - protein, 124 aa, Homo sapiens
MLCPRAAFLVGSFHGVFPGPPASSHWEFWVPSTPVGAYFCPPQPQLTPPNTPKLVSEVEELYKSITALREKLLQAEQSLRNLKDIHMSLEKDVTAMTNSVFIDRQKCMAHRTCYPTILQLAGYQ

SEQ ID NO: 91 - protein, 117 aa, Homo sapiens
MKHLWFFLLLVAAPRWVLSQVQLQESGPGLVKPSETLSLTCTVSGYSISSGYYWGWIRQPPGKGLEWIGSIYHSGSTYYNPSLKSRVTISVDTSKNQFSLKLSSVTAADTAVYYCAR

SEQ ID NO: 92 - protein, 67 aa, Homo sapiens
MESPSAPPHRWCIPWQRLLLTASLLTFWNPPTTAKLTIESTPFNVAEGKEVLLLAHNLPQNRIGYSW

SEQ ID NO: 93 - protein, 152 aa, Homo sapiens
MESPSAPPHRWCIPWQRLLLTASLLTFWNPPTTAKLTIESTPFNVAEGKEVLLLVHNLPQHLFGYSWYKGERVDGNRQIIGYVIGTQQATPGPAYSGREIIYPNASLLIQNIIQNDTGFYTLHVIKSDLVNEEATGQFRVYPELPKPSISSN

SEQ ID NO: 94 - protein, 155 aa, Homo sapiens
MSPAKCKICFPDREVKPSMSGLHLVKRGREHKKLDLHRDFTVASPAEFVTRFGGDRVIEKVLIANNGIAAVKCMRSIRRWAYEMFRNERAIRFVVMVTPEDLKANAEYIKMADHYVPVPGGPNNNNYANVELIVDIAKRIPVQAVWAGWGHASEN

SEQ ID NO: 95 - protein, 143 aa, Homo sapiens
MTDSKPITKSKSEANLIPSQEPFPASDNSGETPQRNGEGHTLPKTPSQAEPASHKGPKDAGRRRNSLPPSHQKPPRNPLSSSDAAPSPELQANGTGTQGLEATDTNGLSSSARPQGQQAGSPSKEDKKQANIKRQLMTNFILG

SEQ ID NO: 96 - protein, 858 aa, Homo sapiens
MTVPISITNPDLLRHSTELFMDSGFSPLCQRMGAMVAFRRFEDFTRNFDEVISCFANVPKDTPLFSEARTSLYSEDDCKSLREEPIHILNVSIQCADHLEDEALVPILRTFVQSKKNILVDYGLRRITFLIAQEKEFPKFFTFRARDEFAEDRIYRHLEPALAFQLELNRMRNFDLTAVPCANHKMHLYLGAAKVKEGVEVTDHRFFIRAIIRHSDLITKEASFEYLQNEGERLLLEAMDELEVAFNNTSVRTDCNHIFLNFVPTVIMDPFKIEESVRYMVMRYGSRLWKLRVLQAEVKINIRQTTTGSAVPIRLFITNESGYYLDISLYKEVTDSRSGNIMFHSFGNKQGPQHGMLINTPYVTKDLLQAKRFQAQTLGTTYIYDFPEMFRQALFKLWGSPDKYPKDILTYTELVLDSQGQLVEMNRLPGGNEVGMVAFKMRFKTQEYPEGRDVIVIGNDITFRIGSFGPGEDLLYLRASEMARAEGIPKIYVAANSGARIGMAEEIKHMFHVAWVDPEDPHKGFKYLYLTPQDYTRISSLNSVHCKHIEEGGESRYMITDIIGKDDGLGVENLRGSGMIAGESSLAYEEIVTISLVTCRAIGIGAYLVRLGQRVIQVENSHIILTGASALNKVLGREVYTSNNQLGGVQIMHYNGVSHITVPDDFEGVYTILEWLSYMPKDNHSPVPIITPTDPIDREIEFLPSRAPYDPRWMLAGRPHPTLKGTWQSGFFDHGSFKEIMAPWAQTVVTGRARLGGIPVGVIAVETRTVEVAVPADPANLDSEAKIIQQAGQVWFPDSAYKTAQAVKDFNREKLPLMIFANWRGFSGGMKGCLGTWRDVSWWKIRAMLPMHIGEGSV

SEQ ID NO: 97 - protein, 2458 aa, Homo sapiens
MVLLLCLSCLIFSCLTFSWLKIWGKMTDSKPITKSKSEANLIPSQEPFPASDNSGETPQRNGEGHTLPKTPSQAEPASHKGPKDAGRRRNSLPPSHQKPPRNPLSSSDAAPSPELQANGTGTQGLEATDTNGLSSSARPQGQQAGSPSKEDKKQANIKRQLMTNFILGSFDDYSSDEDSVAGSSRESTRKGSRASLGALSLEAYLTTGEAETRVPTMRPSMSGLHLVKRGREHKKLDLHRDFTVASPAEFVTRFGGDRVIEKVLIANNGIAAVKCMRSIRRWAYEMFRNERAIRFVVMVTPEDLKANAEYIKMADHYVPVPGGPNNNNYANVELIVDIAKRIPVQAVWAGWGHASENPKLPELLCKNGVAFLGPPSEAMWALGDKIASTVVAQTLQVPTLPWSGSGLTVEWTEDDLQQGKRISVPEDVYDKGCVKDVDEGLEAAERIGFPLMIKASEGGGGKGIRKAESAEDFPILFRQVQSEIPGSPIFLMKLAQHARHLEVQILADQYGNAVSLFGRDCSIQRRHQKIVEEAPATIAPLAIFEFMEQCAIRLAKTVGYVSAGTVEYLYSQDGSFHFLELNPRLQVEHPCTEMIADVNLPAAQLQIAMGVPLHRLKDIRLLYGESPWGVTPISFETPSNPPLARGHVIAARITSENPDEGFKPSSGTVQELNFRSSKNVWGYFSVAATGGLHEFADSQFGHCFSWGENREEAISNMVVALKELSIRGDFRTTVEYLINLLETESFQNNDIDTGWLDYLIAEKVQAEKPDIMLGVVCGALNVADAMFRTCMTDFLHSLERGQVLPADSLLNLVDVELIYGGVKYILKVARQSLTMFVLIMNGCHIEIDAHRLNDGGLLLSYNGNSYTTYMKEEVDSYRITIGNKTCVFEKENDPTVLRSPSAGKLTQYTVEDGGHVEAGSSYAEMEVMKMIMTLNVQERGRVKYIKRPGAVLEAGCVVARLELDDPSKVHPAEPFTGELPAQQTLPILGEKLHQVFHSVLENLTNVMSGFCLPEPVFSIKLKEWVQKLMMTLRHPSLPLLELQEIMTSVAGRIPAPVEKSVRRVMAQYASNITSVLCQFPSQQIATILDCHAATLQRKADREVFFINTQSIVQLVQRYRSGIRGYMKTVVLDLLRRYLRVEHHFQQAHYDKCVINLREQFKPDMSQVLDCIFSHAQVAKKNQLVIMLIDELCGPDPSLSDELISILNELTQLSKSEHCKVALRARQILIASHLPSYELRHNQVESIFLSAIDMYGHQFCPENLKKLILSETTIFDVLPTFFYHANKVVCMASLEVYVRRGYIAYELNSLQHRQLPDGTCVVEFQFMLPSSHPNRMTVPISITNPDLLRHSTELFMDSGFSPLCQRMGAMVAFRRFEDFTRNFDEVISCFANVPKDTPLFSEARTSLYSEDDCKSLREEPIHILNVSIQCADHLEDEALVPILRTFVQSKKNILVDYGLRRITFLIAQEKEFPKFFTFRARDEFAEDRIYRHLEPALAFQLELNRMRNFDLTAVPCANHKMHLYLGAAKVKEGVEVTDHRFFIRAIIRHSDLITKEASFEYLQNEGERLLLEAMDELEVAFNNTSVRTDCNHIFLNFVPTVIMDPFKIEESVRYMVMRYGSRLWKLRVLQAEVKINIRQTTTGSAVPIRLFITNESGYYLDISLYKEVTDSRSGNIMFHSFGNKQGPQHGMLINTPYVTKDLLQAKRFQAQTLGTTYIYDFPEMFRQALFKLWGSPDKYPKDILTYTELVLDSQGQLVEMNRLPGGNEVGMVAFKMRFKTQEYPEGRDVIVIGNDITFRIGSFGPGEDLLYLRASEMARAEGIPKIYVAANSGARIGMAEEIKHMFHVAWVDPEDPHKGFKYLYLTPQDYTRISSLNSVHCKHIEEGGESRYMITDIIGKDDGLGVENLRGSGMIAGESSLAYEEIVTISLVTCRAIGIGAYLVRLGQRVIQVENSHIILTGASALNKVLGREVYTSNNQLGGVQIMHYNGVSHITVPDDFEGVYTILEWLSYMPKDNHSPVPIITPTDPIDREIEFLPSRAPYDPRWMLAGRPHPTLKGTWQSGFFDHGSFKEIMAPWAQTVVTGRARLGGIPVGVIAVETRTVEVAVPADPANLDSEAKIIQQAGQVWFPDSAYKTAQAVKDFNREKLPLMIFANWRGFSGGMKDMYDQVLKFGAYIVDGLRQYKQPILIYIPPYAELRGGSWVVIDATINPLCIEMYADKESRGGVLEPEGTVEIKFRKKDLIKSMRRIDPAYKKLMEQLGEPDLSDKDRKDLEGRLKAREDLLLPIYHQVAVQFADFHDTPGRMLEKGVISDILEWKTARTFLYWRLRRLLLEDQVKQEILQASGELSHVHIQSMLRRWFVETEGAVKAYLWDNNQVVVQWLEQHWQAGDGPRSTIRENITYLKHDSVLKTIRGLVEENPEVAVDCVIYLSQHISPAERAQVVHLLSTMDSPAST

SEQ ID NO: 98 - protein, 2458 aa, Homo sapiens; identical to SEQ ID NO: 97

SEQ ID NO: 99 - protein, 859 aa, Homo sapiens
  VARIANT 1: note = misc_feature - Xaa can be any naturally occurring amino acid
XMTVPISITNPDLLRHSTELFMDSGFSPLCQRMGAMVAFRRFEDFTRNFDEVISCFANVPKDTPLFSEARTSLYSEDDCKSLREEPIHILNVSIQCADHLEDEALVPILRTFVQSKKNILVDYGLRRITFLIAQEKEFPKFFTFRARDEFAEDRIYRHLEPALAFQLELNRMRNFDLTAVPCANHKMHLYLGAAKVKEGVEVTDHRFFIRAIIRHSDLITKEASFEYLQNEGERLLLEAMDELEVAFNNTSVRTDCNHIFLNFVPTVIMDPFKIEESVRYMVMRYGSRLWKLRVLQAEVKINIRQTTTGSAVPIRLFITNESGYYLDISLYKEVTDSRSGNIMFHSFGNKQGPQHGMLINTPYVTKDLLQAKRFQAQTLGTTYIYDFPEMFRQALFKLWGSPDKYPKDILTYTELVLDSQGQLVEMNRLPGGNEVGMVAFKMRFKTQEYPEGRDVIVIGNDITFRIGSFGPGEDLLYLRASEMARAEGIPKIYVAANSGARIGMAEEIKHMFHVAWVDPEDPHKGFKYLYLTPQDYTRISSLNSVHCKHIEEGGESRYMITDIIGKDDGLGVENLRGSGMIAGESSLAYEEIVTISLVTCRAIGIGAYLVRLGQRVIQVENSHIILTGASALNKVLGREVYTSNNQLGGVQIMHYNGVSHITVPDDFEGVYTILEWLSYMPKDNHSPVPIITPTDPIDREIEFLPSRAPYDPRWMLAGRPHPTLKGTWQSGFFDHGSFKEIMAPWAQTVVTGRARLGGIPVGVIAVETRTVEVAVPADPANLDSEAKIIQQAGQVWFPDSAYKTAQAVKDFNREKLPLMIFANWRGFSGGMKGCLGTWRDVSWWKIRAMLPMHIGEGSV

SEQ ID NO: 100 - protein, 112 aa, Homo sapiens
  VARIANT 1: note = misc_feature - Xaa can be any naturally occurring amino acid
XVEMNRLPGGNEVGMVAFKMRFKTQEYPEGRDVIVIGNDITFRIGSFGPGEDLLYLRASEMARAEGIPKIYVAANSGARIGMAEEIKHMFHVAWVDPEDPHKIHDHGYHREG

SEQ ID NO: 101 - protein, 2431 aa, Homo sapiens
MTTLLWVFVTLRVITAAVTVETSDHDNSLSVSIPQPSPLRVLLGTSLTIPCYFIDPMHPVTTAPSTAPLAPRIKWSRVSKEKEVVLLVATEGRVRVNSAYQDKVSLPNYPAIPSDATLEVQSLRSNDSGVYRCEVMHGIEDSEATLEVVVKGIVFHYRAISTRYTLDFDRAQRACLQNSAIIATPEQLQAAYEDGFHQCDAGWLADQTVRYPIHTPREGCYGDKDEFPGVRTYGIRDTNETYDVYCFAEEMEGEVFYATSPEKFTFQEAANECRRLGARLATTGQLYLAWQAGMDMCSAGWLADRSVRYPISKARPNCGGNLLGVRTVYVHANQTGYPDPSSRYDAICYTGEDFVDIPENFFGVGGEEDITVQTVTWPDMELPLPRNITEGEARGSVILTVKPIFEVSPSPLEPEEPFTFAPEIGATAFAEVENETGEATRPWGFPTPGLGPATAFTSEDLVVQVTAVPGQPHLPGGVVFHYRPGPTRYSLTFEEAQQACLRTGAVIASPEQLQAAYEAGYEQCDAGWLRDQTVRYPIVSPRTPCVGDKDSSPGVRTYGVRPSTETYDVYCFVDRLEGEVFFATRLEQFTFQEALEFCESHNATLATTGQLYAAWSRGLDKCYAGWLADGSLRYPIVTPRPACGGDKPGVRTVYLYPNQTGLPDPLSRHHAFCFRGISAVPSPGEEEGGTPTSPSGVEEWIVTQVVPGVAAVPVEEETTAVPSGETTAILEFTTEPENQTEWEPAYTPVGTSPLPGILPTWPPTGAATEESTEGPSATEVPSASEEPSPSEVPFPSEEPSPSEEPFPSVRPFPSVELFPSEEPFPSKEPSPSEEPSASEEPYTPSPPVPSWTELPSSGEESGAPDVSGDFTGSGDVSGHLDFSGQLSGDRASGLPSGDLDSSGLTSTVGSGLPVESGLPSGDEERIEWPSTPTVGELPSGAEILEGSASGVGDLSGLPSGEVLETSASGVGDLSGLPSGEVLETTAPGVEDISGLPSGEVLETTAPGVEDISGLPSGEVLETTAPGVEDISGLPSGEVLETTAPGVEDISGLPSGEVLETTAPGVEDISGLPSGEVLETTAPGVEDISGLPSGEVLETAAPGVEDISGLPSGEVLETAAPGVEDISGLPSGEVLETAAPGVEDISGLPSGEVLETAAPGVEDISGLPSGEVLETAAPGVEDISGLPSGEVLETAAPGVEDISGLPSGEVLETAAPGVEDISGLPSGEVLETAAPGVEDISGLPSGEVLETAAPGVEDISGLPSGEVLETAAPGVEDISGLPSGEVLETAAPGVEDISGLPSGEVLETAAPGVEDISGLPSGEVLETAAPGVEDISGLPSGEVLETAAPGVEDISGLPSGEVLETAAPGVEDISGLPSGEVLETAAPGVEDISGLPSGEVLETTAPGVEEISGLPSGEVLETTAPGVDEISGLPSGEVLETTAPGVEEISGLPSGEVLETSTSAVGDLSGLPSGGEVLEISVSGVEDISGLPSGEVVETSASGIEDVSELPSGEGLETSASGVEDLSRLPSGEEVLEISASGFGDLSGLPSGGEGLETSASEVGTDLSGLPSGREGLETSASGAEDLSGLPSGKEDLVGSASGDLDLGKLPSGTLGSGQAPETSGLPSGFSGEYSGVDLGSGPPSGLPDFSGLPSGFPTVSLVDSTLVEVVTASTASELEGRGTIGISGAGEISGLPSSELDISGRASGLPSGTELSGQASGSPDVSGEIPGLFGVSGQPSGFPDTSGETSGVTELSGLSSGQPGISGEASGVLYGTSQPFGITDLSGETSGVPDLSGQPSGLPGFSGATSGVPDLVSGTTSGSGESSGITFVDTSLVEVAPTTFKEEEGLGSVELSGLPSGEADLSGKSGMVDVSGQFSGTVDSSGFTSQTPEFSGLPSGIAEVSGESSRAEIGSSLPSGAYYGSGTPSSFPTVSLVDRTLVESVTQAPTAQEAGEGPSGILELSGAHSGAPDMSGEHSGFLDLSGLQSGLIEPSGEPPGTPYFSGDFASTTNVSGESSVAMGTSGEASGLPEVTLITSEFVEGVTEPTISQELGQRPPVTHTPQLFESSGKVSTAGDISGATPVLPGSGVEVSSVPESSSETSAYPEAGFGASAAPEASREDSGSPDLSETTSAFHEANLERSSGLGVSGSTLTFQEGEASAAPEVSGESTTTSDVGTEAPGLPSATPTASGDRTEISGDLSGHTSQLGVVISTSIPESEWTQQTQRPAETHLEIESSSLLYSGEETHTVETATSPTDASIPASPEWKRESESTAADQEVCEEGWNKYQGHCYRHFPDRETWVDAERRCREQQSHLSSIVTPEEQEFVNNNAQDYQWIGLNDRTIEGDFRWSDGHPMQFENWRPNQPDNFFAAGEDCVVMIWHEKGEWNDVPCNYHLPFTCKKGTATTYKRRLQKRSSRHPRRSRPSTAH

SEQ ID NO: 102 - protein, 2530 aa, Homo sapiens
MTTLLWVFVTLRVITAAVTVETSDHDNSLSVSIPQPSPLRVLLGTSLTIPCYFIDPMHPVTTAPSTAPLAPRIKWSRVSKEKEVVLLVATEGRVRVNSAYQDKVSLPNYPAIPSDATLEVQSLRSNDSGVYRCEVMHGIEDSEATLEVVVKGIVFHYRAISTRYTLDFDRAQRACLQNSAIIATPEQLQAAYEDGFHQCDAGWLADQTVRYPIHTPREGCYGDKDEFPGVRTYGIRDTNETYDVYCFAEEMEGEVFYATSPEKFTFQEAANECRRLGARLATTGQLYLAWQAGMDMCSAGWLADRSVRYPISKARPNCGGNLLGVRTVYVHANQTGYPDPSSRYDAICYTGEDFVDIPENFFGVGGEEDITVQTVTWPDMELPLPRNITEGEARGSVILTVKPIFEVSPSPLEPEEPFTFAPEIGATAFAEVENETGEATRPWGFPTPGLGPATAFTSEDLVVQVTAVPGQPHLPGGVVFHYRPGPTRYSLTFEEAQQACLRTGAVIASPEQLQAAYEAGYEQCDAGWLRDQTVRYPIVSPRTPCVGDKDSSPGVRTYGVRPSTETYDVYCFVDRLEGEVFFATRLEQFTFQEALEFCESHNATLATTGQLYAAWSRGLDKCYAGWLADGSLRYPIVTPRPACGGDKPGVRTVYLYPNQTGLPDPLSRHHAFCFRGISAVPSPGEEEGGTPTSPSGVEEWIVTQVVPGVAAVPVEEETTAVPSGETTAILEFTTEPENQTEWEPAYTPVGTSPLPGILPTWPPTGAATEESTEGPSATEVPSASEEPSPSEVPFPSEEPSPSEEPFPSVRPFPSVELFPSEEPFPSKEPSPSEEPSASEEPYTPSPPVPSWTELPSSGEESGAPDVSGDFTGSGDVSGHLDFSGQLSGDRASGLPSGDLDSSGLTSTVGSGLPVESGLPSGDEERIEWPSTPTVGELPSGAEILEGSASGVGDLSGLPSGEVLETSASGVGDLSGLPSGEVLETTAPGVEDISGLPSGEVLETTAPGVEDISGLPSGEVLETTAPGVEDISGLPSGEVLETTAPGVEDISGLPSGEVLETTAPGVEDISGLPSGEVLETTAPGVEDISGLPSGEVLETAAPGVEDISGLPSGEVLETAAPGVEDISGLPSGEVLETAAPGVEDISGLPSGEVLETAAPGVEDISGLPSGEVLETAAPGVEDISGLPSGEVLETAAPGVEDISGLPSGEVLETAAPGVEDISGLPSGEVLETAAPGVEDISGLPSGEVLETAAPGVEDISGLPSGEVLETAAPGVEDISGLPSGEVLETAAPGVEDISGLPSGEVLETAAPGVEDISGLPSGEVLETAAPGVEDISGLPSGEVLETAAPGVEDISGLPSGEVLETAAPGVEDISGLPSGEVLETAAPGVEDISGLPSGEVLETTAPGVEEISGLPSGEVLETTAPGVDEISGLPSGEVLETTAPGVEEISGLPSGEVLETSTSAVGDLSGLPSGGEVLEISVSGVEDISGLPSGEVVETSASGIEDVSELPSGEGLETSASGVEDLSRLPSGEEVLEISASGFGDLSGLPSGGEGLETSASEVGTDLSGLPSGREGLETSASGAEDLSGLPSGKEDLVGSASGDLDLGKLPSGTLGSGQAPETSGLPSGFSGEYSGVDLGSGPPSGLPDFSGLPSGFPTVSLVDSTLVEVVTASTASELEGRGTIGISGAGEISGLPSSELDISGRASGLPSGTELSGQASGSPDVSGEIPGLFGVSGQPSGFPDTSGETSGVTELSGLSSGQPGISGEASGVLYGTSQPFGITDLSGETSGVPDLSGQPSGLPGFSGATSGVPDLVSGTTSGSGESSGITFVDTSLVEVAPTTFKEEEGLGSVELSGLPSGEADLSGKSGMVDVSGQFSGTVDSSGFTSQTPEFSGLPSGIAEVSGESSRAEIGSSLPSGAYYGSGTPSSFPTVSLVDRTLVESVTQAPTAQEAGEGPSGILELSGAHSGAPDMSGEHSGFLDLSGLQSGLIEPSGEPPGTPYFSGDFASTTNVSGESSVAMGTSGEASGLPEVTLITSEFVEGVTEPTISQELGQRPPVTHTPQLFESSGKVSTAGDISGATPVLPGSGVEVSSVPESSSETSAYPEAGFGASAAPEASREDSGSPDLSETTSAFHEANLERSSGLGVSGSTLTFQEGEASAAPEVSGESTTTSDVGTEAPGLPSATPTASGDRTEISGDLSGHTSQLGVVISTSIPESEWTQQTQRPAETHLEIESSSLLYSGEETHTVETATSPTDASIPASPEWKRESESTAAAPARSCAEEPCGAGTCKETEGHVICLCPPGYTGEHCNIDQEVCEEGWNKYQGHCYRHFPDRETWVDAERRCREQQSHLSSIVTPEEQEFVNNNAQDYQWIGLNDRTIEGDFRWSDGHPMQFENWRPNQPDNFFAAGEDCVVMIWHEKGEWNDVPCNYHLPFTCKKGTVACGEPPVVEHARTFGQKKDRYEINSLVRYQCTEGFVQRHMPTIRCQPSGHWEEPQITCTDPTTYKRRLQKRSSRHPRRSRPSTAH

SEQ ID NO: 103 - protein, 2492 aa, Homo sapiens
MTTLLWVFVTLRVITAAVTVETSDHDNSLSVSIPQPSPLRVLLGTSLTIPCYFIDPMHPVTTAPSTAPLAPRIKWSRVSKEKEVVLLVATEGRVRVNSAYQDKVSLPNYPAIPSDATLEVQSLRSNDSGVYRCEVMHGIEDSEATLEVVVKGIVFHYRAISTRYTLDFDRAQRACLQNSAIIATPEQLQAAYEDGFHQCDAGWLADQTVRYPIHTPREGCYGDKDEFPGVRTYGIRDTNETYDVYCFAEEMEGEVFYATSPEKFTFQEAANECRRLGARLATTGQLYLAWQAGMDMCSAGWLADRSVRYPISKARPNCGGNLLGVRTVYVHANQTGYPDPSSRYDAICYTGEDFVDIPENFFGVGGEEDITVQTVTWPDMELPLPRNITEGEARGSVILTVKPIFEVSPSPLEPEEPFTFAPEIGATAFAEVENETGEATRPWGFPTPGLGPATAFTSEDLVVQVTAVPGQPHLPGGVVFHYRPGPTRYSLTFEEAQQACLRTGAVIASPEQLQAAYEAGYEQCDAGWLRDQTVRYPIVSPRTPCVGDKDSSPGVRTYGVRPSTETYDVYCFVDRLEGEVFFATRLEQFTFQEALEFCESHNATLATTGQLYAAWSRGLDKCYAGWLADGSLRYPIVTPRPACGGDKPGVRTVYLYPNQTGLPDPLSRHHAFCFRGISAVPSPGEEEGGTPTSPSGVEEWIVTQVVPGVAAVPVEEETTAVPSGETTAILEFTTEPENQTEWEPAYTPVGTSPLPGILPTWPPTGAATEESTEGPSATEVPSASEEPSPSEVPFPSEEPSPSEEPFPSVRPFPSVELFPSEEPFPSKEPSPSEEPSASEEPYTPSPPVPSWTELPSSGEESGAPDVSGDFTGSGDVSGHLDFSGQLSGDRASGLPSGDLDSSGLTSTVGSGLPVESGLPSGDEERIEWPSTPTVGELPSGAEILEGSASGVGDLSGLPSGEVLETSASGVGDLSGLPSGEVLETTAPGVEDISGLPSGEVLETTAPGVEDISGLPSGEVLETTAPGVEDISGLPSGEVLETTAPGVEDISGLPSGEVLETTAPGVEDISGLPSGEVLETTAPGVEDISGLPSGEVLETAAPGVEDISGLPSGEVLETAAPGVEDISGLPSGEVLETAAPGVEDISGLPSGEVLETAAPGVEDISGLPSGEVLETAAPGVEDISGLPSGEVLETAAPGVEDISGLPSGEVLETAAPGVEDISGLPSGEVLETAAPGVEDISGLPSGEVLETAAPGVEDISGLPSGEVLETAAPGVEDISGLPSGEVLETAAPGVEDISGLPSGEVLETAAPGVEDISGLPSGEVLETAAPGVEDISGLPSGEVLETAAPGVEDISGLPSGEVLETAAPGVEDISGLPSGEVLETAAPGVEDISGLPSGEVLETTAPGVEEISGLPSGEVLETTAPGVDEISGLPSGEVLETTAPGVEEISGLPSGEVLETSTSAVGDLSGLPSGGEVLEISVSGVEDISGLPSGEVVETSASGIEDVSELPSGEGLETSASGVEDLSRLPSGEEVLEISASGFGDLSGLPSGGEGLETSASEVGTDLSGLPSGREGLETSASGAEDLSGLPSGKEDLVGSASGDLDLGKLPSGTLGSGQAPETSGLPSGFSGEYSGVDLGSGPPSGLPDFSGLPSGFPTVSLVDSTLVEVVTASTASELEGRGTIGISGAGEISGLPSSELDISGRASGLPSGTELSGQASGSPDVSGEIPGLFGVSGQPSGFPDTSGETSGVTELSGLSSGQPGISGEASGVLYGTSQPFGITDLSGETSGVPDLSGQPSGLPGFSGATSGVPDLVSGTTSGSGESSGITFVDTSLVEVAPTTFKEEEGLGSVELSGLPSGEADLSGKSGMVDVSGQFSGTVDSSGFTSQTPEFSGLPSGIAEVSGESSRAEIGSSLPSGAYYGSGTPSSFPTVSLVDRTLVESVTQAPTAQEAGEGPSGILELSGAHSGAPDMSGEHSGFLDLSGLQSGLIEPSGEPPGTPYFSGDFASTTNVSGESSVAMGTSGEASGLPEVTLITSEFVEGVTEPTISQELGQRPPVTHTPQLFESSGKVSTAGDISGATPVLPGSGVEVSSVPESSSETSAYPEAGFGASAAPEASREDSGSPDLSETTSAFHEANLERSSGLGVSGSTLTFQEGEASAAPEVSGESTTTSDVGTEAPGLPSATPTASGDRTEISGDLSGHTSQLGVVISTSIPESEWTQQTQRPAETHLEIESSSLLYSGEETHTVETATSPTDASIPASPEWKRESESTAADQEVCEEGWNKYQGHCYRHFPDRETWVDAERRCREQQSHLSSIVTPEEQEFVNNNAQDYQWIGLNDRTIEGDFRWSDGHPMQFENWRPNQPDNFFAAGEDCVVMIWHEKGEWNDVPCNYHLPFTCKKGTVACGEPPVVEHARTFGQKKDRYEINSLVRYQCTEGFVQRHMPTIRCQPSGHWEEPQITCTDPTTYKRRLQKRSSRHPRRSRPSTAH

SEQ ID NO: 104 - protein, 721 aa, Homo sapiens
MTTLLWVFVTLRVITAAVTVETSDHDNSLSVSIPQPSPLRVLLGTSLTIPCYFIDPMHPVTTAPSTAPLAPRIKWSRVSKEKEVVLLVATEGRVRVNSAYQDKVSLPNYPAIPSDATLEVQSLRSNDSGVYRCEVMHGIEDSEATLEVVVKGIVFHYRAISTRYTLDFDRAQRACLQNSAIIATPEQLQAAYEDGFHQCDAGWLADQTVRYPIHTPREGCYGDKDEFPGVRTYGIRDTNETYDVYCFAEEMEGEVFYATSPEKFTFQEAANECRRLGARLATTGQLYLAWQAGMDMCSAGWLADRSVRYPISKARPNCGGNLLGVRTVYVHANQTGYPDPSSRYDAICYTGEDFVDIPENFFGVGGEEDITVQTVTWPDMELPLPRNITEGEARGSVILTVKPIFEVSPSPLEPEEPFTFAPEIGATAFAEVENETGEATRPWGFPTPGLGPATAFTSEDLVVQVTAVPGQPHLPGGVVFHYRPGPTRYSLTFEEAQQACLRTGAVIASPEQLQAAYEAGYEQCDAGWLRDQTVRYPIVSPRTPCVGDKDSSPGVRTYGVRPSTETYDVYCFVDRLEGEVFFATRLEQFTFQEALEFCESHNATLATTGQLYAAWSRGLDKCYAGWLADGSLRYPIVTPRPACGGDKPGVRTVYLYPNQTGLPDPLSRHHAFCFRGMQPHFGSNSPFCLERTPLGSPDPATTQYPIHQSKKMSVPLGQSQL

SEQ ID NO: 105 - protein, 2530 aa, Homo sapiens; identical to SEQ ID NO: 102

SEQ ID NO: 106 - protein, 2568 aa, Homo sapiens
MTTLLWVFVTLRVITAAVTVETSDHDNSLSVSIPQPSPLRVLLGTSLTIPCYFIDPMHPVTTAPSTAPLAPRIKWSRVSKEKEVVLLVATEGRVRVNSAYQDKVSLPNYPAIPSDATLEVQSLRSNDSGVYRCEVMHGIEDSEATLEVVVKGIVFHYRAISTRYTLDFDRAQRACLQNSAIIATPEQLQAAYEDGFHQCDAGWLADQTVRYPIHTPREGCYGDKDEFPGVRTYGIRDTNETYDVYCFAEEMEGEVFYATSPEKFTFQEAANECRRLGARLATTGQLYLAWQAGMDMCSAGWLADRSVRYPISKARPNCGGNLLGVRTVYVHANQTGYPDPSSRYDAICYTGEDFVDIPENFFGVGGEEDITVQTVTWPDMELPLPRNITEGEARGSVILTVKPIFEVSPSPLEPEEPFTFAPEIGATAFAEVENETGEATRPWGFPTPGLGPATAFTSEDLVVQVTAVPGQPHLPGGVVFHYRPGPTRYSLTFEEAQQACLRTGAVIASPEQLQAAYEAGYEQCDAGWLRDQTVRYPIVSPRTPCVGDKDSSPGVRTYGVRPSTETYDVYCFVDRLEGEVFFATRLEQFTFQEALEFCESHNATLATTGQLYAAWSRGLDKCYAGWLADGSLRYPIVTPRPACGGDKPGVRTVYLYPNQTGLPDPLSRHHAFCFRGISAVPSPGEEEGGTPTSPSGVEEWIVTQVVPGVAAVPVEEETTAVPSGETTAILEFTTEPENQTEWEPAYTPVGTSPLPGILPTWPPTGAATEESTEGPSATEVPSASEEPSPSEVPFPSEEPSPSEEPFPSVRPFPSVELFPSEEPFPSKEPSPSEEPSASEEPYTPSPPVPSWTELPSSGEESGAPDVSGDFTGSGDVSGHLDFSGQLSGDRASGLPSGDLDSSGLTSTVGSGLPVESGLPSGDEERIEWPSTPTVGELPSGAEILEGSASGVGDLSGLPSGEVLETSASGVGDLSGLPSGEVLETTAPGVEDISGLPSGEVLETTAPGVEDISGLPSGEVLETTAPGVEDISGLPSGEVLETTAPGVEDISGLPSGEVLETTAPGVEDISGLPSGEVLETTAPGVEDISGLPSGEVLETAAPGVEDISGLPSGEVLETAAPGVEDISGLPSGEVLETAAPGVEDISGLPSGEVLETAAPGVEDISGLPSGEVLETAAPGVEDISGLPSGEVLETAAPGVEDISGLPSGEVLETAAPGVEDISGLPSGEVLETAAPGVEDISGLPSGEVLETAAPGVEDISGLPSGEVLETAAPGVEDISGLPSGEVLETAAPGVEDISGLPSGEVLETAAPGVEDISGLPSGEVLETAAPGVEDISGLPSGEVLETAAPGVEDISGLPSGEVLETAAPGVEDISGLPSGEVLETAAPGVEDISGLPSGEVLETTAPGVEEISGLPSGEVLETTAPGVDEISGLPSGEVLETTAPGVEEISGLPSGEVLETSTSAVGDLSGLPSGGEVLEISVSGVEDISGLPSGEVVETSASGIEDVSELPSGEGLETSASGVEDLSRLPSGEEVLEISASGFGDLSGLPSGGEGLETSASEVGTDLSGLPSGREGLETSASGAEDLSGLPSGKEDLVGSASGDLDLGKLPSGTLGSGQAPETSGLPSGFSGEYSGVDLGSGPPSGLPDFSGLPSGFPTVSLVDSTLVEVVTASTASELEGRGTIGISGAGEISGLPSSELDISGRASGLPSGTELSGQASGSPDVSGEIPGLFGVSGQPSGFPDTSGETSGVTELSGLSSGQPGISGEASGVLYGTSQPFGITDLSGETSGVPDLSGQPSGLPGFSGATSGVPDLVSGTTSGSGESSGITFVDTSLVEVAPTTFKEEEGLGSVELSGLPSGEADLSGKSGMVDVSGQFSGTVDSSGFTSQTPEFSGLPSGIAEVSGESSRAEIGSSLPSGAYYGSGTPSSFPTVSLVDRTLVESVTQAPTAQEAGEGPSGILELSGAHSGAPDMSGEHSGFLDLSGLQSGLIEPSGEPPGTPYFSGDFASTTNVSGESSVAMGTSGEASGLPEVTLITSEFVEGVTEPTISQELGQRPPVTHTPQLFESSGKVSTAGDISGATPVLPGSGVEVSSVPESSSETSAYPEAGFGASAAPEASREDSGSPDLSETTSAFHEANLERSSGLGVSGSTLTFQEGEASAAPEVSGESTTTSDVGTEAPGLPSATPTASGDRTEISGDLSGHTSQLGVVISTSIPESEWTQQTQRPAETHLEIESSSLLYSGEETHTVETATSPTDASIPASPEWKRESESTAAAPARSCAEEPCGAGTCKETEGHVICLCPPGYTGEHCNIDIDECLSSPCLNGATCVDAIDSFTCLCLPSYEGDLCEIDQEVCEEGWNKYQGHCYRHFPDRETWVDAERRCREQQSHLSSIVTPEEQEFVNNNAQDYQWIGLNDRTIEGDFRWSDGHPMQFENWRPNQPDNFFAAGEDCVVMIWHEKGEWNDVPCNYHLPFTCKKGTVACGEPPVVEHARTFGQKKDRYEINSLVRYQCTEGFVQRHMPTIRCQPSGHWEEPQITCTDPTTYKRRLQKRSSRHPRRSRPSTAH

SEQ ID NO: 107 - protein, 2473 aa, Homo sapiens
MTTLLWVFVTLRVITAAVTVETSDHDNSLSVSIPQPSPLRVLLGTSLTIPCYFIDPMHPVTTAPSTAPLAPRIKWSRVSKEKEVVLLVATEGRVRVNSAYQDKVSLPNYPAIPSDATLEVQSLRSNDSGVYRCEVMHGIEDSEATLEVVVKGIVFHYRAISTRYTLDFDRAQRACLQNSAIIATPEQLQAAYEDGFHQCDAGWLADQTVRYPIHTPREGCYGDKDEFPGVRTYGIRDTNETYDVYCFAEEMEGEVFYATSPEKFTFQEAANECRRLGARLATTGQLYLAWQAGMDMCSAGWLADRSVRYPISKARPNCGGNLLGVRTVYVHANQTGYPDPSSRYDAICYTGEDFVDIPENFFGVGGEEDITVQTVTWPDMELPLPRNITEGEARGSVILTVKPIFEVSPSPLEPEEPFTFAPEIGATAFAEVENETGEATRPWGFPTPGLGPATAFTSEDLVVQVTAVPGQPHLPGGVVFHYRPGPTRYSLTFEEAQQACLRTGAVIASPEQLQAAYEAGYEQCDAGWLRDQTVRYPIVSPRTPCVGDKDSSPGVRTYGVRPSTETYDVYCFVDRLEGEVFFATRLEQFTFQEALEFCESHNATLATTGQLYAAWSRGLDKCYAGWLADGSLRYPIVTPRPACGGDKPGVRTVYLYPNQTGLPDPLSRHHAFCFRGISAVPSPGEEEGGTPTSPSGVEEWIVTQVVPGVAAVPVEEETTAVPSGETTAILEFTTEPENQTEWEPAYTPVGTSPLPGILPTWPPTGAATEESTEGPSATEVPSASEEPSPSEVPFPSEEPSPSEEPFPSVRPFPSVELFPSEEPFPSKEPSPSEEPSASEEPYTPSPPVPSWTELPSSGEESGAPDVSGDFTGSGDVSGHLDFSGQLSGDRASGLPSGDLDSSGLTSTVGSGLPVESGLPSGDEERIEWPSTPTVGELPSGAEILEGSASGVGDLSGLPSGEVLETSASGVGDLSGLPSGEVLETTAPGVEDISGLPSGEVLETTAPGVEDISGLPSGEVLETTAPGVEDISGLPSGEVLETTAPGVEDISGLPSGEVLETTAPGVEDISGLPSGEVLETAAPGVEDISGLPSGEVLETAAPGVEDISGLPSGEVLETAAPGVEDISGLPSGEVLETAAPGVEDISGLPSGEVLETAAPGVEDISGLPSGEVLETAAPGVEDISGLPSGEVLETAAPGVEDISGLPSGEVLETAAPGVEDISGLPSGEVLETAAPGVEDISGLPSGEVLETAAPGVEDISGLPSGEVLETAAPGVEDISGLPSGEVLETAAPGVEDISGLPSGEVLETAAPGVEDISGLPSGEVLETAAPGVEDISGLPSGEVLETAAPGVEDISGLPSGEVLETAAPGVEDISGLPSGEVLETTAPGVEEISGLPSGEVLETTAPGVDEISGLPSGEVLETTAPGVEEISGLPSGEVLETSTSAVGDLSGLPSGGEVLEISVSGVEDISGLPSGEVVETSASGIEDVSELPSGEGLETSASGVEDLSRLPSGEEVLEISASGFGDLSGLPSGGEGLETSASEVGTDLSGLPSGREGLETSASGAEDLSGLPSGKEDLVGSASGDLDLGKLPSGTLGSGQAPETSGLPSGFSGEYSGVDLGSGPPSGLPDFSGLPSGFPTVSLVDSTLVEVVTASTASELEGRGTIGISGAGEISGLPSSELDISGRASGLPSGTELSGQASGSPDVSGEIPGLFGVSGQPSGFPDTSGETSGVTELSGLSSGQPGISGEASGVLYGTSQPFGITDLSGETSGVPDLSGQPSGLPGFSGATSGVPDLVSGTTSGSGESSGITFVDTSLVEVAPTTFKEEEGLGSVELSGLPSGEADLSGKSGMVDVSGQFSGTVDSSGFTSQTPEFSGLPSGIAEVSGESSRAEIGSSLPSGAYYGSGTPSSFPTVSLVDRTLVESVTQAPTAQEAGEGPSGILELSGAHSGAPDMSGEHSGFLDLSGLQSGLIEPSGEPPGTPYFSGDFASTTNVSGESSVAMGTSGEASGLPEVTLITSEFVEGVTEPTISQELGQRPPVTHTPQLFESSGKVSTAGDISGATPVLPGSGVEVSSVPESSSETSAYPEAGFGASAAPEASREDSGSPDLSETTSAFHEANLERSSGLGVSGSTLTFQEGEASAAPEVSGESTTTSDVGTEAPGLPSATPTASGDRTEISGDLSGHTSQLGVVISTSIPESEWTQQTQRPAETHLEIESSSLLYSGEETHTVETATSPTDASIPASPEWKRESESTAADQEVCEEGWNKYQGHCYRHFPDRETWVDAERRCREQQSHLSSIVTPEEQEFVNNNAQDYQWIGLNDRTIEGDFRWSDGHPMQFENWRPNQPDNFFAAGEDCVVMIWHEKGEWNDVPCNYHLPFTCKKGTVACGEPPVVEHARTFGQKKDRYEINSLVRYQCTEGFVQRHMPTIRCQPSGHWEEPQITCTDPTTYKRRLQKRSSRHPRRSRPSTAH

SEQ ID NO: 108 - protein, 156 aa, Homo sapiens
  VARIANT 1: note = misc_feature - Xaa can be any naturally occurring amino acid
XWNDVPCNYHLPFTCKKGTVACGEPPVVEHARTFGQKKDRYEINSLVRYQCTEGFVQRHMPTIRCQPSGHWEEPQITCTDREHHPGHLAEHRPPPTNADYRSGAHGTLGGAAPAQPTEKSFQDAPRTLSPGACQADVHPTQTVSSSCRFLSYKESH

SEQ ID NO: 109 - protein, 282 aa, Homo sapiens
LDMETTYSVATVCHPNGSCLQLEPDLTNVMATSRKYEDLLWAWEGWRDKAGRAILQFYPKYVELINQAARLNGYVDAGDSWRSMYETPSLEQDLERLFQELQPLYLNLHAYVRRALHRHYGAQHINLEGPIPAHLLGNMWAQTWSNIYDLVVPFPSAPSMDTTEAMLKQGWTPRRMFKEADDFFTSLGLLPVPPEFWNKSMLEKPTDGREVVCHASAWDFYNEHDINFLMKMALDKIAFIPFSYLVDQWRWRVFDGSITKENYNQEWWSLRLKYQGLCPPVP

SEQ ID NO: 110 - protein, 314 aa, Homo sapiens
MDEGGCSQAAPAFAEGAGLGSGAPALSGSCLLTSGRCRCHRHRTALSIHPPLARPLFWSQFLLHHSHEADSLQKEEARLPQTKEEAALLSQEFAEAWGQKAKELYEPIWQNFTDPQLRRIIGAVRTLGSANLPLAKRQQYNALLSNMSRIYSTAKVCLPNKTATCWSLDPDLTNILASSRSYAMLLFAWEGWHNAAGIPLKPLYEDFTALSNEAYKQDGFTDTGAYWRSWYNSPTFEDDLEHLYQQLEPLYLNLHAFVRRALHRRYGDRYINLRGPIPAHLLGDMWAQSWENIYDMVVPFPDKPNLDVTSTMLQ

SEQ ID NO: 111 - protein, 168 aa, Homo sapiens
MGAASGRRGPGLLLPLPLLLLLPPQPALALDPGLQPGNFSADEAGAQLFAQSYNSSAEQVLFQSVAASWAHDTNITAENARRQEEAALLSQEFAEAWGQKAKELYEPIWQNFTDPQLRRIIGAVRTLGSANLPLAKRQQISPTSWLPREATPCSCLPGRAGTTLRASR

SEQ ID NO: 112 - protein, 1306 aa, Homo sapiens
MGAASGRRGPGLLLPLPLLLLLPPQPALALDPGLQPGNFSADEAGAQLFAQSYNSSAEQVLFQSVAASWAHDTNITAENARRQEEAALLSQEFAEAWGQKAKELYEPIWQNFTDPQLRRIIGAVRTLGSANLPLAKRQQYNALLSNMSRIYSTAKVCLPNKTATCWSLDPDLTNILASSRSYAMLLFAWEGWHNAAGIPLKPLYEDFTALSNEAYKQDGFTDTGAYWRSWYNSPTFEDDLEHLYQQLEPLYLNLHAFVRRALHRRYGDRYINLRGPIPAHLLGDMWAQSWENIYDMVVPFPDKPNLDVTSTMLQQGWNATHMFRVAEEFFTSLELSPMPPEFWEGSMLEKPADGREVVCHASAWDFYNRKDFRIKQCTRVTMDQLSTVHHEMGHIQYYLQYKDLPVSLRRGANPGFHEAIGDVLALSVSTPEHLHKIGLLDRVTNDTESDINYLLKMALEKIAFLPFGYLVDQWRWGVFSGRTPPSRYNFDWWYLRTKYQGICPPVTRNETHFDAGAKFHVPNVTPYIRYFVSFVLQFQFHEALCKEAGYEGPLHQCDIYRSTKAGAKLRKVLQAGSSRPWQEVLKDMVGLDALDAQPLLKYFQPVTQWLQEQNQQNGEVLGWPEYQWHPPLPDNYPEGIDLVTDEAEASKFVEEYDRTSQVVWNEYAEANWNYNTNITTETSKILLQKNMQIANHTLKYGTQARKFDVNQLQNTTIKRIIKKVQDLERAALPAQELEEYNKILLDMETTYSVATVCHPNGSCLQLEPDLTNVMATSRKYEDLLWAWEGWRDKAGRAILQFYPKYVELINQAARLNGYVDAGDSWRSMYETPSLEQDLERLFQELQPLYLNLHAYVRRALHRHYGAQHINLEGPIPAHLLGNMWAQTWSNIYDLVVPFPSAPSMDTTEAMLKQGWTPRRMFKEADDFFTSLGLLPVPPEFWNKSMLEKPTDGREVVCHASAWDFYNGKDFRIKQCTTVNLEDLVVAHHEMGHIQYFMQYKDLPVALREGANPGFHEAIGDVLALSVSTPKHLHSLNLLSSEGGSDEHDINFLMKMALDKIAFIPFSYLVDQWRWRVFDGSITKENYNQEWWSLRLKYQGLCPPVPRTQGDFDPGAKFHIPSSVPYIRYFVSFIIQFQFHEALCQAAGHTGPLHKCDIYQSKEAGQRLATAMKLGFSRPWPEAMQLITGQPNMSASAMLSYFKPLLDWLRTENELHGEKLGWPQYNWTPNSARSEGPLPDSGRVSFLGLDLDAQQARVGQWLLLFLGIALLVATLGLSQRLFSIRHRSLHRHSHGPQFGSEVELRHS

SEQ ID NO: 113 - protein, 1242 aa, Homo sapiens
MGAASGRRGPGLLLPLPLLLLLPPQPALALDPGLQPGNFSADEAGAQLFAQSYNSSAEQVLFQSVAASWAHDTNITAENARRQEEAALLSQEFAEAWGQKAKELYEPIWQNFTDPQLRRIIGAVRTLGSANLPLAKRQQYNALLSNMSRIYSTAKVCLPNKTATCWSLDPDLTNILASSRSYAMLLFAWEGWHNAAGIPLKPLYEDFTALSNEAYKQDGFTDTGAYWRSWYNSPTFEDDLEHLYQQLEPLYLNLHAFVRRALHRRYGDRYINLRGPIPAHLLGDMWAQSWENIYDMVVPFPDKPNLDVTSTMLQQGWNATHMFRVAEEFFTSLELSPMPPEFWEGSMLEKPADGREVVCHASAWDFYNRKDFRIKQCTRVTMDQLSTVHHEMGHIQYYLQYKDLPVSLRRGANPGFHEAIGDVLALSVSTPEHLHKIGLLDRVTNDTESDINYLLKMALEKIAFLPFGYLVDQWRWGVFSGRTPPSRYNFDWWYLRTKYQGICPPVTRNETHFDAGAKFHVPNVTPYIRYFVSFVLQFQFHEALCKEAGYEGPLHQCDIYRSTKAGAKLRKVLQAGSSRPWQEVLKDMVGLDALDAQPLLKYFQPVTQWLQEQNQQNGEVLGWPEYQWHPPLPDNYPEGIDLVTDEAEASKFVEEYDRTSQVVWNEYAEANWNYNTNITTETSKILLQKNMQIANHTLKYGTQARKFDVNQLQNTTIKRIIKKVQDLERAALPAQELEEYNKILLDMETTYSVATVCHPNGSCLQLEPDLTNVMATSRKYEDLLWAWEGWRDKAGRAILQFYPKYVELINQAARLNGYVDAGDSWRSMYETPSLEQDLERLFQELQPLYLNLHAYVRRALHRHYGAQHINLEGPIPAHLLGNMWAQTWSNIYDLVVPFPSAPSMDTTEAMLKQGWTPRRMFKEADDFFTSLGLLPVPPEFWNKSMLEKPTDGREVVCHASAWDFYNGKDFRIKQCTTVNLEDLVVAHHEMGHIQYFMQYKDLPVALREGANPGFHEAIGDVLALSVSTPKHLHSLNLLSSEGGSDEHDINFLMKMALDKIAFIPFSYLVDQWRWRVFDGSITKENYNQEWWSLRLKYQGLCPPVPRTQGDFDPGAKFHIPSSVPYIRYFVSFIIQFQFHEALCQAAGHTGPLHKCDIYQSKEAGQRLATAMKLGFSRPWPEAMQLITGQPNMSASAMLSYFKPLLDWLRTENELHGEKLGWPQYNWTPNSGTATHPTSSLGS

SEQ ID NO: 114 - protein, 36 aa, Homo sapiens
MGQGWATAGLPSLLFLLLCYGHPLLVPSQEASQQTW

SEQ ID NO: 115 - protein, 36 aa, Homo sapiens; identical to SEQ ID NO: 114

SEQ ID NO: 116 - protein, 145 aa, Homo sapiens
MGQGWATAGLPSLLFLLLCYGHPLLVPSQEASQQVTVTHGTSSQATTSSQTTTHQATAHQTSAQSPNLVTDEAEASKFVEEYDRTSQVVWNEYAEANWNYNTNITTETSKILGLYDTWGSSLLCPCLDMCCLTAGIQGGCRRTCK

SEQ ID NO: 117 - protein, 208 aa, Homo sapiens
MGQGWATAGLPSLLFLLLCYGHPLLVPSQEASQQVTVTHGTSSQATTSSQTTTHQATAHQTSAQSPNLVTDEAEASKFVEEYDRTSQVVWNEYAEANWNYNTNITTETSKILLQKNMQIANHTLKYGTQARKFDVNQLQNTTIKRIIKKVQDLERAALPAQELEEYNKILLDMETTYSVATVCHPNGSCLQLEPALKFSELPLQAEVS

SEQ ID NO: 118 - protein, 732 aa, Homo sapiens
MGQGWATAGLPSLLFLLLCYGHPLLVPSQEASQQVTVTHGTSSQATTSSQTTTHQATAHQTSAQSPNLVTDEAEASKFVEEYDRTSQVVWNEYAEANWNYNTNITTETSKILLQKNMQIANHTLKYGTQARKFDVNQLQNTTIKRIIKKVQDLERAALPAQELEEYNKILLDMETTYSVATVCHPNGSCLQLEPDLTNVMATSRKYEDLLWAWEGWRDKAGRAILQFYPKYVELINQAARLNGYVDAGDSWRSMYETPSLEQDLERLFQELQPLYLNLHAYVRRALHRHYGAQHINLEGPIPAHLLGNMWAQTWSNIYDLVVPFPSAPSMDTTEAMLKQGWTPRRMFKEADDFFTSLGLLPVPPEFWNKSMLEKPTDGREVVCHASAWDFYNGKDFRIKQCTTVNLEDLVVAHHEMGHIQYFMQYKDLPVALREGANPGFHEAIGDVLALSVSTPKHLHSLNLLSSEGGSDEHDINFLMKMALDKIAFIPFSYLVDQWRWRVFDGSITKENYNQEWWSLRLKYQGLCPPVPRTQGDFDPGAKFHIPSSVPYIRYFVSFIIQFQFHEALCQAAGHTGPLHKCDIYQSKEAGQRLATAMKLGFSRPWPEAMQLITGQPNMSASAMLSYFKPLLDWLRTENELHGEKLGWPQYNWTPNSARSEGPLPDSGRVSFLGLDLDAQQARVGQWLLLFLGIALLVATLGLSQRLFSIRHRSLHRHSHGPQFGSEVELRHS

SEQ ID NO: 119 - protein, 691 aa, Homo sapiens
MGQGWATAGLPSLLFLLLCYGHPLLVPSQEASQQVTVTHGTSSQATTSSQTTTHQATAHQTSAQSPNLVTDEAEASKFVEEYDRTSQVVWNEYAEANWNYNTNITTETSKILLQKNMQIANHTLKYGTQARKFDVNQLQNTTIKRIIKKVQDLERAALPAQELEEYNKILLDMETTYSVATVCHPNGSCLQLEPDLTNVMATSRKYEDLLWAWEGWRDKAGRAILQFYPKYVELINQAARLNGYVDAGDSWRSMYETPSLEQDLERLFQELQPLYLNLHAYVRRALHRHYGAQHINLEGPIPAHLLGNMWAQTWSNIYDLVVPFPSAPSMDTTEAMLKQGWTPRRMFKEADDFFTSLGLLPVPPEFWNKSMLEKPTDGREVVCHASAWDFYNGKDFRIKQCTTVNLEDLVVAHHEMGHIQYFMQYKDLPVALREGANPGFHEAIGDVLALSVSTPKHLHSLNLLSSEGGSDEHDINFLMKMALDKIAFIPFSYLVDQWRWRVFDGSITKENYNQEWWSLRLKYQGLCPPVPRTQGDFDPGAKFHIPSSVPYIRTAMKLGFSRPWPEAMQLITGQPNMSASAMLSYFKPLLDWLRTENELHGEKLGWPQYNWTPNSARSEGPLPDSGRVSFLGLDLDAQQARVGQWLLLFLGIALLVATLGLSQRLFSIRHRSLHRHSHGPQFGSEVELRHS

SEQ ID NO: 120 - protein, 119 aa, Homo sapiens
  VARIANT 1: note = misc_feature - Xaa can be any naturally occurring amino acid
XQAGSSRPWQEVLKDMVGLDALDAQPLLKYFQPVTQWLQEQNQQNGEVLGWPEYQWHPPLPDNYPEGIGDSHPWDKQPGNNQQPDNHPPGDGPPDISPEPKWDHAGEGQGARGGRGGAG

SEQ ID NO: 121 - protein, 138 aa, Homo sapiens
  VARIANT 1: note = misc_feature - Xaa can be any naturally occurring amino acid
XRTQGDFDPGAKFHIPSSVPYIRYFVSFIIQFQFHEALCQAAGHTGPLHKCDIYQSKEAGQRLATAMKLGFSRPWPEAMQLITGQPNMSASAMLSYFKPLLDWLRTENELHGEKLGWPQYNWTPNSGTATHPTSSLGS

SEQ ID NO: 122 - protein, 94 aa, Homo sapiens
MLGLVMSCPDRTLVTKVRSHPSGNQHRPTRGGSRSFHCRRGVRPRPAALRVLPRCPAFSDAACPAAMRPPQCLLHTPSLASPLLLLLLWLLGGG

SEQ ID NO: 123 - protein, 55 aa, Homo sapiens
MRPPQCLLHTPSLASPLLLLLLWLLGGGVGAEGREDAELLVTVLRAPRCGTPTVS

SEQ ID NO: 124 - protein, 159 aa, Homo sapiens
MRPPQCLLHTPSLASPLLLLLLWLLGGGVGAEGREDAELLVTVRGGRLRGIRLKTPGGPVSAFLGIPFAEPPMGPRRFLPPEPKQPWSGVVDATTFQSVCYQYVDTLYPGFEGTEMWNPNRELSEDCLYLNVWTPYPRPTSPTPVLVWIYGGGFYSGAS

SEQ ID NO: 125 - protein, 614 aa, Homo sapiens
MRPPQCLLHTPSLASPLLLLLLWLLGGGVGAEGREDAELLVTVRGGRLRGIRLKTPGGPVSAFLGIPFAEPPMGPRRFLPPEPKQPWSGVVDATTFQSVCYQYVDTLYPGFEGTEMWNPNRELSEDCLYLNVWTPYPRPTSPTPVLVWIYGGGFYSGASSLDVYDGRFLVQAERTVLVSMNYRVGAFGFLALPGSREAPGNVGLLDQRLALQWVQENVAAFGGDPTSVTLFGESAGAASVGMHLLSPPSRGLFHRAVLQSGAPNGPWATVGMGEARRRATQLAHLVGCPPGGTGGNDTELVACLRTRPAQVLVNHEWHVLPQESVFRFSFVPVVDGDFLSDTPEALINAGDFHGLQVLVGVVKDEGSYFLVYGAPGFSKDNESLISRAEFLAGVRVGVPQVSDLAAEAVVLHYTDWLHPEDPARLREALSDVVGDHNVVCPVAQLAGRLAAQGARVYAYVFEHRASTLSWPLWMGVPHGYEIEFIFGIPLDPSRNYTAEEKIFAQRLMRYWANFARTGDPNEPRDPKAPQWPPYTAGAQQYVSLDLRPLEVRRGLRAQACAFWNRFLPKLLSATDTLDEAERQWKAEFHRWSSYMVHWKNQFDHYSKQDRCSDL

SEQ ID NO: 126 - protein, 617 aa, Homo sapiens
MRPPQCLLHTPSLASPLLLLLLWLLGGGVGAEGREDAELLVTVRGGRLRGIRLKTPGGPVSAFLGIPFAEPPMGPRRFLPPEPKQPWSGVVDATTFQSVCYQYVDTLYPGFEGTEMWNPNRELSEDCLYLNVWTPYPRPTSPTPVLVWIYGGGFYSGASSLDVYDGRFLVQAERTVLVSMNYRVGAFGFLALPGSREAPGNVGLLDQRLALQWVQENVAAFGGDPTSVTLFGESAGAASVGMHLLSPPSRGLFHRAVLQSGAPNGPWATVGMGEARRRATQLAHLVGCPPGGTGGNDTELVACLRTRPAQVLVNHEWHVLPQESVFRFSFVPVVDGDFLSDTPEALINAGDFHGLQVLVGVVKDEGSYFLVYGAPGFSKDNESLISRAEFLAGVRVGVPQVSDLAAEAVVLHYTDWLHPEDPARLREALSDVVGDHNVVCPVAQLAGRLAAQGARVYAYVFEHRASTLSWPLWMGVPHGYEIEFIFGIPLDPSRNYTAEEKIFAQRLMRYWANFARTGDPNEPRDPKAPQWPPYTAGAQQYVSLDLRPLEVRRGLRAQACAFWNRFLPKLLSATASEAPSTCPGFTHGEAAPRPGLPLPLLLLHQLLLLFLSHLRRL

SEQ ID NO: 127 - protein, 614 aa, Homo sapiens; identical to SEQ ID NO: 125

SEQ ID NO: 128 - protein, 614 aa, Homo sapiens; identical to SEQ ID NO: 125

SEQ ID NO: 129 - protein, 617 aa, Homo sapiens; identical to SEQ ID NO: 126

SEQ ID NO: 130 - protein, 435 aa, Homo sapiens [sequence omitted]

SEQ ID NO: 131 - protein, 398 aa, Homo sapiens [sequence omitted]

SEQ ID NO: 132 - protein, 526 aa, Homo sapiens
MRPPQCLLHTPSLASPLLLLLLWLLGGGVGAEGREDAELLVTVRGGRLRGIRLKTPGGPVSAFLGIPFAEPPMGPRRFLPPEPKQPWSGVVDATTFQSVCYQYVDTLYPGFEGTEMWNPNRELSEDCLYLNVWTPYPRPTSPTPVLVWIYGGGFYSGASSLDVYDGRFLVQAERTVLVSMNYRVGAFGFLALPGSREAPGNVGLLDQRLALQWVQENVAAFGGDPTSVTLFGESAGAASVGMHLLSPPSRGLFHRAVLQSGAPNGPWATVGMGEARRRATQLAHLVGCPPGGTGGNDTELVACLRTRPAQVLVNHEWHVLPQESVFRFSFVPVVDGDFLSDTPEALINAGDFHGLQLAGRLAAQGARVYAYVFEHRASTLSWPLWMGVPHGYEIEFIFGIPLDPSRNYTAEEKIFAQRLMRYWANFARTGDPNEPRDPKAPQWPPYTAGAQQYVSLDLRPLEVRRGLRAQACAFWNRFLPKLLSATDTLDEAERQWKAEFHRWSSYMVHWKNQFDHYSKQDRCSDL

SEQ ID NO: 133 - protein, 359 aa, Homo sapiens
MRPPQCLLHTPSLASPLLLLLLWLLGGGVGAEGREDAELLVTVRGGRLRGIRLKTPGGPVSAFLGIPFAEPPMGPRRFLPPEPKQPWSGVVDATTFQSVCYQYVDTLYPGFEGTEMWNPNRELSEDCLYLNVWTPYPRPTSPTPVLVWIYGGGFYSGASSLDVYDGRFLVQAERTVLVSMNYRVGAFGFLALPGSREAPGNVGLLDQRLALQWVQENVAAFGGDPTSVTLFGESAGAASVGMHLLSPPSRGLFHRAVLQSGAPNGPWATVGMGEARRRATQLAHLVGCPPGGTGGNDTELVACLRTRPAQVLVNHEWHVLPQESVFRFSFVPVVDGDFLSDTPEALINAGDFHGLQGSQ

SEQ ID NO: 134 - protein, 403 aa, Homo sapiens
MRPPQCLLHTPSLASPLLLLLLWLLGGGVGAEGREDAELLVTVRGGRLRGIRLKTPGGPVSAFLGIPFAEPPMGPRRFLPPEPKQPWSGVVDATTFQSVCYQYVDTLYPGFEGTEMWNPNRELSEDCLYLNVWTPYPRPTSPTPVLVWIYGGGFYSGASSLDVYDGRFLVQAERTVLVSMNYRVGAFGFLALPGSREAPGNVGLLDQRLALQWVQENVAAFGGDPTSVTLFGESAGAASVGMHLLSPPSRGLFHRAVLQSGAPNGPWATVGMGEARRRATQLAHLVGCPPGGTGGNDTELVACLRTRPAQVLVNHEWHVLPQESVFRFSFVPVVDGDFLSDTPEALINAGDFHGLQVLVGVVKDEGSYFLVYGAPGFSKDNESLISRAEFLAGVRVGVPQGSQ

SEQ ID NO: 135 - protein, 391 aa, Homo sapiens
MAGKRSGWSRAALLQLLLGVNLVVMPPTRARSLRFVTLEGMLQHWELGQALRQRYHGFLNTSYHRQEVYVRSTDFDRTLMSAEANLAGLFPPNGMQRFNPNISWQPIPVHTVPITEDRLLKFPLGPCPRYEQLQNETRQTPEYQNESSRNAQFLDMVANETGLTDLTLETVWNVYDTLFCEQTHGLRLPPWASPQTMQRLSRLKDFSFRFLFGIYQQAEKARLQGGVLLAQIRKNLTLMATTSQLPKLLVYSAHDTTLVALQMALDVYNGEQAPYASCHIFELYQEDSGNFSVEMYFRNESDKAPWPLSLPGCPHRCPLQDFLRLTEPVVPKDWQQECQLASGPADTEVIVALAVCGSILFLLIVLLLTVLFRMQAQPPGYRHVADGEDHA

SEQ ID NO: 136 - protein, 151 aa, Homo sapiens
MAGKRSGWSRAALLQLLLGVNLVVMPPTRARSLRFVTLLYRHGDRSPVKTYPKDPYQEEEWPQGFGQLTKEGMLQHWELGQALRQRYHGFLNTSYHRQEVYVRSTDFDRTLMSAEANLAGLFPPNGMQRFNPNISWQPIPVHTVPITEDRD

SEQ ID NO: 137 - protein, 423 aa, Homo sapiens
MAGKRSGWSRAALLQLLLGVNLVVMPPTRARSLRFVTLLYRHGDRSPVKTYPKDPYQEEEWPQGFGQLTKEGMLQHWELGQALRQRYHGFLNTSYHRQEVYVRSTDFDRTLMSAEANLAGLFPPNGMQRFNPNISWQPIPVHTVPITEDRLLKFPLGPCPRYEQLQNETRQTPEYQNESSRNAQFLDMVANETGLTDLTLETVWNVYDTLFCEQTHGLRLPPWASPQTMQRLSRLKDFSFRFLFGIYQQAEKARLQGGVLLAQIRKNLTLMATTSQLPKLLVYSAHDTTLVALQMALDVYNGEQAPYASCHIFELYQEDSGNFSVEMYFRNESDKAPWPLSLPGCPHRCPLQDFLRLTEPVVPKDWQQECQLASGPADTEVIVALAVCGSILFLLIVLLLTVLFRMQAQPPGYRHVADGEDHA

SEQ ID NO: 138 - protein, 162 aa, Homo sapiens
MAGKRSGWSRAALLQLLLGVNLVVMPPTRARSLRFVTLLYRHGDRSPVKTYPKDPYQEEEWPQGFGQLTKEGMLQHWELGQALRQRYHGFLNTSYHRQEVYVRSTDFDRTLMSAEANLAGLFPPNGMQRFNPNISWQPIPVHTVPITEDRQAQVTRTVEHSA

SEQ ID NO: 139 - protein, 305 aa, Homo sapiens
MAGKRSGWSRAALLQLLLGVNLVVMPPTRARSLRFVTLLYRHGDRSPVKTYPKDPYQEEEWPQGFGQLTKEGMLQHWELGQALRQRYHGFLNTSYHRQEVYVRSTDFDRTLMSAEANLAGLFPPNGMQRFNPNISWQPIPVHTVPITEDRQFLDMVANETGLTDLTLETVWNVYDTLFCEQTHGLRLPPWASPQTMQRLSRLKDFSFRFLFGIYQQAEKARLQGGVLLAQIRKNLTLMATTSQLPKLLVYSAHDTTLVALQMALDVYNGEQAPYASCHIFELYQEDSGNFSVEMYFRNESDKAPW

SEQ ID NO: 140 - protein, 360 aa, Homo sapiens
MAGKRSGWSRAALLQLLLGVNLVVMPPTRARSLRFVTLLYRHGDRSPVKTYPKDPYQEEEWPQGFGQLTKEGMLQHWELGQALRQRYHGFLNTSYHRQEVYVRSTDFDRTLMSAEANLAGLFPPNGMQRFNPNISWQPIPVHTVPITEDRQTHGLRLPPWASPQTMQRLSRLKDFSFRFLFGIYQQAEKARLQGGVLLAQIRKNLTLMATTSQLPKLLVYSAHDTTLVALQMALDVYNGEQAPYASCHIFELYQEDSGNFSVEMYFRNESDKAPWPLSLPGCPHRCPLQDFLRLTEPVVPKDWQQECQLASGPADTEVIVALAVCGSILFLLIVLLLTVLFRMQAQPPGYRHVADGEDHA

SEQ ID NO: 141 - protein, 160 aa, Homo sapiens
MAGKRSGWSRAALLQLLLGVNLVVMPPTRARSLRFVTLLYRHGDRSPVKTYPKDPYQEEEWPQGFGQLTKEGMLQHWELGQALRQRYHGFLNTSYHRQEVYVRSTDFDRTLMSAEANLAGLFPPNGMQRFNPNISWQPIPVHTVPITEDRSRTETLIHFS

SEQ ID NO: 142 - protein, 395 aa, Homo sapiens
MGVRMTEYVGLYRHGDRSPVKTYPKDPYQEEEWPQGFGQLTKEGMLQHWELGQALRQRYHGFLNTSYHRQEVYVRSTDFDRTLMSAEANLAGLFPPNGMQRFNPNISWQPIPVHTVPITEDRLLKFPLGPCPRYEQLQNETRQTPEYQNESSRNAQFLDMVANETGLTDLTLETVWNVYDTLFCEQTHGLRLPPWASPQTMQRLSRLKDFSFRFLFGIYQQAEKARLQGGVLLAQIRKNLTLMATTSQLPKLLVYSAHDTTLVALQMALDVYNGEQAPYASCHIFELYQEDSGNFSVEMYFRNESDKAPWPLSLPGCPHRCPLQDFLRLTEPVVPKDWQQECQLASGPADTEVIVALAVCGSILFLLIVLLLTVLFRMQAQPPGYRHVADGEDHA

SEQ ID NO: 143 - protein, 6 aa, Homo sapiens
MDMWTA

SEQ ID NO: 144 - protein, 52 aa, Homo sapiens
MDMWTALLILQALLLPSLADGATPALRFVAVGDWGGVPNAPFHTAREMANAK

SEQ ID NO: 145 - protein, 74 aa, Homo sapiens
MDMWTALLILQALLLPSLADGATPALRFVAVGDWGGVPNAPFHTAREMANAKEIARTVQILGADFILSLGDNFY

SEQ ID NO: 146 - protein, 124 aa, Homo sapiens
MDMWTALLILQALLLPSLADGATPALRFVAVGDWGGVPNAPFHTAREMANAKEIARTVQILGADFILSLGDNFYFTGVQDINDKRFQETFEDVFSDRSLRKVPWYVLAGNHDHLGNVSAQIAYS

SEQ ID NO: 147 - protein, 325 aa, Homo sapiens
MDMWTALLILQALLLPSLADGATPALRFVAVGDWGGVPNAPFHTAREMANAKEIARTVQILGADFILSLGDNFYFTGVQDINDKRFQETFEDVFSDRSLRKVPWYVLAGNHDHLGNVSAQIAYSKISKRWNFPSPFYRLHFKIPQTNVSVAIFMLDTVTLCGNSDDFLSQQPERPRDVKLARTQLSWLKKQLAAAREDYVLVAGHYPVWSIAEHGPTHCLVKQLRPLLATYGVTAYLCGHDHNLQYLQDENGVGYVLSGAGNFMDPSKRHQRKVPNGYLRFHYGTEDSLGGFAYVEISSKEMTVTYIEASGKSLFKTRLPRRARP

SEQ ID NO: 148 - protein, 325 aa, Homo sapiens; identical to SEQ ID NO: 147

SEQ ID NO: 149 - protein, 325 aa, Homo sapiens; identical to SEQ ID NO: 147

SEQ ID NO: 150 - protein, 325 aa, Homo sapiens; identical to SEQ ID NO: 147

SEQ ID NO: 151 - protein, 59 aa, Homo sapiens
MDMWTALLILQALLLPSLGISWTPQSGTSARSPTAICASTMGLKTHWVALPMWRSAPKR

SEQ ID NO: 152 - protein, 228 aa, Homo sapiens
MITGVFSMRLWTPVGVLTSLAYCLHQRRVALAELQEADGQCPVDRSLLKLKMVQVVFRHGARSPLKPLPLEEQGGMFAGQLTKVGMQQMFALGERLRKNYVEDIPFLSPTFNPQEVFIRSTNIFRNLESTRCLLAGLFQCQKEGPIIIHTDEADSEVLYPNYQSCWSLRQRTRGRRQTASLQPGISEDLKKVKDRMGIDSSDKVDFFILLDNVAAEQEKMGSCRFHGS

SEQ ID NO: 153 - protein, 428 aa, Homo sapiens
MITGVFSMRLWTPVGVLTSLAYCLHQRRVALAELQEADGQCPVDRSLLKLKMVQVVFRHGARSPLKPLPLEEQVEWNPQLLEVPPQTQFDYTVTNLAGGPKPYSPYDSQYHETTLKGGMFAGQLTKVGMQQMFALGERLRKNYVEDIPFLSPTFNPQEVFIRSTNIFRNLESTRCLLAGLFQCQKEGPIIIHTDEADSEVLYPNYQSCWSLRQRTRGRRQTASLQPGISEDLKKVKDRMGIDSSDKVDFFILLDNVAAEQAHNLPSCPMLKRFARMIEQRAVDTSLYILPKEDRESLQMAVGPFLHILESNLLKAMDSATAPDKIRKLYLYAAHDVTFIPLLMTLGIFDHKWPPFAVDLTMELYQHLESKEWFVQLYYHGKEQVPRGCPDGLCPLDMFLNAMSVYTLSPEKYHALCSQTQVMEVGNEE

SEQ ID NO: 154 - protein, 271 aa, Homo sapiens
MITGVFSMRLWTPVGVLTSLAYCLHQRRVALAELQEADGQCPVDRSLLKLKMVQVVFRHGARSPLKPLPLEEQVEWNPQLLEVPPQTQFDYTVTNLAGGPKPYSPYDSQYHETTLKGGMFAGQLTKVGMQQMFALGERLRKNYVEDIPFLSPTFNPQEVFIRSTNIFRNLESTRCLLAGLFQCQKEGPIIIHTDEADSEVLYPNYQSCWSLRQRTRGRRQTASLQPGISEDLKKVKDRMGIDSSDKVDFFILLDNVAAEQEKMGSCRFHGS

SEQ ID NO: 155 - protein, 77 aa, Homo sapiens
MITGVFSMRLWTPVGVLTSLAYCLHQRRVALAELQEADGQCPVDRSLLKLKMVQVVFRHGARSPLKPLPLEEQYSFH

SEQ ID NO: 156 - protein, 143 aa, Homo sapiens
MVQVVFRHGARSPLKPLPLEEQVEWNPQLLEVPPQTQFDYTVTNLAGGPKPYSPYDSQYHETTLKGGMFAGQLTKVGMQQMFALGERLRKNYVEDIPFLSPTFNPQEVFIRSTNIFRNLESTRCLLAGLFQCQKEGPIIIHTD

SEQ ID NO: 157 - protein, 166 aa, Homo sapiens
  VARIANT 1: note = misc_feature - Xaa can be any naturally occurring amino acid
XDSQYHETTLKGGMFAGQLTKVGMQQMFALGERLRKNYVEDIPFLSPTFNPQEVFIRSTNIFRNLESTRCLLAGLFQCQKEGPIIIHTDEADSEVLYPNYQSCWSLRQRTRGRRQTASLQPGISEDLKKVKDRMGIDSSDKVDFFILLDNVAAEQEKMGSCRFHGS

SEQ ID NO: 158 - protein, 157 aa, Homo sapiens
  VARIANT 1: note = misc_feature - Xaa can be any naturally occurring amino acid
XRCLLAGLFQCQKEGPIIIHTDEADSEVLYPNYQSCWSLRQRTRGRRQTASLQPGISEDLKKVKDRMGIDSSDKVDFFILLDNVAAEQAHNLPSCPMLKRFARMIEQRAVDTSLYILPKEDRESLQMAVGPFLHILESNLLKAMDSATAPDKIRTCR

SEQ ID NO: 159 - protein, 334 aa, Homo sapiens
MHPLPGYWSCYCLLLLFSLGVQGSLGAPSAAPEQVHLSYPGEPGSMTVTWTTWVPTRSEVQFGLQPSGPLPLRAQGTFVPFVDGGILRRKLYIHRVTLRKLLPGVQYVYRCGSAQGWSRRFRFRALKNGAHWSPRLAVFGDLGADNPKAVPRLRRDTQQGMYDAVLHVATSLTTRLASACRGIMRACGTAGIWVPPTSSPSPPRSISFSIMAATWYRGSFAGWRATSRKPIRTGQPGRGSSLWGTGPCTAPTQIWTTAHDMKARSAKASKASCTGWRIFSTNMEWICSCGLMSTRMNDCGQFTTTRYLTAAERCPTPTREGLSTSSQDLLMGRS

SEQ ID NO: 160 - protein, 367 aa, Homo sapiens
MHPLPGYWSCYCLLLLFSLGVQGSLGAPSAAPEQVHLSYPGEPGSMTVTWTTWVPTRSEVQFGLQPSGPLPLRAQGTFVPFVDGGILRRKLYIHRVTLRKLLPGVQYVYRCGSAQGWSRRFRFRALKNGAHWSPRLAVFGDLGADNPKAVPRLRRDTQQGMYDAVLHVATSLTTRLASACRGIMRACGTGNVGVLGDWPSPLKDGRCRGALVPDPCPLTPPAGIWVPPTSSPSPPRSISFSIMAATWYRGSFAGWRATSRKPIRTGQPGRGSSLWGTGPCTAPTQIWTTAHDMKARSAKASKASCTGWRIFSTNMEWICSCGLMSTRMNDCGQFTTTRYLTAAERCPTPTREGLSTSSQDLLAVRSG

SEQ ID NO: 161 - protein, 438 aa, Homo sapiens
MHPLPGYWSCYCLLLLFSLGVQGSLGAPSAAPEQVHLSYPGEPGSMTVTWTTWVPTRSEVQFGLQPSGPLPLRAQGTFVPFVDGGILRRKLYIHRVTLRKLLPGVQYVYRCGSAQGWSRRFRFRALKNGAHWSPRLAVFGDLGADNPKAVPRLRRDTQQGMYDAVLHVGDFAYNLDQDNARVGDRFMRLIEPVAASLPYMTCPGNHEERYNFSNYKARFSMPGDNEGLWYSWDLGPAHIISFSTEVYFFLHYGRHLVQRQFRWLESDLQKANKNRAARPWIITMGHRPMYCSNADLDDCTRHESKVRKGLQGKLYGLEDLFYKYGVDLQLWAHEHSYERLWPIYNYQVFNGSREMPYTNPRGPVHIITGSAGCEERLTPFAVFPRPWSAVRVKEYGYTRLHILNGTHIHIQQVSDDQDGKIVDDVWVVRPLFGRRMYL

SEQ ID NO: 162 - protein, 227 aa, Homo sapiens
  VARIANT 1: note = misc_feature - Xaa can be any naturally occurring amino acid
XGADNPKAVPRLRRDTQQGMYDAVLHVGDFAYNLDQDNARVGDRFMRLIEPVAASLPYMTCPGNHEERYNFSNYKARFSMPGDNEGLWYSWDLGPAHIISFSTEVYFFLHYGRHLVQRQFRWLESDLQKANKNRAARPWIITMGHRPMYCSNADLDDCTRHESKVRKGLQGKLYGLEDLFYKYGVDLQLWAHEHSYERLWPIYNYQDGKIVDDVWVVRPLFGRRMYL

SEQ ID NO: 163 - protein, 353 aa, Homo sapiens
MRAAPLLLARAASLSLGFLFLLFFWLDRSVLAKELKFVTLVFRHGDRSPIDTFPTDPIKESSWPQGFGQLTQLGMEQHYELGEYIRKRYRKFLNESYKHEQVYIRSTDVDRTLMSAMTNLAALFPPEGVSIWNPILLWQPIPVHTVPLSEDQDFIATLGKLSGLHGQDLFGIWSKVYDPLYCESVHNFTLPSWATEDTMTKLRELSELSLLSLYGIHKQKEKSRLQGGVLVNEILNHMKRATQIPSYKKLIMYSAHDTTVSGLQMALDVYNGLLPPYASCHLTELYFEKGEYFVEMYYRNETQHEPYPLMLPGCSPSCPLERFAELVGPVIPQDWSTECMTTNSHQGTEDSTD

SEQ ID NO: 164 - protein, 418 aa, Homo sapiens
MRAAPLLLARAASLSLGFLFLLFFWLDRSVLAKELKFVTLVFRHGDRSPIDTFPTDPIKESSWPQGFGQLTQLGMEQHYELGEYIRKRYRKFLNESYKHEQVYIRSTDVDRTLMSAMTNLAALFPPEGVSIWNPILLWQPIPVHTVPLSEDQLLYLPFRNCPRFQELESETLKSEEFQKRLHPYKDFIATLGKLSGLHGQDLFGIWSKVYDPLYCESVHNFTLPSWATEDTMTKLRELSELSLLSLYGIHKQKEKSRLQGGVLVNEILNHMKRATQIPSYKKLIMYSAHDTTVSGLQMALDVYNGLLPPYASCHLTELYFEKGEYFVEMYYRNETQHEPYPLMLPGCSPSCPLERFAELVGPVIPQDWSTECMTTNSHQVLKVIFAVAFCLISAVLMVLLFIHIRRGLCWQRESYGNI

SEQ ID NO: 165 - protein, 386 aa, Homo sapiens
MRAAPLLLARAASLSLGFLFLLFFWLDRSVLAKELKFVTLVFRHGDRSPIDTFPTDPIKESSWPQGFGQLTQLGMEQHYELGEYIRKRYRKFLNESYKHEQVYIRSTDVDRTLMSAMTNLAALFPPEGVSIWNPILLWQPIPVHTVPLSEDQLLYLPFRNCPRFQELESETLKSEEFQKRLHPYKDFIATLGKLSGLHGQDLFGIWSKVYDPLYCESVHNFTLPSWATEDTMTKLRELSELSLLSLYGIHKQKEKSRLQGGVLVNEILNHMKRATQIPSYKKLIMYSAHDTTVSGLQMALDVYNGLLPPYASCHLTELYFEKGEYFVEMYYRNETQHEPYPLMLPGCSPSCPLERFAELVGPVIPQDWSTECMTTNSHQGTEDSTD

SEQ ID NO: 166 - protein, 165 aa, Homo sapiens
MRAAPLLLARAASLSLGFLFLLFFWLDRSVLAKELKFVTLVFRHGDRSPIDTFPTDPIKESSWPQGFGQLTQVYIRSTDVDRTLMSAMTNLAALFPPEGVSIWNPILLWQPIPVHTVPLSEDQLLYLPFRNCPRFQELESETLKSEEFQKRLHPYKDFIATLGKL

SEQ ID NO: 167 - protein, 99 aa, Homo sapiens
  VARIANT 1: note = misc_feature - Xaa can be any naturally occurring amino acid
XELYFEKGEYFVEMYYRNETQHEPYPLMLPGCSPSCPLERFAELVGPVIPQDWSTECMTTNSHQGPAETAHSARRNHDIALPCGRSTCLENTVLYYHYG

SEQ ID NO: 168 - protein, 421 aa, Homo sapiens
MVEMLPTAILLVLAVSVVAKDNATCDGPCGLRFRQNPQGGVRIVGGKAAQHGAWPWMVSLQIFTYNSHRYHTCGGSLLNSRWVLTAAHCFVGKNNVHDWRLVFGAKEITYGNNKPVKAPLQERYVEKIIIHEKYNSATEGNDIALVEITPPISCGRFIGPGCLPHFKAGLPRGSQSCWVAGWGYIEEKAPRPSSILMEARVDLIDLDLCNSTQWYNGRVQPTNVCAGYPVGKIDTCQGDSGGPLMCKDSKESAYVVVGITSWGVGCARAKRPGIYTATWPYLNWIASKIGSNALRMIQSATPPPPTTRPPPIRPPFSHPISAHLPWYFQPPPRPLPPRPPAAQPRPPPSPPPPPPPPASPLPPPPPPPPPTPSSTTKLPQGLSFAKRLQQLIEVLKGKTYSDGKNHYDMETTELPELTSTS

SEQ ID NO: 169 - protein, 212 aa, Homo sapiens
MVEMLPTAILLVLAVSVVAKDNATCDGPCGLRFRQNPQGGVRIVGGKAAQHGAWPWMVSLQIFTYNSHRYHTCGGSLLNSRWVLTAAHCFVGKNNVHDWRLVFGAKEITYGNNKPVKAPLQERYVEKIIIHEKYNSATEGNDIALVEITPPISCGRFIGPGCLPHFKAGLPRGSQSCWVAGWGYIEEKGFLECPAGTSPFKTGVAVALELCP

SEQ ID NO: 170 - protein, 100 aa, Homo sapiens
MRKPAAGFLPSLLKVLLLPLAPAAAQDSTQASTPGSPLSPTEYERFFALLTPTWKAETTCRLRATHGCRNPTLVQLDQYENHGLVPDESPVFPASLYSLT

SEQ ID NO: 171 - protein, 510 aa, Homo sapiens
MRKPAAGFLPSLLKVLLLPLAPAAAQDSTQASTPGSPLSPTEYERFFALLTPTWKAETTCRLRATHGCRNPTLVQLDQYENHGLVPDGAVCSNLPYASWFESFCQFTHYRCSNHVYYAKRVLCSQPVSILSPNTLKEIEASAEVSPTTMTSPISPHFTAPEHKQEQGVEHRQEPTQEHKQEEGQKQEEQEEEQEEEGKQEEGQGTKEGREAVSQLQTDSEPKFHSESLSSNPSSFAPRVREVESTPMIMENIQELIRSAQEIDEMNEIYDENSYWRNQNPGSLLQLPHTEALLVLCYSIVENTCIITPTAKAWKYMEEEILGFGKSVCDSLGRRHMSTCALCDFCSLKLEQCHSEASLQRQQCDTSHKTPFVSPLLASQSLSIGNQVGSPESGRFYGLDLYGGLHMDFWCARLATKGCEDVRVSGWLQTEFLSFQDGDFPTKICDTDYIQYPNYCSFKSQQCLMRNRNRKVSRMRCLQNETYSALSPGKSEDVVLRWSQEFSTLTLGQFG

SEQ ID NO: 172 - protein, 174 aa, Homo sapiens [sequence omitted]

SEQ ID NO: 173 - protein, 543 aa, Homo sapiens
MRKPAAGFLPSLLKVLLLPLAPAAAQDSTQASTPGSPLSPTEYERFFALLTPTWKAETTCRLRATHGCRNPTLVQLDQYENHGLVPDGAVCSNLPYASWFESFCQFTHYRCSNHVYYAKRVLCSQPVSILSPNTLKEIEASAEVSPTTMTSPISPHFTVTERQTFQPWPERLSNNVEELLQSSLSLGGQEQAPEHKQEQGVEHRQEPTQEHKQEEGQKQEEQEEEQEEEGKQEEGQGTKEGREAVSQLQTDSEPKFHSESLSSNPSSFAPRVREVESTPMIMENIQELIRSAQEIDEMNEIYDENSYWRNQNPGSLLQLPHTEALLVLCYSIVENTCIITPTAKAWKYMEEEILGFGKSVCDSLGRRHMSTCALCDFCSLKLEQCHSEASLQRQQCDTSHKTPFVSPLLASQSLSIGNQVGSPESGRFYGLDLYGGLHMDFWCARLATKGCEDVRVSGWLQTEFLSFQDGDFPTKICDTDYIQYPNYCSFKSQQCLMRNRNRKVSRMRCLQNETYSALSPGKSEDVVLRWSQEFSTLTLGQFG

SEQ ID NO: 174 - protein, 319 aa, Homo sapiens
MRKPAAGFLPSLLKVLLLPLAPAAAQDSTQASTPGSPLSPTEYERFFALLTPTWKAETTCRLRATHGCRNPTLVQLDQYENHGLVPDGAVCSNLPYASWFESFCQFTHYRCSNHVYYAKRVLCSQPVSILSPNTLKEIEASAEVSPTTMTSPISPHFTVTERQTFQPWPERLSNNVEELLQSSLSLGGQEQAPEHKQEQGVEHRQEPTQEHKQEEGQKQEEQEEEQEEEGKQEEGQGTKEGREAVSQLQTDSEPKFHSESLSSNPSSFAPRVREVESTPMIMENIQELIRSAQEIDEMNEIYDENSYWRNQNPGRYRKF

SEQ ID NO: 175 - protein, 265 aa, Homo sapiens
MNRFLLLMSLYLLGSARGTSSQPNELSGSIDHQTSVQQLPGEFFSLENPSDAEALYETSSGLNTLSEHGSSEHGSSKHTVAEHTSGEHAESEHASGEPAATEHAEGEHTVGEQPSGEQPSGEHLSGEQPLSELESGEQPSDEQPSGEHGSGEQPSGEQASGEQPSGEHASGEQASGAPISSTSTGTILNCYTCAYMNDQGKCLRGEGTCITQNSQQCMLKKIFEGGKLQFMVQGCENMCPSMNLFSHGTRMQIICCRNQSFCNKI

SEQ ID NO: 176 - protein, 246 aa, Homo sapiens
MNRFLLLMSLYLLGSARGTSSQPNELSGSIDHQTSVQQLPGEFFSLENPSDAEALYETSSGLNTLSEHGSSEHGSSKHTVAEHTSGEHAESEHASGEPAATEHAEGEHTVGEQPSGEQPSGEHLSGEQPLSELESGEQPSDEQPSGEHGSGEQPSGEQASGEQPSGTILNCYTCAYMNDQGKCLRGEGTCITQNSQQCMLKKIFEGGKLQFMVQGCENMCPSMNLFSHGTRMQIICCRNQSFCNKI

SEQ ID NO: 177 - protein, 210 aa, Homo sapiens
MNRFLLLMSLYLLGSARGTSSQPNELSGSIDHQTSVQQLPGEPAATEHAEGEHTVGEQPSGEQPSGEHLSGEQPLSELESGEQPSDEQPSGEHGSGEQPSGEQASGEQPSGEHASGEQASGAPISSTSTGTILNCYTCAYMNDQGKCLRGEGTCITQNSQQCMLKKIFEGGKLQFMVQGCENMCPSMNLFSHGTRMQIICCRNQSFCNKI

SEQ ID NO: 178 - protein, 195 aa, Homo sapiens
MNRFLLLMSLYLLGSARGTSSQPNELSGSIDHQTSVQQLPGEQPSGEQPSGEHLSGEQPLSELESGEQPSDEQPSGEHGSGEQPSGEQASGEQPSGEHASGEQASGAPISSTSTGTILNCYTCAYMNDQGKCLRGEGTCITQNSQQCMLKKIFEGGKLQFMVQGCENMCPSMNLFSHGTRMQIICCRNQSFCNKI

SEQ ID NO: 179 - protein, 45 aa, Homo sapiens
MAVYVGMLRLGRLCAGSSGVLGARAALSRSWQEARLQGVRFLRCL

SEQ ID NO: 180 - protein, 54 aa, Homo sapiens
MAVYVGMLRLGRLCAGSSGVLGARAALSRSWQEARLQGVRFLRPSGEKLAHQGV

SEQ ID NO: 181 - protein, 640 aa, Homo sapiens
MAVYVGMLRLGRLCAGSSGVLGARAALSRSWQEARLQGVRFLSARGGMEAGRQRISVPSSFTASAAAHSREVDRMVSTPIGGLSYVQGCTKKHLNSKTVGQCLETTAQRVPEREALVVLHEDVRLTFAQLKEEVDKAASGLLSIGLCKGDRLGMWGPNSYAWVLMQLATAQAGIILVSVNPAYQAMELEYVLKKVGCKALVFPKQFKTQQYYNVLKQICPEVENAQPGALKSQRLPDLTTVISVDAPLPGTLLLDEVVAAGSTRQHLDQLQYNQQFLSCHDPINIQFTSGTTGSPKGATLSHYNIVNNSNILGERLKLHEKTPEQLRMILPNPLYHCLGSVAGTMMCLMYGATLILASPIFNGKKALEAISRERGTFLYGTPTMFVDILNQPDFSSYDISTMCGGVIAGSPAPPELIRAIINKINMKDLVVAYGTTENSPVTFAHFPEDTVEQKAESVGRIMPHTEARIMNMEAGTLAKLNTPGELCIRGYCVMLGYWGEPQKTEEAVDQDKWYWTGDVATMNEQGFCKIVGRSKDMIIRGGENIYPAELEDFFHTHPKVQEVQVVGVKDDRMGEEICACIRLKDGEETTVEEIKAFCKGKISHFKIPKYIVFVTNYPLTISGKIQKFKLREQMERHLNL

SEQ ID NO: 182 - protein, 615 aa, Homo sapiens
MAVYVGMLRLGRLCAGSSGVLGARAALSRSWQEARLQGVRFLSSREVDRMVSTPIGGLSYVQGCTKKHLNSKTVGQCLETTAQRVPEREALVVLHEDVRLTFAQLKEEVDKAASGLLSIGLCKGDRLGMWGPNSYAWVLMQLATAQAGIILVSVNPAYQAMELEYVLKKVGCKALVFPKQFKTQQYYNVLKQICPEVENAQPGALKSQRLPDLTTVISVDAPLPGTLLLDEVVAAGSTRQHLDQLQYNQQFLSCHDPINIQFTSGTTGSPKGATLSHYNIVNNSNILGERLKLHEKTPEQLRMILPNPLYHCLGSVAGTMMCLMYGATLILASPIFNGKKALEAISRERGTFLYGTPTMFVDILNQPDFSSYDISTMCGGVIAGSPAPPELIRAIINKINMKDLVVAYGTTENSPVTFAHFPEDTVEQKAESVGRIMPHTEARIMNMEAGTLAKLNTPGELCIRGYCVMLGYWGEPQKTEEAVDQDKWYWTGDVATMNEQGFCKIVGRSKDMIIRGGENIYPAELEDFFHTHPKVQEVQVVGVKDDRMGEEICACIRLKDGEETTVEEIKAFCKGKISHFKIPKYIVFVTNYPLTISGKIQKFKLREQMERHLNL

SEQ ID NO: 183 - protein, 602 aa, Homo sapiens
MAVYVGMLRLGRLCAGSSGVLGARAALSRSWQEARLQGVRFLSSREVDRMVSTPIGGLSYVQGCTKKHLNSKTVGQCLETTAQRVPEREALVVLHEDVRLTFAQLKEEVDKAASGLLSIGLCKGDRLGMWGPNSYAWVLMQLATAQAMELEYVLKKVGCKALVFPKQFKTQQYYNVLKQICPEVENAQPGALKSQRLPDLTTVISVDAPLPGTLLLDEVVAAGSTRQHLDQLQYNQQFLSCHDPINIQFTSGTTGSPKGATLSHYNIVNNSNILGERLKLHEKTPEQLRMILPNPLYHCLGSVAGTMMCLMYGATLILASPIFNGKKALEAISRERGTFLYGTPTMFVDILNQPDFSSYDISTMCGGVIAGSPAPPELIRAIINKINMKDLVVAYGTTENSPVTFAHFPEDTVEQKAESVGRIMPHTEARIMNMEAGTLAKLNTPGELCIRGYCVMLGYWGEPQKTEEAVDQDKWYWTGDVATMNEQGFCKIVGRSKDMIIRGGENIYPAELEDFFHTHPKVQEVQVVGVKDDRMGEEICACIRLKDGEETTVEEIKAFCKGKISHFKIPKYIVFVTNYPLTISGKIQKFKLREQMERHLNL

SEQ ID NO: 184 - protein, 183 aa, Homo sapiens
MAVYVGMLRLGRLCAGSSGVLGARAALSRSWQEARLQGVRFLSSREVDRMVSTPIGGLSYVQGCTKKHLNSKTVGQCLETTAQRVPEREALVVLHEDVRLTFAQLKEEVDKAASGLLSIGLCKGVCEPSLPGYGTGVCPQEGGLQGPCVPQAIQDPAILQRPEADLSRSGECPARGLEESEAP

SEQ ID NO: 185 - protein, 572 aa, Homo sapiens
MAVYVGMLRLGRLCAGSSGVLGARAALSRSWQEARLQGVRFLSSREVDRMVSTPIGGLSYVQGCTKKHLNSKTVGQCLETTAQRVPEREALVVLHEDVRLTFAQLKEEVSVNPAYQAMELEYVLKKVGCKALVFPKQFKTQQYYNVLKQICPEVENAQPGALKSQRLPDLTTVISVDAPLPGTLLLDEVVAAGSTRQHLDQLQYNQQFLSCHDPINIQFTSGTTGSPKGATLSHYNIVNNSNILGERLKLHEKTPEQLRMILPNPLYHCLGSVAGTMMCLMYGATLILASPIFNGKKALEAISRERGTFLYGTPTMFVDILNQPDFSSYDISTMCGGVIAGSPAPPELIRAIINKINMKDLVVAYGTTENSPVTFAHFPEDTVEQKAESVGRIMPHTEARIMNMEAGTLAKLNTPGELCIRGYCVMLGYWGEPQKTEEAVDQDKWYWTGDVATMNEQGFCKIVGRSKDMIIRGGENIYPAELEDFFHTHPKVQEVQVVGVKDDRMGEEICACIRLKDGEETTVEEIKAFCKGKISHFKIPKYIVFVTNYPLTISGKIQKFKLREQMERHLNL

SEQ ID NO: 186 - protein, 85 aa, Homo sapiens
TVPPSSWPLPSSMARRHWRPSAERGVIAGSPAPPELIRAIINKINMKDLVKSQEEIAAWEDGQQSTDVLLERPGRLLMEPQRTVP

SEQ ID NO: 187 - protein, 104 aa, Homo sapiens
  VARIANT 1: note = misc_feature - Xaa can be any naturally occurring amino acid
XGKKALEAISRERGTFLYGTPTMFVDILNQPDFSSYDISTMCGGVIAGSPAPPELIRAIINKINMKDLVKSQEEIAAWEDGQQSTDVLLERPGRLLMEPQRTVP

SEQ ID NO: 188 - protein, 245 aa, Homo sapiens
MASTALLALCSTGAFSGLAVEAGAGVCHATPIYAGHSWHQATFRLNVAGSTLSRYLRDLLVAANPDLLQQALPRKAITHLKKRSCYVSLDFEGDLRDPARHHPASFSVGNGCCVCLSSERFRCPEPIFQPGLLGQAEQGLPALAFRALQKMPKTLRTRLADTVVLAGGSTLFPGFAERLDKELEAQCRRHGYAALRPHLVAKHGRGMAVWTGGSMVASLHSFQRRWITRAMYQECGSRLLYDVFN

SEQ ID NO: 189 - protein, 21 aa, Homo sapiens
MVDGVMILPVLIMIALPSPSM

SEQ ID NO: 190 - protein, 71 aa, Homo sapiens
MVDGVMILPVLIMIALPSPSMEDEKPKVNPKLYMCVCEGLSCGNEDHCEGQQCFSSLSINDGFHVYQKGCF

SEQ ID NO: 191 - protein, 73 aa, Homo sapiens
MVDGVMILPVLIMIALPSPSMEDEKPKVNPKLYMCVCEGLSCGNEDHCEGQQCFSSLSINDGFHVYQKGCFQV

SEQ ID NO: 192 - protein, 87 aa, Homo sapiens
MVDGVMILPVLIMIALPSPSMEDEKPKVNPKLYMCVCEGLSCGNEDHCEGQQCFSSLSINDGFHVYQKGCFQVYEQGKMTCKTPPSP

SEQ ID NO: 193 - protein, 87 aa, Homo sapiens; identical to SEQ ID NO: 192

SEQ ID NO: 194 - protein, 509 aa, Homo sapiens
MVDGVMILPVLIMIALPSPSMEDEKPKVNPKLYMCVCEGLSCGNEDHCEGQQCFSSLSINDGFHVYQKGCFQVYEQGKMTCKTPPSPGQAVECCQGDWCNRNITAQLPTKGKSFPGTQNFHLEVGLIILSVVFAVCLLACLLGVALRKFKRRNQERLNPRDVEYGTIEGLITTNVGDSTLADLLDHSCTSGSGSGLPFLVQRTVARQITLLECVGKGRYGEVWRGSWQGENVAVKIFSSRDEKSWFRETELYNTVMLRHENILGFIASDMTSRHSSTQLWLITHYHEMGSLYDYLQLTTLDTVSCLRIVLSIASGLAHLHIEIFGTQGKPAIAHRDLKSKNILVKKNGQCCIADLGLAVMHSQSTNQLDVGNNPRVGTKRYMAPEVLDETIQVDCFDSYKRVDIWAFGLVLWEVARRMVSNGIVEDYKPPFYDVVPNDPSFEDMRKVVCVDQQRPNIPNRWFSDPTLTSLAKLMKECWYQNPSARLTALRIKKTLTKIDNSLDKLKTDC

SEQ ID NO: 195 - protein, 509 aa, Homo sapiens; identical to SEQ ID NO: 194

SEQ ID NO: 196 - protein, 509 aa, Homo sapiens; identical to SEQ ID NO: 194

SEQ ID NO: 197 - protein, 509 aa, Homo sapiens; identical to SEQ ID NO: 194

SEQ ID NO: 198 - protein, 443 aa, Homo sapiens
MLTNGKEQVIKSCVSLPELNAQVFCHSSNNVTKTECCFTDFCNNITLHLPTASPNAPKLGPMELAIIITVPVCLLSIAAMLTVWACQGRQCSYRKKKRPNVEEPLSECNLVNAGKTLKDLIYDVTASGSGSGLPLLVQRTIARTIVLQEIVGKGRFGEVWHGRWCGEDVAVKIFSSRDERSWFREAEIYQTVMLRHENILGFIAADNKDNGTWTQLWLVSEYHEQGSLYDYLNRNIVTVAGMIKLALSIASGLAHLHMEIVGTQGKPAIAHRDIKSKNILVKKCETCAIADLGLAVKHDSILNTIDIPQNPKVGTKRYMAPEMLDDTMNVNIFESFKRADIYSVGLVYWEIARRCSVGGIVEEYQLPYYDMVPSDPSIEEMRKVVCDQKFRPSIPNQWQSCEALRVMGRIMRECWYANGAARLTALRIKKTISQLCVKEDCKA

SEQ ID NO: 199 - protein, 493 aa, Homo sapiens
MTRALCSALRQALLLLAAAAELSPGLKCVCLLCDSSNFTCQTEGACWASVMLTNGKEQVIKSCVSLPELNAQVFCHSSNNVTKTECCFTDFCNNITLHLPTASPNAPKLGPMELAIIITVPVCLLSIAAMLTVWACQGRQCSYRKKKRPNVEEPLSECNLVNAGKTLKDLIYDVTASGSGSGLPLLVQRTIARTIVLQEIVGKGRFGEVWHGRWCGEDVAVKIFSSRDERSWFREAEIYQTVMLRHENILGFIAADNKDNGTWTQLWLVSEYHEQGSLYDYLNRNIVTVAGMIKLALSIASGLAHLHMEIVGTQGKPAIAHRDIKSKNILVKKCETCAIADLGLAVKHDSILNTIDIPQNPKVGTKRYMAPEMLDDTMNVNIFESFKRADIYSVGLVYWEIARRCSVGGIVEEYQLPYYDMVPSDPSIEEMRKVVCDQKFRPSIPNQWQSCEALRVMGRIMRECWYANGAARLTALRIKKTISQLCVKEDCKA

SEQ ID NO: 200 - protein, 336 aa, Homo sapiens
MTRALCSALRQALLLLAAAAELSPGLKCVCLLCDSSNFTCQTEGACWASVMLTNGKEQVIKSCVSLPELNAQVFCHSSNNVTKTECCFTDFCNNITLHLPTDNGTWTQLWLVSEYHEQGSLYDYLNRNIVTVAGMIKLALSIASGLAHLHMEIVGTQGKPAIAHRDIKSKNILVKKCETCAIADLGLAVKHDSILNTIDIPQNPKVGTKRYMAPEMLDDTMNVNIFESFKRADIYSVGLVYWEIARRCSVGGIVEEYQLPYYDMVPSDPSIEEMRKVVCDQKFRPSIPNQWQSCEALRVMGRIMRECWYANGAARLTALRIKKTISQLCVKEDCKA

SEQ ID NO: 201 - protein, 413 aa, Homo sapiens
MTRALCSALRQALLLLAAAAELSPGLKCVCLLCDSSNFTCQTEGACWASVMLTNGKEQVIKSCVSLPELNAQVFCHSSNNVTKTECCFTDFCNNITLHLPTGLPLLVQRTIARTIVLQEIVGKGRFGEVWHGRWCGEDVAVKIFSSRDERSWFREAEIYQTVMLRHENILGFIAADNKDNGTWTQLWLVSEYHEQGSLYDYLNRNIVTVAGMIKLALSIASGLAHLHMEIVGTQGKPAIAHRDIKSKNILVKKCETCAIADLGLAVKHDSILNTIDIPQNPKVGTKRYMAPEMLDDTMNVNIFESFKRADIYSVGLVYWEIARRCSVGGIVEEYQLPYYDMVPSDPSIEEMRKVVCDQKFRPSIPNQWQSCEALRVMGRIMRECWYANGAARLTALRIKKTISQLCVKEDCKA

SEQ ID NO: 202 - protein, 517 aa, Homo sapiens
MALTPPLLLLSAGTMTLGSPRKGLLMLLMALVTQGDPVKPSRGPLVTCTCESPHCKGPTCRGAWCTVVLVREEGRHPQEHRGCGNLHRELCRGRPTEFVNHYCCDSHLCNHNVSLVLEATQPPSEQPGTDGQLALILGPVLALLALVALGVLGLWHVRRRQEKQRGLHSELGESSLILKASEQGDSMLGDLLDSDCTTGSGSGLPFLVQRTVARQVALVECVGKGRYGEVWRGLWHGESVAVKIFSSRDEQSWFRETEIYNTVLLRHDNILGFIASDMTSRNSSTQLWLITHYHEHGSLYDFLQRQTLEPHLALRLAVSAACGLAHLHVEIFGTQGKPAIAHRDFKSRNVLVKSNLQCCIADLGLAVMHSQGSDYLDIGNNPRVGTKRYMAPEVLDEQIRTDCFESYKWTDIWAFGLVLWEIARRTIVNGIVEDYRPPFYDVVPNDPSFEDMKKVVCVDQQTPTIPNRLAADPVLSGLAQMMRECWYPNPSARLTALRIKKTLQKISNSPEKPKVIQ

SEQ ID NO: 203 - protein, 159 aa, Homo sapiens
MALTPPLLLLSAGTMTLGSPRKGLLMLLMALVTQGDPVKPSRGPLVTCTCESPHCKGPTCRGAWCTVVLVREEGRHPQEHRGCGNLHRELCRGRPTEFVNHYCCDSHLCNHNVSLVLEGKGRYGEVWRGLWHGESVAVKIFSSRDEQSWFRETEIYNTV

SEQ ID NO: 204 - protein, 329 aa, Homo sapiens
MALTPPLLLLSAGTMTLGSPRKGLLMLLMALVTQGKGRYGEVWRGLWHGESVAVKIFSSRDEQSWFRETEIYNTVLLRHDNILGFIASDMTSRNSSTQLWLITHYHEHGSLYDFLQRQTLEPHLALRLAVSAACGLAHLHVEIFGTQGKPAIAHRDFKSRNVLVKSNLQCCIADLGLAVMHSQGSDYLDIGNNPRVGTKRYMAPEVLDEQIRTDCFESYKWTDIWAFGLVLWEIARRTIVNGIVEDYRPPFYDVVPNDPSFEDMKKVVCVDQQTPTIPNRLAADPVLSGLAQMMRECWYPNPSARLTALRIKKTLQKISNSPEKPKVIQ

SEQ ID NO: 205 - protein, 89 aa, Homo sapiens
MTLGSPRKGLLMLLMALVTQGDPVKPSRGPLVTCTCESPHCKGPTCRGAWCTVVLVREEGRHPQEHRGCGNLHRELCRGRPTEFVNHYC

SEQ ID NO: 206 - protein, 503 aa, Homo sapiens
MTLGSPRKGLLMLLMALVTQGDPVKPSRGPLVTCTCESPHCKGPTCRGAWCTVVLVREEGRHPQEHRGCGNLHRELCRGRPTEFVNHYCCDSHLCNHNVSLVLEATQPPSEQPGTDGQLALILGPVLALLALVALGVLGLWHVRRRQEKQRGLHSELGESSLILKASEQGDSMLGDLLDSDCTTGSGSGLPFLVQRTVARQVALVECVGKGRYGEVWRGLWHGESVAVKIFSSRDEQSWFRETEIYNTVLLRHDNILGFIASDMTSRNSSTQLWLITHYHEHGSLYDFLQRQTLEPHLALRLAVSAACGLAHLHVEIFGTQGKPAIAHRDFKSRNVLVKSNLQCCIADLGLAVMHSQGSDYLDIGNNPRVGTKRYMAPEVLDEQIRTDCFESYKWTDIWAFGLVLWEIARRTIVNGIVEDYRPPFYDVVPNDPSFEDMKKVVCVDQQTPTIPNRLAADPVLSGLAQMMRECWYPNPSARLTALRIKKTLQKISNSPEKPKVIQ

SEQ ID NO: 207 - protein, 163 aa, Homo sapiens
  VARIANT 1: note = misc_feature - Xaa can be any naturally occurring amino acid
XSRNVLVKSNLQCCIADLGLAVMHSQGSDYLDIGNNPRVGTKRYMAPEVLDEQIRTDCFESYKWTDIWAFGLVLWEIARRTIVNGIVEDYRPPFYDVVPNDPSFEDMKKVVCVDQQTPTIPNRLAADPVRPLLGLGWRGVVAHGWDFWAQELVSEASASSHRY

SEQ ID NO: 208 - protein, 99 aa, Homo sapiens
MAEGNTLISVDYEIFGKVQGVFFRKHTQAEGKKLGLVGWVQNTDRGTVQGQLQGPISKVRHMQEWLETRGSPKSHIDKANFNNEKVILKLDYSDFQIVK

SEQ ID NO: 209 - protein, 99 aa, Homo sapiens; identical to SEQ ID NO: 208

SEQ ID NO: 210 - protein, 55 aa, Homo sapiens
MAEGNTLISVDYEIFGKVQGVFFRKHTQEMTVENRIAETHSKSCVPVSFATSYAG

SEQ ID NO: 211 - protein, 62 aa, Homo sapiens
MAEGNTLISVDYEIFGKVQGVFFRKHTQEMTVENRIAETHSKSCVPVSFATSYAGINEFKRI

SEQ ID NO: 212 - protein, 37 aa, Homo sapiens
MAEGNTLISVDYEIFGKVQGVFFRKHTQVCGLQALGW

SEQ ID NO: 213 - protein, 129 aa, Homo sapiens
MPASARLAGAGLLLAFLRALGCAGRAPGLSMAEGNTLISVDYEIFGKVQGVFFRKHTQAEGKKLGLVGWVQNTDRGTVQGQLQGPISKVRHMQEWLETRGSPKSHIDKANFNNEKVILKLDYSDFQIVK

SEQ ID NO: 214 - protein, 97 aa, Homo sapiens
MCPLPLAAAAVAAPRAPLRLLNRGLAAAMSTAQSLKSVDYEVFGRVQGVCFRMYTEDEARKIGVVGWVKNTSKGTVTGQVQGPEDKVNSMLECSGLI

SEQ ID NO: 215 - protein, 98 aa, Homo sapiens
MCPLPLAAAAVAAPRAPLRLLNRGLAAAMSTAQSLKSVDYEVFGRVQGVCFRMYTEDEARKIGVVGWVKNTSKGTVTGQVQGPEDKVNSMNSSAPEAG

SEQ ID NO: 216 - protein, 40 aa, Homo sapiens
MLLTQSLFGGLFPRTRETMRREAVPDDNELPRNKHLNWKS

SEQ ID NO: 217 - protein, 116 aa, Homo sapiens
MLLTQSLFGGLFPRTRETMRRYKVSLFYLGCSRTPNVKLSSCLGLPCCWDYSYKFIQLSEFGFGQVIIVSEEPWKENISCSSTTFIKSTICLNPDSEFRPCFNAWLSLIRENAVGL

SEQ ID NO: 218 - protein, 172 aa, Homo sapiens
MLLTQSLFGGLFPRTRETMRRYKVSLFYLGCSRTPNVKLSSCLGLPCCWDYSYKFIQLSEFGFGQVIIVSEEPWKENISCSSTTFIKSTICLSVCFRMYTEDEARKIGVVGWVKNTSKGTVTGQVQGPEDKVNSMKSWLSKVGSPSSRIDRTNFSNEKTISKLEYSNFSIRY

SEQ ID NO: 219 - protein, 99 aa, Homo sapiens
MSTAQSLKSVDYEVFGRVQGVCFRMYTEDEARKIGVVGWVKNTSKGTVTGQVQGPEDKVNSMKSWLSKVGSPSSRIDRTNFSNEKTISKLEYSNFSIRY

SEQ ID NO: 220 - protein, 83 aa, Homo sapiens
MTALVLQIEYTEDEARKIGVVGWVKNTSKGTVTGQVQGPEDKVNSMKSWLSKVGSPSSRIDRTNFSNEKTISKLEYSNFSIRY

SEQ ID NO: 221 - protein, 66 aa, Homo sapiens
  VARIANT 1: note = misc_feature - Xaa can be any naturally occurring amino acid
XAQSLKSVDYEVFGRVQGVCFRMYTEDEARKIGVVGWVKNTSKGTVTGQVQGPEDKVNSILAFPFY

SEQ ID NO: 222 - protein, 270 aa, Homo sapiens
MDSLEWNWALVYELSGEHHDEEWSVKTYQEVAQKFVETHPEFIGIKIIYSDHRSKDVAVIAESIRMAMGLRIKFPTVVAGFDLVGHEDTGHSLHDYKEALMIPAKDGVKLPYFFHAGETDWQGTSIDRNILDALMLNTTRIGHGFALSKHPAVRTYSWKKDIPIEVCPISNQVLKLVSDLRNHPVATLMATGHPMVISSDDPAMFGAKGLSYDFYEVFMGIGGMKADLRTLKQLAMNSIKYSTLLESEKNTFMEIWKKRWDKFIADVATK

SEQ ID NO: 223 - protein, 391 aa, Homo sapiens
MDWLVRNVTYRPHCHICFTPRGIMQFRFAHPTPRPSEKCSKWILLEDYRKRVQNVTEFDDSLLRNFTLVTQHPEVIYTNQNVVWSKFETIFFTISGLIHYAPVFRDYVFRSMQEFYEDNVLYMEIRARLLPVYELSGEHHDEEWSVKTYQEVAQKFVETHPEFIGIKIIYSDHRSKDVAVIAESIRMAMGLRIKFPTVVAGFDLVGHEDTGHSLHDYKEALMIPAKDGVKLPYFFHAGETDWQGTSIDRNILDALMLNTTRIGHGFALSKHPAVRTYSWKKDIPIEVCPISNQVLKLVSDLRNHPVATLMATGHPMVISSDDPAMFGAKGLSYDFYEVFMGIGGMKADLRTLKQLAMNSIKYSTLLESEKNTFMEIWKKRWDKFIADVATK

SEQ ID NO: 224 - protein, 135 aa, Homo sapiens
MLVDGPSERPALCFLLLAVAMSFFGSALSIDETRAHLLLKEKMMRLGGRLVLNTKEELANERLMTLKIAEMKEAMRTLIFPPSMHFFQAKHLIERSQVFNILRMMPKGAALHLHDIGIVTMDWLVRNVTYRPHCH

SEQ ID NO: 225 - protein, 152 aa, Homo sapiens
MLVDGPSERPALCFLLLAVAMSFFGSALSIDETRAHLLLKEKMMRLGGRLVLNTKEELANERLMTLKIAEMKEAMRTLIFPPSMHFFQAKHLIERSQVFNILRMMPKGAALHLHDIGIVTMDWLVRNVTYRPHCHICFTPRGIMQFRFAHPT

SEQ ID NO: 226 - protein, 511 aa, Homo sapiens
MLVDGPSERPALCFLLLAVAMSFFGSALSIDETRAHLLLKEKMMRLGGRLVLNTKEELANERLMTLKIAEMKEAMRTLIFPPSMHFFQAKHLIERSQVFNILRMMPKGAALHLHDIGIVTMDWLVRNVTYRPHCHICFTPRGIMQFRFAHPTPRPSEKCSKWILLEDYRKRVQNVTEFDDSLLRNFTLVTQHPEVIYTNQNVVWSKFETIFFTISGLIHYAPVFRDYVFRSMQEFYEDNVLYMEIRARLLPVYELSGEHHDEEWSVKTYQEVAQKFVETHPEFIGIKIIYSDHRSKDVAVIAESIRMAMGLRIKFPTVVAGFDLVGHEDTGHSLHDYKEALMIPAKDGVKLPYFFHAGETDWQGTSIDRNILDALMLNTTRIGHGFALSKHPAVRTYSWKKDIPIEVCPISNQVLKLVSDLRNHPVATLMATGHPMVISSDDPAMFGAKGLSYDFYEVFMGIGGMKADLRTLKQLAMNSIKYSTLLESEKNTFMEIWKKRWDKFIADVATK

SEQ ID NO: 227 - protein, 511 aa, Homo sapiens; identical to SEQ ID NO: 226

SEQ ID NO: 228 - protein, 511 aa, Homo sapiens; identical to SEQ ID NO: 226

SEQ ID NO: 229 - protein, 469 aa, Homo sapiens
MMRLGGRLVLNTKEELANERLMTLKIAEMKEAMRTLIFPPSMHFFQAKHLIERSQVFNILRMMPKGAALHLHDIGIVTMDWLVRNVTYRPHCHICFTPRGIMQFRFAHPTPRPSEKCSKWILLEDYRKRVQNVTEFDDSLLRNFTLVTQHPEVIYTNQNVVWSKFETIFFTISGLIHYAPVFRDYVFRSMQEFYEDNVLYMEIRARLLPVYELSGEHHDEEWSVKTYQEVAQKFVETHPEFIGIKIIYSDHRSKDVAVIAESIRMAMGLRIKFPTVVAGFDLVGHEDTGHSLHDYKEALMIPAKDGVKLPYFFHAGETDWQGTSIDRNILDALMLNTTRIGHGFALSKHPAVRTYSWKKDIPIEVCPISNQVLKLVSDLRNHPVATLMATGHPMVISSDDPAMFGAKGLSYDFYEVFMGIGGMKADLRTLKQLAMNSIKYSTLLESEKNTFMEIWKKRWDKFIADVATK

SEQ ID NO: 230 - protein, 59 aa, Homo sapiens
MVLLRVLILLLSWAAGMGAPARWRIPKSSPPPRPAAQTRGKLCCLQLGSCIVLYPARRS

SEQ ID NO: 231 - protein, 148 aa, Homo sapiens
MVLLRVLILLLSWAAGMGDRDFDDGVLGLAWVGAPSGSSGGICEKSKLYSDGKKKSLNTGIITVQNYGSHVPPKVSHITFAHEVGHNFGSPHDSGTECTPGESKNLGQKENGNYIMYARATSGDKLNNNKFSLCSIRNISQVLEKKRN

SEQ ID NO: 232 - protein, 71 aa, Homo sapiens
MVLLRVLILLLSWAAGMGDRDFDDGVLGLAWVGAPSGSSGGICEKSKLYSDVPTMGKLHSKEKPIKSSSPN

SEQ ID NO: 233 - protein, 115 aa, Homo sapiens
MVLLRVLILLLSWAAGMGGQYGNPLNKYIRHYEGLSYNVDSLHQKHQRAKRAVSHEDQFLRLDFHAHGRDGVLPCCPGWSQTPGLKRSTCLSLPQCWDYRCEPSPMISVFDYPHK

SEQ ID NO: 234 - protein, 125 aa, Homo sapiens
MVLLRVLILLLSWAAGMGGQYGNPLNKYIRHYEGLSYNVDSLHQKHQRAKRAVSHEDQFLRLDFHAHGRHFNLRMKRDTSLFSDEFKVETSNKVLDYDTSHIYTGHIYDYPHKYGPQGGCADHSV

SEQ ID NO: 235 - protein, 748 aa, Homo sapiens
MVLLRVLILLLSWAAGMGGQYGNPLNKYIRHYEGLSYNVDSLHQKHQRAKRAVSHEDQFLRLDFHAHGRHFNLRMKRDTSLFSDEFKVETSNKVLDYDTSHIYTGHIYGEEGSFSHGSVIDGRFEGFIQTRGGTFYVEPAERYIKDRTLPFHSVIYHEDDINYPHKYGPQGGCADHSVFERMRKYQMTGVEEVTQIPQEEHAANGPELLRKKRTTSAEKNTCQLYIQTDHLFFKYYGTREAVIAQISSHVKAIDTIYQTTDFSGIRNISFMVKRIRINTTADEKDPTNPFRFPNIGVEKFLELNSEQNHDDYCLAYVFTDRDFDDGVLGLAWVGAPSGSSGGICEKSKLYSDGKKKSLNTGIITVQNYGSHVPPKVSHITFAHEVGHNFGSPHDSGTECTPGESKNLGQKENGNYIMYARATSGDKLNNNKFSLCSIRNISQVLEKKRNNCFVESGQPICGNGMVEQGEECDCGYSDQCKDECCFDANQPEGRKCKLKPGKQCSPSQGPCCTAQCAFKSKSEKCRDDSDCAREGICNGFTALCPASDPKPNFTDCNRHTQVCINGQCAGSICEKYGLEECTCASSDGKDDKELCHVCCMKKMDPSTCASTGSVQWSRHFSGRTITLQPGSPCNDFRGYCDVFMRCRLVDADGPLARLKKAIFSPELYENIAEWIVAHWWAVLLMGIALIMLMAGFIKICSVHTPSSNPKLPPPKPLPGTLKRRRPPQPIQQPQRQRPRESYQMGHMRR

SEQ ID NO: 236 - protein, 38 aa, Homo sapiens
MVLLRVLILLLSWAAGMGVPTMGKLHSKEKPIKSSSPN

SEQ ID NO: 237 - protein, 58 aa, Homo sapiens
  VARIANT 1: note = misc_feature - Xaa can be any naturally occurring amino acid
XEEGSFSHGSVIDGRFEGFIQTRGGTFYVEPAERYIKDRTLPFHSVIYHEDDISEGLN

SEQ ID NO: 238 - protein, 278 aa, Homo sapiens
MAARPLPVSPARALLLALAGALLAPCEARGVSLWNQGRADEVVSASVGSGDLWIPVKSFDSKNHPEVLNIRLQRESKELIINLERNEGLIASSFTETHYLQDGTDVSLARNYTGHCYYHGHVRGYSDSAVSLSTCSGLRGLIVFENESYVLEPMKSATNRYKLFPAKKLKSVRGSCGSHHNTPNLAAKNVFPPPSQTWARRHKRETLKATKYVELVIVADNREFQRQGKDLEKVKQRLIEIANHVDKFYRPLNIRIVLVGVEVWNDMDKCSVSQDPFT

SEQ ID NO: 239 - protein, 909 aa, Homo sapiens
MAARPLPVSPARALLLALAGALLAPCEARGVSLWNQGRADEVVSASVGSGDLWIPVKSFDSKNHPEVLNIRLQRESKELIINLERNEGLIASSFTETHYLQDGTDVSLARNYTVILGHCYYHGHVRGYSDSAVSLSTCSGLRGLIVFENESYVLEPMKSATNRYKLFPAKKLKSVRGSCGSHHNTPNLAAKNVFPPPSQTWARRHKRETLKATKYVELVIVADNREFQRQGKDLEKVKQRLIEIANHVDKFYRPLNIRIVLVGVEVWNDMDKCSVSQDPFTSLHEFLDWRKMKLLPRKSHDNAQLVSGVYFQGTTIGMAPIMSMCTADQSGGIVMDHSDNPLGAAVTLAHELGHNFGMNHDTLDRGCSCQMAVEKGGCIMNASTGYPFPMVFSSCSRKDLETSLEKGMGVCLFNLPEVRESFGGQKCGNRFVEEGEECDCGEPEECMNRCCNATTCTLKPDAVCAHGLCCEDCQLKPAGTACRDSSNSCDLPEFCTGASPHCPANVYLHDGHSCQDVDGYCYNGICQTHEQQCVTLWGPGAKPAPGICFERVNSAGDPYGNCGKVSKSSFAKCEMRDAKCGKIQCQGGASRPVIGTNAVSIETNIPLQQGGRILCRGTHVYLGDDMPDPGLVLAGTKCADGKICLNRQCQNISVFGVHECAMQCHGRGVCNNRKNCHCEAHWAPPFCDKFGFGGSTDSGPIRQADNQGLTIGILVTILCLLAAGFVVYLKRKTLIRLLFTNKKTTIEKLRCVRPSRPPRGFQPCQAHLGHLGKGLMRKPPDSYPPKDNPRRLLQCQNVDISRPLNGLNVPQPQSTQRVLPPLHRAPRAPSVPARPLPAKPALRQAQGTCKPNPPQKPLPADPLARTTRLTHALARTPGQWETGLRLAPLRPAPQYPHQVPRSTHTAYIK

SEQ ID NO: 240 - protein, 738 aa, Homo sapiens
MAARPLPVSPARALLLALAGALLAPCEARGVSLWNQGRADEVVSASVGSGDLWIPVKSFDSKNHPEVLNIRLQRESKELIINLERNEGLIASSFTETHYLQDGTDVSLARNYTVILGHCYYHGHVRGYSDSAVSLSTCSGLRGLIVFENESYVLEPMKSATNRYKLFPAKKLKSVRGSCGSHHNTPNLAAKNVFPPPSQTWARRHKRETLKATKYVELVIVADNREFQRQGKDLEKVKQRLIEIANHVDKFYRPLNIRIVLVGVEVWNDMDKCSVSQDPFTSLHEFLDWRKMKLLPRKSHDNAQLVSGVYFQGTTIGMAPIMSMCTADQSGGIVMDHSDNPLGAAVTLAHELGHNFGMNHDTLDRGCSCQMAVEKGGCIMNASTGYPFPMVFSSCSRKDLETSLEKGMGVCLFNLPEVRESFGGQKCGNRFVEEGEECDCGEPEECMNRCCNATTCTLKPDAVCAHGLCCEDCQLKPAGTACRDSSNSCDLPEFCTGASPHCPANVYLHDGHSCQDVDGYCYNGICQTHEQQCVTLWGPGAKPAPGICFERVNSAGDPYGNCGKVSKSSFAKCEMRDAKCGKIQCQGGASRPVIGTNAVSIETNIPLQQGGRILCRGTHVYLGDDMPDPGLVLAGTKCADGKICLNRQCQNISVFGVHECAMQCHGRGVCNNRKNCHCEAHWAPPFCDKFGFGGSTDSGPIRQAEARQEAAESNRERGQGQEPVGSQEHASTASLTLI

SEQ ID NO: 241 - protein, 520 aa, Homo sapiens
MRLALLWALGLLGAGSPLPSWPLPNIGGTEEQQAESEKAPREPLEPQVLQDDLPISLKKVLQTSLPEPLRIKLELDGDSHILELLQNRELVPGLNFSNCSRRALEKALLDGMGSCLFERLPSLPPMAAFCGNMFVEPGEQCDCGFLDDCVDPCCDSLTCQLRPGAQCASDGPCCQNCQLRPSGWQCRPTRGDCDLPEFCPGDSSQCPPDVSLGDGEPCAGGQAVCMHGRCASYAQQCQSLWGPGAQPAAPLCLQTANTRGNAFGSCGRNPSGSYVSCTPRDAICGQLQCQTGRTQPLLGSIRDLLWETIDVNGTELNCSWVHLDLGSDVAQPLLTLPGTACGPGLVCIDHRCQRVDLLGAQECRSKCHGHGVCDSNRHCYCEEGWAPPDCTTQLKATSSLTTGLLLSLLVLLVLVMLGASYWYRARLHQRLCQLKGPTCQYRAAQSGPSERPGPPQRALLARGTKSQGPAKPPPPRKPLPADPQGRCPSGDLPGPGAGIPPLVVPSRPAPPPPTVSSLYL

SEQ ID NO: 242 - protein, 814 aa, Homo sapiens
MRLALLWALGLLGAGSPLPSWPLPNIGGTEEQQAESEKAPREPLEPQVLQDDLPISLKKVLQTSLPEPLRIKLELDGDSHILELLQNRELVPGRPTLVWYQPDGTRVVSEGHTLENCCYQGRVRGYAGSWVSICTCSGLRGLVVLTPERSYTLEQGPGDLQGPPIISRIQDLHLPGHTCALSWRESVHTQKPPEHPLGQRHIRRRRDVVTETKTVELVIVADHSEAQKYRDFQHLLNRTLEVALLLDTFFRPLNVRVALVGLEAWTQRDLVEISPNPAVTLENFLHWRRAHLLPRLPHDSAQLVTGTSFSGPTVGMAIQNSICSPDFSGGVNMDHSTSILGVASSIAHELGHSLGLDHDLPGNSCPCPGPAPAKTCIMEASTDFLPGLNFSNCSRRALEKALLDGMGSCLFERLPSLPPMAAFCGNMFVEPGEQCDCGFLDDCVDPCCDSLTCQLRPGAQCASDGPCCQNCQLRPSGWQCRPTRGDCDLPEFCPGDSSQCPPDVSLGDGEPCAGGQAVCMHGRCASYAQQCQSLWGPGAQPAAPLCLQTANTRGNAFGSCGRNPSGSYVSCTPRDAICGQLQCQTGRTQPLLGSIRDLLWETIDVNGTELNCSWVHLDLGSDVAQPLLTLPGTACGPGLVCIDHRCQRVDLLGAQECRSKCHGHGVCDSNRHCYCEEGWAPPDCTTQLKATSSLTTGLLLSLLVLLVLVMLGASYWYRARLHQRLCQLKGPTCQYRAAQSGPSERPGPPQRALLARGTKSQGPAKPPPPRKPLPADPQGRCPSGDLPGPGAGIPPLVVPSRPAPPPPTVSSLYL

SEQ ID NO: 243 - protein, 796 aa, Homo sapiens
MRLALLWALGLLGAGSPLPSWPLPNIGGTEEQQAESEKAPREPLEPQVLQDDLPISLKKVLQTSLPEPLRIKLELDGDSHILELLQNRELVPGRPTLVWYQPDGTRVVSEGHTLENCCYQGRVRGYAGSWVSICTCSGLRGLVVLTPERSYTLEQGPGDLQGPPIISRIQDLHLPGHTCALSWRESVHTQKPPEHPLGQRHIRRRRDVVTETKTVELVIVADHSEAQKYRDFQHLLNRTLEVALLLDTFFRPLNVRVALVGLEAWTQRDLVEISPNPAVTLENFLHWRRAHLLPRLPHDSAQLVTGTSFSGPTVGMAIQNSICSPDFSGGVNMDHSTSILGVASSIAHELGHSLGLDHDLPGNSCPCPGPAPAKTCIMEASTDFLPGLNFSNCSRRALEKALLDGMGSCLFERLPSLPPMAAFCGNMFVEPGEQCDCGFLDDCVDPCCDSLTCQLRPGAQCASDGPCCQNCQLRPSGWQCRPTRGDCDLPEFCPGDSSQCPPDVSLGDGEPCAGGQAVCMHGRCASYAQQCQSLWGPGAQPAAPLCLQTANTRGNAFGSCGRNPSGSYVSCTPRDAICGQLQCQTGRTQPLLGSIRDLLWETIDVNGTELNCSWVHLDLGSDVAQPLLTLPGTACGPGLVCIDHRCQRVDLLGAQECRSKCHGHGVCDSNRHCYCEEGWAPPDCTTQLKATSSLTTGLLLSLLVLLVLVMLGASYWYRARLHQRLCQLKGPTCQYRLVLSASRPPLPGRCRLTLCPRDSSLRGQPSPHPQGSHCLPTPRAGAHRVTCPAQGLESRP

SEQ ID NO: 244 - protein, 772 aa, Homo sapiens
MRLALLWALGLLGAGSPLPSWPLPNIGGTEEQQAESEKAPREPLEPQVLQDDLPISLKKVLQTSLPEPLRIKLELDGDSHILELLQNRELVPGRPTLVWYQPDGTRVVSEGHTLENCCYQGRVRGYAGSWVSICTCSGLRGLVVLTPERSYTLEQGPGDLQGPPIISRIQDLHLPGHTCALSWRESVHTQKPPEHPLGQRHIRRRRDVVTETKTVELVIVADHSEAQKYRDFQHLLNRTLEVALLLDTFFRPLNVRVALVGLEAWTQRDLVEISPNPAVTLENFLHWRRAHLLPRLPHDSAQLVTGTSFSGPTVGMAIQNSICSPDFSGGVNMDHSTSILGVASSIAHELGHSLGLDHDLPGNSCPCPGPAPAKTCIMEASTDFLPGLNFSNCSRRALEKALLDGMGSCLFERLPSLPPMAAFCGNMFVEPGEQCDCGFLDDCVDPCCDSLTCQLRPGAQCASDGPCCQNCQLRPSGWQCRPTRGDCDLPEFCPGDSSQCPPDVSLGDGEPCAGGQAVCMHGRCASYAQQCQSLWGPGAQPAAPLCLQTANTRGNAFGSCGRNPSGSYVSCTPRDAICGQLQCQTGRTQPLLGSIRDLLWETIDVNGTELNCSWVHLDLGSDVAQPLLTLPGTACGPGLVCIDHRCQRVDLLGAQECRSKCHGHGVCDSNRHCYCEEGWAPPDCTTQLKATSSLTTGLLLSLLVLLVLVMLGASYWYRARLHQRLCQLKGPTCQYSLRGQPSPHPQGSHCLPTPRAGAHRVTCPAQGLESRP

SEQ ID NO: 245 - protein, 839 aa, Homo sapiens
MRLALLWALGLLGAGSPLPSWPLPNIGGTEEQQAESEKAPREPLEPQVLQDDLPISLKKVLQTSLPEPLRIKLELDGDSHILELLQNRELVPGRPTLVWYQPDGTRVVSEGHTLENCCYQGRVRGYAGSWVSICTCSGLRGLVVLTPERSYTLEQGPGDLQGPPIISRIQDLHLPGHTCALSWRESVHTQKPPEHPLGQRHIRRRRDVVTETKTVELVIVADHSEAQKYRDFQHLLNRTLEVALLLDTFFRPLNVRVALVGLEAWTQRDLVEISPNPAVTLENFLHWRRAHLLPRLPHDSAQLVTGTSFSGPTVGMAIQNSICSPDFSGGVNMDHSTSILGVASSIAHELGHSLGLDHDLPGNSCPCPGPAPAKTCIMEASTDFLPGLNFSNCSRRALEKALLDGMGSCLFERLPSLPPMAAFCGNMFVEPGEQCDCGFLDDCVDPCCDSLTCQLRPGAQCASDGPCCQNCQLRPSGWQCRPTRGDCDLPEFCPGDSSQCPPDVSLGDGEPCAGGQAVCMHGRCASYAQQCQSLWGPGAQPAAPLCLQTANTRGNAFGSCGRNPSGSYVSCTPRDAICGQLQCQTGRTQPLLGSIRDLLWETIDVNGTELNCSWVHLDLGSDVAQPLLTLPGTACGPGLVCIDHRCQRVDLLGAQECRSKCHGHGVCDSNRHCYCEEGWAPPDCTTQLKATSSLTTGLLLSLLVLLVLVMLGASYWYRARLHQRLCQLKGPTCQYRAAQSGPSERPGPPQRALLARGTKQASALSFPAPPSRPLPPDPVSKRLQSQGPAKPPPPRKPLPADPQGRCPSGDLPGPGAGIPPLVVPSRPAPPPPTVSSLYL

SEQ ID NO: 246 - protein, 838 aa, Homo sapiens
MRLALLWALGLLGAGSPLPSWPLPNIGGTEEQQAESEKAPREPLEPQVLQDDLPISLKKVLQTSLPEPLRIKLELDGDSHILELLQNRELVPGRPTLVWYQPDGTRVVSEGHTLENCCYQGRVRGYAGSWVSICTCSGLRGLVVLTPERSYTLEQGPGDLQGPPIISRIQDLHLPGHTCALSWRESVHTQKPPEHPLGQRHIRRRRDVVTETKTVELVIVADHSEAQKYRDFQHLLNRTLEVALLLDTFFRPLNVRVALVGLEAWTQRDLVEISPNPAVTLENFLHWRRAHLLPRLPHDSAQLVTGTSFSGPTVGMAIQNSICSPDFSGGVNMDHSTSILGVASSIAHELGHSLGLDHDLPGNSCPCPGPAPAKTCIMEASTDFLPGLNFSNCSRRALEKALLDGMGSCLFERLPSLPPMAAFCGNMFVEPGEQCDCGFLDDCVDPCCDSLTCQLRPGAQCASDGPCCQNCQLRPSGWQCRPTRGDCDLPEFCPGDSSQCPPDVSLGDGEPCAGGQAVCMHGRCASYAQQCQSLWGPGAQPAAPLCLQTANTRGNAFGSCGRNPSGSYVSCTPRDAICGQLQCQTGRTQPLLGSIRDLLWETIDVNGTELNCSWVHLDLGSDVAQPLLTLPGTACGPGLVCIDHRCQRVDLLGAQECRSKCHGHGVCDSNRHCYCEEGWAPPDCTTQLKATSSLTTGLLLSLLVLLVLVMLGASYWYRARLHQRLCQLKGPTCQYRAAQSGPSERPGPPQRALLARGTKAELADRPNPPTRPLPADPVVRSPKSQGPAKPPPPRKPLPADPQGRCPSGDLPGPGAGIPPLVVPSRPAPPPPTVSSLYL

SEQ ID NO: 247 - protein, 863 aa, Homo sapiens
MRLALLWALGLLGAGSPLPSWPLPNIGGTEEQQAESEKAPREPLEPQVLQDDLPISLKKVLQTSLPEPLRIKLELDGDSHILELLQNRELVPGRPTLVWYQPDGTRVVSEGHTLENCCYQGRVRGYAGSWVSICTCSGLRGLVVLTPERSYTLEQGPGDLQGPPIISRIQDLHLPGHTCALSWRESVHTQKPPEHPLGQRHIRRRRDVVTETKTVELVIVADHSEAQKYRDFQHLLNRTLEVALLLDTFFRPLNVRVALVGLEAWTQRDLVEISPNPAVTLENFLHWRRAHLLPRLPHDSAQLVTGTSFSGPTVGMAIQNSICSPDFSGGVNMDHSTSILGVASSIAHELGHSLGLDHDLPGNSCPCPGPAPAKTCIMEASTDFLPGLNFSNCSRRALEKALLDGMGSCLFERLPSLPPMAAFCGNMFVEPGEQCDCGFLDDCVDPCCDSLTCQLRPGAQCASDGPCCQNCQLRPSGWQCRPTRGDCDLPEFCPGDSSQCPPDVSLGDGEPCAGGQAVCMHGRCASYAQQCQSLWGPGAQPAAPLCLQTANTRGNAFGSCGRNPSGSYVSCTPRDAICGQLQCQTGRTQPLLGSIRDLLWETIDVNGTELNCSWVHLDLGSDVAQPLLTLPGTACGPGLVCIDHRCQRVDLLGAQECRSKCHGHGVCDSNRHCYCEEGWAPPDCTTQLKATSSLTTGLLLSLLVLLVLVMLGASYWYRARLHQRLCQLKGPTCQYRAAQSGPSERPGPPQRALLARGTKQASALSFPAPPSRPLPPDPVSKRLQAELADRPNPPTRPLPADPVVRSPKSQGPAKPPPPRKPLPADPQGRCPSGDLPGPGAGIPPLVVPSRPAPPPPTVSSLYL

SEQ ID NO: 248 - protein, 862 aa, Homo sapiens
MRLALLWALGLLGAGSPLPSWPLPNIGGTEEQQAESEKAPREPLEPQVLQDDLPISLKKVLQTSLPEPLRIKLELDGDSHILELLQNRELVPGRPTLVWYQPDGTRVVSEGHTLENCCYQGRVRGYAGSWVSICTCSGLRGLVVLTPERSYTLEQGPGDLQGPPIISRIQDLHLPGHTCALSWRESVHTQKPPEHPLGQRHIRRRRDVVTETKTVELVIVADHSEAQKYRDFQHLLNRTLEVALLLDTFFRPLNVRVALVGLEAWTQRDLVEISPNPAVTLENFLHWRRAHLLPRLPHDSAQLVTGTSFSGPTVGMAIQNSICSPDFSGGVNMDHSTSILGVASSIAHELGHSLGLDHDLPGNSCPCPGPAPAKTCIMEASTDFLPGLNFSNCSRRALEKALLDGMGSCLFERLPSLPPMAAFCGNMFVEPGEQCDCGFLDDCVDPCCDSLTCQLRPGAQCASDGPCCQNCQLRPSGWQCRPTRGDCDLPEFCPGDSSQCPPDVSLGDGEPCAGGQAVCMHGRCASYAQQCQSLWGPGAQPAAPLCLQTANTRGNAFGSCGRNPSGSYVSCTPRDAICGQLQCQTGRTQPLLGSIRDLLWETIDVNGTELNCSWVHLDLGSDVAQPLLTLPGTACGPGLVCIDHRCQRVDLLGAQECRSKCHGHGVCDSNRHCYCEEGWAPPDCTTQLKATSSLTTGLLLSLLVLLVLVMLGASYWYRARLHQRLCQLKGPTCQYRAAQSGPSERPGPPQRALLARGTKASALSFPAPPSRPLPPDPVSKRLQAELADRPNPPTRPLPADPVVRSPKSQGPAKPPPPRKPLPADPQGRCPSGDLPGPGAGIPPLVVPSRPAPPPPTVSSLYL

SEQ ID NO: 249 - protein, 797 aa, Homo sapiens
MRLALLWALGLLGAGSPLPSWPLPNIGGTEEQQAESEKAPREPLEPQVLQDDLPISLKKVLQTSLPEPLRIKLELDGDSHILELLQNRELVPGRPTLVWYQPDGTRVVSEGHTLENCCYQGRVRGYAGSWVSICTCSGLRGLVVLTPERSYTLEQGPGDLQGPPIISRIQDLHLPGHTCALSWRESVHTQKPPEHPLGQRHIRRRRDVVTETKTVELVIVADHSEAQKYRDFQHLLNRTLEVALLLDTFFRPLNVRVALVGLEAWTQRDLVEISPNPAVTLENFLHWRRAHLLPRLPHDSAQLVTGTSFSGPTVGMAIQNSICSPDFSGGVNMDHSTSILGVASSIAHELGHSLGLDHDLPGNSCPCPGPAPAKTCIMEASTDFLPGLNFSNCSRRALEKALLDGMGSCLFERLPSLPPMAAFCGNMFVEPGEQCDCGFLDDCVDPCCDSLTCQLRPGAQCASDGPCCQNCQLRPSGWQCRPTRGDCDLPEFCPGDSSQCPPDVSLGDGEPCAGGQAVCMHGRCASYAQQCQSLWGPGAQPAAPLCLQTANTRGNAFGSCGRNPSGSYVSCTPRDAICGQLQCQTGRTQPLLGSIRDLLWETIDVNGTELNCSWVHLDLGSDVAQPLLTLPGTACGPGLVCIDHRCQRVDLLGAQECRSKCHGHGVCDSNRHCYCEEGWAPPDCTTQLKATSSLTTGLLLSLLVLLVLVMLGASYWYRARLHQRLCQLKGPTCQYRAAQSGPSERPGPPQRALLARGTKAELADRPNPPTRPLPADPVVRSPKVTVGGEKGTASPPT

SEQ ID NO: 250 - protein, 822 aa, Homo sapiens
MRLALLWALGLLGAGSPLPSWPLPNIGGTEEQQAESEKAPREPLEPQVLQDDLPISLKKVLQTSLPEPLRIKLELDGDSHILELLQNRELVPGRPTLVWYQPDGTRVVSEGHTLENCCYQGRVRGYAGSWVSICTCSGLRGLVVLTPERSYTLEQGPGDLQGPPIISRIQDLHLPGHTCALSWRESVHTQKPPEHPLGQRHIRRRRDVVTETKTVELVIVADHSEAQKYRDFQHLLNRTLEVALLLDTFFRPLNVRVALVGLEAWTQRDLVEISPNPAVTLENFLHWRRAHLLPRLPHDSAQLVTGTSFSGPTVGMAIQNSICSPDFSGGVNMDHSTSILGVASSIAHELGHSLGLDHDLPGNSCPCPGPAPAKTCIMEASTDFLPGLNFSNCSRRALEKALLDGMGSCLFERLPSLPPMAAFCGNMFVEPGEQCDCGFLDDCVDPCCDSLTCQLRPGAQCASDGPCCQNCQLRPSGWQCRPTRGDCDLPEFCPGDSSQCPPDVSLGDGEPCAGGQAVCMHGRCASYAQQCQSLWGPGAQPAAPLCLQTANTRGNAFGSCGRNPSGSYVSCTPRDAICGQLQCQTGRTQPLLGSIRDLLWETIDVNGTELNCSWVHLDLGSDVAQPLLTLPGTACGPGLVCIDHRCQRVDLLGAQECRSKCHGHGVCDSNRHCYCEEGWAPPDCTTQLKATSSLTTGLLLSLLVLLVLVMLGASYWYRARLHQRLCQLKGPTCQYRAAQSGPSERPGPPQRALLARGTKQASALSFPAPPSRPLPPDPVSKRLQAELADRPNPPTRPLPADPVVRSPKVTVGGEKGTASPPT

SEQ ID NO: 251 - protein, 824 aa, Homo sapiens
MRLALLWALGLLGAGSPLPSWPLPNIVLSWGVLGPAGGTEEQQAESEKAPREPLEPQVLQDDLPISLKKVLQTSLPEPLRIKLELDGDSHILELLQNRELVPGRPTLVWYQPDGTRVVSEGHTLENCCYQGRVRGYAGSWVSICTCSGLRGLVVLTPERSYTLEQGPGDLQGPPIISRIQDLHLPGHTCALSWRESVHTQKPPEHPLGQRHIRRRRDVVTETKTVELVIVADHSEAQKYRDFQHLLNRTLEVALLLDTFFRPLNVRVALVGLEAWTQRDLVEISPNPAVTLENFLHWRRAHLLPRLPHDSAQLVTGTSFSGPTVGMAIQNSICSPDFSGGVNMDHSTSILGVASSIAHELGHSLGLDHDLPGNSCPCPGPAPAKTCIMEASTDFLPGLNFSNCSRRALEKALLDGMGSCLFERLPSLPPMAAFCGNMFVEPGEQCDCGFLDDCVDPCCDSLTCQLRPGAQCASDGPCCQNCQLRPSGWQCRPTRGDCDLPEFCPGDSSQCPPDVSLGDGEPCAGGQAVCMHGRCASYAQQCQSLWGPGAQPAAPLCLQTANTRGNAFGSCGRNPSGSYVSCTPRDAICGQLQCQTGRTQPLLGSIRDLLWETIDVNGTELNCSWVHLDLGSDVAQPLLTLPGTACGPGLVCIDHRCQRVDLLGAQECRSKCHGHGVCDSNRHCYCEEGWAPPDCTTQLKATSSLTTGLLLSLLVLLVLVMLGASYWYRARLHQRLCQLKGPTCQYRAAQSGPSERPGPPQRALLARGTKSQGPAKPPPPRKPLPADPQGRCPSGDLPGPGAGIPPLVVPSRPAPPPPTVSSLYL

SEQ ID NO: 252 - protein, 633 aa, Homo sapiens
MRLALLWALGLLGAGSPLPSWPLPNIVSACNVEAPQVALRSSRQSQRRPRGSPWSPRSFRTISQLASKRCFRELVPGRPTLVWYQPDGTRVVSEGHTLENCCYQGRVRGYAGSWVSICTCSGLRGLVVLTPERSYTLEQGPGDLQGPPIISRIQDLHLPGHTCALSWRESVHTQKPPEHPLGQRHIRRRRDVVTETKTVELVIVADHSEAQKYRDFQHLLNRTLEVALLLDTFFRPLNVRVALVGLEAWTQRDLVEISPNPAVTLENFLHWRRAHLLPRLPHDSAQLVTGTSFSGPTVGMAIQNSICSPDFSGGVNMDHSTSILGVASSIAHELGHSLGLDHDLPGNSCPCPGPAPAKTCIMEASTDFLPGLNFSNCSRRALEKALLDGMGSCLFERLPSLPPMAAFCGNMFVEPGEQCDCGFLDDCVDPCCDSLTCQLRPGAQCASDGPCCQNCQLRPSGWQCRPTRGDCDLPEFCPGDSSQCPPDVSLGDGEPCAGGQAVCMHGRCASYAQQCQSLWGPGAQPAAPLCLQTANTRGNAFGSCGRNPSGSYVSCTPRDAICGQLQCQTGRTQPLLGSIRDLLWETIDVNGTELNCSWVHLDLGSDVAQPLLTLPGTACGPGLVSSLGGQDQV

SEQ ID NO: 253 - protein, 824 aa, Homo sapiens
MRQSLLFLTSVVPFVLAPRPPDDPGFGPHQRLEKLDSLLSDYDILSLSNIQQHSVRKRDLQTSTHVETLLTFSALKRHFKLYLTSSTERFSQNFKVVVVDGKNESEYTVKWQDFFTGHVVGEPDSRVLAHIRDDDVIIRINTDGAEYNIEPLWRFVNDTKDKRMLVYKSEDIKNVSRLQSPKVCGYLKVDNEELLPKGLVDREPPEELVHRVKRRADPDPMKNTCKLLVVADHRFYRYMGRGEESTTTNYLIELIDRVDDIYRNTSWDNAGFKGYGIQIEQIRILKSPQEVKPGEKHYNMAKSYPNEEKDAWDVKMLLEQFSFDIAEEASKVCLAHLFTYQDFDMGTLGLAYVGSPRANSHGGVCPKAYYSPVGKKNIYLNSGLTSTKNYGKTILTKEADLVTTHELGHNFGAEHDPDGLAECAPNEDQGGKYVMYPIAVSGDHENNKMFSNCSKQSIYKTIESKAQECFQERSNKVCGNSRVDEGEECDPGIMYLNNDTCCNSDCTLKEGVQCSDRNSPCCKNCQFETAQKKCQEAINATCKGVSYCTGNSSECPPPGNAEDDTVCLDLGKCKDGKCIPFCEREQQLESCACNETDNSCKVCCRDLSGRCVPYVDAEQKNLFLRKGKPCTVGFCDMNGKCEKRVQDVIERFWDFIDQLSINTFGKFLADNIVGSVLVFSLIFWIPFSILVHCVDKKLDKQYESLSLFHPSNVEMLSSMDSASVRIIKPFPAPQTPGRLQPAPVIPSAPAAPKLDHQRMDTIQEDPSTDSHMDEDGFEKDPFPNSSTAAKSFEDLTDHPVTRSEKAASFKLQRQNRVDSKETEC

SEQ ID NO: 254 - protein, 285 aa, Homo sapiens
MRQSLLFLTSVVPFVLAPRPPDDPGFGPHQRLEKLDSLLSDYDILSLSNIQQHSVRKRDLQTSTHVETLLTFSALKRHFKLYLTSSTERFSQNFKVVVVDGKNESEYTVKWQDFFTGHVVGEPDSRVLAHIRDDDVIIRINTDGAEYNIEPLWRFVNDTKDKRMLVYKSEDIKNVSRLQSPKVCGYLKVDNEELLPKGLVDREPPEELVHRVKRRADPDPMKNTCKLLVVADHRFYRYMGRGEESTTTNYLIELIDRVDDIYRNTSWDNAGFKGYGIQIEQLLFE

SEQ ID NO: 255 - protein, 258 aa, Homo sapiens
MRQSLLFLTSVVPFVLAPRPPDDPGFGPHQRLEKLDSLLSDYDILSLSNIQQHSVRKRDLQTSTHVETLLTFSALKRHFKLYLTSSTERFSQNFKVVVVDGKNESEYTVKWQDFFTGHVVGEPDSRVLAHIRDDDVIIRINTDGAEYNIEPLWRFVNDTKDKRMLVYKSEDIKNVSRLQSPKVCGYLKVDNEELLPKGLVDREPPEELVHRVKRRADPDPMKNTCKLLVVADHRFYRYMGRGEESTTTNYLIHTDRAN

SEQ ID NO: 256 - protein, 115 aa, Homo sapiens
MFLLLALLTELGRLQAHEGSEGIFLHVTVPRKIKSNDSEVSERKMIYIITIDGQPYTLHLGKQSFLPQNFLVYTYNETGSLHSVSPYFMMHCHYQGYAAEFPNSFVTLSICSGLR

SEQ ID NO: 257 - protein, 715 aa, Homo sapiens
MFLLLALLTELGRLQAHEGSEGIFLHVTVPRKIKSNDSEVSERKMIYIITIDGQPYTLHLGKQSFLPQNFLVYTYNETGSLHSVSPYFMMHCHYQGYAAEFPNSFVTLSICSGLRGFLQFENISYGIEPVESSARFEHIIYQMKNNDPNVSILAVNYSHIWQKDQPYKVPLNSQIKNLSKLLPQYLEIYIIVEKALMFTQFKLTVILSSLELWSNENQISTSGDADDILQRFLAWKRDYLILRPHDIAYLLVYRKHPKYVGATFPGTVCNKSYDAGIAMYPDAIGLEGFSVIIAQLLGLNVGLTYDDITQCFCLRATCIMNHEAVSASGRKIFSNCSMHDYRYFVSKFETKCLQKLSNLQPLHQNQPVCGNGILESNEECDCGNKNECQFKKCCDYNTCKLKGSVKCGSGPCCTSKCELSIAGTPCRKSIDPECDFTEYCNGTSSNCVPDTYALNGRLCKLGTAYCYNGQCQTTDNQCAKIFGKGAQGAPFACFKEVNSLHERSENCGFKNSQPLPCERKDVLCGKLACVQPHKNANKSDAQSTVYSYIQDHVCVSIATGSSMRSDGTDNAYVADGTMCGPEMYCVNKTCRKVHLMGYNCNATTKCKGKGICNNFGNCQCFPGHRPPDCKFQFGSPGGSIDDGNFQKSGDFYTEKGYNTHWNNWFILSFCIFLPFFIVFTTVIFKRNEISKSCNRENAEYNRNSSVVSESDDVGH

SEQ ID NO: 258 - protein, 739 aa, Homo sapiens
MFLLLALLTELGRLQAHEGSEGIFLHVTVPRKIKSNDSEVSERKMIYIITIDGQPYTLHLGKQSFLPQNFLVYTYNETGSLHSVSPYFMMHCHYQGYAAEFPNSFVTLSICSGLRGFLQFENISYGIEPVESSARFEHIIYQMKNNDPNVSILAVNYSHIWQKDQPYKVPLNSQIKNLSKLLPQYLEIYIIVEKALYDYMGSEMMAVTQKIVQVIGLVNTMFTQFKLTVILSSLELWSNENQISTSGDADDILQRFLAWKRDYLILRPHDIAYLLVYRKHPKYVGATFPGTVCNKSYDAGIAMYPDAIGLEGFSVIIAQLLGLNVGLTYDDITQCFCLRATCIMNHEAVSASGRKIFSNCSMHDYRYFVSKFETKCLQKLSNLQPLHQNQPVCGNGILESNEECDCGNKNECQFKKCCDYNTCKLKGSVKCGSGPCCTSKCELSIAGTPCRKSIDPECDFTEYCNGTSSNCVPDTYALNGRLCKLGTAYCYNGQCQTTDNQCAKIFGKGAQGAPFACFKEVNSLHERSENCGFKNSQPLPCERKDVLCGKLACVQPHKNANKSDAQSTVYSYIQDHVCVSIATGSSMRSDGTDNAYVADGTMCGPEMYCVNKTCRKVHLMGYNCNATTKCKGKGICNNFGNCQCFPGHRPPDCKFQFGSPGGSIDDGNFQKSGDFYTEKGYNTHWNNWFILSFCIFLPFFIVFTTVIFKRNEISKSCNRENAEYNRNSSVVSESDDVGH

SEQ ID NO: 259 - protein, 182 aa, Homo sapiens
MFLLLALLTELGRLQAHEGSEGIFLHVTVPRKIKSNDSEVSERKMIYIITIDGQPYTLHLGKQSFLPQNFLVYTYNETGSLHSVSPYFMMHCHYQGYAAEFPNSFVTLSICSGLRGFLQFENISYGIEPVESSARFEHIIYQMKNNDPNVSILAVNYSHIWQKDQPYKVPLNSQVTVIILML

SEQ ID NO: 260 - protein, 62 aa, Homo sapiens
MFLLLALLTELGRLQAHEGSEGIFLHVTVPRKIKSNDSEVSERKVFGEQVVFGYMNDLHHYN

SEQ ID NO: 261 - protein, 330 aa, Homo sapiens
EEDVDLGYVEDGTPCGPQMMCLEHRCLPVASFNFSTCLSSKEGTICSGNGVCSNELKCVCNRHWIGSDCNTYFPHNDDAKTGITLSGNGVAGTNIIIGIIAGTILVLALILGITAWGYKNYREQRQLPQGDYVKKPGDGDSFYSDIPPGVSTNSASSSKKRSNGLSHSWSERIPDTKHISDICENGRPRSNSWQGNLGGNKKKIRGKRFRPRSNSTEREPQAPEPGHSLAQTVPSQGISPGGSDSPQTGSLDHRYLNPWFKRDYNVAKWVEDVNKNTEGPYFRTLSPAKSPSSSTGSIASSRKYPYPMPPLPDEDKKVNRQSARLWETSI

SEQ ID NO: 262 - protein, 804 aa, Homo sapiens
MELEKRKENRFVERQSIVPLRLIYRSGGEDESRHDALDTRVRGDLGGPQLTHVDQASFQVDAFGTSFILDVVLNHDLLSSEYIERHIEHGGKTVEVKGGEHCYYQGHIRGNPDSFVALSTCHGLHGMFYDGNHTYLIEPEENDTTQEDFHFHSVYKSRLFEFSLDDLPSEFQQVNITPSKFILKPRPKRSKRQLRRYPRNVEEETKYIELMIVNDHLMFKKHRLSVVHTNTYAKSVVNMADLIYKDQLKTRIVLVAMETWATDNKFAISENPLITLREFMKYRRDFIKEKSDAVHLFSGSQFESSRSGAAYIGGICSLLKGGGVNEFGKTDLMAVTLAQSLAHNIGIISDKRKLASGECKCEDTWSGCIMGDTGYYLPKKFTQCNIEEYHDFLNSGGGACLFNKPSKLLDPPECGNGFIETGEECDCGTPAECVLEGAECCKKCTLTQDSQCSDGLCCKKCKFQPMGTVCREAVNDCDIRETCSGNSSQCAPNIHKMDGYSCDGVQGICFGGRCKTRDRQCKYIWGQKVTASDKYCYEKLNIEGTEKGNCGKDKDTWIQCNKRDVLCGYLLCTNIGNIPRLGELDGEITSTLVVQQGRTLNCSGGHVKLEEDVDLGYVEDGTPCGPQMMCLEHRCLPVASFNFSTCLSSKEGTICSGNGVCSNELKCVCNRHWIGSDCNTYFPHNDDAKTGITLSGNGVAGTNIIIGIIAGTILVLALILGITAWGYKNYREQRQLPQGDYVKKPGDGDSFYSDIPPGVSTNSASSSKKRSNGLSHSWSERIPDTKHISDICENGRPRSNSWQG

SEQ ID NO: 263 - protein, 196 aa, Homo sapiens
MQAAVAVSVPFLLLCVLGTCPPARCGQAGDASLMELEKRKENRFVERQSIVPLRLIYRSGGEDESRHDALDTRVRGDLGGPQIQMFLKSESQKTIYQIQLTHVDQASFQVDAFGTSFILDVVLNHDLLSSEYIERHIEHGGKTVEVKGGEHCYYQGHIRGNPDSFVALSTCHGLHGMFYDGNHTYLIEPEENDTTQ

SEQ ID NO: 264 - protein, 906 aa, Homo sapiens
MQAAVAVSVPFLLLCVLGTCPPARCGQAGDASLMELEKRKENRFVERQSIVPLRLIYRSGGEDESRHDALDTRVRGDLGGPQLTHVDQASFQVDAFGTSFILDVVLNHDLLSSEYIERHIEHGGKTVEVKGGEHCYYQGHIRGNPDSFVALSTCHGLHGMFYDGNHTYLIEPEENDTTQEDFHFHSVYKSRLFEFSLDDLPSEFQQVNITPSKFILKPRPKRSKRQLRRYPRNVEEETKYIELMIVNDHLMFKKHRLSVVHTNTYAKSVVNMADLIYKDQLKTRIVLVAMETWATDNKFAISENPLITLREFMKYRRDFIKEKSDAVHLFSGSQFESSRSGAAYIGGICSLLKGGGVNEFGKTDLMAVTLAQSLAHNIGIISDKRKLASGECKCEDTWSGCIMGDTGYYLPKKFTQCNIEEYHDFLNSGGGACLFNKPSKLLDPPECGNGFIETGEECDCGTPAECVLEGAECCKKCTLTQDSQCSDGLCCKKCKFQPMGTVCREAVNDCDIRETCSGNSSQCAPNIHKMDGYSCDGVQGICFGGRCKTRDRQCKYIWGQKVTASDKYCYEKLNIEGTEKGNCGKDKDTWIQCNKRDVLCGYLLCTNIGNIPRLGELDGEITSTLVVQQGRTLNCSGGHVKLEEDVDLGYVEDGTPCGPQMMCLEHRCLPVASFNFSTCLSSKEGTICSGNGVCSNELKCVCNRHWIGSDCNTYFPHNDDAKTGITLSGNGVAGTNIIIGIIAGTILVLALILGITAWGYKNYREQRQLPQGDYVKKPGDGDSFYSDIPPGVSTNSASSSKKRSNGLSHSWSERIPDTKHISDICENGRPRSNSWQGNLGGNKKKIRGKRFRPRSNSTETLSPAKSPSSSTGSIASSRKYPYPMPPLPDEDKKVNRQSARLWETSI

SEQ ID NO: 265 - protein, 859 aa, Homo sapiens
MQAAVAVSVPFLLLCVLGTCPPARCGQAGDASLMELEKRKENRFVERQSIVPLRLIYRSGGEDESRHDALDTRVRGDLGGPQLTHVDQASFQVDAFGTSFILDVVLNHDLLSSEYIERHIEHGGKTVEVKGGEHCYYQGHIRGNPDSFVALSTCHGLHGMFYDGNHTYLIEPEENDTTQEDFHFHSVYKSRLFEFSLDDLPSEFQQVNITPSKFILKPRPKRSKRQLRRYPRNVEEETKYIELMIVNDHLMFKKHRLSVVHTNTYAKSVVNMADLIYKDQLKTRIVLVAMETWATDNKFAISENPLITLREFMKYRRDFIKEKSDAVHLFSGSQFESSRSGAAYIGGICSLLKGGGVNEFGKTDLMAVTLAQSLAHNIGIISDKRKLASGECKCEDTWSGCIMGDTGYYLPKKFTQCNIEEYHDFLNSGGGACLFNKPSKLLDPPECGNGFIETGEECDCGTPAECVLEGAECCKKCTLTQDSQCSDGLCCKKCKFQPMGTVCREAVNDCDIRETCSGNSSQCAPNIHKMDGYSCDGVQGICFGGRCKTRDRQCKYIWGQKVTASDKYCYEKLNIEGTEKGNCGKDKDTWIQCNKRDVLCGYLLCTNIGNIPRLGELDGEITSTLVVQQGRTLNCSGGHVKLEEDVDLGYVEDGTPCGPQMMCLEHRCLPVASFNFSTCLSSKEGTICSGNGVCSNELKCVCNRHWIGSDCNTYFPHNDDAKTGITLSGNGVAGTNIIIGIIAGTILVLALILGITAWGYKNYREQRQLPQGDYVKKPGDGDSFYSDIPPGVSTNSASSSKKRSNGLSHSWSERIPDTKHISDICENGRPRSNSWQGNLGGNKKKIRGKRFRPRSNSTE

SEQ ID NO: 266 - protein, 899 aa, Homo sapiens
MQAAVAVSVPFLLLCVLGTCPPARCGQAGDASLMELEKRKENRFVERQSIVPLRLIYRSGGEDESRHDALDTRVRGDLGGPQLTHVDQASFQVDAFGTSFILDVVLNHDLLSSEYIERHIEHGGKTVEVKGGEHCYYQGHIRGNPDSFVALSTCHGLHGMFYDGNHTYLIEPEENDTTQEDFHFHSVYKSRLFEFSLDDLPSEFQQVNITPSKFILKPRPKRSKRQLRRYPRNVEEETKYIELMIVNDHLMFKKHRLSVVHTNTYAKSVVNMADLIYKDQLKTRIVLVAMETWATDNKFAISENPLITLREFMKYRRDFIKEKSDAVHLFSGSQFESSRSGAAYIGGICSLLKGGGVNEFGKTDLMAVTLAQSLAHNIGIISDKRKLASGECKCEDTWSGCIMGDTGYYLPKKFTQCNIEEYHDFLNSGGGACLFNKPSKLLDPPECGNGFIETGEECDCGTPAECVLEGAECCKKCTLTQDSQCSDGLCCKKCKFQPMGTVCREAVNDCDIRETCSGNSSQCAPNIHKMDGYSCDGVQGICFGGRCKTRDRQCKYIWGQKVTASDKYCYEKLNIEGTEKGNCGKDKDTWIQCNKRDVLCGYLLCTNIGNIPRLGELDGEITSTLVVQQGRTLNCSGGHVKLEEDVDLGYVEDGTPCGPQMMCLEHRCLPVASFNFSTCLSSKEGTICSGNGVCSNELKCVCNRHWIGSDCNTYFPHNDDAKTGITLSGNGVAGTNIIIGIIAGTILVLALILGITAWGYKNYREQRSNGLSHSWSERIPDTKHISDICENGRPRSNSWQGNLGGNKKKIRGKRFRPRSNSTEYLNPWFKRDYNVAKWVEDVNKNTEGPYFRTLSPAKSPSSSTGSIASSRKYPYPMPPLPDEDKKVNRQSARLWETSI

SEQ ID NO: 267 - protein, 870 aa, Homo sapiens
MQAAVAVSVPFLLLCVLGTCPPARCGQAGDASLMELEKRKENRFVERQSIVPLRLIYRSGGEDESRHDALDTRVRGDLGGPQLTHVDQASFQVDAFGTSFILDVVLNHDLLSSEYIERHIEHGGKTVEVKGGEHCYYQGHIRGNPDSFVALSTCHGLHGMFYDGNHTYLIEPEENDTTQEDFHFHSVYKSRLFEFSLDDLPSEFQQVNITPSKFILKPRPKRSKRQLRRYPRNVEEETKYIELMIVNDHLMFKKHRLSVVHTNTYAKSVVNMADLIYKDQLKTRIVLVAMETWATDNKFAISENPLITLREFMKYRRDFIKEKSDAVHLFSGSQFESSRSGAAYIGGICSLLKGGGVNEFGKTDLMAVTLAQSLAHNIGIISDKRKLASGECKCEDTWSGCIMGDTGYYLPKKFTQCNIEEYHDFLNSGGGACLFNKPSKLLDPPECGNGFIETGEECDCGTPAECVLEGAECCKKCTLTQDSQCSDGLCCKKCKFQPMGTVCREAVNDCDIRETCSGNSSQCAPNIHKMDGYSCDGVQGICFGGRCKTRDRQCKYIWGQKVTASDKYCYEKLNIEGTEKGNCGKDKDTWIQCNKRDVLCGYLLCTNIGNIPRLGELDGEITSTLVVQQGRTLNCSGGHVKLEEDVDLGYVEDGTPCGPQMMCLEHRCLPVASFNFSTCLSSKEGTICSGNGVCSNELKCVCNRHWIGSDCNTYFPHNDDAKTGITLSGNGVAGTNIIIGIIAGTILVLALILGITAWGYKNYREQRSNGLSHSWSERIPDTKHISDICENGRPRSNSWQGNLGGNKKKIRGKRFRPRSNSTETLSPAKSPSSSTGSIASSRKYPYPMPPLPDEDKKVNRQSARLWETSI

SEQ ID NO: 268 - protein, 342 aa, Homo sapiens
MQAAVAVSVPFLLLCVLGTCPPARCGQAGDASLMELEKRKENRFVERQSIVPLRLIYRSGGEDESRHDALDTRVRGDLGGPQLTHVDQASFQVDAFGTSFILDVVLNHDLLSSEYIERHIEHGGKTVEVKGGEHCYYQGHIRGNPDSFVALSTCHGLHGMFYDGNHTYLIEPEENDTTQEDFHFHSVYKSRLFEFSLDDLPSEFQQVNITPSKFILKPRPKRSKRQLRRYPRNVEEETKYIELMIVNDHLMFKKHRLSVVHTNTYAKSVVNMADLIYKDQLKTRIVLVAMETWATDNKFAISENPLITLREFMKYRRDFIKEKSDAVHLFSYVTSVMMYYFF

SEQ ID NO: 269 - protein, 264 aa, Homo sapiens
  VARIANT 1: note = misc_feature - Xaa can be any naturally occurring amino acid
XCNRHWIGSDCNTYFPHNDDAKTGITLSGNGVAGTNIIIGIIAGTILVLALILGITAWGYKNYREQRQLPQGDYVKKPGDGDSFYSDIPPGVSTNSASSSKKRSAFLSHFQISTCSITHYSISQNISLFCSRSNGLSHSWSERIPDTKHISDICENGRPRSNSWQGNLGGNKKKIRGKRFRPRSNSTEYLNPWFKRDYNVAKWVEDVNKNTEGPYFRTLSPAKSPSSSTGSIASSRKYPYPMPPLPDEDKKVNRQSARLWETSI

SEQ ID NO: 270 - protein, 217 aa, Homo sapiens
MLQGLLPVSLLLSVAVSAIKELPGVKKYEVVYPIRLHPLHKREAKEPEQQEQFETELKYKMTINGKIAVLYLKKNKNLLAPGYTETYYNSTGKEITTSPQIMDDCYYQGHILNEKVSDASISTCRGLRGYFSQGDQRYFIEPLSPIHRDGQEHALFKYNPDEKNYDSTCGMDGVLWAHDLQQNIALPATKLVKLKDRKVQEHEKYIEYYLVLDNGEF

SEQ ID NO: 271 - protein, 775 aa, Homo sapiens
MLQGLLPVSLLLSVAVSAIKELPGVKKYEVVYPIRLHPLHKREAKEPEQQEQFETELKYKMTINGKIAVLYLKKNKNLLAPGYTETYYNSTGKEITTSPQIMDDCYYQGHILNEKVSDASISTCRGLRGYFSQGDQRYFIEPLSPIHRDGQEHALFKYNPDEKNYDSTCGMDGVLWAHDLQQNIALPATKLVKLKDRKVQEHEKYIEYYLVLDNGEFKRYNENQDEIRKRVFEMANYVNMLYKKLNTHVALVGMEIWTDKDKIKITPNASFTLENFSKWRGSVLSRRKRHDIAQLITATELAGTTVGLAFMSTMCSPYSVGVVQDHSDNLLRVAGTMAHEMGHNFGMFHDDYSCKCPSTICVMDKALSFYIPTDFSSCSRLSYDKFFEDKLSNCLFNAPLPTDIISTPICGNQLVEMGEDCDCGTSEECTNICCDAKTCKIKATFQCALGECCEKCQFKKAGMVCRPAKDECDLPEMCNGKSGNCPDDRFQVNGFPCHHGKGHCLMGTCPTLQEQCTELWGPGTEVADKSCYNRNEGGSKYGYCRRVDDTLIPCKANDTMCGKLFCQGGSDNLPWKGRIVTFLTCKTFDPEDTSQEIGMVANGTKCGDNKVCINAECVDIEKAYKSTNCSSKCKGHAVCDHELQCQCEEGWIPPDCDDSSVVFHFSIVVGVLFPMAVIFVVVAMVIRHQSSREKQKKDQRPLSTTGTRPHKQKRKPQMVKAVQPQEMSQMKPHVYDLPVEGNEPPASFHKDTNALPPTVFKDNPVSTPKDSNPKA

SEQ ID NO: 272 - protein, 540 aa, Homo sapiens
MLQGLLPVSLLLSVAVSAIKELPGVKKYEVVYPIRLHPLHKREAKEPEQQEQFETELKYKMTINGKIAVLYLKKNKNLLAPGYTETYYNSTGKEITTSPQIMDDCYYQGHILNEKVSDASISTCRGLRGYFSQGDQRYFIEPLSPIHRDGQEHALFKYNPDEKNYDSTCGMDGVLWAHDLQQNIALPATKLVKLKDRKVQEHEKYIEYYLVLDNGEFKRYNENQDEIRKRVFEMANYVNMLYKKLNTHVALVGMEIWTDKDKIKITPNASFTLENFSKWRGSVLSRRKRHDIAQLITATELAGTTVGLAFMSTMCSPYSVGVVQDHSDNLLRVAGTMAHEMGHNFGMFHDDYSCKCPSTICVMDKALSFYIPTDFSSCSRLSYDKFFEDKLSNCLFNAPLPTDIISTPICGNQLVEMGEDCDCGTSEECTNICCDAKTCKIKATFQCALGECCEKCQFKKAGMVCRPAKDECDLPEMCNGKSGNCPDDRFQVNGFPCHHGKGHCLMGTCPTLQEQCTELWGPGRRTNPFPCACAKENHFR

SEQ ID NO: 273 - protein, 58 aa, Homo sapiens
MLQGLLPVSLLLSVAVSAIKELPGVKKYEVVYPIRLHPLHKREAKEPEQQFLSSMKIS

SEQ ID NO: 274 - protein, 387 aa, Homo sapiens
  VARIANT 1: note = misc_feature - Xaa can be any naturally occurring amino acid
XFYIPTDFSSCSRLSYDKFFEDKLSNCLFNAPLPTDIISTPICGNQLVEMGEDCDCGTSEECTNICCDAKTCKIKATFQCALGECCEKCQFKKAGMVCRPAKDECDLPEMCNGKSGNCPDDRFQVNGFPCHHGKGHCLMGTCPTLQEQCTELWGPGTEVADKSCYNRNEGGSKYGYCRRVDDTLIPCKANDTMCGKLFCQGGSDNLPWKGRIVTFLTCKTFDPEDTSQEIGMVANGTKCGDNKVCINAECVDIEKAYKSTNCSSKCKGHAVCDHELQCQCEEGWIPPDCDDSSVVFHFSIVVGVLFPMAVIFVVVAMVIRHQSSREKQKKDQRPLSTTGTRPHKQKRKPQMVKAVQPQEMSQMKPHVYDLPVEGNEPPASFDSNPKA

SEQ ID NO: 275 - protein, 174 aa, Homo sapiens
  VARIANT 1: note = misc_feature - Xaa can be any naturally occurring amino acid
XKGRIVTFLTCKTFDPEDTSQEIGMVANGTKCGDNKVCINAECVDIEKAYKSTNCSSKCKGHAVCDHELQCQCEEGWIPPDCDDSSVVFHFSIVVGVLFPMAVIFVVVAMVIRHQSSREKQKKDQRPLSTTGTRPHKQKRKPQMVKAVQPQEVNYIVWAVITMAPLCVSLTLLS

SEQ ID NO: 276 - protein, 14 aa, Homo sapiens
MKMLLLLHCLGVFL

SEQ ID NO: 277 - protein, 44 aa, Homo sapiens
MKMLLLLHCLGVFLSCSGHIQDEHPQYHSPPDVVIPVRITGTTR

SEQ ID NO: 278 - protein, 90 aa, Homo sapiens
MKMLLLLHCLGVFLSCSGHIQDEHPQYHSPPDVVIPVRITGTTRGMTPPGWLSYILPFGGQKHIIHIKVKKLLFSKHLPVFTYTDQGAIL

SEQ ID NO: 279 - protein, 820 aa, Homo sapiens
MKMLLLLHCLGVFLSCSGHIQDEHPQYHSPPDVVIPVRITGTTRGMTPPGWLSYILPFGGQKHIIHIKVKKLLFSKHLPVFTYTDQGAILEDQPFVQNNCYYHGYVEGDPESLVSLSTCFGGFQGILQINDFAYEIKPLAFSTTFEHLVYKMDSEEKQFSTMRSGFMQNEITCRMEFEEIDNSTQKQSSYVGWWIHFRIVEIVVVIDNYLYIRYERNDSKLLEDLYVIVNIVDSILDVIGVKVLLFGLEIWTNKNLIVVDDVRKSVHLYCKWKSENITPRMQHDTSHLFTTLGLRGLSGIGAFRGMCTPHRSCAIVTFMNKTLGTFSIAVAHHLGHNLGMNHDEDTCRCSQPRCIMHEGNPPITKFSNCSYGDFWEYTVERTKCLLETVHTKDIFNVKRCGNGVVEEGEECDCGPLKHCAKDPCCLSNCTLTDGSTCAFGLCCKDCKFLPSGKVCRKEVNECDLPEWCNGTSHKCPDDFYVEDGIPCKERGYCYEKSCHDRNEQCRRIFGAGANTASETCYKELNTLGDRVGHCGIKNATYIKCNISDVQCGRIQCENVTEIPNMSDHTTVHWARFNDIMCWSTDYHLGMKGPDIGEVKDGTECGIDHICIHRHCVHITILNSNCSPAFCNKRGICNNKHHCHCNYLWDPPNCLIKGYGGSVDSGPPPKRKKKKKFCYLCILLLIVLFILLCCLYRLCKKSKPIKKQQDVQTPSAKEEEKIQRRPHELPPQSQPWVMPSQSQPPVTPSQSHPQVMPSQSQPPVTPSQSQPRVMPSQSQPPVMPSQSHPQLTPSQSQPPVTPSQRQPQLMPSQSQPPVTPS

SEQ ID NO: 280 - protein, 820 aa, Homo sapiens; identical to SEQ ID NO: 279

SEQ ID NO: 281 - protein, 820 aa, Homo sapiens; identical to SEQ ID NO: 279

SEQ ID NO: 282 - protein, 820 aa, Homo sapiens; identical to SEQ ID NO: 279

SEQ ID NO: 283 - protein, 820 aa, Homo sapiens; identical to SEQ ID NO: 279

SEQ ID NO: 284 - protein, 820 aa, Homo sapiens; identical to SEQ ID NO: 279

SEQ ID NO: 285 - protein, 787 aa, Homo sapiens
MFRLWLLLAGLCGLLASRPGFQNSLLQIVIPEKIQTNTNDSSEIEYEQISYIIPIDEKLYTVHLKQRYFLADNFMIYLYNQGSMNTYSSDIQTQCYYQGNIEGYPDSMVTLSTCSGLRGILQFENVSYGIEPLESAVEFQHVLYKLKNEDNDIAIFIDRSLKEQPMDDNIFISEKSEPAVPDLFPLYLEMHIVVDKTLYDYWGSDSMIVTNKVIEIVGLANSMFTQFKVTIVLSSLELWSDENKISTVGEADELLQKFLEWKQSYLNLRPHDIAYLLIYMDYPRYLGAVFPGTMCITRYSAGVALYPKEITLEAFAVIVTQMLALSLGISYDDPKKCQCSESTCIMNPEVVQSNGVKTFSSCSLRSFQNFISNVGVKCLQNKPQMQKKSPKPVCGNGRLEGNEICDCGTEAQCGPASCCDFRTCVLKDGAKCYKGLCCKDCQILQSGVECRPKAHPECDIAENCNGTSPECGPDITLINGLSCKNNKFICYDGDCHDLDARCESVFGKGSRNAPFACYEEIQSQSDRFGNCGRDRNNKYVFCGWRNLICGRLVCTYPTRKPFHQENGDVIYAFVRDSVCITVDYKLPRTVPDPLAVKNGSQCDIGRVCVNRECVESRIIKASAHVCSQQCSGHGVCDSRNKCHCSPGYKPPNCQIRSKGFSIFPEEDMGSIMERASGKTENTWLLGFLIALPILIVTTAIVLARKQLKKWFAKEEEFPSSESKSEGSTQTYASQSSSEGSTQTYASQTRSESSSQADTSKSKSEDSAEAYTSRSKSQDSTQTQSSSN

SEQ ID NO: 286 - protein, 629 aa, Homo sapiens
MFRLWLLLAGLCGLLASRPGFQNSLLQIVIPEKIQTNTNDSSEIEYEQISYIIPIDEKLYTVHLKQRYFLADNFMIYLYNQGSMNTYSSDIQTQCYYQGNIEGYPDSMVTLSTCSGLRGILQFENVSYGIEPLESAVEFQHVLYKLKNEDNDIAIFIDRSLKEQPMDDNIFISEKSEPAVPDLFPLYLEMHIVVDKTLYDYWGSDSMIVTNKVIEIVGLANSMFTQFKVTIVLSSLELWSDENKISTVGEADELLQKFLEWKQSYLNLRPHDIAYLLIYMDYPRYLGAVFPGTMCITRYSAGVALQCGPASCCDFRTCVLKDGAKCYKGLCCKDCQILQSGVECRPKAHPECDIAENCNGTSPECGPDITLINGLSCKNNKFICYDGDCHDLDARCESVFGKGSRNAPFACYEEIQSQSDRFGNCGRDRNNKYVFCGWRNLICGRLVCTYPTRKPFHQENGDVIYAFVRDSVCITVDYKLPRTVPDPLAVKNGSQCDIGRVCVNRECVESRIIKASAHVCSQQCSGHGVCDSRNKCHCSPGYKPPNCQIRSKGFSIFPEEDMGSIMERASGKTENTWLLGFLIALPILIVTTAIVLARKQLKKWFAKEEEFPSSESKSQDSTQTQSSSN

SEQ ID NO: 287 - protein, 184 aa, Homo sapiens
MFRLWLLLAGLCGLLASRPGFQNSLLQIVIPEKIQTNTNDSSEIEYEQISYIIPIDEKLYTVHLKQRYFLADNFMIYLYNQGSMNTYSSDIQTQCYYQGNIEGYPDSMVTLSTCSGLRGILQFENVSYGIEPLESAVEFQHVLYKLKNEDNDIAIFIDRSLKEQPMDDNIFISEKYDYWGSDSM

SEQ ID NO: 288 - protein, 155 aa, Homo sapiens
MFRLWLLLAGLCGLLASRPGFQNSLLQIVIPEKIQTNTNDSSEIEYEQISYIIPIDEKLYTVHLKQRYFLADNFMIYLYNQGSMNTYSSDIQTQCYYQGNIEGYPDSMVTLSTCSGLRSLKEQPMDDNIFISEKSEPAVPDLFPLYLEMHIVVDK

SEQ ID NO: 289 - protein, 53 aa, Homo sapiens
MIYLYNQGSMNTYSSDIQTQCYYQGNIEGYPDSMVTLSTCSGLRGILQFENVS

SEQ ID NO: 290 - protein, 688 aa, Homo sapiens
MNVRGAAPGVRASPRPWQFPTSQRLPAGSPEAAPCSASGCCWPGSAASWRQDPEQISYIIPIDEKLYTVHLKQRYFLADNFMIYLYNQGSMNTYSSDIQTQCYYQGNIEGYPDSMVTLSTCSGLRGILQFENVSYGIEPLESAVEFQHVLYKLKNEDNDIAIFIDRSLKEQPMDDNIFISEKSEPAVPDLFPLYLEMHIVVDKTLYDYWGSDSMIVTNKVIEIVGLANSMFTQFKVTIVLSSLELWSDENKISTVGEADELLQKFLEWKQSYLNLRPHDIAYLLIYMDYPRYLGAVFPGTMCITRYSAGVALQCGPASCCDFRTCVLKDGAKCYKGLCCKDCQILQSGVECRPKAHPECDIAENCNGTSPECGPDITLINGLSCKNNKFICYDGDCHDLDARCESVFGKGSRNAPFACYEEIQSQSDRFGNCGRDRNNKYVFCGWRNLICGRLVCTYPTRKPFHQENGDVIYAFVRDSVCITVDYKLPRTVPDPLAVKNGSQCDIGRVCVNRECVESRIIKASAHVCSQQCSGHGVCDSRNKCHCSPGYKPPNCQIRSKGFSIFPEEDMGSIMERASGKTENTWLLGFLIALPILIVTTAIVLARKQLKKWFAKEEEFPSSESKSEGSTQTYASQSSSEGSTQTYASQTRSESSSQADTSKSKSEDSAEAYTSRSKSQDSTQTQSSSN

SEQ ID NO: 291 - protein, 173 aa, Homo sapiens [sequence omitted]

SEQ ID NO: 292 - protein, 787 aa, Homo sapiens
MGWRPRRARGTPLLLLLLLLLLWPVPGAGVLQGHIPGQPVTPHWVLDGQPWRTVSLEEPVSKPDMGLVALEAEGQELLLELEKNHRLLAPGYIETHYGPDGQPVVLAPNHTDHCHYQGRVRGFPDSWVVLCTCSGMSGLITLSRNASYYLRPWPPRGSKDFSTHEIFRMEQLLTWKGTCGHRDPGNKAGMTSLPGGPQSRGRREARRTRKYLELYIVADHTLFLTRHRNLNHTKQRLLEVANYVDQLLRTLDIQVALTGLEVWTERDRSRVTQDANATLWAFLQWRRGLWAQRPHDSAQLLTGRAFQGATVGLAPVEGMCRAESSGGVSTDHSELPIGAAATMAHEIGHSLGLSHDPDGCCVEAAAESGGCVMAAATGHPFPRVFSACSRRQLRAFFRKGGGACLSNAPDPGLPVPPALCGNGFVEAGEECDCGPGQECRDLCCFAHNCSLRPGAQCAHGDCCVRCLLKPAGALCRQAMGDCDLPEFCTGTSSHCPPDVYLLDGSPCARGSGYCWDGACPTLEQQCQQLWGPGSHPAPEACFQVVNSAGDAHGNCGQDSEGHFLPCAGRDALCGKLQCQGGKPSLLAPHMVPVDSTVHLDGQEVTCRGALALPSAQLDLLGLGLVEPGTQCGPRMVCNSNHNCHCAPGWAPPFCDKPGFGGSMDSGPVQAENHDTFLLAMLLSVLLPLLPGAGLAWCCYRLPGAHLQRCSWGCRRDPACSGPKDGPHRDHPLGGVHPMELGPTATGQPWPLDPENSHEPSSHPEKPLPAVSPDPQADQVQMPRSCLW

SEQ ID NO: 293 - protein, 813 aa, Homo sapiens
MGWRPRRARGTPLLLLLLLLLLWPVPGAGVLQGHIPGQPVTPHWVLDGQPWRTVSLEEPVSKPDMGLVALEAEGQELLLELEKNHRLLAPGYIETHYGPDGQPVVLAPNHTDHCHYQGRVRGFPDSWVVLCTCSGMSGLITLSRNASYYLRPWPPRGSKDFSTHEIFRMEQLLTWKGTCGHRDPGNKAGMTSLPGGPQSRGRREARRTRKYLELYIVADHTLFLTRHRNLNHTKQRLLEVANYVDQLLRTLDIQVALTGLEVWTERDRSRVTQDANATLWAFLQWRRGLWAQRPHDSAQLLTGRAFQGATVGLAPVEGMCRAESSGGVSTDHSELPIGAAATMAHEIGHSLGLSHDPDGCCVEAAAESGGCVMAAATGHPFPRVFSACSRRQLRAFFRKGGGACLSNAPDPGLPVPPALCGNGFVEAGEECDCGPGQECRDLCCFAHNCSLRPGAQCAHGDCCVRCLLKPAGALCRQAMGDCDLPEFCTGTSSHCPPDVYLLDGSPCARGSGYCWDGACPTLEQQCQQLWGPGSHPAPEACFQVVNSAGDAHGNCGQDSEGHFLPCAGRDALCGKLQCQGGKPSLLAPHMVPVDSTVHLDGQEVTCRGALALPSAQLDLLGLGLVEPGTQCGPRMVCQSRRCRKNAFQELQRCLTACHSHGVCNSNHNCHCAPGWAPPFCDKPGFGGSMDSGPVQAENHDTFLLAMLLSVLLPLLPGAGLAWCCYRLPGAHLQRCSWGCRRDPACSGPKDGPHRDHPLGGVHPMELGPTATGQPWPLDPENSHEPSSHPEKPLPAVSPDPQADQVQMPRSCLW

SEQ ID NO: 294 - protein, 812 aa, Homo sapiens
MGWRPRRARGTPLLLLLLLLLLWPVPGAGVLQGHIPGQPVTPHWVLDGQPWRTVSLEEPVSKPDMGLVALEAEGQELLLELEKNHRLLAPGYIETHYGPDGQPVVLAPNHTDHCHYQGRVRGFPDSWVVLCTCSGMSGLITLSRNASYYLRPWPPRGSKDFSTHEIFRMEQLLTWKGTCGHRDPGNKAGMTSLPGGPQSRGRREARRTRKYLELYIVADHTLFLTRHRNLNHTKQRLLEVANYVDQLLRTLDIQVALTGLEVWTERDRSRVTQDANATLWAFLQWRRGLWAQRPHDSAQLLTGRAFQGATVGLAPVEGMCRAESSGGVSTDHSELPIGAAATMAHEIGHSLGLSHDPDGCCVEAAAESGGCVMAAATGHPFPRVFSACSRRQLRAFFRKGGGACLSNAPDPGLPVPPALCGNGFVEAGEECDCGPGQECRDLCCFAHNCSLRPGAQCAHGDCCVRCLLKPAGALCRQAMGDCDLPEFCTGTSSHCPPDVYLLDGSPCARGSGYCWDGACPTLEQQCQQLWGPGSHPAPEACFQVVNSAGDAHGNCGQDSEGHFLPCAGRDALCGKLQCQGGKPSLLAPHMVPVDSTVHLDGQEVTCRGALALPSAQLDLLGLGLVEPGTQCGPRMVCQSRRCRKNAFQELQRCLTACHSHGVCNSNHNCHCAPGWAPPFCDKPGFGGSMDSGPVQAENHDTFLLAMLLSVLLPLLPGAGLAWCCYRLPGAHLQRCSWGCRRDPACSGPKDGPHRDHPLGGVHPMELGPTATGQPWPLDPENSHEPSSHPEKPLPAVSPDPQDQVQMPRSCLW

SEQ ID NO: 295 - protein, 692 aa, Homo sapiens
MGWRPRRARGTPLLLLLLLLLLWPVPGAGVLQGHIPGQPVTPHWVLDGQPWRTVSLEEPVSKPDMGLVALEAEGQELLLELEKNHRLLAPGYIETHYGPDGQPVVLAPNHTDHCHYQGRVRGFPDSWVVLCTCSGMSGLITLSRNASYYLRPWPPRGSKDFSTHEIFRMEQLLTWKGTCGHRDPGNKAGMTSLPGGPQSRGRREARRTRKYLELYIVADHTLFLTRHRNLNHTKQRLLEVANYVDQLLRTLDIQVALTGLEVWTERDRSRRQLRAFFRKGGGACLSNAPDPGLPVPPALCGNGFVEAGEECDCGPGQECRDLCCFAHNCSLRPGAQCAHGDCCVRCLLKPAGALCRQAMGDCDLPEFCTGTSSHCPPDVYLLDGSPCARGSGYCWDGACPTLEQQCQQLWGPGSHPAPEACFQVVNSAGDAHGNCGQDSEGHFLPCAGRDALCGKLQCQGGKPSLLAPHMVPVDSTVHLDGQEVTCRGALALPSAQLDLLGLGLVEPGTQCGPRMVCQSRRCRKNAFQELQRCLTACHSHGVCNSNHNCHCAPGWAPPFCDKPGFGGSMDSGPVQAENHDTFLLAMLLSVLLPLLPGAGLAWCCYRLPGAHLQRCSWGCRRDPACSGPKDGPHRDHPLGGVHPMELGPTATGQPWPLDPENSHEPSSHPEKPLPAVSPDPQDQVQMPRSCLW

SEQ ID NO: 296 - protein, 138 aa, Homo sapiens
MGWRPRRARGTPLLLLLLLLLLWPVPGAGVLQGHIPGQPVTPHWVLDGQPWRTVSLEEPVSKPDMGLVALEAEGQELLLELEKNHRLLAPGYIETHYGPDGQPVVLAPNHTVRCFHGLWDAPPEVPPHHSYPYSSLHS

SEQ ID NO: 297 - protein, 754 aa, Homo sapiens
MLPGCIFLMILLIPQVKEKFILGVEGQQLVRPKKLPLIQKRDTGHTHDDDILKTYEEELLYEIKLNRKTLVLHLLRSREFLGSNYSETFYSMKGEAFTRHPQIMDHCFYQGSIVHEYDSAASISTCNGLRGFFRINDQRYLIEPVKYSDEGEHLVFKYNLRVPYGANYSCTELNFTRKTVPGDNESEEDSKIKGIHDEKYVELFIVADDTVYRRNGHPHNKLRNRIWGMVNFVNMIYKTLNIHVTLVGIEIWTHEDKIELYSNIETTLLRFSFWQEKILKTRKDFDHVVLLSGKWLYSHVQGISYPGGMCLPYYSTSIIKDLLPDTNIIANRMAHQLGHNLGMQHDEFPCTCPSGKCVMDSDGSIPALKFSKCSQNQYHQYLKDYKPTCMLNIPFPYNFHDFQFCGNKKLDEGEECDCGPAQECTNPCCDAHTCVLKPGFTCAEGECCESCQIKKAGSICRPAKDECDFPEMCTGHSPACPKDQFRVNGFPCKNSEGYCFMGKCPTREDQCSELFDDEAIESHDICYKMNTKGNKFGYCKNKENRFLPCEEKDVRCGKIYCTGGELSSLLGEDKTYHLKDPQKNATVKCKTIFLYHDSTDIGLVASGTKCGEGMVCNNGECLNMEKVYISTNCPSQCNENPVDGHGLQCHCEEGQAPVACEETLHVTNITILVVVLVLVIVGIGVLILLVRYRKCIKLKQVQSPPTETLGVENKGYFGDEQQIRTEPILPEIHFLNKPASKDSRGIADPNQSAK

SEQ ID NO: 298 - protein, 776 aa, Homo sapiens
MLPGCIFLMILLIPQVKEKFILGVEGQQLVRPKKLPLIQKRDTGHTHDDDILKTYEEELLYEIKLNRKTLVLHLLRSREFLGSNYSETFYSMKGEAFTRHPQIMDHCFYQGSIVHEYDSAASISTCNGLRGFFRINDQRYLIEPVKYSDEGEHLVFKYNLRVPYGANYSCTELNFTRKTVPGDNESEEDSKIKGIHDEKYVELFIVADDTVYRRNGHPHNKLRNRIWGMVNFVNMIYKTLNIHVTLVGIEIWTHEDKIELYSNIETTLLRFSFWQEKILKTRKDFDHVVLLSGKWLYSHVQGISYPGGMCLPYYSTSIIKDLLPDTNIIANRMAHQLGHNLGMQHDEFPCTCPSGKCVMDSDGSIPALKFSKCSQNQYHQYLKDYKPTCMLNIPFPYNFHDFQFCGNKKLDEGEECDCGPAQECTNPCCDAHTCVLKPGFTCAEGECCESCQIKKAGSICRPAKDECDFPEMCTGHSPACPKDQFRVNGFPCKNSEGYCFMGKCPTREDQCSELFDDEAIESHDICYKMNTKGNKFGYCKNKENRFLPCEEKDVRCGKIYCTGGELSSLLGEDKTYHLKDPQKNATVKCKTIFLYHDSTDIGLVASGTKCGEGMVCNNGECLNMEKVYISTNCPSQCNENPVDGHGLQCHCEEGQAPVACEETLHVTNITILVVVLVLVIVGIGVLILLVRYRKCIKLKQVQSPPTETLGVENKGYFGDEQQIRTEPILPEIHFLNQRTPESLESLPTSFSSPHYITLKPASKDSRGIADPNQSAK

SEQ ID NO: 299 - protein, 210 aa, Homo sapiens
MLPGCIFLMILLIPQVKEKFILGVEGQQLVRPKKLPLIQKRDTGHTHDDDILKTYEEELLYEIKLNRKTLVLHLLRSREFLGSNYSETFYSMKGEAFTRHPQIMDHCFYQGSIVHEYDSAASISTCNGLRGFFRINDQRYLIEPVKYSDEGEHLVFKYNLRVPYGANYSCTELNFTRKTVPGDNESEEDSKIKVSTLLLSLPQMKHLLFS

SEQ ID NO: 300 - protein, 516 aa, Homo sapiens
MVNFVNMIYKTLNIHVTLVGIEIWTHEDKIELYSNIETTLLRFSFWQEKILKTRKDFDHVVLLSGKWLYSHVQGISYPGGMCLPYYSTSIIKDLLPDTNIIANRMAHQLGHNLGMQHDEFPCTCPSGKCVMDSDGSIPALKFSKCSQNQYHQYLKDYKPTCMLNIPFPYNFHDFQFCGNKKLDEGEECDCGPAQECTNPCCDAHTCVLKPGFTCAEGECCESCQIKKAGSICRPAKDECDFPEMCTGHSPACPKDQFRVNGFPCKNSEGYCFMGKCPTREDQCSELFDDEAIESHDICYKMNTKGNKFGYCKNKENRFLPCEEKDVRCGKIYCTGGELSSLLGEDKTYHLKDPQKNATVKCKTIFLYHDSTDIGLVASGTKCGEGMVCNNGECLNMEKVYISTNCPSQCNENPVDGHGLQCHCEEGQAPVACEETLHVTNITILVVVLVLVIVGIGVLILLVRYRKCIKLKQVQSPPTETLGVENKGYFGDEQQIRTEPILPEIHFLNHLLYGRHQ

SEQ ID NO: 301 - protein, 245 aa, Homo sapiens
MRGLGLWLLGAMMLPAIAPSRPWALMEQYEVVLPWRLPGPRVRRALPSHLGGQFRPQPCPYLSIRGTYYRPARCPGLIQPVAQLRLSQSSAGRAPACTWGLEMQWSSRRLCRHHQGLHPERVSYVLGATGHNFTLHLRKNRDLLGSGYTETYTAANGSEVTEQPRGQDHCFYQGHVEGYPDSAASLSTCAGLRGFFQVGSDLHLIEPLDEGGEGGRHAVYQAEHLLQTAGTCGVSDDSLGSLLGP

SEQ ID NO: 302 - protein, 742 aa, Homo sapiens
MRGLGLWLLGAMMLPAIAPSRPWALMEQYEVVLPWRLPGPRVRRALPSHLGLHPERVSYVLGATGHNFTLHLRKNRDLLGSGYTETYTAANGSEVTEQPRGQDHCFYQGHVEGYPDSAASLSTCAGLRGFFQVGSDLHLIEPLDEGGEGGRHAVYQAEHLLQTAGTCGVSDDSLGSLLGPRTAAVFRPRPGDSLPSRETRYVELYVVVDNAEFQMLGSEAAVRHRVLEVVNHVDKLYQKLNFRVVLVGLEIWNSQDRFHVSPDPSVTLENLLTWQARQRTRRHLHDNVQLITGVDFTGTTVGFARVSAMCSHSSGAVNQDHSKNPVGVACTMAHEMGHNLGMDHDENVQGCRCQERFEAGRCIMAGSIGSSFPRMFSDCSQAYLESFLERPQSVCLANAPDLSHLVGGPVCGNLFVERGEQCDCGPPEDCRNRCCNSTTCQLAEGAQCAHGTCCQECKVKPAGELCRPKKDMCDLEEFCDGRHPECPEDAFQENGTPCSGGYCYNGACPTLAQQCQAFWGPGGQAAEESCFSYDILPGCKASRYRADMCGVLQCKGGQQPLGRAICIVDVCHALTTEDGTAYEPVPEGTRCGPEKVCWKGRCQDLHVYRSSNCSAQCHNHGVCNHKQECHCHAGWAPPHCAKLLTEVHAGCQPRAGQGRGSSPIQGPPRAGPHHPPGPARPTPGLLGGSEEAAPCSSGHCVQPTLPSSCLHPAGTKAGHQANVRTPSAPSQTRGWCGQPWSS

SEQ ID NO: 303 - protein, 824 aa, Homo sapiens
MRGLGLWLLGAMMLPAIAPSRPWALMEQYEVVLPWRLPGPRVRRALPSHLGLHPERVSYVLGATGHNFTLHLRKNRDLLGSGYTETYTAANGSEVTEQPRGQDHCFYQGHVEGYPDSAASLSTCAGLRGFFQVGSDLHLIEPLDEGGEGGRHAVYQAEHLLQTAGTCGVSDDSLGSLLGPRTAAVFRPRPGDSLPSRETRYVELYVVVDNAEFQMLGSEAAVRHRVLEVVNHVDKLYQKLNFRVVLVGLEIWNSQDRFHVSPDPSVTLENLLTWQARQRTRRHLHDNVQLITGVDFTGTTVGFARVSAMCSHSSGAVNQDHSKNPVGVACTMAHEMGHNLGMDHDENVQGCRCQERFEAGRCIMAGSIGSSFPRMFSDCSQAYLESFLERPQSVCLANAPDLSHLVGGPVCGNLFVERGEQCDCGPPEDCRNRCCNSTTCQLAEGAQCAHGTCCQECKVKPAGELCRPKKDMCDLEEFCDGRHPECPEDAFQENGTPCSGGYCYNGACPTLAQQCQAFWGPGGQAAEESCFSYDILPGCKASRYRADMCGVLQCKGGQQPLGRAICIVDVCHALTTEDGTAYEPVPEGTRCGPEKVCWKGRCQDLHVYRSSNCSAQCHNHGVCNHKQECHCHAGWAPPHCAKLLTEVHAASGSLPVFVVVVLVLLAVVLVTLAGIIVYRKARSRILSRNVAPKTTMGRSNPLFHQAASRVPAKGGAPAPSRGPQELVPTTHPGQPARHPASSVALKRPPPAPPVTVSSPPFPVPVYTRQAPKQVIKPTFAPPVPPVKPGAGAANPGPAEGAVGPKVALKPPIQRKQGAGAPTAP

SEQ ID NO: 304 - protein, 109 aa, Homo sapiens
MRGLGLWLLGAMMLPGPAPREGELRPWGHRAQLHPPPAEEQGPAGLRLHRDLYGCQWLRGDGAASRAGPLLLPGPRRGVPGLSRQPQHLCRPQGFLPGGVRPAPDRAPG

SEQ ID NO: 305 - protein, 733 aa, Homo sapiens
MRGLGLWLLGAMMLPGPAPREGELRPWGHRAQLHPPPAEEQGPAGLRLHRDLYGCQWLRGDGAASRAGPLLLPGPRRGVPGLSRQPQHLCRPQVGSDLHLIEPLDEGGEGGRHAVYQAEHLLQTAGTCGVSDDSLGSLLGPRTAAVFRPRPGDSLPSRETRYVELYVVVDNAEFQMLGSEAAVRHRVLEVVNHVDKLYQKLNFRVVLVGLEIWNSQDRFHVSPDPSVTLENLLTWQARQRTRRHLHDNVQLITGVDFTGTTVGFARVSAMCSHSSGAVNQDHSKNPVGVACTMAHEMGHNLGMDHDENVQGCRCQERFEAGRCIMAGSIGSSFPRMFSDCSQAYLESFLERPQSVCLANAPDLSHLVGGPVCGNLFVERGEQCDCGPPEDCRNRCCNSTTCQLAEGAQCAHGTCCQECKVKPAGELCRPKKDMCDLEEFCDGRHPECPEDAFQENGTPCSGGYCYNGACPTLAQQCQAFWGPGGQAAEESCFSYDILPGCKASRYRADMCGVLQCKGGQQPLGRAICIVDVCHALTTEDGTAYEPVPEGTRCGPEKVCNHKQECHCHAGWAPPHCAKLLTEVHAASGSLPVFVVVVLVLLAVVLVTLAGIIVYRKARSRILSRNVAPKTTMGRSNPLFHQAASRVPAKGGAPAPSRGPQELVPTTHPGQPARHPASSVALKRPPPAPPVTVSSPPFPVPVYTRQAPKQGAVGPKVALKPPIQRKQGAGAPTAP

SEQ ID NO: 306 - protein, 655 aa, Homo sapiens
MGSGARFPSGTLRVRWLLLLGLVGPVLGAARPGFQQTSHLSSYEIITPWRLTRERREAPRPYSKQVSYVIQAEGKEHIIHLERNKDLLPEDFVVYTYNKEGTLITDHPNIQNHCHYRGYVEGVHNSSIALSDCFGLRGLLHLENASYGIEPLQNSSHFEHIIYRMDDVYKEPLKCGVSNKDIEKETAKDEEEEPPSMTQLLRRRRAVLPQTRYVELFIVVDKERYDMMGRNQTAVREEMILLANYLDSMYIMLNIRIVLVGLEIWTNGNLINIVGGAGDVLGNFVQWREKFLITRRRHDSAQLVLKKGFGGTAGMAFVGTVCSRSHAGGINVFGQITVETFASIVAHELGHNLGMNHDDGRDCSCGAKSCIMNSGASGSRNFSSCSAEDFEKLTLNKGGNCLLNIPKPDEAYSAPSCGNKLVDAGEECDCGTPKECELDPCCEGSTCKLKSFAECAYGDCCKDCRFLPGGTLCRGKTSECDVPEYCNGSSQFCQPDVFIQNGYPCQNNKAYCYNGMCQYYDAQCQVIFGSKAKAAPKDCFIEVNSKGDRFGNCGFSGNEYKKCATGNALCGKLQCENVQEIPVFGIVPAIIQTPSRGTKCWGVDFQLGSDVPDPGMVNEGTKCGAGKICRNFQCVDASVLNYDCDVQKKCHGHGK

SEQ ID NO: 307 - protein, 628 aa, Homo sapiens
MGSGARFPSGTLRVRWLLLLGLVGPVLGAARPGFQQTSHLSSYEIITPWRLTRERREAPRPYSKQVSYVIQAEGKEHIIHLERNKDLLPEDFVVYTYNKEGTLITDHPNIQNHCHYRGYVEGVHNSSIALSDCFGLRGLLHLENASYGIEPLQNSSHFEHIIYRMDDVYKEPLKCGVSNKDIEKETAKDEEEEPPSMTQLLRRRRAVLPQTRYVELFIVVDKERYDMMGRNQTAVREEMILLANYLDSMYIMLNIRIVLVGLEIWTNGNLINIVGGAGDVLGNFVQWREKFLITRRRHDSAQLVLKKGFGGTAGMAFVGTVCSRSHAGGINVFGQITVETFASIVAHELGHNLGMNHDDGRDCSCGAKSCIMNSGASGSRNFSSCSAEDFEKLTLNKGGNCLLNIPKPDEAYSAPSCGNKLVDAGEECDCGTPKECELDPCCEGSTCKLKSFAECAYGDCCKDCRFLPGGTLCRGKTSECDVPEYCNGSSQFCQPDVFIQNGYPCQNNKAYCYNGMCQYYDAQCQVIFGSKAKAAPKDCFIEVNSKGDRFGNCGFSGNEYKKCATGNALCGKLQCENVQEIPVFGIVPAIIQTPSRGTKCWGVDFQLGSDVPDPGMVNEGTKCGAGKK

SEQ ID NO: 308 - protein, 819 aa, Homo sapiens
MGSGARFPSGTLRVRWLLLLGLVGPVLGAARPGFQQTSHLSSYEIITPWRLTRERREAPRPYSKQVSYVIQAEGKEHIIHLERNKDLLPEDFVVYTYNKEGTLITDHPNIQNHCHYRGYVEGVHNSSIALSDCFGLRGLLHLENASYGIEPLQNSSHFEHIIYRMDDVYKEPLKCGVSNKDIEKETAKDEEEEPPSMTQLLRRRRAVLPQTRYVELFIVVDKERYDMMGRNQTAVREEMILLANYLDSMYIMLNIRIVLVGLEIWTNGNLINIVGGAGDVLGNFVQWREKFLITRRRHDSAQLVLKKGFGGTAGMAFVGTVCSRSHAGGINVFGQITVETFASIVAHELGHNLGMNHDDGRDCSCGAKSCIMNSGASGSRNFSSCSAEDFEKLTLNKGGNCLLNIPKPDEAYSAPSCGNKLVDAGEECDCGTPKECELDPCCEGSTCKLKSFAECAYGDCCKDCRFLPGGTLCRGKTSECDVPEYCNGSSQFCQPDVFIQNGYPCQNNKAYCYNGMCQYYDAQCQVIFGSKAKAAPKDCFIEVNSKGDRFGNCGFSGNEYKKCATGNALCGKLQCENVQEIPVFGIVPAIIQTPSRGTKCWGVDFQLGSDVPDPGMVNEGTKCGAGKICRNFQCVDASVLNYDCDVQKKCHGHGVCNSNKNCHCENGWAPPNCETKGYGGSVDSGPTYNEMNTALRDGLLVFFFLIVPLIVCAIFIFIKRDQLWRSYFRKKRSQTYESDGKNQANPSRQPGSVPRHVSPVTPPREVPIYANRFAVPTYAAKQPQQFPSRPPPPQPKVSSQGNLIPARPAPAPPLYSSLT

SEQ ID NO: 309 - protein, 712 aa, Homo sapiens
MGSGARFPSGTLRVRWLLLLGLVGPVLGAARPGFQQTSHLSSYEIITPWRLTRERREAPRPYSKQVSYVIQAEGKEHIIHLERNKDLLPEDFVVYTYNKEGTLITDHPNIQNHCHYRGYVEGVHNSSIALSDCFGLRGLLHLENASYGIEPLQNSSHFEHIIYRMDDVYKEPLKCGVSNKDIEKETAKDEEEEPPSMTQLLRRRRAVLPQTRYVELFIVVDKERYDMMGRNQTAVREEMILLANYLDSMYIMLNIRIVLVGLEIWTNGNLINIVGGAGDVLGNFVQWREKFLITRRRHDSAQLVLKKGFGGTAGMAFVGTVCSRSHAGGINVFGQITVETFASIVAHELGHNLGMNHDDGRDCSCGAKSCIMNSGASGSRNFSSCSAEDFEKLTLNKGGNCLLNIPKPDEAYSAPSCGNKLVDAGEECDCGTPKECELDPCCEGSTCKLKSFAECAYGDCCKDCRFLPGGTLCRGKTSECDVPEYCNGSSQFCQPDVFIQNGYPCQNNKAYCYNGMCQYYDAQCQVIFGSKAKAAPKDCFIEVNSKGDRFGNCGFSGNEYKKCATGNALCGKLQCENVQEIPVFGIVPAIIQTPSRGTKCWGVDFQLGSDVPDPGMVNEGTKCGAGKICRNFQCVDASVLNYDCDVQKKCHGHGVCNSNKNCHCENGWAPPNCETKGYGGSVDSGPTYNGQMAKIKQTLLDSRGVFLDMFLQ

SEQ ID NO: 310 - protein, 147 aa, Homo sapiens
MGSGARFPSGTLRVRWLLLLGLVGPVLGAARPGFQQTSHLSSYEIITPWRLTRERREAPRPYSKQVSYVIQAEGKEHIIHLERNKDLLPEDFVVYTYNKEGTLITDHPNIQRCGPLCIREQSTPGDRAGQNTQNNWQMSNLAFCVYY

SEQ ID NO: 311 - protein, 128 aa, Homo sapiens
MGSGARFPSGTLRVRWLLLLGLVGPVLGAARPGFQQTSHLSSYEIITPWRLTRERREAPRPYSKQVSYVIQAEGKEHIIHLERNKDLLPEDFVVYTYNKEGTLITDHPNIQVMYFSLDPIANFKTIII

SEQ ID NO: 312 - protein, 391 aa, Homo sapiens
MILNGEEIILSLQKTKHLLGPDYTETLYSPRGEEITTKPENMEHCYYKGNILNEKNSVASISTCDGLRGYFTHHHQRYQIKPLKSTDEKEHAVFTSNQEEQDPANHTCGVKSTDGKQGPIRISRSLKSPEKEDFLRAQKYIDLYLVLDNAFYKNYNENLTLIRSFVFDVMNLLNVIYNTIDVQVALVGMEIWSDGDKIKVVPSASTTFDNFLRWHSSNLGKKIHDHAQLLSGISFNNRRVGLAASNSLCSPSSVAVIEAKKKNNVALVGVMSHELGHVLGMPDVPFNTKCPSGSCVMNQYLSSKFPKDFSTSCRAHFERYLLSQKPKCLLQAPIPTNIMTTPVCGNHLLEVGEDCDCGSPKECTNLCCEALTCKLKPGTDCGGDAPNHTTE

SEQ ID NO: 313 - protein, 470 aa, Homo sapiens
MLRGISQLPAVATMSWVLLPVLWLIVQTQAIAIKQTPELTLHEIVCPKKLHILHKREIKNNQTEKHGKEERYEPEVQYQMILNGEEIILSLQKTKHLLGPDYTETLYSPRGEEITTKPENMEHCYYKGNILNEKNSVASISTCDGLRGYFTHHHQRYQIKPLKSTDEKEHAVFTSNQEEQDPANHTCGVKSTDGKQGPIRISRSLKSPEKEDFLRAQKYIDLYLVLDNAFYKNYNENLTLIRSFVFDVMNLLNVIYNTIDVQVALVGMEIWSDGDKIKVVPSASTTFDNFLRWHSSNLGKKIHDHAQLLSGISFNNRRVGLAASNSLCSPSSVAVIEAKKKNNVALVGVMSHELGHVLGMPDVPFNTKCPSGSCVMNQYLSSKFPKDFSTSCRAHFERYLLSQKPKCLLQAPIPTNIMTTPVCGNHLLEVGEDCDCGSPKECTNLCCEALTCKLKPGTDCGGDAPNHTTE

SEQ ID NO: 314 - protein, 41 aa, Homo sapiens
MLRGISQLPAVATMSWVLLPVLWLIVQTQASNCAWPKVSIQ

SEQ ID NO: 315 - protein, 171 aa, Homo sapiens
MLVADQSMAEFHGSGLKHYLLTLFSVAARLYKHPSIRNSVSLVVVKILVIHDEQKGPEVTSNAALTLRNFCNWQKQHNPPSDRDAEHYDTAILFTRQDLCGSQTCDTLGMADVGTVCDPSRSCSVIEDDGLQAAFTTAHELGHVFNMPHDDAKQCASLNGVNQDSHMMASM

SEQ ID NO: 316 - protein, 967 aa, Homo sapiens
MQRAVPEGFGRRKLGSDMGNAERAPGSRSFGPVPTLLLLAAALLAVSDALGRPSEEDEELVVPELERAPGHGTTRLRLHAFDQQLDLELRPDSSFLAPGFTLQNVGRKSGSETPLPETDLAHCFYSGTVNGDPSSAAALSLCEGVRGAFYLLGEAYFIQPLPAASERLATAAPGEKPPAPLQFHLLRRNRQGDVGGTCGVVDDEPRPTGKAETEDEDEGTEGEDEGAQWSPQDPALQGVGQPTGTGSIRKKRFVSSHRYVETMLVADQSMAEFHGSGLKHYLLTLFSVAARLYKHPSIRNSVSLVVVKILVIHDEQKGPEVTSNAALTLRNFCNWQKQHNPPSDRDAEHYDTAILFTRQDLCGSQTCDTLGMADVGTVCDPSRSCSVIEDDGLQAAFTTAHELGHVFNMPHDDAKQCASLNGVNQDSHMMASMLSNLDHSQPWSPCSAYMITSFLDNGHGECLMDKPQNPIQLPGDLPGTSYDANRQCQFTFGEDSKHCPDAASTCSTLWCTGTSGGVLVCQTKHFPWADGTSCGEGKWCINGKCVNKTDRKHFDTPFHGSWGMWGPWGDCSRTCGGGVQYTMRECDNPVPKNGGKYCEGKRVRYRSCNLEDCPDNNGKTFREEQCEAHNEFSKASFGSGPAVEWIPKYAGVSPKDRCKLICQAKGIGYFFVLQPKVVDGTPCSPDSTSVCVQGQCVKAGCDRIIDSKKKFDKCGVCGGNGSTCKKISGSVTSAKPGYHDIITIPTGATNIEVKQRNQRGSRNNGSFLAIKAADGTYILNGDYTLSTLEQDIMYKGVVLRYSGSSAALERIRSFSPLKEPLTIQVLTVGNALRPKIKYTYFVKKKKESFNAIPTFSAWVIEEWGECSKSCELGWQRRLVECRDINGQPASECAKEVKPASTRPCADHPCPQWQLGEWSSCSKTCGKGYKKRSLKCLSHDGGVLSHESCDPLKKPKHFIDFCTMAECS

SEQ ID NO: 317 - protein, 128 aa, Homo sapiens
MVTWEGTGSIRKKRFVSSHRYVETMLVADQSMAEFHGSGLKHYLLTLFSVAARLYKHPSIRNSVSLVVVKILVIHDEQKGPEVTSNAALTLRNFCNWQKQHNPPSDRDAEHYDTAILFTRQDLCGSQT

SEQ ID NO: 318 - protein, 200 aa, Homo sapiens
  VARIANT 1: note = misc_feature - Xaa can be any naturally occurring amino acid
XCRSFLLRPSLCAVLILQFFLFHHFGTGSIRKKRFVSSHRYVETMLVADQSMAEFHGSGLKHYLLTLFSVAARLYKHPSIRNSVSLVVVKILVIHDEQKGPEVTSNAALTLRNFCNWQKQHNPPSDRDAEHYDTAILFTRQDLCGSQTCDTLGMADVGTVCDPSRSCSVIEDDGLQAAFTTAHELGHVFNMPHDDAKQCA

SEQ ID NO: 319 - protein, 1103 aa, Homo sapiens
MAPACQILRWALALGLGLMFEVTHAFRSQDEFLSSLESYEIAFPTRVDHNGALLAFSPPPPRRQRRGTGATAESRLFYKVASPSTHFLLNLTRSSRLLAGHVSVEYWTREGLAWQRAARPHCLYAGHLQGQASSSHVAISTCGGLHGLIVADEEEYLIEPLHGGPKGSRSPEESGPHVVYKRSSLRHPHLDTACGVRDEKPWKGRPWWLRTLKPPPARPLGNETERGQPGLKRSVSRERYVETLVVADKMMVAYHGRRDVEQYVLAIMNIVAKLFQDSSLGSTVNILVTRLILLTEDQPTLEITHHAGKSLDSFCKWQKSIVNHSGHGNAIPENGVANHDTAVLITRYDICIYKNKPCGTLGLAPVGGMCERERSCSVNEDIGLATAFTIAHEIGHTFGMNHDGVGNSCGARGQDPAKLMAAHITMKTNPFVWSSCSRDYITSFLDSGLGLCLNNRPPRQDFVYPTVAPGQAYDADEQCRFQHGVKSRQCKYGEVCSELWCLSKSNRCITNSIPAAEGTLCQTHTIDKGWCYKRVCVPFGSRPEGVDGAWGPWTPWGDCSRTCGGGVSSSSRHCDSPRPTIGGKYCLGERRRHRSCNTDDCPPGSQDFREVQCSEFDSIPFRGKFYKWKTYRGGGVKACSLTCLAEGFNFYTERAAAVVDGTPCRPDTVDICVSGECKHVGCDRVLGSDLREDKCRVCGGDGSACETIEGVFSPASPGAGYEDVVWIPKGSVHIFIQDLNLSLSHLALKGDQESLLLEGLPGTPQPHRLPLAGTTFQLRQGPDQVQSLEALGPINASLIVMVLARTELPALRYRFNAPIARDSLPPYSWHYAPWTKCSAQCAGGSQVQAVECRNQLDSSAVAPHYCSAHSKLPKRQRACNTEPCPPDWVVGNWSLCSRSCDAGVRSRSVVCQRRVSAAEEKALDDSACPQPRPPVLEACHGPTCPPEWAALDWSECTPSCGPGLRHRVVLCKSADHRATLPPAHCSPAAKPPATMRCNLRRCPPARWVAGEWGECSAQCGVGQRQRSVRCTSHTGQASHECTEALRPPTTQQCEAKCDSPTPGDGPEECKDVNKVAYCPLVLKFQFCSRAYFRQMCCKTCHGH

SEQ ID NO: 320 - protein, 289 aa, Homo sapiens
MAPACQILRWALALGLGLMFEVTHAFRSQDEFLSSLESYEIAFPTRVDHNGALLAFSPPPPRRQRRGTGATAESRLFYKVASPSTHFLLNLTRSSRLLAGHVSVEYWTREGLAWQRAARPHCLYAGHLQGQASSSHVAISTCGGLHGLIVADEEEYLIEPLHGGPKGSRSPEESGPHVVYKRSSLRHPHLDTACGVRDEKPWKGRPWWLRTLKPPPARPLGNETERGQPGLKRSVSRERYVETLVVADKMMVAYHGRRDVEQYVLAIMNIVRLPNFSRTRVWEAPLTSS

SEQ ID NO: 321 - protein, 289 aa, Homo sapiens; identical to SEQ ID NO: 320

SEQ ID NO: 322 - protein, 1103 aa, Homo sapiens; identical to SEQ ID NO: 319

SEQ ID NO: 323 - protein, 590 aa, Homo sapiens
MGPTSVLRAGLTPSCLPPPSGATNGSVSPLGRAQRVWTEPGGRGLHGATAAGPVAAACPLLAVTATAPGQPSGASTVWVREGGTAPATRMTVPLAPRTSEKCSVLNLTASLSVGNSTSGKRTGEACSLTCLAEGFNFYTERAAAVVDGTPCRPDTVDICVSGECKHVGCDRVLGSDLREDKCRVCGGDGSACETIEGVFSPASPGAGYEDVVWIPKGSVHIFIQDLNLSLSHLALKGDQESLLLEGLPGTPQPHRLPLAGTTFQLRQGPDQVQSLEALGPINASLIVMVLARTELPALRYRFNAPIARDSLPPYSWHYAPWTKCSAQCAGGSQVQAVECRNQLDSSAVAPHYCSAHSKLPKRQRACNTEPCPPDWVVGNWSLCSRSCDAGVRSRSVVCQRRVSAAEEKALDDSACPQPRPPVLEACHGPTCPPEWAALDWSECTPSCGPGLRHRVVLCKSADHRATLPPAHCSPAAKPPATMRCNLRRCPPARWVAGEWGECSAQCGVGQRQRSVRCTSHTGQASHECTEALRPPTTQQCEAKCDSPTPGDGPEECKDVNKVAYCPLVLKFQFCSRAYFRQMCCKTCHGH

SEQ ID NO: 324 - protein, 126 aa, Homo sapiens
MGPTSVLRAGLTPSCLPPPSGATNGSVSPLGRAQRVWTEPGGRGLHGATAAGPVAAACPLLAVTATAPGQPSGASTVWVREGGTAPATRMTVPLAPRTSEKCSVLNLTASLSVGNSTSGKRTGEGA

SEQ ID NO: 325 - protein, 1509 aa, Homo sapiens
MPCAQRSWLANLSVVAQLLNFGALCYGRQPQPGPVRFPDRRQEHFIKGLPEYHVVGPVRVDASGHFLSYGLHYPITSSRRKRDLDGSEDWVYYRISHEEKDLFFNLTVNQGFLSNSYIMEKRYGNLSHVKMMASSAPLCHLSGTVLQQGTRVGTAALSACHGLTGFFQLPHGDFFIEPVKKHPLVEGGYHPHIVYRRQKVPETKEPTCGLKDSVNISQKQELWREKWERHNLPSRSLSRRSISKERWVETLVVADTKMIEYHGSENVESYILTIMNMVTGLFHNPSIGNAIHIVVVRLILLEEEEQGLKIVHHAEKTLSSFCKWQKSINPKSDLNPVHHDVAVLLTRKDICAGFNRPCETLGLSHLSGMCQPHRSCNINEDSGLPLAFTIAHELGHSFGIQHDGKENDCEPVGRHPYIMSRQLQYDPTPLTWSKCSEEYITRFLDRGWGFCLDDIPKKKGLKSKVIAPGVIYDVHHQCQLQYGPNATFCQEVENVCQTLWCSVKGFCRSKLDAAADGTQCGEKKWCMAGKCITVGKKPESIPGGWGRWSPWSHCSRTCGAGVQSAERLCNNPEPKFGGKYCTGERKRYRLCNVHPCRSEAPTFRQMQCSEFDTVPYKNELYHWFPIFNPGYVDIGLIPKGARDIRVMEIEGAGNFLAIRSEDPEKYYLNGGFIIQWNGNYKLAGTVFQYDRKGDLEKLMATGPTNESVWIQLLFQVTNPGIKYEYTIQKDGLDNDVEQQMYFWQYGHWTECSVTCGTGIRRQTAHCIKKGRGMVKATFCDPETQPNGRQKKCHEKACPPRWWAGEWEACSATCGPHGEKKRTVLCIQTMVSDEQALPPTDCQHLLKPKTLLSCNRDILCPSDWTVGNWSECSVSCGGGVRIRSVTCAKNHDEPCDVTRKPNSRALCGLQQCPSSRRVLKPNKGTISNGKNPPTLKPVPPPTSRPRMLTTPTGPESMSTSTPAISSPSPTTASKEGDLGGKQWQDSSTQPELSSRYLISTGSTSQPILTSQSLSIQPSEENVSSSDTGPTSEGGLVATTTSGSGLSSSRNPITWPVTPFYNTLTKGPEMEIHSGSGEEREQPEDKDESNPVIWTKIRVPGNDAPVESTEMPLAPPLTPDLSRESWWPPFSTVMEGLLPSQRPTTSETGTPRVEGMVTEKPANTLLPLGGDHQPEPSGKTANRNHLKLPNNMNQTKSSEPVLTEEDATSLITEGFLLNASNYKQLTNGHGSAHWIVGNWSECSTTCGLGAYWRRVECSTQMDSDCAAIQRPDPAKRCHLRPCAGWKVGNWSKCSRNCSGGFKIREIQCVDSRDHRNLRPFHCQFLAGIPPPLSMSCNPEPCEAWQVEPWSQCSRSCGGGVQERGVFCPGGLCDWTKRPTSTMSCNEHLCCHWATGNWDLCSTSCGGGFQKRTVQCVPSEGNKTEDQDQCLCDHKPRPPEFKKCNQQACKKSADLLCTKDKLSASFCQTLKAMKKCSVPTVRAECCFSCPQTHITHTQRQRRQRLLQKSKEL

SEQ ID NO: 326 - protein, 1594 aa, Homo sapiens
MPCAQRSWLANLSVVAQLLNFGALCYGRQPQPGPVRFPDRRQEHFIKGLPEYHVVGPVRVDASGHFLSYGLHYPITSSRRKRDLDGSEDWVYYRISHEEKDLFFNLTVNQGFLSNSYIMEKRYGNLSHVKMMASSAPLCHLSGTVLQQGTRVGTAALSACHGLTGFFQLPHGDFFIEPVKKHPLVEGGYHPHIVYRRQKVPETKEPTCGLKDSVNISQKQELWREKWERHNLPSRSLSRRSISKERWVETLVVADTKMIEYHGSENVESYILTIMNMVTGLFHNPSIGNAIHIVVVRLILLEEEEQGLKIVHHAEKTLSSFCKWQKSINPKSDLNPVHHDVAVLLTRKDICAGFNRPCETLGLSHLSGMCQPHRSCNINEDSGLPLAFTIAHELGHSFGIQHDGKENDCEPVGRHPYIMSRQLQYDPTPLTWSKCSEEYITRFLDRGWGFCLDDIPKKKGLKSKVIAPGVIYDVHHQCQLQYGPNATFCQEVENVCQTLWCSVKGFCRSKLDAAADGTQCGEKKWCMAGKCITVGKKPESIPGGWGRWSPWSHCSRTCGAGVQSAERLCNNPEPKFGGKYCTGERKRYRLCNVHPCRSEAPTFRQMQCSEFDTVPYKNELYHWFPIFNPAHPCELYCRPIDGQFSEKMLDAVIDGTPCFEGGNSRNVCINGICKMVGCDYEIDSNATEDRCGVCLGDGSSCQTVRKMFKQKEGSGYVDIGLIPKGARDIRVMEIEGAGNFLAIRSEDPEKYYLNGGFIIQWNGNYKLAGTVFQYDRKGDLEKLMATGPTNESVWIQLLFQVTNPGIKYEYTIQKDGLDNDVEQQMYFWQYGHWTECSVTCGTGIRRQTAHCIKKGRGMVKATFCDPETQPNGRQKKCHEKACPPRWWAGEWEACSATCGPHGEKKRTVLCIQTMVSDEQALPPTDCQHLLKPKTLLSCNRDILCPSDWTVGNWSECSVSCGGGVRIRSVTCAKNHDEPCDVTRKPNSRALCGLQQCPSSRRVLKPNKGTISNGKNPPTLKPVPPPTSRPRMLTTPTGPESMSTSTPAISSPSPTTASKEGDLGGKQWQDSSTQPELSSRYLISTGSTSQPILTSQSLSIQPSEENVSSSDTGPTSEGGLVATTTSGSGLSSSRNPITWPVTPFYNTLTKGPEMEIHSGSGEEREQPEDKDESNPVIWTKIRVPGNDAPVESTEMPLAPPLTPDLSRESWWPPFSTVMEGLLPSQRPTTSETGTPRVEGMVTEKPANTLLPLGGDHQPEPSGKTANRNHLKLPNNMNQTKSSEPVLTEEDATSLITEGFLLNASNYKQLTNGHGSAHWIVGNWSECSTTCGLGAYWRRVECSTQMDSDCAAIQRPDPAKRCHLRPCAGWKVGNWSKCSRNCSGGFKIREIQCVDSRDHRNLRPFHCQFLAGIPPPLSMSCNPEPCEAWQVEPWSQCSRSCGGGVQERGVFCPGGLCDWTKRPTSTMSCNEHLCCHWATGNWDLCSTSCGGGFQKRTVQCVPSEGNKTEDQDQCLCDHKPRPPEFKKCNQQACKKSADLLCTKDKLSASFCQTLKAMKKCSVPTVRAECCFSCPQTHITHTQRQRRQRLLQKSKEL

SEQ ID NO: 327 - protein, 232 aa, Homo sapiens
MPCAQRSWLANLSVVAQLLNFGALCYGRQPQPGPVRFPDRRQEHFIKGLPEYHVVGPVRVDASGHFLSYGLHYPITSSRRKRDLDGSEDWVYYRISHEEKDLFFNLTVNQGFLSNSYIMEKRYGNLSHVKMMASSAPLCHLSGTVLQQGTRVGTAALSACHGLTGFFQLPHGDFFIEPVKKHPLVEGGYHPHIVYRRQKVPETKEPTCGLKGIVTHMSSWVEESVLFFWLFY

SEQ ID NO: 328 - protein, 444 aa, Homo sapiens
MASDGAAPRAGLAWSPCSRRQLLSLLSAGRARCVWDPPRPQPGSAGHPPDAQPGLYYSANEQCRVAFGPKAVACTFAREHLDMCQALSCHTDPLDQSSCSRLLVPLLDGTECGVEKWCSKGRCRSLVELTPIAAVHGRWSSWGPRSPCSRSCGGGVVTRRRQCNNPRPAFGGRACVGADLQAEMCNTQACEKTQLEFMSQQCARTDGQPLRSSPGGASFYHWGAAVPHSQGDALCRHMCRAIGESFIMKRGDSFLDGTRCMPSGPREDGTLSLCVSGSCRTFGCDGRMDSQQVWDRCQVCGGDNSTCSPRKGSFTAGRAREYVTFLTVTPNLTSVYIANHRPLFTHLAVRIGGRYVVAGKMSISPNTTYPSLLEDGRVEYRVALTEDRLPRLEEIRIWGPLQEDADIQVGGVRAQLMHISWWSRPGLGERDLCARGRWPGGSSD

SEQ ID NO: 329 - protein, 276 aa, Homo sapiens
MHQRHPRARCPPLCVAGILACGFLLGCWGPSHFQQSCLQALEPQAVSSYLSPGAPLKGRPPSPGFQRQRQRQRRAAGGILHLELLVAVGPDVFQAHQEDTERYVLTNLNIGAELLRDPSLGAQFRVHLVKMVILTEPEGAPNITANLTSSLLSVCGWSQTINPEDDTDPGHADLVLYITRFDLELPDGNRQVRGVTQLGGACSPTWSCLITEDTGFDLGVTIAHEIGHRICARPSPATQTRWTKAAAAASSFLSWMGQNVAWRSGAPRVAAAPWWS

SEQ ID NO: 330 - protein, 1371 aa, Homo sapiens
MHQRHPRARCPPLCVAGILACGFLLGCWGPSHFQQSCLQALEPQAVSSYLSPGAPLKGRPPSPGFQRQRQRQRRAAGGILHLELLVAVGPDVFQAHQEDTERYVLTNLNIGAELLRDPSLGAQFRVHLVKMVILTEPEGAPNITANLTSSLLSVCGWSQTINPEDDTDPGHADLVLYITRFDLELPDGNRQVRGVTQLGGACSPTWSCLITEDTGFDLGVTIAHEIGHSFGLEHDGAPGSGCGPSGHVMASDGAAPRAGLAWSPCSRRQLLSLLSAGRARCVWDPPRPQPGSAGHPPDAQPGLYYSANEQCRVAFGPKAVACTFAREHLDMCQALSCHTDPLDQSSCSRLLVPLLDGTECGVEKWCSKGRCRSLVELTPIAAVHGRWSSWGPRSPCSRSCGGGVVTRRRQCNNPRPAFGGRACVGADLQAEMCNTQACEKTQLEFMSQQCARTDGQPLRSSPGGASFYHWGAAVPHSQGDALCRHMCRAIGESFIMKRGDSFLDGTRCMPSGPREDGTLSLCVSGSCRTFGCDGRMDSQQVWDRCQVCGGDNSTCSPRKGSFTAGRAREYVTFLTVTPNLTSVYIANHRPLFTHLAVRIGGRYVVAGKMSISPNTTYPSLLEDGRVEYRVALTEDRLPRLEEIRIWGPLQEDADIQVYRRYGEEYGNLTRPDITFTYFQPKPRQAWVWAAVRGPCSVSCGAGLRWVNYSCLDQARKELVETVQCQGSQQPPAWPEACVLEPCPPYWAVGDFGPCSASCGGGLRERPVRCVEAQGSLLKTLPPARCRAGAQQPAVALETCNPQPCPARWEVSEPSSCTSAGGAGLALENETCVPGADGLEAPVTEGPGSVDEKLPAPEPCVGMSCPPGWGHLDATSAGEKAPSPWGSIRTGAQAAHVWTPAAGSCSVSCGRGLMELRFLCMDSALRVPVQEELCGLASKPGSRREVCQAVPCPARWQYKLAACSVSCGRGVVRRILYCARAHGEDDGEEILLDTQCQGLPRPEPQEACSLEPCPPRWKVMSLGPCSASCGLGTARRSVACVQLDQGQDVEVDEAACAALVRPEASVPCLIADCTYRWHVGTWMECSVSCGDGIQRRRDTCLGPQAQAPVPADFCQHLPKPVTVRGCWAGPCVGQGACGRQHLEPTGTIDMRGPGQADCAVAIGRPLGEVVTLRVLESSLNCSAGDMLLLWGRLTWRKMCRKLLDMTFSSKTNTLVVRQRCGRPGGGVLLRYGSQLAPETFYRECDMQLFGPWGEIVSPSLSPATSNAGGCRLFINVAPHARIAIHALATNMGAGTEGANASYILIRDTHSLRTTAFHGQQVLYWESESSQAEMEFSEGFLKAQASLRGQYWTLQSWVPEMQDPQSWKGKEGT

SEQ ID NO: 331 - protein, 1340 aa, Homo sapiens
MHQRHPRARCPPLCVAGILACGFLLGCWGPSHFQQSCLQALEPQAVSSYLSPGAPLKGRPPSPGFQRQRQRQRRAAGGILHLELLVAVGPDVFQAHQEDTERYVLTNLNIGAELLRDPSLGAQFRVHLVKMVILTEPEGAPNITANLTSSLLSVCGWSQTINPEDDTDPGHADLVLYITRFDLELPDGNRQVRGVTQLGGACSPTWSCLITEDTGFDLGVTIAHEIGHSFGLEHDGAPGSGCGPSGHVMASDGAAPRAGLAWSPCSRRQLLSLLSANEQCRVAFGPKAVACTFAREHLDMCQALSCHTDPLDQSSCSRLLVPLLDGTECGVEKWCSKGRCRSLVELTPIAAVHGRWSSWGPRSPCSRSCGGGVVTRRRQCNNPRPAFGGRACVGADLQAEMCNTQACEKTQLEFMSQQCARTDGQPLRSSPGGASFYHWGAAVPHSQGDALCRHMCRAIGESFIMKRGDSFLDGTRCMPSGPREDGTLSLCVSGSCRTFGCDGRMDSQQVWDRCQVCGGDNSTCSPRKGSFTAGRAREYVTFLTVTPNLTSVYIANHRPLFTHLAVRIGGRYVVAGKMSISPNTTYPSLLEDGRVEYRVALTEDRLPRLEEIRIWGPLQEDADIQVYRRYGEEYGNLTRPDITFTYFQPKPRQAWVWAAVRGPCSVSCGAGLRWVNYSCLDQARKELVETVQCQGSQQPPAWPEACVLEPCPPYWAVGDFGPCSASCGGGLRERPVRCVEAQGSLLKTLPPARCRAGAQQPAVALETCNPQPCPARWEVSEPSSCTSAGGAGLALENETCVPGADGLEAPVTEGPGSVDEKLPAPEPCVGMSCPPGWGHLDATSAGEKAPSPWGSIRTGAQAAHVWTPAAGSCSVSCGRGLMELRFLCMDSALRVPVQEELCGLASKPGSRREVCQAVPCPARWQYKLAACSVSCGRGVVRRILYCARAHGEDDGEEILLDTQCQGLPRPEPQEACSLEPCPPRWKVMSLGPCSASCGLGTARRSVACVQLDQGQDVEVDEAACAALVRPEASVPCLIADCTYRWHVGTWMECSVSCGDGIQRRRDTCLGPQAQAPVPADFCQHLPKPVTVRGCWAGPCVGQGACGRQHLEPTGTIDMRGPGQADCAVAIGRPLGEVVTLRVLESSLNCSAGDMLLLWGRLTWRKMCRKLLDMTFSSKTNTLVVRQRCGRPGGGVLLRYGSQLAPETFYRECDMQLFGPWGEIVSPSLSPATSNAGGCRLFINVAPHARIAIHALATNMGAGTEGANASYILIRDTHSLRTTAFHGQQVLYWESESSQAEMEFSEGFLKAQASLRGQYWTLQSWVPEMQDPQSWKGKEGT

SEQ ID NO: 332 - protein, 1427 aa, Homo sapiens
MHQRHPRARCPPLCVAGILACGFLLGCWGPSHFQQSCLQALEPQAVSSYLSPGAPLKGRPPSPGFQRQRQRQRRAAGGILHLELLVAVGPDVFQAHQEDTERYVLTNLNIGAELLRDPSLGAQFRVHLVKMVILTEPEGAPNITANLTSSLLSVCGWSQTINPEDDTDPGHADLVLYITRFDLELPDGNRQVRGVTQLGGACSPTWSCLITEDTGFDLGVTIAHEIGHSFGLEHDGAPGSGCGPSGHVMASDGAAPRAGLAWSPCSRRQLLSLLSAGRARCVWDPPRPQPGSAGHPPDAQPGLYYSANEQCRVAFGPKAVACTFAREHLDMCQALSCHTDPLDQSSCSRLLVPLLDGTECGVEKWCSKGRCRSLVELTPIAAVHGRWSSWGPRSPCSRSCGGGVVTRRRQCNNPRPAFGGRACVGADLQAEMCNTQACEKTQLEFMSQQCARTDGQPLRSSPGGASFYHWGAAVPHSQGDALCRHMCRAIGESFIMKRGDSFLDGTRCMPSGPREDGTLSLCVSGSCRTFGCDGRMDSQQVWDRCQVCGGDNSTCSPRKGSFTAGRAREYVTFLTVTPNLTSVYIANHRPLFTHLAVRIGGRYVVAGKMSISPNTTYPSLLEDGRVEYRVALTEDRLPRLEEIRIWGPLQEDADIQVYRRYGEEYGNLTRPDITFTYFQPKPRQAWVWAAVRGPCSVSCGAGLRWVNYSCLDQARKELVETVQCQGSQQPPAWPEACVLEPCPPYWAVGDFGPCSASCGGGLRERPVRCVEAQGSLLKTLPPARCRAGAQQPAVALETCNPQPCPARWEVSEPSSCTSAGGAGLALENETCVPGADGLEAPVTEGPGSVDEKLPAPEPCVGMSCPPGWGHLDATSAGEKAPSPWGSIRTGAQAAHVWTPAAGSCSVSCGRGLMELRFLCMDSALRVPVQEELCGLASKPGSRREVCQAVPCPARWQYKLAACSVSCGRGVVRRILYCARAHGEDDGEEILLDTQCQGLPRPEPQEACSLEPCPPRWKVMSLGPCSASCGLGTARRSVACVQLDQGQDVEVDEAACAALVRPEASVPCLIADCTYRWHVGTWMECSVSCGDGIQRRRDTCLGPQAQAPVPADFCQHLPKPVTVRGCWAGPCVGQGTPSLVPHEEAAAPGRTTATPAGASLEWSQARGLLFSPAPQPRRLLPGPQENSVQSSACGRQHLEPTGTIDMRGPGQADCAVAIGRPLGEVVTLRVLESSLNCSAGDMLLLWGRLTWRKMCRKLLDMTFSSKTNTLVVRQRCGRPGGGVLLRYGSQLAPETFYRECDMQLFGPWGEIVSPSLSPATSNAGGCRLFINVAPHARIAIHALATNMGAGTEGANASYILIRDTHSLRTTAFHGQQVLYWESESSQAEMEFSEGFLKAQASLRGQYWTLQSWVPEMQDPQSWKGKEGT

SEQ ID NO: 333 - protein, 344 aa, Homo sapiens
MHQRHPRARCPPLCVAGILACGFLLGCWGPSHFQQSCLQALEPQAVSSYLSPGAPLKGRPPSPGFQRQRQRQRRAAGGILHLELLVAVGPDVFQAHQEDTERYVLTNLNIGAELLRDPSLGAQFRVHLVKMVILTEPEGAPNITANLTSSLLSVCGWSQTINPEDDTDPGHADLVLYITRFDLELPDGNRQVRGVTQLGGACSPTWSCLITEDTGFDLGVTIAHEIGHSFGLEHDGAPGSGCGPSGHVMASDGAAPRAGLAWSPCSRRQLLSLLRPVPPSPLPLLATHLCAGRSLSLGPSQEPAPGGGRGPRTPVPTHKRPRFQTLPSSCPLLRPASSRCTPRD

SEQ ID NO: 334 - protein, 344 aa, Homo sapiens; identical to SEQ ID NO: 333

SEQ ID NO: 335 - protein, 223 aa, Homo sapiens
MRGPGQADCAVAIGRPLGEVVTLRVLESSLNCSAGDMLLLWGRLTWRKMCRKLLDMTFSSKTNTLVVRQRCGRPGGGVLLRYGSQLAPETFYRECDMQLFGPWGEIVSPSLSPATSNAGGCRLFINVAPHARIAIHALATNMGAGTEGANASYILIRDTHSLRTTAFHGQQVLYWESESSQAEMEFSEGFLKAQASLRGQYWTLQSWVPEMQDPQSWKGKEGT

SEQ ID NO: 336 - protein, 1226 aa, Homo sapiens
MAPLRALLSYLLPLHCALCAAAGSRTPELHLSGKLSDYGVTVPCSTDFRGRFLSHVVSGPAAASAGSMVVDTPPTLPRHSSHLRVARSPLHPGGTLWPGRVGRHSLYFNVTVFGKELHLRLRPNRRLVVPGSSVEWQEDFRELFRQPLRQECVYTGGVTGMPGAAVAISNCDGLAGLIRTDSTDFFIEPLERGQQEKEASGRTHVVYRREAVQQEWAEPDGDLHNEAFGLGDLPNLLGLVGDQLGDTERKRRHAKPGSYSIEVLLVVDDSVVRFHGKEHVQNYVLTLMNIVDEIYHDESLGVHINIALVRLIMVGYRQSLSLIERGNPSRSLEQVCRWAHSQQRQDPSHAEHHDHVVFLTRQDFGPSGMQGYAPVTGMCHPLRSCALNHEDGFSSAFVIAHETGHVLGMEHDGQGNGCADETSLGSVMAPLVQAAFHRFHWSRCSKLELSRYLPSYDCLLDDPFDPAWPQPPELPGINYSMDEQCRFDFGSGYQTCLAFRTFEPCKQLWCSHPDNPYFCKTKKGPPLDGTECAPGKWCFKGHCIWKSPEQTYGQDGGWSSWTKFGSCSRSCGGGVRSRSRSCNNPSPAYGGRLCLGPMFEYQVCNSEECPGTYEDFRAQQCAKRNSYYVHQNAKHSWVPYEPDDDAQKCELICQSADTGDVVFMNQVVHDGTRCSYRDPYSVCARGECVPVGCDKEVGSMKADDKCGVCGGDNSHCRTVKGTLGKASKQAGALKLVQIPAGARHIQIEALEKSPHRIVVKNQVTGSFILNPKGKEATSRTFTAMGLEWEDAVEDAKESLKTSGPLPEAIAILALPPTEGGPRSSLAYKYVIHEDLLPLIGSNNVLLEEMDTYEWALKSWAPCSKACGGGIQFTKYGCRRRRDHHMVQRHLCDHKKRPKPIRRRCNQHPCSQPVWVTEEWGACSRSCGKLGVQTRGIQCLLPLSNGTHKVMPAKACAGDRPEARRPCLRVPCPAQWRLGAWSQCSATCGEGIQQRQVVCRTNANSLGHCEGDRPDTVQVCSLPACGGNHQNSTVRADVWELGTPEGQWVPQSEPLHPINKISSTEPCTGDRSVFCQMEVLDRYCSIPGYHRLCCVSCIKKASGPNPGPDPGPTSLPPFSTPGSPLPGPQDPADAAEPPGKPTGSEDHQHGRATQLPGALDTSSPGTQHPFAPETPIPGASWSISPTTPGGLPWGWTQTPTPVPEDKGQPGEDLRHPGTSLPAASPVT

SEQ ID NO: 337 - protein, 1223 aa, Homo sapiens
MAPLRALLSYLLPLHCALCAAAGSRTPELHLSGKLSDYGVTVPCSTDFRGRFLSHVVSGPAAASAGSMVVDTPPTLPRHSSHLRVARSPLHPGGTLWPGRVGRHSLYFNVTVFGKELHLRLRPNRRLVVPGSSVEWQEDFRELFRQPLRQECVYTGGVTGMPGAAVAISNCDGLAGLIRTDSTDFFIEPLERGQQEKEASGRTHVVYRREAVQQEWAEPDGDLHNEAFGLGDLPNLLGLVGDQLGDTERKRRHAKPGSYSIEVLLVVDDSVVRFHGKEHVQNYVLTLMNIVDEIYHDESLGVHINIALVRLIMVGYRQSLSLIERGNPSRSLEQVCRWAHSQQRQDPSHAEHHDHVVFLTRQDFGPSGYAPVTGMCHPLRSCALNHEDGFSSAFVIAHETGHVLGMEHDGQGNGCADETSLGSVMAPLVQAAFHRFHWSRCSKLELSRYLPSYDCLLDDPFDPAWPQPPELPGINYSMDEQCRFDFGSGYQTCLAFRTFEPCKQLWCSHPDNPYFCKTKKGPPLDGTECAPGKWCFKGHCIWKSPEQTYGQDGGWSSWTKFGSCSRSCGGGVRSRSRSCNNPSPAYGGRLCLGPMFEYQVCNSEECPGTYEDFRAQQCAKRNSYYVHQNAKHSWVPYEPDDDAQKCELICQSADTGDVVFMNQVVHDGTRCSYRDPYSVCARGECVPVGCDKEVGSMKADDKCGVCGGDNSHCRTVKGTLGKASKQAGALKLVQIPAGARHIQIEALEKSPHRIVVKNQVTGSFILNPKGKEATSRTFTAMGLEWEDAVEDAKESLKTSGPLPEAIAILALPPTEGGPRSSLAYKYVIHEDLLPLIGSNNVLLEEMDTYEWALKSWAPCSKACGGGIQFTKYGCRRRRDHHMVQRHLCDHKKRPKPIRRRCNQHPCSQPVWVTEEWGACSRSCGKLGVQTRGIQCLLPLSNGTHKVMPAKACAGDRPEARRPCLRVPCPAQWRLGAWSQCSATCGEGIQQRQVVCRTNANSLGHCEGDRPDTVQVCSLPACGGNHQNSTVRADVWELGTPEGQWVPQSEPLHPINKISSTEPCTGDRSVFCQMEVLDRYCSIPGYHRLCCVSCIKKASGPNPGPDPGPTSLPPFSTPGSPLPGPQDPADAAEPPGKPTGSEDHQHGRATQLPGALDTSSPGTQHPFAPETPIPGASWSISPTTPGGLPWGWTQTPTPVPEDKGQPGEDLRHPGTSLPAASPVT

SEQ ID NO: 338 - protein, 950 aa, Homo sapiens
MLLLGILTLAFAGRTAGGSEPEREVVVPIRLDPDINGRRYYWRGPEDSGDQGLIFQITAFQEDFYLHLTPDAQFLAPAFSTEHLGVPLQGLTGGSSDLRRCFYSGDVNAEPDSFAAVSLCGGLRGAFGYRGAEYVISPLPNASAPAAQRNSQGAHLLQRRGVPGGPSGDPTSRCGVASGWNPAILRALDPYKPRRAGFGESRSRRRSGRAKRFVSIPRYVETLVVADESMVKFHGADLEHYLLTLLATAARLYRHPSILNPINIVVVKVLLLRDRDSGPKVTGNAALTLRNFCAWQKKLNKVSDKHPEYWDTAILFTRQDLCGATTCDTLGMADVGTMCDPKRSCSVIEDDGLPSAFTTAHELGHVFNMPHDNVKVCEEVFGKLRANHMMSPTLIQIDRANPWSACSAAIITDFLDSGHGDCLLDQPSKPISLPEDLPGASYTLSQQCELAFGVGSKPCPYMQYCTKLWCTGKAKGQMVCQTRHFPWADGTSCGEGKLCLKGACVERHNLNKHRVDGSWAKWDPYGPCSRTCGGGVQLARRQCTNPTPANGGKYCEGVRVKYRSCNLEPCPSSASGKSFREEQCEAFNGYNHSTNRLTLAVAWVPKYSGVSPRDKCKLICRANGTGYFYVLAPKVVDGTLCSPDSTSVCVQGKCIKAGCDGNLGSKKRFDKCGVCGGDNKSCKKVTGLFTKPMHGYNFVVAIPAGASSIDIRQRGYKGLIGDDNYLALKNSQGKYLLNGHFVVSAVERDLVVKGSLLRYSGTGTAVESLQASRPILEPLTVEVLSVGKMTPPRVRYSFYLPKEPREDKSSHPKDPRGPSVLHNSVLSLSNQVEQPDDRPPARWVAGSWGPCSASCGSGLQKRAVDCRGSAGQRTVPACDAAHRPVETQACGEPCPTWELSAWSPCSKSCGRGFQRRSLKCVGHGGRLLARDQCNLHRKPQELDFCVLRPC

SEQ ID NO: 339 - protein, 1224 aa, Homo sapiens
MKPRARGWRGLAALWMLLAQVAEQAPACAMGPAAAAPGSPSVPRPPPPAERPGWMEKGEYDLVSAYEVDHRGDYVSHEIMHHQRRRRAVPVSEVESLHLRLKGSRHDFHMDLRTSSSLVAPGFIVQTLGKTGTKSVQTLPPEDFCFYQGSLRSHRNSSVALSTCQGLSGMIRTEEADYFLRPLPSHLSWKLGRAAQGSSPSHVLYKRSTEPHAPGASEVLVTSRTWELAHQPLHSSDLRLGLPQKQHFCGRRKKYMPQPPKEDLFILPDEYKSCLRHKRSLLRSHRNEELNVETLVVVDKKMMQNHGHENITTYVLTILNMVSALFKDGTIGGNINIAIVGLILLEDEQPGLVISHHADHTLSSFCQWQSGLMGKDGTRHDHAILLTGLDICSWKNEPCDTLGFAPISGMCSKYRSCTINEDTGLGLAFTIAHESGHNFGMIHDGEGNMCKKSEGNIMSPTLAGRNGVFSWSPCSRQYLHKFLSTAQAICLADQPKPVKEYKYPEKLPGELYDANTQCKWQFGEKAKLCMLDFKKDICKALWCHRIGRKCETKFMPAAEGTICGHDMWCRGGQCVKYGDEGPKPTHGHWSDWSSWSPCSRTCGGGVSHRSRLCTNPKPSHGGKFCEGSTRTLKLCNSQKCPRDSVDFRAAQCAEHNSRRFRGRHYKWKPYTQVEDQDLCKLYCIAEGFDFFFSLSNKVKDGTPCSEDSRNVCIDGICERVGCDNVLGSDAVEDVCGVCNGNNSACTIHRGLYTKHHHTNQYYHMVTIPSGARSIRIYEMNVSTSYISVRNALRRYYLNGHWTVDWPGRYKFSGTTFDYRRSYNEPENLIATGPTNETLIVELLFQGRNPGVAWEYSMPRLGTEKQPPAQPSYTWAIVRSECSVSCGGGQMTVREGCYRDLKFQVNMSFCNPKTRPVTGLVPCKVSACPPSWSVGNWSACSRTCGGGAQSRPVQCTRRVHYDSEPVPASLCPQPAPSSRQACNSQSCPPAWSAGPWAECSHTCGKGWRKRAVACKSTNPSARAQLLPDAVCTSEPKPRMHEACLLQRCHKPKKLQWLVSAWSQCSVTCERGTQKRFLKCAEKYVSGKYRELASKKCSHLPKPSLELERACAPLPCPRHPPFAAAGPSRGSWFASPWSQCTASCGGGVQTRSVQCLAGGRPASGCLLHQKPSASLACNTHFCPIAEKKDAFCKDYFHWCYLVPQHGMCSHKFYGKQCCKTCSKSNL

SEQ ID NO: 340 - protein, 570 aa, Homo sapiens
MKPRARGWRGLAALWMLLAQVAEQAPACAMGPAAAAPGSPSVPRPPPPAERPGWMEKGEYDLVSAYEVDHRGDYVSHEIMHHQRRRRAVPVSEVESLHLRLKGSRHDFHMDLRTSSSLVAPGFIVQTLGKTGTKSVQTLPPEDFCFYQGSLRSHRNSSVALSTCQGLSGMIRTEEADYFLRPLPSHLSWKLGRAAQGSSPSHVLYKRSTEPHAPGASEVLVTSRTWELAHQPLHSSDLRLGLPQKQHFCGRRKKYMPQPPKEDLFILPDEYKSCLRHKRSLLRSHRNEELNVETLVVVDKKMMQNHGHENITTYVLTILNMVSALFKDGTIGGNINIAIVGLILLEDEQPGLVISHHADHTLSSFCQWQSGLMGKDGTRHDHAILLTGLDICSWKNEPCDTLGFAPISGMCSKYRSCTINEDTGLGLAFTIAHESGHNFGMIHDGEGNMCKKSEGNIMSPTLAGRNGVFSWSPCSRQYLHKFLSTAQAICLADQPKPVKEYKYPEKLPGELYDANTQCKWQFGEKAKLCMLDFKKDICKALWCHRIGRKCETKFMPAAEGTICGHDMVRS

SEQ ID NO: 341 - protein, 1095 aa, Homo sapiens
MCDGALLPPLVLPVLLLLVWGLDPGTAVGDAAADVEVVLPWRVRPDDVHLPPLPAAPGPRRRRRPRTPPAAPRARPGERALLLHLPAFGRDLYLQLRRDLRFLSRGFEVEEAGAARRRGRPAELCFYSGRVLGHPGSLVSLSACGAAGGLVGLIQLGQEQVLIQPLNNSQGPFSGREHLIRRKWSLTPSPSAEAQRPEQLCKVLTEKKKPTWGRPSRDWRERRNAIRLTSEHTVETLVVADADMVQYHGAEAAQRFILTVMNMVYNMFQHQSLGIKINIQVTKLVLLRQRPAKLSIGHHGERSLESFCHWQNEEYGGARYLGNNQVPGGKDDPPLVDAAVFVTRTDFCVHKDEPCDTVGIAYLGGVCSAKRKCVLAEDNGLNLAFTIAHELGHNLGMNHDDDHSSCAGRSHIMSGEWVKGRNPSDLSWSSCSRDDLENFLKSKVSTCLLVTDPRSQHTVRLPHKLPGMHYSANEQCQILFGMNATFCRNMEHLMCAGLWCLVEGDTSCKTKLDPPLDGTECGADKWCRAGECVSKTPIPEHVDGDWSPWGAWSMCSRTCGTGARFRQRKCDNPPPGPGGTHCPGASVEHAVCENLPCPKGLPSFRDQQCQAHDRLSPKKKGLLTAVVVDDKPCELYCSPLGKESPLLVADRVLDGTPCGPYETDLCVHGKCQKIGCDGIIGSAAKEDRCGVCSGDGKTCHLVKGDFSHARGTALKDSGKGSINSDWKIELPGEFQIAGTTVRYVRRGLWEKISAKGPTKLPLHLMVLLFHDQDYGIHYEYTVPVNRTAENQSEPEKPQDSLFIWTHSGWEGCSVQCGGGERRTIVSCTRIVNKTTTLVNDSDCPQASRPEPQVRRCNLHPCQSRWVAGPWSPCSATCEKGFQHREVTCVYQLQNGTHVATRPLYCPGPRPAAVQSCEGQDCLSIWEASEWSQCSASCGKGVWKRTVACTNSQGKCDASTRPRAEEACEDYSGCYEWKTGDWSTCSSTCGKGLQSRVVQCMHKVTGRHGSECPALSKPAPYRQCYQEVCNDRINANTITSPRLAALTYKCTRDQWTVYCRVIREKNLCQDMRWYQRCCQTCRDFYANKMRQPPPNS

SEQ ID NO: 342 - protein, 68 aa, Homo sapiens
MCDGALLPPLVLPVLLLLVWGLDPGTGWPHSAWAGAGANPAPQQLPGPIQWTRTSDQAQMVLDPQPFC

SEQ ID NO: 343 - protein, 214 aa, Homo sapiens
  VARIANT 1: note = misc_feature - Xaa can be any naturally occurring amino acid
XELYCSPLGKESPLLVADRVLDGTPCGPYETDLCVHGKCQKIGCDGIIGSAAKEDRCGVCSGDGKTCHLVKGDFSHARGTGYIEAAVIPAGARRIRVVEDKPAHSFLALKDSGKGSINSDWKIELPGEFQIAGTTVRYVRRGLWEKISAKGPTKLPLHLMVLLFHDQDYGIHYEYTVPVNRTAENQSEPEKPQDSLFIWTHSGWEGCSVQCGGG

SEQ ID NO: 344 - protein, 120 aa, Homo sapiens
  VARIANT 1: note = misc_feature - Xaa can be any naturally occurring amino acid
XGRPAELCFYSGRVLGHPGSLVSLSACGAAGGLVGLIQLGQEQVLIQPLNNSQGPFSGREHLIRRKWSLTPSPSAEAQRPEQLCKVLTVPQCLGLTWEDLKSGGWSDLEVPHSCVWPGGG

SEQ ID NO: 345 - protein, 1221 aa, Homo sapiens
MECALLLACAFPAAGSGPPRGLAGLGRVAKALQLCCLCCASVAAALASDSSSGASGLNDDYVFVTPVEVDSAGSYISHDILHNGRKKRSAQNARSSLHYRFSAFGQELHLELKPSAILSSHFIVQVLGKDGASETQKPEVQQCFYQGFIRNDSSSSVAVSTCAGLSGLIRTRKNEFLISPLPQLLAQEHNYSSPAGHHPHVLYKRTAEEKIQRYRGYPGSGRNYPGYSPSHIPHASQSRETEYHHRRLQKQHFCGRRKKYAPKPPTEDTYLRFDEYGSSGRPRRSAGKSQKGLNVETLVVADKKMVEKHGKGNVTTYILTVMNMVSGLFKDGTIGSDINVVVVSLILLEQEPGGLLINHHADQSLNSFCQWQSALIGKNGKRHDHAILLTGFDICSWKNEPCDTLGFAPISGMCSKYRSCTINEDTGLGLAFTIAHESGHNFGMIHDGEGNPCRKAEGNIMSPTLTGNNGVFSWSSCSRQYLKKFLSTPQAGCLVDEPKQAGQYKYPDKLPGQIYDADTQCKWQFGAKAKLCSLGFVKDICKSLWCHRVGHRCETKFMPAAEGTVCGLSMWCRQGQCVKFGELGPRPIHGQWSAWSKWSECSRTCGGGVKFQERHCNNPKPQYGGLFCPGSSRIYQLCNINPCNENSLDFRAQQCAEYNSKPFRGWFYQWKPYTKVEEEDRCKLYCKAENFEFFFAMSGKVKDGTPCSPNKNDVCIDGVCELVGCDHELGSKAVSDACGVCKGDNSTCKFYKGLYLNQHKANEYYPVVLIPAGARSIEIQELQVSSSYLAVRSLSQKYYLTGGWSIDWPGEFPFAGTTFEYQRSFNRPERLYAPGPTNETLVFEILMQGKNPGIAWKYALPKVMNGTPPATKRPAYTWSIVQSECSVSCGGGYINVKAICLRDQNTQVNSSFCSAKTKPVTEPKICNAFSCPAYWMPGEWSTCSKACAGGQQSRKIQCVQKKPFQKEEAVLHSLCPVSTPTQVQACNSHACPPQWSLGPWSQCSKTCGRGVRKRELLCKGSAAETLPESQCTSLPRPELQEGCVLGRCPKNSRLQWVASSWSECSATCGLGVRKREMKCSEKGFQGKLITFPERRCRNIKKPNLDLEETCNRRACPAHPVYNMVAGWYSLPWQQCTVTCGGGVQTRSVHCVQQGRPSSSCLLHQKPPVLRACNTNFCPAPEKREDPSCVDFFNWCHLVPQHGVCNHKFYGKQCCKSCTRKI

SEQ ID NO: 346 - protein, 274 aa, Homo sapiens
MECALLLACAFPAAGSGPPRGLAGLGRVAKALQLCCLCCASVAAALASDSSSGASGLNDDYVFVTPVEVDSAGSYISHDILHNGRKKRSAQNARSSLHYRFSAFGQELHLELKPSAILSSHFIVQVLGKDGASETQKPEVQQCFYQGFIRNDSSSSVAVSTCAGLSGLIRTRKNEFLISPLPQLLAQEHNYSSPAGHHPHVLYKRTAEEKIQRYRGYPGSGRNYPGYSPSHIPHASQSRETEYHHRRLQKQHFCGRRKKCICSQASHRGHLSKV

SEQ ID NO: 347 - protein, 62 aa, Homo sapiens
  VARIANT 1: note = misc_feature - Xaa can be any naturally occurring amino acid
XQGRPSSSCLLHQKPPVLRACNTNFCPAPEKRDSAGSQLPCCDGPQAVHEEGLRFPDNHWAM

SEQ ID NO: 348 - protein, 186 aa, Homo sapiens
  VARIANT 1: note = misc_feature - Xaa can be any naturally occurring amino acid
XVDSAGSYISHDILHNGRKKRSAQNARSSLHYRFSAFGQELHLELKPSAILSSHFIVQVLGKDGASETQKPEVQQCFYQGFIRNDSSSSVAVSTCAGLLLAQEHNYSSPAGHHPHVLYKRTAEEKIQRYRGYPGSGRNYPGYSPSHIPHASQSRETEYHHRRLQKQHFCGRRKKCICSQASHRGHL

SEQ ID NO: 349 - protein, 37 aa, Homo sapiens
MGKNREMRLTHICCCCLLYQLGFLSNGIVSDGIYTAQ

SEQ ID NO: 350 - protein, 1213 aa, Homo sapiens
MGKNREMRLTHICCCCLLYQLGFLSNGIVSELQFAPDREEWEVVFPALWRREPVDPAGGSGGSADPGWVRGVGGGGSARAQAAGSSREVRSVAPVPLEEPVEGRSESRLRPPPPSEGEEDEELESQELPRGSSGAAALSPGAPASWQPPPPPQPPPSPPPAQHAEPDGDEVLLRIPAFSRDLYLLLRRDGRFLAPRFAVEQRPNPGPGPTGAASAPQPPAPPDAGCFYTGAVLRHPGSLASFSTCGGGLMGFIQLNEDFIFIEPLNDTMAITGHPHRVYRQKRSMEEKVTEKSALHSHYCGIISDKGRPRSRKIAESGRGKRYSYKLPQEYNIETVVVADPAMVSYHGADAARRFILTILNMVFNLFQHKSLSVQVNLRVIKLILLHETPPELYIGHHGEKMLESFCKWQHEEFGKKNDIHLEMSTNWGEDMTSVDAAILITRKDFCVHKDEPCDTVGIAYLSGMCSEKRKCIIAEDNGLNLAFTIAHEMGHNMGINHDNDHPSCADGLHIMSGEWIKGQNLGDVSWSRCSKEDLERFLRSKASNCLLQTNPQSVNSVMVPSKLPGMTYTADEQCQILFGPLASFCQEMQHVICTGLWCKVEGEKECRTKLDPPMDGTDCDLGKWCKAGECTSRTSAPEHLAGEWSLWSPCSRTCSAGISSRERKCPGLDSEARDCNGPRKQYRICENPPCPAGLPGFRDWQCQAYSVRTSSPKHILQWQAVLDEEKPCALFCSPVGKEQPILLSEKVMDGTSCGYQGLDICANGRCQKVGCDGLLGSLAREDHCGVCNGNGKSCKIIKGDFNHTRGAGYVEVLVIPAGARRIKVVEEKPAHSYLALRDAGKQSINSDWKIEHSGAFNLAGTTVHYVRRGLWEKISAKGPTTAPLHLLVLLFQDQNYGLHYEYTIPSDPLPENQSSKAPEPLFMWTHTSWEDCDATCGGGERKTTVSCTKIMSKNISIVDNEKCKYLTKPEPQIRKCNEQPCQTRWMMTEWTPCSRTCGKGMQSRQVACTQQLSNGTLIRARERDCIGPKPASAQRCEGQDCMTVWEAGVWSECSVKCGKGIRHRTVRCTNPRKKCVLSTRPREAEDCEDYSKCYVWRMGDWSKCSITCGKGMQSRVIQCMHKITGRHGNECFSSEKPAAYRPCHLQPCNEKINVNTITSPRLAALTFKCLGDQWPVYCRVIREKNLCQDMRWYQRCCETCRDFYAQKLQQKS

SEQ ID NO: 351 - protein, 1207 aa, Homo sapiens
MRLTHICCCCLLYQLGFLSNGIVSELQFAPDREEWEVVFPALWRREPVDPAGGSGGSADPGWVRGVGGGGSARAQAAGSSREVRSVAPVPLEEPVEGRSESRLRPPPPSEGEEDEELESQELPRGSSGAAALSPGAPASWQPPPPPQPPPSPPPAQHAEPDGDEVLLRIPAFSRDLYLLLRRDGRFLAPRFAVEQRPNPGPGPTGAASAPQPPAPPDAGCFYTGAVLRHPGSLASFSTCGGGLMGFIQLNEDFIFIEPLNDTMAITGHPHRVYRQKRSMEEKVTEKSALHSHYCGIISDKGRPRSRKIAESGRGKRYSYKLPQEYNIETVVVADPAMVSYHGADAARRFILTILNMVFNLFQHKSLSVQVNLRVIKLILLHETPPELYIGHHGEKMLESFCKWQHEEFGKKNDIHLEMSTNWGEDMTSVDAAILITRKDFCVHKDEPCDTVGIAYLSGMCSEKRKCIIAEDNGLNLAFTIAHEMGHNMGINHDNDHPSCADGLHIMSGEWIKGQNLGDVSWSRCSKEDLERFLRSKASNCLLQTNPQSVNSVMVPSKLPGMTYTADEQCQILFGPLASFCQEMQHVICTGLWCKVEGEKECRTKLDPPMDGTDCDLGKWCKAGECTSRTSAPEHLAGEWSLWSPCSRTCSAGISSRERKCPGLDSEARDCNGPRKQYRICENPPCPAGLPGFRDWQCQAYSVRTSSPKHILQWQAVLDEEKPCALFCSPVGKEQPILLSEKVMDGTSCGYQGLDICANGRCQKVGCDGLLGSLAREDHCGVCNGNGKSCKIIKGDFNHTRGAGYVEVLVIPAGARRIKVVEEKPAHSYLALRDAGKQSINSDWKIEHSGAFNLAGTTVHYVRRGLWEKISAKGPTTAPLHLLVLLFQDQNYGLHYEYTIPSDPLPENQSSKAPEPLFMWTHTSWEDCDATCGGGERKTTVSCTKIMSKNISIVDNEKCKYLTKPEPQIRKCNEQPCQTRWMMTEWTPCSRTCGKGMQSRQVACTQQLSNGTLIRARERDCIGPKPASAQRCEGQDCMTVWEAGVWSECSVKCGKGIRHRTVRCTNPRKKCVLSTRPREAEDCEDYSKCYVWRMGDWSKCSITCGKGMQSRVIQCMHKITGRHGNECFSSEKPAAYRPCHLQPCNEKINVNTITSPRLAALTFKCLGDQWPVYCRVIREKNLCQDMRWYQRCCETCRDFYAQKLQQKS

SEQ ID NO: 352 - protein, 145 aa, Homo sapiens
  VARIANT 1: note = misc_feature - Xaa can be any naturally occurring amino acid
XDAGCFYTGAVLRHPGSLASFSTCGGGLMGFIQLNEDFIFIEPLNDTMAITGHPHRVYRQKRSMEEKVTEKSALHSHYCGIISDKGRPRSRKIAESGRGKRYSYKLPQEYNIETVVVADPAMVSYHGADAARRFILTILNMVGKL

SEQ ID NO: 353 - protein, 1211 aa, Homo sapiens
MDPPAGAARRLLCPALLLLLLLLPPPLLPPPPPPANARLAAAADPPGGPLGHGAERILAVPVRTDAQGRLVSHVVSAATSRAGVRARRAAPVRTPSFPGGNEEEPGSHLFYNVTVFGRDLHLRLRPNARLVAPGATMEWQGEKGTTRVEPLLGSCLYVGDVAGLAEASSVALSNCDGLAGLIRMEEEEFFIEPLEKGLAAQEAEQGRVHVVYRRPPTSPPLGGPQALDTGASLDSLDSLSRALGVLEEHANSSRRRARRHAADDDYNIEVLLGVDDSVVQFHGKEHVQKYLLTLMNIVNEIYHDESLGAHINVVLVRIILLSYGKSMSLIEIGNPSQSLENVCRWAYLQQKPDTGHDEYHDHAIFLTRQDFGPSGMQGYAPVTGMCHPVRSCTLNHEDGFSSAFVVAHETGHVLGMEHDGQGNRCGDEVRLGSIMAPLVQAAFHRFHWSRCSQQELSRYLHSYDCLLDDPFAHDWPALPQLPGLHYSMNEQCRFDFGLGYMMCTAFRTFDPCKQLWCSHPDNPYFCKTKKGPPLDGTMCAPGKHCFKGHCIWLTPDILKRDGSWGAWSPFGSCSRTCGTGVKFRTRQCDNPHPANGGRTCSGLAYDFQLCSRQDCPDSLADFREEQCRQWDLYFEHGDAQHHWLPHEHRDAKERCHLYCESRETGEVVSMKRMVHDGTRCSYKDAFSLCVRGDCRKVGCDGVIGSSKQEDKCGVCGGDNSHCKVVKGTFTRSPKKHGYIKMFEIPAGARHLLIQEVDATSHHLAVKNLETGKFILNEENDVDASSKTFIAMGVEWEYRDEDGRETLQTMGPLHGTITVLVIPVGDTRVSLTYKYMIHEDSLNVDDNNVLEEDSVVYEWALKKWSPCSKPCGGGSQFTKYGCRRRLDHKMVHRGFCAALSKPKAIRRACNPQECSQPVWVTGEWEPCSQTCGRTGMQVRSVRCIQPLHDNTTRSVHAKHCNDARPESRRACSRELCPGRWRAGPWSQCSVTCGNGTQERPVLCRTADDSFGICQEERPETARTCRLGPCPRNISDPSKKSYVVQWLSRPDPDSPIRKISSKGHCQGDKSIFCRMEVLSRYCSIPGYNKLCCKSCNLYNNLTNVEGRIEPPPGKHNDIDVFMPTLPVPTVAMEVRPSPSTPLEVPLNASSTNATEDHPETNAVDEPYKIHGLEDEVQPPNLIPRRPSPYEKTRNQRIQELIDEMRKKEMLGKF

SEQ ID NO: 354 - protein, 566 aa, Homo sapiens
MDPPAGAARRLLCPALLLLLLLLPPPLLPPPPPPANARLAAAADPPGGPLGHGAERILAVPVRTDAQGRLVSHVVSAATSRAGVRARRAAPVRTPSFPGGNEEEPGSHLFYNVTVFGRDLHLRLRPNARLVAPGATMEWQGEKGTTRVEPLLGSCLYVGDVAGLAEASSVALSNCDGLAGLIRMEEEEFFIEPLEKGLAAQEAEQGRVHVVYRRPPTSPPLGGPQALDTGASLDSLDSLSRALGVLEEHANSSRRRARRHAADDDYNIEVLLGVDDSVVQFHGKEHVQKYLLTLMNIVNEIYHDESLGAHINVVLVRIILLSYGKSMSLIEIGNPSQSLENVCRWAYLQQKPDTGHDEYHDHAIFLTRQDFGPSGMQGYAPVTGMCHPVRSCTLNHEDGFSSAFVVAHETGHVLGMEHDGQGNRCGDEVRLGSIMAPLVQAAFHRFHWSRCSQQELSRYLHSYDCLLDDPFAHDWPALPQLPGLHYSMNEQCRFDFGLGYMMCTAFRTFDPCKQLWCSHPDNPYFCKTKKGPPLDGTMCAPGKFRPGAVAHACYPSTLGGQGRWIA

SEQ ID NO: 355 - protein, 106 aa, Homo sapiens
VTCGNGTQERPVLCRTADDSFGICQEERPETARTCRLGPCPRNISDPSKKSYVVQWLSRPDPDSPIRKISSSNRPVYNSASALQCMPCALWSLPWAPLLSVYGKLP

SEQ ID NO: 356 - protein, 1910 aa, Homo sapiens
MWVAKWLTGLLYHLSLFITRSWEVDFHPRQEALVRTLTSYEVVIPERVNEFGEVFPQSHHFSRQKRSSEALEPMPFRTHYRFTAYGQLFQLNLTADASFLAAGYTEVHLGTPERGAWESDAGPSDLRHCFYRGQVNSQEDYKAVVSLCGGLTGTFKGQNGEYFLEPIMKADGNEYEDGHNKPHLIYRQDLNNSFLQTLKYCSVSESQIKETSLPFHTYSNMNEDLNVMKERVLGHTSKNVPLKDERRHSRKKRLISYPRYIEIMVTADAKVVSAHGSNLQNYILTLMSIVATIYKDPSIGNLIHIVVVKLVMIHREEEGPVINFDGATTLKNFCSWQQTQNDLDDVHPSHHDTAVLITREDICSSKEKCNMLGLSYLGTICDPLQSCFINEEKGLISAFTIAHELGHTLGVQHDDNPRCKEMKVTKYHVMAPALSFHMSPWSWSNCSRKYVTEFLDTGYGECLLDKPDEEIYNLPSELPGSRYDGNKQCELAFGPGSQMCPHINICMHLWCTSTEKLHKGCFTQHVPPADGTDCGPGMHCRHGLCVNKETETRPVNGEWGPWEPYSSCSRTCGGGIESATRRCNRPEPRNGGNYCVGRRMKFRSCNTDSCPKGTQDFREKQCSDFNGKHLDISGIPSNVRWLPRYSGIGTKDRCKLYCQVAGTNYFYLLKDMVEDGTPCGTETHDICVQGQCMAAGCDHVLNSSAKIDKCGVCGGDNSSCKTITGVFNSSHYGYNVVVKIPAGATNVDIRQYSYSGQPDDSYLALSDAEGNFLFNGNFLLSTSKKEINVQGTRTVIEYSGSNNAVERINSTNRQEKELILQVLCVGNLYNPDVHYSFNIPLEERSDMFTWDPYGPWEGCTKMCQGLQRRNITCIHKSDHSVVSDKECDHLPLPSFVTQSCNTDCELRWHVIGKSECSSQCGQGYRTLDIHCMKYSIHEGQTVQVDDHYCGDQLKPPTQELCHGNCVFTRWHYSEWSQCSRSCGGGERSRESYCMNNFGHRLADNECQELSRVTRENCNEFSCPSWAASEWSECLVTCGKGTKQRQVWCQLNVDHLSDGFCNSSTKPESLSPCELHTCASWQVGPWGPCTTTCGHGYQMRDVKCVNELASAVLEDTECHEASRPSDRQSCVLTPCSFISKLETALLPTVLIKKMAQWRHGSWTPCSVSCGRGTQARYVSCRDALDRIADESYCAHLPRPAEIWDCFTPCGEWQAGDWSPCSASCGHGKTTRQVLCMNYHQPIDENYCDPEVRPLMEQECSLAACPPAHSHFPSSPVQPSYYLSTNLPLTQKLEDNENQVVHPSVRGNQWRTGPWGSCSSSCSGGLQHRAVVCQDENGQSASYCDAASKPPELQQCGPGPCPQWNYGNWGECSQTCGGGIKSRLVICQFPNGQILEDHNCEIVNKPPSVIQCHMHACPADVSWHQEPWTSCSASCGKGRKYREVFCIDQFQRKLEDTNCSQVQKPPTHKACRSVRCPSWKANSWNECSVTCGSGVQQRDVYCRLKGVGQVVEEMCDQSTRPCSQRRCWSQDCVQHKGMERGRLNCSTSCERKDSHQRMECTDNQIRQVNEIVYNSSTISLTSKNCRNPPCNYIVVTADSSQCANNCGFSYRQRITYCTEIPSTKKHKLHRLRPIVYQECPVVPSSQVYQCINSCLHLATWKVGKWSKCSVTCGIGIMKRQVKCITKHGLSSDLCLNHLKPGAQKKCYANDCKSFTTCKEIQVKNHIRKDGDYYLNIKGRIIKIYCADMYLENPKEYLTLVQGEENFSEVYGFRLKNPYQCPFNGSRREDCECDNGHLAAGYTVFSKIRIDLTSMQIKTTDLLFSKTIFGNAVPFATAGDCYSAFRCPQGQFSINLSGTGMKISSTAKWLTQGSYTSVSIRRSEDGTRFFGKCGGYCGKCLPHMTTGLPIQVI

SEQ ID NO: 357 - protein, 1504 aa, Homo sapiens
MWVAKWLTGLLYHLSLFITRSWEVDFHPRQEALVRTLTSYEVVIPERVNEFGEVFPQSHHFSRQKRSSEALEPMPFRTHYRFTAYGQLFQLNLTADASFLAAGYTEVHLGTPERGAWESDAGPSDLRHCFYRGQVNSQEDYKAVVSLCGGLTGTFKGQNGEYFLEPIMKADGNEYEDGHNKPHLIYRQDLNNSFLQTLKYCSVSESQIKETSLPFHTYSNMNEDLNVMKERVLGHTSKNVPLKDERRHSRKKRLISYPRYIEIMVTADAKVVSAHGSNLQNYILTLMSIVATIYKDPSIGNLIHIVVVKLVMIHREEEGPVINFDGATTLKNFCSWQQTQNDLDDVHPSHHDTAVLITREDICSSKEKCNMLGLSYLGTICDPLQSCFINEEKGLISAFTIAHELGHTLGVQHDDNPRCKEMKVTKYHVMAPALSFHMSPWSWSNCSRKYVTEFLDTGYGECLLDKPDEEIYNLPSELPGSRYDGNKQCELAFGPGSQMCPHINICMHLWCTSTEKLHKGCFTQHVPPADGTDCGPGMHCRHGLCVNKETETRPVNGEWGPWEPYSSCSRTCGGGIESATRRCNRPEPRNGGNYCVGRRMKFRSCNTDSCPKGTQDFREKQCSDFNGKHLDISGIPSNVRWLPRYSGIGTKDRCKLYCQVAGTNYFYLLKDMVEDGTPCGTETHDICVQGQCMAAGCDHVLNSSAKIDKCGVCGGDNSSCKTITGVFNSSHYGYNVVVKIPAGATNVDIRQYSYSGQPDDSYLALSDAEGNFLFNGNFLLSTSKKEINVQGTRTVIEYSGSNNAVERINSTNRQEKELILQVLCVGNLYNPDVHYSFNIPLEERSDMFTWDPYGPWEGCTKMCQGLQRRNITCIHKSDHSVVSDKECDHLPLPSFVTQSCNTDCELRWHVIGKSECSSQCGQGYRTLDIHCMKYSIHEGQTVQVDDHYCGDQLKPPTQELCHGNCVFTRWHYSEWSQCSRSCGGGERSRESYCMNNFGHRLADNECQELSRVTRENCNEFSCPSWAASEWSECLVTCGKGTKQRQVWCQLNVDHLSDGFCNSSTKPESLSPCELHTCASWQVGPWGPCTTTCGHGYQMRDVKCVNELASAVLEDTECHEASRPSDRQSCVLTPCSFISKLETALLPTVLIKKMAQWRHGSWTPCSVSCGRGTQARYVSCRDALDRIADESYCAHLPRPAEIWDCFTPCGEWQAGDWSPCSASCGHGKTTRQVLCMNYHQPIDENYCDPEVRPLMEQECSLAACPPAHSHFPSSPVQPSYYLSTNLPLTQKLEDNENQVVHPSVRGNQWRTGPWGSCSSSCSGGLQHRAVVCQDENGQSASYCDAASKPPELQQCGPGPCPQWNYGNWGECSQTCGGGIKSRLVICQFPNGQILEDHNCEIVNKPPSVIQCHMHACPADVSWHQEPWTSEDLKVKLLPQRTIILWELMKNIFCHGKHSHMYLINVVTDHLLYPRHCDPETIETYFLSLWSLQFTWGDLKYYKNSL

SEQ ID NO: 358 - protein, 1504 aa, Homo sapiens [sequence omitted]

SEQ ID NO: 359 - protein, 634 aa, Homo sapiens
YSFNIPLEERSDMFTWDPYGPWEGCTKMCQGLQRRNITCIHKSDHSVVSDKECDHLPLPSFVTQSCNTDCELRWHVIGKSECSSQCGQGYRTLDIHCMKYSIHEGQTVQVDDHYCGDQLKPPTQELCHGNCVFTRWHYSEWSQCSRSCGGGERSRESYCMNNFGHRLADNECQELSRVTRENCNEFSCPSWAASEWSECLVTCGKGTKQRQVWCQLNVDHLSDGFCNSSTKPESLSPCELHTCASWQVGPWGPCTTTCGHGYQMRDVKCVNELASAVLEDTECHEASRPSDRQCSVSCGRGTQARYVSCRDALDRIADESYCAHLPRPAEIWDCFTPCGEWQAGDWSPCSASCGHGKTTRQVLCMNYHQPIDENYCDPEVRPLMEQECSLAACPPAHSHFPSSPVQPSYYLSTNLPLTQKLEDNENQVVHPSVRGNQWRTGPWGSCSSSCSGGLQHRAVVCQDENGQSASYCDAASKPPELQQCGPGPCPQWNYGNWGECSQTCGGGIKSRLVICQFPNGQILEDHNCEIVNKPPSVIQCHMHACPADVSWHQEPWTSEDLKVKLLPQRTIILWELMKNIFCHGKHSHMYLINVVTDHLLYPRHCDPETIETYFLSLWSLQFTWGDLKYYKNSL

SEQ ID NO: 360 - protein, 1205 aa, Homo sapiens
MVLLSLWLIAAALVEVRTSADGQAGNEEMVQIDLPIKRYREYELVTPVSTNLEGRYLSHTLSASHKKRSARDVSSNPEQLFFNITAFGKDFHLRLKPNTQLVAPGAVVEWHETSLVPGNITDPINNHQPGSATYRIRRTEPLQTNCAYVGDIVDIPGTSVAISNCDGLAGMIKSDNEEYFIEPLERGKQMEEEKGRIHVVYKRSAVEQAPIDMSKDFHYRESDLEGLDDLGTVYGNIHQQLNETMRRRRHAGENDYNIEVLLGVDDSVVRFHGKEHVQNYLLTLMNIVNEIYHDESLGVHINVVLVRMIMLGYAKSISLIERGNPSRSLENVCRWASQQQRSDLNHSEHHDHAIFLTRQDFGPAGMQGYAPVTGMCHPVRSCTLNHEDGFSSAFVVAHETGHVLGMEHDGQGNRCGDETAMGSVMAPLVQAAFHRYHWSRCSGQELKRYIHSYDCLLDDPFDHDWPKLPELPGINYSMDEQCRFDFGVGYKMCTAFRTFDPCKQLWCSHPDNPYFCKTKKGPPLDGTECAAGKWCYKGHCMWKNANQQKQDGNWGSWTKFGSCSRTCGTGVRFRTRQCNNPMPINGGQDCPGVNFEYQLCNTEECQKHFEDFRAQQCQQRNSHFEYQNTKHHWLPYEHPDPKKRCHLYCQSKETGDVAYMKQLVHDGTHCSYKDPYSICVRGECVKVGCDKEIGSNKVEDKCGVCGGDNSHCRTVKGTFTRTPRKLGYLKMFDIPPGARHVLIQEDEASPHILAIKNQATGHYILNGKGEEAKSRTFIDLGVEWDYNIEDDIESLHTDGPLHDPVIVLIIPQENDTRSSLTYKYIIHEDSVPTINSNNVIQEELDTFEWALKSWSQCSKPCGGGFQYTKYGCRRKSDNKMVHRSFCEANKKPKPIRRMCNIQECTHPLWVAEEWEHCTKTCGSSGYQLRTVRCLQPLLDGTNRSVHSKYCMGDRPESRRPCNRVPCPAQWKTGPWSECSVTCGEGTEVRQVLCRAGDHCDGEKPESVRACQLPPCNDEPCLGDKSIFCQMEVLARYCSIPGYNKLCCESCSKRSSTLPPPYLLEAAETHDDVISNPSDLPRSLVMPTSLVPYHSETPAKKMSLSSISSVGGPNAYAAFRPNSKPDGANLRQRSAQQAGSKTVRLVTVPSSPPTKRVHLSSASQMAAASFFAASDSIGASSQARTSKKDGKIIDNRRPTRSSTLER

SEQ ID NO: 361 - protein, 1205 aa, Homo sapiens; identical to SEQ ID NO: 360

SEQ ID NO: 362 - protein, 930 aa, Homo sapiens
MLLGWASLLLCAFRLPLAAVGPAATPAQDKAGQPPTAAAAAQPRRRQGEEVQERAEPPGHPHPLAQRRRSKGLVQNIDQLYSGGGKVGYLVYAGGRRFLLDLERDGSVGIAGFVPAGGGTSAPWRHRSHCFYRGTVDGSPRSLAVFDLCGGLDGFFAVKHARYTLKPLLRGPWAEEEKGRVYGDGSARILHVYTREGFSFEALPPRASCETPASTPEAHEHAPAHSNPSGRAALASQLLDQSALSPAGGSGPQTWWRRRRRSISRARQVELLLVADASMARLYGRGLQHYLLTLASIANRLYSHASIENHIRLAVVKVVVLGDKDKSLEVSKNAATTLKNFCKWQHQHNQLGDDHEEHYDAAILFTREDLCGHHSCDTLGMADVGTICSPERSCAVIEDDGLHAAFTVAHEIGHLLGLSHDDSKFCEETFGSTEDKRLMSSILTSIDASKPWSKCTSATITEFLDDGHGNCLLDLPRKQILGPEELPGQTYDATQQCNLTFGPEYSVCPGMDVCARLWCAVVRQGQMVCLTKKLPAVEGTPCGKGRICLQGKCVDKTKKKYYSTSSHGNWGSWGSWGQCSRSCGGGVQFAYRHCNNPAPRNNGRYCTGKRAIYRSCSLMPCPPNGKSFRHEQCEAKNGYQSDAKGVKTFVEWVPKYAGVLPADVCKLTCRAKGTGYYVVFSPKVTDGTECRLYSNSVCVRGKCVRTGCDGIIGSKLQYDKCGVCGGDNSSCTKIVGTFNKKSKGYTDVVRIPEGATHIKVRQFKAKDQTRFTAYLALKKKNGEYLINGKYMISTSETIIDINGTVMNYSGWSHRDDFLHGMGYSATKEILIVQILATDPTKPLDVRYSFFVPKKSTPKVNSVTSHGSNKVGSHTSQPQWVTGPWLACSRTCDTGWHTRTVQCQDGNRKLAKGCPLSQRPSAFKQCLLKKC

SEQ ID NO: 363 - protein, 292 aa, Homo sapiens
MEILWKTLTWILSLIMASSEFHSDHRLSYSSQEEFLTYLEHYQLTIPIRVDQNGAFLSFTVKNDKHSRRRRSMDPIDPQQAVSKLFFKLSAYGKHFHLNLTLNTDFVSKHFTVEYWGKDGPQWKHDFLDNCHYTGYLQDQRSTTKVALSNCVGLHGVIATEDEEYFIEPLKNTTEDSKHFSYENGHPHVIYKKSALQQRHLYDHSHCGVSDFTRSGKPWWLNDTSTVSYSLPINNTHIHHRQKRSVSIERFVETLVVADKMMVGYHGRKDIEHYILSVMNIVRLPNFTVIPA

SEQ ID NO: 364 - protein, 1117 aa, Homo sapiens
MEILWKTLTWILSLIMASSEFHSDHRLSYSSQEEFLTYLEHYQLTIPIRVDQNGAFLSFTVKNDKHSRRRRSMDPIDPQQAVSKLFFKLSAYGKHFHLNLTLNTDFVSKHFTVEYWGKDGPQWKHDFLDNCHYTGYLQDQRSTTKVALSNCVGLHGVIATEDEEYFIEPLKNTTEDSKHFSYENGHPHVIYKKSALQQRHLYDHSHCGVSDFTRSGKPWWLNDTSTVSYSLPINNTHIHHRQKRSVSIERFVETLVVADKMMVGYHGRKDIEHYILSVMNIVAKLYRDSSLGNVVNIIVARLIVLTEDQPNLEINHHADKSLDSFCKWQKSILSHQSDGNTIPENGIAHHDNAVLITRYDICTYKNKPCGTLGLASVAGMCEPERSCSINEDIGLGSAFTIAHEIGHNFGMNHDGIGNSCGTKGHEAAKLMAAHITANTNPFSWSACSRDYITSFLDSGRGTCLDNEPPKRDFLYPAVAPGQVYDADEQCRFQYGATSRQCKYGEVCRELWCLSKSNRCVTNSIPAAEGTLCQTGNIEKGWCYQGDCVPFGTWPQSIDGGWGPWSLWGECSRTCGGGVSSSLRHCDSPAPSGGGKYCLGERKRYRSCNTDPCPLGSRDFREKQCADFDNMPFRGKYYNWKPYTGGGVKPCALNCLAEGYNFYTERAPAVIDGTQCNADSLDICINGECKHVGCDNILGSDAREDRCRVCGGDGSTCDAIEGFFNDSLPRGGYMEVVQIPRGSVHIEVREVAMSKNYIALKSEGDDYYINGAWTIDWPRKFDVAGTAFHYKRPTDEPESLEALGPTSENLIVMVLLQEQNLGIRYKFNVPITRTGSGDNEVGFTWNHQPWSECSATCAGGVQRQEVVCKRLDDNSIVQNNYCDPDSKPPENQRACNTEPCPPEWFIGDWLECSKTCDGGMRTRAVLCIRKIGPSEEETLDYSGCLTHRPVEKEPCNNQSCPPQWVALDWSECTPKCGPGFKHRIVLCKSSDLSKTFPAAQCPEESKPPVRIRCSLGRCPPPRWVTGDWGQCSAQCGLGQQMRTVQCLSYTGQASSDCLETVRPPSMQQCESKCDSTPISNTEECKDVNKVAYCPLVLKFKFCSRAYFRQMCCKTCQGH

SEQ ID NO: 365 - protein, 1686 aa, Homo sapiens
MPGGPSPRSPAPLLRPLLLLLCALAPGAPGPAPGRATEGRAALDIVHPVRVDAGGSFLSYELWPRALRKRDVSVRRDAPAFYELQYRGRELRFNLTANQHLLAPGFVSETRRRGGLGRAHIRAHTPACHLLGEVQDPELEGGLAAISACDGLKGVFQLSNEDYFIEPLDSAPARPGHAQPHVVYKRQAPERLAQRGDSSAPSTCGVQVYPELESRRERWEQRQQWRRPRLRRLHQRSVSKEKWVETLVVADAKMVEYHGQPQVESYVLTIMNMVAGLFHDPSIGNPIHITIVRLVLLEDEEEDLKITHHADNTLKSFCKWQKSINMKGDAHPLHHDTAILLTRKDLCAAMNRPCETLGLSHVAGMCQPHRSCSINEDTGLPLAFTVAHELGHSFGIQHDGSGNDCEPVGKRPFIMSPQLLYDAAPLTWSRCSRQYITRFLDRGWGLCLDDPPAKDIIDFPSVPPGVLYDVSHQCRLQYGAYSAFCEDMDNVCHTLWCSVGTTCHSKLDAAVDGTRCGENKWCLSGECVPVGFRPEAVDGGWSGWSAWSICSRSCGMGVQSAERQCTQPTPKYKGRYCVGERKRFRLCNLQACPAGRPSFRHVQCSHFDAMLYKGQLHTWVPVVNDVNPCELHCRPANEYFAEKLRDAVVDGTPCYQVRASRDLCINGICKNVGCDFEIDSGAMEDRCGVCHGNGSTCHTVSGTFEEAEGLGYVDVGLIPAGAREIRIQEVAEAANFLALRSEDPEKYFLNGGWTIQWNGDYQVAGTTFTYARRGNWENLTSPGPTKEPVWIQLLFQESNPGVHYEYTIHREAGGHDEVPPPVFSWHYGPWTKCTVTCGRGVQRQNVYCLERQAGPVDEEHCDPLGRPDDQQRKCSEQPCPARWWAGEWQLCSSSCGPGGLSRRAVLCIRSVGLDEQSALEPPACEHLPRPPTETPCNRHVPCPATWAVGNWSQCSVTCGEGTQRRNVLCTNDTGVPCDEAQQPASEVTCSLPLCRWPLGTLGPEGSGSGSSSHELFNEADFIPHHLAPRPSPASSPKPGTMGNAIEEEAPELDLPGPVFVDDFYYDYNFINFHEDLSYGPSEEPDLDLAGTGDRTPPPHSHPAAPSTGSPVPATEPPAAKEEGVLGPWSPSPWPSQAGRSPPPPSEQTPGNPLINFLPEEDTPIGAPDLGLPSLSWPRVSTDGLQTPATPESQNDFPVGKDSQSQLPPPWRDRTNEVFKDDEEPKGRGAPHLPPRPSSTLPPLSPVGSTHSSPSPDVAELWTGGTVAWEPALEGGLGPVDSELWPTVGVASLLPPPIAPLPEMKVRDSSLEPGTPSFPTPGPGSWDLQTVAVWGTFLPTTLTGLGHMPEPALNPGPKGQPESLSPEVPLSSRLLSTPAWDSPANSHRVPETQPLAPSLAEAGPPADPLVVRNAGWQAGNWSECSTTCGLGAVWRPVRCSSGRDEDCAPAGRPQPARRCHLRPCATWHSGNWSKCSRSCGGGSSVRDVQCVDTRDLRPLRPFHCQPGPAKPPAHRPCGAQPCLSWYTSSWRECSEACGGGEQQRLVTCPEPGLCEEALRPNTTRPCNTHPCTQWVVGPWGQCSGPCGGGVQRRLVKCVNTQTGLPEEDSDQCGHEAWPESSRPCGTEDCEPVEPPRCERDRLSFGFCETLRLLGRCQLPTIRTQCCRSCSPPSHGAPSRGHQRVARR

SEQ ID NO: 366 - protein, 889 aa, Homo sapiens
MLPAPAAPRWPPLLLLLLLLLPLARGAPARPAAGGQASELVVPTRLPGSAGELALHLSAFGKGFVLRLAPDDSFLAPEFKIERLGGSGRATGGERGLRGCFFSGTVNGEPESLAAVSLCRGLSGSFLLDGEEFTIQPQGAGGSLAQPHRLQRWGPAGARPLPRGPEWEVETGEGQRQERGDHQEDSEEESQEEEAEGASEPPPPLGATSRTKRFVSEARFVETLLVADASMAAFYGADLQNHILTLMSVAARIYKHPSIKNSINLMVVKVLIVEDEKWGPEVSDNGGLTLRNFCNWQRRFNQPSDRHPEHYDTAILLTRQNFCGQEGLCDTLGVADIGTICDPNKSCSVIEDEGLQAAHTLAHELGHVLSMPHDDSKPCTRLFGPMGKHHVMAPLFVHLNQTLPWSPCSAMYLTELLDGGHGDCLLDAPAAALPLPTGLPGRMALYQLDQQCRQIFGPDFRHCPNTSAQDVCAQLWCHTDGAEPLCHTKNGSLPWADGTPCGPGHLCSEGSCLPEEEVERPKPVADGGWAPWGPWGECSRTCGGGVQFSHRECKDPEPQNGGRYCLGRRAKYQSCHTEECPPDGKSFREQQCEKYNAYNYTDMDGNLLQWVPKYAGVSPRDRCKLFCRARGRSEFKVFEAKVIDGTLCGPETLAICVRGQCVKAGCDHVVDSPRKLDKCGVCGGKGNSCRKVSGSLTPTNYGYNDIVTIPAGATNIDVKQRSHPGVQNDGNYLALKTADGQYLLNGNLAISAIEQDILVKGTILKYSGSIATLERLQSFRPLPEPLTVQLLTVPGEVFPPKVKYTFFVPNDVDFSMQSSKERATTNIIQPLLHAQWVLGDWSECSSTCGAGWQRRTVECRDPSGQASATCNKALKPEDAKPCESQLCPL

SEQ ID NO: 367 - protein, 69 aa, Homo sapiens
AKCPQGRFSINLYGTGLSLTESARWISQGNYAVSDIKKSPDGTRVVGKCGGYCGKCTPSSGTGLEVRVL

SEQ ID NO: 368 - protein, 1907 aa, Homo sapiens
MQFVSWATLLTLLVRDLAEMGSPDAAAAVRKDRLHPRQVKLLETLSEYEIVSPIRVNALGEPFPTNVHFKRTRRSINSATDPWPAFASSSSSSTSSQAHYRLSAFGQQFLFNLTANAGFIAPLFTVTLLGTPGVNQTKFYSEEEAELKHCFYKGYVNTNSEHTAVISLCSGMLGTFRSHDGDYFIEPLQSMDEQEDEEEQNKPHIIYRRSAPQREPSTGRHACDTSEHKNRHSKDKKKTRARKWGERINLAGDVAALNSGLATEAFSAYGNKTDNTREKRTHRRTKRFLSYPRFVEVLVVADNRMVSYHGENLQHYILTLMSIDGPSISFNAQTTLKNFCQWQHSKNSPGGIHHDTAVLLTRQDICRAHDKCDTLGLAELGTICDPYRSCSISEDSGLSTAFTIAHELGHVFNMPHDDNNKCKEEGVKSPQHVMAPTLNFYTNPWMWSKCSRKYITEFLDTGYGECLLNEPESRPYPLPVQLPGILYNVNKQCELIFGPGSQVCPYMMQCRRLWCNNVNGVHKGCRTQHTPWADGTECEPGKHCKYGFCVPKEMDVPVTDGSWGSWSPFGTCSRTCGGGIKTAIRECNRPEPKNGGKYCVGRRMKFKSCNTEPCLKQKRDFRDEQCAHFDGKHFNINGLLPNVRWVPKYSGILMKDRCKLFCRVAGNTAYYQLRDRVIDGTPCGQDTNDICVQGLCRQAGCDHVLNSKARRDKCGVCGGDNSSCKTVAGTFNTVHYGYNTVVRIPAGATNIDVRQHSFSGETDDDNYLALSSSKGEFLLNGNFVVTMAKREIRIGNAVVEYSGSETAVERINSTDRIEQELLLQVLSVGKLYNPDVRYSFNIPIEDKPQQFYWNSHGPWQACSKPCQGERKRKLVCTRESDQLTVSDQRCDRLPQPGHITEPCGTDCDLRWHVASRSECSAQCGLGYRTLDIYCAKYSRLDGKTEKVDDGFCSSHPKPSNREKCSGECNTGGWRYSAWTECSKSCDGGTQRRRAICVNTRNDVLDDSKCTHQEKVTIQRCSEFPCPQWKSGDWSECLVTCGKGHKHRQVWCQFGEDRLNDRMCDPETKPTSMQTCQQPECASWQAGPWGQCSVTCGQGYQLRAVKCIIGTYMSVVDDNDCNAATRPTDTQDCELPSCHPPPAAPETRRSTYSAPRTQWRFGSWTPCSATCGKGTRMRYVSCRDENGSVADESACATLPRPVAKEECSVTPCGQWKALDWSSCSVTCGQGRATRQVMCVNYSDHVIDRSECDQDYIPETDQDCSMSPCPQRTPDSGLAQHPFQNEDYRPRSASPSRTHVLGGNQWRTGPWGACSSTCAGGSQRRVVVCQDENGYTANDCVERIKPDEQRACESGPCPQWAYGNWGECTKLCGGGIRTRLVVCQRSNGERFPDLSCEILDKPPDREQCNTHACPHDAAWSTGPWSSCSVSCGRGHKQRNVYCMAKDGSHLESDYCKHLAKPHGHRKCRGGRCPKWKAGAWSQCSVSCGRGVQQRHVGCQIGTHKIARETECNPYTRPESERDCQGPRCPLYTWRAEEWQECTKTCGEGSRYRKVVCVDDNKNEVHGARCDVSKRPVDRESCSLQPCEYVWITGEWSECSVTCGKGYKQRLVSCSEIYTGKENYEYSYQTTINCPGTQPPSVHPCYLRDCPVSATWRVGNWGSCSVSCGVGVMQRSVQCLTNEDQPSHLCHTDLKPEERKTCRNVYNCELPQNCKEVKRLKGASEDGEYFLMIRGKLLKIFCAGMHSDHPKEYVTLVHGDSENFSEVYGHRLHNPTECPYNGSRRDDCQCRKDYTAAGFSSFQKIRIDLTSMQIITTDLQFARTSEGHPVPFATAGDCYSAAKCPQGRFSINLYGTGLSLTESARWISQGNYAVSDIKKSPDGTRVVGKCGGYCGKCTPSSGTGLEVRVL

SEQ ID NO: 369 - protein, 1935 aa, Homo sapiens
MQFVSWATLLTLLVRDLAEMGSPDAAAAVRKDRLHPRQVKLLETLSEYEIVSPIRVNALGEPFPTNVHFKRTRRSINSATDPWPAFASSSSSSTSSQAHYRLSAFGQQFLFNLTANAGFIAPLFTVTLLGTPGVNQTKFYSEEEAELKHCFYKGYVNTNSEHTAVISLCSGMLGTFRSHDGDYFIEPLQSMDEQEDEEEQNKPHIIYRRSAPQREPSTGRHACDTSEHKNRHSKDKKKTRARKWGERINLAGDVAALNSGLATEAFSAYGNKTDNTREKRTHRRTKRFLSYPRFVEVLVVADNRMVSYHGENLQHYILTLMSIVASIYKDPSIGNLINIVIVNLIVIHNEQDGPSISFNAQTTLKNFCQWQHSKNSPGGIHHDTAVLLTRQDICRAHDKCDTLGLAELGTICDPYRSCSISEDSGLSTAFTIAHELGHVFNMPHDDNNKCKEEGVKSPQHVMAPTLNFYTNPWMWSKCSRKYITEFLDTGYGECLLNEPESRPYPLPVQLPGILYNVNKQCELIFGPGSQVCPYMMQCRRLWCNNVNGVHKGCRTQHTPWADGTECEPGKHCKYGFCVPKEMDVPVTDGSWGSWSPFGTCSRTCGGGIKTAIRECNRPEPKNGGKYCVGRRMKFKSCNTEPCLKQKRDFRDEQCAHFDGKHFNINGLLPNVRWVPKYSGILMKDRCKLFCRVAGNTAYYQLRDRVIDGTPCGQDTNDICVQGLCRQAGCDHVLNSKARRDKCGVCGGDNSSCKTVAGTFNTVHYGYNTVVRIPAGATNIDVRQHSFSGETDDDNYLALSSSKGEFLLNGNFVVTMAKREIRIGNAVVEYSGSETAVERINSTDRIEQELLLQVLSVGKLYNPDVRYSFNIPIEDKPQQFYWNSHGPWQACSKPCQGERKRKLVCTRESDQLTVSDQRCDRLPQPGHITEPCGTDCDLRWHVASRSECSAQCGLGYRTLDIYCAKYSRLDGKTEKVDDGFCSSHPKPSNREKCSGECNTGGWRYSAWTECSKSCDGGTQRRRAICVNTRNDVLDDSKCTHQEKVTIQRCSEFPCPQWKSGDWSECLVTCGKGHKHRQVWCQFGEDRLNDRMCDPETKPTSMQTCQQPECASWQAGPWGQCSVTCGQGYQLRAVKCIIGTYMSVVDDNDCNAATRPTDTQDCELPSCHPPPAAPETRRSTYSAPRTQWRFGSWTPCSATCGKGTRMRYVSCRDENGSVADESACATLPRPVAKEECSVTPCGQWKALDWSSCSVTCGQGRATRQVMCVNYSDHVIDRSECDQDYIPETDQDCSMSPCPQRTPDSGLAQHPFQNEDYRPRSASPSRTHVLGGNQWRTGPWGACSSTCAGGSQRRVVVCQDENGYTANDCVERIKPDEQRACESGPCPQWAYGNWGECTKLCGGGIRTRLVVCQRSNGERFPDLSCEILDKPPDREQCNTHACPHDAAWSTGPWSSCSVSCGRGHKQRNVYCMAKDGSHLESDYCKHLAKPHGHRKCRGGRCPKWKAGAWSQCSVSCGRGVQQRHVGCQIGTHKIARETECNPYTRPESERDCQGPRCPLYTWRAEEWQECTKTCGEGSRYRKVVCVDDNKNEVHGARCDVSKRPVDRESCSLQPCEYVWITGEWSECSVTCGKGYKQRLVSCSEIYTGKENYEYSYQTTINCPGTQPPSVHPCYLRDCPVSATWRVGNWGSCSVSCGVGVMQRSVQCLTNEDQPSHLCHTDLKPEERKTCRNVYNCELPQNCKEVKRLKGASEDGEYFLMIRGKLLKIFCAGMHSDHPKEYVTLVHGDSENFSEVYGHRLHNPTECPYNGSRRDDCQCRKDYTAAGFSSFQKIRIDLTSMQIITTDLQFARTSEGHPVPFATAGDCYSAAKCPQGRFSINLYGTGLSLTESARWISQGNYAVSDIKKSPDGTRVVGKCGGYCGKCTPSSGTGLEVRVL

SEQ ID NO: 370 - protein, 488 aa, Homo sapiens
MQFVSWATLLTLLVRDLAEMGSPDAAAAVRKDRLHPRQVKLLETLSEYEIVSPIRVNALGEPFPTNVHFKRTRRSINSATDPWPAFASSSSSSTSSQAHYRLSAFGQQFLFNLTANAGFIAPLFTVTLLGTPGVNQTKFYSEEEAELKHCFYKGYVNTNSEHTAVISLCSGMLGTFRSHDGDYFIEPLQSMDEQEDEEEQNKPHIIYRRSAPQREPSTGRHACDTSEHKNRHSKDKKKTRARKWGERINLAGDVAALNSGLATEAFSAYGNKTDNTREKRTHRRTKRFLSYPRFVEVLVVADNRMVSYHGENLQHYILTLMSIVASIYKDPSIGNLINIVIVNLIVIHNEQDGPSISFNAQTTLKNFCQWQHSKNSPGGIHHDTAVLLTRQDICRAHDKCDTLGLAELGTICDPYRSCSISEDSGLSTAFTIAHELGHVFNMPHDDNNKCKEEGVKSPQHVMAPTLNFYTNPWMWSKCSRKYITEFLE

SEQ ID NO: 371 - protein, 991 aa, Homo sapiens
  VARIANT 1: note = misc_feature - Xaa can be any naturally occurring amino acid
XECSAQCGLGYRTLDIYCAKYSRLDGKTEKVDDGFCSSHPKPSNREKCSGECNTGGWRYSAWTECSKSCDGGTQRRRAICVNTRNDVLDDSKCTHQEKVTIQRCSEFPCPQWKSGDWSECLVTCGKGHKHRQVWCQFGEDRLNDRMCDPETKPTSMQTCQQPECASWQAGPWGQCSVTCGQGYQLRAVKCIIGTYMSVVDDNDCNAATRPTDTQDCELPSCHPPPAAPETRRSTYSAPRTQWRFGSWTPCSATCGKGTRMRYVSCRDENGSVADESACATLPRPVAKEECSVTPCGQWKALDWSSCSVTCGQGRATRQVMCVNYSDHVIDRSECDQDYIPETDQDCSMSPCPQRTPDSGLAQHPFQNEDYRPRSASPSRTHVLGGNQWRTGPWGACSSTCAGGSQRRVVVCQDENGYTANDCVERIKPDEQRACESGPCPQWAYGNWGECTKLCGGGIRTRLVVCQRSNGERFPDLSCEILDKPPDREQCNTHACPHDAAWSTGPWSSCSVSCGRGHKQRNVYCMAKDGSHLESDYCKHLAKPHGHRKCRGGRCPKWKAGAWSQCSVSCGRGVQQRHVGCQIGTHKIARETECNPYTRPESERDCQGPRCPLYTWRAEEWQECTKTCGEGSRYRKVVCVDDNKNEVHGARCDVSKRPVDRESCSLQPCEYVWITGEWSECSVTCGKGYKQRLVSCSEIYTGKENYEYSYQTTINCPGTQPPSVHPCYLRDCPVSATWRVGNWGSCSVSCGVGVMQRSVQCLTNEDQPSHLCHTDLKPEERKTCRNVYNCELPQNCKEVKRLKGASEDGEYFLMIRGKLLKIFCAGMHSDHPKEYVTLVHGDSENFSEVYGHRLHNPTECPYNGSRRDDCQCRKDYTAAGFSSFQKIRIDLTSMQIITTDLQFARTSEGHPVPFATAGDCYSAAKCPQGRFSINLYGTGLSLTESARWISQGNYAVSDIKKSPDGTRVVGKCGGYCGKCTPSSGTGLEVRVL

SEQ ID NO: 372 - protein, 127 aa, Homo sapiens
MARLEAPQCPGFLARLLGGTWCLLCIAGQVCGDQSQGAVFLREFTLIRRESLHEDFLSDLLNSHKTEDSSSRTARSEEDRDGLWDAWGPWSECSRTCGGGASYSLRRCLSSKSCEGRNIRYRTCSNV

SEQ ID NO: 373 - protein, 219 aa, Homo sapiens
MECCRRATPGTLLLFLAFLLLSSRTARSEEDRDGLWDAWGPWSECSRTCGGGASYSLRRCLSSKSCEGRNIRYRTCSNVDCPPEAGDFRAQQCSAHNDVKHHGQFYEWLPVSNDPDNPCSLKCQAKGTTLVVELAPKVLDGTRCYTESLDMCISGLCQIVGCDHQLGSTVKEDNCGVCNGDGSTCRLVRGQYKSQLSATKCKTHRDGRPLDLLTYPLLA

SEQ ID NO: 374 - protein, 683 aa, Homo sapiens
MECCRRATPGTLLLFLAFLLLSSRTARSEEDRDGLWDAWGPWSECSRTCGGGASYSLRRCLSSKSCEGRNIRYRTCSNVDCPPEAGDFRAQQCSAHNDVKHHGQFYEWLPVSNDPDNPCSLKCQAKGTTLVVELAPKVLDGTRCYTESLDMCISGLCQIVGCDHQLGSTVKEDNCGVCNGDGSTCRLVRGQYKSQLSATKSDDTVVAIPYGSRHIRLVLKGPDHLYLETKTLQGTKGENSLSSTGTFLVDNSSVDFQKFPDKEILRMAGPLTADFIVKIRNSGSADSTVQFIFYQPIIHRWRETDFFPCSATCGGGYQLTSAECYDLRSNRVVADQYCHYYPENIKPKPKLQECNLDPCPASDGYKQIMPYDLYHPLPRWEATPWTACSSSCGGGIQSRAVSCVEEDIQGHVTSVEEWKCMYTPKMPIAQPCNIFDCPKWLAQEWSPCTVTCGQGLRYRVVLCIDHRGMHTGGCSPKTKPHIKEECIVPTPCYKPKEKLPVEAKLPWFKQAQELEEGAAVSEEPSFIPEAWSACTVTCGVGTQVRIVRCQVLLSFSQSVADLPIDECEGPKPASQRACYAGPCSGEIPEFNPDETDGLFGGLQDFDELYDWEYEGFTKCSESCGGGVQEAVVSCLNKQTREPAEENLCVTSRRPPQLLKSCNLDPCPARSSIDSAWNACNVLC

SEQ ID NO: 375 - protein, 525 aa, Homo sapiens
MECCRRATPGTLLLFLAFLLLSSRTARSEEDRDGLWDAWGPWSECSRTCGGGASYSLRRCLSSKSCEGRNIRYRTCSNVDCPPEAGDFRAQQCSAHNDVKHHGQFYEWLPVSNDPDNPCSLKCQAKGTTLVVELAPKVLDGTRCYTESLDMCISGLCQIVGCDHQLGSTVKEDNCGVCNGDGSTCRLVRGQYKSQLSATKSDDTVVAIPYGSRHIRLVLKGPDHLYLETKTLQGTKGENSLSSTGTFLVDNSSVDFQKFPDKEILRMAGPLTADFIVKIRNSGSADSTVQFIFYQPIIHRWRETDFFPCSATCGGGYQLTSAECYDLRSNRVVADQYCHYYPENIKPKPKLQECNLDPCPASDGYKQIMPYDLYHPLPRWEATPWTACSSSCGGGIQSRAVSCVEEDIQGHVTSVEEWKCMYTPKMPIAQPCNIFDCPKWLAQEWSPCTVTCGQGLRYRVVLCIDHRGMHTGGCSPKTKPHIKEECIVPTPCYKPKEKLPVEAKLPWFKQAQELEEGAAVSEEPS

SEQ ID NO: 376 - protein, 1762 aa, Homo sapiens
MECCRRATPGTLLLFLAFLLLSSRTARSEEDRDGLWDAWGPWSECSRTCGGGASYSLRRCLSSKSCEGRNIRYRTCSNVDCPPEAGDFRAQQCSAHNDVKHHGQFYEWLPVSNDPDNPCSLKCQAKGTTLVVELAPKVLDGTRCYTESLDMCISGLCQIVGCDHQLGSTVKEDNCGVCNGDGSTCRLVRGQYKSQLSATKSDDTVVAIPYGSRHIRLVLKGPDHLYLETKTLQGTKGENSLSSTGTFLVDNSSVDFQKFPDKEILRMAGPLTADFIVKIRNSGSADSTVQFIFYQPIIHRWRETDFFPCSATCGGGYQLTSAECYDLRSNRVVADQYCHYYPENIKPKPKLQECNLDPCPASDGYKQIMPYDLYHPLPRWEATPWTACSSSCGGGIQSRAVSCVEEDIQGHVTSVEEWKCMYTPKMPIAQPCNIFDCPKWLAQEWSPCTVTCGQGLRYRVVLCIDHRGMHTGGCSPKTKPHIKEECIVPTPCYKPKEKLPVEAKLPWFKQAQELEEGAAVSEEPSFIPEAWSACTVTCGVGTQVRIVRCQVLLSFSQSVADLPIDECEGPKPASQRACYAGPCSGEIPEFNPDETDGLFGGLQDFDELYDWEYEGFTKCSESCGGGVQEAVVSCLNKQTREPAEENLCVTSRRPPQLLKSCNLDPCPARWEIGKWSPCSLTCGVGLQTRDVFCSHLLSREMNETVILADELCRQPKPSTVQACNRFNCPPAWYPAQWQPCSRTCGGGVQKREVLCKQRMADGSFLELPETFCSASKPACQQACKKDDCPSEWLLSDWTECSTSCGEGTQTRSAICRKMLKTGLSTVVNSTLCPPLPFSSSIRPCMLATCARPGRPSTKHSPHIAAARKVYIQTRRQRKLHFVVGGFAYLLPKTAVVLRCPARRVRKPLITWEKDGQHLISSTHVTVAPFGYLKIHRLKPSDAGVYTCSAGPAREHFVIKLIGGNRKLVARPLSPRSEEEVLAGRKGGPKEALQTHKHQNGIFSNGSKAEKRGLAANPGSRYDDLVSRLLEQGGWPGELLASWEAQDSAERNTTSEEDPGAEQVLLHLPFTMVTEQRRLDDILGNLSQQPEELRDLYSKHLVAQLAQEIFRSHLEHQDTLLKPSERRTSPVTLSPHKHVSGFSSSLRTSSTGDAGGGSRRPHRKPTILRKISAAQQLSASEVVTHLGQTVALASGTLSVLLHCEAIGHPRPTISWARNGEEVQFSDRILLQPDDSLQILAPVEADVGFYTCNATNALGYDSVSIAVTLAGKPLVKTSRMTVINTEKPAVTVDIGSTIKTVQGVNVTINCQVAGVPEAEVTWFRNKSKLGSPHHLHEGSLLLTNVSSSDQGLYSCRAANLHGELTESTQLLILDPPQVPTQLEDIRALLAATGPNLPSVLTSPLGTQLVLDPGNSALLGCPIKGHPVPNITWFHGGQPIVTATGLTHHILAAGQILQVANLSGGSQGEFSCLAQNEAGVLMQKASLVIQDYWWSVDRLATCSASCGNRGVQQPRLRCLLNSTEVNPAHCAGKVRPAVQPIACNRRDCPSRWMVTSWSACTRSCGGGVQTRRVTCQKLKASGISTPVSNDMCTQVAKRPVDTQACNQQLCVEWAFSSWGQCNGPCIGPHLAVQHRQVFCQTRDGITLPSEQCSALPRPVSTQNCWSEACSVHWRVSLWTLCTATCGNYGFQSRRVECVHARTNKAVPEHLCSWGPRPANWQRCNITPCENMECRDTTRYCEKVKQLKLCQLSQFKSRCCGTCGKA

SEQ ID NO: 377 - protein, 439 aa, Homo sapiens
MECCRRATPGTLLLFLAFLLLSSRTARSEEDRDGLWDAWGPWSECSRTCGGGASYSLRRCLSSKSCEGRNIRYRTCSNVDCPPEAGDFRAQQCSAHNDVKHHGQFYEWLPVSNDPDNPCSLKCQAKGTTLVVELAPKVLDGTRCYTESLDMCISGLCQIVGCDHQLGSTVKEDNCGVCNGDGSTCRLVRGQYKSQLSATKSDDTVVAIPYGSRHIRLVLKGPDHLYLETKTLQGTKGENSLSSTGTFLVDNSSVDFQKFPDKEILRMAGPLTADFIVKIRNSGSADSTVQFIFYQPIIHRWRETDFFPCSATCGGGYQLTSAECYDLRSNRVVADQYCHYYPENIKPKPKLQECNLDPCPARWEATPWTACSSSCGGGIQSRAVSCVEEDIQGHVTSVEEWKCMYTPKMPIAQPCNIFDCPKWLAQEWSPVTVPSFFVH

SEQ ID NO: 378 - protein, 185 aa, Homo sapiens
MECCRRATPGTLLLFLAFLLLSSRTARSEEDRDGLWDAWGPWSECSRTCGGGASYSLRRCLSSKSCEGRNIRYRTCSNVDCPPEAGDFRAQQCSAHNDVKHHGQFYEWLPVSNDPDNPCSLKCQAKGTTLVVELAPKVLDGTRCYTESLDMCISGLCQVSADLFSFNLSRGFQCLCVNGLHSLTL

SEQ ID NO: 379 - protein, 258 aa, Homo sapiens
MSGVFCFFFFFLGVPEAEVTWFRNKSKLGSPHHLHEGSLLLTNVSSSDQGLYSCRAANLHGELTESTQLLILDPPQVPTQLEDIRALLAATGPNLPSVLTSPLGTQLVLDPGNSALLGCPIKGHPVPNITWFHGGQPIVTATGLTHHILAAGQILQVANLSGGSQGEFSCLAQNEAGVLMQKASLVIQDYWWSVDRLATCSASCGNRGVQQPRLRCLLNSTEVNPAHCAGKVRPAVQPIACNRRDCPSRAMGLASGLT

SEQ ID NO: 380 - protein, 463 aa, Homo sapiens
MSGVFCFFFFFLGVPEAEVTWFRNKSKLGSPHHLHEGSLLLTNVSSSDQGLYSCRAANLHGELTESTQLLILDPPQVPTQLEDIRALLAATGPNLPSVLTSPLGTQLVLDPGNSALLGCPIKGHPVPNITWFHGGQPIVTATGLTHHILAAGQILQVANLSGGSQGEFSCLAQNEAGVLMQKASLVIQDYWWSVDRLATCSASCGNRGVQQPRLRCLLNSTEVNPAHCAGKVRPAVQPIACNRRDCPSRWMVTSWSACTRSCGGGVQTRRVTCQKLKASGISTPVSNDMCTQVAKRPVDTQACNQQLCVEWAFSSWGQCNGPCIGPHLAVQHRQVFCQTRDGITLPSEQCSALPRPVSTQNCWSEACSVHWRVSLWTLCTATCGNYGFQSRRVECVHARTNKAVPEHLCSWGPRPANWQRCNITPCENMECRDTTRYCEKVKQLKLCQLSQFKSRCCGTCGKA

SEQ ID NO: 381 - protein, 275 aa, Homo sapiens
MSGVFCFFFFFLGVPEAEVTWFRNKSKLGSPHHLHEGSLLLTNVSSSDQGLYSCRAANLHGELTESTQLLILDPPQVPTQLEDIRALLAATGPNLPSVLTSPLGTQLVLDPGNSALLGCPIKGHPVPNITWFHGGQPIVTATGLTHHILAAGQILQVANLSGGSQGEFSCLAQNEAGVLMQKASLVIQVQWALHRASPSCATQTSLLPDTGWHHLTIRAVQCSSEACEHPELLVRGLQCTLESQPVDPVHSYLWQLRLPVPACGVCACPHQQGSA

SEQ ID NO: 382 - protein, 150 aa, Homo sapiens
TSPLGTQLVLDPGNSALLGCPIKGHPVPNITWFHGGQPIVTATGLTHHILAAGQILQVANLSGGSQGEFSCLAQNEAGVLMQKASLVIQDYWWSVDRLATCSASCGNRGVQQPRLRCLLNSTEVNPAHCAGKVRPAVQPIACNRRDCPSR

SEQ ID NO: 383 - protein, 951 aa, Homo sapiens
MDGRWQCSCWAWFLLVLAVVAGDTVSTGSTDNSPTSNSLEGGTDATAFWWGEWTKWTACSRSCGGGVTSQERHCLQQRRKSVPGPGNRTCTGTSKRYQLCRVQECPPDGRSFREEQCVSFNSHVYNGRTHQWKPLYPDDYVHISSKPCDLHCTTVDGQRQLMVPARDGTSCKLTDLRGVCVSGKCEPIGCDGVLFSTHTLDKCGICQGDGSSCTHVTGNYRKGNAHLGYSLVTHIPAGARDIQIVERKKSADVLALADEAGYYFFNGNYKVDSPKNFNIAGTVVKYRRPMDVYETGIEYIVAQGPTNQGLNVMVWNQNGKSPSITFEYTLLQPPHESRPQPIYYGFSESAESQGLDGAGLMGFVPHNGSLYGQASSERLGLDNRLFGHPGLDMELGPSQGQETNEVCEQAGGGACEGPPRGKGFRDRNVTGTPLTGDKDDEEVDTHFASQEFFSANAISDQLLGAGSDLKDFTLNETVNSIFAQGAPRSSLAESFFVDYEENEGAGPYLLNGSYLELSSDRVANSSSEAPFPNVSTSLLTSAGNRTHKARTRPKARKQGVSPADMYRWKLSSHEPCSATCTTGVMSAYAMCVRYDGVEVDDSYCDALTRPEPVHEFCAGRECQPRWETSSWSECSRTCGEGYQFRVVRCWKMLSPGFDSSVYSDLCEAAEAVRPEERKTCRNPACGPQWEMSEWSECTAKCGERSVVTRDIRCSEDEKLCDPNTRPVGEKNCTGPPCDRQWTVSDWGPCSGSCGQGRTIRHVYCKTSDGRVVPESQCQMETKPLAIHPCGDKNCPAHWLAQDWERCNTTCGRGVKKRLVLCMELANGKPQTRSGPECGLAKKPPEESTCFERPCFKWYTSPWSECTKTCGVGVRMRDVKCYQGTDIVRGCDPLVKPVGRQACDLQPCPTEPPDDSCQDQPGTNCALAIKVNLCGHWYYSKACCRSCRPPHS

SEQ ID NO: 384 - protein, 951 aa, Homo sapiens; identical to SEQ ID NO: 383

SEQ ID NO: 385 - protein, 1060 aa, Homo sapiens
MLFEVGEGGGAGEEGKGRGRPGRSLCTHAAPARTAHLAPSALRSARPFLWEDNLLTRSQGLPDNHDQLVPDNLEAWALAGPRGLFPKRTLVIWKRIGAGLVVTVALLPRMDGRWQCSCWAWFLLVLAVVAGDTVSTGSTDNSPTSNSLEGGTDATAFWWGEWTKWTACSRSCGGGVTSQERHCLQQRRKSVPGPGNRTCTGTSKRYQLCRVQECPPDGRSFREEQCVSFNSHVYNGRTHQWKPLYPDDYVHISSKPCDLHCTTVDGQRQLMVPARDGTSCKLTDLRGVCVSGKCEPIGCDGVLFSTHTLDKCGICQGDGSSCTHVTGNYRKGNAHLGYSLVTHIPAGARDIQIVERKKSADVLALADEAGYYFFNGNYKVDSPKNFNIAGTVVKYRRPMDVYETGIEYIVAQGPTNQGLNVMVWNQNGKSPSITFEYTLLQPPHESRPQPIYYGFSESAESQGLDGAGLMGFVPHNGSLYGQASSERLGLDNRLFGHPGLDMELGPSQGQETNEVCEQAGGGACEGPPRGKGFRDRNVTGTPLTGDKDDEEVDTHFASQEFFSANAISDQLLGAGSDLKDFTLNETVNSIFAQGAPRSSLAESFFVDYEENEGAGPYLLNGSYLELSSDRVANSSSEAPFPNVSTSLLTSAGNRTHKARTRPKARKQGVSPADMYRWKLSSHEPCSATCTTGVMSAYAMCVRYDGVEVDDSYCDALTRPEPVHEFCAGRECQPRWETSSWSECSRTCGEGYQFRVVRCWKMLSPGFDSSVYSDLCEAAEAVRPEERKTCRNPACGPQWEMSEWSECTAKCGERSVVTRDIRCSEDEKLCDPNTRPVGEKNCTGPPCDRQWTVSDWGPCSGSCGQGRTIRHVYCKTSDGRVVPESQCQMETKPLAIHPCGDKNCPAHWLAQDWERCNTTCGRGVKKRLVLCMELANGKPQTRSGPECGLAKKPPEESTCFERPCFKWYTSPWSECTKTCGVGVRMRDVKCYQGTDIVRGCDPLVKPVGRQACDLQPCPTEPPDDSCQDQPGTNCALAIKVNLCGHWYYSKACCRSCRPPHS

SEQ ID NO: 386 - protein, 1691 aa, Homo sapiens
MASWTSPWWVLIGMVFMHSPLPQTTAEKSPGAYFLPEFALSPQGSFLEDTTGEQFLTYRYDDQTSRNTRSDEDKDGNWDAWGDWSDCSRTCGGGASYSLRRCLTGRNCEGQNIRYKTCSNHDCPPDAEDFRAQQCSAYNDVQYQGHYYEWLPRYNDPAAPCALKCHAQGQNLVVELAPKVLDGTRCNTDSLDMCISGICQAVGCDRQLGSNAKEDNCGVCAGDGSTCRLVRGQSKSHVSPEKREENVIAVPLGSRSVRITVKGPAHLFIESKTLQGSKGEHSFNSPGVFLVENTTVEFQRGSERQTFKIPGPLMADFIFKTRYTAAKDSVVQFFFYQPISHQWRQTDFFPCTVTCGGGYQLNSAECVDIRLKRVVPDHYCHYYPENVKPKPKLKECSMDPCPSSDGFKEIMPYDHFQPLPRWEHNPWTACSVSCGGGIQRRSFVCVEESMHGEILQVEEWKCMYAPKPKVMQTCNLFDCPKWIAMEWSQCTVTCGRGLRYRVVLCINHRGEHVGGCNPQLKLHIKEECVIPIPCYKPKEKSPVEAKLPWLKQAQELEETRIATEEPTFIPEPWSACSTTCGPGVQVREVKCRVLLTFTQTETELPEEECEGPKLPTERPCLLEACDESPASRELDIPLPEDSETTYDWEYAGFTPCTATCVGGHQEAIAVCLHIQTQQTVNDSLCDMVHRPPAMSQACNTEPCPPRWHVGSWGPCSATCGVGIQTRDVYCLHPGETPAPPEECRDEKPHALQACNQFDCPPGWHIEEWQQCSRTCGGGTQNRRVTCRQLLTDGSFLNLSDELCQGPKASSHKSCARTDCPPHLAVGDWSKCSVSCGVGIQRRKQVCQRLAAKGRRIPLSEMMCRDLPGLPLVRSCQMPECSKIKSEMKTKLGEQGPQILSVQRVYIQTREEKRINLTIGSRAYLLPNTSVIIKCPVRRFQKSLIQWEKDGRCLQNSKRLGITKSGSLKIHGLAAPDIGVYRCIAGSAQETVVLKLIGTDNRLIARPALREPMREYPGMDHSEANSLGVTWHKMRQMWNNKNDLYLDDDHISNQPFLRALLGHCSNSAGSTNSWELKNKQFEAAVKQGAYSMDTAQFDELIRNMSQLMETGEVSDDLASQLIYQLVAELAKAQPTHMQWRGIQEETPPAAQLRGETGSVSQSSHAKNSGKLTFKPKGPVLMRQSQPPSISFNKTINSRIGNTVYITKRTEVINILCDLITPSEATYTWTKDGTLLQPSVKIILDGTGKIQIQNPTRKEQGIYECSVANHLGSDVESSSVLYAEAPVILSVERNITKPEHNHLSVVVGGIVEAALGANVTIRCPVKGVPQPNITWLKRGGSLSGNVSLLFNGSLLLQNVSLENEGTYVCIATNALGKAVATSVLHLLERRWPESRIVFLQGHKKYILQATNTRTNSNDPTGEPPPQEPFWEPGNWSHCSATCGHLGARIQRPQCVMANGQEVSEALCDHLQKPLAGFEPCNIRDCPARWFTSVWSQCSVSCGEGYHSRQVTCKRTKANGTVQVVSPRACAPKDRPLGRKPCFGHPCVQWEPGNRCPGRCMGRAVRMQQRHTACQHNSSDSNCDDRKRPTLRRNCTSGACDVCWHTGPWKPCTAACGRGFQSRKVDCIHTRSCKPVAKRHCVQKKKPISWRHCLGPSCDRDCTDTTHYCMFVKHLNLCSLDRYKQRCCQSCQEG

SEQ ID NO: 387 - protein, 1682 aa, Homo sapiens
MASWTSPWWVLIGMVFMHSPLPQTTAEKSPGAYFLPEFALSPQGSFLEDTTGEQFLTYRYDDQTSRNTRSDEDKDGNWDAWGDWSDCSRTCGGGASYSLRRCLTGRNCEGQNIRYKTCSNHDCPPDAEDFRAQQCSAYNDVQYQGHYYEWLPRYNDPAAPCALKCHAQGQNLVVELAPKVLDGTRCNTDSLDMCISGICQAVGCDRQLGSNAKEDNCGVCAGDGSTCRLVRGQSKSHVSPEKREENVIAVPLGSRSVRITVKGPAHLFIESKTLQGSKGEHSFNSPGVFLVENTTVEFQRGSERQTFKIPGPLMADFIFKTRYTAAKDSVVQFFFYQPISHQWRQTDFFPCTVTCGGGYQLNSAECVDIRLKRVVPDHYCHYYPENVKPKPKLKECSMDPCPSSDGFKEIMPYDHFQPLPRWEHNPWTACSVSCGGGIQRRSFVCVEESMHGEILQVEEWKCMYAPKPKVMQTCNLFDCPKWIAMEWSQCTVTCGRGLRYRVVLCINHRGEHVGGCNPQLKLHIKEECVIPIPCYKPKEKSPVEAKLPWLKQAQELEETRIATEEPTFIPEPWSACSTTCGPGVQVREVKCRVLLTFTQTETELPEEECEGPKLPTERPCLLEACDESPASRELDIPLPEDSETTYDWEYAGFTPCTATCVGGHQEAIAVCLHIQTQQTVNDSLCDMVHRPPAMSQACNTEPCPPRWHVGSWGPCSATCGVGIQTRDVYCLHPGETPAPPEECRDEKPHALQACNQFDCPPGWHIEEWQQCSRTCGGGTQNRRVTCRQLLTDGSFLNLSDELCQGPKASSHKSCARTDCPPHLAVGDWSKCSVSCGVGIQRRKQVCQRLAAKGRRIPLSEMMCRDLPGLPLVRSCQMPECSKIKSEMKTKLGEQGPQILSVQRVYIQTREEKRINLTIGSRAYLLPNTSVIIKCPVRRFQKSLIQWEKDGRCLQNSKRLGITKSGSLKIHGLAAPDIGVYRCIAGSAQETVVLKLIGTDNRLIARPALREPMREYPGMDHSEANSLGVTWHKMRQMWNNKNDLYLDDDHISNQPFLRALLGHCSNSAGSTNSWELKNKQFEAAVKQGAYSMDTAQFDELIRNMSQLMETGEVSDDLASQLIYQLVAELAKAQPTHMQWRGIQEETPPAAQLRGETGSVSQSSHAKNSGKLTFKPKGPVLMRQSQPPSISFNKTINSRIGNTVYITKRTEVINILCDLITPSEATYTWTKDGTLLQPSVKIILDGTGKIQIQNPTRKEQGIYECSVANHLGSDVESSSVLYAEAPVILSVERNITKPEHNHLSVVVGGIVEAALGANVTIRCPVKGVPQPNITWLKRGGSLSGNVSLLFNGSLLLQNVSLENEGTYVCIATNALGKAVATSVLHLLERRWPESRIVFLQGHKKYILQATNTRTNSNDPTGEPPPQEPFWEPGNWSHCSATCGHLGARIQRPQCVMANGQEVSEALCDHLQKPLAGFEPCNIRDCPARWFTSVWSQCSVSCGEGYHSRQVTCKRTKANGTVQVVSPRACAPKDRPLGRKPCFGHPCVQWEPGNRCPGRCMGRAVRMQQRHTACQHNSSDSNCDDRKRPTLRRNCTSGACDVCWHTGPWKPCTAACGRGFQSRKVDCIHTRSCKPVAKRHCVQKKKPISWRHCLGPSCDSTYTSQTATNKGAASHVKRDKPLEGS

SEQ ID NO: 388 - protein, 1074 aa, Homo sapiens
MENWTGRPWLYLLLLLSLPQLCLDQEVLSGHSLQTPTEEGQGPEGVWGPWVQWASCSQPCGVGVQRRSRTCQLPTVQLHPSLPLPPRPPRHPEALLPRGQGPRPQTSPETLPLYRTQSRGRGGPLRGPASHLGREETQEIRAARRSRLRDPIKPGMFGYGRVPFALPLHRNRRHPRSPPRSELSLISSRGEEAIPSPTPRAEPFSANGSPQTELPPTELSVHTPSPQAEPLSPETAQTEVAPRTRPAPLRHHPRAQASGTEPPSPTHSLGEGGFFRASPQPRRPSSQGWASPQVAGRRPDPFPSVPRGRGQQGQGPWGTGGTPHGPRLEPDPQHPGAWLPLLSNGPHASSLWSLFAPSSPIPRCSGESEQLRACSQAPCPPEQPDPRALQCAAFNSQEFMGQLYQWEPFTEVQGSQRCELNCRPRGFRFYVRHTEKVQDGTLCQPGAPDICVAGRCLSPGCDGILGSGRRPDGCGVCGGDDSTCRLVSGNLTDRGGPLGYQKILWIPAGALRLQIAQLRPSSNYLALRGPGGRSIINGNWAVDPPGSYRAGGTVFRYNRPPREEGKGESLSAEGPTTQPVDVYMIFQEENPGVFYQYVISSPPPILENPTPEPPVPQLQPEILRVEPPLAPAPRPARTPGTLQRQVRIPQMPAPPHPRTPLGSPAAYWKRVGHSACSASCGKGVWRPIFLCISRESGEELDERSCAAGARPPASPEPCHGTPCPPYWEAGEWTSCSRSCGPGTQHRQLQCRQEFGGGGSSVPPERCGHLPRPNITQSCQLRLCGHWEVGSPWSQCSVRCGRGQRSRQVRCVGNNGDEVSEQECASGPPQPPSREACDMGPCTTAWFHSDWSSKCSAECGTGIQRRSVVCLGSGAALGPGQGEAGAGTGQSCPTGSRPPDMRACSLGPCERTWRWYTGPWGECSSECGSGTQRRDIICVSKLGTEFNVTSPSNCSHLPRPPALQPCQGQACQDRWFSTPWSPCSRSCQGGTQTREVQCLSTNQTLSTRCPPQLRPSRKRPCNSQPCSQRPDDQCKDSSPHCPLVVQARLCVYPYYTATCCRSCAHVLERSPQDPS

SEQ ID NO: 389 - protein, 1097 aa, Homo sapiens
MENWTGRPWLYLLLLLSLPQLCLDQEVLSGHSLQTPTEEGQGPEGVWGPWVQWASCSQPCGVGVQRRSRTCQLPTVQLHPSLPLPPRPPRHPEALLPRGQGPRPQTSPETLPLYRTQSRGRGGPLRGPASHLGREETQEIRAARRSRLRDPIKPGMFGYGRVPFALPLHRNRRHPRSPPRSELSLISSRGEEAIPSPTPRAEPFSANGSPQTELPPTELSVHTPSPQAEPLSPETAQTEVAPRTRPAPLRHHPRAQASGTEPPSPTHSLGEGGFFRASPQPRRPSSQGWASPQVAGRRPDPFPSVPRGRGQQGQGPWGTGGTPHGPRLEPDPQHPGAWLPLLSNGPHASSLWSLFAPSSPIPRCSGESEQLRACSQAPCPPEQPDPRALQCAAFNSQEFMGQLYQWEPFTEAPLLPLRHAFFLLPGAGSGDSTGVQGSQRCELNCRPRGFRFYVRHTEKVQDGTLCQPGAPDICVAGRCLSPGCDGILGSGRRPDGCGVCGGDDSTCRLVSGNLTDRGGPLGYQKILWIPAGALRLQIAQLRPSSNYLALRGPGGRSIINGNWAVDPPGSYRAGGTVFRYNRPPREEGKGESLSAEGPTTQPVDVYMIFQEENPGVFYQYVISSPPPILENPTPEPPVPQLQPEILRVEPPLAPAPRPARTPGTLQRQVRIPQMPAPPHPRTPLGSPAAYWKRVGHSACSASCGKGVWRPIFLCISRESGEELDERSCAAGARPPASPEPCHGTPCPPYWEAGEWTSCSRSCGPGTQHRQLQCRQEFGGGGSSVPPERCGHLPRPNITQSCQLRLCGHWEVGSPWSQCSVRCGRGQRSRQVRCVGNNGDEVSEQECASGPPQPPSREACDMGPCTTAWFHSDWSSKCSAECGTGIQRRSVVCLGSGAALGPGQGEAGAGTGQSCPTGSRPPDMRACSLGPCERTWRWYTGPWGECSSECGSGTQRRDIICVSKLGTEFNVTSPSNCSHLPRPPALQPCQGQACQDRWFSTPWSPCSRSCQGGTQTREVQCLSTNQTLSTRCPPQLRPSRKRPCNSQPCSQRPDDQCKDSSPHCPLVVQARLCVYPYYTATCCRSCAHVLERSPQDPS

SEQ ID NO: 390 - protein, 1074 aa, Homo sapiens; identical to SEQ ID NO: 388

SEQ ID NO: 391 - protein, 877 aa, Homo sapiens
MENWTGRPWLYLLLLLSLPQLCLDQEVLSGHSLQTPTEEGQGPEGVWGPWVQWASCSQPCGVGVQRRSRTCQLPTVQLHPSLPLPPRPPRHPEALLPRGQGPRPQTSPETLPLYRTQSRGRGGPLRGPASHLGREETQEIRAARRSRLRDPIKPGMFGYGRVPFALPLHRNRRHPRSPPRSELSLISSRGEEAIPSPTPRAEPFSANGSPQTELPPTELSVHTPSPQAEPLSPETAQTEVAPRTRPAPLRHHPRAQASGTEPPSPTHSLGEGGFFRASPQPRRPSSQGWASPQVAGRRPDPFPSVPRGRGQQGQGPWGTGGTPHGPRLEPDPQHPGAWLPLLSNGPHASSLWSLFAPSSPIPRCSGESEQLRACSQAPCPPEQPDPRALQCAAFNSQEFMGQLYQWEPFTEVQGSQRCELNCRPRGFRFYVRHTEKVQDGTLCQPGAPDICVAGRCLSPGCDGILGSGRRPDGCGVCGGDDSTCRLVSGNLTDRGGPLGYQKILWIPAGALRLQIAQLRPSSNYLALRGPGGRSIINGNWAVDPPGSYRAGGTVFRYNRPPREEGKGESLSAEGPTTQPVDVYMIFQEENPGVFYQYVISSPPPILENPTPEPPVPQLQPEILRVEPPLAPAPRPARTPGTLQRQVRIPQMPAPPHPRTPLGSPAAYWKRVGHSACSASCGKGVWRPIFLCISRESGEELDERSCAAGARPPASPEPCHGTPCPPYWEAGEWTSCSRSCGPGTQHRQLQCRQEFGGGGSSVPPERCGHLPRPNITQSCQLRLCGHWEVGSPWSQCSVRCGRGQRSRQVRCVGNNGDEVSEQECASGPPQPPSREACDMGPCTTAWFHSDWSSKVSPEPPAISCILGNHAQDTSAFPA

SEQ ID NO: 392 - protein, 471 aa, Homo sapiens
MDSAPLFPRPHLFQNLLLFLWALLNCGLGVSAQGPGEWTPWVSWTRCSSSCGRGVSVRSRRCLRLPGEEPCWGDSHEYRLCQLPDCPPGAVPFRDLQCALYNGRPVLGTQKTYQWVPFHGAPNQCDLNCLAEGHAFYHSFGRVLDGTACSPGAQGVCVAGRCLSAGCDGLLGSGALEDRCGRCGGANDSCLFVQRVFRDAGAFAGYWNVTLIPEGARHIRVEHRSRNHLALMGGDGRYVLNGHWVVSPPGTYEAAGTHVVYTRDTGPQETLQAAGPTSHDLLLQVLLQEPNPGIEFEFWLPRERYSPFQARVQALGWPLRQPQPRGVEPQPPAAPAVTPAQTPTLAPDPCPPCPDTRGRAHRLLHYCGSDFVFQARVLGHHHQAQETRYEVRIQLVYKNRSPLRAREYVWAPGHCPCPMLAPHRDYLMAVQRLVSPDGTQDQLLLPHAGYARPWSPAEDSRIRLTARRCPG

SEQ ID NO: 393 - protein, 131 aa, Homo sapiens
MGGDGRYVLNGHWVVSPPGTYEAAGTHVVYTRDTGPQETLQAAGPTSHDLLLQVLLQEPNPGIEFEFWLPRERYSPFQARVQALGWPLRQPQPRGVEPQPPAAPAVTPAQTPTLAPGPSAGPPPPGPGDPL

SEQ ID NO: 394 - protein, 130 aa, Homo sapiens
MGKLRPGRVEWLASGHTERPHLFQNLLLFLWALLNCGLGVSAQGPGEWTPWVSWTRCSSSCGRGVSVRSRRCLRLPGEEPCWGDSHEYRLCQLPDCPPGAVPFRDLQCALYNGRPVLGTQKTYQWVPFHG

SEQ ID NO: 395 - protein, 141 aa, Homo sapiens
MGKLRPGRVEWLASGHTERPHLFQNLLLFLWALLNCGLGVSAQGPGEWTPWVSWTRCSSSCGRGVSVRSRRCLRLPGEEPCWGDSHEYRLCQLPDCPPGAVPFRDLQCALYNGRPVLGTQKTYQWVPFHGAPNQCDLNCLA

SEQ ID NO: 396 - protein, 210 aa, Homo sapiens
MGKLRPGRVEWLASGHTERPHLFQNLLLFLWALLNCGLGVSAQGPGEWTPWVSWTRCSSSCGRGVSVRSRRCLRLPGEEPCWGDSHEYRLCQLPDCPPGAVPFRDLQCALYNGRPVLGTQKTYQWVPFHGAPNQCDLNCLAEGHAFYHSFGRVLDGTACSPGAQGVCVAGRCLSAGCDGLLGSGALEDRCGRCGGANDSCLFVQRVFRDA

SEQ ID NO: 397 - protein, 135 aa, Homo sapiens
RHIRVEHRSRNHLGILGSLMGGDGRYVLNGHWVVSPPGTYEAAGTHVVYTRDTGPQETLQAAGPTSHDLLLQVLLQEPNPGIEFEFWLPRERYSPFQARVQALGWPLRQPQPRGVEPQPPAAPAVTPAQTPTLAP

SEQ ID NO: 398 - protein, 455 aa, Homo sapiens
MARKALKLASWTSMALAASGIYFYSNKYLDPNDFGAVRVGRAVATTAVISYDYLTSLKSVPYGSEEYLQLRSKIHDLFQSFDDTPLGTASLAQVHKAVLHDGRTVAVKVQHPKVRAQSSKDILLMEVLVLAVKQLFPEFEFMWLVDEAKKNLPLELDFLNEGRNAEKVSQMLRHFDFLKVPRIHWDLSTERVLLMEFVDGGQVNDRDYMERNKIDVNEISRHLGKMYSEMIFVNGFVHCDPHPGNVLVRKHPGTGKAEIVLLDHGLYQMLTEEFRLNYCHLWQSLIWTDMKRVKEYSQRLGAGDLYPLFACMLTARSWDSVNRGISQAPVTATEDLEIRNNAANYLPQISHLLNHVPRQMLLILKTNDLLRGIEAALGTRASASSFLNMSRCCIRALAEHKKKNTCSFFRRTQISFSEAFNLWQINLHELILRVKGLKLADRVLALICWLFPAPL

SEQ ID NO: 399 - protein, 122 aa, Homo sapiens
MARKALKLASWTSMALAASGIYFYSNKYLDPNDFGAVRVGRAVATTAVISYDYLTSLKSVPYGSEEYLQLRSKSLAVSPRLECIGVISAHCNLYLLGSSDSPASASQVAGTTGAPSLCQASL

SEQ ID NO: 400 - protein, 266 aa, Homo sapiens
MARKALKLASWTSMALAASGIYFYSNKYLDPNDFGAVRVGRAVATTAVISYDYLTSLKSVPYGSEEYLQLRSKVHLRSARRLCELCCANRGTFIKVGQHLGALDYLLPEEYTSTLKVLHSQAPQSSMQEIRQVIREDLGKEIHDLFQSFDDTPLGTASLAQVHKAVLHDGRTVAVKVQHPKVRAQSSKDILLMEVLVLAVKQLFPEFEFMWLVDEAKKNLPLELDFLNEGRNAEKVSQMLRHFDFLKISRHLGKMYSEMIFVNGFV

SEQ ID NO: 401 - protein, 523 aa, Homo sapiens
MARKALKLASWTSMALAASGIYFYSNKYLDPNDFGAVRVGRAVATTAVISYDYLTSLKSVPYGSEEYLQLRSKVHLRSARRLCELCCANRGTFIKVGQHLGALDYLLPEEYTSTLKVLHSQAPQSSMQEIRQVIREDLGKEIHDLFQSFDDTPLGTASLAQVHKAVLHDGRTVAVKVQHPKVRAQSSKDILLMEVLVLAVKQLFPEFEFMWLVDEAKKNLPLELDFLNEGRNAEKVSQMLRHFDFLKVPRIHWDLSTERVLLMEFVDGGQVNDRDYMERNKIDVNEISRHLGKMYSEMIFVNGFVHCDPHPGNVLVRKHPGTGKAEIVLLDHGLYQMLTEEFRLNYCHLWQSLIWTDMKRVKEYSQRLGAGDLYPLFACMLTARSWDSVNRGISQAPVTATEDLEIRNNAANYLPQISHLLNHVPRQMLLILKTNDLLRGIEAALGTRASASSFLNMSRCCIRALAEHKKKNTCSFFRRTQISFSEAFNLWQINLHELILRVKGLKLADRVLALICWLFPAPL

SEQ ID NO: 402 - protein, 218 aa, Homo sapiens
MARKALKLASWTSMALAASGIYFYSNKYLDPNDFGAVRVGRAVATTAVISYDYLTSLKSVPYGSEEYLQLRSKVHLRSARRLCELCCANRGTFIKVGQHLGALDYLLPEEYTSTLKVLHSQAPQSSMQEIRQVIREDLGKEVLVLAVKQLFPEFEFMWLVDEAKKNLPLELDFLNEGRNAEKVSQMLRHFDFLKPGQQSETASQGTTTTTKKKWDRKL

SEQ ID NO: 403 - protein, 176 aa, Homo sapiens
MTMCSGARLALLVYGIIMHSSVYSSPAAAGLRFPGIRPEEEAYGEDGNPLPDFDGSEPPGAGSPASAPRAAAAWYRPAGRRDVAHGILNEAYRKVLDQLSAGKHLQSLVARGVGGSLGGGAGDDAEPLSKRHSDGIFTDSYSRYRKQMAVKKYLAAVLGKRYKQRVKNKGRRIAYL

SEQ ID NO: 404 - protein, 176 aa, Homo sapiens; identical to SEQ ID NO: 403

SEQ ID NO: 405 - protein, 74 aa, Homo sapiens
MAGVVHVSLAALLLLPMAPAMHSDCIFKKEQAMCLEKIQRANELMGFNDSSPGCPGMWDNITCWKPAHVGEMVL

SEQ ID NO: 406 - protein, 447 aa, Homo sapiens
MAGVVHVSLAALLLLPMAPAMHSDCIFKKEQAMCLEKIQRANELMGFNDSSPGCPGMWDNITCWKPAHVGEMVLVSCPELFRIFNPDQDMGVVSRNCTEDGWSEPFPHYFDACGFDEYESETGDQDYYYLSVKALYTVGYSTSLVTLTTAMVILCRFRKLHCTRNFIHMNLFVSFMLRAISVFIKDWILYAEQDSNHCFISTVECKAVMVFFHYCVVSNYFWLFIEGLYLFTLLVETFFPERRYFYWYTIIGWGTPTVCVTVWATLRLYFDDTGCWDMNDSTALWWVIKGPVVGSIMVNFVLFIGIIVILVQKLQSPDMGGNESSIYLRLARSTLLLIPLFGIHYTVFAFSPENVSKRERLVFELGLGSFQGFVVAVLYCFLNGEVQAEIKRKWRSWKVNRYFAVDFKHRHPSLASSGVNGGTQLSILSKSSSQIRMSGLPADNLAT

SEQ ID NO: 407 - protein, 468 aa, Homo sapiens
MAGVVHVSLAALLLLPMAPAMHSDCIFKKEQAMCLEKIQRANELMGFNDSSPGCPGMWDNITCWKPAHVGEMVLVSCPELFRIFNPDQVWETETIGESDFGDSNSLDLSDMGVVSRNCTEDGWSEPFPHYFDACGFDEYESETGDQDYYYLSVKALYTVGYSTSLVTLTTAMVILCRFRKLHCTRNFIHMNLFVSFMLRAISVFIKDWILYAEQDSNHCFISTVECKAVMVFFHYCVVSNYFWLFIEGLYLFTLLVETFFPERRYFYWYTIIGWGTPTVCVTVWATLRLYFDDTGCWDMNDSTALWWVIKGPVVGSIMVNFVLFIGIIVILVQKLQSPDMGGNESSIYLRLARSTLLLIPLFGIHYTVFAFSPENVSKRERLVFELGLGSFQGFVVAVLYCFLNGEVQAEIKRKWRSWKVNRYFAVDFKHRHPSLASSGVNGGTQLSILSKSSSQIRMSGLPADNLAT

SEQ ID NO: 408 - protein, 524 aa, Homo sapiens
MAGVVHVSLAALLLLPMAPAMHSDCIFKKEQAMCLEKIQRANELMGFNDSSPGCPGMWDNITCWKPAHVGEMVLVSCPELFRIFNPDQVWETETIGESDFGDSNSLDLSDMGVVSRNCTEDGWSEPFPHYFDACGFDEYESETGDQDYYYLSVKALYTVGYSTSLVTLTTAMVILCRFRKLHCTRNFIHMNLFVSFMLRAISVFIKDWILYAEQDSNHCFISTVECKAVMVFFHYCVVSNYFWLFIEGLYLFTLLVETFFPERRYFYWYTIIGWGTPTVCVTVWATLRLYFDDTGCWDMNDSTALWWVIKGPVVGSIMVNFVLFIGIIVILVQKLQSPDMGGNESSIYLTNLSPRVPKKAREDPLPVPSDQHSLPFLSCVQKCYCKPQRAQQHSCKMSELSTITLRLARSTLLLIPLFGIHYTVFAFSPENVSKRERLVFELGLGSFQGFVVAVLYCFLNGEVQAEIKRKWRSWKVNRYFAVDFKHRHPSLASSGVNGGTQLSILSKSSSQIRMSGLPADNLAT

SEQ ID NO: 409 - protein, 496 aa, Homo sapiens
MAGVVHVSLAALLLLPMAPAMHSDCIFKKEQAMCLEKIQRANELMGFNDSSPGCPGMWDNITCWKPAHVGEMVLVSCPELFRIFNPDQVWETETIGESDFGDSNSLDLSDMGVVSRNCTEDGWSEPFPHYFDACGFDEYESETGDQDYYYLSVKALYTVGYSTSLVTLTTAMVILCRFRKLHCTRNFIHMNLFVSFMLRAISVFIKDWILYAEQDSNHCFISTVECKAVMVFFHYCVVSNYFWLFIEGLYLFTLLVETFFPERRYFYWYTIIGWGTPTVCVTVWATLRLYFDDTGCWDMNDSTALWWVIKGPVVGSIMVNFVLFIGIIVILVQKLQSPDMGGNESSIYFSCVQKCYCKPQRAQQHSCKMSELSTITLRLARSTLLLIPLFGIHYTVFAFSPENVSKRERLVFELGLGSFQGFVVAVLYCFLNGEVQAEIKRKWRSWKVNRYFAVDFKHRHPSLASSGVNGGTQLSILSKSSSQIRMSGLPADNLAT

SEQ ID NO: 410 - protein, 496 aa, Homo sapiens; identical to SEQ ID NO: 409

SEQ ID NO: 411 - protein, 148 aa, Homo sapiens
  VARIANT 1: note = misc_feature - Xaa can be any naturally occurring amino acid
XATLRLYFDDTGCWDMNDSTALWWVIKGPVVGSIMVNFVLFIGIIVILVQKLQSPDMGGNESSIYLTNLSPRVPKKAREDPLPVPSDQHSLPFLRLARSTLLLIPLFGIHYTVFAFSPENVSKRERLVFELGLGSFQGFVVAVLYCFL

SEQ ID NO: 412 - protein, 97 aa, Homo sapiens
MASYIDQDMQVLWYQDGRIVETDESQGIFVEKNMIHNCSLIASALTISNIQAGSTGNWGCHVQTKRGNNTRTVDIVVLESSAQYCPPERVVNNKGDF

SEQ ID NO: 413 - protein, 1321 aa, Homo sapiens
MEPPGRRRGRAQPPLLLPLSLLALLALLGGGGGGGAAALPAGCKHDGRPRGAGRAAGAAEGKVVCSSLELAQVLPPDTLPNRTVTLILSNNKISELKNGSFSGLSLLERLDLRNNLISSIDPGAFWGLSSLKRLDLTNNRIGCLNADIFRGLTNLVRLNLSGNLFSSLSQGTFDYLASLRSLEFQTEYLLCDCNILWMHRWVKEKNITVRDTRCVYPKSLQAQPVTGVKQELLTCDPPLELPSFYMTPSHRQVVFEGDSLPFQCMASYIDQDMQVLWYQDGRIVETDESQGIFVEKNMIHNCSLIASALTISNIQAGSTGNWGCHVQTKRGNNTRTVDIVVLESSAQYCPPERVVNNKGDFRWPRTLAGITAYLQCTRNTHGSGIYPGNPQDERKAWRRCDRGGFWADDDYSRCQYANDVTRVLYMFNQMPLNLTNAVATARQLLAYTVEAANFSDKMDVIFVAEMIEKFGRFTKEEKSKELGDVMVDIASNIMLADERVLWLAQREAKACSRIVQCLQRIATYRLAGGAHVYSTYSPNIALEAYVIKSTGFTGMTCTVFQKVAASDRTGLSDYGRRDPEGNLDKQLSFKCNVSNTFSSLALKNTIVEASIQLPPSLFSPKQKRELRPTDDSLYKLQLIAFRNGKLFPATGNSTNLADDGKRRTVVTPVILTKIDGVNVDTHHIPVNVTLRRIAHGADAVAARWDFDLLNGQGGWKSDGCHILYSDENITTIQCYSLSNYAVLMDLTGSELYTQAASLLHPVVYTTAIILLLCLLAVIVSYIYHHSLIRISLKSWHMLVNLCFHIFLTCVVFVGGITQTRNASICQAVGIILHYSTLATVLWVGVTARNIYKQVTKKAKRCQDPDEPPPPPRPMLRFYLIGGGIPIIVCGITAAANIKNYGSRPNAPYCWMAWEPSLGAFYGPASFITFVNCMYFLSIFIQLKRHPERKYELKEPTEEQQRLAANENGEINHQDSMSLSLISTSALENEHTFHSQLLGASLTLLLYVALWMFGALAVSLYYPLDLVFSFVFGATSLSFSAFFVVHHCVNREDVRLAWIMTCCPGRSSYSVQVNVQPPNSNGTNGEAPKCPNSSAESSCTNKSASSFKNSSQGCKLTNLQAAAAQCHANSLPLNSTPQLDNSLTEHSMDNDIKMHVAPLEVQFRTNVHSSRHHKNRSKGHRASRLTVLREYAYDVPTSVEGSVQNGLPKSRLGNNEGHSRSRRAYLAYRERQYNPPQQDSSDACSTLPKSSRNFEKPVSTTSKKDALRKPAVVELENQQKSYGLNLAIQNGPIKSNGQEGPLLGTDSTGNVRTGLWKHETTV

SEQ ID NO: 414 - protein, 616 aa, Homo sapiens
MEPPGRRRGRAQPPLLLPLSLLALLALLGGGGGGGAAALPAGCKHDGRPRGAGRAAGAAEGKVVCSSLELAQVLPPDTLPNRTVTLILSNNKISELKNGSFSGLSLLERLDLRNNLISSIDPGAFWGLSSLKRLDLTNNRIGCLNADIFRGLTNLVRLNLSGNLFSSLSQGTFDYLASLRSLEFQTEYLLCDCNILWMHRWVKEKNITVRDTRCVYPKSLQAQPVTGVKQELLTCDPPLELPSFYMTPSHRQVVFEGDSLPFQCMASYIDQDMQVLWYQDGRIVETDESQGIFVEKNMIHNCSLIASALTISNIQAGSTGNWGCHVQTKRGNNTRTVDIVVLESSAQYCPPERVVNNKGDFRWPRTLAGITAYLQCTRNTHGSGIYPGNPQDERKAWRRCDRGGFWADDDYSRCQYANDVTRVLYMFNQMPLNLTNAVATARQLLAYTVEAANFSDKMDVIFVAEMIEKFGRFTKEEKSKELGDVMVDIASNIMLADERVLWLAQREAKACSRIVQCLQRIATYRLAGGAHVYSTYSPNIALEAYVIKSTGFTGMTCTVFQKVAASDRTGLSDYGRRDPEGNLDKQLSFKCNVSNTFSSLALKVCYILQSFKTIYS

SEQ ID NO: 415 - protein, 34 aa, Homo sapiens
MLRFYLIGGGIPIIVCGITAAANIKNYGSRPNAP

SEQ ID NO: 416 - protein, 381 aa, Homo sapiens
MPLKRNNSKYPPLELPSFYMTPSHRQVVFEGDSLPFQCMASYIDQDMQVLWYQDGRIVETDESQGIFVEKNMIHNCSLIASALTISNIQAGSTGNWGCHVQTKRGNNTRTVDIVVLESSAQYCPPERVVNNKGDFRWPRTLAGITAYLQCTRNTHGSGIYPGNPQDERKAWRRCDRGGFWADDDYSRCQYANDVTRVLYMFNQMPLNLTNAVATARQLLAYTVEAANFSDKMDVIFVAEMIEKFGRFTKEEKSKELGDVMVDIASNIMLADERVLWLAQREAKACSRIVQCLQRIATYRLAGGAHVYSTYSPNIALEAYVIKSTGFTGMTCTVFQKVAASDRTGLSDYGRRDPEGNLDKQLSFKCNVSNTFSSLALKGKFR

SEQ ID NO: 417 - protein, 847 aa, Homo sapiens
GKGHRMTPACPLLLSVILSLRLATAFDPAPSACSALASGVLYGAFSLQDLFPTIASGCSWTLENPDPTKYSLYLRFNRQEQVCAHFAPRLLPLDHYLVNFTCLRPSPEEAVAQAESEVGRPEEEEAEAAAGLELCSGSGPFTFLHFDKNFVQLCLSAEPSEAPRLLAPAALAFRFVEVLLINNNNSSQFTCGVLCRWSEECGRAAGRACGFAQPGCSCPGEAGAGSTTTTSPGPPAAHTLSNALVPGGPAPPAEADLHSGSSNDLFTTEMRYGEEPEEEPKVKTQWPRSADEPGLYMAQTGDPAAEEWSPWSVCSLTCGQGLQVRTRSCVSSPYGTLCSGPLRETRPCNNSATCPVEGQWLEWGPWGPCSTSCANGTQQRSRKCSVAGPAWATCTGALTDTRECSNLECPATDSKWGPWNAWSLCSKTCDTGWQRRFRMCQATGTQGYPCEGTGEEVKPCSEKRCPAFHEMCRDEYVMLMTWKKAAAGEIIYNKCPPNASGSASRRCLLSAQGVAYWGLPSFARCISHEYRYLYLSLREHLAKGQRMLAGEGMSQVVRSLQELLARRTYYSGDLLFSVDILRNVTDTFKRATYVPSADDVQRFFQVVSFMVDAENKEKWDDAQQVSPGSVHLLRVVEDFIHLVGDALKAFQSSLIVTDNLVISIQREPVSAVSSDITFPMRGRRGMKDWVRHSEDRLFLPKEVLSLSSPGKPATSGAAGSPGRGRGPGTVPPGPGHSHQRLLPADPDESSYFVIGAVLYRTLGLILPPPRPPLAVTSRVMTVTVRPPTQPPAEPLITVELSYIINGTTDPHCASWDYSRADASSGDWDTENCQTLETQAAHTRCQCQ

SEQ ID NO: 418 - protein, 1585 aa, Homo sapiens
MENTGWMGKGHRMTPACPLLLSVILSLRLATAFDPAPSACSALASGVLYGAFSLQDLFPTIASGCSWTLENPDPTKYSLYLRFNRQEQVCAHFAPRLLPLDHYLVNFTCLRPSPEEAVAQAESEVGRPEEEEAEAAAGLELCSGSGPFTFLHFDKNFVQLCLSAEPSEAPRLLAPAALAFRFVEVLLINNNNSSQFTCGVLCRWSEECGRAAGRACGFAQPGCSCPGEAGAGSTTTTSPGPPAAHTLSNALVPGGPAPPAEADLHSGSSNDLFTTEMRYGEEPEEEPKVKTQWPRSADEPGLYMAQTGDPAAEEWSPWSVCSLTCGQGLQVRTRSCVSSPYGTLCSGPLRETRPCNNSATCPVHGVWEEWGSWSLCSRSCGRGSRSRMRTCVPPQHGGKACEGPELQTKLCSMAACPVEGQWLEWGPWGPCSTSCANGTQQRSRKCSVAGPAWATCTGALTDTRECSNLECPATDSKWGPWNAWSLCSKTCDTGWQRRFRMCQATGTQGYPCEGTGEEVKPCSEKRCPAFHEMCRDEYVMLMTWKKAAAGEIIYNKCPPNASGSASRRCLLSAQGVAYWGLPSFARCISHEYRYLYLSLREHLAKGQRMLAGEGMSQVVRSLQELLARRTYYSGDLLFSVDILRNVTDTFKRATYVPSADDVQRFFQVVSFMVDAENKEKWDDAQQVSPGSVHLLRVVEDFIHLVGDALKAFQSSLIVTDNLVISIQREPVSAVSSDITFPMRGRRGMKDWVRHSEDRLFLPKEVLSLSSPGKPATSGAAGSPGRGRGPGTVPPGPGHSHQRLLPADPDESSYFVIGAVLYRTLGLILPPPRPPLAVTSRVMTVTVRPPTQPPAEPLITVELSYIINGTTDPHCASWDYSRADASSGDWDTENCQTLETQAAHTRCQCQHLSTFAVLAQPPKDLTLELAGSPSVPLVIGCAVSCMALLTLLAIYAAFWRFIKSERSIILLNFCLSILASNILILVGQSRVLSKGVCTMTAAFLHFFFLSSFCWVLTEAWQSYLAVIGRMRTRLVRKRFLCLGWGLPALVVAVSVGFTRTKGYGTSSYCWLSLEGGLLYAFVGPAAVIVLVNMLIGIIVFNKLMARDGISDKSKKQRAGSERCPWASLLLPCSACGAVPSPLLSSASARNAMASLWSSCVVLPLLALTWMSAVLAMTDRRSVLFQALFAVFNSAQGFVITAVHCFLRREVQDVVKCQMGVCRADESEDSPDSCKNGQLQILSDFEKDVDLACQTVLFKEVNTCNPSTITGTLSRLSLDEDEEPKSCLVGPEGSLSFSPLPGNILVPMAASPGLGEPPPPQEANPVYMCGEGGLRQLDLTWLRPTEPGSEGDYMVLPRRTLSLQPGGGGGGGEDAPRARPEGTPRRAAKTVAHTEGYPSFLSVDHSGLGLGPAYGSLQNPYGMTFQPPPPTPSARQVPEPGERSRTMPRTVPGSTMKMGSLERKKLRYSDLDFEKVMHTRKRHSELYHELNQKFHTFDRYRSQSTAKREKRWSVSSGGAAERSVCTDKPSPGERPSLSQHRRHQSWSTFKSMTLGSLPPKPRERLTLHRAAAWEPTEPPDGDFQTEV

SEQ ID NO: 419 - protein, 1584 aa, Homo sapiens
MENTGWMGKGHRMTPACPLLLSVILSLRLATAFDPAPSACSALASGVLYGAFSLQDLFPTIASGCSWTLENPDPTKYSLYLRFNRQEQVCAHFAPRLLPLDHYLVNFTCLRPSPEEAVAQAESEVGRPEEEEAEAAAGLELCSGSGPFTFLHFDKNFVQLCLSAEPSEAPRLLAPAALAFRFVEVLLINNNNSSQFTCGVLCRWSEECGRAAGRACGFAQPGCSCPGEAGAGSTTTTSPGPPAAHTLSNALVPGGPAPPAEADLHSGSSNDLFTTEMRYGEEPEEEPKVKTQWPRSADEPGLYMAQTGDPAAEEWSPWSVCSLTCGQGLQVRTRSCVSSPYGTLCSGPLRETRPCNNSATCPVHGVWEEWGSWSLCSRSCGRGSRSRMRTCVPPQHGGKACEGPELQTKLCSMAACPVEGQWLEWGPWGPCSTSCANGTQQRSRKCSVAGPAWATCTGALTDTRECSNLECPATDSKWGPWNAWSLCSKTCDTGWQRRFRMCQATGTQGYPCEGTGEEVKPCSEKRCPAFHEMCRDEYVMLMTWKKAAAGEIIYNKCPPNASGSASRRCLLSAQGVAYWGLPSFARCISHEYRYLYLSLREHLAKGQRMLAGEGMSQVVRSLQELLARRTYYSGDLLFSVDILRNVTDTFKRATYVPSADDVQRFFQVVSFMVDAENKEKWDDAQQVSPGSVHLLRVVEDFIHLVGDALKAFQSSLIVTDNLVISIQREPVSAVSSDITFPMRGRRGMKDWVRHSEDRLFLPKEVLSLSSPGKPATSGAAGSPGRGRGPGTVPPGPGHSHQRLLPADPDESSYFVIGAVLYRTLGLILPPPRPPLAVTSRVMTVTVRPPTQPPAEPLITVELSYIINGTTDPHCASWDYSRADASSGDWDTENCQTLETQAAHTRCQCQHLSTFAVLAQPPKDLTLELAGSPSVPLVIGCAVSCMALLTLLAIYAAFWRFIKSERSIILLNFCLSILASNILILVGQSRVLSKGVCTMTAAFLHFFFLSSFCWVLTEAWQSYLAVIGRMRTRLVRKRFLCLGWGLPALVVAVSVGFTRTKGYGTSSYCWLSLEGGLLYAFVGPAAVIVLVNMLIGIIVFNKLMARDGISDKSKKQRAGSERCPWASLLLPCSACGAVPSPLLSSASARNAMASLWSSCVVLPLLALTWMSAVLAMTDRRSVLFQALFAVFNSAQGFVITAVHCFLRREVQDVVKCQMGVCRADESEDSPDSCKNGQLQILSDFEKDVDLACQTVLFKEVNTCNPSTITGTLSRLSLDEDEEPKSCLVGPEGSLSFSPLPGNILVPMAASPGLGEPPPPQEANPVYMCGEGGLRQLDLTWLRPTEPGSEGDYMVLPRRTLSLQPGGGGGGGEDAPRARPEGTPRRAAKTVAHTEGYPSFLSVDHSGLGLGPAYGSLQNPYGMTFQPPPPTPSARQVPEPGERSRTMPRTVPGSTMKMGSLERKKLRYSDLDFEVMHTRKRHSELYHELNQKFHTFDRYRSQSTAKREKRWSVSSGGAAERSVCTDKPSPGERPSLSQHRRHQSWSTFKSMTLGSLPPKPRERLTLHRAAAWEPTEPPDGDFQTEV

SEQ ID NO: 420 - protein, 1551 aa, Homo sapiens
MENTGWMGKGHRMTPACPLLLSVILSLRLATAFDPAPSACSALASGVLYGAFSLQDLFPTIASGCSWTLENPDPTKYSLYLRFNRQEQVCAHFAPRLLPLDHYLVNFTCLRPSPEEAVAQAESEVGRPEEEEAEAAAGLELCSGSGPFTFLHFDKNFVQLCLSAEPSEAPRLLAPAALAFRFVEVLLINNNNSSQFTCGVLCRWSEECGRAAGRACGFAQPGCSCPGEAGAGSTTTTSPGPPAAHTLSNALVPGGPAPPAEADLHSGSSNDLFTTEMRYGEEPEEEPKVKTQWPRSADEPGLYMAQTGDPAAEEWSPWSVCSLTCGQGLQVRTRSCVSSPYGTLCSGPLRETRPCNNSATCPVHGVWEEWGSWSLCSRSCGRGSRSRMRTCVPPQHGGKACEGPELQTKLCSMAACPVEGQWLEWGPWGPCSTSCANGTQQRSRKCSVAGPAWATCTGALTDTRECSNLECPATDSKWGPWNAWSLCSKTCDTGWQRRFRMCQATGTQGYPCEGTGEEVKPCSEKRCPAFHEMCRDEYVMLMTWKKAAAGEIIYNKCPPNASGSASRRCLLSAQGVAYWGLPSFARCISHEYRYLYLSLREHLAKGQRMLAGEGMSQVVRSLQELLARRTYYSGDLLFSVDILRNVTDTFKRATYVPSADDVQRFFQVVSFMVDAENKEKWDDAQQVSPGSVHLLRVVEDFIHLVGDALKAFQSSLIVTDNLVISIQREPVSAVSSDITFPMRGRRGMKDWVRHSEDRLFLPKEVLSLSSPGKPATSGAAGSPGRGRGPGTVPPGPGHSHQRLLPADPDESSYFVIGAVLYRTLGLILPPPRPPLAVTSRVMTVTVRPPTQPPAEPLITVELSYIINGTTDPHCASWDYSRADASSGDWDTENCQTLETQAAHTRCQCQHLSTFAVLAQPPKDLTLELAGSPSVPLVIGCAVSCMALLTLLAIYAAFWRFIKSERSIILLNFCLSILASNILILVGQSRVLSKGVCTMTAAFLHFFFLSSFCWVLTEAWQSYLAVIGRMRTRLVRKRFLCLGWGLPALVVAVSVGFTRTKGYGTSSYCWLSLEGGLLYAFVGPAAVIVLVNMLIGIIVFNKLMARDGISDKSKKQRAGASLWSSCVVLPLLALTWMSAVLAMTDRRSVLFQALFAVFNSAQGFVITAVHCFLRREVQDVVKCQMGVCRADESEDSPDSCKNGQLQILSDFEKDVDLACQTVLFKEVNTCNPSTITGTLSRLSLDEDEEPKSCLVGPEGSLSFSPLPGNILVPMAASPGLGEPPPPQEANPVYMCGEGGLRQLDLTWLRPTEPGSEGDYMVLPRRTLSLQPGGGGGGGEDAPRARPEGTPRRAAKTVAHTEGYPSFLSVDHSGLGLGPAYGSLQNPYGMTFQPPPPTPSARQVPEPGERSRTMPRTVPGSTMKMGSLERKKLRYSDLDFEVMHTRKRHSELYHELNQKFHTFDRYRSQSTAKREKRWSVSSGGAAERSVCTDKPSPGERPSLSQHRRHQSWSTFKSMTLGSLPPKPRERLTLHRAAAWEPTEPPDGDFQTEV

SEQ ID NO: 421 - protein, 507 aa, Homo sapiens
MHLPRQHGSAHLGHLYAYAKFSAHDWHLHAQGHAICNAHGKGKGHRMTPACPLLLSVILSLRLATAFDPAPSACSALASGVLYGAFSLQDLFPTIASGCSWTLENPDPTKYSLYLRFNRQEQVCAHFAPRLLPLDHYLVNFTCLRPSPEEAVAQAESEVGRPEEEEAEAAAGLELCSGSGPFTFLHFDKNFVQLCLSAEPSEAPRLLAPAALAFRFVEVLLINNNNSSQFTCGVLCRWSEECGRAAGRACGFAQPGCSCPGEAGAGSTTTTSPGPPAAHTLSNALVPGGPAPPAEADLHSGSSNDLFTTEMRYGEEPEEEPKVKTQWPRSADEPGLYMAQTVHGVWEEWGSWSLCSRSCGRGSRSRMRTCVPPQHGGKACEGPELQTKLCSMAACPVEGQWLEWGPWGPCSTSCANGTQQRSRKCSVAGPAWATCTGALTDTRECSNLECPATDSKWGPWNAWSLCSKTCDTGWQRRFRMCQATGTQGYPCEGTGEEVKPCSEKRCP

SEQ ID NO: 422 - protein, 1500 aa, Homo sapiens
MLSLRGPDTHGKGHRMTPACPLLLSVILSLRLATAFDPAPSACSALASGVLYGAFSLQDLFPTIASGCSWTLENPDPTKYSLYLRFNRQEQVCAHFAPRLLPLDHYLVNFTCLRPSPEEAVAQAESEVGRPEEEEAEAAAGLELCSGSGPFTFLHFDKNFVQLCLSAEPSEAPRLLAPAALAFRFVEVLLINNNNSSQFTCGVLCRWSEECGRAAGRACGFAQPGCSCPGEAGAGSTTTTSPGPPAAHTLSNALVPGGPAPPAEADLHSGSSNDLFTTEMRYGEEPEEEPKVKTQWPRSADEPGLYMAQTVHGVWEEWGSWSLCSRSCGRGSRSRMRTCVPPQHGGKACEGPELQTKLCSMAACPVEGQWLEWGPWGPCSTSCANGTQQRSRKCSVAGPAWATCTGALTDTRECSNLECPATDSKWGPWNAWSLCSKTCDTGWQRRFRMCQATGTQGYPCEGTGEEVKPCSEKRCPAFHEMCRDEYVMLMTWKKAAAGEIIYNKCPPNASGSASRRCLLSAQGVAYWGLPSFARCISHEYRYLYLSLREHLAKGQRMLAGEGMSQVVRSLQELLARRTYYSGDLLFSVDILRNVTDTFKRATYVPSADDVQRFFQVVSFMVDAENKEKWDDAQQVSPGSVHLLRVVEDFIHLVGDALKAFQSSLIVTDNLVISIQREPVSAVSSDITFPMRGRRGMKDWVRHSEDRLFLPKEVLSLSSPGKPATSGAAGSPGRGRGPGTVPPGPGHSHQRLLPADPDESSYFVIGAVLYRTLGLILPPPRPPLAVTSRVMTVTVRPPTQPPAEPLITVELSYIINGTTDPHCASWDYSRADASSGDWDTENCQTLETQAAHTRCQCQHLSTFAVLAQPPKDLTLELAGSPSVPLVIGCAVSCMALLTLLAIYAAFWRFIKSERSIILLNFCLSILASNILILVGQSRVLSKGVCTMTAAFLHFFFLSSFCWVLTEAWQSYLAVIGRMRTRLVRKRFLCLGWGLPALVVAVSVGFTRTKGYGTSSYCWLSLEGGLLYAFVGPAAVIVLVNMLIGIIVFNKLMARDGISDKSKKQRAGASLWSSCVVLPLLALTWMSAVLAMTDRRSVLFQALFAVFNSAQGFVITAVHCFLRREVQDVVKCQMGVCRADESEDSPDSCKNGQLQILSDFEKDVDLACQTVLFKEVNTCNPSTITGTLSRLSLDEDEEPKSCLVGPEGSLSFSPLPGNILVPMAASPGLGEPPPPQEANPVYMCGEGGLRQLDLTWLRPTEPGSEGDYMVLPRRTLSLQPGGGGGGGEDAPRARPEGTPRRAAKTVAHTEGYPSFLSVDHSGLGLGPAYGSLQNPYGMTFQPPPPTPSARQVPEPGERSRTMPRTVPGSTMKMGSLERKKLRYSDLDFEKVMHTRKRHSELYHELNQKFHTFDRYRSQSTAKREKRWSVSSGGAAERSVCTDKPSPGERPSLSQHRRHQSWSTFKSMTLGSLPPKPRERLTLHRAAAWEPTEPPDGDFQTEV

SEQ ID NO: 423 - protein, 1554 aa, Homo sapiens
MTPACPLLLSVILSLRLATAFDPAPSACSALASGVLYGAFSLQDLFPTIASGCSWTLENPDPTKYSLYLRFNRQEQVCAHFAPRLLPLDHYLVNFTCLRPSPEEAVAQAESEVGRPEEEEAEAAAGLELCSGSGPFTFLHFDKNFVQLCLSAEPSEAPRLLAPAALAFRFVEVLLINNNNSSQFTCGVLCRWSEECGRAAGRACGFAQPGCSCPGEAGAGSTTTTSPGPPAAHTLSNALVPGGPAPPAEADLHSGSSNDLFTTEMRYGEEPEEEPKVKTQWPRSADEPGLYMAQTGDPAAEEWSPWSVCSLTCGQGLQVRTRSCVSSPYGTLCSGPLRETRPCNNSATCPVHGVWEEWGSWSLCSRSCGRGSRSRMRTCVPPQHGGKACEGPELQTKLCSMAACPVEGQWLEWGPWGPCSTSCANGTQQRSRKCSVAGPAWATCTGALTDTRECSNLECPATDSKWGPWNAWSLCSKTCDTGWQRRFRMCQATGTQGYPCEGTGEEVKPCSEKRCPAFHEMCRDEYVMLMTWKKAAAGEIIYNKCPPNASGSASRRCLLSAQGVAYWGLPSFARCISHEYRYLYLSLREHLAKGQRMLAGEGMSQVVRSLQELLARRTYYSGDLLFSVDILRNVTDTFKRATYVPSADDVQRFFQVVSFMVDAENKEKWDDAQQVSPGSVHLLRVVEDFIHLVGDALKAFQSSLIVTDNLVISIQREPVSAVSSDITFPMRGRRGMKDWVRHSEDRLFLPKEVLSLSSPGKPATSGAAGSPGRGRGPGTVPPGPGHSHQRLLPADPDESSYFVIGAVLYRTLGLILPPPRPPLAVTSRVMTVTVRPPTQPPAEPLITVELSYIINGTTDPHCASWDYSRADASSGDWDTENCQTLETQAAHTRCQCQHLSTFAVLAQPPKDLTLELAGSPSVPLVIGCAVSCMALLTLLAIYAAFWRFIKSERSIILLNFCLSILASNILILVGQSRVLSKGVCTMTAAFLHFFFLSSFCWVLTEAWQSYLAVIGRMRTRLVRKRFLCLGWGLPALVVAVSVGFTRTKGYGTSSYCWLSLEGGLLYAFVGPAAVIVLVNMLIGIIVFNKLMARDGISDKSKKQRAGSERCPWASLLLPCSACGAVPSPLLSSASARNAMASLWSSCVVLPLLALTWMSAVLAMTDRRSVLFQALFAVFNSAQGFVITAVHCFLRREVQDVVKCQMGVCRADESEDSPDSCKNGQLQILSDFEKDVDLACQTVLFKEVNTCNPSTITGTLSRLSLDEDEEPKSCLVGPEGSLSFSPLPGNILVPMAASPGLGEPPPPQEANPVYMCGEGGLRQLDLTWLRPTEPGSEGDYMVLPRRTLSLQPGGGGGGGEDAPRARPEGTPRRAAKTVAHTEGYPSFLSVDHSGLGLGPAYGSLQNPYGMTFQPPPPTPSARQVPEPGERSRTMPRTVPGSTMKMGSLERKKLRYSDLDFEKVMHTRKRHSELYHELNQKFHTFDRYRSQSTAKDKPSPGERPSLSQHRRHQSWSTFKSMTLGSLPPKPRERLTLHRAAAWEPTEPPDGDFQTEV

SEQ ID NO: 424 - protein, 1499 aa, Homo sapiens
MTPACPLLLSVILSLRLATAFDPAPSACSALASGVLYGAFSLQDLFPTIASGCSWTLENPDPTKYSLYLRFNRQEQVCAHFAPRLLPLDHYLVNFTCLRPSPEEAVAQAESEVGRPEEEEAEAAAGLELCSGSGPFTFLHFDKNFVQLCLSAEPSEAPRLLAPAALAFRFVEVLLINNNNSSQFTCGVLCRWSEECGRAAGRACGFAQPGCSCPGEAGAGSTTTTSPGPPAAHTLSNALVPGGPAPPAEADLHSGSSNDLFTTEMRYGEEPEEEPKVKTQWPRSADEPGLYMAQTVHGVWEEWGSWSLCSRSCGRGSRSRMRTCVPPQHGGKACEGPELQTKLCSMAACPVEGQWLEWGPWGPCSTSCANGTQQRSRKCSVAGPAWATCTGALTDTRECSNLECPATDSKWGPWNAWSLCSKTCDTGWQRRFRMCQATGTQGYPCEGTGEEVKPCSEKRCPAFHEMCRDEYVMLMTWKKAAAGEIIYNKCPPNASGSASRRCLLSAQGVAYWGLPSFARCISHEYRYLYLSLREHLAKGQRMLAGEGMSQVVRSLQELLARRTYYSGDLLFSVDILRNVTDTFKRATYVPSADDVQRFFQVVSFMVDAENKEKWDDAQQVSPGSVHLLRVVEDFIHLVGDALKAFQSSLIVTDNLVISIQREPVSAVSSDITFPMRGRRGMKDWVRHSEDRLFLPKEVLSLSSPGKPATSGAAGSPGRGRGPGTVPPGPGHSHQRLLPADPDESSYFVIGAVLYRTLGLILPPPRPPLAVTSRVMTVTVRPPTQPPAEPLITVELSYIINGTTDPHCASWDYSRADASSGDWDTENCQTLETQAAHTRCQCQHLSTFAVLAQPPKDLTLELAGSPSVPLVIGCAVSCMALLTLLAIYAAFWRFIKSERSIILLNFCLSILASNILILVGQSRVLSKGVCTMTAAFLHFFFLSSFCWVLTEAWQSYLAVIGRMRTRLVRKRFLCLGWGLPALVVAVSVGFTRTKGYGTSSYCWLSLEGGLLYAFVGPAAVIVLVNMLIGIIVFNKLMARDGISDKSKKQRAGSERCPWASLLLPCSACGAVPSPLLSSASARNAMASLWSSCVVLPLLALTWMSAVLAMTDRRSVLFQALFAVFNSAQGFVITAVHCFLRREVQDVVKCQMGVCRADESEDSPDSCKNGQLQILSDFEKDVDLACQTVLFKEVNTCNPSTITGTLSRLSLDEDEEPKSCLVGPEGSLSFSPLPGNILVPMAASPGLGEPPPPQEANPVYMCGEGGLRQLDLTWLRPTEPGSEGDYMVLPRRTLSLQPGGGGGGGEDAPRARPEGTPRRAAKTVAHTEGYPSFLSVDHSGLGLGPAYGSLQNPYGMTFQPPPPTPSARQVPEPGERSRTMPRTVPGSTMKMGSLERKKLRYSDLDFEKVMHTRKRHSELYHELNQKFHTFDRYRSQSTAKDKPSPGERPSLSQHRRHQSWSTFKSMTLGSLPPKPRERLTLHRAAAWEPTEPPDGDFQTEV

SEQ ID NO: 425 - protein, 1466 aa, Homo sapiens
MTPACPLLLSVILSLRLATAFDPAPSACSALASGVLYGAFSLQDLFPTIASGCSWTLENPDPTKYSLYLRFNRQEQVCAHFAPRLLPLDHYLVNFTCLRPSPEEAVAQAESEVGRPEEEEAEAAAGLELCSGSGPFTFLHFDKNFVQLCLSAEPSEAPRLLAPAALAFRFVEVLLINNNNSSQFTCGVLCRWSEECGRAAGRACGFAQPGCSCPGEAGAGSTTTTSPGPPAAHTLSNALVPGGPAPPAEADLHSGSSNDLFTTEMRYGEEPEEEPKVKTQWPRSADEPGLYMAQTGDPAAEEWSPWSVCSLTCGQGLQVRTRSCVSSPYGTLCSGPLRETRPCNNSATCPVEGQWLEWGPWGPCSTSCANGTQQRSRKCSVAGPAWATCTGALTDTRECSNLECPATDSKWGPWNAWSLCSKTCDTGWQRRFRMCQATGTQGYPCEGTGEEVKPCSEKRCPAFHEMCRDEYVMLMTWKKAAAGEIIYNKCPPNASGSASRRCLLSAQGVAYWGLPSFARCISHEYRYLYLSLREHLAKGQRMLAGEGMSQVVRSLQELLARRTYYSGDLLFSVDILRNVTDTFKRATYVPSADDVQRFFQVVSFMVDAENKEKWDDAQQVSPGSVHLLRVVEDFIHLVGDALKAFQSSLIVTDNLVISIQREPVSAVSSDITFPMRGRRGMKDWVRHSEDRLFLPKEVLSLSSPGKPATSGAAGSPGRGRGPGTVPPGPGHSHQRLLPADPDESSYFVIGAVLYRTLGLILPPPRPPLAVTSRVMTVTVRPPTQPPAEPLITVELSYIINGTTDPHCASWDYSRADASSGDWDTENCQTLETQAAHTRCQCQHLSTFAVLAQPPKDLTLELAGSPSVPLVIGCAVSCMALLTLLAIYAAFWRFIKSERSIILLNFCLSILASNILILVGQSRVLSKGVCTMTAAFLHFFFLSSFCWVLTEAWQSYLAVIGRMRTRLVRKRFLCLGWGLPALVVAVSVGFTRTKGYGTSSYCWLSLEGGLLYAFVGPAAVIVLVNMLIGIIVFNKLMARDGISDKSKKQRAGASLWSSCVVLPLLALTWMSAVLAMTDRRSVLFQALFAVFNSAQGFVITAVHCFLRREVQDVVKCQMGVCRADESEDSPDSCKNGQLQILSDFEKDVDLACQTVLFKEVNTCNPSTITGTLSRLSLDEDEEPKSCLVGPEGSLSFSPLPGNILVPMAASPGLGEPPPPQEANPVYMCGEGGLRQLDLTWLRPTEPGSEGDYMVLPRRTLSLQPGGGGGGGEDAPRARPEGTPRRAAKTVAHTEGYPSFLSVDHSGLGLGPAYGSLQNPYGMTFQPPPPTPSARQVPEPGERSRTMPRTVPGSTMKMGSLERKKLRYSDLDFEKVMHTRKRHSELYHELNQKFHTFDRYRSQSTAKDKPSPGERPSLSQHRRHQSWSTFKSMTLGSLPPKPRERLTLHRAAAWEPTEPPDGDFQTEV

SEQ ID NO: 426 - protein, 906 aa, Homo sapiens
MEKLLRLCCWYSWLLLFYYNFQVRGVYSRSQDHPGFQVLASASHYWPLENVDGIHELQDTTGASRTHKLTVLPSRNATFVYSNDSAYSNLSATVDIVEGKVNKGIYLKEEKGVTLLYYGRYNSSCISKPEQCGPEGVTFSFFWKTQGEQSRPIPSAYGGQVISNGFKVCSSGGRGSVELYTRDNSMTWEASFSPPGPYWTHVLFTWKSKEGLKVYVNGTLSTSDPSGKVSRDYGESNVNLVIGSEQDQAKCYENGAFDEFIIWERALTPDEIAMYFTAAIGKHALLSSTLPSLFMTSTASPVMPTDAYHPIITNLTEERKTFQSPGVILSYLQNVSLSLPSKSLSEQTALNLTKTFLKAVGEILLLPGWIALSEDSAVVLSLIDTIDTVMGHVSSNLHGSTPQVTVEGSSAMAEFSVAKILPKTVNSSHYRFPAHGQSFIQIPHEAFHRHAWSTVVGLLYHSMHYYLNNIWPAHTKIAEAMHHQDCLLFATSHLISLEVSPPPTLSQNLSGSPLITVHLKHRLTRKQHSEATNSSNRVFVYCAFLDFSSGEGVWSNHGCALTRGNLTYSVCRCTHLTNFAILMQVVPLELARGHQVALSSISYVGCSLSVLCLVATLVTFAVLSSVSTIRNQRYHIHANLSFAVLVAQVLLLISFRLEPGTTPCQVMAVLLHYFFLSAFAWMLVEGLHLYSMVIKVFGSEDSKHRYYYGMGWGFPLLICIISLSFAMDSYGTSNNCWLSLASGAIWAFVAPALFVIVVNIGILIAVTRVISQISADNYKIHGDPSAFKLTAKAVAVLLPILGTSWVFGVLAVNGCAVVFQYMFATLNSLQGLFIFLFHCLLNSEVRAAFKHKTKVWSLTSSSARTSNAKPFHSDLMNGTRPGMASTKLSPWDKSSHSAHRVDLSAV

SEQ ID NO: 427 - protein, 221 aa, Homo sapiens
MEKLLRLCCWYSWLLLFYYNFQVRGVYSRSQDHPGFQVLASASHYWPLENVDGIHELQDTTGDIVEGKVNKGIYLKEEKGVTLLYYGRYNSSCISKPEQCGPEGPYWTHVLFTWKSKEGLKVYVNGTLSTSDPSGKVSRDYGESNVNLVIGSEQDQAKCYENGAFDEFIIWERALTPDEIAMYFTAAIGKHALLSSTLPSLFMTSTASPVMPTDAYHPIIT

SEQ ID NO: 428 - protein, 874 aa, Homo sapiens
MEKLLRLCCWYSWLLLFYYNFQVRGVYSRSQDHPGFQVLASASHYWPLENVDGIHELQDTTGDIVEGKVNKGIYLKEEKGVTLLYYGRYNSSCISKPEQCGPEGVTFSFFWKTQGEQSRPIPSAYGGQVISNGFKVCSSGGRGSVELYTRDNSMTWEASFSPPGPYWTHVLFTWKSKEGLKVYVNGTLSTSDPSGKVSRDYGESNVNLVIGSEQDQAKCYENGAFDEFIIWERALTPDEIAMYFTAAIGKHALLSSTLPSLFMTSTASPVMPTDAYHPIITNLTEERKTFQSPGVILSYLQNVSLSLPSKSLSEQTALNLTKTFLKAVGEILLLPGWIALSEDSAVVLSLIDTIDTVMGHVSSNLHGSTPQVTVEGSSAMAEFSVAKILPKTVNSSHYRFPAHGQSFIQIPHEAFHRHAWSTVVGLLYHSMHYYLNNIWPAHTKIAEAMHHQDCLLFATSHLISLEVSPPPTLSQNLSGSPLITVHLKHRLTRKQHSEATNSSNRVFVYCAFLDFSSGEGVWSNHGCALTRGNLTYSVCRCTHLTNFAILMQVVPLELARGHQVALSSISYVGCSLSVLCLVATLVTFAVLSSVSTIRNQRYHIHANLSFAVLVAQVLLLISFRLEPGTTPCQVMAVLLHYFFLSAFAWMLVEGLHLYSMVIKVFGSEDSKHRYYYGMGWGFPLLICIISLSFAMDSYGTSNNCWLSLASGAIWAFVAPALFVIVVNIGILIAVTRVISQISADNYKIHGDPSAFKLTAKAVAVLLPILGTSWVFGVLAVNGCAVVFQYMFATLNSLQGLFIFLFHCLLNSEVRAAFKHKTKVWSLTSSSARTSNAKPFHSDLMNGTRPGMASTKLSPWDKSSHSAHRVDLSAV

SEQ ID NO: 429 - protein, 393 aa, Homo sapiens
MHRVCFLSFQTRKQHSEATNSSNRVFVYCAFLDFSSGEGVWSNHGCALTRGNLTYSVCRCTHLTNFAILMQVVPLELARGHQVALSSISYVGCSLSVLCLVATLVTFAVLSSVSTIRNQRYHIHANLSFAVLVAQVLLLISFRLEPGTTPCQVMAVLLHYFFLSAFAWMLVEGLHLYSMVIKVFGSEDSKHRYYYGMGWGFPLLICIISLSFAMDSYGTSNNCWLSLASGAIWAFVAPALFVIVVNIGILIAVTRVISQISADNYKIHGDPSAFKLTAKAVAVLLPILGTSWVFGVLAVNGCAVVFQYMFATLNSLQGLFIFLFHCLLNSEVRAAFKHKTKVWSLTSSSARTSNAKPFHSDLMNGTRPGMASTKLSPWDKSSHSAHRVDLSAV

SEQ ID NO: 430 - protein, 345 aa, Homo sapiens
MQVVPLELARGHQVALSSISYVGCSLSVLCLVATLVTFAVLSSVSTIRNQRYHIHANLSFAVLVAQVLLLISFRLEPGTTPCQVMAVLLHYFFLSAFAWMLVEGLHLYSMVIKVFGSEDSKHRYYYGMGWGFPLLICIISLSFAMDSYGTSNNCWLSLASGAIWAFVAPALFVIVVNIGILIAVTRVISQISADNYKIHGDPSAFKLTAKAVAVLLPILGTSWVFGVLAVNGCAVVFQYMFATLNSLQGLFIFLFHCLLNSEARWAKEGRAESLSRMVAGQKGCMITKPSDPLIATPSDPLQGLRWIPVAGRQCSHGSPPAHPPACPPRICLFASLSHSPRDIHC

SEQ ID NO: 431 - protein, 156 aa, Homo sapiens
MQVVPLEVNIGILIAVTRVISQISADNYKIHGDPSAFKLTAKAVAVLLPILGTSWVFGVLAVNGCAVVFQYMFATLNSLQGLFIFLFHCLLNSEVRAAFKHKTKVWSLTSSSARTSNAKPFHSDLMNGTRPGMASTKLSPWDKSSHSAHRVDLSAV

SEQ ID NO: 432 - protein, 437 aa, Homo sapiens
MNSMDIRCSDIIQGDTQGPSAIAFISYSSLGNIINATFFEEMDKKDQVYLNSQVVSAAIGPKRNVSLSKSVTLTFQHVKMTPSTKKVFCVYWKSTGQGSQWSRDGCFLIHVNKSHTMCNCSHLSSFAVLMALTSQEEDPVLTVITYVGLSVSLLCLLLAALTFLLCKAIRNTSTSLHLQLSLCLFLAHLLFLVGIDRTEPKVLCSIIAGALHYLYLAAFTWMLLEGVHLFLTARNLTVVNYSSINRLMKWIMFPVGYGVPAVTVAISAASWPHLYGTADRCWLHLDQGFMWSFLGPVCAIFSANLVLFILVFWILKRKLSSLNSEVSTIQNTRMLAFKATAQLFILGCTWCLGLLQVGPAAQVMAYLFTIINSLQGFFIFLVYCLLSQQVQKQYQKWFREIVKSKSESETYTLSSKMGPDSKPSEGDVFPGQVKRKY

SEQ ID NO: 433 - protein, 57 aa, Homo sapiens
MQGPLLLPGLCFLLSLFGAVTQKTKSECSEPEQRTCGPRAGPGATHGLQWAGEKCLF

SEQ ID NO: 434 - protein, 526 aa, Homo sapiens
MQGPLLLPGLCFLLSLFGAVTQKTKTSCAKCPPNASCVNNTHCTCNHGYTSGSGQKLFTFPLETCNAIETQAITDNCSEERKTFNLNVQMNSMDIRCSDIIQGDTQGPSAIAFISYSSLGNIINATFFEEMDKKDQVYLNSQVVSAAIGPKRNVSLSKSVTLTFQHVKMTPSTKKVFCVYWKSTGQGSQWSRDGCFLIHVNKSHTMCNCSHLSSFAVLMALTSQEEDPVLTVITYVGLSVSLLCLLLAALTFLLCKAIRNTSTSLHLQLSLCLFLAHLLFLVGIDRTEPKVLCSIIAGALHYLYLAAFTWMLLEGVHLFLTARNLTVVNYSSINRLMKWIMFPVGYGVPAVTVAISAASWPHLYGTADRCWLHLDQGFMWSFLGPVCAIFSANLVLFILVFWILKRKLSSLNSEVSTIQNTRMLAFKATAQLFILGCTWCLGLLQVGPAAQVMAYLFTIINSLQGFFIFLVYCLLSQQVQKQYQKWFREIVKSKSESETYTLSSKMGPDSKPSEGDVFPGQVKRKY

SEQ ID NO: 435 - protein, 652 aa, Homo sapiens
MQGPLLLPGLCFLLSLFGAVTQKTKTSCAKCPPNASCVNNTHCTCNHGYTSGSGQKLFTFPLETCNDINECTPPYSVYCGFNAVCYNVEGSFYCQCVPGYRLHSGNEQFSNSNENTCQDTTSSKTTEGRKELQKIVDKFESLLTNQTLWRTEGRQEISSTATTILRDVESKVLETALKDPEQKVLKIQNDSVAIETQAITDNCSEERKTFNLNVQMNSMDIRCSDIIQGDTQGPSAIAFISYSSLGNIINATFFEEMDKKDQVYLNSQVVSAAIGPKRNVSLSKSVTLTFQHVKMTPSTKKVFCVYWKSTGQGSQWSRDGCFLIHVNKSHTMCNCSHLSSFAVLMALTSQEEDPVLTVITYVGLSVSLLCLLLAALTFLLCKAIRNTSTSLHLQLSLCLFLAHLLFLVGIDRTEPKVLCSIIAGALHYLYLAAFTWMLLEGVHLFLTARNLTVVNYSSINRLMKWIMFPVGYGVPAVTVAISAASWPHLYGTADRCWLHLDQGFMWSFLGPVCAIFSANLVLFILVFWILKRKLSSLNSEVSTIQNTRMLAFKATAQLFILGCTWCLGLLQVGPAAQVMAYLFTIINSLQGFFIFLVYCLLSQQVQKQYQKWFREIVKSKSESETYTLSSKMGPDSKPSEGDVFPGQVKRKY

SEQ ID NO: 436 - protein, 600 aa, Homo sapiens
MQGPLLLPGLCFLLSLFGAVTQKTKTSCAKCPPNASCVNNTHCTCNHGYTSGSGQKLFTFPLETCNDTTSSKTTEGRKELQKIVDKFESLLTNQTLWRTEGRQEISSTATTILRDVESKVLETALKDPEQKVLKIQNDSVAIETQAITDNCSEERKTFNLNVQMNSMDIRCSDIIQGDTQGPSAIAFISYSSLGNIINATFFEEMDKKDQVYLNSQVVSAAIGPKRNVSLSKSVTLTFQHVKMTPSTKKVFCVYWKSTGQGSQWSRDGCFLIHVNKSHTMCNCSHLSSFAVLMALTSQEEDPVLTVITYVGLSVSLLCLLLAALTFLLCKAIRNTSTSLHLQLSLCLFLAHLLFLVGIDRTEPKVLCSIIAGALHYLYLAAFTWMLLEGVHLFLTARNLTVVNYSSINRLMKWIMFPVGYGVPAVTVAISAASWPHLYGTADRCWLHLDQGFMWSFLGPVCAIFSANLVLFILVFWILKRKLSSLNSEVSTIQNTRMLAFKATAQLFILGCTWCLGLLQVGPAAQVMAYLFTIINSLQGFFIFLVYCLLSQQVQKQYQKWFREIVKSKSESETYTLSSKMGPDSKPSEGDVFPGQVKRKY

SEQ ID NO: 437 - protein, 786 aa, Homo sapiens
MGGRVFLAFCVWLTLPGAETQDSRGCARWCPQNSSCVNATACRCNPGFSSFSEIITTPTETCDDINECATPSKVSCGKFSDCWNTEGSYDCVCSPGYEPVSGAKTFKNESENTCQDVDECQQNPRLCKSYGTCVNTLGSYTCQCLPGFKFIPEDPKVCTDVDECSSGQHQCDSSTVCFNTVGSYSCRCRPGWKPRHGIPNNQKDTVCEDMTFSTWTPPPGVHSQTLSRFFDKVQDLGRDSKTSSAEVTIQNVIKLVDELMEAPGDVEALAPPVRHLIATQLLSNLEDIMRILAKSLPKGPFTYISPSNTELTLMIQERGDKNVTMGQSSARMKLNWAVAAGAEDPGPAVAGILSIQNMTTLLANASLNLHSKKQAELEEIYESSIRGVQLRRLSAVNSIFLSHNNTKELNSPILFAFSHLESSDGEAGRDPPAKDVMPGPRQELLCAFWKSDSDRGGHWATEGCQVLGSKNGSTTCQCSHLSSFAILMAHYDVEDWKLTLITRVGLALSLFCLLLCILTFLLVRPIQGSRTTIHLHLCICLFVGSTIFLAGIENEGGQVGLRCRLVAGLLHYCFLAAFCWMSLEGLELYFLVVRVFQGQGLSTRWLCLIGYGVPLLIVGVSAAIYSKGYGRPRYCWLDFEQGFLWSFLGPVTFIILCNAVIFVTTVWKLTQKFSEINPDMKKLKKARALTITAIAQLFLLGCTWVFGLFIFDDRSLVLTYVFTILNCLQGAFLYLLHCLLNKKVREEYRKWACLVAGGSKYSEFTSTTSGTGHNQTRALRASESGI

SEQ ID NO: 438 - protein, 835 aa, Homo sapiens
MGGRVFLAFCVWLTLPGAETQDSRGCARWCPQNSSCVNATACRCNPGFSSFSEIITTPTETCDDINECATPSKVSCGKFSDCWNTEGSYDCVCSPGYEPVSGAKTFKNESENTCQDVDECQQNPRLCKSYGTCVNTLGSYTCQCLPGFKFIPEDPKVCTDVNECTSGQNPCHSSTHCLNNVGSYQCRCRPGWQPIPGSPNGPNNTVCEDVDECSSGQHQCDSSTVCFNTVGSYSCRCRPGWKPRHGIPNNQKDTVCEDMTFSTWTPPPGVHSQTLSRFFDKVQDLGRDSKTSSAEVTIQNVIKLVDELMEAPGDVEALAPPVRHLIATQLLSNLEDIMRILAKSLPKGPFTYISPSNTELTLMIQERGDKNVTMGQSSARMKLNWAVAAGAEDPGPAVAGILSIQNMTTLLANASLNLHSKKQAELEEIYESSIRGVQLRRLSAVNSIFLSHNNTKELNSPILFAFSHLESSDGEAGRDPPAKDVMPGPRQELLCAFWKSDSDRGGHWATEGCQVLGSKNGSTTCQCSHLSSFAILMAHYDVEDWKLTLITRVGLALSLFCLLLCILTFLLVRPIQGSRTTIHLHLCICLFVGSTIFLAGIENEGGQVGLRCRLVAGLLHYCFLAAFCWMSLEGLELYFLVVRVFQGQGLSTRWLCLIGYGVPLLIVGVSAAIYSKGYGRPRYCWLDFEQGFLWSFLGPVTFIILCNAVIFVTTVWKLTQKFSEINPDMKKLKKARALTITAIAQLFLLGCTWVFGLFIFDDRSLVLTYVFTILNCLQGAFLYLLHCLLNKKVREEYRKWACLVAGGSKYSEFTSTTSGTGHNQTRALRASESGI

SEQ ID NO: 439 - protein, 742 aa, Homo sapiens
MGGRVFLAFCVWLTLPGAETQDSRGCARWCPQNSSCVNATACRCNPGFSSFSEIITTPTETCDDINECATPSKVSCGKFSDCWNTEGSYDCVCSPGYEPVSGAKTFKNESENTCQDVDECSSGQHQCDSSTVCFNTVGSYSCRCRPGWKPRHGIPNNQKDTVCEDMTFSTWTPPPGVHSQTLSRFFDKVQDLGRDSKTSSAEVTIQNVIKLVDELMEAPGDVEALAPPVRHLIATQLLSNLEDIMRILAKSLPKGPFTYISPSNTELTLMIQERGDKNVTMGQSSARMKLNWAVAAGAEDPGPAVAGILSIQNMTTLLANASLNLHSKKQAELEEIYESSIRGVQLRRLSAVNSIFLSHNNTKELNSPILFAFSHLESSDGEAGRDPPAKDVMPGPRQELLCAFWKSDSDRGGHWATEGCQVLGSKNGSTTCQCSHLSSFAILMAHYDVEDWKLTLITRVGLALSLFCLLLCILTFLLVRPIQGSRTTIHLHLCICLFVGSTIFLAGIENEGGQVGLRCRLVAGLLHYCFLAAFCWMSLEGLELYFLVVRVFQGQGLSTRWLCLIGYGVPLLIVGVSAAIYSKGYGRPRYCWLDFEQGFLWSFLGPVTFIILCNAVIFVTTVWKLTQKFSEINPDMKKLKKARALTITAIAQLFLLGCTWVFGLFIFDDRSLVLTYVFTILNCLQGAFLYLLHCLLNKKVREEYRKWACLVAGGSKYSEFTSTTSGTGHNQTRALRASESGI

SEQ ID NO: 440 - protein, 164 aa, Homo sapiens
MGGRVFLAFCVWLTLPGAETQDSRGCARWCPQNSSCVNATACRCNPGFSSFSEIITTPTETCDDINECATPSKVSCGKFSDCWNTEGSYDCVCSPGYEPVSGAKTFKNESENTCQDVNECTSGQNPCHSSTHCLNNVGSYQCRCRPGWQPIPGSPNGPNNTVCE

SEQ ID NO: 441 - protein, 154 aa, Homo sapiens
MGGRVFLAFCVWLTLPGAETQDSRGCARWCPQNSSCVNATACRCNPGFSSFSEIITTPTETCDDINECATPSKVSCGKFSDCWNTEGSYDCVCSPGYEPVSGAKTFKNESENTCQGKNHPTSSDFPSMRFGVTRAILAASREQGLGCRVSAWRL

SEQ ID NO: 442 - protein, 157 aa, Homo sapiens [sequence omitted]

SEQ ID NO: 443 - protein, 160 aa, Homo sapiens
EYQLLLQVTYRDSKEKRDLRNFLKLLKPPLLWSHGLIRIIRAKATTDCNSLNGVLQCTCEDSYTWFPPSCLDPQNCYLHTAGALPSCECHLNNLSQSVNFCERTKIWGTFKINERFTNDLLNSSSAIYSKYANGIEIQLKKAYERIQGFESVQVTQFRPV

SEQ ID NO: 444 - protein, 713 aa, Homo sapiens
MDISIQRNGSIVAGYEVVGSSSASELLSAIEHVAEKAKTALHKLFPLEDGSFRVFGKAQCNDIVFGFGSKDDEYTLPCSSGYRGNITAKCESSGWQVIRETCVLSLLEELNKNFSMIVGNATEAAVSSFVQNLSVIIRQNPSTTVGNLASVVSILSNISSLSLASHFRVSNSTMEDVISIADNILNSASVTNWTVLLREEKYASSRLLETLENISTLVPPTALPLNFSRKFIDWKGIPVNKSQLKRGYSYQIKMCPQNTSIPIRGRVLIGSDQFQRSLPETIISMASLTLGNILPVSKNGNAQVNGPVISTVIQNYSINEVFLFFSKIESNLSQPHCVFWDFSHLQWNDAGCHLVNETQDIVTCQCTHLTSFSILMSPFVPSTIFPVVKWITYVGLGISIGSLILCLIIEALFWKQIKKSQTSHTRRICMVNIALSLLIADVWFIVGATVDTTVNPSGVCTAAVFFTHFFYLSLFFWMLMLGILLAYRIILVFHHMAQHLMMAVGFCLGYGCPLIISVITIAVTQPSNTYKRKDVCWLNWSNGSKPLLAFVVPALAIVAVNFVVVLLVLTKLWRPTVGERLSRDDKATIIRVGKSLLILTPLLGLTWGFGIGTIVDSQNLAWHVIFALLNAFQGFFILCFGILLDSKLRQLLFNKLSALSSWKQTEKQNSSDLSAKPKFSKPFNPLQNKGHYAFSHTGDSSDNIMLTQFVSNE

SEQ ID NO: 445 - protein, 218 aa, Homo sapiens
MKVGVLWLISFFTFTDGHGGFLGKNDGIKTKKELIVNKKKHLGPVEEYQLLLQVTYRDSKEKRDLRNFLKLLKPPLLWSHGLIRIIRAKATTDCNSLNGVLQCTCEDSYTWFPPSCLDPQNCYLHTAGALPSCECHLNNLSQSVNFCERTKIWGTFKINERFTNDLLNSSSAIYSKYANGIEIQLKKAYERIQGFESVQVTQFRMSLLSPKLECNGTI

SEQ ID NO: 446 - protein, 910 aa, Homo sapiens
MKVGVLWLISFFTFTDGHGGFLGKNDGIKTKKELIVNKKKHLGPVEEYQLLLQVTYRDSKEKRDLRNFLKLLKPPLLWSHGLIRIIRAKATTDCNSLNGVLQCTCEDSYTWFPPSCLDPQNCYLHTAGALPSCECHLNNLSQSVNFCERTKIWGTFKINERFTNDLLNSSSAIYSKYANGIEIQLKKAYERIQGFESVQVTQFRNGSIVAGYEVVGSSSASELLSAIEHVAEKAKTALHKLFPLEDGSFRVFGKAQCNDIVFGFGSKDDEYTLPCSSGYRGNITAKCESSGWQVIRETCVLSLLEELNKNFSMIVGNATEAAVSSFVQNLSVIIRQNPSTTVGNLASVVSILSNISSLSLASHFRVSNSTMEDVISIADNILNSASVTNWTVLLREEKYASSRLLETLENISTLVPPTALPLNFSRKFIDWKGIPVNKSQLKRGYSYQIKMCPQNTSIPIRGRVLIGSDQFQRSLPETIISMASLTLGNILPVSKNGNAQVNGPVISTVIQNYSINEVFLFFSKIESNLSQPHCVFWDFSHLQWNDAGCHLVNETQDIVTCQCTHLTSFSILMSPFVPSTIFPVVKWITYVGLGISIGSLILCLIIEALFWKQIKKSQTSHTRRICMVNIALSLLIADVWFIVGATVDTTVNPSGVCTAAVFFTHFFYLSLFFWMLMLGILLAYRIILVFHHMAQHLMMAVGFCLGYGCPLIISVITIAVTQPSNTYKRKDVCWLNWSNGSKPLLAFVVPALAIVAVNFVVVLLVLTKLWRPTVGERLSRDDKATIIRVGKSLLILTPLLGLTWGFGIGTIVDSQNLAWHVIFALLNAFQGFFILCFGILLDSKLRQLLFNKLSALSSWKQTEKQNSSDLSAKPKFSKPFNPLQNKGHYAFSHTGDSSDNIMLTQFVSNE

SEQ ID NO: 447 - protein, 137 aa, Homo sapiens
  VARIANT 1: note = misc_feature - Xaa can be any naturally occurring amino acid
XWSHGLIRIIRAKATTDCNSLNGVLQCTCEDSYTWFPPSCLDPQNCYLHTAGALPSCECHLNNLSQSVNFCERTKIWGTFKINERFTNDLLNSSSAIYSKYANGIEIQLKKAYERIQGFESVQVTQFRTVIHLWNLV

SEQ ID NO: 448 - protein, 6 aa, Homo sapiens
MTPQSL

SEQ ID NO: 449 - protein, 95 aa, Homo sapiens
MTPQSLLQTTLFLLSLLFLVQAHPASRSFPDPRGLYHFCLYWNRHAGRLHLLYGKRDFLLSDKASSLLCFQHQEESLAQGPPLLATSVTSWWSPQ

SEQ ID NO: 450 - protein, 125 aa, Homo sapiens
MTPQSLLQTTLFLLSLLFLVQAHPASRSFPDPRGLYHFCLYWNRHAGRLHLLYGKRDFLLSDKASSLLCFQHQEESLAQGPPLLATSVTSWWSPQNISLPSAASFTFSFHSPPHTAAHNASVDMC

SEQ ID NO: 451 - protein, 90 aa, Homo sapiens
MTPQSLLQTTLFLLSLLFLVQAPATGSHLQPLPPQVPTAGATGKTFASAASGTRHTGAASTTNPHQTCASPSRTPKRPSQSMPLSLQPTL

SEQ ID NO: 452 - protein, 118 aa, Homo sapiens
MTPQSLLQTTLFLLSLLFLVQAPATGSHLQPLPPQVPTAGATGKTFASAASGTRHTGAASTTNPHQTCASPSRTPKRPSQSMPLSLQPTLLPDPSLTPGASTTSASTGTDMLGDYIFS

SEQ ID NO: 453 - protein, 91 aa, Homo sapiens
MTPQSLLQTTLFLLSLLFLVQASASSGAHGRGHREDFRFCSQRNQTHRSSLHYKPTPDLRISIENSEEALTVHAPFPAAHPASRSFPDPRG

SEQ ID NO: 454 - protein, 98 aa, Homo sapiens
MTPQSLLQTTLFLLSLLFLVQASASSGAHGRGHREDFRFCSQRNQTHRSSLHYKPTPDLRISIENSEEALTVHAPFPAAHPASRSFPDPRGLYHFCLY

SEQ ID NO: 455 - protein, 103 aa, Homo sapiens
MTPQSLLQTTLFLLSLLFLVQASASSGAHGRGHREDFRFCSQRNQTHRSSLHYKPTPDLRISIENSEEALTVHAPFPAAHPASRSFPDPRGLYHFCLYWNRHA

SEQ ID NO: 456 - protein, 114 aa, Homo sapiens
MTPQSLLQTTLFLLSLLFLVQASASSGAHGRGHREDFRFCSQRNQTHRSSLHYKPTPDLRISIENSEEALTVHAPFPAAHPASRSFPDPRGLYHFCLYWNRHAGRLHLLYGKRD

SEQ ID NO: 457 - protein, 118 aa, Homo sapiens
MTPQSLLQTTLFLLSLLFLVQASASSGAHGRGHREDFRFCSQRNQTHRSSLHYKPTPDLRISIENSEEALTVHAPFPAAHPASRSFPDPRGLYHFCLYWNRHAGRLHLLYGKRDFLLS

SEQ ID NO: 458 - protein, 118 aa, Homo sapiens; identical to SEQ ID NO: 457

SEQ ID NO: 459 - protein, 125 aa, Homo sapiens
MTPQSLLQTTLFLLSLLFLVQASASSGAHGRGHREDFRFCSQRNQTHRSSLHYKPTPDLRISIENSEEALTVHAPFPAAHPASRSFPDPRGLYHFCLYWNRHAGRLHLLYGKRDFLLSDKASSLL

SEQ ID NO: 460 - protein, 145 aa, Homo sapiens
MTPQSLLQTTLFLLSLLFLVQASASSGAHGRGHREDFRFCSQRNQTHRSSLHYKPTPDLRISIENSEEALTVHAPFPAAHPASRSFPDPRGLYHFCLYWNRHAGRLHLLYGKRDFLLSDKASSLLCFQHQEESLAQGPPLLATSV

SEQ ID NO: 461 - protein, 146 aa, Homo sapiens
MTPQSLLQTTLFLLSLLFLVQASASSGAHGRGHREDFRFCSQRNQTHRSSLHYKPTPDLRISIENSEEALTVHAPFPAAHPASRSFPDPRGLYHFCLYWNRHAGRLHLLYGKRDFLLSDKASSLLCFQHQEESLAQGPPLLATSVT

SEQ ID NO: 462 - protein, 164 aa, Homo sapiens
MTPQSLLQTTLFLLSLLFLVQASASSGAHGRGHREDFRFCSQRNQTHRSSLHYKPTPDLRISIENSEEALTVHAPFPAAHPASRSFPDPRGLYHFCLYWNRHAGRLHLLYGKRDFLLSDKASSLLCFQHQEESLAQGPPLLATSVTSWWSPQNISLPSAASFTF

SEQ ID NO: 463 - protein, 168 aa, Homo sapiens
MTPQSLLQTTLFLLSLLFLVQASASSGAHGRGHREDFRFCSQRNQTHRSSLHYKPTPDLRISIENSEEALTVHAPFPAAHPASRSFPDPRGLYHFCLYWNRHAGRLHLLYGKRDFLLSDKASSLLCFQHQEESLAQGPPLLATSVTSWWSPQNISLPSAASFTFSFHS

SEQ ID NO: 464 - protein, 198 aa, Homo sapiens
MTPQSLLQTTLFLLSLLFLVQASASSGAHGRGHREDFRFCSQRNQTHRSSLHYKPTPDLRISIENSEEALTVHAPFPAAHPASRSFPDPRGLYHFCLYWNRHAGRLHLLYGKRDFLLSDKASSLLCFQHQEESLAQGPPLLATSVTSWWSPQNISLPSAASFTFSFHSPPHTAAHNASVDMCELKRDLQLLSQFLKHP

SEQ ID NO: 465 - protein, 692 aa, Homo sapiens
MTPQSLLQTTLFLLSLLFLVQASASSGAHGRGHREDFRFCSQRNQTHRSSLHYKPTPDLRISIENSEEALTVHAPFPAAHPASRSFPDPRGLYHFCLYWNRHAGRLHLLYGKRDFLLSDKASSLLCFQHQEESLAQGPPLLATSVTSWWSPQNISLPSAASFTFSFHSPPHTAAHNASVDMCELKRDLQLLSQFLKHPQKASRRPSAAPASQQLQSLESKLTSVRFMGDMVSFEEDRINATVWKLQPTAGLQDLHIHSRQEEEQSEIMEYSVLLPRTLFQRTKGRSGEAEKRLLLVDFSSQALFQDKNSSQVLGEKVLGIVVQNTKVANLTEPVVLTFQHQLQPKNVTLQCVFWVEDPTLSSPGHWSSAGCETVRRETQTSCFCNHLTYFAVLMVSSVEVDAVHKHYLSLLSYVGCVVSALACLVTIAAYLCSRRKPRDYTIKVHMNLLLAVFLLDTSFLLSEPVALTGSEAGCRASAIFLHFSLLTCLSWMGLEGYNLYRLVVEVFGTYVPGYLLKLSAMGWGFPIFLVTLVALVDVDNYGPIILAVHRTPEGVIYPSMCWIRDSLVSYITNLGLFSLVFLFNMAMLATMVVQILRLRPHTQKWSHVLTLLGLSLVLGLPWALIFFSFASGTFQLVVLYLFSIITSFQGFLIFIWYWSMRLQARGGPSPLKSNSDSARLPISSGSTSSSRI

SEQ ID NO: 466 - protein, 97 aa, Homo sapiens
MTPQSLLQTTLFLLSLLFLVQASGTRHTGAASTTNPHQTCASPSRTPKRPSQSMPLSLQPTLLPDPSLTPGASTTSASTGTDMLGDYIFSMASVTSC

SEQ ID NO: 467 - protein, 97 aa, Homo sapiens; identical to SEQ ID NO: 466

SEQ ID NO: 468 - protein, 97 aa, Homo sapiens; identical to SEQ ID NO: 466

SEQ ID NO: 469 - protein, 68 aa, Homo sapiens
MTPQSLLQTTLFLLSLLFLVQASSLLCFQHQEESLAQGPPLLATSVTSWWSPQNISLPSAASFTFSFH

SEQ ID NO: 470 - protein, 42 aa, Homo sapiens
MTPQSLLQTTLFLLSLLFLVQGAHGRGHREDFRFCSQRNQTH

SEQ ID NO: 471 - protein, 50 aa, Homo sapiens
MTPQSLLQTTLFLLSLLFLVQGAHGRGHREDFRFCSQRNQTHRSSLHYKP

SEQ ID NO: 472 - protein, 55 aa, Homo sapiens
MTPQSLLQTTLFLLSLLFLVQGAHGRGHREDFRFCSQRNQTHRSSLHYKPTPDLR

SEQ ID NO: 473 - protein, 56 aa, Homo sapiens
MTPQSLLQTTLFLLSLLFLVQGAHGRGHREDFRFCSQRNQTHRSSLHYKPTPDLRI

SEQ ID NO: 474 - protein, 70 aa, Homo sapiens
MTPQSLLQTTLFLLSLLFLVQGAHGRGHREDFRFCSQRNQTHRSSLHYKPTPDLRISIENSEEALTVHAP

SEQ ID NO: 475 - protein, 77 aa, Homo sapiens
MTPQSLLQTTLFLLSLLFLVQGAHGRGHREDFRFCSQRNQTHRSSLHYKPTPDLRISIENSEEALTVHAPFPAAHPA

SEQ ID NO: 476 - protein, 84 aa, Homo sapiens
MTPQSLLQTTLFLLSLLFLVQGAHGRGHREDFRFCSQRNQTHRSSLHYKPTPDLRISIENSEEALTVHAPFPAAHPASRSFPDP

SEQ ID NO: 477 - protein, 84 aa, Homo sapiens; identical to SEQ ID NO: 476

SEQ ID NO: 478 - protein, 94 aa, Homo sapiens
MTPQSLLQTTLFLLSLLFLVQGAHGRGHREDFRFCSQRNQTHRSSLHYKPTPDLRISIENSEEALTVHAPFPAAHPASRSFPDPRGLYHFCLYW

SEQ ID NO: 479 - protein, 94 aa, Homo sapiens; identical to SEQ ID NO: 478

SEQ ID NO: 480 - protein, 100 aa, Homo sapiens
MTPQSLLQTTLFLLSLLFLVQGAHGRGHREDFRFCSQRNQTHRSSLHYKPTPDLRISIENSEEALTVHAPFPAAHPASRSFPDPRGLYHFCLYWNRHAGR

SEQ ID NO: 481 - protein, 107 aa, Homo sapiens
MTPQSLLQTTLFLLSLLFLVQGAHGRGHREDFRFCSQRNQTHRSSLHYKPTPDLRISIENSEEALTVHAPFPAAHPASRSFPDPRGLYHFCLYWNRHAGRLHLLYGK

SEQ ID NO: 482 - protein, 110 aa, Homo sapiens
MTPQSLLQTTLFLLSLLFLVQGAHGRGHREDFRFCSQRNQTHRSSLHYKPTPDLRISIENSEEALTVHAPFPAAHPASRSFPDPRGLYHFCLYWNRHAGRLHLLYGKRDF

SEQ ID NO: 483 - protein, 111 aa, Homo sapiens
MTPQSLLQTTLFLLSLLFLVQGAHGRGHREDFRFCSQRNQTHRSSLHYKPTPDLRISIENSEEALTVHAPFPAAHPASRSFPDPRGLYHFCLYWNRHAGRLHLLYGKRDFL

SEQ ID NO: 484 - protein, 113 aa, Homo sapiens
MTPQSLLQTTLFLLSLLFLVQGAHGRGHREDFRFCSQRNQTHRSSLHYKPTPDLRISIENSEEALTVHAPFPAAHPASRSFPDPRGLYHFCLYWNRHAGRLHLLYGKRDFLLS

SEQ ID NO: 485 - protein, 116 aa, Homo sapiens
MTPQSLLQTTLFLLSLLFLVQGAHGRGHREDFRFCSQRNQTHRSSLHYKPTPDLRISIENSEEALTVHAPFPAAHPASRSFPDPRGLYHFCLYWNRHAGRLHLLYGKRDFLLSDKA

SEQ ID NO: 486 - protein, 116 aa, Homo sapiens; identical to SEQ ID NO: 485

SEQ ID NO: 487 - protein, 119 aa, Homo sapiens
MTPQSLLQTTLFLLSLLFLVQGAHGRGHREDFRFCSQRNQTHRSSLHYKPTPDLRISIENSEEALTVHAPFPAAHPASRSFPDPRGLYHFCLYWNRHAGRLHLLYGKRDFLLSDKASSL

SEQ ID NO: 488 - protein, 119 aa, Homo sapiens; identical to SEQ ID NO: 487

SEQ ID NO: 489 - protein, 122 aa, Homo sapiens
MTPQSLLQTTLFLLSLLFLVQGAHGRGHREDFRFCSQRNQTHRSSLHYKPTPDLRISIENSEEALTVHAPFPAAHPASRSFPDPRGLYHFCLYWNRHAGRLHLLYGKRDFLLSDKASSLLCF

SEQ ID NO: 490 - protein, 131 aa, Homo sapiens
MTPQSLLQTTLFLLSLLFLVQGAHGRGHREDFRFCSQRNQTHRSSLHYKPTPDLRISIENSEEALTVHAPFPAAHPASRSFPDPRGLYHFCLYWNRHAGRLHLLYGKRDFLLSDKASSLLCFQHQEESLAQ

SEQ ID NO: 491 - protein, 131 aa, Homo sapiens; identical to SEQ ID NO: 490

SEQ ID NO: 492 - protein, 141 aa, Homo sapiens
MTPQSLLQTTLFLLSLLFLVQGAHGRGHREDFRFCSQRNQTHRSSLHYKPTPDLRISIENSEEALTVHAPFPAAHPASRSFPDPRGLYHFCLYWNRHAGRLHLLYGKRDFLLSDKASSLLCFQHQEESLAQGPPLLATSVT

SEQ ID NO: 493 - protein, 153 aa, Homo sapiens
MTPQSLLQTTLFLLSLLFLVQGAHGRGHREDFRFCSQRNQTHRSSLHYKPTPDLRISIENSEEALTVHAPFPAAHPASRSFPDPRGLYHFCLYWNRHAGRLHLLYGKRDFLLSDKASSLLCFQHQEESLAQGPPLLATSVTSWWSPQNISLPS

SEQ ID NO: 494 - protein, 154 aa, Homo sapiens
MTPQSLLQTTLFLLSLLFLVQGAHGRGHREDFRFCSQRNQTHRSSLHYKPTPDLRISIENSEEALTVHAPFPAAHPASRSFPDPRGLYHFCLYWNRHAGRLHLLYGKRDFLLSDKASSLLCFQHQEESLAQGPPLLATSVTSWWSPQNISLPSA

SEQ ID NO: 495 - protein, 160 aa, Homo sapiens
MTPQSLLQTTLFLLSLLFLVQGAHGRGHREDFRFCSQRNQTHRSSLHYKPTPDLRISIENSEEALTVHAPFPAAHPASRSFPDPRGLYHFCLYWNRHAGRLHLLYGKRDFLLSDKASSLLCFQHQEESLAQGPPLLATSVTSWWSPQNISLPSAASFTFS

SEQ ID NO: 496 - protein, 162 aa, Homo sapiens
MTPQSLLQTTLFLLSLLFLVQGAHGRGHREDFRFCSQRNQTHRSSLHYKPTPDLRISIENSEEALTVHAPFPAAHPASRSFPDPRGLYHFCLYWNRHAGRLHLLYGKRDFLLSDKASSLLCFQHQEESLAQGPPLLATSVTSWWSPQNISLPSAASFTFSFH

SEQ ID NO: 497 - protein, 167 aa, Homo sapiens
MTPQSLLQTTLFLLSLLFLVQGAHGRGHREDFRFCSQRNQTHRSSLHYKPTPDLRISIENSEEALTVHAPFPAAHPASRSFPDPRGLYHFCLYWNRHAGRLHLLYGKRDFLLSDKASSLLCFQHQEESLAQGPPLLATSVTSWWSPQNISLPSAASFTFSFHSPPHT

SEQ ID NO: 498 - protein, 167 aa, Homo sapiens; identical to SEQ ID NO: 497

SEQ ID NO: 499 - protein, 199 aa, Homo sapiens
MTPQSLLQTTLFLLSLLFLVQGAHGRGHREDFRFCSQRNQTHRSSLHYKPTPDLRISIENSEEALTVHAPFPAAHPASRSFPDPRGLYHFCLYWNRHAGRLHLLYGKRDFLLSDKASSLLCFQHQEESLAQGPPLLATSVTSWWSPQNISLPSAASFTFSFHSPPHTAAHNASVDMCELKRDLQLLSQFLKHPQKASRR

SEQ ID NO: 500 - protein, 687 aa, Homo sapiens
MTPQSLLQTTLFLLSLLFLVQGAHGRGHREDFRFCSQRNQTHRSSLHYKPTPDLRISIENSEEALTVHAPFPAAHPASRSFPDPRGLYHFCLYWNRHAGRLHLLYGKRDFLLSDKASSLLCFQHQEESLAQGPPLLATSVTSWWSPQNISLPSAASFTFSFHSPPHTAAHNASVDMCELKRDLQLLSQFLKHPQKASRRPSAAPASQQLQSLESKLTSVRFMGDMVSFEEDRINATVWKLQPTAGLQDLHIHSRQEEEQSEIMEYSVLLPRTLFQRTKGRSGEAEKRLLLVDFSSQALFQDKNSSQVLGEKVLGIVVQNTKVANLTEPVVLTFQHQLQPKNVTLQCVFWVEDPTLSSPGHWSSAGCETVRRETQTSCFCNHLTYFAVLMVSSVEVDAVHKHYLSLLSYVGCVVSALACLVTIAAYLCSRRKPRDYTIKVHMNLLLAVFLLDTSFLLSEPVALTGSEAGCRASAIFLHFSLLTCLSWMGLEGYNLYRLVVEVFGTYVPGYLLKLSAMGWGFPIFLVTLVALVDVDNYGPIILAVHRTPEGVIYPSMCWIRDSLVSYITNLGLFSLVFLFNMAMLATMVVQILRLRPHTQKWSHVLTLLGLSLVLGLPWALIFFSFASGTFQLVVLYLFSIITSFQGFLIFIWYWSMRLQARGGPSPLKSNSDSARLPISSGSTSSSRI

SEQ ID NO: 501 - protein, 687 aa, Homo sapiens; identical to SEQ ID NO: 500

SEQ ID NO: 502 - protein, 687 aa, Homo sapiens; identical to SEQ ID NO: 500

SEQ ID NO: 503 - protein, 687 aa, Homo sapiens; identical to SEQ ID NO: 500

SEQ ID NO: 504 - protein, 693 aa, Homo sapiens
MTPQSLLQTTLFLLSLLFLVQGAHGRGHREDFRFCSQRNQTHRSSLHYKPTPDLRISIENSEEALTVHAPFPAAHPASRSFPDPRGLYHFCLYWNRHAGRLHLLYGKRDFLLSDKASSLLCFQHQEESLAQGPPLLATSVTSWWSPQNISLPSAASFTFSFHSPPHTAAHNASVDMCELKRDLQLLSQFLKHPQKASRRPSAAPASQQLQSLESKLTSVRFMGDMVSFEEDRINATVWKLQPTAGLQDLHIHSRQEEEQSEIMEYSVLLPRTLFQRTKGRSGEAEKRLLLVDFSSQALFQDKNSSQVLGEKVLGIVVQNTKVANLTEPVVLTFQHQLQPKNVTLQCVFWVEDPTLSSPGHWSSAGCETVRRETQTSCFCNHLTYFAVLMVSSVEVDAVHKHYLSLLSYVGCVVSALACLVTIAAYLCSRVPLPCRRKPRDYTIKVHMNLLLAVFLLDTSFLLSEPVALTGSEAGCRASAIFLHFSLLTCLSWMGLEGYNLYRLVVEVFGTYVPGYLLKLSAMGWGFPIFLVTLVALVDVDNYGPIILAVHRTPEGVIYPSMCWIRDSLVSYITNLGLFSLVFLFNMAMLATMVVQILRLRPHTQKWSHVLTLLGLSLVLGLPWALIFFSFASGTFQLVVLYLFSIITSFQGFLIFIWYWSMRLQARGGPSPLKSNSDSARLPISSGSTSSSRI

SEQ ID NO: 505 - protein, 693 aa, Homo sapiens; identical to SEQ ID NO: 504

SEQ ID NO: 506 - protein, 687 aa, Homo sapiens; identical to SEQ ID NO: 500

SEQ ID NO: 507 - protein, 256 aa, Homo sapiens
MTPQSLLQTTLFLLSLLFLVQGAHGRGHREDFRFCSQRNQTHRSSLHYKPTPDLRISIENSEEALTVHAPFPAAHPASRSFPDPRGLYHFCLYWNRHAGRLHLLYGKRDFLLSDKASSLLCFQHQEESLAQGPPLLATSVTSWWSPQNISLPSAASFTFSFHSPPHTAAHNASVDMCELKRDLQLLSQFLKHPQKASRRPSAAPASQQLQSLESKLTSVRFMGDMVSFEEDRINATVWKLQPTAGLQDLHIHSRQE

SEQ ID NO: 508 - protein, 78 aa, Homo sapiens
MTPQSLLQTTLFLLSLLFLVQGRCPRQGPQGRLSLLQPAEPDTQEQPPLQTHTRPAHLHRELRRGPHSPCPFPCSPPC

SEQ ID NO: 509 - protein, 81 aa, Homo sapiens
MTPQSLLQTTLFLLSLLFLVQGRCPRQGPQGRLSLLQPAEPDTQEQPPLQTHTRPAHLHRELRRGPHSPCPFPCSPPCFPI

SEQ ID NO: 510 - protein, 97 aa, Homo sapiens
MTPQSLLQTTLFLLSLLFLVQGSGTRHTGAASTTNPHQTCASPSRTPKRPSQSMPLSLQPTLLPDPSLTPGASTTSASTGTDMLGDYIFSMASVTSC

SEQ ID NO: 511 - protein, 97 aa, Homo sapiens; identical to SEQ ID NO: 510

SEQ ID NO: 512 - protein, 187 aa, Homo sapiens
  VARIANT 1: note = misc_feature - Xaa can be any naturally occurring amino acid
XSVDMCELKRDLQLLSQFLKHPQKASRRPSAAPASQQLQSLESKLTSVRFMGDMVSFEEDRINATVWKLQPTAGLQDLHIHSRQEEEQSEIMEYSVLLPRTLFQRTKGRSGEAEKRLLLVDFSSQALFQDKNSSQVLGEKVFGTYVPGYLLKLSAMGWGFPIFLVTLVALVDVDNYGPIILAVHRTP

SEQ ID NO: 513 - protein, 528 aa, Homo sapiens
MDHCGALFLCLCLLTLQNATTETWEELLSYMENMQVSRGRSSVFSSRQLHQLEQMLLNTSFPGYNLTLQTPTIQSLAFKLSCDFSGLSLTSATLKRVPQAGGQHARGQHAMQFPAELTRDACKTRPRELRLICIYFSNTHFFKDENNSSLLNNYVLGAQLSHGHVNNLRDPVNISFWHNQSLEGYTLTCVFWKEGARKQPWGGWSPEGCRTEQPSHSQVLCRCNHLTYFAVLMQLSPALVPAELLAPLTYISLVGCSISIVASLITVLLHFHFRKQSDSLTRIHMNLHASVLLLNIAFLLSPAFAMSPVPGSACTALAAALHYALLSCLTWMAIEGFNLYLLLGRVYNIYIRRYVFKLGVLGWGAPALLVLLSLSVKSSVYGPCTIPVFDSWENGTGFQNMSICWVRSPVVHSVLVMGYGGLTSLFNLVVLAWALWTLRRLRERADAPSVRACHDTVTVLGLTVLLGTTWALAFFSFGVFLLPQLFLFTILNSLYGFFLFLWFCSQRCRSEAEAKAQIEAFSSSQTTQ

SEQ ID NO: 514 - protein, 528 aa, Homo sapiens; identical to SEQ ID NO: 513

SEQ ID NO: 515 - protein, 221 aa, Homo sapiens
MDHCGALFLCLCLLTLQNATTETWEELLSYMENMQVSRGRSSVFSSRQLHQLEQMLLNTSFPGYNLTLQTPTIQSLAFKLSCDFSGLSLTSATLKRVPQAGGQHARGQHAMQFPAELTRDACKTRPRELRLICIYFSNTHFFKDENNSSLLNNYVLGAQLSHGHVNNLRDPVNISFWHNQSLVLLGAPPFPLHPCPSVTLLLNTGLTRPKPVEPSWKSITL

SEQ ID NO: 516 - protein, 141 aa, Homo sapiens
MFRSDRMWSCHWKWKPSPLLFLFALYIMCVPHSAVWGCANCRVVLSNPSGTFTSPCYPNDYPNSQACMWTLRAPTGYIIQITFNDFDIEEAPNCIYDSLSLDNGESQTKFCGATAKGLSFNSSANEMHVSFSSDFSIQKKG

SEQ ID NO: 517 - protein, 241 aa, Homo sapiens
MFRSDRMWSCHWKWKPSPLLFLFALYIMCVPHSVWGCANCRVVLSNPSGTFTSPCYPNDYPNSQACMWTLRAPTGYIIQITFNDFDIEEAPNCIYDSLSLDNGESQTKFCGATAKGLSFNSSANEMHVSFSSDFSIQKKGFNASYIRVAVSLRNQKVILPQTSDAYQVSVAKSISIPELSAFTLCFEATKVGHEDSDWTAFSYSNASFTQLLSFGKAKSGYFLSISDSKCLLNNALPVKEK

SEQ ID NO: 518 - protein, 1221 aa, Homo sapiens
MMFRSDRMWSCHWKWKPSPLLFLFALYIMCVPHSVWGCANCRVVLSNPSGTFTSPCYPNDYPNSQACMWTLRAPTGYIIQITFNDFDIEEAPNCIYDSLSLDNGESQTKFCGATAKGLSFNSSANEMHVSFSSDFSIQKKGFNASYIRVAVSLRNQKVILPQTSDAYQVSVAKSISIPELSAFTLCFEATKVGHEDSDWTAFSYSNASFTQLLSFGKAKSGYFLSISDSKCLLNNALPVKEKEDIFAESFEQLCLVWNNSLGSIGVNFKRNYETVPCDSTISKVIPGNGKLLLGSNQNEIVSLKGDIYNFRLWNFTMNAKILSNLSCNVKGNVVDWQNDFWNIPNLALKAESNLSCGSYLIPLPAAELASCADLGTLCQATVNSPSTTPPTVTTNMPVTNRIDKQRNDGIIYRISVVIQNILRHPEVKVQSKVAEWLNSTFQNWNYTVYVVNISFHLSAGEDKIKVKRSLEDEPRLVLWALLVYNATNNTNLEGKIIQQKLLKNNESLDEGLRLHTVNVRQLGHCLAMEEPKGYYWPSIQPSEYVLPCPDKPGFSASRICFYNATNPLVTYWGPVDISNCLKEANEVANQILNLTADGQNLTSANITNIVEQVKRIVNKEENIDITLGSTLMNIFSNILSSSDSDLLESSSEALKTIDELAFKIDLNSTSHVNITTRNLALSVSSLLPGTNAISNFSIGLPSNNESYFQMDFESGQVDPLASVILPPNLLENLSPEDSVLVRRAQFTFFNKTGLFQDVGPQRKTLVSYVMACSIGNITIQNLKDPVQIKIKHTRTQEVHHPICAFWDLNKNKSFGGWNTSGCVAHRDSDASETVCLCNHFTHFGVLMDLPRSASQLDARNTKVLTFISYIGCGISAIFSAATLLTYVAFEKLRRDYPSKILMNLSTALLFLNLLFLLDGWITSFNVDGLCIAVAVLLHFFLLATFTWMGLEAIHMYIALVKVFNTYIRRYILKFCIIGWGLPALVVSVVLASRNNNEVYGKESYGKEKGDEFCWIQDPVIFYVTCAGYFGVMFFLNIAMFIVVMVQICGRNGKRSNRTLREEVLRNLRSVVSLTFLLGMTWGFAFFAWGPLNIPFMYLFSIFNSLQGLFIFIFHCAMKENVQKQWRQHLCCGRFRLADNSDWSKTATNIIKKSSDNLGKSLSSSSIGSNSTYLTSKSKSSSTTYFKRNSHTDNVSYEHSFNKSGSLRQCFHGQVLVKTGPC

SEQ ID NO: 519 - protein, 1193 aa, Homo sapiens
MMFRSDRMWSCHWKWKPSPLLFLFALYIMCVPHSVWGCANCRVVLSNPSGTFTSPCYPNDYPNSQACMWTLRAPTGYIIQITFNDFDIEEAPNCIYDSLSLDNGESQTKFCGATAKGLSFNSSANEMHVSFSSDFSIQKKGFNASYIRVAVSLRNQKVILPQTSDAYQVSVAKSISIPELSAFTLCFEATKVGHEDSDWTAFSYSNASFTQLLSFGKAKSGYFLSISDSKCLLNNALPVKEKEDIFAESFEQLCLVWNNSLGSIGVNFKRNYETVPCDSTISKVIPGNGKLLLGSNQNEIVSLKGDIYNFRLWNFTMNAKILSNLSCNVKGNVVDWQNDFWNIPNLALKAESNLSCGSYLIPLPAAELASCADLGTLCQDGIIYRISVVIQNILRHPEVKVQSKVAEWLNSTFQNWNYTVYVVNISFHLSAGEDKIKVKRSLEDEPRLVLWALLVYNATNNTNLEGKIIQQKLLKNNESLDEGLRLHTVNVRQLGHCLAMEEPKGYYWPSIQPSEYVLPCPDKPGFSASRICFYNATNPLVTYWGPVDISNCLKEANEVANQILNLTADGQNLTSANITNIVEQVKRIVNKEENIDITLGSTLMNIFSNILSSSDSDLLESSSEALKTIDELAFKIDLNSTSHVNITTRNLALSVSSLLPGTNAISNFSIGLPSNNESYFQMDFESGQVDPLASVILPPNLLENLSPEDSVLVRRAQFTFFNKTGLFQDVGPQRKTLVSYVMACSIGNITIQNLKDPVQIKIKHTRTQEVHHPICAFWDLNKNKSFGGWNTSGCVAHRDSDASETVCLCNHFTHFGVLMDLPRSASQLDARNTKVLTFISYIGCGISAIFSAATLLTYVAFEKLRRDYPSKILMNLSTALLFLNLLFLLDGWITSFNVDGLCIAVAVLLHFFLLATFTWMGLEAIHMYIALVKVFNTYIRRYILKFCIIGWGLPALVVSVVLASRNNNEVYGKESYGKEKGDEFCWIQDPVIFYVTCAGYFGVMFFLNIAMFIVVMVQICGRNGKRSNRTLREEVLRNLRSVVSLTFLLGMTWGFAFFAWGPLNIPFMYLFSIFNSLQGLFIFIFHCAMKENVQKQWRQHLCCGRFRLADNSDWSKTATNIIKKSSDNLGKSLSSSSIGSNSTYLTSKSKSSSTTYFKRNSHTDNVSYEHSFNKSGSLRQCFHGQVLVKTGPC

SEQ ID NO: 520 - protein, 1250 aa, Homo sapiens
MMFRSDRMWSCHWKWKPSPLLFLFALYIMCVPHSVWGCANCRVVLSNPSGTFTSPCYPNDYPNSQACMWTLRAPTGYIIQITFNDFDIEEAPNCIYDSLSLDNGESQTKFCGATAKGLSFNSSANEMHVSFSSDFSIQKKGFNASYIRVAVSLRNQKVILPQTSDAYQVSVAKSISIPELSAFTLCFEATKVGHEDSDWTAFSYSNASFTQLLSFGKAKSGYFLSISDSKCLLNNALPVKEKEDIFAESFEQLCLVWNNSLGSIGVNFKRNYETVPCDSTISKVIPGNGKLLLGSNQNEIVSLKGDIYNFRLWNFTMNAKILSNLSCNVKGNVVDWQNDFWNIPNLALKAESNLSCGSYLIPLPAAELASCADLGTLCQATVNSPSTTPPTVTTNMPVTNRIDKQRNDGIIYRISVVIQNILRHPEVKVQSKVAEWLNSTFQNWNYTVYVVNISFHLSAGEDKIKVKRSLEDEPRLVLWALLVYNATNNTNLEGKIIQQKLLKNNESLDEGLRLHTVNVRQLGHCLAMEEPKGYYWPSIQPSEYVLPCPDKPGFSASRICFYNATNPLVTYWGPVDISNCLKEANEVANQILNLTADGQNLTSANITNIVEQVKRIVNKEENIDITLGSTLMNIFSNILSSSDSDLLESSSEALKTIDELAFKIDLNSTSHVNITTRNLALSVSSLLPGTNAISNFSIGLPSNNESYFQMDFESGQVDPLASVILPPNLLENLSPEDSVLVRRAQFTFFNKTGLFQDVGPQRKTLVSYVMACSIGNITIQNLKDPVQIKIKHTRTQEVHHPICAFWDLNKNKSFGGWNTSGCVAHRDSDASETVCLCNHFTHFGVLMDLPRSASQLDARNTKVLTFISYIGCGISAIFSAATLLTYVAFEKLRRDYPSKILMNLSTALLFLNLLFLLDGWITSFNVDGLCIAVAVLLHFFLLATFTWMGLEAIHMYIALVKVFNTYIRRYILKFCIIGWGLPALVVSVVLASRNNNEVYGKESYGKEKGDEFCWIQDPVIFYVTCAGYFGVMFFLNIAMFIVVMVQICGRNGKRSNRTLREEVLRNLRSVVSLTFLLGMTWGFAFFAWGPLNIPFMYLFSIFNSLQGLFIFIFHCAMKENVQKQWRQHLCCGRFRLADNSDWSKTATNIIKKSSDNLGKSLSSSSIGSNSTYLTSKSKSSSTTYFKRNSHTDSASMDKSLSKLAHADGDQTSIIPVHQVIDKVKGYCNAHSDNFYKNIIMSDTFSHSTKF

SEQ ID NO: 521 - protein, 1222 aa, Homo sapiens
MMFRSDRMWSCHWKWKPSPLLFLFALYIMCVPHSVWGCANCRVVLSNPSGTFTSPCYPNDYPNSQACMWTLRAPTGYIIQITFNDFDIEEAPNCIYDSLSLDNGESQTKFCGATAKGLSFNSSANEMHVSFSSDFSIQKKGFNASYIRVAVSLRNQKVILPQTSDAYQVSVAKSISIPELSAFTLCFEATKVGHEDSDWTAFSYSNASFTQLLSFGKAKSGYFLSISDSKCLLNNALPVKEKEDIFAESFEQLCLVWNNSLGSIGVNFKRNYETVPCDSTISKVIPGNGKLLLGSNQNEIVSLKGDIYNFRLWNFTMNAKILSNLSCNVKGNVVDWQNDFWNIPNLALKAESNLSCGSYLIPLPAAELASCADLGTLCQDGIIYRISVVIQNILRHPEVKVQSKVAEWLNSTFQNWNYTVYVVNISFHLSAGEDKIKVKRSLEDEPRLVLWALLVYNATNNTNLEGKIIQQKLLKNNESLDEGLRLHTVNVRQLGHCLAMEEPKGYYWPSIQPSEYVLPCPDKPGFSASRICFYNATNPLVTYWGPVDISNCLKEANEVANQILNLTADGQNLTSANITNIVEQVKRIVNKEENIDITLGSTLMNIFSNILSSSDSDLLESSSEALKTIDELAFKIDLNSTSHVNITTRNLALSVSSLLPGTNAISNFSIGLPSNNESYFQMDFESGQVDPLASVILPPNLLENLSPEDSVLVRRAQFTFFNKTGLFQDVGPQRKTLVSYVMACSIGNITIQNLKDPVQIKIKHTRTQEVHHPICAFWDLNKNKSFGGWNTSGCVAHRDSDASETVCLCNHFTHFGVLMDLPRSASQLDARNTKVLTFISYIGCGISAIFSAATLLTYVAFEKLRRDYPSKILMNLSTALLFLNLLFLLDGWITSFNVDGLCIAVAVLLHFFLLATFTWMGLEAIHMYIALVKVFNTYIRRYILKFCIIGWGLPALVVSVVLASRNNNEVYGKESYGKEKGDEFCWIQDPVIFYVTCAGYFGVMFFLNIAMFIVVMVQICGRNGKRSNRTLREEVLRNLRSVVSLTFLLGMTWGFAFFAWGPLNIPFMYLFSIFNSLQGLFIFIFHCAMKENVQKQWRQHLCCGRFRLADNSDWSKTATNIIKKSSDNLGKSLSSSSIGSNSTYLTSKSKSSSTTYFKRNSHTDSASMDKSLSKLAHADGDQTSIIPVHQVIDKVKGYCNAHSDNFYKNIIMSDTFSHSTKF

SEQ ID NO: 522 - protein, 103 aa, Homo sapiens
  VARIANT 1: note = misc_feature - Xaa can be any naturally occurring amino acid
XLGSTLMNIFSNILSSSDSDLLESSSEALKTIDELAFKIDLNSTSHVNITTRNLALSVSSLLPGTNAISNFSIGLPSNNESYFQLLSFTTCFEKTSKSAADGF

SEQ ID NO: 523 - protein, 135 aa, Homo sapiens
  VARIANT 1: note = misc_feature - Xaa can be any naturally occurring amino acid
XVKVQSKVAEWLNSTFQNWNYTVYVVNISFHLSAGEDKIKVKRSLEDEPRLVLWALLVYNATNNTNLEGKIIQQKLLKNNESLDEGLRLHTVNVRQLGHCLAMEEPKGYYWPSIQPSEYVLPCPDKPGFSASRIW

SEQ ID NO: 524 - protein, 73 aa, Homo sapiens
GQNLIRSIQINITRLAGTFGDVAVGLRISSDHKEQPIVTENAERQLVVKDGATYKVDVVPIKNQVVGCQSLPW

SEQ ID NO: 525 - protein, 123 aa, Homo sapiens
MAAVTHYLYLCQFSWMLIQSVNFWYVLVMNDEHTERRYLLFFLLSWGLPAFVVILLIVILKGIYHQSMSQIYGLIHGDLCFIPNVYAALFTAALVPLTCLVVVFVVFIHAYQVKPQWKAYDDV

SEQ ID NO: 526 - protein, 123 aa, Homo sapiens; identical to SEQ ID NO: 525

SEQ ID NO: 527 - protein, 334 aa, Homo sapiens
MAAVTHYLYLCQFSWMLIQSVNFWYVLVMNDEHTERRYLLFFLLSWGLPAFVVILLIVILKGIYHQSMSQIYGLIHGDLCFIPNVYAALFTAALVPLTCLVVVFVVFIHAYQVKPQWKAYDDVFRGRTNAAEIPLILYLFALISVTWLWGGLHMAYRHFWMLVLFVIFNSLQGLYVFMVYFILHNQMCCPMKASYTVEMNGHPGPSTAFFTPGSGMPPAGGEISKSTQNLIGAMEEVPPDWERASFQQGSQASPDLKPSPQNGATFPSSGGYGQGSLIADEESQEFDDLIFALKTGAGLSVSDNESGQGSQEGGTLTDSQIVELRRIPIADTHL

SEQ ID NO: 528 - protein, 192 aa, Homo sapiens
MAAVTHYLYLCQFSWMLIQSVNFWYVLVMNDEHTERRYLLFFLLSWGLPAFVVILLIVILKGIYHQSMSQIYGLIHGDLCFIPNVYAALFTAALVPLTCLVVVFVVFIHAYQVKPQWKAYDDVFRGRTNAAEIPLILYLFALISVTWLWGGLHMAYRHFWMLVLFVIFNSLQVLVSVSVIMNLVKAARRGAP

SEQ ID NO: 529 - protein, 148 aa, Homo sapiens
MAKRSAAAAVPGMPSASLLVNLLSALLILFVFGETEIRFTGQTEFVVNETSTTVIRLIIERIGEPANVTAIVSLYGEDAGDFFDTYAAAFIPAGETNRTVYIAVCDDDLPEPDETFIFHLTLQLPSIAVSEPKGRNESMPLTLIREKG

SEQ ID NO: 530 - protein, 2038 aa, Homo sapiens
MINESKGDAIYSAVYDVVRNRGNFGDVSVSWVVSPDFTQDVFPVQGTVVFGDQEFSKNITIYSLPDEIPEEMEEFTVILLNGTGGAKVGNRTTATLRIRRNDDPIYFAEPRVVRVQEGETANFTVLRNGSVDVTCMVQYATKDGKATARERDFIPVEKGETLIFEVGSRQQSISIFVNEDGIPETDEPFYIILLNSTGDTVVYQYGVATVIIEANDDPNGIFSLEPIDKAVEEGKTNAFWILRHRGYFGSVSVSWQLFQNDSALQPGQEFYETSGTVNFMDGEEAKPIILHAFPDKIPEFNEFYFLKLVNISGPGGQLAETNLQVTVMVPFNDDPFGVFILDPECLEREVAEDVLSEDDMSYITNFTILRQQGVFGDVQLGWEILSSEFPAGLPPMIDFLLVGIFPTTVHLQQHMRRHHSGTDALYFTGLEGAFGTVNPKYHPSRNNTIANFTFSAWVMPNANTNGFIIAKDDGNGSIYYGVKIQTNESHVTLSLHYKTLGSNATYIAKTTVMKYLEESVWLHLLIILEDGIIEFYLDGNAMPRGIKSLKGEAITDGPGILRIGAGINGNDRFTGLMQDVRSYERKLTLEEIYELHAMPAKSDLHPISGYLEFRQGETNKSFIISARDDNDEEGEELFILKLVSVYGGARISEENTTARLTIQKSDNANGLFGFTGACIPEIAEEGSTISCVVERTRGALDYVHVFYTISQIETDGINYLVDDFANASGTITFLPWQRSEVLNIYVLDDDIPELNEYFRVTLVSAIPGDGKLGSTPTSGASIDPEKETTDITIKASDHPYGLLQFSTGLPPQPKDAMTLPASSVPHITVEEEDGEIRLLVIRAQGLLGRVTAEFRTVSLTAFSPEDYQNVAGTLEFQPGERYKYIFINITDNSIPELEKSFKVELLNLEGGVAELFRVDGSGSGDGDMEFFLPTIHKRASLGVASQILVTIAASDHAHGVFEFSPESLFVSGTEPEDGYSTVTLNVIRHHGTLSPVTLHWNIDSDPDGDLAFTSGNITFEIGQTSANITVEILPDEDPELDKAFSVSVLSVSSGSLGAHINATLTVLASDDPYGIFIFSEKNRPVKVEEATQNITLSIIRLKGLMGKVLVSYATLDDMEKPPYFPPNLARATQGRDYIPASGFALFGANQSEATIAISILDDDEPERSESVFIELLNSTLVAKVQSRSIPNSPRLGPKVETIAQLIIIANDDAFGTLQLSAPIVRVAENHVGPIINVTRTGGAFADVSVKFKAVPITAIAGEDYSIASSDVVLLEGETSKAVPIYVINDIYPELEESFLVQLMNETTGGARLGALTEAVIIIEASDDPYGLFGFQITKLIVEEPEFNSVKVNLPIIRNSGTLGNVTVQWVATINGQLATGDLRVVSGNVTFAPGETIQTLLLEVLADDVPEIEEVIQVQLTDASGGGTIGLDRIANIIIPANDDPYGTVAFAQMVYRVQEPLERSSCANITVRRSGGHFGRLLLFYSTSDIDVVALAMEEGQDLLSYYESPIQGVPDPLWRTWMNVSAVGEPLYTCATLCLKEQACSAFSFFSASEGPQCFWMTSWISPAVNNSDFWTYRKNMTRVASLFSGQAVAGSDYEPVTRQWAIMQEGDEFANLTVSILPDDFPEMDESFLISLLEVHLMNISASLKNQPTIGQPNISTVVIALNGDAFGVFVIYNISPNTSEDGLFVEVQEQPQTLVELMIHRTGGSLGQVAVEWRVVGGTATEGLDFIGAGEILTFAEGETKKTVILTILDDSEPEDDESIIVSLVYTEGGSRILPSSDTVRVNILANDNVAGIVSFQTASRSVIGHEGEILQFHVIRTFPGRGNVTVNWKIIGQNLELNFANFSGQLFFPEGSLNTTLFVHLLDDNIPEEKEVYQVILYDVRTQGVPPAGIALLDAQGYAAVLTVEASDEPHGVLNFALSSRFVLLQEANITIQLFINREFGSLGAINVTYTTVPGMLSLKNQTVGNLAEPEVDFVPIIGFLILEEGETAAAINITILEDDVPELEEYFLVNLTYVGLTMAASTSFPPRL

SEQ ID NO: 531 - protein, 6306 aa, Homo sapiens
MSVFLGPGMPSASLLVNLLSALLILFVFGETEIRFTGQTEFVVNETSTTVIRLIIERIGEPANVTAIVSLYGEDAGDFFDTYAAAFIPAGETNRTVYIAVCDDDLPEPDETFIFHLTLQKPSANVKLGWPRTVTVTILSNDNAFGIISFNMLPSIAVSEPKGRNESMPLTLIREKGTYGMVMVTFEVEGGPNPPDEDLSPVKGNITFPPGRATVIYNLTVLDDEVPENDEIFLIQLKSVEGGAEINTSRNSIEIIIKKNDSPVRFLQSIYLVPEEDHILIIPVVRGKDNNGNLIGSDEYEVSISYAVTTGNSTAHAQQNLDFIDLQPNTTVVFPPFIHESHLKFQIVDDTIPEIAESFHIMLLKDTLQGDAVLISPSVVQVTIKPNDKPYGVLSFNSVLFERTVIIDEDRISRYEEITVVRNGGTHGNVSANWVLTRNSTDPSPVTADIRPSSGVLHFAQGQMLATIPLTVVDDDLPEEAEAYLLQILPHTIRGGAEVSEPAELLFYIQDSDDVYGLITFFPMENQKIESSPGERYLSLSFTRLGGTKGDVRLLYSVLYIPAGAVDPLQAKEGILNISRRNDLIFPEQKTQVTTKLPIRNDAFLQNGAHFLVQLETVELLNIIPLIPPISPRFGEICNISLLVTPAIANGEIGFLSNLPIILHEPEDFAAEVVYIPLHRDGTDGQATVYWSLKPSGFNSKAVTPDDIGPFNGSVLFLSGQSDTTINITIKGDDIPEMNETVTLSLDRVNVENQVLKSGYTSRDLIILENDDPGGVFEFSPASRGPYVIKEGESVELHIIRSRGSLVKQFLHYRVEPRDSNEFYGNTGVLEFKPGEREIVITLLARLDGIPELDEHYWVVLSSHGERESKLGSATIVNITILKNDDPHGIIEFVSDGLIVMINESKGDAIYSAVYDVVRNRGNFGDVSVSWVVSPDFTQDVFPVQGTVVFGDQEFSKNITIYSLPDEIPEEMEEFTVILLNGTGGAKVGNRTTATLRIRRNDDPIYFAEPRVVRVQEGETANFTVLRNGSVDVTCMVQYATKDGKATARERDFIPVEKGETLIFEVGSRQQSISIFVNEDGIPETDEPFYIILLNSTGDTVVYQYGVATVIIEANDDPNGIFSLEPIDKAVEEGKTNAFWILRHRGYFGSVSVSWQLFQNDSALQPGQEFYETSGTVNFMDGEEAKPIILHAFPDKIPEFNEFYFLKLVNISGGSPGPGGQLAETNLQVTVMVPFNDDPFGVFILDPECLEREVAEDVLSEDDMSYITNFTILRQQGVFGDVQLGWEILSSEFPAGLPPMIDFLLVGIFPTTVHLQQHMRRHHSGTDALYFTGLEGAFGTVNPKYHPSRNNTIANFTFSAWVMPNANTNGFIIAKDDGNGSIYYGVKIQTNESHVTLSLHYKTLGSNATYIAKTTVMKYLEESVWLHLLIILEDGIIEFYLDGNAMPRGIKSLKGEAITDGPGILRIGAGINGNDRFTGLMQDVRSYERKLTLEEIYELHAMPAKSDLHPISGYLEFRQGETNKSFIISARDDNDEEGEELFILKLVSVYGGARISEENTTARLTIQKSDNANGLFGFTGACIPEIAEEGSTISCVVERTRGALDYVHVFYTISQIETDGINYLVDDFANASGTITFLPWQRSEVLNIYVLDDDIPELNEYFRVTLVSAIPGDGKLGSTPTSGASIDPEKETTDITIKASDHPYGLLQFSTGLPPQPKDAMTLPASSVPHITVEEEDGEIRLLVIRAQGLLGRVTAEFRTVSLTAFSPEDYQNVAGTLEFQPGERYKYIFINITDNSIPELEKSFKVELLNLEGGVAELFRVDGSGSGDGDMEFFLPTIHKRASLGVASQILVTIAASDHAHGVFEFSPESLFVSGTEPEDGYSTVTLNVIRHHGTLSPVTLHWNIDSDPDGDLAFTSGNITFEIGQTSANITVEILPDEDPELDKAFSVSVLSVSSGSLGAHINATLTVLASDDPYGIFIFSEKNRPVKVEEATQNITLSIIRLKGLMGKVLVSYATLDDMEKPPYFPPNLARATQGRDYIPASGFALFGANQSEATIAISILDDDEPERSESVFIELLNSTLVAKVQSRSIPNSPRLGPKVETIAQLIIIANDDAFGTLQLSAPIVRVAENHVGPIINVTRTGGAFADVSVKFKAVPITAIAGEDYSIASSDVVLLEGETSKAVPIYVINDIYPELEESFLVQLMNETTGGARLGALTEAVIIIEASDDPYGLFGFQITKLIVEEPEFNSVKVNLPIIRNSGTLGNVTVQWVATINGQLATGDLRVVSGNVTFAPGETIQTLLLEVLADDVPEIEEVIQVQLTDASGGGTIGLDRIANIIIPANDDPYGTVAFAQMVYRVQEPLERSSCANITVRRSGGHFGRLLLFYSTSDIDVVALAMEEGQDLLSYYESPIQGVPDPLWRTWMNVSAVGEPLYTCATLCLKEQACSAFSFFSASEGPQCFWMTSWISPAVNNSDFWTYRKNMTRVASLFSGQAVAGSDYEPVTRQWAIMQEGDEFANLTVSILPDDFPEMDESFLISLLEVHLMNISASLKNQPTIGQPNISTVVIALNGDAFGVFVIYNISPNTSEDGLFVEVQEQPQTLVELMIHRTGGSLGQVAVEWRVVGGTATEGLDFIGAGEILTFAEGETKKTVILTILDDSEPEDDESIIVSLVYTEGGSRILPSSDTVRVNILANDNVAGIVSFQTASRSVIGHEGEILQFHVIRTFPGRGNVTVNWKIIGQNLELNFANFSGQLFFPEGSLNTTLFVHLLDDNIPEEKEVYQVILYDVRTQGVPPAGIALLDAQGYAAVLTVEASDEPHGVLNFALSSRFVLLQEANITIQLFINREFGSLGAINVTYTTVPGMLSLKNQTVGNLAEPEVDFVPIIGFLILEEGETAAAINITILEDDVPELEEYFLVNLTYVGLTMAASTSFPPRLDSEGLTAQVIIDANDGARGVIEWQQSRFEVNETHGSLTLVAQRSREPLGHVSLFVYAQNLEAQVGLDYIFTPMILHFADGERYKNVNIMILDDDIPEGDEKFQLILTNPSPGLELGKNTIALIIVLANDDGPGVLSFNNSEHFFLREPTALYVQESVAVLYIVREPAQGLFGTVTVQFIVTEVNSSNESKDLTPSKGYIVLEEGVRFKALQISAILDTEPEMDEYFVCTLFNPTGGARLGVHVQTLITVLQNQAPLGLFSISAVENRATSIDIEEANRTVYLNVSRTNGIDLAVSVQWETVSETAFGMRGMDVVFSVFQSFLDESASGWCFFTLENLIYGIMLRKSSVTVYRWQGIFIPVEDLNIENPKTCEAFNIGFSPYFVITHEERNEEKPSLNSVFTFTSGFKLFLVQTIIILESSQVRYFTSDSQDYLIIASQRDDSELTQVFRWNGGSFVLHQKLPVRGVLTVALFNKGGSVFLAISQANARLNSLLFRWSGSGFINFQEVPVSGTTEVEALSSANDIYLIFAENVFLGDQNSIDIFIWEMGQSSFRYFQSVDFAAVNRIHSFTPASGIAHILLIGQDMSALYCWNSERNQFSFVLEVPSAYDVASVTVKSLNSSKNLIALVGAHSHIYELAYISSHSDFIPSSGELIFEPGEREATIAVNILDDTVPEKEESFKVQLKNPKGGAEIGINDSVTITILSNDDAYGIVAFAQNSLYKQVEEMEQDSLVTLNVERLKGTYGRITIAWEADGSISDIFPTSGVILFTEGQVLSTITLTILADNIPELSEVVIVTLTRITTEGVEDSYKGATIDQDRSKSVITTLPNDSPFGLVGWRAASVFIRVAEPKENTTTLQLQIARDKGLLGDIAIHLRAQPNFLLHVDNQATENEDYVLQETIIIMKENIKEAHAEVSILPDDLPELEEGFIVTITEVNLVNSDFSTGQPSVRRPGMEIAEIMIEENDDPRGIFMFHVTRGAGEVITAYEVPPPLNVLQVPVVRLAGSFGAVNVYWKASPDSAGLEDFKPSHGILEFADKQVTAMIEITIIDDAEFELTETFNISLISVAGGGRLGDDVVVTVVIPQNDSPFGVFGFEEKTVMIDESLSSDDPDSYVTLTVVRSPGGKGTVRLEWTIDEKAKHNLSPLNGTLHFDETESQKTIVLHTLQDTVLEEDRRFTIQLISIDEVEISPVKGSASIIIRGDKRASGEVGIAPSSRHILIGEPSAKYNGTAIISLVRGPGILGEVTVFWRIFPPSVGEFAETSGKLTMRDEQSAVIVVIQALNDDIPEEKSFYEFQLTAVSEGGVLSESSSTANITVVASDSPYGRFAFSHEQLRVSEAQRVNITIIRSSGDFGHVRLWYKTMSGTAEAGLDFVPAAGELLFEAGEMRKSLHVEILDDDYPEGPEEFSLTITKVELQGRGYDFTIQENGLQIDQPPEIGNISIVRIIIMKNDNAEGIIEFDPKYTAFEVEEDVGLIMIPVVRLHGTYGYVTADFISQSSSASPGGVDYILHGSTVTFQHGQNLSFINISIIDDNESEFEEPIEILLTGATGGAVLGRHLVSRIIIAKSDSPFGVIRFLNQSKISIANPNSTMILSLVLERTGGLLGEIQVNWETVGPNSQEALLPQNRDIADPVSGLFYFGEGEGGVRTIILTIYPHEEIEVEETFIIKLHLVKGEAKLDSRAKDVTLTIQEFGDPNGVVQFAPETLSKKTYSEPLALEGPLLITFFVRRVKGTFGEIMVYWELSSEFDITEDFLSTSGFFTIADGESEASFDVHLLPDEVPEIEEDYVIQLVSVEGGAELDLEKSITWFSVYANDDPHGVFALYSDRQSILIGQNLIRSIQINITRLAGTFGDVAVGLRISSDHKEQPIVTENAERQLVVKDGATYKVDVVPIKNQVFLSLGSNFTLQLVTVMLVGGRFYGMPTILQEAKSAVLPVSEKAANSQVGFESTAFQLMNITAGTSHVMISRRGTYGALSVAWTTGYAPGLEIPEFIVVGNMTPTLGSLSFSHGEQRKGVFLWTFPSPGWPEAFVLHLSGVQSSAPGGAQLRSGFIVAEIEPMGVFQFSTSSRNIIVSEDTQMIRLHVQRLFGFHSDLIKVSYQTTAGSAKPLEDFEPVQNGELFFQKFQTEVDFEITIINDQLSEIEEFFYINLTSVEIRGLQKFDVNWSPRLNLDFSVAVITILDNDDLAGMDISFPETTVAVAVDTTLIPVETESTTYLSTSKTTTILQPTNVVAIVTEATGVSAIPEKLVTLHGTPAVSEKPDVATVTANVSIHGTFSLGPSIVYIEEEMKNGTFNTAEVLIRRTGGFTGNVSITVKTFGERCAQMEPNALPFRGIYGISNLTWAVEEEDFEEQTLTLIFLDGERERKVSVQILDDDEPEGQEFFYVFLTNPQGGAQIVEEKDDTGFAAFAMVIITGSDLHNGIIGFSEESQSGLELREGAVMRRLHLIVTRQPNRAFEDVKVFWRVTLNKTVVVLQKDGVNLVEELQSVSGTTTCTMGQTKCFISIELKPEKVPQVEVYFFVELYEATAGAAINNSARFAQIKILESDESQSLVYFSVGSRLAVAHKKATLISLQVARDSGTGLMMSVNFSTQELRSAETIGRTIISPAISGKDFVITEGTLVFEPGQRSTVLDVILTPETGSLNSFPKRFQIVLFDPKGGARIDKVYGTANITLVSDADSQAIWGLADQLHQPVNDDILNRVLHTISMKVATENTDEQLSAMMHLIEKITTEGKIQAFSVASRTLFYEILCSLINPKRKDTRGFSHFAEVTENFAFSLLTNVTCGSPGEKSKTILDSCPYLSILALHWYPQQINGHKFEGKEGDYIRIPERLLDVQDAEIMAGKSTCKLVQFTEYSSQQWFISGNNLPTLKNKVLSLSVKGQSSQLLTNDNEVLYRIYAAEPRIIPQTSLCLLWNQAAASWLSDSQFCKVVEETADYVECACSHMSVYAVYARTDNLSSYNEAFFTSGFICISGLCLAVLSHIFCARYSMFAAKLLTHMMAASLGTQILFLASAYASPQLAEESCSAMAAVTHYLYLCQFSWMLIQSVNFWYVLVMNDEHTERRYLLFFLLSWGLPAFVVILLIVILKGIYHQSMSQIYGLIHGDLCFIPNVYAALFTAALVPLTCLVVVFVVFIHAYQVKPQWKAYDDVFRGRTNAAEIPLILYLFALISVTWLWGGLHMAYRHFWMLVLFVIFNSLQGLYVFMVYFILHNQMCCPMKASYTVEMNGHPGPSTAFFTPGSGMPPAGGEISKSTQNLIGAMEEVPPDWERASFQQGSQASPDLKPSPQNGATFPSSGGYGQGSLIADEESQEFDDLIFALKTGAGLSVSDNESGQGSQEGGTLTDSQIVELRRIPIADTHL

SEQ ID NO: 532 - protein, 6306 aa, Homo sapiens; identical to SEQ ID NO: 531

SEQ ID NO: 533 - protein, 938 aa, Homo sapiens
NSTMILSLVLERTGGLLGEIQVNWETVGPNSQEALLPQNRDIADPVSGLFYFGEGEGGVRTIILTIYPHEEIEVEETFIIKLHLVKGEAKLDSRAKDVTLTIQEFGDPNGVVQFAPETLSKKTYSEPLALEGPLLITFFVRRVKGTFGEIMVYWELSSEFDITEDFLSTSGFFTIADGESEASFDVHLLPDEVPEIEEDYVIQLVSVEGGAELDLEKSITWFSVYANDDPHGVFALYSDRQSILIGQNLIRSIQINITRLAGTFGDVAVGLRISSDHKEQPIVTENAERQLVVKDGATYKVDVVPIKNQVFLSLGSNFTLQLVTVMLVGGRFYGMPTILQEAKSAVLPVSEKAANSQVGFESTAFQLMNITAGTSHVMISRRGTYGALSVAWTTGYAPGLEIPEFIVVGNMTPTLGSLSFSHGEQRKGVFLWTFPSPGWPEAFVLHLSGVQSSAPGGAQLRSGFIVAEIEPMGVFQFSTSSRNIIVSEDTQMIRLHVQRLFGFHSDLIKVSYQTTAGSAKPLEDFEPVQNGELFFQKFQTEVDFEITIINDQLSEIEEFFYINLTSVEIRGLQKFDVNWSPRLNLDFSVAVITILDNDDLAGMDISFPETTVAVAVDTTLIPVETESTTYLSTSKTTTILQPTNVVAIVTEATGVSAIPEKLVTLHGTPAVSEKPDVATVTANVSIHGTFSLGPSIVYIEEEMKNGTFNTAEVLIRRTGGFTGNVSITVKTFGERCAQMEPNALPFRGIYGISNLTWAVEEEDFEEQTLTLIFLDGERERKVSVQILDDDEPEGQEFFYVFLTNPQGGAQIVEEKDDTGFAAFAMVIITGSDLHNGIIGFSEESQSGLELREGAVMRRLHLIVTRQPNRAFEDVKVFWRVTLNKTVVVLQKDGVNLVEELQSVSGTTTCTMGQTKCFISIELKPEKRNATEPIIKSFS

SEQ ID NO: 534 - protein, 2624 aa, Homo sapiens
QLKNPKGGAEIGINDSVTITILSNDDAYGIVAFAQNSLYKQVEEMEQDSLVTLNVERLKGTYGRITIAWEADGSISDIFPTSGVILFTEGQVLSTITLTILADNIPELSEVVIVTLTRITTEGVEDSYKGATIDQDRSKSVITTLPNDSPFGLVGWRAASVFIRVAEPKENTTTLQLQIARDKGLLGDIAIHLRAQPNFLLHVDNQATENEDYVLQETIIIMKENIKEAHAEVSILPGAGEVITAYEVPPPLNVLQVPVVRLAGSFGAVNVYWKASPDSAGLEDFKPSHGILEFADKQVTAMIEITIIDDAEFELTETFNISLISVAGGGRLGDDVVVTVVIPQNDSPFGVFGFEEKTVMIDESLSSDDPDSYVTLTVVRSPGGKGTVRLEWTIDEKAKHNLSPLNGTLHFDETESQKTIVLHTLQDTVLEEDRRFTIQLISIDEVEISPVKGSASIIIRGDKRASGEVGIAPSSRHILIGEPSAKYNGTAIISLVRGPGILGEVTVFWRIFPPSVGEFAETSGKLTMRDEQSAVIVVIQALNDDIPEEKSFYEFQLTAVSEGGVLSESSSTANITVVASDSPYGRFAFSHEQLRVSEAQRVNITIIRSSGDFGHVRLWYKTMSGTAEAGLDFVPAAGELLFEAGEMRKSLHVEILDDDYPEGPEEFSLTITKVELQGRGYDFTIQENGLQIDQPPEIGNISIVRIIIMKNDNAEGIIEFDPKYTAFEVEEDVGLIMIPVVRLHGTYGYVTADFISQSSSASPGGVDYILHGSTVTFQHGQNLSFINISIIDDNESEFEEPIEILLTGATGGAVLGRHLVSRIIIAKSDSPFGVIRFLNQSKISIANPNSTMILSLVLERTGGLLGEIQVNWETVGPNSQEALLPQNRDIADPVSGLFYFGEGEGGVRTIILTIYPHEEIEVEETFIIKLHLVKGEAKLDSRAKDVTLTIQEFGDPNGVVQFAPETLSKKTYSEPLALEGPLLITFFVRRVKGTFGEIMVYWELSSEFDITEDFLSTSGFFTIADGESEASFDVHLLPDEVPEIEEDYVIQLVSVEGGAELDLEKSITWFSVYANDDPHGVFALYSDRQSILIGQNLIRSIQINITRLAGTFGDVAVGLRISSDHKEQPIVTENAERQLVVKDGATYKVDVVPIKNQVFLSLGSNFTLQLVTVMLVGGRFYGMPTILQEAKSAVLPVSEKAANSQVGFESTAFQLMNITAGTSHVMISRRGTYGALSVAWTTGYAPGLEIPEFIVVGNMTPTLGSLSFSHGEQRKGVFLWTFPSPGWPEAFVLHLSGVQSSAPGGAQLRSGFIVAEIEPMGVFQFSTSSRNIIVSEDTQMIRLHVQRLFGFHSDLIKVSYQTTAGSAKPLEDFEPVQNGELFFQKFQTEVDFEITIINDQLSEIEEFFYINLTSVEIRGLQKFDVNWSPRLNLDFSVAVITILDNDDLAGMDISFPETTVAVAVDTTLIPVETESTTYLSTSKTTTILQPTNVVAIVTEATGVSAIPEKLVTLHGTPAVSEKPDVATVTANVSIHGTFSLGPSIVYIEEEMKNGTFNTAEVLIRRTGGFTGNVSITVKTFGERCAQMEPNALPFRGIYGISNLTWAVEEEDFEEQTLTLIFLDGERERKVSVQILDDDEPEGQEFFYVFLTNPQGGAQIVEEKDDTGFAAFAMVIITGSDLHNGIIGFSEESQSGLELREGAVMRRLHLIVTRQPNRAFEDVKVFWRVTLNKTVVVLQKDGVNLVEELQSVSGTTTCTMGQTKCFISIELKPEKVPQVEVYFFVELYEATAGAAINNSARFAQIKILESDESQSLVYFSVGSRLAVAHKKATLISLQVARDSGTGLMMSVNFSTQELRSAETIGRTIISPAISGKDFVITEGTLVFEPGQRSTVLDVILTPETGSLNSFPKRFQIVLFDPKGGARIDKVYGTANITLVSDADSQAIWGLADQLHQPVNDDILNRVLHTISMKVATENTDEQLSAMMHLIEKITTEGKIQAFSVASRTLFYEILCSLINPKRKDTRGFSHFAEVTENFAFSLLTNVTCGSPGEKSKTILDSCPYLSILALHWYPQQINGHKFEGKEGDYIRIPERLLDVQDAEIMAGKSTCKLVQFTEYSSQQWFISGNNLPTLKNKVLSLSVKGQSSQLLTNDNEVLYRIYAAEPRIIPQTSLCLLWNQAAASWLSDSQFCKVVEETADYVECACSHMSVYAVYARTDNLSSYNEAFFTSGFICISGLCLAVLSHIFCARYSMFAAKLLTHMMAASLGTQILFLASAYASPQLAEESCSAMAAVTHYLYLCQFSWMLIQSVNFWYVLVMNDEHTERRYLLFFLLSWGLPAFVVILLIVILKGIYHQSMSQIYGLIHGDLCFIPNVYAALFTAALVPLTCLVVVFVVFIHAYQVKPQWKAYDDVFRGRTNAAEIPLILYLFALISVTWLWGGLHMAYRHFWMLVLFVIFNSLQGLYVFMVYFILHNQMCCPMKASYTVEMNGHPGPSTAFFTPGSGMPPAGGEISKSTQNLIGAMEEVPPDWERASFQQGSQASPDLKPSPQNGATFPSSGGYGQGSLIADEESQEFDDLIFALKTGAGLSVSDNESGQGSQEGGTLTDSQIVELRRIPIADTHL

SEQ ID NO: 535 - protein, 390 aa, Homo sapiens
TFQHGQNLSFINISIIDDNESEFEEPIEILLTGATGGAVLGRHLVSRIIIAKSDSPFGVIRFLNQSKISIANPNSTMILSLVLERTGGLLGEIQVNWETVGPNSQEALLPQNRDIADPVSGLFYFGEGEGGVRTIILTIYPHEEIEVEETFIIKLHLVKGEAKLDSRAKDVTLTIQEFGDPNGVVQFAPETLSKKTYSEPLALEGPLLITFFVRRVKGTFGEIMVYWELSSEFDITEDFLSTSGFFTIADGESEASFDVHLLPDEVPEIEEDYVIQLVSVEGGAELDLEKSITWFSVYANDDPHGVFALYSDRQSILIGQNLIRSIQINITRLAGTFGDVAVGLRISSDHKEQPIVTENAERQLVVKDGATYKVDVVPIKNQVCGISSVS

SEQ ID NO: 536 - protein, 99 aa, Homo sapiens
VPHITVEEEDGEIRLLVIRAQGLLGRVTAEFRTVSLTAFSPEDYQNVAGTLEFQPGERYKYIFINITDNSIPELEKSFKVELLNLEGGVCEFLVRAGDE

SEQ ID NO: 537 - protein, 80 aa, Homo sapiens
  VARIANT 1: note = misc_feature - Xaa can be any naturally occurring amino acid
XDEQLSAMMHLIEKITTEGKIQAFSVASRTLFYEILCSLINPKRKDTRGFSHFAEVTENFAFSLLTNVTCGSPGEKSPAC

SEQ ID NO: 538 - protein, 72 aa, Homo sapiens
  VARIANT 1: note = misc_feature - Xaa can be any naturally occurring amino acid
XEGSTISCVVERTRGALDYVHVFYTISQIETDGINYLVDDFANASGTITFLPWQRSELLIEVSLPIIIYNCN

SEQ ID NO: 539 - protein, 567 aa, Homo sapiens
  VARIANT 1: note = misc_feature - Xaa can be any naturally occurring amino acid
XITVEEEDGEIRLLVIRAQGLLGRVTAEFRTVSLTAFSPEDYQNVAGTLEFQPGERYKYIFINITDNSIPELEKSFKVELLNLEGGAELFRVDGSGSGDGDMEFFLPTIHKRASLGVASQILVTIAASDHAHGVFEFSPESLFVSGTEPEDGYSTVTLNVIRHHGTLSPVTLHWNIDSDPDGDLAFTSGNITFEIGQTSANITVEILPDEDPELDKAFSVSVLSVSSGSLGAHINATLTVLASDDPYGIFIFSEKNRPVKVEEATQNITLSIIRLKGLMGKVLVSYATLDDMEKPPYFPPNLARATQGRDYIPASGFALFGANQSEATIAISILDDDEPERSESVFIELLNSTLVAKVQSRSIPNSPRLGPKVETIAQLIIIANDDAFGTLQLSAPIVRVAENHVGPIINVTRTGGAFADVSVKFKAVPITAIAGEDYSIASSDVVLLEGETSKAVPIYVINDIYPELEESFLVQLMNETTGGARLGALTEAVIIIEASDDPYGLFGFQITKLIVEEPEFNSVKVNLPIIRNSGTLGNVTVQWVATINGQLATGDLRVVSGYPSATN

SEQ ID NO: 540 - protein, 65 aa, Homo sapiens
  VARIANT 1: note = misc_feature - Xaa can be any naturally occurring amino acid
XLPTIHKRASLGVASQILVTIAASDHAHGVFEFSPESLFVSGTEPEDGYSTVTLNFQILHVLGLR

SEQ ID NO: 541 - protein, 173 aa, Homo sapiens
MSVKSSKLMFLCHGSSRSLHSGSLTSCNTGVCCSLDADKYENDPELEKIRRERNYSWMDIITICKDKLPNYEEKIKMFYEEHLHLDDEIRYILDGSGYFDVRDKEDQWIRIFMEKGDMVTLPAGIYHRFTVDEKNYTKAMRLFVGEPVWTAYNRPADHFEARGQYVKFLAQTA

SEQ ID NO: 542 - protein, 179 aa, Homo sapiens
MVQAWYMDDAPGDPRQPHRPDPGRPVGLEQLRRLGVLYWKLDADKYENDPELEKIRRERNYSWMDIITICKDKLPNYEEKIKMFYEEHLHLDDEIRYILDGSGYFDVRDKEDQWIRIFMEKGDMVTLPAGIYHRFTVDEKNYTKAMRLFVGEPVWTAYNRPADHFEARGQYVKFLAQTA

SEQ ID NO: 543 - protein, 117 aa, Homo sapiens
  VARIANT 1: note = misc_feature - Xaa can be any naturally occurring amino acid
XRWECCAFSPGPACVVALAVASLPLNCAASADSKRGRWARDSSTCASRRVCGAAGDVRGDSCPSVAASVAPACDPGGQNYTKAMRLFVGEPVWTAYNRPADHFEARGQYVKFLAQTA

SEQ ID NO: 544 - protein, 59 aa, Homo sapiens
MKYPLMPLVNDLTFSFLVFWFCLPVGLLLLLIIWLRFLLSQDILQVRRYRYDANILTAS

SEQ ID NO: 545 - protein, 80 aa, Homo sapiens
MKYPLMPLVNDLTFSFLVFWFCLPVGLLLLLIIWLRFLLSQDSEENDSSVCLDWEPWSKGPAEFCWKGTLHGQEKERPCW

SEQ ID NO: 546 - protein, 80 aa, Homo sapiens; identical to SEQ ID NO: 545

SEQ ID NO: 547 - protein, 179 aa, Homo sapiens
  VARIANT 1: note = misc_feature - Xaa can be any naturally occurring amino acid
XWFCLPVGLLLLLIIWLRFLLSQDSEENDSSVCLDWEPWSKGPAEFCWKGTLHGQEKERPCCLVFLESAGQWQWQKWMGETCQGGKRTLATVVPPWNPQLISSSDRHVKASRGPSPSPASQMTSSPAGSRSSLGGHGSSEQAHGEKLANLIQRGLKAGLGRRVWVHIKEARVFPYPGDP

SEQ ID NO: 548 - protein, 244 aa, Homo sapiens
MLLLGAVLLLLALPGHDQETTTQGPGVLLPLPKGACTGWMAGIPGHPGHNGAPGRDGRDGTPGEKGEKGDPGLIGPKGDIGETGVPGAEGPRGFPGIQGRKGEPGEGAYVYRSAFSVGLETYVTIPNMPIRFTKIFYNQQNHYDGSTGKFHCNIPGLYYFAYHITVYMKDVKVSLFKKDKAMLFTYDQYQENNVDQASGSVLLHLEVGDQVWLQVYGEGERNGLYADNDNDSTFTGFLLYHDTN

SEQ ID NO: 549 - protein, 244 aa, Homo sapiens; identical to SEQ ID NO: 548

SEQ ID NO: 550 - protein, 117 aa, Homo sapiens
MGSQVAFLPPPPARSSPDAARIRVKRYRQSMNNFQGLRSFGCRFGTCTVQKLAHQIYQFTDKDKDNVAPRSKISPQGYGRRRRRSLPEAGPGRTLVSSKPQAHGAPAPPSGSAPHFL

SEQ ID NO: 551 - protein, 83 aa, Homo sapiens
MKLVSVALMYLGSLAFLGADTARLDVASEFRKKWNKWALSRGKRELRMSSSYPTGLADVKAGPAQTLIRPQDMKGASRSPEDR

SEQ ID NO: 552 - protein, 83 aa, Homo sapiens; identical to SEQ ID NO: 551

SEQ ID NO: 553 - protein, 139 aa, Homo sapiens
MKLVSVALMYLGSLAFLGADTARLDVASEFRKKWNKWALSRGKRELRMSSSYPTGLADVKAGPAQTLIRPQDMKGASRSPEDSCLSSPSPRPQQSGCRPHPSQALPPEHEQLPGPPELWLPLRDVHGAEAGTPDLPVHR

SEQ ID NO: 554 - protein, 185 aa, Homo sapiens
MKLVSVALMYLGSLAFLGADTARLDVASEFRKKWNKWALSRGKRELRMSSSYPTGLADVKAGPAQTLIRPQDMKGASRSPEDSSPDAARIRVKRYRQSMNNFQGLRSFGCRFGTCTVQKLAHQIYQFTDKDKDNVAPRSKISPQGYGRRRRRSLPEAGPGRTLVSSKPQAHGAPAPPSGSAPHFL

SEQ ID NO: 555 - protein, 185 aa, Homo sapiens; identical to SEQ ID NO: 554

SEQ ID NO: 556 - protein, 185 aa, Homo sapiens; identical to SEQ ID NO: 554

SEQ ID NO: 557 - protein, 138 aa, Homo sapiens
MSSSYPTGLADVKAGPAQTLIRPQDMKGASRSPEDSSPDAARIRVKRYRQSMNNFQGLRSFGCRFGTCTVQKLAHQIYQFTDKDKDNVAPRSKISPQGYGRRRRRSLPEAGPGRTLVSSKPQAHGAPAPPSGSAPHFL

SEQ ID NO: 558 - protein, 148 aa, Homo sapiens
MARIPTAALGCISLLCLQLPGSLSRSLGGDPRPVKPREPPARSPSSSLQPRHPAPRPVVWKLHRALQAQRGAGLAPVMGQPLRDGGRQHSGPRRHSGPRRTQAQLLRVGCVLGTCQVQNLSHRLWQLMGPAGRQDSAPVDPSSPHSYG

SEQ ID NO: 559 - protein, 148 aa, Homo sapiens; identical to SEQ ID NO: 558

SEQ ID NO: 560 - protein, 153 aa, Homo sapiens
MTIHILILLLLLAFSAQGDLDTAARRGQHQVPQHRGHVCYLGVCRTHRLAEIIYWIRCLHQGALGEGQPRAPGPLQLWAPPVARGGSPARFPGFRPAARGLAQCPARWVTSGTARPLLGFSLPICMLELLLHISSPLTPAPETVFPSPSPGCD

SEQ ID NO: 561 - protein, 57 aa, Homo sapiens
LLEPELPGSALRSLWSSLCLGPAPAPPGPVSPEGRLAAAWDALIVRPVRRWRRVAVG

SEQ ID NO: 562 - protein, 222 aa, Homo sapiens
MAASCRVVTSISDIPTGIPVHLELASMTNRELMSSIVHQVFPAVTSLGLNEQELLFLTQSASGPHSSLSSWNGVPDVGMVSDILFWILKEHGRSKSRASDLTRIHFHTLVYHILATVDGHWANQLAAVAAGARVAGTQACATETIDTSRVSLRAPQEFMTSHSEAGSRIVLNPNKPVVEWHREGISFHFTPVLVCKDPIRTVGLGDAISAEGLFYSEVHPHY

SEQ ID NO: 563 - protein, 78 aa, Homo sapiens
MALWRGSAYAGFLALAVGCVFLLEPELPGSALRSLWSSLCLGPAPAPPGPVSPEGRLAAAWDALIVRPVRRWRRVAVG

SEQ ID NO: 564 - protein, 78 aa, Homo sapiens; identical to SEQ ID NO: 563

SEQ ID NO: 565 - protein, 78 aa, Homo sapiens; identical to SEQ ID NO: 563

SEQ ID NO: 566 - protein, 113 aa, Homo sapiens
MALWRGSAYAGFLALAVGCVFLLEPELPGSALRSLWSSLCLGPAPAPPGPVSPEGRLAAAWDALIVRPVRRWRRVAVGFFFAVQLVQSYMSFLMTMSLFHQSHCRKWMSSTSF

SEQ ID NO: 567 - protein, 496 aa, Homo sapiens
MALWRGSAYAGFLALAVGCVFLLEPELPGSALRSLWSSLCLGPAPAPPGPVSPEGRLAAAWDALIVRPVRRWRRVAVGVNACVDVVLSGVKLLQALGLSPGNGKDHSILHSRNDLEEAFIHFMGKGAAAERFFSDKETFHDIAQVASEFPGAQHYVGGNAALIGQKFAANSDLKVLLCGPVGPKLHELLDDNVFVPPESLQEVDEFHLILEYQAGEEWGQLKAPHANRFIFSHDLSNGAMNMLEVFVSSLEEFQPDLVVLSGLHMMEGQSKELQRKRLLEVVTSISDIPTGIPVHLELASMTNRELMSSIVHQVFPAVTSLGLNEQELLFLTQSASGPHSSLSSWNGVPDVGMVSDILFWILKEHGRSKSRASDLTRIHFHTLVYHILATVDGHWANQLAAVAAGARVAGTQACATETIDTSRVSLRAPQEFMTSHSEAGSRIVLNPNKPVVEWHREGISFHFTPVLVCKDPIRTVGLGDAISAEGLFYSEVHPHY

SEQ ID NO: 568 - protein, 154 aa, Homo sapiens
MGKGAAAERFFSDKETFHDIAQVASEFPGAQHYVGGNAALIGQKFAANSDLKVLLCGPVGPKLHELLDDNVFVPPESLQEVDEFHLILEYQAGEEWGQLKAPHANRFIFSHDLSNGAMNMLEVFVSSLEEFQPDLVVLSGLHMMEGQSKELQRK

SEQ ID NO: 569 - protein, 204 aa, Homo sapiens
  VARIANT 1: note = misc_feature - Xaa can be any naturally occurring amino acid
XEPELPGSALRSLWSSLCLGPAPAPPGPVSPEGRLAAAWDALIVRPVRRWRRVAVGVNACVDVVLSGVKLLQALGLSPGNGKDHSILHSRNDLEEAFIHFMGKGAAAERFFSDKETFHDIAQVASEFPGAQHYVGGNAALIGQKFAANSDLKVLLCGPVGPKLHELLDDNVFVPPESLQEVDEFHLILEYQAAGLSRGDFPWAE

SEQ ID NO: 570 - protein, 26 aa, Homo sapiens
  VARIANT 1: note = misc_feature - Xaa can be any naturally occurring amino acid
XKRLLEVLASQGHILAAGCGACLLLQ

SEQ ID NO: 571 - protein, 363 aa, Homo sapiens
MAAAAMAAAAGGGAGAARSLSRFRGCLAGALLGDCVGSFYEAHDTVDLTSVLRHVQSLEPDPGTPGSERTEALYYTDDTAMARALVQSLLAKEAFDEVDMAHRFAQEYKKDPDRGYGAGVVTVFKKLLNPKCRDVFEPARAQFNGKGSYGNGGAMRVAGISLAYSSVQDVQKFARLSAQLTHASSLGYNGAILQALAVHLALQGESSSEHFLKQLLGHMEDLEGDAQSVLDARELGMEERPYSSRLKKIGELLDQASVTREEVVSELGNGIAAFESVPTAIYCFLRCMEPDPEIPSAFNSLQRTLIYSISLGGDTDTIATMAGAIAGAYYGMDQVPESWQQSCEGYEETDILAQSLHRVFQKS

SEQ ID NO: 572 - protein, 69 aa, Homo sapiens
KPDAERQTDEEKEELKKPKKEDSSPKEETDKWAVEKGKDHKEPRKGEELEEEWTPTEKVRPLCRRSPSG

SEQ ID NO: 573 - protein, 54 aa, Homo sapiens
LMKVVNEECPTITRTYSLGKSSRGLKIYAMEISDNPGEHELGEGLWGPAAGLCC

SEQ ID NO: 574 - protein, 1158 aa, Homo sapiens
MAAVRGAPLLSCLLALLALCPGGRPQTVLTDDEIEEFLEGFLSELEPEPREDDVEAPPPPEPTPRVRKAQAGGKPGKRPGTAAEVPPEKTKDKGKKGKKDKGPKVPKESLEGSPRPPKKGKEKPPKATKKPKEKPPKATKKPKEKPPKATKKPKEKPPKATKKPPSGKRPPILAPSETLEWPLPPPPSPGPEELPQEGGAPLSNNWQNPGEETHVEAREHQPEPEEETEQPTLDYNDQIEREDYEDFEYIRRQKQPRPPPSRRRRPERVWPEPPEEKAPAPAPEERIEPPVKPLLPPLPPDYGDGYVIPNYDDMDYYFGPPPPQKPDAERQTDEEKEELKKPKKEDSSPKEETDKWAVEKGKDHKEPRKGEELEEEWTPTEKVKCPPIGMESHRIEDNQIRASSMLRHGLGAQRGRLNMQTGATEDDYYDGAWCAEDDARTQWIEVDTRRTTRFTGVITQGRDSSIHDDFVTTFFVGFSNDSQTWVMYTNGYEEMTFHGNVDKDTPVLSELPEPVVARFIRIYPLTWNGSLCMRLEVLGCSVAPVYSYYAQNEVVATDDLDFRHHSYKDMRQLMKVVNEECPTITRTYSLGKSSRGLKIYAMEISDNPGEHELGEPEFRYTAGIHGNEVLGRELLLLLMQYLCREYRDGNPRVRSLVQDTRIHLVPSLNPDGYEVAAQMGSEFGNWALGLWTEEGFDIFEDFPDLNSVLWGAEERKWVPYRVPNNNLPIPERYLSPDATVSTEVRAIIAWMEKNPFVLGANLNGGERLVSYPYDMARTPTQEQLLAAAMAAARGEDEDEVSEAQETPDHAIFRWLAISFASAHLTLTEPYRGGCQAQDYTGGMGIVNGAKWNPRTGTINDFSYLHTNCLELSFYLGCDKFPHESELPREWENNKEALLTFMEQVHRGIKGVVTDEQGIPIANATISVSGINHGVKTASGGDYWRILNPGEYRVTAHAEGYTPSAKTCNVDYDIGATQCNFILARSNWKRIREIMAMNGNRPIPHIDPSRPMTPQQRRLQQRRLQHRLRLRAQMRLRRLNATTTLGPHTVPPTLPPAPATTLSTTIEPWGLIPPTTAGWEESETETYTEVVTEFGTEVEPEFGTKVEPEFETQLEPEFETQLEPEFEEEEEEEKEEEIATGQAFPFTTVETYTVNFGDF

SEQ ID NO: 575 - protein, 162 aa, Homo sapiens
MPPEKTKDKGKKGKKDKGPKVPKESLEGSPRPPKKGKEKPPKATKKPKEKPPKATKKPKEKPPKATKKPKEKPPKATKKPPSGKRPPILAPSETLEWPLPPPPSPGPEELPQEGGAPLSNNWQNPGEETHVEAREHQPEPEEETEQPTLDYNDQIEREDYED

SEQ ID NO: 576 - protein, 733 aa, Homo sapiens
MRKWWAPCPGSWLCSHCLGEGWALRGAGSTALRPASPQTFHGNVDKDTPVLSELPEPVVARFIRIYPLTWNGSLCMRLEVLGCSVARECGGLAGALSGGGVLGWASRHPAKDNPASLAAVYSYYAQNEVVATDDLDFRHHSYKDMRQLMKVVNEECPTITRTYSLGKSSRGLKIYAMEISDNPGEHELGEPEFRYTAGIHGNEVLGRELLLLLMQYLCREYRDGNPRVRSLVQDTRIHLVPSLNPDGYEVAAQMGSEFGNWALGLWTEEGFDIFEDFPDLNSVLWGAEERKWVPYRVPNNNLPIPERYLSPDATVSTEVRAIIAWMEKNPFVLGANLNGGERLVSYPYDMARTPTQEQLLAAAMAAARGEDEDEVSEAQETPDHAIFRWLAISFASAHLTLTEPYRGGCQAQDYTGGMGIVNGAKWNPRTGTINDFSYLHTNCLELSFYLGCDKFPHESELPREWENNKEALLTFMEQVHRGIKGVVTDEQGIPIANATISVSGINHGVKTASGGDYWRILNPGEYRVTAHAEGYTPSAKTCNVDYDIGATQCNFILARSNWKRIREIMAMNGNRPIPHIDPSRPMTPQQRRLQQRRLQHRLRLRAQMRLRRLNATTTLGPHTVPPTLPPAPATTLSTTIEPWGLIPPTTAGWEESETETYTEVVTEFGTEVEPEFGTKVEPEFETQLEPEFETQLEPEFEEEEEEEKEEEIATGQAFPFTTVETYTVNFGDF

SEQ ID NO: 577 - protein, 104 aa, Homo sapiens
RTQWIEVDTRRTTRFTGVITQGRDSSIHDDFVTTFFVGFSNDSQTWVMYTNGYEEMVGTMPRLLALLPLSGRGVGSQRGWQYCSEACLSPDLSWERGQGHTRAE

SEQ ID NO: 578 - protein, 251 aa, Homo sapiens
  VARIANT 1: note = misc_feature - Xaa can be any naturally occurring amino acid
XELEPEPREDDVEAPPPPEPTPRVRKAQAGGKPGKRPGTAAEVPPEKTKDKGKKGKKDKGPKVPKESLEGSPRPPKKGKEKPPKATKKPKEKPPKATKKPKEKPPKATKKPKEKPPKATKKPPSGKRPPILAPSETLEWPLPPPPSPGPEELPQEGGAPLSNNWQNPGEETHVEAREHQPEPPVKPLLPPLPPDYGDGYVIPNYDDMDYYFGPPPPQKPDAERQTDEEKEELKKPKKEDSSPKEETDKWAV

SEQ ID NO: 579 - protein, 66 aa, Homo sapiens
  VARIANT 1: note = misc_feature - Xaa can be any naturally occurring amino acid
XFRHHSYKDMRQLMKVVNEECPTITRTYSLGKSSRGLKIYAMEISDNPGEHELGEGLWGPAAGLCC

SEQ ID NO: 580 - protein, 481 aa, Homo sapiens
MAASWSLLVTLRPLAQSPLRGRCVGCGAWAAALAPLATAPGKPFWKAYTVQTSESMTPTATSETYLKALAVCHGPLDHYDFLIKAHELKDDEHQRRVIQCLQKLHEDLKGYNIEAEGLFSKLFSRSKPPRGLYVYGDVGTGKTMVMDMFYAYVEMKRKKRVHFHGFMLDVHKRIHRLKQSLPKRKPGFMAKSYDPIAPIAEEISEEACLLCFDEFQVTDIADAMILKQLFENLFKNGVVVVATSNRPPEDLYKNGLQRANFVPFIAVLKEYCNTVQLDSGIDYRKRELPAAGKLYYLTSEADVEAVMDKLFDELAQKQNDLTRPRILKVQGRELRLNKACGTVADCTFEELCERPLGASDYLELSKNFDTIFLRNIPQFTLANRTQGRRFITLIDNFYDLKVRIICSASTPISSLFLHQHHDSELEQSRILMDDLGLSQDSAEGLSMFTGEEEIFAFQRTISRLTEMQTEQYWNEGDRTKK

SEQ ID NO: 581 - protein, 160 aa, Homo sapiens
MCATPPSLNFKKLAYTVQTSESMTPTATSETYLKALAVCHGPLDHYDFLIKAHELKDDEHQRRVIQCLQKLHEDLKGYNIEAEGLFSKLFSRSKPPRGLYVYGDVGTGKTMVMDMFYAYVEMKRKKRVHFHGFMLDVHKRIHRLKQSLPKRKPGFMAKSY

SEQ ID NO: 582 - protein, 80 aa, Homo sapiens
  VARIANT 1: note = misc_feature - Xaa can be any naturally occurring amino acid
XIHRLKQSLPKRKPGFMAKSYDPIAPIAEEISEEACLLCFDEFQVTDIADAMILKQLFENLFKNGVVVVATSNRPPEGIL

SEQ ID NO: 583 - protein, 349 aa, Homo sapiens
  VARIANT 1: note = misc_feature - Xaa can be any naturally occurring amino acid
XKPFWKGTGKTMVMDMFYAYVEMKRKKRVHFHGFMLDVHKRIHRLKQSLPKRKPGFMAKSYDPIAPIAEEISEEACLLCFDEFQVTDIADAMILKQLFENLFKNGVVVVATSNRPPEDLYKNGLQRANFVPFIAVLKEYCNTVQLDSGIDYRKRELPAAGKLYYLTSEADVEAVMDKLFDELAQKQNDLTRPRILKVQGRELRLNKACGTVADCTFEELCERPLGASDYLELSKNFDTIFLRNIPQFTLANRTQGRRFITLIDNFYDLKVRIICSASTPISSLFLHQHHDSELEQSRILMDDLGLSQDSAEGLSMFTGEEEIFAFQRTISRLTEMQTEQYWNEGDRTKK

SEQ ID NO: 584 - protein, 599 aa, Homo sapiens
MKLLKLTGFIFFLFFLTESLTLPTQPRDIENFNSTQKFIEDNIEYITIIAFAQYVQEATFEEMEKLVKDMVEYKDRCMADKTLPECSKLPNNVLQEKICAMEGLPQKHNFSHCCSKVDAQRRLCFFYNKKSDVGFLPPFPTLDPEEKCQAYESNRESLLNHFLYEVARRNPFVFAPTLLTVAVHFEEVAKSCCEEQNKVNCLQTRAIPVTQYLKAFSSYQKHVCGALLKFGTKVVHFIYIAILSQKFPKIEFKELISLVEDVSSNYDGCCEGDVVQCIRDTSKVMNHICSKQDSISSKIKECCEKKIPERGQCIINSNKDDRPKDLSLREGKFTDSENVCQERDADPDTFFAKFTFEYSRRHPDLSIPELLRIVQIYKDLLRNCCNTENPPGCYRYAEDKFNETTEKSLKMVQQECKHFQNLGKDGLKYHYLIRLTKIAPQLSTEELVSLGEKMVTAFTTCCTLSEEFACVDNLADLVFGELCGVNENRTINPAVDHCCKTNFAFRRPCFESLKADKTYVPPPFSQDLFTFHADMCQSQNEELQRKTDRFLVNLVKLKHELTDEELQSLFTNFANVVDKCCKAESPEVCFNEESPKIGN

SEQ ID NO: 585 - protein, 622 aa, Homo sapiens
MKWVESIFLIFLLNFTESRTLHRNEYGIASILDSYQCTAEISLADLATIFFAQFVQEATYKEVSKMVKDALTAIEKPTGDEQSSGCLENQLPAFLEELCHEKEILEKYGHSDCCSQSEEGRHNCFLAHKKPTPASIPLFQVPEPVTSCEAYEEDRETFMNKFIYEIARRHPFLYAPTILLWAARYDKIIPSCCKAENAVECFQTKAATVTKELRESSLLNQHACAVMKNFGTRTFQAITVTKLSQKFTKVNFTEIQKLVLDVAHVHEHCCRGDVLDCLQDGEKIMSYICSQQDTLSNKITECCKLTTLERGQCIIHAENDEKPEGLSPNLNRFLGDRDFNQFSSGEKNIFLASFVHEYSRRHPQLAVSVILRVAKGYQELLEKCFQTENPLECQDKGEEELQKYIQESQALAKRSCGLFQKLGEYYLQNAFLVAYTKKAPQLTSSELMAITRKMAATAATCCQLSEDKLLACGEGAADIIIGHLCIRHEMTPVNPGVGQCCTSSYANRRPCFSSLVVDETYVPPAFSDDKFIFHKDLCQAQGVALQTMKQEFLINLVKQKPQITEEQLEAVIADFSGLLEKCCQGQEQEVCFAEEGKRRQNESFIRCELFSLILTDLTLFVN

SEQ ID NO: 586 - protein, 609 aa, Homo sapiens
MKWVESIFLIFLLNFTESRTLHRNEYGIASILDSYQCTAEISLADLATIFFAQFVQEATYKEVSKMVKDALTAIEKPTGDEQSSGCLENQLPAFLEELCHEKEILEKYGHSDCCSQSEEGRHNCFLAHKKPTPASIPLFQVPEPVTSCEAYEEDRETFMNKFIYEIARRHPFLYAPTILLWAARYDKIIPSCCKAENAVECFQTKAATVTKELRESSLLNQHACAVMKNFGTRTFQAITVTKLSQKFTKVNFTEIQKLVLDVAHVHEHCCRGDVLDCLQDGEKIMSYICSQQDTLSNKITECCKLTTLERGQCIIHAENDEKPEGLSPNLNRFLGDRDFNQFSSGEKNIFLASFVHEYSRRHPQLAVSVILRVAKGYQELLEKCFQTENPLECQDKGEEELQKYIQESQALAKRSCGLFQKLGEYYLQNAFLVAYTKKAPQLTSSELMAITRKMAATAATCCQLSEDKLLACGEGAADIIIGHLCIRHEMTPVNPGVGQCCTSSYANRRPCFSSLVVDETYVPPAFSDDKFIFHKDLCQAQGVALQTMKQEFLINLVKQKPQITEEQLEAVIADFSGLLEKCCQGQEQEVCFAEEGQKLISKTRAALGV

SEQ ID NO: 587 - protein, 346 aa, Homo sapiens
MARKSNLPVLLVPFLLCQALVRCSSPLPLVVNTWPFKNATEAAWRALASGGSALDAVESGCAMCEREQCDGSVGFGGSPDELGETTLDAMIMDGTTMDVGAVGDLRRIKNAIGVARKVLEHTTHTLLVGESATTFAQSMGFINEDLSTTASQALHSDWLARNCQPNYWRNVIPDPSKYCGPYKPPGILKQDIPIHKETEDDRGHDTIGMVVIHKTGHIAAGTSTNGIKFKIHGRVGDSPIPGAGAYADDTAGAAAATGNGDILMRFLPSYQAVEYMRRGEDPTIACQKVISRIQKHFPEFFGAVICANVTGSYGAACNKLSTFTQFSFMVYNSEKNQPTEEKVDCI

SEQ ID NO: 588 - protein, 155 aa, Homo sapiens
RKVLEHTTHTLLVGESATTFAQSMGFINEDLSTTASQALHSDWLARNCQPNYWRNVIPDPSKYCGPYKPPGILKQDIPIHKETEDDRGHDTIGDSPIPGAGAYADDTAGAAAATGNGDILMRFLPSYQAVEYMRRGEDPTIACQKVISRIQKHFP

SEQ ID NO: 589 - protein, 138 aa, Homo sapiens
  VARIANT 1: note = misc_feature - Xaa can be any naturally occurring amino acid
XGDLRRIKNAIGVARKVLEHTTHTLLVGESATTFAQSMGFINEDLSTTASQALHSDWLARNCQPNYWRNVIPDPSKYCGPYKPPGILKQDIPIHKETEDDRGHDTIGMVVIHKTGHIAAGTSTNGDSPIPGAGAYADD

SEQ ID NO: 590 - protein, 342 aa, Homo sapiens
MAAGTAVGAWVLVLSLWGAVVGAQNITARIGEPLVLKCKGAPKKPPQRLEWKLGGGPWDSVARVLPNGSLFLPAVGIQDEGIFRCQAMNRNGKETKSNYRVRVYQIPGKPEIVDSASELTAGVPNKVGTCVSEGSYPAGTLSWHLDGKPLVPNEKGVSVKEQTRRHPETGLFTLQSELMVTPARGGDPRPTFSCSFSPGLPRHRALRTAPIQPRVWEPVPLEEVQLVVEPEGGAVAPGGTVTLTCEVPAQPSPQIHWMKDVSDLERGAGRTRRGGANCRLCGRIRAGNSSPGPGDPGRPGDSRPAHWGHLVAKAATPRRGEEGPRKPGGRGGACRTESVGGT

SEQ ID NO: 591 - protein, 234 aa, Homo sapiens
MAAGTAVGAWVLVLSLWGAVVGAQNITARIGEPLVLKCKGAPKKPPQRLEWKLNTGRTEAWKVLSPQGGGPWDSVARVLPNGSLFLPAVGIQDEGIFRCQAMNRNGKETKSNYRSLRTFTITASDWIFPPSEIPGKPEIVDSASELTAGVPNKVGTCVSEGSYPAGTLSWHLDGKPLVPNEKGVSVKEQTRRHPETGLFTLQSELMVTPARGGDPRPTFSCSFSPGLPRHRALR

SEQ ID NO: 592 - protein, 128 aa, Homo sapiens
MAAGTAVGAWVLVLSLWGAVVGAQNITARIGEPLVLKCKGAPKKPPQRLEWKLNTGRTEAWKVLSPQGGGPWDSVARVLPNGSLFLPAVGIQDEGIFRCQAMNRNGKETKSNYRVRVYQFENLHNYSL

SEQ ID NO: 593 - protein, 404 aa, Homo sapiens
MAAGTAVGAWVLVLSLWGAVVGAQNITARIGEPLVLKCKGAPKKPPQRLEWKLNTGRTEAWKVLSPQGGGPWDSVARVLPNGSLFLPAVGIQDEGIFRCQAMNRNGKETKSNYRVRVYQIPGKPEIVDSASELTAGVPNKVGTCVSEGSYPAGTLSWHLDGKPLVPNEKGVSVKEQTRRHPETGLFTLQSELMVTPARGGDPRPTFSCSFSPGLPRHRALRTAPIQPRVWEPVPLEEVQLVVEPEGGAVAPGGTVTLTCEVPAQPSPQIHWMKDGVPLPLPPSPVLILPEIGPQDQGTYSCVATHSSHGPQESRAVSISIIEPGEEGPTAGSVGGSGLGTLALALGILGGLGTAALLIGVILWQRRQRRGEERKAPENQEEEEERAELNQSEEPEAGESSTGGP

SEQ ID NO: 594 - protein, 347 aa, Homo sapiens
MAAGTAVGAWVLVLSLWGAVVGAQNITARIGEPLVLKCKGAPKKPPQRLEWKLNTGRTEAWKVLSPQGGGPWDSVARVLPNGSLFLPAVGIQDEGIFRCQAMNRNGKETKSNYRVRVYQIPGKPEIVDSASELTAGVPNKVGTCVSEGSYPAGTLSWHLDGKPLVPNEKGVSVKEQTRRHPETGLFTLQSELMVTPARGGDPRPTFSCSFSPGLPRHRALRTAPIQPRVWEPVPLEEVQLVVEPEGGAVAPGGTVTLTCEVPAQPSPQIHWMKDGVPLPLPPSPVLILPEIGPQDQGTYSCVATHSSHGPQESRAVSISIIEPGEEGPTAGEGFDKVREAEDSPQHM

SEQ ID NO: 595 - protein, 233 aa, Homo sapiens
MAAGTAVGAWVLVLSLWGAVVGAQNITARIGEPLVLKCKGAPKKPPQRLEWKLNTGRTEAWKVLSPQGGGPWDSVARVLPNGSLFLPAVGIQDEGIFRCQAMNRNGKETKSNYRVRVYQIPGKPEIVDSASELTAGVPNKVVEESRRSRKRPCEQEVGTCVSEGSYPAGTLSWHLDGKPLVPNEKGVSVKEQTRRHPETGLFTLQSELMVTPARGGDPRPTFSCSFSPGLPRH

SEQ ID NO: 596 - protein, 363 aa, Homo sapiens
MAAGTAVGAWVLVLSLWGAVVGAQNITARIGEPLVLKCKGAPKKPPQRLEWKLNTGRTEAWKVLSPQGGGPWDSVARVLPNGSLFLPAVGIQDEGIFRCQAMNRNGKETKSNYRVRVYQIPGKPEIVDSASELTAGVPNKVVEESRRSRKRPCEQEVGTCVSEGSYPAGTLSWHLDGKPLVPNEKGVSVKEQTRRHPETGLFTLQSELMVTPARGGDPRPTFSCSFSPGLPRHRALRTAPIQPRVWEPVPLEEVQLVVEPEGGAVAPGGTVTLTCEVPAQPSPQIHWMKDGVPLPLPPSPVLILPEIGPQDQGTYSCVATHSSHGPQESRAVSISIIEPGEEGPTAGEGFDKVREAEDSPQHM

SEQ ID NO: 597 - protein, 420 aa, Homo sapiens
MAAGTAVGAWVLVLSLWGAVVGAQNITARIGEPLVLKCKGAPKKPPQRLEWKLNTGRTEAWKVLSPQGGGPWDSVARVLPNGSLFLPAVGIQDEGIFRCQAMNRNGKETKSNYRVRVYQIPGKPEIVDSASELTAGVPNKVVEESRRSRKRPCEQEVGTCVSEGSYPAGTLSWHLDGKPLVPNEKGVSVKEQTRRHPETGLFTLQSELMVTPARGGDPRPTFSCSFSPGLPRHRALRTAPIQPRVWEPVPLEEVQLVVEPEGGAVAPGGTVTLTCEVPAQPSPQIHWMKDGVPLPLPPSPVLILPEIGPQDQGTYSCVATHSSHGPQESRAVSISIIEPGEEGPTAGSVGGSGLGTLALALGILGGLGTAALLIGVILWQRRQRRGEERKAPENQEEEEERAELNQSEEPEAGESSTGGP

SEQ ID NO: 598 - protein, 153 aa, Homo sapiens
MAAGTAVGAWVLVLSLWGAVVGAQNITARIGEPLVLKCKGAPKKPPQRLEWKLNTGRTEAWKVLSPQGGGPWDSVARVLPNGSLFLPAVGIQDEGILGGLGTAALLIGVILWQRRQRRGEERKAPENQEEEEERAELNQSEEPEAGESSTGGP

SEQ ID NO: 599 - protein, 133 aa, Homo sapiens
MKDGVPLPLPPSPVLILPEIGPQDQGTYSCVATHSSHGPQESRAVSISIIEPGEEGPTAGSVGGSGLGTLALALGILGGLGTAALLIGVILWQRRQRRGEERKAPENQEEEEERAELNQSEEPEAGESSTGGP

SEQ ID NO: 600 - protein, 294 aa, Homo sapiens
MNRNGKETKSNYRVRVYQIPGKPEIVDSASELTAGVPNKVGTCVSEGSYPAGTLSWHLDGKPLVPNEKGVSVKEQTRRHPETGLFTLQSELMVTPARGGDPRPTFSCSFSPGLPRHRALRTAPIQPRVWEPVPLEEVQLVVEPEGGAVAPGGTVTLTCEVPAQPSPQIHWMKDGVPLPLPPSPVLILPEIGPQDQGTYSCVATHSSHGPQESRAVSISIIGSVGGSGLGTLALALGILGGLGTAALLIGVILWQRRQRRGEERKAPENQEEEEERAELNQSEEPEAGESSTGGP

SEQ ID NO: 601 - protein, 394 aa, Homo sapiens
MENTDSDNLLRRAACQEAQVFGNQLIPPNAQVKKATVFLNPAACKGKARTLFEKNAAPILHLSGMDVTIVKTDYEGQAKKLLELMENTDVIIVAGGDGTLQEVVTGVLRRTDEATFSKIPIGFIPLGETSSLSHTLFAESGNKVQHITDATLAIVKGETVPLDVLQIKGEKEQPVFAMTGLRWGSFRDAGVKVSKYWYLGPLKIKAAHFFSTLKEWPQTHQASISYTGPTERPPNEPEETPVQRPSLYRRILRRLASYWAQPQDALSQEVSPEVWKDVQLSTIELSITTRNNQLDPTSKEDFLNICIEPDTISKGDFITIGSRKVRNPKLHVEGTECLQASQCTLLIPEGAGGSFSIDSEEYEAMPVEVKLLPRKLQFFCDPRKREQMLTSPTQ

SEQ ID NO: 602 - protein, 65 aa, Homo sapiens
MTVFFKTLRNHWKKTTAGLCLLTWGGHWLYGKHCDNLLRRAACQEAQHYQDESRWEPTLSRTPGS

SEQ ID NO: 603 - protein, 422 aa, Homo sapiens
MTVFFKTLRNHWKKTTAGLCLLTWGGHWLYGKHCDNLLRRAACQEAQVFGNQLIPPNAQVKKATVFLNPAACKGKARTLFEKNAAPILHLSGMDVTIVKTDYEGQAKKLLELMENTDVIIVAGGDGTLQEVVTGVLRRTDEATFSKIPIGFIPLGETSSLSHTLFAESGNKVQHITDATLAIVKGETVPLDVLQIKGEKEQPVFAMTGLRWGSFRDAGVKVSKYWYLGPLKIKAAHFFSTLKEWPQTHQASISYTGPTERPPNEPEETPVQRPSLYRRILRRLASYWAQPQDALSQEVSPEVWKDVQLSTIELSITTRNNQLDPTSKEDFLNICIEPDTISKGDFITIGSRKVRNPKLHVEGTECLQASQCTLLIPEGAGGSFSIDSEEYEAMPVEVKLLPRKLQFFCDPRKREQMLTSPTQ

SEQ ID NO: 604 - protein, 244 aa, Homo sapiens
MTVFFKTLRNHWKKTTAGLCLLTWGGHWLYGKHCDNLLRRAACQEAQVFGNQLIPPNAQVKKATVFLNPAACKGTLFEKNAAPILHLSGMDVTIVKTDYEGQAKKLLELMENTDVIIVAGGDGTLQEVVTGVLRRTDEATFSKIPIGFIPLGETSSLSHTLFAESGNKVQHITDATLAIVKGETVPLDVLQIKGEKEQPVFAMTGLRWGSFRDAGVKVSKYWYLGPLKIKAAHFFSTLKPFPKR

SEQ ID NO: 605 - protein, 244 aa, Homo sapiens; identical to SEQ ID NO: 604

SEQ ID NO: 606 - protein, 46 aa, Homo sapiens
MTVFFKTLRNHWKKTTAGLCLLTWGGHWLYGKHWCLAINSFLPMHK

SEQ ID NO: 607 - protein, 189 aa, Homo sapiens
MAEAAAAAGGTGLGAGASYGSAADRDRDPDPDRAGRRLRVLSGHLLGRPREALSTNECKARRAASAATAAPTATPAAQESGTIPKKRQEVMKWNGWGYNDSKFIFNKKGQIELTGKRGISDPLTVFEQTEAAAREEILANGGSLSHHHGVGKLRKQWLKESISDVGFGMLKSVKEYVDPNNIFGNRNLL

SEQ ID NO: 608 - protein, 658 aa, Homo sapiens
MAEAAAAAGGTGLGAGASYGSAADRDRDPDPDRAGRRLRVLSGHLLGRPREALSTNECKARRAASAATAAPTATPAAQESGTIPKKRQEVMKWNGWGYNDSKFIFNKKGQIELTGKRYPLSGMGLPTFKEWIQNTLGVNVEHKTTSKASLNPSDTPPSVVNEDFLHDLKETNISYSQEADDRVFRAHGHCLHEIFLLREGMFERIPDIVLWPTCHDDVVKIVNLACKYNLCIIPIGGGTSVSYGLMCPADETRTIISLDTSQMNRILWVDENNLTAHVEAGITGQELERQLKESGYCTGHEPDSLEFSTVGGWVSTRASGMKKNIYGNIEDLVVHIKMVTPRGIIEKSCQGPRMSTGPDIHHFIMGSEGTLGVITEATIKIRPVPEYQKYGSVAFPNFEQGVACLREIAKQRCAPASIRLMDNKQFQFGHALKPQVSSIFTSFLDGLKKFYITKFKGFDPNQLSVATLLFEGDREKVLQHEKQVYDIAAKFGGLAAGEDNGQRGYLLTYVIAYIRDLALEYYVLGESFETSAPWDRVVDLCRNVKERITRECKEKGVQFAPFSTCRVTQTYDAGACIYFYFAFNYRGISDPLTVFEQTEAAAREEILANGGSLSHHHGVGKLRKQWLKESISDVGFGMLKSVKEYVDPNNIFGNRNLL

SEQ ID NO: 609 - protein, 543 aa, Homo sapiens
  VARIANT 1: note = misc_feature - Xaa can be any naturally occurring amino acid
XQEVMKWNGWGYNDSKFIFNKKGQIELTGKRYPLSGMGLPTFKEWIQNTLGVNVEHKTTSKASLNPSDTPPSVVNEDFLHDLKETNISYSQEADDRVFRAHGHCLHEIFLLREGMFERIPDIVLWPTCHDDVVKIVNLACKYNLCIIPIGGGTSVSYGLMCPADETRTIISLDTSQMNRILWVDENNLTAHVEAGITGQELERQLKESGYCTGHEPDSLEFSTVGGWVSTRASGMKKNIYGNIEDLVVHIKMVTPRGIIEKSCQGPRMSTGPDIHHFIMGSEGTLGVITEATIKIRPVPEYQKYGSVAFPNFEQGVACLREIAKQRCAPASIRLMDNKQFQFGHALKPQVSSIFTSFLDGLKKFYITKFKGFDPNQLSVATLLFEGDREKVLQHEKQVYDIAAKFGGLAAGEDNGQRGYLLTYVIAYIRDLALEYYVLGESFETSAPWDRVVDLCRNVKERITRECKEKGVQFAPFSTCRVTQTYDAGACIYFYFAFNYRGISDPLTVFEQTEAAAREEILANGGSLSHHHGGLQLEGTCYES

SEQ ID NO: 610 - protein, 560 aa, Homo sapiens
  VARIANT 1: note = misc_feature - Xaa can be any naturally occurring amino acid
XYPLSGMGLPTFKEWIQNTLGVNVEHKTTSKASLNPSDTPPSVVNEDFLHDLKETNISYSQEADDRVFRAHGHCLHEIFLLREGMFERIPDIVLWPTCHDDVVKIVNLACKYNLCIIPIGGGTSVSYGLMCPADETRTIISLDTSQMNRILWVDENNLTAHVEAGITGQELERQLKESGYCTGHEPDSLEFSTVGGWVSTRASGMKKNIYGNIEDLVVHIKMVTPRGIIEKSCQGPRMSTGPDIHHFIMGSEGTLGVITEATIKIRPVPEYQKYGSVAFPNFEQGVACLREIAKQRCAPASIRLMDNKQFQFGHALKPQVSSIFTSFLDGLKKFYITKFKGFDPNQLSVATLLFEGDREKVLQHEKQVYDIAAKFGGLAAGEDNGQRGYLLTYVIAYIRDLALEYYVLGESFETSAPWDRVVDLCRNVKERITRECKEKGVQFAPFSTCRVTQTYDAGACIYFYFAFNYRGISDPLTVFEQTEAAAREEILANGGSLSHHHGEHEPHSTSTHHGRYRIPQICGRSFPPLDNFQDSSRFLPEPSTQECISPWFHHIHSLPF

SEQ ID NO: 611 - protein, 131 aa, Homo sapiens
MEKIPVSAFLLLVALSYTLARDTTVKPGAKKDTKDSRPKLPQTLSRGWGDQLIWTQTYEEALYKSKTSNKPLMIIHHLDECPHSQALKKVFAENKEIQKLAEQFVLLNLVYETTDKHLSPDGQYVPRIMFV

SEQ ID NO: 612 - protein, 188 aa, Homo sapiens
MEKIPVSAFLLLVALSYTLARDTTVKPGAKKDTKDSRPKLPQTLSRGWGDQLIWTQTYEEALYKSKTSNKPLMIIHHLDECPHSQALKKVFAENKEIQKLAEQFVLLNLVYETTDKHLSPDGQYVPRIMFVDPSLTVRADITGRYSNRLYAYEPADTALCKCDLQFGCCPRVEHLYCCSDGTRGCMVR

SEQ ID NO: 613 - protein, 175 aa, Homo sapiens
MEKIPVSAFLLLVALSYTLARDTTVKPGAKKDTKDSRPKLPQTLSRGWGDQLIWTQTYEEALYKSKTSNKPLMIIHHLDECPHSQALKKVFAENKEIQKLAEQFVLLNLVYETTDKHLSPDGQYVPRIMFVDPSLTVRADITGRYSNRLYAYEPADTALLLDNMKKALKLLKTEL

SEQ ID NO: 614 - protein, 119 aa, Homo sapiens
PLMIIHHLDECPHSQALKKVFAENKEIQKLAEQFVLLNLVYETTDKHLSPDGQYVPRIMFVDPSLTVRADITGRYSNRLYAYEPADTALCKCDLQFGCCPRVEHLYCCSDGTRGCMVSA

SEQ ID NO: 615 - protein, 163 aa, Homo sapiens
MMLHSALGLCLLLVTVSSNLAIAIKKEKRPPQTLSRGWGDDITWVQTYEEGLFYAQKSKKPLMVIHHLEDCQYSQALKKVFAQNEEIQEMAQNKFIMLNLMHETTDKNLSPDGQYVPRIMFVDPSLTVRADIAGRYSNRLYTYEPRDLPLCKYSQMISNSGHS

SEQ ID NO: 616 - protein, 166 aa, Homo sapiens
MMLHSALGLCLLLVTVSSNLAIAIKKEKRPPQTLSRGWGDDITWVQTYEEGLFYAQKSKKPLMVIHHLEDCQYSQALKKVFAQNEEIQEMAQNKFIMLNLMHETTDKNLSPDGQYVPRIMFVDPSLTVRADIAGRYSNRLYTYEPRDLPLLIENMKKALRLIQSEL

SEQ ID NO: 617 - protein, 129 aa, Homo sapiens
  VARIANT 1: note = misc_feature - Xaa can be any naturally occurring amino acid
XNIQNTFPTRALAKSGWGDDITWVQTYEEGLFYAQKSKKPLMVIHHLEDCQYSQALKKVFAQNEEIQEMAQNKFIMLNLMHETTDKNLSPDGQYVPRIMFVDPSLTVRADIAGRYSNRLYTYEPRDLPL

SEQ ID NO: 618 - protein, 2045 aa, Homo sapiens
MAGRSHPGPLRPLLPLLVVAACVLPGAGGTCPERALERREEEANVVLTGTVEEILNVDPVQHTYSCKVRVWRYLKGKDLVARESLLDGGNKVVISGFGDPLICDNQVSTGDTRIFFVNPAPPYLWPAHKNELMLNSSLMRITLRNLEEVEFCVEDKPGTHFTPVPPTPPDACRGMLCGFGAVCEPNAEGPGRASCVCKKSPCPSVVAPVCGSDASTYSNECELQRAQCSQQRRIRLLSRGPCGSRDPCSNVTCSFGSTCARSADGLTASCLCPATCRGAPEGTVCGSDGADYPGECQLLRRACARQENVFKKFDGPCDPCQGALPDPSRSCRVNPRTRRPEMLLRPESCPARQAPVCGDDGVTYENDCVMGRSGAARGLLLQKVRSGQCQGRDQCPEPCRFNAVCLSRRGRPRCSCDRVTCDGAYRPVCAQDGRTYDSDCWRQQAECRQQRAIPSKHQGPCDQAPSPCLGVQCAFGATCAVKNGQAACECLQACSSLYDPVCGSDGVTYGSACELEATACTLGREIQVARKGPCDRCGQCRFGALCEAETGRCVCPSECVALAQPVCGSDGHTYPSECMLHVHACTHQISLHVASAGPCETCGDAVCAFGAVCSAGQCVCPRCEHPPPGPVCGSDGVTYGSACELREAACLQQTQIEEARAGPCEQAECGSGGSGSGEDGDCEQELCRQRGGIWDEDSEDGPCVCDFSCQSVPGSPVCGSDGVTYSTECELKKARCESQRGLYVAAQGACRGPTFAPLPPVAPLHCAQTPYGCCQDNITAARGVGLAGCPSACQCNPHGSYGGTCDPATGQCSCRPGVGGLRCDRCEPGFWNFRGIVTDGRSGCTPCSCDPQGAVRDDCEQMTGLCSCKPGVAGPKCGQCPDGRALGPAGCEADASAPATCAEMRCEFGARCVEESGSAHCVCPMLTCPEANATKVCGSDGVTYGNECQLKTIACRQGLQISIQSLGPCQEAVAPSTHPTSASVTVTTPGLLLSQALPAPPGALPLAPSSTAHSQTTPPPSSRPRTTASVPRTTVWPVLTVPPTAPSPAPSLVASAFGESGSTDGSSDEELSGDQEASGGGSGGLEPLEGSSVATPGPPVERASCYNSALGCCSDGKTPSLDAEGSNCPATKVFQGVLELEGVEGQELFYTPEMADPKSELFGETARSIESTLDDLFRNSDVKKDFRSVRLRDLGPGKSVRAIVDVHFDPTTAFRAPDVARALLRQIQVSRRRSLGVRRPLQEHVRFMDFDWFPAFITGATSGAIAAGATARATTASRLPSSAVTPRAPHPSHTSQPVAKTTAAPTTRRPPTTAPSRVPGRRPPAPQQPPKPCDSQPCFHGGTCQDWALGGGFTCSCPAGRGGAVCEKVLGAPVPAFEGRSFLAFPTLRAYHTLRLALEFRALEPQGLLLYNGNARGKDFLALALLDGRVQLRFDTGSGPAVLTSAVPVEPGQWHRLELSRHWRRGTLSVDGETPVLGESPSGTDGLNLDTDLFVGGVPEDQAAVALERTFVGAGLRGCIRLLDVNNQRLELGIGPGAATRGSGVGECGDHPCLPNPCHGGAPCQNLEAGRFHCQCPPGRVGPTCADEKSPCQPNPCHGAAPCRVLPEGGAQCECPLGREGTFCQTASGQDGSGPFLADFNGFSHLELRGLHTFARDLGEKMALEVVFLARGPSGLLLYNGQKTDGKGDFVSLALRDRRLEFRYDLGKGAAVIRSREPVTLGAWTRVSLERNGRKGALRVGDGPRVLGESPVPHTVLNLKEPLYVGGAPDFSKLARAAAVSSGFDGAIQLVSLGGRQLLTPEHVLRQVDVTSFAGHPCTRASGHPCLNGASCVPREAAYVCLCPGGFSGPHCEKGLVEKSAGDVDTLAFDGRTFVEYLNAVTESEKALQSNHFELSLRTEATQGLVLWSGKATERADYVALAIVDGHLQLSYNLGSQPVVLRSTVPVNTNRWLRVVAHREQREGSLQVGNEAPVTGSSPLGATQLDTDGALWLGGLPELPVGPALPKAYGTGFVGCLRDVVVGRHPLHLLEDAVTKPELRPCPTP

SEQ ID NO: 619 - protein, 86 aa, Homo sapiens
MPPLPLARDTRQPPGASLLVRGFMVPCNACLILLATATLGFAVLLFLNNYKPGTHFTPVPPTPPDACRGMLCGFGAVCEPNAEGPG

SEQ ID NO: 620 - protein, 1930 aa, Homo sapiens
MRITLRNLEEVEFCVEDKPGTHFTPVPPTPPDACRGMLCGFGAVCEPNAEGPGRASCVCKKSPCPSVVAPVCGSDASTYSNECELQRAQCSQQRRIRLLSRGPCGSRDPCSNVTCSFGSTCARSADGLTASCLCPATCRGAPEGTVCGSDGADYPGECQLLRRACARQENVFKKFDGPCDPCQGALPDPSRSCRVNPRTRRPEMLLRPESCPARQAPVCGDDGVTYENDCVMGRSGAARGLLLQKVRSGQCQGRDQCPEPCRFNAVCLSRRGRPRCSCDRVTCDGAYRPVCAQDGRTYDSDCWRQQAECRQQRAIPSKHQGPCDQAPSPCLGVQCAFGATCAVKNGQAACECLQACSSLYDPVCGSDGVTYGSACELEATACTLGREIQVARKGPCDRCGQCRFGALCEAETGRCVCPSECVALAQPVCGSDGHTYPSECMLHVHACTHQISLHVASAGPCETCGDAVCAFGAVCSAGQCVCPRCEHPPPGPVCGSDGVTYGSACELREAACLQQTQIEEARAGPCEQAECGSGGSGSGEDGDCEQELCRQRGGIWDEDSEDGPCVCDFSCQSVPGSPVCGSDGVTYSTECELKKARCESQRGLYVAAQGACRGPTFAPLPPVAPLHCAQTPYGCCQDNITAARGVGLAGCPSACQCNPHGSYGGTCDPATGQCSCRPGVGGLRCDRCEPGFWNFRGIVTDGRSGCTPCSCDPQGAVRDDCEQMTGLCSCKPGVAGPKCGQCPDGRALGPAGCEADASAPATCAEMRCEFGARCVEESGSAHCVCPMLTCPEANATKVCGSDGVTYGNECQLKTIACRQGLQISIQSLGPCQEAVAPSTHPTSASVTVTTPGLLLSQALPAPPGALPLAPSSTAHSQTTPPPSSRPRTTASVPRTTVWPVLTVPPTAPSPAPSLVASAFGESGSTDGSSDEELSGDQEASGGGSGGLEPLEGSSVATPGPPVERASCYNSALGCCSDGKTPSLDAEGSNCPATKVFQGVLELEGVEGQELFYTPEMADPKSELFGETARSIESTLDDLFRNSDVKKDFRSVRLRDLGPGKSVRAIVDVHFDPTTAFRAPDVARALLRQIQVSRRRSLGVRRPLQEHVRFMDFDWFPAFITGATSGAIAAGATARATTASRLPSSAVTPRAPHPSHTSQPVAKTTAAPTTRRPPTTAPSRVPGRRPPAPQQPPKPCDSQPCFHGGTCQDWALGGGFTCSCPAGRGGAVCEKVLGAPVPAFEGRSFLAFPTLRAYHTLRLALEFRALEPQGLLLYNGNARGKDFLALALLDGRVQLRFDTGSGPAVLTSAVPVEPGQWHRLELSRHWRRGTLSVDGETPVLGESPSGTDGLNLDTDLFVGGVPEDQAAVALERTFVGAGLRGCIRLLDVNNQRLELGIGPGAATRGSGVGECGDHPCLPNPCHGGAPCQNLEAGRFHCQCPPGRVGPTCADEKSPCQPNPCHGAAPCRVLPEGGAQCECPLGREGTFCQTASGQDGSGPFLADFNGFSHLELRGLHTFARDLGEKMALEVVFLARGPSGLLLYNGQKTDGKGDFVSLALRDRRLEFRYDLGKGAAVIRSREPVTLGAWTRVSLERNGRKGALRVGDGPRVLGESPKSRKVPHTVLNLKEPLYVGGAPDFSKLARAAAVSSGFDGAIQLVSLGGRQLLTPEHVLRQVDVTSFAGHPCTRASGHPCLNGASCVPREAAYVCLCPGGFSGPHCEKGLVEKSAGDVDTLAFDGRTFVEYLNAVTESELANEIPVPETLDSGALHSEKALQSNHFELSLRTEATQGLVLWSGKATERADYVALAIVDGHLQLSYNLGSQPVVLRSTVPVNTNRWLRVVAHREQREGSLQVGNEAPVTGSSPLGATQLDTDGALWLGGLPELPVGPALPKAYGTGFVGCLRDVVVGRHPLHLLEDAVTKPELRPCPTP

SEQ ID NO: 621 - protein, 287 aa, Homo sapiens
  VARIANT 1: note = misc_feature - Xaa can be any naturally occurring amino acid
XKGDFVSLALRDRRLEFRYDLGKGAAVIRSREPVTLGAWTRVSLERNGRKGALRVGDGPRVLGESPKSRKVPHTVLNLKEPLYVGGAPDFSKLARAAAVSSGFDGAIQLVSLGGRQLLTPEHVLRQVDVTSFAGHPCTRASGHPCLNGASCVPREAAYVCLCPGGFSGPHCEKGLVEKSAGDVDTLAFDGRTFVEYLNAVTESELANEIPVPETLDSGALHSEKALQSNHFELSLRTEATQGLVLWSGKATERADYVALAIVDGHLQLSYNLGSQPVVLRSTVPVNT

SEQ ID NO: 622 - protein, 132 aa, Homo sapiens
MLTAAVLSCALLLALPATRGAQMGLAPMEGIRRPDQALLPELPGLGLRAPLKKTTAEQAEEDLLQEAQALAEVLDLQDREPRSSRRCVRLHESCLGQQVPCCDPCATCYCRFFNAFCYCRKLGTAMNPCSRT

SEQ ID NO: 623 - protein, 485 aa, Homo sapiens
MRKRAPQSEMAPAGVSLRATILCLLAWAGLAAGDRVYIHPFHLVIHNESTCEQLAKANAGKPKDPTFIPAPIQAKTSPVDEKALQDQLVLVAAKLDTEDKLRAAMVGMLANFLGFRIYGMHSELWGVVHGATVLSPTAVFGTLASLYLGALDHTADRLQAILGVPWKDKNCTSRLDAHKVLSALQAVQGLLVAQGRADSQAQLLLSTVVGVFTAPGLHLKQPFVQGLALYTPVVLPRSLDFTELDVAAEKIDRFMQAVTGWKTGCSLMGASVDSTLAFNTYVHFQGKMKGFSLLAEPQEFWVDNSTSVSVPMLSGMGTFQHWSDIQDNFSVTQVPFTESACLLLIQPHYASDLDKVEGLTFQQNSLNWMKKLSPRTIHLTMPQLVLQGSYDLQDLLAQAELPAILHTELNLQKLSNDRIRVGEVLNSIFFELEADEREPTESTQQLNKPEVLEVTLNRPFLFAVYDQSATALHFLGRVANPLSTA

SEQ ID NO: 624 - protein, 1278 aa, Homo sapiens
MRTGSAASSAAAAAAAAAASASPATGVCMKTPGGGRRGIRRDPGAEPGAAALRGPRQRPILSRLTNNSRIVGLLAQLEKINAEPSESDTARYVTSKILHLAQSQEKTRREMTAKGSTGMEILLSTLENTKDLQTTLNILSILVELVSAGGGRRVSFLVTKGGSQILLQLLMNASKESPPHEDLMVQIHSILAKIGPKDKKFGVKARINGALNITLNLVKQNLQNHRLVLPCLQLLRVYSANSVNSVSLGKNGVVELMFKIIGPFSKKNSSLIKVALDTLAALLKSKTNARRAVDRGYVQVLLTIYVDWHRHDNRHRNMLIRKGILQSLKSVTNIKLGRKAFIDANGMKILYNTSQECLAVRTLDPLVNTSSLIMRKCFPKNRLPLPTIKSSFHFQLPVIPVTGPVAQLYSLPPEVDDVVDESDDNDDIDVEAENETENEDDLDQNFKNDDIETDINKLKPQQEPGRTIEDLKMYEHLFPELVDDFQDYDLISKEPKPFVFEGKVRGPIVVPTAGEETSGNSGNLRKVVMKENISSKGDEGEKKSTFMDLAKEDIKDNDRTLQQQPGDQNRTISSVHGLNNDIVKALDRITLQNIPSQTAPGFTAEMKKDCSLPLTVLTCAKACPHMATCGNVLFEGRTVQLGKLCCTGVETEDDEDTESNSSVEQASVEVPDGPTLHDPDLYIEIVKNTKSVPEYSEVAYPDYFGHIPPPFKEPILERPYGVQRTKIAQDIERLIHQSDIIDRVVYDLDNPNYTIPEEGDILKFNSKFESGNLRKVIQIRKNEYDLILNSDINSNHYHQWFYFEVSGMRPGVAYRFNIINCEKSNSQFNYGMQPLMYSVQEALNARPWWIRMGTDICYYKNHFSRSSVAAGGQKGKSYYTITFTVNFPHKDDVCYFAYHYPYTYSTLQMHLQKLESAHNPQQIYFRKDVLCETLSGNSCPLVTITAMPESNYYEHICHFRNRPYVFLSARVHPGETNASWVMKGTLEYLMSNNPTAQSLRESYIFKIVPMLNPDGVINGNHRCSLSGEDLNRQWQSPSPDLHPTIYHAKGLLQYLAAVKRLPLVYCDYHGHSRKKNVFMYGCSIKETVWHTNDNATSCDVVEDTGYRTLPKILSHIAPAFCMSSCSFVVEKSKESTARVVVWREIGVQRSYTMESTLCGCDQGKYKGLQIGTRELEEMGAKFCVGLLRLKRLTSPLEYNLPSSLLDFENDLIESSCKVTSPTTYVLDEDEPRFLEEVDYSAESNDELDIELAENVGDYEPSAQEEVLSDSELSRTYLP

SEQ ID NO: 625 - protein, 1238 aa, Homo sapiens
MRTGSAASSAAAAAAAAAASASPATGVCMKTPGGGRRGIRRDPGAEPGAAALRGPRQRPILSRLTNNSRIVGLLAQLEKINAEPSESDTARYVTSKILHLAQSQEKTRREMTAKGSTGMEILLSTLENTKDLQTTLNILSILVELVSAGGGRRVSFLVTKGGSQILLQLLMNASKESPPHEDLMVQIHSILAKIGPKDKKFGVKARINGALNITLNLVKQNLQNHRLVLPCLQLLRVYSANSVNSVSLGKNGVVELMFKIIGPFSKKNSSLIKVALDTLAALLKSKTNARRAVDRGYVQVLLTIYVDWHRHDNRHRNMLIRKGILQSLKSVTNIKLGRKAFIDANGMKILYNTSQLPVIPVTGPVAQLYSLPPEVDDVVDESDDNDDIDVEAENETENEDDLDQNFKNDDIETDINKLKPQQEPGRTIEDLKMYEHLFPELVDDFQDYDLISKEPKPFVFEGKVRGPIVVPTAGEETSGNSGNLRKVVMKENISSKGDEGEKKSTFMDLAKEDIKDNDRTLQQQPGDQNRTISSVHGLNNDIVKALDRITLQNIPSQTAPGFTAEMKKDCSLPLTVLTCAKACPHMATCGNVLFEGRTVQLGKLCCTGVETEDDEDTESNSSVEQASVEVPDGPTLHDPDLYIEIVKNTKSVPEYSEVAYPDYFGHIPPPFKEPILERPYGVQRTKIAQDIERLIHQSDIIDRVVYDLDNPNYTIPEEGDILKFNSKFESGNLRKVIQIRKNEYDLILNSDINSNHYHQWFYFEVSGMRPGVAYRFNIINCEKSNSQFNYGMQPLMYSVQEALNARPWWIRMGTDICYYKNHFSRSSVAAGGQKGKSYYTITFTVNFPHKDDVCYFAYHYPYTYSTLQMHLQKLESAHNPQQIYFRKDVLCETLSGNSCPLVTITAMPESNYYEHICHFRNRPYVFLSARVHPGETNASWVMKGTLEYLMSNNPTAQSLRESYIFKIVPMLNPDGVINGNHRCSLSGEDLNRQWQSPSPDLHPTIYHAKGLLQYLAAVKRLPLVYCDYHGHSRKKNVFMYGCSIKETVWHTNDNATSCDVVEDTGYRTLPKILSHIAPAFCMSSCSFVVEKSKESTARVVVWREIGVQRSYTMESTLCGCDQGKYKGLQIGTRELEEMGAKFCVGLLRLKRLTSPLEYNLPSSLLDFENDLIESSCKVTSPTTYVLDEDEPRFLEEVDYSAESNDELDIELAENVGDYEPSAQEEVLSDSELSRTYLP

SEQ ID NO: 626 - protein, 1226 aa, Homo sapiens
MSKLKVIPEKSLTNNSRIVGLLAQLEKINAEPSESDTARYVTSKILHLAQSQEKTRREMTAKGSTGMEILLSTLENTKDLQTTLNILSILVELVSAGGGRRVSFLVTKGGSQILLQLLMNASKESPPHEDLMVQIHSILAKIGPKDKKFGVKARINGALNITLNLVKQNLQNHRLVLPCLQLLRVYSANSVNSVSLGKNGVVELMFKIIGPFSKKNSSLIKVALDTLAALLKSKTNARRAVDRGYVQVLLTIYVDWHRHDNRHRNMLIRKGILQSLKSVTNIKLGRKAFIDANGMKILYNTSQECLAVRTLDPLVNTSSLIMRKCFPKNRLPLPTIKSSFHFQLPVIPVTGPVAQLYSLPPEVDDVVDESDDNDDIDVEAENETENEDDLDQNFKNDDIETDINKLKPQQEPGRTIEDLKMYEHLFPELVDDFQDYDLISKEPKPFVFEGKVRGPIVVPTAGEETSGNSGNLRKVVMKENISSKGDEGEKKSTFMDLAKEDIKDNDRTLQQQPGDQNRTISSVHGLNNDIVKALDRITLQNIPSQTAPGFTAEMKKDCSLPLTVLTCAKACPHMATCGNVLFEGRTVQLGKLCCTGVETEDDEDTESNSSVEQASVEVPDGPTLHDPDLYIEIVKNTKSVPEYSEVAYPDYFGHIPPPFKEPILERPYGVQRTKIAQDIERLIHQSDIIDRVVYDLDNPNYTIPEEGDILKFNSKFESGNLRKVIQIRKNEYDLILNSDINSNHYHQWFYFEVSGMRPGVAYRFNIINCEKSNSQFNYGMQPLMYSVQEALNARPWWIRMGTDICYYKNHFSRSSVAAGGQKGKSYYTITFTVNFPHKDDVCYFAYHYPYTYSTLQMHLQKLESAHNPQQIYFRKDVLCETLSGNSCPLVTITAMPESNYYEHICHFRNRPYVFLSARVHPGETNASWVMKGTLEYLMSNNPTAQSLRESYIFKIVPMLNPDGVINGNHRCSLSGEDLNRQWQSPSPDLHPTIYHAKGLLQYLAAVKRLPLVYCDYHGHSRKKNVFMYGCSIKETVWHTNDNATSCDVVEDTGYRTLPKILSHIAPAFCMSSCSFVVEKSKESTARVVVWREIGVQRSYTMESTLCGCDQGKYKGLQIGTRELEEMGAKFCVGLLRLKRLTSPLEYNLPSSLLDFENDLIESSCKVTSPTTYVLDEDEPRFLEEVDYSAESNDELDIELAENVGDYEPSAQEEVLSDSELSRTYLP

SEQ ID NO: 627 - protein, 1186 aa, Homo sapiens
MSKLKVIPEKSLTNNSRIVGLLAQLEKINAEPSESDTARYVTSKILHLAQSQEKTRREMTAKGSTGMEILLSTLENTKDLQTTLNILSILVELVSAGGGRRVSFLVTKGGSQILLQLLMNASKESPPHEDLMVQIHSILAKIGPKDKKFGVKARINGALNITLNLVKQNLQNHRLVLPCLQLLRVYSANSVNSVSLGKNGVVELMFKIIGPFSKKNSSLIKVALDTLAALLKSKTNARRAVDRGYVQVLLTIYVDWHRHDNRHRNMLIRKGILQSLKSVTNIKLGRKAFIDANGMKILYNTSQLPVIPVTGPVAQLYSLPPEVDDVVDESDDNDDIDVEAENETENEDDLDQNFKNDDIETDINKLKPQQEPGRTIEDLKMYEHLFPELVDDFQDYDLISKEPKPFVFEGKVRGPIVVPTAGEETSGNSGNLRKVVMKENISSKGDEGEKKSTFMDLAKEDIKDNDRTLQQQPGDQNRTISSVHGLNNDIVKALDRITLQNIPSQTAPGFTAEMKKDCSLPLTVLTCAKACPHMATCGNVLFEGRTVQLGKLCCTGVETEDDEDTESNSSVEQASVEVPDGPTLHDPDLYIEIVKNTKSVPEYSEVAYPDYFGHIPPPFKEPILERPYGVQRTKIAQDIERLIHQSDIIDRVVYDLDNPNYTIPEEGDILKFNSKFESGNLRKVIQIRKNEYDLILNSDINSNHYHQWFYFEVSGMRPGVAYRFNIINCEKSNSQFNYGMQPLMYSVQEALNARPWWIRMGTDICYYKNHFSRSSVAAGGQKGKSYYTITFTVNFPHKDDVCYFAYHYPYTYSTLQMHLQKLESAHNPQQIYFRKDVLCETLSGNSCPLVTITAMPESNYYEHICHFRNRPYVFLSARVHPGETNASWVMKGTLEYLMSNNPTAQSLRESYIFKIVPMLNPDGVINGNHRCSLSGEDLNRQWQSPSPDLHPTIYHAKGLLQYLAAVKRLPLVYCDYHGHSRKKNVFMYGCSIKETVWHTNDNATSCDVVEDTGYRTLPKILSHIAPAFCMSSCSFVVEKSKESTARVVVWREIGVQRSYTMESTLCGCDQGKYKGLQIGTRELEEMGAKFCVGLLRLKRLTSPLEYNLPSSLLDFENDLIESSCKVTSPTTYVLDEDEPRFLEEVDYSAESNDELDIELAENVGDYEPSAQEEVLSDSELSRTYLP

SEQ ID NO: 628 - protein, 159 aa, Homo sapiens
MELPAVNLKCASSSVPRNHPHVILLGHWLLTTCFWRHFSAKPRLETIELTCALCKLRSAAHRATAGLHCILRLLCLGQLHHPGLGRVGCGSAGLHRRHKHVSGWLAGHHLPGHRAHQHLLPAGQPHGHGPLWRGHGHPQLAAQAALLLLRLPHVPGARG

SEQ ID NO: 629 - protein, 111 aa, Homo sapiens
MELPAVNLKGLHCILRLLCLGQLHHPGLGRVGCGSAGLHRRHKHVSGWLAGHHLPGHRAHQHLLPAGQPHGHGPLWRGHGHPQLAAQAALLLLRLPHVPGARGFPWVFSGP

SEQ ID NO: 630 - protein, 147 aa, Homo sapiens
MELPAVNLKVILLGHWLLTTCFWRHFSAKPRLETIELTCALCKLRSAAHRATAGLHCILRLLCLGQLHHPGLGRVGCGSAGLHRRHKHVSGWLAGHHLPGHRAHQHLLPAGQPHGHGPLWRGHGHPQLAAQAALLLLRLPHVPGARG

SEQ ID NO: 631 - protein, 155 aa, Homo sapiens
MELPAVNLKVILLGHWLLTTCFWRHFSAKPRLETIELTCALCKLRSAAHRATAGLHCILRLLCLGQLHHPGLGRVGCGSAGLHRRHKHVSGWLAGHHLPGHRAHQHLLPAGQPHGHGPLWRGHGHPQLAAQAALLLLRLPHVPGARGFPWVFSGP

SEQ ID NO: 632 - protein, 155 aa, Homo sapiens
MELPAVNLKVILLGHWLLTTCFWVACWPPSSWTSCTSASSTRGSASRTRAALAWAWPSSACCSSRSPAASSTTCTGSAGVSSWSTLVSLGLLRTVVPTRRLTQQRRPQIPLQSQRAGVKMPEGTEASHAAPGPAPGLPRAWEVVLGMLLTSVSWT

SEQ ID NO: 633 - protein, 159 aa, Homo sapiens
MELPAVNLKVILLGHWLLTTWGCIVFSGSYAWANFTILALGVWAVAQRDSIDAISMFLGGLLATIFLDIVHISIFYPRVSLTDTGRFGVGMAILSLLLKPLSCCFVYHMYRERGGELLVHTGFLGSSQDRSAYQTIDSAEAPADPFAVPEGRSQDARGY

SEQ ID NO: 634 - protein, 152 aa, Homo sapiens
MELPAVNLKVILLGHWLLTTWGCIVFSGSYAWANFTILALGVWAVAQRDSIDAISMFLGGLLATIFLDIVHISIFYPRVSLTDTGRFGVGMAILSLLLKPLSCCFVYHMYRERGGFLGSSQDRSAYQTIDSAEAPADPFAVPEGRSQDARGY

SEQ ID NO: 635 - protein, 63 aa, Homo sapiens
MELPAVNLKVILLGHWLLTTWHKDCTPCRSWEGDVEVLIRAPQGLPHSEASALQLDFHLYHLF

SEQ ID NO: 636 - protein, 508 aa, Homo sapiens
MEKWDGNEGTSAFHMPEWMIQFADQKQEFNKRPTKIGRRSLSRSISQSSTDSYSSAASYTDSSDDETSPRDKQQKNSKGSSDFCVKNIKQAEFGRREIEIAEQEMPALMALRKRAQGEKPLAGAKIVGCTHITAQTAVLMETLGALGAQCRWAACNIYSTLNEVAAALAESGFPVFAWKGESEDDFWWCIDRCVNVEGWQPNMILDDGGDLTHWIYKKYPNMFKKIKGIVEESVTGVHRLYQLSKAGKLCVPAMNVNDSVTKQKFDNLYCCRESILDGLKRTTDMMFGGKQVVVCGYGEVGKGCCAALKAMGSIVYVTEIDPICALQACMDGFRLVKLNEVIRQVDIVITCTGNKNVVTREHLDRMKNSCIVCNMGHSNTEIDVASLRTPELTWERVRSQVDHVIWPDGKRIVLLAEGRLLNLSCSTVPTFVLSITATTQALALIELYNAPEGRYKQDVYLLPKKMDEYVASLHLPTFDAHLTELTDEQAKYLGLNKNGPFKPNYYRY

SEQ ID NO: 637 - protein, 75 aa, Homo sapiens
MEKWDGNEGTSAFHMPEWMQIQFADQKQEFNKRPTKIGRRSLSRSISQSSTDSYSSAASYTDSSDDETSPRDKQQ

SEQ ID NO: 638 - protein, 508 aa, Homo sapiens
MLGSKKKYIVNGNSGIKAQIQFADQKQEFNKRPTKIGRRSLSRSISQSSTDSYSSAASYTDSSDDETSPRDKQQKNSKGSSDFCVKNIKQAEFGRREIEIAEQEMPALMALRKRAQGEKPLAGAKIVGCTHITAQTAVLMETLGALGAQCRWAACNIYSTLNEVAAALAESGFPVFAWKGESEDDFWWCIDRCVNVEGWQPNMILDDGGDLTHWIYKKYPNMFKKIKGIVEESVTGVHRLYQLSKAGKLCVPAMNVNDSVTKQKFDNLYCCRESILDGLKRTTDMMFGGKQVVVCGYGEVGKGCCAALKAMGSIVYVTEIDPICALQACMDGFRLVKLNEVIRQVDIVITCTGNKNVVTREHLDRMKNSCIVCNMGHSNTEIDVASLRTPELTWERVRSQVDHVIWPDGKRIVLLAEGRLLNLSCSTVPTFVLSITATTQALALIELYNAPEGRYKQDVYLLPKKMDEYVASLHLPTFDAHLTELTDEQAKYLGLNKNGPFKPNYYRY

SEQ ID NO: 639 - protein, 183 aa, Homo sapiens [sequence omitted]

SEQ ID NO: 640 - protein, 610 aa, Homo sapiens
MSVQVVSAAAAAKVPEVELKDLSPSEAESQLGLSTAAVGAMAPPAGGGDPEAPAPAAERPPVPGPGSGPAAALSPAAGKVPQASAMKRSDPHHQHQRHRDGGEALVSPDGTVTEAPRTVKKIQFADQKQEFNKRPTKIGRRSLSRSISQSSTDSYSSAASYTDSSDDETSPRDKQQKNSKGSSDFCVKNIKQAEFGRREIEIAEQEMPALMALRKRAQGEKPLAGAKIVGCTHITAQTAVLMETLGALGAQCRWAACNIYSTLNEVAAALAESGFPVFAWKGESEDDFWWCIDRCVNVEGWQPNMILDDGGDLTHWIYKKYPNMFKKIKGIVEESVTGVHRLYQLSKAGKLCVPAMNVNDSVTKQKFDNLYCCRESILDGLKRTTDMMFGGKQVVVCGYGEVGKGCCAALKAMGSIVYVTEIDPICALQACMDGFRLVKLNEVIRQVDIVITCTGNKNVVTREHLDRMKNSCIVCNMGHSNTEIDVASLRTPELTWERVRSQVDHVIWPDGKRIVLLAEGRLLNLSCSTVPTFVLSITATTQALALIELYNAPEGRYKQDVYLLPKKMDEYVASLHLPTFDAHLTELTDEQAKYLGLNKNGPFKPNYYRY

SEQ ID NO: 641 - protein, 611 aa, Homo sapiens
MSVQVVSAAAAAKVPEVELKDLSPSEAESQLGLSTAAVGAMAPPAGGGDPEAPAPAAERPPVPGPGSGPAAALSPAAGKVPQASAMKRSDPHHQHQRHRDGGEALVSPDGTVTEAPRTVKKQIQFADQKQEFNKRPTKIGRRSLSRSISQSSTDSYSSAASYTDSSDDETSPRDKQQKNSKGSSDFCVKNIKQAEFGRREIEIAEQEMPALMALRKRAQGEKPLAGAKIVGCTHITAQTAVLMETLGALGAQCRWAACNIYSTLNEVAAALAESGFPVFAWKGESEDDFWWCIDRCVNVEGWQPNMILDDGGDLTHWIYKKYPNMFKKIKGIVEESVTGVHRLYQLSKAGKLCVPAMNVNDSVTKQKFDNLYCCRESILDGLKRTTDMMFGGKQVVVCGYGEVGKGCCAALKAMGSIVYVTEIDPICALQACMDGFRLVKLNEVIRQVDIVITCTGNKNVVTREHLDRMKNSCIVCNMGHSNTEIDVASLRTPELTWERVRSQVDHVIWPDGKRIVLLAEGRLLNLSCSTVPTFVLSITATTQALALIELYNAPEGRYKQDVYLLPKKMDEYVASLHLPTFDAHLTELTDEQAKYLGLNKNGPFKPNYYRY

SEQ ID NO: 642 - protein, 518 aa, Homo sapiens
  VARIANT 1: note = misc_feature - Xaa can be any naturally occurring amino acid
XRKWSRQFLLSFWCTVCSAHQGTIFLSLKIQFADQKQEFNKRPTKIGRRSLSRSISQSSTDSYSSAASYTDSSDDETSPRDKQQKNSKGSSDFCVKNIKQAEFGRREIEIAEQEMPALMALRKRAQGEKPLAGAKIVGCTHITAQTAVLMETLGALGAQCRWAACNIYSTLNEVAAALAESGFPVFAWKGESEDDFWWCIDRCVNVEGWQPNMILDDGGDLTHWIYKKYPNMFKKIKGIVEESVTGVHRLYQLSKAGKLCVPAMNVNDSVTKQKFDNLYCCRESILDGLKRTTDMMFGGKQVVVCGYGEVGKGCCAALKAMGSIVYVTEIDPICALQACMDGFRLVKLNEVIRQVDIVITCTGNKNVVTREHLDRMKNSCIVCNMGHSNTEIDVASLRTPELTWERVRSQVDHVIWPDGKRIVLLAEGRLLNLSCSTVPTFVLSITATTQALALIELYNAPEGRYKQDVYLLPKKMDEYVASLHLPTFDAHLTELTDEQAKYLGLNKNGPFKPNYYRY

SEQ ID NO: 643 - protein, 368 aa, Homo sapiens
MKSLVLLLCLAQLWGCHSAPHGPGLIYRQPNCDDPETEEAALVAIDYINQNLPWGYKHTLNQIDEVKVWPQQPSGELFEIEIDTLETTCHVLDPTPVARCSVRQLKEHAVEGDCDFQLLKLDGKFSVVYAKCDSSPADSAEDVRKVCQDCPLLAPLNDTRVVHAAKAALAAFNAQNNGSNFQLEEISRAQLVPLPPSTYVEFTVSGTDCVAKEATEAAKCNLLAEKQYGFCKATLSEKLGGAEVAVTCMVFQTQPVSSQPQPEGANEAVPTPVVDPDAPPSPPLGAPGLPPAGSPPDSHVLLAAPPGHQLHRAHYDLRHTFMGVVSLGSPSGEVSHPRKTRTVVQPSVGAAAGPVVPPCPGRIRHFKV

SEQ ID NO: 644 - protein, 367 aa, Homo sapiens
MKSLVLLLCLAQLWGCHSAPHGPGLIYRQPNCDDPETEEAALVAIDYINQNLPWGYKHTLNQIDEVKVWPQQPSGELFEIEIDTLETTCHVLDPTPVARCSVRQLKEHAVEGDCDFQLLKLDGKFSVVYAKCDSSPDSAEDVRKVCQDCPLLAPLNDTRVVHAAKAALAAFNAQNNGSNFQLEEISRAQLVPLPPSTYVEFTVSGTDCVAKEATEAAKCNLLAEKQYGFCKATLSEKLGGAEVAVTCMVFQTQPVSSQPQPEGANEAVPTPVVDPDAPPSPPLGAPGLPPAGSPPDSHVLLAAPPGHQLHRAHYDLRHTFMGVVSLGSPSGEVSHPRKTRTVVQPSVGAAAGPVVPPCPGRIRHFKV

SEQ ID NO: 645 - protein, 47 aa, Homo sapiens
MALVPCQVLRMAILLSYCSILCNYKAIEMPSHQTYGGSWKFLTFIDL

SEQ ID NO: 646 - protein, 124 aa, Homo sapiens
MALVPCQVLRMAILLSYCSILCNYKAIEMPSHQTYGGSWKFLTFIDLFVVAVFWIIYAYDREMIYPKLLDNFIPGWLNHGMHTTVLPFILIEMRTSHHQYPSRSSGLTAICTFSVGYILWVCWV

SEQ ID NO: 647 - protein, 137 aa, Homo sapiens
MALVPCQVLRMAILLSYCSILCNYKAIEMPSHQTYGGSWKFLTFIDLVIQAVFFGICVLTDLSSLLTRGSGNQEQERQLKKLISLRDWMLAVLAFPVGVFVVAVFWIIYAYDREMIYPKLLDNFIPGWLNHGMHFKA

SEQ ID NO: 648 - protein, 245 aa, Homo sapiens
MALVPCQVLRMAILLSYCSILCNYKAIEMPSHQTYGGSWKFLTFIDLVIQAVFFGICVLTDLSSLLTRGSGNQEQERQLKKLISLRDWMLAVLAFPVGVFVVAVFWIIYAYDREMIYPKLLDNFIPGWLNHGMHTTVLPFILIEMRTSHHQYPSRSSGLTAICTFSVGYILWVCWVHHVTGMWVYPFLEHIGPGARIIFFGSTTILMNFLYLLGEVLNNYIWDTQKKPPSWQDMKIKFMYLGPSS

SEQ ID NO: 649 - protein, 238 aa, Homo sapiens
MALVPCQVLRMAILLSYCSILCNYKAIEMPSHQTYGGSWKFLTFIDLVIQAVFFGICVLTDLSSLLTRGSGNQEQERQLKKLISLRDWMLAVLAFPVGVFVVAVFWIIYAYDREMIYPKLLDNFIPGWLNHGMHTTVLPFILIEMRTSHHQYPSRSSGLTAICTFSVGYILWVCWVHHVTGMWVYPFLEHIGPGARIIFFGSTTILMNFLYLLGEVLNNYIWDTQKSMEEEKEKPKLE

SEQ ID NO: 650 - protein, 231 aa, Homo sapiens
MALVPCQVLRMAILLSYCSILCNYKAIEMPSHQTYGGSWKFLTFIDLVIQAVFFGICVLTDLSSLLTRGSGNQEQERQLKKLISLRDWMLAVLAFPVGVFVVAVFWIIYAYDREMIYPKLLDNFIPGWLNHGMHTTVLPFILIEMRTSHHQYPSRSSGLTAICTFSVGYILWVCWVHHVTGMWVYPFLEHIGPGARIIFFGSTTILMNFLYLLGEVLNNYIWDTQKTAKLK

SEQ ID NO: 651 - protein, 134 aa, Homo sapiens
MALVPCQVLRMAILLSYCSILCNYKAIEMPSHQTYGGSWKFLTFIDLVIQAVFFGICVLTDLSSLLTRGSGNQEQERQLKKLISLRDWMLAVLAFPVGVFVVAVFWIIYAYDREMIYPKLLDNFIPGWLNHGML

SEQ ID NO: 652 - protein, 138 aa, Homo sapiens
MLAVLAFPVGVFVVAVFWIIYAYDREMIYPKLLDNFIPGWLNHGMHTTVLPFILIEMRTSHHQYPSRSSGLTAICTFSVGYILWVCWVHHVTGMWVYPFLEHIGPGARIIFFGSTTILMNFLYLLGEVLNNYIWDTQK

SEQ ID NO: 653 - protein, 192 aa, Homo sapiens
MTKVLRMAILLSYCSILCNYKAIEMPSHQTYGGSWKFLTFIDLVIQAVFFGICVLTDLSSLLTRGSGNQEQERQLKKLISLRDWMLAVLAFPVGVFVVAVFWIIYAYDREMIYPKLLDNFIPGWLNHGMHTTVLPFILIEMRTSHHQYPSRSSGLTAICTFSVGYILWVCWVHHVTGMWVYPFLEHIGPGAR

SEQ ID NO: 654 - protein, 171 aa, Homo sapiens
MAKQYIEKSLLVPDHVITRLMMSELENRRGQHWLLDGFPRTLGQAEALDKICEVDLVISLNIPFETLKDRLSRRWIHPPSGRVYNLDFNPPHVHGIDDVTGEPLVQQEDDKPEAVAARLRQYKDVAKPVIELYKSRGVLHQFSGTETNKIWPYVYTLFSNKITPIQSKEAY

SEQ ID NO: 655 - protein, 223 aa, Homo sapiens
MASKLLRAVILGPPGSGKGTVCQRIAQNFGLQHLSSGHFLRENIKASTEVGEMAKQYIEKSLLVPDHVITRLMMSELENRRGQHWLLDGFPRTLGQAEALDKICEVDLVISLNIPFETLKDRLSRRWIHPPSGRVYNLDFNPPHVHGIDDVTGEPLVQQEDDKPEAVAARLRQYKDVAKPVIELYKSRGVLHQFSGTETNKIWPYVYTLFSNKITPIQSKEAY

SEQ ID NO: 656 - protein, 223 aa, Homo sapiens; identical to SEQ ID NO: 655

SEQ ID NO: 657 - protein, 223 aa, Homo sapiens; identical to SEQ ID NO: 655

SEQ ID NO: 658 - protein, 78 aa, Homo sapiens
LALLALLMSLTQGVLTALRLRKMTFGRVSDLGQFIRESEPEPDVRKSKGSMFSQAMKKWVQGNTDEAQEELAWKIAKM

SEQ ID NO: 659 - protein, 138 aa, Homo sapiens
MRGAGPSPRQSPRTLRPDPGPAMSFFRRKVKGKEQEKTSDVKSIKALKIMPCWRLQDQVMLQSMPFLPTWTPFQVAGQPHLRSSQATWRPLILVTWADLVWTTRLKRPNQAFLRPLNKSCTTLLSSLTSFNSWNFGEW

SEQ ID NO: 660 - protein, 150 aa, Homo sapiens
MRGAGPSPRQSPRTLRPDPGPAMSFFRRKVKGKEQEKTSDVKSIKASISVHSPQKSTKNHALLEAAGPSHVAINAISANMDSFSSSRTATLKKQPSHMEAAHFGDLDLVWTTRLKRPNQAFLRPLNKSCTTLLSSLTSFNSWNFGEWSIW

SEQ ID NO: 661 - protein, 662 aa, Homo sapiens
MRGAGPSPRQSPRTLRPDPGPAMSFFRRKVKGKEQEKTSDVKSIKASISVHSPQKSTKNHALLEAAGPSHVAINAISANMDSFSSSRTATLKKQPSHMEAAHFGDLGRSCLDYQTQETKSSLSKTLEQVLHDTIVLPYFIQFMELRRMEHLVKFWLEAESFHSTTWSRIRAHSLNTVKQSSLAEPVSPSKKHETTASFLTDSLDKRLEDSGSAQLFMTHSEGIDLNNRTNSTQNHLLLSQECDSAHSLRLEMARAGTHQVSMETQESSSTLTVASRNSPASPLKELSGKLMKSIEQDAVNTFTKYISPDAAKPIPITEAMRNDIIARICGEDGQVDPNCFVLAQSIVFSAMEQEHFSEFLRSHHFCKYQIEVLTSGTVYLADILFCESALFYFSEYMEKEDAVNILQFWLAADNFQSQLAAKKGQYDGQEAQNDAMILYDKYFSLQATHPLGFDDVVRLEIESNICREGGPLPNCFTTPLRQAWTTMEKVFLPGFLSSNLYYKYLNDLIHSVRGDEFLGGNVSLTAPGSVGPPDESHPGSSDSSASQSSVKKASIKILKNFDEAIIVDAASLDPESLYQRTYAGKMTFGRVSDLGQFIRESEPEPDVRKSKGSMFSQAMKKWVQGNTDEAQEELAWKIAKMIVSDIMQQAQYDQPLEKSTKL

SEQ ID NO: 662 - protein, 604 aa, Homo sapiens
MRGAGPSPRQSPRTLRPDPGPAMSFFRRKVKGKEQEKTSDVKSIKASISVHSPQKSTKNHALLEAAGPSHVAINAISANMDSFSSSRTATLKKQPSHMEAAHFGDLGRSCLDYQTQETKSSLSKTLEQVLHDTIVLPYFIQFMELRRMEHLVKFWLEAESFHSTTWSRIRAHSLNTVKQSSLAEPVSPSKKHETTASFLTDSLDKRLEDSGSAQLFMTHSEGIDLNNRTNSTQNHLLLSQECDSAHSLRLEMARAGTHQVSMETQESSSTLTVASRNSPASPLKELSGKLMKSIEQDAVNTFTKYISPDAAKPIPITEAMRNDIIARICGEDGQVDPNCFVLAQSIVFSAMEQEHFSEFLRSHHFCKYQIEVLTSGTVYLADILFCESALFYFSEYMEKEDAVNILQFWLAADNFQSQLAAKKGQYDGQEAQNDAMILYDKYFSLQATHPLGFDDVVRLEIESNICREGGPLPNCFTTPLRQAWTTMEKSSVKKASIKILKNFDEAIIVDAASLDPESLYQRTYAGKMTFGRVSDLGQFIRESEPEPDVRKSKGSMFSQAMKKWVQGNTDEAQEELAWKIAKMIVSDIMQQAQYDQPLEKSTKL

SEQ ID NO: 663 - protein, 66 aa, Homo sapiens
MRGAGPSPRQSPRTLRPDPGPAMSFFRRKVKGKEQEKTSDVKSIKGCRTKSCCNQCHFCQHGLLFK

SEQ ID NO: 664 - protein, 63 aa, Homo sapiens
MRGAGPSPRQSPRTLRPDPGPAMSFFRRKVKGKEQEKTSDVKSIKVETEFHHVSQYGLDLLTL

SEQ ID NO: 665 - protein, 59 aa, Homo sapiens
  VARIANT 1: note = misc_feature - Xaa can be any naturally occurring amino acid
XKYISPDAAKPIPITEAMRNDIIARICGEDGQVDPNCFVLAQSIVFSAMEQDTWKKRMQ

SEQ ID NO: 666 - protein, 31 aa, Homo sapiens
  VARIANT 1: note = misc_feature - Xaa can be any naturally occurring amino acid
XLTAPGSVGPPDESHPGSSDSSASQCEKSQY

SEQ ID NO: 667 - protein, 323 aa, Homo sapiens
MDSKYQCVKLNDGHFMPVLGFGTYAPAEVPKSKALEATKLAIEAGFRHIDSAHLYNNEEQVGLAIRSKIADGSVKREDIFYTSKLWCNSHRPELVRPALERSLKNLQLDYVDLYLIHFPVSVKPGEEVIPKDENGKILFDTVDLCATWEAVEKCKDAGLAKSIGVSNFNRRQLEMILNKPGLKYKPVCNQVECHPYFNQRKLLDFCKSKDIVLVAYSALGSHREEPWVDPNSPVLLEDPVLCALAKKHKRTPALIALRYQLQRGVVVLAKSYNEQRIRQNVQVFEFQLTSEEMKAIDGLNRNVRYLTLDIFAGPPNYPFSDEY

SEQ ID NO: 668 - protein, 205 aa, Homo sapiens
MGVVSLFLCIVEQIFTSSKKIQFRGIFMAKVPKSKALEATKLAIEAGFRHIDSAHLYNNEEQVGLAIRSKIADGSVKREDIFYTSKLWCNSHRPELVRPALERSLKNLQLDYVDLYLIHFPVSVKPGEEVIPKDENGKILFDTVDLCATWEAVEKCKDAGLAKSIGVSNFNRRQLEMILNKPGLKYKPVCNQPRDNSIFSLSPDW

SEQ ID NO: 669 - protein, 248 aa, Homo sapiens
  VARIANT 1: note = misc_feature - Xaa can be any naturally occurring amino acid
XSKYQCVKLNDGHFMPVLGFGTYAPAEVGLAIRSKIADGSVKREDIFYTSKLWCNSHRPELVRPALERSLKNLQLDYVDLYLIHFPVSVKPGEEVIPKDENGKILFDTVDLCATWEAVEKCKDAGLAKSIGVSNFNRRQLEMILNKPGLKYKPVCNQVECHPYFNQRKLLDFCKSKDIVLVAYSALGSHREEPWVDPNSPVLLEDPVLCALAKKHKRTPALIALRYQLQRGVVVLAKSYNEQRIRQNV

SEQ ID NO: 670 - protein, 172 aa, Homo sapiens
MPVPASWPHLPSPFLLMTLLLGRLTGVAGEDELQVIQPEKSVSVAAGESATLRCAMTSLIPVGPIMWFRGAGAGRELIYNQKEGHFPRVTTVSELTKRNNLDFSISISNITPADAGTYYCVKFRKGSPDDVEFKSGAGTELSVRAFFQESHMCSMCNKRRCHRLYQLGSQSS

SEQ ID NO: 671 - protein, 177 aa, Homo sapiens
MPVPASWPHPPCPFLLLTLLLGLTGVAGEDELQVIQPEKSVSVAAGESATLRCAMTSLIPVGPIMWFRGAGAGRELIYNQKEGHFPRVTTVSELTKRNNLDFSISISNITPADAGTYYCVKFRKGSPDDVEFKSGAGTELSVRGVTHVFHVQQTEMSQTVSTGESIILSCSVPNTLP

SEQ ID NO: 672 - protein, 140 aa, Homo sapiens
  VARIANT 1: note = misc_feature - Xaa can be any naturally occurring amino acid
XLIYNQKEGHFPRVTTVSDLTKRNNMDFSIRISNITPADAGTYYCVKFRKGSPDHVEFKSGAGTELSVREARTVFSARSTESRASPGQAFRQSKLQVSPQCPSLPPHSTHLCLPYCCICCLNWQSLTVLEARSLKSASLD

SEQ ID NO: 673 - protein, 45 aa, Homo sapiens
  VARIANT 1: note = misc_feature - Xaa can be any naturally occurring amino acid
XVHKAVVEVDESGTRAAAATGTIFTFRYSLNGHCVPGTVPSAEEK

SEQ ID NO: 674 - protein, 85 aa, Homo sapiens
KKEHVFIHERPRKINGICISPKKVACQNLSAIFCFQSETKFKMTVCQLIEGTRYPACRYHYSPTEGFVLVTCDDLRPDSFLGYVK

SEQ ID NO: 675 - protein, 96 aa, Homo sapiens
MIIMVIIFLVLLFWENEVNDEAVMSTLEHLHVDYPQNDVPVPARRDYTTSEMETFPLLLLSLGLVLAEASESTMKIIKEEFTDEEMQYDMAKSGQE

SEQ ID NO: 676 - protein, 31 aa, Homo sapiens
MVMGLGVLLLVFVLGLGLTPPTLAQDNSRHL

SEQ ID NO: 677 - protein, 190 aa, Homo sapiens
MCLCVCLYVCICVYVCVCHFVCFWVCLPLRVSVYLYLRVCVCVCVFVCLCMCVRGCVSVCVCVCIEREGERKGATDGSAWKVYPHSQPWEESVNPPTGQDQLWWCLADSGNVTFHLRMGLHFLGKECRSWSLKECFFFPFVIERAQPCVHWLTVTNLRVGDSHREETEGTADSEQESGGTSLPLGPNPQL

SEQ ID NO: 678 - protein, 23 aa, Homo sapiens
MSRLVRGSSLLTYLVVALVLQSR

SEQ ID NO: 679 - protein, 1266 aa, Homo sapiens
MGPLMVLFCLLFLYPGLADSAPSCPQNVNISGGTFTLSHGWAPGSLLTYSCPQGLYPSPASRLCKSSGQWQTPGATRSLSKAVCKPGHCPNPGISLGAVRTGFRFGHGDKVRYRCSSNLVLTGSSERECQGNGVWSGTEPICRQPYSYDFPEDVAPALGTSFSHMLGATNPTQKTKDHENGTGTNTYAALNSVYLMMNNQMRLLGMETMAWQEIRHAIILLTDGKSNMGGSPKTAVDHIREILNINQKRNDYLDIYAIGVGKLDVDWRELNELGSKKDGERHAFILQDTKALHQVFEHMLDVSKLTDTICGVGNMSANASDQERTPWHVTIKPKSQETCRGALISDQWVLTAAHCFRDGNDHSLWRVNVGDPKSQWGKEFLIEKAVISPGFDVFAKKNQGILEFYGDDIALLKLAQKVKMSTHARPICLPCTMEANLALRRPQGSTCRDHENELLNKQSVPAHFVALNGSKLNINLKMGVEWTSCAEVVSQEKTMFPNLTDVREVVTDQFLCSGTQEDESPCKGVTTTPWSLARPQGSCSLEGVEIKGGSFRLLQEGQALEYVCPSGFYPYPVQTRTCRSTGSWSTLKTQDQKTVRKAECRAIHCPRPHDFENGEYWPRSPYYNVSDEISFHCYDGYTLRGSANRTCQVNGRWSGQTAICDNGAGYCSNPGIPIGTRKVGSQYRLEDSVTYHCSRGLTLRGSQRRTCQEGGSWSGTEPSCQDSFMYDTPQEVAEAFLSSLTETIEGVDAEDGHGPGEQQKRKIVLDPSGSMNIYLVLDGSDSIGASNFTGAKKCLVNLIEKVASYGVKPRYGLVTYATYPKIWVKVSEADSSNADWVTKQLNEINYEDHKLKSGTNTKKALQAVYSMMSWPDDVPPEGWNRTRHVIILMTDGLHNMGGDPITVIDEIRDLLYIGKDRKNPREDYLDVYVFGVGPLVNQVNINALASKKDNEQHVFKVKDMENLEDVFYQMIDESQSLSLCGMVWEHRKGTDYHKQPWQAKISVIRPSKGHESCMGAVVSEYFVLTAAHCFTVDDKEHSIKVSVGGEKRDLEIEVVLFHPNYNINGKKEAGIPEFYDYDVALIKLKNKLKYGQTIRPICLPCTEGTTRALRLPPTTTCQQQKEELLPAQDIKALFVSEEEKKLTRKEVYIKNGDKKGSCERDAQYAPGYDKVKDISEVVTPRFLCTGGVSPYADPNTCRGDSGGPLIVHKRSRFIQVGVISWGVVDVCKNQKRQKQVPAHARDFHINLFQVLPWLKEKLQDEDLGFL

SEQ ID NO: 680 - protein, 1115 aa, Homo sapiens
MGPLMVLFCLLFLYPGLADSAPSCPQNVNISGGTFTLSHGWAPGSLLTYSCPQGLYPSPASRLCKSSGQWQTPGATRSLSKAVCKPVRCPAPVSFENGIYTPRLGSYPVGGNVSFECEDGFILRGSPVRQCRPNGMWDGETAVCDNGDHENGTGTNTYAALNSVYLMMNNQMRLLGMETMAWQEIRHAIILLTDGKSNMGGSPKTAVDHIREILNINQKRNDYLDVSKLTDTICGVGNMSANASDQERTPWHVTIKPKSQETCRGALISDQWVLTAAHCFRDGNDHSLWRVNVGDPKSQWGKEFLIEKAVISPGFDVFAKKNQGILEFYGDDIALLKLAQKVKMSTHARPICLPCTMEANLALRRPQGSTCRDHENELLNKQSVPAHFVALNGSKLNINLKMGVEWTSCAEVVSQEKTMFPNLTDVREVVTDQFLCSGTQEDESPCKGGSAIHCPRPHDFENGEYWPRSPYYNVSDEISFHCYDGYTLRGSANRTCQVNGRWSGQTAICDNGAGYCSNPGIPIGTRKVGSQYRLEDSVTYHCSRGLTLRGSQRRTCQEGGSWSGTEPSCQDSFMYDTPQEVAEAFLSSLTETIEGVDAEDGHGPGEQQKRKIVLDPSGSMNIYLVLDGSDSIGASNFTGAKKCLVNLIEKVASYGVKPRYGLVTYATYPKIWVKVSEADSSNADWVTKQLNEINYEDHKLKSGTNTKKALQAVYSMMSWPDDVPPEGWNRTRHVIILMTDGLHNMGGDPITVIDEIRDLLYIGKDRKNPREDYLDVYVFGVGPLVNQVNINALASKKDNEQHVFKVKDMENLEDVFYQMIDESQSLSLCGMVWEHRKGTDYHKQPWQAKISVIRPSKGHESCMGAVVSEYFVLTAAHCFTVDDKEHSIKVSVGGEKRDLEIEVVLFHPNYNINGKKEAGIPEFYDYDVALIKLKNKLKYGQTIRPICLPCTEGTTRALRLPPTTTCQQQKEELLPAQDIKALFVSEEEKKLTRKEVYIKNGDKKGSCERDAQYAPGYDKVKDISEVVTPRFLCTGGVSPYADPNTCRGDSGGPLIVHKRSRFIQVGVISWGVVDVCKNQKRQKQVPAHARDFHINLFQVLPWLKEKLQDEDLGFL

SEQ ID NO: 681 - protein, 175 aa, Homo sapiens
MGHEQNQGAALLQMLPLLWLLPHSWAVPEEQSMITFLPLLLGLSLGCTGAGGFVAHVESTCLLDDAGTPKDFTYCISFNKDLLTCWDPEENKMAPCEFGVLNSLANVLSQHLNQKDTLMQRLRNGLQNCATHTQPFWGSLTNRTRPPSVQVAKTTPFNTREPVMLACYVWGFYPA

SEQ ID NO: 682 - protein, 63 aa, Homo sapiens
MGTSSIFLCVLFLCGALGLTMSPARGRLRCYICGFTKPCHPVPTECRDDEACGISIGTSDAHC

SEQ ID NO: 683 - protein, 33 aa, Homo sapiens
  VARIANT 1: note = misc_feature - Xaa can be any naturally occurring amino acid
XLGLTYLSLLLIPAAGASSCPRTPLPAMAPLPQ

SEQ ID NO: 684 - protein, 198 aa, Homo sapiens
MLSELQDGKSKIVQKAAPEVQEDVKAFKTDLPSSLVSVSLRKPFSGPQEQEQISGKVTHLIQNNMPGNYVFSYDQFFRDKIMEKKQDHTYRVFKTVNRWADAYPFAQHFSEASVASKDVSVWCSNDYLGMSRHPQVLQATQETLQRHGAGAGGTRNISGTSKFHVELEQELAELHQKDSALLFSSCFVANDSTLFTLA

SEQ ID NO: 685 - protein, 171 aa, Homo sapiens
MLSELQDGKSKIVQKAAPEVQEDVKAFKTGNYVFSYDQFFRDKIMEKKQDHTYRVFKTVNRWADAYPFAQHFSEASVASKDVSVWCSNDYLGMSRHPQVLQATQETLQRHGAGAGGTRNISGTSKFHVELEQELAELHQKDSALLFSSCFVANDSTLFTLAKILPGCEIYS

SEQ ID NO: 686 - protein, 165 aa, Homo sapiens
MRGGEVALGWNKKKRLFCEDFRFKMVTAAMLLQCCPVLARGPTSLLGKVVKTHQFLFGIGRCPILATQGPNCSQIHLKATKAGGDSPSWAKGHCPFMLSELQDGKSKIVQKAAPEVQEDVKAFKTDLPSSLVSVSLRKPFSGPQEQEQISGKVTHLIQNNMPGNY

SEQ ID NO: 687 - protein, 574 aa, Homo sapiens
MRGGEVALGWNKKKRLFCEDFRFKMVTAAMLLQCCPVLARGPTSLLGKVVKTHQFLFGIGRCPILATQGPNCSQIHLKATKAGGDSPSWAKGHCPFMLSELQDGKSKIVQKAAPEVQEDVKAFKTGNYVFSYDQFFRDKIMEKKQDHTYRVFKTVNRWADAYPFAQHFSEASVASKDVSVWCSNDYLGMSRHPQVLQATQETLQRHGAGAGGTRNISGTSKFHVELEQELAELHQKDSALLFSSCFVANDSTLFTLAKILPGCEIYSDAGNHASMIQGIRNSGAAKFVFRHNDPDHLKKLLEKSNPKIPKIVAFETVHSMDGAICPLEELCDVSHQYGALTFVDEVHAVGLYGSRGAGIGERDGIMHKIDIISGTLGKAFGCVGGYIASTRDLVDMVRSYAAGFIFTTSLPPMVLSGALESVRLLKGEEGQALRRAHQRNVKHMRQLLMDRGLPVIPCPSHIIPIRVGNAALNSKLCDLLLSKHGIYVQAINYPTVPRGEELLRLAPSPHHSPQMMEDFVEKLLLAWTAVGLPLQDVSVAACNFCRRPVHFELMSEWERSYFGNMGPQYVTTYA

SEQ ID NO: 688 - protein, 587 aa, Homo sapiens
MVTAAMLLQCCPVLARGPTSLLGKVVKTHQFLFGIGRCPILATQGPNCSQIHLKATKAGGDSPSWAKGHCPFMLSELQDGKSKIVQKAAPEVQEDVKAFKTDLPSSLVSVSLRKPFSGPQEQEQISGKVTHLIQNNMPGNYVFSYDQFFRDKIMEKKQDHTYRVFKTVNRWADAYPFAQHFSEASVASKDVSVWCSNDYLGMSRHPQVLQATQETLQRHGAGAGGTRNISGTSKFHVELEQELAELHQKDSALLFSSCFVANDSTLFTLAKILPGCEIYSDAGNHASMIQGIRNSGAAKFVFRHNDPDHLKKLLEKSNPKIPKIVAFETVHSMDGAICPLEELCDVSHQYGALTFVDEVHAVGLYGSRGAGIGERDGIMHKIDIISGTLGKAFGCVGGYIASTRDLVDMVRSYAAGFIFTTSLPPMVLSGALESVRLLKGEEGQALRRAHQRNVKHMRQLLMDRGLPVIPCPSHIIPIRVGNAALNSKLCDLLLSKHGIYVQAINYPTVPRGEELLRLAPSPHHSPQMMEDFVEKLLLAWTAVGLPLQDVSVAACNFCRRPVHFELMSEWERSYFGNMGPQYVTTYA

SEQ ID NO: 689 - protein, 550 aa, Homo sapiens
MVTAAMLLQCCPVLARGPTSLLGKVVKTHQFLFGIGRCPILATQGPNCSQIHLKATKAGGDSPSWAKGHCPFMLSELQDGKSKIVQKAAPEVQEDVKAFKTGNYVFSYDQFFRDKIMEKKQDHTYRVFKTVNRWADAYPFAQHFSEASVASKDVSVWCSNDYLGMSRHPQVLQATQETLQRHGAGAGGTRNISGTSKFHVELEQELAELHQKDSALLFSSCFVANDSTLFTLAKILPGCEIYSDAGNHASMIQGIRNSGAAKFVFRHNDPDHLKKLLEKSNPKIPKIVAFETVHSMDGAICPLEELCDVSHQYGALTFVDEVHAVGLYGSRGAGIGERDGIMHKIDIISGTLGKAFGCVGGYIASTRDLVDMVRSYAAGFIFTTSLPPMVLSGALESVRLLKGEEGQALRRAHQRNVKHMRQLLMDRGLPVIPCPSHIIPIRVGNAALNSKLCDLLLSKHGIYVQAINYPTVPRGEELLRLAPSPHHSPQMMEDFVEKLLLAWTAVGLPLQDVSVAACNFCRRPVHFELMSEWERSYFGNMGPQYVTTYA

SEQ ID NO: 690 - protein, 141 aa, Homo sapiens
MVTAAMLLQCCPVLARGPTSLLGKVVKTHQFLFGIGRCPILATQGPNCSQIHLKATKAGGDSPSWAKGHCPFMLSELQDGKSKIVQKAAPEVQEDVKAFKTGRPCSVMVLELVAPATSQAPILPGCEIYSDAGNHASMIQG

SEQ ID NO: 691 - protein, 276 aa, Homo sapiens
  VARIANT 1: note = misc_feature - Xaa can be any naturally occurring amino acid
XELEQELAELHQKDSALLFSSCFVANDSTLFTLAKILPGCEIYSDAGNHASMIQGIRNSGAAKFVFRHNDPDHLKKLLEKSNPKIPKIVAFETVHSMDGAICPLEELCDVSHQYGALTFVDEVHAVGLYGSRGAGIGERDGIMHKIDIISGTLGKAFGCVGGYIASTRDLVDMVRSYAAGFIFTTSLPPMVLSGALESVRLLKGEEGQALRRAHQRNVKHMRQLLMDRGLPVIPCPSHIIPIRRSCCWLGLRWGCPSRMCLWLPAISVAVLYTLSS

SEQ ID NO: 692 - protein, 197 aa, Homo sapiens
GFEWGGQRRASHNSTFSAYSRGVFRRDAHKSEVAHRFKDLGEENFKALVLIAFAQYLQQCPFEDHVKLVNEVTEFAKTCVADESAENCDKSLHTLFGDKLCTVATLRETYGEMADCCAKQEPERNECFLQHKDDNPNLPRLVRPEVDVMCTAFHDNEETFLKKYLYEIARRHPYFYAPELLFFAKRYKAAFTECCQA

SEQ ID NO: 693 - protein, 417 aa, Homo sapiens
MKWVTFISLLFLFSSAYSRGVFRRDAHKSEVAHRFKDLGEENFKALAVARLSQRFPKAEFAEVSKLVTDLTKVHTECCHGDLLECADDRADLAKYICENQDSISSKLKECCEKPLLEKSHCIAEVENDEMPADLPSLAADFVESKDVCKNYAEAKDVFLGMFLYEYARRHPDYSVVLLLRLAKTYETTLEKCCAAADPHECYAKVFDEFKPLVEEPQNLIKQNCELFEQLGEYKFQNALLVRYTKKVPQVSTPTLVEVSRNLGKVGSKCCKHPEAKRMPCAEDYLSVVLNQLCVLHEKTPVSDRVTKCCTESLVNRRPCFSALEVDETYVPKEFNAETFTFHADICTLSEKERQIKKQTALVELVKHKPKATKEQLKAVMDDFAAFVEKCCKADDKETCFAEEGKKLVAASQAALGL

SEQ ID NO: 694 - protein, 609 aa, Homo sapiens [sequence omitted]

SEQ ID NO: 695 - protein, 604 aa, Homo sapiens
MKWVTFISLLFLFSSAYSRGVFRRDAHKSEVAHRFKDLGEENFKALVLIAFAQYLQQCPFEDHVKLVNEVTEFAKTCVADESAENCDKSLHTLFGDKLCTVATLRETYGEMADCCAKQEPERNECFLQHKDDNPNLPRLVRPEVDVMCTAFHDNEETFLKKYLYEIARRHPYFYAPELLFFAKRYKAAFTECCQAADKAACLLPKLDELRDEGKASSAKQRLKCASLQKFGERAFKAWAVARLSQRFPKAEFAEVSKLVTDLTKVHTECCHGDLLECADDRADLAKYICENQDSISSKLKECCEKPLLEKSHCIAEVENDEMPADLPSLAADFVESKDVCKNYAEAKDVFLGMFLYEYARRHPDYSVVLLLRLAKTYETTLEKCCAAADPHECYAKVFDEFKPLVEEPQNLIKQNCELFEQLGEYKFQNALLVRYTKKVPQVSTPTLVEVSRNLGKVGSKCCKHPEAKRMPCAEDYLSVVLNQLCVLHEKTPVSDRVTKCCTESLVNRRPCFSALEVDETYVPKEFNAETFTFHADICTLSEKERQIKKQTALVELVKHKPKATKEQLKAVMDDFAAFVEKCCKADDKETCFAEEPTMRIRERK

SEQ ID NO: 696 - protein, 396 aa, Homo sapiens
MKWVTFISLLFLFSSAYSRGVFRRDAHKSEVAHRFKDLGEENFKALVLIAFAQYLQQCPFEDHVKLVNEVTEFAKTCVADESAENCDKSLHTLFGDKLCTVATLRETYGEMADCCAKQEPERNECFLQHKDDNPNLPRLVRPEVDVMCTAFHDNEETFLKKYLYETTLEKCCAAADPHECYAKVFDEFKPLVEEPQNLIKQNCELFEQLGEYKFQNALLVRYTKKVPQVSTPTLVEVSRNLGKVGSKCCKHPEAKRMPCAEDYLSVVLNQLCVLHEKTPVSDRVTKCCTESLVNRRPCFSALEVDETYVPKEFNAETFTFHADICTLSEKERQIKKQTALVELVKHKPKATKEQLKAVMDDFAAFVEKCCKADDKETCFAEEGKKLVAASQAALGL

SEQ ID NO: 697 - protein, 396 aa, Homo sapiens
MKWVTFISLLFLFSSAYSRGVFRRDAHKSEVAHRFKDLGEENFKALVLIAFAQYLQQCPFEDHVKLVNEVTEFAKTCVADESAENCDKSLHTLFGDKLCTVATLRETYGEMADCCAKQEPERNECFLQHKDDNPNLPRLVRPEVDVMCTAFHDNEETFLKKYTYETTLEKCCAAADPHECYAKVFDEFKPLVEEPQNLIKQNCELFEQLGEYKFQNALLVRYTKKVPQVSTPTLVEVSRNLGKVGSKCCKHPEAKRMPCAEDYLSVVLNQLCVLHEKTPVSDRVTKCCTESLVNRRPCFSALEVDETYVPKEFNAETFTFHADICTLSEKERQIKKQTALVELVKHKPKATKEQLKAVMDDFAAFVEKCCKADDKETCFAEEGKKLVAASQAALGL

SEQ ID NO: 698 - protein, 494 aa, Homo sapiens
MKWVTFISLLFLFSSAYSRGVFRRDAHKSEVAHRFKDLGEENFKALYLYEIARRHPYFYAPELLFFAKRYKAAFTECCQAADKAACLLPKLDELRDEGKASSAKQRLKCASLQKFGERAFKAWAVARLSQRFPKAEFAEVSKLVTDLTKVHTECCHGDLLECADDRADLAKYICENQDSISSKLKECCEKPLLEKSHCIAEVENDEMPADLPSLAADFVESKDVCKNYAEAKDVFLGMFLYEYARRHPDYSVVLLLRLAKTYETTLEKCCAAADPHECYAKVFDEFKPLVEEPQNLIKQNCELFEQLGEYKFQNALLVRYTKKVPQVSTPTLVEVSRNLGKVGSKCCKHPEAKRMPCAEDYLSVVLNQLCVLHEKTPVSDRVTKCCTESLVNRRPCFSALEVDETYVPKEFNAETFTFHADICTLSEKERQIKKQTALVELVKHKPKATKEQLKAVMDDFAAFVEKCCKADDKETCFAEEGKKLVAASQAALGL

SEQ ID NO: 699 - protein, 105 aa, Homo sapiens
MKWVTFISLLFLFSSAYSRGVFRRDAHTYMKLPEDILTFMPRNSFSLLKGIKLLLQNVAKLLIKLPACCQSSMNFGMKGRLRLPNRDSSVPVSKNLEKELSKHGQ

SEQ ID NO: 700 - protein, 459 aa, Homo sapiens
MSQLKIVTNHLYLYEIARRHPYFYAPELLFFAKRYKAAFTECCQAADKAACLLPKLDELRDEGKASSAKQRLKCASLQKFGERAFKAWAVARLSQRFPKAEFAEVSKLVTDLTKVHTECCHGDLLECADDRADLAKYICENQDSISSKLKECCEKPLLEKSHCIAEVENDEMPADLPSLAADFVESKDVCKNYAEAKDVFLGMFLYEYARRHPDYSVVLLLRLAKTYETTLEKCCAAADPHECYAKVFDEFKPLVEEPQNLIKQNCELFEQLGEYKFQNALLVRYTKKVPQVSTPTLVEVSRNLGKVGSKCCKHPEAKRMPCAEDYLSVVLNQLCVLHEKTPVSDRVTKCCTESLVNRRPCFSALEVDETYVPKEFNAETFTFHADICTLSEKERQIKKQTALVELVKHKPKATKEQLKAVMDDFAAFVEKCCKADDKETCFAEEGKKLVAASQAALGL

SEQ ID NO: 701 - protein, 454 aa, Homo sapiens
  VARIANT 1: note = misc_feature - Xaa can be any naturally occurring amino acid
XFSKFRYLYEIARRHPYFYAPELLFFAKRYKAAFTECCQAADKAACLLPKLDELRDEGKASSAKQRLKCASLQKFGERAFKAWAVARLSQRFPKAEFAEVSKLVTDLTKVHTECCHGDLLECADDRADLAKYICENQDSISSKLKECCEKPLLEKSHCIAEVENDEMPADLPSLAADFVESKDVCKNYAEAKDVFLGMFLYEYARRHPDYSVVLLLRLAKTYETTLEKCCAAADPHECYAKVFDEFKPLVEEPQNLIKQNCELFEQLGEYKFQNALLVRYTKKVPQVSTPTLVEVSRNLGKVGSKCCKHPEAKRMPCAEDYLSVVLNQLCVLHEKTPVSDRVTKCCTESLVNRRPCFSALEVDETYVPKEFNAETFTFHADICTLSEKERQIKKQTALVELVKHKPKATKEQLKAVMDDFAAFVEKCCKADDKETCFAEEGKKLVAASQAALGL

SEQ ID NO: 702 - protein, 518 aa, Homo sapiens
MFLRAGLAALSPLLRSLRPSPVAAMSTGTFVVSQPLNYRGGARVEPADASGTEKAFEPATGRVIATFTCSGEKEVNLAVQNAKAAFKIWSQKSGMERCRILLEAARIIREREDEIATMECINNGKSIFEARLDIDISWQCLEYYAGLAASMAGEHIQLPGGSFGYTRREPLGVCVGIGAWNYPFQIASWKSAPALACGNAMVFKPSPFTPVSALLLAEIYSEAGVPPGLFNVVQGGAATGQFLCQHPDVAKVSFTGSVPTGMKIMEMSAKGIKPVTLELGGKSPLIIFSDCDMNNAVKGALMANFLTQGQVCCNGTRVFVQKEILDKFTEEVVKQTQRIKIGDPLLEDTRMGPLINRPHLERVLGFVKVAKEQGAKVLCGGDIYVPEDPKLKDGYYMRPCVLTNCRDDMTCVKEEIFGPVMSILSFDTEAEVLERANDTTFGLAAGVFTRDIQRAHRVVAELQAGTCFINNYNVSPVELPFGGYKKSGFGRENGRVTIEYYSQLKTVCVEMGDVESAF

SEQ ID NO: 703 - protein, 418 aa, Homo sapiens
MARRKPEGSSFNMTHLSMAMAFSFPPVASGQLHPQLGNTQHQTELGKELATTSTMPYQYPALTPEQKKELSDIAHRIVAPGKGILAADESTGSIAKRLQSIGTENTEENRRFYRQLLLTADDRVNPCIGGVILFHETLYQKADDGRPFPQVIKSKGGVVGIKVDKGVVPLAGTNGETTTQGLDGLSERCAQYKKDGADFAKWRCVLKIGEHTPSALAIMENANVLARYASICQQNGIVPIVEPEILPDGDHDLKRCQYVTEKVLAAVYKALSDHHIYLEGTLLKPNMVTPGHACTQKFSHEEIAMATVTALRRTVPPAVTGITFLSGGQSEEEASINLNAINKCPLLKPWALTFSYGRALQASALKAWGGKKENLKAAQEEYVKRALANSLACQGKYTPSGQAGAAASESLFVSNHAY

SEQ ID NO: 704 - protein, 278 aa, Homo sapiens
MARRKPEGSSFNMTHLSMAMAFSFPPVASGQLHPQLGNTQHQTELGKELATTSTMPYQYPALTPEQKKELSDIAHRIVAPGKGILAADESTGSIAKRLQSIGTENTEENRRFYRQLLLTADDRVNPCIGGVILFHETLYQKADDGRPFPQVIKSKGGVVGIKVDKGVVPLAGTNGETTTQGLDGLSERCAQYKKDGADFAKWRCVLKIGEHTPSALAIMENANVLARYASICQQNGIVPIVEPEILPDGDHDLKRCQYVTEKVLAAVYKALSDHHIYL

SEQ ID NO: 705 - protein, 418 aa, Homo sapiens; identical to SEQ ID NO: 703

SEQ ID NO: 706 - protein, 155 aa, Homo sapiens
MPYQYPALTPEQKKELSDIAHRIVAPGKGILAADESTGSIAKRLQSIGTENTEENRRFYRQLLLTADDRVNPCIGGVILFHETLYQKADDGRPFPQVIKSKGGVVGIKVDKGVVPLAGTNGETTTQGLDGLSERCAQYKKDGADFAKWRCVLKIG

SEQ ID NO: 707 - protein, 364 aa, Homo sapiens
MPYQYPALTPEQKKELSDIAHRIVAPGKGILAADESTGSIAKRLQSIGTENTEENRRFYRQLLLTADDRVNPCIGGVILFHETLYQKADDGRPFPQVIKSKGGVVGIKVDKGVVPLAGTNGETTTQGLDGLSERCAQYKKDGADFAKWRCVLKIGEHTPSALAIMENANVLARYASICQQNGIVPIVEPEILPDGDHDLKRCQYVTEKVLAAVYKALSDHHIYLEGTLLKPNMVTPGHACTQKFSHEEIAMATVTALRRTVPPAVTGITFLSGGQSEEEASINLNAINKCPLLKPWALTFSYGRALQASALKAWGGKKENLKAAQEEYVKRALANSLACQGKYTPSGQAGAAASESLFVSNHAY

SEQ ID NO: 708 - protein, 364 aa, Homo sapiens; identical to SEQ ID NO: 707

SEQ ID NO: 709 - protein, 364 aa, Homo sapiens; identical to SEQ ID NO: 707

SEQ ID NO: 710 - protein, 364 aa, Homo sapiens; identical to SEQ ID NO: 707

SEQ ID NO: 711 - protein, 361 aa, Homo sapiens
MPYQYPALTPEQKKELSDIAHRIVAPGKGILAADESTGSIAKRLQSIGTENTEENRRFYRQLLLTADDRVNPCIGGVILFHETLYQKADDGRPFPQVIKSKGGVVGIKVDKGVVPLAGTNGETTTQGLDGLSERCAQYKKDGADFAKWRCVLKIGEHTPSALAIMENANVLARYASICQQNGIVPIVEPEILPDGDHDLKRCQYVTEKVLAAVYKALSDHHIYLEGTLLKPNMVTPGHACTQKFSHEEIAMATVTALRRTVPPAVTGITFLSGGQSEEEASINLNAINKCPLLKPWALTFSYGRALQASALKAWGGKKENLKAAQEEYVKRALVRIGRRWAGCLGGWDSEKSPSHSTPLPA

SEQ ID NO: 712 - protein, 364 aa, Homo sapiens; identical to SEQ ID NO: 707

SEQ ID NO: 713 - protein, 368 aa, Homo sapiens
MPYQYPALTPEQKKELSDIAHRIVAPGKGILAADESTGSIAKRLQSIGTENTEENRRFYRQLLLTADDRVNPCIGGVILFHETLYQKADDGRPFPQVIKSKGGVVGIKVDKGVVPLAGTNGETTTQGLDGLSERCAQYKKDGADFAKWRCVLKIGEHTPSALAIMENANVLARYASICQQVGLQNGIVPIVEPEILPDGDHDLKRCQYVTEKVLAAVYKALSDHHIYLEGTLLKPNMVTPGHACTQKFSHEEIAMATVTALRRTVPPAVTGITFLSGGQSEEEASINLNAINKCPLLKPWALTFSYGRALQASALKAWGGKKENLKAAQEEYVKRALANSLACQGKYTPSGQAGAAASESLFVSNHAY

SEQ ID NO: 714 - protein, 140 aa, Homo sapiens
MPYQYPALTPEQKKELSDIAHRIVAPGSIAKRLQSIGTENTEENRRFYRQLLLTADDRVNPCIGGVILFHETLYQKADDGRPFPQVIKSKGGVVGIKVDKGVVPLAGTNGETTTQGLDGLSERCAQYKKDGADFAKWRCV

SEQ ID NO: 715 - protein, 162 aa, Homo sapiens
MPYQYPALTPEQKKELSDIAHRIVAPGSIAKRLQSIGTENTEENRRFYRQLLLTADDRVNPCIGGVILFHETLYQKADDGRPFPQVIKSKGGVVGIKVDKGVVPLAGTNGETTTQGLDGLSERCAQYKKDGADFAKWRCVLKIGEHTPSALAIMENANVLAR

SEQ ID NO: 716 - protein, 204 aa, Homo sapiens
RRFYRQLLLTADDRVNPCIGGVILFHETLYQKADDGRPFPQVIKSKGGVVGIKVDKGVVPLAGTNGETTTQGLDGLSERCAQYKKDGADFAKWRCVLKIGEHTPSALAIMENANVLARYASICQQVLAAVYKALSDHHIYLEGTLLKPNMVTPGHACTQKFSHEEIAMATVTALRRTVPPAVTGITFLSGGQSEEEASINLNAI

SEQ ID NO: 717 - protein, 130 aa, Homo sapiens
  VARIANT 1: note = misc_feature - Xaa can be any naturally occurring amino acid
XPGHACTQKFSHEEIAMATVTALRRTVPPAVTGITFLSGGQSEEEASINLNAINKCPLLKPWALTFSYGRALQASALKAWGGKKENLKAAQEEYVKRALANSLACQGKYTPSGQAGAAASESLFVSNHAY

SEQ ID NO: 718 - protein, 464 aa, Homo sapiens
MAASCLVLLALCLLLPLLLLGGWKRWRRGRAARHVVAVVLGDVGRSPRMQYHALSLAMHGFSVTLLGFCNSKPHDELLQNNRIQIVGLTELQSLAVGPRVFQYGVKVVLQAMYLLWKLMWREPGAYIFLQNPPGLPSIAVCWFVGCLCGSKLVIDWHNYGYSIMGLVHGPNHPLVLLAKWYEKFFGRLSHLNLCVTNAMREDLADNWHIRAVTVYDKPASFFKETPLDLQHRLFMKLGSMHSPFRARSEPEDPVTERSAFTERDAGSGLVTRLRERPALLVSSTSWTEDEDFSILLAALEKFEQLTLDGHNLPSLVCVITGKGPLREYYSRLIHQKHFQHIQVCTPWLEAEDYPLLLGSADLGVCLHTSSSGLDLPMKVVDMFGCCLPVCAVNFKCLHELVKHEENGLVFEDSEELAAQLQMLFSNFPDPAGKLNQFRKNLRESQQLRWDESWVQTVLPLVMDT

SEQ ID NO: 719 - protein, 184 aa, Homo sapiens
MAASCLVLLALCLLLPLLLLGGWKRWRRGRAARHVVAVVLGDVGRSPRMQYHALSLAMHGFSVTLLGFCNSKPHDELLQNNRIQIVGLTELQSLAVGPRVFQYGVKVVLQAMYLLWKLMWREPGAYIFLQVCLALLSAGSWAAFVEASSSLTGTTMATPSWVWCMAPTIPSFCWPSGTRSSLGA

SEQ ID NO: 720 - protein, 84 aa, Homo sapiens
MAASCLVLLALCLLLPLLLLGGWKRWRRGRAARHVVAVVLGDVGRSPRMQYHALSLAMHGFSVTLLGFCSEWPRVWEGRCSLSR

SEQ ID NO: 721 - protein, 168 aa, Homo sapiens
MYLLWKLMWREPGAYIFLQNPPGLPSIAVCWFVGCLCGSKLVIDWHNYGYSIMGLVHGPNHPLVLLAKWYEKFFGRLSHLNLCVTNAMREDLADNWHIRAVTVYDKPASFFKETPLDLQHRLFMKLGSMHSPFRARSEPEDPVTERSAFTERDAGSGLVTRLRERPAL

SEQ ID NO: 722 - protein, 353 aa, Homo sapiens
MYLLWKLMWREPGAYIFLQNPPGLPSIAVCWFVGCLCGSKLVIDWHNYGYSIMGLVHGPNHPLVLLAKWYEKFFGRLSHLNLCVTNAMREDLADNWHIRAVTVYDKPASFFKETPLDLQHRLFMKLGSMHSPFRARSEPEDPVTERSAFTERDAGSGLVTRLRERPALLVSSTSWTEDEDFSILLAALEKFEQLTLDGHNLPSLVCVITGKGPLREYYSRLIHQKHFQHIQVCTPWLEAEDYPLLLGSADLGVCLHTSSSGLDLPMKVVDMFGCCLPVCAVNFKCLHELVKHEENGLVFEDSEELAAQLQMLFSNFPDPAGKLNQFRKNLRESQQLRWDESWVQTVLPLVMDT

SEQ ID NO: 723 - protein, 353 aa, Homo sapiens; identical to SEQ ID NO: 722

SEQ ID NO: 724 - protein, 324 aa, Homo sapiens
MAPLLLQLAVLGAALAAAALVLISIVAFTTATKMPALHRHEEEKFFLNAKGQKETLPSIWDSPTKQLSVVVPSYNEEKRLPVMMDEALSYLEKRQKRDPAFTYEVIVVDDGSKDQTSKVAFKYCQKYGSDKVRVITLVKNRGKGGAIRMGIFSSRGEKILMADADGATKFPDVEKLEKGLNDLQPWPNQMAIACGSRAHLEKESIAQRSYFRTLLMYGFHFLVWFLCVKGIRDTQCGFKLFTREAASRTFSSLHVERWAFDVELLYIAQFFKIPIAEIAVNWTEIEGSKLVPFWSWLQMGKDLLFIRLRYLTGAWRLEQTRKMN

SEQ ID NO: 725 - protein, 294 aa, Homo sapiens
MAPLLLQLAVLGAALAAAALVLISIVAFTTATKMPALHRHEEEKFFLNAKGQKETLPSIWDSPTKQLSVVVPSYNEEKRLPVMMDEALSYLEKRQKYGSDKVRVITLVKNRGKGGAIRMGIFSSRGEKILMADADGATKFPDVEKLEKGLNDLQPWPNQMAIACGSRAHLEKESIAQRSYFRTLLMYGFHFLVWFLCVKGIRDTQCGFKLFTREAASRTFSSLHVERWAFDVELLYIAQFFKIPIAEIAVNWTEIEGSKLVPFWSWLQMGKDLLFIRLRYLTGAWRLEQTRKMN

SEQ ID NO: 726 - protein, 102 aa, Homo sapiens
MASRGARQRLKGSGASSGDTAPAADKLRELLGSREAGGAEHRTEHTTSSMGKGFRLGNIPQHMPFAPMLTCCFMPGQLHFMQEFYKLIRFLCFTFCDVFWLL

SEQ ID NO: 727 - protein, 168 aa, Homo sapiens
MASRGARQRLKGSGASSGDTAPAADKLRELLGSREAGGAEHRTELSGNKAGQVWAPEGSTAFKCLLSARLCAALLSNISDCDETFNYWEPTHYLIYGEGFQTWEYSPAYAIRSYAYLLLHAWPAAFHARILQTNKGCVQEVWVARESNDASLLGSQHWHVLLIISIPS

SEQ ID NO: 728 - protein, 618 aa, Homo sapiens
MASRGARQRLKGSGASSGDTAPAADKLRELLGSREAGGAEHRTELSGNKAGQVWAPEGSTAFKCLLSARLCAALLSNISDCDETFNYWEPTHYLIYGEGFQTWEYSPAYAIRSYAYLLLHAWPAAFHARILQTNKILVFYFLRCLLAFVSCICELYFYKAVCKKFGLHVSRMMLAFLVLSTGMFCSSSAFLPSSFCMYTTLIAMTGWYMDKTSIAVLGVAAGAILGWPFSAALGLPIAFDLLVMKHRWKSFFHWSLMALILFLVPVVVIDSYYYGKLVIAPLNIVLYNVFTPHGPDLYGTEPWYFYLINGFLNFNVAFALALLVLPLTSLMEYLLQRFHVQNLGHPYWLTLAPMYIWFIIFFIQPHKEERFLFPVYPLICLCGAVALSALQHSFLYFQKCYHFVFQRYRLEHYTVTSNWLALGTVFLFGLLSFSRSVALFRGYHGPLDLYPEFYRIATDPTIHTVPEGRPVNVCVGKEWYRFPSSFLLPDNWQLQFIPSEFRGQLPKPFAEGPLATRIVPTDMNDQNLEEPSRYIDISKCHYLVDLDTMRETPREPKYSSNKEEWISLAYRPFLDASRSSKLLRAFYVPFLSDQYTVYVNYTILKPRKAKQIRKKSGG

SEQ ID NO: 729 - protein, 611 aa, Homo sapiens
MASRGARQRLKGSGASSGDTAPAADKLRELLGSREAGGAEHRTELSGNKAGQVWAPEGSTAFKCLLSARLCAALLSNISDCDETFNYWEPTHYLIYGEGFQTWEYSPAYAIRSYAYLLLHAWPAAFHARILQTNKILVFYFLRCLLAFVSCICELYFYKAVCKKFGLHVSRMMLAFLVLSTGMFCSSSAFLPSSFCMYTTLIAMTGWYMDKTSIAVLGVAAGAILGWPFSAALGLPIAFDLLVMKHRWKSFFHWSLMALILFLVPVVVIDSYYYGKLVIAPLNIVLYNVFTPHGPDLYGTEPWYFYLINGFLNFNVAFALALLVLPLTSLMEYLLQRFHVQNLGHPYWLTLAPMYIWFIIFFIQPHKEERFLFPVYPLICLCGAVALSALQKCYHFVFQRYRLEHYTVTSNWLALGTVFLFGLLSFSRSVALFRGYHGPLDLYPEFYRIATDPTIHTVPEGRPVNVCVGKEWYRFPSSFLLPDNWQLQFIPSEFRGQLPKPFAEGPLATRIVPTDMNDQNLEEPSRYIDISKCHYLVDLDTMRETPREPKYSSNKEEWISLAYRPFLDASRSSKLLRAFYVPFLSDQYTVYVNYTILKPRKAKQIRKKSGG

SEQ ID NO: 730 - protein, 198 aa, Homo sapiens
MASRGARQRLKGSGASSGDTAPAADKLRELLGSREAGGAEHRTELSGNKAGQVWAPEGSTAFKCLLSARLCAALLSNISDCDETFNYWEPTHYLIYGEGFQTWEYSPAYAIRSYAYLLLHAWPAAFHARILQTNKILVFYFLRCLLAFVSCICELYFYKAVCKKFGLHVSRMMLAFLVLSTGMFCSSSVYPLPLICWS

SEQ ID NO: 731 - protein, 134 aa, Homo sapiens
MASRGARQRLKGSGASSGDTAPAADKLRELLGSREAGGAEHRTELSGNKAGQVWAPEGSTAFKCLLSARLCAALLSNISDCDETFNYWEPVDTLPHLWGRVSDLGIFPSICHSLLCLPVASCLASCISCKNSTN

SEQ ID NO: 732 - protein, 447 aa, Homo sapiens
MMLAFLVLSTGMFCSSSAFLPSSFCMYTTLIAMTGWYMDKTSIAVLGVAAGAILGWPFSAALGLPIAFDLLVMKHRWKSFFHWSLMALILFLVPVVVIDSYYYGKLVIAPLNIVLYNVFTPHGPDLYGTEPWYFYLINGFLNFNVAFALALLVLPLTSLMEYLLQRFHVQNLGHPYWLTLAPMYIWFIIFFIQPHKEERFLFPVYPLICLCGAVALSALQHSFLYFQKCYHFVFQRYRLEHYTVTSNWLALGTVFLFGLLSFSRSVALFRGYHGPLDLYPEFYRIATDPTIHTVPEGRPVNVCVGKEWYRFPSSFLLPDNWQLQFIPSEFRGQLPKPFAEGPLATRIVPTDMNDQNLEEPSRYIDISKCHYLVDLDTMRETPREPKYSSNKEEWISLAYRPFLDASRSSKLLRAFYVPFLSDQYTVYVNYTILKPRKAKQIRKKSGG

SEQ ID NO: 733 - protein, 440 aa, Homo sapiens
MMLAFLVLSTGMFCSSSAFLPSSFCMYTTLIAMTGWYMDKTSIAVLGVAAGAILGWPFSAALGLPIAFDLLVMKHRWKSFFHWSLMALILFLVPVVVIDSYYYGKLVIAPLNIVLYNVFTPHGPDLYGTEPWYFYLINGFLNFNVAFALALLVLPLTSLMEYLLQRFHVQNLGHPYWLTLAPMYIWFIIFFIQPHKEERFLFPVYPLICLCGAVALSALQKCYHFVFQRYRLEHYTVTSNWLALGTVFLFGLLSFSRSVALFRGYHGPLDLYPEFYRIATDPTIHTVPEGRPVNVCVGKEWYRFPSSFLLPDNWQLQFIPSEFRGQLPKPFAEGPLATRIVPTDMNDQNLEEPSRYIDISKCHYLVDLDTMRETPREPKYSSNKEEWISLAYRPFLDASRSSKLLRAFYVPFLSDQYTVYVNYTILKPRKAKQIRKKSGG

SEQ ID NO: 734 - protein, 24 aa, Homo sapiens
  VARIANT 1: note = misc_feature - Xaa can be any naturally occurring amino acid
XEEWISLAYRPFLDASRVSLCCPG

SEQ ID NO: 735 - protein, 35 aa, Homo sapiens
  VARIANT 1: note = misc_feature - Xaa can be any naturally occurring amino acid
XKYSSNKEEWISLAYRPFLDASSFEGWKTKITMPV

SEQ ID NO: 736 - protein, 207 aa, Homo sapiens
  VARIANT 1: note = misc_feature - Xaa can be any naturally occurring amino acid
XTVFLFGLLSFSRSVALFRGYHGPLDLYPEFYRIATDPTIHTVPEGRPVNVCVGKEWYRFPSSFLLPDNWQLQFIPSEFRGQLPKPFAEGPLATRIVPTDMNDQNLEEPSRYIDISKCHYLVDLDTMRETPREPKYSSNKEEWISLAYRPFLDASRSSKLLRAFYVPFLSDQYTVYVNYTILKPRKAKQIRKKSGDRRRAEPTYRKN

SEQ ID NO: 737 - protein, 111 aa, Homo sapiens
MRPLKPGAPLPALFLLALALSPHGAHGRPRGRRGARVTDKEPKPLLFLPAAGAGRTPSGSRSAEIFPRDSNLKDKFIKHFTGPVTFSPECSKHFHRLYYNTRECSTPAYIS

SEQ ID NO: 738 - protein, 129 aa, Homo sapiens
MRPLKPGAPLPALFLLALALSPHGAHGRPRGRRGARVTDKEPKPLLFLPAAGAGRTPSGSRSAEIFPRDSNLKDKFIKHFTGPVTFSPECSKHFHRLYYNTRECSTPAYYKRCARLLTRLAVSPLCSQT

SEQ ID NO: 739 - protein, 59 aa, Homo sapiens
MKDKFLKHLTGPLYFSPKCSKHFHRLYHNTRDCTIPAYYKRCARLLTRLAVSPVCMEDK

SEQ ID NO: 740 - protein, 59 aa, Homo sapiens; identical to SEQ ID NO: 739

SEQ ID NO: 741 - protein, 60 aa, Homo sapiens
MKDKFLKHLTGPLYFSPKCSKHFHRLYHNTRDCTIPAYYKRCARLLTRLAVSPVCMEDKQ

SEQ ID NO: 742 - protein, 151 aa, Homo sapiens
MRGPGHPLLLGLLLVLGAAGRGRGGAEPREPADGQALLRLVVELVQELRKHHSAEHKGLQLLGRDCALGRAEAAGLGPSPEQRVEIVPRDLRMKDKFLKHLTGPLYFSPKCSKHFHRLYHNTRDCTIPAYYKRCARLLTRLAVSPVCMEDK

SEQ ID NO: 743 - protein, 152 aa, Homo sapiens
MRGPGHPLLLGLLLVLGAAGRGRGGAEPREPADGQALLRLVVELVQELRKHHSAEHKGLQLLGRDCALGRAEAAGLGPSPEQRVEIVPRDLRMKDKFLKHLTGPLYFSPKCSKHFHRLYHNTRDCTIPAYYKRCARLLTRLAVSPVCMEDKQ

SEQ ID NO: 744 - protein, 91 aa, Homo sapiens
MRGPGHPLLLGLLLVLGPSPEQRVEIVPRDLRMKDKFLKHLTGPLYFSPKCSKHFHRLYHNTRDCTIPAYYKRCARLLTRLAVSPVCMEDK

SEQ ID NO: 745 - protein, 102 aa, Homo sapiens
  VARIANT 1: note = misc_feature - Xaa can be any naturally occurring amino acid
XHHSAEHKGLQLLGRDCALGRAEAAGLGPSPEQRVEIVPRDLRMKDKFLKHLTGPLYFSPKCSKHFHRLYHNTRDCTIPAYYKRCARLLTRLAVSPVCMEDK

SEQ ID NO: 746 - protein, 112 aa, Homo sapiens
AAAVGSVATLATEPGEDAFRKLFRFYRQSRPGTADLEGVIDFSAAHAARGKGPGAQKVIKSQLNVSSVSEQNAYRAGLQPVSKWQAYGLKGYPGIKKRLNGDPEVYWRNCVG

SEQ ID NO: 747 - protein, 389 aa, Homo sapiens
MGKMAAAVGSVATLATEPGEDAFRKLFRFYRQSRPGTADLEGVIDFSAAHAARGKGPGAQKVIKSQLNVSSVSEQNAYRAGLQPVSKWQAYGLKGYPGFIFIPNPFLPGYQWHWVKQCLKLYSQKPNVCNLDKHMSKEETQDLWEQSKEFLRYKEATKRRPRSLLEKLRWVTVGYHYNWDSKKYSADHYTPFPSDLGFLSEQVAAACGFEDFRAEAGILNYYRLDSTLGIHVDRSELDHSKPLLSFSFGQSAIFLLGGLQRDEAPTAMFMHSGDIMIMSGFSRLLNHAVPRVLPNPEGEGLPHCLEAPLPAVLPRDSMVEPCSMEDWQVCASYLKTARVNMTVRQVLATDQNFPLEPIEDEKRDISTEGFCHLDDQNSEVKRARINPDS

SEQ ID NO: 748 - protein, 116 aa, Homo sapiens
MGKMAAAVGSVATLATEPGEDAFRKLFRFYRQSRPGTADLEGVIDFSAAHAARGKGPGAQKVIKSQLNVSSVSEQNAYRAGLQPVSKWQAYGLKGYPGIKKRLNGDPEVYWRNCVG

SEQ ID NO: 749 - protein, 394 aa, Homo sapiens
MAAASGYTDLREKLKSMTSRDNYKAGSREAAAAAAAAVAAAAAAAAAAEPYPVSGAKRKYQEDSDPERSDYEEQQLQKEEEARKVKSGIRQMRLFSQDECAKIEARIDEVVSRAEKGLYNEHTVDRAPLRNKYFFGEGYTYGAQLQKRGPGQERLYPPGDVDEIPEWVHQLVIQKLVEHRVIPEGFVNSAVINDYQPGGCIVSHVDPIHIFERPIVSVSFFSDSALCFGCKFQFKPIRVSEPVLSLPVRRGSVTVLSGYAADEITHCIRPQDIKERRAVIILRKTRLDAPRLETKSLSSSVLPPSYASDRLSGNNRDPALKPKRSHRKADPDAAHRPRILEMDKEENRRSVLLPTHRRRGSFSSENYWRKSYESSEDCSEAAGSPARKVKMRRH

SEQ ID NO: 750 - protein, 53 aa, Homo sapiens
MDKEENRRSVLLPTHRRRGSFSSENYWRKSYESSEDCSEAAGSPARKVKMRRH

SEQ ID NO: 751 - protein, 528 aa, Homo sapiens
MQGPWVLLLLGLRLQLSLGVIPAEEENPAFWNRQAAEALDAAKKLQPIQKVAKNLILFLGDGLGVPTVTATRILKGQKNGKLGPETPLAMDRFPYLALSKTYNVDRQVPDSAATATAYLCGVKANFQTIGLSAAARFNQCNTTRGNEVISVMNRAKQAGKSVGVVTTTRVQHASPAGTYAHTVNRNWYSDADMPASARQEGCQDIATQLISNMDIDVILGGGRKYMFPMGTPDPEYPADASQNGIRLDGKNLVQEWLAKHQGAWYVWNRTELMQASLDQSVTHLMGLFEPGDTKYEIHRDPTLDPSLMEMTEAALRLLSRNPRGFYLFVEGGRIDHGHHEGVAYQALTEAVMFDDAIERAGQLTSEEDTLTLVTADHSHVFSFGGYTLRGSSIFGLAPSKAQDSKAYTSILYGNGPGYVFNSGVRPDVNESESGSPDYQQQAAVPLSSETHGGEDVAVFARGPQAHLVHGVQEQSFVAHVMAFAACLEPYTACDLAPPACTTDAAHPVAASLPLLAGTLLLLGASAAP

SEQ ID NO: 752 - protein, 50 aa, Homo sapiens
MQGPWVLLLLGLRLQLSLGVIPGNEAPQAVPHTGHPLSQADLISTLPLAS

SEQ ID NO: 753 - protein, 469 aa, Homo sapiens
MFLGDGMGVSTVTAARILKGQLHHNPGEETRLEMDKFPFVALSKTYNTNAQVPDSAGTATAYLCGVKANEGTVGVSAATERSRCNTTQGNEVTSILRWAKDAGKSVGIVTTTRVNHATPSAAYAHSADRDWYSDNEMPPEALSQGCKDIAYQLMHNIRDIDVIMGGGRKYMYPKNKTDVEYESDEKARGTRLDGLDLVDTWKSFKPRYKHSHFIWNRTELLTLDPHNVDYLLGLFEPGDMQYELNRNNVTDPSLSEMVVVAIQILRKNPKGFFLLVEGGRIDHGHHEGKAKQALHEAVEMDRAIGQAGSLTSSEDTLTVVTADHSHVFTFGGYTPRGNSIFGLAPMLSDTDKKPFTAILYGNGPGYKVVGGERENVSMVDYAHNNYQAQSAVPLRHETHGGEDVAVFSKGPMAHLLHGVHEQNYVPHVMAYAACIGANLGHCAPASSAGSLAAGPLLLALALYPLSVLF

SEQ ID NO: 754 - protein, 524 aa, Homo sapiens
MISPFLVLAIGTCLTNSLVPEKEKDPKYWRDQAQETLKYALELQKLNTNVAKNVIMFLGDGMGVSTVTAARILKGQLHHNPGEETRLEMDKFPFVALSKTYNTNAQVPDSAGTATAYLCGVKANEGTVGVSAATERSRCNTTQGNEVTSILRWAKDAGKSVGIVTTTRVNHATPSAAYAHSADRDWYSDNEMPPEALSQGCKDIAYQLMHNIRDIDVIMGGGRKYMYPKNKTDVEYESDEKARGTRLDGLDLVDTWKSFKPRYKHSHFIWNRTELLTLDPHNVDYLLGLFEPGDMQYELNRNNVTDPSLSEMVVVAIQILRKNPKGFFLLVEGGRIDHGHHEGKAKQALHEAVEMDRAIGQAGSLTSSEDTLTVVTADHSHVFTFGGYTPRGNSIFGLAPMLSDTDKKPFTAILYGNGPGYKVVGGERENVSMVDYAHNNYQAQSAVPLRHETHGGEDVAVFSKGPMAHLLHGVHEQNYVPHVMAYAACIGANLGHCAPASSAGSLAAGPLLLALALYPLSVLF

SEQ ID NO: 755 - protein, 524 aa, Homo sapiens; identical to SEQ ID NO: 754

SEQ ID NO: 756 - protein, 447 aa, Homo sapiens
MPWSFRSSTPTWLRMSSCSWEMTYNTNAQVPDSAGTATAYLCGVKANEGTVGVSAATERSRCNTTQGNEVTSILRWAKDAGKSVGIVTTTRVNHATPSAAYAHSADRDWYSDNEMPPEALSQGCKDIAYQLMHNIRDIDVIMGGGRKYMYPKNKTDVEYESDEKARGTRLDGLDLVDTWKSFKPRYKHSHFIWNRTELLTLDPHNVDYLLGLFEPGDMQYELNRNNVTDPSLSEMVVVAIQILRKNPKGFFLLVEGGRIDHGHHEGKAKQALHEAVEMDRAIGQAGSLTSSEDTLTVVTADHSHVFTFGGYTPRGNSIFGLAPMLSDTDKKPFTAILYGNGPGYKVVGGERENVSMVDYAHNNYQAQSAVPLRHETHGGEDVAVFSKGPMAHLLHGVHEQNYVPHVMAYAACIGANLGHCAPASSAGSLAAGPLLLALALYPLSVLF

SEQ ID NO: 757 - protein, 216 aa, Homo sapiens
  VARIANT 1: note = misc_feature - Xaa can be any naturally occurring amino acid
XHSHFIWNRTELLTLDPHNVDYLLGGRIDHGHHEGKAKQALHEAVEMDRAIGQAGSLTSSEDTLTVVTADHSHVFTFGGYTPRGNSIFGLAPMLSDTDKKPFTAILYGNGPGYKVVGGERENVSMVDYAHNNYQAQSAVPLRHETHGGEDVAVFSKGPMAHLLHGVHEQNYVPHVMAYAACIGANLGHCAPASSAGSLAAGPLLLALALYPLSVLF

SEQ ID NO: 758 - protein, 535 aa, Homo sapiens
MLGPCMLLLLLLLGLRLQLSLGIIPVEEENPDFWNREAAEALGAAKKLQPAQTAAKNLIIFLGDGMGVSTVTAARILKGQKKDKLGPEIPLAMDRFPYVALSKTYNVDKHVPDSGATATAYLCGVKGNFQTIGLSAAARFNQCNTTRGNEVISVMNRAKKAGKSVGVVTTTRVQHASPAGTYAHTVNRNWYSDADVPASARQEGCQDIATQLISNMDIDVILGGGRKYMFRMGTPDPEYPDDYSQGGTRLDGKNLVQEWLAKRQGARYVWNRTELMQASLDPSVTHLMGLFEPGDMKYEIHRDSTLDPSLMEMTEAALRLLSRNPRGFFLFVEGGRIDHGHHESRAYRALTETIMFDDAIERAGQLTSEEDTLSLVTADHSHVFSFGGYPLRGSSIFGLAPGKARDRKAYTVLLYGNGPGYVLKDGARPDVTESESGSPEYRQQSAVPLDEETHAGEDVAVFARGPQAHLVHGVQEQTFIAHVMAFAACLEPYTACDLAPPAGTTDAAHPGRSVVPALLPLLAGTLLLLETATAP

SEQ ID NO: 759 - protein, 532 aa, Homo sapiens
MQGPWVLLLLGLRLQLSLGIIPVEEENPDFWNRQAAEALGAAKKLQPAQTAAKNLIIFLGDGMGVSTVTAARILKGQKKDKLGPETFLAMDRFPYVALSKTYSVDKHVPDSGATATAYLCGVKGNFQTIGLSAAARFNQCNTTRGNEVISVMNRAKKAGKSVGVVTTTRVQHASPAGAYAHTVNRNWYSDADVPASARQEGCQDIATQLISNMDIDVILGGGRKYMFPMGTPDPEYPDDYSQGGTRLDGKNLVQEWLAKHQGARYVWNRTELLQASLDPSVTHLMGLFEPGDMKYEIHRDSTLDPSLMEMTEAALLLLSRNPRGFFLFVEGGRIDHGHHESRAYRALTETIMFDDAIERAGQLTSEEDTLSLVTADHSHVFSFGGYPLRGSSIFGLAPGKARDRKAYTVLLYGNGPGYVLKDGARPDVTESESGSPEYRQQSAVPLDGETHAGEDVAVFARGPQAHLVHGVQEQTFIAHVMAFAACLEPYTACDLAPRAGTTDAAHPGPSVVPALLPLLAGTLLLLGTATAP

SEQ ID NO: 760 - protein, 432 aa, Homo sapiens
MSASKIPLFKMKDLILILCLLEMSFAVPFFPQQSGTPGMASLSLETMRQLGSLQRLNTLSQYSRYGFGKSFNSLWMHGLLPPHSSLPWMRPREHETQQPSLKPQQPGLKPFLQSAAATTNQATALKEALQPPIHLGHLPLQEGELPLVQQQVAPSDKPPKPELPGVDFADPQGPSLPGMDFPDPQGPSLPGLDFADPQGSTIFQIARLISHGPMPQNKQSPLYPGMLYVPFGANQLNAPARLGIMSSEEVAGGREDPMAYGAMFPGFGGMRPGFEGMPHNPAMGGDFTLEFDSPVAATKGPENEEGGAQGSPMPEANPDNLENPAFLTELEPAPHAGLLALPKDDIPGLPRSPSGKMKGLPSVTPAAADPLMTPELADVYRTYDADMTTSVDFQEEATMDTTMAPNSLQTSMPGNKAQEPEMMHDAWHFQEP

SEQ ID NO: 761 - protein, 447 aa, Homo sapiens
MSASKIPLFKMKDLILILCLLEMSFAVPFFPQQSGTPGMASLSLETMRQLGSLQRLNTLSQYSRYGFGKSFNSLWMHGLLPPHSSLPWMRPREHETQQYEYSLPVHPPPLPSQPSLKPQQPGLKPFLQSAAATTNQATALKEALQPPIHLGHLPLQEGELPLVQQQVAPSDKPPKPELPGVDFADPQGPSLPGMDFPDPQGPSLPGLDFADPQGSTIFQIARLISHGPMPQNKQSPLYPGMLYVPFGANQLNAPARLGIMSSEEVAGGREDPMAYGAMFPGFGGMRPGFEGMPHNPAMGGDFTLEFDSPVAATKGPENEEGGAQGSPMPEANPDNLENPAFLTELEPAPHAGLLALPKDDIPGLPRSPSGKMKGLPSVTPAAADPLMTPELADVYRTYDADMTTSVDFQEEATMDTTMAPNSLQTSMPGNKAQEPEMMHDAWHFQEP

SEQ ID NO: 762 - protein, 446 aa, Homo sapiens [sequence omitted]

SEQ ID NO: 763 - protein, 193 aa, Homo sapiens
HKSKWNITMESYVVHTNYDEYAIFLTKKFSRHHGPTITAKLYGRAPQLRETLLQDFRVVAQGVGIPEDSIFTMADRGECVPGEQEPEPILIPRVRRAVLPQEEEGSGGGQLVTEVTKKEDSCQLGYSAGPCMGMTSRYFYNGTSMACETFQYGGCMGNGNNFVTVRGPCRAFIQLWAFDAVKGKCVLFPYGGC

SEQ ID NO: 764 - protein, 352 aa, Homo sapiens
MRSLGALLLLLSACLAVSAGPVPTPPDNIQVQENFNISRIYGKWYNLAIGSTCPWLKKIMDRMTVSTLVLGEGATEAEISMTSTRWRKGVCEETSGAYEKTDTDGKFLYHKSKWNITMESYVVHTNYDEYAIFLTKKFSRHHGPTITAKLYGRAPQLRETLLQDFRVVAQGVGIPEDSIFTMADRGECVPGEQEPEPILIPRVRRAVLPQEEEGSGGGQLVTEVTKKEDSCQLGYSAGPCMGMTSRYFYNGTSMACETFQYGGCMGNGNNFVTEKECLQTCRTVAACNLPIVRGPCRAFIQLWAFDAVKGKCVLFPYGGCQGNGNKFYSEKECREYCGVPGDGDEELLRFSN

SEQ ID NO: 765 - protein, 238 aa, Homo sapiens
MRSLGALLLLLSACLAVSAGPVPTPPDNIQVQENFNISRIYGKWYNLAIGSTCPWLKKIMDRMTVSTLVLGEGATEAEISMTSTRWRKGVCEETSGAYEKTDTDGKFLYHKSKWNITMESYVVHTNYDEYAIFLTKKFSRHHGPTITAKLYGRAPQLRETLLQDFRVVAQGVGIPEDSIFTMADRVNGLEQATQAGPFMKWTKARQVPSTMLTKDTNPGLGWPLGLVLLFTPLSCSVT

SEQ ID NO: 766 - protein, 205 aa, Homo sapiens
MGTWILFACLLGAAFAMPLPPHPGHPGYINFSYENSHSQAINVDRTALVLTPLKWYQSIRPPYPSYGYEPMGGWLHHQIIPVLSQQHPPTHTLQPHHHIPVVPAQQPVIPQQPMMPVPGQHSMTPIQHHQPNLPPPAQQPYQPQPVQPQPHQPMQPQPPVHPMQPLPPQPPLPPMFPMQPLPPMLPDLTLEAWPSTDKTKREEVD

SEQ ID NO: 767 - protein, 191 aa, Homo sapiens
MGTWILFACLLGAAFAMPLPPHPGHPGYINFSYEVLTPLKWYQSIRPPYPSYGYEPMGGWLHHQIIPVLSQQHPPTHTLQPHHHIPVVPAQQPVIPQQPMMPVPGQHSMTPIQHHQPNLPPPAQQPYQPQPVQPQPHQPMQPQPPVHPMQPLPPQPPLPPMFPMQPLPPMLPDLTLEAWPSTDKTKREEVD

SEQ ID NO: 768 - protein, 175 aa, Homo sapiens
MGTWILFACLLGAAFAMPVLTPLKWYQSIRPPYPSYGYEPMGGWLHHQIIPVLSQQHPPTHTLQPHHHIPVVPAQQPVIPQQPMMPVPGQHSMTPIQHHQPNLPPPAQQPYQPQPVQPQPHQPMQPQPPVHPMQPLPPQPPLPPMFPMQPLPPMLPDLTLEAWPSTDKTKREEVD

SEQ ID NO: 769 - protein, 206 aa, Homo sapiens
MGTWILFACLVGAAFAMPLPPHPGHPGYINFSYENSHSQAINVDRIALVLTPLKWYQSMIRPPYSSYGYEPMGGWLHHQIIPVVSQQHPLTHTLQSHHHIPVVPAQQPRVRQQALMPVPGQQSMTPTQHHQPNLPLPAQQPFQPQPVQPQPHQPMQPQPPVQPMQPLLPQPPLPPMFPLRPLPPILPDLHLEAWPATDKTKQEEVD

SEQ ID NO: 770 - protein, 192 aa, Homo sapiens
MGTWILFACLVGAAFAMPLPPHPGHPGYINFSYEVLTPLKWYQSMIRPPYSSYGYEPMGGWLHHQIIPVVSQQHPLTHTLQSHHHIPVVPAQQPRVRQQALMPVPGQQSMTPTQHHQPNLPLPAQQPFQPQPVQPQPHQPMQPQPPVQPMQPLLPQPPLPPMFPLRPLPPILPDLHLEAWPATDKTKQEEVD

SEQ ID NO: 771 - protein, 560 aa, Homo sapiens
MRDLPLTSLALVLSALGALLGTEALRAEEPAVGTSGLIFREDLDWPPGSPQEPLCLVALGGDSNGSSSPLRVVGALSAYEQAFLGAVQRARWGPRDLATFGVCNTGDRQAALPSLRRLGAWLRDPGGQRLVVLHLEEVTWEPTPSLRFQEPPPGGAGPPELALLVLYPGPGPEVTVTRAGLPGAQSLCPSRDTRYLVLAVDRPAGAWRGSGLALTLQPRGEDSRLSTARLQALLFGDDHRCFTRMTPALLLLPRSEPAPLPAHGQLDTVPFPPPRPSAELEESPPSADPFLETLTRLVRALRVPPARASAPRLALDPDALAGFPQGLVNLSDPAALERLLDGEEPLLLLLRPTAATTGDPAPLHDPTSAPWATALARRVAAELQAAAAELRSLPGLPPATAPLLARLLALCPGGPGGLGDPLRALLLLKALQGLRVEWRGRDPRGPGRAQRSAGATAADGPCALRELSVDLRAERSVLIPETYQANNCQGVCGWPQSDRNPRYGNHVVLLLKMQVRGAALARPPCCVPTAYAGKLLISLSEERISAHHVPNMVATECGCR

SEQ ID NO: 772 - protein, 780 aa, Homo sapiens
MNVRIFYSVSQSPHSLLSLLFYCAILESRISATMPLFKLPAEEKQIDDAMRNFAEKVFASEVKDEGGRQEISPFDVDEICPISHHEMQAHIFHLETLSTSTEARRKKRFQGRKTVNLSIPLSETSSTKLSHIDEYISSSPTYQTVPDFQRVQITGDYASGVTVEDFEIVCKGLYRALCIREKYMQKSFQRFPKTPSKYLRNIDGEAWVANESFYPVFTPPVKKGEDPFRTDNLPENLGYHLKMKDGVVYVYPNEAAVSKDEPKPLPYPNLDTFLDDMNFLLALIAQGPVKTYTHRRLKFLSSKFQVHQMLNEMDELKELKNNPHRDFYNCRKVDTHIHAAACMNQKHLLRFIKKSYQIDADRVVYSTKEKNLTLKELFAKLKMHPYDLTVDSLDVHAGRQTFQRFDKFNDKYNPVGASELRDLYLKTDNYINGEYFATIIKEVGADLVEAKYQHAEPRLSIYGRSPDEWSKLSSWFVCNRIHCPNMTWMIQVPRIYDVFRSKNFLPHFGKMLENIFMPVFEATINPQADPELSVFLKHITGFDSVDDESKHSGHMFSSKSPKPQEWTLEKNPSYTYYAYYMYANIMVLNSLRKERGMNTFLFRPHCGEAGALTHLMTAFMIADDISHGLNLKKSPVLQYLFFLAQIPIAMSPLSNNSLFLEYAKNPFLDFLQKGLMISLSTDDPMQFHFTKEPLMEEYAIAAQVFKLSTCDMCEVARNSVLQCGISHEEKVKFLGDNYLEEGPAGNDIRRTNVAQIRMAYRYETWCYELNLIAEGLKSTE

SEQ ID NO: 773 - protein, 776 aa, Homo sapiens
MNVRIFYSVSQSPHSLLSLLFYCAILESRISATMPLFKLPEIDDAMRNFAEKVFASEVKDEGGRQEISPFDVDEICPISHHEMQAHIFHLETLSTSTEARRKKRFQGRKTVNLSIPLSETSSTKLSHIDEYISSSPTYQTVPDFQRVQITGDYASGVTVEDFEIVCKGLYRALCIREKYMQKSFQRFPKTPSKYLRNIDGEAWVANESFYPVFTPPVKKGEDPFRTDNLPENLGYHLKMKDGVVYVYPNEAAVSKDEPKPLPYPNLDTFLDDMNFLLALIAQGPVKTYTHRRLKFLSSKFQVHQMLNEMDELKELKNNPHRDFYNCRKVDTHIHAAACMNQKHLLRFIKKSYQIDADRVVYSTKEKNLTLKELFAKLKMHPYDLTVDSLDVHAGRQTFQRFDKFNDKYNPVGASELRDLYLKTDNYINGEYFATIIKEVGADLVEAKYQHAEPRLSIYGRSPDEWSKLSSWFVCNRIHCPNMTWMIQVPRIYDVFRSKNFLPHFGKMLENIFMPVFEATINPQADPELSVFLKHITGFDSVDDESKHSGHMFSSKSPKPQEWTLEKNPSYTYYAYYMYANIMVLNSLRKERGMNTFLFRPHCGEAGALTHLMTAFMIADDISHGLNLKKSPVLQYLFFLAQIPIAMSPLSNNSLFLEYAKNPFLDFLQKGLMISLSTDDPMQFHFTKEPLMEEYAIAAQVFKLSTCDMCEVARNSVLQCGISHEEKVKFLGDNYLEEGPAGNDIRRTNVAQIRMAYRYETWCYELNLIAEGLKSTE

SEQ ID NO: 774 - protein, 191 aa, Homo sapiens
QCLCSNSQVGVQKIDDAMRNFAEKVFASEVKDEGGRQEISPFDVDEICPISHHEMQAHIFHLETLSTSTEARRKKRFQGRKTVNLSIPLSETSSTKLSHIDEYISSSPTYQTVPDFQRVQITGDYASGVTVEDFEIVCKGLYRALCIREKYMQKSFQRFPKTPSKYLRNIDGEAWVANESFYPVRPIPTGA

SEQ ID NO: 775 - protein, 208 aa, Homo sapiens
MRSTILLFCLLGSTRSLPLKPALGLPPTKLAPDQGTLPNQQQSNQVFPSLSLIPLTQMLTLGPDLHLLNPAAGMTPGTQTHPLTLGGLNVQQQLHPHVLPIFVTQLGAQGTILSSEELPQIFTSLIIHSLFPGGILPTSQAGANPDVQDGSLPAGGAGVNPATQGTPAGRLPTPSGTDDDFAVTTPAGIQRSTHAIEEATTESANGIQ

SEQ ID NO: 776 - protein, 209 aa, Homo sapiens
MRSTILLFCLLGSTRSLPQLKPALGLPPTKLAPDQGTLPNQQQSNQVFPSLSLIPLTQMLTLGPDLHLLNPAAGMTPGTQTHPLTLGGLNVQQQLHPHVLPIFVTQLGAQGTILSSEELPQIFTSLIIHSLFPGGILPTSQAGANPDVQDGSLPAGGAGVNPATQGTPAGRLPTPSGTDDDFAVTTPAGIQRSTHAIEEATTESANGIQ

SEQ ID NO: 777 - protein, 105 aa, Homo sapiens
MKLFWLLFTIGFCWAQYSSNTQQGRTSIVHLFEWRWVDIALECERYLAPKGFGGVQVSPPNENVAIHNPFRPWWERYQPVSYKLCTRSGNEDEFRNMVTRCNNVG

SEQ ID NO: 778 - protein, 226 aa, Homo sapiens
MKLFWLLFTIGFCWAQYSSNTQQGRTSIVHLFEWRWVDIALECERYLAPKGFGGVQVSPPNENVAIHNPFRPWWERYQPVSYKLCTRSGNEDEFRNMVTRCNNVGVRIYVDAVINHMCGNAVSAGTSSTCGSYFNPGSRDFPAVPYSGWDFNDGKCKTGSGDIENYNDATQVRDCRLSGLLDLALGKDYVRSKIAEYMNHLIDIGVAGFRIDASKHMWPGDIKAIL

SEQ ID NO: 779 - protein, 511 aa, Homo sapiens
MKLFWLLFTIGFCWAQYSSNTQQGRTSIVHLFEWRWVDIALECERYLAPKGFGGVQVSPPNENVAIHNPFRPWWERYQPVSYKLCTRSGNEDEFRNMVTRCNNVGVRIYVDAVINHMCGNAVSAGTSSTCGSYFNPGSRDFPAVPYSGWDFNDGKCKTGSGDIENYNDATQVRDCRLSGLLDLALGKDYVRSKIAEYMNHLIDIGVAGFRIDASKHMWPGDIKAILDKLHNLNSNWFPEGSKPFIYQEVIDLGGEPIKSSDYFGNGRVTEFKYGAKLGTVIRKWNGEKMSYLKNWGEGWGFMPSDRALVFVDNHDNQRGHGAGGASILTFWDARLYKMAVGFMLAHPYGFTRVMSSYRWPRYFENGKDVNDWVGPPNDNGVTKEVTINPDTTCGNDWVCEHRWRQIRNMVNFRNVVDGQPFTNWYDNGSNQVAFGRGNRGFIVFNNDDWTFSLTLQTGLPAGTYCDVISGDKINGNCTGIKIYVSDDGKAHFSISNSAEDPFIAIHAESKL

SEQ ID NO: 780 - protein, 105 aa, Homo sapiens; identical to SEQ ID NO: 777

SEQ ID NO: 781 - protein, 226 aa, Homo sapiens; identical to SEQ ID NO: 778

SEQ ID NO: 782 - protein, 511 aa, Homo sapiens; identical to SEQ ID NO: 779

SEQ ID NO: 783 - protein, 511 aa, Homo sapiens; identical to SEQ ID NO: 779

SEQ ID NO: 784 - protein, 511 aa, Homo sapiens; identical to SEQ ID NO: 779

SEQ ID NO: 785 - protein, 511 aa, Homo sapiens
MKFFLLLFTIGFCWAQYSPNTQQGRTSIVHLFEWRWVDIALECERYLAPKGFGGVQVSPPNENVAIYNPFRPWWERYQPVSYKLCTRSGNEDEFRNMVTRCNNVGVRIYVDAVINHMCGNAVSAGTSSTCGSYFNPGSRDFPAVPYSGWDFNDGKCKTGSGDIENYNDATQVRDCRLTGLLDLALEKDYVRSKIAEYMNHLIDIGVAGFRLDASKHMWPGDIKAILDKLHNLNSNWFPAGSKPFIYQEVIDLGGEPIKSSDYFGNGRVTEFKYGAKLGTVIRKWNGEKMSYLKNWGEGWGFVPSDRALVFVDNHDNQRGHGAGGASILTFWDARLYKMAVGFMLAHPYGFTRVMSSYRWPRQFQNGNDVNDWVGPPNNNGVIKEVTINPDTTCGNDWVCEHRWRQIRNMVIFRNVVDGQPFTNWYDNGSNQVAFGRGNRGFIVFNNDDWSFSLTLQTGLPAGTYCDVISGDKINGNCTGIKIYVSDDGKAHFSISNSAEDPFIAIHAESKL

SEQ ID NO: 786 - protein, 511 aa, Homo sapiens; identical to SEQ ID NO: 785

SEQ ID NO: 787 - protein, 209 aa, Homo sapiens
  VARIANT 1: note = misc_feature - Xaa can be any naturally occurring amino acid
XFFLLLFTIGFCWAQYSPNTQQGRTSIVHLFEWRWVDIALECERYLAPKGFGGVQVSPPNENVAIYNPFRPWWERYQPVSYKLCTRSGNEDEFRNMVTRCNNVGVRIYVDAVINHMCGNAVSAGTSSTCGSYFNPGSRDFPAVPYSGWDFNDGKCKTGSGDIENYNDATQVIDLGGEPIKSSDYFGNGRVTEFKYGAKLGTVIRKWNGE

SEQ ID NO: 788 - protein, 86 aa, Homo sapiens
MKFFLLLFTIGFCWAQYSPNTQQGRTSIVHLFEWRWVDIALECERYLAPKGFGGVQVSPPNENVAIHNPFRPWWERYQPVSYKLCT

SEQ ID NO: 789 - protein, 96 aa, Homo sapiens
MKFFLLLFTIGFCWAQYSPNTQQGRTSIVHLFEWRWVDIALECERYLAPKGFGGVQVSPPNENVAIHNPFRPWWERYQPVSYKLCTRSGNEDEFRN

SEQ ID NO: 790 - protein, 511 aa, Homo sapiens
MKFFLLLFTIGFCWAQYSPNTQQGRTSIVHLFEWRWVDIALECERYLAPKGFGGVQVSPPNENVAIHNPFRPWWERYQPVSYKLCTRSGNEDEFRNMVTRCNNVGVRIYVDAVINHMSGNAVSAGTSSTCGSYFNPGSRDFPAVPYSGWDFNDGKCKTGSGDIENYNDATQVRDCRLVGLLDLALEKDYVRSKIAEYMNHLIDIGVAGFRLDASKHMWPGDIKAILDKLHNLNSNWFPAGSKPFIYQEVIDLGGEPIKSSDYFGNGRVTEFKYGAKLGTVIRKWNGEKMSYLKNWGEGWGFMPSDRALVFVDNHDNQRGHGAGGASILTFWDARLYKMAVGFMLAHPYGFTRVMSSYRWPRQFQNGNDVNDWVGPPNNNGVIKEVTINPDTTCGNDWVCEHRWRQIRNMVNFRNVVDGQPFTNWYDNGSNQVAFGRGNRGFIVFNNDDWTFSLTLQTGLPAGTYCDVISGDKINGNCTGIKIYVSDDGKAHFSISNSAEDPFIAIHAESKL

SEQ ID NO: 791 - protein, 370 aa, Homo sapiens
MKFFLLLFTIGFCWAQYSPNTQQGRTSIVHLFEWRWVDIALECERYLAPKGFGGVQVSPPNENVAIHNPFRPWWERYQPVSYKLCTRSGNEDEFRNMVTRCNNVGVRIYVDAVINHMSGNAVSAGTSSTCGSYFNPGSRDFPAVPYSGWDFNDGKCKTGSGDIENYNDATQVRDCRLVGLLDLALEKDYVRSKIAEYMNHLIDIGVAGFRLDASKHMWPGDIKAILDKLHNLNSNWFPAGSKPFIYQEVIDLGGEPIKSSDYFGNGRVTEFKYGAKLGTVIRKWNGEKMSYLKNWGEGWGFMPSDRALVFVDNHDNQRGHGAGGASILTFWDARLYKMAVGFMLAHPYGFTRVMSSYRWPRQFQNGNEHG

SEQ ID NO: 792 - protein, 511 aa, Homo sapiens; identical to SEQ ID NO: 790

SEQ ID NO: 793 - protein, 147 aa, Homo sapiens
MVMGLGVLLLVFVLGLGLTPPTLAQDNSRYTHFLTQHYDAKPQGRDDRYCESIMRRRGLTSPCKDINTFIHGNKRSIKAICENKNGNPHRENLRISKSSFQVTTCKLHGGSPWPPCQYRATAGFRNVVVACENGLPVHLDQSIFRRP

SEQ ID NO: 794 - protein, 147 aa, Homo sapiens; identical to SEQ ID NO: 793

SEQ ID NO: 795 - protein, 129 aa, Homo sapiens
MAPRGPEQEECEGLLQQWREEGLSQVLSTASEGPLIDKGLAQSSLALLMDNPGEENAASEDRWSSRQLSDLRAAENLDEPFPEMLGEEPLLEVEGVEGSMWAAIPMQSEPQYADCAALPVGALATEQWE

SEQ ID NO: 796 - protein, 67 aa, Homo sapiens
MEGVTDTKPERPAGWAESVLEEDASELEPAFSRTVGTIQHCLHLTSVYTHFLPQRGRPEVTTMPLGL

SEQ ID NO: 797 - protein, 670 aa, Homo sapiens
MIASCLCYLLLPATRLFRALSDAFFTCRKNVLLANSSSPQVEGDFAMAPRGPEQEECEGLLQQWREEGLSQVLSTASEGPLIDKGLAQSSLALLMDNPGEENAASEDRWSSRQLSDLRAAENLDEPFPEMLGEEPLLEVEGVEGSMWAAIPMQSEPQYADCAALPVGALATEQWEEDPAVLAWSIAPEPVPQEEASIWPFEGLGQLQPPAVEIPYHEILWREWEDFSTQPDAQGLKAGDGPQFQFTLMSYNILAQDLMQQSSELYLHCHPDILNWNYRFVNLMQEFQHWDPDILCLQEVQEDHYWEQLEPSLRMMGFTCFYKRRTGCKTDGCAVCYKPTRFRLLCASPVEYFRPGLELLNRDNVGLVLLLQPLVPEGLGQVSVAPLCVANTHILYNPRRGDVKLAQMAILLAEVDKVARLSDGSHCPIILCGDLNSVPDSPLYNFIRDGELQYHGMPAWKVSGQEDFSHQLYQRKLQAPLWPSSLGITDCCQYVTSCHPKRSERRKYGRDFLLRFRFCSIACQRPVGLVLMEGVTDTKPERPAGWAESVLEEDASELEPAFSRTVGTIQHCLHLTSVYTHFLPQRGRPEVTTMPLGLGMTVDYIFFSAESCENGNRTDHRLYRDGTLKLLGRLSLLSEEILWAANGLPNPFCSSDHLCLLASFGMEVTAP

SEQ ID NO: 798 - protein, 235 aa, Homo sapiens
MSQNMGCYFLFLSWFPYSHPSFSTQVSGQEDFSHQLYQRKLQAPLWPSSLGITDCCQYVTSCHPKRSERRKYGRDFLLRFRFCSIACQRPVGLVLMEGVTDTKPERPAGWAESVLEEDASELEPAFSRTVGTIQHCLHLTSVYTHFLPQRGRPEVTTMPLGLGMTVDYIFFSAESCENGNRTDHRLYRDGTLKLLGRLSLLSEEILWAANGLPNPFCSSDHLCLLASFGMEVTAP

SEQ ID NO: 799 - protein, 298 aa, Homo sapiens
MEGKHKEELDTLKEEKENLQGLVTRQTYIIQELEKQLNRATTNNSVLQKQQLELMDTVHNLVNLCTKEGVLLKGGKREEEKPFRDCADVYQAGFNKSGIYTIYINNMPEPKKVFCNMDVNGGGWTVIQHREDGSLDFQRGWKEYKMGFGNPSGEYWLGNEFIFAITSQRQYMLRIELMDWEGNRAYSQYDRFHIGNEKQNYRLYLKGHTGTAGKQSSLILHGADFSTKDADNDNCMCKCALMLTGGWWFDACGPSNLNGMFYTAGQNHGKLNGIKWHYFKGPSYSLRSTTMMIRPLDF

SEQ ID NO: 800 - protein, 297 aa, Homo sapiens
MEGKHKEELDTLKEEKENLQGLVTRQTYIIQELEKQLNRATTNNSVLQKQQLELMDTVHNLVNLCTKEVLLKGGKREEEKPFRDCADVYQAGFNKSGIYTIYINNMPEPKKVFCNMDVNGGGWTVIQHREDGSLDFQRGWKEYKMGFGNPSGEYWLGNEFIFAITSQRQYMLRIELMDWEGNRAYSQYDRFHIGNEKQNYRLYLKGHTGTAGKQSSLILHGADFSTKDADNDNCMCKCALMLTGGWWFDACGPSNLNGMFYTAGQNHGKLNGIKWHYFKGPSYSLRSTTMMIRPLDF

SEQ ID NO: 801 - protein, 30 aa, Homo sapiens
MKSEMAQIQQNAVQNHTATMLEIGTSLLSQ

SEQ ID NO: 802 - protein, 497 aa, Homo sapiens
MTVFLSFAFLAAILTHIGCSNQRRSPENSGRRYNRIQHGQCAYTFILPEHDGNCRESTTDQYNTNALQRDAPHVEPDFSSQKLQHLEHVMENYTQWLQKLENYIVENMKSEMAQIQQNAVQNHTATMLEIGTSLLSQTAEQTRKLTDVETQVLNQTSRLEIQLLENSLSTYKLEKQLLQQTNEILKIHEKNSLLEHKILEMEGKHKEELDTLKEEKENLQGLVTRQTYIIQELEKQLNRATTNNSVLQKQQLELMDTVHNLVNLCTKEVLLKGGKREEEKPFRDCADVYQAGFNKSGIYTIYINNMPEPKKVFCNMDVNGGGWTVIQHREDGSLDFQRGWKEYKMGFGNPSGEYWLGNEFIFAITSQRQYMLRIELMDWEGNRAYSQYDRFHIGNEKQNYRLYLKGHTGTAGKQSSLILHGADFSTKDADNDNCMCKCALMLTGGWWFDACGPSNLNGMFYTAGQNHGKLNGIKWHYFKGPSYSLRSTTMMIRPLDF

SEQ ID NO: 803 - protein, 498 aa, Homo sapiens
MTVFLSFAFLAAILTHIGCSNQRRSPENSGRRYNRIQHGQCAYTFILPEHDGNCRESTTDQYNTNALQRDAPHVEPDFSSQKLQHLEHVMENYTQWLQKLENYIVENMKSEMAQIQQNAVQNHTATMLEIGTSLLSQTAEQTRKLTDVETQVLNQTSRLEIQLLENSLSTYKLEKQLLQQTNEILKIHEKNSLLEHKILEMEGKHKEELDTLKEEKENLQGLVTRQTYIIQELEKQLNRATTNNSVLQKQQLELMDTVHNLVNLCTKEGVLLKGGKREEEKPFRDCADVYQAGFNKSGIYTIYINNMPEPKKVFCNMDVNGGGWTVIQHREDGSLDFQRGWKEYKMGFGNPSGEYWLGNEFIFAITSQRQYMLRIELMDWEGNRAYSQYDRFHIGNEKQNYRLYLKGHTGTAGKQSSLILHGADFSTKDADNDNCMCKCALMLTGGWWFDACGPSNLNGMFYTAGQNHGKLNGIKWHYFKGPSYSLRSTTMMIRPLDF

SEQ ID NO: 804 - protein, 496 aa, Homo sapiens
MWQIVFFTLSCDLVLAAAYNNFRKSMDSIGKKQYQVQHGSCSYTFLLPEMDNCRSSSSPYVSNAVQRDAPLEYDDSVQRLQVLENIMENNTQWLMKLENYIQDNMKKEMVEIQQNAVQNQTAVMIEIGTNLLNQTAEQTRKLTDVEAQVLNQTTRLELQLLEHSLSTNKLEKQILDQTSEINKLQDKNSFLEKKVLAMEDKHIIQLQSIKEEKDQLQVLVSKQNSIIEELEKKIVTATVNNSVLQKQQHDLMETVNNLLTMMSTSNSAKDPTVAKEEQISFRDCAEVFKSGHTTNGIYTLTFPNSTEEIKAYCDMEAGGGGWTIIQRREDGSVDFQRTWKEYKVGFGNPSGEYWLGNEFVSQLTNQQRYVLKIHLKDWEGNEAYSLYEHFYLSSEELNYRIHLKGLTGTAGKISSISQPGNDFSTKDGDNDKCICKCSQMLTGGWWFDACGPSNLNGMYYPQRQNTNKFNGIKWYYWKGSGYSLKATTMMIRPADF

SEQ ID NO: 805 - protein, 459 aa, Homo sapiens
MWQIVFFTLSCDLVLAAAYNNFRKSMDSIGKKQYQVQHGSCSYTFLLPEMDNCRSSSSPYVSNAVQRDAPLEYDDSVQRLQVLENIMENNTQWLMKLENYIQDNMKKEMVEIQQNAVQNQTAVMIEIGTNLLNQTAEQTRKLTDVEAQVLNQTTRLELQLLEHSLSTNKLEKQILDQTSEINKLQDKNSFLEKKVLAMEDKHIIQLQSIKEEKDQLQVLVSKQNSIIEELEKKIVTATVNNSVLQKQQHDLMETVNNLLTMMSTSNSKDPTVAKEEQISFRDCAEVFKSGHTTNGIYTLTFPNSTEEIKAYCDMEAGGGGWTIIQRREDGSVDFQRTWKEYKVGFGNPSGEYWLGNEFVSQLTNQQRYVLKIHLKDWEGNEAYSLYEHFYLSSEELNYRIHLKGLTGTAGKISSISQPGNDFSTKDGDNDKCICKCSQMLTGGRDDFLSSYLYWQGMIS

SEQ ID NO: 806 - protein, 495 aa, Homo sapiens
MWQIVFFTLSCDLVLAAAYNNFRKSMDSIGKKQYQVQHGSCSYTFLLPEMDNCRSSSSPYVSNAVQRDAPLEYDDSVQRLQVLENIMENNTQWLMKLENYIQDNMKKEMVEIQQNAVQNQTAVMIEIGTNLLNQTAEQTRKLTDVEAQVLNQTTRLELQLLEHSLSTNKLEKQILDQTSEINKLQDKNSFLEKKVLAMEDKHIIQLQSIKEEKDQLQVLVSKQNSIIEELEKKIVTATVNNSVLQKQQHDLMETVNNLLTMMSTSNSKDPTVAKEEQISFRDCAEVFKSGHTTNGIYTLTFPNSTEEIKAYCDMEAGGGGWTIIQRREDGSVDFQRTWKEYKVGFGNPSGEYWLGNEFVSQLTNQQRYVLKIHLKDWEGNEAYSLYEHFYLSSEELNYRIHLKGLTGTAGKISSISQPGNDFSTKDGDNDKCICKCSQMLTGGWWFDACGPSNLNGMYYPQRQNTNKFNGIKWYYWKGSGYSLKATTMMIRPADF

SEQ ID NO: 807 - protein, 444 aa, Homo sapiens
MWQIVFFTLSCDLVLAAAYNNFRKSMDSIGKKQYQVQHGSCSYTFLLPEMDNCRSSSSPYVSNAVQRDAPLEYDDSVQRLQVLENIMENNTQWLMKVLNQTTRLELQLLEHSLSTNKLEKQILDQTSEINKLQDKNSFLEKKVLAMEDKHIIQLQSIKEEKDQLQVLVSKQNSIIEELEKKIVTATVNNSVLQKQQHDLMETVNNLLTMMSTSNSAKDPTVAKEEQISFRDCAEVFKSGHTTNGIYTLTFPNSTEEIKAYCDMEAGGGGWTIIQRREDGSVDFQRTWKEYKVGFGNPSGEYWLGNEFVSQLTNQQRYVLKIHLKDWEGNEAYSLYEHFYLSSEELNYRIHLKGLTGTAGKISSISQPGNDFSTKDGDNDKCICKCSQMLTGGWWFDACGPSNLNGMYYPQRQNTNKFNGIKWYYWKGSGYSLKATTMMIRPADF

SEQ ID NO: 808 - protein, 503 aa, Homo sapiens
MLSQLAMLQGSLLLVVATMSVAQQTRQEADRGCETLVVQHGHCSYTFLLPKSEPCPPGPEVSRDSNTLQRESLANPLHLGKLPTQQVKQLEQALQNNTQWLKKLERAIKTILRSKLEQVQQQMAQNQTAPMLELGTSLLNQTTAQIRKLTDMEAQLLNQTSRMDAQMPETFLSTNKLENQLLLQRQKLQQLQGQNSALEKRLQALETKQQEELASILSKKAKLLNTLSRQSAALTNIERGLRGVRHNSSLLQDQQHSLRQLLVLLRHLVQERANASAPAFIMAGEQVFQDCAEIQRSGASASGVYTIQVSNATKPRKVFCDLQSSGGRWTLIQRRENGTVNFQRNWKDYKQGFGDPAGEHWLGNEVVHQLTRRAAYSLRVELQDWEGHEAYAQYEHFHLGSENQLYRLSVVGYSGSAGRQSSLVLQNTSFSTLDSDNDHCLCKCAQVMSGGWWFDACGLSNLNGVYYHAPDNKYKMDGIRWHYFKGPSYSLRASRMMIRPLDI

SEQ ID NO: 809 - protein, 114 aa, Homo sapiens
MKTFTWTLGVLFFLLVDTGHCRGGQFKIKKINQRRYPRATDGKEEAKKCAYTFLVPEQRITGPICVNTKGQDASTIKDMITRMDLENLKDVLSRQKREIDVLQLVVDVDGNIVN

SEQ ID NO: 810 - protein, 491 aa, Homo sapiens
MKTFTWTLGVLFFLLVDTGHCRGGQFKIKKINQRRYPRATDGKEEAKKCAYTFLVPEQRITGPICVNTKGQDASTIKDMITRMDLENLKDVLSRQKREIDVLQLVVDVDGNIVNEVKLLRKESRNMNSRVTQLYMQLLHEIIRKRDNSLELSQLENKILNVTTEMLKMATRYRELEVKYASLTDLVNNQSVMITLLEEQCLRIFSRQDTHVSPPLVQVVPQHIPNSQQYTPGLLGGNEIQRDPGYPRDLMPPPDLATSPTKSPFKIPPVTFINEGPFKDCQQAKEAGHSVSGIYMIKPENSNGPMQLWCENSLDPGGWTVIQKRTDGSVNFFRNWENYKKGFGNIDGEYWLGLENIYMLSNQDNYKLLIELEDWSDKKVYAEYSSFRLEPESEFYRLRLGTYQGNAGDSMMWHNGKQFTTLDRDKDMYAGNCAHFHKGGWWYNACAHSNLNGVWYRGGHYRSKHQDGIFWAEYRGGSYSLRAVQMMIKPID

SEQ ID NO: 811 - protein, 491 aa, Homo sapiens; identical to SEQ ID NO: 810

SEQ ID NO: 812 - protein, 191 aa, Homo sapiens
MQVWCDQRHDPGGWTVIQRRLDGSVNFFRNWETYKQGFGNIDGEYWLGLENIYWLTNQGNYKLLVTMEDWSGRKVFAEYASFRLEPESEYYKLRLGRYHGNAGDSFTWHNGKQFTTLDRDHDVYTGNCAHYQKGGWWYNACAHSNLNGVWYRGGHYRSRYQDGVYWAEFRGGSYSLKKVVMMIRPNPNTFH

SEQ ID NO: 813 - protein, 493 aa, Homo sapiens
MRPLCVTCWWLGLLAAMGAVAGQEDGFEGTEEGSPREFIYLNRYKRAGESQDKCTYTFIVPQQRVTGAICVNSKEPEVLLENRVHKQELELLNNELLKQKRQIETLQQLVEVDGGIVSEVKLLRKESRNMNSRVTQLYMQLLHEIIRKRDNALELSQLENRILNQTADMLQLASKYKDLEHKYQHLATLAHNQSEIIAQLEEHCQRVPSARPVPQPPPAAPPRVYQPPTYNRIINQISTNEIQSDQNLKVLPPPLPTMPTLTSLPSSTDKPSGPWRDCLQALEDGHDTSSIYLVKPENTNRLMQVWCDQRHDPGGWTVIQRRLDGSVNFFRNWETYKQGFGNIDGEYWLGLENIYWLTNQGNYKLLVTMEDWSGRKVFAEYASFRLEPESEYYKLRLGRYHGNAGDSFTWHNGKQFTTLDRDHDVYTGNCAHYQKGGWWYNACAHSNLNGVWYRGGHYRSRYQDGVYWAEFRGGSYSLKKVVMMIRPNPNTFH

SEQ ID NO: 814 - protein, 460 aa, Homo sapiens
MFTIKLLLFIVPLVISSRIDQDNSSFDSLSPEPKSRFAMLDDVKILANGLLQLGHGLKDFVHKTKGQINDIFQKLNIFDQSFYDLSLQTSEIKEEEKELRRTTYKLQVKNEEVKNMSLELNSKLESLLEEKILLQQKVKYLEEQLTNLIQNQPETPEHPEVTSLKTFVEKQDNSIKDLLQTVEDQYKQLNQQHSQIKEIENQLRRTSIQEPTEISLSSKPRAPRTTPFLQLNEIRNVKHDGIPAECTTIYNRGEHTSGMYAIRPSNSQVFHVYCDVISGSPWTLIQHRIDGSQNFNETWENYKYGFGRLDGEFWLGLEKIYSIVKQSNYVLRIELEDWKDNKHYIEYSFYLGNHETNYTLHLVAITGNVPNAIPENKDLVFSTWDHKAKGHFNCPEGYSGGWWWHDECGENNLNGKYNKPRAKSKPERRRGLSWKSQNGRLYSIKSTKMLIHPTDSESFE

SEQ ID NO: 815 - protein, 86 aa, Homo sapiens
MSGAPTAGAALMLCAATAVLLSAQGGPVQSKSPRFASWDEMNVLAHGLLQLGQGLREHAERTRSQLSALERRLSACGSACQGTEGS

SEQ ID NO: 816 - protein, 96 aa, Homo sapiens
MSGAPTAGAALMLCAATAVLLSAQGGPVQSKSPRFASWDEMNVLAHGLLQLGQGLREHAERTRSQLSALERRLSACGSACQGTEGSTDLPLAPESR

SEQ ID NO: 817 - protein, 105 aa, Homo sapiens
MSGAPTAGAALMLCAATAVLLSAQGGPVQSKSPRFASWDEMNVLAHGLLQLGQGLREHAERTRSQLSALERRLSACGSACQGTEGSTDLPLAPESRVDPEVLHSL

SEQ ID NO: 818 - protein, 368 aa, Homo sapiens
MSGAPTAGAALMLCAATAVLLSAQGGPVQSKSPRFASWDEMNVLAHGLLQLGQGLREHAERTRSQLSALERRLSACGSACQGTEGSTDLPLAPESRVDPEVLHSLQTQLKAQNSRIQQLFHKVAQQQRHLEKQHLRIQHLQSQFGLLDHKHLDHEVAKPARRKRLPEMAQPVDPAHNVSRLHHGGWTVIQRRHDGSVDFNRPWEAYKAGFGDPHGEFWLGLEKVHSITGDRNSRLAVQLRDWDGNAELLQFSVHLGGEDTAYSLQLTAPVAGQLGATTVPPSGLSVPFSTWDQDHDLRRDKNCAKSLSGGWWFGTCSHSNLNGQYFRSIPQQRQKLKKGIFWKTWRGRYYPLQATTMLIQPMAAEAAS

SEQ ID NO: 819 - protein, 406 aa, Homo sapiens
MSGAPTAGAALMLCAATAVLLSAQGGPVQSKSPRFASWDEMNVLAHGLLQLGQGLREHAERTRSQLSALERRLSACGSACQGTEGSTDLPLAPESRVDPEVLHSLQTQLKAQNSRIQQLFHKVAQQQRHLEKQHLRIQHLQSQFGLLDHKHLDHEVAKPARRKRLPEMAQPVDPAHNVSRLHRLPRDCQELFQVGERQSGLFEIQPQGSPPFLVNCKMTSDGGWTVIQRRHDGSVDFNRPWEAYKAGFGDPHGEFWLGLEKVHSITGDRNSRLAVQLRDWDGNAELLQFSVHLGGEDTAYSLQLTAPVAGQLGATTVPPSGLSVPFSTWDQDHDLRRDKNCAKSLSGGWWFGTCSHSNLNGQYFRSIPQQRQKLKKGIFWKTWRGRYYPLQATTMLIQPMAAEAAS

SEQ ID NO: 820 - protein, 406 aa, Homo sapiens; identical to SEQ ID NO: 819

SEQ ID NO: 821 - protein, 128 aa, Homo sapiens
MSGAPTAGAALMLCAATAVLLSAQGGPVQSKSPRFASWDEMNVLAHGLLQLGQGLREHAERTRSQLSALERRLSACGSFTACRHNSRLRTAGSSNSSTRWPSSSGTWRSSTCEFSICKASLASWTTST

SEQ ID NO: 822 - protein, 129 aa, Homo sapiens
  VARIANT 1: note = misc_feature - Xaa can be any naturally occurring amino acid
XPVQSKSPRFASWDEMNVLAHGLLQLGQGLREHAERTRSQLSALERRLSACGSACQGTEGSTDLPLAPESRVDPEVLHSLQTQLKAQNSRIQQLFHKVAQQQRHLEKQHLRIQHLQSQTGLNGGLSHID

SEQ ID NO: 823 - protein, 192 aa, Homo sapiens
MMSPSQASLLFLNVCIFICGEAVQGNCVHHSTDSSVVNIVEDGSNAKDESKSNDTVCKEDCEESCDVKTKITREEKHFMCRNLQNSIVSYTRSTKKLLRNMMDEQQASLDYLSNQVMCDMDYRGGGRTVIQKRIDGIIDFQRLWCDYLDGFGDLLGEFWLGLKKIFYIVNQKNTSFMLYVALESEDDTLAYA

SEQ ID NO: 824 - protein, 388 aa, Homo sapiens
MMSPSQASLLFLNVCIFICGEAVQGNCVHHSTDSSVVNIVEDGSNAKDESKSNDTVCKEDCEESCDVKTKITREEKHFMCRNLQNSIVSYTRSTKKLLRNMMDEQQASLDYLSNQVNELMNRVLLLTTEVFRKQLDPFPHRPVQSHGLDCTDIKDTIGSVTKTPSGLYIIHPEGSSYPFEVMCDMDYRGGGRTVIQKRIDGIIDFQRLWCDYLDGFGDLLGEFWLGLKKIFYIVNQKNTSFMLYVALESEDDTLAYASYDNFWLEDETRFFKMHLGRYSGNAGDAFRGLKKEDNQNAMPFSTSDVDNDGCRPACLVNGQSVKSCSHLHNKTGWWFNECGLANLNGIHHFSGKLLATGIQWGTWTKNNSPVKIKSVSMKIRRMYNPYFK

SEQ ID NO: 825 - protein, 470 aa, Homo sapiens
MGKPWLRALQLLLLLGASWARAGAPRCTYTFVLPPQKFTGAVCWSGPASTRATPEAANASELAALRMRVGRHEELLRELQRLAAADGAVAGEVRALRKESRGLSARLGQLRAQLQHEAGPGAGPGADLGAEPAAALALLGERVLNASAEAQRAAARFHQLDVKFRELAQLVTQQSSLIARLERLCPGGAGGQQQVLPPPPLVPVVPVRLVGSTSDTSRMLDPAPEPQRDQTQRQQEPMASPMPAGHPAVPTKPVGPWQDCAEARQAGHEQSGVYELRVGRHVVSVWCEQQLEGGGWTVIQRRQDGSVNFFTTWQHYKAGFGRPDGEYWLGLEPVYQLTSRGDHELLVLLEDWGGRGARAHYDGFSLEPESDHYRLRLGQYHGDAGDSLSWHNDKPFSTVDRDRDSYSGNCALYQRGGWWYHACAHSNLNGVWHHGGHYRSRYQDGVYWAEFRGGAYSLRKAAMLIRPLKL

SEQ ID NO: 826 - protein, 470 aa, Homo sapiens; identical to SEQ ID NO: 825

SEQ ID NO: 827 - protein, 430 aa, Homo sapiens
MGKPWLRALQLLLLLGASWARAGAPRCTYTFVLPPQKFTGAVCWSGPASTRATPEAANASELAALRMRVGRHEELLRELQRLAAADGAVAGEVRALRKESRGLSARLGQLRAQLQHEAGPGAGPGADLGAEPAAALALLGERVLNASAEAQRAAARFHQLDVKFRELAQLVTQQSSLIARLERLCPGGAGGQQQVLPPPPLVPVVPVRLVGSTSDTSRMLDPAPEPQRDQTQRQQEPMASPMPAGHPAVPTKPVGPWQDCAEARQAGHEQSGVYELRAGFGRPDGEYWLGLEPVYQLTSRGDHELLVLLEDWGGRGARAHYDGFSLEPESDHYRLRLGQYHGDAGDSLSWHNDKPFSTVDRDRDSYSGNCALYQRGGWWYHACAHSNLNGVWHHGGHYRSRYQDGVYWAEFRGGAYSLRKAAMLIRPLKL

SEQ ID NO: 828 - protein, 346 aa, Homo sapiens
MLKKPLSAVTWLCIFIVAFVSHPAWLQKLSKHKTPAQPQLKAANCCEEVKELKAQVANLSSLLSELNKKQERDWVSVVMQVMELESNSKRMESRLTDAESKYSEMNNQIDIMQLQAAQTVTQTSADAIYDCSSLYQKNYRISGVYKLPPDDFLGSPELEVFCDMETSGGGWTIIQRRKSGLVSFYRDWKQYKQGFGSIRGDFWLGNEHIHRLSRQPTRLRVEMEDWEGNLRYAEYSHFVLGNELNSYRLFLGNYTGNVGNDALQYHNNTAFSTKDKDNDNCLDKCAQLRKGGYWYNCCTDSNLNGVYYRLGEHNKHLDGITWYGWHGSTYSLKRVEMKIRPEDFKP

SEQ ID NO: 829 - protein, 99 aa, Homo sapiens
MEEDILQLQAEATAEVLGEVAQAQKVLRDSVQRLEVQLRSAWLGPAYREFEVLKAHADKQSHILWALTGHVQRQRREMVAQQHRLRQIQERLHTAALPA

SEQ ID NO: 830 - protein, 198 aa, Homo sapiens
MPVPALCLLWALAMVTRPASAAPMGGPELAQHEELTLLFHGTLQLGQALNGVYRTTEGRLTKARNSLGLYGRTIELLGQEVSRGRDAAQELRASLLETQMEEDILQLQAEATAEVLGEVAQAQKVLRDSVQRLEVQLRSAWLGPAYREFEVLKAHADKQSHILWALTGHVQRQRREMVAQQHRLRQIQERLHTAALPA

SEQ ID NO: 831 - protein, 198 aa, Homo sapiens; identical to SEQ ID NO: 830

SEQ ID NO: 832 - protein, 58 aa, Homo sapiens
  VARIANT 1: note = misc_feature - Xaa can be any naturally occurring amino acid
XAQELRASLLETQAHADKQSHILWALTGHVQRQRREMVAQQHRLRQIQERLHTAALPA

SEQ ID NO: 833 - protein, 1897 aa, Homo sapiens
MAQAAKQLKKIKDIEAQALQEQKEKEESNRKRRNRSRDRKKKADAATSFLRAARSGNLDKALDHLRNGVDINTCNQNGLNGLHLASKEGHVKMVVELLHKEIILETTTKKGNTALHIAALAGQDEVVRELVNYGANVNAQSQKGFTPLYMAAQENHLEVVKFLLENGANQNVATEDGFTPLAVALQQGHENVVAHLINYGTKGKVRLPALHIAARNDDTRTAAVLLQNDPNPDVLSKTGFTPLHIAAHYENLNVAQLLLNRGASVNFTPQNGITPLHIASRRGNVIMVRLLLDRGAQIETKTKDELTPLHCAARNGHVRISEILLDHGAPIQAKTKNGLSPIHMAAQGDHLDCVRLLLQYDAEIDDITLDHLTPLHVAAHCGHHRVAKVLLDKGAKPNSRALNGFTPLHIACKKNHVRVMELLLKTGASIDAVTESGLTPLHVASFMGHLPIVKNLLQRGASPNVSNVKVETPLHMAARAGHTEVAKYLLQNKAKVNAKAKDDQTPLHCAARIGHTNMVKLLLENNANPNLATTAGHTPLHIAAREGHVETVLALLEKEASQACMTKKGFTPLHVAAKYGKVRVAELLLERDAHPNAAGKNGLTPLHVAVHHNNLDIVKLLLPRGGSPHSPAWNGYTPLHIAAKQNQVEVARSLLQYGGSANAESVQGVTPLHLAAQEGHAEMVALLLSKQANGNLGNKSGLTPLHLVAQEGHVPVADVLIKHGVMVDATTRMGYTPLHVASHYGNIKLVKFLLQHQADVNAKTKLGYSPLHQAAQQGHTDIVTLLLKNGASPNEVSSDGTTPLAIAKRLGYISVTDVLKVVTDETSFVLVSDKHRMSFPETVDEILDVSEDEGTAHITIMGEELISFKAERRDSRDVDEEKELLDFVPKLDQVVESPAIPRIPCAMPETVVIRSEEQEQASKEYDEDSLIPSSPATETSDNISPVASPVHTGFLVSFMVDARGGSMRGSRHNGLRVVIPPRTCAAPTRITCRLVKPQKLSTPPPLAEEEGLASRIIALGPTGAQFLSPVIVEIPHFASHGRGDRELVVLRSENGSVWKEHRSRYGESYLDQILNGMDEELGSLEELEKKRVCRIITTDFPLYFVIMSRLCQDYDTIGPEGGSLKSKLVPLVQATFPENAVTKRVKLALQAQPVPDELVTKLLGNQATFSPIVTVEPRRRKFHRPIGLRIPLPPSWTDNPRDSGEGDTTSLRLLCSVIGGTDQAQWEDITGTTKLVYANECANFTTNVSARFWLSDCPRTAEAVNFATLLYKELTAVPYMAKFVIFAKMNDPREGRLRCYCMTDDKVDKTLEQHENFVEVARSRDIEVLEGMSLFAELSGNLVPVKKAAQQRSFHFQSFRENRLAMPVKVRDSSREPGGSLSFLRKAMKYEDTQHILCHLNITMPPCAKGSGAEDRRRTPTPLALRYSILSESTPGSLSGTEQAEMKMAVISEHLGLSWAELARELQFSVEDINRIRVENPNSLLEQSVALLNLWVIREGQNANMENLYTALQSIDRGEIVNMLEGSGRQSRNLKPDRRHTDRDYSLSPSQMNGYSSLQDELLSPASLGCALSSPLRADQYWNEVAVLDAIPLAATEHDTMLEMSDMQVWSAGLTPSLVTAEDSSLECSKAEDSDATGHEWKLEGALSEEPRGPELGSLELVEDDTVDSDATNGLIDLLEQEEGQRSEEKLPGSKRQDDATGAGQDSENEVSLVSGHQRGQARITHSPTVSQVTERSQDRLQDWDADGSIVSYLQDAAQGSWQEEVTQGPHSFQGTSTMTEGLEPGGSQEYEKVLVSVSEHTWTEQPEAESSQADRDRRQQGQEEQVQEAKNTFTQVVQGNEFQNIPGEQVTEEQFTDEQGNIVTKKIIRKVVRQIDLSSADAAQEHEEDHTSTPNP

SEQ ID NO: 834 - protein, 1880 aa, Homo sapiens
MPYSVGFREADAATSFLRAARSGNLDKALDHLRNGVDINTCNQNGLNGLHLASKEGHVKMVVELLHKEIILETTTKKGNTALHIAALAGQDEVVRELVNYGANVNAQSQKGFTPLYMAAQENHLEVVKFLLENGANQNVATEDGFTPLAVALQQGHENVVAHLINYGTKGKVRLPALHIAARNDDTRTAAVLLQNDPNPDVLSKTGFTPLHIAAHYENLNVAQLLLNRGASVNFTPQNGITPLHIASRRGNVIMVRLLLDRGAQIETKTKDELTPLHCAARNGHVRISEILLDHGAPIQAKTKNGLSPIHMAAQGDHLDCVRLLLQYDAEIDDITLDHLTPLHVAAHCGHHRVAKVLLDKGAKPNSRALNGFTPLHIACKKNHVRVMELLLKTGASIDAVTESGLTPLHVASFMGHLPIVKNLLQRGASPNVSNVKVETPLHMAARAGHTEVAKYLLQNKAKVNAKAKDDQTPLHCAARIGHTNMVKLLLENNANPNLATTAGHTPLHIAAREGHVETVLALLEKEASQACMTKKGFTPLHVAAKYGKVRVAELLLERDAHPNAAGKNGLTPLHVAVHHNNLDIVKLLLPRGGSPHSPAWNGYTPLHIAAKQNQVEVARSLLQYGGSANAESVQGVTPLHLAAQEGHAEMVALLLSKQANGNLGNKSGLTPLHLVAQEGHVPVADVLIKHGVMVDATTRMGYTPLHVASHYGNIKLVKFLLQHQADVNAKTKLGYSPLHQAAQQGHTDIVTLLLKNGASPNEVSSDGTTPLAIAKRLGYISVTDVLKVVTDETSFVLVSDKHRMSFPETVDEILDVSEDEGEELISFKAERRDSRDVDEEKELLDFVPKLDQVVESPAIPRIPCAMPETVVIRSEEQEQASKEYDEDSLIPSSPATETSDNISPVASPVHTGFLVSFMVDARGGSMRGSRHNGLRVVIPPRTCAAPTRITCRLVKPQKLSTPPPLAEEEGLASRIIALGPTGAQFLSPVIVEIPHFASHGRGDRELVVLRSENGSVWKEHRSRYGESYLDQILNGMDEELGSLEELEKKRVCRIITTDFPLYFVIMSRLCQDYDTIGPEGGSLKSKLVPLVQATFPENAVTKRVKLALQAQPVPDELVTKLLGNQATFSPIVTVEPRRRKFHRPIGLRIPLPPSWTDNPRDSGEGDTTSLRLLCSVIGGTDQAQWEDITGTTKLVYANECANFTTNVSARFWLSDCPRTAEAVNFATLLYKELTAVPYMAKFVIFAKMNDPREGRLRCYCMTDDKVDKTLEQHENFVEVARSRDIEVLEGMSLFAELSGNLVPVKKAAQQRSFHFQSFRENRLAMPVKVRDSSREPGGSLSFLRKAMKYEDTQHILCHLNITMPPCAKGSGAEDRRRTPTPLALRYSILSESTPGSLSGTEQAEMKMAVISEHLGLSWAELARELQFSVEDINRIRVENPNSLLEQSVALLNLWVIREGQNANMENLYTALQSIDRGEIVNMLEGSGRQSRNLKPDRRHTDRDYSLSPSQMNGYSSLQDELLSPASLGCALSSPLRADQYWNEVAVLDAIPLAATEHDTMLEMSDMQVWSAGLTPSLVTAEDSSLECSKAEDSDATGHEWKLEGALSEEPRGPELGSLELVEDDTVDSDATNGLIDLLEQEEGQRSEEKLPGSKRQDDATGAGQDSENEVSLVSGHQRGQARITHSPTVSQVTERSQDRLQDWDADGSIVSYLQDAAQGSWQEEVTQGPHSFQGTSTMTEGLEPGGSQEYEKVLVSVSEHTWTEQPEAESSQADRDRRQQGQEEQVQEAKNTFTQVVQGNEFQNIPGEQVTEEQFTDEQGNIVTKKIIRKVVRQIDLSSADAAQEHEEVELRGSGLQPDLIEGRKGAQIVKRASLKRGKQ

SEQ ID NO: 835 - protein, 1881 aa, Homo sapiens
MPYSVGFREADAATSFLRAARSGNLDKALDHLRNGVDINTCNQNGLNGLHLASKEGHVKMVVELLHKEIILETTTKKGNTALHIAALAGQDEVVRELVNYGANVNAQSQKGFTPLYMAAQENHLEVVKFLLENGANQNVATEDGFTPLAVALQQGHENVVAHLINYGTKGKVRLPALHIAARNDDTRTAAVLLQNDPNPDVLSKTGFTPLHIAAHYENLNVAQLLLNRGASVNFTPQNGITPLHIASRRGNVIMVRLLLDRGAQIETKTKDELTPLHCAARNGHVRISEILLDHGAPIQAKTKNGLSPIHMAAQGDHLDCVRLLLQYDAEIDDITLDHLTPLHVAAHCGHHRVAKVLLDKGAKPNSRALNGFTPLHIACKKNHVRVMELLLKTGASIDAVTESGLTPLHVASFMGHLPIVKNLLQRGASPNVSNVKVETPLHMAARAGHTEVAKYLLQNKAKVNAKAKDDQTPLHCAARIGHTNMVKLLLENNANPNLATTAGHTPLHIAAREGHVETVLALLEKEASQACMTKKGFTPLHVAAKYGKVRVAELLLERDAHPNAAGKNGLTPLHVAVHHNNLDIVKLLLPRGGSPHSPAWNGYTPLHIAAKQNQVEVARSLLQYGGSANAESVQGVTPLHLAAQEGHAEMVALLLSKQANGNLGNKSGLTPLHLVAQEGHVPVADVLIKHGVMVDATTRMGYTPLHVASHYGNIKLVKFLLQHQADVNAKTKLGYSPLHQAAQQGHTDIVTLLLKNGASPNEVSSDGTTPLAIAKRLGYISVTDVLKVVTDETSFVLVSDKHRMSFPETVDEILDVSEDEGEELISFKAERRDSRDVDEEKELLDFVPKLDQVVESPAIPRIPCAMPETVVIRSEEQEQASKEYDEDSLIPSSPATETSDNISPVASPVHTGFLVSFMVDARGGSMRGSRHNGLRVVIPPRTCAAPTRITCRLVKPQKLSTPPPLAEEEGLASRIIALGPTGAQFLSPVIVEIPHFASHGRGDRELVVLRSENGSVWKEHRSRYGESYLDQILNGMDEELGSLEELEKKRVCRIITTDFPLYFVIMSRLCQDYDTIGPEGGSLKSKLVPLVQATFPENAVTKRVKLALQAQPVPDELVTKLLGNQATFSPIVTVEPRRRKFHRPIGLRIPLPPSWTDNPRDSGEGDTTSLRLLCSVIGGTDQAQWEDITGTTKLVYANECANFTTNVSARFWLSDCPRTAEAVNFATLLYKELTAVPYMAKFVIFAKMNDPREGRLRCYCMTDDKVDKTLEQHENFVEVARSRDIEVLEGMSLFAELSGNLVPVKKAAQQRSFHFQSFRENRLAMPVKVRDSSREPGGSLSFLRKAMKYEDTQHILCHLNITMPPCAKGSGAEDRRRTPTPLALRYSILSESTPGSLSGTEQAEMKMAVISEHLGLSWAELARELQFSVEDINRIRVENPNSLLEQSVALLNLWVIREGQNANMENLYTALQSIDRGEIVNMLEGSGRQSRNLKPDRRHTDRDYSLSPSQMNGYSSLQDELLSPASLGCALSSPLRADQYWNEVAVLDAIPLAATEHDTMLEMSDMQVWSAGLTPSLVTAEDSSLECSKAEDSDATGHEWKLEGALSEEPRGPELGSLELVEDDTVDSDATNGLIDLLEQEEGQRSEEKLPGSKRQDDATGAGQDSENEVSLVSGHQRGQARITHSPTVSQVTERSQDRLQDWDADGSIVSYLQDAAQGSWQEEVTQGPHSFQGTSTMTEGLEPGGSQEYEKVLVSVSEHTWTEQPEAESSQADRDRRQQGQEEQVQEAKNTFTQVVQGNEFQNIPGEQVTEEQFTDEQGNIVTKKIIRKVVRQIDLSSADAAQEHEEVTVEGPLEDPSELEVDIDYFMKHSKDHTSTPNP

SEQ ID NO: 836 - protein, 109 aa, Homo sapiens
MWTFVTQLLVTLVLLSFFLVSCQNVMHIVRGSLCFVLKHIHQELDKELGESEGLSDDEETISTRVVRRRVFLKGNEFQNIPGEQVTEEQFTDEQGNIVTKKDHTSTPNP

SEQ ID NO: 837 - protein, 131 aa, Homo sapiens
MWTFVTQLLVTLVLLSFFLVSCQNVMHIVRGSLCFVLKHIHQELDKELGESEGLSDDEETISTRVVRRRVFLKGNEFQNIPGEQVTEEQFTDEQGNIVTKKIIRKVVRQIDLSSADAAQEHEEDHTSTPNP

SEQ ID NO: 838 - protein, 155 aa, Homo sapiens
MWTFVTQLLVTLVLLSFFLVSCQNVMHIVRGSLCFVLKHIHQELDKELGESEGLSDDEETISTRVVRRRVFLKGNEFQNIPGEQVTEEQFTDEQGNIVTKKIIRKVVRQIDLSSADAAQEHEEVELRGSGLQPDLIEGRKGAQIVKRASLKRGKQ

SEQ ID NO: 839 - protein, 156 aa, Homo sapiens
MWTFVTQLLVTLVLLSFFLVSCQNVMHIVRGSLCFVLKHIHQELDKELGESEGLSDDEETISTRVVRRRVFLKGNEFQNIPGEQVTEEQFTDEQGNIVTKKIIRKVVRQIDLSSADAAQEHEEVTVEGPLEDPSELEVDIDYFMKHSKDHTSTPNP

SEQ ID NO: 840 - protein, 113 aa, Homo sapiens
MWTFVTQLLVTLVLLSFFLVSCQNVMHIVRGSLCFVLKHIHQELDKELGESEGLSDDEETISTRVVRRRVFLKGNEFQNIPGEQVTEEQFTDEQGNIVTKKVELRGSGLQPDL

SEQ ID NO: 841 - protein, 177 aa, Homo sapiens
  VARIANT 1: note = misc_feature - Xaa can be any naturally occurring amino acid
XEDTQHILCHLNITMPPCAKGSGAEDRRRTPTPLALRYSILSESTPGSLSGTEQAEMKMAVISEHLGLSWAELARELQFSVEDINRIRVENPNSLLEQSVALLNLWVIREGQNANMENLYTALQSIDRGEIVNMLEGSGRQSRNLKPDRRHTDRDYSLSPSQMNGGRSEVRREAARF

SEQ ID NO: 842 - protein, 1040 aa, Homo sapiens
  VARIANT 1: note = misc_feature - Xaa can be any naturally occurring amino acid
XIKHGVMVDATTRMGYTPLHVASHYGNIKLVKFLLQHQADVNAKTKLGYSPLHQAAQQGHTDIVTLLLKNGASPNEVSSDGTTPLAIAKRLGYISVTDVLKVVTDETSFVLVSDKHRMSFPETVDEILDVSEDEGTAHITIMGEELISFKAERRDSRDVDEEKELLDFVPKLDQVVESPAIPRIPCAMPETVVIRSEEQEQASKEYDEDSLIPSSPATETSDNISPVASPVHTGFLVSFMVDARGGSMRGSRHNGLRVVIPPRTCAAPTRITCRLVKPQKLSTPPPLAEEEGLASRIIALGPTGAQFLSPVIVEIPHFASHGRGDRELVVLRSENGSVWKEHRSRYGESYLDQILNGMDEELGSLEELEKKRVCRIITTDFPLYFVIMSRLCQDYDTIGPEGGSLKSKLVPLVQATFPENAVTKRVKLALQAQPVPDELVTKLLGNQATFSPIVTVEPRRRKFHRPIGLRIPLPPSWTDNPRDSGEGDTTSLRLLCSVIGGTDQAQWEDITGTTKLVYANECANFTTNVSARFWLSDCPRTAEAVNFATLLYKELTAVPYMAKFVIFAKMNDPREGRLRCYCMTDDKVDKTLEQHENFVEVARSRDIEVLEGMSLFAELSGNLVPVKKAAQQRSFHFQSFRENRLAMPVKVRDSSREPGGSLSFLRKAMKYEDTQHILCHLNITMPPCAKGSGAEDRRRTPTPLALRYSILSESTPGSLSGTEQAEMKMAVISEHLGLSWAELARELQFSVEDINRIRVENPNSLLEQSVALLNLWVIREGQNANMENLYTALQSIDRGEIVNMLEGSGRQSRNLKPDRRHTDRDYSLSPSQMNGHQRGQARITHSPTVSQVTERSQDRLQDWDADGSIVSYLQDAAQGSWQEEVTQGPHSFQGTSTMTEGLEPGGSQEYEKVLVSVSEHTWTEQPEAESSQADRDRRQQGQEEQVQEAKNTFTQVVQGNEFQNIPGEQVTEEQFTDEQGNIVTKKIIRKVVRQIDLSSADAAQEHEEVELRGSGLQPDLIEGRKGAQIVKRASLKRGKQ

SEQ ID NO: 843 - protein, 553 aa, Homo sapiens
  VARIANT 1: note = misc_feature - Xaa can be any naturally occurring amino acid
XTSLRLLCSVIGGTDQAQWEDITGTTKLVYANECANFTTNVSARFWLSDCPRTAEAVNFATLLYKELTAVPYMAKFVIFAKMNDPREGRLRCYCMTDDKVDKTLEQHENFVEVARSRDIEVLEGMSLFAELSGNLVPVKKAAQQRSFHFQSFRENRLAMPVKVRDSSREPGGSLSFLRKAMKYEDTQHILCHLNITMPPCAKGSGAEDRRRTPTPLALRYSILSESTPGSLSGTEQAEMKMAVISEHLGLSWAELARELQFSVEDINRIRVENPNSLLEQSVALLNLWVIREGQNANMENLYTALQSIDRGEIVNMLEGSGRQSRNLKPDRRHTDRDYSLSPSQMNGHQRGQARITHSPTVSQVTERSQDRLQDWDADGSIVSYLQDAAQGSWQEEVTQGPHSFQGTSTMTEGLEPGGSQEYEKVLVSVSEHTWTEQPEAESSQADRDRRQQGQEEQVQEAKNTFTQVVQGNEFQNIPGEQVTEEQFTDEQGNIVTKKIIRKVVRQIDLSSADAAQEHEEVTVEGPLEDPSELEVDIDYFMKHSKDHTSTPNP

SEQ ID NO: 844 - protein, 133 aa, Homo sapiens
IGRRVNTRARNHVGRVALHWAAGAGHEQAVRLLLEHEAAVDEEDAVGALTEEGNTALHLAAGRGHMAVLQRLVDIGLDLEEQNAEGLTALHSAAGGSHPDCVQLLLRAGSTVNALTQVARPSQDCGRLLAAEP

SEQ ID NO: 845 - protein, 423 aa, Homo sapiens
MNALLLSAWFGHLRILQILVNSGAKIHCESKDGLTLLHCAAQKGHVPVLAFIMEDLEDVALDHVDKLGRTAFHRAAEHGQLDALDFLVGSGCDHNVKDKEGNTALHLAAGRGHMAVLQRLVDIGLDLEEQNAEGLTALHSAAGGSHPDCVQLLLRAGSTVNALTQKNLSCLHYAALSGSEDVSRVLIHAGGCANVVDHQGASPLHLAVRHNFPALVRLLINSDSDVNAVDNRQQTPLHLAAEHAWQDIADMLLIAGVDLNLRDKQGKTALAVAVRSNHVSLVDMIIKADRFYRWEKDHPSDPSGKSLSFKQDHRQETQQLRSVLWRLASRYLQPREWKKLAYSWEFTEAHVDAIEQQWTGTRSYQEHGHRMLLIWLHGVATAGENPSKALFEGLVAIGRRDLAENIRKKANAAPSAPRRCTAM

SEQ ID NO: 846 - protein, 399 aa, Homo sapiens
MNALLLSAWFGHLRILQILVNSGAKIHCESKDGLTLLHCAAQKGHVPVLAFIMEDLEDVALDHVDKLGRTAFHRAAEHGQLDALDFLVGSGCDHNVKDKEGNTALHLAAGRGHMAVLQRLVDIGLDLEEQNAEGLTALHSAAGGSHPDCVQLLLRAGSTVNALTQKNLSCLHYAALSGSEDVSRVLIHAGGCANVVDHQGASPLHLAVRHNFPALVRLLINSDSDVNAVDNRQQTPLHLAAEHAWQDIADMLLIAGVDLNLRDKDHPSDPSGKSLSFKQDHRQETQQLRSVLWRLASRYLQPREWKKLAYSWEFTEAHVDAIEQQWTGTRSYQEHGHRMLLIWLHGVATAGENPSKALFEGLVAIGRRDLAGWSTMARSQLTATSASRVQMILVPQPPE

SEQ ID NO: 847 - protein, 423 aa, Homo sapiens; identical to SEQ ID NO: 845

SEQ ID NO: 848 - protein, 181 aa, Homo sapiens
MNALLLSAWFGHLRILQILVNSGAKIHCESKDGLTLLHCAAQKGHVPVLAFIMEDLEDVALDHVDKLGRTAFHRAAEHGQLDALDFLVGSGCDHNVKDKEGNTALHLAAGRGHMAVLQRLVDIGLDLEEQNAEGLTALHSAAGGSHPDCVQLLLRAGSTVNALTQVARPSQDCGRLLAAEP

SEQ ID NO: 849 - protein, 123 aa, Homo sapiens
MQEELAWETDGLLPLERQLHEAARQNNVGRMQELIGRRVNTRARNHVGRVALHWAAGAGHEQAVRLLLEHEAAVDEEDAFGMNALLLSAWFGHLRILQILVNSGAKIHCESKPKKAMCLCWRS

SEQ ID NO: 850 - protein, 522 aa, Homo sapiens
MQEELAWETDGLLPLERQLHEAARQNNVGRMQELIGRRVNTRARNHVGRVALHWAAGAGHEQAVRLLLEHEAAVDEEDAVGALTEARLCFGMNALLLSAWFGHLRILQILVNSGAKIHCESKDGLTLLHCAAQKGHVPVLAFIMEDLEDVALDHVDKLGRTAFHRAAEHGQLDALDFLVGSGCDHNVKDKEGNTALHLAAGRGHMAVLQRLVDIGLDLEEQNAEGLTALHSAAGGSHPDCVQLLLRAGSTVNALTQKNLSCLHYAALSGSEDVSRVLIHAGGCANVVDHQGASPLHLAVRHNFPALVRLLINSDSDVNAVDNRQQTPLHLAAEHAWQDIADMLLIAGVDLNLRDKQGKTALAVAVRSNHVSLVDMIIKADRFYRWEKDHPSDPSGKSLSFKQDHRQETQQLRSVLWRLASRYLQPREWKKLAYSWEFTEAHVDAIEQQWTGTRSYQEHGHRMLLIWLHGVATAGENPSKALFEGLVAIGRRDLAGWSTMARSQLTATSASRVQMILVPQPPE

SEQ ID NO: 851 - protein, 217 aa, Homo sapiens [sequence omitted]

SEQ ID NO: 852 - protein, 300 aa, Homo sapiens
MAAAAGDADDEPRSGHSSSEGECAVAPEPLTDAEGLFSFADFGSALGGGGAGLSGRASGGAQSPLRYLHVLWQQDAEPRDELRCKIPAGRLRRAARPHRRLGPTGKEVHALKRLRDSANANDVETVQQLLEDGADPCAADDKGRTALHFASCNGNDQIVQLLLDHGADPNQRDGLGNTPLHLAACTNHVPVITTLLRGGARVDALDRAGRTPLHLAKSKLNILQEGHAQCLEAVRLEVKQIIHMLREYLERLGQHEQRERLDDLCTRLQMTSTKEQVDEVTDLLASFTSLSLQMQSMEKR

SEQ ID NO: 853 - protein, 284 aa, Homo sapiens
MAAAAGDADDEPRSGHSSSEGECAVAPEPLTDAEGLFSFADFGSALGGGGAGLSGRASGGAQSPLRYLHVLWQQDAEPRDELRCKIPAGRLRRAARPHRRLGPTGKEVHVQQLLEDGADPCAADDKGRTALHFASCNGNDQIVQLLLDHGADPNQRDGLGNTPLHLAACTNHVPVITTLLRGGARVDALDRAGRTPLHLAKSKLNILQEGHAQCLEAVRLEVKQIIHMLREYLERLGQHEQRERLDDLCTRLQMTSTKEQVDEVTDLLASFTSLSLQMQSMEKR

SEQ ID NO: 854 - protein, 90 aa, Homo sapiens
MARIPVQLMTRAAQLYTLPHAMAMTRLLLLDHGADPNQRDGLGNTPLHLAACTNHVPVITTLLRGGARVDALDRAGRTPLHLAKSKLNIL

SEQ ID NO: 855 - protein, 156 aa, Homo sapiens
MARIPVQLMTRAAQLYTLPHAMAMTRLLLLDHGADPNQRDGLGNTPLHLAACTNHVPVITTLLRGGARVDALDRAGRTPLHLAKSKLNILQEGHAQCLEAVRLEVKQIIHMLREYLERLGQHEQRERLDDLCTRLQMTSTKEQVDEVTDLLASFTS

SEQ ID NO: 856 - protein, 107 aa, Homo sapiens
MPMMWKQCSCSWTMVLILTSEMGWGTRHCTWRPAPTTFLSSPHCYEEIIHMLREYLERLGQHEQRERLDDLCTRLQMTSTKEQVDEVTDLLASFTSLSLQMQSMEKR

SEQ ID NO: 857 - protein, 180 aa, Homo sapiens
MPMMWKQQLLEDGADPCAADDKGRTALHFASCNGNDQIVQLLLDHGADPNQRDGLGNTPLHLAACTNHVPVITTLLRGGARVDALDRAGRTPLHLAKSKLNILQEGHAQCLEAVRLEVKQIIHMLREYLERLGQHEQRERLDDLCTRLQMTSTKEQVDEVTDLLASFTSLSLQMQSMEKR

SEQ ID NO: 858 - protein, 208 aa, Homo sapiens
  VARIANT 1: note = misc_feature - Xaa can be any naturally occurring amino acid
XRDELRCKIPAGRLRRAARPHRRLGPTGKEVHALKRLRDSANANDVETVQQLLEDGADPCAADDKGRTALHFASCNGNDQIVQLLLDHGADPNQRDGLGNTPLHLECSPQLVPAGARVDALDRAGRTPLHLAKSKLNILQEGHAQCLEAVRLEVKQIIHMLREYLERLGQHEQRERLDDLCTRLQMTSTKEQVDEVTDLLASFTSLSL

SEQ ID NO: 859 - protein, 178 aa, Homo sapiens
  VARIANT 1: note = misc_feature - Xaa can be any naturally occurring amino acid
XRLRRPGPRGAVAMAAAAGDADDEPRSGHSSSEGECAVAPEPLTDAEGLFSFADFGSALGGGGAGLSGRASGGAQSPLRYLHVLWQQDAEPRDELRCKIPAGRLRRAARPHRRLGPTGKEVHALKRLRDSANANDVETVQQLLEDGADPCAADDKGRTALHFASCNGNDQIAAPGPWC

SEQ ID NO: 860 - protein, 345 aa, Homo sapiens
MTRGRAWGMRRAAAGAGGARAAGPTGGASRLHPNAGRRSGARAGAQGCGGPRVGSADSRALPAQPLACARGRSQRLVCDPKAASALPDLAPDVFVLRVRLEETGEMFRVANCRGDMTVRELKEELDLMVGIPFNLQRLQYLDEGVLMDDTTLKFHDVVPGGIISLCIWHHDGWTELVLAAVEGDPSKLSCLGLTEDSFYRTANSEHFEGEKWKHWTSQRAFVALYVASHRGHFDAVQYLLEHGASCLSRSPLGRTPLHVAAAMGRSDCIILLLQHGASIHDRDAKGETPISIAHRLNHTLSERQMVLLHRIAKSGIRDLNDLVMKNALQRVKSGFRSEKMTMTPH

SEQ ID NO: 861 - protein, 933 aa, Homo sapiens
MRMAATAWAGLQGPPLPTLCPAVRTGLYCRDQAHAERWAMTSETSSGSHCARSRMLRRRAQEEDSTVLIDVSPPEAEKRGSYGSTAHASEPGGQQAAACRAGSPAKPRIADFVLVWEEDLKLDRQQDSAARDRTDMHRTWRETFLDNLRAAGLCVDQQDVQDGNTTVHYALLSASWAVLCYYAEDLRLKLPLQELPNQASNWSAGLLAWLGIPNVLLEVVPDVPPEYYSCRFRVNKLPRFLGSDNQDTFFTSTKRHQILFEILAKTPYGHEKKNLLGIHQLLAEGVLSAAFPLHDGPFKTPPEGPQAPRLNQRQVLFQHWARWGKWNKYQPLDHVRRYFGEKVALYFAWLGFYTGWLLPAAVVGTLVFLVGCFLVFSDIPTQELCGSKDSFEMCPLCLDCPFWLLSSACALAQAGRLFDHGGTVFFSLFMALWAVLLLEYWKRKSATLAYRWDCSDYEDTEERPRPQFAASAPMTAPNPITGEDEPYFPERSRARRMLAGSVVIVVMVAVVVMCLVSIILYRAIMAIVVSRSGNTLLAAWASRIASLTGSVVNLVFILILSKIYVSLAHVLTRWEMHRTQTKFEDAFTLKVFIFQFVNFYSSPVYIAFFKGRFVGYPGNYHTLFGVRNEECAAGGCLIELAQELLVIMVGKQVINNMQEVLIPKLKGWWQKFRLRSKKRKAGASAGASQGPWEDDYELVPCEGLFDEYLEMVLQFGFVTIFVAACPLAPLFALLNNWVEIRLDARKFVCEYRRPVAERAQDIGIWFHILAGLTHLAVISNAFLLAFSSDFLPRAYYRWTRAHDLRGFLNFTLARAPSSFAAAHNRTCRYRAFRDDDGHYSQTYWNLLAIRLAFVIVFEHVVFSVGRLLDLLVPDIPESVEIKVKREYYLAKQALAENEVLFGTNGTKDEQPEGSELSSHWTPFTVPKASQLQQ

SEQ ID NO: 862 - protein, 883 aa, Homo sapiens
MRMAATAWAGLQGPPLPTLCPAVRTGLYCRDQAHAERWAMTSETSSGSHCARSRMLRRRAQEEDSTVLIDVSPPEAEKRGSYGSTAHASEPGGQQAAACRAGSPAKPRIDFVLVWEEDLKLDRQQDSAARDRTDMHRTWRETFLDNLRAAGLCVDQQDVQDGNTTVHYALLSASWAVLCYYAEDLRLKLPLQELPNQASNWSAGLLAWLGIPNVLLEVVPDVPPEYYSCRFRVNKLPRFLGSDNQDTFFTSTKRHQILFEILAKTPYGHEKKNLLGIHQLLAEGVLSAAFPLHDGPFKTPPEGPQAPRLNQRQVLFQHWARWGKWNKYQPLDHVRRYFGEKVALYFAWLGFYTGWLLPAAVVGTLVFLVGCFLVFSDIPTQELCGSKDSFEMCPLCLDCPFWLLSSACALAQAGRLFDHGGTVFFSLFMALWAVLLLEYWKRKSATLAYRWDCSDYEDTEERPRPQFAASAPMTAPNPITGEDEPYFPERSRARRMLAGSVVIVVMVAVVVMCLVSIILYRAIMAIVVSRSGNTLLAAWASRIASLTGSVVNLVFILILSKIYVSLAHVLTRWEMHRTQTKFEDAFTLKVFIFQFVNFYSSPVYIAFFKGRFVGYPGNYHTLFGVRNEECAAGGCLIELAQELLVIMVGKQVINNMQEVLIPKLKGWWQKFRLRSKKRKAGASAGASQGPWEDDYELVPCEGLFDEYLEMVLQFGFVTIFVAACPLAPLFALLNNWVEIRLDARKFVCEYRRPVAERAQDIGIWFHILAGLTHLAVISNAFLLAFSSDFLPRAYYRWTRAHDLRGFLNFTLARAPSSFAAAHNRTCRYRAFRDDDGHYSQTYWNLLAIRLAFVIVFEVAEAPAGSPIHGMRPRPCALPNSSTW

SEQ ID NO: 863 - protein, 179 aa, Homo sapiens
MRMAATAWAGLQGPPLPTLCPAVRTGLYCRDQAHAERWAMTSETSSGSHCARSRMLRRRAQEEDSTVLIDVSPPEAEKRGSYGSTAHASEPGGQQAAACRAGSPAKPRIDFVLVWEEDLKLDRQQDSAARDRTDMHRTWRETFLDNLRAAGLCVDQVRGGCHGQGPRPCIHSVTHDLAA

SEQ ID NO: 864 - protein, 186 aa, Homo sapiens
  VARIANT 1: note = misc_feature - Xaa can be any naturally occurring amino acid
XAGGAFRGLRADGGGEPGRDPLPAVLQFGFVTIFVAACPLAPLFALLNNWVEIRLDARKFVCEYRRPVAERAQDIGIWFHILAGLTHLAVISNAFLLAFSSDFLPRAYYRWTRAHDLRGFLNFTLARAPSSFAAAHNRTCRYRAFRDDDGHYSQTYWNLLAIRLAFVIVFEHVVFSVGRLLDLLVP

SEQ ID NO: 865 - protein, 680 aa, Homo sapiens
MVPGVPGAVLTLCLWLAASSGCLAAGPGAAAARRLDESLSAGSVQRARCASRCLSLQITRISAFFQHFQNNGSLVWCQNHKQCSKCLEPCKESGDLRKHQCQSFCEPLFPKKSYECLTSCEFLKYILLVKQGDCPAPEKASGFAAACVESCEVDNECSGVKKCCSNGCGHTCQVPKTLYKGVPLKPRKELRFTELQSGQLEVKWSSKFNISIEPVIYVVQRRWNYGIHPSEDDATHWQTVAQTTDERVQLTDIRPSRWYQFRVAAVNVHGTRGFTAPSKHFRSSKDPSAPPAPANLRLANSTVNSDGSVTVTIVWDLPEEPDIPVHHYKVFWSWMVSSKSLVPTKKKRRKTTDGFQNSVILEKLQPDCDYVVELQAITYWGQTRLKSAKVSLHFTSTHATNNKEQLVKTRKGGIQTQLPFQRRRPTRPLEVGAPFYQDGQLQVKVYWKKTEDPTVNRYHVRWFPEACAHNRTTGSEASSGMTHENYIILQDLSFSCKYKVTVQPIRPKSHSKAEAVFFTTPPCSALKGKSHKPVGCLGEAGHVLSKVLAKPENLSASFIVQDVNITGHFSWKMAKANLYQPMTGFQVTWAEVTTESRQNSLPNSIISQSQILPSDHYVLTVPNLRPSTLYRLEVQVLTPGGEGPATIKTFRTPELPPSSAHRSHLKHRHPHHYKPSPERY

SEQ ID NO: 866 - protein, 564 aa, Homo sapiens
MATAERRALGIGFQWLSLATLVLICAGQGGRREDGGPACYGGFDLYFILDKSGSVLHHWNEIYYFVEQLAHKFISPQLRMSFIVFSTRGTTLMKLTEDREQIRQGLEELQKVLPGGDTYMHEGFERASEQIYYENRQGYRTASVIIALTDGELHEDLFFYSEREANRSRDLGAIVYCVGVKDFNETQLARIADSKDHVFPVNDGFQALQGIIHSILKKSCIEILAAEPSTICAGESFQVVVRGNGFRHARNVDRVLCSFKINDSVTLNEKPFSVEDTYLLCPAPILKEVGMKAALQVSMNDGLSFISSSVIITTTHCSDGSILAIALLILFLLLALALLWWFWPLCCTVIIKEVPPPPAEESEEEDDDGLPKKKWPTVDASYYGGRGVGGIKRMEVRWGEKGSTEEGAKLEKAKNARVKMPEQEYEFPEPRNLNNNMRRPSSPRKWYSPIKGKLDALWVLLRKGYDRVSVMRPQPGDTGRCINFTRVKNNQPAKYPLNNAYHTSSPPPAPIYTPPPPAPHCPPPPPSAPTPPIPSPPSTLPPPPQAPPPNRAPPPSRPPPRPSV

SEQ ID NO: 867 - protein, 333 aa, Homo sapiens
MATAERRALGIGFQWLSLATLVLICAGQGGRREDGGPACYGGFDLYFILDKSGSVLHHWNEIYYFVEQLAHKFISPQLRMSFIVFSTRGTTLMKLTEDREQIRQGLEELQKVLPGGDTYMHEGFERASEQIYYENRQGYRTASVIIALTDGELHEDLFFYSEREANRSRDLGAIVYCVGVKDFNETQLARIADSKDHVFPVNDGFQALQGIIHSILKKSCIEILAAEPSTICAGESFQVVVRGNGFRHARNVDRVLCSFKINDSVTLNEKPFSVEDTYLLCPAPILKEVGMKAALQVSMNDGLSFISSSVIITTTHCSLHKIASGPTTAACME

SEQ ID NO: 868 - protein, 368 aa, Homo sapiens
MATAERRALGIGFQWLSLATLVLICAGQGGRREDGGPACYGGFDLYFILDKSGSVLHHWNEIYYFVEQLAHKFISPQLRMSFIVFSTRGTTLMKLTEDREQIRQGLEELQKVLPGGDTYMHEGFERASEQIYYENRQGYRTASVIIALTDGELHEDLFFYSEREANRSRDLGAIVYCVGVKDFNETQLARIADSKDHVFPVNDGFQALQGIIHSILKKSCIEILAAEPSTICAGESFQVVVRGNGFRHARNVDRVLCSFKINDSVTLNEKPFSVEDTYLLCPAPILKEVGMKAALQVSMNDGLSFISSSVIITTTHCSDGSILAIALLILFLLLALALLWWFWPLCCTVIIKEVPPPPAEESEENKIK

SEQ ID NO: 869 - protein, 179 aa, Homo sapiens
  VARIANT 1: note = misc_feature - Xaa can be any naturally occurring amino acid
XDLGAIVYCVGVKDFNETQLARIADSKDHVFPVNDGFQALQGIIHSILKKSCIEILAAEPSTICAGESFQVVVRGNGFRHARNVDRVLCSFKINDSVTLNEKPFSVEDTYLLCPAPILKEVGMKAALQVSMNDGLSFISSSVIITTTHCDGLWFYIQSLETVKDHRNIRVRNSDLKYCL

SEQ ID NO: 870 - protein, 52 aa, Homo sapiens
MQSPWKILTVAPLFLLLSLQSSASPANDDQSRPSLSNGHTCVASSAEKPQLS

SEQ ID NO: 871 - protein, 108 aa, Homo sapiens
MQSPWKILTVAPLFLLLSLQSSASPANDDQSRPSLSNGHTCVEKLFLKTTCYLVIDKFGSDIIKLLSADMNADVVCHTLEFCKQNTGQPLCHLYPLPKETWKFTLQKA

SEQ ID NO: 872 - protein, 543 aa, Homo sapiens
MQSPWKILTVAPLFLLLSLQSSASPANDDQSRPSLSNGHTCVEKLFLKTTCYLVIDKFGSDIIKLLSADMNADVVCHTLEFCKQNTGQPLCHLYPLPKETWKFTLQKARQIVKKSPILKYSRSGSDICSLPVLAKICQKIKLAMEQSVPFKDVDSDKYSVFPTLRGYHWRGRDCNDSDESVYPGRRPNNWDVHQDSNCNGIWGVDPKDGVPYEKKFCEGSQPRGIILLGDSAGAHFHISPEWITASQMSLNSFINLPTALTNELDWPQLSGATGFLDSTVGIKEKSIYLRLWKRNHCNHRDYQNISRNGASSRNLKKFIESLSRNKVLDYPAIVIYAMIGNDVCSGKSDPVPAMTTPEKLYSNVMQTLKHLNSHLPNGSHVILYGLPDGTFLWDNLHNRYHPLGQLNKDMTYAQLYSFLNCLQVSPCHGWMSSNKTLRTLTSERAEQLSNTLKKIAASEKFTNFNLFYMDFAFHEIIQEWQKRGGQPWQLIEPVDGFHPNEVALLLLADHFWKKVQLQWPQILGKENPFNPQIKQVFGDQGGH

SEQ ID NO: 873 - protein, 688 aa, Homo sapiens
MQSPWKILTVAPLFLLLSLQSSASPANDDQSRPSLSNGHTCVGCVLVVSVIEQLAQVHNSTVQASMERLCSYLPEKLFLKTTCYLVIDKFGSDIIKLLSADMNADVVCHTLEFCKQNTGQPLCHLYPLPKETWKFTLQKARQIVKKSPILKYSRSGSDICSLPVLAKICQKIKLAMEQSVPFKDVDSDKYSVFPTLRGYHWRGRDCNDSDESVYPGRRPNNWDVHQDSNCNGIWGVDPKDGVPYEKKFCEGSQPRGIILLGDSAGAHFHISPEWITASQMSLNSFINLPTALTNELDWPQLSGATGFLDSTVGIKEKSIYLRLWKRNHCNHRDYQNISRNGASSRNLKKFIESLSRNKVLDYPAIVIYAMIGNDVCSGKSDPVPAMTTPEKLYSNVMQTLKHLNSHLPNGSHVILYGLPDGTFLWDNLHNRYHPLGQLNKDMTYAQLYSFLNCLQVSPCHGWMSSNKTLRTLTSERAEQLSNTLKKIAASEKFTNFNLFYMDFAFHEIIQEWQKRGGQPWQLIEPVDGFHPNERKSILLKGILMTSQTLDNQEWTQLTSWIKGNLTCDSRTREWLCCCWRIISGKRCSSSGPKSWERRIRSTPRLNRCLETKAGTEPLRSMHPWGAQGGRGLGKLIPQTLWGLPRHRPKGLFFSSIFAKCLSLNEEHIWTTVQCCVLPGSVTLPLFLK

SEQ ID NO: 874 - protein, 575 aa, Homo sapiens
MQSPWKILTVAPLFLLLSLQSSASPANDDQSRPSLSNGHTCVGCVLVVSVIEQLAQVHNSTVQASMERLCSYLPEKLFLKTTCYLVIDKFGSDIIKLLSADMNADVVCHTLEFCKQNTGQPLCHLYPLPKETWKFTLQKARQIVKKSPILKYSRSGSDICSLPVLAKICQKIKLAMEQSVPFKDVDSDKYSVFPTLRGYHWRGRDCNDSDESVYPGRRPNNWDVHQDSNCNGIWGVDPKDGVPYEKKFCEGSQPRGIILLGDSAGAHFHISPEWITASQMSLNSFINLPTALTNELDWPQLSGATGFLDSTVGIKEKSIYLRLWKRNHCNHRDYQNISRNGASSRNLKKFIESLSRNKVLDYPAIVIYAMIGNDVCSGKSDPVPAMTTPEKLYSNVMQTLKHLNSHLPNGSHVILYGLPDGTFLWDNLHNRYHPLGQLNKDMTYAQLYSFLNCLQVSPCHGWMSSNKTLRTLTSERAEQLSNTLKKIAASEKFTNFNLFYMDFAFHEIIQEWQKRGGQPWQLIEPVDGFHPNEVALLLLADHFWKKVQLQWPQILGKENPFNPQIKQVFGDQGGH

SEQ ID NO: 875 - protein, 249 aa, Homo sapiens
MPALGWAVAAILMLQTAMAEPSPGTLPRKAGVFSDLSNQELKAVHSFLWSKKELRLQPSSTTTMAKNTVFLIEMLLPKKYHVLRFLDKGERHPVREARAVIFFGDQEHPNVTEFAVGPLPGPCYMRALSPRPGYQSSWASRPISTAEYALLYHTLQEATKPLHQFFLNTTGFSFQDCHDRCLAFTDVAPRGVASGQRRSWLIIQRYVEGYFLHPTGLELLVDHGSTDAGHWAVEQVWYNGKFYGSPEEL

SEQ ID NO: 876 - protein, 751 aa, Homo sapiens
MPALGWAVAAILMLQTAMAEPSPGTLPRKAGVFSDLSNQELKAVHSFLWSKKELRLQPSSTTTMAKNTVFLIEMLLPKKYHVLRFLDKGERHPVREARAVIFFGDQEHPNVTEFAVGPLPGPCYMRALSPRPGYQSSWASRPISTAEYALLYHTLQEATKPLHQFFLNTTGFSFQDCHDRCLAFTDVAPRGVASGQRRSWLIIQRYVEGYFLHPTGLELLVDHGSTDAGHWAVEQVWYNGKFYGSPEELARKYADGEVDVVVLEDPLPGGKGHDSTEEPPLFSSHKPRGDFPSPIHVSGPRLVQPHGPRFRLEGNAVLYGGWSFAFRLRSSSGLQVLNVHFGGERIAYEVSVQEAVALYGGHTPAGMQTKYLDVGWGLGSVTHELAPGIDCPETATFLDTFHYYDADDPVHYPRALCLFEMPTGVPLRRHFNSNFKGGFNFYAGLKGQVLVLRTTSTVYNYDYIWDFIFYPNGVMEAKMHATGYVHATFYTPEGLRHGTRLHTHLIGNIHTHLVHYRVDLDVAGTKNSFQTLQMKLENITNPWSPRHRVVQPTLEQTQYSWERQAAFRFKRKLPKYLLFTSPQENPWGHKRTYRLQIHSMADQVLPPGWQEEQAITWARYPLAVTKYRESELCSSSIYHQNDPWHPPVVFEQFLHNNENIENEDLVAWVTVGFLHIPHSEDIPNTATPGNSVGFLLRPFNFFPEDPSLASRDTVIVWPRDNGPNYVQRWIPEDRDCSMPPPFSYNGTYRPV

SEQ ID NO: 877 - protein, 770 aa, Homo sapiens
MPALGWAVAAILMLQTAMAEPSPGTLPRKAGVFSDLSNQELKAVHSFLWSKKELRLQPSSTTTMAKNTVFLIEMLLPKKYHVLRFLDKGERHPVREARAVIFFGDQEHPNVTEFAVGPLPGPCYMRALSPRPGYQSSWASRPISTAEYALLYHTLQEATKPLHQFFLNTTGFSFQDCHDRCLAFTDVAPRGVASGQRRSWLIIQRYVEGYFLHPTGLELLVDHGSTDAGHWAVEQVWYNGKFYGSPEELARKYADGEVDVVVLEDPLPGGKGHDSTEEPPLFSSHKPRGDFPSPIHVSGPRLVQPHGPRFRLEGNAVLYGGWSFAFRLRSSSGLQVLNVHFGGERIAYEVSVQEAVALYGGHTPAGMQTKYLDVGWGLGSVTHELAPGIDCPETATFLDTFHYYDADDPVHYPRALCLFEMPTGVPLRRHFNSNFKGGFNFYAGLKGQVLVLRTTSTVYNYDYIWDFIFYPNGVMEAKMHATGYVHATFYTPEGLRHGTRLHTHLIGNIHTHLVHYRVDLDVAGTKNSFQTLQMKLENITNPWSPRHRVVQPTLEQTQYSWERQAAFRFKRKLPKYLLFTSPQENPWGHKRTYRLQIHSMADQVLPPGWQEEQAITWARTEGGQPRALSQAASPVPGRYPLAVTKYRESELCSSSIYHQNDPWHPPVVFEQFLHNNENIENEDLVAWVTVGFLHIPHSEDIPNTATPGNSVGFLLRPFNFFPEDPSLASRDTVIVWPRDNGPNYVQRWIPEDRDCSMPPPFSYNGTYRPV

SEQ ID NO: 878 - protein, 751 aa, Homo sapiens; identical to SEQ ID NO: 876

SEQ ID NO: 879 - protein, 337 aa, Homo sapiens
MPALGWAVAAILMLQTAMAEPSPGTLPRKAGVFSDLSNQELKAVHSFLWSKKELRLQPSSTTTMAKNTVFLIEMLLPKKYHVLRFLDKGERHPVREARAVIFFGDQEHPNVTEFAVGPLPGPCYMRALSPRPGYQSSWASRPISTAEYALLYHTLQEATKPLHQFFLNTTGFSFQDCHDRCLAFTDVAPRGVASGQRRSWLIIQRYVEGYFLHPTGLELLVDHGSTDAGHWAVEQVWYNGKFYGSPEELARKYADGEVDVVVLEDPLPGGKGHDSTEEPPLFSSHKPRGDFPSPIHVSGPRLVQPHGPRFRLEGNAVLYGGWSFAFRLRSSSGLQVL

SEQ ID NO: 880 - protein, 751 aa, Homo sapiens; identical to SEQ ID NO: 876

SEQ ID NO: 881 - protein, 756 aa, Homo sapiens
MHLKIVLAFLALSLITIFALAYVLLTSPGGSSQPPHCPSVSHRAQPWPHPGQSQLFADLSREELTAVMRFLTQRLGPGLVDAAQAQPSDNCIFSVELQLPPKAAALAHLDRGSPPPAREALAIVLFGGQPQPNVSELVVGPLPHPSYMRDVTVERHGGPLPYHRRPVLRAEFTQMWRHLKEVELPKAPIFLSSTFNYNGSTLAAVHATPRGLRSGDRATWMALYHNISGVGLFLHPVGLELLLDHRALDPAHWTVQQVFYLGHYYADLGQLEREFKSGRLEVVRVPLPPPNGASSLRSRNSPGPLPPLQFSPQGSQYSVQGNLVVSSLWSFTFGHGVFSGLRIFDVRFQGERIAYEVSVQECVSIYGADSPKTMLTRYLDSSFGLGRNSRGLVRGVDCPYQATMVDIHILVGKGAVQLLPGAVCVFEEAQGLPLRRHHNYLQNHFYGGLASSALVVRSVSSVGNYDYIWDFVLYPNGALEGRVHATGYINTAFLKGGEEGLLFGNRVGERVLGTVHTHAFHFKLDLDVAGLKNWVVAEDVVFKPVAAPWNPEHWLQRPQLTRQVLGKEDLTAFSLGSPLPRYLYLASNQTNAWGHQRGYRIQIHSPLGIHIPLESDMERALSWGRYQLVVTQRKEEESQSSSIYHQNDIWTPTVTFADFINNETLLGEDLVAWVTASFLHIPHAEDIPNTVTLGNRVGFLLRPYNFFDEDPSIFSPGSVYFEKGQDAGLCSINPVACLPDLAACVPDLPPFSYHGF

SEQ ID NO: 882 - protein, 729 aa, Homo sapiens
MHLKIVLAFLALSLITIFALAYVLLTSPGGSSQPPHCPSVSHRAQPWPHPGQSQLFADLSREELTAVMRFLTQRLGPGLVDAAQAQPSDNCIFSVELQLPPKAAALAHLDRGSPPPAREALAIVLFGGQPQPNVSELVVGPLPHPSYMRDVTVERHGGPLPYHRRPVLRAEFTQMWRHLKEVELPKAPIFLSSTFNYNGSTLAAVHATPRGLRSGDRATWMALYHNISGVGLFLHPVGLELLLDHRALDPAHWTVQQVFYLGHYYADLGQLEREFKSGRLEVVRVPLPPPNGASSLRSRNSPGPLPPLQFSPQGSQYSVQGNLVVSSLWSFTFGHGVFSGLRIFDVRFQGERIAYEVSVQECVSIYGADSPKTMLTRYLDSSFGLGRNSRGLVRGVDCPYQATMVDIHILVGKGAVQLLPGAVCVFEEAQGLPLRRHHNYLQNHFYGGLASSALVVRSVSSVGNYDYIWDFVLYPNGALEGRVHATGYINTAFLKGGEEGLLFGNRVGERVLGTVHTHAFHFKLDLDVAGLKNWVVAEDVVFKPVAAPWNPEHWLQRPQLTRQVLGKEDLTAFSLGSPLPRYLYLASNQTNAWGHQRGYQLVVTQRKEEESQSSSIYHQNDIWTPTVTFADFINNETLLGEDLVAWVTASFLHIPHAEDIPNTVTLGNRVGFLLRPYNFFDEDPSIFSPGSVYFEKGQDAGLCSINPVACLPDLAACVPDLPPFSYHGF

SEQ ID NO: 883 - protein, 763 aa, Homo sapiens
MNQKTILVLLILAVITIFALVCVLLVGRGGDGGEPSQLPHCPSVSPSAQPWTHPGQSQLFADLSREELTAVMRFLTQRLGPGLVDAAQARPSDNCVFSVELQLPPKAAALAHLDRGSPPPAREALAIVFFGRQPQPNVSELVVGPLPHPSYMRDVTVERHGGPLPYHRRPVLFQEYLDIDQMIFNRELPQASGLLHHCCFYKHRGRNLVTMTTAPRGLQSGDRATWFGLYYNISGAGFFLHHVGLELLVNHKALDPARWTIQKVFYQGRYYDSLAQLEAQFEAGLVNVVLIPDNGTGGSWSLKSPVPPGPAPPLQFYPQGPRFSVQGSRVASSLWTFSFGLGAFSGPRIFDVRFQGERLVYEISLQEALAIYGGNSPAAMTTRYVDGGFGMGKYTTPLTRGVDCPYLATYVDWHFLLESQAPKTIRDAFCVFEQNQGLPLRRHHSDLYSHYFGGLAETVLVVRSMSTLLNYDYVWDTVFHPSGAIEIRFYATGYISSAFLFGATGKYGNQVSEHTLGTVHTHSAHFKVDLDVAGLENWVWAEDMVFVPMAVPWSPEHQLQRLQVTRKLLEMEEQAAFLVGSATPRYLYLASNHSNKWGHPRGYRIQMLSFAGEPLPQNSSMARGFSWERYQLAVTQRKEEEPSSSSVFNQNDPWAPTVDFSDFINNETIAGKDLVAWVTAGFLHIPHAEDIPNTVTVGNGVGFFLRPYNFFDEDPSFYSADSIYFRGDQDAGACEVNPLACLPQAAACAPDLPAFSHGGFSHN

SEQ ID NO: 884 - protein, 634 aa, Homo sapiens
MNQKTILVLLILAVITIFALVCVLLVGRGGDGGEPSQLPHCPSVSPSAQPWTHPGQSQLFADLSREELTAVMRFLTQRLGPGLVDAAQARPSDNCVFSVELQLPPKAAALAHLDRGSPPPAREALAIVFFGRQPQPNVSELVVGPLPHPSYMRDVTVERHGGPLPYHRRPVLFQEYLDIDQMIFNRELPQASGLLHHCCFYKHRGRNLVTMTTAPRGLQSGDRATWFGLYYNISGAGFFLHHVGLELLVNHKALDPARWTIQKVFYQGRYYDSLAQLEAQFEAGLVNVVLIPDNGTGGSWSLKSPVPPGPAPPLQFYPQGPRFSVQGSRVASSLWTFSFGLGAFSGPRIFDVRFQGERLVYEISLQEALAIYGGNSPAAMTTRYVDGGFGMGKYTTPLTRGVDCPYLATYVDWHFLLESQAPKTIRDAFCVFEQNQGLPLRRHHSDLYSHYFGGLAETVLVVRSMSTLLNYDYVWDTVFHPSGAIEIRFYATGYISSAFLFGATGKYGNQVSEHTLGTVHTHSAHFKVDLDVAGLENWVWAEDMVFVPMAVPWSPEHQLQRLQVTRKLLEMEEQAAFLVGSATPRYLYLASNHSNKWGHPRGYRIQMLSFAGEPLPQNSSMARGFSWERIWWPG

SEQ ID NO: 885 - protein, 112 aa, Homo sapiens
MVFVPMAVPWSPEHQLQRLQVTRKLLEMEEQAAFLVGSATPRYLYLASNHSNKWGHPRGYRIQMLSFAGEPLPQNSSMARGFSWERYQLAVTQRKEEEPSSSSVFNQNDPWA

SEQ ID NO: 886 - protein, 152 aa, Homo sapiens
MVFVPMAVPWSPEHQLQRLQVTRKLLEMEEQAAFLVGSATPRYLYLASNHSNKWGHPRGYRIQMLSFAGEPLPQNSSMARGFSWERYQLAVTQRKEEEPSSSSVFNQNDPWAPTVDFSDFINNETIAGKDLVAWVTAGFLHIPHAEDIPNTV

SEQ ID NO: 887 - protein, 220 aa, Homo sapiens
MVFVPMAVPWSPEHQLQRLQVTRKLLEMEEQAAFLVGSATPRYLYLASNHSNKWGHPRGYRIQMLSFAGEPLPQNSSMARGFSWERYQLAVTQRKEEEPSSSSVFNQNDPWAPTVDFSDFINNETIAGKDLVAWVTAGFLHIPHAEDIPNTVTVGNGVGFFLRPYNFFDEDPSFYSADSIYFRGDQDAGACEVNPLACLPQAAACAPDLPAFSHGGFSHN

SEQ ID NO: 888 - protein, 220 aa, Homo sapiens; identical to SEQ ID NO: 887

SEQ ID NO: 889 - protein, 144 aa, Homo sapiens
  VARIANT 1: note = misc_feature - Xaa can be any naturally occurring amino acid
XYDYVWDTVFHPSGAIEIRFYATGYISSAFLFGATGKYGNQVSEHTLGTVHTHSAHFKVDLDVAGDPEAAGDGGAGRLPRGKRHPSLPVPGQQPQQQVGSPPGLPHPDAQLCWRAAAPKQLHGERLQLGEVPAGCDPAEGGGAQ

SEQ ID NO: 890 - protein, 164 aa, Homo sapiens
MSVLTPLLLRGLTGSARRLPVPRAKIHSLPPEGKLGIMGKENGIGSRRICNHHRELWEAGKMEPNQCVGWRCGSGAAGLSYRSQVRRPGVPAPATGLEAHSLTTPKGIPLLGLLPRRGNEEGLASGRTAIGNPEAVGSAALFKDGGGGTSAAEAGAAGQRLRRC

SEQ ID NO: 891 - protein, 235 aa, Homo sapiens
MLKCHVFRCEAPAKNIATSLHEICSKIMAERRNARCLVNGLSLDHSKLVDVPFQVEFPAPKNELVQKFQVYYLGNVPVAKPVGVDVINGALESVLSSSSREQWTPSHVSVAPATLTILHQQTEAVLGECRVRFLSFLAVGRDVHTFAFIMAAGPASFCCHMFWCEPNAASLSEAVQAACMLRYQKCLDARSQASTSCLPAPPAESVARRVGWTVRRGVQSLWGSLKPKRLGAHTP

SEQ ID NO: 892 - protein, 87 aa, Homo sapiens
MRVQDTSGTYYWHIPTGTTQWEPPGRASPSQGSSPQEESQLTWTGFAHGEGFEDGEFWKDEPSDEAPMELGLKEPEEGTLTFPAQSL

SEQ ID NO: 893 - protein, 262 aa, Homo sapiens
MRVQDTSGTYYWHIPTGTTQWEPPGRASPSQGSSPQEESQLTWTGFAHGEGFEDGEFWKDEPSDEAPMELGLKEPEEGTLTFPAQSLSPEPLPQEEEKLPPRNTNPGIKCFAVRSLGWVEMTEEELAPGRSSVAVNNCIRQLSYHKNNLHDPMSGGWGEGKDLLLQLEDETLKLVEPQSQALLHAQPIISIRVWGVGRDSGRDFAYVARDKLTQMLKCHVFRCEAPAKNIATSLHEICSKIMAERRNARCLVNGLSLDHSKL

SEQ ID NO: 894 - protein, 451 aa, Homo sapiens
MRVQDTSGTYYWHIPTGTTQWEPPGRASPSQGSSPQEESQLTWTGFAHGEGFEDGEFWKDEPSDEAPMELGLKEPEEGTLTFPAQSLSPEPLPQEEEKLPPRNTNPGIKCFAVRSLGWVEMTEEELAPGRSSVAVNNCIRQLSYHKNNLHDPMSGGWGEGKDLLLQLEDETLKLVEPQSQALLHAQPIISIRVWGVGRDSGRERDFAYVARDKLTQMLKCHVFRCEAPAKNIATSLHEICSKIMAERRNARCLVNGLSLDHSKLVDVPFQVEFPAPKNELVQKFQVYYLGNVPVAKPVGVDVINGALESVLSSSSREQWTPSHVSVAPATLTILHQQTEAVLGECRVRFLSFLAVGRDVHTFAFIMAAGPASFCCHMFWCEPNAASLSEAVQAACMLRYQKCLDARSQASTSCLPAPPAESVARRVGWTVRRGVQSLWGSLKPKRLGAHTP

SEQ ID NO: 895 - protein, 451 aa, Homo sapiens; identical to SEQ ID NO: 894

SEQ ID NO: 896 - protein, 451 aa, Homo sapiens; identical to SEQ ID NO: 894

SEQ ID NO: 897 - protein, 451 aa, Homo sapiens [sequence omitted]

SEQ ID NO: 898 - protein, 451 aa, Homo sapiens [sequence omitted]

SEQ ID NO: 899 - protein, 488 aa, Homo sapiens
MSAMFSQDFFLAIILQDSSADSFWNPNAFETDSDLPAGWMRVQDTSGTYYWHIPTGTTQWEPPGRASPSQGSSPQEESQLTWTGFAHGEGFEDGEFWKDEPSDEAPMELGLKEPEEGTLTFPAQSLSPEPLPQEEEKLPPRNTNPGIKCFAVRSLGWVEMTEEELAPGRSSVAVNNCIRQLSYHKNNLHDPMSGGWGEGKDLLLQLEDETLKLVEPQSQALLHAQPIISIRVWGVGRDSGRDFAYVARDKLTQMLKCHVFRCEAPAKNIATSLHEICSKIMAERRNARCLVNGLSLDHSKLVDVPFQVEFPAPKNELVQKFQVYYLGNVPVAKPVGVDVINGALESVLSSSSREQWTPSHVSVAPATLTILHQQTEAVLGECRVRFLSFLAVGRDVHTFAFIMAAGPASFCCHMFWCEPNAASLSEAVQAACMLRYQKCLDARSQASTSCLPAPPAESVARRVGWTVRRGVQSLWGSLKPKRLGAHTP

SEQ ID NO: 900 - protein, 490 aa, Homo sapiens
MSAMFSQDFFLAIILQDSSADSFWNPNAFETDSDLPAGWMRVQDTSGTYYWHIPTGTTQWEPPGRASPSQGSSPQEESQLTWTGFAHGEGFEDGEFWKDEPSDEAPMELGLKEPEEGTLTFPAQSLSPEPLPQEEEKLPPRNTNPGIKCFAVRSLGWVEMTEEELAPGRSSVAVNNCIRQLSYHKNNLHDPMSGGWGEGKDLLLQLEDETLKLVEPQSQALLHAQPIISIRVWGVGRDSGRERDFAYVARDKLTQMLKCHVFRCEAPAKNIATSLHEICSKIMAERRNARCLVNGLSLDHSKLVDVPFQVEFPAPKNELVQKFQVYYLGNVPVAKPVGVDVINGALESVLSSSSREQWTPSHVSVAPATLTILHQQTEAVLGECRVRFLSFLAVGRDVHTFAFIMAAGPASFCCHMFWCEPNAASLSEAVQAACMLRYQKCLDARSQASTSCLPAPPAESVARRVGWTVRRGVQSLWGSLKPKRLGAHTP

SEQ ID NO: 901 - protein, 708 aa, Homo sapiens
MSVPSSLSQSAINANSHGGPALSLPLPLHAAHNQLLNAKLQATAVGPKDLRSAMGEGGGPEPGPANAKWLKEGQNQLRRAATAHRDQNRNVTLTLAEEASQEPEMAPLGPKGLIHLYSELELSAHNAANRGLRGPGLIISTQEQGPDEGEEKAAGEAEEEEEDDDDEEEEEDLSSPPGLPEPLESVEAPPRPQALTDGPREHSKSASLLFGMRNSAASDEDSSWATLSQGSPSYGSPEDTDSFWNPNAFETDSDLPAGWMRVQDTSGTYYWHIPTGTTQWEPPGRASPSQGSSPQEESQLTWTGFAHGEGFEDGEFWKDEPSDEAPMELGLKEPEEGTLTFPAQSLSPEPLPQEEEKLPPRNTNPGIKCFAVRSLGWVEMTEEELAPGRSSVAVNNCIRQLSYHKNNLHDPMSGGWGEGKDLLLQLEDETLKLVEPQSQALLHAQPIISIRVWGVGRDSGRDFAYVARDKLTQMLKCHVFRCEAPAKNIATSLHEICSKIMAERRNARCLVNGLSLDHSKLVDVPFQVEFPAPKNELVQKFQVYYLGNVPVAKPVGVDVINGALESVLSSSSREQWTPSHVSVAPATLTILHQQTEAVLGECRVRFLSFLAVGRDVHTFAFIMAAGPASFCCHMFWCEPNAASLSEAVQAACMLRYQKCLDARSQASTSCLPAPPAESVARRVGWTVRRGVQSLWGSLKPKRLGAHTP

SEQ ID NO: 902 - protein, 708 aa, Homo sapiens; identical to SEQ ID NO: 901

SEQ ID NO: 903 - protein, 710 aa, Homo sapiens [sequence omitted]

SEQ ID NO: 904 - protein, 710 aa, Homo sapiens
MSVPSSLSQSAINANSHGGPALSLPLPLHAAHNQLLNAKLQATAVGPKDLRSAMGEGGGPEPGPANAKWLKEGQNQLRRAATAHRDQNRNVTLTLAEEASQEPEMAPLGPKGLIHLYSELELSAHNAANRGLRGPGLIISTQEQGPDEGEEKAAGEAEEEEEDDDDEEEEEDLSSPPGLPEPLESVEAPPRPQALTDGPREHSKSASLLFGMRNSAASDEDSSWATLSQGSPSYGSPEDTDSFWNPNAFETDSDLPAGWMRVQDTSGTYYWHIPTGTTQWEPPGRASPSQGSSPQEESQLTWTGFAHGEGFEDGEFWKDEPSDEAPMELGLKEPEEGTLTFPAQSLSPEPLPQEEEKLPPRNTNPGIKCFAVRSLGWVEMTEEELAPGRSSVAVNNCIRQLSYHKNNLHDPMSGGWGEGKDLLLQLEDETLKLVEPQSQALLHAQPIISIRVWGVGRDSGRERDFAYVARDKLTQMLKCHVFRCEAPAKNIATSLHEICSKIMAERRNARCLVNGLSLDHSKLVDVPFQVEFPAPKNELVQKFQVYYLGNVPVAKPVGVDVINGALESVLSSSSREQWTPSHVSVAPATLTILHQQTEAVLGECRVRFLSFLAVGRDVHTFAFIMAAGPASFCCHMFWCEPNAASLSEAVQAACMLRYQKCLDARSQASTSCLPAPPAESVARRVGWTVRRGVQSLWGSLKPKRLGAHTP

SEQ ID NO: 905 - protein, 707 aa, Homo sapiens
MSVPSSLSQSAINANSHGGPALSLPLPLHAAHNQLLNAKLQATAVGPKDLRSAMGEGGGPEPGPANAKWLKEGQNQLRRAATAHRDQNRNVTLTLAEEASQEPEMAPLGPKGLIHLYSELELSAHNAANRGLRGPGLIISTQEQGPDEGEEKAAGEAEEEEEDDDDEEEEEDLSSPPGLPEPLESVEAPPRPQALTDGPREHSKSASLLFGMRNSAASDEDSSWATLSQGSPSYGSPEDTDSFWNPNAFETDSDLPAGWMRVQDTSGTYYWHIPTGTTQWEPPGRASPSQGSSPQEESQLTWTGFAHGEGFEDGEFWKDEPSDEAPMELGLKEPEEGTLTFPAQSLSPEPLPQEEEKLPPRNTNPGIKCFAVRSLGWVEMTEEELAPGRSSVAVNNCIRQLSYHKNNLHDPMSGGWGEGKDLLLQLEDETLKLVEPQSQALLHAQPIISIRVWGVGRDSGRERDFAYVARDKLTQMLKCHVFRCEAPAKNIATSLHEICSKIMAERRNARCLVNGLSLDHSKLVDVPFQVEFPAPKNELVQKFQVYYLGNVPVAKPVGVDVINGALESVLSSSSREQWTPSHVSVAPATLTILHQQTEAVLGECRVRFLSFLAVGRDVHTFAFIMAAGPASFCCHMFWCEPNAASLSEAVQAACMVEQEELVQARPHPPGPSRGRRRKGLVQAWVPSPCSMGTSAVLISLIKSVCTA

SEQ ID NO: 906 - protein, 475 aa, Homo sapiens
MTQMRDSFWNPNAFETDSDLPAGWMRVQDTSGTYYWHIPTGTTQWEPPGRASPSQGSSPQEESQLTWTGFAHGEGFEDGEFWKDEPSDEAPMELGLKEPEEGTLTFPAQSLSPEPLPQEEEKLPPRNTNPGIKCFAVRSLGWVEMTEEELAPGRSSVAVNNCIRQLSYHKNNLHDPMSGGWGEGKDLLLQLEDETLKLVEPQSQALLHAQPIISIRVWGVGRDSGRERDFAYVARDKLTQMLKCHVFRCEAPAKNIATSLHEICSKIMAERRNARCLVNGLSLDHSKLVDVPFQVEFPAPKNELVQKFQVYYLGNVPVAKPVGVDVINGALESVLSSSSREQWTPSHVSVAPATLTILHQQTEAVLGECRVRFLSFLAVGRDVHTFAFIMAAGPASFCCHMFWCEPNAASLSEAVQAACMLRYQKCLDARSQASTSCLPAPPAESVARRVGWTVRRGVQSLWGSLKPKRLGAHTP

SEQ ID NO: 907 - protein, 475 aa, Homo sapiens [sequence omitted]

SEQ ID NO: 908 - protein, 22 aa, Homo sapiens
MSWPRRLLLRYLFPALLLHAVK

SEQ ID NO: 909 - protein, 61 aa, Homo sapiens
MSWPRRLLLRYLFPALLLHEPRPCLHRLSDHLSVRRAPPSHPAPKGRPDHRPARGVGEPAL

SEQ ID NO: 910 - protein, 184 aa, Homo sapiens
MSWPRRLLLRYLFPALLLHGLGEGSALLHPDSRSHPRSLEKSAWRAFKESQCHHMLKHLHNGARITVQMPPTIEGHWVSTGCEVRSGPEFITRSYRFYHNNTFKAYQFYYGSNRCTNPTYTLIIRGKIRLRQASWIIRGGTEADYQLHNVQGHGRHRVRVQSESHEGHPHGCGHSLTAQRLQRE

SEQ ID NO: 911 - protein, 514 aa, Homo sapiens
MSWPRRLLLRYLFPALLLHGLGEGSALLHPDSRSHPRSLEKSAWRAFKESQCHHMLKHLHNGARITVQMPPTIEGHWVSTGCEVRSGPEFITRSYRFYHNNTFKAYQFYYGSNRCTNPTYTLIIRGKIRLRQASWIIRGGTEADYQLHNVQVICHTEAVAEKLGQQVNRTCPGFLADGGPWVQDVAYDLWREENGCECTKAVNFAMHELQLIRVEKQYLHHNLDHLVEELFLGDIHTDATQRMFYRPSSYQPPLQNAKNHDHACIACRIIYRSDEHHPPILPPKADLTIGLHGEWVSQRCEVRPEVLFLTRHFIFHDNNNTWEGHYYHYSDPVCKHPTFSIYARGRYSRGVLSSRVMGGTEFVFKVNHMKVTPMDAATASLLNVFNGNECGAEGSWQVGIQQDVTHTNGCVALGIKLPHTEYEIFKMEQDARGRYLLFNGQRPSDGSSPDRPEKRATSYQMPLVQCASSSPRAEDLAEDSGSSLYGRAPGRHTWSLLLAALACLVPLLHWNIRR

SEQ ID NO: 912 - protein, 94 aa, Homo sapiens
PEDVLPALQLPAPSAECQVEMGFHHVGQDGLQLPTSSDPPALASQSAGITGVSHRPPGRHLSNDLRTTTMPASPVGSSIGQTSTTLPSCPQRQT

SEQ ID NO: 913 - protein, 227 aa, Homo sapiens
  VARIANT 1: note = misc_feature - Xaa can be any naturally occurring amino acid
XDVAYDLWREENGCECTKAVNFAMHELQLIRVEKQYLHHNLDHLVEELFLGDIHTDATQRMFYRPSSYQPPLQNAKCAAESSGSFQILPQDSSEKEQNGLSHWCLSRPGHQKDWALCAHAGPATAGCPSCLWPPAETGRKAGRTSSKTVHACPGEAGTSSFELFYFPNCWSIETKLKISLNAKLSFKPRASAPLETGHRVKIETLSQLVFLSFIQLCCEVQSPLANK

SEQ ID NO: 914 - protein, 223 aa, Homo sapiens
MNKPLLWISVLTSLLEAFAHTDLSGKVFVFPRESVTDHVNLITPLEKPLQNFTLCFRAYSDLSRAYSLFSYNTQGRDNELLVYKERVGEYSLYIGRHKVTSKVIEKFPAPVHICVSWESSSGIAEFWINGTPLVKKGLRQGYFVEAQPKIVLGQEQDSYGGKFDRSQSFVGEIGDLYMWDSVLPPENILSAYQGTPLPANILDWQALNYEIRGYVIIKPLVWV

SEQ ID NO: 915 - protein, 54 aa, Homo sapiens
MRFQQFLFAFFIFIMSLLLISGQRPVNLTMRRKLRKHNCLQRRCMPLHSRVPFP

SEQ ID NO: 916 - protein, 54 aa, Homo sapiens; identical to SEQ ID NO: 915

SEQ ID NO: 917 - protein, 54 aa, Homo sapiens; identical to SEQ ID NO: 915

SEQ ID NO: 918 - protein, 77 aa, Homo sapiens
MNLRLCVQALLLLWLSLTAVCGGSLMPLPDGNGLEDGNVRHLVQPRGSRNGPGPWQGGRRKFRRQRPRLSHKGPMPF

SEQ ID NO: 919 - protein, 158 aa, Homo sapiens
MAATGTAAAAATGRLLLLLLALAANAGTGFAVAEPQIAMFCGKLNMHVNIQTGKWEPDPTGTKSCFETKEEVLQYCQEMYPELQITNVMEANQRVSIDNWCRRDKKQCKSRFVTPFKCLVGEFVSDVLLVPEKCQFFHKERMEVCENHQHWHTVVKEV

SEQ ID NO: 920 - protein, 35 aa, Homo sapiens
MAATGTAAAAATGRLLLLLLVGLTAPALALAGYIE

SEQ ID NO: 921 - protein, 116 aa, Homo sapiens
MAATGTAAAAATGRLLLLLLVGLTAPALALAGYIEALAANAGTGFAVAEPQIAMFCGKLNMHVNIQTGKWEPDPTGTKSCFETKEEVLQYCQEMYPELQITNSGWRCVRITSTGTR

SEQ ID NO: 922 - protein, 763 aa, Homo sapiens
MAATGTAAAAATGRLLLLLLVGLTAPALALAGYIEALAANAGTGFAVAEPQIAMFCGKLNMHVNIQTGKWEPDPTGTKSCFETKEEVLQYCQEMYPELQITNVMEANQRVSIDNWCRRDKKQCKSRFVTPFKCLVGEFVSDVLLVPEKCQFFHKERMEVCENHQHWHTVVKEACLTQGMTLYSYGMLLPCGVDQFHGTEYVCCPQTKIIGSVSKEEEEEDEEEEEEEDEEEDYDVYKSEFPTEADLEDFTEAAVDEDDEDEEEGEEVVEDRDYYYDTFKGDDYNEENPTEPGSDGTMSDKEITHDVKAVCSQEAMTGPCRAVMPRWYFDLSKGKCVRFIYGGCGGNRNNFESEDYCMAVCKAMIPPTPLPTNDVDVYFETSADDNEHARFQKAKEQLEIRHRNRMDRVKKEWEEAELQAKNLPKAERQTLIQHFQAMVKALEKEAASEKQQLVETHLARVEAMLNDRRRMALENYLAALQSDPPRPHRILQALRRYVRAENKDRLHTIRHYQHVLAVDPEKAAQMKSQVMTHLHVIEERRNQSLSLLYKVPYVAQEIQEEIDELLQEQRADMDQFTASISETPVDVRVSSEESEEIPPFHPFHPFPALPENEDTQPELYHPMKKGSGVGEQDGGLIGAEEKVINSKNKVDENMVIDETLDVKEMIFNAERVGGLEEERESVGPLREDFSLSSSALIGLLVIAVAIATVIVISLVMLRKRQYGTISHGIVEVDPMLTPEERHLNKMQNHGYENPTYKYLEQMQI

SEQ ID NO: 923 - protein, 751 aa, Homo sapiens
MAATGTAAAAATGRLLLLLLVGLTAPALALAGYIEALAANAGTGFAVAEPQIAMFCGKLNMHVNIQTGKWEPDPTGTKSCFETKEEVLQYCQEMYPELQITNVMEANQRVSIDNWCRRDKKQCKSRFVTPFKCLVGEFVSDVLLVPEKCQFFHKERMEVCENHQHWHTVVKEACLTQGMTLYSYGMLLPCGVDQFHGTEYVCCPQTKIIGSVSKEEEEEDEEEEEEEDEEEDYDVYKSEFPTEADLEDFTEAAVDEDDEDEEEGEEVVEDRDYYYDTFKGDDYNEENPTEPGSDGTMSDKEITHDVKAVCSQEAMTGPCRAVMPRWYFDLSKGKCVRFIYGGCGGNRNNFESEDYCMAVCKAMIPPTPLPTNDVDVYFETSADDNEHARFQKAKEQLEIRHRNRMDRVKKEWEEAELQAKNLPKAERQTLIQHFQAMVKALEKEAASEKQQLVETHLARVEAMLNDRRRMALENYLAALQSDPPRPHRILQALRRYVRAENKDRLHTIRHYQHVLAVDPEKAAQMKSQVMTHLHVIEERRNQSLSLLYKVPYVAQEIQEEIDELLQEQRADMDQFTASISETPVDVRVSSEESEEIPPFHPFHPFPALPENEGSGVGEQDGGLIGAEEKVINSKNKVDENMVIDETLDVKEMIFNAERVGGLEEERESVGPLREDFSLSSSALIGLLVIAVAIATVIVISLVMLRKRQYGTISHGIVEVDPMLTPEERHLNKMQNHGYENPTYKYLEQMQI

SEQ ID NO: 924 - protein, 695 aa, Homo sapiens
MAATGTAAAAATGRLLLLLLVGLTAPALALAGYIEALAANAGTGFAVAEPQIAMFCGKLNMHVNIQTGKWEPDPTGTKSCFETKEEVLQYCQEMYPELQITNVMEANQRVSIDNWCRRDKKQCKSRFVTPFKCLVGEFVSDVLLVPEKCQFFHKERMEVCENHQHWHTVVKEACLTQGMTLYSYGMLLPCGVDQFHGTEYVCCPQTKIIGSVSKEEEEEDEEEEEEEDEEEDYDVYKSEFPTEADLEDFTEAAVDEDDEDEEEGEEVVEDRDYYYDTFKGDDYNEENPTEPGSDGTMSDKEITHDVKVPPTPLPTNDVDVYFETSADDNEHARFQKAKEQLEIRHRNRMDRVKKEWEEAELQAKNLPKAERQTLIQHFQAMVKALEKEAASEKQQLVETHLARVEAMLNDRRRMALENYLAALQSDPPRPHRILQALRRYVRAENKDRLHTIRHYQHVLAVDPEKAAQMKSQVMTHLHVIEERRNQSLSLLYKVPYVAQEIQEEIDELLQEQRADMDQFTASISETPVDVRVSSEESEEIPPFHPFHPFPALPENEGSGVGEQDGGLIGAEEKVINSKNKVDENMVIDETLDVKEMIFNAERVGGLEEERESVGPLREDFSLSSSALIGLLVIAVAIATVIVISLVMLRKRQYGTISHGIVEVDPMLTPEERHLNKMQNHGYENPTYKYLEQMQI

SEQ ID NO: 925 - protein, 522 aa, Homo sapiens
MAATGTAAAAATGRLLLLLLVGLTAPALALAGYIEALAANAGTGFAVAEPQIAMFCGKLNMHVNIQTGKWEPDPTGTKSCFETKEEVLQYCQEMYPELQITNVMEANQRVSIDNWCRRDKKQCKSRFVTPFKCLVPPTPLPTNDVDVYFETSADDNEHARFQKAKEQLEIRHRNRMDRVKKEWEEAELQAKNLPKAERQTLIQHFQAMVKALEKEAASEKQQLVETHLARVEAMLNDRRRMALENYLAALQSDPPRPHRILQALRRYVRAENKDRLHTIRHYQHVLAVDPEKAAQMKSQVMTHLHVIEERRNQSLSLLYKVPYVAQEIQEEIDELLQEQRADMDQFTASISETPVDVRVSSEESEEIPPFHPFHPFPALPENEGSGVGEQDGGLIGAEEKVINSKNKVDENMVIDETLDVKEMIFNAERVGGLEEERESVGPLREDFSLSSSALIGLLVIAVAIATVIVISLVMLRKRQYGTISHGIVEVDPMLTPEERHLNKMQNHGYENPTYKYLEQMQI

SEQ ID NO: 926 - protein, 159 aa, Homo sapiens [sequence omitted]

SEQ ID NO: 927 - protein, 39 aa, Homo sapiens
MAATGTAAAAATGRLLLLLLVGLTAPALALAGYIEWVNL

SEQ ID NO: 928 - protein, 761 aa, Homo sapiens
MLRAPGELPRQAARCSLCRLGPGRGRAFFKWRCLPASVDRGNPLWALAANAGTGFAVAEPQIAMFCGKLNMHVNIQTGKWEPDPTGTKSCFETKEEVLQYCQEMYPELQITNVMEANQRVSIDNWCRRDKKQCKSRFVTPFKCLVGEFVSDVLLVPEKCQFFHKERMEVCENHQHWHTVVKEACLTQGMTLYSYGMLLPCGVDQFHGTEYVCCPQTKIIGSVSKEEEEEDEEEEEEEDEEEDYDVYKSEFPTEADLEDFTEAAVDEDDEDEEEGEEVVEDRDYYYDTFKGDDYNEENPTEPGSDGTMSDKEITHDVKAVCSQEAMTGPCRAVMPRWYFDLSKGKCVRFIYGGCGGNRNNFESEDYCMAVCKAMIPPTPLPTNDVDVYFETSADDNEHARFQKAKEQLEIRHRNRMDRVKKEWEEAELQAKNLPKAERQTLIQHFQAMVKALEKEAASEKQQLVETHLARVEAMLNDRRRMALENYLAALQSDPPRPHRILQALRRYVRAENKDRLHTIRHYQHVLAVDPEKAAQMKSQVMTHLHVIEERRNQSLSLLYKVPYVAQEIQEEIDELLQEQRADMDQFTASISETPVDVRVSSEESEEIPPFHPFHPFPALPENEGSGVGEQDGGLIGAEEKVINSKNKVDENMVIDETLDVKEMIFNAERVGGLEEERESVGPLREDFSLSSSALIGLLVIAVAIATVIVISLVMLRKRQYGTISHGIVEVDPMLTPEERHLNKMQNHGYENPTYKYLEQMQI

SEQ ID NO: 929 - protein, 267 aa, Homo sapiens
MKAAVLTLAVLFLTGSQARHFWQQDEPPQSPWDRVKDLATVYVDVLKDSGRDYVSQFEGSALGKQLNLKLLDNWDSVTSTFSKLREQLGPVTQEFWDNLEKETEGLRQEMSKDLEEVKAKVQPYLDDFQKKWQEEMELYRQKVEPLRAELQEGARQKLHELQEKLSPLGEEMRDRARAHVDALRTHLAPYSDELRQRLAARLEALKENGGARLAEYHAKATEHLSTLSEKAKPALEDLRQGLLPVLESFKVSFLSALEEYTKKLNTQ

SEQ ID NO: 930 - protein, 267 aa, Homo sapiens; identical to SEQ ID NO: 929

SEQ ID NO: 931 - protein, 267 aa, Homo sapiens; identical to SEQ ID NO: 929

SEQ ID NO: 932 - protein, 267 aa, Homo sapiens; identical to SEQ ID NO: 929

SEQ ID NO: 933 - protein, 245 aa, Homo sapiens
MSGGARGFCMLKAPHSARPFFSSRSPTALQDESCGADLGRALPDGLKLLDNWDSVTSTFSKLREQLGPVTQEFWDNLEKETEGLRQEMSKDLEEVKAKVQPYLDDFQKKWQEEMELYRQKVEPLRAELQEGARQKLHELQEKLSPLGEEMRDRARAHVDALRTHLAPYSDELRQRLAARLEALKENGGARLAEYHAKATEHLSTLSEKAKPALEDLRQGLLPVLESFKVSFLSALEEYTKKLNTQ

SEQ ID NO: 934 - protein, 133 aa, Homo sapiens
MCEQHPKRPGLQLWRGREPGWNGQQAALPTVTNMKLLAATVLLLTICSLEGALVRRQAKEPCVESLVSQYFQTVTDYGKDLMEKVKSPELQAEAKSYFEKSKEQLTPLIKKAGTELVNFLSYFVELGTQPATQ

SEQ ID NO: 935 - protein, 52 aa, Homo sapiens
MEKVKSPELQAEAKSYFEKSKEQLTPLIKKAGTELVNFLSYFVELGTQPATQ

SEQ ID NO: 936 - protein, 52 aa, Homo sapiens; identical to SEQ ID NO: 935

SEQ ID NO: 937 - protein, 66 aa, Homo sapiens
MKLLAATVLLLTICSLEGALVRRQAKEPCVESLVSQYFQTVTDYGKDLMEKVKSPELQAEAKSYFE

SEQ ID NO: 938 - protein, 95 aa, Homo sapiens
MKLLAATVLLLTICSLEGALVRRQAKEPCVESLVSQYFQTVTDYGKDLMEKVKSPELQAEAKSYFEKSKEQLTPLIKKAGTELVNFLSYFVELGT

SEQ ID NO: 939 - protein, 100 aa, Homo sapiens
MKLLAATVLLLTICSLEGALVRRQAKEPCVESLVSQYFQTVTDYGKDLMEKVKSPELQAEAKSYFEKSKEQLTPLIKKAGTELVNFLSYFVELGTQPATQ

SEQ ID NO: 940 - protein, 82 aa, Homo sapiens
MKLLAATVLLLTICSLEGALVRRQAKEPCVESLVSQYFQTVTDYGKDLMEKVKSPELQAEAKSYFENFLSYFVELGTQPATQ

SEQ ID NO: 941 - protein, 72 aa, Homo sapiens
MKLLAATVLLLTICSLEGLATKGLKRKIIPSLKPRKPIQRSGWIPFWGGGRELGWVLAEVWQEARIHCCGPS

SEQ ID NO: 942 - protein, 27 aa, Homo sapiens
MKLLAATVLLLTICSLEGLTLKSQRSS

SEQ ID NO: 943 - protein, 396 aa, Homo sapiens
MFLKAVVLTLALVAVAGARAEVSADQVATVMWDYFSQLSNNAKEAVEHLQKSELTQQLNALFQDKLGEVNTYAGDLQKKLVPFATELHERLAKDSEKLKEEIGKELEELRARLLPHANEVSQKIGDNLRELQQRLEPYADQLRTQVSTQAEQLRRQLTPYAQRMERVLRENADSLQASLRPHADELKAKIDQNVEELKGRLTPYADEFKVKIDQTVEELRRSLAPYAQDTQEKLNHQLEGLTFQMKKNAEELKARISASAEELRQRLAPLAEDVRGNLRGNTEGLQKSLAELGGHLDQQVEEFRRRVEPYGENFNKALVQQMEQLRQKLGPHAGDVEGHLSFLEKDLRDKVNSFFSTFKEKESQDKTLSLPELEQQQEQQQEQQQEQVQMLAPLES

SEQ ID NO: 944 - protein, 162 aa, Homo sapiens
MASMAAVLTWALALLSAFSATQARKGFWDYFSQTSGDKGRVEQIHQQKMAREPATLKDSLEQDLNNMNKFLEKLRPLSGSEAPRLPQDPVGMRRQLQEELEEVKARLQPYMAEAHELVGWNLEGLRQQLKPYTMDLMEQVALRVQELQEQLRVVGEDTKAQL

SEQ ID NO: 945 - protein, 366 aa, Homo sapiens
MASMAAVLTWALALLSAFSATQARKGFWDYFSQTSGDKGRVEQIHQQKMAREPATLKDSLEQDLNNMNKFLEKLRPLSGSEAPRLPQDPVGMRRQLQEELEEVKARLQPYMAEAHELVGWNLEGLRQQLKPYTMDLMEQVALRVQELQEQLRVVGEDTKAQLLGGVDEAWALLQGLQSRVVHHTGRFKELFHPYAESLVSGIGRHVQELHRSVAPHAPASPARLSRCVQVLSRKLTLKAKALHARIQQNLDQLREELSRAFAGTGTEEGAGPDPQMLSEEVRQRLQAFRQDTYLQIAAFTRAIDQETEEVQQQLAPPPPGHSAFAPEFQQTDSGKVLSKLQARLDDLWEDITHSLHDQGHSHLGDP

SEQ ID NO: 946 - protein, 366 aa, Homo sapiens; identical to SEQ ID NO: 945

SEQ ID NO: 947 - protein, 4563 aa, Homo sapiens
MDPPRPALLALLALPALLLLLLAGARAEEEMLENVSLVCPKDATRFKHLRKYTYNYEAESSSGVPGTADSRSATRINCKVELEVPQLCSFILKTSQCTLKEVYGFNPEGKALLKKTKNSEEFAAAMSRYELKLAIPEGKQVFLYPEKDEPTYILNIKRGIISALLVPPETEEAKQVLFLDTVYGNCSTHFTVKTRKGNVATEISTERDLGQCDRFKPIRTGISPLALIKGMTRPLSTLISSSQSCQYTLDAKRKHVAEAICKEQHLFLPFSYKNKYGMVAQVTQTLKLEDTPKINSRFFGEGTKKMGLAFESTKSTSPPKQAEAVLKTLQELKKLTISEQNIQRANLFNKLVTELRGLSDEAVTSLLPQLIEVSSPITLQALVQCGQPQCSTHILQWLKRVHANPLLIDVVTYLVALIPEPSAQQLREIFNMARDQRSRATLYALSHAVNNYHKTNPTGTQELLDIANYLMEQIQDDCTGDEDYTYLILRVIGNMGQTMEQLTPELKSSILKCVQSTKPSLMIQKAAIQALRKMEPKDKDQEVLLQTFLDDASPGDKRLAAYLMLMRSPSQADINKIVQILPWEQNEQVKNFVASHIANILNSEELDIQDLKKLVKEALKESQLPTVMDFRKFSRNYQLYKSVSLPSLDPASAKIEGNLIFDPNNYLPKESMLKTTLTAFGFASADLIEIGLEGKGFEPTLEALFGKQGFFPDSVNKALYWVNGQVPDGVSKVLVDHFGYTKDDKHEQDMVNGIMLSVEKLIKDLKSKEVPEARAYLRILGEELGFASLHDLQLLGKLLLMGARTLQGIPQMIGEVIRKGSKNDFFLHYIFMENAFELPTGAGLQLQISSSGVIAPGAKAGVKLEVANMQAELVAKPSVSVEFVTNMGIIIPDFARSGVQMNTNFFHESGLEAHVALKAGKLKFIIPSPKRPVKLLSGGNTLHLVSTTKTEVIPPLIENRQSWSVCKQVFPGLNYCTSGAYSNASSTDSASYYPLTGDTRLELELRPTGEIEQYSVSATYELQREDRALVDTLKFVTQAEGAKQTEATMTFKYNRQSMTLSSEVQIPDFDVDLGTILRVNDESTEGKTSYRLTLDIQNKKITEVALMGHLSCDTKEERKIKGVISIPRLQAEARSEILAHWSPAKLLLQMDSSATAYGSTVSKRVAWHYDEEKIEFEWNTGTNVDTKKMTSNFPVDLSDYPKSLHMYANRLLDHRVPQTDMTFRHVGSKLIVAMSSWLQKASGSLPYTQTLQDHLNSLKEFNLQNMGLPDFHIPENLFLKSDGRVKYTLNKNSLKIEIPLPFGGKSSRDLKMLETVRTPALHFKSVGFHLPSREFQVPTFTIPKLYQLQVPLLGVLDLSTNVYSNLYNWSASYSGGNTSTDHFSLRARYHMKADSVVDLLSYNVQGSGETTYDHKNTFTLSCDGSLRHKFLDSNIKFSHVEKLGNNPVSKGLLIFDASSSWGPQMSASVHLDSKKKQHLFVKEVKIDGQFRVSSFYAKGTYGLSCQRDPNTGRLNGESNLRFNSSYLQGTNQITGRYEDGTLSLTSTSDLQSGIIKNTASLKYENYELTLKSDTNGKYKNFATSNKMDMTFSKQNALLRSEYQADYESLRFFSLLSGSLNSHGLELNADILGTDKINSGAHKATLRIGQDGISTSATTNLKCSLLVLENELNAELGLSGASMKLTTNGRFREHNAKFSLDGKAALTELSLGSAYQAMILGVDSKNIFNFKVSQEGLKLSNDMMGSYAEMKFDHTNSLNIAGLSLDFSSKLDNIYSSDKFYKQTVNLQLQPYSLVTTLNSDLKYNALDLTNNGKLRLEPLKLHVAGNLKGAYQNNEIKHIYAISSAALSASYKADTVAKVQGVEFSHRLNTDIAGLASAIDMSTNYNSDSLHFSNVFRSVMAPFTMTIDAHTNGNGKLALWGEHTGQLYSKFLLKAEPLAFTFSHDYKGSTSHHLVSRKSISAALEHKVSALLTPAEQTGTWKLKTQFNNNEYSQDLDAYNTKDKIGVELTGRTLADLTLLDSPIKVPLLLSEPINIIDALEMRDAVEKPQEFTIVAFVKYDKNQDVHSINLPFFETLQEYFERNRQTIIVVLENVQRNLKHINIDQFVRKYRAALGKLPQQANDYLNSFNWERQVSHAKEKLTALTKKYRITENDIQIALDDAKINFNEKLSQLQTYMIQFDQYIKDSYDLHDLKIAIANIIDEIIEKLKSLDEHYHIRVNLVKTIHDLHLFIENIDFNKSGSSTASWIQNVDTKYQIRIQIQEKLQQLKRHIQNIDIQHLAGKLKQHIEAIDVRVLLDQLGTTISFERINDILEHVKHFVINLIGDFEVAEKINAFRAKVHELIERYEVDQQIQVLMDKLVELAHQYKLKETIQKLSNVLQQVKIKDYFEKLVGFIDDAVKKLNELSFKTFIEDVNKFLDMLIKKLKSFDYHQFVDETNDKIREVTQRLNGEIQALELPQKAEALKLFLEETKATVAVYLESLQDTKITLIINWLQEALSSASLAHMKAKFRETLEDTRDRMYQMDIQQELQRYLSLVGQVYSTLVTYISDWWTLAAKNLTDFAEQYSIQDWAKRMKALVEQGFTVPEIKTILGTMPAFEVSLQALQKATFQTPDFIVPLTDLRIPSVQINFKDLKNIKIPSRFSTPEFTILNTFHIPSFTIDFVEMKVKIIRTIDQMLNSELQWPVPDIYLRDLKVEDIPLARITLPDFRLPEIAIPEFIIPTLNLNDFQVPDLHIPEFQLPHISHTIEVPTFGKLYSILKIQSPLFTLDANADIGNGTTSANEAGIAASITAKGESKLEVLNFDFQANAQLSNPKINPLALKESVKFSSKYLRTEHGSEMLFFGNAIEGKSNTVASLHTEKNTLELSNGVIVKINNQLTLDSNTKYFHKLNIPKLDFSSQADLRNEIKTLLKAGHIAWTSSGKGSWKWACPRFSDEGTHESQISFTIEGPLTSFGLSNKINSKHLRVNQNLVYESGSLNFSKLEIQSQVDSQHVGHSVLTAKGMALFGEGKAEFTGRHDAHLNGKVIGTLKNSLFFSAQPFEITASTNNEGNLKVRFPLRLTGKIDFLNNYALFLSPSAQQASWQVSARFNQYKYNQNFSAGNNENIMEAHVGINGEANLDFLNIPLTIPEMRLPYTIITTPPLKDFSLWEKTGLKEFLKTTKQSFDLSVKAQYKKNKHRHSITNPLAVLCEFISQSIKSFDRHFEKNRNNALDFVTKSYNETKIKFDKYKAEKSHDELPRTFQIPGYTVPVVNVEVSPFTIEMSAFGYVFPKAVSMPSFSILGSDVRVPSYTLILPSLELPVLHVPRNLKLSLPDFKELCTISHIFIPAMGNITYDFSFKSSVITLNTNAELFNQSDIVAHLLSSSSSVIDALQYKLEGTTRLTRKRGLKLATALSLSNKFVEGSHNSTVSLTTKNMEVSVATTTKAQIPILRMNFKQELNGNTKSKPTVSSSMEFKYDFNSSMLYSTAKGAVDHKLSLESLTSYFSIESSTKGDVKGSVLSREYSGTIASEANTYLNSKSTRSSVKLQGTSKIDDIWNLEVKENFAGEATLQRIYSLWEHSTKNHLQLEGLFFTNGEHTSKATLELSPWQMSALVQVHASQPSSFHDFPDLGQEVALNANTKNQKIRWKNEVRIHSGSFQSQVELSNDQEKAHLDIAGSLEGHLRFLKNIILPVYDKSLWDFLKLDVTTSIGRRQHLRVSTAFVYTKNPNGYSFSIPVKVLADKFIIPGLKLNDLNSVLVMPTFHVPFTDLQVPSCKLDFREIQIYKKLRTSSFALNLPTLPEVKFPEVDVLTKYSQPEDSLIPFFEITVPESQLTVSQFTLPKSVSDGIAALDLNAVANKIADFELPTIIVPEQTIEIPSIKFSVPAGIVIPSFQALTARFEVDSPVYNATWSASLKNKADYVETVLDSTCSSTVQFLEYELNVLGTHKIEDGTLASKTKGTFAHRDFSAEYEEDGKYEGLQEWEGKAHLNIKSPAFTDLHLRYQKDKKGISTSAASPAVGTVGMDMDEDDDFSKWNFYYSPQSSPDKKLTIFKTELRVRESDEETQIKVNWEEEAASGLLTSLKDNVPKATGVLYDYVNKYHWEHTGLTLREVSSKLRRNLQNNAEWVYQGAIRQIDDIDVRFQKAASGTTGTYQEWKDKAQNLYQELLTQEGQASFQGLKDNVFDGLVRVTQEFHMKVKHLIDSLIDFLNFPRFQFPGKPGIYTREELCTMFIREVGTVLSQVYSKVHNGSEILFSYFQDLVITLPFELRKHKLIDVISMYRELLKDLSKEAQEVFKAIQSLKTTEVLRNLQDLLQFIFQLIEDNIKQLKEMKFTYLINYIQDEINTIFSDYIPYVFKLLKENLCLNLHKFNEFIQNELQEASQELQQIHQYIMALREEYFDPSIVGWTVKYYELEEKIVSLIKNLLVALKDFHSEYIVSASNFTSQLSSQVEQFLHRNIQEYLSILTDPDGKGKEKIAELSATAQEIIKSQAIATKKIISDYHQQFRYKLQDFSDQLSDYYEKFIAESKRLIDLSIQNYHTFLIYITELLKKLQSTTVMNPYMKLAPGELTIIL

SEQ ID NO: 948 - protein, 828 aa, Homo sapiens
MDPPRPALLALLALPALLLLLLAGARAEEEMLENVSLVCPKDATRFKHLRKYTYNYEAESSSGVPGTADSRSATRINCKVELEVPQLCSFILKTSQCTLKEVYGFNPEGKALLKKTKNSEEFAAAMSRYELKLAIPEGKQVFLYPEKDEPTYILNIKRGIISALLVPPETEEAKQVLFLDTVYGNCSTHFTVKTRKGNVATEISTERDLGQCDRFKPIRTGISPLALIKGMTRPLSTLISSSQSCQYTLDAKRKHVAEAICKEQHLFLPFSYKNKYGMVAQVTQTLKLEDTPKINSRFFGEGTKKMGLAFESTKSTSPPKQAEAVLKTLQELKKLTISEQNIQRANLFNKLVTELRGLSDEAVTSLLPQLIEVSSPITLQALVQCGQPQCSTHILQWLKRVHANPLLIDVVTYLVALIPEPSAQQLREIFNMARDQRSRATLYALSHAVNNYHKTNPTGTQELLDIANYLMEQIQDDCTGDEDYTYLILRVIGNMGQTMEQLTPELKSSILKCVQSTKPSLMIQKAAIQALRKMEPKDKDQEVLLQTFLDDASPGDKRLAAYLMLMRSPSQADINKIVQILPWEQNEQVKNFVASHIANILNSEELDIQDLKKLVKEALKESQLPTVMDFRKFSRNYQLYKSVSLPSLDPASAKIEGNLIFDPNNYLPKESMLKTTLTAFGFASADLIEIGLEGKGFEPTLEALFGKQGFFPDSVNKALYWVNGQVPDGVSKVLVDHFGYTKDDKHEQDMVNGIMLSVEKLIKDLKSKEVPEARAYLRILGEELGFASLHDLQLLGKLLLMDRPDSLTIPAAQARKDACTFFRDGGLP

SEQ ID NO: 949 - protein, 54 aa, Homo sapiens
MRLFLSLPVLVVVLSIVLEGPAPAQGTPDVSSALDKLKEFGNTLEDKARELISR

SEQ ID NO: 950 - protein, 83 aa, Homo sapiens
MRLFLSLPVLVVVLSIVLEGPAPAQGTPDVSSALDKLKEFGNTLEDKARELISRIKQSELSAKMREDDISPCCPGWSRTPDLK

SEQ ID NO: 951 - protein, 77 aa, Homo sapiens
MRLFLSLPVLVVVLSIVLEGPAPAQGTPDVSSALDKLKEFGNTLEDKARELISRIKQSELSAKMREWFSETFQKVKE

SEQ ID NO: 952 - protein, 83 aa, Homo sapiens
MRLFLSLPVLVVVLSIVLEGPAPAQGTPDVSSALDKLKEFGNTLEDKARELISRIKQSELSAKMREWFSETFQKVKEKLKIDS

SEQ ID NO: 953 - protein, 83 aa, Homo sapiens; identical to SEQ ID NO: 952

SEQ ID NO: 954 - protein, 92 aa, Homo sapiens
MRLFLSLPVLVVVLSIVLEGPAPAQGTPDVSSALDKLKEFGNTLEDKARELISRIKQSELSAKMRLEPFPGHGRAGGVVFRDISESEGETQD

SEQ ID NO: 955 - protein, 129 aa, Homo sapiens
MRLFLSLPVLVVVLSIVLEGPAPAQGTPDVSSALDKLKEFGNTLEDKARELISRIKQSELSAKMRLEPFPGHGRAGVCFWVEPWQMVQDEQIEKKTSPGEADNIPLVTQLDLKGVVFRDISESEGETQD

SEQ ID NO: 956 - protein, 29 aa, Homo sapiens
MRLFLSLPVLVVVLSIVLEGSGFQRHFRK

SEQ ID NO: 957 - protein, 39 aa, Homo sapiens
MRLFLSLPVLVVVLSIVLEGSPRLSPAGAKSAQESTSNR

SEQ ID NO: 958 - protein, 87 aa, Homo sapiens
MGTRLLPALFLVLLVLGFEVQGTQQPQQDEMPSPTFLTQVKESLSSYWESAKTAAQNLDLYSKSTAAMSTYTGIFTDQVLSVLKGEE

SEQ ID NO: 959 - protein, 72 aa, Homo sapiens
MGTRLLPALFLVLLVLGFEVQGTQQPQQDEMPSPTFLTQVKESLSSYWESAKTAAQNLYEKTYLPAVDEKLR

SEQ ID NO: 960 - protein, 101 aa, Homo sapiens
MGTRLLPALFLVLLVLGFEVQGTQQPQQDEMPSPTFLTQVKESLSSYWESAKTAAQNLYEKTYLPAVDEKLRDLYSKSTAAMSTYTGIFTDQVLSVLKGEE

SEQ ID NO: 961 - protein, 101 aa, Homo sapiens; identical to SEQ ID NO: 960

SEQ ID NO: 962 - protein, 47 aa, Homo sapiens
MGTRLLPALFLVLLVLGFGEGISLQLLGVSKDSRPEPVREDIPARCR

SEQ ID NO: 963 - protein, 117 aa, Homo sapiens
MGTWGAPHRTLPCRNRGAMQPRVLLVVALLALLASARASEAEDASLLSFMQGYMKHATKTAKDALSSVQESQVAQQARGWVTDGFSSLKDYWSTVKDKFSEFWDLDPEVRPTSAVAA

SEQ ID NO: 964 - protein, 117 aa, Homo sapiens; identical to SEQ ID NO: 963

SEQ ID NO: 965 - protein, 55 aa, Homo sapiens
MQPRVLLVVALLALLASARASEAEDASLLSFMQGYMKHATKTAKDALSSVQESQV

SEQ ID NO: 966 - protein, 99 aa, Homo sapiens
MQPRVLLVVALLALLASARASEAEDASLLSFMQGYMKHATKTAKDALSSVQESQVAQQARGWVTDGFSSLKDYWSTVKDKFSEFWDLDPEVRPTSAVAA

SEQ ID NO: 967 - protein, 73 aa, Homo sapiens
MSLLRNRLQALPALCLCVLVLACIGACQPEAQEGTLSPPPKLKMSRWSLVRGRMKELLETVVNRTRDGWQWFW

SEQ ID NO: 968 - protein, 127 aa, Homo sapiens
MSLLRNRLQALPALCLCVLVLACIGACQPEAQEGTLSPPPKLKMSRWSLVRGRMKELLETVVNRTRDGWQWFWSPSTFRGFMQTYYDDHLRDLGPLTKAWFLESKDSLLKKTHSLCPRLVCGDKDQG

SEQ ID NO: 969 - protein, 178 aa, Homo sapiens
MSLLRNRLQALPALCLCVLVLACIGACQPEAQEGTLSPPPKLKMSRWSLVRGRMKELLETVVNRTRDGWQWFWSLDTMGTRLLPALFLVLLVLGFEVQGTQQPQQDEMPSPTFLTQVKESLSSYWESAKTAAQNLYEKTYLPAVDEKLRDLYSKSTAAMSTYTGIFTDQVLSVLKGEE

SEQ ID NO: 970 - protein, 127 aa, Homo sapiens; identical to SEQ ID NO: 968

SEQ ID NO: 971 - protein, 215 aa, Homo sapiens
MFKQLSCISLPSSCDYSSRSLLQPPSPKMVMLLLLLSALAGLFGAAEGQAFHLGKCPNPPVQENFDVNKYLGRWYEIEKIPTTFENGRCIQANYSLMENGKIKVLNQELRADGTVNQIEGEATPVNLTEPAKLEVKFSWFMPSAPYWILATDYENYALVYSCTCIIQLFHVDFAWILARNPNLPPETVDSLKNILTSNNIDVKKMTVTDQVNCPK

SEQ ID NO: 972 - protein, 108 aa, Homo sapiens
MVMLLLLLSALAGLFGAAEGQAFHLGKCPNPPVQENFDVNKTESHFVTQGGVQHHHLGSLQPPPPGFKQFSCLSLPSSWDYSISEDGTKLRRSQQPLRMDAASRPTTH

SEQ ID NO: 973 - protein, 149 aa, Homo sapiens
MVMLLLLLSALAGLFGAAEGQAFHLGKCPNPPVQENFDVNKYLGRWYEIEKIPTTFENGRCIQANYSLMENGKIKVLNQELRADGTVNQIEGEATPVNLTEPAKLEVKFSWFMPSAPYWILATDYENYALVYSCTCIIQLFHVDFAWIL

SEQ ID NO: 974 - protein, 189 aa, Homo sapiens
MVMLLLLLSALAGLFGAAEGQAFHLGKCPNPPVQENFDVNKYLGRWYEIEKIPTTFENGRCIQANYSLMENGKIKVLNQELRADGTVNQIEGEATPVNLTEPAKLEVKFSWFMPSAPYWILATDYENYALVYSCTCIIQLFHVDFAWILARNPNLPPETVDSLKNILTSNNIDVKKMTVTDQVNCPKLS

SEQ ID NO: 975 - protein, 216 aa, Homo sapiens
MKVLWAALLVTFLAGCQAKVEQAVETEPEPELRQQTEWQSGQRWELALGRFWDYLRWVQTLSEQVQEELLSSQVTQELRALMDETMKELKAYKSELEEQLTPVAEETRARLSKELQAAQARLGADMEDVCGRLVQYRGEVQAMLGQSTEELRVRLASHLRKLRKRLLRDADDLQKRLAVYQAGAREGAERGLSAIRERLGPLVEQGRVRAATVGSL

SEQ ID NO: 976 - protein, 219 aa, Homo sapiens
MKVLWAALLVTFLAGCQAKVEQAVETEPEPELRQQTEWQSGQRWELALGRFWDYLRWVQTLSEQVQEELLSSQVTQELRALMDETMKELKAYKSELEEQLTPVAEETRARLSKELQAAQARLGADMEDVCGRLVQYRGEVQAMLGQSTEELRVRLASHLRKLRKRLLRDADDLQKRLAVYQAGAREGAERGLSAIRERLGPLVEQGRVRAATVGSLAGQ

SEQ ID NO: 977 - protein, 317 aa, Homo sapiens [sequence omitted]

SEQ ID NO: 978 - protein, 269 aa, Homo sapiens
MSSGASRKSWDPGNPWPPDWPITGRKMKVLWAALLVTFLAGCQAKVEQAVETEPEPELRQQTEWQSGQRWELALGRFWDYLRWVQTLSEQVQEELLSSQVTQELRALMDETMKELKAYKSELEEQLTPVAEETRARLSKELQAAQARLGADMEDVCGRLVQYRGEVQAMLGQSTEELRVRLASHLRKLRKRLLRDADDLQKRLAVYQAGAREGAERGLSAIRERLGPLVEQGRVRAATVGSLAGQPLQERAQAWGERLRARMEEMGSRT

SEQ ID NO: 979 - protein, 326 aa, Homo sapiens
MTGLCGYSAPDMRGLRLIMIPVELLLCYLLLHPVDATSYGKQTNVLMHFPLSLESQTPSSDPLSCQFLHPKSLPGFSHMAPLPKFLVSLALRNALEEAGCQADVWALQLQLYRQGGVNATQVLIQHLRGLQKGRSTERNVSVEALASALQLLAREQQSTGRVGRSLPTEDCENEKEQAVHNVVQLLPGVGTFYNLGTALYYATQNCLGKARERGRDGAIDLGYDLLMTMAGMSGGPMGLAISAALKPALRSGVQQLIQYYQDQKDANISQPETTKEGLRAISDVSDLEETTTLASFISEVVSSAPYWGWAIIKSYDLDPGAGSLEI

SEQ ID NO: 980 - protein, 181 aa, Homo sapiens
MISPVLILFSSFLCHVAIAGRTCPKPDDLPFSTVVPLKTFYEPGEEITYSCKPGYVSRGGMRKFICPLTGLWPINTLKCTPRVCPFAGILENGAVRYTTFEYPNTISFSCNTGFYLNGADSAKCTEEGKWSPELPVCAPIICPPPSIPTFATLRVYKPSAGNNSLYRDTAVFECLPQHAMF

SEQ ID NO: 981 - protein, 345 aa, Homo sapiens
MISPVLILFSSFLCHVAIAGRTCPKPDDLPFSTVVPLKTFYEPGEEITYSCKPGYVSRGGMRKFICPLTGLWPINTLKCTPRVCPFAGILENGAVRYTTFEYPNTISFSCNTGFYLNGADSAKCTEEGKWSPELPVCAPIICPPPSIPTFATLRVYKPSAGNNSLYRDTAVFECLPQHAMFGNDTITCTTHGNWTKLPECREVKCPFPSRPDNGFVNYPAKPTLYYKDKATFGCHDGYSLDGPEEIECTKLGNWSAMPSCKASCKVPVKKATVVYQGERVKIQEKFKNGMLHGDKVSFFCKNKEKKCSYTEDAQCIDGTIEVPKCFKEHSSLAFWKTDASDVKPC

SEQ ID NO: 982 - protein, 200 aa, Homo sapiens
MRKFICPLTGLWPINTLKCTPRVCPFAGILENGAVRYTTFEYPNTISFSCNTGFYLNGADSAKCTEEGKWSPELPVCAPIICPPPSIPTFATLRVYKPSAGNNSLYRDTAVFECLPQHAMFGNDTITCTTHGNWTKLPECREVKCPFPSRPDNGFVNYPAKPTLYYKDKATFGCHDGYSLDGPEEIECTKLGNWSAMPSC

SEQ ID NO: 983 - protein, 104 aa, Homo sapiens
  VARIANT 1: note = misc_feature - Xaa can be any naturally occurring amino acid
XQHAMFGNDTITCTTHGNWTKLPECREVKCPFPSRPDNGFVNYPAKPTLYYKDKATFGCHDGYSLDGPEEIECTKLGNWSAMPSCKEHSSLAFWKTDASDVKPC

SEQ ID NO: 984 - protein, 160 aa, Homo sapiens
MEGAALLRVSVLCIWMSALFLGVGVRAEEAGARVQQNVPSGTDTGDPQSKPLGDWAAGTMDPESSIFIEDAIKYFKEKVSTQNLLLLLTDNEAWNGFVAAAELPRNEADELRKALDNLARQMIMKDKNWHDKGQQYRNWFLKEFPRLKSELEDNIRRLRA

SEQ ID NO: 985 - protein, 398 aa, Homo sapiens
MEGAALLRVSVLCIWMSALFLGVGVRAEEAGARVQQNVPSGTDTGDPQSKPLGDWAAGTMDPESSIFIEDAIKYFKEKVSTQNLLLLLTDNEAWNGFVAAAELPRNEADELRKALDNLARQMIMKDKNWHDKGQQYRNWFLKEFPRLKSELEDNIRRLRALADGVQKVHKGTTIANVVSGSLSISSGILTLVGMGLAPFTEGGSLVLLEPGMELGITAALTGITSSTMDYGKKWWTQAQAHDLVIKSLDKLKEVREFLGENISNFLSLAGNTYQLTRGIGKDIRALRRARANLQSVPHASASRPRVTEPISAESGEQVERVNEPSILEMSRGVKLTDVAPVSFFLVLDVVYLVYESKHLHEGAKSETAEELKKVAQELEEKLNILNNNYKILQADQEL

SEQ ID NO: 986 - protein, 398 aa, Homo sapiens; identical to SEQ ID NO: 985

SEQ ID NO: 987 - protein, 398 aa, Homo sapiens; identical to SEQ ID NO: 985

SEQ ID NO: 988 - protein, 141 aa, Homo sapiens
MEGAALLRVSVLCIWMSALFLGVGVRAEEAGARVQQNVPSGTDTGDPQSKPLGDWAAGTMDPGPAGSRGDSGEPCTLRPACRGQRQHGGASRISAEGPAPMPRRRTPSTAHLRVPKTSRRNLLCMRAVSLLRMPLSISRKK

SEQ ID NO: 989 - protein, 141 aa, Homo sapiens; identical to SEQ ID NO: 988

SEQ ID NO: 990 - protein, 142 aa, Homo sapiens
MEGAALLRVSVLCIWMSALFLGVGVRAEEAGARVQQNVPSGTDTGDPQSKPLGDWAAGTMDPGPAGSRGDSGEPCTLRPACRGQRQHGGASRISAEGPAPMPRRRTPSTAHLRVPKTSRRNLLCMVVVLNAVEFETLFLNFK

SEQ ID NO: 991 - protein, 380 aa, Homo sapiens
MEGAALLRVSVLCIWVQQNVPSGTDTGDPQSKPLGDWAAGTMDPESSIFIEDAIKYFKEKVSTQNLLLLLTDNEAWNGFVAAAELPRNEADELRKALDNLARQMIMKDKNWHDKGQQYRNWFLKEFPRLKSELEDNIRRLRALADGVQKVHKGTTIANVVSGSLSISSGILTLVGMGLAPFTEGGSLVLLEPGMELGITAALTGITSSTMDYGKKWWTQAQAHDLVIKSLDKLKEVREFLGENISNFLSLAGNTYQLTRGIGKDIRALRRARANLQSVPHASASRPRVTEPISAESGEQVERVNEPSILEMSRGVKLTDVAPVSFFLVLDVVYLVYESKHLHEGAKSETAEELKKVAQELEEKLNILNNNYKILQADQEL

SEQ ID NO: 992 - protein, 123 aa, Homo sapiens
MEGAALLRVSVLCIWVQQNVPSGTDTGDPQSKPLGDWAAGTMDPGPAGSRGDSGEPCTLRPACRGQRQHGGASRISAEGPAPMPRRRTPSTAHLRVPKTSRRNLLCMRAVSLLRMPLSISRKK

SEQ ID NO: 993 - protein, 414 aa, Homo sapiens
MRFKSHTVELRRPCSDMEGAALLRVSVLCIWMSALFLGVGVRAEEAGARVQQNVPSGTDTGDPQSKPLGDWAAGTMDPESSIFIEDAIKYFKEKVSTQNLLLLLTDNEAWNGFVAAAELPRNEADELRKALDNLARQMIMKDKNWHDKGQQYRNWFLKEFPRLKSELEDNIRRLRALADGVQKVHKGTTIANVVSGSLSISSGILTLVGMGLAPFTEGGSLVLLEPGMELGITAALTGITSSTMDYGKKWWTQAQAHDLVIKSLDKLKEVREFLGENISNFLSLAGNTYQLTRGIGKDIRALRRARANLQSVPHASASRPRVTEPISAESGEQVERVNEPSILEMSRGVKLTDVAPVSFFLVLDVVYLVYESKHLHEGAKSETAEELKKVAQELEEKLNILNNNYKILQADQEL

SEQ ID NO: 994 - protein, 118 aa, Homo sapiens
MRFKSHTVELRSTLSQPLFSCSRRRPCSDMEGAALLRVSVLCIWMSALFLGVGVRAEEAGARVQQNVPSGTDTGDPQSKPLGDWAAGTMDPESSIFIEDAIKYFKEKVSTQNLLLLLT

SEQ ID NO: 995 - protein, 331 aa, Homo sapiens
MDSEKKRFTEEATKYFRERVSPVHLQILLTNNEAWKRFVTAAELPRDEADALYEALKKLRTYAAIEDEYVQQKDEQFREWFLKEFPQVKRKIQESIEKLRALANGIEEVHRGCTISNVVSSSTGAASGIMSLAGLVLAPFTAGTSLALTAAGVGLGAASAVTGITTSIVEHSYTSSAEAEASRLTATSIDRLKVFKEVMRDITPNLLSLLNNYYEATQTIGSEIRAIRQARARARLPVTTWRISAGSGGQAERTIAGTTRAVSRGARILSATTSGIFLALDVVNLVYESKHLHEGAKSASAEELRRQAQELEENLMELTQIYQRLNPCHTH

SEQ ID NO: 996 - protein, 402 aa, Homo sapiens
MGLGQGWGWEASCFACLIRSCCQVVTFTFPFGFQGISQSLENVSGYYADARLEVGSTQLRTAGSCSHSFKRSFLEKKRFTEEATKYFRERVSPVHLQILLTNNEAWKRFVTAAELPRDEADALYEALKKLRTYAAIEDEYVQQKDEQFREWFLKEFPQVKRKIQESIEKLRALANGIEEVHRGCTISNVVSSSTGAASGIMSLAGLVLAPFTAGTSLALTAAGVGLGAASAVTGITTSIVEHSYTSSAEAEASRLTATSIDRLKVFKEVMRDITPNLLSLLNNYYEATQTIGSEIRAIRQARARARLPVTTWRISAGSGGQAERTIAGTTRAVSRGARILSATTSGIFLALDVVNLVYESKHLHEGAKSASAEELRRQAQELEENLMELTQIYQRLNPCHTH

SEQ ID NO: 997 - protein, 97 aa, Homo sapiens
MGLGQGWGWEASCFACLIRSCCQVVTFTFPFGFQGISQSLENVSGYYADARLEVGSTQLRTAGSCSHSFKRSFLGLRKKTNPSSQVSDWRAPWKVSQ

SEQ ID NO: 998 - protein, 82 aa, Homo sapiens
MGLGQGWGWEASCFACLIRSCCQVVTFTFPFGFQGISQSLENVSGYYADARLEVGSTQLRTAGSCSHSFKRSFLGQKDPALV

SEQ ID NO: 999 - protein, 82 aa, Homo sapiens; identical to SEQ ID NO: 998

SEQ ID NO: 1000 - protein, 202 aa, Homo sapiens
MSLAGLVLAPFTAGTSLALTAAGVGLGAASAVTGITTSIVEHSYTSSAEAEASRLTATSIDRLKVFKEVMRDITPNLLSLLNNYYEATQTIGSEIRAIRQARARARLPVTTWRISAGSGGQAERTIAGTTRAVSRGARILSATTSGIFLALDVVNLVYESKHLHEGAKSASAEELRRQAQELEENLMELTQIYQRLNPCHTH

SEQ ID NO: 1001 - protein, 202 aa, Homo sapiens; identical to SEQ ID NO: 1000

SEQ ID NO: 1002 - protein, 202 aa, Homo sapiens; identical to SEQ ID NO: 1000

SEQ ID NO: 1003 - protein, 40 aa, Homo sapiens
SQSLENVSGYYADARLEVGSTQLRTAGSCSHSFKRSFLGE

SEQ ID NO: 1004 - protein, 39 aa, Homo sapiens
  VARIANT 1: note = misc_feature - Xaa can be any naturally occurring amino acid
XYADARLEVGSTQLRTAGSCSHSFKRSFLAWLPQPPRFL

SEQ ID NO: 1005 - protein, 86 aa, Homo sapiens
  VARIANT 1: note = misc_feature - Xaa can be any naturally occurring amino acid
XYADARLEVGSTQLRTAGSCSHSFKRSFLAWWYVPVGTTTWEVEAEASLAARTYRQKQGGQRVSSTAPVNSPRQTLGHRVQDTDLE

SEQ ID NO: 1006 - protein, 33 aa, Homo sapiens
  VARIANT 1: note = misc_feature - Xaa can be any naturally occurring amino acid
XYADARLEVGSTQLRTAGSCSHSFKRSFLEMSI

SEQ ID NO: 1007 - protein, 52 aa, Homo sapiens
  VARIANT 1: note = misc_feature - Xaa can be any naturally occurring amino acid
XYADARLEVGSTQLRTAGSCSHSFKRSFLGLRKKTNPSSQVSDWRAPWKVSQ

SEQ ID NO: 1008 - protein, 52 aa, Homo sapiens; identical to SEQ ID NO: 1007
  VARIANT 1: note = misc_feature - Xaa can be any naturally occurring amino acid

SEQ ID NO: 1009 - protein, 37 aa, Homo sapiens
  VARIANT 1: note = misc_feature - Xaa can be any naturally occurring amino acid
XYADARLEVGSTQLRTAGSCSHSFKRSFLGQKDPALV

SEQ ID NO: 1010 - protein, 116 aa, Homo sapiens
MAAGSAPMQLHLRATIRMKDGLCVPRKWIYHLTEGSTDLRTEGRPDMKTELFSSSCPGGIMLNETGQGYQRFLLYNRSPHPPEKCVEEFKSLTSCLDSKAFLLTPRNQEACELSNN

SEQ ID NO: 1011 - protein, 129 aa, Homo sapiens
MAAGSAPMQLHLRATIRMKDGLCVPRKWIYHLTEGSTDLRTEGRPDMKTELFSSSCPGGIMLNETGQGYQRFLLYNRSPHPPEKCVEEFKSLTSCLDSKAFLLTPRNQGKGLKSHKTGLGLTKSSGVTG

SEQ ID NO: 1012 - protein, 188 aa, Homo sapiens
MFHQIWAALLYFYGIILNSIYQCPEHSQLTTLGVDGKEFPEVHLGQWYFIAGAAPTKEELATFDPVDNIVFNMAAGSAPMQLHLRATIRMKDGLCVPRKWIYHLTEGSTDLRTEGRPDMKTELFSSSCPGGIMLNETGQGYQRFLLYNRSPHPPEKCVEEFKSLTSCLDSKAFLLTPRNQEACELSNN

SEQ ID NO: 1013 - protein, 268 aa, Homo sapiens
MAAIRMGKLTTMPAGLIYASVSVHAAKQEESKKQLVKPEQLPIYTAPPLQSKYVEEQPGHLQMGFASIRTATGCYIGWCKGVYVFVKNGIMDTVQFGKDAYVYLKNPPRDFLPKMGVITVSGLAGLVSARKGSKFKKITYPLGLATLGATVCYPVQSVIIAKVTAKKVYATSQQIFGAVKSLWTKSSKEESLPKPKEKTKLGSSSEIEVPAKTTHVLKHSVPLPTELSSEAKTKSESTSGATQFMPDPKLMDHGQSHPEDIDMYSTRS

SEQ ID NO: 1014 - protein, 263 aa, Homo sapiens [sequence omitted]

SEQ ID NO: 1015 - protein, 268 aa, Homo sapiens [sequence omitted]

SEQ ID NO: 1016 - protein, 552 aa, Homo sapiens
MAECNLVAILISSIDNPLDKNLDNGGNSCLDFRPLNSFSQPQVLLAAAVCTKAGKAIVSRQFVEMTRTRIEGLLAAFPKLMNTGKQHTFVETESVRYVYQPMEKLYMVLITTKNSNILEDLETLRLFSRVIPEYCRALEENEISEHCFDLIFAFDEIVALGYRENVNLAQIRTFTEMDSHEEKVFRAVRETQEREAKAEMRRKAKELQQARRDAERQGKKAPGFGGFGSSAVSGGSTAAMITETIIETDKPKVAPAPARPSGPSKALKLGAKGKEVDNFVDKLKSEGETIMSSSMGKRTSEATKMHAPPINMESVHMKIEEKITLTCGRDGGLQNMELHGMIMLRISDDKYGRIRLHVENEDKKGVQLQTHPNVDKKLFTAESLIGLKNPEKSFPVNSDVGVLKWRLQTTEESFIPLTINCWPSESGNGCDVNIEYELQEDNLELNDVVITIPLPSGVGAPVIGEIDGEYRHDSRRNTLEWCLPVIDAKNKSGSLEFSIAGQPNDFFPVQVSFVSKKNYCNIQVTKVTQVDGNSPVRFSTETTFLVDKYEIL

SEQ ID NO: 1017 - protein, 423 aa, Homo sapiens
MIPEYCRALEENEISEHCFDLIFAFDEIVALGYRENVNLAQIRTFTEMDSHEEKVFRAVRETQEREAKAEMRRKAKELQQARRDAERQGKKAPGFGGFGSSAVSGGSTAAMITETIIETDKPKVAPAPARPSGPSKALKLGAKGKEVDNFVDKLKSEGETIMSSSMGKRTSEATKMHAPPINMESVHMKIEEKITLTCGRDGGLQNMELHGMIMLRISDDKYGRIRLHVENEDKKGVQLQTHPNVDKKLFTAESLIGLKNPEKSFPVNSDVGVLKWRLQTTEESFIPLTINCWPSESGNGCDVNIEYELQEDNLELNDVVITIPLPSGVGAPVIGEIDGEYRHDSRRNTLEWCLPVIDAKNKSGSLEFSIAGQPNDFFPVQVSFVSKKNYCNIQVTKVTQVDGNSPVRFSTETTFLVDKYEIL

SEQ ID NO: 1018 - protein, 83 aa, Homo sapiens
MVLLAAAVCTKAGKAIVSRQFVEMTRTRIEGLLAAFPKLMNTGKQHTFVETESIRMSSVLFPYQFIPSSLCQVVFLSGPVLPV

SEQ ID NO: 1019 - protein, 189 aa, Homo sapiens
MVLLAAAVCTKAGKAIVSRQFVEMTRTRIEGLLAAFPKLMNTGKQHTFVETESVRYVYQPMEKLYMVLITTKNSNILEDLETLRLFSRVIPEYCRALEENEISEHCFDLIFAFDEIVALGYRENVNLAQIRTFTEMDSHEEKVFRAVRETQEREAKAEMRRKAKELQQAQSVGITGMSHHAQLLLYFNP

SEQ ID NO: 1020 - protein, 511 aa, Homo sapiens
MVLLAAAVCTKAGKAIVSRQFVEMTRTRIEGLLAAFPKLMNTGKQHTFVETESVRYVYQPMEKLYMVLITTKNSNILEDLETLRLFSRVIPEYCRALEENEISEHCFDLIFAFDEIVALGYRENVNLAQIRTFTEMDSHEEKVFRAVRETQEREAKAEMRRKAKELQQARRDAERQGKKAPGFGGFGSSAVSGGSTAAMITETIIETDKPKVAPAPARPSGPSKALKLGAKGKEVDNFVDKLKSEGETIMSSSMGKRTSEATKMHAPPINMESVHMKIEEKITLTCGRDGGLQNMELHGMIMLRISDDKYGRIRLHVENEDKKGVQLQTHPNVDKKLFTAESLIGLKNPEKSFPVNSDVGVLKWRLQTTEESFIPLTINCWPSESGNGCDVNIEYELQEDNLELNDVVITIPLPSGVGAPVIGEIDGEYRHDSRRNTLEWCLPVIDAKNKSGSLEFSIAGQPNDFFPVQVSFVSKKNYCNIQVTKVTQVDGNSPVRFSTETTFLVDKYEIL

SEQ ID NO: 1021 - protein, 256 aa, Homo sapiens
MKPALCLVAMGALVMDSSPQCTKQLLSERFGRGSRTVDLELELQIELLRETKRKYESVLQLGRALTAHLYSLLQTQHALGDAFADLSQKSPELQEEFGYNAETQKLLCKNGETLLGAVNFFVSSINTLVTKTMEDTLMTVKQYEAARLEYDAYRTDLEELSLGPRDAGTRGRLESAQATFQAHRDKYEKLRGDVAIKLKFLEENKIKVMHKQLLLFHNAVSAYFAGNQKQLEQTLQQFNIKLRPPGAEKPSWLEEQ

SEQ ID NO: 1022 - protein, 374 aa, Homo sapiens
MTDGILGKAATMEIPIHGNGEARQLPEDDGLEQDLQQVMVSGPNLNETSIVSGGYGGSGDGLIPTGKSISCARREVWVGPQRCLVYLREAGVRELDPLGSGRHPSHSTTPSGPGDEVARGIAGEKFDIVKKWGINTYKCTKQLLSERFGRGSRTVDLELELQIELLRETKRKYESVLQLGRALTAHLYSLLQTQHALGDAFADLSQKSPELQEEFGYNAETQKLLCKNGETLLGAVNFFVSSINTLVTKTMEDTLMTVKQYEAARLEYDAYRTDLEELSLGPRDAGTRGRLESAQATFQAHRDKYEKLRGDVAIKLKFLEENKIKVMHKQLLLFHNAVSAYFAGNQKQLEQTLQQFNIKLRPPGAEKPSWLEEQ

SEQ ID NO: 1023 - protein, 159 aa, Homo sapiens
MTDGILGKAATMEIPIHGNGEARQLPEDDGLEQDLQQVMVSGPNLNETSIVSGGYGGSGDGLIPTGSGRHPSHSTTPSGPGDEVARGIAGEKFDIVKKWGINTYKCTKQLLSERFGRGSRTVDLELELQIELLRETKRKRNLATMQRHRNYYARMGKRC

SEQ ID NO: 1024 - protein, 341 aa, Homo sapiens
MTDGILGKAATMEIPIHGNGEARQLPEDDGLEQDLQQVMVSGPNLNETSIVSGGYGGSGDGLIPTGSGRHPSHSTTPSGPGDEVARGIAGEKFDIVKKWGINTYKCTKQLLSERFGRGSRTVDLELELQIELLRETKRKYESVLQLGRALTAHLYSLLQTQHALGDAFADLSQKSPELQEEFGYNAETQKLLCKNGETLLGAVNFFVSSINTLVTKTMEDTLMTVKQYEAARLEYDAYRTDLEELSLGPRDAGTRGRLESAQATFQAHRDKYEKLRGDVAIKLKFLEENKIKVMHKQLLLFHNAVSAYFAGNQKQLEQTLQQFNIKLRPPGAEKPSWLEEQ

SEQ ID NO: 1025 - protein, 341 aa, Homo sapiens; identical to SEQ ID NO: 1024

SEQ ID NO: 1026 - protein, 202 aa, Homo sapiens
MTDGILGKAATMEIPIHGNGEARQLPEDDGLEQDLQQVMVSGPNLNETSIVSGGYGGSGDGLIPTGSGRHPSHSTTPSGPGDEVARGIAGEKFDIVKKWGINTYKCTKQLLSERFGRGSRTVDLELELQIELLRETKRKYESVLQLGRALTAHLYSLLQTQHALGDAFADLSQKSPELQPTGRTPSGWAQPYPQQHSPVEAA

SEQ ID NO: 1027 - protein, 303 aa, Homo sapiens
MVSGPNLNETSIVSGGYGGSGDGLIPTGSGRHPSHSTTPSGPGDEVARGIAGEKFDIVKKWGINTYKCTKQLLSERFGRGSRTVDLELELQIELLRETKRKYESVLQLGRALTAHLYSLLQTQHALGDAFADLSQKSPELQEEFGYNAETQKLLCKNGETLLGAVNFFVSSINTLVTKTMEDTLMTVKQYEAARLEYDAYRTDLEELSLGPRDAGTRGRLESAQATFQAHRDKYEKLRGDVAIKLKFLEENKIKVMHKQLLLFHNAVSAYFAGNQKQLEQTLQQFNIKLRPPGAEKPSWLEEQ

SEQ ID NO: 1028 - protein, 535 aa, Homo sapiens
MAWILDCLFASAFEPRPRRVSVLGGAPGHNPDRRTKMVSIHSLSELERLKLQETAYHELVARHFLSEFKPDRALPIDRPNTLDKWFLILRGQQRAVSHKTFGISLEEVLVNEFTRRKHLELTATMQVEEATGQAAGRRRGNVVRRVFGRIRRFFSRRRNEPTLPREFTRRGRRGAVSVDSLAELEDGALLLQTLQLSKISFPIGQRLLGSKRKMSLNPIAKQIPQVVEACCQFIEKHGLSAVGIFTLEYSVQRVRQLREEFDQGLDVVLDDNQNVHDVAALLKEFFRDMKDSLLPDDLYMSFLLTATLKPQDQLSALQLLVYLMPPCHSDTLERLLKALHKITENCEDSIGIDGQLVPGNRMTSTNLALVFGSALLKKGKFGKRESRKTKLGIDHYVASVNVVRAMIDNWDVLFQVPPHIQRQVAKRVWKSSPEALDFIRRRNLRKIQSARIKMEEDALLSDPVETSAEARAAVLAQSKPSDEGSSEEPAVPSGTARSHDDEEGAGNPPIPEQDRPLLRVPREKEAKTGVSYFFP

SEQ ID NO: 1029 - protein, 547 aa, Homo sapiens
MGGCIPFLKAARALCPRIMPPLLLLSAFIFLVSVLGGAPGHNPDRRTKMVSIHSLSELERLKLQETAYHELVARHFLSEFKPDRALPIDRPNTLDKWFLILRGQQRAVSHKTFGISLEEVLVNEFTRRKHLELTATMQVEEATGQAAGRRRGNVVRRVFGRIRRFFSRRRNEPTLPREFTRRGRRGAVSVDSLAELEDGALLLQTLQLSKISFPIGQRLLGSKRKMSLNPIAKQIPQVVEACCQFIEKHGLSAVGIFTLEYSVQRVRQLREEFDQGLDVVLDDNQNVHDVAALLKEFFRDMKDSLLPDDLYMSFLLTATLKPQDQLSALQLLVYLMPPCHSDTLERLLKALHKITENCEDSIGIDGQLVPGNRMTSTNLALVFGSALLKKGKFGKRESRKTKLGIDHYVASVNVVRAMIDNWDVLFQVPPHIQRQVAKRVWKSSPEALDFIRRRNLRKIQSARIKMEEDALLSDPVETSAEARAAVLAQSKPSDEGSSEEPAVPSGTARSHDDEEGAGNPPIPEQDRPLLRVPREKEAKTGVSYFFP

SEQ ID NO: 1030 - protein, 411 aa, Homo sapiens
MQVEEATGQAAGRRRGNVVRRVFGRIRRFFSRRRNEPTLPREFTRRGRRGAVSVDSLAELEDGALLLQTLQLSKISFPIGQRLLGSKRKMSLNPIAKQIPQVVEACCQFIEKHGLSAVGIFTLEYSVQRVRQLREEFDQGLDVVLDDNQNVHDVAALLKEFFRDMKDSLLPDDLYMSFLLTATLKPQDQLSALQLLVYLMPPCHSDTLERLLKALHKITENCEDSIGIDGQLVPGNRMTSTNLALVFGSALLKKGKFGKRESRKTKLGIDHYVASVNVVRAMIDNWDVLFQVPPHIQRQVAKRVWKSSPEALDFIRRRNLRKIQSARIKMEEDALLSDPVETSAEARAAVLAQSKPSDEGSSEEPAVPSGTARSHDDEEGAGNPPIPEQDRPLLRVPREKEAKTGVSYFFP

SEQ ID NO: 1031 - protein, 411 aa, Homo sapiens; identical to SEQ ID NO: 1030

SEQ ID NO: 1032 - protein, 516 aa, Homo sapiens
MSVLGGAPGHNPDRRTKMVSIHSLSELERLKLQETAYHELVARHFLSEFKPDRALPIDRPNTLDKWFLILRGQQRAVSHKTFGISLEEVLVNEFTRRKHLELTATMQVEEATGQAAGRRRGNVVRRVFGRIRRFFSRRRNEPTLPREFTRRGRRGAVSVDSLAELEDGALLLQTLQLSKISFPIGQRLLGSKRKMSLNPIAKQIPQVVEACCQFIEKHGLSAVGIFTLEYSVQRVRQLREEFDQGLDVVLDDNQNVHDVAALLKEFFRDMKDSLLPDDLYMSFLLTATLKPQDQLSALQLLVYLMPPCHSDTLERLLKALHKITENCEDSIGIDGQLVPGNRMTSTNLALVFGSALLKKGKFGKRESRKTKLGIDHYVASVNVVRAMIDNWDVLFQVPPHIQRQVAKRVWKSSPEALDFIRRRNLRKIQSARIKMEEDALLSDPVETSAEARAAVLAQSKPSDEGSSEEPAVPSGTARSHDDEEGAGNPPIPEQDRPLLRVPREKEAKTGVSYFFP

SEQ ID NO: 1033 - protein, 218 aa, Homo sapiens
MVSIHSLSELERLKLQETAYHELVARHFLSEFKPDRALPIDRPNTLDKWFLILRGQQRAVSHKTFGISLEEVLVNEFTRRKHLELTATMQVEEATGQAAGRRRGNVVRRVFGRIRRFFSRRRNEPTLPREFTRRGRRGAVSVDSLAELEDGALLLQTLQLSKISFPIGQRLLGSKRKMSLNPIAKQIPQVVEACCQFIEKHGLSAVGIFTLEYSVQRV

SEQ ID NO: 1034 - protein, 78 aa, Homo sapiens
GRQDGSESEAVAVALAGRLRELLRDLPPENRASLQYLLRHLRRPASSRLSSSTTAWSSRRSRRRPPGARTSHPTSELR

SEQ ID NO: 1035 - protein, 1019 aa, Homo sapiens
MCICGTAHPVLDEGPVRCRAGPRDLLEARRPRAHECLGEALRVMHQIISKYPLLNTVETLTAAGTLIAKVKAFHYESNNDLEKQEFEKALETIAVAFSSTVSEFLMGEVDSSTLLAVPPGDSSQSMESLYGPGSEGTPPSLEDCDAGCLPAEEVDVLLQRCEGGVDAALLYAKNMAKYMKDLISYLEKRTTLEMEFAKGLQKIAHNCRQSVMQEPHMPLLSIYSLALEQDLEFGHSMVQAVGTLQTQTFMQPLTLRRLEHEKRRKEIKEAWHRAQRKLQEAESNLRKAKQGYVQRCEDHDKARFLVAKAEEEQAGSAPGAGSTATKTLDKRRRLEEEAKNKAEEAMATYRTCVADAKTQKQELEDTKVTALRQIQEVIRQSDQTIKSATISYYQMMHMQTAPLPVHFQMLCESSKLYDPGQQYASHVRQLQRDQEPDVHYDFEPHVSANAWSPVMRARKSSFNVSDVARPEAAGSPPEEGGCTEGTPAKDHRAGRGHQVHKSWPLSISDSDSGLDPGPGAGDFKKFERTSSSGTMSSTEELVDPDGGAGASAFEQADLNGMTPELPVAVPSGPFRHEGLSKAARTHRLRKLRTPAKCRECNSYVYFQGAECEECCLACHKKCLETLAIQCGHKKLQGRLQLFGQDFSHAARSAPDGVPFIVKKCVCEIERRALRTKGIYRVNGVKTRVEKLCQAFENGKELVELSQASPHDISNVLKLYLRQLPEPLISFRLYHELVGLAKDSLKAEAEAKAASRGRQDGSESEAVAVALAGRLRELLRDLPPENRASLQYLLRHLRRIVEVEQDNKMTPGNLGIVFGPTLLRPRPTEATVSLSSLVDYPHQARVIETLIVHYGLVFEEEPEETPGGQDESSNQRAEVVVQVPYLEAGEAVVYPLQEAAADGCRESRVVSNDSDSDLEEASELLSSSEASALGHLSFLEQQQSEASLEVASGSHSGSEEQLEATAREDGDGDEDGPAQQLSGFNTNQSNNVLQAPLPPMRLRGGRMTLGSCRERQPEFV

SEQ ID NO: 1036 - protein, 1136 aa, Homo sapiens
MFSRKKRELMKTPSISKKNRAGSPSPQPSGELPRKDGADAVFPGPSLEPPAGSSGVKATGTLKRPTSLSRHASAAGFPLSGAASWTLGRSHRSPLTAASPGELPTEGAGPDVVEDISHLLADVARFAEGLEKLKECVLRDDLLEARRPRAHECLGEALRVMHQIISKYPLLNTVETLTAAGTLIAKVKAFHYESNNDLEKQEFEKALETIAVAFSSTVSEFLMGEVDSSTLLAVPPGDSSQSMESLYGPGSEGTPPSLEDCDAGCLPAEEVDVLLQRCEGGVDAALLYAKNMAKYMKDLISYLEKRTTLEMEFAKGLQKIAHNCRQSVMQEPHMPLLSIYSLALEQDLEFGHSMVQAVGTLQTQTFMQPLTLRRLEHEKRRKEIKEAWHRAQRKLQEAESNLRKAKQGYVQRCEDHDKARFLVAKAEEEQAGSAPGAGSTATKTLDKRRRLEEEAKNKAEEAMATYRTCVADAKTQKQELEDTKVTALRQIQEVIRQSDQTIKSATISYYQMMHMQTAPLPVHFQMLCESSKLYDPGQQYASHVRQLQRDQEPDVHYDFEPHVSANAWSPVMRARKSSFNVSDVARPEAAGSPPEEGGCTEGTPAKDHRAGRGHQVHKSWPLSISDSDSGLDPGPGAGDFKKFERTSSSGTMSSTEELVDPDGGAGASAFEQADLNGMTPELPVAVPSGPFRHEGLSKAARTHRLRKLRTPAKCRECNSYVYFQGAECEECCLACHKKCLETLAIQCGHKKLQGRLQLFGQDFSHAARSAPDGVPFIVKKCVCEIERRALRTKGIYRVNGVKTRVEKLCQAFENGKELVELSQASPHDISNVLKLYLRQLPEPLISFRLYHELVGLAKDSLKAEAEAKAASRGRQDGSESEAVAVALAGRLRELLRDLPPENRASLQYLLRHLRRIVEVEQDNKMTPGNLGIVFGPTLLRPRPTEATVSLSSLVDYPHQARVIETLIVHYGLVFEEEPEETPGGQDESSNQRAEVVVQVPYLEAGEAVVYPLQEAAADGCRESRVVSNDSDSDLEEASELLSSSEASALGHLSFLEQQQSEASLEVASGSHSGSEEQLEATAREDGDGDEDGPAQQLSGFNTNQSNNVLQAPLPPMRLRGGRMTLGSCRERQPEFV

SEQ ID NO: 1037 - protein, 1163 aa, Homo sapiens
MFSRKKRELMKTPSISKKNRAGSPSPQPSGPHFISGETEAVSRPENPFNELPSDLPKELPRKDGADAVFPGPSLEPPAGSSGVKATGTLKRPTSLSRHASAAGFPLSGAASWTLGRSHRSPLTAASPGELPTEGAGPDVVEDISHLLADVARFAEGLEKLKECVLRDDLLEARRPRAHECLGEALRVMHQIISKYPLLNTVETLTAAGTLIAKVKAFHYESNNDLEKQEFEKALETIAVAFSSTVSEFLMGEVDSSTLLAVPPGDSSQSMESLYGPGSEGTPPSLEDCDAGCLPAEEVDVLLQRCEGGVDAALLYAKNMAKYMKDLISYLEKRTTLEMEFAKGLQKIAHNCRQSVMQEPHMPLLSIYSLALEQDLEFGHSMVQAVGTLQTQTFMQPLTLRRLEHEKRRKEIKEAWHRAQRKLQEAESNLRKAKQGYVQRCEDHDKARFLVAKAEEEQAGSAPGAGSTATKTLDKRRRLEEEAKNKAEEAMATYRTCVADAKTQKQELEDTKVTALRQIQEVIRQSDQTIKSATISYYQMMHMQTAPLPVHFQMLCESSKLYDPGQQYASHVRQLQRDQEPDVHYDFEPHVSANAWSPVMRARKSSFNVSDVARPEAAGSPPEEGGCTEGTPAKDHRAGRGHQVHKSWPLSISDSDSGLDPGPGAGDFKKFERTSSSGTMSSTEELVDPDGGAGASAFEQADLNGMTPELPVAVPSGPFRHEGLSKAARTHRLRKLRTPAKCRECNSYVYFQGAECEECCLACHKKCLETLAIQCGHKKLQGRLQLFGQDFSHAARSAPDGVPFIVKKCVCEIERRALRTKGIYRVNGVKTRVEKLCQAFENGKELVELSQASPHDISNVLKLYLRQLPEPLISFRLYHELVGLAKDSLKAEAEAKAASRGRQDGSESEAVAVALAGRLRELLRDLPPENRASLQYLLRHLRRIVEVEQDNKMTPGNLGIVFGPTLLRPRPTEATVSLSSLVDYPHQARVIETLIVHYGLVFEEEPEETPGGQDESSNQRAEVVVQVPYLEAGEAVVYPLQEAAADGCRESRVVSNDSDSDLEEASELLSSSEASALGHLSFLEQQQSEASLEVASGSHSGSEEQLEATAREDGDGDEDGPAQQLSGFNTNQSNNVLQAPLPPMRLRGGRMTLGSCRERQPEFV

SEQ ID NO: 1038 - protein, 60 aa, Homo sapiens
MFSRKKRELMKTPSISKKNRAGSPSPQPSGTSLRPAARGPTSAWVRLCVSCIRSSPSTRC

SEQ ID NO: 1039 - protein, 771 aa, Homo sapiens
MGVGRKGGAGETESHPRIGLELASWLPHPQQEAESNLRKAKQGYVQRCEDHDKARFLVAKAEEEQAGSAPGAGSTATKTLDKRRRLEEEAKNKAEEAMATYRTCVADAKTQKQELEDTKVTALRQIQEVIRQSDQTIKSATISYYQMMHMQTAPLPVHFQMLCESSKLYDPGQQYASHVRQLQRDQEPDVHYDFEPHVSANAWSPVMRARKSSFNVSDVARPEAAGSPPEEGGCTEGTPAKDHRAGRGHQVHKSWPLSISDSDSGLDPGPGAGDFKKFERTSSSGTMSSTEELVDPDGGAGASAFEQADLNGMTPELPVAVPSGPFRHEGLSKAARTHRLRKLRTPAKCRECNSYVYFQGAECEECCLACHKKCLETLAIQCGHKKLQGRLQLFGQDFSHAARSAPDGVPFIVKKCVCEIERRALRTKGIYRVNGVKTRVEKLCQAFENGKELVELSQASPHDISNVLKLYLRQLPEPLISFRLYHELVGLAKDSLKAEAEAKAASRGRQDGSESEAVAVALAGRLRELLRDLPPENRASLQYLLRHLRRIVEVEQDNKMTPGNLGIVFGPTLLRPRPTEATVSLSSLVDYPHQARVIETLIVHYGLVFEEEPEETPGGQDESSNQRAEVVVQVPYLEAGEAVVYPLQEAAADGCRESRVVSNDSDSDLEEASELLSSSEASALGHLSFLEQQQSEASLEVASGSHSGSEEQLEATAREDGDGDEDGPAQQLSGFNTNQSNNVLQAPLPPMRLRGGRMTLGSCRERQPEFV

SEQ ID NO: 1040 - protein, 1140 aa, Homo sapiens
MLGRRLGARASYSPYRAGRQGPQQRGRDPGIQLTELPRKDGADAVFPGPSLEPPAGSSGVKATGTLKRPTSLSRHASAAGFPLSGAASWTLGRSHRSPLTAASPGELPTEGAGPDVVEDISHLLADVARFAEGLEKLKECVLRDDLLEARRPRAHECLGEALRVMHQIISKYPLLNTVETLTAAGTLIAKVKAFHYESNNDLEKQEFEKALETIAVAFSSTVSEFLMGEVDSSTLLAVPPGDSSQSMESLYGPGSEGTPPSLEDCDAGCLPAEEVDVLLQRCEGGVDAALLYAKNMAKYMKDLISYLEKRTTLEMEFAKGLQKIAHNCRQSVMQEPHMPLLSIYSLALEQDLEFGHSMVQAVGTLQTQTFMQPLTLRRLEHEKRRKEIKEAWHRAQRKLQEAESNLRKAKQGYVQRCEDHDKARFLVAKAEEEQAGSAPGAGSTATKTLDKRRRLEEEAKNKAEEAMATYRTCVADAKTQKQELEDTKVTALRQIQEVIRQSDQTIKSATISYYQMMHMQTAPLPVHFQMLCESSKLYDPGQQYASHVRQLQRDQEPDVHYDFEPHVSANAWSPVMRARKSSFNVSDVARPEAAGSPPEEGGCTEGTPAKDHRAGRGHQVHKSWPLSISDSDSGLDPGPGAGDFKKFERTSSSGTMSSTEELVDPDGGAGASAFEQADLNGMTPELPVAVPSGPFRHEGLSKAARTHRLRKLRTPAKCRECNSYVYFQGAECEECCLACHKKCLETLAIQCGHKKLQGRLQLFGQDFSHAARSAPDGVPFIVKKCVCEIERRALRTKGIYRVNGVKTRVEKLCQAFENGKELVELSQASPHDISNVLKLYLRQLPEPLISFRLYHELVGLAKDSLKAEAEAKAASRGRQDGSESEAVAVALAGRLRELLRDLPPENRASLQYLLRHLRRIVEVEQDNKMTPGNLGIVFGPTLLRPRPTEATVSLSSLVDYPHQARVIETLIVHYGLVFEEEPEETPGGQDESSNQRAEVVVQVPYLEAGEAVVYPLQEAAADGCRESRVVSNDSDSDLEEASELLSSSEASALGHLSFLEQQQSEASLEVASGSHSGSEEQLEATAREDGDGDEDGPAQQLSGFNTNQSNNVLQAPLPPMRLRGGRMTLGSCRERQPEFV

SEQ ID NO: 1041 - protein, 1152 aa, Homo sapiens
MSRGQRVLKGLLGWVCTWTWAWRARLGARGCGLHVLCPRDLPLPPEELPRKDGADAVFPGPSLEPPAGSSGVKATGTLKRPTSLSRHASAAGFPLSGAASWTLGRSHRSPLTAASPGELPTEGAGPDVVEDISHLLADVARFAEGLEKLKECVLRDDLLEARRPRAHECLGEALRVMHQIISKYPLLNTVETLTAAGTLIAKVKAFHYESNNDLEKQEFEKALETIAVAFSSTVSEFLMGEVDSSTLLAVPPGDSSQSMESLYGPGSEGTPPSLEDCDAGCLPAEEVDVLLQRCEGGVDAALLYAKNMAKYMKDLISYLEKRTTLEMEFAKGLQKIAHNCRQSVMQEPHMPLLSIYSLALEQDLEFGHSMVQAVGTLQTQTFMQPLTLRRLEHEKRRKEIKEAWHRAQRKLQEAESNLRKAKQGYVQRCEDHDKARFLVAKAEEEQAGSAPGAGSTATKTLDKRRRLEEEAKNKAEEAMATYRTCVADAKTQKQELEDTKVTALRQIQEVIRQSDQTIKSATISYYQMMHMQTAPLPVHFQMLCESSKLYDPGQQYASHVRQLQRDQEPDVHYDFEPHVSANAWSPVMRARKSSFNVSDVARPEAAGSPPEEGGCTEGTPAKDHRAGRGHQVHKSWPLSISDSDSGLDPGPGAGDFKKFERTSSSGTMSSTEELVDPDGGAGASAFEQADLNGMTPELPVAVPSGPFRHEGLSKAARTHRLRKLRTPAKCRECNSYVYFQGAECEECCLACHKKCLETLAIQCGHKKLQGRLQLFGQDFSHAARSAPDGVPFIVKKCVCEIERRALRTKGIYRVNGVKTRVEKLCQAFENGKELVELSQASPHDISNVLKLYLRQLPEPLISFRLYHELVGLAKDSLKAEAEAKAASRGRQDGSESEAVAVALAGRLRELLRDLPPENRASLQYLLRHLRRIVEVEQDNKMTPGNLGIVFGPTLLRPRPTEATVSLSSLVDYPHQARVIETLIVHYGLVFEEEPEETPGGQDESSNQRAEVVVQVPYLEAGEAVVYPLQEAAADGCRESRVVSNDSDSDLEEASELLSSSEASALGHLSFLEQQQSEASLEVASGSHSGSEEQLEATAREDGDGDEDGPAQQLSGFNTNQSNNVLQAPLPPMRLRGGRMTLGSCRERQPEFV

SEQ ID NO: 1042 - protein, 170 aa, Homo sapiens
MVGSTPHFGDPCAGSPGPGGRGDPDGRGDPDGQGPELPRKDGADAVFPGPSLEPPAGSSGVKATGTLKRPTSLSRHASAAGFPLSGAASWTLGRSHRSPLTAASPGELPTEGAGPDVVEDISHLLADVARFAEGLEKLKECVLRDDLLEARRPRAHECLGEALRVMHQII

SEQ ID NO: 1043 - protein, 601 aa, Homo sapiens
LELYDLQILGTKPPMNSDTHRNFDPTATLRNQGDFTWNSMSGRSVRLRSVPIQSLSELERARLQEVAFYQLQQDCDLSCQITIPKDGQKRKKSLRKKLDSLGKEKNKDKEFIPQAFGMPLSQVIANDRAYKLKQDLQRDEQKDASDFVASLLPFGNKRQNKELSSSNSSLSSTSETPNESTSPNTPEPAPRARRRGAMSVDSITDLDDNQSRLLEALQLSLPAEAQSKKEKARDKKLSLNPIYRQVPRLVDSCCQHLEKHGLQTVGIFRVGSSKKRVRQLREEFDRGIDVSLEEEHSVHDVAALLKEFLRDMPDPLLTRELYTAFINTLLLEPEEQLGTLQLLIYLLPPCNCDTLHRLLQFLSIVARHADDNISKDGQEVTGNKMTSLNLATIFGPNLLHKQKSSDKEFSVQSSARAEESTAIIAVVQKMIENYEALFMVPPDLQNEVLISLLETDPDVVDYLLRRKASQSSSPDMLQSEVSFSVGGRHSSTDSNKASSGDISPYDNNSPVLSERSLLAMQEDAAPGGSEKLYRVPGQFMLVGHLSSSKSRESSPGPRLGKGNWSLASRRWPKQATLLLLHVAWCGALRTFSSSLPYLMFL

SEQ ID NO: 1044 - protein, 974 aa, Homo sapiens
MSAQSLLHSVFSCSSPASSSAASAKGFSKRKLRQTRSLDPALIGGCGSDEAGAEGSARGATAGRLYSPSLPAESLGPRLASSSRGPPPRATRLPPPGPLCSSFSTPSTPQEKSPSGSFHFDYEVPLGRGGLKKSMAWDLPSVLAGPASSRSASSILCSSGGGPNGIFASPRRWLQQRKFQSPPDSRGHPYVVWKSEGDFTWNSMSGRSVRLRSVPIQSLSELERARLQEVAFYQLQQDCDLSCQITIPKDGQKRKKSLRKKLDSLGKEKNKDKEFIPQAFGMPLSQVIANDRAYKLKQDLQRDEQKDASDFVASLLPFGNKRQNKELSSSNSSLSSTSETPNESTSPNTPEPAPRARRRGAMSVDSITDLDDNQSRLLEALQLSLPAEAQSKKEKARDKKLSLNPIYRQVPRLVDSCCQHLEKHGLQTVGIFRVGSSKKRVRQLREEFDRGIDVSLEEEHSVHDVAALLKEFLRDMPDPLLTRELYTAFINTLLLEPEEQLGTLQLLIYLLPPCNCDTLHRLLQFLSIVARHADDNISKDGQEVTGNKMTSLNLATIFGPNLLHKQKSSDKEFSVQSSARAEESTAIIAVVQKMIENYEALFMVPPDLQNEVLISLLETDPDVVDYLLRRKASQSSSPDMLQSEVSFSVGGRHSSTDSNKASSGDISPYDNNSPVLSERSLLAMQEDAAPGGSEKLYRVPGQFMLVGHLSSSKSRESSPGPRLGKDLSEEPFDIWGTWHSTLKSGSKDPGMTGSSGDIFESSSLRAGPCSLSQGNLSPNWPRWQGSPAELDSDTQGARRTQAAAPATEGRAHPAVSRACSTPHVQVAGKAERPTARSEQYLTLSGAHDLSESELDVAGLQSRATPQCQRPHGSGRDDKRPPPPYPGPGKPAAAAAWIQGPPEGVETPTDQGGQAAEREQQVTQKKLSSANSLPAGEQDSPRLGDAGWLDWQRERWQIWELLSTDNPDALPETLV

SEQ ID NO: 1045 - protein, 765 aa, Homo sapiens
MSAQSLLHSVFSCSSPASSSAASAKGFSKRKLRQTRSLDPALIGGCGSDEAGAEGSARGATAGRLYSPSLPAESLGPRLASSSRGPPPRATRLPPPGPLCSSFSTPSTPQEKSPSGSFHFDYEVPLGRGGLKKSMAWDLPSVLAGPASSRSASSILCSSGGGPNGIFASPRRWLQQRKFQSPPDSRGHPYVVWKSEGDFTWNSMSGRSVRLRSVPIQSLSELERARLQEVAFYQLQQDCDLSCQITIPKDGQKRKKSLRKKLDSLGKEKNKDKEFIPQAFGMPLSQVIANDRAYKLKQDLQRDEQKDASDFVASLLPFGNKRQNKELSSSNSSLSSTSETPNESTSPNTPEPAPRARRRGAMSVDSITDLDDNQSRLLEALQLSLPAEAQSKKEKARDKKLSLNPIYRQVPRLVDSCCQHLEKHGLQTVGIFRVGSSKKRVRQLREEFDRGIDVSLEEEHSVHDVAALLKEFLRDMPDPLLTRELYTAFINTLLLEPEEQLGTLQLLIYLLPPCNCDTLHRLLQFLSIVARHADDNISKDGQEVTGNKMTSLNLATIFGPNLLHKQKSSDKEFSVQSSARAEESTAIIAVVQKMIENYEALFMVPPDLQNEVLISLLETDPDVVDYLLRRKASQSSSPDMLQSEVSFSVGGRHSSTDSNKASSGDISPYDNNSPVLSERSLLAMQEDAAPGGSEKLYRVPGQFMLVGHLSSSKSRESSPGPRLGKGNWSLASRRWPKQATLLLLHVAWCGALRTFSSSLPYLMFL

SEQ ID NO: 1046 - protein, 690 aa, Homo sapiens
MSAQSLLHSVFSCSSPASSSAASAKGFSKRKLRQTRSLDPALIGGCGSDEAGAEGSARGATAGRLYSPSLPAESLGPRLASSSRGPPPRATRLPPPGPLCSSFSTPSTPQEKSPSGSFHFDYEVPLGRGGLKKSMAWDLPSVLAGPASSRSASSILCSSGGGPNGIFASPRRWLQQRKFQSPPDSRGHPYVVWKSELELYDLQILGTKPPMNSDTHRNFDPTATLRNQGDFTWNSMSGRSVRLRSVPIQSLSELERARLQEVAFYQLQQDCDLSCQITIPKDGQKRKKSLRKKLDSLGKEKNKDKEFIPQAFGMPLSQVIANDRAYKLKQDLQRDEQKDASDFVASLLPFGNKRQNKELSSSNSSLSSTSETPNESTSPNTPEPAPRARRRGAMSVDSITDLDDNQSRLLEALQLSLPAEAQSKKEKARDKKLSLNPIYRQVPRLVDSCCQHLEKHGLQTVGIFRVGSSKKRVRQLREEFDRGIDVSLEEEHSVHDVAALLKEFLRDMPDPLLTRELYTAFINTLLLEPEEQLGTLQLLIYLLPPCNCDTLHRLLQFLSIVARHADDNISKDGQEVTGNKMTSLNLATIFGPNLLHKQKSSDKEFSVQSSARAEESTAIIAVVQKMIENYEALFMVPPDLQNEVLISLLETDPDVVDYLLRRKASQSSTSSVLPAAVQACPQYPASMFTP

SEQ ID NO: 1047 - protein, 771 aa, Homo sapiens
MSGRSVRLRSVPIQSLSELERARLQEVAFYQLQQDCDLSCQITIPKDGQKRKKSLRKKLDSLGKEKNKDKEFIPQAFGMPLSQVIANDRAYKLKQDLQRDEQKDASDFVASLLPFGNKRQNKELSSSNSSLSSTSETPNESTSPNTPEPAPRARRRGAMSVDSITDLDDNQSRLLEALQLSLPAEAQSKKEKARDKKLSLNPIYRQVPRLVDSCCQHLEKHGLQTVGIFRVGSSKKRVRQLREEFDRGIDVSLEEEHSVHDVAALLKEFLRDMPDPLLTRELYTAFINTLLLEPEEQLGTLQLLIYLLPPCNCDTLHRLLQFLSIVARHADDNISKDGQEVTGNKMTSLNLATIFGPNLLHKQKSSDKEFSVQSSARAEESTAIIAVVQKMIENYEALFMVPPDLQNEVLISLLETDPDVVDYLLRRKASQSSSPDMLQSEVSFSVGGRHSSTDSNKASSGDISPYDNNSPVLSERSLLAMQEDAAPGGSEKLYRVPGQFMLVGHLSSSKSRESSPGPRLGKDLSEEPFDIWGTWHSTLKSGSKDPGMTGSSGDIFESSSLRAGPCSLSQGNLSPNWPRWQGSPAELDSDTQGARRTQAAAPATEGRAHPAVSRACSTPHVQVAGKAERPTARSEQYLTLSGAHDLSESELDVAGLQSRATPQCQRPHGSGRDDKRPPPPYPGPGKPAAAAAWIQGPPEGVETPTDQGGQAAEREQQVTQKKLSSANSLPAGEQDSPRLGDAGWLDWQRERWQIWELLSTDNPDALPETLV

SEQ ID NO: 1048 - protein, 771 aa, Homo sapiens; identical to SEQ ID NO: 1047

SEQ ID NO: 1049 - protein, 1816 aa, Homo sapiens
MLSVVHFLRSFFKTPEPGAHLPGEGEIEDNQLPTSPAEQVEQGWNQQTDRDDSETLSQQSESGSDTKTDPFESASDTESLSGYLPRGVFHPLRGTPVDIEAPWEYPDVSATGPPQEQHLTSVPGLHAKEELDLSPSLEDDSCKNGWRAFATVAGEQEAGHLWDCATSLERESLLAGVPRHTGCCLQRATDSSGPEPVQGVAVQDLRGLSSVSLQKSRSESYLGIPVVWPFLLWCCELGRSWPHIHNRARALVLPSRGPLDNTAPLGTRTKKESTLGPAGDTELLWSQPHSDVPCQPPLRTSCLLRTNRHHSAPETTGDKNRASPRLNCGHMRALVRAHSIAGFSPECPEDPVGQNVVKSGTHVKEGAKNERDPRIQNIPSPAPTQLSGPIPAFQSGAPHLQGPCKPGGFRLQRASQDTPSAGLLGENQLRQDSRSCLVASCLTSELVKLSAEEVPEPAECKSEQSPESRTQEPQGTQLAPRAADERETQKHLWGISVQAGNQTSNYTSKYVLSEESKSPTRAKFPRQPSSEGTQVWSGDLMGCLEVSDSSDAPETTQKSSAIDTSKAAEEAMVLDPNYREQALQGLSEFKAATVSHCGPGAEEGEQGPGGAGGRQLEPKAGGEASRGRGALIIVAVEQKGLQASRSNAGPVPETLPRDFPKERPESPLSTGETPCESPTRGKTPAGNECELPAAPIQGAGDGALQRVAQAAELGRVLVPQAASEETPSTEEPPGERLRGESRSSGSGERGPEEAPEGGAAAARGQRPRVPALEPPQPPRGLRKGAQEPGKRPTFSKVTSFRKGRPLATESPGGVPAPTTEGRRWGSSGPEGLPRENPPAAAGRDAPPLHHGDASAWPEFVPQAAGDRTAGPAGAGHTGTSGDLGSRGPSSESCNAKRLKTTEKKLRARLALAHKTFSNFIESIVLEKENTHERSPSSPKGEKEKSRLRQGSWRAFLKSKDAGSPKKPTLVSLPLGPEVLSPAETDSHCEERAEDKEGYVFSDHWAPPLASTPLSSSLVSPEHRRKSEPTIKCTATQEGGRYLPSGIFPEKSWLASPGSPRAQQAGIAHTLPSSSACCLAYENPGTPCRPTSPKPLSPRPSAQRMGLHYPGRGSAISMVSLGSYSYVDSSSGDPERPKIPKGQTSFLLSLQTLNQDEQKEESREGGQGPRGLGTVPWLRDLPGSENHMPWEEPAGEKPSCSHSQKAFHMEPAQKPCFTTDMVTWALLCISAETVRGEAPSQPRGIPHRSPVSVDDLWLEKTQRKKLQKQAHVERRLHIGAVHKDGVKCWRKTIITSPESLNLPRRSHPLSQSAPTGLNHMGWPEHTPGTAMPDGALDTAVCADEVGSEEDLYDDLHSSSHHYSHPGGGGEQLAINELISDGSVVCAEALWDHVTMDDQELGFKAGDVIEVMDATNREWWWGRVADGEGWFPASFVRLRVNQDEPADDDAPLAGNSGAEDGGAEAQSSKDQMRTNVINEILSTERDYIKHLRDICEQADFQIYSEYCNNHPNACVELSRLTKLSKYVYFFEACRLLQKMIDISLDGFLLTPVQKICKYPLQLAELLKYTHPQHRDFKDVEAALHAMKNVAQLINERKRRLENIDKIAQWQSSIEDWEGEDLLVRSSELIYSGELTRVTQPQAKSQQRMFFLFDHQLIYCKKDLLRRDVLYYKGRLDMDGLEVVDLEDGKDRDLHVSIKNAFRLHRGATGDSHLLCTRKPEQKQRWLKAFAREREQVQLDQETGFSITELQRKQAMLNASKQQVTGKPKAVGRPCYLTRQKHPALPSNRPQQQVLVLAEPRRKPSTFWHSISRLAPFRK

SEQ ID NO: 1050 - protein, 690 aa, Homo sapiens
MPWEEPAGEKPSCSHSQKAFHMEPAQKPCFTTDMVTWALLCISAETVRGEAPSQPRGIPHRSPVSVDDLWLEKTQRKKLQKQAHVERRLHIGAVHKDGVKCWRKTIITSPESLNLPRRSHPLSQSAPTGLNHMGWPEHTPGTAMPDGALDTAVCADEVGSEEDLYDDLHSSSHHYSHPGGGGEQLAINELISDGSVVCAEALWDHVTMDDQELGFKAGDVIEVMDATNREWWWGRVADGEGWFPASFVRLRVNQDEPADDDAPLAGNSGAEDGGAEAQSSKDQMRTNVINEILSTERDYIKHLRDICEGYVRQCRKRADMFSEEQLRTIFGNIEDIYRCQKAFVKALEQRFNRERPHLSELGACFLEHQADFQIYSEYCNNHPNACVELSRLTKLSKYVYFFEACRLLQKMIDISLDGFLLTPVQKICKYPLQLAELLKYTHPQHRDFKDVEAALHAMKNVAQLINERKRRLENIDKIAQWQSSIEDWEGEDLLVRSSELIYSGELTRVTQPQAKSQQRMFFLFDHQLIYCKKDLLRRDVLYYKGRLDMDGLEVVDLEDGKDRDLHVSIKNAFRLHRGATGDSHLLCTRKPEQKQRWLKAFAREREQVQLDQETGFSITELQRKQAMLNASKQQVTGKPKAVGRPCYLTRQKHPALPSNRPQQQVLVLAEPRRKPSTFWHSISRLAPFRK

SEQ ID NO: 1051 - protein, 670 aa, Homo sapiens
MPWEEPAGEKPSCSHSQKAFHMEPAQKPCFTTDMVTWALLCISAETVRGEAPSQPRGIPHRSPVSVDDLWLEKTQRKKLQKQAHVERRLHIGAVHKDGVKCWRKTIITSPESLNLPRRSHPLSQSAPTGLNHMGWPEHTPGTAMPDGALDTAVCADEVGSEEDLYDDLHSSSHHYSHPGGGGEQLAINELISDGSVVCAEALWDHVTMDDQELGFKAGDVIEVMDATNREWWWGRVADGEGWFPASFVRLRVNQDEPADDDAPLAGNSGAEDGGAEAQSSKDQMRTNVINEILSTERDYIKHLRDICEGYVRQCRKRADMFSEEQLRTIFGNIEDIYRCQKAFVKALEQRFNRERPHLSELGACFLEHQADFQIYSEYCNNHPNACVELSRLTKLSKYVYFFEACRLLQKMIDISLDGFLLTPVQKICKYPLQLAELLKYTHPQHRDFKDVEAALHAMKNVAQLINERKRRLENIDKIAQWQSSIEDWEGEDLLVRSSELIYSGELTRVTQPQAKSQQRMFFLFDHQLIYCKKDLLRRDVLYYKGRLDMDGLEVVDLEDGKDRDLHVSIKNAFRLHRGATGDSHLLCTRKPEQKQRWLKAFAREREQVQLDQETGFSITELQRKQAMLNASKQQVTGKPKGRRTAAPPPRLPGPYPADIIPFSEPQSQAS

SEQ ID NO: 1052 - protein, 630 aa, Homo sapiens
MPWEEPAGEKPSCSHSQKAFHMEPAQKPCFTTDMVTWALLCISAETVRGEAPSQPRGIPHRSPVSVDDLWLEKTQRKKLQKQAHVERRLHIGAVHKDGVKCWRKTIITSPESLNLPRRSHPLSQSAPTGLNHMGWPEHTPGTAMPDGALDTAVCADEVGSEEDLYDDLHSSSHHYSHPGGGGEQLAINELISDGSVVCAEALWDHVTMDDQELGFKAGDVIEVMDATNREWWWGRVADGEGWFPASFVRLRVNQDEPADDDAPLAGNSGAEDGGAEAQSSKDQMRTNVINEILSTERDYIKHLRDICEQADFQIYSEYCNNHPNACVELSRLTKLSKYVYFFEACRLLQKMIDISLDGFLLTPVQKICKYPLQLAELLKYTHPQHRDFKDVEAALHAMKNVAQLINERKRRLENIDKIAQWQSSIEDWEGEDLLVRSSELIYSGELTRVTQPQAKSQQRMFFLFDHQLIYCKKDLLRRDVLYYKGRLDMDGLEVVDLEDGKDRDLHVSIKNAFRLHRGATGDSHLLCTRKPEQKQRWLKAFAREREQVQLDQETGFSITELQRKQAMLNASKQQVTGKPKAVGRPCYLTRQKHPALPSNRPQQQVLVLAEPRRKPSTFWHSISRLAPFRK

SEQ ID NO: 1053 - protein, 192 aa, Homo sapiens
MPWEEPAGEKPSCSHSQKAFHMEPAQKPCFTTDMVTWALLCISAETVRGEAPSQPRGIPHRSPVSVDDLWLEKTQRKKLQKQAHVERRLHIGAVHKDGVKCWRKTIITSPESLNLPRRSHPLSQSAPTGLNHMGWPEHTPGTAVGRPCYLTRQKHPALPSNRPQQQVLVLAEPRRKPSTFWHSISRLAPFRK

SEQ ID NO: 1054 - protein, 517 aa, Homo sapiens
MRGAVSRSWSLESLRSATAAMPDGALDTAVCADEVGSEEDLYDDLHSSSHHYSHPGGGGEQLAINELISDGSVVCAEALWDHVTMDDQELGFKAGDVIEVMDATNREWWWGRVADGEGWFPASFVRLRVNQDEPADDDAPLAGNSGAEDGGAEAQSSKDQMRTNVINEILSTERDYIKHLRDICEGYVRQCRKRADMFSEEQLRTIFGNIEDIYRCQKAFVKALEQRFNRERPHLSELGACFLEHQADFQIYSEYCNNHPNACVELSRLTKLSKYVYFFEACRLLQKMIDISLDGFLLTPVQKICKYPLQLAELLKYTHPQHRDFKDVEAALHAMKNVAQLINERKRRLENIDKIAQWQSSIEDWEGEDLLVRSSELIYSGELTRVTQPQAKSQQRMFFLFDHQLIYCKKDLLRRDVLYYKGRLDMDGLEVVDLEDGKDRDLHVSIKNAFRLHRGATGDSHLLCTRKPEQKQRWLKAFAREREQVQLDQETGFSITELQRKQAMLNASKQQVTGKPK

SEQ ID NO: 1055 - protein, 619 aa, Homo sapiens
MRPDGQQALDAVVRSFDCHSEAALRQRNDVIYCSLPRTAQGIVQREDQLEVLVSLREVWGRRRGRDGTCTGAMPDGALDTAVCADEVGSEEDLYDDLHSSSHHYSHPGGGGEQLAINELISDGSVVCAEALWDHVTMDDQELGFKAGDVIEVMDATNREWWWGRVADGEGWFPASFVRLRVNQDEPADDDAPLAGNSGAEDGGAEAQSSKDQMRTNVINEILSTERDYIKHLRDICEGYVRQCRKRADMFSEEQLRTIFGNIEDIYRCQKAFVKALEQRFNRERPHLSELGACFLEHQADFQIYSEYCNNHPNACVELSRLTKLSKYVYFFEACRLLQKMIDISLDGFLLTPVQKICKYPLQLAELLKYTHPQHRDFKDVEAALHAMKNVAQLINERKRRLENIDKIAQWQSSIEDWEGEDLLVRSSELIYSGELTRVTQPQAKSQQRMFFLFDHQLIYCKKDLLRRDVLYYKGRLDMDGLEVVDLEDGKDRDLHVSIKNAFRLHRGATGDSHLLCTRKPEQKQRWLKAFAREREQVQLDQETGFSITELQRKQAMLNASKQQVTGKPKAVGRPCYLTRQKHPALPSNRPQQQVLVLAEPRRKPSTFWHSISRLAPFRK

SEQ ID NO: 1056 - protein, 372 aa, Homo sapiens
PLASTPLSSSLVSPEHRRKSEPTIKCTATQEGGRYLPSGIFPEKSWLASPGSPRAQQAGIAHTLPSSSACCLAYENPGTPCRPTSPKPLSPRPSAQRMGLHYPGRGSAISMVSLGSYSYVDSSSGDPERPKIPKGQTSFLLSLQTLNQDEQKEESREGGQGPRGLGTVPWLRDLPGSENHMPWEEPAGEKPSCSHSQKAFHMEPAQKPCFTTDMVTWALLCISAETVRGEAPSQPRGIPHRSPVSVDDLWLEKTQRKKLQKQAHVERRLHIGAVHKDGVKCWRKTIITSPESLNLPRRSHPLSQSAPTGLNHMGWPEHTPGTAVGRPCYLTRQKHPALPSNRPQQQVLVLAEPRRKPSTFWHSISRLAPFRK

SEQ ID NO: 1057 - protein, 287 aa, Homo sapiens
  VARIANT 1: note = misc_feature - Xaa can be any naturally occurring amino acid
XACVELSRLTKLSKYVYFFEACRLLQKMIDISLDGFLLTPVQKICKYPLQLAELLKYTHPQHRDFKDVEAALHAMKNVAQLINERKRRLENIDKIAQWQSSIEDWEGEDLLVRSSELIYSGELTRVTQPQAKSQQRMFFLFDHQLIYCKKDLLRRDVLYYKGRLDMDGLEVVDLEDGKDRDLHVSIKNAFRLHRGATGDSHLLCTRKPEQKQRWLKAFAREREQVQLDQETGFSITELQRKQAMLNASKQQVTGKPKGRRTAAPPPRLPGPYPADIIPFSEPQSQAS

SEQ ID NO: 1058 - protein, 695 aa, Homo sapiens
  VARIANT 1: note = misc_feature - Xaa can be any naturally occurring amino acid
XEGGQGPRGLGTVPWLRDLPGSENHMPWEEPAGEKPSCSHSQKAFHMEPAQKPCFTTDMVTWALLCISAETVRGEAPSQPRGIPHRSPVSVDDLWLEKTQRKKLQKQAHVERRLHIGAVHKDGVKCWRKTIITSPESLNLPRRSHPLSQSAPTGLNHMGWPEHTPGTAMPDGALDTAVCADEVGSEEDLYDDLHSSSHHYSHPGGGGEQLAINELISDGSVVCAEALWDHVTMDDQELGFKAGDVIEVMDATNREWWWGRVADGEGWFPASFVRLRVNQDEPADDDAPLAGNSGAEDGGAEAQSSKDQMRTNVINEILSTERDYIKHLRDICEGYVRQCRKRADMFSEEQLRTIFGNIEDIYRCQKAFVKALEQRFNRERPHLSELGACFLEHQADFQIYSEYCNNHPNACVELSRLTKLSKYVYFFEACRLLQKMIDISLDGFLLTPVQKICKYPLQLAELLKYTHPQHRDFKDVEAALHAMKNVAQLINERKRRLENIDKIAQWQSSIEDWEGEDLLVRSSELIYSGELTRVTQPQAKSQQRMFFLFDHQLIYCKKDLLRRDVLYYKGRLDMDGLEVVDLEDGKDRDLHVSIKNAFRLHRGATGDSHLLCTRKPEQKQRWLKAFAREREQVQLDQETGFSITELQRKQAMLNASKQQVTGKPKGRRTAAPPPRLPGPYPADIIPFSEPQSQAS

SEQ ID NO: 1059 - protein, 142 aa, Homo sapiens
  VARIANT 1: note = misc_feature - Xaa can be any naturally occurring amino acid
XKKLRARLALAHKTFSNFIESIVLEKENTHERSPSSPKGEKEKSRLRQGSWRAFLKSKDAGSPKKPTLVSLPLGPEVLSPAETDSHCEERAEDKEGYVFSDHWAPPLASTPLSSSLVSPEHRRKSEPTIKCTATQEGDAKPR

SEQ ID NO: 1060 - protein, 173 aa, Homo sapiens
MCLLLGATGVGKTLLVKRLQEVSSRDGKGDLGEPPPTRPTVGTNLTDIVAQRKITIRELGGCMGPIWSSYYGNCRSLLFVMDASDPTQLSASCVQLLGLLSAEQLAEASVLILFNKIDLPCYMSTEEMKSLIRLPDIIACAKQNITTAEISAREGTGLAGVLAWLQATHRAND

SEQ ID NO: 1061 - protein, 93 aa, Homo sapiens
MDASDPTQLSASCVQLLGLLSAEQLAEASVLILFNKIDLPCYMSTEEMKSLIRLPDIIACAKQNITTAEISAREGTGLAGVLAWLQATHRAND

SEQ ID NO: 1062 - protein, 93 aa, Homo sapiens; identical to SEQ ID NO: 1061

SEQ ID NO: 1063 - protein, 93 aa, Homo sapiens; identical to SEQ ID NO: 1061

SEQ ID NO: 1064 - protein, 111 aa, Homo sapiens
MGPIWSSYYGNCRSLLFVMDASDPTQLSASCVQLLGLLSAEQLAEASVLILFNKIDLPCYMSTEEMKSLIRLPDIIACAKQNITTAEISAREGTGLAGVLAWLQATHRAND

SEQ ID NO: 1065 - protein, 111 aa, Homo sapiens; identical to SEQ ID NO: 1064

SEQ ID NO: 1066 - protein, 197 aa, Homo sapiens
MRVAGGRALSRGAELRVPGGAKHGMCLLLGATGVGKTLLVKRLQEVSSRDGKGDLGEPPPTRPTVGTNLTDIVAQRKITIRELGGCMGPIWSSYYGNCRSLLFVMDASDPTQLSASCVQLLGLLSAEQLAEASVLILFNKIDLPCYMSTEEMKSLIRLPDIIACAKQNITTAEISAREGTGLAGVLAWLQATHRAND

SEQ ID NO: 1067 - protein, 197 aa, Homo sapiens; identical to SEQ ID NO: 1066

SEQ ID NO: 1068 - protein, 48 aa, Homo sapiens
VGTNLTDIVAQRKITIRELGGCMGPIWSSYYGNCRSLLACAADTSMEN

SEQ ID NO: 1069 - protein, 935 aa, Homo sapiens
MAAAKPTLTDSLSFCLAQLAAAAGEALGGEKDPATNETPLSRALLALRTRHIKAAGGIERFRARGGLRPLLALLRRAAAAGSAPSQAGPGSAPSSAASGASSPAPASGPAPSAVSSSSPTPPVRLRKTLDLALSILADCCTEGACRTEVRRLGGILPLVTILQCMKTDSIQNRTARALGNLAMEPESCGDIHCAGAVPLLVESLTACQDSQCLQSVVRALRNLADSPQHRLALAQQGAVRPLAELLATAPDAALTLALVRALLELSRGCSRACAEQLSLGGGLGPLVSLASHPKRAVREGTILILANLCAQGLIRPALGNAGGVEVLVDELRQRRDPNGASPTSQQPLVRAVCLLCREAINRARLRDAGGLDLLMGLLRDPRASAWHPRIVAALVGFLYDTGALGRLQALGLVPLLAGQLCGEAGEEEEEGREAASWDFPEERTPERAQGGSFRSLRSWLISEGYATGPDDISPDWSPEQCPPEPMEPASPAPTPTSLRAPRTQRTPGRSPAAAIEEPWGREGPALLLLSRFSQAPDPSGALVTGPALYGLLTYVTGAPGPPSPRALRILSRLTCNPACLEAFVRSYGAALLRAWLVLGVAPDDWPAPRARPTLHSRHRELGERLLQNLTVQAESPFGVGALTHLLLSGSPEDRVACALTLPFICRKPSLWRRLLLEQGGLRLLLAALTRPAPHPLFLFFAADSLSCLQDLVSPTVSPAVPQAVPMDLDSPSPCLYEPLLGPAPVPAPDLHFLLDSGLQLPAQRAASATASPFFRALLSGSFAEAQMDLVPLRGLSPGAAWPVLHHLHGCRGCGAALGPVPPPGQPLLGSEAEEALEAAGRFLLPGLEEELEEAVGRIHLGPQGGPESVGEVFRLGRPRLAAHCARWTLGSEQCPRKRGLALVGLVEAAGEEAGPLTEALLAVVMGIELGARVPA

SEQ ID NO: 1070 - protein, 935 aa, Homo sapiens; identical to SEQ ID NO: 1069

SEQ ID NO: 1071 - protein, 725 aa, Homo sapiens
MAAAKPTLTDSLSFCLAQLAAAAGEALGGEKDPATNETPLSRALLALRTRHIKAAGGIERFRARGGLRPLLALLRRAAAAGSAPSQAGPGSAPSSAASGASSPAPASGPAPSAVSSSSPTPPVRLRKTLDLALSILADCCTEGACRTEVRRLGGILPLVTILQCMKTDSIQNRTARALGNLAMEPESCGDIHCAGAVPLLVESLTACQDSQCLQSVVRALRNLADSPQHRLALAQQGAVRPLAELLATAPDAALTLALVRALLELSRGCSRACAEQLSLGGGLGPLVSLASHPKRAVREGTILILANLCAQGLIRPALGNAGGVEVLVDELRQRRDPNGASPTSQQPLVRAVCLLCREAINRARLRDAGGLDLLMGLLRDPRASAWHPRIVAALVGFLYDTGALGRLQALGLVPLLAGQLCGEAGEEEEEGREAASWDFPEERTPERAQGGSFRSLRSWLISEGYATGPDDISPDWSPEQCPPEPMEPASPAPTPTSLRAPRTQRTPGRSPAAAIEEPWGREGPALLLLSRFSQAPDPSGALVTGPALYGLLTYVTGAPGPPSPRALRILSRLTCNPACLEAFVRSYGAALLRAWLVLGVAPDDWPAPRARPTLHSRHRELGEFPYPPVSLPPCESPSSPMASMGPEPHLPTHLSSPARPPDNLSPEWGGEQGVPVPPWAHRQSSAVSSALALGPRYPNSRCSPAPRIWAGLCFFPGSAIGSALS

SEQ ID NO: 1072 - protein, 771 aa, Homo sapiens
MKTDSIQNRTARALGNLAMEPESCGDIHCAGAVPLLVESLTACQDSQCLQSVVRALRNLADSPQHRLALAQQGAVRPLAELLATAPDAALTLALVRALLELSRGCSRACAEQLSLGGGLGPLVSLASHPKRAVREGTILILANLCAQGLIRPALGNAGGVEVLVDELRQRRDPNGASPTSQQPLVRAVCLLCREAINRARLRDAGGLDLLMGLLRDPRASAWHPRIVAALVGFLYDTGALGRLQALGLVPLLAGQLCGEAGEEEEEGREAASWDFPEERTPERAQGGSFRSLRSWLISEGYATGPDDISPDWSPEQCPPEPMEPASPAPTPTSLRAPRTQRTPGRSPAAAIEEPWGREGPALLLLSRFSQAPDPSGALVTGPALYGLLTYVTGAPGPPSPRALRILSRLTCNPACLEAFVRSYGAALLRAWLVLGVAPDDWPAPRARPTLHSRHRELGERLLQNLTVQAESPFGVGALTHLLLSGSPEDRVACALTLPFICRKPSLWRRLLLEQGGLRLLLAALTRPAPHPLFLFFAADSLSCLQDLVSPTVSPAVPQAVPMDLDSPSPCLYEPLLGPAPVPAPDLHFLLDSGLQLPAQRAASATASPFFRALLSGSFAEAQMDLVPLRGLSPGAAWPVLHHLHGCRGCGAALGPVPPPGQPLLGSEAEEALEAAGRFLLPGLEEELEEAVGRIHLGPQGGPESVGEVFRLGRPRLAAHCARWTLGSEQCPRKRGLALVGLVEAAGEEAGPLTEALLAVVMGIELGARVPA

SEQ ID NO: 1073 - protein, 1030 aa, Homo sapiens
MVTLGAGVRLFTGVYPVVLNQIRATSEASAITRTTMPAPELTSTSRAEDTRDTGVQLRKRKIPQARHSRKRQRTFSFRSLGSAARSGAESEARAKMAAAKPTLTDSLSFCLAQLAAAAGEALGGEKDPATNETPLSRALLALRTRHIKAAGGIERFRARGGLRPLLALLRRAAAAGSAPSQAGPGSAPSSAASGASSPAPASGPAPSAVSSSSPTPPVRLRKTLDLALSILADCCTEGACRTEVRRLGGILPLVTILQCMKTDSIQNRTARALGNLAMEPESCGDIHCAGAVPLLVESLTACQDSQCLQSVVRALRNLADSPQHRLALAQQGAVRPLAELLATAPDAALTLALVRALLELSRGCSRACAEQLSLGGGLGPLVSLASHPKRAVREGTILILANLCAQGLIRPALGNAGGVEVLVDELRQRRDPNGASPTSQQPLVRAVCLLCREAINRARLRDAGGLDLLMGLLRDPRASAWHPRIVAALVGFLYDTGALGRLQALGLVPLLAGQLCGEAGEEEEEGREAASWDFPEERTPERAQGGSFRSLRSWLISEGYATGPDDISPDWSPEQCPPEPMEPASPAPTPTSLRAPRTQRTPGRSPAAAIEEPWGREGPALLLLSRFSQAPDPSGALVTGPALYGLLTYVTGAPGPPSPRALRILSRLTCNPACLEAFVRSYGAALLRAWLVLGVAPDDWPAPRARPTLHSRHRELGERLLQNLTVQAESPFGVGALTHLLLSGSPEDRVACALTLPFICRKPSLWRRLLLEQGGLRLLLAALTRPAPHPLFLFFAADSLSCLQDLVSPTVSPAVPQAVPMDLDSPSPCLYEPLLGPAPVPAPDLHFLLDSGLQLPAQRAASATASPFFRALLSGSFAEAQMDLVPLRGLSPGAAWPVLHHLHGCRGCGAALGPVPPPGQPLLGSEAEEALEAAGRFLLPGLEEELEEAVGRIHLGPQGGPESVGEVFRLGRPRLAAHCARWTLGSEQCPRKRGLALVGLVEAAGEEAGPLTEALLAVVMGIELGARVPA

SEQ ID NO: 1074 - protein, 10 aa, Homo sapiens
  VARIANT 1: note = misc_feature - Xaa can be any naturally occurring amino acid
XLGKCSAPVS

SEQ ID NO: 1075 - protein, 598 aa, Homo sapiens
  VARIANT 1: note = misc_feature - Xaa can be any naturally occurring amino acid
XTEVRRLGGILPLVTILQCMKTDSIQNRTARALGNLAMEPESCGDIHCAGAVPLLVESLTACQDSQCLQSVALGLVPLLAGQLCGEAGEEEEEGREAASWDFPEERTPERAQGGSFRSLRSWLISEGYATGPDDISPDWSPEQCPPEPMEPASPAPTPTSLRAPRTQRTPGRSPAAAIEEPWGREGPALLLLSRFSQAPDPSGALVTGPALYGLLTYVTGAPGPPSPRALRILSRLTCNPACLEAFVRSYGAALLRAWLVLGVAPDDWPAPRARPTLHSRHRELGERLLQNLTVQAESPFGVGALTHLLLSGSPEDRVACALTLPFICRKPSLWRRLLLEQGGLRLLLAALTRPAPHPLFLFFAADSLSCLQDLVSPTVSPAVPQAVPMDLDSPSPCLYEPLLGPAPVPAPDLHFLLDSGLQLPAQRAASATASPFFRALLSGSFAEAQMDLVPLRGLSPGAAWPVLHHLHGCRGCGAALGPVPPPGQPLLGSEAEEALEAAGRFLLPGLEEELEEAVGRIHLGPQGGPESVGEVFRLGRPRLAAHCARWTLGSEQCPRKRGLALVGLVEAAGEEAGPLTEALLAVVMGIELGARVPA

SEQ ID NO: 1076 - protein, 23 aa, Homo sapiens
MADQRMDISSTISDFMSPGPTDL

SEQ ID NO: 1077 - protein, 59 aa, Homo sapiens
MADQRMDISSTISDFMSPGPTDLLSSSLGTSGVDCNRKRKGSSTDYQESMDTDKDDPHG

SEQ ID NO: 1078 - protein, 76 aa, Homo sapiens
MADQRMDISSTISDFMSPGPTDLLSSSLGTSGVDCNRKRKGSSTDYQESMDTDKDDPHGRLEYTEHQGRIKNAREA

SEQ ID NO: 1079 - protein, 101 aa, Homo sapiens
MADQRMDISSTISDFMSPGPTDLLSSSLGTSGVDCNRKRKGSSTDYQESMDTDKDDPHGRLEYTEHQGRIKNAREAHSQIEKRRRDKMNSFIDELASLVPT

SEQ ID NO: 1080 - protein, 135 aa, Homo sapiens
MADQRMDISSTISDFMSPGPTDLLSSSLGTSGVDCNRKRKGSSTDYQESMDTDKDDPHGRLEYTEHQGRIKNAREAHSQIEKRRRDKMNSFIDELASLVPTCNAMSRKLDKLTVLRMAVQHMKTLRGATNPYTEA

SEQ ID NO: 1081 - protein, 626 aa, Homo sapiens
MADQRMDISSTISDFMSPGPTDLLSSSLGTSGVDCNRKRKGSSTDYQESMDTDKDDPHGRLEYTEHQGRIKNAREAHSQIEKRRRDKMNSFIDELASLVPTCNAMSRKLDKLTVLRMAVQHMKTLRGATNPYTEANYKPTFLSDDELKHLILRAADGFLFVVGCDRGKILFVSESVFKILNYSQNDLIGQSLFDYLHPKDIAKVKEQLSSSDTAPRERLIDAKTGLPVKTDITPGPSRLCSGARRSFFCRMKCNRPSVKVEDKDFPSTCSKKKADRKSFCTIHSTGYLKSWPPTKMGLDEDNEPDNEGCNLSCLVAIGRLHSHVVPQPVNGEIRVKSMEYVSRHAIDGKFVFVDQRATAILAYLPQELLGTSCYEYFHQDDIGHLAECHRQVLQTREKITTNCYKFKIKDGSFITLRSRWFSFMNPWTKEVEYIVSTNTVVLANVLEGGDPTFPQLTASPHSMDSMLPSGEGGPKRTHPTVPGIPGGTRAGAGKIGRMIAEEIMEIHRIRGSSPSSCGSSPLNITSTPPPDASSPGGKKILNGGTPDIPSSGLLSGQAQENPGYPYSDSSSILGENPHIGIDMIDNDQGSSSPSNDEAAMAVIMSLLEADAGLGGPVDFSDLPWPL

SEQ ID NO: 1082 - protein, 625 aa, Homo sapiens
MADQRMDISSTISDFMSPGPTDLLSSSLGTSGVDCNRKRKGSSTDYQESMDTDKDDPHGRLEYTEHQGRIKNAREAHSQIEKRRRDKMNSFIDELASLVPTCNAMSRKLDKLTVLRMAVQHMKTLRGATNPYTEANYKPTFLSDDELKHLILRAADGFLFVVGCDRGKILFVSESVFKILNYSQNDLIGQSLFDYLHPKDIAKVKEQLSSSDTAPRERLIDAKTGLPVKTDITPGPSRLCSGARRSFFCRMKCNRPSVKVEDKDFPSTCSKKKDRKSFCTIHSTGYLKSWPPTKMGLDEDNEPDNEGCNLSCLVAIGRLHSHVVPQPVNGEIRVKSMEYVSRHAIDGKFVFVDQRATAILAYLPQELLGTSCYEYFHQDDIGHLAECHRQVLQTREKITTNCYKFKIKDGSFITLRSRWFSFMNPWTKEVEYIVSTNTVVLANVLEGGDPTFPQLTASPHSMDSMLPSGEGGPKRTHPTVPGIPGGTRAGAGKIGRMIAEEIMEIHRIRGSSPSSCGSSPLNITSTPPPDASSPGGKKILNGGTPDIPSSGLLSGQAQENPGYPYSDSSSILGENPHIGIDMIDNDQGSSSPSNDEAAMAVIMSLLEADAGLGGPVDFSDLPWPL

SEQ ID NO: 1083 - protein, 60 aa, Homo sapiens
MADQRMDISSTISDFMSPGPTDLLSSSLGTSGVDCNRKRKGSSTDYQLEYTEHQGRIKNA

SEQ ID NO: 1084 - protein, 46 aa, Homo sapiens
MINIESMDTDKDDPHGRLEYTEHQGRIKNAREAHSQIEKRRRDKMN

SEQ ID NO: 1085 - protein, 72 aa, Homo sapiens
MINIESMDTDKDDPHGRLEYTEHQGRIKNAREAHSQIEKRRRDKMNSFIDELASLVPTCNAMSRKLDKLTVL

SEQ ID NO: 1086 - protein, 141 aa, Homo sapiens
MINIESMDTDKDDPHGRLEYTEHQGRIKNAREAHSQIEKRRRDKMNSFIDELASLVPTCNAMSRKLDKLTVLRMAVQHMKTLRGATNPYTEANYKPTFLSDDELKHLILRAADGFLFVVGCDRGKILFVSESVFKILNYSQ

SEQ ID NO: 1087 - protein, 583 aa, Homo sapiens
MINIESMDTDKDDPHGRLEYTEHQGRIKNAREAHSQIEKRRRDKMNSFIDELASLVPTCNAMSRKLDKLTVLRMAVQHMKTLRGATNPYTEANYKPTFLSDDELKHLILRAADGFLFVVGCDRGKILFVSESVFKILNYSQNDLIGQSLFDYLHPKDIAKVKEQLSSSDTAPRERLIDAKTGLPVKTDITPGPSRLCSGARRSFFCRMKCNRPSVKVEDKDFPSTCSKKKADRKSFCTIHSTGYLKSWPPTKMGLDEDNEPDNEGCNLSCLVAIGRLHSHVVPQPVNGEIRVKSMEYVSRHAIDGKFVFVDQRATAILAYLPQELLGTSCYEYFHQDDIGHLAECHRQVLQTREKITTNCYKFKIKDGSFITLRSRWFSFMNPWTKEVEYIVSTNTVVLANVLEGGDPTFPQLTASPHSMDSMLPSGEGGPKRTHPTVPGIPGGTRAGAGKIGRMIAEEIMEIHRIRGSSPSSCGSSPLNITSTPPPDASSPGGKKILNGGTPDIPSSGLLSGQAQENPGYPYSDSSSILGENPHIGIDMIDNDQGSSSPSNDEAAMAVIMSLLEADAGLGGPVDFSDLPWPL

SEQ ID NO: 1088 - protein, 582 aa, Homo sapiens
MINIESMDTDKDDPHGRLEYTEHQGRIKNAREAHSQIEKRRRDKMNSFIDELASLVPTCNAMSRKLDKLTVLRMAVQHMKTLRGATNPYTEANYKPTFLSDDELKHLILRAADGFLFVVGCDRGKILFVSESVFKILNYSQNDLIGQSLFDYLHPKDIAKVKEQLSSSDTAPRERLIDAKTGLPVKTDITPGPSRLCSGARRSFFCRMKCNRPSVKVEDKDFPSTCSKKKDRKSFCTIHSTGYLKSWPPTKMGLDEDNEPDNEGCNLSCLVAIGRLHSHVVPQPVNGEIRVKSMEYVSRHAIDGKFVFVDQRATAILAYLPQELLGTSCYEYFHQDDIGHLAECHRQVLQTREKITTNCYKFKIKDGSFITLRSRWFSFMNPWTKEVEYIVSTNTVVLANVLEGGDPTFPQLTASPHSMDSMLPSGEGGPKRTHPTVPGIPGGTRAGAGKIGRMIAEEIMEIHRIRGSSPSSCGSSPLNITSTPPPDASSPGGKKILNGGTPDIPSSGLLSGQAQENPGYPYSDSSSILGENPHIGIDMIDNDQGSSSPSNDEAAMAVIMSLLEADAGLGGPVDFSDLPWPL

SEQ ID NO: 1089 - protein, 624 aa, Homo sapiens
MSKEAVSLWALTVSLQPPVPLCVCREMTGSGRRKQQCVTLPFISRELCFYLLLFPPPRLEYTEHQGRIKNAREAHSQIEKRRRDKMNSFIDELASLVPTCNAMSRKLDKLTVLRMAVQHMKTLRGATNPYTEANYKPTFLSDDELKHLILRAADGFLFVVGCDRGKILFVSESVFKILNYSQNDLIGQSLFDYLHPKDIAKVKEQLSSSDTAPRERLIDAKTGLPVKTDITPGPSRLCSGARRSFFCRMKCNRPSVKVEDKDFPSTCSKKKADRKSFCTIHSTGYLKSWPPTKMGLDEDNEPDNEGCNLSCLVAIGRLHSHVVPQPVNGEIRVKSMEYVSRHAIDGKFVFVDQRATAILAYLPQELLGTSCYEYFHQDDIGHLAECHRQVLQTREKITTNCYKFKIKDGSFITLRSRWFSFMNPWTKEVEYIVSTNTVVLANVLEGGDPTFPQLTASPHSMDSMLPSGEGGPKRTHPTVPGIPGGTRAGAGKIGRMIAEEIMEIHRIRGSSPSSCGSSPLNITSTPPPDASSPGGKKILNGGTPDIPSSGLLSGQAQENPGYPYSDSSSILGENPHIGIDMIDNDQGSSSPSNDEAAMAVIMSLLEADAGLGGPVDFSDLPWPL

SEQ ID NO: 1090 - protein, 171 aa, Homo sapiens
RATAILAYLPQELLGTSCYEYFHQDDIGHLAECHRQVLQTREKITTNCYKFKIKDGSFITLRSRWFSFMNPWTKEVEYIVSTNTVVLSRVDTGHLGQVEWCTVLSRPDSRFLIAGMFTEPTSWKAGTQPSHSSQHPPTAWTACCPLEKVAQRGPTPLFQGFQGEPGLGQEK

SEQ ID NO: 1091 - protein, 423 aa, Homo sapiens
MGMYPGVLVPSSRGGLPLEEVTVAEVLAARGYLTGMAGKWHLGVGPEGAFLPPHQGFHRFLGIPYSHDQGPCQNLTCFPPATPCDGGCDQGLVPIPLLANLSVEAQPPWLPGLEARYMAFAHDLMADAQRQDRPFFLYYASHHTHYPQFSGQSFAERSGRGPFGDSLMELDAAVGTLMTAIGDLGLLEETLVIFTADNGPETMRMSRGGCSGLLRCGKGTTYEGGVREPALAFWPGHIAPGVTHELASSLDLLPTLAALAGAPLPNVTLDGFDLSPLLLGTGKSPRQSLFFYPSYPDEVRGVFAVRTGKYKAHFFTQGSAHSDTTADPACHASSSLTAHEPPLLYDLSKDPGENYNLLGGVAGATPEVLQALKQLQLLKAQLDAAVTFGPSQVARGEDPALQICCHPGCTPRPACCHCPDPHA

SEQ ID NO: 1092 - protein, 509 aa, Homo sapiens
MSMGAPRSLLLALAAGLAVARPPNIVLIFADDLGYGDLGCYGHPSSTTPNLDQLAAGGLRFTDFYVPVSLCTPSRAALLTGRLPVRMGMYPGVLVPSSRGGLPLEEVTVAEVLAARGYLTGMAGKWHLGVGPEGAFLPPHQGFHRFLGIPYSHDQGPCQNLTCFPPATPCDGGCDQGLVPIPLLANLSVEAQPPWLPGLEARYMAFAHDLMADAQRQDRPFFLYYASHHTHYPQFSGQSFAERSGRGPFGDSLMELDAAVGTLMTAIGDLGLLEETLVIFTADNGPETMRMSRGGCSGLLRCGKGTTYEGGVREPALAFWPGHIAPGVTHELASSLDLLPTLAALAGAPLPNVTLDGFDLSPLLLGTGKSPRQSLFFYPSYPDEVRGVFAVRTGKYKAHFFTQGSAHSDTTADPACHASSSLTAHEPPLLYDLSKDPGENYNLLGGVAGATPEVLQALKQLQLLKAQLDAAVTFGPSQVARGEDPALQICCHPGCTPRPACCHCPDPHA

SEQ ID NO: 1093 - protein, 509 aa, Homo sapiens; identical to SEQ ID NO: 1092

SEQ ID NO: 1094 - protein, 509 aa, Homo sapiens; identical to SEQ ID NO: 1092

SEQ ID NO: 1095 - protein, 509 aa, Homo sapiens; identical to SEQ ID NO: 1092

SEQ ID NO: 1096 - protein, 69 aa, Homo sapiens
  VARIANT 1: note = misc_feature - Xaa can be any naturally occurring amino acid
XPSYPDEVRGVFAVRTGKYKAHFFTQGSAHSDTTADPACHASSSLTAHEPPLLYDLSKDPDGVSLCRPG

SEQ ID NO: 1097 - protein, 45 aa, Homo sapiens
MGPRGAASLPRGPGPRRLLLPVVLPLLLLLLLAPPGSGAGASRPP

SEQ ID NO: 1098 - protein, 533 aa, Homo sapiens
MGPRGAASLPRGPGPRRLLLPVVLPLLLLLLLAPPGSGAGASRPPHLVFLLADDLGWNDVGFHGSRIRTPHLDALAAGGVLLDNYYTQPLCTPSRSQLLTGRYQIRTGLQHQIIWPCQPSCVPLDEKLLPQLLKEAGYTTHMVGKWHLGMYRKECLPTRRGFDTYFGYLLGSEDYYSHERCTLIDALNVTRCALDFRDGEEVATGYKNMYSTNIFTKRAIALITNHPPEKPLFLYLALQSVHEPLQVPEEYLKPYDFIQDKNRHHYAGMVSLMDEAVGNVTAALKSSGLWNNTVFIFSTDNGGQTLAGGNNWPLRGRKWSLWEGGVRGVGFVASPLLKQKGVKNRELIHISDWLPTLVKLARGHTNGTKPLDGFDVWKTISEGSPSPRIELLHNIDPNFVDSSPCPRNSMAPAKDDSSLPEYSAFNTSVHAAIRHGNWKLLTGYPGCGYWFPPPSQYNVSEIPSSDPPTKTLWLFDIDRDPEERHDLSREYPHIVTKLLSRLQFYHKHSVPVYFPAQDPRCDPKATGVWGPWM

SEQ ID NO: 1099 - protein, 413 aa, Homo sapiens
MGPRGAASLPRGPGPRRLLLPVVLPLLLLLLLAPPGSGAGASRPPHLVFLLADDLGWNDVGFHGSRIRTPHLDALAAGGVLLDNYYTQPLCTPSRSQLLTGRYQIRTGLQHQIIWPCQPSCVPLDEKLLPQLLKEAGYTTHMVGKWHLGMYRKECLPTRRGFDTYFGYLLGSEDYYSHERCTLIDALNVTRCALDFRDGEEVATGYKNMYSTNIFTKRAIALITNHPPEKPLFLYLALQSVHEPLQVPEEYLKPYDFIQDKNRHHYAGMVSLMDEAVGNVTAALKSSGLWNNTVFIFSTDNGGQTLAGGNNWPLRGRKWSLWEGGVRGVGFVASPLLKQKGVKNRELIHISDWLPTLVKLARGHTNGTKPLDGFDVWKTISEGSPSPRIELLHNIDPNFVDSSPYWPECSLLL

SEQ ID NO: 1100 - protein, 398 aa, Homo sapiens
MGPRGAASLPRGPGPRRLLLPVVLPLLLLLLLAPPGSGAGASRPPHLVFLLADDLGWNDVGFHGSRIRTPHLDALAAGGVLLDNYYTQPLCTPSRSQLLTGRYQIRTGLQHQIIWPCQPSCVPLDEKLLPQLLKEAGYTTHMVGKWHLGMYRKECLPTRRGFDTYFGYLLGSEDYYSHERCTLIDALNVTRCALDFRDGEEVATGYKNMYSTNIFTKRAIALITNHPPEKPLFLYLALQSVHEPLQVPEEYLKPYDFIQDKNRHHYAGMVSLMDEAVGNVTAALKSSGLWNNTVFIFSTDNGGQTLAGGNNWPLRGRKWSLWEGGVRGVGFVASPLLKQKGVKNRELIHISDWLPTLVKLARGHTNGTKPLDGFDVWKTIRYLHPALFPPRTETPRAA

SEQ ID NO: 1101 - protein, 178 aa, Homo sapiens
MLHLHHSCLCFRSWLPAMLAVLLSLAPSASSDISASRPNILLLMADDLGIGDIGCYGNNTMRTPNIDRLAEDGVKLTQHISAASLCTPSRAAFLTGRYPVRSGMVSSIGYRVLQWTGASGGLPTNETTFAKILKEKGYATGLIGKWHLGLNCESASDHCHHPLHHGFDHFYGMPFSLM

SEQ ID NO: 1102 - protein, 589 aa, Homo sapiens
MLHLHHSCLCFRSWLPAMLAVLLSLAPSASSDISASRPNILLLMADDLGIGDIGCYGNNTMRTPNIDRLAEDGVKLTQHISAASLCTPSRAAFLTGRYPVRSGMVSSIGYRVLQWTGASGGLPTNETTFAKILKEKGYATGLIGKWHLGLNCESASDHCHHPLHHGFDHFYGMPFSLMGDCARWELSEKRVNLEQKLNFLFQVLALVALTLVAGKLTHLIPVSWMPVIWSALSAVLLLASSYFVGALIVHADCFLMRNHTITEQPMCFQRTTPLILQEVASFLKRNKHGPFLLFVSFLHVHIPLITMENFLGKSLHGLYGDNVEEMDWMVGRILDTLDVEGLSNSTLIYFTSDHGGSLENQLGNTQYGGWNGIYKGGKGMGGWEGGIRVPGIFRWPGVLPAGRVIGEPTSLMDVFPTVVRLAGGEVPQDRVIDGQDLLPLLLGTAQHSDHEFLMHYCERFLHAARWHQRDRGTMWKVHFVTPVFQPEGAGACYGRKVCPCFGEKVVHHDPPLLFDLSRDPSETHILTPASEPVFYQVMERVQQAVWEHQRTLSPVPLQLDRLGNIWRPWLQPCCGPFPLCWCLREDDPQ

SEQ ID NO: 1103 - protein, 614 aa, Homo sapiens
MRPVINRCAPGSLDLMLPQAASEGIVFHSLQISLCFRSWLPAMLAVLLSLAPSASSDISASRPNILLLMADDLGIGDIGCYGNNTMRTPNIDRLAEDGVKLTQHISAASLCTPSRAAFLTGRYPVRSGMVSSIGYRVLQWTGASGGLPTNETTFAKILKEKGYATGLIGKWHLGLNCESASDHCHHPLHHGFDHFYGMPFSLMGDCARWELSEKRVNLEQKLNFLFQVLALVALTLVAGKLTHLIPVSWMPVIWSALSAVLLLASSYFVGALIVHADCFLMRNHTITEQPMCFQRTTPLILQEVASFLKRNKHGPFLLFVSFLHVHIPLITMENFLGKSLHGLYGDNVEEMDWMVGRILDTLDVEGLSNSTLIYFTSDHGGSLENQLGNTQYGGWNGIYKGGKGMGGWEGGIRVPGIFRWPGVLPAGRVIGEPTSLMDVFPTVVRLAGGEVPQDRVIDGQDLLPLLLGTAQHSDHEFLMHYCERFLHAARWHQRDRGTMWKVHFVTPVFQPEGAGACYGRKVCPCFGEKVVHHDPPLLFDLSRDPSETHILTPASEPVFYQVMERVQQAVWEHQRTLSPVPLQLDRLGNIWRPWLQPCCGPFPLCWCLREDDPQ

SEQ ID NO: 1104 - protein, 544 aa, Homo sapiens
MSGSRERDNMLHLHHSWTPNIDRLAEDGVKLTQHISAASLCTPSRAAFLTGRYPVRSGMVSSIGYRVLQWTGASGGLPTNETTFAKILKEKGYATGLIGKWHLGLNCESASDHCHHPLHHGFDHFYGMPFSLMGDCARWELSEKRVNLEQKLNFLFQVLALVALTLVAGKLTHLIPVSWMPVIWSALSAVLLLASSYFVGALIVHADCFLMRNHTITEQPMCFQRTTPLILQEVASFLKRNKHGPFLLFVSFLHVHIPLITMENFLGKSLHGLYGDNVEEMDWMVGRILDTLDVEGLSNSTLIYFTSDHGGSLENQLGNTQYGGWNGIYKGGKGMGGWEGGIRVPGIFRWPGVLPAGRVIGEPTSLMDVFPTVVRLAGGEVPQDRVIDGQDLLPLLLGTAQHSDHEFLMHYCERFLHAARWHQRDRGTMWKVHFVTPVFQPEGAGACYGRKVCPCFGEKVVHHDPPLLFDLSRDPSETHILTPASEPVFYQVMERVQQAVWEHQRTLSPVPLQLDRLGNIWRPWLQPCCGPFPLCWCLREDDPQ

SEQ ID NO: 1105 - protein, 361 aa, Homo sapiens
MGCTDTPGYNHPPCPACPQGDGPSRNLQRDCYTDVALPLYENLNIVEQPVNLSSLAQKYAEKATQFIQRASTSGRPFLLYVALAHMHVPLPVTQLPAAPRGRSLYGAGLWEMDSLVGQIKDKVDHTVKENTFLWFTGDNGPWAQKCELAGSVGPFTGFWQTRQGGSPAKQTTWEGGHRVPALAYWPGRVPVNVTSTALLSVLDIFPTVVALAQASLPQGRRFDGVDVSEVLFGRSQPGHRVLFHPNSGAAGEFGALQTVRLERYKAFYITGGARACDGSTGPELQHKFPLIFNLEDDTAEAVPLERGGAEYQAVLPEVRKVLADVLQDIANDNISSADYTQDPSVTPCCNPYQIACRCQAA

SEQ ID NO: 1106 - protein, 29 aa, Homo sapiens
MGWLFLKVLLAGVSFSGFLYPLVDFCISG

SEQ ID NO: 1107 - protein, 525 aa, Homo sapiens
MGWLFLKVLLAGVSFSGFLYPLVDFCISGKTRGQKPNFVIILADDMGWGDLGANWAETKDTANLDKMASEGMRFVDFHAAASTCSPSRASLLTGRLGLRNGVTRNFAVTSVGGLPLNETTLAEVLQQAGYVTGIIGKWHLGHHGSYHPNFRGFDYYFGIPYSHDMGCTDTPGYNHPPCPACPQGDGPSRNLQRDCYTDVALPLYENLNIVEQPVNLSSLAQKYAEKATQFIQRASTSGRPFLLYVALAHMHVPLPVTQLPAAPRGRSLYGAGLWEMDSLVGQIKDKVDHTVKENTFLWFTGDNGPWAQKCELAGSVGPFTGFWQTRQGGSPAKQTTWEGGHRVPALAYWPGRVPVNVTSTALLSVLDIFPTVVALAQASLPQGRRFDGVDVSEVLFGRSQPGHRVLFHPNSGAAGEFGALQTVRLERYKAFYITGGARACDGSTGPELQHKFPLIFNLEDDTAEAVPLERGGAEYQAVLPEVRKVLADVLQDIANDNISSADYTQDPSVTPCCNPYQIACRCQAA

SEQ ID NO: 1108 - protein, 525 aa, Homo sapiens; identical to SEQ ID NO: 1107

SEQ ID NO: 1109 - protein, 569 aa, Homo sapiens
MHTLTGFSLVSLLSFGYLSWDWAKPSFVADGPGEAGEQPSAAPPQPPHIIFILTDDQGYHDVGYHGSDIETPTLDRLAAKGVKLENYYIQPICTPSRSQLLTGRYQIHTGLQHSIIRPQQPNCLPLDQVTLPQKLQEAGYSTHMVGKWHLGFYRKECLPTRRGFDTFLGSLTGNVDYYTYDNCDGPGVCGFDLHEGENVAWGLSGQYSTMLYAQRASHILASHSPQRPLFLYVAFQAVHTPLQSPREYLYRYRTMGNVARRKYAAMVTCMDEAVRNITWALKRYGFYNNSVIIFSSDNGGQTFSGGSNWPLRGRKGTYWEGGVRGLGFVHSPLLKRKQRTSRALMHITDWYPTLVGLAGGTTSAADGLDGYDVWPAISEGRASPRTEILHNIDPLYNHAQHGSLEGGFGIWNTAVQAAIRVGEWKLLTGDPGYGDWIPPQTLATFPGSWWNLERMASVRQAVWLFNISADPYEREDLAGQRPDVVRTLLARLAEYNRTAIPVRYPAENPRAHPDFNGGAWGPWASDEEEEEEEGRARSFSRGRRKKKCKICKLRSFFRKLNTRLMSQRI

SEQ ID NO: 1110 - protein, 86 aa, Homo sapiens
MVGKWHLGFYRKECLPTRRGFDTFLGSLTGNVDYYTYDNCDGPGVCGFDLHEGENVAWGLSGQYSTMLYAQRASHILASHSPQRPL

SEQ ID NO: 1111 - protein, 426 aa, Homo sapiens
MVGKWHLGFYRKECLPTRRGFDTFLGSLTGNVDYYTYDNCDGPGVCGFDLHEGENVAWGLSGQYSTMLYAQRASHILASHSPQRPLFLYVAFQAVHTPLQSPREYLYRYRTMGNVARRKYAAMVTCMDEAVRNITWALKRYGFYNNSVIIFSSDNGGQTFSGGSNWPLRGRKGTYWEGGVRGLGFVHSPLLKRKQRTSRALMHITDWYPTLVGLAGGTTSAADGLDGYDVWPAISEGRASPRTEILHNIDPLYNHAQHGSLEGGFGIWNTAVQAAIRVGEWKLLTGDPGYGDWIPPQTLATFPGSWWNLERMASVRQAVWLFNISADPYEREDLAGQRPDVVRTLLARLAEYNRTAIPVRYPAENPRAHPDFNGGAWGPWASDEEEEEEEGRARSFSRGRRKKKCKICKLRSFFRKLNTRLMSQRI

SEQ ID NO: 1112 - protein, 153 aa, Homo sapiens
MLLLWVSVVAALALAVLAPGAGEQRRRAAKAPNVVLVVSDSFDGRLTFHPGSQVVKLPFINFMKTRGTSFLNAYTNSPICCPSRAAMWSGLFTHLTESWNNFKGLDPNYTTWMDVMERHGYRTQKFGKLDYTSGHHSIRHSERGSTNQRSEKV

SEQ ID NO: 1113 - protein, 536 aa, Homo sapiens
MLLLWVSVVAALALAVLAPGAGEQRRRAAKAPNVVLVVSDSFDGRLTFHPGSQVVKLPFINFMKTRGTSFLNAYTNSPICCPSRAAMWSGLFTHLTESWNNFKGLDPNYTTWMDVMERHGYRTQKFGKLDYTSGHHSISNRVEAWTRDVAFLLRQEGRPMVNLIRNRTKVRVMERDWQNTDKAVNWLRKEAINYTEPFVIYLGLNLPHPYPSPSSGENFGSSTFHTSLYWLEKVSHDAIKIPKWSPLSEMHPVDYYSSYTKNCTGRFTKKEIKNIRAFYYAMCAETDAMLGEIILALHQLDLLQKTIVIYSSDHGELAMEHRQFYKMSMYEASAHVPLLMMGPGIKAGLQVSNVVSLVDIYPTMLDIAGIPLPQNLSGYSLLPLSSETFKNEHKVKNLHPPWILSEFHGCNVNASTYMLRTNHWKYIAYSDGASILPQLFDLSSDPDELTNVAVKFPEITYSLDQKLHSIINYPKVSASVHQYNKEQFIKWKQSIGQNYSNVIANLRWHQDWQKEPRKYENAIDQWLKTHMNPRAV

SEQ ID NO: 1114 - protein, 395 aa, Homo sapiens
MLLLWVSVVAALALAVLAPGAGEQRRRAAKAPNVVLVVSDSFDGRLTFHPGSQVVKLPFINFMKTRGTSFLNAYTNSPICCPSRAAMWSGLFTHLTESWNNFKGLDPNYTTWMDVMERHGYRTQKFGKLDYTSGHHSISNRVEAWTRDVAFLLRQEGRPMVNLIRNRTKVRVMERDWQNTDKAVNWLRKEAINYTEPFVIYLGLNLPHPYPSPSSGENFGSSTFHTSLYWLEKVSHDAIKIPKWSPLSEMHPVDYYSSYTKNCTGRFTKKEIKNIRAFYYAMCAETDAMLGEIILALHQLDLLQKTIVIYSSDHGELAMEHRQFYKMSMYEASAHVPLLMMGPGIKAGLQVSNVVSLVDIYPTMLDEKTEVEISKLLAEVHMASGILLEFLCLRT

SEQ ID NO: 1115 - protein, 46 aa, Homo sapiens
MLLLWVSVVAALALAVLAPGAGEQRRRAAKAPNVVLVVSDSFIPDD

SEQ ID NO: 1116 - protein, 92 aa, Homo sapiens
RAAKAPNVVLVVSDSFDGRLTFHPGSQVVKLPFINFMKTRGTSFLNAYTNSPICCPSRAVIVWKRGQEMLLSYSDKKAGPWLILSVTGLKSE

SEQ ID NO: 1117 - protein, 117 aa, Homo sapiens
KTCSHYECAFLGGLKTENCIENLEYFQPIYVYNPGEKNQKLEDHSEKNWKLEDHGEKNQKLEDHGVKILEPTQIPGMKIPEPFPLPGIKMIQLNEKPEDKSQGNINNPTPGPVPVPG

SEQ ID NO: 1118 - protein, 107 aa, Homo sapiens
MKTGHFEIVTMLLATMILVDIFQVKAEVLDMADNAFDDEYLKCTDRMEIKYVPQLLKEEKASHQQLDTVWENAKAKWAARKTQIFLPMNFKDNHGIALMAYISEAQE

SEQ ID NO: 1119 - protein, 129 aa, Homo sapiens
MKTGHFEIVTMLLATMILVDIFQVKAEVLDMADNAFDDEYLKCTDRMEIKYVPQLLKEEKASHQQLDTVWENAKAKWAARKTQIFLPMNFKDNHGIALMAYISEAQEQTPFYHLFSEAVKMAGQSREDY

SEQ ID NO: 1120 - protein, 175 aa, Homo sapiens
MKTGHFEIVTMLLATMILVDIFQVKAEVLDMADNAFDDEYLKCTDRMEIKYVPQLLKEEKASHQQLDTVWENAKAKWAARKTQIFLPMNFKDNHGIALMAYISEAQEQTPFYHLFSEAVKMAGQSREDYIYGFQFKAFHFYLTRALQLLRKPCEASSKTVVYRTSQGTSFTFGGL

SEQ ID NO: 1121 - protein, 202 aa, Homo sapiens
MKTGHFEIVTMLLATMILVDIFQVKAEVLDMADNAFDDEYLKCTDRMEIKYVPQLLKEEKASHQQLDTVWENAKAKWAARKTQIFLPMNFKDNHGIALMAYISEAQEQTPFYHLFSEAVKMAGQSREDYIYGFQFKAFHFYLTRALQLLRKPCEASSKTVVYRTSQGTSFTFGGLNQARFGHFTLAYSAKPQAANDQLTVLS

SEQ ID NO: 1122 - protein, 389 aa, Homo sapiens
MKTGHFEIVTMLLATMILVDIFQVKAEVLDMADNAFDDEYLKCTDRMEIKYVPQLLKEEKASHQQLDTVWENAKAKWAARKTQIFLPMNFKDNHGIALMAYISEAQEQTPFYHLFSEAVKMAGQSREDYIYGFQFKAFHFYLTRALQLLRKPCEASSKTVVYRTSQGTSFTFGGLNQARFGHFTLAYSAKPQAANDQLTVLSIYTCLGVDIENFLDKESERITLIPLNEVFQVSQEGAGNNLILQSINKTCSHYECAFLGGLKTENCIENLEYFQPIYVYNPGEKNQKLEDHSEKNWKLEDHGEKNQKLEDHGVKILEPTQIPGMKIPEPFPLPEDKSQGNINNPTPGPVPVPGPKSHPSASSGKLLLPQFGMVIILISVSAINLFVAL

SEQ ID NO: 1123 - protein, 378 aa, Homo sapiens
MKTGHFEIVTMLLATMILVDIFQVKAEVLDMADNAFDDEYLKCTDRMEIKYVPQLLKEEKASHQQLDTVWENAKAKWAARKTQIFLPMNFKDNHGIALMAYISEAQEQTPFYHLFSEAVKMAGQSREDYIYGFQFKAFHFYLTRALQLLRKPCEASSKTVVYRTSQGTSFTFGGLNQARFGHFTLAYSAKPQAANDQLTVLSIYTCLGVDIENFLDKESERITLIPLNEVFQVSQEGAGNNLILQSINKTCSHYECAFLGGLKTENCIENLEYFQPIYVYNPGEKNQKLEDHSEKNWKLEDHGEKNQKLEDHGVKILEPTQIPEDKSQGNINNPTPGPVPVPGPKSHPSASSGKLLLPQFGMVIILISVSAINLFVAL

SEQ ID NO: 1124 - protein, 367 aa, Homo sapiens
MKTGHFEIVTMLLATMILVDIFQVKAEVLDMADNAFDDEYLKCTDRMEIKYVPQLLKEEKASHQQLDTVWENAKAKWAARKTQIFLPMNFKDNHGIALMAYISEAQEQTPFYHLFSEAVKMAGQSREDYIYGFQFKAFHFYLTRALQLLRKPCEASSKTVVYRTSQGTSFTFGGLNQARFGHFTLAYSAKPQAANDQLTVLSIYTCLGVDIENFLDKESERITLIPLNEVFQVSQEGAGNNLILQSINKTCSHYECAFLGGLKTENCIENLEYFQPIYVYNPGEKNQKLEDHSEKNWKLEDHGEKNQKLEDHGVKILEPTQIPAPGPVPVPGPKSHPSASSGKLLLPQFGMVIILISVSAINLFVAL

SEQ ID NO: 1125 - protein, 314 aa, Homo sapiens
MGPLINRCKKILLPTTVPPATMRIWLLGGLLPFLLLLSGLQRPTEGSEVAIKIDFDFAPGSFDDQYQGCSKQVMEKLTQGDYFTKDIEAQKNYFRMWQKAHLAWLNQGKVLPQNMTTTHAVAILFYTLNSNVHSDFTRAMASVARTPQQYERSFHFKYLHYYLTSAIQLLRKDSIMENGTLCYEVHYRTKDVHFNAYTGATIRFGQFLSTSLLKEEAQEFGNQTLFTIFTCLGAPVQYFSLKKEVLIPPYELFKVINMSYHPRGDWLQLRSTGNLSTYNCQLLKASSKKCIPDPIAIASLSFLTSVIIFSKSRV

SEQ ID NO: 1126 - protein, 41 aa, Homo sapiens
PPATMRIWLLGGLLPFLLLLSGLQRPTEGSELPARNASLIL

SEQ ID NO: 1127 - protein, 65 aa, Homo sapiens
PPATMRIWLLGGLLPFLLLLSGLQRPTEGSEVAIKIDFDFAPGSFDDQYQGCSKQLPARNASLIL

SEQ ID NO: 1128 - protein, 273 aa, Homo sapiens
PPATMRIWLLGGLLPFLLLLSGLQRPTEGSEVAIKIDFDFAPGSFDDQYQGCSKQVMEKLTQGDYFTKDIEAQKNYFRMWQKAHLAWLNQGKVLPQNMTTTHAVAILFYTLNSNVHSDFTRAMASVARTPQQYERSFHFKYLHYYLTSAIQLLRKDSIMENGTLCYEVHYRTKDVHFNAYTGATIRFGQFLSTSLLKEEAQEFGNQTLFTIFTCLGAPVQYFSLKKEVLIPPYELFKVINMSYHPRGDWLQLRSTGNLSTYNCQLLKGILYLN

SEQ ID NO: 1129 - protein, 152 aa, Homo sapiens
AVPILPLGLAPDTFDDTYVGCAEEMEEKAAPLLKEEMAHHALLRESWEAAQETWEDKRRGLTLPPGFKAQNGIAIMVYTNSSNTLYWELNQAAFSVFPKEREVLIPPHEVFLVTRFSQDGAQSLVTLWSYNQTCSHFNCAYLGGEKRRGCVS

SEQ ID NO: 1130 - protein, 239 aa, Homo sapiens
MALAALMIALGSLGLHTWQAQAVPILPLGLAPDTFDDTYVGCAEEMEEKAAPLLKEEMAHHALLRESWEAAQETWEDKRRGLTLPPGFKAQNGIAIMVYTNSSNTLYWELNQAVRTGGGSRELYMRHFPFKALHFYLIRALQLLRGSGGCSRGPGEVVFRGVGSLRFEPKRLGDSVRLGQFASSSLDKAVAHRFGEKRRGCVSAPGVQLGSQSEGASSLPPWKTLLLAPGEFQLSGVGP

SEQ ID NO: 1131 - protein, 291 aa, Homo sapiens
MALAALMIALGSLGLHTWQAQAVPILPLGLAPDTFDDTYVGCAEEMEEKAAPLLKEEMAHHALLRESWEAAQETWEDKRRGLTLPPGFKAQNGIAIMVYTNSSNTLYWELNQAVRTGGGSRELYMRHFPFKALHFYLIRALQLLRGSGGCSRGPGEVVFRGVGSLRFEPKRLGDSVRLGQFASSSLDKAVAHRFGNATLFSLTTCFGAPIQAFSVFPKEREVLIPPHEVFLVTRFSQDGAQSLVTLWSYNQTCSHFNCAYLGGEKRRGCVSAPGALGTGDLHMTKRHLQQP

SEQ ID NO: 1132 - protein, 291 aa, Homo sapiens; identical to SEQ ID NO: 1131

SEQ ID NO: 1133 - protein, 264 aa, Homo sapiens
  VARIANT 1: note = misc_feature - Xaa can be any naturally occurring amino acid
XEMEEKAAPLLKEEMAHHALLRESWEAAQETWEDKRRGLTLPPGFKAQNGIAIMVYTNSSNTLYWELNQAVRTGGGSRELYMRHFPFKALHFYLIRALQLLRGSGGCSRGPGEVVFRGVGSLRFEPKRLGDSVRLGQFASSSLDKAVAHRFGNATLFSLTTCFGAPIQAFSVFPKEREVLIPPHEVFLVTRFSQDGAQSLVTLWSYNQTCSHFNCAYLGGEKRRGCVSAPGVQLGSQSEGASSLPPWKTLLLAPGEFQLSGVGP

SEQ ID NO: 1134 - protein, 89 aa, Homo sapiens
MELGLGGLSTLSHCPWPRQQAPLGLSAQPALWPTLAALALLSSVAEASLGSAPRSPAPREGPPPVLASPAGHLPGGRTARWCSGRARRP

SEQ ID NO: 1135 - protein, 89 aa, Homo sapiens; identical to SEQ ID NO: 1134

SEQ ID NO: 1136 - protein, 228 aa, Homo sapiens
MELGLGGLSTLSHCPWPRQQAPLGLSAQPALWPTLAALALLSSVAEASLGSAPRSPAPREGPPPVLASPAGHLPGGRTARWCSGRARRPPPQPSRPAPPPPAPPSALPRGGRAARAGGPGSRARAAGARGCRLRSQLVPVRALGLGHRSDELVRFRFCSGSCRRARSPHDLSLASLLGAGALRPPPGSRPVSQPCCRPTRYEAVSFMDVNSTWRTVDRLSATACGCLG

SEQ ID NO: 1137 - protein, 228 aa, Homo sapiens; identical to SEQ ID NO: 1136

SEQ ID NO: 1138 - protein, 76 aa, Homo sapiens
MELGLGGLSTLSHCPWPRQQAPLGLSAQPALWPTLAALALLSSVAEASLGSAPRSPAPREGPPPVLASPAGHLPGR

SEQ ID NO: 1139 - protein, 76 aa, Homo sapiens; identical to SEQ ID NO: 1138

SEQ ID NO: 1140 - protein, 66 aa, Homo sapiens
MELGLGGLSTLSHCPWPRQQPALWPTLAALALLSSVAEASLGSAPRSPAPREGPPPVLASPAGHLP

SEQ ID NO: 1141 - protein, 66 aa, Homo sapiens; identical to SEQ ID NO: 1140

SEQ ID NO: 1142 - protein, 220 aa, Homo sapiens
MELGLGGLSTLSHCPWPRQQPALWPTLAALALLSSVAEASLGSAPRSPAPREGPPPVLASPAGHLPGGRTARWCSGRARRPPPQPSRPAPPPPAPPSALPRGGRAARAGGPGSRARAAGARGCRLRSQLVPVRALGLGHRSDELVRFRFCSGSCRRARSPHDLSLASLLGAGALRPPPGSRPVSQPCCRPTRYEAVSFMDVNSTWRTVDRLSATACGCLG

SEQ ID NO: 1143 - protein, 220 aa, Homo sapiens; identical to SEQ ID NO: 1142

SEQ ID NO: 1144 - protein, 237 aa, Homo sapiens
MPGLISARGQPLLEVLPPQAHLGALFLPEAPLGLSAQPALWPTLAALALLSSVAEASLGSAPRSPAPREGPPPVLASPAGHLPGGRTARWCSGRARRPPPQPSRPAPPPPAPPSALPRGGRAARAGGPGSRARAAGARGCRLRSQLVPVRALGLGHRSDELVRFRFCSGSCRRARSPHDLSLASLLGAGALRPPPGSRPVSQPCCRPTRYEAVSFMDVNSTWRTVDRLSATACGCLG

SEQ ID NO: 1145 - protein, 31 aa, Homo sapiens
GRAVDRGLQKINLSSFRTNVQRCSSMVHHKS

SEQ ID NO: 1146 - protein, 125 aa, Homo sapiens
MLDKAPVLKVIVNSLKNMINTFVPSGKIMQVVDEKLPGLLGNFPGPFEEEMKGIAAVTDIPLGEIISFNIFYELFTICTSIVAEDKKGHLIHGRNMDFGVFLGWNINNDTWVITEQLKPLTVNLD

SEQ ID NO: 1147 - protein, 151 aa, Homo sapiens
MLDKAPVLKVIVNSLKNMINTFVPSGKIMQVVDEKLPGLLGNFPGPFEEEMKGIAAVTDIPLGEIISFNIFYELFTICTSIVAEDKKGHLIHGRNMDFGVFLGWNINNDTWVITEQLKPLTVNLDFQRNNKTVFKASSFAGYVGMLTGFKP

SEQ ID NO: 1148 - protein, 330 aa, Homo sapiens
MLDKAPVLKVIVNSLKNMINTFVPSGKIMQVVDEKLPGLLGNFPGPFEEEMKGIAAVTDIPLGEIISFNIFYELFTICTSIVAEDKKGHLIHGRNMDFGVFLGWNINNDTWVITEQLKPLTVNLDFQRNNKTVFKASSFAGYVGMLTGFKPGLFSLTLNERFSINGGYLGILEWILGKKDVMWIGFLTRTVLENSTSYEEAKNLLTKTKILAPAYFILGGNQSGEGCVITRDRKESLDVYELDAKQGRWYVVQTNYDRWKHPFFLDDRRTPAKMCLNRTSQENISFETMYDVLSTKPVLNKLTVYTTLIDVTKGQFETYLRDCPDPCIGW

SEQ ID NO: 1149 - protein, 330 aa, Homo sapiens; identical to SEQ ID NO: 1148

SEQ ID NO: 1150 - protein, 110 aa, Homo sapiens
MLDKAPVLKVIVNSLKNMINTFVPSGKIMQVVDEKLPGLLGNFPGPFEEEMKGIAAVTDIPLGKVHLEALKKKVIKFFYKFPLRCDIHTAQVLYVLDIQHRCTGLRYTAQ

SEQ ID NO: 1151 - protein, 110 aa, Homo sapiens; identical to SEQ ID NO: 1150

SEQ ID NO: 1152 - protein, 187 aa, Homo sapiens
MNCCIGLGEKARGSHRASYPSLSALFTEASILGFGSFAVKAQVAWKALSLSLRHPFRGTEKPRPLLPVPPPPSVPPTAWNGAVPGRGSRGGGGVACPRPSRLFFASAGVRGVALAARAMPGRSCVALVLLAAAVSCAVAQHAPPWTEDCRKSTYPPSGPTYRGAVPWYTINLDLPPYKRWHELMLDK

SEQ ID NO: 1153 - protein, 72 aa, Homo sapiens
MNCCIGLGEKARGSHRASYPSLSALFTEASILGFGSFAVKAQVGNQQLGGPEWIRFSLTPRPLNCSLSLTPR

SEQ ID NO: 1154 - protein, 97 aa, Homo sapiens
MNCCIGLGEKARGSHRASYPSLSALFTEASILGFGSFAVKAQVGNQQLGGPEWIRFSLTPRPLNCSLSLTPRGQRTAENQPILLQDQRTEVQFHGTP

SEQ ID NO: 1155 - protein, 74 aa, Homo sapiens
MNCCIGLGEKARGSHRASYPSLSALFTEASILGFGSFAVKAQVGNQQLGGPEWIRFSLTPRPLNCSLSLTPRWG

SEQ ID NO: 1156 - protein, 74 aa, Homo sapiens; identical to SEQ ID NO: 1155

SEQ ID NO: 1157 - protein, 74 aa, Homo sapiens; identical to SEQ ID NO: 1155

SEQ ID NO: 1158 - protein, 74 aa, Homo sapiens; identical to SEQ ID NO: 1155

SEQ ID NO: 1159 - protein, 74 aa, Homo sapiens; identical to SEQ ID NO: 1155

SEQ ID NO: 1160 - protein, 71 aa, Homo sapiens
MNCCIGLGEKARGSHRASYPSLSALFTEASILGFGSFAVKAQVVDRGLQKINLSSFRTNVQRCSSMVHHKS

SEQ ID NO: 1161 - protein, 58 aa, Homo sapiens
MNCCIGLGEKARGSHRASYPSLSALFTEASILGFGSFAVKAQWTEDCRKSTYPPSGPT

SEQ ID NO: 1162 - protein, 59 aa, Homo sapiens
MNCCIGLGEKARGSHRASYPSLSALFTEASILGFGSFAVKAQWTEDCRKSTYPPSGPTL

SEQ ID NO: 1163 - protein, 389 aa, Homo sapiens
MNCCIGLGEKARGSHRASYPSLSALFTEASILGFGSFAVKAQWTEDCRKSTYPPSGPTVFPAVIRYRGAVPWYTINLDLPPYKRWHELMLDKAPVPGLLGNFPGPFEEEMKGIAAVTDIPLGEIISFNIFYELFTICTSIVAEDKKGHLIHGRNMDFGVFLGWNINNDTWVITEQLKPLTVNLDFQRNNKTVFKASSFAGYVGMLTGFKPGLFSLTLNERFSINGGYLGILEWILGKKDVMWIGFLTRTVLENSTSYEEAKNLLTKTKILAPAYFILGGNQSGEGCVITRDRKESLDVYELDAKQGRWYVVQTNYDRWKHPFFLDDRRTPAKMCLNRTSQENISFETMYDVLSTKPVLNKLTVYTTLIDVTKGQFETYLRDCPDPCIGW

SEQ ID NO: 1164 - protein, 411 aa, Homo sapiens
MNCCIGLGEKARGSHRASYPSLSALFTEASILGFGSFAVKAQWTEDCRKSTYPPSGPTYRGAVPWYTINLDLPPYKRWHELMLDKAPVLKVIVNSLKNMINTFVPSGKIMQVVDEKLPGLLGNFPGPFEEEMKGIAAVTDIPLGEIISFNIFYELFTICTSIVAEDKKGHLIHGRNMDFGVFLGWNINNDTWVITEQLKPLTVNLDFQRNNKTVFKASSFAGYVGMLTGFKPGLFSLTLNERFSINGGYLGILEWILGKKDVMWIGFLTRTVLENSTSYEEAKNLLTKTKILAPAYFILGGNQSGEGCVITRDRKESLDVYELDAKQGRWYVVQTNYDRWKHPFFLDDRRTPAKMCLNRTSQENISFETMYDVLSTKPVLNKLTVYTTLIDVTKGQFETYLRDCPDPCIGW

SEQ ID NO: 1165 - protein, 341 aa, Homo sapiens
MNCCIGLGEKARGSHRASYPSLSALFTEASILGFGSFAVKAQWTEDCRKSTYPPSGPTYRGAVPWYTINLDLPPYKRWHELMLDKAPVLKVIVNSLKNMINTFVPSGKIMQVVDEKLPGLLGNFPGPFEEEMKGIAAVTDIPLGEIISFNIFYELFTICTSIVAEDKKGHLIHGRNMDFGVFLGWNINNDTWVITEQLKPLTVNLDFQRNNKTVFKASSFAGYVGMLTGFKPGLFSLTLNERFSINGGYLGILEWILGKKDVMWIGFLTRTVLENSTSYEEAKNLLTKTKILAPAYFILGGNQSGEGCVITRDRKESLDVYEISHLKPCMMSCQQNLSSTS

SEQ ID NO: 1166 - protein, 386 aa, Homo sapiens
MNCCIGLGEKARGSHRASYPSLSALFTEASILGFGSFAVKAQWTEDCRKSTYPPSGPTYRGAVPWYTINLDLPPYKRWHELMLDKAPVLKVIVNSLKNMINTFVPSGKIMQVVDEKLPGLLGNFPGPFEEEMKGIAAVTDIPLGHLIHGRNMDFGVFLGWNINNDTWVITEQLKPLTVNLDFQRNNKTVFKASSFAGYVGMLTGFKPGLFSLTLNERFSINGGYLGILEWILGKKDVMWIGFLTRTVLENSTSYEEAKNLLTKTKILAPAYFILGGNQSGEGCVITRDRKESLDVYELDAKQGRWYVVQTNYDRWKHPFFLDDRRTPAKMCLNRTSQENISFETMYDVLSTKPVLNKLTVYTTLIDVTKGQFETYLRDCPDPCIGW

SEQ ID NO: 1167 - protein, 191 aa, Homo sapiens
MNCCIGLGEKARGSHRASYPSLSALFTEASILGFGSFAVKAQWTEDCRKSTYPPSGPTYRGAVPWYTINLDLPPYKRWHELMLDKAPVLKVIVNSLKNMINTFVPSGKIMQVVDEKLPGLLGNFPGPFEEEMKGIAAVTDIPLGKVHLEALKKKVIKFFYKFPLRCDIHTAQVLYVLDIQHRCTGLRYTAQ

SEQ ID NO: 1168 - protein, 140 aa, Homo sapiens
MNCCIGLGEKARGSHRASYPSLSALFTEASILGFGSFAVKAQWTEDCRKSTYPPSGPTYRGAVPWYTINLDLPPYKRWHELMLDKAPVVIVNSLKNMINTFVPSGKIMQVVDEKLPGLLGNFPGPFEEEMKGIAAVTDIP

SEQ ID NO: 1169 - protein, 49 aa, Homo sapiens
MPGRSCVALVLLAAAVSCAVAQHAPPRTAENQPILLQDQRTEVQFHGTP

SEQ ID NO: 1170 - protein, 81 aa, Homo sapiens
MPGRSCVALVLLAAAVSCAVAQHAPPVSELEPRRREGRAGAGADGGAGVAARAVDRGLQKINLSSFRTNVQRCSSMVHHKS

SEQ ID NO: 1171 - protein, 75 aa, Homo sapiens
MPGRSCVALVLLAAAVSCAVAQHAPPVSELEPRRREGRAGAGADGGAVDRGLQKINLSSFRTNVQRCSSMVHHKS

SEQ ID NO: 1172 - protein, 75 aa, Homo sapiens; identical to SEQ ID NO: 1171

SEQ ID NO: 1173 - protein, 67 aa, Homo sapiens
MPGRSCVALVLLAAAVSCAVAQHAPPVSELEPRRREGRAVDRGLQKINLSSFRTNVQRCSSMVHHKS

SEQ ID NO: 1174 - protein, 42 aa, Homo sapiens
MPGRSCVALVLLAAAVSCAVAQHAPPWTEDCRKSTYPPSGPT

SEQ ID NO: 1175 - protein, 42 aa, Homo sapiens; identical to SEQ ID NO: 1174

SEQ ID NO: 1176 - protein, 42 aa, Homo sapiens; identical to SEQ ID NO: 1174

SEQ ID NO: 1177 - protein, 56 aa, Homo sapiens
MPGRSCVALVLLAAAVSCAVAQHAPPWTEDCRKSTYPPSGPTLAYLATFLALLKRK

SEQ ID NO: 1178 - protein, 184 aa, Homo sapiens
MPGRSCVALVLLAAAVSCAVAQHAPPWTEDCRKSTYPPSGPTVFPAVIRYRGAVPWYTINLDLPPYKRWHELMLDKAPVLKVIVNSLKNMINTFVPSGKIMQVVDEKLPGLLGNFPGPFEEEMKGIAAVTDIPLGEIISFNIFYELFTICTSIVAEDKKGHLIHGRNMDFGVFLGWNINNDTWV

SEQ ID NO: 1179 - protein, 62 aa, Homo sapiens
MPGRSCVALVLLAAAVSCAVAQHAPPWTEDCRKSTYPPSGPTYRGAVPWYTINLDLPPYKRC

SEQ ID NO: 1180 - protein, 185 aa, Homo sapiens
MPGRSCVALVLLAAAVSCAVAQHAPPWTEDCRKSTYPPSGPTYRGAVPWYTINLDLPPYKRWHELMLDKAPVLKVIVNSLKNMINTFVPSGKIMQVVDEKLPGLLGNFPGPFEEEMKGEIISFNIFYELFTICTSIVAEDKKGHLIHGRNMDFGVFLGWNINNDTWVITEQLKPLTVNLDFQRNN

SEQ ID NO: 1181 - protein, 375 aa, Homo sapiens
MPGRSCVALVLLAAAVSCAVAQHAPPWTEDCRKSTYPPSGPTYRGAVPWYTINLDLPPYKRWHELMLDKAPVLKVIVNSLKNMINTFVPSGKIMQVVDEKLPGLLGNFPGPFEEEMKGIAAVTDIPLAEDKKGHLIHGRNMDFGVFLGWNINNDTWVITEQLKPLTVNLDFQRNNKTVFKASSFAGYVGMLTGFKPGLFSLTLNERFSINGGYLGILEWILGKKDVMWIGFLTRTVLENSTSYEEAKNLLTKTKILAPAYFILGGNQSGEGCVITRDRKESLDVYELDAKQGRWYVVQTNYDRWKHPFFLDDRRTPAKMCLNRTSQENISFETMYDVLSTKPVLNKLTVYTTLIDVTKGQFETYLRDCPDPCIGW

SEQ ID NO: 1182 - protein, 374 aa, Homo sapiens
MPGRSCVALVLLAAAVSCAVAQHAPPWTEDCRKSTYPPSGPTYRGAVPWYTINLDLPPYKRWHELMLDKAPVLKVIVNSLKNMINTFVPSGKIMQVVDEKLPGLLGNFPGPFEEEMKGIAAVTDIPLEDKKGHLIHGRNMDFGVFLGWNINNDTWVITEQLKPLTVNLDFQRNNKTVFKASSFAGYVGMLTGFKPGLFSLTLNERFSINGGYLGILEWILGKKDVMWIGFLTRTVLENSTSYEEAKNLLTKTKILAPAYFILGGNQSGEGCVITRDRKESLDVYELDAKQGRWYVVQTNYDRWKHPFFLDDRRTPAKMCLNRTSQENISFETMYDVLSTKPVLNKLTVYTTLIDVTKGQFETYLRDCPDPCIGW

SEQ ID NO: 1183 - protein, 395 aa, Homo sapiens
MPGRSCVALVLLAAAVSCAVAQHAPPWTEDCRKSTYPPSGPTYRGAVPWYTINLDLPPYKRWHELMLDKAPVLKVIVNSLKNMINTFVPSGKIMQVVDEKLPGLLGNFPGPFEEEMKGIAAVTDIPLGEIISFNIFYELFTICTSIVAEDKKGHLIHGRNMDFGVFLGWNINNDTWVITEQLKPLTVNLDFQRNNKTVFKASSFAGYVGMLTGFKPGLFSLTLNERFSINGGYLGILEWILGKKDVMWIGFLTRTVLENSTSYEEAKNLLTKTKILAPAYFILGGNQSGEGCVITRDRKESLDVYELDAKQGRWYVVQTNYDRWKHPFFLDDRRTPAKMCLNRTSQENISFETMYDVLSTKPVLNKLTVYTTLIDVTKGQFETYLRDCPDPCIGW

SEQ ID NO: 1184 - protein, 395 aa, Homo sapiens; identical to SEQ ID NO: 1183

SEQ ID NO: 1185 - protein, 395 aa, Homo sapiens; identical to SEQ ID NO: 1183

SEQ ID NO: 1186 - protein, 173 aa, Homo sapiens
MPGRSCVALVLLAAAVSCAVAQHAPPWTEDCRKSTYPPSGPTYRGAVPWYTINLDLPPYKRWHELMLDKAPVLKVIVNSLKNMINTFVPSGKIMQVVDEKLPGLLGNFPGPFEEEMKGIAAVTDIPLGEIISFNIFYELFTICTSIVAEDKKGNCALREGGQHEALHKEKSSK

SEQ ID NO: 1187 - protein, 370 aa, Homo sapiens
MPGRSCVALVLLAAAVSCAVAQHAPPWTEDCRKSTYPPSGPTYRGAVPWYTINLDLPPYKRWHELMLDKAPVLKVIVNSLKNMINTFVPSGKIMQVVDEKLPGLLGNFPGPFEEEMKGIAAVTDIPLGHLIHGRNMDFGVFLGWNINNDTWVITEQLKPLTVNLDFQRNNKTVFKASSFAGYVGMLTGFKPGLFSLTLNERFSINGGYLGILEWILGKKDVMWIGFLTRTVLENSTSYEEAKNLLTKTKILAPAYFILGGNQSGEGCVITRDRKESLDVYELDAKQGRWYVVQTNYDRWKHPFFLDDRRTPAKMCLNRTSQENISFETMYDVLSTKPVLNKLTVYTTLIDVTKGQFETYLRDCPDPCIGW

SEQ ID NO: 1188 - protein, 288 aa, Homo sapiens
MPGRSCVALVLLAAAVSCAVAQHAPPWTEDCRKSTYPPSGPTYRGAVPWYTINLDLPPYKRWHELMLDKAPVLKVIVNSLKNMINTFVPSGKIMQVVDEKLPGLLGNFPGPFEEEMKGIAAVTDIPLGILEWILGKKDVMWIGFLTRTVLENSTSYEEAKNLLTKTKILAPAYFILGGNQSGEGCVITRDRKESLDVYELDAKQGRWYVVQTNYDRWKHPFFLDDRRTPAKMCLNRTSQENISFETMYDVLSTKPVLNKLTVYTTLIDVTKGQFETYLRDCPDPCIGW

SEQ ID NO: 1189 - protein, 175 aa, Homo sapiens
MPGRSCVALVLLAAAVSCAVAQHAPPWTEDCRKSTYPPSGPTYRGAVPWYTINLDLPPYKRWHELMLDKAPVLKVIVNSLKNMINTFVPSGKIMQVVDEKLPGLLGNFPGPFEEEMKGIAAVTDIPLGKVHLEALKKKVIKFFYKFPLRCDIHTAQVLYVLDIQHRCTGLRYTAQ

SEQ ID NO: 1190 - protein, 376 aa, Homo sapiens
MPGRSCVALVLLAAAVSCAVAQHAPPWTEDCRKSTYPPSGPTYRGAVPWYTINLDLPPYKRWHELMLDKAPVLKVIVNSLKNMINTFVPSGKIMQVVDEKLPGLLGNFPGPFEEEMKGIAAVTDIPLVAEDKKGHLIHGRNMDFGVFLGWNINNDTWVITEQLKPLTVNLDFQRNNKTVFKASSFAGYVGMLTGFKPGLFSLTLNERFSINGGYLGILEWILGKKDVMWIGFLTRTVLENSTSYEEAKNLLTKTKILAPAYFILGGNQSGEGCVITRDRKESLDVYELDAKQGRWYVVQTNYDRWKHPFFLDDRRTPAKMCLNRTSQENISFETMYDVLSTKPVLNKLTVYTTLIDVTKGQFETYLRDCPDPCIGW

SEQ ID NO: 1191 - protein, 246 aa, Homo sapiens
MPGRSCVALVLLAAAVSCAVAQHAPPWTEDCRKSTYPPSGPTYRGAVPWYTINLDLPPYKRWHELMLDKAPVLKVIVNSLKNMINTFVPSGKIMQVVDEKLPGLLGNFPGPFEEEMKGIAAVTDIPLVNLDFQRNNKTVFKASSFAGYVGMLTGFKPGLFSLTLNERFSINGGYLGILEWILGKKDVMWIGFLTRTVLENSTSYEEAKNLLTKTKILAPAYFILGGNQSGEGCVITRDRKESLDVY

SEQ ID NO: 1192 - protein, 366 aa, Homo sapiens
MPGRSCVALVLLAAAVSCAVAQHAPPWTEDCRKSTYPPSGPTYRGAVPWYTINLDLPPYKRWHELMLDKAPVPGLLGNFPGPFEEEMKGIAAVTDIPLGEIISFNIFYELFTICTSIVAEDKKGHLIHGRNMDFGVFLGWNINNDTWVITEQLKPLTVNLDFQRNNKTVFKASSFAGYVGMLTGFKPGLFSLTLNERFSINGGYLGILEWILGKKDVMWIGFLTRTVLENSTSYEEAKNLLTKTKILAPAYFILGGNQSGEGCVITRDRKESLDVYELDAKQGRWYVVQTNYDRWKHPFFLDDRRTPAKMCLNRTSQENISFETMYDVLSTKPVLNKLTVYTTLIDVTKGQFETYLRDCPDPCIGW

SEQ ID NO: 1193 - protein, 393 aa, Homo sapiens
MPGRSCVALVLLAAAVSCAVAQHAPPWTEDCRKSTYPPSGPTYRGAVPWYTINLDLPPYKRWHELMLDKAPVVIVNSLKNMINTFVPSGKIMQVVDEKLPGLLGNFPGPFEEEMKGIAAVTDIPLGEIISFNIFYELFTICTSIVAEDKKGHLIHGRNMDFGVFLGWNINNDTWVITEQLKPLTVNLDFQRNNKTVFKASSFAGYVGMLTGFKPGLFSLTLNERFSINGGYLGILEWILGKKDVMWIGFLTRTVLENSTSYEEAKNLLTKTKILAPAYFILGGNQSGEGCVITRDRKESLDVYELDAKQGRWYVVQTNYDRWKHPFFLDDRRTPAKMCLNRTSQENISFETMYDVLSTKPVLNKLTVYTTLIDVTKGQFETYLRDCPDPCIGW

SEQ ID NO: 1194 - protein, 368 aa, Homo sapiens
  VARIANT 1: note = misc_feature - Xaa can be any naturally occurring amino acid
XLAAAVSCAVAQHAPPVSELEPRRREGRAVDRGLQKINLSSFRTNLKVIVNSLKNMINTFVPSGKIMQVVDEKLPGLLGNFPGPFEEEMKGIAAVTDIPLGEIISFNIFYELFTICTSIVAEDKKGHLIHGRNMDFGVFLGWNINNDTWVITEQLKPLTVNLDFQRNNKTVFKASSFAGYVGMLTGFKPGLFSLTLNERFSINGGYLGILEWILGKKDVMWIGFLTRTVLENSTSYEEAKNLLTKTKILAPAYFILGGNQSGEGCVITRDRKESLDVYELDAKQGRWYVVQTNYDRWKHPFFLDDRRTPAKMCLNRTSQENISFETMYDVLSTKPVLNKLTVYTTLIDVTKGQFETYLRDCPDPCIGW

SEQ ID NO: 1195 - protein, 200 aa, Homo sapiens
  VARIANT 1: note = misc_feature - Xaa can be any naturally occurring amino acid
XNNKTVFKASSFAGYVGMLTGFKPGLFSLTLNERFSINGGYLEWILGKKDVMWIGFLTRTVLENSTSYEEAKNLLTKTKILAPAYFILGGNQSGEGCVITRDRKESLDVYELDAKQGRWYVVQTNYDRWKHPFFLDDRRTPAKMCLNRTSQENISFETMYDVLSTKPVLNKLTVYTTLIDVTKGQFETYLRDCPDPCIGW

SEQ ID NO: 1196 - protein, 51 aa, Homo sapiens
AQRYEAASTIYGPHTLSAYIQLFRNLAKAIATELHLWKSSLWMQLFMKLQL

SEQ ID NO: 1197 - protein, 144 aa, Homo sapiens
AQRYEAASTIYGPHTLSAYIQLFRNLAKAIATGEVAEVIFVGANPKNSVQNQTHQTFLTVEKYEATSTSWQIVCNDASWETRFYWHKGLLGLSNATVEWHIPDTAQPGIYRIRYFGHNRKQDILKPAVILSFEGTSPAFEVVTI

SEQ ID NO: 1198 - protein, 780 aa, Homo sapiens
MAKRTFSNLETFLIFLLVMMSAITVALLSLLFITSGTIENHKDLGGHFFSTTQSPPATQGSTAAQRSTATQHSTATQSSTATQTSPVPLTPESPLFQNFSGYHIGVGRADCTGQVADINLMGYGKSGQNAQGILTRLYSRAFIMAEPDGSNRTVFVSIDIGMVSQRLRLEVLNRLQSKYGSLYRRDNVILSGTHTHSGPAGYFQYTVFVIASEGFSNQTFQHMVTGILKSIDIAHTNMKPGKIFINKGNVDGVQINRSPYSYLQNPQSERARYSSNTDKEMIVLKMVDLNGDDLGLISWFAIHPVSMNNSNHLVNSDNVGYASYLLEQEKNKGYLPGQGPFVAAFASSNLGDVSPNILGPRCINTGESCDNANSTCPIGGPSMCIAKGPGQDMFDSTQIIGRAMYQRAKELYASASQEVTGPLASAHQWVDMTDVTVWLNSTHASKTCKPALGYSFAAGTIDGVGGLNFTQGKTEGDPFWDTIRDQILGKPSEEIKECHKPKPILLHTGELSKPHPWHPDIVDVQIITLGSLAITAIPGEFTTMSGRRLREAVQAEFASHGMQNMTVVISGLCNVYTHYITTYEEYQAQRYEAASTIYGPHTLSAYIQLFRNLAKAIATDTVANLSRGPEPPFFKQLIVPLIPSIVDRAPKGRTFGDVLQPAKPEYRVGEVAEVIFVGANPKNSVQNQTHQTFLTVEKYEATSTSWQIVCNDASWETRFYWHKGLLGLSNATVEWHIPDTAQPGIYRIRYFGHNRKQDILKPAVILSFEGTSPAFEVVTI

SEQ ID NO: 1199 - protein, 745 aa, Homo sapiens
MAKRTFSNLETFLIFLLVMMSAITVALLSLLFITSGTIENHKDLGGHFFSTTQSPPATQGSTAAQRSTATQHSTATQSSTATQTSPVPLTPESPLFQNFSGYHIGVGRADCTGQVADINLMGYGKSGQNAQGILTRLYSRAFIMAEPDGSNRTVFVSIDIGMVSQRLRLEVLNRLQSKYGSLYRRDNVILSGTHTHSGPAGYFQYTVFVIASEGFSNQTFQHMVTGILKSIDIAHTNMKPGKIFINKGNVDGVQINRSPYSYLQNPQSERARYSSNTDKEMIVLKMVDLNGDDLGLISWFAIHPVSMNNSNHLVNSDNVGYASYLLEQEKNKGYLPGQGPFVAAFASSNLGDVSPNILGPRCINTGESCDNANSTCPIGGPSMCIAKGPGQDMFDSTQIIGRAMYQRAKSKTCKPALGYSFAAGTIDGVGGLNFTQGKTEGDPFWDTIRDQILGKPSEEIKECHKPKPILLHTGELSKPHPWHPDIVDVQIITLGSLAITAIPGEFTTMSGRRLREAVQAEFASHGMQNMTVVISGLCNVYTHYITTYEEYQAQRYEAASTIYGPHTLSAYIQLFRNLAKAIATDTVANLSRGPEPPFFKQLIVPLIPSIVDRAPKGRTFGDVLQPAKPEYRVGEVAEVIFVGANPKNSVQNQTHQTFLTVEKYEATSTSWQIVCNDASWETRFYWHKGLLGLSNATVEWHIPDTAQPGIYRIRYFGHNRKQDILKPAVILSFEGTSPAFEVVTI

SEQ ID NO: 1200 - protein, 622 aa, Homo sapiens
MDSEKSSEWRSDVLNRLQSKYGSLYRRDNVILSGTHTHSGPAGYFQYTVFVIASEGFSNQTFQHMVTGILKSIDIAHTNMKPGKIFINKGNVDGVQINRSPYSYLQNPQSERARYSSNTDKEMIVLKMVDLNGDDLGLISWFAIHPVSMNNSNHLVNSDNVGYASYLLEQEKNKGYLPGQGPFVAAFASSNLGDVSPNILGPRCINTGESCDNANSTCPIGGPSMCIAKGPGQDMFDSTQIIGRAMYQRAKELYASASQEVTGPLASAHQWVDMTDVTVWLNSTHASKTCKPALGYSFAAGTIDGVGGLNFTQGKTEGDPFWDTIRDQILGKPSEEIKECHKPKPILLHTGELSKPHPWHPDIVDVQIITLGSLAITAIPGEFTTMSGRRLREAVQAEFASHGMQNMTVVISGLCNVYTHYITTYEEYQAQRYEAASTIYGPHTLSAYIQLFRNLAKAIATDTVANLSRGPEPPFFKQLIVPLIPSIVDRAPKGRTFGDVLQPAKPEYRVGEVAEVIFVGANPKNSVQNQTHQTFLTVEKYEATSTSWQIVCNDASWETRFYWHKGLLGLSNATVEWHIPDTAQPGIYRIRYFGHNRKQDILKPAVILSFEGTSPAFEVVTI

SEQ ID NO: 1201 - protein, 726 aa, Homo sapiens
MSAITVALLSLLFITSGTIENHKDLGGHFFSTTQSPPATQGSTAAQRSTATQHSTATQSSTATQTSPVPLTPESPLFQNFSGYHIGVGRADCTGQVADINLMGYGKSGQNAQGILTRLYSRAFIMAEPDGSNRTVFVSIDIGMVSQRLRLEVLNRLQSKYGSLYRRDNVILSGTHTHSGPAGYFQYTVFVIASEGFSNQTFQHMVTGILKSIDIAHTNMKPGKIFINKGNVDGVQINRSPYSYLQNPQSERARYSSNTDKEMIVLKMVDLNGDDLGLISWFAIHPVSMNNSNHLVNSDNVGYASYLLEQEKNKGYLPGQGPFVAAFASSNLGDVSPNILGPRCINTGESCDNANSTCPIGGPSMCIAKGPGQDMFDSTQIIGRAMYQRAKSKTCKPALGYSFAAGTIDGVGGLNFTQGKTEGDPFWDTIRDQILGKPSEEIKECHKPKPILLHTGELSKPHPWHPDIVDVQIITLGSLAITAIPGEFTTMSGRRLREAVQAEFASHGMQNMTVVISGLCNVYTHYITTYEEYQAQRYEAASTIYGPHTLSAYIQLFRNLAKAIATDTVANLSRGPEPPFFKQLIVPLIPSIVDRAPKGRTFGDVLQPAKPEYRVGEVAEVIFVGANPKNSVQNQTHQTFLTVEKYEATSTSWQIVCNDASWETRFYWHKGLLGLSNATVEWHIPDTAQPGIYRIRYFGHNRKQDILKPAVILSFEGTSPAFEVVTI

SEQ ID NO: 1202 - protein, 236 aa, Homo sapiens
MESSAKMESGGAGQQPQPQPQQPFLPPAACFFATAAAAAAAAAAAAAQSAQQQQQQQQQQQQAPQLRPAADGQPSGGGHKSAPKQVKRQRSSSPELMRCKRRLNFSGFGYSLPQQQPAAVARRNERERNRVKLVNLGFATLREHVPNGAANKKMSKVETLRSAVEYIRALQQLLDEHDAVSAAFQAGVLSPTISPNYSNDLNSMAGSPVSSYSSDEGSYDPLSPEEQELLDFTNWF

SEQ ID NO: 1203 - protein, 132 aa, Homo sapiens
MDVTRLLLATLLVFLCFFTANSHLPPEEKLRDDRSLRSNSSVNLLDVPSVSIVALNKKSKQIGRKAAEKKRSSKKEASMKKVVRPRTPLSAPCVATRNSCKPPAPACCDPCASCQCRFFRSACSCRVLSLNC

SEQ ID NO: 1204 - protein, 132 aa, Homo sapiens; identical to SEQ ID NO: 1203

SEQ ID NO: 1205 - protein, 243 aa, Homo sapiens
MKEYVLLLFLALCSAKPFFSPSHIALKNMMLKDMEDTDDDDDDDDDDDDDDEDNSLFPTREPRSHFFPFDLFPMCPFGCQCYSRVVHCSDLGLTSVPTNIPFDTRMLDLQNNKIKEIKENDFKGLTSLYGLILNNNKLTKIHPKAFLTTKKLRRLYLSHNQLSEIPLNLPKSLAELRIHENKVKKIQKDTFKGMNALHVLEMSANPLDNNGIEPGAFEGVTVFHIRIAEAKLTSVPKDNLPSF

SEQ ID NO: 1206 - protein, 380 aa, Homo sapiens
MKEYVLLLFLALCSAKPFFSPSHIALKNMMLKDMEDTDDDDDDDDDDDDDDEDNSLFPTREPRSHFFPFDLFPMCPFGCQCYSRVVHCSDLGLTSVPTNIPFDTRMLDLQNNKIKEIKENDFKGLTSLYGLILNNNKLTKIHPKAFLTTKKLRRLYLSHNQLSEIPLNLPKSLAELRIHENKVKKIQKDTFKGMNALHVLEMSANPLDNNGIEPGAFEGVTVFHIRIAEAKLTSVPKGLPPTLLELHLDYNKISTVELEDFKRYKELQRLGLGNNKITDIENGSLANIPRVREIHLENNKLKKIPSGLPELKYLQIIFLHSNSIARVGVNDFCPTVPKMKKSLYSAISLFNNPVKYWEMQPATFRCVLSRMSVQLGNFGM

SEQ ID NO: 1207 - protein, 431 aa, Homo sapiens
MEGVGGLWPWVLGLLSLPGVILGAPLASSCAGACGTSFPDGLTPEGTQASGDKDIPAINQGLILEETPESSFLIEGDIIRPSPFRLLSATSNKWPMGGSGVVEVPFLLSSKYDEPSRQVILEALAEFERSTCIRFVTYQDQRDFISIIPMYGCFSSVGRSGGMQVVSLAPTCLQKGRGIVLHELMHVLGFWHEHTRADRDRYIRVNWNEILPGFEINFIKSQSSNMLTPYDYSSVMHYGRLAFSRRGLPTITPLWAPSVHIGQRWNLSASDITRVLKLYGCSPSGPRPRGRGSHAHSTGRSPAPASLSLQRLLEALSAESRSPDPSGSSAGGQPVPAGPGESPHGWESPALKKLSAEASARQPQTLASSPRSRPGAGAPGVAQEQSWLAGVSTKPTVPSSEAGIQPVPVQGSPALPGGCVPRNHFKGMSED

SEQ ID NO: 1208 - protein, 1844 aa, Homo sapiens
MVGVLAMAAAAAPPPVKDCEIEPCKKRKKDDDTSTCKTITKYLSPLGKTRDRVFAPPKPSNILDYFRKTSPTNEKTQLGKECKIKSPESVPVDSNKDCTTPLEMFSNVEFKKKRKRVNLSHQLNNIKTENEAPIEISSDDSKEDYSLNNDFVESSTSVLRYKKQVEVLAENIQDTKSQPNTMTSLQNSKKVNPKQGTTKNDFKKLRKRKCRDVVDLSESLPLAEELNLLKKDGKDTKQMENTTSHANSRDNVTEAAQLNDSIITVSYEEFLKSHKENKVEEIPDSTMSICVPSETVDEIVKSGYISESENSEISQQVRFKTVTVLAQVHPIPPKKTGKIPRIFLKQKQFEMENSLSDPENEQTVQKRKSNVVIQEEELELAVLEAGSSEAVKPKCTLEERQQFMKAFRQPASDALKNGVKKSSDKQKDLNEKCLYEVGRDDNSKKIMENSGIQMVSKNGNLQLHTDKGSFLKEKNKKLKKKNKKTLDTGAIPGKNREGNTQKKETTFFLKEKQYQNRMSLRQRKTEFFKSSTLFNNESLVYEDIANDDLLKVSSLCNNNKLSRKTSIPVKDIKLTQSKAESEASLLNVSTPKSTRRSGRISSTPTTETIRGIDSDDVQDNSQLKASTQKAANLSEKHSLYTAELITVPFDSESPIRMKFTRISTPKKSKKKSNKRSEKSEATDGGFTSQIRKASNTSKNISKAKQLIEKAKALHISRSKVTEEIAIPLRRSSRHQTLPERKKLSETEDSVIIIDSSPTALKHPEKNQKKLQCLNDVLGKKLNTSTKNVPGKMKVAPLFLVRKAQKAADPVPSFDESSQDTSEKSQDCDVQCKAKRDFLMSGLPDLLKRQIAKKAAALDVYNAVSTSFQRVVHVQQKDDGCCLWHLKPPSCPLLTKFKELNTKVIDLSKCGIALGEFSTLNSKLKSGNSAAVFMRTRKEFTEEVRNLLLEEIRWSNPEFSLKKYFPLLLKKQIEHQVLSSECHSKQELEADVSHKETKRKLVEAENSKSKRKKPNEYSKNLEKTNRKSEELSKRNNSSGIKLDSSKDSGTEDMLWTEKYQPQTASELIGNELAIKKLHSWLKDWKRRAELEERQNLKGKRDEKHEDFSGGIDFKGSSDDEEESRLCNTVLITGPTGVGKTAAVYACAQELGFKIFEVNASSQRSGRQILSQLKEATQSHQVDKQGVNSQKPCFFNSYYIGKSPKKISSPKKVVTSPRKVPPPSPKSSGPKRALPPKTLANYFKVSPKPKNNEEIGMLLENNKGIKNSFEQKQITQTKSTNATNSNVKDVGAEEPSRKNATSLILFEEVDVIFDEDAGFLNAIKTFMATTKRPVILTTSDPTFSLMFDGCFEEIKFSTPSLLNVASYLQMICLTENFRTDVKDFVTLLTANTCDIRKSILYLQFWIRSGGGVLEERPLTLYRGNSRNVQLVCSEHGLDNKIYPKNTKKKRVDLPKCDSGCAETLFGLKNIFSPSEDLFSFLKHKITMKEEWHKFIQLLTEFQMRNVDFLYSNLEFILPLPVDTIPETKNFCGPSVTVDASAATKSMNCLARKHSEREQPLKKSQKKKQKKTLVILDDSDLFDTDLDFPDQSISLSSVSSSSNAEESKTGDEESKARDKGNNPETKKSIPCPPKTTAGKKCSALVSHCLNSLSEFMDNMSFLDALLTDVREQNKYGRNDFSWTNGKVTSGLCDEFSLESNDGWTSQSSGELKAAAEALSFTKCSSAISKALETLNSCKKLGRDPTNDLTFYVSQKRNNVYFSQSAANLDNAWKRISVIKSVFSSRSLLYVGNRQASIIEYLPTLRNICKTEKLKEQGKSKRRFLHYFEGIHLDIPKETVNTLAADFP

SEQ ID NO: 1209 - protein, 1224 aa, Homo sapiens
MVGVLAMAAAAAPPPVKDCEIEPCKKRKKDDDTSTCKTITKYLSPLGKTRDRVFAPPKPSNILDYFRKTSPTNEKTQLGKECKIKSPESVPVDSNKDCTTPLEMFSNVEFKKKRKRVNLSHQLNNIKTENEAPIEISSDDSKEDYSLNNDFVESSTSVLRYKKQVEVLAENIQDTKSQPNTMTSLQNSKKVNPKQGTTKNDFKKLRKRKCRDVVDLSESLPLAEELNLLKKDGKDTKQMENTTSHANSRDNVTEAAQLNDSIITVSYEEFLKSHKENKVEEIPDSTMSICVPSETVDEIVKSGYISESENSEISQQVRFKTVTVLAQVHPIPPKKTGKIPRIFLKQKQFEMENSLSDPENEQTVQKRKSNVVIQEEELELAVLEAGSSEAVKPKCTLEERQQFMKAFRQPASDALKNGVKKSSDKQKDLNEKCLYEVGRDDNSKKIMENSGIQMVSKNGNLQLHTDKGSFLKEKNKKLKKKNKKTLDTGAIPGKNREGNTQKKETTFFLKEKQYQNRMSLRQRKTEFFKSSTLFNNESLVYEDIANDDLLKVSSLCNNNKLSRKTSIPVKDIKLTQSKAESEASLLNVSTPKSTRRSGRISSTPTTETIRGIDSDDVQDNSQLKASTQKAANLSEKHSLYTAELITVPFDSESPIRMKFTRISTPKKSKKKSNKRSEKSEATDGGFTSQIRKASNTSKNISKAKQLIEKAKALHISRSKVTEEIAIPLRRSSRHQTLPERKKLSETEDSVIIIDSSPTALKHPEKNQKKLQCLNDVLGKKLNTSTKNVPGKMKVAPLFLVRKAQKAADPVPSFDESSQDTSEKSQDCDVQCKAKRDFLMSGLPDLLKRQIAKKAAALDVYNAVSTSFQRVVHVQQKDDGCCLWHLKPPSCPLLTKFKELNTKVIDLSKCGIALGEFSTLNSKLKSGNSAAVFMRTRKEFTEEVRNLLLEEIRWSNPEFSLKKYFPLLLKKQIEHQVLSSECHSKQELEADVSHKETKRKLVEAENSKSKRKKPNEYSKNLEKTNRKSEELSKRNNSSGIKLDSSKDSGTEDMLWTEKYQPQTASELIGNELAIKKLHSWLKDWKRRAELEERQNLKGKRDEKHEDFSGGIDFKGSSDDEEESRLCNTVLITGPTGVGKTAAVYACAQELGFKIFEVNASSQRSGRQILSQLKEATQSHQVDKQGVNSQKPCFFNSYYIGKSPKKISSPKKVVTSPRKVPPPSPK

SEQ ID NO: 1210 - protein, 310 aa, Homo sapiens
MEFPFDVDALFPERITVLDQHLRPPARRPGTTTPARVDLQQQIMTIIDELGKASAKAQNLSAPITSASRMQSNRHVVYILKDSSARPAGKGAIIGFIKVGYKKLFVLDDREAHNEVEPLCILDFYIHESVQRHGHGRELFQYMLQKERVEPHQLAIDRPSQKLLKFLNKHYNLETTVPQVNNFVIFEGFFAHQHPPARKLPPKRAEGDIKPYSSSDREFLKVAVEPPWPLNRAPRRATPPAHPPPRSSSLGNSPERGPLRPFVPEQELLRSLRLCPPHPTARLLLAADPGGSPAQRRRTSSLPRSEESRY

SEQ ID NO: 1211 - protein, 300 aa, Homo sapiens
MEFPFDVDALFPERITVLDQHLRPPARRPGTTTPARVDLQQQIMTIIDELGKASAKAQNLSAPITSASRMQSNRHVVYILKDSSARPAGKGAIIGFIKVGYKKLFVLDDREAHNEVEPLCILDFYIHESVQRHGHGRELFQYMLQKERVEPHQLAIDRPSQKLLKFLNKHYNLETTVPQVNNFVIFEGFFAHQHPPARKLPPKRAEGDIKPYSSSDREFLKVAVEPPWPLNRAPRRATPPAHPPPRSSSLGNSPERGPLRPFVPEQELLRSLRLCPPHPTARLLLAADPGGSPAQRRRTR

SEQ ID NO: 1212 - protein, 333 aa, Homo sapiens
MEFPFDVDALFPERITVLDQHLRPPARRPGTTTPARVDLQQQIMTIIDELGKASAKAQNLSAPITSASRMQSNRHVVYILKDSSARPAGKGAIIGFIKVGYKKLFVLDDREAHNEVEPLCILDFYIHESVQRHGHGRELFQYMLQKERVEPHQLAIDRPSQKLLKFLNKHYNLETTVPQVNNFVIFEGFFAHQHRPPAPSLRATRHSRAAAVDPTPAAPARKLPPKRAEGDIKPYSSSDREFLKVAVEPPWPLNRAPRRATPPAHPPPRSSSLGNSPERGPLRPFVPEQELLRSLRLCPPHPTARLLLAADPGGSPAQRRRTSSLPRSEESRY

SEQ ID NO: 1213 - protein, 421 aa, Homo sapiens
MEFPFDVDALFPERITVLDQHLRPPARRPGTTTPARVDLQQQIMTIIDELGKASAKAQNLSAPITSASRMQSNRHVVYILKDSSARPAGKGAIIGFIKVGYKKLFVLDDREAHNEVEPLCILDFYIHESVQRHGHGRELFQYMLQKERVEPHQLAIDRPSQKLLKFLNKHYNLETTVPQVNNFVIFEGFFAHQHRPPAPSLRATRHSRAAAVDPTPAAPARKLPPKRAEGDIKPYSSSDREFLKVAVEPPWPLNRAPRRATPPAHPPPRSSSLGNSPERGPLRPFVPEQELLRSLRLCPPHPTARLLLAADPGGSPAQRRRTRGTPPGLVAQSCCYSRHGGVNSSSPNTGNQDSKQGEQETKNRSASEEQALSQDGSGEKPMHTAPPQAPAPPAQSWTVGGDILNARFIRNLQERRSTRPW

SEQ ID NO: 1214 - protein, 323 aa, Homo sapiens
MEFPFDVDALFPERITVLDQHLRPPARRPGTTTPARVDLQQQIMTIIDELGKASAKAQNLSAPITSASRMQSNRHVVYILKDSSARPAGKGAIIGFIKVGYKKLFVLDDREAHNEVEPLCILDFYIHESVQRHGHGRELFQYMLQKERVEPHQLAIDRPSQKLLKFLNKHYNLETTVPQVNNFVIFEGFFAHQHRPPAPSLRATRHSRAAAVDPTPAAPARKLPPKRAEGDIKPYSSSDREFLKVAVEPPWPLNRAPRRATPPAHPPPRSSSLGNSPERGPLRPFVPEQELLRSLRLCPPHPTARLLLAADPGGSPAQRRRTR

SEQ ID NO: 1215 - protein, 409 aa, Homo sapiens
MWLTWPFCFLTITLREEGVCHLESVDLQQQIMTIIDELGKASAKAQNLSAPITSASRMQSNRHVVYILKDSSARPAGKGAIIGFIKVGYKKLFVLDDREAHNEVEPLCILDFYIHESVQRHGHGRELFQYMLQKERVEPHQLAIDRPSQKLLKFLNKHYNLETTVPQVNNFVIFEGFFAHQHRPPAPSLRATRHSRAAAVDPTPAAPARKLPPKRAEGDIKPYSSSDREFLKVAVEPPWPLNRAPRRATPPAHPPPRSSSLGNSPERGPLRPFVPEQELLRSLRLCPPHPTARLLLAADPGGSPAQRRRTRGTPPGLVAQSCCYSRHGGVNSSSPNTGNQDSKQGEQETKNRSASEEQALSQDGSGEKPMHTAPPQAPAPPAQSWTVGGDILNARFIRNLQERRSTRPW

SEQ ID NO: 1216 - protein, 331 aa, Homo sapiens
MAVAMVKLCERAGLPLLAAPLLRSLLPRAPQPGPAQPRSVQGQRCPARHPPGNLVCERGAGVNGVTAGAGGRLRGLHRGGRALGCSAHRPLHSARVRPPAHLAAPPGSSARGCRLTELGYALNEWLQDIRKNQLPGLLGGVGPMHSVVQLFQGFRDLLWLPIEQYRKDGRLMRGLQRGAASFGSSTASAALELSNRLVQAIQATAETVYDILSPAAPVSRSLQDKRSARRLRRGQQPADLREGVAKAYDTVREGILDTAQTICDVASRGHEQKGLTGAVGGVIRQLPPTVVKPLILATEATSSLLGGMRNQIVPDAHKDHALKWRSDSAQD

SEQ ID NO: 1217 - protein, 1938 aa, Homo sapiens
MSRWLWPWSNCVKERVCRYLLHHYLGHFFQEHLSLDQLSLDLYKGSVALRDIHLEIWSVNEVLESMESPLELVEGFVGSIEVAVPWAALLTDHCTVRVSGLQLTLQPRRGPAPGAADSQSWASCMTTSLQLAQECLRDGLPEPSEPPQPLEGLEMFAQTIETVLRRIKVTFLDTVVRVEHSPGDGERGVAVEVRVQRLEYCDEAVRDPSQAPPVDVHQPPAFLHKLLQLAGVRLHYEELPAQEEPPEPPLQIGSCSGYMELMVKLKQNEAFPGPKLEVAGQLGSLHLLLTPRQLQQLQELLSAVSLTDHEGLADKLNKSRPLGAEDLWLIEQDLNQQLQAGAVAEPLSPDPLTNPLLNLDNTDLFFSMAGLTSSVASALSELSLSDVDLASSVRSDMASRRLSAQAHPAGKMAPNPLLDTMRPDSLLKMTLGGVTLTLLQTSAPSSGPPDLATHFFTEFDATKDGPFGSRDFHHLRPRFQRACPCSHVRLTGTAVQLSWELRTGSRGRRTTSMEVHFGQLEVLECLWPRGTSEPEYTEILTFPGTLGSQASARPCAHLRHTQILRRVPKSRPRRSVACHCHSELALDLANFQADVELGALDRLAALLRLATVPAEPPAGLLTEPLPAMEQQTVFRLSAPRATLRLRFPIADLRPEPDPWAGQAVRAEQLRLELSEPQFRSELSSGPGPPVPTHLELTCSDLHGIYEDGGKPPVPCLRVSKALDPKSTGRKYFLPQVVVTVNPQSSSTQWEVAPEKGEELELSVESPCELREPEPSPFSSKRTMYETEEMVIPGDPEEMRTFQSRTLALSRCSLEVILPSVHIFLPSKEVYESIYNRINNDLLMWEPADLLPTPDPAAQPSGFPGPSGFWHDSFKMCKSAFKLANCFDLTPDSDSDDEDAHFFSVGASGGPQAAAPEAPSLHLQSTFSTLVTVLKGRITALCETKDEGGKRLEAVHGELVLDMEHGTLFSVSQYCGQPGLGYFCLEAEKATLYHRAAVDDYPLPSHLDLPSFAPPAQLAPTIYPSEEGVTERGASGRKGQGRGPHMLSTAVRIHLDPHKNVKEFLVTLRLHKATLRHYMALPEQSWHSQLLEFLDVLDDPVLGYLPPTVITILHTHLFSCSVDYRPLYLPVRVLITAETFTLSSNIIMDTSTFLLRFILDDSALYLSDKCEVETLDLRRDYVCVLDVDLLELVIKTWKGSTEGKLSQPLFELRCSNNVVHVHSCADSCALLVNLLQYVMSTGDLHPPPRPPSPTEIAGQKLSESPASLPSCPPVETALINQRDLADALLDTERSLRELAQPSGGHLPQASPISVYLFPGERSGAPPPSPPVGGPAGSLGSCSEEKEDEREEEGDGDTLDSDEFCILDAPGLGIPPRDGEPVVTQLHPGPIVVRDGYFSRPIGSTDLLRAPAHFPVPSTRVVLREVSLVWHLYGGRDFGPHPGHRARTGLSGPRSSPSRCSGPNRPQNSWRTQGGSGRQHHVLMEIQLSKVSFQHEVYPAEPATGPAAPSQELEERPLSRQVFIVQELEVRDRLASSQINKFLYLHTSERMPRRAHSNMLTIKALHVAPTTNLGGPECCLRVSLMPLRLNVDQDALFFLKDFFTSLVAGINPVVPGETSAEARPETRAQPSSPLEGQAEGVETTGSQEAPGGGHSPSPPDQQPIYFREFRFTSEVPIWLDYHGKHVTMDQVGTFAGLLIGLAQLNCSELKLKRLCCRHGLLGVDKVLGYALNEWLQDIRKNQLPGLLGGVGPMHSVVQLFQGFRDLLWLPIEQYRKDGRLMRGLQRGAASFGSSTASAALELSNRLVQAIQATAETVYDILSPAAPVSRSLQDKRSARRLRRGQQPADLREGVAKAYDTVREGILDTAQTICDVASRGHEQKGLTGAVGGVIRQLPPTVVKPLILATEATSSLLGGMRNQIVPDAHKDHALKWRSDSAQD

SEQ ID NO: 1218 - protein, 1742 aa, Homo sapiens
  VARIANT 1: note = misc_feature - Xaa can be any naturally occurring amino acid
XYCDEAVRDPSQAPPVDVHQPPAFLHKLLQLAGVRLHYEELPAQEEPPEPPLQIGSCSGYMELMVKLKQNEAFPGPKLEVAGQLGSLHLLLTPRQLQQLQELLSAVSLTDHEGLADKLNKSRPLGAEDLWLIEQDLNQQLQAGAVAEPLSPDPLTNPLLNLDNTDLFFSMAGLTSSVASALSELSLSDVDLASSVRSDMASRRLSAQAHPAGKMAPNPLLDTMRPDSLLKMTLGGVTLTLLQTSAPSSGPPDLATHFFTEFDATKDGPFGSRDFHHLRPRFQRACPCSHVRLTGTAVQLSWELRTGSRGRRTTSMEVHFGQLEVLECLWPRGTSEPEYTEILTFPGTLGSQASARPCAHLRHTQILRRVPKSRPRRSVACHCHSELALDLANFQADVELGALDRLAALLRLATVPAEPPAGLLTEPLPAMEQQTVFRLSAPRATLRLRFPIADLRPEPDPWAGQAVRAEQLRLELSEPQFRSELSSGPGPPVPTHLELTCSDLHGIYEDGGKPPVPCLRVSKALDPKSTGRKYFLPQVVVTVNPQSSSTQWEVAPEKGEELELSVESPCELREPEPSPFSSKRTMYETEEMVIPGDPEEMRTFQSRTLALSRCSLEVILPSVHIFLPSKEVYESIYNRINNDLLMWEPADLLPTPDPAAQPSGFPGPSGFWHDSFKMCKSAFKLANCFDLTPDSDSDDEDAHFFSVGASGGPQAAAPEAPSLHLQSTFSTLVTVLKGRITALCETKDEGGKRLEAVHGELVLDMEHGTLFSVSQYCGQPGLGYFCLEAEKATLYHRAAVDDYPLPSHLDLPSFAPPAQLAPTIYPSEEGVTERGASGRKGQGRGPHMLSTAVRIHLDPHKNVKEFLVTLRLHKATLRHYMALPEQSWHSQLLEFLDVLDDPVLGYLPPTVITILHTHLFSCSVDYRPLYLPVRVLITAETFTLSSNIIMDTSTFLLRFILDDSALYLSDKCEVETLDLRRDYVCVLDVDLLELVIKTWKGSTEGKLSQPLFELRCSNNVVHVHSCADSCALLVNLLQYVMSTGDLHPPPRPPSPTEIAGQKVQLSESPASLPSCPPVETALINQRDLADALLDTERSLRELAQPSGGHLPQASPISVYLFPGERSGAPPPSPPVGGPAGSLGSCSEEKEDEREEEGDGDTLDSDEFCILDAPGLGIPPRDGEPVVTQLHPGPIVVRDGYFSRPIGSTDLLRAPAHFPVPSTRVVLREVSLVWHLYGGRDFGPHPGHRARTGLSGPRSSPSRCSGPNRPQNSWRTQGGSGRQHHVLMEIQLSKVSFQHEVYPAEPATGPAAPSQELEERPLSRQVFIVQELEVRDRLASSQINKFLYLHTSERMPRRAHSNMLTIKALHVAPTTNLGGPECCLRVSLMPLRLNVDQDALFFLKDFFTSLVAGINPVVPGETSAEARPETRAQPSSPLEGQAEGVETTGSQEAPGGGHSPSPPDQQPIYFREFRFTSEVPIWLDYHGKHVTMDQVGTFAGLLIGLAQLNCSELKLKRLCCRHGLLGVDKVLGYALNEWLQDIRKNQLPGLLGGVGPMHSVVQLFQGFRDLLWLPIEQYRKDGRLMRGLQRGAASFGSSTASAALELSNRLVQAIQATAETVYDILSPAAPVSRSLQDKRSARRLRRGQQPADLREGVAKAYDTVREGILDTAQTICDVASRGHEQKGLTGAVGGVIRQLPPTVVKPLILATEATSSLLGGMRNQIVPDAHKDHALKWRSDSAQD

SEQ ID NO: 1219 - protein, 153 aa, Homo sapiens
MHYPIGLLFDLLASSSALPWNITVHFKSFPEKDLLHCPSKDAIEAHFMSCMKEADALKHKSQVINEMQKKDHKQLWMGLQNDRFDQFWAINRKLMEYPAEENGFRYIPFRIYQTTTERPFIQKLFRPVAADGQLHTLGDLLKEVCPSAIDPED

SEQ ID NO: 1220 - protein, 197 aa, Homo sapiens
MHYPIGLLFDLLASSSALPWNITVHFKSFPEKDLLHCPSKDAIEAHFMSCMKEADALKHKSQVINEMQKKDHKQLWMGLQNDRFDQFWAINRKLMEYPAEENGFRYIPFRIYQTTTERPFIQKLFRPVAADGQLHTLGDLLKEVCPSAIDPEDGEKKNQVMIHGIEPMLETPLQWLSEHLSYPDNFLHISIIPQPTD

SEQ ID NO: 1221 - protein, 159 aa, Homo sapiens
MHYPIGLLFDLLASSSALPWNITVHFKSFPEKDLLHCPSKDAIEAHFMSCMKEADALKHKSQVINEMQKKDHKQLWMGLQNDRFDQFWAINRKLMEYPAEENGFRYIPFRIYQTTTERPFIQKLFRPVAADGQLHTLGDLLKEVCPSAIDPEEIPPGED

SEQ ID NO: 1222 - protein, 44 aa, Homo sapiens
MTDDKDVLRDVWFGRIPTCFTLYQDEITEREAEPYYALSNWFAI

SEQ ID NO: 1223 - protein, 162 aa, Homo sapiens
MTDDKDVLRDVWFGRIPTCFTLYQDEITEREAEPYYLLLPRVSYLTLVTDKVKKHFQKVMRQEDISEIWFEYEGTPLKWHYPIGLLFDLLASSSALPWNITVHFKSFPEKDLLHCPSKDAIEAHFMSCMKEADALKHKSQVINEMQKKDHKQLWMGLQNDND

SEQ ID NO: 1224 - protein, 275 aa, Homo sapiens
MTDDKDVLRDVWFGRIPTCFTLYQDEITEREAEPYYLLLPRVSYLTLVTDKVKKHFQKVMRQEDISEIWFEYEGTPLKWHYPIGLLFDLLASSSALPWNITVHFKSFPEKDLLHCPSKDAIEAHFMSCMKEADALKHKSQVINEMQKKDHKQLWMGLQNDRFDQFWAINRKLMEYPAEENGFRYIPFRIYQTTTERPFIQKLFRPVAADGQLHTLGDLLKEVCPSAIDPEDGEKKNQVMIHGIEPMLETPLQWLSEHLSYPDNFLHISIIPQPTD

SEQ ID NO: 1225 - protein, 275 aa, Homo sapiens; identical to SEQ ID NO: 1224

SEQ ID NO: 1226 - protein, 233 aa, Homo sapiens
MTDDKDVLRDVWFGRIPTCFTLYQDEITEREAEPYYLLLPRVSYLTLVTDKVKKHFQKVMRQEDISEIWFEYEGTPLKWHYPIGLLFDLLASSSALPWNITVHFKSFPEKDLLHCPSKDAIEAHFMSCMKEADALKHKSQVINEMQKKDHKQLWMGLQNDRFDQFWAINRKLMEYPAEENGFRYIPFRIYQVTAVWVGIQRFQASEEESEDEEFLATLTGGERSGKARKQWTQ

SEQ ID NO: 1227 - protein, 91 aa, Homo sapiens
MTDDKDVLRDVWFGRIPTCFTLYQDEITEREAEPYYTDLTSFGPSIGNSWNILQKKMDFVISPLEYIRQRLKDLSFRSCFVLWLQMDSCTH

SEQ ID NO: 1228 - protein, 823 aa, Homo sapiens
MAASEAAAAAGSAALAAGARAVPAATTGAAAAASGPWVPPGPRLRGSRPRPAGATQQPAVPAPPAGELIQPSVSELSRAVRTNILCTVRGCGKILPNSPALNMHLVKSHRLQDGIVNPTIRKDLKTGPKFYCCPIEGCPRGPERPFSQFSLVKQHFMKMHAEKKHKCSKCSNSYGTEWDLKRHAEDCGKTFRCTCGCPYASRTALQSHIYRTGHEIPAEHRDPPSKKRKMENCAQNQKLSNKTIESLNNQPIPRPDTQELEASEIKLEPSFEDSCGSNTDKQTLTTPPRYPQKLLLPKPKVALVKLPVMQFSVMPVFVPTADSSAQPVVLGVDQGSATGAVHLMPLSVGTLILGLDSEACSLKESLPLFKIANPIAGEPISTGVQVNFGKSPSNPLQELGNTCQKNSISSINVQTDLSYASQNFIPSAQWATADSSVSSCSQTDLSFDSQVSLPISVHTQTFLPSSKVTSSIAAQTDAFMDTCFQSGGVSRETQTSGIESPTDDHVQMDQAGMCGDIFESVHSSYNVATGNIISNSLVAETVTHSLLPQNEPKTLNQDIEKSAPIINFSAQNSMLPSQNMTDNQTQTIDLLSDLENILSSNLPAQTLDHRSLLSDTNPGPDTQLPSGPAQNPGIDFDIEEFFSASNIQTQTEESELSTMTTEPVLESLDIETQTDFLLADTSAQSYGCRGNSNFLGLEMFDTQTQTDLNFFLDSSPHLPLGSILKHSSFSVSTDSSDTETQTEGVSTAKNIPALESKVQLNSTETQTMSSGFETLGSLFFTSNETQTAMDDFLLADLAWNTMESQFSSVETQTSAEPHTVSNF

SEQ ID NO: 1229 - protein, 55 aa, Homo sapiens
MKMHAEKKHKCSKCSNSYGTEWDLKRHAEDCGKTFRCTCGCPYASRTALQSHIYR

SEQ ID NO: 1230 - protein, 667 aa, Homo sapiens
MKMHAEKKHKCSKCSNSYGTEWDLKRHAEDCGKTFRCTCGCPYASRTALQSHIYRTGHEIPAEHRDPPSKKRKMENCAQNQKLSNKTIESLNNQPIPRPDTQELEASEIKLEPSFEDSCGSNTDKQTLTTPPRYPQKLLLPKPKVALVKLPVMQFSVMPVFVPTADSSAQPVVLGVDQGSATGAVHLMPLSVGTLILGLDSEACSLKESLPLFKIANPIAGEPISTGVQVNFGKSPSNPLQELGNTCQKNSISSINVQTDLSYASQNFIPSAQWATADSSVSSCSQTDLSFDSQVSLPISVHTQTFLPSSKVTSSIAAQTDAFMDTCFQSGGVSRETQTSGIESPTDDHVQMDQAGMCGDIFESVHSSYNVATGNIISNSLVAETVTHSLLPQNEPKTLNQDIEKSAPIINFSAQNSMLPSQNMTDNQTQTIDLLSDLENILSSNLPAQTLDHRSLLSDTNPGPDTQLPSGPAQNPGIDFDIEEFFSASNIQTQTEESELSTMTTEPVLESLDIETQTDFLLADTSAQSYGCRGNSNFLGLEMFDTQTQTDLNFFLDSSPHLPLGSILKHSSFSVSTDSSDTETQTEGVSTAKNIPALESKVQLNSTETQTMSSGFETLGSLFFTSNETQTAMDDFLLADLAWNTMESQFSSVETQTSAEPHTVSNF

SEQ ID NO: 1231 - protein, 667 aa, Homo sapiens; identical to SEQ ID NO: 1230

SEQ ID NO: 1232 - protein, 1204 aa, Homo sapiens
MAAAAAVGNAVPCGARPCGVRPDGQPKPGPQPRALLAAGPALIANGDELVAAVWPYRRLALLRRLTVLPFAGLLYPAWLGAAAAGCWGWGSSWVQIPEAALLVLATICLAHALTVLSGHWSVHAHCALTCTPEYDPSKATFVKVVPTPNNGSTELVALHRNEGEDGLEVLSFEFQKIKYSYDALEKKQFLPVAFPVGNAFSYYQSNRGFQEDSEIRAAEKKFGSNKAEMVVPDFSELFKERATAPFFVFQVFCVGLWCLDEYWYYSVFTLSMLVAFEASLVQQQMRNMSEIRKMGNKPHMIQVYRSRKWRPIASDEIVPGDIVSIGRSPQENLVPCDVLLLRGRCIVDEAMLTGESVPQMKEPIEDLSPDRVLDLQADSRLHVIFGGTKVVQHIPPQKATTGLKPVDSGCVAYVLRTGFNTSQGKLLRTILFGVKRVTANNLETFIFILFLLVFAIAAAAYVWIEGTKDPSRNRYKLFLECTLILTSVVPPELPIELSLAVNTSLIALAKLYMYCTEPFRIPFAGKVEVCCFDKTGTLTSDSLVVRGVAGLRDGKEVTPVSSIPVETHRALASCHSLMQLDDGTLVGDPLEKAMLTAVDWTLTKDEKVFPRSIKTQGLKIHQRFHFASALKRMSVLASYEKLGSTDLCYIAAVKGAPETLHSMFSQCPPDYHHIHTEISREGARVLALGYKELGHLTHQQAREVKREALECSLKFVGFIVVSCPLKADSKAVIREIQNASHRVVMITGDNPLTACHVAQELHFIEKAHTLILQPPSEKGRQCEWRSIDGSIVLPLARGSPKALALEYALCLTGDGLAHLQATDPQQLLRLIPHVQVFARVAPKQKEFVITSLKELGYVTLMCGDGTNDVGALKHADVGVALLANAPERVVERRRRPRDSPTLSNSGIRATSRTAKQRSGLPPSEEQPTSQRDRLSQVLRDLEDESTPIVKLGDASIAAPFTSKLSSIQCICHVIKQGRCTLVTTLQMFKILALNALILAYSQSVLYLEGVKFSDFQATLQGLLLAGCFLFISRSKPLKTLSRERPLPNIFNLYTILTVMLQFFVHFLSLVYLYREAQARSPEKQEQFVDLYKEFEPSLVNSTVYIMAMAMQMATFAINYKGPPFMESLPENKPLVWSLAVSLLAIIGLLLGSSPDFNSQFGLVDIPVEFKLVIAQVLLLDFCLALLADRVLQFFLGTPKLKVPS

SEQ ID NO: 1233 - protein, 1086 aa, Homo sapiens
MEKWEELNSHQPGEEYDPSKATFVKVVPTPNNGSTELVALHRNEGEDGLEVLSFEFQKIKYSYDALEKKQFLPVAFPVGNAFSYYQSNRGFQEDSEIRAAEKKFGSNKAEMVVPDFSELFKERATAPFFVFQVFCVGLWCLDEYWYYSVFTLSMLVAFEASLVQQQMRNMSEIRKMGNKPHMIQVYRSRKWRPIASDEIVPGDIVSIGRSPQENLVPCDVLLLRGRCIVDEAMLTGESVPQMKEPIEDLSPDRVLDLQADSRLHVIFGGTKVVQHIPPQKATTGLKPVDSGCVAYVLRTGFNTSQGKLLRTILFGVKRVTANNLETFIFILFLLVFAIAAAAYVWIEGTKDPSRNRYKLFLECTLILTSVVPPELPIELSLAVNTSLIALAKLYMYCTEPFRIPFAGKVEVCCFDKTGTLTSDSLVVRGVAGLRDGKEVTPVSSIPVETHRALASCHSLMQLDDGTLVGDPLEKAMLTAVDWTLTKDEKVFPRSIKTQGLKIHQRFHFASALKRMSVLASYEKLGSTDLCYIAAVKGAPETLHSMFSQCPPDYHHIHTEISREGARVLALGYKELGHLTHQQAREVKREALECSLKFVGFIVVSCPLKADSKAVIREIQNASHRVVMITGDNPLTACHVAQELHFIEKAHTLILQPPSEKGRQCEWRSIDGSIVLPLARGSPKALALEYALCLTGDGLAHLQATDPQQLLRLIPHVQVFARVAPKQKEFVITSLKELGYVTLMCGDGTNDVGALKHADVGVALLANAPERVVERRRRPRDSPTLSNSGIRATSRTAKQRSGLPPSEEQPTSQRDRLSQVLRDLEDESTPIVKLGDASIAAPFTSKLSSIQCICHVIKQGRCTLVTTLQMFKILALNALILAYSQSVLYLEGVKFSDFQATLQGLLLAGCFLFISRSKPLKTLSRERPLPNIFNLYTILTVMLQFFVHFLSLVYLYREAQARSPEKQEQFVDLYKEFEPSLVNSTVYIMAMAMQMATFAINYKGPPFMESLPENKPLVWSLAVSLLAIIGLLLGSSPDFNSQFGLVDIPVEFKLVIAQVLLLDFCLALLADRVLQFFLGTPKLKVPS

SEQ ID NO: 1234 - protein, 185 aa, Homo sapiens
  VARIANT 1: note = misc_feature - Xaa can be any naturally occurring amino acid
XASPWVPAAAFLSVTIATWATHLPGLDSQGHPLHFGAGLIMTPLLTCCACLEYDPSKATFVKVVPTPNNGSTELVALHRNEGEDGLEVLSFEFQKIKYSYDALEKKQFLPVAFPVGNAFSYYQSNRGFQEDSEIRAAEKKFGSNKAEMVVPDFSELFKERATAPFFVFQVFCVGLWCLDEYWYYS

SEQ ID NO: 1235 - protein, 256 aa, Homo sapiens
MLSRVVLSAAATAAPSLKNAAFLGPGVLQATRTFHTGQPHLVPVPPLPEYGGKVRYGLIPEEFFQFLYPKTGVTGPYVLGTGLILYALSKEIYVISAETFTALSVLGVMVYGIKKYGPFVADFADKLNEQKLAQLEEAKQASIQHIQNAIDTEKSQQALVQKRHYLFDVQRNNIAMALEVTYRERLYRVYKEVKNRLDYHISVQNMMRRKEQEHMINWVEKHVVQSISTQQEKETIAKCIADLKLLAKKAQAQPVM

SEQ ID NO: 1236 - protein, 195 aa, Homo sapiens
MLSRVVLSAAATAGPYVLGTGLILYALSKEIYVISAETFTALSVLGVMVYGIKKYGPFVADFADKLNEQKLAQLEEAKQASIQHIQNAIDTEKSQQALVQKRHYLFDVQRNNIAMALEVTYRERLYRVYKEVKNRLDYHISVQNMMRRKEQEHMINWVEKHVVQSISTQQEKETIAKCIADLKLLAKKAQAQPVM

SEQ ID NO: 1237 - protein, 128 aa, Homo sapiens
AQALWRMPWLPVFLSLAAAAAAAAAEQQVPLVLWSSDRDLWAPAADTHEGHITSDLQLSTYLDPALELGPRNVLLFLQDKLSIEDFTAYGGVFGNKQDSAFSNLEHTQVRRCPIHSGPHSGPPFQGGP

SEQ ID NO: 1238 - protein, 281 aa, Homo sapiens
MAPREVLTGNDEVIGQVLSTLKSEDVPYTAALTAVRPSRVARDVAVVAGGLGRQLLQKQPVSPVIHPPVSYNDTAPRILFWAQNFSVAYKDQWEDLTPLTFGVQELNLTGSFWNDSFARLSLTYERLFGTTVTFKFILANRLYPVSARHWFTMERLEVHSNGSVAYFNASQVTGPSIYSFHCEYVSSLSKKGSLLVARTQPSPWQMMLQDFQIQAFNVMGEQFSYASDCASFFSPGIWMGLLTSLFMLFIFTYGLHMILSLKTMDRFDDHKGPTISLTQIV

SEQ ID NO: 1239 - protein, 273 aa, Homo sapiens
MMAAMATARVRMGPRCAQALWRMPWLPVFLSLAAAAAAAAAEQQVPLVLWSSDRDLWAPAADTHEGHITSDLQLSTYLDPALELGPRNVLLFLQDKLSIEDFTAYGGVFGNKQDSAFSNLENALDLAPSSLVLPAVDWYAVSTLTTYLQEKLGASPLHVARDVAVVAGGLGRQLLQKQPVSPVIHPPVSYNDTAPRILFWAQNFSVAYKDQWEDLTPLTFGVQELNLTGSFWNDSFARFILANRLYPVSARHWFTMERLEVHSNGSVAYFNAS

SEQ ID NO: 1240 - protein, 230 aa, Homo sapiens
MMAAMATARVRMGPRCAQALWRMPWLPVFLSLAAAAAAAAAEQQVPLVLWSSDRDLWAPAADTHEGHITSDLQLSTYLDPALELGPRNVLLFLQDKLSIEDFTAYGGVFGNKQDSAFSNLENALDLAPSSLVLPAVDWYAVSTLTTYLQEKLGASPLHVDLATLRELKLNASLPALLLIRLPYTASSGLMAPREVLTDEVIGQVLSTLKSEDVPYTAALTAVRPSRVARD

SEQ ID NO: 1241 - protein, 470 aa, Homo sapiens
MMAAMATARVRMGPRCAQALWRMPWLPVFLSLAAAAAAAAAEQQVPLVLWSSDRDLWAPAADTHEGHITSDLQLSTYLDPALELGPRNVLLFLQDKLSIEDFTAYGGVFGNKQDSAFSNLENALDLAPSSLVLPAVDWYAVSTLTTYLQEKLGASPLHVDLATLRELKLNASLPALLLIRLPYTASSGLMAPREVLTGNDEVIGQVLSTLKSEDVPYTAALTAVRPSRVARDVAVVAGGLGRQLLQKQPVSPVIHPPVSYNDTAPRILFWAQNFSVAYKDQWEDLTPLTFGVQELNLTGSFWNDSFARLSLTYERLFGTTVTFKFILANRLYPVSARHWFTMERLEVHSNGSVAYFNASQVTGPSIYSFHCEYVSSLSKKGSLLVARTQPSPWQMMLQDFQIQAFNVMGEQFSYASDCASFFSPGIWMGLLTSLFMLFIFTYGLHMILSLKTMDRFDDHKGPTISLTQIV

SEQ ID NO: 1242 - protein, 134 aa, Homo sapiens
MMAAMATARVRMGPRCAQALWRMPWLPVFLSLAAAAAAAAAEQQVPLVLWSSDRDLWAPAADTHEGHITSDLQLSTYLDPALELGPRNVLLFLQDKVRPPQPTLPRSSGGSQAPSPHDTDAHSPREASVTLSQL

SEQ ID NO: 1243 - protein, 134 aa, Homo sapiens; identical to SEQ ID NO: 1242

SEQ ID NO: 1244 - protein, 133 aa, Homo sapiens
  VARIANT 1: note = misc_feature - Xaa can be any naturally occurring amino acid
XAAMATARVRMGPRCAQALWRMPWLPVFLSLAAAAAAAAAEQQVPLVLWSSDRDLWAPAADTHEGHITSDLQLSTYLDPALELGPRNVLLFLQDKVRPPQPTLPRSSGGSQAPSPHDTDAHSPREASVTLSQL

SEQ ID NO: 1245 - protein, 186 aa, Homo sapiens
FHRPRATVMVMVKGVNKLALPPGSVISYPLENLSRHKHLAKDHSPDLYSLELAGLDEIGKRYGEDSEQFRDASKILVDALQKFADDMYSLYGGNAVVELVTVKSFDTSLIRKTRTILEAKQAKNPASPYNLAYKYNFEYSVVFNMVLWIMIALALAVIITSYNIWNMDPGYDSIIYRMTNQKIRMD

SEQ ID NO: 1246 - protein, 186 aa, Homo sapiens
MAVFVVLLALVAGVLGNEFSILKSPGSVVFRNGNWPIPGERIPDVAALSMGFSVKEDLSWPGLAVGNLFHRPRATVMVMVKGVNKLALPPGSVISYPLENAVPFSLDSVANSIHSLFSEETPVVLQLAPSEERVYMVGKANSVFEDLSVTLRQLRNRLFQENSVLSSLPLNSLSRNNENALFFWAL

SEQ ID NO: 1247 - protein, 209 aa, Homo sapiens
MAVFVVLLALVAGVLGNEFSILKSPGSVVFRNGNWPIPGERIPDVAALSMGFSVKEDLSWPGLAVGNLFHRPRATVMVMVKGVNKLALPPGSVISYPLENAVPFSLDSVANSIHSLFSEETPVVLQLAPSEERVYMVGKANSVFEDLSVTLRQLRNRLFQENSVLSSLPLNSLSRNNEVDLLFLSELQVLHDISSLGETTYLPRTQAWA

SEQ ID NO: 1248 - protein, 345 aa, Homo sapiens
MAVFVVLLALVAGVLGNEFSILKSPGSVVFRNGNWPIPGERIPDVAALSMGFSVKEDLSWPGLAVGNLFHRPRATVMVMVKGVNKLALPPGSVISYPLENAVPFSLDSVANSIHSLFSEETPVVLQLAPSEERVYMVGKANSVFEDLSVTLRQLRNRLFQENSVLSSLPLNSLSRNNEVDLLFLSELQVLHDISSLHLAKDHSPDLYSLELAGLDEIGKRYGEDSEQFRDASKILVDALQKFADDMYSLYGGNAVVELVTVKSFDTSLIRKTRTILEAKQAKNPASPYNLAYKYNFEYSVVFNMVLWIMIALALAVIITSYNIWNMDPGYDSIIYRMTNQKIRMD

SEQ ID NO: 1249 - protein, 331 aa, Homo sapiens
MAVFVVLLALVAGVLGNEFSILKSPGSVVFRNGNWPIPGERIPDVAALSMGFSVKEDLSWPGLAVGNLFHRPRATVMVMVKGVNKLALPPGSVISYPLENAVPFSLDSVANSIHSLFSEETPVVLQLAPSEERVYMVGKANSVFEDLSVTLRQLRNRLFQENSVLSSLPLNSLSRNNEVDLLFLSELQVLHDISSLLAGLDEIGKRYGEDSEQFRDASKILVDALQKFADDMYSLYGGNAVVELVTVKSFDTSLIRKTRTILEAKQAKNPASPYNLAYKYNFEYSVVFNMVLWIMIALALAVIITSYNIWNMDPGYDSIIYRMTNQKIRMD

SEQ ID NO: 1250 - protein, 349 aa, Homo sapiens
MAVFVVLLALVAGVLGNEFSILKSPGSVVFRNGNWPIPGERIPDVAALSMGFSVKEDLSWPGLAVGNLFHRPRATVMVMVKGVNKLALPPGSVISYPLENAVPFSLDSVANSIHSLFSEETPVVLQLAPSEERVYMVGKANSVFEDLSVTLRQLRNRLFQENSVLSSLPLNSLSRNNEVDLLFLSELQVLHDISSLLSRHKHLAKDHSPDLYSLELAGLDEIGKRYGEDSEQFRDASKILVDALQKFADDMYSLYGGNAVVELVTVKSFDTSLIRKTRTILEAKQANPASPYNLAYKYNFEYSVVFNMVLWIMIALALAVIITSYNIWNMDPGYDSIIYRMTNQKIRMD

SEQ ID NO: 1251 - protein, 350 aa, Homo sapiens
MAVFVVLLALVAGVLGNEFSILKSPGSVVFRNGNWPIPGERIPDVAALSMGFSVKEDLSWPGLAVGNLFHRPRATVMVMVKGVNKLALPPGSVISYPLENAVPFSLDSVANSIHSLFSEETPVVLQLAPSEERVYMVGKANSVFEDLSVTLRQLRNRLFQENSVLSSLPLNSLSRNNEVDLLFLSELQVLHDISSLLSRHKHLAKDHSPDLYSLELAGLDEIGKRYGEDSEQFRDASKILVDALQKFADDMYSLYGGNAVVELVTVKSFDTSLIRKTRTILEAKQAKNPASPYNLAYKYNFEYSVVFNMVLWIMIALALAVIITSYNIWNMDPGYDSIIYRMTNQKIRMD

SEQ ID NO: 1252 - protein, 258 aa, Homo sapiens
MAVFVVLLALVAGVLGNEFSILKSPGSVVFRNGNWPIPGERIPDVAALSMGFSVKEDLSWPGLAVGNLFHRPRATVMVMVKGVNKLALPPGSVISYPLENAVPFSLDSVANSIHSLFSEETPVVLQLAPSEERVYMVGKANSVFEDLSVTLRQLRNRLFQENSVLSSLPLNSLSRNNEVDLLFLSELQVLHDISSLLSRHKHLAKDHSPDLYSLELAGLDEIGKRYGEDSEQFRDASKILVDALQKMTCTVFMVGMQW

SEQ ID NO: 1253 - protein, 262 aa, Homo sapiens
MAVFVVLLALVAGVLGNEFSILKSPGSVVFRNGNWPIPGERIPDVAALSMGFSVKEDLSWPGLAVGNLFHRPRATVMVMVKGVNKLALPPGSVISYPLENAVPFSLDSVANSIHSLFSEETPVVLQLAPSEERVYMVGKANSVFEDLSVTLRQLRNRLFQENSVLSSLPLNSLSRNNEVDLLFLSELQVLHDISSLLSRHKHLAKDHSPDLYSLELAGLDEIGKRYGEDSEQFRDASKILVDALQKSLWWECSGRVSHCQVI

SEQ ID NO: 1254 - protein, 143 aa, Homo sapiens
MAVFVVLLALVAGVLGNEFSILKSPGSVVFRNGNWPIPGERIPDVAALSMGFSVKEDLSWPGLAVGNLFHRPRATVMVMVKGVNKLALPPGSVISYPLENAVPFSLDSVANSIHSLFSEETPVVLQLAPSEESVYGREGKLSV

SEQ ID NO: 1255 - protein, 318 aa, Homo sapiens
MAVFVVLLALVAGVLGNEFSILKSPGSVVFRNGNWPIPGERIPDVAALSMGFSVKEDLSWPGLAVGNLFHRPRATVMVMVKGVNKLALPPGSVISYPLENRVYMVGKANSVFEDLSVTLRQLRNRLFQENSVLSSLPLNSLSRNNEVDLLFLSELQVLHDISSLLSRHKHLAKDHSPDLYSLELAGLDEIGKRYGEDSEQFRDASKILVDALQKFADDMYSLYGGNAVVELVTVKSFDTSLIRKTRTILEAKQAKNPASPYNLAYKYNFEYSVVFNMVLWIMIALALAVIITSYNIWNMDPGYDSIIYRMTNQKIRMD

SEQ ID NO: 1256 - protein, 317 aa, Homo sapiens
MAVFVVLLALVAGVLGNEFSILKSPGSVVFRNGNWPIPGERIPDVAALSMGFSVKEDLSWPGLAVGNLFHRPRATVMVMVKGVNKLALPPGSVISYPLENRVYMVGKANSVFEDLSVTLRQLRNRLFQENSVLSSLPLNSLSRNNEVDLLFLSELQVLHDISSLLSRHKHLAKDHSPDLYSLELAGLDEIGKRYGEDSEQFRDASKILVDALQKFADDMYSLYGGNAVVELVTVKSFDTSLIRKTRTILEAKQANPASPYNLAYKYNFEYSVVFNMVLWIMIALALAVIITSYNIWNMDPGYDSIIYRMTNQKIRMD

SEQ ID NO: 1257 - protein, 272 aa, Homo sapiens
MAVFVVLLALVAGVLGNEFSILKSPGSVVFRNGNWPIPGERIPDVAALSMGFSVKEDLSWPGLAVGNLFHRPRATVMVMVKGVNKLALPPGSVISYPLENVDLLFLSELQVLHDISSLLSRHKHLAKDHSPDLYSLELAGLDEIGKRYGEDSEQFRDASKILVDALQKFADDMYSLYGGNAVVELVTVKSFDTSLIRKTRTILEAKQAKNPASPYNLAYKYNFEYSVVFNMVLWIMIALALAVIITSYNIWNMDPGYDSIIYRMTNQKIRMD

SEQ ID NO: 1258 - protein, 128 aa, Homo sapiens
MGFSVKEDLSWPGLAVGNLFHRPRATVMVMVKGVNKLALPPGSVISYPLENAVPFSLDSVANSIHSLFSEETPVVLQLAPSEERVYMVGKANSVFEDLSVTLRQLRNRLFQENSVLSSLPLNSLSRNN

SEQ ID NO: 1259 - protein, 301 aa, Homo sapiens
MGFSVKEDLSWPGLAVGNLFHRPRATVMVMVKGVNKLALPPGSVISYPLENAVPFSLDSVANSIHSLFSEETPVVLQLAPSEERVYMVGKANSVFEDLSVTLRQLRNRLFQENSVLSSLPLNSLSRNNEVDLLFLSELQVLHDISSLLSRHKHLAKDHSPDLYSLELAGLDEIGKRYGEDSEQFRDASKILVDALQKFADDMYSLYGGNAVVELVTVKSFDTSLIRKTRTILEAKQAKNPASPYNLAYKYNFEYSVVFNMVLWIMIALALAVIITSYNIWNMDPGYDSIIYRMTNQKIRMD

SEQ ID NO: 1260 - protein, 274 aa, Homo sapiens
MVMVKGVNKLALPPGSVISYPLENAVPFSLDSVANSIHSLFSEETPVVLQLAPSEERVYMVGKANSVFEDLSVTLRQLRNRLFQENSVLSSLPLNSLSRNNEVDLLFLSELQVLHDISSLLSRHKHLAKDHSPDLYSLELAGLDEIGKRYGEDSEQFRDASKILVDALQKFADDMYSLYGGNAVVELVTVKSFDTSLIRKTRTILEAKQAKNPASPYNLAYKYNFEYSVVFNMVLWIMIALALAVIITSYNIWNMDPGYDSIIYRMTNQKIRMD

SEQ ID NO: 1261 - protein, 273 aa, Homo sapiens
MVMVKGVNKLALPPGSVISYPLENAVPFSLDSVANSIHSLFSEETPVVLQLAPSEERVYMVGKANSVFEDLSVTLRQLRNRLFQENSVLSSLPLNSLSRNNEVDLLFLSELQVLHDISSLLSRHKHLAKDHSPDLYSLELAGLDEIGKRYGEDSEQFRDASKILVDALQKFADDMYSLYGGNAVVELVTVKSFDTSLIRKTRTILEAKQANPASPYNLAYKYNFEYSVVFNMVLWIMIALALAVIITSYNIWNMDPGYDSIIYRMTNQKIRMD

SEQ ID NO: 1262 - protein, 59 aa, Homo sapiens
MVMVKGVNKLALPPGSVISYPLENFLLVLTVLQIPFTPYFLRKLLLFCSWLPVRKECIW

SEQ ID NO: 1263 - protein, 101 aa, Homo sapiens
MVMVKGVNKLALPPGSVISYPLENRVYMVGKANSVFEDLSVTLRQLRNRLFQENSVLSSLPLNSLSRNNEVDLLFLSELQVLHDISSLGETTYLPRTQAWA

SEQ ID NO: 1264 - protein, 242 aa, Homo sapiens
MVMVKGVNKLALPPGSVISYPLENRVYMVGKANSVFEDLSVTLRQLRNRLFQENSVLSSLPLNSLSRNNEVDLLFLSELQVLHDISSLLSRHKHLAKDHSPDLYSLELAGLDEIGKRYGEDSEQFRDASKILVDALQKFADDMYSLYGGNAVVELVTVKSFDTSLIRKTRTILEAKQAKNPASPYNLAYKYNFEYSVVFNMVLWIMIALALAVIITSYNIWNMDPGYDSIIYRMTNQKIRMD

SEQ ID NO: 1265 - protein, 196 aa, Homo sapiens
MVMVKGVNKLALPPGSVISYPLENVDLLFLSELQVLHDISSLLSRHKHLAKDHSPDLYSLELAGLDEIGKRYGEDSEQFRDASKILVDALQKFADDMYSLYGGNAVVELVTVKSFDTSLIRKTRTILEAKQAKNPASPYNLAYKYNFEYSVVFNMVLWIMIALALAVIITSYNIWNMDPGYDSIIYRMTNQKIRMD

SEQ ID NO: 1266 - protein, 294 aa, Homo sapiens
  VARIANT 1: note = misc_feature - Xaa can be any naturally occurring amino acid
XEFSILKSPGSVVFRNGNWPIPGERIPDVAALSMGFSVKEDLSWPGLAVGNLFHRPRATVMVMVKGVNKLALPPGSVISYPLENAVPFSLDSVANSIHSLFSEETPVVLQLAPSEERVYMVGKANSVFEDLSVTLRQLRNRLFQENSVLSSLPLNSLSRNNEVDLLFLSELQVLHDISSLLSRHKHLAKDHSPDLYSLELAGLDEIGKRYGEDSEQFRDASKILVDALQKKNPASPYNLAYKYNFEYSVVFNMVLWIMIALALAVIITSYNIWNMDPGYDSIIYRMTNQKIRMD

SEQ ID NO: 1267 - protein, 76 aa, Homo sapiens
  VARIANT 1: note = misc_feature - Xaa can be any naturally occurring amino acid
XSLYGGNAVVELVTVKSFDTSLIRKTRTILEAKQAEKEHVYQKKKKERNKEVFMGVKSFNVCLSSELPAEEPSKSL

SEQ ID NO: 1268 - protein, 113 aa, Homo sapiens
FLCALPRREGYEFFVGQWTGTELHFTALINIQTRGEAAASQLILYHYPELKEEKGIVLMTAEMDSTFLNVAEAQCIANQVQLFYATDRKETYGWAQLLAIHSTLIHLHQRVRK

SEQ ID NO: 1269 - protein, 174 aa, Homo sapiens
LIRSDPAAFESRLEKRSEFRKQPVGHSRQGDFIKCVEQKTDALGKQSVNRGFTKDKTLSSIFNIEMVKEKTAEEIKQIWQQYFAAKDTVYAVIPAEKFDLIWNRAQSCPTNVAEAQCIANQVQLFYATDRKETYGLVETFNLRPNEFKYMSVIAELEQSGLGAELKCAQNQNKT

SEQ ID NO: 1270 - protein, 328 aa, Homo sapiens
MAAVVVAAAGGAGPAVLQVAGLYRGLCAVRSRALGLGLVSPAQLRVFPVRPGSGRPEGGADSSGVGAEAELQANPFYDRYRDKIQLLRRSDPAAFESRLEKRSEFRKQPVGHSRQGDFIKCVEQKTDALGKQSVNRGFTKDKTLSSIFNIEMVKEKTAEEIKQIWQQYFAAKDTVYAVIPAEKFDLIWNRAQSCPTFLCALPRREGYEFFVGQWTGTELHFTALINIQTRGEAAASQLILYHYPELKEEKGIVLMTAEMDSTFLNVAEAQCIANQVQLFYATDRKETYGLVETFNLRPNEFKYMSVIAELEQSGLGAELKCAQNQNKT

SEQ ID NO: 1271 - protein, 351 aa, Homo sapiens
MERARGPRAEADAPEEEEEAGAAMAAVVVAAAGGAGPAVLQVAGLYRGLCAVRSRALGLGLVSPAQLRVFPVRPGSGRPEGGADSSGVGAEAELQANPFYDRYRDKIQLLRRSDPAAFESRLEKRSEFRKQPVGHSRQGDFIKCVEQKTDALGKQSVNRGFTKDKTLSSIFNIEMVKEKTAEEIKQIWQQYFAAKDTVYAVIPAEKFDLIWNRAQSCPTFLCALPRREGYEFFVGQWTGTELHFTALINIQTRGEAAASQLILYHYPELKEEKGIVLMTAEMDSTFLNVAEAQCIANQVQLFYATDRKETYGLVETFNLRPNEFKYMSVIAELEQSGLGAELKCAQNQNKT

SEQ ID NO: 1272 - protein, 351 aa, Homo sapiens; identical to SEQ ID NO: 1271

SEQ ID NO: 1273 - protein, 283 aa, Homo sapiens
MERARGPRAEADAPEEEEEAGAAMAAVVVAAAGGAGPAVLQVAGLYRGLCAVRSRALGLGLVSPAQLRVFPVRPGSGRPEGGADSSGVGAEAELQANPFYDRYRDKIQLLRRSDPAAFESRLEKRSEFRKQPVGHSRQGDFIKCVEQKTDALGKQSVNRGFTKDKTLSSIFNIEMVKEKTAEEIKQIWQQYFAAKDTVYAVIPAEKFDLIWNRAQSCPTNVAEAQCIANQVQLFYATDRKETYGLVETFNLRPNEFKYMSVIAELEQSGLGAELKCAQNQNKT

SEQ ID NO: 1274 - protein, 45 aa, Homo sapiens
MSDPAAFESRLEKRSEFRKQPVGHSRQGDFIKCVEQKDGAQNKLV

SEQ ID NO: 1275 - protein, 240 aa, Homo sapiens
MSDPAAFESRLEKRSEFRKQPVGHSRQGDFIKCVEQKTDALGKQSVNRGFTKDKTLSSIFNIEMVKEKTAEEIKQIWQQYFAAKDTVYAVIPAEKFDLIWNRAQSCPTFLCALPRREGYEFFVGQWTGTELHFTALINIQTRGEAAASQLILYHYPELKEEKGIVLMTAEMDSTFLNVAEAQCIANQVQLFYATDRKETYGLVETFNLRPNEFKYMSVIAELEQSGLGAELKCAQNQNKT

SEQ ID NO: 1276 - protein, 177 aa, Homo sapiens
MVKEKTAEEIKQIWQQYFAAKDTVYAVIPAEKFDLIWNRAQSCPTFLCALPRREGYEFFVGQWTGTELHFTALINIQTRGEAAASQLILYHYPELKEEKGIVLMTAEMDSTFLNVAEAQCIANQVQLFYATDRKETYGLVETFNLRPNEFKYMSVIAELEQSGLGAELKCAQNQNKT

SEQ ID NO: 1277 - protein, 183 aa, Homo sapiens
  VARIANT 1: note = misc_feature - Xaa can be any naturally occurring amino acid
XGKQSVNRGFTKDKTLSSIFNIEMVKEKTAEEIKQAEKFDLIWNRAQSCPTFLCALPRREGYEFFVGQWTGTELHFTALINIQTRGEAAASQLILYHYPELKEEKGIVLMTAEMDSTFLNVAEAQCIANQVQLFYATDRKETYGLVETFNLRPNEFKYMSVIAELEQSGLGAELKCAQNQNKT

SEQ ID NO: 1278 - protein, 86 aa, Homo sapiens
  VARIANT 1: note = misc_feature - Xaa can be any naturally occurring amino acid
XVRPGSGRPEGGADSSGVGAEAELQANPFYDRYRDKIQLLRRSDPAAFESRLEKRSEFRKQPVGHSRQGDFIKCVEQKDGAQNKLV

SEQ ID NO: 1279 - protein, 310 aa, Homo sapiens
MAAAVAAAPGALGSLHAGGARLVAACSAWLCPGLRLPGSLAGRRAGPAIWAQGWVPAAGGPAPKRGYSSEMKTEDELRVRHLEEENRGIVVLGINRAYGKNSLSKNLIKMLSKAVDALKSDKKVRTIIIRSEVPGIFCAANLPVPTIAAIDGLALGGGLELALACDIRVAASSAKMGLVETKLAIIPGGGGTQRLPRAIGMSLAKELIFSARVLDGKEAKAVGLISHVLEQNQEGDAAYRKALDLAREFLPQGPVAMRVAKLAINQGMEVDLVTGLAIEEACYAQTIPTKDRLEGLLAFKEKRPPRYKGE

SEQ ID NO: 1280 - protein, 339 aa, Homo sapiens
MAAAVAAAPGALGSLHAGGARLVAACSAWLCPGLRLPGSLAGRRAGPAIWAQGWVPAAGGPAPKRGYSSEMKTEDELRVRHLEEENRGIVVLGINRAYGKNSLSKNLIKMLSKAVDALKSDKKVRTIIIRSEVPGIFCAGADLKERAKMSSSEVGPFVSKIRAVINDIANLPVPTIAAIDGLALGGGLELALACDIRVAASSAKMGLVETKLAIIPGGGGTQRLPRAIGMSLAKELIFSARVLDGKEAKAVGLISHVLEQNQEGDAAYRKALDLAREFLPQGPVAMRVAKLAINQGMEVDLVTGLAIEEACYAQTIPTKDRLEGLLAFKEKRPPRYKGE

SEQ ID NO: 1281 - protein, 164 aa, Homo sapiens
MPDTMLPACFLGLLAFSSACYFQNCPRGGKRAMSDLELRQCLPCGPGGKGRCFGPSICCADELGCFVGTAEALRCQEENYLPSPCQSGQKACGSGGRCAAFGVCCNDESCVTEPECREGFHRRARASDRSNATQLDGPAGALLLRLVQLAGAPEPFEPAQPDAY

SEQ ID NO: 1282 - protein, 151 aa, Homo sapiens
MSSAMLVTCLPDPSSSFREDAPRPPVPGEEGETPPCQPGVGKGQVTKPMPVSSNTRRNEDGLGEPEGRASPDSPLTRWTKSLHSLLGDQDGAYLFRTFLEREKCVDTLDFWFACNGFRQMNLKDTKTLRVAKAIYKRYIENNSIVSKQLKP

SEQ ID NO: 1283 - protein, 192 aa, Homo sapiens
MSSAMLVTCLPDPSSSFREDAPRPPVPGEEGETPPCQPGVGKGQVTKPMPVSSNTRRNEDGLGEPEGRASPDSPLTRWTKSLHSLLGDQDGAYLFRTFLEREKCVDTLDFWFACNGFRQMNLKDTKTLRVAKAIYKRYIENNSIVSKQLKPATKTYIRDGIKKQQIDSIMFDQAQTEIQSVMEENAYQMFLT

SEQ ID NO: 1284 - protein, 192 aa, Homo sapiens; identical to SEQ ID NO: 1283

SEQ ID NO: 1285 - protein, 843 aa, Homo sapiens
MSSAMLVTCLPDPSSSFREDAPRPPVPGEEGETPPCQPGVGKGQVTKPMPVSSNTRRNEDGLGEPEGRASPDSPLTRWTKSLHSLLGDQDGAYLFRTFLEREKCVDTLDFWFACNGFRQMNLKDTKTLRVAKAIYKRYIENNSIVSKQLKPATKTYIRDGIKKQQIDSIMFDQAQTEIQSVMEENAYQMFLTSDIYLEYVRSGGENTAYMSNGGLGSLKVVCGYLPTLNEEEEWTCADFKCKLSPTVVGLSSKTLRATASVRSTETVDSGYRSFKRSDPVNPYHIGSGYVFAPATSANDSEISSDALTDDSMSMTDSSVDGIPPYRVGSKKQLQREMHRSVKANGQVSLPHFPRTHRLPKEMTPVEPATFAAELISRLEKLKLELESRHSLEERLQQIREDEEREGSELTLNSREGAPTQHPLSLLPSGSYEEDPQTILDDHLSRVLKTPGCQSPGVGRYSPRSRSPDHHHHHHSQYHSLLPPGGKLPPAAASPGACPLLGGKGFVTKQTTKHVHHHYIHHHAVPKTKEEIEAEATQRVHCFCPGGSEYYCYSKCKSHSKAPETMPSEQFGGSRGSTLPKRNGKGTEPGLALPAREGGAPGGAGALQLPREEGDRSQDVWQWMLESERQSKPKPHSAQSTKKAYPLESARSSPGERASRHHLWGGNSGHPRTTPRAHLFTQDPAMPPLTPPNTLAQLEEACRRLAEVSKPPKQRCCVASQQRDRNHSATVQTGATPFSNPSLAPEDHKEPKKLAGVHALQASELVVTYFFCGEEIPYRRMLKAQSLTLGHFKEQLSKKGNYRYYFKKASDEFACGAVFEEIWEDETVLPMYEGRILGKVERID

SEQ ID NO: 1286 - protein, 778 aa, Homo sapiens
MSSAMLVTCLPDPSSSFREDAPRPPVPGEEGETPPCQPGVGKGQVTKPMPVSSNTRRNEDGLGEPEGRASPDSPLTRWTKSLHSLLGDQDGAYLFRTFLEREKCVDTLDFWFACNGFRQMNLKDTKTLRVAKAIYKRYIENNSIVSKQLKPATKTYIRDGIKKQQIDSIMFDQAQTEIQSVMEENAYQMFLTSDIYLEYVRSGGENTAYMSNGGLGSLKVVCGYLPTLNEEEEWTCADFKCKLSPTVVGLSSKTLRATASVRSTETVDSGYRSFKRSDPVNPYHIGSGYVFAPATSANDSEISSDALTDDSMSMTDSSVDGIPPYRVGSKKQLQREMHRSVKANGQVSLPHFPRTHRLPKEMTPVEPATFAAELISRLEKLKLELESRHSLEERLQQIREDEEREGSELTLNSREGAPTQHPLSLLPSGSYEEDPQTILDDHLSRVLKTPGCQSPGVGRYSPRSRSPDHHHHHHSQYHSLLPPGGKLPPAAASPGACPLLGGKGFVTKQTTKHVHHHYIHHHAVPKTKEEIEAEATQRVHCFCPGGSEYYCYSKCKSHSKAPETMPSEQFGAQSTKKAYPLESARSSPGERASRHHLWGGNSGHPRTTPRAHLFTQDPAMPPLTPPNTLAQLEEACRRLAEVSKPPKQRCCVASQQRDRNHSATVQTGATPFSNPSLAPEDHKEPKKLAGVHALQASELVVTYFFCGEEIPYRRMLKAQSLTLGHFKEQLSKKGNYRYYFKKASDEFACGAVFEEIWEDETVLPMYEGRILGKVERID

SEQ ID NO: 1287 - protein, 271 aa, Homo sapiens
MSSAMLVTCLPDPSSSFREDAPRPPVPGEEGETPPCQPGVGKGQVTKPMPVSSNTRRNEDGLGEPEGRASPDSPLTRWTKSLHSLLGDQDGAYLFRTFLEREKCVDTLDFWFACNGFRQMNLKDTKTLRVAKAIYKRYIENNSIVSKQLKPATKTYIRDGIKKQQIDSIMFDQAQTEIQSVMEENAYQMFLTSDIYLEYVRSGGENTAYMSNGGLGSLKVVCGYLPTLNEEEEWTCADFKCKLSPTVVGLSSKTLRATASVRSTETVDSGY

SEQ ID NO: 1288 - protein, 778 aa, Homo sapiens; identical to SEQ ID NO: 1286

SEQ ID NO: 1289 - protein, 160 aa, Homo sapiens
MSSAMLVTCLPDPSSSFREDAPRPPVPGEEGETPPCQPGVGKGQVTKPMPVSSNTRRNEDGLGEPEGRASPDSPLTRWTKSLHSLLGDQDGAYLFRTFLEREKCVDTLDFWFACNGFRQMNLKDTKTLRVAKDFCHDILFYLYCKLCIIKSSFKENYLVQ

SEQ ID NO: 1290 - protein, 227 aa, Homo sapiens
MVPVLLSLLLLLGPAVPQENQDGRYSLTYIYTGLSKHVEDVPAFQALGSLNDLQFFRYNSKDRKSQPMGLWRQVEGMEDWKQDSQLQKAREDIFMETLKDIVEYYNDSNGSHVLQGRFGCEIENNRSSGAFWKYYYDGKDYIEFNKEIPAWVPFDPAAQITKQKWEAEPVYVQRAKAYLEEECPATLRKYLKYSKNILDRQGTHCFLLPSTEPRIKDDLRLGAQATS

SEQ ID NO: 1291 - protein, 298 aa, Homo sapiens
MVRMVPVLLSLLLLLGPAVPQENQDGRYSLTYIYTGLSKHVEDVPAFQALGSLNDLQFFRYNSKDRKSQPMGLWRQVEGMEDWKQDSQLQKAREDIFMETLKDIVEYYNDSNGSHVLQGRFGCEIENNRSSGAFWKYYYDGKDYIEFNKEIPAWVPFDPAAQITKQKWEAEPVYVQRAKAYLEEECPATLRKYLKYSKNILDRQDPPSVVVTSHQAPGEKKKLKCLAYDFYPGKIDVHWTRAGEVQEPELRGDVLHNGNGTYQSWVVVAVPPQDTAPYSCHVQHSSLAQPLVVPWEAS

SEQ ID NO: 1292 - protein, 85 aa, Homo sapiens
  VARIANT 1: note = misc_feature - Xaa can be any naturally occurring amino acid
XTYIYTGLSKHVEDVPAFQALGSLNDLQFFRYNSKDRKSQPMGLWRQQKYPGPARSSLCGGHQPPGPRRKEETEVPGLRLLPREN

SEQ ID NO: 1293 - protein, 150 aa, Homo sapiens
MTAASCFQSQNPGVSTVVLGAYDLRRRERQSRQTFSISSMSENGYDPQQNLNDLMLLQLDREANLTSSVTILPLPLQNATVEAGTRCQVAGWGSQRSGGRLSRFPRFVNVTVTPEDQCRPNNVCTGVLTRRGGICNVSAPCGGRRGPERY

SEQ ID NO: 1294 - protein, 251 aa, Homo sapiens
MTRLTVLALLAGLLASSRAGSSPLLDIVGGRKARPRQFPFLASIQNQGRHFCGGALIHARFVMTAASCFQSQNPGVSTVVLGAYDLRRRERQSRQTFSISSMSENGYDPQQNLNDLMLLQLDREANLTSSVTILPLPLQNATVEAGTRCQVAGWGSQRSGGRLSRFPRFVNVTVTPEDQCRPNNVCTGVLTRRGGICNGDGGTPLVCEGLAHGVASFSLGPCGRGPDFFTRVALFRDWIDGVLNNPGPGPA

SEQ ID NO: 1295 - protein, 71 aa, Homo sapiens
GFHPSDIEVDLLKNGERIEKVEHSDLSFSKDWSFYLLYYTEFTPTEKDEYACRVNHVTLSQPKIVKWDRDM

SEQ ID NO: 1296 - protein, 51 aa, Homo sapiens
MSRSVALAVLALLSLSGLEAIQHSGLLTSSSREWKVKFPELLCVWVSSIRH

SEQ ID NO: 1297 - protein, 101 aa, Homo sapiens
MSRSVALAVLALLSLSGLEAIQRTPKIQVYSRHPADIEVDLLKNGERIEKVEHSDLSFSKDWSFYLLYYTEFTPTEKDEYACRVNHVTLSQPKIVKWDRDM

SEQ ID NO: 1298 - protein, 119 aa, Homo sapiens
MSRSVALAVLALLSLSGLEAIQRTPKIQVYSRHPAENGKSNFLNCYVSGFHPSDIEVDLLKNGERIEKVEHSDLSFSKDWSFYLLYYTEFTPTEKDEYACRVNHVTLSQPKIVKWDRDM

SEQ ID NO: 1299 - protein, 119 aa, Homo sapiens; identical to SEQ ID NO: 1298

SEQ ID NO: 1300 - protein, 119 aa, Homo sapiens; identical to SEQ ID NO: 1298

SEQ ID NO: 1301 - protein, 57 aa, Homo sapiens
MSRSVALAVLALLSLSGLERELKKWSIQTCLSARTGLSISCTTLNSPPLKKMSMPAV

SEQ ID NO: 1302 - protein, 41 aa, Homo sapiens
MASALWTVLPSRMSLRSLKWSLLLLSLLSFFVMWYLSLPHY

SEQ ID NO: 1303 - protein, 46 aa, Homo sapiens
MASALWTVLPSRMSLRSLKWSLLLLSLLSFFVMWYLSLPHYNVIER

SEQ ID NO: 1304 - protein, 54 aa, Homo sapiens
MASALWTVLPSRMSLRSLKWSLLLLSLLSFFVMWYLSLPHYNVIERVNWMYFYE

SEQ ID NO: 1305 - protein, 91 aa, Homo sapiens
MASALWTVLPSRMSLRSLKWSLLLLSLLSFFVMWYLSLPHYNVIERVNWMYFYEIHLDVCQLRRVIAAHGFSSKEIITFWQVMLRNTTCHY

SEQ ID NO: 1306 - protein, 58 aa, Homo sapiens
MASALWTVLPSRMSLRSLKWSLLLLSLLSFFVMWYLSLPHYNVIERVNWMYFYEYEPI

SEQ ID NO: 1307 - protein, 65 aa, Homo sapiens
MASALWTVLPSRMSLRSLKWSLLLLSLLSFFVMWYLSLPHYNVIERVNWMYFYEYEPIYRQDFHF

SEQ ID NO: 1308 - protein, 111 aa, Homo sapiens
MASALWTVLPSRMSLRSLKWSLLLLSLLSFFVMWYLSLPHYNVIERVNWMYFYEYEPIYRQDFHFTLREHSNCSHQNPFLVILVTSHPSDVKARQAIRVTWGEKKSWWGYE

SEQ ID NO: 1309 - protein, 331 aa, Homo sapiens
MASALWTVLPSRMSLRSLKWSLLLLSLLSFFVMWYLSLPHYNVIERVNWMYFYEYEPIYRQDFHFTLREHSNCSHQNPFLVILVTSHPSDVKARQAIRVTWGEKKSWWGYEVLTFFLLGQEAEKEDKMLALSLEDEHLLYGDIIRQDFLDTYNNLTLKTIMAFRWVTEFCPNAKYVMKTDTDVFINTGNLVKYLLNLNHSEKFFTGYPLIDNYSYRGFYQKTHISYQEYPFKVFPPYCSGLGYIMSRDLVPRIYEMMGHVKPIKFEDVYVGICLNLLKVNIHIPEDTNLFFLYRIHLDVCQLRRVIAAHGFSSKEIITFWQVMLRNTTCHY

SEQ ID NO: 1310 - protein, 331 aa, Homo sapiens; identical to SEQ ID NO: 1309

SEQ ID NO: 1311 - protein, 331 aa, Homo sapiens; identical to SEQ ID NO: 1309

SEQ ID NO: 1312 - protein, 331 aa, Homo sapiens; identical to SEQ ID NO: 1309

SEQ ID NO: 1313 - protein, 331 aa, Homo sapiens; identical to SEQ ID NO: 1309

SEQ ID NO: 1314 - protein, 150 aa, Homo sapiens
MSFFLFSEFTTDLSVLIKHGIQKTTKNLSFNFIWNSTVFLAPWTRLTCWLFPLAALSRGALRLLTPSVKSCCSVAQAGVQWQDLSSLQSPSLRFKQFSCLSLPSRWDYRTFGSRASELLWMASALWTVLPSRMSLRSLKWSLLLLSLLSF

SEQ ID NO: 1315 - protein, 92 aa, Homo sapiens
MRNWLVLLCPCVLGAALHLWLRLRSPPPACASGAGPADQLALFPQWKSTHYDVVVGVLSARNNHELRNVIRSTWMRHLLQHPTLSQRFESGN

SEQ ID NO: 1316 - protein, 500 aa, Homo sapiens
MRNWLVLLCPCVLGAALHLWLRLRSPPPACASGAGPADQLALFPQWKSTHYDVVVGVLSARNNHELRNVIRSTWMRHLLQHPTLSQRVLVKFIIGAHGCEVPVEDREDPYSCKLLNITNPVLNQEIEAFSLSEDTSSGLPEDRVVSVSFRVLYPIVITSLGVFYDANDVGFQRNITVKLYQAEQEEALFIARFSPPSCGVQVNKLWYKPVEQFILPESFEGTIVWESQDLHGLVSRNLHKVTVNDGGGVLRVITAGEGALPHEFLEGVEGVAGGFIYTIQEGDALLHNLHSRPQRLIDHIRNLHEEDALLKEESSIYDDIVFVDVVDTYRNVPAKLLNFYRWTVETTSFNLLLKTDDDCYIDLEAVFNRIVQKNLDGPNFWWGNFRLNWAVDRTGKWQELEYPSPAYPAFACGSGYVISKDIVKWLASNSGRLKTYQGEDVSMGIWMAAIGPKRYQDSLWLCEKTCETGMLSSPQYSPWELTELWKLKERCGDPCRCQAR

SEQ ID NO: 1317 - protein, 326 aa, Homo sapiens
MRNWLVLLCPCVLGAALHLWLRLRSPPPACASGAGPAGGVSLLLPRLECNGAVSAHPNLHLPGSRDSPASASQVAGITDQLALFPQWKSTHYDVVVGVLSARNNHELRNVIRSTWMRHLLQHPTLSQRVLVKFIIGAHGCEVPVEDREDPYSCKLLNITNPVLNQEIEAFSLSEDTSSGLPEDRVVSVSFRVLYPIVITSLGVFYDANDVGFQRNITVKLYQAEQEEALFIARFSPPSCGVQVNKLWYKPVEQFILPESFEGTIVWESQDLHGLVSRNLHKVTVNDGGGVLRVITAGEGALPHEFLEGVEGVAGGFIYTIQGKFAS

SEQ ID NO: 1318 - protein, 326 aa, Homo sapiens
MASKVSCLYVLTVVCWASALWYLSITRPTSSYTGSKPFSHLTVARKNFTFGNIRTRPINPHSFEFLINEPNKCEKNIPFLVILISTTHKEFDARQAIRETWGDENNFKGIKIATLFLLGKNADPVLNQMVEQESQIFHDIIVEDFIDSYHNLTLKTLMGMRWVATFCSKAKYVMKTDSDIFVNMDNLIYKLLKPSTKPRRRYFTGYVINGGPIRDVRSKWYMPRDLYPDSNYPPFCSGTGYIFSADVAELIYKTSLHTRLLHLEDVYVGLCLRKLGIHPFQNSGFNHWKMAYSLCRYRRVITVHQISPEEMHRIWNDMSSKKHLRC

SEQ ID NO: 1319 - protein, 378 aa, Homo sapiens
MQLRLFRRLLLAALLLVIVWTLFGPSGLGEELLSLSLASLLPAPASPGPPLALPRLLIPNQEACSGPGAPPFLLILVCTAPENLNQRNAIRASWGGLREARGLRVQTLFLLGEPNAQHPVWGSQGSDLASESAAQGDILQAAFQDSYRNLTLKTLSGLNWAEKHCPMARYVLKTDDDVYVNVPELVSELVLRGGRWGQWERSTEPQREAEQEGGQVLHSEEVPLLYLGRVHWRVNPSRTPGGRHRVSEEQWPHTWGPFPPYASGTGYVLSASAVQLILKVASRAPLLPLEDVFVGVSARRGGLAPTQCVKLAGATHYPLDRCCYGKFLLTSHRLDPWKMQEAWKLVGGSDGERTAPFCSWFQGVLGILRCRAIAWLQS

SEQ ID NO: 1320 - protein, 310 aa, Homo sapiens
MAFPKMRLMYICLLVLGALCLYFSMYSLNPFKEQSFVYKKDGNFLKLPDTDCRQTPPFLVLLVTSSHKQLAERMAIRQTWGKERMVKGKQLKTFFLLGTTSSAAETKEVDQESQRHGDIIQKDFLDVYYNLTLKTMMGIEWVHRFCPQAAFVMKTDSDMFINVDYLTELLLKKNRTTRFFTGFLKLNEFPIRQPFSKWFVSKSEYPWDRYPPFCSGTGYVFSGDVASQVYNVSKSVPYIKLEDVFVGLCLERLNIRLEELHSQPTFFPGGLRFSVCLFRRIVACHFIKPRTLLDYWQALENSRGEDCPPV

SEQ ID NO: 1321 - protein, 310 aa, Homo sapiens; identical to SEQ ID NO: 1320

SEQ ID NO: 1322 - protein, 310 aa, Homo sapiens; identical to SEQ ID NO: 1320

SEQ ID NO: 1323 - protein, 310 aa, Homo sapiens; identical to SEQ ID NO: 1320

SEQ ID NO: 1324 - protein, 314 aa, Homo sapiens
MCLEMAFPKMRLMYICLLVLGALCLYFSMYSLNPFKEQSFVYKKDGNFLKLPDTDCRQTPPFLVLLVTSSHKQLAERMAIRQTWGKERMVKGKQLKTFFLLGTTSSAAETKEVDQESQRHGDIIQKDFLDVYYNLTLKTMMGIEWVHRFCPQAAFVMKTDSDMFINVDYLTELLLKKNRTTRFFTGFLKLNEFPIRQPFSKWFVSKSEYPWDRYPPFCSGTGYVFSGDVASQVYNVSKSVPYIKLEDVFVGLCLERLNIRLEELHSQPTFFPGGLRFSVCLFRRIVACHFIKPRTLLDYWQALENSRGEDCPPV

SEQ ID NO: 1325 - protein, 329 aa, Homo sapiens
MKLLRRAWRRRAALGLGTLALCGAALLYLARCAAEPGDPRAMSGRSPPPPAPARAAAFLAVLVASAPRAAERRSVIRSTWLARRGAPGDVWARFAVGTAGLGAEERRALEREQARHGDLLLLPALRDAYENLTAKVLAMLAWLDEHVAFEFVLKADDDSFARLDALLAELRAREPARRRRLYWGFFSGRGRVKPGGRWREAAWQLCDYYLPYALGGGYVLSADLVHYLRLSRDYLRAWHSEDVSLGAWLAPVDVQREHDPRFDTEYRSRGCSNQYLVTHKQSLEDMLEKHATLAREGRLCKREVQLRLSYVYDWSAPPSQCCQRREGIP

SEQ ID NO: 1326 - protein, 223 aa, Homo sapiens
MKLKLKNVFLAYFLVSIAGLLYALVQLAKGMDRTLPLMQRFRDSATALSSGQPCDCLPPLRAAAEQLRQKDLRISQLQAELRRPPPAPAQPPEPEALPTIYVVTPTYARLVQKAELVRLSQTLSLVPRLHWLLVEDAEGPTPLVSGLLAASGLLFTHLVVLTPKAQRLREGEPGWVHPRGVEQRNKALDWLRGRGGAVGGEKDPPPPGTQGVVYFADDDNTYS

SEQ ID NO: 1327 - protein, 335 aa, Homo sapiens
MKLKLKNVFLAYFLVSIAGLLYALVQLGQPCDCLPPLRAAAEQLRQKDLRISQLQAELRRPPPAPAQPPEPEALPTIYVVTPTYARLVQKAELVRLSQTLSLVPRLHWLLVEDAEGPTPLVSGLLAASGLLFTHLVVLTPKAQRLREGEPGWVHPRGVEQRNKALDWLRGRGGAVGGEKDPPPPGTQGVVYFADDDNTYSRELFEEMRWTRGVSVWPVGLVGGLRFEGPQVQDGRVVGFHTAWEPSRPFPVDMAGFAVALPLLLDKPNAQFDSTAPRGHLESSLLSHLVDPKDLEPRAANCTRVLVWHTRTEKPKMKQEEQLQRQGRGSDPAIEV

SEQ ID NO: 1328 - protein, 319 aa, Homo sapiens
MKLKLKNVFLAYFLVSIAGLLYALVQLGQPCDCLPPLRAAAEQLRQKDLRISQLQAELRRPPPAPAQPPEPEALPTIYVVTPTYARLVQKAELVRLSQTLSLVPRLHWLLVEDAEGPTPLVSGLLAASGLLFTHLVVLTPKAQRLREGEPGWVHPRGVEQRNKALDWLRGRGGAVGGEKDPPPPGTQGVVYFADDDNTYSRELFEEMRWTRGVSVWPVGLVGGLRFEGPQVQDGRVVGFHTAWEPSRPFPVDMAGFAVALPLLLDKPNAQFDSTAPRGHLESSLLSHLVDPKDLEPRAANCTRSLAVSPRLECSSAILA

SEQ ID NO: 1329 - protein, 315 aa, Homo sapiens
MKLKLKNVFLAYFLVSIAGLLYALVQLGQPCDCLPPLRAAAEQLRQKDLRISQLQAELRRPPPAPAQPPEPEALPTIYVVTPTYARLVQKAELVRLSQTLSLVPRLHWLLVEDAEGPTPLVSGLLAASGLLFTHLVVLTPKAQRLREGEPGWVHPRGVEQRNKALDWLRGRGGAVGGEKDPPPPGTQGVVYFADDDNTYSRELFEEMRWTRGVSVWPVGLVGGLRFEGPQVQDGRVVGFHTAWEPSRPFPVDMAGFAVALPLLLDKPNAQFDSTAPRGHLESSLLSHLVDPKDLEPRAANCTRTESRCVTQAGVQ

SEQ ID NO: 1330 - protein, 38 aa, Homo sapiens
MKLKLKNVFLAYFLVSIAGLLYALVQLVSASSTKQKAR

SEQ ID NO: 1331 - protein, 498 aa, Homo sapiens
MRPPACWWLLAPPALLALLTCSLAFGLASEDTKKEVKQSQDLEKSGISRKNDIDLKGIVFVIQSQSNSFHAKRAEQLKKSILKQAADLTQELPSVLLLHQLAKQEGAWTILPLLPHFSVTYSRNSSWIFFCEEETRIQIPKLLETLRRYDPSKEWFLGKALHDEEATIIHHYAFSENPTVFKYPDFAAGWALSIPLVNKLTKRLKSESLKSDFTIDLKHEIALYIWDKGGGPPLTPVPEFCTNDVDFYCATTFHSFLPLCRKPVKKKDIFVAVKTCKKFHGDRIPIVKQTWESQASLIEYYSDYTENSIPTVDLGIPNTDRGHCGKTFAILERFLNRSQDKTAWLVIVDDDTLISISRLQHLLSCYDSGEPVFLGERYGYGLGTGGYSYITGGGGMVFSREAVRRLLASKCRCYSNDAPDDMVLGMCFSGLGIPVTHSPLFHQARPVDYPKDYLSHQVPISFHKHWNIDPVKVYFTWLAPSDEDKARQETQKGFREEL

SEQ ID NO: 1332 - protein, 127 aa, Homo sapiens
MKYLRHRRPNATLILAIGAFTLLLFSLLVSPPTCKVQEQPPAIPEALAWPTPPTRPAPAPCHANTSMVTHPDFATQPQHVQNFLLYRHCRHFPLLQDVPPSKCAQPVFLLLVIKSSPSNYVRRELLR

SEQ ID NO: 1333 - protein, 250 aa, Homo sapiens
MKYLRHRRPNATLILAIGAFTLLLFSLLVSPPTCKVQEQPPAIPEALAWPTPPTRPAPAPCHANTSMVTHPDFATQPQHVQNFLLYRHCRHFPLLQDVPPSKCAQPVFLLLVIKSSPSNYVRRELLRRTWGRERKVRGLQLRLLFLVGTASNPHEARKVNRLLELEAQTHGDILQWDFHDSFFNLTLKQVLFLQWQETRCANASFVLNGDDDVFAHTDNMVFYLQDHDPGRHLFVGQLIQNVGPIRAFWS

SEQ ID NO: 1334 - protein, 372 aa, Homo sapiens
MKYLRHRRPNATLILAIGAFTLLLFSLLVSPPTCKVQEQPPAIPEALAWPTPPTRPAPAPCHANTSMVTHPDFATQPQHVQNFLLYRHCRHFPLLQDVPPSKCAQPVFLLLVIKSSPSNYVRRELLRRTWGRERKVRGLQLRLLFLVGTASNPHEARKVNRLLELEAQTHGDILQWDFHDSFFNLTLKQVLFLQWQETRCANASFVLNGDDDVFAHTDNMVFYLQDHDPGRHLFVGQLIQNVGPIRAFWSKYYVPEVVTQNERYPPYCGGGGFLLSRFTAAALRRAAHVLDIFPIDDVFLGMCLELEGLKPASHSGIRTSGVRAPSQRLSSFDPCFYRDLLLVHRFLPYEMLLMWDALNQPNLTCGNQTQIY

SEQ ID NO: 1335 - protein, 372 aa, Homo sapiens; identical to SEQ ID NO: 1334

SEQ ID NO: 1336 - protein, 353 aa, Homo sapiens
MLCRLCWLVSYSLAVLLLGCLLFLRKAAKPAGDPTAHQPFWAPPTPRHSRCPPNHTVSSASLSLPSRHRLFLTYRHCRNFSILLEPSGCSKDTFLLLAIKSQPGHVERRAAIRSTWGRVGGWARGRQLKLVFLLGVAGSAPPAQLLAYESREFDDILQWDFTEDFFNLTLKELHLQRWVVAACPQAHFMLKGDDDVFVHVPNVLEFLDGWDPAQDLLVGDVIRQALPNRNTKVKYFIPPSMYRATHYPPYAGGGGYVMSRATVRRLQAIMEDAELFPIDDVFVGMCLRRLGLSPMHHAGFKTFGIRRPLDPLDPCLYRGLLLVHRLSPLEMWTMWALVTDEGLKCAAGPIPQR

SEQ ID NO: 1337 - protein, 353 aa, Homo sapiens; identical to SEQ ID NO: 1336

SEQ ID NO: 1338 - protein, 378 aa, Homo sapiens
MLPPQPSAAHQGRGGRSGLLPKGPAMLCRLCWLVSYSLAVLLLGCLLFLRKAAKPAGDPTAHQPFWAPPTPRHSRCPPNHTVSSASLSLPSRHRLFLTYRHCRNFSILLEPSGCSKDTFLLLAIKSQPGHVERRAAIRSTWGRVGGWARGRQLKLVFLLGVAGSAPPAQLLAYESREFDDILQWDFTEDFFNLTLKELHLQRWVVAACPQAHFMLKGDDDVFVHVPNVLEFLDGWDPAQDLLVGDVIRQALPNRNTKVKYFIPPSMYRATHYPPYAGGGGYVMSRATVRRLQAIMEDAELFPIDDVFVGMCLRRLGLSPMHHAGFKTFGIRRPLDPLDPCLYRGLLLVHRLSPLEMWTMWALVTDEGLKCAAGPIPQR

SEQ ID NO: 1339 - protein, 55 aa, Homo sapiens
MLPPQPSAAHQGRGGRSGLLPKGWQDPLPQPSCWPMRVGSLMTSSSGTSLRTSST

SEQ ID NO: 1340 - protein, 121 aa, Homo sapiens
MAFPCRRSLTAKTLACLLVGVSFLALQQWFLQAPRSPREERSPQEETPEGPTDAPAADEPPSELVPGPPCVANASANATADFEQLPARIQDFLRYRHCRHFPLLWDAPAKCAGGRGVFLLL

SEQ ID NO: 1341 - protein, 384 aa, Homo sapiens
MAFPCRRSLTAKTLACLLVGVSFLALQQWFLQAPRSPREERSPQEETPEGPTDAPAADEPPSELVPGPPCVANASANATADFEQLPARIQDFLRYRHCRHFPLLWDAPAKCAGGRGVFLLLAVKSAPEHYERRELIRRTWGQERSYGGRPVRRLFLLGTPGPEDEARAERLAELVALEAREHGDVLQWAFADTFLNLTLKHLHLLDWLAARCPHARFLLSGDDDVFVHTANVVRFLQAQPPGRHLFSGQLMEGSVPIRDSWSKYFVPPQLFPGSAYPVYCSGGGFLLSGPTARALRAAARHTPLFPIDDAYMGMCLERAGLAPSGHEGIRPFGVQLPGAQQSSFDPCMYRELLLVHRFAPYEMLLMWKALHSPALSCDRGHRVS

SEQ ID NO: 1342 - protein, 401 aa, Homo sapiens
MSLWKKTVYRSLCLALALLVAVTVFQRSLTPGQFLQEPPPPTLEPQKAQKPNGQLVNPNNFWKNPKDVAAPTPMASQGPQAWDVTTTNCSANINLTHQPWFQVLEPQFRQFLFYRHCRYFPMLLNHPEKCRGDVYLLVVVKSVITQHDRREAIRQTWGRERQSAGGGRGAVRTLFLLGTASKQEERTHYQQLLAYEDRLYGDILQWGFLDTFFNLTLKEIHFLKWLDIYCPHVPFIFKGDDDVFVNPTNLLEFLADRQPQENLFVGDVLQHARPIRRKDNKYYIPGALYGKASYPPYAGGGGFLMAGSLARRLHHACDTLELYPIDDVFLGMCLEVLGVQPTAHEGFKTFGISRNRNSRMNKEPCFFRAMLVVHKLLPPELLAMWGLVHSNLTCSRKLQVL

SEQ ID NO: 1343 - protein, 397 aa, Homo sapiens
MRCPKCLLCLSALLTLLGLKVYIEWTSESRLSKAYPSPRGTPPSPTPANPEPTLPANLSTRLGQTIPLPFAYWNQQQWRLGSLPSGDSTETGGCQAWGAAAATEIPDFASYPKDLRRFLLSAACRSFPQWLPGGGGSQVSSCSDTDVPYLLLAVKSEPGRFAERQAVRETWGSPAPGIRLLFLLGSPVGEAGPDLDSLVAWESRRYSDLLLWDFLDVPFNQTLKDLLLLAWLGRHCPTVSFVLRAQDDAFVHTPALLAHLRALPPASARSLYLGEVFTQAMPLRKPGGPFYVPESFFEGGYPAYASGGGYVIAGRLAPWLLRAAARVAPFPFEDVYTGLCIRALGLVPQAHPGFLTAWPADRTADHCAFRNLLLVRPLGPQASIRLWKQLQDPRLQC

SEQ ID NO: 1344 - protein, 402 aa, Homo sapiens
MRRRLRLRRDALLTLLLGASLGLLLYAQRDGAAPTASAPRGRGRAAPRPTPGPRAFQLPDAGAAPPAYEGDTPAPPTPTGPFDFARYLRAKDQRRFPLLINQPHKCRGDGAPGGRPDLLIAVKSVAEDFERRQAVRQTWGAEGRVQGALVRRVFLLGVPRGAGSGGADEVGEGARTHWRALLRAESLAYADILLWAFDDTFFNLTLKEIHFLAWASAFCPDVRFVFKGDADVFVNVGNLLEFLAPRDPAQDLLAGDVIVHARPIRTRASKYYIPEAVYGLPAYPAYAGGGGFVLSGATLHRLAGACAQVELFPIDDVFLGMCLQRLRLTPEPHPAFRTFGIPQPSAAPHLSTFDPCFYRELVVVHGLSAADIWLMWRLLHGPHGPACAHPQPVAAGPFQWDS

SEQ ID NO: 1345 - protein, 96 aa, Homo sapiens
MWLGRRALCALVLLLACASLGLLYASTRDAPGLRLPLAPWAPPQSPRRPELPDLAPEPRYAHIPVRIKEQVVGAEGCLCHKRAGVPGLSVEEPVPS

SEQ ID NO: 1346 - protein, 81 aa, Homo sapiens
MWLGRRALCALVLLLACASLGLLYASTRDAPGLRLPLAPWAPPQSPRRPELPDLAPEPRYAHIPVRIKEQVVGLLAWNNCS

SEQ ID NO: 1347 - protein, 120 aa, Homo sapiens
MWLGRRALCALVLLLACASLGLLYASTRDAPGLRLPLAPWAPPQSPRRPELPDLAPEPRYAHIPVRIKEQVVGLLAWNNCSCESSGGGLPLPFQKQVRAIDLTKAFDPAELRAASATREQ

SEQ ID NO: 1348 - protein, 231 aa, Homo sapiens
MWLGRRALCALVLLLACASLGLLYASTRDAPGLRLPLAPWAPPQSPRRPELPDLAPEPRYAHIPVRIKEQVVGLLAWNNCSCESSGGGLPLPFQKQVRAIDLTKAFDPAELRAASATREQEFQAFLSRSQSPADQLLIAPANSPLQYPLQGVEVQPLRSILVPGEPDCLPRHLGRGRGSDWSYSHWRGSGRSHPCQPRAGPTQQATTTGHLQQPKLPDQHSRHSPVLHRGT

SEQ ID NO: 1349 - protein, 237 aa, Homo sapiens
MWLGRRALCALVLLLACASLGLLYASTRDAPGLRLPLAPWAPPQSPRRPELPDLAPEPRYAHIPVRIKEQVVGLLAWNNCSCESSGGGLPLPFQKQVRAIDLTKAFDPAELRAASATREQEFQAFLSRSQSPADQLLIAPANSPLQYPLQGVEVQPLRSILVPGLSLQAASGQEVYQVNLTASLGTWDVAGEVTGVTLTGEGQADLTLVSPGLDQLNRQLQLVTYSSRSYQTNTADT

SEQ ID NO: 1350 - protein, 304 aa, Homo sapiens
MWLGRRALCALVLLLACASLGLLYASTRDAPGLRLPLAPWAPPQSPRRPELPDLAPEPRYAHIPVRIKEQVVGLLAWNNCSCESSGGGLPLPFQKQVRAIDLTKAFDPAELRAASATREQEFQAFLSRSQSPADQLLIAPANSPLQYPLQGVEVQPLRSILVPGLSLQAASGQEVYQVNLTASLGTWDVAGEVTGVTLTGEGQADLTLVSPGLDQLNRQLQLVTYSSRSYQTNTADTAQYNISALVTIATKTFLRYDRLRALITSIRRFYPTVTVVIADDSDKPERVSGPYVEHYLMPFGKVCS

SEQ ID NO: 1351 - protein, 328 aa, Homo sapiens
MWLGRRALCALVLLLACASLGLLYASTRDAPGLRLPLAPWAPPQSPRRPELPDLAPEPRYAHIPVRIKEQVVGLLAWNNCSCESSGGGLPLPFQKQVRAIDLTKAFDPAELRAASATREQEFQAFLSRSQSPADQLLIAPANSPLQYPLQGVEVQPLRSILVPGLSLQAASGQEVYQVNLTASLGTWDVAGEVTGVTLTGEGQADLTLVSPGLDQLNRQLQLVTYSSRSYQTNTADTGARPGWRDGQAGQTEKNQKGWSGQMAEGMGGIWAMARAVQPHNGCFNWTSRARGRKGAFVHLGLEQARGKPEPWVCLPFRPTVGGPRKRLV

SEQ ID NO: 1352 - protein, 328 aa, Homo sapiens; identical to SEQ ID NO: 1351

SEQ ID NO: 1353 - protein, 533 aa, Homo sapiens
MWLGRRALCALVLLLACASLGLLYASTRDAPGLRLPLAPWAPPQSPRRPELPDLAPEPRYAHIPVRIKEQVVGLLAWNNCSCESSGGGLPLPFQKQVRAIDLTKAFDPAELRAASATREQEFQAFLSRSQSPADQLLIAPANSPLQYPLQGVEVQPLRSILVPGLSLQAASGQEVYQVNLTASLGTWDVAGEVTGVTLTGEGQADLTLVSPGLDQLNRQLQLVTYSSRSYQTNTADTVRFSTEGHEAAFTIRIRHPPNPRLYPPGSLPQGAQYNISALVTIATKTFLRYDRLRALITSIRRFYPTVTVVIADDSDKPERVSGPYVEHYLMPFGKGWFAGRNLAVSQVTTKYVLWVDDDFVFTARTRLERLVDVLERTPLDLVGGAVREISGFATTYRQLLSVEPGAPGLGNCLRQRRGFHHELVGFPGCVVTDGVVNFFLARTDKVREVGFDPRLSRVAHLEFFLDGLGSLRVGSCSDVVVDHASKLKLPWTSRDAGAETYARYRYPGSLDESQMAKHRLLFFKHRLQCMTSQ

SEQ ID NO: 1354 - protein, 478 aa, Homo sapiens
MWLGRRALCALVLLLACASLGLLYASTRDAPGLRLPLAPWAPPQSPRRPELPDLAPEPRYAHIPVRIKEQVVGSQSPADQLLIAPANSPLQYPLQGVEVQPLRSILVPGLSLQAASGQEVYQVNLTASLGTWDVAGEVTGVTLTGEGQADLTLVSPGLDQLNRQLQLVTYSSRSYQTNTADTVRFSTEGHEAAFTIRIRHPPNPRLYPPGSLPQGAQYNISALVTIATKTFLRYDRLRALITSIRRFYPTVTVVIADDSDKPERVSGPYVEHYLMPFGKGWFAGRNLAVSQVTTKYVLWVDDDFVFTARTRLERLVDVLERTPLDLVGGAVREISGFATTYRQLLSVEPGAPGLGNCLRQRRGFHHELVGFPGCVVTDGVVNFFLARTDKVREVGFDPRLSRVAHLEFFLDGLGSLRVGSCSDVVVDHASKLKLPWTSRDAGAETYARYRYPGSLDESQMAKHRLLFFKHRLQCMTSQ

SEQ ID NO: 1355 - protein, 151 aa, Homo sapiens
  VARIANT 1: note = misc_feature - Xaa can be any naturally occurring amino acid
XMPFGKGWFAGRNLAVSQVTTKYVLWVDDDFVFTARTRLERLVDVLERTPLDLARLEATSLSLQVGGAVREISGFATTYRQLLSVEPGAPGLGNCLRQRRGFHHELVGFPGCVVTDGVVNFFLARTDKVREVGFDPRLSRVAHLEFFLDGL

SEQ ID NO: 1356 - protein, 127 aa, Homo sapiens
  VARIANT 1: note = misc_feature - Xaa can be any naturally occurring amino acid
XSQSPADQLLIAPANSPLQYPLQGVEVQPLRSILVPGLSLQAASGQEVYQVNLTASLGTWDVAGEVTGVTLTGEGQADLTLVSPGLDQLNRQLQLVTYSSRSYQTNTADTGSNAMSFLPSPVLHRGT

SEQ ID NO: 1357 - protein, 637 aa, Homo sapiens [sequence omitted]

SEQ ID NO: 1358 - protein, 998 aa, Homo sapiens [sequence omitted]

SEQ ID NO: 1359 - protein, 53 aa, Homo sapiens
DASSIVFLCDLHIHFPPNILDGIRKHCVEGRLAFAPVVMRLSCGSSPRDPHGS

SEQ ID NO: 1360 - protein, 26 aa, Homo sapiens
DVERALRAARLPRDRACDSPSPGTST

SEQ ID NO: 1361 - protein, 1039 aa, Homo sapiens
MPRLPVKKIRKQMKLLLLLLLLSCAAWLTYVHLGLVRQGRALRQRLGYGRDGEKLTSETDGRGVHAAPSTQRAEDSSESREEEQAPEGRDLDMLFPGGAGRLPLNFTHQTPPWREEYKGQVNLHVFEDWCGGAVGHLRRNLHFPLFPHTRTTVKKLAVSPKWKNYGLRIFGFIHPARDGDVQFSVASDDNSEFWLSLDESPAAAQLVAFVGKTGSEWTAPGEFTKFSSQVSKPRRLMASRRYYFELLHKQDDRGSDHVEVGWRAFLPGLKFEVISSAHISLYTDESALKMDHVAHVPQSPASHVGGRPPQEETSADMLRPDPRDTFFLTPRMESSSLENVLEPCAYAPTYVVKDFPIARYQGLQFVYLSFVYPNDYTRLTHMETDNKCFYRESPLYLERFGFYKYMKMDKEEGDEDEEDEVQRRAFLFLNPDDFLDDEDEGELLDSLEPTEAAPPRSGPQSPAPAAPAQPGATLAPPTPPRPRDGGTPRHSRALSWAARAARPLPLFLGRAPPPRPAVEQPPPKVYVTRVRPGQRASPRAPAPRAPWPPFPGVFLHPRPLPRVQLRAPPRPPRPHGRRTGGPQATQPRPPARAQATQGGREGQARTLGPAAPTVDSNLSSEARPVTSFLSLSQVSGPQLPGEGEEEEEGEDDGAPGDEAASEDSEEAAGPALGRWREDAIDWQRTFSVGAVDFELLRSDWNDLRCNVSGNLQLPEAEAVDVTAQYMERLNARHGGRFALLRIVNVEKRRDSARGSRFLLELELQERGGGRLRLSEYVFLRLPGARVGDADGESPEPAPAASVRPDGRPELCRPLRLAWRQDVMVHFIVPVKNQARWVAQFLADMAALHARTGDSRFSVVLVDFESEDMDVERALRAARLPRYQYLRRTGNFERSAGLQAGVDAVEDASSIVFLCDLHIHFPPNILDGIRKHCVEGRLAFAPVVMRLSCGSSPRDPHGYWEVNGFGLFGIYKSDFDRVGGMNTEEFRDQWGGEDWELLDRVLQAGLEVERLRLRNFYHHYHSKRGMWSVRSRKGSRTGAS

SEQ ID NO: 1362 - protein, 62 aa, Homo sapiens
MANFHKTLILGKGKTLTNEASTKKVELDNCPSVSPYLRGQSKLIFKPDLTLEEVQEIRLLNV

SEQ ID NO: 1363 - skipped

SEQ ID NO: 1364 - protein, 6 aa, Homo sapiens
MGFNLT

SEQ ID NO: 1365 - protein, 21 aa, Homo sapiens
MGFNLTFHLSYKFRLLLLLTL

SEQ ID NO: 1366 - protein, 42 aa, Homo sapiens
MGFNLTFHLSYKFRLLLLLTLCLTVVGWATSNYFVGAIQEIP

SEQ ID NO: 1367 - protein, 55 aa, Homo sapiens
MGFNLTFHLSYKFRLLLLLTLCLTVVGWATSNYFVGAIQEIPKAKEFMANFHKTL

SEQ ID NO: 1368 - protein, 118 aa, Homo sapiens
MGFNLTFHLSYKFRLLLLLTLCLTVVGWATSNYFVGAIQEIPKAKEFMANFHKTLILGKGKTLTNEASTKKVELDNCPSVSPYLRGQSKLIFKPDLTLEEVQAENPKVSRGRYRPQEC

SEQ ID NO: 1369 - protein, 136 aa, Homo sapiens
MGFNLTFHLSYKFRLLLLLTLCLTVVGWATSNYFVGAIQEIPKAKEFMANFHKTLILGKGKTLTNEASTKKVELDNCPSVSPYLRGQSKLIFKPDLTLEEVQAENPKVSRGRYRPQECKALQRVAILVPHRNREKH

SEQ ID NO: 1370 - protein, 246 aa, Homo sapiens
MGFNLTFHLSYKFRLLLLLTLCLTVVGWATSNYFVGAIQEIPKAKEFMANFHKTLILGKGKTLTNEASTKKVELDNCPSVSPYLRGQSKLIFKPDLTLEEVQAENPKVSRGRYRPQECKALQRVAILVPHRNREKHLMYLLEHLHPFLQRQQLDYGIYVIHQAEGKKFNRAKLLNVGYLEALKEENWDCFIFHDVDLVPENDFNLYKCEEHPKHLVVGRNSTGYRLRYSGYFGGVTALSREQFFKG

SEQ ID NO: 1371 - protein, 344 aa, Homo sapiens
MGFNLTFHLSYKFRLLLLLTLCLTVVGWATSNYFVGAIQEIPKAKEFMANFHKTLILGKGKTLTNEASTKKVELDNCPSVSPYLRGQSKLIFKPDLTLEEVQAENPKVSRGRYRPQECKALQRVAILVPHRNREKHLMYLLEHLHPFLQRQQLDYGIYVIHQAEGKKFNRAKLLNVGYLEALKEENWDCFIFHDVDLVPENDFNLYKCEEHPKHLVVGRNSTGYRLRYSGYFGGVTALSREQFFKVNGFSNNYWGWGGEDDDLRLRVELQRMKISRPLPEVGKYTMVFHTRDKGNEVNAERMKLLHQVSRVWRTDGLSSCSYKLVSVEHNPLYINITVDFWFGA

SEQ ID NO: 1372 - protein, 344 aa, Homo sapiens; identical to SEQ ID NO: 1371

SEQ ID NO: 1373 - protein, 344 aa, Homo sapiens; identical to SEQ ID NO: 1371

SEQ ID NO: 1374 - protein, 301 aa, Homo sapiens
MGFNLTFHLSYKFRLLLLLTLCLTVVGWATSNYFVGAIQEIPKAKEFMANFHKTLILGKGKTLTNEASTKKVELDNCPSVSPYLRGQSKLIFKPDLTLEEVQAENPKVSRGRYRPQECKALQRVAILVPHRNREKHLMYLLEHLHPFLQRQQLDYGIYVIHQAEGKKFNRAKLLNVGYLEALKEENWDCFIFHDVDLVPENDFNLYKCEEHPKHLVVGRNSTGYRLRYSGYFGGVTALSREQFFKVNGFSNNYWGWGGEDDDLRLRVELQRMKISRPLPEVGKYTMVFHTRDKGNEVNAER

SEQ ID NO: 1375 - protein, 25 aa, Homo sapiens
MYLLEHLHPFLQRQQLDYGIYVIHQ

SEQ ID NO: 1376 - protein, 388 aa, Homo sapiens
MRARRGLLRLPRRSLLAALFFFSLSSSLLYFVYVAPGIVNTYLFMMQAQGILIRDNVRTIGAQVYEQVLRSAYAKRNSSVNDSDYPLDLNHSETFLQTTTFLPEDFTYFANHTCPERLPSMKGPIDINMSEIGMDYIHELFSKDPTIKLGGHWKPSDCMPRWKVAILIPFRNRHEHLPVLFRHLLPMLQRQRLQFAFYVVEQVGTQPFNRAMLFNVGFQEAMKDLDWDCLIFHDVDHIPESDRNYYGCGQMPRHFATKLDKYMYLLPYTEFFGGVSGLTVEQFRKINGFPNAFWGWGGEDDDLWNRVQNAGYSVSRPEGDTGKYKSIPHHHRGEVQFLGRYALLRKSKERQGLDGLNNLNYFANITYDALYKNITVNLTPELAQVNEY

SEQ ID NO: 1377 - protein, 343 aa, Homo sapiens
MSVLRRMMRVSNRSLLAFIFFFSLSSSCLYFIYVAPGIANTYLFMVQARGIMLRENVKTIGHMIRLYTNKNSTLNGTDYPEGNNSSDYLVQTTTYLPENFTYSPYLPCPEKLPYMRGFLNVNVSEVSFDEIHQLFSKDLDIEPGGHWRPKDCKPRWKTGTQPFNRAMLFNVGFKEAMKDSVWDCVIFHDVDHLPENDRNYYGCGEMPRHFAAKLDKYMYILPYKEFFGGVSGLTVEQFRKINGFPNAFWGWGGEDDDLWNRVHYAGYNVTRPEGDLGKYKSIPHHHRGEVQFLGRYKLLRYSKERQYIDGLNNLIYRPKILVDRLYTNISVNLMPELAPIEDY

SEQ ID NO: 1378 - protein, 382 aa, Homo sapiens
MSVLRRMMRVSNRSLLAFIFFFSLSSSCLYFIYVAPGIANTYLFMVQARGIMLRENVKTIGHMIRLYTNKNSTLNGTDYPEGNNSSDYLVQTTTYLPENFTYSPYLPCPEKLPYMRGFLNVNVSEVSFDEIHQLFSKDLDIEPGGHWRPKDCKPRWKVAVLIPFRNRHEHLPIFFLHLIPMLQKQRLEFAFYVIEQTGTQPFNRAMLFNVGFKEAMKDSVWDCVIFHDVDHLPENDRNYYGCGEMPRHFAAKLDKYMYILPYKEFFGGVSGLTVEQFRKINGFPNAFWGWGGEDDDLWNRVHYAGYNVTRPEGDLGKYKSIPHHHRGEVQFLGRYKLLRYSKERQYIDGLNNLIYRPKILVDRLYTNISVNLMPELAPIEDY

SEQ ID NO: 1379 - protein, 343 aa, Homo sapiens
MSVLRRMMRVSNRSLLAFIFFFSLSSSCLYFIYVAPGIDYPEGNNSSDYLVQTTTYLPENFTYSPYLPCPEKLPYMRGFLNVNVSEVSFDEIHQLFSKDLDIEPGGHWRPKDCKPRWKVAVLIPFRNRHEHLPIFFLHLIPMLQKQRLEFAFYVIEQTGTQPFNRAMLFNVGFKEAMKDSVWDCVIFHDVDHLPENDRNYYGCGEMPRHFAAKLDKYMYILPYKEFFGGVSGLTVEQFRKINGFPNAFWGWGGEDDDLWNRVHYAGYNVTRPEGDLGKYKSIPHHHRGEVQFLGRYKLLRYSKERQYIDGLNNLIYRPKILVDRLYTNISVNLMPELAPIEDY

SEQ ID NO: 1380 - protein, 72 aa, Homo sapiens
MVQARGIMLRENVKTIGHMIRLYTNKNSTLNGTDYPEGNNSSDYLVQTTTYLPENFTYSPYLPCPEKLPYMR

SEQ ID NO: 1381 - protein, 415 aa, Homo sapiens
MQMSYAIRCAFYQLLLAALMLVAMLQLLYLSLLSGLHGQEEQDQYFEFFPPSPRSVDQVKAQLRTALASGGVLDASGDYRVYRGLLKTTMDPNDVILATHASVDNLLHLSGLLERWEGPLSVSVFAATKEEAQLATVLAYALSSHCPDMRARVAMHLVCPSRYEAAVPDPREPGEFALLRSCQEVFDKLARVAQPGINYALGTNVSYPNNLLRNLAREGANYALVIDVDMVPSEGLWRGLREMLDQSNQWGGTALVVPAFEIRRARRMPMNKNELVQLYQVGEVRPFYYGLCTPCQAPTNYSRWVNLPEESLLRPAYVVPWQDPWEPFYVAGGKVPTFDERFRQYGFNRISQACELHVAGFDFEVLNEGFLVHKGFKEALKFHPQKEAENQHNKILYRQFKQELKAKYPNSPRRC

SEQ ID NO: 1382 - protein, 92 aa, Homo sapiens
IDVTFKSTNPYGWPQIVLSVYGPDVFGNDVVRGYGAVHVPFSPGRHKRTIPMFVPESTSKLQKFTSWFMGRRPEYTDPKVVAQGEGREAQPG

SEQ ID NO: 1383 - protein, 133 aa, Homo sapiens
LLMVNGQVESAQFPEYDDLYCKYCFVYGQDWAPTAGLEEGISQITSKSQDVRQALVWNFPIDVTFKSTNPYGWPQIVLSVYGPDVFGNDVVRGYGAVHVPFSPGRHKRTIPMFVPESTSKLQKFTRSASCSTH

SEQ ID NO: 1384 - protein, 135 aa, Homo sapiens
MATASPSVFLLMVNGQVESAQFPEYDDLYCKYCFVYGQDWAPTAGLEEGISQITSKSQDVRQALVWNFPIDVTFKSTNPYGWPQIVLSVYGPDVFGNDVVRGYGAVHVPFSPGRHKRTIPMFVPESTSKLQKFTR

SEQ ID NO: 1385 - protein, 153 aa, Homo sapiens
MATASPSVFLLMVNGQVESAQFPEYDDLYCKYCFVYGQDWAPTAGLEEGISQITSKSQDVRQALVWNFPIDVTFKSTNPYGWPQIVLSVYGPDVFGNDVVRGYGAVHVPFSPGRHKRTIPMFVPESTSKLQKFTSLCLVASSDLQAAPPTEDK

SEQ ID NO: 1386 - protein, 186 aa, Homo sapiens
MATASPSVFLLMVNGQVESAQFPEYDDLYCKYCFVYGQDWAPTAGLEEGISQITSKSQDVRQALVWNFPIDVTFKSTNPYGWPQIVLSVYGPDVFGNDVVRGYGAVHVPFSPGRHKRTIPMFVPESTSKLQKFTSWFMGRRPEYTDPKVVAQGEGREAITAPRKAVFSVHGLTSPRALALVHIKGT

SEQ ID NO: 1387 - protein, 161 aa, Homo sapiens
MATASPSVFLLMVNGQVESAQFPEYDDLYCKYCFVYGQDWAPTAGLEEGISQITSKSQDVRQALVWNFPIDVTFKSTNPYGWPQIVLSVYGPDVFGNDVVRGYGAVHVPFSPGRHKRTIPMFVPESTSKLQKFTSWFMGRRPEYTDPKVVAQGEGREAQPG

SEQ ID NO: 1388 - protein, 187 aa, Homo sapiens
MATASPSVFLLMVNGQVESAQFPEYDDLYCKYCFVYGQDWAPTAGLEEGISQITSKSQDVRQALVWNFPIDVTFKSTNPYGWPQIVLSVYGPDVFGNDVVRGYGAVHVPFSPGRHKRTIPMFVPESTSKLQKFTSWFMGRRPEYTDPKVVAQGEGREDENAEAEIPRSTWVSLCPSPAWLMLPFCPQ

SEQ ID NO: 1389 - protein, 183 aa, Homo sapiens
MATASPSVFLLMVNGQVESAQFPEYDDLYCKYCFVYGQDWAPTAGLEEGISQITSKSQDVRQALVWNFPIDVTFKSTNPYGWPQIVLSVYGPDVFGNDVVRGYGAVHVPFSPGRHKRTIPMFVPESTSKLQKFTSWFMGRRPEYTDPKVVAQGEGREGKAPSPLLPPSPIQVTAWEWVGPGLG

SEQ ID NO: 1390 - protein, 204 aa, Homo sapiens
MATASPSVFLLMVNGQVESAQFPEYDDLYCKYCFVYGQDWAPTAGLEEGISQITSKSQDVRQALVWNFPIDVTFKSTNPYGWPQIVLSVYGPDVFGNDVVRGYGAVHVPFSPGRHKRTIPMFVPESTSKLQKFTSWFMGRRPEYTDPKVVAQGEGREVTRVRSQGFVTLLFNVVTKDMRKLGYDTGPSDTQGVLGPSPPQSFPQ

SEQ ID NO: 1391 - protein, 125 aa, Homo sapiens
MATASPSVFLLMVNGQVESAQFPEYDDLYCKYCFVYGQDWAPTAGLEEGISQITSKSQDVRQALVWNFPIDVTFKSTNPYGYRAQRVWTRCVRERCGSRLWGRARALLTWPAQKDHPHVCPRIYV

SEQ ID NO: 1392 - protein, 19 aa, Homo sapiens
MMTSTASTALCTARTGPPQ

SEQ ID NO: 1393 - protein, 106 aa, Homo sapiens
MMTSTASTALCTARTGPPQRVWRRGSHRSHPRAKMCGKHWCGTSPLMSPLKAPTPTAGHRSCSACMDQMCSGTMWFEAMGPCTCPSHLAGTKGPSPCLSQNLRLNC

SEQ ID NO: 1394 - protein, 133 aa, Homo sapiens
MMTSTASTALCTARTGPPQRVWRRGSHRSHPRAKMCGKHWCGTSPLMSPLKAPTPTAGHRSCSACMDQMCSGTMWFEAMGPCTCPSHLAGTKGPSPCLSQNLRLNCRSLQAGSWGGGPSTQTPRWWLRVKAGK

SEQ ID NO: 1395 - protein, 147 aa, Homo sapiens
MMTSTASTALCTARTGPPQRVWRRGSHRSHPRAKMCGKHWCGTSPLMSPLKAPTPTAGHRSCSACMDQMCSGTMWFEAMGPCTCPSHLAGTKGPSPCLSQNLRLNCRSLQAGSWGGGPSTQTPRWWLRVKAGKPPSGLSVKDSSVSR

SEQ ID NO: 1396 - protein, 153 aa, Homo sapiens
MMTSTASTALCTARTGPPQRVWRRGSHRSHPRAKMCGKHWCGTSPLMSPLKAPTPTAGHRSCSACMDQMCSGTMWFEAMGPCTCPSHLAGTKGPSPCLSQNLRLNCRSLQAGSWGGGPSTQTPRWWLRVKAGKVKLPPLSYPHPPYRLQPGSG

SEQ ID NO: 1397 - protein, 213 aa, Homo sapiens
MMTSTASTALCTARTGPPQRVWRRGSHRSHPRAKMCGKHWCGTSPLMSPLKAPTPTAGHRSCSACMDQMCSGTMWFEAMGPCTCPSHLAGTKGPSPCLSQNLRLNCRSLQAGSWGGGPSTQTPRWWLRVKAGKVKLPPLSYPHPPYRLQPGSGWAQGWGECRGPARHIGASPQMFPDEGLVGAQRVCHVCLSRQPLYLPVRGLGQALLSPFYR

SEQ ID NO: 1398 - protein, 112 aa, Homo sapiens
SNRARPRWVPPAPPDLPWRPRVLASFYSWSTGRWRAPSFQSMMTSTASTALCTARTGPPQRVWRRGSHRSHPRAKMCGKHWCGTSPLMSPLKAPTPTAAVQLAFWKFRVHQG

SEQ ID NO: 1399 - protein, 396 aa, Homo sapiens
MGALARALLLPLLAQWLLRAAPELAPAPFTLPLRVAAATNRVVAPTPGPGTPAERHADGLALALEPALASPAGAANFLAMVDNLQGDSGRGYYLEMLIGTPPQKLQILVDTGSSNFAVAGTPHSYIDTYFDTERSSTYRSKGFDVTVKYTQGSWTGFVGEDLVTIPKGFNTSFLVNIATIFESENFFLPGIKWNGILGLAYATLAKPSSSLETFFDSLVTQANIPNVFSMQMCGAGLPVAGSGTNGGSLVLGGIEPSLYKGDIWYTPIKEEWYYQIEILKLEIGGQSLNLDCREYNADKAIVDSGTTLLRLPQKVFDAVVEAVARASLIPEFSDGFWTGSQLACWTNSETPWSYFPKISIYLRDENSSRSFRITILPQKLQVLQCLKFPGLSQQRM

SEQ ID NO: 1400 - protein, 518 aa, Homo sapiens
MGALARALLLPLLAQWLLRAAPELAPAPFTLPLRVAAATNRVVAPTPGPGTPAERHADGLALALEPALASPAGAANFLAMVDNLQGDSGRGYYLEMLIGTPPQKLQILVDTGSSNFAVAGTPHSYIDTYFDTERSSTYRSKGFDVTVKYTQGSWTGFVGEDLVTIPKGFNTSFLVNIATIFESENFFLPGIKWNGILGLAYATLAKPSSSLETFFDSLVTQANIPNVFSMQMCGAGLPVAGSGTNGGSLVLGGIEPSLYKGDIWYTPIKEEWYYQIEILKLEIGGQSLNLDCREYNADKAIVDSGTTLLRLPQKVFDAVVEAVARASLIPEFSDGFWTGSQLACWTNSETPWSYFPKISIYLRDENSSRSFRITILPQLYIQPMMGAGLNYECYRFGISPSTNALVIGATVMEGFYVIFDRAQKRVGFAASPCAEIAGAAVSEISGPFSTEDVASNCVPAQSLSEPILWIVSYALMSVCGAILLVLIVLLLLPFRCQRRPRDPEVVNDESSLVRHRWK

SEQ ID NO: 1401 - protein, 468 aa, Homo sapiens
MGALARALLLPLLAQWLLRAAPELAPAPFTLPLRVAAATNRVVAPTPGPGTPAERHADGLALALEPALASPAGAANFLAMVDNLQGDSGRGYYLEMLIGTPPQKLQILVDTGSSNFAVAGTPHSYIDTYFDTERSSTYRSKGFDVTVKYTQGSWTGFVGEDLVTIPKGFNTSFLVNIATIFESENFFLPGIKWNGILGLAYATLAKPSSSLETFFDSLVTQANIPNVFSMQMCGAGLPVAGSGTNGGSLVLGGIEPSLYKGDIWYTPIKEEWYYQIEILKLEIGGQSLNLDCREYNADKAIVDSGTTLLRLPQKVFDAVVEAVARASLLYIQPMMGAGLNYECYRFGISPSTNALVIGATVMEGFYVIFDRAQKRVGFAASPCAEIAGAAVSEISGPFSTEDVASNCVPAQSLSEPILWIVSYALMSVCGAILLVLIVLLLLPFRCQRRPRDPEVVNDESSLVRHRWK

SEQ ID NO: 1402 - protein, 43 aa, Homo sapiens
MAAGAVFLALSAQLLQARLMKEESPVVSWRLEPEDGTALCFIF

SEQ ID NO: 1403 - protein, 628 aa, Homo sapiens
MEPPDAPAQARGAPRLLLLAVLLAAHPDAQAEVRLSVPPLVEVMRGKSVILDCTPTGTHDHYMLEWFLTDRSGARPRLASAEMQGSELQVTMHDTRGRSPPYQLDSQGRLVLAEAQVGDERDYVCVVRAGAAGTAEATARLNVFAKPEATEVSPNKGTLSVMEDSAQEIATCNSRNGNPAPKITWYRNGQRLEVPVEMNPEGYMTSRTVREASGLLSLTSTLYLRLRKDDRDASFHCAAHYSLPEGRHGRLDSPTFHLTLHYPTEHVQFWVGSPSTPAGWVREGDTVQLLCRGDGSPSPEYTLFRLQDEQEEVLNVNLEGNLTLEGVTRGQSGTYGCRVEDYDAADDVQLSKTLELRVAYLDPLELSEGKVLSLPLNSSAVVNCSVHGLPTPALRWTKDSTPLGDGPMLSLSSITFDSNGTYVCEASLPTVPVLSRTQNFTLLVQGSPELKTAEIEPKADGSWREGDEVTLICSARGHPDPKLSWSQLGGSPAEPIPGRQGWVSSSLTLKVTSALSRDGISCEASNPHGNKRHVFHFGTVSPQTSQAGVAVMAVAVSVGLLLLVVAVFYCVRRKGGPCCRQRREKGAPPPGEPGLSHSGSEQPEQTGLLMGGASGGARGGSGGFGDEC

SEQ ID NO: 1404 - protein, 588 aa, Homo sapiens
MEPPDAPAQARGAPRLLLLAVLLAAHPDAQAEVRLSVPPLVEVMRGKSVILDCTPTGTHDHYMLEWFLTDRSGARPRLASAEMQGSELQVTMHDTRGRSPPYQLDSQGRLVLAEAQVGDERDYVCVVRAGAAGTAEATARLNVFAKPEATEVSPNKGTLSVMEDSAQEIATCNSRNGNPAPKITWYRNGQRLEVPVEMNPEGYMTSRTVREASGLLSLTSTLYLRLRKDDRDASFHCAAHYSLPEGRHGRLDSPTFHLTLHYPTEHVQFWVGSPSTPAGWVREGDTVQLLCRGDGSPSPEYTLFRLQDEQEEVLNVNLEGNLTLEGVTRGQSGTYGCRVEDYDAADDVQLSKTLELRVAYLDPLELSEGKVLSLPLNSSAVVNCSVHGLPTPALRWTKDSTPLGDGPMLSLSSITFDSNGTYVCEASLPTVPVLSRTQNFTLLVQGSPELKTAEIEPKADGSWREGDEVTLICSARGHPDPKLSWSQLGGSPAEPIPGRQGWVSSSLTLKVTSALSRDGISCEASNPHGNKRHVFHFGTVSPQTSQAGVAVMAVAVSVGLLLLVVAVFYCVRRKGGPCCRQRREKGAP

SEQ ID NO: 1405 - protein, 286 aa, Homo sapiens
MEPPDAPAQARGAPRLLLLAVLLAAHPDAQAEVRLSVPPLVEVMRGKSVILDCTPTGTHDHYMLEWFLVTMHDTRGRSPPYQLDSQGRLVLAEAQVGDERDYVCVVRAGAAGTAEATARLNVFAKPEATEVSPNKGTLSVMEDSAQEIATCNSRNGNPAPKITWYRNGQRLEVPVEMNPEGYMTSRTVREASGLLSLTSTLYLRLRKDDRDASFHCAAHYSLPEGRHGRLDSPTFHLTLHYPTEHVQFWVGSPSTPAGWVREGDTVQLLCRGDGSPSPEYTLFRLQ

SEQ ID NO: 1406 - protein, 61 aa, Homo sapiens
  VARIANT 1: note = misc_feature - Xaa can be any naturally occurring amino acid
XGYMTSRTVREASGLLSLTSTLYLRLRKDDRDASFHCAAHYSLPEGRHGRLDSPTFHLTLH

SEQ ID NO: 1407 - protein, 145 aa, Homo sapiens
MAQLFLPLLAALVLAQAPAALADVLEGDSSEDRAFRVRIAGDAPLQGVLGGALTIPCHVHYLRPPPSRRAVLGSPRVKWTFLSRGREAEVLVARGVRVKVNEAYRFRVALPAYPASLTDVSLALSELRPNDSGIYRCEVQHGIDD

SEQ ID NO: 1408 - protein, 196 aa, Homo sapiens
MAQLFLPLLAALVLAQAPAALADVLEGDSSEDRAFRVRIAGDAPLQGVLGGALTIPCHVHYLRPPPSRRAVLGSPRVKWTFLSRGREAEVLVARGVRVKVNEAYRFRVALPAYPASLTDVSLALSELRPNDSGIYRCEVQHGIDDSSDAVEVKVKGIPSRPHERPVTETWMASPGSGTMVWWTRMTSMMCTVMLKT

SEQ ID NO: 1409 - protein, 213 aa, Homo sapiens
MAQLFLPLLAALVLAQAPAALADVLEGDSSEDRAFRVRIAGDAPLQGVLGGALTIPCHVHYLRPPPSRRAVLGSPRVKWTFLSRGREAEVLVARGVRVKVNEAYRFRVALPAYPASLTDVSLALSELRPNDSGIYRCEVQHGIDDSSDAVEVKVKGVVFLYREGSARYAFSFSGAQEACARIGAHIATPEQLYAAYLGGYEQCDAGWLSDQTV

SEQ ID NO: 1410 - protein, 911 aa, Homo sapiens
MAQLFLPLLAALVLAQAPAALADVLEGDSSEDRAFRVRIAGDAPLQGVLGGALTIPCHVHYLRPPPSRRAVLGSPRVKWTFLSRGREAEVLVARGVRVKVNEAYRFRVALPAYPASLTDVSLALSELRPNDSGIYRCEVQHGIDDSSDAVEVKVKGVVFLYREGSARYAFSFSGAQEACARIGAHIATPEQLYAAYLGGYEQCDAGWLSDQTVRYPIQTPREACYGDMDGFPGVRNYGVVDPDDLYDVYCYAEDLNGELFLGDPPEKLTLEEARAYCQERGAEIATTGQLYAAWDGGLDHCSPGWLADGSVRYPIVTPSQRCGGGLPGVKTLFLFPNQTGFPNKHSRFNVYCFRDSAQPSAIPEASNPASNPASDGLEAIVTVTETLEELQLPQEATESESRGAIYSIPIMEDGGGGSSTPEDPAEAPRTLLEFETQSMVPPTGFSEEEGKALEEEEKYEDEEEKEEEEEEEEVEDEALWAWPSELSSPGPEASLPTEPAAQEESLSQAPARAVLQPGASPLPDGESEASRPPRVHGPPTETLPTPRERNLASPSPSTLVEAREVGEATGGPELSGVPRGESEETGSSEGAPSLLPATRAPEGTRELEAPSEDNSGRTAPAGTSVQAQPVLPTDSASRGGVAVVPASGDCVPSPCHNGGTCLEEEEGVRCLCLPGYGGDLCDVGLRFCNPGWDAFQGACYKHFSTRRSWEEAETQCRMYGAHLASISTPEEQDFINNRYREYQWIGLNDRTIEGDFLWSDGVPLLYENWNPGQPDSYFLSGENCVVMVWHDQGQWSDVPCNYHLSYTCKMGLVSCGPPPELPLAQVFGRPRLRYEVDTVLRYRCREGLAQRNLPLIRCQENGRWEAPQISCVPRRPARALHPEEDPEGRQGRLLGRWKALLIPPSSPMPGP

SEQ ID NO: 1411 - protein, 671 aa, Homo sapiens
MAQLFLPLLAALVLAQAPAALADVLEGDSSEDRAFRVRIAGDAPLQGVLGGALTIPCHVHYLRPPPSRRAVLGSPRVKWTFLSRGREAEVLVARGVRVKVNEAYRFRVALPAYPASLTDVSLALSELRPNDSGIYRCEVQHGIDDSSDAVEVKVKGVVFLYREGSARYAFSFSGAQEACARIGAHIATPEQLYAAYLGGYEQCDAGWLSDQTVRYPIQTPREACYGDMDGFPGVRNYGVVDPDDLYDVYCYAEDLNGELFLGDPPEKLTLEEARAYCQERGAEIATTGQLYAAWDGGLDHCSPGWLADGSVRYPIVTPSQRCGGGLPGVKTLFLFPNQTGFPNKHSRFNVYCFRDSAQPSAIPEASNPASNPASDGLEAIVTVTETLEELQLPQEATESESRGAIYSIPIMEDGGGGSSTPEDPAEAPRTLLEFETQSMVPPTGFSEEEGKALEEEEKYEDEEEKEEEEEEEEVEDEALWAWPSELSSPGPEASLPTEPAAQEESLSQAPARAVLQPGASPLPDGESEASRPPRVHGPPTETLPTPRERNLASPSPSTLVEAREVGEATGGPELSGVPRGESEETGSSEGAPSLLPATRAPEGTRELEAPSEDNSGRTAPAGTSVQAQPVLPTDSASRGGVAVVPASGNSAQGSTALSILLLFFPLQLWVT

SEQ ID NO: 1412 - protein, 231 aa, Homo sapiens
MAQLFLPLLAALVLAQAPAALADVLEGDSSGIYRCEVQHGIDDSSDAVEVKVKGVVFLYREGSARYAFSFSGAQEACARIGAHIATPEQLYAAYLGGYEQCDAGWLSDQTVRYPIQTPREACYGDMDGFPGVRNYGVVDPDDLYDVYCYAEDLNGELFLGDPPEKLTLEEARAYCQERGAEIATTGQLYAAWDGGLDHCSPGWLADGSVRYPIVTPSQRCGGGLPGVKTLF

SEQ ID NO: 1413 - protein, 26 aa, Homo sapiens
  VARIANT 1: note = misc_feature - Xaa can be any naturally occurring amino acid
XHGIDDSSDAVEVKVKGGGHSTHNLT

SEQ ID NO: 1414 - protein, 294 aa, Homo sapiens
IATFWNKAFLTIIILLIVLFLDAVREVRKYSSVHTIEKSSTSRPDAYEHTQMKLFRSQRNLYISGFSLFFWLVLRRLVTLITQLAKELSNKGVLKTQAENTNKAAKKFMEENEKLKRILKSHGKDEECVLEAENKKLVEDQEKLKTELRKTSDALSKAQNDVMEMKMQSERLSKEYDQLLKEHSELQKQREILPHRRGESTVTTEAEIGVMEPQQRNADSHQKLEEAKNRFFPRASSSRSMALQIPIKLILDFLASRTMGINLLFQAIKFVIICYCCHSKLIQEHAGQICNGLN

SEQ ID NO: 1415 - protein, 147 aa, Homo sapiens
MKLFRSQRNLYISGFSLFFWLVLRRLVTLITQLAKELSNKGVLKTQAENTNKAAKKFMEENEKLKRILKSHGKDEECVLEAENKKLVEDQEKLKTELRKTSDALSKAQNDVMEMKMQSERLSKEYDQLLKEHSELQDRLERGNKKRL

SEQ ID NO: 1416 - protein, 64 aa, Homo sapiens
MTLQWAAVATFLYAEIGLILIFCLPFIPPQRWQKIFSFNVWGKIATFWNKAFLTIIILLIVLFL

SEQ ID NO: 1417 - protein, 133 aa, Homo sapiens
MTLQWAAVATFLYAEIGLILIFCLPFIPPQRWQKIFSFNVWGKIATFWNKAFLTIIILLIVLFLDAVREVRKYSSVHTIEKSSTSRPDAYEHTQMKLFRSQRNLYISGFSLFFWLVLRRLVTLITQLAKELSN

SEQ ID NO: 1418 - protein, 171 aa, Homo sapiens
MTLQWAAVATFLYAEIGLILIFCLPFIPPQRWQKIFSFNVWGKIATFWNKAFLTIIILLIVLFLDAVREVRKYSSVHTIEKSSTSRPDAYEHTQMKLFRSQRNLYISGFSLFFWLVLRRLVTLITQLAKELSNKGVLKTQAENTNKAAKKFMEENEKLKRFLLAKVHCRKL

SEQ ID NO: 1419 - protein, 196 aa, Homo sapiens
MTLQWAAVATFLYAEIGLILIFCLPFIPPQRWQKIFSFNVWGKIATFWNKAFLTIIILLIVLFLDAVREVRKYSSVHTIEKSSTSRPDAYEHTQMKLFRSQRNLYISGFSLFFWLVLRRLVTLITQLAKELSNKGVLKTQAENTNKAAKKFMEENEKLKRILKSHGKDEECVLEAENKKLVEDQEKLKTELRKTSD

SEQ ID NO: 1420 - protein, 230 aa, Homo sapiens
MTLQWAAVATFLYAEIGLILIFCLPFIPPQRWQKIFSFNVWGKIATFWNKAFLTIIILLIVLFLDAVREVRKYSSVHTIEKSSTSRPDAYEHTQMKLFRSQRNLYISGFSLFFWLVLRRLVTLITQLAKELSNKGVLKTQAENTNKAAKKFMEENEKLKRILKSHGKDEECVLEAENKKLVEDQEKLKTELRKTSDALSKAQNDVMEMKMQSERLSKEYDQLLKEHSELQ

SEQ ID NO: 1421 - protein, 241 aa, Homo sapiens
MTLQWAAVATFLYAEIGLILIFCLPFIPPQRWQKIFSFNVWGKIATFWNKAFLTIIILLIVLFLDAVREVRKYSSVHTIEKSSTSRPDAYEHTQMKLFRSQRNLYISGFSLFFWLVLRRLVTLITQLAKELSNKGVLKTQAENTNKAAKKFMEENEKLKRILKSHGKDEECVLEAENKKLVEDQEKLKTELRKTSDALSKAQNDVMEMKMQSERLSKEYDQLLKEHSELQDRLERGNKKRL

SEQ ID NO: 1422 - protein, 241 aa, Homo sapiens; identical to SEQ ID NO: 1421

SEQ ID NO: 1423 - protein, 348 aa, Homo sapiens
MTLQWAAVATFLYAEIGLILIFCLPFIPPQRWQKIFSFNVWGKIATFWNKAFLTIIILLIVLFLDAVREVRKYSSVHTIEKSSTSRPDAYEHTQMKLFRSQRNLYISGFSLFFWLVLRRLVTLITQLAKELSNKGVLKTQAENTNKAAKKFMEENEKLKRILKSHGKDEECVLEAENKKLVEDQEKLKTELRKTSDALSKAQNDVMEMKMQSERLSKEYDQLLKEHSELQHSSFGEFLSKRSHKNGSIGKQTGSRKGSFRKRQQEKTVNFIKDTCNILCQNDNFVMLASRKFKFRKMHYDRFVIFLMPHIGCIVMALSKYLMMFQIYCKVCIPALKKNISMLNTIFTY

SEQ ID NO: 1424 - protein, 348 aa, Homo sapiens; identical to SEQ ID NO: 1423

SEQ ID NO: 1425 - protein, 66 aa, Homo sapiens
MTLQWAAVATFLYAEIGLILIFCLPFIPPQRWQKIFSFNVWGKIATFWNKAFLTIIILLIVLFLEF

SEQ ID NO: 1426 - protein, 163 aa, Homo sapiens
  VARIANT 1: note = misc_feature - Xaa can be any naturally occurring amino acid
XDAYEHTQMKLFRSQRNLYISGFSLFFWLVLRRLVTLITQLAKELSNKGVLKTQAENTNKAAKKFMEENEKLKRILKSHGKDEECVLEAENKKLVEDQEKLKTELRKTSDALSKAQNDVMEMKMQSERLSKEYDQLLKEHSELQKSHSQPGAAAFLVKEVESF

SEQ ID NO: 1427 - protein, 868 aa, Homo sapiens
MENVLAKALYDNVAESPDELSFRKGDIMTVLEQDTQGLDGWWLCSLHGRQGIVPGNRLKILVGMYDKKPAGPGPGPPATPAQPQPGLHAPAPPASQYTPMLPNTYQPQPDSVYLVPTPSKAQQGLYQVPGPSPQFQSPPAKQTSTFSKQTPHHPFPSPATDLYQVPPGPGGPAQDIYQVPPSAGMGHDIYQVPPSMDTRSWEGTKPPAKVVVPTRVGQGYVYEAAQPEQDEYDIPRHLLAPGPQDIYDVPPVRGLLPSQYGQEVYDTPPMAVKGPNGRDPLLEVYDVPPSVEKGLPPSNHHAVYDVPPSVSKDVPDGPLLREETYDVPPAFAKAKPFDPARTPLVLAAPPPDSPPAEDVYDVPPPAPDLYDVPPGLRRPGPGTLYDVPRERVLPPEVADGGVVDSGVYAVPPPAEREAPAEGKRLSASSTGSTRSSQSASSLEVAGPGREPLELEVAVEALARLQQGVSATVAHLLDLAGSAGATGSWRSPSEPQEPLVQDLQAAVAAVQSAVHELLEFARSAVGNAAHTSDRALHAKLSRQLQKMEDVHQTLVAHGQALDAGRGGSGATLEDLDRLVACSRAVPEDAKQLASFLHGNASLLFRRTKATAPGPEGGGTLHPNPTDKTSSIQSRPLPSPPKFTSQDSPDGQYENSEGGWMEDYDYVHLQGKEEFEKTQKELLEKGSITRQGKSQLELQQLKQFERLEQEVSRPIDHDLANWTPAQPLAPGRTGGLGPSDRQLLLFYLEQCEANLTTLTNAVDAFFTAVATNQPPKIFVAHSKFVILSAHKLVFIGDTLSRQAKAADVRSQVTHYSNLLCDLLRGIVATTKAAALQYPSPSAAQDMVERVKELGHSTQQFRRVLGQLAAA

SEQ ID NO: 1428 - protein, 888 aa, Homo sapiens
MHCPGEAPLAAPRPTPKDPCLRNVLAKALYDNVAESPDELSFRKGDIMTVLEQDTQGLDGWWLCSLHGRQGIVPGNRLKILVGMYDKKPAGPGPGPPATPAQPQPGLHAPAPPASQYTPMLPNTYQPQPDSVYLVPTPSKAQQGLYQVPGPSPQFQSPPAKQTSTFSKQTPHHPFPSPATDLYQVPPGPGGPAQDIYQVPPSAGMGHDIYQVPPSMDTRSWEGTKPPAKVVVPTRVGQGYVYEAAQPEQDEYDIPRHLLAPGPQDIYDVPPVRGLLPSQYGQEVYDTPPMAVKGPNGRDPLLEVYDVPPSVEKGLPPSNHHAVYDVPPSVSKDVPDGPLLREETYDVPPAFAKAKPFDPARTPLVLAAPPPDSPPAEDVYDVPPPAPDLYDVPPGLRRPGPGTLYDVPRERVLPPEVADGGVVDSGVYAVPPPAEREAPAEGKRLSASSTGSTRSSQSASSLEVAGPGREPLELEVAVEALARLQQGVSATVAHLLDLAGSAGATGSWRSPSEPQEPLVQDLQAAVAAVQSAVHELLEFARSAVGNAAHTSDRALHAKLSRQLQKMEDVHQTLVAHGQALDAGRGGSGATLEDLDRLVACSRAVPEDAKQLASFLHGNASLLFRRTKATAPGPEGGGTLHPNPTDKTSSIQSRPLPSPPKFTSQDSPDGQYENSEGGWMEDYDYVHLQGKEEFEKTQKELLEKGSITRQGKSQLELQQLKQFERLEQEVSRPIDHDLANWTPAQPLAPGRTGGLGPSDRQLLLFYLEQCEANLTTLTNAVDAFFTAVATNQPPKIFVAHSKFVILSAHKLVFIGDTLSRQAKAADVRSQVTHYSNLLCDLLRGIVATTKAAALQYPSPSAAQDMVERVKELGHSTQQFRRVLGQLAAA

SEQ ID NO: 1429 - protein, 888 aa, Homo sapiens
MLTHRPQEAEQRGRTPGPSFEWNVLAKALYDNVAESPDELSFRKGDIMTVLEQDTQGLDGWWLCSLHGRQGIVPGNRLKILVGMYDKKPAGPGPGPPATPAQPQPGLHAPAPPASQYTPMLPNTYQPQPDSVYLVPTPSKAQQGLYQVPGPSPQFQSPPAKQTSTFSKQTPHHPFPSPATDLYQVPPGPGGPAQDIYQVPPSAGMGHDIYQVPPSMDTRSWEGTKPPAKVVVPTRVGQGYVYEAAQPEQDEYDIPRHLLAPGPQDIYDVPPVRGLLPSQYGQEVYDTPPMAVKGPNGRDPLLEVYDVPPSVEKGLPPSNHHAVYDVPPSVSKDVPDGPLLREETYDVPPAFAKAKPFDPARTPLVLAAPPPDSPPAEDVYDVPPPAPDLYDVPPGLRRPGPGTLYDVPRERVLPPEVADGGVVDSGVYAVPPPAEREAPAEGKRLSASSTGSTRSSQSASSLEVAGPGREPLELEVAVEALARLQQGVSATVAHLLDLAGSAGATGSWRSPSEPQEPLVQDLQAAVAAVQSAVHELLEFARSAVGNAAHTSDRALHAKLSRQLQKMEDVHQTLVAHGQALDAGRGGSGATLEDLDRLVACSRAVPEDAKQLASFLHGNASLLFRRTKATAPGPEGGGTLHPNPTDKTSSIQSRPLPSPPKFTSQDSPDGQYENSEGGWMEDYDYVHLQGKEEFEKTQKELLEKGSITRQGKSQLELQQLKQFERLEQEVSRPIDHDLANWTPAQPLAPGRTGGLGPSDRQLLLFYLEQCEANLTTLTNAVDAFFTAVATNQPPKIFVAHSKFVILSAHKLVFIGDTLSRQAKAADVRSQVTHYSNLLCDLLRGIVATTKAAALQYPSPSAAQDMVERVKELGHSTQQFRRVLGQLAAA

SEQ ID NO: 1430 - protein, 870 aa, Homo sapiens
MNHLNVLAKALYDNVAESPDELSFRKGDIMTVLEQDTQGLDGWWLCSLHGRQGIVPGNRLKILVGMYDKKPAGPGPGPPATPAQPQPGLHAPAPPASQYTPMLPNTYQPQPDSVYLVPTPSKAQQGLYQVPGPSPQFQSPPAKQTSTFSKQTPHHPFPSPATDLYQVPPGPGGPAQDIYQVPPSAGMGHDIYQVPPSMDTRSWEGTKPPAKVVVPTRVGQGYVYEAAQPEQDEYDIPRHLLAPGPQDIYDVPPVRGLLPSQYGQEVYDTPPMAVKGPNGRDPLLEVYDVPPSVEKGLPPSNHHAVYDVPPSVSKDVPDGPLLREETYDVPPAFAKAKPFDPARTPLVLAAPPPDSPPAEDVYDVPPPAPDLYDVPPGLRRPGPGTLYDVPRERVLPPEVADGGVVDSGVYAVPPPAEREAPAEGKRLSASSTGSTRSSQSASSLEVAGPGREPLELEVAVEALARLQQGVSATVAHLLDLAGSAGATGSWRSPSEPQEPLVQDLQAAVAAVQSAVHELLEFARSAVGNAAHTSDRALHAKLSRQLQKMEDVHQTLVAHGQALDAGRGGSGATLEDLDRLVACSRAVPEDAKQLASFLHGNASLLFRRTKATAPGPEGGGTLHPNPTDKTSSIQSRPLPSPPKFTSQDSPDGQYENSEGGWMEDYDYVHLQGKEEFEKTQKELLEKGSITRQGKSQLELQQLKQFERLEQEVSRPIDHDLANWTPAQPLAPGRTGGLGPSDRQLLLFYLEQCEANLTTLTNAVDAFFTAVATNQPPKIFVAHSKFVILSAHKLVFIGDTLSRQAKAADVRSQVTHYSNLLCDLLRGIVATTKAAALQYPSPSAAQDMVERVKELGHSTQQFRRVLGQLAAA

SEQ ID NO: 1431 - protein, 888 aa, Homo sapiens
MNHLNVLAKALYDNVAESPDELSFRKGDIMTVLEQDTQGLDGWWLCSLHGRQGIVPGNRLKILVGMYDKKPAGPGPGPPATPAQPQPGLHAPAPPASQYTPMLPNTYQPQPDSVYLVPTPSKAQQGLYQVPGPSPQFQSPPAKQTSTFSKQTPHHPFPSPATDLYQVPPGPGGPAQDIYQVPPSAGMGHDIYQVPPSMDTRSWEGTKPPAKVVVPTRVGQGYVYEAAQPEQDEYDIPRHLLAPGPQDIYDVPPVRGLLPSQYGQEVYDTPPMAVKGPNGRDPLLEVYDVPPSVEKGLPPSNHHAVSKCQGNARARLRLWGVWVYDVPPSVSKDVPDGPLLREETYDVPPAFAKAKPFDPARTPLVLAAPPPDSPPAEDVYDVPPPAPDLYDVPPGLRRPGPGTLYDVPRERVLPPEVADGGVVDSGVYAVPPPAEREAPAEGKRLSASSTGSTRSSQSASSLEVAGPGREPLELEVAVEALARLQQGVSATVAHLLDLAGSAGATGSWRSPSEPQEPLVQDLQAAVAAVQSAVHELLEFARSAVGNAAHTSDRALHAKLSRQLQKMEDVHQTLVAHGQALDAGRGGSGATLEDLDRLVACSRAVPEDAKQLASFLHGNASLLFRRTKATAPGPEGGGTLHPNPTDKTSSIQSRPLPSPPKFTSQDSPDGQYENSEGGWMEDYDYVHLQGKEEFEKTQKELLEKGSITRQGKSQLELQQLKQFERLEQEVSRPIDHDLANWTPAQPLAPGRTGGLGPSDRQLLLFYLEQCEANLTTLTNAVDAFFTAVATNQPPKIFVAHSKFVILSAHKLVFIGDTLSRQAKAADVRSQVTHYSNLLCDLLRGIVATTKAAALQYPSPSAAQDMVERVKELGHSTQQFRRVLGQLAAA

SEQ ID NO: 1432 - protein, 916 aa, Homo sapiens
MPAKPFLSSVLLSWKVLDFSGPGPQGTGQPCSCGHWAEGQGGPPEPAGGPNVLAKALYDNVAESPDELSFRKGDIMTVLEQDTQGLDGWWLCSLHGRQGIVPGNRLKILVGMYDKKPAGPGPGPPATPAQPQPGLHAPAPPASQYTPMLPNTYQPQPDSVYLVPTPSKAQQGLYQVPGPSPQFQSPPAKQTSTFSKQTPHHPFPSPATDLYQVPPGPGGPAQDIYQVPPSAGMGHDIYQVPPSMDTRSWEGTKPPAKVVVPTRVGQGYVYEAAQPEQDEYDIPRHLLAPGPQDIYDVPPVRGLLPSQYGQEVYDTPPMAVKGPNGRDPLLEVYDVPPSVEKGLPPSNHHAVYDVPPSVSKDVPDGPLLREETYDVPPAFAKAKPFDPARTPLVLAAPPPDSPPAEDVYDVPPPAPDLYDVPPGLRRPGPGTLYDVPRERVLPPEVADGGVVDSGVYAVPPPAEREAPAEGKRLSASSTGSTRSSQSASSLEVAGPGREPLELEVAVEALARLQQGVSATVAHLLDLAGSAGATGSWRSPSEPQEPLVQDLQAAVAAVQSAVHELLEFARSAVGNAAHTSDRALHAKLSRQLQKMEDVHQTLVAHGQALDAGRGGSGATLEDLDRLVACSRAVPEDAKQLASFLHGNASLLFRRTKATAPGPEGGGTLHPNPTDKTSSIQSRPLPSPPKFTSQDSPDGQYENSEGGWMEDYDYVHLQGKEEFEKTQKELLEKGSITRQGKSQLELQQLKQFERLEQEVSRPIDHDLANWTPAQPLAPGRTGGLGPSDRQLLLFYLEQCEANLTTLTNAVDAFFTAVATNQPPKIFVAHSKFVILSAHKLVFIGDTLSRQAKAADVRSQVTHYSNLLCDLLRGIVATTKAAALQYPSPSAAQDMVERVKELGHSTQQFRRVLGQLAAA

SEQ ID NO: 1433 - protein, 57 aa, Homo sapiens
MPAKPFLSSVLLSWKVLDFSGPGPQGTGQPCSCGHWAEGQGGPPEPAGGPVSQGSSD

SEQ ID NO: 1434 - protein, 57 aa, Homo sapiens; identical to SEQ ID NO: 1433

SEQ ID NO: 1435 - protein, 722 aa, Homo sapiens
MQGKNVLAKALYDNVAESPDELSFRKGDIMTVLEQDTQGLDGWWLCSLHGRQGIVPGNRLKILVVVPTRVGQGYVYEAAQPEQDEYDIPRHLLAPGPQDIYDVPPVRGLLPSQYGQEVYDTPPMAVKGPNGRDPLLEVYDVPPSVEKGLPPSNHHAVYDVPPSVSKDVPDGPLLREETYDVPPAFAKAKPFDPARTPLVLAAPPPDSPPAEDVYDVPPPAPDLYDVPPGLRRPGPGTLYDVPRERVLPPEVADGGVVDSGVYAVPPPAEREAPAEGKRLSASSTGSTRSSQSASSLEVAGPGREPLELEVAVEALARLQQGVSATVAHLLDLAGSAGATGSWRSPSEPQEPLVQDLQAAVAAVQSAVHELLEFARSAVGNAAHTSDRALHAKLSRQLQKMEDVHQTLVAHGQALDAGRGGSGATLEDLDRLVACSRAVPEDAKQLASFLHGNASLLFRRTKATAPGPEGGGTLHPNPTDKTSSIQSRPLPSPPKFTSQDSPDGQYENSEGGWMEDYDYVHLQGKEEFEKTQKELLEKGSITRQGKSQLELQQLKQFERLEQEVSRPIDHDLANWTPAQPLAPGRTGGLGPSDRQLLLFYLEQCEANLTTLTNAVDAFFTAVATNQPPKIFVAHSKFVILSAHKLVFIGDTLSRQAKAADVRSQVTHYSNLLCDLLRGIVATTKAAALQYPSPSAAQDMVERVKELGHSTQQFRRVLGQLAAA

SEQ ID NO: 1436 - protein, 870 aa, Homo sapiens
MSVPNVLAKALYDNVAESPDELSFRKGDIMTVLEQDTQGLDGWWLCSLHGRQGIVPGNRLKILVGMYDKKPAGPGPGPPATPAQPQPGLHAPAPPASQYTPMLPNTYQPQPDSVYLVPTPSKAQQGLYQVPGPSPQFQSPPAKQTSTFSKQTPHHPFPSPATDLYQVPPGPGGPAQDIYQVPPSAGMGHDIYQVPPSMDTRSWEGTKPPAKVVVPTRVGQGYVYEAAQPEQDEYDIPRHLLAPGPQDIYDVPPVRGLLPSQYGQEVYDTPPMAVKGPNGRDPLLEVYDVPPSVEKGLPPSNHHAVYDVPPSVSKDVPDGPLLREETYDVPPAFAKAKPFDPARTPLVLAAPPPDSPPAEDVYDVPPPAPDLYDVPPGLRRPGPGTLYDVPRERVLPPEVADGGVVDSGVYAVPPPAEREAPAEGKRLSASSTGSTRSSQSASSLEVAGPGREPLELEVAVEALARLQQGVSATVAHLLDLAGSAGATGSWRSPSEPQEPLVQDLQAAVAAVQSAVHELLEFARSAVGNAAHTSDRALHAKLSRQLQKMEDVHQTLVAHGQALDAGRGGSGATLEDLDRLVACSRAVPEDAKQLASFLHGNASLLFRRTKATAPGPEGGGTLHPNPTDKTSSIQSRPLPSPPKFTSQDSPDGQYENSEGGWMEDYDYVHLQGKEEFEKTQKELLEKGSITRQGKSQLELQQLKQFERLEQEVSRPIDHDLANWTPAQPLAPGRTGGLGPSDRQLLLFYLEQCEANLTTLTNAVDAFFTAVATNQPPKIFVAHSKFVILSAHKLVFIGDTLSRQAKAADVRSQVTHYSNLLCDLLRGIVATTKAAALQYPSPSAAQDMVERVKELGHSTQQFRRVLGQLAAA

SEQ ID NO: 1437 - protein, 50 aa, Homo sapiens
MTVLEQDTQGLDGWWLCSLHGRQGIVPGNRLKILVGMYDKKPAGPGPGPP

SEQ ID NO: 1438 - protein, 59 aa, Homo sapiens
MTVLEQDTQGLDGWWLCSLHGRQGIVPGNRLKILVGMYDKKPAGPGPGPPATPAQPQPG

SEQ ID NO: 1439 - protein, 80 aa, Homo sapiens
MTVLEQDTQGLDGWWLCSLHGRQGIVPGNRLKILVGMYDKKPAGPGPGPPATPAQPQPGLHAPAPPASQYTPMLPNTYQP

SEQ ID NO: 1440 - protein, 120 aa, Homo sapiens
MTVLEQDTQGLDGWWLCSLHGRQGIVPGNRLKILVGMYDKKPAGPGPGPPATPAQPQPGLHAPAPPASQYTPMLPNTYQPQPDSVYLVPTPSKAQQGLYQVPGPSPQFQSPPAKQTSTFS

SEQ ID NO: 1441 - protein, 128 aa, Homo sapiens
MTVLEQDTQGLDGWWLCSLHGRQGIVPGNRLKILVGMYDKKPAGPGPGPPATPAQPQPGLHAPAPPASQYTPMLPNTYQPQPDSVYLVPTPSKAQQGLYQVPGPSPQFQSPPAKQTSTFSKQTPHHPF

SEQ ID NO: 1442 - protein, 133 aa, Homo sapiens
MTVLEQDTQGLDGWWLCSLHGRQGIVPGNRLKILVGMYDKKPAGPGPGPPATPAQPQPGLHAPAPPASQYTPMLPNTYQPQPDSVYLVPTPSKAQQGLYQVPGPSPQFQSPPAKQTSTFSKQTPHHPFPSPAT

SEQ ID NO: 1443 - protein, 135 aa, Homo sapiens
MTVLEQDTQGLDGWWLCSLHGRQGIVPGNRLKILVGMYDKKPAGPGPGPPATPAQPQPGLHAPAPPASQYTPMLPNTYQPQPDSVYLVPTPSKAQQGLYQVPGPSPQFQSPPAKQTSTFSKQTPHHPFPSPATDL

SEQ ID NO: 1444 - protein, 238 aa, Homo sapiens
  VARIANT 1: note = misc_feature - Xaa can be any naturally occurring amino acid
XPQFQSPPAKQTSTFSKQTPHHPFPSPATDLYQVPPGPGGPAQDIYQVPPSAGMGHDIYQVPPSMDTRSWEGTKPPAKVVVPTRVGQGYVYEAAQPEQDEYDIPRHLLAPGPQDIYDVPPVRGLLPSQYGQEVYDVPPSVSKDVPDGPLLREETYDVPPAFAKAKPFDPARTPLVLAAPPPDSPPAEDVYDVPPPAPDLYDVPPGLRRPGPGTLYDVPRERVLPPEVADGGVVDSGVY

SEQ ID NO: 1445 - protein, 120 aa, Homo sapiens
AVQFTGWSSSCILHFPEVLHDFHSLQTLPSLLQRIGNPNETQNNSTSWPVFKSTEQKYLTLNTESTRIMTKLRAQQCRFWTSFFPKVLEMTEPICCYCEPGTALAARAAQMKMTGSAYSQ

SEQ ID NO: 1446 - protein, 132 aa, Homo sapiens
AVQFTGWSSSCILHFPEVLHDFHSLQTLPSLLQRIGNPNETQNNSTSWPVFKSTEQKYLTLNTESTRIMTKLRAQQCRFWTSFFPKVLEMTGNIDEAEWEWKAGFHRWNNYMMDWKNQFNDYTSKKESCVGL

SEQ ID NO: 1447 - protein, 602 aa, Homo sapiens
MHSKVTIICIRFLFWFLLLCMLIGKSHTEDDIIIATKNGKVRGMNLTVFGGTVTAFLGIPYAQPPLGRLRFKKPQSLTKWSDIWNATKYANSCCQNIDQSFPGFHGSEMWNPNTDLSEDCLYLNVWIPAPKPKNATVLIWIYGGGFQTGTSSLHVYDGKFLARVERVIVVSMNYRVGALGFLALPGNPEAPGNMGLFDQQLALQWVQKNIAAFGGNPKSVTLFGESAGAASVSLHLLSPGSHSLFTRAILQSGSFNAPWAVTSLYEARNRTLNLAKLTGCSRENETEIIKCLRNKDPQEILLNEAFVVPYGTPLSVNFGPTVDGDFLTDMPDILLELGQFKKTQILVGVNKDEGTAFLVYGAPGFSKDNNSIITRKEFQEGLKIFFPGVSEFGKESILFHYTDWVDDQRPENYREALGDVVGDYNFICPALEFTKKFSEWGNNAFFYYFEHRSSKLPWPEWMGVMHGYEIEFVFGLPLERRDNYTKAEEILSRSIVKRWANFAKYGNPNETQNNSTSWPVFKSTEQKYLTLNTESTRIMTKLRAQQCRFWTSFFPKVLEMTGNIDEAEWEWKAGFHRWNNYMMDWKNQFNDYTSKKESCVGL

SEQ ID NO: 1448 - protein, 525 aa, Homo sapiens
MHSKVTIICIRFLFWFLLLCMLIGKSHTEDDIIIATKNGKVRGMNLTVFGGTVTAFLGIPYAQPPLGRLRFKKPQSLTKWSDIWNATKYANSCCQNIDQSFPGFHGSEMWNPNTDLSEDCLYLNVWIPAPKPKNATVLIWIYGGGFQTGTSSLHVYDGKFLARVERVIVVSMNYRVGALGFLALPGNPEAPGNMGLFDQQLALQWVQKNIAAFGGNPKSVTLFGESAGAASVSLHLLSPGSHSLFTRAILQSGSFNAPWAVTSLYEARNRTLNLAKLTGCSRENETEIIKCLRNKDPQEILLNEAFVVPYGTPLSVNFGPTVDGDFLTDMPDILLELGQFKKTQILVGVNKDEGTAFLVYGAPGFSKDNNSIITRKEFQEGLKIFFPGVSEFGKESILFHYTDWVDDQRPENYREALGDVVGDYNFICPALEFTKKFSEWGNNAFFYYFEHRSSKLPWPEWMGVMHGYEIEFVFGLPLERRDNYTKAEEILSRSIVKRWANFAKYGCSSSTILNYVLETEPVVLI

SEQ ID NO: 1449 - protein, 562 aa, Homo sapiens
MHSKVTIICIRFLFWFLLLCMLIGKSHTEDDIIIATKNGKVRGMNLTVFGGTVTAFLGIPYAQPPLGRLRFKKPQSLTKWSDIWNATKYANSCCQNIDQSFPGFHGSEMWNPNTDLSEDCLYLNVWIPAPKPKNATVLIWIYGGGFQTGTSSLHVYDGKFLARVERVIVVSMNYRVGALGFLALPGNPEAPGNMGLFDQQLALQWVQKNIAAFGGNPKSVTLFGESAGAASVSLHLLSPGSHSLFTRAILQSGSFNAPWAVTSLYEARNRTLNLAKLTGCSRENETEIIKCLRNKDPQEILLNEAFVVPYGTPLSVNFGPTVDGDFLTDMPDILLELGQFKKTQILVGVNKDEGTAFLVYGAPGFSKDNNSIITRKEFQEGLKIFFPGVSEFGKESILFHYTDWVDDQRPENYREALGDVVGDYNFICPALEFTKKFSEWGNNAFFYYFEHRSSKLPWPEWMGVMHGYEIEFVFGLPLERRDNYTKAEEILSRSIVKRWANFAKYGNPNETQNNSTSWPVFKSTEQKYLTLNTESTRIMTKLRAQQCRFWTSFFPKVLEMTG

SEQ ID NO: 1450 - protein, 218 aa, Homo sapiens
MAVVAAAAGWLLRLRAAGAEGHWRRLPGAGLARGFLHPAATVEDAAQRRQVAHFTFQPDPEPREYGQTQKMNLFQSVTSALDNSLAKDPTAVIFGEDVAFGGVFRCTVGLRDKYGKDRVFNTPLCEQGIVGFGIGIAVTGATAIAEIQFADYIFPAFDQIVNEAAKYRYRSGDLFNCGSLTIRSPWGCVGHGALYHSQSPEAFFAHCPGIKIKVISLS

SEQ ID NO: 1451 - protein, 392 aa, Homo sapiens
MAVVAAAAGWLLRLRAAGAEGHWRRLPGAGLARGFLHPAATVEDAAQRRQVAHFTFQPDPEPREYGQTQKMNLFQSVTSALDNSLAKDPTAVIFGEDVAFGGVFRCTVGLRDKYGKDRVFNTPLCEQGIVGFGIGIAVTGATAIAEIQFADYIFPAFDQIVNEAAKYRYRSGDLFNCGSLTIRSPWGCVGHGALYHSQSPEAFFAHCPGIKVVIPRSPFQAKGLLLSCIEDKNPCIFFEPKILYRAAAEEVPIEPYNIPLSQAEVIQEGSDVTLVAWGTQVHVIREVASMAKEKLGVSCEVIDLRTIIPWDVDTICKSVIKTGRLLISHEAPLTGGFASEISSTVQEECFLNLEAPISRVCGYDTPFPHIFEPFYIPDKWKCYDALRKMINY

SEQ ID NO: 1452 - protein, 392 aa, Homo sapiens; identical to SEQ ID NO: 1451

SEQ ID NO: 1453 - protein, 329 aa, Homo sapiens
MCGATSFLHECTRLILVTTQNAEFLQKGLQVHTCFGVYPHASVWHDCASQKKGCAVYLHVSVEFNKLIPENGFIKFHQVRRVMTILFLTMVISYFGCMKAAPMKEANIRGQGGLAYPGVRTHGTLESVNGPKAGSRGLTSLADTFEHVIEELLDEDQKVRPNEENNKDADLYTSRVMLSSQVPLEPPLLFLLEEYKNYLDAANMSMRVRRHSDPARRGELSVCDSISEWVTAADKKTAVDMSGGTVTVLEKVPVSKGQLKQYFYETKCNPMGYTKEGCRGIDKRHWNSQCRTTQSYVRALTMDSKKRIGWRFIRIDTSCVCTLTIKRGR

SEQ ID NO: 1454 - protein, 77 aa, Homo sapiens
MCGATSFLHECTRLILVTTQNAEFLQKGLQVHTCFGVYPHASVWHDCASQKKGCAVYLHVSVEFNKLIPENGFIKGW

SEQ ID NO: 1455 - protein, 255 aa, Homo sapiens
MFHQVRRVMTILFLTMVISYFGCMKAAPMKEANIRGQGGLAYPGVRTHGTLESVNGPKAGSRGLTSLADTFEHVIEELLDEDQKVRPNEENNKDADLYTSRVMLSSQVPLEPPLLFLLEEYKNYLDAANMSMRVRRHSDPARRGELSVCDSISEWVTAADKKTAVDMSGGTVTVLEKVPVSKGQLKQYFYETKCNPMGYTKEGCRGIDKRHWNSQCRTTQSYVRALTMDSKKRIGWRFIRIDTSCVCTLTIKRGR

SEQ ID NO: 1456 - protein, 262 aa, Homo sapiens
MQSREEEWFHQVRRVMTILFLTMVISYFGCMKAAPMKEANIRGQGGLAYPGVRTHGTLESVNGPKAGSRGLTSLADTFEHVIEELLDEDQKVRPNEENNKDADLYTSRVMLSSQVPLEPPLLFLLEEYKNYLDAANMSMRVRRHSDPARRGELSVCDSISEWVTAADKKTAVDMSGGTVTVLEKVPVSKGQLKQYFYETKCNPMGYTKEGCRGIDKRHWNSQCRTTQSYVRALTMDSKKRIGWRFIRIDTSCVCTLTIKRGR

SEQ ID NO: 1457 - protein, 247 aa, Homo sapiens
MTILFLTMVISYFGCMKAAPMKEANIRGQGGLAYPGVRTHGTLESVNGPKAGSRGLTSLADTFEHVIEELLDEDQKVRPNEENNKDADLYTSRVMLSSQVPLEPPLLFLLEEYKNYLDAANMSMRVRRHSDPARRGELSVCDSISEWVTAADKKTAVDMSGGTVTVLEKVPVSKGQLKQYFYETKCNPMGYTKEGCRGIDKRHWNSQCRTTQSYVRALTMDSKKRIGWRFIRIDTSCVCTLTIKRGR

SEQ ID NO: 1458 - protein, 247 aa, Homo sapiens; identical to SEQ ID NO: 1457

SEQ ID NO: 1459 - protein, 247 aa, Homo sapiens; identical to SEQ ID NO: 1457

SEQ ID NO: 1460 - protein, 247 aa, Homo sapiens; identical to SEQ ID NO: 1457

SEQ ID NO: 1461 - protein, 247 aa, Homo sapiens; identical to SEQ ID NO: 1457

SEQ ID NO: 1462 - protein, 247 aa, Homo sapiens; identical to SEQ ID NO: 1457

SEQ ID NO: 1463 - protein, 247 aa, Homo sapiens; identical to SEQ ID NO: 1457

SEQ ID NO: 1464 - protein, 247 aa, Homo sapiens; identical to SEQ ID NO: 1457

SEQ ID NO: 1465 - protein, 247 aa, Homo sapiens; identical to SEQ ID NO: 1457

SEQ ID NO: 1466 - protein, 247 aa, Homo sapiens; identical to SEQ ID NO: 1457

SEQ ID NO: 1467 - protein, 247 aa, Homo sapiens; identical to SEQ ID NO: 1457

SEQ ID NO: 1468 - protein, 247 aa, Homo sapiens; identical to SEQ ID NO: 1457

SEQ ID NO: 1469 - protein, 247 aa, Homo sapiens; identical to SEQ ID NO: 1457

SEQ ID NO: 1470 - protein, 247 aa, Homo sapiens; identical to SEQ ID NO: 1457

SEQ ID NO: 1471 - protein, 100 aa, Homo sapiens
MRALTLLALLALAALCIAGQAGAKPSGAESSKGAAFVSKQEGSEVVKRPRRYLYQWLGAPVPYPDPLEPRREVCELNPDCDELADHIGFQEAYRRFYGPV

SEQ ID NO: 1472 - protein, 368 aa, Homo sapiens
MWPLWRLVSLLALSQALPFEQRGFWDFTLDDGPFMMNDEEASGADTSGVLDPDSVTPTYSAMCPFGCHCHLRVVQCSDLGLKSVPKEISPDTTLLDLQNNDISELRKDDFKGLQHLYALVLVNNKISKIHEKAFSPLRKLQKLYISKNHLVEIPPNLPSSLVELRIHDNRIRKVPKGVFSGLRNMNCIEMGGNPLENSGFEPGAFDGLKLNYLRISEAKLTGIPKDLPETLNELHLDHNKIQAIELEDLLRYSKLYRLGLGHNQIRMIENGSLSFLPTLRELHLDNNKLARVPSGLPDLKLLQVVYLHSNNITKVGVNDFCPMGFGVKRAYYNGISLFNNPVPYWEVQPATFRCVTDRLAIQFGNYKK

SEQ ID NO: 1473 - protein, 238 aa, Homo sapiens
MWPLWRLVSLLALSQALPFEQRGFWDFTLDDGPFMMNDEEASGADTSGVLDPDSVTPTYSAMCPFGCHCHLRVVQCSDLGLKSVPKEISPDTTLLDLQNNDISELRKDDFKGLQHLYVRSWEEPAGLQQRAGVRALVLVNNKISKIHEKAFSPLRKLQKLYISKNHLVEIPPNLPSSLVELRIHDNRIRKVPKGVFSGLRNMNCIEMGGNPLENSGFEPGAFDGLKLNYLRISEAKLT

SEQ ID NO: 1474 - protein, 121 aa, Homo sapiens
MAVKKIAIFGATGQTGLTTLAQAVQAGYEVTVLVRDSSRLPSEGPRPAHVVVGDVLQAADVDKTVAGQDAVIVLLGTRNDLSPTTVMSEGARNIVAAMKAHGVDKLSCSGTLPRCPHDCRL

SEQ ID NO: 1475 - protein, 206 aa, Homo sapiens
MAVKKIAIFGATGQTGLTTLAQAVQAGYEVTVLVRDSSRLPSEGPRPAHVVVGDVLQAADVDKTVAGQDAVIVLLGTRNDLSPTTVMSEGARNIVAAMKAHGVDKVVACTSAFLLWDPTKVPPRLQAVTDDHIRMHKVLRESGLKYVAVMPPHIGDQPLTGAYTVTLDGRGPSRVISKHDLGHFMLRCLTTDEYDGHSTYPSHQYQ

SEQ ID NO: 1476 - protein, 163 aa, Homo sapiens
MAVKKIAIFGATGQTGLTTLAQAVQAGYEVTVLVRDSSRLPSEGPRPAHVVVGDVLQAADVDKTVAGQDAVIVLLGTRNDLSPTTVMSEGARNIVAAMKAHGVDKVVACTSGDQPLTGAYTVTLDGRGPSRVISKHDLGHFMLRCLTTDEYDGHSTYPSHQYQ

SEQ ID NO: 1477 - protein, 154 aa, Homo sapiens
MAVKKIAIFGATGQTGLTTLAQAVQAGYEVTVLVRDSSRLPSEGPRPAHVVVGDVLQAADVDKTVAGQDAVIVLLGTRNDLSPTTVMSEGARNIVAAMKAHGVDKVVACTSGGWWDHGGGAELGGTGEAAQGPLKGDAEAIPCYCAFTEHQLCA

SEQ ID NO: 1478 - protein, 245 aa, Homo sapiens
MAVKKIAIFGATGQTGLTTLAQAVQAGYEVTVLVRDSSRLPSEGPRPAHVVVGDVLQAADVDKTVAGQDAVIVLLGTRNDLSTEPPLCPRPSPTPRPPAPPPPPAPPLPPLPPPPPTSDSHSLSPLRSHDSDVRGRPEHCGSHEGSWCGQAFLLWDPTKVPPRLQAVTDDHIRMHKVLRESGLKYVAVMPPHIGDQPLTGAYTVTLDGRGPSRVISKHDLGHFMLRCLTTDEYDGHSTYPSHQYQ

SEQ ID NO: 1479 - protein, 730 aa, Homo sapiens
MPGVARLPLLLGLLLLPRPGRPLDLADYTYDLAEEDDSEPLNYKDPCKAAAFLGDIALDEEDLRAFQVQQAVDLRRHTARKSSIKAAVPGNTSTPSCQSTNGQPQRGACGRWRGRSRSRRAATSRPERVWPDGVIPFVIGGNFTGSQRAVFRQAMRHWEKHTCVTFLERTDEDSYIVFTYRPCGCCSYVGRRGGGPQAISIGKNCDKFGIVVHELGHVVGFWHEHTRPDRDRHVSIVRENIQPGQEYNFLKMEPQEVESLGETYDFDSIMHYARNTFSRGIFLDTIVPKYEVNGVKPPIGQRTRLSKGDIAQARKLYKCPACGETLQDSTGNFSSPEYPNGYSAHMHCVWRISVTPGEKIILNFTSLDLYRSRLCWYDYVEVRDGFWRKAPLRGRFCGSKLPEPIVSTDSRLWVEFRSSSNWVGKGFFAVYEAICGGDVKKDYGHIQSPNYPDDYRPSKVCIWRIQVSEGFHVGLTFQSFEIERHDSCAYDYLEVRDGHSESSTLIGRYCGYEKPDDIKSTSSRLWLKFVSDGSINKAGFAVNFFKEVDECSRPNRGGCEQRCLNTLGSYKCSCDPGYELAPDKRRCEAACGGFLTKLNGSITSPGWPKEYPPNKNCIWQLVAPTQYRISLQFDFFETEGNDVCKYDFVEVRSGLTADSKLHGKFCGSEKPEVITSQYNNMRVEFKSDNTVSKKGFKAHFFSEKRPALQPPRGRPHQLKFRVQKRNRTPQ

SEQ ID NO: 1480 - protein, 986 aa, Homo sapiens
MPGVARLPLLLGLLLLPRPGRPLDLADYTYDLAEEDDSEPLNYKDPCKAAAFLGDIALDEEDLRAFQVQQAVDLRRHTARKSSIKAAVPGNTSTPSCQSTNGQPQRGACGRWRGRSRSRRAATSRPERVWPDGVIPFVIGGNFTGSQRAVFRQAMRHWEKHTCVTFLERTDEDSYIVFTYRPCGCCSYVGRRGGGPQAISIGKNCDKFGIVVHELGHVVGFWHEHTRPDRDRHVSIVRENIQPGQEYNFLKMEPQEVESLGETYDFDSIMHYARNTFSRGIFLDTIVPKYEVNGVKPPIGQRTRLSKGDIAQARKLYKCPACGETLQDSTGNFSSPEYPNGYSAHMHCVWRISVTPGEKIILNFTSLDLYRSRLCWYDYVEVRDGFWRKAPLRGRFCGSKLPEPIVSTDSRLWVEFRSSSNWVGKGFFAVYEAICGGDVKKDYGHIQSPNYPDDYRPSKVCIWRIQVSEGFHVGLTFQSFEIERHDSCAYDYLEVRDGHSESSTLIGRYCGYEKPDDIKSTSSRLWLKFVSDGSINKAGFAVNFFKEVDECSRPNRGGCEQRCLNTLGSYKCSCDPGYELAPDKRRCEAACGGFLTKLNGSITSPGWPKEYPPNKNCIWQLVAPTQYRISLQFDFFETEGNDVCKYDFVEVRSGLTADSKLHGKFCGSEKPEVITSQYNNMRVEFKSDNTVSKKGFKAHFFSDKDECSKDNGGCQQDCVNTFGSYECQCRSGFVLHDNKHDCKEAGCDHKVTSTSGTITSPNWPDKYPSKKECTWAISSTPGHRVKLTFMEMDIESQPECAYDHLEVFDGRDAKAPVLGRFCGSKKPEPVLATGSRMFLRFYSDNSVQRKGFQASHATECGGQVRADVKTKDLYSHAQFGDNNYPGGVDCEWVIVAEEGYGVELVFQTFEVEEETDCGYDYMELFDGYDSTAPRLGRYCGSGPPEEVYSAGDSVLVKFHSDDTITKKGFHLRYTSTKFQDTLHSRK

SEQ ID NO: 1481 - protein, 622 aa, Homo sapiens
MPGVARLPLLLGLLLLPRPGRPLDLADYTYDLAEEDDSEPLNYKDPCKAAAFLGDIALDEEDLRAFQVQQAVDLRRHTARKSSIKAAVPGNTSTPSCQSTNGQPQRGACGRWRGRSRSRRAATSRPERVWPDGVIPFVIGGNFTGSQRAVFRQAMRHWEKHTCVTFLERTDEDSYIVFTYRPCGCCSYVGRRGGGPQAISIGKNCDKFGIVVHELGHVVGFWHEHTRPDRDRHVSIVRENIQPGQEYNFLKMEPQEVESLGETYDFDSIMHYARNTFSRGIFLDTIVPKYEVNGVKPPIGQRTRLSKGDIAQARKLYKCPACGETLQDSTGNFSSPEYPNGYSAHMHCVWRISVTPGEKIILNFTSLDLYRSRLCWYDYVEVRDGFWRKAPLRGRFCGSKLPEPIVSTDSRLWVEFRSSSNWVGKGFFAVYEAICGGDVKKDYGHIQSPNYPDDYRPSKVCIWRIQVSEGFHVGLTFQSFEIERHDSCAYDYLEVRDGHSESSTLIGRYCGYEKPDDIKSTSSRLWLKFVSDGSINKAGFAVNFFKEVDECSRPNRGGCEQRCLNTLGSYKCSCDPGYELAPDKRRCEGCYDLQVGKPLLWDRHCFRLSTHGPEMLGTALRG

SEQ ID NO: 1482 - protein, 717 aa, Homo sapiens
MPGVARLPLLLGLLLLPRPGRPLDLADYTYDLAEEDDSEPLNYKDPCKAAAFLGDIALDEEDLRAFQVQQAVDLRRHTARKSSIKAAVPGNTSTPSCQSTNGQPQRGACGRWRGRSRSRRAATSRPERVWPDGVIPFVIGGNFTGSQRAVFRQAMRHWEKHTCVTFLERTDEDSYIVFTYRPCGCCSYVGRRGGGPQAISIGKNCDKFGIVVHELGHVVGFWHEHTRPDRDRHVSIVRENIQPGQEYNFLKMEPQEVESLGETYDFDSIMHYARNTFSRGIFLDTIVPKYEVNGVKPPIGQRTRLSKGDIAQARKLYKCPACGETLQDSTGNFSSPEYPNGYSAHMHCVWRISVTPGEKIILNFTSLDLYRSRLCWYDYVEVRDGFWRKAPLRGRFCGSKLPEPIVSTDSRLWVEFRSSSNWVGKGFFAVYEAICGGDVKKDYGHIQSPNYPDDYRPSKVCIWRIQVSEGFHVGLTFQSFEIERHDSCAYDYLEVRDGHSESSTLIGRYCGYEKPDDIKSTSSRLWLKFVSDGSINKAGFAVNFFKEVDECSRPNRGGCEQRCLNTLGSYKCSCDPGYELAPDKRRCEAACGGFLTKLNGSITSPGWPKEYPPNKNCIWQLVAPTQYRISLQFDFFETEGNDVCKYDFVEVRSGLTADSKLHGKFCGSEKPEVITSQYNNMRVEFKSDNTVSKKGFKAHFFSGGELFGLLGHPPRRP

SEQ ID NO: 1483 - protein, 730 aa, Homo sapiens; identical to SEQ ID NO: 1479

SEQ ID NO: 1484 - protein, 302 aa, Homo sapiens
MPGVARLPLLLGLLLLPRPGRPLDLADYTYDLAEEDDSEPLNYKDPCKAAAFLGDIALDEEDLRAFQVQQAVDLRRHTARKSSIKAAVPGNTSTPSCQSTNGQPQRGACGRWRGRSRSRRAATSRPERVWPDGVIPFVIGGNFTGSQRAVFRQAMRHWEKHTCVTFLERTDEDSYIVFTYRPCGCCSYVGRRGGGPQAISIGKNCDKFGIVVHELGHVVGFWHEHTRPDRDRHVSIVRENIQPGVLHSSLLLLSCGSRNGASFPCSLESSIHQALCWTGLFLRPSPFPRLPLAAPRTLRAGV

SEQ ID NO: 1485 - protein, 302 aa, Homo sapiens; identical to SEQ ID NO: 1484

SEQ ID NO: 1486 - protein, 189 aa, Homo sapiens
MPGVARLPLLLGLLLLPRPGRPLDLADYTYDLAEEDDSEPLNYKDPCKAAAFLGDIALDEEDLRAFQVQQAVDLRRHTARKSSIKAAVPGNTSTPSCQSTNGQPQRGACGRWRGRSRSRRAATSRPERVWPDGVIPFVIGGNFTGSQRAVFRQAMRHWEKHTCVTFLERTDEDSYIVFTYRPCGSGPPP

SEQ ID NO: 1487 - protein, 189 aa, Homo sapiens; identical to SEQ ID NO: 1486

SEQ ID NO: 1488 - protein, 189 aa, Homo sapiens; identical to SEQ ID NO: 1486

SEQ ID NO: 1489 - protein, 189 aa, Homo sapiens; identical to SEQ ID NO: 1486

SEQ ID NO: 1490 - protein, 61 aa, Homo sapiens
MPGVARLPLLLGLLLLPRPGRPLDLADYTYDLAEEDDSEPLNYKDPCKLPFLGTLPWTKRT

SEQ ID NO: 1491 - protein, 424 aa, Homo sapiens
MGSLVLTLCALFCLAAYLVSGSPIMNLEQSPLEEDMSLFGDVFSEQDGVDFNTLLQSMKDEFLKTLNLSDIPTQDSAKVDPPEYMLELYNKFATDRTSMPSANIIRSFKNEDLFSQPVSFNGLRKYPLLFNVSIPHHEEVIMAELRLYTLVQRDRMIYDGVDRKITIFEVLESKGDNEGERNMLVLVSGEIYGTNSEWETFDVTDAIRRWQKSGSSTHQLEVHIESKHDEAEDASSGRLEIDTSAQNKHNPLLIVFSDDQSSDKERKEELNEMISHEQLPELDNLGLDSFSSGPGEEALLQMRSNIIYDSTARIRRNAKGNYCKRTPLYIDFKEIGWDSWIIAPPGYEAYECRGVCNYPLAEHLTPTKHAIIQALVHLKNSQKASKACCVPTKLEPISILYLDKGVVTYKFKYEGMAVSECGCR

SEQ ID NO: 1492 - protein, 392 aa, Homo sapiens
MVLLSILRILFLCELVLFMEHRAQMAEGGQSSIALLAEAPTLPLIEELLEESPGEQPRKPRLLGHSLRYMLELYRRSADSHGHPRENRTIGATMVRLVKPLTNVARPHRGTWHIQILGFPLRPNRGLYQLVRATVVYRHHLQLTRFNLSCHVEPWVQKNPTNHFPSSEGDSSKPSLMSNAWKEMDITQLVQQRFWNNKGHRILRLRFMCQQQKDSGGLELWHGTSSLDIAFLLLYFNDTHKSIRKAKFLPRGMEEFMERESLLRRTRQADGISAEVTASSSKHSGPENNQCSLHPFQISFRQLGWDHWIIAPPFYTPNYCKGTCLRVLRDGLNSPNHAIIQNLINQLVDQSVPRPSCVPYKYVPISVLMIEANGSILYKEYEGMIAESCTCR

SEQ ID NO: 1493 - protein, 396 aa, Homo sapiens
MVAGTRCLLALLLPQVLLGGAAGLVPELGRRKFAAASSGRPSSQPSDEVLSEFELRLLSMFGLKQRPTPSRDAVVPPYMLDLYRRHSGQPGSPAPDHRLERAASRANTVRSFHHEESLEELPETSGKTTRRFFFNLSSIPTEEFITSAELQVFREQMQDALGNNSSFHHRINIYEIIKPATANSKFPVTRLLDTRLVNQNASRWESFDVTPAVMRWTAQGHANHGFVVEVAHLEEKQGVSKRHVRISRSLHQDEHSWSQIRPLLVTFGHDGKGHPLHKREKRQAKHKQRKRLKSSCKRHPLYVDFSDVGWNDWIVAPPGYHAFYCHGECPFPLADHLNSTNHAIVQTLVNSVNSKIPKACCVPTELSAISMLYLDENEKVVLKNYQDMVVEGCGCR

SEQ ID NO: 1494 - protein, 472 aa, Homo sapiens
MAGASRLLFLWLGCFCVSLAQGERPKPPFPELRKAVPGDRTAGGGPDSELQPQDKVSEHMLRLYDRYSTVQAARTPGSLEGGSQPWRPRLLREGNTVRSFRAAAAETLERKGLYIFNLTSLTKSENILSATLYFCIGELGNISLSCPVSGGCSHHAQRKHIQIDLSAWTLKFSRNQSQLLGHLSVDMAKSHRDIMSWLSKDITQLLRKAKENEEFLIGFNITSKGRQLPKRRLPFPEPYILVYANDAAISEPESVVSSLQGHRNFPTGTVPKWDSHIRAALSIERRKKRSTGVLLPLQNNELPGAEYQYKKDEVWEERKPYKTLQAQAPEKSKNKKKQRKGPHRKSQTLQFDEQTLKKARRKQWIEPRNCARRYLKVDFADIGWSEWIISPKSFDAYYCSGACQFPMPKSLKPSNHATIQSIVRAVGVVPGIPEPCCVPEKMSSLSILFFDENKNVVLKVYPNMTVESCACR

SEQ ID NO: 1495 - protein, 104 aa, Homo sapiens
LIPETGKKKVAEIQGHAGGRRSGQSHELLRDFEATLLQMFGLRRRPQPSKSAVIPDYMRDLYRLQSGEEEEEQIHSTGLEYPERPASRANTVRSFHHEASLRTR

SEQ ID NO: 1496 - protein, 271 aa, Homo sapiens
MFGLRRRPQPSKSAVIPDYMRDLYRLQSGEEEEEQIHSTGLEYPERPASRANTVRSFHHEEHLENIPGTSENSAFRFLFNLSSIPENEVISSAELRLFREQVDQGPDWERGFHRINIYEVMKPPAEVVPGHLITRLLDTRLVHHNVTRWETFDVSPAVLRWTREKQPNYGLAIEVTHLHQTRTHQGQHVRISRSLPQGSGNWAQLRPLLVTFGHDGRGHALTRRRRAKRSPKHHSQRARKKNKNCRRHSLYVDFSDVGWNDWIVAPPGYQA

SEQ ID NO: 1497 - protein, 110 aa, Homo sapiens
MIPGNRMLMVVLLCQVLLGGASHASLIPETGKKKVAEIQGHAGGRRSGQSHELLRDFEATLLQMFGLRRRPQPSKSAVIPDYMRDLYRLQSGEEEEEQIHSTGLEYPERP

SEQ ID NO: 1498 - protein, 408 aa, Homo sapiens
MIPGNRMLMVVLLCQVLLGGASHASLIPETGKKKVAEIQGHAGGRRSGQSHELLRDFEATLLQMFGLRRRPQPSKSAVIPDYMRDLYRLQSGEEEEEQIHSTGLEYPERPASRANTVRSFHHEEHLENIPGTSENSAFRFLFNLSSIPENEVISSAELRLFREQVDQGPDWERGFHRINIYEVMKPPAEVVPGHLITRLLDTRLVHHNVTRWETFDVSPAVLRWTREKQPNYGLAIEVTHLHQTRTHQGQHVRISRSLPQGSGNWAQLRPLLVTFGHDGRGHALTRRRRAKRSPKHHSQRARKKNKNCRRHSLYVDFSDVGWNDWIVAPPGYQAFYCHGDCPFPLADHLNSTNHAIVQTLVNSVNSSIPKACCVPTELSAISMLYLDEYDKVVLKNYQEMVVEGCGCR

SEQ ID NO: 1499 - protein, 408 aa, Homo sapiens; identical to SEQ ID NO: 1498

SEQ ID NO: 1500 - protein, 408 aa, Homo sapiens; identical to SEQ ID NO: 1498

SEQ ID NO: 1501 - protein, 408 aa, Homo sapiens; identical to SEQ ID NO: 1498

SEQ ID NO: 1502 - protein, 29 aa, Homo sapiens
NTVRSFHHEGQSLPPVCVGEGWWDWLEGQ

SEQ ID NO: 1503 - protein, 513 aa, Homo sapiens
MPGLGRRAQWLCWWWGLLCSCCGPPPLRPPLPAAAAAAAGGQLLGDGGSPGRTEQPPPSPQSSSGFLYRRLKTQEKREMQKEILSVLGLPHRPRPLHGLQQPQPPALRQQEEQQQQQQLPRGEPPPGRLKSAPLFMLDLYNALSADNDEDGASEGERQQSWPHEAASSSQRRQPPPGAAHPLNRKSLLAPGSGSGGASPLTSAQDSAFLNDADMVMSFVNLVEYDKEFSPRQRHHKEFKFNLSQIPEGEVVTAAEFRIYKDCVMGSFKNQTFLISIYQVLQEHQHRDSDLFLLDTRVVWASEEGWLEFDITATSNLWVVTPQHNMGLQLSVVTRDGVHVHPRAAGLVGRDGPYDKQPFMVAFFKVSEVHVRTTRSASSRRRQQSRNRSTQSQDVARVSSASDYNSSELKTACRKHELYVSFQDLGWQDWIIAPKGYAANYCDGECSFPLNAHMNATNHAIVQTLVHLMNPEYVPKPCCAPTKLNAISVLYFDDNSNVILKKYRNMVVRACGCH

SEQ ID NO: 1504 - protein, 365 aa, Homo sapiens
MHVRSLRAAAPHSFVALWAPLFLLRSALADFSLDNEVHSSFIHRRLRSQERREMQREILSILGLPHRPRPHLQGKHNSAPMFMLDLYNAMAVEEGGGPGGQGFSYPYKAVFSTQGPPLASLQDSHFLTDADMVMSFVNLVEHDKEFFHPRYHHREFRFDLSKIPEGEAVTAAEFRIYKDYIRERFDNETFRISVYQVLQEHLGRESDLFLLDSRTLWASEEGWLVFDITATSNHWVVNPRHNLGLQLSVETLDENSSSDQRQACKKHELYVSFRDLGWQDWIIAPEGYAAYYCEGECAFPLNSYMNATNHAIVQTLVHFINPETVPKPCCAPTQLNAISVLYFDDSSNVILKKYRNMVVRACGCH

SEQ ID NO: 1505 - protein, 431 aa, Homo sapiens
MHVRSLRAAAPHSFVALWAPLFLLRSALADFSLDNEVHSSFIHRRLRSQERREMQREILSILGLPHRPRPHLQGKHNSAPMFMLDLYNAMAVEEGGGPGGQGFSYPYKAVFSTQGPPLASLQDSHFLTDADMVMSFVNLVEHDKEFFHPRYHHREFRFDLSKIPEGEAVTAAEFRIYKDYIRERFDNETFRISVYQVLQEHLGRESDLFLLDSRTLWASEEGWLVFDITATSNHWVVNPRHNLGLQLSVETLDGQSINPKLAGLIGRHGPQNKQPFMVAFFKATEVHFRSIRSTGSKQRSQNRSKTPKNQEALRMANVAENSSSDQRQACKKHELYVSFRDLGWQDWIIAPEGYAAYYCEGECAFPLNSYMNATNHAIVQTLVHFINPETVPKPCCAPTQLNAISVLYFDDSSNVILKKYRNMVVRACGCH

SEQ ID NO: 1506 - protein, 412 aa, Homo sapiens
MHVRSLRAAAPHSFVALWAPLFLLRSALADFSLDNEVHSSFIHRRLRSQERREMQREILSILGLPHRPRPHLQGKHNSAPMFMLDLYNAMAVEEGGGPGGQGFSYPYKAVFSTQGPPLASLQDSHFLTDADMVMSFVNLVEHDKEFFHPRYHHREFRFDLSKIPEGEAVTAAEFRIYKDYIRERFDNETFRISVYQVLQEHLGRESDLFLLDSRTLWASEEGWLVFDITATSNHWVVNPRHNLGLQLSVETLDGQSINPKLAGLIGRHGPQNKQPFMVAFFKATEVHFRSIRSTGSKQRSQNRSKTPKNQEALRMANVAENSSSDQRQACKKHELYVSFRDLGWQDWIIAPEGYAAYYCEGECAFPLNSYMNATNHAIVQTLVGVTPSWGVVTWAGQAAGPPDPAASKLGPE

SEQ ID NO: 1507 - protein, 297 aa, Homo sapiens
  VARIANT 1: note = misc_feature - Xaa can be any naturally occurring amino acid
XPPLASLQDSHFLTDADMVMSFVNLVEHDKEFFHPRYHHREFRFDLSKIPEGEAVTAAEFRIYKDYIRERFDNETFRISVYQVLQEHLGSTGTCCMPCLRASTRTNQTRVPALWKLTFQQRRGHGRESDLFLLDSRTLWASEEGWLVFDITATSNHWVVNPRHNLGLQLSVETLDGQSINPKLAGLIGRHGPQNKQPFMVAFFKATEVHFRSIRSTGSKQRSQNRSKTPKNQEALRMANVAENSSSDQRQACKKHELYVSFRDLGWQDWIIAPEGYAAYYCEGECAFPLNSYMNATN

SEQ ID NO: 1508 - protein, 402 aa, Homo sapiens
MAARPGPLWLLGLTLCALGGGGPGLRPPPGCPQRRLGARERRDVQREILAVLGLPGRPRPRAPPAASRLPASAPLFMLDLYHAMAGDDDEDGAPAEQRLGRADLVMSFVNMVERDRALGHQEPHWKEFRFDLTQIPAGEAVTAAEFRIYKVPSIHLLNRTLHVSMFQVVQEQSNRESDLFFLDLQTLRAGDEGWLVLDVTAASDCWLLKRHKDLGLRLYVETEDGHSVDPGLAGLLGQRAPRSQQPFVVTFFRASPSPIRTPRAVRPLRRRQPKKSNELPQANRLPGIFDDVRGSHGRQVCRRHELYVSFQDLGWLDWVIAPQGYSAYYCEGECSFPLDSCMNATNHAILQSLVHLMKPNAVPKACCAPTKLSATSVLYYDSSNNVILRKHRNMVVKACGCH

SEQ ID NO: 1509 - protein, 402 aa, Homo sapiens
MTALPGPLWLLGLALCALGGGGPGLRPPPGCPQRRLGARERRDVQREILAVLGLPGRPRPRAPPAASRLPASAPLFMLDLYHAMAGDDDEDGAPAERRLGRADLVMSFVNMVERDRALGHQEPHWKEFRFDLTQIPAGEAVTAAEFRIYKVPSIHLLNRTLHVSMFQVVQEQSNRESDLFFLDLQTLRAGDEGWLVLDVTAASDCWLLKRHKDLGLRLYVETEDGHSVDPGLAGLLGQRAPRSQQPFVVTFFRASPSPIRTPRAVRPLRRRQPKKSNELPQANRLPGIFDDVHGSHGRQVCRRHELYVSFQDLGWLDWVIAPQGYSAYYCEGECSFPLDSCMNATNHAILQSLVHLMMPDAVPKACCAPTKLSATSVLYYDSSNNVILRKHRNMVVKACGCH

SEQ ID NO: 1510 - protein, 90 aa, Homo sapiens
MLWFSGVGALAERYCRRSPGITCCVLLLLNCSGVPMSLASSFLTGSVAKCENEGEVLQIPFITDNPCIMCVCLHEPTRWSNLTQNPGFYD

SEQ ID NO: 1511 - protein, 685 aa, Homo sapiens
MLWFSGVGALAERYCRRSPGITCCVLLLLNCSGVPMSLASSFLTGSVAKCENEGEVLQIPFITDNPCIMCVCLNKEVTCKREKCPVLSRDCALAIKQRGACCEQCKGCTYEGNTYNSSFKWQSPAEPCVLRQCQEGVVTESGVRCVVHCKNPLEHLGMCCPTCPGCVFEGVQYQEGEEFQPEGSKCTKCSCTGGRTQCVREVCPILSCPQHLSHIPPGQCCPKCLGQRKVFDLPFGSCLFRSDVYDNGSSFLYDNCTACTCRDSTVVCKRKCSHPGGCDQGQEGCCEECLLRVPPEDIKVCKFGNKIFQDGEMWSSINCTICACVKGRTECRNKQCIPISSCPQGKILNRKGCCPICTEKPGVCTVFGDPHYNTFDGRTFNFQGTCQYVLTKDCSSPASPFQVLVKNDARRTRSFSWTKSVELVLGESRVSLQQHLTVRWNGSRIALPCRAPHFHIDLDGYLLKVTTKAGLEISWDGDSFVEVMAAPHLKGKLCGLCGNYNGHKRDDLIGGDGNFKFDVDDFAESWRVESNEFCNRPQRKPVPELCQGTVKVKLRAHRECQKLKSWEFQTCHSTVDYATFYRSCVTDMCECPVHKNCYCESFLAYTRACQREGIKVHWEPQQNCAATQCKHGAVYDTCGPGCIKTCDNWNEIGPCNKPCVAGCHCPANLVLHKGRCIKPVLCPQR

SEQ ID NO: 1512 - protein, 133 aa, Homo sapiens
MLWFSGVGALAERYCRRSPGITCCVLLLLNCSGVPMSLASSFLTGSVAKCENEGEVLQIPFITDNPCIMCVCLNKEVTCKREKCPVLSRDCALAIKQRGACCEQCKVLVSRVLRDTVLFTLKYWRLPVFWLHL

SEQ ID NO: 1513 - protein, 161 aa, Homo sapiens
MLWFSGVGALAERYCRRSPGITCCVLLLLNCSGVPMSLASSFLTGSVAKCENEGEVLQIPFITDNPCIMCVCLVAPMKEIPITAPSNGRARLSLVFYASARRALSQSLGCAVLFIVKTLWSIWECAAPHVQAVCLRVCSIKKGRNFSQKEANVPSVPALEA

SEQ ID NO: 1514 - protein, 987 aa, Homo sapiens
MRCRNMFFSFKASLCGCGAATAPSLTAISCTLNCSCQSFKPGKINHRQCDQCKHGWVAHALSKLRIPPMYPTSQVEIVQSNVVFDISSLMLYGTQAIPVRLKILLDRLFSVLKQDEVLQILHALDWTLQDYIRGYVLQDASGKVLDHWSIMTSEEEVATLQQFLRFGETKSIVELMAIQEKEEQSIIIPPSTANVDIRAFIESCSHRSSSLPTPVDKGNPSSIHPFENLISNMTFMLPFQFFNPLPPALIGSLPEQYMLEQGHDQSQDPKQEVHGPFPDSSFLTSSSTPFQVEKDQCLNCPDAITKKEDSTHLSDSSSYNIVTKFERTQLSPEAKVKPERNSLGTKKGRVFCTACEKTFYDKGTLKIHYNAVHLKIKHKCTIEGCNMVFSSLRSRNRHSANPNPRLHMPMNRNNRDKDLRNSLNLASSENYKCPGFTVTSPDCRPPPSYPGSGEDSKGQPAFPNIGQNGVLFPNLKTVQPVLPFYRSPATPAEVANTPGILPSLPLLSSSIPEQLISNEMPFDALPKKKSRKSSMPIKIEKEAVEIANEKRHNLSSDEDMPLQVVSEDEQEACSPQSHRVSEEQHVQSGGLGKPFPEGERPCHRESVIESSGAISQTPEQATHNSERETEQTPALIMVPREVEDGGHEHYFTPGMEPQVPFSDYMELQQRLLAGGLFSALSNRGMAFPCLEDSKELEHVGQHALARQIEENRFQCDICKKTFKNACSVKIHHKNMHVKEMHTCTVEGCNATFPSRRSRDRHSSNLNLHQKALSQEALESSEDHFRAAYLLKDVAKEAYQDVAFTQQASQTSVIFKGTSRMGSLVYPITQVHSASLESYNSGPLSEGTILDLSTTSSMKSESSSHSSWDSDGVSEEGTVLMEDSDGNCEGSSLVPGEDEYPICVLMEKADQSLASLPSGLPITCHLCQKTYSNKGTFRAHYKTVHLRQLHKCKVPGCNTMFSSVRSRNRHSQNPNLHKSLASSPSHLQ

SEQ ID NO: 1515 - protein, 994 aa, Homo sapiens
MRRRPPSRGGRGAARARETRRQPRHRSGRRMAEAISCTLNCSCQSFKPGKINHRQCDQCKHGWVAHALSKLRIPPMYPTSQVEIVQSNVVFDISSLMLYGTQAIPVRLKILLDRLFSVLKQDEVLQILHALDWTLQDYIRGYVLQDASGKVLDHWSIMTSEEEVATLQQFLRFGETKSIVELMAIQEKEEQSIIIPPSTANVDIRAFIESCSHRSSSLPTPVDKGNPSSIHPFENLISNMTFMLPFQFFNPLPPALIGSLPEQYMLEQGHDQSQDPKQEVHGPFPDSSFLTSSSTPFQVEKDQCLNCPDAITKKEDSTHLSDSSSYNIVTKFERTQLSPEAKVKPERNSLGTKKGRVFCTACEKTFYDKGTLKIHYNAVHLKIKHKCTIEGCNMVFSSLRSRNRHSANPNPRLHMPMNRNNRDKDLRNSLNLASSENYKCPGFTVTSPDCRPPPSYPGSGEDSKGQPAFPNIGQNGVLFPNLKTVQPVLPFYRSPATPAEVANTPGILPSLPLLSSSIPEQLISNEMPFDALPKKKSRKSSMPIKIEKEAVEIANEKRHNLSSDEDMPLQVVSEDEQEACSPQSHRVSEEQHVQSGGLGKPFPEGERPCHRESVIESSGAISQTPEQATHNSERETEQTPALIMVPREVEDGGHEHYFTPGMEPQVPFSDYMELQQRLLAGGLFSALSNRGMAFPCLEDSKELEHVGQHALARQIEENRFQCDICKKTFKNACSVKIHHKNMHVKEMHTCTVEGCNATFPSRRSRDRHSSNLNLHQKALSQEALESSEDHFRAAYLLKDVAKEAYQDVAFTQQASQTSVIFKGTSRMGSLVYPITQVHSASLESYNSGPLSEGTILDLSTTSSMKSESSSHSSWDSDGVSEEGTVLMEDSDGNCEGSSLVPGEDEYPICVLMEKADQSLASLPSGLPITCHLCQKTYSNKGTFRAHYKTVHLRQLHKCKVPGCNTMFSSVRSRNRHSQNPNLHKSLASSPSHLQ

SEQ ID NO: 1516 - protein, 22 aa, Homo sapiens
MLRGTMTAWRGMRPEVTLACLL

SEQ ID NO: 1517 - protein, 32 aa, Homo sapiens
MLRGTMTAWRGMRPEVTLACLLLATAGCFADL

SEQ ID NO: 1518 - protein, 85 aa, Homo sapiens
MLRGTMTAWRGMRPEVTLACLLLATAGCFADLNEVPQVTVQPASTVQKPGGTVILGCVVEPPRMNVTWRLNGKELNGSDDALGVL

SEQ ID NO: 1519 - protein, 1115 aa, Homo sapiens
MLRGTMTAWRGMRPEVTLACLLLATAGCFADLNEVPQVTVQPASTVQKPGGTVILGCVVEPPRMNVTWRLNGKELNGSDDALGVLITHGTLVITALNNHTVGRYQCVARMPAGAVASVPATVTLANLQDFKLDVQHVIEVDEGNTAVIACHLPESHPKAQVRYSVKQEWLEASRGNYLIMPSGNLQIVNASQEDEGMYKCAAYNPVTQEVKTSGSSDRLRVRRSTAEAARIIYPPEAQTIIVTKGQSLILECVASGIPPPRVTWAKDGSSVTGYNKTRFLLSNLLIDTTSEEDSGTYRCMADNGVGQPGAAVILYNVQVFEPPEVTMELSQLVIPWGQSAKLTCEVRGNPPPSVLWLRNAVPLISSQRLRLSRRALRVLSMGPEDEGVYQCMAENEVGSAHAVVQLRTSRPSITPRLWQDAELATGTPPVSPSKLGNPEQMLRGQPALPRPPTSVGPASPQCPGEKGQGAPAEAPIILSSPRTSKTDSYELVWRPRHEGSGRAPILYYVVKHRKQVTNSSDDWTISGIPANQHRLTLTRLDPGSLYEVEMAAYNCAGEGQTAMVTFRTGRRPKPEIMASKEQQIQRDDPGASPQSSSQPDHGRLSPPEAPDRPTISTASETSVYVTWIPRGNGGFPIQSFRVEYKKLKKVGDWILATSAIPPSRLSVEITGLEKGTSYKFRVRALNMLGESEPSAPSRPYVVSGYSGRVYERPVAGPYITFTDAVNETTIMLKWMYIPASNNNTPIHGFYIYYRPTDSDNDSDYKKDMVEGDKYWHSISHLQPETSYDIKMQCFNEGGESEFSNVMICETKARKSSGQPGRLPPPTLAPPQPPLPETIERPVGTGAMVARSSDLPYLIVGVVLGSIVLIIVTFIPFCLWRAWSKQKHTTDLGFPRSALPPSCPYTMVPLGGLPGHQASGQPYLSGISGRACANGIHMNRGCPSAAVGYPGMKPQQHCPGELQQQSDTSSLLRQTHLGNGYDPQSHQITRGPKSSPDEGSFLYTLPDDSTHQLLQPHHDCCQRQEQPAAVGQSGVRRAPDSPVLEAVWDPPFHSGPPCCLGLVPVEEVDSPDSCQVSGGDWCPQHPVGAYVGQEPGMQLSPGPLVRVSFETPPLTI

SEQ ID NO: 1520 - protein, 1114 aa, Homo sapiens
MLRGTMTAWRGMRPEVTLACLLLATAGCFADLNEVPQVTVQPASTVQKPGGTVILGCVVEPPRMNVTWRLNGKELNGSDDALGVLITHGTLVITALNNHTVGRYQCVARMPAGAVASVPATVTLANLQDFKLDVQHVIEVDEGNTAVIACHLPESHPKAQVRYSVKQEWLEASRGNYLIMPSGNLQIVNASQEDEGMYKCAAYNPVTQEVKTSGSSDRLRVRRSTAEAARIIYPPEAQTIIVTKGQSLILECVASGIPPPRVTWAKDGSSVTGYNKTRFLLSNLLIDTTSEEDSGTYRCMADNGVGQPGAAVILYNVQVFEPPEVTMELSQLVIPWGQSAKLTCEVRGNPPPSVLWLRNAVPLISSQRLRLSRRALRVLSMGPEDEGVYQCMAENEVGSAHAVVQLRTSRPSITPRLWQDAELATGTPPVSPSKLGNPEQMLRGQPALPRPPTSVGPASPQCPGEKGQGAPAEAPIILSSPRTSKTDSYELVWRPRHEGSGRAPILYYVVKHRKVTNSSDDWTISGIPANQHRLTLTRLDPGSLYEVEMAAYNCAGEGQTAMVTFRTGRRPKPEIMASKEQQIQRDDPGASPQSSSQPDHGRLSPPEAPDRPTISTASETSVYVTWIPRGNGGFPIQSFRVEYKKLKKVGDWILATSAIPPSRLSVEITGLEKGTSYKFRVRALNMLGESEPSAPSRPYVVSGYSGRVYERPVAGPYITFTDAVNETTIMLKWMYIPASNNNTPIHGFYIYYRPTDSDNDSDYKKDMVEGDKYWHSISHLQPETSYDIKMQCFNEGGESEFSNVMICETKARKSSGQPGRLPPPTLAPPQPPLPETIERPVGTGAMVARSSDLPYLIVGVVLGSIVLIIVTFIPFCLWRAWSKQKHTTDLGFPRSALPPSCPYTMVPLGGLPGHQASGQPYLSGISGRACANGIHMNRGCPSAAVGYPGMKPQQHCPGELQQQSDTSSLLRQTHLGNGYDPQSHQITRGPKSSPDEGSFLYTLPDDSTHQLLQPHHDCCQRQEQPAAVGQSGVRRAPDSPVLEAVWDPPFHSGPPCCLGLVPVEEVDSPDSCQVSGGDWCPQHPVGAYVGQEPGMQLSPGPLVRVSFETPPLTI

SEQ ID NO: 1521 - protein, 1114 aa, Homo sapiens; identical to SEQ ID NO: 1520

SEQ ID NO: 1522 - protein, 157 aa, Homo sapiens
MLRGTMTAWRGMRPEVTLACLLLATAGCFADLNEVPQVTVQPASTVQKPGGTVILGCVVEPPRMNVTWRLNGKELNGSDDALGVLITHGTLVITALNNHTVGRYQCVARMPAGAVASVPATVTLASESAPLPPCHGAVPPHLSHPEAPTIHAASCYS

SEQ ID NO: 1523 - protein, 157 aa, Homo sapiens; identical to SEQ ID NO: 1522

SEQ ID NO: 1524 - protein, 65 aa, Homo sapiens
MTHEVLSTFIPSEGSSSKVEEVDLQDFKLDVQHVIEVDEGNTAVIACHLPESHPKAQVRYSVKQE

SEQ ID NO: 1525 - protein, 39 aa, Homo sapiens
  VARIANT 1: note = misc_feature - Xaa can be any naturally occurring amino acid
XQQQSDTSSLLRQTHLGNGYDPQSHQITRAPMLLGPCAS

SEQ ID NO: 1526 - protein, 84 aa, Homo sapiens
  VARIANT 1: note = misc_feature - Xaa can be any naturally occurring amino acid
XRACANGIHMNRGCPSAAVGYPGMKPQQHCPGELQQQSDTSSLLRQTHLGNGYDPQSHQITSCCSPITTAANARSSLLLWASQG

SEQ ID NO: 1527 - protein, 85 aa, Homo sapiens
MADGGGGGGTGAVGGGGTSQASAGAATGATGASGGGGPINPASLPPGDPQLIALIVEQLKSRGLFDSFRRDCLADVDTKNTPDTF

SEQ ID NO: 1528 - protein, 129 aa, Homo sapiens
MADGGGGGGTGAVGGGGTSQASAGAATGATGASGGGGPINPASLPPGDPQLIALIVEQLKSRGLFDSFRRDCLADVDTKPAYQNLRQKVDNFVSTHLDKQEWNPTMNKNQLRNGLRQSVVQIRQTPFES

SEQ ID NO: 1529 - protein, 185 aa, Homo sapiens
MADGGGGGGTGAVGGGGTSQASAGAATGATGASGGGGPINPASLPPGDPQLIALIVEQLKSRGLFDSFRRDCLADVDTKPAYQNLRQKVDNFVSTHLDKQEWNPTMNKNQLRNGLRQSVVQSGMLEAGVDRIISQVVDPKLNHIFRPQIERAIHEFLAAQKKAAVPAPPPEPEGQDPPAPSQDTS

SEQ ID NO: 1530 - protein, 42 aa, Homo sapiens
MNKNQLRNGLRQSVVQSGMLEAGVDRIISQVVDPKLNHIFRP

SEQ ID NO: 1531 - protein, 118 aa, Homo sapiens
  VARIANT 1: note = misc_feature - Xaa can be any naturally occurring amino acid
XLALLGPAGAVAPSTRPRCLPATRSSSLSSWSSSRAGAFLTASAGTAWPTWTPRSGMLEAGVDRIISQVVDPKLNHIFRPQIERAIHEFLAAQKKAAVPAPPPEPEGQDPPAPSQDTS

SEQ ID NO: 1532 - protein, 137 aa, Homo sapiens
MLSGRLVLGLVSMAGRVCLCQGSAGSGAIGPVEAAIRTKLEEALSPEVLELRNESGGHAVPPGSETHFRVAVVSSRFEGLSPLQRHRLVHAALAEELGGPVHALAIQARTPAQWRENSQLDTSPPCLGGNKKTLGTP

SEQ ID NO: 1533 - protein, 137 aa, Homo sapiens; identical to SEQ ID NO: 1532

SEQ ID NO: 1534 - protein, 137 aa, Homo sapiens; identical to SEQ ID NO: 1532

SEQ ID NO: 1535 - protein, 55 aa, Homo sapiens
MENVCEKVTNSVSSELQPYFQTLPVMTKIDSVAGINYGLVAPPATTAETLDVQMK

SEQ ID NO: 1536 - protein, 286 aa, Homo sapiens
MENVCEKVTNSVSSELQPYFQTLPVMTKIDSVAGINYGLVAPPATTAETLDVQMKGEFYSENHHNPPPFAPPVMEFPAAHDRMVYLGLSDYFFNTAGLVYQEAGVLKMTLRDDMIPKESKFRLTTKFFGTFLPEVAKKFPNMKIQIHVSASTPPHLSVQPTGLTFYPAVDVQAFAVLPNSSLASLFLIGMHTTGSMEVSAESNRLVGELKLDRLLLELKHSNIGPFPVELLQDIMNYIVPILVLPRVNEKLQKGFPLPTPARVQLYNVVLQPHQNFLLFGADVVYK

SEQ ID NO: 1537 - protein, 487 aa, Homo sapiens
MRENMARGPCNAPRWASLMVLVAIGTAVTAAVNPGVVVRISQKGLDYASQQGTAALQKELKRIKIPDYSDSFKIKHLGKGHYSFYSMDIREFQLPSSQISMVPNVGLKFSISNANIKISGKWKAQKRFLKMSGNFDLSIEGMSISADLKLGSNPTSGKPTITCSSCSSHINSVHVHISKSKVGWLIQLFHKKIESALRNKMNSQVCEKVTNSVSSELQPYFQTLPVMTKIDSVAGINYGLVAPPATTAETLDVQMKGEFYSENHHNPPPFAPPVMEFPAAHDRMVYLGLSDYFFNTAGLVYQEAGVLKMTLRDDMIPKESKFRLTTKFFGTFLPEVAKKFPNMKIQIHVSASTPPHLSVQPTGLTFYPAVDVQAFAVLPNSSLASLFLIGMHTTGSMEVSAESNRLVGELKLDRLLLELKHSNIGPFPVELLQDIMNYIVPILVLPRVNEKLQKGFPLPTPARVQLYNVVLQPHQNFLLFGADVVYK

SEQ ID NO: 1538 - protein, 261 aa, Homo sapiens
MTKIDSVAGINYGLVAPPATTAETLDVQMKGEFYSENHHNPPPFAPPVMEFPAAHDRMVYLGLSDYFFNTAGLVYQEAGVLKMTLRDDMIPKESKFRLTTKFFGTFLPEVAKKFPNMKIQIHVSASTPPHLSVQPTGLTFYPAVDVQAFAVLPNSSLASLFLIGMHTTGSMEVSAESNRLVGELKLDRLLLELKHSNIGPFPVELLQDIMNYIVPILVLPRVNEKLQKGFPLPTPARVQLYNVVLQPHQNFLLFGADVVYK

SEQ ID NO: 1539 - protein, 242 aa, Homo sapiens
MFQTGGLIVFYGLLAQTLPLNVNPALPLSPTGLAGSLTNALSNGLLSGGLLGILENLPLLDILKPGGGTSGGLLGGLLGKVTSVIPGLNNIIDIKVTDPQLLELGLVQSPDGHRLYVTIPLGIKLQVNTPLVGASLLRLAVKLDITAEILAVRDKQERIHLVLGDCTHSPGSLQISLLDGLGPLPIQGLLDSLTGILNKVLPELVQGNVCPLVNEVLRGLDITLVHDIVNMLIHGLQFVIKV

SEQ ID NO: 1540 - protein, 256 aa, Homo sapiens
MFQTGGLIVFYGLLAQTMAQFGGLPVPLDQTLPLNVNPALPLSPTGLAGSLTNALSNGLLSGGLLGILENLPLLDILKPGGGTSGGLLGGLLGKVTSVIPGLNNIIDIKVTDPQLLELGLVQSPDGHRLYVTIPLGIKLQVNTPLVGASLLRLAVKLDITAEILAVRDKQERIHLVLGDCTHSPGSLQISLLDGLGPLPIQGLLDSLTGILNKVLPELVQGNVCPLVNEVLRGLDITLVHDIVNMLIHGLQFVIKV

SEQ ID NO: 1541 - protein, 256 aa, Homo sapiens; identical to SEQ ID NO: 1540

SEQ ID NO: 1542 - protein, 256 aa, Homo sapiens; identical to SEQ ID NO: 1540

SEQ ID NO: 1543 - protein, 249 aa, Homo sapiens
MLQLWKLVLLCGVLTGTSESLLDNLGNDLSNVVDKLEPVLHEGLETVDNTLKGILEKLKVDLGVLQKSSAWQLAKQKAQEAEKLLNNVISKLLPTNTDIFGLKISNSLILDVKAEPIDDGKGLNLSFPVTANVTVAGPIIGQIINLKASLDLLTAVTIETDPQTHQPVAVLGECASDPTSISLSLLDKHSQIINKFVNSVINTLKSTVSSLLQKEICPLIRIFIHSLDVNVIQQVVDNPQHKTQLQTLI

SEQ ID NO: 1544 - protein, 249 aa, Homo sapiens; identical to SEQ ID NO: 1543

SEQ ID NO: 1545 - protein, 218 aa, Homo sapiens
MMCPLWRLLIFLGLLALPLAPHKQPWPGLAQAHRDNKSTLARIIAQGLIKHNAESRIQNIHFGDRLNASAQVAPGLVGWLISGRKHQQQQESRSFDNNIVKMCAHMSIVVEFWLEKDEFGRRDLVIGKCDAEPSSVHVAILTEAIPPKMNQFLYNLKENLQKVLPHMVESQVCPLIGEILGQLDVKLLKSLIEQEAAHEPTHHETSQPSACQAGESPS

SEQ ID NO: 1546 - protein, 254 aa, Homo sapiens
MMCPLWRLLIFLGLLALPLAPHKQPWPGLAQAHRDNKSTLARIIAQGLIKHNAESRIQNIHFGDRLNASAQVAPGLVGWLISGRKHQQQQESSINITNIQLDCGGIQISFHKEWFSANISLEFDLELRPSFDNNIVKMCAHMSIVVEFWLEKDEFGRRDLVIGKCDAEPSSVHVAILTEAIPPKMNQFLYNLKENLQKVLPHMVESQVCPLIGEILGQLDVKLLKSLIEQEAAHEPTHHETSQPSACQAGESPS

SEQ ID NO: 1547 - protein, 147 aa, Homo sapiens
MAGPWTFTLLCGLLAATLIQATLSPTAVLILGPKVIKEKLTQELKDHNATSILQQLPLLSAMREKPAGGIPVLGSLVNTVLKHIIWLKVITANILQLQVKPSANDQELLVKIPLDMVAGFNTPLVKTIVEFHMTTEAQATIRMDTSA

SEQ ID NO: 1548 - protein, 484 aa, Homo sapiens
MAGPWTFTLLCGLLAATLIQATLSPTAVLILGPKVIKEKLTQELKDHNATSILQQLPLLSAMREKPAGGIPVLGSLVNTVLKHIIWLKVITANILQLQVKPSANDQELLVKIPLDMVAGFNTPLVKTIVEFHMTTEAQATIRMDTSASGPTRLVLSDCATSHGSLRIQLLHKLSFLVNALAKQVMNLLVPSLPNLVKNQLCPVIEASFNGMYADLLQLVKVPISLSIDRLEFDLLYPAIKGDTIQLYLGAKLLDSQGKVTKWFNNSAASLTMPTLDNIPFSLIVSQDVVKAAVAAVLSPEEFMVLLDSVLPESAHRLKSSIGLINEKAADKLGSTQIVKILTQDTPEFFIDQGHAKVAQLIVLEVFPSSEALRPLFTLGIEASSEAQFYTKGDQLILNLNNISSDRIQLMNSGIGWFQPDVLKNIITEIIHSILLPNQNGKLRSGVPVSLVKALGFEAAESSLTKDALVLTPASLWKPSSPVSQ

SEQ ID NO: 1549 - protein, 458 aa, Homo sapiens
MAWASRLGLLLALLLPVVGASTPGTVVRLNKAALSYVSEIGKAPLQRALQVTVPHFLDWSGEALQPTRIRILNVHVPRLHLKFIAGFGVRLLAAANFTFKVFRAPEPLELTLPVELLADTRVTQSSIRTPVVSISACSLFSGHANEFDGSNSTSHALLVLVQKHIKAVLSNKLCLSISNLVQGVNVHLGTLIGLNPVGPESQIRYSMVSVPTVTSDYISLEVNAVLFLLGKPIILPTDATPFVLPRHVGTEGSMATVGLSQQLFDSALLLLQKAGALNLDITGQLRSDDNLLNTSALGRLIPEVARQFPEPMPVVLKVRLGATPVAMLHTNNATLRLQPFVEVLATASNSAFQSLFSLDVVVNLRLQLSVSKVKLQGTTSVLGDVQLTVASSNVGFIDTDQVRTLMGTVFEKPLLDHLNALLAMGIALPGVVNLHYVAPEIFVYEGYVVISSGLFYQS

SEQ ID NO: 1550 - protein, 476 aa, Homo sapiens
MQPVMLALWSLLLLWGLATPCQELLETVGTLARIDKDELGKAIQNSLVGEPILQNVLGSVTAVNRGLLGSGGLLGGGGLLGHGGVFGVVEELSGLKIEELTLPKVLLKLLPGFGVQLSLHTKVGMHCSGPLGGLLQLAAEVNVTSRVALAVSSRGTPILILKRCSTLLGHISLFSGLLPTPLFGVVEQMLFKVLPGLLCPVVDSVLGVVNELLGAVLGLVSLGALGSVEFSLATLPLISNQYIELDINPIVKSVAGDIIDFPKSRAPAKVPPKKDHTSQVMVPLYLFNTTFGLLQTNGALDMDITPELVPSDVPLTTTDLAALLPEALGKLPLHQQLLLFLRVREAPTVTLHNKKALVSLPANIHVLFYVPKGTPESLFELNSVMTVRAQLAPSATKLHISLSLERLSVKVASSFTHAFDGSRLEEWLSHVVGAVYAPKLNVALDVGIPLPKVLNINFSNSVLEIVENAVVLTVAS

SEQ ID NO: 1551 - protein, 614 aa, Homo sapiens
MWMAWCVAALSVVAVCGTSHETNTVLRVTKDVLSNAISGMLQQSDALHSALREVPLGVGDIPYNDFHVRGPPPVYTNGKKLDGIYQYGHIETNDNTAQLGGKYRYGEILESEGSIRDLRNSGYRSAENAYGGHRGLGRYRAAPVGRLHRRELQPGEIPPGVATGAVGPGGLLGTGGMLAADGILAGQGGLLGGGGLLGDGGLLGGGGVLGVLGEGGILSTVQGITGLRIVELTLPRVSVRLLPGVGVYLSLYTRVAINGKSLIGFLDIAVEVNITAKVRLTMDRTGYPRLVIERCDTLLGGIKVKLLRGLLPNLVDNLVNRVLADVLPDLLCPIVDVVLGLVNDQLGLVDSLIPLGILGSVQYTFSSLPLVTGEFLELDLNTLVGEAGGGLIDYPLGWPAVSPKPMPELPPMGDNTKSQLAMSANFLGSVLTLLQKQHALDLDITNGMFEELPPLTTATLGALIPKVFQQYPESCPLIIRIQVLNPPSVMLQKDKALVKVLATAEVMVSQPKDLETTICLIDVDTEFLASFSTEGDKLMIDAKLEKTSLNLRTSNVGNFDIGLMEVLVEKIFDLAFMPAMNAVLGSGVPLPKILNIDFSNADIDVLEDLLVLSA

SEQ ID NO: 1552 - protein, 44 aa, Homo sapiens
MWMAWCVAALSVVAVCGTSHETNTVLRVTKDVLSNGFSPISWTI

SEQ ID NO: 1553 - protein, 453 aa, Homo sapiens
MLRILCLALCSLLTGTRADPGALLRLGMDIMNQVQSAMDESHILEKMAAEAGKKQPGMKPIKGITNLKVKDVQLPVITLNFVPGVGIFQCVSTGMTVTGKSFMGGNMEIIVALNITATNRLLRDEETGLPVFKSEGCEVILVNVKTNLPSNMLPKMVNKFLDSTLHKVLPGLMCPAIDAVLVYVNRKWTNLSDPMPVGQMGTVKYVLMSAPATTASYIQLDFSPVVQQQKGKTIKLADAGEALTFPEGYAKGSSQLLLPATFLSAELALLQKSFHVNIQDTMIGELPPQTTKTLARFIPEVAVAYPKSKPLTTQIKIKKPPKVTMKTGKSLLHLHSTLEMFAARWRSKAPMSLFLLEVHFNLKVQYSVHENQLQMATSLDRLLSLSRKSSSIGNFNERELTGFITSYLEEAYIPVVNDVLQVGLPLPDFLAMNYNLAELDIVENALMLDLKLG

SEQ ID NO: 1554 - protein, 88 aa, Homo sapiens
MLRILCLALCSLLTGTRADPGALLRLGMDIMNREVQSAMDESHILEKMAAEAGKKQPGMKPIKGITNEQGHFEEEMRLESQISTLHAT

SEQ ID NO: 1555 - protein, 82 aa, Homo sapiens
MCTKTIPVLWGCFLLWNLYVSSSQTIYPGIKARITQRALDYGVQAGMKMIEQMLKEKKLPDLSGSESLEFLKVDYVNYNFSK

SEQ ID NO: 1556 - protein, 507 aa, Homo sapiens
MCTKTIPVLWGCFLLWNLYVSSSQTIYPGIKARITQRALDYGVQAGMKMIEQMLKEKKLPDLSGSESLEFLKVDYVNYNFSNIKISAFSFPNTSLAFVPGVGIKALTNHGTANISTDWGFESPLFQDTGGADLFLSGVYFTGIIILTRNDFGHPTLKLQDCYAQLSHAHVSFSGELSVLYNSFAEPMEKPILKNLNEMLCPIIASEVKALNANLSTLEVLTKIDNYTLLDYSLISSPEITENYLDLNLKGVFYPLENLTDPPFSPVPFVLPERSNSMLYIGIAEYFFKSASFAHFTAGVFNVTLSTEEISNHFVQNSQGLGNVLSRIAEIYILSQPFMVRIMATEPPIINLQPGNFTLDIPASIMMLTQPKNSTVETIVSMDFVASTSVGLVILGQRLVCSLSLNRFRLALPESNRSNIEVLRFENILSSILHFGVLPLANAKLQQGFPLSNPHKFLFVNSDIEVLEGFLLISTDLKYETSSKQQPSFHVWEGLNLISRQWRGKSAP

SEQ ID NO: 1557 - protein, 507 aa, Homo sapiens; identical to SEQ ID NO: 1556

SEQ ID NO: 1558 - protein, 264 aa, Homo sapiens
MEKPILKNLNEMLCPIIASEVKALNANLSTLEVLTKIDNYTLLDYSLISSPEITENYLDLNLKGVFYPLENLTDPPFSPVPFVLPERSNSMLYIGIAEYFFKSASFAHFTAGVFNVTLSTEEISNHFVQNSQGLGNVLSRVASTSVGLVILGQRLVCSLSLNRFRLALPESNRSNIEVLRFENILSSILHFGVLPLANAKLQQGFPLSNPHKFLFVNSDIEVLEGFLLISTDLKYETSSKQQPSFHVWEGLNLISRQWRGKSAP

SEQ ID NO: 1559 - protein, 64 aa, Homo sapiens
MAVSRHLTRGRKMAHVIAACLYLVCRTEGTPHMLLDLSDLLQVNVYVLGKTFLLLARELCINAP

SEQ ID NO: 1560 - protein, 562 aa, Homo sapiens
MAVSRHLTRGRKMAHVIAACLYLVCRTEGTPHMLLDLSDLLQVNVYVLGKTFLLLARELCINAPAIDPCLYIPRFAHLLEFGEKNHEVSMTALRLLQRMKRDWMHTGRRPSGLCGAALLVAARMHDFRRTVKEVISVVKVCESTLRKRLTEFEDTPTSQLTIDEFMKIDLEEECDPPSYTAGQRKLRMKQLEQVLSKKLEEVEGEISSYQDAIEIELENSRPKAKGGLASLAKDGSTEDTASSLCGEEDTEDEELEAAASHLNKDLYRELLGGAPGSSEAAGSPEWGGRPPALGSLLDPLPTAASLGISDSIRECISSQSSDPKDASGDGELDLSGIDDLEIDRYILNESEARVKAELWMRENAEYLREQREKEARIAKEKELGIYKEHKPKKSCKRREPIQASTAREAIEKMLEQKKISSKINYSVLRGLSSAGGGSPHREDAQPEHSASARKLSRRRTPASRSGADPVTSVGKRLRPLVSTQPAKKVATGEALLPSSPTLGAEPARPQAVLVESGPVSYHADEEADEEEPDEEDGEPCVSALQMMGSNDYGCDGDEDDGY

SEQ ID NO: 1561 - protein, 584 aa, Homo sapiens
MAVSRHLTRGRKMAHVIAACLYLVCRTEGTPHMLLDLSDLLQVNVYVLGKTFLLLARELCINAPAIDPCLYIPRFAHLLEFGEKNHEVSMTALRLLQRMKRDWMHTGRRPSGLCGAALLVAARMHDFRRTVKEVISVVKVCESTLRKRLTEFEDTPTSQLTIDEFMKIDLEEECDPPSYTAGQRKLRMKQLEQVLSKKLEEVEGEISSYQDAIEIELENSRPKAKGGLASLAKDGSTEDTASSLCGEEDTEDEELEAAASHLNKDLYRELLGGAPGSSEAAGSPEWGGRPPALGSLLDPLPTAASLGISDSIRECISSQSSDPKDASGDGELDLSGIDDLEIDRRDLSMPRCAKAKSQPHFPVLAQYILNESEARVKAELWMRENAEYLREQREKEARIAKEKELGIYKEHKPKKSCKRREPIQASTAREAIEKMLEQKKISSKINYSVLRGLSSAGGGSPHREDAQPEHSASARKLSRRRTPASRSGADPVTSVGKRLRPLVSTQPAKKVATGEALLPSSPTLGAEPARPQAVLVESGPVSYHADEEADEEEPDEEDGEPCVSALQMMGSNDYGCDGDEDDGY

SEQ ID NO: 1562 - protein, 439 aa, Homo sapiens
MHDFRRTVKEVISVVKVCESTLRKRLTEFEDTPTSQLTIDEFMKIDLEEECDPPSYTAGQRKLRMKQLEQVLSKKLEEVEGEISSYQDAIEIELENSRPKAKGGLASLAKDGSTEDTASSLCGEEDTEDEELEAAASHLNKDLYRELLGGAPGSSEAAGSPEWGGRPPALGSLLDPLPTAASLGISDSIRECISSQSSDPKDASGDGELDLSGIDDLEIDRYILNESEARVKAELWMRENAEYLREQREKEARIAKEKELGIYKEHKPKKSCKRREPIQASTAREAIEKMLEQKKISSKINYSVLRGLSSAGGGSPHREDAQPEHSASARKLSRRRTPASRSGADPVTSVGKRLRPLVSTQPAKKVATGEALLPSSPTLGAEPARPQAVLVESGPVSYHADEEADEEEPDEEDGEPCVSALQMMGSNDYGCDGDEDDGY

SEQ ID NO: 1563 - protein, 14 aa, Homo sapiens
MTALRLLQRMKRDW

SEQ ID NO: 1564 - protein, 45 aa, Homo sapiens
MTALRLLQRMKRDWMHTGRRPSGLCGAALLVAARMHDFRRTVKEV

SEQ ID NO: 1565 - protein, 134 aa, Homo sapiens [sequence omitted]

SEQ ID NO: 1566 - protein, 184 aa, Homo sapiens
MTALRLLQRMKRDWMHTGRRPSGLCGAALLVAARMHDFRRTVKEVISVVKVCESTLRKRLTEFEDTPTSQLTIDEFMKIDLEEECDPPSYTAGQRKLRMKQLEQVLSKKLEEVEGEISSYQDAIEIELENSPPSRREGRRRPESLPRPLRGKAPVPLVGGLSSGMAAPDVAEGASPCVLRRGWP

SEQ ID NO: 1567 - protein, 155 aa, Homo sapiens
MTALRLLQRMKRDWMHTGRRPSGLCGAALLVAARMHDFRRTVKEVISVVKVCESTLRKRLTEFEDTPTSQLTIDEFMKIDLEEECDPPSYTAGQRKLRMKQLEQVLSKKLEEVEGEISSYQDAIEIELENSRPKAKGGLASLAKDGSTEDTASSL

SEQ ID NO: 1568 - protein, 234 aa, Homo sapiens
MTALRLLQRMKRDWMHTGRRPSGLCGAALLVAARMHDFRRTVKEVISVVKVCESTLRKRLTEFEDTPTSQLTIDEFMKIDLEEECDPPSYTAGQRKLRMKQLEQVLSKKLEEVEGEISSYQDAIEIELENSRPKAKGGLASLAKDGSTEDTASSLCGEEDTEDEELEAAASHLNKDLYRELLGGAPGSSEAAGSPEWGGRPPALGSLLDPLPTAASLGISDSIRECISSQSSDP

SEQ ID NO: 1569 - protein, 473 aa, Homo sapiens
MTALRLLQRMKRDWMHTGRRPSGLCGAALLVAARMHDFRRTVKEVISVVKVCESTLRKRLTEFEDTPTSQLTIDEFMKIDLEEECDPPSYTAGQRKLRMKQLEQVLSKKLEEVEGEISSYQDAIEIELENSRPKAKGGLASLAKDGSTEDTASSLCGEEDTEDEELEAAASHLNKDLYRELLGGAPGSSEAAGSPEWGGRPPALGSLLDPLPTAASLGISDSIRECISSQSSDPKDASGDGELDLSGIDDLEIDRYILNESEARVKAELWMRENAEYLREQREKEARIAKEKELGIYKEHKPKKSCKRREPIQASTAREAIEKMLEQKKISSKINYSVLRGLSSAGGGSPHREDAQPEHSASARKLSRRRTPASRSGADPVTSVGKRLRPLVSTQPAKKVATGEALLPSSPTLGAEPARPQAVLVESGPVSYHADEEADEEEPDEEDGEPCVSALQMMGSNDYGCDGDEDDGY

SEQ ID NO: 1570 - protein, 161 aa, Homo sapiens
MTALRLLQRMKRDWMHTGRRPSGLCGAALLVAARMHDFRRTVKEVISVVKVCESTLRKRLTEFEDTPTSQLTIDEFMKIDLEEECDPPSYTAGQRKLRMKQLEQVLSKKLEEVEGEISSYQDAIEIELENSRPKAPHRGGRADGGPRASPGLFVGRPQYHS

SEQ ID NO: 1571 - protein, 208 aa, Homo sapiens
MTGRVCRGCGGTDIELDAARGDAVCTACGSVLEDNIIVSEVQFVESSGGGSSAVGQFVSLDGAGKTPTLGGGFHVNLGKESRAQTLQNGRRHIHHLGNQLQLNQHCLDTAFNFFKMAVSRHLTRGRKMAHVIAACLYLVCRTEGTPHMLLDLSDLLQVDSLRPASFPTWGCDLGVVTRVVTGVYPRCLHASQWPVCAACPVRKFWSVG

SEQ ID NO: 1572 - protein, 677 aa, Homo sapiens
MTGRVCRGCGGTDIELDAARGDAVCTACGSVLEDNIIVSEVQFVESSGGGSSAVGQFVSLDGAGKTPTLGGGFHVNLGKESRAQTLQNGRRHIHHLGNQLQLNQHCLDTAFNFFKMAVSRHLTRGRKMAHVIAACLYLVCRTEGTPHMLLDLSDLLQVNVYVLGKTFLLLARELCINAPAIDPCLYIPRFAHLLEFGEKNHEVSMTALRLLQRMKRDWMHTGRRPSGLCGAALLVAARMHDFRRTVKEVISVVKVCESTLRKRLTEFEDTPTSQLTIDEFMKIDLEEECDPPSYTAGQRKLRMKQLEQVLSKKLEEVEGEISSYQDAIEIELENSRPKAKGGLASLAKDGSTEDTASSLCGEEDTEDEELEAAASHLNKDLYRELLGGAPGSSEAAGSPEWGGRPPALGSLLDPLPTAASLGISDSIRECISSQSSDPKDASGDGELDLSGIDDLEIDRYILNESEARVKAELWMRENAEYLREQREKEARIAKEKELGIYKEHKPKKSCKRREPIQASTAREAIEKMLEQKKISSKINYSVLRGLSSAGGGSPHREDAQPEHSASARKLSRRRTPASRSGADPVTSVGKRLRPLVSTQPAKKVATGEALLPSSPTLGAEPARPQAVLVESGPVSYHADEEADEEEPDEEDGEPCVSALQMMGSNDYGCDGDEDDGY

SEQ ID NO: 1573 - protein, 650 aa, Homo sapiens
MTGRVCRGCGGTDIELDAARGDAVCTACGSVLEDNIIVSEVQFVESSGGGSSAVGQFVSLDGRRHIHHLGNQLQLNQHCLDTAFNFFKMAVSRHLTRGRKMAHVIAACLYLVCRTEGTPHMLLDLSDLLQVNVYVLGKTFLLLARELCINAPAIDPCLYIPRFAHLLEFGEKNHEVSMTALRLLQRMKRDWMHTGRRPSGLCGAALLVAARMHDFRRTVKEVISVVKVCESTLRKRLTEFEDTPTSQLTIDEFMKIDLEEECDPPSYTAGQRKLRMKQLEQVLSKKLEEVEGEISSYQDAIEIELENSRPKAKGGLASLAKDGSTEDTASSLCGEEDTEDEELEAAASHLNKDLYRELLGGAPGSSEAAGSPEWGGRPPALGSLLDPLPTAASLGISDSIRECISSQSSDPKDASGDGELDLSGIDDLEIDRYILNESEARVKAELWMRENAEYLREQREKEARIAKEKELGIYKEHKPKKSCKRREPIQASTAREAIEKMLEQKKISSKINYSVLRGLSSAGGGSPHREDAQPEHSASARKLSRRRTPASRSGADPVTSVGKRLRPLVSTQPAKKVATGEALLPSSPTLGAEPARPQAVLVESGPVSYHADEEADEEEPDEEDGEPCVSALQMMGSNDYGCDGDEDDGY

SEQ ID NO: 1574 - protein, 185 aa, Homo sapiens
  VARIANT 1: note = misc_feature - Xaa can be any naturally occurring amino acid
XGQFVSLDGAGKTPTLGGGFHVNLGKESRAQTLQNDPCLYIPRFAHLLEFGEKNHEVSMTALRLLQRMKRDWMHTGRRPSGLCGAALLVAARMHDFRRTVKEVISVVKVCESTLRKRLTEFEDTPTSQLTIDEFMKIDLEEECDPPSYTAGQRKLRMKQLEQVLSKKLEEVEGEISSYQDAIEIE

SEQ ID NO: 1575 - protein, 761 aa, Homo sapiens
MNWRFVELLYFLFIWGRISVQPSHQEPAGTDQHVSKEFDWLISDRGPFHHSRSYLSFVERHRQGFTTRYKIYREFARWKVRNTAIERRDLVRHPVPLMPEFQRSIRLLGRRPTTQQFIDTIIKKYGTHLLISATLGGEEALTMYMDKSRLDRKSGNATQSVEALHQLASSYFVDRDGTMRRLHEIQISTGAIKVTETRTGPLGCNSYDNLDSVSSVLLQSTESKLHLQGLQIIFPQYLQEKFVQSALSYIMCNGEGEYLCQNSQCRCQCAEEFPQCNCPITDIQIMEYTLANMAKSWAEAYKDLENSDEFKSFMKRLPSNHFLTIGSIHQHWGNDWDLQNRYKLLQSATEAQRQKIQRTARKLFGLSVRCRHNPNHQLPRERTIQQWLARVQSLLYCNENGFWGTFLESQRSCVCHGSTTLCQRPIPCVIGGNNSCAMCSLANISLCGSCNKGYKLYRGRCEPQNVDSERSEQFISFETDLDFQDLELKYLLQKMDSRLYVHTTFISNEIRLDTFFDPRWRKRMSLTLKSNKNRMDFIHMVIGMSMRICQMRNSSLDPMFFVYVNPFSGSHSEGWNMPFGEFGYPRWEKIRLQNSQCYNWTLLLGNRWKTFFETVHIYLRSRTRLPTLLRNETGQGPVDLSDPSKRQFYIKISDVQVFGYSLRFNADLLRSAVQQVNQSYTQGGQFYSSSSVMLLLLDIRDRINRLAPPVAPGKPQLDLFSCMLKHRLKLTNSEIIRVNHALDLYNTEILKQSDQMTAKLC

SEQ ID NO: 1576 - protein, 320 aa, Homo sapiens
MNWRFVELLYFLFIWGRISVQPSHQEPAGTDQHVSKEFDWLISDRGPFHHSRSYLSFVERHRQGFTTRYKIYREFARWKVRNTAIERRDLVRHPVPLMPEFQRSIRLLGRRPTTQQFIDTIIKKYGTHLLISATLGGEEALTMYMDKSRLDRKSGNATQSVEALHQLASSYFVDRDGTMRRLHEIQISTGAIKVTETRTGPLGCNSYDNLDSVSSVLLQSTESKLHLQGLQIIFPQYLQEKFVQSALSYIMCNGEGEYLCQNSQCRCQCAEEFPQCNCPITDIQIMEYTLANMAKSWAEAYKDLENSGRESHSVPLHEWP

SEQ ID NO: 1577 - protein, 783 aa, Homo sapiens
MRWQCGTRFRGLRPAVAPWTALLALGLPGWVLAVSATAAAVVPEQHASVAGQHPLDWLLTDRGPFHRAQEYADFMERYRQGFTTRYRIYREFARWKVNNLALERKDFFSLPLPLAPEFIRNIRLLGRRPNLQQVTENLIKKYGTHFLLSATLGGEESLTIFVDKQKLGRKTETTGGASIIGGSGNSTAVSLETLHQLAASYFIDRESTLRRLHHIQIATGAIKVTETRTGPLGCSNYDNLDSVSSVLVQSPENKVQLLGLQVLLPEYLRERFVAAALSYITCSSEGELVCKENDCWCKCSPTFPECNCPDADIQAMEDSLLQIQDSWATHNRQFEESEEFQALLKRLPDDRFLNSTAISQFWAMDTSLQHRYQQLGAGLKVLFKKTHRILRRLFNLCKRCHRQPRFRLPKERSLSYWWNRIQSLLYCGESTFPGTFLEQSHSCTCPYDQSSCQGPIPCALGEGPACAHCAPDNSTRCGSCNPGYVLAQGLCRPEVAESLENFLGLETDLQDLELKYLLQKQDSRIEVHSIFISNDMRLGSWFDPSWRKRMLLTLKSNKYKPGLVHVMLALSLQICLTKNSTLEPVMAIYVNPFGGSHSESWFMPVNEGSFPDWERTNVDAAAQCQNWTITLGNRWKTFFETVHVYLRSRIKSLDDSSNETIYYEPLEMTDPSKNLGYMKINTLQVFGYSLPFDPDAIRDLILQLDYPYTQGSQDSALLQLIELRDRVNQLSPPGKVRLDLFSCLLRHRLKLANNEVGRIQSSLRAFNSKLPNPVEYETGKLCS

SEQ ID NO: 1578 - protein, 28 aa, Homo sapiens
MIWRSRAGAELFSLMALWEWIALSLHCW

SEQ ID NO: 1579 - protein, 158 aa, Homo sapiens
MIWRSRAGAELFSLMALWEWIALSLHCWVLAVAAVSDQHATSPFDWLLSDKGPFHRSQEYTDFVDRSRQGFSTRYKIYREFGRWKVNNLAVERRNFLGSPLPLAPEFFRNIRLLGRRPTLQQITENLIKKYGTHFLLSATLGGEESLTIFVDKRKLSK

SEQ ID NO: 1580 - protein, 766 aa, Homo sapiens
MIWRSRAGAELFSLMALWEWIALSLHCWVLAVAAVSDQHATSPFDWLLSDKGPFHRSQEYTDFVDRSRQGFSTRYKIYREFGRWKVNNLAVERRNFLGSPLPLAPEFFRNIRLLGRRPTLQQITENLIKKYGTHFLLSATLGGEESLTIFVDKRKLSKRAEGSDSTTNSSSVTLETLHQLAASYFIDRDSTLRRLHHIQIASTAIKVTETRTGPLGCSNYDNLDSVSSVLVQSPENKIQLQGLQVLLPDYLQERFVQAALSYIACNSEGEFICKENDCWCHCGPKFPECNCPSMDIQAMEENLLRITETWKAYNSDFEESDEFKLFMKRLPMNYFLNTSTIMHLWTMDSNFQRRYEQLENSMKQLFLKAQKIVHKLFSLSKRCHKQPLISLPRQRTSTYWLTRIQSFLYCNENGLLGSFSEETHSCTCPNDQVVCTAFLPCTVGDASACLTCAPDNRTRCGTCNTGYMLSQGLCKPEVAESTDHYIGFETDLQDLEMKYLLQKTDRRIEVHAIFISNDMRLNSWFDPSWRKRMLLTLKSNKYKSSLVHMILGLSLQICLTKNSTLEPVLAVYVNPFGGSHSESWFMPVNENSFPDWERTKLDLPLQCYNWTLTLGNKWKTFFETVHIYLRSRIKSNGPNGNESIYYEPLEFIDPSRNLGYMKINNIQVFGYSMHFDPEAIRDLILQLDYPYTQGSQDSALLQLLEIRDRVNKLSPPGQRRLDLFSCLLRHRLKLSTSEVVRIQSALQAFNAKLPNTMDYDTTKLCS

SEQ ID NO: 1581 - protein, 385 aa, Homo sapiens
MAAALFVLLGFALLGTHGASGAAGFVQAPLSQQRWVGGSVELHCEAVGSPVPEIQWWFEGQGPNDTCSQLWDGARLDRVHIHATYHQHAASTISIDTLVEEDTGTYECRASNDPDRNHLTRAPRVKWVRAQAVVLVLEPGTVFTTVEDLGSKILLTCSLNDSATEVTGHRWLKGGVVLKEDALPGQKTEFKVDSDDQWGEYSCVFLPEPMGTANIQLHGPPRVKAVKSSEHINEGETAMLVCKSESVPPVTDWAWYKITDSEDKALMNGSESRFFVSSSQGRSELHIENLNMEADPGQYRCNGTSSKGSDQAIITLRVRSHLAALWPFLGIVAEVLVLVTIIFIYEKRRKPEDVLDDDDAGSAPLKSSGQHQNDKGKNVRQRNSS

SEQ ID NO: 1582 - protein, 55 aa, Homo sapiens
MAAALFVLLGFALLGTHGASGAAGTVFTTVEDLGSKILLTCSLNDSATEQRAAPE

SEQ ID NO: 1583 - protein, 132 aa, Homo sapiens
MAAALFVLLGFALLGTHGASGAAGTVFTTVEDLGSKILLTCSLNDSATEVTGHRWLKGGVVLKEDALPGQKTEFKAPTRPSSRSACAATWPPSGPSWASWLRCWCWSPSSSSTRSAGSPRTSWMMTTPALHP

SEQ ID NO: 1584 - protein, 269 aa, Homo sapiens
MAAALFVLLGFALLGTHGASGAAGTVFTTVEDLGSKILLTCSLNDSATEVTGHRWLKGGVVLKEDALPGQKTEFKVDSDDQWGEYSCVFLPEPMGTANIQLHGPPRVKAVKSSEHINEGETAMLVCKSESVPPVTDWAWYKITDSEDKALMNGSESRFFVSSSQGRSELHIENLNMEADPGQYRCNGTSSKGSDQAIITLRVRSHLAALWPFLGIVAEVLVLVTIIFIYEKRRKPEDVLDDDDAGSAPLKSSGQHQNDKGKNVRQRNSS

SEQ ID NO: 1585 - protein, 161 aa, Homo sapiens [sequence omitted]

SEQ ID NO: 1586 - protein, 189 aa, Homo sapiens
MAAALFVLLGFALLGTHGASGAGPPRVKAVKSSEHINEGETAMLVCKSESVPPVTDWAWYKITDSEDKALMNGSESRFFVSSSQGRSELHIENLNMEADPGQYRCNGTSSKGSDQAIITLRVRSHLAALWPFLGIVAEVLVLVTIIFIYEKRRKPEDVLDDDDAGSAPLKSSGQHQNDKGKNVRQRNSS

SEQ ID NO: 1587 - protein, 221 aa, Homo sapiens
MAAALFVLLGFALLGTHGASGAVFTTVEDLGSKILLTCSLNDSATEVTGHRWLKGGVVLKEDALPGQKTEFKVDSDDQWGEYSCVFLPEPMGTANIQLHGPPRVKAVKSSEHINEGETAMLVCKSESVPPVTDWAWYKITDSEDKALMNGSESRFFVSSSQGRSELHIENLNMEADPGQYRCNGTSSKGSDQAIITLRVRSHLAALWPFLGIVAEVLVLVT

SEQ ID NO: 1588 - protein, 52 aa, Homo sapiens
MGTANIQLHGPPRVKAVKSSEHINEGETAMLVCKSESVPPVTDWAWYKITDS

SEQ ID NO: 1589 - protein, 84 aa, Homo sapiens
MGTANIQLHGPPRVKAVKSSEHINEGETAMLVCKSESVPPVTDWAWYKITDSEDKALMNGSESRFFVSSSQGRSELHIENLNME

SEQ ID NO: 1590 - protein, 176 aa, Homo sapiens
MGTANIQLHGPPRVKAVKSSEHINEGETAMLVCKSESVPPVTDWAWYKITDSEDKALMNGSESRFFVSSSQGRSELHIENLNMEADPGQYRCNGTSSKGSDQAIITLRVRSHLAALWPFLGIVAEVLVLVTIIFIYEKRRKPEDVLDDDDAGSAPLKSSGQHQNDKGKNVRQRNSS

SEQ ID NO: 1591 - protein, 205 aa, Homo sapiens
MKQSDASPQERVDSDDQWGEYSCVFLPEPMGTANIQLHGPPRVKAVKSSEHINEGETAMLVCKSESVPPVTDWAWYKITDSEDKALMNGSESRFFVSSSQGRSELHIENLNMEADPGQYRCNGTSSKGSDQAIITLRVRSHLAALWPFLGIVAEVLVLVTIIFIYEKRRKPEDVLDDDDAGSAPLKSSGQHQNDKGKNVRQRNSS

SEQ ID NO: 1592 - protein, 132 aa, Homo sapiens
MGSLMLLFVETTRNSSACIFPVILNELSSTVETITHFPEVTDGECVFPFHYKNGTYYDCIKSKARHKWCSLNKTYEGYWKFCSAEDFANCVFPFWYRRLIYWECTDDGEAFGKKWCSLTKNFNKDRIWKYCE

SEQ ID NO: 1593 - protein, 155 aa, Homo sapiens
GLDYQSCPTSEDCENNPVDSFWKRASIQYSKDSSGVIHVMLNGSEPTGAYPIKGFFADYEIPNLQKEKITRIEIWVMHEIGGPNVESCGEGSMKVLEKRLKDMGFQYSCINDYRPVKLLQCVDHSTHPDCALKSPKRLCGTLGVRPRAEPYNRRF

SEQ ID NO: 1594 - protein, 318 aa, Homo sapiens
MAAQGCAASRLLQLLLQLLLLLLLLAAGGARARWRGEGTSAHLRDIFLGRCAEYRALLSPEQRNKNCTAIWEAFKVALDKDPCSVLPSDYDLFINLSRHSIPRDKSLFWENSHLLVNSFADNTRRFMPLSDVLYGRVADFLSWCRQKNDSGLDYQSCPTSEDCENNPVDSFWKRASIQYSKDSSGVIHVMLNGSEPTGAYPIKGFFADYEIPNLQKEKITRIEIWVMHEIGGPNVESCGEGSMKVLEKRLKDMGFQYSCINDYRPVKLLQCVDHSTHPDCALKSAAAATQRKAPSLYTEQRAGLIIPLFLVLASRTQL

SEQ ID NO: 1595 - protein, 333 aa, Homo sapiens
MAAQGCAASRLLQLLLQLLLLLLLLAAGGARARWRGEGTSAHLRDIFLGRCAEYRALLSPEQRQIRNSREPPVLHTTQNKNCTAIWEAFKVALDKDPCSVLPSDYDLFINLSRHSIPRDKSLFWENSHLLVNSFADNTRRFMPLSDVLYGRVADFLSWCRQKNDSGLDYQSCPTSEDCENNPVDSFWKRASIQYSKDSSGVIHVMLNGSEPTGAYPIKGFFADYEIPNLQKEKITRIEIWVMHEIGGPNVESCGEGSMKVLEKRLKDMGFQYSCINDYRPVKLLQCVDHSTHPDCALKSAAAATQRKAPSLYTEQRAGLIIPLFLVLASRTQL

SEQ ID NO: 1596 - protein, 97 aa, Homo sapiens
  VARIANT 1: note = misc_feature - Xaa can be any naturally occurring amino acid
XSEPTGAYPIKGFFADYEIPNLQKEKITRIEIWVMHEIGGPNVESCGEGSMKVLEKRLKDMGFQYSCINDYRPVKLLQCVDHSTHPDCALKSKLWEP

SEQ ID NO: 1597 - protein, 186 aa, Homo sapiens
  VARIANT 1: note = misc_feature - Xaa can be any naturally occurring amino acid
XSLFWENSHLLVNSFADNTRRFMPLSDVLYGRVADFLSWCRQKNDSGLDYQSCPTSEDCENNPVDSFWKRASIQYSKDSSGVIHVMLNGSEPTGAYPIKGFFADYEIPNLQKEKITRIEIWVMHEIGGPNVESCGEGSMKVLEKRLKDMGFQYSCINDYRPVKLLQCVDHSTHPDCALKSDGVSPC

SEQ ID NO: 1598 - protein, 478 aa, Homo sapiens
MPRRGYSKPGSWGSFWAMLTLVGLVTHAAQRADVGGEAAGTSINHSQAVLQRLQELLRQGNASDVVLRVQAAGTDEVRVFHAHRLLLGLHSELFLELLSNQSEAVLQEPQDCAAVFDKFIRYLYCGELTVLLTQAIPLHRLATKYGVSSLQRGVADYMRAHLAGGAGPAVGWYHYAVGTGDEALRESCLQFLAWNLSAVAASTEWGAVSPELLWQLLQRSDLVLQDELELFHALEAWLGRARPPPAVAERALRAIRYPMIPPAQLFQLQARSAALARHGPAVADLLLQAYQFHAASPLHYAKFFDVNGSAFLPRNYLAPAWGAPWVINNPARDDRSTSFQTQLGPSGHDAGRRVTWNVLFSPRWLPVSLRPVYADAAGTALPAARPEDGRPRLVVTPASSGGDAAGVSFQKTVLVGARQQGRLLVRHAYSFHQSSEEAGDFLAHADLQRRNSEYLVENALHLHLIVKPVYHTLIRTPK

SEQ ID NO: 1599 - protein, 179 aa, Homo sapiens
MAHAHIQGGRRAKSRFVVCIMSGARSKLALFLCGCYVVALGAHTGEESVADHHEAEYYVAAVYEHPSILSLNPLALISRQEALELMNQNLDIYEQQVMTAAQKDVQIIVFPEDGIHGFNFTRTSIYPFLDFMPSPQVVRWNPCLEPHRFNDTEVIPAFFLSRLRVHRGDLSQGPEAVTC

SEQ ID NO: 1600 - protein, 543 aa, Homo sapiens
MAHAHIQGGRRAKSRFVVCIMSGARSKLALFLCGCYVVALGAHTGEESVADHHEAEYYVAAVYEHPSILSLNPLALISRQEALELMNQNLDIYEQQVMTAAQKDVQIIVFPEDGIHGFNFTRTSIYPFLDFMPSPQVVRWNPCLEPHRFNDTEVLQRLSCMAIRGDMFLVANLGTKEPCHSSDPRCPKDGRYQFNTNVVFSNNGTLVDRYRKHNLYFEAAFDVPLKVDLITFDTPFAGRFGIFTCFDILFFDPAIRVLRDYKVKHVVYPTAWMNQLPLLAAIEIQKAFAVAFGINVLAANVHHPVLGMTGSGIHTPLESFWYHDMENPKSHLIIAQVAKNPVGLIGAENATGETDPSHSKFLKILSGDPYCEKDAQEVHCDEATKWNVNAPPTFHSEMMYDNFTLVPVWGKEGYLHVCSNGLCCYLLYERPTLSKELYALGVFDGLHTVHGTYYIQVCALVRCGGLGFDTCGQEITEATGIFEFHLWGNFSTSYIFPLFLTSGMTLEVPDQLGWENDHYFLRKSRLSSGLVTAALYGRLYERD

SEQ ID NO: 1601 - protein, 545 aa, Homo sapiens
MARKETQLIIKMNHLARFVVCIMSGARSKLALFLCGCYVVALGAHTGEESVADHHEAEYYVAAVYEHPSILSLNPLALISRQEALELMNQNLDIYEQQVMTAAQKDVQIIVFPEDGIHGFNFTRTSIYPFLDFMPSPQVVRWNPCLEPHRFNDTEVLQRLSCMAIRGDMFLVANLGTKEPCHSSDPRCPKDGRYQFNTNVVFSNNGTLVDRYRKHNLYFEAAFDVPLKVDLITFDTPFAGRFGIFTCFDILFFDPAIRVLRDYKVKHVVYPTAWMNQLPLLAAIEIQKAFAVAFGINVLAANVHHPVLGMTGSGIHTPLESFWYHDMENPKSHLIIAQVAKNPVGLIGAENATGETDPSHSKFLKILSGDPYCEKDAQEVHCDEATKWNVNAPPTFHSEMMYDNFTLVPVWGKEGYLHVCSNGLCCYLLYERPTLSKELYALGVFDGLHTVHGTYYIQVCALVRCGGLGFDTCGQEITEATGIFEFHLWGNFSTSYIFPLFLTSGMTLEVPDQLGWENDHYFLRKSRLSSGLVTAALYGRLYERD

SEQ ID NO: 1602 - protein, 545 aa, Homo sapiens
MPEGGGTSRRLLPMQSRFVVCIMSGARSKLALFLCGCYVVALGAHTGEESVADHHEAEYYVAAVYEHPSILSLNPLALISRQEALELMNQNLDIYEQQVMTAAQKDVQIIVFPEDGIHGFNFTRTSIYPFLDFMPSPQVVRWNPCLEPHRFNDTEVLQRLSCMAIRGDMFLVANLGTKEPCHSSDPRCPKDGRYQFNTNVVFSNNGTLVDRYRKHNLYFEAAFDVPLKVDLITFDTPFAGRFGIFTCFDILFFDPAIRVLRDYKVKHVVYPTAWMNQLPLLAAIEIQKAFAVAFGINVLAANVHHPVLGMTGSGIHTPLESFWYHDMENPKSHLIIAQVAKNPVGLIGAENATGETDPSHSKFLKILSGDPYCEKDAQEVHCDEATKWNVNAPPTFHSEMMYDNFTLVPVWGKEGYLHVCSNGLCCYLLYERPTLSKELYALGVFDGLHTVHGTYYIQVCALVRCGGLGFDTCGQEITEATGIFEFHLWGNFSTSYIFPLFLTSGMTLEVPDQLGWENDHYFLRKSRLSSGLVTAALYGRLYERD

SEQ ID NO: 1603 - protein, 159 aa, Homo sapiens
MSGARSKLALFLCGCYVVALGAHTGEESVADHHEAEYYVAAVYEHPSILSLNPLALISRQEALELMNQNLDIYEQQVMTAAQKDVQIIVFPEDGIHGFNFTRTSIYPFLDFMPSPQVVRWNPCLEPHRFNDTEVIPAFFLSRLRVHRGDLSQGPEAVTC

SEQ ID NO: 1604 - protein, 251 aa, Homo sapiens
MSGARSKLALFLCGCYVVALGAHTGEESVADHHEAEYYVAAVYEHPSILSLNPLALISRQEALELMNQNLDIYEQQVMTAAQKDVQIIVFPEDGIHGFNFTRTSIYPFLDFMPSPQVVRWNPCLEPHRFNDTEVLQRLSCMAIRGDMFLVANLGTKEPCHSSDPRCPKDGRYQFNTNVVFSNNGTLVDRYRKHNLYFEAAFDVPLKVDLITFDTPFAGRFGIFTCFDILFFDPAIRVLRDYKVKHVVYPTA

SEQ ID NO: 1605 - protein, 523 aa, Homo sapiens
MSGARSKLALFLCGCYVVALGAHTGEESVADHHEAEYYVAAVYEHPSILSLNPLALISRQEALELMNQNLDIYEQQVMTAAQKDVQIIVFPEDGIHGFNFTRTSIYPFLDFMPSPQVVRWNPCLEPHRFNDTEVLQRLSCMAIRGDMFLVANLGTKEPCHSSDPRCPKDGRYQFNTNVVFSNNGTLVDRYRKHNLYFEAAFDVPLKVDLITFDTPFAGRFGIFTCFDILFFDPAIRVLRDYKVKHVVYPTAWMNQLPLLAAIEIQKAFAVAFGINVLAANVHHPVLGMTGSGIHTPLESFWYHDMENPKSHLIIAQVAKNPVGLIGAENATGETDPSHSKFLKILSGDPYCEKDAQEVHCDEATKWNVNAPPTFHSEMMYDNFTLVPVWGKEGYLHVCSNGLCCYLLYERPTLSKELYALGVFDGLHTVHGTYYIQVCALVRCGGLGFDTCGQEITEATGIFEFHLWGNFSTSYIFPLFLTSGMTLEVPDQLGWENDHYFLRKSRLSSGLVTAALYGRLYERD

SEQ ID NO: 1606 - protein, 523 aa, Homo sapiens; identical to SEQ ID NO: 1605

SEQ ID NO: 1607 - protein, 523 aa, Homo sapiens; identical to SEQ ID NO: 1605

SEQ ID NO: 1608 - protein, 523 aa, Homo sapiens; identical to SEQ ID NO: 1605

SEQ ID NO: 1609 - protein, 56 aa, Homo sapiens
FIIFMAVSICCIKKLQREKKILSGEKKVEQEEKEIAQQLQEELRWRRTFLHAGECL

SEQ ID NO: 1610 - protein, 96 aa, Homo sapiens
MEPAAALHFSLPASLLLLLLLLLLSLCALVSAQFTVVGPANPILAMVGENTTLRCHLSPEKNAEDMEVRWFRSQFSPAVFVYKGGRERTEEQMEEY

SEQ ID NO: 1611 - protein, 256 aa, Homo sapiens
MEPAAALHFSLPASLLLLLLLLLLSLCALVSAQFTVVGPANPILAMVGENTTLRCHLSPEKNAEDMEVRWFRSQFSPAVFVYKGGRERTEEQMEEYRGRITFVSKDINRGSVALVIHNVTAQENGIYRCYFQEGRSYDEAILRLVVAESFMPSASPWMVALAVILTASPWMVSMTVILAVFIIFMAVSICCIKKLQREKKILSGEKKVEQEEKEIAQQLQEELRWRRTFLHAGYELPGIRGPSWKRPLHGEPPSAF

SEQ ID NO: 1612 - protein, 239 aa, Homo sapiens
MEPAAALHFSLPASLLLLLLLLLLSLCALVSAQFTVVGPANPILAMVGENTTLRCHLSPEKNAEDMEVRWFRSQFSPAVFVYKGGRERTEEQMEEYRGRITFVSKDINRGSVALVIHNVTAQENGIYRCYFQEGRSYDEAILRLVVAGLGSKPLIEIKAQEDGSIWLECISGGWYPEPLTVWRDPYGEVVPALKEVSIADADGLFMVTTAVIIRDKYVRNVSCSVNNTLLGQEKETVIF

SEQ ID NO: 1613 - protein, 523 aa, Homo sapiens
MEPAAALHFSLPASLLLLLLLLLLSLCALVSAQFTVVGPANPILAMVGENTTLRCHLSPEKNAEDMEVRWFRSQFSPAVFVYKGGRERTEEQMEEYRGRITFVSKDINRGSVALVIHNVTAQENGIYRCYFQEGRSYDEAILRLVVAGLGSKPLIEIKAQEDGSIWLECISGGWYPEPLTVWRDPYGEVVPALKEVSIADADGLFMVTTAVIIRDKYVRNVSCSVNNTLLGQEKETVIFIPESFMPSASPWMVALAVILTASPWMVSMTVILAVFIIFMAVSICCIKKLQREKKILSGEKKVEQEEKEIAQQLQEELRWRRTFLHAADVVLDPDTAHPELFLSEDRRSVRRGPYRQRVPDNPERFDSQPCVLGWESFASGKHYWEVEVENVMVWTVGVCRHSVERKGEVLLIPQNGFWTLEMFGNQYRALSSPERILPLKESLCRVGVFLDYEAGDVSFYNMRDRSHIYTCPRSAFTVPVRPFFRLGSDDSPIFICPALTGASGVMVPEEGLKLHRVGTHQSL

SEQ ID NO: 1614 - protein, 336 aa, Homo sapiens
MEPAAALHFSLPASLLLLLLLLLLSLCALVSAQFTVVGPANPILAMVGENTTLRCHLSPEKNAEDMEVRWFRSQFSPAVFVYKGGRERTEEQMEEYRGRITFVSKDINRGSVALVIHNVTAQENGIYRCYFQEGRSYDEAILRLVVAGLGSKPLIEIKAQEDGSIWLECISGGWYPEPLTVWRDPYGEVVPALKEVSIADADGLFMVTTAVIIRDKYVRNVSCSVNNTLLGQEKETVIFIPESFMPSASPWMVALAVILTASPWMVSMTVILAVFIIFMAVSICCIKKLQREKKILSGEKKVEQEEKEIAQQLQEELRWRRTFLHADVNLTGLRNT

SEQ ID NO: 1615 - protein, 523 aa, Homo sapiens; identical to SEQ ID NO: 1613

SEQ ID NO: 1616 - protein, 313 aa, Homo sapiens
MEPAAALHFSLPASLLLLLLLLLLSLCALVSESFMPSASPWMVALAVILTASPWMVSMTVILAVFIIFMAVSICCIKKLQREKKILSGEKKVEQEEKEIAQQLQEELRWRRTFLHAADVVLDPDTAHPELFLSEDRRSVRRGPYRQRVPDNPERFDSQPCVLGWESFASGKHYWEVEVENVMVWTVGVCRHSVERKGEVLLIPQNGFWTLEMFGNQYRALSSPERILPLKESLCRVGVFLDYEAGDVSFYNMRDRSHIYTCPRSAFTVPVRPFFRLGSDDSPIFICPALTGASGVMVPEEGLKLHRVGTHQSL

SEQ ID NO: 1617 - protein, 110 aa, Homo sapiens
MEPAAALHFSLPASLLLLLLLLLLSLCALVSGLGSKPLIEIKAQEDGSIWLECISGGWYPEPLTVWRDPYGEVVPALKEVSIADADGLFMVTTAVIIRDKYVRNVSCSVN

SEQ ID NO: 1618 - protein, 184 aa, Homo sapiens
MEPAAALHFSLPASLLLLLLLLLLSLCALVSGLGSKPLIEIKAQEDGSIWLECISGGWYPEPLTVWRDPYGEVVPALKEVSIADADGLFMVTTAVIIRDKYVRNVSCSVNNTLLGQEKETVIFIPESFMPSASPWMVALAVILTASPWMVSMTVILAVFIIFMAVSICCIKKLQREKKILSGEK

SEQ ID NO: 1619 - protein, 407 aa, Homo sapiens
MEPAAALHFSLPASLLLLLLLLLLSLCALVSGLGSKPLIEIKAQEDGSIWLECISGGWYPEPLTVWRDPYGEVVPALKEVSIADADGLFMVTTAVIIRDKYVRNVSCSVNNTLLGQEKETVIFIPESFMPSASPWMVALAVILTASPWMVSMTVILAVFIIFMAVSICCIKKLQREKKILSGEKKVEQEEKEIAQQLQEELRWRRTFLHAADVVLDPDTAHPELFLSEDRRSVRRGPYRQRVPDNPERFDSQPCVLGWESFASGKHYWEVEVENVMVWTVGVCRHSVERKGEVLLIPQNGFWTLEMFGNQYRALSSPERILPLKESLCRVGVFLDYEAGDVSFYNMRDRSHIYTCPRSAFTVPVRPFFRLGSDDSPIFICPALTGASGVMVPEEGLKLHRVGTHQSL

SEQ ID NO: 1620 - protein, 39 aa, Homo sapiens
MEPAAALHFSLPASLLLLLLLLLLSLCALVSVLPRSVCV

SEQ ID NO: 1621 - protein, 80 aa, Homo sapiens
MVTTAVIIRDKYVRNVSCSVNNTLLGQEKETVIFIPESFMPSASPWMVALAVILTASPWMVSMTVILAVFIIFMAVSICC

SEQ ID NO: 1622 - protein, 237 aa, Homo sapiens
MVTTAVIIRDKYVRNVSCSVNNTLLGQEKETVIFIPESFMPSASPWMVALAVILTASPWMVSMTVILAVFIIFMAVSICCIKKLQREKKILSGEKKVEQEEKEIAQQLQEELRWRRTFLHAADVVLDPDTAHPELFLSEDRRSVRRGPYRQRVPDNPERFDSQPCVLGWESFASGKHYWEVEVENVMVWTVGVCRHSVERKGEVLLIPQNGFWTLEMFGNQYRALSSPERILPLKES

SEQ ID NO: 1623 - protein, 43 aa, Homo sapiens
MKMASFLAFLLLNFRVCLLLLQLLMPHSAQFSVLGPSGPILAM

SEQ ID NO: 1624 - protein, 92 aa, Homo sapiens
MKMASFLAFLLLNFRVCLLLLQLLMPHSAQFSVLGPSGPILAMVGEDADLPCHLFPTMSAETMELKWVSSSLRQVVNVYADGKEVEDRQSAP

SEQ ID NO: 1625 - protein, 119 aa, Homo sapiens
MKMASFLAFLLLNFRVCLLLLQLLMPHSAQFSVLGPSGPILAMVGEDADLPCHLFPTMSAETMELKWVSSSLRQVVNVYADGKEVEDRQSAPYRGRTSILRDGITAGKAALRIHNVTAS

SEQ ID NO: 1626 - protein, 513 aa, Homo sapiens
MKMASFLAFLLLNFRVCLLLLQLLMPHSAQFSVLGPSGPILAMVGEDADLPCHLFPTMSAETMELKWVSSSLRQVVNVYADGKEVEDRQSAPYRGRTSILRDGITAGKAALRIHNVTASDSGKYLCYFQDGDFYEKALVELKVAALGSDLHVDVKGYKDGGIHLECRSTGWYPQPQIQWSNNKGENIPTVEAPVVADGVGLYAVAASVIMRGSSGEGVSCTIRSSLLGLEKTASISIADPFFRSAQRWIAALAGTLPVLLLLLGGAGYFLWQQQEEKKTQFRKKKREQELREMAWSTMKQEQSTRVKLLEELRWRSIQYASRGERHSAYNEWKKALFKPADVILDPKTANPILLVSEDQRSVQRAKEPQDLPDNPERFNWHYCVLGCESFISGRHYWEVEVGDRKEWHIGVCSKNVQRKGWVKMTPENGFWTMGLTDGNKYRTLTEPRTNLKLPKPPKKVGVFLDYETGDISFYNAVDGSHIHTFLDVSFSEALYPVFRILTLEPTALTICPA

SEQ ID NO: 1627 - protein, 352 aa, Homo sapiens
MKMASFLAFLLLNFRVCLLLLQLLMPHSAQFSVLGPSGPILAMVGEDADLPCHLFPTMSAETMELKWVSSSLRQVVNVYADGKEVEDRQSAPYRGRTSILRDGITAGKAALRIHNVTASDSGKYLCYFQDGDFYEKALVELKVAALGSDLHVDVKGYKDGGIHLECRSTGWYPQPQIQWSNNKGENIPTVEAPVVADGVGLYAVAASVIMRGSSGEGVSCTIRSSLLGLEKTASISIADPFFRSAQRWIAALAGTLPVLLLLLGGAGYFLWQQQEEKKTQFRKKKREQELREMAWSTMKQEQSTRVKLLEELRWRSIQYASRGERHSAYNEWKKALFKPGEEMLQMRLHFVK

SEQ ID NO: 1628 - protein, 378 aa, Homo sapiens
MKMASFLAFLLLNFRVCLLLLQLLMPHSAQFSVLGPSGPILAMVGEDADLPCHLFPTMSAETMELKWVSSSLRQVVNVYADGKEVEDRQSAPYRGRTSILRDGITAGKAALRIHNVTASDSGKYLCYFQDGDFYEKALVELKVAALGSDLHVDVKGYKDGGIHLECRSTGWYPQPQIQWSNNKGENIPTVEAPVVADGVGLYAVAASVIMRGSSGEGVSCTIRSSLLGLEKTASISIADPFFRSAQRWIAALAGTLPVLLLLLGGAGYFLWQQQEEKKTQFRKKKREQELREMAWSTMKQEQSTRVKLLEELRWRSIQYASRGERHSAYNEWKKALFKPGPPIGQTQQQTRGQGSPVALSQESAQRTDSWGPEEGGES

SEQ ID NO: 1629 - protein, 461 aa, Homo sapiens
MKMASFLAFLLLNFRVCLLLLQLLMPHSAQFSVLGPSGPILAMVGEDADLPCHLFPTMSAETMELKWVSSSLRQVVNVYADGKEVEDRQSAPYRGRTSILRDGITAGKAALRIHNVTASDSGKYLCYFQDGDFYEKALVELKVADGVGLYAVAASVIMRGSSGEGVSCTIRSSLLGLEKTASISIADPFFRSAQRWIAALAGTLPVLLLLLGGAGYFLWQQQEEKKTQFRKKKREQELREMAWSTMKQEQSTRVKLLEELRWRSIQYASRGERHSAYNEWKKALFKPADVILDPKTANPILLVSEDQRSVQRAKEPQDLPDNPERFNWHYCVLGCESFISGRHYWEVEVGDRKEWHIGVCSKNVQRKGWVKMTPENGFWTMGLTDGNKYRTLTEPRTNLKLPKPPKKVGVFLDYETGDISFYNAVDGSHIHTFLDVSFSEALYPVFRILTLEPTALTICPA

SEQ ID NO: 1630 - protein, 311 aa, Homo sapiens
MGIPRAQFSVLGPSGPILAMVGEDADLPCHLFPTMSAETMELKWVSSSLRQVVNVYADGKEVEDRQSAPYRGRTSILRDGITAGKAALRIHNVTASDSGKYLCYFQDGDFYEKALVELKVAALGSNLHVEVKGYEDGGIHLECRSTGWYPQPQIQWSNAKGENIPAVEAPVVADGVGLYEVAASVIMRGGSGEGVSCIIRNSLLGLEKTASISIADPFFRSAQPWIAALAGTLPILLLLLAGASYFLWRQQKEITALSSEIESEQEMKEMGYAATEREISLRESLQEELKRKKIQYLTRGEESSSDTNKSA

SEQ ID NO: 1631 - protein, 334 aa, Homo sapiens
MKMASSLAFLLLNFHVSLLLVQLLTPCSAQFSVLGPSGPILAMVGEDADLPCHLFPTMSAETMELKWVSSSLRQVVNVYADGKEVEDRQSAPYRGRTSILRDGITAGKAALRIHNVTASDSGKYLCYFQDGDFYEKALVELKVAALGSNLHVEVKGYEDGGIHLECRSTGWYPQPQIQWSNAKGENIPAVEAPVVADGVGLYEVAASVIMRGGSGEGVSCIIRNSLLGLEKTASISIADPFFRSAQPWIAALAGTLPILLLLLAGASYFLWRQQKEITALSSEIESEQEMKEMGYAATEREISLRESLQEELKRKKIQYLTRGEESSSDTNKSA

SEQ ID NO: 1632 - protein, 334 aa, Homo sapiens; identical to SEQ ID NO: 1631

SEQ ID NO: 1633 - protein, 334 aa, Homo sapiens; identical to SEQ ID NO: 1631

SEQ ID NO: 1634 - protein, 334 aa, Homo sapiens; identical to SEQ ID NO: 1631

SEQ ID NO: 1635 - protein, 160 aa, Homo sapiens
MKMASSLAFLLLNFHVSLLLVQLLTPCSAQFSVLGPSGPILAMVGEDADLPCHLFPTMSAETMELKWVSSSLRQVVNVYADGKEVEDRQSAPYRGRTSILRDGITAGKAALRIHNVTASDSGKYLCYFQDGDFYEKALVELKVADPFFRSAQPWIAALAG

SEQ ID NO: 1636 - protein, 43 aa, Homo sapiens
MKMASSLAFLLLNFHVSLLLVQLLTPCSGLCSPLGSLYLAFPV

SEQ ID NO: 1637 - protein, 115 aa, Homo sapiens
MVGEDADLPCHLFPTMSAETMELKWVSSSLRQVVNVYADGKEVEDRQSAPYRGRTSILRDGITAGKAALRIHNVTASDSGKYLCYFQDGDFYEKALVELKVAALGSNLHVEVKGY

SEQ ID NO: 1638 - protein, 196 aa, Homo sapiens
MVGEDADLPCHLFPTMSAETMELKWVSSSLRQVVNVYADGKEVEDRQSAPYRGRTSILRDGITAGKAALRIHNVTASDSGKYLCYFQDGDFYEKALVELKVAALGSNLHVEVKGYEDGGIHLECRSTGWYPQPQIQWSNAKGENIPAVEAPVVADGVGLYEVAASVIMRGGSGEGVSCIIRNSLLGLEKTASISIA

SEQ ID NO: 1639 - protein, 292 aa, Homo sapiens
MVGEDADLPCHLFPTMSAETMELKWVSSSLRQVVNVYADGKEVEDRQSAPYRGRTSILRDGITAGKAALRIHNVTASDSGKYLCYFQDGDFYEKALVELKVAALGSNLHVEVKGYEDGGIHLECRSTGWYPQPQIQWSNAKGENIPAVEAPVVADGVGLYEVAASVIMRGGSGEGVSCIIRNSLLGLEKTASISIADPFFRSAQPWIAALAGTLPILLLLLAGASYFLWRQQKEITALSSEIESEQEMKEMGYAATEREISLRESLQEELKRKKIQYLTRGEESSSDTNKSA

SEQ ID NO: 1640 - protein, 115 aa, Homo sapiens
RGGSGEGVSCIIRNSLLGLEKTASISIADPFFRSAQPWIAALAGTLPILLLLLAGASYFLWRQQKEITALSSEIESEQEMKEMGYAATEREISLRESLQEELKRKKIQYLTREWL

SEQ ID NO: 1641 - protein, 138 aa, Homo sapiens
MKMASSLAFLLLNFHVSLFLVQLLTPCSAQFSVLGPSGPILAMVGEDADLPCHLFPTMSAETMELRWVSSSLRQVVNVYADGKEVEDRQSAPYRGRTSILRDGITAGKAALRIHNVTASDSGKYLCYFQDGDFYEKAL

SEQ ID NO: 1642 - protein, 238 aa, Homo sapiens
MKMASSLAFLLLNFHVSLFLVQLLTPCSAQFSVLGPSGPILAMVGEDADLPCHLFPTMSAETMELRWVSSSLRQVVNVYADGKEVEDRQSAPYRGRTSILRDGITAGKAALRIHNVTASDSGKYLCYFQDGDFYEKALVELKVAALGSDLHIEVKGYEDGGIHLECRSTGWYPQPQIKWSDTKGENIPAVEAPVVADGVGLYAVAASVIMRGSSGGGVSCIIRNSLLGLEKTASISIA

SEQ ID NO: 1643 - protein, 584 aa, Homo sapiens
MKMASSLAFLLLNFHVSLFLVQLLTPCSAQFSVLGPSGPILAMVGEDADLPCHLFPTMSAETMELRWVSSSLRQVVNVYADGKEVEDRQSAPYRGRTSILRDGITAGKAALRIHNVTASDSGKYLCYFQDGDFYEKALVELKVAALGSDLHIEVKGYEDGGIHLECRSTGWYPQPQIKWSDTKGENIPAVEAPVVADGVGLYAVAASVIMRGSSGGGVSCIIRNSLLGLEKTASISIADPFFRSAQPWIAALAGTLPISLLLLAGASYFLWRQQKEKIALSRETEREREMKEMGYAATEQEISLREKLQEELKWRKIQYMARGEKSLAYHEWKMALFKPADVILDPDTANAILLVSEDQRSVQRAEEPRDLPDNPERFEWRYCVLGCENFTSGRHYWEVEVGDRKEWHIGVCSKNVERKKGWVKMTPENGYWTMGLTDGNKYRALTEPRTNLKLPEPPRKVGIFLDYETGEISFYNATDGSHIYTFPHASFSEPLYPVFRILTLEPTALTICPIPKEVESSPDPDLVPDHSLETPLTPGLANESGEPQAEVTSLLLPAHPGAEVSPSATTNQNHKLQARTEALY

SEQ ID NO: 1644 - protein, 127 aa, Homo sapiens
MKMASSLAFLLLNFHVSLFLVQLLTPCSDADLPCHLFPTMSAETMELRWVSSSLRQVVNVYADGKEVEDRQSAPYRGRTSILRDGITAGKAALRIHNVTASDSGKYLCYFQDGDFYEKALVELKVAA

SEQ ID NO: 1645 - protein, 100 aa, Homo sapiens
MVGEDADLPCHLFPTMSAETMELRWVSSSLRQVVNVYADGKEVEDRQSAPYRGRTSILRDGITAGKAALRIHNVTASDSGKYLCYFQDGDFYEKALVELK

SEQ ID NO: 1646 - protein, 140 aa, Homo sapiens
MVGEDADLPCHLFPTMSAETMELRWVSSSLRQVVNVYADGKEVEDRQSAPYRGRTSILRDGITAGKAALRIHNVTASDSGKYLCYFQDGDFYEKALVELKVAALGSDLHIEVKGYEDGGIHLECRSTGWYPQPQIKWSDT

SEQ ID NO: 1647 - protein, 250 aa, Homo sapiens
MVGEDADLPCHLFPTMSAETMELRWVSSSLRQVVNVYADGKEVEDRQSAPYRGRTSILRDGITAGKAALRIHNVTASDSGKYLCYFQDGDFYEKALVELKVAALGSDLHIEVKGYEDGGIHLECRSTGWYPQPQIKWSDTKGENIPAVEAPVVADGVGLYAVAASVIMRGSSGGGVSCIIRNSLLGLEKTASISIADPFFRSAQPWIAALAGTLPISLLLLAGASYFLWRQQKEKIALSRETEREREMKE

SEQ ID NO: 1648 - protein, 535 aa, Homo sapiens
MVGEDADLPCHLFPTMSAETMELRWVSSSLRQVVNVYADGKEVEDRQSAPYRGRTSILRDGITAGKAALRIHNVTASDSGKYLCYFQDGDFYEKALVELKVAALGSDLHIEVKGYEDGGIHLECRSTGWYPQPQIKWSDTKGENIPAVEAPVVADGVGLYAVAASVIMRGSSGGGVSCIIRNSLLGLEKTASISIADPFFRSAQPWIAALAGTLPISLLLLAGASYFLWRQQKEKIALSRETEREREMKEMGYAATEQEISLREWRKIQYMARGEKSLAYHEWKMALFKPADVILDPDTANAILLVSEDQRSVQRAEEPRDLPDNPERFEWRYCVLGCENFTSGRHYWEVEVGDRKEWHIGVCSKNVERKKGWVKMTPENGYWTMGLTDGNKYRALTEPRTNLKLPEPPRKVGIFLDYETGEISFYNATDGSHIYTFPHASFSEPLYPVFRILTLEPTALTICPIPKEVESSPDPDLVPDHSLETPLTPGLANESGEPQAEVTSLLLPAHPGAEVSPSATTNQNHKLQARTEALY

SEQ ID NO: 1649 - protein, 210 aa, Homo sapiens
MVGEDADLPCHLFPTMSAETMELRWVSSSLRQVVNVYADGKEVEDRQSAPYRGRTSILRDGITAGKAALRIHNVTASDSGKYLCYFQDGDFYEKALVELKVAEWRKIQYMARGEKSLAYHEWKMALFKPADVILDPDTANAILLVSEDQRSVQRAEEPRDLPDNPERFEWRYCVLGCENFTSGRHYWEVEVGDRKEWHIGVCSKNVERKK

SEQ ID NO: 1650 - protein, 270 aa, Homo sapiens
MWLLVSVILISRISSVGGEAMFCDFPKINHGILYDEEKYKPFSQVPTGEVFYYSCEYNFVSPSKSFWTRITCAEEGWSPTPKCLRLCFFPFVENGHSESSGQTHLEGDTVQIICNTGYRLQNNENNISCVERGWSTPPKCRSTISAEKCGPPPPIDNGDITSFLLSVYAPGSSVEYQCQNLYQLEGNNQITCRNGQWSEPPKCLDPCVISQEIMEKYNIKLKWTNQQKLYSRTGDIVEFVCKSGYHPTKSHSFRAMCQNGKLVYPSCEEK

SEQ ID NO: 1651 - protein, 81 aa, Homo sapiens
MRLLVLSSLLCILLLCFSIFSTEGKRRPAKAWSGRRTRLCCHRVPSPNSTNLKGHHVRLCKPCKLEPEPRLWVVPGALPQV

SEQ ID NO: 1652 - protein, 121 aa, Homo sapiens
MAASQCLCCSKFLFQRQNLACFLTNPHCGSLVNADGHGEVWTDWNNMSKFFQYGWRCTTNENTYSNRTLMGNWNQERYDLRNIVQPKPLPSQDLSESLTGSQDINLNWILPDTNAQKSQLT

SEQ ID NO: 1653 - protein, 150 aa, Homo sapiens
MAASQCLCCSKFLFQRQNLACFLTNPHCGSLVNADGHGEVWTDWNNMSKFFQYGWRCTTNENTYSNRTLMGNWNQERYDLRNIVQPKPLPSQFGHYFETTYDTSYNNKMPLSTHRFKREPHWFPGHQPELDPPRYKCTEKSTYMNSYSKP

SEQ ID NO: 1654 - protein, 142 aa, Homo sapiens
MEQPSKDFCDSHKKSSKSSTYSASSYSSSGKRQNLACFLTNPHCGSLVNADGHGEVWTDWNNMSKFFQYGWRCTTNENTYSNRTLMGNWNQERYDLRNIVQPKPLPSQFGHYFETTYDTSYNNKMPLSTHRFKREPHWFPGH

SEQ ID NO: 1655 - protein, 104 aa, Homo sapiens
MSKFFQYGWRCTTNENTYSNRTLMGNWNQERYDLRNIVQPKPLPSQFGHYFETTYDTSYNNKMPLSTHRFKREPHWFPGHQPELDPPRYKCTEKSTYMNSYSKP

SEQ ID NO: 1656 - protein, 190 aa, Homo sapiens
MVIWVILSLLGELGKPGLLTSLKNMEQPSKDFCDSHKKSSKSSTYSASSYSSSGKRQNLACFLTNPHCGSLVNADGHGEVWTDWNNMSKFFQYGWRCTTNENTYSNRTLMGNWNQERYDLRNIVQPKPLPSQFGHYFETTYDTSYNNKMPLSTHRFKREPHWFPGHQPELDPPRYKCTEKSTYMNSYSKP

SEQ ID NO: 1657 - protein, 25 aa, Homo sapiens
MWTALVLIWIFSLSLSESHAASNDP

SEQ ID NO: 1658 - protein, 114 aa, Homo sapiens
MWTALVLIWIFSLSLSESHAASNDPRNFVPNKMWKGLVKRNASVETVDNKTSEDVTMAAASPVTLTKGTSAAHLNSMEVTTEDTSRTDAYESYKKKDYTQVDYLINGMYADSEM

SEQ ID NO: 1659 - protein, 449 aa, Homo sapiens
MWTALVLIWIFSLSLSESHAASNDPRNFVPNKMWKGLVKRNASVETVDNKTSEDVTMAAASPVTLTKGTSAAHLNSMEVTTEDTSRTDVSEPATSGGAADGVTSIAPTAVASSTTAASITTAASSMTVASSAPTTAASSTTVASIAPTTAASSMTAASSTPMTLALPAPTSTSTGRTPSTTATGHPSLSTALAQVPKSSALPRTATLATLATRAQTVATTANTSSPMSTRPSPSKHMPSDTAASPVPPMRPQAQGPISQVSVDQPVVNTTNKSTPMPSNTTPEPAPTPTVVTTTKAQAREPTASPVPVPHTSPIPEMEAMSPTTQPSPMPYTQRAAGPGTSQAPEQVETEATPGTDSTGPTPRSSGGTKMPATDSCQPSTQGQYMVVTTEPLTQAVVDKTLLLVVLLLGVTLFITVLVLFALQAYESYKKKDYTQVDYLINGMYADSEM

SEQ ID NO: 1660 - protein, 145 aa, Homo sapiens
MLTRLVLSAHLSSTTSPPWTHAAISWELDNVLMPSPRIWPQVTPTGRSASVRSEGNTSSLWNFSAGQDVHAIVTRTCESVLSSAVYTHGCGCVRSATNITCQSSGQQRQAARQEEENSICKAHDSREGRLGYPLSAHQPGSGGPN

SEQ ID NO: 1661 - protein, 145 aa, Homo sapiens; identical to SEQ ID NO: 1660

SEQ ID NO: 1662 - protein, 98 aa, Homo sapiens
MVLAMLGALHPRAGLSLFLHLILAVALLRSQPLRSQRSVPEAFSAPLELSQPLSGLVDDYGILPKHPRPRGPRPLLSRAQQRKRDGPDLAEYYYDAHL

SEQ ID NO: 1663 - protein, 376 aa, Homo sapiens
MGHQFLRGLLTLLLPPPPLYTRHRMLGPESVPPPKRSRSKLMAPPRIGTHNGTFHCDEALACALLRLLPEYRDAEIVRTRDPEKLASCDIVVDVGGEYDPRRHRYDHHQRSFTETMSSLSPGKPWQTKLSSAGLIYLHFGHKLLAQLLGTSEEDSMVGTLYDKMYENFVEEVDAVDNGISQWAEGEPRYALTTTLSARVARLNPTWNHPDQDTEAGFKRAMDLVQEEFLQRLDFYQHSWLPARALVEEALAQRFQVDPSGEIVELAKGACPWKEHLYHLESGLSPPVAIFFVIYTDQAGQWRIQCVPKEPHSFQSRLPLPEPWRGLRDEALDQVSGIPGCIFVHASGFTGGHHTREGALSMARATLAQRSYLPQIS

SEQ ID NO: 1664 - protein, 301 aa, Homo sapiens
MLGPESVPPPKRSRSKLMAPPRIGTHNGTFHCDEALACALLRLLPEYRDAEIVRTRDPEKLASCDIVVDVGGEYDPRRHRYDHHQRSFTETMSSLSPGKPWQTKLSSAGLIYLHFGHKLLAQLLGTSEEDSMVGTLYDKAGFKRAMDLVQEEFLQRLDFYQHSWLPARALVEEALAQRFQVDPSGEIVELAKGACPWKEHLYHLESGLSPPVAIFFVIYTDQAGQWRIQCVPKEPHSFQSRLPLPEPWRGLRDEALDQVSGIPGCIFVHASGFTGGHHTREGALSMARATLAQRSYLPQIS

SEQ ID NO: 1665 - protein, 213 aa, Homo sapiens
MYENFVEEVDAVDNGISQWAEGEPRYALTTTLSARVARLNPTWNHPDQDTEAGFKRAMDLVQEEFLQRLDFYQHSWLPARALVEEALAQRFQVDPSGEIVELAKGACPWKEHLYHLESGLSPPVAIFFVIYTDQAGQWRIQCVPKEPHSFQSRLPLPEPWRGLRDEALDQVSGIPGCIFVHASGFTGGHHTREGALSMARATLAQRSYLPQIS

SEQ ID NO: 1666 - protein, 130 aa, Homo sapiens
  VARIANT 1: note = misc_feature - Xaa can be any naturally occurring amino acid
XMVGTLYDKVDPSGEIVELAKGACPWKEHLYHLESGLSPPVAIFFVIYTDQAGQWRIQCVPKEPHSFQSRLPLPEPWRGLRDEALDQVSGIPGCIFVHASGFTGGHHTREGALSMARATLAQRSYLPQIS

SEQ ID NO: 1667 - protein, 46 aa, Homo sapiens
MAVEDHFELCLAKCRTSSQSVQHENTYRDPIAKYCYGESPPELFPA

SEQ ID NO: 1668 - protein, 47 aa, Homo sapiens
MVNLAAMVWRRLLRKRWVLALVFGLSLVYFLSSTFKQATFARGRICW

SEQ ID NO: 1669 - protein, 205 aa, Homo sapiens
MVNLAAMVWRRLLRKRWVLALVFGLSLVYFLSSTFKQEERAVRDRNLLQVHDHNQPIPWKVQFNLGNSSRPSNQCRNSIQGKHLITDELGYVCERKDLLVNGCCNVNVPSTKQYCCDGCWPNGCCSAYEYCVSCCLQPNKQLLLERFLNRAAVAFQNLFMAVEDHFELCLAKCRTSSQSVQHENTYRDPIAKYCYGESPPELFPA

SEQ ID NO: 1670 - protein, 43 aa, Homo sapiens
  VARIANT 1: note = misc_feature - Xaa can be any naturally occurring amino acid
XFGLSLVYFLSSTFKQSVQHENTYRDPIAKYCYGESPPELFPA

SEQ ID NO: 1671 - protein, 53 aa, Homo sapiens
MPAGVPMSTYLKMFAASLLAMCAGAEVVHRYYRPDLMRNRLRRVKLISQSHIA

SEQ ID NO: 1672 - protein, 53 aa, Homo sapiens; identical to SEQ ID NO: 1671

SEQ ID NO: 1673 - protein, 59 aa, Homo sapiens
MPAGVPMSTYLKMFAASLLAMCAGAEVVHRYYRPDLQNWITSLSVGELEGLGRVEQRRP

SEQ ID NO: 1674 - protein, 59 aa, Homo sapiens; identical to SEQ ID NO: 1673

SEQ ID NO: 1675 - protein, 71 aa, Homo sapiens
MPAGVPMSTYLKMFAASLLAMCAGAEVVHRYYRPDLTIPEIPPKRGELKTELLGLKERKHKPQVSQQEELK

SEQ ID NO: 1676 - protein, 71 aa, Homo sapiens; identical to SEQ ID NO: 1675

SEQ ID NO: 1677 - protein, 71 aa, Homo sapiens; identical to SEQ ID NO: 1675

SEQ ID NO: 1678 - protein, 71 aa, Homo sapiens; identical to SEQ ID NO: 1675

SEQ ID NO: 1679 - protein, 37 aa, Homo sapiens
MPAGVPMSTYLKMFAASLLAMCAGAEVVHRYYRPDLV

SEQ ID NO: 1680 - protein, 46 aa, Homo sapiens
MPAGVPMSTYLKMFAASLLAMCAGAEVVHRYYRPDLVSAGGLLFYF

SEQ ID NO: 1681 - protein, 135 aa, Homo sapiens [sequence omitted]

SEQ ID NO: 1682 - protein, 135 aa, Homo sapiens
MFQNLQGTFEKEIGKIIPFTIAFKRAEAVEPDGCVQSWRCCLPCDLGQASRFIHTTVCSAIRWRSCKGERNFAERHILPAELEEQSNHAGMGPILPAMPSVDGNHFQHPAGDCHPYGILCLQAHSASVTARQVLQ

SEQ ID NO: 1683 - protein, 107 aa, Homo sapiens
MLERENESHGSKSCSRARIGTEVACRACLPPHCAMPPIDAFLCLPFSFALVSGKLYQWKEPVISSVHSKVKRTAEVKEEIVEKEMKKLVHSVFNMADYTFPLQVNTW

SEQ ID NO: 1684 - protein, 49 aa, Homo sapiens
MLRPALPWLYLGLCSLLVGEAEAPSPVDPLERSRPYAVLRGQNLDQTLH

SEQ ID NO: 1685 - protein, 76 aa, Homo sapiens
MLRPALPWLYLGLCSLLVGEAEAPSPVDPLERSRPYAVLRGQNLESLSPRLECNGAISARCNLRVWGSSDSPASAP

SEQ ID NO: 1686 - protein, 76 aa, Homo sapiens; identical to SEQ ID NO: 1685

SEQ ID NO: 1687 - protein, 61 aa, Homo sapiens
MLRPALPWLYLGLCSLLVGEAEAPSPVDPLERSRPYAVLRGQNLETTGERICLQLFAQHLT

SEQ ID NO: 1688 - protein, 72 aa, Homo sapiens
MLRPALPWLYLGLCSLLVGEAEAPSPVDPLERSRPYAVLRGQNLVLMGTIFSILLVTVILMAFCVYKPIRRR

SEQ ID NO: 1689 - protein, 126 aa, Homo sapiens
MRLPGCTLAASEAAPLLNPLVDDYVASEGAVQRVLVPAYAKQLSPATQLAIQRATPETGPENGTKLPPPRPEDMLNAAAALDSALEESGPGSTGELRHSLGLTVSPCRTRGSGQKNSRRKRDLVLS

SEQ ID NO: 1690 - protein, 358 aa, Homo sapiens
MRLPGCTLAASEAAPLLNPLVDDYVASEGAVQRVLVPAYAKQLSPATQLAIQRATPETGPENGTKLPPPRPEDMLNAAAALDSALEESGPGSTGELRHSLGLTVSPCRTRGSGQKNSRRKRDLVLSKLVHNVHNHITNDKRFNGSESIKSSWNISVVKFLLEKLKQELVTSPHNYTDKELKGACVAYFLTKRREYRNSLNPFKGLKEKEEKKLRSRRYRLFANRSSIMRHFGPEDQRLWNDVTEELMSDEEDSLNEPGVWVARPPRFRAQRLTELCYHLDANSKHGTKANRVYGPPSDRLPSAEAQLLPPELYNPNFQEEEDEGGDENAPGSPSFDQPHKTCCPDLNSFIEIKVEKDE

SEQ ID NO: 1691 - protein, 9 aa, Homo sapiens
MSFSATILF

SEQ ID NO: 1692 - protein, 9 aa, Homo sapiens
MSFSATILF

SEQ ID NO: 1693 - protein, 11 aa, Homo sapiens
MSFSATILFSP

SEQ ID NO: 1694 - protein, 50 aa, Homo sapiens
MSFSATILFSPPSGSEARCCCCACKSETNGGNTGSQGGNPPPSTPITVTG

SEQ ID NO: 1695 - protein, 79 aa, Homo sapiens
MSFSATILFSPPSGSEARCCCCACKSETNGGNTGSQGGNPPPSTPITVTGHGLAVQSSEQLLHVIYQRVDKAVGLAEAA

SEQ ID NO: 1696 - protein, 83 aa, Homo sapiens
MSFSATILFSPPSGSEARCCCCACKSETNGGNTGSQGGNPPPSTPITVTGHGLAVQSSEQLLHVIYQRVDKAVGLAEAALGLA

SEQ ID NO: 1697 - protein, 106 aa, Homo sapiens
MSFSATILFSPPSGSEARCCCCACKSETNGGNTGSQGGNPPPSTPITVTGHGLAVQSSEQLLHVIYQRVDKAVGLAEAALGLARANNELLKRLQEEVGDLRQGKVS

SEQ ID NO: 1698 - protein, 136 aa, Homo sapiens
MSFSATILFSPPSGSEARCCCCACKSETNGGNTGSQGGNPPPSTPITVTGHGLAVQSSEQLLHVIYQRVDKAVGLAEAALGLARANNELLKRLQEEVGDLRQGKVSIPDEDGESRAHSSPPEEPGPLKESPGEAFK

SEQ ID NO: 1699 - protein, 199 aa, Homo sapiens
MSFSATILFSPPSGSEARCCCCACKSETNGGNTGSQGGNPPPSTPITVTGHGLAVQSSEQLLHVIYQRVDKAVGLAEAALGLARANNELLKRLQEEVGDLRQGKVSIPDEDGESRAHSSPPEEPGPLKESPGEAFKALSAVEEECDSVGSGVQVVIEELRQLGAASVGPGPLGFPATQRDMRLPGCTLAASEAAPLLNP

SEQ ID NO: 1700 - protein, 209 aa, Homo sapiens
MSFSATILFSPPSGSEARCCCCACKSETNGGNTGSQGGNPPPSTPITVTGHGLAVQSSEQLLHVIYQRVDKAVGLAEAALGLARANNELLKRLQEEVGDLRQGKVSIPDEDGESRAHSSPPEEPGPLKESPGEAFKALSAVEEECDSVGSGVQVVIEELRQLGAASVGPGPLGFPATQRDMRLPGCTLAASEAAPLLNPLVDDYVASEG

SEQ ID NO: 1701 - protein, 498 aa, Homo sapiens
MSFSATILFSPPSGSEARCCCCACKSETNGGNTGSQGGNPPPSTPITVTGHGLAVQSSEQLLHVIYQRVDKAVGLAEAALGLARANNELLKRLQEEVGDLRQGKVSIPDEDGESRAHSSPPEEPGPLKESPGEAFKALSAVEEECDSVGSGVQVVIEELRQLGAASVGPGPLGFPATQRDMRLPGCTLAASEAAPLLNPLVDDYVASEGAVQRVLVPAYAKQLSPATQLAIQRATPETGPENGTKLPPPRPEDMLNAAAALDSALEESGPGSTGELRHSLGLTVSPCRTRGSGQKNSRRKRDLVLSKLVHNVHNHITNDKRFNGSESIKSSWNISVVKFLLEKLKQELVTSPHNYTDKELKGACVAYFLTKRREYRNSLNPFKGLKEKEEKKLRSRRYRLFANRSSIMRHFGPEDQRLWNDVTEELMSDEEDSLNEPDRLPSAEAQLLPPELYNPNFQEEEDEGGDENAPGSPSFDQPHKTCCPDLNSFIEIKVEKDE

SEQ ID NO: 1702 - protein, 538 aa, Homo sapiens
MSFSATILFSPPSGSEARCCCCACKSETNGGNTGSQGGNPPPSTPITVTGHGLAVQSSEQLLHVIYQRVDKAVGLAEAALGLARANNELLKRLQEEVGDLRQGKVSIPDEDGESRAHSSPPEEPGPLKESPGEAFKALSAVEEECDSVGSGVQVVIEELRQLGAASVGPGPLGFPATQRDMRLPGCTLAASEAAPLLNPLVDDYVASEGAVQRVLVPAYAKQLSPATQLAIQRATPETGPENGTKLPPPRPEDMLNAAAALDSALEESGPGSTGELRHSLGLTVSPCRTRGSGQKNSRRKRDLVLSKLVHNVHNHITNDKRFNGSESIKSSWNISVVKFLLEKLKQELVTSPHNYTDKELKGACVAYFLTKRREYRNSLNPFKGLKEKEEKKLRSRRYRLFANRSSIMRHFGPEDQRLWNDVTEELMSDEEDSLNEPGVWVARPPRFRAQRLTELCYHLDANSKHGTKANRVYGPPSDRLPSAEAQLLPPELYNPNFQEEEDEGGDENAPGSPSFDQPHKTCCPDLNSFIEIKVEKDE

SEQ ID NO: 1703 - protein, 538 aa, Homo sapiens; identical to SEQ ID NO: 1702

SEQ ID NO: 1704 - protein, 538 aa, Homo sapiens; identical to SEQ ID NO: 1702

SEQ ID NO: 1705 - protein, 402 aa, Homo sapiens
MASLGLLLLLLLTALPPLWSSSLPGLDTAESKATIADLILSALERATVFLEQRLPEINLDGMVGVRVLEEQLKSVREKWAQEPLLQPLSLRVGMLGEKLEAAIQRSLHYLKLSDPKYLREFQLTLQPGFWKLPHAWIHTDASLVYPTFGPQDSFSEERSDVCLVQLLGTGTDSSEPCGLSDLCRSLMTKPGCSGYCLSHQLLFFLWARMRGCTQGPLQQSQDYINLFCANMMDLNRRAEAIGYAYPTRDIFMENIMFCGMGGFSDFYKLRWLEAILSWQKQQEGCFGEPDAEDEELSKAIQYQQHFSRRVKRREKQFPDSRSVAQAGVQWRNLGSLQPLPPGFKQFSCLILPSSWDYRSVPPYLANFYIFLVETGFHHVAHAGLELLISRDPPTSGSQSVGL

SEQ ID NO: 1706 - protein, 361 aa, Homo sapiens
MASLGLLLLLLLTALPPLWSSSLPGLDTAESKATIADLILSALERATVFLEQRLPEINLDGMVGVRVLEEQLKSVREKWAQEPLLQPLSLRVGMLGEKLEAAIQRSLHYLKLSDPKYLREFQLTLQPGFWKLPHAWIHTDASLVYPTFGPQDSFSEERSDVCLVQLLGTGTDSSEPCGLSDLCRSLMTKPGCSGYCLSHQLLFFLWARMRGCTQGPLQQSQDYINLFCANMMDLNRRAEAIGYAYPTRDIFMENIMFCGMGGFSDFYKLRWLEAILSWQKQQEGCFGEPDAEDEELSKAIQYQQHFSRRVKRREKQFPDGCSSHNTATAVAALGGFLYILAEYPPANREPHPSTPPPPSSR

SEQ ID NO: 1707 - protein, 434 aa, Homo sapiens
MASLGLLLLLLLTALPPLWSSSLPGLDTAESKATIADLILSALERATVFLEQRLPEINLDGMVGVRVLEEQLKSVREKWAQEPLLQPLSLRVGMLGEKLEAAIQRSLHYLKLSDPKYLREFQLTLQPGFWKLPHAWIHTDASLVYPTFGPQDSFSEERSDVCLVQLLGTGTDSSEPCGLSDLCRSLMTKPGCSGYCLSHQLLFFLWARMRGCTQGPLQQSQDYINLFCANMMDLNRRAEAIGYAYPTRDIFMENNVTGHPVFYLPLCDSFLPPKAAPVTELYTDGPVMFCGMGGFSDFYKLRWLEAILSWQKQQEGCFGEPDAEDEELSKAIQYQQHFSRRVKRREKQFPDSRSVAQAGVQWRNLGSLQPLPPGFKQFSCLILPSSWDYRSVPPYLANFYIFLVETGFHHVAHAGLELLISRDPPTSGSQSVGL

SEQ ID NO: 1708 - protein, 182 aa, Homo sapiens
MEALVCAFSELHIREDAVSQAQGRPGHPDAPPNIYEGGLGSPQPQCPSAQGSKPKNFRLRHLRGLGLYLESHPPPTGQCESHWLGRLMAGGCLPQPEGTAWALDLPQGTLGPRNSLCSALLEARLPRDSLGSSASSSSMDPDKGALPQPSPSRLRPKRSWGTWEEAMCPLCKRTRSGALERP

SEQ ID NO: 1709 - protein, 191 aa, Homo sapiens
  VARIANT 1: note = misc_feature - Xaa can be any naturally occurring amino acid
XEQGPAAPKSWLLLPTTLALHGSLDAVSQAQGRPGHPDAPPNIYEGGLGSPQPQCPSAQGSKPKNFRLRHLRGLGLYLESHPPPTGQCESHWLGRLMAGGCLPQPEGTAWALDLPQGTLGPRNSLCSALLEARLPRDSLGSSASSSSMDPDKGALPQPSPSRLRPKRSWGTWEEAMCPLCKRTRSGALERP

SEQ ID NO: 1710 - protein, 90 aa, Homo sapiens
MKTLPVLVLSLTLLTVFSETSPILTEKQAKQLLRSRRQDRPSKPGFPDEPMREYMHHLLALEHRAEEQFLEHWLNPHCKPHCDRNRIHPV

SEQ ID NO: 1711 - protein, 275 aa, Homo sapiens
MDGDEKELESSEEGGSAEERRLEPPSSSHYCLYSYRGSRLAQQRGDSEDGSPSGTNAETPSGDDFSLSLADTNLPSEVEPELRSFIAKRLSRGAVFEGLGNVASVELKIPGYRVGCYYCLFQNEKLLPETVTIDSERNPSEYVVCFLGGSEKGLELFRLELDKYIQGLKNNMNCEARGLESHIKSYLSSWFEDVVCPIQRVVLLFQEKLTFLLHAALSYTPVEVKESDEKTKRDINRFLSVASLQGLIHEGTMTSLCMAMTEEQHKSVVIDCSSS

SEQ ID NO: 1712 - protein, 75 aa, Homo sapiens
MLPSLQESMDGDEKELESSEEGGSAEERRLEPPSSSHYCLYSYRGSRLAQQRGDSEDGSPSGTNAETPSGDDFRY

SEQ ID NO: 1713 - protein, 396 aa, Homo sapiens
MLPSLQESMDGDEKELESSEEGGSAEERRLEPPSSSHYCLYSYRGSRLAQQRGDSEDGSPSGTNAETPSGDDFSLSLADTNLPSEVEPELRSFIAKRLSRGAVFEGLGNVASVELKIPGYRVGCYYCLFQNEKLLPETVTIDSERNPSEYVVCFLGGSEKGLELFRLELDKYIQGLKNNMNCEARGLESHIKSYLSSWFEDVVCPIQRVVLLFQEKLTFLLHAALSYTPVEVKESDEKTKRDINRFLSVASLQGLIHEGTMTSLCMAMTEEQHKSVVIDCSSSQPQFCNAGSNRFCEDWMQAFLNGAKGGNPFLFRQVLENFKLKAIQDTNNLKRFIRQAEMNHYALFKCYMFLKNCGSGDILLKIVKVEHEEMPEAKNVIAVLEEFMKEALDQSF

SEQ ID NO: 1714 - protein, 396 aa, Homo sapiens [sequence omitted]

SEQ ID NO: 1715 - protein, 38 aa, Homo sapiens
MNCEARGLESHIKSYLSSWFEDVVCPIQRVVLLFQEKL

SEQ ID NO: 1716 - protein, 88 aa, Homo sapiens
MNCEARGLESHIKSYLSSWFEDVVCPIQRVVLLFQEKLTFLLHAALSYTPVEVKESDEKTKRDINRFLSVASLQGLIHEGTMTSLCMA

SEQ ID NO: 1717 - protein, 132 aa, Homo sapiens
MNCEARGLESHIKSYLSSWFEDVVCPIQRVVLLFQEKLTFLLHAALSYTPVEVKESDEKTKRDINRFLSVASLQGLIHEGTMTSLCMAMTEEQHKSVVIDCSSSQPQFCNAGSNRFCEDWMQAFLNGAKGGN

SEQ ID NO: 1718 - protein, 48 aa, Homo sapiens
  VARIANT 1: note = misc_feature - Xaa can be any naturally occurring amino acid
XAMTEEQHKSVVIDCSSSQPQFCNAGHTRHKQFEEIYPTGRNESLCFV

SEQ ID NO: 1719 - protein, 97 aa, Homo sapiens
  VARIANT 1: note = misc_feature - Xaa can be any naturally occurring amino acid
XLLFQEKLTFLLHAALSYTPVEVKESDEKTKRDINRFLSVASLQGLIHEGTMTSLCMAMTEEQHKSVVIDCSSSQPQFCNAEILDPPPLLFTLSHPS

SEQ ID NO: 1720 - protein, 189 aa, Homo sapiens
LIALTSLTAASSFSKAREEEITPVVSIAYKVLEVFPKGRWVLITCCAPQPPPPITYSLCGTKNIKVAKKVVKTHEPASFNLNVTLKSSPDLLTYFCWASSTSGAHVDSARLQMHWELWSKPVSELRANFTLQDRGAGPRVEMICQASSGSPPITNSLIGKDGQVHLQQRPCHRQPANFSFLPSQTSDWF

SEQ ID NO: 1721 - protein, 265 aa, Homo sapiens
MGLPGLFCLAVLAASSFSKAREEEITPVVSIAYKVLEVFPKGRWVLITCCAPQPPPPITYSLCGTKNIKVAKKVVKTHEPASFNLNVTLKSSPDLLTYFCWASSTSGAHVDSARLQMHWELWSKPVSELRANFTLQDRGAGPRVEMICQASSGSPPITNSLIGKDGQVHLQQRPCHRQPANFSFLPSQTSDWFWCQAANNANVQHSALTVVPPGGDQKMEDWQGPLESPILALPLYRSTRRLSEEEFGGFRIGNGEVRGRKAAAM

SEQ ID NO: 1722 - protein, 151 aa, Homo sapiens
  VARIANT 1: note = misc_feature - Xaa can be any naturally occurring amino acid
XQPPPPITYSLCGTKNIKVAKKVVKTHEPASFNLNVTLKSSPDLLTYFCWASSTSGAHVDSARLQMHWELWSRQRGRPQGGDDLPGVLGQPTYHQQPDREGWAGPPAAETMPQAACQLLLPAEPDIGLVLVPGCKQRQCPAQRPHSGAPRW

SEQ ID NO: 1723 - protein, 35 aa, Homo sapiens
ESMIPITRSLQKALHHLSRLRDLVDDTNGERSPKM

SEQ ID NO: 1724 - protein, 372 aa, Homo sapiens
MAKSKTKHRLCSQESSVSALLASCTLSGSNSSNSDGSFHYKDKLYRSASQALQAYIDDFDLGQIYPGASTGKINIDEDFTNMSQFCNYIYKPNNAFENLDHKKHSNFISCRRHTVNDIDSMSLTTDDLLRLPADGSFSYTYVGPSHRTSKKNKKCRGRLGSLDIEKNPHFQGPYTSMGKDNFVTPVIRSNINGKQCGDKIELLILKAKRNLEQCTEELPKSMKKDDSPCSLDKLEADRSWENIPVTFKSPVPVNSDDSPQQTSRAKSAKGVLEDFLNNDNQSCTLSGGKHHGPVEALKQMLFNLQAVQERFNQNKTTDPKEEIKQVSEDDFSKLQLKESMIPITRSLQKALHHLSRLRDLVDDTNGERSPKM

SEQ ID NO: 1725 - protein, 533 aa, Homo sapiens
MAKSKTKHRLCSQESSVSALLASCTLSGSNSSNSDGSFHYKDKLYRSASQALQAYIDDFDLGQIYPGASTGKINIDEDFTNMSQFCNYIYKPNNAFENLDHKKHSNFISCRRHTVNDIDSMSLTTDDLLRLPADGSFSYTYVGPSHRTSKKNKKCRGRLGSLDIEKNPHFQGPYTSMGKDNFVTPVIRSNINGKQCGRLKNPKLMNRTNNCISESSLSFPKKSSFKDSSEHSLEKNYPRWLTSQKSDLNVSGITSIPDFKYPVWLHNQDLLPDANSQRVYQIFKDDQCSPRHSHQAQGTSRLINKLDCFEYAFEPSNFSNSLSDDKELVNEYKCDFEHSQCQCENPLLPGQSTKPFSGDKIELLILKAKRNLEQCTEELPKSMKKDDSPCSLDKLEADRSWENIPVTFKSPVPVNSDDSPQQTSRAKSAKGVLEDFLNNDNQSCTLSGGKHHGPVEALKQMLFNLQAVQERFNQNKTTDPKEEIKQVSEDDFSKLQLKESMIPITRSLQKALHHLSRLRDLVDDTNGERSPKM

SEQ ID NO: 1726 - protein, 533 aa, Homo sapiens; identical to SEQ ID NO: 1725

SEQ ID NO: 1727 - protein, 151 aa, Homo sapiens
MKKDDSPCSLDKLEADRSWENIPVTFKSPVPVNSDDSPQQTSRAKSAKGVLEDFLNNDNQSCTLSGGKHHGPVEALKQMLFNLQAVQERFNQNKTTDPKEEIKQVSEDDFSKLQLKESMIPITRSLQKALHHLSRLRDLVDDTNGERSPKM

SEQ ID NO: 1728 - protein, 142 aa, Homo sapiens
MFVDNRIQKSMLLDLNKEIMNELGVTVVGDIIAILKHAKVVHRQDMCKAATESVPCSPSPLAGEIRRGTSAASRMITNSLNHDSPPSTPPRRPDTSTSKISVTVSNKMAAKSAKATAALARREEESLAVPAKRRRVTAEMEG

SEQ ID NO: 1729 - protein, 355 aa, Homo sapiens
MFVDNRIQKSMLLDLNKEIMNELGVTVVGDIIAILKHAKVVHRQDMCKAATESVPCSPSPLAGEIRRGTSAASRMITNSLNHDSPPSTPPRRPDTSTSKISVTVSNKMAAKSAKATAALARREEESLAVPAKRRRVTAEMEGKYVINMPKGTTPRTRKILEQQQAAKGLHRTSVFDRLGAETKADTTTGSKPTGVFSRLGATPETDEDLAWDSDNDSSSSVLQYAGVLKKLGRGPAKASPQPALTVKAKATSSATTAAAPTLRRLALSSRSGLERKPESLSKVSIIKRLGAAALVPEAQDSQVTSTKSKSSAEVKVTIKRTLVGPRGSSSSEGLGAQMDHAGTVSVFKRLGRRTF

SEQ ID NO: 1730 - protein, 422 aa, Homo sapiens
MVMAALSLVAACWGRAAADESVQLPAAPGSSVRARETMVSVTMATSEWIQFFKEAGIPPGPAVNYAVMFVDNRIQKSMLLDLNKEIMNELGVTVVGDIIAILKHAKVVHRQDMCKAATESVPCSPSPLAGEIRRGTSAASRMITNSLNHDSPPSTPPRRPDTSTSKISVTVSNKMAAKSAKATAALARREEESLAVPAKRRRVTAEMEGKYVINMPKGTTPRTRKILEQQQAAKGLHRTSVFDRLGAETKADTTTGSKPTGVFSRLGATPETDEDLAWDSDNDSSSSVLQYAGVLKKLGRGPAKASPQPALTVKAKATSSATTAAAPTLRRLALSSRSGLERKPESLSKVSIIKRLGAAALVPEAQDSQVTSTKSKSSAEVKVTIKRTLVGPRGSSSSEGLGAQMDHAGTVSVFKRLGRRTF

SEQ ID NO: 1731 - protein, 141 aa, Homo sapiens
MVMAALSLVAACWGRAAADESVQLPAAPGSSVRARETMVSVTMATSEWIQFFKEAGIPPGPAVNYAVMFVDNRIQKSMLLDLNKEIMNELGVTVVGDIIAILKHAKVVHRQGLTPSPRLECSSTISAHCNLCLPGHVQSCH

SEQ ID NO: 1732 - protein, 146 aa, Homo sapiens
MVSVTMATSEWIQFFKEAGIPPGPAVNYAVMFVDNRIQKSMLLDLNKEIMNELGVTVVGDIIAILKHAKVVHRQDMCKAATESVPCSPSPLAGEIRRGTSAASRMITNSLNHDSPPSTPPRRPDTSTSKISVTVSNKMAAKSAKAT

SEQ ID NO: 1733 - protein, 168 aa, Homo sapiens
  VARIANT 1: note = misc_feature - Xaa can be any naturally occurring amino acid
XEMEGKYVINMPKGTTPRTRKILEQQQAAKGLHRTSVFDRLGAETKADTTTGSKPTGVFSRLGATPETDEDLAWDSDNDSSSSVLQYAGVLKKLGRGPAKASPQPALTVKAKATSSATTAAAPTLRRLALSSRSGLERKPESLSKVSIIKRLGAAALVPEAQDSQASA

SEQ ID NO: 1734 - protein, 146 aa, Homo sapiens
  VARIANT 1: note = misc_feature - Xaa can be any naturally occurring amino acid
XGSSVRARETMVSVTMATSEWIQFFKEAGIPPGPAVNYAVMFVDNRIQKSMLLDLNKEIMNELGVTVVGDIIAILKHAKVVHRQDMCKAATESVPCSPSPLAGEIRRGTSDGVSLCCPGWSTVARPWLSATSASRVQAVLLPQPPE

SEQ ID NO: 1735 - protein, 133 aa, Homo sapiens
  VARIANT 1: note = misc_feature - Xaa can be any naturally occurring amino acid
XTDEDLAWDSDNDSSSSVLQYAGVLKKLGRGPAKASPQPALTVKAKATSSATTAAAPTLRRLALSSRSGLERKPESLSKVSIIKRLGAAALVPEAQDSQVTSTKSPTVRCVLPDPPVPPASQRPPRRRWRRAC

SEQ ID NO: 1736 - protein, 110 aa, Homo sapiens
MRSECVLGAASDSGQEAPRDTWFLQGWKASRRFLIKGSVAGGAVYLVYDQELLGPSDKSQAALQKAGEVVPPAMYQFSQYVCQQTGLQIPQLPAPPKIYFPIRDSWNAGI

SEQ ID NO: 1737 - protein, 140 aa, Homo sapiens
MRSECVLGAASDSGQEAPRDTWFLQGWKASRRFLIKGSVAGGAVYLVYDQELLGPSDKSQAALQKAGEVVPPAMYQFSQYVCQQTGLQIPQLPAPPKIYFPIRDSWNAGIMTVMSALSVAPSKAREYSKEGWEYVKARTK

SEQ ID NO: 1738 - protein, 88 aa, Homo sapiens
MVARVWSLMRFLIKGSVAGGAVYLVYDQELLGPSDKSQAALQKAGEVVPPAMYQFSQYVCQQTGLQIPQLPAPPKIYFPIRDSWNAGI

SEQ ID NO: 1739 - protein, 118 aa, Homo sapiens
MVARVWSLMRFLIKGSVAGGAVYLVYDQELLGPSDKSQAALQKAGEVVPPAMYQFSQYVCQQTGLQIPQLPAPPKIYFPIRDSWNAGIMTVMSALSVAPSKAREYSKEGWEYVKARTK

SEQ ID NO: 1740 - protein, 100 aa, Homo sapiens
MASKSWLNFLTFLCGSAIGFLLCSQLFSILLGEKVDTQPNVLHNDPHARHSDDNGQNHLEGQMNFNADSSQHKDENTDIAENLYQKVRILCWVMTGPQNL

SEQ ID NO: 1741 - protein, 131 aa, Homo sapiens
MASKSWLNFLTFLCGSAIGFLLCSQLFSILLGEKVDTQPNVLHNDPHARHSDDNGQNHLEGQMNFNADSSQHKDENTDIAENLYQKVRILCWVMTGPQNLEKKAKHVKATWAQRCNKVLFMSSEENKDFPA

SEQ ID NO: 1742 - protein, 363 aa, Homo sapiens
MASKSWLNFLTFLCGSAIGFLLCSQLFSILLGEKVDTQPNVLHNDPHARHSDDNGQNHLEGQMNFNADSSQHKDENTDIAENLYQKVRILCWVMTGPQNLEKKAKHVKATWAQRCNKVLFMSSEENKDFPAVGLKTKEGRDQLYWKTIKAFQYVHEHYLEDADWFLKADDDTYVILDNLRWLLSKYDPEEPIYFGRRFKPYVKQGYMSGGAGYVLSKEALKRFVDAFKTDKCTHSSSIEDLALGRCMEIMNVEAGDSRDTIGKETFHPFVPEHHLIKGYLPRTFWYWNYNYYPPVEGPGCCSDLAVSFHYVDSTTMYELEYLVYHLRPYGYLYRYQPTLPERILKEISQANKNEDTKVKLGNP

SEQ ID NO: 1743 - protein, 309 aa, Homo sapiens
MASKSWLNFLTFLCGSAIGFLLCSQLFSILLGEKVDTQPNVLHNDPHARHSDDNGQNHLEGQMNFNADSSQHKDENTDIAENLYQKVRILCWVMTGPQNLEKKAKHVKATWAQRCNKVLFMSSEENKDFPAVGLKTKEGRDQLYWKTIKAFQYVHEHYLEDADWFLKADDDTYVILDNLRWLLSKYDPEEPIYFGRRFKPYVKQGYMSGGAGYVLSKEALKRFVDAFKTDKCTHSSSIEDLALGRCMEIMNVEAGDSRDTIGKETFHPFVPEHHLIKGYLPRTFWYWNYNYYPPVEVSLEILLLCQYLD

SEQ ID NO: 1744 - protein, 363 aa, Homo sapiens; identical to SEQ ID NO: 1742

SEQ ID NO: 1745 - protein, 823 aa, Homo sapiens
MWGSPALAWAVWLACVQPTVFPWSLSFRSDTDKPSSAAEVLTEASSCWTDTVECFSDYMTLWIPRSHVEGLRRWLARTLHLPGTWRSPDHLDSSLAKCGYFLHLASDGDFLFRVQYSACFVQKEKANYRLEIRIFQKGVMGLERSDRYIMKCPMLRSRLGQESVHCGPMFIQVSRPLPLWRDNRQTPWLLSLRGELVASLEDASLMGLYVDMNATTVTVQSPRQGLLQRWEVLNTSAELLPLWLVSGHHAYSLEAACPPVSFQPESEVLVHIPKQRLGLVKRGSYIEETLSLRFLRVHQSNIFMVTENKDFVVVSIPAAGVLQVQRCQEVGGTPGTQAFYRVDLSLEFAEMAAPVLWTVESFFQCVGSGTESPASTAALRTTPSPPSPGPETPPAGVPPAASSQVWAAGPAAQEWLSRDLLHRPSDALAKKGLGPFLQTAKPARRGQTSASILPRVVQAQRGPQPPPGEAGIPGHPTPPATLPSEPVEGVQASPWRPRPVLPTHPALTLPVSSDASSPSPPAPRPERPESLLVSGPSVTLTEGLGTVRPEQDPAKSPGSPLLLRGLSSGDVAAPEPIMGEPGQASEEFQPLARPWRATLAAEELVSHRSPGEPQETCSGTEVERPRQTGPGLPREGARGHMDLSSSEPSQDIEGPGLSILPARDATFSTPSVRQPDPSAWLSSGPELTGMPRVRLAAPLAVLPMEPLPPEPVRPAALLTPEASSVGGPDQARYLESAPGWPVGQEEWGVAHTSSPPSTQTLSLWAPTGVLLPSLVELEYPFQAGRGASLQQELTEPTLALSAESHRPPELQDSVEGLSERPSR

SEQ ID NO: 1746 - protein, 658 aa, Homo sapiens
  VARIANT 1: note = misc_feature - Xaa can be any naturally occurring amino acid
XIMKCPMLRSRLGQESVHCGPMFIQVSRPLPLWRDNRQTPWLLSLRGELVASLEDASLMGLYVDMNATTVTVQSPRQGLLQRWEVSGGQQALPGVSFQPESEVLVHIPKQRLGLVKRGSYIEETLSLRFLRVHQSNIFMVTENKDFVVVSIPAAGVLQVQRCQEVGGTPGTQAFYRVDLSLEFAEMAAPVLWTVESFFQCVGSGTESPASTAALRTTPSPPSPGPETPPAGVPPAASSQVWAAGPAAQEWLSRDLLHRPSDALAKKGLGPFLQTAKPARRGQTSASILPRVVQAQRGPQPPPGEAGIPGHPTPPATLPSEPVEGVQASPWRPRPVLPTHPALTLPVSSDASSPSPPAPRPERPESLLVSGPSVTLTEGLGTVRPEQDPAKSPGSPLLLRGLSSGDVAAPEPIMGEPGQASEEFQPLARPWRATLAAEELVSHRSPGEPQETCSGTEVERPRQTGPGLPREGARGHMDLSSSEPSQDIEGPGLSILPARDATFSTPSVRQPDPSAWLSSGPELTGMPRVRLAAPLAVLPMEPLPPEPVRPAALLTPEASSVGGPDQARYLESAPGWPVGQEEWGVAHTSSPPSTQTLSLWAPTGVLLPSLVELEYPFQAGRGASLQQELTEPTLALSAESHRPPELQDSVEGLSERPSR

SEQ ID NO: 1747 - protein, 69 aa, Homo sapiens
  VARIANT 1: note = misc_feature - Xaa can be any naturally occurring amino acid
XPSTQTLSLWAPTGVLLPSLVELEYPFQAGRGASLQQELTEPTLALSAESHRPPELQDSVEGLSERPSR

SEQ ID NO: 1748 - protein, 775 aa, Homo sapiens
  VARIANT 1: note = misc_feature - Xaa can be any naturally occurring amino acid
XSLSFRSDTDKPSSAAEVLTEASSCWTDTVECFSDYMTLWIPRSHVEGLRRWLARTLHLPGTWRSPDHLDSSLAKCGYFLHLASDGDFLFRVQYSACFVQKEKANYRLEIRIFQKGVMGLERSDRYIMKCPMLRSRLGQESVHCGPMFIQVSRPLPLWRDNRQTPWLLSLRGELVASLEDASLMGLYVDMNATTVTVQSPRQGLLQRWEVLNTSAELLPLWLVSGHHAYSLEAACPPVSFQPESEVLVHIPKQRLGLVKRGSYIEETLSLRFLRVHQSNIFMVTENKDFVVVSIPAAGVLQVQRCQEVGGTPGTQAFYRVDLSLEFAEMAAPVLWTVESFFQCVGSGTESPASTAALRTTPSPPSPGPETPPAGVPPAASSQKGLGPFLQTAKPARRGQTSASILPRVVQAQRGPQPPPGEAGIPGHPTPPATLPSEPVEGVQASPWRPRPVLPTHPALTLPVSSDASSPSPPAPRPERPESLLVSGPSVTLTEGLGTVRPEQDPAKSPGSPLLLRGLSSGDVAAPEPIMGEPGQASEEFQPLARPWRATLAAEELVSHRSPGEPQETCSGTEVERPRQTGPGLPREGARGHMDLSSSEPSQDIEGPGLSILPARDATFSTPSVRQPDPSAWLSSGPELTGMPRVRLAAPLAVLPMEPLPPEPVRPAALLTPEASSVGGPDQARYLESAPGWPVGQEEWGVAHTSSPPSTQTLSLWAPTGVLLPSLVELEYPFQAGRGASLQQELTEPTLALSAESHRPPELQDSVEGLSERPSR

SEQ ID NO: 1749 - protein, 15 aa, Homo sapiens
MALRHLALLAGLLVG

SEQ ID NO: 1750 - protein, 57 aa, Homo sapiens
MALRHLALLAGLLVGVASKSMENTAQLPECCVDVVGVNASCPGASLCGPGCYRRWNA

SEQ ID NO: 1751 - protein, 86 aa, Homo sapiens
MALRHLALLAGLLVGVASKSMENTAQLPECCVDVVGVNASCPGASLCGPGCYRRWNADGSASCVRCGNGTLPAYNGSECRSFAGPG

SEQ ID NO: 1752 - protein, 103 aa, Homo sapiens
MALRHLALLAGLLVGVASKSMENTAQLPECCVDVVGVNASCPGASLCGPGCYRRWNADGSASCVRCGNGTLPAYNGSECRSFAGPGAPFPMNRSSGTPGRPHP

SEQ ID NO: 1753 - protein, 224 aa, Homo sapiens [sequence omitted]

SEQ ID NO: 1754 - protein, 189 aa, Homo sapiens
MALRHLALLAGLLVGVASKSMENTAQLPECCVDVVGVNASCPGASLCGPGCYRRWNADGSASCVRCGNGTLPAYNGSECRSFAGPGAPFPMNRSSGTPGRPHPGAPRVAASLFLGTFFISSGLILSVAGFFYLKRSSKLPRACYRRNKAPALQPGEAAAMIPPPQSSDVGSAGKEDPPRQGRPPIPAPP

SEQ ID NO: 1755 - protein, 344 aa, Homo sapiens
MALRHLALLAGLLVGVASKSMENTAQLPECCVDVVGVNASCPGASLCGPGCYRRWNADGSASCVRCGNGTLPAYNGSECRSFAGPGAPFPMNRSSGTPGRPHPGAPRVAASLFLGTFFISSGLILSVAGFFYLKRSSKLPRACYRRNKAPALQPGEAAAMIPPPQSSGNSSCRIPLWGFPSLGQSQGALWVCPQTGLPGSGSRPPLPGSPGDPPTRQGQGRIWLVPPALDLSWIWPAPPARPPLIPVTSMLFPVPETWGLQERRTHHDRADPQYLLLLEVQLHPRTDAAGLRQALLSSHRFSGAGSGGPKSQPVRKPRYVRRERPLDRATDPAAFPGEARISNV

SEQ ID NO: 1756 - protein, 198 aa, Homo sapiens
MALRHLALLAGLLVGVASKSMENTAQLPECCVDVVGVNASCPGASLCGPGCYRRWNADGSASCVRCGNGTLPAYNGSECRSFAGPGAPFPMNRSSGTPGRPHPGAPRVAASLFLGTFFISSGLILSVAGFFYLKRSSKLPRACYRRNKAPALQPGEAAAMIPPPQSSVRKPRYVRRERPLDRATDPAAFPGEARISNV

SEQ ID NO: 1757 - protein, 198 aa, Homo sapiens; identical to SEQ ID NO: 1756

SEQ ID NO: 1758 - protein, 98 aa, Homo sapiens
MALRHLALLAGLLVGVASKSMENTDTDVPAPEVLTRSTAGVRGACASQRGALRCLLGERLLRNGWVRRGPHGEASWPAMGAPLPAVTAQRAAHRYRGV

SEQ ID NO: 1759 - protein, 64 aa, Homo sapiens
MALRHLALLAGLLVGVASKSMENTDTDVPAPEVLTRSTAGVRGACASQRGALRCLLGPAARVLC

SEQ ID NO: 1760 - protein, 111 aa, Homo sapiens
MALRHLALLAGLLVGVASKSMENTDTDVPAPEVLTRSTAGVRGACASQRGALRCLLGPAARVLCGCGGRQRQLPRRKSVWSRLLQALERGRERQLRPLWERNPPSLQRLRV

SEQ ID NO: 1761 - protein, 380 aa, Homo sapiens
MALRHLALLAGLLVGVASKSMENTVTRNSTAVINTQAEGTLSPPGLSSLPVVREWALTHTAQLPECCVDVVGVNASCPGASLCGPGCYRRWNADGSASCVRCGNGTLPAYNGSECRSFAGPGAPFPMNRSSGTPGRPHPGAPRVAASLFLGTFFISSGLILSVAGFFYLKRSSKLPRACYRRNKAPALQPGEAAAMIPPPQSSGNSSCRIPLWGFPSLGQSQGALWVCPQTGLPGSGSRPPLPGSPGDPPTRQGQGRIWLVPPALDLSWIWPAPPARPPLIPVTSMLFPVPETWGLQERRTHHDRADPQYLLLLEVQLHPRTDAAGLRQALLSSHRFSGAGSGGPKSQPVRKPRYVRRERPLDRATDPAAFPGEARISNV

SEQ ID NO: 1762 - protein, 289 aa, Homo sapiens
MARKIMQDKEKIREKYGPEWARLPPAQQDEIIDRCLVGPRAPAPRDPGDSEELTRFPGLRGPTGQKVVRFGDEDLTWQDEHSAPFSWETKSQMEFSISALSIQEPSNGTAASEPRPLSKASQGSQALKSSQGSRSSSLDALGPTRKEEEASFWKINAERSRGEGPEAEFQSLTPSQIKSMEKGEKVLPPCYRQEPAPKDREAKVERPSTLRQEQRPLPNVSTERERPQPVQAFSSALHEAAPSQLEGKLPSPDVRQDDGEDTLFSEPKFAQVSSSNVVLKTGFDFLDNW

SEQ ID NO: 1763 - protein, 327 aa, Homo sapiens
MASMAAAIAASRSAVMSGNRPLDDRERKRFTYFSSLSPMARKIMQDKEKIREKYGPEWARLPPAQQDEIIDRCLVGPRAPAPRDPGDSEELTRFPGLRGPTGQKVVRFGDEDLTWQDEHSAPFSWETKSQMEFSISALSIQEPSNGTAASEPRPLSKASQGSQALKSSQGSRSSSLDALGPTRKEEEASFWKINAERSRGEGPEAEFQSLTPSQIKSMEKGEKVLPPCYRQEPAPKDREAKVERPSTLRQEQRPLPNVSTERERPQPVQAFSSALHEAAPSQLEGKLPSPDVRQDDGEDTLFSEPKFAQVSSSNVVLKTGFDFLDNW

SEQ ID NO: 1764 - protein, 197 aa, Homo sapiens
MEFSISALSIQEPSNGTAASEPRPLSKASQGSQALKSSQGSRSSSLDALGPTRKEEEASFWKINAERSRGEGPEAEFQSLTPSQIKSMEKGEKVLPPCYRQEPAPKDREAKVERPSTLRQEQRPLPNVSTERERPQPVQAFSSALHEAAPSQLEGKLPSPDVRQDDGEDTLFSEPKFAQVSSSNVVLKTGFDFLDNW

SEQ ID NO: 1765 - protein, 110 aa, Homo sapiens
MEKGEKVLPPCYRQEPAPKDREAKVERPSTLRQEQRPLPNVSTERERPQPVQAFSSALHEAAPSQLEGKLPSPDVRQDDGEDTLFSEPKFAQVSSSNVVLKTGFDFLDNW

SEQ ID NO: 1766 - protein, 160 aa, Homo sapiens
MQDKEKIREKYGPEWARLPPAQQDEIIDRCLVGPRAPAPRDPGDSEELTRFPGLRGPTGQKVVRFGDEDLTWQDEHSAPFSWETKSQMEFSISALSIQEPSNGTAASEPRPLSKASQGSQALKSSQGSRSSSLDALGPTRKEEEASFWKINAERSRGEGP

SEQ ID NO: 1767 - protein, 131 aa, Homo sapiens
MDVLFVAIFAVPLILGQEYEDEERLGEDEYYQVVYYYTVTPSYDDFSADFTIDYSIFESEDRLNRLDKDITEAIETTISLETARADHPKPVTVKPVTTEPSPDLNDAVSSLRSPIPLLLSCAFVQVGMYFM

SEQ ID NO: 1768 - protein, 131 aa, Homo sapiens; identical to SEQ ID NO: 1767

SEQ ID NO: 1769 - protein, 121 aa, Homo sapiens
MDVLFVAIFAVPLILGQEYEDEERLGEDEYYQVVYYYTVTPSYDDFSADFTIDYSIFESEDRLNRLDKDITEAIETTISLETARADHPKPVTVKPVTTEPVEEGCYDSLDGSLARGNWKIK

SEQ ID NO: 1770 - protein, 341 aa, Homo sapiens
MVPAAGALLWVLLLNLGPRAAGAQGLTQTPTEMQRVSLRFGGPMTRSYRSTARTGLPRKTRIILEDENDAMADADRLAGPAAAELLAATVSTGFSRSSAINEEDGSSEEGVVINAGKDSTSRELPSATPNTAGSSSTRFIANSQEPEIRLTSSLPRSPGRSTEDLPGSQATLSQWSTPGSTPSRWPSPSPTAMPSPEDLRLVLMPWGPWHCHCKSGTMSRSRSGKLHGLSGRLRVGALSQLRTEHKPCTYQQCPCNRLREECPLDTSLCTDTNCASQSTTSTRTTTTPFPTIHLRSSPSLPPASPCPALAFWKRVRIGLEDIWNSLSSVFTEMQPIDRNQR

SEQ ID NO: 1771 - protein, 221 aa, Homo sapiens
MEGPRGWLVLCVLAISLASMVTEDLCRAPDGKKGEAGRPGRRGRPGLKGEQGEPGAPGIRTGIQGLKGDQGEPGPSGNPGKVGYPGPSGPLGARGIPGIKGTKGSPGNIKDQPRPAFSAIRRNPPMGGNVVIFDTVITNQEEPYQNHSGRFVCTVPGYYYFTFQVLSQWEICLSIVSSSRGQVRRSLGFCDTTNKGLFQVVSGGMVLQLQQGDQVWVEKDP

SEQ ID NO: 1772 - protein, 245 aa, Homo sapiens
MEGPRGWLVLCVLAISLASMVTEDLCRAPDGKKGEAGRPGRRGRPGLKGEQGEPGAPGIRTGIQGLKGDQGEPGPSGNPGKVGYPGPSGPLGARGIPGIKGTKGSPGNIKDQPRPAFSAIRRNPPMGGNVVIFDTVITNQEEPYQNHSGRFVCTVPGYYYFTFQVLSQWEICLSIVSSSRGQVRRSLGFCDTTNKGLFQVVSGGMVLQLQQGDQVWVEKDPKKGHIYQGSEADSVFSGFLIFPSA

SEQ ID NO: 1773 - protein, 245 aa, Homo sapiens; identical to SEQ ID NO: 1772

SEQ ID NO: 1774 - protein, 153 aa, Homo sapiens
MKIPWGSIPVLMLLLLLGLIDISQAQLSCTGPPAIPGIPGIPGTPGPDGQPGTPGIKGEKGLPGLAGDHGEFGEKGDPGIPGNPGKVGPKGPMGPKGGPGAPGAPGPKGESGDYKATQKIAFSATRTINVPLRRDQTIRFDHVITNMNNNYEP

SEQ ID NO: 1775 - protein, 229 aa, Homo sapiens
MKIPWGSIPVLMLLLLLGLIDISQAQLSCTGPPAIPGIPGIPGTPGPDGQPGTPGIKGEKGLPGLAGDHGEFGEKGDPGIPGNPGKVGPKGPMGPKGGPGAPGAPGPKGESGDYKATQKIAFSATRTINVPLRRDQTIRFDHVITNMNNNYEPRSGKFTCKVPGLYYFTYHASSRGNLCVNLMRGRERAQKVVTFCDYAYNTFQVTTGGMVLKLEQGENVFLQATDKNS

SEQ ID NO: 1776 - protein, 251 aa, Homo sapiens
MKIPWGSIPVLMLLLLLGLIDISQAQLSCTGPPAIPGIPGIPGTPGPDGQPGTPGIKGEKGLPGLAGDHGEFGEKGDPGIPGNPGKVGPKGPMGPKGGPGAPGAPGPKGESGDYKATQKIAFSATRTINVPLRRDQTIRFDHVITNMNNNYEPRSGKFTCKVPGLYYFTYHASSRGNLCVNLMRGRERAQKVVTFCDYAYNTFQVTTGGMVLKLEQGENVFLQATDKNSLLGMEGANSIFSGFLLFPDMEA

SEQ ID NO: 1777 - protein, 253 aa, Homo sapiens
MMMKIPWGSIPVLMLLLLLGLIDISQAQLSCTGPPAIPGIPGIPGTPGPDGQPGTPGIKGEKGLPGLAGDHGEFGEKGDPGIPGNPGKVGPKGPMGPKGGPGAPGAPGPKGESGDYKATQKIAFSATRTINVPLRRDQTIRFDHVITNMNNNYEPRSGKFTCKVPGLYYFTYHASSRGNLCVNLMRGRERAQKVVTFCDYAYNTFQVTTGGMVLKLEQGENVFLQATDKNSLLGMEGANSIFSGFLLFPDMEA

SEQ ID NO: 1778 - protein, 245 aa, Homo sapiens
MDVGPSSLPHLGLKLLLLLLLLPLRGQANTGCYGIPGMPGLPGAPGKDGYDGLPGPKGEPGIPAIPGIRGPKGQKGEPGLPGHPGKNGPMGPPGMPGVPGPMGIPGEPGEEGRYKQKFQSVFTVTRQTHQPPAPNSLIRFNAVLTNPQGDYDTSTGKFTCKVPGLYYFVYHASHTANLCVLLYRSGVKVVTFCGHTSKTNQVNSGGVLLRLQVGEEVWLAVNDYYDMVGIQGSDSVFSGFLLFPD

SEQ ID NO: 1779 - protein, 245 aa, Homo sapiens; identical to SEQ ID NO: 1778

SEQ ID NO: 1780 - protein, 245 aa, Homo sapiens; identical to SEQ ID NO: 1778

SEQ ID NO: 1781 - protein, 258 aa, Homo sapiens
MLLVLVVLIPVLVSSGGPEGHYEMLGTCRMVCDPYPARGPGAGARTDGGDALSEQSGAPPPSTLVQGPQGKPGRTGKPGPPGPPGDPGPPGPVGPPGEKGEPGKPGPPGLPGAGGSGAISTATYTTVPRVAFYAGLKNPHEGYEVLKFDDVVTNLGNNYDAASGKFTCNIPGTYFFTYHVLMRGGDGTSMWADLCKNGQVRASAIAQDADQNYDYASNSVILHLDAGDEVFIKLDGGKAHGGNSNKYSTFSGFIIYSD

SEQ ID NO: 1782 - protein, 287 aa, Homo sapiens
MALGLLIAVPLLLQAAPRGAAHYEMMGTCRMICDPYTAAPGGEPPGAKAQPPGPSTAALEVMQDLSANPPPPFIQGPKGDPGRPGKPGPRGPPGEPGPPGPRGPPGEKGDSGRPGLPGLQLTAGTASGVGVVGGGAGVGGDSEGEVTSALSATFSGPKIAFYVGLKSPHEGYEVLKFDDVVTNLGNHYDPTTGKFSCQVRGIYFFTYHILMRGGDGTSMWADLCKNGQVRASAIAQDADQNYDYASNSVVLHLDSGDEVYVKLDGGKAHGGNNNKYSTFSGFLLYPD

SEQ ID NO: 1783 - protein, 255 aa, Homo sapiens
MVLLLVILIPVLVSSAGTSAHYEMLGTCRMVCDPYGGTKAPSTAATPDRGLMQSLPTFIQGPKGEAGRPGKAGPRGPPGEPGPPGPMGPPGEKGEPGRQGLPGPPGAPGLNAAGAISAATYSTVPKIAFYAGLKRQHEGYEVLKFDDVVTNLGNHYDPTTGKFTCSIPGIYFFTYHVLMRGGDGTSMWADLCKNNQVRASAIAQDADQNYDYASNSVVLHLEPGDEVYIKLDGGKAHGGNNNKYSTFSGFIIYAD

SEQ ID NO: 1784 - protein, 213 aa, Homo sapiens
MVLLLVILIPVLVSSAGTSAHYEMLGTCRMVCDPYGGTKAPSTAATPDRGLMQSLPTFIQGPPGAPGLNAAGAISAATYSTVPKIAFYAGLKRQHEGYEVLKFDDVVTNLGNHYDPTTGKFTCSIPGIYFFTYHVLMRGGDGTSMWADLCKNNQVRASAIAQDADQNYDYASNSVVLHLEPGDEVYIKLDGGKAHGGNNNKYSTFSGFIIYAD

SEQ ID NO: 1785 - protein, 238 aa, Homo sapiens
MVLLLLVAIPLLVHSSRGPAHYEMLGRCRMVCDPHGPRGPGPDGAPASVPPFPPGAKGEVGRRGKAGLRGPPGPPGPRGPPGEPGRPGPPGPPGPGPGGVAPAAGYVPRIAFYAGLRRPHEGYEVLRFDDVVTNVGNAYEAASGKFTCPMPGVYFFAYHVLMRGGDGTSMWADLMKNGQVRASAIAQDADQNYDYASNSVILHLDVGDEVFIKLDGGKVHGGNTNKYSTFSGFIIYPD

SEQ ID NO: 1786 - protein, 281 aa, Homo sapiens
MGSRGQGLLLAYCLLLAFASGLVLSRVPHVQGEQQEWEGTEELPSPPDHAERAEEQHEKYRPSQDQGLPASRCLRCCDPGTSMYPATAVPQINITILKGEKGDRGDRGLQGKYGKTGSAGARGHTGPKGQKGSMGAPGERCKSHYAAFSVGRKKPMHSNHYYQTVIFDTEFVNLYDHFNMFTGKFYCYVPGLYFFSLNVHTWNQKETYLHIMKNEEEVVILFAQVGDRSIMQSQSLMLELREQDQVWVRLYKGERENAIFSEELDTYITFSGYLVKHATEP

SEQ ID NO: 1787 - protein, 281 aa, Homo sapiens; identical to SEQ ID NO: 1786

SEQ ID NO: 1788 - protein, 281 aa, Homo sapiens; identical to SEQ ID NO: 1786

SEQ ID NO: 1789 - protein, 281 aa, Homo sapiens; identical to SEQ ID NO: 1786

SEQ ID NO: 1790 - protein, 281 aa, Homo sapiens; identical to SEQ ID NO: 1786

SEQ ID NO: 1791 - protein, 281 aa, Homo sapiens; identical to SEQ ID NO: 1786

SEQ ID NO: 1792 - protein, 281 aa, Homo sapiens; identical to SEQ ID NO: 1786

SEQ ID NO: 1793 - protein, 281 aa, Homo sapiens; identical to SEQ ID NO: 1786

SEQ ID NO: 1794 - protein, 199 aa, Homo sapiens
MYPATAVPQINITILKGEKGDRGDRGLQGKYGKTGSAGARGHTGPKGQKGSMGAPGERCKSHYAAFSVGRKKPMHSNHYYQTVIFDTEFVNLYDHFNMFTGKFYCYVPGLYFFSLNVHTWNQKETYLHIMKNEEEVVILFAQVGDRSIMQSQSLMLELREQDQVWVRLYKGERENAIFSEELDTYITFSGYLVKHATEP

SEQ ID NO: 1795 - protein, 199 aa, Homo sapiens; identical to SEQ ID NO: 1794

SEQ ID NO: 1796 - protein, 302 aa, Homo sapiens
MRRWAWAAVVVLLGPQLVLLGGVGARREAQRTQQPGQRADPPNATASASSREGLPEAPKPSQASGPEFSDAHMTWLNFVRRPDDGALRKRCGSRDKKPRDLFGPPGPPGAEVTAETLLHEFQELLKEATERRFSGLLDPLLPQGAGLRLVGEAFHCRLQGPRRVDKRTLVELHGFQAPAAQGAFLRGSGLSLASGRFTAPVSGIFQFSASLHVDHSELQGKARLRARDVVCVLICIESLCQRHTCLEAVSGLESNSRVFTLQVQGLLQLQAGQYASVFVDNGSGAVLTIQAGSSFSGLLLGT

SEQ ID NO: 1797 - protein, 330 aa, Homo sapiens
MGKLCLGPTLCPAAAAEESRDAEPRRELLCSGRPWTWRAAARVTTMIPWVLLACALPCAADPLLGAFARRDFRKGSPQLVCSLPGPQGPPGPPGAPGPSGMMGRMGFPGKDGQDGHDGDRGDSGEEGPPGRTGNRGKPGPKGKAGAIGRAGPRGPKGVNGTPGKHGTPGKKGPKGKKGEPGLPGPCSCGSGHTKSAFSVAVTKSYPRERLPIKFDKILMNEGGHYNASSGKFVCGVPGIYYFTYDITLANKHLAIGLVHNGQYRIRTFDANTGNHDVASGSTILALKQGDEVWLQIFYSEQNGLFYDPYWTDSLFTGFLIYADQDDPNEV

SEQ ID NO: 1798 - protein, 246 aa, Homo sapiens
MLWRQLIYWQLLALFFLPFCLCQDEYMESPQTGGLPPDCSKCCHGDYSFRGYQGPPGPPGPPGIPGNHGNNGNNGATGHEGAKGEKGDKGDLGPRGERGQHGPKGEKGYPGIPPELQIAFMASLATHFSNQNSGIIFSSVETNIGNFFDVMTGRFGAPVSGVYFFTFSMMKHEDVEEVYVYLMHNGNTVFSMYSYEMKGKSDTSSNHAVLKLAKGDEVWLRMGNGALHGDHQRFSTFAGFLLFETK

SEQ ID NO: 1799 - protein, 319 aa, Homo sapiens
MLWRQLIYWQLLALFFLPFCLCQDEYMEVSGRTNKVVARIVQSHQQTGRSGSRREKVRERSHPKTGTVDNNTSTDLKSLRPDELPHPEVDDLAQITTFWGQSPQTGGLPPDCSKCCHGDYSFRGYQGPPGPPGPPGIPGNHGNNGNNGATGHEGAKGEKGDKGDLGPRGERGQHGPKGEKGYPGIPPELQIAFMASLATHFSNQNSGIIFSSVETNIGNFFDVMTGRFGAPVSGVYFFTFSMMKHEDVEEVYVYLMHNGNTVFSMYSYEMKGKSDTSSNHAVLKLAKGDEVWLRMGNGALHGDHQRFSTFAGFLLFETK

SEQ ID NO: 1800 - protein, 100 aa, Homo sapiens
MLPLLLGLLGPAACWALGPTPGPGSSELRSAFSAARTTPLEGTSEMAVTFDKVYVNIGGDFDVATGQFRCRVPGAYFFSFTAGKAPHKSLSVMLVRNRDE

SEQ ID NO: 1801 - protein, 329 aa, Homo sapiens
MLPLLLGLLGPAACWALGPTPGPGSSELRSAFSAARTTPLEGTSEMAVTFDKVYVNIGGDFDVATGQFRCRVPGAYFFSFTAGKAPHKSLSVMLVRNRDEVQALAFDEQRRPGARRAASQSAMLQLDYGDTVWLRLHGAPQYALGAPGATFSGYLVYADADADAPARGPPAPPEPRSAFSAARTRSLVGSDAGPGPRHQPLAFDTEFVNIGGDFDAAAGVFRCRLPGAYFFSFTLGKLPRKTLSVKLMKNRDEVQAMIYDDGASRRREMQSQSVMLALRRGDAVWLLSHDHDGYGAYSNHGKYITFSGFLVYPDLAPAAPPGLGASELL

SEQ ID NO: 1802 - protein, 60 aa, Homo sapiens
MRPLLVLLLLGLAAGSPPLDDNKIPSLCPGHPGLPGLPGPRGDPGPRGEAGPAGPTGPAG

SEQ ID NO: 1803 - protein, 243 aa, Homo sapiens
MRPLLVLLLLGLAAGSPPLDDNKIPSLCPGHPGLPGTPGHHGSQGLPGRDGRDGRDGAPGAPGEKGEGGRPGLPGPRGDPGPRGEAGPAGPTGPAGECSVPPRSAFSAKRSESRVPPPSDAPLPFDRVLVNEQGHYDAVTGKFTCQVPGVYYFAVHATVYRASLQFDLVKNGESIASFFQFFGGWPKPASLSGGAMVRLEPEDQVWVQVGVGDYIGIYASIKTDSTFSGFLVYSDWHSSPVFA

SEQ ID NO: 1804 - protein, 243 aa, Homo sapiens; identical to SEQ ID NO: 1803

SEQ ID NO: 1805 - protein, 112 aa, Homo sapiens
MFVLLYVTSFAICASGQPRGNQLKGENYSPRYICSIPGLPGPPGPPGANGSPGPHGRIGLPGRDGRDGRKGEKGEKGTAGLRGKTGPLGLAGEKGDQGETGKKGPIGPEGEK

SEQ ID NO: 1806 - protein, 289 aa, Homo sapiens
MFVLLYVTSFAICASGQPRGNQLKGENYSPRYICSIPGLPGPPGPPGANGSPGPHGRIGLPGRDGRDGRKGEKGEKGTAGLRGKTGPLGLAGEKGDQGETGKKGPIGPEGEKGEVGPIGPPGPKGDRGEQGDPGLPGVCRCGSIVLKSAFSVGITTSYPEERLPIIFNKVLFNEGEHYNPATGKFICAFPGIYYFSYDITLANKHLAIGLVHNGQYRIKTFDANTGNHDVASGSTVIYLQPEDEVWLEIFFTDQNGLFSDPGWADSLFSGFLLYVDTDYLDSISEDDEL

SEQ ID NO: 1807 - protein, 289 aa, Homo sapiens; identical to SEQ ID NO: 1806

SEQ ID NO: 1808 - protein, 151 aa, Homo sapiens
MSRQEPKMFVLLYVTSFAICASGQPRGNQLKGENYSPRYICSIPGLPGPPGPPGANGSPGPHGRIGLPGRDGRDGRKGEKGEKGTAGLRGKTGPLGLAGEKGDQGETGKKGPIGPEGEKGEVGPIGPPGPKGDRGEQGDPGLPGVCRCGSI

SEQ ID NO: 1809 - protein, 296 aa, Homo sapiens
MSRQEPKMFVLLYVTSFAICASGQPRGNQLKGENYSPRYICSIPGLPGPPGPPGANGSPGPHGRIGLPGRDGRDGRKGEKGEKGTAGLRGKTGPLGLAGEKGDQGETGKKGPIGPEGEKGEVGPIGPPGPKGDRGEQGDPGLPGVCRCGSIVLKSAFSVGITTSYPEERLPIIFNKVLFNEGEHYNPATGKFICAFPGIYYFSYDITLANKHLAIGLVHNGQYRIKTFDANTGNHDVASGSTVIYLQPEDEVWLEIFFTDQNGLFSDPGWADSLFSGFLLYVDTDYLDSISEDDEL

SEQ ID NO: 1810 - protein, 256 aa, Homo sapiens [sequence omitted]

SEQ ID NO: 1811 - protein, 252 aa, Homo sapiens
MAAPALLLLALLLPVGAWPGLPRRPCVHCCRPAWPPGPYARVSDRDLWRGDLWRGLPRVRPTIDIEILKGEKGEAGVRGRAGRSGKEGPPGARGLQGRRGQKGQVGPPGAACRRAYAAFSVGRREGLHSSDHFQAVPFDTELVNLDGAFDLAAGRFLCTVPGVYFLSLNVHTWNYKETYLHIMLNRRPAAVLYAQPSERSVMQAQSLMLLLAAGDAVWVRMFQRDRDNAIYGEHGDLYITFSGHLVKPAAEL

SEQ ID NO: 1812 - protein, 333 aa, Homo sapiens
MRIWWLLLAIEICTGNINSQDTCRQGHPGIPGNPGHNGLPGRDGRDGAKGDKGDAGEPGRPGSPGKDGTSGEKGERGADGKVEAKGIKGDQGSRGSPGKHGPKGLAGPMGEKGLRGETGPQGQKGNKGDVGPTGPEGPRGNIGPLGPTGLPGPMGPIGKPGPKGEAGPTGPQGEPGVRGIRGWKGDRGEKGKIGETLVLPKSAFTVGLTVLSKFPSSDMPIKFDKILYNEFNHYDTAAGKFTCHIAGVYYFTYHITVFSRNVQVSLVKNGVKILHTKDAYMSSEDQASGGIVLQLKLGDEVWLQVTGGERFNGLFADEDDDTTFTGFLLFSSP

SEQ ID NO: 1813 - protein, 333 aa, Homo sapiens; identical to SEQ ID NO: 1812

SEQ ID NO: 1814 - protein, 333 aa, Homo sapiens
MRIWWLLLAIEICTGNINSQDTCRQGHPGIPGNPGHNGLPGRDGRDGAKGDKGDAGEPGCPGSPGKDGTSGEKGERGADGKVEAKGIKGDQGSRGSPGKHGPKGLAGPMGEKGLRGETGPQGQKGNKGDVGPTGPEGPRGNIGPLGPTGLPGPMGPIGKPGPKGEAGPTGPQGEPGVRGIRGWKGDRGEKGKIGETLVLPKSAFTVGLTVLSKFPSSDVPIKFDKILYNEFNHYDTAVGKFTCHIAGVYYFTYHITVFSRNVQVSLVKNGVKILHTRDAYVSSEDQASGSIVLQLKLGDEMWLQVTGGERFNGLFADEDDDTTFTGFLLFSSQ

SEQ ID NO: 1815 - protein, 333 aa, Homo sapiens; identical to SEQ ID NO: 1814

SEQ ID NO: 1816 - protein, 99 aa, Homo sapiens
MRIWWLLLAIEICTGNINSQDTCRQGHPGIPGNPGHNGLPGRDGRDGAKGDKGDAGEPGCPGSPGKDGTSGEKGERGADGKVEAKGIKGMFRCLWSKTE

SEQ ID NO: 1817 - protein, 49 aa, Homo sapiens
MSQGNKMLLTFHTDFSNEENGTIMFYKGFLAYYQAVDLDECASRSKSGE

SEQ ID NO: 1818 - protein, 72 aa, Homo sapiens
MSQGNKMLLTFHTDFSNEENGTIMFYKGFLAYYQAVDLDECASRSKSGEEDPQPQCQHLCHNYVGGYFCSCR

SEQ ID NO: 1819 - protein, 94 aa, Homo sapiens
MSQGNKMLLTFHTDFSNEENGTIMFYKGFLAYYQAVDLDECASRSKSGEEDPQPQCQHLCHNYVGGYFCSCRPGYELQEDRHSCQAECSSELYT

SEQ ID NO: 1820 - protein, 719 aa, Homo sapiens
MSVRFRVGREENAQWWLLYLLVPALFCRAGGSIPIPQKLFGEVTSPLFPKPYPNNFETTTVITVPTGYRVKLVFQQFDLEPSEGCFYDYVKISADKKSLGRFCGQLGSPLGNPPGKKEFMSQGNKMLLTFHTDFSNEENGTIMFYKGFLAYYQAVDLDECASRSKSGEEDPQPQCQHLCHNYVGGYFCSCRPGYELQEDRHSCQAECSSELYTEASGYISSLEYPRSYPPDLRCNYSIRVERGLTLHLKFLEPFDIDDHQQVHCPYDQLQIYANGKNIGEFCGKQRPPDLDTSSNAVDLLFFTDESGDSRGWKLRYTTEIIKCPQPKTLDEFTIIQNLQPQYQFRDYFIATCKQGYQLIEGNQVLHSFTAVCQDDGTWHRAMPRCKIKDCGQPRNLPNGDFRYTTTMGVNTYKARIQYYCHEPYYKMQTRAGSRESEQGVYTCTAQGIWKNEQKGEKIPRCLPVCGKPVNPVEQRQRIIGGQKAKMGNFPWQVFTNIHGRGGGALLGDRWILTAAHTLYPKEHEAQSNASLDVFLGHTNVEELMKLGNHPIRRVSVHPDYRQDESYNFEGDIALLELENSVTLGPNLLPICLPDNDTFYDLGLMGYVSGFGVMEEKIAHDLRFVRLPVANPQACENWLRGKNRMDVFSQNMFCAGHPSLKQDACQGDSGGVFAVRDPNTDRWVATGIVSWGIGCSRGYGFYTKVLNYVDWIKKEMEEED

SEQ ID NO: 1821 - protein, 705 aa, Homo sapiens
MWLLYLLVPALFCRAGGSIPIPQKLFGEVTSPLFPKPYPNNFETTTVITVPTGYRVKLVFQQFDLEPSEGCFYDYVKISADKKSLGRFCGQLGSPLGNPPGKKEFMSQGNKMLLTFHTDFSNEENGTIMFYKGFLAYYQAVDLDECASRSKSGEEDPQPQCQHLCHNYVGGYFCSCRPGYELQEDRHSCQAECSSELYTEASGYISSLEYPRSYPPDLRCNYSIRVERGLTLHLKFLEPFDIDDHQQVHCPYDQLQIYANGKNIGEFCGKQRPPDLDTSSNAVDLLFFTDESGDSRGWKLRYTTEIIKCPQPKTLDEFTIIQNLQPQYQFRDYFIATCKQGYQLIEGNQVLHSFTAVCQDDGTWHRAMPRCKIKDCGQPRNLPNGDFRYTTTMGVNTYKARIQYYCHEPYYKMQTRAGSRESEQGVYTCTAQGIWKNEQKGEKIPRCLPVCGKPVNPVEQRQRIIGGQKAKMGNFPWQVFTNIHGRGGGALLGDRWILTAAHTLYPKEHEAQSNASLDVFLGHTNVEELMKLGNHPIRRVSVHPDYRQDESYNFEGDIALLELENSVTLGPNLLPICLPDNDTFYDLGLMGYVSGFGVMEEKIAHDLRFVRLPVANPQACENWLRGKNRMDVFSQNMFCAGHPSLKQDACQGDSGGVFAVRDPNTDRWVATGIVSWGIGCSRGYGFYTKVLNYVDWIKKEMEEED

SEQ ID NO: 1822 - protein, 156 aa, Homo sapiens
MWLLYLLVPALFCRAGGSIPIPQKLFGEVTSPLFPKPYPNNFETTTVITVPTGYRVKLVFQQFDLEPSEGCFYDYVKISADKKSLGRFCGQLGSPLGNPPGKKEFMSQGNKMLLTFHTDFSNEENGTIMFYKGFLAYYQAVGEEDPQPQCQHLCHN

SEQ ID NO: 1823 - protein, 144 aa, Homo sapiens
MWLLYLLVPALFCRAGGSIPIPQKLFGEVTSPLFPKPYPNNFETTTVITVPTGYRVKLVFQQFDLEPSEGCFYDYVKISADKKSLGRFCGQLGSPLGNPPGKKEFMSQGNKMLLTFHTDFSNEENGTIMFYKGFLAYYQAVGLW

SEQ ID NO: 1824 - protein, 156 aa, Homo sapiens
MWLLYLLVPALFCRAGGSIPIPQKLFGEVTSPLFPKPYPNNFETTTVITVPTGYRVKLVFQQFDLEPSEGCFYDYVKKEFMSQGNKMLLTFHTDFSNEENGTIMFYKGFLAYYQAVDLDECASRSKSGEEDPQPQCQHLCHNYVGGYFCSCRPGYE

SEQ ID NO: 1825 - protein, 671 aa, Homo sapiens
MWLLYLLVPALFCRAGGSIPIPQKLFGEVTSPLFPKPYPNNFETTTVITVPTGYRVKLVFQQFDLEPSEGCFYDYVKMLLTFHTDFSNEENGTIMFYKGFLAYYQAVDLDECASRSKSGEEDPQPQCQHLCHNYVGGYFCSCRPGYELQEDRHSCQAECSSELYTEASGYISSLEYPRSYPPDLRCNYSIRVERGLTLHLKFLEPFDIDDHQQVHCPYDQLQIYANGKNIGEFCGKQRPPDLDTSSNAVDLLFFTDESGDSRGWKLRYTTEIIKCPQPKTLDEFTIIQNLQPQYQFRDYFIATCKQGYQLIEGNQVLHSFTAVCQDDGTWHRAMPRCKIKDCGQPRNLPNGDFRYTTTMGVNTYKARIQYYCHEPYYKMQTRAGSRESEQGVYTCTAQGIWKNEQKGEKIPRCLPVCGKPVNPVEQRQRIIGGQKAKMGNFPWQVFTNIHGRGGGALLGDRWILTAAHTLYPKEHEAQSNASLDVFLGHTNVEELMKLGNHPIRRVSVHPDYRQDESYNFEGDIALLELENSVTLGPNLLPICLPDNDTFYDLGLMGYVSGFGVMEEKIAHDLRFVRLPVANPQACENWLRGKNRMDVFSQNMFCAGHPSLKQDACQGDSGGVFAVRDPNTDRWVATGIVSWGIGCSRGYGFYTKVLNYVDWIKKEMEEED

SEQ ID NO: 1826 - protein, 83 aa, Homo sapiens
GLRPGAVPGLCRGLCHNLIRRFGSKPVLWSARLPSGQAPWSEGVCILREEFAADLPHTAFLGEQDCPPPQGLPGPLPNRGCEL

SEQ ID NO: 1827 - protein, 110 aa, Homo sapiens
MPGPRVWGKYLWRSPHSKGCPGAISHSSVRIQASSVVSKAPLWAGPLVRGSFQPISEASRGSEAINAPGDNPAKVQNHCQEPYYQAAAAGCGSYADPITDQPSVRFSPQL

SEQ ID NO: 1828 - protein, 314 aa, Homo sapiens
MPGPRVWGKYLWRSPHSKGCPGAMWWLLLWGVLQACPTRGSVLLAQELPQQLTSPGYPEPYGKGQESSTDIKAPEGFAVRLVFQDFDLEPSQDCAGDSVTISFVGSDPSQFCGQQGSPLGRPPGQREFVSSGRSLRLTFRTQPSSENKTAHLHKGFLALYQTVAVNYSQPISEASRGSEAINAPGDNPAKVQNHCQEPYYQAAAAASTPSLFLCLSSFTPQGHSPVQPQGPGKTDRMGRRFFSVCLSADGQSPPLPRIRRPSVLPEPSWATSPGKPSPVSTAVGAGPCWGTDGSSLLPTPSTPRTVFLSGRTRV

SEQ ID NO: 1829 - protein, 487 aa, Homo sapiens
MPGPRVWGKYLWRSPHSKGCPGAMWWLLLWGVLQACPTRGSVLLAQELPQQLTSPGYPEPYGKGQESSTDIKAPEGFAVRLVFQDFDLEPSQDCAGDSVTISFVGSDPSQFCGQQGSPLGRPPGQREFVSSGRSLRLTFRTQPSSENKTAHLHKGFLALYQTVAVNYSQPISEASRGSEAINAPGDNPAKVQNHCQEPYYQAAAAGALTCATPGTWKDRQDGEEVLQCMPVCGRPVTPIAQNQTTLGSSRAKLGNFPWQAFTSIHGRGGGALLGDRWILTAAHTIYPKDSVSLRKNQSVNVFLGHTAIDEMLKLGNHPVHRVVVHPDYRQNESHNFSGDIALLELQHSIPLGPNVLPVCLPDNETLYRSGLLGYVSGFGMEMGWLTTELKYSRLPVAPREACNAWLQKRQRPEVFSDNMFCVGDETQRHSVCQGDSGSVYVVWDNHAHHWVATGIVSWGIGCGEGYDFYTKVLSYVDWIKGVMNGKN

SEQ ID NO: 1830 - protein, 192 aa, Homo sapiens
MPGPRVWGKYLWRSPHSKGCPGAMWWLLLWGVLQACPTRGSVLLAQELPQQLTSPGYPEPYGKGQESSTDIKAPEGFAVRLVFQDFDLEPSQDCAGDSVTISFVGSDPSQFCGQQGSPLGRPPGQREFVSSGRSLRLTFRTQPSSENKTAHLHKGFLALYQTVGALTCATPGTWKDRQDGEEVLQCMPVCGR

SEQ ID NO: 1831 - protein, 187 aa, Homo sapiens
MPGPRVWGKYLWRSPHSKGCPGAMWWLLLWGVLQACPTRGSVLLAQELPQQLTSPGYPEPYGKGQESSTDIKAPEGFAVRLVFQDFDLEPSQDCAGDSVTISFVGSDPSQFCGQQGSPLGRPPGQREFVSSGRSLRLTFRTQPSSENKTAHLHKGFLALYQTVGECPSWGCREGASVPSHDPGIFKP

SEQ ID NO: 1832 - protein, 66 aa, Homo sapiens
  VARIANT 1: note = misc_feature - Xaa can be any naturally occurring amino acid
XNPAKVQNHCQEPYYQAAAAGALTCATPGTWKDRQDGEEVLQCMPGCGSYADPITDQPSVRFSPQL

SEQ ID NO: 1833 - protein, 85 aa, Homo sapiens
  VARIANT 1: note = misc_feature - Xaa can be any naturally occurring amino acid
XPGLRPGAVPGLCRGLCHNLIRRFGSKPVLWSARLPSGQAPWSEGVCILREEFAADLPHTAFLGEQDCPPPQGLPGPLPNRGCEL

SEQ ID NO: 1834 - protein, 194 aa, Homo sapiens
  VARIANT 1: note = misc_feature - Xaa can be any naturally occurring amino acid
XSFVGSDPSQFCGQQGSPLGRPPGQREFVSSGRSLRLTFRTQPSSENKTAHLHKGFLALYQTVVCGRPVTPIAQNQTTLGSSRAKLGNFPWQAFTSIHGRGGGALLGDRWILTAAHTIYPKDSVSLRKNQSVNVFLGHTAIDEMLKLGNHPVHRVVVHPDYRQNESHNFSGDIALLELQHSIPLGPNVLPVCLP

SEQ ID NO: 1835 - protein, 157 aa, Homo sapiens
MKNCGVNCSGDVFTALIGEIASPNYPKPYPENSRCEYQIRLEKGFQVVVTLRREDFDVEAADSAGNCLDSLVFVAGDRQFGPYCGHGFPGPLNIETKSNALDIIFQTDLTGQKKGWKLRYHGDPMPCPKEDTPNSVWEPAKAKYVFRDVVQITCLDG

SEQ ID NO: 1836 - protein, 521 aa, Homo sapiens
MKNCGVNCSGDVFTALIGEIASPNYPKPYPENSRCEYQIRLEKGFQVVVTLRREDFDVEAADSAGNCLDSLVFVAGDRQFGPYCGHGFPGPLNIETKSNALDIIFQTDLTGQKKGWKLRYHGDPMPCPKEDTPNSVWEPAKAKYVFRDVVQITCLDGFEVVEGRVGATSFYSTCQSNGKWSNSKLKCQPVDCGIPESIENGKVEDPESTLFGSVIRYTCEEPYYYMENGGGGEYHCAGNGSWVNEVLGPELPKCVPVCGVPREPFEEKQRIIGGSDADIKNFPWQVFFDNPWAGGALINEYWVLTAAHVVEGNREPTMYVGSTSVQTSRLAKSKMLTPEHVFIHPGWKLLEVPEGRTNFDNDIALVRLKDPVKMGPTVSPICLPGTSSDYNLMDGDLGLISGWGRTEKRDRAVRLKAARLPVAPLRKCKEVKVEKPTADAEAYVFTPNMICAGGEKGMDSCKGDSGGAFAVQDPNDKTKFYAAGLVSWGPQCGTYGLYTRVKNYVDWIMKTMQENSTPRED

SEQ ID NO: 1837 - protein, 101 aa, Homo sapiens
MWCIVLFSLLAWVYAEPTMYGEILSPNYPQAYPSEVEKSWDIEVPEGYGIHLYFTHLDIELSENCAYDSVQIISGDTEEGRLCGQRSSNNPHSPIVEEFQV

SEQ ID NO: 1838 - protein, 103 aa, Homo sapiens
MWCIVLFSLLAWVYAEPTMYGEILSPNYPQAYPSEVEKSWDIEVPEGYGIHLYFTHLDIELSENCAYDSVQIISGDTEEGRLCGQRSSNNPHSPIVEEFQVPY

SEQ ID NO: 1839 - protein, 168 aa, Homo sapiens
MWCIVLFSLLAWVYAEPTMYGEILSPNYPQAYPSEVEKSWDIEVPEGYGIHLYFTHLDIELSENCAYDSVQIISGDTEEGRLCGQRSSNNPHSPIVEEFQVPYNKLQVIFKSDFSNEERFTGFAAYYVATDINECTDFVDVPCSHFCNNFIGGYFCSCPPEYFLHDDM

SEQ ID NO: 1840 - protein, 688 aa, Homo sapiens
MWCIVLFSLLAWVYAEPTMYGEILSPNYPQAYPSEVEKSWDIEVPEGYGIHLYFTHLDIELSENCAYDSVQIISGDTEEGRLCGQRSSNNPHSPIVEEFQVPYNKLQVIFKSDFSNEERFTGFAAYYVATDINECTDFVDVPCSHFCNNFIGGYFCSCPPEYFLHDDMKNCGVNCSGDVFTALIGEIASPNYPKPYPENSRCEYQIRLEKGFQVVVTLRREDFDVEAADSAGNCLDSLVFVAGDRQFGPYCGHGFPGPLNIETKSNALDIIFQTDLTGQKKGWKLRYHGDPMPCPKEDTPNSVWEPAKAKYVFRDVVQITCLDGFEVVEGRVGATSFYSTCQSNGKWSNSKLKCQPVDCGIPESIENGKVEDPESTLFGSVIRYTCEEPYYYMENGGGGEYHCAGNGSWVNEVLGPELPKCVPVCGVPREPFEEKQRIIGGSDADIKNFPWQVFFDNPWAGGALINEYWVLTAAHVVEGNREPTMYVGSTSVQTSRLAKSKMLTPEHVFIHPGWKLLEVPEGRTNFDNDIALVRLKDPVKMGPTVSPICLPGTSSDYNLMDGDLGLISGWGRTEKRDRAVRLKAARLPVAPLRKCKEVKVEKPTADAEAYVFTPNMICAGGEKGMDSCKGDSGGAFAVQDPNDKTKFYAAGLVSWGPQCGTYGLYTRVKNYVDWIMKTMQENSTPRED

SEQ ID NO: 1841 - protein, 688 aa, Homo sapiens; identical to SEQ ID NO: 1840

SEQ ID NO: 1842 - protein, 688 aa, Homo sapiens; identical to SEQ ID NO: 1840

SEQ ID NO: 1843 - protein, 682 aa, Homo sapiens [sequence omitted]

SEQ ID NO: 1844 - protein, 355 aa, Homo sapiens
  VARIANT 1: note = misc_feature - Xaa can be any naturally occurring amino acid
XSKVRRCRKPGPRDRQLTRVDKSPEMWCIVLFSLLAWVYAEPTMYGEILSPNYPQAYPSEVEKSWDIEVPEGYGIHLYFTHLDIELSENCAYDSVQIISGDTEEGRLCGQRSSNNPHSPIVEEFQVPYNKLQVIFKSDFSNEERFTGFAAYYVATDINECTDFVDVPCSHFCNNFIGGYFCSCPPEYFLHDDMKNCGVNCSGDVFTALIGEIASPNYPKPYPENSRCEYQIRLEKGFQVVVTLRREDFDVEAADSAGNCLDSLVFVAGDRQFGPYCGHGFPGPLNIETKSNALDIIFQTDLTGQKKGWKLRYHGDPMPCPKEDTPNSVWEPAKAKYVFRDVVQITCLDGFEVVEK

SEQ ID NO: 1845 - protein, 620 aa, Homo sapiens
MGPLMVLFCLLFLYPAGHCPNPGISLGAVRTGFRFGHGDKVRYRCSSNLVLTGSSERECQGNGVWSGTEPICRQPYSYDFPEDVAPALGTSFSHMLGATNPTQKTKESLGRKIQIQRSGHLNLYLLLDCSQSVSENDFLIFKESASLMVDRIFSFEINVSVAIITFASEPKVLMSVLNDNSRDMTEVISSLENANYKDHENGTGTNTYAALNSVYLMMNNQMRLLGMETMAWQEIRHAIILLTDGKSNMGGSPKTAVDHIREILNINQKRNDYLDIYAIGVGKLDVDWRELNELGSKKDGERHAFILQDTKALHQVFEHMLDVSKLTDTICGVGNMSANASDQERTPWHVTIKPKSQETCRGALISDQWVLTAAHCFRDGNDHSLWRVNVGDPKSQWGKEFLIEKAVISPGFDVFAKKNQGILEFYGDDIALLKLAQKVKMSTHARPICLPCTMEANLALRRPQGSTCRDHENELLNKQSVPAHFVALNGSKLNINLKMGVEWTSCAEVVSQEKTMFPNLTDVREVVTDQFLCSGTQEDESPCKGESGGAVFLERRFRFFQVGLVSWGLYNPCLGSADKNSRKRAPRSKVPPPRDFHINLFRMQPWLRQHLGDVLNFLPL

SEQ ID NO: 1846 - protein, 203 aa, Homo sapiens
MGPLMVLFCLLFLYPGLADSAPSCPQNVNISGGTFTLSHGWAPGSLLTYSCPQGLYPSPASRLCKSSGQWQTPGATRSLSKAVCKPGHCPNPGISLGAVRTGFRFGHGDKVRYRCSSNLVLTGSSERECQGNGVWSGTEPICRQPYSYDFPEDVAPALGTSFSHMLGATNPTQKTKESLGRKIQIQRSGHLNLYLLLDCSQSV

SEQ ID NO: 1847 - protein, 139 aa, Homo sapiens
MGPLMVLFCLLFLYPGLADSAPSCPQNVNISGGTFTLSHGWAPGSLLTYSCPQGLYPSPASRLCKSSGQWQTPGATRSLSKAVCKPVRCPAPVSFENGIYTPRLGSYPVGGNVSFECEDGFILRGSPVRQCRPNGMWDG

SEQ ID NO: 1848 - protein, 752 aa, Homo sapiens
MGPLMVLFCLLFLYPGLADSAPSCPQNVNISGGTFTLSHGWAPGSLLTYSCPQGLYPSPASRLCKSSGQWQTPGATRSLSKAVCKPVRCPAPVSFENGIYTPRLGSYPVGGNVSFECEDGFILRGSPVRQCRPNGMWDGETAVCDNGAGHCPNPGISLGAVRTGFRFGHGDKVRYRCSSNLVLTGSSERECQGNGVWSGTEPICRQPYSYDFPEDVAPALGTSFSHMLGATNPTQKTKESLGRKIQIQRSGHLNLYLLLDCSQSVSENDFLIFKESASLMVDRIFSFEINVSVAIITFASEPKVLMSVLNDNSRDMTEVISSLENANYKDHENGTGTNTYAALNSVYLMMNNQMRLLGMETMAWQEIRHAIILLTDGKSNMGGSPKTAVDHIREILNINQKRNDYLDIYAIGVGKLDVDWRELNELGSKKDGERHAFILQDTKALHQVFEHMLDVSKLTDTICGVGNMSANASDQERTPWHVTIKPKSQETCRGALISDQWVLTAAHCFRDGNDHSLWRVNVGDPKSQWGKEFLIEKAVISPGFDVFAKKNQGILEFYGDDIALLKLAQKVKMSTHARPICLPCTMEANLALRRPQGSTCRDHENELLNKQSVPAHFVALNGSKLNINLKMGVEWTSCAEVVSQEKTMFPNLTDVREVVTDQFLCSGTQEDESPCKGESGGAVFLERRFRFFQVGLVSWGLYNPCLGSADKNSRKRAPRSKVPPPRDFHINLFRMQPWLRQHLGDVLNFLPL

SEQ ID NO: 1849 - protein, 328 aa, Homo sapiens
MGPLMVLFCLLFLYPGLADSAPSCPQNVNISGGTFTLSHGWAPGSLLTYSCPQGLYPSPASRLCKSSGQWQTPGATRSLSKAVCKPVRCPAPVSFENGIYTPRLGSYPVGGNVSFECEDGFILRGSPVRQCRPNGMWDGETAVCDNGAGHCPNPGISLGAVRTGFRFGHGDKVRYRCSSNLVLTGSSERECQGNGVWSGTEPICRQPYSYDFPEDVAPALGTSFSHMLGATNPTQKTKESLGRKIQIQRSGHLNLYLLLDCSQSVSENDFLIFKESASLMVDRVRNQESACSRGLPVLTISLCLLPLLRTPLTAHLLQEVFSDYTHAM

SEQ ID NO: 1850 - protein, 104 aa, Homo sapiens
MGPLMVLFCLLFLYPGLADSAPSCPQNVNISGGTFTLSHGWAPGSLLTYSCPQGLYPSPASRLCKSSGQWQTPGATRSLSKAVCKREAPCGLCSGCALSSPCLL

SEQ ID NO: 1851 - protein, 136 aa, Homo sapiens
MGRPGRAGHCPNPGISLGAVRTGFRFGHGDKVRYRCSSNLVLTGSSERECQGNGVWSGTEPICRQPYSYDFPEDVAPALGTSFSHMLGATNPTQKTKESLGRKIQIQRSGHLNLYLLLDCSQSVSENDFLIFKESA

SEQ ID NO: 1852 - protein, 506 aa, Homo sapiens
MGTRSAIAAPRILCSRGLRSGSARATGSGVERSPSAAIFSFEINVSVAIITFASEPKVLMSVLNDNSRDMTEVISSLENANYKDHENGTGTNTYAALNSVYLMMNNQMRLLGMETMAWQEIRHAIILLTDGKSNMGGSPKTAVDHIREILNINQKRNDYLDIYAIGVGKLDVDWRELNELGSKKDGERHAFILQDTKALHQVFEHMLDVSKLTDTICGVGNMSANASDQERTPWHVTIKPKSQETCRGALISDQWVLTAAHCFRDGNDHSLWRVNVGDPKSQWGKEFLIEKAVISPGFDVFAKKNQGILEFYGDDIALLKLAQKVKMSTHARPICLPCTMEANLALRRPQGSTCRDHENELLNKQSVPAHFVALNGSKLNINLKMGVEWTSCAEVVSQEKTMFPNLTDVREVVTDQFLCSGTQEDESPCKGESGGAVFLERRFRFFQVGLVSWGLYNPCLGSADKNSRKRAPRSKVPPPRDFHINLFRMQPWLRQHLGDVLNFLPL

SEQ ID NO: 1853 - protein, 463 aa, Homo sapiens
MGTRSAIAAPRILCSRGLRSGSARATGSGVERSPSAANPTLMTSLRTWPLPWALPSPTCLGPPIPPRRQRIFSFEINVSVAIITFASEPKVLMSVLNDNSRDMTEVISSLENANYKDHENGTGTNTYAALNSVYLMMNNQMRLLGMETMAWQEIRHAIILLTDGKSNMGGSPKTAVDHIREILNINQKRNDYLDIYAIGVGKLDVDWRELNELGSKKDGERHAFILQDTKALHQVFEHMLDVSKLTDTICGVGNMSANASDQERTPWHVTIKPKSQETCRGALISDQWVLTAAHCFRDGNDHSLWRVNVGDPKSQWGKEFLIEKAVISPGFDVFAKKNQGILEFYGDDIALLKLAQKVKMSTHARPICLPCTMEANLALRRPQGSTCRDHENELLNKQSVPAHFVALNGSKLNINLKMGVEWTSCAEVVSQEKTMFPNLTDVREVVTDQFLCSGTQEDESPCK

SEQ ID NO: 1854 - protein, 84 aa, Homo sapiens
MGTRSAIAAPRILCSRGLRSGSARATGSGVERSPSAANPTLMTSLRTWPLPWALPSPTCLGPPIPPRRQRKAWAVKSKSSALVI

SEQ ID NO: 1855 - protein, 84 aa, Homo sapiens; identical to SEQ ID NO: 1854

SEQ ID NO: 1856 - protein, 538 aa, Homo sapiens
MRALCIRETCSSELGFSRNWSRRKAGHCPNPGISLGAVRTGFRFGHGDKVRYRCSSNLVLTGSSERECQGNGVWSGTEPICRQPYSYDFPEDVAPALGTSFSHMLGATNPTQKTKDHENGTGTNTYAALNSVYLMMNNQMRLLGMETMAWQEIRHAIILLTDGKSNMGGSPKTAVDHIREILNINQKRNDYLDIYAIGVGKLDVDWRELNELGSKKDGERHAFILQDTKALHQVFEHMLDVSKLTDTICGVGNMSANASDQERTPWHVTIKPKSQETCRGALISDQWVLTAAHCFRDGNDHSLWRVNVGDPKSQWGKEFLIEKAVISPGFDVFAKKNQGILEFYGDDIALLKLAQKVKMSTHARPICLPCTMEANLALRRPQGSTCRDHENELLNKQSVPAHFVALNGSKLNINLKMGVEWTSCAEVVSQEKTMFPNLTDVREVVTDQFLCSGTQEDESPCKGESGGAVFLERRFRFFQVGLVSWGLYNPCLGSADKNSRKRAPRSKVPPPRDFHINLFRMQPWLRQHLGDVLNFLPL

SEQ ID NO: 1857 - protein, 158 aa, Homo sapiens
MRALCIRETCSSELGFSRNWSRRKAGHCPNPGISLGAVRTGFRFGHGDKVRYRCSSNLVLTGSSERECQGNGVWSGTEPICRQPYSYDFPEDVAPALGTSFSHMLGATNPTQKTKESLGRKIQIQRSGHLNLYLLLDCSQSVSENDFLIFKESASLMV

SEQ ID NO: 1858 - protein, 160 aa, Homo sapiens
  VARIANT 1: note = misc_feature - Xaa can be any naturally occurring amino acid
XLMVDRIFSFEINVSVAIITFASEPKVLMSVLNDNSRDMTEVISSLENANYKDHENGTGTNTYAALNSVYLMMNNQMRLLGMETMAWQEIRHAIILLTDGKSNMGGSPKTAVDHIREILNINQKRNDYLAPKPQESGDFPLPHQTSMPSGWASWMWTGEN

SEQ ID NO: 1859 - protein, 526 aa, Homo sapiens
  VARIANT 1: note = misc_feature - Xaa can be any naturally occurring amino acid
XMVLFCLLFLYPAGHCPNPGISLGAVRTGFRFGHGDKVRYRCSSNLVLTGSSERECQGNGVWSGTEPICRQPYSYDFPEDVAPALGTSFSHMLGATNPTQKTKDHENGTGTNTYAALNSVYLMMNNQMRLLGMETMAWQEIRHAIILLTDGKSNMGGSPKTAVDHIREILNINQKRNDYLDIYAIGVGKLDVDWRELNELGSKKDGERHAFILQDTKALHQVFEHMLDVSKLTDTICGVGNMSANASDQERTPWHVTIKPKSQETCRGALISDQWVLTAAHCFRDGNDHSLWRVNVGDPKSQWGKEFLIEKAVISPGFDVFAKKNQGILEFYGDDIALLKLAQKVKMSTHARPICLPCTMEANLALRRPQGSTCRDHENELLNKQSVPAHFVALNGSKLNINLKMGVEWTSCAEVVSQEKTMFPNLTDVREVVTDQFLCSGTQEDESPCKGESGGAVFLERRFRFFQVGLVSWGLYNPCLGSADKNSRKRAPRSKVPPPRDFHINLFRMQPWLRQHLGDVLNFLPL

SEQ ID NO: 1860 - protein, 57 aa, Homo sapiens
MAAVRVLVASRLAAASAFTSLSPGGRTPSQRAALHLSVPRPAARVALDPGAPEPWRG

SEQ ID NO: 1861 - protein, 163 aa, Homo sapiens
MAAVRVLVASRLAAASAFTSLSPGGRTPSQRAALHLSVPRPAARVALVLSGCGVYDGTEIHEASAILVHLSRGGAEVQIFAPDVPQMHVIDHTKGQPSEGESRNVLTESARIARGKITDLANLSAANHDAAIFPGGFGAAKNLDSVSLWTSSLWNCERYMSVM

SEQ ID NO: 1862 - protein, 237 aa, Homo sapiens
MAAVRVLVASRLAAASAFTSLSPGGRTPSQRAALHLSVPRPAARVALVLSGCGVYDGTEIHEASAILVHLSRGGAEVQIFAPDVPQMHVIDHTKGQPSEGESRNVLTESARIARGKITDLANLSAANHDAAIFPGGFGAAKNLLCCIAPVLAAKVLRGVEVTVGHEQEEGGKWPYAGTAEAIKALGAKHCVKEVVEAHVDQKNKVVTTPAFMCETALHYIHDGIGAMVRKVLELTGK

SEQ ID NO: 1863 - protein, 217 aa, Homo sapiens
MAAVRVLVASRLAAASAFTSLSPGGRTPSQRAALHLSVPRPAARVALVLSGCGVYDGTEIHEASAILVHLSRGGAEVQIFAPDVPQMHVIDHTKGQPSEGESRNVLTESARIARGKITDLANLSAANHDAAIFPGGFGAAKNLSTFAVDGKDCKVNKEVERVLKEFHQAGKPIGCDASTSLPAPAPWWSWNAALCCPGLSCVWCWQGESRTCVGEHQ

SEQ ID NO: 1864 - protein, 268 aa, Homo sapiens
MAAVRVLVASRLAAASAFTSLSPGGRTPSQRAALHLSVPRPAARVALVLSGCGVYDGTEIHEASAILVHLSRGGAEVQIFAPDVPQMHVIDHTKGQPSEGESRNVLTESARIARGKITDLANLSAANHDAAIFPGGFGAAKNLSTFAVDGKDCKVNKEVERVLKEFHQAGKPIGLCCIAPVLAAKVLRGVEVTVGHEQEEGGKWPYAGTAEAIKALGAKHCVKEVVEAHVDQKNKVVTTPAFMCETALHYIHDGIGAMVRKVLELTGK

SEQ ID NO: 1865 - protein, 224 aa, Homo sapiens
PSQRAALHLSVPRPAARVALVLSGCGVYDGTEIHEASAILVHLSRGGAEVQIFAPDVPQMHVIDHTKGQPSEGESRNVLTESARIARGKITDLANLSAANHDAAIFPGGFGAAKNLSTFAVDGKDCKVNKEVERVLKEFHQAGKPIGHSLKDLPGHCPGRPLKWSLRKRCRLRAPEGGPCCSRVTAGVKVSPMVSTSGSRPCQRSVPWMSAQREEPMALSSVTD

SEQ ID NO: 1866 - protein, 184 aa, Homo sapiens
QPSEGESRNVLTESARIARGKITDLANLSAANHDAAIFPGGFGAAKNLSTFAVDGKDCKVNKEVERVLKEFHQAGKPIGLCCIAPVLAAKVLRGVEVTVGHEQEEGGKWPYAGTAEAIKALGAKHCVKEVVEAHVDQKNKVVTTPAFMCETALHYIHDGIGAMASWACWLMPVIPALWEAKARG

SEQ ID NO: 1867 - protein, 191 aa, Homo sapiens
  VARIANT 1: note = misc_feature - Xaa can be any naturally occurring amino acid
XQMHVIDHTKGQPSEGESRNVLTESARIARGKITDLANLSAANHDAAIFPGGFGAAKNLSTFAVDGKDCKVNKEVERVLKEFHQAGKPIGLCCIAPVLAAKVLRGVEVTVGHEQEEGGKWPYAGTAEAIKALGAKHCVKEVVEAHVDQKNKVVTTPAFMCETALHYIHDGIGAMEEREIAAPQPPGLTSGE

SEQ ID NO: 1868 - protein, 190 aa, Homo sapiens
  VARIANT 1: note = misc_feature - Xaa can be any naturally occurring amino acid
XSRGGAEVQIFAPDVPQMHVIDHTKGQPSEGESRNVLTESARIARGKITDLANLSAANHDAAIFPGGFGAAKNLSTFAVDGKDCKVNKEVERVLKEFHQAGKPIGPGDGGDVSMSVSLRSLSLALSLPGGSCSQPSLPPHRHPACPSGPARLLCLEGATKEEDVNVQVLREAGPAASVSVFRPQEEPRPG

SEQ ID NO: 1869 - protein, 266 aa, Homo sapiens
CRLNQLSSQGEGSVARQRSVEWRGEASRWNSQMTACRHQESGRTYRRQPCTELGTCNNNSTLGVFALNCFTKGQKNSTLIFTRENTIRNCSCSADIRDCDYSLANLMCNCKTVLPLAVERTSYNGHLTIWFTDTSALGHLLNFTLVQDLKLSLCSTNTLPTEYLAICGLKRLRINMEAKHPFPEQSLLIHSGGDSDSREKPMWLHKGWQPCMYISFLDMALFNRDSALKSYSIENVTSIANNFPDFSYFRTFPMPSNKSYVVTFIY

SEQ ID NO: 1870 - protein, 219 aa, Homo sapiens
MAPPSRHCLLLISTLGVFALNCFTKGQKNSTLIFTRENTIRNCSCSADIRDCDYSLANLMCNCKTVLPLAVERTSYNGHLTIWFTDTSALGHLLNFTLVQDLKLSLCSTNTLPTEYLAICGLKRLRINMEAKHPFPEQSLLIHSGGDSDSREKPMWLHKGWQPCMYISFLDMALFNRDSALKSYSIENVTSIANNFPDFSYFRTFPMPSNKSYVVTFIY

SEQ ID NO: 1871 - protein, 219 aa, Homo sapiens; identical to SEQ ID NO: 1870

SEQ ID NO: 1872 - protein, 219 aa, Homo sapiens; identical to SEQ ID NO: 1870

SEQ ID NO: 1873 - protein, 148 aa, Homo sapiens
MFIKVMFGAGCSVLVNTSCRLVNLTAHLRQKAGLPPDATIALLAEDGNLVSLEEDLKEGASRAQTMGNSLLKERAIYVLVRIIKGEDMASTRYESLLENLDDHYPELAEELRRLSGLSSVGHNWRKRMGTRRGRHEQSPTSRPRKGPD

SEQ ID NO: 1874 - protein, 157 aa, Homo sapiens
MFIKVMFGAGCSVLVNTSCRLVNLTAHLRQKAGLPPDATIALLAEDGNLVSLEEDLKEGASRAQTMGNSLLKERAIYVLVRIISKRERTWPPPAMSPYWRTWMTITQSWQRNCAGCQASPLWATTGGSVWALGEAAMSKAPLQGPERALIKGMDCTL

SEQ ID NO: 1875 - protein, 142 aa, Homo sapiens
MFIKVMFGAGCSVLVNTSCRLVNLTAHLRQKAGLPPDATIALLAEDGNLVSLEEDLKEGASRAQTMGNSLLKERAIYVLVRIISKVAQEGEDMASTRYESLLENLDDHYPELAGANRQQPSRTPLAESGIAEKLHQQEGQGP

SEQ ID NO: 1876 - protein, 243 aa, Homo sapiens
MLLSLLGACAVVGPFHGPEWEPVQGLLSQNHSCRDPQCCGNLLVLCLFLVWQVRHCWHQVTRTRFSTRNVIKVPLQKRAVPSMRCETVFKLTPEFFSPGKSRGLDSQQCAQRQRWGYRRSLQESWAQNLLSPQHPCPGPPSGVHTHSEPIFCTTSISNTCLLPQNSSWKAWQVPWCLHDGQTRPALDMCQEMEQLLLHSQERLVSLEPVISVRSRPTSMTLTTSLPNLLSAERLQFCPQRAPA

SEQ ID NO: 1877 - protein, 696 aa, Homo sapiens
MAMARLGSWLGEAQWLALVSLFVAALATVGLYLAQWALARARPQPQRRAVEPGEGPRPGSDALLSWILTLGSWRSQWQAAWVTALNEEAERKGGPPFLSFEEDPRQQALELVVQEVSSVLRSAEEKVVVCHVVGQAIQFLVSETPALGAGCRLYDMRLSPFHLQLEFHMKEKREDLQISWSFISVPEMAVNIQPKALGEDQVAETSAMSDVLKDILKHLAGSASPSVVLITKPTTVKEAQNLQCAASTAQESCPPKPPRAHELKLLVRNIHVLLLSEPGASGHINAVCVVQLNDPVQRFSSTLTKNTPDLMWEEEFTFELNAKSKELHLQISEAGRSSEGLLATATVPLDLFKKQPSGPQSFTLTSGSACGSSVLGSVTAEFSYMEPGELKSWPIPPPVPAAKIEKDRTVMPCGTVVTTVTAVKTKPRVDVGRASPLSSDSPVKTPIKVKVIEKDISVQAIACRSAPVSKTLSSSDTELLVLNGSDPVAEVAIRQLSESSKLKLKSPRKKSTIIISGISKTSLSQDHDAALMQGYTASVDSTHQEDAPSHPERAAASAPPEEAESAQASLAPKPQEDELDSWDLEKEPQAAAWSSQVLLDPDGDELSESSMSVLEPGTAKKHKGGILRKGAKLFFRRRHQQKDPGMSQSHNDLVFLEQPEGSRRKGITLTRILNKKLLSRHRNKNTMNGAPVEPCT

SEQ ID NO: 1878 - protein, 541 aa, Homo sapiens
MRLSPFHLQLEFHMKEKREDLQISWSFISVPEMAVNIQPKALGEDQVAETSAMSDVLKDILKHLAGSASPSVVLITKPTTVKEAQNLQCAASTAQESCPPKPPRAHELKLLVRNIHVLLLSEPGASGHINAVCVVQLNDPVQRFSSTLTKNTPDLMWEEEFTFELNAKSKELHLQISEAGRSSEGLLATATVPLDLFKKQPSGPQSFTLTSGSACGSSVLGSVTAEFSYMEPGELKSWPIPPPVPAAKIEKDRTVMPCGTVVTTVTAVKTKPRVDVGRASPLSSDSPVKTPIKVKVIEKDISVQAIACRSAPVSKTLSSSDTELLVLNGSDPVAEVAIRQLSESSKLKLKSPRKKSTIIISGISKTSLSQDHDAALMQGYTASVDSTHQEDAPSHPERAAASAPPEEAESAQASLAPKPQEDELDSWDLEKEPQAAAWSSQVLLDPDGDELSESSMSVLEPGTAKKHKGGILRKGAKLFFRRRHQQKDPGMSQSHNDLVFLEQPEGSRRKGITLTRILNKKLLSRHRNKNTMNGAPVEPCT

SEQ ID NO: 1879 - protein, 182 aa, Homo sapiens
  VARIANT 1: note = misc_feature - Xaa can be any naturally occurring amino acid
XSTIIISGISKDHDAALMQGYTASVDSTHQEDAPSHPERAAASAPPEEAESAQASLAPKPQEDELDSWDLEKEPQAAAWSSQVLLDPDGDELSESSMSVLEPGTAKKHKGGILRKGAKLFFRRRHQQKDPGMSQSHNDLVFLEQPEGSRRKGITLTRILNKKLLSRHRNKNTMNGAPVEPCT

SEQ ID NO: 1880 - protein, 148 aa, Homo sapiens
MAASPARPAVLALTGLALLLLLCWGPGGISGNKLKLMLQKREAPVPTKTKVAVDENKAKEFLGSLKRQKRQLWDRTRPEVQQWYQQFLYMGFDEAKFEDDITYWLNRDRNGHEYYGDYYQRHYDEDSAIGPRSPYGFRHGASVNYDDY

SEQ ID NO: 1881 - protein, 112 aa, Homo sapiens
MLQKREAPVPTKTKVAVDENKAKEFLGSLKRQKRQLWDRTRPEVQQWYQQFLYMGFDEAKFEDDITYWLNRDRNGHEYYGDYYQRHYDEDSAIGPRSPYGFRHGASVNYDDY

SEQ ID NO: 1882 - protein, 142 aa, Homo sapiens
MQQLRVRGSYRSASQFAGWRRVFYQARQGGISGNKLKLMLQKREAPVPTKTKVAVDENKAKEFLGSLKRQKRQLWDRTRPEVQQWYQQFLYMGFDEAKFEDDITYWLNRDRNGHEYYGDYYQRHYDEDSAIGPRSPYGFRHG

SEQ ID NO: 1883 - protein, 117 aa, Homo sapiens
MIIDSSRIPSFTQLHSTMTRAPLLLLCVALVLLGHVNGATVRNEDKWKPLNNPRNRDLFFRRLQAYFKGRGLDLGTFPNPFPTNENPRPLSFQSELTASASADYEEQKNSFHNYLKG

SEQ ID NO: 1884 - protein, 385 aa, Homo sapiens
MWGFRLLRSPPLLLLLPQLGIGNASSCSQARTMNPGGSGGARCSLSAEVRRRQCLQLSTVPGADPQRSNELLLLAAAGEGLERQDLPGDPAKEEPQPPPQHHVLYFPGDVQNYHEIMTRHPENYQWENWSLENVATILAHRFPNSYIWVIKCSRMHLHKFSCYDNFVKSNMFGAPEHNTDFGAFKHLYMLLVNAFNLSQNSLSKKSLNVWNKDSIASNCRSSPSHTTNGCQGEKVRTCEKSDESAMSFYPPSLNDASFTLIGFSKGCVVLNQLLFELKEAKKDKNIDAFIKSIRTMYWLDGGHSGGSNTWVTYPEVLKEFAQTGIIVHTHVTPYQVRDPMRSWIGKEHKKFVQILGDLGMQVTSQIHFTKEAPSIENHFRVHEVF

SEQ ID NO: 1885 - protein, 922 aa, Homo sapiens
MHWLASATQTSASIVSSSLLSAVDVSSSLTMSEYFQNTSLPGTANSRQFSLPVVSNAAFLTGSISNFSRASAPAISSAWLQPSASGTSFQPLMGSAYLYQHSSTTMLSGVTGQSHICTSAASYPGVFEWDSTASTVKKSSSLRDFTVTVIDQNTAVSSMSMTAQYYKTSDTNTMVPLYPSLSASLVQGTLTQIPNQQGHNLSLPCQIGSQVYYYNQGTLGPQLSCLQSYGSVSYTGYRASAHQPEMVMVLKEVQPTNVLPPVSTSGMYYSVSSQPITETSVQVMETSLGMDTSLGLQSPSQTFCLPQTPEFSKSFSSRNTQTLESNPSPELGDISITPVQSPTNLLTLSPAPSQEKNENENLDEIKTNLSKPLDVHQILIGNQDPPLLPVEIPDIHPLLACIDPLGQEEQPGSENANLRNKSLSLEDQGIFENGIESSSDLADITTWVEDTYLPPIFSSLQDLDQPESPSAKKAKDTSAIKVNQVQEKSCVIKGHSDQVRKNKHKASEPIQGAPKAKIQPKNPECLLEREVVVGSATVSNSASVNKAKHSSNKPHKAASSRISKTKSHGQEKTKGNRKNSSKKSEESKQSGKKVKVEEKQTIPNMKRKKNQPELSQKTLKKPRSSLGMHMLESVQVFHALGKKIDMKTGFSSSRTLGSSSNTQNRQPFPALKPWLDIQHEGKGPEKIQVKAQKLDGSAEKECTSPSHSELPPPGKVKLIPLPFLTLDQPQARHVSRRPNPLASRRPAVAYPARPDSTNSAQSNAVNPSRPAPTNTSLTGPATPAQPISAKATQPSSANPTQPTVPQSAASRPSAYKTSSCSSLQREPVSTAVTSLRSLPKPQNQFLIQDFSLQPRPWRKPTVPEPVMSTPITEEQRPEREAMKRKAQQERENAAKYTSLGKVQFFIERERDMEIAEYYGYTI

SEQ ID NO: 1886 - protein, 192 aa, Homo sapiens
ITHRIHWESASLLRSEETKENEGFTVTAEGKGQGTLSVVTMYHAKAKDQLTCNKFDLKVTIKPAPETGIPSPIFLSSVFLEKRPQDAKNTMILEICTRYRGDQDATMSILDISMMTGFAPDTDDLKQLANGVDRYISKYELDKAFSDRNTLIIYLDKVSHSEDDCLAFKVHQYFNVELIQPGAVKVYAYYNL

SEQ ID NO: 1887 - protein, 1663 aa, Homo sapiens
MGPTSGPSLLLLLLTHLPLALGSPMYSIITPNILRLESEETMVLEAHDAQGDVPVTVTVHDFPGKKLVLSSEKTVLTPATNHMGNVTFTIPANREFKSEKGRNKFVTVQATFGTQVVEKVVLVSLQSGYLFIQTDKTIYTPGSTVLYRIFTVNHKLLPVGRTVMVNIENPEGIPVKQDSLSSQNQLGVLPLSWDIPELVNMGQWKIRAYYENSPQQVFSTEFEVKEYVLPSFEVIVEPTEKFYYIYNEKGLEVTITARFLYGKKVEGTAFVIFGIQDGEQRISLPESLKRIPIEDGSGEVVLSRKVLLDGVQNPRAEDLVGKSLYVSATVILHSGSDMVQAERSGIPIVTSPYQIHFTKTPKYFKPGMPFDLMVFVTNPDGSPAYRVPVAVQGEDTVQSLTQGDGVAKLSINTHPSQKPLSITVRTKKQELSEAEQATRTMQALPYSTVGNSNNYLHLSVLRTELRPGETLNVNFLLRMDRAHEAKIRYYTYLIMNKGRLLKAGRQVREPGQDLVVLPLSITTDFIPSFRLVAYYTLIGASGQREVVADSVWVDVKDSCVGSLVVKSGQSEDRQPVPGQQMTLKIEGDHGARVVLVAVDKGVFVLNKKNKLTQSKIWDVVEKADIGCTPGSGKDYAGVFSDAGLTFTSSSGQQTAQRAELQCPQPAARRRRSVQLTEKRMDKVGKYPKELRKCCEDGMRENPMRFSCQRRTRFISLGEACKKVFLDCCNYITELRRQHARASHLGLARSNLDEDIIAEENIVSRSEFPESWLWNVEDLKEPPKNGISTKLMNIFLKDSITTWEILAVSMSDKKGICVADPFEVTVMQDFFIDLRLPYSVVRNEQVEIRAVLYNYRQNQELKVRVELLHNPAFCSLATTKRRHQQTVTIPPKSSLSVPYVIVPLKTGLQEVEVKAAVYHHFISDGVRKSLKVVPEGIRMNKTVAVRTLDPERLGREGVQKEDIPPADLSDQVPDTESETRILLQGTPVAQMTEDAVDAERLKHLIVTPSGCGEQNMIGMTPTVIAVHYLDETEQWEKFGLEKRQGALELIKKGYTQQLAFRQPSSAFAAFVKRAPSTWLTAYVVKVFSLAVNLIAIDSQVLCGAVKWLILEKQKPDGVFQEDAPVIHQEMIGGLRNNNEKDMALTAFVLISLQEAKDICEEQVNSLPGSITKAGDFLEANYMNLQRSYTVAIAGYALAQMGRLKGPLLNKFLTTAKDKNRWEDPGKQLYNVEATSYALLALLQLKDFDFVPPVVRWLNEQRYYGGGYGSTQATFMVFQALAQYQKDAPDHQELNLDVSLQLPSRSSKITHRIHWESASLLRSEETKENEGFTVTAEGKGQGTLSVVTMYHAKAKDQLTCNKFDLKVTIKPAPETEKRPQDAKNTMILEICTRYRGDQDATMSILDISMMTGFAPDTDDLKQLANGVDRYISKYELDKAFSDRNTLIIYLDKVSHSEDDCLAFKVHQYFNVELIQPGAVKVYAYYNLEESCTRFYHPEKEDGKLNKLCRDELCRCAEENCFIQKSDDKVTLEERLDKACEPGVDYVYKTRLVKVQLSNDFDEYIMAIEQTIKSGSDEVQVGQQRTFISPIKCREALKLEEKKHYLMWGLSSDFWGEKPNLSYIIGKDTWVEHWPEEDECQDEENQKQCQDLGAFTESMVVFGCPN

SEQ ID NO: 1888 - protein, 103 aa, Homo sapiens
MVLEAHDAQGDVPVTVTVHDFPGKKLVLSSEKTVLTPATNHMGNVTFTIPANREFKSEKGRNKFVTVQATFGTQVVEKVVLVSLQSGYLFIQTDKTIYTPGST

SEQ ID NO: 1889 - protein, 101 aa, Homo sapiens
NNEKDMALTAFVLISLQEAKDICEEQVNSLPGSITKAGDFLEANYMNLQRSYTVAIAGYALAQMGRLKGPLLNKFLTTAKDEENQKQCQDLGAFTESMVVF

SEQ ID NO: 1890 - protein, 100 aa, Homo sapiens
  VARIANT 1: note = misc_feature - Xaa can be any naturally occurring amino acid
XFIQKSDDKVTLEERLDKACEPGVDYVYKTRLVKVQLSNDFDEYIMAIEQTIKSGSDEVQVGQQRTFISPIKCREALKLEEKKHYLMWGLSSDFWGEKPK

SEQ ID NO: 1891 - protein, 119 aa, Homo sapiens
MAGQPAATGSPSADKDGMEPNVVARISQWADDHLRLVRGHGIPLWPKLECSGTIIAHCCCSTHFGRKDPPTSASRVAGTTEHQHWNGHSWNNVTFEKHSTDIKIYKLFGYSSRIYKKKC

SEQ ID NO: 1892 - protein, 71 aa, Homo sapiens
MAGQPAATGSPSADKDGMEPNVVARISQWADDHLRLVRNISTGMAIAGIMLLLRSIRLKSHVVLCWLSWLE

SEQ ID NO: 1893 - protein, 294 aa, Homo sapiens
MAGQPAATGSPSADKDGMEPNVVARISQWADDHLRLVRNISTGMAIAGIMLLLRSIRLTSKFTSSSDIPVEFIRRNVKLRGRLRRITENGLEIEHIPITLPIIASLRKEPRGALLVKLAGVELAETGKAWLQKELKPSQLLWFQLLGKENSALFCYLLVSKGGYFSVNLNEEILRRGLGKTVLVKGLKYDSKIYWTVHRNLLKAELTALKKGEGIWKEDSEKESYLEKFKDSWREIWKKDSFLKTTGSDFSLKKESYYEKLKRTYEIWKDNMNNCSLILKFRELISRINFRRKG

SEQ ID NO: 1894 - protein, 251 aa, Homo sapiens
MAIAGIMLLLRSIRLTSKFTSSSDIPVEFIRRNVKLRGRLRRITENGLEIEHIPITLPIIASLRKEPRGALLVKLAGVELAETGKAWLQKELKPSQLLWFQLLGKENSALFCYLLVSKGGYFSVNLNEEILRRGLGKTVLVKGLKYDSKIYWTVHRNLLKAELTALKKGEGIWKEDSEKESYLEKFKDSWREIWKKDSFLKTTGSDFSLKKESYYEKLKRTYEIWKDNMNNCSLILKFRELISRINFRRKG

SEQ ID NO: 1895 - protein, 115 aa, Homo sapiens
  VARIANT 1: note = misc_feature - Xaa can be any naturally occurring amino acid
XAGQPAATGSPSADKDGMEPNVVARISQWADDHLRLVRGHGIPLWPKLECSGTIIAHCCCSTHFGRKDPPTSASRVAGTTDQVLHLSPRLECNGVISAHCNLCLPGSSDCPASPS

SEQ ID NO: 1896 - protein, 213 aa, Homo sapiens
MESLLLLPRFGRISDLTVDLSTPEGSFPSDEGWPFAKYLGACGRMVAVNYVGEELWSYFNAPWEKRVDLAWQLMEIAEQLTNNDFEFALYLLDVSFDNFAVGPRDGKVIIVDAENVLVADKRLIRQNKPENWDVWYESKFDDCDKEACLSFSKEILCARATVDHNYYAVCQNLLSRHATWRGTSGGLLHDPPSEIAKDGRLEALLDECANPKK

SEQ ID NO: 1897 - protein, 221 aa, Homo sapiens
MKSENGTVVGSFPSDEGWPFAKYLGACGRMVAVNYVGEELWSYFNAPWEKRVDLAWQLMEIAEQLTNNDFEFALYLLDVSFDNFAVGPRDGKVIIVDAENVLVADKRLIRQNKPENWDVWYESKFDDCDKEACLSFSKEILCARATVDHNYYAVCQNLLSRHATWRGTSGGLLHDPPSEIAKDGRLEALLDECANPKKRYGRFQAAKELREYLAQLSNNVR

SEQ ID NO: 1898 - protein, 192 aa, Homo sapiens
MVAVNYVGEELWSYFNAPWEKRVDLAWQLMEIAEQLTNNDFEFALYLLDVSFDNFAVGPRDGKVIIVDAENVLVADKRLIRQNKPENWDVWYESKFDDCDKEACLSFSKEILCARATVDHNYYAVCQNLLSRHATWRGTSGGLLHDPPSEIAKDGRLEALLDECANPKKRYGRFQAAKELREYLAQLSNNVR

SEQ ID NO: 1899 - protein, 430 aa, Homo sapiens
MWRLVPPKLGRLSRSLKLAALGSLLVLMVLHSPSLLASWQRNELTDRRFLQLNKCPACFGTSWCRRFLNGQVVFEAWGRLRLLDFLNVKNVYFAQYGEPREGGRRRVVLKRLGSQRELAQLDQSICKRATGRPRCDLLQAMPRTEFARLNGDVRLLTPEAVEGWSDLVHCPSQRLLDRLVRRYAETKDSGSFLLRNLKDSERMQLLLTLAFNPEPLVLQSFPSDEGWPFAKYLGACGRMVAVNYVGEELWSYFNAPWEKRVDLAWQLMEIAEQLTNNDFEFALYLLDVSFDNFAVGPRDGKVIIVDAENVLVADKRLIRQNKPENWDVWYESKFDDCDKEACLSFSKEILCARATVDHNYYAVCQNLLSRHATWRGTSGGLLHDPPSEIAKDGRLEALLDECANPKKRYGRFQAAKELREYLAQLSNNVR

SEQ ID NO: 1900 - protein, 1744 aa, Homo sapiens
MRLLWGLIWASSFFTLSLQKPRLLLFSPSVVHLGVPLSVGVQLQDVPRGQVVKGSVFLRNPSRNNVPCSPKVDFTLSSERDFALLSLQVPLKDAKSCGLHQLLRGPEVQLVAHSPWLKDSLSRTTNIQGINLLFSSRRGHLFLQTDQPIYNPGQRVRYRVFALDQKMRPSTDTITVMVENSHGLRVRKKEVYMPSSIFQDDFVIPDISEPGTWKISARFSDGLESNSSTQFEVKKYVLPNFEVKITPGKPYILTVPGHLDEMQLDIQARYIYGKPVQGVAYVRFGLLDEDGKKTFFRGLESQTKLVNGQSHISLSKAEFQDALEKLNMGITDLQGLRLYVAAAIIESPGGEMEEAELTSWYFVSSPFSLDLSKTKRHLVPGAPFLLQALVREMSGSPASGIPVKVSATVSSPGSVPEVQDIQQNTDGSGQVSIPIIIPQTISELQLSVSAGSPHPAIARLTVAAPPSGGPGFLSIERPDSRPPRVGDTLNLNLRAVGSGATFSHYYYMILSRGQIVFMNREPKRTLTSVSVFVDHHLAPSFYFVAFYYHGDHPVANSLRVDVQAGACEGKLELSVDGAKQYRNGESVKLHLETDSLALVALGALDTALYAAGSKSHKPLNMGKVFEAMNSYDLGCGPGGGDSALQVFQAAGLAFSDGDQWTLSRKRLSCPKEKTTRKKRNVNFQKAINEKLGQYASPTAKRCCQDGVTRLPMMRSCEQRAARVQQPDCREPFLSCCQFAESLRKKSRDKGQAGLQRALEILQEEDLIDEDDIPVRSFFPENWLWRVETVDRFQILTLWLPDSLTTWEIHGLSLSKTKGLCVATPVQLRVFREFHLHLRLPMSVRRFEQLELRPVLYNYLDKNLTVSVHVSPVEGLCLAGGGGLAQQVLVPAGSARPVAFSVVPTAAAAVSLKVVARGSFEFPVGDAVSKVLQIEKEGAIHREELVYELNPLDHRGRTLEIPGNSDPNMIPDGDFNSYVRVTASDPLDTLGSEGALSPGGVASLLRLPRGCGEQTMIYLAPTLAASRYLDKTEQWSTLPPETKDHAVDLIQKGYMRIQQFRKADGSYAAWLSRDSSTWLTAFVLKVLSLAQEQVGGSPEKLQETSNWLLSQQQADGSFQDPCPVLDRSMQGGLVGNDETVALTAFVTIALHHGLAVFQDEGAEPLKQRVEASISKANSFLGEKASAGLLGAHAAAITAYALTLTKAPVDLLGVAHNNLMAMAQETGDNLYWGSVTGSQSNAVSPTPAPRNPSDPMPQAPALWIETTAYALLHLLLHEGKAEMADQASAWLTRQGSFQGGFRSTQDTVIALDALSAYWIASHTTEERGLNVTLSSTGRNGFKSHALQLNNRQIRGLEEELQFSLGSKINVKVGGNSKGTLKVLRTYNVLDMKNTTCQDLQIEVTVKGHVEYTMEANEDYEDYEYDELPAKDDPDAPLQPVTPLQLFEGRRNRRRREAPKVVEEQESRVHYTVCIWRNGKVGLSGMAIADVTLLSGFHALRADLEKLTSLSDRYVSHFETEGPHVLLYFDSVPTSRECVGFEAVQEVPVGLVQPASATLYDYYNPERRCSVFYGAPSKSRLLATLCSAEVCQCAEGKCPRQRRALERGLQDEDGYRMKFACYYPRVEYGFQVKVLREDSRAAFRLFETKITQVLHFTKDVKAAANQMRNFLVRASCRLRLEPGKEYLIMGLDGATYDLEGHPQYLLDSNSWIEEMPSERLCRSTRQRAACAQLNDFLQEYGTQGCQV

SEQ ID NO: 1901 - protein, 1698 aa, Homo sapiens
MRLLWGLIWASSFFTLSLQKPRLLLFSPSVVHLGVPLSVGVQLQDVPRGQVVKGSVFLRNPSRNNVPCSPKVDFTLSSERDFALLSLQVPLKDAKSCGLHQLLRGPEVQLVAHSPWLKDSLSRTTNIQGINLLFSSRRGHLFLQTDQPIYNPGQRVRYRVFALDQKMRPSTDTITVMVENSHGLRVRKKEVYMPSSIFQDDFVIPDISEPGTWKISARFSDGLESNSSTQFEVKKYVLPNFEVKITPGKPYILTVPGHLDEMQLDIQARYIYGKPVQGVAYVRFGLLDEDGKKTFFRGLESQTKLVNGQSHISLSKAEFQDALEKLNMGITDLQGLRLYVAAAIIESPGGEMEEAELTSWYFVSSPFSLDLSKTKRHLVPGAPFLLQALVREMSGSPASGIPVKVSATVSSPGSVPEVQDIQQNTDGSGQVSIPIIIPQTISELQLSVSAGSPHPAIARLTVAAPPSGGPGFLSIERPDSRPPRVGDTLNLNLRAVGSGATFSHYYYMILSRGQIVFMNREPKRTLTSVSVFVDHHLAPSFYFVAFYYHGDHPVANSLRVDVQAGACEGKLELSVDGAKQYRNGESVKLHLETDSLALVALGALDTALYAAGSKSHKPLNMGKVFEAMNSYDLGCGPGGGDSALQVFQAAGLAFSDGDQWTLSRKRLSCPKEKTTRKKRNVNFQKAINEKLGQYASPTAKRCCQDGVTRLPMMRSCEQRAARVQQPDCREPFLSCCQFAESLRKKSRDKGQAGLQRALEILQEEDLIDEDDIPVRSFFPENWLWRVETVDRFQILTLWLPDSLTTWEIHGLSLSKTKGLCVATPVQLRVFREFHLHLRLPMSVRRFEQLELRPVLYNYLDKNLTVSVHVSPVEGLCLAGGGGLAQQVLVPAGSARPVAFSVVPTAAAAVSLKVVARGSFEFPVGDAVSKVLQIEKEGAIHREELVYELNPLDHRGRTLEIPGNSDPNMIPDGDFNSYVRVTASDPLDTLGSEGALSPGGVASLLRLPRGCGEQTMIYLAPTLAASRYLDKTEQWSTLPPETKDHAVDLIQKGYMRIQQFRKADGSYAAWLSRDSSTWLTAFVLKVLSLAQEQVGGSPEKLQETSNWLLSQQQADGSFQDPCPVLDRSMQGGLVGNDETVALTAFVTIALHHGLAVFQDEGAEPLKQRVEASISKANSFLGEKASAGLLGAHAAAITAYALTLTKAPVDLLGVAHNNLMAMAQETGDNLYWGSVTGSQSNAVSPTPAPRNPSDPMPQAPALWIETTAYALLHLLLHEGKAEMADQASAWLTRQGSFQGGFRSTQDTVIALDALSAYWIASHTTEERGLNVTLSSTGRNGFKSHALQLNNRQIRGLEEELQFSLGSKINVKVGGNSKGTLKVLRTYNVLDMKNTTCQDLQIEVTVKGHVEYTMEANEDYEDYEYDELPAKDDPDAPLQPVTPLQLFEGRRNRRRREAPKLTSLSDRYVSHFETEGPHVLLYFDSVPTSRECVGFEAVQEVPVGLVQPASATLYDYYNPERRCSVFYGAPSKSRLLATLCSAEVCQCAEGKCPRQRRALERGLQDEDGYRMKFACYYPRVEYGFQVKVLREDSRAAFRLFETKITQVLHFTKDVKAAANQMRNFLVRASCRLRLEPGKEYLIMGLDGATYDLEGHPQYLLDSNSWIEEMPSERLCRSTRQRAACAQLNDFLQEYGTQGCQV

SEQ ID NO: 1902 - protein, 1698 aa, Homo sapiens
MRLLWGLIWASSFFTLSLQKPRLLLFSPSVVHLGVPLSVGVQLQDVPRGQVVKGSVFLRNPSRNNVPCSPKVDFTLSSERDFALLSLQVPLKDAKSCGLHQLLRGPEVQLVAHSPWLKDSLSRTTNIQGINLLFSSRRGHLFLQTDQPIYNPGQRVRYRVFALDQKMRPSTDTITVMVENSHGLRVRKKEVYMPSSIFQDDFVIPDISEPGTWKISARFSDGLESNSSTQFEVKKYVLPNFEVKITPGKPYILTVPGHLDEMQLDIQARYIYGKPVQGVAYVRFGLLDEDGKKTFFRGLESQTKLVNGQSHISLSKAEFQDALEKLNMGITDLQGLRLYVAAAIIESPGGEMEEAELTSWYFVSSPFSLDLSKTKRHLVPGAPFLLQALVREMSGSPASGIPVKVSATVSSPGSVPEVQDIQQNTDGSGQVSIPIIIPQTISELQLSVSAGSPHPAIARLTVAAPPSGGPGFLSIERPDSRPPRVGDTLNLNLRAVGSGATFSHYYYMILSRGQIVFMNREPKRTLTSVSVFVDHHLAPSFYFVAFYYHGDHPVANSLRVDVQAGACEGKLELSVDGAKQYRNGESVKLHLETDSLALVALGALDTALYAAGSKSHKPLNMGKVFEAMNSYDLGCGPGGGDSALQVFQAAGLAFSDGDQWTLSRKRLSCPKEKTTRKKRNVNFQKAINEKLGQYASPTAKRCCQDGVTRLPMMRSCEQRAARVQQPDCREPFLSCCQFAESLRKKSRDKGQAGLQRALEILQEEDLIDEDDIPVRSFFPENWLWRVETVDRFQILTLWLPDSLTTWEIHGLSLSKTKGLCVATPVQLRVFREFHLHLRLPMSVRRFEQLELRPVLYNYLDKNLTVSVHVSPVEGLCLAGGGGLAQQVLVPAGSARPVAFSVVPTAATAVSLKVVARGSFEFPVGDAVSKVLQIEKEGAIHREELVYELNPLDHRGRTLEIPGNSDPNMIPDGDFNSYVRVTASDPLDTLGSEGALSPGGVASLLRLPRGCGEQTMIYLAPTLAASRYLDKTEQWSTLPPETKDHAVDLIQKGYMRIQQFRKADGSYAAWLSRGSSTWLTAFVLKVLSLAQEQVGGSPEKLQETSNWLLSQQQADGSFQDLSPVIHRSMQGGLVGNDETVALTAFVTIALHHGLAVFQDEGAEPLKQRVEASISKASSFLGEKASAGLLGAHAAAITAYALTLTKAPADLRGVAHNNLMAMAQETGDNLYWGSVTGSQSNAVSPTPAPRNPSDPMPQAPALWIETTAYALLHLLLHEGKAEMADQAAAWLTRQGSFQGGFRSTQDTVIALDALSAYWIASHTTEERGLNVTLSSTGRNGFKSHALQLNNRQIRGLEEELQFSLGSKINVKVGGNSKGTLKVLRTYNVLDMKNTTCQDLQIEVTVKGHVEYTMEANEDYEDYEYDELPAKDDPDAPLQPVTPLQLFEGRRNRRRREAPKLTSLSDRYVSHFETEGPHVLLYFDSVPTSRECVGFEAVQEVPVGLVQPASATLYDYYNPERRCSVFYGAPSKSRLLATLCSAEVCQCAEGKCPRQRRALERGLQDEDGYRMKFACYYPRVEYGFQVKVLREDSRAAFRLFETKITQVLHFTKDVKAAANQMRNFLVRASCRLRLEPGKEYLIMGLDGATYDLEGHPQYLLDSNSWIEEMPSERLCRSTRQRAACAQLNDFLQEYGTQGCQV

SEQ ID NO: 1903 - protein, 1744 aa, Homo sapiens
MRLLWGLIWASSFFTLSLQKPRLLLFSPSVVHLGVPLSVGVQLQDVPRGQVVKGSVFLRNPSRNNVPCSPKVDFTLSSERDFALLSLQVPLKDAKSCGLHQLLRGPEVQLVAHSPWLKDSLSRTTNIQGINLLFSSRRGHLFLQTDQPIYNPGQRVRYRVFALDQKMRPSTDTITVMVENSHGLRVRKKEVYMPSSIFQDDFVIPDISEPGTWKISARFSDGLESNSSTQFEVKKYVLPNFEVKITPGKPYILTVPGHLDEMQLDIQARYIYGKPVQGVAYVRFGLLDEDGKKTFFRGLESQTKLVNGQSHISLSKAEFQDALEKLNMGITDLQGLRLYVAAAIIESPGGEMEEAELTSWYFVSSPFSLDLSKTKRHLVPGAPFLLQALVREMSGSPASGIPVKVSATVSSPGSVPEVQDIQQNTDGSGQVSIPIIIPQTISELQLSVSAGSPHPAIARLTVAAPPSGGPGFLSIERPDSRPPRVGDTLNLNLRAVGSGATFSHYYYMILSRGQIVFMNREPKRTLTSVSVFVDHHLAPSFYFVAFYYHGDHPVANSLRVDVQAGACEGKLELSVDGAKQYRNGESVKLHLETDSLALVALGALDTALYAAGSKSHKPLNMGKVFEAMNSYDLGCGPGGGDSALQVFQAAGLAFSDGDQWTLSRKRLSCPKEKTTRKKRNVNFQKAINEKLGQYASPTAKRCCQDGVTRLPMMRSCEQRAARVQQPDCREPFLSCCQFAESLRKKSRDKGQAGLQRALEILQEEDLIDEDDIPVRSFFPENWLWRVETVDRFQILTLWLPDSLTTWEIHGLSLSKTKGLCVATPVQLRVFREFHLHLRLPMSVRRFEQLELRPVLYNYLDKNLTVSVHVSPVEGLCLAGGGGLAQQVLVPAGSARPVAFSVVPTAATAVSLKVVARGSFEFPVGDAVSKVLQIEKEGAIHREELVYELNPLDHRGRTLEIPGNSDPNMIPDGDFNSYVRVTASDPLDTLGSEGALSPGGVASLLRLPRGCGEQTMIYLAPTLAASRYLDKTEQWSTLPPETKDHAVDLIQKGYMRIQQFRKADGSYAAWLSRGSSTWLTAFVLKVLSLAQEQVGGSPEKLQETSNWLLSQQQADGSFQDLSPVIHRSMQGGLVGNDETVALTAFVTIALHHGLAVFQDEGAEPLKQRVEASISKASSFLGEKASAGLLGAHAAAITAYALTLTKAPADLRGVAHNNLMAMAQETGDNLYWGSVTGSQSNAVSPTPAPRNPSDPMPQAPALWIETTAYALLHLLLHEGKAEMADQAAAWLTRQGSFQGGFRSTQDTVIALDALSAYWIASHTTEERGLNVTLSSTGRNGFKSHALQLNNRQIRGLEEELQFSLGSKINVKVGGNSKGTLKVLRTYNVLDMKNTTCQDLQIEVTVKGHVEYTMEANEDYEDYEYDELPAKDDPDAPLQPVTPLQLFEGRRNRRRREAPKVVEEQESRVHYTVCIWRNGKVGLSGMAIADVTLLSGFHALRADLEKLTSLSDRYVSHFETEGPHVLLYFDSVPTSRECVGFEAVQEVPVGLVQPASATLYDYYNPERRCSVFYGAPSKSRLLATLCSAEVCQCAEGKCPRQRRALERGLQDEDGYRMKFACYYPRVEYGFQVKVLREDSRAAFRLFETKITQVLHFTKDVKAAANQMRNFLVRASCRLRLEPGKEYLIMGLDGATYDLEGHPQYLLDSNSWIEEMPSERLCRSTRQRAACAQLNDFLQEYGTQGCQV

SEQ ID NO: 1904 - protein, 118 aa, Homo sapiens
MHPPKTPSGALHRKRKMAAWPFSRLWKVSDPILFQMTLIAALLPAVLGNCGPPPTLSFAAPMDITLTETRFKTGTTLKYTCLPGYVRSHSTQTLTCNSDGEWVYNTFCILDTGFHHIG

SEQ ID NO: 1905 - protein, 152 aa, Homo sapiens
MHPPKTPSGALHRKRKMAAWPFSRLWKVSDPILFQMTLIAALLPAVLGNCGPPPTLSFAAPMDITLTETRFKTGTTLKYTCLPGYVRSHSTQTLTCNSDGEWVYNTFCIYKRCRHPGELRNGQVEIKTDLSFGSQIEFSCSEGFFLIGSTTS

SEQ ID NO: 1906 - protein, 597 aa, Homo sapiens
MHPPKTPSGALHRKRKMAAWPFSRLWKVSDPILFQMTLIAALLPAVLGNCGPPPTLSFAAPMDITLTETRFKTGTTLKYTCLPGYVRSHSTQTLTCNSDGEWVYNTFCIYKRCRHPGELRNGQVEIKTDLSFGSQIEFSCSEGFFLIGSTTSRCEVQDRGVGWSHPLPQCEIVKCKPPPDIRNGRHSGEENFYAYGFSVTYSCDPRFSLLGHASISCTVENETIGVWRPSPPTCEKITCRKPDVSHGEMVSGFGPIYNYKDTIVFKCQKGFVLRGSSVIHCDADSKWNPSPPACEPNSCINLPDIPHASWETYPRPTKEDVYVVGTVLRYRCHPGYKPTTDEPTTVICQKNLRWTPYQGCEALCCPEPKLNNGEITQHRKSRPANHCVYFYGDEISFSCHETSRFSAICQGDGTWSPRTPSCGDICNFPPKIAHGHYKQSSSYSFFKEEIIYECDKGYILVGQAKLSCSYSHWSAPAPQCKALCRKPELVNGRLSVDKDQYVEPENVTIQCDSGYGVVGPQSITCSGNRTWYPEVPKCEWETPEGCEQVLTGKRLMQCLPNPEDVKMALEVYKLSLEIEQLELQRDSARQSTLDKEL

SEQ ID NO: 1907 - protein, 181 aa, Homo sapiens
MFFWCACCLMVAWRVSASDAEHCPELPPVDNSIFVAKEVEGQILGTYVCIKGYHLVGKKTLFCNASKEWDNTTTECRLGHCPDPVLVNGEFSSSGPVNVSDKITFMCNDHYILKGSNRSQCLEDHTWAPPFPICKSRDCDPPGNPVHGYFEGNNFTLGSTISYYCEDRYYLVGVQEQQCVD

SEQ ID NO: 1908 - protein, 252 aa, Homo sapiens
MFFWCACCLMVAWRVSASDAEHCPELPPVDNSIFVAKEVEGQILGTYVCIKGYHLVGKKTLFCNASKEWDNTTTECRLGHCPDPVLVNGEFSSSGPVNVSDKITFMCNDHYILKGSNRSQCLEDHTWAPPFPICKSRDCDPPGNPVHGYFEGNNFTLGSTISYYCEDRYYLVGVQEQQCVDGEWSSALPVCKLIQEAPKPECEKALLAFQESKNLCEAMENFMQQLKESGMTMEELKYSLELKKAELKAKLL

SEQ ID NO: 1909 - protein, 252 aa, Homo sapiens; identical to SEQ ID NO: 1908

SEQ ID NO: 1910 - protein, 252 aa, Homo sapiens; identical to SEQ ID NO: 1908

SEQ ID NO: 1911 - protein, 251 aa, Homo sapiens
MFFWCACCLMVAWRVSASDEHCPELPPVDNSIFVAKEVEGQILGTYVCIKGYHLVGKKTLFCNASKEWDNTTTECRLGHCPDPVLVNGEFSSSGPVNVSDKITFMCNDHYILKGSNRSQCLEDHTWAPPFPICKSRDCDPPGNPVHGYFEGNNFTLGSTISYYCEDRYYLVGVQEQQCVDGEWSSALPVCKLIQEAPKPECEKALLAFQESKNLCEAMENFMQQLKESGMTMEELKYSLELKKAELKAKLL

SEQ ID NO: 1912 - protein, 95 aa, Homo sapiens
MAPPPACRSPMSPPPPPLLLLLLSLALLGARARAEPAGSAVPAQSRPCVDCHAFEFMQRALQDLRKTACSLDARTETLLLQAERRALCACWPAGH

SEQ ID NO: 1913 - protein, 128 aa, Homo sapiens
MRVARRTRNVCRCPRAAGPGVPEPRAAPLPLLAMAPPPACRSPMSPPPPPLLLLLLSLALLGARARAEPAGSAVPAQSRPCVDCHAFEFMQRALQDLRKTACSLDARTETLLLQAERRALCACWPAGH

SEQ ID NO: 1914 - protein, 1676 aa, Homo sapiens
MGLLGILCFLIFLGKTWGQEQTYVISAPKIFRVGASENIVIQVYGYTEAFDATISIKSYPDKKFSYSSGHVHLSSENKFQNSAILTIQPKQLPGGQNPVSYVYLEVVSKHFSKSKRMPITYDNGFLFIHTDKPVYTPDQSVKVRVYSLNDDLKPAKRETVLTFIDPEGSEVDMVEEIDHIGIISFPDFKIPSNPRYGMWTIKAKYKEDFSTTGTAYFEVKEYVLPHFSVSIEPEYNFIGYKNFKNFEITIKARYFYNKVVTEADVYITFGIREDLKDDQKEMMQTAMQNTMLINGIAQVTFDSETAVKELSYYSLEDLNNKYLYIAVTVIESTGGFSEEAEIPGIKYVLSPYKLNLVATPLFLKPGIPYPIKVQVKDSLDQLVGGVPVTLNAQTIDVNQETSDLDPSKSVTRVDDGVASFVLNLPSGVTVLEFNVKTDAPDLPEENQAREGYRAIAYSSLSQSYLYIDWTDNHKALLVGEHLNIIVTPKSPYIDKITHYNYLILSKGKIIHFGTREKFSDASYQSINIPVTQNMVPSSRLLVYYIVTGEQTAELVSDSVWLNIEEKCGNQLQVHLSPDADAYSPGQTVSLNMATGMDSWVALAAVDSAVYGVQRGAKKPLERVFQFLEKSDLGCGAGGGLNNANVFHLAGLTFLTNANADDSQENDEPCKEILRPRRTLQKKIEEIAAKYKHSVVKKCCYDGACVNNDETCEQRAARISLGPRCIKAFTECCVVASQLRANISHKDMQLGRLHMKTLLPVSKPEIRSYFPESWLWEVHLVPRRKQLQFALPDSLTTWEIQGVGISNTGICVADTVKAKVFKDVFLEMNIPYSVVRGEQIQLKGTVYNYRTSGMQFCVKMSAVEGICTSESPVIDHQGTKSSKCVRQKVEGSSSHLVTFTVLPLEIGLHNINFSLETWFGKEILVKTLRVVPEGVKRESYSGVTLDPRGIYGTISRRKEFPYRIPLDLVPKTEIKRILSVKGLLVGEILSAVLSQEGINILTHLPKGSAEAELMSVVPVFYVFHYLETGNHWNIFHSDPLIEKQKLKKKLKEGMLSIMSYRNADYSYSVWKGGSASTWLTAFALRVLGQVNKYVEQNQNSICNSLLWLVENYQLDNGSFKENSQYQPIKLQGTLPVEARENSLYLTAFTVIGIRKAFDICPLVKIDTALIKADNFLLENTLPAQSTFTLAISAYALSLGDKTHPQFRSIVSALKREALVKGNPPIYRFWKDNLQHKDSSVPNTGTARMVETTAYALLTSLNLKDINYVNPVIKWLSEEQRYGGGFYSTQDTINAIEGLTEYSLLVKQLRLSMDIDVSYKHKGALHNYKMTDKNFLGRPVEVLLNDDLIVSTGFGSGLATVHVTTVVHKTSTSEEVCSFYLKIDTQDIEASHYRGYGNSDYKRIVACASYKPSREESSSGSSHAVMDISLPTGISANEEDLKALVEGVDQLFTDYQIKDGHVILQLNSIPSSDFLCVRFRIFELFEVGFLSPATFTVYEYHRPDKQCTMFYSTSNIKIQKVCEGAACKCVEADCGQMQEELDLTISAETRKQTACKPEIAYAYKVSITSITVENVFVKYKATLLDIYKTGEAVAEKDSEITFIKKVTCTNAELVKGRQYLIMGKEALQIKYNFSFRYIYPLDSLTWIEYWPRDTTCSSCQAFLANLDEFAEDIFLNGC

SEQ ID NO: 1915 - protein, 72 aa, Homo sapiens
MAVSVLRLTVVLGLLVLFLTCYADDKPDKPDDKPDDSGKDPKPDFPKFLSLLGTEIIENAVEFILRSMSRST

SEQ ID NO: 1916 - protein, 87 aa, Homo sapiens
MAVSVLRLTVVLGLLVLFLTCYADDKPDKPDDKPDDSGKDPKPDFPKFLSLLGTEIIENAVEFILRSMSRSTGFMEFDDNEGKHSSK

SEQ ID NO: 1917 - protein, 31 aa, Homo sapiens
MARRSVLYFILLNALINKGQACFCDHYAWTQ

SEQ ID NO: 1918 - protein, 133 aa, Homo sapiens
MARRSVLYFILLNALINKGQACFCDHYAWTQWTSCSKTCNSGTQSRHRQIVVDKYYQENFCEQICSKQETRECNWQRCPINCLLGDFGPWSDCDPCIEKQSKVRSVLRPSQFGGQPCTAPLVAFQPCIPSKLC

SEQ ID NO: 1919 - protein, 934 aa, Homo sapiens
MARRSVLYFILLNALINKGQACFCDHYAWTQWTSCSKTCNSGTQSRHRQIVVDKYYQENFCEQICSKQETRECNWQRCPINCLLGDFGPWSDCDPCIEKQSKVRSVLRPSQFGGQPCTAPLVAFQPCIPSKLCKIEEADCKNKFRCDSGRCIARKLECNGENDCGDNSDERDCGRTKAVCTRKYNPIPSVQLMGNGFHFLAGEPRGEVLDNSFTGGICKTVKSSRTSNPYRVPANLENVGFEVQTAEDDLKTDFYKDLTSLGHNENQQGSFSSQGGSSFSVPIFYSSKRSENINHNSAFKQAIQASHKKDSSFIRIHKVMKVLNFTTKAKDLHLSDVFLKALNHLPLEYNSALYSRIFDDFGTHYFTSGSLGGVYDLLYQFSSEELKNSGLTEEEAKHCVRIETKKRVLFAKKTKVEHRCTTNKLSEKHEGSFIQGAEKSISLIRGGRSEYGAALAWEKGSSGLEEKTFSEWLESVKENPAVIDFELAPIVDLVRNIPCAVTKRNNLRKALQEYAAKFDPCQCAPCPNNGRPTLSGTECLCVCQSGTYGENCEKQSPDYKSNAVDGQWGCWSSWSTCDATYKRSRTRECNNPAPQRGGKRCEGEKRQEEDCTFSIMENNGQPCINDDEEMKEVDLPEIEADSGCPQPVPPENGFIRNEKQLYLVGEDVEISCLTGFETVGYQYFRCLPDGTWRQGDVECQRTECIKPVVQEVLTITPFQRLYRIGESIELTCPKGFVVAGPSRYTCQGNSWTPPISNSLTCEKDTLTKLKGHCQLGQKQSGSECICMSPEEDCSHHSEDLCVFDTDSNDYFTSPACKFLAEKCLNNQQLHFLHIGSCQDGRQLEWGLERTRLSSNSTKKESCGYDTCYDWEKCSASTSKCVCLLPPQCFKGGNQLYCVKMGSSTSEKTLNICEVGTIRCANRKMEILHPGKCLA

SEQ ID NO: 1920 - protein, 934 aa, Homo sapiens; identical to SEQ ID NO: 1919

SEQ ID NO: 1921 - protein, 191 aa, Homo sapiens
MAAPRGRAAPWTTALLLLLASQVLSPGSCADEEEVPEEWVLLHVVQGQIGAGNYSYLRLNHEGKIVLRMRSLKGDADLYVSASSLHPSFDDYELQSATCGPDAVSIPAHFRRPVGIGVYGHPSHLESEFEMKVYYDGTVEQHPFGEAAYPADGADAGQKHAGAPEDASQEEESVLWTILISILKLVLEILF

SEQ ID NO: 1922 - protein, 325 aa, Homo sapiens
MQGRVAGSCAPLGLLLVCLHLPGLFARSIGVVEEKVSQNLGTNLPQLGQPSSTGPSNSEHPQPALDPRSNDLARVPLKLSVPASDGFPPAGGSAVQRWPPSWGLPAMDSWPPEDPWQMMAAAAEDRLGEALPEELSYLSSAAALAPGSGPLPGESSPDATGLSPKASLLHQDSESRRLPRSNSLGAGGKILSQRPPWSLIHRVLPDHPWGTLNPSVSWGGGGPGTGWGTRPMPHPEGIWGINNQPPGTSWGNINRYPGGSWGNINRYPGGSWGNINRYPGGSWGNIHLYPGINNPFPPGVLRPPGSSWNIPAGFPNPPSPRLQWG

SEQ ID NO: 1923 - protein, 330 aa, Homo sapiens
MAFLPSWVCVLVGSFSASLAGTSNLSETEPPLWKESPGQLSDYRVENSMYIINPWVYLERMGMYKIILNQTARYFAKFAPDNEQNILWGLPLQYGWQYRTGRLADPTRRTNCGYESGDHMCISVDSWWADLNYFLSSLPFLAAVDSGVMGISSDQVRLLPPPKNERKFCYDVSSCRSSFPETMNKWNTFYQYLQSPFSKFDDLLKYLWAAHTSTLADNIKSFEDRYDYYSKAEAHFERSWVLAVDHLAAVLFPTTLIRSYKFQKGMPPRILLNTDVAPFISDFTAFQNVVLVLLNMLDNVDKSIGYLCTEKSNVYRDHSESSSRSYGNNS

SEQ ID NO: 1924 - protein, 843 aa, Homo sapiens
MKVISLFILVGFIGEFQSFSSASSPVNCQWDFYAPWSECNGCTKTQTRRRSVAVYGQYGGQPCVGNAFETQSCEPTRGCPTEEGCGERFRCFSGQCISKSLVCNGDSDCDEDSADEDRCEDSERRPSCDIDKPPPNIELTGNGYNELTGQFRNRVINTKSFGGQCRKVFSGDGKDFYRLSGNVLSYTFQVKINNDFNYEFYNSTWSYVKHTSTEHTSSSRKRSFFRSSSSSSRSYTSHTNEIHKGKSYQLLVVENTVEVAQFINNNPEFLQLAEPFWKELSHLPSLYDYSAYRRLIDQYGTHYLQSGSLGGEYRVLFYVDSEKLKQNDFNSVEEKKCKSSGWHFVVKFSSHGCKELENALKAASGTQNNVLRGEPFIRGGGAGFISGLSYLELDNPAGNKRRYSAWAESVTNLPQVIKQKLTPLYELVKEVPCASVKKLYLKWALEEYLDEFDPCHCRPCQNGGLATVEGTHCLCHCKPYTFGAACEQGVLVGNQAGGVDGGWSCWSSWSPCVQGKKTRSRECNNPPPSGGGRSCVGETTESTQCEDEELEHLRLLEPHCFPLSLVPTEFCPSPPALKDGFVQDEGTMFPVGKNVVYTCNEGYSLIGNPVARCGEDLRWLVGEMHCQKIACVLPVLMDGIQSHPQKPFYTVGEKVTVSCSGGMSLEGPSAFLCGSSLKWSPEMKNARCVQKENPLTQAVPKCQRWEKLQNSRCVCKMPYECGPSLDVCAQDERSKRILPLTVCKMHVLHCQGRNYTLTGRDSCTLPASAEKACGACPLWGKCDAESSKCVCREASECEEEGFSICVEVNGKEQTMSECEAGALRCRGQSISVTSIRPCAAETQ

SEQ ID NO: 1925 - protein, 324 aa, Homo sapiens
MLWFRGALGVWVWLAAASQPCKNSNAGRRGQHPRRPAGSCVQRLTMRNTSKELQGATHRYAPCDWYYHVPVKRSEKAVDAPPASQIPGLSNLGDSHSENLPGTRRYWIKETDSEYVKLAKQGGRPDLLKHFAPGTRKGSPVAYSLPDWYIHHSKPPTASQQEVRAVSMPDYMVHEEFNPDQANGSYASRRGPFDFDMKTVWQREAEELEKEKKKLRLPAIDSKYLSKAGTPLGPKNPAGSRLSFPPVNGYKDEWLQQQQRADSDKRTPKTSRASVLSQSPRDLEGPQDAARLQDAEASEGPEDTPESSQSPEESVSASTPAELK

SEQ ID NO: 1926 - protein, 340 aa, Homo sapiens
MLWFRGALGVWVWLAAASQPCKNSNAGRRGQHPRRPAGSCVQRLTMRNTSKELQGATHRYAPCDWYYHVPVKRSEKAVDAPPASQIPGLSNLGDSHSENLPGTRRYWIKETDSEYVKLAKQGGRPDLLKHFAPGTRKGSPVAYSLPDWYIHHSKPPTASQQEVRAVSMPDYMVHEEFNPDQANGSYASRRGPFDFDMKTVWQREAEELEKEKKKLRLPAIDSKYLSKAGTPLGPKNPAGSRLSFPPVPGQKNSSPTNFSKLISNGYKDEWLQQQQRADSDKRTPKTSRASVLSQSPRDLEGPQDAARLQDAEASEGPEDTPESSQSPEESVSASTPAELK

SEQ ID NO: 1927 - protein, 157 aa, Homo sapiens
MPDYMVHEEFNPDQANGSYASRRGPFDFDMKTVWQREAEELEKEKKKLRLPAIDSKYLSKAGTPLGPKNPAGSRLSFPPVNGYKDEWLQQQQRADSDKRTPKTSRASVLSQSPRDLEGPQDAARLQDAEASEGPEDTPESSQSPEESVSASTPAELK

SEQ ID NO: 1928 - protein, 153 aa, Homo sapiens
MPDYMVHEEFNPDQANGSYASRRGPFDFDMKTVWQREAEELEKEKKKLRLPAIDSKYLSKAGTPLGPKNPAGSRLSFPPVNGYKDEWLQQQQRADSDKRTPKTSRASVLSQSPRDLEGPQDAARLQDAEASEGPEDTPGPEESVSASTPAELK

SEQ ID NO: 1929 - protein, 295 aa, Homo sapiens
MRNTSKELQGATHRYAPCDWYYHVPVKRSEKAVDAPPASQIPGLSNLGDSHSENLPGTRRYWIKETDSEYVKLAKQGGRPDLLKHFAPGTRKGSPVAYSLPDWYIHHSKPPTASQQEVRAVSMPDYMVHEEFNPDQANGSYASRRGPFDFDMKTVWQREAEELEKEKKKLRLPAIDSKYLSKAGTPLGPKNPAGSRLSFPPVPGQKNSSPTNFSKLISNGYKDEWLQQQQRADSDKRTPKTSRASVLSQSPRDLEGPQDAARLQDAEASEGPEDTPESSQSPEESVSASTPAELK

SEQ ID NO: 1930 - protein, 584 aa, Homo sapiens
MFAVVFFILSLMTCQPGVTAQEKVNQRVRRAATPAAVTCQLSNWSEWTDCFPCQDKKYRHRSLLQPNKFGGTICSGDIWDQASCSSSTTCVRQAQCGQDFQCKETGRCLKRHLVCNGDQDCLDGSDEDDCEDVRAIDEDCSQYEPIPGSQKAALGYNILTQEDAQSVYDASYYGGQCETVYNGEWRELRYDSTCERLYYGDDEKYFRKPYNFLKYHFEALADTGISSEFYDNANDLLSKVKKDKSDSFGVTIGIGPAGSPLLVGVGVSHSQDTSFLNELNKYNEKKFIFTRIFTKVQTAHFKMRKDDIMLDEGMLQSLMELPDQYNYGMYAKFINDYGTHYITSGSMGGIYEYILVIDKAKMESLGITSRDITTCFGGSLGIQYEDKINVGGGLSGDHCKKFGGGKTERARKAMAVEDIISRVRGGSSGWSGGLAQNRSTITYRSWGRSLKYNPVVIDFEMQPIHEVLRHTSLGPLEAKRQNLRRALDQYLMEFNACRCGPCFNNGVPILEGTSCRCQCRLGSLGAACEQTQTEGAKADGSWSCWSSWSVCRAGIQERRRECDNPAPQNGGASCPGRKVQTQAC

SEQ ID NO: 1931 - protein, 529 aa, Homo sapiens
MDTCMTLAFTLSGRFFMLLSQYRYAYLLQPSQFHGEPCNFSDKEVEDCVTNRPCGSQVRCEGFVCAQTGRCVNRRLLCNGDNDCGDQSDEANCRRIYKKCQHEMDQYWGIGSLASGINLFTNSFEGPVLDHRYYAGGCSPHYILNTRFRKPYNVESYTPQTQGKYEFILKEYESYSDFERNVTEKMASKSGFSFGFKIPGIFELGISSQSDRGKHYIRRTKRFSHTKSVFLHARSDLEVAHYKLKPRSLMLHYEFLQRVKRLPLEYSYGEYRDLFRDFGTHYITEAVLGGIYEYTLVMNKEAMERGDYTLNNVHACAKNDFKIGGAIEEVYVSLGVSVGKCRGILNEIKDRNKRDTMVEDLVVLVRGGASEHITTLAYQELPTADLMQEWGDAVQYNPAIIKVKVEPLYELVTATDFAYSSTVRQNMKQALEEFQKEVSSCHCAPCQGNGVPVLKGSRCDCICPVGSQGLACEVSYRKNTPIDGKWNCWSNWSSCSGRRKTRQRQCNNPPPQNGGSPCSGPASETLDCS

SEQ ID NO: 1932 - protein, 591 aa, Homo sapiens
MKNSRTWAWRAPVELFLLCAALGCLSLPGSRGERPHSFGSNAVNKSFAKSRQMRSVDVTLMPIDCELSSWSSWTTCDPCQKKRYRYAYLLQPSQFHGEPCNFSDKEVEDCVTNRPCGSQVRCEGFVCAQTGRCVNRRLLCNGDNDCGDQSDEANCRRIYKKCQHEMDQYWGIGSLASGINLFTNSFEGPVLDHRYYAGGCSPHYILNTRFRKPYNVESYTPQTQGKYEFILKEYESYSDFERNVTEKMASKSGFSFGFKIPGIFELGISSQSDRGKHYIRRTKRFSHTKSVFLHARSDLEVAHYKLKPRSLMLHYEFLQRVKRLPLEYSYGEYRDLFRDFGTHYITEAVLGGIYEYTLVMNKEAMERGDYTLNNVHACAKNDFKIGGAIEEVYVSLGVSVGKCRGILNEIKDRNKRDTMVEDLVVLVRGGASEHITTLAYQELPTADLMQEWGDAVQYNPAIIKVKVEPLYELVTATDFAYSSTVRQNMKQALEEFQKEVSSCHCAPCQGNGVPVLKGSRCDCICPVGSQGLACEVSYRKNTPIDGKWNCWSNWSSCSGRRKTRQRQCNNPPPQNGGSPCSGPASETLDCS

SEQ ID NO: 1933 - protein, 539 aa, Homo sapiens
MRSVDVTLMPIDCELSSWSSWTTCDPCQKKRYRYAYLLQPSQFHGEPCNFSDKEVEDCVTNRPCGSQVRCEGFVCAQTGRCVNRRLLCNGDNDCGDQSDEANCRRIYKKCQHEMDQYWGIGSLASGINLFTNSFEGPVLDHRYYAGGCSPHYILNTRFRKPYNVESYTPQTQGKYEFILKEYESYSDFERNVTEKMASKSGFSFGFKIPGIFELGISSQSDRGKHYIRRTKRFSHTKSVFLHARSDLEVAHYKLKPRSLMLHYEFLQRVKRLPLEYSYGEYRDLFRDFGTHYITEAVLGGIYEYTLVMNKEAMERGDYTLNNVHACAKNDFKIGGAIEEVYVSLGVSVGKCRGILNEIKDRNKRDTMVEDLVVLVRGGASEHITTLAYQELPTADLMQEWGDAVQYNPAIIKVKVEPLYELVTATDFAYSSTVRQNMKQALEEFQKEVSSCHCAPCQGNGVPVLKGSRCDCICPVGSQGLACEVSYRKNTPIDGKWNCWSNWSSCSGRRKTRQRQCNNPPPQNGGSPCSGPASETLDCS

SEQ ID NO: 1934 - protein, 202 aa, Homo sapiens
MLPPGTATLLTLLLAAGSLGQKPQRPRRPASPISTIQPKANFDAQQFAGTWLLVAVGSACRFLQEQGHRAEATTLHVAPQGTAMAVSTFRKLDGICWQVRQLYGDTGVLGRFLLQARDARGAVHVVVAETDYQSFAVLYLERAGQLSVKLYARSLPVSDSVLSGFEQRVQEAHLTEDQIFYFPKYGFCEAADQFHVLDEVRR

SEQ ID NO: 1935 - protein, 164 aa, Homo sapiens
MLPPGTATLLTLLLAAGSLGQKPQRPRRPASPISTIQPKANFDAQQFAGTWLLVAVGSACRFLQEQGHRAEATTLHVAPQGTAMAVSTFRKLDGICWQVRQLYGDTGVLGRFLLQARDARGAVHVVVAETDYQSFAVLYLERAGQLSVKLYGAQGVVTDRPGVG

SEQ ID NO: 1936 - protein, 559 aa, Homo sapiens
MSACRSFAVAICILEISILTAQYTTSYDPELTESSGSASHIDCRMSPWSEWSQCDPCLRQMFRSRSIEVFGQFNGKRCTDAVGDRRQCVPTEPCEDAEDDCGNDFQCSTGRCIKMRLRCNGDNDCGDFSDEDDCESEPRPPCRDRVVEESELARTAGYGINILGMDPLSTPFDNEFYNGLCNRDRDGNTLTYYRRPWNVASLIYETKGEKNFRTEHYEEQIEAFKSIIQEKTSNFNAAISLKFTPTETNKAEQCCEETASSISLHGKGSFRFSYSKNETYQLFLSYSSKKEKMFLHVKGEIHLGRFVMRNRDVVLTTTFVDDIKALPTTYEKGEYFAFLETYGTHYSSSGSLGGLYELIYVLDKASMKRKGVELKDIKRCLGYHLDVSLAFSEISVGAEFNKDDCVKRGEGRAVNITSENLIDDVVSLIRGGTRKYAFELKEKLLRGTVIDVTDFVNWASSINDAPVLISQKLSPIYNLVPVKMKNAHLKKQNLERAIEDYINEFSVRKCHTCQNGGTVILMDGKCLCACPFKFEGIACEISKQKISEGLPALEFPNEK

SEQ ID NO: 1937 - protein, 183 aa, Homo sapiens
MVRIWTTIMIVLILLLRIGPNKPSLSGRQAPAQAQTSDLVPSLFPLGLWAPGFCTWSSPDEDKRPRKPVPGTGNRDSGTRRRLQDATEQDPRPGNDVASAETAGPPSPSGIRAQDRAPRHRRAPPARMPVAPAPSADGEPLQEQGGGLFHRTRSVYNGLELNTWMKVERLFVEKFHQSFSLDN

SEQ ID NO: 1938 - protein, 235 aa, Homo sapiens
MVRIWTTIMIVLILLLRIGPNKPSLSGRQAPAQAQTSDLVPSLFPLGLWAPGFCTWSSPDEDKRPRKPVPGTGNRDSGTRRRLQDATEQDPRPGNDVASAETAGPPSPSGIRAQDRAPRHRRAPPARMPVAPAPSADGGERRARAGRGTRVGGWGPKDPPFQQNPHRSRARRGLGRATAAGALHISTPPPEPLQEQGGGLFHRTRSVYNGLELNTWMKVERLFVEKFHQSFSLDN

SEQ ID NO: 1939 - protein, 202 aa, Homo sapiens
MVRIWTTIMIVLILLLRIGPNKPSLSGRQAPAQAQTSDLVPSLFPLGLWAPGFCTWSSPDEDKVWRPAWEQGPKGEPDPRGLRPRKPVPGTGNRDSGTRRRLQDATEQDPRPGNDVASAETAGPPSPSGIRAQDRAPRHRRAPPARMPVAPAPSADGEPLQEQGGGLFHRTRSVYNGLELNTWMKVERLFVEKFHQSFSLDN

SEQ ID NO: 1940 - protein, 56 aa, Homo sapiens
HVSLRLDKEHLVNISGGPMTYSHRLEEIRLHFGSEDSQGSEHLLNGQAFSGEEKVC

SEQ ID NO: 1941 - protein, 328 aa, Homo sapiens
MEIVWEVLFLLQANFIVCISAQQNSPKIHEGWWAYKEVVQGSFVPVPSFWGLVNSAWNLCSVGKRQSPVNIETSHMIFDPFLTPLRINTGGRKVSGTMYNTGRHVSLRLDKEHLVNISGGPMTYSHRLEEIRLHFGSEDSQGSEHLLNGQAFSGEVQLIHYNHELYTNVTEAAKSPNGLVVVSIFIKVSDSSNPFLNRMLNRDTITRITYKNDAYLLQGLNIEELYPETSSFITYDGSMTIPPCYETASWIIMNKPVYITRMQMHSLRLLSQNQPSQIFLSMSDNFRPVQPLNNRCIRTNINFSLQGKDCPNNRAQKLQYRVNEWLLK

SEQ ID NO: 1942 - protein, 328 aa, Homo sapiens; identical to SEQ ID NO: 1941

SEQ ID NO: 1943 - protein, 328 aa, Homo sapiens; identical to SEQ ID NO: 1941

SEQ ID NO: 1944 - protein, 276 aa, Homo sapiens
MEIVWEVLFLLQANFIVCISAQQNSPKIHEGWWAYKEVVQGSFVPVPSFWGLVNSAWNLCSVGKRQSPVNIETSHMIFDPFLTPLRINTGGRKVSGTMYNTGRHVSLRLDKEHLVNISGGPMTYSHRLEEIRLHFGSEDSQGSEHLLNGQAFSGEVQLIHYNHELYTNVTEAAKSPNGLVVVSIFIKVSDSSNPFLNRMLNRDTITRITYKNDAYLLQGLNIEELYPETSSFITYDGSMTIPPCYETASWIIMNKPVYITRMQMHSLRLLSQNQPS

SEQ ID NO: 1945 - protein, 42 aa, Homo sapiens
MEIVWEVLFLLQANFIVCISGDLRRAVRRLWWQSGLEMQVTC

SEQ ID NO: 1946 - protein, 253 aa, Homo sapiens
MIFDPFLTPLRINTGGRKVSGTMYNTGRHVSLRLDKEHLVNISGGPMTYSHRLEEIRLHFGSEDSQGSEHLLNGQAFSGEVQLIHYNHELYTNVTEAAKSPNGLVVVSIFIKVSDSSNPFLNRMLNRDTITRITYKNDAYLLQGLNIEELYPETSSFITYDGSMTIPPCYETASWIIMNKPVYITRMQMHSLRLLSQNQPSQIFLSMSDNFRPVQPLNNRCIRTNINFSLQGKDCPNNRAQKLQYRVNEWLLK

SEQ ID NO: 1947 - protein, 328 aa, Homo sapiens
MGAAARLSAPRALVLWAALGAAAHIGPAPDPEDWWSYKDNLQGNFVPGPPFWGLVNAAWSLCAVGKRQSPVDVELKRVLYDPFLPPLRLSTGGEKLRGTLYNTGRHVSFLPAPRPVVNVSGGPLLYSHRLSELRLLFGARDGAGSEHQINHQGFSAEVQLIHFNQELYGNFSAASRGPNGLAILSLFVNVASTSNPFLSRLLNRDTITRISYKNDAYFLQDLSLELLFPESFGFITYQGSLSTPPCSETVTWILIDRALNITSLQMHSLRLLSQNPPSQIFQSLSGNSRPLQPLAHRALRGNRDPRHPERRCRGPNYRLHVDGVPHGR

SEQ ID NO: 1948 - protein, 113 aa, Homo sapiens
  VARIANT 1: note = misc_feature - Xaa can be any naturally occurring amino acid
XDAYFLQDLSLELLFPESFGFITYQGSLSTPPCSETVTWILIDRALNITSLQMHSLRLLSQNPPSQIFQSLSGNSRPLQPLAHRALRGNRDPRHPERRCRGPNYRLHAQCFST

SEQ ID NO: 1949 - protein, 187 aa, Homo sapiens
MRALVLLLSLFLLGGQAQHVSDWTYSEGALDEAHWPQHYPACGGQRQSPINLQRTKISLPSTMRMTVADGTVYIAQQMHFHWGGASSEISGSEHTVDGIRHVIEIHIVHYNSKYKSYDIAQDAPDGLAVLAAFVEVKNYPENTYYSNFISHLANIKYPGQRTTLTGLDVQDMLPRNLQHYYTYHGSL

SEQ ID NO: 1950 - protein, 179 aa, Homo sapiens
MRALVLLLSLFLLGGQAQHVSDWTYSEGALDEAHWPQHYPACGGQRQSPINLQRTKVRYNPSLKGLNMTGYETQAGEFPMVNNGHTDWQAELFLPSLSSPCGEGAKHKGQRQWLCSPSLDSWWEAIIDGGSLWATLAECGLRAEGPEEGRHMEEKSPASQGACSGSRLPISRGPCTFFL

SEQ ID NO: 1951 - protein, 313 aa, Homo sapiens
MRALVLLLSLFLLGGQAQHVSDWTYSEGALDEAHWPQHYPACGGQRQSPINLQRTKVRYNPSLKGLNMTGYETQAGEFPMVNNGHTVQISLPSTMRMTVADGTVYIAQQMHFHWGGASSEISGSEHTVDGIRHVIEIHIVHYNSKYKSYDIAQDAPDGLAVLAAFVEVKNYPENTYYSNFISHLANIKYPGQRTTLTGLDVQDMLPRNLQHYYTYHGSLTTPPCTENVHWFVLADFVKLSRTQVWKLENSLLDHRNKTIHNDYRRTQPLNHRVVESNFPNQGKGHGGHRGRSQNPRVQPTSTRHPLALGSLEA

SEQ ID NO: 1952 - protein, 308 aa, Homo sapiens
MRALVLLLSLFLLGGQAQHVSDWTYSEGALDEAHWPQHYPACGGQRQSPINLQRTKVRYNPSLKGLNMTGYETQAGEFPMVNNGHTVQISLPSTMRMTVADGTVYIAQQMHFHWGGASSEISGSEHTVDGIRHVIEIHIVHYNSKYKSYDIAQDAPDGLAVLAAFVEVKNYPENTYYSNFISHLANIKYPGQRTTLTGLDVQDMLPRNLQHYYTYHGSLTTPPCTENVHWFVLADFVKLSRTQVWKLENSLLDHRNKTIHNDYRRTQPLNHRVVESNFPNQEYTLGSEFQFYLHKIEEILDYLRRALN

SEQ ID NO: 1953 - protein, 248 aa, Homo sapiens
MRALVLLLSLFLLGGQAQHVSDWTYSVQISLPSTMRMTVADGTVYIAQQMHFHWGGASSEISGSEHTVDGIRHVIEIHIVHYNSKYKSYDIAQDAPDGLAVLAAFVEVKNYPENTYYSNFISHLANIKYPGQRTTLTGLDVQDMLPRNLQHYYTYHGSLTTPPCTENVHWFVLADFVKLSRTQVWKLENSLLDHRNKTIHNDYRRTQPLNHRVVESNFPNQEYTLGSEFQFYLHKIEEILDYLRRALN

SEQ ID NO: 1954 - protein, 459 aa, Homo sapiens
MAPLCPSPWLPLLIPAPAPGLTVQLLLSLLLLVPVHPQRLPRMQEDSPLGGGSSGEDDPLGEEDLPSEEDSPREEDPPGEEDLPGEEDLPGEEDLPEVKPKSEEEGSLKLEDLPTVEAPGDPQEPQNNAHRDKEGDDQSHWRYGGDPPWPRVSPACAGRFQSPVDIRPQLAAFCPALRPLELLGFQLPPLPELRLRNNGHSVQLTLPPGLEMALGPGREYRALQLHLHWGAAGRPGSEHTVEGHRFPAEIHVVHLSTAFARVDEALGRPGGLAVLAAFLEEGPEENSAYEQLLSRLEEIAEEGSETQVPGLDISALLPSDFSRYFQYEGSLTTPPCAQGVIWTVFNQTVMLSAKQLHTLSDTLWGPGDSRLQLNFRATQPLNGRVIEASFPAGVDSSPRAAEPVQLNSCLAAGDILALVFGLLFAVTSVAFLVQMRRQHRRGTKGGVSYRPAEVAETGA

SEQ ID NO: 1955 - protein, 356 aa, Homo sapiens [sequence omitted]

SEQ ID NO: 1956 - protein, 633 aa, Homo sapiens
MAAAAAAATTAACSSGSAGTDAAGASGLQQPPPQPQPQPAAAAPAQPPPEPPRKPRMDPRRRQAALSFLTNISLDGRLPPQDAEWGGGEEGGAAKPGAGGACGARTRFSLLAAAERGGCIALAAPGTPAAGLAAGSGPCLPQPSSLPPLIPGGHATVSGPGVARGFASPLGAGRASGEQWQPPRPAPLAACAQLQLLDGSGAAGQEELEEDDAFISVQVPAAAFLGSGTPGSGSGSRGRLNSFTQGILPIAFSRPTSQNYCSLEQPGQGGSTSAFEQLQRSRRRLISQRSSLETLEDIEENAPLRRCRTLSGSPRPKNFKKIHFIKNMRQHDTRNGRIVLISGRRSFCSIFSVLPYRDSTQVGDLKLDGGRQSTGAVSLKEIIGLEGVELGADGKTVSYTQFLLPTNAFGARRNTIDSTSSFSQFRNLSHRSLSIGRASGTQGSLDTGSDLGDFMDYDPNLLDDPQWPCGKHKRVLIFPSYMTTVIDYVKPSDLKKDMNETFKEKFPHIKLTLSKIRSLKREMRKLAQEDCGLEEPTVAMAFVYFEKLALKGKLNKQNRKLCAGACVLLAAKIGSDLKKHEVKHLIDKLEEKFRLNRRELIAFEFPVLVALEFALHLPEHEVMPHYRRLVQSS

SEQ ID NO: 1957 - protein, 368 aa, Homo sapiens
MLSKRGCHARIYADFPIRRLISQRSSLETLEDIEENAPLRRCRTLSGSPRPKNFKKIHFIKNMRQHDTRNGRIVLISGRRSFCSIFSVLPYRDSTQVGDLKLDGGRQSTGAVSLKEIIGLEGVELGADGKTVSYTQFLLPTNAFGARRNTIDSTSSFSQFRNLSHRSLSIGRASGTQGSLDTGSDLGDFMDYDPNLLDDPQWPCGKHKRVLIFPSYMTTVIDYVKPSDLKKDMNETFKEKFPHIKLTLSKIRSLKREMRKLAQEDCGLEEPTVAMAFVYFEKLALKGKLNKQNRKLCAGACVLLAAKIGSDLKKHEVKHLIDKLEEKFRLNRRELIAFEFPVLVALEFALHLPEHEVMPHYRRLVQSS

SEQ ID NO: 1958 - protein, 9 aa, Homo sapiens
MRQHDTRNG

SEQ ID NO: 1959 - protein, 306 aa, Homo sapiens
MRQHDTRNGRIVLISGRRSFCSIFSVLPYRDSTQVGDLKLDGGRQSTGAVSLKEIIGLEGVELGADGKTVSYTQFLLPTNAFGARRNTIDSTSSFSQFRNLSHRSLSIGRASGTQGSLDTGSDLGDFMDYDPNLLDDPQWPCGKHKRVLIFPSYMTTVIDYVKPSDLKKDMNETFKEKFPHIKLTLSKIRSLKREMRKLAQEDCGLEEPTVAMAFVYFEKLALKGKLNKQNRKLCAGACVLLAAKIGSDLKKHEVKHLIDKLEEKFRLNRRELIAFEFPVLVALEFALHLPEHEVMPHYRRLVQSS

SEQ ID NO: 1960 - protein, 38 aa, Homo sapiens
MRQHDTRNGRIVLISGRRSFCSIFSVLPYRDSTQVGQQ

SEQ ID NO: 1961 - protein, 163 aa, Homo sapiens
  VARIANT 1: note = misc_feature - Xaa can be any naturally occurring amino acid
XAAFLGSGTPGSGSGSRGRLNSFTQGILPIAFSRPTSQNYCSLEQPGQGGSTSAFEQLQRSRRRLISQRSSLETLEDIEENAPLRRCRTLSGSPRPKNFKKIHFIKNMRQHDTRNGRIVLISGRRSFCSIFSVLPYRDSTQVGYVYACMLCSSLGEKISHQCT

SEQ ID NO: 1962 - protein, 306 aa, Homo sapiens
MCQCVRACVCVCVCACATQRASHSALPGTTISVKDWRLCLLDQFDACARSGLSEPRSLTLRVPSCGKPLPGPGARLGREVTPCLSFAFAWCWLKMCQEEQTSYMVVQTSEEGLAADAELPGPLLMLAQNCAVMHNLLGPACIFLRKGFAENRQPDRSLRPEEIEELREAFREFDKDKDGYINCRDLGNCMRTMGYMPTEMELIELSQQINMNLGGHVDFDDFVELMGPKLLAETADMIGVKELRDAFREFDTNGDGEISTSELREAMRKLLGHQVGHRDIEEIIRDVDLNGDGRVDFEEFVRMMSR

SEQ ID NO: 1963 - protein, 370 aa, Homo sapiens
MGGGDGAAFKRPGDGARLQRVLGLGSRREPRSLPAGGPAPRRTAPPPPGHASAGPAAMSSHIAKSESKTSLLKAAAAAASGGSRAPRHGPARDPGLPSRRLPGSCPATPQSSGDPSSRRPLCRPAPREEGARGSQRVLPQAHCRPREALPAAASRPSPSSPLPPARGRDGEERGLSPALGLRGSLRARGRGDSVPAAASEADPFLHRLRPMLSSAFGQDRSLRPEEIEELREAFREFDKDKDGYINCRDLGNCMRTMGYMPTEMELIELSQQINMNLGGHVDFDDFVELMGPKLLAETADMIGVKELRDAFREFDTNGDGEISTSELREAMRKLLGHQVGHRDIEEIIRDVDLNGDGRVDFEEFVRMMSR

SEQ ID NO: 1964 - protein, 167 aa, Homo sapiens
MGNCVKYPLRNLSRKDRSLRPEEIEELREAFREFDKDKDGYINCRDLGNCMRTMGYMPTEMELIELSQQINMNLGGHVDFDDFVELMGPKLLAETADMIGVKELRDAFREFDTNGDGEISTSELREAMRKLLGHQVGHRDIEEIIRDVDLNGDGRVDFEEFVRMMSR

SEQ ID NO: 1965 - protein, 227 aa, Homo sapiens
MGNCVKYPLRNLSRKMCQEEQTSYMVVQTSEEGLAADAELPGPLLMLAQNCAVMHNLLGPACIFLRKGFAENRQPDRSLRPEEIEELREAFREFDKDKDGYINCRDLGNCMRTMGYMPTEMELIELSQQINMNLGGHVDFDDFVELMGPKLLAETADMIGVKELRDAFREFDTNGDGEISTSELREAMRKLLGHQVGHRDIEEIIRDVDLNGDGRVDFEEFVRMMSR

SEQ ID NO: 1966 - protein, 1091 aa, Homo sapiens
MAAGCLLALTLTLFQSLLIGPSSEEPFPSAVTIKSWVDKMQEDLVTLAKTASGVNQLVDIYEKYQDLYTVEPNNARQLVEIAARDIEKLLSNRSKALVRLALEAEKVQAAHQWREDFASNEVVYYNAKDDLDPEKNDSEPGSQRIKPVFIEDANFGRQISYQHAAVHIPTDIYEGSTIVLNELNWTSALDEVFKKNREEDPSLLWQVFGSATGLARYYPASPWVDNSRTPNKIDLYDVRRRPWYIQGAASPKDMLILVDVSGSVSGLTLKLIRTSVSEMLETLSDDDFVNVASFNSNAQDVSCFQHLVQANVRNKKVLKDAVNNITAKGITDYKKGFSFAFEQLLNYNVSRANCNKIIMLFTDGGEERAQEIFNKYNKDKKVRVFTFSVGQHNYDRGPIQWMACENKGYYYEIPSIGAIRINTQEYLDVLGRPMVLAGDKAKQVQWTNVYLDALELGLVITGTLPVFNITGQFENKTNLKNQLILGVMGVDVSLEDIKRLTPRFTLCPNGYYFAIDPNGYVLLHPNLQPKNPKSQEPVTLDFLDAELENDIKVEIRNKMIDGESGEKTFRTLVKSQDERYIDKGNRTYTWTPVNGTDYSLALVLPTYSFYYIKAKLEETITQARSKKGKMKDSETLKPDNFEESGYTFIAPRDYCNDLKISDNNTEFLLNFNEFIDRKTPNNPSCNADLINRVLLDAGFTNELVQNYWSKQKNIKGVKARFVVTDGGITRVYPKEAGENWQENPETYEDSFYKRSLDNDNYVFTAPYFNKSGPGAYESGIMVSKAVEIYIQGKLLKPAVVGIKIDVNSWIENFTKTSIRDPCAGPVCDCKRNSDVMDCVILDDGGFLLMANHDDYTNQIGRFFGEIDPSLMRHLVNISVYAFNKSYDYQSVCEPGAAPKQGAGHRSAYVPSVADILQIGWWATAAAWSILQQFLLSLTFPRLLEAVEMEDDDFTASLSKQSCITEQTQYFFDNDSKSFSGVLDCGNCSRIFHGEKLMNTNLIFIMVESKGTCPCDTRLLIQAEQTSDGPNPCDMVKQPRYRKGPDVCFDNNVLEDYTDCGGVSGLNPSLWYIIGIQFLLLWLVSGSTHRLL

SEQ ID NO: 1967 - protein, 1103 aa, Homo sapiens
MAAGCLLALTLTLFQSLLIGPSSEEPFPSAVTIKSWVDKMQEDLVTLAKTASGVNQLVDIYEKYQDLYTVEPNNARQLVEIAARDIEKLLSNRSKALVRLALEAEKVQAAHQWREDFASNEVVYYNAKDDLDPEKNDSEPGSQRIKPVFIEDANFGRQISYQHAAVHIPTDIYEGSTIVLNELNWTSALDEVFKKNREEDPSLLWQVFGSATGLARYYPASPWVDNSRTPNKIDLYDVRRRPWYIQGAASPKDMLILVDVSGSVSGLTLKLIRTSVSEMLETLSDDDFVNVASFNSNAQDVSCFQHLVQANVRNKKVLKDAVNNITAKGITDYKKGFSFAFEQLLNYNVSRANCNKIIMLFTDGGEERAQEIFNKYNKDKKVRVFTFSVGQHNYDRGPIQWMACENKGYYYEIPSIGAIRINTQEYLDVLGRPMVLAGDKAKQVQWTNVYLDALELGLVITGTLPVFNITGQFENKTNLKNQLILGVMGVDVSLEDIKRLTPRFTLCPNGYYFAIDPNGYVLLHPNLQPKPIGVGIPTINLRKRRPNIQNPKSQEPVTLDFLDAELENDIKVEIRNKMIDGESGEKTFRTLVKSQDERYIDKGNRTYTWTPVNGTDYSLALVLPTYSFYYIKAKLEETITQARYSETLKPDNFEESGYTFIAPRDYCNDLKISDNNTEFLLNFNEFIDRKTPNNPSCNADLINRVLLDAGFTNELVQNYWSKQKNIKGVKARFVVTDGGITRVYPKEAGENWQENPETYEDSFYKRSLDNDNYVFTAPYFNKSGPGAYESGIMVSKAVEIYIQGKLLKPAVVGIKIDVNSWIENFTKTSIRDPCAGPVCDCKRNSDVMDCVILDDGGFLLMANHDDYTNQIGRFFGEIDPSLMRHLVNISVYAFNKSYDYQSVCEPGAAPKQGAGHRSAYVPSVADILQIGWWATAAAWSILQQFLLSLTFPRLLEAVEMEDDDFTASLSKQSCITEQTQYFFDNDSKSFSGVLDCGNCSRIFHGEKLMNTNLIFIMVESKGTCPCDTRLLIQAEQTSDGPNPCDMVKQPRYRKGPDVCFDNNVLEDYTDCGGVSGLNPSLWYIIGIQFLLLWLVSGSTHRLL

SEQ ID NO: 1968 - protein, 309 aa, Homo sapiens
MAAGCLLALTLTLFQSLLIGPSSEEPFPSAVTIKSWVDKMQEDLVTLAKTASGVNQLVDIYEKYQDLYTVEPNNARQLVEIAARDIEKLLSNRSKALVRLALEAEKVQAAHQWREDFASNEVVYYNAKDDLDPEKNDSEPGSQRIKPVFIEDANFGRQISYQHAAVHIPTDIYEGSTIVLNELNWTSALDEVFKKNREEDPSLLWQVFGSATGLARYYPASPWVDNSRTPNKIDLYDVRRRPWYIQGAASPKDMLILVDVSGSVSGLTLKLIRTSVSEMLETLSDDDFVNVASDSKEISPSPEEIFNAE

SEQ ID NO: 1969 - protein, 280 aa, Homo sapiens
  VARIANT 1: note = misc_feature - Xaa can be any naturally occurring amino acid
XKRLTPRFTLCPNGYYFAIDPNGYVLLHPNLQPKPIGVGIPTINLRKRRPNIQEPVTLDFLDAELENDIKVEIRNKMIDGESGEKTFRTLVKSQDERYIDKGNRTYTWTPVNGTDYSLALVLPTYSFYYIKAKLEETITQARYSETLKPDNFEESGYTFIAPRDYCNDLKISDNNTEFLLNFNEFIDRKTPNNPSCNADLINRVLLDAGFTNELVQNYWSKQKNIKGVKARFVVTDGGITRVYPKEAGENWQENPETYEDSFYKRSLDNDNYVFTAPYFN

SEQ ID NO: 1970 - protein, 1073 aa, Homo sapiens
MAVALGTRRRDRVKLWADTFGGDLYNTVTKYSGSLLLQKKYKDVESSLKIEEVDGLELVRKFSEDMENMLRRKVEAVQNLVEAAEEADLNHEFNESLVFDYYNSVLINERDEKGNFVELGAEFLLESNAHFSNLPVNTSISSVQLPTNVYNKDPDILNGVYMSEALNAVFVENFQRDPTLTWQYFGSATGFFRIYPGIKWTPDENGVITFDCRNRGWYIQAATSPKDIVILVDVSGSMKGLRMTIAKHTITTILDTLGENDFINIIAYNDYVHYIEPCFKGILVQADRDNREHFKLLVEELMVKGVGVVDQALREAFQILKQFQEAKQGSLCNQAIMLISDGAVEDYEPVFEKYNWPDCKVRVFTYLIGREVSFADRMKWIACNNKGYYTQISTLADTQENVMEYLHVLSRPMVINHDHDIIWTEAYMDSKLLSSQAQSLTLLTTVAMPVFSKKNETRSHGILLGVVGSDVALRELMKLAPRYKLGVHGYAFLNTNNGYILSHPDLRPLYREGKKLKPKPNYNSVDLSEVEWEDQAESLRTAMINRETGTLSMDVKVPMDKGKRVLFLTNDYFFTDISDTPFSLGVVLSRGHGEYILLGNTSVEEGLHDLLHPDLALAGDWIYCITDIDPDHRKLSQLEAMIRFLTRKDPDLECDEELVREVLFDAVVTAPMEAYWTALALNMSEESEHVVDMAFLGTRAGLLRSSLFVGSEKVSDRKFLTPEDEASVFTLDRFPLWYRQASEHPAGSFVFNLRWAEGPESAGEPMVVTASTAVAVTVDKRTAIAAAAGVQMKLEFLQRKFWAATRQCSTVDGPCTQSCEDSDLDCFVIDNNGFILISKRSRETGRFLGEVDGAVLTQLLSMGVFSQVTMYDYQAMCKPSSHHHSAAQPLVSPISAFLTATRWLLQELVLFLLEWSVWGSWYDRGAEAKSVFHHSHKHKKQDPLQPCDTEYPVFVYQPAIREANGIVECGPCQKVFVVQQIPNSNLLLLVTDPTCDCSIFPPVLQEATEVKYNASVKCDRMRSQKLRRRPDSCHAFHPEENAQDCGGASDTSASPPLLLLPVCAWGLLPQLLR

SEQ ID NO: 1971 - protein, 1090 aa, Homo sapiens
MAVALGTRRRDRVKLWADTFGGDLYNTVTKYSGSLLLQKKYKDVESSLKIEEVDGLELVRKFSEDMENMLRRKVEAVQNLVEAAEEADLNHEFNESLVFDYYNSVLINERDEKGNFVELGAEFLLESNAHFSNLPVNTSISSVQLPTNVYNKDPDILNGVYMSEALNAVFVENFQRDPTLTWQYFGSATGFFRIYPGIKWTPDENGVITFDCRNRGWYIQAATSPKDIVILVDVSGSMKGLRMTIAKHTITTILDTLGENDFINIIAYNDYVHYIEPCFKGILVQADRDNREHFKLLVEELMVKGVGVVDQALREAFQILKQFQEAKQGSLCNQAIMLISDGAVEDYEPVFEKYNWPDCKVRVFTYLIGREVSFADRMKWIACNNKGYYTQISTLADTQENVMEYLHVLSRPMVINHDHDIIWTEAYMDSKLLSSQAQSLTLLTTVAMPVFSKKNETRSHGILLGVVGSDVALRELMKLAPRYKLGVHGYAFLNTNNGYILSHPDLRPLYREGKKLKPKPNYNSVDLSEVEWEDQAESLRTAMINRETGTLSMDVKVPMDKGKRVLFLTNDYFFTDISDTPFSLGVVLSRGHGEYILLGNTSVEEGLHDLLHPDLALAGDWIYCITDIDPDHRKLSQLEAMIRFLTRKDPDLECDEELVREVLFDAVVTAPMEAYWTALALNMSEESEHVVDMAFLGTRAGLLRSSLFVGSEKVSDRKFLTPEDEASVFTLDRFPLWYRQASEHPAGSFVFNLRWAEGPESAGEPMVVTASTAVAVTVDKRTAIAAAAGVQMKLEFLQRKFWAATRQCSTVDGPCTQSCEDSDLDCFVIDNNGFILISKRSRETGRFLGEVDGAVLTQLLSMGVFSQVTMYDYQAMCKPSSHHHSAAQPLVSPISAFLTATRWLLQELVLFLLEWSVWGSWYDRGAEAKSVFHHSHKHKKQDPLQPCDTEYPVFVYQPAIREANGIVECGPCQKVFVVQQIPNSNLLLLVTDPTCDCSIFPPVLQEATEVKYNASVKCDRMRSQKLRRRPDSCHAFHPEVRVEADRGWAGFSSPNPLCLGLCPCRQEHIGMPMNTPVPVLLGGNIRVYAL

SEQ ID NO: 1972 - protein, 56 aa, Homo sapiens
MKLEFLQRKFWAATRQCSTVDGPCTQSCEDSDLDCFVIDNNGFILISKRSRESDYV

SEQ ID NO: 1973 - protein, 56 aa, Homo sapiens; identical to SEQ ID NO: 1972

SEQ ID NO: 1974 - protein, 282 aa, Homo sapiens
MKLEFLQRKFWAATRQCSTVDGPCTQSCEDSDLDCFVIDNNGFILISKRSRETGRFLGEVDGAVLTQLLSMGVFSQVTMYDYQAMCKPSSHHHSAAQPLVSPISAFLTATRWLLQELVLFLLEWSVWGSWYDRGAEAKSVFHHSHKHKKQDPLQPCDTEYPVFVYQPAIREANGIVECGPCQKVFVVQQIPNSNLLLLVTDPTCDCSIFPPVLQEATEVKYNASVKCDRMRSQKLRRRPDSCHAFHPEENAQDCGGASDTSASPPLLLLPVCAWGLLPQLLR

SEQ ID NO: 1975 - protein, 41 aa, Homo sapiens
MKLEFLQRKFWAATRQDLDCFVIDNNGFILISKRSRESDYV

SEQ ID NO: 1976 - protein, 267 aa, Homo sapiens
MKLEFLQRKFWAATRQDLDCFVIDNNGFILISKRSRETGRFLGEVDGAVLTQLLSMGVFSQVTMYDYQAMCKPSSHHHSAAQPLVSPISAFLTATRWLLQELVLFLLEWSVWGSWYDRGAEAKSVFHHSHKHKKQDPLQPCDTEYPVFVYQPAIREANGIVECGPCQKVFVVQQIPNSNLLLLVTDPTCDCSIFPPVLQEATEVKYNASVKCDRMRSQKLRRRPDSCHAFHPEENAQDCGGASDTSASPPLLLLPVCAWGLLPQLLR

SEQ ID NO: 1977 - protein, 1137 aa, Homo sapiens
MVCGCSALLPLPNPRPTMPATPNFLANPSSSSRWIPLQPMPVAWAFVQKTSALLWLLLLGTSLSPAWGQAKIPLETVKLWADTFGGDLYNTVTKYSGSLLLQKKYKDVESSLKIEEVDGLELVRKFSEDMENMLRRKVEAVQNLVEAAEEADLNHEFNESLVFDYYNSVLINERDEKGNFVELGAEFLLESNAHFSNLPVNTSISSVQLPTNVYNKDPDILNGVYMSEALNAVFVENFQRDPTLTWQYFGSATGFFRIYPGIKWTPDENGVITFDCRNRGWYIQAATSPKDIVILVDVSGSMKGLRMTIAKHTITTILDTLGENDFINIIAYNDYVHYIEPCFKGILVQADRDNREHFKLLVEELMVKGVGVVDQALREAFQILKQFQEAKQGSLCNQAIMLISDGAVEDYEPVFEKYNWPDCKVRVFTYLIGREVSFADRMKWIACNNKGYYTQISTLADTQENVMEYLHVLSRPMVINHDHDIIWTEAYMDSKLLSSQAQSLTLLTTVAMPVFSKKNETRSHGILLGVVGSDVALRELMKLAPRYKLGVHGYAFLNTNNGYILSHPDLRPLYREGKKLKPKPNYNSVDLSEVEWEDQAESLRTAMINRETGTLSMDVKVPMDKGKRVLFLTNDYFFTDISDTPFSLGVVLSRGHGEYILLGNTSVEEGLHDLLHPDLALAGDWIYCITDIDPDHRKLSQLEAMIRFLTRKDPDLECDEELVREVLFDAVVTAPMEAYWTALALNMSEESEHVVDMAFLGTRAGLLRSSLFVGSEKVSDRKFLTPEDEASVFTLDRFPLWYRQASEHPAGSFVFNLRWAEGPESAGEPMVVTASTAVAVTVDKRTAIAAAAGVQMKLEFLQRKFWAATRQCSTVDGPCTQSCEDSDLDCFVIDNNGFILISKRSRETGRFLGEVDGAVLTQLLSMGVFSQVTMYDYQAMCKPSSHHHSAAQPLVSPISAFLTATRWLLQELVLFLLEWSVWGSWYDRGAEAKSVFHHSHKHKKQDPLQPCDTEYPVFVYQPAIREANGIVECGPCQKVFVVQQIPNSNLLLLVTDPTCDCSIFPPVLQEATEVKYNASVKCDRMRSQKLRRRPDSCHAFHPEENAQDCGGASDTSASPPLLLLPVCAWGLLPQLLR

SEQ ID NO: 1978 - protein, 601 aa, Homo sapiens
MVCGCSALLPLPNPRPTMPATPNFLANPSSSSRWIPLQPMPVAWAFVQKTSALLWLLLLGTSLSPAWGQAKIPLETVKLWADTFGGDLYNTVTKYSGSLLLQKKYKDVESSLKIEEVDGLELVRKFSEDMENMLRRKVEAVQNLVEAAEEADLNHEFNESLVFDYYNSVLINERDEKGNFVELGAEFLLESNAHFSNLPVNTSISSVQLPTNVYNKDPDILNGVYMSEALNAVFVENFQRDPTLTWQYFGSATGFFRIYPGIKWTPDENGVITFDCRNRGWYIQAATSPKDIVILVDVSGSMKGLRMTIAKHTITTILDTLGENDFINIIAYNDYVHYIEPCFKGILVQADRDNREHFKLLVEELMVKGVGVVDQALREAFQILKQFQEAKQGSLCNQAIMLISDGAVEDYEPVFEKYNWPDCKVRVFTYLIGREVSFADRMKWIACNNKGYYTQISTLADTQENVMEYLHVLSRPMVINHDHDIIWTEAYMDSKLLSSQAQSLTLLTTVAMPVFSKKNETRSHGILLGVVGSDVALRELMKLAPRYKMPSTNSRPNAPPPWTLAAWSARIRLSEHQQWLHPLPSRPPAPVQRGEETKTQT

SEQ ID NO: 1979 - protein, 1154 aa, Homo sapiens
MVCGCSALLPLPNPRPTMPATPNFLANPSSSSRWIPLQPMPVAWAFVQKTSALLWLLLLGTSLSPAWGQAKIPLETVKLWADTFGGDLYNTVTKYSGSLLLQKKYKDVESSLKIEEVDGLELVRKFSEDMENMLRRKVEAVQNLVEAAEEADLNHEFNESLVFDYYNSVLINERDEKGNFVELGAEFLLESNAHFSNLPVNTSISSVQLPTNVYNKDPDILNGVYMSEALNAVFVENFQRDPTLTWQYFGSATGFFRIYPGIKWTPDENGVITFDCRNRGWYIQAATSPKDIVILVDVSGSMKGLRMTIAKHTITTILDTLGENDFINIIAYNDYVHYIEPCFKGILVQADRDNREHFKLLVEELMVKGVGVVDQALREAFQILKQFQEAKQGSLCNQAIMLISDGAVEDYEPVFEKYNWPDCKVRVFTYLIGREVSFADRMKWIACNNKGYYTQISTLADTQENVMEYLHVLSRPMVINHDHDIIWTEAYMDSKLLSSQAQSLTLLTTVAMPVFSKKNETRSHGILLGVVGSDVALRELMKLAPRYKLGVHGYAFLNTNNGYILSHPDLRPLYREGKKLKPKPNYNSVDLSEVEWEDQAESLRTAMINRETGTLSMDVKVPMDKGKRVLFLTNDYFFTDISDTPFSLGVVLSRGHGEYILLGNTSVEEGLHDLLHPDLALAGDWIYCITDIDPDHRKLSQLEAMIRFLTRKDPDLECDEELVREVLFDAVVTAPMEAYWTALALNMSEESEHVVDMAFLGTRAGLLRSSLFVGSEKVSDRKFLTPEDEASVFTLDRFPLWYRQASEHPAGSFVFNLRWAEGPESAGEPMVVTASTAVAVTVDKRTAIAAAAGVQMKLEFLQRKFWAATRQCSTVDGPCTQSCEDSDLDCFVIDNNGFILISKRSRETGRFLGEVDGAVLTQLLSMGVFSQVTMYDYQAMCKPSSHHHSAAQPLVSPISAFLTATRWLLQELVLFLLEWSVWGSWYDRGAEAKSVFHHSHKHKKQDPLQPCDTEYPVFVYQPAIREANGIVECGPCQKVFVVQQIPNSNLLLLVTDPTCDCSIFPPVLQEATEVKYNASVKCDRMRSQKLRRRPDSCHAFHPEVRVEADRGWAGFSSPNPLCLGLCPCRQEHIGMPMNTPVPVLLGGNIRVYAL

SEQ ID NO: 1980 - protein, 780 aa, Homo sapiens
MVCGCSALLPLPNPRPTMPATPNFLANPSSSSRWIPLQPMPVAWAFVQKTSALLWLLLLGTSLSPAWGQAKIPLETVKLWADTFGGDLYNTVTKYSGSLLLQKKYKDVESSLKIEEVDGLELVRKFSEDMENMLRRKVEAVQNLVEAAEEADLNHEFNESLVFDYYNSVLINERDEKGNFVELGAEFLLESNAHFSNLPVNTSISSVQLPTNVYNKDPDILNGVYMSEALNAVFVENFQRDPTLTWQYFGSATGFFRIYPGILVQADRDNREHFKLLVEELMVKGVGVVDQALREAFQILKQFQEAKQGSLCNQAIMLISDGAVEDYEPVFEKYNWPDCKISTLADTQENVMEYLHVLSRPMVINHDHDIIWTEAYMDSKLLSSQAQSLTLLTTVAMPVFSKKNETRSHGILLGVVGSDVALRELMKLAPRYKLGVHGYAFLNTNNGYILSHPDLRPLYREGKKLKPKPNYNSVDLSEVEWEDQAESKRVLFLTNDYFFTDISDTPFSLGVVLSRGHGEYILLGNTSVEEGLHDLLHPDLALAGDWIYCITDIDPDHRKLSQLEAMIRFLTRKDPDLECDEELVREVLFDAVVTAPMEAYWTALALNMSEESEHVVDMAFLGTRAGLLRSSLFVGSEKVSDRKFLTPEDEASVFTLDRFPLWYRQASEHPAGSFVFNLRWAEGPESAGEPMVVTASTAVAVTVDKRTAIAAAAGVQMKLEFLQRKFWAATRQCSTVDGPCTQSCEDSDLDCFVIDNNGFILISKRSREPGIKLRKKPIQT

SEQ ID NO: 1981 - protein, 1112 aa, Homo sapiens
MVCGCSALLPLPNPRPTMPATPNFLANPSSSSRWIPLQPMPVAWAFVQKTSALLWLLLLGTSLSPAWGQAKIPLETVKLWADTFGGDLYNTVTKYSGSLLLQKKYKDVESSLKIEEVDGLELVRKFSEDMENMLRRKVEAVQNLVEAAEEADLNHEFNESLVFDYYNSVLINERDEKGNFVELGAEFLLESNAHFSNLPVNTSISSVQLPTNVYNKDPDILNGVYMSEALNAVFVENFQRDPTLTWQYFGSATGFFRIYPGIKWTPDENGVITFDCRNRGWYIQAATSPKDIVILVDVSGSMKGLRMTIAKHTITTILDTLGENDFINIIAYNDYVHYIEPCFKGILVQADRDNREHFKLLVEELMVKGVGVVDQALREAFQILKQFQEAKQGSLCNQAIMLISDGAVEDYEPVFEKYNWPDCKVRVFTYLIGREVSFADRMKWIACNNKGYYTQISTLADTQENVMEYLHVLSRPMVINHDHDIIWTEAYMDSKLLSSQAQSLTLLTTVAMPVFSKKNETRSHGILLGVVGSDVALRELMKLAPRYKYREGKKLKPKPNYNSVDLSEVEWEDQAESLRTAMINRETGTLSMDVKVPMDKGKRVLFLTNDYFFTDISDTPFSLGVVLSRGHGEYILLGNTSVEEGLHDLLHPDLALAGDWIYCITDIDPDHRKLSQLEAMIRFLTRKDPDLECDEELVREVLFDAVVTAPMEAYWTALALNMSEESEHVVDMAFLGTRAGLLRSSLFVGSEKVSDRKFLTPEDEASVFTLDRFPLWYRQASEHPAGSFVFNLRWAEGPESAGEPMVVTASTAVAVTVDKRTAIAAAAGVQMKLEFLQRKFWAATRQCSTVDGPCTQSCEDSDLDCFVIDNNGFILISKRSRETGRFLGEVDGAVLTQLLSMGVFSQVTMYDYQAMCKPSSHHHSAAQPLVSPISAFLTATRWLLQELVLFLLEWSVWGSWYDRGAEAKSVFHHSHKHKKQDPLQPCDTEYPVFVYQPAIREANGIVECGPCQKVFVVQQIPNSNLLLLVTDPTCDCSIFPPVLQEATEVKYNASVKCDRMRSQKLRRRPDSCHAFHPEENAQDCGGASDTSASPPLLLLPVCAWGLLPQLLR

SEQ ID NO: 1982 - protein, 192 aa, Homo sapiens
  VARIANT 1: note = misc_feature - Xaa can be any naturally occurring amino acid
XELVREVLFDAVVTAPMEAYWTALALNMSEESEHVVDMAFLGTRAGLLRSSLFVGSEKVSDRKFLTPEDEASVFTLDRFPLWYRQASEHPAGSFVFNLRWAEGPESAGEPMVVTASTAVAVTVDKRTAIAAAAGVQMKLEFLQRKFWAATRQCSTVDGPCTQSCEDSDLDCFVIDNNGFILISKRSRESDYV

SEQ ID NO: 1983 - protein, 284 aa, Homo sapiens
  VARIANT 1: note = misc_feature - Xaa can be any naturally occurring amino acid
XGVQMKLEFLQRKFWAATRQCSTVDGPCTQSCEDSDLDCFVIDNNGFILISKRSRETGRFLGEVDGAVLTQLLSMGVFSQVTMYDYQAMCKPSSHHHSAAQPLPISAFLTATRWLLQELVLFLLEWSVWGSWYDRGAEAKSVFHHSHKHKKQDPLQPCDTEYPVFVYQPAIREANGIVECGPCQKVFVVQQIPNSNLLLLVTDPTCDCSIFPPVLQEATEVKYNASVKCDRMRSQKLRRRPDSCHAFHPEENAQDCGGASDTSASPPLLLLPVCAWGLLPQLLR

SEQ ID NO: 1984 - protein, 234 aa, Homo sapiens
MGAPAASLLLLLLLFACCWAPGGANLSQDDSQPWTSDETVVAGGTVVLKCQVKDHEDSSLQWSNPAQQTLYFGEKRALRDNRIQLVTSTPHELSISISNVALADEGEYTCSIFTMPVRTAKSLVTVLGIPQKPIITGYKSSLREKDTATLNCQSSGSKPAARLTWRKGDQELHGEPTRIQEDPNDTPTAMIRPDPPHPREGQKLLLHCEGRGNPVPQQYLWEKEGSVPPLKMTQ

SEQ ID NO: 1985 - protein, 398 aa, Homo sapiens
MGAPAASLLLLLLLFACCWAPGGANLSQDDSQPWTSDETVVAGGTVVLKCQVKDHEDSSLQWSNPAQQTLYFGEKRALRDNRIQLVTSTPHELSISISNVALADEGEYTCSIFTMPVRTAKSLVTVLGIPQKPIITGYKSSLREKDTATLNCQSSGSKPAARLTWRKGDQELHGEPTRIQEDPNGKTFTVSSSVTFQVTREDDGASIVCSVNHESLKGADRSTSQRIEVLYTPTAMIRPDPPHPREGQKLLLHCEGRGNPVPQQYLWEKEGSVPPLKMTQESALIFPFLNKSDSGTYGCTATSNMGSYKAYYTLNVNDPSPVPSSSSTYHAIIGGIVAFIVFLLLIMLIFLGHYLIRHKGTYLTHEAKGSDDAPDADTAIINAEGGQSGGDDKKEYFI

SEQ ID NO: 1986 - protein, 432 aa, Homo sapiens
MGAPAASLLLLLLLFACCWAPGGANLSQDGYWQEQDLELGTLAPLDEAISSTVWSSPDMLASQDSQPWTSDETVVAGGTVVLKCQVKDHEDSSLQWSNPAQQTLYFGEKRALRDNRIQLVTSTPHELSISISNVALADEGEYTCSIFTMPVRTAKSLVTVLGIPQKPIITGYKSSLREKDTATLNCQSSGSKPAARLTWRKGDQELHGEPTRIQEDPNGKTFTVSSSVTFQVTREDDGASIVCSVNHESLKGADRSTSQRIEVLYTPTAMIRPDPPHPREGQKLLLHCEGRGNPVPQQYLWEKEGSVPPLKMTQESALIFPFLNKSDSGTYGCTATSNMGSYKAYYTLNVNDPSPVPSSSSTYHAIIGGIVAFIVFLLLIMLIFLGHYLIRHKGTYLTHEAKGSDDAPDADTAIINAEGGQSGGDDKKEYFI

SEQ ID NO: 1987 - protein, 128 aa, Homo sapiens
MGFQKFSPFLALSILVLLQAGSLHAAPFRSALESSPADPATLSEDEARLLLAALVQDYVQMKASELEQEQEREGSRIIAQKRACDTATCVTHRLAGLLSRSGGVVKNNFVPTNVGSKAFGRRRRDLQA

SEQ ID NO: 1988 - protein, 128 aa, Homo sapiens; identical to SEQ ID NO: 1987

SEQ ID NO: 1989 - protein, 141 aa, Homo sapiens
MGFQKFSPFLALSILVLLQAGSLHAAPFRSALESSPADPATLSEDEARLLLAALVQDYVQMKASELEQEQEREGSSLDSPRSKRCGNLSTCMLGTYTQDFNKFHTFPQTAIGVGAPGKKRDMSSDLERDHRPHNHCPEESL

SEQ ID NO: 1990 - protein, 141 aa, Homo sapiens
MGFQKFSPFLALSILVLLQAGSLHAAPFRSALESSPADPATLSEDEARLLLAALVQDYVQMKASELEQEQEREGSSLDSPRSKRCGNLSTCMLGTYTQDFNKFHTFPQTAIGVGAPGKKRDMSSDLERDHRPHVSMPQNAN

SEQ ID NO: 1991 - protein, 141 aa, Homo sapiens; identical to SEQ ID NO: 1990

SEQ ID NO: 1992 - protein, 127 aa, Homo sapiens
MGFRKFSPFLALSILVLYQAGSLQAAPFRSALESSPDPATLSKEDARLLLAALVQDYVQMKASELKQEQETQGSSSAAQKRACNTATCVTHRLAGLLSRSGGMVKSNFVPTNVGSKAFGRRRRDLQA

SEQ ID NO: 1993 - protein, 127 aa, Homo sapiens; identical to SEQ ID NO: 1992

SEQ ID NO: 1994 - protein, 138 aa, Homo sapiens
MKKEANLQRGGMGFRKFSPFLALSILVLYQAGSLQAAPFRSALESSPDPATLSKEDARLLLAALVQDYVQMKASELKQEQETQGSSSAAQKRACNTATCVTHRLAGLLSRSGGMVKSNFVPTNVGSKAFGRRRRDLQA

SEQ ID NO: 1995 - protein, 508 aa, Homo sapiens
MQFSGEKISGQRDLQKSKMRFTFTSRCLALFLLLNHPTPILPAFSNQTYPTIEPKPFLYVVGRKKMMDAQYKCYDRMQQLPAYQGEGPYCNRTWDGWLCWDDTPAGVLSYQFCPDYFPDFDPSEKVTKYCDEKGVWFKHPENNRTWSNYTMCNAFTPEKLKNAYVLYYLAIVGHSLSIFTLVISLGIFVFFRKLTTIFPLNWKYRKALSLGCQRVTLHKNMFLTYILNSMIIIIHLVEVVPNGELVRRDPVSCKILHFFHQYMMACNYFWMLCEGIYLHTLIVVAVFTEKQRLRWYYLLGWGFPLVPTTIHAITRAVYFNDNCWLSVETHLLYIIHGPVMAALVVNFFFLLNIVRVLVTKMRETHEAESHMYLKAVKATMILVPLLGIQFVVFPWRPSNKMLGKIYDYVMHSLIHFQGFFVATIYCFCNNEVQTTVKRQWAQFKIQWNQRWGRRPSNRSARAAAAAAEAGDIPIYICHQELRNEPANNQGEESAEIIPLNIIEQESSA

SEQ ID NO: 1996 - protein, 162 aa, Homo sapiens
MRFTFTSRCLALFLLLNHPTPILPAFSNQTYPTIEPKPFLYVVGRKKMMDAQYKCYDRMQQLPAYQGEGPYCNRTWDGWLCWDDTPAGVLSYQFCPDYFPDFDPSEKVTKYCDEKGVWFKHPENNRTWSNYTMCNAFTPEKLKNAYVLYYLAIVGHSCQFSP

SEQ ID NO: 1997 - protein, 290 aa, Homo sapiens
MRFTFTSRCLALFLLLNHPTPILPAFSNQTYPTIEPKPFLYVVGRKKMMDAQYKCYDRMQQLPAYQGEGPYCNRTWDGWLCWDDTPAGVLSYQFCPDYFPDFDPSEKVTKYCDEKGVWFKHPENNRTWSNYTMCNAFTPEKLKNAYVLYYLAIVGHSLSIFTLVISLGIFVFFRKLTTIFPLNWKYRKALSLGCQRVTLHKNMFLTYILNSMIIIIHLVEVVPNGELVRRDPVSCKILHFFHQYMMACNYFWMLCEGIYLHTLIVVAVFTEKQRLRWYYLLGWAPAFHRD

SEQ ID NO: 1998 - protein, 490 aa, Homo sapiens
MRFTFTSRCLALFLLLNHPTPILPAFSNQTYPTIEPKPFLYVVGRKKMMDAQYKCYDRMQQLPAYQGEGPYCNRTWDGWLCWDDTPAGVLSYQFCPDYFPDFDPSEKVTKYCDEKGVWFKHPENNRTWSNYTMCNAFTPEKLKNAYVLYYLAIVGHSLSIFTLVISLGIFVFFRKLTTIFPLNWKYRKALSLGCQRVTLHKNMFLTYILNSMIIIIHLVEVVPNGELVRRDPVSCKILHFFHQYMMACNYFWMLCEGIYLHTLIVVAVFTEKQRLRWYYLLGWGFPLVPTTIHAITRAVYFNDNCWLSVETHLLYIIHGPVMAALVVNFFFLLNIVRVLVTKMRETHEAESHMYLKAVKATMILVPLLGIQFVVFPWRPSNKMLGKIYDYVMHSLIHFQGFFVATIYCFCNNEVQTTVKRQWAQFKIQWNQRWGRRPSNRSARAAAAAAEAGDIPIYICHQELRNEPANNQGEESAEIIPLNIIEQESSA

SEQ ID NO: 1999 - protein, 474 aa, Homo sapiens
MRFTFTSRCLALFLLLNHPTPILPAFSNQTYPTIEPKPFLYVVGRKKMMDAQYKCYDRMQQLPAYQGEGPYCNRTWDGWLCWDDTPAGVLSYQFCPDYFPDFDPSEKVTKYCDEKGVWFKHPENNRTWSNYTMCNAFTPEKLKNAYVLYYLAIVGHSLSIFTLVISLGIFVFFRSLGCQRVTLHKNMFLTYILNSMIIIIHLVEVVPNGELVRRDPVSCKILHFFHQYMMACNYFWMLCEGIYLHTLIVVAVFTEKQRLRWYYLLGWGFPLVPTTIHAITRAVYFNDNCWLSVETHLLYIIHGPVMAALVVNFFFLLNIVRVLVTKMRETHEAESHMYLKAVKATMILVPLLGIQFVVFPWRPSNKMLGKIYDYVMHSLIHFQGFFVATIYCFCNNEVQTTVKRQWAQFKIQWNQRWGRRPSNRSARAAAAAAEAGDIPIYICHQELRNEPANNQGEESAEIIPLNIIEQESSA

SEQ ID NO: 2000 - protein, 474 aa, Homo sapiens; identical to SEQ ID NO: 1999

SEQ ID NO: 2001 - protein, 274 aa, Homo sapiens
MRFTFTSRCLALFLLLNHPTPILPAFSNQTYPTIEPKPFLYVVGRKKMMDAQYKCYDRMQQLPAYQGEGPYCNRTWDGWLCWDDTPAGVLSYQFCPDYFPDFDPSEKVTKYCDEKGVWFKHPENNRTWSNYTMCNAFTPEKLKNAYVLYYLAIVGHSLSIFTLVISLGIFVFFRSLGCQRVTLHKNMFLTYILNSMIIIIHLVEVVPNGELVRRDPVSCKILHFFHQYMMACNYFWMLCEGIYLHTLIVVAVFTEKQRLRWYYLLGWAPAFHRD

SEQ ID NO: 2002 - protein, 37 aa, Homo sapiens
MEKKCTLYFLVLLPFFMILVTAELEESPEDSIQLGVT

SEQ ID NO: 2003 - protein, 78 aa, Homo sapiens
MEKKCTLYFLVLLPFFMILVTAELEESPEDSIQLGVTRNKIMTAQYECYQKIMQDPIQQAEGVYCNRTWDGWLCWNDV

SEQ ID NO: 2004 - protein, 461 aa, Homo sapiens [sequence omitted]

SEQ ID NO: 2005 - protein, 461 aa, Homo sapiens [sequence omitted]

SEQ ID NO: 2006 - protein, 461 aa, Homo sapiens [sequence omitted]

SEQ ID NO: 2007 - protein, 170 aa, Homo sapiens
MAPRSAKETFRINPNVAANLSAPSDVILVRDEIALLHRYQSQMLGWILITLATIAALVSCCVAKCCSPLTSLQHCYWTSHLQNERELFEQAAEQHSRLLMMHRIKKLFGFIPGSEDVKHIRIPSCQDWKDISVPTLLCMGDDLQGHYSFLGNRVDEDNEEDRSRGIELKP

SEQ ID NO: 2008 - protein, 314 aa, Homo sapiens
MCPTLNNIVSSLQRNGIFINSLIAALTIGGQQLFSSSTFSCPCQVGKNFYYGSAFLVIPALILLVAGFALRSQMWTITGEYCCSCAPPYRRISPLECKLACLRFFSITGRAVIAPLTWLAVTLLTGTYYECAASEFASVDHYPMFDNVSASKREEILAGFPCCRSAPSDVILVRDEIALLHRYQSQMLGWILITLATIAALVSCCVAKCCSPLTSLQHCYWTSHLQNERELFEQAAEQHSRLLMMHRIKKLFGFIPGSEDVKHIRIPSCQDWKDISVPTLLCMGDDLQGHYSFLGNRVDEDNEEDRSRGIELKP

SEQ ID NO: 2009 - protein, 171 aa, Homo sapiens
MFDNVSASKREEILAGFPCCRSAPSDVILVRDEIALLHRYQSQMLGWILITLATIAALVSCCVAKCCSPLTSLQHCYWTSHLQNERELFEQAAEQHSRLLMMHRIKKLFGFIPGSEDVKHIRIPSCQDWKDISVPTLLCMGDDLQGHYSFLGNRVDEDNEEDRSRGIELKP

SEQ ID NO: 2010 - protein, 123 aa, Homo sapiens
MLGWILITLATIAALVSCCVAKCCSPLTSLQHCYWTSHLQNERELFEQAAEQHSRLLMMHRIKKLFGFIPGSEDVKHIRIPSCQDWKDISVPTLLCMGDDLQGHYSFLGNRVDEDNEEDRSRG

SEQ ID NO: 2011 - protein, 128 aa, Homo sapiens
MLGWILITLATIAALVSCCVAKCCSPLTSLQHCYWTSHLQNERELFEQAAEQHSRLLMMHRIKKLFGFIPGSEDVKHIRIPSCQDWKDISVPTLLCMGDDLQGHYSFLGNRVDEDNEEDRSRGIELKP

SEQ ID NO: 2012 - protein, 417 aa, Homo sapiens
MLLSVPLLLGLLGLAVAEPAVYFKEQFLDGDGWTSRWIESKHKSDFGKFVLSSGKFYGDEEKDKGLQTSQDARFYALSASFEPFSNKGQTLVVQFTVKHEQNIDCGGGYVKLFPNSLDQTDMHGDSEYNIMFGPDICGPGTKKVHVIFNYKGKNVLINKDIRCKDDEFTHLYTLIVRPDNTYEVKIDNSQVESGSLEDDWDFLPPKKIKDPDASKPEDWDERAKIDDPTDSKPEDWDKPEHIPDPDAKKPEDWDEEMDGEWEPPVIQNPEYKGEWKPRQIDNPDYKGTWIHPEIDNPEYSPDPSIYAYDNFGVLGLDLWQVKSGTIFDNFLITNDEAYAEEFGNETWGVTKAAEKQMKDKQDEEQRLKEEEEDKKRKEEEEAEDKEDDEDKDEDEEDEEDKEEDEEEDVPGQAKDEL

SEQ ID NO: 2013 - protein, 247 aa, Homo sapiens
MLLSVPLLLGLLGLAVAEPAVYFKEQFLDGDGWTSRWIESKHKSDFGKFVLSSGKFYGDEEKDKGPDICGPGTKKVHVIFNYKGKNVLINKDIRCKDDEFTHLYTLIVRPDNTYEVKIDNSQVESGSLEDDWDFLPPKKIKDPDASKPEDWDERAKIDDPTDSKPEDWDKPEHIPDPDAKKPEDWDEEMDGEWEPPVIQNPEYKGEWKPRQIDNPDYKGTWIHPEIDNPEYSPDPSIYAYDNFGVLG

SEQ ID NO: 2014 - protein, 163 aa, Homo sapiens
  VARIANT 1: note = misc_feature - Xaa can be any naturally occurring amino acid
XEDWDERAKIDDPTDSKPEDWDKPEHIPDPDAKKPEDWDEEMDGEWEPPVIQNPEYKGEWKPRQIDNPDYKGTWIHPEIDNPEYSPDPSIYAYDNFGVLGLDLWQVKSGTIFDNFLITNDEAYAEEFGNETWGVTKAAEKQMKDKQDEEQRPERSCRRAGRAK

SEQ ID NO: 2015 - protein, 13 aa, Homo sapiens
  VARIANT 1: note = misc_feature - Xaa can be any naturally occurring amino acid
XEEDVPGQAKDEL

SEQ ID NO: 2016 - protein, 384 aa, Homo sapiens
MARALVQLWAICMLRVALATVYFQEEFLDGEHWRNRWLQSTNDSRFGHFRLSSGKFYGHKEKDKGLQTTQNGRFYAISARFKPFSNKGKTLVIQYTVKHEQKMDCGGGYIKVFPADIDQKNLNGKSQYYIMFGPDICGFDIKKVHVILHFKNKYHENKKLIRCKVDGFTHLYTLILRPDLSYDVKIDGQSIESGSIEYDWNLTSLKKETSPAESKDWEQTKDNKAQDWEKHFLDASTSKQSDWNGDLDGDWPAPMLQKPPYQDGLKPEGIHKDVWLHRKMKNTDYLTQYDLSEFENIGAIGLELWQVRSGTIFDNFLITDDEEYADNFGKATWGETKGPEREMDAIQAKEEMKKAREEEEEELLSGKINRHEHYFNQFHRRNEL

SEQ ID NO: 2017 - protein, 142 aa, Homo sapiens
  VARIANT 1: note = misc_feature - Xaa can be any naturally occurring amino acid
XLVQLWAICMLRVALATVYFQEEFLDGEHWRNRWLQSTNDSRFGHFRLSSGKFYGHKEKDKGPDICGFDIKKVHVILHFKNKYHENKKLIRCKVDGFTHLYTLILRPDLSYDVKIDGQSIESGSIEYDWNLTSLKKETSPAE

SEQ ID NO: 2018 - protein, 315 aa, Homo sapiens
MDLRQFLMCLSLCTAFALSKPTEKKDRVHHEPQLSDKVHNDAQSFDYDHDAFLGAEEAKTFDQLTPEESKERLGKIVSKIDGDKDGFVTVDELKDWIKFAQKRWIYEDVERQWKGHDLNEDGLVSWEEYKNATYGYVLDDPDPDDGFNYKQMMVRDERRFKMADKDGDLIATKEEFTAFLHPEEYDYMKDIVVQETMEDIDKNADGFIDLEEYIGDMYSHDGNTDEPEWVKTEREQFVEFRDKNRDGKMDKEETKDWILPSDYDHAEAEARHLVYESDQNKDGKLTKEEIVDKYDLFVGSQATDFGEALVRHDEF

SEQ ID NO: 2019 - protein, 224 aa, Homo sapiens
MDLRQFLMCLSLCTAFALSKPTEKKDRVHHEPQLSDKVHNDAQSFDYDHDAFLGAEEAKTFDQLTPEESKERLGKIVSKIDGDKDGFVTVDELKDWIKFAQKRWIYEDVERQWKGHDLNEDGLVSWEEYKNATYGYVLDDPDPDDGFNYKQMMVRDERRFKMADKDGDLIATKEEFTAFLHPEEYDYMKDIVVQETMEDIDKNADGFIDLEEYIGWQAYQGGDR

SEQ ID NO: 2020 - protein, 315 aa, Homo sapiens
MDLRQFLMCLSLCTAFALSKPTEKKDRVHHEPQLSDKVHNDAQSFDYDHDAFLGAEEAKTFDQLTPEESKERLGMIVDKIDADKDGFVTEGELKSWIKHAQKKYIYDNVENQWQEFDMNQDGLISWDEYRNVTYGTYLDDPDPDDGFNYKQMMVRDERRFKMADKDGDLIATKEEFTAFLHPEEYDYMKDIVVQETMEDIDKNADGFIDLEEYIGDMYSHDGNTDEPEWVKTEREQFVEFRDKNRDGKMDKEETKDWILPSDYDHAEAEARHLVYESDQNKDGKLTKEEIVDKYDLFVGSQATDFGEALVRHDEF

SEQ ID NO: 2021 - protein, 323 aa, Homo sapiens
MKETDLIIMDLRQFLMCLSLCTAFALSKPTEKKDRVHHEPQLSDKVHNDAQSFDYDHDAFLGAEEAKTFDQLTPEESKERLGKIVSKIDGDKDGFVTVDELKDWIKFAQKRWIYEDVERQWKGHDLNEDGLVSWEEYKNATYGYVLDDPDPDDGFNYKQMMVRDERRFKMADKDGDLIATKEEFTAFLHPEEYDYMKDIVVQETMEDIDKNADGFIDLEEYIGDMYSHDGNTDEPEWVKTEREQFVEFRDKNRDGKMDKEETKDWILPSDYDHAEAEARHLVYESDQNKDGKLTKEEIVDKYDLFVGSQATDFGEALVRHDEF

SEQ ID NO: 2022 - protein, 323 aa, Homo sapiens
MKETDLIIMDLRQFLMCLSLCTAFALSKPTEKKDRVHHEPQLSDKVHNDAQSFDYDHDAFLGAEEAKTFDQLTPEESKERLGMIVDKIDADKDGFVTEGELKSWIKHAQKKYIYDNVENQWQEFDMNQDGLISWDEYRNVTYGTYLDDPDPDDGFNYKQMMVRDERRFKMADKDGDLIATKEEFTAFLHPEEYDYMKDIVVQETMEDIDKNADGFIDLEEYIGDMYSHDGNTDEPEWVKTEREQFVEFRDKNRDGKMDKEETKDWILPSDYDHAEAEARHLVYESDQNKDGKLTKEEIVDKYDLFVGSQATDFGEALVRHDEF

SEQ ID NO: 2023 - protein, 147 aa, Homo sapiens
  VARIANT 1: note = misc_feature - Xaa can be any naturally occurring amino acid
XIATKEEFTAFLHPEEYDYMKDIVVQETMEDIDKNADGFIDLEEYIGDMYSHDGNTDEPEWVKTEREQFVEFRDKNRDGKMDKEETKDWILPSDYDHAEAEARHLVYESDQNKDGKLTKEEIVDKYDLFVGSQATDFGEALVRHDEF

SEQ ID NO: 2024 - protein, 194 aa, Homo sapiens
ILLVGYPPFWDEDQHRLYQQIKAGAYDFPSPEWDTVTPEAKDLINKMLTINPAKRITASEALKHPWICQRSTVASMMHRQETVDCLKKFNARRKLKGAILTTMLATRNFSAKSLLKKPDGVKSTESSNTTIEDEDVKARKQEIIKVTEQLIEAINNGDFEAYTKICDPGLTAFEPEALGNLVEGMDFHRFYFEN

SEQ ID NO: 2025 - protein, 512 aa, Homo sapiens
MASTTTCTRFTDEYQLFEELGKGAFSVVRRCMKIPTGQEYAAKIINTKKLSARDHQKLEREARICRLLKHPNIVRLHDSISEEGFHYLVFDLVTGGELFEDIVAREYYSEADASHCIQQILEAVLHCHQMGVVHRDLKPENLLLASKSKGAAVKLADFGLAIEVQGDQQAWFGFAGTPGYLSPEVLRKDPYGKPVDMWACGVILYILLVGYPPFWDEDQHRLYQQIKAGAYDFPSPEWDTVTPEAKDLINKMLTINPAKRITASEALKHPWICQRSTVASMMHRQETVDCLKKFNARRKLKGAILTTMLATRNFSAAKSLLKKPDGVKINNKANVVTSPKENIPTPALEPQTTVIHNPDGNKESTESSNTTIEDEDVKARKQEIIKVTEQLIEAINNGDFEAYTKICDPGLTAFEPEALGNLVEGMDFHRFYFENALSKSNKPIHTIILNPHVHLVGDDAACIAYIRLTQYMDGSGMPKTMQSEETRVWHRRDGKWQNVHFHRSGSPTVPIK

SEQ ID NO: 2026 - protein, 533 aa, Homo sapiens
MASTTTCTRFTDEYQLFEELGKGAFSVVRRCMKIPTGQEYAAKIINTKKLSARDHQKLEREARICRLLKHPNIVRLHDSISEEGFHYLVFDLVTGGELFEDIVAREYYSEADASHCIQQILEAVLHCHQMGVVHRDLKPENLLLASKSKGAAVKLADFGLAIEVQGDQQAWFGFAGTPGYLSPEVLRKDPYGKPVDMWACGVILYILLVGYPPFWDEDQHRLYQQIKAGAYDFPSPEWDTVTPEAKDLINKMLTINPAKRITASEALKHPWICQRSTVASMMHRQETVDCLKKFNARRKLKGAILTTMLATRNFSAAKSLLKKPDGVKINNKANVVTSPKENIPTPALEPQTTVIHNPDGNKESTESSNTTIEDEDVKARKQEIIKVTEQLIEAINNGDFEAYTKICDPGLTAFEPEALGNLVEGMDFHRFYFENALSKSNKPIHTIILNPHVHLVGDDAACIAYIRLTQYMDGSGMPKTMQSEETRVWHRRDGKWQNVHFHRSGSPTVPIKPPCIPNGKENFSGGTSLWQNI

SEQ ID NO: 2027 - protein, 478 aa, Homo sapiens
MASTTTCTRFTDEYQLFEELGKGAFSVVRRCMKIPTGQEYAAKIINTKKLSARDHQKLEREARICRLLKHPNIVRLHDSISEEGFHYLVFDLVTGGELFEDIVAREYYSEADASHCIQQILESVNHCHLNGIVHRDLKPENLLLASKSKGAAVKLADFGLAIEVQGDQQAWFGFAGTPGYLSPEVLRKDPYGKPVDMWACGVILYILLVGYPPFWDEDQHRLYQQIKAGAYDFPSPEWDTVTPEAKDLINKMLTINPAKRITASEALKHPWICQRSTVASMMHRQETVDCLKKFNARRKLKGAILTTMLATRNFSAAKSLLKKPDGVKESTESSNTTIEDEDVKARKQEIIKVTEQLIEAINNGDFEAYTKICDPGLTAFEPEALGNLVEGMDFHRFYFENALSKSNKPIHTIILNPHVHLVGDDAACIAYIRLTQYMDGSGMPKTMQSEETRVWHRRDGKWQNVHFHRSGSPTVPIK

SEQ ID NO: 2028 - protein, 499 aa, Homo sapiens
MASTTTCTRFTDEYQLFEELGKGAFSVVRRCMKIPTGQEYAAKIINTKKLSARDHQKLEREARICRLLKHPNIVRLHDSISEEGFHYLVFDLVTGGELFEDIVAREYYSEADASHCIQQILESVNHCHLNGIVHRDLKPENLLLASKSKGAAVKLADFGLAIEVQGDQQAWFGFAGTPGYLSPEVLRKDPYGKPVDMWACGVILYILLVGYPPFWDEDQHRLYQQIKAGAYDFPSPEWDTVTPEAKDLINKMLTINPAKRITASEALKHPWICQRSTVASMMHRQETVDCLKKFNARRKLKGAILTTMLATRNFSAAKSLLKKPDGVKESTESSNTTIEDEDVKARKQEIIKVTEQLIEAINNGDFEAYTKICDPGLTAFEPEALGNLVEGMDFHRFYFENALSKSNKPIHTIILNPHVHLVGDDAACIAYIRLTQYMDGSGMPKTMQSEETRVWHRRDGKWQNVHFHRSGSPTVPIKPPCIPNGKENFSGGTSLWQNI

SEQ ID NO: 2029 - protein, 492 aa, Homo sapiens
MASTTTCTRFTDEYQLFEELGKGAFSVVRRCMKIPTGQEYAAKIINTKKLSARDHQKLEREARICRLLKHPNIVRLHDSISEEGFHYLVFDLVTGGELFEDIVAREYYSEADASHCIQQILESVNHCHLNGIVHRDLKPENLLLASKSKGAAVKLADFGLAIEVQGDQQAWFGFAGTPGYLSPEVLRKDPYGKPVDMWACGVILYILLVGYPPFWDEDQHRLYQQIKAGAYDFPSPEWDTVTPEAKDLINKMLTINPAKRITASEALKHPWICQRSTVASMMHRQETVDCLKKFNARRKLKGAILTTMLATRNFSAAKSLLKKPDGVKEPQTTVIHNPDGNKESTESSNTTIEDEDVKARKQEIIKVTEQLIEAINNGDFEAYTKICDPGLTAFEPEALGNLVEGMDFHRFYFENALSKSNKPIHTIILNPHVHLVGDDAACIAYIRLTQYMDGSGMPKTMQSEETRVWHRRDGKWQNVHFHRSGSPTVPIK

SEQ ID NO: 2030 - protein, 478 aa, Homo sapiens
MASTTTCTRFTDEYQLFEELGKGAFSVVRRCMKIPTGQEYAAKIINTKKLSARDHQKLEREARICRLLKHPNIVRLHDSISEEGFHYLVFDLVTGGELFEDIVAREYYSEADASHCIQQILESVNHCHLNGIVHRDLKPENLLLASKSKGAAVKLADFGLAIEVQGDQQAWFGFAGTPGYLSPEVLRKDPYGKPVDMWACGVILYILLVGYPPFWDEDQHRLYQQIKAGAYDFPSPEWDTVTPEAKDLINKMLTINPAKRITASEALKHPWICQRSTVASMMHRQETVDCLKKFNARRKLKGAILTTMLATRNFSAAKSLLKKPDGVKESTESSNTTIEDEDVKARKQEIIKVTEQLIEAINNGDFEAYTKICDPGLTAFEPEALGNLVEGMDFHRFYFENALSKSNKPIHTIILNPHVHLVGDDAACIAYIRLTQYMDGSGMPKTMQSEETRVWHRRDGKWQNVHFHRSGSPTVPIN

SEQ ID NO: 2031 - protein, 478 aa, Homo sapiens; identical to SEQ ID NO: 2027

SEQ ID NO: 2032 - protein, 510 aa, Homo sapiens
MASTTTCTRFTDEYQLFEELGKGAFSVVRRCMKIPTGQEYAAKIINTKKLSARDHQKLEREARICRLLKHPNIVRLHDSISEEGFHYLVFDLVTGGELFEDIVAREYYSEADASHCIQQILESVNHCHLNGIVHRDLKPENLLLASKSKGAAVKLADFGLAIEVQGDQQAWFGFAGTPGYLSPEVLRKDPYGKPVDMWACGVILYILLVGYPPFWDEDQHRLYQQIKAGAYDFPSPEWDTVTPEAKDLINKMLTINPAKRITASEALKHPWICQRSTVASMMHRQETVDCLKKFNARRKLKGAILTTMLATRNFSAAKSLLKKPDGVKKRKSSSSVQMMESTESSNTTIEDEDVKARKQEIIKVTEQLIEAINNGDFEAYTKICDPGLTAFEPEALGNLVEGMDFHRFYFENALSKSNKPIHTIILNPHVHLVGDDAACIAYIRLTQYMDGSGMPKTMQSEETRVWHRRDGKWQNVHFHRSGSPTVPIKPPCIPNGKENFSGGTSLWQNI

SEQ ID NO: 2033 - protein, 489 aa, Homo sapiens
MASTTTCTRFTDEYQLFEELGKGAFSVVRRCMKIPTGQEYAAKIINTKKLSARDHQKLEREARICRLLKHPNIVRLHDSISEEGFHYLVFDLVTGGELFEDIVAREYYSEADASHCIQQILESVNHCHLNGIVHRDLKPENLLLASKSKGAAVKLADFGLAIEVQGDQQAWFGFAGTPGYLSPEVLRKDPYGKPVDMWACGVILYILLVGYPPFWDEDQHRLYQQIKAGAYDFPSPEWDTVTPEAKDLINKMLTINPAKRITASEALKHPWICQRSTVASMMHRQETVDCLKKFNARRKLKGAILTTMLATRNFSAAKSLLKKPDGVKKRKSSSSVQMMESTESSNTTIEDEDVKARKQEIIKVTEQLIEAINNGDFEAYTKICDPGLTAFEPEALGNLVEGMDFHRFYFENALSKSNKPIHTIILNPHVHLVGDDAACIAYIRLTQYMDGSGMPKTMQSEETRVWHRRDGKWQNVHFHRSGSPTVPIK

SEQ ID NO: 2034 - protein, 498 aa, Homo sapiens
MASTTTCTRFTDEYQLFEELGKGAFSVVRRCMKIPTGQEYAAKIINTKKLSARDHQKLEREARICRLLKHPNIVRLHDSISEEGFHYLVFDLVTGGELFEDIVAREYYSEADASHCIQQILESVNHCHLNGIVHRDLKPENLLLASKSKGAAVKLADFGLAIEVQGDQQAWFGFAGTPGYLSPEVLRKDPYGKPVDMWACGVILYILLVGYPPFWDEDQHRLYQQIKAGAYDFPSPEWDTVTPEAKDLINKMLTINPAKRITASEALKHPWICQRSTVASMMHRQETVDCLKKFNARRKLKGAILTTMLATRNFSAKSLLKKPDGVKESTESSNTTIEDEDVKARKQEIIKVTEQLIEAINNGDFEAYTKICDPGLTAFEPEALGNLVEGMDFHRFYFENALSKSNKPIHTIILNPHVHLVGDDAACIAYIRLTQYMDGSGMPKTMQSEETRVWHRRDGKWQNVHFHRSGSPTVPIKPPCIPNGKENFSGGTSLWQNI

SEQ ID NO: 2035 - protein, 182 aa, Homo sapiens
  VARIANT 1: note = misc_feature - Xaa can be any naturally occurring amino acid
XRKLKGAILTTMLATRNFSAAKSLLKKPDGVKESTESSNTTIEDEDVKARKQEIIKVTEQLIEAINNGDFEAYTKICDPGLTAFEPEALGNLVEGMDFHRFYFENALSKSNKPIHTIILNPHVHLVGDDAACIAYIRLTQYMDGSGMPKTMQSEETRVWHRRDGKWQNVHFHRSGSPTVPIK

SEQ ID NO: 2036 - protein, 173 aa, Homo sapiens
MGTMKTQRDGHSLGRWSLVLLLLGLVMPLAIIAQVLSYKEAVLRAIDGINQRSSDANLYRLLDLDPRPTMDGDPDTPKPVSFTVKETVCPRTTQQSPEDCDFKKDGLVKRCMGTVTLNQARGSFDISCDKDNKRFALLGDFFRKSKEKIGKEFKRIVQRIKDFLRNLVPRTES

SEQ ID NO: 2037 - protein, 32 aa, Homo sapiens
MEGKWLLCMLLVLGTAIVEAHDGHDDDVIDIE

SEQ ID NO: 2038 - protein, 61 aa, Homo sapiens
MEGKWLLCMLLVLGTAIVEAHDGHDDDVIDIEDDLDDVIEEVEDSKPDTTAPPSSPKESGR

SEQ ID NO: 2039 - protein, 79 aa, Homo sapiens
MEGKWLLCMLLVLGTAIVEAHDGHDDDVIDIEDDLDDVIEEVEDSKPDTTAPPSSPKVTYKAPVPTGEVYFADSFDRGT

SEQ ID NO: 2040 - protein, 96 aa, Homo sapiens
MEGKWLLCMLLVLGTAIVEAHDGHDDDVIDIEDDLDDVIEEVEDSKPDTTAPPSSPKVTYKAPVPTGEVYFADSFDRGTLSGKVGGRGNEGVKASR

SEQ ID NO: 2041 - protein, 107 aa, Homo sapiens
MEGKWLLCMLLVLGTAIVEAHDGHDDDVIDIEDDLDDVIEEVEDSKPDTTAPPSSPKVTYKAPVPTGEVYFADSFDRGTLSGWILSKAKKDDTDDEIAKYDGKWEVE

SEQ ID NO: 2042 - protein, 134 aa, Homo sapiens
MEGKWLLCMLLVLGTAIVEAHDGHDDDVIDIEDDLDDVIEEVEDSKPDTTAPPSSPKVTYKAPVPTGEVYFADSFDRGTLSGWILSKAKKDDTDDEIAKYDGKWEVEEMKESKLPGDKGLVLMSRAKHHAISAK

SEQ ID NO: 2043 - protein, 144 aa, Homo sapiens
MEGKWLLCMLLVLGTAIVEAHDGHDDDVIDIEDDLDDVIEEVEDSKPDTTAPPSSPKVTYKAPVPTGEVYFADSFDRGTLSGWILSKAKKDDTDDEIAKYDGKWEVEEMKESKLPGDKGLVLMSRAKHHAISAKLNKPFLFDTK

SEQ ID NO: 2044 - protein, 168 aa, Homo sapiens
MEGKWLLCMLLVLGTAIVEAHDGHDDDVIDIEDDLDDVIEEVEDSKPDTTAPPSSPKVTYKAPVPTGEVYFADSFDRGTLSGWILSKAKKDDTDDEIAKYDGKWEVEEMKESKLPGDKGLVLMSRAKHHAISAKLNKPFLFDTKPLIVQYEVNFQNGIECGGAYVKLL

SEQ ID NO: 2045 - protein, 592 aa, Homo sapiens
MEGKWLLCMLLVLGTAIVEAHDGHDDDVIDIEDDLDDVIEEVEDSKPDTTAPPSSPKVTYKAPVPTGEVYFADSFDRGTLSGWILSKAKKDDTDDEIAKYDGKWEVEEMKESKLPGDKGLVLMSRAKHHAISAKLNKPFLFDTKPLIVQYEVNFQNGIECGGAYVKLLSKTPELNLDQFHDKTPYTIMFGPDKCGEDYKLHFIFRHKNPKTGIYEEKHAKRPDADLKTYFTDKKTHLYTLILNPDNSFEILVDQSVVNSGNLLNDMTPPVNPSREIEDPEDRKPEDWDERPKIPDPEAVKPDDWDEDAPAKIPDEEATKPEGWLDDEPEYVPDPDAEKPEDWDEDMDGEWEAPQIANPRCESAPGCGVWQRPVIDNPNYKGKWKPPMIDNPSYQGIWKPRKIPNPDFFEDLEPFRMTPFSAIGLELWSMTSDIFFDNFIICADRRIVDDWANDGWGLKKAADGAAEPGVVGQMIEAAEERPWLWVVYILTVALPVFLVILFCCSGKKQTSGMEYKKTDAPQPDVKEEEEEKEEEKDKGDEEEEGEEKLEEKQKSDAEEDGGTVSQEEEDRKPKAEEDEILNRSPRNRKPRRE

SEQ ID NO: 2046 - protein, 592 aa, Homo sapiens; identical to SEQ ID NO: 2045

SEQ ID NO: 2047 - protein, 592 aa, Homo sapiens; identical to SEQ ID NO: 2045

SEQ ID NO: 2048 - protein, 308 aa, Homo sapiens
MEGKWLLCMLLVLGTAIVEAHDGHDDDVIDIEDDLDDVIEEVEEMKESKLPGDKGLVLMSRAKHHAISAKLNKPFLFDTKPLIVQYEVNFQNGIECGGAYVKLLSKTPELNLDQFHDKTPYTIMFGPDKCGEDYKLHFIFRHKNPKTGIYEEKHAKRPDADLKTYFTDKKTHLYTLILNPDNSFEILVDQSVVNSGNLLNDMTPPVNPSREIEDPEDRKPEDWDERPKIPDPEAVKPDDWDEDAPAKIPDEEATKPEGWLDDEPEYVPDPDAEKPEDWDEDMDGEWEAPQIANPRCESAPGCGVWQRP

SEQ ID NO: 2049 - protein, 131 aa, Homo sapiens
MKESKLPGDKGLVLMSRAKHHAISAKLNKPFLFDTKPLIVQYEVNFQNGIECGGAYVKLLSKTPELNLDQFHDKTPYTIMFGPDKCGEDYKLHFIFRHKNPKTGIYEEKHAKRPDADLKTYFTDKKTHLYT

SEQ ID NO: 2050 - protein, 190 aa, Homo sapiens
  VARIANT 1: note = misc_feature - Xaa can be any naturally occurring amino acid
XGLVLMSRAKHHAISAKLNKPFLFDTKPLIVQYEVNFQNGIECGGAYVKLLSKTPELNLDQFHDKTPYTIMFGPDKCGEDYKLHFIFRHKNPKTGIYEEKHAKRPDADLKTYFTDKKTHLYTLKSRGTNHLCFVHKEMGVSFPKTPGARHCSYPKASVLNPDNSFEILVDQSVVNSGNLLNDMTPPVNPS

SEQ ID NO: 2051 - protein, 170 aa, Homo sapiens
  VARIANT 1: note = misc_feature - Xaa can be any naturally occurring amino acid
XLYCGAGQGVRAGRGTGTPAVPGRLEVTYKAPVPTGEVYFADSFDRGTLSGWILSKAKKDDTDDEIAKYDGKWEVEEMKESKLPGDKGLVLMSRAKHHAISAKLNKPFLFDTKPLIVQYEVNFQNGIECGGAYVKLLSKTPELNLDQFHDKTPYTIMFGPDKCGEDYKLH

SEQ ID NO: 2052 - protein, 111 aa, Homo sapiens
AEQQALRLEVRAGPDSAGIALYSHEDVCVFKCSVSRETECSRVGKQSFIITLGCNSVLIQFATPNDFCSFYNILKTCRGHTLERSVFSERTEESSAVQYFQMRKLRLREVK

SEQ ID NO: 2053 - protein, 92 aa, Homo sapiens
ALYSHEDVCVFKCSVSRETECSRVGKQSFIITLGCNSVLIQFATPNDFCSFYNILKTCRGHTLERSVFSERTEESSAVQYFQMRKLRLREVK

SEQ ID NO: 2054 - protein, 176 aa, Homo sapiens
LAFWFDVAFIGSIQSYDISIVAQVDQTGSKSSNLLDLKNPFFRYTGTTPSPPPGSHYTSPSENMWNTGSTYNLSSGMAVAGMPTAYDLSSVIASGSSVGHNNLIPLANTGIVNHTHSRMGSIMSTGIVQGSSGAQGSGGGSTSAHYAVNSQFTMGGPAISMASPMSIPTNTMHYGS

SEQ ID NO: 2055 - protein, 608 aa, Homo sapiens
MAAAAAAVGPGAGGAGSAVPGGAGPCATVSVFPGARLLTIGDANGEIQRHAEQQALRLEVRAGPDSAGIALYSHEDVCVFKCSVSRETECSRVGKQSFIITLGCNSVLIQFATPNDFCSFYNILKTCRGHTLERSVFSERTEESSAVQYFQFYGYLSQQQNMMQDYVRTGTYQRAILQNHTDFKDKIVLDVGCGSGILSFFAAQAGARKIYAVEASTMAQHAEVLVKSNNLTDRIVVIPGKVEEVSLPEQVDIIISEPMGYMLFNERMLESYLHAKKYLKPSGNMFPTIGDVHLAPFTDEQLYMEQFTKANFWYQPSFHGVDLSALRGAAVDEYFRQPVVDTFDIRILMAKSVKYTVNFLEAKEGDLHRIEIPFKFHMLHSGLVHGLAFWFDVAFIGSIMTVWLSTAPTEPLTHWYQVRCLFQSPLFAKAGDTLSGTCLLIANKRQSYDISIVAQVDQTGSKSSNLLDLKNPFFRYTGTTPSPPPGSHYTSPSENMWNTGSTYNLSSGMAVAGMPTAYDLSSVIASGSSVGHNNLIPLANTGIVNHTHSRMGSIMSTGIVQGSSGAQGSGGGSTSAHYAVNSQFTMGGPAISMASPMSIPTNTMHYGS

SEQ ID NO: 2056 - protein, 585 aa, Homo sapiens
MAAAAAAVGPGAGGAGSAVPGGAGPCATVSVFPGARLLTIGDANGEIQRHAEQQALRLEVRAGPDSAGIALYSHEDVCVFKCSVSRETECSRVGKQSFIITLGCNSVLIQFATPNDFCSFYNILKTCRGHTLERSVFSERTEESSAVQYFQFYGYLSQQQNMMQDYVRTGTYQRAILQNHTDFKDKIVLDVGCGSGILSFFAAQAGARKIYAVEASTMAQHAEVLVKSNNLTDRIVVIPGKVEEVSLPEQVDIIISEPMGYMLFNERMLESYLHAKKYLKPSGNMFPTIGDVHLAPFTDEQLYMEQFTKANFWYQPSFHGVDLSALRGAAVDEYFRQPVVDTFDIRILMAKSVKYTVNFLEAKEGDLHRIEIPFKFHMLHSGLVHGLAFWFDVAFIGSIMTVWLSTAPTEPLTHWYQVRCLFQSPLFAKAGDTLSGTCLLIANKRQSYDISIVAQVDQTGSKSSNLLDLKNPFFRYTGTTPSPPPGSHYTSPSENMWNTGSTYNLSSGMAVAGMPTAYDLSSVIASGSSVGHNNLIPLGSSGAQGSGGGSTSAHYAVNSQFTMGGPAISMASPMSIPTNTMHYGS

SEQ ID NO: 2057 - protein, 161 aa, Homo sapiens
MAAAAAAVGPGAGGAGSAVPGGAGPCATVSVFPGARLLTIGDANGEIQRHAEQQALRLEVRAGPDSAGIALYSHEDVCVFKCSVSRETECSRVGKQSFIITLGCNSVLIQFATPNDFCSFYNILKTCRGHTLERSVFSERTEESSAVQYFQMRKLRLREVK

SEQ ID NO: 2058 - protein, 120 aa, Homo sapiens
MAAAAAAVGPGAGGAGSAVPGGAGPCATVSVFPGARLLTIGDANGEIQRHAEQQALRLEVRAGPDSAGIALYSHFCSFYNILKTCRGHTLERSVFSERTEESSAVQYFQFYGYLSQQQNM

SEQ ID NO: 2059 - protein, 343 aa, Homo sapiens
  VARIANT 1: note = misc_feature - Xaa can be any naturally occurring amino acid
XANGEIQRHAEQQALRLEVRAGPDSAGIALYSHEDVCVFKCSVSRETECSRVGKQSFIITLGCNSVLIQFATPNDFCSFYNILKTCRGHTLERSVFSERTEESSAVQYFQFYGYLSQQQNMMQDYVRTGTYQRAILQNHTDFKDKIVLDVGCGSGILSFFAAQAGARKIYAVEASTMAQHAEVLVKSNNLTDRIVVIPGKVEEVSLPEQVDIIISEPMGYMLFNERMLESYLHAKKYLKPSGNMFPTIGDVHLAPFTDEQLYMEQFTKANFWYQPSFHGVDLSALRGAAVDEYFRQPVVDTFDIRILMAKSVKYTVNFLEAKEGDLHSACLASPAATALCLPG

SEQ ID NO: 2060 - protein, 827 aa, Homo sapiens
MLLCLSPAWLMKVPAPGQPGEAALLVSKAVSFHPGGLTFLDDFVPPRRATYFLAGLGLGPGRGREAAELARDLTCPTGASAELARLLEDRLLTRQLLAQQGGVAVPATLAFTYKPPGLLRGGDASLGLRLVELSGKEGQETLVKEEVEAFLRSEALGDILQVAVKLSGWRWRGRQAWRLHPRAELGAVVDTVLALLEKLEEEESVLVEAVYPPAQLPCSDGPSPGPGLAVRICAVVCRTQGDRPLLSKVVCGVGRGDRPLRHHNSLPRTLEVALAQCGLGEEAQVAAVRQRVKAAAEAALAAVLALEAGLSAEQRGGRRAHTDFLGVDFALTAAGGVLTPVALELNGGLCLEACGALEGLWAAPRLGPAADEAVAAPLVETMLRRSARCLMEGKQLLVVGAGGVSKKFVWEAARDYGLQLHLVESDPNHFASQLVQTFIHFDMTEHRRDEENARLLAELVRARGLKLDGCFSYWDDCLVLTALLCQELGLPCSSPAAMRLAKQKSLTQLHLLHHHGPPWPAPSLHAVPCCPLESEADVERAVHQVPLPGVMKLEFGAGAVGVRLVEDAPQCHEHFSRITRDLQGEADHPGIGLGWGNAMLLMEFVEGTEHDVDLVLFGGRLLAAFVSDNGPTRLPGFTETAACMPTGLAPEQEAQMVQAAFRCCLGCGLLDGVFNVELKLTGAGPRLIEINPRMGGFYLRDWILELYGVDLLLAAVMVACGLRPALPTRPRARGHLVGVMCLVSQHLQALSSTASRETLQALHDRGLLRLNLLEEALVPGEYEEPYCSVACAGPSPTEARLRLLGLCQGLGIDGPSYPVAHFLSHFK

SEQ ID NO: 2061 - protein, 950 aa, Homo sapiens
MLSLDPSGPEWDCPLGSKDLEEEGPWGGGSGLPPTGCFPGSWRQDVGLDCKGSPEGAEARAWTVYYYSLLQSCLQQAGLPETQDRGQVPRTGCPGAEVTLCVLGSPSTFLPVLLEGGVQSPGNMLLCLSPAWLMKVPAPGQPGEAALLVSKAVSFHPGGLTFLDDFVPPRRATYFLAGLGLGPGRGREAAELARDLTCPTGASAELARLLEDRLLTRQLLAQQGGVAVPATLAFTYKPPGLLRGGDASLGLRLVELSGKEGQETLVKEEVEAFLRSEALGDILQVAVKLSGWRWRGRQAWRLHPRAELGAVVDTVLALLEKLEEEESVLVEAVYPPAQLPCSDGPSPGPGLAVRICAVVCRTQGDRPLLSKVVCGVGRGDRPLRHHNSLPRTLEVALAQCGLGEEAQVAAVRQRVKAAAEAALAAVLALEAGLSAEQRGGRRAHTDFLGVDFALTAAGGVLTPVALELNGGLCLEACGALEGLWAAPRLGPAADEAVAAPLVETMLRRSARCLMEGKQLLVVGAGGVSKKFVWEAARDYGLQLHLVESDPNHFASQLVQTFIHFDMTEHRRDEENARLLAELVRARGLKLDGCFSYWDDCLVLTALLCQELGLPCSSPAAMRLAKQKSLTQLHLLHHHGPPWPAPSLHAVPCCPLESEADVERAVHQVPLPGVMKLEFGAGAVGVRLVEDAPQCHEHFSRITRDLQGEADHPGIGLGWGNAMLLMEFVEGTEHDVDLVLFGGRLLAAFVSDNGPTRLPGFTETAACMPTGLAPEQEAQMVQAAFRCCLGCGLLDGVFNVELKLTGAGPRLIEINPRMGGFYLRDWILELYGVDLLLAAVMVACGLRPALPTRPRARGHLVGVMCLVSQHLQALSSTASRETLQALHDRGLLRLNLLEEALVPGEYEEPYCSVACAGPSPTEARLRLLGLCQGLGIDGPSYPVAHFLSHFK

SEQ ID NO: 2062 - protein, 924 aa, Homo sapiens
MLSLDPSGPEWDCPLGSKDLEEEGPWGGGSGLPPTGCFPGSWRQDVGLDCKGSPEGAEARAWTVYYYSLLQSCLQQAGLPETQDRGQVPRTGCPGAEVTLCVLGSPSTFLPVLLEGGVQSPGNMLLCLSPAWLMKVPAPGQPGEAALLVSKAVSFHPGGLTFLDDFVPPRRATYFLAGLGLGPGRGREAAELARDLTCPTGASAELARLLEDRLLTRQLLAQQGGVAVPATLAFTYKPPGLLRGGDASLGLRLVELSGKEGQETLVKEEVEAFLRSEALGDILQVAVKLSGWRWRGRQAWRLHPRAELGAVVDTVLALLEKLEEEESVLVEAVYPPAQLPCSDGPSPGPGLAVRICAVVCRTQGDRPLLSKVVCGVGRGDRPLRHHNSLPRTLEAALAAVLALEAGLSAEQRGGRRAHTDFLGVDFALTAAGGVLTPVALELNGGLCLEACGALEGLWAAPRLGPAADEAVAAPLVETMLRRSARCLMEGKQLLVVGAGGVSKKFVWEAARDYGLQLHLVESDPNHFASQLVQTFIHFDMTEHRRDEENARLLAELVRARGLKLDGCFSYWDDCLVLTALLCQELGLPCSSPAAMRLAKQKSLTQLHLLHHHGPPWPAPSLHAVPCCPLESEADVERAVHQVPLPGVMKLEFGAGAVGVRLVEDAPQCHEHFSRITRDLQGEADHPGIGLGWGNAMLLMEFVEGTEHDVDLVLFGGRLLAAFVSDNGPTRLPGFTETAACMPTGLAPEQEAQMVQAAFRCCLGCGLLDGVFNVELKLTGAGPRLIEINPRMGGFYLRDWILELYGVDLLLAAVMVACGLRPALPTRPRARGHLVGVMCLVSQHLQALSSTASRETLQALHDRGLLRLNLLEEALVPGEYEEPYCSVACAGPSPTEARLRLLGLCQGLGIDGPSYPVAHFLSHFK

SEQ ID NO: 2063 - protein, 116 aa, Homo sapiens
MESSRVRLLPLLGAALLLMLPLLGTRAQEDAELQPRALDIYSAVDDASHEKELIEALQEVLKKLKSKRVPIYEKKYGQVPMCDAGEQCAVRKGARIGKLCDCPRGTSCNSFLLKCL

SEQ ID NO: 2064 - protein, 117 aa, Homo sapiens
MDGIHIVAFAEEADPDGFEFLETLKAVAQDNTENPDLSIIWIDPDDFPLLVPYWEKTFDIDLSAPQIGVVNVTDADSVWMEMDDEEDLPSAEELEDWLEDVLEGEINTEDDDDDDDD

SEQ ID NO: 2065 - protein, 396 aa, Homo sapiens
MSATDRMGPRAVPGLRLALLLLLVLGTPKSGVQGQEGLDFPEYDGVDRVINVNAKNYKNVFKKYEVLALLYHEPPEDDKASQRQFEMEELILELAAQVLEDKGVGFGLVDSEKDAAVAKKLGLTEVDSMYVFKGDEVIEYDGEFSADTIVEFLLDVLEDPVELIEGERELQAFENIEDEIKLIGYFKSKDSEHYKAFEDAAEEFHPYIPFFATFDSKVAKKLTLKLNEIDFYEAFMEEPVTIPDKPNSEEEIVNFVEEHRRSTLRKLKPESMYETWEDDMDGIHIVAFAEEADPDGFEFLETLKAVAQDNTENPDLSIIWIDPDDFPLLVPYWEKTFDIDLSAPQIGVVNVTDADSVWMEMDDEEDLPSAEELEDWLEDVLEGEINTEDDDDDDDD

SEQ ID NO: 2066 - protein, 399 aa, Homo sapiens
MKRTHLFIVGIYFLSSCRAEEGLNFPTYDGKDRVVSLSEKNFKQVLKKYDLLCLYYHEPVSSDKVTQKQFQLKEIVLELVAQVLEHKAIGFVMVDAKKEAKLAKKLGFDEEGSLYILKGDRTIEFDGEFAADVLVEFLLDLIEDPVEIISSKLEVQAFERIEDYIKLIGFFKSEDSEYYKAFEEAAEHFQPYIKFFATFDKGVAKKLSLKMNEVDFYEPFMDEPIAIPNKPYTEEELVEFVKEHQRPTLRRLRPEEMFETWEDDLNGIHIVAFAEKSDPDGYEFLEILKQVARDNTDNPDLSILWIDPDDFPLLVAYWEKTFKIDLFRPQIGVVNVTDADSVWMEIPDDDDLPTAEELEDWIEDVLSGKINTEDDDEDDDDDDNSDEEDNDDSDDDDDE

SEQ ID NO: 2067 - protein, 1119 aa, Homo sapiens
MCGPAMFPAGPPWPRVRVVQVLWALLAVLLASWRLWAIKDFQECTWQVVLNEFKRVGESGVSDSFFEQEPVDTVSSLFHMLVDSPIDPSEKYLGFPYYLKINYSCEEKPSEDLVRMGHLTGLKPLVLVTFQSPVNFYRWKIEQLQIQMEAAPFRSKEPCMAEEVCSMSWYTPMPIKKGSVVMRVDISSNGLGTFIPDKRFQMNINGFLKRDRDNNIQFTVGEELFNLMPQYFVGVSSRPLWHTVDQSPVLILGGIPNEKYVLMTDTSFKDFSLVELSIDSCWVGSFYCPHSGFTATIYDTIATESTLFIRQNQLVYYFTGTYTTLYERNRGSGSWIRVLASECIKKLCPVYFHSNGSEYIMALTTGKHEGYVHFGTIRDGQVSFEMLPRQWSVCEQIGASDDLELLYHIPEFIPEARGLEFLMILGTESYTSTAMAPKGIFCNPYNNLIFIWGNFLLQSSNKENFIYLADFPKELSIKYMARSFRGAVAIVTETEEIWYLLEGSYRVYQLFPSKGWQVHISLKLMQQSSLYASNETMLTLFYEDSKLYQLVYLMNNQKGQLVKRLVPVEQLLMYQQHTSHYDLERKGGYLMLSFIDFCPFSVMRLRSLPSPQRYTRQERYRARPPRVLERSGFHNENSLAIYQGLVYYLLWLHSVYDKPYADPVHDPTWRWWANNKQDQDYYFFLASNWRSAGGVSIEMDSYEKIYNLESAYELPERIFLDKGTEYSFAIFLSAQGHSFRTQSELGTAFQLHSQVDVGVVLADPGCIEASVKQEVLINRNSVLFSITLKDKKLCYDQGISGHHLMETSMTVNVVGSSGLCFQETHLGPHMQGNLMVPVFIGCPPGKRLAFDITYTLEYSRLKNKHYFDCVNVNPEMPCFLFRDIFYPFFLIQDLVTGDSGSFQGSYVLLVVGGGPTLDSLKDYSEDEIYRFNSPLDKTNSLIWTTRTTRTTKDSAFHIMSHESPGIEWLCLENAPCYDNVPQGIFAPEFFFKVLVSNRGVDTSTYCNYQLTFLLHIHGLPLSPKRALFIIMVSASVFVGLVIFYIAFCLLWPLVVKGCTMIRWKINNLIASESYYTYASISGISSMPSLRHSRMGSMFSSRMTEDRAEPKEAVERQLMT

SEQ ID NO: 2068 - protein, 661 aa, Homo sapiens
MCGPAMFPAGPPWPRVRVVQVLWALLAVLLASWRLWAIKDFQECTWQVVLNEFKRVGESGVSDSFFEQEPVDTVSSLFHMLVDSPIDPSEKYLGFPYYLKINYSCEEKPSEDLVRMGHLTGLKPLVLVTFQSPVNFYRWKIEQLQIQMEAAPFRSKEPCMAEEVCSMSWYTPMPIKKGSVVMRVDISSNGLGTFIPDKRFQMNINGFLKRDRDNNIQFTVGEELFNLMPQYFVGVSSRPLWHTVDQSPVLILGGIPNEKYVLMTDTSFKDFSLVELSIDSCWVGSFYCPHSGFTATIYDTIATESTLFIRQNQLVYYFTGTYTTLYERNRGSGSWIRVLASECIKKLCPVYFHSNGSEYIMALTTGKHEGYVHFGTIRDGQVSFEMLPRQWSVCEQIGVTTCSIIWSEYIAGEYTLLLLVESGYGNASKRFQVVSYNTASDDLELLYHIPEFIPEARGLEFLMILGTESYTSTAMAPKGIFCNPYNNLIFIWGNFLLQSSNKENFIYLADFPKELSIKYMARSFRGAVAIVTETEEIWYLLEGSYRVYQLFPSKGWQVHISLKLMQQSSLYASNETMLTLFYEDSKLYQLVYLMNNQKGQLVKRLVPVEQLLMYQQHTSHYDLERKGGYLMLSFIDFCPFSVMRLRSLPSPQRYTRQERYR

SEQ ID NO: 2069 - protein, 1159 aa, Homo sapiens
MCGPAMFPAGPPWPRVRVVQVLWALLAVLLASWRLWAIKDFQECTWQVVLNEFKRVGESGVSDSFFEQEPVDTVSSLFHMLVDSPIDPSEKYLGFPYYLKINYSCEEKPSEDLVRMGHLTGLKPLVLVTFQSPVNFYRWKIEQLQIQMEAAPFRSKEPCMAEEVCSMSWYTPMPIKKGSVVMRVDISSNGLGTFIPDKRFQMNINGFLKRDRDNNIQFTVGEELFNLMPQYFVGVSSRPLWHTVDQSPVLILGGIPNEKYVLMTDTSFKDFSLVELSIDSCWVGSFYCPHSGFTATIYDTIATESTLFIRQNQLVYYFTGTYTTLYERNRGSGSWIRVLASECIKKLCPVYFHSNGSEYIMALTTGKHEGYVHFGTIRDGQVSFEMLPRQWSVCEQIGVTTCSIIWSEYIAGEYTLLLLVESGYGNASKRFQVVSYNTASDDLELLYHIPEFIPEARGLEFLMILGTESYTSTAMAPKGIFCNPYNNLIFIWGNFLLQSSNKENFIYLADFPKELSIKYMARSFRGAVAIVTETEEIWYLLEGSYRVYQLFPSKGWQVHISLKLMQQSSLYASNETMLTLFYEDSKLYQLVYLMNNQKGQLVKRLVPVEQLLMYQQHTSHYDLERKGGYLMLSFIDFCPFSVMRLRSLPSPQRYTRQERYRARPPRVLERSGFHNENSLAIYQGLVYYLLWLHSVYDKPYADPVHDPTWRWWANNKQDQDYYFFLASNWRSAGGVSIEMDSYEKIYNLESAYELPERIFLDKGTEYSFAIFLSAQGHSFRTQSELGTAFQLHSQVDVGVVLADPGCIEASVKQEVLINRNSVLFSITLKDKKLCYDQGISGHHLMETSMTVNVVGSSGLCFQETHLGPHMQGNLMVPVFIGCPPGKRLAFDITYTLEYSRLKNKHYFDCVNVNPEMPCFLFRDIFYPFFLIQDLVTGDSGSFQGSYVLLVVGGGPTLDSLKDYSEDEIYRFNSPLDKTNSLIWTTRTTRTTKDSAFHIMSHESPGIEWLCLENAPCYDNVPQGIFAPEFFFKVLVSNRGVDTSTYCNYQLTFLLHIHGLPLSPKRALFIIMVSASVFVGLVIFYIAFCLLWPLVVKGCTMIRWKINNLIASESYYTYASISGISSMPSLRHSRMGSMFSSRMTEDRAEPKEAVERQLMT

SEQ ID NO: 2070 - protein, 292 aa, Homo sapiens
MCGPAMFPAGPPWPRVRVVQVLWALLAVLLASWRLWAIKDFQECTWQVVLNEFKRVGESGVSDSFFEQEPVDTVSSLFHMLVDSPIDPSEKYLGFPYYLKINYSCEEKSPVNFYRWKIEQLQIQMEAAPFRSKEPCMAEEVCSMSWYTPMPIKKGSVVMRVDISSNGLGTFIPDKRFQMNINGFLKRDRDNNIQFTVGEELFNLMPQYFVGVSSRPLWHTVDQSPVLILGGIPNEKYVLMTDTSFKDFSLVEAPIPHSMRETAAVAVGFVSWPASASRSCALCISIAMALST

SEQ ID NO: 2071 - protein, 136 aa, Homo sapiens
MCGPAMFPAGPPWPRVRVVQVLWALLAVLLASWRLWAIKDFQECTWQVVLNEFKRVGESGVSDSFFEQEPVDTVSSLFHMLVDSPIDPSEKYLGFPYYLKINYSCEEKSPVNFYRWKIEQLQIQMEAAPFRSKGSR

SEQ ID NO: 2072 - protein, 159 aa, Homo sapiens
MCGPAMFPAGPPWPRVRVVQVLWALLAVLLASWRLWAIKDFQECTWQVVLNEFKRVGESGVSDSFFEQEPVDTVSSLFHMLVDSPIDPSEKYLGFPYYLKINYSCEEKTESCAVAQTGVQWRDLGSLQPPPPVFKRCSCLGLPSSWNYSPLRTWCAWAT

SEQ ID NO: 2073 - protein, 165 aa, Homo sapiens
RWKIEQLQIQMEAAPFRSKEPCMAEEVCSMSWYTPMPIKKGSVVMRVDISSNGLGTFIPDKRFQMNINGFLKRDRDNNIQFTVGEELFNLMPQYFVGVSSRPLWHTVDQSPVLILGGIPNEKYVLMTDTSFKDFSLVEAVGFVSWPASASRSCALCISIAMALST

SEQ ID NO: 2074 - protein, 180 aa, Homo sapiens
  VARIANT 1: note = misc_feature - Xaa can be any naturally occurring amino acid
XRNRGSGSWIRVLASECIKKLCPVYFHSNGSEYIMALTTGKHEGYVHFGTIRASDDLELLYHIPEFIPEARGLEFLMILGTESYTSTAMAPKGIFCNPYNNLIFIWGNFLLQSSNKENFIYLADFPKELSIKYMARSFRGAVAIVTETEEIWYLLEGSYRVYQLFPSKGWQVHISLKLMQ

SEQ ID NO: 2075 - protein, 193 aa, Homo sapiens
MLGVLELLLLGAAWLAGPARGQNETEPIVLEGKCLVVCDSNPTSDPTGTALGISVRSGSAKVAFSAIRSTNHEPSEMSNRTMIIYFDQVLVNIGNNFDSERSTFIAPRKGIYSFNFHVVKVYNRQTIQVSLMLNGWPVISAFAGDQDVTREAASNGVLIQMEKGDRAYLKLERGNLMGGWKYSTFSGFLVFPL

SEQ ID NO: 2076 - protein, 193 aa, Homo sapiens; identical to SEQ ID NO: 2075

SEQ ID NO: 2077 - protein, 140 aa, Homo sapiens
MLGVLELLLLGAAWLAGPARGQNETEPIVLEGKCLVVCDSNPTSDPTGTALGISVRSGSAKVAFSAIRSTNHEPSEMSNRTMIIYFDQVSVPSSRGVQIGLVKEGWMEDRCPVLSKGSAEARGRQSGTDSCPLPFVPVSL

SEQ ID NO: 2078 - protein, 110 aa, Homo sapiens
MDWDKVLVNIGNHFDLASSIFVAPRKGIYSFSFHVVKVYNRQTIQVSLMQNGYPVISAFAGDQDVTREAASNGVLLLMEREDKVHLKLERGNLMGGWKYSTFSGFLVFPL

SEQ ID NO: 2079 - protein, 108 aa, Homo sapiens
MFQVLVNIGNHFDLASSIFVAPRKGIYSFSFHVVKVYNRQTIQVSLMQNGYPVISAFAGDQDVTREAASNGVLLLMEREDKVHLKLERGNLMGGWKYSTFSGFLVFPL

SEQ ID NO: 2080 - protein, 224 aa, Homo sapiens
MQAPGRGPLGLRLMMPGRRGALREPGGCGSCLGVALALLLLLLPACCPVRAQNDTEPIVLEGKCLVVCDSSPSADGAVTSSLGISVRSGSAKVAFSATRSTNHEPSEMSNRTMTIYFDQVLVNIGNHFDLASSIFVAPRKGIYSFSFHVVKVYNRQTIQVSLMQNGYPVISAFAGDQDVTREAASNGVLLLMEREDKVHLKLERGNLMGGWKYSTFSGFLVFPL

SEQ ID NO: 2081 - protein, 224 aa, Homo sapiens; identical to SEQ ID NO: 2080

SEQ ID NO: 2082 - protein, 205 aa, Homo sapiens
MLGAKPHWLPGPLHSPGLPLVLVLLALGAGWAQEGSEPVLLEGECLVVCEPGRAAAGGPGGAALGEAPPGRVAFAAVRSHHHEPAGETGNGTSGAIYFDQVLVNEGGGFDRASGSFVAPVRGVYSFRFHVVKVYNRQTVQVSLMLNTWPVISAFANDPDVTREAATSSVLLPLDPGDRVSLRLRRGNLLGGWKYSSFSGFLIFPL

SEQ ID NO: 2083 - protein, 154 aa, Homo sapiens
MWGLSGQSFGRTLTPTLKMRSTWGCCSRTLFSASADTAKRSGDAGRAPQVLVNEGGGFDRASGSFVAPVRGVYSFRFHVVKVYNRQTVQVSLMLNTWPVISAFANDPDVTREAATSSVLLPLDPGDRVSLRLRRGNLLGGWKYSSFSGFLIFPL

SEQ ID NO: 2084 - protein, 201 aa, Homo sapiens
MGSGRRALSAVPAVLLVLTLPGLPVWAQNDTEPIVLEGKCLVVCDSNPATDSKGSSSSPLGISVRAANSKVAFSAVRSTNHEPSEMSNKTRIIYFDQILVNVGNFFTLESVFVAPRKGIYSFSFHVIKVYQSQTIQVNLMLNGKPVISAFAGDKDVTREAATNGVLLYLDKEDKVYLKLEKGNLVGGWQYSTFSGFLVFPL

SEQ ID NO: 2085 - protein, 46 aa, Homo sapiens
MVKAGTCCATCKEFYQMKQTVLQLKQKIALLPNNAADLGKYITGDK

SEQ ID NO: 2086 - protein, 406 aa, Homo sapiens
MVPPPPSRGGAARGQLGRSLGPLLLLLALGHTWTYREEPEDGDREICSESKIATTKYPCLKSSGELTTCYRKKCCKGYKFVLGQCIPEDYDVCAEAPCEQQCTDNFGRVLCTCYPGYRYDRERHRKREKPYCLDIDECASSNGTLCAHICINTLGSYRCECREGYIREDDGKTCTRGDKYPNDTGHEKSENMVKAGTCCATCKEFYQMKQTVLQLKQKIALLPNNAADLGKYITGDKVLASNTYLPGPPGLPGGQGPPGSPGPKGSPGFPGMPGPPGQPGPRGSMGPMGPSPDLSHIKQGRRGPVGPPGAPGRDGSKGERGAPGPRGSPGPPGSFDFLLLMLADIRNDITELQEKVFGHRTHSSAEEFPLPQEFPSYPEAMDLGSGDDHPRRTETRDLRAPRDFYP

SEQ ID NO: 2087 - protein, 336 aa, Homo sapiens
RKKCCKGYKFVLGQCIPEDYDVCAEAPCEQQCTDNFGRVLCTCYPGYRYDRERHRKREKPYCLDIDECASSNGTLCAHICINTLGSYRCECREGYIREDDGKTCTRGDKYPNDTGHEKSENMVKAGTCCATCKEFYQMKQTVLQLKQKIALLPNNAADLGKYITGDKVLASNTYLPGPPGLPGGQGPPGSPGPKGSPGFPGMPGPPGQPGPRGSMGPMGPSPDLSHIKQGRRGPVGPPGAPGRDGSKGERGAPGPRGSPGPPGSFDFLLLMLADIRNDITELQEKVFGHRTHSSAEEFPLPQEFPSYPEAMDLGSGDDHPRRTETRDLRAPRDFYP

SEQ ID NO: 2088 - protein, 529 aa, Homo sapiens
MAALTTVVVAAAATAVAGAVAGAGAATGTGVGATPAPQQSDGCFSTSGGIRPFHLQNWKQKVNQTKKAEFVRTAEKFKNQVINMEKDKHSHFYNQKSDFRIEHSMLEELENKLIHSRKTERAKIQQQLAKIHNNVKKLQHQLKDVKPTPDFVEKLREMMEEIENAINTFKEEQRLIYEELIKEEKTTNNELSAISRKIDTWALGNSETEKAFRAISSKVPVDKVTPSTLPEEVLDFEKFLQQTGGRQGAWDDYDHQNFVKVRNKHKGKPTFMEEVLEHLPGKTQDEVQQHEKWYQKFLALEERKKESIQIWKTKKQQKREEIFKLKEKADNTPVLFHNKQEDNQKQKEEQRKKQKLAVEAWKKQKSIEMSMKCASQLKEEEEKEKKHQKERQRQFKLKLLLESYTQQKKEQEEFLRLEKEIREKAEKAEKRKNAADEISRFQERDLHKLELKILDRQAKEDEKSQKQRRLAKLKEKVENNVSRDPSRLYKPTKGWEERTKKIGPTGSGPLLHIPHRAIPTWRQGIQRRV

SEQ ID NO: 2089 - protein, 446 aa, Homo sapiens
MEKDKHSHFYNQKSDFRIEHSMLEELENKLIHSRKTERAKIQQQLAKIHNNVKKLQHQLKDVKPTPDFVEKLREMMEEIENAINTFKEEQRLIYEELIKEEKTTNNELSAISRKIDTWALGNSETEKAFRAISSKVPVDKVTPSTLPEEVLDFEKFLQQTGGRQGAWDDYDHQNFVKVRNKHKGKPTFMEEVLEHLPGKTQDEVQQHEKWYQKFLALEERKKESIQIWKTKKQQKREEIFKLKEKADNTPVLFHNKQEDNQKQKEEQRKKQKLAVEAWKKQKSIEMSMKCASQLKEEEEKEKKHQKERQRQFKLKLLLESYTQQKKEQEEFLRLEKEIREKAEKAEKRKNAADEISRFQERDLHKLELKILDRQAKEDEKSQKQRRLAKLKEKVENNVSRDPSRLYKPTKGWEERTKKIGPTGSGPLLHIPHRAIPTWRQGIQRRV

SEQ ID NO: 2090 - protein, 414 aa, Homo sapiens
MEKDKHSHFYNQKSDFRIEHSMLEELENKLIHSRKTERAKIQQQLAKIHNNVKKLQHQLKDVKPTPDFVEKLREMMEEIENAINTFKEEQRLIYEELIKEEKTTNNELSAISRKIDTWALGNSETEKAFRAISSKVPVDKVTPSTLPEEVLDFEKFLQQTGGRQGAWDDYDHQNFVKVRNKHKGKPTFMEEVLEHLPGKTQDEVQQHEKWYQKFLALEERKKESIQIWKTKKQQKREEIFKLKEKADNTPVLFHNKQEDNQKQKEEQRKKQKLAVEAWKKQKSIEMSMKCASQLKEEEEKEKKHQKERQRQFKLKLLLESYTQQKKEQEEFLRLEKEIREKAEKAEKRKNAADEISRFQERVENNVSRDPSRLYKPTKGWEERTKKIGPTGSGPLLHIPHRAIPTWRQGIQRRV

SEQ ID NO: 2091 - protein, 446 aa, Homo sapiens; identical to SEQ ID NO: 2089

SEQ ID NO: 2092 - protein, 142 aa, Homo sapiens
MMAQKSQGSDNLQEGQEKSKREILKCTKSAWAPLDEWLPPDPEEESQSLTIPMLEDSKQESIQQWLDSGFFVSANENFQQVIDRTVSLYEQGMVQMTVKDYMRSLHQFSETPILSRGTSFNSCYSTASVPQSIPEWLEFWEI

SEQ ID NO: 2093 - protein, 163 aa, Homo sapiens
MMAQKSQGSDNLQEGQEKSKREILKCTKSAWAPLDEWLPPDPEEESQSLTIPMLEDSKQESIQQWLDSGFFVSANENFQQVIDRTVSLYEQGMVQMTVKDYMRSLHQFSETPILSRGTSFNSCYSTASVPQSIPEWLEFWEIDPVEILLDLGFGADEPDICMQ

SEQ ID NO: 2094 - protein, 168 aa, Homo sapiens
MMAQKSQGSDNLQEGQEKSKREILKCTKSAWAPLDEWLPPDPEEESQSLTIPMLEDSKQESIQQWLDSGFFVSANENFQQVIDRTVSLYEQGMVQMTVKDYMRSLHQFSETPILSRGTSFNSCYSTASVPQSIPEWLEFWEIDPVEILLDLGFGADEPDICMQIPARF

SEQ ID NO: 2095 - protein, 896 aa, Homo sapiens
MMAQKSQGSDNLQEGQEKSKREILKCTKSAWAPLDEWLPPDPEEESQSLTIPMLEDSKQESIQQWLDSGFFVSANENFQQVIDRTVSLYEQGMVQMTVKDYMRSLHQFSETPILSRGTSFNSCYSTASVPQSIPEWLEFWEIDPVEILLDLGFGADEPDICMQIPARFLGCGSAARGINIRVFLEAQKQRMDIENPNLYGRFRQLEILDHVTNAFSSLLSDVSILPNRAEEKAGGESVQRTSVQSFEEETGNPLDMTSGTVGARVDRANSCQSDSSGFLEEPLEPLPLQMPSLPNSQSPAENGGRKPRDQSHSLVSSQDCQLESDGPDSKSRASMSFSSQEANALEQRASVSVMEEEFLLEAMEGPPELYIPDMACAKTTTRGECPRKDSHLWQLLPMPHAEYEVTRPTATSKYDHPLGFMVTHVTEMQDSFVRPEGAGKVQSHHNESQRSPGNDHTQDKFLHVDSEAPREEESSGFCPHTNHSLLVPESSSQCIPKHSEITPYATDLAQTSEKLIPHLHKLPGDPAQVKSRSGTLGQILPGTEAEMENLPLNTGSSRSVMTQMSSSLVSAAQRAVALGTGPRGTSLECTVCDPVTATETRLGTKARQLNDASIQTSALSNKTLTHGPQPLTKSVSLDSGFSSICPMGTCHAIPAHCCICCHHHPHCHGERQSPGPEPSVCRHCLCSLTGHQEAQFMTTLKALQDTTVRELCSCTVHEMEAMKTICQSFREYLEEIEQHLMGQQALFSRDMSEEEREEAEQLQTLREALRQQVAELEFQLGDRAQQIREGILLQLEVLTAEPPEHYSNLHQYNWIEESNGQTSCSKIHPGMAPRTVFPPDDGQEAPCSGGTQLAAFTPPTLENSTRMSPSSSAWAKLGPTPLSNCPVGEKDADVFL

SEQ ID NO: 2096 - protein, 1044 aa, Homo sapiens
MMAQKSQGSDNLQEGQEKSKREILKCTKSAWAPLDEWLPPDPEEESQSLTIPMLEDSKQESIQQWLDSGFFVSANENFQQVIDRTVSLYEQGMVQMTVKDYMRSLHQFSETPILSRGTSFNSCYSTASVPQSIPEWLEFWEIDPVEILLDLGFGADEPDICMQIPARFLGCGSAARGINIRVFLEAQKQRMDIENPNLYGRFRQLEILDHVTNAFSSLLSDVSILPNRAEEKAGGESVQRTSVSAAKEHRRRMGKLLRRASKQNIRRDCNPEVSESFKVKDEVFVPFTKPWDCGAELAATSINHKQNHLSLSVEHQSLQACDDLLPYPPHGLLSKQWPCSSMPAKQAPPSCVSEGSVKGRTQKENLFQTNKLKSLSHLAGKGPDSFEMEEVQSFEEETGNPLDMTSGTVGARVDRANSCQSDSSGFLEEPLEPLPLQMPSLPNSQSPAENGGRKPRDQSHSLVSSQDCQLESDGPDSKSRASMSFSSQEANALEQRASVSVMEEEFLLEAMEGPPELYIPDMACAKTTTRGECPRKDSHLWQLLPMPHAEYEVTRPTATSKYDHPLGFMVTHVTEMQDSFVRPEGAGKVQSHHNESQRSPGNDHTQDKFLHVDSEAPREEESSGFCPHTNHSLLVPESSSQCIPKHSEITPYATDLAQTSEKLIPHLHKLPGDPAQVKSRSGTLGQILPGTEAEMENLPLNTGSSRSVMTQMSSSLVSAAQRAVALGTGPRGTSLECTVCDPVTATETRLGTKARQLNDASIQTSALSNKTLTHGPQPLTKSVSLDSGFSSICPMGTCHAIPAHCCICCHHHPHCHGERQSPGPEPSVCRHCLCSLTGHQEAQFMTTLKALQDTTVRELCSCTVHEMEAMKTICQSFREYLEEIEQHLMGQQALFSRDMSEEEREEAEQLQTLREALRQQVAELEFQLGDRAQQIREGILLQLEVLTAEPPEHYSNLHQYNWIEESNGQTSCSKIHPGMAPRTVFPPDDGQEAPCSGGTQLAAFTPPTLENSTRMSPSSSAWAKLGPTPLSNCPVGEKDADVFL

SEQ ID NO: 2097 - protein, 1062 aa, Homo sapiens
MPTTASCKTISLLKLLYSVSLQNYSPMMAQKSQGSDNLQEGQEKSKREILKCTKSAWAPLDEWLPPDPEEESQSLTIPMLEDSKQESIQQWLDSGFFVSANENFQQVIDRTVSLYEQGMVQMTVKDYMRSLHQFSETPILSRGTSFNSCYSTASVPQSIPEWLEFWEIDPVEILLDLGFGADEPDICMQIPARFLGCGSAARGINIRVFLEAQKQRMDIENPNLYGRFRQLEILDHVTNAFSSLLSDVSILPNRAEEKAGGESVQRTSVSAAKEHRRRMGKLLRRASKQNIRRDCNPEVSESFKVKDEVFVPFTKPWDCGAELAATSINHKQNHLSLSVEHQSLQACDDLLPYPPHGLLSKQWPCSSMPAKQAPPSCVSEGSVKGRTQKENLFQTNKLKSLSHLAGKGPDSFEMEEVQSFEEETGNPLDMTSGTVGARVDRANSCQSDSSGFLEEPLEPLPLQMPSLPNSQSPAENGGRKPRDQSHSLVSSQDCQLESDGPDSKSRASMSFSSQEANALEQRASVSVMEEEFLLEAMEGPPELYIPDMACAKTTTRGECPRKDSHLWQLLPMPHAEYEVTRPTATSKYDHPLGFMVTHVTEMQDSFVRPEGAGKVQSHHNESQRSPGNDHTQDKFLHVDSEAPREEESSGFCPHTNHSLLVPESSSQCIPKHSEITPYATDLAQTSEKLIPHLHKLPGDPAQVKSRSGTLGQILPGTEAEMENLPLNTGSSRSVMTQMSSSLVSAAQRAVALGTGPRGTSLECTVCDPVTATETRLGTKARQLNDASIQTSALSNKTLTHGPQPLTKSVSLDSGFSSICPMGTCHAIPAHCCICCHHHPHCHGERQSPGPEPSVCRHCLCSLTGHQEAQFMTTLKALQDTTVRELCSCTVHEMEAMKTICQSFREYLEEIEQHLMGQQALFSRDMSEEEREEAEQLQTLREALRQQVAELEFQLGDRAQQIREGILLQLEVLTAEPPEHYSNLHQYNWIEESNGQTSCSKIHPGMAPRTVFPPDDGQEAPCSGELLSAELDPFFFSSKANNSAKDEKIKSKDFLKTQDSGLL

SEQ ID NO: 2098 - protein, 1054 aa, Homo sapiens
MSVSLQNYSPMMAQKSQGSDNLQEGQEKSKREILKCTKSAWAPLDEWLPPDPEEESQSLTIPMLEDSKQESIQQWLDSGFFVSANENFQQVIDRTVSLYEQGMVQMTVKDYMRSLHQFSETPILSRGTSFNSCYSTASVPQSIPEWLEFWEIDPVEILLDLGFGADEPDICMQIPARFLGCGSAARGINIRVFLEAQKQRMDIENPNLYGRFRQLEILDHVTNAFSSLLSDVSILPNRAEEKAGGESVQRTSVSAAKEHRRRMGKLLRRASKQNIRRDCNPEVSESFKVKDEVFVPFTKPWDCGAELAATSINHKQNHLSLSVEHQSLQACDDLLPYPPHGLLSKQWPCSSMPAKQAPPSCVSEGSVKGRTQKENLFQTNKLKSLSHLAGKGPDSFEMEEVQSFEEETGNPLDMTSGTVGARVDRANSCQSDSSGFLEEPLEPLPLQMPSLPNSQSPAENGGRKPRDQSHSLVSSQDCQLESDGPDSKSRASMSFSSQEANALEQRASVSVMEEEFLLEAMEGPPELYIPDMACAKTTTRGECPRKDSHLWQLLPMPHAEYEVTRPTATSKYDHPLGFMVTHVTEMQDSFVRPEGAGKVQSHHNESQRSPGNDHTQDKFLHVDSEAPREEESSGFCPHTNHSLLVPESSSQCIPKHSEITPYATDLAQTSEKLIPHLHKLPGDPAQVKSRSGTLGQILPGTEAEMENLPLNTGSSRSVMTQMSSSLVSAAQRAVALGTGPRGTSLECTVCDPVTATETRLGTKARQLNDASIQTSALSNKTLTHGPQPLTKSVSLDSGFSSICPMGTCHAIPAHCCICCHHHPHCHGERQSPGPEPSVCRHCLCSLTGHQEAQFMTTLKALQDTTVRELCSCTVHEMEAMKTICQSFREYLEEIEQHLMGQQALFSRDMSEEEREEAEQLQTLREALRQQVAELEFQLGDRAQQIREGILLQLEVLTAEPPEHYSNLHQYNWIEESNGQTSCSKIHPGMAPRTVFPPDDGQEAPCSGGTQLAAFTPPTLENSTRMSPSSSAWAKLGPTPLSNCPVGEKDADVFL

SEQ ID NO: 2099 - protein, 952 aa, Homo sapiens
MVQMTVKDYMRSLHQFSETPILSRGTSFNSCYSTASVPQSIPEWLEFWEIDPVEILLDLGFGADEPDICMQIPARFLGCGSAARGINIRVFLEAQKQRMDIENPNLYGRFRQLEILDHVTNAFSSLLSDVSILPNRAEEKAGGESVQRTSVSAAKEHRRRMGKLLRRASKQNIRRDCNPEVSESFKVKDEVFVPFTKPWDCGAELAATSINHKQNHLSLSVEHQSLQACDDLLPYPPHGLLSKQWPCSSMPAKQAPPSCVSEGSVKGRTQKENLFQTNKLKSLSHLAGKGPDSFEMEEVQSFEEETGNPLDMTSGTVGARVDRANSCQSDSSGFLEEPLEPLPLQMPSLPNSQSPAENGGRKPRDQSHSLVSSQDCQLESDGPDSKSRASMSFSSQEANALEQRASVSVMEEEFLLEAMEGPPELYIPDMACAKTTTRGECPRKDSHLWQLLPMPHAEYEVTRPTATSKYDHPLGFMVTHVTEMQDSFVRPEGAGKVQSHHNESQRSPGNDHTQDKFLHVDSEAPREEESSGFCPHTNHSLLVPESSSQCIPKHSEITPYATDLAQTSEKLIPHLHKLPGDPAQVKSRSGTLGQILPGTEAEMENLPLNTGSSRSVMTQMSSSLVSAAQRAVALGTGPRGTSLECTVCDPVTATETRLGTKARQLNDASIQTSALSNKTLTHGPQPLTKSVSLDSGFSSICPMGTCHAIPAHCCICCHHHPHCHGERQSPGPEPSVCRHCLCSLTGHQEAQFMTTLKALQDTTVRELCSCTVHEMEAMKTICQSFREYLEEIEQHLMGQQALFSRDMSEEEREEAEQLQTLREALRQQVAELEFQLGDRAQQIREGILLQLEVLTAEPPEHYSNLHQYNWIEESNGQTSCSKIHPGMAPRTVFPPDDGQEAPCSGGTQLAAFTPPTLENSTRMSPSSSAWAKLGPTPLSNCPVGEKDADVFL

SEQ ID NO: 2100 - protein, 116 aa, Homo sapiens
MDLLQFLAFLFVLLLSGMGATGTLRTSLDPSLEIYKKMFEVKRREQLLALKNLAQLNDIHQQYKILDVMLKGLFKFIPSTDPFQKALREEEKRRKKEEKRKEIRKGPRISRSQSEL

SEQ ID NO: 2101 - protein, 229 aa, Homo sapiens
MDLLQFLAFLFVLLLSGMGATGTLRTSLDPSLEIYKKMFEVKRREQLLALKNLAQLNDIHQQYKILDVMLKGLFKVLEDSRTVLTAADVLPDGPFPQDEKLKDAFSHVVENTAFFGDVVLRFPRIVHYYFDHNSNWNLLIRWGISFCNQTGVFNQGPHSPILSLMAQELGISEKDSNFQNPFKIDRTEFIPSTDPFQKALREEEKRRKKEEKRKEIRKGPRISRSQSEL

SEQ ID NO: 2102 - protein, 141 aa, Homo sapiens
MEEEAMNGDRTESDWQGLVSEYLVCKRKLESKKEALLILSKELDTCQQERDQYKLMANQLRERHQSLKKKYRELIDGDPSLPPEKRKQANLAQLLRDSQDRNKHLGEEIKELQQRLGEVQGDNKGRLRSKKKMKVVPLLRR

SEQ ID NO: 2103 - protein, 529 aa, Homo sapiens
MEEEAMNGDRTESDWQGLVSEYLVCKRKLESKKEALLILSKELDTCQQERDQYKLMANQLRERHQSLKKKYRELIDGDPSLPPEKRKQANLAQLLRDSQDRNKHLGEEIKELQQRLGEVQGDNKLLRMTIAKQRLGDEAIGVRHFAAHEREDLVQQLERAKEQIESLEHDLQASVDELQDVKEERSSYQDKVERLNQELNHILSGHENRIIDVDALCMENRYLQERLKQLHEEVNLLKSNIAKYKNALERRKNSKGQGKSSSSALTGVLSAKQVQDLLSEDHGCSLPATPQSISDLKSLATALLETIHEKNMVIQHQRQTNKILGNRVAELEKKLRTLEVSGLWSLPGGKDTILFSDPTLPSGQRSRSPLLKFVEQPTENKADPKDGEAQKQEEDESCAAAEALTAPEDAGRPAVNSPANQSRGNQCKLFHPSLPQLPSEEEVNSLGREIIKLTKEQAAAELEEVRRESPIEGQRSETGPAPPGLAIQGELPKSHLDSFEASRPAAKASTPEDGKGIPEGGGMRSTVKT

SEQ ID NO: 2104 - protein, 540 aa, Homo sapiens
MEEEAMNGDRTESDWQGLVSEYLVCKRKLESKKEALLILSKELDTCQQERDQYKLMANQLRERHQSLKKKYRELIDGDPSLPPEKRKQANLAQLLRDSQDRNKHLGEEIKELQQRLGEVQGDNKLLRMTIAKQRLGDEAIGVRHFAAHEREDLVQQLERAKEQIESLEHDLQASVDELQDVKEERSSYQDKVERLNQELNHILSGHENRIIDVDALCMENRYLQERLKQLHEEVNLLKSNIAKYKNALERRKNSKGQGKSSSSALTGVLSAKQVQDLLSEDHGCSLPATPQSISDLKSLATALLETIHEKNMVIQHQRQTNKILGNRVAELEKKLRTLEVSGLWSLPGLSYNVSVGFGRGKDTILFSDPTLPSGQRSRSPLLKFVEQPTENKADPKDGEAQKQEEDESCAAAEALTAPEDAGRPAVNSPANQSRGNQCKLFHPSLPQLPSEEEVNSLGREIIKLTKEQAAAELEEVRRESPIEGQRSETGPAPPGLAIQGELPKSHLDSFEASRPAAKASTPEDGKGIPEGGGMRSTVKT

SEQ ID NO: 2105 - protein, 529 aa, Homo sapiens
MVVIVVVIIIIIARAATWDSEYLVCKRKLESKKEALLILSKELDTCQQERDQYKLMANQLRERHQSLKKKYRELIDGDPSLPPEKRKQANLAQLLRDSQDRNKHLGEEIKELQQRLGEVQGDNKLLRMTIAKQRLGDEAIGVRHFAAHEREDLVQQLERAKEQIESLEHDLQASVDELQDVKEERSSYQDKVERLNQELNHILSGHENRIIDVDALCMENRYLQERLKQLHEEVNLLKSNIAKYKNALERRKNSKGQGKSSSSALTGVLSAKQVQDLLSEDHGCSLPATPQSISDLKSLATALLETIHEKNMVIQHQRQTNKILGNRVAELEKKLRTLEVSGLWSLPGGKDTILFSDPTLPSGQRSRSPLLKFVEQPTENKADPKDGEAQKQEEDESCAAAEALTAPEDAGRPAVNSPANQSRGNQCKLFHPSLPQLPSEEEVNSLGREIIKLTKEQAAAELEEVRRESPIEGQRSETGPAPPGLAIQGELPKSHLDSFEASRPAAKASTPEDGKGIPEGGGMRSTVKT

SEQ ID NO: 2106 - protein, 145 aa, Homo sapiens
MDENYNLLPHGVNFQDAIFPDTQENRRMFSSLFQFSNCSQGQQLATFSSDWEIQEDSRLMCSSVQKALFEEEDHVKKLQQKVATLEKRNRQLRERVKKVKRSLRQARKKGRHLELANQKLSEKLAAGALPHINARGPVRPPYLRG

SEQ ID NO: 2107 - protein, 270 aa, Homo sapiens
MLRQLLLAALCLAGPPAPARACQLPSEWRPLSEGCRAELAETIVYARVLALHPEAPGLYNHLPWQYHAGQGGLFYSAEVEMLCDQAWGSMLEVPAGSRLNLTGLGYFSCHSHTVVQDYSYFFFLRMDENYNLLPHGVNFQDAIFPDTQENRRMFSSLFQFSNCSQGQQLATFSSDWEIQEDSRLMCSSVQKALFEEEDHVKKLQQKVATLEKRNRQLRERVKKVKRSLRQARKKGRHLELANQKLSEKLAAGALPHINARGPVRPPYLRG

SEQ ID NO: 2108 - protein, 212 aa, Homo sapiens
MALRSMGQFSVFFFFFFWAQKKIASLSHSGFLHWFLLFEAVSSNGVLLFFSRFRWRRRLLVISAPNDEDWAYSQQLSALSGQACNFGLRHITILKLLGVGEEVGGVLELFPINGSSVVEREDVPAHLVKDIRNYFQVSPEYFSMLLVGKDGNVKSWYPSPMWSMVIVYDLIDSMQLRRQEMAIQQSLGMRCPEDEYAGYGYHSYHQGYQDGY

SEQ ID NO: 2109 - protein, 950 aa, Homo sapiens
MTWRMGPRFTMLLAMWLVCGSEPHPHATIRGSHGGRKVPLVSPDSSRPARFLRHTGRSRGIERSTLEEPNLQPLQRRRSVPVLRLARPTEPPARSDINGAAVRPEQRPAARGSPREMIRDEGSSARSRMLRFPSGSSSPNILASFAGKNRVWVISAPHASEGYYRLMMSLLKDDVYCELAERHIQQIVLFHQAGEEGGKVRRITSEGQILEQPLDPSLIPKLMSFLKLEKGKFGMVLLKKTLQVEERYPYPVRLEAMYEVIDQGPIRRIEKIRQKGFVQKCKASGVEGQVVAEGNDGGGGAGRPSLGSEKKKEDPRRAQVPPTRESRVKVLRKLAATAPALPQPPSTPRATTLPPAPATTVTRSTSRAVTVAARPMTTTAFPTTQRPWTPSPSHRPPTTTEVITARRPSVSENLYPPSRKDQHRERPQTTRRPSKATSLESFTNAPPTTISEPSTRAAGPGRFRDNRMDRREHGHRDPNVVPGPPKPAKEKPPKKKAQDKILSNEYEEKYDLSRPTASQLEDELQVGNVPLKKAKESKKHEKLEKPEKEKKKKMKNENADKLLKSEKQMKKSEKKSKQEKEKSKKKKGGKTEQDGYQKPTNKHFTQSPKKSVADLLGSFEGKRRLLLITAPKAENNMYVQQRDEYLESFCKMATRKISVITIFGPVNNSTMKIDHFQLDNEKPMRVVDDEDLVDQRLISELRKEYGMTYNDFFMVLTDVDLRVKQYYEVPITMKSVFDLIDTFQSRIKDMEKQKKEGIVCKEDKKQSLENFLSRFRWRRRLLVISAPNDEDWAYSQQLSALSGQACNFGLRHITILKLLGVGEEVGGVLELFPINGSSVVEREDVPAHLVKDIRNYFQVSPEYFSMLLVGKDGNVKSWYPSPMWSMVIVYDLIDSMQLRRQEMAIQQSLGMRCPEDEYAGYGYHSYHQGYQDGYQDDYRHHESYHHGYPY

SEQ ID NO: 2110 - protein, 950 aa, Homo sapiens; identical to SEQ ID NO: 2109

SEQ ID NO: 2111 - protein, 261 aa, Homo sapiens
  VARIANT 1: note = misc_feature - Xaa can be any naturally occurring amino acid
XFTQSPKKSVADLLGSFEGKRRLLLITAPKAENNMYVQQRDEYLESFCKMATRKISVITIFGPVNNSTMKIDHFQLDNEKPMRVVDDEDLVDQRLISELRKEYGMTYNDFFMVLTDVDLRVKQYYEVPITMKSVFDLIDTFQSRIKDMEKQKKEGIVCKEDKKQSLENFLSRFRWRRRLLVISAPNDEDWAYSQQLSALSGQACNFGSSVVEREDVPAHLVKDIRNYFQVSPEYFSMLLVGKDGNVKSWYPSPMWSMVIVY

SEQ ID NO: 2112 - protein, 553 aa, Homo sapiens
MSKAAGGAAAAAAAAESCSPAPAGSSAAPPAPVEDLSKVSDEELLQWSKEELIRSLRRAEAEKVSAMLDHSNLIREVNRRLQLHLGEIRGLKDINQKLQEDNQELRDLCCFLDDDRQKGKRVSREWQRLGRYTAGVMHKEVALYLQKLKDLEVKQEEVVKENMELKELCVLLDEEKGAGCAGSRCSIDSQASLCQLTASTAPYVRDVGDGSSTSSTGSTDSPDHHKHHASSGSPEHLQKPRSEGSPEHSKHRSASPEHPQKPRACGTPDRPKALKGPSPEHHKPLCKGSPEQQRHPHPGSSPETLPKHVLSGSPEHFQKHRSGSSPEHARHSGGSPEHLQKHALGGSLEHLPRARGTSPEHLKQHYGGSPDHKHGGGSGGSGGSGGGSREGTLRRQAQEDGSPHHRNVYSGMNESTLSYVRQLEARVRQLEEENRMLPQASQNRRQPPTRNSSNMEKGWGSRARRVLQWWQGCRGIGRCLPTLPGSFRLSSGADGSNSSPNSAASFSGHATPSQQPEPVVHSLKVVWRKLGDAAGSCPGIRQHLSGNQYKGPM

SEQ ID NO: 2113 - protein, 712 aa, Homo sapiens
MAGVAAHRAHPPFTAHMKNRGLREELEKAVVRGKELGDRLEHLQRELEQAALERQEFLREKESQHQRYQGLEQRLEAELQAAATSKEEALMELKTRALQLEEELFQLRQGPAGLGPKKRAEPQLVETQNVRLIEVERSNAMLVAEKAALQGQLQHLEGQLGSLQGRAQELLLQSQRAQEHSSRLQAEKSVLEIQGQELHRKLEVLEEEVRAARQSQEETRGQQQALLRDHKALAQLQRRQEAELEGLLVRHRDLKANMRALELAHRELQGRHEQLQAQRASVEAQEVALLAERERLMQDGHRQRGLEEELRRLQSEHDRAQMLLAELSRERGELQGERGELRGRLARLELERAQLEMQSQQLRESNQQLDLSACRLTTQCELLTQLRSAQEEENRQLLAEVQALSRENRELLERSLESRDHLHREQREYLDQLNALRREKQKLVEKIMDQYRVLEPVPLPRTKKGSWLADKGPLPRHPCAGPRAPSACGMRPWQAGSGGNSAQGSRWGEALSHSALGTPLGNDSDSAIQAPWGRPSPTAKDLVWDGRTPLRPCRNTKQMPTERALRYRNRRNVPSPHPSASDTVGTAGLGVQPSRHWSVSGGPRQPKSSGSQGPQGESLDKEAWALRSSTVSAGARRWSWDECVDRGDGWPPRAAPGWSSGSSRWLPLRQRSLGDPPAEGGWQELAREPPALSRWEAESQCWGTVAWADLEP

SEQ ID NO: 2114 - protein, 1476 aa, Homo sapiens
MEGGKGPRLRDFLSGSLATWALGLAGLVGEAEDSEGEEEEEEEEPPLWLEKRFLRLSDGALLLRVLGIIAPSSRGGPRMLRGLDGPAAWRVWNLNHLWGRLRDFYQEELQLLILSPPPDLQTLGFDPLSEEAVEQLEGVLRLLLGASVQCEHRELFIRHIQGLSLEVQSELAAAIQEVTQPGAGVVLALSGPDPGELAPAELEMLSRSLMGTLSKLARERDLGAQRLAELLLEREPLCLRPEAPSRAPAEGPSHHLALQLANAKAQLRRLRQELEEKAELLLDSQAEVQGLEAEIRRLRQEAQALSGQAKRAELYREEAEALRERAGRLPRLQEELRRCRERLQAAEAYKSQLEEERVLSGVLEASKALLEEQLEAARERCARLHETQRENLLLRTRLGEAHAELDSLRHQVDQLAEENVELELELQRSLEPPPGSPGEAPLAGAAPSLQDEVREAEAGRLRTLERENRELRGLLQVLQGQPGGQHPLLEAPREDPVLPVLEEAPQTPVAFDHSPQGLVQKARDGGPQALDLAPPALDSVLEASAECPQAPDSDPQEAESPLQAAAMDPQASDWSPQESGSPVETQESPEKAGRRSSLQSPASVAPPQGPGTKIQAPQLLGGETEGREAPQGELVPEAWGLRQEGPEHKPGPSEPSSVQLEEQEGPNQGLDLATGQAEAREHDQRLEGTVRDPAWQKPQQKSEGALEVQVWEGPIPGESLASGVAEQEALREEVAQLRRKAEALGDELEAQARKLEAQNTEAARLSKELAQARRAEAEAHREAEAQAWEQARLREAVEAAGQELESASQEREALVEALAAAGRERRQWEREGSRLRAQSEAAEERMQVLESEGRQHLEEAERERREKEALQAELEKAVVRGKELGDRLEHLQRELEQAALERQEFLREKESQHQRYQGLEQRLEAELQAAATSKEEALMELKTRALQLEEELFQLRQGPAGLGPKKRAEPQLVETQNVRLIEVERSNAMLVAEKAALQGQLQHLEGQLGSLQGRAQELLLQSQRAQEHSSRLQAEKSVLEIQGQELHRKLEVLEEEVRAARQSQEETRGQQQALLRDHKALAQLQRRQEAELEGLLVRHRDLKANMRALELAHRELQGRHEQLQAQRASVEAQEVALLAERERLMQDGHRQRGLEEELRRLQSEHDRAQMLLAELSRERGELQGERGELRGRLARLELERAQLEMQSQQLRESNQQLDLSACRLTTQCELLTQLRSAQEEENRQLLAEVQALSRENRELLERSLESRDHLHREQREYLDQLNALRREKQKLVEKIMDQYRVLEPVPLPRTKKGSWLADKVKRLMRPRREGGPPGGLRLGADGAGSTESLGGPPETELPEGREADGTGSPSPAPMRRAQSSLCLRDETLAGGQRRKLSSRFPVGRSSESFSPGDTPRQRFRQRHPGPLGAPVSHSKGPGVGWENSAETLQEHETDANREGPEVQEPEKRPLTPSLSQ

SEQ ID NO: 2115 - protein, 139 aa, Homo sapiens
MPCAARSRSSWRRSWTNTACWSLCPCPGPRSPSPAPMRRAQSSLCLRDETLAGGQRRKLSSRFPVGRSSESFSPGDTPRQRFRQRHPGPLGAPVSHSKGPGVGWENSAETLQEHETDANREGPEVQEPEKRPLTPSLSQ

SEQ ID NO: 2116 - protein, 122 aa, Homo sapiens
EDEEEEKEERKRGPMETFEDLWQRHLENGGDLQKRVAEKASDKETAQFQAEEKGVRVLGGDRSLWQGAERGGGERREDLPHHHHHHHQPEAEPRQEKEEASEREEKEVEQLEHLRDELKKDC

SEQ ID NO: 2117 - protein, 266 aa, Homo sapiens
MPPRGPASELLLLRLLLLGAATAAPLAPRPSKEELTRCLAEVVTEVLTVGQVQRGPCTALLHKELCGTEPHGCASTEEKGLLLGDFKKQEAGKMRSSQEVRDEEEEEVAERTHKSEVQEQAIRMQGHRQLHQEEDEEEEKEERKRGPMETFEDLWQRHLENGGDLQKRVAEKASDKETAQFQAEEKGVRVLGGDRSLWQGAERGGGERREDLPHHHHHHHQPEAEPRQEKEEASEREEKEVEQLEHLRDELKKVTETLGEQLRREG

SEQ ID NO: 2118 - protein, 115 aa, Homo sapiens
MNSGVCLCVLMAVLAAGALTQPVPPADPAGSGLQRAEEAPRRQLRVSQRTDGESRAHLGALLARYIQQARKAPSGRMSIVKNLQNLDPSHRISDRDYMGWMDFGRRSAEEYEYPS

SEQ ID NO: 2119 - protein, 115 aa, Homo sapiens; identical to SEQ ID NO: 2118

SEQ ID NO: 2120 - protein, 115 aa, Homo sapiens; identical to SEQ ID NO: 2118

SEQ ID NO: 2121 - protein, 96 aa, Homo sapiens
MQIITTALVCLLLAGMWPEDVDSKSMQVPFSRCCFSFAEQEIPLRAILCYRNTSSICSNEGLIFKLKRGKEACALDTVGWVQRHRKMLRHCPSKRK

SEQ ID NO: 2122 - protein, 97 aa, Homo sapiens
MKVSAALLWLLLIAAAFSPQGLAGPASVPTTCCFNLANRKIPLQRLESYRRITSGKCPQKAVIFKTKLAKDICADPKKKWVQDSMKYLDQKSPTPKP

SEQ ID NO: 2123 - protein, 98 aa, Homo sapiens
MKVSAVLLCLLLMTAAFNPQGLAQPDALNVPSTCCFTFSSKKISLQRLKSYVITTSRCPQKAVIFRTKLGKEICADPKEKWVQNYMKHLGRKAHTLKT

SEQ ID NO: 2124 - protein, 63 aa, Homo sapiens
  VARIANT 1: note = misc_feature - Xaa can be any naturally occurring amino acid
XVPSTCCFTFSSKKISLQRLKSYVITTSSFRTKLGKEICADPKEKWVQNYMKHLGRKAHTLKT

SEQ ID NO: 2125 - protein, 109 aa, Homo sapiens
MKISVAAIPFFLLITIALGTKTESSSQTGGKPKVVKIQLKLVGGPYHPSECCFTYTTYKIPRQRIMDYYETNSQCSKPGIVFITKRGHSVCTNPSDKWVQDYIKDMKEN

SEQ ID NO: 2126 - protein, 65 aa, Homo sapiens
MKISVAAIPFFLLITIALGTKTESSSRGPYHPSECCFTYTTYKIPRQRIMDYYETNSQCSKPGIV

SEQ ID NO: 2127 - protein, 93 aa, Homo sapiens
MKISVAAIPFFLLITIALGTKTESSSRGPYHPSECCFTYTTYKIPRQRIMDYYETNSQCSKPGIVFITKRGHSVCTNPSDKWVQDYIKDMKEN

SEQ ID NO: 2128 - protein, 115 aa, Homo sapiens
MRKAYSPLQVLRGCLLLPSLLHALSLQEQPMVWPLTRGPSSASDALSSGGPYHPSECCFTYTTYKIPRQRIMDYYETNSQCSKPGIVFITKRGHSVCTNPSDKWVQDYIKDMKEN

SEQ ID NO: 2129 - protein, 113 aa, Homo sapiens
MKVSVAALSCLMLVAVLGSQAQFTNDAETELMMSKLPLENPVVLNSFHFAADCCTSYISQSIPCSLMKSYFETSSECSKPGVIFLTKKGRQVCAKPSGPGVQDCMKKLKPYSI

SEQ ID NO: 2130 - protein, 61 aa, Homo sapiens
  VARIANT 1: note = misc_feature - Xaa can be any naturally occurring amino acid
XCTSYISQSIPCSLMKSYFETSSECSKPGVIFLTKKGRQVCAKPSGPGVQDCMKKLKPYSI

SEQ ID NO: 2131 - protein, 120 aa, Homo sapiens
MKVSEAALSLLVLILIITSASRSQPKVPEWVNTPSTCCLKYYEKVLPRRLVVGYRKALNCHLPAIIFVTKRNREVCTNPNDDWVQEYIKDPNLPLLPTRNLSTVKIITAKNGQPQLLNSQ

SEQ ID NO: 2132 - protein, 53 aa, Homo sapiens
MKVSEAALSLLVLILIITSASRSQPSWSAVSRSRLTTTSASRVQVILLPQPPE

SEQ ID NO: 2133 - protein, 95 aa, Homo sapiens
  VARIANT 1: note = misc_feature - Xaa can be any naturally occurring amino acid
XVPEWVNTPSTCCLKYYEKVLPRRLVVGYRKALNCHLPAIIFVTKRNREVCTNPNDDWVQEYIKDPNLPLLPTRNLSTVKIITAKNGQPQLLNSQ

SEQ ID NO: 2134 - protein, 94 aa, Homo sapiens
MAPLKMLALVTLLLGASLQHIHAARGTNVGRECCLEYFKGAIPLRKLKTWYQTSEDCSRDAIVFVTVQGRAICSDPNNKRVKNAVKYLQSLERS

SEQ ID NO: 2135 - protein, 94 aa, Homo sapiens; identical to SEQ ID NO: 2134

SEQ ID NO: 2136 - protein, 89 aa, Homo sapiens
MKGLAAALLVLVCTMALCSCAQVGTNKELCCLVYTSWQIPQKFIVDYSETSPQCPKPGVILLTKRGRQICADPNKKWVQKYISDLKLNA

SEQ ID NO: 2137 - protein, 104 aa, Homo sapiens
MALLLALSLLVLWTSPAPTLSGTNDAEDCCLSVTQKPIPGYIVRNFHYLLIKDGCRVPAVVFTTLRGRQLCAPPDQPWVERIIQRLQRTSAKASLALPGPVSSL

SEQ ID NO: 2138 - protein, 98 aa, Homo sapiens
MALLLALSLLVLWTSPAPTLSGTNDAEDCCLSVTQKPIPGYIVRNFHYLLIKDGCRVPAVVFTTLRGRQLCAPPDQPWVERIIQRLQRTSAKMKRRSS

SEQ ID NO: 2139 - protein, 99 aa, Homo sapiens
MKVSAALLCLLLIAATFIPQGLAQPDAINAPVTCCYNFTNRKISVQRLASYRRITSSKCPKEAVIFKTIVAKEICADPKQKWVQDSMDHLDKQTQTPKT

SEQ ID NO: 2140 - protein, 65 aa, Homo sapiens
MKVSAALLCLLLIAATFIPQGLAQPDAINAPVTCCYNFTNRKISVQRLASYRRITSSKCPKEAVM

SEQ ID NO: 2141 - protein, 25 aa, Homo sapiens
MCCTKSLLLAALMSVLLLHLCGESE

SEQ ID NO: 2142 - protein, 96 aa, Homo sapiens
MCCTKSLLLAALMSVLLLHLCGESEAASNFDCCLGYTDRILHPKFIVGFTRQLANEGCDINAIIFHTKKKLSVCANPKQTWVKYIVRLLSKKVKNM

SEQ ID NO: 2143 - protein, 95 aa, Homo sapiens
MCCTKSLLLAALMSVLLLHLCGESEASNFDCCLGYTDRILHPKFIVGFTRQLANEGCDINAIIFHTKKKLSVCANPKQTWVKYIVRLLSKKVKNM

SEQ ID NO: 2144 - protein, 124 aa, Homo sapiens
MAQSLALSLLILVLAFGIPRTQGSDGGAQDCCLKYSQRKIPAKVVRSYRKQEPSLGCSIPAILFLPRKRSQAELCADPKELWVQQLMQHLDKTPSPQKPAQGCRKDRGASKTGKKGKGSKGCKR

SEQ ID NO: 2145 - protein, 134 aa, Homo sapiens
MAQSLALSLLILVLAFGIPRTQGSDGGAQDCCLKYSQRKIPAKVVRSYRKQEPSLGCSIPAILFLPRKRSQAELCADPKELWVQQLMQHLDKTPSPQKPAQGCRKDRGASKTGKKGKGSKGCKRTERSQTPKGP

SEQ ID NO: 2146 - protein, 93 aa, Homo sapiens
MDRLQTALLVVLVLLAVALQATEAGPYGANMEDSVCCRDYVRYRLPLRVVKHFYWTSDSCPRPGVVLLTFRDKEICADPRVPWVKMILNKLSQ

SEQ ID NO: 2147 - protein, 13 aa, Homo sapiens
FETNSECSKPGVM

SEQ ID NO: 2148 - protein, 137 aa, Homo sapiens
MKVSVAALSCLMLVTALGSQARVTKDAETEFMMSKLPLENPVLLDMLWRRKIGPQMTLSHAAGFHATSADCCISYTPRSIPCSLLESYFETNSECSKPGVIFLTKKGRRFCANPSDKQVQVCMRMLKLDTRIKTRKN

SEQ ID NO: 2149 - protein, 120 aa, Homo sapiens
MKVSVAALSCLMLVTALGSQARVTKDAETEFMMSKLPLENPVLLDRFHATSADCCISYTPRSIPCSLLESYFETNSECSKPGVIFLTKKGRRFCANPSDKQVQVCMRMLKLDTRIKTRKN

SEQ ID NO: 2150 - protein, 119 aa, Homo sapiens
MAGLMTIVTSLLFLGVCAHHIIPTGSVVIPSPCCMFFVSKRIPENRVVSYQLSSRSTCLKAGVIFTTKKGQQFCGDPKQEWVQRYMKNLDAKQKKASPRARAVAVKGPVQRYPGNQTTC

SEQ ID NO: 2151 - protein, 119 aa, Homo sapiens; identical to SEQ ID NO: 2150

SEQ ID NO: 2152 - protein, 150 aa, Homo sapiens
MNLWLLACLVAGFLGAWAPAVHTQGVFEDCCLAYHYPIGWAVLRRAWTYRIQEVSGSCNLPAAIFYLPKRHRKVCGNPKSREVQRAMKLLDARNKVFAKLHHNTQTFQAGPHAVKKLSSGNSKLSSSKFSNPISSSKRNVSLLISANSGK

SEQ ID NO: 2153 - protein, 150 aa, Homo sapiens
MNLWLLACLVAGFLGAWAPAVHTQGVFEDCCLAYHYPIGWAVLRRAWTYRIQEVSGSCNLPAAIFYLPKRHRKVCGNPKSREVQRAMKLLDARNKVFAKLHHNTQTFQAGPHAVKKLSSGNSKLSSSKFSNPISSSKRNVSLLISANSGL

SEQ ID NO: 2154 - protein, 149 aa, Homo sapiens
MNLWLLACLVAGFLGAWAPAVHTQGVFEDCCLAYHYPIGWAVLRRAWTYRIQEVSGSCNLPAAIFYLPKRHRKVCGNPKSREVQRAMKLLDARNKVFAKLHHNTQTFQGPHAVKKLSSGNSKLSSSKFSNPISSSKRNVSLLISANSGL

SEQ ID NO: 2155 - protein, 84 aa, Homo sapiens
MNLWLLACLVAGFLGAWAPAVHTQGVFEDCCLAYHYPIGWAVLRRAWTYRIQEVSGSCNLPAAIRPSCCKEVEFWKLQVIIVQV

SEQ ID NO: 2156 - protein, 94 aa, Homo sapiens
MMGLSLASAVLLASLLSLHLGTATRGSDISKTCCFQYSHKPLPWTWVRSYEFTSNSCSQRAVIFTTKRGKKVCTHPRKKWVQKYISLLKTPKQL

SEQ ID NO: 2157 - protein, 94 aa, Homo sapiens; identical to SEQ ID NO: 2156

SEQ ID NO: 2158 - protein, 112 aa, Homo sapiens
MKGPPTFCSLLLLSLLLSPDPTAAFLLPPSTACCTQLYRKPLSDKLLRKVIQVELQEADGDCHLQAFVLHLAQRSICIHPQNPSLSQWFEHQERKLHGTLPKLNFGMLRKMG

SEQ ID NO: 2159 - protein, 80 aa, Homo sapiens
MCRIQRADGDCDLAAVILHVKRRRICVSPHNHTVKQWMKVQAAKKNGKGNVCHRKKHHGKRNSNRAHQGKHETYGHKTPY

SEQ ID NO: 2160 - protein, 127 aa, Homo sapiens
MQQRGLAIVALAVCAALHASEAILPIASSCCTEVSHHISRRLLERVNMCRIQRADGDCDLAAVILHVKRRRICVSPHNHTVKQWMKVQAAKKNGKGNVCHRKKHHGKRNSNRAHQGKHETYGHKTPY

SEQ ID NO: 2161 - protein, 127 aa, Homo sapiens; identical to SEQ ID NO: 2160

SEQ ID NO: 2162 - protein, 92 aa, Homo sapiens
MQVSTAALAVLLCTMALCNQFSASLAADTPTACCFSYTSRQIPQNFIADYFETSSQCSKPGVIFLTKRSRQVCADPSEEWVQKYVSDLELSA

SEQ ID NO: 2163 - protein, 93 aa, Homo sapiens
MQVSTAALAVLLCTMALCNQVLSAPLAADTPTACCFSYTSRQIPQNFIADYFETSSQCSKPSVIFLTKRGRQVCADPSEEWVQKYVSDLELSA

SEQ ID NO: 2164 - protein, 92 aa, Homo sapiens
MKLCVTVLSLLMLVAAFCSPALSAPMGSDPPTACCFSYTARKLPRNFVVDYYETSSLCSQPAVVFQTKRSKQVCADPSESWVQEYVYDLELN

SEQ ID NO: 2165 - protein, 52 aa, Homo sapiens
MKLCVTVLSLLMLVAAFCSPALSAPNSKPKEASKSVLIPVNPGSRSTCMTWN

SEQ ID NO: 2166 - protein, 47 aa, Homo sapiens
MKLCVTVLSLLVLVAAFCSLALSAPKASKSALTPVSPGSRSTCMTWN

SEQ ID NO: 2167 - protein, 64 aa, Homo sapiens
MKLCVTVLSLLVLVAAFCSLALSAPMGSDPPTACCFSYTARKLPRNFVVDYYETSSLCSQPAVV

SEQ ID NO: 2168 - protein, 64 aa, Homo sapiens; identical to SEQ ID NO: 2167

SEQ ID NO: 2169 - protein, 96 aa, Homo sapiens
MKLCVTVLSLLVLVAAFCSLALSAPMGSDPPTACCFSYTARKLPRNFVVDYYETSSLCSQPAVVAAPGRIPSTRAAPHGPWSGRGRCLPQARDKAR

SEQ ID NO: 2170 - protein, 86 aa, Homo sapiens
MKLCVTVLSLLVLVAAFCSLALSAPMGSDPPTACCFSYTARKLPRNFVVDYYETSSLCSQPAVVAAPHGPWSGRGRCLPQARDKAR

SEQ ID NO: 2171 - protein, 103 aa, Homo sapiens
MKLCVTVLSLLVLVAAFCSLALSAPMGSDPPTACCFSYTARKLPRNFVVDYYETSSLCSQPAVVEWKLQGVCFQCCSGKDPIHQSCPTWTMVRQRKMPTTGKG

SEQ ID NO: 2172 - protein, 92 aa, Homo sapiens
MKLCVTVLSLLVLVAAFCSLALSAPMGSDPPTACCFSYTARKLPRNFVVDYYETSSLCSQPAVVFQTKRGKQVCADPSESWVQEYVYDLELN

SEQ ID NO: 2173 - protein, 87 aa, Homo sapiens
MKLCVTVLSLLVLVAAFCSLALSAPMGSDPPTACCFSYTARKLPRNFVVDYYETSSLCSQPAVVGKQVCADPSESWVQEYVYDLELN

SEQ ID NO: 2174 - protein, 103 aa, Homo sapiens
MKLCVTVLSLLVLVAAFCSLALSAPMGSDPPTACCFSYTARKLPRNFVVDYYETSSLCSQPAVVYRESASSAAPGRIPSTRAAPHGPWSGRGRCLPQARDKAR

SEQ ID NO: 2175 - protein, 68 aa, Homo sapiens
MKLCVTVLSLLVLVAAFCSLALSAPTKSSEWKLQGVCFQCCSGKDPIHQSCPTWTMVRQRKMPTTGKG

SEQ ID NO: 2176 - protein, 91 aa, Homo sapiens
MKVSAAALAVILIATALCAPASASPYSSDTTPCCFAYIARPLPRAHIKEYFYTSGKCSNPAVVFVTRKNRQVCANPEKKWVREYINSLEMS

SEQ ID NO: 2177 - protein, 91 aa, Homo sapiens; identical to SEQ ID NO: 2176

SEQ ID NO: 2178 - protein, 150 aa, Homo sapiens
  VARIANT 1: note = misc_feature - Xaa can be any naturally occurring amino acid
XAALAVILIATALCAPASASPYSSDTTPCCFAYIARPLPRAHIKEYFYTSGKCSNPAVVHRSRMPKREGQQVWQDFLYDSRLNKGKLCHPKEPPSVCQPREEMGSGVHQLFGDELGWRVLEPELTQICLFLLALVLAWEASPHYPTPPAP

SEQ ID NO: 2179 - protein, 47 aa, Homo sapiens
MKASAALLCLLLTAAAFSPQGLAQPASRPNWTRRSVLTPHRSGSRTL

SEQ ID NO: 2180 - protein, 81 aa, Homo sapiens
MKASAALLCLLLTAAAFSPQGLAQPERPRTHPQWTFLLVVSLQLGLILQLPAATDLSIRKSLSRGWRATEGPPVATVPGKL

SEQ ID NO: 2181 - protein, 99 aa, Homo sapiens
MKASAALLCLLLTAAAFSPQGLAQPVGINTSTTCCYRFINKKIPKQRLESYRRTTSSHCPREAVIFKTKLDKEICADPTQKWVQDFMKHLDKKTQTPKL

SEQ ID NO: 2182 - protein, 99 aa, Homo sapiens
MKVSAALLCLLLMAATFSPQGLAQPDSVSIPITCCFNVINRKIPIQRLESYTRITNIQCPKEAVIFKTKRGKEVCADPKERWVRDSMKHLDQIFQNLKP

SEQ ID NO: 2183 - protein, 68 aa, Homo sapiens [sequence omitted]

SEQ ID NO: 2184 - protein, 4 aa, Homo sapiens
MSLC

SEQ ID NO: 2185 - protein, 154 aa, Homo sapiens
MSLCEDMLLCNYRKCRIKLSGYAWVTACSHIFCDQHGSGEFSRSPAICPACNSTLSGKLDIVRTELSPSEEYKAMVLAGLRPEIVLDISSRALAFWTYQVHQERLYQEYNFSKAEGHLKQMEKIYTQQIQSKDVELTSMKGEVTSMKKVLEEYK

SEQ ID NO: 2186 - protein, 277 aa, Homo sapiens
MSLCEDMLLCNYRKCRIKLSGYAWVTACSHIFCDQHGSGEFSRSPAICPACNSTLSGKLDIVRTELSPSEEYKAMVLAGLRPEIVLDISSRALAFWTYQVHQERLYQEYNFSKAEGHLKQMEKIYTQQIQSKDVELTSMKGEVTSMKKVLEEYKKKFSDISEKLMERNRQYQKLQGLYDSLRLRNITIANHEGTLEPSMIAQSGVLGFPLGNNSKFPLDNTPVRNRGDGDGDFQFRPFFAGSPTAPEPSNSFFSFVSPSRELEQQQVSSRAFKVKRI

SEQ ID NO: 2187 - protein, 277 aa, Homo sapiens; identical to SEQ ID NO: 2186

SEQ ID NO: 2188 - protein, 277 aa, Homo sapiens; identical to SEQ ID NO: 2186

SEQ ID NO: 2189 - protein, 277 aa, Homo sapiens; identical to SEQ ID NO: 2186

SEQ ID NO: 2190 - protein, 277 aa, Homo sapiens; identical to SEQ ID NO: 2186

SEQ ID NO: 2191 - protein, 277 aa, Homo sapiens; identical to SEQ ID NO: 2186

SEQ ID NO: 2192 - protein, 102 aa, Homo sapiens
MSLCEDMLLCNYRKCRIKLSGYAWVTACSHIFCDQHGSGEFSRSPAICPACNSTLSGKLDIVRTELSPSEEYKAMVLAGLRPEIVLDISSRALAFWTYQYFL

SEQ ID NO: 2193 - protein, 64 aa, Homo sapiens
  VARIANT 1: note = misc_feature - Xaa can be any naturally occurring amino acid
XEFSRSPAICPACNSTLSGKLDIVRTELSPSEEYKAMVLAGLRPEIVLDISSRALAFWTYQYFL

SEQ ID NO: 2194 - protein, 31 aa, Homo sapiens
  VARIANT 1: note = misc_feature - Xaa can be any naturally occurring amino acid
XTLAPERWPSGHIRLVSNSWVQAILPPQPPE

SEQ ID NO: 2195 - protein, 526 aa, Homo sapiens
MASGPHSTATAAAAASSAAPSAGGSSSGTTTTTTTTTGGILIGDRLYSEVSLTIDHSLIPEERLSPTPSMQDGLDLPSETDLRILGCELIQAAGILLRLPQVAMATGQVLFHRFFYSKSFVKHSFEIVAMACINLASKIEEAPRRIRDVINVFHHLRQLRGKRTPSPLILDQNYINTKNQVIKAERRVLKELGFCVHVKHPHKIIVMYLQVLECERNQTLVQTAWNYMNDSLRTNVFVRFQPETIACACIYLAARALQIPLPTRPHWFLLFGTTEEEIQEICIETLRLYTRKKPNYELLEKEVEKRKVALQEAKLKAKGLNPDGTPALSTLGGFSPASKPSSPREVKAEEKSPISINVKTVKKEPEDRQQASKSPYNGVRKDSKRSRNSRSASRSRSRTRSRSRSHTPRRHYNNRRSRSGTYSSRSRSRSRSHSESPRRHHNHGSPHLKAKHTRDDLKSSNRHGHKRKKSRSRSQSKSRDHSDAAKKHRHERGHHRDRRERSRSFERSHKSKHHGGSRSGHGRHRR

SEQ ID NO: 2196 - protein, 428 aa, Homo sapiens
MASGPHSTATAAAAASSAAPSAGGSSSGTTTTTTTTTGGILIGDRLYSEVSLTIDHSLIPEERLSPTPSMQDGLDLPSETDLRILGCELIQAAGILLRLPQVAMATGQVLFHRFFYSKSFVKHSFEIVAMACINLASKIEEAPRRIRDVINVFHHLRQLRGKRTPSPLILDQNYINTKNQVIKAERRVLKELGFCVHVKHPHKIIVMYLQVLECERNQTLVQTAWNYMNDSLRTNVFVRFQPETIACACIYLAARALQIPLPTRPHWFLLFGTTEEEIQEICIETLRLYTRKKPNYELLEKEVEKRKVALQEAKLKAKGLNPDGTPALSTLGGFSPASKPSSPREVKAEEKSPISINVKTVKKEPEDRQQASKSPYNGVRKDSKRSRNSRSASRSRSRTRSRSRSHTPRRQDEVLLRCPGRSRTPGLK

SEQ ID NO: 2197 - protein, 232 aa, Homo sapiens
MASGPHSTATAAAAASSAAPSAGGSSSGTTTTTTTTTGGILIGDRLYSEVSLTIDHSLIPEERLSPTPSMQDGLDLPSETDLRILGCELIQAAGILLRLPQVAMATGQVLFHRFFYSKSFVKHSFEIVAMACINLASKIEEAPRRIRDVINVFHHLRQLRGKRTPSPLILDQNYINTKNQVIKAERRVLKELGFCVHVKHPHKIIVMYLQVLECERNQTLVQTAWVVHDGKS

SEQ ID NO: 2198 - protein, 172 aa, Homo sapiens
MASGPHSTATAAAAASSAAPSAGGSSSGTTTTTTTTTGGILIGDRLYSEVSLTIDHSLIPEERLSPTPSMQDGLDLPSETDLRILGCELIQAAGILLRLPQVAMATGQVLFHRFFYSKSFVKHSFEIVAMACINLASKIEEAPRRIRDVINVFHHLRQLRGKSDQLHLPKPG

SEQ ID NO: 2199 - protein, 172 aa, Homo sapiens; identical to SEQ ID NO: 2198

SEQ ID NO: 2200 - protein, 172 aa, Homo sapiens; identical to SEQ ID NO: 2198

SEQ ID NO: 2201 - protein, 172 aa, Homo sapiens; identical to SEQ ID NO: 2198

SEQ ID NO: 2202 - protein, 172 aa, Homo sapiens; identical to SEQ ID NO: 2198

SEQ ID NO: 2203 - protein, 59 aa, Homo sapiens
  VARIANT 1: note = misc_feature - Xaa can be any naturally occurring amino acid
XRKKPNYELLEKEVEKRKVALQEAKLKAKGLNPDGTPALSTLGGFSPASKPCKMYLELK

SEQ ID NO: 2204 - protein, 520 aa, Homo sapiens
MAAAAAAAGAAGSAAPAAAAGAPGSGGAPSGSQGVLIGDRLYSGVLITLENCLLPDDKLRFTPSMSSGLDTDTETDLRVVGCELIQAAGILLRLPQVAMATGQVLFQRFFYTKSFVKHSMEHVSMACVHLASKIEEAPRRIRDVINVFHRLRQLRDKKKPVPLLLDQDYVNLKNQIIKAERRVLKELGFCVHVKHPHKIIVMYLQVLECERNQHLVQTSWNYMNDSLRTDVFVRFQPESIACACIYLAARTLEIPLPNRPHWFLLFGATEEEIQEICLKILQLYARKKVDLTHLEGEVEKRKHAIEEAKAQARGLLPGGTQVLDGTSGFSPAPKLVESPKEGKGSKPSPLSVKNTKRRLEGAKKAKADSPVNGLPKGRESRSRSRSREQSYSRSPSRSASPKRRKSDSGSTSGGSKSQSRSRSRSDSPPRQAPRSAPYKGSEIRGSRKSKDCKYPQKPHKSRSRSSSRSRSRSRERADNPGKYKKKSHYYRDQRRERSRSYERTGRRYERDHPGHSRHRR

SEQ ID NO: 2205 - protein, 236 aa, Homo sapiens
MAAAAAAAGAAGSAAPAAAAGAPGSGGAPSGSQGVLIGDRLYSGVLITLENCLLPDDKLRFTPSMSSGLDTDTETDLRVVGCELIQAAGILLRLPQVAMATGQVLFQRFFYTKSFVKHSMEHVSMACVHLASKIEEAPRRIRDVINVFHRLRQLRDKKKPVPLLLDQDYVNLKNQIIKAERRVLKELGFCVHVKHPHKIIVMYLQVLECERNQHLVQTSWVASEDPLLKWDSWQRL

SEQ ID NO: 2206 - protein, 227 aa, Homo sapiens
MAAAAAAAGAAGSAAPAAAAGAPGSGGAPSGSQGVLIGDRLYSGVLITLENCLLPDDKLRFTPSMSSGLDTDTETDLRVVGCELIQAAGILLRLPQVAMATGQVLFQRFFYTKSFVKHSMEHVSMACVHLASKIEEAPRRIRDVINVFHRLRQLRDKKKPVPLLLDQDYVNLKNQIIKAERRVLKELGFCVHVKHPHKIIVMYLQVLECERNQHLVQTSWVASEGIT

SEQ ID NO: 2207 - protein, 226 aa, Homo sapiens
MAAAAAAAGAAGSAAPAAAAGAPGSGGAPSGSQGVLIGDRLYSGVLITLENCLLPDDKLRFTPSMSSGLDTDTETDLRVVGCELIQAAGILLRLPQVAMATGQVLFQRFFYTKSFVKHSMEHVSMACVHLASKIEEAPRRIRDVINVFHRLRQLRDKKKPVPLLLDQDYVNLKNQIIKAERRVLKELGFCVHVKHPHKIIVMYLQVLECERNQHLVQTSWVASEGK

SEQ ID NO: 2208 - protein, 180 aa, Homo sapiens
MAAAAAAAGAAGSAAPAAAAGAPGSGGAPSGSQGVLIGDRLYSGVLITLENCLLPDDKLRFTPSMSSGLDTDTETDLRVVGCELIQAAGILLRLPQVRARPRASGPGGHGYRAGVVPAVLLYQVLREALHGACVNGLCPPGFQDRRGPKTHTGRHQCVSPPSTAERQKEARASTTGSRLC

SEQ ID NO: 2209 - protein, 86 aa, Homo sapiens
MATGQVLFQRFFYTKSFVKHSMEHVSMACVHLASKIEEAPRRIRDVINVFHRLRQLRDKKKPVPLLLDQDYVNLKNQIIKAERRVL

SEQ ID NO: 2210 - protein, 347 aa, Homo sapiens [sequence omitted]

SEQ ID NO: 2211 - protein, 46 aa, Homo sapiens
  VARIANT 1: note = misc_feature - Xaa can be any naturally occurring amino acid
XEEAPRRIRDVINVFHRLRQLRDKKPCALSLAGSPCLYYWIKIMLI

SEQ ID NO: 2212 - protein, 55 aa, Homo sapiens
MERASCLLLLLLPLVHVSATTPEPCELDDEDFRCVCNFSEPQPDWSEAFQCVSAV

SEQ ID NO: 2213 - protein, 81 aa, Homo sapiens
MERASCLLLLLLPLVHVSATTPEPCELDDEDFRCVCNFSEPQPDWSEAFQCVSAVEVEIHAGGLNLEPFLKRVDADADPRQ

SEQ ID NO: 2214 - protein, 213 aa, Homo sapiens
MERASCLLLLLLPLVHVSATTPEPCELDDEDFRCVCNFSEPQPDWSEAFQCVSAVEVEIHAGGLNLEPFLKRVDADADPRQYADTVKALRVRRLTVGAAQVPAQLLVGALRVLAYSRLKELTLEDLKITGTMPPLPLEATGLALSSLRLRNVSWATGRSWLAELQQWLKPGLKVLSIAQAHSPAFSCEQVRAFPALTSLDLSDNPGLGERGLM

SEQ ID NO: 2215 - protein, 375 aa, Homo sapiens
MERASCLLLLLLPLVHVSATTPEPCELDDEDFRCVCNFSEPQPDWSEAFQCVSAVEVEIHAGGLNLEPFLKRVDADADPRQYADTVKALRVRRLTVGAAQVPAQLLVGALRVLAYSRLKELTLEDLKITGTMPPLPLEATGLALSSLRLRNVSWATGRSWLAELQQWLKPGLKVLSIAQAHSPAFSCEQVRAFPALTSLDLSDNPGLGERGLMAALCPHKFPAIQNLALRNTGMETPTGVCAALAAAGVQPHSLDLSHNSLRATVNPSAPRCMWSSALNSLNLSFAGLEQVPKGLPAKLRVLDLSCNRLNRAPQPDELPEVDNLTLDGNPFLVPGTALPHEGSMNSGVVPACARSTLSVGVSGTLVLLQGARGFA

SEQ ID NO: 2216 - protein, 375 aa, Homo sapiens; identical to SEQ ID NO: 2215

SEQ ID NO: 2217 - protein, 72 aa, Homo sapiens
MLLEPGRGCCALAILLAIVDIQSGETGNYTVTGLKQRQHLEFSHNEGTLSSGFLQEKVWVMLVTSLVALQAL

SEQ ID NO: 2218 - protein, 125 aa, Homo sapiens
MLLEPGRGCCALAILLAIVDIQSGETGNYTVTGLKQRQHLEFSHNEGTLSSGFLQEKVWVMLVTSLVALQGMSKRAVSTPSNEGAIIFLPPWLFSRRRRLERMSRGREKCYSSPGYPQESSNQFH

SEQ ID NO: 2219 - protein, 181 aa, Homo sapiens
MLLEPGRGCCALAILLAIVDIQSGGCINITSSASQEGTRLNLICTVWHKKEEAEGFVVFLCKDRSGDCSPETSLKQLRLKRDPGIDGVGEISSQLMFTISQVTPLHSGTYQCCARSQKSGIRLQGHFFSILFTETGNYTVTGLKQRQHLEFSHNEGTLSSGFLQEKVWVMLVTSLVALQAL

SEQ ID NO: 2220 - protein, 181 aa, Homo sapiens; identical to SEQ ID NO: 2219

SEQ ID NO: 2221 - protein, 234 aa, Homo sapiens
MLLEPGRGCCALAILLAIVDIQSGGCINITSSASQEGTRLNLICTVWHKKEEAEGFVVFLCKDRSGDCSPETSLKQLRLKRDPGIDGVGEISSQLMFTISQVTPLHSGTYQCCARSQKSGIRLQGHFFSILFTETGNYTVTGLKQRQHLEFSHNEGTLSSGFLQEKVWVMLVTSLVALQGMSKRAVSTPSNEGAIIFLPPWLFSRRRRLERMSRGREKCYSSPGYPQESSNQFH

SEQ ID NO: 2222 - protein, 163 aa, Homo sapiens
MRKGRKVPMYVPGVLRTYPKAKLEETCEGRNSCVSCFNVSVVNTTCFWIECKDESYCSHNSTVSDCQVGNTTDFCSVSTATPVPTANSTAKPTVQPSPSTTSKTVTTSGTTNNTVTPTSQPVRKSTFDAASFIGGIVLVLGVQAVIFFLYKFCKSKERNYHTL

SEQ ID NO: 2223 - protein, 184 aa, Homo sapiens
MSRLSRSLLWAATCLGVLCVLSADKNTTQHPNVTTLAPISNVTSAPVTSLPLVTTPAPETCEGRNSCVSCFNVSVVNTTCFWIECKDESYCSHNSTVSDCQVGNTTDFCSAKPTVQPSPSTTSKTVTTSGTTNNTVTPTSQPVRKSTFDAASFIGGIVLVLGVQAVIFFLYKFCKSKERNYHTL

SEQ ID NO: 2224 - protein, 157 aa, Homo sapiens
MSRLSRSLLWAATCLGVLCVLSADKNTTQHPNVTTLAPISNVTSAPVTSLPLVTTPAPETCEGRNSCVSCFNVSVVNTTCFWIECKDESYCSHNSTVSDCQVGNTTDFCSVSTATPVPTANSTAKPTVQPSPSTTSKTVTTSEIRCHTRNYIPDLKK

SEQ ID NO: 2225 - protein, 189 aa, Homo sapiens
MSRLSRSLLWAATCLGVLCVLSADKNTTQHPNVTTLAPISNVTSAPVTSLPLVTTPAPETCEGRNSCVSCFNVSVVNTTCFWIECKDESYCSHNSTVSDCQVGNTTDFCSVSTATPVPTANSTAKPTVQPSPSTTSKTVTTSGTTNNTVTPTSQPVRKSTFDAASFIGGIVLVLEIRCHTRNYIPDLKK

SEQ ID NO: 2226 - protein, 197 aa, Homo sapiens
MSRLSRSLLWAATCLGVLCVLSADKNTTQHPNVTTLAPISNVTSAPVTSLPLVTTPAPETCEGRNSCVSCFNVSVVNTTCFWIECKDESYCSHNSTVSDCQVGNTTDFCSVSTATPVPTANSTAKPTVQPSPSTTSKTVTTSGTTNNTVTPTSQPVRKSTFDAASFIGGIVLVLGVQAVIFFLYKFCKSKERNYHTL

SEQ ID NO: 2227 - protein, 178 aa, Homo sapiens
MSRLSRSLLWAATCLGVLCVLSADKNTTQHPNVTTLAPISNVTSAPVTSLPLVTTPAPETCEGRNSCVSCFNVSVVNTTCFWIECKDESYCSHNSTVSDCQVGNTTDFCSVSTATPVPTANSTGTTNNTVTPTSQPVRKSTFDAASFIGGIVLVLGVQAVIFFLYKFCKSKERNYHTL

SEQ ID NO: 2228 - protein, 437 aa, Homo sapiens
MSAVLLLALLGFILPLPGVQALLCQFGTVQHVWKVSDLPRQWTPKNTSCDSGLGCQDTLMLIESGPQVSLVLSKGCTEAKDQEPRVTEHRMGPGLSLISYTFVCRQEDFCNNLVNSLPLWAPQPPADPGSLRCPVCLSMEGCLEGTTEEICPKGTTHCYDGLLRLRGGGIFSNLRVQGCMPQPVCNLLNGTQEIGPVGMTENCDMKDFLTCHRGTTIMTHGNLAQEPTDWTTSNTEMCEVGQVCQETLLLLDVGLTSTLVGTKGCSTVGAQNSQKTTIHSAPPGVLVASYTHFCSSDLCNSASSSSVLLNSLPPQAAPVPGDRQCPTCVQPLGTCSSGSPRMTCPRGATHCYDGYIHLSGGGLSTKMSIQGCVAQPSSFLLNHTRQIGIFSAREKRDVQPPASQHEGGGAEGLESLTWGVGLALAPALWWGVVCPSC

SEQ ID NO: 2229 - protein, 145 aa, Homo sapiens
MSAVLLLALLGFILPLPGVQALLCQFGTVQHVWKVSDLPRQWTPKNTSCDSGLGCQDTLMLIESGPQVSLVLSKGCTEAKDQEPRVTEHRMGPGLSLISYTFVCRQEDFCNNLVNSLPLWAPQPPADPMMGAAEGPFGKAEQVDS

SEQ ID NO: 2230 - protein, 139 aa, Homo sapiens
MSAVLLLALLGFILPLPGVQALLCQFGTVQHVWKVSDLPRQWTPKNTSCDSGLGCQDTLMLIESGPQVSLVLSKGCTEAKDQEPRVTEHRMGPGLSLISYTFVCRQEDFCNNLVNSLPLWAPQPPAGACGRVGRRGRGC

SEQ ID NO: 2231 - protein, 286 aa, Homo sapiens
MLLLFLLFEGLCCPGENTAAPQALQSYHLAAEEQLSFRMLQTSSFANHSWAHSEGSGWLGDLQTHGWDTVLGTIRFLKPWSHGNFSKQELKNLQSLFQLYFHSFIQIVQASAGQFQLELKPEAWLSCGPSPGPGRLQLVCHVSGFYPKPVWVMWMRGEQEQRGTQRGDVLPNADETWYLRATLDVAAGEAAGLSCRVKHSSLGGHDLIIHWGGYSIFLILICLTVIVTLVILVVVDSRLKKQSPVFLMGANTQDTKNSRHQFCLAQVSWIKNRVLKKWKTRLNQLW

SEQ ID NO: 2232 - protein, 298 aa, Homo sapiens
MLLLFLLFEGLCCPGENTAAPQALQSYHLAAEEQLSFRMLQTSSFANHSWAHSEGSGWLGDLQTHGWDTVLGTIRFLKPWSHGNFSKQELKNLQSLFQLYFHSFIQIVQASAGQFQLELKPEAWLSCGPSPGPGRLQLVCHVSGFYPKPVWVMWMRGEQEQRGTQRGDVLPNADETWYLRATLDVAAGEAAGLSCRVKHSSLGGHDLIIHWGGYSIFLILICLTVIVTLVILVVVDSRLKKQSSNKNILSPHTPSPVFLMGANTQDTKNSRHQFCLAQVSWIKNRVLKKWKTRLNQLW

SEQ ID NO: 2233 - protein, 231 aa, Homo sapiens
MLLLFLLFEGLCCPGENTAAPQALQSYHLAAEEQLSFRMLQTSSFANHSWAHSEGSGWLGDLQTHGWDTVLGTIRFLKPWSHGNFSKQELKNLQSLFQLYFHSFIQIVQASAGQFQLELKPEAWLSCGPSPGPGRLQLVCHVSGFYPKPVWVMWMRGGYSIFLILICLTVIVTLVILVVVDSRLKKQSPVFLMGANTQDTKNSRHQFCLAQVSWIKNRVLKKWKTRLNQLW

SEQ ID NO: 2234 - protein, 290 aa, Homo sapiens
MLLLFLLFEGLCCPGENTAAPQALQSYHLAAEEQLSFRMLQTSSFANHSWAHSEGSGWLGDLQTHGWDTVLGTIRFLKPWSHGNFSKQELKNLQSLFQLYFHSFIQIVQASAGQFQLEYPFEIQILAGCRMNAPQIFLNMAYQGSDFLSFQGISWEPSPGAGIRAQNICKVLNRYLDIKEILQSLLGHTCPRFLAGLMEAGESELKRKVKPEAWLSCGPSPGPGRLQLVCHVSGFYPKPVWVMWMRGEQEQRGTQRGDVLPNADETWWIFHLSHPDLFDCDSYPGHIGCS

SEQ ID NO: 2235 - protein, 388 aa, Homo sapiens
MLLLFLLFEGLCCPGENTAAPQALQSYHLAAEEQLSFRMLQTSSFANHSWAHSEGSGWLGDLQTHGWDTVLGTIRFLKPWSHGNFSKQELKNLQSLFQLYFHSFIQIVQASAGQFQLEYPFEIQILAGCRMNAPQIFLNMAYQGSDFLSFQGISWEPSPGAGIRAQNICKVLNRYLDIKEILQSLLGHTCPRFLAGLMEAGESELKRKVKPEAWLSCGPSPGPGRLQLVCHVSGFYPKPVWVMWMRGEQEQRGTQRGDVLPNADETWYLRATLDVAAGEAAGLSCRVKHSSLGGHDLIIHWGGYSIFLILICLTVIVTLVILVVVDSRLKKQSSNKNILSPHTPSPVFLMGANTQDTKNSRHQFCLAQVSWIKNRVLKKWKTRLNQLW

SEQ ID NO: 2236 - protein, 376 aa, Homo sapiens
MLLLFLLFEGLCCPGENTAAPQALQSYHLAAEEQLSFRMLQTSSFANHSWAHSEGSGWLGDLQTHGWDTVLGTIRFLKPWSHGNFSKQELKNLQSLFQLYFHSFIQIVQASAGQFQLEYPFEIQILAGCRMNAPQIFLNMAYQGSDFLSFQGISWEPSPGAGIRAQNICKVLNRYLDIKEILQSLLGHTCPRFLAGLMEAGESELKRKVKPEAWLSCGPSPGPGRLQLVCHVSGFYPKPVWVMWMRGEQEQRGTQRGDVLPNADETWYLRATLDVAAGEAAGLSCRVKHSSLGGHDLIIHWGGYSIFLILICLTVIVTLVILVVVDSRLKKQSPVFLMGANTQDTKNSRHQFCLAQVSWIKNRVLKKWKTRLNQLW

SEQ ID NO: 2237 - protein, 321 aa, Homo sapiens
MLLLFLLFEGLCCPGENTAAPQALQSYHLAAEEQLSFRMLQTSSFANHSWAHSEGSGWLGDLQTHGWDTVLGTIRFLKPWSHGNFSKQELKNLQSLFQLYFHSFIQIVQASAGQFQLEYPFEIQILAGCRMNAPQIFLNMAYQGSDFLSFQGISWEPSPGAGIRAQNICKVLNRYLDIKEILQSLLGHTCPRFLAGLMEAGESELKRKVKPEAWLSCGPSPGPGRLQLVCHVSGFYPKPVWVMWMRGGYSIFLILICLTVIVTLVILVVVDSRLKKQSPVFLMGANTQDTKNSRHQFCLAQVSWIKNRVLKKWKTRLNQLW

SEQ ID NO: 2238 - protein, 289 aa, Homo sapiens
MLLLFLLFEGLCCPGENTADPFEIQILAGCRMNAPQIFLNMAYQGSDFLSFQGISWEPSPGAGIRAQNICKVLNRYLDIKEILQSLLGHTCPRFLAGLMEAGESELKRKVKPEAWLSCGPSPGPGRLQLVCHVSGFYPKPVWVMWMRGEQEQRGTQRGDVLPNADETWYLRATLDVAAGEAAGLSCRVKHSSLGGHDLIIHWGGYSIFLILICLTVIVTLVILVVVDSRLKKQSSNKNILSPHTPSPVFLMGANTQDTKNSRHQFCLAQVSWIKNRVLKKWKTRLNQLW

SEQ ID NO: 2239 - protein, 101 aa, Homo sapiens
MLLLFLLFEGLCCPGENTAVKPEAWLSCGPSPGPGRLQLVCHVSGFYPKPVWVMWMRGEQEQRGTQRGDVLPNADETWWIFHLSHPDLFDCDSYPGHIGCS

SEQ ID NO: 2240 - protein, 187 aa, Homo sapiens
MLLLFLLFEGLCCPGENTAVKPEAWLSCGPSPGPGRLQLVCHVSGFYPKPVWVMWMRGEQEQRGTQRGDVLPNADETWYLRATLDVAAGEAAGLSCRVKHSSLGGHDLIIHWGGYSIFLILICLTVIVTLVILVVVDSRLKKQSPVFLMGANTQDTKNSRHQFCLAQVSWIKNRVLKKWKTRLNQLW

SEQ ID NO: 2241 - protein, 199 aa, Homo sapiens
MLLLFLLFEGLCCPGENTAVKPEAWLSCGPSPGPGRLQLVCHVSGFYPKPVWVMWMRGEQEQRGTQRGDVLPNADETWYLRATLDVAAGEAAGLSCRVKHSSLGGHDLIIHWGGYSIFLILICLTVIVTLVILVVVDSRLKKQSSNKNILSPHTPSPVFLMGANTQDTKNSRHQFCLAQVSWIKNRVLKKWKTRLNQLW

SEQ ID NO: 2242 - protein, 132 aa, Homo sapiens
MLLLFLLFEGLCCPGENTAVKPEAWLSCGPSPGPGRLQLVCHVSGFYPKPVWVMWMRGGYSIFLILICLTVIVTLVILVVVDSRLKKQSPVFLMGANTQDTKNSRHQFCLAQVSWIKNRVLKKWKTRLNQLW

SEQ ID NO: 2243 - protein, 144 aa, Homo sapiens
MLLLFLLFEGLCCPGENTAVKPEAWLSCGPSPGPGRLQLVCHVSGFYPKPVWVMWMRGGYSIFLILICLTVIVTLVILVVVDSRLKKQSSNKNILSPHTPSPVFLMGANTQDTKNSRHQFCLAQVSWIKNRVLKKWKTRLNQLW

SEQ ID NO: 2244 - protein, 60 aa, Homo sapiens
  VARIANT 1: note = misc_feature - Xaa can be any naturally occurring amino acid
XVSGFYPKPVWVMWMRGEQEQRGTQRGDVLPNADETWWIFHLSHPDLFDCDSYPGHIGCS

SEQ ID NO: 2245 - protein, 351 aa, Homo sapiens
MSFPCKFVASFLLIFNVSSKGAVSKEITNALETWGALGQDINLDIPSFQMSDDIDDIKWEKTSDKKKIAQFRKEKETFKEKDTYKLFKNGTLKIKHLKTDDQDIYKVSIYDTKGKNVLEKIFDLKIQERVSKPKISWTCINTTLTCEVMNGTDPELNLYQDGKHLKLSQRVITHKWTTSLSAKFKCTAGNKVSKESSVEPVSCPEKGLDIYLIIGICGGGSLLMVFVALLVFYITKRKKQRSRRNDEELETRAHRVATEERGRKPHQIPASTPQNPATSQHPPPPPGHRSQAPSHRPPPPGHRVQHQPQKRPPAPSGTQVHQQKGPPLPRPRVQPKPPHGAAENSLSPSSN

SEQ ID NO: 2246 - protein, 133 aa, Homo sapiens
MSFPCKFVASFLLIFNVSSKGAVSKEITNALETWGALGQDINLDIPSFQMSDDIDDIKWEKTSDKKKIAQFRKEKETFKEKDTYKLFKNGTLKIKHLKTDDQDIYKVSIYDTKGKNVLEKIFDLKIQGKCSFP

SEQ ID NO: 2247 - protein, 294 aa, Homo sapiens
MERLTLTRTIGGPLLTATLLGKTTINDYQVIRMPFSHLSTYSLVWVMAAVVLCTAQVQVVTQDEREQLYTPASLKCSLQNAQEALIVTWQKKKAVSPENMVTFSENHGVVIQPAYKDKINITQLGLQNSTITFWNITLEDEGCYMCLFNTFGFGKISGTACLTVYVQPIVSLHYKFSEDHLNITCSATARPAPMVFWKVPRSGIENSTVTLSHPNGTTSVTSILHIKDPKNQVGKEVICQVLHLGTVTDFKQTVNKGYWFSVPLLLSIVSLVILLVLISILLYWKRHRNQDREP

SEQ ID NO: 2248 - protein, 150 aa, Homo sapiens
MERLVIRMPFSHLSTYSLVWVMAAVVLCTAQVQVVTQDEREQLYTPASLKCSLQNAQEALIVTWQKKKAVSPENMVTFSENHGVVIQPAYKDKINITQLGLQNSTITFWNITLEDEGCYMCLFNTFGFGKISGTACLTVYAHSIPSLQIL

SEQ ID NO: 2249 - protein, 269 aa, Homo sapiens
MERLVIRMPFSHLSTYSLVWVMAAVVLCTAQVQVVTQDEREQLYTPASLKCSLQNAQEALIVTWQKKKAVSPENMVTFSENHGVVIQPAYKDKINITQLGLQNSTITFWNITLEDEGCYMCLFNTFGFGKISGTACLTVYVQPIVSLHYKFSEDHLNITCSATARPAPMVFWKVPRSGIENSTVTLSHPNGTTSVTSILHIKDPKNQVGKEVICQVLHLGTVTDFKQTVNKGYWFSVPLLLSIVSLVILLVLISILLYWKRHRNQDREP

SEQ ID NO: 2250 - protein, 202 aa, Homo sapiens
MKVQVVTQDEREQLYTPASLKCSLQNAQEALIVTWQKKKAVSPENMVTFSENHGVVIQPAYKDKINITQLGLQNSTITFWNITLEDEGCYMCLFNTFGFGKISGTACLTVYVQPIVSLHYKFSEDHLNITCSATARPAPMVFWKVPRSGIENSTVTLSHPNGTTSVTSILHIKDPKNQVGKEVICQVLHLGTVTDFKQTVNK

SEQ ID NO: 2251 - protein, 62 aa, Homo sapiens
MPFSHLSTYSLVWVMAAVVLCTAQVQVVTQDEREQLYTPASLKCSLQNAQEALIVTWQKKKA

SEQ ID NO: 2252 - protein, 76 aa, Homo sapiens
MVTFSENHGVVIQPAYKDKINITQLGLQNSTITFWNITLEDEGCYMCLFNTFGFGKISGTACLTVYAHSIPSLQIL

SEQ ID NO: 2253 - protein, 195 aa, Homo sapiens
MVTFSENHGVVIQPAYKDKINITQLGLQNSTITFWNITLEDEGCYMCLFNTFGFGKISGTACLTVYVQPIVSLHYKFSEDHLNITCSATARPAPMVFWKVPRSGIENSTVTLSHPNGTTSVTSILHIKDPKNQVGKEVICQVLHLGTVTDFKQTVNKGYWFSVPLLLSIVSLVILLVLISILLYWKRHRNQDREP

SEQ ID NO: 2254 - protein, 165 aa, Homo sapiens
MLCPWRTANLGLLLILTIFLVAASSSLCMDEKQITQNYSKVLAEVNTSWPVKMATNAVLCCPPIALRNLIIITWEIILRGQPSCTKAYKKETNETKETNCTDERITWVSRPDQNSDLQIRTVAITHDGYYRCIMVTPDGNFHRGYHLQVLGKEHHILRYFTSPDL

SEQ ID NO: 2255 - protein, 325 aa, Homo sapiens
MLCPWRTANLGLLLILTIFLVAASSSLCMDEKQITQNYSKVLAEVNTSWPVKMATNAVLCCPPIALRNLIIITWEIILRGQPSCTKAYKKETNETKETNCTDERITWVSRPDQNSDLQIRTVAITHDGYYRCIMVTPDGNFHRGYHLQVLVTPEVTLFQNRNRTAVCKAVAGKPAAHISWIPEGDCATKQEYWSNGTVTVKSTCHWEVHNVSTVTCHVSHLTGNKSLYIELLPVPGAKKSAKLYIPYIILTIIILTIVGFIWLLKVNGCRKYKLNKTESTPVVEEDEMQPYASYTEKNNPLYDTTNKVKASEALQSEVDTDLHTL

SEQ ID NO: 2256 - protein, 188 aa, Homo sapiens
MLCPWRTANLGLLLILTIFLVAEAEGAAQPNNSLMLQTSKENHALASSSLCMDEKQITQNYSKVLAEVNTSWPVKMATNAVLCCPPIALRNLIIITWEIILRGQPSCTKAYKKETNETKETNCTDERITWVSRPDQNSDLQIRTVAITHDGYYRCIMVTPDGNFHRGYHLQVLGKEHHILRYFTSPDL

SEQ ID NO: 2257 - protein, 348 aa, Homo sapiens
MLCPWRTANLGLLLILTIFLVAEAEGAAQPNNSLMLQTSKENHALASSSLCMDEKQITQNYSKVLAEVNTSWPVKMATNAVLCCPPIALRNLIIITWEIILRGQPSCTKAYKKETNETKETNCTDERITWVSRPDQNSDLQIRTVAITHDGYYRCIMVTPDGNFHRGYHLQVLVTPEVTLFQNRNRTAVCKAVAGKPAAHISWIPEGDCATKQEYWSNGTVTVKSTCHWEVHNVSTVTCHVSHLTGNKSLYIELLPVPGAKKSAKLYIPYIILTIIILTIVGFIWLLKVNGCRKYKLNKTESTPVVEEDEMQPYASYTEKNNPLYDTTNKVKASEALQSEVDTDLHTL

SEQ ID NO: 2258 - protein, 212 aa, Homo sapiens
MLCPWRTANLGLLLILTIFLVAVNTSWPVKMATNAVLCCPPIALRNLIIITWEIILRGQPSCTKAYKKETNETKETNCTDERITWVSRPDQNSDLQIRTVAITHDGYYRCIMVTPDGNFHRGYHLQVLVTPEVTLFQNRNRTAVCKAVAGKPAAHISWIPEGDCATKQEYWSNGTVTVKSTCHWEVHNVSTVTCHVSHLTGNKSLYIELLPG

SEQ ID NO: 2259 - protein, 153 aa, Homo sapiens
HIQLPPEIQESQEVTLTCLLNFSCYGYPIQLQWLLEGVPMRQAAVTSTSLTIKSVFTRSELKFSPQWSHHGKIVTCQLQDADGKFLSNDTVQLNVKRESPRHACGKGKVCVTFSPAPQGACTQGRGKPAQTAASSSPGHAALSALVFREKDLL

SEQ ID NO: 2260 - protein, 159 aa, Homo sapiens [sequence omitted]

SEQ ID NO: 2261 - protein, 138 aa, Homo sapiens
MHLLGPWLLLLEYLAFSDSSKWVFEHPETLYAWEGACVWIPCTYRALDGDLESFILFHNPEYNKNTSKFDGTRLYESTKDGKVPSEQKRVQFLGDKNKNCTLSIHPVHLNDSGQLGLRMESKTEKWMERIHLNVSERP

SEQ ID NO: 2262 - protein, 145 aa, Homo sapiens
MHLLGPWLLLLEYLAFSDSSKWVFEHPETLYAWEGACVWIPCTYRALDGDLESFILFHNPEYNKNTSKFDGTRLYESTKDGKVPSEQKRVQFLGDKNKNCTLSIHPVHLNDSGQLGLRMESKTEKWMERIHLNVSERPFPPHIQL

SEQ ID NO: 2263 - protein, 191 aa, Homo sapiens
MHLLGPWLLLLEYLAFSDSSKWVFEHPETLYAWEGACVWIPCTYRALDGDLESFILFHNPEYNKNTSKFDGTRLYESTKDGKVPSEQKRVQFLGDKNKNCTLSIHPVHLNDSGQLGLRMESKTEKWMERIHLNVSVAPRGGSNEAGCCHLDLLDHQVCLHPERAQVLPTVESPWEDCDLPASGCRWEVPLQ

SEQ ID NO: 2264 - protein, 106 aa, Homo sapiens
MHLLGPWLLLLVLEYLAFSDSSKWVFEHPETLYAWEGACVWIPCTYRALDGDLESFILFHNPEYNKNTSKFDGTRLYESTKDGKVPSEQKRVQFLGDKNKNCTLSI

SEQ ID NO: 2265 - protein, 133 aa, Homo sapiens
MHLLGPWLLLLVLEYLAFSDSSKWVFEHPETLYAWEGACVWIPCTYRALDGDLESFILFHNPEYNKNTSKFDGTRLYESTKDGKVPSEQKRVQFLGDKNKNCTLSIHPVHLNDSGQLGLRMESKTEKWMERIH

SEQ ID NO: 2266 - protein, 164 aa, Homo sapiens
MHLLGPWLLLLVLEYLAFSDSSKWVFEHPETLYAWEGACVWIPCTYRALDGDLESFILFHNPEYNKNTSKFDGTRLYESTKDGKVPSEQKRVQFLGDKNKNCTLSIHPVHLNDSGQLGLRMESKTEKWMERIHLNVSDPPKKVTTVIQNPMPIREGDTVTLSCN

SEQ ID NO: 2267 - protein, 226 aa, Homo sapiens
MHLLGPWLLLLVLEYLAFSDSSKWVFEHPETLYAWEGACVWIPCTYRALDGDLESFILFHNPEYNKNTSKFDGTRLYESTKDGKVPSEQKRVQFLGDKNKNCTLSIHPVHLNDSGQLGLRMESKTEKWMERIHLNVSERPFPPHIQLPPEIQESQEVTLTCLLNFSCYGYPIQLQWLLEGVPMRQAAVTSTSLTIKSVFTRSELKFSPQWSHHGKIVTCQLQDADG

SEQ ID NO: 2268 - protein, 670 aa, Homo sapiens
MHLLGPWLLLLVLEYLAFSDSSKWVFEHPETLYAWEGACVWIPCTYRALDGDLESFILFHNPEYNKNTSKFDGTRLYESTKDGKVPSEQKRVQFLGDKNKNCTLSIHPVHLNDSGQLGLRMESKTEKWMERIHLNVSERPFPPHIQLPPEIQESQEVTLTCLLNFSCYGYPIQLQWLLEGVPMRQAAVTSTSLTIKSVFTRSELKFSPQWSHHGKIVTCQLQDADGKFLSNDTVQLNVKHPPKKVTTVIQNPMPIREGDTVTLSCNYNSSNPSVTRYEWKPHGAWEEPSLGVLKIQNVGWDNTTIACAACNSWCSWASPVALNVQYAPRDVRVRKIKPLSEIHSGNSVSLQCDFSSSHPKEVQFFWEKNGRLLGKESQLNFDSISPEDAGSYSCWVNNSIGQTASKAWTLEVLYAPRRLRVSMSPGDQVMEGKSATLTCESDANPPVSHYTWFDWNNQSLPYHSQKLRLEPVKVQHSGAYWCQGTNSVGKGRSPLSTLTVYYSPETIGRRVAVGLGSCLAILILAICGLKLQRRWKRTQSQQGLQENSSGQSFFVRNKKVRRAPLSEGPHSLGCYNPMMEDGISYTTLRFPEMNIPRTGDAESSEMQRPPPDCDDTVTYSALHKRQVGDYENVIPDFPEDEGIHYSELIQFGVGERPQAQENVDYVILKH

SEQ ID NO: 2269 - protein, 670 aa, Homo sapiens; identical to SEQ ID NO: 2268

SEQ ID NO: 2270 - protein, 847 aa, Homo sapiens
MHLLGPWLLLLVLEYLAFSDSSKWVFEHPETLYAWEGACVWIPCTYRALDGDLESFILFHNPEYNKNTSKFDGTRLYESTKDGKVPSEQKRVQFLGDKNKNCTLSIHPVHLNDSGQLGLRMESKTEKWMERIHLNVSERPFPPHIQLPPEIQESQEVTLTCLLNFSCYGYPIQLQWLLEGVPMRQAAVTSTSLTIKSVFTRSELKFSPQWSHHGKIVTCQLQDADGKFLSNDTVQLNVKHTPKLEIKVTPSDAIVREGDSVTMTCEVSSSNPEYTTVSWLKDGTSLKKQNTFTLNLREVTKDQSGKYCCQVSNDVGPGRSEEVFLQVQYAPEPSTVQILHSPAVEGSQVEFLCMSLANPLPTNYTWYHNGKEMQGRTEEKVHIPKILPWHAGTYSCVAENILGTGQRGPGAELDVQYPPKKVTTVIQNPMPIREGDTVTLSCNYNSSNPSVTRYEWKPHGAWEEPSLGVLKIQNVGWDNTTIACAACNSWCSWASPVALNVQYAPRDVRVRKIKPLSEIHSGNSVSLQCDFSSSHPKEVQFFWEKNGRLLGKESQLNFDSISPEDAGSYSCWVNNSIGQTASKAWTLEVLYAPRRLRVSMSPGDQVMEGKSATLTCESDANPPVSHYTWFDWNNQSLPYHSQKLRLEPVKVQHSGAYWCQGTNSVGKGRSPLSTLTVYYSPETIGRRVAVGLGSCLAILILAICGLKLQRRWKRTQSQQGLQENSSGQSFFVRNKKVRRAPLSEGPHSLGCYNPMMEDGISYTTLRFPEMNIPRTGDAESSEMQRPPPDCDDTVTYSALHKRQVGDYENVIPDFPEDEGIHYSELIQFGVGERPQAQENVDYVILKH

SEQ ID NO: 2271 - protein, 759 aa, Homo sapiens
MHLLGPWLLLLVLEYLAFSDSSKWVFEHPETLYAWEGACVWIPCTYRALDGDLESFILFHNPEYNKNTSKFDGTRLYESTKDGKVPSEQKRVQFLGDKNKNCTLSIHPVHLNDSGQLGLRMESKTEKWMERIHLNVSERPFPPHIQLPPEIQESQEVTLTCLLNFSCYGYPIQLQWLLEGVPMRQAAVTSTSLTIKSVFTRSELKFSPQWSHHGKIVTCQLQDADGKFLSNDTVQLNVKHTPKLEIKVTPSDAIVREGDSVTMTCEVSSSNPEYTTVSWLKDGTSLKKQNTFTLNLREVTKDQSGKYCCQVSNDVGPGRSEEVFLQVQYPPKKVTTVIQNPMPIREGDTVTLSCNYNSSNPSVTRYEWKPHGAWEEPSLGVLKIQNVGWDNTTIACAACNSWCSWASPVALNVQYAPRDVRVRKIKPLSEIHSGNSVSLQCDFSSSHPKEVQFFWEKNGRLLGKESQLNFDSISPEDAGSYSCWVNNSIGQTASKAWTLEVLYAPRRLRVSMSPGDQVMEGKSATLTCESDANPPVSHYTWFDWNNQSLPYHSQKLRLEPVKVQHSGAYWCQGTNSVGKGRSPLSTLTVYYSPETIGRRVAVGLGSCLAILILAICGLKLQRRWKRTQSQQGLQENSSGQSFFVRNKKVRRAPLSEGPHSLGCYNPMMEDGISYTTLRFPEMNIPRTGDAESSEMQRPPPDCDDTVTYSALHKRQVGDYENVIPDFPEDEGIHYSELIQFGVGERPQAQENVDYVILKH

SEQ ID NO: 2272 - protein, 751 aa, Homo sapiens
MHLLGPWLLLLVLEYLAFSDSSKWVFEHPETLYAWEGACVWIPCTYRALDGDLESFILFHNPEYNKNTSKFDGTRLYESTKDGKVPSEQKRVQFLGDKNKNCTLSIHPVHLNDSGQLGLRMESKTEKWMERIHLNVSERPFPPHIQLPPEIQESQEVTLTCLLNFSCYGYPIQLQWLLEGVPMRQAAVTSTSLTIKSVFTRSELKFSPQWSHHGKIVTCQLQDADGKFLSNDTVQLNVKHTPKLEIKVTPSDAIVREGDSVTMTCEVSSSNPEYTTVSWLKDGTSLKKQNTFTLNLREVTKDQSGKYCCQVSNDVGPGRSEEVFLQVQYAPEPSTVQILHSPAVEGSQVEFLCMSLANPLPTNYTWYHNGKEMQGRTEEKVHIPKILPWHAGTYSCVAENILGTGQRGPGAELDVQYPPKKVTTVIQNPMPIREGDTVTLSCNYNSSNPSVTRYEWKPHGAWEEPSLGVLKIQNVGWDNTTIACAACNSWCSWASPVALNVQYAPRDVRVRKIKPLSEIHSGNSVSLQCDFSSSHPKEVQFFWEKNGRLLGKESQLNFDSISPEDAGSYSCWVNNSIGQTASKAWTLEVLYAPRRLRVSMSPGDQVMEGKSATLTCESDANPPVSHYTWFDWNNQSLPYHSQKLRLEPVKVQHSGAYWCQGTNSVGKGRSPLSTLTVYYSPETIGRRVAVGLGSCLAILILAICGLKLQRRWKRTQSQQGLQENSSGQSFFVRNKKRCRVLRDAETSPGLR

SEQ ID NO: 2273 - protein, 38 aa, Homo sapiens
MHLLGPWLLLLVNGFLSTLKPSTPGRGPASGSPAPTEP

SEQ ID NO: 2274 - protein, 675 aa, Homo sapiens
MSLWLLEGVPMRQAAVTSTSLTIKSVFTRSELKFSPQWSHHGKIVTCQLQDADGKFLSNDTVQLNVKHTPKLEIKVTPSDAIVREGDSVTMTCEVSSSNPEYTTVSWLKDGTSLKKQNTFTLNLREVTKDQSGKYCCQVSNDVGPGRSEEVFLQVQYAPEPSTVQILHSPAVEGSQVEFLCMSLANPLPTNYTWYHNGKEMQGRTEEKVHIPKILPWHAGTYSCVAENILGTGQRGPGAELDVQYPPKKVTTVIQNPMPIREGDTVTLSCNYNSSNPSVTRYEWKPHGAWEEPSLGVLKIQNVGWDNTTIACAACNSWCSWASPVALNVQYAPRDVRVRKIKPLSEIHSGNSVSLQCDFSSSHPKEVQFFWEKNGRLLGKESQLNFDSISPEDAGSYSCWVNNSIGQTASKAWTLEVLYAPRRLRVSMSPGDQVMEGKSATLTCESDANPPVSHYTWFDWNNQSLPYHSQKLRLEPVKVQHSGAYWCQGTNSVGKGRSPLSTLTVYYSPETIGRRVAVGLGSCLAILILAICGLKLQRRWKRTQSQQGLQENSSGQSFFVRNKKVRRAPLSEGPHSLGCYNPMMEDGISYTTLRFPEMNIPRTGDAESSEMQRPPPDCDDTVTYSALHKRQVGDYENVIPDFPEDEGIHYSELIQFGVGERPQAQENVDYVILKH

SEQ ID NO: 2275 - protein, 145 aa, Homo sapiens
NPLPTNYTWYHNGKEMQGRTEEKVHIPKILPWHAGTYSCVAENILGTGQRGPGAELDVQYPPKKVTTVIQNPMPIREGDTVTLSCNYNSSNPSVTRYEWKPHGAWEEPSLGVLKIQNVGWDNTTIACAACNSWCSWASPVALNVQ

SEQ ID NO: 2276 - protein, 148 aa, Homo sapiens
VLEYLAFSDSSKWVFEHPETLYAWEGACVWIPCTYRALDGDLESFILFHNPEYNKNTSKFDGTRLYESTKDGKVPSEQKRVQFLGDKNKNCTLSIHPVHLNDSGQLGLRMESKTEKWMERIHLNVSVESPWEDCDLPASGCRWEVPLQ

SEQ ID NO: 2277 - protein, 37 aa, Homo sapiens
IVIPDVTVSDSGLYRCYLQASAGENETFVMRLTVAEG

SEQ ID NO: 2278 - protein, 127 aa, Homo sapiens
MDYPTLLLALLHVYRALCEEVLWHTSVPFAENMSLECVYPSMGILTQVEWFKIGTQQDSIAIFSPTHGMVIRKPYAERVYFLNSTMASNNMTLFFRNASEDDVGYYSCSLYTYPQGTWQKVIQVVQS

SEQ ID NO: 2279 - protein, 132 aa, Homo sapiens
MDYPTLLLALLHVYRALCEEVLWHTSVPFAENMSLECVYPSMGILTQVEWFKIGTQQDSIAIFSPTHGMVIRKPYAERVYFLNSTMASNNMTLFFRNASEDDVGYYSCSLYTYPQGTWQKVIQVVQSDSFEA

SEQ ID NO: 2280 - protein, 336 aa, Homo sapiens
MDYPTLLLALLHVYRALCEEVLWHTSVPFAENMSLECVYPSMGILTQVEWFKIGTQQDSIAIFSPTHGMVIRKPYAERVYFLNSTMASNNMTLFFRNASEDDVGYYSCSLYTYPQGTWQKVIQVVQSDSFEAAVPSNSHIVSEPGKNVTLTCQPQMTWPVQAVRWEKIQPRQIDLLTYCNLVHGRNFTSKFPRQIVSNCSHGRWSVIVIPDVTVSDSGLYRCYLQASAGENETFVMRLTVAEGKTDNQYTLFVAGGTVLLLLFVISITTIIVIFLNRRRRRERRDLFTESWDTQKAPNNYRSPISTSQPTNQSMDDTREDIYVNYPTFSRRPKTRV

SEQ ID NO: 2281 - protein, 276 aa, Homo sapiens
MDYPTLLLALLHVYRALCEEVLWHTSVPFAENMSLECVYPSMGILTQVEWFKIGTQQDSIAIFSPTHGMVIRKPYAERVYFLNSTMASNNMTLFFRNASEDDVGYYSCSLYTYPQGTWQKVIQVVQSDSFEAAVPSNSHIVSEPGKNVTLTCQPQMTWPVQAVRWEKIQPRQIDLLTYCNLVHGRNFTSKFPRQIVSNCSHGRWSVIVIPDVTVSDSGLYRCYLQASAGENETFVMRLTVAEGKTDNQYTLFVAGGTVLLLLFVISITTIIVIFLN

SEQ ID NO: 2282 - protein, 336 aa, Homo sapiens; identical to SEQ ID NO: 2280

SEQ ID NO: 2283 - protein, 181 aa, Homo sapiens
MTWPVQAVRWEKIQPRQIDLLTYCNLVHGRNFTSKFPRQIVSNCSHGRWSVIVIPDVTVSDSGLYRCYLQASAGENETFVMRLTVAEGKTDNQYTLFVAGGTVLLLLFVISITTIIVIFLNRRRRRERRDLFTESWDTQKAPNNYRSPISTSQPTNQSMDDTREDIYVNYPTFSRRPKTRV

SEQ ID NO: 2284 - protein, 181 aa, Homo sapiens; identical to SEQ ID NO: 2283

SEQ ID NO: 2285 - protein, 80 aa, Homo sapiens
MGRAMVARLGLGLLLLALLLPTQIYSSETTTGTSSNSSQSTSNSGLAPNPTNATTKAAGGALQSTASLFVVSLSLLHLYS

SEQ ID NO: 2286 - protein, 80 aa, Homo sapiens; identical to SEQ ID NO: 2285

SEQ ID NO: 2287 - protein, 80 aa, Homo sapiens; identical to SEQ ID NO: 2285

SEQ ID NO: 2288 - protein, 37 aa, Homo sapiens
MGRAMVARLGLGLLLLALLLPTQKMLRIPNLIDLKNM

SEQ ID NO: 2289 - protein, 129 aa, Homo sapiens
MVGRFCPESPPGFVRVAATSAVSLDPPSGEPRPGCGYPGPRSAASRVYGCTAPARETGGWAWETLAGAGAKKIYSSETTTGTSSNSSQSTSNSGLAPNPTNATTKAAGGALQSTASLFVVSLSLLHLYS

SEQ ID NO: 2290 - protein, 88 aa, Homo sapiens
  VARIANT 1: note = misc_feature - Xaa can be any naturally occurring amino acid
XDRSGPGHRLRGAPTSREGFALGGARVPSARIYSSETTTGTSSNSSQSTSNSGLAPNPTNATTKAAGGALQSTASLFVVSLSLLHLYS

SEQ ID NO: 2291 - protein, 122 aa, Homo sapiens
  VARIANT 1: note = misc_feature - Xaa can be any naturally occurring amino acid
XLSSAAGREITLPEGSRRPPPTRSHWNSQPLSGPRGAFCSLSGNALAPGQAATPPQRRRGLFFWGIYSSETTTGTSSNSSQSTSNSGLAPNPTNATTKAAGGALQSTASLFVVSLSLLHLYS

SEQ ID NO: 2292 - protein, 38 aa, Homo sapiens
MLRRRGSPGMGVHVGAALGALWFCLTADRYQTAGAQLC

SEQ ID NO: 2293 - protein, 38 aa, Homo sapiens; identical to SEQ ID NO: 2292

SEQ ID NO: 2294 - protein, 51 aa, Homo sapiens
MLRRRGSPGMGVHVGAALGALWFCLTGALEVQVPEDPVVALVGTDATLCCS

SEQ ID NO: 2295 - protein, 133 aa, Homo sapiens
MLRRRGSPGMGVHVGAALGALWFCLTGALEVQVPEDPVVALVGTDATLCCSFSPEPGFSLAQLNLIWQLTDTKQLVHSFAEGQDQGSAYANRTALFPDLLAQGNASLRLQRVRVADEGSFTCFVSIRDFGSAA

SEQ ID NO: 2296 - protein, 133 aa, Homo sapiens; identical to SEQ ID NO: 2295

SEQ ID NO: 2297 - protein, 136 aa, Homo sapiens
MLRRRGSPGMGVHVGAALGALWFCLTGALEVQVPEDPVVALVGTDATLCCSFSPEPGFSLAQLNLIWQLTDTKQLVHSFAEGQDQGSAYANRTALFPDLLAQGNASLRLQRVRVADEGSFTCFVSIRDFGSAAVSL

SEQ ID NO: 2298 - protein, 156 aa, Homo sapiens
MLRRRGSPGMGVHVGAALGALWFCLTGALEVQVPEDPVVALVGTDATLCCSFSPEPGFSLAQLNLIWQLTDTKQLVHSFAEGQDQGSAYANRTALFPDLLAQGNASLRLQRVRVADEGSFTCFVSIRDFGSAAVSLQVAAPYSKPSMTLEPNKDLR

SEQ ID NO: 2299 - protein, 165 aa, Homo sapiens
MLRRRGSPGMGVHVGAALGALWFCLTGALEVQVPEDPVVALVGTDATLCCSFSPEPGFSLAQLNLIWQLTDTKQLVHSFAEGQDQGSAYANRTALFPDLLAQGNASLRLQRVRVADEGSFTCFVSIRDFGSAAVSLQVAAPYSKPSMTLEPNKDLRPGDTVTITC

SEQ ID NO: 2300 - protein, 534 aa, Homo sapiens
MLRRRGSPGMGVHVGAALGALWFCLTGALEVQVPEDPVVALVGTDATLCCSFSPEPGFSLAQLNLIWQLTDTKQLVHSFAEGQDQGSAYANRTALFPDLLAQGNASLRLQRVRVADEGSFTCFVSIRDFGSAAVSLQVAAPYSKPSMTLEPNKDLRPGDTVTITCSSYQGYPEAEVFWQDGQGVPLTGNVTTSQMANEQGLFDVHSILRVVLGANGTYSCLVRNPVLQQDAHSSVTITPQRSPTGAVEVQVPEDPVVALVGTDATLRCSFSPEPGFSLAQLNLIWQLTDTKQLVHSFTEGRDQGSAYANRTALFPDLLAQGNASLRLQRVRVADEGSFTCFVSIRDFGSAAVSLQVAAPYSKPSMTLEPNKDLRPGDTVTITCSSYRGYPEAEVFWQDGQGVPLTGNVTTSQMANEQGLFDVHSVLRVVLGANGTYSCLVRNPVLQQDAHGSVTITGQPMTFPPEALWVTVGLSVCLIALLVALAFVCWRKIKQSCEEENAGAEDQDGEGEGSKTALQPLKHSDSKEDDGQEIA

SEQ ID NO: 2301 - protein, 533 aa, Homo sapiens
MLRRRGSPGMGVHVGAALGALWFCLTGALEVQVPEDPVVALVGTDATLCCSFSPEPGFSLAQLNLIWQLTDTKQLVHSFAEGQDQGSAYANRTALFPDLLAQGNASLRLQRVRVADEGSFTCFVSIRDFGSAAVSLQVAAPYSKPSMTLEPNKDLRPGDTVTITCSSYQGYPEAEVFWQDGQGVPLTGNVTTSQMANEQGLFDVHSILRVVLGANGTYSCLVRNPVLQQDAHSSVTITPQRSPTGAVEVQVPEDPVVALVGTDATLRCSFSPEPGFSLAQLNLIWQLTDTKQLVHSFTEGRDQGSAYANRTALFPDLLAQGNASLRLQRVRVADEGSFTCFVSIRDFGSAAVSLQVAAPYSKPSMTLEPNKDLRPGDTVTITCSSYRGYPEAEVFWQDGQGVPLTGNVTTSQMANEQGLFDVHSVLRVVLGANGTYSCLVRNPVLQQDAHGSVTITGQPMTFPPEALWVTVGLSVCLIALLVALAFVCWRKIKQSCEEENAGAEDQDGEGEGSKTALQPLKHSDSKEGKDTWA

SEQ ID NO: 2302 - protein, 316 aa, Homo sapiens
MLRRRGSPGMGVHVGAALGALWFCLTGALEVQVPEDPVVALVGTDATLCCSFSPEPGFSLAQLNLIWQLTDTKQLVHSFAEGQDQGSAYANRTALFPDLLAQGNASLRLQRVRVADEGSFTCFVSIRDFGSAAVSLQVAAPYSKPSMTLEPNKDLRPGDTVTITCSSYRGYPEAEVFWQDGQGVPLTGNVTTSQMANEQGLFDVHSVLRVVLGANGTYSCLVRNPVLQQDAHGSVTITGQPMTFPPEALWVTVGLSVCLIALLVALAFVCWRKIKQSCEEENAGAEDQDGEGEGSKTALQPLKHSDSKEDDGQEIA

SEQ ID NO: 2303 - protein, 316 aa, Homo sapiens; identical to SEQ ID NO: 2302

SEQ ID NO: 2304 - protein, 146 aa, Homo sapiens
MSLKAPMSSRKKKLYLQQHCEAGAAFHHGEPSCQPPHRKMLRRRGSPGMGVHVGAALGALWFCLTGALEVQVPEDPVVALVGTDATLCCSFSPEPGFSLAQLNLIWQLTDTKQLVHSFAEGQDQGSAYANRTALFPDLLAQGNASL

SEQ ID NO: 2305 - protein, 388 aa, Homo sapiens
MTLEPNKDLRPGDTVTITCSSYQGYPEAEVFWQDGQGVPLTGNVTTSQMANEQGLFDVHSILRVVLGANGTYSCLVRNPVLQQDAHSSVTITPQRSPTGAVEVQVPEDPVVALVGTDATLRCSFSPEPGFSLAQLNLIWQLTDTKQLVHSFTEGRDQGSAYANRTALFPDLLAQGNASLRLQRVRVADEGSFTCFVSIRDFGSAAVSLQVAAPYSKPSMTLEPNKDLRPGDTVTITCSSYRGYPEAEVFWQDGQGVPLTGNVTTSQMANEQGLFDVHSVLRVVLGANGTYSCLVRNPVLQQDAHGSVTITGQPMTFPPEALWVTVGLSVCLIALLVALAFVCWRKIKQSCEEENAGAEDQDGEGEGSKTALQPLKHSDSKEDDGQEIA

SEQ ID NO: 2306 - protein, 199 aa, Homo sapiens
  VARIANT 1: note = misc_feature - Xaa can be any naturally occurring amino acid
XRVRVADEGSFTCFVSIRDFGSAAVSLQVAAPYSKPSMTLEPNKDLRPGDTVTITCSSYRGYPEAEVFWQDGQGVPLTGNVTTSQMANEQGLFDVHSVLRVVLGANGTYSCLVRNPVLQQDAHGSVTITEALWVTVGLSVCLIALLVALAFVCWRKIKQSCEEENAGAEDQDGEGEGSKTALQPLKHSDSKEDDGQEIA

SEQ ID NO: 2307 - protein, 170 aa, Homo sapiens
  VARIANT 1: note = misc_feature - Xaa can be any naturally occurring amino acid
XTLEPNKDLRPGDTVTITCSSYRGYPEAEVFWQDGQGVPLTGNVTTSQMANEQGLFDVHSVLRVVLGANGTYSCLVRNPVLQQDAHGSVTITGQPMTFPPEALWVTVGLSVCLIALLVALAFVCWRKIKQSCEEENAGAEDQDGEGEGSKTALQPLKHSDSKEDDGQEIA

SEQ ID NO: 2308 - protein, 169 aa, Homo sapiens
MTPASITAAKTSTITTAFPPVSSTTLFAVGATHSASIQEETEEVVNSQLPLLLSLLALLLLLLVGASLLAWRMFQKWIKAGDHSELSQNPKQAATQSELHYANLELLMWPLQEKPAPPREVEVEYSTVASPREELHYASVVFDSNTNRIAAQRPREEEPDSDYSVIRKT

SEQ ID NO: 2309 - protein, 103 aa, Homo sapiens
MWLPWALLLLWVPAGDHSELSQNPKQAATQSELHYANLELLMWPLQEKPAPPREVEVEYSTVASPREELHYASVVFDSNTNRIAAQRPREEEPDSDYSVIRKT

SEQ ID NO: 2310 - protein, 186 aa, Homo sapiens
MWLPWALLLLWVPASTSMTPASITAAKTSTITTAFPPVSSTTLFAVGATHSASIQEETEEVVNSQLPLLLSLLALLLLLLVGASLLAWRMFQKWIKAGDHSELSQNPKQAATQSELHYANLELLMWPLQEKPAPPREVEVEYSTVASPREELHYASVVFDSNTNRIAAQRPREEEPDSDYSVIRKT

SEQ ID NO: 2311 - protein, 150 aa, Homo sapiens
MWLPWALLLLWVPASTSMTPASITAAKTSTITTAFPPVSSTTLFAVGATHSASIQEETEEVVNSQLPLLLSLLALLLLLLVGASLLAWRMFQKWIKAGDHSELSQNPKQASPREELHYASVVFDSNTNRIAAQRPREEEPDSDYSVIRKT

SEQ ID NO: 2312 - protein, 299 aa, Homo sapiens
MWLPWALLLLWVPGCFALSKCRTVAGPVGGSLSVQCPYEKEHRTLNKYWCRPPQIFLCDKIVETKGSAGKRNGRVSIRDSPANLSFTVTLENLTEEDAGTYWCGVDTPWLRDFHDPVVEVEVSVFPASTSMTPASITAAKTSTITTAFPPVSSTTLFAVGATHSASIQEETEEVVNSQLPLLLSLLALLLLLLVGASLLAWRMFQKWIKAGDHSELSQNPKQAATQSELHYANLELLMWPLQEKPAPPREVEVEYSTVASPREELHYASVVFDSNTNRIAAQRPREEEPDSDYSVIRKT

SEQ ID NO: 2313 - protein, 148 aa, Homo sapiens
MWLPPALLLLSLSGCFSIQGPESVRAPEQGSLTVQCHYKQGWETYIKWWCRGVRWDTCKILIETRGSEQGEKSDRVSIKDNQKDRTFTVTMEGLRRDDADVYWCGIERRGPDLGTQVKVIVDPEGAASTTASSPTNSNMAVFIGSHKR

SEQ ID NO: 2314 - protein, 201 aa, Homo sapiens
MWLPPALLLLSLSGCFSIQGPESVRAPEQGSLTVQCHYKQGWETYIKWWCRGVRWDTCKILIETRGSEQGEKSDRVSIKDNQKDRTFTVTMEGLRRDDADVYWCGIERRGPDLGTQVKVIVDPEGAASTTASSPTNSNMAVFIGSHKRNHYMLLVFVKVPILLILVTAILWLKGSQRVPEEPGEQPIYMNFSEPLTKDMAT

SEQ ID NO: 2315 - protein, 290 aa, Homo sapiens
MPLLTLYLLLFWLSGYSIVTQITGPTTVNGLERGSLTVQCVYRSGWETYLKWWCRGAIWRDCKILVKTSGSEQEVKRDRVSIKDNQKNRTFTVTMEDLMKTDADTYWCGIEKTGNDLGVTVQVTIDPAPVTQEETSSSPTLTGHHLDNRHKLLKLSVLLPLIFTILLLLLVAASLLAWRMMKYQQKAAGMSPEQVLQPLEGDLCYADLTLQLAGTSPQKATTKLSSAQVDQVEVEYVTMASLPKEDISYASLTLGAEDQEPTYCNMGHLSSHLPGRGPEEPTEYSTISRP

SEQ ID NO: 2316 - protein, 244 aa, Homo sapiens
MPLLTLYLLLFWLSGYSIVTQITGPTTVNGLERGSLTVQCVYRSGWETYLKWWCRGAIWRDCKILVKTSGSEQEVKRDRVSIKDNQKNRTFTVTMEDLMKTDADTYWCGIEKTGNDLGVTVQVTIDPAPVTQEETSSSPTLTGHHLDNRSEGSQAANYRPAAHQAQAPEAQCPPAPHLHHIAAAFGGRLTLGLEDDEVPAESSRDVPRAGTAAPGGRPLLCRPDPAAGRNLPAKGYHEAFLCPG

SEQ ID NO: 2317 - protein, 305 aa, Homo sapiens
MPLLTLYLLLFWLSGYSIVTQITGPTTVNGLERGSLTVQCVYRSGWETYLKWWCRGAIWRDCKILVKTSGSEQEVKRDRVSIKDNQKNRTFTVTMEDLMKTDADTYWCGIEKTGNDLGVTVQVTIDPASTPAPTTPTSTTFTAPVTQEETSSSPTLTGHHLDNRHKLLKLSVLLPLIFTILLLLLVAASLLAWRMMKYQQKAAGMSPEQVLQPLEGDLCYADLTLQLAGTSPQKATTKLSSAQVDQVEVEYVTMASLPKEDISYASLTLGAEDQEPTYCNMGHLSSHLPGRGPEEPTEYSTISRP

SEQ ID NO: 2318 - protein, 293 aa, Homo sapiens
MWLPQLDLMRVISAKSQGYSIVTQITGPTTVNGLERGSLTVQCVYRSGWETYLKWWCRGAIWRDCKILVKTSGSEQEVKRDRVSIKDNQKNRTFTVTMEDLMKTDADTYWCGIEKTGNDLGVTVQVTIDPAPVTQEETSSSPTLTGHHLDNRHKLLKLSVLLPLIFTILLLLLVAASLLAWRMMKYQQKAAGMSPEQVLQPLEGDLCYADLTLQLAGTSPQKATTKLSSAQVDQVEVEYVTMASLPKEDISYASLTLGAEDQEPTYCNMGHLSSHLPGRGPEEPTEYSTISRP

SEQ ID NO: 2319 - protein, 165 aa, Homo sapiens
MWLPQLDLMRVISAKSQGYSIVTQITGPTTVNGLERGSLTVQCVYRSGWETYLKWWCRGAIWRDCKILVKTSGSEQEVKRDRVSIKDNQKNRTFTVTMEDLMKTDADTYWCGIEKTGNDLGVTVQVTIDPAPVTQEETSSSPTLTGHHLDNRYCSPWRATSAMQT

SEQ ID NO: 2320 - protein, 194 aa, Homo sapiens
MWLPQLDLMRVISAKSQGYSIVTQITGPTTVNGLERGSLTVQCVYRSGWETYLKWWCRGAIWRDCKILVKTSGSEQEVKRDRVSIKDNQKNRTFTVTMEDLMKTDADTYWCGIEKTGNDLGVTVQVTIDPAPVTQEETSSSPTLTGHHLDNSSRDVPRAGTAAPGGRPLLCRPDPAAGRNLPAKGYHEAFLCPG

SEQ ID NO: 2321 - protein, 194 aa, Homo sapiens; identical to SEQ ID NO: 2320

SEQ ID NO: 2322 - protein, 239 aa, Homo sapiens
MWLPQLDLMRVISAKSQGYSIVTQITGPTTVNGLERGSLTVQCVYRSGWETYLKWWCRGAIWRDCKILVKTSGSEQEVKRDRVSIKDNQKNRTFTVTMEDLMKTDADTYWCGIEKTGNDLGVTVQVTIDPASTPAPTTPTSTTFTAPVTQEETSSSPTLTGHHLDNRHKLLKLSVLLPLIFTILLLLLVAASLLAWRMMKYQQKGTAAPGGRPLLCRPDPAAGRNLPAKGYHEAFLCPG

SEQ ID NO: 2323 - protein, 239 aa, Homo sapiens; identical to SEQ ID NO: 2322

SEQ ID NO: 2324 - protein, 273 aa, Homo sapiens
MRLLVLLWGCLLLPGYEALEGPEEISGFEGDTVSLQCTYREELRDHRKYWCRKGGILFSRCSGTIYAEEEGQETMKGRVSIRDSRQELSLIVTLWNLTLQDAGEYWCGVEKRGPDESLLISLFVFPASPGLYPAATTAKQGKTGAEAPPLPGTSQYGHERTSQYTGTSPHPATSPPAGSSRPPMQLDSTSAEDTSPALSSGSSKPRVSIPMVRILAPVLVLLSLLSAAGLIAFCSHLLLWRKEAQQATETQRNEKFCLSRLNSLMFSLSLPWL

SEQ ID NO: 2325 - protein, 150 aa, Homo sapiens
MRLLVLLWGCLLLPGYEALEGPEEISGFEGDTVSLQCTYREELRDHRKYWCRKGGILFSRCSGTIYAEEEGQETMKGRVSIRDSRQELSLIVTLWNLTLQDAGEYWCGVEKRGPDESLLISLFVFPGNRYLSFPRLGTGAAEGRGRGGGA

SEQ ID NO: 2326 - protein, 332 aa, Homo sapiens
MRLLVLLWGCLLLPGYEALEGPEEISGFEGDTVSLQCTYREELRDHRKYWCRKGGILFSRCSGTIYAEEEGQETMKGRVSIRDSRQELSLIVTLWNLTLQDAGEYWCGVEKRGPDESLLISLFVFPGPCCPPSPSPTFQPLATTRLQPKAKAQQTQPPGLTSPGLYPAATTAKQGKTGAEAPPLPGTSQYGHERTSQYTGTSPHPATSPPAGSSRPPMQLDSTSAEDTSPALSSGSSKPRVSIPMVRILAPVLVLLSLLSAAGLIAFCSHLLLWRKEAQQATETQRNEKFCLSRLTAEEKEAPSQAPEGDVISMPPLHTSEEELGFSKFVSA

SEQ ID NO: 2327 - protein, 307 aa, Homo sapiens
MRLLVLLWGCLLLPGYEALEGPEEISGFEGDTVSLQCTYREELRDHRKYWCRKGGILFSRCSGTIYAEEEGQETMKGRVSIRDSRQELSLIVTLWNLTLQDAGEYWCGVEKRGPDESLLISLFVFPGPCCPPSPSPTFQPLATTRLQPKAKAQQTQPPGLTSPGLYPAATTAKQGKTGAEAPPLPGTSQYGHERTSQYTGTSPHPATSPPAGSSRPPMQLDSTSAEDTSPALSSGSSKPRVSIPMVRILAPVLVLLSLLSAAGLIAFCSHLLLWRKEAQQATETQRNEKFCLSRLNSLMFSLSLPWL

SEQ ID NO: 2328 - protein, 233 aa, Homo sapiens
MRLLVLLWGCLLLPGYEALEGPEEISGFEGDTVSLQCTYREELRDHRKYWCRKGGILFSRCSGTIYAEEEGQETMKGRVSIRDSRQELSLIVTLWNLTLQDAGEYWCGVEKRGPDESLLISLFVFPGSSRPPMQLDSTSAEDTSPALSSGSSKPRVSIPMVRILAPVLVLLSLLSAAGLIAFCSHLLLWRKEAQQATETQRNEKFCLSRLNHRTSELDPDEAFEISSLTFLSV

SEQ ID NO: 2329 - protein, 222 aa, Homo sapiens
MRLLVLLWGCLLLPGYEALEGPEEISGFEGDTVSLQCTYREELRDHRKYWCRKGGILFSRCSGTIYAEEEGQETMKGRVSIRDSRQELSLIVTLWNLTLQDAGEYWCGVEKRGPDESLLISLFVFPGSSRPPMQLDSTSAEDTSPALSSGSSKPRVSIPMVRILAPVLVLLSLLSAAGLIAFCSHLLLWRKEAQQATETQRNEKFCLSRLNSLMFSLSLPWL

SEQ ID NO: 2330 - protein, 98 aa, Homo sapiens
MEHSTFLSGLVLATLLSQVCQSCVELDPATVAGIIVTDVIATLLLALGVFCFAGHETGRLSGAADTQALLRNDQVYQPLRDRDDAQYSHLGGNWARNK

SEQ ID NO: 2331 - protein, 171 aa, Homo sapiens
MEHSTFLSGLVLATLLSQVSPFKIPIEELEDRVFVNCNTSITWVEGTVGTLLSDITRLDLGKRILDPRGIYRCNGTDIYKDKESTVQVHYRMCQSCVELDPATVAGIIVTDVIATLLLALGVFCFAGHETGRLSGAADTQALLRNDQVYQPLRDRDDAQYSHLGGNWARNK

SEQ ID NO: 2332 - protein, 127 aa, Homo sapiens
MEHSTFLSGLVLATLLSQVSPFKIPIEELEDRVFVNCNTSITWVEGTVGTLLSDITRLDLGKRILDPRGIYRCNGTDIYKDKESTVQVHYRTADTQALLRNDQVYQPLRDRDDAQYSHLGGNWARNK

SEQ ID NO: 2333 - protein, 132 aa, Homo sapiens
  VARIANT 1: note = misc_feature - Xaa can be any naturally occurring amino acid
XSRCFSGPCSPYSSSVVWIHFQEVSPFKIPIEELEDRVFVNCNTSITWVEGTVGTLLSDITRLDLGKRILDPRGIYRCNGTDIYKDKESTVQVHYRTADTQALLRNDQVYQPLRDRDDAQYSHLGGNWARNK

SEQ ID NO: 2334 - protein, 45 aa, Homo sapiens
MNRGVPFRHLLLVLQLALLPAATQGKKVVLGKKGDTVELTCTASQ

SEQ ID NO: 2335 - protein, 458 aa, Homo sapiens
MNRGVPFRHLLLVLQLALLPAATQGKKVVLGKKGDTVELTCTASQKKSIQFHWKNSNQIKILGNQGSFLTKGPSKLNDRADSRRSLWDQGNFPLIIKNLKIEDSDTYICEVEDQKEEVQLLVFGLTANSDTHLLQGQSLTLTLESPPGSSPSVQCRSPRGKNIQGGKTLSVSQLELQDSGTWTCTVLQNQKKVEFKIDIVVLAFQKASSIVYKKEGEQVEFSFPLAFTVEKLTGSGELWWQAERASSSKSWITFDLKNKEVSVKRVTQDPKLQMGKKLPLHLTLPQALPQYAGSGNLTLALEAKTGKLHQEVNLVVMRATQLQKNLTCEVWGPTSPKLMLSLKLENKEAKVSKREKAVWVLNPEAGMWQCLLSDSGQVLLESNIKVLPTWSTPVQPMALIVLGGVAGLLLFIGLGIFFCVRCRHRRRQAERMSQIKRLLSEKKTCQCPHRFQKTCSPI

SEQ ID NO: 2336 - protein, 148 aa, Homo sapiens
MNRGVPFRHLLLVLQLGPSKLNDRADSRRSLWDQGNFPLIIKNLKIEDSDTYICEVEDQKEEVQLLVFGLTANSDTHLLQGQSLTLTLESPPGSSPSVQCRSPRGKNIQGGKTLSVSQLELQDSGTWTCTVLQNQKKVEFKIDIVVLG

SEQ ID NO: 2337 - protein, 203 aa, Homo sapiens
MVRLPLQCVLWGCLLTAVHPEPPTACREKQYLINSQCCSLCQPGQKLVSDCTEFTETECLPCGESEFLDTWNRETHCHQHKYCDPNLGLRVQQKGTSETDTICTCEEGWHCTSEACESCVLHRSCSPGFGVKQIATGVSDTICEPCPVGFFSNVSSAFEKCHPWTRSPGSAESPGGDPHHLRDPVCHPLGAGLYQKGGQEANQ

SEQ ID NO: 2338 - protein, 277 aa, Homo sapiens
MVRLPLQCVLWGCLLTAVHPEPPTACREKQYLINSQCCSLCQPGQKLVSDCTEFTETECLPCGESEFLDTWNRETHCHQHKYCDPNLGLRVQQKGTSETDTICTCEEGWHCTSEACESCVLHRSCSPGFGVKQIATGVSDTICEPCPVGFFSNVSSAFEKCHPWTSCETKDLVVQQAGTNKTDVVCGPQDRLRALVVIPIIFGILFAILLVLVFIKKVAKKPTNKAPHPKQEPQEINFPDDLPGSNTAAPVQETLHGCQPVTQEDGKESRISVQERQ

SEQ ID NO: 2339 - protein, 151 aa, Homo sapiens
MVRLPLQCVLWGCLLTAVHPEPPTACREKQYLINSQCCSLCQPGQKLVSDCTEFTETECLPCGESEFLDTWNRETHCHQHKYCDPNLGLRVQQKGTSETDTICTCEEGWHCTSEACESCVLHRSCSPGFGVKQIDICQPHFPKDRGLNLLM

SEQ ID NO: 2340 - protein, 159 aa, Homo sapiens
  VARIANT 1: note = misc_feature - Xaa can be any naturally occurring amino acid
XRLPLQCVLWGCLLTAVHPEPPTACREKQYLINSQCCSLCQPGQKLVSDCTEFTETECLPCGESEFLDTWNRETHCHQHKYCDPNLGLRVQQKGTSETDTICTCEEGWHCTSEACESCVLHRSCSPGFGVKQIAVRPKTWLCNRQAQTRLMLSVVPRIG

SEQ ID NO: 2341 - protein, 176 aa, Homo sapiens
DTYCFNASAPPEEDCTSVTGPLSMTTQQSNSQSFSTSHEGLEEDKDHPTTSTLTSSNRNDVTGGRRDPNHSEGSTTLLEGYTSHYPHTKESRTFIPVTSAKTGSFGVTAVTVGDSNSNVNRSLSGDQDTFHPSGGSHTTHGSESDGHSHGSQEGGANTTSGPIRTPQIPEWLIILA

SEQ ID NO: 2342 - protein, 269 aa, Homo sapiens
EDCTSVTDLPNAFDGPITITIVNRDGTRYVQKGEYRTNPEDIYPSNPTDDDVSSGSSSERSSTSGGYIFYTFSTVHPIPDEDSPWITDSTDRIPATIQATPSSTTEETATQKEQWFGNRWHEGYRQTPKEDSHSTTGTAAASAHTSHPMQGRTTPSPEDSSWTDFFNPISHPMGRGHQAGRRMDMDSSHSITLQPTANPNTGLVEDLDRTGPLSMTTQQSNSQSFSTSHEGLEEDKDHPTTSTLTSSNRNDVTGGRRDPNHSEGSTTLL

SEQ ID NO: 2343 - protein, 193 aa, Homo sapiens
IYPSNPTDDDVSSGSSSERSSTSGGYIFYTFSTVHPIPDEDSPWITDSTDRIPATSTSSNTISAGWEPNEENEDERDRHLSFSGSGIDDDEDFISSTNMDSSHSITLQPTANPNTGLVEDLDRTGPLSMTTQQSNSQSFSTSHEGLEEDKDHPTTSTLTSSNRNDVTGGRRDPNHSEGSTTLLEGYTSHYPHT

SEQ ID NO: 2344 - protein, 78 aa, Homo sapiens
MDKFWWHAAWGLCLVPLSLAQIDLNITCRFAGVFHVEKNGRYSISRTEAADLCKAFNSTLPTMAQMEKALSIGFETCR

SEQ ID NO: 2345 - protein, 493 aa, Homo sapiens
MDKFWWHAAWGLCLVPLSLAQIDLNITCRFAGVFHVEKNGRYSISRTEAADLCKAFNSTLPTMAQMEKALSIGFETCRYGFIEGHVVIPRIHPNSICAANNTGVYILTSNTSQYDTYCFNASAPPEEDCTSVTDLPNAFDGPITITIVNRDGTRYVQKGEYRTNPEDIYPSNPTDDDVSSGSSSERSSTSGGYIFYTFSTVHPIPDEDSPWITDSTDRIPATNMDSSHSITLQPTANPNTGLVEDLDRTGPLSMTTQQSNSQSFSTSHEGLEEDKDHPTTSTLTSSNRNDVTGGRRDPNHSEGSTTLLEGYTSHYPHTKESRTFIPVTSAKTGSFGVTAVTVGDSNSNVNRSLSGDQDTFHPSGGSHTTHGSESDGHSHGSQEGGANTTSGPIRTPQIPEWLIILASLLALALILAVCIAVNSRRRCGQKKKLVINSGNGAVEDRKPSGLNGEASKSQEMVHLVNKESSETPDQFMTADETRNLQNVDMKIGV

SEQ ID NO: 2346 - protein, 429 aa, Homo sapiens
MDKFWWHAAWGLCLVPLSLAQIDLNITCRFAGVFHVEKNGRYSISRTEAADLCKAFNSTLPTMAQMEKALSIGFETCRYGFIEGHVVIPRIHPNSICAANNTGVYILTSNTSQYDTYCFNASAPPEEDCTSVTDLPNAFDGPITITIVNRDGTRYVQKGEYRTNPEDIYPSNPTDDDVSSGSSSERSSTSGGYIFYTFSTVHPIPDEDSPWITDSTDRIPATNRNDVTGGRRDPNHSEGSTTLLEGYTSHYPHTKESRTFIPVTSAKTGSFGVTAVTVGDSNSNVNRSLSGDQDTFHPSGGSHTTHGSESDGHSHGSQEGGANTTSGPIRTPQIPEWLIILASLLALALILAVCIAVNSRRRCGQKKKLVINSGNGAVEDRKPSGLNGEASKSQEMVHLVNKESSETPDQFMTADETRNLQNVDMKIGV

SEQ ID NO: 2347 - protein, 361 aa, Homo sapiens
MDKFWWHAAWGLCLVPLSLAQIDLNITCRFAGVFHVEKNGRYSISRTEAADLCKAFNSTLPTMAQMEKALSIGFETCRYGFIEGHVVIPRIHPNSICAANNTGVYILTSNTSQYDTYCFNASAPPEEDCTSVTDLPNAFDGPITITIVNRDGTRYVQKGEYRTNPEDIYPSNPTDDDVSSGSSSERSSTSGGYIFYTFSTVHPIPDEDSPWITDSTDRIPATRDQDTFHPSGGSHTTHGSESDGHSHGSQEGGANTTSGPIRTPQIPEWLIILASLLALALILAVCIAVNSRRRCGQKKKLVINSGNGAVEDRKPSGLNGEASKSQEMVHLVNKESSETPDQFMTADETRNLQNVDMKIGV

SEQ ID NO: 2348 - protein, 340 aa, Homo sapiens
MDKFWWHAAWGLCLVPLSLAQIDLNITCRFAGVFHVEKNGRYSISRTEAADLCKAFNSTLPTMAQMEKALSIGFETCRYGFIEGHVVIPRIHPNSICAANNTGVYILTSNTSQYDTYCFNASAPPEEDCTSVTDLPNAFDGPITITIVNRDGTRYVQKGEYRTNPEDIYPSNPTDDDVSSGSSSERSSTSGGYIFYTFSTVHPIPDEDSPWITDSTDRIPATRHSHGSQEGGANTTSGPIRTPQIPEWLIILASLLALALILAVCIAVNSRRRCGQKKKLVINSGNGAVEDRKPSGLNGEASKSQEMVHLVNKESSETPDQFMTADETRNLQNVDMKIGV

SEQ ID NO: 2349 - protein, 699 aa, Homo sapiens
MDKFWWHAAWGLCLVPLSLAQIDLNITCRFAGVFHVEKNGRYSISRTEAADLCKAFNSTLPTMAQMEKALSIGFETCRYGFIEGHVVIPRIHPNSICAANNTGVYILTSNTSQYDTYCFNASAPPEEDCTSVTDLPNAFDGPITITIVNRDGTRYVQKGEYRTNPEDIYPSNPTDDDVSSGSSSERSSTSGGYIFYTFSTVHPIPDEDSPWITDSTDRIPATSTSSNTISAGWEPNEENEDERDRHLSFSGSGIDDDEDFISSTISTTPRAFDHTKQNQDWTQWNPSHSNPEVLLQTTTRMTDVDRNGTTAYEGNWNPEAHPPLIHHEHHEEEETPHSTSTIQATPSSTTEETATQKEQWFGNRWHEGYRQTPKEDSHSTTGTAAASAHTSHPMQGRTTPSPEDSSWTDFFNPISHPMGRGHQAGRRMDMDSSHSITLQPTANPNTGLVEDLDRTGPLSMTTQQSNSQSFSTSHEGLEEDKDHPTTSTLTSSNRNDVTGGRRDPNHSEGSTTLLEGYTSHYPHTKESRTFIPVTSAKTGSFGVTAVTVGDSNSNVNRSLSGDQDTFHPSGGSHTTHGSESDGHSHGSQEGGANTTSGPIRTPQIPEWLIILASLLALALILAVCIAVNSRRRCGQKKKLVINSGNGAVEDRKPSGLNGEASKSQEMVHLVNKESSETPDQFMTADETRNLQNVDMKIGV

SEQ ID NO: 2350 - protein, 277 aa, Homo sapiens
MDKFWWHAAWGLCLVPLSLAQIDLNITCRFAGVFHVEKNGRYSISRTEAADLCKAFNSTLPTMAQMEKALSIGFETCRYGFIEGHVVIPRIHPNSICAANNTGVYILTSNTSQYDTYCFNASAPPEEDCTSVTDLPNAFDGPITITIVNRDGTRYVQKGEYRTNPEDIYPSNPTDDDVSSGSSSERSSTSGGYIFYTFSTVHPIPDEDSPWITDSTDRIPATTASAHTSHPMQGRTTPSPEDSSWTDFFNPISHPMGRGHQAGRRMDMDSSHSITLQ

SEQ ID NO: 2351 - protein, 742 aa, Homo sapiens
MDKFWWHAAWGLCLVPLSLAQIDLNITCRFAGVFHVEKNGRYSISRTEAADLCKAFNSTLPTMAQMEKALSIGFETCRYGFIEGHVVIPRIHPNSICAANNTGVYILTSNTSQYDTYCFNASAPPEEDCTSVTDLPNAFDGPITITIVNRDGTRYVQKGEYRTNPEDIYPSNPTDDDVSSGSSSERSSTSGGYIFYTFSTVHPIPDEDSPWITDSTDRIPATTLMSTSATATETATKRQETWDWFSWLFLPSESKNHLHTTTQMAGTSSNTISAGWEPNEENEDERDRHLSFSGSGIDDDEDFISSTISTTPRAFDHTKQNQDWTQWNPSHSNPEVLLQTTTRMTDVDRNGTTAYEGNWNPEAHPPLIHHEHHEEEETPHSTSTIQATPSSTTEETATQKEQWFGNRWHEGYRQTPKEDSHSTTGTAAASAHTSHPMQGRTTPSPEDSSWTDFFNPISHPMGRGHQAGRRMDMDSSHSITLQPTANPNTGLVEDLDRTGPLSMTTQQSNSQSFSTSHEGLEEDKDHPTTSTLTSSNRNDVTGGRRDPNHSEGSTTLLEGYTSHYPHTKESRTFIPVTSAKTGSFGVTAVTVGDSNSNVNRSLSGDQDTFHPSGGSHTTHGSESDGHSHGSQEGGANTTSGPIRTPQIPEWLIILASLLALALILAVCIAVNSRRRCGQKKKLVINSGNGAVEDRKPSGLNGEASKSQEMVHLVNKESSETPDQFMTADETRNLQNVDMKIGV

SEQ ID NO: 2352 - protein, 206 aa, Homo sapiens
MDKFWWHAAWGLCLVPLSLAQIDLNITCRFAGVFHVEKNGRYSISRTEAADLCKAFNSTLPTMAQMEKALSIGFETCRYGFIEGHVVIPRIHPNSICGANTTSGPIRTPQIPEWLIILASLLALALILAVCIAVNSRRRCGQKKKLVINSGNGAVEDRKPSGLNGEASKSQEMVHLVNKESSETPDQFMTADETRNLQNVDMKIGV

SEQ ID NO: 2353 - protein, 139 aa, Homo sapiens
MDKFWWHAAWGLCLVPLSLAQIDLNITCRFAGVFHVEKNGRYSISRTEAADLCKAFNSTLPTMAQMEKALSIGFETCSLHCSQQSKKVWAEEKASDQQWQWSCGGQKAKWTQRRGQQVSGNGAFGEQGVVRNSRPVYDS

SEQ ID NO: 2354 - protein, 80 aa, Homo sapiens
MDKFWWHAAWGLCLVPLSLAQIDLNITCRFAGVFHVEKNGRYSISRTEAADLCKAFNSTLPTMAQMEKALSIGFETCSST

SEQ ID NO: 2355 - protein, 232 aa, Homo sapiens
PEDIYPSNPTDDDVSSGSSSERSSTSGGYIFYTFSTVHPIPDEDSPWITDSTDRIPATNMDSSHSITLQPTANPNTGLVEDLDRTGPLSMTTQQSNSQSFSTSHEGLEEDKDHPTTSTLTSSRDQDTFHPSGGSHTTHGSESDGHSHGSQEGGANTTSGPIRTPQIPEWLIILASLLALALILAVCIAVNSRRRCGQKKKLVINSGNGAVEDRKPSGLNGEASKSQEMVHLV

SEQ ID NO: 2356 - protein, 195 aa, Homo sapiens
RNGTTAYEGNWNPEAHPPLIHHEHHEEEETPHSTSTIQATPSSTTEETATQKEQWFGNRWHEGYRQTPKEDSHSTTGTADMDSSHSITLQPTANPNTGLVEDLDRTGPLSMTTQQSNSQSFSTSHEGLEEDKDHPTTSTLTSSNRNDVTGGRRDPNHSEGSTTLLEGYTSHYPHTKESRTFIPVTSAKTGSFGVT

SEQ ID NO: 2357 - protein, 187 aa, Homo sapiens [sequence omitted]

SEQ ID NO: 2358 - protein, 287 aa, Homo sapiens
RYSISRTEAADLCKAFNSTLPTMAQMEKALSIGFETCRYGFIEGHVVIPRIHPNSICAANNTGVYILTSNTSQYDTYCFNASAPPEEDCTSVTDLPNAFDGPITITIVNRDGTRYVQKGEYRTNPEDIYPSNPTDDDVSSGSSSERSSTSGGDQDTFHPSGGSHTTHGSESDGHSHGSQEGGANTTSGPIRTPQIPEWLIILASLLALALILAVCIAVNSRRRCGQKKKLVINSGNGAVEDRKPSGLNGEASKSQEMVHLVNKESSETPDQFMTADETRNLQNVDMK

SEQ ID NO: 2359 - protein, 82 aa, Homo sapiens
SKHNLWSYKDTPNSRCGQKKKLVINSGNGAVEDRKPSGLNGEASKSQEMVHLVNKESSETPDQFMTADETRNLQNVDMKIGV

SEQ ID NO: 2360 - protein, 294 aa, Homo sapiens
  VARIANT 1: note = misc_feature - Xaa can be any naturally occurring amino acid
XDKFWWHAAWGLCLVPLSLAQIDLNITCRFAGVFHVEKNGRYSISRTEAADLCKAFNSTLPTMAQMEKALSIGFETCRYGFIEGHVVIPRIHPNSICAANNTGVYILTSNTSQYDTYCFNASAPPEEDCTSVTDLPNAFDGPITITIVNRDGTRYVQKGEYRTNPEDIYPSNPTDDDVSSGSSSERSSTSGGYIFYTFSTVHPIPDEDSPWITDSTDRIPATRDQDTFHPSGGSHTTHGSESDGHSHGSQEGGANTTSGPIRTPQIPEWLIILASLLALALILAVCIAVNSRRS

SEQ ID NO: 2361 - protein, 243 aa, Homo sapiens
  VARIANT 1: note = misc_feature - Xaa can be any naturally occurring amino acid
XDLPNAFDGPITITIVNRDGTRYVQKGEYRTNPEDIYPSNPTDDDVSSGSSSERSSTSGGYIFYTFSTVHPIPDEDSPWITDSTDRIPATTLMSTSATATETATKRQETWDWFSWLFLPSESKNHLHTTTQMAGTSSNTISAGWEPNEENEDERDRHLSFSGSGIDDDEDFISSTNMDSSHSITLQPTANPNTGLVEDLDRTGPLSMTTQQSNSQSFSTSHEGLEEDKDHPTTSTLTSSNRND

SEQ ID NO: 2362 - protein, 195 aa, Homo sapiens
  VARIANT 1: note = misc_feature - Xaa can be any naturally occurring amino acid
XFIEGHVVIPRIHPNSICAANNTGVYILTSNTSQYDTYCFNASAPPEEDCTSVTDLPNAFDGPITITIVNRDGTRYVQKGEYRTNPEDIYPSNPTDDDVSSGSSSERSSTSGGYIFYTFSTVHPIPDEDSPWITDSTDRIPATKQSNSQSFSTSHEGLEEDKDHPTTSTLTSSNRNDVTGGRRDPNHSEGSTTLL

SEQ ID NO: 2363 - protein, 240 aa, Homo sapiens
  VARIANT 1: note = misc_feature - Xaa can be any naturally occurring amino acid
XLNITCRFAGVFHVEKNGRYSISRTEAADLCKAFNSTLPTMAQMEKALSIGFETCRYGFIEGHVVIPRIHPNSICAANNTGVYILTSNTSQYDTYCFNASAPPEEDCTSVTDLPNAFDGPITITIVNRDGTRYVQKGEYRTNPEDIYPSNPTDDDVSSGSSSERSSTSGDRNDVTGGRRDPNHSEGSTTLLEGYTSHYPHTKESRTFIPVTSAKTGSFGVTAVTVGDSNSNVNRSLSGDQ

SEQ ID NO: 2364 - protein, 118 aa, Homo sapiens
  VARIANT 1: note = misc_feature - Xaa can be any naturally occurring amino acid
XPDEDSPWITDSTDRIPATSWEPNEENEDERDRHLSFSGSGIDDDEDFISSTISTTPRAFDHTKQNQDWTQWNPSHSNPEVLLQTTTRMTDVDRNGTTAYEGNWNPEAHPPLIHHEHH

SEQ ID NO: 2365 - protein, 230 aa, Homo sapiens
  VARIANT 1: note = misc_feature - Xaa can be any naturally occurring amino acid
XQMEKALSIGFETCRYGFIEGHVVIPRIHPNSICAANNTGVYILTSNTSQYDTYCFNASAPPEEDCTSVTDLPNAFDGPITITIVNRDGTRYVQKGEYRTNPEDIYPSNPTDDDVSSGSSSERSSTSGGYIFYTFSTVHPIPDEDSPWITDSTDRIPATISTTPRAFDHTKQNQDWTQWNPSHSNPEVLLQTTTRMTDVDRNGTTAYEGNWNPEAHPPLIHHEHHEEEET

SEQ ID NO: 2366 - protein, 183 aa, Homo sapiens
  VARIANT 1: note = misc_feature - Xaa can be any naturally occurring amino acid
XRTEAADLCKAFNSTLPTMAQMEKALSIGFETCRYGFIEGHVVIPRIHPNSICAANNTGVYILTSNTSQYDTYCFNASAPPEEDCTSVTDLPNAFDGPITITIVNRDGTRYVQKGEYRTNPEDIYPSNPTDDDVSSGSSSERSSTSGDMDSSHSITLQPTANPNTGLVEDLDRTGPLSMTTQQ

SEQ ID NO: 2367 - protein, 191 aa, Homo sapiens
  VARIANT 1: note = misc_feature - Xaa can be any naturally occurring amino acid
XSTTPRAFDHTKQNQDWTQWNPSHSNPEVLLQTTTRMTVQATPSSTTEETATQKEQWFGNRWHEGYRQTPKEDSHSTTGTAASAHTSHPMQGRTTPSPEDSSWTDFFNPISHPMGRGHQAGRRMDMDSSHSITLQPTANPNTGLVEDLDRTGPLSMTTQQSNSQSFSTSHEGLEEDKDHPTTSTLTSSNRN

SEQ ID NO: 2368 - protein, 243 aa, Homo sapiens
MCSRGWDSCLALELLLLPLSLLVTSIQGHLVHMTVVSGSNVTLNISESLPENYKQLTWFYTFDQKIVEWDSRKSKYFESKFKGRVRLDPQSGALYISKVQKEDNSTYIMRVLKKTGNEQEWKIKLQVLDPVPKPVIKIEKIEDMDDNCYLKLSCVIPGESVNYTWYGDKRPFPKELQNSVLETTLMPHNYSRCYTCQVSNSVSSKNGTVCLSPPCTLARSFGVEWIASWLVVTVPTILGLLLT

SEQ ID NO: 2369 - protein, 252 aa, Homo sapiens
MCSRGWDSCLALELLLLPLSLLVTSIQGHLVHMTVVSGSNVTLNISESLPENYKQLTWFYTFDQKIVEWDSRKSKYFESKFKGRVRLDPQSGALYISKVQKEDNSTYIMRVLKKTGNEQEWKIKLQVLDPVPKPVIKIEKIEDMDDNCYLKLSCVIPGESVNYTWYGDKRPFPKELQNSVLETTLMPHNYSRCYTCQVSNSVSSKNGTVCLSPPCTLGKKDPWELRGAQGNWSCFEQRKAGGPIQPPCTVWW

SEQ ID NO: 2370 - protein, 169 aa, Homo sapiens
MCSRGWDSCLALELLLLPLSLLVTSIQGHLVHMTVVSGSNVTLNISESLPENYKQLTWFYTFDQKIVEWDSRKSKYFESKFKGRVRLDPQSGALYISKVQKEDNSTYIMRVLKKTGNEQEWKIKLQVLGESGEPKSKSPLQWPQMDHCRASWEAWGTLGEEERKTSGQV

SEQ ID NO: 2371 - protein, 165 aa, Homo sapiens
MPMGSLQPLATLYLLGMLVASCLGRLSWYDPDFQARLTRSNSKCQGQLEVYLKDGWHMVCSQSWGRSSKQWEDPSQASKVCQRLNCGVPLSLGPFLVTYTPQSSIICYGQLGSFSNCSHSRNDMCHSLGLTCLEPQKTTPPTTRPPPTTTPEPTAMRPRTRPRTW

SEQ ID NO: 2372 - protein, 495 aa, Homo sapiens
MPMGSLQPLATLYLLGMLVASCLGRLSWYDPDFQARLTRSNSKCQGQLEVYLKDGWHMVCSQSWGRSSKQWEDPSQASKVCQRLNCGVPLSLGPFLVTYTPQSSIICYGQLGSFSNCSHSRNDMCHSLGLTCLEPQKTTPPTTRPPPTTTPEPTAPPRLQLVAQSGGQHCAGVVEFYSGSLGGTISYEAQDKTQDLENFLCNNLQCGSFLKHLPETEAGRAQDPGEPREHQPLPIQWKIQNSSCTSLEHCFRKIKPQKSGRVLALLCSGFQPKVQSRLVGGSSICEGTVEVRQGAQWAALCDSSSARSSLRWEEVCREQQCGSVNSYRVLDAGDPTSRGLFCPHQKLSQCHELWERNSYCKKVFVTCQDPNPAGLAAGTVASIILALVLLVVLLVVCGPLAYKKLVKKFRQKKQRQWIGPTGMNQNMSFHRNHTATVRSHAENPTASHVDNEYSQPPRNSHLSAYPALEGALHRSSMQPDNSSDSDYDLHGAQRL

SEQ ID NO: 2373 - protein, 317 aa, Homo sapiens
MTVARPSVPAALPLLGELPRLLLLVLLCLPAVWGDCGLPPDVPNAQPALEGRTSFPEDTVITYKCEESFVKIPGEKDSVICLKGSQWSDIEEFCNQKSCPNPGEIRNGQIDVPGGILFGATISFSCNTGYKLFGSTSSFCLISGSSVQWSDPLPECREIYCPAPPQIDNGIIQGERDHYGYRQSVTYACNKGFTMIGEHSIYCTVNNDEGEWSGPPPECRGKSLTSKVPPTVQKPTTVNVPTTEVSPTSQKTTTKTTTPNAQATRSTPVSRTTKHFHETTPNKGSGTTSGTTRLLSGHTCFTLTGLLGTLVTMGLLT

SEQ ID NO: 2374 - protein, 440 aa, Homo sapiens
MTVARPSVPAALPLLGELPRLLLLVLLCLPAVWGDCGLPPDVPNAQPALEGRTSFPEDTVITYKCEESFVKIPGEKDSVICLKGSQWSDIEEFCNRSCEVPTRLNSASLKQPYITQNYFPVGTVVEYECRPGYRREPSLSPKLTCLQNLKWSTAVEFCKKKSCPNPGEIRNGQIDVPGGILFGATISFSCNTGYKLFGSTSSFCLISGSSVQWSDPLPECREIYCPAPPQIDNGIIQGERDHYGYRQSVTYACNKGFTMIGEHSIYCTVNNDEGEWSGPPPECRGKSLTSKVPPTVQKPTTVNVPTTEVSPTSQKTTTKTTTPNAQATRSTPVSRTTKHFHETTPNKGSGTTSGTTRLLSGSRPVTQAGMRWCDRSSLQSRTPGFKRSFHFSLPSSWYYRAHVFHVDRFAWDASNHGLADLAKEELRRKYTQVYRLFLVS

SEQ ID NO: 2375 - protein, 381 aa, Homo sapiens
MTVARPSVPAALPLLGELPRLLLLVLLCLPAVWGDCGLPPDVPNAQPALEGRTSFPEDTVITYKCEESFVKIPGEKDSVICLKGSQWSDIEEFCNRSCEVPTRLNSASLKQPYITQNYFPVGTVVEYECRPGYRREPSLSPKLTCLQNLKWSTAVEFCKKKSCPNPGEIRNGQIDVPGGILFGATISFSCNTGYKLFGSTSSFCLISGSSVQWSDPLPECREIYCPAPPQIDNGIIQGERDHYGYRQSVTYACNKGFTMIGEHSIYCTVNNDEGEWSGPPPECRGKSLTSKVPPTVQKPTTVNVPTTEVSPTSQKTTTKTTTPNAQATRSTPVSRTTKHFHETTPNKGSGTTSGTTRLLSGHTCFTLTGLLGTLVTMGLLT

SEQ ID NO: 2376 - protein, 444 aa, Homo sapiens
MTVARPSVPAALPLLGELPRLLLLVLLCLPAVWGDCGLPPDVPNAQPALEGRTSFPEDTVITYKCEESFVKIPGEKDSVICLKGSQWSDIEEFCNRSCEVPTRLNSASLKQPYITQNYFPVGTVVEYECRPGYRREPSLSPKLTCLQNLKWSTAVEFCKKKSCPNPGEIRNGQIDVPGGILFGATISFSCNTGYKLFGSTSSFCLISGSSVQWSDPLPECREIYCPAPPQIDNGIIQGERDHYGYRQSVTYACNKGFTMIGEHSIYCTVNNDEGEWSGPPPECRGKSLTSKVPPTVQKPTTVNVPTTEVSPTSQKTTTKTTTPNAQATRSTPVSRTTKHFHETTPNKGSGTTSGTTRLLSGSRPVTQAGMRWCDRSSLQSRTPGFKRSFHFSLPSSWYYRCVPRHPAKFLKFIFCRDRIFLCCPGWFQTPGRKRFFRPPKTLRL

SEQ ID NO: 2377 - protein, 550 aa, Homo sapiens
MTVARPSVPAALPLLGELPRLLLLVLLCLPAVWGDCGLPPDVPNAQPALEGRTSFPEDTVITYKCEESFVKIPGEKDSVICLKGSQWSDIEEFCNRSCEVPTRLNSASLKQPYITQNYFPVGTVVEYECRPGYRREPSLSPKLTCLQNLKWSTAVEFCKKKSCPNPGEIRNGQIDVPGGILFGATISFSCNTGYKLFGSTSSFCLISGSSVQWSDPLPECREIYCPAPPQIDNGIIQGERDHYGYRQSVTYACNKGFTMIGEHSIYCTVNNDEGEWSGPPPECRGKSLTSKVPPTVQKPTTVNVPTTEVSPTSQKTTTKTTTPNAQGTETPSVLQKHTTENVSATRTPPTPQKPTTVNVPATIVTPTPKPTTINVPATGVSSTPQRHTIVNVSATGTLPTLQKPTRANDSATKSPAAAQTSFISKTLSTKTPSAAQNPMMTNASATQATLTAQKFTTAKVAFTQSPSAARKSTNVHSPVTNGLKSTQRFPSAHITATRSTPVSRTTKHFHETTPNKGSGTTSGTTRLLSGHTCFTLTGLLGTLVTMGLLT

SEQ ID NO: 2378 - protein, 439 aa, Homo sapiens
MTVARPSVPAALPLLGELPRLLLLVLLCLPAVWGDCGLPPDVPNAQPALEGRTSFPEDTVITYKCEESFVKIPGEKDSVICLKGSQWSDIEEFCNRSCEVPTRLNSASLKQPYITQNYFPVGTVVEYECRPGYRREPSLSPKLTCLQNLKWSTAVEFCKKKSCPNPGEIRNGQIDVPGGILFGATISFSCNTGYKLFGSTSSFCLISGSSVQWSDPLPECREIYCPAPPQIDNGIIQGERDHYGYRQSVTYACNKGFTMIGEHSIYCTVNNDEGEWSGPPPECRGKSLTSKVPPTVQKPTTVNVPTTEVSPTSQKTTTKTTTPNAQATRSTPVSRTTKHFHETTPNKGSGTTSGTTRLLSETVFHRVIQDGLDLLASRSACLGLPKCWDYRREPPHLARAHVFHVDRFAWDASNHGLADLAKEELRRKYTQVYRLFLVS

SEQ ID NO: 2379 - protein, 384 aa, Homo sapiens
MTVARPSVPAALPLLGELPRLLLLVLLCLPAVWGDCGLPPDVPNAQPALEGRTSFPEDTVITYKCEESFVKIPGEKDSVICLKGSQWSDIEEFCNRSCEVPTRLNSASLKQPYITQNYFPVGTVVEYECRPGYRREPSLSPKLTCLQNLKWSTAVEFCKKKSCPNPGEIRNGQIDVPGGILFGATISFSCNTGYKLFGSTSSFCLISGSSVQWSDPLPECREIYCPAPPQIDNGIIQGERDHYGYRQSVTYACNKGFTMIGEHSIYCTVNNDEGEWSGPPPECRGKSLTSKVPPTVQKPTTVNVPTTEVSPTSQKTTTKTTTPNAQATRSTPVSRTTKHFHETTPNKGSGTTSGTTRLLSALQVRPFEVSGSSHISSKKMMCIL

SEQ ID NO: 2380 - protein, 326 aa, Homo sapiens
  VARIANT 1: note = misc_feature - Xaa can be any naturally occurring amino acid
XAALPLLGELPRLLLLVLLCLPAVWESSRVEHTMLQTCMSSLSGDCGLPPDVPNAQPALEGRTSFPEDTVITYKCEESFVKIPGEKDSVICLKGSQWSDIEEFCNRSCEVPTRLNSASLKQPYITQNYFPVGTVVEYECRPGYRREPSLSPKLTCLQNLKWSTAVEFCKKKSCPNPGEIRNGQIDVPGGILFGATISFSCNTGYKLFGSTSSFCLISGSSVQWSDPLPECREIYCPAPPQIDNGIIQGERDHYGYRQSVTYACNKGFTMIGEHSIYCTVNNDEGEWSGPPPECRGKSLTSKVPPTVQKPTTVNVPTTEVSPTSQKT

SEQ ID NO: 2381 - protein, 268 aa, Homo sapiens
  VARIANT 1: note = misc_feature - Xaa can be any naturally occurring amino acid
XGEIRNGQIDVPGGILFGATISFSCNTGYKLFGSTSSFCLISGSSVQWSDPLPECREIYCPAPPQIDNGIIQGERDHYGYRQSVTYACNKGFTMIGEHSIYCTVNNDEGEWSGPPPECRGKSLTSKVPPTVQKPTTVNVPTTEVSPTSQKTTTKTTTPNAQATRSTPVSRTTKHFHETTPNKGSGTTSGTTRLLSESYSVTQAGVWWCDLRSLQPLPPEFKQFSCLSLRSSWDYRIITGHLLPGDFSVPSTIVDGIYFPTPLSPFFVG

SEQ ID NO: 2382 - protein, 194 aa, Homo sapiens
  VARIANT 1: note = misc_feature - Xaa can be any naturally occurring amino acid
XREIYCPAPPQIDNGIIQGERDHYGYRQSVTYACNKGFTMIGEHSIYCTVNNDEGEWSGPPPECRGKSLTSKVPPTVQKPTTVNVPTTEVSPTSQKTTTKTTTPNAQATRSTPVSRTTKHFHETTPNKGSGTTSGTTRLLSESYSVTQAGVWWCDLRSLQPLPPEFKQFSCLSLRSSWDYRIEAADLHSECYSS

SEQ ID NO: 2383 - protein, 61 aa, Homo sapiens
  VARIANT 1: note = misc_feature - Xaa can be any naturally occurring amino acid
XTTEVSPTSQKTTTKTTTPNAQATRSTPVSRTTKHFHETTPNKGSGTTSGTTRLLSAIFSC

SEQ ID NO: 2384 - protein, 119 aa, Homo sapiens
MGIQGGSVLFGLLLVLAVFCHSGHSLQCYNCPNPTADCKTAVNCSSDFDACLITKAELGYHYVAQAGRRQSSHFSLLKCWDYRCEPSHWPHCPYFNWGYKCITSVGSLSIAISTTSQPA

SEQ ID NO: 2385 - protein, 119 aa, Homo sapiens; identical to SEQ ID NO: 2384

SEQ ID NO: 2386 - protein, 120 aa, Homo sapiens
MGIQGGSVLFGLLLVLAVFCHSGHSLQCYNCPNPTADCKTAVNCSSDFDACLITKAGLQVYNKCWKFEHCNFNDVTTRLRENELTYYCCKKDLCNFNEQLENGGTSLSEKTVLLLVTPFL

SEQ ID NO: 2387 - protein, 128 aa, Homo sapiens
MGIQGGSVLFGLLLVLAVFCHSGHSLQCYNCPNPTADCKTAVNCSSDFDACLITKAGLQVYNKCWKFEHCNFNDVTTRLRENELTYYCCKKDLCNFNEQLENGGTSLSEKTVLLLVTPFLAAAWSLHP

SEQ ID NO: 2388 - protein, 128 aa, Homo sapiens; identical to SEQ ID NO: 2387

SEQ ID NO: 2389 - protein, 128 aa, Homo sapiens; identical to SEQ ID NO: 2387

SEQ ID NO: 2390 - protein, 128 aa, Homo sapiens; identical to SEQ ID NO: 2387

SEQ ID NO: 2391 - protein, 128 aa, Homo sapiens; identical to SEQ ID NO: 2387

SEQ ID NO: 2392 - protein, 128 aa, Homo sapiens; identical to SEQ ID NO: 2387

SEQ ID NO: 2393 - protein, 128 aa, Homo sapiens; identical to SEQ ID NO: 2387

SEQ ID NO: 2394 - protein, 128 aa, Homo sapiens; identical to SEQ ID NO: 2387

SEQ ID NO: 2395 - protein, 347 aa, Homo sapiens
MALLFSLILAICTRPGFLASPSGVRLVGGLHRCEGRVEVEQKGQWGTVCDDGWDIKDVAVLCRELGCGAASGTPSGILYEPPAEKEQKVLIQSVSCTGTEDTLAQCEQEEVYDCSHDEDAGASCENPESSFSPVPEGVRLADGPGHCKGRVEVKHQNQWYTVCQTGWSLRAAKVVCRQLGCGRAVLTQKRCNKHAYGRKPIWLSQMSCSGREATLQDCPSGPWGKNTCNHDEDTWVECEDPFDLRLVGGDNLCSGRLEVLHKGVWGSVCDDNWGEKEDQVVCKQLGCGKSLSPSFRDRKCYGPGVGRIWLDNVRCSGEEQSLEQCQHRFWGFHDCTHQEDVAVICSG

SEQ ID NO: 2396 - protein, 38 aa, Homo sapiens
MWLFFGITGLLTAALSGCTVAKWIQLLGEICCFAGMGF

SEQ ID NO: 2397 - protein, 468 aa, Homo sapiens
MWLFFGITGLLTAALSGHPSPAPPDQLNTSSAESELWEPGERLPVRLTNGSSSCSGTVEVRLEASWEPACGALWDSRAAEAVCRALGCGGAEAASQLAPPTPELPPPPAAGNTSVAANATLAGAPALLCSGAEWRLCEVVEHACRSDGRRARVTCAENRALRLVDGGGACAGRVEMLEHGEWGSVCDDTWDLEDAHVVCRQLGCGWAVQALPGLHFTPGRGPIHRDQVNCSGAEAYLWDCPGLPGQHYCGHKEDAGAVCSEHQSWRLTGGADRCEGQVEVHFRGVWNTVCDSEWYPSEAKVLCQSLGCGTAVERPKGLPHSLSGRMYYSCNGEELTLSNCSWRFNNSNLCSQSLAARVLCSASRSLHNLSTPEVPASVQTVTIESSVTVKIENKESRELMLLIPSIVLGILLLGSLIFIAFILLRIKGKYALPVMVNHQHLPTTIPAGSNSYQPVPITIPKEGPGPAP

SEQ ID NO: 2398 - protein, 668 aa, Homo sapiens
MWLFFGITGLLTAALSGHPSPAPPDQLNTSSAESELWEPGERLPVRLTNGSSSCSGTVEVRLEASWEPACGALWDSRAAEAVCRALGCGGAEAASQLAPPTPELPPPPAAGNTSVAANATLAGAPALLCSGAEWRLCEVVEHACRSDGRRARVTCAENRALRLVDGGGACAGRVEMLEHGEWGSVCDDTWDLEDAHVVCRQLGCGWAVQALPGLHFTPGRGPIHRDQVNCSGAEAYLWDCPGLPGQHYCGHKEDAGAVCSEHQSWRLTGGADRCEGQVEVHFRGVWNTVCDSEWYPSEAKVLCQSLGCGTAVERPKGLPHSLSGRMYYSCNGEELTLSNCSWRFNNSNLCSQSLAARVLCSASRSLHNLSTPEVPASVQTVTIESSVTVKIENKESRELMLLIPSIVLGILLLGSLIFIAFILLRIKGKYALPVMVNHQHLPTTIPAGSNSYQPVPITIPKEVFMLPIQVQAPPPEDSDSGSDSDYEHYDFSAQPPVALTTFYNSQRHRVTDEEVQQSRFQMPPLEEGLEELHASHIPTANPGHCITDPPSLGPQYHPRSNSESSTSSGEDYCNSPKSKLPPWNPQVFSSERSSFLEQPPNLELAGTQPAFSAGPPADDSSSTSSGEWYQNFQPPPQPPSEEQFGCPGSPSPQPDSTDNDDYDDISAA

SEQ ID NO: 2399 - protein, 601 aa, Homo sapiens
MWLFFGITGLLTAALSGHPSPAPPDQLNTSSAESELWEPGERLPVRLTNGSSSCSGTVEVRLEASWEPACGALWDSRAAEAVCRALGCGGAEAASQLAPPTPELPPPPAAGNTSVAANATLAGAPALLCSGAEWRLCEVVEHACRSDGRRARVTCAENRALRLVDGGGACAGRVEMLEHGEWGSVCDDTWDLEDAHVVCRQLGCGWAVQALPGLHFTPGRGPIHRDQVNCSGAEAYLWDCPGLPGQHYCGHKEDAGAVCSEHQSWRLTGGADRCEGQVEVHFRGVWNTVCDSEWYPSEAKVLCQSLGCGTAVERPKGLPHSLSGRMYYSCNGEELTLSNCSWRFNNSNLCSQSLAARVLCSASRSLHNLSTPEVPASVQTVTIESSVTVKIENKESRELMLLIPSIVLGILLLGSLIFIAFILLRIKGKYVFMLPIQVQAPPPEDSDSGSDSDYEHYDFSAQPPVALTTFYNSQRHRVTDEEVQQSRFQMPPLEEGLEELHASHIPTANPGHCITDPPSLGPQYHPRSNSESSTSSGEDYCNSPKSKLPPWNPQVFSSERSSFLEQPPNLELAGTQPAFSGSPSPQPDSTDNDDYDDISAA

SEQ ID NO: 2400 - protein, 592 aa, Homo sapiens
MWLFFGITGLLTAALSGHPSPAPPDQLNTSSAESELWEPGERLPVRLTNGSSSCSGTVEVRLEASWEPACGALWDSRAAEAVCRALGCGGAEAASQLAPPTPELPPPPAAGNTSVAANATLAGAPALLCSGAEWRLCEVVEHACRSDGRRARVTCAENRALRLVDGGGACAGRVEMLEHGEWGSVCDDTWDLEDAHVVCRQLGCGWAVQALPGLHFTPGRGPIHRDQVNCSGAEAYLWDCPGLPGQHYCGHKEDAGAVCSEHQSWRLTGGADRCEGQVEVHFRGVWNTVCDSEWYPSEAKVLCQSLGCGTAVERPKGLPHSLSGRMYYSCNGEELTLSNCSWRFNNSNLCSQSLAARVLCSASRSLHNLSTPEVPASVQTVTIESSVTVKIENKESRELMLLIPSIVLGILLLGSLIFIAFILLRIKGKYALPVMVNHQHLPTTIPAGSNSYQPVPITIPKEDSQRHRVTDEEVQQSRFQMPPLEEGLEELHASHIPTANPGHCITDPPSLGPQYHPRSNSESSTSSGEDYCNSPKSKLPPWNPQVFSSERSSFLEQPPNLELAGTQPAFSGSPSPQPDSTDNDDYDDISAA

SEQ ID NO: 2401 - protein, 422 aa, Homo sapiens
MWLFFGITGLLTAALSGHPSPAPPDQLNTSSAESELWEPGERLPVRLTNGSSSCSGTVEVRLEASWEPACGALWDSRAAEAVCRALGCGGAEAASQLAPPTPELPPPPAAGNTSVAANATLAGAPALLCSGAEWRLCEVVEHACRSDGRRARVTCAENRALRLVDGGGACAGRVEMLEHGEWGSVCDDTWDLEDAHVVCRQLGCGWAVQALPGLHFTPGRGPIHRDQVNCSGAEAYLWDCPGLPGQHYCGHKEDAGAVCSASRSLHNLSTPEVPASVQTVTIESSVTVKIENKESRELMLLIPSIVLGILLLGSLIFIAFILLRIKGKYVFMLPIQVQAPPPEDSDSGSDSDYEHYDFSAQPPVALTTFYNSQRHRVTDEEVQQSRFQMPPLEEGLEELHASHIPTANPGHCITDPPSLGPQ

SEQ ID NO: 2402 - protein, 278 aa, Homo sapiens
MWLFFGITGLLTAALSGHPSPAPPDQLNTSSAESELWEPGERLPVRLTNGSSSCSGTVEVRLEASWEPACGALWDSRAAEAVCRALGCGGAEAASQLAPPTPELPPPPAAGNTSVAANATLAGAPALLCSGAEWRLCEVVEHACRSDGRRARVTCAENRALRLVDGGGACAGRVEMLEHGEWGSVCDDTWDLEDAHVVCRQLGCGWAVQALPGLHFTPGRGPIHRDQVNCSGAEAYLWDCPGLPGQHYCGHKEDAGAVCSESSVTVKIENKESRELML

SEQ ID NO: 2403 - protein, 186 aa, Homo sapiens
  VARIANT 1: note = misc_feature - Xaa can be any naturally occurring amino acid
XNRALRLVDGGGACAGRVEMLEHGEWGSVCDDTWDLEDAHVVCRQLGCGWAVQALPGLHFTPGRGPIHRDQVNCSGAEAYLWDCPGLPGQHYCGHKEDAGAVCSASRSLHNLSTPEVPASVQTVTIESSVTVKIENKESRELMLLIPSIVLGILLLGSLIFIAFILLRIKGKYALPVMVNHQHLPT

SEQ ID NO: 2404 - protein, 354 aa, Homo sapiens
MRLAVLFSGALLGLLAAQGTGNDCPHKKSATLLPSFTVTPTVTESTGTTSHRTTKSHKTTTHRTTTTGTTSHGPTTATHNPTTTSHGNVTVHPTSNSTATSQGPSTATHSPATTSHGNATVHPTSNSTATSPGFTSSAHPEPPPPSPSPSPTSKETIGDYTWTNGSQPCVHLQAQIQIRVMYTTQGGGEAWGISVLNPNKTKVQGSCEGAHPHLLLSFPYGHLSFGFMQDLQQKVVYLSYMAVEYNVSFPHAAQWTFSAQNASLRDLQAPLGQSFSCSNSSIILSPAVHLDLLSLRLQAAQLPHTGVFGQSFSCPSDRSILLPLIIGLILLGLLALVLIAFCIIRRRPSAYQAL

SEQ ID NO: 2405 - protein, 181 aa, Homo sapiens [sequence omitted]

SEQ ID NO: 2406 - protein, 327 aa, Homo sapiens
MRLAVLFSGALLGLLAESTGTTSHRTTKSHKTTTHRTTTTGTTSHGPTTATHNPTTTSHGNVTVHPTSNSTATSQGPSTATHSPATTSHGNATVHPTSNSTATSPGFTSSAHPEPPPPSPSPSPTSKETIGDYTWTNGSQPCVHLQAQIQIRVMYTTQGGGEAWGISVLNPNKTKVQGSCEGAHPHLLLSFPYGHLSFGFMQDLQQKVVYLSYMAVEYNVSFPHAAQWTFSAQNASLRDLQAPLGQSFSCSNSSIILSPAVHLDLLSLRLQAAQLPHTGVFGQSFSCPSDRSILLPLIIGLILLGLLALVLIAFCIIRRRPSAYQAL

SEQ ID NO: 2407 - protein, 121 aa, Homo sapiens
  VARIANT 1: note = misc_feature - Xaa can be any naturally occurring amino acid
XKTKVQGSCEGAHPHLLLSFPYGHLSFGFMQDLQQKVVYLSYMAVEYNVSFPHAAQWTFSAQNASLRDLQAPLGQSFSCSNSSIILSPAVHLDLLSLRLQAAQLPHTGVFGQSKTYLLLPS

SEQ ID NO: 2408 - protein, 35 aa, Homo sapiens
MAGPPRLLLLPLLLALARGLPGALAAQAGACVGST

SEQ ID NO: 2409 - protein, 240 aa, Homo sapiens
MAGPPRLLLLPLLLALARGLPGALAAQEVQQSPHCTTVPVGASVNITCSTSGGLRGIYLRQLGPQPQDIIYYEDGVVPTTDRRFRGRIDFSGSQDNLTITMHRLQLSDTGTYTCQAITEVNVYGSGTLVLVTEEQSQGWHRCSDAPPRASALPAPPTGSALPDPQTASALPDPPAASALPAALAVISFLLGLGLGVACVLARTQIKKLCSWRDKNSAACVVYEDMSHSRCNTLSSPNQYQ

SEQ ID NO: 2410 - protein, 221 aa, Homo sapiens
MAGPPRLLLLPLLLALARGLPGALAAQEVQQSPHCTTVPVGASVNITCSTSGGLRGIYLRQLGPQPQDIIYYEDGVVPTTDRRFRGRIDFSGSQDNLTITMHRLQLSDTGTYTCQAITEVNVYGSGTLVLVTEEQSQGWHRCSDAPPRASALPAPPTGSALPDPQTASALPDPPAASALPAALAVISFLLGLGLGVACVLARTQVSVSPSCHLHPKDCSLS

SEQ ID NO: 2411 - protein, 160 aa, Homo sapiens
MAGPPRLLLLPLLLALARGLPGALAAQGRTFSVLLARLMVTAQVLPRGAAVSPLHDCPRGSLRQHHLLHQRGPAWDLPEAARATAPRHHLLRGRGGAHYGQTVPGPHRLLRVPGQPDYHHAPPAAVGHWHLHLPGHHGGQCLRLRHPGPGDRGTVPRMAQ

SEQ ID NO: 2412 - protein, 140 aa, Homo sapiens
MHRLQLSDTGTYTCQAITEVNVYGSGTLVLVTEEQSQGWHRCSDAPPRASALPAPPTGSALPDPQTASALPDPPAASALPAALAVISFLLGLGLGVACVLARTQIKKLCSWRDKNSAACVVYEDMSHSRCNTLSSPNQYQ

SEQ ID NO: 2413 - protein, 121 aa, Homo sapiens
MHRLQLSDTGTYTCQAITEVNVYGSGTLVLVTEEQSQGWHRCSDAPPRASALPAPPTGSALPDPQTASALPDPPAASALPAALAVISFLLGLGLGVACVLARTQVSVSPSCHLHPKDCSLS

SEQ ID NO: 2414 - protein, 188 aa, Homo sapiens
MPGGPGVLQALPATIFLLFLLSAVYLGPGCQALWMHKVPASLMVSLGEDAHFQCPHNSSNNANVTWWRVLHGNYTWPPEFLGPGEDPNEPPPRPFLDMGEGTKNRIITAEGIILLFCAVVPGTLLLFRKRWQNEKLGLDAGDEYEDENLYEGLNLDDCSMYEDISRGLQGTYQDVGSLNIGDVQLEKP

SEQ ID NO: 2415 - protein, 226 aa, Homo sapiens
MPGGPGVLQALPATIFLLFLLSAVYLGPGCQALWMHKVPASLMVSLGEDAHFQCPHNSSNNANVTWWRVLHGNYTWPPEFLGPGEDPNGTLIIQNVNKSHGGIYVCRVQEGNESYQQSCGTYLRVRQPPPRPFLDMGEGTKNRIITAEGIILLFCAVVPGTLLLFRKRWQNEKLGLDAGDEYEDENLYEGLNLDDCSMYEDISRGLQGTYQDVGSLNIGDVQLEKP

SEQ ID NO: 2416 - protein, 258 aa, Homo sapiens
MPGGPGVLQALPATIFLLFLLSAVYLGPGCQALWMHKVPASLMVSLGEDAHFQCPHNSSNNANVTWWRVLHGNYTWPPEFLGPGEDPNGTLIIQNVNKSHGGIYVCRVQEGNESYQQSCGTYLRVRREWPSPGPYSHCPAGDTRFIFEVGIEPVPSMWVSNRLGQRDGHSPLQSGVSGGSGALQEVGGARRLGRARGARALSHTTSLQSRPPGPSWTWGRAPRTESSQPRGSSSCSARWCLGRCCCSGNDGRTRSSGW

SEQ ID NO: 2417 - protein, 256 aa, Homo sapiens
MGHTRRQGTSPSKCPYLNFFQLLVLAGLSHFCSGVIHVTKEVKEVATLSCGHNVSVEELAQTRIYWQKEKKMVLTMMSGDMNIWPEYKNRTIFDITNNLSIVILALRPSDEGTYECVVLKYEKDAFKREHLAEVTLSVKADFPTPSISDFEIPTSNIRRIICSTSGGFPEPHLSWLENGEELNAINTTVSQDPETELYAVSSKLDFNMTTNHSFMCLIKYGHLRVNQTFNWNTSFAPRCRERRRNERLRRESVRPV

SEQ ID NO: 2418 - protein, 288 aa, Homo sapiens
MGHTRRQGTSPSKCPYLNFFQLLVLAGLSHFCSGVIHVTKEVKEVATLSCGHNVSVEELAQTRIYWQKEKKMVLTMMSGDMNIWPEYKNRTIFDITNNLSIVILALRPSDEGTYECVVLKYEKDAFKREHLAEVTLSVKADFPTPSISDFEIPTSNIRRIICSTSGGFPEPHLSWLENGEELNAINTTVSQDPETELYAVSSKLDFNMTTNHSFMCLIKYGHLRVNQTFNWNTTKQEHFPDNLLPSWAITLISVNGIFVICCLTYCFAPRCRERRRNERLRRESVRPV

SEQ ID NO: 2419 - protein, 288 aa, Homo sapiens; identical to SEQ ID NO: 2418

SEQ ID NO: 2420 - protein, 217 aa, Homo sapiens
MDPQCTMGLSNILFVMAFLLSANFSQPEIVPISNITENVYINLTCSSIHGYPEPKKMSVLLRTKNSTIEYDGVMQKSQDNVTELYDVSISLSVSFPDVTSNMTIFCILETDKTRLLSSPFSIELEDPQPPPDHIPWITAVLPTVIICVMVFCLILWKWKKKKRPRNSYKCGTNTMEREESEQTKKREKIHIPERSDEAQRVFKSSKTSSCDKSDTCF

SEQ ID NO: 2421 - protein, 329 aa, Homo sapiens
MDPQCTMGLSNILFVMAFLLSGAAPLKIQAYFNETADLPCQFANSQNQSLSELVVFWQDQENLVLNEVYLGKEKFDSVHSKYMGRTSFDSDSWTLRLHNLQIKDKGLYQCIIHHKKPTGMIRIHQMNSELSVLANFSQPEIVPISNITENVYINLTCSSIHGYPEPKKMSVLLRTKNSTIEYDGVMQKSQDNVTELYDVSISLSVSFPDVTSNMTIFCILETDKTRLLSSPFSIELEDPQPPPDHIPWITAVLPTVIICVMVFCLILWKWKKKKRPRNSYKCGTNTMEREESEQTKKREKIHIPERSDEAQRVFKSSKTSSCDKSDTCF

SEQ ID NO: 2422 - protein, 167 aa, Homo sapiens
MGLSNILFVMAFLLSGAAPLKIQAYFNETADLPCQFANSQNQSLSELVVFWQDQENLVLNEVYLGKEKFDSVHSKYMGRTSFDSDSWTLRLHNLQIKDKGLYQCIIHHKKPTGMIRIHQMNSELSVLANFSQPEIVPISNITENVYINLTCSSIHGYPEPKKMSVLL

SEQ ID NO: 2423 - protein, 323 aa, Homo sapiens
MGLSNILFVMAFLLSGAAPLKIQAYFNETADLPCQFANSQNQSLSELVVFWQDQENLVLNEVYLGKEKFDSVHSKYMGRTSFDSDSWTLRLHNLQIKDKGLYQCIIHHKKPTGMIRIHQMNSELSVLANFSQPEIVPISNITENVYINLTCSSIHGYPEPKKMSVLLRTKNSTIEYDGVMQKSQDNVTELYDVSISLSVSFPDVTSNMTIFCILETDKTRLLSSPFSIELEDPQPPPDHIPWITAVLPTVIICVMVFCLILWKWKKKKRPRNSYKCGTNTMEREESEQTKKREKIHIPERSDEAQRVFKSSKTSSCDKSDTCF

SEQ ID NO: 2424 - protein, 275 aa, Homo sapiens
MGLSNILFVMAFLLSGAAPLKIQAYFNETADLPCQFANSQNQSLSELVVFWQDQENLVLNEVYLGKEKFDSVHSKYMGRTSFDSDSWTLRLHNLQIKDKGLYQCIIHHKKPTGMIRIHQMNSELSVLANFSQPEIVPISNITENVYINLTCSSIHGYPEPKKMSVLLRTKNSTIEYDGVMQKSQDNVTELYDVSISLSVSFPDVTSNMTIFCILETDKTRLLSSPFSIGTNTMEREESEQTKKREKIHIPERSDEAQRVFKSSKTSSCDKSDTCF

SEQ ID NO: 2425 - protein, 247 aa, Homo sapiens
MGRTSFDSDSWTLRLHNLQIKDKGLYQCIIHHKKPTGMIRIHQMNSELSVLANFSQPEIVPISNITENVYINLTCSSIHGYPEPKKMSVLLRTKNSTIEYDGVMQKSQDNVTELYDVSISLSVSFPDVTSNMTIFCILETDKTRLLSSPFSIELEDPQPPPDHIPWITAVLPTVIICVMVFCLILWKWKKKKRPRNSYKCGTNTMEREESEQTKKREKIHIPERSDEAQRVFKSSKTSSCDKSDTCF

SEQ ID NO: 2426 - protein, 277 aa, Homo sapiens
  VARIANT 1: note = misc_feature - Xaa can be any naturally occurring amino acid
XTMGLSNILFVMAFLLSGAAPLKIQAYFNETADLPCQFANSQNQSLSELVVFWQDQENLVLNEVYLGKEKFDSVHSKYMGRTSFDSDSWTLRLHNLQIKDKGLYQCIIHHKKPTGMIRIHQMNSELSVLANFSQPEIVPISNITENVYINLTCSSIHGYPEPKKMSVLLRTKNSTIEYDGVMQKSQDNVTELYDVSISLSVSFPDVTSNMTIFCILETDKTRLLSSPFSIGTNTMEREESEQTKKREKIHIPERSDEAQRVFKSSKTSSCDKSDTCF

SEQ ID NO: 2427 - protein, 198 aa, Homo sapiens
MALPVTALLLPLALLLHAARPSQFRVSPLDRTWNLGETVELKCQVLLSNPTSGCSWLFQPRGAAASPTFLLYLSQNKPKAAEGLDTQRFSGKRLGDTFVLTLSDFRRENEGYYFCSALSNSIMYFSHFVPVFLPAKPTTTPAPRPPTPAPTIASQPLSLRPEACRPAAGGAGNRRRVCKCPRPVVKSGDKPSLSARYV

SEQ ID NO: 2428 - protein, 235 aa, Homo sapiens
MALPVTALLLPLALLLHAARPSQFRVSPLDRTWNLGETVELKCQVLLSNPTSGCSWLFQPRGAAASPTFLLYLSQNKPKAAEGLDTQRFSGKRLGDTFVLTLSDFRRENEGYYFCSALSNSIMYFSHFVPVFLPAKPTTTPAPRPPTPAPTIASQPLSLRPEACRPAAGGAVHTRGLDFACDIYIWAPLAGTCGVLLLSLVITLYCNHRNRRRVCKCPRPVVKSGDKPSLSARYV

SEQ ID NO: 2429 - protein, 235 aa, Homo sapiens; identical to SEQ ID NO: 2428

SEQ ID NO: 2430 - protein, 198 aa, Homo sapiens
MALPVTALLLPLALLLHAARPSQFRVSPLDRTWNLGETVELKCQVLLSNPTSGCSWLFQPRGAAASPTFLLYLSQNKPKAAEGLDTQRFSGKRLGDTFVLTLSDFRRENEGYYFCSALSNSIMYFSHFVPVFLPVHTRGLDFACDIYIWAPLAGTCGVLLLSLVITLYCNHRNRRRVCKCPRPVVKSGDKPSLSARYV

SEQ ID NO: 2431 - protein, 198 aa, Homo sapiens
MRPRLWLLLAAQLTVLHGNSVLQQTPAYIKVQTNKMVMLSCEAKISLSNMRIYWLRQRQAPSSDSHHEFLALWDSAKGTIHGEEVEQEKIAVFRDASRFILNLTSVKPEDSGIYFCMIVGSPELTFGKGTQLSVVDFLPTTAQPTKKSTLKKRVCRLPRPETQKGLKGKVYQEPLSPNACMDTTAILQPHRSCLTHGS

SEQ ID NO: 2432 - protein, 210 aa, Homo sapiens
MRPRLWLLLAAQLTVLHGNSVLQQTPAYIKVQTNKMVMLSCEAKISLSNMRIYWLRQRQAPSSDSHHEFLALWDSAKGTIHGEEVEQEKIAVFRDASRFILNLTSVKPEDSGIYFCMIVGSPELTFGKGTQLSVVDFLPTTAQPTKKSTLKKRVCRLPRPETQKGPLCSPITLGLLVAGVLVLLVSLGVAIHLCCRRRRARLRFMKQFYK

SEQ ID NO: 2433 - protein, 221 aa, Homo sapiens
MRPRLWLLLAAQLTVLHGNSVLQQTPAYIKVQTNKMVMLSCEAKISLSNMRIYWLRQRQAPSSDSHHEFLALWDSAKGTIHGEEVEQEKIAVFRDASRFILNLTSVKPEDSGIYFCMIVGSPELTFGKGTQLSVVDFLPTTAQPTKKSTLKKRVCRLPRPETQKGPLCSPITLGLLVAGVLVLLVSLGVAIHLCCRRRRARLRFMKQLRLHPLEKCSRMDY

SEQ ID NO: 2434 - protein, 210 aa, Homo sapiens
MRPRLWLLLAAQLTVLHGNSVLQQTPAYIKVQTNKMVMLSCEAKISLSNMRIYWLRQRQAPSSDSHHEFLALWDSAKGTIHGEEVEQEKIAVFRDASRFILNLTSVKPEDSGIYFCMIVGSPELTFGKGTQLSVVDFLPTTAQPTKKSTLKKRVCRLPRPETQKGPLCSPITLGLLVAGVLVLLVSLGVAIHLCCRRRRARLRFMKQLYK

SEQ ID NO: 2435 - protein, 243 aa, Homo sapiens
MRPRLWLLLAAQLTVLHGNSVLQQTPAYIKVQTNKMVMLSCEAKISLSNMRIYWLRQRQAPSSDSHHEFLALWDSAKGTIHGEEVEQEKIAVFRDASRFILNLTSVKPEDSGIYFCMIVGSPELTFGKGTQLSVVDFLPTTAQPTKKSTLKKRVCRLPRPETQKGPLCSPITLGLLVAGVLVLLVSLGVAIHLCCRRRRARLRFMKQPQGEGISGTFVPQCLHGYYSNTTTSQKLLNPWILKT

SEQ ID NO: 2436 - protein, 213 aa, Homo sapiens
MRPRLWLLLAAQLTVLHGNSVLQQTPAYIKVQTNKMVMLSCEAKISLSNMRIYWLRQRQAPSSDSHHEFLALWDSAKGTIHGEEVEQEKIAVFRDASRFILNLTSVKPEDSGIYFCMIVGSPELTFGKGTQLSVVDFLPTTAQPTKKSTLKKRVCRLPRPETQKGRRRRARLRFMKQPQGEGISGTFVPQCLHGYYSNTTTSQKLLNPWILKT

SEQ ID NO: 2437 - protein, 185 aa, Homo sapiens
MARGAALALLLFGLLGVLVAAPDGGFDLSDALPDNENKKPTAIPKKPSAGDDFDLGDAVVDGENDDPRPPNPPKPMPNPNPNHPSSSGSFSDADLADGVSGGEGKGGSDGGGSHRKEGEEADAPGVIPGIVGAVVVAVAGAISSFIAYQKKKLCFKENAEQGEVDMESHRNANAEPAVQRTLLEK

SEQ ID NO: 2438 - protein, 160 aa, Homo sapiens
MARGAALALLLFGLLGVLVAAPDGGFDLSDALPDNENKKPTAIPKKPSAGDDFDLGDAVVDGENDDPRPPNPPKPMPNPNPNHPSSSGSFSDADLADGVSGGEGKGGSDGGGSHRKEGEEADAPGVIPGIVGAVVVAVAGAISSFIAYQKKKLCFKENDG

SEQ ID NO: 2439 - protein, 160 aa, Homo sapiens; identical to SEQ ID NO: 2438

SEQ ID NO: 2440 - protein, 160 aa, Homo sapiens; identical to SEQ ID NO: 2438

SEQ ID NO: 2441 - protein, 184 aa, Homo sapiens
MARGAALALLLFGLLGVLVAAPDGGFDLSDALPDNENKKPTAIPKKPSAGDDFDLGDAVVDGENDDPRPPNPPKPMPNPNPNHPSSSGSFSDADLADGVSGGEGKGGSDGGGSHRKEGEEADAPGVIPGIVGAVVVAVAGAISSFIAYQKKKLCFKENEQGEVDMESHRNANAEPAVQRTLLEK

SEQ ID NO: 2442 - protein, 177 aa, Homo sapiens
MARGAALALLLFGLLGVLVAAPDGGFDLSDALPDNENKKPTAIPKKPSAGDDFDLGDAVVDGENDDPRPPNPPKPMPNPNPNHPSSSGSFSDADLADGVSGGEGKGGSDGGGSHRKEGEEADAPGVIPGIVGAVVVAVAGAISSFIAYQKKKLCFKENGQLAGSLGPCIGIRREADG

SEQ ID NO: 2443 - protein, 169 aa, Homo sapiens
MARGAALALLLFGLLGVLVAAPDGGFDLSDALPGDDFDLGDAVVDGENDDPRPPNPPKPMPNPNPNHPSSSGSFSDADLADGVSGGEGKGGSDGGGSHRKEGEEADAPGVIPGIVGAVVVAVAGAISSFIAYQKKKLCFKENAEQGEVDMESHRNANAEPAVQRTLLEK

SEQ ID NO: 2444 - protein, 76 aa, Homo sapiens
MARGAALALLLFGLLGVLVAAPGFGDLRLQAARGGRPGVACHSHALRPGPKFGIARSLRPGWWGEGKEKLEKNFEP

SEQ ID NO: 2445 - protein, 22 aa, Homo sapiens
  VARIANT 1: note = misc_feature - Xaa can be any naturally occurring amino acid
XQKKKLCFKENERASMCVFLSV

SEQ ID NO: 2446 - protein, 109 aa, Homo sapiens
MAASTSMVPVAVTAAVAPVLSINSDFSDLREIKKQLLLIAGLTRERGLLHSSKWKMPRIWMPIPWPRPTLTLKSMIGQHISCMAAIARKPIFCICIPDIWPPGKRTSEK

SEQ ID NO: 2447 - protein, 597 aa, Homo sapiens
MAASTSMVPVAVTAAVAPVLSINSDFSDLREIKKQLLLIAGLTRERGLLHSSKWSAELAFSLPALPLAELQPPPPITEEDAQDMDAYTLAKAYFDVKEYDRAAHFLHGCNSKKAYFLYMYSRYLSGEKKKDDETVDSLGPLEKGQVKNEALRELRVELSKKHQARELDGFGLYLYGVVLRKLDLVKEAIDVFVEATHVLPLHWGAWLELCNLITDKEMLKFLSLPDTWMKEFFLAHIYTELQLIEEALQKYQNLIDVGFSKSSYIVSQIAVAYHNIRDIDKALSIFNELRKQDPYRIENMDTFSNLLYVRSMKSELSYLAHNLCEIDKYRVETCCVIGNYYSLRSQHEKAALYFQRALKLNPRYLGAWTLMGHEYMEMKNTSAAIQAYRHAIEVNKRDYRAWYGLGQTYEILKMPFYCLYYYRRAHQLRPNDSRMLVALGECYEKLNQLVEAKKCYWRAYAVGDVEKMALVKLAKLHEQLTESEQAAQCYIKYIQDIYSCGEIVEHLEESTAFRYLAQYYFKCKLWDEASTCAQKCCAFNDTREEGKALLRQILQLRNQGETPTTEVPAPFFLPASLSANNTPTRRVSPLNLSSVTP

SEQ ID NO: 2448 - protein, 151 aa, Homo sapiens
MAASTSMVPVAVTAAVAPVLSINSDFSDLREIKKQLLLIAGLTRERGLLHSSKWSAELAFSLPALPLAELQPPPPITEEDAQDMDAYTLAKAYFDVKEYDRAAHFLHGCNSKKAYFLYMYSRYLVRAILKCHSAFSETSIFRTNGKVKSFK

SEQ ID NO: 2449 - protein, 123 aa, Homo sapiens
MAASTSMVPVAVTAAVAPVLSINSDFSDLREIKKQLLLIAGLTRERGLLHSSKWSAELAFSLPALPLAELQPPPPITEMPRIWMPIPWPRPTLTLKSMIGQHISCMAAIARKPIFCICIPDIW

SEQ ID NO: 2450 - protein, 134 aa, Homo sapiens
  VARIANT 1: note = misc_feature - Xaa can be any naturally occurring amino acid
XSTSMVPVAVTAAVAPVLSINSDFSDLREIKKQLLLIAGLTRERGLLHSSKWSAELAFSLPALPLAELQPPPPITEMPRIWMPIPWPRPTLTLKSMIGQHISCMAAIARKPIFCICIPDICLEKKRRTMKQLIA

SEQ ID NO: 2451 - protein, 579 aa, Homo sapiens
MSAAIAALAASYGSGSGSESDSDSESSRCPLPAADSLMHLTKSPSSKPSLAVAVDSAPEVAVKEDLETGVHLDPAVKEVQYNPTYETMFAPEFGPENPFRTQQMAAPRNMLSGYAEPAHINDFMFEQQRRTFATYGYALDPSLDNHQVSAKYIGSVEEAEKNQGLTVFETGQKKTEKRKKFKENDASNIDGFLGPWAKYVDEKDVAKPSEEEQKELDEITAKRQKKGKQEEEKPGEEKTILHVKEMYDYQGRSYLHIPQDVGVNLRSTMPPEKCYLPKKQIHVWSGHTKGVSAVRLFPLSGHLLLSCSMDCKIKLWEVYGERRCLRTFIGHSKAVRDICFNTAGTQFLSAAYDRYLKLWDTETGQCISRFTNRKVPYCVKFNPDEDKQNLFVAGMSDKKIVQWDIRSGEIVQEYDRHLGAVNTIVFVDENRRFVSTSDDKSLRVWEWDIPVDFKYIAEPSMHSMPAVTLSPNGKWLACQSMDNQILIFGAQNRFRLNKKKIFKGHMVAGYACQVDFSPDMSYVISGDGNGKLNIWDWKTTKLYSRFKAHDKVCIGAVWHPHETSKVITCGWDGLIKLWD

SEQ ID NO: 2452 - protein, 539 aa, Homo sapiens
MSAAIAALAASYGSGSGSESDSDSESSRCPLPAADSLMHLTKSPSSKPSLAVAVDSAPEVAVKEDLETGVHLDPAVKEVQYNPTYETMFAPEFGPENPFRTQQMAAPRNMLSGYAEPAHINDFMFEQQRRTFATYGYALDPSLDNHQVSAKYIGSVEEAEKNQGLTVFETGQKKTEKRKKFKENDASNIDGFLGPWAKYVDEKDVAKPSEEEQKELDEITAKRQKKGKQEEEKPGEEKTILHVKEMYDYQGRSYLHIPQDVGVNLRSTMPPEKCYLPKKQIHVWSGHTKGVSAVRLFPLSGHLLLSCSMDCKIKLWEVYGERRCLRTFIGHSKAVRDICFNTAGTQFLSAAYDRYLKLWDTETGQCISRFTNRKVPYCVKFNPDEDKQNLFVAGMSDKKIVQWDIRSGEIVQEYDRHLGAVNTIVFVDENRRFVSTSDDKSLRVWEWDIPVDFKYIAEPSMHSMPAVTLSPNGKWLACQSMDNQILIFGAQNRFRLNKKKIFKGHMVAGYACQVDFSPDMRVPQSFQNLKEVTAGPQEG

SEQ ID NO: 2453 - protein, 579 aa, Homo sapiens; identical to SEQ ID NO: 2451

SEQ ID NO: 2454 - protein, 112 aa, Homo sapiens
MFVSDFRKEFYEVVQSQRVLLFVASDVDALCACKILQALFQCDHVQYTLVPVSGWQELETAFLEHKEQFHYFILINCGANVDLLDILQPDEDTIFFVCDTHRPVNVVNVYND

SEQ ID NO: 2455 - protein, 566 aa, Homo sapiens
MFVSDFRKEFYEVVQSQRVLLFVASDVDALCACKILQALFQCDHVQYTLVPVSGWQELETAFLEHKEQFHYFILINCGANVDLLDILQPDEDTIFFVCDTHRPVNVVNVYNDTQIKLLIKQDDDLEVPAYEDIFRDEEEDEEHSGNDSDGSEPSEKRTRLEEEIVEQTMRRRQRREWEARRRDILFDYEQYEYHGTSSAMVMFELAWMLSKDLNDMLWWAIVGLTDQWVQDKITQMKYVTDVGVLQRHVSRHNHRNEDEENTLSVDCTRISFEYDLRLVLYQHWSLHDSLCNTSYTAARFKLWSVHGQKRLQEFLADMGLPLKQVKQKFQAMDISLKENLREMIEESANKFGMKDMRVQTFSIHFGFKHKFLASDVVFATMSLMESPEKDGSGTDHFIQALDSLSRSNLDKLYHGLELAKKQLRATQQTIASCLCTNLVISQGPFLYCSLMEGTPDVMLFSRPASLSLLSKHLLKSFVCSTKNRRCKLLPLVMAAPLSMEHGTVTVVGIPPETDSSDRKNFFGRAFEKAAESTSSRMLHNHFDLSVIELKAEDRSKFLDALISLLS

SEQ ID NO: 2456 - protein, 566 aa, Homo sapiens; identical to SEQ ID NO: 2455

SEQ ID NO: 2457 - protein, 598 aa, Homo sapiens
MFVSDFRKEFYEVVQSQRVLLFVASDVDALCACKILQALFQCDHVQYTLVPVSGWQELETAFLEHKEQFHYFILINCGANVDLLDILQPDEDTIFFVCDTHRPVNVVNVYNDTQIKLLIKQDDDLEVPAYEDIFRDEEEDEEHSGNDSDGSEPSEKRTRLEEEIVEQTMRRRQRREWEARSGSGSEPVAAALEKSSRLFAGPMSDRTAPRSPRRDILFDYEQYEYHGTSSAMVMFELAWMLSKDLNDMLWWAIVGLTDQWVQDKITQMKYVTDVGVLQRHVSRHNHRNEDEENTLSVDCTRISFEYDLRLVLYQHWSLHDSLCNTSYTAARFKLWSVHGQKRLQEFLADMGLPLKQVKQKFQAMDISLKENLREMIEESANKFGMKDMRVQTFSIHFGFKHKFLASDVVFATMSLMESPEKDGSGTDHFIQALDSLSRSNLDKLYHGLELAKKQLRATQQTIASCLCTNLVISQGPFLYCSLMEGTPDVMLFSRPASLSLLSKHLLKSFVCSTKNRRCKLLPLVMAAPLSMEHGTVTVVGIPPETDSSDRKNFFGRAFEKAAESTSSRMLHNHFDLSVIELKAEDRSKFLDALISLLS

SEQ ID NO: 2458 - protein, 520 aa, Homo sapiens
MFVSDFRKEFYEVVQSQRVLLFVASDVDALCACKILQALFQCDHVQYTLVPVSGWQELETAFLEHKEQIKLLIKQDDDLEVPAYEDIFRDEEEDEEHSGNDSDGSEPSEKRTRLEEEIVEQTMRRRQRREWEARRRDILFDYEQYEYHGTSSAMVMFELAWMLSKDLNDMLWWAIVGLTDQWVQDKITQMKYVTDVGVLQRHVSRHNHRNEDEENTLSVDCTRISFEYDLRLVLYQHWSLHDSLCNTSYTAARFKLWSVHGQKRLQEFLADMGLPLKQVKQKFQAMDISLKENLREMIEESANKFGMKDMRVQTFSIHFGFKHKFLASDVVFATMSLMESPEKDGSGTDHFIQALDSLSRSNLDKLYHGLELAKKQLRATQQTIASCLCTNLVISQGPFLYCSLMEGTPDVMLFSRPASLSLLSKHLLKSFVCSTKNRRCKLLPLVMAAPLSMEHGTVTVVGIPPETDSSDRKNFFGRAFEKAAESTSSRMLHNHFDLSVIELKAEDRSKFLDALISLLS

SEQ ID NO: 2459 - protein, 159 aa, Homo sapiens
MLPHWRVLLFVASDVDALCACKILQALFQCDHVQYTLVPVSGWQELETAFLEHKEQFHYFILINCGANVDLLDILQPDEDTIFFVCDTHRPVNVVNVYNDTQIKLLIKQDDDLEVPAYEDIFRDEEEDEEHSGNDSDGSEPSEKRTRLEEEIVEQTMRR

SEQ ID NO: 2460 - protein, 96 aa, Homo sapiens
  VARIANT 1: note = misc_feature - Xaa can be any naturally occurring amino acid
XDEDTIFFVCDTHRPVNVVNVYNDTQIKLLIKQDDDLEVPAYEDIFRDEEEDEEHSGNDSDGSEPSEKRTRLEEEIVEQTMRRRQRREWEARRIIY

SEQ ID NO: 2461 - protein, 836 aa, Homo sapiens
MAGLNCGVSIALLGVLLLGAARLPRGAEAFEIALPRESNITVLIKLGTPTLLAKPCYIVISKRHITMLSIKSGERIVFTFSCQSPENHFVIEIQKNIDCMSGPCPFGEVQLQPSTSLLPTLNRTFIWDVKAHKSIGLELQFSIPRLRQIGPGESCPDGVTHSISGRIDATVVRIGTFCSNGTVSRIKMQEGVKMALHLPWFHPRNVSGFSIANRSSIKRLCIIESVFEGEGSATLMSANYPEGFPEDELMTWQFVVPAHLRASVSFLNFNLSNCERKEERVEYYIPGSTTNPEVFKLEDKQPGNMAGNFNLSLQGCDQDAQSPGILRLQFQVLVQHPQNESNKIYVVDLSNERAMSLTIEPRPVKQSRKFVPGCFVCLESRTCSSNLTLTSGSKHKISFLCDDLTRLWMNVEKTISCTDHRYCQRKSYSLQVPSDILHLPVELHDFSWKLLVPKDRLSLVLVPAQKLQQHTHEKPCNTSFSYLVASAIPSQDLYFGSFCPGGSIKQIQVKQNISVTLRTFAPSFQQEASRQGLTVSFIPYFKEEGVFTVTPDTKSKVYLRTPNWDRGLPSLTSVSWNISVPRDQVACLTFFKERSGVVCQTGRAFMIIQEQRTRAEEIFSLDEDVLPKPSFHHHSFWVNISNCSPTSGKQLDLLFSVTLTPRTVDLTVILIAAVGGGVLLLSALGLIICCVKKKKKKTNKGPAVGIYNDNINTEMPRQPKKFQKGRKDNDSHVYAVIEDTMVYGHLLQDSSGSFLQPEVDTYRPFQGTMGVCPPSPPTICSRAPTAKLATEEPPPRSPPESESEPYTFSHPNNGDVSSKDTDIPLLNTQEPMEPAE

SEQ ID NO: 2462 - protein, 343 aa, Homo sapiens
MAGLNCGVSIALLGVLLLGAARLPRGAEAFEIALPRESNITVLIKLGTPTLLAKPCYIVISKRHITMLSIKSGERIVFTFSCQSPENHFVIEIQKNIDCMSGPCPFGEVQLQPSTSLLPTLNRTFIWDVKAHKSIGLELQFSIPRLRQIGPGESCPDGVTHSISGRIDATVVRIGTFCSNGTVSRIKMQEGVKMALHLPWFHPRNVSGFSIANRSSIKRLCIIESVFEGEGSATLMSANYPEGFPEDELMTWQFVVPAHLRASVSFLNFNLSNCERKEERVEYYIPGSTTNPEVFKLEDKQPGNMAGNFNLSLQGCDQDAQSPGILRLQFQVLVQHPQNESSE

SEQ ID NO: 2463 - protein, 449 aa, Homo sapiens
MLAEWGACLLLAVALLGPGLQAQAMEGVKCGGVLSAPSGNFSSPNFPRLYPYNTECSWLIVVAEGSSVLLTFHAFDLEYHDTCSFDFLEIYNGASPDKGNLLGRFCGKVPPPPFTSSWHVMSVIFHSDKHVASHGFSAGYQKDVCGGVLTGLSGVLTSPEYPNNYPNSMECHWVIRAAGPAHVKLVFVDFQVEGNEECTYDYVAVLGGPGPTRGHHYCGSTRPPTLVSLGHELQVVFKSDFNIGGRGFKAYYFSGECQEVYMAMRGNFSSPQYPSSYPNNIRCHWTIRLPPGYQVKVFFLDLDLEEPNSLTKTCDFDHLAAFDGASEEAPLLGNWCGHHLPPPVTSSHNQLLLLLHTDRSTTRRGFSVAYIGGQLGCGSGSTEGEGEALQPQSLQSPSSIPPVCPAPPMNGLLQLLLHWLHPCPLSGPLRLDGTAPACFHYCRASFPSF

SEQ ID NO: 2464 - protein, 540 aa, Homo sapiens
MLAEWGACLLLAVALLGPGLQAQAMEGVKCGGVLSAPSGNFSSPNFPRLYPYNTECSWLIVVAEGSSVLLTFHAFDLEYHDTCSFDFLEIYNGASPDKGNLLGRFCGKVPPPPFTSSWHVMSVIFHSDKHVASHGFSAGYQKDVCGGVLTGLSGVLTSPEYPNNYPNSMECHWVIRAAGPAHVKLVFVDFQVEGNEECTYDYVAVLGGPGPTRGHHYCGSTRPPTLVSLGHELQVVFKSDFNIGGRGFKAYYFSGECQEVYMAMRGNFSSPQYPSSYPNNIRCHWTIRLPPGYQVKVFFLDLDLEEPNSLTKTCDFDHLAAFDGASEEAPLLGNWCGHHLPPPVTSSHNQLLLLLHTDRSTTRRGFSVAYIGVVPMNVSCSRTDFQILISTQALAPLERTKVYLGSRSCAAQEVGGNLRIQARFDTCGTESQRRNNTSVIVSVLYIDFSAAGREDIHEYEVRCEPRRKEASVHLLSGSHWLGPYAATAEHLQEAPPMDEAEALEGPVSMVAQDTSDIVFLGLCILAGILMVIAIVVLMLL

SEQ ID NO: 2465 - protein, 882 aa, Homo sapiens
MGPWSRSLSALLLLLQVSSWLCQEPEPCHPGFDAESYTFTVPRRHLERGRVLGRVNFEDCTGRQRTAYFSLDTRFKVGTDGVITVKRPLRFHNPQIHFLVYAWDSTYRKFSTKVTLNTVGHHHRPPPHQASVSGIQAELLTFPNSSPGLRRQKRDWVIPPISCPENEKGPFPKNLVQIKSNKDKEGKVFYSITGQGADTPPVGVFIIERETGWLKVTEPLDRERIATYTLFSHAVSSNGNAVEDPMEILITVTDQNDNKPEFTQEVFKGSVMEGALPGTSVMEVTATDADDDVNTYNAAIAYTILSQDPELPDKNMFTINRNTGVISVVTTGLDRESFPTYTLVVQAADLQGEGLSTTATAVITVTDTNDNPPIFNPTTYKGQVPENEANVVITTLKVTDADAPNTPAWEAVYTILNDDGGQFVVTTNPVNNDGILKTAKGLDFEAKQQYILHVAVTNVVPFEVSLTTSTATVTVDVLDVNEAPIFVPPEKRVEVSEDFGVGQEITSYTAQEPDTFMEQKITYRIWRDTANWLEINPDTGAISTRAELDREDFEHVKNSTYTALIIATDNGSPVATGTGTLLLILSDVNDNAPIPEPRTIFFCERNPKPQVINIIDADLPPNTSPFTAELTHGASANWTIQYNDPTQESIILKPKMALEVGDYKINLKLMDNQNKDQVTTLEVSVCDCEGAAGVCRKAQPVEAGLQIPAILGILGGILALLILILLLLLFLRRRAVVKEPLLPPEDDTRDNVYYYDEEGGGEEDQDFDLSQLHRGLDARPEVTRNDVAPTLMSVPRYLPRPANPDEIGNFIDENLKAADTDPTAPPYDSLLVFDYEGSGSEAASLSSLNSSESDKDQDYDYLNEWGNRFKKLADMYGGGEDD

SEQ ID NO: 2466 - protein, 821 aa, Homo sapiens
MGPWSRSLSALLLLLQVSSWLCQEPEPCHPGFDAESYTFTVPRRHLERGRVLGRVNFEDCTGRQRTAYFSLDTRFKVGTDGVITVKRPLRFHNPQIHFLVYAWDSTYRKFSTKVTLNTVGHHHRPPPHQASVSGIQAELLTFPNSSPGLRRQKRDWVIPPISCPENEKGPFPKNLVQIKSNKDKEGKVFYSITGQGADTPPVGVFIIERETGWLKVTEPLDRERIATYTLFSHAVSSNGNAVEDPMEILITVTDQNDNKPEFTQEVFKGSVMEGALPGTSVMEVTATDADDDVNTYNAAIAYTILSQDPELPDKNMFTINRNTGVISVVTTGLDRESFPTYTLVVQAADLQGEGLSTTATAVITVTDTNDNPPIFNPTTGLDFEAKQQYILHVAVTNVVPFEVSLTTSTATVTVDVLDVNEAPIFVPPEKRVEVSEDFGVGQEITSYTAQEPDTFMEQKITYRIWRDTANWLEINPDTGAISTRAELDREDFEHVKNSTYTALIIATDNGSPVATGTGTLLLILSDVNDNAPIPEPRTIFFCERNPKPQVINIIDADLPPNTSPFTAELTHGASANWTIQYNDPTQESIILKPKMALEVGDYKINLKLMDNQNKDQVTTLEVSVCDCEGAAGVCRKAQPVEAGLQIPAILGILGGILALLILILLLLLFLRRRAVVKEPLLPPEDDTRDNVYYYDEEGGGEEDQDFDLSQLHRGLDARPEVTRNDVAPTLMSVPRYLPRPANPDEIGNFIDENLKAADTDPTAPPYDSLLVFDYEGSGSEAASLSSLNSSESDKDQDYDYLNEWGNRFKKLADMYGGGEDD

SEQ ID NO: 2467 - protein, 537 aa, Homo sapiens
MGPWSRSLSALLLLLQVSSWLCQEPEPCHPGFDAESYTFTVPRRHLERGRVLGRVNFEDCTGRQRTAYFSLDTRFKVGTDGVITVKRPLRFHNPQIHFLVYAWDSTYRKFSTKVTLNTVGHHHRPPPHQASVSGIQAELLTFPNSSPGLRRQKRDWVIPPISCPENEKGPFPKNLVQIKSNKDKEGKVFYSITGQGADTPPVGVFIIERETGWLKVTEPLDRERIATYTLFSHAVSSNGNAVEDPMEILITVTDQNDNKPEFTQEVFKGSVMEGALPGTSVMEVTATDADDDVNTYNAAIAYTILSQDPELPDKNMFTINRNTGVISVVTTGLDRESFPTYTLVVQAADLQGEGLSTTATAVITVTDTNDNPPIFNPTTYKGQVPENEANVVITTLKVTDADAPNTPAWEAVYTILNDDGGQFVVTTNPVNNDGILKTAKGLDFEAKQQYILHVAVTNVVPFEVSLTTSTATVTVDVLDVNEAPIFVPPEKRVEVSEDFGVGQEITSYTAQEPDTFMEQKITFSSCYWNRDTSADPV

SEQ ID NO: 2468 - protein, 647 aa, Homo sapiens
MGPWSRSLSALLLLLQVSSWLCQEPEPCHPGFDAESYTFTVPRRHLERGRVLGRVNFEDCTGRQRTAYFSLDTRFKVGTDGVITVKRPLRFHNPQIHFLVYAWDSTYRKFSTKVTLNTVGHHHRPPPHQASVSGIQAELLTFPNSSPGLRRQKRDWVIPPISCPENEKGPFPKNLVQIKSNKDKEGKVFYSITGQGADTPPVGVFIIERETGWLKVTEPLDRERIATYTLFSHAVSSNGNAVEDPMEILITVTDQNDNKPEFTQEVFKGSVMEGALPGTSVMEVTATDADDDVNTYNAAIAYTILSQDPELPDKNMFTINRNTGVISVVTTGLDRESFPTYTLVVQAADLQGEGLSTTATAVITVTDTNDNPPIFNPTTYKGQVPENEANVVITTLKVTDADAPNTPAWEAVYTILNDDGGQFVVTTNPVNNDGILKTAKGLDFEAKQQYILHVAVTNVVPFEVSLTTSTATVTVDVLDVNEAPIFVPPEKRVEVSEDFGVGQEITSYTAQEPDTFMEQKITYRIWRDTANWLEINPDTGAISTRAELDREDFEHVKNSTYTALIIATDNGSPVATGTGTLLLILSDVNDNAPIPEPRTIFFCERNPKPQVINIIDADLPPNLASQSIGITDMSHCTCPAPQLPAIF

SEQ ID NO: 2469 - protein, 903 aa, Homo sapiens
MGPWSRSLSALLLLLQVSSWLCQEPEPCHPGFDAESYTFTVPRRHLERGRVLGRVNFEDCTGRQRTAYFSLDTRFKVGTDGVITVKRPLRFHNPQIHFLVYAWDSTYRKFSTKVTLNTVGHHHRPPPHQASVSGIQAELLTFPNSSPGLRRQKRDWVIPPISCPENEKGPFPKNLVQIKSNKDKEGKVFYSITGQGADTPPVGVFIIERETGWLKVTEPLDRERIATYTLFSHAVSSNGNAVEDPMEILITVTDQNDNKPEFTQEVFKGSVMEGALPGTSVMEVTATDADDDVNTYNAAIAYTILSQDPELPDKNMFTINRNTGVISVVTTGLDRESFPTYTLVVQAADLQGEGLSTTATAVITVTDTNDNPPIFNPTTYKGQVPENEANVVITTLKVTDADAPNTPAWEAVYTILNDDGGQFVVTTNPVNNDGILKTAKVWYLARCRNWHPHSCSYPCPLGLDFEAKQQYILHVAVTNVVPFEVSLTTSTATVTVDVLDVNEAPIFVPPEKRVEVSEDFGVGQEITSYTAQEPDTFMEQKITYRIWRDTANWLEINPDTGAISTRAELDREDFEHVKNSTYTALIIATDNGSPVATGTGTLLLILSDVNDNAPIPEPRTIFFCERNPKPQVINIIDADLPPNTSPFTAELTHGASANWTIQYNDPTQESIILKPKMALEVGDYKINLKLMDNQNKDQVTTLEVSVCDCEGAAGVCRKAQPVEAGLQIPAILGILGGILALLILILLLLLFLRRRAVVKEPLLPPEDDTRDNVYYYDEEGGGEEDQDFDLSQLHRGLDARPEVTRNDVAPTLMSVPRYLPRPANPDEIGNFIDENLKAADTDPTAPPYDSLLVFDYEGSGSEAASLSSLNSSESDKDQDYDYLNEWGNRFKKLADMYGGGEDD

SEQ ID NO: 2470 - protein, 647 aa, Homo sapiens [sequence omitted]

SEQ ID NO: 2471 - protein, 414 aa, Homo sapiens
MGPWSRSLSALLLLLQVSSWLCQEPEPCHPGFDAESYTFTVPRRHLERGRVLGRVNFEDCTGRQRTAYFSLDTRFKVGTDGVITVKRPLRFHNPQIHFLVYAWDSTYRKFSTKVTLNTVGHHHRPPPHQASVSGIQAELLTFPNSSPGLRRQKRDWVIPPISCPENEKGPFPKNLVQLFSHAVSSNGNAVEDPMEILITVTDQNDNKPEFTQEVFKGSVMEGALPGTSVMEVTATDADDDVNTYNAAIAYTILSQDPELPDKNMFTINRNTGVISVVTTGLDRESFPTYTLVVQAADLQGEGLSTTATAVITVTDTNDNPPIFNPTTYKGQVPENEANVVITTLKVTDADAPNTPAWEAVYTILNDDGGQFVVTTNPVNNDGILKTAKVCMVPGKMQKLASSQLFIPLSPGLGF

SEQ ID NO: 2472 - protein, 155 aa, Homo sapiens
  VARIANT 1: note = misc_feature - Xaa can be any naturally occurring amino acid
XTDGVITVKRPLRFHNPQIHFLVYAWDSTYRKFSTKVTLNTVGHHHRPPPHQASVSGIQAELLTFPNSSPGLRRQKRDWVIPPISCPENEKGPFPKNLVQIKSNKDKEGKVFYSITGQGADTPPVGVFIIERETGWLKVTEPLDRERIATYTEPL

SEQ ID NO: 2473 - protein, 670 aa, Homo sapiens
MAQAVDRDTNRPLEPPSEFIVKVQDINDNPPEFLHETYHANVPERSNVGTSVIQVTASDADDPTYGNSAKLVYSILEGQPYFSVEAQTGIIRTALPNMDREAKEEYHVVIQAKDMGGHMGGLSGTTKVTITLTDVNDNPPKFPQSVYQMSVSEAAVPGEEVGRVKAKDPDIGENGLVTYNIVDGDGMESFEITTDYETQEGVIKLKKPVDFETKRAYSLKVEAANVHIDPKFISNGPFKDTVTVKISVEDADEPPMFLAPSYIHEVQENAAAGTVVGRVHAKDPDAANSPIRYSIDRHTDLDRFFTINPEDGFIKTTKPLDREETAWLNITVFAAEIHNRHQEAKVPVAIRVLDVNDNAPKFAAPYEGFICESDQTKPLSNQPIVTISADDKDDTANGPRFIFSLPPEIIHNPNFTVRDNRDNTAGVYARRGGFSRQKQDLYLLPIVISDGGIPPMSSTNTLTIKVCGCDVNGALLSCNAEAYILNAGLSTGALIAILACIVILLVIVVLFVTLRRQKKEPLIVFEEEDVRENIITYDDEGGGEEDTEAFDIATLQNPDGINGFIPRKDIKPEYQYMPRPGLRPAPNSVDVDDFINTRIQEADNDPTAPPYDSIQIYGYEGRGSVAGSLSSLESATTDSDLDYDYLQNWGPRFKKLADLYGSKDTFDDDS

SEQ ID NO: 2474 - protein, 22 aa, Homo sapiens
MKENYCLQAALVCLGMLCHSHA

SEQ ID NO: 2475 - protein, 34 aa, Homo sapiens
MKENYCLQAALVCLGMLCHSHAFAPERRGHLRPS

SEQ ID NO: 2476 - protein, 54 aa, Homo sapiens
MKENYCLQAALVCLGMLCHSHAFAPERRGHLRPSFHGHHEKGKEGQVLQRSKRG

SEQ ID NO: 2477 - protein, 65 aa, Homo sapiens
MKENYCLQAALVCLGMLCHSHAFAPERRGHLRPSFHGHHEKGKEGQVLQRSKRGWVWNQFFVIEE

SEQ ID NO: 2478 - protein, 70 aa, Homo sapiens
MKENYCLQAALVCLGMLCHSHAFAPERRGHLRPSFHGHHEKGKEGQVLQRSKRGWVWNQFFVIEEYTGPD

SEQ ID NO: 2479 - protein, 222 aa, Homo sapiens
MKENYCLQAALVCLGMLCHSHAFAPERRGHLRPSFHGHHEKGKEGQVLQRSKRGWVWNQFFVIEEYTGPDPVLVGRLHSDIDSGDGNIKYILSGEGAGTIFVIDDKSGNIHATKTLDREERAQYTLMAQAVDRDTNRPLEPPSEFIVKVQDINDNPPEFLHETYHANVPERSNVGTSVIQVTASDADDPTYGNSAKLVYSILEGQPYFSVEAQTGIIRTALP

SEQ ID NO: 2480 - protein, 796 aa, Homo sapiens
MKENYCLQAALVCLGMLCHSHAFAPERRGHLRPSFHGHHEKGKEGQVLQRSKRGWVWNQFFVIEEYTGPDPVLVGRLHSDIDSGDGNIKYILSGEGAGTIFVIDDKSGNIHATKTLDREERAQYTLMAQAVDRDTNRPLEPPSEFIVKVQDINDNPPEFLHETYHANVPERSNVGTSVIQVTASDADDPTYGNSAKLVYSILEGQPYFSVEAQTGIIRTALPNMDREAKEEYHVVIQAKDMGGHMGGLSGTTKVTITLTDVNDNPPKFPQSVYQMSVSEAAVPGEEVGRVKAKDPDIGENGLVTYNIVDGDGMESFEITTDYETQEGVIKLKKPVDFETKRAYSLKVEAANVHIDPKFISNGPFKDTVTVKISVEDADEPPMFLAPSYIHEVQENAAAGTVVGRVHAKDPDAANSPIRYSIDRHTDLDRFFTINPEDGFIKTTKPLDREETAWLNITVFAAEIHNRHQEAKVPVAIRVLDVNDNAPKFAAPYEGFICESDQTKPLSNQPIVTISADDKDDTANGPRFIFSLPPEIIHNPNFTVRDNRDNTAGVYARRGGFSRQKQDLYLLPIVISDGGIPPMSSTNTLTIKVCGCDVNGALLSCNAEAYILNAGLSTGALIAILACIVILLVIVVLFVTLRRQKKEPLIVFEEEDVRENIITYDDEGGGEEDTEAFDIATLQNPDGINGFIPRKDIKPEYQYMPRPGLRPAPNSVDVDDFINTRIQEADNDPTAPPYDSIQIYGYEGRGSVAGSLSSLESATTDSDLDYDYLQNWGPRFKKLADLYGSKDTFDDDS

SEQ ID NO: 2481 - protein, 693 aa, Homo sapiens
MKENYCLQAALVCLGMLCHSHAFAPERRGHLRPSFHGHHEKGKEGQVLQRSKRGWVWNQFFVIEEYTGPDPVLVGRLHSDIDSGDGNIKYILSGEGAGTIFVIDDKSGNIHATKTLDREERAQYTLMAQAVDRDTNRPLEPPSEFIVKVQDINDNPPEFLHETYHANVPERSNVGTSVIQVTASDADDPTYGNSAKLVYSILEGQPYFSVEAQTGIIRTALPNMDREAKEEYHVVIQAKDMGGHMGGLSGTTKVTITLTDVNDNPPKFPQSVYQMSVSEAAVPGEEVGRVKAKDPDIGENGLVTYNIVDGDGMESFEITTDYETQEGVIKLKKPVDFETKRAYSLKVEAANVHIDPKFISNGPFKDTVTVKISVEDADEPPMFLAPSYIHEVQENAAAGTVVGRVHAKDPDAANSPIRYSIDRHTDLDRFFTINPEDGFIKTTKPLDREETAWLNITVFAAEIHNRHQEAKVPVAIRVLDVNDNAPKFAAPYEGFICESDQTKPLSNQPIVTISADDKDDTANGPRFIFSLPPEIIHNPNFTVRDNRDNTAGVYARRGGFSRQKQDLYLLPIVISDGGIPPMSSTNTLTIKVCGCDVNGALLSCNAEAYILNAGLSTGALIAILACIVILLGCPSLMEPPSPREDMRLLYLGFQLMLFSYVKVNRRFCLLGVFIKLPFLYVVATESPTTLTSL

SEQ ID NO: 2482 - protein, 62 aa, Homo sapiens
  VARIANT 1: note = misc_feature - Xaa can be any naturally occurring amino acid
XMSVSEAAVPGEEVGRVKAKDPDIGENGLVTYNIVDGDGMESFEITTDYETQEGVIKLKKVS

SEQ ID NO: 2483 - protein, 760 aa, Homo sapiens
MKTPPGASSRTKCSRELRSFCAFSCPRAKQPTCTAWFPQQEHPSENGPQMPGRDPPAASTMQVLLLTSAEDLDCTPGFQQKVFHINQPAEFIEDQSILNLTFSDCKGNDKLRYEVSSPYFKVNSDGGLVALRNITAVGKTLFVHARTPHAEDMAELVIVGGKDIQGSLQDIFKFARTSPVPRQKRSIVVSPILIPENQRQPFPRDVGKVVDSDRPERSKFRLTGKGVDQEPKGIFRINENTGSVSVTRTLDREVIAVYQLFVETTDVNGKTLEGPVPLEVIVIDQNDNRPIFREGPYIGHVMEGSPTGTTVMRMTAFDADDPATDNALLRYNIRQQTPDKPSPNMFYIDPEKGDIVTVVSPALLDRETLENPKYELIIEAQDMAGLDVGLTGTATATIMIDDKNDHSPKFTKKEFQATVEEGAVGVIVNLTVEDKDDPTTGAWRAAYTIINGNPGQSFEIHTNPQTNEGMLSVVKPLDYEISAFHTLLIKVENEDPLVPDVSYGPSSTATVHITVLDVNEGPVFYPDPMMVTRQEDLSVGSVLLTVNATDPDSLQHQTIRYSVYKDPAGWLNINPINGTVDTTAVLDRESPFVDNSVYTALFLAIDSGNPPATGTGTLLITLEDVNDNAPFIYPTVAEVCDDAKNLSVVILGASDKDLHPNTDPFKFEIHKQAVPDKVWKISKINNTHALVSLLQNLNKANYNLPIMVTDSGKPPMTNITDLRVQVCSCRNSKVDCNAAGALRFSLPSVLLLSLFSLACL

SEQ ID NO: 2484 - protein, 37 aa, Homo sapiens
MQPRTPLVLCVLLSQSGGPVCKSQFQALPLAVQWLGV

SEQ ID NO: 2485 - protein, 67 aa, Homo sapiens
MQPRTPLVLCVLLSQTPVRPTIYLCQNLQFIKNKARDSNSLADHKGKRIQVNRLLPGLLFHDELSGI

SEQ ID NO: 2486 - protein, 52 aa, Homo sapiens
MQPRTPLVLCVLLSQVLLLTSAEDLDCTPGFQQKVFHINQPAEFIEDQSILN

SEQ ID NO: 2487 - protein, 67 aa, Homo sapiens
MQPRTPLVLCVLLSQVLLLTSAEDLDCTPGFQQKVFHINQPAEFIEDQSILNCKQCHSKMLLDSSHI

SEQ ID NO: 2488 - protein, 175 aa, Homo sapiens
MQPRTPLVLCVLLSQVLLLTSAEDLDCTPGFQQKVFHINQPAEFIEDQSILNLTFSDCKGNDKLRYEVSSPYFKVNSDGGLVALRNITAVGKTLFVHARTPHAEDMAELVIVGGKDIQGSLQDIFKFARTSPVPRQKRSIVVSPILIPENQRQPFPRDVGKMKIWQVLCLARWLT

SEQ ID NO: 2489 - protein, 190 aa, Homo sapiens
MQPRTPLVLCVLLSQVLLLTSAEDLDCTPGFQQKVFHINQPAEFIEDQSILNLTFSDCKGNDKLRYEVSSPYFKVNSDGGLVALRNITAVGKTLFVHARTPHAEDMAELVIVGGKDIQGSLQDIFKFARTSPVPRQKRSIVVSPILIPENQRQPFPRDVGKRTHNPINSELLLNEGITADLNPCITILAI

SEQ ID NO: 2490 - protein, 713 aa, Homo sapiens
MQPRTPLVLCVLLSQVLLLTSAEDLDCTPGFQQKVFHINQPAEFIEDQSILNLTFSDCKGNDKLRYEVSSPYFKVNSDGGLVALRNITAVGKTLFVHARTPHAEDMAELVIVGGKDIQGSLQDIFKFARTSPVPRQKRSIVVSPILIPENQRQPFPRDVGKVVDSDRPERSKFRLTGKGVDQEPKGIFRINENTGSVSVTRTLDREVIAVYQLFVETTDVNGKTLEGPVPLEVIVIDQNDNRPIFREGPYIGHVMEGSPTGTTVMRMTAFDADDPATDNALLRYNIRQQTPDKPSPNMFYIDPEKGDIVTVVSPALLDRETLENPKYELIIEAQDMAGLDVGLTGTATATIMIDDKNDHSPKFTKKEFQATVEEGAVGVIVNLTVEDKDDPTTGAWRAAYTIINGNPGQSFEIHTNPQTNEGMLSVVKPLDYEISAFHTLLIKVENEDPLVPDVSYGPSSTATVHITVLDVNEGPVFYPDPMMVTRQEDLSVGSVLLTVNATDPDSLQHQTIRYSVYKDPAGWLNINPINGTVDTTAVLDRESPFVDNSVYTALFLAIDSGNPPATGTGTLLITLEDVNDNAPFIYPTVAEVCDDAKNLSVVILGASDKDLHPNTDPFKFEIHKQAVPDKVWKISKINNTHALVSLLQNLNKANYNLPIMVTDSGKPPMTNITDLRVQVCSCRNSKVDCNAAGALRFSLPSVLLLSLFSLACL

SEQ ID NO: 2491 - protein, 674 aa, Homo sapiens
MQPRTPLVLCVLLSQVLLLTSAEDLDCTPGFQQKVFHINQPAEFIEDQSILNLTFSDCKGNDKLRYEVSSPYFKVNSDGGLVALRNITAVGKTLFVHARTPHAEDMAELVIVGGKDIQGSLQVVDSDRPERSKFRLTGKGVDQEPKGIFRINENTGSVSVTRTLDREVIAVYQLFVETTDVNGKTLEGPVPLEVIVIDQNDNRPIFREGPYIGHVMEGSPTGTTVMRMTAFDADDPATDNALLRYNIRQQTPDKPSPNMFYIDPEKGDIVTVVSPALLDRETLENPKYELIIEAQDMAGLDVGLTGTATATIMIDDKNDHSPKFTKKEFQATVEEGAVGVIVNLTVEDKDDPTTGAWRAAYTIINGNPGQSFEIHTNPQTNEGMLSVVKPLDYEISAFHTLLIKVENEDPLVPDVSYGPSSTATVHITVLDVNEGPVFYPDPMMVTRQEDLSVGSVLLTVNATDPDSLQHQTIRYSVYKDPAGWLNINPINGTVDTTAVLDRESPFVDNSVYTALFLAIDSGNPPATGTGTLLITLEDVNDNAPFIYPTVAEVCDDAKNLSVVILGASDKDLHPNTDPFKFEIHKQAVPDKVWKISKINNTHALVSLLQNLNKANYNLPIMVTDSGKPPMTNITDLRVQVCSCRNSKVDCNAAGALRFSLPSVLLLSLFSLACL

SEQ ID NO: 2492 - protein, 56 aa, Homo sapiens
MQPRTPLVLCVLLSQVLLLTSAEDLDCTPGFQQKVFHINQPAEFIEDQSILNYVFY

SEQ ID NO: 2493 - protein, 147 aa, Homo sapiens
MILQAHLHSLCLLMLYLATGYGQEGKFSGPLKPMTFSIYEGQEPSQIIFQFKANPPAVTFELTGETDNIFVIEREGLLYYNRALDRETRSTHNLQVAALDANGIIVEGPVPITIKVKDINDNRPTFLQSKYEGSVRQNSRPGKPFLY

SEQ ID NO: 2494 - protein, 832 aa, Homo sapiens
MILQAHLHSLCLLMLYLATGYGQEGKFSGPLKPMTFSIYEGQEPSQIIFQFKANPPAVTFELTGETDNIFVIEREGLLYYNRALDRETRSTHNLQVAALDANGIIVEGPVPITIKVKDINDNRPTFLQSKYEGSVRQNSRPGKPFLYVNATDLDDPATPNGQLYYQIVIQLPMINNVMYFQINNKTGAISLTREGSQELNPAKNPSYNLVISVKDMGGQSENSFSDTTSVDIIVTENIWKAPKPVEMVENSTDPHPIKITQVRWNDPGAQYSLVDKEKLPRFPFSIDQEGDIYVTQPLDREEKDAYVFYAVAKDEYGKPLSYPLEIHVKVKDINDNPPTCPSPVTVFEVQENERLGNSIGTLTAHDRDEENTANSFLNYRIVEQTPKLPMDGLFLIQTYAGMLQLAKQSLKKQDTPQYNLTIEVSDKDFKTLCFVQINVIDINDQIPIFEKSDYGNLTLAEDTNIGSTILTIQATDADEPFTGSSKILYHIIKGDSEGRLGVDTDPHTNTGYVIIKKPLDFETAAVSNIVFKAENPEPLVFGVKYNASSFAKFTLIVTDVNEAPQFSQHVFQAKVSEDVAIGTKVGNVTAKDPEGLDISYSLRGDTRGWLKIDHVTGEIFSVAPLDREAGSPYRVQVVATEVGGSSLSSVSEFHLILMDVNDNPPRLAKDYTGLFFCHPLSAPGSLIFEATDDDQHLFRGPHFTFSLGSGSLQNDWEVSKINGTHARLSTRHTEFEEREYVVLIRINDGGRPPLEGIVSLPVTFCSCVEGSCFRPAGHQTGIPTVGMAVGILLTTLLVIGIILAVVFIRIKKDKGKDNVESAQASEVKPLRS

SEQ ID NO: 2495 - protein, 832 aa, Homo sapiens; identical to SEQ ID NO: 2494

SEQ ID NO: 2496 - protein, 580 aa, Homo sapiens
MILQAHLHSLCLLMLYLATGYGQEGKFSGPLKPMTFSIYEGQEPSQIIFQFKANPPAVTFELTGETDNIFVIEREGLLYYNRALDRETRSTHNLQVAALDANGIIVEGPVPITIKVKDINDNRPTFLQSKYEGSVRQNSRPGNSIGTLTAHDRDEENTANSFLNYRIVEQTPKLPMDGLFLIQTYAGMLQLAKQSLKKQDTPQYNLTIEVSDKDFKTLCFVQINVIDINDQIPIFEKSDYGNLTLAEDTNIGSTILTIQATDADEPFTGSSKILYHIIKGDSEGRLGVDTDPHTNTGYVIIKKPLDFETAAVSNIVFKAENPEPLVFGVKYNASSFAKFTLIVTDVNEAPQFSQHVFQAKVSEDVAIGTKVGNVTAKDPEGLDISYSLRGDTRGWLKIDHVTGEIFSVAPLDREAGSPYRVQVVATEVGGSSLSSVSEFHLILMDVNDNPPRLAKDYTGLFFCHPLSAPGSLIFEATDDDQHLFRGPHFTFSLGSGSLQNDWEVSKINGTHARLSTRHTEFEEREYVVLIRINDGGRPPLEGIVSLPGIILAVVFIRIKKDKGKDNVESAQASEVKPLRS

SEQ ID NO: 2497 - protein, 90 aa, Homo sapiens
  VARIANT 1: note = misc_feature - Xaa can be any naturally occurring amino acid
XIDINDQIPIFEKSDYGNLTLAEDTNIGSTILTIQATDADEPFTGSSKILYHIIKGDSEGRLGVDTDPHTNTGYVIIKKLFTEGRHKRLA

SEQ ID NO: 2498 - protein, 790 aa, Homo sapiens
MKITSTSCICPVLVCLCFVQRCYGTAHHSSIKVMRNQTKHIEGETEVHHRPKRGWVWNQFFVLEEHMGPDPQYVGKLHSNSDKGDGSVKYILTGEGAGTIFIIDDTTGDIHSTKSLDREQKTHYVLHAQAIDRRTNKPLEPESEFIIKVQDINDNAPKFTDGPYIVTVPEMSDMGTSVLQVTATDADDPTYGNSARVVYSILQGQPYFSVDPKTGVIRTALHNMDREAREHYSVVIQAKDMAGQVGGLSGSTTVNITLTDVNDNPPRFPQKHYQLYVPESAQVGSAVGKIKANDADTGSNADMTYSIINGDGMGIFSISTDKETREGILSLKKPLNYEKKKSYTLNIEGANTHLDFRFSHLGPFKDATMLKIIVGDVDEPPLFSMPSYLMEVYENAKIGTVVGTVLAQDPDSTNSLVRYFINYNVEDDRFFNIDANTGTIRTTKVLDREETPWYNITVTASEIDNPDLLSHVTVGIRVLDVNDNPPELAREYDIIVCENSKPGQVIHTISATDKDDFANGPRFNFFLDERLPVNPNFTLKDNEDNTASILTRRRRFSRTVQDVYYLPIMISDGGIPSLSSSSTLTIRVCACERDGRVRTCHAEAFLSSAGLSTGALIAILLCVLILLAIVVLFITLRRSKKEPLIISEEDVRENVVTYDDEGGGEEDTEAFDITALRNPSAAEELKYRRDIRPEVKLTPRHQTSSTLESIDVQEFIKQRLAEADLDPSVPPYDSLQTYAYEGQRSEAGSISSLDSATTQSDQDYHYLGDWGPEFKKLAELYGEIESERTT

SEQ ID NO: 2499 - protein, 790 aa, Homo sapiens; identical to SEQ ID NO: 2498

SEQ ID NO: 2500 - protein, 590 aa, Homo sapiens
MKITSTSCICPVLVCLCFVQRCYGTAHHSSIKVMRNQTKHIEGETEVHHRPKRGWVWNQFFVLEEHMGPDPQYVGKLHSNSDKGDGSVKYILTGEGAGTIFIIDDTTGDIHSTKSLDREQKTHYVLHAQAIDRRTNKPLEPESEFIIKVQDINDNAPKFTDGPYIVTVPEMSDMGTSVLQVTATDADDPTYGNSARVVYSILQGQPYFSVDPKTGVIRTALHNMDREAREHYSVVIQAKDMAGQVGGLSGSTTVNITLTDVNDNPPRFPQKHYQLYVPESAQVGSAVGKIKANDADTGSNADMTYSIINGDGMGIFSISTDKETREGILSLKKPLNYEKKKSYTLNIEGANTHLDFRFSHLGPFKDATMLKIIVGDVDEPPLFSMPSYLMEVYENAKIGTVVGTVLAQDPDSTNSLVRYFINYNVEDDRFFNIDANTGTIRTTKVLDREETPWYNITVTASEIDNPDLLSHVTVGIRVLDVNDNPPELAREYDIIVCENSKPGQVIHTISATDKDDFANGPRFNFFLDERLPVNPNFTLKDNEGEHIYTYLFIYVVSALTLYVIGFILIYTQTSCKSAFKVSLMLLCYDL

SEQ ID NO: 2501 - protein, 575 aa, Homo sapiens
MKITSTSCICPVLVCLCFVQRCYGTAHHSSIKVMRNQTKHIEGETEVHHRPKRGWVWNQFFVLEEHMGPDPQYVGKLHSNSDKGDGSVKYILTGEGAGTIFIIDDTTGDIHSTKSLDREQKTHYVLHAQAIDRRTNKPLEPESEFIIKVQDINDNAPKFTDGPYIVTVPEMSDMGTSVLQVTATDADDPTYGNSARVVYSILQGQPYFSVDPKTGVIRTALHNMDREAREHYSVVIQAKDMAGQVGGLSGSTTVNITLTDVNDNPPRFPQKHYQLYVPESAQVGSAVGKIKANDADTGSNADMTYSIINGDGMGIFSISTDKETREGILSLKKPLNYEKKKSYTLNIEGANTHLDFRFSHLGPFKDATMLKIIVGDVDEPPLFSMPSYLMEVYENAKIGTVVGTVLAQDPDSTNSLVRYFINYNVEDDRFFNIDANTGTIRTTKVLDREETPWYNITVTASEIDNPDLLSHVTVGIRVLDVNDNPPELAREYDIIVCENSKPGQVIHTISATDKDDFANGPRFNFFLDERLPVNPNFTLKDNEAAAAPSPSGFVHAREMGVCGPAMQKPSCPRLV

SEQ ID NO: 2502 - protein, 790 aa, Homo sapiens; identical to SEQ ID NO: 2498

SEQ ID NO: 2503 - protein, 574 aa, Homo sapiens
MKITSTSCICPVLVCLCFVQRCYGTAHHSSIKVMRNQTKHIEGETEVHHRPKRGWVWNQFFVLEEHMGPDPQYVGKLHSNSDKGDGSVKYILTGEGAGTIFIIDDTTGDIHSTKSLDREQKTHYVLHAQAIDRRTNKPLEPESEFIIKVQDINDNAPKFTDGPYIVTVPEMSDMGTSVLQVTATDADDPTYGNSARVVYSILQGQPYFSVDPKTGVIRTALHNMDREAREHYSVVIQAKDMAGQVGGLSGSTTVNITLTDVNDNPPRFPQKHYQLYVPESAQVGSAVGKIKANDADTGSNADMTYSIINGDGMGIFSISTDKETREGILSLKKPLNYEKKKSYTLNIEGANTHLDFRFSHLGPFKDATMLKIIVGDVDEPPLFSMPSYLMEVYENAKIGTVVGTVLAQDPDSTNSLVRYFINYNVEDDRFFNIDANTGTIRTTKVLDREETPWYNITVTASEIDNPDLLSHVTVGIRVLDVNDNPPELAREYDIIVCENSKPGQVIHTISATDKDDFANGPRFNFFLDERLPVNPNFTLKDNEAAAPSPSGFVHAREMGVCGPAMQKPSCPRLV

SEQ ID NO: 2504 - protein, 441 aa, Homo sapiens
WVWNQFFVLEEHMGPDPQYVGKLHSNSDKGDGSVKYILTGEGAGTIFIIDDTTGDIHSTKSLDREQKTHYVLHAQAIDRRTNKPLEPESEFIIKVQDINDNAPKFTDGPYIVTVPEMSDMGTSVLQVTATDADDPTYGNSARVVYSILQGQPYFSVDPKTGVIRTALHNMDREAREHYSVVIQAKDMAGQVGGLSGSTTVNITLTDVNDNPPRFPQKHYQLYVPESAQVGSAVGKIKANDADTGSNADMTYSIINGDGMGIFSISTDKETREGILSLKKPLNYEKKKSYTLNIEGANTHLDFRFSHLGPFKDATMLKIIVGDVDEPPLFSMPSYLMEVYENAKIGTVVGTVLAQDPDSTNSLVRYFINYNVEDDRFFNIDANTGTIRTTKVLDREETPWYNITVTASEIAAAAPSPSGFVHAREMGVCGPAMQKPSCPRLV

SEQ ID NO: 2505 - protein, 434 aa, Homo sapiens
GIPLLWPCLGATENSQTKKVKQPVRSHLRVKRGWVWNQFFVPEEMNTTSHHIGQLRSDLDNGNNSFQYKLLGAGAGSTFIIDERTGDIYAIQKLDREERSLYILRAQVIDIATGRAVEPESEFVIKVSDINDNEPKFLDEPYEAIVPEMSPEGTLVIQVTASDADDPSSGNNARLLYSLLQGQPYFSVEPTTGVIRISSKMDRELQDEYWVIIQAKDMIGQPGALSGTTSVLIKLSDVNDNKPIFKESLYRLTVSESAPTGTSIGTIMAYDNDIGENAEMDYSIEEDDSQTFDIITNHETQEGIVILKKKVDFEHQNHYGIRAKVKNHHVPEQLMKYHTEASTTFIKIQVEDVDEPPLFLLPYYVFEVFEETPQGSFVGVVSATDPDNRKSPIRYSITRSKVFNINDNGTITTSNSLDREISAWYNLSITATEK

SEQ ID NO: 2506 - protein, 65 aa, Homo sapiens
MNCYLLLRFMLGIPLLWPCLGATENSQTKKVKQPVRSHLRVKRGWVWNQFFVPEEMNTTSHHIGQ

SEQ ID NO: 2507 - protein, 772 aa, Homo sapiens
MNCYLLLRFMLGIPLLWPCLGATENSQTKKVKQPVRSHLRVKRGWVWNQFFVPEEMNTTSHHIGQLRSDLDNGNNSFQYKLLGAGAGSTFIIDERTGDIYAIQKLDREERSLYILRAQVIDIATGRAVEPESEFVIKVSDINDNEPKFLDEPYEAIVPEMSPEGTLVIQVTASDADDPSSGNNARLLYSLLQGQPYFSVEPTTGVIRISSKMDRELQDEYWVIIQAKDMIGQPGALSGTTSVLIKLSDVNDNKPIFKESLYRLTVSESAPTGTSIGTIMAYDNDIGENAEMDYSIEEDDSQTFDIITNHETQEGIVILKKKVDFEHQNHYGIRAKVKNHHVPEQLMKYHTEASTTFIKIQVEDVDEPPLFLLPYYVFEVFEETPQGSFVGVVSATDPDNRKSPIRYSITRSKVFNINDNGTITTSNSLDREISAWYNLSITATEKYNIEQISSIPLYVQVLNINDHAPEFSQYYETYVCENAGSGQVIQTISAVDRDESIEEHHFYFNLSVEDTNNSSFTIIDNQDNTAVILTNRTGFNLQEEPVFYISILIADNGIPSLTSTNTLTIHVCDCGDSGSTQTCQYQELVLSMGFKTEVIIAILICIMIIFGFIFLTLGLKQRRKQILFPEKSEDFRENIFQYDDEGGGEEDTEAFDIAELRSSTIMRERKTRKTTSAEIRSLYRQSLQVGPDSAIFRKFILEKLEEANTDPCAPPFDSLQTYAFEGTGSLAGSLSSLESAVSDQDESYDYLNELGPRFKRLACMFGSAVQSNN

SEQ ID NO: 2508 - protein, 490 aa, Homo sapiens
MNCYLLLRFMLGIPLLWPCLGATENSQTKKVKQPVRSHLRVKRGWVWNQFFVPEEMNTTSHHIGQLRSDLDNGNNSFQYKLLGAGAGSTFIIDERTGDIYAIQKLDREERSLYILRAQVIDIATGRAVEPESEFVIKVSDINDNEPKFLDEPYEAIVPEMSPEGTLVIQVTASDADDPSSGNNARLLYSLLQGQPYFSVEPTTGVIRISSKMDRELQDEYWVIIQAKDMIGQPGALSGTTSVLIKLSDVNDNKPIFKESLYRLTVSESAPTGTSIGTIMAYDNDIGENAEMDYSIEEDDSQTFDIITNHETQEGIVILKKKVDFEHQNHYGIRAKVKNHHVPEQLMKYHTEASTTFIKIQVEDVDEPPLFLLPYYVFEVFEETPQGSFVGVVSATDPDNRKSPIRYSITRSKVFNINDNGTITTSNSLDREISAWYNLSITATEKYNIEQISSIPLYVQVLNINDHAPEFSQYYETYVCENAGSGQGLFF

SEQ ID NO: 2509 - protein, 541 aa, Homo sapiens
MNCYLLLRFMLGIPLLWPCLGATENSQTKKVKQPVRSHLRVKRGWVWNQFFVPEEMNTTSHHIGQLRSDLDNGNNSFQYKLLGAGAGSTFIIDERTGDIYAIQKLDREERSLYILRAQVIDIATGRAVEPESEFVIKVSDINDNEPKFLDEPYEAIVPEMSPEGTLVIQVTASDADDPSSGNNARLLYSLLQGQPYFSVEPTTGVIRISSKMDRELQDEYWVIIQAKDMIGQPGALSGTTSVLIKLSDVNDNKPIFKESLYRLTVSESAPTGTSIGTIMAYDNDIGENAEMDYSIEEDDSQTFDIITNHETQEGIVILKKKVDFEHQNHYGIRAKVKNHHVPEQLMKYHTEASTTFIKIQVEDVDEPPLFLLPYYVFEVFEETPQGSFVGVVSATDPDNRKSPIRYSITRSKVFNINDNGTITTSNSLDREISAWYNLSITATEKYNIEQISSIPLYVQVLNINDHAPEFSQYYETYVCENAGSGQVIQTISAVDRDESIEEHHFYFNLSVEDTNNSSFTIIDNQELVLTFKKNLSSTSPS

SEQ ID NO: 2510 - protein, 445 aa, Homo sapiens
MDNDPLVFGVSGEEASRFFAVEPDTGVVWLRQPLDRETKSEFTVEFSVSDHQGVITRKVNIQVGDVNDNAPTFHNQPYSVRIPENTPVGTPIFIVNATDPDLGAGGSVLYSFQPPSQFFAIDSARGIVTVIRELDYETTQAYQLTVNALAIIITNLPYSTNIYEHSPPGTTVRIITAIDQDKGRPRGIGYTIVSGNTNSIFALDYISGVLTLNGLLDRENPLYSHGFILTVKGTELNDDRTPSDATVTTTFNILVIDINDNAPEFNSSEYSVAITELAQVGFALPLFIQVVDKDEGLNSMFEVYLVGNNSHHFIISPTSVQGKADIRIRVAIPLDYETVDRYDFDLFANESVPDHVGYAKVKITLINENDNRPIFSQPLYNISLYENVTVGTSVLTVLVSPRFTAGPLSSPGPTVVRHPEGFCPRDLSNQGRRHPQIPELCLLVY

SEQ ID NO: 2511 - protein, 3354 aa, Homo sapiens
MGRHVATSCHVAWLLVLISGCWGQVNRLPFFTNHFFDTYLLISEDTPVGSSVTQLLAQDMDNDPLVFGVSGEEASRFFAVEPDTGVVWLRQPLDRETKSEFTVEFSVSDHQGVITRKVNIQVGDVNDNAPTFHNQPYSVRIPENTPVGTPIFIVNATDPDLGAGGSVLYSFQPPSQFFAIDSARGIVTVIRELDYETTQAYQLTVNATDQDKTRPLSTLANLAIIITDVQDMDPIFINLPYSTNIYEHSPPGTTVRIITAIDQDKGRPRGIGYTIVSGNTNSIFALDYISGVLTLNGLLDRENPLYSHGFILTVKGTELNDDRTPSDATVTTTFNILVIDINDNAPEFNSSEYSVAITELAQVGFALPLFIQVVDKDENLGLNSMFEVYLVGNNSHHFIISPTSVQGKADIRIRVAIPLDYETVDRYDFDLFANESVPDHVGYAKVKITLINENDNRPIFSQPLYNISLYENVTVGTSVLTVLATDNDAGTFGEVSYFFSDDPDRFSLDKDTGLIMLIARLDYELIQRFTLTIIARDGGGEETTGRVRINVLDVNDNVPTFQKDAYVGALRENEPSVTQLVRLRATDEDSPPNNQITYSIVSASAFGSYFDISLYEGYGVISVSRPLDYEQISNGLIYLTVMAMDAGNPPLNSTVPVTIEVFDENDNPPTFSKPAYFVSVVENIMAGATVLFLNATDLDRSREYGQESIIYSLEGSTQFRINARSGEITTTSLLDRETKSEYILIVRAVDGGVGHNQKTGIATVNITLLDINDNHPTWKDAPYYINLVEMTPPDSDVTTVVAVDPDLGENGTLVYSIQPPNKFYSLNSTTGKIRTTHAMLDRENPDPHEAELMRKIVVSVTDCGRPPLKATSSATVFVNLLDLNDNDPTFQNLPFVAEVLEGIPAGVSIYQVVAIDLDEGLNGLVSYRMPVGMPRMDFLINSSSGVVVTTTELDRERIAEYQLRVVASDAGTPTKSSTSTLTIHVLDVNDETPTFFPAVYNVSVSEDVPREFRVVWLNCTDNDVGLNAELSYFITGGNVDGKFSVGYRDAVVRTVVGLDRETTAAYMLILEAIDNGPVGKRHTGTATVFVTVLDVNDNRPIFLQSSYEASVPEDIPEGHSILQLKATDADEGEFGRVWYRILHGNHGNNFRIHVSNGLLMRGPRPLDRERNSSHVLIVEAYNHDLGPMRSSVRVIVYVEDINDEAPVFTQQQYSRLGLRETAGIGTSVIVVQATDRDSGDGGLVNYRILSGAEGKFEIDESTGLIITVNYLDYETKTSYMMNVSATDQAPPFNQGFCSVYITLLNELDEAVQFSNASYEAAILENLALGTEIVRVQAYSIDNLNQITYRFNAYTSTQAKALFKIDAITGVITVQGLVDREKGDFYTLTVVADDGGPKVDSTVKVYITVLDENDNSPRFDFTSDSAVSIPEDCPVGQRVATVKAWDPDAGSNGQVVFSLASGNIAGAFEIVTTNDSIGEVFVARPLDREELDHYILQVVASDRGTPPRKKDHILQVTILDINDNPPVIESPFGYNVSVNENVGGGTAVVQVRATDRDIGINSVLSYYITEGNKDMAFRMDRISGEIATRPAPPDRERQSFYHLVATVEDEGTPTLSATTHVYVTIVDENDNAPMFQQPHYEVLLDEGPDTLNTSLITIQALDLDEGPNGTVTYAIVAGNIVNTFRIDRHMGVITAAKELDYEISHGRYTLIVTATDQCPILSHRLTSTTTVLVNVNDINDNVPTFPRDYEGPFEVTEGQPGPRVWTFLAHDRDSGPNGQVEYSIMDGDPLGEFVISPVEGVLRVRKDVELDRETIAFYNLTICARDRGMPPLSSTMLVGIRVLDINDNDPVLLNLPMNITISENSPVSSFVAHVLASDADSGCNARLTFNITAGNRERAFFINATTGIVTVNRPLDRERIPEYKLTISVKDNPENPRIARRDYDLLLIFLSDENDNHPLFTKSTYQAEVMENSPAGTPLTVLNGPILALDADQDIYAVVTYQLLGAQSGLFDINSSTGVVTVRSGVIIDREAFSPPILELLLLAEDIGLLNSTAHLLITILDDNDNRPTFSPATLTVHLLENCPPGFSVLQVTATDEDSGLNGELVYRIEAGAQDRFLIHLVTGVIRVGNATIDREEQESYRLTVVATDRGTVPLSGTAIVTILIDDINDSRPEFLNPIQTVSVLESAEPGTVIANITAIDHDLNPKLEYHIVGIVAKDDTDRLVPNQEDAFAVNINTGSVMVKSPMNRELVATYEVTLSVIDNASDLPERSVSVPNAKLTVNVLDVNDNTPQFKPFGITYYMERILEGATPGTTLIAVAAVDPDKGLNGLVTYTLLDLVPPGYVQLEDSSAGKVIANRTVDYEEVHWLNFTVRASDNGSPPRAAEIPVYLEIVDINDNNPIFDQPSYQEAVFEDVPVGTIILTVTATDADSGNFALIEYSLGDGESKFAINPTTGDIYVLSSLDREKKDHYILTALAKDNPGDVASNRRENSVQVVIQVLDVNDCRPQFSKPQFSTSVYENEPAGTSVITMMATDQDEGPNGELTYSLEGPGVEAFHVDMDSGLVTTQRPLQSYEKFSLTVVATDGGEPPLWGTTMLLVEVIDVNDNRPVFVRPPNGTILHIREEIPLRSNVYEVYATDKDEGLNGAVRYSFLKTAGNRDWEFFIIDPISGLIQTAQRLDRESQAVYSLILVASDLGQPVPYETMQPLQVALEDIDDNEPLFVRPPKGSPQYQLLTVPEHSPRGTLVGNVTGAVDADEGPNAIVYYFIAAGNEEKNFHLQPDGCLLVLRDLDREREAIFSFIVKASSNRSWTPPRGPSPTLDLVADLTLQEVRVVLEDINDQPPRFTKAEYTAGVATDAKVGSELIQVLALDADIGNNSLVFYSILAIHYFRALANDSEDVGQVFTMGSMDGILRTFDLFMAYSPGYFVVDIVARDLAGHNDTAIIGIYILRDDQRVKIVINEIPDRVRGFEEEFIHLLSNITGAIVNTDNVQFHVDKKGRVNFAQTELLIHVVNRDTNRILDVDRVIQMIDENKEQLRNLFRNYNVLDVQPAISVRLPDDMSALQMAIIVLAILLFLAAMLFVLMNWYYRTVHKRKLKAIVAGSAGNRGFIDIMDMPNTNKYSFDGANPVWLDPFCRNLELAAQAEHEDDLPENLSEIADLWNSPTRTHGTFGREPAAVKPDDDRYLRAAIQEYDNIAKLGQIIREGPIKGSLLKVVLEDYLRLKKLFAQRMVQKASSCHSSISELIQTELDEEPGDHSPGQGSLRFRHKPPVELKGPDGIHVVHGSTGTLLATDLNSLPEEDQKGLGRSLETLTAAEATAFERNARTESAKSTPLHKLRDVIMETPLEITEL

SEQ ID NO: 2512 - protein, 1061 aa, Homo sapiens
MGRHVATSCHVAWLLVLISGCWGQVNRLPFFTNHFFDTYLLISEDTPVGSSVTQLLAQDMDNDPLVFGVSGEEASRFFAVEPDTGVVWLRQPLDRETKSEFTVEFSVSDHQGVITRKVNIQVGDVNDNAPTFHNQPYSVRIPENTPVGTPIFIVNATDPDLGAGGSVLYSFQPPSQFFAIDSARGIVTVIRELDYETTQAYQLTVNATDQDKTRPLSTLANLAIIITDVQDMDPIFINLPYSTNIYEHSPPGTTVRIITAIDQDKGRPRGIGYTIVSGNTNSIFALDYISGVLTLNGLLDRENPLYSHGFILTVKGTELNDDRTPSDATVTTTFNILVIDINDNAPEFNSSEYSVAITELAQVGFALPLFIQVVDKDENLGLNSMFEVYLVGNNSHHFIISPTSVQGKADIRIRVAIPLDYETVDRYDFDLFANESVPDHVGYAKVKITLINENDNRPIFSQPLYNISLYENVTVGTSVLTVLATDNDAGTFGEVSYFFSDDPDRFSLDKDTGLIMLIARLDYELIQRFTLTIIARDGGGEETTGRVRINVLDVNDNVPTFQKDAYVGALRENEPSVTQLVRLRATDEDSPPNNQITYSIVSASAFGSYFDISLYEGYGVISVSRPLDYEQISNGLIYLTVMAMDAGNPPLNSTVPVTIEVFDENDNPPTFSKPAYFVSVVENIMAGATVLFLNATDLDRSREYGQESIIYSLEGSTQFRINARSGEITTTSLLDRETKSEYILIVRAVDGGVGHNQKTGIATVNITLLDINDNHPTWKDAPYYINLVEMTPPDSDVTTVVAVDPDLGENGTLVYSIQPPNKFYSLNSTTGKIRTTHAMLDRENPDPHEAELMRKIVVSVTDCGRPPLKATSSATVFVNLLDLNDNDPTFQNLPFVAEVLEGIPAGVSIYQVVAIDLDEGLNGLVSYRMPVGMPRMDFLINSSSGVVVTTTELDRERIAEYQLRVVASDAGTPTKSSTSTLTIHVLDVNDETPTFFPAVYNVSVSEDVPREFRVVWLNCTDNDVGLNAELSYFITGAAPASAHLCRPPGALPPPLPDGQPD

SEQ ID NO: 2513 - protein, 1380 aa, Homo sapiens
MGRHVATSCHVAWLLVLISGCWGQVNRLPFFTNHFFDTYLLISEDTPVGSSVTQLLAQDMDNDPLVFGVSGEEASRFFAVEPDTGVVWLRQPLDRETKSEFTVEFSVSDHQGVITRKVNIQVGDVNDNAPTFHNQPYSVRIPENTPVGTPIFIVNATDPDLGAGGSVLYSFQPPSQFFAIDSARGIVTVIRELDYETTQAYQLTVNATDQDKTRPLSTLANLAIIITDVQDMDPIFINLPYSTNIYEHSPPGTTVRIITAIDQDKGRPRGIGYTIVSGNTNSIFALDYISGVLTLNGLLDRENPLYSHGFILTVKGTELNDDRTPSDATVTTTFNILVIDINDNAPEFNSSEYSVAITELAQVGFALPLFIQVVDKDENLGLNSMFEVYLVGNNSHHFIISPTSVQGKADIRIRVAIPLDYETVDRYDFDLFANESVPDHVGYAKVKITLINENDNRPIFSQPLYNISLYENVTVGTSVLTVLATDNDAGTFGEVSYFFSDDPDRFSLDKDTGLIMLIARLDYELIQRFTLTIIARDGGGEETTGRVRINVLDVNDNVPTFQKDAYVGALRENEPSVTQLVRLRATDEDSPPNNQITYSIVSASAFGSYFDISLYEGYGVISVSRPLDYEQISNGLIYLTVMAMDAGNPPLNSTVPVTIEVFDENDNPPTFSKPAYFVSVVENIMAGATVLFLNATDLDRSREYGQESIIYSLEGSTQFRINARSGEITTTSLLDRETKSEYILIVRAVDGGVGHNQKTGIATVNITLLDINDNHPTWKDAPYYINLVEMTPPDSDVTTVVAVDPDLGENGTLVYSIQPPNKFYSLNSTTGKIRTTHAMLDRENPDPHEAELMRKIVVSVTDCGRPPLKATSSATVFVNLLDLNDNDPTFQNLPFVAEVLEGIPAGVSIYQVVAIDLDEGLNGLVSYRMPVGMPRMDFLINSSSGVVVTTTELDRERIAEYQLRVVASDAGTPTKSSTSTLTIHVLDVNDETPTFFPAVYNVSVSEDVPREFRVVWLNCTDNDVGLNAELSYFITGGNVDGKFSVGYRDAVVRTVVGLDRETTAAYMLILEAIDNGPVGKRHTGTATVFVTVLDVNDNRPIFLQSSYEASVPEDIPEGHSILQAATDADEGEFGRVWYRILHGNHGNNFRIHVSNGLLMRGPRPLDRERNSSHVLIVEAYNHDLGPMRSSVRVIVYVEDINDEAPVFTQQQYSRLGLRETAGIGTSVIVVQATDRDSGDGGLVNYRILSGAEGKFEIDESTGLIITVNYLDYETKTSYMMNVSATDQAPPFNQGFCSVYITLLNELDEAVQFSNASYEAAILENLALGTEIVRVQAYSIDNLNQITYRFNAYTSTQAKALFKIDAITVRGWGQGAPFLPI

SEQ ID NO: 2514 - protein, 1211 aa, Homo sapiens
MGRHVATSCHVAWLLVLISGCWGQVNRLPFFTNHFFDTYLLISEDTPVGSSVTQLLAQDMDNDPLVFGVSGEEASRFFAVEPDTGVVWLRQPLDRETKSEFTVEFSVSDHQGVITRKVNIQVGDVNDNAPTFHNQPYSVRIPENTPVGTPIFIVNATDPDLGAGGSVLYSFQPPSQFFAIDSARGIVTVIRELDYETTQAYQLTVNATDQDKTRPLSTLANLAIIITDVQDMDPIFINLPYSTNIYEHSPPGTTVRIITAIDQDKGRPRGIGYTIVSGNTNSIFALDYISGVLTLNGLLDRENPLYSHGFILTVKGTELNDDRTPSDATVTTTFNILVIDINDNAPEFNSSEYSVAITELAQVGFALPLFIQVVDKDENLGLNSMFEVYLVGNNSHHFIISPTSVQGKADIRIRVAIPLDYETVDRYDFDLFANESVPDHVGYAKVKITLINENDNRPIFSQPLYNISLYENVTVGTSVLTVLATDNDAGTFGEVSYFFSDDPDRFSLDKDTGLIMLIARLDYELIQRFTLTIIARDGGGEETTGRVRINVLDVNDNVPTFQKDAYVGALRENEPSVTQLVRLRATDEDSPPNNQITYSIVSASAFGSYFDISLYEGYGVISVSRPLDYEQISNGLIYLTVMAMDAGNPPLNSTVPVTIEVFDENDNPPTFSKPAYFVSVVENIMAGATVLFLNATDLDRSREYGQESIIYSLEGSTQFRINARSGEITTTSLLDRETKSEYILIVRAVDGGVGHNQKTGIATVNITLLDINDNHPTWKDAPYYINLVEMTPPDSDVTTVVAVDPDLGENGTLVYSIQPPNKFYSLNSTTGKIRTTHAMLDRENPDPHEAELMRKIVVSVTDCGRPPLKATSSATVFVNLLDLNDNDPTFQNLPFVAEVLEGIPAGVSIYQVVAIDLDEGLNGLVSYRMPVGMPRMDFLINSSSGVVVTTTELDRERIAEYQLRVVASDAGTPTKSSTSTLTIHVLDVNDETPTFFPAVYNVSVSEDVPREFRVVWLNCTDNDVGLNAELSYFITGGNVDGKFSVGYRDAVVRTVVGLDRETTAAYMLILEAIDNGPVGKRHTGTATVFVTVLDVNDNRPIFLQSSYEASVPEDIPEGHSILQEDLASPCISPAPPRRAFQSSGEKETSQFPGKELRREPGPSKAQNRAAFTEPLAEAPLLGSKQAQEERAPLPREQAQQLQGSEGEKGGP

SEQ ID NO: 2515 - protein, 530 aa, Homo sapiens
MGRHVATSCHVAWLLVLISGCWGQVNRLPFFTNHFFDTYLLISEDTPVGSSVTQLLAQDMDNDPLVFGVSGEEASRFFAVEPDTGVVWLRQPLDRETKSEFTVEFSVSDHQGVITRKVNIQVGDVNDNAPTFHNQPYSVRIPENTPVGTPIFIVNATDPDLGAGGSVLYSFQPPSQFFAIDSARGIVTVIRELDYETTQAYQLTVNATDQDKTRPLSTLANLAIIITDVQDMDPIFINLPYSTNIYEHSPPGTTVRIITAIDQDKGRPRGIGYTIVSGNTNSIFALDYISGVLTLNGLLDRENPLYSHGFILTVKGTELNDDRTPSDATVTTTFNILVIDINDNAPEFNSSEYSVAITELAQVGFALPLFIQVVDKDENLGLNSMFEVYLVGNNSHHFIISPTSVQGKADIRIRVAIPLDYETVDRYDFDLFANESVPDHVGYAKVKITLINENDNRPIFSQPLYNISLYENVTVGTSVLTVLVSPRFTAGPLSSPGPTVVRHPEGFCPRDLSNQGRRHPQIPELCLLVY

SEQ ID NO: 2516 - protein, 3354 aa, Homo sapiens
MGRHVATSCHVAWLLVLISGCWGQVNRLPFFTNHFFDTYLLISEDTPVGSSVTQLLAQDMDNDPLVFGVSGEEASRFFAVEPDTGVVWLRQPLDRETKSEFTVEFSVSDHQGVITRKVNIQVGDVNDNAPTFHNQPYSVRIPENTPVGTPIFIVNATDPDLGAGGSVLYSFQPPSQFFAIDSARGIVTVIRELDYETTQAYQLTVNATDQDKTRPLSTLANLAIIITDVQDMDPIFINLPYSTNIYEHSPPGTTVRIITAIDQDKGRPRGIGYTIVSGNTNSIFALDYISGVLTLNGLLDRENPLYSHGFILTVKGTELNDDRTPSDATVTTTFNILVIDINDNAPEFNSSEYSVAITELAQVGFALPLFIQVVDKDETQGLNSMFEVYLVGNNSHHFIISPTSVQGKADIRIRVAIPLDYETVDRYDFDLFANESVPDHVGYAKVKITLINENDNRPIFSQPLYNISLYENVTVGTSVLTVLATDNDAGTFGEVSYFFSDDPDRFSLDKDTGLIMLIARLDYELIQRFTLTIIARDGGGEETTGRVRINVLDVNDNVPTFQKDAYVGALRENEPSVTQLVRLRATDEDSPPNNQITYSIVSASAFGSYFDISLYEGYGVISVSRPLDYEQISNGLIYLTVMAMDAGNPPLNSTVPVTIEVFDENDNPPTFSKPAYFVSVVENIMAGATVLFLNATDLDRSREYGQESIIYSLEGSTQFRINARSGEITTTSLLDRETKSEYILIVRAVDGGVGHNQKTGIATVNITLLDINDNHPTWKDAPYYINLVEMTPPDSDVTTVVAVDPDLGENGTLVYSIQPPNKFYSLNSTTGKIRTTHAMLDRENPDPHEAELMRKIVVSVTDCGRPPLKATSSATVFVNLLDLNDNDPTFQNLPFVAEVLEGIPAGVSIYQVVAIDLDEGLNGLVSYRMPVGMPRMDFLINSSSGVVVTTTELDRERIAEYQLRVVASDAGTPTKSSTSTLTIHVLDVNDETPTFFPAVYNVSVSEDVPREFRVVWLNCTDNDVGLNAELSYFITGGNVDGKFSVGYRDAVVRTVVGLDRETTAAYMLILEAIDNGPVGKRHTGTATVFVTVLDVNDNRPIFLQSSYEASVPEDIPEGHSILQLKATDADEGEFGRVWYRILHGNHGNNFRIHVSNGLLMRGPRPLDRERNSSHVLIVEAYNHDLGPMRSSVRVIVYVEDINDEAPVFTQQQYSRLGLRETAGIGTSVIVVQATDRDSGDGGLVNYRILSGAEGKFEIDESTGLIITVNYLDYETKTSYMMNVSATDQAPPFNQGFCSVYITLLNELDEAVQFSNASYEAAILENLALGTEIVRVQAYSIDNLNQITYRFNAYTSTQAKALFKIDAITGVITVQGLVDREKGDFYTLTVVADDGGPKVDSTVQVYITVLDENDNSPRFDFTSDSAVSIPEDCPVGQRVATVKAWDPDAGSNGQVVFSLASGNIAGAFEIVTTNDSIGEVFVARPLDREELDHYILQVVASDRGTPPRKKDHILQVTILDINDNPPVIESPFGYNVSVNENVGGGTAVVQVRATDRDIGINSVLSYYITEGNKDMAFRMDRISGEIATRPAPPDRERQSFYHLVATVEDEGTPTLSATTHVYVTIVDENDNAPMFQQPHYEVLLDEGPDTLNTSLITIQALDLDEGPNGTVTYAIVAGNIVNTFRIDRHMGVITAAKELDYEISHGRYTLIVTATDQCPILSHRLTSTTTVLVNVNDINDNVPTFPRDYEGPFEVTEGQPGPRVWTFLAHDRDSGPNGQVEYSIMDGDPLGEFVISPVEGVLRVRKDVELDRETIAFYNLTICARDRGMPPLSSTMLVGIRVLDINDNDPVLLNLPMNITISENSPVSSFVAHVLASDADSGCNARLTFNITAGNRERAFFINATTGIVTVNRPLDRERIPEYKLTISVKDNPENPRIARRDYDLLLIFLSDENDNHPLFTKSTYQAEVMENSPAGTPLTVLNGPILALDADQDIYAVVTYQLLGAQSGLFDINSSTGVVTVRSGVIIDREAFSPPILELLLLAEDIGLLNSTAHLLITILDDNDNRPTFSPATLTVHLLENCPPGFSVLQVTATDEDSGLNGELVYRIEAGAQDRFLIHLVTGVIRVGNATIDREEQESYRLTVVATDRGTVPLSGTAIVTILIDDINDSRPEFLNPIQTVSVLESAEPGTVIANITAIDHDLNPKLEYHIVGIVAKDDTDRLVPNQEDAFAVNINTGSVMVKSPMNRELVATYEVTLSVIDNASDLPERSVSVPNAKLTVNVLDVNDNTPQFKPFGITYYMERILEGATPGTTLIAVAAVDPDKGLNGLVTYTLLDLVPPGYVQLEDSSAGKVIANRTVDYEEVHWLNFTVRASDNGSPPRAAEIPVYLEIVDINDNNPIFDQPSYQEAVFEDVPVGTIILTVTATDADSGNFALIEYSLGDGESKFAINPTTGDIYVLSSLDREKKDHYILTALAKDNPGDVASNRRENSVQVVIQVLDVNDCRPQFSKPQFSTSVYENEPAGTSVITMMATDQDEGPNGELTYSLEGPGVEAFHVDMDSGLVTTQRPLQSYEKFSLTVVATDGGEPPLWGTTMLLVEVIDVNDNRPVFVRPPNGTILHIREEIPLRSNVYEVYATDKDEGLNGAVRYSFLKTAGNRDWEFFIIDPISGLIQTAQRLDRESQAVYSLILVASDLGQPVPYETMQPLQVALEDIDDNEPLFVRPPKGSPQYQLLTVPEHSPRGTLVGNVTGAVDADEGPNAIVYYFIAAGNEEKNFHLQPDGCLLVLRDLDREREAIFSFIVKASSNRSWTPPRGPSPTLDLVADLTLQEVRVVLEDINDQPPRFTKAEYTAGVATDAKVGSELIQVLALDADIGNNSLVFYSILAIHYFRALANDSEDVGQVFTMGSMDGILRTFDLFMAYSPGYFVVDIVARDLAGHNDTAIIGIYILRDDQRVKIVINEIPDRVRGFEEEFIHLLSNITGAIVNTDNVQFHVDKKGRVNFAQTELLIHVVNRDTNRILDVDRVIQMIDENKEQLRNLFRNYNVLDVQPAISVRLPDDMSALQMAIIVLAILLFLAAMLFVLMNWYYRTVHKRKLKAIVAGSAGNRGFIDIMDMPNTNKYSFDGANPVWLDPFCRNLELAAQAEHEDDLPENLSEIADLWNSPTRTHGTFGREPAAVKPDDDRYLRAAIQEYDNIAKLGQIIREGPIKGSLLKVVLEDYLRLKKLFAQRMVQKASSCHSSISELIQTELDEEPGDHSPGQGSLRFRHKPPVELKGPDGIHVVHGSTGTLLATDLNSLPEEDQKGLGRSLETLTAAEATAFERNARTESAKSTPLHKLRDVIMETPLEITEL

SEQ ID NO: 2517 - protein, 1381 aa, Homo sapiens
MGRHVATSCHVAWLLVLISGCWGQVNRLPFFTNHFFDTYLLISEDTPVGSSVTQLLAQDMDNDPLVFGVSGEEASRFFAVEPDTGVVWLRQPLDRETKSEFTVEFSVSDHQGVITRKVNIQVGDVNDNAPTFHNQPYSVRIPENTPVGTPIFIVNATDPDLGAGGSVLYSFQPPSQFFAIDSARGIVTVIRELDYETTQAYQLTVNATDQDKTRPLSTLANLAIIITDVQDMDPIFINLPYSTNIYEHSPPGTTVRIITAIDQDKGRPRGIGYTIVSGNTNSIFALDYISGVLTLNGLLDRENPLYSHGFILTVKGTELNDDRTPSDATVTTTFNILVIDINDNAPEFNSSEYSVAITELAQVGFALPLFIQVVDKDENLGLNSMFEVYLVGNNSHHFIISPTSVQGKADIRIRVAIPLDYETVDRYDFDLFANESVPDHVGYAKVKITLINENDNRPIFSQPLYNISLYENVTVGTSVLTVLATDNDAGTFGEVSYFFSDDPDRFSLDKDTGLIMLIARLDYELIQRFTLTIIARDGGGEETTGRVRINVLDVNDNVPTFQKDAYVGALRENEPSVTQLVRLRATDEDSPPNNQITYSIVSASAFGSYFDISLYEGYGVISVSRPLDYEQISNGLIYLTVMAMDAGNPPLNSTVPVTIEVFDENDNPPTFSKPAYFVSVVENIMAGATVLFLNATDLDRSREYGQESIIYSLEGSTQFRINARSGEITTTSLLDRETKSEYILIVRAVDGGVGHNQKTGIATVNITLLDINDNHPTWKDAPYYINLVEMTPPDSDVTTVVAVDPDLGENGTLVYSIQPPNKFYSLNSTTGKIRTTHAMLDRENPDPHEAELMRKIVVSVTDCGRPPLKATSSATVFVNLLDLNDNDPTFQNLPFVAEVLEGIPAGVSIYQVVAIDLDEGLNGLVSYRMPVGMPRMDFLINSSSGVVVTTTELDRERIAEYQLRVVASDAGTPTKSSTSTLTIHVLDVNDETPTFFPAVYNVSVSEDVPREFRVVWLNCTDNDVGLNAELSYFITGGNVDGKFSVGYRDAVVRTVVGLDRETTAAYMLILEAIDNGPVGKRHTGTATVFVTVLDVNDNRPIFLQSSYEASVPEDIPEGHSILQLKATDADEGEFGRVWYRILHGNHGNNFRIHVSNGLLMRGPRPLDRERNSSHVLIVEAYNHDLGPMRSSVRVIVYVEDINDEAPVFTQQQYSRLGLRETAGIGTSVIVVQATDRDSGDGGLVNYRILSGAEGKFEIDESTGLIITVNYLDYETKTSYMMNVSATDQAPPFNQGFCSVYITLLNELDEAVQFSNASYEAAILENLALGTEIVRVQAYSIDNLNQITYRFNAYTSTQAKALFKIDAITVRGWGQGAPFLPI

SEQ ID NO: 2518 - protein, 115 aa, Homo sapiens
MSLRAGGKTRRWPGPEQAARGGRSGGEQSPRRGEARRRCTHAHGSSVTQLLAQDMDNDPLVFGVSGEEASRFFAVEPDTGVVWLRQPLDRETKSEFTVEFSVSDHQGVITRKVNI

SEQ ID NO: 2519 - protein, 1114 aa, Homo sapiens
MVKSPMNRELVATYEVTLSVIDNASDLPERSVSVPNAKLTVNVLDVNDNTPQFKPFGITYYMERILEGATPGTTLIAVAAVDPDKGLNGLVTYTLLDLVPPGYVQLEDSSAGKVIANRTVDYEEVHWLNFTVRASDNGSPPRAAEIPVYLEIVDINDNNPIFDQPSYQEAVFEDVPVGTIILTVTATDADSGNFALIEYSLGDGESKFAINPTTGDIYVLSSLDREKKDHYILTALAKDNPGDVASNRRENSVQVVIQVLDVNDCRPQFSKPQFSTSVYENEPAGTSVITMMATDQDEGPNGELTYSLEGPGVEAFHVDMDSGLVTTQRPLQSYEKFSLTVVATDGGEPPLWGTTMLLVEVIDVNDNRPVFVRPPNGTILHIREEIPLRSNVYEVYATDKDEGLNGAVRYSFLKTAGNRDWEFFIIDPISGLIQTAQRLDRESQAVYSLILVASDLGQPVPYETMQPLQVALEDIDDNEPLFVRPPKGSPQYQLLTVPEHSPRGTLVGNVTGAVDADEGPNAIVYYFIAAGNEEKNFHLQPDGCLLVLRDLDREREAIFSFIVKASSNRSWTPPRGPSPTLDLVADLTLQEVRVVLEDINDQPPRFTKAEYTAGVATDAKVGSELIQVLALDADIGNNSLVFYSILAIHYFRALANDSEDVGQVFTMGSMDGILRTFDLFMAYSPGYFVVDIVARDLAGHNDTAIIGIYILRDDQRVKIVINEIPDRVRGFEEEFIHLLSNITGAIVNTDNVQFHVDKKGRVNFAQTELLIHVVNRDTNRILDVDRVIQMIDENKEQLRNLFRNYNVLDVQPAISVRLPDDMSALQMAIIVLAILLFLAAMLFVLMNWYYRTVHKRKLKAIVAGSAGNRGFIDIMDMPNTNKYSFDGANPVWLDPFCRNLELAAQAEHEDDLPENLSEIADLWNSPTRTHGTFGREPAAVKPDDDRYLRAAIQEYDNIAKLGQIIREGPIKGSLLKVVLEDYLRLKKLFAQRMVQKASSCHSSISELIQTELDEEPGDHSPGQGSLRFRHKPPVELKGPDGIHVVHGSTGTLLATDLNSLPEEDQKGLGRSLETLTAAEATAFERNARTESAKSTPLHKLRDVIMETPLEITEL

SEQ ID NO: 2520 - protein, 1079 aa, Homo sapiens
MVKSPMNRELVATYEVTLSVIDNASDLPERSVSVPNAKLTVNVLDVNDNTPQFKPFGITYYMERILEGATPGTTLIAVAAVDPDKGLNGLVTYTLLDLVPPGYVQLEDSSAGKVIANRTVDYEEVHWLNFTVRASDNGSPPRAAEIPVYLEIVDINDNNPIFDQPSYQEAVFEDVPVGTIILTVTATDADSGNFALIEYSLGDGESKFAINPTTGDIYVLSSLDREKKDHYILTALAKDNPGDVASNRRENSVQVVIQVLDVNDCRPQFSKPQFSTSVYENEPAGTSVITMMATDQDEGPNGELTYSLEGPGVEAFHVDMDSGLVTTQRPLQSYEKFSLTVVATDGGEPPLWGTTMLLVEVIDVNDNRPVFVRPPNGTILHIREEIPLRSNVYEVYATDKDEGLNGAVRYSFLKTAGNRDWEFFIIDPISGLIQTAQRLDRESQAVYSLILVASDLGQPVPYETMQPLQVALEDIDDNEPLFVRPPKGSPQYQLLTVPEHSPRGTLVGNVTGAVDADEGPNAIVYYFIAAGNEEKNFHLQPDGCLLVLRDLDREREAIFSFIVKASSNRSWTPPRGPSPTLDLVADLTLQEVRVVLEDINDQPPRFTKAEYTAGVATDAKVGSELIQVLALDADIGNNSLVFYSILAIHYFRALANDSEDVGQVFTMGSMDGILRTFDLFMAYSPGYFVVDIVARDLAGHNDTAIIGIYILRDDQRVKIVINEIPDRVRGFEEEFIHLLSNITGAIVNTDNVQFHVDKKGRVNFAQTELLIHVVNRDTNRILDVDRVIQMIDENKEQLRNLFRNYNVLDVQPAISVRLPDDMSALQMAIIVLAILLFLAAMLFVLMNWYYRTVHKRKLKAIVAGSAGNRGFIDIMDMPNTNKYSFDGANPVWLDPFCRNLELAAQAEHEDDLPENLSEIADLWNSPTRTHGTFGREPAAVKPDDDRYLRAAIQEYDNIAKLGQIIREGPIKLIQTELDEEPGDHSPGQGSLRFRHKPPVELKGPDGIHVVHGSTGTLLATDLNSLPEEDQKGLGRSLETLTAAEATAFERNARTESAKSTPLHKLRDVIMETPLEITEL

SEQ ID NO: 2521 - protein, 6 aa, Homo sapiens
PCCTLN

SEQ ID NO: 2522 - protein, 29 aa, Homo sapiens
TGKGHGADTCTSWKAQRNDRRINMAVTKH

SEQ ID NO: 2523 - protein, 396 aa, Homo sapiens
VITRKVNIQVGDVNDNAPTFHNQPYSVRIPENTPVGTPIFIVNATDPDLGAGGSVLYSFQPPSQFFAIDSARGIVTVIRELDYETTQAYQLTVNATDQDKTRPLSTLANLAIIITDVQDMDPIFINLPYSTNIYEHSPPGTTVRIITAIDQDKGRPRGIGYTIVSGNTNSIFALDYISGVLTLNGLLDRENPLYSHGFILTVKGTELNDDRTPSDATVTTTFNILVIDINDNAPEFNSSEYSVAITELAQVGFALPLFIQVVDKDENLGLNSMFEVYLVGNNSHHFIISPTSVQGKADIRIRVAIPLDYETVDRYDFDLFANESVPDHVGYAKVKITLINENDNRPIFSQPLYNISLYENVTVGTSVLTVLWEKFFCSNSSRFSSAQLVVSSWNQL

SEQ ID NO: 2524 - protein, 1035 aa, Homo sapiens
  VARIANT 1: note = misc_feature - Xaa can be any naturally occurring amino acid
XDKTRPLSTLANLAIIITDVQDMDPIFINLPYSTNIYEHSPPGTTVRIITAIDQDKGRPRGIGYTIVSGNTNSIFALDYISGVLTLNGLLDRENPLYSHGFILTVKGTELNDDRTPSDATVTTTFNILVIDINDNAPEFNSSEYSVAITELAQVGFALPLFIQVVDKDEENGGWLQGRPEGVGEGLHVQNLGLNSMFEVYLVGNNSHHFIISPTSVQGKADIRIRVAIPLDYETVDRYDFDLFANESVPDHVGYAKVKITLINENDNRPIFSQPLYNISLYENVTVGTSVLTVLATDNDAGTFGEVSYFFSDDPDRFSLDKDTGLIMLIARLDYELIQRFTLTIIARDGGGEETTGRVRINVLDVNDNVPTFQKDAYVGALRENEPSVTQLVRLRATDEDSPPNNQITYSIVSASAFGSYFDISLYEGYGVISVSRPLDYEQISNGLIYLTVMAMDAGNPPLNSTVPVTIEVFDENDNPPTFSKPAYFVSVVENIMAGATVLFLNATDLDRSREYGQESIIYSLEGSTQFRINARSGEITTTSLLDRETKSEYILIVRAVDGGVGHNQKTGIATVNITLLDINDNHPTWKDAPYYINLVEMTPPDSDVTTVVAVDPDLGENGTLVYSIQPPNKFYSLNSTTGKIRTTHAMLDRENPDPHEAELMRKIVVSVTDCGRPPLKATSSATVFVNLLDLNDNDPTFQNLPFVAEVLEGIPAGVSIYQVVAIDLDEGLNGLVSYRMPVGMPRMDFLINSSSGVVVTTTELDRERIAEYQLRVVASDAGTPTKSSTSTLTIHVLDVNDETPTFFPAVYNVSVSEDVPREFRVVWLNCTDNDVGLNAELSYFITGGNVDGKFSVGYRDAVVRTVVGLDRETTAAYMLILEAIDNGPVGKRHTGTATVFVTVLDVNDNRPIFLQSSYEASVPEDIPEGHSILQHPPWPLKGASSIIFNPFLIDPNVGALKRGHQDGCQDHAWRALFAPPPSWHPGICSTRREAAAPTGHQADAGSTRETQGREPRGFAPALGQHRCQDSVLAPV

SEQ ID NO: 2525 - protein, 165 aa, Homo sapiens
  VARIANT 1: note = misc_feature - Xaa can be any naturally occurring amino acid
XDNAPEFNSSEYSVAITELAQVGFALPLFIQVVDKDEGLNSMFEVYLVGNNSHHFIISPTSVQGKADIRIRVAIPLDYETVDRYDFDLFANESVPDHVGYAKVKITLINENDNRPIFSQPLYNISLYENVTVGTSVLTVLWEKFFCSNSSRFSSAQLVVSSWNQL

SEQ ID NO: 2526 - protein, 223 aa, Homo sapiens
MPSRTGTSTLTVAVCKCNEQGEFTFCEDMAAQVGVSIQAVVAILLCILTITVITLLIFLRRRLRKQARAHGKSVPEIHEQLVTYDEEGGGEMDTTSYDVSVLNSVRRGGAKPPRPALDARPSLYAQVQKPPRHAPGAHGGPGEMAAMIEVKKDEADHDGDGPPYDTLHIYGYEGSESIAESLSSLGTDSSDSDVDYDFLNDWGPRFKMLAELYGSDPREELLY

SEQ ID NO: 2527 - protein, 17 aa, Homo sapiens
MQRLMMLLATSGACLGL

SEQ ID NO: 2528 - protein, 76 aa, Homo sapiens
MQRLMMLLATSGACLGLLAVAAVAAAGANPAQRDTHSLLPTHRRQKRDWIWNQMHIDEEKNTSLPHHVGKIKSSVS

SEQ ID NO: 2529 - protein, 131 aa, Homo sapiens
MQRLMMLLATSGACLGLLAVAAVAAAGANPAQRDTHSLLPTHRRQKRDWIWNQMHIDEEKNTSLPHHVGKIKSSVSRKNAKYLLKGEYVGKVFRVDAETGDVFAIERLDRENISEYHLTAVIVDKDTGENL

SEQ ID NO: 2530 - protein, 784 aa, Homo sapiens
MQRLMMLLATSGACLGLLAVAAVAAAGANPAQRDTHSLLPTHRRQKRDWIWNQMHIDEEKNTSLPHHVGKIKSSVSRKNAKYLLKGEYVGKVFRVDAETGDVFAIERLDRENISEYHLTAVIVDKDTGENLETPSSFTIKVHDVNDNWPVFTHRLFNASVPESSAVGTSVISVTAVDADDPTVGDHASVMYQILKGKEYFAIDNSGRIITITKSLDREKQARYEIVVEARDAQGLRGDSGTATVLVTLQDINDNFPFFTQTKYTFVVPEDTRVGTSVGSLFVEDPDEPQNRMTKYSILRGDYQDAFTIETNPAHNEGIIKPMKPLDYEYIQQYSFIVEATDPTIDLRYMSPPAGNRAQVIINITDVDEPPIFQQPFYHFQLKENQKKPLIGTVLAMDPDAARHSIGYSIRRTSDKGQFFRVTKKGDIYNEKELDREVYPWYNLTVEAKELDSTGTPTGKESIVQVHIEVLDENDNAPEFAKPYQPKVCENAVHGQLVLQISAIDKDITPRNVKFKFILNTENNFTLTDNHDNTANITVKYGQFDREHTKVHFLPVVISDNGMPSRTGTSTLTVAVCKCNEQGEFTFCEDMAAQVGVSIQAVVAILLCILTITVITLLIFLRRRLRKQARAHGKSVPEIHEQLVTYDEEGGGEMDTTSYDVSVLNSVRRGGAKPPRPALDARPSLYAQVQKPPRHAPGAHGGPGEMAAMIEVKKDEADHDGDGPPYDTLHIYGYEGSESIAESLSSLGTDSSDSDVDYDFLNDWGPRFKMLAELYGSDPREELLY

SEQ ID NO: 2531 - protein, 406 aa, Homo sapiens
MQRLMMLLATSGACLGLLAVAAVAAAGANPAQRDTHSLLPTHRRQKRDWIWNQMHIDEEKNTSLPHHVGKIKSSVSRKNAKYLLKGEYVGKVFRVDAETGDVFAIERLDRENISEYHLTAVIVDKDTGENLETPSSFTIKVHDVNDNWPVFTHRLFNASVPESSAVGTSVISVTAVDADDPTVGDHASVMYQILKGKEYFAIDNSGRIITITKSLDREKQARYEIVVEARDAQGLRGDSGTATVLVTLQDINDNFPFFTQTKYTFVVPEDTRVGTSVGSLFVEDPDEPQNRMTKYSILRGDYQDAFTIETNPAHNEGIIKPMKPLDYEYIQQYSFIVEATDPTIDLRYMSPPAGNRAQVIINITDVDEPPIFQQPFYHFQLKENQKKPLIGTVLAMDPDAARHSIG

SEQ ID NO: 2532 - protein, 669 aa, Homo sapiens
MQRLMMLLATSGACLGLLAVAAVAAAGANPAQRDTHSLLPTHRRQKRDWIWNQMHIDEEKNTSLPHHVGKIKSSVSRKNAKYLLKGEYVGKVFRVDAETGDVFAIERLDRENISEYHLTAVIVDKDTGENLETPSSFTIKVHDVNDNWPVFTHRLFNASVPESSAVGTSVISVTAVDADDPTVGDHASVMYQILKGKEYFAIDNSGRIITITKSLDREKQARYEIVVEARDAQGLRGDSGTATVLVTLQDINDNFPFFTQTKYTFVVPEDTRVGTSVGSLFVEDPDEPQNRMTKYSILRGDYQDAFTIETNPAHNEGIIKPMKPLDYEYIQQYSFIVEATDPTIDLRYMSPPAGNRAQVIINITDVDEPPIFQQPFYHFQLVLQISAIDKDITPRNVKFKFILNTENNFTLTDNHDNTANITVKYGQFDREHTKVHFLPVVISDNGMPSRTGTSTLTVAVCKCNEQGEFTFCEDMAAQVGVSIQAVVAILLCILTITVITLLIFLRRRLRKQARAHGKSVPEIHEQLVTYDEEGGGEMDTTSYDVSVLNSVRRGGAKPPRPALDARPSLYAQVQKPPRHAPGAHGGPGEMAAMIEVKKDEADHDGDGPPYDTLHIYGYEGSESIAESLSSLGTDSSDSDVDYDFLNDWGPRFKMLAELYGSDPREELLY

SEQ ID NO: 2533 - protein, 110 aa, Homo sapiens
MQRLMMLLATSGACLGLLAVAAVAAAGANPAQRDTHSLLPTHRRQKRDWIWNQMHIDEEKNTSLPHHVGKIKSSVSRKNAKYLLKGEYVGKVFRVDAETGDVTQMSPRTG

SEQ ID NO: 2534 - protein, 745 aa, Homo sapiens
MRRCRWAALALGLLRLCLAQANFAPHFFDNGVGSTNGNMALFSLPEDTPVGSHVYTLNGTDPEGDPISYHISFDPSTRSVFSVDPTFGNITLVEELDREREDEIEAIISISDGLNLVAEKVVILVTDANDEAPRFIQEPYVALVPEDIPAGSIIFKVHAVDRDTGSGGSVTYFLQNLHSPFAVDRHSGVLRLQAGATLDYERSRTHYITVVAKDGGGRLHGADVVFSATTTVTVNVEDVQDMAPVFVGTPYYGYVYEDTLPGSEVLKVVAMDGDRGKPNRILYSLVNGNDGAFEINETSGAISITQSPAQLQREVYELHVQVTEMSPAGSPAAQATVPVTIRIVDLNNHPPTFYGESGPQNRFELSMNEHPPQGEILRGLKITVNDSDQGANAKFNLQLVGPRGIFRVVPQTVLNEAQVTIIVENSAAIDFEKSKVLTFKLLAVEVNTPEKFSSTADVVIQLLDTNDNVPKFDSLYYVARIPENAPGGSSVVAVTAVDPDTGPWGEVKYSTYGTGADLFLIHPSTGLIYTQPWASLDAEATARYNFYVKAEDMEGKYSVAEVFITLLDVNDHPPQFGKSVQKKTMVLGTPVKIEAIDEDAEEPNNLVDYSITHAEPANVFDINSHTGEIWLKNSIRSLDALHNITPGRDCLWSLEVQAKDRGSPSFSTTALLKIDITDAEVRRLRYMKNSNFPGTTKSVRKPKFKPKKPHSSQGLFLHPHCEIALFNLSNVNLYSRVFQGAAQAS

SEQ ID NO: 2535 - protein, 859 aa, Homo sapiens
MRRCRWAALALGLLRLCLAQANFAPHFFDNGVGSTNGNMALFSLPEDTPVGSHVYTLNGTDPEGDPISYHISFDPSTRSVFSVDPTFGNITLVEELDREREDEIEAIISISDGLNLVAEKVVILVTDANDEAPRFIQEPYVALVPEDIPAGSIIFKVHAVDRDTGSGGSVTYFLQNLHSPFAVDRHSGVLRLQAGATLDYERSRTHYITVVAKDGGGRLHGADVVFSATTTVTVNVEDVQDMAPVFVGTPYYGYVYEDTLPGSEVLKVVAMDGDRGKPNRILYSLVNGNDGAFEINETSGAISITQSPAQLQREVYELHVQVTEMSPAGSPAAQATVPVTIRIVDLNNHPPTFYGESGPQNRFELSMNEHPPQGEILRGLKITVNDSDQGANAKFNLQLVGPRGIFRVVPQTVLNEAQVTIIVENSAAIDFEKSKVLTFKLLAVEVNTPEKFSSTADVVIQLLDTNDNVPKFDSLYYVARIPENAPGGSSVVAVTAVDPDTGPWGEVKYSTYGTGADLFLIHPSTGLIYTQPWASLDAEATARYNFYVKAEDMEGKYSVAEVFITLLDVNDHPPQFGKSVQKKTMVLGTPVKIEAIDEDAEEPNNLVDYSITHAEPANVFDINSHTGEIWLKNSIRSLDALHNITPGRDCLWSLEVQAKDRGSPSFSTTALLKIDITDAETLSRSPMAAFLIQTKDNPMKAVGVLAGTMATVVAITVLISTATFWRNKKSNKVLPMRRVLRKRPSPAPRTIRIEWLKSKSTKAATKFMLKEKPPNENCNNNSPESSLLPRAPALPPPPSVAPSTGAAQWTVPTVSGSLTPQPTQPPPKPKTMGSPVQSTLISELKQKFEKKSVHNKAYF

SEQ ID NO: 2536 - protein, 135 aa, Homo sapiens
  VARIANT 1: note = misc_feature - Xaa can be any naturally occurring amino acid
XENSAAIDFEKSKVLTFKLLAVEVNTPEKFSSTADVVIQLLDTNDNVPKFDSLYYVARIPENAPGGSSVVAVTAVDPDTGPWGEVKYSTYGTGADLFLIHPSTGLIYTQPWASLDAEATARYNFYVKAEDMEGKP

SEQ ID NO: 2537 - protein, 78 aa, Homo sapiens
  VARIANT 1: note = misc_feature - Xaa can be any naturally occurring amino acid
XITHAEPANVFDINSHTGEIWLKNSIRSLDALHNITPGRDCLWSLEVQAKDRGSPSFSTTALLKIDITDAEVRRLRSN

SEQ ID NO: 2538 - protein, 598 aa, Homo sapiens
  VARIANT 1: note = misc_feature - Xaa can be any naturally occurring amino acid
XITVVAKDGGGRLHGADVVFSATTTVTVNVEDVQDMAPVFVGTPYYGYVYEDTLPGSEVLKVVAMDGDRGKPNRILYSLVNGNDGAFEINETSGAISITQSPAQLQREVYELHVQVTEMSPAGSPAAQATVPVTIRIVDLNNHPPTFYGESGPQNRFELSMNEHPPQGEILRGLKITVNDSDQGANAKFNLQLVGPRGIFRVVPQTVLNEAQVTIIVENSAAIDFEKSKVLTFKAVDPDTGPWGEVKYSTYGTGADLFLIHPSTGLIYTQPWASLDAEATARYNFYVKAEDMEGKYSVAEVFITLLDVNDHPPQFGKSVQKKTMVLGTPVKIEAIDEDAEEPNNLVDYSITHAEPANVFDINSHTGEIWLKNSIRSLDALHNITPGRDCLWSLEVQAKDRGSPSFSTTALLKIDITDAETLSRSPMAAFLIQTKDNPMKAVGVLAGTMATVVAITVLISTATFWRNKKSNKVLPMRRVLRKRPSPAPRTIRIEWLKSKSTKAATKFMLKEKPPNENCNNNSPESSLLPRAPALPPPPSVAPSTGAAQWTVPTVSGSLTPQPTQPPPKPKTMGSPVQSTLISELKQKFEKKSVHNKAYF

SEQ ID NO: 2539 - protein, 48 aa, Homo sapiens
  VARIANT 1: note = misc_feature - Xaa can be any naturally occurring amino acid
XMDGDRGKPNRILYSLVNDFPRQCRTILWHDSPAPPCGPVQNFRVHLP

SEQ ID NO: 2540 - protein, 788 aa, Homo sapiens
MVLLRLLVFLFAPVVSDLCSLPCFINVSESQGPGTVLQFLSFNCSSYTPTPTLELLNVQPPTTFFNPPSLARWQGTYVGKLTLSSSAQLDALMVNHYKVQLKFTCGNHVMEGSLSVDVQRDLSHIQCAGQFASPAGEMIQVPETVTPGARLYTLLLPGLELHGAQMSIISAQDLPHFPGPFSINEQGWLQAPSQGLLGQAQKVFQLQISVSFGQRQSCQGMVIVKVLPVPSSQVSFLEQAQNITIPENLAPGSEVVQVQARGVDLRYEILSPVPSPLFSIGRADGVVRTTTPLELARTSGTAVSRLQVKAFEQGQLWASAKLNLTMNVQLVNLWPPRCLPALLVSQIPETAPVGTVLNTLTCEDPDSVGATLDYKLWFRSSSNPASLCLYDRVLEVNATLDCDTPGACFQHAASILVLDGGQPQMTTEVPVLVMVTPINEFSPACAPRTFRVQEDAAPHTLLGSVVGTDMDYPHDNIEYYTSGGPTTFAVDRLSGEVHLLGPLDYEQQRLYRLTVLVIDHGQDQNPNHHLSGSCTITIEVEDVNDHAPECEPPFQELTIYAPLGRSVEVTKMSCQIPQEPQRLIYSYSIVGGNSQNRFILQGAILVHSDLVLGPFWPEQPRTYELLICVADAGPSTPHLSTTATIIVHLVPRRASTVATSTHRTTVPSTMTPMLVTDTEAFWQPQPWFVVVLTATGALLLLALGWLLGRLLQGLAQLLQAPSKPAQALLLNSIQGTEGSIEGFLEAPKMEMSQAPSSVMSLHFDGRAQDSRTGRDYLFNTHTGARRWL

SEQ ID NO: 2541 - protein, 184 aa, Homo sapiens
MVLLRLLVFLFAPVVSDLCSLPCFINVSESQGPGTVLQFLSFNCSSYTPTPTLELLNVQPPTTFFNPPSLARWQGTYVGKLTLSSSAQLDALMVNHYKVQLKFTCGNHVMEGSLSVDVQRDLSHIQCAGQFASPAGEMIQVPETVTPGARLYTLLLPGLELHGAQVSPEHGTVGDRMGVGGWRE

SEQ ID NO: 2542 - protein, 199 aa, Homo sapiens
MVLLRLLVFLFAPVVSDLCSLPCFINVSESQGPGTVLQFLSFNCSSYTPTPTLELLNVQPPTTFFNPPSLARWQGTYVGKLTLSSSAQLDALMVNHYKVQLKFTCGNHVMEGSLSVDVQRDLSHIQCAGQFASPGEARGSRQGGGRHGLSRSSLTSTLASWGNDSGARDSHTWGSAVHSAPPRPRTPRSAGKPRTWDGG

SEQ ID NO: 2543 - protein, 134 aa, Homo sapiens
QELTIYAPLGRSVEVTKMSCQIPQEPQRLIYSYSIVGGNSQNRFILQGAILVHSDLVLGPFWPEQPRTYELLICVADAGPSTPHLSTTATIIVHLVPRRASTVATSTHRTTVGPAAASTQQTSPGFAAKQHPGN

SEQ ID NO: 2544 - protein, 151 aa, Homo sapiens
  VARIANT 1: note = misc_feature - Xaa can be any naturally occurring amino acid
XSTTATIIVHLVPRRASTVATSTHRTTVPSTMTPMLVTDTEAFWQPQPWFVVVLTATGALLLLALGWLLGRLLQGLAQLLQAPSKPAQALLLNSIQGTEGSIEGFLEAPKMEMSQAPSSVMSLQHFDGRAQDSRTGRDYLFNTHTGARRWL

SEQ ID NO: 2545 - protein, 190 aa, Homo sapiens
MGSWALLWPPLLFTGLLVRPPGTMAQAQYCSVNKDIFEVEENTNVTEPLVDIHVPEGQEVTLGALSTPFAFRIQGNQLFLNVTPDYEEKSLLEAQLLCQSGGTLDTKVNSTVIPETQLQAEDRDKDDILFYTLQEMTAGASDYFSLVSVNRPALRLDRPLDFYERPNMTFWLLVRPSVAGHSGGECGTQP

SEQ ID NO: 2546 - protein, 166 aa, Homo sapiens [sequence omitted]

SEQ ID NO: 2547 - protein, 651 aa, Homo sapiens
MGSWALLWPPLLFTGLLVRPPGTMAQAQYCSVNKDIFEVEENTNVTEPLVDIHVPEGQEVTLGALSTPFAFRIQGNQLFLNVTPDYEEKSLLEAQLLCQSGGTLVTQLRVFVSVLDVNDNAPEFPFKTKEIRVEEDTKVNSTVIPETQLQAEDRDKDDILFYTLQEMTAGASDYFSLVSVNRPALRLDRPLDFYERPNMTFWLLVRDTPGENVEPSHTATATLVLNVVPADLRPPWFLPCTFSDGYVCIQAQYHGAVPTGHILPSPLVLRPGPIYAEDGDRGINQPIIYSIFRGNVNGTFIIHPDSGNLTVARSVPSPMTFLLLVKGQQADLARYSVTQVTVEAVAAAGSPPRFPQRLYRGTVARGAGAGVVVKDAAAPSQPLRIQAQDPEFSDLNSAITYRITNHSHFRMEGEVVLTTTTLAQAGAFYAEVEAHNTVTSGTATTVIEIQVSEQEPPSTGGGPSEDKRFSVVDMAALGGVLGALLLLALLGLAVLVHKHYGPRLKCCCGKAPEPQPQGFDNQAFLPDHKANWAPVPSPTHDPKPAEAPMPAEPAPPGPASPGGAPEPPAAARAGGSPTAVRSILTKERRPEGGYKAVWFGEDIGTEADVVVLNAPTLDVDGASDSGSGDEGEGAGRGGGPYDAPGGDDSYI

SEQ ID NO: 2548 - protein, 845 aa, Homo sapiens
MGSWALLWPPLLFTGLLVRPPGTMAQAQYCSVNKDIFEVEENTNVTEPLVDIHVPEGQEVTLGALSTPFAFRIQGNQLFLNVTPDYEEKSLLEAQLLCQSGGTLVTQLRVFVSVLDVNDNAPEFPFKTKEIRVEEDTKVNSTVIPETQLQAEDRDKDDILFYTLQEMTAGASDYFSLVSVNRPALRLDRPLDFYERPNMTFWLLVRDTPGENVEPSHTATATLVLNVVPADLRPPWFLPCTFSDGYVCIQAQYHGAVPTGHILPSPLVLRPGPIYAEDGDRGINQPIIYSIFRGNVNGTFIIHPDSGNLTVARSVPSPMTFLLLVKGQQADLARYSVTQVTVEAVAAAGSPPRFPQRLYRGTVARGAGAGVVVKDAAAPSQPLRIQAQDPEFSDLNSAITYRITNHSHFRMEGEVVLTTTTLAQAGAFYAEVEAHNTVTSGTATTVIEIQVSEQEPPSTDVPPSPEAGGTTGPWTSTTSEVPRPPEPSQGPSTTSSGGGTGPHPPSGTTLRPPTSSTPGGPPGAENSTSHQPATPGGDTAQTPKPGTSQPMPPGVGTSTSHQPATPSGGTAQTPEPGTSQPMPPSMGTSTSHQPATPGGGTAQTPEAGTSQPMPPGMGTSTSHQPTTPGGGTAQTPEPGTSQPMPLSKSTPSSGGGPSEDKRFSVVDMAALGGVLGALLLLALLGLAVLVHKHYGPRLKCCCGKAPEPQPQGFDNQAFLPDHKANWAPVPSPTHDPKPAEAPMPAEPAPPGPASPGGAPEPPAAARAGGSPTAVRSILTKERRPEGGYKAVWFGEDIGTEADVVVLNAPTLDVDGASDSGSGDEGEGAGRGGGPYDAPGGDDSYI

SEQ ID NO: 2549 - protein, 845 aa, Homo sapiens; identical to SEQ ID NO: 2548

SEQ ID NO: 2550 - protein, 106 aa, Homo sapiens
MGSWALLWPPLLFTGLLVRPPGTMAQAQYCSVNKDIFEVEENTNVTEPLVDIHVPEGQEVTLGALSTPFAFRIQGNQLFLNVTPDYEKAGPFRDEAAWAHTLSTDH

SEQ ID NO: 2551 - protein, 15 aa, Homo sapiens
MTAGASDYFSLVSVN

SEQ ID NO: 2552 - protein, 116 aa, Homo sapiens
MEPAAGSSMEPSADWLATAAARGRVEEVRALLEAGALPNAPNSYGRRPIQVGRGSAAGAGDGGRLWRTKFAGELESGSASILRKKGRLPGEFSEGVCNHRPPPGDALGAWEAKEEE

SEQ ID NO: 2553 - protein, 138 aa, Homo sapiens
MEPAAGSSMEPSADWLATAAARGRVEEVRALLEAGALPNAPNSYGRRPIQVMMMGSARVAELLLLHGAEPNCADPATLTRPVHDAAREGFLDTLVVLHRAGARLDVRDAWGRLPVDLAEELGHRDVARHPRLKEPERL

SEQ ID NO: 2554 - protein, 156 aa, Homo sapiens
MEPAAGSSMEPSADWLATAAARGRVEEVRALLEAGALPNAPNSYGRRPIQVMMMGSARVAELLLLHGAEPNCADPATLTRPVHDAAREGFLDTLVVLHRAGARLDVRDAWGRLPVDLAEELGHRDVARYLRAAAGGTRGSNHARIDAAEGPSDIPD

SEQ ID NO: 2555 - protein, 167 aa, Homo sapiens
MEPAAGSSMEPSADWLATAAARGRVEEVRALLEAGALPNAPNSYGRRPIQVMMMGSARVAELLLLHGAEPNCADPATLTRPVHDAAREGFLDTLVVLHRAGARLDVRDAWGRLPVDLAEELGHRDVARYLRAAAGGTRGSNHARIDAAEGPSEMIGNHLWVCRSRHA

SEQ ID NO: 2556 - protein, 105 aa, Homo sapiens
MMMGSARVAELLLLHGAEPNCADPATLTRPVHDAAREGFLDTLVVLHRAGARLDVRDAWGRLPVDLAEELGHRDVARYLRAAAGGTRGSNHARIDAAEGPSDIPD

SEQ ID NO: 2557 - protein, 105 aa, Homo sapiens; identical to SEQ ID NO: 2556

SEQ ID NO: 2558 - protein, 105 aa, Homo sapiens; identical to SEQ ID NO: 2556

SEQ ID NO: 2559 - protein, 104 aa, Homo sapiens
MMMGSARVAELLLLHGAEPNCADPATLTRPVHDAAREGFLDTLVVLHRAGARLDVRDAWGRLPVDLAEELGHRDVARYLRAAAGGTRGSNHARIDAAEGPSGED

SEQ ID NO: 2560 - protein, 121 aa, Homo sapiens
MMMGSARVAELLLLHGAEPNCADPATLTRPVHDAAREGFLDTLVVLHRAGARLDVRDAWGRLPVDLAEELGHRDVARYLRAAAGGTRGSNHARIDAAEGPSVTASIQVPGGEEGDFGSSYS

SEQ ID NO: 2561 - protein, 132 aa, Homo sapiens
MVRRFLVTLRIRRACGPPRVRVFVVHIPRLTGEWAAPGAPAAVALVLMLLRSQRLGQQPLPRRPGHDDGQRPSGGAAAAPRRGAQLRRPRHSHPTRARRCPGGLPGHAGGAAPGRGAAGRARCLGPSARGPG

SEQ ID NO: 2562 - protein, 132 aa, Homo sapiens; identical to SEQ ID NO: 2561

SEQ ID NO: 2563 - protein, 85 aa, Homo sapiens
MSVHMPAMKICEKLKKLDSQICELKYEKTLDLASVDLRKMRVAELKQILHSWGEECRACAEKTDYVNLIQELAPKYAATHPKTEL

SEQ ID NO: 2564 - protein, 187 aa, Homo sapiens
MWCASPVAVVAFCAGLLVSHPVLTQGQEAGGRPGADCEVCKEFLNRFYKSLIDRGVNFSLDTIEKELISFCLDTKGKENRLCYYLGATKDAATKILSEVTRPMSVHMPAMKICEKLKKLDSQICELKYEKTLDLASVDLRKMRVAELKQILHSWGEECRACAEKTDYVNLIQELAPKYAATHPKTEL

SEQ ID NO: 2565 - protein, 111 aa, Homo sapiens
MHPDLGPLCTLLYVTLTILCSSVSSDLAPYFTSEPLSAVQKLGGPVVLHCSAQPVTTRISWLHNGKTLDGNLEHVKIHQGTLTILSLNSSLLGYYQCLANNSIGAIVSGPA

SEQ ID NO: 2566 - protein, 143 aa, Homo sapiens
MHPDLGPLCTLLYVTLTILCSSVSSDLAPYFTSEPLSAVQKLGGPVVLHCSAQPVTTRISWLHNGKTLDGNLEHVKIHQGTLTILSLNSSLLGYYQCLANNSIGAIVSGPATVSVAVLGDFGSSTKHVITAEEKSAGFIGCRV

SEQ ID NO: 2567 - protein, 165 aa, Homo sapiens
MHPDLGPLCTLLYVTLTILCSSVSSDLAPYFTSEPLSAVQKLGGPVVLHCSAQPVTTRISWLHNGKTLDGNLEHVKIHQGTLTILSLNSSLLGYYQCLANNSIGAIVSGPATVSVAVLGDFGSSTKHVITAEEKSAGFIGCRVPESNPKAEVRYKIRGKWLEHST

SEQ ID NO: 2568 - protein, 1264 aa, Homo sapiens
MHPDLGPLCTLLYVTLTILCSSVSSDLAPYFTSEPLSAVQKLGGPVVLHCSAQPVTTRISWLHNGKTLDGNLEHVKIHQGTLTILSLNSSLLGYYQCLANNSIGAIVSGPATVSVAVLGDFGSSTKHVITAEEKSAGFIGCRVPESNPKAEVRYKIRGKWLEHSTENYLILPSGNLQILNVSLEDKGSYKCAAYNPVTHQLKVEPIGRKLLVSRPSSDDVHILHPTHSQALAVLSRSPVTLECVVSGVPAPQVYWLKDGQDIAPGSNWRRLYSHLATDSVDPADSGNYSCMAGNKSGDVKYVTYMVNVLEHASISKGLQDQIVSLGATVHFTCDVHGNPAPNCTWFHNAQPIHPSARHLTAGNGLKISGVTVEDVGMYQCVADNGIGFMHSTGRLEIENDGGFKPVIITAPVSAKVADGDFVTLSCNASGLPVPVIRWYDSHGLITSHPSQVLRSKSRKSQLSRPEGLNLEPVYFVLSQAGASSLHIQAVTQEHAGKYICEAANEHGTTQAEASLMVVPFETNTKAETVTLPDAAQNDDRSKRDGSETGLLSSFPVKVHPSAVESAPEKNASGISVPDAPIILSPPQTHTPDTYNLVWRAGKDGGLPINAYFVKYRKLDDGVGMLGSWHTVRVPGSENELHLAELEPSSLYEVLMVARSAAGEGQPAMLTFRTSKEKTASSKNTQASSPPVGIPKYPVVSEAANNNFGVVLTDSSRHSGVPEAPDRPTISTASETSVYVTWIPRANGGSPITAFKVEYKRMRTSNWLVAAEDIPPSKLSVEVRSLEPGSTYKFRVIAINHYGESFRSSASRPYQVVGFPNRFSSRPITGPHIAYTEAVSDTQIMLKWTYIPSSNNNTPIQGFYIYYRPTDSDNDSDYKRDVVEGSKQWHMIGHLQPETSYDIKMQCFNEGGESEFSNVMICETKVKRVPGASEYPVKDLSTPPNSLGSGGNVGPATSPARSSDMLYLIVGCVLGVMVLILMVFIAMCLWKNRQQNTIQKYDPPGYLYQGSDMNGQMVDYTTLSGASQINGNVHGGFLTNGGLSSGYSHLHHKVPNAVNGIVNGSLNGGLYSGHSNSLTRTHVDFEHPHHLVNGGGMYTAVPQIDPLECVNCRNCRNNNRCFTKTNSTFSSSPPPVVPVVAPYPQDGLEMKPLSHVKVPVCLTSAVPDCGQLPEESVKDNVEPVPTQRTCCQDIVNDVSSDGSEDPAEFSRGDSCAHSETEINIVSWNALILPPVPEGCAEKTMWSPPGIPLDSPTEVLQQPRET

SEQ ID NO: 2569 - protein, 1287 aa, Homo sapiens
MHPDLGPLCTLLYVTLTILCSSVSSDLAPYFTSEPLSAVQKLGGPVVLHCSAQPVTTRISWLHNGKTLDGNLEHVKIHQGTLTILSLNSSLLGYYQCLANNSIGAIVSGPATVSVAVLGDFGSSTKHVITAEEKSAGFIGCRVPESNPKAEVRYKIRGKWLEHSTENYLILPSGNLQILNVSLEDKGSYKCAAYNPVTHQLKVEPIGRKLLVSRPSSDDVHILHPTHSQALAVLSRSPVTLECVVSGVPAPQVYWLKDGQDIAPGSNWRRLYSHLATDSVDPADSGNYSCMAGNKSGDVKYVTYMVNVLEHASISKGLQDQIVSLGATVHFTCDVHGNPAPNCTWFHNAQPIHPSARHLTAGNGLKISGVTVEDVGMYQCVADNGIGFMHSTGRLEIENDGGFKPVIITAPVSAKVADGDFVTLSCNASGLPVPVIRWYDSHGLITSHPSQVLRSKSRKSQLSRPEGLNLEPVYFVLSQAGASSLHIQAVTQEHAGKYICEAANEHGTTQAEASLMVVPFETNTKAETVTLPDAAQNDDRSKRDGSETGLLSSFPVKVHPSAVESAPEKNASGISVPDAPIILSPPQTHTPDTYNLVWRAGKDGGLPINAYFVKYRKLDDGVGMLGSWHTVRVPGSENELHLAELEPSSLYEVLMVARSAAGEGQPAMLTFRTSKEKTASSKNTQASSPPVGIPKYPVVSEAANNNFGVVLTDSSRHSGVPEAPDRPTISTASETSVYVTWIPRANGGSPITAFKVEYKRMRTSNWLVAAEDIPPSKLSVEVRSLEPGSTYKFRVIAINHYGESFRSSASRPYQVVGFPNRFSSRPITGPHIAYTEAVSDTQIMLKWTYIPSSNNNTPIQGFYIYYRPTDSDNDSDYKRDVVEGSKQWHMIGHLQPETSYDIKMQCFNEGGESEFSNVMICETKVKRVPGASEYPVKDLSTPPNSLGSGGNVGPATSPARSSDMLYLIVGCVLGVMVLILMVFIAMCLWKNRQQNTIQKYDPPGYLYQGSDMNGQMVDYTTLSGASQINGNVHGGFLTNGGLSSGYSHLHHKVPNAVNGIVNGSLNGGLYSGHSNSLTRTHVDFEHPHHLVNGGGMYTAVPQIDPLECVNCRNCRNNNRCFTKTNSTFSSSPPPVVPVVAPYPQDGLEMKPLSHVKVPVCLTSAVPDCGQLPEESVKDNVEPVPTQRTCCQDIVNDVSSDGSEDPAEFSRGQEGMINLRIPDHLQLAKSCVWEGDSCAHSETEINIVSWNALILPPVPEGCAEKTMWSPPGIPLDSPTEVLQQPRET

SEQ ID NO: 2570 - protein, 641 aa, Homo sapiens
MLGSWHTVRVPGSENELHLAELEPSSLYEVLMVARSAAGEGQPAMLTFRTSKEKTASSKNTQASSPPVGIPKYPVVSEAANNNFGVVLTDSSRHSGVPEAPDRPTISTASETSVYVTWIPRANGGSPITAFKVEYKRMRTSNWLVAAEDIPPSKLSVEVRSLEPGSTYKFRVIAINHYGESFRSSASRPYQVVGFPNRFSSRPITGPHIAYTEAVSDTQIMLKWTYIPSSNNNTPIQGFYIYYRPTDSDNDSDYKRDVVEGSKQWHMIGHLQPETSYDIKMQCFNEGGESEFSNVMICETKVKRVPGASEYPVKDLSTPPNSLGSGGNVGPATSPARSSDMLYLIVGCVLGVMVLILMVFIAMCLWKNRQQNTIQKYDPPGYLYQGSDMNGQMVDYTTLSGASQINGNVHGGFLTNGGLSSGYSHLHHKVPNAVNGIVNGSLNGGLYSGHSNSLTRTHVDFEHPHHLVNGGGMYTAVPQIDPLECVNCRNCRNNNRCFTKTNSTFSSSPPPVVPVVAPYPQDGLEMKPLSHVKVPVCLTSAVPDCGQLPEESVKDNVEPVPTQRTCCQDIVNDVSSDGSEDPAEFSRGDSCAHSETEINIVSWNALILPPVPEGCAEKTMWSPPGIPLDSPTEVLQQPRET

SEQ ID NO: 2571 - protein, 650 aa, Homo sapiens
  VARIANT 1: note = misc_feature - Xaa can be any naturally occurring amino acid
XDLAPYFTSEPLSAVQKLGGPVVLHCSAQPVTTRISWLHNGKTLDGNLEHVKIHQGTLTILSLNSSLLGYYQCLANNSIGAIVSGPATVSVAVLGDFGSSTKHVITAEEKSAGFIGCRVPESNPKAEVRYKIRGKWLEHSTENYLILPSGNLQILNVSLEDKGSYKCAAYNPVTHQLKVEPIGRKLLVSRPSSDDVHILHPTHSQALAVLSRSPVTLECVVSGVPAPQVYWLKDGQDIAPGSNWRRLYSHLATDSVDPADSGNYSCMAGNKSGDVKYVTYMVNVLEHASISKGLQDQIVSLGATVHFTCDVHGNPAPNCTWFHNAQPIHPSARHLTAGNGLKISGVTVEDVGMYQCVADNGIGFMHSTGRLEIENDGGFKPVIITAPVSAKVADGDFVTLSCNASGLPVPVIRWYDSHGLITSHPSQVLRSKSRKSQLSRPEGLNLEPVYFVLSQAGASSLHIQAVTQEHAGKYICEAANEHGTTQAEASLMVVPFETNTKAETVTLPDAAQNDDRSKRDGSETGLLSSFPVKVHPSAVESAPEKNASGISVPDAPIILSPPQTHTPDTYNLVWRAGKDGGLPINAYFVKYRKLDDGVGMLGSWHTVRVPGSENELHLAELEPSSLYEVLMVARSAAGEGQPAMLTFRTS

SEQ ID NO: 2572 - protein, 243 aa, Homo sapiens
  VARIANT 1: note = misc_feature - Xaa can be any naturally occurring amino acid
XNYLILPSGNLQILNVSLEDKGSYKCAAYNPVTHQLKVEPIGRKLLVSRPSSDDVHILHPTHSQALAVLSRSPVTLECVVSGVPAPQVYWLKDGQDIAPGSNWRRLYSHLATDSVDPADSGNYSCMAGNKSGDVKYVTYMVNVLEHASISKGLQDQIVSLGATVHFTCDVHGNPAPNCTWFHNAQPIHPSARHLTAGNGLKISGVTVEDVGMYQCVADNGIGFMHSTGRLEIENGQEIYVGNV

SEQ ID NO: 2573 - protein, 529 aa, Homo sapiens
MGSSRAPWMGRVGGHGMMALLLAGLLLPGTLAKSIGTFSDPCKDPTRITSPNDPCLTGKGDSSGFSSYSGSSSSGSSISSARSSGGGSSGSSSGSSIAQGGSAGSFKPGTGYSQVSYSSGSGSSLQGASGSSQLGSSSSHSGNSGSHSGSSSSHSSSSSSFQFSSSSFQVGNGSALPTNDNSYRGILNPSQPGQSSSSSQTFGVSSSGQSVSSNQRPCSSDIPDSPCSGGPIVSHSGPYIPSSHSVSGGQRPVVVVVDQHGSGAPGVVQGPPCSNGGLPGKPCPPITSVDKSYGGYEVVGGSSDSYLVPGMTYSKGKIYPVGYFTKENPVKGSPGVPSFAAGPPISEGKYFSSNPIIPSQSAASSAIAFQPVGTGGVQLCGGGSTGSKGPCSPSSSRVPSSSSISSSSGLPYHPCGSASQSPCSPPGTGSFSSSSSSQSSGKIILQPCGSKSSSSGHPCMSVSSLTLTGGPDGSPHPDPSAGAKPCGSSSAGKIPCRSIRDILAQVKPLGPQLADPEVFLPQGELLNSP

SEQ ID NO: 2574 - protein, 425 aa, Homo sapiens
MALTGYSWLLLSATFLNVGAEISITLEPAQPSEGDNVTLVVHGLSGELLAYSWYAGPTLSVSYLVASYIVSTGDETPGPAHTGREAVRPDGSLDIQGILPRHSGTYILQTFNRQLQTEVGYGHVQVHEILAQPTVLANSTALVERRDTLRLMCSSPSPTAEVRWFFNGGALPVALRLGLSPDGRVLARHGIRREEAGAYQCEVWNPVSVSRSEPINLTVYFGPERVAILQDSTTRTGCTIKVDFNTSLTLWCVSRSCPEPEYVWTFNGQALKNGQDHLNISSMTAAQEGTYTCIAKNTKTLLSGSASVVVKLSAAAVATMIVPVPTKPTEGQDVTLTVQGYPKDLLVYAWYRGPASEPNRLLSQLPSGTWIAGPAHTGREVGFPNCSLLVQKLNLTDTGRYTLKTVTVQGKTETLEVELQVAPLG

SEQ ID NO: 2575 - protein, 425 aa, Homo sapiens; identical to SEQ ID NO: 2574

SEQ ID NO: 2576 - protein, 384 aa, Homo sapiens
MDLSRPRWSLWRRVFLMASLLACGICQASGQIFITQTLGIKGYRTVVALDKVPEDVQEYSWYWGANDSAGNMIISHKPPSAQQPGPMYTGRERVNREGSLLIRPTALNDTGNYTVRVVAGNETQRATGWLEVLELGSNLGISVNASSLVENMDSVAADCLTNVTNITWYVNDVPTSSSDRMTISPDGKTLVILRVSRYDRTIQCMIESFPEIFQRSERISLTVAYGPDYVLLRSNPDDFNGIVTAEIGSQVEMECICYSFLDLKYHWIHNGSLLNFSDAKMNLSSLAWEQMGRYRCTVENPVTQLIMYMDVRIQAPHEDLTCCPQRFLHLRIHGDVPHHADSAGWRLHLWSPDPCSDQPLLNQDKSGSMSVHPRPEDKTRRASR

SEQ ID NO: 2577 - protein, 55 aa, Homo sapiens
MEIPMGTQGCFSKSLLLSASILVLWMLQGSQAALYIQKIPEQPQKNQDLLLSVQG

SEQ ID NO: 2578 - protein, 56 aa, Homo sapiens
MEIPMGTQGCFSKSLLLSASILVLWMLQGSQAALYIQKIPEQPQKNQDLLLSVQGV

SEQ ID NO: 2579 - protein, 56 aa, Homo sapiens; identical to SEQ ID NO: 2578

SEQ ID NO: 2580 - protein, 56 aa, Homo sapiens; identical to SEQ ID NO: 2578

SEQ ID NO: 2581 - protein, 56 aa, Homo sapiens; identical to SEQ ID NO: 2578

SEQ ID NO: 2582 - protein, 299 aa, Homo sapiens
MEIPMGTQGCFSKSLLLSASILVLWMLQGSQAALYIQKIPEQPQKNQDLLLSVQGVPDTFQDFNWYLGEETYGGTRLFTYIPGIQRPQRDGSAMGQRDIVGFPNGSMLLRRAQPTDSGTYQVAITINSEWTMKAKTEVQVAEKNKELPSTHLPTNAGILAATIIGSLAAGALLISCIAYLLVTRNWRGQSHRLPAPRGQGSLSILCSAVSPVPSVTPSTWMATTEKPELGPAHDAGDNNIYEVMPSPVLLVSPISDTRSINPARPLPTPPHLQAEPENHQYQDLLNPDPAPYCQLVPTS

SEQ ID NO: 2583 - protein, 300 aa, Homo sapiens
MEIPMGTQGCFSKSLLLSASILVLWMLQGSQAALYIQKIPEQPQKNQDLLLSVQGVPDTFQDFNWYLGEETYGGTRLFTYIPGIQRPQRDGSAMGQRDIVGFPNGSMLLRRAQPTDSGTYQVAITINSEWTMKAKTEVQVAEKNKELPSTHLPTNAGILAATIIGSLAAGALLISCIAYLLVTRNWRGQSHRLPAPRGQGSLSILCSAVSPVPSVTPSTWMATTEKPELGPAHDAGDNNIYEVMPSPVLLVSPISDTRSINPARPLPTPPHLQAEPENHQYQQDLLNPDPAPYCQLVPTS

SEQ ID NO: 2584 - protein, 346 aa, Homo sapiens
MESPSAPPHRWCIPWQRLLLTASLLTFWNPPTTAKLTIESTPFNVAEGKEVLLLVHNLPQHLFGYSWYKGERVDGNRQIIGYVIGTQQATPGPAYSGREIIYPNASLLIQNIIQNDTGFYTLHVIKSDLVNEEATGQFRVYPELPKPSISSNNSKPVEDKDAVAFTCEPETQDATYLWWVNNQSLPVSPRLQLSNGNRTLTLFNVTRNDARAYVCGIQNSVSANRSDPVTLDVLYGPDTPIISPPDSSYLSGANLNLSCHSASNPSPQYSWRINGIPQQHTQVLFIAKITPNNNGTYACFVSNLATGRNNSIVKSITVSASGTSPGLSAGATVGIMIGVLVGVALI

SEQ ID NO: 2585 - protein, 702 aa, Homo sapiens
MESPSAPPHRWCIPWQRLLLTASLLTFWNPPTTAKLTIESTPFNVAEGKEVLLLVHNLPQHLFGYSWYKGERVDGNRQIIGYVIGTQQATPGPAYSGREIIYPNASLLIQNIIQNDTGFYTLHVIKSDLVNEEATGQFRVYPELPKPSISSNNSKPVEDKDAVAFTCEPETQDATYLWWVNNQSLPVSPRLQLSNGNRTLTLFNVTRNDTASYKCETQNPVSARRSDSVILNVLYGPDAPTISPLNTSYRSGENLNLSCHAASNPPAQYSWFVNGTFQQSTQELFIPNITVNNSGSYTCQAHNSDTGLNRTTVTTITVYAEPPKPFITSNNSNPVEDEDAVALTCEPEIQNTTYLWWVNNQSLPVSPRLQLSNDNRTLTLLSVTRNDVGPYECGIQNELSVDHSDPVILNVLYGPDDPTISPSYTYYRPGVNLSLSCHAASNPPAQYSWLIDGNIQQHTQELFISNITEKNSGLYTCQANNSASGHSRTTVKTITVSAELPKPSISSNNSKPVEDKDAVAFTCEPEAQNTTYLWWVNGQSLPVSPRLQLSNGNRTLTLFNVTRNDARAYVCGIQNSVSANRSDPVTLDVLYGPDTPIISPPDSSYLSGANLNLSCHSASNPSPQYSWRINGIPQQHTQVLFIAKITPNNNGTYACFVSNLATGRNNSIVKSITVSASGTSPGLSAGATVGIMIGVLVGVALI

SEQ ID NO: 2586 - protein, 701 aa, Homo sapiens
MESPSAPPHRWCIPWQRLLLTASLLTFWNPPTTAKLTIESTPFNVAEGKEVLLLVHNLPQHLFGYSWYKGERVDGNRQIIGYVIGTQQATPGPAYSGREIIYPNASLLIQNIIQNDTGFYTLHVIKSDLVNEEATGQFRVYPELPKPSISSNNSKPVEDKDAVAFTCEPETQDATYLWWVNNQSLPVSPRLQLSNGNRTLTLFNVTRNDTASYKCETQNPVSARRSDSVILNVLYGPDAPTISPLNTSYRSGENLNLSCHAASNPPAQYSWFVNGTFQQSTQELFIPNITVNNSGSYTCQAHNSDTGLNRTTVTTITVYEPPKPFITSNNSNPVEDEDAVALTCEPEIQNTTYLWWVNNQSLPVSPRLQLSNDNRTLTLLSVTRNDVGPYECGIQNELSVDHSDPVILNVLYGPDDPTISPSYTYYRPGVNLSLSCHAASNPPAQYSWLIDGNIQQHTQELFISNITEKNSGLYTCQANNSASGHSRTTVKTITVSAELPKPSISSNNSKPVEDKDAVAFTCEPEAQNTTYLWWVNGQSLPVSPRLQLSNGNRTLTLFNVTRNDARAYVCGIQNSVSANRSDPVTLDVLYGPDTPIISPPDSSYLSGANLNLSCHSASNPSPQYSWRINGIPQQHTQVLFIAKITPNNNGTYACFVSNLATGRNNSIVKSITVSASGTSPGLSAGATVGIMIGVLVGVALI

SEQ ID NO: 2587 - protein, 702 aa, Homo sapiens; identical to SEQ ID NO: 2585

SEQ ID NO: 2588 - protein, 702 aa, Homo sapiens; identical to SEQ ID NO: 2585

SEQ ID NO: 2589 - protein, 524 aa, Homo sapiens
MESPSAPPHRWCIPWQRLLLTASLLTFWNPPTTAKLTIESTPFNVAEGKEVLLLVHNLPQHLFGYSWYKGERVDGNRQIIGYVIGTQQATPGPAYSGREIIYPNASLLIQNIIQNDTGFYTLHVIKSDLVNEEATGQFRVYPEPPKPFITSNNSNPVEDEDAVALTCEPEIQNTTYLWWVNNQSLPVSPRLQLSNDNRTLTLLSVTRNDVGPYECGIQNELSVDHSDPVILNVLYGPDDPTISPSYTYYRPGVNLSLSCHAASNPPAQYSWLIDGNIQQHTQELFISNITEKNSGLYTCQANNSASGHSRTTVKTITVSAELPKPSISSNNSKPVEDKDAVAFTCEPEAQNTTYLWWVNGQSLPVSPRLQLSNGNRTLTLFNVTRNDARAYVCGIQNSVSANRSDPVTLDVLYGPDTPIISPPDSSYLSGANLNLSCHSASNPSPQYSWRINGIPQQHTQVLFIAKITPNNNGTYACFVSNLATGRNNSIVKSITVSASGTSPGLSAGATVGIMIGVLVGVALI

SEQ ID NO: 2590 - protein, 194 aa, Homo sapiens
  VARIANT 1: note = misc_feature - Xaa can be any naturally occurring amino acid
XIYPNASLLIQNIIQNDTGFYTLHVIKSDLVNEEATGQFRVYPELPKPSISSNNSKPVEDKDAVAFTCEPETQDATYLWWVNNQSLPVSPRLQLSNGNRTLTLFNVTRNDTASYKCETQNPVSARRSDSVILNVLSEPPKPFITSNNSNPVEDEDAVALTCEPEIQNTTYLWWVNNQSLPVSPRLQLSNDNRTL

SEQ ID NO: 2591 - protein, 141 aa, Homo sapiens
  VARIANT 1: note = misc_feature - Xaa can be any naturally occurring amino acid
XKLTIESTPFNVAEGKEVLLLVHNLPQHLFGYSWYKGERVDGNRQIIGYVIGTQQATPGPAYSGREIIYPNASLLIQNIIQNDTGFYTLHVIKSDLVNEEATGQFRVYPELPKPSISSNNSKPVEDKDAVAFTCEPEAQNT

SEQ ID NO: 2592 - protein, 265 aa, Homo sapiens
MGSPSACPYRVCIPWQGLLLTASLLTFWNLPNSAQTNIDVVPFNVAEGKEVLLVVHNESQNLYGYNWYKGERVHANYRIIGYVKNISQENAPGPAHNGRETIYPNGTLLIQNVTHNDAGIYTLHVIKENLVNEEVTRQFYVFSEPPKPSITSNNFNPVENKDIVVLTCQPETQNTTYLWWVNNQSLLVSPRLLLSTDNRTLVLLSATKNDIGPYECEIQNPVGASRSDPVTLNVRYESVQASSPDLSAGTAVSIMIGVLAGMALI

SEQ ID NO: 2593 - protein, 265 aa, Homo sapiens; identical to SEQ ID NO: 2592

SEQ ID NO: 2594 - protein, 172 aa, Homo sapiens
MGSPSACPYRVCIPWQGLLLTASLLTFWNLPNSAQTNIDVVPFNVAEGKEVLLVVHNESQNLYGYNWYKGERVHANYRIIGYVKNISQENAPGPAHNGRETIYPNGTLLIQNVTHNDAGIYTLHVIKENLVNEEVTRQFYVFYESVQASSPDLSAGTAVSIMIGVLAGMALI

SEQ ID NO: 2595 - protein, 349 aa, Homo sapiens
MGPISAPSCRWRIPWQGLLLTASLFTFWNPPTTAQLTIEAVPSNAAEGKEVLLLVHNLPQDPRGYNWYKGETVDANRRIIGYVISNQQITPGPAYSNRETIYPNASLLMRNVTRNDTGSYTLQVIKLNLMSEEVTGQFSVHPETPKPSISSNNSNPVEDKDAVAFTCEPETQNTTYLWWVNGQSLPVSPRLQLSNGNRTLTLLSVTRNDVGPYECEIQNPASANFSDPVTLNVLYGPDAPTISPSDTYYHAGVNLNLSCHAASNPPSQYSWSVNGTFQQYTQKLFIPNITTKNSGSYACHTTNSATGRNRTTVRMITVSDALVQGSSPGLSARATVSIMIGVLARVALI

SEQ ID NO: 2596 - protein, 51 aa, Homo sapiens
MGPISAPSCRWRIPWQGLLLTDALVQGSSPGLSARATVSIMIGVLARVALI

SEQ ID NO: 2597 - protein, 756 aa, Homo sapiens
MLTMGRLQLVVLGLTCCWAVASAAKLGAVYTEGGFVEGVNKKLGLLGDSVDIFKGIPFAAPTKALENPQPHPGWQGTLKAKNFKKRCLQATITQDSTYGDEDCLYLNIWVPQGRKQVSRDLPVMIWIYGGAFLMGSGHGANFLNNYLYDGEEIATRGNVIVVTFNYRVGPLGFLSTGDANLPGNYGLRDQHMAIAWVKRNIAAFGGDPNNITLFGESAGGASVSLQTLSPYNKGLIRRAISQSGVALSPWVIQKNPLFWAKKVAEKVGCPVGDAARMAQCLKVTDPRALTLAYKVPLAGLEYPMLHYVGFVPVIDGDFIPADPINLYANAADIDYIAGTNNMDGHIFASIDMPAINKGNKKVTEEDFYKLVSEFTITKGLRGAKTTFDVYTESWAQDPSQENKKKTVVDFETDVLFLVPTEIALAQHRANAKSAKTYAYLFSHPSRMPVYPKWVGADHADDIQYVFGKPFATPTGYRPQDRTVSKAMIAYWTNFAKTGDPNMGDSAVPTHWEPYTTENSGYLEITKKMGSSSMKRSLRTNFLRYWTLTYLALPTVTDQEATPVPPTGDSEATPVPPTGDSETAPVPPTGDSGAPPVPPTGDSGAPPVPPTGDSGAPPVPPTGDSGAPPVPPTGDSGAPPVPPTGDSGAPPVPPTGDSGAPPVPPTGDSGAPPVPPTGDAGPPPVPPTGDSGAPPVPPTGDSGAPPVTPTGDSETAPVPPTGDSGAPPVPPTGDSEAAPVPPTDDSKEAQMPAVIRF

SEQ ID NO: 2598 - protein, 269 aa, Homo sapiens
MIRTLLLSTLVAGALSCGDPTYPPYVTRVVGGEEARPNSWPWQVSLQYSSNGKWYHTCGGSLIANSWVLTAAHCISSSRTYRVGLGRHNLYVAESGSLAVSVSKIVVHKDWNSNQISKGNDIALLKLANPVSLTDKIQLACLPPAGTILPNNYPCYVTGWGRLQTNGAVPDVLQQGRLLVVDYATCSSSAWWGSSVKTSMICAGGDGVISSCNGDSGGPLNCQASDGRWQVHGIVSFGSRLGCNYYHKPSVFTRVSNYIDWINSVIANN

SEQ ID NO: 2599 - protein, 126 aa, Homo sapiens [sequence omitted]

SEQ ID NO: 2600 - protein, 269 aa, Homo sapiens
MIRTLLLSTLVAGALSCGVSTYAPDMSRMLGGEEARPNSWPWQVSLQYSSNGQWYHTCGGSLIANSWVLTAAHCISSSGIYRVMLGQHNLYVAESGSLAVSVSKIVVHKDWNSDQVSKGNDIALLKLANPVSLTDKIQLACLPPAGTILPNNYPCYVTGWGRLQTNGALPDDLKQGQLLVVDYATCSSSGWWGSTVKTNMICAGGDGVICTCNGDSGGPLNCQASDGRWEVHGIGSLTSVLGCNYYYKPSIFTRVSNYNDWINSVIANN

SEQ ID NO: 2601 - protein, 121 aa, Homo sapiens
MMLRLLSSLLLVAVASGYGPPSSHSSSRVVHGEDAVPYSWPWQVSLQYEKSGSFYHTCGGSLIAPDWVVTAGHCISRDLTYQVVLGEYNLAVKEGPEQVIPINSEELFVHPLWNRSCVACG

SEQ ID NO: 2602 - protein, 270 aa, Homo sapiens
MMLRLLSSLLLVAVASGYGPPSSHSSSRVVHGEDAVPYSWPWQVSLQYEKSGSFYHTCGGSLIAPDWVVTAGHCISRDLTYQVVLGEYNLAVKEGPEQVIPINSEELFVHPLWNRSCVACGNDIALIKLSRSAQLGDAVQLASLPPAGDILPNKTPCYITGWGRLYTNGPLPDKLQQARLPVVDYKHCSRWNWWGSTVKKTMVCAGGYIRSGCNGDSGGPLNCPTEDGGWQVHGVTSFVSAFGCNFIWKPTVFTRVSAFIDWIEETIASH

SEQ ID NO: 2603 - protein, 75 aa, Homo sapiens
WWGSTVKKTMVCAGGYIRSGCNGDSGGPLNCPTEDGGWQVHGVTSFVSAFGCNFIWKPTVFTRVSAFIDWIEEGG

SEQ ID NO: 2604 - protein, 270 aa, Homo sapiens
MMLRLLSSLLLVAVASGYGPPSSRPSSRVVNGEDAVPYSWPWQVSLQYEKSGSFYHTCGGSLIAPDWVVTAGHCISSSRTYQVVLGEYDRAVKEGPEQVIPINSGDLFVHPLWNRSCVACGNDIALIKLSRSAQLGDAVQLASLPPAGDILPNETPCYITGWGRLYTNGPLPDKLQEALLPVVDYEHCSRWNWWGSSVKKTMVCAGGDIRSGCNGDSGGPLNCPTEDGGWQVHGVTSFVSAFGCNTRRKPTVFTRVSAFIDWIEETIASH

SEQ ID NO: 2605 - protein, 164 aa, Homo sapiens
MRSCYVAQAGLKLPGSSDPPASASQSTRITASGYGPPSSRPSSRVVNGEDAVPYSWPWQVSLQYEKSGSFYHTCGGSLIAPDWVVTAGHCISSSRTYQVVLGEYDRAVKEGPEQVIPINSGDLFVHPLWNRSCVACGNDIALIKLSRSAQLGDAVQLASLPPAG

SEQ ID NO: 2606 - protein, 180 aa, Homo sapiens
QVIPINSGDLFVHPLWNRSCVACGNDIALIKLSRSAQLGDAVQLASLPPAGDILPNETPCYITGWGRLYTNGPLPDKLQEALLPVVDYEHCSRWNWWGSSVKKTMVCAGGDIRSGCNGDSGGPLNCPTEDGGWQVHGVTSFVSAFGCNTRRKPTVFTRVSAFIDWIEEKLQGNKAPESRT

SEQ ID NO: 2607 - protein, 1361 aa, Homo sapiens
MGAAGRQDFLFKAMLTISWLTLTCFPGATSTVAAGCPDQSPELQPWNPGHDQDHHVHIGQGKTLLLTSSATVYSIHISEGGKLVIKDHDEPIVLRTRHILIDNGGELHAGSALCPFQGNFTIILYGRADEGIQPDPYYGLKYIGVGKGGALELHGQKKLSWTFLNKTLHPGGMAEGGYFFERSWGHRGVIVHVIDPKSGTVIHSDRFDTYRSKKESERLVQYLNAVPDGRILSVAVNDEGSRNLDDMARKAMTKLGSKHFLHLGFRHPWSFLTVKGNPSSSVEDHIEYHGHRGSAAARVFKLFQTEHGEYFNVSLSSEWVQDVEWTEWFDHDKVSQTKGGEKISDLWKAHPGKICNRPIDIQATTMDGVNLSTEVVYKKGQDYRFACYDRGRACRSYRVRFLCGKPVRPKLTVTIDTNVNSTILNLEDNVQSWKPGDTLVIASTDYSMYQAEEFQVLPCRSCAPNQVKVAGKPMYLHIGEEIDGVDMRAEVGLLSRNIIVMGEMEDKCYPYRNHICNFFDFDTFGGHIKFALGFKAAHLEGTELKHMGQQLVGQYPIHFHLAGDVDERGGYDPPTYIRDLSIHHTFSRCVTVHGSNGLLIKDVVGYNSLGHCFFTEDGPEERNTFDHCLGLLVKSGTLLPSDRDSKMCKMITEDSYPGYIPKPRQDCNAVSTFWMANPNNNLINCAAAGSEETGFWFIFHHVPTGPSVGMYSPGYSEHIPLGKFYNNRAHSNYRAGMIIDNGVKTTEASAKDKRPFLSIISARYSPHQDADPLKPREPAIIRHFIAYKNQDHGAWLRGGDVWLDSCRFADNGIGLTLASGGTFPYDDGSKQEIKNSLFVGESGNVGTEMMDNRIWGPGGLDHSGRTLPIGQNFPIRGIQLYDGPINIQNCTFRKFVALEGRHTSALAFRLNNAWQSCPHNNVTGIAFEDVPITSRVFFGEPGPWFNQLDMDGDKTSVFHDVDGSVSEYPGSYLTKNDNWLVRHPDCINVPDWRGAICSGCYAQMYIQAYKTSNLRMKIIKNDFPSHPLYLEGALTRSTHYQQYQPVVTLQKGYTIHWDQTAPAELAIWLINFNKGDWIRVGLCYPRGTTFSILSDVHNRLLKQTSKTGVFVRTLQMDKVEQSYPGRSHYYWDEDSGLLFLKLKAQNEREKFAFCSMKGCERIKIKALIPKNAGVSDCTATAYPKFTERAVVDVPMPKKLFGSQLKTKDHFLEVKMESSKQHFFHLWNDFAYIEVDGKKYPSSEDGIQVVVIDGNQGRVVSHTSFRNSILQGIPWQLFNYVATIPDNSIVLMASKGRYVSRGPWTRVLEKLGADRGLKLKEQMAFVGFKGSFRPIWVTLDTEDHKAKIFQVVPIPVVKKKKL

SEQ ID NO: 2608 - protein, 1361 aa, Homo sapiens; identical to SEQ ID NO: 2607

SEQ ID NO: 2609 - protein, 1361 aa, Homo sapiens; identical to SEQ ID NO: 2607

SEQ ID NO: 2610 - protein, 76 aa, Homo sapiens
  VARIANT 1: note = misc_feature - Xaa can be any naturally occurring amino acid
XINFNKGDWIRVGLCYPRGTTFSILSDVHNRLLKQTSKTGVFVRTLQMDKVEQSYPGRSHYYWDEDSGKQRTISWR

SEQ ID NO: 2611 - protein, 145 aa, Homo sapiens
  VARIANT 1: note = misc_feature - Xaa can be any naturally occurring amino acid
XRGAICSGCYAQMYIQAYKTSNLRMKIIKNDFPSHPLYLEGALTRSTHYQQYQPVVTLQKGYTIHWDQTAPAELAIWLINFNKGDWIRVGLCYPRGTTFSILSDVHNRLLKQTSKTGVFVRTLQMDKVEQSYPGRSHYYWDEDSG

SEQ ID NO: 2612 - protein, 173 aa, Homo sapiens
EQDSFIEPYATTSQLRPRPNWQSEMGRRSSLPSFETLDYGDEEDIETQLSSSGKELGDVSAREDRGGHSDDLYAVPHRNQVPLLHEVNSEDDENISHQDGFPGSPPAPQRTQQKDGKHPVLNLKDEKPPLCEKPPPSPGPTLLQDLWGVAFLVGNVCGASVPLPEFLSCVQEE

SEQ ID NO: 2613 - protein, 783 aa, Homo sapiens
MLLGFRRGRRSHFKHIIHGLLPAASVAPKAAVPRTPPPRSPNPSPERPRSALAAAILATTLTGRTVAIPQPRQRSRSESDVSSVEQDSFIEPYATTSQLRPRPNWQSEMGRRSSLPSFETLDYGDEEDIETQLSSSGKELGDVSAREDRGGHSDDLYAVPHRNQVPLLHEVNSEDDENISHQDGFPGSPPAPQRTQQKDGKHPVLNLKDEKPPLCEKPPPSPDITGRARQRYTEITREKFEALKEENMDLNNMNQSLTLELNTMKQAMKELQLKLKGMEKEKRKLKEAEKASSQEVAAPELLYLRKQAQELVDENDGLKMTVHRLNVELSRYQTKFRHLSKEESLNIEGLPSKGPIPPWLLDIKYLSPLLLAYEDMMKEKDELNATLKEEMRMFRMRVQEVVKENEELHQELNKSSAVTSEEWRQLQTQAKLVLEENKLLLEQLEIQQRKAKDSHQERLQEVSKLTKQLMLLEAKTHGQEKELAENREQLEILRAKCQELKTHSDGKIAVEVHKSIVNELKSQLQKEEEKERAEMEELMEKLTVLQAQKKSLLLEKNSLTEQNKALEAELERAQKINRKSQKKIEVLKKQVEKAMGNEMSAHQYLANLVGLAENITQERDSLMCLAKCLESEKDGVLNKVIKSNIRLGKLEEKVKGYKKQAALKLGDISHRLLEQQEDFAGKTAQYRQEMRHLHQVLKDKQEVLDQALQQNREMEGELEVIWESTFRENRRIRELLQDTLTRTGVQDNPRALVAPSLNGVSQADLLDGCDVCSYDLKSHAPTC

SEQ ID NO: 2614 - protein, 428 aa, Homo sapiens
MLLGFRRGRRSHFKHIIHGLLPAASVAPKAAVPRTPPPRSPNPSPERPRSALAAAILATTLTGRTVAIPQPRQRSRSESDVSSVEQDSFIEPYATTSQLRPRPNWQSEMGRRSSLPSFETLDYGDEEDIETQLSSSGKELGDVSAREDRGGHSDDLYAVPHRNQVPLLHEVNSEDDENISHQDGFPGSPPAPQRTQQKDGKHPVLNLKDEKPPLCEKPPPSPDITGRARQRYTEITREKFEALKEENMDLNNMNQSLTLELNTMKQAMKELQLKLKGMEKEKRKLKEAEKASSQEVAAPELLYLRKQAQELVDENDGLKMTVHRLNVELSRYQTKFRHLSKEESLNIEGLPSKGPIPPWLLDIKYLSPLLLAYEDMMKEKDELNATLKASASDSSKTGFRGKQVVAGAVGDSAKESQGQPPGAPPRSF

SEQ ID NO: 2615 - protein, 356 aa, Homo sapiens
MLLGFRRGRRSHFKHIIHGLLPAASVAPKAAVPRTPPPRSPNPSPERPRSALAAAILATTLTGRTVAIPQPRQRSRSESDVSSVEQDSFIEPYATTSQLRPRPNWQSEMGRRSSLPSFETLDYGDEEDIETQLSSSGKELGDVSAREDRGGHSDDLYAVPHRNQVPLLHEVNSEDDENISHQDGFPGSPPAPQRTQQKDGKHPVLNLKDEKPPLCEKPPPSPDITGRARQRYTEITREKFEALKEENMDLNNMNQSLTLELNTMKQAMKELQLKLKGMEKEKRKLKEAEKASSQEVAAPELLYLRKQAQELVDENDGLKMTVHRLNVELSRYQTKFRHLSKEEVTFPIVKISFSDF

SEQ ID NO: 2616 - protein, 80 aa, Homo sapiens
MLLGFRRGRRSHFKQGLALSPRLECSGAIIAHCILELLGSSDLPTPASRGAETTGARHYSRLIVQYFCGNRDLAMFLWWS

SEQ ID NO: 2617 - protein, 217 aa, Homo sapiens
  VARIANT 1: note = misc_feature - Xaa can be any naturally occurring amino acid
XAAVPRTPPPRSPNPSPERPRSALAAAILATTLTGRTVAIPQPRQRSRSESDVSSVEQDSFIEPYATTSQLRPRPNWQSEMGRRSSLPSFETLDYGDEEDIETQLSSSGKELGDVSAREDRGGHSDDLYAVPHRNQVPLLHEVNSEDDENISHQDGFPGSPPAPQRTQQKDGKHPVLNLKDEKPPLCEKPPPSPGICLLNYIMIEKLVLENIQINFI

SEQ ID NO: 2618 - protein, 267 aa, Homo sapiens
MHLLLFQLLVLLPLGKTTRHQDGRQNQSSLSPVLLPRNQRELPTGNHEEAEEKPDLFVAVPHLVATSPAGEGQRQREKMLSRFGRFWKKPEREMHPSRDSDSEPFPPGTQSLIQPIDGMKMEKSPLREEAKKFWHHFMFRKTPASQGVILPIKSHEVHWETCRTVPFSQTITHEGCEKVVVQNNLCFGKCGSVHFPGAAQHSHTSCSHCLPAKFTTMHLPLNCTELSSVIKVVMLVEECQCKVKTEHEDGHILHAGSQDSFIPGVSA

SEQ ID NO: 2619 - protein, 64 aa, Homo sapiens
MLQEWLAAVGDDYAAVVWRPEGEPRFYPDEEGPKHWTKERHQFLMELKQEALTFARNWGADYIL

SEQ ID NO: 2620 - protein, 79 aa, Homo sapiens
MLQEWLAAVGDDYAAVVWRPEGEPRFYPDEEGPKHWTKERHQFLMELKQEALTFARNWGADYILFADTDNILTNNQTLR

SEQ ID NO: 2621 - protein, 109 aa, Homo sapiens
MLQEWLAAVGDDYAAVVWRPEGEPRFYPDEEGPKHWTKERHQFLMELKQEALTFARNWGADYILFADTDNILTNNQTLRLLMGQGLPVVAPMLDSQTYYSNFWCGITPQ

SEQ ID NO: 2622 - protein, 218 aa, Homo sapiens
MLQEWLAAVGDDYAAVVWRPEGEPRFYPDEEGPKHWTKERHQFLMELKQEALTFARNWGADYILFADTDNILTNNQTLRLLMGQGLPVVAPMLDSQTYYSNFWCGITPQGYYRRTAEYFPTKNRQRRGCFRVPMVHSTFLASLRAEGADQLAFYPPHPNYTWPFDDIIVFAYACQAAGVSVHVCNEHRYGYMNVPVKSHQGLEDERVNFIHLILEALG

SEQ ID NO: 2623 - protein, 517 aa, Homo sapiens
MLQEWLAAVGDDYAAVVWRPEGEPRFYPDEEGPKHWTKERHQFLMELKQEALTFARNWGADYILFADTDNILTNNQTLRLLMGQGLPVVAPMLDSQTYYSNFWCGITPQGYYRRTAEYFPTKNRQRRGCFRVPMVHSTFLASLRAEGADQLAFYPPHPNYTWPFDDIIVFAYACQAAGVSVHVCNEHRYGYMNVPVKSHQGLEDERVNFIHLILEALVDGPRMQASAHVTRPSKRPSKIGFDEVFVISLARRPDRRERMLASLWEMEISGRVVDAVDGWMLNSSAIRNLGVDLLPGYQDPYSGRTLTKGEVGCFLSHYSIWEEVVARGLARVLVFEDDVRFESNFRGRLERLMEDVEAEKLSWDLIYLGRKQVNPEKETAVEGLPGLVVAGYSYWTLAYALRLAGARKLLASQPLRRMLPVDEFLPIMFDQHPNEQYKAHFWPRDLVAFSAQPLLAAPTHYAGDAEWLSDTETSSPWDDDSGRLISWSGSQKTLRSPRLDLTGSSGHSLQPQPRDEL

SEQ ID NO: 2624 - protein, 517 aa, Homo sapiens [sequence omitted]

SEQ ID NO: 2625 - protein, 595 aa, Homo sapiens
MRAARAAPLLQLLLLLGPWLEAAGVAESPLPAVVLAILARNAEHSLPHYLGALERLDYPRARMALWCATDHNVDNTTEMLQEWLAAVGDDYAAVVWRPEGEPRFYPDEEGPKHWTKERHQFLMELKQEALTFARNWGADYILFADTDNILTNNQTLRLLMGQGLPVVAPMLDSQTYYSNFWCGITPQGYYRRTAEYFPTKNRQRRGCFRVPMVHSTFLASLRAEGADQLAFYPPHPNYTWPFDDIIVFAYACQAAGVSVHVCNEHRYGYMNVPVKSHQGLEDERVNFIHLILEALVDGPRMQASAHVTRPSKRPSKIGFDEVFVISLARRPDRRERMLASLWEMEISGRVVDAVDGWMLNSSAIRNLGVDLLPGYQDPYSGRTLTKGEVGCFLSHYSIWEEVVARGLARVLVFEDDVRFESNFRGRLERLMEDVEAEKLSWDLIYLGRKQVNPEKETAVEGLPGLVVAGYSYWTLAYALRLAGARKLLASQPLRRMLPVDEFLPIMFDQHPNEQYKAHFWPRDLVAFSAQPLLAAPTHYAGDAEWLSDTETSSPWDDDSGRLISWSGSQKTLRSPRLDLTGSSGHSLQPQPRDEL

SEQ ID NO: 2626 - protein, 155 aa, Homo sapiens
MTAKQCPGAGHYCPESRGGGCWQGLQILSDLATTLGMATLPSGPVFHREKPLRDGSHSLKVSQQRSRTPRPLYPAWPDSGPCGPQLVSSWADPRIPSLPKDSAEGPLCPFYLHLSTLPQLDVWVSPAPSSLAGAKYREVKQDPCRHVAQHTVGPQ

SEQ ID NO: 2627 - protein, 337 aa, Homo sapiens
MAAAGPAAGPTGPEPMPSYAQLVQRGWGSALAAARGCTDCGWGLARRGLAEHAHLAPPELLLLALGALGWTALRSAATARLFRPLAKRCCLQPRDAAKMPESAWKFLFYLGSWSYSAYLLFGTDYPFFHDPPSVFYDWTPGMAVPRDIAAAYLLQGSFYGHSIYATLYMDTWRKDSVVMLLHHVVTLILIVSSYAFRYHNVGILVLFLHDISDVQLEFTKLNIYFKSRGGSYHRLHALAADLGCLSFGFSWFWFRLYWFPLKVLYATSHCSLRTVPDIPFYFFFNALLLLLTLMNLYWFLYIVAFAAKVLTGQVHELKDLREYDTAEAQSLKPSKAE

SEQ ID NO: 2628 - protein, 350 aa, Homo sapiens
MAAAGPAAGPTGPEPMPSYAQLVQRGWGSALAAARGCTDCGWGLARRGLAEHAHLAPPELLLLALGALGWTALRSAATARLFRPLAKRCCLQPRDAAKMPESAWKFLFYLGSWSYSAYLLFGTDYPFFHDPPSVFYDWTPGMAVPRDIAAAYLLQGSFYGHSIYATLYMDTWRKDSVVMLLHHVVTLILIVSSYAFRYHNVGILVLFLHDISDVQLEFTKLNIYFKSRGGSYHRLHALAADLGCLSFGFSWFWFRLYWFPLKVLYATSHCSLRTVPDIPFYFFFNALLLLLTLMNLYWFLYIVAFAAKVLTGQVHELKDLREYDTAEAQSLKPSKAEKPLRNGLVKDKRF

SEQ ID NO: 2629 - protein, 239 aa, Homo sapiens
MPESAWKFLFYLGSWSYSAYLLFGTDYPFFHDPPSVFYDWTPGMAVPRDIAAAYLLQGSFYGHSIYATLYMDTWRKDSVVMLLHHVVTLILIVSSYAFRYHNVGILVLFLHDISDVQLEFTKLNIYFKSRGGSYHRLHALAADLGCLSFGFSWFWFRLYWFPLKVLYATSHCSLRTVPDIPFYFFFNALLLLLTLMNLYWFLYIVAFAAKVLTGQVHELKDLREYDTAEAQSLKPSKAE

SEQ ID NO: 2630 - protein, 372 aa, Homo sapiens
MPPPQQGPCGHHLLLLLALLLPSLPLTRAPVPPGPAAALLQALGLRDEPQGAPRLRPVPPVMWRLFRRRDPQETRSGSRRTSPGVTLQPCHVEELGVAGNIVRHIPDRGAPTRASEPASAAGHCPEWTVVFDLSAVEPAERPSRARLELRFAAAAAAAPEGGWELSVAQAGQGAGADPGPVLLRQLVPALGPPVRAELLGAAWARNASWPRSLRLALALRPRAPAACARLAEASLLLVTLDPRLCHPLARPRRDAEPVLGGGPGGACRARRLYVSFREVGWHRWVIAPRGFLANYCQGQCALPVALSGSGGPPALNHAVLRALMHAAAPGAADLPCCVPARLSPISVLFFDNSDNVVLRQYEDMVVDECGCR

SEQ ID NO: 2631 - protein, 216 aa, Homo sapiens
  VARIANT 1: note = misc_feature - Xaa can be any naturally occurring amino acid
XAAAYLLQGSFYGHSIYATLYMDTWRKDSVVMLLHHVVTLILIVSSYAFRYHNVGILVLFLHDISDVQLEFTKLNIYFKSRGGSYHRLHALAADLGCLSFGFSWFWFRLYWFPLKVLYATSHCSLRTVPDIPFYFFFNALLLLLTLMNLYWFLYIVAFAAKVLTGQVHELKDLREYDTAEAQSLKPSKAEEAVAQSSVTFFGTGGARCRHLTHPGL

SEQ ID NO: 2632 - protein, 44 aa, Homo sapiens
ERNFHTVPYMVGINKQEFGWLIPMMLEHPPTCMSFSTVQASHQT

SEQ ID NO: 2633 - protein, 131 aa, Homo sapiens
KELIPEATEKYLGGTDDTVKKKDLFLDLIADVMFGVPSVIVARNHREGASEEEIRLSKMVMKFWANFARNGNPNGEGLPHWPEYNQKEGYLQIGANTQAAQKLKDKEVAFWTNLFAKKAVEKPPQTEHIEL

SEQ ID NO: 2634 - protein, 568 aa, Homo sapiens
MWLRAFILATLSASAAWAGHPSSPPVVDTVHGKVLGKFVSLEGFAQPVAIFLGIPFAKPPLGPLRFTPPQPAEPWSFVKNATSYPPMCTQDPKAGQLLSELFTNRKENIPLKLSEDCLYLNIYTPADLTKKNRLPVMVWIHGGGLMVGAASTYDGLALAAHENVVVVTIQYRLGIWGFFSTGDEHSRGNWGHLDQVAALRWVQDNIASFGGNPGSVTIFGESAGGESVSVLVLSPLAKNLFHRAISESGVALTSVLVKKGDVKPLAEQIAITAGCKTTTSAVMVHCLRQKTEEELLETTLKMKFLSLDLQGDPRESQPLLGTVIDGMLLLKTPEELQAERNFHTVPYMVGINKQEFGWLIPMQLMSYPLSEGQLDQKTAMSLLWKSYPLVCIAKELIPEATEKYLGGTDDTVKKKDLFLDLIADVMFGVPSVIVARNHRDAGAPTYMYEFQYRPSFSSDMKPKTVIGDHGDELFSVFGAPFLKEGASEEEIRLSKMVMKFWANFARNGNPNGEGLPHWPEYNQKEGYLQIGANTQAAQKLKDKEVAFWTNLFAKKAVEKPPQTEHIEL

SEQ ID NO: 2635 - protein, 567 aa, Homo sapiens
MWLRAFILATLSASAAWGHPSSPPVVDTVHGKVLGKFVSLEGFAQPVAIFLGIPFAKPPLGPLRFTPPQPAEPWSFVKNATSYPPMCTQDPKAGQLLSELFTNRKENIPLKLSEDCLYLNIYTPADLTKKNRLPVMVWIHGGGLMVGAASTYDGLALAAHENVVVVTIQYRLGIWGFFSTGDEHSRGNWGHLDQVAALRWVQDNIASFGGNPGSVTIFGESAGGESVSVLVLSPLAKNLFHRAISESGVALTSVLVKKGDVKPLAEQIAITAGCKTTTSAVMVHCLRQKTEEELLETTLKMKFLSLDLQGDPRESQPLLGTVIDGMLLLKTPEELQAERNFHTVPYMVGINKQEFGWLIPMQLMSYPLSEGQLDQKTAMSLLWKSYPLVCIAKELIPEATEKYLGGTDDTVKKKDLFLDLIADVMFGVPSVIVARNHRDAGAPTYMYEFQYRPSFSSDMKPKTVIGDHGDELFSVFGAPFLKEGASEEEIRLSKMVMKFWANFARNGNPNGEGLPHWPEYNQKEGYLQIGANTQAAQKLKDKEVAFWTNLFAKKAVEKPPQTEHIEL

SEQ ID NO: 2636 - protein, 566 aa, Homo sapiens
MWLRAFILATLSASAAWGHPSSPPVVDTVHGKVLGKFVSLEGFAQPVAIFLGIPFAKPPLGPLRFTPPQPAEPWSFVKNATSYPPMCTQDPKAGQLLSELFTNRKENIPLKLSEDCLYLNIYTPADLTKKNRLPVMVWIHGGGLMVGAASTYDGLALAAHENVVVVTIQYRLGIWGFFSTGDEHSRGNWGHLDQVAALRWVQDNIASFGGNPGSVTIFGESAGGESVSVLVLSPLAKNLFHRAISESGVALTSVLVKKGDVKPLAEQIAITAGCKTTTSAVMVHCLRQKTEEELLETTLKMKFLSLDLQGDPRESQPLLGTVIDGMLLLKTPEELQAERNFHTVPYMVGINKQEFGWLIPMLMSYPLSEGQLDQKTAMSLLWKSYPLVCIAKELIPEATEKYLGGTDDTVKKKDLFLDLIADVMFGVPSVIVARNHRDAGAPTYMYEFQYRPSFSSDMKPKTVIGDHGDELFSVFGAPFLKEGASEEEIRLSKMVMKFWANFARNGNPNGEGLPHWPEYNQKEGYLQIGANTQAAQKLKDKEVAFWTNLFAKKAVEKPPQTEHIEL

SEQ ID NO: 2637 - protein, 84 aa, Homo sapiens
  VARIANT 1: note = misc_feature - Xaa can be any naturally occurring amino acid
XRQKTEEELLETTLKMKFLSLDLQGDPRESQPLLGTVIDGMLLLKTPEELQAERNFHTVPYMVGINKQEFGWLIPMGTADISVY

SEQ ID NO: 2638 - protein, 210 aa, Homo sapiens
MEQMSREDMLAISTPVLTSLDVPPEMMPTVIDEYLGSNSDAQAKCQAFQEFMGDVFINVPTVSFSRYLRDSGSPVFFYEFQHRPSSFAKIKPAWVKADHGAEGAFVFGGPFLMDESSRLAFPEATEEEKQLSLTMMAQWTHFARTGDPNSKALPPWPQFNQAEQYLEINPVPRAGQKFREAWMQFWSETLPSKIQQWHQKQKNRKAQEDL

SEQ ID NO: 2639 - protein, 571 aa, Homo sapiens
MERAVRVESGVLVGVVCLLLACPATATGPEVAQPEVDTTLGRVRGRQVGVKGTDRLVNVFLGIPFAQPPLGPDRFSAPHPAQPWEGVRDASTAPPMCLQDVESMNSSRFVLNGKQQIFSVSEDCLVLNVYSPAEVPAGSGRPVMVWVHGGALITGAATSYDGSALAAYGDVVVVTVQYRLGVLGFFSTGDEHAPGNQGFLDVVAALRWVQENIAPFGGDLNCVTVFGGSAGGSIISGLVLSPVAAGLFHRAITQSGVITTPGIIDSHPWPLAQKIANTLACSSSSPAEMVQCLQQKEGEELVLSKKLKNTIYPLTVDGTVFPKSPKELLKEKPFHSVPFLMGVNNHEFSWLIPRGWGLLDTMEQMSREDMLAISTPVLTSLDVPPEMMPTVIDEYLGSNSDAQAKCQAFQEFMGDVFINVPTVSFSRYLRDSGSPVFFYEFQHRPSSFAKIKPAWVKADHGAEGAFVFGGPFLMDESSRLAFPEATEEEKQLSLTMMAQWTHFARTGDPNSKALPPWPQFNQAEQYLEINPVPRAGQKFREAWMQFWSETLPSKIQQWHQKQKNRKAQEDL

SEQ ID NO: 2640 - protein, 568 aa, Homo sapiens
MERAVRVESGVLVGVVCLLLACPATATGPEVAQPEVDTTLGRVRGRQVGVKGTDRLVNVFLGIPFAQPPLGPDRFSAPHPAQPWEGVRDASTAPPMCLQDVESMNSSRFVLNGKQQIFSVSEDCLVLNVYSPAEVPAGSGRPVMVWVHGGALITGAATSYDGSALAAYGDVVVVTVQYRLGVLGFFSTGDEHAPGNQGFLDVVAALRWVQENIAPFGGDLNCVTVFGGSAGGSIISGLVLSPVAAGLFHRAITQSGVITTPGIIDSHPWPLAQKIANTLACSSSSPAEMVQCLQQKEGEELVLSKKLKNTIYPLTVDGTVFPKSPKELLKEKPFHSVPFLMGVNNHEFSWLIPRGWGLLDTMEQMSREDMLAISTPVLTSLDVPPEMMPTVIDEYLGSNSDAQAKCQAFQEFMGDVFINVPTVSFSRYLRDSGSPVFFYEFQHRPSSFAKIKPAWVKADHGAEGAFVFGGPFLMDESSRLEATEEEKQLSLTMMAQWTHFARTGDPNSKALPPWPQFNQAEQYLEINPVPRAGQKFREAWMQFWSETLPSKIQQWHQKQKNRKAQEDL

SEQ ID NO: 2641 - protein, 379 aa, Homo sapiens
MERAVRVESGVLVGVVCLLLACPATATGPEVAQPEVDTTLGRVRGRQVGVKGTDRLVNVFLGIPFAQPPLGPDRFSAPHPAQPWEGVRDASTAPPMCLQDVESMNSSRFVLNGKQQIFSVSEDCLVLNVYSPAEVPAGSGRPVMVWVHGGALITGAATSYDGSALAAYGDVVVVTVQYRLGVLGFFSTGDEHAPGNQGFLDVVAALRWVQENIAPFGGDLNCVTVFGGSAGGSIISGLVLSPVAAGLFHRAITQSGVITTPGIIDSHPWPLAQKIANTLACSSSSPAEMVQCLQQKEGEELVLSKKLKNTIYPLTVDGTVFPKSPKELLKEKPFHSVPFLMGVNNHEFSWLIPRILEALSFSMSSSIDPVLLRRSNLPG

SEQ ID NO: 2642 - protein, 40 aa, Homo sapiens
MERAVRVESGVLVGVVCLLLACPATATGYQDAVWARSCSA

SEQ ID NO: 2643 - protein, 454 aa, Homo sapiens
GKQMHVGKTPIQVFLGVPFSRPPLGILRFAPPEPPEPWKGIRDATTYPPGCLQESWGQLASMYVSTRERYKWLRFSEDCLYLNVYAPARAPGDPQLPVMVWFPGGAFIVGAASSYEGSDLAAREKVVLVFLQHRLGIFGFLSTDDSHARGNWGLLDQMAALRWVQENIAAFGGDPGNVTLFGQSAGAMSISGLMMSPLASGLFHRAISQSGTALFRLFITSNPLKVAKKVAHLAGCNHNSTQILVNCLRALSGTKVMRVSNKMRFLQLNFQRDPEEIIWSMSPVVDGVVIPDDPLVLLTQGKVSSVPYLLGVNNLEFNWLLPYNITKEQVPLVVEEYLDNVNEHDWKMLRNRMMDIVQDATFVYATLQTAHYHRGLSMGKEKALSLQMMKYWANFARTGNPNDGNLPCWPRYNKDEKYLQLDFTTRVGMKLKEKKMAFWMSLYQSQRPEKQRQF

SEQ ID NO: 2644 - protein, 468 aa, Homo sapiens
MRWILCWSLTLCLMAQTALGALHTKRPQVVTKYGTLQGKQMHVGKTPIQVFLGVPFSRPPLGILRFAPPEPPEPWKGIRDATTYPPGCLQESWGQLASMYVSTRERYKWLRFSEDCLYLNVYAPARAPGDPQLPVMVWFPGGAFIVGAASSYEGSDLAAREKVVLVFLQHRLGIFGFLSTDDSHARGNWGLLDQMAALRWVQENIAAFGGDPGNVTLFGQSAGAMSISGLMMSPLASGLFHRAISQSGTALFRLFITSNPLKVAKKVAHLAGCNHNSTQILVNCLRALSGTKVMRVSNKMRFLQLNFQRDPEEIIWSMSPVVDGVVIPDDPLVLLTQGKVSSVPYLLGVNNLEFNWLLPYIMKFPLNRQAMRKETITKMLWSTRTLLNITKEQVPLVVEEYLDNVNEHDWKMLRNRMMDIVQDATFVYATLQTAHYHRETPMMGICPAGHATTRMKSTCSWILPQEWA

SEQ ID NO: 2645 - protein, 374 aa, Homo sapiens
MYVSTRERYKWLRFSEDCLYLNVYAPARAPGDPQLPVMVWFPGGAFIVGAASSYEGSDLAAREKVVLVFLQHRLGIFGFLRWRGRTDDSHARGNWGLLDQMAALRWVQENIAAFGGDPGNVTLFGQSAGAMSISGLMMSPLASGLFHRAISQSGTALFRLFITSNPLKVAKKVAHLAGCNHNSTQILVNCLRALSGTKVMRVSNKMRFLQLNFQRDPEEIIWSMSPVVDGVVIPDDPLVLLTQGKVSSVPYLLGVNNLEFNWLLPYIMKFPLNRQAMRKETITKMLWSTRTLLNITKEQVPLVVEEYLDNVNEHDWKMLRNRMMDIVQDATFVYATLQTAHYHRETPMMGICPAGHATTRMKSTCSWILPQEWA

SEQ ID NO: 2646 - protein, 135 aa, Homo sapiens
MYVSTRERYKWLRFSEDCLYLNVYAPARAPGDPQLPVMVWFPGGAFIVGAASSYEGSDLAAREKVVLVFLQHRLGIFGFLRWRGRYPLGPQLWPERRGLARTTATRAGTGGCWTRWRLCAGCRRTSQPSGETQEM

SEQ ID NO: 2647 - protein, 463 aa, Homo sapiens
MYVSTRERYKWLRFSEDCLYLNVYAPARAPGDPQLPVMVWFPGGAFIVGAASSYEGSDLAAREKVVLVFLQHRLGIFGFLSTDDSHARGNWGLLDQMAALRWVQENIAAFGGDPGNVTLFGQSAGAMSISGLMMSPLASGLFHRAISQSGTALFRLFITSNPLKVAKKVAHLAGCNHNSTQILVNCLRALSGTKVMRVSNKMRFLQLNFQRDPEEIIWSMSPVVDGVVIPDDPLVLLTQGKVSSVPYLLGVNNLEFNWLLPYIMKFPLNRQAMRKETITKMLWSTRTLLNITKEQVPLVVEEYLDNVNEHDWKMLRNRMMDIVQDATFVYATLQTAHYHRDAGLPVYLYEFEHHARGIIVKPRTDGADHGDEMYFLFGGPFATGLSMGKEKALSLQMMKYWANFARTGNPNDGNLPCWPRYNKDEKYLQLDFTTRVGMKLKEKKMAFWMSLYQSQRPEKQRQF

SEQ ID NO: 2648 - protein, 177 aa, Homo sapiens
  VARIANT 1: note = misc_feature - Xaa can be any naturally occurring amino acid
XALHTKRPQVVTKYGTLQGKQMHVGKTPIQVFLGVPFSRPPLGILRFAPPEPPEPWKGIRDATTYPPGWSLALSPGWSAVARSRLTATSASRVQASLLPQPLSIWGYRCLQESWGQLASMYVSTRERYKWLRFSEDCLYLNVYAPARAPGDPQLPVSDGLVPGRRLHRGRCFFVRGL

SEQ ID NO: 2649 - protein, 604 aa, Homo sapiens
MAVLVCPASCHGLKEFRIRRGMWRLCLVYYFYPASSTLYVLRIDVLNYTSKDEGPSAEGPQRNTRLGWIQGKQVTVLGSPVPVNVFLGVPFAAPPLGSLRFTNPQPASPWDNLREATSYPNLCLQNSEWLLLDQHMLKVHYPKFGVSEDCLYLNIYAPAHADTGSKLPVLVWFPGGAFKTGSASIFDGSALAAYEDVLVVVVQYRLGIFGFFTTWDQHAPGNWAFKDQVAALSWVQKNIEFFGGDPSSVTIFGESAGAISVSSLILSPMAKGLFHKAIMESGVAIIPYLEAHDYEKSEDLQVVAHFCGNNASDSEALLRCLRTKPSKELLTLSQKTKSFTRVVDGAFFPNEPLDLLSQKAFKAIPSIIGVNNHECGFLLPMKEAPEILSGSNKSLALHLIQNILHIPPQYLHLVANEYFHDKHSLTEIRDSLLDLLGDVFFVVPALITARYHRDAGAPVYFYEFRHRPQCFEDTKPAFVKADHADEVRFVFGGAFLKGDIVMFEGATEEEKLLSRKMMKYWATFARTGNPNGNDLSLWPAYNLTEQYLQLDLNMSLGQRLKEPRVDFWTSTIPLILSASDMLHSPLSSLTFLSLLQPFFFFCAP

SEQ ID NO: 2650 - protein, 355 aa, Homo sapiens
MEDDLSWRSWSLLCMEILSPMAKGLFHKAIMESGVAIIPYLEAHDYEKSEDLQVVAHFCGNNASDSEALLRCLRTKPSKELLTLSQKTKSFTRVVDGAFFPNEPLDLLSQKAFKAIPSIIGVNNHECGFLLPMEAPEILSGSNKSLALHLIQNILHIPPQYLHLVANEYFHDKHSLTEIRDSLLDLLGDVFFVVPALITARYHRDAGAPVYFYEFRHRPQCFEDTKPAFVKADHADEVRFVFGGAFLKGDIVMFEGATEEEKLLSRKMMKYWATFARTGNPNGNDLSLWPAYNLTEQYLQLDLNMSLGQRLKEPRVDFWTSTIPLILSASDMLHSPLSSLTFLSLLQPFFFFCAP

SEQ ID NO: 2651 - protein, 75 aa, Homo sapiens
MLKVHYPKFGVSEDCLYLNIYAPAHADTGSKLPVLVWFPGGAFKTGSASIFDGSALAAYEDVLVVVVQYRLGIFG

SEQ ID NO: 2652 - protein, 78 aa, Homo sapiens
MLKVHYPKFGVSEDCLYLNIYAPAHADTGSKLPVLVWFPGGAFKTGSASIFDGSALAAYEDVLVVVVQYRLGIFGFFT

SEQ ID NO: 2653 - protein, 469 aa, Homo sapiens
MLKVHYPKFGVSEDCLYLNIYAPAHADTGSKLPVLVWFPGGAFKTGSASIFDGSALAAYEDVLVVVVQYRLGIFGFFTTWDQHAPGNWAFKDQVAALSWVQKNIEFFGGDPSSVTIFGESAGAISVSSLILSPMAKGLFHKAIMESGVAIIPYLEAHDYEKSEDLQVVAHFCGNNASDSEALLRCLRTKPSKELLTLSQKTKSFTRVVDGAFFPNEPLDLLSQKAFKAIPSIIGVNNHECGFLLPMKEAPEILSGSNKSLALHLIQNILHIPPQYLHLVANEYFHDKHSLTEIRDSLLDLLGDVFFVVPALITARYHRDAGAPVYFYEFRHRPQCFEDTKPAFVKADHADEVRFVFGGAFLKGDIVMFEGATEEEKLLSRKMMKYWATFARTGNPNGNDLSLWPAYNLTEQYLQLDLNMSLGQRLKEPRVDFWTSTIPLILSASDMLHSPLSSLTFLSLLQPFFFFCAP

SEQ ID NO: 2654 - protein, 575 aa, Homo sapiens
MSGNWVHPGQILIWAIWVLAAPTKGPSAEGPQRNTRLGWIQGKQVTVLGSPVPVNVFLGVPFAAPPLGSLRFTNPQPASPWDNLREATSYPNLCLQNSEWLLLDQHMLKVHYPKFGVSEDCLYLNIYAPAHADTGSKLPVLVWFPGGAFKTGSASIFDGSALAAYEDVLVVVVQYRLGIFGFFTTWDQHAPGNWAFKDQVAALSWVQKNIEFFGGDPSSVTIFGESAGAISVSSLILSPMAKGLFHKAIMESGVAIIPYLEAHDYEKSEDLQVVAHFCGNNASDSEALLRCLRTKPSKELLTLSQKTKSFTRVVDGAFFPNEPLDLLSQKAFKAIPSIIGVNNHECGFLLPMKEAPEILSGSNKSLALHLIQNILHIPPQYLHLVANEYFHDKHSLTEIRDSLLDLLGDVFFVVPALITARYHRDAGAPVYFYEFRHRPQCFEDTKPAFVKADHADEVRFVFGGAFLKGDIVMFEGATEEEKLLSRKMMKYWATFARTGNPNGNDLSLWPAYNLTEQYLQLDLNMSLGQRLKEPRVDFWTSTIPLILSASDMLHSPLSSLTFLSLLQPFFFFCAP

SEQ ID NO: 2655 - protein, 525 aa, Homo sapiens
MSGNWVHPGQILIWAIWVLAAPTKGPSAEGPQRNTRLGWIQGKQVTVLGSPVPVNVFLGVPFAAPPLGSLRFTNPQPASPWDNLREATSYPNLCLQNSEWLLLDQHMLKVHYPKFGVSEDCLYLNIYAPAHADTGSKLPVLVWFPGGAFKTGSASIFDGSALAAYEDVLVVVVQYRLGIFGFFTTWDQHAPGNWAFKDQVAALSWVQKNIEFFGGDPSSVTIFGESAGAISVSSLILSPMAKGLFHKAIMESGVAIIPYLEAHDYEKSEDLQVVAHFCGNNASDSEALLRCLRTKPSKELLTLSQKTKSFTRVVDGAFFPNEPLDLLSQKAFKAIPSIIGVNNHECGFLLPMKEAPEILSGSNKSLALHLIQNILHIPPQYLHLVANEYFHDKHSLTEIRDSLLDLLGDVFFVVPALITARYHREGATEEEKLLSRKMMKYWATFARTGNPNGNDLSLWPAYNLTEQYLQLDLNMSLGQRLKEPRVDFWTSTIPLILSASDMLHSPLSSLTFLSLLQPFFFFCAP

SEQ ID NO: 2656 - protein, 545 aa, Homo sapiens
MSGNWVHPGQILIWAIWVLAAPTKGPSAEGPQRNTRLGWIQGKQVTVLGSPVPVNVFLGVPFAAPPLGSLRFTNPQPASPWDNLREATSYPNLCLQNSEWLLLDQHMLKVLVWFPGGAFKTGSASIFDGSALAAYEDVLVVVVQYRLGIFGFFTTWDQHAPGNWAFKDQVAALSWVQKNIEFFGGDPSSVTIFGESAGAISVSSLILSPMAKGLFHKAIMESGVAIIPYLEAHDYEKSEDLQVVAHFCGNNASDSEALLRCLRTKPSKELLTLSQKTKSFTRVVDGAFFPNEPLDLLSQKAFKAIPSIIGVNNHECGFLLPMKEAPEILSGSNKSLALHLIQNILHIPPQYLHLVANEYFHDKHSLTEIRDSLLDLLGDVFFVVPALITARYHRDAGAPVYFYEFRHRPQCFEDTKPAFVKADHADEVRFVFGGAFLKGDIVMFEGATEEEKLLSRKMMKYWATFARTGNPNGNDLSLWPAYNLTEQYLQLDLNMSLGQRLKEPRVDFWTSTIPLILSASDMLHSPLSSLTFLSLLQPFFFFCAP

SEQ ID NO: 2657 - protein, 433 aa, Homo sapiens
MLAATVLTLALLGNAHACSKGTSHEAGIVCRITKPALLVLNHETAKVIQTAFQRASYPDITGEKAMMLLGQVKYGLHNIQISHLSIASSQVELVEAKSIDVSIQNVSVVFKGTLKYGYTTAWWLGIDQSIDFEIDSAIDLQINTQLTCDSGRVRTDAPDCYLSFHKLLLHLQGEREPGWIKQLFTNFISFTLKLVLKGQICKEINVISNIMADFVQTRAASILSDGDIGVDISLTGDPVITASYLESHHKAVLETWGFNTNQEIFQEVVGGFPSQAQVTVHCLKMPKISCQNKGVVVNSSVMVKFLFPRPDQQHSVAYTFEEDIVTTVQASYSKKKLFLSLLDFQITPKTVSNLTESSSESVQSFLQSMITAVGIPEVMSRLEVVFTALMNSKGVSLFDIINPEIITRDGFLLLQMDFGFPEHLLVDFLQSLS

SEQ ID NO: 2658 - protein, 493 aa, Homo sapiens [sequence omitted]

SEQ ID NO: 2659 - protein, 428 aa, Homo sapiens
MMLLGQVKYGLHNIQISHLSIASSQVELVEAKSIDVSIQNVSVVFKGTLKYGYTTAWWLGIDQSIDFEIDSAIDLQINTQLTCDSGRVRTDAPDCYLSFHKLLLHLQGEREPGWIKQLFTNFISFTLKLVLKGQICKEINVISNIMADFVQTRAASILSDGDIGVDISLTGDPVITASYLESHHKGHFIYKNVSEDLPLPTFSPTLLGDSRMLYFWFSERVFHSLAKVAFQDGRLMLSLMGDEFKAVLETWGFNTNQEIFQEVVGGFPSQAQVTVHCLKMPKISCQNKGVVVNSSVMVKFLFPRPDQQHSVAYTFEEDIVTTVQASYSKKKLFLSLLDFQITPKTVSNLTESSSESVQSFLQSMITAVGIPEVMSRLEVVFTALMNSKGVSLFDIINPEIITRDGFLLLQMDFGFPEHLLVDFLQSLS

SEQ ID NO: 2660 - protein, 784 aa, Homo sapiens
METAIWRRSYISLISSERPVHNWRGKSVQKKQAESKSQIKLHTQSAPFGLCPKDMMLTQAPSSVVRSRNSRNHTVNSGGSCLSASTVAIPAINDSSAAMSACSTISAQPASSMDTQMHSPKKQERVNKRVIWGIEVAEELHWKGWELGKETTRNLVLKNRSLKLQKMKYRPPKTKFFFTVIPQPIFLSPGITLTLPIVFRPLEAKEYMDQLWFEKAEGMFCVGLRATLPCHRLICRPPSLQLPMCAVGDTTEAFFCLDNVGDLPTFFTWEFSSPFQMLPATGLLEPGQASQIKVTFQPLTAVIYEVQATCWYGAGSRQRSSIQLQAVAKCAQLLVSIKHKCPEDQDAEGFQKLLYFGSVAVGCTSERQIRLHNPSAVNAPFRIEISPDELAEDQAFSCPTAHGIVLPGEKKCVSVFFHPKTLDTRTVDYCSIMPSGCASKTLLKVVGFCRGPAVSLQHYCVNFSWVNLGERSEQPLWIENQSDCTAHFQFAIDCLESVFTIRPAFGTLVGKARMTLHCAFQPTHPIICFRRVACLIHHQDPLFLDLMGTCHSDSTKPAILKPQHLTWYRTHLARGLTLYPPDILDAMLKEKKLAQDQNGALMIPIQDLEDMPAPQYPYIPPMTEFFFDGTSDITIFPPPISVEPVEVDFGACPGPEAPNPVPLCLMNHTKGKIMVVWTRRSDCPFWVTPESCDVPPLKSMAMRLHFQPPHPNCLYTVELEAFAIYKVCARNEREECGVSARSLSGLVGWQEVTEGSFRLHPLRARLSLGWTVTPMSLSPPKLLA

SEQ ID NO: 2661 - protein, 234 aa, Homo sapiens
METAIWRRSYISLISSERPVHNWRGKSVQKKQAESKSQIKLHTQSAPFGLCPKDMMLTQAPSSVVRSRNSRNHTVNSGGSCLSASTVAIPAINDSSAAMSACSTISAQPASSMDTQMHSPKKQERVNKRVIWGIEVAEELHWKGWELGKETTRNLVLKNRSLKLQKMKYRPPKTKFFFTVIPQPIFLSPGITLTLPIVFRPLEAPLTAVIYEVQATCWYGAGSRQRSSIQLQAV

SEQ ID NO: 2662 - protein, 1925 aa, Homo sapiens
MFTLTGCRLVEKTQKVENPSVSFASSFPLIPLLLRGKSVQKKQAESKSQIKLHTQSAPFGLCPKDMMLTQAPSSVVRSRNSRNHTVNSGGSCLSASTVAIPAINDSSAAMSACSTISAQPASSMDTQMHSPKKQERVNKRVIWGIEVAEELHWKGWELGKETTRNLVLKNRSLKLQKMKYRPPKTKFFFTVIPQPIFLSPGITLTLPIVFRPLEAKEYMDQLWFEKAEGMFCVGLRATLPCHRLICRPPSLQLPMCAVGDTTEAFFCLDNVGDLPTFFTWEFSSPFQMLPATGLLEPGQASQIKVTFQPLTAVIYEVQATCWYGAGSRQRSSIQLQAVAKCAQLLVSIKHKCPEDQDAEGFQKLLYFGSVAVGCTSERQIRLHNPSAVNAPFRIEISPDELAEDQAFSCPTAHGIVLPGEKKCVSVFFHPKTLDTRTVDYCSIMPSGCASKTLLKVVGFCRGPAVSLQHYCVNFSWVNLGERSEQPLWIENQSDCTAHFQFAIDCLESVFTIRPAFGTLVGKARMTLHCAFQPTHPIICFRRVACLIHHQDPLFLDLMGTCHSDSTKPAILKPQHLTWYRTHLARGLTLYPPDILDAMLKEKKLAQDQNGALMIPIQDLEDMPAPQYPYIPPMTEFFFDGTSDITIFPPPISVEPVEVDFGACPGPEAPNPVPLCLMNHTKGKIMVVWTRRSDCPFWVTPESCDVPPLKSMAMRLHFQPPHPNCLYTVELEAFAIYKVLQSYSNIEEDCTMCPSWCLTVRARGHSYFAGFEHHIPQYSLDVPKLFPAVSSGEPTYRSLLLVNKDCKLLTFSLAPQRGSDVILRPTSGLVAPGAHQIILICTYPEGSSWKQHTFYLQCNASPQYLKEVSMYSREEPLQLKLDTHKSLYFKPTWVGCSSTSPFTFRNPSRLPLQFEWRVSEQHRKLLAVQPSRGLIQPNERLTLTWTFSPLEETKYLFQVGMWVWEAGLSPNANPAATTHYMLRLVGVGLTSSLSAKEKELAFGNVLVNSKQSRFLVLLNDGNCTLYYRLYLEQGSPEAVDNHPLALQLDRTEGSMPPRSQDTICLTACPKQRSQYSWTITYSLLSHRDNKAGEKQELCCVSLVAVYPLLSILDVSSMGSAEGITRKHLWRLFSLDLLNSYLERDPTPCELTYKVPTRHSMSQIPPVLTPLRLDFNFGAAPFKAPPSVVFLALKNSGVVSLDWAFLLPSDQRIDVELWAEQAELNSTELHQMRVQDNCLFSISPKAGSLSPGQEQMVELKYSHLFIGTDHLPVLFKVSHGREILLNFIGVTVKPEQKYVHFTSTTHQFIPIPIGDTLPPRQIYELYNGGSVPVTYEVQTDVLSQVQEKNFDHPIFCCLNPKGEIQPGSTARVLWIFSPIEAKTYTVDVPIHILGWNSALIHFQGVGYNPHMMGDTAPFHNISSWDNSSIHSRLVVPGQNVFLSQSHISLGNIPVQSKCSRLLFLNNISKNEEIAFSWQPSPLDFGEVSVSPMIGVVAPEETVPFVVTLRASVHASFYSADLVCKLYSQQLMRQYHKELQEWKDEKVRQEVEFTITDMKVKKRTCCTACEPARKYKTLPPIKNQQSVSRPASWKLQTPKEEVSWPCPQPPSPGMLCLGLTARAHATDYFLANFFSEFPCHFLHRELPKRKAPREESETSEEKSPNKWGPVSKQKKQLLVDILTTIIRGLLEDKNFHEAVDQSLVEQVPYFRQFWNEQSTKFMDQKNSLYLMPILPVPSSSWEDGKGKQPKEDRPEHYPGLGKKEEGEEEKGEEEEEELEEEEEEEEETEEEELGKEEIEEKEEERDEKEEKVSWAGIGPTPQPESQESMQWQWQQQLNVMVKEEQEQDEKEAIRRLPAFANLQEALLENMIQNILVEASRGEVVLTSRPRVIALPPFCVPRSLTPDTLLPTQQAEVLHPVVPLPTDLP

SEQ ID NO: 2663 - protein, 1925 aa, Homo sapiens; identical to SEQ ID NO: 2662

SEQ ID NO: 2664 - protein, 114 aa, Homo sapiens
MMLTQAPSSVVRSRNSRNHTVNSGGSCLSASTVAIPAINDSSAAMSACSTISAQPASSMDTQMHSPKKQERVNKRVIWGIEVAEELHWKGWELGKETTRNLVLKNRSLKLQKMK

SEQ ID NO: 2665 - protein, 117 aa, Homo sapiens
MMLTQAPSSVVRSRNSRNHTVNSGGSCLSASTVAIPAINDSSAAMSACSTISAQPASSMDTQMHSPKKQERVNKRVIWGIEVAEELHWKGWELGKETTRNLVLKNRSLKLQKMKYRP

SEQ ID NO: 2666 - protein, 730 aa, Homo sapiens
MMLTQAPSSVVRSRNSRNHTVNSGGSCLSASTVAIPAINDSSAAMSACSTISAQPASSMDTQMHSPKKQERVNKRVIWGIEVAEELHWKGWELGKETTRNLVLKNRSLKLQKMKYRPPKTKFFFTVIPQPIFLSPGITLTLPIVFRPLEAKEYMDQLWFEKAEGMFCVGLRATLPCHRLICRPPSLQLPMCAVGDTTEAFFCLDNVGDLPTFFTWEFSSPFQMLPATGLLEPGQASQIKVTFQPLTAVIYEVQATCWYGAGSRQRSSIQLQAVAKCAQLLVSIKHKCPEDQDAEGFQKLLYFGSVAVGCTSERQIRLHNPSAVNAPFRIEISPDELAEDQAFSCPTAHGIVLPGEKKCVSVFFHPKTLDTRTVDYCSIMPSGCASKTLLKVVGFCRGPAVSLQHYCVNFSWVNLGERSEQPLWIENQSDCTAHFQFAIDCLESVFTIRPAFGTLVGKARMTLHCAFQPTHPIICFRRVACLIHHQDPLFLDLMGTCHSDSTKPAILKPQHLTWYRTHLARGLTLYPPDILDAMLKEKKLAQDQNGALMIPIQDLEDMPAPQYPYIPPMTEFFFDGTSDITIFPPPISVEPVEVDFGACPGPEAPNPVPLCLMNHTKGKIMVVWTRRSDCPFWVTPESCDVPPLKSMAMRLHFQPPHPNCLYTVELEAFAIYKVCARNEREECGVSARSLSGLVGWQEVTEGSFRLHPLRARLSLGWTVTPMSLSPPKLLA

SEQ ID NO: 2667 - protein, 164 aa, Homo sapiens
MMLTQAPSSVVRSRNSRNHTVNSGGSCLSASTVAIPAINDSSAAMSACSTISAQPASSMDTQMHSPKKQERVNKRVIWGIEVAEELHWKGWELGKETTRNLVLKNRSLKLQKMKYRYQYKGSRTQCHSLEPRKQALFKTKQNKQKKPLTCHIKASECLKYVQYE

SEQ ID NO: 2668 - protein, 271 aa, Homo sapiens
MTLHCAFQPTHPIICFRRVACLIHHQDPLFLDLMGTCHSDSTKPAILKPQHLTWYRTHLARGLTLYPPDILDAMLKEKKLAQDQNGALMIPIQDLEDMPAPQYPYIPPMTEFFFDGTSDITIFPPPISVEPVEVDFGACPGPEAPNPVPLCLMNHTKGKIMVVWTRRSDCPFWVTPESCDVPPLKSMAMRLHFQPPHPNCLYTVELEAFAIYKVCARNEREECGVSARSLSGLVGWQEVTEGSFRLHPLRARLSLGWTVTPMSLSPPKLLA

SEQ ID NO: 2669 - protein, 127 aa, Homo sapiens
  VARIANT 1: note = misc_feature - Xaa can be any naturally occurring amino acid
XKQELCCVSLVAVYPLLSILDVSSMGSAEGITRKHLWRLFSLDLLNSYLERDPTPCELTYKVPTRHSMSQIPPVLTPLRLDFNFGAAPFKAPPSVVFLALKNSGVVSLDWYGLKGATGGPGRQVPRG

SEQ ID NO: 2670 - protein, 144 aa, Homo sapiens
MGSNLSPQLCLMPFILGLLSGGVTTTPWSLARPQGSCSLEGVEIKGGSFRLLQEGQALEYVCPSGFYPYPVQTRTCRSTGSWSTLKTQDQKTVRKAECRAIHCPRPHDFENGEYWPRSPYYNVSDEISFHCYDGYTLRGSANRT

SEQ ID NO: 2671 - protein, 764 aa, Homo sapiens
MGSNLSPQLCLMPFILGLLSGGVTTTPWSLARPQGSCSLEGVEIKGGSFRLLQEGQALEYVCPSGFYPYPVQTRTCRSTGSWSTLKTQDQKTVRKAECRAIHCPRPHDFENGEYWPRSPYYNVSDEISFHCYDGYTLRGSANRTCQVNGRWSGQTAICDNGAGYCSNPGIPIGTRKVGSQYRLEDSVTYHCSRGLTLRGSQRRTCQEGGSWSGTEPSCQDSFMYDTPQEVAEAFLSSLTETIEGVDAEDGHGPGEQQKRKIVLDPSGSMNIYLVLDGSDSIGASNFTGAKKCLVNLIEKVASYGVKPRYGLVTYATYPKIWVKVSEADSSNADWVTKQLNEINYEDHKLKSGTNTKKALQAVYSMMSWPDDVPPEGWNRTRHVIILMTDGLHNMGGDPITVIDEIRDLLYIGKDRKNPREDYLDVYVFGVGPLVNQVNINALASKKDNEQHVFKVKDMENLEDVFYQMIDESQSLSLCGMVWEHRKGTDYHKQPWQAKISVIRPSKGHESCMGAVVSEYFVLTAAHCFTVDDKEHSIKVSVGGEKRDLEIEVVLFHPNYNINGKKEAGIPEFYDYDVALIKLKNKLKYGQTIRPICLPCTEGTTRALRLPPTTTCQQQKEELLPAQDIKALFVSEEEKKLTRKEVYIKNGDKKGSCERDAQYAPGYDKVKDISEVVTPRFLCTGGVSPYADPNTCRGDSGGPLIVHKRSRFIQVGVISWGVVDVCKNQKRQKQVPAHARDFHINLFQVLPWLKEKLQDEDLGFL

SEQ ID NO: 2672 - protein, 86 aa, Homo sapiens
MGSNLSPQLCLMPFILGLLSGVRVSFWLLPVPCADTYLQIYGVLEHPEDSRPKDCQEGRVQSNPLSKTTRLRERGILAPVSLLQCE

SEQ ID NO: 2673 - protein, 305 aa, Homo sapiens
  VARIANT 1: note = misc_feature - Xaa can be any naturally occurring amino acid
XDGLHNMGGDPITVIDEIRDLLYIGKDRKNPREDYLDVYVFGVGPLVNQVNINALASKKDNEQHVFKVKDMENLEDVFYQMIGGEKRDLEIEVVLFHPNYNINGKKEAGIPEFYDYDVALIKLKNKLKYGQTIRPICLPCTEGTTRALRLPPTTTCQQQKEELLPAQDIKALFVSEEEKKLTRKEVYIKNGDKKGSCERDAQYAPGYDKVKDISEVVTPRFLCTGGVSPYADPNTCRGDSGGPLIVHKRSRFIQVGVISWGVVDVCKNQKRQKQVPAHARDFHINLFQVLPWLKEKLQDEDLGFL

SEQ ID NO: 2674 - protein, 68 aa, Homo sapiens
  VARIANT 1: note = misc_feature - Xaa can be any naturally occurring amino acid
XPRFLCTGGVSPYADPNTCRGDSGGPLIVHKRSRFIQVSPPFPIWGDAKWSAWAPKQESSMHVASNSR

SEQ ID NO: 2675 - protein, 148 aa, Homo sapiens
MTWRHHVRLLFTVSLALQIINLGNSYQREKHNGGREEVTKVATQKHRQSPLNWTSSHFGEVTGSAEGWGPEEPLPYSRAFGEDPKDFLASHAHGPSAGGAPSLLLLLPCALLHRLLRPDAPAHPRSLVPSVLQRERRPCGRPGLGHRL

SEQ ID NO: 2676 - protein, 223 aa, Homo sapiens
MTWRHHVRLLFTVSLALQIINLGNSYQREKHNGGREEVTKVATQKHRQSPLNWTSSHFGEVTGSAEGWGPEEPLPYSRAFGEGASARPRCCRNGGTCVLGSFCVCPAHFTGRYCEHDQRRSECGALEHGAWTLRACHLCRCIFGALHCLPLQTPDRCDPKDFLASHAHGPSAGGAPSLLLLLPCALLHRLLRPDAPAHPRSLVPSVLQRERRPCGRPGLGHRL

SEQ ID NO: 2677 - protein, 191 aa, Homo sapiens
MTWRHHVRLLFTVSLALQIINLGNSYQREKHNGGREEVTKVATQKHRQSPLNWTSSHFGEVTGSAEGWGPEEPLPYSRAFGEVNAAPWSTEPGPSAPATSAGASSGPCTASPSRRLTAVTRKTSWPPTLTGRAPGARPACYSCCPAHSCTASCARMRPRTLGPWSLPSSSGSGAPAEGRDLGIAFNFLCCK

SEQ ID NO: 2678 - protein, 148 aa, Homo sapiens
MTWRHHVRLLFTVSLALQIINLGNSYQREKHNGGREEVTKVATQKHRQSPLNWTSSHFGEVTGSAEGWGPEEPLPYSWAFGEDPKDFLASHAHGPSAGGAPSLLLLLPCALLHRLLRPDAPAHPRSLVPSVLQRERRPCGRPGLGHRL

SEQ ID NO: 2679 - protein, 223 aa, Homo sapiens
MTWRHHVRLLFTVSLALQIINLGNSYQREKHNGGREEVTKVATQKHRQSPLNWTSSHFGEVTGSAEGWGPEEPLPYSWAFGEGASARPRCCRNGGTCVLGSFCVCPAHFTGRYCEHDQRRSECGALEHGAWTLRACHLCRCIFGALHCLPLQTPDRCDPKDFLASHAHGPSAGGAPSLLLLLPCALLHRLLRPDAPAHPRSLVPSVLQRERRPCGRPGLGHRL

SEQ ID NO: 2680 - protein, 191 aa, Homo sapiens
MTWRHHVRLLFTVSLALQIINLGNSYQREKHNGGREEVTKVATQKHRQSPLNWTSSHFGEVTGSAEGWGPEEPLPYSWAFGEVNAAPWSTEPGPSAPATSAGASSGPCTASPSRRLTAVTRKTSWPPTLTGRAPGARPACYSCCPAHSCTASCARMRPRTLGPWSLPSSSGSGAPAEGRDLGIAFNFLCCK

SEQ ID NO: 2681 - protein, 253 aa, Homo sapiens
MHSWERLAVLVLLGAAACAAPPRGRILGGREAEAHARPYMASVQLNGAHLCGGVLVAEQWVLSAAHCLEDAADGKVQVLLGAHSLSQPEPSKRLYDVLRAVPHPDSQPDTIDHDLLLLQLSEKATLGPAVRPLPWQRVDRDVAPGTLCDVAGWGIVNHAGRRPDSLQHVLLPVLDRATCNRRTHHDGAITERLMCAESNRRDSCKGDSGGPLVCGGVLEGVVTSGSRVCGNRKKPGIYTRVASYAAWIDSVLA

SEQ ID NO: 2682 - protein, 260 aa, Homo sapiens
MHSWERLAVLVLLGAAACGEEAWAWAAPPRGRILGGREAEAHARPYMASVQLNGAHLCGGVLVAEQWVLSAAHCLEDAADGKVQVLLGAHSLSQPEPSKRLYDVLRAVPHPDSQPDTIDHDLLLLQLSEKATLGPAVRPLPWQRVDRDVAPGTLCDVAGWGIVNHAGRRPDSLQHVLLPVLDRATCNRRTHHDGAITERLMCAESNRRDSCKGDSGGPLVCGGVLEGVVTSGSRVCGNRKKPGIYTRVASYAAWIDSVLA

SEQ ID NO: 2683 - protein, 299 aa, Homo sapiens
MEEFDSEDFSTSEEDEDYVPSGGEYSEDDVNELVKEDEVDGEEQTQKTQGKKRKAQSIPARKRRQGGLSLEEEEEEDANSESEGSSSEEEDDAAEQEKGIGSEDARKKKEDELWASFLNDVGPKSKVPPSTQVKKGEETEETSSSKLLVKAEELEKPKETEKVKITKVFDFAGEEVRVTKEVDATSKEAKSFFKQNEKEKPQANVPSALPSLPAGSGLKRSSGMSSLLGKIGAKKQKMSTLEKSKLDWESFKEEEGIGEELAIHNRGKEGYIERKAFLDRVDHRQFEIERDLRLSKMKP

SEQ ID NO: 2684 - protein, 50 aa, Homo sapiens
MSRRPAYCSLQFLGSSDPPASASPVDGTTGGEYSEDDVNELVKEDEVDGE

SEQ ID NO: 2685 - protein, 19 aa, Homo sapiens
QANVPSALPSLPAGSGCVI

SEQ ID NO: 2686 - protein, 17 aa, Homo sapiens
  VARIANT 1: note = misc_feature - Xaa can be any naturally occurring amino acid
XALPSLPAGSGKKKFDA

SEQ ID NO: 2687 - protein, 385 aa, Homo sapiens
MRLLAKIICLMLWAICVAEDCNELPPRRNTEILTGSWSDQTYPEGTQAIYKCRPGYRSLGNVIMVCRKGEWVALNPLRKCQKRPCGHPGDTPFGTFTLTGGNVFEYGVKAVYTCNEGYQLLGEINYRECDTDGWTNDIPICEEISCKSPDVINGSPISQKIIYKENERFQYKCNMGYEYSERGDAVCTESGWRPLPSCEEKSCDNPYIPNGDYSPLRIKHRTGDEITYQCRNGFYPATRGNTAKCTSTGWIPAPRCTLKPCDYPDIKHGGLYHENMRRPYFPVAVGKYYSYYCDEHFETPSGSYWDHIHCTQDGWSPAVPCLRKCYFPYLENGYNQNHGRKFVQGKSIDVACHPGYALPKAQTTVTCMENGWSPTPRCIRVSFTL

SEQ ID NO: 2688 - protein, 1231 aa, Homo sapiens
MRLLAKIICLMLWAICVAEDCNELPPRRNTEILTGSWSDQTYPEGTQAIYKCRPGYRSLGNVIMVCRKGEWVALNPLRKCQKRPCGHPGDTPFGTFTLTGGNVFEYGVKAVYTCNEGYQLLGEINYRECDTDGWTNDIPICEVVKCLPVTAPENGKIVSSAMEPDREYHFGQAVRFVCNSGYKIEGDEEMHCSDDGFWSKEKPKCVEISCKSPDVINGSPISQKIIYKENERFQYKCNMGYEYSERGDAVCTESGWRPLPSCEEKSCDNPYIPNGDYSPLRIKHRTGDEITYQCRNGFYPATRGNTAKCTSTGWIPAPRCTLKPCDYPDIKHGGLYHENMRRPYFPVAVGKYYSYYCDEHFETPSGSYWDHIHCTQDGWSPAVPCLRKCYFPYLENGYNQNHGRKFVQGKSIDVACHPGYALPKAQTTVTCMENGWSPTPRCIRVKTCSKSSIDIENGFISESQYTYALKEKAKYQCKLGYVTADGETSGSITCGKDGWSAQPTCIKSCDIPVFMNARTKNDFTWFKLNDTLDYECHDGYESNTGSTTGSIVCGYNGWSDLPICYERECELPKIDVHLVPDRKKDQYKVGEVLKFSCKPGFTIVGPNSVQCYHFGLSPDLPICKEQVQSCGPPPELLNGNVKEKTKEEYGHSEVVEYYCNPRFLMKGPNKIQCVDGEWTTLPVCIVEESTCGDIPELEHGWAQLSSPPYYYGDSVEFNCSESFTMIGHRSITCIHGVWTQLPQCVAIDKLKKCKSSNLIILEEHLKNKKEFDHNSNIRYRCRGKEGWIHTVCINGRWDPEVNCSMAQIQLCPPPPQIPNSHNMTTTLNYRDGEKVSVLCQENYLIQEGEEITCKDGRWQSIPLCVEKIPCSQPPQIEHGTINSSRSSQESYAHGTKLSYTCEGGFRISEENETTCYMGKWSSPPQCEGLPCKSPPEISHGVVAHMSDSYQYGEEVTYKCFEGFGIDGPAIAKCLGEKWSHPPSCIKTDCLSLPSFENAIPMGEKKDVYKAGEQVTYTCATYYKMDGASNVTCINSRWTGRPTCRDTSCVNPPTVQNAYIVSRQMSKYPSGERVRYQCRSPYEMFGDEEVMCLNGNWTEPPQCKDSTGKCGPPPPIDNGDITSFPLSVYAPASSVEYQCQNLYQLEGNKRITCRNGQWSEPPKCLHPCVISREIMENYNIALRWTAKQKLYSRTGESVEFVCKRGYRLSSRSHTLRTTCWDGKLEYPTCAKR

SEQ ID NO: 2689 - protein, 449 aa, Homo sapiens
MRLLAKIICLMLWAICVAEDCNELPPRRNTEILTGSWSDQTYPEGTQAIYKCRPGYRSLGNVIMVCRKGEWVALNPLRKCQKRPCGHPGDTPFGTFTLTGGNVFEYGVKAVYTCNEGYQLLGEINYRECDTDGWTNDIPICEVVKCLPVTAPENGKIVSSAMEPDREYHFGQAVRFVCNSGYKIEGDEEMHCSDDGFWSKEKPKCVEISCKSPDVINGSPISQKIIYKENERFQYKCNMGYEYSERGDAVCTESGWRPLPSCEEKSCDNPYIPNGDYSPLRIKHRTGDEITYQCRNGFYPATRGNTAKCTSTGWIPAPRCTLKPCDYPDIKHGGLYHENMRRPYFPVAVGKYYSYYCDEHFETPSGSYWDHIHCTQDGWSPAVPCLRKCYFPYLENGYNQNHGRKFVQGKSIDVACHPGYALPKAQTTVTCMENGWSPTPRCIRVSFTL

SEQ ID NO: 2690 - protein, 271 aa, Homo sapiens
MWLLVSVILISRISSVGGEATFCDFPKINHGILYDEEKYKPFSQVPTGEVFYYSCEYNFVSPSKSFWTRITCTEEGWSPTPKCLRLCFFPFVENGHSESSGQTHLEGDTVQIICNTGYRLQNNENNISCVERGWSTPPKCRSTDSTGKCGPPPPIDNGDITSFPLSVYAPASSVEYQCQNLYQLEGNKRITCRNGQWSEPPKCLHPCVISREIMENYNIALRWTAKQKLYLRTGESAEFVCKRGYRLSSRSHTLRTTCWDGKLEYPTCAKR

SEQ ID NO: 2691 - protein, 330 aa, Homo sapiens
MWLLVSVILISRISSVGGEATFCDFPKINHGILYDEEKYKPFSQVPTGEVFYYSCEYNFVSPSKSFWTRITCTEEGWSPTPKCLRLCFFPFVENGHSESSGQTHLEGDTVQIICNTGYRLQNNENNISCVERGWSTPPKCRSTDTSCVNPPTVQNAHILSRQMSKYPSGERVRYECRSPYEMFGDEEVMCLNGNWTEPPQCKDSTGKCGPPPPIDNGDITSFPLSVYAPASSVEYQCQNLYQLEGNKRITCRNGQWSEPPKCLHPCVISREIMENYNIALRWTAKQKLYLRTGESAEFVCKRGYRLSSRSHTLRTTCWDGKLEYPTCAKR

SEQ ID NO: 2692 - protein, 270 aa, Homo sapiens; identical to SEQ ID NO: 1650

SEQ ID NO: 2693 - protein, 254 aa, Homo sapiens
MWLLVSVILISRISSVGGEAMFCDFPKINHGILYDEEKYKPFSQVPTGEVFYYSCEYNFVSPSKSFWTRITCAEEGWSPTPKCLRQTHLEGDTVQIICNTGYRLQNNENNISCVERGWSTPPKCRSTISAEKCGPPPPIDNGDITSFLLSVYAPGSSVEYQCQNLYQLEGNNQITCRNGQWSEPPKCLDPCVISQEIMEKYNIKLKWTNQQKLYSRTGDIVEFVCKSGYHPTKSHSFRAMCQNGKLVYPSCEEK

SEQ ID NO: 2694 - protein, 269 aa, Homo sapiens
MLLLINVILTLWVSCANGQVKPCDFPDIKHGGLFHENMRRPYFPVAVGKYYSYYCDEHFETPSGSYWDYIHCTQNGWSPAVPCLRKCYFPYLENGYNQNYGRKFVQGNSTEVACHPGYGLPKAQTTVTCTEKGWSPTPRCIRVNSSEKCGPPPPISNGDTTSFLLKVYVPQSRVEYQCQPYYELQGSNYVTCSNGEWSEPPRCIHPCIITEENMNKNNIKLKGRSDRKYYAKTGDTIEFMCKLGYNANTSILSFQAVCREGIVEYPRCE

SEQ ID NO: 2695 - protein, 195 aa, Homo sapiens
MLLLINVILTLWVSCANGQVKPCDFPDIKHGGLFHENMRRPYFPVAVGKYYSYYCDEHFETPSGSYWDYIHCTQNGWSPAVPCLRKCYFPYLENGYNQNYGRKFVQGNSTEVACHPGYGLPKAQTTVTCTEKGWSPTPRCIRVRTCSKSDIEIENGFISESSSIYILNKEIQYKCKPGYATADGNSSDMVFCISY

SEQ ID NO: 2696 - protein, 330 aa, Homo sapiens
MLLLINVILTLWVSCANGQVKPCDFPDIKHGGLFHENMRRPYFPVAVGKYYSYYCDEHFETPSGSYWDYIHCTQNGWSPAVPCLRKCYFPYLENGYNQNYGRKFVQGNSTEVACHPGYGLPKAQTTVTCTEKGWSPTPRCIRVRTCSKSDIEIENGFISESSSIYILNKEIQYKCKPGYATADGNSSGSITCLQNGWSAQPICINSSEKCGPPPPISNGDTTSFLLKVYVPQSRVEYQCQPYYELQGSNYVTCSNGEWSEPPRCIHPCIITEENMNKNNIKLKGRSDRKYYAKTGDTIEFMCKLGYNANTSILSFQAVCREGIVEYPRCE

SEQ ID NO: 2697 - protein, 232 aa, Homo sapiens
MLLLINVILTLWVSCANGQVKPCDFPDIKHGGLFHENMRRPYFPVAVGKYYSYYCDEHFETPSGSYWDYIHCTQNGWSPAVPCLRKCYFPYLENGYNQNYGRKFVQGNSTEVACHPGYGLPKAQTTVTCTEKGWSPTPRCIRVRTCSKSDIEIENGFISESSSIYILNKEIQYKCKPGYATADGNSSGSITCLQNGWSAQPICITACIAFRAHAQKSCTCRGRNECLILNFC

SEQ ID NO: 2698 - protein, 232 aa, Homo sapiens; identical to SEQ ID NO: 2697

SEQ ID NO: 2699 - protein, 201 aa, Homo sapiens
MENGWSPPCRCIRVRTCSKSDIEIENGFISESSSIYILNKEIQYKCKPGYATADGNSSGSITCLQNGWSAQPICINSSEKCGPPPPISNGDTTSFLLKVYVPQSRVEYQCQSYYELQGSNYVTCSNGEWSEPPRCIHPCIITEENMNKNNIQLKGKSDIKYYAKTGDTIEFMCKLGYNANTSVLSFQAVCREGIVEYPRCE

SEQ ID NO: 2700 - protein, 331 aa, Homo sapiens
MLLLINVILTLWVSCANGQEVKPCDFPEIQHGGLYYKSLRRLYFPAAAGQSYSYYCDQNFVTPSGSYWDYIHCTQDGWLPTVPCLRTCSKSDIEIENGFISESSSIYILNKEIQYKCKPGYATADGNSSGSITCLQNGWSAQPICIKFCDMPVFENSRAKSNGMRFKLHDTLDYECYDGYEISYGNTTGSIVCGEDGWSHFPTCYNSSEKCGPPPPISNGDTTSFLLKVYVPQSRVEYQCQSYYELQGSNYVTCSNGEWSEPPRCIHPCIITEENMNKNNIQLKGKSDIKYYAKTGDTIEFMCKLGYNANTSVLSFQAVCREGIVEYPRCE

SEQ ID NO: 2701 - protein, 331 aa, Homo sapiens
MLLLINVILTLWVSCANGQEVKPCDFPEIQHGGLYYKSLRRLYFPAAAGQSYSYYCDQNFVTPSGSYWDYIHCTQDGWSPTVPCLRTCSKSDIEIENGFISESSSIYILNKEIQYKCKPGYATADGNSSGSITCLQNGWSAQPICIKFCDMPVFENSRAKSNGMRFKLHDTLDYECYDGYEISYGNTTGSIVCGEDGWSHFPTCYNSSEKCGPPPPISNGDTTSFLLKVYVPQSRVEYQCQSYYELQGSNYVTCSNGEWSEPPRCIHPCIITEENMNKNNIQLKGKSDIKYYAKTGDTIEFMCKLGYNANTSVLSFQAVCREGIVEYPRCE

SEQ ID NO: 2702 - protein, 577 aa, Homo sapiens
MLLLINVILTLWVSCANGQVKPCDFPEIQHGGLYYKSLRRLYFPAAAGQSYSYYCDQNFVTPSGSYWDYIHCTQDGWSPTVPCLRTCSKSDVEIENGFISESSSIYILNEETQYNCKPGYATAEGNSSGSITCLQNGWSTQPICIKFCDMPVFENSRAKSNGMWFKLHDTLDYECYDGYESSYGNTTDSIVCGEDGWSHLPTCYNSSENCGPPPPISNGDTTSFPQKVYLPWSRVEYQCQSYYELQGSKYVTCSNGDWSEPPRCISMKPCEFPEIQHGHLYYENTRRPYFPVATGQSYSYYCDQNFVTPSGSYWDYIHCTQDGWLPTVPCLRTCSKSDIEIENGFISESSSIYILNKEIQYKCKPGYATADGNSSGSITCLQNGWSAQPICIKFCDMPVFENSRAKSNGMRFKLHDTLDYECYDGYEISYGNTTGSIVCGEDGWSHFPTCYNSSEKCGPPPPISNGDTTSFLLKVYVPQSRVEYQCQSYYELQGSNYVTCSNGEWSEPPRCIHPCIITEENMNKNNIQLKGKSDIKYYAKTGDTIEFMCKLGYNANTSVLSFQAVCREGIVEYPRCE

SEQ ID NO: 2703 - protein, 569 aa, Homo sapiens
MLLLFSVILISWVSTVGGEGTLCDFPKIHHGFLYDEEDYNPFSQVPTGEVFYYSCEYNFVSPSKSFWTRITCTEEGWSPTPKCLRMCSFPFVKNGHSESSGLIHLEGDTVQIICNTGYSLQNNEKNISCVERGWSTPPICSFTKGECHVPILEANVDAQPKKESYKVGDVLKFSCRKNLIRVGSDSVQCYQFGWSPNFPTCKGQVRSCGPPPQLSNGEVKEIRKEEYGHNEVVEYDCNPNFIINGPKKIQCVDGEWTTLPTCVEQVKTCGYIPELEYGYVQPSVPPYQHGVSVEVNCRNEYAMIGNNMITCINGIWTELPMCVATHQLKRCKIAGVNIKTLLKLSGKEFNHNSRIRYRCSDIFRYRHSVCINGKWNPEVDCTEKREQFCPPPPQIPNAQNMTTTVNYQDGEKVAVLCKENYLLPEAKEIVCKDGRWQSLPRCVESTAYCGPPPSINNGDTTSFPLSVYPPGSTVTYRCQSFYKLQGSVTVTCRNKQWSEPPRCLDPCVVSEENMNKNNIQLKWRNDGKLYAKTGDAVEFQCKFPHKAMISSPPFRAICQEGKFEYPICE

SEQ ID NO: 2704 - protein, 161 aa, Homo sapiens
MKLLHVFLLFLCFHLRFCKVTYTSQEDLVEKKCLAKKYTHLSCDKVFCQPWQRCIEGTCVCKLPYQCPKNGTAVCATNRRSFPTYCQQKSLECLHPGTKFLNNGTCTAEGKFSVSLKHGNTDSEGIVEVKLVDQDKTMFICKSSWSMREANVACLDLGFQQ

SEQ ID NO: 2705 - protein, 591 aa, Homo sapiens
MKLLHVFLLFLCFHLRFCKVTYTSQEDLVEKKCLAKKYTHLSCDKVFCQPWQRCIEGTCVCKLPYQCPKNGTAVCATNRRSFPTYCQQKSLECLHPGTKFLNNGTCTAEGKFSVSLKHGNTDSEGIVEVKLVDQDKTMFICKSSWSMREANVACLDLGFQQGADTQRRFKLSDLSINSTECLHVHCRGLETSLAECTFTKRRTMGYQDFADVVCYTQKADSPMDDFFQCVNGKYISQMKACDGINDCGDQSDELCCKACQGKGFHCKSGVCIPSQYQCNGEVDCITGEDEVGCAAARHPTIQGFASVTQEETEILTADMDAERRRIKSLLPKLSCGVKNRMHIRRKRIVGGKRAQLGDLPWQVAIKDASGITCGGIYIGGCWILTAAHCLRASKTHRYQIWTTVVDWIHPDLKRIVIEYVDRIIFHENYNAGTYQNDIALIEMKKDGNKKDCELPRSIPACVPWSPYLFQPNDTCIVSGWGREKDNERVFSLQWGEVKLISNCSKFYGNRFYEKEMECAGTYDGSIDACKGDSGGPLVCMDANNVTYVWGVVSWGENCGKPEFPGVYTKVANYFDWISYHVGRPFISQYNV

SEQ ID NO: 2706 - protein, 583 aa, Homo sapiens
MKLLHVFLLFLCFHLRFCKVTYTSQEDLVEKKCLAKKYTHLSCDKVFCQPWQRCIEGTCVCKLPYQCPKNGTAVCATNRRSFPTYCQQKSLECLHPGTKFLNNGTCTAEGKFSVSLKHGNTDSEGIVEVKLVDQDKTMFICKSSWSMREANVACLDLGFQQGADTQRRFKLSDLSINSTECLHVHCRGLETSLAECTFTKRRTMGYQDFADVVCYTQKADSPMDDFFQCVNGKYISQMKACDGINDCGDQSDELCCKACQGKGFHCKSGVCIPSQYQCNGEVDCITGEDEVGCAGFASVTQEETEILTADMDAERRRIKSLLPKLSCGVKNRMHIRRKRIVGGKRAQLGDLPWQVAIKDASGITCGGIYIGGCWILTAAHCLRASKTHRYQIWTTVVDWIHPDLKRIVIEYVDRIIFHENYNAGTYQNDIALIEMKKDGNKKDCELPRSIPACVPWSPYLFQPNDTCIVSGWGREKDNERVFSLQWGEVKLISNCSKFYGNRFYEKEMECAGTYDGSIDACKGDSGGPLVCMDANNVTYVWGVVSWGENCGKPEFPGVYTKVANYFDWISYHVGRPFISQYNV

SEQ ID NO: 2707 - protein, 576 aa, Homo sapiens
MKLLHVFLLFLCFHLRFCKVTYTSQEDLVEKKCLAKKYTHLSCDKVFCQPWQRCIEGTCVCKLPYQCPKNGTAVCATNRRSFPTYCQQKSLECLHPGTKFLNNGTCTAEGKFSVSLKHGNTDSEGIVEVKLVDQDKTMFICKSSWSMREANVACLDLGFQQGADTQRRFKLSDLSINSTECLHVHCRGLETSLAECTFTKRRTMGYQDFADVVCYTQKADSPMDDFFQCVNGKYISQMKACDGINDCGDQSDELCCKACQGKGFHCKSGVCIPSQYQCNGEVDCITGEDEVGCAEETEILTADMDAERRRIKSLLPKLSCGVKNRMHIRRKRIVGGKRAQLGDLPWQVAIKDASGITCGGIYIGGCWILTAAHCLRASKTHRYQIWTTVVDWIHPDLKRIVIEYVDRIIFHENYNAGTYQNDIALIEMKKDGNKKDCELPRSIPACVPWSPYLFQPNDTCIVSGWGREKDNERVFSLQWGEVKLISNCSKFYGNRFYEKEMECAGTYDGSIDACKGDSGGPLVCMDANNVTYVWGVVSWGENCGKPEFPGVYTKVANYFDWISYHVGRPFISQYNV

SEQ ID NO: 2708 - protein, 378 aa, Homo sapiens
MKLLHVFLLFLCFHLRFCKVTYTSQEDLVEKKCLAKKYTHLSCDKVFCQPWQRCIEGTCVCKLPYQCPKNGTAVCATNRRSFPTYCQQKSLECLHPGTKFLNNGTCTAEGKFSVSLKHGNTDSEGIVEVKLVDQDKTMFICKSSWSMREANVACLDLGFQQGADTQRRFKLSDLSINSTECLHVHCRGLETSLAECTFTKRRTMGYQDFADVVCYTQKADSPMDDFFQCVNGKYISQMKACDGINDCGDQSDELCCKACQGKGFHCKSGVCIPSQYQCNGEVDCITGEDEVGCAGFASVTQEETEILTADMDAERRRIKSLLPKLSCGVKNRMHIRRKRIVGGKRAQLGGKMKQISLDIFKGLHRVYAILEFCCIILK

SEQ ID NO: 2709 - protein, 167 aa, Homo sapiens
MGGWSGWGPWEPCSVTCSKGTRTRRRACNHPAPKCGGHCPGQAQESEACDTQQVCPTHGAWATWGPWTPCSASCHGGPHEPKETRSRKCSAPEPSQKPPGKPCPGLAYEQRRCTGLPPCPVAGGWGPWGPVSPCPVTCGLGQTMEQRTCNHPVPQHGGPFCAGDATR

SEQ ID NO: 2710 - protein, 469 aa, Homo sapiens
MITEGAQAPRLLLPPLLLLLTLPATGSDPVLCFTQYEESSGKCKGLLGGGVSVEDCCLNTAFAYQKRSGGLCQPCRSPRWSLWSTWAPCSVTCSEGSQLRYRRCVGWNGQCSGKVAPGTLEWQLQACEDQQCCPEMGGWSGWGPWEPCSVTCSKGTRTRRRACNHPAPKCGGHCPGQAQESEACDTQQVCPTHGAWATWGPWTPCSASCHGGPHEPKETRSRKCSAPEPSQKPPGKPCPGLAYEQRRCTGLPPCPVAGGWGPWGPVSPCPVTCGLGQTMEQRTCNHPVPQHGGPFCAGDATRTHICNTAVPCPVDGEWDSWGEWSPCIRRNMKSISCQEIPGQQSRGRTCRGRKFDGHRCAGQQQDIRHCYSIQHCPLKGSWSEWSTWGLCMPPCGPNPTRARQRLCTPLLPKYPPTVSMVEGQGEKNVTFWGRPLPRCEELQGQKLVVEEKRPCLHVPACKDPEEEEL

SEQ ID NO: 2711 - protein, 415 aa, Homo sapiens
MITEGAQAPRLLLPPLLLLLTLPATGSDPVLCFTQYEESSGKCKGLLGGGVSVEDCCLNTAFAYQKRSGGLCQPCRSPRWSLWSTWAPCSVTCSEGSQLRYRRCVGWNGQCSGKVAPGTLEWQLQACEDQQCCPEMGGWSGWGPWEPCSVTCSKGTRTRRRACNHPAPKCGGHCPGQAQESEACDTQQVCPTHGAWATWGPWTPCSASCHGGPHEPKETRSRKCSAPEPSQKPPGKPCPGLAYEQRRCTGLPPCPVAGGWGPWGPVSPCPVTCGLGQTMEQRTCNHPVPQHGGPFCAGDATRTHICNTAVPCPVDGEWDSWGEWSPCIRRNMKSISCQEIPGQQSRGRTCRGRKFDGHRCAGQQQDIRHCYSIQHCPLKGSWSEWSTWGLCMPPCGPNPTRARQRLCTPLLPKYP

SEQ ID NO: 2712 - protein, 469 aa, Homo sapiens; identical to SEQ ID NO: 2710

SEQ ID NO: 2713 - protein, 62 aa, Homo sapiens
MDYYRKYAAIFLVTLSVFLHVLHSAPDVQDCPECTLQENPFFSQPGAPILQCMGCCFSRAYP

SEQ ID NO: 2714 - protein, 101 aa, Homo sapiens
MDYYRKYAAIFLVTLSVFLHVLHSAPDVQDCPECTLQENPFFSQPGAPILQCMGCCFSRAYPTPLRSKKTMLVQKNVTSESTCCVAKSYNRVRTSRSPEAF

SEQ ID NO: 2715 - protein, 116 aa, Homo sapiens
MDYYRKYAAIFLVTLSVFLHVLHSAPDVQDCPECTLQENPFFSQPGAPILQCMGCCFSRAYPTPLRSKKTMLVQKNVTSESTCCVAKSYNRVTVMGGFKVENHTACHCSTCYYHKS

SEQ ID NO: 2716 - protein, 147 aa, Homo sapiens
MDYYRKYAAIFLVTLSVFLHVLHSAPDVQETGFHHVAQAALKLLSSSNPPTKASQSARITDCPECTLQENPFFSQPGAPILQCMGCCFSRAYPTPLRSKKTMLVQKNVTSESTCCVAKSYNRVTVMGGFKVENHTACHCSTCYYHKS

SEQ ID NO: 2717 - protein, 116 aa, Homo sapiens
MQLSFWSHCRCFCMFSIPLLMCRVRDQICDCPECTLQENPFFSQPGAPILQCMGCCFSRAYPTPLRSKKTMLVQKNVTSESTCCVAKSYNRVTVMGGFKVENHTACHCSTCYYHKS

SEQ ID NO: 2718 - protein, 130 aa, Homo sapiens; identical to SEQ ID NO: 74

SEQ ID NO: 2719 - protein, 155 aa, Homo sapiens
MSKRLLLLLLLSMGGTWASKEPLRPRCRPINATLAVEKEGCPVCITVNTTICAGYCPTMTRVLQGVLPALPQVVCNYRDVRFESIRLPGCPRGVNPVVSYAVALSCQCALCRRSTTDCGGPKDHPLTCDDPRFQDSSSSKAPPPSLPSPSRLPGP

SEQ ID NO: 2720 - protein, 130 aa, Homo sapiens
MGGTWASKEPLRPRCRPINATLAVEKEGCPVCITVNTTICAGYCPTMTRVLQGVLPALPQVVCNYRDVRFESIRLPGCPRGVNPVVSYAVALSCQCALCRRSTTDCGGPKDHPLTCDDPRFQASSSSKAP

SEQ ID NO: 2721 - protein, 163 aa, Homo sapiens
MSKGLLLLLLLSMGGTWASKEPLRPRCRPINATLAVEKEGCPVCITVNTTICAGYCPTMTRVLQGVLPALPQVVCNYRDVRFESIRLPGCPRGVNPVVSYAVALSCQCALCRRSTTDCGGPKDHPLTCDDPRFQASSSSKAPPPSLPSPSRLPGPSDTPILPQ

SEQ ID NO: 2722 - protein, 165 aa, Homo sapiens
MEMFQGLLLLLLLSMGGTWASKEPLRPRCRPINATLAVEKEGCPVCITVNTTICAGYCPTMTRVLQGVLPALPQVVCNYRDVRFESIRLPGCPRGVNPVVSYAVALSCQCALCRRSTTDCGGPKDHPLTCDDPRFQDSSSSKAPPPSLPSPSRLPGPSDTPILPQ

SEQ ID NO: 2723 - protein, 165 aa, Homo sapiens; identical to SEQ ID NO: 2722

SEQ ID NO: 2724 - protein, 165 aa, Homo sapiens
MEMFQGLLLLLLLSMGGTWASREMLRPRCRPINATLAVEKEGCPVCITVNTTICAGYCPTMTRVLQGVLPALPQVVCNYRDVRFESIRLPGCPRGVNPVVSYAVALSCQCALCRRSTTDCGGPKDHPLTCDDPRFQASSSSKAPPPSLPSPSRLPGPSDTPILPQ

SEQ ID NO: 2725 - protein, 165 aa, Homo sapiens; identical to SEQ ID NO: 2724

SEQ ID NO: 2726 - protein, 165 aa, Homo sapiens; identical to SEQ ID NO: 2724

SEQ ID NO: 2727 - protein, 165 aa, Homo sapiens; identical to SEQ ID NO: 2722

SEQ ID NO: 2728 - protein, 132 aa, Homo sapiens
MLPLTMTVLILLLLPTGQAAPKDGVTRPDSEVQHQLLPNPFQPGQEQLGLLQSYLKGLGRTEVQLEHLSREQVLLYLFALHDYDQSGQLDGLELLSMLTAALAPGAANSPTTNPGNLDARLDGGEKAMQPQW

SEQ ID NO: 2729 - protein, 301 aa, Homo sapiens
MLPLTMTVLILLLLPTGQAAPKDGVTRPDSEVQHQLLPNPFQPGQEQLGLLQSYLKGLGRTEVQLEHLSREQVLLYLFALHDYDQSGQLDGLELLSMLTAALAPGAANSPTTNPVILIVDKVLETQDLNGDGLMTPAELINFPGVALRHVEPGEPLAPSPQEPQAVGRQSLLAKSPLRQETQEAPGPREEAKGQVEARRESLDPVQEPGGQAEADGDVPGPRGEAEGQAEAKGDAPGPRGEAGGQAEAEGDAPGPRGEAGGQAEARENGEEAKELPGETLESKNTQNDFEVHIVQVENDEI

SEQ ID NO: 2730 - protein, 318 aa, Homo sapiens
MLPLTMTVLILLLLPTGQAAPKDGVTRPDSEVQHQLLPNPFQPGQEQLGLLQSYLKGLGRTEVQLEHLSREQVLLYLFALHDYDQSGQLDGLELLSMLTAALAPGAANSPTTNPVILIVDKVLETQDLNGDGLMTPAELINFPGVALRHVEPGEPLAPSPQEPQAVGRQSLLAKSPLRQETQEAPGPREEAKGQVEARRESLDPVQEPGGQAEADGDVPGPRGEAEGQAEAKGDAPGPRGEAGGQAEAEGDAPGPRGEAGGQAEAEGDAPGPRGEAGGQAEARENGEEAKELPGETLESKNTQNDFEVHIVQVENDEI

SEQ ID NO: 2731 - protein, 318 aa, Homo sapiens; identical to SEQ ID NO: 2730

SEQ ID NO: 2732 - protein, 318 aa, Homo sapiens; identical to SEQ ID NO: 2730

SEQ ID NO: 2733 - protein, 57 aa, Homo sapiens
MLPLTMTVLILLLLPTGQAAPKDGVTRPDSEVQHQLLPNPFQPGQEQLGSPLPLCPP

SEQ ID NO: 2734 - protein, 112 aa, Homo sapiens
MLTAALAPGAANSPTTNPVILIVDKVLETQDLNGDGLMTPAELINFPGVALRPYPPYIGVGPNSNMCSRSDLPEDSNTLYPGSHLWLRHALNSKGNLDARLDGGEKAMQPQW

SEQ ID NO: 2735 - protein, 440 aa, Homo sapiens
MNGLKEVRYACAVLLWAPWHLVGSKGMGRGVGMRPQLCFRHSRPAFMCFIYKSWSDIYFEHSSMGSLLSVCESSLSRSPVFGAAGRSRQKMRLCLTQPICDTVADASFPRPLILFLVPVPGRMLPLTMTVLILLLLPTGQAAPKDGVTRPDSEVQHQLLPNPFQPGQEQLGLLQSYLKGLGRTEVQLEHLSREQVLLYLFALHDYDQSGQLDGLELLSMLTAALAPGAANSPTTNPVILIVDKVLETQDLNGDGLMTPAELINFPGVALRHVEPGEPLAPSPQEPQAVGRQSLLAKSPLRQETQEAPGPREEAKGQVEARRESLDPVQEPGGQAEADGDVPGPRGEAEGQAEAKGDAPGPRGEAGGQAEAEGDAPGPRGEAGGQAEAEGDAPGPRGEAGGQAEARENGEEAKELPGETLESKNTQNDFEVHIVQVENDEI

SEQ ID NO: 2736 - protein, 359 aa, Homo sapiens
MVRPMLLLSLGLLAGLLPALAACPQNCHCHSDLQHVICDKVGLQKIPKVSEKTKLLNLQRNNFPVLAANSFRAMPNLVSLHLQHCQIREVAAGAFRGLKQLIYLYLSHNDIRVLRAGAFDDLTELTYLYLDHNKVTELPRGLLSPLVNLFILQLNNNKIRELRAGAFQGAKDLRWLYLSENALSSLQPGALDDVENLAKFHVDRNQLSSYPSAALSKLRVVEELKLSHNPLKSIPDNAFQSFGRYLETLWLDNTNLEKFSDGAFLGVTTLKHVHLENNRLNQLPSNFPFDSLETLALTNNPWKCTCQLRGLRRWLEAKASRPDATCASPAKFKGQHIRDTDAFRSCKFPTKRSKKAGRH

SEQ ID NO: 2737 - protein, 359 aa, Homo sapiens; identical to SEQ ID NO: 2736

SEQ ID NO: 2738 - protein, 42 aa, Homo sapiens
  VARIANT 1: note = misc_feature - Xaa can be any naturally occurring amino acid
XASRPDATCASPAKFKGQHIRDTDAFRSCKFPTKRSKKAGRH

SEQ ID NO: 2739 - protein, 762 aa, Homo sapiens
MEGPRSSTHVPLVLPLLVLLLLAPARQAAAQRCPQACICDNSRRHVACRYQNLTEVPDAIPELTQRLDLQGNLLKVIPAAAFQGVPHLTHLDLRHCEVELVAEGAFRGLGRLLLLNLASNHLRELPQEALDGLGSLRRLELEGNALEELRPGTFGALGALATLNLAHNALVYLPAMAFQGLLRVRWLRLSHNALSVLAPEALAGLPALRRLSLHHNELQALPGPVLSQARGLARLELGHNPLTYAGEEDGLALPGLRELLLDGGALQALGPRAFAHCPRLHTLDLRGNQLDTLPPLQGPGQLRRLRLQGNPLWCGCQARPLLEWLARARVRSDGACQGPRRLRGEALDALRPWDLRCPGDAAQEEEELEERAVAGPRAPPRGPPRGPGEERAVAPCPRACVCVPESRHSSCEGCGLQAVPRGFPSDTQLLDLRRNHFPSVPRAAFPGLGHLVSLHLQHCGIAELEAGALAGLGRLIYLYLSDNQLAGLSAAALEGAPRLGYLYLERNRFLQVPGAALRALPSLFSLHLQDNAVDRLAPGDLGRTRALRWVYLSGNRITEVSLGALGPARELEKLHLDRNQLREVPTGALEGLPALLELQLSGNPLRALRDGAFQPVGRSLQHLFLNSSGLEQICPGAFSGLGPGLQSLHLQKNQLRALPALPSLSQLELIDLSSNPFHCDCQLLPLHRWLTGLNLRVGATCATPPNARGQRVKAAAAVFEDCPGWAARKAKRTPASRPSARRTPIKGRQCGADKVGKEKGRL

SEQ ID NO: 2740 - protein, 253 aa, Homo sapiens [sequence omitted]

SEQ ID NO: 2741 - protein, 684 aa, Homo sapiens
  VARIANT 1: note = misc_feature - Xaa can be any naturally occurring amino acid
XPRSSTHVPLVLPLLVLLLLAPARQAAAQRCPQACICDNSRRHVACRYQNLTEVPDAIPELTQRLDLQGNLLKVIPAAAFQGVPHLTHLDLRHCEVELVAEGAFRGLGRLLLLNLASNHLRELPQEALDGLGSLRRLELEGNALEELRPGTFGALGALATLNLAHNALVYLPAMAFQGLLRVRWLRLSHNALSVLAPEALAGLPALRRLSLHHNELQALPGPVLSQARGLARLELGHNPLTYAGEEDGLALPGLRELLLDGGALQALGPRAFAHCPRLHTLDLRGNQLDTLPPLQGPGQLRRLRLQGNPLWCGCQARPLLEWLARARVRSDGACQGPRRLRGEALDALRPWDLRCPGDAAQEEEELEERAVAGPRAPPRGPPRGPGEERAVAPCPRACVCVPESRHSSCEGCGLQAVPRGFPSDTQLLDLRRNHFPSVPRAAFPGLGHLVSLHLQHCGIAELEAGALAGLGRLIYLYLSDNQLAGLSAAALEGAPRLGYLYLERNRFLQVPGAALRALPSLFSLHLQDNAVDRLAPGDLGRTRALRWVYLSGNRITEVSLGALGPARELEKLHLDRNQLREVPTGALEGLPALLELQLSGNPLRALRDGAFQPVGRSLQHLFLNSSGLEQICPGAFSGLGPGLQSLHLQKNQLRALPALPSARRTPIKGRQCGADKVGKEKGRL

SEQ ID NO: 2742 - protein, 57 aa, Homo sapiens
FREVGPKNSYIAYIEDHSGNGTFVNTELVGKGKRRPLNNNSEIALSLSRNKVVPVER

SEQ ID NO: 2743 - protein, 137 aa, Homo sapiens
MERLLYGIGACGEVKLAFERKTCKKVAIKIISKRKFAIGSAREADPALNVETEIEILKKLNHPCIIKIKNFFDAEDYYIVLELMEGGELFDKVVGNKRLKEATCKLYFYQMLLAVQYLHENGIIHRDLKPENVLLSS

SEQ ID NO: 2744 - protein, 172 aa, Homo sapiens
MLRLLTSMVVMSRESDVEAQQSHGSSACSQPHGSVTQSQGSSSQSQGISSSSTSTMPNSSQSSHSSSGTLSSLETVSTQELYSIPEDQEPEDQEPEEPTPAPWARLWALQDGFANLECVNDNYWFGRDKSCEYCFDEPLLKRTDKYRTYSKKHFRIFREVGPKNSYIAYIED

SEQ ID NO: 2745 - protein, 121 aa, Homo sapiens
MSKTLGSGACGEVKLAFERKTCKKVAIKIISKRKFAIGSAREADPALNVETEIEILKKLNHPCIIKIKNFFDAEDYYIVLELMEGGELFDKVVGNKRLKEATCKLYFYQMLLAVQYLHENG

SEQ ID NO: 2746 - protein, 161 aa, Homo sapiens
MSRESDVEAQQSHGSSACSQPHGSVTQSQGSSSQSQGISSSSTSTMPNSSQSSHSSSGTLSSLETVSTQELYSIPEDQEPEDQEPEEPTPAPWARLWALQDGFANLECVNDNYWFGRDKSCEYCFDEPLLKRTDKYRTYSKKHFRIFREENLSCPYRIWFK

SEQ ID NO: 2747 - protein, 165 aa, Homo sapiens
MSRESDVEAQQSHGSSACSQPHGSVTQSQGSSSQSQGISSSSTSTMPNSSQSSHSSSGTLSSLETVSTQELYSIPEDQEPEDQEPEEPTPAPWARLWALQDGFANLECVNDNYWFGRDKSCEYCFDEPLLKRTDKYRTYSKKHFRIFREENLSCPYRIWFNFCLF

SEQ ID NO: 2748 - protein, 298 aa, Homo sapiens
MSRESDVEAQQSHGSSACSQPHGSVTQSQGSSSQSQGISSSSTSTMPNSSQSSHSSSGTLSSLETVSTQELYSIPEDQEPEDQEPEEPTPAPWARLWALQDGFANLECVNDNYWFGRDKSCEYCFDEPLLKRTDKYRTYSKKHFRIFREENLSCPYRIWFNGACGEVKLAFERKTCKKVAIKIISKRKFAIGSAREADPALNVETEIEILKKLNHPCIIKIKNFFDAEDYYIVLELMEGGELFDKVVGNKRLKEATCKLYFYQMLLAVQYLHENGIIHRDLKPENVLLSSQEEDCLIK

SEQ ID NO: 2749 - protein, 207 aa, Homo sapiens
MSRESDVEAQQSHGSSACSQPHGSVTQSQGSSSQSQGISSSSTSTMPNSSQSSHSSSGTLSSLETVSTQELYSIPEDQEPEDQEPEEPTPAPWARLWALQDGFANLECVNDNYWFGRDKSCEYCFDEPLLKRTDKYRTYSKKHFRIFREVGPKNSYIAYIEDHSGNGTFVNTELVGKGKRRPLNNNSEIALSLSRNKEKILKIYSLS

SEQ ID NO: 2750 - protein, 207 aa, Homo sapiens; identical to SEQ ID NO: 2749

SEQ ID NO: 2751 - protein, 514 aa, Homo sapiens
MSRESDVEAQQSHGSSACSQPHGSVTQSQGSSSQSQGISSSSTSTMPNSSQSSHSSSGTLSSLETVSTQELYSIPEDQEPEDQEPEEPTPAPWARLWALQDGFANLECVNDNYWFGRDKSCEYCFDEPLLKRTDKYRTYSKKHFRIFREVGPKNSYIAYIEDHSGNGTFVNTELVGKGKRRPLNNNSEIALSLSRNKVFVFFDLTVDDQSVYPKALRDEYIMSKTLGSGACGEVKLAFERKTCKKVAIKIISKRKFAIGSAREADPALNVETEIEILKKLNHPCIIKIKNFFDAEDYYIVLELMEGGELFDKVVGNKRLKEATCKLYFYQMLLAVQITDFGHSKILGETSLMRTLCGTPTYLAPEVLVSVGTAGYNRAVDCWSLGVILFICLSGYPPFSEHRTQVSLKDQITSGKYNFIPEVWAEVSEKALDLVKKLLVVDPKARFTTEEALRHPWLQDEDMKRKFQDLLSEENESTALPQVLAQPSTSRKRPREGEAEGAETTKRPAVCAAVL

SEQ ID NO: 2752 - protein, 543 aa, Homo sapiens
MSRESDVEAQQSHGSSACSQPHGSVTQSQGSSSQSQGISSSSTSTMPNSSQSSHSSSGTLSSLETVSTQELYSIPEDQEPEDQEPEEPTPAPWARLWALQDGFANLECVNDNYWFGRDKSCEYCFDEPLLKRTDKYRTYSKKHFRIFREVGPKNSYIAYIEDHSGNGTFVNTELVGKGKRRPLNNNSEIALSLSRNKVFVFFDLTVDDQSVYPKALRDEYIMSKTLGSGACGEVKLAFERKTCKKVAIKIISKRKFAIGSAREADPALNVETEIEILKKLNHPCIIKIKNFFDAEDYYIVLELMEGGELFDKVVGNKRLKEATCKLYFYQMLLAVQYLHENGIIHRDLKPENVLLSSQEEDCLIKITDFGHSKILGETSLMRTLCGTPTYLAPEVLVSVGTAGYNRAVDCWSLGVILFICLSGYPPFSEHRTQVSLKDQITSGKYNFIPEVWAEVSEKALDLVKKLLVVDPKARFTTEEALRHPWLQDEDMKRKFQDLLSEENESTALPQVLAQPSTSRKRPREGEAEGAETTKRPAVCAAVL

SEQ ID NO: 2753 - protein, 514 aa, Homo sapiens; identical to SEQ ID NO: 2751

SEQ ID NO: 2754 - protein, 543 aa, Homo sapiens; identical to SEQ ID NO: 2752

SEQ ID NO: 2755 - protein, 289 aa, Homo sapiens
MSRESDVEAQQSHGSSACSQPHGSVTQSQGSSSQSQGISSSSTSTMPNSSQSSHSSSGTLSSLETVSTQELYSIPEDQEPEDQEPEEPTPAPWARLWALQDGFANLECVNDNYWFGRDKSCEYCFDEPLLKRTDKYRTYSKKHFRIFREVGPKNSYIAYIEDHSGNGTFVNTELVGKGKRRPLNNNSEIALSLSRNKVFVFFDLTVDDQSVYPKALRDEYIMSKTLGSGACGEVKLAFERKTCKKVAIKIISKRKFAIGSAREADPALNVETEIEILKKLNHDGRGRAV

SEQ ID NO: 2756 - protein, 543 aa, Homo sapiens; identical to SEQ ID NO: 2752

SEQ ID NO: 2757 - protein, 203 aa, Homo sapiens
MSRESDVEAQQSHGSSACSQPHGSVTQSQGSSSQSQGISSSSTSTMPNSSQSSHSSSGTLSSLETVSTQELYSIPEDQEPEDQEPEEPTPAPWARLWALQDGFANLECVNDNYWFGRDKSCEYCFDEPLLKRTDKYRTYSKKHFRIFREVGPKNSYIAYIEDHSGNGTFVNTELVGKGKRRPLNNNSEIALSLSRNKVVPVER

SEQ ID NO: 2758 - protein, 295 aa, Homo sapiens
MSRESDVEAQQSHGSSACSQPHGSVTQSQGSSSQSQGISSSSTSTMPNSSQSSHSSSGTLSSLETVSTQELYSIPEDQEPEDQEPEEPTPAPWARLWALQDGFANLETESGHVTQSDLELLLSSDPPASASQSAGIRECVNDNYWFGRDKSCEYCFDEPLLKRTDKYRTYSKKHFRIFREVGPKNSYIAYIEDHSGNGTFVNTELVGKGKRRPLNNNSEIALSLSRNKVFVFFDLTVDDQSVYPKALRDEYIMSKTLGSGACGEVKLAFERKTCKKVAIKIISKRKFAIGSAREA

SEQ ID NO: 2759 - protein, 586 aa, Homo sapiens
MSRESDVEAQQSHGSSACSQPHGSVTQSQGSSSQSQGISSSSTSTMPNSSQSSHSSSGTLSSLETVSTQELYSIPEDQEPEDQEPEEPTPAPWARLWALQDGFANLETESGHVTQSDLELLLSSDPPASASQSAGIRGVRHHPRPVCSLKCVNDNYWFGRDKSCEYCFDEPLLKRTDKYRTYSKKHFRIFREVGPKNSYIAYIEDHSGNGTFVNTELVGKGKRRPLNNNSEIALSLSRNKVFVFFDLTVDDQSVYPKALRDEYIMSKTLGSGACGEVKLAFERKTCKKVAIKIISKRKFAIGSAREADPALNVETEIEILKKLNHPCIIKIKNFFDAEDYYIVLELMEGGELFDKVVGNKRLKEATCKLYFYQMLLAVQYLHENGIIHRDLKPENVLLSSQEEDCLIKITDFGHSKILGETSLMRTLCGTPTYLAPEVLVSVGTAGYNRAVDCWSLGVILFICLSGYPPFSEHRTQVSLKDQITSGKYNFIPEVWAEVSEKALDLVKKLLVVDPKARFTTEEALRHPWLQDEDMKRKFQDLLSEENESTALPQVLAQPSTSRKRPREGEAEGAETTKRPAVCAAVL

SEQ ID NO: 2760 - protein, 452 aa, Homo sapiens
MSRESDVEAQQSHGSSACSQPHGSVTQSQGSSSQSQGISSSSTSTMPNSSQSSHSSSGTLSSLETVSTQELYSIPEDQEPEDQEPEEPTPAPWARLWALQDGFANLVFVFFDLTVDDQSVYPKALRDEYIMSKTLGSGACGEVKLAFERKTCKKVAIKIISKRKFAIGSAREADPALNVETEIEILKKLNHPCIIKIKNFFDAEDYYIVLELMEGGELFDKVVGNKRLKEATCKLYFYQMLLAVQYLHENGIIHRDLKPENVLLSSQEEDCLIKITDFGHSKILGETSLMRTLCGTPTYLAPEVLVSVGTAGYNRAVDCWSLGVILFICLSGYPPFSEHRTQVSLKDQITSGKYNFIPEVWAEVSEKALDLVKKLLVVDPKARFTTEEALRHPWLQDEDMKRKFQDLLSEENESTALPQVLAQPSTSRKRPREGEAEGAETTKRPAVCAAVL

SEQ ID NO: 2761 - protein, 45 aa, Homo sapiens
SSDPPASASQSAGIRGVRHHPRPVCSLIETGFHRVSQDGLHLLTS

SEQ ID NO: 2762 - protein, 276 aa, Homo sapiens
  VARIANT 1: note = misc_feature - Xaa can be any naturally occurring amino acid
XIGSAREADPALNVETEIEILKKLNHPCIIKIKNFFDAEDYYIVLELMEGGELFDKVVGNKRLKEATCKLYFYQMLLAVQYLHENGIIHRDLKPENVLLSSQEEDCLIKITDFGHSKILGETSLMRTLCGTPTYLAPEVLVSVGTAGYNRAVDCWSLGVILFIWTQVSLKDQITSGKYNFIPEVWAEVSEKALDLVKKLLVVDPKARFTTEEALRHPWLQDEDMKRKFQDLLSEENESTALPQVLAQPSTSRKRPREGEAEGAETTKRPAVCAAVL

SEQ ID NO: 2763 - protein, 144 aa, Homo sapiens
  VARIANT 1: note = misc_feature - Xaa can be any naturally occurring amino acid
XIISKRKFAIGSAREADPALNVETEIEILKKLNHPCIIKIKNFFDAEDYYIVLELMEGGELFDKVVGNKRLKEATCKLYFYQMLLAVQDEDMKRKFQDLLSEENESTALPQVLAQPSTSRKRPREGEAEGAETTKRPAVCAAVL

SEQ ID NO: 2764 - protein, 38 aa, Homo sapiens
MRSAAVLALLLCAGQVTALPVNSPMNKGDTEMNGSFPF

SEQ ID NO: 2765 - protein, 457 aa, Homo sapiens
MRSAAVLALLLCAGQVTALPVNSPMNKGDTEVMKCIVEVISDTLSKPSPMPVSQECFETLRGDERILSILRHQNLLKELQDLALQGAKERAHQQKKHSGFEDELSEVLENQSSQAELKEAVEEPSSKDVMEKREDSKEAEKSGEATDGARPQALPEPMQESKAEGNNQAPGEEEEEEEEATNTHPPASLPSQKYPGPQAEGDSEGLSQGLVDREKGLSAEPGWQAKREEEEEEEEEAEAGEEAVPEEEGPTVVLNPHPSLGYKEIRKGESRSEALAVDGAGKPGAEEAQDPEGKGEQEHSQQKEEEEEMAVVPQGLFRGGKSGELEQEEERLSKEWEDSKRWSKMDQLAKELTAEKRLEGQEEEEDNRDSSMKLSFRARAYGFRGPGPQLRRGWRPSSREDSLEAGLPLQVRGYPEEKKEEEGSANRRPEDQELESLSAIEAELEKVAHQLQALRRG

SEQ ID NO: 2766 - protein, 306 aa, Homo sapiens
MRSAAVLALLLCAGQVTALPVNSPMNKGDTEVMKCIVEVISDTLSKPSPMPVSQECFETLRGDERILSILRHQNLLKELQDLALQGAKERAHQQKKHSGFEDELSEVLENQSSQAELKGRSEALAVDGAGKPGAEEAQDPEGKGEQEHSQQKEEEEEMAVVPQGLFRGGKSGELEQEEERLSKEWEDSKRWSKMDQLAKELTAEKRLEGQEEEEDNRDSSMKLSFRARAYGFRGPGPQLRRGWRPSSREDSLEAGLPLQVRGYPEEKKEEEGSANRRPEDQELESLSAIEAELEKVAHQLQALRRG

SEQ ID NO: 2767 - protein, 289 aa, Homo sapiens
MPVDNRNHNEGMVTRCIIEVLSNALSKSSAPPITPECRQVLKTSRKDVKDKETTENENTKFEVRLLRDPADASEAHESSSRGEAGAPGEEDIQGPTKADTEKWAEGGGHSRERADEPQWSLYPSDSQVSEEVKTRHSEKSQREDEEEEEGENYQKGERGEDSSEEKHLEEPGETQNAFLNERKQASAIKKEELVARSETHAAGHSQEKTHSREKSSQESGEETGSQENHPQESKGQPRSQEESEEGEEDATSEVDKRRTRPRHHHGRSRPDRSSQGGSLPSEEKGHPQE

SEQ ID NO: 2768 - protein, 677 aa, Homo sapiens
MQPTLLLSLLGAVGLAAVNSMPVDNRNHNEGMVTRCIIEVLSNALSKSSAPPITPECRQVLKTSRKDVKDKETTENENTKFEVRLLRDPADASEAHESSSRGEAGAPGEEDIQGPTKADTEKWAEGGGHSRERADEPQWSLYPSDSQVSEEVKTRHSEKSQREDEEEEEGENYQKGERGEDSSEEKHLEEPGETQNAFLNERKQASAIKKEELVARSETHAAGHSQEKTHSREKSSQESGEETGSQENHPQESKGQPRSQEESEEGEEDATSEVDKRRTRPRHHHGRSRPDRSSQGGSLPSEEKGHPQEESEESNVSMASLGEKRDHHSTHYRASEEEPEYGEEIKGYPGVQAPEDLEWERYRGRGSEEYRAPRPQSEESWDEEDKRNYPSLELDKMAHGYGEESEEERGLEPGKGRHHRGRGGEPRAYFMSDTREEKRFLGEGHHRVQENQMDKARRHPQGAWKELDRNYLNYGEEGAPGKWQQQGDLQDTKENREEARFQDKQYSSHHTAEKRKRLGELFNPYYDPLQWKSSHFERRDNMNDNFLEGEEENELTLNEKNFFPEYNYDWWEKKPFSEDVNWGYEKRNLARVPKLDLKRQYDRVAQLDQLLHYRKKSAEFPDFYDSEEPVSTHQEAENEKDRADQTVLTEDEKKELENLAAMDLELQKIAEKFSQRG

SEQ ID NO: 2769 - protein, 383 aa, Homo sapiens
MGVKASQTGFVVLVLLQCCSAYKLVCYYTSWSQYREGDGSCFPDALDRFLCTHIIYSFANISNDHIDTWEWNDVTLYGMLNTLKNRNPNLKTLLSVGGWNFGSQRFSKIASNTQSRRTFIKSVPPFLRTHGFDGLDLAWLYPGRRDKQHFTTLIKEMKAEFIKEAQPGKKQLLLSAALSAGKVTIDSSYDIAKISQHLDFISIMTYDFHGAWRGTTGHHSPLFRGQEDASPDRFSNTDYAVGYMLRLGAPASKLVMGIPTFGRSFTLASSETGVGAPISGPGIPGRFTKEAGTLAYYEICDFLRGATVHRILGQQVPYATKGNQWVGYDDQESVKSKVQYLKDRQLAGAMVWALDLDDFQGSFCGQDLRFPLTNAIKDALAAT

SEQ ID NO: 2770 - protein, 152 aa, Homo sapiens
  VARIANT 1: note = misc_feature - Xaa can be any naturally occurring amino acid
XLLLSAALSAGKVTIDSSYDIAKISQHLDFISIMTYDFHGAWRGTTGHHSPLFRGQEDASPDRFSNTICDFLRGATVHRILGQQVPYATKGNQWVGYDDQESVKSKVQYLKDRQLAGAMVWALDLDDFQGSFCGQDLRFPLTNAIKDALAAT

SEQ ID NO: 2771 - protein, 380 aa, Homo sapiens
MGATTMDQKSLWAGSAYKLVCYFTNWSQDRQEPGKFTPENIDPFLCSHLIYSFASIENNKVIIKDKSEVMLYQTINSLKTKNPKLKILLSIGGYLFGSKGFHPMVDSSTSRLEFINSIILFLRNHNFDGLDVSWIYPDQKENTHFTVLIHELAEAFQKDFTKSTKERLLLTAGVSAGRQMIDNSYQVEKLAKDLDFINLLSFDFHGSWEKPLITGHNSPLSKGWQDRGPSSYYNVEYAVGYWIHKGMPSEKVVMGIPTYGHSFTLASAETTVGAPASGPGAAGPITESSGFLAYYEICQFLKGAKITRLQDQQVPYAVKGNQWVGYDDVKSMETKVQFLKNLNLGGAMIWSIDMDDFTGKSCNQGPYPLVQAVKRSLGSL

SEQ ID NO: 2772 - protein, 182 aa, Homo sapiens
MGATTMDQKSLWAGVVVLLLLQGGSAYKLVCYFTNWSQDRQEPGKFTPENIDPFLCSHLIYSFASIENNKVIIKDKSEVMLYQTINSLKTKNPKLKILLSIGGYLFGSKGFHPMVDSSTSRLEFINSIILFLRNHNFDGLDELAEAFQKDFTKSTKERLLLTAGVSAGRQMIDNSYQVEKLA

SEQ ID NO: 2773 - protein, 201 aa, Homo sapiens
MGATTMDQKSLWAGVVVLLLLQGGSAYKLVCYFTNWSQDRQEPGKFTPENIDPFLCSHLIYSFASIENNKVIIKDKSEVMLYQTINSLKTKNPKLKILLSIGGYLFGSKGFHPMVDSSTSRLEFINSIILFLRNHNFDGLDVSWIYPDQKENTHFTVLIHELAEAFQKDFTKSTKERLLLTAGVSAGRQMIDNSYQVEKLA

SEQ ID NO: 2774 - protein, 221 aa, Homo sapiens
MGATTMDQKSLWAGVVVLLLLQGGSAYKLVCYFTNWSQDRQEPGKFTPENIDPFLCSHLIYSFASIENNKVIIKDKSEVMLYQTINSLKTKNPKLKILLSIGGYLFGSKGFHPMVDSSTSRLEFINSIILFLRNHNFDGLDVSWIYPDQKENTHFTVLIHELAEAFQKDFTKSTKERLLLTAGVSAGRQMIDNSYQVEKLAKDLDFINLLSFDFHGSWEKP

SEQ ID NO: 2775 - protein, 390 aa, Homo sapiens
MGATTMDQKSLWAGVVVLLLLQGGSAYKLVCYFTNWSQDRQEPGKFTPENIDPFLCSHLIYSFASIENNKVIIKDKSEVMLYQTINSLKTKNPKLKILLSIGGYLFGSKGFHPMVDSSTSRLEFINSIILFLRNHNFDGLDVSWIYPDQKENTHFTVLIHELAEAFQKDFTKSTKERLLLTAGVSAGRQMIDNSYQVEKLAKDLDFINLLSFDFHGSWEKPLITGHNSPLSKGWQDRGPSSYYNVEYAVGYWIHKGMPSEKVVMGIPTYGHSFTLASAETTVGAPASGPGAAGPITESSGFLAYYEICQFLKGAKITRLQDQQVPYAVKGNQWVGYDDVKSMETKVQFLKNLNLGGAMIWSIDMDDFTGKSCNQGPYPLVQAVKRSLGSL

SEQ ID NO: 2776 - protein, 390 aa, Homo sapiens; identical to SEQ ID NO: 2775

SEQ ID NO: 2777 - protein, 145 aa, Homo sapiens
MLYQTINSLKTKFHPMVDSSTSRLEFINSIILFLRNHNFDGLDVSWIYPDQKENTHFTVLIHELAEAFQKDFTKSTKERLLLTAGVSAGRQMIDNSYQVEKLAKDLDFINLLSFDFHGSWEKPLITGHNSPLSKGWQDRGPSSYY

SEQ ID NO: 2778 - protein, 122 aa, Homo sapiens
MLYQTINSLKTKNPKLKILLSIGGYLFGSKGFHPMVDSSTSRLEFINSIILFLRNHNFDGLDVSWIYPDQKENTHFTVLIHELAEAFQKDFTKSTKERLLLTAGVSAGRQMIDNSYQVEKLA

SEQ ID NO: 2779 - protein, 169 aa, Homo sapiens
MLYQTINSLKTKNPKLKILLSIGGYLFGSKGFHPMVDSSTSRLEFINSIILFLRNHNFDGLDVSWIYPDQKENTHFTVLIHELAEAFQKDFTKSTKERLLLTAGVSAGRQMIDNSYQVEKLAKDLDFINLLSFDFHGSWEKPLITGHNSPLSKGWQDRGPSSYYNVEYA

SEQ ID NO: 2780 - protein, 311 aa, Homo sapiens
MLYQTINSLKTKNPKLKILLSIGGYLFGSKGFHPMVDSSTSRLEFINSIILFLRNHNFDGLDVSWIYPDQKENTHFTVLIHELAEAFQKDFTKSTKERLLLTAGVSAGRQMIDNSYQVEKLAKDLDFINLLSFDFHGSWEKPLITGHNSPLSKGWQDRGPSSYYNVEYAVGYWIHKGMPSEKVVMGIPTYGHSFTLASAETTVGAPASGPGAAGPITESSGFLAYYEICQFLKGAKITRLQDQQVPYAVKGNQWVGYDDVKSMETKVQFLKNLNLGGAMIWSIDMDDFTGKSCNQGPYPLVQAVKRSLGSL

SEQ ID NO: 2781 - protein, 311 aa, Homo sapiens; identical to SEQ ID NO: 2780

SEQ ID NO: 2782 - protein, 183 aa, Homo sapiens
PDQKENTHFTVLIHELAEAFQKDFTKSTKERLLLTAGVSAGRQMIDNSYQVEKLAKDLDFINLLSFDFHGSWEKPLITGHNSPLSKGWQDRGPSSYYNVICQFLKGAKITRLQDQQVPYAVKGNQWVGYDDVKSMETKVQFLKNLNLGGAMIWSIDMDDFTGKSCNQGPYPLVQAVKRSLGSL

SEQ ID NO: 2783 - protein, 161 aa, Homo sapiens
  VARIANT 1: note = misc_feature - Xaa can be any naturally occurring amino acid
XFTNWSQDRQEPGKFTPENIDPFLCSHLIYSFASIENNKVIIKDKSEVMLYQTINSLKTKNPKLKILLSIGGYLFGSKGDLDFINLLSFDFHGSWEKPLITGHNSPLSKGWQDRGPSSYYNVEYAVGYWIHKGMPSEKVVMGIPTYGHSFTLASAETTVGA

SEQ ID NO: 2784 - protein, 42 aa, Homo sapiens
YEICQFLKGAKITRLQDQQVPYAVKGNQWVGYDDVKSMETKD

SEQ ID NO: 2785 - protein, 420 aa, Homo sapiens
ETSSSVHEQVADSGAQAVAFQSGGESSIVWNSQLKTLLAIGGWNFGTAPFTAMVSTPENRQTFITSVIKFLRQYEFDGLDFDWEYPGSRGSPPQDKHLFTVLVQEMREAFEQEAKQINKPRLMVTAAVAAGISNIQSGYEIPQLSQYLDYIHVMTYDLHGSWEGYTGENSPLYKYPTDTGSNAYLNVDYVMNYWKDNGAPAEKLIVGFPTYGHNFILSNPSNTGIGAPTSGAGPAGPYAKESGIWAYYEICTFLKNGATQGWDAPQEVPYAYQGNVWVGYDNIKSFDIKAQWLKHNKFGGAMVWAIDLDDFTGTFCNQGKFPLISTLKKALGLQSASCTAPAQPIEPITAAPSGSGNGSGSSSSGGSSGGSGFCAVRANGLYPVANNRNAFWHCVNGVTYQQNCQAGLVFDTSCDCCNWA

SEQ ID NO: 2786 - protein, 315 aa, Homo sapiens
MREAFEQEAKQINKPRLMVTAAVAAGISNIQSGYEIPQLSQYLDYIHVMTYDLHGSWEGYTGENSPLYKYPTDTGSNAYLNVDYVMNYWKDNGAPAEKLIVGFPTYGHNFILSNPSNTGIGAPTSGAGPAGPYAKESGIWAYYEICTFLKNGATQGWDAPQEVPYAYQGNVWVGYDNIKSFDIKAQWLKHNKFGGAMVWAIDLDDFTGTFCNQGKFPLISTLKKALGLQSASCTAPAQPIEPITAAPSGSGNGSGSSSSGGSSGGSGFCAVRANGLYPVANNRNAFWHCVNGVTYQQNCQAGLVFDTSCDCCNWA

SEQ ID NO: 2787 - protein, 315 aa, Homo sapiens; identical to SEQ ID NO: 2786

SEQ ID NO: 2788 - protein, 287 aa, Homo sapiens
MREAFEQEAKQINKPRLMVTAAVAAGISNIQSGYEIPQLSQYLDYIHVMTYDLHGSWEGYTGENSPLYKYPTDTGSNAYLNVDYVMNYWKDNGAPAEKLIVGFPTYGHNFILSNPSNTGIGAPTSGAGPAGPYAKESGIWAYYEICTFLKNGATQGWDAPQEVPYAYQGNVWVGYDNIKSFDIKAQWLKHNKFGGAMVWAIDLDDFTGTFCNQGKFPLISTLKKALGLQSASCTAPAQPIEPITAAPSGSGNGSGSSSSGGSSGGSGFCAVRANGLYPVANNRNAFW

SEQ ID NO: 2789 - protein, 315 aa, Homo sapiens; identical to SEQ ID NO: 2786

SEQ ID NO: 2790 - protein, 476 aa, Homo sapiens [sequence omitted]

SEQ ID NO: 2791 - protein, 476 aa, Homo sapiens [sequence omitted]

SEQ ID NO: 2792 - protein, 368 aa, Homo sapiens
MVSTPENRQTFITSVIKFLRQYEFDGLDFDWEYPGSRGSPPQDKHLFTVLVQEMREAFEQEAKQINKPRLMVTAAVAAGISNIQSGYEIPQLSQYLDYIHVMTYDLHGSWEGYTGENSPLYKYPTDTGSNAYLNVDYVMNYWKDNGAPAEKLIVGFPTYGHNFILSNPSNTGIGAPTSGAGPAGPYAKESGIWAYYEICTFLKNGATQGWDAPQEVPYAYQGNVWVGYDNIKSFDIKAQWLKHNKFGGAMVWAIDLDDFTGTFCNQGKFPLISTLKKALGLQSASCTAPAQPIEPITAAPSGSGNGSGSSSSGGSSGGSGFCAVRANGLYPVANNRNAFWHCVNGVTYQQNCQAGLVFDTSCDCCNWA

SEQ ID NO: 2793 - protein, 101 aa, Homo sapiens
MVSTPENRQTFITSVIKFLRQYEFDGLDFDWEYPGSRGSPPQDKHLFTVLVQMRKLKYREDLSNLPKITQLVGIITSSAVWPQSPLLLSITLGCPLLLRNA

SEQ ID NO: 2794 - protein, 69 aa, Homo sapiens
LKDHRPRMVWDSQASEHFFEYKKSRSGRHVVFYPTLKSLQVRLELARELGVGVSIWELGQGLDYFYDLL

SEQ ID NO: 2795 - protein, 26 aa, Homo sapiens
MRTLFNLLWLALACSPVHTTLSKSDA

SEQ ID NO: 2796 - protein, 84 aa, Homo sapiens
MRTLFNLLWLALACSPVHTTLSKSDAKKAASKTLLEKAGAQWRDLGSPQPLPPRFKRFSCFSLPSSWDYRVSFQISRCKTGVWW

SEQ ID NO: 2797 - protein, 84 aa, Homo sapiens
MRTLFNLLWLALACSPVHTTLSKSDAKKAASKTLLEKSQFSDKPVQDRGLVVTDLKAESVVLEHRSYCSAKARDRHFAGDVLGY

SEQ ID NO: 2798 - protein, 116 aa, Homo sapiens
MRTLFNLLWLALACSPVHTTLSKSDAKKAASKTLLEKSQFSDKPVQDRGLVVTDLKAESVVLEHRSYCSAKARDRHFAGDVLGYVTPWNSHGYDVTKVFGSKFTQISPVWLQLKRR

SEQ ID NO: 2799 - protein, 119 aa, Homo sapiens
MRTLFNLLWLALACSPVHTTLSKSDAKKAASKTLLEKSQFSDKPVQDRGLVVTDLKAESVVLEHRSYCSAKARDRHFAGDVLGYVTPWNSHGYDVTKVFGSKFTQISPVWLQLKRRGRE

SEQ ID NO: 2800 - protein, 224 aa, Homo sapiens
MRTLFNLLWLALACSPVHTTLSKSDAKKAASKTLLEKSQFSDKPVQDRGLVVTDLKAESVVLEHRSYCSAKARDRHFAGDVLGYVTPWNSHGYDVTKVFGSKFTQISPVWLQLKRRGREMFEARLLALLVIPPAITPGTDQLGMFTHKEFEQLAPVLDGFSLMTYDYSTAHQPGPNAPLSWVRACVQVLDPKSKWRSKILLGLNFYGMDYATSKDAREPVVGAR

SEQ ID NO: 2801 - protein, 132 aa, Homo sapiens
MRTLFNLLWLALACSPVHTTLSKSDAKKAASKTLLEKSQFSDKPVQDRGLVVTDLKAESVVLEHRSYCSAKARDRHFAGDVLGYVTPWNSHGYDVTKVFGSKFTQISPVWLQLKRRGREMFEVTGLHDVDQG

SEQ ID NO: 2802 - protein, 162 aa, Homo sapiens
MRTLFNLLWLALACSPVHTTLSKSDAKKAASKTLLEKSQFSDKPVQDRGLVVTDLKAESVVLEHRSYCSAKARDRHFAGDVLGYVTPWNSHGYDVTKVFGSKFTQISPVWLQLKRRGREMFEVTGLHDVDQGSHPSCLTVLAPQAEKSGGCELSGSMPRACT

SEQ ID NO: 2803 - protein, 393 aa, Homo sapiens
MRTLFNLLWLALACSPVHTTLSKSDAKKAASKTLLEKSQFSDKPVQDRGLVVTDLKAESVVLEHRSYCSAKARDRHFAGDVLGYVTPWNSHGYDVTKVFGSKFTQISPVWLQLKRRGREMFEVTGLHDVDQGWMRAVRKHAKGLHIVPRLLFEDWTYDDFRNVLDSEDEIEELSKTVVQVAKNQHFDGFVVEVWNQLLSQKRVGLIHMLTHLAEALHQARLLALLVIPPAITPGTDQLGMFTHKEFEQLAPVLDGFSLMTYDYSTAHQPGPNAPLSWVRACVQVLDPKSKWRSKILLGLNFYGMDYATSKDAREPVVGARYIQTLKDHRPRMVWDSQASEHFFEYKKSRSGRHVVFYPTLKSLQVRLELARELGVGVSIWELGQGLDYFYDLL

SEQ ID NO: 2804 - protein, 393 aa, Homo sapiens; identical to SEQ ID NO: 2803

SEQ ID NO: 2805 - protein, 393 aa, Homo sapiens; identical to SEQ ID NO: 2803

SEQ ID NO: 2806 - protein, 362 aa, Homo sapiens
MRTLFNLLWLALACSPVHTTLSKSDAKKAASKTLLEKSQFSDKPVQDRGLVVTDLKAESVVLEHRSYCSAKARDRHFAGDVLGYVTPWNSHGYDVTKVFGSKFTQISPVWLQLKRRGREMFEVTGLHDVDQGWMRAVRKHAKGLHIVPRLLFEDWTYDDFRNVLDSEDEIEELSKTVVQVAKNQHFDGFVVEVWNQLLSQKRVTDQLGMFTHKEFEQLAPVLDGFSLMTYDYSTAHQPGPNAPLSWVRACVQVLDPKSKWRSKILLGLNFYGMDYATSKDAREPVVGARYIQTLKDHRPRMVWDSQASEHFFEYKKSRSGRHVVFYPTLKSLQVRLELARELGVGVSIWELGQGLDYFYDLL

SEQ ID NO: 2807 - protein, 38 aa, Homo sapiens
MRTLFNLLWLALACSPVHTTLSKSDAKKAASKTLLEKV

SEQ ID NO: 2808 - protein, 418 aa, Homo sapiens
MRTLFNLLWLALACSPVHTTLSKSDAKKAASKTLLEKVKFCSCCPGWSAMARSWLTATSATQSQFSDKPVQDRGLVVTDLKAESVVLEHRSYCSAKARDRHFAGDVLGYVTPWNSHGYDVTKVFGSKFTQISPVWLQLKRRGREMFEVTGLHDVDQGWMRAVRKHAKGLHIVPRLLFEDWTYDDFRNVLDSEDEIEELSKTVVQVAKNQHFDGFVVEVWNQLLSQKRVGLIHMLTHLAEALHQARLLALLVIPPAITPGTDQLGMFTHKEFEQLAPVLDGFSLMTYDYSTAHQPGPNAPLSWVRACVQVLDPKSKWRSKILLGLNFYGMDYATSKDAREPVVGARYIQTLKDHRPRMVWDSQASEHFFEYKKSRSGRHVVFYPTLKSLQVRLELARELGVGVSIWELGQGLDYFYDLL

SEQ ID NO: 2809 - protein, 418 aa, Homo sapiens; identical to SEQ ID NO: 2808

SEQ ID NO: 2810 - protein, 84 aa, Homo sapiens
  VARIANT 1: note = misc_feature - Xaa can be any naturally occurring amino acid
XDAREPVVGARYIQTLKDHRPRMVWDSQASEHFFEYKKSRSGRHVVFYPTLKSLQVRLELARELGVGVSIWELGQGLDYFYDLL

SEQ ID NO: 2811 - protein, 108 aa, Homo sapiens
  VARIANT 1: note = misc_feature - Xaa can be any naturally occurring amino acid
XPKSKWRSKILLGLNFYGMDYATSKDAREPVVGARYIQTLKDHRPRMVWDSQASEHFFEYKKSRSGRHVVFYPTLKSLQVRLELARELGVGVSIWELGQGLDYFYDLL

SEQ ID NO: 2812 - protein, 72 aa, Homo sapiens
  VARIANT 1: note = misc_feature - Xaa can be any naturally occurring amino acid
XQLGMFTHKEFEQLAPVLDGFSLMTYDYSTAHQPGPNAPLSWVRACVQVLDPKSKWRSKILLGLNFYGTSRH

SEQ ID NO: 2813 - protein, 447 aa, Homo sapiens
MVRSVAWAGFMVLLMIPWGSAAKLVCYFTNWAQYRQGEARFLPKDLDPSLCTHLIYAFAGMTNHQLSTTEWNDETLYQEFNGLKKMFTDMVATANNRQTFVNSAIRFLRKYSFDGLDLDWEYPGSQGSPAVDKERFTTLVQDLANAFQQEAQTSGKERLLLSAAVPAGQTYVDAGYEVDKIAQNLDFVNLMAYDFHGSWEKVTGHNSPLYKRQEESGAAASLNVDAAVQQWLQKGTPASKLILGMPTYGRSFTLASSSDTRVGAPATGSGTPGPFTKEGGMLAYYEVCSWKGATKQRIQDQKVPYIFRDNQWVGFDDVESFKTKVSYLKQKGLGGAMVWALDLDDFAGFSCNQGRYPLIQTLRQELSLPYLPSGTPELEVPKPGQPSEPEHGPSPGQDTFCQGKADGLYPNPRERSSFYSCAAGRLFQQSCPTGLVFSNSCKCCTWN

SEQ ID NO: 2814 - protein, 466 aa, Homo sapiens
MVRSVAWAGFMVLLMIPWGSAAKLVCYFTNWAQYRQGEARFLPKDLDPSLCTHLIYAFAGMTNHQLSTTEWNDETLYQEFNGLKKMNPKLKTLLAIGGWNFGTQKFTDMVATANNRQTFVNSAIRFLRKYSFDGLDLDWEYPGSQGSPAVDKERFTTLVQDLANAFQQEAQTSGKERLLLSAAVPAGQTYVDAGYEVDKIAQNLDFVNLMAYDFHGSWEKVTGHNSPLYKRQEESGAAASLNVDAAVQQWLQKGTPASKLILGMPTYGRSFTLASSSDTRVGAPATGSGTPGPFTKEGGMLAYYEVCSWKGATKQRIQDQKVPYIFRDNQWVGFDDVESFKTKVSYLKQKGLGGAMVWALDLDDFAGFSCNQGRYPLIQTLRQELSLPYLPSGTPELEVPKPGQPSEPEHGPSPGQDTFCQGKADGLYPNPRERSSFYSCAAGRLFQQSCPTGLVFSNSCKCCTWN

SEQ ID NO: 2815 - protein, 387 aa, Homo sapiens
MVRSVAWAGFMVLLMIPWGSAAKLVCYFTNWAQYRQGEARFLPKDLDPSLCTHLIYAFAGMTNHQLSTTEWNDETLYQEFNGLKKMNPKLKTLLAIGGWNFGTQKFTDMVATANNRQTFVNSAIRFLRKYSFDGLDLDWEYPGSQGSPAVDKERFTTLVQDLANAFQQEAQTSGKERLLLSAAVPAGQTYVDAGYEVDKIAQNLDFVNLMAYDFHGSWEKVTGHNSPLYKRQEESGAAASLNVDAAVQQWLQKGTPASKLILGMPTYGRSFTLASSSDTRVGAPATGSGTPGPFTKEGGMLAYYEVCSWKGATKQRIQDQKVPYIFRDNQWVGFDDVESFKTKVSYLKQKGLGGAMVWALDLDDFAGFSCNQGRYPLIQTLRQELNG

SEQ ID NO: 2816 - protein, 361 aa, Homo sapiens
MVRSVAWAGFMVLLMIPWGSAAKLVCYFTNWAQYRQGEARFLPKDLDPSLCTHLIYAFAGMTNHQLSTTEWNDETLYQEFNGLKKMNPKLKTLLAIGGWNFGTQKFTDMVATANNRQTFVNSAIRFLRKYSFDGLDLDWEYPGSQGSPAVDKERFTTLVQDLANAFQQEAQTSGKERLLLSAAVPAGQTYVDAGYEVDKIAQNLDFVNLMAYDFHGSWEKVTGHNSPLYKRQEESGAAASLNVDAAVQQWLQKGTPASKLILGMPTYGRSFTLASSSDTRVGAPATGSGTPGPFTKEGGMLAYYEVCSWKGATKQRIQDQKVPYIFRDNQWVGFDDVESFKTKVMLTLRQGDCKMTDVQAA

SEQ ID NO: 2817 - protein, 66 aa, Homo sapiens
MEPLLLGRGLIVYLMFLLLKFSKAIEIPSSVQQVPTIIKQSKVQVAFPFDEYFQIECEAKGNPEPT

SEQ ID NO: 2818 - protein, 85 aa, Homo sapiens
MEPLLLGRGLIVYLMFLLLKFSKAIEIPSSVQQVPTIIKQSKVQVAFPFDEYFQIECEAKGNPEPTFSWTKDGNPFYFTDHRIIP

SEQ ID NO: 2819 - protein, 96 aa, Homo sapiens
MEPLLLGRGLIVYLMFLLLKFSKAIEIPSSVQQVPTIIKQSKVQVAFPFDEYFQIECEAKGNPEPTFSWTKDGNPFYFTDHRIIPSNNSGTFRIPN

SEQ ID NO: 2820 - protein, 181 aa, Homo sapiens
MEPLLLGRGLIVYLMFLLLKFSKAIEIPSSVQQVPTIIKQSKVQVAFPFDEYFQIECEAKGNPEPTFSWTKDGNPFYFTDHRIIPSNNSGTFRIPNEGHISHFQGKYRCFASNKLGIAMSEEIEFIVPSVPKFPKEKIDPLEVEEGDPIVLPCNPPKGLPPLHIYWMNIELEHIEQDERVY

SEQ ID NO: 2821 - protein, 1224 aa, Homo sapiens
MEPLLLGRGLIVYLMFLLLKFSKAIEIPSSVQQVPTIIKQSKVQVAFPFDEYFQIECEAKGNPEPTFSWTKDGNPFYFTDHRIIPSNNSGTFRIPNEGHISHFQGKYRCFASNKLGIAMSEEIEFIVPSVPKFPKEKIDPLEVEEGDPIVLPCNPPKGLPPLHIYWMNIELEHIEQDERVYMSQKGDLYFANVEEKDSRNDYCCFAAFPRLRTIVQKMPMKLTVNSLKHANDSSSSTEIGSKANSIKQRKPKLLLPPTESGSESSITILKGEILLLECFAEGLPTPQVDWNKIGGDLPKGRETKENYGKTLKIENVSYQDKGNYRCTASNFLGTATHDFHVIVEEPPRWTKKPQSAVYSTGSNGILLCEAEGEPQPTIKWRVNGSPVDNHPFAGDVVFPREISFTNLQPNHTAVYQCEASNVHGTILANANIDVVDVRPLIQTKDGENYATVVGYSAFLHCEFFASPEAVVSWQKVEEVKPLEGRRYHIYENGTLQINRTTEEDAGSYSCWVENAIGKTAVTANLDIRNATKLRVSPKNPRIPKLHMLELHCESKCDSHLKHSLKLSWSKDGEAFEINGTEDGRIIIDGANLTISNVTLEDQGIYCCSAHTALDSAADITQVTVLDVPDPPENLHLSERQNRSVRLTWEAGADHNSNISEYIVEFEGNKEEPGRWEELTRVQGKKTTVILPLAPFVRYQFRVIAVNEVGRSQPSQPSDHHETPPAAPDRNPQNIRVQASQPKEMIIKWEPLKSMEQNGPGLEYRVTWKPQGAPVEWEEETVTNHTLRVMTPAVYAPYDVKVQAINQLGSGPDPQSVTLYSGEDYPDTAPVIHGVDVINSTLVKVTWSTVPKDRVHGRLKGYQINWWKTKSLLDGRTHPKEVNILRFSGQRNSGMVPSLDAFSEFHLTVLAYNSKGAGPESEPYIFQTPEGVPEQPTFLKVIKVDKDTATLSWGLPKKLNGNLTGYLLQYQIINDTYEIGELNDINITTPSKPSWHLSNLNATTKYKFYLRACTSQGCGKPITEESSTLGEGSKGIGKISGVNLTQKTHPIEVFEPGAEHIVRLMTKNWGDNDSIFQDVIETRGREYAGLYDDISTQGWFIGLMCAIALLTLLLLTVCFVKRNRGGKYSVKEKEDLHPDPEIQSVKDETFGEYSDSDEKPLKGSLRSLNRDMQPTESADSLVEYGEGDHGLFSEDGSFIGAYAGSKEKGSVESNGSSTATFPLRA

SEQ ID NO: 2822 - protein, 1171 aa, Homo sapiens
MEPLLLGRGLIVYLMFLLLKFSKAIEIPSSVQQVPTIIKQSKVQVAFPFDEYFQIECEAKGNPEPTFSWTKDGNPFYFTDHRIIPSNNSGTFRIPNEGHISHFQGKYRCFASNKLGIAMSEEIEFIVPSVPKFPKEKIDPLEVEEGDPIVLPCNPPKGLPPLHIYWMNIELEHIEQDERVYMSQKGDLYFANVEEKDSRNDYCCFAAFPRLRTIVQKMPMKLTVNSLKHANDSSSSTEIGSKANSIKQRKPKLLLPPTESGSESSITILKGEILLLECFAEGLPTPQVDWNKIGGDLPKGRETKENYGKTLKIENVSYQDKGNYRCTASNFLGTATHDFHVIVEEPPRWTKKPQSAVYSTGSNGILLCEAEGEPQPTIKWRVNGSPVDNHPFAGDVVFPREISFTNLQPNHTAVYQCEASNVHGTILANANIDVVDVRPLIQTKDGENYATVVGYSAFLHCEFFASPEAVVSWQKVEEVKPLEGRRYHIYENGTLQINRTTEEDAGSYSCWVENAIGKTAVTANLDIRNATKLRVSPKNPRIPKLHMLELHCESKCDSHLKHSLKLSWSKDGEAFEINGTEDGRIIIDGANLTISNVTLEDQGIYCCSAHTALDSAADITQVTVLDVPDPPENLHLSERQNRSVRLTWEAGADHNSNISEYIVEFEGNKEEPGRWEELTRVQGKKTTVILPLAPFVRYQFRVIAVNEVGRSQPSQPSDHHETPPAAPDRNPQNIRVQASQPKEMIIKWEPLKSMEQNGPGLEYRVTWKPQGAPVEWEEETVTNHTLRVMTPAVYAPYDVKVQAINQLGSGPDPQSVTLYSGEDYPDTAPVIHGVDVINSTLVKVTWSTVPKDRVHGRLKGYQINWWKTKSLLDGRTHPKEVNILRFSGQRNSGMVPSLDAFSEFHLTVLAYNSKGAGPESEPYIFQTPEGVPEQPTFLKVIKVDKDTATLSWGLPKKLNGNLTGYLLQYQIINDTYEIGELNDINITTPSKPSWHLSNLNATTKYKFYLRACTSQGCGKPITEESSTLGEGKYAGLYDDISTQGWFIGLMCAIALLTLLLLTVCFVKRNRGGKYSVKEKEDLHPDPEIQSVKDETFGEYSDSDEKPLKGSLRSLNRDMQPTESADSLVEYGEGDHGLFSEDGSFIGAYAGSKEKGSVESNGSSTATFPLRA

SEQ ID NO: 2823 - protein, 1208 aa, Homo sapiens
MEPLLLGRGLIVYLMFLLLKFSKAIEIPSSVQQVPTIIKQSKVQVAFPFDEYFQIECEAKGNPEPTFSWTKDGNPFYFTDHRIIPSNNSGTFRIPNEGHISHFQGKYRCFASNKLGIAMSEEIEFIVPSVPKFPKEKIDPLEVEEGDPIVLPCNPPKGLPPLHIYWMNIELEHIEQDERVYMSQKGDLYFANVEEKDSRNDYCCFAAFPRLRTIVQKMPMKLTVNSSNSIKQRKPKLLLPPTESGSESSITILKGEILLLECFAEGLPTPQVDWNKIGGDLPKGRETKENYGKTLKIENVSYQDKGNYRCTASNFLGTATHDFHVIVEEPPRWTKKPQSAVYSTGSNGILLCEAEGEPQPTIKWRVNGSPVDNHPFAGDVVFPREISFTNLQPNHTAVYQCEASNVHGTILANANIDVVDVRPLIQTKDGENYATVVGYSAFLHCEFFASPEAVVSWQKVEEVKPLEGRRYHIYENGTLQINRTTEEDAGSYSCWVENAIGKTAVTANLDIRNATKLRVSPKNPRIPKLHMLELHCESKCDSHLKHSLKLSWSKDGEAFEINGTEDGRIIIDGANLTISNVTLEDQGIYCCSAHTALDSAADITQVTVLDVPDPPENLHLSERQNRSVRLTWEAGADHNSNISEYIVEFEGNKEEPGRWEELTRVQGKKTTVILPLAPFVRYQFRVIAVNEVGRSQPSQPSDHHETPPAAPDRNPQNIRVQASQPKEMIIKWEPLKSMEQNGPGLEYRVTWKPQGAPVEWEEETVTNHTLRVMTPAVYAPYDVKVQAINQLGSGPDPQSVTLYSGEDYPDTAPVIHGVDVINSTLVKVTWSTVPKDRVHGRLKGYQINWWKTKSLLDGRTHPKEVNILRFSGQRNSGMVPSLDAFSEFHLTVLAYNSKGAGPESEPYIFQTPEGVPEQPTFLKVIKVDKDTATLSWGLPKKLNGNLTGYLLQYQIINDTYEIGELNDINITTPSKPSWHLSNLNATTKYKFYLRACTSQGCGKPITEESSTLGEGSKGIGKISGVNLTQKTHPIEVFEPGAEHIVRLMTKNWGDNDSIFQDVIETRGREYAGLYDDISTQGWFIGLMCAIALLTLLLLTVCFVKRNRGGKYSVKEKEDLHPDPEIQSVKDETFGEYSDSDEKPLKGSLRSLNRDMQPTESADSLVEYGEGDHGLFSEDGSFIGAYAGSKEKGSVESNGSSTATFPLRA

SEQ ID NO: 2824 - protein, 93 aa, Homo sapiens
MPPAWSGESMDRGVVGLGSTKTQRGARAPPPQTAEGREGAPGAVVAMAPGSGARGAGDAGRGWSLLPLCASLFLSLFFFFWSVSVRGEAARRK

SEQ ID NO: 2825 - protein, 358 aa, Homo sapiens
  VARIANT 1: note = misc_feature - Xaa can be any naturally occurring amino acid
XSVTLYSGEDYPDTAPVIHGVDVINSTLVKVTWSTVPKDRVHGRLKGYQINWWKTKSLLDGRTHPKEVNILRFSGQRNSGMVPSLDAFSEFHLTVLAYNSKGAGPESEPYIFQTPEGVPEQPTFLKVIKVDKDTATLSWGLPKKLNGNLTGYLLQYQIINDTYEIGELNDINITTPSKPSWHLSNLNATTKYKFYLRACTSQGCGKPITEESSTLGEGKYAGLYDDISTQGWFIGLMCAIALLTLLLLTVCFVKRNRGGKYSVKEKEDLHPDPEIQSVKDETFGEYSDSDEKPLKGSLRSLNRDMQPTESADSLVEYGEGDHGLFSEDGSFIGAYAGSKEKGSVESNGSSTATFPLRA

SEQ ID NO: 2826 - protein, 23 aa, Homo sapiens
MALTLFDTDEYRPPVWKSYCFMA

SEQ ID NO: 2827 - protein, 459 aa, Homo sapiens
MALTLFDTDEYRPPVWKSYLYQLQQEAPHPRRITCTCEVENRPKYYGREFHGMISREAADQLLIVAEGSYLIRESQRQPGTYTLALRFGSQTRNFRLYYDGKHFVGEKRFESIHDLVTDGLITLYIETKAAEYIAKMTINPIYEHVGYTTLNREPAYKKHMPVLKETHDERDSTGQDGVSEKRLTSLVRRATLKENEQIPKYEKIHNFKVHTFRGPHWCEYCANFMWGLIAQGVKCADCGLNVHKQCSKMVPNDCKPDLKHVKKVYSCDLTTLVKAHTTKRPMVVDMCIREIESRGLNSEGLYRVSGFSDLIEDVKMAFDRDGEKADISVNMYEDINIITGALKLYFRDLPIPLITYDAYPKFIESAKIMDPDEQLETLHEALKLLPPAHCETLRYLMAHLKRVTLHEKENLMNAENLGIVFGPTLMRSPELDAMAALNDIRYQRLVVELLIKNEDILF

SEQ ID NO: 2828 - protein, 433 aa, Homo sapiens
MALTLFDTDEYRPPVWKSYLYQLQQEAPHPRRITCTCEVENRPKYYGREFHGMISREAADQLLIVAEGSYLIRESQRQPGTYTLALRFGSQTRNFRLYYDGKHFVGEKRFESIHDLVTDGLITLYIETKAAEYIAKMTINPIYEHVGYTTLNREPAYKKHMPVLKETHDERDSTGQDGVSEKRVHTFRGPHWCEYCANFMWGLIAQGVKCADCGLNVHKQCSKMVPNDCKPDLKHVKKVYSCDLTTLVKAHTTKRPMVVDMCIREIESRGLNSEGLYRVSGFSDLIEDVKMAFDRDGEKADISVNMYEDINIITGALKLYFRDLPIPLITYDAYPKFIESAKIMDPDEQLETLHEALKLLPPAHCETLRYLMAHLKRVTLHEKENLMNAENLGIVFGPTLMRSPELDAMAALNDIRYQRLVVELLIKNEDILF

SEQ ID NO: 2829 - protein, 22 aa, Homo sapiens
MALTLFDTDEYRPPVWKSYYIL

SEQ ID NO: 2830 - protein, 185 aa, Homo sapiens
MATMGLLMLLTLAASPHFLSICFHHVCVHTFRGPHWCEYCANFMWGLIAQGVKCADCGLNVHKQCSKMVPNDCKPDLKHVKKVYSCDLTTLVKAHTTKRPMVVDMCIREIESRGLNSEGLYRVSGFSDLIEDVKMAFDRDGEKADISVNMYEDINIITGALKLYFRDLPIPLITYDAYPKFIESA

SEQ ID NO: 2831 - protein, 275 aa, Homo sapiens
MATMGLLMLLTLAASPHFLSICFHHVHTFRGPHWCEYCANFMWGLIAQGVKCADCGLNVHKQCSKMVPNDCKPDLKHVKKVYSCDLTTLVKAHTTKRPMVVDMCIREIESRGLNSEGLYRVSGFSDLIEDVKMAFDRDGEKADISVNMYEDINIITGALKLYFRDLPIPLITYDAYPKFIESAKIMDPDEQLETLHEALKLLPPAHCETLRYLMAHLKRVTLHEKENLMNAENLGIVFGPTLMRSPELDAMAALNDIRYQRLVVELLIKNEDILF

SEQ ID NO: 2832 - protein, 334 aa, Homo sapiens
MPSKESWSGRKTNRAAVHKSKQEGRQQDLLIAALGMKLGSPKSSVTIWQPLKLFAYSQLTSLVRRATLKENEQIPKYEKIHNFKVHTFRGPHWCEYCANFMWGLIAQGVKCADCGLNVHKQCSKMVPNDCKPDLKHVKKVYSCDLTTLVKAHTTKRPMVVDMCIREIESRGLNSEGLYRVSGFSDLIEDVKMAFDRDGEKADISVNMYEDINIITGALKLYFRDLPIPLITYDAYPKFIESAKIMDPDEQLETLHEALKLLPPAHCETLRYLMAHLKRVTLHEKENLMNAENLGIVFGPTLMRSPELDAMAALNDIRYQRLVVELLIKNEDILF

SEQ ID NO: 2833 - protein, 165 aa, Homo sapiens
MPSKESWSGRKTNRAAVHKSKQEGRQQDLLIAALGMKLGSPKSSVTIWQPLKLFAYSQLTSLVRRATLKENEQIPKYEKIHNFKVHTFRGPHWCEYCANFMWGLIAQGVKCAVLEARKSKIKLAAGSVSDCGLNVHKQCSKMVPNDCKPDLKHVKKVYSCDLTTL

SEQ ID NO: 2834 - protein, 186 aa, Homo sapiens
MRGGRNRDRLTSLVRRATLKENEQIPKYEKIHNFKVHTFRGPHWCEYCANFMWGLIAQGVKCADCGLNVHKQCSKMVPNDCKPDLKHVKKVYSCDLTTLVKAHTTKRPMVVDMCIREIESRGLNSEGLYRVSGFSDLIEDVKMAFDRDGEKADISVNMYEDINIITGALKLYFRDLPIPLITYDAY

SEQ ID NO: 2835 - protein, 173 aa, Homo sapiens
MWGLIAQGVKCADCGLNVHKQCSKMVPNDCKPDLKHVKKVYSCDLTTLVKAHTTKRPMVVDMCIREIESRGLNSEGLYRVSGFSDLIEDVKMAFDRDGEKADISVNMYEDINIITGALKLYFRDLPIPLITYDAYPKFIESAKIMDPDEQLETLHEALKLLPPAHCETLRYLM

SEQ ID NO: 2836 - protein, 194 aa, Homo sapiens
MWGLIAQGVKCAVLEARKSKIKLAAGSVSDCGLNVHKQCSKMVPNDCKPDLKHVKKVYSCDLTTLVKAHTTKRPMVVDMCIREIESRGLNSEGLYRVSGFSDLIEDVKMAFDRDGEKADISVNMYEDINIITGALKLYFRDLPIPLITYDAYPKFIESAKIMDPDEQLETLHEALKLLPPAHCETLRYLMAHLK

SEQ ID NO: 2837 - protein, 613 aa, Homo sapiens
MAVVTLGEERPIGHLHLALRHLLEQHGDDFDWFFLVPDTTYTEAHGLARLTGHLSLASAAHLYLGRPQDFIGGEPTPGRYCHGGFGVLLSRMLLQQLRPHLEGCRNDIVSARPDEWLGRCILDATGVGCTGDHEGVHYSHLELSPGEPVQEGDPHFRSALTAHPVRDPVHMYQLHKAFARAELERTYQEIQELQWEIQNTSHLAVDGDQAAAWPVGIPAPSRPASRFEVLRWDYFTEQHAFSCADGSPRCPLRGADRADVADVLGTALEELNRRYHPALRLQKQQLVNGYRRFDPARGMEYTLDLQLEALTPQGGRRPLTRRVQLLRPLSRVEILPVPYVTEASRLTVLLPLAAAERDLAPGFLEAFATAALEPGDAAAALTLLLLYEPRQAQRVAHADVFAPVKAHVAELERRFPGARVPWLSVQTAAPSPLRLMDLLSKKHPLDTLFLLAGPDTVLTPDFLNRCRMHAISGWQAFFPMHFQAFHPAVAPPQGPGPPELGRDTGRFDRQAASEACFYNSDYVAARGRLAAASEQEEELLESLDVYELFLHFSSLHVLRAVEPALLQRYRAQTCSARLSEDLYHRCLQSVLEGLGSRTQLAMLLFEQEQGNST

SEQ ID NO: 2838 - protein, 775 aa, Homo sapiens
MRASLLLSVLRPAGPVAVGISLGFTLSLLSVTWVEEPCGPGPPQPGDSELPPRGNTNAARRPNSVQPGAEREKPGAGEGAGENWEPRVLPYHPAQPGQAAKKAVRTRYISTELGIRQRLLVAVLTSQTTLPTLGVAVNRTLGHRLERVVFLTGARGRRAPPGMAVVTLGEERPIGHLHLALRHLLEQHGDDFDWFFLVPDTTYTEAHGLARLTGHLSLASAAHLYLGRPQDFIGGEPTPGRYCHGGFGVLLSRMLLQQLRPHLEGCRNDIVSARPDEWLGRCILDATGVGCTGDHEGVHYSHLELSPGEPVQEGDPHFRSALTAHPVRDPVHMYQLHKAFARAELERTYQEIQELQWEIQNTSHLAVDGDQAAAWPVGIPAPSRPASRFEVLRWDYFTEQHAFSCADGSPRCPLRGADRADVADVLGTALEELNRRYHPALRLQKQQLVNGYRRFDPARGMEYTLDLQLEALTPQGGRRPLTRRVQLLRPLSRVEILPVPYVTEASRLTVLLPLAAAERDLAPGFLEAFATAALEPGDAAAALTLLLLYEPRQAQRVAHADVFAPVKAHVAELERRFPGARVPWLSVQTAAPSPLRLMDLLSKKHPLDTLFLLAGPDTVLTPDFLNRCRMHAISGWQAFFPMHFQAFHPAVAPPQGPGPPELGRDTGRFDRQAASEACFYNSDYVAARGRLAAASEQEEELLESLDVYELFLHFSSLHVLRAVEPALLQRYRAQTCSARLSEDLYHRCLQSVLEGLGSRTQLAMLLFEQEQGNST

SEQ ID NO: 2839 - protein, 298 aa, Homo sapiens
MRASLLLSVLRPAGPVAVGISLGFTLSLLSVTWVEEPCGPGPPQPGDSELPPRGNTNAARRPNSVQPGAEREKPGAGEGAGENWEPRVLPYHPAQPGQAAKKAVRTRYISTELGIRQRLLVAVLTSQTTLPTLGVAVNRTLGHRLERVVFLTGARGRRAPPGMAVVTLGEERPIGHLHLALRHLLEQHGDDFDWFFLVPDTTYTEAHGLARLTGHLSLASAAHLYLGRPQDFIGGEPTPGRYCHGGFGVLLSRMLLQQLRPHLEGCRNDIVSARPDEWLGRCILDATGVGCTGDHEVG

SEQ ID NO: 2840 - protein, 123 aa, Homo sapiens
CHGGFGYLLSRSLLLRLRPHLDGCRGDILSARPDEWLGRCLIDSLGVGCVSQHQGQQYRSFELAKNRDPEKEGSSAFLSAFAVHPVSEGTLMYRLHKRFSALELERAYSEIEQLQNCPKKAQG

SEQ ID NO: 2841 - protein, 90 aa, Homo sapiens
MLSLARPPLPPTGLRTRTRYIQTELGSRERLLVAVLTSRATLSTLAVAVNRTVAHHFPRLLYFTGQRGARAPAGMQVVSHGDERPAWLMS

SEQ ID NO: 2842 - protein, 764 aa, Homo sapiens
MLSLARPPLPPTGLRTSLSLLRVSWIQGEGEDPCVEAVGERGGPQNPDSRARLDQSDEDFKPRIVPYYRDPNKPYKKVLRTRYIQTELGSRERLLVAVLTSRATLSTLAVAVNRTVAHHFPRLLYFTGQRGARAPAGMQVVSHGDERPAWLMSETLRHLHTHFGADYDWFFIMQDDTYVQAPRLAALAGHLSINQDLYLGRAEEFIGAGEQARYCHGGFGYLLSRSLLLRLRPHLDGCRGDILSARPDEWLGRCLIDSLGVGCVSQHQGQQYRSFELAKNRDPEKEGSSAFLSAFAVHPVSEGTLMYRLHKRFSALELERAYSEIEQLQAQIRNLTVLTPEGEAGLSWPVGLPAPFTPHSRFEVLGWDYFTEQHTFSCADGAPKCPLQGASRADVGDALETALEQLNRRYQPRLRFQKQRLLNGYRRFDPARGMEYTLDLLLECVTQRGHRRALARRVSLLRPLSRVEILPMPYVTEATRVQLVLPLLVAEAAAAPAFLEAFAANVLEPREHALLTLLLVYGPREGGRGAPDPFLGVKAAAAELERRYPGTRLAWLAVRAEAPSQVRLMDVVSKKHPVDTLFFLTTVWTRPGPEVLNRCRMNAISGWQAFFPVHFQEFNPALSPQRSPPGPPGAGPDPPSPPGADPSRGAPIGGRFDRQASAEGCFYNADYLAARARLAGELAGQEEEEALEGLEVMDVFLRFSGLHLFRAVEPGLVQKFSLRDCSPRLSEELYHRCRLSNLEGLGGRAQLAMALFEQEQANST

SEQ ID NO: 2843 - protein, 772 aa, Homo sapiens
MRLSSLLALLRPALPLILGLSLGCSLSLLRVSWIQGEGEDPCVEAVGERGGPQNPDSRARLDQSDEDFKPRIVPYYRDPNKPYKKVLRTRYIQTELGSRERLLVAVLTSRATLSTLAVAVNRTVAHHFPRLLYFTGQRGARAPAGMQVVSHGDERPAWLMSETLRHLHTHFGADYDWFFIMQDDTYVQAPRLAALAGHLSINQDLYLGRAEEFIGAGEQARYCHGGFGYLLSRSLLLRLRPHLDGCRGDILSARPDEWLGRCLIDSLGVGCVSQHQGQQYRSFELAKNRDPEKEGSSAFLSAFAVHPVSEGTLMYRLHKRFSALELERAYSEIEQLQAQIRNLTVLTPEGEAGLSWPVGLPAPFTPHSRFEVLGWDYFTEQHTFSCADGAPKCPLQGASRADVGDALETALEQLNRRYQPRLRFQKQRLLNGYRRFDPARGMEYTLDLLLECVTQRGHRRALARRVSLLRPLSRVEILPMPYVTEATRVQLVLPLLVAEAAAAPAFLEAFAANVLEPREHALLTLLLVYGPREGGRGAPDPFLGVKAAAAELERRYPGTRLAWLAVRAEAPSQVRLMDVVSKKHPVDTLFFLTTVWTRPGPEVLNRCRMNAISGWQAFFPVHFQEFNPALSPQRSPPGPPGAGPDPPSPPGADPSRGAPIGGRFDRQASAEGCFYNADYLAARARLAGELAGQEEEEALEGLEVMDVFLRFSGLHLFRAVEPGLVQKFSLRDCSPRLSEELYHRCRLSNLEGLGGRAQLAMALFEQEQANST

SEQ ID NO: 2844 - protein, 86 aa, Homo sapiens
MPSLPAPPAPLLLLGLLLLGSRPARGAGPEPPVLPIRSEKEPLPVRGAAGCTFGGKVYALDETWHPDLGEPFGVMRCVLCACEAGP

SEQ ID NO: 2845 - protein, 955 aa, Homo sapiens
MPSLPAPPAPLLLLGLLLLGSRPARGAGPEPPVLPIRSEKEPLPVRGAAGCTFGGKVYALDETWHPDLGEPFGVMRCVLCACEAPQWGRRTRGPGRVSCKNIKPECPTPACGQPRQLPGHCCQTCPQERSSSERQPSGLSFEYPRDPEHRSYSDRGEPGAEERARGDGHTDFVALLTGPRSQAVARARVSLLRSSLRFSISYRRLDRPTRIRFSDSNGSVLFEHPAAPTQDGLVCGVWRAVPRLSLRLLRAEQLHVALVTLTHPSGEVWGPLIRHRALAAETFSAILTLEGPPQQGVGGITLLTLSDTEDSLHFLLLFRGLLEPRSGGLTQVPLRLQILHQGQLLRELQANVSAQEPGFAEVLPNLTVQEMDWLVLGELQMALEWAGRPGLRISGHIAARKSCDVLQSVLCGADALIPVQTGAAGSASLTLLGNGSLIYQVQVVGTSSEVVAMTLETKPQRRDQRTVLCHMAGLQPGGHTAVGICPGLGARGAHMLLQNELFLNVGTKDFPDGELRGHVAALPYCGHSARHDTLPVPLAGALVLPPVKSQAAGHAWLSLDTHCHLHYEVLLAGLGGSEQGTVTAHLLGPPGTPGPRRLLKGFYGSEAQGVVKDLEPELLRHLAKGMASLMITTKGSPRGELRGQVHIANQCEVGGLRLEAAGAEGVRALGAPDTASAAPPVVPGLPALAPAKPGGPGRPRDPNTCFFEGQQRPHGARWAPNYDPLCSLCTCQRRTVICDPVVCPPPSCPHPVQAPDQCCPVCPEKQDVRDLPGLPRSRDPGEGCYFDGDRSWRAAGTRWHPVVPPFGLIKCAVCTCKGGTGEVHCEKVQCPRLACAQPVRVNPTDCCKQCPVGSGAHPQLGDPMQADGPRGCRFAGQWFPESQSWHPSVPPFGEMSCITCRCGAGVPHCERDDCSLPLSCGSGKESRCCSRCTAHRRPAPETRTDPELEKEAEGS

SEQ ID NO: 2846 - protein, 915 aa, Homo sapiens
MPSLPAPPAPLLLLGLLLLGSRPARGAGPEPPVLPIRSEKEPLPVRGAAGCTFGGKVYALDETWHPDLGEPFGVMRCVLCACEAPQWGRRTRGPGRVSCKNIKPECPTPACGQPRQLPGHCCQTCPQERSSSERQPSGLSFEYPRDPEHRSYSDRGEPGAEERARGDGHTDFVALLTGPRSQAVARARVSLLRSSLRFSISYRRLDRPTRIRFSDSNGSVLFEHPAAPTQDGLVCGVWRAVPRLSLRLLRAEQLHVALVTLTHPSGEVWGPLIRHRALAAETFSAILTLEGPPQQGVGGITLLTLSDTEDSLHFLLLFRGLLEPRSGGLTQVPLRLQILHQGQLLRELQANVSAQEPGFAEVLPNLTVQEMDWLVLGELQMALEWAGRPGLRISGHIAARKSCDVLQSVLCGADALIPVQTGAAGSASLTLLGNGSLIYQAVGICPGLGARGAHMLLQNELFLNVGTKDFPDGELRGHVAALPYCGHSARHDTLPVPLAGALVLPPVKSQAAGHAWLSLDTHCHLHYEVLLAGLGGSEQGTVTAHLLGPPGTPGPRRLLKGFYGSEAQGVVKDLEPELLRHLAKGMASLMITTKGSPRGELRGQVHIANQCEVGGLRLEAAGAEGVRALGAPDTASAAPPVVPGLPALAPAKPGGPGRPRDPNTCFFEGQQRPHGARWAPNYDPLCSLCTCQRRTVICDPVVCPPPSCPHPVQAPDQCCPVCPEKQDVRDLPGLPRSRDPGEGCYFDGDRSWRAAGTRWHPVVPPFGLIKCAVCTCKGGTGEVHCEKVQCPRLACAQPVRVNPTDCCKQCPVGSGAHPQLGDPMQADGPRGCRFAGQWFPESQSWHPSVPPFGEMSCITCRCGAGVPHCERDDCSLPLSCGSGKESRCCSRCTAHRRPAPETRTDPELEKEAEGS

SEQ ID NO: 2847 - protein, 350 aa, Homo sapiens
MPSLPAPPAPLLLLGLLLLGSRPARGAGPEPPVLPIRSEKEPLPVRGAAGCTFGGKVYALDETWHPDLGEPFGVMRCVLCACEAPQWGRRTRGPGRVSCKNIKPECPTPACGQPRQLPGHCCQTCPQERSSSERQPSGLSFEYPRDPEHRSYSDRGEPGAEERARGDGHTDFVALLTGPRSQAVARARVSLLRSSLRFSISYRRLDRPTRIRFSDSNGSVLFEHPAAPTQDGLVCGVWRAVPRLSLRLLRAEQLHVALVTLTHPSGEVWGPLIRHRALAAETFSAILTLEGPPQQGVGGITLLTLSDTEDSLHFLLLFRGLLEPRSGDSTPGAATARTSGQCLSPGTRLC

SEQ ID NO: 2848 - protein, 954 aa, Homo sapiens
MPSLPAPPAPLLLLGLLLLGSRPARGAGPEPPVLPIRSEKEPLPVRGAAGCTFGGKVYALDETWHPDLGEPFGVMRCVLCACEAPQWGRRTRGPGRVSCKNIKPECPTPACGQPRQLPGHCCQTCPQERSSSERQPSGLSFEYPRDPEHRSYSDRGEPGAEERARGDGHTDFVALLTGPRSQAVARARVSLLRSSLRFSISYRRLDRPTRIRFSDSNGSVLFEHPAAPTQDGLVCGVWRAVPRLSLRLLRAEQLHVALVTLTHPSGEVWGPLIRHRALAAETFSAILTLEGPPQQGVGGITLLTLSDTEDSLHFLLLFRGLLEPRSGGLTQVPLRLQILHQGQLLRELQANVSAQEPGFAEVLPNLTVQEMDWLVLGELQMALEWAGRPGLRISGHIAARKSCDVLQSVLCGADALIPVQTGAAGSASLTLLGNGSLIYQVQVVGTSSEVVAMTLETKPQRRDQRTVLCHMAGLQPGGHTAVGICPGLGARGAHMLLQNELFLNVGTKDFPDGELRGHVAALPYCGHSARHDTLPVPLAGALVLPPVKSQAAGHAWLSLDTHCHLHYEVLLAGLGGSEQGTVTAHLLGPPGTPGPRRLLKGFYGSEAQGVVKDLEPELLRHLAKGMASLMITTKGSPRGELRGQVHIANQCEVGGLRLEAAGAEGVRALGAPDTASAAPPVVPGLPALAPAKPGGPGRPRDPNTCFFEGQQRPHGARWAPNYDPLCSLCTCQRRTVICDPVVCPPPSCPHPVQAPDQCCPVCPEKQDVRDLPGLPRSRDPGEGCYFDGDRSWRAAGTRWHPVVPPFGLIKCAVCTCKGGTGEVHCEKVQCPRLACAQPVRVNPTDCCKQCPVGSGAHPQLGDPMQADGPRGCRFAGQWFPESQSWHPSVPPFGEMSCITCRCGAGVPHCERDDCSLPLSCGSGKESRCCSRCTAHRRPPETRTDPELEKEAEGS

SEQ ID NO: 2849 - protein, 94 aa, Homo sapiens
MPSLPAPPAPLLLLGLLLLGSRPARGAGPEPPVLPIRSEKEPLPVRGAAGCTFGGKVYALDETWHPDLGEPFGVMRCVLCACEATGTLRPREMK

SEQ ID NO: 2850 - protein, 450 aa, Homo sapiens
MGGMKYIFSLLFFLLLEGGKTEQVKHSETYCMFQDKKYRVGERWHPYLEPYGLVYCVNCICSENGNVLCSRVRCPNVHCLSPVHIPHLCCPRCPDSLPPVNNKVTSKSCEYNGTTYQHGELFVAEGLFQNRQPNQCTQCSCSEGNVYCGLKTCPKLTCAFPVSVPDSCCRVCRGDGELSWEHSDGDIFRQPANREARHSYHRSHYDPPPSRQAGGLSRFPGARSHRGALMDSQQASGTIVQIVINNKHKHGQVCVSNGKTYSHGESWHPNLRAFGIVECVLCTCNVTKQECKKIHCPNRYPCKYPQKIDGKCCKVCPGKKAKELPGQSFDNKGYFCGEETMPVYESVFMEDGETTRKIALETERPPQVEVHVWTIRKGILQHFHIEKISKRMFEELPHFKLVTRTTLSQWKIFTEGEAQISQMCSSRVCRTELEDLVKVLYLERSEKGHC

SEQ ID NO: 2851 - protein, 456 aa, Homo sapiens
MRKKWKMGGMKYIFSLLFFLLLEGGKTEQVKHSETYCMFQDKKYRVGERWHPYLEPYGLVYCVNCICSENGNVLCSRVRCPNVHCLSPVHIPHLCCPRCPDSLPPVNNKVTSKSCEYNGTTYQHGELFVAEGLFQNRQPNQCTQCSCSEGNVYCGLKTCPKLTCAFPVSVPDSCCRVCRGDGELSWEHSDGDIFRQPANREARHSYHRSHYDPPPSRQAGGLSRFPGARSHRGALMDSQQASGTIVQIVINNKHKHGQVCVSNGKTYSHGESWHPNLRAFGIVECVLCTCNVTKQECKKIHCPNRYPCKYPQKIDGKCCKVCPGKKAKELPGQSFDNKGYFCGEETMPVYESVFMEDGETTRKIALETERPPQVEVHVWTIRKGILQHFHIEKISKRMFEELPHFKLVTRTTLSQWKIFTEGEAQISQMCSSRVCRTELEDLVKVLYLERSEKGHC

SEQ ID NO: 2852 - protein, 457 aa, Homo sapiens
MRKKWKMGGMKYIFSLLFFLLLEGGKTEQVKHSETYCMFQDKKYRVGERWHPYLEPYGLVYCVNCICSENGNVLCSRVRCPNVHCLSPVHIPHLCCPRCPDSLPPVNNKVTSKSCEYNGTTYQHGELFVAEGLFQNRQPNQCTQCSCSEGNVYCGLKTCPKLTCAFPVSVPDSCCRVCRGDGELSWEHSDGDIFRQPANREARHSYHRSHYDPPPSRQAGGLSRFPGARSHRGALMDSQQASGTIVQIVINNKHKHGQVCVSNGKTYSHGESWHPNLRAFGIVECVLCTCNVTKQECKKIHCPNRYPCKYPQKIDGKCCKVCPGKKAKEELPGQSFDNKGYFCGEETMPVYESVFMEDGETTRKIALETERPPQVEVHVWTIRKGILQHFHIEKISKRMFEELPHFKLVTRTTLSQWKIFTEGEAQISQMCSSRVCRTELEDLVKVLYLERSEKGHC

SEQ ID NO: 2853 - protein, 458 aa, Homo sapiens
MRKKWKMGGMKYIFSLLFFLLLEGGKTEQVKHSETYCMFQDKKYRVGERWHPYLEPYGLVYCVNCICSENGNVLCSRVRCPNVHCLSPVHIPHLCCPRCPEDSLPPVNNKVTSKSCEYNGTTYQHGELFVAEGLFQNRQPNQCTQCSCSEGNVYCGLKTCPKLTCAFPVSVPDSCCRVCRGDGELSWEHSDGDIFRQPANREARHSYHRSHYDPPPSRQAGGLSRFPGARSHRGALMDSQQASGTIVQIVINNKHKHGQVCVSNGKTYSHGESWHPNLRAFGIVECVLCTCNVTKQECKKIHCPNRYPCKYPQKIDGKCCKVCPGKKAKEELPGQSFDNKGYFCGEETMPVYESVFMEDGETTRKIALETERPPQVEVHVWTIRKGILQHFHIEKISKRMFEELPHFKLVTRTTLSQWKIFTEGEAQISQMCSSRVCRTELEDLVKVLYLERSEKGHC

SEQ ID NO: 2854 - protein, 378 aa, Homo sapiens
MRKKWKMGGMKYIFSLLFFLLLEGGKTEQVKHSETYCMFQDKKYRVGERWHPYLEPYGLVYCVNCICSENGNVLCSRVRCPNVHCLSPVHIPHLCCPRCPGDGELSWEHSDGDIFRQPANREARHSYHRSHYDPPPSRQAGGLSRFPGARSHRGALMDSQQASGTIVQIVINNKHKHGQVCVSNGKTYSHGESWHPNLRAFGIVECVLCTCNVTKQECKKIHCPNRYPCKYPQKIDGKCCKVCPGKKAKEELPGQSFDNKGYFCGEETMPVYESVFMEDGETTRKIALETERPPQVEVHVWTIRKGILQHFHIEKISKRMFEELPHFKLVTRTTLSQWKIFTEGEAQISQMCSSRVCRTELEDLVKVLYLERSEKGHC

SEQ ID NO: 2855 - protein, 142 aa, Homo sapiens
MALVGLPGPDMFCLFHGKRYSPGESWHPYLEPQGLMYCLRCTCSEGAHVSCYRLHCPPVHCPQPVTEPQQCCPKCVEPHTPSGLRAPPKSCQHNGTMYQHGEIFSAHELFPSRLPNQCVLCSCTMRQVSNRMKRTVCSRSMG

SEQ ID NO: 2856 - protein, 93 aa, Homo sapiens
MALVGLPGPDMFCLFHGKRYSPGESWHPYLEPQGLMYCLRCTCSENLTLPLDSGPHQSPASTTGPCTNTERSSVPMSCSPPACPTSVSSAAAQ

SEQ ID NO: 2857 - protein, 142 aa, Homo sapiens
MALVGLPGPDMFCLFHGKRYSPGESWHPYLEPQGLMYCLRCTCSENLTLPLDSGPHQSPASTTGPCTNTERSSVPMSCSPPACPTSVSSAAAQRARSTAASQPAPNQAAQHPSRCQTPAARPAKMRQVSNRMKRTVCSRSMG

SEQ ID NO: 2858 - protein, 451 aa, Homo sapiens
MVPEVRVLSSLLGLALLWFPLDSHARARPDMFCLFHGKRYSPGESWHPYLEPQGLMYCLRCTCSEGAHVSCYRLHCPPVHCPQPVTEPQQCCPKCVEPHTPSGLRAPPKSCQHNGTMYQHGEIFSAHELFPSRLPNQCVLCSCTEGQIYCGLTTCPEPGCPAPLPLPDSCCQACKDEASEQSDEEDSVQSLHGVRHPQDPCSSDAGRKRGPGTPAPTGLSAPLSFIPRHFRPKGAGSTTVKIVLKEKHKKACVHGGKTYSHGEVWHPAFRAFGPLPCILCTCEDGRQDCQRVTCPTEYPCRHPEKVAGKCCKICPEDKADPGHSEISSTRCPKAPGRVLVHTSVSPSPDNLRRFALEHEASDLVEIYLWKLVKDEETEAQRGEVPGPRPHSQNLPLDSDQESQEARLPERGTALPTARWPPRRSLERLPSPDPGAEGHGQSRQSDQDITKT

SEQ ID NO: 2859 - protein, 429 aa, Homo sapiens
MVPEVRVLSSLLGLALLWFPLDSHARARPDMFCLFHGKRYSPGESWHPYLEPQGLMYCLRCTCSEGAHVSCYRLHCPPVHCPQPVTEPQQCCPKCVEPHTPSGLRAPPKSCQHNGTMYQHGEIFSAHELFPSRLPNQCVLCSCTEGQIYCGLTTCPEPGCPAPLPLPDSCCQACKDEASEQSDEEDSVQSLHGVRHPQDPCSSDAGRKRGPGTPAPTGLSAPLSFIPRHFRPKGAGSTTVKIVLKEKHKKACVHGGKTYSHGEVWHPAFRAFGPLPCILCTCEDGRQDCQRVTCPTEYPCRHPEKVAGKCCKICPEDKADPGHSEISSTRCPKAPGRVLVHTSVSPSPDNLRRFALEHEASDLVEIYLWKLVKGIFHLTQIKKVRKQDFQKEAQHFRLLAGPHEGHWNVFLAQTLELKVTASPDKVTKT

SEQ ID NO: 2860 - protein, 308 aa, Homo sapiens
MVPEVRVLSSLLGLALLWFPLDSHARARPDMFCLFHGKRYSPGESWHPYLEPQGLMYCLRCTCSEGAHVSCYRLHCPPVHCPQPVTEPQQCCPKCVEPHTPSGLRAPPKSCQHNGTMYQHGEIFSAHELFPSRLPNQCVLCSCTEGQIYCGLTTCPEPGCPAPLPLPDSCCQACKDEASEQSDEEDSVQSLHGVRHPQDPCSSDAGRKRGPGTPAPTGLSAPLSFIPRHFRPKGAGSTTVKIVLKEKHKKEDKADPGHSEISSTRCPKAPGRVLVHTSVSPSPDNLRRFALEHEASDLVEIYLWKLVK

SEQ ID NO: 2861 - protein, 281 aa, Homo sapiens [sequence omitted]

SEQ ID NO: 2862 - protein, 91 aa, Homo sapiens
  VARIANT 1: note = misc_feature - Xaa can be any naturally occurring amino acid
XGDRSRISKENRQKKTGFTVEATGRQGRGMTGNLPLDSDQESQEARLPERGTALPTARWPPRRSLERLPSPDPGAEGHGQSRQSDQDITKT

SEQ ID NO: 2863 - protein, 177 aa, Homo sapiens
  VARIANT 1: note = misc_feature - Xaa can be any naturally occurring amino acid
XSSDAGRKRGPGTPAPTGLSAPLSFIPRHFRPKGAGSTTVKIVLKEKHKKACVHGGKTYSHGEVWHPAFRAFGPLPCILCTCEDGRQDCQRVTCPTEYPCRHPEKVAGKCCKICPEDKADPGHSEISSTRCPKAPGRVLVHTSVSPSPDNLRRFALEHEASDLVEIYLWKLVTGTSS

SEQ ID NO: 2864 - protein, 507 aa, Homo sapiens
MAGGEEAKRPPPRAPGDPLSSPSPTALPQGGSHTETEDRLFKHLFRGYNRWARPVPNTSDVVIVRFGLSIAQLIDVDEKNQMMTTNVWLKQEWSDYKLRWNPTDFGNITSLRVPSEMIWIPDIVLYNNADGEFAVTHMTKAHLFSTGTVHWVPPAIYKSSCSIDVTFFPFDQQNCKMKFGSWTYDKAKIDLEQMEQTVDLKDYWESGEWAIVNATGTYNSKKYDCCAEIYPDVTYAFVIRRLPLFYTINLIIPCLLISCLTVLVFYLPSDCGEKITLCISVLLSLTVFLLLITEIIPSTSLVIPLIGEYLLFTMIFVTLSIVITVFVLNVHHRSPSTHTMPHWVRGALLGCVPRWLLMNRPPPPVELCHPLRLKLSPSYHWLESNVDAEEREVVVEEEDRWACAGHVAPSVGTLCSHGHLHSGASGPKAEALLQEGELLLSPHMQKALEGVHYIADHLRSEDADSSVKEDWKYVAMVIDRIFLWLFIIVCFLGTIGLFLPPFLAGMI

SEQ ID NO: 2865 - protein, 19 aa, Homo sapiens
MGPSCPVFLSFTKLSLWWL

SEQ ID NO: 2866 - protein, 50 aa, Homo sapiens
MGPSCPVFLSFTKLSLWWLLLTPAGGEEAKRPPPRAPGDPLSSPSPTALP

SEQ ID NO: 2867 - protein, 81 aa, Homo sapiens
MGPSCPVFLSFTKLSLWWLLLTPAGGEEAKRPPPRAPGDPLSSPSPTALPQGGSHTETEDRLFKHLFRGYNRWARPVPNTS

SEQ ID NO: 2868 - protein, 514 aa, Homo sapiens
MGPSCPVFLSFTKLSLWWLLLTPAGGEEAKRPPPRAPGDPLSSPSPTALPQGGSHTETEDRLFKHLFRGYNRWARPVPNTSDVDEKNQMMTTNVWLKQEWSDYKLRWNPTDFGNITSLRVPSEMIWIPDIVLYNNADGEFAVTHMTKAHLFSTGTVHWVPPAIYKSSCSIDVTFFPFDQQNCKMKFGSWTYDKAKIDLEQMEQTVDLKDYWESGEWAIVNATGTYNSKKYDCCAEIYPDVTYAFVIRRLPLFYTINLIIPCLLISCLTVLVFYLPSDCGEKITLCISVLLSLTVFLLLITEIIPSTSLVIPLIGEYLLFTMIFVTLSIVITVFVLNVHHRSPSTHTMPHWVRGALLGCVPRWLLMNRPPPPVELCHPLRLKLSPSYHWLESNVDAEEREVVVEEEDRWACAGHVAPSVGTLCSHGHLHSGASGPKAEALLQEGELLLSPHMQKALEGVHYIADHLRSEDADSSVKEDWKYVAMVIDRIFLWLFIIVCFLGTIGLFLPPFLAGMI

SEQ ID NO: 2869 - protein, 108 aa, Homo sapiens
MGPSCPVFLSFTKLSLWWLLLTPAGGEEAKRPPPRAPGDPLSSPSPTALPQGGSHTETEDRLFKHLFRGYNRWARPVPNTSDVVIVRFGLSIAQLIDVDEKNQMMTTN

SEQ ID NO: 2870 - protein, 529 aa, Homo sapiens
MGPSCPVFLSFTKLSLWWLLLTPAGGEEAKRPPPRAPGDPLSSPSPTALPQGGSHTETEDRLFKHLFRGYNRWARPVPNTSDVVIVRFGLSIAQLIDVDEKNQMMTTNVWLKQEWSDYKLRWNPTDFGNITSLRVPSEMIWIPDIVLYNNADGEFAVTHMTKAHLFSTGTVHWVPPAIYKSSCSIDVTFFPFDQQNCKMKFGSWTYDKAKIDLEQMEQTVDLKDYWESGEWAIVNATGTYNSKKYDCCAEIYPDVTYAFVIRRLPLFYTINLIIPCLLISCLTVLVFYLPSDCGEKITLCISVLLSLTVFLLLITEIIPSTSLVIPLIGEYLLFTMIFVTLSIVITVFVLNVHHRSPSTHTMPHWVRGALLGCVPRWLLMNRPPPPVELCHPLRLKLSPSYHWLESNVDAEEREVVVEEEDRWACAGHVAPSVGTLCSHGHLHSGASGPKAEALLQEGELLLSPHMQKALEGVHYIADHLRSEDADSSVKEDWKYVAMVIDRIFLWLFIIVCFLGTIGLFLPPFLAGMI

SEQ ID NO: 2871 - protein, 154 aa, Homo sapiens
MGPSCPVFLSFTKLSLWWLLLTPAGGEEAKRPPPRAPGDPLSSPSPTALPQGGSHTETEDRLFKHLFRGYNRWARPVPNTSDVVIVRFGLSIAQLIDVDEKNQMMTTNVWLKQEWSDYKLRWNPTDFGNITSLRVPSEMIWIPDIVLYNNRTAR

SEQ ID NO: 2872 - protein, 133 aa, Homo sapiens
MGPSCPVFLSFTKLSLWWLLLTPAGGEEAKRPPPRAPGDPLSSPSPTALPQGGSHTETEDRLFKHLFRGYNRWARPVPNTSDVVIVRFGLSIAQLIDVVRLSSHRWPEEGDPRPPTAFPLLLPLPQPCPHAQQ

SEQ ID NO: 2873 - protein, 160 aa, Homo sapiens
MAARGSGPRALRLLLLVQLVAGRCGLAGAAGGAQRGLSEPSSIAKHEDSLLKDLFQDYERWVRPVEHLNDKIKIKFGLAISQLVDVDEKNQLMTTNVWLKQEWIDVKLRWNPDDYGGIKVIRVPSDSVWTPDIVLFDNADGRFEGTSTKTVIRLLKIGNS

SEQ ID NO: 2874 - protein, 468 aa, Homo sapiens
MAARGSGPRALRLLLLVQLVAGRCGLAGAAGGAQRGLSEPSSIAKHEDSLLKDLFQDYERWVRPVEHLNDKIKIKFGLAISQLVDVDEKNQLMTTNVWLKQEWIDVKLRWNPDDYGGIKVIRVPSDSVWTPDIVLFDNADGRFEGTSTKTVIRYNGTVTWTPPANYKSSCTIDVTFFPFDLQNCSMKFGSWTYDGSQVDIILEDQDVDKRDFFDNGEWEIVSATGSKGNRTDSCCWYPYVTYSFVIKRLPLFYTLFLIIPCIGLSFLTVLVFYLPSNEGEKICLCTSVLVSLTVFLLVIEEIIPSSSKVIPLIGEYLVFTMIFVTLSIMVTVFAINIHHRSSSTHNAMAPLVRKIFLHTLPKLLCMRSHVDRYFTQKEETESGSGPKSSRNTLEAALDSIRYITRHIMKENDVREVVEDWKFIAQVLDRMFLWTFLFVSIVGSLGLFVPVIYKWANILIPVHIGNANK

SEQ ID NO: 2875 - protein, 182 aa, Homo sapiens
  VARIANT 1: note = misc_feature - Xaa can be any naturally occurring amino acid
XRPVEHLNDKIKIKFGLAISQLVDVDEKNQLMTTNVWLKQEWIDVKLRWNPDDYGGIKVIRVPSDSVWTPDIVLFDNADGRFEGTSTKTVIRYNGTVTWTPPANYKSSCTIDVTFFPFDLQNCSMKFGSWTYDGSQVDIILEDQDVDKRDFFDNGEWEIVSATGSKGNRTDSCCWLLKIGNS

SEQ ID NO: 2876 - protein, 56 aa, Homo sapiens
  VARIANT 1: note = misc_feature - Xaa can be any naturally occurring amino acid
XTLSIMVTVFAINIHHRSSSTHNAMAPLVRKIFLHTLPKLLCMRSHVDRLLKIGNS

SEQ ID NO: 2877 - protein, 429 aa, Homo sapiens
MSTKVYLDLEWTDYRLSWDPAEHDGIDSLRITAESVWLPDVVLLNNNDGNFDVALDISVVVSSDGSVRWQPPGIYRSSCSIQVTYFPFDWQNCTMVFSSYSYDSSEVSLQTGLGPDGQGHQEIHIHEGTFIENGQWEIIHKPSRLIQPPGDPRGGREGQRQEVIFYLIIRRKPLFYLVNVIAPCILITLLAIFVFYLPPDAGEKMGLSIFALLTLTVFLLLLADKVPETSLSVPIIIKYLMFTMVLVTFSVILSVVVLNLHHRSPHTHQMPLWVRQIFIHKLPLYLRLKRPKPERDLMPEPPHCSSPGSGWGRGTDEYFIRKPPSDFLFPKPNRFQPELSAPDLRRFIDGPNRAVALLPELREVVSSISYIARQLQEQEDHDALKEDWQFVAMVVDRLFLWTFIIFTSVGTLVIFLDATYHLPPPDPFP

SEQ ID NO: 2878 - protein, 380 aa, Homo sapiens
MSTKVYLDLEWTDYRLSWDPAEHDGIDSLRITAESVWLPDVVLLNNNDGNFDVALDISVVVSSDGSVRWQPPGIYRSSCSIQVTYFPFDWQNCTMVFSSYSYDSSEVSLQTGLGPDGQGHQEIHIHEGTFIENGQWEIIHKPSRLIQPPGDPRGGREGQRQEVIFYLIIRRKPLFYLVNVIAPCILITLLAIFVFYLPPDAVILSVVVLNLHHRSPHTHQMPLWVRQIFIHKLPLYLRLKRPKPERDLMPEPPHCSSPGSGWGRGTDEYFIRKPPSDFLFPKPNRFQPELSAPDLRRFIDGPNRAVALLPELREVVSSISYIARQLQEQEDHDALKEDWQFVAMVVDRLFLWTFIIFTSVGTLVIFLDATYHLPPPDPFP

SEQ ID NO: 2879 - protein, 158 aa, Homo sapiens
MTPGALLMLLGALGAPLAPGVRGSEAEGRLREKLFSGYDSSVRPAREVGDRVRVSVGLILAQLISLNEKDEEMSTKVYLDLAVLECGGSSHPPASGGTSTSAEITAEWTDYRLSWDPAEHDGIDSLRITAESVWLPDVVLLNNNDGNFDVALDISVVV

SEQ ID NO: 2880 - protein, 501 aa, Homo sapiens
MTPGALLMLLGALGAPLAPGVRGSEAEGRLREKLFSGYDSSVRPAREVGDRVRVSVGLILAQLISLNEKDEEMSTKVYLDLEWTDYRLSWDPAEHDGIDSLRITAESVWLPDVVLLNNNDGNFDVALDISVVVSSDGSVRWQPPGIYRSSCSIQVTYFPFDWQNCTMVFSSYSYDSSEVSLQTGLGPDGQGHQEIHIHEGTFIENGQWEIIHKPSRLIQPPGDPRGGREGQRQEVIFYLIIRRKPLFYLVNVIAPCILITLLAIFVFYLPPDAGEKMGLSIFALLTLTVFLLLLADKVPETSLSVPIIIKYLMFTMVLVTFSVILSVVVLNLHHRSPHTHQMPLWVRQIFIHKLPLYLRLKRPKPERDLMPEPPHCSSPGSGWGRGTDEYFIRKPPSDFLFPKPNRFQPELSAPDLRRFIDGPNRAVALLPELREVVSSISYIARQLQEQEDHDALKEDWQFVAMVVDRLFLWTFIIFTSVGTLVIFLDATYHLPPPDPFP

SEQ ID NO: 2881 - protein, 37 aa, Homo sapiens
MVVDRLFLWTFIIFTSVGTLVIFLDATYHLPPPDPFP

SEQ ID NO: 2882 - protein, 316 aa, Homo sapiens
  VARIANT 1: note = misc_feature - Xaa can be any naturally occurring amino acid
XPAREVGDRVRVSVGLILAQLISLNEKDEEMSTKVYLDLEWTDYRLSWDPAEHDGIDSLRITAESVWLPDVVLLNNNDGNFDVALDISVVVSSDGSVRWQPPGIYRSSCSIQVTYFPFDWQNCTMVFSSYSYDSSEVSLQTGLGPDGQGHQEIHIHEGTFIGEKMGLSIFALLTLTVFLLLLADKVPETSLSVPIIIKYLMFTMVLVTFSVILSVVVLNLHHRSPHTHQMPLWVRQIFIHKLPLYLRLKRPKPERDLMPEPPHCSSPGSGWGRGTDEYFIRKPPSDFLFPKPNRFQPELSAPDLRRFIDGPNRAVA

SEQ ID NO: 2883 - protein, 172 aa, Homo sapiens
MEGPVLTLGLLAALAVCGSWGLNEEERLIRHLFQEKGYNKELRPVAHKEESVDVALALTLSNLISLGWTDNRLKWNAEEFGNISVLRLPPDMVWLPEIVLENNNDGSFQISYSCNVLVYHYGFVYWLPPAIFRSSCPISVTYFPFDWQNCSLKFSSLKYTAKEITLSLKQDA

SEQ ID NO: 2884 - protein, 502 aa, Homo sapiens
MEGPVLTLGLLAALAVCGSWGLNEEERLIRHLFQEKGYNKELRPVAHKEESVDVALALTLSNLISLGWTDNRLKWNAEEFGNISVLRLPPDMVWLPEIVLENNNDGSFQISYSCNVLVYHYGFVYWLPPAIFRSSCPISVTYFPFDWQNCSLKFSSLKYTAKEITLSLKQDAKENRTYPVEWIIIDPEGFTENGEWEIVHRPARVNVDPRAPLDSPSRQDITFYLIIRRKPLFYIINILVPCVLISFMVNLVFYLPADSGEKTSVAISVLLAQSVFLLLISKRLPATSMAIPLIGKFLLFGMVLVTMVVVICVIVLNIHFRTPSTHVLSEGVKKLFLETLPELLHMSRPAEDGPSPGALVRRSSSLGYISKAEEYFLLKSRSDLMFEKQSERHGLARRLTTARRPPASSEQAQQELFNELKPAVDGANFIVNHMRDQNNYNEEKDSWNRVARTVDRLCLFVVTPVMVVGTAWIFLQGVYNQPPPQPFPGDPYSYNVQDKRFI

SEQ ID NO: 2885 - protein, 108 aa, Homo sapiens
MEGPVLTLGLLAALAVCGSWGLNEEERLIRHLFQEKGYNKELRPVAHKEESVDVALALTLSNLISLKEVEETLTTNVWIEHGWTDNRLKWNAEEFGNISVLRLPPDMQ

SEQ ID NO: 2886 - protein, 235 aa, Homo sapiens
MEGPVLTLGLLAALAVCGSWGLNEEERLIRHLFQEKGYNKELRPVAHKEESVDVALALTLSNLISLKEVEETLTTNVWIEHGWTDNRLKWNAEEFGNISVLRLPPDMVWLPEIVLENNNDGSFQISYSCNVLVYHYGFVYWLPPAIFRSSCPISVTYFPFDWQNCSLKFRERGVGDSPPAGQGQRGPQSPSGQPQPPGHHLLPHHPPQAPLLHHQHPGALRAHLLHGQPGLLPTG

SEQ ID NO: 2887 - protein, 171 aa, Homo sapiens
MEGPVLTLGLLAALAVCGSWGLNEEERLIRHLFQEKGYNKELRPVAHKEESVDVALALTLSNLISLKEVEETLTTNVWIEHGWTDNRLKWNAEEFGNISVLRLPPDMVWLPEIVLENNNDGSFQISYSCNVLVYHYGFVYWLPPAIFRSSCPISVTYFPFDWQNCSLKFRW

SEQ ID NO: 2888 - protein, 517 aa, Homo sapiens
MEGPVLTLGLLAALAVCGSWGLNEEERLIRHLFQEKGYNKELRPVAHKEESVDVALALTLSNLISLKEVEETLTTNVWIEHGWTDNRLKWNAEEFGNISVLRLPPDMVWLPEIVLENNNDGSFQISYSCNVLVYHYGFVYWLPPAIFRSSCPISVTYFPFDWQNCSLKFSSLKYTAKEITLSLKQDAKENRTYPVEWIIIDPEGFTENGEWEIVHRPARVNVDPRAPLDSPSRQDITFYLIIRRKPLFYIINILVPCVLISFMVNLVFYLPADSGEKTSVAISVLLAQSVFLLLISKRLPATSMAIPLIGKFLLFGMVLVTMVVVICVIVLNIHFRTPSTHVLSEGVKKLFLETLPELLHMSRPAEDGPSPGALVRRSSSLGYISKAEEYFLLKSRSDLMFEKQSERHGLARRLTTARRPPASSEQAQQELFNELKPAVDGANFIVNHMRDQNNYNEEKDSWNRVARTVDRLCLFVVTPVMVVGTAWIFLQGVYNQPPPQPFPGDPYSYNVQDKRFI

SEQ ID NO: 2889 - protein, 411 aa, Homo sapiens
MQCSWKAVLLLALASIAIQYTAIRTFTAKSFHTCPGLAEAGLAERLCEESPTFAYNLSRKTHILILATTRSGSSFVGQLFNQHLDVFYLFEPLYHVQNTLIPRFTQGKSPADRRVMLGASRDLLRSLYDCDLYFLENYIKPPPVNHTTDRIFRRGASRVLCSRPVCDPPGPADLVLEEGDCVRKCGLLNLTVAAEACRERSHVAIKTVRVPEVNDLRALVEDPRLNLKVIQLVRDPRGILASRSETFRDTYRLWRLWYGTGRKPYNLDVTQLTTVCEDFSNSVSTGLMRPPWLKGKYMLVRYEDLARNPMKKTEEIYGFLGIPLDSHVARWIQNNTRGDPTLGKHKYGTVRNSAATAEKWRFRLSYDIVAFAQNACQQVLAQLGYKIAASEEELKNPSVSLVEERDFRPFS

SEQ ID NO: 2890 - protein, 33 aa, Homo sapiens
MHHQWLLLAACFWVIFMFMVASKFITLTFKDPD

SEQ ID NO: 2891 - protein, 64 aa, Homo sapiens
MHHQWLLLAACFWVIFMFMVASKFITLTFKDPDVYSAKQEFLFLTTMPEVRKLPEEKHIPEELK

SEQ ID NO: 2892 - protein, 85 aa, Homo sapiens
MHHQWLLLAACFWVIFMFMVASKFITLTFKDPDVYSAKQEFLFLTTMPEVRKLPEEKHIPEELKPTGKELPDSQLVQPLVYMERL

SEQ ID NO: 2893 - protein, 133 aa, Homo sapiens
MHHQWLLLAACFWVIFMFMVASKFITLTFKDPDVYSAKQEFLFLTTMPEVRKLPEEKHIPEELKPTGKELPDSQLVQPLVYMERLELIRNVCRDDALKNLSHTPVSKFVLDRIFVCDKHKILFCQTPKVGNTQ

SEQ ID NO: 2894 - protein, 141 aa, Homo sapiens
MHHQWLLLAACFWVIFMFMVASKFITLTFKDPDVYSAKQEFLFLTTMPEVRKLPEEKHIPEELKPTGKELPDSQLVQPLVYMERLELIRNVCRDDALKNLSHTPVSKFVLDRIFVCDKHKILFCQTPKVGNTQWKKVLIVL

SEQ ID NO: 2895 - protein, 356 aa, Homo sapiens
MHHQWLLLAACFWVIFMFMVASKFITLTFKDPDVYSAKQEFLFLTTMPEVRKLPEEKHIPEELKPTGKELPDSQLVQPLVYMERLELIRNVCRDDALKNLSHTPVSKFVLDRIFVCDKHKILFCQTPKVGNTQWKKVLIVLNGAFSSIEEIPENVVHDHEKNGLPRLSSFSDAEIQKRLKTYFKFFIVRDPFERLISAFKDKFVHNPRFEPWYRHEIAPGIIRKYRRNRTETRGIQFEDFVRYLGDPNHRWLDLQFGDHIIHWVTYVELCAPCEIMYSVIGHHETLEDDAPYILKEAGIDHLVSYPTIPPGITVYNRTKVEHYFLGISKRDIRRLYARFEGDFKLFGYQKPDFLLN

SEQ ID NO: 2896 - protein, 356 aa, Homo sapiens; identical to SEQ ID NO: 2895

SEQ ID NO: 2897 - protein, 142 aa, Homo sapiens
MQRKAGKKEHVQLRDKRNQEPQFRGNTARKCEPQAAEGRVSEWLRCDNMHHQWLLLAACFWVIFMFMVASKFITLTFKDPDVYSAKQEFLFLTTMPEVRKLPEEKHIPEELKPTGKELPDSQLVQPLVYMERLELIRNVCRD

SEQ ID NO: 2898 - protein, 347 aa, Homo sapiens
MKPALLEVMRMNRICRMVLATCLGSFILVIFYFQIMRRNPFGVDICCRKGSRSPLQELYNPIQLELSNTAVLHQMRRDQVTDTCRANSATSRKRRVLTPNDLKHLVVDEDHELIYCYVPKVACTNWKRLMMVLTGRGKYSDPMEIPANEAHVSANLKTLNQYSIPEINHRLKSYMKFLFVREPFERLVSAYRNKFTQKYNISFHKRYGTKIIKRQRKNATQEALRKGDDVKFEEFVAYLIDPHTQREEPFNEHWQTVYSLCHPCHIHYDLVGKYETLEEDSNYVLQLAGVGSYLKFPTYAKSTRTTDEMTTEFFQNISSEHQTQLYEVYKLDFLMFNYSVPSYLKLE

SEQ ID NO: 2899 - protein, 72 aa, Homo sapiens
MKPALLEVMRMNRICRMVLATCLGSFILVIFYFQIMRRNPFGVDICCRKGSRSPLQELYNPIQVSFKHSVSM

SEQ ID NO: 2900 - protein, 352 aa, Homo sapiens
MKPALLEVMRMNRICRMVLATCLGSFILVIFYFQSMLHPVMRRNPFGVDICCRKGSRSPLQELYNPIQLELSNTAVLHQMRRDQVTDTCRANSATSRKRRVLTPNDLKHLVVDEDHELIYCYVPKVACTNWKRLMMVLTGRGKYSDPMEIPANEAHVSANLKTLNQYSIPEINHRLKSYMKFLFVREPFERLVSAYRNKFTQKYNISFHKRYGTKIIKRQRKNATQEALRKGDDVKFEEFVAYLIDPHTQREEPFNEHWQTVYSLCHPCHIHYDLVGKYETLEEDSNYVLQLAGVGSYLKFPTYAKSTRTTDEMTTEFFQNISSEHQTQLYEVYKLDFLMFNYSVPSYLKLE

SEQ ID NO: 2901 - protein, 77 aa, Homo sapiens
MKPALLEVMRMNRICRMVLATCLGSFILVIFYFQSMLHPVMRRNPFGVDICCRKGSRSPLQELYNPIQVSFKHSVSM

SEQ ID NO: 2902 - protein, 158 aa, Homo sapiens
MRRNPFGVDICCRKGSRSPLQELYNPIQLELSNTAVLHQMRRDQVTDTCRANSATSRKRRVLTPNDLKHLVVDEDHELIYCYVPKVACTNWKRLMMVLTGRGKYSDPMEIPANEAHVSANLKTLNQYSIPEINHRLKSYMKFLFVREPFERLVSAYRN

SEQ ID NO: 2903 - protein, 225 aa, Homo sapiens [sequence omitted]

SEQ ID NO: 2904 - protein, 341 aa, Homo sapiens
MGRRCCRRRVLAAACLGAALLLLCAAPRSLRPAFGNRALGSSWLGGEKRSPLQKLYDLDQDPRSTLAKVHRQRRDLLNSACSRHSRRQRLLQPEDLRHVLVDDAHGLLYCYVPKVACTNWKRVLLALSGQARGDPRAISAQEAHAPGRLPSLADFSPAEINRRLRAYLAFLFVREPFERLASAYRNKLARPYSAAFQRRYGARIVQRLRPRALPDARARGHDVRFAEFLAYLLDPRTRREEPFNEHWERAHALCHPCRLRYDVVGKFETLAEDAAFVLGLAGASDLSFPGPPRPRGAAASRDLAARLFRDISPFYQRRLFDLYKMDFLLFNYSAPSYLRLL

SEQ ID NO: 2905 - protein, 386 aa, Homo sapiens
MLLPKKMKLLLFLVSQMAILALFFHMYSHNISSLSMKAQPERMHVLVLSSWRSGSSFVGQLFGQHPDVFYLMEPAWHVWMTFKQSTAWMLHMAVRDLIRAVFLCDMSVFDAYMEPGPRRQSSLFQWENSRALCSAPACDIIPQDEIIPRAHCRLLCSQQPFEVVEKACRSYSHVVLKEVRFFNLQSLYPLLKDPSLNLHIVHLVRDPRAVFRSRERTKGDLMIDSRIVMGQHEQKLKKEDQPYYVMQVICQSQLEIYKTIQSLPKALQERYLLVRYEDLARAPVAQTSRMYEFVGLEFLPHLQTWVHNITRGKGMGDHAFHTNARDALNVSQAWRWSLPYEKVSRLQKACGDAMNLLGYRHVRSEQEQRNLLLDLLSTWTVPEQIH

SEQ ID NO: 2906 - protein, 386 aa, Homo sapiens; identical to SEQ ID NO: 2905

SEQ ID NO: 2907 - protein, 411 aa, Homo sapiens
MGMRARVPKVAHSTRRPPAARMWLPRFSSKTVTVLLLAQTTCLLLFIISRPGPSSPAGGEDRVHVLVLSSWRSGSSFLGQLFSQHPDVFYLMEPAWHVWTTLSQGSAATLHMAVRDLMRSIFLCDMDVFDAYMPQSRNLSAFFNWATSRALCSPPACSAFPRGTISKQDVCKTLCTRQPFSLAREACRSYSHVVLKEVRFFNLQVLYPLLSDPALNLRIVHLVRDPRAVLRSREAAGPILARDNGIVLGTNGKWVEADPHLRLIREVCRSHVRIAEAATLKPPPFLRGRYRLVRFEDLAREPLAEIRALYAFTGLTLTPQLEAWIHNITHGSGIGKPIEAFHTSSRNARNVSQAWRHALPFTKILRVQEVCAGALQLLGYRPVYSADQQRDLTLDLVLPRGPDHFSWASPD

SEQ ID NO: 2908 - protein, 99 aa, Homo sapiens
MSRHLPWICDQRCSSPSSPGRWPPAARMWLPRFSSKTVTVLLLAQTTCLLLFIISRPGPSSPAGGEDRVHVLVLSSWRSGSSFLGQLFSQHPDVFYLME

SEQ ID NO: 2909 - protein, 395 aa, Homo sapiens
MWLPRVSSTAVTALLLAQTFLLLFLVSRPGPSSPAGGEARVHVLVLSSWRSGSSFVGQLFNQHPDVFYLMEPAWHVWTTLSQGSAATLHMAVRDLVRSVFLCDMDVFDAYLPWRRNLSDLFQWAVSRALCSPPACSAFPRGAISSEAVCKPLCARQSFTLAREACRSYSHVVLKEVRFFNLQVLYPLLSDPALNLRIVHLVRDPRAVLRSREQTAKALARDNGIVLGTNGTWVEADPGLRVVREVCRSHVRIAEAATLKPPPFLRGRYRLVRFEDLAREPLAEIRALYAFTGLSLTPQLEAWIHNITHGSGPGARREAFKTSSRNALNVSQAWRHALPFAKIRRVQELCAGALQLLGYRPVYSEDEQRNLALDLVLPRGLNGFTWASSTASHPRN

SEQ ID NO: 2910 - protein, 395 aa, Homo sapiens; identical to SEQ ID NO: 2909

SEQ ID NO: 2911 - protein, 486 aa, Homo sapiens
MKGRRRRRREYCKFALLLVLYTLVLLLVPSVLDGGRDGDKGAEHCPGLQRSLGVWSLEAAAAGEREQGAEARAAEEGGANQSPRFPSNLSGAVGEAVSREKQHIYVHATWRTGSSFLGELFNQHPDVFYLYEPMWHLWQALYPGDAESLQGALRDMLRSLFRCDFSVLRLYAPPGDPAARAPDTANLTTAALFRWRTNKVICSPPLCPGAPRARAEVGLVEDTACERSCPPVAIRALEAECRKYPVVVIKDVRLLDLGVLVPLLRDPGLNLKVVQLFRDPRAVHNSRLKSRQGLLRESIQVLRTRQRGDRFHRVLLAHGVGARPGGQSRALPAAPRADFFLTGALEVICEAWLRDLLFARGAPAWLRRRYLRLRYEDLVRQPRAQLRRLLRFSGLRALAALDAFALNMTRGAAYGADRPFHLSARDAREAVHAWRERLSREQVRQVEAACAPAMRLLAYPRSGEEGDAEQPREGETPLEMDADGAT

SEQ ID NO: 2912 - protein, 178 aa, Homo sapiens
MTLRPGTMRLACMFSSILLFGAAGLLLFISLQDPTELAPQQVPGIKFNIRPRQPHHDLPPGGSQDGDLKEPTERVTRDLSSGAPRGRNLPAPDQPQPPLQRGTRLRLRQRRRRLLIKKMPAAATIPANSSDAPFIRPGPGTLDGRWVSLHRSQQERKRVMQEACAKYRASSSRRAVTP

SEQ ID NO: 2913 - protein, 424 aa, Homo sapiens
MTLRPGTMRLACMFSSILLFGAAGLLLFISLQDPTELAPQQVPGIKFNIRPRQPHHDLPPGGSQDGDLKEPTERVTRDLSSGAPRGRNLPAPDQPQPPLQRGTRLRLRQRRRRLLIKKMPAAATIPANSSDAPFIRPGPGTLDGRWVSLHRSQQERKRVMQEACAKYRASSSRRAVTPRHVSRIFVEDRHRVLYCEVPKAGCSNWKRVLMVLAGLASSTADIQHNTVHYGSALKRLDTFDRQGILHRLSTYTKMLFVREPFERLVSAFRDKFEHPNSYYHPVFGKAILARYRANASREALRTGSGVRFPEFVQYLLDVHRPVGMDIHWDHVSRLCSPCLIDYDFVGKFESMEDDANFFLSLIRAPRNLTFPRFKDRHSQEARTTARIAHQYFAQLSALQRQRTYDFYYMDYLMFNYSKPFADLY

SEQ ID NO: 2914 - protein, 424 aa, Homo sapiens; identical to SEQ ID NO: 2913

SEQ ID NO: 2915 - protein, 424 aa, Homo sapiens; identical to SEQ ID NO: 2913

SEQ ID NO: 2916 - protein, 53 aa, Homo sapiens
EDVEVGRCVRRFAGVQCVWSYEDKRVRKPLLCNELKRCLSPNGKLSLCSSDGL

SEQ ID NO: 2917 - protein, 802 aa, Homo sapiens
MAARGRRAWLSVLLGLVLGFVLASRLVLPRASELKRAGPRRRASPEGCRSGQAAASQAGGARGDARGAQLWPPGSDPDGGPRDRNFLFVGVMTAQKYLQTRAVAAYRTWSKTIPGKVQFFSSEGSDTSVPIPVVPLRGVDDSYPPQKKSFMMLKYMHDHYLDKYEWFMRADDDVYIKGDRLENFLRSLNSSEPLFLGQTGLGTTEEMGKLALEPGENFCMGGPGVIMSREVLRRMVPHIGKCLREMYTTHEDVEVGRCVRRFAGVQCVWSYEMQQLFYENYEQNKKGYIRDLHNSKIHQAITLHPNKNPPYQYRLHSYMLSRKISELRHRTIQLHREIVLMSKYSNTEIHKEDLQLGIPPSFMRFQPRQREEILEWEFLTGKYLYSAVDGQPPRRGMDSAQREALDDIVMQVMEMINANAKTRGRIIDFKEIQYGYRRVNPMYGAEYILDLLLLYKKHKGKKMTVPVRRHAYLQQTFSKIQFVEHEELDAQELAKRINQESGSLSFLSNSLKKLVPFQLPGSKSEHKEPKDKKINILIPLSGRFDMFVRFMGNFEKTCLIPNQNVKLVVLLFNSDSNPDKAKQVELMRDYRIKYPKADMQILPVSGEFSRALALEVGSSQFNNESLLFFCDVDLVFTTEFLQRCRANTVLGQQIYFPIIFSQYDPKIVYSGKVPSDNHFAFTQKTGFWRNYGFGITCIYKGDLVRVGGFDVSIQGWGLEDVDLFNKVVQAGLKTFRSQEVGVVHVHHPVFCDPNLDPKQYKMCLGSKASTYGSTQQLAEMWLEKNDPSYSKSSNNNGSVRTA

SEQ ID NO: 2918 - protein, 882 aa, Homo sapiens
MAVRSRRPWMSVALGLVLGFTAASWLIAPRVAELSERKRRGSSLCSYYGRSAAGPRAGAQQPLPQPQSRPRQEQSPPPARQDLQGPPLPEAAPGITSFRSSPWQQPPPLQQRRRGREPEGATGLPGAPAAEGEPEEEDGGAAGQRRDGRPGSSHNGSGDGGAAAPSARPRDFLYVGVMTAQKYLGSRALAAQRTWARFIPGRVEFFSSQQPPNAGQPPPPLPVIALPGVDDSYPPQKKSFMMIKYMHDHYLDKYEWFMRADDDVYIKGDKLEEFLRSLNSSKPLYLGQTGLGNIEELGKLGLEPGENFCMGGPGMIFSREVLRRMVPHIGECLREMYTTHEDVEVGRCVRRFGGTQCVWSYEMQQLFHENYEHNRKGYIQDLHNSKIHAAITLHPNKRPAYQYRLHNYMLSRKISELRYRTIQLHRESALMSKLSNTEVSKEDQQLGVIPSFNHFQPRERNEVIEWEFLTGKLLYSAAENQPPRQSLSSILRTALDDTVLQVMEMINENAKSRGRLIDFKEIQYGYRRVNPMHGVEYILDLLLLYKRHKGRKLTVPVRRHAYLQQLFSKPFFRETEELDVNSLVESINSETQSFSFISNSLKILSSFQGAKEMGGHNEKKVHILVPLIGRYDIFLRFMENFENMCLIPKQNVKLVIILFSRDSGQDSSKHIELIKGYQNKYPKAEMTLIPMKGEFSRGLGLEMASAQFDNDTLLLFCDVDLIFREDFLQRCRDNTIQGQQVYYPIIFSQYDPKVTNGGNPPTDDYFIFSKKTGFWRDYGYGITCIYKSDLLGAGGFDTSIQGWGLEDVDLYNKVILSGLRPFRSQEVGVVHIFHPVHCDPNLDPKQYKMCLGSKASTFASTMQLAELWLEKHLGVRYNRTLS

SEQ ID NO: 2919 - protein, 65 aa, Homo sapiens
HILYGKIIHLEKPFAVLVKHTPGDQDCDELGRETGTRYLVTALIKDKILFKTRPKPIITSVPKKV

SEQ ID NO: 2920 - protein, 524 aa, Homo sapiens
MKEPRIFPRERPTPWTRAPLPPRGRLDGSLGPQGGPVLNTGHPLGVNSDPFLMAAGSLGGNLTPFPRNPSPFPASSGSLASNPAPFPAGARDPSMASFPRGMNPTGTGAVSFPRPGGLLGPGPGPGPTLNPRTGALPGPGPLSNPRLGGLPGPGPMSNPRAGGLLGAGPDPRGGGPMGPGSGPNLRAGVLLTSGNGPPNPRPVGLGPGPNPNLRSGFLGTNPAPRSGVFPGPGLGPNPRPSGLGPGPNLDARAGGLLGTGSGLNLRMAGPQGLDLAPILRAAGLLGANSASFSQASGNMGTSPSSMARVPGPMGPNSGPSSRGIGLPGPNPSPMSRAPGPIGPNSAHFSRPVGPMGVNANPFPRGAGSSAFSQSSGTLASNPATFQRSAGLQGSNPTIFPRASGPLGPNPANFPRATGLQGPSPTTFPRSTGPLGPGQVTFPRPAAGHLGPSPAGPVGINPAPFTRPTGTLGLNPASFPRMNGPAGKSFVPFPRVGSLPGTNPAAFPRPGGPMAAMYPNGMLPP

SEQ ID NO: 2921 - protein, 12 aa, Homo sapiens
MVQIVISRESLC

SEQ ID NO: 2922 - protein, 12 aa, Homo sapiens
MVQIVISRESLC

SEQ ID NO: 2923 - protein, 121 aa, Homo sapiens
MVQIVISSARAGGLAEWVLMELQGEIEARYSTGLAGNLLGDLHYTTEGIPVLIVGHHILYGKIIHLEKPFAVLVKHTPGDQDCDELGRETGTRYLVTALIKDKILFKTRPKPIITSVPKKV

SEQ ID NO: 2924 - protein, 121 aa, Homo sapiens; identical to SEQ ID NO: 2923

SEQ ID NO: 2925 - protein, 58 aa, Homo sapiens
MVQIVISSARAGGLAEWVLMELQGEIEARYSTGLAGNLLGDLHYTTEGYIGLQVPVHM

SEQ ID NO: 2926 - protein, 75 aa, Homo sapiens
MVQIVISSARAGGLAEWVLMELQGEIEARYSTGLAGNLLGDLHYTTELHQAHWLQIQHLSRLVLVTQVWLLFQEG

SEQ ID NO: 2927 - protein, 99 aa, Homo sapiens
MVQIVISSARAGGLAEWVLMELQGEIEARYSTGLAGNLLGDLHYTTEVRGLFFPCLMPQESKLHQGGAPRTQSEDCLRFVIQGLANLRCSLLVLPLPLQ

SEQ ID NO: 2928 - protein, 144 aa, Homo sapiens
  VARIANT 1: note = misc_feature - Xaa can be any naturally occurring amino acid
XAVLAAAATAAGGSVVARWPRGAALGGRHCSARAGGLAEWVLMELQGEIEARYSTGLAGNLLGDLHYTTEGIPVLIVGHHILYGKIIHLEKPFAVLVKHTPGDQDCDELGRETGTRYLVTALIKDKILFKTRPKPIITSVPKKV

SEQ ID NO: 2929 - protein, 104 aa, Homo sapiens
  VARIANT 1: note = misc_feature - Xaa can be any naturally occurring amino acid
XSARGGGDGGGRFGCRPLAARRRARRPPLQGIPVLIVGHHILYGKIIHLEKPFAVLVKHTPGDQDCDELGRETGTRYLVTALIKDKILFKTRPKPIITSVPKKV

SEQ ID NO: 2930 - protein, 1184 aa, Homo sapiens
MVGTKAWVFSFLVLEVTSVLGRQTMLTQSVRRVQPGKKNPSIFAKPADTLESPGEWTTWFNIDYPGGKGDYERLDAIRFYYGDRVCARPLRLEARTTDWTPAGSTGQVVHGSPREGFWCLNREQRPGQNCSNYTVRFLCPPGSLRRDTERIWSPWSPWSKCSAACGQTGVQTRTRICLAEMVSLCSEASEEGQHCMGQDCTACDLTCPMGQVNADCDACMCQDFMLHGAVSLPGGAPASGAAIYLLTKTPKLLTQTDSDGRFRIPGLCPDGKSILKITKVKFAPIVLTMPKTSLKAATIKAEFVRAETPYMVMNPETKARRAGQSVSLCCKATGKPRPDKYFWYHNDTLLDPSLYKHESKLVLRKLQQHQAGEYFCKAQSDAGAVKSKVAQLIVIASDETPCNPVPESYLIRLPHDCFQNATNSFYYDVGRCPVKTCAGQQDNGIRCRDAVQNCCGISKTEEREIQCSGYTLPTKVAKECSCQRCTETRSIVRGRVSAADNGEPMRFGHVYMGNSRVSMTGYKGTFTLHVPQDTERLVLTFVDRLQKFVNTTKVLPFNKKGSAVFHEIKMLRRKKPITLEAMETNIIPLGEVVGEDPMAELEIPSRSFYRQNGEPYIGKVKASVTFLDPRNISTATAAQTDLNFINDEGDTFPLRTYGMFSVDFRDEVTSEPLNAGKVKVHLDSTQVKMPEHISTVKLWSLNPDTGLWEEEGDFKFENQRRNKREDRTFLVGNLEIRERRLFNLDVPESRRCFVKVRAYRSERFLPSEQIQGVVISVINLEPRTGFLSNPRAWGRFDSVITGPNGACVPAFCDDQSPDAYSAYVLASLAGEELQAVESSPKFNPNAIGVPQPYLNKLNYRRTDHEDPRVKKTAFQISMAKPRPNSAEESNGPIYAFENLRACEEAPPSAAHFRFYQIEGDRYDYNTVPFNEDDPMSWTEDYLAWWPKPMEFRACYIKVKIVGPLEVNVRSRNMGGTHRQTVGKLYGIRDVRSTRDRDQPNVSAACLEFKCSGMLYDQDRVDRTLVKVIPQGSCRRASVNPMLHEYLVNHLPLAVNNDTSEYTMLAPLDPLGHNYGIYTVTDQDPRTAKEIALGRCFDGTSDGSSRIMKSNVGVALTFNCVERQVGRQSAFQYLQSTPAQSPAAGTVQGRVPSRRQQRASRGGQRQGGVVASLRFPRVAQQPLIN

SEQ ID NO: 2931 - protein, 1162 aa, Homo sapiens
MASLLPLLCLCVVAAHLAGARDATPTEEPMATALGLERRSVYTGQPSPALEDWEARAVPAEASEWTSWFNVDHPGGDGDFESLAAIRFYYGPARVCPRPLALEARTTDWALPSAVGERVHLNPTRGFWCLNREQPRGRRCSNYHVRFRCPLEASWGAWGPWGPCSGSCGPGRRLRRRHCPSPAGDACPGRPLEAQKCVRPRCPGCSLDTCECPDHILLGSVVTPSGQPLLGARVSLRDQPGTVATSDAHGTFRVPGVCADSRANIRAQMDGFSAGEAQAQANGSISVVTIILDKLEKPYLVKHPESRVREAGQNVTFCCKASGTPMPKKYSWFHNGTLLDRRAHGYGAHLELRGLRPDQAGIYHCKAWNEAGAVRSGTARLTVLAPGQPACDPRPREYLIKLPEDCGQPGSGPAYLDVGLCPDTRCPSLAGSSPRCGDASSRCCSVRRLERREIHCPGYVLPVKVVAECGCQKCLPPRGLVRGRVVAADSGEPLRFARILLGQEPIGFTAYQGDFTIEVPPSTQRLVVTFVDPSGEFMDAVRVLPFDPRGAGVYHEVKAMRKKAPVILHTSQSNTIPLGELEDEAPLGELVLPSGAFRRADGKPYSGPVEARVTFVDPRDLTSAASAPSDLRFVDSDGELAPLRTYGMFSVDLRAPGSAEQLQVGPVAVRVAASQIHMPGHVEALKLWSLNPETGLWEEESGFRREGSSGPRVRREERVFLVGNVEIRERRLFNLDVPERRRCFVKVRAYANDKFTPSEQVEGVVVTLVNLEPAPGFSANPRAWGRFDSAVTGPNGACLPAFCDADRPDAYTALVTATLGGEELEPAPSLPRPLPATVGVTQPYLDRLGYRRTDHDDPAFKRNGFRINLAKPRPGDPAEANGPVYPWRSLRECQGAPVTASHFRFARVEADKYEYNVVPFREGTPASWTGDLLAWWPNPQEFRACFLKVKIQGPQEYMVRSHNAGGSHPRTRGQLYGLRDARSVRDPERPGTSAACVEFKCSGMLFDQRQVDRTLVTIMPQGSCRRVAVNGLLRDYLTRHPPPVPAEDPAAFSMLAPLDPLGHNYGVYTVTDQSPRLAKEIAIGRCFDGSSDGFSREMKADAGTAVTFQCREPPAGRPSLFQRLLESPATALGDIRREMSEAAQAQARASGPLRTRRGRVRQ

SEQ ID NO: 2932 - protein, 1156 aa, Homo sapiens
MASLLPLLCLCVVAAHLAGARDATPTEEPMATALGLERRSVYTGQPSPALEDWEEASEWTSWFNVDHPGGDGDFESLAAIRFYYGPARVCPRPLALEARTTDWALPSAVGERVHLNPTRGFWCLNREQPRGRRCSNYHVRFRCPLEASWGAWGPWGPCSGSCGPGRRLRRRHCPSPAGDACPGRPLEAQKCVRPRCPGCSLDTCECPDHILLGSVVTPSGQPLLGARVSLRDQPGTVATSDAHGTFRVPGVCADSRANIRAQMDGFSAGEAQAQANGSISVVTIILDKLEKPYLVKHPESRVREAGQNVTFCCKASGTPMPKKYSWFHNGTLLDRRAHGYGAHLELRGLRPDQAGIYHCKAWNEAGAVRSGTARLTVLAPGQPACDPRPREYLIKLPEDCGQPGSGPAYLDVGLCPDTRCPSLAGSSPRCGDASSRCCSVRRLERREIHCPGYVLPVKVVAECGCQKCLPPRGLVRGRVVAADSGEPLRFARILLGQEPIGFTAYQGDFTIEVPPSTQRLVVTFVDPSGEFMDAVRVLPFDPRGAGVYHEVKAMRKKAPVILHTSQSNTIPLGELEDEAPLGELVLPSGAFRRADGKPYSGPVEARVTFVDPRDLTSAASAPSDLRFVDSDGELAPLRTYGMFSVDLRAPGSAEQLQVGPVAVRVAASQIHMPGHVEALKLWSLNPETGLWEEESGFRREGSSGPRVRREERVFLVGNVEIRERRLFNLDVPERRRCFVKVRAYANDKFTPSEQVEGVVVTLVNLEPAPGFSANPRAWGRFDSAVTGPNGACLPAFCDADRPDAYTALVTATLGGEELEPAPSLPRPLPATVGVTQPYLDRLGYRRTDHDDPAFKRNGFRINLAKPRPGDPAEANGPVYPWRSLRECQGAPVTASHFRFARVEADKYEYNVVPFREGTPASWTGDLLAWWPNPQEFRACFLKVKIQGPQEYMVRSHNAGGSHPRTRGQLYGLRDARSVRDPERPGTSAACVEFKCSGMLFDQRQVDRTLVTIMPQGSCRRVAVNGLLRDYLTRHPPPVPAEDPAAFSMLAPLDPLGHNYGVYTVTDQSPRLAKEIAIGRCFDGSSDGFSREMKADAGTAVTFQCREPPAGRPSLFQRLLESPATALGDIRREMSEAAQAQARASGPLRTRRGRVRQ

SEQ ID NO: 2933 - protein, 113 aa, Homo sapiens
MDNVQPKIKHRPFCFSVKGHVKMLRLALTVTSMTFFIIAQAPEPYIVITGFEVTVILFFILLYVLRLDRLMKWLFWPLLDIINSLVTTVFMLIVSVLALIPETTTLTVGGGLF

SEQ ID NO: 2934 - protein, 152 aa, Homo sapiens
MDNVQPKIKHRPFCFSVKGHVKMLRLALTVTSMTFFIIAQAPEPYIVITGFEVTVILFFILLYVLRLDRLMKWLFWPLLDIINSLVTTVFMLIVSVLALIPETTTLTVGGGVFALVTAVCCLADGALIYRKLLFNPSGPYQKKPVHEKKEVL

SEQ ID NO: 2935 - protein, 120 aa, Homo sapiens
MDNVQPKIKHRPFCFSVKGHVKMLRLALTVTSMTFFIIAQAPEPYIVITGFEVTVILFFILLYVLRLDRLMKWLFWPLLVFALVTAVCCLADGALIYRKLLFNPSGPYQKKPVHEKKEVL

SEQ ID NO: 2936 - protein, 99 aa, Homo sapiens
MDNVQPKIKHRPFCFSVKGHVKMLRLDIINSLVTTVFMLIVSVLALIPETTTLTVGGGVFALVTAVCCLADGALIYRKLLFNPSGPYQKKPVHEKKEVL

SEQ ID NO: 2937 - protein, 33 aa, Homo sapiens
MDNVQPKIKHRPFCFSVKGHVKMLRLHCLVVFM

SEQ ID NO: 2938 - protein, 67 aa, Homo sapiens
MDNVQPKIKHRPFCFSVKGHVKMLRLVFALVTAVCCLADGALIYRKLLFNPSGPYQKKPVHEKKEVL

SEQ ID NO: 2939 - protein, 69 aa, Homo sapiens
MAGPFSRLLSARPGLRLLALAGAGSLAAGFLLRPEPVRAASERRRLYPPRLFPSSIRSVVSWEERTEQI

SEQ ID NO: 2940 - protein, 148 aa, Homo sapiens
MAGPFSRLLSARPGLRLLALAGAGSLAAGFLLRPEPVRAASERRRLYPPSAEYPDLRKHNNCMASHLTPAVYARLCDKTTPTGWTLDQCIQTGVDNPGHPFIKTVGMVAGDEETYEVFADLFDPVIQERHNGYDPRTMKHTTDLDASK

SEQ ID NO: 2941 - protein, 417 aa, Homo sapiens
MAGPFSRLLSARPGLRLLALAGAGSLAAGFLLRPEPVRAASERRRLYPPSAEYPDLRKHNNCMASHLTPAVYARLCDKTTPTGWTLDQCIQTGVDNPGHPFIKTVGMVAGDEETYEVFADLFDPVIQERHNGYDPRTMKHTTDLDASKIRSGYFDERYVLSSRVRTGRSIRGLSLPPACTRAERREVERVVVDALSGLKGDLAGRYYRLSEMTEAEQQQLIDDHFLFDKPVSPLLTAAGMARDWPDARGIWHNNEKSFLIWVNEEDHTRVISMEKGGNMKRVFERFCRGLKEVERLIQERGWEFMWNERLGYILTCPSNLGTGLRAGVHIKLPLLSKDSRFPKILENLRLQKRGTGGVDTAATGGVFDISNLDRLGKSEVELVQLVIDGVNYLIDCERRLERGQDIRIPTPVIHTKH

SEQ ID NO: 2942 - protein, 417 aa, Homo sapiens; identical to SEQ ID NO: 2941

SEQ ID NO: 2943 - protein, 298 aa, Homo sapiens
MAGPFSRLLSARPGLRLLALAGAGSLAAGFLLRPEPVRAASERRRLYPPSAEYPDLRKHNNCMASHLTPAVYARLCDKTTPTGWTLDQCIQTGVDNPGHPFIKTVGMVAGDEETYEVFADLFDPVIQERHNGYDPRTMKHTTDLDASKIRSGYFDERYVLSSRVRTGRSIRGLSLPPACTRAERREVERVVVDALSGLKGDLAGRYYRLSEMTEAEQQQLIDDHFLFDKPVSPLLTAAGMARDWPDARGIWHNNEKSFLIWVNEEDHTRVISMEKGGNMKRVFERFCRGLKEVVVGIK

SEQ ID NO: 2944 - protein, 222 aa, Homo sapiens
MAGPFSRLLSARPGLRLLALAGAGSLAAGFLLRPEPVRAASERRRLYPPSQTWPTGQLPGNCTRSRRLCPPSMVTGYPLPSAEYPDLRKHNNCMASHLTPAVYARLCDKTTPTGWTLDQCIQTGVDNPGHPFIKTVGMVAGDEETYEVFADLFDPVIQERHNGYDPRTMKHTTDLDASKIRSGYFDERYVLSSRVRTGRSIRGLSLPPACTRAERREVERVV

SEQ ID NO: 2945 - protein, 58 aa, Homo sapiens
MAGPFSRLLSARPGLRLLALAGAGSLAAGFLLRPEPVRAASERRRLYPPRYLLTCLTL

SEQ ID NO: 2946 - protein, 103 aa, Homo sapiens
MAGPFSRLLSARPGLRLLALAGAGSLAAGFLLRPEPVRAASERRRLYPPSAEYPDLRKHNNCMASHLTPAVYARLCDKTTPTGWTLDQCIQTGVDNPGHPFIK

SEQ ID NO: 2947 - protein, 129 aa, Homo sapiens
MAGPFSRLLSARPGLRLLALAGAGSLAAGFLLRPEPVRAASERRRLYPPSAEYPDLRKHNNCMASHLTPAVYARLCDKTTPTGWTLDQCIQTGVDNPGHPFIKTVGMVAGDEETYEVFADLFDPVIQER

SEQ ID NO: 2948 - protein, 241 aa, Homo sapiens
MAGPFSRLLSARPGLRLLALAGAGSLAAGFLLRPEPVRAASERRRLYPPSAEYPDLRKHNNCMASHLTPAVYARLCDKTTPTGWTLDQCIQTGVDNPGHPFIKTVGMVAGDEETYEVFADLFDPVIQERHNGYDPRTMKHTTDLDASKIRSGYFDERYVLSSRVRTGRSIRGLSLPPACTRAERREVERVVVDALSGLKGDLAGRYYRLSEMTEAEQQQLIDDHFLFDKPVSPLLTAAGMA

SEQ ID NO: 2949 - protein, 417 aa, Homo sapiens; identical to SEQ ID NO: 2941

SEQ ID NO: 2950 - protein, 298 aa, Homo sapiens; identical to SEQ ID NO: 2943

SEQ ID NO: 2951 - protein, 417 aa, Homo sapiens; identical to SEQ ID NO: 2941

SEQ ID NO: 2952 - protein, 298 aa, Homo sapiens; identical to SEQ ID NO: 2943

SEQ ID NO: 2953 - protein, 96 aa, Homo sapiens
MAGPFSRLLSARPGLRLLALAGAGSLAAGFLLRPEPVRAASERRRLYPPSQTWPTGQLPGNCTRSRRLCPPSMVTGYPLPSAEYPDLRKHNNCMAS

SEQ ID NO: 2954 - protein, 203 aa, Homo sapiens
MAGPFSRLLSARPGLRLLALAGAGSLAAGFLLRPEPVRAASERRRLYPPSQTWPTGQLPGNCTRSRRLCPPSMVTGYPLPSAEYPDLRKHNNCMASHLTPAVYARLCDKTTPTGWTLDQCIQTGVDNPGHPFIKTVGMVAGDEETYEVFADLFDPVIQERHNGYDPRTMKHTTDLDASKIRSGYFDERYVLSSRVRTGRSIRG

SEQ ID NO: 2955 - protein, 914 aa, Homo sapiens
MGPFKSSVFILILHLLEGALSNSLIQLNNNGYEGIVVAIDPNVPEDETLIQQIKDMVTQASLYLLEATGKRFYFKNVAILIPETWKTKADYVRPKLETYKNADVLVAESTPPGNDEPYTEQMGNCGEKGERIHLTPDFIAGKKLAEYGPQGRAFVHEWAHLRWGVFDEYNNDEKFYLSNGRIQAVRCSAGITGTNVVKKCQGGSCYTKRCTFNKVTGLYEKGCEFVLQSRQTEKASIMFAQHVDSIVEFCTEQNHNKEAPNKQNQKCNLRSTWEVIRDSEDFKKTTPMTTQPPNPTFSLLQIGQRIVCLVLDKSGSMATGNRLNRLNQAGQLFLLQTVELGSWVGMVTFDSAAHVQNELIQINSGSDRDTLAKRLPAAASGGTSICSGLRSAFTVIRKKYPTDGSEIVLLTDGEDNTISGCFNEVKQSGAIIHTVALGPSAAQELEELSKMTGGLQTYASDQVQNNGLIDAFGALSSGNGAVSQRSIQLESKGLTLQNSQWMNGTVIVDSTVGKDTLFLITWTMQPPQILLWDPSGQKQGGFVVDKNTKMAYLQIPGIAKVGTWKYSLQASSQTLTLTVTSRASNATLPPITVTSKTNKDTSKFPSPLVVYANIRQGASPILRASVTALIESVNGKTVTLELLDNGAGADATKDDGVYSRYFTTYDTNGRYSVKVRALGGVNAARRRVIPQQSGALYIPGWIENDEIQWNPPRPEINKDDVQHKQVCFSRTSSGGSFVASDVPNAPIPDLFPPGQITDLKAEIHGGSLINLTWTAPGDDYDHGTAHKYIIRISTSILDLRDKFNESLQVNTTALIPKEANSEEVFLFKPENITFENGTDLFIAIQAVDKVDLKSEISNIARVSLFIPPQTPPETPSPDETSAPCPNIHINSTIPGIHILKIMWKWIGELQLSIA

SEQ ID NO: 2956 - protein, 914 aa, Homo sapiens; identical to SEQ ID NO: 2955

SEQ ID NO: 2957 - protein, 225 aa, Homo sapiens
MDLRAGDSWGMLACLCTVLWHLPAVPALNRTGDPGPGPSIQKTYDLTRYLEHQLRSLAGTYLNYLGPPFNEPDFNPPRLGAETLPRATVDLEVWRSLNDKLRLTQNYEAYSHLLCYLRGLNRQAATAELRRSLAHFCTSLQGLLGSIAGVMAALGYPLPQPLPGTEPTWTPGPAHSDFLQKMDDFWLLKELQTWLWRSAKDFNRLKKKMQPPAAAVTLHLGAHGF

SEQ ID NO: 2958 - protein, 215 aa, Homo sapiens
MLACLCTVLWHLPAVPALNRTGDPGPGPSIQKTYDLTRYLEHQLRSLAGTYLNYLGPPFNEPDFNPPRLGAETLPRATVDLEVWRSLNDKLRLTQNYEAYSHLLCYLRGLNRQAATAELRRSLAHFCTSLQGLLGSIAGVMAALGYPLPQPLPGTEPTWTPGPAHSDFLQKMDDFWLLKELQTWLWRSAKDFNRLKKKMQPPAAAVTLHLGAHGF

SEQ ID NO: 2959 - protein, 170 aa, Homo sapiens
MSMAVETFGFFMATVGLLMLGVTLPNSYWRVSTVHGNVITTNTIFENLWFSCATDSLGVYNCWEFPSMLALSGIAGLRCTNIGGLELSRKAKLAATAGALHILAGICGMVAISWYAFNITRDFFDPLYPGTKYELGPALYLGWSASLISILGGLCLCSACCCGSDEDPAA

SEQ ID NO: 2960 - protein, 148 aa, Homo sapiens
MSMAVETFGFFMATVGLLMLGVTLPNSYWRVSTVHGNVITTNTIFENLWFSCATDSLGVYNCWEFPSMLALSGICGMVAISWYAFNITRDFFDPLYPGTKYELGPALYLGWSASLISILGGLCLCSACCCGSDEDPAASARRPYQAPV

SEQ ID NO: 2961 - protein, 128 aa, Homo sapiens
MSMAVETFGFFMATVGLLMLGVTLPNSYWRVSTVHGNVITTNTIFENLWFSCATDSLGVYNCWEFPSMLALSGSTDSPASLSGGTGLLVRLMSIKGPCEGRRLASCRLSVRCKEAVCVQGIFRPAGHS

SEQ ID NO: 2962 - protein, 228 aa, Homo sapiens
MSMAVETFGFFMATVGLLMLGVTLPNSYWRVSTVHGNVITTNTIFENLWFSCATDSLGVYNCWEFPSMLALSGYIQACRALMITAILLGFLGLLLGIAGLRCTNIGGLELSRKAKLAATAGALHILAGICGMVAISWYAFNITRDFFDPLYPGTKYELGPALYLGWSASLISILGGLCLCSACCCGSDEDPAASARRPYQAPVSVMPVATSDQEGDSSFGKYGRNAYV

SEQ ID NO: 2963 - protein, 228 aa, Homo sapiens; identical to SEQ ID NO: 2962

SEQ ID NO: 2964 - protein, 106 aa, Homo sapiens
  VARIANT 1: note = misc_feature - Xaa can be any naturally occurring amino acid
XGNVITTNTIFENLWFSCATDSLGVYNCWEFPSMLALSGYIQACRALMITAILLGFLGLLLGIAGLRCTNIGGLELSRKAKLAATAGALHILADLLAANQPIGSVS

SEQ ID NO: 2965 - protein, 140 aa, Homo sapiens
MANSGLQLLGFSMALLGWVGLVACTAIPQWQMSSYAGDNIITAQAMYKGLWMDCVTQSTGMMSCKIGLAGHSSPNGGLPGAGLPGHVCGHDGHEVHALWGRRQSEEGPYSHGWRHNFHRGRSCRLGSLLLVWPSDCHRLL

SEQ ID NO: 2966 - protein, 129 aa, Homo sapiens
MANSGLQLLGFSMALLGWVGLVACTAIPQWQMSSYAGDNIITAQAMYKGLWMDCVTQSTGMMSCKMYDSVLALSAALQATRALMVVSLVLGFLAMFVATMGMKCTRCGGDDKVKKARIAMGGGIIFIVA

SEQ ID NO: 2967 - protein, 211 aa, Homo sapiens
MANSGLQLLGFSMALLGWVGLVACTAIPQWQMSSYAGDNIITAQAMYKGLWMDCVTQSTGMMSCKMYDSVLALSAALQATRALMVVSLVLGFLAMFVATMGMKCTRCGGDDKVKKARIAMGGGIIFIVAGLAALVACSWYGHQIVTDFYNPLIPTNIKYEFGPAIFIGWAGSALVILGGALLSCSCPGNESKAGYRVPRSYPKSNSSKEYV

SEQ ID NO: 2968 - protein, 211 aa, Homo sapiens; identical to SEQ ID NO: 2967

SEQ ID NO: 2969 - protein, 145 aa, Homo sapiens
MANSGLQLLGFSMALLGWVGLVACTAIPQWQMSSYAGDNIITAQAMYKGLWMDCVTQSTGMMSCKMYDSVLALSAALQATRALMVVSLVLGFLAMFVATMGMKCTRCGGDDKVKKARIAMGGGIIFIVAGMSLALPSLLAGQGLP

SEQ ID NO: 2970 - protein, 194 aa, Homo sapiens
MPEGTVGLPARRPQCFLRAEMANSGLQLLGFSMALLGWVGLVACTAIPQWQMSSYAGDNIITAQAMYKGLWMDCVTQSTGMMSCKMYDSVLALSAALQATRALMVVSLVLGFLAMFVATMGMKCTRCGGDDKVKKARIAMGGGIIFIVAGLAALVACSWYGHQIVTDFYNPLIPTNIKYEFGPAIFIGWAGSAL

SEQ ID NO: 2971 - protein, 100 aa, Homo sapiens
MVVSLVLGFLAMFVATMGMKCTRCGGDDKVKKARIAMGGGIIFIVAGLAALVACSWYGHQIVTDFYNPLIPTNIKYEFGPAIFIGWAGSALVILGGALLS

SEQ ID NO: 2972 - protein, 72 aa, Homo sapiens
FVSLGLMCFGALIGLCACICRSLYPTIATGILHLLAGLCTLGSVSCYVAGIELLHQKLELPDNPSTIKNVSP

SEQ ID NO: 2973 - protein, 155 aa, Homo sapiens
KSIWDEFISDEADEKTYNDALFRYNGTVGLWRRCITIPKNMHWYSPPERTESFDVVTKCVSFTLTEQFMEKFVDPGNHNSGIDLLRTYLWRCQFLLPFVSLGLMCFGALIGLCACICRSLYPTIATGILHLLAAQYYKERFTIMTLQSWETYHKI

SEQ ID NO: 2974 - protein, 138 aa, Homo sapiens
MAASIGTDFWYEYRSPVQENSSDLNKSIWDEFISDEADEKTYNDALFRYNGTVGLWRRCITIPKNMHWYSPPERTESFDVVTKCVSFTLTEQFMEKFVDPGNHNSGIDLLRTYLWRCQFLLPFVSLGLMCFGALIGLC

SEQ ID NO: 2975 - protein, 223 aa, Homo sapiens
MAASIGTDFWYEYRSPVQENSSDLNKSIWDEFISDEADEKTYNDALFRYNGTVGLWRRCITIPKNMHWYSPPERTESFDVVTKCVSFTLTEQFMEKFVDPGNHNSGIDLLRTYLWRCQFLLPFVSLGLMCFGALIGLCACICRSLYPTIATGILHLLAGLCTLGSVSCYVAGIELLHQKLELPDNVSGEFGWSFCLACVSAPLQFMASALFIWAAHTNRKEYT

SEQ ID NO: 2976 - protein, 89 aa, Homo sapiens
MDNRFATAFVIACVLSLISTIYMAASIGTDFWYEYRSPVQENSSDLNKSIWDEFISDEADEKTYNDALFRYNGTVGLWRRCITIPKNMH

SEQ ID NO: 2977 - protein, 145 aa, Homo sapiens
MDNRFATAFVIACVLSLISTIYMAASIGTDFWYEYRSPVQENSSDLNKSIWDEFISDEADEKTYNDALFRYNGTVGLWRRCITIPKNMHWYSPPERTESFDVVTKCVSFTLTEQFMEKFVDPGNHNSGIDLLRTYLWRCQFLLPF

SEQ ID NO: 2978 - protein, 172 aa, Homo sapiens
MDNRFATAFVIACVLSLISTIYMAASIGTDFWYEYRSPVQENSSDLNKSIWDEFISDEADEKTYNDALFRYNGTVGLWRRCITIPKNMHWYSPPERTESFDVVTKCVSFTLTEQFMEKFVDPGNHNSGIDLLRTYLWRCQFLLPFVSLGLMCFGALIGLCACICRSLYPTIA

SEQ ID NO: 2979 - protein, 177 aa, Homo sapiens
MDNRFATAFVIACVLSLISTIYMAASIGTDFWYEYRSPVQENSSDLNKSIWDEFISDEADEKTYNDALFRYNGTVGLWRRCITIPKNMHWYSPPERTESFDVVTKCVSFTLTEQFMEKFVDPGNHNSGIDLLRTYLWRCQFLLPFVSLGLMCFGALIGLCACICRSLYPTIATGILH

SEQ ID NO: 2980 - protein, 180 aa, Homo sapiens
MDNRFATAFVIACVLSLISTIYMAASIGTDFWYEYRSPVQENSSDLNKSIWDEFISDEADEKTYNDALFRYNGTVGLWRRCITIPKNMHWYSPPERTESFDVVTKCVSFTLTEQFMEKFVDPGNHNSGIDLLRTYLWRCQFLLPFVSLGLMCFGALIGLCACICRSLYPTIATGILHLLA

SEQ ID NO: 2981 - protein, 213 aa, Homo sapiens
MDNRFATAFVIACVLSLISTIYMAASIGTDFWYEYRSPVQENSSDLNKSIWDEFISDEADEKTYNDALFRYNGTVGLWRRCITIPKNMHWYSPPERTESFDVVTKCVSFTLTEQFMEKFVDPGNHNSGIDLLRTYLWRCQFLLPFVSLGLMCFGALIGLCACICRSLYPTIATGILHLLAGLCTLGSVSCYVAGIELLHQKLELPDNVSGEFG

SEQ ID NO: 2982 - protein, 237 aa, Homo sapiens
MDNRFATAFVIACVLSLISTIYMAASIGTDFWYEYRSPVQENSSDLNKSIWDEFISDEADEKTYNDALFRYNGTVGLWRRCITIPKNMHWYSPPERTESFDVVTKCVSFTLTEQFMEKFVDPGNHNSGIDLLRTYLWRCQFLLPFVSLGLMCFGALIGLCACICRSLYPTIATGILHLLAGLCTLGSVSCYVAGIELLHQKLELPDNVSGEFGWSFCLACVSAPLQFMASALFIWAA

SEQ ID NO: 2983 - protein, 239 aa, Homo sapiens
MDNRFATAFVIACVLSLISTIYMAASIGTDFWYEYRSPVQENSSDLNKSIWDEFISDEADEKTYNDALFRYNGTVGLWRRCITIPKNMHWYSPPERTESFDVVTKCVSFTLTEQFMEKFVDPGNHNSGIDLLRTYLWRCQFLLPFVSLGLMCFGALIGLCACICRSLYPTIATGILHLLAGLCTLGSVSCYVAGIELLHQKLELPDNVSGEFGWSFCLACVSAPLQFMASALFIWAAHT

SEQ ID NO: 2984 - protein, 245 aa, Homo sapiens
MDNRFATAFVIACVLSLISTIYMAASIGTDFWYEYRSPVQENSSDLNKSIWDEFISDEADEKTYNDALFRYNGTVGLWRRCITIPKNMHWYSPPERTESFDVVTKCVSFTLTEQFMEKFVDPGNHNSGIDLLRTYLWRCQFLLPFVSLGLMCFGALIGLCACICRSLYPTIATGILHLLAGLCTLGSVSCYVAGIELLHQKLELPDNVSGEFGWSFCLACVSAPLQFMASALFIWAAHTNRKEYT

SEQ ID NO: 2985 - protein, 253 aa, Homo sapiens
MDNRFATAFVIACVLSLISTIYMAASIGTDFWYEYRSPVQENSSDLNKSIWDEFISDEADEKTYNDALFRYNGTVGLWRRCITIPKNMHWYSPPERTESFDVVTKCVSFTLTEQFMEKFVDPGNHNSGIDLLRTYLWRCQFLLPFVSLGLMCFGALIGLCACICRSLYPTIATGILHLLAGLCTLGSVSCYVAGIELLHQKLELPDNVSGEFGWSFCLACVSAPLQFMASALFIWAAHTNRKEYTLMKAYRVA

SEQ ID NO: 2986 - protein, 253 aa, Homo sapiens; identical to SEQ ID NO: 2985

SEQ ID NO: 2987 - protein, 253 aa, Homo sapiens; identical to SEQ ID NO: 2985

SEQ ID NO: 2988 - protein, 253 aa, Homo sapiens; identical to SEQ ID NO: 2985

SEQ ID NO: 2989 - protein, 253 aa, Homo sapiens; identical to SEQ ID NO: 2985

SEQ ID NO: 2990 - protein, 253 aa, Homo sapiens; identical to SEQ ID NO: 2985

SEQ ID NO: 2991 - protein, 210 aa, Homo sapiens
MDNRFATAFVIACVLSLISTIYMAASIGTDFWYEYRSPVQENSSDLNKSIWDEFISDEADEKTYNDALFRYNGTVGLWRRCITIPKNMHWYSPPERTESFDVVTKCVSFTLTEQFMEKFVDPGNHNSGIDLLRTYLWRCQFLLPFVSLGLMCFGALIGLCACICRSLYPTIATGILHLLAVTKESMLPAGAESKHTATPAHACVQTGKPK

SEQ ID NO: 2992 - protein, 106 aa, Homo sapiens
MDNRFATAFVIACVLSLISTIYMAASIGTDFWYEYRSPVQENSSDLNKSIWDEFISDEADEKTYNDALFRYNGTVGLWRRCITIPKNMHWYSPPERTGNCSCSRVI

SEQ ID NO: 2993 - protein, 100 aa, Homo sapiens
MEKFVDPGNHNSGIDLLRTYLWRCQFLLPFVSLGLMCFGALIGLCACICRSLYPTIATGILHLLAGLCTLGSVSCYVAGIELLHQKLELPDNVSGEFGWS

SEQ ID NO: 2994 - protein, 122 aa, Homo sapiens
MEKFVDPGNHNSGIDLLRTYLWRCQFLLPFVSLGLMCFGALIGLCACICRSLYPTIATGILHLLAGLCTLGSVSCYVAGIELLHQKLELPDNVSGEFGWSFCLACVSAPLQFMASALFIWAA

SEQ ID NO: 2995 - protein, 87 aa, Homo sapiens
MGESFDVVTKCVSFTLTEQFMEKFVDPGNHNSGIDLLRTYLWRCQFLLPFVSLGLMCFGALIGLCACICRSLYPTIATGILHLLAEN

SEQ ID NO: 2996 - protein, 158 aa, Homo sapiens
MGESFDVVTKCVSFTLTEQFMEKFVDPGNHNSGIDLLRTYLWRCQFLLPFVSLGLMCFGALIGLCACICRSLYPTIATGILHLLAGLCTLGSVSCYVAGIELLHQKLELPDNVSGEFGWSFCLACVSAPLQFMASALFIWAAHTNRKEYTLMKAYRVA

SEQ ID NO: 2997 - protein, 276 aa, Homo sapiens
MGGDRLENKTSVSVASWSSLNARMDNRFATAFVIACVLSLISTIYMAASIGTDFWYEYRSPVQENSSDLNKSIWDEFISDEADEKTYNDALFRYNGTVGLWRRCITIPKNMHWYSPPERTESFDVVTKCVSFTLTEQFMEKFVDPGNHNSGIDLLRTYLWRCQFLLPFVSLGLMCFGALIGLCACICRSLYPTIATGILHLLAGLCTLGSVSCYVAGIELLHQKLELPDNVSGEFGWSFCLACVSAPLQFMASALFIWAAHTNRKEYTLMKAYRVA

SEQ ID NO: 2998 - protein, 317 aa, Homo sapiens
MQAAWLLGALVVPQLLGFGHGARGAEREWEGGWGGAQEEEREREALMLKHLQEALGLPAGRGDENPAGTVEGKEDWEMEEDQGEEEEEEATPTPSSGPSPSPTPEDIVTYILGRLAGLDAGLHQLHVRLHALDTRVVELTQGLRQLRNAAGDTRDAVQALQEAQGRAEREHGRLEDSECMTPPPSLPGPAHRLPEGAAPGPQVLPALARLRSSGGGAGAVHGAGREPGAAGRPPADGGAHSVPARGARSLQLARVAGRARSARRGPLPLRKRPARVLLRLASLTPPRARRPAQRLAASAQPGPAQRWHARELRGAGL

SEQ ID NO: 2999 - protein, 323 aa, Homo sapiens
MQAAWLLGALVVPQLLGFGHGARGAEREWEGGWGGAQEEEREREALMLKHLQEALGLPAGRGDENPAGTVEGKEDWEMEEDQGEEEEEEATPTPSSGPSPSPTPEDIVTYILGRLAGLDAGLHQLHVRLHALDTRVVELTQGLRQLRNAAGDTRDAVQALQEAQGRAEREHGRLEGCLKGLRLGHKCFLLSRDFEAQAAAQARCTARGGSLAQPADRQQMEALTRYLRAALAPYNWPVWLGVHDRRAEGLYLFENGQRVSFFAWHRSPRPELGAQPSASPHPLSPDQPNGGTLENCVAQASDDGSWWDHDCQRRLYYVCEFPF

SEQ ID NO: 3000 - protein, 245 aa, Homo sapiens
MQAAWLLGALVVPQLLGFGHGARGAEREWEGGWGGAQEEEREREALMLKHLQEALGLPAGRGDENPAGTVEGKEDWEMEEDQGEEEEEEATPTPSSGPSPSPTPEDIVTYILGRLAGLDAGLHQLHVRLHALDTRVVELTQGLRQLRNAAGDTRDAVQALQEAQGRAEREHGRLEGCLKGLRLGHKCFLLSRDFEAQPSASPHPLSPDQPNGGTLENCVAQASDDGSWWDHDCQRRLYYVCEFPF

SEQ ID NO: 3001 - protein, 118 aa, Homo sapiens
LAKGRIQARRMKMQRIAALLDLPIQPTTEVLGFGLGSSTSTQHLPFRFYDQGRRGSSDPTVQRSVFASVDKVPALLTAAVERQPRWPLPSLLVPWLTDCCGGLCLLIYRRFSRIVFKI

SEQ ID NO: 3002 - protein, 906 aa, Homo sapiens
MFGRSRSWVGGGHGKTSRNIHSLDHLKYLYHVLTKNTTVTEQNRNLLVETIRSITEILIWGDQNDSSVFDFFLEKNMFVFFLNILRQKSGRYVCVQLLQTLNILFENISHETSLYYLLSNNYVNSIIVHKFDFSDEEIMAYYISFLKTLSLKLNNHTVHFFYNEHTNDFALYTEAIKFFNHPESMVRIAVRTITLNVYKVDNQAMLHYIRDKTAVPYFSNLVWFIGSHVIELDDCVQTDEEHRNRGKLSDLVAEHLDHLHYLNDILIINCEFLNDVLTDHLLNRLFLPLYVYSLENQDKGGERPKISLPVSLYLLSQVFLIIHHAPLVNSLAEVILNGDLSEMYAKTEQDIQRSSAKPSIRCFIKPTETLERSLEMNKHKGKRRVQKRPNYKNVGEEEDEEKGPTEDAQEDAEKAKEIEMVIMERSKLSELAASTSVQEQNTTDEEKSAAATCSESTQWSRPFLDMVYHALDSPDDDYHALFVLCLLYAMSHNKGMDPEKLERIQLPVPNAAEKTTYNHPLAERLIRIMNNAAQPDGKIRLATLELSCLLLKQQVLMSAGCIMKDVHLACLEGAREESVHLVRHFYKGEDIFLDMFEDEYRSMTMKPMNVEYLMMDASILLPPTGTPLTGIDFVKRLPCGDVEKTRRAIRVFFMLRSLSLQLRGEPETQLPLTREEDLIKTDDVLDLNNSDLIACTVITKDGGMVQRFLAVDIYQMSLVEPDVSRLGWGVVKFAGLLQDMQVTGVEDDSRALNITIHKPASSPHSKPFPILQATFIFSDHIRCIIAKQRLAKGRIQARRMKMQRIAALLDLPIQPTTEVLGFGLGSSTSTQHLPFRFYDQGRRGSSDPTVQRSVFASVDKVPGEPAPRPAPQLVHHGGRSRSFSLWSLCELPFLSQKPRRLAAPAS

SEQ ID NO: 3003 - protein, 1053 aa, Homo sapiens
MFGRSRSWVGGGHGKTSRNIHSLDHLKYLYHVLTKNTTVTEQNRNLLVETIRSITEILIWGDQNDSSVFDFFLEKNMFVFFLNILRQKSGRYVCVQLLQTLNILFENISHETSLYYLLSNNYVNSIIVHKFDFSDEEIMAYYISFLKTLSLKLNNHTVHFFYNEHTNDFALYTEAIKFFNHPESMVRIAVRTITLNVYKVSLDNQAMLHYIRDKTAVPYFSNLVWFIGSHVIELDDCVQTDEEHRNRGKLSDLVAEHLDHLHYLNDILIINCEFLNDVLTDHLLNRLFLPLYVYSLENQDKGGERPKISLPVSLYLLSQVFLIIHHAPLVNSLAEVILNGDLSEMYAKTEQDIQRSSAKPSIRCFIKPTETLERSLEMNKHKGKRRVQKRPNYKNVGEEEDEEKGPTEDAQEDAEKAKGTEGGSKGIKTSGESEEIEMVIMERSKLSELAASTSVQEQNTTDEEKSAAATCSESTQWSRPFLDMVYHALDSPDDDYHALFVLCLLYAMSHNKGMDPEKLERIQLPVPNAAEKTTYNHPLAERLIRIMNNAAQPDGKIRLATLELSCLLLKQQVLMSAGCIMKDVHLACLEGAREESVHLVRHFYKGEDIFLDMFEDEYRSMTMKPMNVEYLMMDASILLPPTGTPLTGIDFVKRLPCGDVEKTRRAIRVFFMLRSLSLQLRGEPETQLPLTREEDLIKTDDVLDLNNSDLIACTVITKDGGMVQRFLAVDIYQMSLVEPDVSRLGWGVVKFAGLLQDMQVTGVEDDSRALNITIHKPASSPHSKPFPILQATFIFSDHIRCIIAKQRLAKGRIQARRMKMQRIAALLDLPIQPTTEVLGFGLGSSTSTQHLPFRFYDQGRRGSSDPTVQRSVFASVDKVPGFAVAQCINQHSSPSLSSQSPPSASGSPSGSGSTSHCDSGGTSSSSTPSTAQSPADAPMSPELPKPHLPDQLVIVNETEADSKPSKNVARSAAVETASLSPSLVPARQPTISLLCEDTADTLSVESLTLVPPVDPHSLRSLTGMPPLSTPAAACTEPVGEEAACAEPVGTAED

SEQ ID NO: 3004 - protein, 60 aa, Homo sapiens
  VARIANT 1: note = misc_feature - Xaa can be any naturally occurring amino acid
XEVLGFGLGSSTSTQHLPFRFYDQGRRGSSDPTVQRSVFASVDKVPDPSLCSCISYMCQS

SEQ ID NO: 3005 - protein, 152 aa, Homo sapiens
  VARIANT 1: note = misc_feature - Xaa can be any naturally occurring amino acid
XKGRIQARRMKMQRIAALLDLPIQPTTEVLGFGLGSSTSTQHLPFRFYDQGRRGSSDPTVQRSVFASVDKVPGFAVAQCINQHSSPSLSSQSPPSASGSPSGSGSTSHCDSGGTSSSSTPSTAQSPAVRSGRKGRRRVFSLSEADSHGGHWV

SEQ ID NO: 3006 - protein, 128 aa, Homo sapiens
  VARIANT 1: note = misc_feature - Xaa can be any naturally occurring amino acid
XMQVTGVEDDSRALNITIHKPASSPHSKPFPILQATFIFSDHIRCIIAKQRLAKGRIQARRMKMQRIAALLDLPIQPTTEVLGFGLGSSTSTQHLPFRFYDQGRRGSSDPTVQRSVFASVDKVPGFQG

SEQ ID NO: 3007 - protein, 446 aa, Homo sapiens
MLHPETSPGRGHLLAVLLALLGTAWAEVWPPQLQEQAPMAGALNRKESFLLLSLHNRLRSWVQPPAADMRRLDWSDSLAQLAQARAALCGTPTPSLASGLWRTLQVGWNMQLLPAGLVSFVEVVSLWFAEGQRYSHAAGECARNATCTHYTQLVWATSSQLGCGRHLCSAGQAAIEAFVCAYSPRGNWEVNGKTIVPYKKGAWCSLCTASVSGCFKAWDHAGGLCEVPRNPCRMSCQNHGRLNISTCHCHCPPGYTGRYCQVRCSLQCVHGRFREEECSCVCDIGYGGAQCATKVHFPFHTCDLRIDGDCFMVSSEADTYYRARMKCQRKGGVLAQIKSQKVQDILAFYLGRLETTNEVIDSDFETRNFWIGLTYKTAKDSFRWATGEHQAFTSFAFGQPDNHGFGNCVELQASAAFNWNDQRCKTRNRYICQFAQEHISRWGPGS

SEQ ID NO: 3008 - protein, 446 aa, Homo sapiens; identical to SEQ ID NO: 3007

SEQ ID NO: 3009 - protein, 455 aa, Homo sapiens
MLHPETSPGRGHLLAVLLALLGTAWAEVWPPQLQEQAPMAGALNRKESFLLLSLHNRLRSWVQPPAADMRRLDWSDSLAQLAQARAALCGTPTPSLASGLWRTLQVGWNMQLLPAGLVSFVEVVSLWFAEGQRYSHAAGECARNATCTHYTQLVWATSSQLGCGRHLCSAGQAAIEAFVCAYSPRGNWEVNGKTIVPYKKGAWCSLCTASVSGCFKAWDHAGGLCEVPRNPCRMSCQNHGRLNISTCHCHCPPGYTGRYCQVRCSLQCVHGRFREEECSCVCDIGYGGAQCATKVHFPFHTCDLRIDGDCFMVSSEADTYYRARMKCQRKGGVLAQIKSQKVQDILAFYLGRLETTNEVIDSDFETRNFWIGLTYKTAKDSFRWATGEHQAFTSFAFGQPDNHGLVWLSAAMGFGNCVELQASAAFNWNDQRCKTRNRYICQFAQEHISRWGPGS

SEQ ID NO: 3010 - protein, 446 aa, Homo sapiens; identical to SEQ ID NO: 3007

SEQ ID NO: 3011 - protein, 446 aa, Homo sapiens; identical to SEQ ID NO: 3007

SEQ ID NO: 3012 - protein, 66 aa, Homo sapiens
MRRLLVWATSSQLGCGRHLCSAGQAAIEAFVCAYSPRGNWEVNGKTIVPYKKGAWCSLCTASVSGC

SEQ ID NO: 3013 - protein, 455 aa, Homo sapiens
MLHPETSPGRGHLLAVLLALLGTTWAEVWPPQLQEQAPMAGALNRKESFLLLSLHNRLRSWVQPPAADMRRLDWSDSLAQLAQARAALCGIPTPSLASGLWRTLQVGWNMQLLPAGLASFVEVVSLWFAEGQRYSHAAGECARNATCTHYTQLVWATSSQLGCGRHLCSAGQTAIEAFVCAYSPGGNWEVNGKTIIPYKKGAWCSLCTASVSGCFKAWDHAGGLCEVPRNPCRMSCQNHGRLNISTCHCHCPPGYTGRYCQVRCSLQCVHGRFREEECSCVCDIGYGGAQCATKVHFPFHTCDLRIDGDCFMVSSEADTYYRARMKCQRKGGVLAQIKSQKVQDILAFYLGRLETTNEVIDSDFETRNFWIGLTYKTAKDSFRWATGEHQAFTSFAFGQPDNHGLVWLSAAMGFGNCVELQASAAFNWNDQRCKTRNRYICQFAQEHISRWGPGS

SEQ ID NO: 3014 - protein, 446 aa, Homo sapiens
MLHPETSPGRGHLLAVLLALLGTTWAEVWPPQLQEQAPMAGALNRKESFLLLSLHNRLRSWVQPPAADMRRLDWSDSLAQLAQARAALCGIPTPSLASGLWRTLQVGWNMQLLPAGLASFVEVVSLWFAEGQRYSHAAGECARNATCTHYTQLVWATSSQLGCGRHLCSAGQTAIEAFVCAYSPRGNWEVNGKTIIPYKKGAWCSLCTASVSGCFKAWDHAGGLCEVPRNPCRMSCQNHGRLNISTCHCHCPPGYTGRYCQVRCSLQCVHGRFREEECSCVCDIGYGGAQCATKVHFPFHTCDLRIDGDCFMVSSEADTYYRARMKCQRKGGVLAQIKSQKVQDILAFYLGRLETTNEVIDSDFETRNFWIGLTYKTAKDSFRWATGEHQAFTSFAFGQPDNHGFGNCVELQASAAFNWNDQRCKTRNRYICQFAQEHISRWGPGS

SEQ ID NO: 3015 - protein, 303 aa, Homo sapiens [sequence omitted]

SEQ ID NO: 3016 - protein, 446 aa, Homo sapiens; identical to SEQ ID NO: 3014

SEQ ID NO: 3017 - protein, 119 aa, Homo sapiens
MLHPETSPGRGHLLAVLLALLGTAWAEVWPPQLQEQAPMAGALNRKESFLLLSLHNRLRSWVQPPAADMRRLDWSDSLAQLAQARAALCGIPTPSLASGLWRTLQVGWNMQLLPAGLAS

SEQ ID NO: 3018 - protein, 446 aa, Homo sapiens
MLHPETSPGRGHLLAVLLALLGTAWAEVWPPQLQEQAPMAGALNRKESFLLLSLHNRLRSWVQPPAADMRRLDWSDSLAQLAQARAALCGIPTPSLASGLWRTLQVGWNMQLLPAGLASFVEVVSLWFAEGQRYSHAAGECARNATCTHYTQLVWATSSQLGCGRHLCSAGQAAIEAFVCAYSPRGNWEVNGKTIVPYKKGAWCSLCTASVSGCFKAWDHAGGLCEVPRNPCRMSCQNHGRLNISTCHCHCPPGYTGRYCQVRCSLQCVHGRFREEECSCVCDIGYGGAQCATKVHFPFHTCDLRIDGDCFMVSSEADTYYRARMKCQRKGGVLAQIKSQKVQDILAFYLGRLETTNEVIDSDFETRNFWIGLTYKTAKDSFRWATGEHQAFTSFAFGQPDNHGFGNCVELQASAAFNWNNQRCKTRNRYICQFAQEHISRWGPGS

SEQ ID NO: 3019 - protein, 455 aa, Homo sapiens
MLHPETSPGRGHLLAVLLALLGTAWAEVWPPQLQEQAPMAGALNRKESFLLLSLHNRLRSWVQPPAADMRRLDWSDSLAQLAQARAALCGIPTPSLASGLWRTLQVGWNMQLLPAGLASFVEVVSLWFAEGQRYSHAAGECARNATCTHYTQLVWATSSQLGCGRHLCSAGQAAIEAFVCAYSPRGNWEVNGKTIVPYKKGAWCSLCTASVSGCFKAWDHAGGLCEVPRNPCRMSCQNHGRLNISTCHCHCPPGYTGRYCQVRCSLQCVHGRFREEECSCVCDIGYGGAQCATKVHFPFHTCDLRIDGDCFMVSSEADTYYRARMKCQRKGGVLAQIKSQKVQDILAFYLGRLETTNEVIDSDFETRNFWIGLTYKTAKDSFRWATGEHQAFTSFAFGQPDNHGLVWLSAAMGFGNCVELQASAAFNWNNQRCKTRNRYICQFAQEHISRWGPGS

SEQ ID NO: 3020 - protein, 446 aa, Homo sapiens; identical to SEQ ID NO: 3018

SEQ ID NO: 3021 - protein, 446 aa, Homo sapiens; identical to SEQ ID NO: 3018

SEQ ID NO: 3022 - protein, 446 aa, Homo sapiens; identical to SEQ ID NO: 3018

SEQ ID NO: 3023 - protein, 134 aa, Homo sapiens
MLHPETSPGRGHLLAVLLALLGTAWAEVWPPQLQEQAPMAGALNRKESFLLLSLHNRLRSWVQPPAADMRRLLVWATSSQLGCGRHLCSAGQAAIEAFVCAYSPRGNWEVNGKTIVPYKKGAWCSLCTASVSGC

SEQ ID NO: 3024 - protein, 86 aa, Homo sapiens
MQRWTLWAAAFLTLHSAQAFPQTDISISPALPELPLPSLCPLFWMEFKGHCYRFFPLNKTWAEADLYCSEFSVGRKSAKLASIHSL

SEQ ID NO: 3025 - protein, 186 aa, Homo sapiens
MQRWTLWAAAFLTLHSAQAFPQTDISISPALPELPLPSLCPLFWMEFKGHCYRFFPLNKTWAEADLYCSEFSVGRKSAKLASIHSWEENVFVYDLVNSCVPGIPADVWTGLHDHRQEGQFEWTDGSSYDYSYWDGSQPDDGVHADPEEEDCVQIWYRPTSALRSWNDNTCSRKFPFVCKIPSLTIH

SEQ ID NO: 3026 - protein, 136 aa, Homo sapiens
MQRWTLWAAAFLTLHSAQAFPQTDISISPALPELPLPSLCPLFWMEFKGHCYRFFPLNKTWAEADLYCSEFSVGRKSAKLASIHSWEENVFVYDLVNSCVPGIPADVWTGLHDHRQVRKQWPLGPLGSSSQDSILI

SEQ ID NO: 3027 - protein, 65 aa, Homo sapiens
MQRWTLWAAAFLTLHSAQAFPQTDISISPVCFLSAPSPARAAPAFPVPPVLDGVQRPLLSILPSQ

SEQ ID NO: 3028 - protein, 80 aa, Homo sapiens
MILKLILSLKNFLRRYKCSSDHWIGLKMAKNRTGQWVDGATFTKSFGMRGSEGCAYLSDDGAATARCYTERKWICRKRIH

SEQ ID NO: 3029 - protein, 149 aa, Homo sapiens
MMTKHKKCFIIVGVLITTNIITLIVKLTRDSQSLCPYDWIGFQNKCYYFSKEEGDWNSSKYNCSTQHADLTIIDNIEEMNFLRRYKCSSDHWIGLKMAKNRTGQWVDGATFTKSFGMRGSEGCAYLSDDGAATARCYTERKWICRKRIH

SEQ ID NO: 3030 - protein, 206 aa, Homo sapiens
MAQQACPRAMAKNGLVICILVITLLLDQTTSHTSRLKARKHSKRRVRDKDGDLKTQIEKLWTEVNALKEIQALQTVCLRGTKVHKKCYLASEGLKHFHEANEDCISKGGILVIPRNSDEINALQDYGKRSLPGVNDFWLGINDMVTEGKFVDVNGIAISFLNWDRAQPNGGKRENCVLFSQSAQGKWSDEACRSSKRYICEFTIPQ

SEQ ID NO: 3031 - protein, 50 aa, Homo sapiens
MAQQACPRAMAKNGLVICILVITLLLDQTTSHTSRLKARKHSKRRVRGIC

SEQ ID NO: 3032 - protein, 202 aa, Homo sapiens
MELWGAYLLLCLFSLLTQVTTEPPTQKPKKIVNAKKDVVNTKMFEELKSRLDTLAQEVALLKEQQALQTVCLKGTKVHMKCFLAFTQTKTFHEASEDCISRGGTLGTPQTGSENDALYEYLRQSVGNEAEIWLGLNDMAAEGTWVDMTGARIAYKNWETEITAQPDGGKTENCAVLSGAANGKWFDKRCRDQLPYICQFGIV

SEQ ID NO: 3033 - protein, 160 aa, Homo sapiens
MFEELKSRLDTLAQEVALLKEQQALQTVCLKGTKVHMKCFLAFTQTKTFHEASEDCISRGGTLGTPQTGSENDALYEYLRQSVGNEAEIWLGLNDMAAEGTWVDMTGARIAYKNWETEITAQPDGGKTENCAVLSGAANGKWFDKRCRDQLPYICQFGIV

SEQ ID NO: 3034 - protein, 179 aa, Homo sapiens
MHFQAFWLCLGLLFISINAEFMDDDVETEDFEENSEEIDVNESELSSEIKYKTPQPIGEVYFAETFDSGRLAGWVLSKAKKDDMDEEISIYDGRWEIEELKENQVPGDRGLVLKSRAKHHAISAVLAKPFIFADKPLIVQYEVNFQDGIDCGGAYIKLLADTDDLILENFYDKTSYIIM

SEQ ID NO: 3035 - protein, 610 aa, Homo sapiens
MHFQAFWLCLGLLFISINAEFMDDDVETEDFEENSEEIDVNESELSSEIKYKTPQPIGEVYFAETFDSGRLAGWVLSKAKKDDMDEEISIYDGRWEIEELKENQVPGDRGLVLKSRAKHHAISAVLAKPFIFADKPLIVQYEVNFQDGIDCGGAYIKLLADTDDLILENFYDKTSYIIMFGPDKCGEDYKLHFIFRHKHPKTGVFEEKHAKPPDVDLKKFFTDRKTHLYTLVMNPDDTFEVLVDQTVVNKGSLLEDVVPPIKPPKEIEDPNDKKPEEWDERAKIPDPSAVKPEDWDESEPAQIEDSSVVKPAGWLDDEPKFIPDPNAEKPDDWNEDTDGEWEAPQILNPACRIGCGEWKPPMIDNPKYKGVWRPPLVDNPNYQGIWSPRKIPNPDYFEDDHPFLLTSFSALGLELWSMTSDIYFDNFIICSEKEVADHWAADGWRWKIMIANANKPGVLKQLMAAAEGHPWLWLIYLVTAGVPIALITSFCWPRKVKKKHKDTEYKKTDICIPQTKGVLEQEEKEEKAALEKPMDLEEEKKQNDGEMLEKEEESEPEEKSEEEIEIIEGQEESNQSNKSGSEDEMKEADESTGSGDGPIKSVRKRRVRKD

SEQ ID NO: 3036 - protein, 610 aa, Homo sapiens; identical to SEQ ID NO: 3035

SEQ ID NO: 3037 - protein, 277 aa, Homo sapiens
GCSLMAQEVDTAQGAEMRRGAGAARGRASWCWALALLWLAVVPGWSRVSGIPSRRHWPVPYKRFDFRPKPDPYCQAKYTFCPTGSPIPVMEGDDDIEVFRLQAPVWEFKYGDLLGHLKIMHDAIGFRSTLTGKNYTMEWYELFQLGNCTFPHLRPEMDAPFWCNQGAACFFEGIDDVHWKENGTLVQVATISGFHHVGQDSIELRTSSDPPILASQSAGITDVSHCTRPTIRILPQRGTLYYLSLALLPGWSTVVRPRLTATSASRIQTIFLPQPPK

SEQ ID NO: 3038 - protein, 204 aa, Homo sapiens
GSTGCSLMAQEVDTAQGAEMRRGAGAARGRASWCWALALLWLAVVPGWSRVSGIPSRRHWPVPYKRFDFRPKPDPYCQAKYTFCPTGSPIPVMEGDDDIEVFRLQAPVWEFKYGDLLGHLKIMHDAIGFRSTLTGKNYTMEWYELFQLGNCTFPHLRPEMDAPFWCNQGAACFFEGIDDVHWKENGTLVQVATISDGETEAQRG

SEQ ID NO: 3039 - protein, 271 aa, Homo sapiens
LMAQEVDTAQGAEMRRGAGAARGRASWCWALALLWLAVVPGWSRVSGIPSRRHWPVPYKRFDFRPKPDPYCQAKYTFCPTGSPIPVMEGDDDIEVFRLQAPVWEFKYGDLLGHLKIMHDAIGFRSTLTGKNYTMEWYELFQLGNCTFPHLRPEMDAPFWCNQGAACFFEGIDDVHWKENGTLVQVATISGFHHVGQDSIELRTSSDPPILASQSAGITDVSHCTRPTIRILPQRGTLYYLLWTKTFLLCSLQFSWDFQNIATPYFNLLPKP

SEQ ID NO: 3040 - protein, 358 aa, Homo sapiens
MAQEVDTAQGAEMRRGAGAARGRASWCWALALLWLAVVPGWSRVSGIPSRRHWPVPYKRFDFRPKPDPYCQAKYTFCPTGSPIPVMEGDDDIEVFRLQAPVWEFKYGDLLGHLKIMHDAIGFRSTLTGKNYTMEWYELFQLGNCTFPHLRPEMDAPFWCNQGAACFFEGIDDVHWKENGTLVQVATISGNMFNQMAKWVKQDNETGIYYETWNVKASPEKGAETWFDSYDCSKFVLRTFNKLAEFGAEFKNIETNYTRIFLYSGEPTYLGNETSVFGPTGNKTLGLAIKRFYYPFKPHLPTKEFLLSLLQIFDAVIVHKQFYLFYNFEYWFLPMKFPFIKITYEEIPLPIRNKTLSGL

SEQ ID NO: 3041 - protein, 36 aa, Homo sapiens
MEGDDDIEVFRLQAPVWEFKYGDLLGHLLLYLAPGR

SEQ ID NO: 3042 - protein, 407 aa, Homo sapiens
MRRNLRLGPSSGADAQGQGAPRPGLAAPRMLLPPASQASRGSGSTGCSLMAQEVDTAQGAEMRRGAGAARGRASWCWALALLWLAVVPGWSRVSGIPSRRHWPVPYKRFDFRPKPDPYCQAKYTFCPTGSPIPVMEGDDDIEVFRLQAPVWEFKYGDLLGHLKIMHDAIGFRSTLTGKNYTMEWYELFQLGNCTFPHLRPEMDAPFWCNQGAACFFEGIDDVHWKENGTLVQVATISGNMFNQMAKWVKQDNETGIYYETWNVKASPEKGAETWFDSYDCSKFVLRTFNKLAEFGAEFKNIETNYTRIFLYSGEPTYLGNETSVFGPTGNKTLGLAIKRFYYPFKPHLPTKEFLLSLLQIFDAVIVHKQFYLFYNFEYWFLPMKFPFIKITYEEIPLPIRNKTLSGL

SEQ ID NO: 3043 - protein, 125 aa, Homo sapiens
  VARIANT 1: note = misc_feature - Xaa can be any naturally occurring amino acid
XGRASWCWALALLWLAVVPGWSRVSGIPSRRHWPVPYKRFDFRPKPDPYCQAKYTFCPTGSPIPVMEGDDDIEVFRLQAPVWEFKYGDLLGHLVTWTHGCVTVAFIHVLSLHRKLCMMPLDSEVH

SEQ ID NO: 3044 - protein, 304 aa, Homo sapiens
  VARIANT 1: note = misc_feature - Xaa can be any naturally occurring amino acid
XGYKRFDFRPKPDPYCQAKYTFCPTGSPIPVMEGDDDIEVFRLQAPVWEFKYGDLLGHLKIMHDAIGFRSTLTGKNYTMEWYELFQLGNCTFPHLRPEMDAPFWCNQGAACFFEGIDDVHWKENGTLVQVATISGNMFNQMAKWVKQDNETGIYYETWNVKASPEKGAETWFDSYDCSKFVLRTFNKLAEFGAEFKNIETNYTRIFLYSGEPTYLGNETSVFGPTGNKTLGLAIKRFYYPFKPHLPTKEFLLSLLQIFDAVIVHKQFYLFYNFEYWFLPMKFPFIKITYEEIPLPIRNKTLSGL

SEQ ID NO: 3045 - protein, 216 aa, Homo sapiens
  VARIANT 1: note = misc_feature - Xaa can be any naturally occurring amino acid
XLPPASQASRGSGSTGCSLMAQEVDTAQGAEMRRGAGAARGRASWCWALALLWLAVVPGWSRVSGIPSRRHWPVPYKRFDFRPKPDPYCQAKYTFCPTGSPIPVMEGDDDIEVFRLQAPVWEFKYGDLLGHLKIMHDAIGFRSTLTGKNYTMEWYELFQLGNCTFPHLRPEMDAPFWCNQGAACFFEGIDDVHWKENGTLVQVATISDGETEAQRG

SEQ ID NO: 3046 - protein, 249 aa, Homo sapiens
  VARIANT 1: note = misc_feature - Xaa can be any naturally occurring amino acid
XMAQEVDTAQGAEMRRGAGAARGRASWCWALALLWLAVVPGWSRVSGIPSRRHWPVPYKRFDFRPKPDPYCQAKYTFCPTGSPIPVMEGDDDIEVFRLQAPVWEFKYGDLLGHLKIMHDAIGFRSTLTGKNYTMEWYELFQLGNCTFPHLRPEMDAPFWCNQGAACFFEGIDDVHWKENGTLVQVATISGFHHVGQDSIELRTSSDPPILASQSAGITDVSHCTRPTIRILPQRGTLYYLRWVLLCCPG

SEQ ID NO: 3047 - protein, 205 aa, Homo sapiens
  VARIANT 1: note = misc_feature - Xaa can be any naturally occurring amino acid
XQASRGSGSTGCSLMAQEVDTAQGAEMRRGAGAARGRASWCWALALLWLAVVPGWSRVSGIPSRRHWPVPYKRFDFRPKPDPYCQAKYTFCPTGSPIPVMEGDDDIEVFRLQAPVWEFKYGDLLGHLKIMHDAIGFRSTLTGKNYTMEWYELFQLGNCTFPHLRPEMDAPFWCNQGAACFFEGIDDVHWKENGTLVQVATISGKL

SEQ ID NO: 3048 - protein, 210 aa, Homo sapiens
  VARIANT 1: note = misc_feature - Xaa can be any naturally occurring amino acid
XSLMAQEVDTAQGAEMRRGAGAARGRASWCWALALLWLAVVPGWSRVSGIPSRRHWPVPYKRFDFRPKPDPYCQAKYTFCPTGSPIPVMEGDDDIEVFRLQAPVWEFKYGDLLGHLKIMHDAIGFRSTLTGKNYTMEWYELFQLGNCTFPHLRPEMDAPFWCNQGAACFFEGIDDVHWKENGTLVQVATISEISCALKNGIKLAELGFLL

SEQ ID NO: 3049 - protein, 112 aa, Homo sapiens
MEKILILLLVALSVAYAAPGPRGIIINLENGELCMNSAQCKSNCCQHSSALGLARCTSMASENSECSVKTLYGIYYKCPCERGLTCEGDKTIVGSITNTNFGICHDAGRSKQ

SEQ ID NO: 3050 - protein, 71 aa, Homo sapiens
MEKILILLLVALSVAYAAPGPRGIIINLTLYGIYYKCPCERGLTCEGDKTIVGSITNTNFGICHDAGRSKQ

SEQ ID NO: 3051 - protein, 98 aa, Homo sapiens
MILLPQPPKKLGLQENGELCMNSAQCKSNCCQHSSALGLARCTSMASENSECSVKTLYGIYYKCPCERGLTCEGDKTIVGSITNTNFGICHDAGRSKQ

SEQ ID NO: 3052 - protein, 42 aa, Homo sapiens
GCCQRAPDNCESHCAEKGSEGSLCQTQLPATPCFLPSNTVRT

SEQ ID NO: 3053 - protein, 121 aa, Homo sapiens
MMLPQWLLLLFLLFFFLFLLTRGSLSPTKYNLLELKESCIRNQDCETGCCQRAPDNCESHCAEKGSEGSLCQTQVFFGQYRACPCLRNLTCIYSKNEKWLSIAYGRCQKIGRQKLAKKMFF

SEQ ID NO: 3054 - protein, 100 aa, Homo sapiens
MAAALALVAGVLSGAVLPLWSALPQYKKKITDRCFHHSECYSGCCLMDLDSGGAFCAPRARITMICLPQTKGATNIICPCRMGLTCISKDLMCSRRCHMI

SEQ ID NO: 3055 - protein, 153 aa, Homo sapiens
MAAALALVAGVLSGAVLPLWSALPQYKKKITDRCFHHSECYSGCCLMDLDSGGAFCAPRARITMICLPQWLELFKGRDRIIFIYEAPTPSLVSAHNQGSYQHHLPLPDGLDVHIQGLDVFPPVPYDLEEDAGWSLLPWGHRPWLPPTCSKSSS

SEQ ID NO: 3056 - protein, 633 aa, Homo sapiens
MPSCGACTCGAAAVRLITSSLASAQRGISGGRIHMSVLGRLGTFETQILQRAPLRSFTETPAYFASKDGISKDGSGDGNKKSASEGSSKKSGSGNSGKGGNQLRCPKCGDLCTHVETFVSSTRFVKCEKCHHFFVVLSEADSKKSIIKEPESAAEAVKLAFQQKPPPPPKKIYNYLDKYVVGQSFAKKVLSVAVYNHYKRIYNNIPANLRQQAEVEKQTSLTPRELEIRRREDEYRFTKLLQIAGISPHGNALGASMQQQVNQQIPQEKRGGEVLDSSHDDIKLEKSNILLLGPTGSGKTLLAQTLAKCLDVPFAICDCTTLTQAGYVGEDIESVIAKLLQDANYNVEKAQQGIVFLDEVDKIGSVPGIHQLRDVGGEGVQQGLLKLLEGTIVNVPEKNSRKLRGETVQVDTTNILFVASGAFNGLDRIISRRKNEKYLGFGTPSNLGKGRRAAAAADLANRSGESNTHQDIEEKDRLLRHVEARDLIEFGMIPEFVGRLPVVVPLHSLDEKTLVQILTEPRNAVIPQYQALFSMDKCELNVTEDALKAIARLALERKTGARGLRSIMEKLLLEPMFEVPNSDIVCVEVDKEVVEGKKEPGYIRAPTKESSEEEYDSGVEEEGWPRQADAANS

SEQ ID NO: 3057 - protein, 268 aa, Homo sapiens
MPSCGACTCGAAAVRLITSSLASAQRGISGGRIHMSVLGRLGTFETQILQRAPLRSFTETPAYFASKDGISKDGSGDGNKKSASEGSSKKSGSGNSGKGGNQLRCPKCGDLCTHVETFVSSTRFVKCEKCHHFFVVLSEADSKKSIIKEPESAAEAVKLAFQQKPPPPPKKIYNYLDKYVVGQSFAKKVLSVAVYNHYKRIYNNIPANLRQQAEVEKQTSLTPRELEIRRREDEYRFTKLLQIAGISPHGNALGASMQQQVKLCWHKP

SEQ ID NO: 3058 - protein, 130 aa, Homo sapiens
MSVLGRLGTFETQILQRAPLRSFTETPAYFASKDGISKDGSGDGNKKSASEGSSKKSGSGNSGKGGNQLRCPKCGDLCTHVETFVSSTRFVKCEKCHHFFVVLSEADSKKSIIKEPESAAEAVKLAFQQK

SEQ ID NO: 3059 - protein, 129 aa, Homo sapiens
MENDNTVLLNPPLFALDKDAPLRYAGEICGFRLHGSGVPFEAVILDKATGEGLIRAKEPVDCEAQKEHTFTIQAYDCGEGPDGANTKKSHKATVHVRVNDVNEFAPVFVERLYRAAVTEGKLYDRILRV

SEQ ID NO: 3060 - protein, 142 aa, Homo sapiens
MENDNTVLLNPPLFALDKDAPLRYAGEICGFRLHGSGVPFEAVILDKATGEGLIRAKEPVDCEAQKEHTFTIQAYDCGEGPDGANTKKSHKATVHVRVNDVNEFAPVFVERLYRAAVTEGKLYDRILRVEAIDGDCSPQYSQ

SEQ ID NO: 3061 - protein, 154 aa, Homo sapiens
MENDNTVLLNPPLFALDKDAPLRYAGEICGFRLHGSGVPFEAVILDKATGEGLIRAKEPVDCEAQKEHTFTIQAYDCGEGPDGANTKKSHKATVHVRVNDVNEFAPVFVERLYRAAVTEGKLYDRILRVEAIDGDCSPQYSQICYYEILTPNTP

SEQ ID NO: 3062 - protein, 134 aa, Homo sapiens
MTLLLLPLLLASLLASCSCNKANKHKPWIEAEYQGIVMENDNTVLLNPPLFALDKDAPLRYAGEICGFRLHGSGVPFEAVILDKATGEGLIRAKEPVDCEAQKEHTFTIQAYDCGEGPDGANTKKSHKATVHVR

SEQ ID NO: 3063 - protein, 956 aa, Homo sapiens
MTLLLLPLLLASLLASCSCNKANKHKPWIEAEYQGIVMENDNTVLLNPPLFALDKDAPLRYAGEICGFRLHGSGVPFEAVILDKATGEGLIRAKEPVDCEAQKEHTFTIQAYDCGEGPDGANTKKSHKATVHVRVNDVNEFAPVFVERLYRAAVTEGKLYDRILRVEAIDGDCSPQYSQICYYEILTPNTPFLIDNDGNIENTEKLQYSGERLYKFTVTAYDCGKKRAADDAEVEIQVKPTCKPSWQGWNKRIEYAPGAGSLALFPGIRLETCDEPLWNIQATIELQTSHVAKGCDRDNYSERALRKLCGAATGEVDLLPMPGPNANWTAGLSVHYSQDSSLIYWFNGTQAVQVPLGGPSGLGSGPQDSLSDHFTLSFWMKHGVTPNKGKKEEETIVCNTVQNEDGFSHYSLTVHGCRIAFLYWPLLESARPVKFLWKLEQVCDDEWHHYALNLEFPTVTLYTDGISFDPALIHDNGLIHPPRREPALMIGACWTEEKNKEKEKGDNSTDTTQGDPLSIHHYFHGYLAGFSVRSGRLESREVIECLYACREGLDYRDFESLGKGMKVHVNPSQSLLTLEGDDVETFNHALQHVAYMNTLRFATPGVRPLRLTTAVKCFSEESCVSIPEVEGYVVVLQPDAPQILLSGTAHFARPAVDFEGTNGVPLFPDLQITCSISHQVEAKKDESWQGTVTDTRMSDEIVHNLDGCEISLVGDDLDPERESLLLDTTSLQQRGLELTNTSAYLTIAGVESITVYEEILRQARYRLRHGAALYTRKFRLSCSEMNGRYSSNEFIVEVNVLHSMNRVAHPSHVLSSQQFLHRGHQPPPEMAGHSLASSHRNSMIPSAATLIIVVCVGFLVLMVVLGLVRIHSLHRRVSGAGGPPGASSDPKDPDLFWDDSALTIIVNPMESYQNRQSCVTGAVGGQQEDEDSSDSEVADSPSSDERRIIETPPHRY

SEQ ID NO: 3064 - protein, 968 aa, Homo sapiens
MVLGCELSGSTRVVVGVEALLTGASSPLPGVGPANKHKPWIEAEYQGIVMENDNTVLLNPPLFALDKDAPLRYAGEICGFRLHGSGVPFEAVILDKATGEGLIRAKEPVDCEAQKEHTFTIQAYDCGEGPDGANTKKSHKATVHVRVNDVNEFAPVFVERLYRAAVTEGKLYDRILRVEAIDGDCSPQYSQICYYEILTPNTPFLIDNDGNIENTEKLQYSGERLYKFTVTAYDCGKKRAADDAEVEIQVKPTCKPSWQGWNKRIEYAPGAGSLALFPGIRLETCDEPLWNIQATIELQTSHVAKGCDRDNYSERALRKLCGAATGEVDLLPMPGPNANWTAGLSVHYSQDSSLIYWFNGTQAVQVPLGGPSGLGSGPQDSLSDHFTLSFWMKHGVTPNKGKKEEETIVCNTVQNEDGFSHYSLTVHGCRIAFLYWPLLESARPVKFLWKLEQVCDDEWHHYALNLEFPTVTLYTDGISFDPALIHDNGLIHPPRREPALMIGACWTEEKNKEKEKGDNSTDTTQGDPLSIHHYFHGYLAGFSVRSGRLESREVIECLYACREGLDYRDFESLGKGMKVHVNPSQSLLTLEGDDVETFNHALQHVAYMNTLRFATPGVRPLRLTTAVKCFSEESCVSIPEVEGYVVVLQPDAPQILLSGTAHFARPAVDFEGTNGVPLFPDLQITCSISHQVEAKKDESWQGTVTDTRMSDEIVHNLDGCEISLVGDDLDPERESLLLDTTSLQQRGLELTNTSAYLTIAGVESITVYEEILRQARYRLRHGAALYTRKFRLSCSEMNGRYSSNEFIVEVNVLHSMNRVAHPSHVLSSQQFLHRGHQPPPEMAGHSLASSHRNSMIPSAATLIIVVCVGFLVLMVVLGLVRIHSLHRRVSGAGGPPGASSDPKDPDLFWDDSALTIIVNPMESYQNRQSCVTGAVGGQQEDEDSSDSEVADSPSSDERRIIETPPHRY

SEQ ID NO: 3065 - protein, 176 aa, Homo sapiens
MVVITNKHKPWIEAEYQGIVMENDNTVLLNPPLFALDKDAPLRYAGEICGFRLHGSGVPFEAVILDKATGEGLIRAKEPVDCEAQKEHTFTIQAYDCGEGPDGANTKKSHKATVHVRVNDVNEFAPVFVERLYRAAVTEGKLYDRILRVEAIDGDCSPQYSQICYYEILTPNTPFL

SEQ ID NO: 3066 - protein, 297 aa, Homo sapiens
MEACKDSRIGGMMKTLLLFVGLLLTWESGQVLGDQTVSDNELQEMSNQGSKYVNKEIQNAVNGVKQIKTLIEKTNEERKTLLSNLEEAKKKKEDALNETRESETKLKELPGVCNETMMALWEECKPCLKQTCMKFYARVCRSGSGLVGRQLEEFLNQSSPFYFWMNGDRIDSLLENDRQQTHMLDVMQDHFSRASSIIDELFQDRFFTREPQDTYHYLPFSLPHRRPHFFFPKSRIVRSLMPFSPYEPLNFHAMFQPFLEMIHEAQQAMDIHFHSPAFQHPPTEFIREGDDDRTVCR

SEQ ID NO: 3067 - protein, 32 aa, Homo sapiens
MMKTLLLFVGLLLTWESGQVLGDQTVSDNELQ

SEQ ID NO: 3068 - protein, 82 aa, Homo sapiens
MMKTLLLFVGLLLTWESGQVLGDQTVSDNELQEMSNQGSKYVNKEIQNAVNGVKQIKTLIEKTNEERKTLLSNLEEAKKKKE

SEQ ID NO: 3069 - protein, 82 aa, Homo sapiens; identical to SEQ ID NO: 3068

SEQ ID NO: 3070 - protein, 129 aa, Homo sapiens
MMKTLLLFVGLLLTWESGQVLGDQTVSDNELQEMSNQGSKYVNKEIQNAVNGVKQIKTLIEKTNEERKTLLSNLEEAKKKKEDALNETRESETKLKELPGVCNETMMALWEECKPCLKQTCMKFYARVC

SEQ ID NO: 3071 - protein, 136 aa, Homo sapiens
MMKTLLLFVGLLLTWESGQVLGDQTVSDNELQEMSNQGSKYVNKEIQNAVNGVKQIKTLIEKTNEERKTLLSNLEEAKKKKEDALNETRESETKLKELPGVCNETMMALWEECKPCLKQTCMKFYARVCRSGSGLV

SEQ ID NO: 3072 - protein, 139 aa, Homo sapiens
MMKTLLLFVGLLLTWESGQVLGDQTVSDNELQEMSNQGSKYVNKEIQNAVNGVKQIKTLIEKTNEERKTLLSNLEEAKKKKEDALNETRESETKLKELPGVCNETMMALWEECKPCLKQTCMKFYARVCRSGSGLVGRQ

SEQ ID NO: 3073 - protein, 204 aa, Homo sapiens
MMKTLLLFVGLLLTWESGQVLGDQTVSDNELQEMSNQGSKYVNKEIQNAVNGVKQIKTLIEKTNEERKTLLSNLEEAKKKKEDALNETRESETKLKELPGVCNETMMALWEECKPCLKQTCMKFYARVCRSGSGLVGRQLEEFLNQSSPFYFWMNGDRIDSLLENDRQQTHMLDVMQDHFSRASSIIDELFQDRFFTREPQDTY

SEQ ID NO: 3074 - protein, 449 aa, Homo sapiens
MMKTLLLFVGLLLTWESGQVLGDQTVSDNELQEMSNQGSKYVNKEIQNAVNGVKQIKTLIEKTNEERKTLLSNLEEAKKKKEDALNETRESETKLKELPGVCNETMMALWEECKPCLKQTCMKFYARVCRSGSGLVGRQLEEFLNQSSPFYFWMNGDRIDSLLENDRQQTHMLDVMQDHFSRASSIIDELFQDRFFTREPQDTYHYLPFSLPHRRPHFFFPKSRIVRSLMPFSPYEPLNFHAMFQPFLEMIHEAQQAMDIHFHSPAFQHPPTEFIREGDDDRTVCREIRHNSTGCLRMKDQCDKCREILSVDCSTNNPSQAKLRRELDESLQVAERLTRKYNELLKSYQWKMLNTSSLLEQLNEQFNWVSRLANLTQGEDQYYLRVTTVASHTSDSDVPSGVTEVVVKLFDSDPITVTVPVEVSRKNPKFMETVAEKALQEYRKKHREE

SEQ ID NO: 3075 - protein, 449 aa, Homo sapiens; identical to SEQ ID NO: 3074

SEQ ID NO: 3076 - protein, 449 aa, Homo sapiens; identical to SEQ ID NO: 3074

SEQ ID NO: 3077 - protein, 271 aa, Homo sapiens
MMKTLLLFVGLLLTWESGQVLGDQTVSDNELQEMSNQGSKYVNKEIQNAVNGVKQIKTLIEKTNEERKTLLSNLEEAKKKKEDALNETRESETKLKELPGVCNETMMALWEECKPCLKQTCMKFYARVCRSGSGLVGRQLEEFLNQSSPFYFWMNGDRIDSLLENDRQQTHMLDVMQDHFSRASSIIDELFQDSLMPFSPYEPLNFHAMFQPFLEMIHEAQQAMDIHFHSPAFQHPPTEFIREGDDDRTVCREIRHNSTGCLRMKDQCDKC

SEQ ID NO: 3078 - protein, 140 aa, Homo sapiens
  VARIANT 1: note = misc_feature - Xaa can be any naturally occurring amino acid
XADCSTNNPSQAKLRRELDESLQVAERLTRKYNELLKSYQWKMLNTSSLLEQLNEQFNWVSRLANLTQGEDQYYLRVTTVASHTSDSDVPSGVTEVVVKLFDSDPITVTVPVEVSRKNPKFMETVAEKALQEYRKKHREE

SEQ ID NO: 3079 - protein, 284 aa, Homo sapiens
  VARIANT 1: note = misc_feature - Xaa can be any naturally occurring amino acid
XQLEEFLNQSSPFYFWMNGDRIDSLLENDRQQTHMLDVMQDHFSRASSIIDELFQDRFFTREPQDTYHYLPFSLPHRRPHFFFPKSRIVRSLMPFSPYEPLNFHAMFQPFLEMIHEAQQAMDIHFHSPAFQHPPTEFIREGDDDRTVCREIRHNSTGCLRMKDQCDKCREILSVDCSTNNPSQAKLRRELDESLQVAERLTRKYNELLKSYQWKMLNTSSLLEQLNEQFNWVSRLANLTQGEDQYYLRVTTVASHTSDSDVPSGVTEVVVKLFDSDPITVTVPV

SEQ ID NO: 3080 - protein, 466 aa, Homo sapiens
MKPPLLVFIVCLLWLKDSHCAPTWKDKTAISENLKSFSEVGEIDADEEVKKALTGIKQMKIMMERKEKEHTNLMSTLKKCREEKQEALKLLNEVQEHLEEEERLCRESLADSWGECRSCLENNCMRIYTTCQPSWSSVKNKIERFFRKIYQFLFPFHEDNEKDLPISEKLIEEDAQLTQMEDVFSQLTVDVNSLFNRSFNVFRQMQQEFDQTFQSHFISDTDLTEPYFFPAFSKEPMTKADLEQCWDIPNFFQLFCNFSVSIYESVSETITKMLKAIEDLPKQDKAPDHGGLISKMLPGQDRGLCGELDQNLSRCFKFHEKCQKCQAHLSEDCPDVPALHTELDEAIRLVNVSNQQYGQILQMTRKHLEDTAYLVEKMRGQFGWVSELANQAPETEIIFNSIQVVPRIHEGNISKQDETMMTDLSILPSSNFTLKIPLEESAESSNFIGYVVAKALQHFKEHFKTW

SEQ ID NO: 3081 - protein, 466 aa, Homo sapiens; identical to SEQ ID NO: 3080

SEQ ID NO: 3082 - protein, 466 aa, Homo sapiens; identical to SEQ ID NO: 3080

SEQ ID NO: 3083 - protein, 491 aa, Homo sapiens
MNSMEAAVGTEVPLLDNLQHCNSGNMKPPLLVFIVCLLWLKDSHCAPTWKDKTAISENLKSFSEVGEIDADEEVKKALTGIKQMKIMMERKEKEHTNLMSTLKKCREEKQEALKLLNEVQEHLEEEERLCRESLADSWGECRSCLENNCMRIYTTCQPSWSSVKNKIERFFRKIYQFLFPFHEDNEKDLPISEKLIEEDAQLTQMEDVFSQLTVDVNSLFNRSFNVFRQMQQEFDQTFQSHFISDTDLTEPYFFPAFSKEPMTKADLEQCWDIPNFFQLFCNFSVSIYESVSETITKMLKAIEDLPKQDKAPDHGGLISKMLPGQDRGLCGELDQNLSRCFKFHEKCQKCQAHLSEDCPDVPALHTELDEAIRLVNVSNQQYGQILQMTRKHLEDTAYLVEKMRGQFGWVSELANQAPETEIIFNSIQVVPRIHEGNISKQDETMMTDLSILPSSNFTLKIPLEESAESSNFIGYVVAKALQHFKEHFKTW

SEQ ID NO: 3084 - protein, 518 aa, Homo sapiens
MRTWDYRWSLALVAQTGVHCCNLSSLQPLPPRFKRFSCLSLSSGWDYSNSGNMKPPLLVFIVCLLWLKDSHCAPTWKDKTAISENLKSFSEVGEIDADEEVKKALTGIKQMKIMMERKEKEHTNLMSTLKKCREEKQEALKLLNEVQEHLEEEERLCRESLADSWGECRSCLENNCMRIYTTCQPSWSSVKNKIERFFRKIYQFLFPFHEDNEKDLPISEKLIEEDAQLTQMEDVFSQLTVDVNSLFNRSFNVFRQMQQEFDQTFQSHFISDTDLTEPYFFPAFSKEPMTKADLEQCWDIPNFFQLFCNFSVSIYESVSETITKMLKAIEDLPKQDKAPDHGGLISKMLPGQDRGLCGELDQNLSRCFKFHEKCQKCQAHLSEDCPDVPALHTELDEAIRLVNVSNQQYGQILQMTRKHLEDTAYLVEKMRGQFGWVSELANQAPETEIIFNSIQVVPRIHEGNISKQDETMMTDLSILPSSNFTLKIPLEESAESSNFIGYVVAKALQHFKEHFKTW

SEQ ID NO: 3085 - protein, 518 aa, Homo sapiens; identical to SEQ ID NO: 3084

SEQ ID NO: 3086 - protein, 82 aa, Homo sapiens
MRTWDYSNSGNMKPPLLVFIVCLLWLKDSHCAPTWKDKTAISENLKSFSEVGEIDADEEVKKALTGIKQMKIMMERKEKEHT

SEQ ID NO: 3087 - protein, 34 aa, Homo sapiens
  VARIANT 1: note = misc_feature - Xaa can be any naturally occurring amino acid
XQFGWVSELANQAPETEIIFNSIQVRRSNASYIQ

SEQ ID NO: 3088 - protein, 136 aa, Homo sapiens
MLLKLKEKASLTLAVGTLPFPSQFNFVPPGRMCRVAGWGRTGVLKPGSDTLQEVKLRLMDPQACSHFRDFDHNLQLCVGNPRKTKSAFKGDSGGPLLCAGVAQGIVSYGRSDAKPPAVFTRISHYRPWINQILQAN

SEQ ID NO: 3089 - protein, 247 aa, Homo sapiens
MLLLPLPLLLFLLCSRAEAGEIIGGTECKPHSRPYMAYLEIVTSNGPSKFCGGFLIRRNFVLTAAHCAGRSITVTLGAHNITEEEDTWQKLEVIKQFRHPKYNTSTLHHDIMLLKLKEKASLTLAVGTLPFPSQFNFVPPGRMCRVAGWGRTGVLKPGSDTLQEVKLRLMDPQACSHFRDFDHNLQLCVGNPRKTKSAFKGDSGGPLLCAGVAQGIVSYGRSDAKPPAVFTRISHYRPWINQILQAN

SEQ ID NO: 3090 - protein, 179 aa, Homo sapiens
MLSRCRSGLLHVLGLSFLLQTRRPILLCSPRLMKPLVVFVLGGPGAGKGTQCARIVEEMDQTMAANAQKNKFLIDGFPRNQDNLQGWNKTMDGKADVSFVLFFDCNNEICIERCLERGKSSGRSDDNRESLEKRIQTYLQSTKPIIDLYEEMGKVKKIDASKSVDEVFDEVVQIFDKEG

SEQ ID NO: 3091 - protein, 58 aa, Homo sapiens
MLSRCRSGLLHVLGLSFLLQTRRPILLCSPRLMKPLVVFVLGGPGAGKGTQCARIVEG

SEQ ID NO: 3092 - protein, 228 aa, Homo sapiens
MLSRCRSGLLHVLGLSFLLQTRRPILLCSPRLMKPLVVFVLGGPGAGKGTQCARIVEKYGYTHLSAGELLRDERKNPDSQYGELIEKYIKEGKIVPVEITISLLKREMDQTMAANAQKNKFLIDGFPRNQDNLQGWNKTMDGKADVSFVLFFDCNNEICIERCLERGKSSGRSDDNRESLEKRIQTYLQSTKPIIDLYEEMGKVKKIDASKSVDEVFDEVVQIFDKEG

SEQ ID NO: 3093 - protein, 169 aa, Homo sapiens
MLSRCRSGLLHVLGLSFLLQTRRPILLCSPRLMKPLVVFVLGGPGAGKGTQCARIVEKYGYTHLSAGELLRDERKNPDSQYGELIEKYIKEGKIVPVEITISLLKREMDQTMAANAQKNKFLIDGFPRNQDNLQGWNKTMDGKADVSFVLFFDCNNENSDLPSVNKANY

SEQ ID NO: 3094 - protein, 436 aa, Homo sapiens
MPMSSLPAAILSHMTAINNVPPPPLHSIPNLKKSKHINYGQLNALCHIRGQHSRSMSNILSAHDTFMKQYPKVFLHQKPRLPKLFKQEEQRELNEGKEESQHQQPDDSNNIAVHVQRAHGGHILYRPKRATEKFEEFLAILKKLPIHRTPYEHKTVWKFLKTIPDLTFQLNDKHLKTLSKTVFSETWLKGSTVVANDGFYVILKGLARPQTNVYKNLIEGSDSPDSFISQSFHSFIWSEEFKNSTLAEMYLPSYDSMLSKWSTFGTLEVMPQNESETQMFSVVTEDDCEILKIPAKGYAKIKEEKIKLENMQKLKLIRMCPYYEEWPTLSIYELIALLKWKKFPPGHVIVESGNIISFVGYINSGCCNIYRSIIGFVKLRSNKVKRSQKLVYMGKLKEKESFGEISVLLQVPFTCTIITKKEVEMAIIEDKDLFVA

SEQ ID NO: 3095 - protein, 292 aa, Homo sapiens [sequence omitted]

SEQ ID NO: 3096 - protein, 161 aa, Homo sapiens
  VARIANT 1: note = misc_feature - Xaa can be any naturally occurring amino acid
XGCCNIYRSIIGFVKLRSNKVKRSQKLVYMGKLKEKESFGEISVLLQVPFTCTIITKKEVEMAIIEDKDLFELDPVTKQLMLQTAKPTFGHLTDEDVKNEYLKKEQQKEWKDFKIASWTKEITDFICLYEKHQDNFTLPKIAHLERITKRIKNNSILIHLE

SEQ ID NO: 3097 - protein, 207 aa, Homo sapiens
  VARIANT 1: note = misc_feature - Xaa can be any naturally occurring amino acid
XNMQKLKLIRMCPYYEEWPTLSIYELIALLKWKKFPPGHVIVESGNIISFVGYINSGCCNIYRSIIGFVKLRSNKVKRSQKLVYMGKLKEKESFGEISVLLQVPFTCTIITKKEVEMAIIEDKDLFELDPVTKQLMLQTAKPTFGHLTDEDVKNEYLKKEQQKEWKDFKDKTVKNSLYYKGIIPGFGKWDHYCTSIPRNLKDTLVNY

SEQ ID NO: 3098 - protein, 507 aa, Homo sapiens
MDPKLGRMAASLLAVLLLLLERGMFSSPSPPPALLEKVFQYIDLHQDEFVQTLKEWVAIESDSVQPVPRFRQELFRMMAVAADTLQRLGARVASVDMGPQQLPDGQSLPIPPVILAELGSDPTKGTVCFYGHLDVQPADRGDGWLTDPYVLTEVDGKLYGRGATDNKGPVLAWINAVSAFRALEQDLPVNIKFIIEGMEEAGSVALEELVEKEKDRFFSGVDYIVISDNLWISQRKPAITYGTRGNSYFMVEVKCRDQDFHSGTFGGILHEPMADLVALLGSLVDSSGHILVPGIYDEVVPLTEEEINTYKAIHLDLEEYRNSSRVEKFLFDTKEEILMHLWRYPSLSIHGIEGAFDEPGTKTVIPGRVIGKFSIRLVPHMNVSAVEKQVTRHLEDVFSKRNSSNKMVVSMTLGLHPWIANIDDTQYLAAKRAIRTVFGTEPDMIRDGSTIPIAKMFQEIVHKSVVLIPLGAVDDGEHSQNEKINRWNYIEGTKLFAAFFLEMAQLH

SEQ ID NO: 3099 - protein, 464 aa, Homo sapiens
MDPKLGRMTLKEWVAIESDSVQPVPRFRQELFRMMAVAADTLQRLGARVASVDMGPQQLPDGQSLPIPPVILAELGSDPTKGTVCFYGHLDVQPADRGDGWLTDPYVLTEVDGKLYGRGATDNKGPVLAWINAVSAFRALEQDLPVNIKFIIEGMEEAGSVALEELVEKEKDRFFSGVDYIVISDNLWISQRKPAITYGTRGNSYFMVEVKCRDQDFHSGTFGGILHEPMADLVALLGSLVDSSGHILVPGIYDEVVPLTEEEINTYKAIHLDLEEYRNSSRVEKFLFDTKEEILMHLWRYPSLSIHGIEGAFDEPGTKTVIPGRVIGKFSIRLVPHMNVSAVEKQVTRHLEDVFSKRNSSNKMVVSMTLGLHPWIANIDDTQYLAAKRAIRTVFGTEPDMIRDGSTIPIAKMFQEIVHKSVVLIPLGAVDDGEHSQNEKINRWNYIEGTKLFAAFFLEMAQLH

SEQ ID NO: 3100 - protein, 38 aa, Homo sapiens
  VARIANT 1: note = misc_feature - Xaa can be any naturally occurring amino acid
XADRGDGWLTDPYVLTEGNFMDEERPTTKALSWLGSML

SEQ ID NO: 3101 - protein, 61 aa, Homo sapiens
ILQKILLDDTGLAYICQTYERFSHVAMILGKMVLQLSKEPSARLLKHVVRCYLRLSDNPRC

SEQ ID NO: 3102 - protein, 41 aa, Homo sapiens
MHSLATAADLALLPRLECSGVILAHRNLDLLGSVDSPTSAS

SEQ ID NO: 3103 - protein, 299 aa, Homo sapiens
MHSLATAAPVPTTLAQVDREKIYQWINELSSPETRENALLELSKKRESVPDLAPMLWHSFGTIAALLQEIVNIYPSINPPTLTAHQSNRVCNALALLQCVASHPETRSAFLAAHIPLFLYPFLHTVSKTRPFEYLRLTSLGVIGALVKTDEQEVINFLLTTEIIPLCLRIMESGSELSKTVATFILQKILLDDTGLAYICQTYERFSHVAMILGKMVLQLSKEPSARLLKHVVRCYLRLSDNPRAREALRQCLPDQLKDTTFAQVLKDDTTTKRWLAQLVKNLQEGQVTDPRGIPLPPQ

SEQ ID NO: 3104 - protein, 299 aa, Homo sapiens; identical to SEQ ID NO: 3103

SEQ ID NO: 3105 - protein, 258 aa, Homo sapiens
MHSLATAAPVPTTLAQVDREKIYQWINELSSPETRENALLELSKKRESVPDLAPMLWHSFGTIAALLQEIVNIYPSINPPTLTAHQSNRVCNALALLQCVASHPETRSAFLAAHIPLFLYPFLHTVSKTRPFEYLRLTSLGVIGALVKTDEQEVINFLLTTEIIPLCLRIMESGSELSKTVATFILQKILLDDTGLAYICQTYERFSHVAMILGKMVLQLSKEPSARLLKHVVRCYLRLSDNPRFSDLTFCWSSFQRK

SEQ ID NO: 3106 - protein, 331 aa, Homo sapiens
MHSLATAAPVPTTLAQVDREKIYQWINELSSPETRENALLELSKKRESVPDLAPMLWHSFGTIAALLQEIVNIYPSINPPTLTAHQSNRVCNALALLQCVASHPETRSAFLAAHIPLFLYPFLHTVSKTRPFEYLRLTSLGVIVETGFHHVGQADLELPTSSDLPASASQSAGITGALVKTDEQEVINFLLTTEIIPLCLRIMESGSELSKTVATFILQKILLDDTGLAYICQTYERFSHVAMILGKMVLQLSKEPSARLLKHVVRCYLRLSDNPRAREALRQCLPDQLKDTTFAQVLKDDTTTKRWLAQLVKNLQEGQVTDPRGIPLPPQ

SEQ ID NO: 3107 - protein, 75 aa, Homo sapiens
MHSLATAAPVPTTLAQVDREKIYQWINELSSPETRENALLELSKKRESVPDLAPMLWHSFGTIAALLQVIVMQVI

SEQ ID NO: 3108 - protein, 80 aa, Homo sapiens
KNYVRVVGRNGESSELDLQGIRIDSDISGTLKFACESIVEEYEDELIEFFSREADNVKDKLCSKRTDLCDHALHISHDEL

SEQ ID NO: 3109 - protein, 102 aa, Homo sapiens
MGSFRINPDGSQSVVEVPYARSEAHLTELLEEICDRMKEYGEQIDPSTHRKNYVRVVGRNGESSELDLQGIRIDSDISGTLKFACESIVEEYEDELIEFFSR

SEQ ID NO: 3110 - protein, 168 aa, Homo sapiens
MKGWGWLALLLGALLGTAWARRSQDLHCGACRALVDELEWEIAQVDPKKTIQMGSFRINPDGSQSVVEVPYARSEAHLTELLEEICDRMKEYGEQIDPSTHRKNYVRVVGRNGESSELDLQGIRIDSDISGTLKFACESIVEEYEDELIEFFSREADNVKDKLCSKRT

SEQ ID NO: 3111 - protein, 182 aa, Homo sapiens
MKGWGWLALLLGALLGTAWARRSQDLHCGACRALVDELEWEIAQVDPKKTIQMGSFRINPDGSQSVVEVPYARSEAHLTELLEEICDRMKEYGEQIDPSTHRKNYVRVVGRNGESSELDLQGIRIDSDISGTLKFACESIVEEYEDELIEFFSREADNVKDKLCSKRTDLCDHALHISHDEL

SEQ ID NO: 3112 - protein, 41 aa, Homo sapiens
  VARIANT 1: note = misc_feature - Xaa can be any naturally occurring amino acid
XACRALVDELEWEIAQVDPKKTIQMGSFRINPDGSQSVVER

SEQ ID NO: 3113 - protein, 278 aa, Homo sapiens [sequence omitted]

SEQ ID NO: 3114 - protein, 143 aa, Homo sapiens
MDSMPEPASRCLLLLPLLLLLLLLLPAPELGPSQAGAEENDWVRLPSKCEVCKYVAVELKSAFEETGKTKEVIGTGYGILDQKASGVKYTKSDLRLIEVTETICKRLLIIACTRRGPAAIDLPRACQRPLRHYTTWYTKGSRW

SEQ ID NO: 3115 - protein, 36 aa, Homo sapiens
MATLKGLVQKGVKVDLGIPLELWDEPSVEVTYLKKQ

SEQ ID NO: 3116 - protein, 248 aa, Homo sapiens
MGPVRLGILLFLFLAVHEAWAGMLKEEDDDTERLPSKCEVCKLLSTELQAELSRTGRSREVLELGQVLDTGKRKRHVPYSVSETRLEEALENLCERILDYSVHAERKGSLRYAKGQSQTMATLKGLVQKGVKVDLGIPLELWDEPSVEVTYLKKQCETMLEEFEDIVGDWYFHHQEQPLQNFLCEGHVLPAAETACLQETWTGKEITDGEEKTEGEEEQEEEEEEEEEEGGDKMTKTGSHPKLDREDL

SEQ ID NO: 3117 - protein, 118 aa, Homo sapiens
  VARIANT 1: note = misc_feature - Xaa can be any naturally occurring amino acid
XCKLLSTELQAELSRTGRSREVLELGQVLDTGKRKRHVPYSVSETRLEEALENLCERILDYSVHAERKGSLRYAKGQSQTMATLKGLVQKGVKVDLGIPLELWDEPSVEVTYLKKQSG

SEQ ID NO: 3118 - protein, 372 aa, Homo sapiens
MAAPVPWACCAVLAAAAAVVYAQRHSPQEAPHVQYERLGSDVTLPCGTANWDAAVTWRVNGTDLAPDLLNGSQLVLHGLELGHSGLYACFHRDSWHLRHQVLLHVGLPPREPVLSCRSNTYPKGFYCSWHLPTPTYIPNTFNVTVLHGSKIMVCEKDPALKNRCHIRYMHLFSTIKYKVSISVSNALGHNATAITFDEFTIVKPDPPENVVARPVPSNPRRLEVTWQTPSTWPDPESFPLKFFLRYRPLILDQWQHVELSDGTAHTITDAYAGKEYIIQVAAKDNEIGTWSDWSVAAHATPWTEEPRHLTTEAQAAETTTSTTSSLAPPPTTKICDPGELGSGGGPSAPFLVSVPITLALAAAAATASSLLI

SEQ ID NO: 3119 - protein, 372 aa, Homo sapiens; identical to SEQ ID NO: 3118

SEQ ID NO: 3120 - protein, 256 aa, Homo sapiens
MAAPVPWACCAVLAAAAAVVYAQRHSPQEAPHVQYERLGSDVTLPCGTANWDAAVTWRVNGTDLAPDLLNGSQLVLHGLELGHSGLYACFHRDSWHLRHQVLLHVGLPPREPVLSCRSNTYPKGFYCSWHLPTPTYIPNTFNVTVLHGSKIMVCEKDPALKNRCHIRYMHLFSTIKYKVSISVSNALGHNATAITFDEFTIVKPDPPENVVARPVPSNPRRLEVTWQTPSTWPDPESFPLKFFLRYRPLILDQWQH

SEQ ID NO: 3121 - protein, 372 aa, Homo sapiens; identical to SEQ ID NO: 3118

SEQ ID NO: 3122 - protein, 57 aa, Homo sapiens
KHSIEVPIPRDGEYVVEVRAHSDGGDGVVSQVKISEGKSTSLRSKTAKDHRSIRTMS

SEQ ID NO: 3123 - protein, 63 aa, Homo sapiens
MKMWLLVSHLVIISITTCLAEFTWYRRYGHGVSEEDKGFGPIFEEQPINTIYPEESLEGKVSL

SEQ ID NO: 3124 - protein, 73 aa, Homo sapiens
MKMWLLVSHLVIISITTCLAEFTWYRRYGHGVSEEDKGFGPIFEEQPINTIYPEESLEGKVSLNCRARASPFP

SEQ ID NO: 3125 - protein, 85 aa, Homo sapiens
MKMWLLVSHLVIISITTCLAEFTWYRRYGHGVSEEDKGFGPIFEEQPINTIYPEESLEGKVSLNCRARASPFPVYKWRMNNGDVD

SEQ ID NO: 3126 - protein, 90 aa, Homo sapiens
MKMWLLVSHLVIISITTCLAEFTWYRRYGHGVSEEDKGFGPIFEEQPINTIYPEESLEGKVSLNCRARASPFPVYKWRMNNGDVDLTSDR

SEQ ID NO: 3127 - protein, 1018 aa, Homo sapiens
MKMWLLVSHLVIISITTCLAEFTWYRRYGHGVSEEDKGFGPIFEEQPINTIYPEESLEGKVSLNCRARASPFPVYKWRMNNGDVDLTSDRYSMVGGNLVINNPDKQKDAGIYYCLASNNYGMVRSTEATLSFGYLDPFPPEERPEVRVKEGKGMVLLCDPPYHFPDDLSYRWLLNEFPVFITMDKRRFVSQTNGNLYIANVEASDKGNYSCFVSSPSITKSVFSKFIPLIPIPERTTKPYPADIVVQFKDVYALMGQNVTLECFALGNPVPDIRWRKVLEPMPSTAEISTSGAVLKIFNIQLEDEGIYECEAENIRGKDKHQARIYVQAFPEWVEHINDTEVDIGSDLYWPCVATGKPIPTIRWLKNGYAYHKGELRLYDVTFENAGMYQCIAENTYGAIYANAELKILALAPTFEMNPMKKKILAAKGGRVIIECKPKAAPKPKFSWSKGTEWLVNSSRILIWEDGSLEINNITRNDGGIYTCFAENNRGKANSTGTLVITDPTRIILAPINADITVGENATMQCAASFDPALDLTFVWSFNGYVIDFNKENIHYQRNFMLDSNGELLIRNAQLKHAGRYTCTAQTIVDNSSASADLVVRGPPGPPGGLRIEDIRATSVALTWSRGSDNHSPISKYTIQTKTILSDDWKDAKTDPPIIEGNMEAARAVDLIPWMEYEFRVVATNTLGRGEPSIPSNRIKTDGAAPNVAPSDVGGGGGRNRELTITWAPLSREYHYGNNFGYIVAFKPFDGEEWKKVTVTNPDTGRYVHKDETMSPSTAFQVKVKAFNNKGDGPYSLVAVINSAQDAPSEAPTEVGVKVLSSSEISVHWEHVLEKIVESYQIRYWAAHDKEEAANRVQVTSQEYSARLENLLPDTQYFIEVGACNSAGCGPPSDMIEAFTKKAPPSQPPRIISSVRSGSRYIITWDHVVALSNESTVTGYKVLYRPDGQHDGKLYSTHKHSIEVPIPRDGEYVVEVRAHSDGGDGVVSQVKISGAPTLSPSLLGLLLPAFGILVYLEF

SEQ ID NO: 3128 - protein, 1018 aa, Homo sapiens; identical to SEQ ID NO: 3127

SEQ ID NO: 3129 - protein, 627 aa, Homo sapiens
MKMWLLVSHLVIISITTCLAEFTWYRRYGHGVSEEDKGFGPIFEEQPINTIYPEESLEGKVSLNCRARASPFPVYKWRMNNGDVDLTSDRYSMVGGNLVINNPDKQKDAGIYYCLASNNYGMVRSTEATLSFGYLDPFPPEERPEVRVKEGKGMVLLCDPPYHFPDDLSYRWLLNEFPVFITMDKRRFVSQTNGNLYIANVEASDKGNYSCFVSSPSITKSVFSKFIPLIPIPERTTKPYPADIVVQFKDVYALMGQNVTLECFALGNPVPDIRWRKVLEPMPSTAEISTSGAVLKIFNIQLEDEGIYECEAENIRGKDKHQARIYVQAFPEWVEHINDTEVDIGSDLYWPCVATGKPIPTIRWLKNGYAYHKGELRLYDVTFENAGMYQCIAENTYGAIYANAELKILALAPTFEMNPMKKKILAAKGGRVIIECKPKAAPKPKFSWSKGTEWLVNSSRILIWEDGSLEINNITRNDGGIYTCFAENNRGKANSTGTLVITDPTRIILAPINADITVGENATMQCAASFDPALDLTFVWSFNGYVIDFNKENIHYQRNFMLDSNGELLIRNAQLKHAGRYTCTAQTIVDNSSASADLVVRGKNRKGGEKNMVDSFLPVCASLPPTW

SEQ ID NO: 3130 - protein, 627 aa, Homo sapiens; identical to SEQ ID NO: 3129

SEQ ID NO: 3131 - protein, 1007 aa, Homo sapiens
MKMWLLVSHLVIISITTCLAVSEEDKGFGPIFEEQPINTIYPEESLEGKVSLNCRARASPFPVYKWRMNNGDVDLTSDRYSMVGGNLVINNPDKQKDAGIYYCLASNNYGMVRSTEATLSFGYLDPFPPEERPEVRVKEGKGMVLLCDPPYHFPDDLSYRWLLNEFPVFITMDKRRFVSQTNGNLYIANVEASDKGNYSCFVSSPSITKSVFSKFIPLIPIPERTTKPYPADIVVQFKDVYALMGQNVTLECFALGNPVPDIRWRKVLEPMPSTAEISTSGAVLKIFNIQLEDEGIYECEAENIRGKDKHQARIYVQAFPEWVEHINDTEVDIGSDLYWPCVATGKPIPTIRWLKNGYAYHKGELRLYDVTFENAGMYQCIAENTYGAIYANAELKILALAPTFEMNPMKKKILAAKGGRVIIECKPKAAPKPKFSWSKGTEWLVNSSRILIWEDGSLEINNITRNDGGIYTCFAENNRGKANSTGTLVITDPTRIILAPINADITVGENATMQCAASFDPALDLTFVWSFNGYVIDFNKENIHYQRNFMLDSNGELLIRNAQLKHAGRYTCTAQTIVDNSSASADLVVRGPPGPPGGLRIEDIRATSVALTWSRGSDNHSPISKYTIQTKTILSDDWKDAKTDPPIIEGNMEAARAVDLIPWMEYEFRVVATNTLGRGEPSIPSNRIKTDGAAPNVAPSDVGGGGGRNRELTITWAPLSREYHYGNNFGYIVAFKPFDGEEWKKVTVTNPDTGRYVHKDETMSPSTAFQVKVKAFNNKGDGPYSLVAVINSAQDAPSEAPTEVGVKVLSSSEISVHWEHVLEKIVESYQIRYWAAHDKEEAANRVQVTSQEYSARLENLLPDTQYFIEVGACNSAGCGPPSDMIEAFTKKAPPSQPPRIISSVRSGSRYIITWDHVVALSNESTVTGYKVLYRPDGQHDGKLYSTHKHSIEVPIPRDGEYVVEVRAHSDGGDGVVSQVKISGAPTLSPSLLGLLLPAFGILVYLEF

SEQ ID NO: 3132 - protein, 1040 aa, Homo sapiens
MGTATRRKPHLLLVAAVALVSSSAWSSALGSQTTFGPVFEDQPLSVLFPEESTEEQVLLACRARASPPATYRWKMNGTEMKLEPGSRHQLVGGNLVIMNPTKAQDAGVYQCLASNPVGTVVSREAILRFGFLQEFSKEERDPVKAHEGWGVMLPCNPPAHYPGLSYRWLLNEFPNFIPTDGRHFVSQTTGNLYIARTNASDLGNYSCLATSHMDFSTKSVFSKFAQLNLAAEDTRLFAPSIKARFPAETYALVGQQVTLECFAFGNPVPRIKWRKVDGSLSPQWTTAEPTLQIPSVSFEDEGTYECEAENSKGRDTVQGRIIVQAQPEWLKVISDTEADIGSNLRWGCAAAGKPRPTVRWLRNGEPLASQNRVEVLAGDLRFSKLSLEDSGMYQCVAENKHGTIYASAELAVQALAPDFRLNPVRRLIPAARGGEILIPCQPRAAPKAVVLWSKGTEILVNSSRVTVTPDGTLIIRNISRSDEGKYTCFAENFMGKANSTGILSVRDATKITLAPSSADINLGDNLTLQCHASHDPTMDLTFTWTLDDFPIDFDKPGGHYRRTNVKETIGDLTILNAQLRHGGKYTCMAQTVVDSASKEATVLVRGPPGPPGGVVVRDIGDTTIQLSWSRGFDNHSPIAKYTLQARTPPAGKWKQVRTNPANIEGNAETAQVLGLTPWMDYEFRVIASNILGTGEPSGPSSKIRTREAAPSVAPSGLSGGGGAPGELIVNWTPMSREYQNGDGFGYLLSFRRQGSTHWQTARVPGADAQYFVYSNESVRPYTPFEVKIRSYNRRGDGPESLTALVYSAEEEPRVAPTKVWAKGVSSSEMNVTWEPVQQDMNGILLGYEIRYWKAGDKEAAADRVRTAGLDTSARVSGLHPNTKYHVTVRAYNRAGTGPASPSANATTMKPPPRRPPGNISWTFSSSSLSIKWDPVVPFRNESAVTGYKMLYQNDLHLTPTLHLTGKNWIEIPVPEDIGHALVQIRTTGPGGDGIPAEVHIVRNGGTSMMVENMAVRPAPHPGTVISHSVAMLILIGSLEL

SEQ ID NO: 3133 - protein, 1040 aa, Homo sapiens; identical to SEQ ID NO: 3132

SEQ ID NO: 3134 - protein, 1085 aa, Homo sapiens
MGTATRRKPHLLLVAAVALVSSSAWSSALGSQTTFGPVFEDQPLSVLFPEESTEEQVLLACRARASPPATYRWKMNGTEMKLEPGSRHQLVGGNLVIMNPTKAQDAGVYQCLASNPVGTVVSREAILRFGFLQEFSKEERDPVKAHEGWGVMLPCNPPAHYPGLSYRWLLNEFPNFIPTDGRHFVSQTTGNLYIARTNASDLGNYSCLATSHMDFSTKSVFSKFAQLNLAAEDTRLFAPSIKARFPAETYALVGQQVTLECFAFGNPVPRIKWRKVDGSLSPQWTTAEPTLQIPSVSFEDEGTYECEAENSKGRDTVQGRIIVQAQPEWLKVISDTEADIGSNLRWGCAAAGKPRPTVRWLRNGEPLASQNRVEVLAGDLRFSKLSLEDSGMYQCVAENKHGTIYASAELAVQALAPDFRLNPVRRLIPAARGGEILIPCQPRAAPKAVVLWSKGTEILVNSSRVTVTPDGTLIIRNISRSDEGKYTCFAENFMGKANSTGILSVRDATKITLAPSSADINLGDNLTLQCHASHDPTMDLTFTWTLDDFPIDFDKPGGHYRRTNVKETIGDLTILNAQLRHGGKYTCMAQTVVDSASKEATVLVRGPPGPPGGVVVRDIGDTTIQLSWSRGFDNHSPIAKYTLQARTPPAGKWKQVRTNPANIEGNAETAQVLGLTPWMDYEFRVIASNILGTGEPSGPSSKIRTREAAPSVAPSGLSGGGGAPGELIVNWTPMSREYQNGDGFGYLLSFRRQGSTHWQTARVPGADAQYFVYSNESVRPYTPFEVKIRSYNRRGDGPESLTALVYSAEEEPRVAPTKVWAKGVSSSEMNVTWEPVQQDMNGILLGYEIRYWKAGDKEAAADRVRTAGLDTSARVSGLHPNTKYHVTVRAYNRAGTGPASPSANATTMKPPPRRPPGNISWTFSSSSLSIKWDPVVPFRNESAVTGYKMLYQNDLHLTPTLHLTGKNWIEIPVPEDIGHALVQIRTTGPGGDGIPAEVHIVRNGEMALWDPIRTPPLESSPRPGRNTRHEQVEELERSAHLTILQSKEEGQALGPRALPPSPSSSSKDPDAVPDNSLGAPACPSG

SEQ ID NO: 3135 - protein, 1040 aa, Homo sapiens; identical to SEQ ID NO: 3132

SEQ ID NO: 3136 - protein, 1040 aa, Homo sapiens; identical to SEQ ID NO: 3132

SEQ ID NO: 3137 - protein, 764 aa, Homo sapiens
MGTATRRKPHLLLVAAVALVSSSAWSSALGSQTTFGPVFEDQPLSVLFPEESTEEQVLLACRARASPPATYRWKMNGTEMKLEPGSRHQLVGGNLVIMNPTKAQDAGVYQCLASNPVGTVVSREAILRFGFLQEFSKEERDPVKAHEGWGVMLPCNPPAHYPGLSYRWLLNEFPNFIPTDGRHFVSQTTGNLYIARTNASDLGNYSCLATSHMDFSTKSVFSKFAQLNLAAEDTRLFAPSIKARFPAETYALVGQQVTLECFAFGNPVPRIKWRKVDGSLSPQWTTAEPTLQIPSVSFEDEGTYECEAENSKGRDTVQGRIIVQAQPEWLKVISDTEADIGSNLRWGCAAAGKPRPTVRWLRNGEPLASQNRVEVLAGDLRFSKLSLEDSGMYQCVAENKHGTIYASAELAVQALAPDFRLNPVRRLIPAARGGEILIPCQPRAAPKAVVLWSKGTEILVNSSRVTVTPDGTLIIRNISRSDEGKYTCFAENFMGKANSTGILSVRDATKITLAPSSADINLGDNLTLQCHASHDPTMDLTFTWTLDDFPIDFDKPGGHYRRTNVKETIGDLTILNAQLRHGGKYTCMAQTVVDSASKEATVLVRGPPGPPGGVVVRDIGDTTIQLSWSRGFDNHSPIAKYTLQARTPPAGKWKQVRTNPANIEGNAETAQVLGLTPWMDYEFRVIASNILGTGEPSGPSSKIRTREAAPSVAPSGLSGGGGAPGELIVNWTAGQHSLADRPGAWRRCPVLCLQQRERPALHAL

SEQ ID NO: 3138 - protein, 41 aa, Homo sapiens
MGTATRRKPHLLLVAAVALVSSSGEDTEAQKSSITFPRSHS

SEQ ID NO: 3139 - protein, 41 aa, Homo sapiens; identical to SEQ ID NO: 3138

SEQ ID NO: 3140 - protein, 527 aa, Homo sapiens
  VARIANT 1: note = misc_feature - Xaa can be any naturally occurring amino acid
XAQTVVDSASKEATVLVRGPPGPPGGVVVRDIGDTTIQLSWSRGFDNHSPIAKYTLQARTPPAGKWKQVRTNPANIEGNAETAQVLGLTPWMDYEFRVIASNILGTGEPSGPSSKIRTREAAPSVAPSGLSGGGGAPGELIVNWTPMSREYQNGDGFGYLLSFRRQGSTHWQTARVPGADAQYFVYSNESVRPYTPFEVKIRSYNRRGDGPESLTALVYSAEEEPRVAPTKVWAKGVSSSEMNVTWEPVQQDMNGILLGYEIRYWKAGDKEAAADRVRTAGLDTSARVSGLHPNTKYHVTVRAYNRAGTGPASPSANATTMKPPPRRPPGNISWTFSSSSLSIKWDPVVPFRNESAVTGYKMLYQNDLHLTPTLHLTGKNWIEIPVPEDIGHALVQIRTTGPGGDGIPAEVHIVRNGGAAPPLPLSPREIQDPPRYLRGSFPPRPTPISTRKGKWKAGRNQVQSSLRTASPPPFYPAPRTSPRAREGRRVQGEAEDQPAIANGLQSTVGVGLRRPPSRPLPGLQLAL

SEQ ID NO: 3141 - protein, 115 aa, Homo sapiens
  VARIANT 1: note = misc_feature - Xaa can be any naturally occurring amino acid
XGKANSTGILSVRDATKITLAPSSADINLGDNLTLQCHASHDPTMDLTFTWTLDDFPIDFDKPGGHYRRTNVKETIGDLTILNAQLRHGGKYTCMAQTVVDSASKEATVLVRGPK

SEQ ID NO: 3142 - protein, 473 aa, Homo sapiens
  VARIANT 1: note = misc_feature - Xaa can be any naturally occurring amino acid
XIKWRKVDGSLSPQWTTAEPTLQIPSVSFEDEGTYECEAENSKGRDTVQGRIIVQAQPEWLKVISDTEADIGSNLRWGCAAAGKPRPTVRWLRNGEPLASQNRVEVLAGDLRFSKLSLEDSGMYQCVAENKHGTIYASAELAVQALAPDFRLNPVRRLIPAARGGEILIPCQPRAAPKAVVLWSKGTEILVNSSRVTVTPDGTLIIRNISRSDEGKYTCFAENFMGKANSTGILSVRDATKITLAPSSADINLGDNLTLQCHASHDPTMDLTFTWTLDDFPIDFDKPGGHYRRTNVKETIGDLTILNAQLRHGGKYTCMAQTVVDSASKEATVLVRGPPGPPGGVVVRDIGDTTIQLSWSRGFDNHSPIAKYTLQARTPPAGKWKQVRTNPANIEGNAETAQVLGLTPWMDYEFRVIASNILGTGEPSGPSSKIRTREAAPSVAPSGLSGGGGAPGELIVNWTQRERPALHAL

SEQ ID NO: 3143 - protein, 1011 aa, Homo sapiens
  VARIANT 1: note = misc_feature - Xaa can be any naturally occurring amino acid
XPTDGRHFVSQTTGNLYIARTNASDLGNYSCLATSHMDFSTKSVFSKFAQLNLAAEDTRLFAPSIKARFPAETYALVGQQVTLECFAFGNPVPRIKWRKVDGSLSPQWTTAEPTLQIPSVSFEDEGTYECEAENSKGRDTVQGRIIVQAQPEWLKVISDTEADIGSNLRWGCAAAGKPRPTVRWLRNGEPLASQNRVEVLAGDLRFSKLSLEDSGMYQCVAENKHGTIYASAELAVQALAPDFRLNPVRRLIPAARGGEILIPCQPRAAPKAVVLWSKGTEILVNSSRVTVTPDGTLIIRNISRSDEGKYTCFAENFMGKANSTGILSVRDATKITLAPSSADINLGDNLTLQCHASHDPTMDLTFTWTLDDFPIDFDKPGGHYRRTNVKETIGDLTILNAQLRHGGKYTCMAQTVVDSASKEATVLVRGPPGPPGGVVVRDIGDTTIQLSWSRGFDNHSPIAKYTLQARTPPAGKWKQVRTNPANIEGNAETAQVLGLTPWMDYEFRVIASNILGTGEPSGPSSKIRTREAAPSVAPSGLSGGGGAPGELIVNWTPMSREYQNGDGFGYLLSFRRQGSTHWQTARVPGADAQYFVYSNESVRPYTPFEVKIRSYNRRGDGPESLTALVYSAEEEPRVAPTKVWAKGVSSSEMNVTWEPVQQDMNGILLGYEIRYWKAGDKEAAADRVRTAGLDTSARVSGLHPNTKYHVTVRAYNRAGTGPASPSANATTMKPPPRRPPGNISWTFSSSSLSIKWDPVVPFRNESAVTGYKMLYQNDLHLTPTLHLTGKNWIEIPVPEDIGHALVQIRTTGPGGDGIPAEVHIVRNGGAAPPLPLSPREIQDPPRYLRGSFPPRPTPISTRKGKWKAGRNQVQSSLRTASPPPFYPAPRTSPRAREGRRVQGEAEDQPAIANGLQSTVGVGLRRPPSRPLPGLQLALHKHDGGEHGSPPSTTPWHRHFPLRGDADPHRLPGALILEPLPLRRSWTPPPTDTASPFLLPRWPDTVPESGWF

SEQ ID NO: 3144 - protein, 1028 aa, Homo sapiens
MMFPWKQLILLSFIGCLGGELLLQGPVFIKEPSNSIFPVGSEDKKITLHCEARGNPSPHYRWQLNGSDIDMSMEHRYKLNGGNLVVINPNRNWDTGTYQCFATNSLGTIVSREAKLQFAYLENFKTKMRSTVSVREGQGVVLLCGPPPHSGELSYAWIFNEYPSFVEEDSRRFVSQETGHLYISKVEPSDVGNYTCVVTSMVTNARVLGSPTPLVLRSDGVMGEYEPKIEVQFPETLPAAKGSTVKLECFALGNPIPQINWRRSDGLPFSSKIKLRKFSGVLEIPNFQQEDAGSYECIAENSRGKNVARGRLTYYAKPHWVQLIKDVEIAVEDSLYWECRASGKPKPSYRWLKNGAALVLEERTQIENGALTISNLSVTDSGMFQCIAENKHGLVYSSAELKVVASAPDFSKNPMKKLVQVQVGSLVSLDCKPRASPRALSSWKKGDVSVQEHERISLLNDGGLKIANVTKADAGTYTCMAENQFGKANGTTHLVVTEPTRITLAPSNMDVSVGESVILPCQVQHDPLLDIIFTWYFNGALADFKKDGSHFEKVGGSSSGDLMIRNIQLKHSGKYVCMVQTGVDSVSSAADLIVRGSPGPPENVKVDEITDTTAQLSWKEGKDNHSPVISYSIQARTPFSVGWQTVTTVPEVIDGKTHTATVVELNPWVEYEFRVVASNKIGGGEPSLPSEKVRTEEAVPEVPPSEVNGGGGSRSELVITWDPVPEELQNGEGFGYVVAFRPLGVTTWIQTVVTSPDTPRYVFRNESIVPYSPYEVKVGVYNNKGEGPFSPVTTVFSAEEEPTVAPSQVSANSLSSSEIEVSWNTIPWKLSNGHLLGYEVRYWNGGGKEESSSKMKVAGNETSARLRGLKSNLAYYTAVRAYNSAGAGPFSATVNVTTKKTPPSQPPGNVVWNATDTKVLLNWEQVKAMENESEVTGYKVFYRTSSQNNVQVLNTNKTSAELVLPIKEDYIIEVKATTDGGDGTSSEQIRIPRITSMDARGSTSAISNVHPMSSYMPIVLFLIVYVLW

SEQ ID NO: 3145 - protein, 698 aa, Homo sapiens
MEENVFWECKANGRPKPTYKWLKNGEPLLTRDRIQIEQGTLNITIVNLSDAGMYQCLAENKHGVIFSNAELSVIAVGPDFSRTLLKRVTLVKVGGEVVIECKPKASPKPVYTWKKGRDILKENERITISEDGNLRIINVTKSDAGSYTCIATNHFGTASSTGNLVVKDPTRVMVPPSSMDVTVGESIVLPCQVTHDHSLDIVFTWSFNGHLIDFDRDGDHFERVGGQDSAGDLMIRNIQLKHAGKYVCMVQTSVDRLSAAADLIVRGPPGPPEAVTIDEITDTTAQLSWRPGPDNHSPITMYVIQARTPFSVGWQAVSTVPELIDGKTFTATVVGLNPWVEYEFRTVAANVIGIGEPSRPSEKRRTEEALPEVTPANVSGGGGSKSELVITWETVPEELQNGRGFGYVVAFRPYGKMIWMLTVLASADASRYVFRNESVHPFSPFEVKVGVFNNKGEGPFSPTTVVYSAEEEPTKPPASIFARSLSATDIEVFWASPLEKNRGRIQGYEVKYWRHEDKEENARKIRTVGNQTSTKITNLKGSVLYHLAVKAYNSAGTGPSSATVNVTTRKPPPSQPPGNIIWNSSDSKIILNWDQVKALDNESEVKGYKVLYRWNRQSSTSVIETNKTSVELSLPFDEDYIIEIKPFSDGGDGSSSEQIRIPKISNAYARGSGASTSNACTLSAISTIMISLTARSSL

SEQ ID NO: 3146 - protein, 54 aa, Homo sapiens
MRLPWELLVLQSFILCLADDSTLHGPIFIQEPSPVMFPLDSEEKKVKLNCEVKG

SEQ ID NO: 3147 - protein, 116 aa, Homo sapiens
MRLPWELLVLQSFILCLADDSTLHGPIFIQEPSPVMFPLDSEEKKVKLNCEVKGNPKPHIRWKLNGTDVDTGMDFRYSVVEGSLLINNPNKTQDAGTYQCTATNSFGTIVSREAKL

SEQ ID NO: 3148 - protein, 1026 aa, Homo sapiens
MRLPWELLVLQSFILCLADDSTLHGPIFIQEPSPVMFPLDSEEKKVKLNCEVKGNPKPHIRWKLNGTDVDTGMDFRYSVVEGSLLINNPNKTQDAGTYQCTATNSFGTIVSREAKLQFAYLDNFKTRTRSTVSVRRGQGMVLLCGPPPHSGELSYAWIFNEYPSYQDNRRFVSQETGNLYIAKVEKSDVGNYTCVVTNTVTNHKVLGPPTPLILRNDGVMGEYEPKIEVQFPETVPTAKGATVKLECFALGNPVPTIIWRRADGKPIARKARRHKSNGILEIPNFQQEDAGLYECVAENSRGKNVARGQLTFYAQPNWIQKINDIHVAMEENVFWECKANGRPKPTYKWLKNGEPLLTRDRIQIEQGTLNITIVNLSDAGMYQCLAENKHGVIFSNAELSVIAVGPDFSRTLLKRVTLVKVGGEVVIECKPKASPKPVYTWKKGRDILKENERITISEDGNLRIINVTKSDAGSYTCIATNHFGTASSTGNLVVKDPTRVMVPPSSMDVTVGESIVLPCQVTHDHSLDIVFTWSFNGHLIDFDRDGDHFERVGGQDSAGDLMIRNIQLKHAGKYVCMVQTSVDRLSAAADLIVRGPPGPPEAVTIDEITDTTAQLSWRPGPDNHSPITMYVIQARTPFSVGWQAVSTVPELIDGKTFTATVVGLNPWVEYEFRTVAANVIGIGEPSRPSEKRRTEEALPEVTPANVSGGGGSKSELVITWETVPEELQNGRGFGYVVAFRPYGKMIWMLTVLASADASRYVFRNESVHPFSPFEVKVGVFNNKGEGPFSPTTVVYSAEEEPTKPPASIFARSLSATDIEVFWASPLEKNRGRIQGYEVKYWRHEDKEENARKIRTVGNQTSTKITNLKGSVLYHLAVKAYNSAGTGPSSATVNVTTRKPPPSQPPGNIIWNSSDSKIILNWDQVKALDNESEVKGYKVLYRWNRQSSTSVIETNKTSVELSLPFDEDYIIEIKPFSDGGDGSSSEQIRIPKISNAYARGSGASTSNACTLSAISTIMISLTARSSL

SEQ ID NO: 3149 - protein, 1026 aa, Homo sapiens; identical to SEQ ID NO: 3148

SEQ ID NO: 3150 - protein, 1026 aa, Homo sapiens; identical to SEQ ID NO: 3148

SEQ ID NO: 3151 - protein, 232 aa, Homo sapiens
MRLPWELLVLQSFILCLADDSTLHGPIFIQEPSPVMFPLDSEEKKVKLNCEVKGNPKPHIRWKLNGTDVDTGMDFRYSVVEGSLLINNPNKTQDAGTYQCTATNSFGTIVSREAKLQFAYLDNFKTRTRSTVSVRRGQGMVLLCGPPPHSGELSYAWIFNEYPSYQDNRRFVSQETGNLYIAKVEKSDVGNYTCVVTNTVTNHKVLGPPTPLILRNDVQYQLLSGEELMESQ

SEQ ID NO: 3152 - protein, 137 aa, Homo sapiens
MRLPWELLVLQSFILCLAGSQTDFWSLLGVLPALEADDSTLHGPIFIQEPSPVMFPLDSEEKKVKLNCEVKGNPKPHIRWKLNGTDVDTGMDFRYSVVEGSLLINNPNKTQDAGTYQCTATNSFGTIVSREAKLQFA

SEQ ID NO: 3153 - protein, 143 aa, Homo sapiens
NDIHVAMEENVFWECKANGRPKPTYKWLKNGEPLLTRDRIQIEQGTLNITIVNLSDAGMYQCLAENKHGVIFSNAELSVIAVGPDFSRTLLKRVTLVKVGGEVVIECKPKASPKPVYTWKKGRDILKENESVHQGFGSGSAPL

SEQ ID NO: 3154 - protein, 1022 aa, Homo sapiens [sequence omitted]

SEQ ID NO: 3155 - protein, 1084 aa, Homo sapiens
LTEYSKSLPGLSTSYAALLRIKKSSSSSLFGSKTRPRYSSPSLGTLSASSPSWLGAAQNYYSPINLYHSSDAFKQDESVDYGPVFVQEPDDIIFPTDSDEKKVALNCEVRGNPVPSYRWLRNGTEIDLESDYRYSLIDGTFIISNPSEAKDSGHYQCLATNTVGSILSREATLQFAYLGNFSGRTRSAVSVREGQGVVLMCSPPPHSPEIIYSWVFNEFPSFVAEDSRRFISQETGNLYISKVQTSDVGSYICLVKNTVTNARVLSPPTPLTLRNDGVMGEYEPKIEVHFPFTVTAAKGTTVKMECFALGNPVPTITWMKVNGYIPSKARLRKSQAVLEIPNVQLDDAGIYECRAENSRGKNSFRGQLQVYTYPHWVEKLNDTQLDSGSPLRWECKATGKPRPTYRWLKNGVPLSPQSRVEMVNGVLMIHNVNQSDAGMYQCLAENKYGAIYASAELKILASAPTFALNQLKKTIIVTKDQEVVIECKPQGSPKPTISWKKGDRAVRENKRIAILPDGSLRILNASKSDEGKYVCRGENVFGSAEIIASLSVKEPTRIELTPKRTELTVGESIVLNCKAIHDASLDVTFYWTLKGQPIDFEEEGGHFESIRAQASSADLMIRNILLMHAGRYGCRVQTTADSVSDEAELLVRGPPGPPGIVIVEEITESTATLSWSPAADNHSPISSYNLQARSPFSLGWQTVKTVPEIITGDMESAMAVDLNPWVEYEFRVVATNPIGTGDPSTPSRMIRTNEAVPKTAPTNVSGRSGRRHELVIAWEPVSEEFQNGEGFGYIVAFRPNGTRGWKEKMVTSSEASKFIYRDESVPPLTPFEVKVGVYNNKGDGPFSQIVVICSAEGEPSAAPTDVKATSVSVSEILVAWKHIKESLGRPQGFEVGYWKDMEQEDTAETVKTRGNESFVILTGLEGNTLYHFTVRAYNGAGYGPPSSEVSATTKKSPPSQAPSNLRWEQQGSQVSLGWEPVIPLANESEVVGYKVFYRQEGHSNSQVIETQKLQAVVPLPDAGVYIIEVRAYSEGGDGTASSQIRVPSYSGGKITSAQSTLHSLSTSSSSVTLLLALMIPSTSW

SEQ ID NO: 3156 - protein, 1026 aa, Homo sapiens
MASSWKLMLFLSVTMCLSESVDYGPVFVQEPDDIIFPTDSDEKKVALNCEVRGNPVPSYRWLRNGTEIDLESDYRYSLIDGTFIISNPSEAKDSGHYQCLATNTVGSILSREATLQFAYLGNFSGRTRSAVSVREGQGVVLMCSPPPHSPEIIYSWVFNEFPSFVAEDSRRFISQETGNLYISKVQTSDVGSYICLVKNTVTNARVLSPPTPLTLRNDGVMGEYEPKIEVHFPFTVTAAKGTTVKMECFALGNPVPTITWMKVNGYIPSKARLRKSQAVLEIPNVQLDDAGIYECRAENSRGKNSFRGQLQVYTYPHWVEKLNDTQLDSGSPLRWECKATGKPRPTYRWLKNGVPLSPQSRVEMVNGVLMIHNVNQSDAGMYQCLAENKYGAIYASAELKILASAPTFALNQLKKTIIVTKDQEVVIECKPQGSPKPTISWKKGDRAVRENKRIAILPDGSLRILNASKSDEGKYVCRGENVFGSAEIIASLSVKEPTRIELTPKRTELTVGESIVLNCKAIHDASLDVTFYWTLKGQPIDFEEEGGHFESIRAQASSADLMIRNILLMHAGRYGCRVQTTADSVSDEAELLVRGPPGPPGIVIVEEITESTATLSWSPAADNHSPISSYNLQARSPFSLGWQTVKTVPEIITGDMESAMAVDLNPWVEYEFRVVATNPIGTGDPSTPSRMIRTNEAVPKTAPTNVSGRSGRRHELVIAWEPVSEEFQNGEGFGYIVAFRPNGTRGWKEKMVTSSEASKFIYRDESVPPLTPFEVKVGVYNNKGDGPFSQIVVICSAEGEPSAAPTDVKATSVSVSEILVAWKHIKESLGRPQGFEVGYWKDMEQEDTAETVKTRGNESFVILTGLEGNTLYHFTVRAYNGAGYGPPSSEVSATTKKSPPSQAPSNLRWEQQGSQVSLGWEPVIPLANESEVVGYKVFYRQEGHSNSQVIETQKLQAVVPLPDAGVYIIEVRAYSEGGDGTASSQIRVPSYSGGKITSAQSTLHSLSTSSSSVTLLLALMIPSTSW

SEQ ID NO: 3157 - protein, 1100 aa, Homo sapiens
MASSWKLMLFLSVTMCLSEYSKSLPGLSTSYAALLRIKKSSSSSLFGSKTRPRYSSPSLGTLSASSPSWLGAAQNYYSPINLYHSSDAFKQDESVDYGPVFVQEPDDIIFPTDSDEKKVALNCEVRGNPVPSYRWLRNGTEIDLESDYRYSLIDGTFIISNPSEAKDSGHYQCLATNTVGSILSREATLQFAYLGNFSGRTRSAVSVREGQGVVLMCSPPPHSPEIIYSWVFNEFPSFVAEDSRRFISQETGNLYISKVQTSDVGSYICLVKNTVTNARVLSPPTPLTLRNDGVMGEYEPKIEVHFPFTVTAAKGTTVKMECFALGNPVPTITWMKVNGYIPSKARLRKSQAVLEIPNVQLDDAGIYECRAENSRGKNSFRGQLQVYTYPHWVEKLNDTQLDSGSPLRWECKATGKPRPTYRWLKNGVPLSPQSRVEMVNGVLMIHNVNQSDAGMYQCLAENKYGAIYASAELKILASAPTFALNQLKKTIIVTKDQEVVIECKPQGSPKPTISWKKGDRAVRENKRIAILPDGSLRILNASKSDEGKYVCRGENVFGSAEIIASLSVKEPTRIELTPKRTELTVGESIVLNCKAIHDASLDVTFYWTLKGQPIDFEEEGGHFESIRAQASSADLMIRNILLMHAGRYGCRVQTTADSVSDEAELLVRGPPGPPGIVIVEEITESTATLSWSPAADNHSPISSYNLQARSPFSLGWQTVKTVPEIITGDMESAMAVDLNPWVEYEFRVVATNPIGTGDPSTPSRMIRTNEAVPKTAPTNVSGRSGRRHELVIAWEPVSEEFQNGEGFGYIVAFRPNGTRGWKEKMVTSSEASKFIYRDESVPPLTPFEVKVGVYNNKGDGPFSQIVVICSAEGEPSAAPTDVKATSVSVSEILVAWKHIKESLGRPQGFEVGYWKDMEQEDTAETVKTRGNESFVILTGLEGNTLYHFTVRAYNGAGYGPPSSEVSATTKKSPPSQAPSNLRWEQQGSQVSLGWEPVIPLANESEVVGYKVFYRQEGHSNSQVIETQKLQAVVPLPDAGVYIIEVRAYSEGGDGTASSQIRVPSYSGGKITSAQSTLHSLSTSSSSVTLLLALMIPSTSW

SEQ ID NO: 3158 - protein, 1100 aa, Homo sapiens; identical to SEQ ID NO: 3157

SEQ ID NO: 3159 - protein, 911 aa, Homo sapiens
MASSWKLMLFLSVTMCLSEYSKSLPGLSTSYAALLRIKKSSSSSLFGSKTRPRYSSPSLGTLSASSPSWLGAAQNYYSPINLYHSSDAFKQDESVDYGPVFVQEPDDIIFPTDSDEKKVALNCEVRGNPVPSYRWLRNGTEIDLESDYRYSLIDGTFIISNPSEAKDSGHYQCLATNTVGSILSREATLQFAYLGNFSGRTRSAVSVREGQGVVLMCSPPPHSPEIIYSWVFNEFPSFVAEDSRRFISQETGNLYISKVQTSDVGSYICLVKNTVTNARVLSPPTPLTLRNDGVMGEYEPKIEVHFPFTVTAAKGTTVKMECFALGNPVPTITWMKVNGYIPSKARLRKSQAVLEIPNVQLDDAGIYECRAENSRGKNSFRGQLQVYTYPHWVEKLNDTQLDSGSPLRWECKATGKPRPTYRWLKNGVPLSPQSRVEMVNGVLMIHNVNQSDAGMYQCLAENKYGAIYASAELKILASAPTFALNQLKKTIIVTKDQEVVIECKPQGSPKPTISWKKGDRAVRENKRIAILPDGSLRILNASKSDEGKYVCRGENVFGSAEIIASLSVKEPTRIELTPKRTELTVGESIVLNCKAIHDASLDVTFYWTLKGQPIDFEEEGGHFESIRAQASSADLMIRNILLMHAGRYGCRVQTTADSVSDEAELLVRGPPGPPGIVIVEEITESTATLSWSPAADNHSPISSYNLQARSPFSLGWQTVKTVPEIITGDMESAMAVDLNPWVEYEFRVVATNPIGTGDPSTPSRMIRTNEAVPKTAPTNVSGRSGRRHELVIAWEPVSEEFQNGEGFGYIVAFRPNGTRGWKEKMVTSSEASKFIYRDESVPPLTPFEVKVGVYNNKGDGPFSQIVVICSAEGEPSAAPTDVKATSVSVSEILVAWKHIKESLGRPQGFEV

SEQ ID NO: 3160 - protein, 390 aa, Homo sapiens
MNGVTLDLEERAKVTSGFISGCSGHCTSYGTNCENGGKCLERYHGYSCDCSNTAYDGTFCNKDVGAFFEEGMWLRYNFQAPATNARDSSSRVDNAPDQQNSHPDLAQEEIRFSFSTTKAPCILLYISSFTTDFLAVLVKPTGSLQIRYNLGGTREPYNIDVDHRNMANGQPHSVNITRHEKTIFLKLDHYPSVSYHLPSSSDTLFNSPKSLFLGKVIETGKIDQEIHKYNTPGFTGCLSRVQFNQIAPLKAALRQTNASAHVHIQGELVESNCGASPLTLSPMSSATDPWHLDHLDSASADFPYNPGQGQAIRNGVNRNSAIIGGVIAVVIFTILCTLVFLIRYMFRHKGTYHTNEAKGAESAESADAAIMNNDPNFTETIDESKKEWLI

SEQ ID NO: 3161 - protein, 120 aa, Homo sapiens
MQAAPRAGCGAALLLWIVSSCLCRAWTAPSTSQKCDEPLVSGLPHVAFSSSSSISGSYSPGYAKINKRGGAGGWSPSDSDHYQWLQVDFGNRKQISAIATQGRYSSSDWVTQYRMLYSDT

SEQ ID NO: 3162 - protein, 1331 aa, Homo sapiens
MQAAPRAGCGAALLLWIVSSCLCRAWTAPSTSQKCDEPLVSGLPHVAFSSSSSISGSYSPGYAKINKRGGAGGWSPSDSDHYQWLQVDFGNRKQISAIATQGRYSSSDWVTQYRMLYSDTGRNWKPYHQDGNIWAFPGNINSDGVVRHELQHPIIARYVRIVPLDWNGEGRIGLRIEVYGCSYWADVINFDGHVVLPYRFRNKKMKTLKDVIALNFKTSESEGVILHGEGQQGDYITLELKKAKLVLSLNLGSNQLGPIYGHTSVMTGSLLDDHHWHSVVIERQGRSINLTLDRSMQHFRTNGEFDYLDLDYEITFGGIPFSGKPSSSSRKNFKGCMESINYNGVNITDLARRKKLEPSNVGNLSFSCVEPYTVPVFFNATSYLEVPGRLNQDLFSVSFQFRTWNPNGLLVFSHFADNLGNVEIDLTESKVGVHINITQTKMSQIDISSGSGLNDGQWHEVRFLAKENFAILTIDGDEASAVRTNSPLQVKTGEKYFFGGFLNQMNNSSHSVLQPSFQGCMQLIQVDDQLVNLYEVAQRKPGSFANVSIDMCAIIDRCVPNHCEHGGKCSQTWDSFKCTCDETGYSGATCHNSIYEPSCEAYKHLGQTSNYYWIDPDGSGPLGPLKVYCNMTEDKVWTIVSHDLQMQTPVVGYNPEKYSVTQLVYSASMDQISAITDSAEYCEQYVSYFCKMSRLLNTPDGSPYTWWVGKANEKHYYWGGSGPGIQKCACGIERNCTDPKYYCNCDADYKQWRKDAGFLSYKDHLPVSQVVVGDTDRQGSEAKLSVGPLRCQGDRNYWNAASFPNPSSYLHFSTFQGETSADISFYFKTLTPWGVFLENMGKEDFIKLELKSATEVSFSFDVGNGPVEIVVRSPTPLNDDQWHRVTAERNVKQASLQVDRLPQQIRKAPTEGHTRLELYSQLFVGGAGGQQGFLGCIRSLRMNGVTLDLEERAKVTSGFISGCSGHCTSYGTNCENGGKCLERYHGYSCDCSNTAYDGTFCNKDVGAFFEEGMWLRYNFQAPATNARDSSSRVDNAPDQQNSHPDLAQEEIRFSFSTTKAPCILLYISSFTTDFLAVLVKPTGSLQIRYNLGGTREPYNIDVDHRNMANGQPHSVNITRHEKTIFLKLDHYPSVSYHLPSSSDTLFNSPKSLFLGKVIETGKIDQEIHKYNTPGFTGCLSRVQFNQIAPLKAALRQTNASAHVHIQGELVESNCGASPLTLSPMSSATDPWHLDHLDSASADFPYNPGQGQAIRNGVNRNSAIIGGVIAVVIFTILCTLVFLIRYMFRHKGTYHTNEAKGAESAESADAAIMNNDPNFTETIDESKKEWLI

SEQ ID NO: 3163 - protein, 108 aa, Homo sapiens
MSSATDPWHLDHLDSASADFPYNPGQGQAIRNGVNRNSAIIGGVIAVVIFTILCTLVFLIRYMFRHKGTYHTNEAKGAESAESADAAIMNNDPNFTETIDESKKEWLI

SEQ ID NO: 3164 - protein, 1288 aa, Homo sapiens
MASVAWAVLKVLLLLPTQTWSPVGAGNPPDCDAPLASALPRSSFSSSSELSSSHGPGFSRLNRRDGAGGWTPLVSNKYQWLQIDLGERMEVTAVATQGGYGSSDWVTSYLLMFSDGGRNWKQYRREESIWGFPGNTNADSVVHYRLQPPFEARFLRFLPLAWNPRGRIGMRIEVYGCAYKSEVVYFDGQSALLYRLDKKPLKPIRDVISLKFKAMQSNGILLHREGQHGNHITLELIKGKLVFFLNSGNAKLPSTIAPVTLTLGSLLDDQHWHSVLIELLDTQVNFTVDKHTHHFQAKGDSSYLDLNFEISFGGIPTPGRSRAFRRKSFHGCLENLYYNGVDVTELAKKHKPQILMMGNVSFSCPQPQTVPVTFLSSRSYLALPGNSGEDKVSVTFQFRTWNRAGHLLFGELRRGSGSFVLFLKDGKLKLSLFQPGQSPRNVTAGAGLNDGQWHSVSFSAKWSHMNVVVDDDTAVQPLVAVLIDSGDTYYFGGCLDNSSGSGCKSPLGGFQGCLRLITIGDKAVDPILVQQGALGSFRDLQIDSCGITDRCLPSYCEHGGECSQSWDTFSCDCLGTGYTGETCHSSLYEQSCEAHKHRGNPSGLYYIDADGSGPLGPFLVYCNMTADAAWTVVQHGGPDAVTLRGAPSGHPRSAVSFAYAAGAGQLRSAVNLAERCEQRLALRCGTARRPDSRDGTPLSWWVGRTNETHTSWGGSLPDAQKCTCGLEGNCIDSQYYCNCDAGRNEWTSDTIVLSQKEHLPVTQIVMTDAGRPHSEAAYTLGPLLCRGDQSFWNSASFNTETSYLHFPAFHGELTADVCFFFKTTVSSGVFMENLGITDFIRIELRAPTEVTFSFDVGNGPCEVTVQSPTPFNDNQWHHVRAERNVKGASLQVDQLPQKMQPAPADGHVRLQLNSQLFIGGTATRQRGFLGCIRSLQLNGVALDLEERATVTPGVEPGCAGHCSTYGHLCRNGGRCREKRRGVTCDCAFSAYDGPFCSNEISAYFATGSSMTYHFQEHYTLSENSSSLVSSLHRDVTLTREMITLSFRTTRTPSLLLYVSSFYEEYLSVILANNGSLQIRYKLDRHQNPDAFTFDFKNMADGQLHQVKINREEAVVMVEVNQSTKKQVILSSGTEFNAVKSLILGKVLEAAGADPDTRRAATSGFTGCLSAVRFGRAAPLKAALRPSGPSRVTVRGHVAPMARCAAGAASGSPARELAPRLAGGAGRSGPADEGEPLVNADRRDSAVIGGVIAVVIFILLCITAIAIRIYQQRKLRKENESKVSKKEEC

SEQ ID NO: 3165 - protein, 1207 aa, Homo sapiens
MASVAWAVLKVLLLLPTQTWSPVGAGNPPDCDAPLASALPRSSFSSSSELSSSHGPGFSRLNRRDGAGGWTPLVSNKYQWLQIDLGERMEVTAVATQGGYGSSDWVTSYLLMFSDGGRNWKQYRREESIWGFPGNTNADSVVHYRLQPPFEARFLRFLPLAWNPRGRIGMRIEVYGCAYKSEVVYFDGQSALLYRLDKKPLKPIRDVISLKFKAMQSNGILLHREGQHGNHITLELIKGKLVFFLNSGNAKLPSTIAPVTLTLGSLLDDQHWHSVLIELLDTQVNFTVDKHTHHFQAKGDSSYLDLNFEISFGGIPTPGRSRAFRRKSFHGCLENLYYNGVDVTELAKKHKPQILMMGNVSFSCPQPQTVPVTFLSSRSYLALPGNSGEDKVSVTFQFRTWNRAGHLLFGELRRGSGSFVLFLKDGKLKLSLFQPGQSPRNVTAGAGLNDGQWHSVSFSAKWSHMNVVVDDDTAVQPLVAVLIDSGDTYYFGGCLDNSSGSGCKSPLGGFQGCLRLITIGDKAVDPILVQQGALGSFRDLQIDSCGITDRCLPSYCEHGGECSQSWDTFSCDCLGTGYTGETCHSSLYEQSCEAHKHRGNPSGLYYIDADGSGPLGPFLVYCNMTDAAWTVVQHGGPDAVTLRGAPSGHPRSAVSFAYAAGAGQLRSAVNLAERCEQRLALRCGTARRPDSRDGTPLSWWVGRTNETHTSWGGSLPDAQKCTCGLEGNCIDSQYYCNCDAGRNEWTSDTIVLSQKEHLPVTQIVMTDAGRPHSEAAYTLGPLLCRGDQSFWNSASFNTETSYLHFPAFHGELTADVCFFFKTTVSSGVFMENLGITDFIRIELRAPTEVTFSFDVGNGPCEVTVQSPTPFNDNQWHHVRAERNVKGASLQVDQLPQKMQPAPADGHVRLQLNSQLFIEISAYFATGSSMTYHFQEHYTLSENSSSLVSSLHRDVTLTREMITLSFRTTRTPSLLLYVSSFYEEYLSVILANNGSLQIRYKLDRHQNPDAFTFDFKNMADGQLHQVKINREEAVVMVEVNQSTKKQVILSSGTEFNAVKSLILGKVLEAAGADPDTRRAATSGFTGCLSAVRFGRAAPLKAALRPSGPSRVTVRGHVAPMARCAAGAASGSPARELAPRLAGGAGRSGPADEGEPLVNADRRDSAVIGGVIAVVIFILLCITAIAIRIYQQRKLRKENESKVSKKEEC

SEQ ID NO: 3166 - protein, 745 aa, Homo sapiens
MASVAWAVLKVLLLLPTQTWSPVGAGNPPDCDAPLASALPRSSFSSSSELSSSHGPGFSRLNRRDGAGGWTPLVSNKYQWLQIDLGERMEVTAVATQGGYGSSDWVTSYLLMFSDGGRNWKQYRREESIWGFPGNTNADSVVHYRLQPPFEARFLRFLPLAWNPRGRIGMRIEVYGCAYKSEVVYFDGQSALLYRLDKKPLKPIRDVISLKFKAMQSNGILLHREGQHGNHITLELIKGKLVFFLNSGNAKLPSTIAPVTLTLGSLLDDQHWHSVLIELLDTQVNFTVDKHTHHFQAKGDSSYLDLNFEISFGGIPTPGRSRAFRRKSFHGCLENLYYNGVDVTELAKKHKPQILMMGNVSFSCPQPQTVPVTFLSSRSYLALPGNSGEDKVSVTFQFRTWNRAGHLLFGELRRGSGSFVLFLKDGKLKLSLFQPGQSPRNVTAGAGLNDGQWHSVSFSAKWSHMNVVVDDDTAVQPLVAVLIDSGDTYYFGGCLDNSSGSGCKSPLGGFQGCLRLITIGDKAVDPILVQQGALGSFRDLQIDSCGITDRCLPSYCEHGGECSQSWDTFSCDCLGTGYTGETCHSSLYEQSCEAHKHRGNPSGLYYIDADGSGPLGPFLVYCNMTDAAWTVVQHGGPDAVTLRGAPSGHPRSAVSFAYAAGAGQLRSAVNLAERCEQRLALRCGTARRPDSRDGTPLSWWVGRTNETHTSWGGSLPDAQKCTCGLEGNCIDSQYYCNCDAGRNEW

SEQ ID NO: 3167 - protein, 604 aa, Homo sapiens
MASVAWAVLKVLLLLPTQTWSPVGAGNPPDCDAPLASALPRSSFSSSSELSSSHGPGFSRLNRRDGAGGWTPLVSNKYQWLQIDLGERMEVTAVATQGGYGSSDWVTSYLLMFSDGGRNWKQYRREESIWGFPGNTNADSVVHYRLQPPFEARFLRFLPLAWNPRGRIGMRIEVYGCAYKSEVVYFDGQSALLYRLDKKPLKPIRDVISLKFKAMQSNGILLHREGQHGNHITLELIKGKLVFFLNSGNAKLPSTIAPVTLTLGSLLDDQHWHSVLIELLDTQVNFTVDKHTHHFQAKGDSSYLDLNFEISFGGIPTPGRSRAFRRKSFHGCLENLYYNGVDVTELAKKHKPQILMMGNVSFSCPQPQTVPVTFLSSRSYLALPGNSGEDKVSVTFQFRTWNRAGHLLFGELRRGSGSFVLFLKDGKLKLSLFQPGQSPRNVTAGAGLNDGQWHSVSFSAKWSHMNVVVDDDTAVQPLVAVLIDSGDTYYFGALYEQSCEAHKHRGNPSGLYYIDADGSGPLGPFLVYCNMTDAAWTVVQHGGPDAVTLRGAPSGHPRSAVSFAYAAGAGQLRSAVNLAERCEQRLALRCGTARRPDSRGLVTQ

SEQ ID NO: 3168 - protein, 1039 aa, Homo sapiens
MEVTAVATQGGYGSSDWVTSYLLMFSDGGRNWKQYRREESIWGFPGNTNADSVVHYRLQPPFEARFLRFLPLAWNPRGRIGMRIEVYGCAYKSEVVYFDGQSALLYRLDKKPLKPIRDVISLKFKAMQSNGILLHREGQHGNHITLELIKGKLVFFLNSGNAKLPSTIAPVTLTLGSLLDDQHWHSVLIELLDTQVNFTVDKHTHHFQAKGDSSYLDLNFEISFGGIPTPGRSRAFRRKSFHGCLENLYYNGVDVTELAKKHKPQILMMGNVSFSCPQPQTVPVTFLSSRSYLALPGNSGEDKVSVTFQFRTWNRAGHLLFGELRRGSGSFVLFLKDGKLKLSLFQPGQSPRNVTAGAGLNDGQWHSVSFSAKWSHMNVVVDDDTAVQPLVAVLIDSGDTYYFGGCLDNSSGSGCKSPLGGFQGCLRLITIGDKAVDPILVQQGALGSFRDLQIDSCGITDRCLPSYCEHGGECSQSWDTFSCDCLGTGYTGETCHSSLYEQSCEAHKHRGNPSGLYYIDADGSGPLGPFLVYCNMTADAAWTVVQHGGPDAVTLRGAPSGHPRSAVSFAYAAGAGQLRSAVNLAERCEQRLALRCGTARRPDSRDGTPLSWWVGRTNETHTSWGGSLPDAQKCTCGLEGNCIDSQYYCNCDAGRNEWTSDTIVLSQKEHLPVTQIVMTDAGRPHSEAAYTLGPLLCRGDQSFWNSASFNTETSYLHFPAFHGELTADVCFFFKTTVSSGVFMENLGITDFIRIELRAPTEVTFSFDVGNGPCEVTVQSPTPFNDNQWHHVRAERNVKGASLQVDQLPQKMQPAPADGHVRLQLNSQLFIGGTATRQRGFLGCIRSLQLNGVALDLEERATVTPGVEPGCAGHCSTYGHLCRNGGRCREKRRGVTCDCAFSAYDGPFCSNEISAYFATGSSMTYHFQEHYTLSENSSSLVSSLHRDVTLTREMITLSFRTTRTPSLLLYVSSFYEEYLSVILANNGSLQIRYKLDRHQNPDAFTFDFKNMADGQLHQVKINREEAVVMVEVIPQMQKSN

SEQ ID NO: 3169 - protein, 380 aa, Homo sapiens
MASVAWAVLKVLLLLPTQTWSPVGAGNPPDCDSPLASALPRSSFSSSSELSSSHGPGFSRLNRRDGAGGWTPLVSNKYQWLQIDLGERMEVTAVATQGGYGSSDWVTSYLLMFSDGGRNWKQYRREESIWGFPGNTNADSVVHYRLQPPFEARFLRFLPLAWNPRGRIGMRIEVYGCAYKSEVVYFDGQSALLYTLDKKPLKPIRDVISLKFKAMQSNGILLHREGQHGNHITLELIKGKLVFFLNSGNAKLPSTIAPVTLTLGSLLDDQHWHSVLIELLDTQVNFTVDKHTHHFQAKGDSSNLDLNFEISFGGILSPGRSRAFTRKSFHGCLENLYYNGVDVTELAKKHKPQILMMELAHGLQDQNLKISLTVCHQTTQ

SEQ ID NO: 3170 - protein, 745 aa, Homo sapiens
MASVAWAVLKVLLLLPTQTWSPVGAGNPPDCDSPLASALPRSSFSSSSELSSSHGPGFSRLNRRDGAGGWTPLVSNKYQWLQIDLGERMEVTAVATQGGYGSSDWVTSYLLMFSDGGRNWKQYRREESIWGFPGNTNADSVVHYRLQPPFEARFLRFLPLAWNPRGRIGMRIEVYGCAYKSEVVYFDGQSALLYTLDKKPLKPIRDVISLKFKAMQSNGILLHREGQHGNHITLELIKGKLVFFLNSGNAKLPSTIAPVTLTLGSLLDDQHWHSVLIELLDTQVNFTVDKHTHHFQAKGDSSNLDLNFEISFGGILSPGRSRAFTRKSFHGCLENLYYNGVDVTELAKKHKPQILMMGNVSFSCPQPQTVPVTFLSSRSYLALPGNSGEDKVSVTFQFRTWNRAGHLLFGELQRGSGSFVLFLKDGKLKLSLFQAGQSPRNVTAGAGLNDGQWHSVSFSAKWSHMNVVVDDDTAVQPLVAVLIDSGDTYYFGGCLGNSSGSGCKSPLGGFQGCLRLITIGDKAVDPILVQQGALGSFRDLQIDSCGITDRCLPSYCEHGGECSQSWDTFSCDCLGTGYTGETCHSSLYEQSCEAHKHRGNPSGLYYIDADGSGPLGPFLVYCNMTDSAWTVVRHGGPDAVTLRGAPSGHPLSAVSFAYAAGAGQLRAAVNLAERCEQRLALRCGTARRPDSRDGTPLSWWVGRTNETHTSWGGSLPDAQKCTCGLEGNCIDSQYYCNCDAGQNEW

SEQ ID NO: 3171 - protein, 1288 aa, Homo sapiens
MASVAWAVLKVLLLLPTQTWSPVGAGNPPDCDSPLASALPRSSFSSSSELSSSHGPGFSRLNRRDGAGGWTPLVSNKYQWLQIDLGERMEVTAVATQGGYGSSDWVTSYLLMFSDGGRNWKQYRREESIWGFPGNTNADSVVHYRLQPPFEARFLRFLPLAWNPRGRIGMRIEVYGCAYKSEVVYFDGQSALLYTLDKKPLKPIRDVISLKFKAMQSNGILLHREGQHGNHITLELIKGKLVFFLNSGNAKLPSTIAPVTLTLGSLLDDQHWHSVLIELLDTQVNFTVDKHTHHFQAKGDSSNLDLNFEISFGGILSPGRSRAFTRKSFHGCLENLYYNGVDVTELAKKHKPQILMMGNVSFSCPQPQTVPVTFLSSRSYLALPGNSGEDKVSVTFQFRTWNRAGHLLFGELQRGSGSFVLFLKDGKLKLSLFQAGQSPRNVTAGAGLNDGQWHSVSFSAKWSHMNVVVDDDTAVQPLVAVLIDSGDTYYFGGCLGNSSGSGCKSPLGGFQGCLRLITIGDKAVDPILVQQGALGSFRDLQIDSCGITDRCLPSYCEHGGECSQSWDTFSCDCLGTGYTGETCHSSLYEQSCEAHKHRGNPSGLYYIDADGSGPLGPFLVYCNMTADSAWTVVRHGGPDAVTLRGAPSGHPLSAVSFAYAAGAGQLRAAVNLAERCEQRLALRCGTARRPDSRDGTPLSWWVGRTNETHTSWGGSLPDAQKCTCGLEGNCIDSQYYCNCDAGQNEWTSDTIVLSQKEHLPVTQIVMTDTGQPHSEADYTLGPLLCRGDKSFWNSASFNTETSYLHFPAFHGELTADVCFFFKTTVSSGVFMENLGITDFIRIELRAPTEVTFSFDVGNGPCEVTVQSPTPFNDNQWHHVRAERNVKGASLQVDQLPQKMQPAPADGHVRLQLNSQLFIGGTATRQRGFLGCIRSLQLNGVALDLEERATVTPGVEPGCAGHCSTYGHLCRNGGRCREKRRGVTCDCAFSAYDGPFCSNEISAYFATGSSMTYHFQEHYTLSENSSSLVSSLHRDVTLTREMITLSFRTTRTPSLLLYVSSFYEEYLSVILANNGSLQIRYKLDRHQNPDAFTFDFKNMADGQLHQVKINREEAVVMVEVNQSAKKQVILSSGTEFNAVKSLILGKVLEAAGADPDTRRAATSGFTGCLSAVRFGCAAPLKAALRPSGPSRVTVRGHVAPMARCAAGAASGSPARELAPRLAGGAGRSGPVDEGEPLVNADRRDSAVIGGVIAVEIFILLCITAIAIRIYQQRKLRKENESKVSKKEEC

SEQ ID NO: 3172 - protein, 605 aa, Homo sapiens
MASVAWAVLKVLLLLPTQTWSPVGAGNPPDCDSPLASALPRSSFSSSSELSSSHGPGFSRLNRRDGAGGWTPLVSNKYQWLQIDLGERMEVTAVATQGGYGSSDWVTSYLLMFSDGGRNWKQYRREESIWGFPGNTNADSVVHYRLQPPFEARFLRFLPLAWNPRGRIGMRIEVYGCAYKSEVVYFDGQSALLYTLDKKPLKPIRDVISLKFKAMQSNGILLHREGQHGNHITLELIKGKLVFFLNSGNAKLPSTIAPVTLTLGSLLDDQHWHSVLIELLDTQVNFTVDKHTHHFQAKGDSSNLDLNFEISFGGILSPGRSRAFTRKSFHGCLENLYYNGVDVTELAKKHKPQILMMGNVSFSCPQPQTVPVTFLSSRSYLALPGNSGEDKVSVTFQFRTWNRAGHLLFGELQRGSGSFVLFLKDGKLKLSLFQAGQSPRNVTAGAGLNDGQWHSVSFSAKWSHMNVVVDDDTAVQPLVAVLIDSGDTYYFGALYEQSCEAHKHRGNPSGLYYIDADGSGPLGPFLVYCNMTADSAWTVVRHGGPDAVTLRGAPSGHPLSAVSFAYAAGAGQLRAAVNLAERCEQRLALRCGTARRPDSRGLVTQ

SEQ ID NO: 3173 - protein, 1207 aa, Homo sapiens
MASVAWAVLKVLLLLPTQTWSPVGAGNPPDCDSPLASALPRSSFSSSSELSSSHGPGFSRLNRRDGAGGWTPLVSNKYQWLQIDLGERMEVTAVATQGGYGSSDWVTSYLLMFSDGGRNWKQYRREESIWGFPGNTNADSVVHYRLQPPFEARFLRFLPLAWNPRGRIGMRIEVYGCAYKSEVVYFDGQSALLYTLDKKPLKPIRDVISLKFKAMQSNGILLHREGQHGNHITLELIKGKLVFFLNSGNAKLPSTIAPVTLTLGSLLDDQHWHSVLIELLDTQVNFTVDKHTHHFQAKGDSSNLDLNFEISFGGILSPGRSRAFTRKSFHGCLENLYYNGVDVTELAKKHKPQILMMGNVSFSCPQPQTVPVTFLSSRSYLALPGNSGEDKVSVTFQFRTWNRAGHLLFGELQRGSGSFVLFLKDGKLKLSLFQAGQSPRNVTAGAGLNDGQWHSVSFSAKWSHMNVVVDDDTAVQPLVAVLIDSGDTYYFGGCLGNSSGSGCKSPLGGFQGCLRLITIGDKAVDPILVQQGALGSFRDLQIDSCGITDRCLPSYCEHGGECSQSWDTFSCDCLGTGYTGETCHSSLYEQSCEAHKHRGNPSGLYYIDADGSGPLGPFLVYCNMTDSAWTVVRHGGPDAVTLRGAPSGHPLSAVSFAYAAGAGQLRAAVNLAERCEQRLALRCGTARRPDSRDGTPLSWWVGRTNETHTSWGGSLPDAQKCTCGLEGNCIDSQYYCNCDAGQNEWTSDTIVLSQKEHLPVTQIVMTDTGQPHSEADYTLGPLLCRGDKSFWNSASFNTETSYLHFPAFHGELTADVCFFFKTTVSSGVFMENLGITDFIRIELRAPTEVTFSFDVGNGPCEVTVQSPTPFNDNQWHHVRAERNVKGASLQVDQLPQKMQPAPADGHVRLQLNSQLFIEISAYFATGSSMTYHFQEHYTLSENSSSLVSSLHRDVTLTREMITLSFRTTRTPSLLLYVSSFYEEYLSVILANNGSLQIRYKLDRHQNPDAFTFDFKNMADGQLHQVKINREEAVVMVEVNQSAKKQVILSSGTEFNAVKSLILGKVLEAAGADPDTRRAATSGFTGCLSAVRFGCAAPLKAALRPSGPSRVTVRGHVAPMARCAAGAASGSPARELAPRLAGGAGRSGPVDEGEPLVNADRRDSAVIGGVIAVEIFILLCITAIAIRIYQQRKLRKENESKVSKKEEC

SEQ ID NO: 3174 - protein, 652 aa, Homo sapiens
MASVAWAVLKVLLLLPTQTWSPVGAGNPPDCDSPLASALPRSSFSSSSELSSSHGPGFSRLNRRDGAGGWTPLVSNKYQWLQIDLGERMEVTAVATQGGYGSSDWVTSYLLMFSDGGRNWKQYRREESIWGFPGNTNADSVVHYRLQPPFEARFLRFLPLAWNPRGRIGMRIEVYGCAYKSEVVYFDGQSALLYTLDKKPLKPIRDVISLKFKAMQSNGILLHREGQHGNHITLELIKGKLVFFLNSGNAKLPSTIAPVTLTLGSLLDDQHWHSVLIELLDTQVNFTVDKHTHHFQAKGDSSNLDLNFEISFGGILSPGRSRAFTRKSFHGCLENLYYNGVDVTELAKKHKPQILMMGNVSFSCPQPQTVPVTFLSSRSYLALPGNSGEDKVSVTFQFRTWNRAGHLLFGELQRGSGSFVLFLKDGKLKLSLFQAGQSPRNVTAGAGLNDGQWHSVSFSAKWSHMNVVVDDDTAVQPLVAVLIDSGDTYYFGALYEQSCEAHKHRGNPSGLYYIDADGSGPLGPFLVYCNMTDSAWTVVRHGGPDAVTLRGAPSGHPLSAVSFAYAAGAGQLRAAVNLAERCEQRLALRCGTARRPDSRDGTPLSWWVGRTNETHTSWGGSLPDAQKCTCGLEGNCIDSQYYCNCDAGQNEW

SEQ ID NO: 3175 - protein, 966 aa, Homo sapiens
MASVAWAVLKVLLLLPTQTWSPVGAGNPPDCDSPLASALPRSSFSSSSELSSSHGPGFSRLNRRDGAGGWTPLVSNKYQWLQIDLGERMEVTAVATQGGYGSSDWVTSYLLMFSDGGRNWKQYRREESIWGFPGNTNADSVVHYRLQPPFEARFLRFLPLAWNPRGRIGMRIEVYGCAYKSEVVYFDGQSALLYTLDKKPLKPIRDVISLKFKAMQSNGILLHREGQHGNHITLELIKGKLVFFLNSGNAKLPSTIAPVTLTLGSLLDDQHWHSVLIELLDTQVNFTVDKHTHHFQAKGDSSNLDLNFEISFGGILSPGRSRAFTRKSFHGCLENLYYNGVDVTELAKKHKPQILMMGNVSFSCPQPQTVPVTFLSSRSYLALPGNSGEDKVSVTFQFRTWNRAGHLLFGELQRGSGSFVLFLKDGKLKLSLFQAGQSPRNVTAGAGLNDGQWHSVSFSAKWSHMNVVVDDDTAVQPLVAVLIDSGDTYYFGALYEQSCEAHKHRGNPSGLYYIDADGSGPLGPFLVYCNMTDSAWTVVRHGGPDAVTLRGAPSGHPLSAVSFAYAAGAGQLRAAVNLAERCEQRLALRCGTARRPDSRDGTPLSWWVGRTNETHTSWGGSLPDAQKCTCGLEGNCIDSQYYCNCDAGQNEWTSDTIVLSQKEHLPVTQIVMTDTGQPHSEADYTLGPLLCRGDKSFWNSASFNTETSYLHFPAFHGELTADVCFFFKTTVSSGVFMENLGITDFIRIELRAPTEVTFSFDVGNGPCEVTVQSPTPFNDNQWHHVRAERNVKGASLQVDQLPQKMQPAPADGHVRLQLNSQLFIGGTATRQRGFLGCIRSLQLNGVALDLEERATVTPGVEPGCAGHCSTYGHLCRNGGRCREKRRGVTCDCAFSAYDGPFCSNEISAYFATGSSMTYHFQEHYTLSENSSSLVSSLHRDVTLTREMITLSFRTTRTPSLLLKFAD

SEQ ID NO: 3176 - protein, 180 aa, Homo sapiens
  VARIANT 1: note = misc_feature - Xaa can be any naturally occurring amino acid
XRDVTLTREMITLSFRTTRTPSLLLYVSSFYEEYLSVILANNGSLQIRYKLDRHQNPDAFTFDFKNMADGQLHQVKINREEAVVMVEVNQSAKKQVILSSGTEFNAVKSLILGKVLGRSGPVDEGEPLVNADRRDSAVIGGVIAVEIFILLCITAIAIRIYQQRKLRKENESKVSKKEEC

SEQ ID NO: 3177 - protein, 167 aa, Homo sapiens
  VARIANT 1: note = misc_feature - Xaa can be any naturally occurring amino acid
XSAAPGLTRTSDTIVLSQKEHLPVTQIVMTDTGQPHSEADYTLGPLLCRGDTRLLKVWRRESVIFEIFPSLFGRLRWEDGLSQGVQHKPGQDESFWNSASFNTETSYLHFPAFHGELTADVCFFFKTTVSSGVFMENLGITDFIRIELRGRLATLDKSQGTHYLAIK

SEQ ID NO: 3178 - protein, 116 aa, Homo sapiens
MAINRFRLENDLEELALYQIQLLKDLRHTENEEDKVSSSSFRQRMLGNLLRPPYERPELPTCLYVIGLTGISGSGKSSIAQRLKGLGAFVIDSDHLGHRAYAPGGPAYQPVVEAFG

SEQ ID NO: 3179 - protein, 91 aa, Homo sapiens
MAVFRSGLLVLTTPLASLAPRLASILTSAARLVNHTLYVHLQPGMSLEGPAQPQSSPVQATFEVLDFITHLYAGADVHRHLDVRILLTNIR

SEQ ID NO: 3180 - protein, 147 aa, Homo sapiens
MAVFRSGLLVLTTPLASLAPRLASILTSAARLVNHTLYVHLQPGMSLEGPAQPQSSPVQATFEVLDFITHLYAGADVHRHLDVRILLTNIRTKSTFLPPLPTSVQNLAHPPEVVLTDFQTLDGSQYNPVKQQLVRYATSCYSCCPRL

SEQ ID NO: 3181 - protein, 219 aa, Homo sapiens
MAVFRSGLLVLTTPLASLAPRLASILTSAARLVNHTLYVHLQPGMSLEGPAQPQSSPVQATFEVLDFITHLYAGADVHRHLDVRILLTNIRTKSTFLPPLPTSVQNLAHPPEVVLTDFQTLDGSQYNPVKQQLVRYATSCYSCCPRLASVLLYSDYGIGEVPVEPLDVPLPSTIRPASPVAGSPKQPVRGYYRGAVGGTFDRLHNAHKVLLSVACILAQ

SEQ ID NO: 3182 - protein, 564 aa, Homo sapiens
MAVFRSGLLVLTTPLASLAPRLASILTSAARLVNHTLYVHLQPGMSLEGPAQPQSSPVQATFEVLDFITHLYAGADVHRHLDVRILLTNIRTKSTFLPPLPTSVQNLAHPPEVVLTDFQTLDGSQYNPVKQQLVRYATSCYSCCPRLASVLLYSDYGIGEVPVEPLDVPLPSTIRPASPVAGSPKQPVRGYYRGAVGGTFDRLHNAHKVLLSVACILAQEQLVVGVADKDLLKSKLLPELLQPYTERVEHLSEFLVDIKPSLTFDVIPLLDPYGPAGSDPSLEFLVVSEETYRGGMAINRFRLENDLEELALYQIQLLKDLRHTENEEDKVSSSSFRQRMLGNLLRPPYERPELPTCLYVIGLTGISGSGKSSIAQRLKGLGAFVIDSDHLGHRAYAPGGPAYQPVVEAFGTDILHKDGIINRKVLGSRVFGNKKQLKILTDIMWPIIAKLAREEMDRAVAEGKRVCVIDAAVLLEAGWQNLVHEVWTAVIPETEAVRRIVERDGLSEAAAQSRLQSQMSGQQLVEQSHVVLSTLWEPHITQRQVEKAWALLQKRIPKTHQALD

SEQ ID NO: 3183 - protein, 564 aa, Homo sapiens; identical to SEQ ID NO: 3182

SEQ ID NO: 3184 - protein, 98 aa, Homo sapiens
MRTPRLRAQPRGAVYQAPSPPPAPVGLGSMAVFRSGLLVLTTPLASLAPRLASILTSAARLVNHTLYVHLQPGMSLEGPAQPQSSPVQATFEVLDFIT

SEQ ID NO: 3185 - protein, 128 aa, Homo sapiens
MRTPRLRAQPRGAVYQAPSPPPAPVGLGSMAVFRSGLLVLTTPLASLAPRLASILTSAARLVNHTLYVHLQPGMSLEGPAQPQSSPVQATFEVLDFITHLYAGADVHRHLDVRILLTNIRTKSTFLPP

SEQ ID NO: 3186 - protein, 593 aa, Homo sapiens
MRTPRLRAQPRGAVYQAPSPPPAPVGLGSMAVFRSGLLVLTTPLASLAPRLASILTSAARLVNHTLYVHLQPGMSLEGPAQPQSSPVQATFEVLDFITHLYAGADVHRHLDVRILLTNIRTKSTFLPPLPTSVQNLAHPPEVVLTDFQTLDGSQYNPVKQQLVRYATSCYSCCPRLASVLLYSDYGIGEVPVEPLDVPLPSTIRPASPVAGSPKQPVRGYYRGAVGGTFDRLHNAHKVLLSVACILAQEQLVVGVADKDLLKSKLLPELLQPYTERVEHLSEFLVDIKPSLTFDVIPLLDPYGPAGSDPSLEFLVVSEETYRGGMAINRFRLENDLEELALYQIQLLKDLRHTENEEDKVSSSSFRQRMLGNLLRPPYERPELPTCLYVIGLTGISGSGKSSIAQRLKGLGAFVIDSDHLGHRAYAPGGPAYQPVVEAFGTDILHKDGIINRKVLGSRVFGNKKQLKILTDIMWPIIAKLAREEMDRAVAEGKRVCVIDAAVLLEAGWQNLVHEVWTAVIPETEAVRRIVERDGLSEAAAQSRLQSQMSGQQLVEQSHVVLSTLWEPHITQRQVEKAWALLQKRIPKTHQALD

SEQ ID NO: 3187 - protein, 96 aa, Homo sapiens
MRTPRLRAQPRGAVYQAPSPPPAPVVQNLAHPPEVVLTDFQTLDGSQYNPVKQQLVRYATSCYSCCPRLASVLLYSDYGIGEVPVEPLDVPLPSTI

SEQ ID NO: 3188 - protein, 438 aa, Homo sapiens
MLSRWSASFTVTKGKSSTQEATGQAVSTAHPPTGKRLKKTPEKKTGNKDCKADIAFLIDGSFNIGQRRFNLQKNFVGKVALMLGIGTEGPHVGLVQASEHPKIEFYLKNFTSAKDVLFAIKEVGFRGGNSNTGKALKHTAQKFFTVDAGVRKGIPKVVVVFIDGWPSDDIEEAGIVAREFGVNVFIVSVAKPIPEELGMVQDVTFVDKAVCRNNGFFSYHMPNWFGTTKYVKPLVQKLCTHEQMMCSKTCYNSVNIAFLIDGSSSVGDSNFRLMLEFVSNIAKTFEISDIGAKIAAVQFTYDQRTEFSFTDYSTKENVLAVIRNIRYMSGGTATGDAISFTVRNVFGPIRESPNKNFLVIVTDGQSYDDVQGPAAAAHDAGITIFSVGVAWAPLDDLKDMASKPKESHAFFTREFTGLEPIVSDVIRGICRDFLESQQ

SEQ ID NO: 3189 - protein, 193 aa, Homo sapiens
MSAAWIPALGLAPIAITCFTRGLDIRKEKADVLCPGGCPLEEFSVYGNIVYASVSSICGAAVHRGVISNSGGPVRVYSLPGRENYSSVDANGIQSQMLSRWSASFTVTKGKSSTQEATGQAVSTAHPPTGKRLKKTPEKKTGNKDCKADIAFLIDGSFNIGQRRFNLQKNFVGKVALMLGIGTEGPHVGLVQA

SEQ ID NO: 3190 - protein, 80 aa, Homo sapiens
MSAAWIPALGLGVCLLLLPGPAGSEGAAPIAITCFTRGLDIRKEKADVLCPGGCPLEEFSVYGNIVYASVSSICGAAVHR

SEQ ID NO: 3191 - protein, 513 aa, Homo sapiens
MSAAWIPALGLGVCLLLLPGPAGSEGAAPIAITCFTRGLDIRKEKADVLCPGGCPLEEFSVYGNIVYASVSSICGAAVHRGVISNSGGPVRVYSLPGRENYSSVDANGIQSQMLSRWSASFTVTKGKSSTQEATGQAVSTAHPPTGKRLKKTPEKKTGNKDCKADIAFLIDGSFNIGQRRFNLQKNFVGKVALMLGIGTEGPHVGLVQASEHPKIEFYLKNFTSAKDVLFAIKEVGFRGGNSNTDVAERMSSTTVDSEERLLRGKALKHTAQKFFTVDAGVRKGIPKVVVVFIDGWPSDDIEEAGIVAREFGVNVFIVSVAKPIPEELGMVQDVTFVDKAVCRNNGFFSYHMPNWFGTTKYVKPLVQKLCTHEQMMCSKTCYNSVNIAFLIDGSSSVGDSNFRLMLEFVSNIAKTFEISDIGAKIAAVQFTYDQRTEFSFTDYSTKENVLAVIRNIRYMSGGTATGDAISFTVRNVFGPIRESPNKNFLVIVTDGQSYDDVQGPAAAAHDAAK

SEQ ID NO: 3192 - protein, 550 aa, Homo sapiens
MSAAWIPALGLGVCLLLLPGPAGSEGAAPIAITCFTRGLDIRKEKADVLCPGGCPLEEFSVYGNIVYASVSSICGAAVHRGVISNSGGPVRVYSLPGRENYSSVDANGIQSQMLSRWSASFTVTKGKSSTQEATGQAVSTAHPPTGKRLKKTPEKKTGNKDCKADIAFLIDGSFNIGQRRFNLQKNFVGKVALMLGIGTEGPHVGLVQASEHPKIEFYLKNFTSAKDVLFAIKEVGFRGGNSNTGKALKHTAQKFFTVDAGVRKGIPKVVVVFIDGWPSDDIEEAGIVAREFGVNVFIVSVAKPIPEELGMVQDVTFVDKAVCRNNGFFSYHMPNWFGTTKYVKPLVQKLCTHEQMMCSKTCYNSVNIAFLIDGSSSVGDSNFRLMLEFVSNIAKTFEISDIGAKIAAVQFTYDQRTEFSFTDYSTKENVLAVIRNIRYMSGGTATGDAISFTVRNVFGPIRESPNKNFLVIVTDGQSYDDVQGPAAAAHDAGITIFSVGVAWAPLDDLKDMASKPKESHAFFTREFTGLEPIVSDVIRGICRDFLESQQ

SEQ ID NO: 3193 - protein, 494 aa, Homo sapiens
MSAAWIPALGLGVCLLLLPGPAGSEGAAPIAITCFTRGLDIRKEKADVLCPGGCPLEEFSVYGNIVYASVSSICGAAVHRGVISNSGGPVRVYSLPGRENYSSVDANGIQSQMLSRWSASFTVTKGKSSTQEATGQAVSTAHPPTGKRLKKTPEKKTGNKDCKADIAFLIDGSFNIGQRRFNLQKNFVGKVALMLGIGTEGPHVGLVQASEHPKIEFYLKNFTSAKDVLFAIKEVGFRGGNSNTGKALKHTAQKFFTVDAGVRKGIPKVVVVFIDGWPSDDIEEAGIVAREFGVNVFIVSVAKPIPEELGMVQDVTFVDKAVCRNNGFFSYHMPNWFGTTKYVKPLVQKLCTHEQMMCSKTCYNSVNIAFLIDGSSSVGDSNFRLMLEFVSNIAKTFEISDIGAKIAAVQFTYDQRTEFSFTDYSTKENVLAVIRNIRYMSGGTATGDAISFTVRNVFGPIRESPNKNFLVIVTDGQSYDDVQGPAAAAHDAAK

SEQ ID NO: 3194 - protein, 550 aa, Homo sapiens; identical to SEQ ID NO: 3192

SEQ ID NO: 3195 - protein, 550 aa, Homo sapiens; identical to SEQ ID NO: 3192

SEQ ID NO: 3196 - protein, 615 aa, Homo sapiens
MSAAWIPALGLGVCLLLLPGPAGSEGAGEWGSWGASRRSQGLSTSGYKRDSDPAPWASALPPEEEGAKVEPPRGAPALTPAADLLLLTCFSHAPIAITCFTRGLDIRKEKADVLCPGGCPLEEFSVYGNIVYASVSSICGAAVHRGVISNSGGPVRVYSLPGRENYSSVDANGIQSQMLSRWSASFTVTKGKSSTQEATGQAVSTAHPPTGKRLKKTPEKKTGNKDCKADIAFLIDGSFNIGQRRFNLQKNFVGKVALMLGIGTEGPHVGLVQASEHPKIEFYLKNFTSAKDVLFAIKEVGFRGGNSNTGKALKHTAQKFFTVDAGVRKGIPKVVVVFIDGWPSDDIEEAGIVAREFGVNVFIVSVAKPIPEELGMVQDVTFVDKAVCRNNGFFSYHMPNWFGTTKYVKPLVQKLCTHEQMMCSKTCYNSVNIAFLIDGSSSVGDSNFRLMLEFVSNIAKTFEISDIGAKIAAVQFTYDQRTEFSFTDYSTKENVLAVIRNIRYMSGGTATGDAISFTVRNVFGPIRESPNKNFLVIVTDGQSYDDVQGPAAAAHDAGITIFSVGVAWAPLDDLKDMASKPKESHAFFTREFTGLEPIVSDVIRGICRDFLESQQ

SEQ ID NO: 3197 - protein, 202 aa, Homo sapiens
MSAAWIPALGLGVCLLLLPGPAGSEGAGKRLKKTPEKKTGNKDCKADIAFLIDGSFNIGQRRFNLQKNFVGKVALMLGIGTEGPHVGLVQASEHPKIEFYLKNFTSAKDVLFAIKEVGFRGGNSNTGKALKHTAQKFFTVDAGVRKGIPKVVVVFIDGWPSDDIEEAGIVAREFGVNVFIVSVAKPIPEELGMVQDVTFVDK

SEQ ID NO: 3198 - protein, 55 aa, Homo sapiens
PIAITCFTRGLDIRKEKADVLCPGGCPLEEFSVYGNIVYASVSSICGAAVHRRQK

SEQ ID NO: 3199 - protein, 434 aa, Homo sapiens
  VARIANT 1: note = misc_feature - Xaa can be any naturally occurring amino acid
XCKADIAFLIDGSFNIGQRRFNLQKNFVGKVALMLGIGTEGPHVGLVQASEHPKIEFYLKNFTSAKDVLFAIKEVGFRGGNSNTDITLEKYLFVMLKRSENQQTYLMNADVAERMSSTTVDSEERLLRGKALKHTAQKFFTVDAGVRKGIPKVVVVFIDGWPSDDIEEAGIVAREFGVNVFIVSVAKPIPEELGMVQDVTFVDKAVCRNNGFFSYHMPNWFGTTKYVKPLVQKLCTHEQMMCSKTCYNSVNIAFLIDGSSSVGDSNFRLMLEFVSNIAKTFEISDIGAKIAAVQFTYDQRTEFSFTDYSTKENVLAVIRNIRYMSGGTATGDAISFTVRNVFGPIRESPNKNFLVIVTDGQSYDDVQGPAAAAHDAGITIFSVGVAWAPLDDLKDMASKPKESHAFFTREFTGLEPIVSDVIRGICRDFLESQQ

SEQ ID NO: 3200 - protein, 828 aa, Homo sapiens
MAEAALLLLPEAAAERDAREKLALWDRRPDTTAPLTDRQTDSVLELKAAAENLPVPAELPIEDLCSLTSQSLPIELTSVVPESTEDILLKGFTSLGMEEERIETAQQFFSWFAKLQTQMDQDEGTKYRQMRDYLSGFQEQCDAILNDVNSALQHLESLQKQYLFVSNKTGTLHEACEQLLKEQSELVDLAENIQQKLSYFNELETINTKLNSPTLSVNSDGFIPMLAKLDDCITYISSHPNFKDYPIYLLKFKQCLSKALHLMKTYTVNTLQTLTSQLLKRDPSSVPNADNAFTLFYVKFRAAAPKVRTLIEQIELRSEKIPEYQQLLNDIHQCYLDQRELLLGPSIACTVAELTSQNNRDHCALVRSGCAFMVHVCQDEHQLYNEFFTKPTSKLDELLEKLCVSLYDVFRPLIIHVIHLETLSELCGILKNEVLEDHVQNNAEQLGAFAAGVKQMLEDVQERLVYRTHIYIQTDITGYKPAPGDLAYPDKLVMMEQIAQSLKDEQKKVPSEASFSDVHLEEGESNSLTKSGSTESLNPRPQTTISPADLHGMWYPTVRRTLVCLSKLYRCIDRAVFQGLSQEALSACIQSLLGASESISKNKTQIDGQLFLIKHLLILREQIAPFHTEFTIKEISLDLKKTRDAAFKILNPMTVPRFFRLNSNNALIEFLLEGTPEIREHYLDSKKDVDRHLKSACEQFIQQQTKLFVEQLEEFMTKVSALKTMASQGGPKYTLSQQPWAQPAKVNDLAATAYKTIKTKLPVTLRSMSLYLSNKDTEFILFKPVRNNIQQVFQKFHALLKEEFSPEDIQIIACPSMEQLSLLLLVSK

SEQ ID NO: 3201 - protein, 444 aa, Homo sapiens
MAEAALLLLPEAAAERDAREKLALWDRRPDTTAPLTDRQTDSVLELKAAAENLPVPAELPIEDLCSLTSQSLPIELTSVVPESTEDILLKGFTSLGMEEERIETAQQFFSWFAKLQTQMDQDEGTKYRQMRDYLSGFQEQCDAILNDVNSALQHLESLQKQYLFVSNKTGTLHEACEQLLKEQSELVDLAENIQQKLSYFNELETINTKLNSPTLSVNSDGFIPMLAKLDDCITYISSHPNFKDYPIYLLKFKQCLSKALHLMKTYTVNTLQTLTSQLLKRDPSSVPNADNAFTLFYVKFRAAAPKVRTLIEQIELRSEKIPEYQQLLNDIHQCYLDQRELLLGPSIACTVAELTSQNNRDHCALVRSGCAFMVHVCQDEHQLYNEFFTKPTSKLDELLEKLCVSLYDVFRPLIIHVIHLETLSELCGILKNEVLEDHVQNNGK

SEQ ID NO: 3202 - protein, 85 aa, Homo sapiens
PEAAAERDAREKLALWDRRPDTTAPLTDRQTDSVLELKAAAENLPVPAEDMVPEVDLKSMKAQVEISLAQLSNSFIPWIIKVVCS

SEQ ID NO: 3203 - protein, 68 aa, Homo sapiens
  VARIANT 1: note = misc_feature - Xaa can be any naturally occurring amino acid
XIDGQLFLIKHLLILREQIAPFHTEFTIKEISLDLKKTRGFSVKNNGQSGRPQVYSLTAALGTTSKGQ

SEQ ID NO: 3204 - protein, 51 aa, Homo sapiens
MLPQIPFLLLVSLNLVHGVFYAERYQMPTGIKGPLPNTKTQFFIPYTIKSK

SEQ ID NO: 3205 - protein, 216 aa, Homo sapiens
MLPQIPFLLLVSLNLVHGVFYAERYQMPTGIKGPLPNTKTQFFIPYTIKSKGIAVRGEQGTPGPPGPAGPRGHPGPSGPPGKPGYGSPGLQGEPGLPGPPGPSAVGKPGVPGLPGKPGERGPYGPKGDVGPAGLPGPRGPPGPPGIPGPAGISVPGKPGQQGPTGAPGPRGFPGEKGAPGVPGMNGQKGEMGYGAPGRPGERGLPGPQGPTGPSGP

SEQ ID NO: 3206 - protein, 680 aa, Homo sapiens
MLPQIPFLLLVSLNLVHGVFYAERYQMPTGIKGPLPNTKTQFFIPYTIKSKGIAVRGEQGTPGPPGPAGPRGHPGPSGPPGKPGYGSPGLQGEPGLPGPPGPSAVGKPGVPGLPGKPGERGPYGPKGDVGPAGLPGPRGPPGPPGIPGPAGISVPGKPGQQGPTGAPGPRGFPGEKGAPGVPGMNGQKGEMGYGAPGRPGERGLPGPQGPTGPSGPPGVGKRGENGVPGQPGIKGDRGFPGEMGPIGPPGPQGPPGERGPEGIGKPGAAGAPGQPGIPGTKGLPGAPGIAGPPGPPGFGKPGLPGLKGERGPAGLPGGPGAKGEQGPAGLPGKPGLTGPPGNMGPQGPKGIPGSHGLPGPKGETGPAGPAGYPGAKGERGSPGSDGKPGYPGKPGLDGPKGNPGLPGPKGDPGVGGPPGLPGPVGPAGAKGMPGHNGEAGPRGAPGIPGTRGPIGPPGIPGFPGSKGDPGSPGPPGPAGIATKGLNGPTGPPGPPGPRGHSGEPGLPGPPGPPGPPGQAVMPEGFIKAGQRPSLSGTPLVSANQGVTGMPVSAFTVILSKAYPAIGTPIPFDKILYNRQQHYDPRTGIFTCQIPGIYYFSYHVHVKGTHVWVGLYKNGTPVMYTYDEYTKGYLDQASGSAIIDLTENDQVWLQLPNAESNGLYSSEYVHSSFSGFLVAPM

SEQ ID NO: 3207 - protein, 680 aa, Homo sapiens; identical to SEQ ID NO: 3206

SEQ ID NO: 3208 - protein, 1767 aa, Homo sapiens
MEPWSSRWKTKRWLWDFTVTTLALTFLFQAREVRGAAPVDVLKALDFHNSPEGISKTTGFCTNRKNSKGSDTAYRVSKQAQLSAPTKQLFPGGTFPEDFSILFTVKPKKGIQSFLLSIYNEHGIQQIGVEVGRSPVFLFEDHTGKPAPEDYPLFRTVNIADGKWHRVAISVEKKTVTMIVDCKKKTTKPLDRSERAIVDTNGITVFGTRILDEEVFEGDIQQFLITGDPKAAYDYCEHYSPDCDSSAPKAAQAQEPQIDEANIVDDFQEYNYGTMESYQTEAPRHVSGTNEPNPVEEIFTEEYLTGEDYDSQRKNSEDTLYENKEIDGRDSDLLVDGDLGEYDFYEYKEYEDKPTSPPNEEFGPGVPAETDITETSINGHGAYGEKGQKGEPAVVEPGMLVEGPPGPAGPAGIMGPPGLQGPTGPPGDPGDRGPPGRPGLPGADGLPGPPGTMLMLPFRYGGDGSKGPTISAQEAQAQAILQQARIALRGPPGPMGLTGRPGPVGGPGSSGAKGESGDPGPQGPRGVQGPPGPTGKPGKRGRPGADGGRGMPGEPGAKGDRGFDGLPGLPGDKGHRGERGPQGPPGPPGDDGMRGEDGEIGPRGLPGEAGPRGLLGPRGTPGAPGQPGMAGVDGPPGPKGNMGPQGEPGPPGQQGNPGPQGLPGPQGPIGPPGEKGPQGKPGLAGLPGADGPPGHPGKEGQSGEKGALGPPGPQGPIGYPGPRGVKGADGVRGLKGSKGEKGEDGFPGFKGDMGLKGDRGEVGQIGPRGEDGPEGPKGRAGPTGDPGPSGQAGEKGKLGVPGLPGYPGRQGPKGSTGFPGFPGANGEKGARGVAGKPGPRGQRGPTGPRGSRGARGPTGKPGPKGTSGGDGPPGPPGERGPQGPQGPVGFPGPKGPPGPPGKDGLPGHPGQRGETGFQGKTGPPGPGGVVGPQGPTGETGPIGERGHPGPPGPPGEQGLPGAAGKEGAKGDPGPQGISGKDGPAGLRGFPGERGLPGAQGAPGLKGGEGPQGPPGPVGSPGERGSAGTAGPIGLPGRPGPQGPPGPAGEKGAPGEKGPQGPAGRDGVQGPVGLPGPAGPAGSPGEDGDKGEIGEPGQKGSKGDKGENGPPGPPGLQGPVGAPGIAGGDGEPGPRGQQGMFGQKGDEGARGFPGPPGPIGLQGLPGPPGEKGENGDVGPMGPPGPPGPRGPQGPNGADGPQGPPGSVGSVGGVGEKGEPGEAGNPGPPGEAGVGGPKGERGEKGEAGPPGAAGPPGAKGPPGDDGPKGNPGPVGFPGDPGPPGEPGPAGQDGVGGDKGEDGDPGQPGPPGPSGEAGPPGPPGKRGPPGAAGAEGRQGEKGAKGEAGAEGPPGKTGPVGPQGPAGKPGPEGLRGIPGPVGEQGLPGAAGQDGPPGPMGPPGLPGLKGDPGSKGEKGHPGLIGLIGPPGEQGEKGDRGLPGTQGSPGAKGDGGIPGPAGPLGPPGPPGLPGPQGPKGNKGSTGPAGQKGDSGLPGPPGSPGPPGEVIQPLPILSSKKTRRHTEGMQADADDNILDYSDGMEEIFGSLNSLKQDIEHMKFPMGTQTNPARTCKDLQLSHPDFPDGEYWIDPNQGCSGDSFKVYCNFTSGGETCIYPDKKSEGVRISSWPKEKPGSWFSEFKRGKLLSYLDVEGNSINMVQMTFLKLLTASARQNFTYHCHQSAAWYDVSSGSYDKALRFLGSNDEEMSYDNNPFIKTLYDGCASRKGYEKTVIEINTPKIDQVPIVDVMINDFGDQNQKFGFEVGPVCFLG

SEQ ID NO: 3209 - protein, 1806 aa, Homo sapiens
MEPWSSRWKTKRWLWDFTVTTLALTFLFQAREVRGAAPVDVLKALDFHNSPEGISKTTGFCTNRKNSKGSDTAYRVSKQAQLSAPTKQLFPGGTFPEDFSILFTVKPKKGIQSFLLSIYNEHGIQQIGVEVGRSPVFLFEDHTGKPAPEDYPLFRTVNIADGKWHRVAISVEKKTVTMIVDCKKKTTKPLDRSERAIVDTNGITVFGTRILDEEVFEGDIQQFLITGDPKAAYDYCEHYSPDCDSSAPKAAQAQEPQIDEYAPEDIIEYDYEYGEAEYKEAESVTEGPTVTEETIAQTEANIVDDFQEYNYGTMESYQTEAPRHVSGTNEPNPVEEIFTEEYLTGEDYDSQRKNSEDTLYENKEIDGRDSDLLVDGDLGEYDFYEYKEYEDKPTSPPNEEFGPGVPAETDITETSINGHGAYGEKGQKGEPAVVEPGMLVEGPPGPAGPAGIMGPPGLQGPTGPPGDPGDRGPPGRPGLPGADGLPGPPGTMLMLPFRYGGDGSKGPTISAQEAQAQAILQQARIALRGPPGPMGLTGRPGPVGGPGSSGAKGESGDPGPQGPRGVQGPPGPTGKPGKRGRPGADGGRGMPGEPGAKGDRGFDGLPGLPGDKGHRGERGPQGPPGPPGDDGMRGEDGEIGPRGLPGEAGPRGLLGPRGTPGAPGQPGMAGVDGPPGPKGNMGPQGEPGPPGQQGNPGPQGLPGPQGPIGPPGEKGPQGKPGLAGLPGADGPPGHPGKEGQSGEKGALGPPGPQGPIGYPGPRGVKGADGVRGLKGSKGEKGEDGFPGFKGDMGLKGDRGEVGQIGPRGEDGPEGPKGRAGPTGDPGPSGQAGEKGKLGVPGLPGYPGRQGPKGSTGFPGFPGANGEKGARGVAGKPGPRGQRGPTGPRGSRGARGPTGKPGPKGTSGGDGPPGPPGERGPQGPQGPVGFPGPKGPPGPPGKDGLPGHPGQRGETGFQGKTGPPGPGGVVGPQGPTGETGPIGERGHPGPPGPPGEQGLPGAAGKEGAKGDPGPQGISGKDGPAGLRGFPGERGLPGAQGAPGLKGGEGPQGPPGPVGSPGERGSAGTAGPIGLPGRPGPQGPPGPAGEKGAPGEKGPQGPAGRDGVQGPVGLPGPAGPAGSPGEDGDKGEIGEPGQKGSKGDKGENGPPGPPGLQGPVGAPGIAGGDGEPGPRGQQGMFGQKGDEGARGFPGPPGPIGLQGLPGPPGEKGENGDVGPMGPPGPPGPRGPQGPNGADGPQGPPGSVGSVGGVGEKGEPGEAGNPGPPGEAGVGGPKGERGEKGEAGPPGAAGPPGAKGPPGDDGPKGNPGPVGFPGDPGPPGEPGPAGQDGVGGDKGEDGDPGQPGPPGPSGEAGPPGPPGKRGPPGAAGAEGRQGEKGAKGEAGAEGPPGKTGPVGPQGPAGKPGPEGLRGIPGPVGEQGLPGAAGQDGPPGPMGPPGLPGLKGDPGSKGEKGHPGLIGLIGPPGEQGEKGDRGLPGTQGSPGAKGDGGIPGPAGPLGPPGPPGLPGPQGPKGNKGSTGPAGQKGDSGLPGPPGSPGPPGEVIQPLPILSSKKTRRHTEGMQADADDNILDYSDGMEEIFGSLNSLKQDIEHMKFPMGTQTNPARTCKDLQLSHPDFPDGEYWIDPNQGCSGDSFKVYCNFTSGGETCIYPDKKSEGVRISSWPKEKPGSWFSEFKRGKLLSYLDVEGNSINMVQMTFLKLLTASARQNFTYHCHQSAAWYDVSSGSYDKALRFLGSNDEEMSYDNNPFIKTLYDGCASRKGYEKTVIEINTPKIDQVPIVDVMINDFGDQNQKFGFEVGPVCFLG

SEQ ID NO: 3210 - protein, 1818 aa, Homo sapiens
MEPWSSRWKTKRWLWDFTVTTLALTFLFQAREVRGAAPVDVLKALDFHNSPEGISKTTGFCTNRKNSKGSDTAYRVSKQAQLSAPTKQLFPGGTFPEDFSILFTVKPKKGIQSFLLSIYNEHGIQQIGVEVGRSPVFLFEDHTGKPAPEDYPLFRTVNIADGKWHRVAISVEKKTVTMIVDCKKKTTKPLDRSERAIVDTNGITVFGTRILDEEVFEGDIQQFLITGDPKAAYDYCEHYSPDCDSSAPKAAQAQEPQIDEKKKSNFKKKMRTVATKSKEKSKKFTPPKSEKFSSKKKKSYQASAKAKLGVKANIVDDFQEYNYGTMESYQTEAPRHVSGTNEPNPVEEIFTEEYLTGEDYDSQRKNSEDTLYENKEIDGRDSDLLVDGDLGEYDFYEYKEYEDKPTSPPNEEFGPGVPAETDITETSINGHGAYGEKGQKGEPAVVEPGMLVEGPPGPAGPAGIMGPPGLQGPTGPPGDPGDRGPPGRPGLPGADGLPGPPGTMLMLPFRYGGDGSKGPTISAQEAQAQAILQQARIALRGPPGPMGLTGRPGPVGGPGSSGAKGESGDPGPQGPRGVQGPPGPTGKPGKRGRPGADGGRGMPGEPGAKGDRGFDGLPGLPGDKGHRGERGPQGPPGPPGDDGMRGEDGEIGPRGLPGEAGPRGLLGPRGTPGAPGQPGMAGVDGPPGPKGNMGPQGEPGPPGQQGNPGPQGLPGPQGPIGPPGEKGPQGKPGLAGLPGADGPPGHPGKEGQSGEKGALGPPGPQGPIGYPGPRGVKGADGVRGLKGSKGEKGEDGFPGFKGDMGLKGDRGEVGQIGPRGEDGPEGPKGRAGPTGDPGPSGQAGEKGKLGVPGLPGYPGRQGPKGSTGFPGFPGANGEKGARGVAGKPGPRGQRGPTGPRGSRGARGPTGKPGPKGTSGGDGPPGPPGERGPQGPQGPVGFPGPKGPPGPPGKDGLPGHPGQRGETGFQGKTGPPGPGGVVGPQGPTGETGPIGERGHPGPPGPPGEQGLPGAAGKEGAKGDPGPQGISGKDGPAGLRGFPGERGLPGAQGAPGLKGGEGPQGPPGPVGSPGERGSAGTAGPIGLPGRPGPQGPPGPAGEKGAPGEKGPQGPAGRDGVQGPVGLPGPAGPAGSPGEDGDKGEIGEPGQKGSKGDKGENGPPGPPGLQGPVGAPGIAGGDGEPGPRGQQGMFGQKGDEGARGFPGPPGPIGLQGLPGPPGEKGENGDVGPMGPPGPPGPRGPQGPNGADGPQGPPGSVGSVGGVGEKGEPGEAGNPGPPGEAGVGGPKGERGEKGEAGPPGAAGPPGAKGPPGDDGPKGNPGPVGFPGDPGPPGEPGPAGQDGVGGDKGEDGDPGQPGPPGPSGEAGPPGPPGKRGPPGAAGAEGRQGEKGAKGEAGAEGPPGKTGPVGPQGPAGKPGPEGLRGIPGPVGEQGLPGAAGQDGPPGPMGPPGLPGLKGDPGSKGEKGHPGLIGLIGPPGEQGEKGDRGLPGTQGSPGAKGDGGIPGPAGPLGPPGPPGLPGPQGPKGNKGSTGPAGQKGDSGLPGPPGSPGPPGEVIQPLPILSSKKTRRHTEGMQADADDNILDYSDGMEEIFGSLNSLKQDIEHMKFPMGTQTNPARTCKDLQLSHPDFPDGEYWIDPNQGCSGDSFKVYCNFTSGGETCIYPDKKSEGVRISSWPKEKPGSWFSEFKRGKLLSYLDVEGNSINMVQMTFLKLLTASARQNFTYHCHQSAAWYDVSSGSYDKALRFLGSNDEEMSYDNNPFIKTLYDGCASRKGYEKTVIEINTPKIDQVPIVDVMINDFGDQNQKFGFEVGPVCFLG

SEQ ID NO: 3211 - protein, 780 aa, Homo sapiens
MEPWSSRWKTKRWLWDFTVTTLALTFLFQAREVRGAAPVDVLKALDFHNSPEGISKTTGFCTNRKNSKGSDTAYRVSKQAQLSAPTKQLFPGGTFPEDFSILFTVKPKKGIQSFLLSIYNEHGIQQIGVEVGRSPVFLFEDHTGKPAPEDYPLFRTVNIADGKWHRVAISVEKKTVTMIVDCKKKTTKPLDRSERAIVDTNGITVFGTRILDEEVFEGDIQQFLITGDPKAAYDYCEHYSPDCDSSAPKAAQAQEPQIDEYAPEDIIEYDYEYGEAEYKEAESVTEGPTVTEETIAQTEKKKSNFKKKMRTVATKSKEKSKKFTPPKSEKFSSKKKKSYQASAKAKLGVKANIVDDFQEYNYGTMESYQTEAPRHVSGTNEPNPVEEIFTEEYLTGEDYDSQRKNSEDTLYENKEIDGRDSDLLVDGDLGEYDFYEYKEYEDKPTSPPNEEFGPGVPAETDITETSINGHGAYGEKGQKGEPAVVEPGMLVEGPPGPAGPAGIMGPPGLQGPTGPPGDPGDRGPPGRPGLPGADGLPGPPGTMLMLPFRYGGDGSKGPTISAQEAQAQAILQQARIALRGPPGPMGLTGRPGPVGGPGSSGAKGESGDPGPQGPRGVQGPPGPTGKPGKRGRPGADGGRGMPGEPGAKGDRGFDGLPGLPGDKGHRGERGPQGPPGPPGDDGMRGEDGEIGPRGLPGEAGPRGLLGPRGTPGAPGQPGMAGVDGPPGPKGNMGPQGEPGPPGQQGNPGPQGLPGPQGPIGPPGEKMCCNLSFGILIPLQK

SEQ ID NO: 3212 - protein, 570 aa, Homo sapiens
MEPWSSRWKTKRWLWDFTVTTLALTFLFQAREVRGAAPVDVLKALDFHNSPEGISKTTGFCTNRKNSKGSDTAYRVSKQAQLSAPTKQLFPGGTFPEDFSILFTVKPKKGIQSFLLSIYNEHGIQQIGVEVGRSPVFLFEDHTGKPAPEDYPLFRTVNIADGKWHRVAISVEKKTVTMIVDCKKKTTKPLDRSERAIVDTNGITVFGTRILDEEVFEGDIQQFLITGDPKAAYDYCEHYSPDCDSSAPKAAQAQEPQIDEKKKSNFKKKMRTVATKSKEKSKKFTPPKSEKFSSKKKKSYQASAKAKLGVKANIVDDFQEYNYGTMESYQTEAPRHVSGTNEPNPVEEIFTEEYLTGEDYDSQRKNSEDTLYENKEIDGRDSDLLVDGDLGEYDFYEYKEYEDKPTSPPNEEFGPGVPAETDITETSINGHGAYGEKGQKGEPAVVEPGMLVEGPPGPAGPAGIMGPPGLQGPTGPPGDPGDRGPPGRPGLPGADGLPGPPGTMLMLPFRYGGDGSKGPTISAQEAQAQAILQQARIALRGPPGPMGLTGRPGPVGGPGSSGAKGESGDP

SEQ ID NO: 3213 - protein, 1690 aa, Homo sapiens
MEPWSSRWKTKRWLWDFTVTTLALTFLFQAREVRGAAPVDVLKALDFHNSPEGISKTTGFCTNRKNSKGSDTAYRVSKQAQLSAPTKQLFPGGTFPEDFSILFTVKPKKGIQSFLLSIYNEHGIQQIGVEVGRSPVFLFEDHTGKPAPEDYPLFRTVNIADGKWHRVAISVEKKTVTMIVDCKKKTTKPLDRSERAIVDTNGITVFGTRILDEEVFEGDIQQFLITGDPKAAYDYCEHYSPDCDSSAPKAAQAQEPQIDEYAPEDIIEYDYEYGEAEYKEAESVTEGPTVTEETIAQTEINGHGAYGEKGQKGEPAVVEPGMLVEGPPGPAGPAGIMGPPGLQGPTGPPGDPGDRGPPGRPGLPGADGLPGPPGTMLMLPFRYGGDGSKGPTISAQEAQAQAILQQARIALRGPPGPMGLTGRPGPVGGPGSSGAKGESGDPGPQGPRGVQGPPGPTGKPGKRGRPGADGGRGMPGEPGAKGDRGFDGLPGLPGDKGHRGERGPQGPPGPPGDDGMRGEDGEIGPRGLPGEAGPRGLLGPRGTPGAPGQPGMAGVDGPPGPKGNMGPQGEPGPPGQQGNPGPQGLPGPQGPIGPPGEKGPQGKPGLAGLPGADGPPGHPGKEGQSGEKGALGPPGPQGPIGYPGPRGVKGADGVRGLKGSKGEKGEDGFPGFKGDMGLKGDRGEVGQIGPRGEDGPEGPKGRAGPTGDPGPSGQAGEKGKLGVPGLPGYPGRQGPKGSTGFPGFPGANGEKGARGVAGKPGPRGQRGPTGPRGSRGARGPTGKPGPKGTSGGDGPPGPPGERGPQGPQGPVGFPGPKGPPGPPGKDGLPGHPGQRGETGFQGKTGPPGPGGVVGPQGPTGETGPIGERGHPGPPGPPGEQGLPGAAGKEGAKGDPGPQGISGKDGPAGLRGFPGERGLPGAQGAPGLKGGEGPQGPPGPVGSPGERGSAGTAGPIGLPGRPGPQGPPGPAGEKGAPGEKGPQGPAGRDGVQGPVGLPGPAGPAGSPGEDGDKGEIGEPGQKGSKGDKGENGPPGPPGLQGPVGAPGIAGGDGEPGPRGQQGMFGQKGDEGARGFPGPPGPIGLQGLPGPPGEKGENGDVGPMGPPGPPGPRGPQGPNGADGPQGPPGSVGSVGGVGEKGEPGEAGNPGPPGEAGVGGPKGERGEKGEAGPPGAAGPPGAKGPPGDDGPKGNPGPVGFPGDPGPPGEPGPAGQDGVGGDKGEDGDPGQPGPPGPSGEAGPPGPPGKRGPPGAAGAEGRQGEKGAKGEAGAEGPPGKTGPVGPQGPAGKPGPEGLRGIPGPVGEQGLPGAAGQDGPPGPMGPPGLPGLKGDPGSKGEKGHPGLIGLIGPPGEQGEKGDRGLPGTQGSPGAKGDGGIPGPAGPLGPPGPPGLPGPQGPKGNKGSTGPAGQKGDSGLPGPPGSPGPPGEVIQPLPILSSKKTRRHTEGMQADADDNILDYSDGMEEIFGSLNSLKQDIEHMKFPMGTQTNPARTCKDLQLSHPDFPDGEYWIDPNQGCSGDSFKVYCNFTSGGETCIYPDKKSEGVRISSWPKEKPGSWFSEFKRGKLLSYLDVEGNSINMVQMTFLKLLTASARQNFTYHCHQSAAWYDVSSGSYDKALRFLGSNDEEMSYDNNPFIKTLYDGCASRKGYEKTVIEINTPKIDQVPIVDVMINDFGDQNQKFGFEVGPVCFLG

SEQ ID NO: 3214 - protein, 736 aa, Homo sapiens
MEPWSSRWKTKRWLWDFTVTTLALTFLFQAREVRGAAPVDVLKALDFHNSPEGISKTTGFCTNRKNSKGSDTAYRVSKQAQLSAPTKQLFPGGTFPEDFSILFTVKPKKGIQSFLLSIYNEHGIQQIGVEVGRSPVFLFEDHTGKPAPEDYPLFRTVNIADGKWHRVAISVEKKTVTMIVDCKKKTTKPLDRSERAIVDTNGITVFGTRILDEEVFEGDIQQFLITGDPKAAYDYCEHYSPDCDSSAPKAAQAQEPQIDEYAPEDIIEYDYEYGEAEYKEAESVTEGPTVTEETIAQTEANIVDDFQEYNYGTMESYQTEAPRHVSGTNEPNPVEEIFTEEYLTGEDYDSQRKNSEDTLYENKEIDGRDSDLLVDGDLGEYDFYEYKEYEDKPTSPPNEEFGPGVPAETDITETSINGHGAYGEKGQKGEPAVVEPGMLVEGPPGPAGPAGIMGPPGLQGPTGPPGDPGDRGPPGRPGLPGADGLPGPPGTMLMLPFRYGGDGSKGPTISAQEAQAQAILQQARIALRGPPGPMGLTGRPGPVGGPGSSGAKGESGDPGPQGPRGVQGPPGPTGKPGKRGRPGADGGRGMPGEPGAKGDRGFDGLPGLPGDKGHRGERGPQGPPGPPGDDGMRGEDGEIGPRGLPGEAGPRGLLGPRGTPGAPGQPGMAGVDGPPGPKGNMGPQGEPGPPGQQGNPGPQGLPGPQGPIGPPGEKVSYSVVLVKPGEHVCFSNLRQV

SEQ ID NO: 3215 - protein, 729 aa, Homo sapiens
MEPWSSRWKTKRWLWDFTVTTLALTFLFQAREVRGAAPVDVLKALDFHNSPEGISKTTGFCTNRKNSKGSDTAYRVSKQAQLSAPTKQLFPGGTFPEDFSILFTVKPKKGIQSFLLSIYNEHGIQQIGVEVGRSPVFLFEDHTGKPAPEDYPLFRTVNIADGKWHRVAISVEKKTVTMIVDCKKKTTKPLDRSERAIVDTNGITVFGTRILDEEVFEGDIQQFLITGDPKAAYDYCEHYSPDCDSSAPKAAQAQEPQIDEYAPEDIIEYDYEYGEAEYKEAESVTEGPTVTEETIAQTEANIVDDFQEYNYGTMESYQTEAPRHVSGTNEPNPVEEIFTEEYLTGEDYDSQRKNSEDTLYENKEIDGRDSDLLVDGDLGEYDFYEYKEYEDKPTSPPNEEFGPGVPAETDITETSINGHGAYGEKGQKGEPAVVEPGMLVEGPPGPAGPAGIMGPPGLQGPTGPPGDPGDRGPPGRPGLPGADGLPGPPGTMLMLPFRYGGDGSKGPTISAQEAQAQAILQQARIALRGPPGPMGLTGRPGPVGGPGSSGAKGESGDPGPQGPRGVQGPPGPTGKPGKRGRPGADGGRGMPGEPGAKGDRGFDGLPGLPGDKGHRGERGPQGPPGPPGDDGMRGEDGEIGPRGLPGEAGPRGLLGPRGTPGAPGQPGMAGVDGPPGPKGNMGPQGEPGPPGQQGNPGPQGLPGPQGPIGPPGEKMCCNLSFGILIPLQK

SEQ ID NO: 3216 - protein, 756 aa, Homo sapiens
MEPWSSRWKTKRWLWDFTVTTLALTFLFQAREVRGAAPVDVLKALDFHNSPEGISKTTGFCTNRKNSKGSDTAYRVSKQAQLSAPTKQLFPGGTFPEDFSILFTVKPKKGIQSFLLSIYNEHGIQQIGVEVGRSPVFLFEDHTGKPAPEDYPLFRTVNIADGKWHRVAISVEKKTVTMIVDCKKKTTKPLDRSERAIVDTNGITVFGTRILDEEVFEGDIQQFLITGDPKAAYDYCEHYSPDCDSSAPKAAQAQEPQIDEYAPEDIIEYDYEYGEAEYKEAESVTEGPTVTEETIAQTEANIVDDFQEYNYGTMESYQTEAPRHVSGTNEPNPVEEIFTEEYLTGEDYDSQRKNSEDTLYENKEIDGRDSDLLVDGDLGEYDFYEYKEYEDKPTSPPNEEFGPGVPAETDITETSINGHGAYGEKGQKGEPAVVEPGMLVEGPPGPAGPAGIMGPPGLQGPTGPPGDPGDRGPPGRPGLPGADGLPGPPGTMLMLPFRYGGDGSKGPTISAQEAQAQAILQQARIALRGPPGPMGLTGRPGPVGGPGSSGAKGESGDPGPQGPRGVQGPPGPTGKPGKRGRPGADGGRGMPGEPGAKGDRGFDGLPGLPGDKGHRGERGPQGPPGPPGDDGMRGEDGEIGPRGLPGEAGPRGLLGPRGTPGAPGQPGMAGVDGPPGPKGNMGPQGEPGPPGQQGNPGPQGLPGPQGPIGPPGEKVSFSFSLFYKKVIKFACDKRFVGRHDERKVVKLSLPLYLIYE

SEQ ID NO: 3217 - protein, 694 aa, Homo sapiens
  VARIANT 1: note = misc_feature - Xaa can be any naturally occurring amino acid
XPKAAYDYCEHYSPDCDSSAPKAAQAQEPQIDEYAPEDIIEYDYEYGEAEYKEAESVTEGPTVTEETIAQTEANIVDDFQEYNYGTMESYQTEAPRHVSGTNEPNPVEEIFTEEYLTGEDYDSQRKNSEDTLYENKEIDGRDSDLLVDGDLGEYDFYEYKEYEDKPTSPPNEEFGPGVPAETDITETSINGHGAYGEKGQKGEPAVVEPGMLVEGPPGPAGPAGIMGPPGLQGPTGPPGDPGDRGPPGRPGLPGADGLPGPPGTMLMLPFRYGGDGSKGPTISAQEAQAQAILQQARIALRGPPGPMGLTGRPGPVGGPGSSGAKGESGDPGPQGPRGVQGPPGPTGKPGKRGRPGADGGRGMPGEPGAKGDRGFDGLPGLPGDKGHRGERGPQGPPGPPGDDGMRGEDGEIGPRGLPGEAGPRGLLGPRGTPGAPGQPGMAGVDGPPGPKGNMGPQGEPGPPGQQGNPGPQGLPGPQGPIGPPGEKGPQGKPGLAGLPGADGPPGHPGKEGQSGEKGALGPPGPQGPIGYPGPRGVKGADGVRGLKGSKGEKGEDGFPGFKGDMGLKGDRGEVGQIGPRGEDGPEGPKGRAGPTGDPGPSGQAGEKGKLGVPGLPGYPGRQGPKDFRCHWFHWIPWVSRCQWRERCTGSSWQTRPSGSAWSNGSSRFKRCKRSHWETWAKGHFRWRWPSWPSR

SEQ ID NO: 3218 - protein, 200 aa, Homo sapiens
YRVSKQAQLSAPTKQLFPGGTFPEDFSILFTVKPKKGIQSFLLSIYNEHGIQQIGVEVGRSPVFLFEDHTGKPAPEDYPLFRTVNIADGKWHRVAISVEKKTVTMIVDCKKKTTKPLDRSERAIVDTNGITVFGTRILDEEVFEGDIQQFLITGDPKAAYDYCEHYSPDCDSSAPKAAQAQEPQIDEVRSTRPEKVFVFQ

SEQ ID NO: 3219 - protein, 1736 aa, Homo sapiens
MERCSRCHRLLLLLPLVLGLSAAPGWAGAPPVDVLRALRFPSLPDGVRRAKGICPADVAYRVARPAQLSAPTRQLFPGGFPKDFSLLTVVRTRPGLQAPLLTLYSAQGVRQLGLELGRPVRFLYEDQTGRPQPPSQPVFRGLSLADGKWHRVAVAVKGQSVTLIVDCKKRVTRPLPRSARPVLDTHGVIIFGARILDEEVFEGDVQELAIVPGVQAAYESCEQKELECEGGQRERPQNQQPHRAQRSPQQQPSRLHRPQNQEPQSQPTESLYYDYEPPYYDVMTTGTTPDYQDPTPGEEEEILESSLLPPLEEEQTDLQVPPTADRFQAEEYGEGGTDPPEGPYDYTYGYGDDYREETELGPALSAETAHSGAAAHGPRGLKGEKGEPAVLEPGMLVEGPPGPEGPAGLIGPPGIQGNPGPVGDPGERGPPGRAGLPGSDGAPGPPGTSLMLPFRFGSGGGDKGPVVAAQEAQAQAILQQARLALRGPPGPMGYTGRPGPLGQPGSPGLKGESGDLGPQGPRGPQGLTGPPGKAGRRGRAGADGARGMPGDPGVKGDRGFDGLPGLPGEKGHRGDTGAQGLPGPPGEDGERGDDGEIGPRGLPGESGPRGLLGPKGPPGIPGPPGVRGMDGPQGPKGSLGPQGEPGPPGQQGTPGTQGLPGPQGAIGPHGEKGPQGKPGLPGMPGSDGPPGHPGKEGPPGTKGNQGPSGPQGPLGYPGPRGVKGVDGIRGLKGHKGEKGEDGFPGFKGDIGVKGDRGEVGVPGSRGEDGPEGPKGRTGPTGDPGPPGLMGEKGKLGVPGLPGYPGRQGPKGSLGFPGFPGASGEKGARGLSGKSGPRGERGPTGPRGQRGPRGATGKSGAKGTSGGDGPHGPPGERGLPGPQGPNGFPGPKGPPGPPGKDGLPGHPGQRGEVGFQGKTGPPGPPGVVGPQGAAGETGPMGERGHPGPPGPPGEQGLPGTAGKEGTKGDPGPPGAPGKDGPAGLRGFPGERGLPGTAGGPGLKGNEGPSGPPGPAGSPGERGAAGSGGPIGPPGRPGPQGPPGAAGEKGVPGEKGPIGPTGRDGVQGPVGLPGPAGPPGVAGEDGDKGEVGDPGQKGTKGNKGEHGPPGPPGPIGPVGQPGAAGADGEPGARGPQGHFGAKGDEGTRGFNGPPGPIGLQGLPGPSGEKGETGDVGPMGPPGPPGPRGPAGPNGADGPQGPPGGVGNLGPPGEKGEPGESGSPGIQGEPGVKGPRGERGEKGESGQPGEPGPPGPKGPTGDDGPKGNPGPVGFPGDPGPPGEGGPRGQDGAKGDRGEDGEPGQPGSPGPTGENGPPGPLGKRGPAGSPGSEGRQGGKGAKGDPGAIGAPGKTGPVGPAGPAGKPGPDGLRGLPGSVGQQGRPGATGQAGPPGPVGPPGLPGLRGDAGAKGEKGHPGLIGLIGPPGEQGEKGDRGLPGPQGSPGQKGEMGIPGASGPIGPGGPPGLPGPAGPKGAKGATGPGGPKGEKGVQGPPGHPGPPGEVIQPLPIQMPKKTRRSVDGSRLMQEDEAIPTGGAPGSPGGLEEIFGSLDSLREEIEQMRRPTGTQDSPARTCQDLKLCHPELPDGEYWVDPNQGCARDAFRVFCNFTAGGETCVTPRDDVTQFSYVDSEGSPVGVVQLTFLRLLSVSAHQDVSYPCSGAARDGPLRLRGANEDELSPETSPYVKEFRDGCQTQQGRTVLEVRTPVLEQLPVLDASFSDLGAPPRRGGVLLGPVCFMG

SEQ ID NO: 3220 - protein, 1629 aa, Homo sapiens
MERCSRCHRLLLLLPLVLGLSAAPGWAGAPPVDVLRALRFPSLPDGVRRAKGICPADVAYRVARPAQLSAPTRQLFPGGFPKDFSLLTVVRTRPGLQAPLLTLYSAQGVRQLGLELGRPVRFLYEDQTGRPQPPSQPVFRGLSLADGKWHRVAVAVKGQSVTLIVDCKKRVTRPLPRSARPVLDTHGVIIFGARILDEEVFEGDVQELAIVPGVQAAYESCEQKELECEGGQRERPQNQQPHRAQRSPQQQPSRLHRPQNQEPQSQAAHGPRGLKGEKGEPAVLEPGMLVEGPPGPEGPAGLIGPPGIQGNPGPVGDPGERGPPGRAGLPGSDGAPGPPGTSLMLPFRFGSGGGDKGPVVAAQEAQAQAILQQARLALRGPPGPMGYTGRPGPLGQPGSPGLKGESGDLGPQGPRGPQGLTGPPGKAGRRGRAGADGARGMPGDPGVKGDRGFDGLPGLPGEKGHRGDTGAQGLPGPPGEDGERGDDGEIGPRGLPGESGPRGLLGPKGPPGIPGPPGVRGMDGPQGPKGSLGPQGEPGPPGQQGTPGTQGLPGPQGAIGPHGEKGPQGKPGLPGMPGSDGPPGHPGKEGPPGTKGNQGPSGPQGPLGYPGPRGVKGVDGIRGLKGHKGEKGEDGFPGFKGDIGVKGDRGEVGVPGSRGEDGPEGPKGRTGPTGDPGPPGLMGEKGKLGVPGLPGYPGRQGPKGSLGFPGFPGASGEKGARGLSGKSGPRGERGPTGPRGQRGPRGATGKSGAKGTSGGDGPHGPPGERGLPGPQGPNGFPGPKGPPGPPGKDGLPGHPGQRGEVGFQGKTGPPGPPGVVGPQGAAGETGPMGERGHPGPPGPPGEQGLPGTAGKEGTKGDPGPPGAPGKDGPAGLRGFPGERGLPGTAGGPGLKGNEGPSGPPGPAGSPGERGAAGSGGPIGPPGRPGPQGPPGAAGEKGVPGEKGPIGPTGRDGVQGPVGLPGPAGPPGVAGEDGDKGEVGDPGQKGTKGNKGEHGPPGPPGPIGPVGQPGAAGADGEPGARGPQGHFGAKGDEGTRGFNGPPGPIGLQGLPGPSGEKGETGDVGPMGPPGPPGPRGPAGPNGADGPQGPPGGVGNLGPPGEKGEPGESGSPGIQGEPGVKGPRGERGEKGESGQPGEPGPPGPKGPTGDDGPKGNPGPVGFPGDPGPPGEGGPRGQDGAKGDRGEDGEPGQPGSPGPTGENGPPGPLGKRGPAGSPGSEGRQGGKGAKGDPGAIGAPGKTGPVGPAGPAGKPGPDGLRGLPGSVGQQGRPGATGQAGPPGPVGPPGLPGLRGDAGAKGEKGHPGLIGLIGPPGEQGEKGDRGLPGPQGSPGQKGEMGIPGASGPIGPGGPPGLPGPAGPKGAKGATGPGGPKGEKGVQGPPGHPGPPGEVIQPLPIQMPKKTRRSVDGSRLMQEDEAIPTGGAPGSPGGLEEIFGSLDSLREEIEQMRRPTGTQDSPARTCQDLKLCHPELPDGEYWVDPNQGCARDAFRVFCNFTAGGETCVTPRDDVTQFSYVDSEGSPVGVVQLTFLRLLSVSAHQDVSYPCSGAARDGPLRLRGANEDELSPETSPYVKEFRDGCQTQQGRTVLEVRTPVLEQLPVLDASFSDLGAPPRRGGVLLGPVCFMG

SEQ ID NO: 3221 - protein, 290 aa, Homo sapiens
MERCSRCHRLLLLLPLVLGLSAAPGWAGAPPVDVLRALRFPSLPDGVRRAKGICPADVAYRVARPAQLSAPTRQLFPGGFPKDFSLLTVVRTRPGLQAPLLTLYSAQGVRQLGLELGRPVRFLYEDQTGRPQPPSQPVFRGLSLADGKWHRVAVAVKGQSVTLIVDCKKRVTRPLPRSARPVLDTHGVIIFGARILDEEVFEGDVQELAIVPGVQAAYESCEQKELECEGGQRERPQNQQPHRAQRSPQQQPSRLHRPQNQEPQSQVRELGEPPSAAHPREGRHPGISPP

SEQ ID NO: 3222 - protein, 1650 aa, Homo sapiens
MERCSRCHRLLLLLPLVLGLSAAPGWAGAPPVDVLRALRFPSLPDGVRRAKGICPADVAYRVARPAQLSAPTRQLFPGGFPKDFSLLTVVRTRPGLQAPLLTLYSAQGVRQLGLELGRPVRFLYEDQTGRPQPPSQPVFRGLSLADGKWHRVAVAVKGQSVTLIVDCKKRVTRPLPRSARPVLDTHGVIIFGARILDEEVFEGDVQELAIVPGVQAAYESCEQKELECEGGQRERPQNQQPHRAQRSPQQQPSRLHRPQNQEPQSQDPTPGEEEEILESSLLPPLEEAAHGPRGLKGEKGEPAVLEPGMLVEGPPGPEGPAGLIGPPGIQGNPGPVGDPGERGPPGRAGLPGSDGAPGPPGTSLMLPFRFGSGGGDKGPVVAAQEAQAQAILQQARLALRGPPGPMGYTGRPGPLGQPGSPGLKGESGDLGPQGPRGPQGLTGPPGKAGRRGRAGADGARGMPGDPGVKGDRGFDGLPGLPGEKGHRGDTGAQGLPGPPGEDGERGDDGEIGPRGLPGESGPRGLLGPKGPPGIPGPPGVRGMDGPQGPKGSLGPQGEPGPPGQQGTPGTQGLPGPQGAIGPHGEKGPQGKPGLPGMPGSDGPPGHPGKEGPPGTKGNQGPSGPQGPLGYPGPRGVKGVDGIRGLKGHKGEKGEDGFPGFKGDIGVKGDRGEVGVPGSRGEDGPEGPKGRTGPTGDPGPPGLMGEKGKLGVPGLPGYPGRQGPKGSLGFPGFPGASGEKGARGLSGKSGPRGERGPTGPRGQRGPRGATGKSGAKGTSGGDGPHGPPGERGLPGPQGPNGFPGPKGPPGPPGKDGLPGHPGQRGEVGFQGKTGPPGPPGVVGPQGAAGETGPMGERGHPGPPGPPGEQGLPGTAGKEGTKGDPGPPGAPGKDGPAGLRGFPGERGLPGTAGGPGLKGNEGPSGPPGPAGSPGERGAAGSGGPIGPPGRPGPQGPPGAAGEKGVPGEKGPIGPTGRDGVQGPVGLPGPAGPPGVAGEDGDKGEVGDPGQKGTKGNKGEHGPPGPPGPIGPVGQPGAAGADGEPGARGPQGHFGAKGDEGTRGFNGPPGPIGLQGLPGPSGEKGETGDVGPMGPPGPPGPRGPAGPNGADGPQGPPGGVGNLGPPGEKGEPGESGSPGIQGEPGVKGPRGERGEKGESGQPGEPGPPGPKGPTGDDGPKGNPGPVGFPGDPGPPGEGGPRGQDGAKGDRGEDGEPGQPGSPGPTGENGPPGPLGKRGPAGSPGSEGRQGGKGAKGDPGAIGAPGKTGPVGPAGPAGKPGPDGLRGLPGSVGQQGRPGATGQAGPPGPVGPPGLPGLRGDAGAKGEKGHPGLIGLIGPPGEQGEKGDRGLPGPQGSPGQKGEMGIPGASGPIGPGGPPGLPGPAGPKGAKGATGPGGPKGEKGVQGPPGHPGPPGEVIQPLPIQMPKKTRRSVDGSRLMQEDEAIPTGGAPGSPGGLEEIFGSLDSLREEIEQMRRPTGTQDSPARTCQDLKLCHPELPDGEYWVDPNQGCARDAFRVFCNFTAGGETCVTPRDDVTQFSYVDSEGSPVGVVQLTFLRLLSVSAHQDVSYPCSGAARDGPLRLRGANEDELSPETSPYVKEFRDGCQTQQGRTVLEVRTPVLEQLPVLDASFSDLGAPPRRGGVLLGPVCFMG

SEQ ID NO: 3223 - protein, 624 aa, Homo sapiens
MERCSRCHRLLLLLPLVLGLSAAPGWAGAPPVDVLRALRFPSLPDGVRRAKGICPADVAYRVARPAQLSAPTRQLFPGGFPKDFSLLTVVRTRPGLQAPLLTLYSAQGVRQLGLELGRPVRFLYEDQTGRPQPPSQPVFRGLSLADGKWHRVAVAVKGQSVTLIVDCKKRVTRPLPRSARPVLDTHGVIIFGARILDEEVFEGDVQELAIVPGVQAAYESCEQKELECEGGQRERPQNQQPHRAQRSPQQQPSRLHRPQNQEPQSQPTESLYYDYEPPYYDVMTTGTTPDYQDPTPGEEEEILESSLLPPLEEEQTDLQVPPTADRFQAEEYGEGGTDPPEGPYDYTYGYGDDYREETELGPALSAETAHSGAAAHGPRGLKGEKGEPAVLEPGMLVEGPPGPEGPAGLIGPPGIQGNPGPVGDPGERGPPGRAGLPGSDGAPGPPGTSLMLPFRFGSGGGDKGPVVAAQEAQAQAILQQARLALRGPPGPMGYTGRPGPLGQPGSPGLKGESGDLGPQGPRGPQGLTGPPGKAGRRGRAGADGARGMPGDPGVKGDRGFDGLPGLPGEKGHRGDTGAQGLPGPPGEDGERGDDGEIGPRGLPGESGPRGLLGPKGPPGIPGPP

SEQ ID NO: 3224 - protein, 1874 aa, Homo sapiens
MECLTRAEADIVLLVDGSWSIGRANFRTVRSFISRIVEVFDIGPKRVQIALAQYSGDPRTEWQLNAHRDKKSLLQAVANLPYKGGNTLTGMALNFIRQQNFRTQAGMRPRARKIGVLITDGKSQDDVEAPSKKLKDEGVELFAIGIKNADEVELKMIATDPDDTHAYNVADFESLSRIVDDLTINLCNSVKGPGDLEAPSNLVISERTHRSFRVSWTPPSDSVDRYKVEYYPVSGGKRQEFYVSRMETSTVLKDLKPETEYVVNVYSVVEDEYSEPLKGTEKTLPVPVVSLNIYDVGPTTMHVQWQPVGGATGYILSYKPVKDTEPTRPKEVRLGPTVNDMQLTDLVPNTEYAVTVQAVLHDLTSEPVTVREVTLPLPRPQDLKLRDVTHSTMNVFWEPVPGKVRKYIVRYKTPEEDVKEVEVDRSETSTSLKDLFSQTLYTVSVSAVHDEGESPPVTAQETTRPVPAPTNLKITEVTSEGFRGTWDHGASDVSLYRITWAPFGSSDKMETILNGDENTLVFENLNPNTIYEVSITAIYPDESESDDLIGSERTLPILTTQAPKSGPRNLQVYNATSNSLTVKWDPASGRVQKYRITYQPSTGEGNEQTTTIGGRQNSVVLQKLKPDTPYTITVSSLYPDGEGGRMTGRGKTKPLNTVRNLRVYDPSTSTLNVRWDHAEGNPRQYKLFYAPAAGGPEELVPIPGNTNYAILRNLQPDTSYTVTVVPVYTEGDGGRTSDTGRTLMRGLARNVQVYNPTPNSLDVRWDPAPGPVLQYRVVYSPVDGTRPSESIVVPGNTRMVHLERLIPDTLYSVNLVALYSDGEGNPSPAQGRTLPRSGPRNLRVFGETTNSLSVAWDHADGPVQQYRIIYSPTVGDPIDEYTTVPGRRNNVILQPLQPDTPYKITVIAVYEDGDGGHLTGNGRTVGLLPPQNIHISDEWYTRFRVSWDPSPSPVLGYKIVYKPVGSNEPMEAFVGEMTSYTLHNLNPSTTYDVNVYAQYDSGLSVPLTDQGTTLYLNVTDLKTYQIGWDTFCVKWSPHRAATSYRLKLSPADGTRGQEITVRGSETSHCFTGLSPDTDYGVTVFVQTPNLEGPGVSVKEHTTVKPTEAPTEPPTPPPPPTIPPARDVCKGAKADIVFLTDASWSIGDDNFNKVVKFIFNTVGGFDEISPAGIQVSFVQYSDEVKSEFKLNTYNDKALALGALQNIRYRGGNTRTGKALTFIKEKVLTWESGMRKNVPKVLVVVTDGRSQDEVKKAALVIQHSRFSVFVVGVADVDYNELANIASKPSERHVFIVDDFESFEKIEDNLITFVCETATSSCPLIYLDGYTSPGFKMLEAYNLTEKNFASVQGVSLESGSFPSYSAYRIQKNAFVNQPTADLHPNGLPPSYTIILLFRLLPETPSDPFAIWQITDRDYKPQVGVIADPSSKTLSFFNKDTRGEVQTVTFDTEEVKTLFYGSFHKVHIVVTSKSVKIYIDCYEIIEKDIKEAGNITTDGYEILGKLLKGERKSAAFQIQSFDIVCSPVWTSRDRCCDIPSRRDEGKCPAFPNSCTCTQDSVGPPGPPGPAGGPGAKGPRGERGISGAIGPPGPRGDIGPPGPQGPPGPQGPNGLSIPGEQGRQGMKGDAGEPGLPGRTGTPGLPGPPGPMGPPGDRGFTGKDGAMGPRGPPGPPGSPGSPGVTGPSGKPGKPGDHGRPGPSGLKGEKGDRGDIASQNMMRAVARQVCEQLISGQMNRFNQMLNQIPNDYQSSRNQPGPPGPPGPPGSAGARGEPGPGGRPGFPGTPGMQGPPGERGLPGEKGERGTGSSGPRGLPGPPGPQGESRTGPPGSTGSRGPPGPPGRPGNSGIRGPPGPPGYCDSSQCASIPYNGQGYPGSG

SEQ ID NO: 3225 - protein, 1899 aa, Homo sapiens
MRSRLPPALAALGAALLLSSIEAEGMECLTRAEADIVLLVDGSWSIGRANFRTVRSFISRIVEVFDIGPKRVQIALAQYSGDPRTEWQLNAHRDKKSLLQAVANLPYKGGNTLTGMALNFIRQQNFRTQAGMRPRARKIGVLITDGKSQDDVEAPSKKLKDEGVELFAIGIKNADEVELKMIATDPDDTHAYNVADFESLSRIVDDLTINLCNSVKGPGDLEAPSNLVISERTHRSFRVSWTPPSDSVDRYKVEYYPVSGGKRQEFYVSRMETSTVLKDLKPETEYVVNVYSVVEDEYSEPLKGTEKTLPVPVVSLNIYDVGPTTMHVQWQPVGGATGYILSYKPVKDTEPTRPKEVRLGPTVNDMQLTDLVPNTEYAVTVQAVLHDLTSEPVTVREVTLPLPRPQDLKLRDVTHSTMNVFWEPVPGKVRKYIVRYKTPEEDVKEVEVDRSETSTSLKDLFSQTLYTVSVSAVHDEGESPPVTAQETTRPVPAPTNLKITEVTSEGFRGTWDHGASDVSLYRITWAPFGSSDKMETILNGDENTLVFENLNPNTIYEVSITAIYPDESESDDLIGSERTLPILTTQAPKSGPRNLQVYNATSNSLTVKWDPASGRVQKYRITYQPSTGEGNEQTTTIGGRQNSVVLQKLKPDTPYTITVSSLYPDGEGGRMTGRGKTKPLNTVRNLRVYDPSTSTLNVRWDHAEGNPRQYKLFYAPAAGGPEELVPIPGNTNYAILRNLQPDTSYTVTVVPVYTEGDGGRTSDTGRTLMRGLARNVQVYNPTPNSLDVRWDPAPGPVLQYRVVYSPVDGTRPSESIVVPGNTRMVHLERLIPDTLYSVNLVALYSDGEGNPSPAQGRTLPRSGPRNLRVFGETTNSLSVAWDHADGPVQQYRIIYSPTVGDPIDEYTTVPGRRNNVILQPLQPDTPYKITVIAVYEDGDGGHLTGNGRTVGLLPPQNIHISDEWYTRFRVSWDPSPSPVLGYKIVYKPVGSNEPMEAFVGEMTSYTLHNLNPSTTYDVNVYAQYDSGLSVPLTDQGTTLYLNVTDLKTYQIGWDTFCVKWSPHRAATSYRLKLSPADGTRGQEITVRGSETSHCFTGLSPDTDYGVTVFVQTPNLEGPGVSVKEHTTVKPTEAPTEPPTPPPPPTIPPARDVCKGAKADIVFLTDASWSIGDDNFNKVVKFIFNTVGGFDEISPAGIQVSFVQYSDEVKSEFKLNTYNDKALALGALQNIRYRGGNTRTGKALTFIKEKVLTWESGMRKNVPKVLVVVTDGRSQDEVKKAALVIQQSGFSVFVVGVADVDYNELANIASKPSERHVFIVDDFESFEKIEDNLITFVCETATSSCPLIYLDGYTSPGFKMLEAYNLTEKNFASVQGVSLESGSFPSYSAYRIQKNAFVNQPTADLHPNGLPPSYTIILLFRLLPETPSDPFAIWQITDRDYKPQVGVIADPSSKTLSFFNKDTRGEVQTVTFDTEEVKTLFYGSFHKVHIVVTSKSVKIYIDCYEIIEKDIKEAGNITTDGYEILGKLLKGERKSAAFQIQSFDIVCSPVWTSRDRCCDIPSRRDEGKCPAFPNSCTCTQDSVGPPGPPGPAGGPGAKGPRGERGISGAIGPPGPRGDIGPPGPQGPPGPQGPNGLSIPGEQGRQGMKGDAGEPGLPGRTGTPGLPGPPGPMGPPGDRGFTGKDGAMGPRGPPGPPGSPGSPGVTGPSGKPGKPGDHGRPGPSGLKGEKGDRGDIASQNMMRAVARQVCEQLISGQMNRFNQMLNQIPNDYQSSRNQPGPPGPPGPPGSAGARGEPGPGGRPGFPGTPGMQGPPGERGLPGEKGERGTGSSGPRGLPGPPGPQGESRTGPPGSTGSRGPPGPPGRPGNSGIRGPPGPPGYCDSSQCASIPYNGQGYPGSG

SEQ ID NO: 3226 - protein, 3063 aa, Homo sapiens
MRSRLPPALAALGAALLLSSIEAEVDPPSDLNFKIIDENTVHMSWAKPVDPIVGYRITVDPTTDGPTKEFTLSASTTETLLSELVPETEYVVTITSYDEVEESVPVIGQLTIQTGSSTKPVEKKPGKTEIQKCSVSAWTDLVFLVDGSWSVGRNNFKYILDFIAALVSAFDIGEEKTRVGVVQYSSDTRTEFNLNQYYQRDELLAAIKKIPYKGGNTMTGDAIDYLVKNTFTESAGARVGFPKVAIIITDGKSQDEVEIPARELRNVGVEVFSLGIKAADAKELKQIASTPSLNHVFNVANFDAIVDIQNEIISQVCSGVDEQLGELVSGEEVVEPPSNLIAMEVSSKYVKLNWNPSPSPVTGYKVILTPMTAGSRQHALSVGPQTTTLSVRDLSADTEYQISVSAMKGMTSSEPISIMEKTQPMKVQVECSRGVDIKADIVFLVDGSYSIGIANFVKVRAFLEVLVKSFEISPNRVQISLVQYSRDPHTEFTLKKFTKVEDIIEAINTFPYRGGSTNTGKAMTYVREKIFVPSKGSRSNVPKVMILITDGKSSDAFRDPAIKLRNSDVEIFAVGVKDAVRSELEAIASPPAETHVFTVEDFDAFQRISFELTQSICLRIEQELAAIKKKAYVPPKDLSFSEVTSYGFKTNWSPAGENVFSYHITYKEAAGDDEVTVVEPASSTSVVLSSLKPETLYLVNVTAEYEDGFSIPLAGEETTEEVKGAPRNLKVTDETTDSFKITWTQAPGRVLRYRIIYRPVAGGESREVTTPPNQRRRTLENLIPDTKYEVSVIPEYFSGPGTPLTGNAATEEVRGNPRDLRVSDPTTSTMKLSWSGAPGKVKQYLVTYTPVAGGETQEVTVRGDTTNTVLQGLKEGTQYALSVTALYASGAGDALFGEGTTLEERGSPQDLVTKDITDTSIGAYWTSAPGMVRGYRVSWKSLYDDVDTGEKNLPEDAIHTMIENLQPETKYRISVFATYSSGEGEPLTGDATTELSQDSKTLKVDEETENTMRVTWKPAPGKVVNYRVVYRPHGRGKQMVAKVPPTVTSTVLKRLQPQTTYDITVLPIYKMGEGKLRQGSGTTASRFKSPRNLKTSDPTMSSFRVTWEPAPGEVKGYKVTFHPTGDDRRLGELVVGPYDNTVVLEELRAGTTYKVNVFGMFDGGESSPLVGQEMTTLSDTTVMPILSSGMECLTRAEADIVLLVDGSWSIGRANFRTVRSFISRIVEVFDIGPKRVQIALAQYSGDPRTEWQLNAHRDKKSLLQAVANLPYKGGNTLTGMALNFIRQQNFRTQAGMRPRARKIGVLITDGKSQDDVEAPSKKLKDEGVELFAIGIKNADEVELKMIATDPDDTHAYNVADFESLSRIVDDLTINLCNSVKGPGDLEAPSNLVISERTHRSFRVSWTPPSDSVDRYKVEYYPVSGGKRQEFYVSRMETSTVLKDLKPETEYVVNVYSVVEDEYSEPLKGTEKTLPVPVVSLNIYDVGPTTMHVQWQPVGGATGYILSYKPVKDTEPTRPKEVRLGPTVNDMQLTDLVPNTEYAVTVQAVLHDLTSEPVTVREVTLPLPRPQDLKLRDVTHSTMNVFWEPVPGKVRKYIVRYKTPEEDVKEVEVDRSETSTSLKDLFSQTLYTVSVSAVHDEGESPPVTAQETTRPVPAPTNLKITEVTSEGFRGTWDHGASDVSLYRITWAPFGSSDKMETILNGDENTLVFENLNPNTIYEVSITAIYPDESESDDLIGSERTLPILTTQAPKSGPRNLQVYNATSNSLTVKWDPASGRVQKYRITYQPSTGEGNEQTTTIGGRQNSVVLQKLKPDTPYTITVSSLYPDGEGGRMTGRGKTKPLNTVRNLRVYDPSTSTLNVRWDHAEGNPRQYKLFYAPAAGGPEELVPIPGNTNYAILRNLQPDTSYTVTVVPVYTEGDGGRTSDTGRTLMRGLARNVQVYNPTPNSLDVRWDPAPGPVLQYRVVYSPVDGTRPSESIVVPGNTRMVHLERLIPDTLYSVNLVALYSDGEGNPSPAQGRTLPRSGPRNLRVFGETTNSLSVAWDHADGPVQQYRIIYSPTVGDPIDEYTTVPGRRNNVILQPLQPDTPYKITVIAVYEDGDGGHLTGNGRTVGLLPPQNIHISDEWYTRFRVSWDPSPSPVLGYKIVYKPVGSNEPMEAFVGEMTSYTLHNLNPSTTYDVNVYAQYDSGLSVPLTDQGTTLYLNVTDLKTYQIGWDTFCVKWSPHRAATSYRLKLSPADGTRGQEITVRGSETSHCFTGLSPDTDYGVTVFVQTPNLEGPGVSVKEHTTVKPTEAPTEPPTPPPPPTIPPARDVCKGAKADIVFLTDASWSIGDDNFNKVVKFIFNTVGGFDEISPAGIQVSFVQYSDEVKSEFKLNTYNDKALALGALQNIRYRGGNTRTGKALTFIKEKVLTWESGMRKNVPKVLVVVTDGRSQDEVKKAALVIQQSGFSVFVVGVADVDYNELANIASKPSERHVFIVDDFESFEKIEDNLITFVCETATSSCPLIYLDGYTSPGFKMLEAYNLTEKNFASVQGVSLESGSFPSYSAYRIQKNAFVNQPTADLHPNGLPPSYTIILLFRLLPETPSDPFAIWQITDRDYKPQVGVIADPSSKTLSFFNKDTRGEVQTVTFDTEEVKTLFYGSFHKVHIVVTSKSVKIYIDCYEIIEKDIKEAGNITTDGYEILGKLLKGERKSAAFQIQSFDIVCSPVWTSRDRCCDIPSRRDEGKCPAFPNSCTCTQDSVGPPGPPGPAGGPGAKGPRGERGISGAIGPPGPRGDIGPPGPQGPPGPQGPNGLSIPGEQGRQGMKGDAGEPGLPGRTGTPGLPGPPGPMGPPGDRGFTGKDGAMGPRGPPGPPGSPGSPGVTGPSGKPGKPGDHGRPGPSGLKGEKGDRGDIASQNMMRAVARQVCEQLISGQMNRFNQMLNQIPNDYQSSRNQPGPPGPPGPPGSAGARGEPGPGGRPGFPGTPGMQGPPGERGLPGEKGERGTGSSGPRGLPGPPGPQGESRTGPPGSTGSRGPPGPPGRPGNSGIRGPPGPPGYCDSSQCASIPYNGQGYPGSG

SEQ ID NO: 3227 - protein, 3062 aa, Homo sapiens
MRSRLPPALAALGAALLLSSIEAEVDPPSDLNFKIIDENTVHMSWAKPVDPIVGYRITVDPTTDGPTKEFTLSASTTETLLSELVPETEYVVTITSYDEVEESVPVIGQLTIQTGSSTKPVEKKPGKTEIQKCSVSAWTDLVFLVDGSWSVGRNNFKYILDFIAALVSAFDIGEEKTRVGVVQYSSDTRTEFNLNQYYQRDELLAAIKKIPYKGGNTMTGDAIDYLVKNTFTESAGARVGFPKVAIIITDGKSQDEVEIPARELRNVGVEVFSLGIKAADAKELKQIASTPSLNHVFNVANFDAIVDIQNEIISQVCSGVDEQLGELVSGEEVVEPPSNLIAMEVSSKYVKLNWNPSPSPVTGYKVILTPMTAGSRQHALSVGPQTTTLSVRDLSADTEYQISVSAMKGMTSSEPISIMEKTQPMKVQVECSRGVDIKADIVFLVDGSYSIGIANFVKVRAFLEVLVKSFEISPNRVQISLVQYSRDPHTEFTLKKFTKVEDIIEAINTFPYRGGSTNTGKAMTYVREKIFVPSKGSRSNVPKVMILITDGKSSDAFRDPAIKLRNSDVEIFAVGVKDAVRSELEAIASPPAETHVFTVEDFDAFQRISFELTQSICLRIEQELAAIKKKAYVPPKDLSFSEVTSYGFKTNWSPAGENVFSYHITYKEAAGDDEVTVVEPASSTSVVLSSLKPETLYLVNVTAEYEDGFSIPLAGEETTEEVKGAPRNLKVTDETTDSFKITWTQAPGRVLRYRIIYRPVAGGESREVTTPPNQRRRTLENLIPDTKYEVSVIPEYFSGPGTPLTGNAATEEVRGNPRDLRVSDPTTSTMKLSWSGAPGKVKQYLVTYTPVAGGETQEVTVRGDTTNTVLQGLKEGTQYALSVTALYASGAGDALFGEGTTLEERGSPQDLVTKDITDTSIGAYWTSAPGMVRGYRVSWKSLYDDVDTGEKNLPEDAIHTMIENLQPETKYRISVFATYSSGEGEPLTGDATTELSQDSKTLKVDEETENTMRVTWKPAPGKVVNYRVVYRPHGRGKQMVAKVPPTVTSTVLKRLQPQTTYDITVLPIYKMGEGKLRQGSGTTASRFKSPRNLKTSDPTMSSFRVTWEPAPGEVKGYKVTFHPTGDDRRLGELVVGPYDNTVVLEELRAGTTYKVNVFGMFDGGESSPLVGQEMTTLSDTTVMPILSSGMECLTRAEADIVLLVDGSWSIGRANFRTVRSFISRIVEVFDIGPKRVQIALAQYSGDPRTEWQLNAHRDKKSLLQAVANLPYKGGNTLTGMALNFIRQQNFRTQAGMRPRARKIGVLITDGKSQDDVEAPSKKLKDEGVELFAIGIKNADEVELKMIATDPDDTHAYNVADFESLSRIVDDLTINLCNSVKGPGDLEAPSNLVISERTHRSFRVSWTPPSDSVDRYKVEYYPVSGGKRQEFYVSRMETSTVLKDLKPETEYVVNVYSVVEDEYSEPLKGTEKTLPVPVVSLNIYDVGPTTMHVQWQPVGGATGYILSYKPVKDTEPTRPKEVRLGPTVNDMQLTDLVPNTEYAVTVQAVLHDLTSEPVTVREVTLPLPRPQDLKLRDVTHSTMNVFWEPVPGKVRKYIVRYKTPEEDVKEVEVDRSETSTSLKDLFSQTLYTVSVSAVHDEGESPPVTAQETTRPVPAPTNLKITEVTSEGFRGTWDHGASDVSLYRITWAPFGSSDKMETILNGDENTLVFENLNPNTIYEVSITAIYPDESESDDLIGSERTLPILTTQAPKSGPRNLQVYNATSNSLTVKWDPASGRVQKYRITYQPSTGEGNEQTTTIGGRQNSVVLQKLKPDTPYTITVSSLYPDGEGGRMTGRGKTKPLNTVRNLRVYDPSTSTLNVRWDHAEGNPRQYKLFYAPAAGGPEELVPIPGNTNYAILRNLQPDTSYTVTVVPVYTEGDGGRTSDTGRTLMRGLARNVQVYNPTPNSLDVRWDPAPGPVLQYRVVYSPVDGTRPSESIVVPGNTRMVHLERLIPDTLYSVNLVALYSDGEGNPSPAQGRTLPRSGPRNLRVFGETTNSLSVAWDHADGPVQQYRIIYSPTVGDPIDEYTTVPGRRNNVILQPLQPDTPYKITVIAVYEDGDGGHLTGNGRTVGLLPPQNIHISDEWYTRFRVSWDPSPSPVLGYKIVYKPVGSNEPMEAFVGEMTSYTLHNLNPSTTYDVNVYAQYDSGLSVPLTDQGTTLYLNVTDLKTYQIGWDTFCVKWSPHRAATSYRLKLSPADGTRGQEITVRGSETSHCFTGLSPDTDYGVTVFVQTPNLEGPGVSVKEHTTVKPTEAPTEPPTPPPPPTIPPARDVCKGAKADIVFLTDASWSIGDDNFNKVVKFIFNTVGGFDEISPAGIQVSFVQYSDEVKSEFKLNTYNDKALALGALQNIRYRGGNTRTGKALTFIKEKVLTWESGMRKNVPKVLVVVTDGRSQDEVKKAALVIQQSGFSVFVVGVADVDYNELANIASKPSERHVFIVDDFESFEKIEDNLITFVCETATSSCPLIYLDGYTSPGFKMLEAYNLTEKNFASVQGVSLESGSFPSYSAYRIQKNAFVNQPTADLHPNGLPPSYTIILLFRLLPETPSDPFAIWQITDRDYKPQVGVIADPSSKTLSFFNKDTRGEVQTVTFDTEEVKTLFYGSFHKVHIVVTSKSVKIYIDCYEIIEKDIKEAGNITTDGYEILGKLLKGERKSAAFQIQSFDIVCSPVWTSRDRCCDIPSRRDEGKCPAFPNSCTCTQDSVGPPGPPGPAGGPGAKGPRGERGISGAIGPPGPRGDIGPPGPQGPPGPQGPNGLSIPGEQGRQGMKGDAGEPGLPGRTGTPGLPGPPGPMGPPGDRGFTGKDGAMGPRGPPGPGSPGVTGPSGKPGKPGDHGRPGPSGLKGEKGDRGDIASQNMMRAVARQVCEQLISGQMNRFNQMLNQIPNDYQSSRNQPGPPGPPGPPGSAGARGEPGPGGRPGFPGTPGMQGPPGERGLPGEKGERGTGSSGPRGLPGPPGPQGESRTGPPGSTGSRGPPGPPGRPGNSGIRGPPGPPGYCDSSQCASIPYNGQGYPGTLLPL

SEQ ID NO: 3228 - protein, 2987 aa, Homo sapiens
MRSRLPPALAALGAALLLSSIEAEVDPPSDLNFKIIDENTVHMSWAKPVDPIVGYRITVDPTTDGPTKEFTLSASTTETLLSELVPETEYVVTITSYDEVEESVPVIGQLTIQTGSSTKPVEKKPGKTEIQKCSVSAWTDLVFLVDGSWSVGRNNFKYILDFIAALVSAFDIGEEKTRVGVVQYSSDTRTEFNLNQYYQRDELLAAIKKIPYKGGNTMTGDAIDYLVKNTFTESAGARVGFPKVAIIITDGKSQDEVEIPARELRNVGVEVFSLGIKAADAKELKQIASTPSLNHVFNVANFDAIVDIQNEIISQVCSGVDEQLGELVSGEEVVEPPSNLIAMEVSSKYVKLNWNPSPSPVTGYKVILTPMTAGSRQHALSVGPQTTTLSVRDLSADTEYQISVSAMKGMTSSEPISIMEKTQPMKVQVECSRGVDIKADIVFLVDGSYSIGIANFVKVRAFLEVLVKSFEISPNRVQISLVQYSRDPHTEFTLKKFTKVEDIIEAINTFPYRGGSTNTGKAMTYVREKIFVPSKGSRSNVPKVMILITDGKSSDAFRDPAIKLRNSDVEIFAVGVKDAVRSELEAIASPPAETHVFTVEDFDAFQRISFELTQSICLRIEQELAAIKKKAYVPPKDLSFSEVTSYGFKTNWSPAGENVFSYHITYKEAAGDDEVTVVEPASSTSVVLSSLKPETLYLVNVTAEYEDGFSIPLAGEETTEEVKGAPRNLKVTDETTDSFKITWTQAPGRVLRYRIIYRPVAGGESREVTTPPNQRRRTLENLIPDTKYEVSVIPEYFSGPGTPLTGNAATEEVRGNPRDLRVSDPTTSTMKLSWSGAPGKVKQYLVTYTPVAGGETQEVTVRGDTTNTVLQGLKEGTQYALSVTALYASGAGDALFGEGTTLEERGSPQDLVTKDITDTSIGAYWTSAPGMVRGYRVSWKSLYDDVDTGEKNLPEDAIHTMIENLQPETKYRISVFATYSSGEGEPLTGDATTELSQDSKTLKVDEETENTMRVTWKPAPGKVVNYRVVYRPHGRGKQMVAKVPPTVTSTVLKRLQPQTTYDITVLPIYKMGEGKLRQGSGTTASRFKSPRNLKTSDPTMSSFRVTWEPAPGEVKGYKVTFHPTGDDRRLGELVVGPYDNTVVLEELRAGTTYKVNVFGMFDGGESSPLVGQEMTTLSDTTVMPILSSGMECLTRAEADIVLLVDGSWSIGRANFRTVRSFISRIVEVFDIGPKRVQIALAQYSGDPRTEWQLNAHRDKKSLLQAVANLPYKGGNTLTGMALNFIRQQNFRTQAGMRPRARKIGVLITDGKSQDDVEAPSKKLKDEGVELFAIGIKNADEVELKMIATDPDDTHAYNVADFESLSRIVDDLTINLCNSVKGPGDLEAPSNLVISERTHRSFRVSWTPPSDSVDRYKVEYYPVSGGKRQEFYVSRMETSTVLKDLKPETEYVVNVYSVVEDEYSEPLKGTEKTLPVPVVSLNIYDVGPTTMHVQWQPVGGATGYILSYKPVKDTEPTRPKEVRLGPTVNDMQLTDLVPNTEYAVTVQAVLHDLTSEPVTVREVTLPLPRPQDLKLRDVTHSTMNVFWEPVPGKVRKYIVRYKTPEEDVKEVEVDRSETSTSLKDLFSQTLYTVSVSAVHDEGESPPVTAQETTRPVPAPTNLKITEVTSEGFRGTWDHGASDVSLYRITWAPFGSSDKMETILNGDENTLVFENLNPNTIYEVSITAIYPDESESDDLIGSERTLPILTTQAPKSGPRNLQVYNATSNSLTVKWDPASGRVQKYRITYQPSTGEGNEQTTTIGGRQNSVVLQKLKPDTPYTITVSSLYPDGEGGRMTGRGKTKPLNTVRNLRVYDPSTSTLNVRWDHAEGNPRQYKLFYAPAAGGPEELVPIPGNTNYAILRNLQPDTSYTVTVVPVYTEGDGGRTSDTGRTLMRGLARNVQVYNPTPNSLDVRWDPAPGPVLQYRVVYSPVDGTRPSESIVVPGNTRMVHLERLIPDTLYSVNLVALYSDGEGNPSPAQGRTLPRSGPRNLRVFGETTNSLSVAWDHADGPVQQYRIIYSPTVGDPIDEYTTVPGRRNNVILQPLQPDTPYKITVIAVYEDGDGGHLTGNGRTVGLLPPQNIHISDEWYTRFRVSWDPSPSPVLGYKIVYKPVGSNEPMEAFVGEMTSYTLHNLNPSTTYDVNVYAQYDSGLSVPLTDQGTTLYLNVTDLKTYQIGWDTFCVKWSPHRAATSYRLKLSPADGTRGQEITVRGSETSHCFTGLSPDTDYGVTVFVQTPNLEGPGVSVKEHTTVKPTEAPTEPPTPPPPPTIPPARDVCKGAKADIVFLTDASWSIGDDNFNKVVKFIFNTVGGFDEISPAGIQVSFVQYSDEVKSEFKLNTYNDKALALGALQNIRYRGGNTRTGKALTFIKEKVLTWESGMRKNVPKVLVVVTDGRSQDEVKKAALVIQQSGFSVFVVGVADVDYNELANIASKPSERHVFIVDDFESFEKIEDNLITFVCETATSSCPLIYLDGYTSPGFKMLEAYNLTEKNFASVQGVSLESGSFPSYSAYRIQKNAFVNQPTADLHPNGLPPSYTIILLFRLLPETPSDPFAIWQITDRDYKPQVGVIADPSSKTLSFFNKDTRGEVQTVTFDTEEVKTLFYGSFHKRDEGKCPAFPNSCTCTQDSVGPPGPPGPAGGPGAKGPRGERGISGAIGPPGPRGDIGPPGPQGPPGPQGPNGLSIPGEQGRQGMKGDAGEPGLPGRTGTPGLPGPPGPMGPPGDRGFTGKDGAMGPRGPPGPPGSPGSPGVTGPSGKPGKPGDHGRPGPSGLKGEKGDRGDIASQNMMRAVARQVCEQLISGQMNRFNQMLNQIPNDYQSSRNQPGPPGPPGPPGSAGARGEPGPGGRPGFPGTPGMQGPPGERGLPGEKGERGTGSSGPRGLPGPPGPQGESRTGPPGSTGSRGPPGPPGRPGNSGIRGPPGPPGYCDSSQCASIPYNGQGYPGSG

SEQ ID NO: 3229 - protein, 207 aa, Homo sapiens
VIQQSGFSVFVVGVADVDYNELANIASKPSERHVFIVDDFESFEKIEDNLITFVCETATSSCPLIYLDGYTSPGFKMLEAYNLTEKNFASVQGVSLESGSFPSYSAYRIQKNAFVNQPTADLHPNGLPPSYTIILLFRLLPETPSDPFAIWQITDRDYKPQVGVIADPSSKTLSFFNKDTRGEVQTVTFDTEEVKTLFYGSFHKVKT

SEQ ID NO: 3230 - protein, 756 aa, Homo sapiens
VSFVQYSDEVKSEFKLNTYNDKALALGALQNIRYRGGNTRTGKALTFIKEKVLTWESGMRKNVPKVLVVVTDGRSQDEVKKAALVIQQSGFSVFVVGVADVDYNELANIASKPSERHVFIVDDFESFEKIEDNLITFVCETATSSCPLIYLDGYTSPGFKMLEAYNLTEKNFASVQGVSLESGSFPSYSAYRIQKNAFVNQPTADLHPNGLPPSYTIILLFRLLPETPSDPFAIWQITDRDYKPQVGVIADPSSKTLSFFNKDTRGEVQTVTFDTEEVKTLFYGSFHKVHIVVTSKSVKIYIDCYEIIEKDIKEAGNITTDGYEILGKLLKGERKSAAFQIQSFDIVCSPVWTSRDRCCDIPSRRDEGKCPAFPNSCTCTQDSVGPPGPPGPAGGPGAKGPRGERGISGAIGPPGPRGDIGPPGPQGPPGPQGPNGLSIPGEQGRQGMKGDAGEPGLPGRTGTPGLPGPPGPMGPPGDRGFTGKDGAMGPRGPPGPPGSPGSPGVTGPSGKPGKPGDHGRPGPSGLKGEKGDRGDIASQNMMRAVARQVCEQLISGQMNRFNQMLNQIPNDYQSSRNQPGPPGPPGPPGSAGARGEPGPGGRPGFPGTPGMQGPPGERGLPGEKGERGTGSSGPRGLPGPPGPQGESRTGPPGSTGSRGPPGPPGRPGNSGIRGPPGPPGYCDSSQCASIPYNGQGYPEPYVPEGGAYLPEREPFIVPVEPERTAEYEDYGADEPAEEPPEPHRRWRRALPHGPGQ

SEQ ID NO: 3231 - protein, 638 aa, Homo sapiens
  VARIANT 1: note = misc_feature - Xaa can be any naturally occurring amino acid
XKSLLQAVANLPYKGGNTLTGMALNFIRQQNFRTQAGMRPRARKIGVLITDGKSQDDVEAPSKKLKDEGVELFAIGIKNADEVELKMIATDPDDTHAYNVADFESLSRIVDDLTINLCNSVKGPGDLEAPSNLVISERTHRSFRVSWTPPSDSVDRYKVEYYPVSGGKRQEFYVSRMETSTVLKDLKPETEYVVNVYSVVEDEYSEPLKGTEKTLPVPVVSLNIYDVGPTTMHVQWQPVGGATGYILSYKPVKDTEPTRPKEVRLGPTVNDMQLTDLVPNTEYAVTVQAVLHDLTSEPVTVREVTLPLPRPQDLKLRDVTHSTMNVFWEPVPGKVRKYIVRYKTPEEDVKEVEVDRSETSTSLKDLFSQTLYTVSVSAVHDEGESPPVTAQETTRPVPAPTNLKITEVTSEGFRGTWDHGASDVSLYRITWAPFGSSDKMETILNGDENTLVFENLNPNTIYEVSITAIYPDESESDDLIGSERTPPKSGPRNLQVYNATSNSLTVKWDPASGRVQKYRITYQPSTGEGNEQTTTIGGRQNSVVLQKLKPDTPYTITVSSLYPDGEGGRMTGRGKTKPLNTVRNLRVYDPSTSTLNVRWDHAEGNPRQYKLFYAPAAGGPEELVPIPGNTNYAILRNL

SEQ ID NO: 3232 - protein, 843 aa, Homo sapiens
FDVGSEKTRIGLAQYSGDPRIEWHLNAFSTKDEVIEAVRNLPYKGGNTLTGLALNYIFENSFKPEAGSRTGVSKIGILITDGKSQDDIIPPSRNLRESGVELFAIGVKNADVNELQEIASEPDSTHVYNVAEFDLMHTVVESLTRTLCSRVEEQDREIKASAHAITGPPTELITSEVTARSFMVNWTHAPGNVEKYRVVYYPTRGGKPDEVVVDGTVSSTVLKNLMSLTEYQIAVFAIYAHTASEGLRGTETTLALPMASDLLLYDVTENSMRVKWDAVPGASGYLILYAPLTEGLAGDEKEMKIGETHTDIELSGLLPNTEYTVTVYAMFGEEASDPVTGQETTLALSPPRNLRISNVGSNSARLTWDPTSRQINGYRIVYNNADGTEINEVEVDPITTFPLKGLTPLTEYTIAIFSIYDEGQSEPLTGVFTTEEVPAQQYLEIDEVTTDSFRVTWHPLSADEGLHKLMWIPVYGGKTEEVVLKEEQDSHVIEGLEPGTEYEVSLLAVLDDGSESEVVTAVGTTLDSFWTEPATTIVPTTSVTSVFQTGIRNLVVGDETTSSLRVKWDISDSDVQQFRVTYMTAQGDPEEEVIGTVMVPGSQNNLLLKPLLPDTEYKVTVTPIYTDGEGVSVSAPGKTLPSSGPQNLRVSEEWYNRLRITWDPPSSPVKGYRIVYKPVSVPGPTLETFVGADINTILITNLLSGMDYNVKIFASQASGFSDALTGMVKTLFLGVTNLQAKHVEMTSLCAHWQVHRHATAYRVVIESLQDRQKQESTVGGGTTRHCFYGLQPDSEYKISVYTKLQEIEGPSVSIMEKTQSLPTRPPTFPPTIPPAKEGKRIIE

SEQ ID NO: 3233 - protein, 149 aa, Homo sapiens
GPPGEPGRPGSPGAPGEQGPPGTPGFPGNAGVPGTPGERGLTGIKGEKGNPGVGTQGPRGPPGPAGPSGESRPGSPGPPGSPGPRGPPGHLGVPGPQGPSGQPGYCDPSSCSAYGVRGWMGIFLLDHPTLPSSPDHLPSLLFPGDGLLT

SEQ ID NO: 3234 - protein, 757 aa, Homo sapiens [sequence omitted]

SEQ ID NO: 3235 - protein, 1796 aa, Homo sapiens
MKIFQRKMRYWLLPPFLAIVYFCTIVQGQVAPPTRLRYNVISHDSIQISWKAPRGKFGGYKLLVTPTSGGKTNQLNLQNTATKAIIQGLMPDQNYTVQIIAYNKDKESKPAQGQFRIKDLEKRKDPKPRVKVVDRGNGSRPSSPEEVKFVCQTPAIADIVILVDGSWSIGRFNFRLVRHFLENLVTAFDVGSEKTRIGLAQYSGDPRIEWHLNAFSTKDEVIEAVRNLPYKGGNTLTGLALNYIFENSFKPEAGSRTGVSKIGILITDGKSQDDIIPPSRNLRESGVELFAIGVKNADVNELQEIASEPDSTHVYNVAEFDLMHTVVESLTRTLCSRVEEQDREIKASAHAITGPPTELITSEVTARSFMVNWTHAPGNVEKYRVVYYPTRGGKPDEVVVDGTVSSTVLKNLMSLTEYQIAVFAIYAHTASEGLRGTETTLALPMASDLLLYDVTENSMRVKWDAVPGASGYLILYAPLTEGLAGDEKEMKIGETHTDIELSGLLPNTEYTVTVYAMFGEEASDPVTGQETTLALSPPRNLRISNVGSNSARLTWDPTSRQINGYRIVYNNADGTEINEVEVDPITTFPLKGLTPLTEYTIAIFSIYDEGQSEPLTGVFTTEEVPAQQYLEIDEVTTDSFRVTWHPLSADEGLHKLMWIPVYGGKTEEVVLKEEQDSHVIEGLEPGTEYEVSLLAVLDDGSESEVVTAVGTTLDSFWTEPATTIVPTTSVTSVFQTGIRNLVVGDETTSSLRVKWDISDSDVQQFRVTYMTAQGDPEEEVIGTVMVPGSQNNLLLKPLLPDTEYKVTVTPIYTDGEGVSVSAPGKTLPSSGPQNLRVSEEWYNRLRITWDPPSSPVKGYRIVYKPVSVPGPTLETFVGADINTILITNLLSGMDYNVKIFASQASGFSDALTGMVKTLFLGVTNLQAKHVEMTSLCAHWQVHRHATAYRVVIESLQDRQKQESTVGGGTTRHCFYGLQPDSEYKISVYTKLQEIEGPSVSIMEKTQSLPTRPPTFPPTIPPAKEVCKAAKADLVFMVDGSWSIGDENFNKIISFLYSTVGALNKIGTDGTQVAMVQFTDDPRTEFKLNAYKTKETLLDAIKHISYKGGNTKTGKAIKYVRDTLFTAESGTRRGIPKVIVVITDGRSQDDVNKISREMQLDGYSIFAIGVADADYSELVSIGSKPSARHVFFVDDFDAFKKIEDELITFVCETASATCPVVHKDGIDLAGFKMMEMFGLVEKDFSSVEGVSMEPGTFNVFPCYQLHKDALVSQPTRYLHPEGLPSDYTISFLFRILPDTPQEPFALWEILNKNSDPLVGVILDNGGKTLTYFNYDQSGDFQTVTFEGPEIRKIFYGSFHKLHIVVSETLVKVVIDCKQVGEKAMNASANITSDGVEVLGKMVRSRGPGGNSAPFQLQMFDIVCSTSWANTDKCCELPGLRDDESCPDLPHSCSCSETNEVALGPAGPPGGPGLRGPKGQQGEPGPKGPDGPRGEIGLPGPQGPPGPQGPSGLSIQGMPGMPGEKGEKGDTGLPGPQGIPGGVGSPGRDGSPGQRGLPGKDGSSGPPGPPGPIGIPGTPGVPGITGSMGPQGALGPPGVPGAKGERGERGDLQSQAMVRSVARQVCEQLIQSHMARYTAILNQIPSHSSSIRTVQGPPGEPGRPGSPGAPGEQGPPGTPGFPGNAGVPGTPGERGLTGIKGEKGNPGVGTQGPRGPPGPAGPSGESRPGSPGPPGSPGPRGPPGHLGVPGPQGPSGQPGYCDPSSCSAYGVRAPHPDQPEFTPVQDELEAMELWGPGV

SEQ ID NO: 3236 - protein, 1780 aa, Homo sapiens
MKIFQRKMRYWLLPPFLAIVYFCTIVQGQVAPPTRLRYNVISHDSIQISWKAPRGKFGGYKLLVTPTSGGKTNQLNLQNTATKAIIQGLMPDQNYTVQIIAYNKDKESKPAQGQFRIKDLEKRKDPKPRVKVVDRGNGSRPSSPEEVKFVCQTPAIADIVILVDGSWSIGRFNFRLVRHFLENLVTAFDVGSEKTRIGLAQYSGDPRIEWHLNAFSTKDEVIEAVRNLPYKGGNTLTGLALNYIFENSFKPEAGSRTGVSKIGILITDGKSQDDIIPPSRNLRESGVELFAIGVKNADVNELQEIASEPDSTHVYNVAEFDLMHTVVESLTRTLCSRVEEQDREIKASAHAITGPPTELITSEVTARSFMVNWTHAPGNVEKYRVVYYPTRGGKPDEVVVDGTVSSTVLKNLMSLTEYQIAVFAIYAHTASEGLRGTETTLALPMASDLLLYDVTENSMRVKWDAVPGASGYLILYAPLTEGLAGDEKEMKIGETHTDIELSGLLPNTEYTVTVYAMFGEEASDPVTGQETTLALSPPRNLRISNVGSNSARLTWDPTSRQINGYRIVYNNADGTEINEVEVDPITTFPLKGLTPLTEYTIAIFSIYDEGQSEPLTGVFTTEEVPAQQYLEIDEVTTDSFRVTWHPLSADEGLHKLMWIPVYGGKTEEVVLKEEQDSHVIEGLEPGTEYEVSLLAVLDDGSESEVVTAVGTTLDSFWTEPATTIVPTTSVTSVFQTGIRNLVVGDETTSSLRVKWDISDSDVQQFRVTYMTAQGDPEEEVIGTVMVPGSQNNLLLKPLLPDTEYKVTVTPIYTDGEGVSVSAPGKTLPSSGPQNLRVSEEWYNRLRITWDPPSSPVKGYRIVYKPVSVPGPTLETFVGADINTILITNLLSGMDYNVKIFASQASGFSDALTGMVKTLFLGVTNLQAKHVEMTSLCAHWQVHRHATAYRVVIESLQDRQKQESTVGGGTTRHCFYGLQPDSEYKISVYTKLQEIEGPSVSIMEKTQSLPTRPPTFPPTIPPAKEVCKAAKADLVFMVDGSWSIGDENFNKIISFLYSTVGALNKIGTDGTQVAMVQFTDDPRTEFKLNAYKTKETLLDAIKHISYKGGNTKTGKAIKYVRDTLFTAESGTRRGIPKVIVVITDGRSQDDVNKISREMQLDGYSIFAIGVADADYSELVSIGSKPSARHVFFVDDFDAFKKIEDELITFVCETASATCPVVHKDGIDLAGFKMMEMFGLVEKDFSSVEGVSMEPGTFNVFPCYQLHKDALVSQPTRYLHPEGLPSDYTISFLFRILPDTPQEPFALWEILNKNSDPLVGVILDNGGKTLTYFNYDQSGDFQTVTFEGPEIRKIFYGSFHKLHIVVSETLVKVVIDCKQVGEKAMNASANITSDGVEVLGKMVRSRGPGGNSAPFQLQMFDIVCSTSWANTDKCCELPGLRDDESCPDLPHSCSCSETNEVALGPAGPPGGPGLRGPKGQQGEPGPKGPDGPRGEIGLPGPQGPPGPQGPSGLSIQGMPGMPGEKGEKGDTGLPGPQGIPGGVGSPGRDGSPGQRGLPGKDGSSGPPGPPGPIGIPGTPGVPGITGSMGPQGALGPPGVPGAKGERGERGDLQSQAMVRSVARQVCEQLIQSHMARYTAILNQIPSHSSSIRTVQGPPGEPGRPGSPGAPGEQGPPGTPGFPGNAGVPGTPGERGLTGIKGEKGNPGVGTQGPRGPPGPAGPSGESRPGSPGPPGSPGPRGPPGHLGVPGPQGPSGQPGYCDPSSCSAYGVRDLIPYNDYQH

SEQ ID NO: 3237 - protein, 534 aa, Homo sapiens
MKIFQRKMRYWLLPPFLAIVYFCTIVQGQVAPPTRLRYNVISHDSIQISWKAPRGKFGGYKLLVTPTSGGKTNQLNLQNTATKAIIQGLMPDQNYTVQIIAYNKDKESKPAQGQFRIKDLEKRKDPKPRVKVVDRGNGSRPSSPEEVKFVCQTPAIADIVILVDGSWSIGRFNFRLVRHFLENLVTAFDVGSEKTRIGLAQYSGDPRIEWHLNAFSTKDEVIEAVRNLPYKGGNTLTGLALNYIFENSFKPEAGSRTGVSKIGILITDGKSQDDIIPPSRNLRESGVELFAIGVKNADVNELQEIASEPDSTHVYNVAEFDLMHTVVESLTRTLCSRVEEQDREIKASAHAITGPPTELITSEVTARSFMVNWTHAPGNVEKYRVVYYPTRGGKPDEVVVDGTVSSTVLKNLMSLTEYQIAVFAIYAHTASEGLRGTETTLALPMASDLLLYDVTENSMRVKWDAVPGASGYLILYAPLTEGLAGDEKEMKIGETHTDIELSGLLPNTEYTVTVYAMFGEEASDPVTGQETTSP

SEQ ID NO: 3238 - protein, 534 aa, Homo sapiens; identical to SEQ ID NO: 3237

SEQ ID NO: 3239 - protein, 337 aa, Homo sapiens
  VARIANT 1: note = misc_feature - Xaa can be any naturally occurring amino acid
XVCQTPAIADIVILVDGSWSIGRFNFRLVRHFLENLVTAFDVGSEKTRIGVKNADVNELQEIASEPDSTHVYNVAEFDLMHTVVESLTRTLCSRVEEQDREIKASAHAITGPPTELITSEVTARSFMVNWTHAPGNVEKYRVVYYPTRGGKPDEVVVDGTVSSTVLKNLMSLTEYQIAVFAIYAHTASEGLRGTETTLALPMASDLLLYDVTENSMRVKWDAVPGASGYLILYAPLTEGLAGDEKEMKIGETHTDIELSGLLPNTEYTVTVYAMFGEEASDPVTGQETTLALSPPRNLRISNVGSNSARLTWDPTSRQINGYRIVYNNADGTEINEV

SEQ ID NO: 3240 - protein, 1388 aa, Homo sapiens
MAPRRNNGQCWCLLMLLSVSTPLPAVTQTRGATETASQGHLDLTQLIGVPLPSSVSFVTGYGGFPAYSFGPGANVGRPARTLIPSTFFRDFAISVVVKPSSTRGGVLFAITDAFQKVIYLGLRLSGVEDGHQRIILYYTEPGSHVSQEAAAFSVPVMTHRWNRFAMIVQGEEVTLLVNCEEHSRIPFQRSSQALAFESSAGIFMGNAGATGLERFTGSLQQLTVHPDPRTPEELCDPEESSASGETSGLQEADGVAEILEAVTYTQASPKEAKVEPINTPPTPSSPFEDMELSGEPVPEGTLETTNMSIIQHSSPKQGSGEILNDTLEGVHSVDGDPITDSGSGAGAFLDIAEEKNLAATAAGLAEVPISTAGEAEASSVPTGGPTLSMSTENPEEGVTPGPDNEERLAATAAGEAEALASMPGEVEASGVAPGELDLSMSAQSLGEEATVGPSSEDSLTTAAAATEVSLSTFEDEEASGVPTDGLAPLTATMAPERAVTSGPGDEEDLAAATTEEPLITAGGEESGSPPPDGPPLPLPTVAPERWITPAQREHVGMKGQAGPKGEKGDAGEELPGPPEPSGPVGPTAGAEAEGSGLGWGSDVGSGSGDLVGSEQLLRGPPGPPGPPGLPGIPGKPGTDVFMGPPGSPGEDGPAGEPGPPGPEGQPGVDGATGLPGMKGEKGARGPNGSVGEKGDPGNRGLPGPPGKKGQAGPPGVMGPPGPPGPPGPPGPGCTMGLGFEDTEGSGSTQLLNEPKLSRPTAAIGLKGEKGDRGPKGERGMDGASIVGPPGPRGPPGHIKVLSNSLINITHGFMNFSDIPELVGPPGPDGLPGLPGFPGPRGPKGDTGLPGFPGLKGEQGEKGEPGAILTEDIPLERLMGKKGEPGMHGAPGPMGPKGPPGHKGEFGLPGRPGRPGLNGLKGTKGDPGVIMQGPPGLPGPPGPPGPPGAVINIKGAIFPIPVRPHCKMPVDTAHPGSPELITFHGVKGEKGSWGLPGSKGEKGDQGAQGPPGPPLDLAYLRHFLNNLKGENGDKGFKGEKGEKGDINGSFLMSGPPGLPGNPGPAGQKGETVVGPQGPPGAPGLPGPPGFGRPGDPGPPGPPGPPGPPAILGAAVALPGPPGPPGQPGLPGSRNLVTAFSNMDDMLQKAHLVIEGTFIYLRDSTEFFIRVRDGWKKLQLGELIPIPADSPPPPALSSNPHQLLPPPNPISSANYEKPALHLAALNMPFSGDIRADFQCFKQARAAGLLSTYRAFLSSHLQDLSTIVRKAERYSLPIVNLKGQVLFNNWDSIFSGHGGQFNMHIPIYSFDGRDIMTDPSWPQKVIWHGSSPHGVRLVDNYCEAWRTADTAVTGLASPLSTGKILDQKAYSCANRLIVLCIENSFMTDARK

SEQ ID NO: 3241 - protein, 1374 aa, Homo sapiens
MLLSVSTPLPAVTQTRGATETASQGHLDLTQLIGVPLPSSVSFVTGYGGFPAYSFGPGANVGRPARTLIPSTFFRDFAISVVVKPSSTRGGVLFAITDAFQKVIYLGLRLSGVEDGHQRIILYYTEPGSHVSQEAAAFSVPVMTHRWNRFAMIVQGEEVTLLVNCEEHSRIPFQRSSQALAFESSAGIFMGNAGATGLERFTGSLQQLTVHPDPRTPEELCDPEESSASGETSGLQEADGVAEILEAVTYTQASPKEAKVEPINTPPTPSSPFEDMELSGEPVPEGTLETTNMSIIQHSSPKQGKGAILNDTLEGVHSVDGDPITDSGSGAGAFLDIAEEKNLAATAAGLAEVPISTAGEAEASSVPTGGPTLSMSTENPEEGVTPGPDNEERLAATAAGEAEALASMPGEVEASGVAPGELDLSMSAQSLGEEATVGPSSEDSLTTAAAATEVSLSTFEDEEASGVPTDGLAPLTATMAPERAVTSGPGDEEDLAAATTEEPLITAGGEESGSPPPDGPPLPLPTVAPERWITPAQREHVGMKGQAGPKGEKGDAGEELPGPPEPSGPVGPTAGAEAEGSGLGWGSDVGSGSGDLVGSEQLLRGPPGPPGPPGLPGIPGKPGTDVFMGPPGSPGEDGPAGEPGPPGPEGQPGVDGATGLPGMKGEKGARGPNGSVGEKGDPGNRGLPGPPGKKGQAGPPGVMGPPGPPGPPGPPGPGCTMGLGFEDTEGSGSTQLLNEPKLSRPTAAIGLKGEKGDRGPKGERGMDGASIVGPPGPRGPPGHIKVLSNSLINITHGFMNFSDIPELVGPPGPDGLPGLPGFPGPRGPKGDTGLPGFPGLKGEQGEKGEPGAILTEDIPLERLMGKKGEPGMHGAPGPMGPKGPPGHKGEFGLPGRPGRPGLNGLKGTKGDPGVIMQGPPGLPGPPGPPGPPGAVINIKGAIFPIPVRPHCKMPVDTAHPGSPELITFHGVKGEKGSWGLPGSKGEKGDQGAQGPPGPPLDLAYLRHFLNNLKGENGDKGFKGEKGEKGDINGSFLMSGPPGLPGNPGPAGQKGETVVGPQGPPGAPGLPGPPGFGRPGDPGPPGPPGPPGPPAILGAAVALPGPPGPPGQPGLPGSRNLVTAFSNMDDMLQKAHLVIEGTFIYLRDSTEFFIRVRDGWKKLQLGELIPIPADSPPPPALSSNPHQLLPPPNPISSANYEKPALHLAALNMPFSGDIRADFQCFKQARAAGLLSTYRAFLSSHLQDLSTIVRKAERYSLPIVNLKGQVLFNNWDSIFSGHGGQFNMHIPIYSFDGRDIMTDPSWPQKVIWHGSSPHGVRLVDNYCEAWRTADTAVTGLASPLSTGKILDQKAYSCANRLIVLCIENSFMTDARK

SEQ ID NO: 3242 - protein, 235 aa, Homo sapiens
GEPGPPGRGVQGPQGEPGAPGLPGIQGLPGPRGPPGPTGEKGAQGSPGVKGATGPVGPPGASVSGPPGRDGQQGQTGLRGTPGEKGPRGEKGEPGECSCPSQGDLIFSGMPGPPGIPGPPGPPGVPGLQGVPGNNGLPGQPGLTAELGSLPIEQHLLKSICGDCVQGQRAHPGYLVEKGEKGDQGIPGVPGLDNCAQCFLSLERPRAEEARGDNSEGDPGCVGSPGLPGPPGLPG

SEQ ID NO: 3243 - protein, 224 aa, Homo sapiens
GPPGSEGLPGPPGPAGPRGERGPQGNSGEKGDQGFQGQPGFPGPPGPPGFPGKVGSPGPPGPQAEKGPAGLDGLDGKDGKPGLRGDPGPAGPPGLMGPPGFKGKTGHPGLPGPKGDCGKPGPPGSTGRPGAEGEPGAMGPQGRPGPPGHVGPPGPPGQPGPAGISAVGLKGDRGATGERGLAGLPGQPGPPGHPGPPGEPGTDGAAGKEGPPGKQGFYGPPGPK

SEQ ID NO: 3244 - protein, 308 aa, Homo sapiens
KVYTRCFCLEEPQNSEVDAQLTGRISQKAERGAKVHQETAADECPPCVHGARDSNGGKGERGLPGPPGSKGEKGARGNDCVRISPDAPLQCAEGPKGEKGESGALGPSGLPGSTGEKGQKGEKGDGGIKGVPGKPGRDGRPGEICVIGPKGQKGDPGFVGPEGLAGEPGPPGLPGPPGIGLPGTPGDPGGPPGPKGDKGSSGIPGKEGPGGKPGKPGVKGEKGDPCEVCPTLPEGFQNFVGLPGKPGPKGEPGDPVPARGDPGIQGIKGEKGEPCLSCSSVVGAQHLVSSTGASGDVGSPGFGLPGLP

SEQ ID NO: 3245 - protein, 1604 aa, Homo sapiens
MWVSWAPGLWLLGLWATFGHGANTGAQCPPSQQEGLKLEHSSSLPANVTGFNLIHRLSLMKTSAIKKIRNPKGPLILRLGAAPVTQPTRRVFPRGLPEEFALVLTLLLKKHTHQKTWYLFQVTDANGYPQISLEVNSQERSLELRAQGQDGDFVSCIFPVPQLFDLRWHKLMLSVAGRVASVHVDCSSASSQPLGPRRPMRPVGHVFLGLDAEQGKPVSFDLQQVHIYCDPELVLEEGCCEILPAGCPPETSKARRDTQSNELIEINPQSEGKVYTRCFCLEEPQNSEVDAQLTGRISQKAERGAKVHQETAADECPPCVHGARDSNVTLAPSGPKGGKGERGLPGPPGSKGEKGARGNDCVRISPDAPLQCAEGPKGEKGESGALGPSGLPGSTGEKGQKGEKGDGGIKGVPGKPGRDGRPGEICVIGPKGQKGDPGFVGPEGLAGEPGPPGLPGPPGIGLPGTPGDPGGPPGPKGDKGSSGIPGKEGPGGKPGKPGVKGEKGDPCEVCPTLPEGFQNFVGLPGKPGPKGEPGDPVPARGDPGIQGIKGEKGEPCLSCSSVVGAQHLVSSTGASGDVGSPGFGLPGLPGRAGVPGLKGEKGNFGEAGPAGSPGPPGPVGPAGIKGAKGEPCEPCPALSNLQDGDVRVVALPGPSGEKGEPGPPGFGLPGKQGKAGERGLKGQKGDAGNPGDPGTPGTTGRPGLSGEPGVQGPAGPKGEKGDGCTACPSLQGTVTDMAGRPGQPGPKGEQGPEGVGRPGKPGQPGLPGVQGPPGLKGVQGEPGPPGRGVQGPQGEPGAPGLPGIQGLPGPRGPPGPTGEKGAQGSPGVKGATGPVGPPGASVSGPPGRDGQQGQTGLRGTPGEKGPRGEKGEPGECSCPSQGDLIFSGMPGAPGLWMGSSWQPGPQGPPGIPGPPGPPGVPGLQGVPGNNGLPGQPGLTAELGSLPIEQHLLKSICGDCVQGQRAHPGYLVEKGEKGDQGIPGVPGLDNCAQCFLSLERPRAEEARGDNSEGDPGCVGSPGLPGPPGLPGQRGEEGPPGMRGSPGPPGPIGPPGFPGAVGSPGLPGLQGERGLTGLTGDKGEPGPPGQPGYPGATGPPGLPGIKGERGYTGSAGEKGEPGPPGSEGLPGPPGPAGPRGERGPQGNSGEKGDQGFQGQPGFPGPPGPPGFPGKVGSPGPPGPQAEKGSEGIRGPSGLPGSPGPPGPPGIQGPAGLDGLDGKDGKPGLRGDPGPAGPPGLMGPPGFKGKTGHPGLPGPKGDCGKPGPPGSTGRPGAEGEPGAMGPQGRPGPPGHVGPPGPPGQPGPAGISAVGLKGDRGATGERGLAGLPGQPGPPGHPGPPGEPGTDGAAGKEGPPGKQGFYGPPGPKGDPGAAGQKGQAGEKGRAGMPGGPGKSGSMGPVGPPGPAGERGHPGAPGPSGSPGLPGVPGSMGDMVNYDEIKRFIRQEIIKMFDERMAYYTSRMQFPMEMAAAPGRPGPPGKDGAPGRPGAPGSPGLPGQIGREGRQGLPGVRGLPGTKGEKGDIGIGIAGENGLPGPPGPQGPPGYGKMGATGPMGQQGIPGIPGPPGPMGQPGKAGHCNPSDCFGAMPMEQQYPPMKTMKGPFG

SEQ ID NO: 3246 - protein, 966 aa, Homo sapiens
MWVSWAPGLWLLGLWATFGHGANTGAQCPPSQQEGLKLEHSSSLPANVTGFNLIHRLSLMKTSAIKKIRNPKGPLILRLGAAPVTQPTRRVFPRGLPEEFALVLTLLLKKHTHQKTWYLFQVTDANGYPQISLEVNSQERSLELRAQGQDGDFVSCIFPVPQLFDLRWHKLMLSVAGRVASVHVDCSSASSQPLGPRRPMRPVGHVFLGLDAEQGKPVSFDLQQVHIYCDPELVLEEGCCEILPAGCPPETSKARRDTQSNELIEINPQSEGKVYTRCFCLEEPQNSEVDAQLTGRISQKAERGAKVHQETAADECPPCVHGARDSNVTLAPSGPKGGKGERGLPGPPGSKGEKGARGNDCVRISPDAPLQCAEGPKGEKGESGALGPSGLPGSTGEKGQKGEKGDGGIKGVPGKPGRDGRPGEICVIGPKGQKGDPGFVGPEGLAGEPGPPGLPGPPGIGLPGTPGDPGGPPGPKGDKGSSGIPGKEGPGGKPGKPGVKGEKGDPCEVCPTLPEGFQNFVGLPGKPGPKGEPGDPVPARGDPGIQGIKGEKGEPCLSCSSVVGAQHLVSSTGASGDVGSPGFGLPGLPGRAGVPGLKGEKGNFGEAGPAGSPGPPGPVGPAGIKGAKGEPCEPCPALSNLQDGDVRVVALPGPSGEKGEPGPPGFGLPGKQGKAGERGLKGQKGDAGNPGDPGTPGTTGRPGLSGEPGVQGPAGPKGEKGDGCTACPSLQGTVTDMAGRPGQPGPKGEQGPEGVGRPGKPGQPGLPGVQGPPGLKGVQGEPGPPGRGVQGPQGEPGAPGLPGIQGLPGPRGPPGPTGEKGAQGSPGVKGATGPVGPPGASVSGPPGRDGQQGQTGLRGTPGEKGPRGEKGEPGECSCPSQGDLIFSGMPGPPGIPGPPGPPGVPGLQVKGEKRMRSLGGRAHGSGWLLPAGPQGCCSPTPKTQTCHFSLLCLPASQGGKEGPLSL

SEQ ID NO: 3247 - protein, 687 aa, Homo sapiens
GEVGADGVPGFPGLPGREGIAGPQGPKGDRGSRGEKGDPGKDGVGQPGLPGPPGPPGPVVYVSEQDGSVLSVPGPEGRPGFAGFPGPAGPKGNLGSKGERGSPGPKGEKGEPGSIFSPDGGALGPAQKGAKGEPGFRGPPGPYGRPGYKGEIGFPGRPGRPGMNGLKGEKGEPGDASLGFGMRGMPGPPGPPGPPGPPGTPVYDSNVFAESSRPGPPGLPGNQGPPGPKGAKGEVGPPGPPGQFPFDFLQLEAEMKGEKGDRGDAGQKGERGEPGGGGFFGSSLPGPPGPPGPPGPRGYPGIPGPKGESIRGQPGPPGPQGPPGIGYEGRQGPPGPPGPPGPPSFPGPHRQTISVPGPPGPPGPPGPPGTMGASSGQVRLWATRQAMLGQVHEVPEGWLIFVAEQEELYVRVQNGFRKVQLEARTPLPRGTDNEVAALQPPVVQLHDSNPYPRREHPHPTARPWRADDILASPPRLPEPQPYPGAPHHSSYVHLRPARPTSPPAHSHRDFQPVLHLVALNSPLSGGMRGIRGADFQCFQQARAVGLAGTFRAFLSSRLQDLYSIVRRADRAAVPIVNLKDELLFPSWEALFSGSEGPLKPGARIFSFDGKDVLRHPTWPQKSVWHGSDPNGRRLTESYCETWRTEAPSATGQASSLLGGRLLGQSAASCHHAYIVLCIENSFMTASK

SEQ ID NO: 3248 - protein, 1339 aa, Homo sapiens
MAPRCPWPWPRRRRLLDVLAPLVLLLGVRAASAEPERISEEVGLLQLLGDPPPQQVTQTDDPDVGLAYVFGPDANSGQVARYHFPSLFFRDFSLLFHIRPATEGPGVLFAITDSAQAMVLLGVKLSGVQDGHQDISLLYTEPGAGQTHTAASFRLPAFVGQWTHLALSVAGGFVALYVDCEEFQRMPLARSSRGLELEPGAGLFVAQAGGADPDKFQGVIAELKVRRDPQVSPMHCLDEEGDDSDGASGDSGSGLGDARELLREETGAALKPRLPAPPPVTTPPLAGGSSTEDSRSEEVEEQTTVASLGAQTLPGSDSVSTWDGSVRTPGGRVKEGGLKGQKGEPGVPGPPGRAGPPGSPCLPGPPGLPCPVSPLGPAGPALQTVPGPQGPPGPPGRDGTPGRDGEPGDPGEDGKPGDTGPQGFPGTPGDVGPKGDKGDPGVGERGPPGPQGPPGPPGPSFRHDKLTFIDMEGSGFGGDLEALRGPRGFPGPPGPPGVPGLPGEPGRFGVNSSDVPGPAGLPGVPGREGPPGFPGLPGPPGPPGREGPPGRTGQKGSLGEAGAPGHKGSKGAPGPAGARGESGLAGAPGPAGPPGPPGPPGPPGPGLPAGFDDMEGSGGPFWSTARSADGPQGPPGLPGLKGDPGVPGLPGAKGEVGADGVPGFPGLPGREGIAGPQGPKGDRGSRGEKGDPGKDGVGQPGLPGPPGPPGPVVYVSEQDGSVLSVPGPEGRPGFAGFPGPAGPKGNLGSKGERGSPGPKGEKGEPGSIFSPDGGALGPAQKGAKGEPGFRGPPGPYGRPGYKGEIGFPGRPGRPGMNGLKGEKGEPGDASLGFGMRGMPGPPGPPGPPGPPGTPVYDSNVFAESSRPGPPGLPGNQGPPGPKGAKGEVGPPGPPGQFPFDFLQLEAEMKGEKGDRGDAGQKGERGEPGGGGFFGSSLPGPPGPPGPPGPRGYPGIPGPKGESIRGQPGPPGPQGPPGIGYEGRQGPPGPPGPPGPPSFPGPHRQTISVPGPPGPPGPPGPPGTMGASSGVRLWATRQAMLGQVHEVPEGWLIFVAEQEELYVRVQNGFRKVQLEARTPLPRGTDNEVAALQPPVVQLHDSNPYPRREHPHPTARPWRADDILASPPRLPEPQPYPGAPHHSSYVHLRPARPTSPPAHSHRDFQPVLHLVALNSPLSGGMRGIRGADFQCFQQARAVGLAGTFRAFLSSRLQDLYSIVRRADRAAVPIVNLKDELLFPSWEALFSGSEGPLKPGARIFSFDGKDVLRHPTWPQKSVWHGSDPNGRRLTESYCETWRTEAPSATGQASSLLGGRLLGQSAASCHHAYIVLCIENSFMTASK

SEQ ID NO: 3249 - protein, 1519 aa, Homo sapiens
MAPYPCGCHILLLLFCCLAAARANLLNLNWLWFNNEDTSHAATTIPEPQGPLPVQPTADTTTHVTPRNGSTEPATAPGSPEPPSELLEDGQDTPTSAESPDAPEENIAGVGAEILNVAKGIRSFVQLWNDTVPTESLARAETLVLETPVGPLALAGPSSTPQENGTTLWPSRGIPSSPGAHTTEAGTLPAPTPSPPSLGRPWAPLTGPSVPPPSSERISEEVGLLQLLGDPPPQQVTQTDDPDVGLAYVFGPDANSGQVARYHFPSLFFRDFSLLFHIRPATEGPGVLFAITDSAQAMVLLGVKLSGVQDGHQDISLLYTEPGAGQTHTAASFRLPAFVGQWTHLALSVAGGFVALYVDCEEFQRMPLARSSRGLELEPGAGLFVAQAGGADPDKFQGVIAELKVRRDPQVSPMHCLDEEGDDSDGASGDSGSGLGDARELLREETGAALKPRLPAPPPVTTPPLAGGSSTEDSRSEEVEEQTTVASLGAQTLPGSDSVSTWDGSVRTPGGRVKEGGLKGQKGEPGVPGPPGRAGPPGSPCLPGPPGLPCPVSPLGPAGPALQTVPGPQGPPGPPGRDGTPGRDGEPGDPGEDGKPGDTGPQGFPGTPGDVGPKGDKGDPGVGERGPPGPQGPPGPPGPSFRHDKLTFIDMEGSGFGGDLEALRGPRGFPGPPGPPGVPGLPGEPGRFGVNSSDVPGPAGLPGVPGREGPPGFPGLPGPPGPPGREGPPGRTGQKGSLGEAGAPGHKGSKGAPGPAGARGESGLAGAPGPAGPPGPPGPPGPPGPGLPAGFDDMEGSGGPFWSTARSADGPQGPPGLPGLKGDPGVPGLPGAKGEVGADGVPGFPGLPGREGIAGPQGPKGDRGSRGEKGDPGKDGVGQPGLPGPPGPPGPVVYVSEQDGSVLSVPGPEGRPGFAGFPGPAGPKGNLGSKGERGSPGPKGEKGEPGSIFSPDGGALGPAQKGAKGEPGFRGPPGPYGRPGYKGEIGFPGRPGRPGMNGLKGEKGEPGDASLGFGMRGMPGPPGPPGPPGPPGTPVYDSNVFAESSRPGPPGLPGNQGPPGPKGAKGEVGPPGPPGQFPFDFLQLEAEMKGEKGDRGDAGQKGERGEPGGGGFFGSSLPGPPGPPGPPGPRGYPGIPGPKGESIRGQPGPPGPQGPPGIGYEGRQGPPGPPGPPGPPSFPGPHRQTISVPGPPGPPGPPGPPGTMGASSGVRLWATRQAMLGQVHEVPEGWLIFVAEQEELYVRVQNGFRKVQLEARTPLPRGTDNEVAALQPPVVQLHDSNPYPRREHPHPTARPWRADDILASPPRLPEPQPYPGAPHHSSYVHLRPARPTSPPAHSHRDFQPVLHLVALNSPLSGGMRGIRGADFQCFQQARAVGLAGTFRAFLSSRLQDLYSIVRRADRAAVPIVNLKDELLFPSWEALFSGSEGPLKPGARIFSFDGKDVLRHPTWPQKSVWHGSDPNGRRLTESYCETWRTEAPSATGQASSLLGGRLLGQSAASCHHAYIVLCIENSFMTASK

SEQ ID NO: 3250 - protein, 1754 aa, Homo sapiens
MAPYPCGCHILLLLFCCLAAARANLLNLNWLWFNNEDTSHAATTIPEPQGPLPVQPTADTTTHVTPRNGSTEPATAPGSPEPPSELLEDGQDTPTSAESPDAPEENIAGVGAEILNVAKGIRSFVQLWNDTVPTESLARAETLVLETPVGPLALAGPSSTPQENGTTLWPSRGIPSSPGAHTTEAGTLPAPTPSPPSLGRPWAPLTGPSVPPPSSGRASLSSLLGGAPPWGSLQDPDSQGLSPAAAAPSQQLQRPDVRLRTPLLHPLVMGSLGKHAAPSAFSSGLPGALSQVAVTTLTRDSGAWVSHVANSVGPGLANNSALLGADPEAPAGRCLPLPPSLPVCGHLGISRFWLPNHLHHESGEQVRAGARAWGGLLQTHCHPFLAWFFCLLLVPPCGSVPPPAPPPCCQFCEALQDACWSRLGGGRLPVACASLPTQEDGYCVLIGPAAERISEEVGLLQLLGDPPPQQVTQTDDPDVGLAYVFGPDANSGQVARYHFPSLFFRDFSLLFHIRPATEGPGVLFAITDSAQAMVLLGVKLSGVQDGHQDISLLYTEPGAGQTHTAASFRLPAFVGQWTHLALSVAGGFVALYVDCEEFQRMPLARSSRGLELEPGAGLFVAQAGGADPDKFQGVIAELKVRRDPQVSPMHCLDEEGDDSDGASGDSGSGLGDARELLREETGAALKPRLPAPPPVTTPPLAGGSSTEDSRSEEVEEQTTVASLGAQTLPGSDSVSTWDGSVRTPGGRVKEGGLKGQKGEPGVPGPPGRAGPPGSPCLPGPPGLPCPVSPLGPAGPALQTVPGPQGPPGPPGRDGTPGRDGEPGDPGEDGKPGDTGPQGFPGTPGDVGPKGDKGDPGVGERGPPGPQGPPGPPGPSFRHDKLTFIDMEGSGFGGDLEALRGPRGFPGPPGPPGVPGLPGEPGRFGVNSSDVPGPAGLPGVPGREGPPGFPGLPGPPGPPGREGPPGRTGQKGSLGEAGAPGHKGSKGAPGPAGARGESGLAGAPGPAGPPGPPGPPGPPGPGLPAGFDDMEGSGGPFWSTARSADGPQGPPGLPGLKGDPGVPGLPGAKGEVGADGVPGFPGLPGREGIAGPQGPKGDRGSRGEKGDPGKDGVGQPGLPGPPGPPGPVVYVSEQDGSVLSVPGPEGRPGFAGFPGPAGPKGNLGSKGERGSPGPKGEKGEPGSIFSPDGGALGPAQKGAKGEPGFRGPPGPYGRPGYKGEIGFPGRPGRPGMNGLKGEKGEPGDASLGFGMRGMPGPPGPPGPPGPPGTPVYDSNVFAESSRPGPPGLPGNQGPPGPKGAKGEVGPPGPPGQFPFDFLQLEAEMKGEKGDRGDAGQKGERGEPGGGGFFGSSLPGPPGPPGPPGPRGYPGIPGPKGESIRGQPGPPGPQGPPGIGYEGRQGPPGPPGPPGPPSFPGPHRQTISVPGPPGPPGPPGPPGTMGASSGVRLWATRQAMLGQVHEVPEGWLIFVAEQEELYVRVQNGFRKVQLEARTPLPRGTDNEVAALQPPVVQLHDSNPYPRREHPHPTARPWRADDILASPPRLPEPQPYPGAPHHSSYVHLRPARPTSPPAHSHRDFQPVLHLVALNSPLSGGMRGIRGADFQCFQQARAVGLAGTFRAFLSSRLQDLYSIVRRADRAAVPIVNLKDELLFPSWEALFSGSEGPLKPGARIFSFDGKDVLRHPTWPQKSVWHGSDPNGRRLTESYCETWRTEAPSATGQASSLLGGRLLGQSAASCHHAYIVLCIENSFMTASK

SEQ ID NO: 3251 - protein, 280 aa, Homo sapiens
  VARIANT 1: note = misc_feature - Xaa can be any naturally occurring amino acid
XISVPGPPGPPGPPGPPGTMGASSGVRLWATRQAMLGQVHEVPEGWLIFVAEQEELYVRVQNGFRKVQDNEVAALQPPVVQLHDSNPYPRREHPHPTARPWRADDILASPPRLPEPQPYPGAPHHSSYVHLRPARPTSPPAHSHRDFQPVLHLVALNSPLSGGMRGIRGADFQCFQQARAVGLAGTFRAFLSSRLQDLYSIVRRADRAAVPIVNLKDELLFPSWEALFSGSEGPLKPGARIFSFDGKDVLRHPTWPQKSVWHGSDPNGRRLTESYCETWR

SEQ ID NO: 3252 - protein, 36 aa, Homo sapiens
GPPGIQGIHQTLGGYYNKDNKGNDEHEAGGLKGDKV

SEQ ID NO: 3253 - protein, 1142 aa, Homo sapiens
MRLTGPWKLWLWMSIFLLPASTSVTVRDKTEESCPILRIEGHQLTYDNINKLEVSGFDLGDSFSLRRAFCESDKTCFKLGSALLIRDTIKIFPKGLPEEYSVAAMFRVRRNAKKERWFLWQVLNQQNIPQISIVVDGGKKVVEFMFQATEGDVLNYIFRNRELRPLFDRQWHKLGISIQSQVISLYMDCNLIARRQTDEKDTVDFHGRTVIATRASDGKPVDIELHQLKIYCSANLIAQETCCEISDTKCPEQDGFGNIASSWVTAHASKMSSYLPAKQELKDQCQCIPNKGEAGLPGAPGSPGQKGHKGEPGENGLHGAPGFPGQKGEQGFEGSKGETGEKGEQGEKGDPALAGLNGENGLKGDLGPHGPPGPKGEKGDTGPPGPPALPGSLGIQGPQGPPGKEGQRGRRGKTGPPGKPGPPGPPGPPGIQGIHQTLGGYYNKDNKGNDEHEAGGLKGDKGETGLPGFPGSVGPKGQKGEPGEPFTKGEKGDRGEPGVIGSQGVKGEPGDPGPPGLIGSPGLKGQQGSAGSMGPRGPPGDVGLPGEHGIPGKQGIKGEKGDPGGIIGPPGLPGPKGEAGPPGKSLPGEPGLDGNPGAPGPRGPKGERGLPGVHGSPGDIGPQGIGIPGRTGAQGPAGEPGIQGPRGLPGLPGTPGTPGNDGVPGRDGKPGLPGPPGDPIALPLLGDIGALLKNFCGNCQASVPGLKSNKGEEGGAGEPGKYDSMARKGDIGPRGPPGIPGREGPKGSKGERGYPGIPGEKGDEGLQGIPGIPGAPGPTGPPGLMGRTGHPGPTGAKGEKGSDGPPGKPGPPGPPGIPFNERNGMSSLYKIKGGVNVPSYPGPPGPPGPKGDPGPVGEPGAMGLPGLEGFPGVKGDRGPAGPPGIAGMSGKPGAPGPPGVPGEPGERGPVGDIGFPGPEGPSGKPGINGKDGIPGAQGIMGKPGDRGPKGERGDQGIPGDRGSQGERGKPGLTGMKGAIGPMGPPGNKGSMGSPGHQGPPGSPGIPGIPADAVSFEEIKKYINQEVLRIFEERMAVFLSQLKLPAAMLAAQAYGRPGPPGKDGLPGPPGDPGPQGYRGQKGERGEPGIGLPGSPGLPGTSALGLPGSPGAPGPQGPPGPSGRCNPEDCLYPVSHAHQRTGGN

SEQ ID NO: 3254 - protein, 60 aa, Homo sapiens
MRLTGPWKLWLWMSIFLLPASTSVTVRDKTGIQANSLPNHQMLFIAFKSLKQILLRLKRP

SEQ ID NO: 3255 - protein, 1464 aa, Homo sapiens
MFSFVDLRLLLLLAATALLTHGQEEGQVEGQDEDIPPITCVQNGLRYHDRDVWKPEPCRICVCDNGKVLCDDVICDETKNCPGAEVPEGECCPVCPDGSESPTDQETTGVEGPKGDTGPRGPRGPAGPPGRDGIPGQPGLPGPPGPPGPPGPPGLGGNFAPQLSYGYDEKSTGGISVPGPMGPSGPRGLPGPPGAPGPQGFQGPPGEPGEPGASGPMGPRGPPGPPGKNGDDGEAGKPGRPGERGPPGPQGARGLPGTAGLPGMKGHRGFSGLDGAKGDAGPAGPKGEPGSPGENGAPGQMGPRGLPGERGRPGAPGPAGARGNDGATGAAGPPGPTGPAGPPGFPGAVGAKGEAGPQGPRGSEGPQGVRGEPGPPGPAGAAGPAGNPGADGQPGAKGANGAPGIAGAPGFPGARGPSGPQGPGGPPGPKGNSGEPGAPGSKGDTGAKGEPGPVGVQGPPGPAGEEGKRGARGEPGPTGLPGPPGERGGPGSRGFPGADGVAGPKGPAGERGSPGPAGPKGSPGEAGRPGEAGLPGAKGLTGSPGSPGPDGKTGPPGPAGQDGRPGPPGPPGARGQAGVMGFPGPKGAAGEPGKAGERGVPGPPGAVGPAGKDGEAGAQGPPGPAGPAGERGEQGPAGSPGFQGLPGPAGPPGEAGKPGEQGVPGDLGAPGPSGARGERGFPGERGVQGPPGPAGPRGANGAPGNDGAKGDAGAPGAPGSQGAPGLQGMPGERGAAGLPGPKGDRGDAGPKGADGSPGKDGVRGLTGPIGPPGPAGAPGDKGESGPSGPAGPTGARGAPGDRGEPGPPGPAGFAGPPGADGQPGAKGEPGDAGAKGDAGPPGPAGPAGPPGPIGNVGAPGAKGARGSAGPPGATGFPGAAGRVGPPGPSGNAGPPGPPGPAGKEGGKGPRGETGPAGRPGEVGPPGPPGPAGEKGSPGADGPAGAPGTPGPQGIAGQRGVVGLPGQRGERGFPGLPGPSGEPGKQGPSGASGERGPPGPMGPPGLAGPPGESGREGAPGAEGSPGRDGSPGAKGDRGETGPAGPPGAPGAPGAPGPVGPAGKSGDRGETGPAGPAGPVGPVGARGPAGPQGPRGDKGETGEQGDRGIKGHRGFSGLQGPPGPPGSPGEQGPSGASGPAGPRGPPGSAGAPGKDGLNGLPGPIGPPGPRGRTGDAGPVGPPGPPGPPGPPGPPSAGFDFSFLPQPPQEKAHDGGRYYRADDANVVRDRDLEVDTTLKSLSQQIENIRSPEGSRKNPARTCRDLKMCHSDWKSGEYWIDPNQGCNLDAIKVFCNMETGETCVYPTQPSVAQKNWYISKNPKDKRHVWFGESMTDGFQFEYGGQGSDPADVAIQLTFLRLMSTEASQNITYHCKNSVAYMDQQTGNLKKALLLQGSNEIEIRAEGNSRFTYSVTVDGCTSHTGAWGKTVIEYKTTKTSRLPIIDVAPLDVGAPDQEFGFDVGPVCFL

SEQ ID NO: 3256 - protein, 154 aa, Homo sapiens
MRSRRAFKDLRKEERGEGREVKNPSVPLRPGGKVVKLGVAVTTDNAPLPPVPVPPITCVQNGLRYHDRDVWKPEPCRICVCDNGKVLCDDVICDETKNCPGAEVPEGECCPVCPDGSESPTDQETTGVEGPKGDTGPRGPRGPAGPPGRDGIPG

SEQ ID NO: 3257 - protein, 1364 aa, Homo sapiens
MLSFVDTRTLLLLAVTLCLATCQFFETVRKGPAGDRGPRGERGPPGPPGRDGEDGPTGPPGPPGPPGPPGLGGNFAAQYDGKGVGLGPGPMGLMGPRGPPGAAGAPGPQGFQGPAGEPGEPGQTGPAGARGPAGPPGKAGEDGHPGKPGRPGERGVVGPQGARGFPGTPGLPGFKGIRGHNGLDGLKGQPGAPGVKGEPGAPGENGTPGQTGARGLPGERGRVGAPGPAGARGSDGSVGPVGPAGPIGSAGPPGFPGAPGPKGEIGAVGNAGPAGPAGPRGEVGLPGLSGPVGPPGNPGANGLTGAKGAAGLPGVAGAPGLPGPRGIPGPVGAAGATGARGLVGEPGPAGSKGESGNKGEPGSAGPQGPPGPSGEEGKRGPNGEAGSAGPPGPPGLRGSPGSRGLPGADGRAGVMGPPGSRGASGPAGVRGPNGDAGRPGEPGLMGPRGLPGSPGNIGPAGKEGPVGLPGIDGRPGPIGPAGARGEPGNIGFPGPKGPTGDPGKNGDKGHAGLAGARGAPGPDGNNGAQGPPGPQGVQGGKGEQGPPGPPGFQGLPGPSGPAGEVGKPGERGLHGEFGLPGPAGPRGERGPPGESGAAGPTGPIGSRGPSGPPGPDGNKGEPGVVGAVGTAGPSGPSGLPGERGAAGIPGGKGEKGEPGLRGEIGNPGRDGARGAPGAVGAPGPAGATGDRGEAGAAGPAGPAGPRGSPGERGEVGPAGPNGFAGPAGAAGQPGAKGERGAKGPKGENGVVGPTGPVGAAGPAGPNGPPGPAGSRGDGGPPGMTGFPGAAGRTGPPGPSGISGPPGPPGPAGKEGLRGPRGDQGPVGRTGEVGAVGPPGFAGEKGPSGEAGTAGPPGTPGPQGLLGAPGILGLPGSRGERGLPGVAGAVGEPGPLGIAGPPGARGPPGAVGSPGVNGAPGEAGRDGNPGNDGPPGRDGQPGHKGERGYPGNIGPVGAAGAPGPHGPVGPAGKHGNRGETGPSGPVGPAGAVGPRGPSGPQGIRGDKGEPGEKGPRGLPGLKGHNGLQGLPGIAGHHGDQGAPGSVGPAGPRGPAGPSGPAGKDGRTGHPGTVGPAGIRGPQGHQGPAGPPGPPGPPGPPGVSGGGYDFGYDGDFYRADQPRSAPSLRPKDYEVDATLKSLNNQIETLLTPEGSRKNPARTCRDLRLSHPEWSSGYYWIDPNQGCTMDAIKVYCDFSTGETCIRAQPENIPAKNWYRSSKDKKHVWLGETINAGSQFEYNVEGVTSKEMATQLAFMRLLANYASQNITYHCKNSIAYMDEETGNLKKAVILQGSNDVELVAEGNSRFTYTVLVDGCSKKTNEWGKTIIEYKTNKPSRLPFLDIAPLDIGGADQEFFVDIGPVCFK

SEQ ID NO: 3258 - protein, 1366 aa, Homo sapiens
MLSFVDTRTLLLLAVTLCLATCQSLQEETVRKGPAGDRGPRGERGPPGPPGRDGEDGPTGPPGPPGPPGPPGLGGNFAAQYDGKGVGLGPGPMGLMGPRGPPGAAGAPGPQGFQGPAGEPGEPGQTGPAGARGPAGPPGKAGEDGHPGKPGRPGERGVVGPQGARGFPGTPGLPGFKGIRGHNGLDGLKGQPGAPGVKGEPGAPGENGTPGQTGARGLPGERGRVGAPGPAGARGSDGSVGPVGPAGPIGSAGPPGFPGAPGPKGEIGAVGNAGPAGPAGPRGEVGLPGLSGPVGPPGNPGANGLTGAKGAAGLPGVAGAPGLPGPRGIPGPVGAAGATGARGLVGEPGPAGSKGESGNKGEPGSAGPQGPPGPSGEEGKRGPNGEAGSAGPPGPPGLRGSPGSRGLPGADGRAGVMGPPGSRGASGPAGVRGPNGDAGRPGEPGLMGPRGLPGSPGNIGPAGKEGPVGLPGIDGRPGPIGPAGARGEPGNIGFPGPKGPTGDPGKNGDKGHAGLAGARGAPGPDGNNGAQGPPGPQGVQGGKGEQGPPGPPGFQGLPGPSGPAGEVGKPGERGLHGEFGLPGPAGPRGERGPPGESGAAGPTGPIGSRGPSGPPGPDGNKGEPGVVGAVGTAGPSGPSGLPGERGAAGIPGGKGEKGEPGLRGEIGNPGRDGARGAPGAVGAPGPAGATGDRGEAGAAGPAGPAGPRGSPGERGEVGPAGPNGFAGPAGAAGQPGAKGERGAKGPKGENGVVGPTGPVGAAGPAGPNGPPGPAGSRGDGGPPGMTGFPGAAGRTGPPGPSGISGPPGPPGPAGKEGLRGPRGDQGPVGRTGEVGAVGPPGFAGEKGPSGEAGTAGPPGTPGPQGLLGAPGILGLPGSRGERGLPGVAGAVGEPGPLGIAGPPGARGPPGAVGSPGVNGAPGEAGRDGNPGNDGPPGRDGQPGHKGERGYPGNIGPVGAAGAPGPHGPVGPAGKHGNRGETGPSGPVGPAGAVGPRGPSGPQGIRGDKGEPGEKGPRGLPGLKGHNGLQGLPGIAGHHGDQGAPGSVGPAGPRGPAGPSGPAGKDGRTGHPGTVGPAGIRGPQGHQGPAGPPGPPGPPGPPGVSGGGYDFGYDGDFYRADQPRSAPSLRPKDYEVDATLKSLNNQIETLLTPEGSRKNPARTCRDLRLSHPEWSSGYYWIDPNQGCTMDAIKVYCDFSTGETCIRAQPENIPAKNWYRSSKDKKHVWLGETINAGSQFEYNVEGVTSKEMATQLAFMRLLANYASQNITYHCKNSIAYMDEETGNLKKAVILQGSNDVELVAEGNSRFTYTVLVDGCSKKTNEWGKTIIEYKTNKPSRLPFLDIAPLDIGGADQEFFVDIGPVCFK

SEQ ID NO: 3259 - protein, 401 aa, Homo sapiens
EHTIVFLVRLLPETPREAFALWQMTAEDFQPLLGVLLDAGKKSLTYFHRDPRAALQEATFDPQEVRKIFFGSFHKVHVAVGRSKVRLYVDCRKVAERPLGEMGSPPAAGFVTLGRLAKARGPRSSSAAFQLQMLQIVCSDTWADEDRCCELPASRDGETCPAFVSACSCSSETPGPPGPQGPPGLPGRNGTPGEQGFPGPRGEPGPPGQMGPEGPGGQQGSPGTQGRAVQGPVGPPGVKGEKGDHGLPGLQGHPGHQGIPGRVGLQGPKGMRGLEGTAGLPGPPGPRGFQGMAGARGTSGERGPPGTVGPTGLPGPKGERGEKGEPQSLATLYQLVSQACESAIQTHVSKFDSFHENTRPPMPILEQKLEPGTEPLGSPGTRSKALVPGEWGRGGRHLEGR

SEQ ID NO: 3260 - protein, 250 aa, Homo sapiens
ERPLGEMGSPPAAGFVTLGRLAKARGPRSSSAAFQLQMLQIVCSDTWADEDRCCELPASRDGETCPAFVSACSCSSETPGPPGPQGPPGPPGVKGEKGDHGLPGLQGHPGHQGIPGRVGLQGPKGMRGLEGTAGLPGPPGPRGFQGMAGARGTSGERGPPGTVGPTGLPGPKGERGEKGEPQSLATLYQLVSQACESAIQTHVSKFDSFHENTRPPMPILEQKLEPGTEPLGSPGTRSKALVPGEWGRGG

SEQ ID NO: 3261 - protein, 1284 aa, Homo sapiens
MSSGDPAHLGLCLWLWLGATLGREQVQASGLLRLAVLPEDRLQMKWRESEGSGLGYLVQVKPMAGDSEQEVILTTKTPKATVGGLSPSKGYTLQIFELTGSGRFLLARREFVIEDLKSSSLDRSSQRPLGSGAPEPTPSHTGSPDPEQASEPQVAFTPSQDPRTPAGPQFRCLPPVPADMVFLVDGSWSIGHSHFQQVKDFLASVIAPFEIGPDKVQVGLTQYSGDAQTEWDLNSLSTKEQVLAAVRRLRYKGGNTFTGLALTHVLGQNLQPAAGLRPEAAKVVILVTDGKSQDDVHTAARVLKDLGVNVFAVGVKNADEAELRLLASPPRDITVHSVLDFLQLGALAGLLSRLICQRLQGGSPRQGPAAAPALDTLPAPTSLVLSQVTSSSIRLSWTPAPRHPLKYLIVWRASRGGTPREVVVEGPAASTELHNLASRTEYLVSVFPIYEGGVGEGLRGLVTTAPLPPPRALTLAAVTPRTVHLTWQPSAGATHYLVRCSPASPKGEEEEREVQVGRPEVLLDGLEPGRDYEVSVQSLRGPEGSEARGIRARTPTLAPPRHLGFSDVSHDAARVFWEGAPRPVRLVRVTYVSSEGGHSGQTEAPGNATSATLGPLSSSTTYTVRVTCLYPGGGSSTLTGRVTTKKAPSPSQLSMTELPGDAVQLAWVAAAPSGVLVYQITWTPLGEGKAHEISVPGNLGTAVLPGLGRHTEYDVTILAYYRDGARSDPVSLRYTPSTVSRSPPSNLALASETPDSLQVSWTPPLGRVLHYWLTYAPASGLGPEKSVSVPGARSHVTLPDLQAATKYRVLVSAIYAAGRSEAVSATGQTACPALRPDGSLPGFDLMVAFSLVEKAYASIRGVAMEPSAFGGTPTFTLFKDAQLTRRVSDVYPAPLPPEHTIVFLVRLLPETPREAFALWQMTAEDFQPLLGVLLDAGKKSLTYFHRDPRAALQEATFDPQEVRKIFFGSFHKVHVAVGRSKVRLYVDCRKVAERPLGEMGSPPAAGFVTLGRLAKARGPRSSSAAFQLQMLQIVCSDTWADEDRCCELPASRDGETCPAFVSACSCSSETPGPPGPQGPPGLPGRNGTPGEQGFPGPRGPPGVKGEKGDHGLPGLQGHPGHQGIPGRVGLQGPKGMRGLEGTAGLPGPPGPRGFQGMAGARGTSGERGPPGTVGPTGLPGPKGERGEKGEPQSLATLYQLVSQASHVSKFDSFHENTRPPMPILEQKLEPGTEPLGSPGTRSKALVPGEWGRGGRHLEGRGEPGAVGQMGSPGQQGASTQGLWE

SEQ ID NO: 3262 - protein, 1297 aa, Homo sapiens
MSSGDPAHLGLCLWLWLGATLGREQVQASGLLRLAVLPEDRLQMKWRESEGSGLGYLVQVKPMAGDSEQEVILTTKTPKATVGGLSPSKGYTLQIFELTGSGRFLLARREFVIEDLKSSSLDRSSQRPLGSGAPEPTPSHTGSPDPEQASEPQVAFTPSQDPRTPGGSEWRETGPQFRCLPPVPADMVFLVDGSWSIGHSHFQQVKDFLASVIAPFEIGPDKVQVGLTQYSGDAQTEWDLNSLSTKEQVLAAVRRLRYKGGNTFTGLALTHVLGQNLQPAAGLRPEAAKVVILVTDGKSQDDVHTAARVLKDLGVNVFAVGVKNADEAELRLLASPPRDITVHSVLDFLQLGALAGLLSRLICQRLQGGSPRQGPAAAPALDTLPAPTSLVLSQVTSSSIRLSWTPAPRHPLKYLIVWRASRGGTPREVVVEGPAASTELHNLASRTEYLVSVFPIYEGGVGEGLRGLVTTAPLPPPRALTLAAVTPRTVHLTWQPSAGATHYLVRCSPASPKGEEEEREVQVGRPEVLLDGLEPGRDYEVSVQSLRGPEGSEARGIRARTPTLAPPRHLGFSDVSHDAARVFWEGAPRPVRLVRVTYVSSEGGHSGQTEAPGNATSATLGPLSSSTTYTVRVTCLYPGGGSSTLTGRVTTKKAPSPSQLSMTELPGDAVQLAWVAAAPSGVLVYQITWTPLGEGKAHEISVPGNLGTAVLPGLGRHTEYDVTILAYYRDGARSDPVSLRYTPSTVSRSPPSNLALASETPDSLQVSWTPPLGRVLHYWLTYAPASGLGPEKSVSVPGARSHVTLPDLQAATKYRVLVSAIYAAGRSEAVSATGQTACPALRPDGSLPGFDLMVAFSLVEKAYASIRGVAMEPSAFGGTPTFTLFKDAQLTRRVSDVYPAPLPPEHTIVFLVRLLPETPREAFALWQMTAEDFQPLLGVLLDAGKKSLTYFHRDPRAALQEATFDPQEVRKIFFGSFHKVHVAVGRSKVRLYVDCRKVAERPLGEMGSPPAAGFVTLGRLAKARGPRSSSAAFQLQMLQIVCSDTWADEDRCCELPASRDGETCPAFVSACSCSSETPGPPGPQGPPGLPGRNGTPGEQGFPGPRGPPGVKGEKGDHGLPGLQGHPGHQGIPGRVGLQGPKGMRGLEGTAGLPGPPGPRGFQGMAGARGTSGERGPPGTVGPTGLPGPKGERGEKGEPQSLATLYQLVSQACESAIQTHVSKFDSFHENTRPPMPILEQKLEPGTEPLGSPGTRSKALVPGEWGRGGRHLEGRGEPGAVGQMGSPGQQGASTQGLWE

SEQ ID NO: 3263 - protein, 79 aa, Homo sapiens
AKGDKGSPGFYGKKGAKGEKGNAGFPGLPGPAGEPGRHGKDGLMGSPGFKGEAGSPGAPGQDGTRGEPTCAYEFSHVKE

SEQ ID NO: 3264 - protein, 136 aa, Homo sapiens
MAHYITFLCMVLVLLLQNSVLAEDGEVRSSCRTAPTDLVFILDGSYSVGPENFEIVKKWLVNITKNFDIGPKFIQVGVVQYSDYPVLEIPLGSYDSGEHLTAAVESILYLGGNTKTGKAIQFALDYLFAKSSRFLT

SEQ ID NO: 3265 - protein, 957 aa, Homo sapiens
MAHYITFLCMVLVLLLQNSVLAEDGEVRSSCRTAPTDLVFILDGSYSVGPENFEIVKKWLVNITKNFDIGPKFIQVGVVQYSDYPVLEIPLGSYDSGEHLTAAVESILYLGGNTKTGKAIQFALDYLFAKSSRFLTKIAVVLTDGKSQDDVKDAAQAARDSKITLFAIGVGSETEDAELRAIANKPSSTYVFYVEDYIAISKIREVMKQKLCEESVCPTRIPVAARDERGFDILLGLDVNKKVKKRIQLSPKKIKGYEVTSKVDLSELTSNVFPEGLPPSYVFVSTQRFKVKKIWDLWRILTIDGRPQIAVTLNGVDKILLFTTTSVINGSQVVTFANPQVKTLFDEGWHQIRLLVTEQDVTLYIDDQQIENKPLHPVLGILINGQTQIGKYSGKEETVQFDVQKLRIYCDPEQNNRETACEIPGFNGECLNGPSDVGSTPAPCICPPGKPGLQGPKGDPGLPGNPGYPGQPGQDGKPGYQGIAGTPGVPGSPGIQGARGLPGYKGEPGRDGDKGDRGLPGFPGLHGMPGSKGEMGAKGDKGSPGFYGKKGAKGEKGNAGFPGLPGPAGEPGRHGKDGLMGSPGFKGEAGSPGAPGQDGTRGEPGIPGFPGNRGLMGQKGEIGPPGQQGKKGAPGMPGLMGSNGSPGQPGTPGSKGSKGEPGIQGMPGASGLKGEPGATGSPGEPGYMGLPGIQGKKGDKGNQGEKGIQGQKGENGRQGIPGQQGIQGHHGAKGERGEKGEPGVRGAIGSKGESGVDGLMGPAGPKGQPGDPGPQGPPGLDGKPGREFSEQFIRQVCTDVIRAQLPVLLQSGRIRNCDHCLSQHGSPGIPGPPGPIGPEGPRGLPGLPGRDGVPGLVGVPGRPGVRGLKGLPGRNGEKGSQGFGYPGEQGPPGPPGPEGPPGISKEGPPGDPGLPGKDGDHGKPGIQGQPGPPGICDPSLCFSVIARRDPFRKGPNY

SEQ ID NO: 3266 - protein, 954 aa, Homo sapiens
MAHYITFLCMVLVLLLQNSVLAEDGEVRSSCRTAPTDLVFILDGSYSVGPENFEIVKKWLVNITKNFDIGPKFIQVGVVQYSDYPVLEIPLGSYDSGEHLTAAVESILYLGGNTKTGKAIQFALDYLFAKSSRFLTKIAVVLTDGKSQDDVKDAAQAARDSKITLFAIGVGSETEDAELRAIANKPSSTYVFYVEDYIAISKIREVMKQKLCEESVCPTRIPVAARDERGFDILLGLDVNKKVKKRIQLSPKKIKGYEVTSKVDLSELTSNVFPEGLPPSYVFVSTQRFKVKKIWDLWRILTIDGRPQIAVTLNGVDKILLFTTTSVINGSQVVTFANPQVKTLFDEGWHQIRLLVTEQDVTLYIDDQQIENKPLHPVLGILINGQTQIGKYSGKEETVQFDVQKLRIYCDPEQNNRETACEIPGFCLNGPSDVGSTPAPCICPPGKPGLQGPKGDPGLPGNPGYPGQPGQDGKPGYQGIAGTPGVPGSPGIQGARGLPGYKGEPGRDGDKGDRGLPGFPGLHGMPGSKGEMGAKGDKGSPGFYGKKGAKGEKGNAGFPGLPGPAGEPGRHGKDGLMGSPGFKGEAGSPGAPGQDGTRGEPGIPGFPGNRGLMGQKGEIGPPGQQGKKGAPGMPGLMGSNGSPGQPGTPGSKGSKGEPGIQGMPGASGLKGEPGATGSPGEPGYMGLPGIQGKKGDKGNQGEKGIQGQKGENGRQGIPGQQGIQGHHGAKGERGEKGEPGVRGAIGSKGESGVDGLMGPAGPKGQPGDPGPQGPPGLDGKPGREFSEQFIRQVCTDVIRAQLPVLLQSGRIRNCDHCLSQHGSPGIPGPPGPIGPEGPRGLPGLPGRDGVPGLVGVPGRPGVRGLKGLPGRNGEKGSQGFGYPGEQGPPGPPGPEGPPGISKEGPPGDPGLPGKDGDHGKPGIQGQPGPPGICDPSLCFSVIARRDPFRKGPNY

SEQ ID NO: 3267 - protein, 956 aa, Homo sapiens [sequence omitted]

SEQ ID NO: 3268 - protein, 125 aa, Homo sapiens
  VARIANT 1: note = misc_feature - Xaa can be any naturally occurring amino acid
XRETACEIPGFNGECLNGPSDVGSTPAPCICPPGKPGLQGPKGYQGIAGTPGVPGSPGIQGARGLPGYKGEPGRDGDKGDRGLPGFPGLHGMPGSKGEMGAKGDKGSPGFYGKKGSIDHTTKYSY

SEQ ID NO: 3269 - protein, 65 aa, Homo sapiens
GEPGELGEPGLPGEVGMRGPQGPPGLPGPPGRVGAPVSEGTCLGRGSTPSPGIKNQVLASSSTCI

SEQ ID NO: 3270 - protein, 1626 aa, Homo sapiens
MAGLRGNAVAGLLWMLLLWSGGGGCQAQRAGCKSVHYDLVFLLDTSSSVGKEDFEKVRQWVANLVDTFEVGPDRTRVGVVRYSDRPTTAFELGLFGSQEEVKAAARRLAYHGGNTNTGDALRYITARSFSPHAGGRPRDRAYKQVAILLTDGRSQDLVLDAAAAAHRAGIRIFAVGVGEALKEELEEIASEPKSAHVFHVSDFNAIDKIRGKLRRRLCENVLCPSVRVEGDRFKHTNGGTKEITGFDLMDLFSVKEILGKRENGAQSSYVRMGSFPVVQSTEDVFPQGLPDEYAFVTTFRFRKTSRKEDWYIWQVIDQYSIPQVSIRLDGENKAVEYNAVGAMKDAVRVVFRGSRVNDLFDRDWHKMALSIQAQNVSLHIDCALVQTLPIEERENIDIQGKTVIGKRLYDSVPIDFDLQRIVIYCDSRHAELETCCDIPSGPCQVTVVTEPPPPPPPQRPPTPGSEQIGFLKTINCSCPAGEKGEMGVAGPMGLPGPKGDIGAIGPVGAPGPKGEKGDVGIGPFGQGEKGEKGSLGLPGPPGRDGSKGMRGEPGELGEPGLPGEVGMRGPQGPPGLPGPPGRVGAPGLQGERGEKGTRGEKGERGLDGFPGKPGDTGQQGRPGPSGVAGPQGEKGDVGPAGPPGVPGSVVQQEGLKGEQGAPGPRGHQGAPGPPGARGPIGPEGRDGPPGLQGLRGKKGDMGPPGIPGLLGLQGPPGPPGVPGPPGPGGSPGLPGEIGFPGKPGPPGPTGPPGKDGPNGPPGPPGTKGEPGERGEDGLPGKPGLRGEIGEQGLAGRPGEKGEAGLPGAPGFPGVRGEKGDQGEKGELGLPGLKGDRGEKGEAGPAGPPGLPGTTSLFTPHPRMPGEQGPKGEKGDPGLPGEPGLQGRPGELGPQGPTGPPGAKGQEGAHGAPGAAGNPGAPGHVGAPGPSGPPGSVGAPGLRGTPGKDGERGEKGAAGEEGSPGPVGPRGDPGAPGLPGPPGKGKDGEPGLRGSPGLPGPLGTKAACGKVRGSENCALGGQCVKGDRGAPGIPGSPGSRGDPGIGVAGPPGPSGPPGDKGSPGSRGLPGFPGPQGPAGRDGAPGNPGERGPPGKPGLSSLLSPGDINLLAKDVCNDCPPGPPGLPGLPGFKGDKGVPGKPGREGTEGKKGEAGPPGLPGPPGIAGPQGSQGERGADGEVGQKGDQGHPGVPGFMGPPGNPGPPGADGIAGAAGPPGIQGSPGKEGPPGPQGPSGLPGIPGEEGKEGRDGKPGPPGEPGKAGEPGLPGPEGARGPPGFKGHTGDSGAPGPRGESGAMGLPGQEGLPGKDGDTGPTGPQGPQGPRGPPGKNGSPGSPGEPGPSGTPGQKGSKGENGSPGLPGFLGPRGPPGEPGEKGVPGKEGVPGKPGEPGFKGERGDPGIKGDKGPPGGKGQPGDPGIPGHKGHTGLMGPQGLPGENGPVGPPGPPGQPGFPGLRGESPSMETLRRLIQEELGKQLETRLAYLLAQMPPAYMKSSQGRPGPPGPPGKDGLPGRAGPMGEPGRPGQGGLEGPSGPIGPKGERGAKGDPGAPGVGLRGEMGPPGIPGQPGEPGYAKDGLPGIPGPQGETGPAGHPGLPGPPGPPGQCDPSQCAYFASLAARPGNVKGP

SEQ ID NO: 3271 - protein, 1319 aa, Homo sapiens
MAGLRGNAVAGLLWMLLLWSGGGGCQAQRAGCKSVHYDLVFLLDTSSSVGKEDFEKVRQWVANLVDTFEVGPDRTRVGVVRYSDRPTTAFELGLFGSQEEVKAAARRLAYHGGNTNTGDALRYITARSFSPHAGGRPRDRAYKQVAILLTDGRSQDLVLDAAAAAHRAGIRIFAVGVGEALKEELEEIASEPKSAHVFHVSDFNAIDKIRGKLRRRLCENVLCPSVRVEGDRFKHTNGGTKEITGFDLMDLFSVKEILGKRENGAQSSYVRMGSFPVVQSTEDVFPQGLPDEYAFVTTFRFRKTSRKEDWYIWQVIDQYSIPQVSIRLDGENKAVEYNAVAGPQGEKGDVGPAGPPGVPGSVVQQEGLKGEQGAPGPRGHQGAPGPPGARGPIGPEGRDGPPGLQGLRGKKGDMGPPGIPGLLGLQGPPGPPGVPGPPGPGGSPGLPGEIGFPGKPGPPGPTGPPGKDGPNGPPGPPGTKGEPGERGEDGLPGKPGLRGEIGEQGLAGRPGEKGEAGLPGAPGFPGVRGEKGDQGEKGELGLPGLKGDRGEKGEAGPAGPPGLPGTTSLFTPHPRMPGEQGPKGEKGDPGLPGEPGLQGRPGELGPQGPTGPPGAKGQEGAHGAPGAAGNPGAPGHVGAPGPSGPPGSVGAPGLRGTPGKDGERGEKGAAGEEGSPGPVGPRGDPGAPGLPGPPGKGKDGEPGLRGSPGLPGPLGTKGDRGAPGIPGSPGSRGDPGIGVAGPPGPSGPPGDKGSPGSRGLPGFPGPQGPAGRDGAPGNPGERGPPGKPGLSSLLSPGDINLLAKDVCNDCPPGPPGLPGLPGFKGDKGVPGKPGREGTEGKKGEAGPPGLPGPPGIAGPQGSQGERGADGEVGQKGDQGHPGVPGFMGPPGNPGPPGADGIAGAAGPPGIQGSPGKEGPPGPQGPSGLPGIPGEEGKEGRDGKPGPPGEPGKAGEPGLPGPEGARGPPGFKGHTGDSGAPGPRGESGAMGLPGQEGLPGKDGDTGPTGPQGPQGPRGPPGKNGSPGSPGEPGPSGTPGQKGSKGENGSPGLPGFLGPRGPPGEPGEKGVPGKEGVPGKPGEPGFKGERGDPGIKGDKGPPGGKGQPGDPGIPGHKGHTGLMGPQGLPGENGPVGPPGPPGQPGFPGLRGESPSMETLRRLIQEELGKQLETRLAYLLAQMPPAYMKSSQGRPGPPGPPGKDGLPGRAGPMGEPGRPGQGGLEGPSGPIGPKGERGAKGDPGAPGVGLRGEMGPPGIPGQPGEPGYAKDGLPGIPGPQGETGPAGHPGLPGPPGPPGQCDPSQCAYFASLAARPGNVKGP

SEQ ID NO: 3272 - protein, 81 aa, Homo sapiens
MHLRAHRTRRGKVSPTAKTKSLLHFIVLCVAGVVVHAQEQGIDILHQLGLGGKDVRHSSPATAVPSASTPLPQGVHLTESG

SEQ ID NO: 3273 - protein, 1714 aa, Homo sapiens
MHLRAHRTRRGKVSPTAKTKSLLHFIVLCVAGVVVHAQEQGIDILHQLGLGGKDVRHSSPATAVPSASTPLPQGVHLTESGVIFKNDAYIETPFVKILPVNLGQPFTILTGLQSHRVNNAFLFSIRNKNRLQLGVQLLPKKLVVHIRGKQPAVFNYSVHDEQWHSFAITIRNQSVSMFVECGKKYFSTETIPEVQTFDSNSVFTLGSMNNNSIHFEGIVCQLDIIPSAEASADYCRYVKQQCRQADKYQPETSIPCTTLIPTKIPEHSPPPKLFAEKVLSEDTFTEGKSIPNIIKNDSETVYKRQEHQISRSQLSSLQSGNVSAVDLTNHGIQAKEMITEEDTQTNFSLSVTTHRISEAKMNTKEKFSSLLNMSDNITQHDDRVTGLSLFKKMPSILPQIKQDTITNLKKAITANLHTNELMEMQPILNTSLHRVTNEPSVDNHLDLRKEGEFYPDATYPIENSYETELYDYYYYEDLNTMLEMEYLRGPKGDTGPPGPPGPAGIPGPSGKRGPRGIPGPHGNPGLPGLPGPKGPKGDPGFSPGQPVPGEKGDQGLSGLMGPPGMQGDKGLKGHPGLPGLPGEQGIPGFAGNIGSPGYPGRQGLAGPEGNPGPKGAQGFIGSPGEAGQLGPEGERGIPGIRGKKGFKGRQGFPGDFGDRGPAGLDGSPGLVGGTGPPGFPGLRGSVGPVGPIGPAGIPGPMGLSGNKGLPGIKGDKGEQGTAGELGEPGYPGDKGAVGLPGPPGMRGKSGPSGQTGDPGLQGPSGPPGPEGFPGDIGIPGQNGPEGPKGLLGNRGPPGPPGLKGTQGEEGPIGAFGELGPRGKPGQKGYAGEPGPEGLKGEVGDQGNIGKIGETGPVGLPGEVGMTGSIGEKGERGSPGPLGPQGEKGVMGYPGPPGVPGPIGPLGLPGHVGARGPPGSQGPKGQRGSRGPDGLLGEQGIQGAKGEKGDQGKRGPHGLIGKTGNPGERGFQGKPGLQGLPGSTGDRGLPGEPGLRGLQGDVGPPGEMGMEGPPGTEGESGLQGEPGAKGDVGTAGSVGGTGEPGLRGEPGAPGEEGLQGKDGLKGVPGGRGLPGEDGEKGEMGLPGIIGPLGRSGQTGLPGPEGIVGIPGQRGRPGKKGDKGQIGPTGEVGSRGPPGKIGKSGPKGARGTRGAVGHLGLMGPDGEPGIPGYRGHQGQPGPSGLPGPKGEKGYPGEDSTVLGPPGPRGEPGPVGDQGERGEPGAEGYKGHVGVPGLRGATGQQGPPGEPGDQGEQGLKGERGSEGNKGKKGAPGPSGKPGIPGLQGLLGPKGIQGYHGADGISGNPGKIGPPGKQGLPGIRGGPGRTGLAGAPGPPGVKGSSGLPGSPGIQGPKGEQGLPGQPGIQGKRGHRGAQGDQGPCGDPGLKGQPGEYGVQGLTGFQGFPGPKGPEGDAGIVGISGPKGPIGHRGNTGPLGREGIIGPTGRTGPRGEKGFRGETGPQGPRGQPGPPGPPGAPGPRKQMDINAAIQALIESNTALQMESYQNTEVTLIDHSEEIFKTLNYLSNLLHSIKNPLGTRDNPARICKDLLNCEQKVSDGKYWIDPNLGCPSDAIEVFCNFSAGGQTCLPPVSVTKLEFGVGKVQMNFLHLLSSEATHIITIHCLNTPRWTSTQTSGPGLPIGFKGWNGQIFKVNTLLEPKVLSDDCKIQDGSWHKATFLFHTQEPNQLPVIEVQKLPHLKTERKYYIDSSSVCFL

SEQ ID NO: 3274 - protein, 890 aa, Homo sapiens
MHLRAHRTRRGKVSPTAKTKSLLHFIVLCVAGVVVHAQEQGIDILHQLGLGGKDVRHSSPATAVPSASTPLPQGVHLTESGVIFKNDAYIETPFVKILPVNLGQPFTILTGLQSHRVNNAFLFSIRNKNRLQLGVQLLPKKLVVHIRGKQPAVFNYSVHDEQWHSFAITIRNQSVSMFVECGKKYFSTETIPEVQTFDSNSVFTLGSMNNNSIHFEGIVCQLDIIPSAEASADYCRYVKQQCRQADKYQPETSIPCTTLIPTKIPEHSPPPKLFAEKVLSEDTFTEGKSIPNIIKNDSETVYKRQEHQISRSQLSSLQSGNVSAVDLTNHGIQAKEMITEEDTQTNFSLSVTTHRISEAKMNTKEKFSSLLNMSDNITQHDDRVTGLSLFKKMPSILPQIKQDTITNLKKAITANLHTNELMEMQPILNTSLHRVTNEPSVDNHLDLRKEGEFYPDATYPIENSYETELYDYYYYEDLNTMLEMEYLRGPKGDTGPPGPPGPAGIPGPSGKRGPRGIPGPHGNPGLPGLPGPKGPKGDPGFSPGQPVPGEKGDQGLSGLMGPPGMQGDKGLKGHPGLPGLPGEQGIPGFAGNIGSPGYPGRQGLAGPEGNPGPKGAQGFIGSPGEAGQLGPEGERGIPGIRGKKGFKGRQGFPGDFGDRGPAGLDGSPGLVGGTGPPGFPGLRGSVGPVGPIGPAGIPGPMGLSGNKGLPGIKGDKGEQGTAGELGEPGYPGDKGAVGLPGPPGMRGKSGPSGQTGDPGLQGPSGPPGPEGFPGDIGIPGQNGPEGPKGLLGNRGPPGPPGLKGTQGEEGPIGAFGELGPRGKPGQKGYAGEPGPEGLKGEVGDQGNIGKIGETMESCSVTQAGAQWHDLGSLHPLPPGFKRFSCLSLPG

SEQ ID NO: 3275 - protein, 166 aa, Homo sapiens
  VARIANT 1: note = misc_feature - Xaa can be any naturally occurring amino acid
XIKNPLGTRDNPARICKDLLNCEQKVSDGKYWIDPNLGCPSDAIEVFCNFSAGGQTCLPPVSVTKAFTIITPEIEEGRILPFLGNHEPLIKSSMIVLLPKYPHHHPHSSGSWHRIIIEGKKMGLCELCRGNRSSGEADSSCFHDQITSLISLIHKLNPRKTREVLG

SEQ ID NO: 3276 - protein, 439 aa, Homo sapiens
MKLALLLPWACCCLCGSALATGFLYPFSAAALQQHGYPEPGAGSPGSGYASRRHWCHHTVTRTVSCQVQNGSETVVQRVYQSCRWPGPCANLVRTLIRPTYRVSYRTVTVLEWRCCPGFTGSNCDEECMNCTRLSDMSERLTTLEAKVLLLEAAERPSSPDNDLPAPESTPPTWNEDFLPDAIPLAHPVPRQRRPTGPAGPPGQTGPPGPAGPPGSKGDRGQTGEKGPAGPPGLLGPPGPRGLPGEMGRPGPPGPPGPAGNPGPSPNSPQGALYSLQPPTDKDNGDSRLASAIVDTVLAGVPGPRGPPGPPGPPGPRGPPGPPGTPGSQGLAGERGTVGPSGEPGVKGEEGEKAATAEGEGVQQLREALKILAERVLILEHMIGIHDPLASPEGGSGQDAALRANLKMKRGGAQPDGVLAALLGPDPGQKSVDQASSRK

SEQ ID NO: 3277 - protein, 441 aa, Homo sapiens
MKLALLLPWACCCLCGSALATGFLYPFSAAALQQHGYPEPGAGSPGSGYASRRHWCHHTVTRTVSCQVQNGSETVVQRVYQSCRWPGPCANLVSYRTLIRPTYRVSYRTVTVLEWRCCPGFTGSNCDEECMNCTRLSDMSERLTTLEAKVLLLEAAERPSSPDNDLPAPESTPPTWNEDFLPDAIPLAHPVPRQRRPTGPAGPPGQTGPPGPAGPPGSKGDRGQTGEKGPAGPPGLLGPPGPRGLPGEMGRPGPPGPPGPAGNPGPSPNSPQGALYSLQPPTDKDNGDSRLASAIVDTVLAGVPGPRGPPGPPGPPGPRGPPGPPGTPGSQGLAGERGTVGPSGEPGVKGEEGEKAATAEGEGVQQLREALKILAERVLILEHMIGIHDPLASPEGGSGQDAALRANLKMKRGGAQPDGVLAALLGPDPGQKSVDQASSRK

SEQ ID NO: 3278 - protein, 714 aa, Homo sapiens
LSWTKAGSPAPPGVIPFQSGFIFTQRARLQAPTGTVIPAALGTELALVLSLCSHRVNHAFLFAVRSQKRKLQLGLQFLPGKTVVHLGSRRSVAFDLDMHDGRWHHLALELRGRTVTLVTACGQRRVPVLLPFHRDPALDPGGSFLFGKMNPHAVQFEGALCQFSIYPVTQVAHNYCTHLRKQCGQADTYQSPLGPLFSQDSGRPFTFQSDLALLGLENLTTATPALGSLPAGRGPRGTVAPATPTKPQRTSPTNPHQHMAVGGPAQTPLLPAKLSASNALDPMLPASVGGSTRTPRPAAAQPSQKITATKIPKSLPTKPSAPSTSIVPIKSPHPTQKTAPSSFTKSALPTQKQVPPTSRPVPARVSRPAEKPIQRNPGMPRPPPPSTRPLPPTTSSSKKPIPTLARTEAKITSHASKPASARTSTHKPPPFTALSSSPAPTPGSTRSTRPPATMVPPTSGTSTPRTAPAVPTPGSAPTGSKKPIGSEASKKAGPKSSPRKPVPLRPGKAARDVPLSDLTTRPSPRQPQPSQQTTPALVLAPAQFLSSSPRPTSSGYSIFHLAGSTPFPLLMGPPGPKGDCGLPGPPGLPGLPGIPGARGPRGPPGPYGNPGLPGPPGAKGDMGLPGLSGNPGPPGRKGLPGPVGDPGPKGSRGYIGLPGLFGLPGSDGERGLPGVPGKRGKMGMPVLLPQSSEARGGNSMPSEGALAGRHGSHL

SEQ ID NO: 3279 - protein, 1860 aa, Homo sapiens
MGAGSARGARGTAAAAAARGGGFLFSWILVSFACHLASTQGAPEDVDILQRLGLSWTKAGSPAPPGVIPFQSGFIFTQRARLQAPTGTVIPAALGTELALVLSLCSHRVNHAFLFAVRSQKRKLQLGLQFLPGKTVVHLGSRRSVAFDLDMHDGRWHHLALELRGRTVTLVTACGQRRVPVLLPFHRDPALDPGGSFLFGKMNPHAVQFEGALCQFSIYPVTQVAHNYCTHLRKQCGQADTYQSPLGPLFSQDSGRPFTFQSDLALLGLENLTTATPALGSLPAGRGPRGTVAPATPTKPQRTSPTNPHQHMAVGGPAQTPLLPAKLSASNALDPMLPASVGGSTRTPRPAAAQPSQKITATKIPKSLPTKPSAPSTSIVPIKSPHPTQKTAPSSFTKSALPTQKQVPPTSRPVPARVSRPAEKPIQRNPGMPRPPPPSTRPLPPTTSSSKKPIPTLARTEAKITSHASKPASARTSTHKPPPFTALSSSPAPTPGSTRSTRPPATMVPPTSGTSTPRTAPAVPTPGSAPTGSKKPIGSEASKKAGPKSSPRKPVPLRPGKAARDVPLSDLTTRPSPRQPQPSQQTTPALVLAPAQFLSSSPRPTSSGYSIFHLAGSTPFPLLMGPPGPKGDCGLPGPPGLPGLPGIPGARGPRGPPGPYGNPGLPGPPGAKGQKGDPGLSPGKAHDGAKGDMGLPGLSGNPGPPGRKGHKGYPGPAGHPGEQGQPGPEGSPGAKGYPGRQGLPGPVGDPGPKGSRGYIGLPGLFGLPGSDGERGLPGVPGKRGKMGMPGFPGVFGERGPPGLDGNPGELGLPGPPGVPGLIGDLGVLGPIGYPGPKGMKGLMGSVGEPGLKGDKGEQGVPGVSGDPGFQGDKGSQGLPGFPGARGKPGPLGKVGDKGSIGFPGPPGPEGFPGDIGPPGDNGPEGMKGKPGARGLPGPRGQLGPEGDEGPMGPPGAPGLEGQPGRKGFPGRPGLDGVKGEPGDPGRPGPVGEQGFMGFIGLVGEPGIVGEKGDRGMMGPPGVPGPKGSMGHPGMPGGMGTPGEPGPQGPPGSRGPPGMRGAKGRRGPRGPDGPAGEQGSRGLKGPPGPQGRPGRPGQQGVAGERGHLGSRGFPGIPGPSGPPGTKGLPGEPGPQGPQGPIGPPGEMGPKGPPGAVGEPGLPGEAGMKGDLGPLGTPGEQGLIGQRGEPGLEGDSGPMGPDGLKGDRGDPGPDGEHGEKGQEGLMGEDGPPGPPGVTGVRGPEGKSGKQGEKGRTGAKGAKGYQGQLGEMGVPGDPGPPGTPGPKGSRGSLGPTGAPGRMGAQGEPGLAGYDGHKGIVGPLGPPGPKGEKGEQGEDGKAEGPPGPPGDRGPVGDRGDRGEPGDPGYPGQEGVQGLRGKPGQQGQPGHPGPRGWPGPKGSKGAEGPKGKQGKAGAPGRRGVQGLQGLPGPRGVVGRQGLEGIAGPDGLPGRDGQAGQQGEQGDDGDPGPMGPAGKRGNPGVAGLPGAQGPPGFKGESGLPGQLGPPGKRGTEGRTGLPGNQGEPGSKGQPGDSGEMGFPGMAGLFGPKGPPGDIGFKGIQGPRGPPGLMGKEGIVGPLGILGPSGLPGPKGDKGSRGDWGLQGPRGPPGPRGRPGPPGPPGGPIQLQQDDLGAAFQTWMDTSGALRPESYSYPDRLVLDQGGEIFKTLHYLSNLIQSIKTPLGTKENPARVCRDLMDCEQKMVDGTYWVDPNLGCSSDTIEVSCNFTHGGQTCLKPITASKVEFAISRVQMNFLHLLSSEVTQHITIHCLNMTVWQEGTGQTPAKQAVRFRAWNGQIFEAGGQFRPEVSMDGCKVQDGRWHQTLFTFRTQDPQQLPIISVDNLPPASSGKQYRLEVGPACFL

SEQ ID NO: 3280 - protein, 485 aa, Homo sapiens
  VARIANT 1: note = misc_feature - Xaa can be any naturally occurring amino acid
XAAQPSQKITATKIPKSLPTKPSAPSTSIVPIKSPHPTQKTAPSSFTKSALPTQKQVPPTSRPVPARVSRPAEKPIQRNPGMPRPPPPSTRPLPPTTSSSKKPIPTLARTEAKITSHASKPASARTSTHKPPPFTALSSSPAPTPGSTRSTRPPATMVPPTSGTSTPRTAPAVPTPGSAPTGSKKPIGSEASKKAGPKSSPRKPVPLRPGKAARDVPLSDLTTRPSPRQPQPSQQTTPALVLAPAQFLSSSPRPTSSGYSIFHLAGSTPFPLLMGPPGPKGDCGLPGPPGLPGLPGIPGARGPRGPPGPYGNPGLPGPPGAKGDMGLPGLSGNPGPPGRKGHKGYPGPAGHPGEQGQPGPEGSPGAKGYPGRQGLPGPVGDPGPKGSRGYIGLPGLFGLPGSDGERGLPGVPGKRGKMGMPGFPGVFGERGPPGLDGNPGELGLPGPPGVPGLIGDLGVLGPIGYPGPKGMKGLMGSVGEPGLKG

SEQ ID NO: 3281 - protein, 80 aa, Homo sapiens
ATTSSEATTTPRPLLSTPVDGAEDPRCLEALKPGNCGEYVVRWYYDKQVNSCARFWFSGCNGSGNRFNSEKECQETCIQG

SEQ ID NO: 3282 - protein, 142 aa, Homo sapiens
FDSYLVQIFGSSSPQPGFGMSGEELSESTPEPQKEISESLSVTRDQDEDDKAPEPTWADDLPATTSSEATTTPRPLLSTPVDGAEDPRCLEALKPGNCGEYVVRWYYDKQVNSCARFWFSGCNGSGNRFNSEKECQETCIQG

SEQ ID NO: 3283 - protein, 130 aa, Homo sapiens
GMPGTSIPGPPGPKGDRGGPGIPGFKGEPGLSIRGPKGVQGPRGPVGAPGLKGDGYPGVPGPRGLPGPPGPMGLRGVGDTGAKTLNTSHGLEDPSCPDCSFCHFSLAADIQPKWPALLQLIPASGTRQDG

SEQ ID NO: 3284 - protein, 67 aa, Homo sapiens
KGNPGNAQKGEAGERGPGGIPGYKGDKQYSREDREVEHNNEKYVACLLPSPALLQQSSLTHHGTCSH

SEQ ID NO: 3285 - protein, 1125 aa, Homo sapiens
MWNRYFVFYLLLLSAFTSQTVSGQRKKGPKSNLLARKSDVQGSICFIDIVFIVDSSESSKIALFDKQKDFVDSLSDKIFQLTPGRSLEYDIKLAALQFSSSVQIDPPFSSWKDLQTFKQKVKSMNLIGQGTFSYYAISNATRLLKREGRKDGVKVVLLMTDGIDHPKNPDVQSISEDARISGISFITIALSTVVNEAKLRLISGDSSSEPTLLLSDPTLVDKIQDRLDILFEKKCERKICECEKGDPGDPGPPGTHGNPGIKGERGPKGNPGNAQKGEAGERGPGGIPGYKGDKGERGECGKPGIKGDKGSPGPYGPKGPRGIQGITGPPGDPGPKGFQGNKGEPGPPGPYGSPGAPGIGQQGIKGERGQEGRPGAPGPIGVGEPGQPGPRGPEGVPGERGLPGEGFPGPKGEKGSEGPTGPQGLQGLSIKGEKGDIGPVGPQGPMGIPGIGSQGEQGIQGPIGPPGPQGPAGQGLPGSKGEVGQMGPTGPRGPVGIGVQGPKGEPGSIGLPGQPGVPGEDGAAGKKGEAGLPGARGPEGPPGKGQPGPKGDEGKKGSKGNQGQRGLPGPEGPKGEPGIMGPFGMPGTSIPGPPGPKGDRGGPGIPGFKGEPGLSIRGPKGVQGPRGPVGAPGLKGDGYPGVPGPRGLPGPPGPMGLRGVGDTGAKGEPGVRGPPGPSGPRGVGTQGPKGDTGQKGLPGPPGPPGYGSQGIKGEQGPQGFPGPKGTMGHGLPGQKGEHGERGDVGKKGDKGEIGEPGSPGKQGLQGPKGDLGLTKEEIIKLITEICGCGPKCKETPLELVFVIDSSESVGPENFQIIKNFVKTMADRVALDLATARIGIINYSHKVEKVANLKQFSSKDDFKLAVDNMQYLGEGTYTATALQAANDMFEDARPGVKKVALVITDGQTDSRDKEKLTEVVKNASDTNVEIFVIGVVKKNDPNFEIFHKEMNLIATDPEHVYQFDDFFTLQDTLKQKLFQKICEDFDSYLVQIFGSSSPQPGFGMSGEELSESTPEPQKEISESLSVTRDQDEDDKAPEPTWADDLPATTSSEATTTPRPLLSTPVDGAEDPRCLEALKPGNCGEYVVRWYYDKQVNSCARFWFSGCNGSGNRFNSEKECQETCIQG

SEQ ID NO: 3286 - protein, 1487 aa, Homo sapiens
MIRLGAPQTLVLLTLLVAAVLRCQGQDVQEAGSCVQDGQRYNDKDVWKPEPCRICVCDTGTVLCDDIICEDVKDCLSPEIPFGECCPICPTDLATASGQPGPKGQKGEPGDIKDIVGPKGPPGPQGPAGEQGPRGDRGDKGEKGAPGPRGRDGEPGTPGNPGPPGPPGPPGPPGLGGNFAAQMAGGFDEKAGGAQLGVMQGPMGPMGPRGPPGPAGAPGPQGFQGNPGEPGEPGVSGPMGPRGPPGPPGKPGDDGEAGKPGKAGERGPPGPQGARGFPGTPGLPGVKGHRGYPGLDGAKGEAGAPGVKGESGSPGENGSPGPMGPRGLPGERGRTGPAGAAGARGNDGQPGPAGPPGPVGPAGGPGFPGAPGAKGEAGPTGARGPEGAQGPRGEPGTPGSPGPAGASGNPGTDGIPGAKGSAGAPGIAGAPGFPGPRGPPGPQGATGPLGPKGQTGEPGIAGFKGEQGPKGEPGPAGPQGAPGPAGEEGKRGARGEPGGVGPIGPPGERGAPGNRGFPGQDGLAGPKGAPGERGPSGLAGPKGANGDPGRPGEPGLPGARGLTGRPGDAGPQGKVGPSGAPGEDGRPGPPGPQGARGQPGVMGFPGPKGANGEPGKAGEKGLPGAPGLRGLPGKDGETGAAGPPGPAGPAGERGEQGAPGPSGFQGLPGPPGPPGEGGKPGDQGVPGEAGAPGLVGPRGERGFPGERGSPGAQGLQGPRGLPGTPGTDGPKGASGPAGPPGAQGPPGLQGMPGERGAAGIAGPKGDRGDVGEKGPEGAPGKDGGRGLTGPIGPPGPAGANGEKGEVGPPGPAGSAGARGAPGERGETGPPGPAGFAGPPGADGQPGAKGEQGEAGQKGDAGAPGPQGPSGAPGPQGPTGVTGPKGARGAQGPPGATGFPGAAGRVGPPGSNGNPGPPGPPGPSGKDGPKGARGDSGPPGRAGEPGLQGPAGPPGEKGEPGDDGPSGAEGPPGPQGLAGQRGIVGLPGQRGERGFPGLPGPSGEPGKQGAPGASGDRGPPGPVGPPGLTGPAGEPGREGSPGADGPPGRDGAAGVKGDRGETGAVGAPGAPGPPGSPGPAGPTGKQGDRGEAGAQGPMGPSGPAGARGIQGPQGPRGDKGEAGEPGERGLKGHRGFTGLQGLPGPPGPSGDQGASGPAGPSGPRGPPGPVGPSGKDGANGIPGPIGPPGPRGRSGETGPAGPPGNPGPPGPPGPPGPGIDMSAFAGLGPREKGPDPLQYMRADQAAGGLRQHDAEVDATLKSLNNQIESIRSPEGSRKNPARTCRDLKLCHPEWKSGDYWIDPNQGCTLDAMKVFCNMETGETCVYPNPANVPKKNWWSSKSKEKKHIWFGETINGGFHFSYGDDNLAPNTANVQMTFLRLLSTEGSQNITYHCKNSIAYLDEAAGNLKKALLIQGSNDVEIRAEGNSRFTYTALKDGCTKHTGKWGKTVIEYRSQKTSRLPIIDIAPMDIGGPEQEFGVDIGPVCFL

SEQ ID NO: 3287 - protein, 1418 aa, Homo sapiens
MIRLGAPQTLVLLTLLVAAVLRCQGQDVRQPGPKGQKGEPGDIKDIVGPKGPPGPQGPAGEQGPRGDRGDKGEKGAPGPRGRDGEPGTPGNPGPPGPPGPPGPPGLGGNFAAQMAGGFDEKAGGAQLGVMQGPMGPMGPRGPPGPAGAPGPQGFQGNPGEPGEPGVSGPMGPRGPPGPPGKPGDDGEAGKPGKAGERGPPGPQGARGFPGTPGLPGVKGHRGYPGLDGAKGEAGAPGVKGESGSPGENGSPGPMGPRGLPGERGRTGPAGAAGARGNDGQPGPAGPPGPVGPAGGPGFPGAPGAKGEAGPTGARGPEGAQGPRGEPGTPGSPGPAGASGNPGTDGIPGAKGSAGAPGIAGAPGFPGPRGPPGPQGATGPLGPKGQTGEPGIAGFKGEQGPKGEPGPAGPQGAPGPAGEEGKRGARGEPGGVGPIGPPGERGAPGNRGFPGQDGLAGPKGAPGERGPSGLAGPKGANGDPGRPGEPGLPGARGLTGRPGDAGPQGKVGPSGAPGEDGRPGPPGPQGARGQPGVMGFPGPKGANGEPGKAGEKGLPGAPGLRGLPGKDGETGAAGPPGPAGPAGERGEQGAPGPSGFQGLPGPPGPPGEGGKPGDQGVPGEAGAPGLVGPRGERGFPGERGSPGAQGLQGPRGLPGTPGTDGPKGASGPAGPPGAQGPPGLQGMPGERGAAGIAGPKGDRGDVGEKGPEGAPGKDGGRGLTGPIGPPGPAGANGEKGEVGPPGPAGSAGARGAPGERGETGPPGPAGFAGPPGADGQPGAKGEQGEAGQKGDAGAPGPQGPSGAPGPQGPTGVTGPKGARGAQGPPGATGFPGAAGRVGPPGSNGNPGPPGPPGPSGKDGPKGARGDSGPPGRAGEPGLQGPAGPPGEKGEPGDDGPSGAEGPPGPQGLAGQRGIVGLPGQRGERGFPGLPGPSGEPGKQGAPGASGDRGPPGPVGPPGLTGPAGEPGREGSPGADGPPGRDGAAGVKGDRGETGAVGAPGAPGPPGSPGPAGPTGKQGDRGEAGAQGPMGPSGPAGARGIQGPQGPRGDKGEAGEPGERGLKGHRGFTGLQGLPGPPGPSGDQGASGPAGPSGPRGPPGPVGPSGKDGANGIPGPIGPPGPRGRSGETGPAGPPGNPGPPGPPGPPGPGIDMSAFAGLGPREKGPDPLQYMRADQAAGGLRQHDAEVDATLKSLNNQIESIRSPEGSRKNPARTCRDLKLCHPEWKSGDYWIDPNQGCTLDAMKVFCNMETGETCVYPNPANVPKKNWWSSKSKEKKHIWFGETINGGFHFSYGDDNLAPNTANVQMTFLRLLSTEGSQNITYHCKNSIAYLDEAAGNLKKALLIQGSNDVEIRAEGNSRFTYTALKDGCTKHTGKWGKTVIEYRSQKTSRLPIIDIAPMDIGGPEQEFGVDIGPVCFL

SEQ ID NO: 3288 - protein, 1466 aa, Homo sapiens
MMSFVQKGSWLLLALLHPTIILAQQEAVEGGCSHLGQSYADRDVWKPEPCQICVCDSGSVLCDDIICDDQELDCPNPEIPFGECCAVCPQPPTAPTRPPNGQGPQGPKGDPGPPGIPGRNGDPGIPGQPGSPGSPGPPGICESCPTGPQNYSPQYDSYDVKSGVAVGGLAGYPGPAGPPGPPGPPGTSGHPGSPGSPGYQGPPGEPGQAGPSGPPGPPGAIGPSGPAGKDGESGRPGRPGERGLPGPPGIKGPAGIPGFPGMKGHRGFDGRNGEKGETGAPGLKGENGLPGENGAPGPMGPRGAPGERGRPGLPGAAGARGNDGARGSDGQPGPPGPPGTAGFPGSPGAKGEVGPAGSPGSNGAPGQRGEPGPQGHAGAQGPPGPPGINGSPGGKGEMGPAGIPGAPGLMGARGPPGPAGANGAPGLRGGAGEPGKNGAKGEPGPRGERGEAGIPGVPGAKGEDGKDGSPGEPGANGLPGAAGERGAPGFRGPAGPNGIPGEKGPAGERGAPGPAGPRGAAGEPGRDGVPGGPGMRGMPGSPGGPGSDGKPGPPGSQGESGRPGPPGPSGPRGQPGVMGFPGPKGNDGAPGKNGERGGPGGPGPQGPPGKNGETGPQGPPGPTGPGGDKGDTGPPGPQGLQGLPGTGGPPGENGKPGEPGPKGDAGAPGAPGGKGDAGAPGERGPPGLAGAPGLRGGAGPPGPEGGKGAAGPPGPPGAAGTPGLQGMPGERGGLGSPGPKGDKGEPGGPGADGVPGKDGPRGPTGPIGPPGPAGQPGDKGEGGAPGLPGIAGPRGSPGERGETGPPGPAGFPGAPGQNGEPGGKGERGAPGEKGEGGPPGVAGPPGGSGPAGPPGPQGVKGERGSPGGPGAAGFPGARGLPGPPGSNGNPGPPGPSGSPGKDGPPGPAGNTGAPGSPGVSGPKGDAGQPGEKGSPGAQGPPGAPGPLGIAGITGARGLAGPPGMPGPRGSPGPQGVKGESGKPGANGLSGERGPPGPQGLPGLAGTAGEPGRDGNPGSDGLPGRDGSPGGKGDRGENGSPGAPGAPGHPGPPGPVGPAGKSGDRGESGPAGPAGAPGPAGSRGAPGPQGPRGDKGETGERGAAGIKGHRGFPGNPGAPGSPGPAGQQGAIGSPGPAGPRGPVGPSGPPGKDGTSGHPGPIGPPGPRGNRGERGSEGSPGHPGQPGPPGPPGAPGPCCGGVGAAAIAGIGGEKAGGFAPYYGDEPMDFKINTDEIMTSLKSVNGQIESLISPDGSRKNPARNCRDLKFCHPELKSGEYWVDPNQGCKLDAIKVFCNMETGETCISANPLNVPRKHWWTDSSAEKKHVWFGESMDGGFQFSYGNPELPEDVLDVHLAFLRLLSSRASQNITYHCKNSIAYMDQASGNVKKALKLMGSNEGEFKAEGNSKFTYTVLEDGCTKHTGEWSKTVFEYRTRKAVRLPIVDIAPYDIGGPDQEFGVDVGPVCFL

SEQ ID NO: 3289 - protein, 1163 aa, Homo sapiens
MMSFVQKGSWLLLALLHPTIILAQQEAVEGGCSHLGQSYADRDVWKPEPCQICVCDSGSVLCDDIICDDQELDCPNPEIPFGECCAVCPQPPTAPTRPPNGQGPQGPKGDPGPPGIPGRNGDPGIPGQPGSPGSPGPPGICESCPTGPQNYSPQYDSYDVKSGVAVGGLAGYPGPAGPPGPPGPPGTSGHPGSPGSPGYQGPPGEPGQAGPSGPPGPPGAIGPSGPAGKDGESGRPGRPGERGLPGPPGIKGPAGIPGFPGMKGHRGFDGRNGEKGETGAPGLKGENGLPGENGAPGPMGPRGAPGERGRPGLPGAAGARGNDGARGSDGQPGPPGPPGTAGFPGSPGAKGEVGPAGSPGSNGAPGQRGEPGPQGHAGAQGPPGPPGINGSPGGKGEMGPAGIPGAPGLMGARGPPGPAGANGAPGLRGGAGEPGKNGAKGEPGPRGERGEAGIPGVPGAKGEDGKDGSPGEPGANGLPGAAGERGAPGFRGPAGPNGIPGEKGPAGERGAPGPAGPRGAAGEPGRDGVPGGPGMRGMPGSPGGPGSDGKPGPPGSQGESGRPGPPGPSGPRGQPGVMGFPGPKGNDGAPGKNGERGGPGGPGPQGPPGKNGETGPQGPPGPTGPGGDKGDTGPPGPQGLQGLPGTGGPPGENGKPGEPGPKGDAGAPGAPGGKGDAGAPGERGPPGLAGAPGLRGGAGPPGPEGGKGAAGPPGPPGAAGTPGLQGMPGERGGLGSPGPKGDKGEPGGPGADGVPGKDGPRGPTGPIGPPGPAGQPGDKGEGGAPGLPGIAGPRGSPGERGETGPPGPAGFPGAPGQNGEPGGKGERGAPGEKGEGGPPGVAGPPGKDGTSGHPGPIGPPGPRGNRGERGSEGSPGHPGQPGPPGPPGAPGPCCGGVGAAAIAGIGGEKAGGFAPYYGDEPMDFKINTDEIMTSLKSVNGQIESLISPDGSRKNPARNCRDLKFCHPELKSGEYWVDPNQGCKLDAIKVFCNMETGETCISANPLNVPRKHWWTDSSAEKKHVWFGESMDGGFQFSYGNPELPEDVLDVHLAFLRLLSSRASQNITYHCKNSIAYMDQASGNVKKALKLMGSNEGEFKAEGNSKFTYTVLEDGCTKHTGEWSKTVFEYRTRKAVRLPIVDIAPYDIGGPDQEFGVDVGPVCFL

SEQ ID NO: 3290 - protein, 90 aa, Homo sapiens
  VARIANT 1: note = misc_feature - Xaa can be any naturally occurring amino acid
XRGAPGERGRPGLPGAAGARGNDGARGSDGQPGPPGPPGTAGFPGSPGAKGPPGINGSPGGKGEMGPAGIPGAPGLMGARGPPGPAGANG

SEQ ID NO: 3291 - protein, 1669 aa, Homo sapiens
MGPRLSVWLLLLPAALLLHEEHSRAAAKGGCAGSGCGKCDCHGVKGQKGERGLPGLQGVIGFPGMQGPEGPQGPPGQKGDTGEPGLPGTKGTRGPPGASGYPGNPGLPGIPGQDGPPGPPGIPGCNGTKGERGPLGPPGLPGFAGNPGPPGLPGMKGDPGEILGHVPGMLLKGERGFPGIPGTPGPPGLPGLQGPVGPPGFTGPPGPPGPPGPPGEKGQMGLSFQGPKGDKGDQGVSGPPGVPGQAQVQEKGDFATKGEKGQKGEPGFQGMPGVGEKGEPGKPGPRGKPGKDGDKGEKGSPGFPGEPGYPGLIGRQGPQGEKGEAGPPGPPGIVIGTGPLGEKGERGYPGTPGPRGEPGPKGFPGLPGQPGPPGLPVPGQAGAPGFPGERGEKGDRGFPGTSLPGPSGRDGLPGPPGSPGPPGQPGYTNGIVECQPGPPGDQGPPGIPGQPGFIGEIGEKGQKGESCLICDIDGYRGPPGPQGPPGEIGFPGQPGAKGDRGLPGRDGVAGVPGPQGTPGLIGQPGAKGEPGEFYFDLRLKGDKGDPGFPGQPGMPGRAGSPGRDGHPGLPGPKGSPGSVGLKGERGPPGGVGFPGSRGDTGPPGPPGYGPAGPIGDKGQAGFPGGPGSPGLPGPKGEPGKIVPLPGPPGAEGLPGSPGFPGPQGDRGFPGTPGRPGLPGEKGAVGQPGIGFPGPPGPKGVDGLPGDMGPPGTPGRPGFNGLPGNPGVQGQKGEPGVGLPGLKGLPGLPGIPGTPGEKGSIGVPGVPGEHGAIGPPGLQGIRGEPGPPGLPGSVGSPGVPGIGPPGARGPPGGQGPPGLSGPPGIKGEKGFPGFPGLDMPGPKGDKGAQGLPGITGQSGLPGLPGQQGAPGIPGFPGSKGEMGVMGTPGQPGSPGPVGAPGLPGEKGDHGFPGSSGPRGDPGLKGDKGDVGLPGKPGSMDKVDMGSMKGQKGDQGEKGQIGPIGEKGSRGDPGTPGVPGKDGQAGQPGQPGPKGDPGISGTPGAPGLPGPKGSVGGMGLPGTPGEKGVPGIPGPQGSPGLPGDKGAKGEKGQAGPPGIGIPGLRGEKGDQGIAGFPGSPGEKGEKGSIGIPGMPGSPGLKGSPGSVGYPGSPGLPGEKGDKGLPGLDGIPGVKGEAGLPGTPGPTGPAGQKGEPGSDGIPGSAGEKGEPGLPGRGFPGFPGAKGDKGSKGEVGFPGLAGSPGIPGSKGEQGFMGPPGPQGQPGLPGSPGHATEGPKGDRGPQGQPGLPGLPGPMGPPGLPGIDGVKGDKGNPGWPGAPGVPGPKGDPGFQGMPGIGGSPGITGSKGDMGPPGVPGFQGPKGLPGLQGIKGDQGDQGVPGAKGLPGPPGPPGPYDIIKGEPGLPGPEGPPGLKGLQGLPGPKGQQGVTGLVGIPGPPGIPGFDGAPGQKGEMGPAGPTGPRGFPGPPGPDGLPGSMGPPGTPSVDHGFLVTRHSQTIDDPQCPSGTKILYHGYSLLYVQGNERAHGQDLGTAGSCLRKFSTMPFLFCNINNVCNFASRNDYSYWLSTPEPMPMSMAPITGENIRPFISRCAVCEAPAMVMAVHSQTIQIPPCPSGWSSLWIGYSFVMHTSAGAEGSGQALASPGSCLEEFRSAPFIECHGRGTCNYYANAYSFWLATIERSEMFKKPTPSTLKAGELRTHVSRCQVCMRRT

SEQ ID NO: 3292 - protein, 519 aa, Homo sapiens
MGPRLSVWLLLLPAALLLHEEHSRAAAKGGCAGSGCGKCDCHGVKGQKGERGLPGLQGVIGFPGMQGPEGPQGPPGQKGDTGEPGLPGTKGTRGPPGASGYPGNPGLPGIPGQDGPPGPPGIPGCNGTKGERGPLGPPGLPGFAGNPGPPGLPGMKGDPGEILGHVPGMLLKGERGFPGIPGTPGPPGLPGLQGPVGPPGFTGPPGPPGPPGPPGEKGQMGLSFQGPKGDKGDQGVSGPPGVPGQAQVQEKGDFATKGEKGQKGEPGFQGMPGVGEKGEPGKPGPRGKPGKDGDKGEKGSPGFPGEPGYPGLIGRQGPQGEKGEAGPPGPPGIVIGTGPLGEKGERGYPGTPGPRGEPGPKGFPGLPGQPGPPGLPVPGQAGAPGFPGERGEKGDRGFPGTSLPGPSGRDGLPGPPGSPGPPGQPGYTNGIVECQPGPPGDQGPPGIPGQPGFIGEIGEKGQKGESCLICDIDGYRGPPGPQGPPGEIGFPGQPGAKGDRGLPGRDGVAGVPLLFQIHK

SEQ ID NO: 3293 - protein, 223 aa, Homo sapiens
MQGPEGPQGPPGQKGDTGEPGLPGTKGTRGPPGASGYPGNPGLPGIPGQDGPPGPPGIPGCNGTKGERGPLGPPGLPGFAGNPGPPGLPGMKGDPGEILGHVPGMLLKGERGFPGIPGTPGPPGLPGLQGPVGPPGFTGPPGPPGPPGPPGEKGQMGLSFQGPKGDKGDQGVSGPPGVPGQAQVQEKGDFATKGEKGQKGEPGFQGMPGVGEKGEPGKPGPRV

SEQ ID NO: 3294 - protein, 105 aa, Homo sapiens
MGRDQRAVAGPALRRWLLLGTVTVGFLAQSVLAGVKKFDVPCGGRDCSGGCQCYPEKGGRGQPGPVGPQGYNGPPGLQGFPGLQGRKGDKGERGAPGVTGPKGDV

SEQ ID NO: 3295 - protein, 1712 aa, Homo sapiens
MGRDQRAVAGPALRRWLLLGTVTVGFLAQSVLAGVKKFDVPCGGRDCSGGCQCYPEKGGRGQPGPVGPQGYNGPPGLQGFPGLQGRKGDKGERGAPGVTGPKGDVGARGVSGFPGADGIPGHPGQGGPRGRPGYDGCNGTQGDSGPQGPPGSEGFTGPPGPQGPKGQKGEPYALPKEERDRYRGEPGEPGLVGFQGPPGRPGHVGQMGPVGAPGRPGPPGPPGPKGQQGNRGLGFYGVKGEKGDVGQPGPNGIPSDTLHPIIAPTGVTFHPDQYKGEKGSEGEPGIRGISLKGEEGIMGFPGLRGYPGLSGEKGSPGQKGSRGLDGYQGPDGPRGPKGEAGDPGPPGLPAYSPHPSLAKGARGDPGFPGAQGEPGSQGEPGDPGLPGPPGLSIGDGDQRRGLPGEMGPKGFIGDPGIPALYGGPPGPDGKRGPPGPPGLPGPPGPDGFLFGLKGAKGRAGFPGLPGSPGARGPKGWKGDAGECRCTEGDEAIKGLPGLPGPKGFAGINGEPGRKGDRGDPGQHGLPGFPGLKGVPGNIGAPGPKGAKGDSRTITTKGERGQPGVPGVPGMKGDDGSPGRDGLDGFPGLPGPPGDGIKGPPGDPGYPGIPGTKGTPGEMGPPGLGLPGLKGQRGFPGDAGLPGPPGFLGPPGPAGTPGQIDCDTDVKRAVGGDRQEAIQPGCIGGPKGLPGLPGPPGPTGAKGLRGIPGFAGADGGPGPRGLPGDAGREGFPGPPGFIGPRGSKGAVGLPGPDGSPGPIGLPGPDGPPGERGLPGEVLGAQPGPRGDAGVPGQPGLKGLPGDRGPPGFRGSQGMPGMPGLKGQPGLPGPSGQPGLYGPPGLHGFPGAPGQEGPLGLPGIPGREGLPGDRGDPGDTGAPGPVGMKGLSGDRGDAGFTGEQGHPGSPGFKGIDGMPGTPGLKGDRGSPGMDGFQGMPGLKGRPGFPGSKGEAGFFGIPGLKGLAGEPGFKGSRGDPGPPGPPPVILPGMKDIKGEKGDEGPMGLKGYLGAKGIQGMPGIPGLSGIPGLPGRPGHIKGVKGDIGVPGIPGLPGFPGVAGPPGITGFPGFIGSRGDKGAPGRAGLYGEIGATGDFGDIGDTINLPGRPGLKGERGTTGIPGLKGFFGEKGTEGDIGFPGITGVTGVQGPPGLKGQTGFPGLTGPPGSQGELGRIGLPGGKGDDGWPGAPGLPGFPGLRGIRGLHGLPGTKGFPGSPGSDIHGDPGFPGPPGERGDPGEANTLPGPVGVPGQKGDQGAPGERGPPGSPGLQGFPGITPPSNISGAPGDKGAPGIFGLKGYRGPPGPPGSAALPGSKGDTGNPGAPGTPGTKGWAGDSGPQGRPGVFGLPGEKGPRGEQGFMGNTGPTGAVGDRGPKGPKGDPGFPGAPGTVGAPGIAGIPQKIAVQPGTVGPQGRRGPPGAPGEMGPQGPPGEPGFRGAPGKAGPQGRGGVSAVPGFRGDEGPIGHQGPIGQEGAPGRPGSPGLPGMPGRSVSIGYLLVKHSQTDQEPMCPVGMNKLWSGYSLLYFEGQEKAHNQDLGLAGSCLARFSTMPFLYCNPGDVCYYASRNDKSYWLSTTAPLPMMPVAEDEIKPYISRCSVCEAPAIAIAVHSQDVSIPHCPAGWRSLWIGYSFLMHTAAGDEGGGQSLVSPGSCLEDFRATPFIECNGGRGTCHYYANKYSFWLTTIPEQSFQGSPSADTLKAGLIRTHISRCQVCMKNL

SEQ ID NO: 3296 - protein, 42 aa, Homo sapiens
  VARIANT 1: note = misc_feature - Xaa can be any naturally occurring amino acid
XGDPGQHGLPGFPGLKVRSNFIMKLARHSEASPGVPFLPFIS

SEQ ID NO: 3297 - protein, 199 aa, Homo sapiens
ATWTTRGFVFTRHSQTTAIPSCPEGTVPLYSGFSFLFVQGNQRAHGQDLGTLGSCLQRFTTMPFLFCNVNDVCNFASRNDYSYWLSTPALMPMNMAPITGRALEPYISRCTVCEGPAIAIAVHSQTTDIPPCPHGWISLWKGFSFIMKAYSINCESWGIRKNNKSLSGVHEEKTLKLKKTAELLFFILKNKVMTEHAVI

SEQ ID NO: 3298 - protein, 156 aa, Homo sapiens
GNPGEKGNRGVPGMPGLKGLKGLPGPAGPPGPRGDLGSTGNPGEPGLRGIPGSMGNMGMPGSKGKRGTLGFPGRAGRPGLPGIHGLQGDKGEPGYSEGTRPGPPGPTGDPGLPGDMGKKGEMGQPGPPGHLGPAGPEGAPGSPGSPGLPVPAAPSL

SEQ ID NO: 3299 - protein, 1670 aa, Homo sapiens
MSARTAPRPQVLLLPLLLVLLAAAPAASKGCVCKDKGQCFCDGAKGEKGEKGFPGPPGSPGQKGFTGPEGLPGPQGPKGFPGLPGLTGSKGVRGISGLPGFSGSPGLPGTPGNTGPYGLVGVPGCSGSKGEQGFPGLPGTLGYPGIPGAAGLKGQKGAPAKEEDIELDAKGDPGLPGAPGPQGLPGPPGFPGPVGPPGPPGFFGFPGAMGPRGPKGHMGERVIGHKGERGVKGLTGPPGPPGTVIVTLTGPDNRTDLKGEKGDKGAMGEPGPPGPSGLPGESYGSEKGAPGDPGLQGKPGKDGVPGFPGSEGVKGNRGFPGLMGEDGIKGQKGDIGPPGFRGPTEYYDTYQEKGDEGTPGPPGPRGARGPQGPSGPPGVPGSPGSSRPGLRGAPGWPGLKGSKGERGRPGKDAMGTPGSPGCAGSPGLPGSPGPPGPPGDIVFRKGPPGDHGLPGYLGSPGIPGVDGPKGEPGLLCTQCPYIPGPPGLPGLPGLHGVKGIPGRQGAAGLKGSPGSPGNTGLPGFPGFPGAQGDPGLKGEKGETLQPEGQVGVPGDPGLRGQPGRKGLDGIPGTPGVKGLPGPKGELALSGEKGDQGPPGDPGSPGSPGPAGPAGPPGYGPQGEPGLQGTQGVPGAPGPPGEAGPRGELSVSTPVPGPPGPPGPPGHPGPQGPPGIPGSLGKCGDPGLPGPDGEPGIPGIGFPGPPGPKGDQGFPGTKGSLGCPGKMGEPGLPGKPGLPGAKGEPAVAMPGGPGTPGFPGERGNSGEHGEIGLPGLPGLPGTPGNEGLDGPRGDPGQPGPPGEQGPPGRCIEGPRGAQGLPGLNGLKGQQGRRGKTGPKGDPGIPGLDRSGFPGETGSPGIPGHQGEMGPLGQRGYPGNPGILGPPGEDGVIGMMGFPGAIGPPGPPGNPGTPGQRGSPGIPGVKGQRGTPGAKGEQGDKGNPGPSEISHVIGDKGEPGLKGFAGNPGEKGNRGVPGMPGLKGLKGLPGPAGPPGPRGDLGSTGNPGEPGLRGIPGSMGNMGMPGSKGKRGTLGFPGRAGRPGLPGIHGLQGDKGEPGYSEGTRPGPPGPTGDPGLPGDMGKKGEMGQPGPPGHLGPAGPEGAPGSPGSPGLPGKPGPHGDLGFKGIKGLLGPPGIRGPPGLPGFPGSPGPMGIRGDQGRDGIPGPAGEKGETGLLRAPPGPRGNPGAQGAKGDRGAPGFPGLPGRKGAMGDAGPRGPTGIEGFPGPPGLPGAIIPGQTGNRGPPGSRGSPGAPGPPGPPGSHVIGIKGDKGSMGHPGPKGPPGTAGDMGPPGRLGAPGTPGLPGPRGDPGFQGFPGVKGEKGNPGFLGSIGPPGPIGPKGPPGVRGDPGTLKIISLPGSPGPPGTPGEPGMQGEPGPPGPPGNLGPCGPRGKPGKDGKPGTPGPAGEKGNKGSKGEPGPAGSDGLPGLKGKRGDSGSPATWTTRGFVFTRHSQTTAIPSCPEGTVPLYSGFSFLFVQGNQRAHGQDLGTLGSCLQRFTTMPFLFCNVNDVCNFASRNDYSYWLSTPALMPMNMAPITGRALEPYISRCTVCEGPAIAIAVHSQTTDIPPCPHGWISLWKGFSFIMFTSAGSEGTGQALASPGSCLEEFRASPFLECHGRGTCNYYSNSYSFWLASLNPERMFRKPIPSTVKAGELEKIISRCQVCMKKRH

SEQ ID NO: 3300 - protein, 155 aa, Homo sapiens
VRGDPGTLKIISLPGSPGPPGTPGEPGMQGEPGPPGPPGNLGPCGPRGKPGKDGKPGTPGPAGEKGNKGSKGEPGPAGSDGLPGLKGKRGDSGSPATWTTRGFVFTRHSQTTAIPSCPEGTVPLYSGFSFLFVQGNQRAHGQDLDALFVKVLRSP

SEQ ID NO: 3301 - protein, 1690 aa, Homo sapiens
MWSLHIVLMRCSFRLTKSLATGPWSLILILFSVQYVYGSGKKYIGPCGGRDCSVCHCVPEKGSRGPPGPPGPQGPIGPLGAPGPIGLSGEKGMRGDRGPPGAAGDKGDKGPTGVPGFPGLDGIPGHPGPPGPRGKPGMSGHNGSRGDPGFPGGRGALGPGGPLGHPGEKGEKGNSVFILGAVKGIQGDRGDPGLPGLPGSWGAGGPAGPTGYPGEPGLVGPPGQPGRPGLKGNPGVGVKGQMGDPGEVGQQGSPGPTLLVEPPDFCLYKGEKGIKGIPGMVGLPGPPGRKGESGIGAKGEKGIPGFPGPRGDPGSYGSPGFPGLKGELGLVGDPGLFGLIGPKGDPGNRGHPGPPGVLVTPPLPLKGPPGDPGFPGRYGETGDVGPPGPPGLLGRPGEACAGMIGPPGPQGFPGLPGLPGEAGIPGRPDSAPGKPGKPGSPGLPGAPGLQGLPGSSVIYCSVGNPGPQGIKGKVGPPGGRGPKGEKGNEGLCACEPGPMGPPGPPGLPGRQGSKGDLGLPGWLGTKGDPGPPGAEGPPGLPGKHGASGPPGNKGAKGDMVVSRVKGHKGERGPDGPPGFPGQPGSHGRDGHAGEKGDPGPPGDHEDATPGGKGFPGPLGPPGKAGPVGPPGLGFPGPPGERGHPGVPGHPGVRGPDGLKGQKGDTISCNVTYPGRHGPPGFDGPPGPKGFPGPQGAPGLSGSDGHKGRPGTPGTAEIPGPPGFRGDMGDPGFGGEKGSSPVGPPGPPGSPGVNGQKGIPGDPAFGHLGPPGKRGLSGVPGIKGPRGDPGCPGAEGPAGIPGFLGLKGPKGREGHAGFPGVPGPPGHSCERGAPGIPGQPGLPGYPGSPGAPGGKGQPGDVGPPGPAGMKGLPGLPGRPGAHGPPGLPGIPGPFGDDGLPGPPGPKGPRGLPGFPGFPGERGKPGAEGCPGAKGEPGEKGMSGLPGDRGLRGAKGAIGPPGDEGEMAIISQKGTPGEPGPPGDDGFPGERGDKGTPGMQGRRGEPGRYGPPGFHRGEPGEKGQPGPPGPPGPPGSTGLRGFIGFPGLPGDQGEPGSPGPPGFSGIDGARGPKGNKGDPASHFGPPGPKGEPGSPGCPGHFGASGEQGLPGIQGPRGSPGRPGPPGSSGPPGCPGDHGMPGLRGQPGEMGDPGPRGLQGDPGIPGPPGIKGPSGSPGLNGLHGLKGQKGTKGASGLHDVGPPGPVGIPGLKGERGDPGSPGISPPGPRGKKGPPGPPGSSGPPGPAGATGRAPKDIPDPGPPGDQGPPGPDGPRGAPGPPGLPGSVDLLRGEPGDCGLPGPPGPPGPPGPPGYKGFPGCDGKDGQKGPVGFPGPQGPHGFPGPPGEKGLPGPPGRKGPTGLPGPRGEPGPPADVDDCPRIPGLPGAPGMRGPEGAMGLPGMRGPSGPGCKGEPGLDGRRGVDGVPGSPGPPGRKGDTGEDGYPGGPGPPGPIGDPGPKGFGPGYLGGFLLVLHSQTDQEPTCPLGMPRLWTGYSLLYLEGQEKAHNQDLGLAGSCLPVFSTLPFAYCNIHQVCHYAQRNDRSYWLASAAPLPMMPLSEEAIRPYVSRCAVCEAPAQAVAVHSQDQSIPPCPQTWRSLWIGYSFLMHTGAGDQGGGQALMSPGSCLEDFRAAPFLECQGRQGTCHFFANKYSFWLTTVKADLQFSSAPAPDTLKESQAQRQKISRCQVCVKYS

SEQ ID NO: 3302 - protein, 296 aa, Homo sapiens
MWSLHIVLMRCSFRLTKSLATGPWSLILILFSVQYVYGSGKKYIGPCGGRDCSVCHCVPEKGSRGPPGPPGPQGPIGPLGAPGPIGLSGEKGMRGDRGPPGAAGDKGDKGPTGVPGFPGLDGIPGHPGPPGPRGKPGMSGHNGSRGDPGFPGGRGALGPGGPLGHPGEKGEKGNSVFILGAVKGIQGDRGDPGLPGLPGSWGAGGPAGPTGYPGEPGLVGPPGQPGRPGLKGNPGVGVKGQMGDPGEVGQQGSPGPTLLVEPPDFCLYKGEKGIKGIPGMVGLPGPPGRKGESGIG

SEQ ID NO: 3303 - protein, 73 aa, Homo sapiens
FASRNDYSYWLSTPEPMPMSMQPLKGQSIQPFISRCAVCEAPAVVIAVHSQTIQIPHCPQGWDSLWIGYSFMM

SEQ ID NO: 3304 - protein, 695 aa, Homo sapiens
MGPPGPPGFPGERGQKGDEGPPGISIPGPPGLDGQPGAPGLPGPPGPAGPHIPPSDEICEPGPPGPPGSPGDKGLQGEQGVKGDKGDTCFNCIGTGISGPPGQPGLPGLPGPPGSLGFPGQKGEKGQAGATGPKGLPGIPGAPGAPGFPGSKGEPGDILTFPGMKGDKGELGSPGAPGLPGLPGTPGQDGLPGLPGPKGEPGGITFKGERGPPGNPGLPGLPGNIGPMGPPGFGPPGPVGEKGIQGVAGNPGQPGIPGPKGDPGQTITQPGKPGLPGNPGRDGDVGLPGDPGLPGQPGLPGIPGSKGEPGIPGIGLPGPPGPKGFPGIPGPPGAPGTPGRIGLEGPPGPPGFPGPKGEPGFALPGPPGPPGLPGFKGALGPKGDRGFPGPPGPPGRTGLDGLPGPKGDVGPNGQPGPMGPPGLPGIGVQGPPGPPGIPGPIGQPGLHGIPGEKGDPGPPGLDVPGPPGERGSPGIPGAPGPIGPPGSPGLPGKAGASGFPGTKGEMGMMGPPGPPGPLGIPGRSGVPGLKGDDGLQGQPGLPGPTGEKGSKGEPGLPGPPGPMDPNLLGSKGEKGEPGLPGIPGVSGPKGYQGLPGDPGQPGLSGQPGLPGPPGPKGNPGLPGQPGLIGPPGLKGTIGDMGFPGPQGVEGPPGPSGVPGQPGSPGLPGQKGDKGDPGISSIGLPGLPGPKVIFGI

SEQ ID NO: 3305 - protein, 1691 aa, Homo sapiens
MKLRGVSLAAGLFLLALSLWGQPAEAAACYGCSPGSKCDCSGIKGEKGERGFPGLEGHPGLPGFPGPEGPPGPRGQKGDDGIPGPPGPKGIRGPPGLPGFPGTPGLPGMPGHDGAPGPQGIPGCNGTKGERGFPGSPGFPGLQGPPGPPGIPGMKGEPGSIIMSSLPGPKGNPGYPGPPGIQGLPGPTGIPGPIGPPGPPGLMGPPGPPGLPGPKGNMGLNFQGPKGEKGEQGLQGPPGPPGQISEQKRPIDVEFQKGDQGLPGDRGPPGPPGIRGPPGPPGGEKGEKGEQGEPGKRGKPGKDGENGQPGIPGLPGDPGYPGEPGRDGEKGQKGDTGPPGPPGLVIPRPGTGITIGEKGNIGLPGLPGEKGERGFPGIQGPPGLPGPPGAAVMGPPGPPGFPGERGQKGDEGPPGISIPGPPGLDGQPGAPGLPGPPGPAGPHIPPSDEICEPGPPGPPGSPGDKGLQGEQGVKGDKGDTCFNCIGTGISGPPGQPGLPGLPGPPGSLGFPGQKGEKGQAGATGPKGLPGIPGAPGAPGFPGSKGEPGDILTFPGMKGDKGELGSPGAPGLPGLPGTPGQDGLPGLPGPKGEPGGITFKGERGPPGNPGLPGLPGNIGPMGPPGFGPPGPVGEKGIQGVAGNPGQPGIPGPKGDPGQTITQPGKPGLPGNPGRDGDVGLPGDPGLPGQPGLPGIPGSKGEPGIPGIGLPGPPGPKGFPGIPGPPGAPGTPGRIGLEGPPGPPGFPGPKGEPGFALPGPPGPPGLPGFKGALGPKGDRGFPGPPGPPGRTGLDGLPGPKGDVGPNGQPGPMGPPGLPGIGVQGPPGPPGIPGPIGQPGLHGIPGEKGDPGPPGLDVPGPPGERGSPGIPGAPGPIGPPGSPGLPGKAGASGFPGTKGEMGMMGPPGPPGPLGIPGRSGVPGLKGDDGLQGQPGLPGPTGEKGSKGEPGLPGPPGPMDPNLLGSKGEKGEPGLPGIPGVSGPKGYQGLPGDPGQPGLSGQPGLPGPPGPKGNPGLPGQPGLIGPPGLKGTIGDMGFPGPQGVEGPPGPSGVPGQPGSPGLPGQKGDKGDPGISSIGLPGLPGPKGEPGLPGYPGNPGIKGSVGDPGLPGLPGTPGAKGQPGLPGFPGTPGPPGPKGISGPPGNPGLPGEPGPVGGGGHPGQPGPPGEKGKPGQDGIPGPAGQKGEPGQPGFGNPGPPGLPGLSGQKGDGGLPGIPGNPGLPGPKGEPGFHGFPGVQGPPGPPGSPGPALEGPKGNPGPQGPPGRPGPTGFQGLPGPEGPPGLPGNGGIKGEKGNPGQPGLPGLPGLKGDQGPPGLQGNPGRPGLNGMKGDPGLPGVPGFPGMKGPSGVPGSAGPEGEPGLIGPPGPPGLPGPSGQSIIIKGDAGPPGIPGQPGLKGLPGPQGPQGLPGPTGPPGDPGRNGLPGFDGAGGRKGDPGLPGQPGTRGLDGPPGPDGLQGPPGPPGTSSVAHGFLITRHSQTTDAPQCPQGTLQVYEGFSLLYVQGNKRAHGQDLGTAGSCLRRFSTMPFMFCNINNVCNFASRNDYSYWLSTPEPMPMSMQPLKGQSIQPFISRCAVCEAPAVVIAVHSQTIQIPHCPQGWDSLWIGYSFMMHTSAGAEGSGQALASPGSCLEEFRSAPFIECHGRGTCNYYANSYSFWLATVDVSDMFSKPQSETLKAGDLRTRISRCQVCMKRT

SEQ ID NO: 3306 - protein, 1685 aa, Homo sapiens
MKLRGVSLAAGLFLLALSLWGQPAEAAACYGCSPGSKCDCSGIKGEKGERGFPGLEGHPGLPGFPGPEGPPGPRGQKGDDGIPGPPGPKGIRGPPGLPGFPGTPGLPGMPGHDGAPGPQGIPGCNGTKGERGFPGSPGFPGLQGPPGPPGIPGMKGEPGSIIMSSLPGPKGNPGYPGPPGIQGLPGPTGIPGPIGPPGPPGLMGPPGPPGLPGPKGNMGLNFQGPKGEKGEQGLQGPPGPPGQISEQKRPIDVEFQKGDQGLPGDRGPPGPPGIRGPPGPPGGEKGEKGEQGEPGKRGKPGKDGENGQPGIPGLPGDPGYPGEPGRDGEKGQKGDTGPPGPPGLVIPRPGTGITIGEKGNIGLPGLPGEKGERGFPGIQGPPGLPGPPGAAVMGPPGPPGFPGERGQKGDEGPPGISIPGPPGLDGQPGAPGLPGPPGPAGPHIPPSDEICEPGPPGPPGSPGDKGLQGEQGVKGDKGDTCFNCIGTGISGPPGQPGLPGLPGPPGSLGFPGQKGEKGQAGATGPKGLPGIPGAPGAPGFPGSKGEPGDILTFPGMKGDKGELGSPGAPGLPGLPGTPGQDGLPGLPGPKGEPGGITFKGERGPPGNPGLPGLPGNIGPMGPPGFGPPGPVGEKGIQGVAGNPGQPGIPGPKGDPGQTITQPGKPGLPGNPGRDGDVGLPGDPGLPGQPGLPGIPGSKGEPGIPGIGLPGPPGPKGFPGIPGPPGAPGTPGRIGLEGPPGPPGFPGPKGEPGFALPGPPGPPGLPGFKGALGPKGDRGFPGPPGPPGRTGLDGLPGPKGDVGPNGQPGPMGPPGLPGIGVQGPPGPPGIPGPIGQPGLHGIPGEKGDPGPPGLDVPGPPGERGSPGIPGAPGPIGPPGSPGLPGKAGASGFPGTKGEMGMMGPPGPPGPLGIPGRSGVPGLKGDDGLQGQPGLPGPTGEKGSKGEPGLPGPPGPMDPNLLGSKGEKGEPGLPGIPGVSGPKGYQGLPGDPGQPGLSGQPGLPGPPGPKGNPGLPGQPGLIGPPGLKGTIGDMGFPGPQGVEGPPGPSGVPGQPGSPGLPGQKGDKGDPGISSIGLPGLPGPKGEPGLPGYPGNPGIKGSVGDPGLPGLPGTPGAKGQPGLPGFPGTPGPPGPKGISGPPGNPGLPGEPGPVGGGGHPGQPGPPGEKGKPGQDGIPGPAGQKGEPGQPGFGNPGPPGLPGLSGQKGDGGLPGIPGNPGLPGPKGEPGFHGFPGVQGPPGPPGSPGPALEGPKGNPGPQGPPGRPGLPGPEGPPGLPGNGGIKGEKGNPGQPGLPGLPGLKGDQGPPGLQGNPGRPGLNGMKGDPGLPGVPGFPGMKGPSGVPGSAGPEGEPGLIGPPGPPGLPGPSGQSIIIKGDAGPPGIPGQPGLKGLPGPQGPQGLPGPTGPPGDPGRNGLPGFDGAGGRKGDPGLPGQPGTRGLDGPPGPDGLQGPPGPPGTSSVAHGFLITRHSQTTDAPQCPQGTLQVYEGFSLLYVQGNKRAHGQDLGTAGSCLRRFSTMPFMFCNINNVCNFASRNDYSYWLSTPEPMPMSMQPLKGQSIQPFISRCAVCEAPAVVIAVHSQTIQIPHCPQGWDSLWIGYSFMMHTSAGAEGSGQALASPGSCLEEFRSAPFIECHGRGTCNYYANSYSFWLATVDVSDMFSKPQSETLKAGDLRTRISRCQVCMKRT

SEQ ID NO: 3307 - protein, 40 aa, Homo sapiens
MKLRGVSLAAGLFLLALSLWGQPAEAAEETLFATPVTQAF

SEQ ID NO: 3308 - protein, 174 aa, Homo sapiens
  VARIANT 1: note = misc_feature - Xaa can be any naturally occurring amino acid
XDDGLQGQPGLPGPTGEKGSKGEPGLPGPPGPMDPNLLGSKGEKGEPGLPGIPGVSGPKGYQGLPGDPGQPGLSGQPGLPGPPGPKGNPGLPGQPGLIGPPGLKGTIGDMGFPGPQGVEGPPGPSGVPGQPGSPGLPGQKGDKGDPGISSIGLPGLPGPKMIRRYVLGFVASPK

SEQ ID NO: 3309 - protein, 115 aa, Homo sapiens
  VARIANT 1: note = misc_feature - Xaa can be any naturally occurring amino acid
XGLPGPTGPPGDPGRNGLPGFDGAGGRKGDPGLPGQPGTRGLDGPPGPDGLQGPPGPPGTSSVAHGFLITRHSQTTDAPQCPQGTLQVYEGFSLLYVQGNKRAHGQDLVNLSQKR

SEQ ID NO: 3310 - protein, 1690 aa, Homo sapiens
MHPGLWLLLVTLCLTEELAAAGEKSYGKPCGGQDCSGSCQCFPEKGARGRPGPIGIQGPTGPQGFTGSTGLSGLKGERGFPGLLGPYGPKGDKGPMGVPGFLGINGIPGHPGQPGPRGPPGLDGCNGTQGAVGFPGPDGYPGLLGPPGLPGQKGSKGDPVLAPGSFKGMKGDPGLPGLDGITGPQGAPGFPGAVGPAGPPGLQGPPGPPGPLGPDGNMGLGFQGEKGVKGDVGLPGPAGPPPSTGELEFMGFPKGKKGSKGEPGPKGFPGISGPPGFPGLGTTGEKGEKGEKGIPGLPGPRGPMGSEGVQGPPGQQGKKGTLGFPGLNGFQGIEGQKGDIGLPGPDVFIDIDGAVISGNPGDPGVPGLPGLKGDEGIQGLRGPSGVPGLPALSGVPGALGPQGFPGLKGDQGNPGRTTIGAAGLPGRDGLPGPPGPPGPPSPEFETETLHNKESGFPGLRGEQGPKGNLGLKGIKGDSGFCACDGGVPNTGPPGEPGPPGPWGLIGLPGLKGARGDRGSGGAQGPAGAPGLVGPLGPSGPKGKKGEPILSTIQGMPGDRGDSGSQGFRGVIGEPGKDGVPGLPGLPGLPGDGGQGFPGEKGLPGLPGEKGHPGPPGLPGNGLPGLPGPRGLPGDKGKDGLPGQQGLPGSKGITLPCIIPGSYGPSGFPGTPGFPGPKGSRGLPGTPGQPGSSGSKGEPGSPGLVHLPELPGFPGPRGEKGLPGFPGLPGKDGLPGMIGSPGLPGSKGATGDIFGAENGAPGEQGLQGLTGHKGFLGDSGLPGLKGVHGKPGLLGPKGERGSPGTPGQVGQPGTPGSSGPYGIKGKSGLPGAPGFPGISGHPGKKGTRGKKGPPGSIVKKGLPGLKGLPGNPGLVGLKGSPGSPGVAGLPALSGPKGEKGSVGFVGFPGIPGLPGIPGTRGLKGIPGSTGKMGPSGRAGTPGEKGDRGNPGPVGIPSPRRPMSNLWLKGDKGSQGSAGSNGFPGPRGDKGEAGRPGPPGLPGAPGLPGIIKGVSGKPGPPGFMGIRGLPGLKGSSGITGFPGMPGESGSQGIRGSPGLPGASGLPGLKGDNGQTVEISGSPGPKGQPGESGFKGTKGRDGLIGNIGFPGNKGEDGKVGVSGDVGLPGAPGFPGVAGMRGEPGLPGSSGHQGAIGPLGSPGLIGPKGFPGFPGLHGLNGLPGTKGTHGTPGPSITGVPGPAGLPGPKGEKGYPGIGIGAPGKPGLRGQKGDRGFPGLQGPAGLPGAPGISLPSLIAGQPGDPGRPGLDGERGRPGPAGPPGPPGPSSNQGDTGDPGFPGIPGPKGPKGDQGIPGFSGLPGELGLKGMRGEPGFMGTPGKVGPPGDPGFPGMKGKAGPRGSSGLQGDPGQTPTAEAVQVPPGPLGLPGIDGIPGLTGDPGAQGPVGLQGSKGLPGIPGKDGPSGLPGPPGALGDPGLPGLQGPPGFEGAPGQQGPFGMPGMPGQSMRVGYTLVKHSQSEQVPPCPIGMSQLWVGYSLLFVEGQEKAHNQDLGFAGSCLPRFSTMPFIYCNINEVCHYARRNDKSYWLSTTAPIPMMPVSQTQIPQYISRCSVCEAPSQAIAVHSQDITIPQCPLGWRSLWIGYSFLMHTAAGAEGGGQSLVSPGSCLEDFRATPFIECSGARGTCHYFANKYSFWLTTVEERQQFGELPVSETLKAGQLHTRVSRCQVCMKSL

SEQ ID NO: 3311 - protein, 1707 aa, Homo sapiens
MHPGLWLLLVTLCLTEELAAAGEKSYGKPCGGQDCSGSCQCFPEKGARGRPGPIGIQGPTGPQGFTGSTGLSGLKGERGFPGLLGPYGPKGDKGPMGVPGFLGINGIPGHPGQPGPRGPPGLDGCNGTQGAVGFPGPDGYPGLLGPPGLPGQKGSKGDPVLAPGSFKGMKGDPGLPGLDGITGPQGAPGFPGAVGPAGPPGLQGPPGPPGPLGPDGNMGLGFQGEKGVKGDVGLPGPAGPPPSTGELEFMGFPKGKKGSKGEPGPKGFPGISGPPGFPGLGTTGEKGEKGEKGIPGLPGPRGPMGSEGVQGPPGQQGKKGTLGFPGLNGFQGIEGQKGDIGLPGPDVFIDIDGAVISGNPGDPGVPGLPGLKGDEGIQGLRGPSGVPGLPALSGVPGALGPQGFPGLKGDQGNPGRTTIGAAGLPGRDGLPGPPGPPGPPSPEFETETLHNKESGFPGLRGEQGPKGNLGLKGIKGDSGFCACDGGVPNTGPPGEPGPPGPWGLIGLPGLKGARGDRGSGGAQGPAGAPGLVGPLGPSGPKGKKGEPILSTIQGMPGDRGDSGSQGFRGVIGEPGKDGVPGLPGLPGLPGDGGQGFPGEKGLPGLPGEKGHPGPPGLPGNGLPGLPGPRGLPGDKGKDGLPGQQGLPGSKGDCCCREVGKGDLDTERGITLPCIIPGSYGPSGFPGTPGFPGPKGSRGLPGTPGQPGSSGSKGEPGSPGLVHLPELPGFPGPRGEKGLPGFPGLPGKDGLPGMIGSPGLPGSKGATGDIFGAENGAPGEQGLQGLTGHKGFLGDSGLPGLKGVHGKPGLLGPKGERGSPGTPGQVGQPGTPGSSGPYGIKGKSGLPGAPGFPGISGHPGKKGTRGKKGPPGSIVKKGLPGLKGLPGNPGLVGLKGSPGSPGVAGLPALSGPKGEKGSVGFVGFPGIPGLPGIPGTRGLKGIPGSTGKMGPSGRAGTPGEKGDRGNPGPVGIPSPRRPMSNLWLKGDKGSQGSAGSNGFPGPRGDKGEAGRPGPPGLPGAPGLPGIIKGVSGKPGPPGFMGIRGLPGLKGSSGITGFPGMPGESGSQGIRGSPGLPGASGLPGLKGDNGQTVEISGSPGPKGQPGESGFKGTKGRDGLIGNIGFPGNKGEDGKVGVSGDVGLPGAPGFPGVAGMRGEPGLPGSSGHQGAIGPLGSPGLIGPKGFPGFPGLHGLNGLPGTKGTHGTPGPSITGVPGPAGLPGPKGEKGYPGIGIGAPGKPGLRGQKGDRGFPGLQGPAGLPGAPGISLPSLIAGQPGDPGRPGLDGERGRPGPAGPPGPPGPSSNQGDTGDPGFPGIPGPKGPKGDQGIPGFSGLPGELGLKGMRGEPGFMGTPGKVGPPGDPGFPGMKGKAGPRGSSGLQGDPGQTPTAEAVQVPPGPLGLPGIDGIPGLTGDPGAQGPVGLQGSKGLPGIPGKDGPSGLPGPPGALGDPGLPGLQGPPGFEGAPGQQGPFGMPGMPGQSMRVGYTLVKHSQSEQVPPCPIGMSQLWVGYSLLFVEGQEKAHNQDLGFAGSCLPRFSTMPFIYCNINEVCHYARRNDKSYWLSTTAPIPMMPVSQTQIPQYISRCSVCEAPSQAIAVHSQDITIPQCPLGWRSLWIGYSFLMHTAAGAEGGGQSLVSPGSCLEDFRATPFIECSGARGTCHYFANKYSFWLTTVEERQQFGELPVSETLKAGQLHTRVSRCQVCMKSL

SEQ ID NO: 3312 - protein, 1633 aa, Homo sapiens
MHPGLWLLLVTLCLTEELAAAGEKSYGKPCGGQDCSGSCQCFPEKGARGRPGPIGIQGPTGPQGFTGSTGLSGLKGERGFPGLLGPYGPKGDKGPMGVPGFLGINGIPGHPGQPGPRGPPGLDGCNGTQGAVGFPGPDGYPGLLGPPGLPGQKGSKGDPVLAPGSFKGMKGDPGLPGLDGITGPQGAPGFPGAVGPAGPPGLQGPPGPPGPLGPDGNMGLGFQGEKGVKGDVGLPGPAGPPPSTGELEFMGFPKGKKGSKGEPGPKGFPGISGPPGFPGLGTTGEKGEKGEKGIPGLPGPRGPMGSEGVQGPPGQQGKKGTLGFPGLNGFQGIEGQKGDIGLPGPDVFIDIDGAVISGNPGDPGVPGLPGLKGDEGIQGLRGPSGVPGLPALSGVPGALGPQGFPGLKGDQGNPGRTTIGAAGLPGRDGLPGPPGPPGPPSPEFETETLHNKESGFPGLRGEQGPKGNLGLKGIKGDSGFCACDGGVPNTGPPGEPGPPGPWGLIGLPGLKGARGDRGSGGAQGPAGAPGLVGPLGPSGPKGKKGEPILSTIQGMPGDRGDSGSQGFRGVIGEPGKDGVPGLPGLPGLPGDGGQGFPGEKGLPGLPGEKGHPGPPGLPGNGLPGLPGPRGLPGDKGKDGLPGQQGLPGSKGITLPCIIPGSYGPSGFPGTPGFPGPKGSRGLPGTPGQPGSSGSKGEPGSPGLVHLPELPGFPGPRGEKGLPGFPGLPGKDGLPGMIGSPGLPGSKGATGDIFGAENGAPGEQGLQGLTGHKGFLGDSGLPGLKGVHGKPGLLGPKGERGSPGTPGQVGQPGTPGSSGPYGIKGKSGLPGAPGFPGISGHPGKKGTRGKKGPPGSIVKKGLPGLKGLPGNPGLVGLKGSPGSPGVAGLPALSGPKGEKGSVGFVGFPGIPGLPGIPGTRGLKGIPGSTGKMGPSGRAGTPGEKGDRGNPGPVGIPSPRRPMSNLWLKGDKGSQGSAGSNGFPGPRGDKGEAGRPGPPGLPGAPGLPGIIKGVSGKPGPPGFMGIRGLPGLKGSSGITGFPGMPGESGSQGIRGSPGLPGASGLPGLKGDNGQTVEISGSPGPKGQPGESGFKGTKGRDGLIGNIGFPGNKGEDGKVGVSGDVGLPGAPGFPGVAGMRGEPGLPGSSGHQGAIGPLGSPGLIGPKGPSITGVPGPAGLPGPKGEKGYPGIGIGAPGKPGLRGQKGDRGFPGLQGPAGLPGAPGISLPSLIAGQPGDPGRPGLDGERGRPGPAGPPGPPGPSSNQGDTGDPGFPGIPGPKGPKGDQGIPGFSGLPGELGLKGSSGLQGDPGQTPTAEAVQVPPGPLGLPGIDGIPGLTGDPGAQGPVGLQGSKGLPGIPGKDGPSGLPGPPGALGDPGLPGLQGPPGFEGAPGQQGPFGMPGMPGQSMRVGYTLVKHSQSEQVPPCPIGMSQLWVGYSLLFVEGQEKAHNQDLGFAGSCLPRFSTMPFIYCNINEVCHYARRNDKSYWLSTTAPIPMMPVSQTQIPQYISRCSVCEAPSQAIAVHSQDITIPQCPLGWRSLWIGYSFLMHTAAGAEGGGQSLVSPGSCLEDFRATPFIECSGARGTCHYFANKYSFWLTTVEERQQFGELPVSETLKAGQLHTRVSRCQVCMKSL

SEQ ID NO: 3313 - protein, 1678 aa, Homo sapiens
MHPGLWLLLVTLCLTEELAAAGEKSYGKPCGGQDCSGSCQCFPEKGARGRPGPIGIQGPTGPQGFTGSTGLSGLKGERGFPGLLGPYGPKGDKGPMGVPGFLGINGIPGHPGQPGPRGPPGLDGCNGTQGAVGFPGPDGYPGLLGPPGLPGQKGSKGDPVLAPGSFKGMKGDPGLPGLDGITGPQGAPGFPGAVGPAGPPGLQGPPGPPGPLGPDGNMGLGFQGEKGVKGDVGLPGPAGPPPSTGELEFMGFPKGKKGSKGEPGPKGFPGISGPPGFPGLGTTGEKGEKGEKGIPGLPGPRGPMGSEGVQGPPGQQGKKGTLGFPGLNGFQGIEGQKGDIGLPGPDVFIDIDGAVISGNPGDPGVPGLPGLKGDEGIQGLRGPSGVPGLPALSGVPGALGPQGFPGLKGDQGNPGRTTIGAAGLPGRDGLPGPPGPPGPPSPEFETETLHNKESGFPGLRGEQGPKGNLGLKGIKGDSGFCACDGGVPNTGPPGEPGPPGPWGLIGLPGLKGARGDRGSGGAQGPAGAPGLVGPLGPSGPKGKKGEPILSTIQGMPGDRGDSGSQGFRGVIGEPGKDGVPGLPGLPGLPGDGGQGFPGEKGLPGLPGEKGHPGPPGLPGNGLPGLPGPRGLPGDKGKDGLPGQQGLPGSKGITLPCIIPGSYGPSGFPGTPGFPGPKGSRGLPGTPGQPGSSGSKGEPGSPGLVHLPELPGFPGPRGEKGLPGFPGLPGKDGLPGMIGSPGLPGSKGATGDIFGAENGAPGEQGLQGLTGHKGFLGDSGLPGLKGVHGKPGLLGPKGERGSPGTPGQVGQPGTPGSSGPYGIKGKSGLPGAPGFPGISGHPGKKGTRGKKGPPGSIVKKGLPGLKGLPGNPGLVGLKGSPGSPGVAGLPALSGPKGEKGSVGFVGFPGIPGLPGIPGTRGLKGIPGSTGKMGPSGRAGTPGEKGDRGNPGPVGIPSPRRPMSNLWLKGDKGSQGSAGSNGFPGPRGDKGEAGRPGPPGLPGAPGLPGIIKGVSGKPGPPGFMGIRGLPGLKGSSGITGFPGMPGESGSQGIRGSPGLPGASGLPGLKGDNGQTVEISGSPGPKGQPGESGFKGTKGRDGLIGNIGFPGNKGEDGKVGVSGDVGLPGAPGFPGVAGMRGEPGLPGSSGHQGAIGPLGSPGLIGPKGFPGFPGLHGLNGLPGTKGTHGTPGPSITGVPGPAGLPGPKGEKGYPGIGIGAPGKPGLRGQKGDRGFPGLQGPAGLPGAPGISLPSLIAGQPGDPGRPGLDGERGRPGPAGPPGPPGPSSNQGDTGDPGFPGIPGFSGLPGELGLKGMRGEPGFMGTPGKVGPPGDPGFPGMKGKAGPRGSSGLQGDPGQTPTAEAVQVPPGPLGLPGIDGIPGLTGDPGAQGPVGLQGSKGLPGIPGKDGPSGLPGPPGALGDPGLPGLQGPPGFEGAPGQQGPFGMPGMPGQSMRVGYTLVKHSQSEQVPPCPIGMSQLWVGYSLLFVEGQEKAHNQDLGFAGSCLPRFSTMPFIYCNINEVCHYARRNDKSYWLSTTAPIPMMPVSQTQIPQYISRCSVCEAPSQAIAVHSQDITIPQCPLGWRSLWIGYSFLMHTAAGAEGGGQSLVSPGSCLEDFRATPFIECSGARGTCHYFANKYSFWLTTVEERQQFGELPVSETLKAGQLHTRVSRCQVCMKSL

SEQ ID NO: 3314 - protein, 1666 aa, Homo sapiens
MHPGLWLLLVTLCLTEELAAAGEKSYGKPCGGQDCSGSCQCFPEKGARGRPGPIGIQGPTGPQGFTGSTGLSGLKGERGFPGLLGPYGPKGDKGPMGVPGFLGINGIPGHPGQPGPRGPPGLDGCNGTQGAVGFPGPDGYPGLLGPPGLPGQKGSKGDPVLAPGSFKGMKGDPGLPGLDGITGPQGAPGFPGAVGPAGPPGLQGPPGPPGPLGPDGNMGLGFQGEKGVKGDVGLPGPAGPPPSTGELEFMGFPKGKKGSKGEPGPKGFPGISGPPGFPGLGTTGEKGEKGEKGIPGLPGPRGPMGSEGVQGPPGQQGKKGTLGFPGLNGFQGIEGQKGDIGLPGPDVFIDIDGAVISGNPGDPGVPGLPGLKGDEGIQGLRGPSGVPGLPALSGVPGALGPQGFPGLKGDQGNPGRTTIGAAGLPGRDGLPGPPGPPGPPSPEFETETLHNKESGFPGLRGEQGPKGNLGLKGIKGDSGFCACDGGVPNTGPPGEPGPPGPWGLIGLPGLKGARGDRGSGGAQGPAGAPGLVGPLGPSGPKGKKGEPILSTIQGMPGDRGDSGSQGFRGVIGEPGKDGVPGLPGLPGLPGDGGQGFPGEKGLPGLPGEKGHPGPPGLPGNGLPGLPGPRGLPGDKGKDGLPGQQGLPGSKGITLPCIIPGSYGPSGFPGTPGFPGPKGSRGLPGTPGQPGSSGSKGEPGSPGLVHLPELPGFPGPRGEKGLPGFPGLPGKDGLPGMIGSPGLPGSKGATGDIFGAENGAPGEQGLQGLTGHKGFLGDSGLPGLKGVHGKPGLLGPKGERGSPGTPGQVGQPGTPGSSGPYGIKGKSGLPGAPGFPGISGHPGKKGTRGKKGPPGSIVKKGLPGLKGLPGNPGLVGLKGSPGSPGVAGLPALSGPKGEKGSVGFVGFPGIPGLPGIPGTRGLKGIPGSTGKMGPSGRAGTPGEKGDRGNPGPVGIPSPRRPMSNLWLKGDKGSQGSAGSNGFPGPRGDKGEAGRPGPPGLPGAPGLPGIIKGVSGKPGPPGFMGIRGLPGLKGSSGITGFPGMPGESGSQGIRGSPGLPGASGLPGLKGDNGQTVEISGSPGPKGQPGESGFKGTKGRDGLIGNIGFPGNKGEDGKVGVSGDVGLPGAPGFPGVAGMRGEPGLPGSSGHQGAIGPLGSPGLIGPKGPSITGVPGPAGLPGPKGEKGYPGIGIGAPGKPGLRGQKGDRGFPGLQGPAGLPGAPGISLPSLIAGQPGDPGRPGLDGERGRPGPAGPPGPPGPSSNQGDTGDPGFPGIPGPKGPKGDQGIPGFSGLPGELGLKGMRGEPGFMGTPGKVGPPGDPGFPGMKGKAGPRGSSGLQGDPGQTPTAEAVQVPPGPLGLPGIDGIPGLTGDPGAQGPVGLQGSKGLPGIPGKDGPSGLPGPPGALGDPGLPGLQGPPGFEGAPGQQGPFGMPGMPGQSMRVGYTLVKHSQSEQVPPCPIGMSQLWVGYSLLFVEGQEKAHNQDLGFAGSCLPRFSTMPFIYCNINEVCHYARRNDKSYWLSTTAPIPMMPVSQTQIPQYISRCSVCEAPSQAIAVHSQDITIPQCPLGWRSLWIGYSFLMHTAAGAEGGGQSLVSPGSCLEDFRATPFIECSGARGTCHYFANKYSFWLTTVEERQQFGELPVSETLKAGQLHTRVSRCQVCMKSL

SEQ ID NO: 3315 - protein, 1691 aa, Homo sapiens
MLINKLWLLLVTLCLTEELAAAGEKSYGKPCGGQDCSGSCQCFPEKGARGRPGPIGIQGPTGPQGFTGSTGLSGLKGERGFPGLLGPYGPKGDKGPMGVPGFLGINGIPGHPGQPGPRGPPGLDGCNGTQGAVGFPGPDGYPGLLGPPGLPGQKGSKGDPVLAPGSFKGMKGDPGLPGLDGITGPQGAPGFPGAVGPAGPPGLQGPPGPPGPLGPDGNMGLGFQGEKGVKGDVGLPGPAGPPPSTGELEFMGFPKGKKGSKGEPGPKGFPGISGPPGFPGLGTTGEKGEKGEKGIPGLPGPRGPMGSEGVQGPPGQQGKKGTLGFPGLNGFQGIEGQKGDIGLPGPDVFIDIDGAVISGNPGDPGVPGLPGLKGDEGIQGLRGPSGVPGLPALSGVPGALGPQGFPGLKGDQGNPGRTTIGAAGLPGRDGLPGPPGPPGPPSPEFETETLHNKESGFPGLRGEQGPKGNLGLKGIKGDSGFCACDGGVPNTGPPGEPGPPGPWGLIGLPGLKGARGDRGSGGAQGPAGAPGLVGPLGPSGPKGKKGEPILSTIQGMPGDRGDSGSQGFRGVIGEPGKDGVPGLPGLPGLPGDGGQGFPGEKGLPGLPGEKGHPGPPGLPGNGLPGLPGPRGLPGDKGKDGLPGQQGLPGSKGITLPCIIPGSYGPSGFPGTPGFPGPKGSRGLPGTPGQPGSSGSKGEPGSPGLVHLPELPGFPGPRGEKGLPGFPGLPGKDGLPGMIGSPGLPGSKGATGDIFGAENGAPGEQGLQGLTGHKGFLGDSGLPGLKGVHGKPGLLGPKGERGSPGTPGQVGQPGTPGSSGPYGIKGKSGLPGAPGFPGISGHPGKKGTRGKKGPPGSIVKKGLPGLKGLPGNPGLVGLKGSPGSPGVAGLPALSGPKGEKGSVGFVGFPGIPGLPGIPGTRGLKGIPGSTGKMGPSGRAGTPGEKGDRGNPGPVGIPSPRRPMSNLWLKGDKGSQGSAGSNGFPGPRGDKGEAGRPGPPGLPGAPGLPGIIKGVSGKPGPPGFMGIRGLPGLKGSSGITGFPGMPGESGSQGIRGSPGLPGASGLPGLKGDNGQTVEISGSPGPKGQPGESGFKGTKGRDGLIGNIGFPGNKGEDGKVGVSGDVGLPGAPGFPGVAGMRGEPGLPGSSGHQGAIGPLGSPGLIGPKGFPGFPGLHGLNGLPGTKGTHGTPGPSITGVPGPAGLPGPKGEKGYPGIGIGAPGKPGLRGQKGDRGFPGLQGPAGLPGAPGISLPSLIAGQPGDPGRPGLDGERGRPGPAGPPGPPGPSSNQGDTGDPGFPGIPGPKGPKGDQGIPGFSGLPGELGLKGMRGEPGFMGTPGKVGPPGDPGFPGMKGKAGPRGSSGLQGDPGQTPTAEAVQVPPGPLGLPGIDGIPGLTGDPGAQGPVGLQGSKGLPGIPGKDGPSGLPGPPGALGDPGLPGLQGPPGFEGAPGQQGPFGMPGMPGQSMRVGYTLVKHSQSEQVPPCPIGMSQLWVGYSLLFVEGQEKAHNQDLGFAGSCLPRFSTMPFIYCNINEVCHYARRNDKSYWLSTTAPIPMMPVSQTQIPQYISRCSVCEAPSQAIAVHSQDITIPQCPLGWRSLWIGYSFLMHTAAGAEGGGQSLVSPGSCLEDFRATPFIECSGARGTCHYFANKYSFWLTTVEERQQFGELPVSETLKAGQLHTRVSRCQVCMKSL

SEQ ID NO: 3316 - protein, 1838 aa, Homo sapiens
MDVHTRWKARSALRPGAPLLPPLLLLLLWAPPPSRAAQPADLLKVLDFHNLPDGITKTTGFCATRRSSKGPDVAYRVTKDAQLSAPTKQLYPASAFPEDFSILTTVKAKKGSQAFLVSIYNEQGIQQIGLELGRSPVFLYEDHTGKPGPEDYPLFRGINLSDGKWHRIALSVHKKNVTLILDCKKKTTKFLDRSDHPMIDINGIIVFGTRILDEEVFEGDIQQLLFVSDHRAAYDYCEHYSPDCDTAVPDTPQSQDPNPDEYYTEGDGEGETYYYEYPYYEDPEDLGKEPTPSKKPVEAAKETTEVPEELTPTPTEAAPMPETSEGAGKEEDVGIGDYDYVPSEDYYTPSPYDDLTYGEGEENPDQPTDPGAGAEIPTSTADTSNSSNPAPPPGEGADDLEGEFTEETIRNLDENYYDPYYDPTSSPSEIGPGMPANQDTIYEGIGGPRGEKGQKGEPAIIEPGMLIEGPPGPEGPAGLPGPPGTMGPTGQVGDPGERGPPGRPGLPGADGLPGPPGTMLMLPFRFGGGGDAGSKGPMVSAQESQAQAILQQARLALRGPAGPMGLTGRPGPVGPPGSGGLKGEPGDVGPQGPRGVQGPPGPAGKPGRRGRAGSDGARGMPGQTGPKGDRGFDGLAGLPGEKGHRGDPGPSGPPGPPGDDGERGDDGEVGPRGLPGEPGPRGLLGPKGPPGPPGPPGVTGMDGQPGPKGNVGPQGEPGPPGQQGNPGAQGLPGPQGAIGPPGEKGPLGKPGLPGMPGADGPPGHPGKEGPPGEKGGQGPPGPQGPIGYPGPRGVKGADGIRGLKGTKGEKGEDGFPGFKGDMGIKGDRGEIGPPGPRGEDGPEGPKGRGGPNGDPGPLGPPGEKGKLGVPGLPGYPGRQGPKGSIGFPGFPGANGEKGGRGTPGKPGPRGQRGPTGPRGERGPRGITGKPGPKGNSGGDGPAGPPGERGPNGPQGPTGFPGPKGPPGPPGKDGLPGHPGQRGETGFQGKTGPPGPPGVVGPQGPTGETGPMGERGHPGPPGPPGEQGLPGLAGKEGTKGDPGPAGLPGKDGPPGLRGFPGDRGLPGPVGALGLKGNEGPPGPPGPAGSPGERGPAGAAGPIGIPGRPGPQGPPGPAGEKGAPGEKGPQGPAGRDGLQGPVGLPGPAGPVGPPGEDGDKGEIGEPGQKGSKGDKGEQGPPGPTGPQGPIGQPGPSGADGEPGPRGQQGLFGQKGDEGPRGFPGPPGPVGLQGLPGPPGEKGETGDVGQMGPPGPPGPRGPSGAPGADGPQGPPGGIGNPGAVGEKGEPGEAGEPGLPGEGGPPGPKGERGEKGESGPSGAAGPPGPKGPPGDDGPKGSPGPVGFPGDPGPPGEPGPAGQDGPPGDKGDDGEPGQTGSPGPTGEPGPSGPPGKRGPPGPAGPEGRQGEKGAKGEAGLEGPPGKTGPIGPQGAPGKPGPDGLRGIPGPVGEQGLPGSPGPDGPPGPMGPPGLPGLKGDSGPKGEKGHPGLIGLIGPPGEQGEKGDRGLPGPQGSSGPKGEQGITGPSGPIGPPGPPGLPGPPGPKGAKGSSGPTGPKGEAGHPGPPGPPGPPGEVIQPLPIQASRTRRNIDASQLLDDGNGENYVDYADGMEEIFGSLNSLKLEIEQMKRPLGTQQNPARTCKDLQLCHPDFPDGEYWVDPNQGCSRDSFKVYCNFTAGGSTCVFPDKKSEGARITSWPKENPGSWFSEFKRGKLLSYVDAEGNPVGVVQMTFLRLLSASAHQNVTYHCYQSVAWQDAATGSYDKALRFLGSNDEEMSYDNNPYIRALVDGCATKKGYQKTVLEIDTPKVEQVPIVDIMFNDFGEASQKFGFEVGPACFMG

SEQ ID NO: 3317 - protein, 1838 aa, Homo sapiens
MDVHTRWKARSALRPGAPLLPPLLLLLLWAPPPSRAAQPADLLKVLDFHNLPDGITKTTGFCATRRSSKGPDVAYRVTKDAQLSAPTKQLYPASAFPEDFSILTTVKAKKGSQAFLVSIYNEQGIQQIGLELGRSPVFLYEDHTGKPGPEDYPLFRGINLSDGKWHRIALSVHKKNVTLILDCKKKTTKFLDRSDHPMIDINGIIVFGTRILDEEVFEGDIQQLLFVSDHRAAYDYCEHYSPDCDTAVPDTPQSQDPNPDEYYTEGDGEGETYYYEYPYYEDPEDLGKEPTPSKKPVEAAKETTEVPEELTPTPTEAAPMPETSEGAGKEEDVGIGDYDYVPSEDYYTPSPYDDLTYGEGEENPDQPTDPGAGAEIPTSTADTSNSSNPAPPPGEGADDLEGEFTEETIRNLDENYYDPYYDPTSSPSEIGPGMPANQDTIYEGIGGPRGEKGQKGEPAIIEPGMLIEGPPGPEGPAGLPGPPGTMGPTGQVGDPGERGPPGRPGLPGADGLPGPPGTMLMLPFRFGGGGDAGSKGPMVSAQESQAQAILQQARLALRGPAGPMGLTGRPGPVGPPGSGGLKGEPGDVGPQGPRGVQGPPGPAGKPGRRGRAGSDGARGMPGQTGPKGDRGFDGLAGLPGEKGHRGDPGPSGPPGPPGDDGERGDDGEVGPRGLPGEPGPRGLLGPKGPPGPPGPPGVTGMDGQPGPKGNVGPQGEPGPPGQQGNPGAQGLPGPQGAIGPPGEKGPLGKPGLPGMPGADGPPGHPGKEGPPGEKGGQGPPGPQGPIGYPGPRGVKGADGIRGLKGTKGEKGEDGFPGFKGDMGIKGDRGEIGPPGPRGEDGPEGPKGRGGPNGDPGPLGPPGEKGKLGVPGLPGYPGRQGPKGSIGFPGFPGANGEKGGRGTPGKPGPRGQRGPTGPRGERGPRGITGKPGPKGNSGGDGPAGPPGERGPNGPQGPTGFPGPKGPPGPPGKDGLPGHPGQRGETGFQGKTGPPGPPGVVGPQGPTGETGPMGERGHPGPPGPPGEQGLPGLAGKEGTKGDPGPAGLPGKDGPPGLRGFPGDRGLPGPVGALGLKGNEGPPGPPGPAGSPGERGPAGAAGPIGIPGRPGPQGPPGPAGEKGAPGEKGPQGPAGRDGLQGPVGLPGPAGPVGPPGEDGDKGEIGEPGQKGSKGDKGEQGPPGPTGPQGPIGQPGPSGADGEPGPRGQQGLFGQKGDEGPRGFPGPPGPVGLQGLPGPPGEKGETGDVGQMGPPGPPGPRGPSGAPGADGPQGPPGGIGNPGAVGEKGEPGEAGEPGLPGEGGPPGPKGERGEKGESGPSGAAGPPGPKGPPGDDGPKGSPGPVGFPGDPGPPGEPGPAGQDGPPGDKGDDGEPGQTGSPGPTGEPGPSGPPGKRGPPGPAGPEGRQGEKGAKGEAGLEGPPGKTGPIGPQGAPGKPGPDGLRGIPGPVGEQGLPGSPGPDGPPGPMGPPGLPGLKGDSGPKGEKGHPGLIGLIGPPGEQGEKGDRGLPGPQGSSGPKGEQGITGPSGPIGPPGPPGLPGPPGPKGAKGSSGPTGPKGEAGHPGPPGPPGPPGEVIQPLPIQASRTRRNIDASQLLDDGNGENYVDYADGMEEIFGSLNSLKLEIEQMKRPLGTQQNPARTCKDLQLCHPDFPDGEYWVDPNQGCSRDSFKVYCNFTAGGSTCVFPDKKSEGSKMARWPKEQPSTWYSQYKRGSLLSYVDAEGNPVGVVQMTFLRLLSASAHQNVTYHCYQSVAWQDAATGSYDKALRFLGSNDEEMSYDNNPYIRALVDGCATKKGYQKTVLEIDTPKVEQVPIVDIMFNDFGEASQKFGFEVGPACFMG

SEQ ID NO: 3318 - protein, 210 aa, Homo sapiens
  VARIANT 1: note = misc_feature - Xaa can be any naturally occurring amino acid
XRTRRNIDASQLLDDGNGENYVDYADGMEEIFGSLNSLKLEIEQMKRPLGTQQNPARTCKDLQLCHPDFPDGEYWVDPNQGCSRDSFKVYCNFTAGGSTCVFPDKKSEGSKMARWPKEQPSTWYSQYKRGSLLSYVDAEGNPVGVVQMTFLRLLSASAHQNVTYHCYQSVAWQDAATGSYDKALRFLGSNDEEMSYDNNPYIRALVDGCA

SEQ ID NO: 3319 - protein, 1499 aa, Homo sapiens
MMANWAEARPLLILIVLLGQFVSIKAQEEDEDEGYGEEIACTQNGQMYLNRDIWKPAPCQICVCDNGAILCDKIECQDVLDCADPVTPPGECCPVCSQTPGGGNTNFGRGRKGQKGEPGLVPVVTGIRGRPGPAGPPGSQGPRGERGPKGRPGPRGPQGIDGEPGVPGQPGAPGPPGHPSHPGPDGLSRPFSAQMAGLDEKSGLGSQVGLMPGSVGPVGPRGPQGLQGQQGGAGPTGPPGEPGDPGPMGPIGSRGPEGPPGKPGEDGEPGRNGNPGEVGFAGSPGARGFPGAPGLPGLKGHRGHKGLEGPKGEVGAPGSKGEAGPTGPMGAMGPLGPRGMPGERGRLGPQGAPGQRGAHGMPGKPGPMGPLGIPGSSGFPGNPGMKGEAGPTGARGPEGPQGQRGETGPPGPVGSPGLPGAIGTDGTPGAKGPTGSPGTSGPPGSAGPPGSPGPQGSTGPQGIRGQPGDPGVPGFKGEAGPKGEPGPHGIQGPIGPPGEEGKRGPRGDPGTVGPPGPVGERGAPGNRGFPGSDGLPGPKGAQGERGPVGSSGPKGSQGDPGRPGEPGLPGARGLTGNPGVQGPEGKLGPLGAPGEDGRPGPPGSIGIRGQPGSMGLPGPKGSSGDPGKPGEAGNAGVPGQRGAPGKDGEVGPSGPVGPPGLAGERGEQGPPGPTGFQGLPGPPGPPGEGGKPGDQGVPGDPGAVGPLGPRGERGNPGERGEPGITGLPGEKGMAGGHGPDGPKGSPGPSGTPGDTGPPGLQGMPGERGIAGTPGPKGDRGGIGEKGAEGTAGNDGARGLPGPLGPPGPAGPTGEKGEPGPRGLVGPPGSRGNPGSRGENGPTGAVGFAGPQGPDGQPGVKGEPGEPGQKGDAGSPGPQGLAGSPGPHGPNGVPGLKGGRGTQGPPGATGFPGSAGRVGPPGPAGAPGPAGPLGEPGKEGPPGLRGDPGSHGRVGDRGPAGPPGGPGDKGDPGEDGQPGPDGPPGPAGTTGQRGIVGMPGQRGERGMPGLPGPAGTPGKVGPTGATGDKGPPGPVGPPGSNGPVGEPGPEGPAGNDGTPGRDGAVGERGDRGDPGPAGLPGSQGAPGTPGPVGAPGDAGQRGDPGSRGPIGPPGRAGKRGLPGPQGPRGDKGDHGDRGDRGQKGHRGFTGLQGLPGPPGPNGEQGSAGIPGPFGPRGPPGPVGPSGKEGNPGPLGPIGPPGVRGSVGEAGPEGPPGEPGPPGPPGPPGHLTAALGDIMGHYDESMPDPLPEFTEDQAAPDDKNKTDPGVHATLKSLSSQIETMRSPDGSKKHPARTCDDLKLCHSAKQSGEYWIDPNQGSVEDAIKVYCNMETGETCISANPSSVPRKTWWASKSPDNKPVWYGLDMNRGSQFAYGDHQSPNTAITQMTFLRLLSKEASQNITYICKNSVGYMDDQAKNLKKAVVLKGANDLDIKAEGNIRFRYIVLQDTCSKRNGNVGKTVFEYRTQNVARLPIIDLAPVDVGGTDQEFGVEIGPVCFV

SEQ ID NO: 3320 - protein, 1112 aa, Homo sapiens
MPGSVGPVGPRGPQGLQGQQGGAGPTGPPGEPGDPGPMGPIGSRGPEGPPGKPGEDGEPGRNGNPGEVGFAGSPGARGFPGAPGLPGLKGHRGHKGLEGPKGEVGAPGSKGEAGPTGPMGDPGTVGPPGPVGERGAPGNRGFPGSDGLPGPKGAQGERGPVGSSGPKGSQGDPGRPGEPGLPGARGLTGNPGVQGPEGKLGPLGAPGEDGRPGPPGSIGIRGQPGSMGLPGPKGSSGDPGKPGEAGNAGVPGQRGAPGKDGEVGPSGPVGPPGLAGERGEQGPPGPTGFQGLPGPPGPPGEGGKPGDQGVPGDPGAVGPLGPRGERGNPGERGEPGITGLPGEKGMAGGHGPDGPKGSPGPSGTPGDTGPPGLQGMPGERGIAGTPGPKGDRGGIGEKGAEGTAGNDGARGLPGPLGPPGPAGPTGEKGEPGPRGLVGPPGSRGNPGSRGENGPTGAVGFAGPQGPDGQPGVKGEPGEPGQKGDAGSPGPQGLAGSPGPHGPNGVPGLKGGRGTQGPPGATGFPGSAGRVGPPGPAGAPGPAGPLGEPGKEGPPGLRGDPGSHGRVGDRGPAGPPGGPGDKGDPGEDGQPGPDGPPGPAGTTGQRGIVGMPGQRGERGMPGLPGPAGTPGKVGPTGATGDKGPPGPVGPPGSNGPVGEPGPEGPAGNDGTPGRDGAVGERGDRGDPGPAGLPGSQGAPGTPGPVGAPGDAGQRGDPGSRGPIGPPGRAGKRGLPGPQGPRGDKGDHGDRGDRGQKGHRGFTGLQGLPGPPGPNGEQGSAGIPGPFGPRGPPGPVGPSGKEGNPGPLGPIGPPGVRGSVGEAGPEGPPGEPGPPGPPGPPGHLTAALGDIMGHYDESMPDPLPEFTEDQAAPDDKNKTDPGVHATLKSLSSQIETMRSPDGSKKHPARTCDDLKLCHSAKQSGEYWIDPNQGSVEDAIKVYCNMETGETCISANPSSVPRKTWWASKSPDNKPVWYGLDMNRGSQFAYGDHQSPNTAITQMTFLRLLSKEASQNITYICKNSVGYMDDQAKNLKKAVVLKGANDLDIKAEGNIRFRYIVLQDTCSKRNGNVGKTVFEYRTQNVARLPIIDLAPVDVGGTDQEFGVEIGPVCFV

SEQ ID NO: 3321 - protein, 1745 aa, Homo sapiens
MGNRRDLGQPRAGLCLLLAALQLLPGTQADPVDVLKALGVQGGQAGVPEGPGFCPQRTPEGDRAFRIGQASTLGIPTWELFPEGHFPENFSLLITLRGQPANQSVLLSIYDERGARQLGLALGPALGLLGDPFRPLPQQVNLTDGRWHRVAVSIDGEMVTLVADCEAQPPVLGHGPRFISIAGLTVLGTQDLGEKTFEGDIQELLISPDPQAAFQACERYLPDCDNLAPAATVAPQGEPETPRPRRKGKGKGRKKGRGRKGKGRKKNKEIWTSSPPPDSAENQTSTDIPKTETPAPNLPPTPTPLVVTSTVTTGLNATILERSLDPDSGTELGTLETKAAREDEEGDDSTMGPDFRAAEYPSRTQFQIFPGAGEKGAKGEPAVIEKGQQFEGPPGAPGPQGVVGPSGPPGPPGFPGDPGPPGPAGLPGIPGIDGIRGPPGTVIMMPFQFAGGSFKGPPVSFQQAQAQAVLQQTQLSMKGPPGPVGLTGRPGPVGLPGHPGLKGEEGAEGPQGPRGLQGPHGPPGRVGKMGRPGADGARGLPGDTGPKGDRGFDGLPGLPGEKGQRGDFGHVGQPGPPGEDGERGAEGPPGPTGQAGEPGPRGLLGPRGSPGPTGRPGVTGIDGAPGAKGNVGPPGEPGPPGQQGNHGSQGLPGPQGLIGTPGEKGPPGNPGIPGLPGSDGPLGHPGHEGPTGEKGAQGPPGSAGPPGYPGPRGVKGTSGNRGLQGEKGEKGEDGFPGFKGDVGLKGDQGKPGAPGPRGEDGPEGPKGQAGQAGEEGPPGSAGEKGKLGVPGLPGYPGRPGPKGSIGFPGPLGPIGEKGKSGKTGQPGLEGERGPPGSRGERGQPGATGQPGPKGDVGQDGAPGIPGEKGLPGLQGPPGFPGPKGPPGHQGKDGRPGHPGQRGELGFQGQTGPPGPAGVLGPQGKTGEVGPLGERGPPGPPGPPGEQGLPGLEGREGAKGELGPPGPLGKEGPAGLRGFPGPKGGPGDPGPTGLKGDKGPPGPVGANGSPGERGPLGPAGGIGLPGQSGSEGPVGPAGKKGSRGERGPPGPTGKDGIPGPLGPLGPPGAAGPSGEEGDKGDVGAPGHKGSKGDKGDAGPPGQPGIRGPAGHPGPPGADGAQGRRGPPGLFGQKGDDGVRGFVGVIGPPGLQGLPGPPGEKGEVGDVGSMGPHGAPGPRGPQGPTGSEGTPGLPGGVGQPGAVGEKGERGDAGDPGPPGAPGIPGPKGDIGEKGDSGPSGAAGPPGKKGPPGEDGAKGSVGPTGLPGDLGPPGDPGVSGIDGSPGEKGDPGDVGGPGPPGASGEPGAPGPPGKRGPSGHMGREGREGEKGAKGEPGPDGPPGRTGPMGARGPPGRVGPEGLRGIPGPVGEPGLLGAPGQMGPPGPLGPSGLPGLKGDTGPKGEKGHIGLIGLIGPPGEAGEKGDQGLPGVQGPPGPKGDPGPPGPIGSLGHPGPPGVAGPLGQKGSKGSPGSMGPRGDTGPAGPPGPPGAPAELHGLRRRRRFVPVPLPVVEGGLEEVLASLTSLSLELEQLRRPPGTAERPGLVCHELHRNHPHLPDGEYWIDPNQGCARDSFRVFCNFTAGGETCLYPDKKFEIVKLASWSKEKPGGWYSTFRRGKKFSYVDADGSPVNVVQLNFLKLLSATARQNFTYSCQNAAAWLDEATGDYSHSARFLGTNGEELSFNQTTAATVSVPQDGCRLRKGQTKTLFEFSSSRAGFLPLWDVAATDFGQTNQKFGFELGPVCFSS

SEQ ID NO: 3322 - protein, 1028 aa, Homo sapiens
MRAARALLPLLLQACWTAAQDEPETPRAVAFQDCPVDLFFVLDTSESVALRLKPYGALVDKVKSFTKRFIDNLRDRYYRCDRNLVWNAGALHYSDEVEIIQGLTRMPGGRDALKSSVDAVKYFGKGTYTDCAIKKGLEQLLVGGSHLKENKYLIVVTDGHPLEGYKEPCGGLEDAVNEAKHLGVKVFSVAITPDHLEPRLSIIATDHTYRRNFTAADWGQSRDAEEAISQTIDTIVDMIKNNVEQVCCSFECQPARGPPGLRGDPGFEGERGKPGLPGEKGEAGDPGRPGDLGPVGYQGMKGEKGSRGEKGSRGPKGYKGEKGKRGIDGVDGVKGEMGYPGLPGCKGSPGFDGIQGPPGPKGDPGAFGLKGEKGEPGADGEAGRPGSSGPSGDEGQPGEPGPPGEKGEAGDEGNPGPDGAPGERGGPGERGPRGTPGTRGPRGDPGEAGPQGDQGREGPVGVPGDPGEAGPIGPKGYRGDEGPPGSEGARGAPGPAGPPGDPGLMGERGEDGPAGNGTEGFPGFPGYPGNRGAPGINGTKGYPGLKGDEGEAGDPGDDNNDIAPRGVKGAKGYRGPEGPQGPPGHQGPPGPDECEILDIIMKMCSCCECKCGPIDLLFVLDSSESIGLQNFEIAKDFVVKVIDRLSRDELVKFEPGQSYAGVVQYSHSQMQEHVSLRSPSIRNVQELKEAIKSLQWMAGGTFTGEALQYTRDQLLPPSPNNRIALVITDGRSDTQRDTTPLNVLCSPGIQVVSVGIKDVFDFIPGSDQLNVISCQGLAPSQGRPGLSLVKENYAELLEDAFLKNVTAQICIDKKCPDYTCPITFSSPADITILLDGSASVGSHNFDTTKRFAKRLAERFLTAGRTDPAHDVRVAVVQYSGTGQQRPERASLQFLQNYTALASAVDAMDFINDATDVNDALGYVTRFYREASSGAAKKRLLLFSDGNSQGATPAAIEKAVQEAQRAGIEIFVVVVGRQVNEPHIRVLVTGKTAEYDVAYGESHLFRVPSYQALLRGVFHQTVSRKVALG

SEQ ID NO: 3323 - protein, 1026 aa, Homo sapiens [sequence omitted]

SEQ ID NO: 3324 - protein, 250 aa, Homo sapiens
GNKGAKGDRGLPGPRGPQGALGEPGKQGSRGDPGDAGPRGDSGQPGPKGDPGRPGFSYPGPRGAPGEKGEPGPRGPEGGRGDFGLKGEPGRKGEKGEPADPGPPGEPGPRGPRGVPGPEGEPGPPGDPGLTECDVMTYVRETCGCCGSEVSPVPPDDPATPPDCEKRCGALDVVFVIDSSESIGYTNFTLEKNFVINVVNRLGAIAKDPKSETGTRVGVVQYSHEGTFEAIQLDDERIDSLSSFKEAVKN

SEQ ID NO: 3325 - protein, 180 aa, Homo sapiens
MLQGTCSVLLLWGILGAIQAQQQEVISPDTTERNNNCPEKTDCPIHVYFVLDTSESVTMQSPTDILLFHMKQFVPQFISQLQNEFYLDQVALSWRYGGLHFSDQVEVFSPPGSDRASFIKNLQGISSFRRGTFTDCALANMTEQIRQDRSKGTVHFAVVITDGHVTGSPCGGIKLQAERA

SEQ ID NO: 3326 - protein, 1019 aa, Homo sapiens
MLQGTCSVLLLWGILGAIQAQQQEVISPDTTERNNNCPEKTDCPIHVYFVLDTSESVTMQSPTDILLFHMKQFVPQFISQLQNEFYLDQVALSWRYGGLHFSDQVEVFSPPGSDRASFIKNLQGISSFRRGTFTDCALANMTEQIRQDRSKGTVHFAVVITDGHVTGSPCGGIKLQAERAREEGIRLFAVAPNQNLKEQGLRDIASTPHELYRNDYATMLPDSTEIDQDTINRIIKVMKHEAYGECYKVSCLEIPGPSGPKGYRGQKGAKGNMGEPGEPGQKGRQGDPGIEGPIGFPGPKGVPGFKGEKGEFGADGRKGAPGLAGKNGTDGQKGKLGRIGPPGCKGDPGNRGPDGYPGEAGSPGERGDQGGKGDPGRPGRRGPPGEIGAKGSKGYQGNSGAPGSPGVKGAKGGPGPRGPKGEPGRRGDPGTKGSPGSDGPKGEKGDPGPEGPRGLAGEVGNKGAKGDRGLPGPRGPQGALGEPGKQGSRGDPGDAGPRGDSGQPGPKGDPGRPGFSYPGPRGAPGEKGEPGPRGPEGGRGDFGLKGEPGRKGEKGEPADPGPPGEPGPRGPRGVPGPEGEPGPPGDPGLTECDVMTYVRETCGCCDCEKRCGALDVVFVIDSSESIGYTNFTLEKNFVINVVNRLGAIAKDPKSETGTRVGVVQYSHEGTFEAIQLDDERIDSLSSFKEAVKNLEWIAGGTWTPSALKFAYDRLIKESRRQKTRVFAVVITDGRHDPRDDDLNLRALCDRDVTVTAIGIGDMFHEKHESENLYSIACDKPQQVRNMTLFSDLVAEKFIDDMEDVLCPDPQIVCPDLPCQTELSVAQCTQRPVDIVFLLDGSERLGEQNFHKARRFVEQVARRLTLARRDDDPLNARVALLQFGGPGEQQVAFPLSHNLTAIHEALETTQYLNSFSHVGAGVVHAINAIVRSPRGGARRHAELSFVFLTDGVTGNDSLHESAHSMRKQNVVPTVLALGSDVDMDVLTTLSLGDRAAVFHEKDYDSLAQPGFFDRFIRWIC

SEQ ID NO: 3327 - protein, 828 aa, Homo sapiens
MLQGTCSVLLLWGILGAIQAQQQEVISPDTTERNNNCPEKTDCPIHVYFVLDTSESVTMQSPTDILLFHMKQFVPQFISQLQNEFYLDQVALSWRYGGLHFSDQVEVFSPPGSDRASFIKNLQGISSFRRGTFTDCALANMTEQIRQDRSKGTVHFAVVITDGHVTGSPCGGIKLQAERAREEGIRLFAVAPNQNLKEQGLRDIASTPHELYRNDYATMLPDSTEIDQDTINRIIKVMKHEAYGECYKVSCLEIPGPSGPKGYRGQKGAKGNMGEPGEPGQKGRQGDPGIEGPIGFPGPKGVPGFKGEKGEFGADGRKGAPGLAGKNGTDGQKGKLGRIGPPGCKGDPGNRGPDGYPGEAGSPGERGDQGGKGDPGRPGRRGPPGEIGAKGSKGYQGNSGAPGSPGVKGAKGGPGPRGPKGEPGRRGDPGTKGSPGSDGPKGEKGDPGPEGPRGLAGEVGNKGAKGDRGLPGPRGPQGALGEPGKQGSRGDPGDAGPRGDSGQPGPKGDPGRPGFSYPGPRGAPGEKGEPGPRGPEGGRGDFGLKGEPGRKGEKGEPADPGPPGEPGPRGPRGVPGPEGEPGPPGDPGLTECDVMTYVRETCGCCDCEKRCGALDVVFVIDSSESIGYTNFTLEKNFVINVVNRLGAIAKDPKSETGTRVGVVQYSHEGTFEAIQLDDERIDSLSSFKEAVKNLEWIAGGTWTPSALKFAYDRLIKESRRQKTRVFAVVITDGRHDPRDDDLNLRALCDRDVTVTAIGIGDMFHEKHESENLYSIACDKPQQVRNMTLFSDLVAEKFIDDMEDVLCPDPQIVCPDLPCQTGLDGAVLC

SEQ ID NO: 3328 - protein, 918 aa, Homo sapiens
MLQGTCSVLLLWGILGAIQAQQQEVISPDTTERNNNCPEKTDCPIHVYFVLDTSESVTMQSPTDILLFHMKQFVPQFISQLQNEFYLDQVALSWRYGGLHFSDQVEVFSPPGSDRASFIKNLQGISSFRRGTFTDCALANMTEQIRQDRSKGTVHFAVVITDGHVTGSPCGGIKLQAERAREEGIRLFAVAPNQNLKEQGLRDIASTPHELYRNDYATMLPDSTEIDQDTINRIIKVMKHEAYGECYKVSCLEIPGPSGPKGYRGQKGAKGNMGEPGEPGQKGRQGDPGIEGPIGFPGPKGVPGFKGEKGEFGADGRKGAPGLAGKNGTDGQKGKLGRIGPPGCKGDPGNRGPDGYPGEAGSPGERGDQGGKGDPGRPGRRGPPGEIGAKGSKGYQGNSGAPGSPGVKGAKGGPGPRGPKGEPGRRGDPGTKGSPGSDGPKGEKGDPGPEGPRGLAGEVGNKGAKGDRGLPGPRGPQGALGEPGKQGSRGDPGDAGPRGDSGQPGPKGDPGRPGFSYPGPRGAPGEKGEPGPRGPEGGRGDFGLKGEPGRKGEKGEPADPGPPGEPGPRGPRGVPGPEGEPGPPGDPGLTECDVMTYVRETCGCCDCEKRCGALDVVFVIDSSESIGYTNFTLEKNFVINVVNRLGAIAKDPKSETGTRVGVVQYSHEGTFEAIQLDDERIDSLSSFKEAVKNLEWIAGGTWTPSALKFAYDRLIKESRRQKTRVFAVVITDGRHDPRDDDLNLRALCDRDVTVTAIGIGDMFHEKHESENLYSIACDKPQQVRNMTLFSDLVAEKFIDDMEDVLCPDPQIVCPDLPCQTDAPWPGGEPPVTFLRTEEGPDATFPRTIPLIQQLLNATELTQDPAAYSQLVAVLVYTAERAKFATGVERQDWMELFIDTFKLVHRDIVGDPETALALC

SEQ ID NO: 3329 - protein, 828 aa, Homo sapiens; identical to SEQ ID NO: 3327

SEQ ID NO: 3330 - protein, 2971 aa, Homo sapiens
MRKHRHLPLVAVFCLFLSGFPTTHAQQQQAAQDSADIIFLIDGSNNTGSVNFAVILDFLVNLLEKLPIGTQQIRVGVVQFSDEPRTMFSLDTYSTKAQVLGAVKALGFAGGELANIGLALDFVVENHFTRAGGSRVEEGVPQVLVLISAGPSSDEIRYGVVALKQASVFSFGLGAQAASRAELQHIATDDNLVFTVPEFRSFGDLQEKLLPYIVGVAQRHIVLKPPTIVTQVIEVNKRDIVFLVDGSSALGLANFNAIRDFIAKVIQRLEIGQDLIQVAVAQYADTVRPEFYFNTHPTKREVITAVRKMKPLDGSALYTGSALDFVRNNLFTSSAGYRAAEGIPKLLVLITGGKSLDEISQPAQELKRSSIMAFAIGNKGADQAELEEIAFDSSLVFIPAEFRAAPLQGMLPGLLAPLRTLSGTPEVHSNKRDIIFLLDGSANVGKTNFPYVRDFVMNLVNSLDIGNDNIRVGLVQFSDTPVTEFSLNTYQTKSDILGHLRQLQLQGGSGLNTGSALSYVYANHFTEAGGSRIREHVPQLLLLLTAGQSEDSYLQAANALTRAGILTFCVGASQANKAELEQIAFNPSLVYLMDDFSSLPALPQQLIQPLTTYVSGGVEEVPLAQPESKRDILFLFDGSANLVGQFPVVRDFLYKIIDELNVKPEGTRIAVAQYSDDVKVESRFDEHQSKPEILNLVKRMKIKTGKALNLGYALDYAQRYIFVKSAGSRIEDGVLQFLVLLVAGRSSDRVDGPASNLKQSGVVPFIFQAKNADPAELEQIVLSPAFILAAESLPKIGDLHPQIVNLLKSVHNGAPAPVSGEKDVVFLLDGSEGVRSGFPLLKEFVQRVVESLDVGQDRVRVAVVQYSDRTRPEFYLNSYMNKQDVVNAVRQLTLLGGPTPNTGAALEFVLRNILVSSAGSRITEGVPQLLIVLTADRSGDDVRNPSVVVKRGGAVPIGIGIGNADITEMQTISFIPDFAVAIPTFRQLGTVQQVISERVTQLTREELSRLQPVLQPLPSPGVGGKRDVVFLIDGSQSAGPEFQYVRTLIERLVDYLDVGFDTTRVAVIQFSDDPKVEFLLNAHSSKDEVQNAVQRLRPKGGRQINVGNALEYVSRNIFKRPLGSRIEEGVPQFLVLISSGKSDDEVDDPAVELKQFGVAPFTIARNADQEELVKISLSPEYVFSVSTFRELPSLEQKLLTPITTLTSEQIQKLLASTRYPPPAVESDAADIVFLIDSSEGVRPDGFAHIRDFVSRIVRRLNIGPSKVRVGVVQFSNDVFPEFYLKTYRSQAPVLDAIRRLRLRGGSPLNTGKALEFVARNLFVKSAGSRIEDGVPQHLVLVLGGKSQDDVSRFAQVIRSSGIVSLGVGDRNIDRTELQTITNDPRLVFTVREFRELPNIEERIMNSFGPSAATPAPPGVDTPPPSRPEKKKADIVFLLDGSINFRRDSFQEVLRFVSEIVDTVYEDGDSIQVGLVQYNSDPTDEFFLKDFSTKRQIIDAINKVVYKGGRHANTKVGLEHLRVNHFVPEAGSRLDQRVPQIAFVITGGKSVEDAQDVSLALTQRGVKVFAVGVRNIDSEEVGKIASNSATAFRVGNVQELSELSEQVLETLHDAMHETLCPGVTDAAKACNLDVILGFDGSRDQNVFVAQKGFESKVDAILNRISQMHRVSCSGGRSPTVRVSVVANTPSGPVEAFDFDEYQPEMLEKFRNMRSQHPYVLTEDTLKVYLNKFRQSSPDSVKVVIHFTDGADGDLADLHRASENLRQEGVRALILVGLERVVNLERLMHLEFGRGFMYDRPLRLNLLDLDYELAEQLDNIAEKACCGVPCKCSGQRGDRGPIGSIGPKGIPGEDGYRGYPGDEGGPGERGPPGVNGTQGFQGCPGQRGVKGSRGFPGEKGEVGEIGLDGLDGEDGDKGLPGSSGEKGNPGRRGDKGPRGEKGERGDVGIRGDPGNPGQDSQERGPKGETGDLGPMGVPGRDGVPGGPGETGKNGGFGRRGPPGAKGNKGGPGQPGFEGEQGTRGAQGPAGPAGPPGLIGEQGISGPRGSGGAAGAPGERGRTGPLGRKGEPGEPGPKGGIGNRGPRGETGDDGRDGVGSEGRRGKKGERGFPGYPGPKGNPGEPGLNGTTGPKGIRGRRGNSGPPGIVGQKGDPGYPGPAGPKGNRGDSIDQCALIQSIKDKCPCCYGPLECPVFPTELAFALDTSEGVNQDTFGRMRDVVLSIVNDLTIAESNCPRGARVAVVTYNNEVTTEIRFADSKRKSVLLDKIKNLQVALTSKQQSLETAMSFVARNTFKRVRNGFLMRKVAVFFSNTPTRASPQLREAVLKLSDAGITPLFLTRQEDRQLINALQINNTAVGHALVLPAGRDLTDFLENVLTCHVCLDICNIDPSCGFGSWRPSFRDRRAAGSDVDIDMAFILDSAETTTLFQFNEMKKYIAYLVRQLDMSPDPKASQHFARVAVVQHAPSESVDNASMPPVKVEFSLTDYGSKEKLVDFLSRGMTQLQGTRALGSAIEYTIENVFESAPNPRDLKIVVLMLTGEVPEQQLEEAQRVILQAKCKGYFFVVLGIGRKVNIKEVYTFASEPNDVFFKLVDKSTELNEEPLMRFGRLLPSFVSSENAFYLSPDIRKQCDWFQGDQPTKNLVKFGHKQVNVPNNVTSSPTSNPVTTTKPVTTTKPVTTTTKPVTTTTKPVTIINQPSVKPAAAKPAPAKPVAAKPVATKMATVRPPVAVKPATAAKPVAAKPAAVRPPAAAAAKPVATKPEVPRPQAAKPAATKPATTKPMVKMSREVQVFEITENSAKLHWERAEPPGPYFYDLTVTSAHDQSLVLKQNLTVTDRVIGGLLAGQTYHVAVVCYLRSQVRATYHGSFSTKKSQPPPPQPARSASSSTINLMVSTEPLALTETDICKLPKDEGTCRDFILKWYYDPNTKSCARFWYGGCGGNENKFGSQKECEKVCAPVLAKPGVISVMGT

SEQ ID NO: 3331 - protein, 1237 aa, Homo sapiens
MRKHRHLPLVAVFCLFLSGFPTTHAQQQQAAQDSADIIFLIDGSNNTGSVNFAVILDFLVNLLEKLPIGTQQIRVGVVQFSDEPRTMFSLDTYSTKAQVLGAVKALGFAGGELANIGLALDFVVENHFTRAGGSRVEEGVPQVLVLISAGPSSDEIRYGVVALKQASVFSFGLGAQAASRAELQHIATDDNLVFTVPEFRSFGDLQEKLLPYIVGVAQRHIVLKPPTIVTQVIEVNKRDIVFLVDGSSALGLANFNAIRDFIAKVIQRLEIGQDLIQVAVAQYADTVRPEFYFNTHPTKREVITAVRKMKPLDGSALYTGSALDFVRNNLFTSSAGYRAAEGIPKLLVLITGGKSLDEISQPAQELKRSSIMAFAIGNKGADQAELEEIAFDSSLVFIPAEFRAAPLQGMLPGLLAPLRTLSGTPEVHSNKRDIIFLLDGSANVGKTNFPYVRDFVMNLVNSLDIGNDNIRVGLVQFSDTPVTEFSLNTYQTKSDILGHLRQLQLQGGSGLNTGSALSYVYANHFTEAGGSRIREHVPQLLLLLTAGQSEDSYLQAANALTRAGILTFCVGASQANKAELEQIAFNPSLVYLMDDFSSLPALPQQLIQPLTTYVSGGVEEVPLAQPESKRDILFLFDGSANLVGQFPVVRDFLYKIIDELNVKPEGTRIAVAQYSDDVKVESRFDEHQSKPEILNLVKRMKIKTGKALNLGYALDYAQRYIFVKSAGSRIEDGVLQFLVLLVAGRSSDRVDGPASNLKQSGVVPFIFQAKNADPAELEQIVLSPAFILAAESLPKIGDLHPQIVNLLKSVHNGAPAPVSGEKDVVFLLDGSEGVRSGFPLLKEFVQRVVESLDVGQDRVRVAVVQYSDRTRPEFYLNSYMNKQDVVNAVRQLTLLGGPTPNTGAALEFVLRNILVSSAGSRITEGVPQLLIVLTADRSGDDVRNPSVVVKRGGAVPIGIGIGNADITEMQTISFIPDFAVAIPTFRQLGTVQQVISERVTQLTREELSRLQPVLQPLPSPGVGGKRDVVFLIDGSQSAGPEFQYVRTLIERLVDYLDVGFDTTRVAVIQFSDDPKVEFLLNAHSSKDEVQNAVQRLRPKGGRQINVGNALEYVSRNIFKRPLGSRIEEGVPQFLVLISSGKSDDEVDDPAVELKQFGVAPFTIARNADQEELVKISLSPEYVFSVSTFRELPSLEQKLLTPITTLTSEQIQKLLASTRYPPPGEMGASEVLLGAFSI

SEQ ID NO: 3332 - protein, 2971 aa, Homo sapiens; identical to SEQ ID NO: 3330

SEQ ID NO: 3333 - protein, 3177 aa, Homo sapiens
MRKHRHLPLVAVFCLFLSGFPTTHAQQQQADVKNGAAADIIFLVDSSWTIGEEHFQLVREFLYDVVKSLAVGENDFHFALVQFNGNPHTEFLLNTYRTKQEVLSHISNMSYIGGTNQTGKGLEYIMQSHLTKAAGSRAGDGVPQVIVVLTDGHSKDGLALPSAELKSADVNVFAIGVEDADEGALKEIASEPLNMHMFNLENFTSLHDIVGNLVSCVHSSVSPERAGDTETLKDITAQDSADIIFLIDGSNNTGSVNFAVILDFLVNLLEKLPIGTQQIRVGVVQFSDEPRTMFSLDTYSTKAQVLGAVKALGFAGGELANIGLALDFVVENHFTRAGGSRVEEGVPQVLVLISAGPSSDEIRYGVVALKQASVFSFGLGAQAASRAELQHIATDDNLVFTVPEFRSFGDLQEKLLPYIVGVAQRHIVLKPPTIVTQVIEVNKRDIVFLVDGSSALGLANFNAIRDFIAKVIQRLEIGQDLIQVAVAQYADTVRPEFYFNTHPTKREVITAVRKMKPLDGSALYTGSALDFVRNNLFTSSAGYRAAEGIPKLLVLITGGKSLDEISQPAQELKRSSIMAFAIGNKGADQAELEEIAFDSSLVFIPAEFRAAPLQGMLPGLLAPLRTLSGTPEVHSNKRDIIFLLDGSANVGKTNFPYVRDFVMNLVNSLDIGNDNIRVGLVQFSDTPVTEFSLNTYQTKSDILGHLRQLQLQGGSGLNTGSALSYVYANHFTEAGGSRIREHVPQLLLLLTAGQSEDSYLQAANALTRAGILTFCVGASQANKAELEQIAFNPSLVYLMDDFSSLPALPQQLIQPLTTYVSGGVEEVPLAQPESKRDILFLFDGSANLVGQFPVVRDFLYKIIDELNVKPEGTRIAVAQYSDDVKVESRFDEHQSKPEILNLVKRMKIKTGKALNLGYALDYAQRYIFVKSAGSRIEDGVLQFLVLLVAGRSSDRVDGPASNLKQSGVVPFIFQAKNADPAELEQIVLSPAFILAAESLPKIGDLHPQIVNLLKSVHNGAPAPVSGEKDVVFLLDGSEGVRSGFPLLKEFVQRVVESLDVGQDRVRVAVVQYSDRTRPEFYLNSYMNKQDVVNAVRQLTLLGGPTPNTGAALEFVLRNILVSSAGSRITEGVPQLLIVLTADRSGDDVRNPSVVVKRGGAVPIGIGIGNADITEMQTISFIPDFAVAIPTFRQLGTVQQVISERVTQLTREELSRLQPVLQPLPSPGVGGKRDVVFLIDGSQSAGPEFQYVRTLIERLVDYLDVGFDTTRVAVIQFSDDPKVEFLLNAHSSKDEVQNAVQRLRPKGGRQINVGNALEYVSRNIFKRPLGSRIEEGVPQFLVLISSGKSDDEVDDPAVELKQFGVAPFTIARNADQEELVKISLSPEYVFSVSTFRELPSLEQKLLTPITTLTSEQIQKLLASTRYPPPAVESDAADIVFLIDSSEGVRPDGFAHIRDFVSRIVRRLNIGPSKVRVGVVQFSNDVFPEFYLKTYRSQAPVLDAIRRLRLRGGSPLNTGKALEFVARNLFVKSAGSRIEDGVPQHLVLVLGGKSQDDVSRFAQVIRSSGIVSLGVGDRNIDRTELQTITNDPRLVFTVREFRELPNIEERIMNSFGPSAATPAPPGVDTPPPSRPEKKKADIVFLLDGSINFRRDSFQEVLRFVSEIVDTVYEDGDSIQVGLVQYNSDPTDEFFLKDFSTKRQIIDAINKVVYKGGRHANTKVGLEHLRVNHFVPEAGSRLDQRVPQIAFVITGGKSVEDAQDVSLALTQRGVKVFAVGVRNIDSEEVGKIASNSATAFRVGNVQELSELSEQVLETLHDAMHETLCPGVTDAAKACNLDVILGFDGSRDQNVFVAQKGFESKVDAILNRISQMHRVSCSGGRSPTVRVSVVANTPSGPVEAFDFDEYQPEMLEKFRNMRSQHPYVLTEDTLKVYLNKFRQSSPDSVKVVIHFTDGADGDLADLHRASENLRQEGVRALILVGLERVVNLERLMHLEFGRGFMYDRPLRLNLLDLDYELAEQLDNIAEKACCGVPCKCSGQRGDRGPIGSIGPKGIPGEDGYRGYPGDEGGPGERGPPGVNGTQGFQGCPGQRGVKGSRGFPGEKGEVGEIGLDGLDGEDGDKGLPGSSGEKGNPGRRGDKGPRGEKGERGDVGIRGDPGNPGQDSQERGPKGETGDLGPMGVPGRDGVPGGPGETGKNGGFGRRGPPGAKGNKGGPGQPGFEGEQGTRGAQGPAGPAGPPGLIGEQGISGPRGSGGAAGAPGERGRTGPLGRKGEPGEPGPKGGIGNRGPRGETGDDGRDGVGSEGRRGKKGERGFPGYPGPKGNPGEPGLNGTTGPKGIRGRRGNSGPPGIVGQKGDPGYPGPAGPKGNRGDSIDQCALIQSIKDKCPCCYGPLECPVFPTELAFALDTSEGVNQDTFGRMRDVVLSIVNDLTIAESNCPRGARVAVVTYNNEVTTEIRFADSKRKSVLLDKIKNLQVALTSKQQSLETAMSFVARNTFKRVRNGFLMRKVAVFFSNTPTRASPQLREAVLKLSDAGITPLFLTRQEDRQLINALQINNTAVGHALVLPAGRDLTDFLENVLTCHVCLDICNIDPSCGFGSWRPSFRDRRAAGSDVDIDMAFILDSAETTTLFQFNEMKKYIAYLVRQLDMSPDPKASQHFARVAVVQHAPSESVDNASMPPVKVEFSLTDYGSKEKLVDFLSRGMTQLQGTRALGSAIEYTIENVFESAPNPRDLKIVVLMLTGEVPEQQLEEAQRVILQAKCKGYFFVVLGIGRKVNIKEVYTFASEPNDVFFKLVDKSTELNEEPLMRFGRLLPSFVSSENAFYLSPDIRKQCDWFQGDQPTKNLVKFGHKQVNVPNNVTSSPTSNPVTTTKPVTTTKPVTTTTKPVTTTTKPVTIINQPSVKPAAAKPAPAKPVAAKPVATKMATVRPPVAVKPATAAKPVAAKPAAVRPPAAAAAKPVATKPEVPRPQAAKPAATKPATTKPMVKMSREVQVFEITENSAKLHWERAEPPGPYFYDLTVTSAHDQSLVLKQNLTVTDRVIGGLLAGQTYHVAVVCYLRSQVRATYHGSFSTKKSQPPPPQPARSASSSTINLMVSTEPLALTETDICKLPKDEGTCRDFILKWYYDPNTKSCARFWYGGCGGNENKFGSQKECEKVCAPVLAKPGVISVMGT

SEQ ID NO: 3334 - protein, 708 aa, Homo sapiens
MRKHRHLPLVAVFCLFLSGFPTTHAQQQQADVKNGAAADIIFLVDSSWTIGEEHFQLVREFLYDVVKSLAVGENDFHFALVQFNGNPHTEFLLNTYRTKQEVLSHISNMSYIGGTNQTGKGLEYIMQSHLTKAAGSRAGDGVPQVIVVLTDGHSKDGLALPSAELKSADVNVFAIGVEDADEGALKEIASEPLNMHMFNLENFTSLHDIVGNLVSCVHSSVSPERAGDTETLKDITAQDSADIIFLIDGSNNTGSVNFAVILDFLVNLLEKLPIGTQQIRVGVVQFSDEPRTMFSLDTYSTKAQVLGAVKALGFAGGELANIGLALDFVVENHFTRAGGSRVEEGVPQVLVLISAGPSSDEIRYGVVALKQASVFSFGLGAQAASRAELQHIATDDNLVFTVPEFRSFGDLQEKLLPYIVGVAQRHIVLKPPTIVTQVIEVNKRDIVFLVDGSSALGLANFNAIRDFIAKVIQRLEIGQDLIQVAVAQYADTVRPEFYFNTHPTKREVITAVRKMKPLDGSALYTGSALDFVRNNLFTSSAGYRAAEGIPKLLVLITGGKSLDEISQPAQELKRSSIMAFAIGNKGADQAELEEIAFDSSLVFIPAEFRAAPLQGMLPGLLAPLRTLSGTPEESKRDILFLFDGSANLVGQFPVVRDFLYKIIDELNVKPEGTRIAVAQYSDDVKVESRFDEHQSKPEILNLVKRMKI

SEQ ID NO: 3335 - protein, 2569 aa, Homo sapiens
MRKHRHLPLVAVFCLFLSGFPTTHAQQQQAVIEVNKRDIVFLVDGSSALGLANFNAIRDFIAKVIQRLEIGQDLIQVAVAQYADTVRPEFYFNTHPTKREVITAVRKMKPLDGSALYTGSALDFVRNNLFTSSAGYRAAEGIPKLLVLITGGKSLDEISQPAQELKRSSIMAFAIGNKGADQAELEEIAFDSSLVFIPAEFRAAPLQGMLPGLLAPLRTLSGTPEESKRDILFLFDGSANLVGQFPVVRDFLYKIIDELNVKPEGTRIAVAQYSDDVKVESRFDEHQSKPEILNLVKRMKIKTGKALNLGYALDYAQRYIFVKSAGSRIEDGVLQFLVLLVAGRSSDRVDGPASNLKQSGVVPFIFQAKNADPAELEQIVLSPAFILAAESLPKIGDLHPQIVNLLKSVHNGAPAPVSGEKDVVFLLDGSEGVRSGFPLLKEFVQRVVESLDVGQDRVRVAVVQYSDRTRPEFYLNSYMNKQDVVNAVRQLTLLGGPTPNTGAALEFVLRNILVSSAGSRITEGVPQLLIVLTADRSGDDVRNPSVVVKRGGAVPIGIGIGNADITEMQTISFIPDFAVAIPTFRQLGTVQQVISERVTQLTREELSRLQPVLQPLPSPGVGGKRDVVFLIDGSQSAGPEFQYVRTLIERLVDYLDVGFDTTRVAVIQFSDDPKVEFLLNAHSSKDEVQNAVQRLRPKGGRQINVGNALEYVSRNIFKRPLGSRIEEGVPQFLVLISSGKSDDEVDDPAVELKQFGVAPFTIARNADQEELVKISLSPEYVFSVSTFRELPSLEQKLLTPITTLTSEQIQKLLASTRYPPPAVESDAADIVFLIDSSEGVRPDGFAHIRDFVSRIVRRLNIGPSKVRVGVVQFSNDVFPEFYLKTYRSQAPVLDAIRRLRLRGGSPLNTGKALEFVARNLFVKSAGSRIEDGVPQHLVLVLGGKSQDDVSRFAQVIRSSGIVSLGVGDRNIDRTELQTITNDPRLVFTVREFRELPNIEERIMNSFGPSAATPAPPGVDTPPPSRPEKKKADIVFLLDGSINFRRDSFQEVLRFVSEIVDTVYEDGDSIQVGLVQYNSDPTDEFFLKDFSTKRQIIDAINKVVYKGGRHANTKVGLEHLRVNHFVPEAGSRLDQRVPQIAFVITGGKSVEDAQDVSLALTQRGVKVFAVGVRNIDSEEVGKIASNSATAFRVGNVQELSELSEQVLETLHDAMHETLCPGVTDAAKACNLDVILGFDGSRDQNVFVAQKGFESKVDAILNRISQMHRVSCSGGRSPTVRVSVVANTPSGPVEAFDFDEYQPEMLEKFRNMRSQHPYVLTEDTLKVYLNKFRQSSPDSVKVVIHFTDGADGDLADLHRASENLRQEGVRALILVGLERVVNLERLMHLEFGRGFMYDRPLRLNLLDLDYELAEQLDNIAEKACCGVPCKCSGQRGDRGPIGSIGPKGIPGEDGYRGYPGDEGGPGERGPPGVNGTQGFQGCPGQRGVKGSRGFPGEKGEVGEIGLDGLDGEDGDKGLPGSSGEKGNPGRRGDKGPRGEKGERGDVGIRGDPGNPGQDSQERGPKGETGDLGPMGVPGRDGVPGGPGETGKNGGFGRRGPPGAKGNKGGPGQPGFEGEQGTRGAQGPAGPAGPPGLIGEQGISGPRGSGGAAGAPGERGRTGPLGRKGEPGEPGPKGGIGNRGPRGETGDDGRDGVGSEGRRGKKGERGFPGYPGPKGNPGEPGLNGTTGPKGIRGRRGNSGPPGIVGQKGDPGYPGPAGPKGNRGDSIDQCALIQSIKDKCPFHGPLECPVFPTELAFALDTSEGVNQDTFGRMRDVVLSIVNDLTIAESNCPRGARVAVVTYNNEVTTEIRFADSKRKSVLLDKIKNLQVALTSKQQSLETAMSFVARNTFKRVRNGFLMRKVAVFFSNTPTRASPQLREAVLKLSDAGITPLFLTRQEDRQLINALQINNTAVGHALVLPAGRDLTDFLENVLTCHVCLDICNIDPSCGFGSWRPSFRDRRAAGSDVDIDMAFILDSAETTTLFQFNEMKKYIAYLVRQLDMSPDPKASQHFARVAVVQHAPSESVDNASMPPVKVEFSLTDYGSKEKLVDFLSRGMTQLQGTRALGSAIEYTIENVFESAPNPRDLKIVVLMLTGEVPEQQLEEAQRVILQAKCKGYFFVVLGIGRKVNIKEVYTFASEPNDVFFKLVDKSTELNEEPLMRFGRLLPSFVSSENAFYLSPDIRKQCDWFQGDQPTKNLVKFGHKQVNVPNNVTSSPTSNPVTTTKPVTTTKPVTTTTKPVTTTTKPVTIINQPSVKPAAAKPAPAKPVAAKPVATKMATVRPPVAVKPATAAKPVAAKPAAVRPPAAAAAKPVATKPEVPRPQAAKPAATKPATTKPMVKMSREVQVFEITENSAKLHWERAEPPGPYFYDLTVTSAHDQSLVLKQNLTVTDRVIGGLLAGQTYHVAVVCYLRSQVRATYHGSFSTKKSQPPPPQPARSASSSTINLMVSTEPLALTETDICKLPKDEGTCRDFILKWYYDPNTKSCARFWYGGCGGNENKFGSQKECEKVCAPVLAKPGVISVMGT

SEQ ID NO: 3336 - protein, 2570 aa, Homo sapiens
MRKHRHLPLVAVFCLFLSGFPTTHAQQQQAVIEVNKRDIVFLVDGSSALGLANFNAIRDFIAKVIQRLEIGQDLIQVAVAQYADTVRPEFYFNTHPTKREVITAVRKMKPLDGSALYTGSALDFVRNNLFTSSAGYRAAEGIPKLLVLITGGKSLDEISQPAQELKRSSIMAFAIGNKGADQAELEEIAFDSSLVFIPAEFRAAPLQGMLPGLLAPLRTLSGTPEESKRDILFLFDGSANLVGQFPVVRDFLYKIIDELNVKPEGTRIAVAQYSDDVKVESRFDEHQSKPEILNLVKRMKIKTGKALNLGYALDYAQRYIFVKSAGSRIEDGVLQFLVLLVAGRSSDRVDGPASNLKQSGVVPFIFQAKNADPAELEQIVLSPAFILAAESLPKIGDLHPQIVNLLKSVHNGAPAPVSGEKDVVFLLDGSEGVRSGFPLLKEFVQRVVESLDVGQDRVRVAVVQYSDRTRPEFYLNSYMNKQDVVNAVRQLTLLGGPTPNTGAALEFVLRNILVSSAGSRITEGVPQLLIVLTADRSGDDVRNPSVVVKRGGAVPIGIGIGNADITEMQTISFIPDFAVAIPTFRQLGTVQQVISERVTQLTREELSRLQPVLQPLPSPGVGGKRDVVFLIDGSQSAGPEFQYVRTLIERLVDYLDVGFDTTRVAVIQFSDDPKVEFLLNAHSSKDEVQNAVQRLRPKGGRQINVGNALEYVSRNIFKRPLGSRIEEGVPQFLVLISSGKSDDEVDDPAVELKQFGVAPFTIARNADQEELVKISLSPEYVFSVSTFRELPSLEQKLLTPITTLTSEQIQKLLASTRYPPPAVESDAADIVFLIDSSEGVRPDGFAHIRDFVSRIVRRLNIGPSKVRVGVVQFSNDVFPEFYLKTYRSQAPVLDAIRRLRLRGGSPLNTGKALEFVARNLFVKSAGSRIEDGVPQHLVLVLGGKSQDDVSRFAQVIRSSGIVSLGVGDRNIDRTELQTITNDPRLVFTVREFRELPNIEERIMNSFGPSAATPAPPGVDTPPPSRPEKKKADIVFLLDGSINFRRDSFQEVLRFVSEIVDTVYEDGDSIQVGLVQYNSDPTDEFFLKDFSTKRQIIDAINKVVYKGGRHANTKVGLEHLRVNHFVPEAGSRLDQRVPQIAFVITGGKSVEDAQDVSLALTQRGVKVFAVGVRNIDSEEVGKIASNSATAFRVGNVQELSELSEQVLETLHDAMHETLCPGVTDAAKACNLDVILGFDGSRDQNVFVAQKGFESKVDAILNRISQMHRVSCSGGRSPTVRVSVVANTPSGPVEAFDFDEYQPEMLEKFRNMRSQHPYVLTEDTLKVYLNKFRQSSPDSVKVVIHFTDGADGDLADLHRASENLRQEGVRALILVGLERVVNLERLMHLEFGRGFMYDRPLRLNLLDLDYELAEQLDNIAEKACCGVPCKCSGQRGDRGPIGSIGPKGIPGEDGYRGYPGDEGGPGERGPPGVNGTQGFQGCPGQRGVKGSRGFPGEKGEVGEIGLDGLDGEDGDKGLPGSSGEKGNPGRRGDKGPRGEKGERGDVGIRGDPGNPGQDSQERGPKGETGDLGPMGVPGRDGVPGGPGETGKNGGFGRRGPPGAKGNKGGPGQPGFEGEQGTRGAQGPAGPAGPPGLIGEQGISGPRGSGGAAGAPGERGRTGPLGRKGEPGEPGPKGGIGNRGPRGETGDDGRDGVGSEGRRGKKGERGFPGYPGPKGNPGEPGLNGTTGPKGIRGRRGNSGPPGIVGQKGDPGYPGPAGPKGNRGDSIDQCALIQSIKDKCPCCYGPLECPVFPTELAFALDTSEGVNQDTFGRMRDVVLSIVNDLTIAESNCPRGARVAVVTYNNEVTTEIRFADSKRKSVLLDKIKNLQVALTSKQQSLETAMSFVARNTFKRVRNGFLMRKVAVFFSNTPTRASPQLREAVLKLSDAGITPLFLTRQEDRQLINALQINNTAVGHALVLPAGRDLTDFLENVLTCHVCLDICNIDPSCGFGSWRPSFRDRRAAGSDVDIDMAFILDSAETTTLFQFNEMKKYIAYLVRQLDMSPDPKASQHFARVAVVQHAPSESVDNASMPPVKVEFSLTDYGSKEKLVDFLSRGMTQLQGTRALGSAIEYTIENVFESAPNPRDLKIVVLMLTGEVPEQQLEEAQRVILQAKCKGYFFVVLGIGRKVNIKEVYTFASEPNDVFFKLVDKSTELNEEPLMRFGRLLPSFVSSENAFYLSPDIRKQCDWFQGDQPTKNLVKFGHKQVNVPNNVTSSPTSNPVTTTKPVTTTKPVTTTTKPVTTTTKPVTIINQPSVKPAAAKPAPAKPVAAKPVATKMATVRPPVAVKPATAAKPVAAKPAAVRPPAAAAAKPVATKPEVPRPQAAKPAATKPATTKPMVKMSREVQVFEITENSAKLHWERAEPPGPYFYDLTVTSAHDQSLVLKQNLTVTDRVIGGLLAGQTYHVAVVCYLRSQVRATYHGSFSTKKSQPPPPQPARSASSSTINLMVSTEPLALTETDICKLPKDEGTCRDFILKWYYDPNTKSCARFWYGGCGGNENKFGSQKECEKVCAPVLAKPGVISVMGT

SEQ ID NO: 3337 - protein, 1036 aa, Homo sapiens
MRKHRHLPLVAVFCLFLSGFPTTHAQQQQAVIEVNKRDIVFLVDGSSALGLANFNAIRDFIAKVIQRLEIGQDLIQVAVAQYADTVRPEFYFNTHPTKREVITAVRKMKPLDGSALYTGSALDFVRNNLFTSSAGYRAAEGIPKLLVLITGGKSLDEISQPAQELKRSSIMAFAIGNKGADQAELEEIAFDSSLVFIPAEFRAAPLQGMLPGLLAPLRTLSGTPEVHSNKRDIIFLLDGSANVGKTNFPYVRDFVMNLVNSLDIGNDNIRVGLVQFSDTPVTEFSLNTYQTKSDILGHLRQLQLQGGSGLNTGSALSYVYANHFTEAGGSRIREHVPQLLLLLTAGQSEDSYLQAANALTRAGILTFCVGASQANKAELEQIAFNPSLVYLMDDFSSLPALPQQLIQPLTTYVSGGVEEVPLAQPESKRDILFLFDGSANLVGQFPVVRDFLYKIIDELNVKPEGTRIAVAQYSDDVKVESRFDEHQSKPEILNLVKRMKIKTGKALNLGYALDYAQRYIFVKSAGSRIEDGVLQFLVLLVAGRSSDRVDGPASNLKQSGVVPFIFQAKNADPAELEQIVLSPAFILAAESLPKIGDLHPQIVNLLKSVHNGAPAPVSGEKDVVFLLDGSEGVRSGFPLLKEFVQRVVESLDVGQDRVRVAVVQYSDRTRPEFYLNSYMNKQDVVNAVRQLTLLGGPTPNTGAALEFVLRNILVSSAGSRITEGVPQLLIVLTADRSGDDVRNPSVVVKRGGAVPIGIGIGNADITEMQTISFIPDFAVAIPTFRQLGTVQQVISERVTQLTREELSRLQPVLQPLPSPGVGGKRDVVFLIDGSQSAGPEFQYVRTLIERLVDYLDVGFDTTRVAVIQFSDDPKVEFLLNAHSSKDEVQNAVQRLRPKGGRQINVGNALEYVSRNIFKRPLGSRIEEGVPQFLVLISSGKSDDEVDDPAVELKQFGVAPFTIARNADQEELVKISLSPEYVFSVSTFRELPSLEQKLLTPITTLTSEQIQKLLASTRYPPPGEMGASEVLLGAFSI

SEQ ID NO: 3338 - protein, 173 aa, Homo sapiens
PIGTQQIRVGVVQFSDEPRTMFSLDTYSTKAQVLGAVKALGFAGGELANIGLALDFVVENHFTRAGGSRVEEGVPQVLVLISAGPSSDEIRYGVVALKQASVFSFGLGAQAASRAELQHIATDDNLVFTVPEFRSFGDLQEKLLPYIVGVAQRHIVLKPPTIVTQEYGLNENW

SEQ ID NO: 3339 - protein, 557 aa, Homo sapiens
IGRALLWTTENLFPETPYLRKHKVIFVVSAGENYERKEFVKMMALRAKCQGYVIFVISLGSTRKDDMEELASYPLDQHLIQLGRIHKPDLNYIAKFLKPFLYSVRRGFNQYPPPMLEDACRLINLGGENIQNDGFQFVTELQEDFLGGNGFIGQELNSGRESPFVKTEDNGSDYLVYLPSQMFEPQKLMINYEKDQKSAEIASLTSGHENYGRKEEPDHTYEPGDVSLQEYYMDVAFLIDASQRVGSDEFKEVKAFITSVLDYFHIAPTPLTSTLGDRVAVLSYSPPGYMPNTEECPVYLEFDLVTYNSIHQMKHHLQDSQQLNGDVFIGHALQWTIDNVFVGTPNLRKNKVIFVISAGETNSLDKDVLRNVSLRAKCQGYSIFVFSFGPKHNDKELEELASHPLDHHLVQLGRTHKPDWNYIIKFVKPFVHLIRRAINKYPTEDMKATCVNMTSPNPENGGTENTVLLLPGIYEIKTENGDLFDEFDSQAQHLLVLGNNHSSGSETATDLMQKLYLLFSTEKLAMKDKEKAHLEEISALVVDKQQEKEDGEDTRSS

SEQ ID NO: 3340 - protein, 2611 aa, Homo sapiens
MKILLIIFVLIIWTETLADQSPGPGPVYADVVFLVDSSDHLGPKSFPFVKTFINKMINSLPIEANKYRVALAQYSDEFHSEFHLSTFKGRSPMLNHLKKNFQFIGGSLQIGKALQEAHRTYFSAPINGRDRKQFPPILVVLASAESEDEVEEASKALQKDGVKIISVGVQKASEENLKAMATSHFHFNLRTIRDLSTFSQNMTQIIKDVTKYKEGAVDADMQVHFPISCQKDSLADLVFLVDESLGTGGNLRHLQTFLENITSSMDVKENCMRLGLMSYSNSAKTISFLKSSTTQSEFQQQIKNLSIQVGKSNTGAAIDQMRRDGFSESYGSRRAQGVPQIAVLVTHRPSDDEVHDAALNLRLEDVNVFALSIQGANNTQLEEIVSYPPEQTISTLKSYADLETYSTKFLKKLQNEIWSQISTYAEQRNLDKTGCVDTKEADIHFLIDGSSSIQEKQFEQIKRFMLEVTEMFSIGPDKVRVGVVQYSDDTEVEFYITDYSNDIDLRKAIFNIKQLTGGTYTGKALDYILQIIKNGMKDRMSKVPCYLIVLTDGMSTDRVVEPAKRLRAEQITVHAVGIGAANKIELQEIAGKEERVSFGQNFDALKSIKNEVVREICAEKGCEDMKADIMFLVDSSWSIGNENFRKMKIFMKNLLTKIQIGADKTQIGVVQFSDKTKEEFQLNRYFTQQEISDAIDRMSLINEGTLTGKALNFVGQYFTHSKGARLGAKKFLILITDGVAQDDVRDPARILRGKDVTIFSVGVYNANRSQLEEISGDSSLVFHVENFDHLKALERKLIFRVCALHDCKRITLLDVVFVLDHSGSIKKQYQDHMINLTIHLVKKADVGRDRVQFGALKYSDQPNILFYLNTYSNRSAIIENLRKRRDTGGNTYTAKALKHANALFTEEHGSRIKQNVKQMLIVITDGESHDHDQLNDTALELRNKGITIFAVGVGKANQKELEGMAGNKNNTIYVDNFDKLKDVFTLVQERMCTEAPEVCHLQEADVIFLCDGSDRVSNSDFVTMTTFLSDLIDNFDIQSQRMKIGMAQFGSNYQSIIELKNSLTKTQWKTQIQNVSKSGGFPRIDFALKKVSNMFNLHAGGRRNAGVPQTLVVITSGDPRYDVADAVKTLKDLGICVLVLGIGDVYKEHLLPITGNSEKIITFQDFDKLKNVDVKKRIIREICQSCGKTNCFMDIVVGFDISTHVQGQPLFQGHPQLESYLPGILEDISSIKGVSCGAGTEAQVSLAFKVNSDQGFPAKFQIYQKAVFDSLLQVNVSGPTHLNAQFLRSLWDTFKDKSASRGQVLLIFSDGLQSESNIMLENQSDRLREAGLDALLVVSLNTTAHHEFSSFEFGKRFDYRTHLTIGMRELGKKLSQYLGNIAERTCCCTFCKCPGIPGPHGTRGLQAMKGSQGLKGSRGHRGEDGNPGVRGDTGPQGDKGIAGCPGAWGQKGLKGFSGPKGGHGDDGIDGLDGEEGCHGFPGIKGEKGDPGSQGSPGSRGAPGQYGEKGFPGDPGNPGQNNNIKGQKGSKGEQGRQGRSGQKGVQGSPSSRGSRGREGQRGLRGVSGEPGNPGPTGTLGAEGLQGPQGSQGNPGRKGEKGSQGQKGPQGSPGLMGAKGSTGRPGLLGKKGEPGLPGDLGPVGQTGQRGRQGDSGIPGYGQMGRKGVKGPRGFPGDAGQKGDIGNPGIPGGPGPKGFRGLALTVGLKGEEGSRGLPGPPGQRGIKGMAGQPVYSQCDLIRFLREHSLFKNAYPTELVFALDNSYDVTEESFNKTRDIITSIVNDLNIRENNCPVGARVAMVSYNSGTSYLIRWSDYNRKKQLLQQLSQIKYQDTTEPRDVGNAMRFVTRNVFKRTYAGANVRRVAVFFSNGQTASRSSIITATMEFSALDISPTVFAFDERVFLEAFGFDNTGTFQVIPVPPNGENQTLERLRRCALCYDKCFPNACIREAFLPEDSYMDVVFLIDNSRNIAKDEFKAVKALVSSVIDNFNIASDPLISDSGDRIALLSYSPWESSRRKMGTVKTEFDFITYDNQLLMKNHIQTSFQQLNGEATIGRALLWTTENLFPETPYLRKHKVIFVVSAGENYERKEFVKMMALRAKCQGYVIFVISLGSTRKDDMEELASYPLDQHLIQLGRIHKPDLNYIAKFLKPFLYSVRRGFNQYPPPMLEDACRLINLGGENIQNDGFQFVTELQEDFLGGNGFIGQELNSGRESPFVKTEDNGSDYLVYLPSQMFEPQKLMINYEKDQKSAEIASLTSGHENYGRKEEPDHTYEPGDVSLQEYYMDVAFLIDASQRVGSDEFKEVKAFITSVLDYFHIAPTPLTSTLGDRVAVLSYSPPGYMPNTEECPVYLEFDLVTYNSIHQMKHHLQDSQQLNGDVFIGHALQWTIDNVFVGTPNLRKNKVIFVISAGETNSLDKDVLRNVSLRAKCQGYSIFVFSFGPKHNDKELEELASHPLDHHLVQLGRTHKPDWNYIIKFVKPFVHLIRRAINKYPTEDMKATCVNMTSPNPENGGTENTVLLLPGIYEIKTENGDLFDEFDSQAQHLLVLGNNHSSGSETATDLMQKLYLLFSTEKLAMKDKEKAHLEEISALVVDKQQEKEDKEMEATDI

SEQ ID NO: 3341 - protein, 2615 aa, Homo sapiens
MKILLIIFVLIIWTETLADQSPGPGPVYADVVFLVDSSDHLGPKSFPFVKTFINKMINSLPIEANKYRVALAQYSDEFHSEFHLSTFKGRSPMLNHLKKNFQFIGGSLQIGKALQEAHRTYFSAPINGRDRKQFPPILVVLASAESEDEVEEASKALQKDGVKIISVGVQKASEENLKAMATSHFHFNLRTIRDLSTFSQNMTQIIKDVTKYKEGAVDADMQVHFPISCQKDSLADLVFLVDESLGTGGNLRHLQTFLENITSSMDVKENCMRLGLMSYSNSAKTISFLKSSTTQSEFQQQIKNLSIQVGKSNTGAAIDQMRRDGFSESYGSRRAQGVPQIAVLVTHRPSDDEVHDAALNLRLEDVNVFALSIQGANNTQLEEIVSYPPEQTISTLKSYADLETYSTKFLKKLQNEIWSQISTYAEQRNLDKTGCVDTKEADIHFLIDGSSSIQEKQFEQIKRFMLEVTEMFSIGPDKVRVGVVQYSDDTEVEFYITDYSNDIDLRKAIFNIKQLTGGTYTGKALDYILQIIKNGMKDRMSKVPCYLIVLTDGMSTDRVVEPAKRLRAEQITVHAVGIGAANKIELQEIAGKEERVSFGQNFDALKSIKNEVVREICAEKGCEDMKADIMFLVDSSWSIGNENFRKMKIFMKNLLTKIQIGADKTQIGVVQFSDKTKEEFQLNRYFTQQEISDAIDRMSLINEGTLTGKALNFVGQYFTHSKGARLGAKKFLILITDGVAQDDVRDPARILRGKDVTIFSVGVYNANRSQLEEISGDSSLVFHVENFDHLKALERKLIFRVCALHDCKRITLLDVVFVLDHSGSIKKQYQDHMINLTIHLVKKADVGRDRVQFGALKYSDQPNILFYLNTYSNRSAIIENLRKRRDTGGNTYTAKALKHANALFTEEHGSRIKQNVKQMLIVITDGESHDHDQLNDTALELRNKGITIFAVGVGKANQKELEGMAGNKNNTIYVDNFDKLKDVFTLVQERMCTEAPEVCHLQEADVIFLCDGSDRVSNSDFVTMTTFLSDLIDNFDIQSQRMKIGMAQFGSNYQSIIELKNSLTKTQWKTQIQNVSKSGGFPRIDFALKKVSNMFNLHAGGRRNAGVPQTLVVITSGDPRYDVADAVKTLKDLGICVLVLGIGDVYKEHLLPITGNSEKIITFQDFDKLKNVDVKKRIIREICQSCGKTNCFMDIVVGFDISTHVQGQPLFQGHPQLESYLPGILEDISSIKGVSCGAGTEAQVSLAFKVNSDQGFPAKFQIYQKAVFDSLLQVNVSGPTHLNAQFLRSLWDTFKDKSASRGQVLLIFSDGLQSESNIMLENQSDRLREAGLDALLVVSLNTTAHHEFSSFEFGKRFDYRTHLTIGMRELGKKLSQYLGNIAERTCCCTFCKCPGIPGPHGTRGLQAMKGSQGLKGSRGHRGEDGNPGVRGDTGPQGDKGIAGCPGAWGQKGLKGFSGPKGGHGDDGIDGLDGEEGCHGFPGIKGEKGDPGSQGSPGSRGAPGQYGEKGFPGDPGNPGQNNNIKGQKGSKGEQGRQGRSGQKGVQGSPSSRGSRGREGQRGLRGVSGEPGNPGPTGTLGAEGLQGPQGSQGNPGRKGEKGSQGQKGPQGSPGLMGAKGSTGRPGLLGKKGEPGLPGDLGPVGQTGQRGRQGDSGIPGYGQMGRKGVKGPRGFPGDAGQKGDIGNPGIPGGPGPKGFRGLALTVGLKGEEGSRGLPGPPGQRGIKGMAGQPVYSQCDLIRFLREHSPCWKEKCPAYPTELVFALDNSYDVTEESFNKTRDIITSIVNDLNIRENNCPVGARVAMVSYNSGTSYLIRWSDYNRKKQLLQQLSQIKYQDTTEPRDVGNAMRFVTRNVFKRTYAGANVRRVAVFFSNGQTASRSSIITATMEFSALDISPTVFAFDERVFLEAFGFDNTGTFQVIPVPPNGENQTLERLRRCALCYDKCFPNACIREAFLPEDSYMDVVFLIDNSRNIAKDEFKAVKALVSSVIDNFNIASDPLISDSGDRIALLSYSPWESSRRKMGTVKTEFDFITYDNQLLMKNHIQTSFQQLNGEATIGRALLWTTENLFPETPYLRKHKVIFVVSAGENYERKEFVKMMALRAKCQGYVIFVISLGSTRKDDMEELASYPLDQHLIQLGRIHKPDLNYIAKFLKPFLYSVRRGFNQYPPPMLEDACRLINLGGENIQNDGFQFVTELQEDFLGGNGFIGQELNSGRESPFVKTEDNGSDYLVYLPSQMFEPQKLMINYEKDQKSAEIASLTSGHENYGRKEEPDHTYEPGDVSLQEYYMDVAFLIDASQRVGSDEFKEVKAFITSVLDYFHIAPTPLTSTLGDRVAVLSYSPPGYMPNTEECPVYLEFDLVTYNSIHQMKHHLQDSQQLNGDVFIGHALQWTIDNVFVGTPNLRKNKVIFVISAGETNSLDKDVLRNVSLRAKCQGYSIFVFSFGPKHNDKELEELASHPLDHHLVQLGRTHKPDWNYIIKFVKPFVHLIRRAINKYPTEDMKATCVNMTSPNPENGGTENTVLLLPGIYEIKTENGDLFDEFDSQAQHLLVLGNNHSSGSETATDLMQKLYLLFSTEKLAMKDKEKAHLEEISALVVDKQQEKEDKEMEATDI

SEQ ID NO: 3342 - protein, 443 aa, Homo sapiens
NQYPPPMLEDACRLINLGGENIQNDGFQFVTELQEDFLGGNGFIGQELNSGRESPFVKTEDNGSDYLVYLPSQMFEPQKLMINYEKDQKSAEIASLTSGHENYGRKEEPDHTYEPGDVSLQEYYMDVAFLIDASQRVGSDEFKEVKAFITSVLDYFHIAPTPLTSTLGDRVAVLSYSPPGYMPNTEECPVYLEFDLVTYNSIHQMKHHLQDSQQLNGDVFIGHALQWTIDNVFVGTPNLRKNKVIFVISAGETNSLDKDVLRNVSLRAKCQGYSIFVFSFGPKHNDKELEELASHPLDHHLVQLGRTHKPDWNYIIKFVKPFVHLIRRAINKYPTEDMKATCVNMTSPNPENGGTENTVLLLPGIYEIKTENGDLFDEFDSQAQHLLVLGNNHSSGSETATDLMQKLYLLFSTEKLAMKDKEKAHLEEISALVVDKQQEKEDL

SEQ ID NO: 3343 - protein, 778 aa, Homo sapiens
  VARIANT 1: note = misc_feature - Xaa can be any naturally occurring amino acid
XEKCPAYPTELVFALDNSYDVTEESFNKTRDIITSIVNDLNIRENNCPVGARVAMVSYNSGTSYLIRWSDYNRKKQLLQQLSQIKYQDTTEPRDVGNAMRFVTRNVFKRTYAGANVRRVAVFFSNGQTASRSSIITATMEFSALDISPTVFAFDERVFLEAFGFDNTGTFQVIPVPPNGENQTLERLRRCALCYDKCFPNACIREAFLPEDSYMDVVFLIDNSRNIAKDEFKAVKALVSSVIDNFNIASDPLISDSGDRIALLSYSPWESSRRKMGTVKTEFDFITYDNQLLMKNHIQTSFQQLNGEATIGRALLWTTENLFPETPYLRKHKVIFVVSAGENYERKEFVKMMALRAKCQGYVIFVISLGSTRKDDMEELASYPLDQHLIQLGRIHKPDLNYIAKFLKPFLYSVRRGFNQYPPPMLEDACRLINLGGENIQNDGFQFVTELQEDFLGGNGFIGQELNSGRESPFVKTEDNGSDYLVYLPSQMFEPQKLMINYEKDQKSAEIASLTSGHENYGRKEEPDHTYEPGDVSLQEYYMDVAFLIDASQRVGSDEFKEVKAFITSVLDYFHIAPTPLTSTLGDRVAVLSYSPPGYMPNTEECPVYLEFDLVTYNSIHQMKHHLQDSQQLNGDVFIGHALQWTIDNVFVGTPNLRKNKVIFVISAGETNSLDKDVLRNVSLRAKCQGYSIFVFSFGPKHNDKELEELASHPLDHHLVQLGRTHKPDWNYIIKFVKPFVHLIRRAINKYPTEDMKATCVNMTSPNPENGGTENTVLW

SEQ ID NO: 3344 - protein, 2263 aa, Homo sapiens
MMLLILFLVIICSHISVNQDSGPEYADVVFLVDSSDRLGSKSFPFVKMFITKMISSLPIEADKYRVALAQYSDKLHSEFHLSTFKGRSPMLNHLRKNFGFIGGSLQIGKALQEAHRTYFSAPANGRDKKQFPPILVVLASSESEDNVEEASKALRKDGVKIISVGVQKASEENLKAMATSQFHFNLRTVRDLSMFSQNMTHIIKDVIKYKEGAVDDIFVEACQGPSMADVVFLLDMSINGSEENFDYLKGFLEESVSALDIKENCMRVGLVAYSNETKVINSLSMGINKSEVLQHIQNLSPRTGKAYTGAAIKKLRKEVFSARNGSRKNQGVPQIAVLVTHRDSEDNVTKAAVNLRREGVTIFTLGIEGASDTQLEKIASHPAEQYVSKLKTFADLAAHNQTFLKKLRNQITHTVSVFSERTETLKSGCVDTEEADIYLLIDGSGSTQATDFHEMKTFLSEVVGMFNIAPHKVRVGAVQYADSWDLEFEINKYSNKQDLGKAIENIRQMGGNTNTGAALNFTLSLLQKAKKQRGNKVPCHLVVLTNGMSKDSILEPANRLREEHIRVYAIGIKEANQTQLREIAGEEKRVYYVHDFDALKDIRNQVVQEICTEEACKEMKADIMFLVDSSGSIGPENFSKMKTFMKNLVSKSQIGPDRVQIGVVQFSDINKEEFQLNRFMSQSDISNAIDQMAHIGQTTLTGSALSFVSQYFSPTKGARPNIRKFLILITDGEAQDIVKEPAVVLRQEGVIIYSVGVFGSNVTQLEEISGRPEMVFYVENFDILQRIEDDLVFGICSPREECKRIEVLDVVFVIDSSGSIDYDEYNIMKDFMIGLVKKADVGKNQVRFGALKYADDPEVLFYLDDFGTKLEVISVLQNDQAMGGSTYTAEALGFSDHMFTEARGSRLNKGVPQVLIVITDGESHDADKLNATAKALRDKGILVLAVGIDGANPVELLAMAGSSDKYFFVETFGGLKGIFSDVTASVCNSSKVDCEIDKVDLVFLMDGSTSIQPNDFKKMKEFLASVVQDFDVSLNRVRIGAAQFSDTYHPEFPLGTFIGEKEISFQIENIKQIFGNTHIGAALREVEHYFRPDMGSRINTGTPQVLLVLTDGQSQDEVAQAAEALRHRGIDIYSVGIGDVDDQQLIQITGTAEKKLTVHNFDELKKVNKRIVRNICTTAGESNCFVDVVVGFDVSTQEKGQTLLEGQPWMETYLQDILRAISSLNGVSCEVGTETQVSVAFQVTNAMEKYSPKFEIYSENILNSLKDITVKGPSLLNANLLDSLWDTFQNKSAARGKVVLLFSDGLDDDVEKLEQKSDELRKEGLNALITVALDGPADSSDLADLPYIEFGKGFEYRTQLSIGMRELGSRLSKQLVNVAERTCCCLFCKCIGGDGTMGDPGPPGKRGPPGFKGSEGYLGEEGIAGERGAPGPVGEQGTKGCYGTKGPKGNRGLNGQEGEVGENGIDGLNGEQGDNGLPGRKGEKGDEGSQGSPGKRGTPGDRGAKGLRGDPGAPGVDSSIEGPTGLKGERGRQGRRGWPGPPGTPGSRRKTAAHGRRGHTGPQGTAGIPGPDGLEGSLGLKGPQGPRGEAGVKGEKGGVGSKGPQGPPGPGGEAGNQGRLGSQGNKGEPGDLGEKGAVGFPGPRGLQGNDGSPGYGSVGRKGAKGQEGFPGESGPKGEIGDPGGPGETGLKGARGKMISAGLPGEMGSPGEPGPPGRKGVKGAKGLASFSTCELIQYVRDRSPGRHGKPECPVHPTELVFALDHSRDVTEQEFERMKEMMAFLVRDIKVRENSCPVGAHIAILSYNSHARHLVRFSDAYKKSQLLREIETIPYERSSASREIGRAMRFISRNVFKRTLPGAHTRKIATFFSSGQSADAHSITTAAMEFGALEIIPVVITFSNVPSVRRAFAIDDTGTFQVIVVPSGADYIPALERLQRCTFCYDVCKPDASCDQARPPPVQSYMDAAFLLDASRNMGSAEFEDIRAFLGALLDHFEITPEPETSVTGDRVALLSHAPPDFLPNTQKSPVRAEFNLTTYRSKRLMKRHVHESVKQLNGDAFIGHALQWTLDNVFLSTPNLRRNKVIFVISAGETSHLDGEILKKESLRAKCQGYALFVFSLGPIWDDKELEDLASHPLDHHLVQLGRIHKPDHSYGVKFVKSFINSIRRAINKYPPINLKIKCNRLNSIDPKQPPRPFRSFVPGPLKATLKEDVLQKAKFFQDKKYLSRVARSGRDDAIQNFMRSTSHTFKNGRMIESAPKQHD

SEQ ID NO: 3345 - protein, 298 aa, Homo sapiens
  VARIANT 1: note = misc_feature - Xaa can be any naturally occurring amino acid
XLNGVSCEVGTETQVSVAFQVTNAMEKYSPKFEIYSENILNSLKDITVKGPSLLNANLLDSLWDTFQNKSAARGKVVLLFSDGLDDDVEKLEQKSDELRKEGLNALITVALDGPADSSDLADLPYIEFGKGFEYRTQLSIGMRELGSRLSKQLVNVAERTCCCLFCKCIGGDGTMGDPGPPGKRGPPGFKGSEGYLGEEGIAGERGAPGPVGEQGTKGCYGTKGPKGNRGLNGQEGEVGENGIDGLNGEQGDNGLPGRKGEKGDEGSQGSPGKRGTPGDRGAKGLRGDPVSARAANWS

SEQ ID NO: 3346 - protein, 259 aa, Homo sapiens
  VARIANT 1: note = misc_feature - Xaa can be any naturally occurring amino acid
XTNAMEKYSPKFEIYSENILNSLKDITVKGPSLLNANLLDSLWDTFQNKSAARGKVVLLFSDGLDDDVEKLEQKSDELRKEGLNALITVALDGPADSSDLADLPYIEFGKGFEYRTQLSIGMRELGSRLSKQLVNVAERTCCCLFCKCIGGDGTMGDPGPPGKRLHVKRVVDFFKKQGSERMERKGPPGFKGSEGYLGEEGIAGERGAPGPVGEQGTKGCYGTKGPKGNRGLNGQEGEVGENGIDGLNGEQGDNGLPGR

SEQ ID NO: 3347 - protein, 173 aa, Homo sapiens
MSALACGLPVPVPCLNSHLSMGQKGAPGPKGFKGDPGVGVPGSPGPPGPPGVKGDLGLPGLPGAPGVVGFPGQTGPRGEMGQPGPSGERGLAGPPGREGIPGPLGPPGPPGSVGPPGASGLKGDKGDPGVGLPGPRGERGEPGIRGEDGRPGQEGPRGLTGPPGSRGERGEKG

SEQ ID NO: 3348 - protein, 2944 aa, Homo sapiens
MTLRLLVAALCAGILAEAPRVRAQHRERVTCTRLYAADIVFLLDGSSSIGRSNFREVRSFLEGLVLPFSGAASAQGVRFATVQYSDDPRTEFGLDALGSGGDVIRAIRELSYKGGNTRTGAAILHVADHVFLPQLARPGVPKVCILITDGKSQDLVDTAAQRLKGQGVKLFAVGIKNADPEELKRVASQPTSDFFFFVNDFSILRTLLPLVSRRVCTTAGGVPVTRPPDDSTSAPRDLVLSEPSSQSLRVQWTAASGPVTGYKVQYTPLTGLGQPLPSERQEVNVPAGETSVRLRGLRPLTEYQVTVIALYANSIGEAVSGTARTTALEGPELTIQNTTAHSLLVAWRSVPGATGYRVTWRVLSGGPTQQQELGPGQGSVLLRDLEPGTDYEVTVSTLFGRSVGPATSLMARTDASVEQTLRPVILGPTSILLSWNLVPEARGYRLEWRRETGLEPPQKVVLPSDVTRYQLDGLQPGTEYRLTLYTLLEGHEVATPATVVPTGPELPVSPVTDLQATELPGQRVRVSWSPVPGATQYRIIVRSTQGVERTLVLPGSQTAFDLDDVQAGLSYTVRVSARVGPREGSASVLTVRREPETPLAVPGLRVVVSDATRVRVAWGPVPGASGFRISWSTGSGPESSQTLPPDSTATDITGLQPGTTYQVAVSVLRGREEGPAAVIVARTDPLGPVRTVHVTQASSSSVTITWTRVPGATGYRVSWHSAHGPEKSQLVSGEATVAELDGLEPDTEYTVHVRAHVAGVDGPPASVVVRTAPEPVGRVSRLQILNASSDVLRITWVGVTGATAYRLAWGRSEGGPMRHQILPGNTDSAEIRGLEGGVSYSVRVTALVGDREGTPVSIVVTTPPEAPPALGTLHVVQRGEHSLRLRWEPVPRAQGFLLHWQPEGGQEQSRVLGPELSSYHLDGLEPATQYRVRLSVLGPAGEGPSAEVTARTESPRVPSIELRVVDTSIDSVTLAWTPVSRASSYILSWRPLRGPGQEVPGSPQTLPGISSSQRVTGLEPGVSYIFSLTPVLDGVRGPEASVTQTPVCPRGLADVVFLPHATQDNAHRAEATRRVLERLVLALGPLGPQAVQVGLLSYSHRPSPLFPLNGSHDLGIILQRIRDMPYMDPSGNNLGTAVVTAHRYMLAPDAPGRRQHVPGVMVLLVDEPLRGDIFSPIREAQASGLNVVMLGMAGADPEQLRRLAPGMDSVQTFFAVDDGPSLDQAVSGLATALCQASFTTQPRPEPCPVYCPKGQKGEPGEMGLRGQVGPPGDPGLPGRTGAPGPQGPPGSATAKGERGFPGADGRPGSPGRAGNPGTPGAPGLKGSPGLPGPRGDPGERGPRGPKGEPGAPGQVIGGEGPGLPGRKGDPGPSGPPGPRGPLGDPGPRGPPGLPGTAMKGDKGDRGERGPPGPGEGGIAPGEPGLPGLPGSPGPQGPVGPPGKKGEKGDSEDGAPGLPGQPGSPGEQGPRGPPGAIGPKGDRGFPGPLGEAGEKGERGPPGPAGSRGLPGVAGRPGAKGPEGPPGPTGRQGEKGEPGRPGDPAVVGPAVAGPKGEKGDVGPAGPRGATGVQGERGPPGLVLPGDPGPKGDPGDRGPIGLTGRAGPPGDSGPPGEKGDPGRPGPPGPVGPRGRDGEVGEKGDEGPPGDPGLPGKAGERGLRGAPGVRGPVGEKGDQGDPGEDGRNGSPGSSGPKGDRGEPGPPGPPGRLVDTGPGAREKGEPGDRGQEGPRGPKGDPGLPGAPGERGIEGFRGPPGPQGDPGVRGPAGEKGDRGPPGLDGRSGLDGKPGAAGPSGPNGAAGKAGDPGRDGLPGLRGEQGLPGPSGPPGLPGKPGEDGKPGLNGKNGEPGDPGEDGRKGEKGDSGASGREGRDGPKGERGAPGILGPQGPPGLPGPVGPPGQGFPGVPGGTGPKGDRGETGSKGEQGLPGERGLRGEPGSVPNVDRLLETAGIKASALREIVETWDESSGSFLPVPERRRGPKGDSGEQGPPGKEGPIGFPGERGLKGDRGDPGPQGPPGLALGERGPPGPSGLAGEPGKPGIPGLPGRAGGVGEAGRPGERGERGEKGERGEQGRDGPPGLPGTPGPPGPPGPKVSVDEPGPGLSGEQGPPGLKGAKGEPGSNGDQGPKGDRGVPGIKGDRGEPGPRGQDGNPGLPGERGMAGPEGKPGLQGPRGPPGPVGGHGDPGPPGAPGLAGPAGPQGPSGLKGEPGETGPPGRGLTGPTGAVGLPGPPGPSGLVGPQGSPGLPGQVGETGKPGAPGRDGASGKDGDRGSPGVPGSPGLPGPVGPKGEPGPTGAPGQAVVGLPGAKGEKGAPGGLAGDLVGEPGAKGDRGLPGPRGEKGEAGRAGEPGDPGEDGQKGAPGPKGFKGDPGVGVPGSPGPPGPPGVKGDLGLPGLPGAPGVVGFPGQTGPRGEMGQPGPSGERGLAGPPGREGIPGPLGPPGPPGSVGPPGASGLKGDKGDPGVGLPGPRGERGEPGIRGEDGRPGQEGPRGLTGPPGSRGERGEKGDVGSAGLKGDKGDSAVILGPPGPRGAKGDMGERGPRGLDGDKGPRGDNGDPGDKGSKGEPGDKGSAGLPGLRGLLGPQGQPGAAGIPGDPGSPGKDGVPGIRGEKGDVGFMGPRGLKGERGVKGACGLDGEKGDKGEAGPPGRPGLAGHKGEMGEPGVPGQSGAPGKEGLIGPKGDRGFDGQPGPKGDQGEKGERGTPGIGGFPGPSGNDGSAGPPGPPGSVGPRGPEGLQGQKGERGPPGERVVGAPGVPGAPGERGEQGRPGPAGPRGEKGEAALTEDDIRGFVRQEMSQHCACQGQFIASGSRPLPSYAADTAGSQLHAVPVLRVSHAEEEERVPPEDDEYSEYSEYSVEEYQDPEAPWDSDDPCSLPLDEGSCTAYTLRWYHRAVTGSTEACHPFVYGGCGGNANRFGTREACERRCPPRVVQSQGTGTAQD

SEQ ID NO: 3349 - protein, 114 aa, Homo sapiens
MAVLPGPLQLLGVLLTISLSSIRLIQAGAYYGIKPLPPQIPPQMPPQIPQYQPLGQQVPHMPLAKDGLAMGKEMPHLQYGKEYPHLPQYMKEIQPAPRMGKEAVPKKGKEIPLA

SEQ ID NO: 3350 - protein, 202 aa, Homo sapiens
MAVLPGPLQLLGVLLTISLSSIRLIQAGAYYGIKPLPPQIPPQMPPQIPQYQPLGQQVPHMPLAKDGLAMGKEMPHLQYGKEYPHLPQYMKEIQPAPRMGKEAVPKKGKEIPLASLRGEQGPRGEPGPRGPPGPPGLPGHGIPGIKGKPGPQGYPGVGKPGMPGMPGKPGAMGMPGAKGEIGQKGEIGPMGIPGPQGPPGPH

SEQ ID NO: 3351 - protein, 744 aa, Homo sapiens
MAVLPGPLQLLGVLLTISLSSIRLIQAGAYYGIKPLPPQIPPQMPPQIPQYQPLGQQVPHMPLAKDGLAMGKEMPHLQYGKEYPHLPQYMKEIQPAPRMGKEAVPKKGKEIPLASLRGEQGPRGEPGPRGPPGPPGLPGHGIPGIKGKPGPQGYPGVGKPGMPGMPGKPGAMGMPGAKGEIGQKGEIGPMGIPGPQGPPGPHGLPGIGKPGGPGLPGQPGPKGDRGPKGLPGPQGLRGPKGDKGFGMPGAPGVKGPPGMHGPPGPVGLPGVGKPGVTGFPGPQGPLGKPGAPGEPGPQGPIGVPGVQGPPGIPGIGKPGQDGIPGQPGFPGGKGEQGLPGLPGPPGLPGIGKPGFPGPKGDRGMGGVPGALGPRGEKGPIGAPGIGGPPGEPGLPGIPGPMGPPGAIGFPGPKGEGGIVGPQGPPGPKGEPGLQGFPGKPGFLGEVGPPGMRGLPGPIGPKGEAGQKGVPGLPGVPGLLGPKGEPGIPGDQGLQGPPGIPGIGGPSGPIGPPGIPGPKGEPGLPGPPGFPGIGKPGVAGLHGPPGKPGALGPQGQPGLPGPPGPPGPPGPPAVMPPTPPPQGEYLPDMGLGIDGVKPPHAYGAKKGKNGGPAYEMPAFTAELTAPFPPVGAPVKFNKLLYNGRQNYNPQTGIFTCEVPGVYYFAYHVHCKGGNVWVALFKNNEPVMYTYDEYKKGFLDQASGSAVLLLRPGDRVFLQMPSEQAAGLYAGQYVHSSFSGYLLYPM

SEQ ID NO: 3352 - protein, 744 aa, Homo sapiens; identical to SEQ ID NO: 3351

SEQ ID NO: 3353 - protein, 703 aa, Homo sapiens
MLGTLTPLSSLLLLLLVLVLGCGPRASSGGGAGGAAGYAPVKYIQPMQKGPVGPPFREGKGQYLEMPLPLLPMDLKGEPGPPGKPGPRGPPGPPGFPGKPGMGKPGLHGQPGPAGPPGFSRMGKAGPPGLPGKVGPPGQPGLRGEPGIRGDQGLRGPPGPPGLPGPSGITIPGKPGAQGVPGPPGFQGEPGPQGEPGPPGDRGLKGDNGVGQPGLPGAPGQGGAPGPPGLPGPAGLGKPGLDGLPGAPGDKGESGPPGVPGPRGEPGAVGPKGPPGVDGVGVPGAAGLPGPQGPSGAKGEPGTRGPPGLIGPTGYGMPGLPGPKGDRGPAGVPGLLGDRGEPGEDGEPGEQGPQGLGGPPGLPGSAGLPGRRGPPGPKGEAGPGGPPGVPGIRGDQGPSGLAGKPGVPGERGLPGAHGPPGPTGPKGEPGFTGRPGGPGVAGALGQKGDLGLPGQPGLRGPSGIPGLQGPAGPIGPQGLPGLKGEPGLPGPPGEGRAGEPGTAGPTGPPGVPGSPGITGPPGPPGPPGPPGAPGAFDETGIAGLHLPNGGVEGAVLGKGGKPQFGLGELSAHATPAFTAVLTSPFPASGMPVKFDRTLYNGHSGYNPATGIFTCPVGGVYYFAYHVHVKGTNVWVALYKNNVPATYTYDEYKKGYLDQASGGAVLQLRPNDQVWVQMPSDQANGLYSTEYIHSSFSGFLLCPT

SEQ ID NO: 3354 - protein, 703 aa, Homo sapiens; identical to SEQ ID NO: 3353

SEQ ID NO: 3355 - protein, 638 aa, Homo sapiens
MPLPLLPMDLKGEPGPPGKPGPRGPPGPPGFPGKPGMGKPGLHGQPGPAGPPGFSRMGKAGPPGLPGKVGPPGQPGLRGEPGIRGDQGLRGPPGPPGLPGPSGITIPGKPGAQGVPGPPGFQGEPGPQGEPGPPGDRGLKGDNGVGQPGLPGAPGQGGAPGPPGLPGPAGLGKPGLDGLPGAPGDKGESGPPGVPGPRGEPGAVGPKGPPGVDGVGVPGAAGLPGPQGPSGAKGEPGTRGPPGLIGPTGYGMPGLPGPKGDRGPAGVPGLLGDRGEPGEDGEPGEQGPQGLGGPPGLPGSAGLPGRRGPPGPKGEAGPGGPPGVPGIRGDQGPSGLAGKPGVPGERGLPGAHGPPGPTGPKGEPGFTGRPGGPGVAGALGQKGDLGLPGQPGLRGPSGIPGLQGPAGPIGPQGLPGLKGEPGLPGPPGEGRAGEPGTAGPTGPPGVPGSPGITGPPGPPGPPGPPGAPGAFDETGIAGLHLPNGGVEGAVLGKGGKPQFGLGELSAHATPAFTAVLTSPFPASGMPVKFDRTLYNGHSGYNPATGIFTCPVGGVYYFAYHVHVKGTNVWVALYKNNVPATYTYDEYKKGYLDQASGGAVLQLRPNDQVWVQMPSDQANGLYSTEYIHSSFSGFLLCPT

SEQ ID NO: 3356 - protein, 112 aa, Homo sapiens
MAWTARDRGALGLLLLGLCLCAAQRGPPGEQGPPGPPGPPGVPGIDGIDGDRGPKGPPGPPGPAGEPGKPGAPGKPGTPGADAGVQWHDLGSLQPLPPGFKRFSCLSLQLPE

SEQ ID NO: 3357 - protein, 678 aa, Homo sapiens
MAWTARDRGALGLLLLGLCLCAAQRGPPGEQGPPGPPGPPGVPGIDGIDGDRGPKGPPGPPGPAGEPGKPGAPGKPGTPGADGLTGPDGSPGSIGSKGQKGEPGVPGSRGFPGRGIPGPPGPPGTAGLPGELGRVGPVGDPGRRGPPGPPGPPGPRGTIGFHDGDPLCPNACPPGRSGYPGLPGMRGHKGAKGEIGEPGRQGHKGEEGDQGELGEVGAQGPPGAQGLRGITGIVGDKGEKGARGLDGEPGPQGLPGAPGDQGQRGPPGEAGPKGDRGAEGARGIPGLPGPKGDTGLPGVDGRDGIPGMPGTKGEPGKPGPPGDAGLQGLPGVPGIPGAKGVAGEKGSTGAPGKPGQMGNSGKPGQQGPPGEVGPRGPQGLPGSRGELGPVGSPGLPGKLGSLGSPGLPGLPGPPGLPGMKGDRGVVGEPGPKGEQGASGEEGEAGERGELGDIGLPGPKGSAGNPGEPGLRGPEGSRGLPGVEGPRGPPGPRGVQGEQGATGLPGVQGPPGRAPTDQHIKQVCMRVIQEHFAEMAASLKRPDSGATGLPGRPGPPGPPGPPGENGFPGQMGIRGLPGIKGPPGALGLRGPKGDLGEKGERGPPGRGPNGLPGAIGLPGDPGPASYGRNGRDGERGPPGVAGIPGVPGPPGPPGLPGFCEPASCTMQAGQRAFNKGPDP

SEQ ID NO: 3358 - protein, 921 aa, Homo sapiens
MKTCWKIPVFFFVCSFLEPWASAAVKRRPRFPVNSNSNGGNELCPKIRIGQDDLPGFDLISQFQVDKAASRRAIQRVVGSATLQVAYKLGNNVDFRIPTRNLYPSGLPEEYSFLTTFRMTGSTLKKNWNIWQIQDSSGKEQVGIKINGQTQSVVFSYKGLDGSLQTAAFSNLSSLFDSQWHKIMIGVERSSATLFVDCNRIESLPIKPRGPIDIDGFAVLGKLADNPQVSVPFELQWMLIHCDPLRPRRETCHELPARITPSQTTDERGPPGEQGPPGPPGPPGVPGIDGIDGDRGPKGPPGPPGPAGEPGKPGAPGKPGTPGADGLTGPDGSPGSIGSKGQKGEPGVPGSRGFPGRGIPGPPGPPGTAGLPGELGRVGPVGDPGRRGPPGPPGPPGPRGTIGFHDGDPLCPNACPPGRSGYPGLPGMRGHKGAKGEIGEPGRQGHKGEEGDQGELGEVGAQGPPGAQGLRGITGIVGDKGEKGARGLDGEPGPQGLPGAPGDQGQRGPPGEAGPKGDRGAEGARGIPGLPGPKGDTGLPGVDGRDGIPGMPGTKGEPGKPGPPGDAGLQGLPGVPGIPGAKGVAGEKGSTGAPGKPGQMGNSGKPGQQGPPGEVGPRGPQGLPGSRGELGPVGSPGLPGKLGSLGSPGLPGLPGPPGLPGMKGDRGVVGEPGPKGEQGASGEEGEAGERGELGDIGLPGPKGSAGNPGEPGLRGPEGSRGLPGVEGPRGPPGPRGVQGEQGATGLPGVQGPPGRAPTDQHIKQVCMRVIQEHFAEMAASLKRPDSGATGLPGRPGPPGPPGPPGENGFPGQMGIRGLPGIKGPPGALGLRGPKGDLGEKGERGPPGRGPNGLPGAIGLPGDPGPASYGRNGRDGERGPPGVAGIPGVPGPPGPPGLPGFCEPASCTMQAGQRAFNKGPDP

SEQ ID NO: 3359 - protein, 328 aa, Homo sapiens
MKTCWKIPVFFFVCSFLEPWASAAVKRRPRFPVNSNSNGGNELCPKIRIGQDDLPGFDLISQFQVDKAASRRAIQRVVGSATLQVAYKLGNNVDFRIPTRNLYPSGLPEEYSFLTTFRMTGSTLKKNWNIWQIQDSSGKEQVGIKINGQTQSVVFSYKGLDGSLQTAAFSNLSSLFDSQWHKIMIGVERSSATLFVDCNRIESLPIKPRGPIDIDGFAVLGKLADNPQVSVPFELQWMLIHCDPLRPRRETCHELPARITPSQTTDERGPPGEQGPPGPPGPPGVPGIDGIDGDRGPKGPPGPPGPAGEPGKPGAPGKPGTPGADTSP

SEQ ID NO: 3360 - protein, 689 aa, Homo sapiens
MAAATASPRSLLVLLQVVVLALAQIRGPPGERGPPGPPGPPGVPGSDGIDGDNGPPGKAGPPGPKGEPGKAGPDGPDGKPGIDGLTGAKGEPGPMGIPGVKGQPGLPGPPGLPGPGFAGPPGPPGPVGLPGEIGIRGPKGDPGPDGPSGPPGPPGKPGRPGTIQGLEGSADFLCPTNCPPGMKGPPGLQGVKGHAGKRGILGDPGHQGKPGPKGDVGASGEQGIPGPPGPQGIRGYPGMAGPKGETGPHGYKGMVGAIGATGPPGEEGPRGPPGRAGEKGDEGSPGIRGPQGITGPKGATGPPGINGKDGTPGTPGMKGSAGQAGQPGSPGHQGLAGVPGQPGTKGGPGDQGEPGPQGLPGFSGPPGKEGEPGPRGEIGPQGIMGQKGDQGERGPVGQPGPQGRQGPKGEQGPPGIPGPQGLPGVKGDKGSPGKTGPRGKVGDPGVAGLPGEKGEKGESGEPGPKGQQGVRGEPGYPGPSGDAGAPGVQGYPGPPGPRGLAGNRGVPGQPGRQGVEGRDATDQHIVDVALKMLQEQLAEVAVSAKREALGAVGMMGPPGPPGPPGYPGKQGPHGHPGPRGVPGIVGAVGQIGNTGPKGKRGEKGDPGEVGRGHPGMPGPPGIPGLPGRPGQAINGKDGDRGSPGAPGEAGRPGLPGPVGLPGFCEPAACLGASAYASARLTEPGSIKGP

SEQ ID NO: 3361 - protein, 83 aa, Homo sapiens
MAAATASPRSLLVLLQVVVLALAQIRGPPGERGPPGPPGPPGVPGSDGIDGPPGPVGLPGEIGIRGPKGDPGPDGPSGPPGPP

SEQ ID NO: 3362 - protein, 11 aa, Homo sapiens
MGIPGVKGQPG

SEQ ID NO: 3363 - protein, 143 aa, Homo sapiens
MGIPGVKGQPGLPGPPGLPGPGFAGPPGPPGPVGLPGEIGIRGPKGDPGPDGPSGPPGPPGKPGRPGTIQGLEGSADFLCPTNCPPGMKGPPGLQGVKGHAGKRGILGDPGHQGKPGPKGDVGASGEQGIPGPPGPQGIRGYP

SEQ ID NO: 3364 - protein, 684 aa, Homo sapiens
MAGPRACAPLLLLLLLGELLAAAGAQRVGLPGPPGPPGPPGKPGQDGIDGEAGPPGLPGPPGPKGAPGKPGKPGEAGLPGLPGVDGLTGRDGPPGPKGAPGERGSLGPPGPPGLGGKGLPGPPGEAGVSGPPGGIGLRGPPGPSGLPGLPGPPGPPGPPGHPGVLPEGATDLQCPSICPPGPPGPPGMPGFKGPTGYKGEQGEVGKDGEKGDPGPPGPAGLPGSVGLQGPRGLRGLPGPLGPPGDRGPIGFRGPPGIPGAPGKAGDRGERGPEGFRGPKGDLGRPGPKGTPGVAGPSGEPGMPGKDGQNGVPGLDGQKGEAGRNGAPGEKGPNGLPGLPGRAGSKGEKGERGRAGELGEAGPSGEPGVPGDAGMPGERGEAGHRGSAGALGPQGPPGAPGVRGFQGQKGSMGDPGLPGPQGLRGDVGDRGPGGAAGPKGDQGIAGSDGLPGDKGELGPSGLVGPKGESGSRGELGPKGTQGPNGTSGVQGVPGPPGPLGLQGVPGVPGITGKPGVPGKEASEQRIRELCGGMISEQIAQLAAHLRKPLAPGSIGRPGPAGPPGPPGPPGSIGHPGARGPPGYRGPTGELGDPGPRGNQGDRGDKGAAGAGLDGPEGDQGPQGPQGVPGTSKDGQDGAPGEPGPPGDPGLPGAIGAQGTPGICDTSACQGAVLGGVGEKSGSRSS

SEQ ID NO: 3365 - protein, 191 aa, Homo sapiens
MWWSSTQNAGTEGEAGPPGLPGPPGPKGAPGKPGKPGEAGLPGLPGVDGLTGRDGPPGPKGAPGERGSLGPPGPPGLGGKGLPGPPGEAGVSGPPGGIGLRGPPGPSGLPGLPGPPGPPGPPGHPGVLPEGATDLQCPSICPPGPPGPPGMPGFKGPTGYKGEQGEVGKDGEKGDPGPPGPAGLPGSVGLQ

SEQ ID NO: 3366 - protein, 277 aa, Homo sapiens
MNGFASLLRRNQFILLVLFLLQIQSLGLDIDSRPTAEVCATHTISPGPKGDDGEKGDPGEEGKHGKVGRMGPKGIKGELGDMGDQGNIGKTGPIGKKGDKGEKGLLGIPGEKGKAGTVCDCGRYRKFVGQLDISIARLKTSMKFVKNVIAGIRETEEKFYYIVQEEKNYRESLTHCRIRGGMLAMPKDEAANTLIADYVAKSGFFRVFIGVNDLEREGQYMFTDNTPLQNYSNWNEGEPSDPYGHEDCVEMLSSGRWNDTECHLTMYFVCEFIKKKK

SEQ ID NO: 3367 - protein, 123 aa, Homo sapiens
MKKQRGVGVLPALRMRGNLALVGVLISLAFLSLLPSGHPQPAGDDACSVQILVPGLKGDAGEKGDKGAPGRPGRVGPTGEKGDMGDKGQKGSVGRHGKIGPIGSKGEKGDSGDIGPPGPNGEP

SEQ ID NO: 3368 - protein, 285 aa, Homo sapiens
MKKQRGVGVLPALRMRGNLALVGVLISLAFLSLLPSGHPQPAGDDACSVQILVPGLKGDAGEKGDKGAPGRPGRVGPTGEKGDMGDKGQKGSVGRHGKIGPIGSKGEKGDSGDIGPPGPNGEPGLPCECSQLRKAIGEMDNQVSQLTSELKFIKNAVAGVRETESKIYLLVKEEKRYADAQLSCQGRGGTLSMPKDEAANGLMAAYLAQAGLARVFIGINDLEKEGAFVYSDHSPMRTFNKWRSGEPNNAYDEEDCVEMVASGGWNDVACHTTMYFMCEFDKENM

SEQ ID NO: 3369 - protein, 116 aa, Homo sapiens
MRGNLALVGVLISLAFLSLLPSGHPQPAGDDACSVQILVPGLKGDAGEKGDKGAPGRPGRVGPTGEKGDMGDKGQKGSVGRHGKIGPIGSKGEKGDSGDIGPPGPNGEPAPSAPQR

SEQ ID NO: 3370 - protein, 271 aa, Homo sapiens
MRGNLALVGVLISLAFLSLLPSGHPQPAGDDACSVQILVPGLKGDAGEKGDKGAPGRPGRVGPTGEKGDMGDKGQKGSVGRHGKIGPIGSKGEKGDSGDIGPPGPNGEPGLPCECSQLRKAIGEMDNQVSQLTSELKFIKNAVAGVRETESKIYLLVKEEKRYADAQLSCQGRGGTLSMPKDEAANGLMAAYLAQAGLARVFIGINDLEKEGAFVYSDHSPMRTFNKWRSGEPNNAYDEEDCVEMVASGGWNDVACHTTMYFMCEFDKENM

SEQ ID NO: 3371 - protein, 247 aa, Homo sapiens
MRGNLALVGVLISLAFLSLLPSGHPQPAGDDACSVQILVPGLKGDAGEKGDKGAPGRPGRVGPTGEKGEKGDSGDIGPPGPNGEPGLPCECSQLRKAIGEMDNQVSQLTSELKFIKNAVAGVRETESKIYLLVKEEKRYADAQLSCQGRGGTLSMPKDEAANGLMAAYLAQAGLARVFIGINDLEKEGAFVYSDHSPMRTFNKWRSGEPNNAYDEEDCVEMVASGGWNDVACHTTMYFMCEFDKENM

SEQ ID NO: 3372 - protein, 268 aa, Homo sapiens
MTPALCRSSSLASKGMRERRETKAPPDGLEESAPREKKQSQPVVTASDISKRKCTSSFVEMGSQGDMGDKGQKGSVGRHGKIGPIGSKGEKGDSGDIGPPGPNGEPGLPCECSQLRKAIGEMDNQVSQLTSELKFIKNAVAGVRETESKIYLLVKEEKRYADAQLSCQGRGGTLSMPKDEAANGLMAAYLAQAGLARVFIGINDLEKEGAFVYSDHSPMRTFNKWRSGEPNNAYDEEDCVEMVASGGWNDVACHTTMYFMCEFDKENM

SEQ ID NO: 3373 - protein, 245 aa, Homo sapiens
MWWVPPSPYGCLPCALPGDAGEKGDKGAPGRPGRVGPTGEKGDMGDKGQKGSVGRHGKIGPIGSKGEKGDSGDIGPPGPNGEPGLPCECSQLRKAIGEMDNQVSQLTSELKFIKNAVAGVRETESKIYLLVKEEKRYADAQLSCQGRGGTLSMPKDEAANGLMAAYLAQAGLARVFIGINDLEKEGAFVYSDHSPMRTFNKWRSGEPNNAYDEEDCVEMVASGGWNDVACHTTMYFMCEFDKENM

SEQ ID NO: 3374 - protein, 221 aa, Homo sapiens
MWWVPPSPYGCLPCALPGDAGEKGDKGAPGRPGRVGPTGEKGEKGDSGDIGPPGPNGEPGLPCECSQLRKAIGEMDNQVSQLTSELKFIKNAVAGVRETESKIYLLVKEEKRYADAQLSCQGRGGTLSMPKDEAANGLMAAYLAQAGLARVFIGINDLEKEGAFVYSDHSPMRTFNKWRSGEPNNAYDEEDCVEMVASGGWNDVACHTTMYFMCEFDKENM

SEQ ID NO: 3375 - protein, 221 aa, Homo sapiens
MWWVPPSPYGCLPCALPGDMGDKGQKGSVGRHGKIGPIGSKGEKGDSGDIGPPGPNGEPGLPCECSQLRKAIGEMDNQVSQLTSELKFIKNAVAGVRETESKIYLLVKEEKRYADAQLSCQGRGGTLSMPKDEAANGLMAAYLAQAGLARVFIGINDLEKEGAFVYSDHSPMRTFNKWRSGEPNNAYDEEDCVEMVASGGWNDVACHTTMYFMCEFDKENM

SEQ ID NO: 3376 - protein, 197 aa, Homo sapiens
MWWVPPSPYGCLPCALPGEKGDSGDIGPPGPNGEPGLPCECSQLRKAIGEMDNQVSQLTSELKFIKNAVAGVRETESKIYLLVKEEKRYADAQLSCQGRGGTLSMPKDEAANGLMAAYLAQAGLARVFIGINDLEKEGAFVYSDHSPMRTFNKWRSGEPNNAYDEEDCVEMVASGGWNDVACHTTMYFMCEFDKENM

SEQ ID NO: 3377 - protein, 622 aa, Homo sapiens
MAAAPRAGRRRGQPLLALLLLLLAPLPPGAPPGADAYFPEERWSPESPLQAPRVLIALLARNAAHALPTTLGALERLRHPRERTALWVATDHNMDNTSTVLREWLVAVKSLYHSVEWRPAEEPRSYPDEEGPKHWSDSRYEHVMKLRQAALKSARDMWADYILFVDADNLILNPDTLSLLIAENKTVVAPMLDSRAAYSNFWCGMTSQGYYKRTPAYIPIRKRDRRGCFAVPMVHSTFLIDLRKAASRNLAFYPPHPDYTWSFDDIIVFAFSCKQAEVQMYVCNKEEYGFLPVPLRAHSTLQDEAESFMHVQLEVMVKHPPAEPSRFISAPTKTPDKMGFDEVFMINLRRRQDRRERMLRALQAQEIECRLVEAVDGKAMNTSQVEALGIQMLPGYRDPYHGRPLTKGELGCFLSHYNIWKEVVDRGLQKSLVFEDDLRFEIFFKRRLMNLMRDVEREGLDWDLIYVGRKRMQVEHPEKAVPRVRNLVEADYSYWTLAYVISLQGARKLLAAEPLSKMLPVDEFLPVMFDKHPVSEYKAHFSLRNLHAFSVEPLLIYPTHYTGDDGYVSDTETSVVWNNEHVKTDWDRAKSQKMREQQALSREAKNSDVLQSPLDSAARDEL

SEQ ID NO: 3378 - protein, 138 aa, Homo sapiens
MDNTSTVLREWLVAVKSLYHSVEWRPAEEPRSYPDEEGPKHWSDSRYEHVMKLRQAALKSARDMWADYILFVDADNLILNPDTLSLLIAENKTVVAPMLDSRAAYSNFWCGMTSQGYYKRTPAYIPIRKRDRRGCFAV

SEQ ID NO: 3379 - protein, 218 aa, Homo sapiens
  VARIANT 1: note = misc_feature - Xaa can be any naturally occurring amino acid
XKAASRNLAFYPPHPDYTWSFDDIIVFAFSCKQAVKHPPAEPSRFISAPTKTPDKMGFDEVFMINLRRRQDRRERMLRALQAQEIECRLVEAVDGKAMNTSQVEALGIQMLPGYRDPYHGRPLTKGELGCFLSHYNIWKEVVDRGLQKSLVFEDDLRFEIFFKRRLMNLMRDVEREGLDWDLIYVGRKRMQVEHPEKAVPRVRNLVEADYSYWTLAYV

SEQ ID NO: 3380 - protein, 626 aa, Homo sapiens
MAARPAATLAWSLLLLSSALLREGCRARFVAERDSEDDGEEPVVFPESPLQSPTVLVAVLARNAAHTLPHFLGCLERLDYPKSRMAIWAATDHNVDNTTEIFREWLKNVQRLYHYVEWRPMDEPESYPDEIGPKHWPTSRFAHVMKLRQAALRTAREKWSDYILFIDVDNFLTNPQTLNLLIAENKTIVAPMLESRGLYSNFWCGITPKGFYKRTPDYVQIREWKRTGCFPVPMVHSTFLIDLRKEASDKLTFYPPHQDYTWTFDDIIVFAFSSRQAGIQMYLCNREHYGYLPIPLKPHQTLQEDIENLIHVQIEAMIDRPPMEPSQYVSVVPKYPDKMGFDEIFMINLKRRKDRRDRMLRTLYEQEIEVKIVEAVDGKALNTSQLKALNIEMLPGYRDPYSSRPLTRGEIGCFLSHYSVWKEVIDRELEKTLVIEDDVRFEHQFKKKLMKLMDNIDQAQLDWELIYIGRKRMQVKEPEKAVPNVANLVEADYSYWTLGYVISLEGAQKLVGANPFGKMLPVDEFLPVMYNKHPVAEYKEYYESRDLKAFSAEPLLIYPTHYTGQPGYLSDTETSTIWDNETVATDWDRTHAWKSRKQSRIYSNAKNTEALPPPTSLDTVPSRDEL

SEQ ID NO: 3381 - protein, 363 aa, Homo sapiens
MFSDCWLCPSLGSSGIQMYLCNREHYGYLPIPLKPHQTLQEDIENLIHVQIEAMIDRPPMEPSQYVSVVPKYPDKMGFDEIFMINLKRRKDRRDRMLRTLYEQEIEVKIVEAVDGKALNTSQLKALNIEMLPGYRDPYSSRPLTRGEIGCFLSHYSVWKEVIDRELEKTLVIEDDVRFEHQFKKKLMKLMDNIDQAQLDWELIYIGRKRMQVKEPEKAVPNVANLVEADYSYWTLGYVISLEGAQKLVGANPFGKMLPVDEFLPVMYNKHPVAEYKEYYESRDLKAFSAEPLLIYPTHYTGQPGYLSDTETSTIWDNETVATDWDRTHAWKSRKQSRIYSNAKNTEALPPPTSLDTVPSRDEL

SEQ ID NO: 3382 - protein, 234 aa, Homo sapiens
MLPGYRDPYSSRPLTRGEIGCFLSHYSVWKEVIDRELEKTLVIEDDVRFEHQFKKKLMKLMDNIDQAQLDWELIYIGRKRMQVKEPEKAVPNVANLVEADYSYWTLGYVISLEGAQKLVGANPFGKMLPVDEFLPVMYNKHPVAEYKEYYESRDLKAFSAEPLLIYPTHYTGQPGYLSDTETSTIWDNETVATDWDRTHAWKSRKQSRIYSNAKNTEALPPPTSLDTVPSRDEL

SEQ ID NO: 3383 - protein, 194 aa, Homo sapiens
ISGLLCYSAGCLALPSLDQKKRGGHKACCLLTPPPPPLFPPPFFRGGRSPGPPGLPGKTGPKGEKGELGRPGRKGRPGPPGVPGMPGPIGWPGPEGPRGEKGDLGMMGLPGSRGPMGSKGYPGSRGEKGSRGEKGDLGPKGEKGFPGFPGMLGQKGEMGPKGEPGIAGHRGPTGRPGKRGKQGQKGDSGVMGPP

SEQ ID NO: 3384 - protein, 445 aa, Homo sapiens
MTGSSFSLAHLLIISGLLCYSAGCLALPSLDQKKRGGHKACCLLTPPPPPLFPPPFFRGGRSPLLSPDMKNLMLELETSQSPCMQGSLGSPGPPGPQGPPGLPGKTGPKGEKGELGRPGRKGRPGPPGVPGMPGPIGWPGPEGPRGEKGDLGMMGLPGSRGPMGSKGYPGSRGEKGSRGEKGDLGPKGEKGFPGFPGMLGQKGEMGPKGEPGIAGHRGPTGRPGKRGKQGQKGDSGVMGPPGKPGPSGQPGRPGPPGPPPAGQLIMGPKGERGFPGPPGRCLCGPTMNVNNPSYGESVYGPSSPRVPVIFVVNNQEELERLNTQNAIAFRRDQRSLYFKDSLGWLPIQLTPFYPVDYTADQHGTCGDGLLQPGEECDDGNSDVGDDCIRCHRAYCGDGHRHEGVEDCDGSDFGYLTCETYLPGSYGDLQCTQYCYIDSTPCRYFT

SEQ ID NO: 3385 - protein, 421 aa, Homo sapiens
MVVLNPMTLGIYLQLFFLSIVSQPTFINSVLPISAALPSLDQKKRGGHKACCLLTPPPPPLFPPPFFRGGRSPGPPGLPGKTGPKGEKGELGRPGRKGRPGPPGVPGMPGPIGWPGPEGPRGEKGDLGMMGLPGSRGPMGSKGYPGSRGEKGSRGEKGDLGPKGEKGFPGFPGMLGQKGEMGPKGEPGIAGHRGPTGRPGKRGKQGQKGDSGVMGPPGKPGPSGQPGRPGPPGPPPAGQLIMGPKGERGFPGPPGRCLCGPTMNVNNPSYGESVYGPSSPRVPVIFVVNNQEELERLNTQNAIAFRRDQRSLYFKDSLGWLPIQLTPFYPVDYTADQHGTCGDGLLQPGEECDDGNSDVGDDCIRCHRAYCGDGHRHEGVEDCDGSDFGYLTCETYLPGSYGDLQCTQYCYIDSTPCRYFT

SEQ ID NO: 3386 - protein, 455 aa, Homo sapiens
MVVLNPMTLGIYLQLFFLSIVSQPTFINSVLPISAALPSLDQKKRGGHKACCLLTPPPPPLFPPPFFRGGRSPLLSPDMKNLMLELETSQSPCMQGSLGSPGPPGPQGPPGLPGKTGPKGEKGELGRPGRKGRPGPPGVPGMPGPIGWPGPEGPRGEKGDLGMMGLPGSRGPMGSKGYPGSRGEKGSRGEKGDLGPKGEKGFPGFPGMLGQKGEMGPKGEPGIAGHRGPTGRPGKRGKQGQKGDSGVMGPPGKPGPSGQPGRPGPPGPPPAGQLIMGPKGERGFPGPPGRCLCGPTMNVNNPSYGESVYGPSSPRVPVIFVVNNQEELERLNTQNAIAFRRDQRSLYFKDSLGWLPIQLTPFYPVDYTADQHGTCGDGLLQPGEECDDGNSDVGDDCIRCHRAYCGDGHRHEGVEDCDGSDFGYLTCETYLPGSYGDLQCTQYCYIDSTPCRYFT

SEQ ID NO: 3387 - protein, 456 aa, Homo sapiens
MVVLNPMTLGIYLQLFFLSIVSQPTFINSVLPISAALPSLDQKKRGGHKACCLLTPPPPPLFPPPFFRGGRSPLLSPDMKNLMLELETSQSPCMQGSLGSPGPPGPQGPPGLPGKTGPKGEKGELGRPGRKGRPGPPGVPGMPGPIGWPGPEGPRGEKGDLGMMGLPGSRGPMGSKGYPGSRGEKGSRGEKGDLGPKGEKGFPGFPGMLGQKGEMGPKGEPGIAGHRGPTGRPGKRGKQGQKGDSGVMGPPGKPGPSGQPGRPGPPGPPPAGQLIMGPKGERGFPGPPGRCLCGPTMNVNNPSYGESVYGPSSPRVPVIFVVNNQEELERLNTQNAIAFRRDQRSLYFKDSLGWLPIQLTPFYPVDYTADQHGTCGDGLLQPGEECDDGNSDVGDDCIRDCHRAYCGDGHRHEGVEDCDGSDFGYLTCETYLPGSYGDLQCTQYCYIDSTPCRYFT

SEQ ID NO: 3388 - protein, 724 aa, Homo sapiens
MLRELQETNAALQDVRELLRQQVREITFLKNTVMECDACGMQQSVRTGLPSVRPLLHCAPGFCFPGVACIQTESGARCGPCPAGFTGNGSHCTDVNECNAHPCFPRVRCINTSPGFRCEACPPGYSGPTHQGVGLAFAKANKQVCTDINECETGQHNCVPNSVCINTRGSFQCGPCQPGFVGDQASGCQRRAQRFCPDGSPSECHEHADCVLERDGSRSCVCAVGWAGNGILCGRDTDLDGFPDEKLRCPERQCRKDNCVTVPNSGQEDVDRDGIGDACDPDADGDGVPNEKDNCPLVRNPDQRNTDEDKWGDACDNCRSQKNDDQKDTDQDGRGDACDDDIDGDRIRNQADNCPRVPNSDQKDSDGDGIGDACDNCPQKSNPDQADVDHDFVGDACDSDQDQDGDGHQDSRDNCPTVPNSAQEDSDHDGQGDACDDDDDNDGVPDSRDNCRLVPNPGQEDADRDGVGDVCQDDFDADKVVDKIDVCPENAEVTLTDFRAFQTVVLDPEGDAQIDPNWVVLNQGREIVQTMNSDPGLAVGYTAFNGVDFEGTFHVNTVTDDDYAGFIFGYQDSSSFYVVMWKQMEQTYWQANPFRAVAEPGIQLKAVKSSTGPGEQLRNALWHTGDTESQVRLLWKDPRNVGWKDKKSYRWFLQHRPQVGYIRVRFYEGPELVADSNVVLDTTMRGGRLGVFCFSQENIIWANLRYRCNDTIPEDYETHQLRQA

SEQ ID NO: 3389 - protein, 704 aa, Homo sapiens
MVPDTACVLLLTLAALGASGQGQSPLGSDLGPQMLRELQETNAALQDVRELLRQQVREITFLKNTVMECDACGMQQSVRTGLPSVRPLLHCAPGFCFPGVACIQTESGARCGPCPAGFTGNGSHCTDVNECETGQHNCVPNSVCINTRGSFQCGPCQPGFVGDQASGCQRRAQRFCPDGSPSECHEHADCVLERDGSRSCVCAVGWAGNGILCGRDTDLDGFPDEKLRCPERQCRKDNCVTVPNSGQEDVDRDGIGDACDPDADGDGVPNEKDNCPLVRNPDQRNTDEDKWGDACDNCRSQKNDDQKDTDQDGRGDACDDDIDGDRIRNQADNCPRVPNSDQKDSDGDGIGDACDNCPQKSNPDQADVDHDFVGDACDSDQDQDGDGHQDSRDNCPTVPNSAQEDSDHDGQGDACDDDDDNDGVPDSRDNCRLVPNPGQEDADRDGVGDVCQDDFDADKVVDKIDVCPENAEVTLTDFRAFQTVVLDPEGDAQIDPNWVVLNQGREIVQTMNSDPGLAVGYTAFNGVDFEGTFHVNTVTDDDYAGFIFGYQDSSSFYVVMWKQMEQTYWQANPFRAVAEPGIQLKAVKSSTGPGEQLRNALWHTGDTESQVRLLWKDPRNVGWKDKKSYRWFLQHRPQVGYIRVRFYEGPELVADSNVVLDTTMRGGRLGVFCFSQENIIWANLRYRCNDTIPEDYETHQLRQA

SEQ ID NO: 3390 - protein, 757 aa, Homo sapiens
MVPDTACVLLLTLAALGASGQGQSPLGSDLGPQMLRELQETNAALQDVRELLRQQVREITFLKNTVMECDACGMQQSVRTGLPSVRPLLHCAPGFCFPGVACIQTESGARCGPCPAGFTGNGSHCTDVNECNAHPCFPRVRCINTSPGFRCEACPPGYSGPTHQGVGLAFAKANKQVCTDINECETGQHNCVPNSVCINTRGSFQCGPCQPGFVGDQASGCQRRAQRFCPDGSPSECHEHADCVLERDGSRSCVCAVGWAGNGILCGRDTDLDGFPDEKLRCPERQCRKDNCVTVPNSGQEDVDRDGIGDACDPDADGDGVPNEKDNCPLVRNPDQRNTDEDKWGDACDNCRSQKNDDQKDTDQDGRGDACDDDIDGDRIRNQADNCPRVPNSDQKDSDGDGIGDACDNCPQKSNPDQADVDHDFVGDACDSDQDQDGDGHQDSRDNCPTVPNSAQEDSDHDGQGDACDDDDDNDGVPDSRDNCRLVPNPGQEDADRDGVGDVCQDDFDADKVVDKIDVCPENAEVTLTDFRAFQTVVLDPEGDAQIDPNWVVLNQGREIVQTMNSDPGLAVGYTAFNGVDFEGTFHVNTVTDDDYAGFIFGYQDSSSFYVVMWKQMEQTYWQANPFRAVAEPGIQLKAVKSSTGPGEQLRNALWHTGDTESQVRLLWKDPRNVGWKDKKSYRWFLQHRPQVGYIRVRFYEGPELVADSNVVLDTTMRGGRLGVFCFSQENIIWANLRYRCNDTIPEDYETHQLRQA

SEQ ID NO: 3391 - protein, 123 aa, Homo sapiens
LGWYTTGGPPDPSDIHVHKQVCEIIESPLFLKLNPMTKHTDLPVSVFESVIDIINGEATMLFAELTYTLATEEAERIGVDHVARMTATGSGENSTVAEHLIAQHSAIKMLHSRVKLILERGPL

SEQ ID NO: 3392 - protein, 326 aa, Homo sapiens
MAAAAAAAAATNGTGGSSGMEVDAAVPSVMACGVTGSVSVALHPLVILNISDHWIRMRSQEGRPVQVIGALIGKQEGRNIEVMNSFELLSHTVEEKIIIDKEYYYTKEEQFKQVFKELEFLGWYTTGGPPDPSDIHVHKQVCEIIESPLFLKLNPMTKHTDLPVSVFESVIDIINGEATMLFAELTYTLATEEAERIGVDHVARMTATGSGENSTVAEHLIAQHSAIKMLHSRVKLILEYVKASEAGEVPFNHEILREAYALCHCLPVLSTDKFKTDFYDQCNDVGLMAYLGTITKTCNTMNQFVNKFNVLYDRQGIGRRMRGLFF

SEQ ID NO: 3393 - protein, 327 aa, Homo sapiens
MAAAAAAAAATNGTGGSSGMEVDAAVVPSVMACGVTGSVSVALHPLVILNISDHWIRMRSQEGRPVQVIGALIGKQEGRNIEVMNSFELLSHTVEEKIIIDKEYYYTKEEQFKQVFKELEFLGWYTTGGPPDPSDIHVHKQVCEIIESPLFLKLNPMTKHTDLPVSVFESVIDIINGEATMLFAELTYTLATEEAERIGVDHVARMTATGSGENSTVAEHLIAQHSAIKMLHSRVKLILEYVKASEAGEVPFNHEILREAYALCHCLPVLSTDKFKTDFYDQCNDVGLMAYLGTITKTCNTMNQFVNKFNVLYDRQGIGRRMRGLFF

SEQ ID NO: 3394 - protein, 42 aa, Homo sapiens
MACGVTGSVSVALHPLVILNISDHWIRMRSQEGRPVQVIGAL

SEQ ID NO: 3395 - protein, 468 aa, Homo sapiens
MAARLVSRCGAVRAAPHSGPLVSWRRWSGASTDTVYDVVVSGGGLVGAAMACALGYDIHFHDKKILLLEAGPKKVLEKLSETYSNRVSSISPGSATLLSSFGAWDHICNMRYRAFRRMQVWDACSEALIMFDKDNLDDMGYIVENDVIMHALTKQLEAVSDRVTVLYRSKAIRYTWPCPFPMADSSPWVHITLGDGSTFQTKLLIGADGHNSGVRQAVGIQNVSWNYDQSAVVATLHLSEATENNVAWQRFLPSGPIALLPLSDTLSSLVWSTSHEHAAELVSMDEEKFVDAVNSAFWSDADHTDFIDTAGAMLQYAVSLLKPTKVSARQLPPSVARVDAKSRVLFPLGLGHAAEYVRPRVALIGDAAHRVHPLAGQGVNMGFGDISSLAHHLSTAAFNGKDLGSVSHLTGYETERQRHNTALLAATDLLKRLYSTSASPLVLLRTWGLQATNAVSPLKEQIMAFASK

SEQ ID NO: 3396 - protein, 200 aa, Homo sapiens
MAARLVSRCGAVRAAPHSGPLVSWRRWSGASTDTVYDVVVSGGGLVGAAMACALGYDIHFHDKKILLLEAGPKKVLEKLSETYSNRVSSISPGSATLLSSFGAWDHICNMRYRAFRRMQVWDACSEALIMFDKDNLDDMGYIVENDVIMHALTKQLEAVSGTDYGLCKQMSTPLLKKDYVDEKEHPAQDPSYIFSRSYLI

SEQ ID NO: 3397 - protein, 111 aa, Homo sapiens
MAARLVSRCGAVRAAPHSGPLVSWRRWSGASTDTVYDVVVSGGGLVGAAMACALGYDIHFHDKKILLLEAGPKKVLEKLSETYSNRVSSISPGSATLLSSVGRLLRGPDNV

SEQ ID NO: 3398 - protein, 54 aa, Homo sapiens
MIFTFMTRKSCCSKQVQRKYWRNCQKLTATGSAPFPLALQRFSVVLVPGTISAT

SEQ ID NO: 3399 - protein, 262 aa, Homo sapiens
MIFTFMTRKSCCSKQVQRKYWRNCQKLTATGSAPFPLALQRFSVVWDACSEALIMFDKDNLDDMGYIVENDVIMHALTKQLEAVSDRVTVLYRSKAIRYTWPCPFPMADSSPWVHITLGDGSTFQTKLLIGADGHNSGVRQAVGIQNVSWNYDQSAVVATLHLSEATENNVAWQRFLPSGPIALLPLSDTLSSLVWSTSHEHAAELVSMDEEKFVDAVNSAFWSDADHTDFIDTAGAMLQYAVSLLKPTKVSARQLPPSVAR

SEQ ID NO: 3400 - protein, 393 aa, Homo sapiens
MIFTFMTRKSCCSKQVQRKYWRNCQKLTATGSAPFPLALQRFSVVWDACSEALIMFDKDNLDDMGYIVENDVIMHALTKQLEAVSDRVTVLYRSKAIRYTWPCPFPMADSSPWVHITLGDGSTFQTKLLIGADGHNSGVRQAVGIQNVSWNYDQSAVVATLHLSEATENNVAWQRFLPSGPIALLPLSDTLSSLVWSTSHEHAAELVSMDEEKFVDAVNSAFWSDADHTDFIDTAGAMLQYAVSLLKPTKVSARQLPPSVARVDAKSRVLFPLGLGHAAEYVRPRVALIGDAAHRVHPLAGQGVNMGFGDISSLAHHLSTAAFNGKDLGSVSHLTGYETERQRHNTALLAATDLLKRLYSTSASPLVLLRTWGLQATNAVSPLKEQIMAFASK

SEQ ID NO: 3401 - protein, 443 aa, Homo sapiens
MRGQGPPLSSFGVWLASRAASDPSRPRRQGYDIHFHDKKILLLEAGPKKVLEKLSETYSNRVSSISPGSATLLSSFGAWDHICNMRYRAFRRMQVWDACSEALIMFDKDNLDDMGYIVENDVIMHALTKQLEAVSDRVTVLYRSKAIRYTWPCPFPMADSSPWVHITLGDGSTFQTKLLIGADGHNSGVRQAVGIQNVSWNYDQSAVVATLHLSEATENNVAWQRFLPSGPIALLPLSDTLSSLVWSTSHEHAAELVSMDEEKFVDAVNSAFWSDADHTDFIDTAGAMLQYAVSLLKPTKVSARQLPPSVARVDAKSRVLFPLGLGHAAEYVRPRVALIGDAAHRVHPLAGQGVNMGFGDISSLAHHLSTAAFNGKDLGSVSHLTGYETERQRHNTALLAATDLLKRLYSTSASPLVLLRTWGLQATNAVSPLKEQIMAFASK

SEQ ID NO: 3402 - protein, 86 aa, Homo sapiens
MRGQGPPLSSFGVWLASRAASDPSRPRRQGYDIHFHDKKILLLEAGPKKVLEKLSETYSNRVSSISPGSATLLSSVGRLLRGPDNV

SEQ ID NO: 3403 - protein, 105 aa, Homo sapiens
MPLSPGLLLLLLSGATATAALPLEGGPTGRDSEHMQEAAGIRKSSLLTFLAWWFEWTSQASAGPLIGEEAREVARRQEGAPPQQSARRDRMPCRNFFWKTFSSCK

SEQ ID NO: 3404 - protein, 225 aa, Homo sapiens
GAGTEDSACIPWAYYSTVDQVKDLYSGLIGPLIVCRRPYLKVFNPRRKLEFALLFLVFDENESWYLDDNIKTYSDHPEKVNKDDEEFIESNKMHAINGRMFGNLQGLTMHVGDEVNWYLMGMGNEIDLHTVHFHGHSFQYKHRGVYSSDVFDIFPGTYQTLEMFPRTPGIWLLHCHVTDHIHAGMETTYTVLQNEASSETHRRIWNVIYPITVSVIILFQISTKE

SEQ ID NO: 3405 - protein, 1065 aa, Homo sapiens
MKILILGIFLFLCSTPAWAKEKHYYIGIIETTWDYASDHGEKKLISVDTEHSNIYLQNGPDRIGRLYKKALYLQYTDETFRTTIEKPVWLGFLGPIIKAETGDKVYVHLKNLASRPYTFHSHGITYYKEHEGAIYPDNTTDFQRADDKVYPGEQYTYMLLATEEQSPGEGDGNCVTRIYHSHIDAPKDIASGLIGPLIICKKDSLDKEKEKHIDREFVVMFSVVDENFSWYLEDNIKTYCSEPEKVDKDNEDFQESNRMYSVNGYTFGSLPGLSMCAEDRVKWYLFGMGNEVDVHAAFFHGQALTNKNYRIDTINLFPATLFDAYMVAQNPGEWMLSCQNLNHLKAGLQAFFQVQECNKSSSKDNIRGKHVRHYYIAAEEIIWNYAPSGIDIFTKENLTAPGSDSAVFFEQGTTRIGGSYKKLVYREYTDASFTNRKERGPEEEHLGILGPVIWAEVGDTIRVTFHNKGAYPLSIEPIGVRFNKNNEGTYYSPNYNPQSRSVPPSASHVAPTETFTYEWTVPKEVGPTNADPVCLAKMYYSAVEPTKDIFTGLIGPMKICKKGSLHANGRQKDVDKEFYLFPTVFDENESLLLEDNIRMFTTAPDQVDKEDEDFQESNKMHSMNGFMYGNQPGLTMCKGDSVVWYLFSAGNEADVHGIYFSGNTYLWRGERRDTANLFPQTSLTLHMWPDTEGTFNVECLTTDHYTGGMKQKYTVNQCRRQSEDSTFYLGERTYYIAAVEVEWDYSPQREWEKELHHLQEQNVSNAFLDKGEFYIGSKYKKVVYRQYTDSTFRVPVERKAEEEHLGILGPQLHADVGDKVKIIFKNMATRPYSIHAHGVQTESSTVTPTLPGETLTYVWKIPERSGAGTEDSACIPWAYYSTVDQVKDLYSGLIGPLIVCRRPYLKVFNPRRKLEFALLFLVFDENESWYLDDNIKTYSDHPEKVNKDDEEFIESNKMHAINGRMFGNLQGLTMHVGDEVNWYLMGMGNEIDLHTVHFHGHSFQYKHRGVYSSDVFDIFPGTYQTLEMFPRTPGIWLLHCHVTDHIHAGMETTYTVLQNEDTKSG

SEQ ID NO: 3406 - protein, 946 aa, Homo sapiens
MKILILGIFLFLCSTPAWAKEKHYYIGIIETTWDYASDHGEKKLISVDTEHSNIYLQNGPDRIGRLYKKALYLQYTDETFRTTIEKPVWLGFLGPIIKAETGDKVYVHLKNLASRPYTFHSHGITYYKEHEGAIYPDNTTDFQRADDKVYPGEQYTYMLLATEEQSPGEGDGNCVTRIYHSHIDAPKDIASGLIGPLIICKKDSLDKEKEKHIDREFVVMFSVVDENFSWYLEDNIKTYCSEPEKVDKDNEDFQESNRMYSVNGYTFGSLPGLSMCAEDRVKWYLFGMGNEVDVHAAFFHGQALTNKNYRIDTINLFPATLFDAYMVAQNPGEWMLSCQNLNHLKAGLQAFFQVQECNKSSSKDNIRGKHVRHYYIAAEEIIWNYAPSGIDIFTKENLTAPGSDSAVFFEQGTTRIGGSYKKLVYREYTDASFTNRKERGPEEEHLGILGPVIWAEVGDTIRVTFHNKGAYPLSIEPIGVRFNKNNEGTYYSPNYNPQSRSVPPSASHVAPTETFTYEWTVPKEVGPTNADPVCLAKMYYSAVEPTKDIFTGLIGPMKICKKGSLHANGRQKDVDKEFYLFPTVFDENESLLLEDNIRMFTTAPDQVDKEDEDFQESNKMHWTFNVECLTTDHYTGGMKQKYTVNQCRRQSEDSTFYLGERTYYIAAVEVEWDYSPQREWEKELHHLQEQNVSNAFLDKGEFYIGSKYKKVVYRQYTDSTFRVPVERKAEEEHLGILGPQLHADVGDKVKIIFKNMATRPYSIHAHGVQTESSTVTPTLPGETLTYVWKIPERSGAGTEDSACIPWAYYSTVDQVKDLYSGLIGPLIVCRRPYLKVFNPRRKLEFALLFLVFDENESWYLDDNIKTYSDHPEKVNKDDEEFIESNKMHAINGRMFGNLQGLTMHVGDEVNWYLMGMGNEIDLHTVHFHGHSFQYKHLLRLTGEYGM

SEQ ID NO: 3407 - protein, 179 aa, Homo sapiens [sequence omitted]

SEQ ID NO: 3408 - protein, 852 aa, Homo sapiens
VVMFSVVDENFSWYLEDNIKTYCSEPEKVDKDNEDFQESNRMYSVNGYTFGSLPGLSMCAEDRVKWYLFGMGNEVDVHAAFFHGQALTNKNYRIDTINLFPATLFDAYMVAQNPGEWMLSCQNLNHLKAGLQAFFQVQECNKSSSKDNIRGKHVRHYYIAAEEIIWNYAPSGIDIFTKENLTAPGSDSAVFFEQGTTRIGGSYKKLVYREYTDASFTNRKERGPEEEHLGILGPVIWAEVGDTIRVTFHNKGAYPLSIEPIGVRFNKNNEGTYYSPNYNPQSRSVPPSASHVAPTETFTYEWTVPKEVGPTNADPVCLAKMYYSAVEPTKDIFTGLIGPMKICKKGSLHANGRQKDVDKEFYLFPTVFDENESLLLEDNIRMFTTAPDQVDKEDEDFQESNKMHSMNGFMYGNQPGLTMCKGDSVVWYLFSAGNEADVHGIYFSGNTYLWRGERRDTANLFPQTSLTLHMWPDTEGTFNVECLTTDHYTGGMKQKYTVNQCRRQSEDSTFYLGERTYYIAAVEVEWDYSPQREWEKELHHLQEQNVSNAFLDKGEFYIGSKYKKVVYRQYTDSTFRVPVERKAEEEHLGILGPQLHADVGDKVKIIFKNMATRPYSIHAHGVQTESSTVTPTLPGETLTYVWKIPERSGAGTEDSACIPWAYYSTVDQVKDLYSGLIGPLIVCRRPYLKVFNPRRKLEFALLFLVFDENESWYLDDNIKTYSDHPEKVNKDDEEFIESNKMHAINGRMFGNLQGLTMHVGDEVNWYLMGMGNEIDLHTVHFHGHSFQYKHRGVYSSDVFDIFPGTYQTLEMFPRTPGIWLLHCHVTDHIHAGMETTYTVLQNEGEYPDTKSG

SEQ ID NO: 3409 - protein, 103 aa, Homo sapiens
MIEDVQSLLDEEQEQMFAFRSRARSTDTFNYATYHTLEEIYDFLDLLVAENPHLVSKIQIGNTYEGRPIYVLKFSTGGSKRPAIWIDTGIHSREWVTQASGVW

SEQ ID NO: 3410 - protein, 331 aa, Homo sapiens
MIEDVQSLLDEEQEQMFAFRSRARSTDTFNYATYHTLEEIYDFLDLLVAENPHLVSKIQIGNTYEGRPIYVLKFSTGGSKRPAIWIDTGIHSREWVTQASGVWFAKKITQDYGQDAAFTAILDTLDIFLEIVTNPDGFAFTHSTNRMWRKTRSHTAGSLCIGVDPNRNWDAGFGLSGASSNPCSETYHGKFANSEVEVKSIVDFVKDHGNIKAFISIHSYSQLLMYPYGYKTEPVPDQDELDQLSKAAVTALASLYGTKFNYGSIIKAIYQASGSTIDWTYSQGIKYSFTFELRDTGRYGFLLPASQIIPTAKETWLALLTIMEHTLNHPY

SEQ ID NO: 3411 - protein, 269 aa, Homo sapiens
MIEDVQSLLDEEQEQMFAFRSRARSTDTFNYATYHTLEEIYDFLDLLVAENPHLVSKIQIGNTYEGRPIYVLKFSTGGSKRPAIWIDTGIHSREWVTQASGVWFAKKITQDYGQDAAFTAILDTLDIFLEIVTNPDGFAFTHSTNRMWRKTRSHTAGSLCIGVDPNRNWDAGFGLSGASSNPCSETYHGKFANSEVEVKSIVDFVKDHGNIKAFISIHSYSQLLMYPYGYKTEPVPDQDELDQLSKAAVTALASLYGTKFNYGSIIKAI

SEQ ID NO: 3412 - protein, 419 aa, Homo sapiens
MRGLLVLSVLLGAVFGKEDFVGHQVLRISVADEAQVQKVKELEDLEHLQLDFWRGPAHPGSPIDVRVPFPSIQAVKIFLESHGISYETMIEDVQSLLDEEQEQMFAFRSRARSTDTFNYATYHTLEEIYDFLDLLVAENPHLVSKIQIGNTYEGRPIYVLKFSTGGSKRPAIWIDTGIHSREWVTQASGVWFAKKITQDYGQDAAFTAILDTLDIFLEIVTNPDGFAFTHSTNRMWRKTRSHTAGSLCIGVDPNRNWDAGFGLSGASSNPCSETYHGKFANSEVEVKSIVDFVKDHGNIKAFISIHSYSQLLMYPYGYKTEPVPDQDELDQLSKAAVTALASLYGTKFNYGSIIKAIYQASGSTIDWTYSQGIKYSFTFELRDTGRYGFLLPASQIIPTAKETWLALLTIMEHTLNHPY

SEQ ID NO: 3413 - protein, 191 aa, Homo sapiens
SLTFPPGSSMRGLLVLSVLLGAVFGKEDFVGHQVLRISVADEAQVQKITQDYGQDAAFTAILDTLDIFLEIVTNPDGFAFTHSTNRMWRKTRSHTAGSLCIGVDPNRNWDAGFGLSGASSNPCSETYHGKFANSEVEVKSIVDFVKDHGNIKAFISIHSYSQLLMYPYGYKTEPVPDQDELDQLSKAAVTA

SEQ ID NO: 3414 - protein, 419 aa, Homo sapiens
MAMRLILFFGALFGHIYCLETFVGDQVLEIVPSNEEQIKNLLQLEAQEHLQLDFWKSPTTPGETAHVRVPFVNVQAVKVFLESQGIAYSIMIEDVQVLLDKENEEMLFNRRRERSGNFNFGAYHTLEEISQEMDNLVAEHPGLVSKVNIGSSFENRPMNVLKFSTGGDKPAIWLDAGIHAREWVTQATALWTANKIVSDYGKDPSITSILDALDIFLLPVTNPDGYVFSQTKNRMWRKTRSKVSGSLCVGVDPNRNWDAGFGGPGASSNPCSDSYHGPSANSEVEVKSIVDFIKSHGKVKAFITLHSYSQLLMFPYGYKCTKLDDFDELSEVAQKAAQSLRSLHGTKYKVGPICSVIYQASGGSIDWSYDYGIKYSFAFELRDTGRYGFLLPARQILPTAEETWLGLKAIMEHVRDHPY

SEQ ID NO: 3415 - protein, 182 aa, Homo sapiens
MRLILFFGALFGHIYCLETFVGDQVLEIVPSNEEQIKNLLQLEAQEHLQLDFWKSPTTPGETAHVRVPFVNVQAVKVFLESQGIAYSIMIEDVQVLLDKENEEMLFNRRRERSGNFNFGAYHTLEEISQEMDNLVAEHPGLVSKVNIGSSFENRPMNVLKKSSGRMQKDDGQLNPKPQRQTP

SEQ ID NO: 3416 - protein, 417 aa, Homo sapiens
MRLILPVGLIATTLAIAPVRFDREKVFRVKPQDEKQADIIKDLAKTNELDFWYPGATHHVAANMMVDFRVSEKESQAIQSALDQNKMHYEILIHDLQEEIEKQFDVKEDIPGRHSYAKYNNWEKIVAWTEKMMDKYPEMVSRIKIGSTVEDNPLYVLKIGEKNERRKAIFTDCGIHAREWVSPAFCQWFVYQATKTYGRNKIMTKLLDRMNFYILPVFNVDGYIWSWTKNRMWRKNRSKNQNSKCIGTDLNRNFNASWNSIPNTNDPCADNYRGSAPESEKETKAVTNFIRSHLNEIKVYITFHSYSQMLLFPYGYTSKLPPNHEDLAKVAKIGTDVLSTRYETRYIYGPIESTIYPISGSSLDWAYDLGIKHTFAFELRDKGKFGFLLPESRIKPTCRETMLAVKFIAKYILKHTS

SEQ ID NO: 3417 - protein, 29 aa, Homo sapiens
MQHNEGQERSSNNFNYGAYHSLEAIYHEM

SEQ ID NO: 3418 - protein, 317 aa, Homo sapiens
MQHNEGQERSSNNFNYGAYHSLEAIYHEMDNIAADFPDLARRVKIGHSFENRPMYVLKFSTGKGVRRPAVWLNAGIHSREWISQATAIWTARKIVSDYQRDPAITSILEKMDIFLLPVANPDGYVYTQTQNRLWRKTRSRNPGSSCIGADPNRNWNASFAGKGASDNPCSEVYHGPHANSEVEVKSVVDFIQKHGNFKGFIDLHSYSQLLMYPYGYSVKKAPDAEELDKVARLAAKALASVSGTEYQVGPTCTTVYPASGSSIDWAYDNGIKFAFTFELRDTGTYGFLLPANQIIPTAEETWLGLKTIMEHVRDNLY

SEQ ID NO: 3419 - protein, 421 aa, Homo sapiens
MRWILFIGALIGSSICGQEKFFGDQVLRINVRNGDEISKLSQLVNSNNLKLNFWKSPSSFNRPVDVLVPSVSLQAFKSFLRSQGLEYAVTIEDLQALLDNEDDEMQHNEGQERSSNNFNYGAYHSLEAIYHEMDNIAADFPDLARRVKIGHSFENRPMYVLKFSTGKGVRRPAVWLNAGIHSREWISQATAIWTARKIVSDYQRDPAITSILEKMDIFLLPVANPDGYVYTQTQNRLWRKTRSRNPGSSCIGADPNRNWNASFAGKGASDNPCSEVYHGPHANSEVEVKSVVDFIQKHGNFKGFIDLHSYSQLLMYPYGYSVKKAPDAEELDKVARLAAKALASVSGTEYQVGPTCTTVYPASGSSIDWAYDNGIKFAFTFELRDTGTYGFLLPANQIIPTAEETWLGLKTIMEHVRDNLY

SEQ ID NO: 3420 - protein, 172 aa, Homo sapiens [sequence omitted]

SEQ ID NO: 3421 - protein, 177 aa, Homo sapiens
MRWILFIGALIGSSICGQEKFFGDQVLRINVRNGDEISKLSQLVNSNNLKLNFWKSPSSFNRPVDVLVPSVSLQAFKSFLRSQGLEYAVTIEDLQIYHEMDNIAADFPDLARRVKIGHSFENRPMYVLKFSTGKGVRRPAVWLNAGIHSREWISQATAIWTARKIVSDYQRDPAITS

SEQ ID NO: 3422 - protein, 388 aa, Homo sapiens
MRWILFIGALIGSSICGQEKFFGDQVLRINVRNGDEISKLSQLVNSNNLKLNFWKSPSSFNRPVDVLVPSVSLQAFKSFLRSQGLEYAVTIEDLQIYHEMDNIAADFPDLARRVKIGHSFENRPMYVLKFSTGKGVRRPAVWLNAGIHSREWISQATAIWTARKIVSDYQRDPAITSILEKMDIFLLPVANPDGYVYTQTQNRLWRKTRSRNPGSSCIGADPNRNWNASFAGKGASDNPCSEVYHGPHANSEVEVKSVVDFIQKHGNFKGFIDLHSYSQLLMYPYGYSVKKAPDAEELDKVARLAAKALASVSGTEYQVGPTCTTVYPASGSSIDWAYDNGIKFAFTFELRDTGTYGFLLPANQIIPTAEETWLGLKTIMEHVRDNLY

SEQ ID NO: 3423 - protein, 92 aa, Homo sapiens
MKCLGKRRGQAAAFLPLCWLFLKILQPGHSHLYNNRYAGDKVIRFIPKTEEEAYALKKISYQLKGPHRRSSENTGEGKQLAHPEKPKIPLWI

SEQ ID NO: 3424 - protein, 92 aa, Homo sapiens; identical to SEQ ID NO: 3423

SEQ ID NO: 3425 - protein, 437 aa, Homo sapiens
MKCLGKRRGQAAAFLPLCWLFLKILQPGHSHLYNNRYAGDKVIRFIPKTEEEAYALKKISYQLKVDLWQPSSISYVSEGTVTDVHIPQNGSRALLAFLQEANIQYKVLIEDLQKTLEKGSSLHTQRNRRSLSGYNYEVYHSLEEIQNWMHHLNKTHSGLIHMFSIGRSYEGRSLFILKLGRRSRLKRAVWIDCGIHAREWIGPAFCQWFVKEALLTYKSDPAMRKMLNHLYFYIMPVFNVDGYHFSWTNDRFWRKTRSRNSRFRCRGVDANRNWKVKWCDEGASMHPCDDTYCGPFPESEPEVKAVANFLRKHRKHIRAYLSFHAYAQMLLYPYSYKYATIPNFRCVESAAYKAVNALQSVYGVRYRYGPASTTLYVSSGSSMDWAYKNGIPYAFAFELRDTGYFGFLLPEMLIKPTCTETMLAVKNITMHLLKKCP

SEQ ID NO: 3426 - protein, 175 aa, Homo sapiens
LLLDKHMGMKRYEVAGRRVLFYFDEIPSRCLTCVRFRALRECVVGRTSALPVSVYDYYEPAFEATRFYNVSTHSPLARELCAGPACNEVERAPARGPGWFPGESGPAVAPEEGAAIARCGCDHDCGAQGNPVCGSDGVVYASACRLREAACRQAAPLEPAPPSCCALAGREAEWS

SEQ ID NO: 3427 - protein, 550 aa, Homo sapiens
MAPGALRGGCEQRAPGGGARTAALGPWPWPSPGPAPSPGAAPPRSRKMSGALLWPLLPLLLLLLSARDGVRAAQPQAPGYLIAAPSVFRAGVEEVISVTIFNSPREVTVQAQLVAQGEPVVQSQGAILDKGTIKLKVPTGLRGQALLKVWGRGWQAEEGPLFHNQTSVTVDGRGASVFIQTDKPVYRPQHRVLISIFTVSPNLRPVNEKLEAYILDPRGSRMIEWRHLKPFCCGITNMSFPLSDQPVLGEWFIFVEMQGHAYNKSFEVQKYVLPKFELLIDPPRYIQDLDACETGTVRARYTFGKPVAGALMINMTVNGVGYYSHEVGRPVLRTTKILGSRDFDICVRDMIPADVPEHFRGRVSIWAMVTSVDGSQQVAFDDSTPVQRQLVDIRYSKDTRKQFKPGLAYVGKVELSYPDGSPAEGVTVQIKAELTPKDNIYTSEVVSQRGLVGFEIPSIPTSAQHVWLEVFQELEDYDVSDSFGVSREDGPFWWAGLTAQRRRRSSVFPWPWGITKDSGFAFTVRRGNGTGGDDRPSEPEPPAGRWPLHR

SEQ ID NO: 3428 - protein, 1932 aa, Homo sapiens
MAPGALRGGCEQRAPGGGARTAALGPWPWPSPGPAPSPGAAPPRSRKMSGALLWPLLPLLLLLLSARDGVRAAQPQAPGYLIAAPSVFRAGVEEVISVTIFNSPREVTVQAQLVAQGEPVVQSQGAILDKGTIKLKVPTGLRGQALLKVWGRGWQAEEGPLFHNQTSVTVDGRGASVFIQTDKPVYRPQHRVLISIFTVSPNLRPVNEKLEAYILDPRGSRMIEWRHLKPFCCGITNMSFPLSDQPVLGEWFIFVEMQGHAYNKSFEVQKYVLPKFELLIDPPRYIQDLDACETGTVRARYTFGKPVAGALMINMTVNGVGYYSHEVGRPVLRTTKILGSRDFDICVRDMIPADVPEHFRGRVSIWAMVTSVDGSQQVAFDDSTPVQRQLVDIRYSKDTRKQFKPGLAYVGKVELSYPDGSPAEGVTVQIKAELTPKDNIYTSEVVSQRGLVGFEIPSIPTSAQHVWLETKVMALNGKPVGAQYLPSYLSLGSWYSPSQCYLQLQPPSHPLQVGEEAYFSVKSTCPCNFTLYYEVAARGNIVLSGQQPAHTTQQRSKRAAPALEKPIRLTHLSETEPPPAPEAEVDVCVTSLHLAVTPSMVPLGRLLVFYVRENGEGVADSLQFAVETFFENQVSVTYSANETQPGEVVDLRIRAARGSCVCVAAVDKSVYLLRSGFRLTPAQVFQELEDYDVSDSFGVSREDGPFWWAGLTAQRRRRSSVFPWPWGITKDSGFAFTETGLVVMTDRVSLNHRQDGGLYTDEAVPAFQPHTGSLVAVAPSRHPPRTEKRKRTFFPETWIWHCLNISDPSGEGTLSVKVPDSITSWVGEAVALSTSQGLGIAEPSLLKTFKPFFVDFMLPALIIRGEQVKIPLSVYNYMGTCAEVYMKLSVPKGIQFVGHPGKRHVTKKMCVAPGEAEPIWVVLSFSDLGLNNITAKALAYGDTNCCRDGRSSKHPEENHADRRVPIGVDHVRRSVMVEAEGVPRAYTYSAFFCPSERVHISTPNKYEFQYVQRPLRLTRFDVAVRAHNDARVALSSGPQDTAGMIEIVLGGHQNTRSWISTSKMGEPVASAHTAKILSWDEFRTFWISWRGGLIQVGHGPEPSNESVIVAWTLPRPPEVQFIGFSTGWGSMGEFRIWRKMEVDESYSEAFTLGVPHGAIPGSERATASIIGDVMGPTLNHLNNLLRLPFGCGEQNMIHFAPNVFVLKYLQKTQQLSPEVERETTDYLVQGYQRQLTYKRQDGSYSAFGERDASGSMWLTAFVLKSFAQARSFIFVDPRELAAAKSWIIQQQQADGSFLAVGRVLNKDIQGGIHGTVPLTAYVVVALLETGTASEEERGSTDKARHFLESAAPLAMDPYSCALTTYALTLLRSPAAPEALRKLRSLAIMRDGVTHWSLSNSWDVDKGTFLSFSDRVSQSVVSAEVEMTAYALLTYTLLGDVAAALPVVKWLSQQRNALGGFSSTQDTCVALQALAEYAILSYAGGINLTVSLASTNLDYQETFELHRTNQKVLQTAAIPSLPTGLFVSAKGDGCCLMQIDVTYNVPDPVAKPAFQLLVSLQEPEAQGRPPPMPASAAEGSRGDWPPADDDDPAADQHHQEYKVMLEVCTRWLHAGSSNMAVLEVPLLSGFRADIESLEQLLLDKHMGMKRYEVAGRRVLFYFDEIPSRCLTCVRFRALRECVVGRTSALPVSVYDYYEPAFEATRFYNVSTHSPLARELCAGPACNEVERAPARGPGWFPGESGPAVAPEEGAAIARCGCDHDCGAQGNPVCGSDGVVYASACRLREAACRQAAPLEPAPPSCCALEQRLPASSSSTYGDDLASVAPGPLQQDVKLNGAGLEVEDSDPEPEGEAEDRVTAGPRPPVSSGNLESSTQSASPFHRWGQTPAPQRHSGRVVGAHRPGLLSPVFVYSPAFQSGGEEGLWMSNTCTLR

SEQ ID NO: 3429 - protein, 503 aa, Homo sapiens
MSGALLWPLLPLLLLLLSARDGVRAAQPQAPGYLIAAPSVFRAGVEEVISVTIFNSPREVTVQAQLVAQGEPVVQSQGAILDKGTIKLKVPTGLRGQALLKVWGRGWQAEEGPLFHNQTSVTVDGRGASVFIQTDKPVYRPQHRVLISIFTVSPNLRPVNEKLEAYILDPRGSRMIEWRHLKPFCCGITNMSFPLSDQPVLGEWFIFVEMQGHAYNKSFEVQKYVLPKFELLIDPPRYIQDLDACETGTVRARYTFGKPVAGALMINMTVNGVGYYSHEVGRPVLRTTKILGSRDFDICVRDMIPADVPEHFRGRVSIWAMVTSVDGSQQVAFDDSTPVQRQLVDIRYSKDTRKQFKPGLAYVGKVELSYPDGSPAEGVTVQIKAELTPKDNIYTSEVVSQRGLVGFEIPSIPTSAQHVWLEVFQELEDYDVSDSFGVSREDGPFWWAGLTAQRRRRSSVFPWPWGITKDSGFAFTVRRGNGTGGDDRPSEPEPPAGRWPLHR

SEQ ID NO: 3430 - protein, 56 aa, Homo sapiens
RTQTLSLKGRRRTERLLFLTAALLRAGRHHLAASCPYQPVTLYGGWADLSPGDTCL

SEQ ID NO: 3431 - protein, 338 aa, Homo sapiens
  VARIANT 1: note = misc_feature - Xaa can be any naturally occurring amino acid
XVSAKGDGCCLMQIDVTYNVPDPVAKPAFQLLVSLQEPEAQGRPPPMPASAAEGSRGDWPPADDDDPAADQHHQEYKVMLEVCTRWLHAGSSNMAVLEVPLLSGFRADIESLEQLLLDKHMGMKRYEVAGRRVLFYFDEIPSRCLTCVRFRALRECVVGRTSALPVSVYDYYEPAFEATRFYNVSTHSPLARELCAGPACNEVERAPARGPGWFPGESGPAVAPEEGAAIARCGCDHDCGAQGNPVCGSDGVVYASACRLREAACRQAAPLEPAPPSCCALEQRLPASSSSTYGDDLASVAPGPLQQDVKLNGAGLEVEDSDPEPEGEAEDSQSGFSS

SEQ ID NO: 3432 - protein, 59 aa, Homo sapiens
MLALLVLVTVALASAHHGGEHFEGEKVFRVNVEDENHINIIRELASTTQIDFWKPDSVT

SEQ ID NO: 3433 - protein, 99 aa, Homo sapiens
MLALLVLVTVALASAHHGGEHFEGEKVFRVNVEDENHINIIRELASTTQIDFWKPDSVTQIKPHSTVDFRVKAEDTVTVENVLKQNELQYKVLISNLRN

SEQ ID NO: 3434 - protein, 417 aa, Homo sapiens
MLALLVLVTVALASAHHGGEHFEGEKVFRVNVEDENHINIIRELASTTQIDFWKPDSVTQIKPHSTVDFRVKAEDTVTVENVLKQNELQYKVLISNLRNVVEAQFDSRVRATGHSYEKYNKWETIEAWTQQVATENPALISRSVIGTTFEGRAIYLLKVGKAGQNKPAIFMDCGFHAREWISPAFCQWFVREAVRTYGREIQVTELLDKLDFYVLPVLNIDGYIYTWTKSRFWRKTRSTHTGSSCIGTDPNRNFDAGWCEIGASRNPCDETYCGPAAESEKETKALADFIRNKLSSIKAYLTIHSYSQMMIYPYSYAYKLGENNAELNALAKATVKELASLHGTKYTYGPGATTIYPAAGGSDDWAYDQGIRYSFTFELRDTGRYGFLLPESQIRATCEETFLAIKYVASYVLEHLY

SEQ ID NO: 3435 - protein, 417 aa, Homo sapiens; identical to SEQ ID NO: 3434

SEQ ID NO: 3436 - protein, 203 aa, Homo sapiens
MLALLVLVTVALASAHHGGEHFEGEKVFRVNVEDENHINIIRELASTTQIDFWKPDSVTQIKPHSTVDFRVKAEDTVTVENVLKQNELQYKVLISNLRNVVEAQFDSRVRATGHSYEKYNKWETVGKAGQNKPAIFMDCGFHAREWISPAFCQWFVREAVRTYGREIQVTELLDKLDFYVLPVLNIDGYIYTWTKSRFWRKTR

SEQ ID NO: 3437 - protein, 423 aa, Homo sapiens
MKLCSLAVLVPIVLFCEQHVFAFQSGQVLAALPRTSRQVQVLQNLTTTYEIVLWQPVTADLIVKKKQVHFFVNASDVDNVKAHLNVSGIPCSVLLADVEDLIQQQISNDTVSPRASASYYEQYHSLNEIYSWIEFITERHPDMLTKIHIGSSFEKYPLYVLKVSGKEQAAKNAIWIDCGIHAREWISPAFCLWFIGHITQFYGIIGQYTNLLRLVDFYVMPVVNVDGYDYSWKKNRMWRKNRSFYANNHCIGTDLNRNFASKHWCEEGASSSSCSETYCGLYPESEPEVKAVASFLRRNINQIKAYISMHSYSQHIVFPYSYTRSKSKDHEELSLVASEAVRAIEKISKNTRYTHGHGSETLYLAPGGGDDWIYDLGIKYSFTIELRDTGTYGFLLPERYIKPTCREAFAAVSKIAWHVIRNV

SEQ ID NO: 3438 - protein, 423 aa, Homo sapiens; identical to SEQ ID NO: 3437

SEQ ID NO: 3439 - protein, 386 aa, Homo sapiens
MKLCSLAVLVPIVLFCEQHVFAFQSGQVLAALPRTSRQVQVLQNLTTTYEIVLWQPVTADLIVKKKQVHFFVNASDVDNVKAHLNVSGIPCSVLLADVEDLIQQQISNDTVSPRASASYYEQYHSLNEIYSWIEFITERHPDMLTKIHIGSSFEKYPLYVLKVSGKEQAAKNAIWIDCGIHAREWISPAFCLWFIGHNRMWRKNRSFYANNHCIGTDLNRNFASKHWCEEGASSSSCSETYCGLYPESEPEVKAVASFLRRNINQIKAYISMHSYSQHIVFPYSYTRSKSKDHEELSLVASEAVRAIEKISKNTRYTHGHGSETLYLAPGGGDDWIYDLGIKYSFTIELRDTGTYGFLLPERYIKPTCREAFAAVSKIAWHVIRNV

SEQ ID NO: 3440 - protein, 476 aa, Homo sapiens
MAGRGGSALLALCGALAACGWLLGAEAQEPGAPAAGMRRRRRLQQEDGISFEYHRYPELREALVSVWLQCTAISRIYTVGRSFEGRELLVIELSDNPGVHEPGEPEFKYIGNMHGNEAVGRELLIFLAQYLCNEYQKGNETIVNLIHSTRIHIMPSLNPDGFEKAASQPGELKDWFVGRSNAQGIDLNRNFPDLDRIVYVNEKEGGPNNHLLKNMKKIVDQNTKLAPETKAVIHWIMDIPFVLSANLHGGDLVANYPYDETRSGSAHEYSSSPDDAIFQSLARAYSSFNPAMSDPNRPPCRKNDDDSSFVDGTTNGGAWYSVPGGMQDFNYLSSNCFEITVELSCEKFPPEETLKTYWEDNKNSLISYLEQIHRGVKGFVRDLQGNPIANATISVEGIDHDVTSAKDGDYWRLLIPGNYKLTASAPGYLAITKKVAVPYSPAAGVDFELESFSERKEEEKEELMEWWKMMSETLNF

SEQ ID NO: 3441 - protein, 139 aa, Homo sapiens
MHGNEAVGRELLIFLAQYLCNEYQKGNETIVNLIHSTRIHIMPSLNPDGFEKAASQPGELKDWFVGRSNAQGIDLNRNFPDLDRIVYVNEKEGGPNNHLLKNMKKIVDQNTKLAPETKAVIHWIMDIPFVLSANLHGGD

SEQ ID NO: 3442 - protein, 147 aa, Homo sapiens
MHGNEAVGRELLIFLAQYLCNEYQKGNETIVNLIHSTRIHIMPSLNPDGFEKAASQPGELKDWFVGRSNAQGIDLNRNFPDLDRIVYVNEKEGGPNNHLLKNMKKIVDQNTKLAPETKAVIHWIMDIPFVLSANLHGGDLVANYPYD

SEQ ID NO: 3443 - protein, 157 aa, Homo sapiens
MHGNEAVGRELLIFLAQYLCNEYQKGNETIVNLIHSTRIHIMPSLNPDGFEKAASQPGELKDWFVGRSNAQGIDLNRNFPDLDRIVYVNEKEGGPNNHLLKNMKKIVDQNTKLAPETKAVIHWIMDIPFVLSANLHGGDLVANYPYDETRSGSAHEY

SEQ ID NO: 3444 - protein, 108 aa, Homo sapiens
  VARIANT 1: note = misc_feature - Xaa can be any naturally occurring amino acid
XLGAEAQEPGAPAAGMRRRRRLQQEDGISFEYHRYPELREALVSVWLQCTAISRIYTVGRSFEGRELLVIELSDNPGVHEPDCKLYEVGTLIPAPSSCLAHSGLEYTL

SEQ ID NO: 3445 - protein, 64 aa, Homo sapiens
MDFPCLWLGLLLPLVAALDFNYHRQEGMEAFLKTVAQNYSSVTHLHSIGKSVKDCWAGAAAPSD

SEQ ID NO: 3446 - protein, 64 aa, Homo sapiens; identical to SEQ ID NO: 3445

SEQ ID NO: 3447 - protein, 72 aa, Homo sapiens
MDFPCLWLGLLLPLVAALDFNYHRQEGMEAFLKTVAQNYSSVTHLHSIGKSVKETCGFLLWGGFQRNTELGF

SEQ ID NO: 3448 - protein, 136 aa, Homo sapiens
MDFPCLWLGLLLPLVAALDFNYHRQEGMEAFLKTVAQNYSSVTHLHSIGKSVKGRNLWVLVVGRFPKEHRIGIPEFKYVANMHGDETVGRELLLHLIDYLVTSDGKDPEITNLINSTRIHIMPSMNPDGFEAVKKP

SEQ ID NO: 3449 - protein, 249 aa, Homo sapiens
MDFPCLWLGLLLPLVAALDFNYHRQEGMEAFLKTVAQNYSSVTHLHSIGKSVKGRNLWVLVVGRFPKEHRIGIPEFKYVANMHGDETVGRELLLHLIDYLVTSDGKDPEITNLINSTRIHIMPSMNPDGFEAVKKPDCYYSIGRENYNQYDLNRNFPDAFEYNNVSRQPETVAVMKWLKTETFVLSANLHGGALVASYPFDNGVQATGALYSRSLTPDDDVFQYLAHTYASRNPNMKKGDECKNKMNFP

SEQ ID NO: 3450 - protein, 443 aa, Homo sapiens
MDFPCLWLGLLLPLVAALDFNYHRQEGMEAFLKTVAQNYSSVTHLHSIGKSVKGRNLWVLVVGRFPKEHRIGIPEFKYVANMHGDETVGRELLLHLIDYLVTSDGKDPEITNLINSTRIHIMPSMNPDGFEAVKKPDCYYSIGRENYNQYDLNRNFPDAFEYNNVSRQPETVAVMKWLKTETFVLSANLHGGALVASYPFDNGVQATGALYSRSLTPDDDVFQYLAHTYASRNPNMKKGDECKNKMNFPNGVTNGYSWYPLQGGMQDYNYIWAQCFEITLELSCCKYPREEKLPSFWNNNKASLIEYIKQVHLGVKGQVFDQNGNPLPNVIVEVQDRKHICPYRTNKYGEYYLLLLPGSYIINVTVPGHDPHITKVIIPEKSQNFSALKKDILLPFQGQLDSIPVSNPSCPMIPLYRNLPDHSAATKPSLFLFLVSLLHIFFK

SEQ ID NO: 3451 - protein, 443 aa, Homo sapiens; identical to SEQ ID NO: 3450

SEQ ID NO: 3452 - protein, 443 aa, Homo sapiens; identical to SEQ ID NO: 3450

SEQ ID NO: 3453 - protein, 35 aa, Homo sapiens
SCPMIPLYRNLPDHSAATKPSLFLFLVSLLHIFFK

SEQ ID NO: 3454 - protein, 198 aa, Homo sapiens
  VARIANT 1: note = misc_feature - Xaa can be any naturally occurring amino acid
XPFDNGVQATGALYSRSLTPDDDVFQYLAHTYASRNPNMKKGDECKNKMNFPNGVTNGYSWYPLQGGMQDYNYIWAQCFEITLELSCCKYPREEKLPSFWNNNKASLIEYIKQVHLGVKGQVFDQNGNPLPNVIVEVQDRKHICPYRTNKYGEYYLLLLPGSYIINVTVPGHDPHITKLRSFACNRGQDEFCLTSLMS

SEQ ID NO: 3455 - protein, 204 aa, Homo sapiens
MHSFNFVLSANLHGGAVVANYPYDKSFEHRVRGVRRTASTPTPDDKLFQKLAKVYSYAHGWMFQGWNCGDYFPDGITNGASWYSLSKGMQDFNYLHTNCFEITLELSCDKFPPEEELQREWLGNREALIQFLEQVHQGIKGMVLDENYNNLANAVISVSGINHDVTSGDHGDYFRLLLPGIYTVSATAPGYDPETVTVTVGPAE

SEQ ID NO: 3456 - protein, 458 aa, Homo sapiens
MSDLLSVFLHLLLLFKLVAPVTFRHHRYDDLVRTLYKVQNECPGITRVYSIGRSVEGRHLYVLEFSDHPGIHEPLEPEVKYVGNMHGNEALGRELMLQLSEFLCEEFRNRNQRIVQLIQDTRIHILPSMNPDGYEVAAAQGPNKPGYLVGRNNANGVDLNRNFPDLNTYIYYNEKYGGPNHHLPLPDNWKSQVEPETRAVIRWMHSFNFVLSANLHGGAVVANYPYDKSFEHRVRGVRRTASTPTPDDKLFQKLAKVYSYAHGWMFQGWNCGDYFPDGITNGASWYSLSKGMQDFNYLHTNCFEITLELSCDKFPPEEELQREWLGNREALIQFLEQVHQGIKGMVLDENYNNLANAVISVSGINHDVTSGDHGDYFRLLLPGIYTVSATAPGYDPETVTVTVGPAEPTLVNFHLKRSIPQVSPVRRAPSRRHGVRAKVQPQARKKEMEMRQLQRGPA

SEQ ID NO: 3457 - protein, 545 aa, Homo sapiens
MLPGAWLLWTSLLLLARPAQPCPMGCDCFVQEVFCSDEELATVPLDIPPYTKNIIFVETSFTTLETRAFGSNPNLTKVVFLNTQLCQFRPDAFGGLPRLEDLEVTGSSFLNLSTNIFSNLTSLGKLTLNFNMLEALPEGLFQHLAALESLHLQGNQLQALPRRLFQPLTHLKTLNLAQNLLAQLPEELFHPLTSLQTLKLSNNALSGLPQGVFGKLGSLQELFLDSNNISELPPQVFSQLFCLERLWLQRNAITHLPLSIFASLGNLTFLSLQWNMLRVLPAGLFAHTPCLVGLSLTHNQLETVAEGTFAHLSNLRSLMLSYNAITHLPAGIFRDLEELVKLYLGSNNLTALHPALFQNLSKLELLSLSKNQLTTLPEGIFDTNYNLFNLALHGNPWQCDCHLAYLFNWLQQYTDRLLNIQTYCAGPAYLKGQVVPALNEKQLVCPVTRDHLGFQVTWPDESKAGGSWDLAVQERAARSQCTYSNPEGTVVLACDQAQCRWLNVQLSPQQGSLGLQYNASQEWDLRSSCGSLRLTVSIEARAAGP

SEQ ID NO: 3458 - protein, 545 aa, Homo sapiens; identical to SEQ ID NO: 3457

SEQ ID NO: 3459 - protein, 374 aa, Homo sapiens
MKPLLETLYLLGMLVPGGLGYDRSLAQHRQEIVDKSVSPWSLETYSYNIYHPMGEIYEWMREISEKYKEVVTQHFLGVTYETHPMYYLKISQPSGNPKKIIWMDCGIHAREWIAPAFCQWFVKEILQNHKDNSSIRKLLRNLDFYVLPVLNIDGYIYTWTTDRLWRKSRSPHNNGTCFGTDLNRNFNASWCSIGASRNCQDQTFCGTGPVSEPETKAVASFIESKKDDILCFLTMHSYGQLILTPYGYTKNKSSNHPEMIQVGQKAANALKAKYGTNYRVGSSADILYASSGSSRDWARDIGIPFSYTFELRDSGTYGFVLPEAQIQPTCEETMEAVLSVLDDVYAKHWHSDSAGRVTSATMLLGLLVSCMSLL

SEQ ID NO: 3460 - protein, 130 aa, Homo sapiens
MKFLIFAFFGGVHLLSLCSGKAICKNGISKRTFEEIKEEIASCGDVAKAIINLAVYGKAQNRSYERLALLVDTVGPRLSGSKNLEKAIQIMYQNLQQDGLEKVHLEPVRIPHWERGEESAVMLEPRIHKI

SEQ ID NO: 3461 - protein, 131 aa, Homo sapiens
MKFLIFAFFGGVHLLSLCSGKAICKNGISKRTFEEIKEEIASCGDVAKAIINLAVYGKAQNRSYERLALLVDTVGPRLSGSKNLEKAIQIMYQNLQQDGLEKVHLEPVRIPHWERGEESAVMLEPRIHKIA

SEQ ID NO: 3462 - protein, 137 aa, Homo sapiens
MKFLIFAFFGGVHLLSLCSGKAICKNGISKRTFEEIKEEIASCGDVAKAIINLAVYGKAQNRSYERLALLVDTVGPRLSGSKNLEKAIQIMYQNLQQDGLEKVHLEPVRIPHWERGEESAVMLEPRIHKIAILGLGS

SEQ ID NO: 3463 - protein, 186 aa, Homo sapiens
MKFLIFAFFGGVHLLSLCSGKAICKNGISKRTFEEIKEEIASCGDVAKAIINLAVYGKAQNRSYERLALLVDTVGPRLSGSKNLEKAIQIMYQNLQQDGLEKVHLEPVRIPHWERGEESAVMLEPRIHKIAILGLGSSIGTPPEGITAEVLVVTSFDELQRRASEARGKIVVYNQPYINYSRTVQY

SEQ ID NO: 3464 - protein, 472 aa, Homo sapiens
MKFLIFAFFGGVHLLSLCSGKAICKNGISKRTFEEIKEEIASCGDVAKAIINLAVYGKAQNRSYERLALLVDTVGPRLSGSKNLEKAIQIMYQNLQQDGLEKVHLEPVRIPHWERGEESAVMLEPRIHKIAILGLGSSIGTPPEGITAEVLVVTSFDELQRRASEARGKIVVYNQPYINYSRTVQYRTQGAVEAAKVGALASLIRSVASFSIYSPHTGIQEYQDGVPKIPTACITVEDAEMMSRMASHGIKIVIQLKMGAKTYPDTDSFNTVAEITGSKYPEQVVLVSGHLDSWDVGQGAMDDGGGAFISWEALSLIKDLGLRPKRTLRLVLWTAEEQGGVGAFQYYQLHKVNISNYSLVMESDAGTFLPTGLQFTGSEKARAIMEEVMSLLQPLNITQVLSHGEGTDINFWIQAGVPGASLLDDLYKYFFFHHSHGDTMTVMDPKQMNVAAAVWAVVSYVVADMEEMLPRS

SEQ ID NO: 3465 - protein, 130 aa, Homo sapiens
  VARIANT 1: note = misc_feature - Xaa can be any naturally occurring amino acid
XFQYYQLHKVNISNYSLVMESDAGTFLPTGLQFTGSEKARAIMEEVMSLLQPLNITQVLSHGEGTDINFWIQAGVPGASLLDDLYKYFFFHHSHGDTMTVMDPKQMNVAAAVWAVVSYVVADMEEMLPRS

SEQ ID NO: 3466 - protein, 141 aa, Homo sapiens
IIGGYAEFLYQIGLLDEKQKKYFQKQCHECIEHIRKQNWFEAFEVLIYNGQLDIIVAAALTERSLMGMDWKGSQEYKKAEKKVWKIFKSDSEVAGYIRQAGDFHQVIIRGGGHILPYDQPLRAFDMINRFIYGKGWDPYVG

SEQ ID NO: 3467 - protein, 100 aa, Homo sapiens
MFGLFVEHGPYVVTSNMTLRDRDFPWTTTLSMLYIDNPVGTGFSFTDDTHGYAVNEDDVARDLYSALIQFFQIFPEYKNNDFYVTGESYAGKYVPAIAHL

SEQ ID NO: 3468 - protein, 142 aa, Homo sapiens
MKSYAGFLTVNKTYNSNLFFWFFPAQIQPEDAPVVLWLQGGPGGSSMFGLFVEHGPYVVTSNMTLRDRDFPWTTTLSMLYIDNPVGTGFSFTDDTHGYAVNEDDVARDLYSALIQFFQIFPEYKNNDFYVTGESYAGKYVPA

SEQ ID NO: 3469 - protein, 244 aa, Homo sapiens
MKSYAGFLTVNKTYNSNLFFWFFPAQIQPEDAPVVLWLQGGPGGSSMFGLFVEHGPYVVTSNMTLRDRDFPWTTTLSMLYIDNPVGTGFSFTDDTHGYAVNEDDVARDLYSALIQFFQIFPEYKNNDFYVTGESYAGKYVPAIAHLIHSLNPVREVKINLNGIAIGDGYSDPESIIGGYAEFLYQIGLLDEKQKKYFQKQCHECIEHIRKQNWFEAFEILDKLLDGDLTSDPSYFQNVTGCSNY

SEQ ID NO: 3470 - protein, 6 aa, Homo sapiens
MVGAMW

SEQ ID NO: 3471 - protein, 43 aa, Homo sapiens
MVGAMWKVIVSLVLLMPGPCDGLFRSLYRSVSMPPKGDSGQPL

SEQ ID NO: 3472 - protein, 52 aa, Homo sapiens
MVGAMWKVIVSLVLLMPGPCDGLFRSLYRSVSMPPKGDSGQPLFLTPYIEAG

SEQ ID NO: 3473 - protein, 476 aa, Homo sapiens
MVGAMWKVIVSLVLLMPGPCDGLFRSLYRSVSMPPKGDSGQPLFLTPYIEAGKIQKGRELSLVGPFPGLNMKSYAGFLTVNKTYNSNLFFWFFPAQIQPEDAPVVLWLQGGPGGSSMFGLFVEHGPYVVTSNMTLRDRDFPWTTTLSMLYIDNPVGTGFSFTDDTHGYAVNEDDVARDLYSALIQFFQIFPEYKNNDFYVTGESYAGKYVPAIAHLIHSLNPVREVKINLNGIAIGDGYSDPESIIGGYAEFLYQIGLLDEKQKKYFQKQCHECIEHIRKQNWFEAFEILDKLLDGDLTSDPSYFQNVTGCSNYYNFLRCTEPEDQLYYVKFLSLPEVRQAIHVGNQTFNDGTIVEKYLREDTVQSVKPWLTEIMNNYKVLIYNGQLDIIVAAALTERSLMGMDWKGSQEYKKAEKKVWKIFKSDSEVAGYIRQAGDFHQVIIRGGGHILPYDQPLRAFDMINRFIYGKGWDPYVG

SEQ ID NO: 3474 - protein, 476 aa, Homo sapiens; identical to SEQ ID NO: 3473

SEQ ID NO: 3475 - protein, 476 aa, Homo sapiens; identical to SEQ ID NO: 3473

SEQ ID NO: 3476 - protein, 180 aa, Homo sapiens
  VARIANT 1: note = misc_feature - Xaa can be any naturally occurring amino acid
XKYFQKQCHECIEHIRKQNWFEAFEEPEDQLYYVKFLSLPEVRQAIHVGNQTFNDGTIVEKYLREDTVQSVKPWLTEIMNNYKVLIYNGQLDIIVAAALTERSLMGMDWKGSQEYKKAEKKVWKIFKSDSEVAGYIRQAGDFHQVIIRGGGHILPYDQPLRAFDMINRFIYGKGWDPYVG

SEQ ID NO: 3477 - protein, 734 aa, Homo sapiens
MWGLLLALAAFAPAVGPALGAPRNSVLGLAQPGTTKVPGSTPALHSSPAQPPAETANGTSEQHVRIRVIKKKKVIMKKRKKLTLTRPTPLVTAGPLVTPTPAGTLDPAEKQETGCPPLGLESLRVSDSRLEASSSQSFGLGPHRGRLNIQSGLEDGDLYDGAWCAEEQDADPWFQVDAGHPTRFSGVITQGRNSVWRYDWVTSYKVQFSNDSRTWWGSRNHSSGMDAVFPANSDPETPVLNLLPEPQVARFIRLLPQTWLQGGAPCLRAEILACPVSDPNDLFLEAPASGSSDPLDFQHHNYKAMRKLMKQVQEQCPNITRIYSIGKSYQGLKLYVMEMSDKPGEHELGEPEVRYVAGMHGNEALGRELLLLLMQFLCHEFLRGNPRVTRLLSEMRIHLLPSMNPDGYEIAYHRGSELVGWAEGRWNNQSIDLNHNFADLNTPLWEAQDDGKVPHIVPNHHLPLPTYYTLPNATVAPETRAVIKWMKRIPFVLSANLHGGELVVSYPFDMTRTPWAARELTPTPDDAVFRWLSTVYAGSNLAMQDTSRRPCHSQDFSVHGNIINGADWHTVPGSMNDFSYLHTNCFEVTVELSCDKFPHENELPQEWENNKDALLTYLEQVRMGIAGVVRDKDTELGIADAVIAVDGINHDVTTAWGGDYWRLLTPGDYMVTASAEGYHSVTRNCRVTFEEGPFPCNFVLTKTPKQRLRELLAAGAKVPPDLRRRLERLRGQKD

SEQ ID NO: 3478 - protein, 224 aa, Homo sapiens
MEKIPFVLGGNLQGGELVVAYPYDLVRSPWKTQEHTPTPDDHVFRWLAYSYASTHRLMTDARRRVCHTEDFQKEEGTVNGASWHTVAGSLNDFSYLHTNCFELSIYVGCDKYPHESQLPEEWENNRESLIVFMEQVHRGIKGLVRDSHGKGIPNAIISVEGINHDIRTGRVSLQKLSLACRRVRCAFALSSSSTMIVRPPQPYGTVPHSSPDPVTTKISPLRNF

SEQ ID NO: 3479 - protein, 756 aa, Homo sapiens
MSRPGTATPALALVLLAVTLAGVGAQGAALEDPDYYGQEIWSREPYYARPEPELETFSPPLPAGPGEEWERRPQEPRPPKRATKPKKAPKREKSAPEPPPPGKHSNKKVMRTKSSEKAANDDHSVRVAREDVRESCPPLGLETLKITDFQLHASTVKRYGLGAHRGRLNIQAGINENDFYDGAWCAGRNDLQQWIEVDARRLTRFTGVITQGRNSLWLSDWVTSYKVMVSNDSHTWVTVKNGSGDMIFEGNSEKEIPVLNELPVPMVARYIRINPQSWFDNGSICMRMEILGCPLPDPNNYYHRRNEMTTTDDLDFKHHNYKEMRQLMKVVNEMCPNITRIYNIGKSHQGLKLYAVEISDHPGEHEVGEPEFHYIAGAHGNEVLGRELLLLLVQFVCQEYLARNARIVHLVEETRIHVLPSLNPDGYEKAYEGGSELGGWSLGRWTHDGIDINNNFPDLNTLLWEAEDRQNVPRKVPNHYIAIPEWFLSENATVAAETRAVIAWMEKIPFVLGGNLQGGELVVAYPYDLVRSPWKTQEHTPTPDDHVFRWLAYSYASTHRLMTDARRRVCHTEDFQKEEGTVNGASWHTVAGSLNDFSYLHTNCFELSIYVGCDKYPHESQLPEEWENNRESLIVFMEQVHRGIKGLVRDSHGKGIPNAIISVEGINHDIRTANDGDYWRLLNPGEYVVTAKAEGFTASTKNCMVGYDMGATRCDFTLSKTNMARIREIMEKFGKQPVSLPARRLKLRGQKRRQRG

SEQ ID NO: 3480 - protein, 515 aa, Homo sapiens
MAWPYFLDCHRYFTREDEGCYDPLEKLRGGLEADEALPSGLPPTFIRFSHHSYAQMVRVLRRTASRCAHVARTYSIGRSFDGRELLVIEFSSRPGQHELMEPEVKLIGNIHGNEVAGREMLIYLAQYLCSEYLLGNPRIQRLLNTTRIHLLPSMNPDGYEVAAAEGAGYNGWTSGRQNAQNLDLNRNFPDLTSEYYRLAETRGARSDHIPIPQHYWWGKVAPETKAIMKWMQTIPFVLSASLHGGDLVVSYPFDFSKHPQEEKMFSPTPDEKMFKLLSRAYADVHPMMMDRSENRCGGNFLKRGSIINGADWYSFTGGMSDFNYLHTNCFEITVELGCVKFPPEEALYILWQHNKESLLNFVETVHRGIKGVVTDKFGKPVKNARISVKGIRHDITTAPDGDYWRLLPPGIHIVIAQAPGYAKVIKKVIIPARMKRAGRVDFILQPLGMGPKNFIHGLRRTGPHDPLGGASSLGEATEPDPLRARRQPSADGSKPWWWSYFTSLSTHRPRWLLKY

SEQ ID NO: 3481 - protein, 641 aa, Homo sapiens
MPPPLPLLLLTVLVVAAARPGCEFERNPAATCVDLQLRTCSDAAYNHTTFPNLLQHRSWEVVEASSEYILLSVLHQLLEGQCNPDLRLLGCAVLAPRCEGGWVRRPCRHICEGLREVCQPAFDAIDMAWPYFLDCHRYFTREDEGCYDPLEKLRGGLEADEALPSGLPPTFIRFSHHSYAQMVRVLRRTASRCAHVARTYSIGRSFDGRELLVIEFSSRPGQHELMEPEVKLIGNIHGNEVAGREMLIYLAQYLCSEYLLGNPRIQRLLNTTRIHLLPSMNPDGYEVAAAEGAGYNGWTSGRQNAQNLDLNRNFPDLTSEYYRLAETRGARSDHIPIPQHYWWGKVAPETKAIMKWMQTIPFVLSASLHGGDLVVSYPFDFSKHPQEEKMFSPTPDEKMFKLLSRAYADVHPMMMDRSENRCGGNFLKRGSIINGADWYSFTGGMSDFNYLHTNCFEITVELGCVKFPPEEALYILWQHNKESLLNFVETVHRGIKGVVTDKFGKPVKNARISVKGIRHDITTAPDGDYWRLLPPGIHIVIAQAPGYAKVIKKVIIPARMKRAGRVDFILQPLGMGPKNFIHGLRRTGPHDPLGGASSLGEATEPDPLRARRQPSADGSKPWWWSYFTSLSTHRPRWLLKY

SEQ ID NO: 3482 - protein, 652 aa, Homo sapiens
MPPPLPLLLLTVLVVAAARPGCEFERNPAGECHRPPAADSATCVDLQLRTCSDAAYNHTTFPNLLQHRSWEVVEASSEYILLSVLHQLLEGQCNPDLRLLGCAVLAPRCEGGWVRRPCRHICEGLREVCQPAFDAIDMAWPYFLDCHRYFTREDEGCYDPLEKLRGGLEADEALPSGLPPTFIRFSHHSYAQMVRVLRRTASRCAHVARTYSIGRSFDGRELLVIEFSSRPGQHELMEPEVKLIGNIHGNEVAGREMLIYLAQYLCSEYLLGNPRIQRLLNTTRIHLLPSMNPDGYEVAAAEGAGYNGWTSGRQNAQNLDLNRNFPDLTSEYYRLAETRGARSDHIPIPQHYWWGKVAPETKAIMKWMQTIPFVLSASLHGGDLVVSYPFDFSKHPQEEKMFSPTPDEKMFKLLSRAYADVHPMMMDRSENRCGGNFLKRGSIINGADWYSFTGGMSDFNYLHTNCFEITVELGCVKFPPEEALYILWQHNKESLLNFVETVHRGIKGVVTDKFGKPVKNARISVKGIRHDITTAPDGDYWRLLPPGIHIVIAQAPGYAKVIKKVIIPARMKRAGRVDFILQPLGMGPKNFIHGLRRTGPHDPLGGASSLGEATEPDPLRARRQPSADGSKPWWWSYFTSLSTHRPRWLLKY

SEQ ID NO: 3483 - protein, 69 aa, Homo sapiens
MPPPLPLLLLTVLVVAAARPGCEFERNPAGECHRPPAADSGTVPGPPWLLFCRRAAAPTLSEHFRQLNP

SEQ ID NO: 3484 - protein, 388 aa, Homo sapiens
IGTYLNYECRPGYSGRPFSIICLKNSVWTSAKDKCKRKSCRNPPDPVNGMAHVIKDIQFRSQIKYSCPKGYRLIGSSSATCIISGNTVIWDNKTPVCDRIICGLPPTIANGDFTSISREYFHYGSVVTYHCNLGSRGKKVFELVGEPSIYCTSKDDQVGIWSGPAPQCIIPNKCTPPNVENGILVSDNRSLFSLNEVVEFRCQPGFGMKGPSHVKCQALNKWEPELPSCSRVCQPPPDVLHAERTQRDKDNFSPGQEVFYSCEPGYDLRGSTYLHCTPQGDWSPAAPRCEVKSCDDFLGQLPNGHVLFPLNLQLGAKVDFVCDEGFQLKGSSASYCVLAGMESLWNSSVPVCERKSCETPPVPVNGMVHVITDIHVGSRINYSCTTGF

SEQ ID NO: 3485 - protein, 569 aa, Homo sapiens
MAPPVRLERPFPSRRFPGLLLAALVLLLSSFSDQCNVPEWLPFARPTNLTDDFEFPIGTYLNYECRPGYSGRPFSIICLKNSVWTSAKDKCKRKSCRNPPDPVNGMAHVIKDIQFRSQIKYSCPKGYRLIGSSSATCIISGNTVIWDNKTPVCDRIICGLPPTIANGDFTSISREYFHYGSVVTYHCNLGSRGKKVFELVGEPSIYCTSKDDQVGIWSGPAPQCIIPNKCTPPNVENGILVSDNRSLFSLNEVVEFRCQPGFGMKGPSHVKCQALNKWEPELPSCSRVCQPPPDVLHAERTQRDKDNFSPGQEVFYSCEPGYDLRGSTYLHCTPQGDWSPAAPRCEVKSCDDFLGQLPNGHVLFPLNLQLGAKVDFVCDEGFQLKGSSASYCVLAGMESLWNSSVPVCERKSCETPPVPVNGMVHVITDIHVGSRINYSCTTGHRLIGHSSAECILSGNTAHWSMKPPICQQIFCPNPPAILNGRHTGTPLGDIPYGKEVSYTCDPHPDRGMTFNLIGESTIRRTSEPHGNGVWSSPAPRCELPVGAGSHDALIVGKFYEVFAEEFCHL

SEQ ID NO: 3486 - protein, 1176 aa, Homo sapiens
MALARPGTPDPQALASVLLLLLWAPALSLLAGTVPSEPPSACASDPCAPGTECQATESGGYTCGPMEPRGCATQPCHHGALCVPQGPDPTGFRCYCVPGFQGPRCELDIDECASRPCHHGATCRNLADRYECHCPLGYAGVTCEMEVDECASAPCLHGGSCLDGVGSFRCVCAPGYGGTRCQLDLDECQSQPCAHGGTCHDLVNGFRCDCAGTGYEGTHCEREVLECASAPCEHNASCLEGLGSFRCLCWPGYSGELCEVDEDECASSPCQHGGRCLQRSDPALYGGVQAAFPGAFSFRHAAGFLCHCPPGFEGADCGVEVDECASRPCLNGGHCQDLPNGFQCHCPDGYAGPTCEEDVDECLSDPCLHGGTCSDTVAGYICRCPETWGGRDCSVQLTGCQGHTCPLAATCIPIFESGVHSYVCHCPPGTHGPFCGQNTTFSVMAGSPIQASVPAGGPLGLALRFRTTLPAGTLATRNDTKESLELALVAATLQATLWSYSTTVLVLRLPDLALNDGHWHQVEVVLHLATLELRLWHEGCPARLCVASGPVALASTASATPLPAGISSAQLGDATFAGCLQDVRVDGHLLLPEDLGENVLLGCERREQCRPLPCVHGGSCVDLWTHFRCDCARPHRGPTCADEIPAATFGLGGAPSSASFLLQELPGPNLTVSFLLRTRESAGLLLQFANDSAAGLTVFLSEGRIRAEVPGSPAVVLPGRWDDGLRHLVMLSFGPDQLQDLGQHVHVGGRLLAADSQPWGGPFRGCLQDLRLDGCHLPFFPLPLDNSSQPSELGGRQSWNLTAGCVSEDMCSPDPCFNGGTCLVTWNDFHCTCPANFTGPTCAQQLWCPGQPCLPPATCEEVPDGFVCVAEATFREGPPAAFSGHNASSGRLLGGLSLAFRTRDSEAWLLRAAAGALEGVWLAVRNGSLAGGVRGGHGLPGAVLPIPGPRVADGAWHRVRLAMERPAATTSRWLLWLDGAATPVALRGLASDLGFLQGPGAVRILLAENFTGCLGRVALGGLPLPLARPRPGAAPGAREHFASWPGTPAPILGCRGAPVCAPSPCLHDGACRDLFDAFACACGPGWEGPRCEAHVDPCHSAPCARGRCHTHPDGRFECRCPPGFGGPRCRWDGWAGGWAANAPWGYGGAEKSARSVDESLPFPGPHVLICDMRRTV

SEQ ID NO: 3487 - protein, 1285 aa, Homo sapiens
MALARPGTPDPQALASVLLLLLWAPALSLLAGTVPSEPPSACASDPCAPGTECQATESGGYTCGPMEPRGCATQPCHHGALCVPQGPDPTGFRCYCVPGFQGPRCELDIDECASRPCHHGATCRNLADRYECHCPLGYAGVTCEMEVDECASAPCLHGGSCLDGVGSFRCVCAPGYGGTRCQLDLDECQSQPCAHGGTCHDLVNGFRCDCAGTGYEGTHCEREVLECASAPCEHNASCLEGLGSFRCLCWPGYSGELCEVDEDECASSPCQHGGRCLQRSDPALYGGVQAAFPGAFSFRHAAGFLCHCPPGFEGADCGVEVDECASRPCLNGGHCQDLPNGFQCHCPDGYAGPTCEEDVDECLSDPCLHGGTCSDTVAGYICRCPETWGGRDCSVQLTGCQGHTCPLAATCIPIFESGVHSYVCHCPPGTHGPFCGQNTTFSVMAGSPIQASVPAGGPLGLALRFRTTLPAGTLATRNDTKESLELALVAATLQATLWSYSTTVLVLRLPDLALNDGHWHQVEVVLHLATLELRLWHEGCPARLCVASGPVALASTASATPLPAGISSAQLGDATFAGCLQDVRVDGHLLLPEDLGENVLLGCERREQCRPLPCVHGGSCVDLWTHFRCDCARPHRGPTCADEIPAATFGLGGAPSSASFLLQELPGPNLTVSFLLRTRESAGLLLQFANDSAAGLTVFLSEGRIRAEVPGSPAVVLPGRWDDGLRHLVMLSFGPDQLQDLGQHVHVGGRLLAADSQPWGGPFRGCLQDLRLDGCHLPFFPLPLDNSSQPSELGGRQSWNLTAGCVSEDMCSPDPCFNGGTCLVTWNDFHCTCPANFTGPTCAQQLWCPGQPCLPPATCEEVPDGFVCVAEATFREGPPAAFSGHNASSGRLLGGLSLAFRTRDSEAWLLRAAAGALEGVWLAVRNGSLAGGVRGGHGLPGAVLPIPGPRVADGAWHRVRLAMERPAATTSRWLLWLDGAATPVALRGLASDLGFLQGPGAVRILLAENFTGCLGRVALGGLPLPLARPRPGAAPGAREHFASWPGTPAPILGCRGAPVCAPSPCLHDGACRDLFDAFACACGPGWEGPRCEAHVDPCHSAPCARGRCHTHPDGRFECRCPPGFGGPRCRLPVPSKECSLNVTCLDGSPCEGGSPAANCSCLEGLAGQRCQVPTLPCEANPCLNGGTCRAAGGVSECICNARFSGQFCEVAKGLPLPLPFPLLEVAVPAACACLLLLLLGLLSGILAARKRRQSEGTYSPSQQEVAGARLEMDSVLKVPPEERLI

SEQ ID NO: 3488 - protein, 953 aa, Homo sapiens
MAMEPGALWTFLGHLWLLAGPTCEEDVDECLSDPCLHGGTCSDTVAGYICRCPETWGGRDCSVQLTGCQGHTCPLAATCIPIFESGVHSYVCHCPPGTHGPFCGQNTTFSVMAGSPIQASVPAGGPLGLALRFRTTLPAGTLATRNDTKESLELALVAATLQATLWSYSTTVLVLRLPDLALNDGHWHQVEVVLHLATLELRLWHEGCPARLCVASGPVALASTASATPLPAGISSAQLGDATFAGCLQDVRVDGHLLLPEDLGENVLLGCERREQCRPLPCVHGGSCVDLWTHFRCDCARPHRGPTCADEIPAATFGLGGAPSSASFLLQELPGPNLTVSFLLRTRESAGLLLQFANDSAAGLTVFLSEGRIRAEVPGSPAVVLPGRWDDGLRHLVMLSFGPDQLQDLGQHVHVGGRLLAADSQPWGGPFRGCLQDLRLDGCHLPFFPLPLDNSSQPSELGGRQSWNLTAGCVSEDMCSPDPCFNGGTCLVTWNDFHCTCPANFTGPTCAQQLWCPGQPCLPPATCEEVPDGFVCVAEATFREGPPAAFSGHNASSGRLLGGLSLAFRTRDSEAWLLRAAAGALEGVWLAVRNGSLAGGVRGGHGLPGAVLPIPGPRVADGAWHRVRLAMERPAATTSRWLLWLDGAATPVALRGLASDLGFLQGPGAVRILLAENFTGCLGRVALGGLPLPLARPRPGAAPGAREHFASWPGTPAPILGCRGAPVCAPSPCLHDGACRDLFDAFACACGPGWEGPRCEAHVDPCHSAPCARGRCHTHPDGRFECRCPPGFGGPRCRLPVPSKECSLNVTCLDGSPCEGGSPAANCSCLEGLAGQRCQVPTLPCEANPCLNGGTCRAAGGVSECICNARFSGQFCEVAKGLPLPLPFPLLEVAVPAACACLLLLLLGLLSGILAARKRRQSEGTYSPSQQEVAGARLEMDSVLKVPPEERLI

SEQ ID NO: 3489 - protein, 220 aa, Homo sapiens
MAGLSRGSARALLAALLASTLLALLVSPARGRGGRDHGDWDEASRLPPLPPREDAARVARFVTHVSDWGALATISTLEAVRGRPFADVLSLSDGPPGAGSGVPYFYLSPLQLSVSNLQENPYATLTMTLAQTNFCKKHGFDPQSPLCVHIMLSGTVTKVNETEMDIAKHSLFIRHPEMKTWPSSHNWFFAKLNITNIWVLDYFGGPKIVTPEEYYNVTVQ

SEQ ID NO: 3490 - protein, 290 aa, Homo sapiens
MSVRRGRRPARPGTRLSWLLCCSALLSPAAGYVIVSSVSWAVTNEVDEELDSASTEEAMPALLEDSGSIWQQSFPASAHKEDAHLRPRAGAARARPPPAPPGMFSYRREGGQTASAPPGPRLRAATARSLAHASVWGCLATVSTHKKIQGLPFGNCLPVSDGPFNNSTGIPFFYMTAKDPVVADLMKNPMASLMLPESEGEFCRKNIVDPEDPRCVQLTLTGQMIAVSPEEVEFAKQAMFSRHPGMRKWPRQYEWFFMKMRIEHIWLQKWYGGASSISREEYFKAVPRKA

SEQ ID NO: 3491 - protein, 422 aa, Homo sapiens
MAPWPPKGLVPAMLWGLSLFLNLPGPIWLQPSPPPQSSPPPQPHPCHTCRGLVDSFNKGLERTIRDNFGGGNTAWEEENLSKYKDSETRLVEVLEGVCSKSDFECHRLLELSEELVESWWFHKQQEAPDLFQWLCSDSLKLCCPAGTFGPSCLPCPGGTERPCGGYGQCEGEGTRGGSGHCDCQAGYGGEACGQCGLGYFEAERNASHLVCSACFGPCARCSGPEESNCLQCKKGWALHHLKCVDIDECGTEGANCGADQFCVNTEGSYECRDCAKACLGCMGAGPGRCKKCSPGYQQVGSKCLDVDECETEVCPGENKQCENTEGGYRCICAEGYKQMEGICVKEQIPGAFPILTDLTPETTRRWKLGSHPHSTYVKMKMQRDEATFPGLYGKQVAKLGSQSRQSDRGTRLIHSQQASSQR

SEQ ID NO: 3492 - protein, 420 aa, Homo sapiens
MAPWPPKGLVPAMLWGLSLFLNLPGPIWLQPSPPPQSSPPPQPHPCHTCRGLVDSFNKGLERTIRDNFGGGNTAWEEENLSKYKDSETRLVEVLEGVCSKSDFECHRLLELSEELVESWWFHKQQEAPDLFQWLCSDSLKLCCPAGTFGPSCLPCPGGTERPCGGYGQCEGEGTRGGSGHCDCQAGYGGEACGQCGLGYFEAERNASHLVCSACFGPCARCSGPEESNCLQCKKGWALHHLKCVDIDECGTEGANCGADQFCVNTEGSYECRDCAKACLGCMGAGPGRCKKCSPGYQQVGSKCLDVDECETEVCPGENKQCENTEGGYRCICAEGYKQMEGICVKEQIPESAGFFSEMTEDELVVLQQMFFGIIICALATLAAKGDLVFTAIFIGAVAAMTGYWLSERSDRVLEGFIKGR

SEQ ID NO: 3493 - protein, 420 aa, Homo sapiens; identical to SEQ ID NO: 3492

SEQ ID NO: 3494 - protein, 420 aa, Homo sapiens; identical to SEQ ID NO: 3492

SEQ ID NO: 3495 - protein, 101 aa, Homo sapiens
MAPWPPKGLVPAMLWGLSLFLNLPGPIWLQPSPPPQSSPPPQPHPCHTCRGLVDSFNKGLERTIRDNFGGGNTAWEEENLSKYKDSLSWGNREALRWLRAV

SEQ ID NO: 3496 - protein, 100 aa, Homo sapiens
  VARIANT 1: note = misc_feature - Xaa can be any naturally occurring amino acid
XPAHLSADIDECGTEGANCGADQFCVNTEGSYECRDCAKACLGCMGAGPGRCKKCSPGYQQMWMSVRQRCVRERTSSVKTPRAVIAASVPRATSRWKASV

SEQ ID NO: 3497 - protein, 229 aa, Homo sapiens
MRLPRRAALGLLPLLLLLPPAPEAAKKPTPCHRCRGLVDKFNQGMVDTAKKNFGGGNTAWEEKTLSKYESSEIRLLEILEGLCESSDFECNQMLEAQEEHLEAWWLQLKSEYPDLFEWFCVKTLKVCCSPGTYGPDCLACQGGSQRPCSGNGHCSGDGSRQGDGSCRCHMGYQGPLCTDCMDGYFSSLRNETHSICTACDESCKTCSGLTNRDCGECEVGWVLDEGACV

SEQ ID NO: 3498 - protein, 353 aa, Homo sapiens
MRLPRRAALGLLPLLLLLPPAPEAAKKPTPCHRCRGLVDKFNQGMVDTAKKNFGGGNTAWEEKTLSKYESSEIRLLEILEGLCESSDFECNQMLEAQEEHLEAWWLQLKSEYPDLFEWFCVKTLKVCCSPGTYGPDCLACQGGSQRPCSGNGHCSGDGSRQGDGSCRCHMGYQGPLCTDCMDGYFSSLRNETHSICTACDESCKTCSGLTNRDCGECEVGWVLDEGACVDVDECAAEPPPCSAAQFCKNANGSYTCEECDSSCVGCTGEGPGNCKECISGYAREHGQCADVDECSLAEKTCVRKNENCYNTPGSYVCVCPDGFEETEDACVPPAEAEATEGESPTQLPSREDL

SEQ ID NO: 3499 - protein, 321 aa, Homo sapiens
MRLPRRAALGLLPLLLLLPPAPEAAKKPTPCHRCRGLVDKFNQGMVDTAKKNFGGGNTAWEEKTLSKYESSEIRLLEILEGLCESSDFECNQMLEAQEEHLEAWWLQLKSEYPDLFEWFCVKTLKVCCSPGTYGPDCLACQGGSQRPCSGNGHCSGDGSRQGDGSCRCHMGYQGPLCTDCMDGYFSSLRNETHSICTACDESCKTCSGLTNRDCGECEVGWVLDEGACVDVDECAAEPPPCSAAQFCKNANGSYTCEDVDECSLAEKTCVRKNENCYNTPGSYVCVCPDGFEETEDACVPPAEAEATEGESPTQLPSREDL

SEQ ID NO: 3500 - protein, 325 aa, Homo sapiens
MRLPRRAALGLLPLLLLLPPAPEAAKKPTPCHRCRGLVDKFNQGMVDTAKKNFGGGNTAWEEKTLSKYESSEIRLLEILEGLCESSDFECNQMLEAQEEHLEAWWLQLKSEYPDLFEWFCVKTLKVCCSPGTYGPDCLACQGGSQRPCSGNGHCSGDGSRQGDGSCRCHMGYQGPLCTDCMDGYFSSLRNETHSICTACDESCKTCSGLTNRDCGECEVGWVLDEGACVECDSSCVGCTGEGPGNCKECISGYAREHGQCADVDECSLAEKTCVRKNENCYNTPGSYVCVCPDGFEETEDACVPPAEAEATEGESPTQLPSREDL

SEQ ID NO: 3501 - protein, 402 aa, Homo sapiens
MRLPRRAALGLLPLLLLLPPAPEAAKKPTPCHRCRGLVDKFNQGMVDTAKKNFGGGNTAWEEKTLSKYESSEIRLLEILEGLCESSDFECNQMLEAQEEHLEAWWLQLKSEYPDLFEWFCVKTLKVCCSPGTYGPDCLACQGGSQRPCSGNGHCSGDGSRQGDGSCRCHMGYQGPLCTDCMDGYFSSLRNETHSICTVRTGLSDSYPPCCLSLGCWRGVGHAWIRGRNTHTQPGYSSRVWIAAFSPACDESCKTCSGLTNRDCGECEVGWVLDEGACVDVDECAAEPPPCSAAQFCKNANGSYTCEECDSSCVGCTGEGPGNCKECISGYAREHGQCADVDECSLAEKTCVRKNENCYNTPGSYVCVCPDGFEETEDACVPPAEAEATEGESPTQLPSREDL

SEQ ID NO: 3502 - protein, 196 aa, Homo sapiens
MRLPLLVSAGVLLVALLPCPPCRALLSRGPVPGARQAPQHPQPLDFFQPPPQSEQPQQPQARPVLLRMGEEYFLRLGNLNKSPAAPLSPASSLLAGGSGSRPSPEQATANFFRVLLQQLLLPRRSLDSPAALAERGARNALGGHQEAPERERRSEEPPISLDLTFHLLREVLEMARAEQLAQQAHSNRKLMEIIGK

SEQ ID NO: 3503 - protein, 322 aa, Homo sapiens
MSPNFKLQCHFILIFLTALRGESRYLELREAADYDPFLLFSANLKRELAGEQPYRRALRCLDMLSLQGQFTFTADRPQLHCAAFFISEPEEFITIHYDQVSIDCQGGDFLKVFDGWILKGEKFPSSQDHPLPSAERYIDFCESGLSRRSIRSSQNVAMIFFRVHEPGNGFTLTIKTDPNLFPCNVISQTPNGKFTLVVPHQHRNCSFSIIYPVVIKISDLTLGHVNGLQLKKSSAGCEGIGDFVELLGGTGLDPSKMTPLADLCYPFHGPAQMKVGCDNTVVRMVSSGKHVNRVTFEYRQLEPYELENPNGNSIGEFCLSGL

SEQ ID NO: 3504 - protein, 238 aa, Homo sapiens
MSPNFKLQCHFILIFLTALRGESRYLELREAADYDPFLLFSANLKRELAGEQPYRRALRCLDMLSLQGQFTFTADRPQLHCAAFFISEPEEFITIHYDQVSIDCQGGDFLKVFDGWILKGEKFPSSQDHPLPSAERYIDFCESGLSRRSIRSSQNVAMIFFRVHEPGNGFTLTIKTDPNLFPCNVISQTPNGKFTLVVPHQHRNCSFSIIYPVVIKISDLTLGHVNGLQLKVSCLLVS

SEQ ID NO: 3505 - protein, 375 aa, Homo sapiens
MGGHPQLRLVKALLLLGLNPVSASLQDQHCESLSLASNISDNGYRECLANGSWAARVNYSECQEILNEEKKSKVHYHVAVIINYLGHCISLVALLVAFVLFLRLRSIRCLRNIIHWNLISAFILRNATWFVVQLTMSPEVHQSNVGWCRLVTAAYNYFHVTNFFWMFGEGCYLHTAIVLTYSTDRLRKWMFICIGWGVPFPIIVAWAIGKLYYDNEKCWFGKRPGVYTDYIYQGPMILVLLINFIFLFNIVRILMTKLRASTTSETIQYRKAVKATLVLLPLLGITYMLFFVNPGEDEVSRVVFIYFNSFLESFQGFFVSVFYCFLNSEVRSAIRKRWHRWQDKHSIRARVARAMSIPTSPTRVSFHSIKQSTAV

SEQ ID NO: 3506 - protein, 154 aa, Homo sapiens
MGGHPQLRLVKALLLLGLNPVSASLQDQHCESLSLASNISEKKQGALPCRSHHQLPGPLYLPGGPPGGLCPLSAAQEHPVPAKHHPLEPHLRLHPAQRHLVRGPANHEPRGPPEQRGLVQVGDSRLQLLPCDQLLLDVRRGLLPAHSHRAHLLH

SEQ ID NO: 3507 - protein, 430 aa, Homo sapiens
MGGHPQLRLVKALLLLGLNPVSASLQDQHCESLSLASNISGLQCNASVDLIGTCWPRSPAGQLVVRPCPAFFYGVRYNTTNNGYRECLANGSWAARVNYSECQEILNEEKKSKVHYHVAVIINYLGHCISLVALLVAFVLFLRLRPGCTHWGDQADGALEVGAPWSGAPFQVRRSIRCLRNIIHWNLISAFILRNATWFVVQLTMSPEVHQSNVGWCRLVTAAYNYFHVTNFFWMFGEGCYLHTAIVLTYSTDRLRKWMFICIGWGVPFPIIVAWAIGKLYYDNEKCWFGKRPGVYTDYIYQGPMILVLLINFIFLFNIVRILMTKLRASTTSETIQYRKAVKATLVLLPLLGITYMLFFVNPGEDEVSRVVFIYFNSFLESFQVRSAIRKRWHRWQDKHSIRARVARAMSIPTSPTRVSFHSIKQSTAV

SEQ ID NO: 3508 - protein, 444 aa, Homo sapiens
MGGHPQLRLVKALLLLGLNPVSASLQDQHCESLSLASNISGLQCNASVDLIGTCWPRSPAGQLVVRPCPAFFYGVRYNTTNNGYRECLANGSWAARVNYSECQEILNEEKKSKVHYHVAVIINYLGHCISLVALLVAFVLFLRLRPGCTHWGDQADGALEVGAPWSGAPFQVRRSIRCLRNIIHWNLISAFILRNATWFVVQLTMSPEVHQSNVGWCRLVTAAYNYFHVTNFFWMFGEGCYLHTAIVLTYSTDRLRKWMFICIGWGVPFPIIVAWAIGKLYYDNEKCWFGKRPGVYTDYIYQGPMILVLLINFIFLFNIVRILMTKLRASTTSETIQYRKAVKATLVLLPLLGITYMLFFVNPGEDEVSRVVFIYFNSFLESFQGFFVSVFYCFLNSEVRSAIRKRWHRWQDKHSIRARVARAMSIPTSPTRVSFHSIKQSTAV

SEQ ID NO: 3509 - protein, 415 aa, Homo sapiens
MGGHPQLRLVKALLLLGLNPVSASLQDQHCESLSLASNISGLQCNASVDLIGTCWPRSPAGQLVVRPCPAFFYGVRYNTTNNGYRECLANGSWAARVNYSECQEILNEEKKSKVHYHVAVIINYLGHCISLVALLVAFVLFLRLRSIRCLRNIIHWNLISAFILRNATWFVVQLTMSPEVHQSNVGWCRLVTAAYNYFHVTNFFWMFGEGCYLHTAIVLTYSTDRLRKWMFICIGWGVPFPIIVAWAIGKLYYDNEKCWFGKRPGVYTDYIYQGPMILVLLINFIFLFNIVRILMTKLRASTTSETIQYRKAVKATLVLLPLLGITYMLFFVNPGEDEVSRVVFIYFNSFLESFQGFFVSVFYCFLNSEVRSAIRKRWHRWQDKHSIRARVARAMSIPTSPTRVSFHSIKQSTAV

SEQ ID NO: 3510 - protein, 401 aa, Homo sapiens
MGGHPQLRLVKALLLLGLNPVSASLQDQHCESLSLASNISGLQCNASVDLIGTCWPRSPAGQLVVRPCPAFFYGVRYNTTNNGYRECLANGSWAARVNYSECQEILNEEKKSKVHYHVAVIINYLGHCISLVALLVAFVLFLRLRSIRCLRNIIHWNLISAFILRNATWFVVQLTMSPEVHQSNVGWCRLVTAAYNYFHVTNFFWMFGEGCYLHTAIVLTYSTDRLRKWMFICIGWGVPFPIIVAWAIGKLYYDNEKCWFGKRPGVYTDYIYQGPMILVLLINFIFLFNIVRILMTKLRASTTSETIQYRKAVKATLVLLPLLGITYMLFFVNPGEDEVSRVVFIYFNSFLESFQVRSAIRKRWHRWQDKHSIRARVARAMSIPTSPTRVSFHSIKQSTAV

SEQ ID NO: 3511 - protein, 145 aa, Homo sapiens
MGGHPQLRLVKALLLLGLNPVSASLQDQHCESLSLASNISGLQCNASVDLIGTCWPRSPAGQLVVRPCPAFFYGVRYNTTNNGYRECLANGSWAARVNYSECQEILNEEKKSKVHYHVAVIINYLGHCISLVALLVAFVLFLRLS

SEQ ID NO: 3512 - protein, 314 aa, Homo sapiens
MVSATIPQKKSKVHYHVAVIINYLGHCISLVALLVAFVLFLRLRSIRCLRNIIHWNLISAFILRNATWFVVQLTMSPEVHQSNVGWCRLVTAAYNYFHVTNFFWMFGEGCYLHTAIVLTYSTDRLRKWMFICIGWGVPFPIIVAWAIGKLYYDNEKCWFGKRPGVYTDYIYQGPMILVLLINFIFLFNIVRILMTKLRASTTSETIQYRKAVKATLVLLPLLGITYMLFFVNPGEDEVSRVVFIYFNSFLESFQGFFVSVFYCFLNSEVRSAIRKRWHRWQDKHSIRARVARAMSIPTSPTRVSFHSIKQSTAV

SEQ ID NO: 3513 - protein, 52 aa, Homo sapiens
  VARIANT 1: note = misc_feature - Xaa can be any naturally occurring amino acid
XCWFGKRPGVYTDYIYQGPMILVLLEGCESHSGAAAPPGHHLHAVLRQSRGG

SEQ ID NO: 3514 - protein, 75 aa, Homo sapiens
  VARIANT 1: note = misc_feature - Xaa can be any naturally occurring amino acid
XCWFGKRPGVYTDYIYQGPMILVLLINFIFLFNIVRILMTKLRASTTSETIQYRASLCLCSTVSSIVRSVLPSGR

SEQ ID NO: 3515 - protein, 93 aa, Homo sapiens
  VARIANT 1: note = misc_feature - Xaa can be any naturally occurring amino acid
XSLASNISGLQCNASVDLIGTCWPRSPAGQLVVRPCPAFFYGVRYNTTNNGYRECLANGSWAARVNYSECQEILNEEEPGPQAQPGRAHRGGT

SEQ ID NO: 3516 - protein, 152 aa, Homo sapiens
YGVRYNTTNNGYRECLANGSWAARVNYSECQEILNEEKKSKVHYHVAVIINYLGHCISLVALLVAFVLFLRLRSIRCLRNIIHWNLISAFILRNATWFVVQLTMSPEVHQSNVVCPSPSLWPGPLGSCTTTMRSAGLAKGLGCTPTTSTRAP

SEQ ID NO: 3517 - protein, 411 aa, Homo sapiens
MDAALLHSLLEANCSLALAEELLLDGWGPPLDPEGPYSYCNTTLDQIGTCWPRSAAGALVERPCPEYFNGVKYNTTRNAYRECLENGTWASKINYSQCEPILDDKQRKYDLHYRIALVVNYLGHCVSVAALVAAFLLFLALRSIRCLRNVIHWNLITTFILRNVMWFLLQLVDHEVHESNEVWCRCITTIFNYFVVTNFFWMFVEGCYLHTAIVMTYSTERLRKCLFLFIGWCIPFPIIVAWAIGKLYYENEQCWFGKEPGDLVDYIYQGPIILVLLINFVFLFNIVRILMTKLRASTTSETIQYRKAVKATLVLLPLLGITYMLFFVNPGEDDLSQIMFIYFNSFLQSFQGFFVSVFYCFFNGEVRSAVRKRWHRWQDHHSLRVPMARAMSIPTSPTRISFHSIKQTAAV

SEQ ID NO: 3518 - protein, 387 aa, Homo sapiens
MDAALLHSLLEANCSLALAEELLLDGWGPPLDPEGPYSYCNTTLDQIGTCWPRSAAGALVERPCPEYFNGVKYNTTRNAYRECLENGTWASKINYSQCEPILDDKQRKYDLHYRIALVVNYLGHCVSVAALVAAFLLFLALRSIRCLRNVIHWNLITTFILRNVMWFLLQLVDHEVHESNEVWCRCITTIFNYFVVTNFFWMFVEGCYLHTAIVMTYSTERLRKCLFLFIGWCIPFPIIVAWAIGKLYYENEQCWFGKEPGDLVDYIYQGPIILVLLINFVFLFNIVRILMTKLRASTTSETIQYRKAVKATLVLLPLLGITYMLFFVNPGEDDLSQIMFIYFNSFLQSFQGFFVSVFYCFFNGESWVSKEAQAAGPHGREKPEQRW

SEQ ID NO: 3519 - protein, 397 aa, Homo sapiens
MGREPWPEDRDLGFPQLFCQGPYSYCNTTLDQIGTCWPRSAAGALVERPCPEYFNGVKYNTTRNAYRECLENGTWASKINYSQCEPILDDKQRKYDLHYRIALVVNYLGHCVSVAALVAAFLLFLALRSIRCLRNVIHWNLITTFILRNVMWFLLQLVDHEVHESNEVWCRCITTIFNYFVVTNFFWMFVEGCYLHTAIVMTYSTERLRKCLFLFIGWCIPFPIIVAWAIGKLYYENEQCWFGKEPGDLVDYIYQGPIILVLLINFVFLFNIVRILMTKLRASTTSETIQYRKAVKATLVLLPLLGITYMLFFVNPGEDDLSQIMFIYFNSFLQSFQGFFVSVFYCFFNGEVRSAVRKRWHRWQDHHSLRVPMARAMSIPTSPTRISFHSIKQTAAV

SEQ ID NO: 3520 - protein, 438 aa, Homo sapiens
MRGPSGPPGLLYVPHLLLCLLCLLPPPLQYAAGQSQMPKDQPLWALLEQYCHTIMTLTNLSGPYSYCNTTLDQIGTCWPRSAAGALVERPCPEYFNGVKYNTTRNAYRECLENGTWASKINYSQCEPILDDKQRKYDLHYRIALVVNYLGHCVSVAALVAAFLLFLALRSIRCLRNVIHWNLITTFILRNVMWFLLQLVDHEVHESNEVWCRCITTIFNYFVVTNFFWMFVEGCYLHTAIVMTYSTERLRKCLFLFIGWCIPFPIIVAWAIGKLYYENEQCWFGKEPGDLVDYIYQGPIILVLLINFVFLFNIVRILMTKLRASTTSETIQYRKAVKATLVLLPLLGITYMLFFVNPGEDDLSQIMFIYFNSFLQSFQGFFVSVFYCFFNGEVRSAVRKRWHRWQDHHSLRVPMARAMSIPTSPTRISFHSIKQTAAV

SEQ ID NO: 3521 - protein, 64 aa, Homo sapiens
MRGPSGPPGLLYVPHLLLCLLCLLPPPLQYAAGQSQMPKDQPLWALLEQYCHTIMTLTNLSGWS

SEQ ID NO: 3522 - protein, 64 aa, Homo sapiens; identical to SEQ ID NO: 3521

SEQ ID NO: 3523 - protein, 99 aa, Homo sapiens
MRGPSGPPGLLYVPHLLLCLLCLLPPPLQYAAGQSQMPKDQPLWALLEQYCHTIMTLTNLSVTPGAHSHSLSARGCGTRWTRHCSTACWRPTAAWRWLK

SEQ ID NO: 3524 - protein, 178 aa, Homo sapiens
MEIKHLLFLVAAACLLPMLSMKKKSARDQFNKLVTDLPNVQEEIVNIHNALRRRVVPPASNMLKMSWSEEAAQNARIFSKYCDMTESNPLERRLPNTFCGENMHMTSYPVSWSSVIGVWYSESTSFKHGEWTTTDDDITTDHYTQIVWATSYLIGCAIASCRQQGSPRYLYVCHYCHD

SEQ ID NO: 3525 - protein, 178 aa, Homo sapiens; identical to SEQ ID NO: 3524

SEQ ID NO: 3526 - protein, 249 aa, Homo sapiens
MEIKHLLFLVAAACLLPMLSMKKKSARDQFNKLVTDLPNVQEEIVNIHNALRRRVVPPASNMLKMSWSEEAAQNARIFSKYCDMTESNPLERRLPNTFCGENMHMTSYPVSWSSVIGVWYSESTSFKHGEWTTTDDDITTDHYTQIVWATSYLIGCAIASCRQQGSPRYLYVCHYCHEGNDPETKNEPYKTGVPCEACPSNCEDKLCTNPCIYYDEYFDCDIQVHYLGCNHSTTILFCKATCLCDTEIK

SEQ ID NO: 3527 - protein, 249 aa, Homo sapiens; identical to SEQ ID NO: 3526

SEQ ID NO: 3528 - protein, 243 aa, Homo sapiens
MALLPVLFLVTVLLPSLPAEGKDPAFTALLTTQLQVQREIVNKHNELRKAVSPPASNMLKMEWSREVTTNAQRWANKCTLQHSDPEDRKTSTRCGENLYMSSDPTSWSSAIQSWYDEILDFVYGVGPKSPNAVVGHYTQLVWYSTYQVGCGIAYCPNQDSLKYYYVCQYCPAGNNMNRKNTPYQQGTPCAGCPDDCDKGLCTNSCQYQDLLSNCDSLKNTAGCEHELLKEKCKATCLCENKIY

SEQ ID NO: 3529 - protein, 243 aa, Homo sapiens; identical to SEQ ID NO: 3528

SEQ ID NO: 3530 - protein, 278 aa, Homo sapiens
MALLPVLFLVTVLLPSLPAEGKDPAFTALLTTQLQVQREIVNKHNELRKAVSPPASNMLKMEWSREVTTNAQRWANKCTLQHSDPEDRKTSTRCGENLYMSSDPTSWSSAIQSWYDEILDFVYGVGPKSPNAVVGHYTQLVWYSTYQVGCGIAYCPNQDSLKYYYVCQYCPAMKTYLNKREGINVWKCFLRLRHFQLLRGEQLLTFSGNNMNRKNTPYQQGTPCAGCPDDCDKGLCTNSCQYQDLLSNCDSLKNTAGCEHELLKEKCKATCLCENKIY

SEQ ID NO: 3531 - protein, 276 aa, Homo sapiens
MKQILHPALETTACTNHFNADPCSTGFVFPAMTLFPVLLFLVAGLLPSFPANEDKDPAFTALLTTQTQVQREIVNKHNELRRAVSPPARNMLKMEWNKEAAANAQKWANQCNYRHSNPKDRMTSLKCGENLYMSSASSSWSQAIQSWFDEYNDFDFGVGPKTPNAVVGHYTQVVWYSSYLVGCGNAYCPNQKVLKYYYVCQYCPAGNWANRLYVPYEQGAPCASCPDNCDDGLCTNGCKYEDLYSNCKSLKLTLTCKHQLVRDSCKASCNCSNSIY

SEQ ID NO: 3532 - protein, 258 aa, Homo sapiens
MKQILHPALETTAMTLFPVLLFLVAGLLPSFPANEDKDPAFTALLTTQTQVQREIVNKHNELRRAVSPPARNMLKMEWNKEAAANAQKWANQCNYRHSNPKDRMTSLKCGENLYMSSASSSWSQAIQSWFDEYNDFDFGVGPKTPNAVVGHYTQVVWYSSYLVGCGNAYCPNQKVLKYYYVCQYCPAGNWANRLYVPYEQGAPCASCPDNCDDGLCTNGCKYEDLYSNCKSLKLTLTCKHQLVRDSCKASCNCSNSIY

SEQ ID NO: 3533 - protein, 191 aa, Homo sapiens
MKQILHPALETTDPCSTGFVFPAMTLFPVLLFLVAGLLPSFPANEDKDPAFTALLTTQTQVQREIVNKHNELRRAVSPPARNMLKMEWNKEAAANAQKWANQCNYRHSNPKDRMTSLKCGENLYMSSASSSWSQAIQSWFDEYNDFDFGVGPKTPNAVVGHYTQVVWYSSYLVGCGNAYCPNQKVLKYYYV

SEQ ID NO: 3534 - protein, 268 aa, Homo sapiens
MKQILHPALETTDPCSTGFVFPAMTLFPVLLFLVAGLLPSFPANEDKDPAFTALLTTQTQVQREIVNKHNELRRAVSPPARNMLKMEWNKEAAANAQKWANQCNYRHSNPKDRMTSLKCGENLYMSSASSSWSQAIQSWFDEYNDFDFGVGPKTPNAVVGHYTQVVWYSSYLVGCGNAYCPNQKVLKYYYVCQYCPAGNWANRLYVPYEQGAPCASCPDNCDDGLCTNGCKYEDLYSNCKSLKLTLTCKHQLVRDSCKASCNCSNSIY

SEQ ID NO: 3535 - protein, 112 aa, Homo sapiens
MCTHYTQIVWATTNKIGCAVNTCRKMTVWGEVWENAVYFVCNYSPKGNWIGEAPYKNGRPCSECPPSYGGSCRNNLCYREETYTPKPETDEMNEVETAPIPEENHVWLQPRV

SEQ ID NO: 3536 - protein, 210 aa, Homo sapiens
MCTHYTQIVWATTNKIGCAVNTCRKMTVWGEVWENAVYFVCNYSPKGNWIGEAPYKNGRPCSECPPSYGGSCRNNLCYREETYTPKPETDEMNEVETAPIPEENHVWLQPRVMRPTKPKKTSAVNYMTQVVRCDTKMKDRCKGSTCNRYQCPAGCLNHKAKIFGTLFYESSSSICRAAIHYGILDDKGGLVDITRNGKVPFFVKSERHGV

SEQ ID NO: 3537 - protein, 19 aa, Homo sapiens
MSCVLGGVIPLGLLFLVCG

SEQ ID NO: 3538 - protein, 120 aa, Homo sapiens
MSCVLGGVIPLGLLFLVCGSQGYLLPNVTLLEELLSKYQHNESHSRVRRAIPREDKEEILMLHNKLRGQVQPQASNMEYMTWDDELEKSAAAWASQCIWEHGPTSLLVSIGQNLGAHWGR

SEQ ID NO: 3539 - protein, 497 aa, Homo sapiens
MSCVLGGVIPLGLLFLVCGSQGYLLPNVTLLEELLSKYQHNESHSRVRRAIPREDKEEILMLHNKLRGQVQPQASNMEYMTWDDELEKSAAAWASQCIWEHGPTSLLVSIGQNLGAHWGRYRSPGFHVQSWYDEVKDYTYPYPSECNPWCPERCSGPMCTHYTQIVWATTNKIGCAVNTCRKMTVWGEVWENAVYFVCNYSPKGNWIGEAPYKNGRPCSECPPSYGGSCRNNLCYREETYTPKPETDEMNEVETAPIPEENHVWLQPRVMRPTKPKKTSAVNYMTQVVRCDTKMKDRCKGSTCNRYQCPAGCLNHKAKIFGTLFYESSSSICRAAIHYGILDDKGGLVDITRNGKVPFFVKSERHGVQSLSKYKPSSSFMVSKVKVQDLDCYTTVAQLCPFEKPATHCPRIHCPAHCKDEPSYWAPVFGTNIYADTSSICKTAVHAGVISNESGGDVDVMPVDKKKTYVGSLRNGVQSESLGTPRDGKAFRIFAVRQ

SEQ ID NO: 3540 - protein, 449 aa, Homo sapiens
MSCVLGGVIPLGLLFLVCGSQGYLLPNVTLLEELLSKYQHNESHSRVRRAIPREDKEEILMLHNKLRGQVQPQASNMEYMTWDDELEKSAAAWASQCIWEHGPTSLLVSIGQNLGAHWGRYRSPGFHVQSWYDEVKDYTYPYPSECNPWCPERCSGPMCTHYTQIVWATTNKIGCAVNTCRKMTVWGEVWENAVYFVCNYSPKGNWIGEAPYKNGRPCSECPPSYGGSCRNNLCYREETYTPKPETDEMNEVETAPIPEENHVWLQPRVMRPTKPKKTSAVNYMTQVVRCDTKMKDRCKGSTCNRYQCPAGCLNHKAKIFGTLFYESSSSICRAAIHYGILDDKGGLVDITRNGKVPFFVKSERHGVQSLSKYKPSSSFMVSKVKVQDLDCYTTVAQLCPFEKPATHCPRIHCPAHCKDEPSYWAPVFGTNIYADVSRMHFQQLSRKAC

SEQ ID NO: 3541 - protein, 496 aa, Homo sapiens
MSCVLGGVIPLGLLFLVCGSQGYLLPNVTLLEELLSKYQHNESHSRVRRAIPREDKEEILMLHNKLRGQVQPQASNMEYMTWDDELEKSAAAWASQCIWEHGPTSLLVSIGQNLGAHWGRYRSPGFHVQSWYDEVKDYTYPYPSECNPWCPERCSGPMCTHYTQIVWATTNKIGCAVNTCRKMTVWGEVWENAVYFVCNYSPKGNWIGEAPYKNGRPCSECPPSYGGSCRNNLCYRETYTPKPETDEMNEVETAPIPEENHVWLQPRVMRPTKPKKTSAVNYMTQVVRCDTKMKDRCKGSTCNRYQCPAGCLNHKAKIFGTLFYESSSSICRAAIHYGILDDKGGLVDITRNGKVPFFVKSERHGVQSLSKYKPSSSFMVSKVKVQDLDCYTTVAQLCPFEKPATHCPRIHCPAHCKDEPSYWAPVFGTNIYADTSSICKTAVHAGVISNESGGDVDVMPVDKKKTYVGSLRNGVQSESLGTPRDGKAFRIFAVRQ

SEQ ID NO: 3542 - protein, 43 aa, Homo sapiens
  VARIANT 1: note = misc_feature - Xaa can be any naturally occurring amino acid
XKTAVHAGVISNESGGDVDVMPVDKKKTYVGSLRNGVQSERNM

SEQ ID NO: 3543 - protein, 422 aa, Homo sapiens
MPAGRRGPAAQSARRPPPLLPLLLLLCVLGAPRAGSGAHTAVISPQDPTLLIGSSLLATCSVHGDPPGATAEGLYWTLNGRRLPPELSRVLNASTLALALANLNGSRQRSGDNLVCHARDGSILAGSCLYVGLPPEKPVNISCWSKNMKDLTCRWTPGAHGETFLHTNYSLKYKLRWYGQDNTCEEYHTVGPHSCHIPKDLALFTPYEIWVEATNRLGSARSDVLTLDILDVVTTDPPPDVHVSRVGGLEDQLSVRWVSPPALKDFLFQAKYQIRYRVEDSVDWKVVDDVSNQTSCRLAGLKPGTVYFVQVRCNPFGIYGSKKAGIWSEWSHPTAASTPRSERPGPGGGACEPRGGEPSSGPVRRELKQFLGWLKKHAYCSNLSFRLYDQWRAWMQKSHKTRNQDEGILPSGRRGTARGPAR

SEQ ID NO: 3544 - protein, 173 aa, Homo sapiens
  VARIANT 1: note = misc_feature - Xaa can be any naturally occurring amino acid
XQDNTCEEYHTVGPHSCHIPKDLALFTPYEIWVEATNRLGSARSDVLTLDILDVVTTDPPPDVHVSRVGGLEDQLSVRWVSPPALKDFLFQAKYQIRYRVEDSVDWKVVDDVSNQTSCRLAGLKPGTVYFVQVRCNPFGIYGSKKAGIWKRPGPGGGACEPRGGEPSSGPVRR

SEQ ID NO: 3545 - protein, 102 aa, Homo sapiens
MEKLLCFLVLTSLSHAFGQTDMSRKAFVFPKESDTSYVSLKAPLTKPLKAFTVCLHFYTELSSTHEINTIYLGGPFSPNVLNWRALKYEVQGEVFTKPQLWP

SEQ ID NO: 3546 - protein, 102 aa, Homo sapiens; identical to SEQ ID NO: 3545

SEQ ID NO: 3547 - protein, 91 aa, Homo sapiens
MEKLLCFLVLTSLSHAFGQTDMSRKAFVFPKESDTSYVSLKAPLTKPLKAFTVCLHFYTELSSTRGPNVLNWRALKYEVQGEVFTKPQLWP

SEQ ID NO: 3548 - protein, 224 aa, Homo sapiens
MEKLLCFLVLTSLSHAFGQTDMSRKAFVFPKESDTSYVSLKAPLTKPLKAFTVCLHFYTELSSTRGYSIFSYATKRQDNEILIFWSKDIGYSFTVGGSEILFEVPEVTVAPVHICTSWESASGIVEFWVDGKPRVRKSLKKGYTVGAEASIILGQEQDSFGGNFEGSQSLVGDIGNVNMWDFVLSPDEINTIYLGGPFSPNVLNWRALKYEVQGEVFTKPQLWP

SEQ ID NO: 3549 - protein, 46 aa, Homo sapiens
MWDFVLSPDEINTIYLGGPFSPNVLNWRALKYEVQGEVFTKPQLWP

SEQ ID NO: 3550 - protein, 645 aa, Homo sapiens
MAPSADPGMSRMLPFLLLLWFLPITEGSQRAEPMFTAVTNSVLPPDYDSNPTQLNYGVAVTDVDHDGDFEIVVAGYNGPNLVLKYDRAQKRLVNIAVDERSSPYYALRDRQGNAIGVTACDIDGDGREEIYFLNTNNAFSGVATYTDKLFKFRNNRWEDILSDEVNVARGVASLFAGRSVACVDRKGSGRYSIYIANYAYGNVGPDALIEMDPEASDLSRGILALRDVAAEAGVSKYTGGRGVSVGPILSSSASDIFCDNENGPNFLFHNRGDGTFVDAAASAGVDDPHQHGRGVALADFNRDGKVDIVYGNWNGPHRLYLQMSTHGKVRFRDIASPKFSMPSPVRTVITADFDNDQELEIFFNNIAYRSSSANRLFRVIRREHGDPLIEELNPGDALEPEGRGTGGVVTDFDGDGMLDLILSHGESMAQPLSVFRGNQGFNNNWLRVVPRTRFGAFARGAKVVLYTKKSGAHLRIIDGGSGYLCEMEPVAHFGLGKDEASSVEVTWPDGKMVSRNVASGEMNSVLEILYPRDEDTLQDPAPLECGQGFSQQENGHCMDTNECIQFPFVCPRDKPVCVNTYGSYRCRTNKKCSRGYEPNEDGTACVAQVAFLGGYSSAASRISEPLSRASYLSLGLGLCLQLYAL

SEQ ID NO: 3551 - protein, 661 aa, Homo sapiens
MAPSADPGMSRMLPFLLLLWFLPITEGSQRAEPMFTAVTNSVLPPDYDSNPTQLNYGVAVTDVDHDGDFEIVVAGYNGPNLVLKYDRAQKRLVNIAVDERSSPYYALRDRQGNAIGVTACDIDGDGREEIYFLNTNNAFSGVATYTDKLFKFRNNRWEDILSDEVNVARGVASLFAGRSVACVDRKGSGRYSIYIANYAYGNVGPDALIEMDPEASDLSRGILALRDVAAEAGVSKYTGGRGVSVGPILSSSASDIFCDNENGPNFLFHNRGDGTFVDAAASAGVDDPHQHGRGVALADFNRDGKVDIVYGNWNGPHRLYLQMSTHGKVRFRDIASPKFSMPSPVRTVITADFDNDQELEIFFNNIAYRSSSANRLFRVIRREHGDPLIEELNPGDALEPEGRGTGGVVTDFDGDGMLDLILSHGESMAQPLSVFRGNQGFNNNWLRVVPRTRFGAFARGAKVVLYTKKSGAHLRIIDGGSGYLCEMEPVAHFGLGKDEASSVEVTWPDGKMVSRNVASGEMNSVLEILYPRDEDTLQDPAPLECGQGFSQQENGHCMDTNECIQFPFVCPRDKPVCVNTYGSYRCRTNKKCSRGYEPNEDGTACVGTLGQSPGPRPTTPTAAAATAAAAAAAGAATAAPVLVDGDLNLGSVVKESCEPSC

SEQ ID NO: 3552 - protein, 637 aa, Homo sapiens
MSRMLPFLLLLWFLPITEGSQRAEPMFTAVTNSVLPPDYDSNPTQLNYGVAVTDVDHDGDFEIVVAGYNGPNLVLKYDRAQKRLVNIAVDERSSPYYALRDRQGNAIGVTACDIDGDGREEIYFLNTNNAFSGVATYTDKLFKFRNNRWEDILSDEVNVARGVASLFAGRSVACVDRKGSGRYSIYIANYAYGNVGPDALIEMDPEASDLSRGILALRDVAAEAGVSKYTGGRGVSVGPILSSSASDIFCDNENGPNFLFHNRGDGTFVDAAASAGVDDPHQHGRGVALADFNRDGKVDIVYGNWNGPHRLYLQMSTHGKVRFRDIASPKFSMPSPVRTVITADFDNDQELEIFFNNIAYRSSSANRLFRVIRREHGDPLIEELNPGDALEPEGRGTGGVVTDFDGDGMLDLILSHGESMAQPLSVFRGNQGFNNNWLRVVPRTRFGAFARGAKVVLYTKKSGAHLRIIDGGSGYLCEMEPVAHFGLGKDEASSVEVTWPDGKMVSRNVASGEMNSVLEILYPRDEDTLQDPAPLECGQGFSQQENGHCMDTNECIQFPFVCPRDKPVCVNTYGSYRCRTNKKCSRGYEPNEDGTACVAQVAFLGGYSSAASRISEPLSRASYLSLGLGLCLQLYAL

SEQ ID NO: 3553 - protein, 79 aa, Homo sapiens
  VARIANT 1: note = misc_feature - Xaa can be any naturally occurring amino acid
XDEDTLQDPAPLETPMNASSSHSCALETSPYVSTPMEATGAGPTRSAVGATSPTRMAQPAWKEPCYLVSAISLENRMLL

SEQ ID NO: 3554 - protein, 524 aa, Homo sapiens
YALRDRQGNAIGVTACDIDGDGREEIYFLNTNNAFSGVATYTDKLFKFRNNRWEDILSDEVNVARGVASLFAGRSVACVDRKGSGRYSIYIANYAYGNVGPDALIEMDPEASDLSRGILALRDVAAEAGVSKYTGGRGVSVGPILSSSASDIFCDNENGPNFLFHNRGDGTFVDAAASAGVDDPHQHGRGVALADFNRDGKVDIVYGNWNGPHRLYLQMSTHGKVRFRDIASPKFSMPSPVRTVITADFDNDQELEIFFNNIAYRSSSANRLFRVIRREHGDPLIEELNPGDALEPEGRGTGGVVTDFDGDGMLDLILSHGESMAQPLSVFRGNQGFNNNWLRVVPRTRFGAFARGAKVVLYTKKSGAHLRIIDGGSGYLCEMEPVAHFGLGKDEASSVEVTWPDGKMVSRNVASGEMNSVLEILYPRDEDTLQDPAPLETPMNASSSHSCALETSPYVSTPMEATGAGPTRSAVGATSPTRMAQPAWGLSASHRAPAPPPPPLLLPLPLLLPLLELPLLHRSS

SEQ ID NO: 3555 - protein, 401 aa, Homo sapiens
MEPGRRGAAALLALLCVACALRAGRAQYERYSFRSFPRDELMPLESAYRHALDKYSGEHWAESVGYLEISLRLHRLLRDSEAFCHRNCSAAPQPEPAAGLASYPELRLFGGLLRRAHCLKRCKQGLPAFRQSQPSREVLADFQRREPYKFLQFAYFKANNLPKAIAAAHTFLLKHPDDEMMKRNMAYYKSLPGAEDYIKDLETKSYESLFIRAVRAYNGENWRTSITDMELALPDFFKAFYECLAACEGSREIKDFKDFYLSIADHYVEVLECKIQCEENLTPVIGGYPVEKFVATMYHYLQFAYYKLNDLKNAAPCAVSYLLFDQNDKVMQQNLVYYQYHRDTWGLSDEHFQPRPEAVQFFNVTTLQKELYDFAKENIMDDDEGEVVEYVDDLLELEETS

SEQ ID NO: 3556 - protein, 358 aa, Homo sapiens
MEPGRRGAAALLALLCVACALRAGRAQYERYSFRSFPRDELMPLESAYRHALDKYSGEHWAESVGYLEISLRLHRLLRDSEAFCHRNCSAAPQPEPAAGLASYPELRLFGGLLRRAHCLKRCKQGLPAFRQSQPSREVLADFQRREPYKFLQFAYFKANNLPKAIAAAHTFLLKHPDDEMMKRNMAYYKSLPGAEDYIKDLETKSYESLFIRAVRAYNGENWRTSITDMELALPDFFKAFYECLAACEGSREIKDFKDFYLSIAVNDLKNAAPCAVSYLLFDQNDKVMQQNLVYYQYHRDTWGLSDEHFQPRPEAVQFFNVTTLQKELYDFAKENIMDDDEGEVVEYVDDLLELEETS

SEQ ID NO: 3557 - protein, 593 aa, Homo sapiens
MAATVATAAAVAPAPAPGTDSASSVHWFRKGLRLHDNPALLAAVRGARCVRCVYILDPWFAASSSVGINRWRFLLQSLEDLDTSLRKLNSRLFVVRGQPADVFPRLFKEWGVTRLTFEYDSEPFGKERDAAIMKMAKEAGVEVVTENSHTLYDLDRIIELNGQKPPLTYKRFQAIISRMELPKKPVGLVTSQQMESCRAEIQENHDETYGVPSLEELGFPTEGLGPAVWQGGETEALARLDKHLERKAWVANYERPRMNANSLLASPTGLSPYLRFGCLSCRLFYYRLWDLYKKVKRNSTPPLSLFGQLLWREFFYTAATNNPRFDRMEGNPICIQIPWDRNPEALAKWAEGKTGFPWIDAIMTQLRQEGWIHHLARHAVACFLTRGDLWVSWESGVRVFDELLLDADFSVNAGSWMWLSCSAFFQQFFHCYCPVGFGRRTDPSGDYIRRYLPKLKAFPSRYIYEPWNAPESIQKAAKCIIGVDYPRPIVNHAETSRLNIERMKQIYQQLSRYRGLCLLASVPSCVEDLSHPVAEPSSSQAGSMSSAGPRPLPSGPASPKRKLEAAEEPPGEELSKRARVAELPTPELPSKDA

SEQ ID NO: 3558 - protein, 614 aa, Homo sapiens
MGGVHVAYRGGAGVAGAVWTVMAATVATAAAVAPAPAPGTDSASSVHWFRKGLRLHDNPALLAAVRGARCVRCVYILDPWFAASSSVGINRWRFLLQSLEDLDTSLRKLNSRLFVVRGQPADVFPRLFKEWGVTRLTFEYDSEPFGKERDAAIMKMAKEAGVEVVTENSHTLYDLDRIIELNGQKPPLTYKRFQAIISRMELPKKPVGLVTSQQMESCRAEIQENHDETYGVPSLEELGFPTEGLGPAVWQGGETEALARLDKHLERKAWVANYERPRMNANSLLASPTGLSPYLRFGCLSCRLFYYRLWDLYKKVKRNSTPPLSLFGQLLWREFFYTAATNNPRFDRMEGNPICIQIPWDRNPEALAKWAEGKTGFPWIDAIMTQLRQEGWIHHLARHAVACFLTRGDLWVSWESGVRVFDELLLDADFSVNAGSWMWLSCSAFFQQFFHCYCPVGFGRRTDPSGDYIRRYLPKLKAFPSRYIYEPWNAPESIQKAAKCIIGVDYPRPIVNHAETSRLNIERMKQIYQQLSRYRGLCLLASVPSCVEDLSHPVAEPSSSQAGSMSSAGPRPLPSGPASPKRKLEAAEEPPGEELSKRARVAELPTPELPSKDA

SEQ ID NO: 3559 - protein, 614 aa, Homo sapiens; identical to SEQ ID NO: 3558

SEQ ID NO: 3560 - protein, 532 aa, Homo sapiens
MPAPPGRTHTWFLLQSLEDLDTSLRKLNSRLFVVRGQPADVFPRLFKEWGVTRLTFEYDSEPFGKERDAAIMKMAKEAGVEVVTENSHTLYDLDRIIELNGQKPPLTYKRFQAIISRMELPKKPVGLVTSQQMESCRAEIQENHDETYGVPSLEELGFPTEGLGPAVWQGGETEALARLDKHLERKAWVANYERPRMNANSLLASPTGLSPYLRFGCLSCRLFYYRLWDLYKKVKRNSTPPLSLFGQLLWREFFYTAATNNPRFDRMEGNPICIQIPWDRNPEALAKWAEGKTGFPWIDAIMTQLRQEGWIHHLARHAVACFLTRGDLWVSWESGVRVFDELLLDADFSVNAGSWMWLSCSAFFQQFFHCYCPVGFGRRTDPSGDYIRRYLPKLKAFPSRYIYEPWNAPESIQKAAKCIIGVDYPRPIVNHAETSRLNIERMKQIYQQLSRYRGLCLLASVPSCVEDLSHPVAEPSSSQAGSMSSAGPRPLPSGPASPKRKLEAAEEPPGEELSKRARVAELPTPELPSKDA

SEQ ID NO: 3561 - protein, 142 aa, Homo sapiens
IQKGTSVSQKVCEWKEPEELKQLLDLELRSQGESQKQILERCRAVIRYSVKTGHPRFFNQLFSGLDPHALAGRIITESLNTSQYTYEIAPVFVLMEEEVLRKLRALVGWSSGDGIFCPVSLLHPEGSCVSGTWHRQCPSGQG

SEQ ID NO: 3562 - protein, 135 aa, Homo sapiens
MADSEALPSLAGDPVAVEALLRAVFGVVVDEAIQKGTSVSQKCHYSIQKGAAFLGLGTDSVRVVKADERGKMVPEDLERQIGMAEAEGAVPFLVSATSGTTVLGAFDPLEAIADVCQRHGLWLHVDAAWGGSVLL

SEQ ID NO: 3563 - protein, 346 aa, Homo sapiens
MADSEALPSLAGDPVAVEALLRAVFGVVVDEAIQKGTSVSQKCHYSIQKGAAFLGLGTDSVRVVKADERGKMVPEDLERQIGMAEAEGAVPFLVSATSGTTVLGAFDPLEAIADVCQRHGLWLHVDAAWGGSVLLSQTHRHLLDGIQRADSVAWNPHKLLAAGLQCSALLLQDTSNLLKRCHGSQASYLFQQDKFYDVALDTGDKVVQCGRRVDCLKLWLMWKAQGDQGLERRIDQAFVLARYLVEEMKKREGFELVMEPEFVNVCFWFVPPSLRGKQESPDYHERLSKVAPVLKERMVKEGSMMIGYQPHGTRGNFFRVVVANSALTCADMDFLLNELERLGQDL

SEQ ID NO: 3564 - protein, 129 aa, Homo sapiens
MADSEALPSLAGDPVAVEALLRAVFGVVVDEAIQKGTSVSQKVCEWKEPEELKQLLDLELRSQGESQKQILERCRAVIRYSVKTGHPRFFNQLFSGLDPHALAGRIITESLNTSQYTYEIAPVFVLMEE

SEQ ID NO: 3565 - protein, 146 aa, Homo sapiens
MADSEALPSLAGDPVAVEALLRAVFGVVVDEAIQKGTSVSQKVCEWKEPEELKQLLDLELRSQGESQKQILERCRAVIRYSVKTGHPRFFNQLFSGLDPHALAGRIITESLNTSQYTYEIAPVFVLMEEEVLRKLRALVGWSSGDG

SEQ ID NO: 3566 - protein, 163 aa, Homo sapiens
MADSEALPSLAGDPVAVEALLRAVFGVVVDEAIQKGTSVSQKVCEWKEPEELKQLLDLELRSQGESQKQILERCRAVIRYSVKTGHPRFFNQLFSGLDPHALAGRIITESLNTSQYTYEIAPVFVLMEEEVLRKLRALVGWSSGDGIFCPGGSISNMYAVNLA

SEQ ID NO: 3567 - protein, 493 aa, Homo sapiens
MADSEALPSLAGDPVAVEALLRAVFGVVVDEAIQKGTSVSQKVCEWKEPEELKQLLDLELRSQGESQKQILERCRAVIRYSVKTGHPRFFNQLFSGLDPHALAGRIITESLNTSQYTYEIAPVFVLMEEEVLRKLRALVGWSSGDGIFCPGGSISNMYAVNLARYQRYPDCKQRGLRTLPPLALFTSKECHYSIQKGAAFLGLGTDSVRVVKADERGKMVPEDLERQIGMAEAEGAVPFLVSATSGTTVLGAFDPLEAIADVCQRHGLWLHVDAAWGGSVLLSQTHRHLLDGIQRADSVAWNPHKLLAAGLQCSALLLQDTSNLLKRCHGSQASYLFQQDKFYDVALDTGDKVVQCGRRVDCLKLWLMWKAQGDQGLERRIDQAFVLARYLVEEMKKREGFELVMEPEFVNVCFWFVPPSLRGKQESPDYHERLSKVAPVLKERMVKEGSMMIGYQPHGTRGNFFRVVVANSALTCADMDFLLNELERLGQDL

SEQ ID NO: 3568 - protein, 493 aa, Homo sapiens; identical to SEQ ID NO: 3567

SEQ ID NO: 3569 - protein, 267 aa, Homo sapiens
MADSEALPSLAGDPVAVEALLRAVFGVVVDEAIQKGTSVSQKVCEWKEPEELKQLLDLELRSQGESQKQILERCRAVIRYSVKTGHPRFFNQLFSGLDPHALAGRIITESLNTSQYTYEIAPVFVLMEEEVLRKLRALVGWSSGDGIFCPGGSISNMYAVNLARYQRYPDCKQRGLRTLPPLALFTSKEVGKRHRPNPGLLILISSHVTTPSRRELRFWDLAPTVSEWSRLMREGKWSPRIWRGRLVWPRLRVLCRSWSVPPLAPLC

SEQ ID NO: 3570 - protein, 267 aa, Homo sapiens; identical to SEQ ID NO: 3569

SEQ ID NO: 3571 - protein, 45 aa, Homo sapiens
MADSEALPSLAGDPVAVEALLRAVFGVVVDEAIQKGTSVSQKVHI

SEQ ID NO: 3572 - protein, 520 aa, Homo sapiens
MSIPLKSSFLLSYLCTLPPALLSREILMADSEALPSLAGDPVAVEALLRAVFGVVVDEAIQKGTSVSQKVCEWKEPEELKQLLDLELRSQGESQKQILERCRAVIRYSVKTGHPRFFNQLFSGLDPHALAGRIITESLNTSQYTYEIAPVFVLMEEEVLRKLRALVGWSSGDGIFCPGGSISNMYAVNLARYQRYPDCKQRGLRTLPPLALFTSKECHYSIQKGAAFLGLGTDSVRVVKADERGKMVPEDLERQIGMAEAEGAVPFLVSATSGTTVLGAFDPLEAIADVCQRHGLWLHVDAAWGGSVLLSQTHRHLLDGIQRADSVAWNPHKLLAAGLQCSALLLQDTSNLLKRCHGSQASYLFQQDKFYDVALDTGDKVVQCGRRVDCLKLWLMWKAQGDQGLERRIDQAFVLARYLVEEMKKREGFELVMEPEFVNVCFWFVPPSLRGKQESPDYHERLSKVAPVLKERMVKEGSMMIGYQPHGTRGNFFRVVVANSALTCADMDFLLNELERLGQDL

SEQ ID NO: 3573 - protein, 519 aa, Homo sapiens
  VARIANT 1: note = misc_feature - Xaa can be any naturally occurring amino acid
XLGDARRGAAGYLCTLPPALLSREILMADSEALPSLAGDPVAVEALLRAVFGVVVDEAIQKGTSVSQKVCEWKEPEELKQLLDLELRSQGESQKQILERCRAVIRYSVKTGHPRFFNQLFSGLDPHALAGRIITESLNTSQYTYEIAPVFVLMEEEVLRKLRALVGWSSGDGIFCPGGSISNMYAVNLARYQRYPDCKQRGLRTLPPLALFTSKECHYSIQKGAAFLGLGTDSVRVVKADERGKMVPEDLERQIGMAEAEGAVPFLVSATSGTTVLGAFDPLEAIADVCQRHGLWLHVDAAWGGSVLLSQTHRHLLDGIQRADSVAWNPHKLLAAGLQCSALLLQDTSNLLKRCHGSQASYLFQQDKFYDVALDTGDKVVQCGRRVDCLKLWLMWKAQGDQGLERRIDQAFVLARYLVEEMKKREGFELVMEPEFVNVCFWFVPPSLRGKQESPDYHERLSKVAPVLKERMVKEGSMMIGYQPHGTRGNFFRVVVANSALTCADMDFLLNELERLGQDL

SEQ ID NO: 3574 - protein, 150 aa, Homo sapiens
MGWGRLQRISLPSQCLSLLSTWLGSLLLLVCLLASRSITEEVSEYCSHMIGSGHLQSLQRLIDSQMETSCQITFEFVDQEQLKDPVCYLKKAFLLVQDIMEDTMRFRDNTPNAIAIVQLQELSLRLKSCFTKDYEEHDKACVRTFYETPL

SEQ ID NO: 3575 - protein, 113 aa, Homo sapiens
MIGSGHLQSLQRLIDSQMETSCQITFEFVDQEQLKDPVCYLKKAFLLVQDIMEDTMRFRDNTPNAIAIVQLQELSLRLKSCFTKDYEEHDKACVRTFYETPLQLLEKVKNVFN

SEQ ID NO: 3576 - protein, 285 aa, Homo sapiens
MTAPGAAGRCPPTIDSQMETSCQITFEFVDQEQLKDPVCYLKKAFLLVQDIMEDTMRFRDNTPNAIAIVQLQELSLRLKSCFTKDYEEHDKACVRTFYETPLQLLEKVKNVFNETKNLLDKDWNIFSKNCNNSFAECSSQDVVTKPDCNCLYPKAIPSSDPASVSPHQPLAPSMAPVAGLTWEDSEGTEGSSLLPGEQPLHTVDPGSAKQRPPRSTCQSFEPPETPVVKDSTIGGSPQPRPSVGAFNPGMEDILDSAMGTNWVPEEASGEASEIPVPQGTELSPS

SEQ ID NO: 3577 - protein, 119 aa, Homo sapiens
MTAPGAAGRCPPTTWLGSLLLLVCLLASRSITEEVSEYCSHMIGSGHLQSLQRLIDSQMETSCQITFEFVDQEQLKDPVCYLKKAFLLVQDIMEDTMRFRDNTPNAIAIVQLQELSLRL

SEQ ID NO: 3578 - protein, 554 aa, Homo sapiens
MTAPGAAGRCPPTTWLGSLLLLVCLLASRSITEEVSEYCSHMIGSGHLQSLQRLIDSQMETSCQITFEFVDQEQLKDPVCYLKKAFLLVQDIMEDTMRFRDNTPNAIAIVQLQELSLRLKSCFTKDYEEHDKACVRTFYETPLQLLEKVKNVFNETKNLLDKDWNIFSKNCNNSFAECSSQDVVTKPDCNCLYPKAIPSSDPASVSPHQPLAPSMAPVAGLTWEDSEGTEGSSLLPGEQPLHTVDPGSAKQRPPRSTCQSFEPPETPVVKDSTIGGSPQPRPSVGAFNPGMEDILDSAMGTNWVPEEASGEASEIPVPQGTELSPSRPGGGSMQTEPARPSNFLSASSPLPASAKGQQPADVTGTALPRVGPVRPTGQDWNHTPQKTDHPSALLRDPPEPGSPRISSLRPQGLSNPSTLSAQPQLSRSHSSGSVLPLGELEGRRSTRDRRSPAEPEGGPASEGAARPLPRFNSVPLTDTGHERQSEGSFSPQLQESVFHLLVPSVILVLLAVGGLLFYRWRRRSHQEPQRADSPLEQPEGSPLTQDDRQVELPV

SEQ ID NO: 3579 - protein, 554 aa, Homo sapiens; identical to SEQ ID NO: 3578

SEQ ID NO: 3580 - protein, 438 aa, Homo sapiens
MTAPGAAGRCPPTTWLGSLLLLVCLLASRSITEEVSEYCSHMIGSGHLQSLQRLIDSQMETSCQITFEFVDQEQLKDPVCYLKKAFLLVQDIMEDTMRFRDNTPNAIAIVQLQELSLRLKSCFTKDYEEHDKACVRTFYETPLQLLEKVKNVFNETKNLLDKDWNIFSKNCNNSFAECSSQDVVTKPDCNCLYPKAIPSSDPASVSPHQPLAPSMAPVAGLTWEDSEGTEGSSLLPGEQPLHTVDPGSAKQRPPRSTCQSFEPPETPVVKDSTIGGSPQPRPSVGAFNPGMEDILDSAMGTNWVPEEASGEASEIPVPQGTELSPSRPGGGSMQTEPARPSNFLSASSPLPASAKGQQPADVTGHERQSEGSFSPQLQESVFHLLVPSVILVLLAVGGLLFYRWRRRSHQEPQRADSPLEQPEGSPLTQDDRQVELPV

SEQ ID NO: 3581 - protein, 256 aa, Homo sapiens
MTAPGAAGRCPPTTWLGSLLLLVCLLASRSITEEVSEYCSHMIGSGHLQSLQRLIDSQMETSCQITFEFVDQEQLKDPVCYLKKAFLLVQDIMEDTMRFRDNTPNAIAIVQLQELSLRLKSCFTKDYEEHDKACVRTFYETPLQLLEKVKNVFNETKNLLDKDWNIFSKNCNNSFAECSSQGHERQSEGSFSPQLQESVFHLLVPSVILVLLAVGGLLFYRWRRRSHQEPQRADSPLEQPEGSPLTQDDRQVELPV

SEQ ID NO: 3582 - protein, 64 aa, Homo sapiens
AGSPWALGQRPFGAQGLKGPVCVAATAHADEKEALMSELKIMSHLGQHENIVNLLGACTHGGIS

SEQ ID NO: 3583 - protein, 972 aa, Homo sapiens
MGPGVLLLLLVATAWHGQGIPVIEPSVPELVVKPGATVTLRCVGNGSVEWDGPPSPHWTLYSDGSSSILSTNNATFQNTGTYRCTEPGDPLGGSAAIHLYVKDPARPWNVLAQEVVVFEDQDALLPCLLTDPVLEAGVSLVRVRGRPLMRHTNYSFSPWHGFTIHRAKFIQSQDYQCSALMGGRKVMSISIRLKVQKVIPGPPALTLVPAELVRIRGEAAQIVCSASSVDVNFDVFLQHNNTKLAIPQQSDFHNNRYQKVLTLNLDQVDFQHAGNYSCVASNVQGKHSTSMFFRVVESAYLNLSSEQNLIQEVTVGEGLNLKVMVEAYPGLQGFNWTYLGPFSDHQPEPKLANATTKDTYRHTFTLSLPRLKPSEAGRYSFLARNPGGWRALTFELTLRYPPEVSVIWTFINGSGTLLCAASGYPQPNVTWLQCSGHTDRCDEAQVLQVWDDPYPEVLSQEPFHKVTVQSLLTVETLEHNQTYECRAHNSVGSGSWAFIPISAGAHTHPPDEFLFTPVVVACMSIMALLLLLLLLLLYKYKQKPKYQVRWKIIESYEGNSYTFIDPTQLPYNEKWEFPRNNLQFGKTLGAGAFGKVVEATAFGLGKEDAVLKVAVKMLKSTAHADEKEALMSELKIMSHLGQHENIVNLLGACTHGGPVLVITEYCCYGDLLNFLRRKAEAMLGPSLSPGQDPEGGVDYKNIHLEKKYVRRDSGFSSQGVDTYVEMRPVSTSSNDSFSEQDLDKEDGRPLELRDLLHFSSQVAQGMAFLASKNCIHRDVAARNVLLTNGHVAKIGDFGLARDIMNDSNYIVKGNARLPVKWMAPESIFDCVYTVQSDVWSYGILLWEIFSLGLNPYPGILVNSKFYKLVKDGYQMAQPAFAPKNIYSIMQACWALEPTHRPTFQQICSFLQEQAQEDRRERDYTNLPSSSRSGGSGSSSSELEEESSSEHLTCCEQGDIAQPLLQPNNYQFC

SEQ ID NO: 3584 - protein, 671 aa, Homo sapiens
MGPGVLLLLLVATAWHGQGIPVIEPSVPELVVKPGATVTLRCVGNGSVEWDGPPSPHWTLYSDGSSSILSTNNATFQNTGTYRCTEPGDPLGGSAAIHLYVKDPARPWNVLAQEVVVFEDQDALLPCLLTDPVLEAGVSLVRVRGRPLMRHTNYSFSPWHGFTIHRAKFIQSQDYQCSALMGGRKVMSISIRLKVQKVIPGPPALTLVPAELVRIRGEAAQIVCSASSVDVNFDVFLQHNNTKLAIPQQSDFHNNRYQKVLTLNLDQVDFQHAGNYSCVASNVQGKHSTSMFFRVVESAYLNLSSEQNLIQEVTVGEGLNLKVMVEAYPGLQGFNWTYLGPFSDHQPEPKLANATTKDTYRHTFTLSLPRLKPSEAGRYSFLARNPGGWRALTFELTLRYPPEVSVIWTFINGSGTLLCAASGYPQPNVTWLQCSGHTDRCDEAQVLQVWDDPYPEVLSQEPFHKVTVQSLLTVETLEHNQTYECRAHNSVGSGSWAFIPISAGAHTHPPDEFLFTPVVVACMSIMALLLLLLLLLLYKYKQKPKYQVRWKIIESYEGNSYTFIDPTQLPYNEKWEFPRNNLQFGKTLGAGAFGKVVEATAFGLGKEDAVLKVAVKMLKSTAHADEKEALMSELKIMSHLGQHENIVNLLGACTHGGTVASPARVWTPMWR

SEQ ID NO: 3585 - protein, 306 aa, Homo sapiens
MGPGVLLLLLVATAWHGQGIPVIEPSVPELVVKPGATVTLRCVGNGSVEWDGPPSPHWTLYSDGSSSILSTNNATFQNTGTYRCTEPGDPLGGSAAIHLYVKDPARPWNVLAQEVVVFEDQDALLPCLLTDPVLEAGVSLVRVRGRPLMRHTNYSFSPWHGFTIHRAKFIQSQDYQCSALMGGRKVMSISIRLKVQKVIPGPPALTLVPAELVRIRGEAAQIVCSASSVDVNFDVFLQHNNTKLAIPQQSDFHNNRYQKVLTLNLDQVDFQHAGNYSCVASNVQGKHSTSMFFRVVGTPSPSLCPA

SEQ ID NO: 3586 - protein, 49 aa, Homo sapiens
MRHTNYSFSPWHGFTIHRAKFIQSQDYQCSALMGGRKVMSISIRLKVQK

SEQ ID NO: 3587 - protein, 144 aa, Homo sapiens
MWLQSLLLLGTVACSISAPARSPSPSTQPWEHVNAIQEARRLLNLSRDTAAEMNETVEVISEMFDLQEPTCLQTRLELYKQGLRGSLTKLKGPLTMMASHYKQHCPPTPETSCATQIITFESFKENLKDFLLVIPFDCWEPVQE

SEQ ID NO: 3588 - protein, 238 aa, Homo sapiens
MLLLVTSLLLCELPHPAFLLIPEKSDLRTVAPASSLNVRFDSRTMNLSWDCQENTTFSKCFLTDKKNRVVEPRLSNNECSCTFREICLHEGVTFEVHVNTSQRGFQQKLLYPNSGREGTAAQNFSCFIYNADLMNCTWARGPTAPRDVQYFLYIRNSKRRREIRCPYYIQDSGTHVGCHLDNLSGLTSRNYFLVNGTSREIGIQFFDSLLDTKKIERFNPPSNVTVRCNTTHCLVRWK

SEQ ID NO: 3589 - protein, 377 aa, Homo sapiens
MLLLVTSLLLCELPHPAFLLIPEKSDLRTVAPASSLNVRFDSRTMNLSWDCQENTTFSKCFLTDKKNRVVEPRLSNNECSCTFREICLHEGVTFEVHVNTSQRGFQQKLLYPNSGREGTAAQNFSCFIYNADLMNCTWARGPTAPRDVQYFLYIRNSKRRREIRCPYYIQDSGTHVGCHLDNLSGLTSRNYFLVNGTSREIGIQFFDSLLDTKKIERFNPPSNVTVRCNTTHCLVRWKQPRTYQKLSYLDFQYQLDVHRKNTQPGTENLLINVSGDLENRYNFPSSEPRAKHSVKIRAADVRILNWSSWSEAIEFDHLGGIHPRGRERLPRRGLDREGNYLRPRGCRNGMDISASATRGNCFLDDAVNLYIIFYVFI

SEQ ID NO: 3590 - protein, 410 aa, Homo sapiens
MLLLVTSLLLCELPHPAFLLIPEKSDLRTVAPASSLNVRFDSRTMNLSWDCQENTTFSKCFLTDKKNRVVEPRLSNNECSCTFREICLHEGVTFEVHVNTSQRGFQQKLLYPNSGREGTAAQNFSCFIYNADLMNCTWARGPTAPRDVQYFLYIRNSKRRREIRCPYYIQDSGTHVGCHLDNLSGLTSRNYFLVNGTSREIGIQFFDSLLDTKKIERFNPPSNVTVRCNTTHCLVRWKQPRTYQKLSYLDFQYQLDVHRKNTQPGTENLLINVSGDLENRYNFPSSEPRAKHSVKIRAADVRILNWSSWSEAIEFGSDDGNLGSVYIYVLLIVGTLVCGIVLGFLFKRFLRIQRLFPPVPQIKDKLNDNHEVEDEMGPQRHHRCGWNLYPTPGPSPGSGSSPRLGSESSL

SEQ ID NO: 3591 - protein, 333 aa, Homo sapiens
MLLLVTSLLLCELPHPAFLLIPEKSDLRTVAPASSLNVRFDSRTMNLSWDCQENTTFSKCFLTDKKNRVVEPRLSNNECSCTFREICLHEGVTFEVHVNTSQRGFQQKLLYPNSGREGTAAQNFSCFIYNADLMNCTWARGPTAPRDVQYFLYIRNSKRRREIRCPYYIQDSGTHVGCHLDNLSGLTSRNYFLVNGTSREIGIQFFDSLLDTKKIERFNPPSNVTVRCNTTHCLVRWKQPRTYQKLSYLDFQYQLDVHRKNTQPGTENLLINVSGDLENRYNFPSSEPRAKHSVKIRAADVRILNWSSWSEAIEFGSLGYSGCSRQFHRSKTN

SEQ ID NO: 3592 - protein, 400 aa, Homo sapiens
MLLLVTSLLLCELPHPAFLLIPEKSDLRTVAPASSLNVRFDSRTMNLSWDCQENTTFSKCFLTDKKNRVVEPRLSNNECSCTFREICLHEGVTFEVHVNTSQRGFQQKLLYPNSGREGTAAQNFSCFIYNADLMNCTWARGPTAPRDVQYFLYIRNSKRRREIRCPYYIQDSGTHVGCHLDNLSGLTSRNYFLVNGTSREIGIQFFDSLLDTKKIERFNPPSNVTVRCNTTHCLVRWKQPRTYQKLSYLDFQYQLDVHRKNTQPGTENLLINVSGDLENRYNFPSSEPRAKHSVKIRAADVRILNWSSWSEAIEFGSDDGNLGSVYIYVLLIVGTLVCGIVLGFLFKRFLRIQRLFPPVPQIKDKLNDNHEVEDEIIWEEFTPEEGKGYREEVLTVKEIT

SEQ ID NO: 3593 - protein, 400 aa, Homo sapiens; identical to SEQ ID NO: 3592

SEQ ID NO: 3594 - protein, 434 aa, Homo sapiens
MLLLVTSLLLCELPHPAFLLIPEKSDLRTVAPASSLNVRFDSRTMNLSWDCQENTTFSKCFLTDKKNRVVEPRLSNNECSCTFREICLHEGVTFEVHVNTSQRGFQQKLLYPNSGREGTAAQNFSCFIYNADLMNCTWARGPTAPRDVQYFLYIRNSKRRREIRCPYYIQDSGTHVGCHLDNLSGLTSRNYFLVNGTSREIGIQFFDSLLDTKKIERFNPPSNVTVRCNTTHCLVRWKQPRTYQKLSYLDFQYQLDVHRKNTQPGTENLLINVSGDLENRYNFPSSEPRAKHSVKIRAADVRILNWSSWSEAIEFGSHSVTQAGVQWHNLGSLQPPSPRLKRFSCLRLPGSDDGNLGSVYIYVLLIVGTLVCGIVLGFLFKRFLRIQRLFPPVPQIKDKLNDNHEVEDEIIWEEFTPEEGKGYREEVLTVKEIT

SEQ ID NO: 3595 - protein, 285 aa, Homo sapiens
MLLLVTSLLLCELPHPAFLLIPEKSDLRTVAPASSLNVRFDSRTMNLSWDCQENTTFSKCFLTDKKNRVVEPRLSNNECSCTFREICLHEGVTFEVHVNTSQRGFQQKLLYPNSGREGTAAQNFSCFIYNADLMNCTWARGPTAPRDVQYFLYIRNSKRRREIRCPYYIQDSGTHVGCHLDNLSGLTSRNYFLVNGTSREIGIQFFDSLLDTKKIERFNPPSNVTVRCNTTHCLVRWKQPRTYQKLSYLDFQYQLDVHRKNTQPGTENLLVLTTGTSALCTFMCS

SEQ ID NO: 3596 - protein, 400 aa, Homo sapiens; identical to SEQ ID NO: 3592

SEQ ID NO: 3597 - protein, 233 aa, Homo sapiens
MLLLVTSLLLCELPHPAFLLIPEKSDLRTVAPASSLNVRFDSRTMNLSWDCQENTTFSKCFLTDKKNRVVEPRLSNNECSCTFREICLHEGVTFEVHVNTSQRGFQQKLLYPNSGREGTAAQNFSCFIYNADLMNCTWARGPTAPRDVQYFLYIRNSKRRREIRCPYYIQDSGTHVGCHLDNLSGLTSRNYFLVNGTSREIGIQFFDSLLDTKKIGSLGYSGCSRQFHRSKTN

SEQ ID NO: 3598 - protein, 90 aa, Homo sapiens
MLLLVTSLLLCELPHPAFLLIPEKSDLRTVAPASSLNVRFDSRTMNLSWDCQENTTFSKCFLTDKKNRVVEPRMEFPSCCPDRTIAHQPA

SEQ ID NO: 3599 - protein, 267 aa, Homo sapiens
MNCTWARGPTAPRDVQYFLYIRNSKRRREIRCPYYIQDSGTHVGCHLDNLSGLTSRNYFLVNGTSREIGIQFFDSLLDTKKIERFNPPSNVTVRCNTTHCLVRWKQPRTYQKLSYLDFQYQLDVHRKNTQPGTENLLINVSGDLENRYNFPSSEPRAKHSVKIRAADVRILNWSSWSEAIEFGSDDGNLGSVYIYVLLIVGTLVCGIVLGFLFKRFLRIQRLFPPVPQIKDKLNDNHEVEDEIIWEEFTPEEGKGYREEVLTVKEIT

SEQ ID NO: 3600 - protein, 155 aa, Homo sapiens
MAGPATQSPMKLMALQLLLWHSALWTVQEATPLGPASSLPQSFLLKCLEQVRKIQGDGAALQEKLAGCLSQLHSGLFLYQGLLQALEGISPELGPTLDTLQLDVADFATTIWQQMEELGMAPALQPTQGAMPAFASAFQRRAGGVLVASHLQSFL

SEQ ID NO: 3601 - protein, 204 aa, Homo sapiens
MAGPATQSPMKLMALQLLLWHSALWTVQEATPLGPASSLPQSFLLKCLEQVRKIQGDGAALQEKLCATYKLCHPEELVLLGHSLGIPWAPLSSCPSQALQLAGCLSQLHSGLFLYQGLLQALEGISPELGPTLDTLQLDVADFATTIWQQMEELGMAPALQPTQGAMPAFASAFQRRAGGVLVASHLQSFLEVSYRVLRHLAQP

SEQ ID NO: 3602 - protein, 171 aa, Homo sapiens
MAGPATQSPMKLMALQLLLWHSALWTVQEATPLGPASSLPQSFLLKCLEQVRKIQGDGAALQEKLVSEAGCLSQLHSGLFLYQGLLQALEGISPELGPTLDTLQLDVADFATTIWQQMEELGMAPALQPTQGAMPAFASAFQRRAGGVLVASHLQSFLEVSYRVLRHLAQP

SEQ ID NO: 3603 - protein, 207 aa, Homo sapiens
MAGPATQSPMKLMALQLLLWHSALWTVQEATPLGPASSLPQSFLLKCLEQVRKIQGDGAALQEKLVSECATYKLCHPEELVLLGHSLGIPWAPLSSCPSQALQLAGCLSQLHSGLFLYQGLLQALEGISPELGPTLDTLQLDVADFATTIWQQMEELGMAPALQPTQGAMPAFASAFQRRAGGVLVASHLQSFLEVSYRVLRHLAQP

SEQ ID NO: 3604 - protein, 57 aa, Homo sapiens
MAGPATQSPMKLMVCHLQAVPPRGAGAARTLSGHPLGSPEQLPQPGPAAGRLLEPTP

SEQ ID NO: 3605 - protein, 164 aa, Homo sapiens
MSPEPALSPALQLLLWHSALWTVQEATPLGPASSLPQSFLLKCLEQVRKIQGDGAALQEKLAGCLSQLHSGLFLYQGLLQALEGISPELGPTLDTLQLDVADFATTIWQQMEELGMAPALQPTQGAMPAFASAFQRRAGGVLVASHLQSFLEVSYRVLRHLAQP

SEQ ID NO: 3606 - protein, 200 aa, Homo sapiens
MSPEPALSPALQLLLWHSALWTVQEATPLGPASSLPQSFLLKCLEQVRKIQGDGAALQEKLCATYKLCHPEELVLLGHSLGIPWAPLSSCPSQALQLAGCLSQLHSGLFLYQGLLQALEGISPELGPTLDTLQLDVADFATTIWQQMEELGMAPALQPTQGAMPAFASAFQRRAGGVLVASHLQSFLEVSYRVLRHLAQP

SEQ ID NO: 3607 - protein, 14 aa, Homo sapiens
MMMVRRGLLAWISR

SEQ ID NO: 3608 - protein, 53 aa, Homo sapiens
MMMVRRGLLAWISRVVVLLVLLCCAISVLYMLACTPKGDEEQLALPRANSPTG

SEQ ID NO: 3609 - protein, 96 aa, Homo sapiens
MMMVRRGLLAWISRVVVLLVLLCCAISVLYMLACTPKGDEEQLALPRANSPTGKEGYQAVLQEWEEQHRNYVSSLKRQIAQLKEELQERSEQLRNG

SEQ ID NO: 3610 - protein, 104 aa, Homo sapiens
MMMVRRGLLAWISRVVVLLVLLCCAISVLYMLACTPKGDEEQLALPRANSPTGKEGYQAVLQEWEEQHRNYVSSLKRQIAQLKEELQERSEQLRNGQYQASDAA

SEQ ID NO: 3611 - protein, 532 aa, Homo sapiens
MMMVRRGLLAWISRVVVLLVLLCCAISVLYMLACTPKGDEEQLALPRANSPTGKEGYQAVLQEWEEQHRNYVSSLKRQIAQLKEELQERSEQLRNGQYQASDAAGLGLDRSPPEKTQADLLAFLHSQVDKAEVNAGVKLATEYAAVPFDSFTLQKVYQLETGLTRHPEEKPVRKDKRDELVEAIESALETLNSPAENSPNHRPYTASDFIEGIYRTERDKGTLYELTFKGDHKHEFKRLILFRPFGPIMKVKNEKLNMANTLINVIVPLAKRVDKFRQFMQNFREMCIEQDGRVHLTVVYFGKEEINEVKGILENTSKAANFRNFTFIQLNGEFSRGKGLDVGARFWKGSNVLLFFCDVDIYFTSEFLNTCRLNTQPGKKVFYPVLFSQYNPGIIYGHHDAVPPLEQQLVIKKETGFWRDFGFGMTCQYRSDFINIGGFDLDIKGWGGEDVHLYRKYLHSNLIVVRTPVRGLFHLWHEKRCMDELTPEQYKMCMQSKAMNEASHGQLGMLVFRHEIEAHLRKQKQKTSSKKT

SEQ ID NO: 3612 - protein, 297 aa, Homo sapiens
MMMVRRGLLAWISRVVVLLVLLCCAISVLYMLACTPKGDEEQLALPRANSPTGKEGYQAVLQEWEEQHRNYVSSLKRQIAQLKEELQERSEQLRNGQYQASDAAGLGLDRSPPEKTQADLLAFLHSQVDKAEVNAGVKLATEYAAVPFDSFTLQKVYQLETGLTRHPEEKPVRKDKRDELVEAIESALETLNSPAENSPNHRPYTASDFIEGIYRTERDKGTLYELTFKGDHKHEFKRLILFRPFGPIMKVKNEKLNMANTLINVIVPLAKRVDKFRQFMQNFRPADEVFRCVPLSP

SEQ ID NO: 3613 - protein, 297 aa, Homo sapiens; identical to SEQ ID NO: 3612

SEQ ID NO: 3614 - protein, 532 aa, Homo sapiens; identical to SEQ ID NO: 3611

SEQ ID NO: 3615 - protein, 532 aa, Homo sapiens; identical to SEQ ID NO: 3611

SEQ ID NO: 3616 - protein, 217 aa, Homo sapiens
MAPGSRTSLLLAFALLCLPWLQEAGAVQTVPLSRLFDHAMLQAHRAHQLAIDTYQEFEETYIPKDQKYSFLHDSQTSFCFSDSIPTPSNMEETQQKSNLELLRISLLLIESWLEPVRFLRSMFANNLVYDTSDSDDYHLLKDLEEGIQTLMGRLEDGSRRTGQILKQTYSKFDTNSHNHDALLKNYGLLYCFRKDMDKVETFLRMVQCRSVEGSCGF

SEQ ID NO: 3617 - protein, 256 aa, Homo sapiens
MAPGSRTSLLLAFALLCLPWLQEAGAVQTVPLSRLFDHAMLQAHRAHQLAIDTYQEFEETYIPKDQKYSFLHDSQTSFCFSDSIPTPSNMEETQQKSNLELLRISLLLIESWLEPVRFLRSMFANNLVYDTSDSDDYHLLKDLEEGIQTLMGVRVAPGVTNPGTPLASRAGGEKYCCPLFSSKALTQENSPYSSFRLVNPPGLSLHPEGEGGKWINERGREQCPSAWPLLLFLHFAEAGRRQPPDWADPQADLQQV

SEQ ID NO: 3618 - protein, 122 aa, Homo sapiens
MAPGSRTSLLLAFALLCLPWLQEAGAVQTVPLSRLFDHAMLQAHRAHQLAIDTYQEFRLEDGSRRTGQILKQTYSKFDTNSHNHDALLKNYGLLYCFRKDMDKVETFLRMVQCRSVEGSCGF

SEQ ID NO: 3619 - protein, 128 aa, Homo sapiens
MEETQQKSNLELLRISLLLIESWLEPVRFLRSMFANNLVYDTSDSDDYHLLKDLEEGIQTLMGRLEDGSRRTGQILKQTYSKFDTNSHNHDALLKNYGLLYCFRKDMDKVETFLRMVQCRSVEGSCGF

SEQ ID NO: 3620 - protein, 160 aa, Homo sapiens
MAAGSRTSLLLAFALLCLPWLQEADSIPTPSNMEETQQKSNLELLRISLLLIESWLEPVRFLRSMFANNLVYDTSDSDDYHLLKDLEEGIQTLMGRLEDGSRRTGQILKQTYSKFDTNSHNHDALLKNYGLLYCFRKDMDKVETFLRMVQCRSVEGSCGF

SEQ ID NO: 3621 - protein, 217 aa, Homo sapiens
MAAGSRTSLLLAFALLCLPWLQEAGAVQTVPLSRLFDHAMLQAHRAHQLAIDTYQEFEETYIPKDQKYSFLHDSQTSFCFSDSIPTPSNMEETQQKSNLELLRISLLLIESWLEPVRFLRSMFANNLVYDTSDSDDYHLLKDLEEGIQTLMGRLEDGSRRTGQILKQTYSKFDTNSHNHDALLKNYGLLYCFRKDMDKVETFLRMVQCRSVEGSCGF

SEQ ID NO: 3622 - protein, 167 aa, Homo sapiens
MAAGSRTSLLLAFALLCLPWLQEAGAVQTVPLSRLFDHAMLQAHRAHQLAIDTYQEFEETYIPKDQKYSFLHDSQTSFCFSDSIPTPSNMEETQQKSNLELLRISLLLIESWLEPVRFLRSMFANNLVYDTSDSDDYHLLKDLEEGIQTLMGVRVAPGVANPGTPLA

SEQ ID NO: 3623 - protein, 122 aa, Homo sapiens
MAAGSRTSLLLAFALLCLPWLQEAGAVQTVPLSRLFDHAMLQAHRAHQLAIDTYQEFRLEDGSRRTGQILKQTYSKFDTNSHNHDALLKNYGLLYCFRKDMDKVETFLRMVQCRSVEGSCGF

SEQ ID NO: 3624 - protein, 128 aa, Homo sapiens; identical to SEQ ID NO: 3619

SEQ ID NO: 3625 - protein, 139 aa, Homo sapiens
MAADSIPTSSNMEETQQKSNLELLHISLLLIESRLEPVRFLRSTFTNNLVYDTSDSDDYHLLKDLEEGIQMLMGRLEDGSHLTGQTLKQTYSKFDTNSHNHDALLKNYGLLHCFRKDMDKVETFLRMVQCRSVEGSCGF

SEQ ID NO: 3626 - protein, 178 aa, Homo sapiens
MAADSIPTSSNMEETQQKSNLELLHISLLLIESRLEPVRFLRSTFTNNLVYDTSDSDDYHLLKDLEEGIQMLMGVRVAPGVPNPGSPLASRAGGEKHCCPLFSSQALTQENSPYSSFPLVNPPGLSLHPEGEGGKWINERGREQCPSAWSLLLLLHFAEAGRRQPPDWADPQADLQQV

SEQ ID NO: 3627 - protein, 160 aa, Homo sapiens
MAAGSRTSLLLAFALLCLPWLQEADSIPTSSNMEETQQKSNLELLHISLLLIESRLEPVRFLRSTFTNNLVYDTSDSDDYHLLKDLEEGIQMLMGRLEDGSHLTGQTLKQTYSKFDTNSHNHDALLKNYGLLHCFRKDMDKVETFLRMVQCRSVEGSCGF

SEQ ID NO: 3628 - protein, 222 aa, Homo sapiens
MAAGSRTSLLLAFALLCLPWLQEAGAVQTVPLSRLFKEAMLQAHRAHQLAIDTYQEFISSWGMEAYITKEQKYSFLHDSQTSFCFSDSIPTSSNMEETQQKSNLELLHISLLLIESRLEPVRFLRSTFTNNLVYDTSDSDDYHLLKDLEEGIQMLMGRLEDGSHLTGQTLKQTYSKFDTNSHNHDALLKNYGLLHCFRKDMDKVETFLRMVQCRSVEGSCGF

SEQ ID NO: 3629 - protein, 217 aa, Homo sapiens [sequence omitted]

SEQ ID NO: 3630 - protein, 128 aa, Homo sapiens
MEETQQKSNLELLHISLLLIESRLEPVRFLRSTFTNNLVYDTSDSDDYHLLKDLEEGIQMLMGRLEDGSHLTGQTLKQTYSKFDTNSHNHDALLKNYGLLHCFRKDMDKVETFLRMVQCRSVEGSCGF

SEQ ID NO: 3631 - protein, 167 aa, Homo sapiens
MEETQQKSNLELLHISLLLIESRLEPVRFLRSTFTNNLVYDTSDSDDYHLLKDLEEGIQMLMGVRVAPGVPNPGSPLASRAGGEKHCCPLFSSQALTQENSPYSSFPLVNPPGLSLHPEGEGGKWINERGREQCPSAWSLLLLLHFAEAGRRQPPDWADPQADLQQV

SEQ ID NO: 3632 - protein, 76 aa, Homo sapiens
KMESSISSSSEEQIRRMNENSHVQVPFQQLNQLAAYPYAVWYYPQIMQYVPFPPFSDISNPTAHENYEKNNVMLQW

SEQ ID NO: 3633 - protein, 185 aa, Homo sapiens
MRLLILTCLVAVALARPKLPLRYPERLQNPSESSEPIPLESREEYMNGMNRQRNILREKQTDEIKDTRNESTQNCVVAEPEKMESSISSSSEEMSLSKCAEQFCRLNEYNQLQLQAAHAQEQIRRMNENSHVQVPFQQLNQLAAYPYAVWYYPQIMQYVPFPPFSDISNPTAHENYEKNNVMLQW

SEQ ID NO: 3634 - protein, 177 aa, Homo sapiens
MRLLILTCLVAVALARPKLPLRYPERLQNPSESSEPIPLESREEYMNGMNRQRNILREKQTDEIKDTRNESTQNCVVAEPEKMESSISSSSEEQFCRLNEYNQLQLQAAHAQEQIRRMNENSHVQVPFQQLNQLAAYPYAVWYYPQIMQYVPFPPFSDISNPTAHENYEKNNVMLQW

SEQ ID NO: 3635 - protein, 169 aa, Homo sapiens
MRLLILTCLVAVALARPKLPLRYPERLQNPSESSEPIPLESREEYMNGMNRQRNILREKQTDEIKNCVVAEPEKMESSISSSSEEQFCRLNEYNQLQLQAAHAQEQIRRMNENSHVQVPFQQLNQLAAYPYAVWYYPQIMQYVPFPPFSDISNPTAHENYEKNNVMLQW

SEQ ID NO: 3636 - protein, 176 aa, Homo sapiens
MRLLILTCLVAVALARPKLPLRYPERLQNPSESSEPIPLESREEYMNGMNRRNILREKQTDEIKDTRNESTQNCVVAEPEKMESSISSSSEEQFCRLNEYNQLQLQAAHAQEQIRRMNENSHVQVPFQQLNQLAAYPYAVWYYPQIMQYVPFPPFSDISNPTAHENYEKNNVMLQW

SEQ ID NO: 3637 - protein, 55 aa, Homo sapiens
QRNILREKQTDEIKNCVVAEPEKMESSISSSSEEMSLSKCAEQFCRLNEYNQLQL

SEQ ID NO: 3638 - protein, 226 aa, Homo sapiens
MKVLILACLVALALARETIESLSSSEESITEYKQKVEKVKHEDQQQGEDEHQDKIYPSFQPQPLIYPFVEPIPYGFLPQNILPLAQPAVVLPVPQPEIMEVPKAKDTVYTKGRVMPVLKSPTIPFFDPQIPKLTDLENLHLPLPLLQPLMQQVPQPIPQTLALPPQPLWSVPQPKVLPIPQQVVPYPQRAVPVQALLLNQELLLNPTHQIYPVTQPLAPVHNPISV

SEQ ID NO: 3639 - protein, 182 aa, Homo sapiens
MKSFLLVVNALALTLPFLAVEVQNQKQPACHENDERPFYQKTAPYVPMYYVPNSYPYYGTNLYQRRPAIAINNPYVPRTYYANPAVVRPHAQIPQRQYLPNSHPPTVVRRPNLHPSFIAIPPKKIQDKIIIPTINTIATVEPTPAPATEPTVDSVVTPEAFSESIITSTPETTTVAVTPPTA

SEQ ID NO: 3640 - protein, 141 aa, Homo sapiens
MAQYLSTLLLLLATLAVALAWSPKEEDRIIPGGIYNADLNDEWVQRALHFAISEYNKATKDDYYRRPLRVLRARQQTVGGVNYFFDVEVGRTICTKSQPNLDTCAFHEQPELQKKQLCSFEIYEVPWENRRSLVKSRCQES

SEQ ID NO: 3641 - protein, 141 aa, Homo sapiens; identical to SEQ ID NO: 3640

SEQ ID NO: 3642 - protein, 103 aa, Homo sapiens
MMAEPWQALQLLLAILLTLMALPYQARKKTFLSVHEVMAVENYAKDSLQWITDQYNKESDDKYHFRIFRVLKVQRQQVNCFFSVFAVPWFEQYKILNKSCSSD

SEQ ID NO: 3643 - protein, 138 aa, Homo sapiens
MMAEPWQALQLLLAILLTLMALPYQARKKTFLSVHEVMAVENYAKDSLQWITDQYNKESDDKYHFRIFRVLKVQRQVTDHLEYHLNVEMQWTTCQKPETTNCVPQERELHKQVNCFFSVFAVPWFEQYKILNKSCSSD

SEQ ID NO: 3644 - protein, 141 aa, Homo sapiens
MAWPLCTLLLLLATQAVALAWSPQEEDRIIEGGIYDADLNDERVQRALHFVISEYNKATEDEYYRRLLRVLRAREQIVGGVNYFFDIEVGRTICTKSQPNLDTCAFHEQPELQKKQLCSFQIYEVPWEDRMSLVNSRCQEA

SEQ ID NO: 3645 - protein, 146 aa, Homo sapiens
MAGPLRAPLLLLAILAVALAVSPAAGSSPGKPPRLVGGPMDASVEEEGVRRALDFAVGEYNKASNDMYHSRALQVVRARKQIVAGVNYFLDVELGRTTCTKTQPNLDNCPFHDQPHLKRKAFCSFQIYAVPWQGTMTLSKSTCQDA

SEQ ID NO: 3646 - protein, 146 aa, Homo sapiens; identical to SEQ ID NO: 3645

SEQ ID NO: 3647 - protein, 146 aa, Homo sapiens; identical to SEQ ID NO: 3645

SEQ ID NO: 3648 - protein, 141 aa, Homo sapiens
MARPLCTLLLLMATLAGALASSSKEENRIIPGGIYDADLNDEWVQRALHFAISEYNKATEDEYYRRPLQVLRAREQTFGGVNYFFDVEVGRTICTKSQPNLDTCAFHEQPELQKKQLCSFEIYEVPWEDRMSLVNSRCQEA

SEQ ID NO: 3649 - protein, 142 aa, Homo sapiens
MMWPMHTPLLLLTALMVAVAGSASAQSRTLAGGIHATDLNDKSVQCALDFAISEYNKVINKDEYYSRPLQVMAAYQQIVGGVNYYFNVKFGRTTCTKSQPNLDNCPFNDQPKLKEEEFCSFQINEVPWEDKISILNYKCRKV

SEQ ID NO: 3650 - protein, 149 aa, Homo sapiens
MARSNLPLALGLALVAFCLLALPRDARARPQERMVGELRDLSPDDPQVQKAAQAAVASYNMGSNSIYYFRDTHIIKAQSQLVAGIKYFLTMEMGSTDCRKTRVTGDHVDLTTCPLAAGAQQEKLRCDFEVLVVPWQNSSQLLKHNCVQM

SEQ ID NO: 3651 - protein, 145 aa, Homo sapiens
MRAAGTLLAFCCLVLSTTGGPSPDTCSQDLNSRVKPGFPKTIKTNDPGVLQAARYSVEKFNNCTNDMFLFKESRITRALVQIVKGLKYMLEVEIGRTTCKKNQHLRLDDCDFQTNHTLKQTLSCYSEVWVVPWLQHFEVPVLRCH

SEQ ID NO: 3652 - protein, 134 aa, Homo sapiens
MPRCRWLSLILLTIPLALVARKDPKKNETGVLRKLKPVNASNANVKQCLWFAMQEYNKESEDKYVFLVVKTLQAQLQVTNLLEYLIDVEIARSDCRKPLSTNEICAIQENSKLKRKLSCSFLVGALPWNGEFTV

SEQ ID NO: 3653 - protein, 142 aa, Homo sapiens
MPRCRWLSLILLTIPLALVARKDPKKNETGVLRKLKPVNASNANVKQCLWFAMQEYNKESEDKYVFLVVKTLQAQLQVTNLLEYLIDVEIARSDCRKPLSTNEICAIQENSKLKRKLSCSFLVGALPWNGEFTVMEKKCEDA

SEQ ID NO: 3654 - protein, 159 aa, Homo sapiens
MSSPQRRKAMPWALSLLLMGFQLLVTYAWCSEEEMGGNNKIVQDPMFLATVEFALNTFNVQSKEEHAYRLLRVLSSWREDSMDRKWRGKMVFSMNLQLRQTVCRKFEDDIDNCPFQESLELNNVRQGISFPQVHSCGCCMGCGVGTGAADKAIPRDKGK

SEQ ID NO: 3655 - protein, 147 aa, Homo sapiens
MLGLPWKGGLSWALLLLLLGSQILLIYAWHFHEQRDCDEHNVMARYLPATVEFAVHTFNQQSKDYYAYRLGHILNSWKEQVESKTVFSMELLLGRTRCGKFEDDIDNCHFQESTELNNTFTCFFTISTRPWMTQFSLLNKTCLEGFH

SEQ ID NO: 3656 - protein, 145 aa, Homo sapiens
MGIGCWRNPLLLLIALVLSAKLGHFQRWEGFQQKLMSKKNMNSTLNFFIQSYNNASNDTYLYRVQRLIRSQMQLTTGVEYIVTVKIGWTKCKRNDTSNSSCPLQSKKLRKSLICESLIYTMPWINYFQLWNNSCLEAEHVGRNLR

SEQ ID NO: 3657 - protein, 145 aa, Homo sapiens; identical to SEQ ID NO: 3656

SEQ ID NO: 3658 - protein, 37 aa, Homo sapiens
MNSTLNFFIQSYNNASNDTYLYRVQRLIRSQMQQVHC

SEQ ID NO: 3659 - protein, 242 aa, Homo sapiens
MLRLLRLALAFYGRTADPAERQGPQQQGLPQGDTQLTTVQGVVTSFCGDYGMIDESIYFSSDVVTGNVPLKVGQKVNVVVEEDKPHYGLRAIKVDVVPRHLYGAGPSDSGTRVLIGCVTSINEDNIYISNSIYFSIAIVSEDFVPYKGDLLEVEYSTEPGISNIKATSVKPIRCIHTEEVCITSVHGRNGVIDYTIFFTLDSVKLPDGYVPQVDDIVNVVMVESIQFCFIWRAISITPVHKS

SEQ ID NO: 3660 - protein, 264 aa, Homo sapiens
MLRLLRLALAFYGRTADPAERQGPQQQGLPQGDTQLTTVQGVVTSFCGDYGMIDESIYFSSDVVTGNVPLKVGQKVNVVVEEDKPHYGLRAIKVDVVPRHLYGAGPSDSGTRVLIGCVTSINEDNIYISNSIYFSIAIVSEDFVPYKGDLLEVEYSTEPGISNIKATSVKPIRCIHTEEVCITSVHGRNGVIDYTIFFTLDSVKLPDGYVPQVDDIVNVVMVESIQFCFIWRAISITPVHKSSSGFQDDGGLGRPKRERRSQSI

SEQ ID NO: 3661 - protein, 385 aa, Homo sapiens
MSRPQLRRWRLVSSPPSGVPGLALLALLALLALRLAAGTDCPCPEPELCRPIRHHPDFEVFVFDVGQKTWKSYDWSQITTVATFGKYDSELMCYAHSKGARVVLKGDVSLKDIIDPAFRASWIAQKLNLAKTQYMDGINIDIEQEVNCLSPEYDALTALVKETTDSFHREIEGSQVTFDVAWSPKNIDRRCYNYTGIADACDFLFVMSYDEQSQIWSECIAAANAPYNQTLTGYNDYIKMSINPKKLVMGVPWYGYDYTCLNLSEDHVCTIAKVPFRGAPCSDAAGRQVPYKTIMKQINSSISGNLWDKDQRAPYYNYKDPAGHFHQVWYDNPQSISLKATYIQNYRLRGIGMWNANCLDYSGDAVAKQQTEEMWEVLKPKLLQR

SEQ ID NO: 3662 - protein, 77 aa, Homo sapiens
MSRPQLRRWRLVSSPPSGVPGLALLALLALLALRLAAGTDCPCPEPELCRPIRHHPDFEVSAFLCSSRSGLQGTKRS

SEQ ID NO: 3663 - protein, 77 aa, Homo sapiens; identical to SEQ ID NO: 3662

SEQ ID NO: 3664 - protein, 349 aa, Homo sapiens
MTAASMGPVRVAFVVLLALCSRPAVGQNCSGPCRCPDEPAPRCPAGVSLVLDGCGCCRVCAKQLGELCTERDPCDPHKGLFCHFGSPANRKIGVCTAKDGAPCIFGGTVYRSGESFQSSCKYQCTCLDGAVGCMPLCSMDVRLPSPDCPFPRRVKLPGKCCEEWVCDEPKDQTVVGPALAAYRLEDTFGPDPTMIRANCLVQTTEWSACSKTCGMGISTRVTNDNASCRLEKQSRLCMVRPCEADLEENIKKGKKCIRTPKISKPIKFELSGCTSMKTYRAKFCGVCTDGRCCTPHRTTTLPVEFKCPDGEVMKKNMMFIKTCACHYNCPGDNDIFESLYYRKMYGDMA

SEQ ID NO: 3665 - protein, 243 aa, Homo sapiens
MRPQGPAASPQRLRGLLLLLLLQLPAPSSASEIPKGKQKAQLRQREVVDLYNGMCLQGPAGVPGRDGSPGANGIPGTPGIPGRDGFKGEKGECLRESFEESWTPNYKQCSWSSLNYGIDLGKIAECTFTKMRSNSALRVLFSGSLRLKCRNACCQRWYFTFNGAECSGPLPIEAIIYLDQGSPEMNSTINIHRTSSVEGLCEGIGAGLVDVAIWVGTCSDYPKGDASTGWNSVSRIIIEELPK

SEQ ID NO: 3666 - protein, 147 aa, Homo sapiens
MRPQGPAASPQRLRGLLLLLLLQLPAPSSASEIPKGKQKAQLRQREVVDLYNGMCLQGPAGVPGRDGSPGANGIPGTPGIPGRDGFKGEKGECLRESFEESWTPNYKQCSWSSLNYGIDLGKIAVSLNYFKIEARFKGFHILVLIFR

SEQ ID NO: 3667 - protein, 113 aa, Homo sapiens
MRSNSALRVLFSGSLRLKCRNACCQRWYFTFNGAECSGPLPIEAIIYLDQGSPEMNSTINIHRTSSVEGLCEGIGAGLVDVAIWVGTCSDYPKGDASTGWNSVSRIIIEELPK

SEQ ID NO: 3668 - protein, 229 aa, Homo sapiens
MWPPGRSITVKLREKTVSRKLEMNGPSAFQGLICGKYNGMCLQGPAGVPGRDGSPGANGIPGTPGIPGRDGFKGEKGECLRESFEESWTPNYKQCSWSSLNYGIDLGKIAECTFTKMRSNSALRVLFSGSLRLKCRNACCQRWYFTFNGAECSGPLPIEAIIYLDQGSPEMNSTINIHRTSSVEGLCEGIGAGLVDVAIWVGTCSDYPKGDASTGWNSVSRIIIEELPK

SEQ ID NO: 3669 - protein, 174 aa, Homo sapiens
MACLGFQRHKAQLNLATRTWPCTLLFFLLFIPVFCKAMHVAQPAVVLASSRGIASFVCEYASPGKATEVRVTVLRQADSQVTEVCAATYMMGNELTFLDDSICTGTSSGNQVNLTIQGLRAMDTGLYICKVELMYPPPYYLGIGNGTQIYVIAKEKKPSYNRGLCENAPNRARM

SEQ ID NO: 3670 - protein, 223 aa, Homo sapiens
MACLGFQRHKAQLNLATRTWPCTLLFFLLFIPVFCKAMHVAQPAVVLASSRGIASFVCEYASPGKATEVRVTVLRQADSQVTEVCAATYMMGNELTFLDDSICTGTSSGNQVNLTIQGLRAMDTGLYICKVELMYPPPYYLGIGNGTQIYVIDPEPCPDSDFLLWILAAVSSGLFFYSFLLTAVSLSKMLKKRSPLTTGVYVKMPPTEPECEKQFQPYFIPIN

SEQ ID NO: 3671 - protein, 79 aa, Homo sapiens
MACLGFQRHKAQLNLATRTWPCTLLFFLLFIPVFCKAMHVAQPAVVLASSRGIASFVSKEKKPSYNRGLCENAPNRARM

SEQ ID NO: 3672 - protein, 137 aa, Homo sapiens
MHVAQPAVVLASSRGIASFVCEYASPGKATEVRVTVLRQADSQVTEVCAATYMMGNELTFLDDSICTGTSSGNQVNLTIQGLRAMDTGLYICKVELMYPPPYYLGIGNGTQIYVIAKEKKPSYNRGLCENAPNRARM

SEQ ID NO: 3673 - protein, 53 aa, Homo sapiens
MIRNWLTIFILFPLKLVEKCESSVSLTVPPVVKLENGSSTNVSLTLRLWCLLE

SEQ ID NO: 3674 - protein, 75 aa, Homo sapiens
MIRNWLTIFILFPLKLVEKCESSVSLTVPPVVKLENGSSTNVSLTLRPPLNATLVITFEITFRSKNITILELPDE

SEQ ID NO: 3675 - protein, 122 aa, Homo sapiens
MIRNWLTIFILFPLKLVEKCESSVSLTVPPVVKLENGSSTNVSLTLRPPLNATLVITFEITFRSKNITILELPDELVEAGGEECRDEISSHEAHQDGLQISSEPPRKQTGVKHDQSPACGNL

SEQ ID NO: 3676 - protein, 163 aa, Homo sapiens
MIRNWLTIFILFPLKLVEKCESSVSLTVPPVVKLENGSSTNVSLTLRPPLNATLVITFEITFRSKNITILELPDEVVVPPGVTNSSFQVTSQNVGQLTVYLHGNHSNQTGPRIRFLVIRSSAISIINQVIGWIYFVAWSISFYPQVIMNWRRKSVIGLSFDFV

SEQ ID NO: 3677 - protein, 367 aa, Homo sapiens
MIRNWLTIFILFPLKLVEKCESSVSLTVPPVVKLENGSSTNVSLTLRPPLNATLVITFEITFRSKNITILELPDEVVVPPGVTNSSFQVTSQNVGQLTVYLHGNHSNQTGPRIRFLVIRSSAISIINQVIGWIYFVAWSISFYPQVIMNWRRKSVIGLSFDFVALNLTGFVAYSVFNIGLLWVPYIKEQFLLKYPNGVNPVNSNDVFFSLHAVVLTLIIIVQCCLYERGGQRVSWPAIGFLVLAWLFAFVTMIVAAVGVTTWLQFLFCFSYIKLAVTLVKYFPQAYMNFYYKSTEGWSIGNVLLDFTGGSFSLLQMFLQSYNNDQWTLIFGDPTKFGLGVFSIVFDVVFFIQHFCLYRKRPGYDQLN

SEQ ID NO: 3678 - protein, 400 aa, Homo sapiens
MIRNWLTIFILFPLKLVEKCESSVSLTVPPVVKLENGSSTNVSLTLRPPLNATLVITFEITFRSKNITILELPDEVVVPPGVTNSSFQVTSQNVGQLTVYLHGNHSNQTGPRIRFLVIRSSAISIINQVIGWIYFVAWSISFYPQVIMNWRRKSVIGLSFDFVALNLTGFVAYSVFNIGLLWVPYIKEQFLLKYPNGVNPVNSNDVFFSLHAVVLTLIIIVQCCLYERGGQRVSWPAIGFLVLAWLFAFVTMIVAAVGVTTWLQFLFCFSYIKLAVTLVKYFPQAYMNFYYKSTEGWSIGNVLLDFTGGSFSLLQMFLQSYNNDQWTLIFGDPTKFGLGVFSIVFDVVFFIQHFCLYRKRPGLQAARTGSGSRLRQDWAPSLQPKALPQTTSVSASSLKG

SEQ ID NO: 3679 - protein, 20 aa, Homo sapiens
MNWRRKSVIGLSFDFVALNL

SEQ ID NO: 3680 - protein, 28 aa, Homo sapiens
MNWRRKSVIGLSFDFVALNLTGFVAYSV

SEQ ID NO: 3681 - protein, 263 aa, Homo sapiens
MASLWLLSCFSLVGAAFGCGVPAIHPVLSGLSRIVNGEDAVPGSWPWQVSLQDKTGFHFCGGSLISEDWVVTAAHCGVRTSDVVVAGEFDQGSDEENIQVLKIAKVFKNPKFSILTVNNDITLLKLATPARFSQTVSAVCLPSADDDFPAGTLCATTGWGKTKYNANKTPDKLQQAALPLLSNAECKKSWGRRITDVMICAGASGVSSCMGDSGGPLVCQKDGAWTLVGIVSWGSDTCSTSSPGVYARVTKLIPWVQKILAAN

SEQ ID NO: 3682 - protein, 182 aa, Homo sapiens
MCQGGPELASVDWGRTGRAARRQVRPRWVWGLSPYSPHSPPGCGVPAIHPVLSGLSRIVNGEDAVPGSWPWQVSLQDKTGFHFCGGSLISEDWVVTAAHCGVRTSDVVVAGEFDQGSDEENIQVLKIAKVFKNPKFSILTVNNDITLLKLATPARFSQTVSAVCLPSADDDFPAGTLCATTG

SEQ ID NO: 3683 - protein, 16 aa, Homo sapiens
  VARIANT 1: note = misc_feature - Xaa can be any naturally occurring amino acid
XVTKLIPWVQKILAAN

SEQ ID NO: 3684 - protein, 114 aa, Homo sapiens
DKTGFHFCGGSLISEDWVVTAAHCGVRTSDVVVAGEFDQGSDEENIQVLKIAKVFKNPKFSILTVNNDITLLKLATPARFSQTVSAVCLPSADDDFPAGTLCATTGWGKTKYNG

SEQ ID NO: 3685 - protein, 168 aa, Homo sapiens
EFDQGSDEENIQVLKIAKVFKNPKFSILTVNNDITLLKLATPARFSQTVSAVCLPSADDDFPAGTLCATTGWGKTKYNANKTPDKLQQAALPLLSNAECKKSWGRRITDVMICAGGDSGGPLVCQKDGAWTLVGIVSWGSRTCSTTTPAVYARVAKLIPWVQKILAAN

SEQ ID NO: 3686 - protein, 263 aa, Homo sapiens
MAFLWLLSCWALLGTTFGCGVPAIHPVLSGLSRIVNGEDAVPGSWPWQVSLQDKTGFHFCGGSLISEDWVVTAAHCGVRTSDVVVAGEFDQGSDEENIQVLKIAKVFKNPKFSILTVNNDITLLKLATPARFSQTVSAVCLPSADDDFPAGTLCATTGWGKTKYNANKTPDKLQQAALPLLSNAECKKSWGRRITDVMICAGASGVSSCMGDSGGPLVCQKDGAWTLVGIVSWGSRTCSTTTPAVYARVAKLIPWVQKILAAN

SEQ ID NO: 3687 - protein, 137 aa, Homo sapiens
VAGEFDQGSDEENIQVLKIAKVFKNPKFSILTVNNDITLLKLATPARFSQTVSAVCLPSADDDFPAGTLCATTGWGKTKYNANKTPDKLQQAALPLLSNAECKKSWGRRITDVMICAGASGVSSCMVRLALPRPWPG

SEQ ID NO: 3688 - protein, 268 aa, Homo sapiens [sequence omitted]

SEQ ID NO: 3689 - protein, 69 aa, Homo sapiens
MLGITVLAALLACATPGPTVWPWERTTWRWKTKKDPCLWVWTPSTSTRDGMPSCCAMILPSSSLQSMWS

SEQ ID NO: 3690 - protein, 190 aa, Homo sapiens
MLLLSLTLSLVLLGSSWGCGIPAIKPALSFSQRIVNGENAVLGSWPWQVSLQDSSGFHFCGGSLISQSWVVTAAHCNVSPGRHFVVLGEYDRSSNAEPLQVLSVSRAITHPSWNSTTMNNDVTLLKLASPAQYTTRISPVCLASSNEALLSARRETHGCLLVLSPGAPKTAMCAHLLCILELASSAPGST

SEQ ID NO: 3691 - protein, 264 aa, Homo sapiens
MLLLSLTLSLVLLGSSWGCGIPAIKPALSFSQRIVNGENAVLGSWPWQVSLQDSSGFHFCGGSLISQSWVVTAAHCNVSPGRHFVVLGEYDRSSNAEPLQVLSVSRAITHPSWNSTTMNNDVTLLKLASPAQYTTRISPVCLASSNEALTEGLTCVTTGWGRLSGVGNVTPAHLQQVALPLVTVNQCRQYWGSSITDSMICAGGAGASSCQGDSGGPLVCQKGNTWVLIGIVSWGTKNCNVRAPAVYTRVSKFSTWINQVIAYN

SEQ ID NO: 3692 - protein, 190 aa, Homo sapiens
MLLLSLTLSLVLLGSSWGQQRLPLLRWFSHQPVLGGHCCPLQCQVLSVSRVSAWAADTEEKWAVQAITHPSWNSTTMNNDVTLLKLASPAQYTTRISPVCLASSNEALTEGLTCVTTGWGRLSGVGNVTPAHLQQVALPLVTVNQCRQYWGSSITDSMICAGGAGASSCQGDSGGPLVCQKGNTWVLIGI

SEQ ID NO: 3693 - protein, 110 aa, Homo sapiens
MIRAAPPPLFLLLLLLLLLVSWASRGEAAPDQDEIQRLPGLAKQPSFRQYSGYLKGSGSKHLHYWFVESQKDPENSPVVLWLNGGPGCSSLDGLLTEHGPFLVQPDGVTL

SEQ ID NO: 3694 - protein, 480 aa, Homo sapiens
MIRAAPPPLFLLLLLLLLLVSWASRGEAAPDQDEIQRLPGLAKQPSFRQYSGYLKGSGSKHLHYWFVESQKDPENSPVVLWLNGGPGCSSLDGLLTEHGPFLVQPDGVTLEYNPYSWNLIANVLYLESPAGVGFSYSDDKFYATNDTEVAQSNFEALQDFFRLFPEYKNNKLFLTGESYAGIYIPTLAVLVMQDPSMNLQGLAVGNGLSSYEQNDNSLVYFAYYHGLLGNRLWSSLQTHCCSQNKCNFYDNKDLECVTNLQEVARIVGNSGLNIYNLYAPCAGGVPSHFRYEKDTVVVQDLGNIFTRLPLKRMWHQALLRSGDKVRMDPPCTNTTAASTYLNNPYVRKALNIPEQLPQWDMCNFLVNLQYRRLYRSMNSQYLKLLSSQKYQILLYNGDVDMACNFMGDEWFVDSLNQKMEVQRRPWLVKYGDSGEQIAGFVKEFSHIAFLTIKGAGHMVPTDKPLAAFTMFSRFLNKQPY

SEQ ID NO: 3695 - protein, 480 aa, Homo sapiens; identical to SEQ ID NO: 3694

SEQ ID NO: 3696 - protein, 480 aa, Homo sapiens; identical to SEQ ID NO: 3694

SEQ ID NO: 3697 - protein, 82 aa, Homo sapiens
MTSSPRAPPGEQGRGGAEMIRAAPPPLFLLLLLLLLLVSWASRGEAAPDQDEIQRLPGLAKQPSFRQYSGYLKGSGSKHLHY

SEQ ID NO: 3698 - protein, 481 aa, Homo sapiens
MTSSPRAPPGEQGRGGAEMIRAAPPPLFLLLLLLLLLVSWASRGEAAPDQDEIQRLPGLAKQPSFRQYSGYLKGSGSKHLHYWFVESQKDPENSPVVLWLNGGPGCSSLDGLLTEHGPFLIANVLYLESPAGVGFSYSDDKFYATNDTEVAQSNFEALQDFFRLFPEYKNNKLFLTGESYAGIYIPTLAVLVMQDPSMNLQGLAVGNGLSSYEQNDNSLVYFAYYHGLLGNRLWSSLQTHCCSQNKCNFYDNKDLECVTNLQEVARIVGNSGLNIYNLYAPCAGGVPSHFRYEKDTVVVQDLGNIFTRLPLKRMWHQALLRSGDKVRMDPPCTNTTAASTYLNNPYVRKALNIPEQLPQWDMCNFLVNLQYRRLYRSMNSQYLKLLSSQKYQILLYNGDVDMACNFMGDEWFVDSLNQKMEVQRRPWLVKYGDSGEQIAGFVKEFSHIAFLTIKGAGHMVPTDKPLAAFTMFSRFLNKQPY

SEQ ID NO: 3699 - protein, 498 aa, Homo sapiens
MTSSPRAPPGEQGRGGAEMIRAAPPPLFLLLLLLLLLVSWASRGEAAPDQDEIQRLPGLAKQPSFRQYSGYLKGSGSKHLHYWFVESQKDPENSPVVLWLNGGPGCSSLDGLLTEHGPFLVQPDGVTLEYNPYSWNLIANVLYLESPAGVGFSYSDDKFYATNDTEVAQSNFEALQDFFRLFPEYKNNKLFLTGESYAGIYIPTLAVLVMQDPSMNLQGLAVGNGLSSYEQNDNSLVYFAYYHGLLGNRLWSSLQTHCCSQNKCNFYDNKDLECVTNLQEVARIVGNSGLNIYNLYAPCAGGVPSHFRYEKDTVVVQDLGNIFTRLPLKRMWHQALLRSGDKVRMDPPCTNTTAASTYLNNPYVRKALNIPEQLPQWDMCNFLVNLQYRRLYRSMNSQYLKLLSSQKYQILLYNGDVDMACNFMGDEWFVDSLNQKMEVQRRPWLVKYGDSGEQIAGFVKEFSHIAFLTIKGAGHMVPTDKPLAAFTMFSRFLNKQPY

SEQ ID NO: 3700 - protein, 231 aa, Homo sapiens
MTSSPRAPPGEQGRGGAEMIRAAPPPLFLLLLLLLLLVSWASRGEAAPDQDEIQRLPGLAKQPSFRQYSGYLKGSGSKHLHYWFVESQKDPENSPVVLWLNGGPGCSSLDGLLTEHGPFLVQPDGVTLEYNPYSWNLIANVLYLESPAGVGFSYSDDKFYATNDTEVAQSNFEALQDFFRLFPEYKNNKLFLTGESYAGIYIPTLAVLVMQDPSMNLQVQGAGCGQWTLLL

SEQ ID NO: 3701 - protein, 202 aa, Homo sapiens
QDFFRLFPEYKNNKLFLTGESYAGIYIPTLAVLVMQDPSMNLQGLAVGNGLSSYEQNDNSLVYFAYYHGLLGNRLWSSLQTHCCSQNKCNFYDNKDLECVTNLQEVARIVGNSGLNIYNLYAPCAGGVPSHFRTLLWSRIWATSSLACHSSGCGIRHCCAQGIKCAWTPPAPTQQLLPPTSTTRTCGRPSTSRSSCHNGTCA

SEQ ID NO: 3702 - protein, 21 aa, Homo sapiens
MWQLWASLCCLLVLANARSRP

SEQ ID NO: 3703 - protein, 32 aa, Homo sapiens
MWQLWASLCCLLVLANARSRPSFHPLSDELVN

SEQ ID NO: 3704 - protein, 55 aa, Homo sapiens
MWQLWASLCCLLVLANARSRPSFHPLSDELVNYVNKRNTTWQAGHNFYNVDMSYL

SEQ ID NO: 3705 - protein, 68 aa, Homo sapiens
MWQLWASLCCLLVLANARSRPSFHPLSDELVNYVNKRNTTWQAGHNFYNVDMSYLKRLCGTFLGGPKP

SEQ ID NO: 3706 - protein, 70 aa, Homo sapiens
MWQLWASLCCLLVLANARSRPSFHPLSDELVNYVNKRNTTWQAGHNFYNVDMSYLKRLCGTFLGGPKPPQ

SEQ ID NO: 3707 - protein, 70 aa, Homo sapiens; identical to SEQ ID NO: 3706

SEQ ID NO: 3708 - protein, 92 aa, Homo sapiens
MWQLWASLCCLLVLANARSRPSFHPLSDELVNYVNKRNTTWQAGHNFYNVDMSYLKRLCGTFLGGPKPPQRVMFTEDLKLPASFDAREQWPQ

SEQ ID NO: 3709 - protein, 98 aa, Homo sapiens
MWQLWASLCCLLVLANARSRPSFHPLSDELVNYVNKRNTTWQAGHNFYNVDMSYLKRLCGTFLGGPKPPQRVMFTEDLKLPASFDAREQWPQCPTIKE

SEQ ID NO: 3710 - protein, 101 aa, Homo sapiens
MWQLWASLCCLLVLANARSRPSFHPLSDELVNYVNKRNTTWQAGHNFYNVDMSYLKRLCGTFLGGPKPPQRVMFTEDLKLPASFDAREQWPQCPTIKEIRD

SEQ ID NO: 3711 - protein, 136 aa, Homo sapiens
MWQLWASLCCLLVLANARSRPSFHPLSDELVNYVNKRNTTWQAGHNFYNVDMSYLKRLCGTFLGGPKPPQRVMFTEDLKLPASFDAREQWPQCPTIKEIRDQGSCGSCWAFGAVEAISDRICIHTNAHVSVEVSAE

SEQ ID NO: 3712 - protein, 143 aa, Homo sapiens
MWQLWASLCCLLVLANARSRPSFHPLSDELVNYVNKRNTTWQAGHNFYNVDMSYLKRLCGTFLGGPKPPQRVMFTEDLKLPASFDAREQWPQCPTIKEIRDQGSCGSCWAFGAVEAISDRICIHTNAHVSVEVSAEDLLTCCG

SEQ ID NO: 3713 - protein, 143 aa, Homo sapiens; identical to SEQ ID NO: 3712

SEQ ID NO: 3714 - protein, 149 aa, Homo sapiens
MWQLWASLCCLLVLANARSRPSFHPLSDELVNYVNKRNTTWQAGHNFYNVDMSYLKRLCGTFLGGPKPPQRVMFTEDLKLPASFDAREQWPQCPTIKEIRDQGSCGSCWAFGAVEAISDRICIHTNAHVSVEVSAEDLLTCCGSMCGDG

SEQ ID NO: 3715 - protein, 165 aa, Homo sapiens
MWQLWASLCCLLVLANARSRPSFHPLSDELVNYVNKRNTTWQAGHNFYNVDMSYLKRLCGTFLGGPKPPQRVMFTEDLKLPASFDAREQWPQCPTIKEIRDQGSCGSCWAFGAVEAISDRICIHTNAHVSVEVSAEDLLTCCGSMCGDGCNGGYPAEAWNFWTRK

SEQ ID NO: 3716 - protein, 170 aa, Homo sapiens
MWQLWASLCCLLVLANARSRPSFHPLSDELVNYVNKRNTTWQAGHNFYNVDMSYLKRLCGTFLGGPKPPQRVMFTEDLKLPASFDAREQWPQCPTIKEIRDQGSCGSCWAFGAVEAISDRICIHTNAHVSVEVSAEDLLTCCGSMCGDGCNGGYPAEAWNFWTRKGLVSG

SEQ ID NO: 3717 - protein, 175 aa, Homo sapiens
MWQLWASLCCLLVLANARSRPSFHPLSDELVNYVNKRNTTWQAGHNFYNVDMSYLKRLCGTFLGGPKPPQRVMFTEDLKLPASFDAREQWPQCPTIKEIRDQGSCGSCWAFGAVEAISDRICIHTNAHVSVEVSAEDLLTCCGSMCGDGCNGGYPAEAWNFWTRKGLVSGGLYES

SEQ ID NO: 3718 - protein, 339 aa, Homo sapiens
MWQLWASLCCLLVLANARSRPSFHPLSDELVNYVNKRNTTWQAGHNFYNVDMSYLKRLCGTFLGGPKPPQRVMFTEDLKLPASFDAREQWPQCPTIKEIRDQGSCGSCWAFGAVEAISDRICIHTNAHVSVEVSAEDLLTCCGSMCGDGCNGGYPAEAWNFWTRKGLVSGGLYESHVGCRPYSIPPCEHHVNGSRPPCTGEGDTPKCSKICEPGYSPTYKQDKHYGYNSYSVSNSEKDIMAEIYKNGPVEGAFSVYSDFLLYKSGVYQHVTGEMMGGHAIRILGWGVENGTPYWLVANSWNTDWGDNGFFKILRGQDHCGIESEVVAGIPRTDQYWEKI

SEQ ID NO: 3719 - protein, 339 aa, Homo sapiens; identical to SEQ ID NO: 3718

SEQ ID NO: 3720 - protein, 339 aa, Homo sapiens; identical to SEQ ID NO: 3718

SEQ ID NO: 3721 - protein, 339 aa, Homo sapiens; identical to SEQ ID NO: 3718

SEQ ID NO: 3722 - protein, 339 aa, Homo sapiens; identical to SEQ ID NO: 3718

SEQ ID NO: 3723 - protein, 339 aa, Homo sapiens; identical to SEQ ID NO: 3718

SEQ ID NO: 3724 - protein, 339 aa, Homo sapiens; identical to SEQ ID NO: 3718

SEQ ID NO: 3725 - protein, 110 aa, Homo sapiens
MWQLWASLCCLLVLANARSRPSFHPLSDELVNYVNKRNTTWQAGHNFYNVDMSYLKRLCGTFLGGPKPPQRVMFTEDLKLPASFDAREQWPQCPTIKEIRDQGSCGSCWL

SEQ ID NO: 3726 - protein, 76 aa, Homo sapiens
SGVYQHVTGEMMGGHAIRILGWGVENGTPYWLVANSWNTDWGDNGFFKILRGQDHCGIESEVVAGIPRTDQYWEKI

SEQ ID NO: 3727 - protein, 141 aa, Homo sapiens
MGAGPSLLLAALLLLLSGDGAVRCDTPANCTYLDLLGTWVFQVGSSGSQRDVNCSVMGPQEKKVVVYLQKLDTAYDDLGNSGHFTIIYNQGFEIVLNDYKWFAFFKDVTDFISHLFMQLGTVGIYDLPHLRNKLAMNRRWG

SEQ ID NO: 3728 - protein, 137 aa, Homo sapiens
MGAGPSLLLAALLLLLSGDGAVRCDTPANCTYLDLLGTWVFQVGSSGSQRDVNCSVMGPQEKKVVVYLQKLDTAYDDLGNSGHFTIIYNQGFEIVLNDYKWFAFFKDVTDFISHLFMQLGTVGIYDLPHLRNKLVIK

SEQ ID NO: 3729 - protein, 463 aa, Homo sapiens
MGAGPSLLLAALLLLLSGDGAVRCDTPANCTYLDLLGTWVFQVGSSGSQRDVNCSVMGPQEKKVVVYLQKLDTAYDDLGNSGHFTIIYNQGFEIVLNDYKWFAFFKYKEEGSKVTTYCNETMTGWVHDVLGRNWACFTGKKVGTASENVYVNIAHLKNSQEKYSNRLYKYDHNFVKAINAIQKSWTATTYMEYETLTLGDMIRRSGGHSRKIPRPKPAPLTAEIQQKILHLPTSWDWRNVHGINFVSPVRNQASCGSCYSFASMGMLEARIRILTNNSQTPILSPQEVVSCSQYAQGCEGGFPYLIAGKYAQDFGLVEEACFPYTGTDSPCKMKEDCFRYYSSEYHYVGGFYGGCNEALMKLELVHHGPMAVAFEVYDDFLHYKKGIYHHTGLRDPFNPFELTNHAVLLVGYGTDSASGMDYWIVKNSWGTGWGENGYFRIRRGTDECAIESIAVAATPIPKL

SEQ ID NO: 3730 - protein, 36 aa, Homo sapiens
  VARIANT 1: note = misc_feature - Xaa can be any naturally occurring amino acid
XDVTDFISHLFMQLGTVGIYDLPHLRNKLAMNRRWG

SEQ ID NO: 3731 - protein, 245 aa, Homo sapiens
  VARIANT 1: note = misc_feature - Xaa can be any naturally occurring amino acid
XVVDSPLARSARLPGPQEKKVVVYLQKLDTAYDDLGNSGHFTIIYNQGFEIVLNDYKWFAFFKYKEEGSKVTTYCNETMTGWVHDVLGRNWACFTGKKVGTASENVYVNIAHLKNSQEKYSNRLYKYDHNFVKAINAIQKSWTATTYMEYETLTLGDMIRRSGGHSRKIPRPKPAPLTAEIQQKILHLPTSWDWRNVHGINFVSPVRNQASCGSCYSFASMGMLEARIRILTNNSQTPILSPQEV

SEQ ID NO: 3732 - protein, 299 aa, Homo sapiens
MPRPVVDRIPLHKFTSIRRTMSEVGGSVEDLIAKGPVSKYSQAVPAVTEGPIPEVLKNYMDAQYYGEIGIGTPPQCFTVVFDTGSSNLWVPSIHCKLLDIACWIHHKYNSDKSSTYVKNGTSFDIHYGSGSLSGYLSQDTVSVPCQSASSASALGGVKVERQVFGEATKQPGITFIAAKFDGILGMAYPRISVNNVLPVFDNLMQQKLVDQNIFSFYLSRDPDAQPGGELMLGGTDSKYYKGSLSYLNVTRKAYWQVHLDQVEVASGLTLCKEGCEAIVDTGTSLMVGPVDEVRELQKA

SEQ ID NO: 3733 - protein, 405 aa, Homo sapiens
MQPSSLLPLALCLLAAPASALVRIPLHKFTSIRRTMSEVGGSVEDLIAKGPVSKYSQAVPAVTEGPIPEAQYYGEIGIGTPPQCFTVVFDTGSSNLWVPSIHCKLLDIACWIHHKYNSDKSSTYVKNGTSFDIHYGSGSLSGYLSQDTVSVPCQSASSASALGGVKVERQVFGEATKQPGITFIAAKFDGILGMAYPRISVNNVLPVFDNLMQQKLVDQNIFSFYLSRDPDAQPGGELMLGGTDSKYYKGSLSYLNVTRKAYWQVHLDQVEVASGLTLCKEGCEAIVDTGTSLMVGPVDEVRELQKAIGAVPLIQGEYMIPCEKVSTLPAITLKLGGKGYKLSPEDYTLKVSQAGKTLCLSGFMGMDIPPPSGPLWILGDVFIGRYYTVFDRDNNRVGFAEAARL

SEQ ID NO: 3734 - protein, 412 aa, Homo sapiens
MQPSSLLPLALCLLAAPASALVRIPLHKFTSIRRTMSEVGGSVEDLIAKGPVSKYSQAVPAVTEGPIPEVLKNYMDAQYYGEIGIGTPPQCFTVVFDTGSSNLWVPSIHCKLLDIACWIHHKYNSDKSSTYVKNGTSFDIHYGSGSLSGYLSQDTVSVPCQSASSASALGGVKVERQVFGEATKQPGITFIAAKFDGILGMAYPRISVNNVLPVFDNLMQQKLVDQNIFSFYLSRDPDAQPGGELMLGGTDSKYYKGSLSYLNVTRKAYWQVHLDQVEVASGLTLCKEGCEAIVDTGTSLMVGPVDEVRELQKAIGAVPLIQGEYMIPCEKVSTLPAITLKLGGKGYKLSPEDYTLKVSQAGKTLCLSGFMGMDIPPPSGPLWILGDVFIGRYYTVFDRDNNRVGFAEAARL

SEQ ID NO: 3735 - protein, 276 aa, Homo sapiens
MQPSSLLPLALCLLAAPASALVRIPLHKFTSIRRTMSEVGGSVEDLIAKGPVSKYSQAVPAVTEGPIPEVLKNYMDAQYYGEIGIGTPPQCFTVVFDTGSSNLWVPSIHCKLLDIACWIHHKYNSDKSSTYVKNGTSFDIHYGSGSLSGYLSQDTVSVPCQSASSASALGGVKVERQVFGEATKQPGITFIAAKFDGILGMAYPRISVNNVLPVFDNLMQQKLVDQNIFSFYLSRDPDAQPGGELMLGGTDSKYYKGSLSYLNVTRKAYWQVHLDQ

SEQ ID NO: 3736 - protein, 406 aa, Homo sapiens
MQPSSLLPLALCLLAAPASALVRIPLHKFTSIRRTMSEVGGSVEDLIAKGPVSKYSQAVPAVTEGPIPEVLKNYMDAQYYGEIGIGTPPQCFTVVFDTGSSNLWVPSIHCKLLDIACWIHHKYNSDKSSTYVKNGTSFDIHYGSGSLSGYLSQDTVSVPCQSASSASALGGVKVERQVFGEATKQPGITFIAAKFDGILGMAYPRISVNNVLPVFDNLMQQKLVDQNIFSFYLSRDPDAQPGGELMLGGTDSKYYKGSLSYLNVTRKAYWVEVASGLTLCKEGCEAIVDTGTSLMVGPVDEVRELQKAIGAVPLIQGEYMIPCEKVSTLPAITLKLGGKGYKLSPEDYTLKVSQAGKTLCLSGFMGMDIPPPSGPLWILGDVFIGRYYTVFDRDNNRVGFAEAARL

SEQ ID NO: 3737 - protein, 405 aa, Homo sapiens
MQPSSLLPLALCLLAAPASALVRIPLHKFTSIRRTMSEVGGSVEDLIAKGPVSKYSQAVPAVTEGPIPEVLKNYMDAQYYGEIGIGTPPQCFTVVFDTGSSNLWVPSIHCKLLDIACWIHHKYNSDKSSTYVKNGTSFDIHYGSGSLSGYLSQDTVSVPCQSASSASALGGVKVERQVFGEATKQPGITFIAAKFDGILGMAYPRISVNNVLPVFDNLMQQKLVDQNIFSFYLSRDPDAQPGGELMLGGTDSKYYKGSLSYLNVTRKAYWQVHLDQVEVASGLTLCKEGCEAIVDTGTSLMVGPVDEVRELQKAIGAVPLIQGEVSTLPAITLKLGGKGYKLSPEDYTLKVSQAGKTLCLSGFMGMDIPPPSGPLWILGDVFIGRYYTVFDRDNNRVGFAEAARL

SEQ ID NO: 3738 - protein, 409 aa, Homo sapiens
MQPSSLLPLALCLLAAPASALVRIPLHKFTSIRRTMSEVGGSVEDLIAKGPVSKYSQAVPAVTEGPIPEVLKNYMDAQYYGEIGIGTPPQCFTVVFDTGSSNLWVPSIHCKLLDIACWIHHKYNSDKSSTYVKNGTSFDIHYGSGSLSGYLSQDTVSVPCQSASSASALGGVKVERQVFGEATKQPGITFIAAKFDGILGMAYPRISVNNVLPVFDNLMQQKLVDQNIFSFYLSRDPDAQPGGELMLGGTDSKYYKGSLSYLNVTRKAYWQVHLDQVEVASGLTLCKEGCEAIVDTGTSLMVGPVDEVRELQKAIGAVPLIQGEYMIPCEKVSTLPAITLKLGGKGYKLSPEDYTLKAGKTLCLSGFMGMDIPPPSGPLWILGDVFIGRYYTVFDRDNNRVGFAEAARL

SEQ ID NO: 3739 - protein, 410 aa, Homo sapiens
MQPSSLLPLALCLLAAPASALVRIPLHKFTSIRRTMSEVGGSVEDLIAKGPVSKYSQAVPAVTEGPIPEVLKNYMDYYGEIGIGTPPQCFTVVFDTGSSNLWVPSIHCKLLDIACWIHHKYNSDKSSTYVKNGTSFDIHYGSGSLSGYLSQDTVSVPCQSASSASALGGVKVERQVFGEATKQPGITFIAAKFDGILGMAYPRISVNNVLPVFDNLMQQKLVDQNIFSFYLSRDPDAQPGGELMLGGTDSKYYKGSLSYLNVTRKAYWQVHLDQVEVASGLTLCKEGCEAIVDTGTSLMVGPVDEVRELQKAIGAVPLIQGEYMIPCEKVSTLPAITLKLGGKGYKLSPEDYTLKVSQAGKTLCLSGFMGMDIPPPSGPLWILGDVFIGRYYTVFDRDNNRVGFAEAARL

SEQ ID NO: 3740 - protein, 94 aa, Homo sapiens
MSEVGGSVEDLIAKGPVSKYSQAVPAVTEGPIPEVLKNYMDAQYYGEIGIGTPPQCFTVVFDTGSSNLWVPSIHCKLLDIACWIHHKYNSDKSS

SEQ ID NO: 3741 - protein, 199 aa, Homo sapiens
MSEVGGSVEDLIAKGPVSKYSQAVPAVTEGPIPEVLKNYMDAQYYGEIGIGTPPQCFTVVFDTGSSNLWVPSIHCKLLDIACWIHHKYNSDKSSTYVKNGTSFDIHYGSGSLSGYLSQDTVSVPCQSASSASALGGVKVERQVFGEATKQPGITFIAAKFDGILGMAYPRISVNNVLPVFDNLMQQKLVDQNIFSFYLS

SEQ ID NO: 3742 - protein, 189 aa, Homo sapiens
NVTRKAYWQVHLDQSPEGRRVQPSQGRGSQGGALGPQGTLQSRQGLHALTPRRVEVASGLTLCKEGCEAIVDTGTSLMVGPVDEVRELQKAIGAVPLIQGEYMIPCEKVSTLPAITLKLGGKGYKLSPEDYTLKVSQAGKTLCLSGFMGMDIPPPSGPLWILGDVFIGRYYTVFDRDNNRVGFAEAARL

SEQ ID NO: 3743 - protein, 396 aa, Homo sapiens
MKTLLLLLLVLLELGEAQGSLHRVPLRRHPSLKKKLRARSQLSEFWKSHNLDMIQFTESCSMDQSAKEPLINYLDMEYFGTISIGSPPQNFTVIFDTGSSNLWVPSVYCTSPACKTHSRFQPSQSSTYSQPGQSFSIQYGTGSLSGIIGADQVSVEGLTVVGQQFGESVTEPGQTFVDAEFDGILGLGYPSLAVGGVTPVFDNMMAQNLVDLPMFSVYMSSNPEGGAGSELIFGGYDHSHFSGSLNWVPVTKQAYWQIALDNIQVGGTVMFCSEGCQAIVDTGTSLITGPSDKIKQLQNAIGAAPVDGEYAVECANLNVMPDVTFTINGVPYTLSPTAYTLLDFVDGMQFCSSGFQGLDIHPPAGPLWILGDVFIRQFYSVFDRGNNRVGLAPAVP

SEQ ID NO: 3744 - protein, 363 aa, Homo sapiens
MKTLLLLLLVLLELGEAQGSLHRVPLRRHPSLKKKLRARSQLSEFWKSHNLDMIQFTESCSMDQSAKEPLINYLDMEYFGTISIGSPPQNFTVIFDTGSSNLWVPSVYCTSPACKTHSRFQPSQSSTYSQPGQSFSIQYGTGSLSGIIGADQVSVEGLTVVGQQFGESVTEPGQTFVDAEFDGILGLGYPSLAVGGVTPVFDNMMAQNLVDLPMFSVYMSSNPEGGAGSELIFGGYDHSHFSGSLNWVPVTKQAYWQIALDNMLWSVPTLTSCRMSPSPLTESPIPSAQLPTPYWTSWMECSSAAVAFKDLTSTLQLGPSGSWGMSSFDSFTQSLTVGITVWDWPQQSPKEGPCVCACLSDRP

SEQ ID NO: 3745 - protein, 484 aa, Homo sapiens [sequence omitted]

SEQ ID NO: 3746 - protein, 120 aa, Homo sapiens
MVCRLPVSKKTLLCSFQVLDELGRHVLLRKDCGPVDTKVPGAGEPKSAFTQGSAMISSLSQNHPDNRNETFSSVISLLNEDPLSQDLPVKMASIFKNFVITYNRTYESKEEARWRLSVFV

SEQ ID NO: 3747 - protein, 283 aa, Homo sapiens
  VARIANT 1: note = misc_feature - Xaa can be any naturally occurring amino acid
XQNHPDNRNETFSSVISLLNEDPLSQDLPVKMASIFKNFVITYNRTYESKEARWRLSVFVNNMVRAQKIQALDRGTAQYGVTKFSDLTEEEFRTIYLNTLLRKEPGNKMKQAKSVGDLAPPEWDWRSKGAVTKVKDQGMCGSCWAFSVTGNVEGQWFLNQGTLLSLSEQELLDCDKMDKACMGGLPSNAYSAIKNLGGLETEDDYSYQGHMQSCNFSAEKAKVYINDSVELSQNEQKLAAWLAKRGPISVAINAFGMQFYRHGISRPLRPLCSPWLIDHAVLL

SEQ ID NO: 3748 - protein, 82 aa, Homo sapiens
  VARIANT 1: note = misc_feature - Xaa can be any naturally occurring amino acid
XRTIYLNTLLRKEPGNKMKQAKSVGDLAPPEWDWRSKGAVTKVKDQGMCGSCWAFSVTGNVEGQWFLNQGTLLSLSEQALGL

SEQ ID NO: 3749 - protein, 255 aa, Homo sapiens
MQPLLLLLAFLLPTGAEAGEIIGGRESRPHSRPYMAYLQIQSPAGQSRCGGFLVREDFVLTAAHCWGSNINVTLGAHNIQRRENTQQHITARRAIRHPQYNQRTIQNDIMLLQLSRRVRRNRNVNPVALPRAQEGLRPGTLCTVAGWGRVSMRRGTDTLREVQLRVQRDRQCLRIFGSYDPRRQICVGDRRERKAAFKGDSGGPLLCNNVAHGIVSYGKSSGVPPEVFTRVSSFLPWIRTTMRSFKLLDQMETPL

SEQ ID NO: 3750 - protein, 134 aa, Homo sapiens
MALNQFSDMSFAEIKHKYLWSEPQNCSATKSNYLRGTGPYPPSVDWRKKGNFVSPVKNQGACGSCWTFSTTGALESAIAIATGKMLSLAEQQLVDCAQDFNNHGCQGGLPSQAFEYILYNKGIMGEDTYPYQGK

SEQ ID NO: 3751 - protein, 323 aa, Homo sapiens
MWATLPLLCAAELCVNSLEKFHFKSWMSKHRKTYSTEEYHHRLQTFASNWRKINAHNNGNHTFKMALNQFSDMSFAEIKHKYLWSEPQNCSATKSNYLRGTGPYPPSVDWRKKGNFVSPVKNQGACGSCWTFSTTGALESAIAIATGKMLSLAEQQLVDCAQDFNNHGCQGGLPSQAFEYILYNKGIMGEDTYPYQGKDGYCKFQPGKAIGFVKDVANITIYDEEAMVEAVALYNPVSFAFEVTQDFMMYRTGIYSSTSCHKTPDKVNHAVLAVGYGEKNGIPYWIVKNSWGPQWGMNGYFLIERGKNMCGLAACASYPIPLV

SEQ ID NO: 3752 - protein, 335 aa, Homo sapiens
MWATLPLLCAGAWLLGVPVCGAAELCVNSLEKFHFKSWMSKHRKTYSTEEYHHRLQTFASNWRKINAHNNGNHTFKMALNQFSDMSFAEIKHKYLWSEPQNCSATKSNYLRGTGPYPPSVDWRKKGNFVSPVKNQGACGSCWTFSTTGALESAIAIATGKMLSLAEQQLVDCAQDFNNHGCQGGLPSQAFEYILYNKGIMGEDTYPYQGKDGYCKFQPGKAIGFVKDVANITIYDEEAMVEAVALYNPVSFAFEVTQDFMMYRTGIYSSTSCHKTPDKVNHAVLAVGYGEKNGIPYWIVKNSWGPQWGMNGYFLIERGKNMCGLAACASYPIPLV

SEQ ID NO: 3753 - protein, 62 aa, Homo sapiens
MWATLPLLCAGAWLLGVPVCGAAELCVNSLEKFHFKSWMSKKTKAHCVLVAESVGEHQCMCF

SEQ ID NO: 3754 - protein, 41 aa, Homo sapiens
MWATLPLLCAGAWLLGVPVCGAAELCVNSLGTQRARRPRGC

SEQ ID NO: 3755 - protein, 118 aa, Homo sapiens
MWATLPLLCAGAWLLGVPVCGAAELCVNSLVAGLSPPLGPWSLRSPSQPERCCPWRNSSWWTAPRTSIITAAKGVSPARLSSISCTTRGSWVKTPTPTRARMVIASSNLERPSALSRM

SEQ ID NO: 3756 - protein, 258 aa, Homo sapiens
MHKENEEIYNVSENRKHCPIFPCPLLTRSGKVPEFRHEREERLEEMIRRQNLDGNLSFVMWGLKVLLLPVVSFALYPEEILDTHWELWKKTHRKQYNNKVDEISRRLIWEKNLKYISIHNLEASLGVHTYELAMNHLGDMTSEEVVQKMTGLKVPLSHSRSNDTLYIPEWEGRAPDSVDYRKKGYVTPVKNQGQCGSCWAFSSVGALEGQLKKKTGKLLNLSPQNLVDCVSENDGCGGGYMTNAFQYVQKNRGIDSED

SEQ ID NO: 3757 - protein, 329 aa, Homo sapiens
MWGLKVLLLPVVSFALYPEEILDTHWELWKKTHRKQYNNKVDEISRRLIWEKNLKYISIHNLEASLGVHTYELAMNHLGDMTSEEVVQKMTGLKVPLSHSRSNDTLYIPEWEGRAPDSVDYRKKGYVTPVKNQGQCGSCWAFSSVGALEGQLKKKTGKLLNLSPQNLVDCVSENDGCGGGYMTNAFQYVQKNRGIDSEDAYPYVGQEESCMYNPTGKAAKCRGYREIPEGNEKALKRAVARVGPVSVAIDASLTSFQFYSKGVYYDESCNSDNLNHAVLAVGYGIQKGNKHWIIKNSWGENWGNKGYILMARNKNNACGIANLASFPKM

SEQ ID NO: 3758 - protein, 333 aa, Homo sapiens [sequence omitted]

SEQ ID NO: 3759 - protein, 333 aa, Homo sapiens [sequence omitted]

SEQ ID NO: 3760 - protein, 225 aa, Homo sapiens
MNPTLILAAFCLGIASATLTFDHSLEAQWTKWKAMHNRLYGMNEEGWRRAVWEKNMKMIELHNQEYREGKHSFTMAMNAFGDMTSEEFRQVMNGFQNRKPRKGKVFQEPLFYEAPRSVDWREKGYVTPVKNQGQCGSCWAFSATGALEGQMFRKTGRLISLSEQNLVDCSGPQGNEGCNGGLMDYAFQYVQDNGGLDSEESYPYEATVSGAPCHHSSSAFGRWTL

SEQ ID NO: 3761 - protein, 321 aa, Homo sapiens
MDVRALPWLPWLLWLLCRGGGDADSRAPFTPTWPRSREREAAAFRESLNRHRYLNSLFPSENSTAFYGINQFSYLFPEEFKAIYLRSKPSKFPRYSAEVHMSIPNVSLPLRFDWRDKQVVTQVRNQQMCGGCWAFSVVGAVESAYAIKGKPLEDLSVQQVIDCSYNNYGCNGGSTLNALNWLNKMQVKLVKDSEYPFKAQNGLCHYFSGSHSGFSIKGYSAYDFSDQEDEMAKALLTFGPLVVIVDAVSWQDYLGGIIQHHCSSGEANHAVLITGFDKTGSTPYWIVRNSWGSSWGVDGYAHVKMGSNVCGIADSVSSIFV

SEQ ID NO: 3762 - protein, 117 aa, Homo sapiens
IIDNKGIDSDASYPYKAMDQKCQYDSKYRAATCSKYTELPYGREDVLKEAVANKGPVSVGVDARHPSFFLYRSDGVLLCCQAGVRWHDLSSLQPLPPGFKQFSCLSLLSSWDYRCLL

SEQ ID NO: 3763 - protein, 281 aa, Homo sapiens
MKRLVCVLLVCSSAVAQLHKDPTLDHHWHLWKKTYGKQYKEKNEEAVRRLIWEKNLKFVMLHNLEHSMGMHSYDLGMNHLGDMGSCGACWAFSAVGALEAQLKLKTGKLVSLSAQNLVDCSTEKYGNKGCNGGFMTTAFQYIIDNKGIDSDASYPYKAMDQKCQYDSKYRAATCSKYTELPYGREDVLKEAVANKGPVSVGVDARHPSFFLYRSGVYYEPSCTQNVNHGVLVVGYGDLNGKEYWLVKNSWGHNFGEEGYIRMARNKGNHCGIASFPSYPEI

SEQ ID NO: 3764 - protein, 331 aa, Homo sapiens
MKRLVCVLLVCSSAVAQLHKDPTLDHHWHLWKKTYGKQYKEKNEEAVRRLIWEKNLKFVMLHNLEHSMGMHSYDLGMNHLGDMTSEEVMSLMSSLRVPSQWQRNITYKSNPNRILPDSVDWREKGCVTEVKYQGSCGACWAFSAVGALEAQLKLKTGKLVSLSAQNLVDCSTEKYGNKGCNGGFMTTAFQYIIDNKGIDSDASYPYKAMDQKCQYDSKYRAATCSKYTELPYGREDVLKEAVANKGPVSVGVDARHPSFFLYRSGVYYEPSCTQNVNHGVLVVGYGDLNGKEYWLVKNSWGHNFGEEGYIRMARNKGNHCGIASFPSYPEI

SEQ ID NO: 3765 - protein, 96 aa, Homo sapiens
  VARIANT 1: note = misc_feature - Xaa can be any naturally occurring amino acid
XVLKEAVANKGPVSVGVDARHPSFFLYRSGVYYEPSCTQNVNHGVLVVGYGDLNGKEYWLVKNSWGHNFGEEGYIRMARNKGNHCGIASFPSYPEI

SEQ ID NO: 3766 - protein, 5 aa, Homo sapiens
  VARIANT 1: note = misc_feature - Xaa can be any naturally occurring amino acid
XYPEI

SEQ ID NO: 3767 - protein, 334 aa, Homo sapiens
MNLSLVLAAFCLGIASAVPKFDQNLDTKWYQWKATHRRLYGANEEGWRRAVWEKNMKMIELHNGEYSQGKHGFTMAMNAFGDMTNEEFRQMMGCFRNQKFRKGKVFREPLFLDLPKSVDWRKKGYVTPVKNQKQCGSCWAFSATGALEGQMFRKTGKLVSLSEQNLVDCSRPQGNQGCNGGFMARAFQYVKENGGLDSEESYPYVAVDEICKYRPENSVANDTGFTVVAPGKEKALMKAVATVGPISVAMDAGHSSFQFYKSGIYFEPDCSSKNLDHGVLVVGYGFEGANSNNSKYWLVKNSWGPEWGSNGYVKIAKDKNNHCGIATAASYPNV

SEQ ID NO: 3768 - protein, 334 aa, Homo sapiens; identical to SEQ ID NO: 3767

SEQ ID NO: 3769 - protein, 211 aa, Homo sapiens
ALTAHPSCLLALLVAGLAQGIRGPLRAQDLGPQPLELKEAFKLFQIQFNRSYLSPEEHAHRLDIFAHNLAQAQRLQEEDLGTAEFGVTPFSDLTEEEFGQLYGYRRAAGGVPSMGREIRSEEPEESVPFSCDWRKVASAISPIKDQKNCNCCWAMAAAGNIETLWRISFWDFVDVSVQGGLASEKDYPFQGKVRAHRCHPKKYQKVAWIQD

SEQ ID NO: 3770 - protein, 376 aa, Homo sapiens
MALTAHPSCLLALLVAGLAQGIRGPLRAQDLGPQPLELKEAFKLFQIQFNRSYLSPEEHAHRLDIFAHNLAQAQRLQEEDLGTAEFGVTPFSDLTEEEFGQLYGYRRAAGGVPSMGREIRSEEPEESVPFSCDWRKVASAISPIKDQKNCNCCWAMAAAGNIETLWRISFWDFVDVSVQELLDCGRCGDGCHGGFVWDAFITVLNNSGLASEKDYPFQGKVRAHRCHPKKYQKVAWIQDFIMLQNNEHRIAQYLATYGPITVTINMKPLQLYRKGVIKATPTTCDPQLVDHSVLLVGFGSVKSEEGIWAETVSSQSQPQPPHPTPYWILKNSWGAQWGEKGYFRLHRGSNTCGITKFPLTARVQKPDMKPRVSCPP

SEQ ID NO: 3771 - protein, 364 aa, Homo sapiens
MALTAHPSCLLALLVAGLAQGIRGPLRAQDLGPQPLELKEAFKLFQIQFNRSYLSPEEHAHRLDIFAHNLAQAQRLQEEDLGTAEFGVTPFSDLTEEEFGQLYGYRRAAGGVPSMGREIRSEEPEESVPFSCDWRKVASAISPIKDQKNCNCCWAMAAAGNIETLWRISFWDFVDVSVQELLDCGRCGDGCHGGFVWDAFITVLNNSGLASEKDYPFQGKVRAHRCHPKKYQKVAWIQDFIMLQNNEHRIAQYLATYGPITVTINMKPLQLYRKGVIKATPTTCDPQLVDHSVLLVGFGSVKSEEGIWAETVSSQSQPQPPHPTPYWILKNSWGAQWGEKVSVIYWGRGQGRTGLFPPSRPYVP

SEQ ID NO: 3772 - protein, 303 aa, Homo sapiens
MARRGPGWRPLLLLVLLAGAAQGGLYFRRGQTCYRPLRGDGLAPLGRSTYPRPHEYLSPADLPKSWDWRNVDGVNYASITRNQHIPQYCGSCWAHASTSAMADRINIKRKGAWPSTLLSVQNVIDCGNAGSCEGGNDLSVWDYAHQHGIPDETCNNYQAKDQECDKFNQCGTCNEFKECHAIRNYTLWRVGDYGSLSGREKMMAEIYANGPISCGIMATERLANYTGGIYAEYQDTTYINHVVSVAGWGISDGTEYWIVRNSWGEPWGERGWLRIVTSTYKDGKGARYNLAIEEHCTFGDPIV

SEQ ID NO: 3773 - protein, 3623 aa, Homo sapiens
MMNMSLPFLWSLLTLLIFAEVNGEAGELELQRQKRSINLQQPRMATERGNLVFLTGSAQNIEFRTGSLGKIKLNDEDLSECLHQIQKNKEDIIELKGSAIGLPQNISSQIYQLNSKLVDLERKFQGLQQTVDKKVCSSNPCQNGGTCLNLHDSFFCICPPQWKGPLCSADVNECEIYSGTPLSCQNGGTCVNTMGSYSCHCPPETYGPQCASKYDDCEGGSVARCVHGICEDLMREQAGEPKYSCVCDAGWMFSPNSPACTLDRDECSFQPGPCSTLVQCFNTQGSFYCGACPTGWQGNGYICEDINECEINNGGCSVAPPVECVNTPGSSHCQACPPGYQGDGRVCTLTDICSVSNGGCHPDASCSSTLGSLPLCTCLPGYTGNGYGPNGCVQLSNICLSHPCLNGQCIDTVSGYFCKCDSGWTGVNCTENINECLSNPCLNGGTCVDGVDSFSCECTRLWTGALCQVPQQVCGESLSGINGSFSYRSPDVGYVHDVNCFWVIKTEMGKVLRITFTFFRLESMDNCPHEFLQVYDGDSSSAFQLGRFCGSSLPHELLSSDNALYFHLYSEHLRNGRGFTVRWETQQPECGGILTGPYGSIKSPGYPGNYPPGRDCVWIVVTSPDLLVTFTFGTLSLEHHDDCNKDYLEIRDGPLYQDPLLGKFCTTFSVPPLQTTGPFARIHFHSDSQISDQGFHITYLTSPSDLRCGGNYTDPEGELFLPELSGPFTHTRQCVYMMKQPQGEQIQINFTHVELQCQSDSSQNYIEVRDGETLLGKVCGNGTISHIKSITNSVWIRFKIDASVEKASFRAVYQVACGDELTGEGVIRSPFFPNVYPGERTCRWTIHQPQSQVILLNFTVFEIGSSAHCETDYVEIGSSSILGSPENKKYCGTDIPSFITSVYNFLYVTFVKSSSTENHGFMAKFSAEDLACGEILTESTGTIQSPGHPNVYPHGINCTWHILVQPNHLIHLMFETFHLEFHYNCTNDYLEVYDTDSETSLGRYCGKSIPPSLTSSGNSLMLVFVTDSDLAYEGFLINYEAISAATACLQDYTDDLGTFTSPNFPNNYPNNWECIYRITVRTGQLIAVHFTNFSLEEAIGNYYTDFLEIRDGGYEKSPLLGIFYGSNLPPTIISHSNKLWLKFKSDQIDTRSGFSAYWDGSSTGCGGNLTTSSGTFISPNYPMPYYHSSECYWWLKSSHGSAFELEFKDFHLEHHPNCTLDYLAVYDGPSSNSHLLTQLCGDEKPPLIRSSGDSMFIKLRTDEGQQGRGFKAEYRQTCENVVIVNQTYGILESIGYPNPYSENQHCNWTIRATTGNTVNYTFLAFDLEHHINCSTDYLELYDGPRQMGRYCGVDLPPPGSTTSSKLQVLLLTDGVGRREKGFQMQWFVYGCGGELSGATGSFSSPGFPNRYPPNKECIWYIRTDPGSSIQLTIHDFDVEYHSRCNFDVLEIYGGPDFHSPRIAQLCTQRSPENPMQVSSTGNELAIRFKTDLSINGRGFNASWQAVTGGCGGIFQAPSGEIHSPNYPSPYRSNTDCSWVIRVDRNHRVLLNFTDFDLEPQDSCIMAYDGLSSTMSRLARTCGREQLANPIVSSGNSLFLRFQSGPSRQNRGFRAQFRQACGGHILTSSFDTVSSPRFPANYPNNQNCSWIIQAQPPLNHITLSFTHFELERSTTCARDFVEILDGGHEDAPLRGRYCGTDMPHPITSFSSALTLRFVSDSSISAGGFHTTVTASVSACGGTFYMAEGIFNSPGYPDIYPPNVECVWNIVSSPGNRLQLSFISFQLEDSQDCSRDFVEIREGNATGHLVGRYCGNSFPLNYSSIVGHTLWVRFISDGSGSGTGFQATFMKIFGNDNIVGTHGKVASPFWPENYPHNSNYQWTVNVNASHVVHGRILEMDIEEIQNCYYDKLRIYDGPSIHARLIGAYCGTQTESFSSTGNSLTFHFYSDSSISGKGFLLEWFAVDAPDGVLPTIAPGACGGFLRTGDAPVFLFSPGWPDSYSNRVDCTWLIQAPDSTVELNILSLDIESHRTCAYDSLVIRDGDNNLAQQLAVLCGREIPGPIRSTGEYMFIRFTSDSSVTRAGFNASFHKSCGGYLHADRGIITSPKYPETYPSNLNCSWHVLVQSGLTIAVHFEQPFQIPNGDSSCNQGDYLVLRNGPDICSPPLGPPGGNGHFCGSHASSTLFTSDNQMFVQFISDHSNEGQGFKIKYEAKSLACGGNVYIHDADSAGYVTSPNHPHNYPPHADCIWILAAPPETRIQLQFEDRFDIEVTPNCTSNYLELRDGVDSDAPILSKFCGTSLPSSQWSSGEVMYLRFRSDNSPTHVGFKAKYSIAQCGGRVPGQSGVVESIGHPTLPYRDNLFCEWHLQGLSGHYLTISFEDFNLQNSSGCEKDFVEIWDNHTSGNILGRYCGNTIPDSIDTSSNTAVVRFVTDGSVTASGFRLRFESSMEECGGDLQGSIGTFTSPNYPNPNPHGRICEWRITAPEGRRITLMFNNLRLATHPSCNNEHVIVFNGIRSNSPQLEKLCSSVNVSNEIKSSGNTMKVIFFTDGSRPYGGFTASYTSSEDAVCGGSLPNTPEGNFTSPGYDGVRNYSRNLNCEWTLSNPNQGNSSISIHFEDFYLESHQDCQFDVLEFRVGDADGPLMWRLCGPSKPTLPLVIPYSQVWIHFVTNERVEHIGFHAKYSFTDCGGIQIGDSGVITSPNYPNAYDSLTHCSSLLEAPQGHTITLTFSDFDIEPHTTCAWDSVTVRNGGSPESPIIGQYCGNSNPRTIQSGSNQLVVTFNSDHSLQGGGFYATWNTQTLGCGGIFHSDNGTIRSPHWPQNFPENSRCSWTAITHKSKHLEISFDNNFLIPSGDGQCQNSFVKVWAGTEEVDKALLATGCGNVAPGPVITPSNTFTAVFQSQEAPAQGFSASFVSRCGSNFTGPSGYIISPNYPKQYDNNMNCTYVIEANPLSVVLLTFVSFHLEARSAVTGSCVNDGVHIIRGYSVMSTPFATVCGDEMPAPLTIAGPVLLNFYSNEQITDFGFKFSYRIISCGGVFNFSSGIITSPAYSYADYPNDMHCLYTITVSDDKVIELKFSDFDVVPSTSCSHDYLAIYDGANTSDPLLGKFCGSKRPPNVKSSNNSMLLVFKTDSFQTAKGWKMSFRQTLGPQQGCGGYLTGSNNTFASPDSDSNGMYDKNLNCVWIIIAPVNKVIHLTFNTFALEAASTRQRCLYDYVKLYDGDSENANLAGTFCGSTVPAPFISSGNFLTVQFISDLTLEREGFNATYTIMDMPCGGTYNATWTPQNISSPNSSDPDVPFSICTWVIDSPPHQQVKITVWALQLTSQDCTQNYLQLQDSPQGHGNSRFQFCGRNASAVPVFYSSMSTAMVIFKSGVVNRNSRMSFTYQIADCNRDYHKAFGNLRSPGWPDNYDNDKDCTVTLTAPQNHTISLFFHSLGIENSVECRNDFLEVRNGSNSNSPLLGKYCGTLLPNPVFSQNNELYLRFKSDSVTSDRGYEIIWTSSPSGCGGTLYGDRGSFTSPGYPGTYPNNTYCEWVLVAPAGRLVTINFYFISIDDPGDCVQNYLTLYDGPNASSPSSGPYCGGDTSIAPFVASSNQVFIKFHADYARRPSAFRLTWDS

SEQ ID NO: 3774 - protein, 170 aa, Homo sapiens
MMNMSLPFLWSLLTLLIFAEVNGEAGELELQRQKRSINLQQPRMATERGNLVFLTGSAQNIEFRTGSLGKIKLNDEDLSECLHQIQKNKEDIIELKGSAIGLPQNISSQIYQLNSKLVDLERKFQGLQQTVDKKVCSSNPCQNGGTCLNLHDSFFCICPPQWKVSHLLFG

SEQ ID NO: 3775 - protein, 105 aa, Homo sapiens
NSKLVDLERKFQGLQQTVDKKVCSSNPCQNGGTCLNLHDSFFCICPPQWKGPLCSADVNECEIYSGTPLSCQNGGTCVNTMGSYRNPCSNIPKEPEEGSRDWHRE

SEQ ID NO: 3776 - protein, 88 aa, Homo sapiens
STGNELAIRFKTDLSINGRGFNASWQAVTGGCGGIFQAPSGEIHSPNYPSPYRSNTDCSWVIRVDRNHRVLLNFTDFDLEPQDSCIMV

SEQ ID NO: 3777 - protein, 198 aa, Homo sapiens
MIGSGLAGSGGAGGPSSTVTWCALFSNHVAATQASLLLSFVWMPALLPVASRLLLLPRVLLTMASGSPPTQPSPASDSGSGYVPGSVSAAFVTCPNEKVAKEIARAVVEKRLAACVNLIPQITSIYEWKGKIEEDSEVLMMIKTQSSLVPALTDFVRSVHPYEVAEVIALPVEQGNFPYLQWVRQVTESVSDSITVLP

SEQ ID NO: 3778 - protein, 135 aa, Homo sapiens
MPALLPVASRLLLLPRVLLTMASGSPPTQPSPASDSGSGYVPGSVSAAFVTCPNEKVAKEIARAVVEKRLAACVNLIPQITSIYEWKGKIEEDSEVLMMIKTQSSLVPALTDFVRSVHPYEVAESCHDEPCSCSS

SEQ ID NO: 3779 - protein, 156 aa, Homo sapiens
MPALLPVASRLLLLPRVLLTMASGSPPTQPSPASDSGSGYVPGSVSAAFVTCPNEKVAKEIARAVVEKRLAACVNLIPQITSIYEWKGKIEEDSEVLMMIKTQSSLVPALTDFVRSVHPYEVAEVIALPVEQGNFPYLQWVRQVTESVSDSITVLP

SEQ ID NO: 3780 - protein, 156 aa, Homo sapiens; identical to SEQ ID NO: 3779

SEQ ID NO: 3781 - protein, 156 aa, Homo sapiens; identical to SEQ ID NO: 3779

SEQ ID NO: 3782 - protein, 156 aa, Homo sapiens; identical to SEQ ID NO: 3779

SEQ ID NO: 3783 - protein, 155 aa, Homo sapiens
MSGGRAPAVLLGGVASLLLSFVWMPALLPVASRLLLLPRVLLTMASGSPPTQPSPASDSGSGYVPGSVSAAFVTCPNEKVAKEIARAVVEKRLAACVNLIPQITSIYEWKGKIEEDSEVLMFCAPLRSGRGNCIACGTGELSVPAVGAPGHRVSF

SEQ ID NO: 3784 - protein, 179 aa, Homo sapiens
MSGGRAPAVLLGGVASLLLSFVWMPALLPVASRLLLLPRVLLTMASGSPPTQPSPASDSGSGYVPGSVSAAFVTCPNEKVAKEIARAVVEKRLAACVNLIPQITSIYEWKGKIEEDSEVLMMIKTQSSLVPALTDFVRSVHPYEVAEVIALPVEQGNFPYLQWVRQVTESVSDSITVLP

SEQ ID NO: 3785 - protein, 42 aa, Homo sapiens
MSGGRAPAVLLGGVVSDRPRPAPSGPRSLDRYPHPKSQRLAP

SEQ ID NO: 3786 - protein, 111 aa, Homo sapiens
  VARIANT 1: note = misc_feature - Xaa can be any naturally occurring amino acid
XSSTVTWCALFSNHVAATQASLLLSFVWMPALLPVASRLLLLPRVLLTMASGSPPTQPSPASDSGSGYVPGSVSAAFVTCPNEKVAKEIARAVVEKRLAACVNLIPQITSM

SEQ ID NO: 3787 - protein, 55 aa, Homo sapiens
MAPISLSWLLRLATFCHLTVLLAAWRRDSTGCSVPTRRSNGSRTRCSIWTARLLP

SEQ ID NO: 3788 - protein, 397 aa, Homo sapiens
MAPISLSWLLRLATFCHLTVLLAGQHHGVTKCNITCSKMTSKIPVALLIHYQQNQASCGKRAIILETRQHRLFCADPKEQWVKDAMQHLDRQAAALTRNGGTFEKQIGEVKPRTTPAAGGMDESVVLEPEATGESSSLEPTPSSQEAQRALGTSPELPTGVTGSSGTRLPPTPKAQDGGPVGTELFRVPPVSTAATWQSSAPHQPGPSLWAEAKTSEAPSTQDPSTQASTASSPAPEENAPSEGQRVWGQGQSPRPENSLEREEMGPVPAHTDAFQDWGPGSMAHVSVVPVSSEGTPSREPVASGSWTPKAEEPIHATMDPQRLGVLITPVPDAQAATRRQAVGLLAFLGLLFCLGVAMFTYQSLQGCPRKMAGEMAEGLRYIPRSCGSNSYVLVPV

SEQ ID NO: 3789 - protein, 403 aa, Homo sapiens
MAPISLSWLLRLATFCHLTVLLAGTSLNSGQHHGVTKCNITCSKMTSKIPVALLIHYQQNQASCGKRAIILETRQHRLFCADPKEQWVKDAMQHLDRQAAALTRNGGTFEKQIGEVKPRTTPAAGGMDESVVLEPEATGESSSLEPTPSSQEAQRALGTSPELPTGVTGSSGTRLPPTPKAQDGGPVGTELFRVPPVSTAATWQSSAPHQPGPSLWAEAKTSEAPSTQDPSTQASTASSPAPEENAPSEGQRVWGQGQSPRPENSLEREEMGPVPAHTDAFQDWGPGSMAHVSVVPVSSEGTPSREPVASGSWTPKAEEPIHATMDPQRLGVLITPVPDAQAATRRQAVGLLAFLGLLFCLGVAMFTYQSLQGCPRKMAGEMAEGLRYIPRSCGSNSYVLVPV

SEQ ID NO: 3790 - protein, 359 aa, Homo sapiens
MTSKIPVALLIHYQQNQASCGKRAIILETRQHRLFCADPKEQWVKDAMQHLDRQAAALTRNGGTFEKQIGEVKPRTTPAAGGMDESVVLEPEATGESSSLEPTPSSQEAQRALGTSPELPTGVTGSSGTRLPPTPKAQDGGPVGTELFRVPPVSTAATWQSSAPHQPGPSLWAEAKTSEAPSTQDPSTQASTASSPAPEENAPSEGQRVWGQGQSPRPENSLEREEMGPVPAHTDAFQDWGPGSMAHVSVVPVSSEGTPSREPVASGSWTPKAEEPIHATMDPQRLGVLITPVPDAQAATRRQAVGLLAFLGLLFCLGVAMFTYQSLQGCPRKMAGEMAEGLRYIPRSCGSNSYVLVPV

SEQ ID NO: 3791 - protein, 89 aa, Homo sapiens
MALLLCFVLLCGVVDFARSLSITTPEEMIEKAKGETAYLPCKFTLSPEDQGPLDIEWLISPADNQKVDQVGRCATSKEPYVHCQKLHRQ

SEQ ID NO: 3792 - protein, 200 aa, Homo sapiens
MALLLCFVLLCGVVDFARSLSITTPEEMIEKAKGETAYLPCKFTLSPEDQGPLDIEWLISPADNQKVDQVIILYSGDKIYDDYYPDLKGRVHFTSNDLKSGDASINVTNLQLSDIGTYQCKVKKAPGVANKKIHLVVLGKMCHLQRAVRPLPEATSAVIIHPWGPCLLPTWKDIPRLSITKYQVKTLNALLRVRLSHLLR

SEQ ID NO: 3793 - protein, 365 aa, Homo sapiens
MALLLCFVLLCGVVDFARSLSITTPEEMIEKAKGETAYLPCKFTLSPEDQGPLDIEWLISPADNQKVDQVIILYSGDKIYDDYYPDLKGRVHFTSNDLKSGDASINVTNLQLSDIGTYQCKVKKAPGVANKKIHLVVLVKPSGARCYVDGSEEIGSDFKIKCEPKEGSLPLQYEWQKLSDSQKMPTSWLAEMTSSVISVKNASSEYSGTYSCTVRNRVGSDQCLLRLNVVPPSNKAGLIAGAIIGTLLALALIGLIIFCCRKKRREEKYEKEVHHDIREDVPPPKSRTSTARSYIGSNHSSLGSMSPSNMEGYSKTQYNQVPSEDFERTPQSPTLPPAKVAAPNLSRMGAIPVMIPAQSKDGSIV

SEQ ID NO: 3794 - protein, 352 aa, Homo sapiens
MALLLCFVLLCGVVDFARSLSITTPEEMIEKAKGETAYLPCKFTLSPEDQGPLDIEWLISPADNQKVDQVIILYSGDKIYDDYYPDLKGRVHFTSNDLKSGDASINVTNLQLSDIGTYQCKVKKAPGVANKKIHLVVLVKPSGARCYVDGSEEIGSDFKIKCEPKEGSLPLQYEWQKLSDSQKMPTSWLAEMTSSVISVKNASSEYSGTYSCTVRNRVGSDQCLLRLNVVPPSNKAGLIAGAIIGTLLALALIGLIIFCCRKKRREEKYEKEVHHDIREDVPPPKSRTSTARSYIGSNHSSLGSMSPSNMEGYSKTQYNQVPSEDFERTPQSPTLPPAKFKYPYKTDGITVV

SEQ ID NO: 3795 - protein, 252 aa, Homo sapiens
MALLLCFVLLCGVVDFARSLSITTPEEMIEKAKGETAYLPCKFTLSPEDQGPLDIEWLISPADNQKVDQVIILYSGDKIYDDYYPDLKGRVHFTSNDLKSGDASINVTNLQLSDIGTYQCKVKKAPGVANKKIHLVVLVKPSGARCYVDGSEEIGSDFKIKCEPKEGSLPLQYEWQKLSDSQKMPTSWLAGKMCHLQRAVRPLPEATSAVIIHPWGPCLLPTWKDIPRLSITKYQVKTLNALLRVRLSHLLR

SEQ ID NO: 3796 - protein, 107 aa, Homo sapiens
MARAALSAAPSNPRLLRVALLLLLLVAAGRRAAGASVATELRCQCLQTLQGIHPKNIQSVNVKSPGPHCAQTEVIATLKNGRKACLNPASPIVKKIIEKMLNSDKSN

SEQ ID NO: 3797 - protein, 98 aa, Homo sapiens
MNQTAILICCLIFLTLSGIQGVPLSRTVRCTCISISNQPVNPRSLEKLEIIPASQFCPRVEIIATMKKKGEKRCLNPESKAIKNLLKAVSKERSKRSP

SEQ ID NO: 3798 - protein, 94 aa, Homo sapiens
MSVKGMAIALAVILCATVVQGFPMFKRGRCLCIGPGVKAVKVADIEKASIMYPSNNCDKIEVIITLKENKGQRCLNPKSKQARLIIKKVERKNF

SEQ ID NO: 3799 - protein, 94 aa, Homo sapiens; identical to SEQ ID NO: 3798

SEQ ID NO: 3800 - protein, 89 aa, Homo sapiens
MNAKVVVVLVLVLTALCLSDGKPVSLSYRCPCRFFESHVARANVKHLKILNTPNCALQIVARLKNNNRQVCIDPKLKWIQEYLEKALNK

SEQ ID NO: 3801 - protein, 119 aa, Homo sapiens
MNAKVVVVLVLVLTALCLSDGKPVSLSYRCPCRFFESHVARANVKHLKILNTPNCALQIVARLKNNNRQVCIDPKLKWIQEYLEKALNKGRREEKVGKKEKIGKKKRQKKRKAAQKRKN

SEQ ID NO: 3802 - protein, 93 aa, Homo sapiens
MNAKVVVVLVLVLTALCLSDGKPVSLSYRCPCRFFESHVARANVKHLKILNTPNCALQIVARLKNNNRQVCIDPKLKWIQEYLEKALNKRFKM

SEQ ID NO: 3803 - protein, 140 aa, Homo sapiens
MNAKVVVVLVLVLTALCLSDGKPVSLSYRCPCRFFESHVARANVKHLKILNTPNCALQIVARLKNNNRQVCIDPKLKWIQEYLEKALNNLISAAPAGKRVIAGARALHPSPPRACPTARALCEIRLWPPPEWSWPSPGDV

SEQ ID NO: 3804 - protein, 103 aa, Homo sapiens
MNAKVVVVLVLVLTALCLSDGKPVSLSYRCPCRFFESHYCTCLIRVSFHGATPLTQGSWVLYSLSCAGGETGLREPGPMVSPRVESHQEGRLGVPGPVNLGKA

SEQ ID NO: 3805 - protein, 103 aa, Homo sapiens; identical to SEQ ID NO: 3804

SEQ ID NO: 3806 - protein, 109 aa, Homo sapiens
MKFISTSLLLMLLVSSLSPVQGVLEVYYTSLRCRCVQESSVFIPRRFIDRIQILPRGNGCPRKEIIVWKKNKSIVCVDPQAEWIQRMMEVLRKRSSSTLPVPVFKRKIP

SEQ ID NO: 3807 - protein, 99 aa, Homo sapiens
MRLLAAALLLLLLALYTARVDGSKCKCSRKGPKIRYSDVKKLEMKPKYPHCEEKMVIITTKSVSRYRGQEHCLHPKLQSTKRFIKWYNAWNEKRRVYEE

SEQ ID NO: 3808 - protein, 111 aa, Homo sapiens
MSLLPRRAPPVSMRLLAAALLLLLLALYTARVDGSKCKCSRKGPKIRYSDVKKLEMKPKYPHCEEKMVIITTKSVSRYRGQEHCLHPKLQSTKRFIKWYNAWNEKRRVYEE

SEQ ID NO: 3809 - protein, 62 aa, Homo sapiens
MKVLISSLLLLLPLMLMSMVSSSLNPGVARGHRDRGQASRRWLQEGGQECECKAMLLFQIGS

SEQ ID NO: 3810 - protein, 119 aa, Homo sapiens
MKVLISSLLLLLPLMLMSMVSSSLNPGVARGHRDRGQASRRWLQEGGQECECKDWFLRAPRRKFMTVSGLPKKQCPCDHFKGNVKKTRHQRHHRKPNKHSRACQQFLKQCQLRSFALPL

SEQ ID NO: 3811 - protein, 107 aa, Homo sapiens
MARATLSAAPSNPRLLRVALLLLLLVAASRRAAGAPLATELRCQCLQTLQGIHLKNIQSVKVKSPGPHCAQTEVIATLKNGQKACLNPASPMVKKIIEKMLKNGKSN

SEQ ID NO: 3812 - protein, 107 aa, Homo sapiens
MAHATLSAAPSNPRLLRVALLLLLLVAASRRAAGASVVTELRCQCLQTLQGIHLKNIQSVNVRSPGPHCAQTEVIATLKNGKKACLNPASPMVQKIIEKILNKGSTN

SEQ ID NO: 3813 - protein, 114 aa, Homo sapiens
MSLLSSRAARVPGPSSSLCALLVLLLLLTQPGPIASAGPAAAVLRELRCVCLQTTQGVHPKMISNLQVFAIGPQCSKVEVVASLKNGKEICLDPEAPFLKKVIQKILDGGNKEN

SEQ ID NO: 3814 - protein, 113 aa, Homo sapiens
MSLPSSRAARVPGPSGSLCALLALLLLLTPPGPLASAGPVSAVLTELRCTCLRVTLRVNPKTIGKLQVFPAGPQCSKVEVVASLKNGKQVCLDPEAPFLKKVIQKILDRYLSL

SEQ ID NO: 3815 - protein, 114 aa, Homo sapiens
MSLPSSRAARVPGPSGSLCALLALLLLLTPPGPLASAGPVSAVLTELRCTCLRVTLRVNPKTIGKLQVFPAGPQCSKVEVVASLKNGKQVCLDPEAPFLKKVIQKILDSGNKKN

SEQ ID NO: 3816 - protein, 95 aa, Homo sapiens
MTSKLAVALLAAFLISAALCEGAVLPRSAKELRCQCIKTYSKPFHPKFIKELRVIESGPHCANTEIIVKLSDGRELCLDPKENWVQRVVEKFLKR

SEQ ID NO: 3817 - protein, 99 aa, Homo sapiens
MTSKLAVALLAAFLISAALCEGAVLPRSAKELRCQCIKTYSKPFHPKFIKELRVIESGPHCANTEIIVKLSDGRELCLDPKENWVQRVVEKFLKRAENS

SEQ ID NO: 3818 - protein, 125 aa, Homo sapiens
MKKSGVLFLLGIILLVLIGVQGTPVVRKGRCSCISTNQGTIHLQSLKDLKQFAPSPSCEKIEIIATLKNGVQTCLNPDSADVKELIKKWEKQVSQKKKQKNGKKHQKKKVLKVRKSQRSRQKKTT

SEQ ID NO: 3819 - protein, 182 aa, Homo sapiens
MEPQLGPEAAALRPGWLALLLWVSALSCSFSLPASSLSSLVPQVRTSYNFGRTFLGLDKCNACIGTSICKKFFKEEIRSDNWLASHLGLPPDSLLSYPANYSDDSKIWRPVEIFRLVSKYQNEISDRRICASASAPKTCSIERVLRKTERFQKWLQAKRLTPDLVQDCHQGQRELKFLCMLR

SEQ ID NO: 3820 - protein, 433 aa, Homo sapiens
MEPQLGPEAAALRPGWLALLLWVSALSCSFSLPASSLSSLVPQVRTSYNFGRTFLGLDKCNACIGTSICKKFFKEEIRSDNWLASHLGLPPDSLLSYPANYSDDSKIWRPVEIFRLVSKYQNEISDRRICASASAPKTCSIERVLRKTERFQKWLQAKRLTPDLVQGLASPLLRCPSQRLLDRVVRRYAEVADAGSIFMDHFTDRDKLRLLYTLAVNSHPILLQIFPGAEGWPLPKYLGSCGRFLVSTSTRPLQEFYDAPPDQAADLAYQLLGVLESLRSNDLNYFFYFTHIDAGMFGVFNNGHLFIRDASAVGVIDKQEGSQEANRAGENKDIFSCLVSGCQAQLPSCESISEKQSLVLVCQKLLPRLLQGRFPSPVQDDIDSILVQCGDSIRPDPEVLGAASQLKDILRPLRTCDSRFAYRYPDCKYNDKF

SEQ ID NO: 3821 - protein, 264 aa, Homo sapiens
MLRCGGRGLLLGLAVAAAAVMAARLMGWWGPRAGFRLFIPEELSRYRGGPGDPGLYLALLGRVYDVSSGRRHYEPGSHYSGFAGRDASRAFVTGDCSEAGLVDDVSDLSAAEMLTLHNWLSFYEKNYVCVGRVTGRFYGEDGLPTPALTQVEAAITRGLEANKLQLQEKQTFPPCNAEWSSARGSRLWCSQKSGGVSRDWIGVPRKLYKPGAKEPRCVCVRTTGPPSGQMPDNPPHRNRGDLDHPNLAEYTGCPPLAITCSFPL

SEQ ID NO: 3822 - protein, 106 aa, Homo sapiens
MLTLHNWLSFYEKNYVCVGRVTGRFYGEDGLPTPALTQVEAAITRGLEANKLQLQEKQTFPPCNAEWSSARGSRLWCSQKRGFNSSLALASGSLKHACHRLILQFL

SEQ ID NO: 3823 - protein, 152 aa, Homo sapiens
MLTLHNWLSFYEKNYVCVGRVTGRFYGEDGLPTPALTQVEAAITRGLEANKLQLQEKQTFPPCNAEWSSARGSRLWCSQKSGGVSRDWIGVPRKLYKPGAKEPRCVCVRTTGPPSGQMPDNPPHRNRGDLDHPNLAEYTGCPPLAITCSFPL

SEQ ID NO: 3824 - protein, 152 aa, Homo sapiens; identical to SEQ ID NO: 3823

SEQ ID NO: 3825 - protein, 42 aa, Homo sapiens
MAPKPGAEWSTALSHLVLGVVSLHAAVSTAEASRGAAAGFLL

SEQ ID NO: 3826 - protein, 362 aa, Homo sapiens
MAPKPGAEWSTALSHLVLGVVSLHAAVSTAEASRGAAAGFLLQVLAATTTLAPGLSTHEDCLAGAWVATVIGLPLLAFDFHWCTNGHLMCAGCFIHLLADARLKEEQATCPNCRCEISKSLCCRNLAVEKAVSELPSECGFCLRQFPRSLLERHQKEECQDRVTQCKYKRIGCPWHGPFHELTVHEAACAHPTKTGSELMEILDGMDQSHRKEMQLYNSIFSLLSFEKIGYTEVQFRPYRTDDFITRLYYETPRFTVLNQTWVLKARVNDSERNPNLSCKRTLSFQLLLKSKVTAPLECSFLLLKGPYDDVRISPVIYHFVFTNESNETDYVPLPIIDSVECNKLLAAKNINLRLFLFQIQK

SEQ ID NO: 3827 - protein, 144 aa, Homo sapiens
MAPKPGAEWSTALSHLVLGVVSLHAAVSTAEASRGAAAGFLLQVLAATTTLAPGLSTHEDCLAGAWVATVIGLPLLAFDFHWVNGDRSSANLLLGGGMVLAVAGGHLGPEGRSVAGQAMLLVVAVTILIVAVFTANTYGMWGGA

SEQ ID NO: 3828 - protein, 192 aa, Homo sapiens
MAPKPGAEWSTALSHLVLGVVSLHAAVSTAEASRGAAAGFLLQVLAATTTLAPGLSTHEDCLAGAWVATVIGLPLLAFDFHWVNGDRSSANLLLGGGMVLAVAGGHLGPEGRSVAGQAMLLVVAVTILIVAVFTANTYGMWGGAMLGVAGLLSRLEEDRLLLLPKEDVCRWALAVGSWAYCRALHTQRLQWE

SEQ ID NO: 3829 - protein, 192 aa, Homo sapiens; identical to SEQ ID NO: 3828

SEQ ID NO: 3830 - protein, 192 aa, Homo sapiens; identical to SEQ ID NO: 3828

SEQ ID NO: 3831 - protein, 246 aa, Homo sapiens
MAPKPGAEWSTALSHLVLGVVSLHAAVSTAECTNGHLMCAGCFIHLLADARLKEEQATCPNCRCEISKSLCCRNLAVEKAVSELPSECGFCLRQFPRSLLERHQKEECQDRVTQCKYKRIGCPWHGPFHELTVHEAACAHPTKTGSELMEILDGMDQSHRKEMQLYNSIFSLLSFEKIGYTEVQFRPYRTDDFITRLYYETPRFTVLNQTWVLKARVNDSERNPNLSCKRTLSFQLLLKSKVTAPL

SEQ ID NO: 3832 - protein, 404 aa, Homo sapiens
MSGAEEAGGGGPAAGPAGSVPAGVGVGVGAGPGAAAGQAAAAALGEAAGPGLPDEAGLAGARQLQLQEAAGDPDAPPKKRLRAAEAAEAAAAAAAAGSGKLEERLYSVLCCTVCLDLPKASVYQCTNGHLMCAGCFIHLLADARLKEEQATCPNCRCEISKSLCCRNLAVEKAVSELPSECGFCLRQFPRSLLERHQKEECQDRVTQCKYKRIGCPWHGPFHELTVHEAACAHPTKTGSELMEILDGMDQSHRKEMQLYNSIFSLLSFEKIGYTEVQFRPYRTDDFITRLYYETPRFTVLNQTWVLKARVNDSERNPNLSCKRTLSFQLLLKSKVTAPLECSFLLLKGPYDDVRISPVIYHFVFTNESNETDYVPLPIIDSVECNKLLAAKNINLRLFLFQIQK

SEQ ID NO: 3833 - protein, 479 aa, Homo sapiens
MWELVALLLLTLAYLFWPKRRCPGAKYPKSLLSLPLVGSLPFLPRHGHMHNNFFKLQKKYGPIYSVRMGTKTTVIVGHHQLAKEVLIKKGKDFSGRPQMATLDIASNNRKGIAFADSGAHWQLHRRLAMATFALFKDGDQKLEKIICQEISTLCDMLATHNGQSIDISFPVFVAVTNVISLICFNTSYKNGDPELNVIQNYNEGIIDNLSKDSLVDLVPWLKEKFRSDSITNMLDTLMQAKMNSDNGNAGPDQDSELLSDNHILTTIGDIFGAGVETTTSVVKWTLAFLLHNPQVKKKLYEEIDQNVGFSRTPTISDRNRLLLLEATIREVLRLRPVAPMLIPHKANVDSSIGEFAVDKGTEVIINLWALHHNEKEWHQPDQFMPERFLNPAGTQLISPSVSYLPFGAGPRSCIGEILARQELFLIMAWLLQRFDLEVPDDGQLPSLEGIPKVVFLIDSFKVKIKVRQAWREAQAEGST

SEQ ID NO: 3834 - protein, 508 aa, Homo sapiens
MWELVALLLLTLAYLFWPKRRCPGAKYPKSLLSLPLVGSLPFLPRHGHMHNNFFKLQKKYGPIYSVRMGTKTTVIVGHHQLAKEVLIKKGKDFSGRPQMATLDIASNNRKGIAFADSGAHWQLHRRLAMATFALFKDGDQKLEKIICQEISTLCDMLATHNGQSIDISFPVFVAVTNVISLICFNTSYKNGDPELNVIQNYNEGIIDNLSKDSLVDLVPWLKIFPNKTLEKLKSHVKIRNDLLNKILENYKEKFRSDSITNMLDTLMQAKMNSDNGNAGPDQDSELLSDNHILTTIGDIFGAGVETTTSVVKWTLAFLLHNPQVKKKLYEEIDQNVGFSRTPTISDRNRLLLLEATIREVLRLRPVAPMLIPHKANVDSSIGEFAVDKGTEVIINLWALHHNEKEWHQPDQFMPERFLNPAGTQLISPSVSYLPFGAGPRSCIGEILARQELFLIMAWLLQRFDLEVPDDGQLPSLEGIPKVVFLIDSFKVKIKVRQAWREAQAEGST

SEQ ID NO: 3835 - protein, 509 aa, Homo sapiens
MWELVALLLLTLAYLFWPKRRCPGAKYPKSLLSLPLVGSLPFLPRHGHMHNNFFKLQKKYGPIYSVRMGTKTTVIVGHHQLAKEVLIKKGKDFSGRPQMATLDIASNNRKGIAFADSGAHWQLHRRLAMATFALFKDGDQKLEKIICQEISTLCDMLATHNGQSIDISFPVFVAVTNVISLICFNTSYKNGDPELNVIQNYNEGIIDNLSKDSLVDLVPWLKIFPNKTLEKLKSHVKIRNDLLNKILENYKEKFRSDSITNMLDTLMQAKMNSDNGNAGPDQDSELLSDNHILTTIGDIFGAGVETTTSVVKWTLAFLLHNPQVKKKLYEEIDQNVGFSRTPTISDRNRLLLLEATIREVLRLRPVAPMLIPHKANVDSSSIGEFAVDKGTEVIINLWALHHNEKEWHQPDQFMPERFLNPAGTQLISPSVSYLPFGAGPRSCIGEILARQELFLIMAWLLQRFDLEVPDDGQLPSLEGIPKVVFLIDSFKVKIKVRQAWREAQAEGST

SEQ ID NO: 3836 - protein, 407 aa, Homo sapiens
MWELVALLLLTLAYLFWPKRRCPGAKYPKSLLSLPLVGSLPFLPRHGHMHNNFFKLQKKYGPIYSVRMGTKTTVIVGHHQLAKEVLIKKGKDFSGRPQMATLDIASNNRKGIAFADSGAHWQLHRRLAMATFALFKDGDQKLEKIICQEISTLCDMLATHNGQSIDISFPVFVAVTNVISLICFNTSYKNGDPELNVIQNYNEGIIDNLSKDSLVDLVPWLKVKKKLYEEIDQNVGFSRTPTISDRNRLLLLEATIREVLRLRPVAPMLIPHKANVDSSIGEFAVDKGTEVIINLWALHHNEKEWHQPDQFMPERFLNPAGTQLISPSVSYLPFGAGPRSCIGEILARQELFLIMAWLLQRFDLEVPDDGQLPSLEGIPKVVFLIDSFKVKIKVRQAWREAQAEGST

SEQ ID NO: 3837 - protein, 356 aa, Homo sapiens
MWELVALLLLTLAYLFWPKRRCPGAKYPKSLLSLPLVGSLPFLPRHGHMHNNFFKLQKKYGPIYSVRMGTKTTVIVGHHQLAKEVLIKKGKDFSGRPQMEKFRSDSITNMLDTLMQAKMNSDNGNAGPDQDSELLSDNHILTTIGDIFGAGVETTTSVVKWTLAFLLHNPQVKKKLYEEIDQNVGFSRTPTISDRNRLLLLEATIREVLRLRPVAPMLIPHKANVDSSIGEFAVDKGTEVIINLWALHHNEKEWHQPDQFMPERFLNPAGTQLISPSVSYLPFGAGPRSCIGEILARQELFLIMAWLLQRFDLEVPDDGQLPSLEGIPKVVFLIDSFKVKIKVRQAWREAQAEGST

SEQ ID NO: 3838 - protein, 192 aa, Homo sapiens
MIFSLASCIITAKLCTWAICFLTTSEEVQKKLYEEINQVFGNGPVTPEKIEQLRYCQHVLCETVRTAKLTPVSAQLQDIEGKIDRFIIPRETLVLYALGVVLQDPNTWPSPHKFDPDRFDDELVMKTFSSLGFSGTQECPELRFAYMVTTVLLSVLVKRLHLLSVEGQVIETKYELVTSSREEAWITVSKRY

SEQ ID NO: 3839 - protein, 258 aa, Homo sapiens
MLDFAIFAVTFLLALVGAVLYLYPASRQAAGIPGITPTEEKDGNLPDIVNSGSLHEFLVNLHERYGPVVSFWFGRRLVVSLGTVDVLKQHINPNKTSDPFETMLKSLLRYQSGGGSVSENHMRKKLYENGVTDSLKSNFALLLKLSEELLDKWLSYPETQHVPLSQHMLGFAMKSVTQMVMGSTFEDDQEVIRFQKNHGTILEDSMIFSLASCIITAKLCTWAICFLTTSEEVQKKLYEEINQVFGNGPVTPEKIEQL

SEQ ID NO: 3840 - protein, 470 aa, Homo sapiens
MLDFAIFAVTFLLALVGAVLYLYPASRQAAGIPGITPTEEKDGNLPDIVNSGSLHEFLVNLHERYGPVVSFWFGRRLVVSLGTVDVLKQHINPNKTSDPFETMLKSLLRYQSGGGSVSENHMRKKLYENGVTDSLKSNFALLLKLSEELLDKWLSYPETQHVPLSQHMLGFAMKSVTQMVMGSTFEDDQEVIRFQKNHGTLCIFTYFQVWSEIGKGFLDGSLDKNMTRKKQYEDALMQLESVLRNIIKERKGRNFSQHIFIDSLVQGNLNDQQILEDSMIFSLASCIITAKLCTWAICFLTTSEEVQKKLYEEINQVFGNGPVTPEKIEQLRYCQHVLCETVRTAKLTPVSAQLQDIEGKIDRFIIPRETLVLYALGVVLQDPNTWPSPHKFDPDRFDDELVMKTFSSLGFSGTQECPELRFAYMVTTVLLSVLVKRLHLLSVEGQVIETKYELVTSSREEAWITVSKRY

SEQ ID NO: 3841 - protein, 208 aa, Homo sapiens
MLDFAIFAVTFLLALVGAVLYLYPASRQAAGIPGITPTEEKDGNLPDIVNSGSLHEFLVNLHERYGPVVSFWFGRRLVVSLGTVDVLKQHINPNKTSDPFETMLKSLLRYQSGGGSVSENHMRKKLYENGVTDSLKSNFALLLKLSEELLDKWLSYPETQHVPLSQHMLGFAMKSVTQMVMGSTFEDDQEVIRFQKNHGTPSCNWSLF

SEQ ID NO: 3842 - protein, 462 aa, Homo sapiens
MLDFAIFAVTFLLALVGAVLYLYPASRQAAGIPGITPTEEKDGNLPDIVNSGSLHEFLVNLHERYGPVVSFWFGRRLVVSLGTVDVLKQHINPNKTSDPFETMLKSLLRYQSGGGSVSENHMRKKLYENGVTDSLKSNFALLLKLSEELLDKWLSYPETQHVPLSQHMLGFAMKSVTQMVMGSTFEDDQEVIRFQKNHGTVWSEIGKGFLDGSLDKNMTRKKQYEDALMQLESVLRNIIKERKGRNFSQHIFIDSLVQGNLNDQQILEDSMIFSLASCIITAKLCTWAICFLTTSEEVQKKLYEEINQVFGNGPVTPEKIEQLRYCQHVLCETVRTAKLTPVSAQLQDIEGKIDRFIIPRETLVLYALGVVLQDPNTWPSPHKFDPDRFDDELVMKTFSSLGFSGTQECPELRFAYMVTTVLLSVLVKRLHLLSVEGQVIETKYELVTSSREEAWITVSKRY

SEQ ID NO: 3843 - protein, 44 aa, Homo sapiens
MLDFAIFAVTFLLALVGAVLYLYPASRQAAGIPGITPTEENGPF

SEQ ID NO: 3844 - protein, 44 aa, Homo sapiens; identical to SEQ ID NO: 3843

SEQ ID NO: 3845 - protein, 78 aa, Homo sapiens
MLLLGLLLLLPLLAGARLLWNWWKLRSLHLPPLAPGFLHLLQPDLPIYLLGLTQKFGPIYRLHLGLQAPTSSCRQAGV

SEQ ID NO: 3846 - protein, 465 aa, Homo sapiens
MLLLGLLLLLPLLAGARLLWNWWKLRSLHLPPLAPGFLHLLQPDLPIYLLGLTQKFGPIYRLHLGLQDKLVSRNYPDLSLGDYSLLWKAHKKLTRSALLLGIRDSMEPVVEQLTQEFCERMRAQPGTPVAIEEEFSLLTCSIICYLTFGDKIKDDNLMPAYYKCIQEVLKTWSHWSIQIVDVIPFLRFFPNPGLRRLKQAIEKRDHIVEMQLRQHKESLVAGQWRDMMDYMLQGVAQPSMEEGSGQLLEGHVHMAAVDLLIGGTETTANTLSWAVVFLLHHPEIQQRLQEELDHELGPGASSSRVPYKDRARLPLLNATIAEVLRLRPVVPLALPHRTTRPSSISGYDIPEGTVIIPNLQGAHLDETVWERPHEFWPDRFLEPGKNSRALAFGCGARVCLGEPLARLELFVVLTRLLQAFTLLPSGDALPSLQPLPHCSVILKMQPFQVRLQPRGMGAHSPGQSQ

SEQ ID NO: 3847 - protein, 186 aa, Homo sapiens
MLLLGLLLLLPLLAGARLLWNWWKLRSLHLPPLAPGFLHLLQPDLPIYLLGLTQKFGPIYRLHLGLQDVVVLNSKRTIEEAMVKKWADFAGRPEPLTFPTLQPPPPPADKLVSRNYPDLSLGDYSLLWKAHKKLTRSALLLGIRDSMEPVVEQLTQEFCERMRAQPGTPVAIEEEFSLLTCSIICY

SEQ ID NO: 3848 - protein, 108 aa, Homo sapiens
MLLLGLLLLLPLLAGARLLWNWWKLRSLHLPPLAPGFLHLLQPDLPIYLLGLTQKFGPIYRLHLGLQDVVVLNSKRTIEEAMVKKWADFAGRPEPLTSPTSSCRQAGV

SEQ ID NO: 3849 - protein, 495 aa, Homo sapiens
MLLLGLLLLLPLLAGARLLWNWWKLRSLHLPPLAPGFLHLLQPDLPIYLLGLTQKFGPIYRLHLGLQDVVVLNSKRTIEEAMVKKWADFAGRPEPLTYKLVSRNYPDLSLGDYSLLWKAHKKLTRSALLLGIRDSMEPVVEQLTQEFCERMRAQPGTPVAIEEEFSLLTCSIICYLTFGDKIKDDNLMPAYYKCIQEVLKTWSHWSIQIVDVIPFLRFFPNPGLRRLKQAIEKRDHIVEMQLRQHKESLVAGQWRDMMDYMLQGVAQPSMEEGSGQLLEGHVHMAAVDLLIGGTETTANTLSWAVVFLLHHPEIQQRLQEELDHELGPGASSSRVPYKDRARLPLLNATIAEVLRLRPVVPLALPHRTTRPSSISGYDIPEGTVIIPNLQGAHLDETVWERPHEFWPDRFLEPGKNSRALAFGCGARVCLGEPLARLELFVVLTRLLQAFTLLPSGDALPSLQPLPHCSVILKMQPFQVRLQPRGMGAHSPGQSQ

SEQ ID NO: 3850 - protein, 495 aa, Homo sapiens; identical to SEQ ID NO: 3849

SEQ ID NO: 3851 - protein, 495 aa, Homo sapiens; identical to SEQ ID NO: 3849

SEQ ID NO: 3852 - protein, 190 aa, Homo sapiens
MLLLGLLLLLPLLAGARLLWNWWKLRSLHLPPLAPGFLHLLQPDLPIYLLGLTQKFGPIYRLHLGLQDVVVLNSKRTIEEAMVKKWADFAGRPEPLTYKLVSRNYPDLSLGDYSLLWKAHKKLTRSALLLGIRDSMEPVVEQLTQEFCERMRAQPGTPVAIEEEFSLLTCSIICYLTFGDKIKEVLKTWS

SEQ ID NO: 3853 - protein, 321 aa, Homo sapiens
MAIRVLLGFSIPEEDLGHLFEVYQQFVDNVFSLPVDLPFSGYRRGIQARQILQKGLEKAIREKLQCTQGKDYLDALDLLIESSKEHGKEMTMQELKDGTLELIFAAYATTASASTSLIMQLLKHPTVLEKLRDELRAHGILHSGGCPCEGTLRLDTLSGLRYLDCVIKEVMRLFTPISGGYRTVLQTFELDGFQIPKGWSVMYSIRDTHDTAPVFKDVNVFDPDRFSQARSEDKDGRFHYLPFGGGVRTCLGKHLAKLFLKVLAVELASTSRFELATRTFPRITLVPVLHPVDGLSVKFFGLDSNQNEILPETEAMLSATV

SEQ ID NO: 3854 - protein, 172 aa, Homo sapiens
MKNKTCVLVCVSVFGGERGQVTVPRVGVRRPSLAGPLQKCTLRETRVWLPQGSGFQSSRREKYGNVFKTHLLGRPLIRVTGAENVRKILMGEHHLVSTEWPRSTRMLLGPNTVSNSIGDIHRNKRKVFSKIFSHEALESYLPKIQLVIQDTLRAWSSHPEAINVYQEAQKLT

SEQ ID NO: 3855 - protein, 512 aa, Homo sapiens
MLFEGLDLVSALATLAACLVSVTLLLAVSQQLWQLRWAATRDKSCKLPIPKGSMGFPLIGETGHWLLQGSGFQSSRREKYGNVFKTHLLGRPLIRVTGAENVRKILMGEHHLVSTEWPRSTRMLLGPNTVSNSIGDIHRNKRKVFSKIFSHEALESYLPKIQLVIQDTLRAWSSHPEAINVYQEAQKLTFRMAIRVLLGFSIPEEDLGHLFEVYQQFVDNVFSLPVDLPFSGYRRGIQARQILQKGLEKAIREKLQCTQGKDYLDALDLLIESSKEHGKEMTMQELKDGTLELIFAAYATTASASTSLIMQLLKHPTVLEKLRDELRAHGILHSGGCPCEGTLRLDTLSGLRYLDCVIKEVMRLFTPISGGYRTVLQTFELDGFQIPKGWSVMYSIRDTHDTAPVFKDVNVFDPDRFSQARSEDKDGRFHYLPFGGGVRTCLGKHLAKLFLKVLAVELASTSRFELATRTFPRITLVPVLHPVDGLSVKFFGLDSNQNEILPETEAMLSATV

SEQ ID NO: 3856 - protein, 182 aa, Homo sapiens
MLFEGLDLVSALATLAACLVSVTLLLAVSQQLWQLRWAATRDKSCKLPIPKGSMGFPLIGETGHWLLQVFSKIFSHEALESYLPKIQLVIQDTLRAWSSHPEAINVYQEAQKLTFRMAIRVLLGFSIPEEDLGHLFEVYQQFVDNVFSLPVDLPFSGYRRGIQARQILQKGLEKAIREKLQC

SEQ ID NO: 3857 - protein, 437 aa, Homo sapiens
MLFEGLDLVSALATLAACLVSVTLLLAVSQQLWQLRWAATRDKSCKLPIPKGSMGFPLIGETGHWLLQVFSKIFSHEALESYLPKIQLVIQDTLRAWSSHPEAINVYQEAQKLTFRMAIRVLLGFSIPEEDLGHLFEVYQQFVDNVFSLPVDLPFSGYRRGIQARQILQKGLEKAIREKLQCTQGKDYLDALDLLIESSKEHGKEMTMQELKDGTLELIFAAYATTASASTSLIMQLLKHPTVLEKLRDELRAHGILHSGGCPCEGTLRLDTLSGLRYLDCVIKEVMRLFTPISGGYRTVLQTFELDGFQIPKGWSVMYSIRDTHDTAPVFKDVNVFDPDRFSQARSEDKDGRFHYLPFGGGVRTCLGKHLAKLFLKVLAVELASTSRFELATRTFPRITLVPVLHPVDGLSVKFFGLDSNQNEILPETEAMLSATV

SEQ ID NO: 3858 - protein, 494 aa, Homo sapiens
MLASGMLLVALLVCLTVMVLMSVWQQRKSKGKLPPGPTPLPFIGNYLQLNTEQMYNSLMKISERYGPVFTIHLGPRRVVVLCGHDAVREALVDQAEEFSGRGEQATFDWVFKGYGVVFSNGERAKQLRRFSIATLRDFGVGKRGIEERIQEEAGFLIDALRGTGGANIDPTFFLSRTVSNVISSIVFGDRFDYKDKEFLSLLRMMLGIFQFTSTSTGQLYEMFSSVMKHLPGPQQQAFQLLQGLEDFIAKKVEHNQRTLDPNSPRDFIDSFLIRMQEEEKNPNTEFYLKNLVMTTLNLFIGGTETVSTTLRYGFLLLMKHPEVEAKVHEEIDRVIGKNRQPKFEDRAKMPYMEAVIHEIQRFGDVIPMSLARRVKKDTKFRDFFLPKGTEVYPMLGSVLRDPSFFSNPQDFNPQHFLNEKGQFKKSDAFVPFSIGKRNCFGEGLARMELFLFFTTVMQNFRLKSSQSPKDIDVSPKHVGFATIPRNYTMSFLPR

SEQ ID NO: 3859 - protein, 65 aa, Homo sapiens
MLASGMLLVALLVCLTVMVLMSVWQQRKSKGKLPPGPTPLPFIGNYLQLNTEQMYNSLMKVSQDQ

SEQ ID NO: 3860 - protein, 80 aa, Homo sapiens
MLASGLLLVALLACLTVMVLMSVWQQRKSRGKLPPGPTPLPFIGNYLQLNTEHICDSIMKAWRSATGSAPSSSCALPSPP

SEQ ID NO: 3861 - protein, 494 aa, Homo sapiens
MLASGLLLVALLACLTVMVLMSVWQQRKSRGKLPPGPTPLPFIGNYLQLNTEHICDSIMKFSECYGPVFTIHLGPRRVVVLCGHDAVREALVDQAEEFSGRGEQATFDWVFKGYGVAFSNGERAKQLLRFAIATLRDFGVGKRGIEERIQEESGFLIEAIRSTHGANIDPTFFLSRTVSNVISSIVFGDRFDYEDKEFLSLLSMMLGIFQFTSTSTGQLYEMFSSVMKHLPGPQQQAFKLLQGLEDFIAKKVEHNQRTLDPNSPQDFIDSFLIHMQEEEKNPNTEFYLKNLMMSTLNLFIAGTETVSTTLRYGFLLLMKHPEVEAKVHEEIDRVIGKNRQPKFEDRTKMPYMEAVIHEIQRFGDVIPMSLARRVKKDTKFRDFFLPKGTEVFPMLGSVLRDPSFFSNPQDFNPQHFLDDKGQFKKSDAFVPFSIGKRNCFGEGLARMELFLFFTTVMQNFRLKSSQSPKDIDVSPKHVVFATIPRNYTMSFLPR

SEQ ID NO: 3862 - protein, 443 aa, Homo sapiens
MLASGLLLVALLACLTVMVLMSVWQQRKSRGKLPPGPTPLPFIGNYLQLNTEHICDSIMKVSQGVAFSNGERAKQLLRFAIATLRDFGVGKRGIEERIQEESGFLIEAIRSTHGANIDPTFFLSRTVSNVISSIVFGDRFDYEDKEFLSLLSMMLGIFQFTSTSTGQLYEMFSSVMKHLPGPQQQAFKLLQGLEDFIAKKVEHNQRTLDPNSPQDFIDSFLIHMQEEEKNPNTEFYLKNLMMSTLNLFIAGTETVSTTLRYGFLLLMKHPEVEAKVHEEIDRVIGKNRQPKFEDRTKMPYMEAVIHEIQRFGDVIPMSLARRVKKDTKFRDFFLPKGTEVFPMLGSVLRDPSFFSNPQDFNPQHFLDDKGQFKKSDAFVPFSIGKRNCFGEGLARMELFLFFTTVMQNFRLKSSQSPKDIDVSPKHVVFATIPRNYTMSFLPR

SEQ ID NO: 3863 - protein, 491 aa, Homo sapiens
MELSVLLFLALLTGLLLLLVQRHPNTHDRLPPGPRPLPLLGNLLQMDRRGLLKSFLRFREKYGDVFTVHLGPRPVVMLCGVEAIREALVDKAEAFSGRGKIAMVDPFFRGYGVIFANGNRWKVLRRFSVTTMRDFGMGKRSVEERIQEEAQCLIEELRKSKGALMDPTFLFQSITANIICSIVFGKRFHYQDQEFLKMLNLFYQTFSLISSVFGQLFELFSGFLKYFPGAHRQVYKNLQEINAYIGHSVEKHRETLDPSAPKDLIDTYLLHMEKEKSNAHSEFSHQNLNLNTLSLFFAGTETTSTTLRYGFLLMLKYPHVAERVYREIEQVIGPHRPPELHDRAKMPYTEAVIYEIQRFSDLLPMGVPHIVTQHTSFRGYIIPKDTEVFLILSTALHDPHYFEKPDAFNPDHFLDANGALKKTEAFIPFSLGKRICLGEGIARAELFLFFTTILQNFSMASPVAPEDIDLTPQECGVGKIPPTYQIRFLPR

SEQ ID NO: 3864 - protein, 491 aa, Homo sapiens; identical to SEQ ID NO: 3863

SEQ ID NO: 3865 - protein, 255 aa, Homo sapiens
MLCGVEAIREALVDKAEAFSGRGKIAMVDPFFRGYGVIFANGNRWKVLRRFSVTTMRDFGMGKRSVEERIQEEAQCLIEELRKSKERVYREIEQVIGPHRPPELHDRAKMPYTEAVIYEIQRFSDLLPMGVPHIVTQHTSFRGYIIPKDTEVFLILSTALHDPHYFEKPDAFNPDHFLDANGALKKTEAFIPFSLGKRICLGEGIARAELFLFFTTILQNFSMASPVAPEDIDLTPQECGVGKIPPTYQIRFLPR

SEQ ID NO: 3866 - protein, 194 aa, Homo sapiens
  VARIANT 1: note = misc_feature - Xaa can be any naturally occurring amino acid
XPRPLPLLGNLLQMDRRGLLKSFLRFREKYGDVFTVHLGPRPVVMLCGVEAIREALVDKAEAFSGRGKIAMVDPFFRGYGVIFANGNRWKVLRRFSVTTMRDFGMGKRSVEERIQEEAQCLIEELRKSKGALMDPTFLFQSITANIICSIVFGKRFHYQDQEFLKMLNLFYQTFSLISSVFGQTESRCFIPAGV

SEQ ID NO: 3867 - protein, 431 aa, Homo sapiens
MDPAVALVLCLSCLFLLSLWRQSSGRGRLPSGPTPLPIIGNILQLDVKDMSKSLTNFSKVYGPVFTVYFGLKPIVVLHGYEAVKEALIDHGEEFSGRGSFPVAEKVNKGLGILFSNGKRWKEIRRFCLMTLRNFGMGKRSIEDRVQEEARCLVEELRKTNASPCDPTFILGCAPCNVICSVIFHDRFDYKDQRFLNLMEKFNENLRILSSPWIQEKHNQQSEFTVESLIATVTDMFGAGTETTSTTLRYGLLLLLKYPEVTAKVQEEIECVVGRNRSPCMQDRSHMPYTDAVVHEIQRYIDLLPTNLPHAVTCDVKFKNYLIPKGTTIITSLTSVLHNDKEFPNPEMFDPGHFLDKSGNFKKSDYFMPFSAGKRMCMGEGLARMELFLFLTTILQNFNLKSQVDPKDIDITPIANAFGRVPPLYQLCFIPV

SEQ ID NO: 3868 - protein, 490 aa, Homo sapiens
MDPAVALVLCLSCLFLLSLWRQSSGRGRLPSGPTPLPIIGNILQLDVKDMSKSLTNFSKVYGPVFTVYFGLKPIVVLHGYEAVKEALIDHGEEFSGRGSFPVAEKVNKGLGILFSNGKRWKEIRRFCLMTLRNFGMGKRSIEDRVQEEARCLVEELRKTNASPCDPTFILGCAPCNVICSVIFHDRFDYKDQRFLNLMEKFNENLRILSSPWIQVCNNFPALIDYLPGSHNKIAENFAYIKSYVLERIKEHQESLDMNSARDFIDCFLIKMEQEKHNQQSEFTVESLIATVTDMFGAGTETTSTTLRYGLLLLLKYPEVTAKVQEEIECVVGRNRSPCMQDRSHMPYTDAVVHEIQRYIDLLPTNLPHAVTCDVKFKNYLIPKGTTIITSLTSVLHNDKEFPNPEMFDPGHFLDKSGNFKKSDYFMPFSAGKRMCMGEGLARMELFLFLTTILQNFNLKSQVDPKDIDITPIANAFGRVPPLYQLCFIPV

SEQ ID NO: 3869 - protein, 490 aa, Homo sapiens
MDPFVVLVLCLSCLLLLSIWRQSSGRGKLPPGPTPLPVIGNILQIDIKDVSKSLTNLSKIYGPVFTLYFGLERMVVLHGYEVVKEALIDLGEEFSGRGHFPLAERANRGFGIVFSNGKRWKEIRRFSLMTLRNFGMGKRSIEDRVQEEARCLVEELRKTKASPCDPTFILGCAPCNVICSIIFQKRFDYKDQQFLNLMEKLNENIRIVSTPWIQICNNFPTIIDYFPGTHNKLLKNLAFMESDILEKVKEHQESMDINNPRDFIDCFLIKMEKEKQNQQSEFTIENLVITAADLLGAGTETTSTTLRYALLLLLKHPEVTAKVQEEIERVIGRNRSPCMQDRGHMPYTDAVVHEVQRYIDLIPTSLPHAVTCDVKFRNYLIPKGTTILTSLTSVLHDNKEFPNPEMFDPRHFLDEGGNFKKSNYFMPFSAGKRICVGEGLARMELFLFLTFILQNFNLKSLIDPKDLDTTPVVNGFASVPPFYQLCFIPV

SEQ ID NO: 3870 - protein, 162 aa, Homo sapiens
MDPFVVLVLCLSCLLLLSIWRQSSGRGKLPPGPTPLPVIGNILQIDIKDVSKSLTNLSKIYGPVFTLYFGLERMVVLHGYEVVKEALIDLGEEFSGRGHFPLAERANRGFGIVFSNGKRWKEIRRFSLMTLRNFGMGKRSIEDRVQEEARCLVEELRKTKGG

SEQ ID NO: 3871 - protein, 307 aa, Homo sapiens
MAAKCCSTFFLGCEFSQFLPLFLLGIISSNGKRWKEIRRFSLTTLRNFGMGKRSIEDRVQEEAHCLVEELRKTKASPCDPTFILGCAPCNVICSVVFQKRFDYKDQNFLTLMKRFNENFRILNSPWIQVCNNFPLLIDCFPGTHNKVLKNVALTRSYIREKVKEHQASLDVNNPRDFIDCFLIKMEQEKDNQKSEFNIENLVGTVADLFVAGTETTSTTLRYGLLLLLKHPEVTAKVQEEIDHVIGRHRSPCMQDRSHMPYTDAVVHEIQRYSDLVPTGVPHAVTTDTKFRNYLIPKSFDNKIMLAA

SEQ ID NO: 3872 - protein, 490 aa, Homo sapiens
MEPFVVLVLCLSFMLLFSLWRQSCRRRKLPPGPTPLPIIGNMLQIDVKDICKSFTNFSKVYGPVFTVYFGMNPIVVFHGYEAVKEALIDNGEEFSGRGNSPISQRITKGLGIISSNGKRWKEIRRFSLTTLRNFGMGKRSIEDRVQEEAHCLVEELRKTKASPCDPTFILGCAPCNVICSVVFQKRFDYKDQNFLTLMKRFNENFRILNSPWIQVCNNFPLLIDCFPGTHNKVLKNVALTRSYIREKVKEHQASLDVNNPRDFIDCFLIKMEQEKDNQKSEFNIENLVGTVADLFVAGTETTSTTLRYGLLLLLKHPEVTAKVQEEIDHVIGRHRSPCMQDRSHMPYTDAVVHEIQRYSDLVPTGVPHAVTTDTKFRNYLIPKGTTIMALLTSVLHDDKEFPNPNIFDPGHFLDKNGNFKKSDYFMPFSAGKRICAGEGLARMELFLFLTTILQNFNLKSVDDLKNLNTTAVTKGIVSLPPSYQICFIPV

SEQ ID NO: 3873 - protein, 393 aa, Homo sapiens
MEPFVVLVLCLSFMLLFSLWRQSCRRRKLPPGPTPLPIIGNMLQIDVKDICKSFTNFSKVYGPVFTVYFGMNPIVVFHGYEAVKEALIDNGEEFSGRGNSPISQRITKGLGIISSNGKRWKEIRRFSLTTLRNFGMGKRSIEDRVQEEAHCLVEELRKTKASPCDPTFILGCAPCNVICSVVFQKRFDYKDQNFLTLMKRFNENFRILNSPWIQVCNNFPLLIDCFPGTHNKVLKNVALTRSYIREKVKEHQASLDVNNPRDFIDCFLIKMEQEKDNQKSEFNIENLVGTVADLFVAGTETTSTTLRYGLLLLLKHPEVTAKVQEEIDHVIGRHRSPCMQDRSHMPYTDAVVHEIQRYSDLVPTGVPHAVTTDTKFRNYLIPKSFDNKIMLAA

SEQ ID NO: 3874 - protein, 99 aa, Homo sapiens
MEPFVVLVLCLSFMLLFSLWRQSCRRRKLPPGPTPLPIIGNMLQIDVKDICKSFTNVSLPYVPPANCKGNHFQQWKEMEGDPAFLPHNLAEFWDGEEEH

SEQ ID NO: 3875 - protein, 83 aa, Homo sapiens
MEPFVVLVLCLSFMLLFSLWRQSCRRRKLPPGPTPLPIIGNMLQIDVKDICKSFTNVSLPYVPPANCKGSQKSMVLCSPCILA

SEQ ID NO: 3876 - protein, 388 aa, Homo sapiens
MFLQPIAKGIISSNGKRWKEIRRFSLTTLRNFGMGKRSIEDRVQEEAHCLVEELRKTKASPCDPTFILGCAPCNVICSVVFQKRFDYKDQNFLTLMKRFNENFRILNSPWIQVCNNFPLLIDCFPGTHNKVLKNVALTRSYIREKVKEHQASLDVNNPRDFIDCFLIKMEQEKDNQKSEFNIENLVGTVADLFVAGTETTSTTLRYGLLLLLKHPEVTAKVQEEIDHVIGRHRSPCMQDRSHMPYTDAVVHEIQRYSDLVPTGVPHAVTTDTKFRNYLIPKGTTIMALLTSVLHDDKEFPNPNIFDPGHFLDKNGNFKKSDYFMPFSAGKRICAGEGLARMELFLFLTTILQNFNLKSVDDLKNLNTTAVTKGIVSLPPSYQICFIPV

SEQ ID NO: 3877 - protein, 420 aa, Homo sapiens
MNPIVVFHGYEAVKEALIDNGEEFSGRGNSPISQRITKGLGIISSNGKRWKEIRRFSLTTLRNFGMGKRSIEDRVQEEAHCLVEELRKTKASPCDPTFILGCAPCNVICSVVFQKRFDYKDQNFLTLMKRFNENFRILNSPWIQVCNNFPLLIDCFPGTHNKVLKNVALTRSYIREKVKEHQASLDVNNPRDFIDCFLIKMEQEKDNQKSEFNIENLVGTVADLFVAGTETTSTTLRYGLLLLLKHPEVTAKVQEEIDHVIGRHRSPCMQDRSHMPYTDAVVHEIQRYSDLVPTGVPHAVTTDTKFRNYLIPKGTTIMALLTSVLHDDKEFPNPNIFDPGHFLDKNGNFKKSDYFMPFSAGKRICAGEGLARMELFLFLTTILQNFNLKSVDDLKNLNTTAVTKGIVSLPPSYQICFIPV

SEQ ID NO: 3878 - protein, 420 aa, Homo sapiens; identical to SEQ ID NO: 3877

SEQ ID NO: 3879 - protein, 490 aa, Homo sapiens [sequence omitted]

SEQ ID NO: 3880 - protein, 282 aa, Homo sapiens
MDSLVVLVLCLSCLLLLSLWRQSSGRGKLPPGPTPLPVIGNILQIGIKDISKSLTNLSKVYGPVFTLYFGLKPIVVLHGYEAVKEALIDLGEEFSGRGIFPLAERANRGFGIVFSNGKKWKEIRRFSLMTLRNFGMGKRSIEDRVQEEARCLVEELRKTKASPCDPTFILGCAPCNVICSIIFHKRFDYKDQQFLNLMEKLNENIKILSSPWIQICNNFSPIIDYFPGTHNKLLKNVAFMKSYILEKVKEHQESMDMNNPQDFIDCFLMKMEKLKSRKRLNV

SEQ ID NO: 3881 - protein, 162 aa, Homo sapiens
MDSLVVLVLCLSCLLLLSLWRQSSGRGKLPPGPTPLPVIGNILQIGIKDISKSLTNLSKVYGPVFTLYFGLKPIVVLHGYEAVKEALIDLGEEFSGRGIFPLAERANRGFGIVFSNGKKWKEIRRFSLMTLRNFGMGKRSIEDRVQEEARCLVEELRKTKGG

SEQ ID NO: 3882 - protein, 86 aa, Homo sapiens
MSALGVTVALLVWAAFLLLVSMWRQVHSSWNLPPGPFPLPIIGNLFQLELKNIPKSFTRLAQRFGPVFTLYVGSQRMVVMHGYKAV

SEQ ID NO: 3883 - protein, 493 aa, Homo sapiens
MSALGVTVALLVWAAFLLLVSMWRQVHSSWNLPPGPFPLPIIGNLFQLELKNIPKSFTRLAQRFGPVFTLYVGSQRMVVMHGYKAVKEALLDYKDEFSGRGDLPAFHAHRDRGIIFNNGPTWKDIRRFSLTTLRNYGMGKQGNESRIQREAHFLLEALRKTQGQPFDPTFLIGCAPCNVIADILFRKHFDYNDEKFLRLMYLFNENFHLLSTPWLQLYNNFPSFLHYLPGSHRKVIKNVAEVKEYVSERVKEHHQSLDPNCPRDLTDCLLVEMEKEKHSAERLYTMDGITVTVADLFFAGTETTSTTLRYGLLILMKYPEIEEKLHEEIDRVIGPSRIPAIKDRQEMPYMDAVVHEIQRFITLVPSNLPHEATRDTIFRGYLIPKGTVVVPTLDSVLYDNQEFPDPEKFKPEHFLNENGKFKYSDYFKPFSTGKRVCAGEGLARMELFLLLCAILQHFNLKPLVDPKDIDLSPIHIGFGCIPPRYKLCVIPRS

SEQ ID NO: 3884 - protein, 493 aa, Homo sapiens; identical to SEQ ID NO: 3883

SEQ ID NO: 3885 - protein, 356 aa, Homo sapiens
RPFPASHHREPLPVGIEEYSQVLHPGIIFNNGPTWKDIRRFSLTTLRNYGMGKQGNESRIQREAHFLLEALRKTQGQPFDPTFLIGCAPCNVIADILFRKHFDYNDEKFLRLMYLFNENFHLLSTPWLQLYNNFPSFLHYLPGSHRKVIKNVAEVKEYVSERVKEHHQSLDPNCPRDLTDCLLVEMEKEKHSAERLYTMDGITVTVADLFFAGTETTSTTLRYGLLILMKYPEIEEKLHEEIDRVIGPSRIPAIKDRQEMPYMDAVVHEIQRFITLVPSNLPHEATRDTIFRGYLIPKGTVVVPTLDSVLYDNQEFPDPEKFKPEHFLNENGKFKYSDYFKPFSTGKRVCAGEGLA

SEQ ID NO: 3886 - protein, 306 aa, Homo sapiens
RPFPASHHREPLPVGIEEYSQVLHPGQPFDPTFLIGCAPCNVIADILFRKHFDYNDEKFLRLMYLFNENFHLLSTPWLQLYNNFPSFLHYLPGSHRKVIKNVAEVKEYVSERVKEHHQSLDPNCPRDLTDCLLVEMEKEKHSAERLYTMDGITVTVADLFFAGTETTSTTLRYGLLILMKYPEIEEKLHEEIDRVIGPSRIPAIKDRQEMPYMDAVVHEIQRFITLVPSNLPHEATRDTIFRGYLIPKGTVVVPTLDSVLYDNQEFPDPEKFKPEHFLNENGKFKYSDYFKPFSTGKRVCAGEGLA

SEQ ID NO: 3887 - protein, 43 aa, Homo sapiens
  VARIANT 1: note = misc_feature - Xaa can be any naturally occurring amino acid
XGPFPLPIIGNLFQLELKNIPKSFTRESFLIMDLPGRTSGGFP

SEQ ID NO: 3888 - protein, 172 aa, Homo sapiens
ARVQEEIDLVVGRARLPALKDRAAMPYTDAVIHEVQRFADIIPMNLPHRVTRDTAFRGFLIPKGTDVITLLNTVHYDPSQFLTPQEFNPEHFLDANQSFKKSPAFMPFSAGEGRNQSLSGPISTYIPHPNSTCQILSLLPSTHSQLWMHRDIHSSSQLCSYRQVVTKILVKQ

SEQ ID NO: 3889 - protein, 491 aa, Homo sapiens
MDSISTAILLLLLALVCLLLTLSSRDKGKLPPGPRPLSILGNLLLLCSQDMLTSLTKLSKEYGSMYTVHLGPRRVVVLSGYQAVKEALVDQGEEFSGRGDYPAFFNFTKGNGIAFSSGDRWKVLRQFSIQILRNFGMGKRSIEERILEEGSFLLAELRKTEGEPFDPTFVLSRSVSNIICSVLFGSRFDYDDERLLTIIRLINDNFQIMSSPWGELYDIFPSLLDWVPGPHQRIFQNFKCLRDLIAHSVHDHQASLDPRSPRDFIQCFLTKMAEEKEDPLSHFHMDTLLMTTHNLLFGGTKTVSTTLHHAFLALMKYPKVQARVQEEIDLVVGRARLPALKDRAAMPYTDAVIHEVQRFADIIPMNLPHRVTRDTAFRGFLIPKGTDVITLLNTVHYDPSQFLTPQEFNPEHFLDANQSFKKSPAFMPFSAGRRLCLGESLARMELFLYLTAILQSFSLQPLGAPEDIDLTPLSSGLGNLPRPFQLCLRPR

SEQ ID NO: 3890 - protein, 320 aa, Homo sapiens
MDSISTAILLLLLALVCLLLTLSSRDKGKLPPGPRPLSILGNLLLLCSQDMLTSLTKLSKEYGSMYTVHLGPRRVVVLSGYQAVKEALVDQGEEFSGRGDYPAFFNFTKGNGIAFSSGDRWKVLRQFSIQILRNFGMGKRSIEERILEEGSFLLAELRKTEGEPFDPTFVLSRSVSNIICSVLFGSRFDYDDERLLTIIRLINDNFQIMSSPWGELYDIFPSLLDWVPGPHQRIFQNFKCLRDLIAHSVHDHQASLDPRSPRDFIQCFLTKMAEEKEDPLSHFHMDTLLMTTHNLLFGGTKTPACRRRSTSWWDARGCRR

SEQ ID NO: 3891 - protein, 81 aa, Homo sapiens
  VARIANT 1: note = misc_feature - Xaa can be any naturally occurring amino acid
XPHRVTRDTAFRGFLIPKGTDVITLLNTVHYDPSQFLTPQEFNPEHFLDANQSFKKSPAFMPFSAALDAQRHSFLLSTLLL

SEQ ID NO: 3892 - protein, 502 aa, Homo sapiens
MLAAMGSLAAALWAVVHPRTLLLGTVAFLLAADFLKRRRPKNYPPGPWRLPFLGNFFLVDFEQSHLEVQLFVKKYGNLFSLELGDISAVLITGLPLIKEALIHMDQNFGNRPVTPMREHIFKKNGLIMSSGQAWKEQRRFTLTALRNFGLGKKSLEERIQEEAQHLTEAIKEENGQPFDPHFKINNAVSNIICSITFGERFEYQDSWFQQLLKLLDEVTYLEASKTCQLYNVFPWIMKFLPGPHQTLFSNWKKLKLFVSHMIDKHRKDWNPAETRDFIDAYLKEMSKHTGNPTSSFHEENLICSTLDLFFAGTETTSTTLRWALLYMALYPEIQEKVQAEIDRVIGQGQQPSTAARESMPYTNAVIHEVQRMGNIIPLNVPREVTVDTTLAGYHLPKGTMILTNLTALHRDPTEWATPDTFNPDHFLENGQFKKREAFMPFSIGKRACLGEQLARTELFIFFTSLMQKFTFRPPNNEKLSLKFRMGITISPVSHRLCAVPQV

SEQ ID NO: 3893 - protein, 268 aa, Homo sapiens
MPCSSKRNFCRQTMPSFIHEDDKNGRLIEKASVNRKPQLPQHFVDAYLDEMDQGKNDPSSTFSKENLIFSVGELIIAGTETTTNVLRWAILFMALYPNIQGQVQKEIDLIMGPNGKPSWDDKCKMPYTEAVLHEVLRFCNIVPLGIFHATSEDAVVRGYSIPKGTTVITNLYSVHFDEKYWRDPEVFHPERFLDSSGYFAKKEALVPFSLGRRHCLGEHLARMEMFLFFTALLQRFHLHFPHELVPDLKPRLGMTLQPQPYLICAERR

SEQ ID NO: 3894 - protein, 37 aa, Homo sapiens
MPCSSKRNFCRQTMPSFIHEDDKNGRLTQFQIWPRMG

SEQ ID NO: 3895 - protein, 37 aa, Homo sapiens; identical to SEQ ID NO: 3894

SEQ ID NO: 3896 - protein, 37 aa, Homo sapiens; identical to SEQ ID NO: 3894

SEQ ID NO: 3897 - protein, 501 aa, Homo sapiens
MWKLWRAEEGAAALGGALFLLLFALGVRQLLKQRRPMGFPPGPPGLPFIGNIYSLAASSELPHVYMRKQSQVYGEIFSLDLGGISTVVLNGYDVVKECLVHQSEIFADRPCLPLFMKMTKMGGLLNSRYGRGWVDHRRLAVNSFRYFGYGQKSFESKILEETKFFNDAIETYKGRPFDFKQLITNAVSNITNLIIFGERFTYEDTDFQHMIELFSENVELAASASVFLYNAFPWIGILPFGKHQQLFRNAAVVYDFLSRLIEKASVNRKPQLPQHFVDAYLDEMDQGKNDPSSTFSKENLIFSVGELIIAGTETTTNVLRWAILFMALYPNIQGQVQKEIDLIMGPNGKPSWDDKCKMPYTEAVLHEVLRFCNIVPLGIFHATSEDAVVRGYSIPKGTTVITNLYSVHFDEKYWRDPEVFHPERFLDSSGYFAKKEALVPFSLGRRHCLGEHLARMEMFLFFTALLQRFHLHFPHELVPDLKPRLGMTLQPQPYLICAERR

SEQ ID NO: 3898 - protein, 32 aa, Homo sapiens
  VARIANT 1: note = misc_feature - Xaa can be any naturally occurring amino acid
XQSEIFADRPCLPLFMKMTKMGVLERPRSVPS

SEQ ID NO: 3899 - protein, 73 aa, Homo sapiens
AVCWDDDGQHHGRLYPPAPDEIPSCPKARRSSPSLAPSCMTPTSSSTQKSSTQTVSWMQMDGSGSMRRSCPSP

SEQ ID NO: 3900 - protein, 175 aa, Homo sapiens
MEATGTWALLLALALLLLLTLALSGTRARGHLPPGPTPLPLLGNLLQLRPGALYSGLMREEQNPGTEFTNKNMLMTVIYLLFAGTMTVSTTVGYTLLLLMKYPHVQKWVREELNRELGAGQAPSLGDRTRLPYTDAVLHEAQRLLALVPMGIPRTLMRTTRFRGYTLPQGTEVFP

SEQ ID NO: 3901 - protein, 165 aa, Homo sapiens
MEATGTWALLLALALLLLLTLALSGTRARGHLPPGPTPLPLLGNLLQLRPGALYSGLMRLSKKYGPVFTIYLGPWRPVVVLVGQEAVREALGGQAEEFSGRGTVAMLEGTFDGHGGTKPRHRIHQQEHADDSHLFAVCWDDDGQHHGRLYPPAPDEIPSCPKVGT

SEQ ID NO: 3902 - protein, 187 aa, Homo sapiens
MEATGTWALLLALALLLLLTLALSGTRARGHLPPGPTPLPLLGNLLQLRPGALYSGLMRLSKKYGPVFTIYLGPWRPVVVLVGQEAVREALGGQAEEFSGRGTVAMLEGTFDGHGVFFSNGERWRQLRKFTMLALRDLGMGKREGEELIQAEARCLVETFQGTEGGTKPRHRIHQQEHADDSHLFAV

SEQ ID NO: 3903 - protein, 504 aa, Homo sapiens
MEATGTWALLLALALLLLLTLALSGTRARGHLPPGPTPLPLLGNLLQLRPGALYSGLMRLSKKYGPVFTIYLGPWRPVVVLVGQEAVREALGGQAEEFSGRGTVAMLEGTFDGHGVFFSNGERWRQLRKFTMLALRDLGMGKREGEELIQAEARCLVETFQGTEGRPFDPSLLLAQATSNVVCSLLFGLRFSYEDKEFQAVVRAAGGTLLGVSSQGGQTYEMFSWFLRPLPGPHKQLLHHVSTLAAFTVRQVQQHQGNLDASGPARDLVDAFLLKMAQEEQNPGTEFTNKNMLMTVIYLLFAGTMTVSTTVGYTLLLLMKYPHVQKWVREELNRELGAGQAPSLGDRTRLPYTDAVLHEAQRLLALVPMGIPRTLMRTTRFRGYTLPQGTEVFPLLGSILHDPNIFKHPEEFNPDRFLDADGRFRKHEAFLPFSLGKRVCLGEGLAKAELFLFFTTILQAFSLESPCPPDTLSLKPTVSGLFNIPPAFQLQVRPTDLHSTTQTR

SEQ ID NO: 3904 - protein, 60 aa, Homo sapiens
MLEGTFDGHGGTKPRHRIHQQEHADDSHLFAVCWDDDGQHHGRLYPPAPDEIPSCPKVGT

SEQ ID NO: 3905 - protein, 288 aa, Homo sapiens
LQLHRPVLRKIEEVRAILRTLLEARRPHVCPGDPVCSYVDALIQQGQGDDPEGLFAEANAVACTLDMVMAGTETTSATLQWAALLMGRHPDVQGRVQEELDRVLGPGRTPRLEDQQALPYTSAVLHEVQRFITLLPHVPRCTAADTQLGGFLLPKGTPVIPLLTSVLLDETQWQTPGQFNPGHFLDANGHFVKREAFLPFSAGSEGGCGGCSCAPLGRSPPLPSRSRPGAAHSVPGHPPQAAASVLGSAWPGPSSSCCLPASCRGTACCPRLASVRPPWTPRPPGLLP

SEQ ID NO: 3906 - protein, 490 aa, Homo sapiens
MALLLLLFLGLLGLWGLLCACAQDPSPAARWPPGPRPLPLVGNLHLLRLSQQDRSLMELSERYGPVFTVHLGRQKTVVLTGFEAVKEALAGPGQELADRPPIAIFQLIQRGGGIFFSSGARWRAARQFTVRALHSLGVGREPVADKILQELKCLSGQLDGYRGRPFPLALLGWAPSNITFALLFGRRFDYRDPVFVSLLGLIDEVMVLLGSPGLQLFNVYPWLGALLQLHRPVLRKIEEVRAILRTLLEARRPHVCPGDPVCSYVDALIQQGQGDDPEGLFAEANAVACTLDMVMAGTETTSATLQWAALLMGRHPDVQGRVQEELDRVLGPGRTPRLEDQQALPYTSAVLHEVQRFITLLPHVPRCTAADTQLGGFLLPKGTPVIPLLTSVLLDETQWQTPGQFNPGHFLDANGHFVKREAFLPFSAGRRVCVGERLARTELFLLFAGLLQRYRLLPPPGVSPASLDTTPARAFTMRPRAQALCAVPRP

SEQ ID NO: 3907 - protein, 408 aa, Homo sapiens
MELSERYGPVFTVHLGRQKTVVLTGFEAVKEALAGPGQELADRPPIAIFQLIQRGGGIFFSSGARWRAARQFTVRALHSLGVGREPVADKILQELKCLSGQLDGYRGRPFPLALLGWAPSNITFALLFGRRFDYRDPVFVSLLGLIDEVMVLLGSPGLQLFNVYPWLGALLQLHRPVLRKIEEVRAILRTLLEARRPHVCPGDPVCSYVDALIQQGQGDDPEGLFAEANAVACTLDMVMAGTETTSATLQWAALLMGRHPDVQGRVQEELDRVLGPGRTPRLEDQQALPYTSAVLHEVQRFITLLPHVPRCTAADTQLGGFLLPKGTPVIPLLTSVLLDETQWQTPGQFNPGHFLDANGHFVKREAFLPFSAGQQPSGPGWGGTSRAPGVGRPQLRLPPLHPPPDLRF

SEQ ID NO: 3908 - protein, 96 aa, Homo sapiens
MSPGLLLLGSAVLLAFGLCCTFVHRARSRYEHIPGPPRPSFLLGHLPCFWKKDEVGGRVLQDVFLDWAKKYGPVVRVNVFHKTSVIVTSPESVKFH

SEQ ID NO: 3909 - protein, 500 aa, Homo sapiens
MSPGLLLLGSAVLLAFGLCCTFVHRARSRYEHIPGPPRPSFLLGHLPCFWKKDEVGGRVLQDVFLDWAKKYGPVVRVNVFHKTSVIVTSPESVKKFLMSTKYNKDSKMYRALQTVFGERLFGQGLVSECNYERWHKQRRVIDLAFSRSSLVSLMETFNEKAEQLVEILEAKADGQTPVSMQDMLTYTAMDILAKAAFGMETSMLLGAQKPLSQAVKLMLEGITASRNTLAKFLPGKRKQLREVRESIRFLRQVGRDWVQRRREALKRGEEVPADILTQILKAEEGAQDDEGLLDNFVTFFIAGHETSANHLAFTVMELSRQPEIVARLQAEVDEVIGSKRYLDFEDLGRLQYLSQVLKESLRLYPPAWGTFRLLEEETLIDGVRVPGNTPLLFSTYVMGRMDTYFEDPLTFNPDRFGPGAPKPRFTYFPFSLGHRSCIGQQFAQMEVKVVMAKLLQRLEFRLVPGQRFGLQEQATLKPLDPVLCTLRPRGWQPAPPPPPC

SEQ ID NO: 3910 - protein, 403 aa, Homo sapiens
MSTKYNKDSKMYRALQTVFGERLFGQGLVSECNYERWHKQRRVIDLAFSRSSLVSLMETFNEKAEQLVEILEAKADGQTPVSMQDMLTYTAMDILAKAAFGMETSMLLGAQKPLSQAVKLMLEGITASRNTLAKFLPGKRKQLREVRESIRFLRQVGRDWVQRRREALKRGEEVPADILTQILKAEEGAQDDEGLLDNFVTFFIAGHETSANHLAFTVMELSRQPEIVARLQAEVDEVIGSKRYLDFEDLGRLQYLSQVLKESLRLYPPAWGTFRLLEEETLIDGVRVPGNTPLLFSTYVMGRMDTYFEDPLTFNPDRFGPGAPKPRFTYFPFSLGHRSCIGQQFAQMEVKVVMAKLLQRLEFRLVPGQRFGLQEQATLKPLDPVLCTLRPRGWQPAPPPPPC

SEQ ID NO: 3911 - protein, 164 aa, Homo sapiens
RFLRQVGRDWVQRRREALKRGEEVPADILTQILKAEEGAQDDEGLLDNFVTFFIAGHETSANHLAFTVMELSRQPEIVARLQAEVDEVIGSKRYLDFEDLGRLQYLSQVLKESLRLYPPAWGTFRLLEEETLIDGVRVPGNTPLLEQCASQLLGHLPRSERAGL

SEQ ID NO: 3912 - protein, 51 aa, Homo sapiens
  VARIANT 1: note = misc_feature - Xaa can be any naturally occurring amino acid
XPAREEEAAPGGPGEHSLPAPGGQGLGPAPPGSPEEGRGGSCRHPHTDSES

SEQ ID NO: 3913 - protein, 199 aa, Homo sapiens
MFEGHDTTASGLSWVLYHLAKHPEYQEQCRQEVQELLKDREPIEIEWDDLAQLPFLTMCIKESLRLHPPVPVISRCCTQDFVLPDGRVIPKGIVCLINIIGIHYNPTVWPDPEVYDPFRFDQENIKERSPLAFIPFSAGPRNCIGQAFAMAEMKVVLALTLLHFRILPTHTEPRRKPELILRAEGGLWLRVEPLGANSQ

SEQ ID NO: 3914 - protein, 524 aa, Homo sapiens
MPQLSLSWLGLGPVAASPWLLLLLVGGSWLLARVLAWTYTFYDNCRRLQCFPQPPKQNWFWGHQGLVTPTEEGMKTLTQLVTTYPQGFKLWLGPTFPLLILCHPDIIRPITSASAAVAPKDMIFYGFLKPWLGDGLLLSGGDKWSRHRRMLTPAFHFNILKPYMKIFNKSVNIMHDKWQRLASEGSARLDMFEHISLMTLDSLQKCVFSFESNCQEKPSEYIAAILELSAFVEKRNQQILLHTDFLYYLTPDGQRFRRACHLVHDFTDAVIQERRCTLPTQGIDDFLKNKAKSKTLDFIDVLLLSKDEDGKELSDEDIRAEADTFMFEGHDTTASGLSWVLYHLAKHPEYQEQCRQEVQELLKDREPIEIEWDDLAQLPFLTMCIKESLRLHPPVPVISRCCTQDFVLPDGRVIPKGIVCLINIIGIHYNPTVWPDPEVYDPFRFDQENIKERSPLAFIPFSAGPRNCIGQAFAMAEMKVVLALTLLHFRILPTHTEPRRKPELILRAEGGLWLRVEPLGANSQ

SEQ ID NO: 3915 - protein, 454 aa, Homo sapiens
MPQLSLSWLGLGPVAASPWLLLLLVGGSWLLARVLAWTYTFYDNCRRLQCFPQPPKQNWFWGHQGLVTPTEEGMKTLTQLVTTYPQGFKLWLGPTFPLLILCHPDIIRPITSASAAVAPKDMIFYGFLKPWLGDGLLLSGGDKWSRHRRMLTPAFHFNILKPYMKIFNKSVNIMHDKWQRLASEGSARLDMFEHISLMTLDSLQKCVFSFESNCQEKPSEYIAAILELSAFVEKRNQQILLHTDFLYYLTPDGQRFRRACHLVHDFTDAVIQERRCTLPTQGIDDFLKNKAKSKTLDFIDVLLLSKDEDGKELSDEDIRAEADTFMFEGHDTTASGLSWVLYHLAKHPEYQEQCRQEVQELLKDREPIEIEWDDLAQLPFLTMCIKESLRLHPPVPVISRCCTQDFVLPDGRVIPKGLRPLPFRPREHQGEVTSGFYSLLGRAQKLHRAGVRHG

SEQ ID NO: 3916 - protein, 524 aa, Homo sapiens; identical to SEQ ID NO: 3914

SEQ ID NO: 3917 - protein, 454 aa, Homo sapiens; identical to SEQ ID NO: 3915

SEQ ID NO: 3918 - protein, 520 aa, Homo sapiens
MSQLSLSWLGLWPVAASPWLLLLLVGASWLLAHVLAWTYAFYDNCRRLRCFPQPPRRNWFWGHQGMIHSSEEGLLYTQSLACTFGDMGCWWVGPWQAVIHIFLPTCIKPVLFAPAAIAPKDKFFYSFLEPWLGDGLLLSAGDKWSRHRRMLTPAFHFNILKPYMKIFNESVNIMHAKWQLLASEGSACLDMFEHISLMTLDSLQKCVFSFDSHCQEKPSEYIAAILELSALVSKRHHEILLHIDFLYYLTPDGQRFRRACRLVHDFTDAVIQERRRTLPSQGVDDFLQAKAKSKTLDFIDVLLLSKDEDGKKLSDEDIRAEADTFMFEGHDTTASGLSWVLYHLAKHPEYQERCRQEVQELLKDREPKEIEWDDLAHLPFLTMCMKESLRLHPPVPVISRHVTQDIVLPDGRVIPKGIICLISVFGTHHNPAVWPDPEVYDPFRFDPENIKERSPLAFIPFSAGPRNCIGQTFAMAEMKVVLALTLLRFRVLPDHTEPRRKPELVLRAEGGLWLRVEPLS

SEQ ID NO: 3919 - protein, 89 aa, Homo sapiens
MSQLSLSWLGLWPVAASPWLLLLLVGASWLLAHVLAWTYAFYDNCRRLRCFPQPPRRNWFWGHQGMLPLHQRTSSSTASWSPGWGMGSC

SEQ ID NO: 3920 - protein, 154 aa, Homo sapiens
MSQLSLSWLGLWPVAASPWLLLLLVGASWLLAHVLAWTYAFYDNCRRLRCFPQPPRRNWFWGHQGMVNPTEEGMRVLTQLVATYPQGFKVWMGPISPLLSLCHPDIIRSVINASAAIAPKDKFFYSFLEPWLGDGLLLSAGDKWSRHRRMLTPA

SEQ ID NO: 3921 - protein, 520 aa, Homo sapiens
MSQLSLSWLGLWPVAASPWLLLLLVGASWLLAHVLAWTYAFYDNCRRLRCFPQPPRRNWFWGHQGMVNPTEEGMRVLTQLVATYPQGFKVWMGPISPLLSLCHPDIIRSVINASAAIAPKDKFFYSFLEPWLGDGLLLSAGDKWSRHRRMLTPAFHFNILKPYMKIFNESVNIMHAKWQLLASEGSACLDMFEHISLMTLDSLQKCVFSFDSHCQEKPSEYIAAILELSALVSKRHHEILLHIDFLYYLTPDGQRFRRACRLVHDFTDAVIQERRRTLPSQGVDDFLQAKAKSKTLDFIDVLLLSKDEDGKKLSDEDIRAEADTFMFEGHDTTASGLSWVLYHLAKHPEYQERCRQEVQELLKDREPKEIEWDDLAHLPFLTMCMKESLRLHPPVPVISRHVTQDIVLPDGRVIPKGIICLISVFGTHHNPAVWPDPEVYDPFRFDPENIKERSPLAFIPFSAGPRNCIGQTFAMAEMKVVLALTLLRFRVLPDHTEPRRKPELVLRAEGGLWLRVEPLS

SEQ ID NO: 3922 - protein, 74 aa, Homo sapiens
  VARIANT 1: note = misc_feature - Xaa can be any naturally occurring amino acid
XWVLYHLAKHPEYQERCRQEVQELLKDREPKEIEWSTTPFALTQRTSRRGHLWLLFPSRQGPGTASGRRSRWRR

SEQ ID NO: 3923 - protein, 381 aa, Homo sapiens [sequence omitted]

SEQ ID NO: 3924 - protein, 136 aa, Homo sapiens
MRTPGPLPVLLLLLAGAPAARPTPPTCYSRMRALSQEITRDFNLLQVSEPSEPCVRYLPRLYLDIHNYCVLDKLRDFVASPPCWKVAQVDSLKDKARKLYTIMNSFCRRDLVFLLDDCNALEYPIPVTTVLPDRQR

SEQ ID NO: 3925 - protein, 76 aa, Homo sapiens
  VARIANT 1: note = misc_feature - Xaa can be any naturally occurring amino acid
XPGPLPVLLLLLAGAPAARPTPPTCYSRMRALSQEITRDFNLLQVSEPSDLVFLLDDCNALEYPIPVTTVLPDRQR

SEQ ID NO: 3926 - protein, 92 aa, Homo sapiens
  VARIANT 1: note = misc_feature - Xaa can be any naturally occurring amino acid
XTPGPLPVLLLLLAGAPAARPTPPTCYSRMRALSQEITRDFNLLQVSEPSEPCVRYLPRLYLDIHDLVFLLDDCNALEYPIPVTTVLPDRQR

SEQ ID NO: 3927 - protein, 78 aa, Homo sapiens
GNTGMVGGSVPVFDEIILSTARMNRVLSFHSVSESPFYVLIETSGSNAGHDAEKLGHFLEHALGSGLVTDGTMATDQR

SEQ ID NO: 3928 - protein, 243 aa, Homo sapiens
MLPRRPLAWPAWLLRGAPGAAGSWGRPVGPLARRGCCSAPGTPEVPLTRERYPVRRLPFSTVSKQDLAAFERIVPGGVVTDPEALQAPNVDWLRTLRGCSKVLLRPRTSEEVSHILRHCHERNLAVNPQGGNTGMVGGSVPVFDEIILSTARMNRVLSFHSVSGGLRPGGAEPVCGGTGLHHAAGLRSQGQLPHRGKRGNQRWRPAVSSIWLTAWDCPGPGSGAGRRHCPGLPDLPEEGQHGL

SEQ ID NO: 3929 - protein, 521 aa, Homo sapiens
MLPRRPLAWPAWLLRGAPGAAGSWGRPVGPLARRGCCSAPGTPEVPLTRERYPVRRLPFSTVSKQDLAAFERIVPGGVVTDPEALQAPNVDWLRTLRGCSKVLLRPRTSEEVSHILRHCHERNLAVNPQGGNTGMVGGSVPVFDEIILSTARMNRVLSFHSVSGILVCQAGCVLEELSRYVEERDFIMPLDLGAKGSCHIGGNVATNAGGLRFLRYGSLHGTVLGLEVVLADGTVLDCLTSLRKDNTGYDLKQLFIGSEGTLGIITTVSILCPPKPRAVNVAFLGCPGFAEVLQTFSTCKGMLGEILSAFEFMDAVCMQLVGRHLHLASPVQESPFYVLIETSGSNAGHDAEKLGHFLEHALGSGLVTDGTMATDQRKVKMLWALRERITEALSRDGYVYKYDLSLPVERLYDIVTDLRARLGPHAKHVVGYGHLGDGNLHLNVTAEAFSPSLLAALEPHVYEWTAGQQGSVSAEHGVGFRKRDVLGYSKPPGALQLMQQLKALLDPKGILNPYKTLPSQA

SEQ ID NO: 3930 - protein, 320 aa, Homo sapiens
MLPRRPLAWPAWLLRGAPGAAGSWGRPVGPLARRGCCSAPGTPEVPLTRERYPVRRLPFSTVSKQDLAAFERIVPGGVVTDPEALQAPNVDWLRTLRGCSKVLLRPRTSEEVSHILRHCHERNLAVNPQGGNTGMVGGSVPVFDEIILSTARMNRVLSFHSVSGILVCQAGCVLEELSRYVEERDFIMPLDLGAKGSCHIGGNVATNAGGLRFLRYGSLHGTVLGLEVVLADGTVLDCLTSLRKDNTGYDLKQLFIGSEGTLGIITTVSILCPPKPRAVNVAFLDAVGPEGKDHRGAEPGWLRVQVRPLPPCGAALRHRD

SEQ ID NO: 3931 - protein, 387 aa, Homo sapiens
MVGGSVPVFDEIILSTARMNRVLSFHSVSGILVCQAGCVLEELSRYVEERDFIMPLDLGAKGSCHIGGNVATNAGGLRFLRYGSLHGTVLGLEVVLADGTVLDCLTSLRKDNTGYDLKQLFIGSEGTLGIITTVSILCPPKPRAVNVAFLGCPGFAEVLQTFSTCKGMLGEILSAFEFMDAVCMQLVGRHLHLASPVQESPFYVLIETSGSNAGHDAEKLGHFLEHALGSGLVTDGTMATDQRKVKMLWALRERITEALSRDGYVYKYDLSLPVERLYDIVTDLRARLGPHAKHVVGYGHLGDGNLHLNVTAEAFSPSLLAALEPHVYEWTAGQQGSVSAEHGVGFRKRDVLGYSKPPGALQLMQQLKALLDPKGILNPYKTLPSQA

SEQ ID NO: 3932 - protein, 90 aa, Homo sapiens [sequence omitted]

SEQ ID NO: 3933 - protein, 152 aa, Homo sapiens
  VARIANT 1: note = misc_feature - Xaa can be any naturally occurring amino acid
XHSVSGILVCQAGCVLEELSRYVEERDFIMPLDLGAKGSCHIGGNVATNAGGLRFLRYGSLHGTVLGLEVVLADGTVLDCLTSLRKDNTGYDLKQLFIGSEGTLGIITTVSILCPPKPRAVNVAFLGFLCSALIPLQLQSPVCRPPVVLGAR

SEQ ID NO: 3934 - protein, 318 aa, Homo sapiens
  VARIANT 1: note = misc_feature - Xaa can be any naturally occurring amino acid
XSHANHRPICLSPRIWPGSASATSTVCSSSESFLPRGPPAVSLLLHGPPTVSFPPPWPTHHVLPSPVAHPPCPCLPPDMPLELPGPCCCPHCLCDSAPPSLPCPTLVQGASRPILILRAFPGPCHSVPCHDLKLQVGASPFRHGCPPSVRCPSRLIAGVPGCSVLSWSLGHSLSGIDSRMLWALRERITEALSRDGYVYKYDLSLPVERLYDIVTDLRARLGPHAKHVVGYGHLGDGNLHLNVTAEAFSPSLLAALEPHVYEWTAGQQGSVSAEHGVGFRKRDVLGYSKPPGALQLMQQLKALLDPKGILNPYKTLPS

SEQ ID NO: 3935 - protein, 189 aa, Homo sapiens
  VARIANT 1: note = misc_feature - Xaa can be any naturally occurring amino acid
XSVFCSDPTPTAVTCVPPACGPGSPRPARLPHPALRTPGCPGFAEVLQTFSTCKGMLGEILSAFEFMDAVCMQLVGRHLHLASPVQESPFYVLIETSGSNAGHDAEKLGHFLEHALGSGLVTDGTMATDQRKVKMLWALRERITEALSRDGYVYKYDLSLPVERLYDIVTDLRARLGPHAKHVVGYGHL

SEQ ID NO: 3936 - protein, 9 aa, Homo sapiens
MRMSVGLSL

SEQ ID NO: 3937 - protein, 15 aa, Homo sapiens
MRMSVGLSLLLPLSG

SEQ ID NO: 3938 - protein, 41 aa, Homo sapiens
MRMSVGLSLLLPLSGRTFLLLLSVVMAQSHWPSEPSEAVRD

SEQ ID NO: 3939 - protein, 52 aa, Homo sapiens
MRMSVGLSLLLPLSGRTFLLLLSVVMAQSHWPSEPSEAVRDWENQLEASMHS

SEQ ID NO: 3940 - protein, 86 aa, Homo sapiens
MRMSVGLSLLLPLSGRTFLLLLSVVMAQSHWPSEPSEAVRDWENQLEASMHSVLSDLHEAVPTVVGIPDGTAVVGRSFRVTIPTDL

SEQ ID NO: 3941 - protein, 88 aa, Homo sapiens
MRMSVGLSLLLPLSGRTFLLLLSVVMAQSHWPSEPSEAVRDWENQLEASMHSVLSDLHEAVPTVVGIPDGTAVVGRSFRVTIPTDLIA

SEQ ID NO: 3942 - protein, 96 aa, Homo sapiens
MRMSVGLSLLLPLSGRTFLLLLSVVMAQSHWPSEPSEAVRDWENQLEASMHSVLSDLHEAVPTVVGIPDGTAVVGRSFRVTIPTDLIASSGDIIKV

SEQ ID NO: 3943 - protein, 106 aa, Homo sapiens
MRMSVGLSLLLPLSGRTFLLLLSVVMAQSHWPSEPSEAVRDWENQLEASMHSVLSDLHEAVPTVVGIPDGTAVVGRSFRVTIPTDLIASSGDIIKVSAAGKEALPS

SEQ ID NO: 3944 - protein, 117 aa, Homo sapiens
MRMSVGLSLLLPLSGRTFLLLLSVVMAQSHWPSEPSEAVRDWENQLEASMHSVLSDLHEAVPTVVGIPDGTAVVGRSFRVTIPTDLIASSGDIIKVSAAGKEALPSWLHWDSQSHTL

SEQ ID NO: 3945 - protein, 895 aa, Homo sapiens
MRMSVGLSLLLPLSGRTFLLLLSVVMAQSHWPSEPSEAVRDWENQLEASMHSVLSDLHEAVPTVVGIPDGTAVVGRSFRVTIPTDLIASSGDIIKVSAAGKEALPSWLHWDSQSHTLEGLPLDTDKGVHYISVSATRLGANGSHIPQTSSVFSIEVYPEDHSELQSVRTASPDPGEVVSSACAADEPVTVLTVILDADLTKMTPKQRIDLLHRMRSFSEVELHNMKLVPVVNNRLFDMSAFMAGPGNAKKVVENGALLSWKLGCSLNQNSVPDIHGVEAPAREGAMSAQLGYPVVGWHIANKKPPLPKRVRRQIHATPTPVTAIGPPTTAIQEPPSRIVPTPTSPAIAPPTETMAPPVRDPVPGKPTVTIRTRGAIIQTPTLGPIQPTRVSEAGTTVPGQIRPTMTIPGYVEPTAVATPPTTTTKKPRVSTPKPATPSTDSTTTTTRRPTKKPRTPRPVPRVTTKVSITRLETASPPTRIRTTTSGVPRGGEPNQRPELKNHIDRVDAWVGTYFEVKIPSDTFYDHEDTTTDKLKLTLKLREQQLVGEKSWVQFNSNSQLMYGLPDSSHVGKHEYFMHATDKGGLSAVDAFEIHVHRRPQGDRAPARFKAKFVGDPALVLNDIHKKIALVKKLAFAFGDRNCSTITLQNITRGSIVVEWTNNTLPLEPCPKEQIAGLSRRIAEDDGKPRPAFSNALEPDFKATSITVTGSGSCRHLQFIPVVPPRRVPSEAPPTEVPDRDPEKSSEDDVYLHTVIPAVVVAAILLIAGIIAMICYRKKRKGKLTLEDQATFIKKGVPIIFADELDDSKPPPSSSMPLILQEEKAPLPPPEYPNQSVPETTPLNQDTMGEYTPLRDEDPNAPPYQPPPPFTAPMEGKGSRPKNMTPYRSPPPYVPP

SEQ ID NO: 3946 - protein, 895 aa, Homo sapiens; identical to SEQ ID NO: 3945

SEQ ID NO: 3947 - protein, 895 aa, Homo sapiens; identical to SEQ ID NO: 3945

SEQ ID NO: 3948 - protein, 895 aa, Homo sapiens; identical to SEQ ID NO: 3945

SEQ ID NO: 3949 - protein, 895 aa, Homo sapiens; identical to SEQ ID NO: 3945

SEQ ID NO: 3950 - protein, 895 aa, Homo sapiens; identical to SEQ ID NO: 3945

SEQ ID NO: 3951 - protein, 189 aa, Homo sapiens
MLLGQLSTLLCLLSGALPTGSGRPEPQSPRPQSWAAANQTWALGPGALPPLVPASALGSWKAFLGLQKARQLGMGRLQRGQDEVAAVTLPLNPQEVIQGMCKAVPFVQVFSRPGCSAIRLRNHLCFGHCSSLYIPGSDPTPLVLCNSCMPARKRWAPVVLWCLTGSSASRRRVKISTMLIEGCHCSPKA

SEQ ID NO: 3952 - protein, 163 aa, Homo sapiens
MPLTRQQGRLLVTLSPVRTDRQADRRTDKQMLLGQLSTLLCLLSGALPTGSGRPEPQSPRPQSWAAANQTWALGPGALPPLVPASALGSWKAFLGLQKARQLGMGRLQRGQDEVAAVTLPLNPQEVIQGMCKAVPFVQTRESRYVAQASLELLASSNPPTSAS

SEQ ID NO: 3953 - protein, 167 aa, Homo sapiens
MFPDYGYGWFHTSLILEGKNYLQWLTERLTERGVKFFQRKVESFEEVAREGADVIVNCTGVWAGALQRDPLLQPGRGQIMKVDAPWMKHFILTHDPERGIYNSPYIIPGTQTVTLGGIFQLGNWSELNNIQDHNTIWEGCCRLEPTLKNARIIGERTGFRPVRPQIR

SEQ ID NO: 3954 - protein, 197 aa, Homo sapiens
MRVVVIGAGVIGLSTALCIHERYHSVLQPLDIKVYADRFTPLTTTDVAAGLWQPYLSDPNNPQEADWSQQTFDYLLSHVHSPNAENLGLFLISGYNLFHEAIPDPSWKDTVLGFRKLTPRELDMFPDYGYGWFHTSLILEGKNYLQWLTERLTERGVKFFQRKVESFEEVAREGADVIVNCTGVWAGALQRDPLLQP

SEQ ID NO: 3955 - protein, 347 aa, Homo sapiens
MRVVVIGAGVIGLSTALCIHERYHSVLQPLDIKVYADRFTPLTTTDVAAGLWQPYLSDPNNPQEADWSQQTFDYLLSHVHSPNAENLGLFLISGYNLFHEAIPDPSWKDTVLGFRKLTPRELDMFPDYGYGWFHTSLILEGKNYLQWLTERLTERGVKFFQRKVESFEEVAREGADVIVNCTGVWAGALQRDPLLQPGRGQIMKVDAPWMKHFILTHDPERGIYNSPYIIPGTQTVTLGGIFQLGNWSELNNIQDHNTIWEGCCRLEPTLKNARIIGERTGFRPVRPQIRLEREQLRTGPSNTEVIHNYGHGGYGLTIHWGCALEAAKLFGRILEEKKLSRMPPSHL

SEQ ID NO: 3956 - protein, 123 aa, Homo sapiens
MRVVVIGAGVIGLSTALCIHERYHSVLQPLDIKVYADRFTPLTTTDVAAGLWQPYLSDPNNPQEADWSQQTFDYLLSHVHSPNAENLGLFLISGYNLFHEAIPLWLVPHKPNSGGKELSTVAD

SEQ ID NO: 3957 - protein, 281 aa, Homo sapiens
MRVVVIGAGVIGLSTALCIHERYHSVLQPLDIKVYADRFTPLTTTDVAAGLWQPYLSDPNNPQEADWSQQTFDYLLSHVHSPNAENLGLFLISGYNLFHEAIPVAREGADVIVNCTGVWAGALQRDPLLQPGRGQIMKVDAPWMKHFILTHDPERGIYNSPYIIPGTQTVTLGGIFQLGNWSELNNIQDHNTIWEGCCRLEPTLKNARIIGERTGFRPVRPQIRLEREQLRTGPSNTEVIHNYGHGGYGLTIHWGCALEAAKLFGRILEEKKLSRMPPSHL

SEQ ID NO: 3958 - protein, 78 aa, Homo sapiens
MRVVVIGAGVIGLSTALCIHERYHSVLQPLDIKVYADRFTPLTTTDVAAGLWQPYLSDPNNPQEATLPGRTQFWDFGS

SEQ ID NO: 3959 - protein, 73 aa, Homo sapiens
MNSKGQYPTQPTYPVQPPGNPVYPQTLHLPQAPPYTDAPPAYSEGLPQSPPCQPHFLEPLCIFPWPSLWLLGL

SEQ ID NO: 3960 - protein, 207 aa, Homo sapiens
MNSKGQYPTQPTYPVQPPGNPVYPQTLHLPQAPPYTDAPPAYSELYRPSFVHPGAATVPTMSAAFPGASLYLPMAQSVAVGPLGSTIPMAYYPVGPIYPPASTSWMPSQCCSACSHAGSQRPRNSAEGELLHGWFRWWLHHLVRNQGHLCAGKDITYLQHFSQCNCFSHINLKLQFRHMLLGCLSGAQTFRHFSNLIRNHVMVAVPP

SEQ ID NO: 3961 - protein, 168 aa, Homo sapiens
MNSKGQYPTQPTYPVQPPGNPVYPQTLHLPQAPPYTDAPPAYSELYRPSFVHPGAATVPTMSAAFPGASLYLPMAQSVAVGPLGSTIPMAYYPVGPIYPPGSTVLVEGGYDAGARFGAGATAGNIPPPPPGCPPNAAQLAVMQGANVLVTQRKGNFFMGGSDGGYTIW

SEQ ID NO: 3962 - protein, 134 aa, Homo sapiens
MNSKGQYPTQPTYPVQPPGNPVYPQTLHLPQAPPYTDAPPAYSELYRPSFVHPGAATVPTMSAAFPGASLYLPMAQSVAVGPLGSTIPMAYYPVGPIYPPGSTVLVEGGYDAGARFGAGATAGNIPVCVLKLGR

SEQ ID NO: 3963 - protein, 153 aa, Homo sapiens
MNSKGQYPTQPTYPVQPPGNPVYPQTLHLPQAPPYTDAPPAYSELYRPSFVHPGAATVPTMSAAFPGASLYLPMAQSVAVGPLGSTIPMAYYPVGPIYPPGSTVLVEGGYDAGARFGAGATAGNIPVKEDQDHDREQGEEDNGDNNLERRGKM

SEQ ID NO: 3964 - protein, 146 aa, Homo sapiens
MNSKGQYPTQPTYPVQPPGNPVYPQTLHLPQAPPYTDAPPAYSELYRPSFVHPGAATVPTMSAAIPMAYYPVGPIYPPGSTVLVEGGYDAGARFGAGATAGNIPPPPPGCPPNAAQLAVMQGANVLVTQRKGNFFMGGSDGGYTIW

SEQ ID NO: 3965 - protein, 86 aa, Homo sapiens
MNSKGQYPTQPTYPVQPPGNPVYPQTLHLPQAPPYTDAPPAYSEPPPPGCPPNAAQLAVMQGANVLVTQRKGNFFMGGSDGGYTIW

SEQ ID NO: 3966 - protein, 136 aa, Homo sapiens
MNSKGQYPTQPTYPVQPPGNPVYPQTLHLPQAPPYTDAPPAYSESVAVGPLGSTIPMAYYPVGPIYPPGSTVLVEGGYDAGARFGAGATAGNIPPPPPGCPPNAAQLAVMQGANVLVTQRKGNFFMGGSDGGYTIW

SEQ ID NO: 3967 - protein, 108 aa, Homo sapiens
MSAAFPGASLYLPMAQSVAVGPLGSTIPMAYYPVGPIYPPGSTVLVEGGYDAGARFGAGATAGNIPPPPPGCPPNAAQLAVMQGANVLVTQRKGNFFMGGSDGGYTIW

SEQ ID NO: 3968 - protein, 617 aa, Homo sapiens
MPALSRWASLPGPSMREAAFMYSTAVAIFLVILVAALQGSAPRESPLPYHIPLDPEGSLELSWNVSYTQEAIHFQLLVRRLKAGVLFGMSDRGELENADLVVLWTDGDTAYFADAWSDQKGQIHLDPQQDYQLLQVQRTPEGLTLLFKRPFGTCDPKDYLIEDGTVHLVYGILEEPFRSLEAINGSGLQMGLQRVQLLKPNIPEPELPSDACTMEVQAPNIQIPSQETTYWCYIKELPKGFSRHHIIKYEPIVTKGNEALVHHMEVFQCAPEMDSVPHFSGPCDSKMKPDRLNYCRHVLAAWALGAKAFYYPEEAGLAFGGPGSSRYLRLEVHYHNPLVIEGRNDSSGIRLYYTAKLRRFNAGIMELGLVYTPVMAIPPRETAFILTGYCTDKCTQLALPPSGIHIFASQLHTHLTGRKVVTVLVRDGREWEIVNQDNHYSPHFQEIRMLKKVVSVHPGDVLITSCTYNTEDRELATVGGFGILEEMCVNYVHYYPQTQLELCKSAVDAGFLQKYFHLINRFNNEDVCTCPQASVSQQFTSVPWNSFNRDVLKALYSFAPISMHCNKSSAVRFQGEWNLQPLPKVISTLEEPTPQCPTSQGRSPAGPTVVSIGGGKG

SEQ ID NO: 3969 - protein, 244 aa, Homo sapiens
MREAAFMYSTAVAIFLVILVAALQGSAPRESPLPYHIPLDPEGSLELSWNVSYTQEAIHFQLLVRRLKAGVLFGMSDRGELENADLVVLWTDGDTAYFADGTVHLVYGILEEPFRSLEAINGSGLQMGLQRVQLLKPNIPEPELPSDACTMEVQAPNIQIPSQETTYWCYIKELPKGFSRHHIIKYEPIVTKGNEALVHHMEVFQCAPEMDSVPHFSGPCDSKMKPDRLNYCRHVLAAWALGAK

SEQ ID NO: 3970 - protein, 27 aa, Homo sapiens
MAANLSRNGPALQEAYVRVVTEKSPTD

SEQ ID NO: 3971 - protein, 50 aa, Homo sapiens
MAANLSRNGPALQEAYVRVVTEKSPTDWALFTYEGNSNDIRCCSCCRGPM

SEQ ID NO: 3972 - protein, 87 aa, Homo sapiens
MAANLSRNGPALQEAYVRVVTEKSPTDWALFTYEGNSNDIRVAGTGDRRGRERCAEGSLCQPRQHHGQLPEGGPCDHQRTGRGGCGA

SEQ ID NO: 3973 - protein, 406 aa, Homo sapiens
MAANLSRNGPALQEAYVRVVTEKSPTDWALFTYEGNSNDIRVAGTGEGGLEEMVEELNSGKVMYAFCRVKDPNSGLPKFVLINWGAHVTINARAEEDVEPECIMEKVAKASGANYSFHKESGRFQDVGPQAPVGSVYQKTNAVSEIKRVGKDSFWAKAEKEEENRRLEEKRRAEEAQRQLEQERRERELREAARREQRYQEQGGEASPQSRTWEQQQEVVSRNRNEQESAVHPREIFKQKERAMSTTSISSPQPGKLRSPFLQKQLTQPETHFGREPAAAISRPRADLPAEEPAPSTPPCLVQAEEEAVYEEPPEQETFYEQPPLVQQQGAGSEHIDHHIQGQGLSGQGLCARALYDYQAADDTEISFDPENLITGIEVIDEGWWRGYGPDGHFGMFPANYVELIE

SEQ ID NO: 3974 - protein, 430 aa, Homo sapiens
MAANLSRNGPALQEAYVRVVTEKSPTDWALFTYEGNSNDIRVAGTGEGGLEEMVEELNSGKVMYAFCRVKDPNSGLPKFVLINWTGEGVNDVRKGACASHVSTMASFLKGAHVTINARAEEDVEPECIMEKVAKASGANYSFHKESGRFQDVGPQAPVGSVYQKTNAVSEIKRVGKDSFWAKAEKEEENRRLEEKRRAEEAQRQLEQERRERELREAARREQRYQEQGGEASPQRTWEQQQEVVSRNRNEQESAVHPREIFKQKERAMSTTSISSPQPGKLRSPFLQKQLTQPETHFGREPAAAISRPRADLPAEEPAPSTPPCLVQAEEEAVYEEPPEQETFYEQPPLVQQQGAGSEHIDHHIQGQGLSGQGLCARALYDYQAADDTEISFDPENLITGIEVIDEGWWRGYGPDGHFGMFPANYVELIE

SEQ ID NO: 3975 - protein, 431 aa, Homo sapiens
MAANLSRNGPALQEAYVRVVTEKSPTDWALFTYEGNSNDIRVAGTGEGGLEEMVEELNSGKVMYAFCRVKDPNSGLPKFVLINWTGEGVNDVRKGACASHVSTMASFLKGAHVTINARAEEDVEPECIMEKVAKASGANYSFHKESGRFQDVGPQAPVGSVYQKTNAVSEIKRVGKDSFWAKAEKEEENRRLEEKRRAEEAQRQLEQERRERELREAARREQRYQEQGGEASPQSRTWEQQQEVVSRNRNEQESAVHPREIFKQKERAMSTTSISSPQPGKLRSPFLQKQLTQPETHFGREPAAAISRPRADLPAEEPAPSTPPCLVQAEEEAVYEEPPEQETFYEQPPLVQQQGAGSEHIDHHIQGQGLSGQGLCARALYDYQAADDTEISFDPENLITGIEVIDEGWWRGYGPDGHFGMFPANYVELIE

SEQ ID NO: 3976 - protein, 439 aa, Homo sapiens
MAANLSRNGPALQEAYVRVVTEKSPTDWALFTYEGNSNDIRVAGTGEGGLEEMVEELNSGKVMYAFCRVKDPNSGLPKFVLINWTGEGVNDVRKGACASHVSTMASFLKGAHVTINARAEEDVEPECIMEKVAKASGANYSFHKESGRFQDVGPQAPVGSVYQKTNAVSEIKRVGKDSFWAKAEKEEENRRLEEKRRAEEAQRQLEQERRERELREAARREQRYQEQGGEASPQSRTWEQQQEVVSRNRNEQGSTCASLQESAVHPREIFKQKERAMSTTSISSPQPGKLRSPFLQKQLTQPETHFGREPAAAISRPRADLPAEEPAPSTPPCLVQAEEEAVYEEPPEQETFYEQPPLVQQQGAGSEHIDHHIQGQGLSGQGLCARALYDYQAADDTEISFDPENLITGIEVIDEGWWRGYGPDGHFGMFPANYVELIE

SEQ ID NO: 3977 - protein, 382 aa, Homo sapiens
MAANLSRNGPALQEAYVRVVTEKSPTDWALFTYEGNSNDIRVAGTGEGGLEEMVEELNSGKVMYAFCRVKDPNSGLPKFVLINWTGEGVNDVRKGACASHVSTMASFLKGSVYQKTNAVSEIKRVGKDSFWAKAEKEEENRRLEEKRRAEEAQRQLEQERRERELREAARREQRYQEQGGEASPQSRTWEQQQEVVSRNRNEQESAVHPREIFKQKERAMSTTSISSPQPGKLRSPFLQKQLTQPETHFGREPAAAISRPRADLPAEEPAPSTPPCLVQAEEEAVYEEPPEQETFYEQPPLVQQQGAGSEHIDHHIQGQGLSGQGLCARALYDYQAADDTEISFDPENLITGIEVIDEGWWRGYGPDGHFGMFPANYVELIE

SEQ ID NO: 3978 - protein, 128 aa, Homo sapiens
MAANLSRNGPALQEAYVRVVTEKSPTDWALFTYEGNSNDIRVAGTGEGGLEEMVEELNSGKVMYAFCRVKDPNSGLPKFVLINWTGEGVNDVRKGACASHVSTMASFLKVRPGGPCDHQRTGRGGCGA

SEQ ID NO: 3979 - protein, 62 aa, Homo sapiens
MAANLSRNGPALQEAYVRVVTEKSPTDWALFTYEGNSNDIRVAGTGGGPCDHQRTGRGGCGA

SEQ ID NO: 3980 - protein, 31 aa, Homo sapiens
MAANLSRNGPALQEAYVRVVTEKSPTDWGPM

SEQ ID NO: 3981 - protein, 40 aa, Homo sapiens
MAANLSRNGPALQEAYVRVVTEKSPTDWWAARRARGSLYL

SEQ ID NO: 3982 - protein, 48 aa, Homo sapiens
MAANLSRNGPALQEAYVRVVTEKSPTDWWAARRARVGPGAASGGSLYL

SEQ ID NO: 3983 - protein, 48 aa, Homo sapiens; identical to SEQ ID NO: 3982

SEQ ID NO: 3984 - protein, 327 aa, Homo sapiens
MASFLKGAHVTINARAEEDVEPECIMEKVAKASGANYSFHKESGRFQDVGPQAPVGSVYQKTNAVSEIKRVGKDSFWAKAEKEEENRRLEEKRRAEEAQRQLEQERRERELREAARREQRYQEQGGEASPQRTWEQQQEVVSRNRNEQESAVHPREIFKQKERAMSTTSISSPQPGKLRSPFLQKQLTQPETHFGREPAAAISRPRADLPAEEPAPSTPPCLVQAEEEAVYEEPPEQETFYEQPPLVQQQGAGSEHIDHHIQGQGLSGQGLCARALYDYQAADDTEISFDPENLITGIEVIDEGWWRGYGPDGHFGMFPANYVELIE

SEQ ID NO: 3985 - protein, 336 aa, Homo sapiens
MKATAMTSAWLAQGGAHVTINARAEEDVEPECIMEKVAKASGANYSFHKESGRFQDVGPQAPVGSVYQKTNAVSEIKRVGKDSFWAKAEKEEENRRLEEKRRAEEAQRQLEQERRERELREAARREQRYQEQGGEASPQSRTWEQQQEVVSRNRNEQESAVHPREIFKQKERAMSTTSISSPQPGKLRSPFLQKQLTQPETHFGREPAAAISRPRADLPAEEPAPSTPPCLVQAEEEAVYEEPPEQETFYEQPPLVQQQGAGSEHIDHHIQGQGLSGQGLCARALYDYQAADDTEISFDPENLITGIEVIDEGWWRGYGPDGHFGMFPANYVELIE

SEQ ID NO: 3986 - protein, 359 aa, Homo sapiens
  VARIANT 1: note = misc_feature - Xaa can be any naturally occurring amino acid
XATAMTSAWLAQGTGEGVNDVRKGACASHVSTMASFLKGAHVTINARAEEDVEPECIMEKVAKASGANYSFHKESGRFQDVGPQAPVGSVYQKTNAVSEIKRVGKDSFWAKAEKEEENRRLEEKRRAEEAQRQLEQERRERELREAARREQRYQEQGGEASPQRTWEQQQEVVSRNRNEQESAVHPREIFKQKERAMSTTSISSPQPGKLRSPFLQKQLTQPETHFGREPAAAISRPRADLPAEEPAPSTPPCLVQAEEEAVYEEPPEQETFYEQPPLVQQQGAGSEHIDHHIQGQGLSGQGLCARALYDYQAADDTEISFDPENLITGIEVIDEGWWRGYGPDGHFGMFPANYVELIE

SEQ ID NO: 3987 - protein, 138 aa, Homo sapiens
  VARIANT 1: note = misc_feature - Xaa can be any naturally occurring amino acid
XKQKERAMSTTSISSPQPDLPAEEPAPSTPPCLVQAEEEAVYEEPPEQETFYEQPPLVQQQGAGSEHIDHHIQGQGLSGQGLCARALYDYQAADDTEISFDPENLITGIEVIDEGWWRGYGPDGHFGMFPANYVELIE

SEQ ID NO: 3988 - protein, 77 aa, Homo sapiens
MRFMTLLFLTALAGALVCAYDPEAASAPGSGNHKQMDCLQLQKPPSETAKFLSSSTNLPRREKLVPSAKPPHTRGLV

SEQ ID NO: 3989 - protein, 110 aa, Homo sapiens
MRFMTLLFLTALAGALVCAYDPEAASAPGSGNPCHEASAAQKENAGEDPGLARQAPKPRKQRSSLLEKGLDGAKKAVGGLGKLGKDAVEDLESVGKGAVHDVKDVLDSVL

SEQ ID NO: 3990 - protein, 121 aa, Homo sapiens
MRFMTLLFLTALAGALVCAYDPEAASAPGSGNPCHEASAAQKENAGEDPGLARQAPKPRKQRSSLLEKGLDGAKKAVGGLGKLGKDAVEDLESVGKGGEERLVFGAPVNLTSIPLTSVSRP

SEQ ID NO: 3991 - protein, 100 aa, Homo sapiens
MKATIILLLLAQVSWAGPFQQRGLFDFMLEDEASGIGPEVPDDRDFEPSLGPVCPFRCQCHLRVVQCSDLEKFGLEIPRALHLEDKSPERLKLSGWAKGE

SEQ ID NO: 3992 - protein, 98 aa, Homo sapiens
MKATIILLLLAQVSWAGPFQQRGLFDFMLEDEASGIGPEVPDDRDFEPSLGPVCPFRCQCHLRVVQCSDLEKKYCNNLSSYNLYTTNCLILCRLFTHH

SEQ ID NO: 3993 - protein, 98 aa, Homo sapiens; identical to SEQ ID NO: 3992

SEQ ID NO: 3994 - protein, 250 aa, Homo sapiens
MKATIILLLLAQVSWAGPFQQRGLFDFMLEDEASGIGPEVPDDRDFEPSLGPVCPFRCQCHLRVVQCSDLELGTNPLKSSGIENGAFQGMKKLSYIRIADTNITSIPQGLPPSLTELHLDGNKISRVDAASLKGLNNLAKLGLSFNSISAVDNGSLANTPHLRELHLDNNKLTRVPGGLAEHKYIQVVYLHNNNISVVGSSDFCPPGHNTKKASYSGVSLFSNPVQYWEIQPSTFRCVYVRSAIQLGNYK

SEQ ID NO: 3995 - protein, 75 aa, Homo sapiens
MKATIILLLLAQVSWAGPFQQRGLFDFMLEDEASGIGPEVPDDRDFEPSLGPVCPFRCQCHLRVVQCSDLGCLPS

SEQ ID NO: 3996 - protein, 119 aa, Homo sapiens
MKATIILLLLAQVSWAGPFQQRGLFDFMLEDEASGIGPEVPDDRDFEPSLGPVCPFRCQCHLRVVQCSDLGLDKVPKDLPPDTTLLDLQNNKITEIKDGDFKNLKNLHALILVNNKISK

SEQ ID NO: 3997 - protein, 174 aa, Homo sapiens
MKATIILLLLAQVSWAGPFQQRGLFDFMLEDEASGIGPEVPDDRDFEPSLGPVCPFRCQCHLRVVQCSDLGLDKVPKDLPPDTTLLDLQNNKITEIKDGDFKNLKNLHALILVNNKISKVSPGAFTPLVKLERLYLSKNQLKELPEKMPKTLQELRAHENEITKVRKVTFNGLN

SEQ ID NO: 3998 - protein, 178 aa, Homo sapiens
MKATIILLLLAQVSWAGPFQQRGLFDFMLEDEASGIGPEVPDDRDFEPSLGPVCPFRCQCHLRVVQCSDLGLDKVPKDLPPDTTLLDLQNNKITEIKDGDFKNLKNLHALILVNNKISKVSPGAFTPLVKLERLYLSKNQLKELPEKMPKTLQELRAHENEITKVRKVTFNGLNQMIV

SEQ ID NO: 3999 - protein, 179 aa, Homo sapiens
MKATIILLLLAQVSWAGPFQQRGLFDFMLEDEASGIGPEVPDDRDFEPSLGPVCPFRCQCHLRVVQCSDLGLDKVPKDLPPDTTLLDLQNNKITEIKDGDFKNLKNLHALILVNNKISKVSPGAFTPLVKLERLYLSKNQLKELPEKMPKTLQELRAHENEITKVRKVTFNGLNQMIVI

SEQ ID NO: 4000 - protein, 359 aa, Homo sapiens
MKATIILLLLAQVSWAGPFQQRGLFDFMLEDEASGIGPEVPDDRDFEPSLGPVCPFRCQCHLRVVQCSDLGLDKVPKDLPPDTTLLDLQNNKITEIKDGDFKNLKNLHALILVNNKISKVSPGAFTPLVKLERLYLSKNQLKELPEKMPKTLQELRAHENEITKVRKVTFNGLNQMIVIELGTNPLKSSGIENGAFQGMKKLSYIRIADTNITSIPQGLPPSLTELHLDGNKISRVDAASLKGLNNLAKLGLSFNSISAVDNGSLANTPHLRELHLDNNKLTRVPGGLAEHKYIQVVYLHNNNISVVGSSDFCPPGHNTKKASYSGVSLFSNPVQYWEIQPSTFRCVYVRSAIQLGNYK

SEQ ID NO: 4001 - protein, 359 aa, Homo sapiens; identical to SEQ ID NO: 4000

SEQ ID NO: 4002 - protein, 359 aa, Homo sapiens; identical to SEQ ID NO: 4000

SEQ ID NO: 4003 - protein, 172 aa, Homo sapiens
MKATIILLLLAQVSWAGPFQQRGLFDFMLEDEASGIGPEVPDDRDFEPSLGPVCPFRCQCHLRVVQCSDLGLDKVPKDLPPDTTLLDLQNNKITEIKDGDFKNLKNLHVVYLHNNNISVVGSSDFCPPGHNTKKASYSGVSLFSNPVQYWEIQPSTFRCVYVRSAIQLGNYK

SEQ ID NO: 4004 - protein, 177 aa, Homo sapiens
MKATIILLLLAQVSWAGPFQQRGLFDFMLEDEASGIGPEVPDDRDFEPSLGPVCPFRCQCHLRVVQCSDLGLPPSLTELHLDGNKISRVDAASLKGLNNLAKLGLSFNSISAVDNGSLANTPHLRELHLDNNKLTRVPGGLAEHKYIQVVYLHNNNISVVGSSDFCPPGHNTKKASY

SEQ ID NO: 4005 - protein, 212 aa, Homo sapiens
MKATIILLLLAQVSWAGPFQQRGLFDFMLEDEASGIGPEVPDDRDFEPSLGPVCPFRCQCHLRVVQCSDLGLPPSLTELHLDGNKISRVDAASLKGLNNLAKLGLSFNSISAVDNGSLANTPHLRELHLDNNKLTRVPGGLAEHKYIQVVYLHNNNISVVGSSDFCPPGHNTKKASYSGVSLFSNPVQYWEIQPSTFRCVYVRSAIQLGNYK

SEQ ID NO: 4006 - protein, 212 aa, Homo sapiens; identical to SEQ ID NO: 4005

SEQ ID NO: 4007 - protein, 88 aa, Homo sapiens
MKATIILLLLAQVSWAGPFQQRGLFDFMLEDEASGIGPEVPDDRDFEPSLGPVCPFRCQCHLRVVQCSDLVETGFHRVSQDGLDLLIS

SEQ ID NO: 4008 - protein, 52 aa, Homo sapiens
  VARIANT 1: note = misc_feature - Xaa can be any naturally occurring amino acid
XDFCPPGHNTKKASYSGVSLFSNPVQYWEIQPSTFRCVYVRSAIQLGNYKKK

SEQ ID NO: 4009 - protein, 95 aa, Homo sapiens
  VARIANT 1: note = misc_feature - Xaa can be any naturally occurring amino acid
XKISRVDAASLKGLNNLAKLGLSFNSISAVDNGSLANTPHLRELHLDNNKLTRVPGGLAEHKYIQVMQSHCLCEEYPKSKTPTLLMGCWEAGSSS

SEQ ID NO: 4010 - protein, 66 aa, Homo sapiens
MNRRRKFLLASVLALQNSSFIYPSCQKCFSRIILVSKRILKTNLDKVQMPVTSYSNALTTKEKPKH

SEQ ID NO: 4011 - protein, 75 aa, Homo sapiens
MNRRRKFLLASVLALQNSSFIYPSCQKCFSRIILVSKRSNCPKCGSTGESGNANYRYKLSLKVAESNKLFVITVF

SEQ ID NO: 4012 - protein, 76 aa, Homo sapiens
MNRRRKFLLASVLALQNSSFIYPSCQKCFSRIILVSKRSNCPKCGSTGESGNANYRYKLSLKVAESNKLFVITVFG

SEQ ID NO: 4013 - protein, 120 aa, Homo sapiens
MNRRRKFLLASVLALQNSSFIYPSCQKCFSRIILVSKRSNCPKCGSTGESGNANYRYKLSLKVAESNKLFVITVFGSCLDTFFGLTATGLHRILKTNLDKVQMPVTSYSNALTTKEKPKH

SEQ ID NO: 4014 - protein, 120 aa, Homo sapiens; identical to SEQ ID NO: 4013

SEQ ID NO: 4015 - protein, 123 aa, Homo sapiens
MNRRRKFLLASVLALQNSSFIYPSCQKCFSRIILVSKRSNCPKCGSTGESGNANYRYKLSLKVAESNKLFVITVFGSCLDTFFGLTATGLHRYIQDPNKIPETLDNDTTQNLLTKAVETCFVG

SEQ ID NO: 4016 - protein, 178 aa, Homo sapiens
MNRRRKFLLASVLALQNSSFIYPSCQKCFSRIILVSKRSNCPKCGSTGESGNANYRYKLSLKVAESNKLFVITVFGSCLDTFFGLTATGLHRYIQDPNKIPETLDNDTTQNLLTKAVETCFVGQSFIFGVTNFENQPGQGSDASNFLQQCSDHKRKAKALVACQIVLPDPATQDAKTK

SEQ ID NO: 4017 - protein, 998 aa, Homo sapiens
MNRRRKFLLASVLALQNSSFIYPSCQKCFSRIILVSKRSNCPKCGSTGESGNANYRYKLSLKVAESNKLFVITVFGSCLDTFFGLTATGLHRYIQDPNKIPETLDNDTTQNLLTKAVETCFVGQSFIFGVTNFENQPGQGSDASNFLQQCSDHKRKAKALVACQIVLPDPGIAGFTVIDYFHQLLQTFNFRKLQCDSQAPNNHLLALDHSNSDLSSIYTSDSTSDFFKSCSKDTFSKFWQPSLEFTCIVSQLTDNDDFSASEQSKAFGTLQQNRKSISIAEATGSSSCHDPIQDSWSLVSYMDKKSTAEKLGKELGLQAKELSAVHSSHHEIGVNDSNLFSLEMREPLESSNTKSFHSAVEIKNRSQHELPCFQHHGIDTPTSLQKRSACCPPSLLRLEETASSSQDGDPQIWDDLPFSESLNKFLAVLESEIAVTQADVSSRKHHVDNDIDKFHADHSRLSVTPQRTTGALHTPPIALRSSQVIVKANCSKDDFLFNCKGNLSPSVEKESQPDNKVEAVSVNHNGRDMSEYFLPNPYLSALSSSSKDLETIVTLKKTIRISPHRESDHSSLNNKYLNGCGEISVSEMNEKLTTLCYRKYNDVSDLCKLENKQYCRWSKNQDDSFTICRKLTYPLETLCNSPNRSTNTLKEMPWGHINNNVTQSYSIGYEGSYDASADLFDDIAKEMDIATEITKKSQDILLKWGTSLAESHPSESDFSLRSLSEDFIQPSQKLSLQSLSDSRHSRTCSPTPHFQSDSEYNFENSQDFVPCSQSTPISGFHQTRIHGINRAFKKPVFYSDLDGNYEKIRIFPENDKQQASPSCPKNIKTPSQKIRSPIVSGVSQPDVFNHYPFAECHETDSDEWVPPTTQKIFPSDMLGFQGIGLGKCLAAYHFPDQQELPRKKLKHIRQGTNKGLIKKKLKNMLAAVVTKKKTHKYNCKSSGWISKCPDIQVLAAPQLHPILGPDSCSEVKCCLPFSEKGPPSVCETRSAWSPELFS

SEQ ID NO: 4018 - protein, 998 aa, Homo sapiens; identical to SEQ ID NO: 4017

SEQ ID NO: 4019 - protein, 225 aa, Homo sapiens
MYQMSTLKSNKVIFQLKKNNFHQFRFFKRFIWSFALVAQAEVPWCNLGSLQPPHPRPRCEHMNRRRKFLLASVLALQNSSFIYPSCQKCFSRIILVSKRSNCPKCGSTGESGNANYRYKLSLKVAESNKLFVITVFGSCLDTFFGLTATGLHRYIQDPNKIPETLDNDTTQNLLTKAVETCFVGQSFIFGVTNFENQPGQGSDASNFLQQCSDHKRKAKALVACQ

SEQ ID NO: 4020 - protein, 439 aa, Homo sapiens
MEPSTAARAWALFWLLLPLLGAVCASGPRTLVLLDNLNVRETHSLFFRSLKDRGFELTFKTADDPSLSLIKYGEFLYDNLIIFSPSVEDFGGNINVETISAFIDGGGSVLVAASSDIGDPLRELGSECGIEFDEEKTAVIDHHNYDISDLGQHTLIVADTENLLKAPTIVGKSSLNPILFRGVGMVADPDNPLVLDILTGSSTSYSFFPDKPITQYPHAVGKNTLLIAGLQARNNARVIFSGSLDFFSDSFFNSAVQKAAPGSQRYSQTGNYELAVALSRWVFKEEGVLRVGPVSHHRVGETAPPNAYTVTDLVEYSIVIQQLSNGKWVPFDGDDIQLEFVRIDPFVRTFLKKKGGKYSVQFKLPDVYGVFQFKVDYNRLGYTHLYSSTQVSVRPLQHTQYERFIPSAYPYYASAFSMMLGLFIFSIVFLHMKEKEKSD

SEQ ID NO: 4021 - protein, 155 aa, Homo sapiens [sequence omitted]

SEQ ID NO: 4022 - protein, 456 aa, Homo sapiens
MGYFRCARAGSFGRRRKMEPSTAARAWALFWLLLPLLGAVCASGPRTLVLLDNLNVRETHSLFFRSLKDRGFELTFKTADDPSLSLIKYGEFLYDNLIIFSPSVEDFGGNINVETISAFIDGGGSVLVAASSDIGDPLRELGSECGIEFDEEKTAVIDHHNYDISDLGQHTLIVADTENLLKAPTIVGKSSLNPILFRGVGMVADPDNPLVLDILTGSSTSYSFFPDKPITQYPHAVGKNTLLIAGLQARNNARVIFSGSLDFFSDSFFNSAVQKAAPGSQRYSQTGNYELAVALSRWVFKEEGVLRVGPVSHHRVGETAPPNAYTVTDLVEYSIVIQQLSNGKWVPFDGDDIQLEFVRIDPFVRTFLKKKGGKYSVQFKLPDVYGVFQFKVDYNRLGYTHLYSSTQVSVRPLQHTQYERFIPSAYPYYASAFSMMLGLFIFSIVFLHMKEKEKSD

SEQ ID NO: 4023 - protein, 456 aa, Homo sapiens; identical to SEQ ID NO: 4022

SEQ ID NO: 4024 - protein, 41 aa, Homo sapiens
MGPEALSSLLLLLLVASGDADMKGHFDPAKCRYALGMQDRT

SEQ ID NO: 4025 - protein, 51 aa, Homo sapiens
MGPEALSSLLLLLLVASGDADMKGHFDPAKCRYALGMQDRTIPDSDISASS

SEQ ID NO: 4026 - protein, 51 aa, Homo sapiens; identical to SEQ ID NO: 4025

SEQ ID NO: 4027 - protein, 55 aa, Homo sapiens
MGPEALSSLLLLLLVASGDADMKGHFDPAKCRYALGMQDRTIPDSDISASSSWSD

SEQ ID NO: 4028 - protein, 58 aa, Homo sapiens
MGPEALSSLLLLLLVASGDADMKGHFDPAKCRYALGMQDRTIPDSDISASSSWSDSTA

SEQ ID NO: 4029 - protein, 70 aa, Homo sapiens
MGPEALSSLLLLLLVASGDADMKGHFDPAKCRYALGMQDRTIPDSDISASSSWSDSTAARHSRLESSDGD

SEQ ID NO: 4030 - protein, 73 aa, Homo sapiens
MGPEALSSLLLLLLVASGDADMKGHFDPAKCRYALGMQDRTIPDSDISASSSWSDSTAARHSRLESSDGDGAW

SEQ ID NO: 4031 - protein, 78 aa, Homo sapiens
MGPEALSSLLLLLLVASGDADMKGHFDPAKCRYALGMQDRTIPDSDISASSSWSDSTAARHSRLESSDGDGAWCPAGS

SEQ ID NO: 4032 - protein, 85 aa, Homo sapiens
MGPEALSSLLLLLLVASGDADMKGHFDPAKCRYALGMQDRTIPDSDISASSSWSDSTAARHSRLESSDGDGAWCPAGSVFPKEEE

SEQ ID NO: 4033 - protein, 101 aa, Homo sapiens
MGPEALSSLLLLLLVASGDADMKGHFDPAKCRYALGMQDRTIPDSDISASSSWSDSTAARHSRLESSDGDGAWCPAGSVFPKEEEYLQVDLQRLHLVALVG

SEQ ID NO: 4034 - protein, 112 aa, Homo sapiens
MGPEALSSLLLLLLVASGDADMKGHFDPAKCRYALGMQDRTIPDSDISASSSWSDSTAARHSRLESSDGDGAWCPAGSVFPKEEEYLQVDLQRLHLVALVGTQGRHAGGLGK

SEQ ID NO: 4035 - protein, 115 aa, Homo sapiens
MGPEALSSLLLLLLVASGDADMKGHFDPAKCRYALGMQDRTIPDSDISASSSWSDSTAARHSRLESSDGDGAWCPAGSVFPKEEEYLQVDLQRLHLVALVGTQGRHAGGLGKEFS

SEQ ID NO: 4036 - protein, 122 aa, Homo sapiens
MGPEALSSLLLLLLVASGDADMKGHFDPAKCRYALGMQDRTIPDSDISASSSWSDSTAARHSRLESSDGDGAWCPAGSVFPKEEEYLQVDLQRLHLVALVGTQGRHAGGLGKEFSRSYRLRY

SEQ ID NO: 4037 - protein, 127 aa, Homo sapiens
MGPEALSSLLLLLLVASGDADMKGHFDPAKCRYALGMQDRTIPDSDISASSSWSDSTAARHSRLESSDGDGAWCPAGSVFPKEEEYLQVDLQRLHLVALVGTQGRHAGGLGKEFSRSYRLRYSRDGR

SEQ ID NO: 4038 - protein, 132 aa, Homo sapiens
MGPEALSSLLLLLLVASGDADMKGHFDPAKCRYALGMQDRTIPDSDISASSSWSDSTAARHSRLESSDGDGAWCPAGSVFPKEEEYLQVDLQRLHLVALVGTQGRHAGGLGKEFSRSYRLRYSRDGRRWMGW

SEQ ID NO: 4039 - protein, 138 aa, Homo sapiens
MGPEALSSLLLLLLVASGDADMKGHFDPAKCRYALGMQDRTIPDSDISASSSWSDSTAARHSRLESSDGDGAWCPAGSVFPKEEEYLQVDLQRLHLVALVGTQGRHAGGLGKEFSRSYRLRYSRDGRRWMGWKDRWGQ

SEQ ID NO: 4040 - protein, 138 aa, Homo sapiens; identical to SEQ ID NO: 4039

SEQ ID NO: 4041 - protein, 143 aa, Homo sapiens
MGPEALSSLLLLLLVASGDADMKGHFDPAKCRYALGMQDRTIPDSDISASSSWSDSTAARHSRLESSDGDGAWCPAGSVFPKEEEYLQVDLQRLHLVALVGTQGRHAGGLGKEFSRSYRLRYSRDGRRWMGWKDRWGQEVISG

SEQ ID NO: 4042 - protein, 147 aa, Homo sapiens
MGPEALSSLLLLLLVASGDADMKGHFDPAKCRYALGMQDRTIPDSDISASSSWSDSTAARHSRLESSDGDGAWCPAGSVFPKEEEYLQVDLQRLHLVALVGTQGRHAGGLGKEFSRSYRLRYSRDGRRWMGWKDRWGQEVISGNEDP

SEQ ID NO: 4043 - protein, 153 aa, Homo sapiens
MGPEALSSLLLLLLVASGDADMKGHFDPAKCRYALGMQDRTIPDSDISASSSWSDSTAARHSRLESSDGDGAWCPAGSVFPKEEEYLQVDLQRLHLVALVGTQGRHAGGLGKEFSRSYRLRYSRDGRRWMGWKDRWGQEVISGNEDPEGVVLK

SEQ ID NO: 4044 - protein, 160 aa, Homo sapiens
MGPEALSSLLLLLLVASGDADMKGHFDPAKCRYALGMQDRTIPDSDISASSSWSDSTAARHSRLESSDGDGAWCPAGSVFPKEEEYLQVDLQRLHLVALVGTQGRHAGGLGKEFSRSYRLRYSRDGRRWMGWKDRWGQEVISGNEDPEGVVLKDLGPPMV

SEQ ID NO: 4045 - protein, 170 aa, Homo sapiens
MGPEALSSLLLLLLVASGDADMKGHFDPAKCRYALGMQDRTIPDSDISASSSWSDSTAARHSRLESSDGDGAWCPAGSVFPKEEEYLQVDLQRLHLVALVGTQGRHAGGLGKEFSRSYRLRYSRDGRRWMGWKDRWGQEVISGNEDPEGVVLKDLGPPMVARLVRFYPRA

SEQ ID NO: 4046 - protein, 243 aa, Homo sapiens
MGPEALSSLLLLLLVASGDADMKGHFDPAKCRYALGMQDRTIPDSDISASSSWSDSTAARHSRLESSDGDGAWCPAGSVFPKEEEYLQVDLQRLHLVALVGTQGRHAGGLGKEFSRSYRLRYSRDGRRWMGWKDRWGQEVISGNEDPEGVVLKDLGPPMVARLVRFYPRADRVMSVCLRVELYGCLWRDCSMGVWASWQMVWWGWMTLGRVRSCGSGQAMTMWDGATTASPVAMWRWSLSLTG

SEQ ID NO: 4047 - protein, 243 aa, Homo sapiens; identical to SEQ ID NO: 4046

SEQ ID NO: 4048 - protein, 209 aa, Homo sapiens
MGPEALSSLLLLLLVASGDADMKGHFDPAKCRYALGMQDRTIPDSDISASSSWSDSTAARHSRLESSDGDGAWCPAGSVFPKEEEYLQVDLQRLHLVALVGTQGRHAGGLGKEFSRSYRLRYSRDGRRWMGWKDRWGQEVISGNEDPEGVVLKDLGPPMVARLVRFYPRADRVMSVCLRVELYGCLWRDGLLSYTAPVGQTMYLSEAVY

SEQ ID NO: 4049 - protein, 913 aa, Homo sapiens
MGPEALSSLLLLLLVASGDADMKGHFDPAKCRYALGMQDRTIPDSDISASSSWSDSTAARHSRLESSDGDGAWCPAGSVFPKEEEYLQVDLQRLHLVALVGTQGRHAGGLGKEFSRSYRLRYSRDGRRWMGWKDRWGQEVISGNEDPEGVVLKDLGPPMVARLVRFYPRADRVMSVCLRVELYGCLWRDGLLSYTAPVGQTMYLSEAVYLNDSTYDGHTVGGLQYGGLGQLADGVVGLDDFRKSQELRVWPGYDYVGWSNHSFSSGYVEMEFEFDRLRAFQAMQVHCNNMHTLGARLPGGVECRFRRGPAMAWEGEPMRHNLGGNLGDPRARAVSVPLGGRVARFLQCRFLFAGPWLLFSEISFISDVVNNSSPALGGTFPPAPWWPPGPPPTNFSSLELEPRGQQPVAKAEGSPTAILIGCLVAIILLLLLIIALMLWRLHWRRLLSKAERRVLEEELTVHLSVPGDTILINNRPGPREPPPYQEPRPRGNPPHSAPCVPNGSALLLSNPAYRLLLATYARPPRGPGPPTPAWAKPTNTQAYSGDYMEPEKPGAPLLPPPPQNSVPHYAEADIVTLQGVTGGNTYAVPALPPGAVGDGPPRVDFPRSRLRFKEKLGEGQFGEVHLCEVDSPQDLVSLDFPLNVRKGHPLLVAVKILRPDATKNARNDFLKEVKIMSRLKDPNIIRLLGVCVQDDPLCMITDYMENGDLNQFLSAHQLEDKAAEGAPGDGQAAQGPTISYPMLLHVAAQIASGMRYLATLNFVHRDLATRNCLVGENFTIKIADFGMSRNLYAGDYYRVQGRAVLPIRWMAWECILMGKFTTASDVWAFGVTLWEVLMLCRAQPFGQLTDEQVIENAGEFFRDQGRQVYLSRPPACPQGLYELMLRCWSRESEQRPPFSQLHRFLAEDALNTV

SEQ ID NO: 4050 - protein, 876 aa, Homo sapiens
MGPEALSSLLLLLLVASGDADMKGHFDPAKCRYALGMQDRTIPDSDISASSSWSDSTAARHSRLESSDGDGAWCPAGSVFPKEEEYLQVDLQRLHLVALVGTQGRHAGGLGKEFSRSYRLRYSRDGRRWMGWKDRWGQEVISGNEDPEGVVLKDLGPPMVARLVRFYPRADRVMSVCLRVELYGCLWRDGLLSYTAPVGQTMYLSEAVYLNDSTYDGHTVGGLQYGGLGQLADGVVGLDDFRKSQELRVWPGYDYVGWSNHSFSSGYVEMEFEFDRLRAFQAMQVHCNNMHTLGARLPGGVECRFRRGPAMAWEGEPMRHNLGGNLGDPRARAVSVPLGGRVARFLQCRFLFAGPWLLFSEISFISDVVNNSSPALGGTFPPAPWWPPGPPPTNFSSLELEPRGQQPVAKAEGSPTAILIGCLVAIILLLLLIIALMLWRLHWRRLLSKAERRVLEEELTVHLSVPGDTILINNRPGPREPPPYQEPRPRGNPPHSAPCVPNGSAYSGDYMEPEKPGAPLLPPPPQNSVPHYAEADIVTLQGVTGGNTYAVPALPPGAVGDGPPRVDFPRSRLRFKEKLGEGQFGEVHLCEVDSPQDLVSLDFPLNVRKGHPLLVAVKILRPDATKNARNDFLKEVKIMSRLKDPNIIRLLGVCVQDDPLCMITDYMENGDLNQFLSAHQLEDKAAEGAPGDGQAAQGPTISYPMLLHVAAQIASGMRYLATLNFVHRDLATRNCLVGENFTIKIADFGMSRNLYAGDYYRVQGRAVLPIRWMAWECILMGKFTTASDVWAFGVTLWEVLMLCRAQPFGQLTDEQVIENAGEFFRDQGRQVYLSRPPACPQGLYELMLRCWSRESEQRPPFSQLHRFLAEDALNTV

SEQ ID NO: 4051 - protein, 876 aa, Homo sapiens; identical to SEQ ID NO: 4050

SEQ ID NO: 4052 - protein, 913 aa, Homo sapiens; identical to SEQ ID NO: 4049

SEQ ID NO: 4053 - protein, 267 aa, Homo sapiens
MGPEALSSLLLLLLVASGDADMKGHFDPAKCRYALGMQDRTIPDSDISASSSWSDSTAARHSRLESSDGDGAWCPAGSVFPKEEEYLQVDLQRLHLVALVGTQGRHAGGLGKEFSRSYRLRYSRDGRRWMGWKDRWGQEVISGNEDPEGVVLKDLGPPMVARLVRFYPRADRVMSVCLRVELYGCLWRDGLLSYTAPVGQTMYLSEAVYLNDSTYDGHTVGGLQYGGLGQLADGVVGLDDFRKSQELRVWPGYDYVGWSNHSFSSGY

SEQ ID NO: 4054 - protein, 876 aa, Homo sapiens; identical to SEQ ID NO: 4050

SEQ ID NO: 4055 - protein, 767 aa, Homo sapiens
MGPEALSSLLLLLLVASGDADMKGHFDPAKCRYALGMQDRTIPDSDISASSSWSDSTAARHSRLESSDGDGAWCPAGSVFPKEEEYLQVDLQRLHLVALVGTQGRHAGGLGKEFSRSYRLRYSRDGRRWMGWKDRWGQEVISGNEDPEGVVLKDLGPPMVARLVRFYPRADRVMSVCLRVELYGCLWRDGLLSYTAPVGQTMYLSEAVYLNDSTYDGHTVGGLQYGGLGQLADGVVGLDDFRKSQELRVWPGYDYVGWSNHSFSSGYVEMEFEFDRLRAFQAMQVHCNNMHTLGARLPGGVECRFRRGPAMAWEGEPMRHNLGGNLGDPRARAVSVPLGGRVARFLQCRFLFAGPWLLFSEISFISDVVNNSSPALGGTFPPAPWWPPGPPPTNFSSLELEPRGQQPVAKAEGSPTAILIGCLVAIILLLLLIIALMLWRLHWRRLLSKVLESHPRTRSPGLVGIRPTPLPVSPMALVHLCEVDSPQDLVSLDFPLNVRKGHPLLVAVKILRPDATKNARNDFLKEVKIMSRLKDPNIIRLLGVCVQDDPLCMITDYMENGDLNQFLSAHQLEDKAAEGAPGDGQAAQGPTISYPMLLHVAAQIASGMRYLATLNFVHRDLATRNCLVGENFTIKIADFGMSRNLYAGDYYRVQGRAVLPIRWMAWECILMGKFTTASDVWAFGVTLWEVLMLCRAQPFGQLTDEQVIENAGEFFRDQGRQVYLSRPPACPQGLYELMLRCWSRESEQRPPFSQLHRFLAEDALNTV

SEQ ID NO: 4056 - protein, 876 aa, Homo sapiens; identical to SEQ ID NO: 4050

SEQ ID NO: 4057 - protein, 876 aa, Homo sapiens; identical to SEQ ID NO: 4050

SEQ ID NO: 4058 - protein, 919 aa, Homo sapiens
MGPEALSSLLLLLLVASGDADMKGHFDPAKCRYALGMQDRTIPDSDISASSSWSDSTAARHSRLESSDGDGAWCPAGSVFPKEEEYLQVDLQRLHLVALVGTQGRHAGGLGKEFSRSYRLRYSRDGRRWMGWKDRWGQEVISGNEDPEGVVLKDLGPPMVARLVRFYPRADRVMSVCLRVELYGCLWRDGLLSYTAPVGQTMYLSEAVYLNDSTYDGHTVGGLQYGGLGQLADGVVGLDDFRKSQELRVWPGYDYVGWSNHSFSSGYVEMEFEFDRLRAFQAMQVHCNNMHTLGARLPGGVECRFRRGPAMAWEGEPMRHNLGGNLGDPRARAVSVPLGGRVARFLQCRFLFAGPWLLFSEISFISDVVNNSSPALGGTFPPAPWWPPGPPPTNFSSLELEPRGQQPVAKAEGSPTAILIGCLVAIILLLLLIIALMLWRLHWRRLLSKAERRVLEEELTVHLSVPGDTILINNRPGPREPPPYQEPRPRGNPPHSAPCVPNGSALLLSNPAYRLLLATYARPPRGPGPPTPAWAKPTNTQAYSGDYMEPEKPGAPLLPPPPQNSVPHYAEADIVTLQGVTGGNTYAVPALPPGAVGDGPPRVDFPRSRLRFKEKLGEGQFGEVHLCEVDSPQDLVSLDFPLNVRKGHPLLVAVKILRPDATKNASFSLFSRNDFLKEVKIMSRLKDPNIIRLLGVCVQDDPLCMITDYMENGDLNQFLSAHQLEDKAAEGAPGDGQAAQGPTISYPMLLHVAAQIASGMRYLATLNFVHRDLATRNCLVGENFTIKIADFGMSRNLYAGDYYRVQGRAVLPIRWMAWECILMGKFTTASDVWAFGVTLWEVLMLCRAQPFGQLTDEQVIENAGEFFRDQGRQVYLSRPPACPQGLYELMLRCWSRESEQRPPFSQLHRFLAEDALNTV

SEQ ID NO: 4059 - protein, 286 aa, Homo sapiens
MGPEALSSLLLLLLVASGDADMKGHFDPAKCRYALGMQDRTIPDSDISASSSWSDSTAARHSRLESSDGDGAWCPAGSVFPKEEEYLQVDLQRLHLVALVGTQGRHAGGLGKEFSRSYRLRYSRDGRRWMGWKDRWGQEVISGNEDPEGVVLKDLGPPMVARLVRFYPRADRVMSVCLRVELYGCLWRDGLLSYTAPVGQTMYLSEAVYLNDSTYDGHTVGGLQYGGLGQLADGVVGLDDFRKSQELRVWPGYDYVGWSNHSFSSGYVEMEFEFDRLRAFQAMQVH

SEQ ID NO: 4060 - protein, 913 aa, Homo sapiens; identical to SEQ ID NO: 4049

SEQ ID NO: 4061 - protein, 35 aa, Homo sapiens
MGPEALSSLLLLLLVASGDADMKGHFDPGPDHPRQ

SEQ ID NO: 4062 - protein, 35 aa, Homo sapiens; identical to SEQ ID NO: 4061

SEQ ID NO: 4063 - protein, 196 aa, Homo sapiens
MPHLASLFTASSRCCPHPLRPEGSGAMGPEALSSLLLLLLVASGDADMKGHFDPAKCRYALGMQDRTIPDSDISASSSWSDSTAARHSRLESSDGDGAWCPAGSVFPKEEEYLQVDLQRLHLVALVGTQGRHAGGLGKEFSRSYRLRYSRDGRRWMGWKDRWGQEVISGNEDPEGVVLKDLGPPMVARLVRFYPRA

SEQ ID NO: 4064 - protein, 894 aa, Homo sapiens
MSLPRCCPHPLRPEGSGAMGPEALSSLLLLLLVASGDADMKGHFDPAKCRYALGMQDRTIPDSDISASSSWSDSTAARHSRLESSDGDGAWCPAGSVFPKEEEYLQVDLQRLHLVALVGTQGRHAGGLGKEFSRSYRLRYSRDGRRWMGWKDRWGQEVISGNEDPEGVVLKDLGPPMVARLVRFYPRADRVMSVCLRVELYGCLWRDGLLSYTAPVGQTMYLSEAVYLNDSTYDGHTVGGLQYGGLGQLADGVVGLDDFRKSQELRVWPGYDYVGWSNHSFSSGYVEMEFEFDRLRAFQAMQVHCNNMHTLGARLPGGVECRFRRGPAMAWEGEPMRHNLGGNLGDPRARAVSVPLGGRVARFLQCRFLFAGPWLLFSEISFISDVVNNSSPALGGTFPPAPWWPPGPPPTNFSSLELEPRGQQPVAKAEGSPTAILIGCLVAIILLLLLIIALMLWRLHWRRLLSKAERRVLEEELTVHLSVPGDTILINNRPGPREPPPYQEPRPRGNPPHSAPCVPNGSAYSGDYMEPEKPGAPLLPPPPQNSVPHYAEADIVTLQGVTGGNTYAVPALPPGAVGDGPPRVDFPRSRLRFKEKLGEGQFGEVHLCEVDSPQDLVSLDFPLNVRKGHPLLVAVKILRPDATKNARNDFLKEVKIMSRLKDPNIIRLLGVCVQDDPLCMITDYMENGDLNQFLSAHQLEDKAAEGAPGDGQAAQGPTISYPMLLHVAAQIASGMRYLATLNFVHRDLATRNCLVGENFTIKIADFGMSRNLYAGDYYRVQGRAVLPIRWMAWECILMGKFTTASDVWAFGVTLWEVLMLCRAQPFGQLTDEQVIENAGEFFRDQGRQVYLSRPPACPQGLYELMLRCWSRESEQRPPFSQLHRFLAEDALNTV

SEQ ID NO: 4065 - protein, 69 aa, Homo sapiens
MVARLVRFYPRADRVMSVCLRVELYGCLWRDGLLSYTAPVGQTMYLSEAVYLNDSTYDGHTVGGLQYGG

SEQ ID NO: 4066 - protein, 493 aa, Homo sapiens
SEAVYLNDSTYDGHTVGGLQYGGLGQLADGVVGLDDFRKSQELRVWPGYDYVGWSNHSFSSGYVEMEFEFDRLRAFQAMQVHCNNMHTLGARLPGGVECRFRRGPAMAWEGEPMRHNLGGNLGDPRARAVSVPLGGRVARFLQCRFLFAGPWLLFSEISFISDVVNNSSPALGGTFPPAPWWPPGPPPTNFSSLELEPRGQQPVAKAEGSPTAILIGCLVAIILLLLLIIALMLWRLHWRRLLSKVLESHPRTRSPGLVGIRPTPLPVSPMALRCCSPIQPTASFWPLTPVPLEARAPPHPPGPNPPTPRGVTGGNTYAVPALPPGAVGDGPPRVDFPRSRLRFKEKLGEGQFGEVHLCEVDSPQDLVSLDFPLNVRKGHPLLVAVKILRPDATKNARNDFLKEVKIMSRLKDPNIIRLLGVCVQDDPLCMITDYMENGDLNQFLSAHQLEDKAAEGAPGDGQAAQGPTISYPMLLHVAAQIASGMRYLATLN

SEQ ID NO: 4067 - protein, 172 aa, Homo sapiens
  VARIANT 1: note = misc_feature - Xaa can be any naturally occurring amino acid
XNNRPGPREPPPYQEPRPRGNPPHSAPCVPNGSAYSGDYMEPEKPGAPLLPPPPQNSVPHYAEADIVTLQGVTGGNTYAVPALPPGAVGDGPPRVDFPRSRLRFKEKLGEGQFGEVHLCEVDSPQDLVSLDFPLNVRKGHPLLVAVKILRPDATKNASFSLFSRNDFLKEVK

SEQ ID NO: 4068 - protein, 277 aa, Homo sapiens
  VARIANT 1: note = misc_feature - Xaa can be any naturally occurring amino acid
XRKGHPLLVAVKILRPDATKNARNDFLKEVKIMSRLKDPNIIRLLGVCVQDDPLCMITDYMENGDLNQFLSAHQLEDKAAEGAPGDGQAAQGPTISYPMLLHVAAQIASGMRYLATLNFVHRDLATRNCLVGENFTIKIADFGMSRNLYAGDYYRVQGRAVLPIRWMAWECILMGKFTTASDVWAFGVTLWEVLMLCRAQPFGQLTDEQVIENAGEFFRDQGRQVRVEEREDGSEAGDRRGRVVILETKEYLFPDSHPHCHNAGVPVPAACLPAGPI

SEQ ID NO: 4069 - protein, 196 aa, Homo sapiens
  VARIANT 1: note = misc_feature - Xaa can be any naturally occurring amino acid
XSLLLLLLVASGDADMKGHFDPAKCRYALGMQDRTIPDSDISASSSWLESSDGDGAWCPAGSVFPKEEEYLQVDLQRLHLVALVGTQGRHAGGLGKEFSRSYRLRYSRDGRRWMGWKDRWGQEVISGNEDPEGVVLKDLGPPMVARLVRFYPRADRVMSVCLRVELYGCLWRDGLLSYTAPVGQTMYLSEAVYLND

SEQ ID NO: 4070 - protein, 166 aa, Homo sapiens
LKVDDSNTRILIGCLVAIIFILLAIIVIILWRQFWQKMLEKASRRMLDDEMTVSLSLPSDSSMFNNNRSSSPSEQGSNSTYDRIFPLRPDYQEPSRLIRKLPEFAPGEEESGEDDVVGRVSREKPQQASGRYDTPAPSSLHLFLVSANLLRSPHSLSRFGLPLLLA

SEQ ID NO: 4071 - protein, 130 aa, Homo sapiens
MILIPRMLLVLFLLLPILSSAKAQVNPAICRYPLGMSGGQIPDEDITASSQWSESTAAKYGRLDSEEGDGAWCPEIPVEPDDLKEFLQIDLHTLHFITLVGTQGRHAGGHGIEFAPMYKINYSRDGTRWI

SEQ ID NO: 4072 - protein, 148 aa, Homo sapiens
MILIPRMLLVLFLLLPILSSAKAQVNPAICRYPLGMSGGQIPDEDITASSQWSESTAAKYGRLDSEEGDGAWCPEIPVEPDDLKEFLQIDLHTLHFITLVGTQGRHAGGHGIEFAPMYKINYSRDGTRWISWRNRHGKQVLDGNSNPY

SEQ ID NO: 4073 - protein, 855 aa, Homo sapiens
MILIPRMLLVLFLLLPILSSAKAQVNPAICRYPLGMSGGQIPDEDITASSQWSESTAAKYGRLDSEEGDGAWCPEIPVEPDDLKEFLQIDLHTLHFITLVGTQGRHAGGHGIEFAPMYKINYSRDGTRWISWRNRHGKQVLDGNSNPYDIFLKDLEPPIVARFVRFIPVTDHSMNVCMRVELYGCVWLDGLVSYNAPAGQQFVLPGGSIIYLNDSVYDGAVGYSMTEGLGQLTDGVSGLDDFTQTHEYHVWPGYDYVGWRNESATNGYIEIMFEFDRIRNFTTMKVHCNNMFAKGVKIFKEVQCYFRSEASEWEPNAISFPLVLDDVNPSARFVTVPLHHRMASAIKCQYHFADTWMMFSEITFQSDAAMYNNSEALPTSPMAPTTYDPMLKVDDSNTRILIGCLVAIIFILLAIIVIILWRQFWQKMLEKASRRMLDDEMTVSLSLPSDSSMFNNNRSSSPSEQGSNSTYDRIFPLRPDYQEPSRLIRKLPEFAPGEEESGCSGVVKPVQPSGPEGVPHYAEADIVNLQGVTGGNTYSVPAVTMDLLSGKDVAVEEFPRKLLTFKEKLGEGQFGEVHLCEVEGMEKFKDKDFALDVSANQPVLVAVKMLRADANKNARNDFLKEIKIMSRLKDPNIIHLLAVCITDDPLCMITEYMENGDLNQFLSRHEPPNSSSSDVRTVSYTNLKFMATQIASGMKYLSSLNFVHRDLATRNCLVGKNYTIKIADFGMSRNLYSGDYYRIQGRAVLPIRWMSWESILLGKFTTASDVWAFGVTLWETFTFCQEQPYSQLSDEQVIENTGEFFRDQGRQTYLPQPAICPDSVYKLMLSCWRRDTKNRPSFQEIHLLLLQQGDE

SEQ ID NO: 4074 - protein, 855 aa, Homo sapiens; identical to SEQ ID NO: 4073

SEQ ID NO: 4075 - protein, 171 aa, Homo sapiens
  VARIANT 1: note = misc_feature - Xaa can be any naturally occurring amino acid
XIFILLAIIVIILWRQFWQKMLEKASRRMLDDEMTVSLSLPSDSSMFNNNRSSSPSEQGSNSTYDRIFPLRPDYQEPSRLIRKLPEFAPGEEESGCSGVVKPVQPSGPEGVPHYAEADIVNLQGVTGGNTYSVPAVTMDLLSGKDVAVEEFPRKLLTFKEKLGEGQFGEVS

SEQ ID NO: 4076 - protein, 166 aa, Homo sapiens
MPFLELDTNLPANRVPAGLEKRLCAAAASILGKPADRVNVTVRPGLAMALSGSTEPCAQLSISSIGVVGTAEDNRSHSAHFFEFLTKELALGQDRFQVKFTGDSQSSERPLAWMSRHLLSGSCIAGGPQTNLEMNHLQLATSSSVNTGEKTSLPHKKRLQPKPGVL

SEQ ID NO: 4077 - protein, 118 aa, Homo sapiens
MPFLELDTNLPANRVPAGLEKRLCAAAASILGKPADRVNVTVRPGLAMALSGSTEPCAQLSISSIGVVGTAEDNRSHSAHFFEFLTKELALGQDRILIRFFPLESWQIGKIGTVMTFL

SEQ ID NO: 4078 - protein, 118 aa, Homo sapiens; identical to SEQ ID NO: 4077

SEQ ID NO: 4079 - protein, 107 aa, Homo sapiens
MPFLELDTNLPANRVPAGLEKRLCAAAASILGKPADRVNVTVRPGLAMALSGSTEPCAQLSISSIGVVGTAEDNRSHSAHFFEFLTKELALGQDRQVPGEVHGRLTE

SEQ ID NO: 4080 - protein, 132 aa, Homo sapiens
MQLFLLAVSVPLPAMPFLELDTNLPANRVPAGLEKRLCAAAASILGKPADRVNVTVRPGLAMALSGSTEPCAQLSISSIGVVGTAEDNRSHSAHFFEFLTKELALGQDRILIRFFPLESWQIGKIGTVMTFL

SEQ ID NO: 4081 - protein, 50 aa, Homo sapiens
  VARIANT 1: note = misc_feature - Xaa can be any naturally occurring amino acid
XKDLPPPQEASATQTWRSVTELKFPLGILIRFFPLESWQIGKIGTVMTFL

SEQ ID NO: 4082 - protein, 729 aa, Homo sapiens
LPTGFVAPILCVLLPSPTREAATVASATGDSASERESAAPAAAPTAEAPPPSVVTRPEPQALPSPAIRAPLPDLYPFGTMRGGGFGDRDRDRDRGGFGARGGGGLPPKKFGNPGERLRKKKWDLSELPKFEKNFYVEHPEVARLTPYEVDELRRKKEITVRGGDVCPKPVFAFHHANFPQYVMDVLMDQHFTEPTPIQCQGFPLALSGRDMVGIAQTGSGKTLAYLLPAIVHINHQPYLERGDGPICLVLAPTRELAQQVQQVADDYGKCSRLKSTCIYGGAPKGPQIRDLERGVEICIATPGRLIDFLESGKTNLRRCTYLVLDEADRMLDMGFEPQIRKIVDQIRPDRQTLMWSATWPKEVRQLAEDFLRDYTQINVGNLELSANHNILQIVDVCMESEKDHKLIQLMEEIMAEKENKTIIFVETKRRCDDLTRRMRRDGWPAMCIHGDKSQPERDWVLNEFRSGKAPILIATDVASRGLDVEDVKFVINYDYPNSSEDYVHRIGRTARSTNKGTAYTFFTPGNLKQARELIKVLEEANQAINPKLMQLVDHRGGGGGGGGRSRYRTTSSANNPNLMYQDECDRRLRGVKDGGRRDSASYRDRSETDRAGYANGSGYGSPNSAFGAQAGQYTYGQGTYGAAAYGTSSYTAQEYGAGTYGASSTTSTGRSSQSSSQQFSGIGRSGQQPQPLMSQQFAQPPGATNMIGYMGQTAYQYPPPPPPPPPSRK

SEQ ID NO: 4083 - protein, 731 aa, Homo sapiens
LPTGFVAPILCVLLPSPTREAATVASATGDSASERESAAPAAAPTAEAPPPSVVTRPEPQALPSPAIRAPLPDLYPFGTMRGGGFGDRDRDRDRGGFGARGGGGLPPKKFGNPGERLRKKKWDLSELPKFEKNFYVEHPEVARLTPYEVDELRRKKEITVRGGDVCPKPVFAFHHANFPQYVMDVLMDQHFTEPTPIQCQGFPLALSGRDMVGIAQTGSGKTLAYLLPAIVHINHQPYLERGDGPICLVLAPTRELAQQVQQVADDYGKCSRLKSTCIYGGAPKGPQIRDLERGVEICIATPGRLIDFLESGKTNLRRCTYLVLDEADRMLDMGFEPQIRKIVDQIRPDRQTLMWSATWPKEVRQLAEDFLRDYTQINVGNLELSANHNILQIVDVCMESEKDHKLIQLMEEIMAEKENKTIIFVETKRRCDDLTRRMRRDGWPAMCIHGDKSQPERDWVLNEFRSGKAPILIATDVASRGLDVEDVKFVINYDYPNSSEDYVHRIGRTARSTNKGTAYTFFTPGNLKQARELIKVLEEANQAINPKLMQLVDHRGGGGGGGKGGRSRYRTTSSANNPNLMYQDECDRRLRGVKDGGRRDSASYRDRSETDRAGYANGSGYGSPNSAFGAQAGQYTYGQGTYGAAAYGTSSYTAQEYGAGTYGASSTTSTGRSSQSSSQQFSGIGRSGQQPQPLMSQQFAQPPGATNMIGYMGQTAYQYPPPPPPPPPSRK

SEQ ID NO: 4084 - protein, 729 aa, Homo sapiens; identical to SEQ ID NO: 4082

SEQ ID NO: 4085 - protein, 731 aa, Homo sapiens; identical to SEQ ID NO: 4083

SEQ ID NO: 4086 - protein, 56 aa, Homo sapiens
  VARIANT 1: note = misc_feature - Xaa can be any naturally occurring amino acid
XWPAMCIHGDKSQPERDWVLNEFRSGKAPILIATDVASRGLGSPALGNQMGLQRSI

SEQ ID NO: 4087 - protein, 138 aa, Homo sapiens
MAAAFEASGALAAVATAMPAEHVAVQVPAPEPTPGPVRILRTAQDLSSPRTRTGDVLLAEPADFESLLLSRPVLEGLRAAGFERPSPVQLKAIPLGRCGLDLIVQAKSGTGKTCVFSTIALDSLVLENLSTQAELSNS

SEQ ID NO: 4088 - protein, 824 aa, Homo sapiens
MAAAFEASGALAAVATAMPAEHVAVQVPAPEPTPGPVRILRTAQDLSSPRTRTGDVLLAEPADFESLLLSRPVLEGLRAAGFERPSPVQLKAIPLGRCGLDLIVQAKSGTGKTCVFSTIALDSLVLENLSTQILILAPTREIAVQIHSVITAIGIKMEGLECHVFIGGTPLSQDKTRLKKCHIAVGSPGRIKQLIELDYLNPGSIRLFILDEADKLLEEGSFQEQINWIYSSLPASKQMLAVSATYPEFLANALTKYMRDPTFVRLNSSDPSLIGLKQYYKVVNSYPLAHKVFEEKTQHLQELFSRIPFNQALVFSNLHSRAQHLADILSSKGFPAECISGNMNQNQRLDAMAKLKHFHCRVLISTDLTSRGIDAEKVNLVVNLDVPLDWETYMHRIGRAGRFGTLGLTVTYCCRGEEENMMMRIAQKCNINLLPLPDPIPSGLMEECVDWDVEVKAAVHTYGIASVPNQPLKKQIQKIERTLQIQKAHGDHMASSRNNSVSGLSVKSKNNTKQKLPVKSHSECGIIEKATSPKELGCDRQSEEQMKNSVQTPVENSTNSQHQVKEALPVSLPQIPCLSSFKIHQPYTLTFAELVEDYEHYIKEGLEKPVEIIRHYTGPGDQTVNPQNGFVRNKVIEQRVPVLASSSQSGDSESDSDSYSSRTSSQSKGNKSYLEGSSDNQLKDSESTPVDDRISLEQPPNGSDTPNPEKYQESPGIQMKTRLKEGASQRAKQSRRNLPRRSSFRLQTEAQEDDWYDCHREIRLSFSDTYQDYEEYWRAYYRAWQEYYAAASHSYYWNAQRHPSWMAAYHMNTIYLQEMMHSNQ

SEQ ID NO: 4089 - protein, 432 aa, Homo sapiens [sequence omitted]

SEQ ID NO: 4090 - protein, 191 aa, Homo sapiens
ASVRSGASDAGGEMREGFGRGPQRETPSPPPREFSNLSQPRKNLWGIKSTAVRNIDGSINNINEDDEEDVVDLAANSLLNKLIHQSLVESSHRVEVLQKDPSSPLYSVKTFEELRLKEELLKGIYAMGFNRPSKIQEMALPMMLAHPPQNLIAQSQSGTGKTAAFVLAMLSRVNALELFPQCLCLAPTYEL

SEQ ID NO: 4091 - protein, 468 aa, Homo sapiens
IAAMASLLWGGDAGAAESERLNSHFSNLSQPRKNLWGIKSTAVRNIDGSINNINEDDEEDVVDLAANSLLNKLIHQSLVESSHRVEVLQKDPSSPLYSVKTFEELRLKEELLKGIYAMGFNRPSKIQEMALPMMLAHPPQNLIAQSQSGTGKTAAFVLAMLSRVNALELFPQCLCLAPTYELALQTGRVVEQMGKFCVDVQVMYAIRGNRIPRGTDITKQIIIGTPGTVLDWCFKLKLIDLTKIRVFVLDEADVMIDTQGFSDHSIRIQRALPSECQMLLFSATFEDSVWHFAERIIPDPNVIKLRKEELTLNNIRQYYVLCEHRKDKYQALCNIYGSITIGQAIIFCQTRRNAKWLTVEMIQDGHQVSLLSGELTVEQRASIIQRFRDGKEKVLITTNVCARGIDVKQVTIVVNFDLPVKQGEEPDYETYLHRIGRTGRFGKKGLAFNMIEVDELPSLMKIQDHFSK

SEQ ID NO: 4092 - protein, 483 aa, Homo sapiens
MASLLWGGDAGAAESERLNSHFSNLSQPRKNLWGIKSTAVRNIDGSINNINEDDEEDVVDLAANSLLNKLIHQSLVESSHRVEVLQKDPSSPLYSVKTFEELRLKEELLKGIYAMGFNRPSKIQEMALPMMLAHPPQNLIAQSQSGTGKTAAFVLAMLSRVNALELFPQCLCLAPTYELALQTGRVVEQMGKFCVDVQVMYAIRGNRIPRGTDITKQIIIGTPGTVLDWCFKLKLIDLTKIRVFVLDEADVMIDTQGFSDHSIRIQRALPSECQMLLFSATFEDSVWHFAERIIPDPNVIKLRKEELTLNNIRQYYVLCEHRKDKYQALCNIYGSITIGQAIIFCQTRRNAKWLTVEMIQDGHQVSLLSGELTVEQRASIIQRFRDGKEKVLITTNVCARGIDVKQVTIVVNFDLPVKQGEEPDYETYLHRIGRTGRFGKKGLAFNMIEVDELPSLMKIQDHFNSSIKQLNAEDMDEIEKIDY

SEQ ID NO: 4093 - protein, 369 aa, Homo sapiens
MGFNRPSKIQEMALPMMLAHPPQNLIAQSQSGTGKTAAFVLAMLSRVNALELFPQCLCLAPTYELALQTGRVVEQMGKFCVDVQVMYAIRGNRIPRGTDITKQIIIGTPGTVLDWCFKLKLIDLTKIRVFVLDEADVMIDTQGFSDHSIRIQRALPSECQMLLFSATFEDSVWHFAERIIPDPNVIKLRKEELTLNNIRQYYVLCEHRKDKYQALCNIYGSITIGQAIIFCQTRRNAKWLTVEMIQDGHQVSLLSGELTVEQRASIIQRFRDGKEKVLITTNVCARGIDVKQVTIVVNFDLPVKQGEEPDYETYLHRIGRTGRFGKKGLAFNMIEVDELPSLMKIQDHFNSSIKQLNAEDMDEIEKIDY

SEQ ID NO: 4094 - protein, 197 aa, Homo sapiens
MGFNRPSKIQEMALPMMLAHPPQNLIAQSQSGTGKTAAFVLAMLSRVNALELFPQCLCLAPTYELALQTGRVVEQMGKFCVDVQVMYAIRGNRIPRGTDITKQIIIGTPGTVLDWCFKLKLIDLTKIRVFVLDEADVMIDTQGFSDHSIRIQRIIWLLVAKETTDNFQLPSLTLELYRDIMETPHSFLLLSQGTWRI

SEQ ID NO: 4095 - protein, 67 aa, Homo sapiens
  VARIANT 1: note = misc_feature - Xaa can be any naturally occurring amino acid
XGIDVKQVTIVVNFDLPVKQGEEPDYETYLHRIGRTGRFGKKGLAFNMIEVDELPSLMKIQDHFRKS

SEQ ID NO: 4096 - protein, 407 aa, Homo sapiens
  VARIANT 1: note = misc_feature - Xaa can be any naturally occurring amino acid
XLVDLAANSLLNKLIHQSLVESSHRVEVLQKDPSSPLYSVKTFEELRLKEELLKGIYAMGFNRPSKIQEMALPMMLAHPPQNLIAQSQSGTGKTAAFVLAMLSRVNALELFPQCLCLAPTYELALQTGRVVEQMGKFCVDVQVMYAIRGNRNWCFKLKLIDLTKIRVFVLDEADVMIDTQGFSDHSIRIQRALPSECQMLLFSATFEDSVWHFAERIIPDPNVIKLRKEELTLNNIRQYYVLCEHRKDKYQALCNIYGSITIGQAIIFCQTRRNAKWLTVEMIQDGHQVSLLSGELTVEQRASIIQRFRDGKEKVLITTNVCARGIDVKQVTIVVNFDLPVKQGEEPDYETYLHRIGRTGRFGKKGLAFNMIEVDELPSLMKIQDHFNSSIKQLNAEDMDEIEKIDY

SEQ ID NO: 4097 - protein, 540 aa, Homo sapiens
MALTRPVRLFSLVTRLLLAPRRGLTVRSPDEPLPVVRIPVALQRQLEQRQSRRRNLPRPVLVRPGPLLVSARRPELNQPARLTLGRWERAPLASQGWKSRRARRDHFSIERAQQEAPAVRKLSSKGSFADLGLEPRVLHALQEAAPEVVQPTTVQSSTIPSLLRGRHVVCAAETGSGKTLSYLLPLLQRLLGQPSLDSLPIPAPRGLVLVPSRELAQQVRAVAQPLGRSLGLLVRDLEGGHGMRRIRLQLSRQPSADVLVATPGALWKALKSRLISLEQLSFLVLDEADTLLDESFLELVDYILEKSHIAEGPADLEDPFNPKAQLVLVGATFPEGVGQLLNKVASPDAVTTITSSKLHCIMPHVKQTFLRLKGADKVAELVHILKHRDRAERTGPSGTVLVFCNSSSTVNWLGYILDDHKIQHLRLQGQMPALMRVGIFQSFQKSSRDILLCTDIASRGLDSTGVELVVNYDFPPTLQDYIHRAGRVGRVGSEVPGTVISFVTHPWDVSLVQKIELAARRRRSLPGLASSVKEPLPQAT

SEQ ID NO: 4098 - protein, 565 aa, Homo sapiens
MEDSDSAAKQLGLAEAAAVAAAAAVAAAAAAAAGGEAEEPVLSRDEDSEEDADSEAERETPRVTAVAVMAAEPGHMDMGAEALPGPDEAAAAAAFAEVTTVTVANVGAAADNVFTTSVANAASISGHVLSGRTALQIGDSLNTEKATLIVVHTDGSIVETTGLKGPAAPLTPGPQSPPTPLAPGQEKGGTKYNWDPSVYDSELPVRCRNISGTLYKNRLGSGGRGRCIKQGENWYSPTEFEAMAGRASSKDWKRSIRYAGRPLQCLIQDGILNPHAASCTCAACCDDMTLSGPVRLFVPYKRRKKENELPTTPVKKDSPKNITLLPATAATTFTVTPSGQITTSGALTFDRASTVEATAVISESPAQGDVFAGATVQEASVQPPCRASHPEPHYPGYQDSCQIAPFPEAALPTSHPKIVLTSLPALAVPPPTPTKAAPPALVNGLELSEPRSWLYLEEMVNSLLNTAQQLKTLFEQAKHASTYREAATNQAKIHADAERKEQSCVNCGREAMSECTGCHKVNYCSTFCQRKDWKDHQHICGQSAAVTVQADEVHVAESVMEKVTV

SEQ ID NO: 4099 - protein, 349 aa, Homo sapiens
  VARIANT 1: note = misc_feature - Xaa can be any naturally occurring amino acid
XLYKNRLGSGGRGRCIKQGENWYSPTEFEAMAGRASSKDWKRSIRYAGRPLQCLIQDGILNPHAASCTCAACCDDMTLSGPVRLFVPYKRRKKENELPTTPVKKDSPKNITLLPATAATTFTVTPSGQITTSGALTFDRASTVEATAVISESPAQGDVFAGATVQEASVQPPCRASHPEPHYPGYQDSCQIAPFPEAALPTSHPKIVLTSLPALAVPPPTPTKAAPPALVNGLELSEPRSWLYLEEMVNSLLNTAQQLKTLFEQAKHASTYREAATNQAKIHADAERKEQSCVNCGREAMSECTGCHKVNYCSTFCQRKRWSLTMLTSLVSISWLRAILPCQPPKVLGL

SEQ ID NO: 4100 - protein, 86 aa, Homo sapiens
  VARIANT 1: note = misc_feature - Xaa can be any naturally occurring amino acid
XPVLSRDEDSEEDADSEAERETPRVTAVAVMAAEPGHMDMGAEALPGPDEAAAAAAFAGKCARRPLASSGSRAPTPRACPAQLSQR

SEQ ID NO: 4101 - protein, 136 aa, Homo sapiens
MAILSLRAPGPWQAMQAHLNPFNKQSGPRQHEQGPGEEVPDVTPEEALPELPPGEPEFRCPERVMDLGLSEDHFSRPVGLFLASDVQQLRQAIEECKQVILELPEQSEKQKDAVVRLIHLRLKLQELKDPNEDEPN

SEQ ID NO: 4102 - protein, 512 aa, Homo sapiens
MAILSLRAPGPWQAMQVWADRTLLTPHTGVTSQVLGVAAAVMTPLPGGHAAGRTREARWDAMEYDEKLARFRQAHLNPFNKQSGPRQHEQGPGEEVPDVTPEEALPELPPGEPEFRCPERVMDLGLSEDHFSRPVGLFLASDVQQLRQAIEECKQVILELPEQSEKQKDAVVRLIHLRLKLQELKDPNEDEPNIRVLLEHRFYKEKSKSVKQTCDKCNTIIWGLIQTWYTCTGCYYRCHSKCLNLISKPCVSSKVSHQAEYELNICPETGLDSQDYRCAECRAPISLRGVPSEARQCDYTGQYYCSHCHWNDLAVIPARVVHNWDFEPRKVSRCSMRYLALMVSRPVLRLREINPLLFSYVEELVEIRKLRQDILLMKPYFITCREAMEARLLLQLQDRQHFVENDEMYSVQDLLDVHAGRLGCSLTEIHTLFAKHIKLDCERCQAKGFVCELCREGDVLFPFDSHTSVCADCSAVFHRDCYYDNSTTCPKCARLSLRKQSLFQEPGPDVEA

SEQ ID NO: 4103 - protein, 125 aa, Homo sapiens
MDLGLSEDHFSRPVGLFLASDVQQLRQAIEECKQVILELPEQSEKQKDAVVRLIHLRLKLQELKDPNEDEPNIRVLLEHRFYKEKSKSVKQTCDKCNTIIWGLIQTWYTCTGCYYRCHSKCLNLI

SEQ ID NO: 4104 - protein, 391 aa, Homo sapiens
MDLGLSEDHFSRPVGLFLASDVQQLRQAIEECKQVILELPEQSEKQKDAVVRLIHLRLKLQELKDPNEDEPNIRVLLEHRFYKEKSKSVKQTCDKCNTIIWGLIQTWYTCTGCYYRCHSKCLNLISKPCVSSKVSHQAEYELNICPETGLDSQDYRCAECRAPISLRGVPSEARQCDYTGQYYCSHCHWNDLAVIPARVVHNWDFEPRKVSRCSMRYLALMVSRPVLRLREINPLLFSYVEELVEIRKLRQDILLMKPYFITCREAMEARLLLQLQDRQHFVENDEMYSVQDLLDVHAGRLGCSLTEIHTLFAKHIKLDCERCQAKGFVCELCREGDVLFPFDSHTSVCADCSAVFHRDCYYDNSTTCPKCARLSLRKQSLFQEPGPDVEA

SEQ ID NO: 4105 - protein, 66 aa, Homo sapiens
MEYDEKLARFRQAHLNPFNKQSGPRQHEQGPGEEVPDVTPEEALPELPPGEPEFRCPERVMDLGLS

SEQ ID NO: 4106 - protein, 107 aa, Homo sapiens
MEYDEKLARFRQAHLNPFNKQSGPRQHEQGPGEEVPDVTPEEALPELPPGEPEFRCPERVMDLGLSEDHFSRPVDGPLTAPAPNLGRVCSWPLTSSSCGRRSRSASR

SEQ ID NO: 4107 - protein, 106 aa, Homo sapiens
MEYDEKLARFRQAHLNPFNKQSGPRQHEQGPGEEVPDVTPEEALPELPPGEPEFRCPERVMDLGLSEDHFSRPVGLFLASDVQQLRQAIEECKQVILELPEQSEKQ

SEQ ID NO: 4108 - protein, 134 aa, Homo sapiens
MEYDEKLARFRQAHLNPFNKQSGPRQHEQGPGEEVPDVTPEEALPELPPGEPEFRCPERVMDLGLSEDHFSRPVGLFLASDVQQLRQAIEECKQVILELPEQSEKQKDAVVRLIHLRLKLQELKDPNEDEPNIR

SEQ ID NO: 4109 - protein, 150 aa, Homo sapiens
MEYDEKLARFRQAHLNPFNKQSGPRQHEQGPGEEVPDVTPEEALPELPPGEPEFRCPERVMDLGLSEDHFSRPVGLFLASDVQQLRQAIEECKQVILELPEQSEKQKDAVVRLIHLRLKLQELKDPNEDEPNIRVLLEHRFYKEKSKSVK

SEQ ID NO: 4110 - protein, 451 aa, Homo sapiens
MEYDEKLARFRQAHLNPFNKQSGPRQHEQGPGEEVPDVTPEEALPELPPGEPEFRCPERVMDLGLSEDHFSRPVGLFLASDVQQLRQAIEECKQVILELPEQSEKQKDAVVRLIHLRLKLQELKDPNEDEPNIRVLLEHRFYKEKSKSVKQTCDKCNTIIWGLIQTWYTCTGCYYRCHSKCLNLISKPCVSSKVSHQAEYELNICPETGLDSQDYRCAECRAPISLRGVPSEARQCDYTGQYYCSHCHWNDLAVIPARVVHNWDFEPRKVSRCSMRYLALMVSRPVLRLREINPLLFSYVEELVEIRKLRQDILLMKPYFITCREAMEARLLLQLQDRQHFVENDEMYSVQDLLDVHAGRLGCSLTEIHTLFAKHIKLDCERCQAKGFVCELCREGDVLFPFDSHTSVCADCSAVFHRDCYYDNSTTCPKCARLSLRKQSLFQEPGPDVEA

SEQ ID NO: 4111 - protein, 451 aa, Homo sapiens; identical to SEQ ID NO: 4110

SEQ ID NO: 4112 - protein, 434 aa, Homo sapiens
MEYDEKLARFRQAHLNPFNKQSGPRQHEQGPGEEVPDVTPEEALPELPPGEPEFRCPERVMDLGLSEDHFSRPVGLFLASDVQQLRQAIEECKQVILELPEQSEKQKDAVVRLIHLRLKLQELKDPNEDEPNIRVLLEHRFYKEKSKSVKQTCDKCNTIIWGLIQTWYTCTGCYYRCHSKCLNLISKPCVSSKVSHQAEYELNICPETGLDSQDYRCAECRAPISLRGVPSEARQCDYTGQYYCSHCHWNDLAVIPARVVHNWDFEPRKVSRCSMRYLALMVSRPVLRLREINPLLFSYVEELVEIRKLRQDILLMKPYFITCREAMEARLLLQDLLDVHAGRLGCSLTEIHTLFAKHIKLDCERCQAKGFVCELCREGDVLFPFDSHTSVCADCSAVFHRDCYYDNSTTCPKCARLSLRKQSLFQEPGPDVEA

SEQ ID NO: 4113 - protein, 451 aa, Homo sapiens; identical to SEQ ID NO: 4110

SEQ ID NO: 4114 - protein, 197 aa, Homo sapiens
MEYDEKLARFRQAHLNPFNKQSGPRQHEQGPGEEVPDVTPEEALPELPPGEPEFRCPERVMDLGLSEDHFSRPVGLFLASDVQQLRQAIEECKQVILELPEQSEKQKDAVVRLIHLRLKLQELKDPNEDEPNIRVLLEHRFYKEKSKSVKQTCDKCNTIIWGLIQTWYTCTGGPRPRRGVRNERDQSSCLRWAHIQM

SEQ ID NO: 4115 - protein, 197 aa, Homo sapiens; identical to SEQ ID NO: 4114

SEQ ID NO: 4116 - protein, 176 aa, Homo sapiens
MEYDEKLARFRQAHLNPFNKQSGPRQHEQGPGEEVPDVTPEEALPELPPGEPEFRCPERVMDLGLSEDHFSRPVGLFLASDVQQLRQAIEECKQVILELPEQSEKQKDAVVRLIHLRLKLQELKRCQAKGFVCELCREGDVLFPFDSHTSVCADCSAVFHRDCYYDNSTTCPKCAR

SEQ ID NO: 4117 - protein, 441 aa, Homo sapiens
MEYDEKLARFRQAHLNPFNKQSGPRQHEQGPGEEVPDVTPEEALPELPPGEPEFRCPERVMDLGLSEDHFSRPVLRQAIEECKQVILELPEQSEKQKDAVVRLIHLRLKLQELKDPNEDEPNIRVLLEHRFYKEKSKSVKQTCDKCNTIIWGLIQTWYTCTGCYYRCHSKCLNLISKPCVSSKVSHQAEYELNICPETGLDSQDYRCAECRAPISLRGVPSEARQCDYTGQYYCSHCHWNDLAVIPARVVHNWDFEPRKVSRCSMRYLALMVSRPVLRLREINPLLFSYVEELVEIRKLRQDILLMKPYFITCREAMEARLLLQLQDRQHFVENDEMYSVQDLLDVHAGRLGCSLTEIHTLFAKHIKLDCERCQAKGFVCELCREGDVLFPFDSHTSVCADCSAVFHRDCYYDNSTTCPKCARLSLRKQSLFQEPGPDVEA

SEQ ID NO: 4118 - protein, 127 aa, Homo sapiens
MEYDEKLARFRQAHLNPFNKQSGPRQHEQGPGEEVPDVTPEEALPELPPGEPEFRCPERVMDLGLSEDHFSRPVQLRQAIEECKQVILELPEQSEKQKDAVVRLIHLRLKLQELKDPNEDEPNIRVL

SEQ ID NO: 4119 - protein, 177 aa, Homo sapiens
MRGGGQAHLNPFNKQSGPRQHEQGPGEEVPDVTPEEALPELPPGEPEFRCPERVMDLGLSEDHFSRPVGLFLASDVQQLRQAIEECKQVILELPEQSEKQKDAVVRLIHLRLKLQELKDPNEDEPNIRVLLEHRFYKEKSKSVKQTCDKCNTIIWGLIQTWYTCTGCYYRCHSKCLN

SEQ ID NO: 4120 - protein, 186 aa, Homo sapiens
MRGGGQVLGVAAAVMTPLPGGHAAGRTREARWDAMEYDEKLARFRQAHLNPFNKQSGPRQHEQGPGEEVPDVTPEEALPELPPGEPEFRCPERVMDLGLSEDHFSRPVGLFLASDVQQLRQAIEECKQVILELPEQSEKQKDAVVRLIHLRLKLQELKDPNEDEPNIRVLLEHRFYKEKSKSVKQT

SEQ ID NO: 4121 - protein, 94 aa, Homo sapiens
MRTLAILAAILLVALQAQAEPLQARADEVAAAPEQIAADIPEVVVSLAWDESLAPKHPGSRKNMACYCRIPACIAGERRYGTCIYQGRLWAFCC

SEQ ID NO: 4122 - protein, 94 aa, Homo sapiens; identical to SEQ ID NO: 4121

SEQ ID NO: 4123 - protein, 94 aa, Homo sapiens; identical to SEQ ID NO: 4121

SEQ ID NO: 4124 - protein, 94 aa, Homo sapiens
MRTLAILAAILLVALQAQAEPLQARADEVAAAPEQIAADIPEVVVSLAWDESLAPKHPGSRKNMDCYCRIPACIAGERRYGTCIYQGRLWAFCC

SEQ ID NO: 4125 - protein, 97 aa, Homo sapiens
MRIIALLAAILLVALQVRAGPLQARGDEAPGQEQRGPEDQDISISFAWDKSSALQVSGSTRGMVCSCRLVFCRRTELRVGNCLIGGVSFTYCCTRVD

SEQ ID NO: 4126 - protein, 94 aa, Homo sapiens
MRTIAILAAILLVALQAQAESLQERADEATTQKQSGEDNQDLAISFAGNGLSALRTSGSQARATCYCRTGRCATRESLSGVCEISGRLYRLCCR

SEQ ID NO: 4127 - protein, 100 aa, Homo sapiens
MRTLTILTAVLLVALQAKAEPLQAEDDPLQAKAYEADAQEQRGANDQDFAVSFAEDASSSLRALGSTRAFTCHCRRSCYSTEYSYGTCTVMGINHRFCCL

SEQ ID NO: 4128 - protein, 68 aa, Homo sapiens
MRTSYLLLFTLCLLLSEMASGGNFLTGLGHRSDHYNCVSSGGQCLYSACPIFTKIQGTCYRGKAKCCK

SEQ ID NO: 4129 - protein, 67 aa, Homo sapiens
MRIHYLLFALLFLFLVPVPGHGGIINTLQKYYCRVRGGRCAVLSCLPKEEQIGKCSTRGRKCCRRKK

SEQ ID NO: 4130 - protein, 67 aa, Homo sapiens; identical to SEQ ID NO: 4129

SEQ ID NO: 4131 - protein, 72 aa, Homo sapiens
MQRLVLLLAISLLLYQDLPVRSEFELDRICGYGTARCRKKCRSQEYRIGRCPNTYACCLRKWDESLLNRTKP

SEQ ID NO: 4132 - protein, 72 aa, Homo sapiens; identical to SEQ ID NO: 4131

SEQ ID NO: 4133 - protein, 78 aa, Homo sapiens
MALIRKTFYFLFAMFFILVQLPSGCQAGLDFSQPFPSGEFAVCESCKLGRGKCRKECLENEKPDGNCRLNFLCCRQRI

SEQ ID NO: 4134 - protein, 78 aa, Homo sapiens; identical to SEQ ID NO: 4133

SEQ ID NO: 4135 - protein, 65 aa, Homo sapiens
MRTFLFLFAVLFFLTPAKNAFFDEKCNKLKGTCKNNCGKNEELIALCQKSLKCCRTIQPCGSIID

SEQ ID NO: 4136 - protein, 65 aa, Homo sapiens; identical to SEQ ID NO: 4135

SEQ ID NO: 4137 - protein, 70 aa, Homo sapiens
MPGAMKIFVFILAALILLAQIFQARTAIHRALISKRMEGHCEAECLTFEVKIGGCRAELAPFCCKNRKKH

SEQ ID NO: 4138 - protein, 70 aa, Homo sapiens; identical to SEQ ID NO: 4137

SEQ ID NO: 4139 - protein, 73 aa, Homo sapiens
MRIAVLLFAIFFFMSQVLPARGKFKEICERPNGSCRDFCLETEIHVGRCLNSQPCCLPLGHQPRIESTTPKKD

SEQ ID NO: 4140 - protein, 67 aa, Homo sapiens
MKIQLFFFILHFWVTILPAKKKYPEYGSLDLRRECRIGNGQCKNQCHENEIRIAYCIRPGTHCCLQQ

SEQ ID NO: 4141 - protein, 62 aa, Homo sapiens
MKIQLFFFILHFWVTILPARSNFEPKYRFERCEKVRGICKTFCDDVEYDYGYCIKWRSQCCV

SEQ ID NO: 4142 - protein, 82 aa, Homo sapiens
MKILCIFLTFVFTVSCGPSVPQKKTREVAERKRECQLVRGACKPECNSWEYVYYYCNVNPCCAVWEYQKPIINKITSKLHQK

SEQ ID NO: 4143 - protein, 69 aa, Homo sapiens
MRIFYYLHFLCYVTFILPATCTLVNADRCTKRYGRCKRDCLESEKQIDICSLPRKICCTEKLYEEDDMF

SEQ ID NO: 4144 - protein, 88 aa, Homo sapiens
MLPDHFSPLSGDIKLSVLALVVLVVLAQTAPDGWIRRCYYGTGRCRKSCKEIERKKEKCGEKHICCVPKEKDKLSHIHDQKETSELYI

SEQ ID NO: 4145 - protein, 102 aa, Homo sapiens
MSVMKPCLMTIAILMILAQKTPGGLFRSHNGKSREPWNPCELYQGMCRNACREYEIQYLTCPNDQKCCLKLSVKITSSKNVKEDYDSNSNLSVTNSSSYSHI

SEQ ID NO: 4146 - protein, 123 aa, Homo sapiens
MKLLLLALPMLVLLPQVIPAYSGEKKCWNRSGHCRKQCKDGEAVKDTCKNLRACCIPSNEDHRRVPATSPTPLSDSTPGIIDDILTVRFTTDYFEVSSKKDMVEESEAGRGTETSLPNVHHSS

SEQ ID NO: 4147 - protein, 43 aa, Homo sapiens
MKLLYLFLAILLAIEEPVISALVRTVGCCLDTARQTPHPSMHG

SEQ ID NO: 4148 - protein, 84 aa, Homo sapiens
MKLLYLFLAILLAIEEPVISGKRHILRCMGNSGICRASCKKNEQPYLYCRNCQSCCLQSYMRISISGKEENTDWSYEKQWPRLP

SEQ ID NO: 4149 - protein, 88 aa, Homo sapiens
MKLLYLFLAILLAIEEPVISVECWMDGHCRLLCKDGEDSIIRCRNRKRCCVPSRYLTIQPVTIHGILGWTTPQMSTTAPKMKTNITNR

SEQ ID NO: 4150 - protein, 76 aa, Homo sapiens
MKLLLLLLTVTLLLAQVTPVMKCWGKSGRCRTTCKESEVYYILCKTEAKCCVDPKYVPVKPKLTDTNTSLESTSAV

SEQ ID NO: 4151 - protein, 67 aa, Homo sapiens
MKLLLLTLTVLLLLSQLTPGGTQRCWNLYGKCRYRCSKKERVYVYCINNKMCCVKPKYQPKERWWPF

SEQ ID NO: 4152 - protein, 71 aa, Homo sapiens
MTQLLLFLVALLVLGHVPSGRSEFKRCWKGQGACQTYCTRQETYMHLCPDASLCCLSYALKPPPVPKHEYE

SEQ ID NO: 4153 - protein, 156 aa, Homo sapiens
MNILMLTFIICGLLTRVTKGSFEPQKCWKNNVGHCRRRCLDTERYILLCRNKLSCCISIISHEYTRRPAFPVIHLEDITLDYSDVDSFTGSPVSMLNDLITFDTTKFGETMTPETNTPETTMPPSEATTPETTMPPSETATSETMPPPSQTALTHN

SEQ ID NO: 4154 - protein, 111 aa, Homo sapiens
MKSLLFTLAVFMLLAQLVSGNWYVKKCLNDVGICKKKCKPEEMHVKNGWAMCGKQRDCCVPADRRANYPVFCVQTKTTRISTVTATTATTTLMMTTASMSSMAPTPVSPTG

SEQ ID NO: 4155 - protein, 99 aa, Homo sapiens
MGLFMIIAILLFQKPTVTEQLKKCWNNYVQGHCRKICRVNEVPEALCENGRYCCLNIKELEACKKITKPPRPKPATLALTLQDYVTIIENFPSLKTQST

SEQ ID NO: 4156 - protein, 93 aa, Homo sapiens
MKLFLVLIILLFEVLTDGARLKKCFNKVTGYCRKKCKVGERYEIGCLSGKLCCANDEEEKKHVSFKKPHQHSGEKLSVLQDYIILPTITIFTV

SEQ ID NO: 4157 - protein, 183 aa, Homo sapiens
MKLLFPIFASLMLQYQVNTEFIGLRRCLMGLGRCRDHCNVDEKEIQKCKMKKCCVGPKVVKLIKNYLQYGTPNVLNEDVQEMLKPAKNSSAVIQRKHILSVLPQIKSTSFFANTNFVIIPNATPMNSATISTMTPGQITYTATSTKSNTKESRDSATASPPPAPPPPNILPTPSLELEEAEEQ

SEQ ID NO: 4158 - protein, 79 aa, Homo sapiens
MKLHSLISVLLLFVTLIPKGKTGVIPGQKQCIALKGVCRDKLCSTLDDTIGICNEGKKCCRRWWILEPYPTPVPKGKSP

SEQ ID NO: 4159 - protein, 79 aa, Homo sapiens; identical to SEQ ID NO: 4158

SEQ ID NO: 4160 - protein, 70 aa, Homo sapiens
MRVLFFVFGVLSLMFTVPPARSFISNDECPSEYYHCRLKCNADEHAIRYCADFSICCKLKIIEIDGQKKW

SEQ ID NO: 4161 - protein, 70 aa, Homo sapiens
MRVLFFVFGVLSLMSTVPPTRSFTSNDECPSEYYHCRLKCNADEHAIRYCADFSICCKLKIIQIDGQKKW

SEQ ID NO: 4162 - protein, 95 aa, Homo sapiens
MKFLLLVLAALGFLTQVIPASAGGSKCVSNTPGYCRTCCHWGETALFMCNASRKCCISYSFLPKPDLPQLIGNHWQSRRRNTQRKDKKQQTTVTS

SEQ ID NO: 4163 - protein, 61 aa, Homo sapiens
MKIHVFLFVLFFFLVPIATRVKCAVKDTYSCFIMRGKCRHECHDFEKPIGFCTKLNANCYM

SEQ ID NO: 4164 - protein, 66 aa, Homo sapiens
MKPLLVVFVFLFLWDPVLAGINSLSSEMHKKCYKNGICRLECYESEMLVAYCMFQLECCVKGNPAP

SEQ ID NO: 4165 - protein, 66 aa, Homo sapiens; identical to SEQ ID NO: 4164

SEQ ID NO: 4166 - protein, 77 aa, Homo sapiens
MATRSVLLALVVLNLLFYVPPGRSGPNVYIQKIFASCWRLQGTCRPKCLKNEQYRILCDTIHLCCVNPKYLPILTGK

SEQ ID NO: 4167 - protein, 78 aa, Homo sapiens
MNLCLSALLFFLVILLPSGKGMFGNDGVKVRTCTSQKAVCFFGCPPGYRWIAFCHNILSCCKNMTRFQPPQAKDPWVH

SEQ ID NO: 4168 - protein, 64 aa, Homo sapiens
MRVLYLLFSFLFIFLMPLPGVFGGIGDPVTCLKSGAICHPVFCPRRYKQIGTCGLPGTKCCKKP

SEQ ID NO: 4169 - protein, 64 aa, Homo sapiens; identical to SEQ ID NO: 4168

SEQ ID NO: 4170 - protein, 84 aa, Homo sapiens
MRSRLLLSVAHLPTIRETTEEMLLGGPGQEPPPSPSLDDYVRSISRLAQPTSVLDKATAQGQPRPPHRPAQACRKGRPAVSLRD

SEQ ID NO: 4171 - protein, 212 aa, Homo sapiens
MRSRLLLSVAHLPTIRETTEEMLLGGPGQEPPPSPSLDDYVRSISRLAQPTSVLDKATAQGQPRPPHRPAQACRKGRPAVSLRDITARFSGQQPTLPMADTVDPLDWLFGESQEKQPSQRDLPRRTGPSAGLWGPHRQMDSSKPMGAPRGRLCEARMPGHSLARPPQDGQQSSDLRSWTFGQSAQAMASRHRPRPSSVLRTLYSHLPVIHEL

SEQ ID NO: 4172 - protein, 326 aa, Homo sapiens
MSENDNVFCAQLQCFHFPTLRHHDLHSWHAESCYEKSSFLCKRSQTCVDIKDNVVDEGFYFTPKGDDPCLSCTCHGGEPEMCVAALCERPQGCQQYRKDPKECCKFMCLDPDGNSLFDSMASGMRLVVSCISSFLILSLLLFMVHRLRQRRRERIESLIGANLHHFNLGRRIPGFDYGPDGFGTGLTPLHLSDDGEGGTFHFHDPPPPYTAYKYPDIGQPDDPPPPYEASIHPDSVFYDPADDDAFEPVEVSLPAPGDGGSEGALLRRLEQPLPTAGASLADLEDSADSSSALLVPPDPAQSGSTPAAEALPGGGRHSRSSLNTVV

SEQ ID NO: 4173 - protein, 550 aa, Homo sapiens
MVPKADSGAFLLLFLLVLTVTEPLRPELRCNPGQFACRSGTIQCIPLPWQCDGWATCEDESDEANCPEVTGEVRPHHGKEAVDPRQGRARGGDPSHFHAVNVAQPVRFSSFLGKCPTGWHHYEGTASCYRVYLSGENYWDAAQTCQRLNGSLATFSTDQELRFVLAQEWDQPERSFGWKDQRKLWVGYQYVITGRNRSLEGRWEVAFKGSSEVFLPPDPIFASAMSENDNVFCAQLQCFHFPTLRHHDLHSWHAESCYEKSSFLCKRSQTCVDIKDNVVDEGFYFTPKGDDPCLSCTCHGGEPEMCVAALCERPQGCQQYRKDPKECCKFMCLDPDGNSLFDSMASGMRLVVSCISSFLILSLLLFMVHRLRQRRRERIESLIGANLHHFNLGRRIPGFDYGPDGFGTGLTPLHLSDDGEGGTFHFHDPPPPYTAYKYPDIGQPDDPPPPYEASIHPDSVFYDPADDDAFEPVEVSLPAPGDGGSEGALLRRLEQPLPTAGASLADLEDSADSSSALLVPPDPAQSGSTPAAEALPGGGRHSRSSLNTVV

SEQ ID NO: 4174 - protein, 550 aa, Homo sapiens [sequence omitted]

SEQ ID NO: 4175 - protein, 509 aa, Homo sapiens
MVPKADSGAFLLLFLLVLTVTEPLRPEVTGEVRPHHGKEAVDPRQGRARGGDPSHFHAVNVAQPVRFSSFLGKCPTGWHHYEGTASCYRVYLSGENYWDAAQTCQRLNGSLATFSTDQELRFVLAQEWDQPERSFGWKDQRKLWVGYQYVITGRNRSLEGRWEVAFKGSSEVFLPPDPIFASAMSENDNVFCAQLQCFHFPTLRHHDLHSWHAESCYEKSSFLCKRSQTCVDIKDNVVDEGFYFTPKGDDPCLSCTCHGGEPEMCVAALCERPQGCQQYRKDPKECCKFMCLDPDGNSLFDSMASGMRLVVSCISSFLILSLLLFMVHRLRQRRRERIESLIGANLHHFNLGRRIPGFDYGPDGFGTGLTPLHLSDDGEGGTFHFHDPPPPYTAYKYPDIGQPDDPPPPYEASIHPDSVFYDPADDDAFEPVEVSLPAPGDGGSEGALLRRLEQPLPTAGASLADLEDSADSSSALLVPPDPAQSGSTPAAEALPGGGRHSRSSLNTVV

SEQ ID NO: 4176 - protein, 396 aa, Homo sapiens
MALLTNLLPLCCLALLALPAQSCGPGRGPVGRRRYARKQLVPLLYKQFVPGVPERTLGASGPAEGRVARGSERFRDLVPNYNPDIIFKDEENSGADRLMTERCKERVNALAIAVMNMWPGVRLRVTEGWDEDGHHAQDSLHYEGRALDITTSDRDRNKYGLLARLAVEAGFDWVYYESRNHVHVSVKADNSLAVRAGGCFPGNATVRLWSGERKGLRELHRGDWVLAADASGRVVPTPVLLFLDRDLQRRASFVAVETEWPPRKLLLTPWHLVFAARGPAPAPGDFAPVFARRLRAGDSVLAPGGDALRPARVARVAREEAVGVFAPLTAHGTLLVNDVLASCYAVLESHQWAHRAFAPLRLLHALGALLPGGAVQPTGMHWYSRLLYRLAEELLG

SEQ ID NO: 4177 - protein, 155 aa, Homo sapiens
MHKAGLLGLCARAWNSVRMASSGMTRRDPLANKVALVTASTDGIGFAIARRLAQDGAHVVVSSRKQQNVDQAVATLQGEGLSVTGTVCHVGKAEDRERLVATAVKLHGGIDILVSNAAVNPFFGSIMDVTEEVWDKLWMDKEKEESMKETLRIRR

SEQ ID NO: 4178 - protein, 192 aa, Homo sapiens
MHKAGLLGLCARAWNSVRMASSGMTRRDPLANKVALVTASTDGIGFAIARRLAQDGAHVVVSSRKQQNVDQAVATLQGEGLSVTGTVCHVGKAEDRERLVATAVKLHGGIDILVSNAAVNPFFGSIMDVTEEVWDKLWMDKEKEESMKETLRIRRLGEPEDCAGIVSFLCSEDASYITGETVVVGGGTPSRL

SEQ ID NO: 4179 - protein, 188 aa, Homo sapiens
MHKAGLLGLCARAWNSVRMASSGMTRRDPLANKVALVTASTDGIGFAIARRLAQDGAHVVVSSRKQQNVDQAVATLQGEGLSVTGTVCHVGKAEDRERLVATAVKLHGGIDILVSNAAVNPFFGSIMDVTEEVWDKRRLSGDRVFHSSLQSISSLDGQGKRGKHERNPADKKVRRARGLCWHRVFPVL

SEQ ID NO: 4180 - protein, 278 aa, Homo sapiens
MHKAGLLGLCARAWNSVRMASSGMTRRDPLANKVALVTASTDGIGFAIARRLAQDGAHVVVSSRKQQNVDQAVATLQGEGLSVTGTVCHVGKAEDRERLVATAVKLHGGIDILVSNAAVNPFFGSIMDVTEEVWDKTLDINVKAPALMTKAVVPEMEKRGGGSVVIVSSIAAFSPSPGFSPYNVSKTALLGLTKTLAIELAPRNIRVNCLAPGLIKTSFSRMLWMDKEKEESMKETLRIRRLGEPEDCAGIVSFLCSEDASYITGETVVVGGGTPSRL

SEQ ID NO: 4181 - protein, 158 aa, Homo sapiens
MHKAGLLGLCARAWNSVRMASSGMTRRDPLANKVALVTASTDGIGFAIARRLAQDGAHVVVSSRKQQNVDQAVATLQGEGLSVTGTVCHVGKAEDRERLVATLWMDKEKEESMKETLRIRRLGEPEDCAGIVSFLCSEDASYITGETVVVGGGTPSRL

SEQ ID NO: 4182 - protein, 244 aa, Homo sapiens
MHKAGLLGLCARAWNSVRMASSGMTRRDPLANKVALVTASTDGIGFAIARRLAQDGAHVVVSSRKQQNVDQAVATLQGEGLSVTGTVCHVGKAEDRERLVATTLDINVKAPALMTKAVVPEMEKRGGGSVVIVSSIAAFSPSPGFSPYNVSKTALLGLTKTLAIELAPRNIRVNCLAPGLIKTSFSRMLWMDKEKEESMKETLRIRRLGEPEDCAGIVSFLCSEDASYITGETVVVGGGTPSRL

SEQ ID NO: 4183 - protein, 199 aa, Homo sapiens
MHKAGLLGLCARAWNSVRMASSGMTRRDPLANKVALVTASTDGIGFAIARRLAQDGAHVVVSSRKQQNVDQAVATLQGEGLSVTGTVCHVGKAEDRERLVATTLDINVKAPALMTKAVVPEMEKRGGGSVVIVSSIAAFSPSPLWMDKEKEESMKETLRIRRLGEPEDCAGIVSFLCSEDASYITGETVVVGGGTPSRL

SEQ ID NO: 4184 - protein, 61 aa, Homo sapiens
RNIRVNCLAPGLIKTSFSRMLWMDKEKEESMKETLRIRRPRIHKHYHYSDLSKKSASLSKG

SEQ ID NO: 4185 - protein, 90 aa, Homo sapiens
MAVKLHGGIDILVSNAAVNPFFGSLMDVTEEVWDKGFSPYNVSKTALLGLNNTLAIELAPRNIRVNCLHLDLSRLASAGCSGWTRKKRKA

SEQ ID NO: 4186 - protein, 131 aa, Homo sapiens
MAVKLHGGIDILVSNAAVNPFFGSLMDVTEEVWDKTLDINVKAPALMTKAVVPEMEKRGGGSVVIVSSIAAFSPSPGFSPYNVSKTALLGLNNTLAIELAPRNIRVNCLHLDLSRLASAGCSGWTRKKRKA

SEQ ID NO: 4187 - protein, 49 aa, Homo sapiens
MDVTEEVWDKTLDINVKAPALMTKAVVPEMEKRGGGSVVIVSSIAAFSP

SEQ ID NO: 4188 - protein, 215 aa, Homo sapiens
MPFPCLSLPSSWDYRIGFAIARRLAQDRAHVVVSSRKQQNVDQAVATLQGEGLSVTGTVCHVGKAEDRERLVAMTLDINVKAPALMTKAVVPEMEKRGGGSVVIVSSIAAFSPSPGFSPYNVSKTALLGLNNTLAIELAPRNIRVNCLPGLIKTSFSRMLWMDKEKEESMKETLRIRRLGEPEDCAGIVSFLCSEDASYITGETVVVGGGTPSRL

SEQ ID NO: 4189 - protein, 192 aa, Homo sapiens
MQMARLLGLCAWARKSVRMASSRMTRRDPLTNKVALVTASTDGIGFAIARRLAQDRAHVVVSSRKQQNVDQAVATLQGEGLSVTGTVCHVGKAEDRERLVAMAVKLHGGIDILVSNAAVNPFFGSLMDVTEEVWDKLWMDKEKEESMKETLRIRRLGEPEDCAGIVSFLCSEDASYITGETVVVGGGTPSRL

SEQ ID NO: 4190 - protein, 232 aa, Homo sapiens
MQMARLLGLCAWARKSVRMASSRMTRRDPLTNKVALVTASTDGIGFAIARRLAQDRAHVVVSSRKQQNVDQAVATLQGEGLSVTGTVCHVGKAEDRERLVAMAVKLHGGIDILVSNAAVNPFFGSLMDVTEEVWDKTLDINVKAPALMTKAVVPEMEKRGGGSVVIVSSIAAFSPSPGFSPYNVSKTALLGLNNTLAIELAPRNIRVNCLHLDLSRLASAGCSGWTRKKRKA

SEQ ID NO: 4191 - protein, 242 aa, Homo sapiens
MQMARLLGLCAWARKSVRMASSRMTRRDPLTNKVALVTASTDGIGFAIARRLAQDRAHVVVSSRKQQNVDQAVATLQGEGLSVTGTVCHVGKAEDRERLVAMAVKLHGGIDILVSNAAVNPFFGSLMDVTEEVWDKTLDINVKAPALMTKAVVPEMEKRGGGSVVIVSSIAAFSPSPGFSPYNVSKTALLGLNNTLAIELAPRNIRVNCLHLDLSRLASAGWLGEPEDCAGIVSFLCSEDAS

SEQ ID NO: 4192 - protein, 157 aa, Homo sapiens
MQMARLLGLCAWARKSVRMASSRMTRRDPLTNKVALVTASTDGIGFAIARRLAQDRAHVVVSSRKQQNVDQAVATLQGEGLSVTGTVCHVGKAEDRERLVAMGFSPYNVSKTALLGLNNTLAIELAPRNIRVNCLHLDLSRLASAGCSGWTRKKRKA

SEQ ID NO: 4193 - protein, 157 aa, Homo sapiens; identical to SEQ ID NO: 4192

SEQ ID NO: 4194 - protein, 109 aa, Homo sapiens
  VARIANT 1: note = misc_feature - Xaa can be any naturally occurring amino acid
XSLMDVTEEVWDKTLDINVKAPALMTKAVVPEMEKRGGGSVVIVSSIAAFSPSPGFSPYNVSKTALLGLNNTLAIELAPRNIRVNCLHLDLSRLASAGCSGWTRKKRKA

SEQ ID NO: 4195 - protein, 61 aa, Homo sapiens
MNWELLLWLLVLCALLLLLVQLLRFLRADGDLTLLWAEWQGRRPEWELTDMVVWVTGASSG

SEQ ID NO: 4196 - protein, 339 aa, Homo sapiens
MNWELLLWLLVLCALLLLLVQLLRFLRADGDLTLLWAEWQGRRPEWELTDMVVWVTGASSGIGEELAYQLSKLGVSLVLSARRVHELERVKRRCLENGNLKEKDILVLPLDLTDTGSHEAATKAVLQEFGRIDILVNNGGMSQRSLCMDTSLDVYRKLIELNYLGTVSLTKCVLPHMIERKQGKIVTVNSILGIISVPLSIGYCASKHALRGFFNGLRTELATYPGIIVSNICPGPVQSNIVENSLAGEVTKTIGNNGDQSHKMTTSRCVRLMLISMANDLKEVWISEQPFLLVTYLWQYMPTWAWWITNKMGKKRIENFKSGVDADSSYFKIFKTKHD

SEQ ID NO: 4197 - protein, 339 aa, Homo sapiens; identical to SEQ ID NO: 4196

SEQ ID NO: 4198 - protein, 376 aa, Homo sapiens
MNWELLLWLLVLCALLLLLVQLLRFLRADGDLTLLWAEWQGRRPEWELTDMVVWVTGASSGIGEELAYQLSKLGVSLVLSARRVHELERVKRRCLENGNLKEKDILVLPLDLTDTGSHEAATKAVLQEFGRIDILVNNGGMSQRSLCMDTSLDVYRKLIELNYLGTVSLTKCVLPHMIERKQGKIVTVNSILGIISVPLSIGYCASKHALRGFFNGLRTELATYPGIIVSNICPGPVQSNIVENSLAGEVTKTIGNNGDQSHKMTTSRCVRLMLISMANDLKEVWISEQPFLLVTYLWQYMPTWAWWITTRWGRKGLRTLRVVWMQTLLILKSLRQNMTEKSTCTFQATGGRNGKHENSNLLMLLNNQRLICDFTF

SEQ ID NO: 4199 - protein, 289 aa, Homo sapiens
MVVWVTGASSGIGEELAYQLSKLGVSLVLSARRVHELERVKRRCLENGNLKEKDILVLPLDLTDTGSHEAATKAVLQEFGRIDILVNNGGMSQRSLCMDTSLDVYRKLIELNYLGTVSLTKCVLPHMIERKQGKIVTVNSILGIISVPLSIGYCASKHALRGFFNGLRTELATYPGIIVSNICPGPVQSNIVENSLAGEVTKTIGNNGDQSHKMTTSRCVRLMLISMANDLKEVWISEQPFLLVTYLWQYMPTWAWWITNKMGKKRIENFKSGVDADSSYFKIFKTKHD

SEQ ID NO: 4200 - protein, 212 aa, Homo sapiens
  VARIANT 1: note = misc_feature - Xaa can be any naturally occurring amino acid
XILVNNGGMSQRSLCMDTSLDVYRKLIELNYLGTVSLTKCVLPHMIERKQGKIVTVNSILGIISVPLSIGYCASKHALRGFFNGLRTELATYPGIIVSNICPGPVQSNIVENSLAGEVTKTIGNNGDQSHKMTTSRCVRLMLISMANDLKEVWISEQPFLMQTLLILKSLRQNMTEKSTCTFQATGGRNGKHENSNLLMLLNNQRLICDFTF

SEQ ID NO: 4201 - protein, 399 aa, Homo sapiens
  VARIANT 1: note = misc_feature - Xaa can be any naturally occurring amino acid
XLWLLVLCALLLLLVQLLRFLRADGDLTLLWAEWQGRRPEWELTDMVVWVTGASSGIGEELAYQLSKLGVSLVLSARRVHELERVKRRCLENGNLKEKDILVLPLDLTDTGSHEAATKAVLQEFGRIDILVNNGGMSQRSLCMDTSLDVYRKLIELNYLGTVSLTKCVLPHMIERKQGKIVTVNSILGIISVPLSIGYCASKHALRGFFNGLRTELATYPGIIVSNICPGPVQSNIVENSLAGEVTKTIGNNGDQSHKMTTSRCVRLMLISMANDLKEVWISEQPFLLVTYLWQYMPTWAWWITNKMGKKRIENFKSGVVRPISKFLNSMYQSCRKVQNFPVFKKLSGWVQWLMSVIPALWEAKADHLRPGVQDQPGQHSETPSLLKIQKVAGHGGACL

SEQ ID NO: 4202 - protein, 160 aa, Homo sapiens
  VARIANT 1: note = misc_feature - Xaa can be any naturally occurring amino acid
XNWELLLWLLVLCALLLLLVQLLRFLRADGDLTLLWAEWQGRRPEWELTDMVVWVTGASSGIGEELAYQLSKLGVSLVLSARRVHELERVKRRCLENGNLKEKDILVLPLDLTDTGSHEAATKAVLQEFGRGFFNGLRTELATYPGIIVSNICPGPVQSN

SEQ ID NO: 4203 - protein, 312 aa, Homo sapiens
MGVMAMLMLPLLLLGISGLLFIYQEVSRLWSKSAVQNKVVVITDAISGLGKECARVFHTGGARLVLCGKNWERLENLYDALISVADPSKQTFTPKLVLLDLSDISCVPDVAKEVLDCYGCVDILINNASVKVKGPAHKISLELDKKIMDANYFGPITLTKALLPNMISRRTGQIVLVNNIQGKFGIPFRTTYAASKHAALGFFDCLRAEVEEYDVVISTVSPTFIRSYHVYPEQGNWEASIWKFFFRKLTYGVHPVEVAEEVMRTVRRKKQEVFMANPIPKAAVYVRTFFPEFFFAVVACGVKEKLNVPEEG

SEQ ID NO: 4204 - protein, 311 aa, Homo sapiens
MGVMAMLMLPLLLLGISGLLFIYQEVSRLWSKSAVQNKVVVITDAISGLGKECARVFHTGGARLVLCGKNWERLENLYDALISVADPSKTFTPKLVLLDLSDISCVPDVAKEVLDCYGCVDILINNASVKVKGPAHKISLELDKKIMDANYFGPITLTKALLPNMISRRTGQIVLVNNIQGKFGIPFRTTYAASKHAALGFFDCLRAEVEEYDVVISTVSPTFIRSYHVYPEQGNWEASIWKFFFRKLTYGVHPVEVAEEVMRTVRRKKQEVFMANPIPKAAVYVRTFFPEFFFAVVACGVKEKLNVPEEG

SEQ ID NO: 4205 - protein, 132 aa, Homo sapiens
SVKVKGPAHKISLELDKKIMDANYFGPITLTKALLPNMISRRTGQIVLVNNIQGKFGIPFRTTFFFRKLTYGVHPVEVAEEVMRTVRRKKQEVFMANPIPKAAVYVRTFFPEFFFAVVACGVKEKLNVPEEG

SEQ ID NO: 4206 - protein, 66 aa, Homo sapiens
MLFWVLGLLILCGFLWTRKGKLKIEDITDKYIFITGCDSGFGNLAARTFDKKGFHVIAACLTESGS

SEQ ID NO: 4207 - protein, 319 aa, Homo sapiens
MLFWVLGLLILCGFLWTRKGKLKIEDITDKYIFITGCDSGFGNLAARTFDKKGFHVIAACLTESGSTALKAETSERLRTVLLDVTDPENVKRTAQWVKNQVGEKGLWGLINNAGVPGVLAPTDWLTLEDYREPIEVNLFGLISVTLNMLPLVKKAQGRVINVSSVGGRLAIVGGGYTPSKYAVEGFNDSLRRDMKAFGVHVSCIEPGLFKTNLADPVKVIEKKLAIWEQLSPDIKQQYGEGYIEKSLDKLKGNKSYVNMDLSPVVECMDHALTSLFPKTHYAAGKDAKIFWIPLSHMPAALQDFLLLKQKAELANPKAV

SEQ ID NO: 4208 - protein, 319 aa, Homo sapiens; identical to SEQ ID NO: 4207

SEQ ID NO: 4209 - protein, 319 aa, Homo sapiens; identical to SEQ ID NO: 4207

SEQ ID NO: 4210 - protein, 319 aa, Homo sapiens; identical to SEQ ID NO: 4207

SEQ ID NO: 4211 - protein, 319 aa, Homo sapiens; identical to SEQ ID NO: 4207

SEQ ID NO: 4212 - protein, 172 aa, Homo sapiens
MLPLVKKAQGRVINVSSVGGRLAIVGGGYTPSKYAVEGFNDSLRRDMKAFGVHVSCIEPGLFKTNLADPVKVIEKKLAIWEQLSPDIKQQYGEGYIEKSLDKLKGNKSYVNMDLSPVVECMDHALTSLFPKTHYAAGKDAKIFWIPLSHMPAALQDFLLLKQKAELANPKAV

SEQ ID NO: 4213 - protein, 379 aa, Homo sapiens
MPEGRSHCACSITSLTLLVSLTRVTLDILQKLDPPQPAHWRHHLLVLYKKGVYLSHTGGKMLFWVLGLLILCGFLWTRKGKLKIEDITDKYIFITGCDSGFGNLAARTFDKKGFHVIAACLTESGSTALKAETSERLRTVLLDVTDPENVKRTAQWVKNQVGEKGLWGLINNAGVPGVLAPTDWLTLEDYREPIEVNLFGLISVTLNMLPLVKKAQGRVINVSSVGGRLAIVGGGYTPSKYAVEGFNDSLRRDMKAFGVHVSCIEPGLFKTNLADPVKVIEKKLAIWEQLSPDIKQQYGEGYIEKSLDKLKGNKSYVNMDLSPVVECMDHALTSLFPKTHYAAGKDAKIFWIPLSHMPAALQDFLLLKQKAELANPKAV

SEQ ID NO: 4214 - protein, 122 aa, Homo sapiens
MHVIIAGNNDSKAKQVVSKIKEETLNDKVEFLYCDLASMTSIRQFVQKFKMKKIPLHVLINNAGVMMVPQRKTRDGFEEHFGLNYLGHFLLTNLLLDTLKESGSPGHSARVVTVSSATHYVA

SEQ ID NO: 4215 - protein, 63 aa, Homo sapiens
MPVFPPRPDRVAIVTGGTDGIGYSTAKHLARLGMHVIIAGNNDSKAKQVVSKIKEETLNDKET

SEQ ID NO: 4216 - protein, 330 aa, Homo sapiens
MSPLSAARAALRVYAVGAAVILAQLLRRCRGGFLEPVFPPRPDRVAIVTGGTDGIGYSTAKHLARLGMHVIIAGNNDSKAKQVVSKIKEETLNDKVEFLYCDLASMTSIRQFVQKFKMKKIPLHVLINNAGVMMVPQRKTRDGFEEHFGLNYLGHFLLTNLLLDTLKESGSPGHSARVVTVSSATHYVAELNMDDLQSSACYSPHAAYAQSKLALVLFTYHLQRLLAAEGSHVTANVVDPGVVNTDVYKHVFWATRLAKKLLGWLLFKTPDEGAWTSIYAAVTPELEGVGGHYLYNEKETKSLHVTYNQKLQQQLWSKSCEMTGVLDVTL

SEQ ID NO: 4217 - protein, 232 aa, Homo sapiens
MSPLSAARAALRVYAVGAAVILAQLLRRCRGGFLEPVFPPRPDRVAIVTGGTDGIGYSTAKHLARLGMHVIIVEFLYCDLASMTSIRQFVQKFKMKKIPLHVLINNAGVMMVPQRKTRDGFEEHFGLNYLGHFLLTNLLLDTLKESGSPGHSARVVTVSSATHYVAELNMDDLQSSACYSPHAAYAQSKLALVLFTYHLQRLLAAEGSHVTANVVDPGVVNTDVYKHVFWAT

SEQ ID NO: 4218 - protein, 154 aa, Homo sapiens
  VARIANT 1: note = misc_feature - Xaa can be any naturally occurring amino acid
XPARPGPTLPSPRVWPPRLSRVGLQPSSPRAAAPPRTLTPPGHGRGPGGSHAPRPRHQAALPAACGRPVTARPRQAPEGRSGRPRDLDPYPPQVFPPRPDRVAIVTGGTDGIGYSTAKHLARLGMHVIIAGNNDSKAKQVVSKIKEETLNDKET

SEQ ID NO: 4219 - protein, 1369 aa, Homo sapiens
MGGKNKKHKAPAAAVVRAAVSASRAKSAEAGIAGEAQSKKPVSRPATAAAAAAGSREPRVKQGPKIYSFNSTNDSSGPANLDKSILKVVINNKLEQRIIGVINEHKKQNNDKGMISGRLTAKKLQDLYMALQAFSFKTKDIEDAMTNTLLYGGDLHSALDWLCLNLSDDALPEGFSQEFEEQQPKSRPKFQSPQIQATISPPLQPKTKTYEEDPKSKPKKEEKNMEVNMKEWILRYAEQQNEEEKNENSKSLEEEEKFDPNERYLHLAAKLLDAKEQAATFKLEKNKQGQKEAQEKIRKFQREMETLEDHPVFNPAMKISHQQNERKKPPVATEGESALNFNLFEKSAAATEEEKDKKKEPHDVRNFDYTARSWTGKSPKQFLIDWVRKNLPKSPNPSFEKVPVGRYWKCRVRVIKSEDDVLVVCPTILTEDGMQAQHLGATLALYRLVKGQSVHQLLPPTYRDVWLEWSDAEKKREELNKMETNKPRDLFIAKLLNKLKQQQQQQQQHSENKRENSEDPEESWENLVSDEDFSALSLESANVEDLEPVRNLFRKLQSTPKYQKLLKERQQLPVFKHRDSIVETLKRHRVVVVAGETGSGKSTQVPHFLLEDLLLNEWEASKCNIVCTQPRRISAVSLANRVCDELGCENGPGGRNSLCGYQIRMESRACESTRLLYCTTGVLLRKLQEDGLLSNVSHVIVDEVHERSVQSDFLLIILKEILQKRSDLHLILMSATVDSEKFSTYFTHCPILRISGRSYPVEVFHLEDIIEETGFVLEKDSEYCQKFLEEEEEVTINVTSKAGGIKKYQEYIPVQTGAHADLNPFYQKYSSRTQHAILYMNPHKINLDLILELLAYLDKSPQFRNIEGAVLIFLPGLAHIQQLYDLLSNDRRFYSERYKVIALHSILSTQDQAAAFTLPPPGVRKIVLATNIAETGITIPDVVFVIDTGRTKENKYHESSQMSSLVETFVSKASALQRQGRAGRVRDGFCFRMYTRERFEGFMDYSVPEILRVPLEELCLHIMKCNLGSPEDFLSKALDPPQLQVISNAMNLLRKIGACELNEPKLTPLGQHLAALPVNVKIGKMLIFGAIFGCLDPVATLAAVMTEKSPFTTPIGRKDEADLAKSALAMADSDHLTIYNAYLGWKKARQEGGYRSEITYCRRNFLNRTSLLTLEDVKQELIKLVKAAGFSSSTTSTSWEGNRASQTLSFQEIALLKAVLVAGLYDNVGKIIYTKSVDVTEKLACIVETAQGKAQVHPSSVNRDLQTHGWLLYQEKIRYARVYLRETTLITPFPVLLFGGDIEVQHRERLLSIDGWIYFQAPVKIAVIFKQLRVLIDSVLRKKLENPKMSLENDKILQIITELIKTENN

SEQ ID NO: 4220 - protein, 1370 aa, Homo sapiens
MGGKNKKHKAPAAAVVRAAVSASRAKSAEAGIAGEAQSKKPVSRPATAAAAAAGSREPRVKQGPKIYSFNSTNDSSGPANLDKSILKVVINNKLEQRIIGVINEHKKQNNDKGMISGRLTAKKLQDLYMALQAFSFKTKDIEDAMTNTLLYGGDLHSALDWLCLNLSDDALPEGFSQEFEEQQPKSRPKFQSPQIQATISPPLQPKTKTYEEDPKSKPKKEEKNMEVNMKEWILRYAEQQNEEEKNENSKSLEEEEKFDPNERYLHLAAKLLDAKEQAATFKLEKNKQGQKEAQEKIRKFQREMETLEDHPVFNPAMKISHQQNERKKPPVATEGESALNFNLFEKSAAATEEEKGKKKEPHDVRNFDYTARSWTGKSPKQFLIDWVRKNLPKSPNPSFEKVPVGRYWKCRVRVIKSEDDVLVVCPTILTEDGMQAQHLGATLALYRLVKGQSVHQLLPPTYRDVWLEWSDAEKKREELNKMETNKPRDLFIAKLLNKLKQQQQQQQQHSENKRENSEDPEESWENLVSDEDFSALSLESANVEDLEPVRNLFRKLQSTPKYQKLLKERQQLPVFKHRDSIVETLKRHRVVVVAGETGSGKSTQVPHFLLEDLLLNEWEASKCNIVCTQPRRISAVSLANRVCDELGCENGPGGRNSLCGYQIRMESRACESTRLLYCTTGVLLRKLQEDGLLSNVSHVIVDEVHERSVQSDFLLIILKEILQKRSDLHLILMSATVDSEKFSTYFTHCPILRISGRSYPVEVFHLEDIIEETGFVLEKDSEYCQKFLEEEEEVTINVTSKAGGIKKYQEYIPVQTGAHADLNPFYQKYSSRTQHAILYMNPHKINLDLILELLAYLDKSPQFRNIEGAVLIFLPGLAHIQQLYDLLSNDRRFYSERYKVIALHSILSTQDQAAAFTLPPPGVRKIVLATNIAETGITIPDVVFVIDTGRTKENKYHESSQMSSLVETFVSKASALQRQGRAGRVRDGFCFRMYTRERFEGFMDYSVPEILRVPLEELCLHIMKCNLGSPEDFLSKALDPPQLQVISNAMNLLRKIGACELNEPKLTPLGQHLAALPVNVKIGKMLIFGAIFGCLDPVATLAAVMTEKSPFTTPIGRKDEADLAKSALAMADSDHLTIYNAYLGWKKARQEGGYRSEITYCRRNFLNRTSLLTLEDVKQELIKLVKAAGFSSSTTSTSWEGNRASQTLSFQEIALLKAVLVAGLYDNVGKIIYTKSVDVTEKLACIVETAQGKAQVHPSSVNRDLQTHGWLLYQEKIRYARVYLRETTLITPFPVLLFGGDIEVQHRERLLSIDGWIYFQAPVKIAVIFKQLRVLIDSVLRKKLENPKMSLENDKILQIITELIKTENNN

SEQ ID NO: 4221 - protein, 160 aa, Homo sapiens
  VARIANT 1: note = misc_feature - Xaa can be any naturally occurring amino acid
XRPRWSGPPCLLPEPNLPRLELPGRPKARSQCPGRPPLPLPLPAPGSPVSSKVVINNKLEQRIIGVINEHKKQNNDKGMISGRLTAKKLQDLYMALQAFSFKTKDIEDAMTNTLLYGGDLHSALDWLCLNLSDDALPEGFSQEFEEQQPKSRPKFQSPQI

SEQ ID NO: 4222 - protein, 1222 aa, Homo sapiens
MAAARRLMALAAGISPRLQPLGPRAAGRQGRSRGFSSSCAHPDHTKEAAEAESGMAPGGPGEGDGSLVNASRDLLKEFPQPKNLLNSVIGRALGISHAKDKLVYVHTNGPKKKKVTLHIKWPKSVEVEGYGSKKIDAERQAAAAACQLFKGWGLLGPRNELFDAAKYRVLADRFGSPADSWWRPEPTMPPTSWRQLNPESIRPGGPGGLSRSLGREEEEDEEEELEEGTIDVTDFLSMTQQDSHAPLRDSRGSSFEMTDDDSAIRALTQFPLPKNLLAKVIQIATSSSTAKNLMQFHTVGTKTKLSTLTLLWPCPMTFVAKGRRKAEAENKAAALACKKLKSLGLVDRNNEPLTHAMYNLASLRELGETQRRPCTIQVPEPILRKIETFLNHYPVESSWIAPELRLQSDDILPLGKDSGPLSDPITGKPYVPLLEAEEVRLSQSLLELWRRRGPVWQEAPQLPVDPHRDTILNAIEQHPVVVISGDTGCGKTTRIPQLLLERYVTEGRGARCNVIITQPRRISAVSVAQRVSHELGPSLRRNVGFQVRLESKPPSRGGALLFCTVGILLRKLQSNPSLEGVSHVIVDEVHERDVNTDFLLILLKGLQRLNPALRLVLMSATGDNERFSRYFGGCPVIKVPGFMYPVKEHYLEDILAKLGKHQYLHRHRHHESEDECALDLDLVTDLVLHIDARGEPGGILCFLPGWQEIKGVQQRLQEALGMHESKYLILPVHSNIPMMDQKAIFQQPPVGVRKIVLATNIAETSITINDIVHVVDSGLHKEERYDLKTKVSCLETVWVSRANVIQRRGRAGRCQSGFAYHLFPRSRLEKMVPFQVPEILRTPLENLVLQAKIHMPEKTAVEFLSKAVDSPNIKAVDEAVILLQEIGVLDQREYLTTLGQRLAHISTDPRLAKAIVLAAIFRCLHPLLVVVSCLTRDPFSSSLQNRAEVDKVKALLSHDSGSDHLAFVRAVAGWEEVLRWQDRSSRENYLEENLLYAPSLRFIHGLIKQFSENIYEAFLVGKPSDCTLASAQCNEYSEEEELVKGVLMAGLYPNLIQVRQGKVTRQGKFKPNSVTYRTKSGNILLHKSTINREATRLRSRWLTYFMAVKSNGSVFVRDSSQVHPLAVLLLTDGDVHIRDDGRRATISLSDSDLLRLEGDSRTVRLLKELRRALGRMVERSLRSELAALPPSVQEEHGQLLALLAELLRGPCGSFDVRKTADD

SEQ ID NO: 4223 - protein, 1155 aa, Homo sapiens
MAASRDLLKEFPQPKNLLNSVIGRALGISHAKDKLVYVHTNGPKKKKVTLHIKWPKSVEVEGYGSKKIDAERQAAAAACQLFKGWGLLGPRNELFDAAKYRVLADRFGSPADSWWRPEPTMPPTSWRQLNPESIRPGGPGGLSRSLGREEEEDEEEELEEGTIDVTDFLSMTQQDSHAPLRDSRGSSFEMTDDDSAIRALTQFPLPKNLLAKVIQIATSSSTAKNLMQFHTVGTKTKLSTLTLLWPCPMTFVAKGRRKAEAENKAAALACKKLKSLGLVDRNNEPLTHAMYNLASLRELGETQRRPCTIQVPEPILRKIETFLNHYPVESSWIAPELRLQSDDILPLGKDSGPLSDPITGKPYVPLLEAEEVRLSQSLLELWRRRGPVWQEAPQLPVDPHRDTILNAIEQHPVVVISGDTGCGKTTRIPQLLLERYVTEGRGARCNVIITQPRRISAVSVAQRVSHELGPSLRRNVGFQVRLESKPPSRGGALLFCTVGILLRKLQSNPSLEGVSHVIVDEVHERDVNTDFLLILLKGLQRLNPALRLVLMSATGDNERFSRYFGGCPVIKVPGFMYPVKEHYLEDILAKLGKHQYLHRHRHHESEDECALDLDLVTDLVLHIDARGEPGGILCFLPGWQEIKGVQQRLQEALGMHESKYLILPVHSNIPMMDQKAIFQQPPVGVRKIVLATNIAETSITINDIVHVVDSGLHKEERYDLKTKVSCLETVWVSRANVIQRRGRAGRCQSGFAYHLFPRSRLEKMVPFQVPEILRTPLENLVLQAKIHMPEKTAVEFLSKAVDSPNIKAVDEAVILLQEIGVLDQREYLTTLGQRLAHISTDPRLAKAIVLAAIFRCLHPLLVVVSCLTRDPFSSSLQNRAEVDKVKALLSHDSGSDHLAFVRAVAGWEEVLRWQDRSSRENYLEENLLYAPSLRFIHGLIKQFSENIYEAFLVGKPSDCTLASAQCNEYSEEEELVKGVLMAGLYPNLIQVRQGKVTRQGKFKPNSVTYRTKSGNILLHKSTINREATRLRSRWLTYFMAVKSNGSVFVRDSSQVHPLAVLLLTDGDVHIRDDGRRATISLSDSDLLRLEGDSRTVRLLKELRRALGRMVERSLRSELAALPPSVQEEHGQLLALLAELLRGPCGSFDVRKTADD

SEQ ID NO: 4224 - protein, 1166 aa, Homo sapiens
MCVNPTPGGTISRASRDLLKEFPQPKNLLNSVIGRALGISHAKDKLVYVHTNGPKKKKVTLHIKWPKSVEVEGYGSKKIDAERQAAAAACQLFKGWGLLGPRNELFDAAKYRVLADRFGSPADSWWRPEPTMPPTSWRQLNPESIRPGGPGGLSRSLGREEEEDEEEELEEGTIDVTDFLSMTQQDSHAPLRDSRGSSFEMTDDDSAIRALTQFPLPKNLLAKVIQIATSSSTAKNLMQFHTVGTKTKLSTLTLLWPCPMTFVAKGRRKAEAENKAAALACKKLKSLGLVDRNNEPLTHAMYNLASLRELGETQRRPCTIQVPEPILRKIETFLNHYPVESSWIAPELRLQSDDILPLGKDSGPLSDPITGKPYVPLLEAEEVRLSQSLLELWRRRGPVWQEAPQLPVDPHRDTILNAIEQHPVVVISGDTGCGKTTRIPQLLLERYVTEGRGARCNVIITQPRRISAVSVAQRVSHELGPSLRRNVGFQVRLESKPPSRGGALLFCTVGILLRKLQSNPSLEGVSHVIVDEVHERDVNTDFLLILLKGLQRLNPALRLVLMSATGDNERFSRYFGGCPVIKVPGFMYPVKEHYLEDILAKLGKHQYLHRHRHHESEDECALDLDLVTDLVLHIDARGEPGGILCFLPGWQEIKGVQQRLQEALGMHESKYLILPVHSNIPMMDQKAIFQQPPVGVRKIVLATNIAETSITINDIVHVVDSGLHKEERYDLKTKVSCLETVWVSRANVIQRRGRAGRCQSGFAYHLFPRSRLEKMVPFQVPEILRTPLENLVLQAKIHMPEKTAVEFLSKAVDSPNIKAVDEAVILLQEIGVLDQREYLTTLGQRLAHISTDPRLAKAIVLAAIFRCLHPLLVVVSCLTRDPFSSSLQNRAEVDKVKALLSHDSGSDHLAFVRAVAGWEEVLRWQDRSSRENYLEENLLYAPSLRFIHGLIKQFSENIYEAFLVGKPSDCTLASAQCNEYSEEEELVKGVLMAGLYPNLIQVRQGKVTRQGKFKPNSVTYRTKSGNILLHKSTINREATRLRSRWLTYFMAVKSNGSVFVRDSSQVHPLAVLLLTDGDVHIRDDGRRATISLSDSDLLRLEGDSRTVRLLKELRRALGRMVERSLRSELAALPPSVQEEHGQLLALLAELLRGPCGSFDVRKTADD

SEQ ID NO: 4225 - protein, 1194 aa, Homo sapiens
MFSLDSFRKDRAQHRQRQCKLPPPRLPPMCVNPTPGGTISRASRDLLKEFPQPKNLLNSVIGRALGISHAKDKLVYVHTNGPKKKKVTLHIKWPKSVEVEGYGSKKIDAERQAAAAACQLFKGWGLLGPRNELFDAAKYRVLADRFGSPADSWWRPEPTMPPTSWRQLNPESIRPGGPGGLSRSLGREEEEDEEEELEEGTIDVTDFLSMTQQDSHAPLRDSRGSSFEMTDDDSAIRALTQFPLPKNLLAKVIQIATSSSTAKNLMQFHTVGTKTKLSTLTLLWPCPMTFVAKGRRKAEAENKAAALACKKLKSLGLVDRNNEPLTHAMYNLASLRELGETQRRPCTIQVPEPILRKIETFLNHYPVESSWIAPELRLQSDDILPLGKDSGPLSDPITGKPYVPLLEAEEVRLSQSLLELWRRRGPVWQEAPQLPVDPHRDTILNAIEQHPVVVISGDTGCGKTTRIPQLLLERYVTEGRGARCNVIITQPRRISAVSVAQRVSHELGPSLRRNVGFQVRLESKPPSRGGALLFCTVGILLRKLQSNPSLEGVSHVIVDEVHERDVNTDFLLILLKGLQRLNPALRLVLMSATGDNERFSRYFGGCPVIKVPGFMYPVKEHYLEDILAKLGKHQYLHRHRHHESEDECALDLDLVTDLVLHIDARGEPGGILCFLPGWQEIKGVQQRLQEALGMHESKYLILPVHSNIPMMDQKAIFQQPPVGVRKIVLATNIAETSITINDIVHVVDSGLHKEERYDLKTKVSCLETVWVSRANVIQRRGRAGRCQSGFAYHLFPRSRLEKMVPFQVPEILRTPLENLVLQAKIHMPEKTAVEFLSKAVDSPNIKAVDEAVILLQEIGVLDQREYLTTLGQRLAHISTDPRLAKAIVLAAIFRCLHPLLVVVSCLTRDPFSSSLQNRAEVDKVKALLSHDSGSDHLAFVRAVAGWEEVLRWQDRSSRENYLEENLLYAPSLRFIHGLIKQFSENIYEAFLVGKPSDCTLASAQCNEYSEEEELVKGVLMAGLYPNLIQVRQGKVTRQGKFKPNSVTYRTKSGNILLHKSTINREATRLRSRWLTYFMAVKSNGSVFVRDSSQVHPLAVLLLTDGDVHIRDDGRRATISLSDSDLLRLEGDSRTVRLLKELRRALGRMVERSLRSELAALPPSVQEEHGQLLALLAELLRGPCGSFDVRKTADD

SEQ ID NO: 4226 - protein, 1194 aa, Homo sapiens; identical to SEQ ID NO: 4225

SEQ ID NO: 4227 - protein, 42 aa, Homo sapiens
MFSLDSFRKDRAQHRQRQCKLPPPRLPPMCVNPTPGGTISRG

SEQ ID NO: 4228 - protein, 42 aa, Homo sapiens; identical to SEQ ID NO: 4227

SEQ ID NO: 4229 - protein, 42 aa, Homo sapiens; identical to SEQ ID NO: 4227

SEQ ID NO: 4230 - protein, 138 aa, Homo sapiens
KAKFHQTEGDHLTLLAVYNSWKNNKFSNPWCYENFIQARSLRRAQDIRKQMLGIMDRHKLDVVSCGKSTVRVQKAICSGFFRNAAKKDPQEGYRTLIDQQVVYIHPSSALFNRQPEWDLYSRFSEWKSGTNCSSLSGT

SEQ ID NO: 4231 - protein, 1220 aa, Homo sapiens [sequence omitted]

SEQ ID NO: 4232 - protein, 1181 aa, Homo sapiens
MAVAVAMAGALIGSEPGPAEELAKLEYLSLVSKVCTELDNHLGINDKDLAEFVISLAEKNTTFDTFKASLVKNGAEFTDSLISNLLRLIQTMRPPAKPSTSKDPVVKPKTEKEKLKELFPVLCQPDNPSVRTMLDEDDVKVAVDVLKELEALMPSAAGQEKQRDAEHRDRTKKKKRSRSRDRNRDRDRDRERNRDRDHKRRHRSRSRSRSRTRERNKVKSRYRSRSRSQSPPKDRKDRDKYGERNLDRWRDKHVDRPPPEEPTIGDIYNGKVTSIMQFGCFVQLEGLRKRWEGLVHISELRREGRVANVADVVSKGQRVKVKVLSFTGTKTSLSMKDVDQETGEDLNPNRRRNLVGETNEETSMRNPDRPTHLSLVSAPEVEDDSLERKRLTRISDPEKWEIKQMIAANVLSKEEFPDFDEETGILPKVDDEEDEDLEIELVEEEPPFLRGHTKQSMDMSPIKIVKNPDGSLSQAAMMQSALAKERRELKQAQREAEMDSIPMGLNKHWVDPLPDAEGRQIAANMRGIGMMPNDIPEWKKHAFGGNKASYGKKTQMSILEQRESLPIYKLKEQLVQAVHDNQILIVIGETGSGKTTQITQYLAEAGYTSRGKIGCTQPRRVAAMSVAKRVSEEFGCCLGQEVGYTIRFEDCTSPETVIKYMTDGMLLRECLIDPDLTQYAIIMLDEAHERTIHTDVLFGLLKKTVQKRQDMKLIVTSATLDAVKFSQYFYEAPIFTIPGRTYPVEILYTKEPETDYLDASLITVMQIHLTEPPGDILVFLTGQEEIDTACEILYERMKSLGPDVPELIILPVYSALPSEMQTRIFDPAPPGSRKVVIATNIAETSLTIDGIYYVVDPGFVKQKVYNSKTGIDQLVVTPISQAQAKQRAGRAGRTGPGKCYRLYTERAYRDEMLTTNVPEIQRTNLASTVLSLKAMGINDLLSFDFMDAPPMETLITAMEQLYTLGALDDEGLLTRLGRRMAEFPLEPMLCKMLIMSVHLGCSEEMLTIVSMLSVQNVFYRPKDKQALADQKKAKFHQTEGDHLTLLAVYNSWKNNKFSNPWCYENFIQARSLRRAQDIRKQMLGIMDRHKLDVVSCGKSTVRVQKAICSGFFRNAAKKDPQEGYRTLIDQQVVYIHPSSALFNRQPECPKHFLPVVAVAVSLEQCLSKFEDLNKELGLVTC

SEQ ID NO: 4233 - protein, 53 aa, Homo sapiens
MAVAVAMAGALIGSEPGPAEELAKLEYLSLVSKVCTELDNHLGINDKDLGFSY

SEQ ID NO: 4234 - protein, 33 aa, Homo sapiens
  VARIANT 1: note = misc_feature - Xaa can be any naturally occurring amino acid
XYRTLIDQQVVYIHPSSALFNRQPEWTVPMGHV

SEQ ID NO: 4235 - protein, 6 aa, Homo sapiens
MGILSV

SEQ ID NO: 4236 - protein, 6 aa, Homo sapiens
MGILSV

SEQ ID NO: 4237 - protein, 56 aa, Homo sapiens
MGILSVDLLITLQILPPSANWWKSSPQWLTSCWSTLMRLIHQMAGRYRGTPLCLLR

SEQ ID NO: 4238 - protein, 55 aa, Homo sapiens
MGILSVDLLITLQILPVFFSNCLFLALYDSVILLKHVVLLLSRSKSTRGEWRRML

SEQ ID NO: 4239 - protein, 145 aa, Homo sapiens
MGILSVDLLITLQILPVFFSNCLFLALYDSVILLKHVVLLLSRSKSTRGEWRRMLTSEGLRCVWKSFLLDAYKQLNCPPSGFSKDGHILLVYEAYKSRLLVYSHLDLWMTDSVVLTLNFPRQISLCFGKNSAAELYIVSKKEKVP

SEQ ID NO: 4240 - protein, 306 aa, Homo sapiens
MGILSVDLLITLQILPVFFSNCLFLALYDSVILLKHVVLLLSRSKSTRGEWRRMLTSEGLRCVWKSFLLDAYKQLNCPPSGFSKDGHILLVYEAYKSRLLVYSHLDLWMVKLGEDAPNSSVVHVSSTEGGDNSGNGTQEKIAEGATCHLLDFASPERPLVVNFGSATPPFTSQLPAFRKLVEEFSSVADFLLVYIDEAHPSDGWAIPGDSSLSFEVKKHQNQEDRCAAAQQLLERFSLPPQCRVVADRMDNNANIAYGVAFERVCIVQRQKIAYLGGKGPFSYNLQEVRHWLEKNFSKRKKTRLAG

SEQ ID NO: 4241 - protein, 271 aa, Homo sapiens
MGILSVDLLITLQILPVFFSNCLFLALYDSVILLKHVVLLLSRSKSTRGEWRRMLTSEGLRCVWKSFLLDAYKQVKLGEDAPNSSVVHVSSTEGGDNSGNGTQEKIAEGATCHLLDFASPERPLVVNFGSATPPFTSQLPAFRKLVEEFSSVADFLLVYIDEAHPSDGWAIPGDSSLSFEVKKHQNQEDRCAAAQQLLERFSLPPQCRVVADRMDNNANIAYGVAFERVCIVQRQKIAYLGGKGPFSYNLQEVRHWLEKNFSKRKKTRLAG

SEQ ID NO: 4242 - protein, 271 aa, Homo sapiens; identical to SEQ ID NO: 4241

SEQ ID NO: 4243 - protein, 37 aa, Homo sapiens
  VARIANT 1: note = misc_feature - Xaa can be any naturally occurring amino acid
XMLTSEGLRCVWKSFLLDAYKQLNCPPSGFSKDGHIL

SEQ ID NO: 4244 - protein, 58 aa, Homo sapiens
  VARIANT 1: note = misc_feature - Xaa can be any naturally occurring amino acid
XMLTSEGLRCVWKSFLLDAYKQTDSVVLTLNFPRQISLCFGKNSAAELYIVSKKEKVP

SEQ ID NO: 4245 - protein, 77 aa, Homo sapiens
MEEAKKMISGLQALLLNGSLPEDEQERPLALCEPGVNPEEQLIIIQSRLDQSMEENQDLKKELLKCKQEARNLQGIK

SEQ ID NO: 4246 - protein, 472 aa, Homo sapiens
MGGTQVKCLTSPSPIHSAKSESIITQSEEKADFVIIPAEGIENRTEGTDSPLSRDWRPGSPGTYLETSWEEQLLEQQEYLEKEMEEAKKMISGLQALLLNGSLPEDEQERPLALCEPGVNPEEQLIIIQSRLDQSMEENQDLKKELLKCKQEARNLQGIKDALQQRLTQQDTSVLQLKQELLRANMDKDELHNQNVDLQRKLDERNRLLGEYKKELGQKDRLLQQHQAKLEEALRKLSDVSYHQVDLERELEHKDVLLAHCMKREADEATNYNSHNSQSNGFLLPTAGKGATSVSNRGTSDLQLVRDALRSLRNSFSGHDPQHHTIDSLEQGISSLMERLHVMETQKKQERKVRVKSPRTQVGSEYRESWPPNSKLPHSQSSPTVSSTCTKVLYFTDRSLTPFMVNIPKRLEEVTLKDFKAAIDREGNHRYHFKALDPEFGTVKEEIFHDDDAIPGWEGKIVAWVEEDHGEN

SEQ ID NO: 4247 - protein, 218 aa, Homo sapiens
MGTQVVMRFNNSLLPTEPSQQLQAYVAWVNAQLKKRPAVKPVQDLRQDLRDGVILAYLIEIVAGEKLSGVQLSPGNQQEMKNNVEKVLQFVASKKIRMHQTSAKDIVDGNLKSIMRLVLALAAHFKPGSSRTVNQGRDSRAPLQSHRPHCATAVAQGAAAALADVCHDMSRSGRDVFRYRQRNSSMDEEIENPYWSVRALVQQYEGQQRSPSESSCSR

SEQ ID NO: 4248 - protein, 683 aa, Homo sapiens
MLACLTRGNLLDVLQEGFNEQQLQAYVAWVNAQLKKRPAVKPVQDLRQDLRDGVILAYLIEIVAGEKLSGVQLSPGNQQEMKNNVEKVLQFVASKKIRMHQTSAKDIVDGNLKSIMRLVLALAAHFKPGSSRTVNQGRDSRAPLQSHRPHCATAVAQGAAAALADVCHDMSRSGRDVFRYRQRNSSMDEEIENPYWSVRALVQQYEGQQRSPSESSCSSLTSPSPIHSAKSESIITQSEEKADFVIIPAEGIENRTEGTDSPLSRDWRPGSPGTYLETSWEEQLLEQQEYLEKEMEEAKKMISGLQALLLNGSLPEDEQERPLALCEPGVNPEEQLIIIQSRLDQSMEENQDLKKELLKCKQEARNLQGIKDALQQRLTQQDTSVLQLKQELLRANMDKDELHNQNVDLQRKLDERNRLLGEYKKELGQKDRLLQQHQAKLEEALRKLSDVSYHQVDLERELEHKDVLLAHCMKREADEATNYNSHNSQSNGFLLPTAGKGATSVSNRGTSDLQLVRDALRSLRNSFSGHDPQHHTIDSLEQGISSLMERLHVMETQKKQERKVRVKSPRTQVGSEYRESWPPNSKLPHSQSSPTVSSTCTKVLYFTDRSLTPFMVNIPKRLEEVTLKDFKAAIDREGNHRYHFKALDPEFGTVKEEIFHDDDAIPGWEGKIVAWVEEDHGEN

SEQ ID NO: 4249 - protein, 266 aa, Homo sapiens
MMALGAAGATRVFVAMVAAALGGHPLLGVSATLNSVLNSNAIKNLPPPLGGAAGHPGSAVSAAPGILYPGGNKYQTIDNYQPYPCAEDEECGTDEYCASPTRGGDAGVQICLACRKRRKRCMRHAMCCPGNYCKNGICVSSDQNHFRGEIEETITESFGNDHSTLDGYSRRTTLSSKMYHTKGQEGSVCLRSSDCASGLCCARHFWSKICKPVLKEGQVCTKHRRKGSHGLEIFQRCYCGEGLSCRIQKDHHQASNSSRLHTCQRH

SEQ ID NO: 4250 - protein, 259 aa, Homo sapiens
MAALMRSKDSSCCLLLLAAVLMVESSQIGSSRAKLNSIKSSLGGETPGQAANRSAGMYQGLAFGGSKKGKNLGQAYPCSSDKECEVGRYCHSPHQGSSACMVCRRKKKRCHRDGMCCPSTRCNNGICIPVTESILTPHIPALDGTRHRDRNHGHYSNHDLGWQNLGRPHTKMSHIKGHEGDPCLRSSDCIEGFCCARHFWTKICKPVLHQGEVCTKQRKKGSHGLEIFQRCDCAKGLSCKVWKDATYSSKARLHVCQKI

SEQ ID NO: 4251 - protein, 213 aa, Homo sapiens
MTLRIDYCQGLLVGVSSSGLNIIQIQCQAYPCSSDKECEVGRYCHSPHQGSSACMVCRRKKKRCHRDGMCCPSTRCNNGICIPVTESILTPHIPALDGTRHRDRNHGHYSNHDLGWQNLGRPHTKMSHIKGHEGDPCLRSSDCIEGFCCARHFWTKICKPVLHQGEVCTKQRKKGSHGLEIFQRCDCAKGLSCKVWKDATYSSKARLHVCQKI

SEQ ID NO: 4252 - protein, 159 aa, Homo sapiens
MVCRRKKKRCHRDGMCCPSTRCNNGICIPVTESILTPHIPALDGTRHRDRNHGHYSNHDLGWQNLGRPHTKMSHIKGHEGDPCLRSSDCIEGFCCARHFWTKICKPVLHQGEVCTKQRKKGSHGLEIFQRCDCAKGLSCKVWKDATYSSKARLHVCQKI

SEQ ID NO: 4253 - protein, 132 aa, Homo sapiens
MQRLGATLLCLLLAAAVPTAPAPAPTATSAPVKPGPALSYPQEEATLNEMFREVEELMEDTQHKLRSAVEEMEAEEAAAKASSEVNLANLPPSYHNETNTDTKVGNNTIHVHREIHKECIIDEDCGPSMYCQ

SEQ ID NO: 4254 - protein, 183 aa, Homo sapiens
MQRLGATLLCLLLAAAVPTAPAPAPTATSAPVKPGPALSYPQEEATLNEMFREVEELMEDTQHKLRSAVEEMEAEEAAAKASSEVNLANLPPSYHNETNTDTKVGNNTIHVHREIHKECIIDEDCGPSMYCQFASFQYTCQPCRGQRMLCTRDSECCGDQLCVWGHCTKMATRGSNGTICDNQ

SEQ ID NO: 4255 - protein, 235 aa, Homo sapiens
MQRLGATLLCLLLAAAVPTAPAPAPTATSAPVKPGPALSYPQEEATLNEMFREVEELMEDTQHKLRSAVEEMEAEEAAAKASSEVNLANLPPSYHNETNTDTKVGNNTIHVHREIHKITNNQTGQMVFSETVITSVGDEEGRRSHECIIDEDCGPSMYCQFASFQYTCQPCRGQRMLCTRDSECCGDQLCVWGHCTKMATRGSNGTICDNQRDCQPGLCCAFQRGLLFPVCTPLP

SEQ ID NO: 4256 - protein, 350 aa, Homo sapiens
MQRLGATLLCLLLAAAVPTAPAPAPTATSAPVKPGPALSYPQEEATLNEMFREVEELMEDTQHKLRSAVEEMEAEEAAAKASSEVNLANLPPSYHNETNTDTKVGNNTIHVHREIHKITNNQTGQMVFSETVITSVGDEEGRRSHECIIDEDCGPSMYCQFASFQYTCQPCRGQRMLCTRDSECCGDQLCVWGHCTKMATRGSNGTICDNQRDCQPGLCCAFQRGLLFPVCTPLPVEGELCHDPASRLLDLITWELEPDGALDRCPCASGLLCQPHSHSLVYVCKPTFVGSRDQDGEILLPREVPDEYEVGSFMEEVRQELEDLERSLTEEMALREPAAAAAALLGGEEI

SEQ ID NO: 4257 - protein, 350 aa, Homo sapiens; identical to SEQ ID NO: 4256

SEQ ID NO: 4258 - protein, 364 aa, Homo sapiens
MQRLGATLLCLLLAAAVPTAPAPAPTATSAPVKPGPALSYPQEEATLNEMFREVEELMEDTQHKLRSAVEEMEAEEAAAKASSEVNLANLPPSYHNETNTDTKVGNNTIHVHREIHKITNNQTGQMVFSETVITSVGDEEGRRSHECIIDEDCGPSMYCQFASFQYTCQPCRGQRMLCTRDSECCGDQLCVWGHCTKMATRGSNGTICDNQRDCQPGLCCAFQRGLLFPVCTPLPVEGELCHDPASRLLDLITWELEPDGALDRCPCASGLLCQPHRLPRLEPGFVPSLPSHSLVYVCKPTFVGSRDQDGEILLPREVPDEYEVGSFMEEVRQELEDLERSLTEEMALREPAAAAAALLGGEEI

SEQ ID NO: 4259 - protein, 224 aa, Homo sapiens
MVAAVLLGLSWLCSPLGALVLDFNNIRSSADLHGARKGSQCLSDTDCNTRKFCLQPRDEKPFCATCRGLRRRCQRDAMCCPGTLCVNDVCTTMEDATPILERQLDEQDGTHAEGTTGHPVQENQPKRKPSIKKSQGRKGQEGESCLRTFDCGPGLCCARHFWTKICKPVLLEGQVCSRRGHKDTAQAPEIFQRCDCGPGLLCRSQLTSNRQHARLRVCQKIEKL

SEQ ID NO: 4260 - protein, 125 aa, Homo sapiens
MDFRGLPGNYHKEENQEHQLGNNTLSSHLQIDKMTDNKTGEVLISENVVASIQPAEGSFEGDLKVPRMEEKEALVPIQKATDSFHTELHPRVAFWIIKLPRRRSHQDALEGGHWLSEKRHRLQAI

SEQ ID NO: 4261 - protein, 146 aa, Homo sapiens
MDFRGLPGNYHKEENQEHQLGNNTLSSHLQIDKMTDNKTGEVLISENVVASIQPAEGSFEGDLKVPRMEEKEALVPIQKATDSFHTELHPRVAFWIIKLPRRRSHQDALEGGHWLSEKRHRLQAIRDGLRKGTHKDVLEEGTESSS

SEQ ID NO: 4262 - protein, 100 aa, Homo sapiens
MEEKEALVPIQKATDSFHTELHPRVAFWIIKLPRRRSHQDALEGGHWLSEKRHRLQAIRDGLRKGTHKDVLEEGTESSSHSRLSPRKTHLLYILRPSRQL

SEQ ID NO: 4263 - protein, 242 aa, Homo sapiens
MGEASPPAPARRHLLVLLLLLSTLVIPSAAAPIHDADAQESSLGLTGLQSLLQGFSRLFLKGNLLRGIDSLFSAPMDFRGLPGNYHKEENQEHQLGNNTLSSHLQIDKMTDNKTGEVLISENVVASIQPAEGSFEGDLKVPRMEEKEALVPIQKATDSFHTELHPRVAFWIIKLPRRRSHQDALEGGHWLSEKRHRLQAIRDGLRKGTHKDVLEEGTESSSHSRLSPRKTHLLYILRPSRQL

SEQ ID NO: 4264 - protein, 199 aa, Homo sapiens
MGEASPPAPARRHLLVLLLLLSTLVIPSAAAPIHDADAQESSLGLTGLQSLLQGFSRLFLKGNLLRGIDSLFSAPMDFRGLPGNYHKEENQEHQLGNNTLSSHLQIDKVPRMEEKEALVPIQKATDSFHTELHPRVAFWIIKLPRRRSHQDALEGGHWLSEKRHRLQAIRDGLRKGTHKDVLEEGTESSSHSRLSPRKT

SEQ ID NO: 4265 - protein, 137 aa, Homo sapiens
  VARIANT 1: note = misc_feature - Xaa can be any naturally occurring amino acid
XAAAPIHDADAQESSLGLTGLQSLLQGFSRLFLKVPRMEEKEALVPIQKATDSFHTELHPRVAFWIIKLPRRRSHQDALEGGHWLSEKRHRLQAIRDGLRKGTHKDVLEEGTESSSHSRLSPRKTHLLYILRPSRQL

SEQ ID NO: 4266 - protein, 724 aa, Homo sapiens
MDCLCIVTTKKYRYQDEDTPPLEHSPAHLPNQANSPPVIVNTDTLEAPGYELQVNGTEGEMEYEEITLERGNSGLGFSIAGGTDNPHIGDDPSIFITKIIPGGAAAQDGRLRVNDSILFVNEVDVREVTHSAAVEALKEAGSIVRLYVMRRKPPAEKVMEIKLIKGPKGLGFSIAGGVGNQHIPGDNSIYVTKIIEGGAAHKDGRLQIGDKILAVNSVGLEDVMHEDAVAALKNTYDVVYLKVAKPSNAYLSDSYAPPDITTSYSQHLDNEISHSSYLGTDYPTAMTPTSPRRYSPVAKDLLGEEDIPREPRRIVIHRGSTGLGFNIVGGEDGEGIFISFILAGGPADLSGELRKGDQILSVNGVDLRNASHEQAAIALKNAGQTVTIIAQYKPEEYSRFEAKIHDLREQLMNSSLGSGTASLRSNPKRGFYIRALFDYDKTKDCGFLSQALSFRFGDVLHVIDASDEEWWQARRVHSDSETDDIGFIPSKRRVERREWSRLKAKDWGSSSGSQGREDSVLSYETVTQMEVHYARPIIILGPTKDRANDDLLSEFPDKFGSCVPHTTRPKREYEIDGRDYHFVSSREKMEKDIQAHKFIEAGQYNSHLYGTSVQSVREVAEQGKHCILDVSANAVRRLQAAHLHPIAIFIRPRSLENVLEINKRITEEQARKAFDRATKLEQEFTECFSAIVEGDSFEEIYHKVKRVIEDLSGPYIWVPARERL

SEQ ID NO: 4267 - protein, 721 aa, Homo sapiens
MDCLCIVTTKKYRYQDEDTPPLEHSPAHLPNQANSPPVIVNTDTLEAPGYVNGTEGEMEYEEITLERGNSGLGFSIAGGTDNPHIGDDPSIFITKIIPGGAAAQDGRLRVNDSILFVNEVDVREVTHSAAVEALKEAGSIVRLYVMRRKPPAEKVMEIKLIKGPKGLGFSIAGGVGNQHIPGDNSIYVTKIIEGGAAHKDGRLQIGDKILAVNSVGLEDVMHEDAVAALKNTYDVVYLKVAKPSNAYLSDSYAPPDITTSYSQHLDNEISHSSYLGTDYPTAMTPTSPRRYSPVAKDLLGEEDIPREPRRIVIHRGSTGLGFNIVGGEDGEGIFISFILAGGPADLSGELRKGDQILSVNGVDLRNASHEQAAIALKNAGQTVTIIAQYKPEEYSRFEAKIHDLREQLMNSSLGSGTASLRSNPKRGFYIRALFDYDKTKDCGFLSQALSFRFGDVLHVIDASDEEWWQARRVHSDSETDDIGFIPSKRRVERREWSRLKAKDWGSSSGSQGREDSVLSYETVTQMEVHYARPIIILGPTKDRANDDLLSEFPDKFGSCVPHTTRPKREYEIDGRDYHFVSSREKMEKDIQAHKFIEAGQYNSHLYGTSVQSVREVAEQGKHCILDVSANAVRRLQAAHLHPIAIFIRPRSLENVLEINKRITEEQARKAFDRATKLEQEFTECFSAIVEGDSFEEIYHKVKRVIEDLSGPYIWVPARERL

SEQ ID NO: 4268 - protein, 296 aa, Homo sapiens
MDCLCIVTTKKYRYQDEDTPPLEHSPAHLPNQANSPPVIVNTDTLEAPGYVNGTEGEMEYEEITLERGNSGLGFSIAGGTDNPHIGDDPSIFITKIIPGGAAAQDGRLRVNDSILFVNEVDVREVTHSAAVEALKEAGSIVRLYVMRRKPPAEKVMEIKLIKGPKGLGFSIAGGVGNQHIPGDNSIYVTKIIEGGAAHKDGRLQIGDKILAVNSVGLEDVMHEDAVAALKNTYDVVYLKVAKPSNAYLSDSYAPPDITTCESPSNTKVPHDPSRLTHDMQSHDIPVAVPLQIFPMK

SEQ ID NO: 4269 - protein, 234 aa, Homo sapiens
MDCLCIVTTKKYRYQDEDTPPLEHSPAHLPNQVNAPELVHVAERNLSHLEAGHGVVGHAHLSPFKANSPPVIVNTDTLEAPGYVNGTEGEMEYEEITLERGNSGLGFSIAGGTDNPHIGDDPSIFITKIIPGGAAAQDGRLRVNDSILFVNEVDVREVTHSAAVEALKEAGSIVRLYVMRRKPPAEKVMEIKLIKGPKGLGFSIAGGVGNQHIPGDNSIYVTKIIEGGAAHKDG

SEQ ID NO: 4270 - protein, 91 aa, Homo sapiens
MEYEEITLERGNSGLGFSIAGGTDNPHIGDDPSIFITKIIPGGAAAQDGRLRVNDSILFVNEVDVREVTHSAAVEALKEAGSIVRLYVMRR

SEQ ID NO: 4271 - protein, 116 aa, Homo sapiens
MEYEEITLERGNSGLGFSIAGGTDNPHIGDDPSIFITKIIPGGAAAQDGRLRVNDSILFVNEVDVREVTHSAAVEALKEAGSIVRLYVMRRKPPAEKVMEIKLIKGPKGLGFSIAG

SEQ ID NO: 4272 - protein, 281 aa, Homo sapiens
MPINGVNLAWKYRYQDEDTPPLEHSPAHLPNQVNAPELVHVAERNLSHLEAGHGVVGHAHLSPFKANSPPVIVNTDTLEAPGYELQVNGTEGEMEYEEITLERGNSGLGFSIAGGTDNPHIGDDPSIFITKIIPGGAAAQDGRLRVNDSILFVNEVDVREVTHSAAVEALKEAGSIVRLYVMRRKPPAEKVMEIKLIKGPKGLGFSIAGGVGNQHIPGDNSIYVTKIIEGGAAHKDGRLQIGDKILAVNSVGLEDVMHEDAVAALKNTYDVVYLKVAKPSN

SEQ ID NO: 4273 - protein, 767 aa, Homo sapiens
MSQRPRAPRSALWLLAPPLLRWAPPLLTVLHSDLFQALLDILDYYEASLSESQKYRYQDEDTPPLEHSPAHLPNQANSPPVIVNTDTLEAPGYELQVNGTEGEMEYEEITLERGNSGLGFSIAGGTDNPHIGDDPSIFITKIIPGGAAAQDGRLRVNDSILFVNEVDVREVTHSAAVEALKEAGSIVRLYVMRRKPPAEKVMEIKLIKGPKGLGFSIAGGVGNQHIPGDNSIYVTKIIEGGAAHKDGRLQIGDKILAVNSVGLEDVMHEDAVAALKNTYDVVYLKVAKPSNAYLSDSYAPPDITTSYSQHLDNEISHSSYLGTDYPTAMTPTSPRRYSPVAKDLLGEEDIPREPRRIVIHRGSTGLGFNIVGGEDGEGIFISFILAGGPADLSGELRKGDQILSVNGVDLRNASHEQAAIALKNAGQTVTIIAQYKPEEYSRFEAKIHDLREQLMNSSLGSGTASLRSNPKRGFYIRALFDYDKTKDCGFLSQALSFRFGDVLHVIDASDEEWWQARRVHSDSETDDIGFIPSKRRVERREWSRLKAKDWGSSSGSQGREDSVLSYETVTQMEVHYARPIIILGPTKDRANDDLLSEFPDKFGSCVPHTTRPKREYEIDGRDYHFVSSREKMEKDIQAHKFIEAGQYNSHLYGTSVQSVREVAEQGKHCILDVSANAVRRLQAAHLHPIAIFIRPRSLENVLEINKRITEEQARKAFDRATKLEQEFTECFSAIVEGDSFEEIYHKVKRVIEDLSGPYIWVPARERL

SEQ ID NO: 4274 - protein, 85 aa, Homo sapiens
  VARIANT 1: note = misc_feature - Xaa can be any naturally occurring amino acid
XGPTKDRANDDLLSEFPDKFGSCVPHTTRPKREYEIDGRDYHFVSSREKMEKDIQAHKFIEAGQYNSHLYGTSVQSVREVAEQRD

SEQ ID NO: 4275 - protein, 97 aa, Homo sapiens
MTATEALLRVLLLLLAFGHSTYGAECFPACNPQNGFCEDDNVCRCQPGWQGPLCDQCVTSPGCLHGLCGEPGQCICTDGWDGELCDRDVRACSSAPC

SEQ ID NO: 4276 - protein, 310 aa, Homo sapiens
MTATEALLRVLLLLLAFGHSTYGAECFPACNPQNGFCEDDNVCRCQPGWQGPLCDQCVTSPGCLHGLCGEPGQCICTDGWDGELCDRDVRACSSAPCANNRTCVSLDDGLYECSCAPGYSGKDCQKKDGPCVINGSPCQHGGTCVDDEGRASHASCLCPPGFSGNFCEIVANSCTPNPCENDGVCTDIGGDFRCRCPAGFIDKTCSRPVTNCASSPCQNGGTCLQHTQGQAICFTILGVLTSLVVLGTVGIVFLNKCETWVSNLRYNHMLRKKKNLLLQYNSGEDLAVNIIFPEKIDMTTFSKEAGDEEI

SEQ ID NO: 4277 - protein, 383 aa, Homo sapiens
MTATEALLRVLLLLLAFGHSTYGAECFPACNPQNGFCEDDNVCRCQPGWQGPLCDQCVTSPGCLHGLCGEPGQCICTDGWDGELCDRDVRACSSAPCANNRTCVSLDDGLYECSCAPGYSGKDCQKKDGPCVINGSPCQHGGTCVDDEGRASHASCLCPPGFSGNFCEIVANSCTPNPCENDGVCTDIGGDFRCRCPAGFIDKTCSRPVTNCASSPCQNGGTCLQHTQVSYECLCKPEFTGLTCVKKRALSPQQVTRLPSGYGLAYRLTPGVHELPVQQPEHRILKVSMKELNKKTPLLTEGQAICFTILGVLTSLVVLGTVGIVFLNKCETWVSNLRYNHMLRKKKNLLLQYNSGEDLAVNIIFPEKIDMTTFSKEAGDEEI

SEQ ID NO: 4278 - protein, 136 aa, Homo sapiens
MTATEALLRVLLLLLAFGHSTYGAECFPACNPQNGFCEDDNVCRCQPGWQGPLCDQCVTSPGCLHGLCGEPGQCICTDGWDGELCDRGWHSPLFTSALRPYLPALAPTTSSQSPVAGVPHFLIPAHSVPCILKICL

SEQ ID NO: 4279 - protein, 54 aa, Homo sapiens
MGSRCALALAVLSALLCQVWSSGVFELKLQEFVNKKGLLGNRNCCRGGAGPPPC

SEQ ID NO: 4280 - protein, 723 aa, Homo sapiens
MGSRCALALAVLSALLCQVWSSGVFELKLQEFVNKKGLLGNRNCCRGGAGPPPCACRTFFRVCLKHYQASVSPEPPCTYGSAVTPVLGVDSFSLPDGGGADSAFSNPIRFPFGFTWPGTFSLIIEALHTDSPDDLATENPERLISRLATQRHLTVGEEWSQDLHSSGRTDLKYSYRFVCDEHYYGEGCSVFCRPRDDAFGHFTCGERGEKVCNPGWKGPYCTEPICLPGCDEQHGFCDKPGECKCRVGWQGRYCDECIRYPGCLHGTCQQPWQCNCQEGWGGLFCNQDLNYCTHHKPCKNGATCTNTGQGSYTCSCRPGYTGATCELGIDECDPSPCKNGGSCTDLENSYSCTCPPGFYGKICELSAMTCADGPCFNGGRCSDSPDGGYSCRCPVGYSGFNCEKKIDYCSSSPCSNGAKCVDLGDAYLCRCQAGFSGRHCDDNVDDCASSPCANGGTCRDGVNDFSCTCPPGYTGRNCSAPVSRCEHAPCHNGATCHERGHRYVCECARGYGGPNCQFLLPELPPGPAVVDLTEKLEGQGGPFPWVAVCAGVILVLMLLLGCAAVVVCVRLRLQKHRPPADPCRGETETMNNLANCQREKDISVSIIGATQIKNTNKKADFHGDHSADKNGFKARYPAVDYNLVQDLKGDDTAVRDAHSKRDTKCQPQGSSGEEKGTPTTLRGGEASERKRPDSGCSTSKDTKYQSVYVISEEKDECVIATEV

SEQ ID NO: 4281 - protein, 220 aa, Homo sapiens
MVSPRMSGLLSQTVILALIFLPQTRPAGVFELQIHSFGPGPGPGAPRSPCSARLPCRLFFRVCLKPGLSEEAAESPCALGAALSARGPVYTEQPGAPAPDLPLPDGLLQVPFRDAWPGTFSFIIETWREELGDQIGGGLCLDLGHALRCRCRAGFAGPRCEHDLDDCAGRACANGGTCVEGGGAHRCSCALGFGGRDCRERADPCAARPCAHGGRCYAHF

SEQ ID NO: 4282 - protein, 618 aa, Homo sapiens
MVSPRMSGLLSQTVILALIFLPQTRPAGVFELQIHSFGPGPGPGAPRSPCSARLPCRLFFRVCLKPGLSEEAAESPCALGAALSARGPVYTEQPGAPAPDLPLPDGLLQVPFRDAWPGTFSFIIETWREELGDQIGGPAWSLLARVAGRRRLAAGGPWARDIQRAGAWELRFSYRARCEPPAVGTACTRLCRPRSAPSRCGPGLRPCAPLEDECEAPLVCRAGCSPEHGFCEQPGECRCLEGWTGPLCTVPVSTSSCLSPRGPSSATTGCLVPGPGPCDGNPCANGGSCSETPRSFECTCPRGFYGLRCEVSGVTCADGPCFNGGLCVGGADPDSAYICHCPPGFQGSNCEKRVDRCSLQPCRNGGLCLDLGHALRCRCRAGFAGPRCEHDLDDCAGRACANGGTCVEGGGAHRCSCALGFGGRDCRERADPCAARPCAHGGRCYAHFSGLVCACAPGYMGARCEFPVHPDGASALPAAPPGLRPGDPQRYLLPPALGLLVAAGVAGAALLLVHVRRRGHSQDAGSRLLAGTPEPSVHALPDALNNLRTQEGSGDGPSSSVDWNRPEDVDPQGIYVISAPSIYAREVATPLFPPLHTGRAGQRQHLLFPYPSSILSVK

SEQ ID NO: 4283 - protein, 587 aa, Homo sapiens
MVSPRMSGLLSQTVILALIFLPQTRPAGVFELQIHSFGPGPGPGAPRSPCSARLPCRLFFRVCLKPGLSEEAAESPCALGAALSARGPVYTEQPGAPAPDLPLPDGLLQVPFRDAWPGTFSFIIETWREELGDQIGGPAWSLLARVAGRRRLAAGGPWARDIQRAGAWELRFSYRARCEPPAVGTACTRLCRPRSAPSRCGPGLRPCAPLEDECEAPLVCRAGCSPEHGFCEQPGECRCLEGWTGPLCTVPVSTSSCLSPRGPSSATTGCLVPGPGPCDGNPCANGGSCSETPRSFECTCPRGFYGLRCEVSGVTCADGPCFNGGLCVGGADPDSAYICHCPPGFQGSNCEKRVDRCSLQPCRNGGLCLDLGHALRCRCRAGFAGPRCEHDLDDCAGRACANGGTCVEGGGAHRCSCALGFGGRDCRERADPCAARPCAHGGRCYAHFSGLVCACAPGYMGARCEFPVHPDGASALPAAPPGLRPGDPQRYLLPPALGLLVAAGVAGAALLLVHVRRRGHSQDAGSRLLAGTPEPSVHALPDALNNLRTQEGSGDGPSSSVDWNRPEDVDPQGIYVISAPSIYAREA

SEQ ID NO: 4284 - protein, 1785 aa, Homo sapiens
MGISTVILEMCLLWGQVLSTGGWIPRTTDYASLIPSEVPLDPTVAEGSPFPSESTLESTVAEGSPISLESTLESTVAEGSLIPSESTLESTVAEGSDSGLALRLVNGDGRCQGRVEILYRGSWGTVCDDSWDTNDANVVCRQLGCGWAMSAPGNAWFGQGSGPIALDDVRCSGHESYLWSCPHNGWLSHNCGHGEDAGVICSAAQPQSTLRPESWPVRISPPVPTEGSESSLALRLVNGGDRCRGRVEVLYRGSWGTVCDDYWDTNDANVVCRQLGCGWAMSAPGNAQFGQGSGPIVLDDVRCSGHESYLWSCPHNGWLTHNCGHSEDAGVICSAPQSRPTPSPDTWPTSHASTAGPESSLALRLVNGGDRCQGRVEVLYRGSWGTVCDDSWDTSDANVVCRQLGCGWATSAPGNARFGQGSGPIVLDDVRCSGYESYLWSCPHNGWLSHNCQHSEDAGVICSAAHSWSTPSPDTLPTITLPASTVGSESSLALRLVNGGDRCQGRVEVLYQGSWGTVCDDSWDTNDANVVCRQLGCGWAMSAPGNARFGQGSGPIVLDDVRCSGHESYLWSCPHNGWLSHNCGHSEDAGVICSASQSRPTPSPDTWPTSHASTAGSESSLALRLVNGGDRCQGRVEVLYRGSWGTVCDDYWDTNDANVVCRQLGCGWAMSAPGNARFGQGSGPIVLDDVRCSGHESYLWSCPHNGWLSHNCGHHEDAGVICSASQSQPTPSPDTWPTSHASTAGSESSLALRLVNGGDRCQGRVEVLYRGSWGTVCDDYWDTNDANVVCRQLGCGWATSAPGNARFGQGSGPIVLDDVRCSGHESYLWSCPHNGWLSHNCGHHEDAGVICSASQSQPTPSPDTWPTSRASTAGSESTLALRLVNGGDRCRGRVEVLYQGSWGTVCDDYWDTNDANVVCRQLGCGWAMSAPGNAQFGQGSGPIVLDDVRCSGHESYLWSCPHNGWLSHNCGHHEDAGVICSAAQSQSTPRPDTWLTTNLPALTVGSESSLALRLVNGGDRCRGRVEVLYRGSWGTVCDDSWDTNDANVVCRQLGCGWAMSAPGNARFGQGSGPIVLDDVRCSGNESYLWSCPHKGWLTHNCGHHEDAGVICSATQINSTTTDWWHPTTTTTARPSSNCGGFLFYASGTFSSPSYPAYYPNNAKCVWEIEVNSGYRINLGFSNLKLEAHHNCSFDYVEIFDGSLNSSLLLGKICNDTRQIFTSSYNRMTIHFRSDISFQNTGFLAWYNSFPSDATLRLVNLNSSYGLCAGRVEIYHGGTWGTVCDDSWTIQEAEVVCRQLGCGRAVSALGNAYFGSGSGPITLDDVECSGTESTLWQCRNRGWFSHNCNHREDAGVICSGNHLSTPAPFLNITRPNTDYSCGGFLSQPSGDFSSPFYPGNYPNNAKCVWDIEVQNNYRVTVIFRDVQLEGGCNYDYIEVFDGPYRSSPLIARVCDGARGSFTSSSNFMSIRFISDHSITRRGFRAEYYSSPSNDSTNLLCLPNHMQASVSRSYLQSLGFSASDLVISTWNGYYECRPQITPNLVIFTIPYSGCGTFKQADNDTIDYSNFLTAAVSGGIIKRRTDLRIHVSCRMLQNTWVDTMYIANDTIHVANNTIQVEEVQYGNFDVNISFYTSSSFLYPVTSRPYYVDLNQDLYVQAEILHSDAVLTLFVDTCVASPYSNDFTSLTYDLIRSGCVRDDTYGPYSSPSLRIARFRFRAFHFLNRFPSVYLRCKMVVCRAYDPSSRCYRGCVLRSKRDVGSYQEKVDVVLGPIQLQTPPRREEEPR

SEQ ID NO: 4285 - protein, 2413 aa, Homo sapiens
MGISTVILEMCLLWGQVLSTGGWIPRTTDYASLIPSEVPLDPTVAEGSPFPSESTLESTVAEGSPISLESTLESTVAEGSLIPSESTLESTVAEGSDSGLALRLVNGDGRCQGRVEILYRGSWGTVCDDSWDTNDANVVCRQLGCGWAMSAPGNAWFGQGSGPIALDDVRCSGHESYLWSCPHNGWLSHNCGHGEDAGVICSAAQPQSTLRPESWPVRISPPVPTEGSESSLALRLVNGGDRCRGRVEVLYRGSWGTVCDDYWDTNDANVVCRQLGCGWAMSAPGNAQFGQGSGPIVLDDVRCSGHESYLWSCPHNGWLTHNCGHSEDAGVICSAPQSRPTPSPDTWPTSHASTAGPESSLALRLVNGGDRCQGRVEVLYRGSWGTVCDDSWDTSDANVVCRQLGCGWATSAPGNARFGQGSGPIVLDDVRCSGYESYLWSCPHNGWLSHNCQHSEDAGVICSAAHSWSTPSPDTLPTITLPASTVGSESSLALRLVNGGDRCQGRVEVLYRGSWGTVCDDSWDTNDANVVCRQLGCGWAMLAPGNARFGQGSGPIVLDDVRCSGNESYLWSCPHNGWLSHNCGHSEDAGVICSGPESSLALRLVNGGDRCQGRVEVLYRGSWGTVCDDSWDTNDANVVCRQLGCGWATSAPGNARFGQGSGPIVLDDVRCSGHESYLWSCPNNGWLSHNCGHHEDAGVICSAAQSRSTPRPDTLSTITLPPSTVGSESSLTLRLVNGSDRCQGRVEVLYRGSWGTVCDDSWDTNDANVVCRQLGCGWATSAPGNARFGQGSGPIVLDDVRCSGHESYLWSCPHNGWLSHNCGHHEDAGVICSVSQSRPTPSPDTWPTSHASTAGPESSLALRLVNGGDRCQGRVEVLYRGSWGTVCDDSWDTSDANVVCRQLGCGWATSAPGNARFGQGSGPIVLDDVRCSGYESYLWSCPHNGWLSHNCQHSEDAGVICSAAHSWSTPSPDTLPTITLPASTVGSESSLALRLVNGGDRCQGRVEVLYQGSWGTVCDDSWDTNDANVVCRQLGCGWAMSAPGNARFGQGSGPIVLDDVRCSGHESYLWSCPHNGWLSHNCGHSEDAGVICSASQSRPTPSPDTWPTSHASTAGSESSLALRLVNGGDRCQGRVEVLYRGSWGTVCDDYWDTNDANVVCRQLGCGWAMSAPGNARFGQGSGPIVLDDVRCSGHESYLWSCPHNGWLSHNCGHHEDAGVICSASQSQPTPSPDTWPTSHASTAGSESSLALRLVNGGDRCQGRVEVLYRGSWGTVCDDYWDTNDANVVCRQLGCGWATSAPGNARFGQGSGPIVLDDVRCSGHESYLWSCPHNGWLSHNCGHHEDAGVICSASQSQPTPSPDTWPTSHASTAGSESSLALRLVNGGDRCQGRVEVLYRGSWGTVCDDYWDTNDANVVCRQLGCGWATSAPGNARFGQGSGPIVLDDVRCSGHESYLWSCPHNGWLSHNCGHHEDAGVICSASQSQPTPSPDTWPTSRASTAGSESTLALRLVNGGDRCRGRVEVLYQGSWGTVCDDYWDTNDANVVCRQLGCGWAMSAPGNAQFGQGSGPIVLDDVRCSGHESYLWSCPHNGWLSHNCGHHEDAGVICSAAQSQSTPRPDTWLTTNLPALTVGSESSLALRLVNGGDRCRGRVEVLYRGSWGTVCDDSWDTNDANVVCRQLGCGWAMSAPGNARFGQGSGPIVLDDVRCSGNESYLWSCPHKGWLTHNCGHHEDAGVICSATQINSTTTDWWHPTTTTTARPSSNCGGFLFYASGTFSSPSYPAYYPNNAKCVWEIEVNSGYRINLGFSNLKLEAHHNCSFDYVEIFDGSLNSSLLLGKICNDTRQIFTSSYNRMTIHFRSDISFQNTGFLAWYNSFPSDATLRLVNLNSSYGLCAGRVEIYHGGTWGTVCDDSWTIQEAEVVCRQLGCGRAVSALGNAYFGSGSGPITLDDVECSGTESTLWQCRNRGWFSHNCNHREDAGVICSGNHLSTPAPFLNITRPNTDYSCGGFLSQPSGDFSSPFYPGNYPNNAKCVWDIEVQNNYRVTVIFRDVQLEGGCNYDYIEVFDGPYRSSPLIARVCDGARGSFTSSSNFMSIRFISDHSITRRGFRAEYYSSPSNDSTNLLCLPNHMQASVSRSYLQSLGFSASDLVISTWNGYYECRPQITPNLVIFTIPYSGCGTFKQADNDTIDYSNFLTAAVSGGIIKRRTDLRIHVSCRMLQNTWVDTMYIANDTIHVANNTIQVEEVQYGNFDVNISFYTSSSFLYPVTSRPYYVDLNQDLYVQAEILHSDAVLTLFVDTCVASPYSNDFTSLTYDLIRSGCVRDDTYGPYSSPSLRIARFRFRAFHFLNRFPSVYLRCKMVVCRAYDPSSRCYRGCVLRSKRDVGSYQEKVDVVLGPIQLQTPPRREEEPR

SEQ ID NO: 4286 - protein, 2403 aa, Homo sapiens
MGISTVILEMCLLWGQVLSTGGWIPRTTDYASLIPSEVPLDPTVAEGSPFPSESTLESTVAEGSPISLESTLESTVAEGSLIPSESTLESTVAEGSDSGLALRLVNGDGRCQGRVEILYRGSWGTVCDDSWDTNDANVVCRQLGCGWAMSAPGNAWFGQGSGPIALDDVRCSGHESYLWSCPHNGWLSHNCGHGEDAGVICSAAQPQSTLRPESWPVRISPPVPTEGSESSLALRLVNGGDRCRGRVEVLYRGSWGTVCDDYWDTNDANVVCRQLGCGWAMSAPGNAQFGQGSGPIVLDDVRCSGHESYLWSCPHNGWLTHNCGHSEDAGVICSAPQSRPTPSPDTWPTSHASTAGPESSLALRLVNGGDRCQGRVEVLYRGSWGTVCDDSWDTSDANVVCRQLGCGWATSAPGNARFGQGSGPIVLDDVRCSGYESYLWSCPHNGWLSHNCQHSEDAGVICSDTLPTITLPASTVGSESSLALRLVNGGDRCQGRVEVLYRGSWGTVCDDSWDTNDANVVCRQLGCGWAMLAPGNARFGQGSGPIVLDDVRCSGNESYLWSCPHNGWLSHNCGHSEDAGVICSGPESSLALRLVNGGDRCQGRVEVLYRGSWGTVCDDSWDTNDANVVCRQLGCGWATSAPGNARFGQGSGPIVLDDVRCSGHESYLWSCPNNGWLSHNCGHHEDAGVICSAAQSRSTPRPDTLSTITLPPSTVGSESSLTLRLVNGSDRCQGRVEVLYRGSWGTVCDDSWDTNDANVVCRQLGCGWATSAPGNARFGQGSGPIVLDDVRCSGHESYLWSCPHNGWLSHNCGHHEDAGVICSVSQSRPTPSPDTWPTSHASTAGPESSLALRLVNGGDRCQGRVEVLYRGSWGTVCDDSWDTSDANVVCRQLGCGWATSAPGNARFGQGSGPIVLDDVRCSGYESYLWSCPHNGWLSHNCQHSEDAGVICSAAHSWSTPSPDTLPTITLPASTVGSESSLALRLVNGGDRCQGRVEVLYQGSWGTVCDDSWDTNDANVVCRQLGCGWAMSAPGNARFGQGSGPIVLDDVRCSGHESYLWSCPHNGWLSHNCGHSEDAGVICSASQSRPTPSPDTWPTSHASTAGSESSLALRLVNGGDRCQGRVEVLYRGSWGTVCDDYWDTNDANVVCRQLGCGWAMSAPGNARFGQGSGPIVLDDVRCSGHESYLWSCPHNGWLSHNCGHHEDAGVICSASQSQPTPSPDTWPTSHASTAGSESSLALRLVNGGDRCQGRVEVLYRGSWGTVCDDYWDTNDANVVCRQLGCGWATSAPGNARFGQGSGPIVLDDVRCSGHESYLWSCPHNGWLSHNCGHHEDAGVICSASQSQPTPSPDTWPTSHASTAGSESSLALRLVNGGDRCQGRVEVLYRGSWGTVCDDYWDTNDANVVCRQLGCGWATSAPGNARFGQGSGPIVLDDVRCSGHESYLWSCPHNGWLSHNCGHHEDAGVICSASQSQPTPSPDTWPTSRASTAGSESTLALRLVNGGDRCRGRVEVLYQGSWGTVCDDYWDTNDANVVCRQLGCGWAMSAPGNAQFGQGSGPIVLDDVRCSGHESYLWSCPHNGWLSHNCGHHEDAGVICSAAQSQSTPRPDTWLTTNLPALTVGSESSLALRLVNGGDRCRGRVEVLYRGSWGTVCDDSWDTNDANVVCRQLGCGWAMSAPGNARFGQGSGPIVLDDVRCSGNESYLWSCPHKGWLTHNCGHHEDAGVICSATQINSTTTDWWHPTTTTTARPSSNCGGFLFYASGTFSSPSYPAYYPNNAKCVWEIEVNSGYRINLGFSNLKLEAHHNCSFDYVEIFDGSLNSSLLLGKICNDTRQIFTSSYNRMTIHFRSDISFQNTGFLAWYNSFPSDATLRLVNLNSSYGLCAGRVEIYHGGTWGTVCDDSWTIQEAEVVCRQLGCGRAVSALGNAYFGSGSGPITLDDVECSGTESTLWQCRNRGWFSHNCNHREDAGVICSGNHLSTPAPFLNITRPNTDYSCGGFLSQPSGDFSSPFYPGNYPNNAKCVWDIEVQNNYRVTVIFRDVQLEGGCNYDYIEVFDGPYRSSPLIARVCDGARGSFTSSSNFMSIRFISDHSITRRGFRAEYYSSPSNDSTNLLCLPNHMQASVSRSYLQSLGFSASDLVISTWNGYYECRPQITPNLVIFTIPYSGCGTFKQADNDTIDYSNFLTAAVSGGIIKRRTDLRIHVSCRMLQNTWVDTMYIANDTIHVANNTIQVEEVQYGNFDVNISFYTSSSFLYPVTSRPYYVDLNQDLYVQAEILHSDAVLTLFVDTCVASPYSNDFTSLTYDLIRSGCVRDDTYGPYSSPSLRIARFRFRAFHFLNRFPSVYLRCKMVVCRAYDPSSRCYRGCVLRSKRDVGSYQEKVDVVLGPIQLQTPPRREEEPR

SEQ ID NO: 4287 - protein, 2542 aa, Homo sapiens
MGISTVILEMCLLWGQVLSTGGWIPRTTDYASLIPSEVPLDPTVAEGSPFPSESTLESTVAEGSPISLESTLESTVAEGSLIPSESTLESTVAEGSDSGLALRLVNGDGRCQGRVEILYRGSWGTVCDDSWDTNDANVVCRQLGCGWAMSAPGNAWFGQGSGPIALDDVRCSGHESYLWSCPHNGWLSHNCGHGEDAGVICSAAQPQSTLRPESWPVRISPPVPTEGSESSLALRLVNGGDRCRGRVEVLYRGSWGTVCDDYWDTNDANVVCRQLGCGWAMSAPGNAQFGQGSGPIVLDDVRCSGHESYLWSCPHNGWLTHNCGHSEDAGVICSAPQSRPTPSPDTWPTSHASTAGPESSLALRLVNGGDRCQGRVEVLYRGSWGTVCDDSWDTSDANVVCRQLGCGWATSAPGNARFGQGSGPIVLDDVRCSGYESYLWSCPHNGWLSHNCQHSEDAGVICSAAHSWSTPSPDTLPTITLPASTVGSESSLALRLVNGGDRCQGRVEVLYRGSWGTVCDDSWDTNDANVVCRQLGCGWAMLAPGNARFGQGSGPIVLDDVRCSGNESYLWSCPHNGWLSHNCGHSEDAGVICSGPESSLALRLVNGGDRCQGRVEVLYRGSWGTVCDDSWDTNDANVVCRQLGCGWATSAPGNARFGQGSGPIVLDDVRCSGHESYLWSCPNNGWLSHNCGHHEDAGVICSAAQSRSTPRPDTLSTITLPPSTVGSESSLTLRLVNGSDRCQGRVEVLYRGSWGTVCDDSWDTNDANVVCRQLGCGWATSAPGNARFGQGSGPIVLDDVRCSGHESYLWSCPHNGWLSHNCGHHEDAGVICSVSQSRPTPSPDTWPTSHASTAGPESSLALRLVNGGDRCQGRVEVLYRGSWGTVCDDSWDTSDANVVCRQLGCGWATSAPGNARFGQGSGPIVLDDVRCSGYESYLWSCPHNGWLSHNCQHSEDAGVICSAAHSWSTPSPDTLPTITLPASTVGSESSLALRLVNGGDRCQGRVEVLYQGSWGTVCDDSWDTNDANVVCRQLGCGWAMSAPGNARFGQGSGPIVLDDVRCSGHESYLWSCPHNGWLSHNCGHSEDAGVICSASQSRPTPSPDTWPTSHASTAGSESSLALRLVNGGDRCQGRVEVLYRGSWGTVCDDYWDTNDANVVCRQLGCGWAMSAPGNARFGQGSGPIVLDDVRCSGHESYLWSCPHNGWLSHNCGHHEDAGVICSASQSQPTPSPDTWPTSHASTAGSESSLALRLVNGGDRCQGRVEVLYRGSWGTVCDDYWDTNDANVVCRQLGCGWATSAPGNARFGQGSGPIVLDDVRCSGHESYLWSCPHNGWLSHNCGHHEDAGVICSASQSQPTPSPDTWPTSHASTAGSESSLALRLVNGGDRCQGRVEVLYRGSWGTVCDDYWDTNDANVVCRQLGCGWATSAPGNARFGQGSGPIVLDDVRCSGHESYLWSCPHNGWLSHNCGHHEDAGVICSASQSQPTPSPDTWPTSHASTAGSESSLALRLVNGGDRCQGRVEVLYRGSWGTVCDDYWDTNDANVVCRQLGCGWATSAPGNARFGQGSGPIVLDDVRCSGHESYLWSCPHNGWLSHNCGHHEDAGVICSASQSQPTPSPDTWPTSRASTAGSESTLALRLVNGGDRCRGRVEVLYQGSWGTVCDDYWDTNDANVVCRQLGCGWAMSAPGNAQFGQGSGPIVLDDVRCSGHESYLWSCPHNGWLSHNCGHHEDAGVICSAAQSQSTPRPDTWLTTNLPALTVGSESSLALRLVNGGDRCRGRVEVLYRGSWGTVCDDSWDTNDANVVCRQLGCGWAMSAPGNARFGQGSGPIVLDDVRCSGNESYLWSCPHKGWLTHNCGHHEDAGVICSATQINSTTTDWWHPTTTTTARPSSNCGGFLFYASGTFSSPSYPAYYPNNAKCVWEIEVNSGYRINLGFSNLKLEAHHNCSFDYVEIFDGSLNSSLLLGKICNDTRQIFTSSYNRMTIHFRSDISFQNTGFLAWYNSFPSDATLRLVNLNSSYGLCAGRVEIYHGGTWGTVCDDSWTIQEAEVVCRQLGCGRAVSALGNAYFGSGSGPITLDDVECSGTESTLWQCRNRGWFSHNCNHREDAGVICSGNHLSTPAPFLNITRPNTDYSCGGFLSQPSGDFSSPFYPGNYPNNAKCVWDIEVQNNYRVTVIFRDVQLEGGCNYDYIEVFDGPYRSSPLIARVCDGARGSFTSSSNFMSIRFISDHSITRRGFRAEYYSSPSNDSTNLLCLPNHMQASVSRSYLQSLGFSASDLVISTWNGYYECRPQITPNLVIFTIPYSGCGTFKQADNDTIDYSNFLTAAVSGGIIKRRTDLRIHVSCRMLQNTWVDTMYIANDTIHVANNTIQVEEVQYGNFDVNISFYTSSSFLYPVTSRPYYVDLNQDLYVQAEILHSDAVLTLFVDTCVASPYSNDFTSLTYDLIRSGCVRDDTYGPYSSPSLRIARFRFRAFHFLNRFPSVYLRCKMVVCRAYDPSSRCYRGCVLRSKRDVGSYQEKVDVVLGPIQLQTPPRREEEPR

SEQ ID NO: 4288 - protein, 1785 aa, Homo sapiens; identical to SEQ ID NO: 4284

SEQ ID NO: 4289 - protein, 2403 aa, Homo sapiens; identical to SEQ ID NO: 4286

SEQ ID NO: 4290 - protein, 2413 aa, Homo sapiens; identical to SEQ ID NO: 4285

SEQ ID NO: 4291 - protein, 33 aa, Homo sapiens
MFNFDTFWKNFKSKLGFINWDAINKDQRSSRIP

SEQ ID NO: 4292 - protein, 33 aa, Homo sapiens; identical to SEQ ID NO: 4291

SEQ ID NO: 4293 - protein, 95 aa, Homo sapiens
MFNFDTFWKNFKSKLGFINWDAINKNQVPPPSTRALLYFSRLWEDFKQNTPFLNWKAIIEGADASSLQKRAGRDDQNYNYNQHAYPTAYGGKYSV

SEQ ID NO: 4294 - protein, 123 aa, Homo sapiens
MFNFDTFWKNFKSKLGFINWDAINKNQVPPPSTRALLYFSRLWEDFKQNTPFLNWKAIIEGADASSLQKRAGRDDQNYNYNQHAYPTAYGGKYSVKTPAKGGVSPSSSASRVQPGLLQWVKFW

SEQ ID NO: 4295 - protein, 123 aa, Homo sapiens; identical to SEQ ID NO: 4294

SEQ ID NO: 4296 - protein, 476 aa, Homo sapiens
MKFQGPLACLLLALCLGSGEAGPLQSGEESTGTNIGEALGHGLGDALSEGVGKAIGKEAGGAAGSKVSEALGQGTREAVGTGVRQVPGFGVADALGNRVGEAAHALGNTGHEIGRQAEDVIRHGADAVRGSWQGVPGHNGAWETSGGHGIFGSQGGLGGQGQGNPGGLGTPWVHGYPGNSAGSFGMNPQGAPWGQGGNGGPPNFGTNTQGAVAQPGYGSVRASNQNEGCTNPPPSGSGGGSSNSGGGSGSQSGSSGSGSNGDNNNGSSSGGSSSGSSSGGSSGGSSGGSSGNSGGSRGDSGSESSWGSSTGSSSGNHGGSGGGNGHKPGCEKPGNEARGSGESGIQNSETSPGMFNFDTFWKNFKSKLGFINWDAINKNQVPPPSTRALLYFSRLWEDFKQNTPFLNWKAIIEGADASSLQKRAGRDDQNYNYNQHAYPTAYGGKYSVKTPAKGGVSPSSSASRVQPGLLQWVKFW

SEQ ID NO: 4297 - protein, 386 aa, Homo sapiens
MKFQGPLACLLLALCLGSGEAGPLQSGEESTGTNIGEALGHGLGDALSEGVGKAIGKEAGGAAGSKVSEALGQGTREAVGTGVRQVPGFGVADALGNRVGEAAHALGNTGHEIGRQAEDVIRHGADAVRGSWQGVPGHNGAWETSGGHGIFGSQGGLGGQGQGNPGGLGTPWVHGYPGNSAGSFGMNPQGAPWGQGGNGGPPNFGTNTQGAVAQPGYGSVRASNQNEGCTNPPPSGSGGGSSNSGGGSGSQSGSSGSGSNGDNNNGSSSGGSSSGSSSGGSSGGSSGGSSGNSGGSRGDSGSESSWGSSTGSSSGNHGGSGGGNGHKPGCEKPGNEARGSGESGIQNSETSPGMFNFDTFWKNFKSKLGFINWDAINKDQRSSRIP

SEQ ID NO: 4298 - protein, 436 aa, Homo sapiens
MKFQGPLACLLLALCLGSGEAGPLQSGEESTGTNIGEALGHGLGDALSEGVGKAIGKEAGGAAGSKVSEALGQGTREAVGTGVRQVPGFGVADALGNRVGEAAHALGNTGHEIGRQAEDVIRHGADAVRGSWQGVPGHNGAWETSGGHGIFGSQGGLGGQGQGNPGGLGTPWVHGYPGNSAGSFGMNPQGAPWGQGGNGGPPNFGTNTQGAVAQPGYGSVRASNQNEGCTNPPPSGSGGGSSNSGGGSGSQSGSSGSGSNGDNNNGSSSGGSSSGSSSGGSSGGSSGGSSGNSGGSRGDSGSESSWGSSTGSSSGNHGGSGGGNGHKPGCEKPGNEARGSGESGIQGFRGQGVSSNMREISKEGNRLLGGSGDNYRGQGSSWGSGGGDAVGGVNTVNSETSPGMFNFDTFWKNFKSKLGFINWDAINKDQRSSRIP

SEQ ID NO: 4299 - protein, 398 aa, Homo sapiens
MKFQGPLACLLLALCLGSGEAGPLQSGEESTGTNIGEALGHGLGDALSEGVGKAIGKEAGGAAGSKVSEALGQGTREAVGTGVRQVPGFGVADALGNRVGEAAHALGNTGHEIGRQAEDVIRHGADAVRGSWQGVPGHNGAWETSGGHGIFGSQGGLGGQGQGNPGGLGTPWVHGYPGNSAGSFGMNPQGAPWGQGGNGGPPNFGTNTQGAVAQPGYGSVRASNQNEGCTNPPPSGSGGGSSNSGGGSGSQSGSSGSGSNGDNNNGSSSGGSSSGSSSGGSSGGSSGGSSGNSGGSRGDSGSESSWGSSTGSSSGNHGGSGGGNGHKPGCEKPGNEARGSGESGIQGFRGQGVSSNMRNSETSPGMFNFDTFWKNFKSKLGFINWDAINKDQRSSRIP

SEQ ID NO: 4300 - protein, 369 aa, Homo sapiens
MKFQGPLACLLLALCLGSGEAGPLQSGEESTGTNIGEALGHGLGDALSEGVGKAIGKEAGGAAGSKVSEALGQGTREAVGTGVRQVPGFGVADALGNRVGEAAHALGNTGHEIGRQAEDVIRHGADAVRGSWQGVPGHNGAWETSGGHGIFGSQGGLGGQGQGNPGGLGTPWVHGYPGNSAGSFGMNPQGAPWGQGGNGGPPNFGTNTQGAVAQPGYGSVRASNQNEGCTNPPPSGSGGGSSNSGGGSGSQSGSSGSGSNGDNNNGSSSGGSSSGSSSGGSSGGSSGGSSGNSGGSRGDSGSESSWGSSTGSSSGNHGGSGGGNGHKPGNSETSPGMFNFDTFWKNFKSKLGFINWDAINKDQRSSRIP

SEQ ID NO: 4301 - protein, 449 aa, Homo sapiens
MKFQGPLACLLLALCLGSGEAGPLQSGEESTGTNIGEALGHGLGDALSEGVGKAIGKEAGGAAGSKVSEALGQGTREAVGTGVRQVPGFGVADALGNRVGEAAHALGNTGHEIGRQAEDVIRHGADAVRGSWQGVPGHNGAWETSGGHGIFGSQGGLGGQGQGNPGGLGTPWVHGYPGNSAGSFGMNPQGAPWGQGGNGGPPNFGTNTQGAVAQPGYGSVRASNQNEGCTNPPPSGSGGGSSNSGGSSTGSSSGNHGGSGGGNGHKPGCEKPGNEARGSGESGIQGQGSSWGSGGGDAVGGVNTVNSETSPGMFNFDTFWKNFKSKLGFINWDAINKNQVPPPSTRALLYFSRLWEDFKQNTPFLNWKAIIEGADASSLQKRAGRDDQPGAGWQEVAAVTSKNYNYNQHAYPTAYGGKYSVKTPAKGGVSPSSSASRVQPGLLQWVKFW

SEQ ID NO: 4302 - protein, 465 aa, Homo sapiens
MKFQGPLACLLLALCLGSGEAGPLQSGEESTGTNIGEALGHGLGDALSEGVGKAIGKEAGGAAGSKVSEALGQGTREAVGTGVRQVPGFGVADALGNRVGEAAHALGNTGHEIGRQAEDVIRHGADAVRGSWQGVPGHNGAWETSGGHGIFGSQGGLGGQGQGNPGGLGTPWVHGYPGNSAGSFGMNPQGAPWGQGGNGGPPNFGTNTQGAVAQPGYGSVRASNQNEGCTNPPPSGSGGGSSNSGGSSTGSSSGNHGGSGGGNGHKPGCEKPGNEARGSGESGIQGFRGQGVSSNMREISKEGNRLLGGSGDNYRGQGSSWGSGGGDAVGGVNTVNSETSPGMFNFDTFWKNFKSKLGFINWDAINKNQVPPPSTRALLYFSRLWEDFKQNTPFLNWKAIIEGADASSLQKRAGRDDQNYNYNQHAYPTAYGGKYSVKTPAKGGVSPSSSASRVQPGLLQWVKFW

SEQ ID NO: 4303 - protein, 36 aa, Homo sapiens
MLGITSCSDQQAKEGEGIQHRLLLRQPRWERRRKWT

SEQ ID NO: 4304 - protein, 36 aa, Homo sapiens; identical to SEQ ID NO: 4303

SEQ ID NO: 4305 - protein, 36 aa, Homo sapiens; identical to SEQ ID NO: 4303

SEQ ID NO: 4306 - protein, 36 aa, Homo sapiens; identical to SEQ ID NO: 4303

SEQ ID NO: 4307 - protein, 36 aa, Homo sapiens; identical to SEQ ID NO: 4303

SEQ ID NO: 4308 - protein, 36 aa, Homo sapiens; identical to SEQ ID NO: 4303

SEQ ID NO: 4309 - protein, 36 aa, Homo sapiens; identical to SEQ ID NO: 4303

SEQ ID NO: 4310 - protein, 36 aa, Homo sapiens; identical to SEQ ID NO: 4303

SEQ ID NO: 4311 - protein, 36 aa, Homo sapiens; identical to SEQ ID NO: 4303

SEQ ID NO: 4312 - protein, 36 aa, Homo sapiens; identical to SEQ ID NO: 4303

SEQ ID NO: 4313 - protein, 36 aa, Homo sapiens; identical to SEQ ID NO: 4303

SEQ ID NO: 4314 - protein, 36 aa, Homo sapiens; identical to SEQ ID NO: 4303

SEQ ID NO: 4315 - protein, 36 aa, Homo sapiens; identical to SEQ ID NO: 4303

SEQ ID NO: 4316 - protein, 36 aa, Homo sapiens; identical to SEQ ID NO: 4303

SEQ ID NO: 4317 - protein, 36 aa, Homo sapiens; identical to SEQ ID NO: 4303

SEQ ID NO: 4318 - protein, 36 aa, Homo sapiens; identical to SEQ ID NO: 4303

SEQ ID NO: 4319 - protein, 36 aa, Homo sapiens; identical to SEQ ID NO: 4303

SEQ ID NO: 4320 - protein, 253 aa, Homo sapiens
MLGITSCSDQQAKEGEGLEGSSTGSSSGNHGGSGGGNGHKPGCEKPGNEARGSGESGIQGFRGQGVSSNMREISKEGNRLLGGSGDNYRGQGSSWGSGGGDAVGGVNTVNSETSPGMFNFDTFWKNFKSKLGFINWDAINKNQVPPPSTRALLYFSRLWEDFKQNTPFLNWKAIIEGADASSLQKRAGRDDQPGAGWQEVAAVTSKNYNYNQHAYPTAYGGKYSVKTPAKGGVSPSSSASRVQPGLLQWVKFW

SEQ ID NO: 4321 - protein, 131 aa, Homo sapiens
MLGITSCSDQQAKEGEGLEGSSTGSSSGNHGGSGGGNGHKPGCEKPGNEARGSGESGIQGFRGQGVSSNMRGQGSSWGSGGGDAVGGVNTVNSETSPGMFNFDTFWKNFKSKLGFINWDAINKDQRSSRIP

SEQ ID NO: 4322 - protein, 201 aa, Homo sapiens
MLGITSCSDQQAKEGEGLEGSSTGSSSGNHGGSGGGNGHKPGCEKPGNEARGSGESGIQGFRGQGVSSNMRNSETSPGMFNFDTFWKNFKSKLGFINWDAINKNQVPPPSTRALLYFSRLWEDFKQNTPFLNWKAIIEGADASSLQKRAGRDDQNYNYNQHAYPTAYGGKYSVKTPAKGGVSPSSSASRVQPGLLQWVKFW

SEQ ID NO: 4323 - protein, 116 aa, Homo sapiens
MLGITSCSDQQAKEGEGLEGSSTGSSSGNHGGSGGGNGHKPGCEKPGNEARGSGESGIQGQGSSWGSGGGDAVGGVNTVNSETSPGMFNFDTFWKNFKSKLGFINWDAINKDQRSS

SEQ ID NO: 4324 - protein, 184 aa, Homo sapiens
MLGITSCSDQQAKEGEGLEGSSTGSSSGNHGGSGGGNGHKPGCEKPGNEARGSGESGIQNSETSPGMFNFDTFWKNFKSKLGFINWDAINKDFKQNTPFLNWKAIIEGADASSLQKRAGRDDQPGAGWQEVAAVTSKNYNYNQHAYPTAYGGKYSVKTPAKGGVSPSSSASRVQPGLLQWVKFW

SEQ ID NO: 4325 - protein, 99 aa, Homo sapiens
MLGITSCSDQQAKEGEGLEGSSTGSSSGNHGGSGGGNGHKPGCEKPGNEARGSGESGIQNSETSPGMFNFDTFWKNFKSKLGFINWDAINKDQRSSRIP

SEQ ID NO: 4326 - protein, 189 aa, Homo sapiens
MLGITSCSDQQAKEGEGLEGSSTGSSSGNHGGSGGGNGHKPGCEKPGNEARGSGESGIQNSETSPGMFNFDTFWKNFKSKLGFINWDAINKNQVPPPSTRALLYFSRLWEDFKQNTPFLNWKAIIEGADASSLQKRAGRDDQNYNYNQHAYPTAYGGKYSVKTPAKGGVSPSSSASRVQPGLLQWVKFW

SEQ ID NO: 4327 - protein, 203 aa, Homo sapiens
MLGITSCSDQQAKEGEGLEGSSTGSSSGNHGGSGGGNGHKPGCEKPGNEARGSGESGIQNSETSPGMFNFDTFWKNFKSKLGFINWDAINKNQVPPPSTRALLYFSRLWEDFKQNTPFLNWKAIIEGADASSLQKRAGRDDQPGAGWQEVAAVTSKNYNYNQHAYPTAYGGKYSVKTPAKGGVSPSSSASRVQPGLLQWVKFW

SEQ ID NO: 4328 - protein, 203 aa, Homo sapiens; identical to SEQ ID NO: 4327

SEQ ID NO: 4329 - protein, 82 aa, Homo sapiens
MLGITSCSDQQAKEGEGLEGSSTGSSSGNHGGSGGGNGHKPGNSETSPGMFNFDTFWKNFKSKLGFINWDAINKDQRSSRIP

SEQ ID NO: 4330 - protein, 172 aa, Homo sapiens
MLGITSCSDQQAKEGEGLEGSSTGSSSGNHGGSGGGNGHKPGNSETSPGMFNFDTFWKNFKSKLGFINWDAINKNQVPPPSTRALLYFSRLWEDFKQNTPFLNWKAIIEGADASSLQKRAGRDDQNYNYNQHAYPTAYGGKYSVKTPAKGGVSPSSSASRVQPGLLQWVKFW

SEQ ID NO: 4331 - protein, 90 aa, Homo sapiens
MNMKPATASALLLLLLGLAWTQGSHGWGADASSLQKRAGRDDQNYNYNQHAYPTAYGGKYSVKTPAKGGVSPSSSASRVQPGLLQWVKFW

SEQ ID NO: 4332 - protein, 36 aa, Homo sapiens
SGNHGGSGGGNGHKPGISRLWLTKWVLLSSHISLVP

SEQ ID NO: 4333 - protein, 152 aa, Homo sapiens
SSTGSSSGNHGGSGGGNGHKPGNSETSPGMFNFDTFWKNFKSKLGFINWDAINKNQVPPPSTRALLYFSRLWEDFKQNTPFLNWKAIIEGADASSLQKRAGRDDQNYNYNQHAYPTAYGGKYSVKTPAKGGVSPSSSASRVQPGLLQWVKFW

SEQ ID NO: 4334 - protein, 74 aa, Homo sapiens
  VARIANT 1: note = misc_feature - Xaa can be any naturally occurring amino acid
XALLLLLLGLAWTQGSHGWGADASSLQKRAGRDDQNYNYNQHAYPTAYGGKYSVKTPAKASRVQPGLLQWVKFW

SEQ ID NO: 4335 - protein, 201 aa, Homo sapiens
  VARIANT 1: note = misc_feature - Xaa can be any naturally occurring amino acid
XGGGNGHKPGCEKPGNEARGSGESGIQGFRGQGVSSNMREISKEGNRLLGGSGDNYRNSETSPGMFNFDTFWKNFKSKLGFINWDAINKNQVPPPSTRALLYFSRLWEDFKQNTPFLNWKAIIEGADASSLQKRAGRDDQPGAGWQEVAAVTSKNYNYNQHAYPTAYGGKYSVKTPAKGGVSPSSSASRVQPGLLQWVKFW

SEQ ID NO: 4336 - protein, 109 aa, Homo sapiens
  VARIANT 1: note = misc_feature - Xaa can be any naturally occurring amino acid
XPATASALLLLLLGLAWTQGSHGWVGTAGCTGCGRVITAETCRQRRSELQLQPACVSHCLWWEVLSQDPCKGGSLTFFLGFPGATWPAAVGEVLVGNFLQPPPRPRKAL

SEQ ID NO: 4337 - protein, 96 aa, Homo sapiens
  VARIANT 1: note = misc_feature - Xaa can be any naturally occurring amino acid
XPPPSTRALLYFSRLWEDFKQNTPFLNWKAIIEGADASSLQKRAGRDDQNYNYNQHAYPTAYGGKYSVKTPAKGGVSPSSSASRVQPGLLQWVKFW

SEQ ID NO: 4338 - protein, 497 aa, Homo sapiens
MKISILLMFLWGLSCALPVTRYQNNESEDSEEWKGHLAQAPTPPLANEDPSDSTQSEEGLGSDDHQYIYRLAGGFSRSTGKGGDDKDDDEDDSGDDTFGDDDSGPGPKDRQEGGNSRLGSDEDSDDTIQASEESAPQGQDSAQDTTSESRELDNEDRVDSKPEGGDSTQESESEEHWVGGGSDGESSHGDGSELDDEGMQSDDPESIRSERGNSRMNSAGMKSKESGENSEQANTQDSGGSQLLEHPSRKIFRKSRISEEDDRSELDDNNTMEEVKSDSTENSNSRDTGLSQPRRDSKGDSQEDSKENLSQEESQNVDGPSSESSQEANLSSQENSSESQEEVVSESRGDNPDPTTSYVEDQEDSDSSEEDSSHTLSHSKSESREEQADSESSESLNFSEESPESPEDENSSSQEGLQSHSSSAESQSEESHSEEDDSDSQDSSRSKEDSNSTESKSSSEEDGQLKNIEIESRKLTVDAYHNKPIGDQDDNDCQDGY

SEQ ID NO: 4339 - protein, 513 aa, Homo sapiens
MKISILLMFLWGLSCALPVTRYQNNESEDSEEWKGHLAQAPTPPLESSESSEGSKVSSEEQANEDPSDSTQSEEGLGSDDHQYIYRLAGGFSRSTGKGGDDKDDDEDDSGDDTFGDDDSGPGPKDRQEGGNSRLGSDEDSDDTIQASEESAPQGQDSAQDTTSESRELDNEDRVDSKPEGGDSTQESESEEHWVGGGSDGESSHGDGSELDDEGMQSDDPESIRSERGNSRMNSAGMKSKESGENSEQANTQDSGGSQLLEHPSRKIFRKSRISEEDDRSELDDNNTMEEVKSDSTENSNSRDTGLSQPRRDSKGDSQEDSKENLSQEESQNVDGPSSESSQEANLSSQENSSESQEEVVSESRGDNPDPTTSYVEDQEDSDSSEEDSSHTLSHSKSESREEQADSESSESLNFSEESPESPEDENSSSQEGLQSHSSSAESQSEESHSEEDDSDSQDSSRSKEDSNSTESKSSSEEDGQLKNIEIESRKLTVDAYHNKPIGDQDDNDCQDGY

SEQ ID NO: 4340 - protein, 542 aa, Homo sapiens
MELRSELPSVPGAATAAAATATGPPVASVASVAAAAAAAASLPVSVAGGLLRGPPLLLRAAEKYPRTPKCARCRNHGVVSALKGHKRYCRWKDCLCAKCTLIAERQRVMAAQVALRRQQAQEENEARELQLLYGTAEGLALAAANGIIPPRPAYEVFGSVCAADGGGPGAGAPAGTGGGAAGAGGSEAKLQKFDLFPKTLLQAGRPGSPLPPPVKPLSPDGADSGPGTSSPEVRPGSGSENGDGESFSGSPLARASKEAGGSCPGSAGPGGGGEEDSPGSASPLGSESGSEADKEEGEAAPAPGLGGGSGPRQRTPLDILTRVFPGHRRGVLELVLQGCGGDVVQAIEQVLNHHRGGLAAGLGPAAPPDKAAVGAAAAADDAWPSRVDAAAAAAAAAGGPGLPAPLQAGPAAPPHHRPLLAGAMAPGALGSLSSRSAFSPLQPNASHFGADAGAYPLGAPLGLSPLRLAYSAAAAHSRGLAFMAPYSTAGLVPTLGFRPPMDYAFSDLMRDRSAAAAAAVHKEPTYGGGLYGPMVNGAPEKQ

SEQ ID NO: 4341 - protein, 542 aa, Homo sapiens; identical to SEQ ID NO: 4340

SEQ ID NO: 4342 - protein, 855 aa, Homo sapiens
MAALGVAEAVAAPHPAEGAETAEAVELSRALSRLLPGLEADSKPGRRRALEALRRALEEPGPAADPTAFQGPWARLLLPRLLRCLSDPAEGCRALAVHLLDLGLRRAARPRDALPRLLPALAARLAGPVPARRPPEACEELRLALVQLLGLAVDLCGAALAPHLDDALRALRCSLLDPFAAVRRESCSCAAALAQATPDHFHMQSESLIGPLMQTISHQHWKVRVAAIEATGAVIHFGNGKSVDDVLSHFAQRLFDDVPQVRRAVASVVGGWLLCLRDRYSFFHKLIPLLLSSLNDEVPEVRQLAASLWEDVGLQWQKENEEDLKDKLDFAPPTPPHYPPHERRPVLGCRELVFRNLSKILPALCHDITDWVVGTRVKSAQLLPVLLLHAEDHATQHLEVVLRTLFQACTDEEAAVVQSCTRSAELVGTFVSPEVFLKLILSTLKKTPSASGLLVLASAMRGCPREALQPHLAAIATELAQAHICQASENDLYLERLLLCVQALVSVCHEDCGVASLQLLDVLLTIVALAGATGLRDKAQETMDSLAMVEGVSSCQDLYRKHIGPLLERVTASHLDWTAHSPELLQFSVIVAQSGPALGEALPHVVPTLRACLQPSQDPQMRLKLFSILSTVLLRATDTINSQGQFPSYLETVTKDILAPNLQWHAGRTAAAIRTAAVSCLWALTSSEVLSAEQIRDVQETLMPQVLTTLEEDSKMTRLISCRIINTFLKTSGGMTDPEKLIRIYPELLKRLDDVSNDVRMAAASTLVTWLQCVKGANAKSYYQSSVQYLYRELLVHLDDPERAIQDAILEVLKEGSGLFPDLLVRETEAVIHKHRSATYCEQLLQHVQAVPATQ

SEQ ID NO: 4343 - protein, 280 aa, Homo sapiens
MTGGAREKAHIARSPATAQGPALGEALPHVVPTLRACLQPSQDPQMRLKLFSILSTVLLRATDTINSQGQFPSYLETVTKDILAPNLQWHAGRTAAAIRTAAVSCLWALTSSEVLSAEQIRDVQETLMPQVLTTLEEDSKMTRLISCRIINTFLKTSGGMTDPEKLIRIYPELLKRLDDVSNDVRMAAASTLVTWLQCVKGANAKSYYQSSVQYLYRELLVHLDDPERAIQDAILEVLKEGSGLFPDLLVRETEAVIHKHRSATYCEQLLQHVQAVPATQ

SEQ ID NO: 4344 - protein, 196 aa, Homo sapiens
  VARIANT 1: note = misc_feature - Xaa can be any naturally occurring amino acid
XLCARCAAPCSTPSPPCAARAAAAPPPWRRPRPVRRAVASVVGGWLLCLRDRYSFFHKLIPLLLSSLNDEVPEVRQLAASLWEDVGLQWQKENEEDLKDKLDFAPPTPPHYPPHERRPVLGCRELVFRNLSKILPALCHDITDWVVGTRVKSAQLLPVLLLHAEDHATQHLEVVLRTLFQACTDEEAAVVQSCTRS

SEQ ID NO: 4345 - protein, 657 aa, Homo sapiens
  VARIANT 1: note = misc_feature - Xaa can be any naturally occurring amino acid
XSPPCAARAAAAPPPWRRPRPHWKVRVAAIEATGAVIHFGNGKSVDDVLSHFAQRLFDDVPQVRRAVASVVGGWLLCLRDRYSFFHKLIPLLLSSLNDEVPEVRQLAASLWEDVGLQWQKENEEDLKDKLDFAPPTPPHYPPHERRPVLGCRELVFRNLSKILPALCHDITDWVVGTRVKSAQLLPVLLLHAEDHATQHLEVVLRTLFQACTDEEAAVVQSCTRSAELVGTFVSPEVFLKLILSTLKKTPSASGLLVLASAMRGCPREALQPHLAAIATELAQAHICQASENDLYLERLLLCVQALVSVCHEDCGVASLQLLDVLLTIVALAGATGLRDKAQETMDSLAMVEGVSSCQDLYRKHIGPLLERVTASHLDWTAHSPELLQFSVIVAQSGPALGEALPHVVPTLRACLQPSQDPQMRLKLFSILSTVLLRATDTINSQGQFPSYLETVTKDILAPNLQWHAGRTAAAIRTAAVSCLWALTSSEVLSAEQIRDVQETLMPQVLTTLEEDSKMTRLISCRIINTFLKTSGGMTDPEKLIRIYPELLKRLDDVSNDVRMAAASTLVTWLQCVKGANAKSYYQSSVQYLYRELLVHLDDPERAIQDAILEVLKEGSGLFPDLLVRETEAVIHKHRSATYCEQLLQHVQAVPATQ

SEQ ID NO: 4346 - protein, 68 aa, Homo sapiens
AEGEGLVLPKKIRVRSAVEQWLVNVEKSMFDVLKKFLSQGIEDWNCQMFSQWVLSHPGQVVLTVTFAI

SEQ ID NO: 4347 - protein, 130 aa, Homo sapiens
DYLEVKRLIFPRFYFLSNAELLDILADSRNPESVQPHLVKCFENIKQLLIWKQDIGPPAVKMLISAEGEGLVLPKYDKCYKLFRFCTTSLFKISALKFLIYYKSALSKLFLQRLYPYVNILLPFHIPYNT

SEQ ID NO: 4348 - protein, 430 aa, Homo sapiens
METFIPIDLTTENQEMDKEETKTKPRLLRYEEKKYEDVKPLETQPAEIAEKETLEYKTVRTFSESLKSEKTEDYLRESIIQQHMVSPEPASLKEKGKSRRKKDQTHACPNVRKARPVSYDRTEPKDDDVIRNIIRLREKLGWQTILPQHSLKYGSSKIAIQKITLKKPLEDDGEFVYCLPRKSPKSLYNPYDLQVINIVGSVKEVELIPTLEWLSERRHYYLLRQFKIFSDFRMNKAFVTWKLNVKRIKTEKSRSFLYHHLFLADDLFQTCLVYIRGLCEDAINLKNYNDHENNLSAICLVKLDSSRTYSLDEFCEEQLQQATQALKQLEDIRNKAISEMKSTFLKVAEKNEIKEYFESKLSEDDTTHFKLPKYRRLLETFFKFVMLVDYIFQELIRQLMNTAVTLLLELFNGSAGMPFSVEKKNENLIR

SEQ ID NO: 4349 - protein, 228 aa, Homo sapiens
METFIPIDLTTENQEMDKEETKTKPRLLRYEEKKYEDVKPLETQPAEIAEKETLEYKTVRTFSESLKSEKTEDYLRESIIQQHMVSPEPASLKEKGKSRRKKDQTHACPNVRKARPVSYDRTEPKDDDVIRNIIRLREKLGWQTILPQHSLKYGSSKIAIQKITLKKPLEDDGEFVYCLPRKSPKSLYNPYDLQVVSAHTAKHCKEFWVITASFISKRYLVICGAVYI

SEQ ID NO: 4350 - protein, 228 aa, Homo sapiens; identical to SEQ ID NO: 4349

SEQ ID NO: 4351 - protein, 4515 aa, Homo sapiens
METFIPIDLTTENQEMDKEETKTKPRLLRYEEKKYEDVKPLETQPAEIAEKETLEYKTVRTFSESLKSEKTEDYLRESIIQQHMVSPEPASLKEKGKSRRKKDQTHACPNVRKARPVSYDRTEPKDDDVIRNIIRLREKLGWQTILPQHSLKYGSSKIAIQKITLKKPLEDDGEFVYCLPRKSPKSLYNPYDLQVVSAHTAKHCKEFWVITASFISKVINIVGSVKEVELIPTLEWLSERRHYYLLRQFKIFSDFRMNKAFVTWKLNVKRIKTEKSRSFLYHHLFLADDLFQTCLVYIRGLCEDAINLKNYNDHENNLSAICLVKLDSSRTYSLDEFCEEQLQQATQALKQLEDIRNKAISEMKSTFLKVAEKNEIKEYFESKLSEDDTTHFKLPKYRRLLETFFKFVMLVDYIFQELIRQLMNTAVTLLLELFNGSAGMPFSVEKKNENLIRTFKDNSFPTGKTTNDCEELVDNSKLHAISVQKSEVKTDTDINEILNSVEVGKDLRKTYAPIFEVNLCLRIPAESDSSENSKENFHESDQCPEECVMFEDEMSENKDNCVKKHSSEELLPKAKKSKEISYNLEDIISDTEIETEFENKYMYYEFPEFPTNLFIDPNRLEFSVKIQNMLTNMEKCITTITPLCQDPQLSIFIDLVSIMDLPNKTGSIIHYKEQTRWPDCHILFETDPAYQNIIVNLLTIIGNSMGLVNAYSHKFIKYCTMTEKAKIMSMKISSMGELTSKEFEAILNRFRNYFRHIVNMAIEKRIGIFNVVSLDYQSECLLYIDNVIHMSHTLIQSVIEKKNKNLLEVVESSLQQLECDPTEIEEFLEHFIFLNAISSKISKLEKEFLTMSQLYSVAKHHQIHISEEQIAIFQVLLLKFSQLKSSMKLSKINKDTAITKFRDNLEACISGLHVDVGNLKAKIRTPLLLCAGTQVSTAMEMIQTLSGEAASLTNKAKAYSHYQDCFSDSQSHMHSVNVEEITQIVLSEISDIEGDLTLRKKLWEAQEEWKRASWEWRNSSLQSIDVESVQRNVSKLMHIISVLEKGLPKSDMVTHLKQVVTEFKQELPIIIALGNPCLKPRHWEALQEIIGKSVPLDKNCKVENLLALKMFQYENEINDMSTSATNEAALEKMLFKIIDFWNTTPLPLILHHTEIYSIFIIPSIDDISAQLEESQVILATIKGSPHIGPIKDLVNEWDQNLTLFSYTLEEWMNCQRNWLYLEPVFHSSEIRRQLPAETELFSQVISMWKKIMSKIQNKQNALQITTSAGVLEILQNCNIHLEHIKKSLEDYLEVKRLIFPRFYFLSNAELLDILADSRNPESVQPHLVKCFENIKQLLIWKQDIGPPAVKMLISAEGEGLVLPKKIRVRSAVEQWLVNVEKSMFDVLKKERYIYNIILLFQSQIMFYNDCVKSFVSSYSREKLEKVHAGLMCHLEEVADLVVLDTSNSRTKAILGALLILYVHCRDIVINLLLKNIFNAEDFEWTRHLQYKWNEKQKLCYVSQGNASFTYGYEYLGCTSRLVITPLTDRCWLTLMEALHLNLGGCPAGPAGTGKTETVKDLAKSLGKHCVVFNCFEDLDYKIVRKFFFGLVQSGAWSCFDEFNLIDLEVLSVIASQILTIKAAKDNYSARFVLEGKEIRINMSCAVFITMNPRYGGGVELPDNLKSLFRPVAMMVPHYQMIAEIILFSFGFKSANSLSGKLTNLYELARKQLSQQDHYNFGLRSLKIVLIMAGTKKREFKCLSEADETLIVIEAIREASLPKCPPEDVPLFENIIGDIFPEVTVLKVNQLALEKVIYTATQQLGLQNWSSQKEKIIQFYNQLQVCVGVMLVGPTGGGKTTVRRILEKALTLLPIADFLSVAERKSASKISERKGKVDICVLNPKCVTLSELYGQLDPNTMEWTDGLLSATIRSYVYFNTPKNTKKDIDLRLKSRISDLSNVFKLDSSDTTETDDNIFEEIEKVVKIPENHNFDWQWIILDGPVDTFWVENLNSVLDDTRTLCLANSERIALTNKIRVIFEVDNLSQASPATVSRCAMVYMDPVDLGWEPYVKSWLLKTSKIISQSGVDCLEFMIKNSVTDGLQFIRNRQKFQPYPMEDITVVITLCRILDAFFDFMGKNGGFEQSDDLNDTSSKEANSQRESVTFKDIEKRDENTWYPEKNPDKLTKIIQKLFVFAFTWAFGGALNREDEHRENIPFCPSLEPDSLAKVTYDFDKLVHELFGNSSQVGWKHWGQSQGRRRKGNCINLPTGECSIFGYFVDIEQCEFIPWSDLVPNDQTLIQRGTSLLTNLQRSGGNFLKITECGECINYTATRDTTCLSFLMSLLLKNSCPVLLTGESGVGKTAAINQMLEKLEGPGAFDIKHGSILGDTLLYSEIKKSSSLKQNITILIPETHKTATGSSDNPTKKPEVRTNKKLLKNNDHKGVVVSTINFSTNVTAAKTKEMILKKLIRRTKDTLGAPKNNRILIFIDDMNMPVSDMYGAQPPLELIRQLLDLGGVYDTEKNTWKNIQDLSIVAACVPVVNDISPRLLKHFSMLVLPHPSQDILCTIFQAHLGIYFSINNFTPEVQKSKDQIISCSLAIYHQVRQNMLPTPTKCHYMFNLRDMFKLLLGLLQADRTVVNSKEMAALLFVHEATRVFHDRLIDFTDKSLFYRLLSRELENCFQIGIDGCGKKTCATLACYLTDNKLYRVPISHKCAYIEFKEVFKKVFIHAGLKGKPTVLMVPNLNIEQDSFLEDLNYIISSGRIPDLFENVELDSIAMKIRYLTEQSGHMDNRQSLLSFFQKRIYKNLHIFVIMSPEGPSFRQNCRVYPSMISSCTIDWYERWPEEALLIVANSFLKEKVNFENRENLKEKLAPTCVQIHKSMKDLNRKYFEETGRFYYTTPNSYLQFMETFAHILRAREEEMQTKRDRFHMGLSTILEATTLVTEMQEELLILGPQVEQKTKETETLMEKLRKDSQVVEKVQMLVKQDEEIVAEEVRIVEDYAQKTANELKSVLPAFDKAIVALNALDKADVAELRVYTRPPFLVLTVMNAVCILLQKKPNWATAKLLLSETGFLKKLINLDKDSIPDKVFVKLKKIVTLPDFNPHKISLVSVACCSLCQWVIALNNYHEVQKVVGPKQIQVAEAQNVLKIARQRLAEKQRGLQLVEEHLLFLQAAYKDTVAEKQLLANRKTMASRRFQCASVLLTVLEDEKTRWQETINQIDNKLEGILGDILLSAACIVYSGILTPEFRQLIVNKWETFCIENGISLSSKFSLIKVMAQKYEISRWHNQGLPHGQYSVENAILIKNGQQWPLLIDPHRQAHKWIRQMEGSRLQKLSIEDSNYTKKIENAMKTGGSVLLQNLLETLAPGLKAILKKDIYQKKGHYFIRVGDAEFEYNSNFRLYLSTEIDNPHFLPSVYNFVTMINFTVTFQGLQDQLLSTVVTHEVPHLEDQRSKLLESISLDAITLEELEEKTLNLLQKALGSILDDDKIVDTLRKSKMTSNEISKRIEATKKAESEIQAIRKNYLPIATRGALLYFLVADLTQINYMYQFSLDWFHQVFVSSVVSKSKEQEHSFKREKVSPKEVHEFISISKEPNLENEKNLLDKHIKSAIDMLTKSIFKVVSSALFNEDKLCFSFRLCTVIMQNNANGNLIQDDIGFLPEEEWNIFLYSGILINIKSALSQSRLTSTFEIGESQHLQWLSDSRWRQCQYVSTHLEPFSLLCKSLLSNVSQWDTFKNSKAVYSLISTPFSSENASLEENTKPPEETELLNENKETCNPINFPWEKLTSFQRLILVKVLRPESLNNSVRKFITEKMGNKYLQRTGVNLKDAYKGSNARTPLILIQTHGIDLTNILLRFAQELKGTTHHVTIISLGRDQAAKAEDLILKALTKTQQWVFLQNCHLATSFMPRLCTIVESFNSPNVTIDPEFRLWLSSKSYSSFPIPVLKKGLKIAVESPQGLKSNLLQTFGCTGSGEVTEEIFENPDCGQWWKKLLFSLCFFNAVINERKNYGILGWNIAYKFNSSDLGVAIKVLENSLRGQPSISWQALRYLIGEVIYGGRVIDNWDKRCLKTLLYKFCNPEVLKDDFSFSRSASIKDYIHIIQSLPDDDLPEVLGIHPEAIRSCWETQGEKFIENLIAMQPKTTTANLMIRPEQSKDELVMEILSDLLKRLPLTVEKEEIAVGTPSTLKSMMSSSIWESLSKNLKDHDPLIHCVLLTFLKQEIKRFDKLLFVIHKSLKDLQLAIKGEIILTQELEEIFNSFLNMRVPTLWQKHAYRSCKPLSSWIDDLIQRLNFFNTWAKVAYTAIQRRYMRFVTVWKQSIPSTSQKCKHPEDSENNFFEGFPSRYWLPAFFFPQAFLAAVLQDYGRSRGIAVDALTFTHHVISNTTDKDEKFSVFMPKKLNIVRRAFKGSASSHTGVYIFGLFIEGARWNREQKILEDSLPLEMCCDFPDIYFLPTKISTKTPNASNQTDSELYAFECPVYQTPERSRILATTGLPTNFLTSVYLSTKKPPSHWITMRVALLCEKNEK

SEQ ID NO: 4352 - protein, 453 aa, Homo sapiens
METFIPIDLTTENQEMDKEETKTKPRLLRYEEKKYEDVKPLETQPAEIAEKETLEYKTVRTFSESLKSEKTEDYLRESIIQQHMVSPEPASLKEKGKSRRKKDQTHACPNVRKARPVSYDRTEPKDDDVIRNIIRLREKLGWQTILPQHSLKYGSSKIAIQKITLKKPLEDDGEFVYCLPRKSPKSLYNPYDLQVVSAHTAKHCKEFWVITASFISKVINIVGSVKEVELIPTLEWLSERRHYYLLRQFKIFSDFRMNKAFVTWKLNVKRIKTEKSRSFLYHHLFLADDLFQTCLVYIRGLCEDAINLKNYNDHENNLSAICLVKLDSSRTYSLDEFCEEQLQQATQALKQLEDIRNKAISEMKSTFLKVAEKNEIKEYFESKLSEDDTTHFKLPKYRRLLETFFKFVMLVDYIFQELIRQLMNTAVTLLLELFNGSAGMPFSVEKKNENLIR

SEQ ID NO: 4353 - protein, 4515 aa, Homo sapiens; identical to SEQ ID NO: 4351

SEQ ID NO: 4354 - protein, 3507 aa, Homo sapiens
MGRRSQWIWAMRCQMLVPVLSLHIGLARALGCGCIASKIECLIRCNAPFPLLDAVGSVASQELQSLTGTVGVTSGAAAYPRWNLARARAPPHLPGTQDPLRRVRDPTPIVASSPGRRRGSWSGGYGQEASEPGVVGLCCAVLPIHPSLALAGVGGPDLRRFQEGPQRPSDHGAAEKHMETFIPIDLTTENQEMDKEETKTKPRLLRYEEKKYEDVKPLETQPAEIAEKETLEYKTVRTFSESLKSEKTEEPKDDDVIRNIIRLREKLGWQTILPQHSLKYGSSKIAIQKITLKKPLEDDGEFVYCLPRKSPKSLYNPYDLQVVSAHTAKHCKEFWVITASFISKLDSSRTYSLDEFCEEQLQQATQALKQLEDIRNKAISEMKSTFLKVAEKNEIKEYFESKLSEDDTTHFKLPKYRRLLETFFKFVMLVDYIFQELIRQLMNTAVTLLLELFNGSAGMPFSVEKKNENLIRTFKDNSFPTGKTTNDCEELVDNSKLHAISVQKSEVKTDTDINEILNSVEVGKDLRKTYAPIFEVNLCLRIPAESDSSENSKENFHESDQCPEECVMFEDEMSENKDNCVKKHSSEELLPKAKKSKEISYNLEDIISATITPLCQDPQLSIFIDLVSIMDLPNKTGSIIHYKEQTRWPDCHILFETDPAYQNIIVNLLTIIGNSMGLVNAYSHKFIKYCTMTEKAKIMSMKISSMGELTSKEFEAILNRFRNYFRHIVNMAIEKRIGIFNVVVESSLQQLECDPTEIEEFLEHFIFLNAISSKISKLEKEFLTMSQLYSVAKHHQIHISEEQIAIFQVLLLKFSQLKSSMKLSKINKDTAITKFRDNLEACISGLHVDVGNLKAKIRTPLLLCAGTQVSTAMEMIQTLSGEAASLTNKAKAYSHYQDCFSDSQSHMHSVNVEEITQIVLSEISDIEGDLTLRKKLWEAQEEWKRASWEWRNSSLQSIDVESVQRNVSKLMHIISVLEKEIYSIFIIPSIDDISAQLEESQVILATIKGSPHIGPIKSQIMFYNDCVKSFVSSYSREKLEKVHAGLMCHLEEVADLVVLDTSNSRTKAILGALLILYVHCRDIVINLLLKNIFNAEDFEWTRHLQYKWNEKQKLCYVSQGNASFTYGYEYLGCTSRLVITPLTDRCWLTLMEALHLNLGGCPAGPAGTGKTETVKDLAKCALFAFKCNTALIKLPNSLIVLTCFGLEKTVLVMNTVMSFRFVLEGKEIRINMSCAVFITMNPRYGGGVELPDNLKSLFRPVAMMVPHYQMIAEIILFSFGFKSANSLSGKLTNLYELARKQLSQQDHYNFGLRSLKIVLIMAGTKKREFKCDTSDSLSEADETLIVIEAIREASLPKCPPEDVPLFENIIGDIFPEVTVLKVNQLALEKVIYTATQQLGLQNWSSQKEKIIQFYNQLQVCVGVMLVGPTGGGKTTVRRILEKALTLLPIADFLSVAERKSASKISERKGKVDICVLNPKCVTLSELYGQLDPNTMEWTDGLLSATIRSYVYFNTPKNTKKDIDLRLKSRISDLSNVFKLDSSDTTETDDNIFEEIEKVVKIPENHNFDWQWIILDGPVDTFWVENLNSVLDDTRTLCLANSERIALTNKIRVIFEVDNLSQASPATVSRCAMVYMDPVDLGWEPYVKSWLLKTSKIISQSGVDCLEFMIKNSVTDGLQFIRNRQKFQPYPMEDITVVITLCRILDAFFDFMGKNGGFEQSDDLNDTSSKEANSQRESVTFKDIEKRDENTWYPEKNPDKLTKIIQKLFVFAFTWAFGGALNREDEHRENIPFCPSLEPDSLAKVTYDFDKLVHELFGNSSQVGINLPTGECSIFGYFVDIEQCEFIPWSDLVPNDQTLIQRDNPTKKPEVRTNKKLLKNNDHKGVVVSTINFSTNVTAAKTKEMILKKLIRRTKDTLGAPKNNRILIFIDDMNMPVSDMYGAQPPLELIRQLLDLGGVYDTEKNTWKNIQDLSIVAACVPVVNDISPRLLKHFSMLVLPHPSQDILCTIFQIGIDGCGKKTCATLACYLTDNKLYRVPISHKCAYIEFKEVFKKVFIHAGLKGKPTVLMVPNLNIEQDSFLEDLNYIISSGRIPDLFENVELDSIAMKIRYLTEQSGHMDNRQSLLSFFQKRIYKNLHIFVIMSPEGPSFRQNCRVYPSMISSCTIDWYERWPEEALLIVANSFLKEKVNFENRENLKEKLAPTCVQIHKSMKDLNRKYFEETGRFYYTTPNSYLQFMETFAHILRAREEEMQTKRDRFHMGLSTILEATTLVTEMQEELLILGPQVEQKTKETETLMEKLRKDSQVVEKVQMLVKQDEEIVAEEVRIVEDYAQKTANELKSVLPAFDKAIVALNALDKADVAELRVYTRPPFLVLTVMNAVCILLQKKPNWATAKLLLSETGFLKKLINLDKDSIPDKVFVKLKKIVTLPDFNPHKISLVSVACCSLCQWVIALNNYHEVQKVVGPKQIQVAEAQNVLKIARQRLAEKQRGLQLISRWHNQGLPHGQYSVENAILIKNGQQWPLLIDPHRQAHKWIRQMEGSRLQKLSIEDSNYTKKIENAMKTGGSVLLQSCQASTWRKKLYLSTEIDNPHFLPSVYNFVTMINFTVTFQGLQDQLLSTVVTHEVPHLEDQRSKLLESISLDAITLEELEEKTLNLLQKALGSILDDDKIVDTLRKSKMTSNEISKRIEATKKAESEIQAIRKNYLPIATRGALLYFLVADLTQINYMYQFSLDWFHQVFVSSVVSKSKEQEHSFKREKVSPKEVHEFISISKEPNLENEKNLLDKHIKSAIDMLTKSIFKVVSSALFNEDKLCFSFRLCTVIMQNNANGNLIQDDIGFLPEEEWNIFLYSGILINIKSALSQSRLTSTFEIGESQHLQWLSDSRWRQCQYVSTHLEPFSLLCKSLLSNVSQWDTFKNSKAVYSLISTPFSSENASLEENTKPPEEKHTFCLLLRAINHTGTDLGPVGRGQWLTSTACDRHTDVCSFSFALNDGVPDVEHVQDIFYGHCVDKYHVKVLRPESLNNSVRKFITEKMGNKYLQRTGVNLKDAYKGSNARTPLILIQTHGSASIKDYIHIIQSLPDDDLPEVLGIHPEAIRSCWETQGEKFIENLIAMQPKTTTANLMIRPEQSKDELVMEILSDLLKRLPLTVEKEEIAVGTPSTLKSMMSSSIWESLSKNLKDHDPLIHCVLLTFLKQEIKRFDKLLFVIHKSLKDLQLAIKGEIILTQELEEIFNSFLNMRVPTLWQKHAYRSCKPLSSWIDDLIQRLNFFNTWAKVAYTAIQRRYMRFVTVWKQSIPSTSQKCKHPEDSENNFFEGFPSRYWLPAFFFPQAFLAAVLQDYGRSRGIAVDALTFTHHVISNTTDKDEKFSVFMPKKLNIVRRAFKGSASSHTGVYIFGLFIEGARWNREQKILEDSLPLEMCCDFPDIYFLPTKISTKTPNASNQTDSELYAFECPVYQTPERSRILATTGLPTNFLTSVYLSTKKPPSHWITMRVALLCEKNEK

SEQ ID NO: 4355 - protein, 1481 aa, Homo sapiens
  VARIANT 1: note = misc_feature - Xaa can be any naturally occurring amino acid
XELFGNSSQVGINLPTGECSIFGYFVDIEQCEFIPWSDLVPNDQTLIQRGTSLLTNLQRSGGNFLKITECGECINYTATRDTTCLSFLMSLLLKNSCPVLLTGESGVGKTAAINQMLEKLEGPGAFDIKHGSILGDTLLYSEIKKSSSLKQNITILIPETHKTATGSSDNPTKKPEVRTNKKLLKNNDHKGVVVSTINFSTNVTAAKTKEMILKKLIRRTKDTLGAPKNNRILIFIDDMNMPVSDMYGAQPPLELIRQLLDLGGVYDTEKNTWKNIQDLSIVAACVPVVNDISPRLLKHFSMLVLPHPSQDILCTIFQLLLGLLQADRTVVNSKEMAALLFVHEATRVFHDRLIDFTDKSLFYRLLSRELENCFQIQWTQENLMNHSTVFLDFLDINKTHRKKIYQNTSDYNKLASVLDEFQMKLGSISLELSHSMVFFKEAIEHIIRATRVLRQPGSHMLLIGIDGCGKKTCATLACYLTDNKLYRVPISHKCAYIEFKEVFKKVFIHAGLKGKPTVLMVPNLNIEQDSFLEDLNYIISSGRIPDLFENVELDSIAMKIRYLTEQSGHMDNRQSLLSFFQKRIYKNLHIFVIMSPEGPSFRQNCRVYPSMISSCTIDWYERWPEEALLIVANSFLKEKVNFENRENLKEKLAPTCVQIHKSMKDLNRKYFEETGRFYYTTPNSYLQFMETFAHILRAREEEMQTKRDRFHMGLSTILEATTLVTEMQEELLILGPQVEQKTKETETLMEKLRKDSQVVEKVQMLVKQDEEIVAEEVRIVEDYAQKTANELKSVLPAFDKAIVALNALDKADVAELRVYTRPPFLVLTVMNAVCILLQKKPNWATAKLLLSETGFLKKLINLDKDSIPDKVFVKLKKIVTLPDFNPHKISLVSVACCSLCQWVIALNNYHEVQKVVGPKQIQVAEAQNVLKIARQRLAEKQRGLQLVEEHLLFLQAAYKDTVAEKQLLANRKTMASRRFQCASVLLTVLEDEKISRWHNQGLPHGQYSVENAILIKNGQQWPLLIDPHRQAHKWIRQMEGSRLQKLSIEDSNYTKKIENAMKTGGSVLLQNLLETLAPGLKAILKKDIYQKKGHYFIRVGDAEFEYNSNFRLYLSTEIDNPHFLPSVYNFVTMINFTVTFQGLQDQLLSTVVTHEVPHLEDQRSKLLESISLDAITLEELEEKTLNLLQKALGSILDDDKIVDTLRKSKMTSNEISKRIEATKKAESEIQAIRKNYLPIATRGALLYFLVADLTQINYMYQFSLDWFHQVFVSSVVSKSKEQEHSFKREKVSPKEVHEFISISKEPNLENEKNLLDKHIKSAIDMLTKSIFKVVSSALFNEDKLCFSFRLCTVIMQNNANGNLIQDDIGFLPEEEWNIFLYSGILINIKSALSQSRLTSTFEIGESQHLQWLSDSRWRQCQYVSTHLEPFSLLCKSLLSNVSQWDTFKNSKAVYSLISTPFSSENASLEENTKPPEESKSS

SEQ ID NO: 4356 - protein, 1477 aa, Homo sapiens
  VARIANT 1: note = misc_feature - Xaa can be any naturally occurring amino acid
XELFGNSSQVGINLPTGECSIFGYFVDIEQCEFIPWSDLVPNDQTLIQRGTSLLTNLQRSGGNFLKITECGECINYTATRDTTCLSFLMSLLLKNSCPVLLTGESGVGKTAAINQMLEKLEGPGAFDIKHGSILGDTLLYSEIKKSSSLKQNITILIPETHKTATGSSDNPTKKPEVRTNKKLLKNNDHKGVVVSTINFSTNVTAAKTKEMILKKLIRRTKDTLGAPKNNRILIFIDDMNMPVSDMYGAQPPLELIRQLLDLGGVYDTEKNTWKNIQDLSIVAACVPVVNDISPRLLKHFSMLVLPHPSQDILCTIFQLLLGLLQADRTVVNSKEMAALLFVHEATRVFHDRLIDFTDKSLFYRLLSRELENCFQIQWTQENLMNHSTVFLDFLDINKTHRKKIYQNTSDYNKLASVLDEFQMKLGSISLELSHSMVFFKEAIEHIIRATRVLRQPGSHMLLIGIDGCGKKTCATLACYLTDNKLYRVPISHKCAYIEFKEVFKKVFIHAGLKGKPTVLMVPNLNIEQDSFLEDLNYIISSGRIPDLFENVELDSIAMKIRYLTEQSGHMDNRQSLLSFFQKRIYKNLHIFVIMSPEGPSFRQNCRVYPSMISSCTIDWYERWPEEALLIVANSFLKEKVNFENRENLKEKLAPTCVQIHKSMKDLNRKYFEETGRFYYTTPNSYLQFMETFAHILRAREEEMQTKRDRFHMGLSTILEATTLVTEMQEELLILGPQVEQKTKETETLMEKLRKDSQVVEKVQMLVKQDEEIVAEEVRIVEDYAQKTANELKSVLPAFDKAIVALNALDKADVAELRVYTRPPFLVLTVMNAVCILLQKKPNWATAKLLLSETGFLKKLINLDKDSIPDKVFVKLKKIVTLPDFNPHKISLVSVACCSLCQWVIALNNYHEVQKVVGPKQIQVAEAQNVLKIARQRLAEKQRGLQLVEEHLLFLQAAYKDTVAEKQLLANRKTMASRRFQCASVLLTVLEDEKISRWHNQGLPHGQYSVENAILIKNGQQWPLLIDPHRQAHKWIRQMEGSRLQKLSIEDSNYTKKIENAMKTGGSVLLQNLLETLAPGLKAILKKDIYQKKGHYFIRVGDAEFEYNSNFRLYLSTEIDNPHFLPSVYNFVTMINFTVTFQGLQDQLLSTVVTHEVPHLEDQRSKLLESISLDAITLEELEEKTLNLLQKALGSILDDDKIVDTLRKSKMTSNEISKRIEATKKAESEIQAIRKNYLPIATRGALLYFLVADLTQINYMYQFSLDWFHQVFVSSVVSKSKEQEHSFKREKVSPKEVHEFISISKEPNLENEKNLLDKHIKSAIDMLTKSIFKVVSSALFNEDKLCFSFRLCTVIMQNNANGNLIQDDIGFLPEEEWNIFLYSGILINIKSALSQSRLTSTFEIGESQHLQWLSDSRWRQCQYVSTHLEPFSLLCKSLLSNVSQWDTFKNSKAVYSLISTPFSSENASLEENTKPPEE

SEQ ID NO: 4357 - protein, 126 aa, Homo sapiens
  VARIANT 1: note = misc_feature - Xaa can be any naturally occurring amino acid
XLEYKTVRTFSESLKSEKTEEPKDDDVIRNIIRLREKLGWQTILPQHSLKYGSSKIAIQKITLKKPLEDDGEFVYCLPRKSPKSLYNPYDLQVVSAHTAKHCKEFWVITASFISKRYLVICGAVYI

SEQ ID NO: 4358 - protein, 204 aa, Homo sapiens
  VARIANT 1: note = misc_feature - Xaa can be any naturally occurring amino acid
XMLISAEGEGLVLPKKIRVRSAVEQWLVNVEKSMFDVLKKFLSQGIEDWNCQMFSQWVLSHPGQVVLTVSQIMFYNDCVKSFVSSYSREKLEKVHAGLMCHLEEVADLVVLDTSNSRTKAILGALLILYVHCRDIVINLLLKNIFNAEDFEWTRHLQYKWNEKQKLCYVSQGNASFTYGYEYLGCTSRLVITPLTDRCWLTLME

SEQ ID NO: 4359 - protein, 219 aa, Homo sapiens
  VARIANT 1: note = misc_feature - Xaa can be any naturally occurring amino acid
XRFVTVWKQSIPSTSQKCKHPEDSENNFFEGFPSRYWLPAFFFPQAFLAAVLQDYGRSRGIAVDALTFTHHVISNTTDKDEKFSVFMPKKLNIVRRAFKGSASSHTGVYIFGLFIEGARWNREQKILEDSLPLEMCCDFPDIYFLPTKISTKTPNASNQTDSELYAFECPVYQTPERSRILATTGLPTNFLTSVYLSTKKPPSHWITMRVALLCEKNEK

SEQ ID NO: 4360 - protein, 300 aa, Homo sapiens
  VARIANT 1: note = misc_feature - Xaa can be any naturally occurring amino acid
XTGVSHRADGERGTVGINLPTGECSIFGYFVDIEQCEFIPWSDLVPNDQTLIQRGTSLLTNLQRSGGNFLKITECGECINYTATRDTTCLSFLMSLLLKNSCPVLLTGESGVGKTAAINQMLEKLEGPGAFDIKHGSILGDTLLYSEIKKSSSLKQNITILIPETHKTATGSSDNPTKKPEVRTNKKLLKNNDHKGVVVSTINFSTNVTAAKTKEMILKKLIRRTKDTLGAPKNNRILIFIDDMNMPVSDMYGAQPPLELIRQLLDLGGVYDTEKNTWKNIQDLSIVAACVPVVNDISPR

SEQ ID NO: 4361 - protein, 358 aa, Homo sapiens
MAPQNLSTFCLLLLYLIGAVIAGRDFYKILGVPRSASIKDIKKAYRKLALQLHPDRNPDDPQAQEKFQDLGAAYEVLSDSEKRKQYDTYGEEGLKDGHQSSHGDIFSHFFGDFGFMFGGTPRQQDRNIPRGSDIIVDLEVTLEEVYAGNFVEVVRNKPVARQAPGKRKCNCRQEMRTTQLGPGRFQMTQEVVCDECPNVKLVNEERTLEVEIEPGVRDGMEYPFIGEGEPHVDGEPGDLRFRIKVVKHPIFERRGDDLYTNVTISLVESLVGFEMDITHLDGHKVHISRDKITRPGAKLWKKGEGLPNFDNNNIKGSLIITFDVDFPKEQLTEEAREGIKQLLKQGSVQKVYNGLQGY

SEQ ID NO: 4362 - protein, 358 aa, Homo sapiens; identical to SEQ ID NO: 4361

SEQ ID NO: 4363 - protein, 223 aa, Homo sapiens
MATPQSIFIFAICILMITELILASKSYYDILGVPKSASERQIKKAFHKLAMKYHPDKNKSPDAEAKFREIAEAYETLSDANRRKEYDTLGHSAFTSGKGQRGSGSSFEQSFNFNFDDLFKDFGFFGQNQNTGSKKRFENHFQTRQDGGSSRQRHHFQEFSFGGGLFDDMFEDMEKMFSFSGFDSTNQHTVQTENRFHGSSKHCRTVTQRRGNMVTTYTDCSGQ

SEQ ID NO: 4364 - protein, 153 aa, Homo sapiens
MGAPLLSPGWGAGAAGRRWWMLLAPLLPALLLVRPAGALVEGLYCGTRDCYEVLGVSRSAGKAEIARAYRQLARRYHPDRYRPQPGDEGPGRTPQSAEEAFLLVATAYETLKVSQAAAELQQYCMQNACKDALLVGVPAGSNPFREPRSCALL

SEQ ID NO: 4365 - protein, 504 aa, Homo sapiens
MVAPGSVTSRLGSVFPFLLVLVDLQYEGAECGVNADVEKHLELGKKLLAAGQLADALSQFHAAVDGDPDNYIAYYRRATVFLAMGKSKAALPDLTKVIQLKMDFTAARLQRGHLLLKQGKLDEAEDDFKKVLKSNPSENEEKEAQSQLIKSDEMQRLRSQALNAFGSGDYTAAIAFLDKILEVCVWDAELRELRAECFIKEGEPRKAISDLKAASKLKNDNTEAFYKISTLYYQLGDHELSLSEVRECLKLDQDHKRCFAHYKQVKKLNKLIESAEELIRDGRYTDATSKYESVMKTEPSIAEYTVRSKERICHCFSKDEKPVEAIRVCSEVLQMEPDNVNALKDRAEAYLIEEMYDEAIQDYETAQEHNENDQQIREGLEKAQRLLKQSQKRDYYKILGVKRNAKKQEIIKAYRKLALQWHPDNFQNEEEKKKAEKKFIDIAAAKEVLSDPEMRKKFDDGEDPLDAESQQGGGGNPFHRSWNSWQGFNPFSSGGPFRFKFHFN

SEQ ID NO: 4366 - protein, 453 aa, Homo sapiens
MVAPGSVTSRLGSVFPFLLVLVDLQYEGAECGVNADVEKHLELGKKLLAAGQLADALSQFHAAVDGDPDNYIAYYRRATVFLAMGKSKAALPDLTKVIQLKMDFTAARLQRGHLLLKQGKLDEAEDDFKKVVCVWDAELRELRAECFIKEGEPRKAISDLKAASKLKNDNTEAFYKISTLYYQLGDHELSLSEVRECLKLDQDHKRCFAHYKQVKKLNKLIESAEELIRDGRYTDATSKYESVMKTEPSIAEYTVRSKERICHCFSKDEKPVEAIRVCSEVLQMEPDNVNALKDRAEAYLIEEMYDEAIQDYETAQEHNENDQQIREGLEKAQRLLKQSQKRDYYKILGVKRNAKKQEIIKAYRKLALQWHPDNFQNEEEKKKAEKKFIDIAAAKEVLSDPEMRKKFDDGEDPLDAESQQGGGGNPFHRSWNSWQGFNPFSSGGPFRFKFHFN

SEQ ID NO: 4367 - protein, 60 aa, Homo sapiens
MRGMKLLGALLALAALLQGAVSLKIAAFNIQTFGETKMSNATLVSYIVQGCTRHLSLRGQ

SEQ ID NO: 4368 - protein, 60 aa, Homo sapiens; identical to SEQ ID NO: 4367

SEQ ID NO: 4369 - protein, 60 aa, Homo sapiens; identical to SEQ ID NO: 4367

SEQ ID NO: 4370 - protein, 282 aa, Homo sapiens [sequence omitted]

SEQ ID NO: 4371 - protein, 282 aa, Homo sapiens [sequence omitted]

SEQ ID NO: 4372 - protein, 86 aa, Homo sapiens
MRGMKLLGALLALAALLQGAVSLKIAAFNIQTFGETKMSNATLVSYIVQILSRYDIALVQEVRDSHLTAVGKLLDNLNQWVTVAGS

SEQ ID NO: 4373 - protein, 108 aa, Homo sapiens
NREPAIVRFFSRFTEVREFAIVPLHAAPGDAVAEIDALYDVYLDVQEKWGLEDVMLMGDFNAGCSYVRPSQWSSIRLWTSPTFQWLIPDSADTTATPTHCAYDRLPMA

SEQ ID NO: 4374 - protein, 72 aa, Homo sapiens
SIRLWTSPTFQWLIPDSADTTATPTHCAYDRIVVAGMLLRGAVVPDSALPFNFQAAYGLSDQLVCVLPCTAT

SEQ ID NO: 4375 - protein, 90 aa, Homo sapiens
  VARIANT 1: note = misc_feature - Xaa can be any naturally occurring amino acid
XHYVVSEPLGRNSYKERYLFVYRPDQVSAVDSYYYDDGCEPCGNDTFNREPAIVRFFSRFTGSVPHTTWLSPQRSGSLPLFPCMRPRGTQ

SEQ ID NO: 4376 - protein, 75 aa, Homo sapiens
  VARIANT 1: note = misc_feature - Xaa can be any naturally occurring amino acid
XRYLFVYRPDQVSAVDSYYYDDGCEPCGNDTFNREPAIVRFFSRFTGSVPHTTWLSPQRSGSLPLFPCMRPRGTQ

SEQ ID NO: 4377 - protein, 65 aa, Homo sapiens
  VARIANT 1: note = misc_feature - Xaa can be any naturally occurring amino acid
XTFQWLIPDSADTTATPTHCAYDRIVVAGMLLRGAVVPDSALPFNFQAAYGLSDQLVCVLPCTAT

SEQ ID NO: 4378 - protein, 26 aa, Homo sapiens
MHYPTALLFLILANGAQAFRICAFNA

SEQ ID NO: 4379 - protein, 85 aa, Homo sapiens
MHYPTALLFLILANGAQAFRICAFNAQRLTLAKVAREQVMDTLVRALNISDHYPVEVELKLSQAHSVQPLSLTVLLLLSLLSPQL

SEQ ID NO: 4380 - protein, 62 aa, Homo sapiens
MHYPTALLFLILANGAQAFRICAFNAQRLTLAKVAREQVMDTLVRDVILLGDFNADCASLTK

SEQ ID NO: 4381 - protein, 104 aa, Homo sapiens
MHYPTALLFLILANGAQAFRICAFNAQRLTLAKVAREQVMDTLVRILARCDIMVLQEVVDSSGSAIPLLLRELNRFDGSGPYSTLSSPQLGRSTYMETYVYFYR

SEQ ID NO: 4382 - protein, 208 aa, Homo sapiens
MHYPTALLFLILANGAQAFRICAFNAQRLTLAKVAREQVMDTLVRILARCDIMVLQEVVDSSGSAIPLLLRELNRFDGSGPYSTLSSPQLGRSTYMETYVYFYRSHKTQVLSSYVYNDEDDVFAREPFVAQFSLPSNVLPSLVLVPLHTTPKAVEKELNALYDVFLEVSQHWQSKDVILLGDFNADCASLTKKRLDKLELRTEPGFHW

SEQ ID NO: 4383 - protein, 302 aa, Homo sapiens
MHYPTALLFLILANGAQAFRICAFNAQRLTLAKVAREQVMDTLVRILARCDIMVLQEVVDSSGSAIPLLLRELNRFDGSGPYSTLSSPQLGRSTYMETYVYFYRSHKTQVLSSYVYNDEDDVFAREPFVAQFSLPSNVLPSLVLVPLHTTPKAVEKELNALYDVFLEVSQHWQSKDVILLGDFNADCASLTKKRLDKLELRTEPGFHWVIADGEDTTVRASTHCTYDRVVLHGERCRSLLHTAAAFDFPTSFQLTEEEALNISDHYPVEVELKLSQAHSVQPLSLTVLLLLSLLSPQLCPAA

SEQ ID NO: 4384 - protein, 302 aa, Homo sapiens; identical to SEQ ID NO: 4383

SEQ ID NO: 4385 - protein, 302 aa, Homo sapiens; identical to SEQ ID NO: 4383

SEQ ID NO: 4386 - protein, 302 aa, Homo sapiens; identical to SEQ ID NO: 4383

SEQ ID NO: 4387 - protein, 302 aa, Homo sapiens; identical to SEQ ID NO: 4383

SEQ ID NO: 4388 - protein, 302 aa, Homo sapiens; identical to SEQ ID NO: 4383

SEQ ID NO: 4389 - protein, 278 aa, Homo sapiens
MGGPRALLAALWALEAAGTAALRIGAFNIQSFGDSKVSDPACGSIIAKILAGYDLALVQEVRDPDLSAVSALMEQINSVSEHEYSFVSSQPLGRDQYKEMYLFVYRKDAVSVVDTYLYPDPEDVFSREPFVVKFSAPGTAQNLVLIPLHAAPHQAVAEIDALYDVYLDVIDKWGTDDMLFLGDFNADCSYVRAQDWAAIRLRSSEVFKWLIPDSADTTVGNSDCAYDRIVACGARLRRSLKPQSATVHDFQEEFGLDQTQALAISDHFPVEVTLKFHR

SEQ ID NO: 4390 - protein, 278 aa, Homo sapiens; identical to SEQ ID NO: 4389

SEQ ID NO: 4391 - protein, 299 aa, Homo sapiens
MGGPRALLAALWALEAAGTAALRIGAFNIQSFGDSKVSDPACGSIIAKILAGYDLALVQEVRDPDLSAVSALMEQINSVSEHEYSFVSSQPLGRDQYKEMYLFVYRKDAVSVVDTYLYPDPEDVFSREPFVVKFSAPGTGERAPPLPSRRALTPPPLPAAAQNLVLIPLHAAPHQAVAEIDALYDVYLDVIDKWGTDDMLFLGDFNADCSYVRAQDWAAIRLRSSEVFKWLIPDSADTTVGNSDCAYDRIVACGARLRRSLKPQSATVHDFQEEFGLDQTQALAISDHFPVEVTLKFHR

SEQ ID NO: 4392 - protein, 299 aa, Homo sapiens; identical to SEQ ID NO: 4391

SEQ ID NO: 4393 - protein, 299 aa, Homo sapiens; identical to SEQ ID NO: 4391

SEQ ID NO: 4394 - protein, 254 aa, Homo sapiens
PRALLAALWALEAAGTAALRIGAFNIQSFGDSKVSDPACGSIIAKILAGYDLALVQEVRDPDLSAVSALMEQINSVSEHEYSFVSSQPLGRDQYKEMYLFVYRKDAVSVVDTYLYPDPEDVFSREPFVVKFSAPGTGERAPPLPSRRALTPPPLPAAAQNLVLIPLHAAPHQAVAEIDALYDVYLDVIDKWGTDDWAAIRLRSSEVFKWLIPDSADTTVGNSDCAYDRIVACGARLRRSLKPQSATVHDFQEEF

SEQ ID NO: 4395 - protein, 137 aa, Homo sapiens
ADVFSREPFVVWFQSPHTAVKDFVIIPLHTTPETSVKEIDELVEVYTDVKHRWKAENFIFMGDFNAGCSYVPKKAWKNIRLRTDPRFVWLIGDQEDTTVKKSTNCAYDRPWMSATTFQLNLNYSLQGPSPTAKNLSL

SEQ ID NO: 4396 - protein, 275 aa, Homo sapiens
MSRELAPLLLLLLSIHSALAMRICSFNVRSFGESKQEDKNAMDVIVKVIKRCDIILVMEIKDSNNRICPILMEKLNREKLVSVKRSYHYHDYQDGDADVFSREPFVVWFQSPHTAVKDFVIIPLHTTPETSVKEIDELVEVYTDVKHRWKAENFIFMGDFNAGCSYVPKKAWKNIRLRTDPRFVWLIGDQEDTTVKKSTNCAYDRIVLRGQEIVSSVVPKSNSVFDFQKAYKLTEEEALDVSDHFPVEFKLQSSRAFTNSKKSVTLRKKTKSKRS

SEQ ID NO: 4397 - protein, 100 aa, Homo sapiens
MSRELAPLLLLLLSIHSALAMRICSFNVRSFGESKQEDKNAMDVIVKVIKRCDIILVMEIKDSNNRICPILMEKLNRNSRRGITYNYVISSRLGRNTYKE

SEQ ID NO: 4398 - protein, 158 aa, Homo sapiens
MSRELAPLLLLLLSIHSALAMRICSFNVRSFGESKQEDKNAMDVIVKVIKRCDIILVMEIKDSNNRICPILMEKLNRNSRRGITYNYVISSRLGRNTYKEQYAFLYKEKLVSVKRSYHYHDYQDGDADVFSREPFVVWFQSPHTAVKDFVIIPLHTTP

SEQ ID NO: 4399 - protein, 305 aa, Homo sapiens
MSRELAPLLLLLLSIHSALAMRICSFNVRSFGESKQEDKNAMDVIVKVIKRCDIILVMEIKDSNNRICPILMEKLNRNSRRGITYNYVISSRLGRNTYKEQYAFLYKEKLVSVKRSYHYHDYQDGDADVFSREPFVVWFQSPHTAVKDFVIIPLHTTPETSVKEIDELVEVYTDVKHRWKAENFIFMGDFNAGCSYVPKKAWKNIRLRTDPRFVWLIGDQEDTTVKKSTNCAYDRIVLRGQEIVSSVVPKSNSVFDFQKAYKLTEEEALDVSDHFPVEFKLQSSRAFTNSKKSVTLRKKTKSKRS

SEQ ID NO: 4400 - protein, 288 aa, Homo sapiens
MSRELAPLLLLLLSIHSALAMRICSFNVRSFGESKQEDKNAMDVIVKVIKRCDIILVMEIKDSNNRICPILMEKLNRNSRRGITYNYVISSRLGRNTYKEQYAFLYKEKLVSVKRSYHYHDYQDGDADVFSREPFVVWFQSPHTAVKDFVIIPLHTTPETSVKEIDELVEVYTDVKHRWKAENFIFMGDFNAGCSYVPKKAWKNIRLRTDPRFVWLIGDQEDTTVKKSTNCAYDRIVLRGQEIVSSVVPKSNSVFDFQKAYKLTEEEVRLPSCLSMPLSWKDELAWAT

SEQ ID NO: 4401 - protein, 218 aa, Homo sapiens
MIPLLLAALLCVPAGALTCYGDSGQPVDWFVVYKLPALRGSGEAAQRGLQYKYLDESSGGWRDGRALINSPEGAVGRSLQPLYRSNTSQLAFLLYNDQPPQPSKAQDSSMRGHTKGKQLTYTYPWVYNYQLEGIFAQEFPDLENVVKGHHVSQEPWNSSITLTSQAGAVFQSFAKFSKFGDDLYSGWLAAALGTNLQVQFWHKTVGILPSNCSDIWQV

SEQ ID NO: 4402 - protein, 360 aa, Homo sapiens
MIPLLLAALLCVPAGALTCYGDSGQPVDWFVVYKLPALRGSGEAAQRGLQYKYLDESSGGWRDGRALINSPEGAVGRSLQPLYRSNTSQLAFLLYNDQPPQPSKAQDSSMRGHTKGVLLLDHDGGFWLVHSVPNFPPPASSAAYSWPHSACTYGQTLLCVSFPFAQFSKMGKQLTYTYPWVYNYQLEGIFAQEFPDLENVVKGHHVSQEPWNSSITLTSQAGAVFQSFAKFSKFGDDLYSGWLAAALGTNLQVQFWHKTVGILPSNCSDIWQVLNVNQIAFPGPAGPSFNSTEDHSKWCVSPKGPWTCVGDMNRNQGEEQRGGGTLCAQLPALWKAFQPLVKNYQPCNGMARKPSRAYKI

SEQ ID NO: 4403 - protein, 361 aa, Homo sapiens
MKQKMMARLLRTSFALLFLGLFGVLGAATISCRNEEGKAVDWFTFYKLPKRQNKESGETGLEYLYLDSTTRSWRKSEQLMNDTKSVLGRTLQQLYEAYASKSNNTAYLIYNDGVPKPVNYSRKYGHTKGLLLWNRVQGFWLIHSIPQFPPIPEEGYDYPPTGRRNGQSGICITFKYNQYEAIDSQLLVCNPNVYSCSIPATFHQELIHMPQLCTRASSSEIPGRLLTTLQSAQGQKFLHFAKSDSFLDDIFAAWMAQRLKTHLLTETWQRKRQELPSNCSLPYHVYNIKAIKLSRHSYFSSYQDHAKWCISQKGTKNRWTCIGDLNRSPHQAFRSGGFICTQNWQIYQAFQGLVLYYESCK

SEQ ID NO: 4404 - protein, 153 aa, Homo sapiens
MPQLCTRASSSEIPGRLLTTLQSAQGQKFLHFAKSDSFLDDIFAAWMAQRLKTHLLTETWQRKRQELPSNCSLPYHVYNIKAIKLSRHSYFSSYQDHAKWCISQKGTKNRWTCIGDLNRSPHQAFRSGGFICTQNWQIYQAFQGLVLYYESCK

SEQ ID NO: 4405 - protein, 107 aa, Homo sapiens
MWSGWWLWPLVAVCTADFFRDEAERIMRDSPVIDGHNDLPWQLLDMFNNRLQDERANLTTLAGTHTNIPKLRAGFVGGQFWSVYTPCDTQNKDAVRRTLEQMDVVHR

SEQ ID NO: 4406 - protein, 111 aa, Homo sapiens
MWSGWWLWPLVAVCTADFFRDEAERIMRDSPVIDGHNDLPWQLLDMFNNRLQDERANLTTLAGTHTNIPKLRAGFVGGQFWSVYTPCDTQNKDAVRRTLEQMDVVHRMCRM

SEQ ID NO: 4407 - protein, 411 aa, Homo sapiens
MWSGWWLWPLVAVCTADFFRDEAERIMRDSPVIDGHNDLPWQLLDMFNNRLQDERANLTTLAGTHTNIPKLRAGFVGGQFWSVYTPCDTQNKDAVRRTLEQMDVVHRMCRMYPETFLYVTSSAGIRQAFREGKVASLIGVEGGHSIDSSLGVLRALYQLGMRYLTLTHSCNTPWADNWLVDTGDSEPQSQGLSPFGQRVVKELNRLGVLIDLAHVSVATMKATLQLSRAPVIFSHSSAYSVCASRRNVPDDVLRLVKQTDSLVMVNFYNNYISCTNKANLSQVADHLDHIKEVAGARAVGFGGDFDGVPRVPEGLEDVSKYPDLIAELLRRNWTEAEVKGALADNLLRVFEAVEQASNLTQAPEEEPIPLDQLGGSCRTHYGYSSGASSLHRHWGLLLASLAPLVLCLSLL

SEQ ID NO: 4408 - protein, 411 aa, Homo sapiens; identical to SEQ ID NO: 4407

SEQ ID NO: 4409 - protein, 411 aa, Homo sapiens; identical to SEQ ID NO: 4407

SEQ ID NO: 4410 - protein, 161 aa, Homo sapiens
MKLQTLAVSVTALKFWSAYVPCQTQDRDALRLTLEQIDLIRRMCASYSELELVTSAKALNDTQKLACLIGVEGGHSLDNSLSILRTFYMLGVRYLTLTHTCNTPWAESSAKGVHSFYNNISGLTDFGEKVVAEMNRLGMMVDLSHVSDAVARRALEVSQAP

SEQ ID NO: 4411 - protein, 123 aa, Homo sapiens
MQMIIIWALLDTEAESSAKGVHSFYNNISGLTDFGEKVVAEMNRLGMMVDLSHVSDAVARRALEVSQAPVIFSHSAARGVCNSARNVPDDILQLLKKNGGVVMVSLSMGVIQCNPSANVSTVA

SEQ ID NO: 4412 - protein, 114 aa, Homo sapiens
MQPSGLEGPGTFGRWPLLSLLLLLLLLQPVTCAYTTPGPPRALTTLGAPRAHTMPGTYAPSTTLSSPSTQGLQEQARALMRDFPLVDGHNDLPLVLRQVYQKGLQDVNLRNFSY

SEQ ID NO: 4413 - protein, 137 aa, Homo sapiens
MQPSGLEGPGTFGRWPLLSLLLLLLLLQPVTCAYTTPGPPRALTTLGAPRAHTMPGTYAPSTTLSSPSTQGLQEQARALMRDFPLVDGHNDLPLVLRQVYQKGLQDVNLRNFSYGQTSLDRLRDGLVGAQFWSAYVP

SEQ ID NO: 4414 - protein, 486 aa, Homo sapiens
MQPSGLEGPGTFGRWPLLSLLLLLLLLQPVTCAYTTPGPPRALTTLGAPRAHTMPGTYAPSTTLSSPSTQGLQEQARALMRDFPLVDGHNDLPLVLRQVYQKGLQDVNLRNFSYGQTSLDRLRDGLVGAQFWSAYVPCQTQDRDALRLTLEQIDLIRRMCASYSELELVTSAKALNDTQKLACLIGVEGGHSLDNSLSILRTFYMLGVRYLTLTHTCNTPWAESSAKGVHSFYNNISGLTDFGEKVVAEMNRLGMMVDLSHVSDAVARRALEVSQAPVIFSHSAARGVCNSARNVPDDILQLLKKNGGVVMVSLSMGVIQCNPSANVSTVADHFDHIKAVIGSKFIGIGGDYDGAGKFPQGLEDVSTYPVLIEELLSRGWSEEELQGVLRGNLLRVFRQVEKVQEENKWQSPLEDKFPDEQLSSSCHSDLSRLRQRQSLTSGQELTEIPIHWTAKLPAKWSVSESSPHMAPVLAVVATFPVLILWL

SEQ ID NO: 4415 - protein, 486 aa, Homo sapiens; identical to SEQ ID NO: 4414

SEQ ID NO: 4416 - protein, 258 aa, Homo sapiens
MQPSGLEGPGTFGRWPLLSLLLLLLLLQPVTCAYTTPGPPRALTTLGAPRAHTMPGTYAPSTTLSSPSTQGLQEQARALMRDFPLVDGHNDLPLVLRQVYQKGLQDVNLRNFSYGQTSLDRLRDGLVGAQFWSAYVPCQTQDRDALRLTLEQIDLIRRMCASYSELELVTSAKALNDTQKLACLIGVEGGHSLDNSLSILRTFYMLGVRYLTLTHTCNTPWAESSAKGVHSFYNNISGLTDFGEMLWHGGPWKCHRHL

SEQ ID NO: 4417 - protein, 513 aa, Homo sapiens
MIRTPLSASAHRLLLPGSRGRPPRNMQPTGREGSRALSRRYLRRLLLLLLLLLLRQPVTRAETTPGAPRALSTLGSPSLFTTPGVPSALTTPGLTTPGTPKTLDLRGRAQALMRSFPLVDGHNDLPQVLRQRYKNVLQDVNLRNFSHGQTSLDRLRDGLVGAQFWSASVSCQSQDQTAVRLALEQIDLIHRMCASYSELELVTSAEGLNSSQKLACLIGVEGGHSLDSSLSVLRSFYVLGVRYLTLTFTCSTPWAESSTKFRHHMYTNVSGLTSFGEKVVEELNRLGMMIDLSYASDTLIRRVLEVSQAPVIFSHSAARAVCDNLLNVPDDILQLLKKNGGIVMVTLSMGVLQCNLLANVSTVADHFDHIRAVIGSEFIGIGGNYDGTGRFPQGLEDVSTYPVLIEELLSRSWSEEELQGVLRGNLLRVFRQVEKVREESRAQSPVEAEFPYGQLSTSCHSHLVPQNGHQATHLEVTKQPTNRVPWRSSNASPYLVPGLVAAATIPTFTQWLC

SEQ ID NO: 4418 - protein, 357 aa, Homo sapiens
MATVIHNPLKALGDQFYKEAIEHCRSYNSRLCAERSVRLPFLDSQTGVAQNNCYIWMEKRHRGPGLAPGQLYTYPARCWRKKRRLHPPEDPKLRLLEIKPEVELPLKKDGFTSESTTLEALLRGEGVEKKVDAREEESIQEIQRVLENDENVEEGNEEEDLEEDIPKRKNRTRGRARGSAGGRRRHDAASQEDHDKPYVCDICGKRYKNRPGLSYHYAHTHLASEEGDEAQDQETRSPPNHRNENHRPQKGPDGTVIPNNYCDFCLGGSNMNKKSGRPEELVSCADCGRSAHLGGEGRKEKEAAAAARTTEDLFGSTSESDTSTFHGFDEDDLEEPRSCRGRRSGRGSPTADKKGSC

SEQ ID NO: 4419 - protein, 357 aa, Homo sapiens; identical to SEQ ID NO: 4418

SEQ ID NO: 4420 - protein, 378 aa, Homo sapiens
MATVIHNPLKALGDQFYKEAIEHCRSYNSRLCAERSVRLPFLDSQTGVAQNNCYIWMEKRHRGPGLAPGQLYTYPARCWRKKRRLHPPEDPKLRLLEIKPEVELPLKKDGFTSESTTLEALLRGEGVEKKVDAREEESIQEIQRVLENDENVEEGNEEEDLEEDIPKRKNRTRGRARGSAGGRRRHDAASQEDHDKPYVCDICGKRYKNRPGLSYHYAHTHLASEEGDEAQDQETRSPPNHRNENHRPQKGPDGTVIPNNYCDFCLGGSNMNKKSGRPEELVSCADCGRSGHPTCLQFTLNMTEAVKTYKWQCIECKSCILCGTSENDDQLLFCDDCDRGYHMYCLNPPVAEPPEGSWSCHLCWELLKEKASAFGCQA

SEQ ID NO: 4421 - protein, 412 aa, Homo sapiens
MFYGRINGRNFAASSLPVAFAATPLMLFLPNPQLIFSFPISSRNHITGLMPPGKLKLENLFHMCTRLGDQFYKEAIEHCRSYNSRLCAERSVRLPFLDSQTGVAQNNCYIWMEKRHRGPGLAPGQLYTYPARCWRKKRRLHPPEDPKLRLLEIKPEVELPLKKDGFTSESTTLEALLRGEGVEKKVDAREEESIQEIQRVLENDENVEEGNEEEDLEEDIPKRKNRTRGRARGSAGGRRRHDAASQEDHDKPYVCDICGKRYKNRPGLSYHYAHTHLASEEGDEAQDQETRSPPNHRNENHRPQKGPDGTVIPNNYCDFCLGGSNMNKKSGRPEELVSCADCGRSAHLGGEGRKEKEAAAAARTTEDLFGSTSESDTSTFHGFDEDDLEEPRSCRGRRSGRGSPTADKKGSC

SEQ ID NO: 4422 - protein, 412 aa, Homo sapiens; identical to SEQ ID NO: 4421

SEQ ID NO: 4423 - protein, 367 aa, Homo sapiens
MGFTDLEEPISGCPGGPWALGLGDQFYKEAIEHCRSYNSRLCAERSVRLPFLDSQTGVAQNNCYIWMEKRHRGPGLAPGQLYTYPARCWRKKRRLHPPEDPKLRLLEIKPEVELPLKKDGFTSESTTLEALLRGEGVEKKVDAREEESIQEIQRVLENDENVEEGNEEEDLEEDIPKRKNRTRGRARGSAGGRRRHDAASQEDHDKPYVCDICGKRYKNRPGLSYHYAHTHLASEEGDEAQDQETRSPPNHRNENHRPQKGPDGTVIPNNYCDFCLGGSNMNKKSGRPEELVSCADCGRSAHLGGEGRKEKEAAAAARTTEDLFGSTSESDTSTFHGFDEDDLEEPRSCRGRRSGRGSPTADKKGSC

SEQ ID NO: 4424 - protein, 367 aa, Homo sapiens; identical to SEQ ID NO: 4423

SEQ ID NO: 4425 - protein, 170 aa, Homo sapiens
MKTPWKVLLGLLGAAALVTIITVPVVLLNKGNDATADSRKTYTLTDYLKNTYRLKLYSLRWISDHEYLYKQENNILVFNAEYGNSSVFLENSTFDEFGHSINDYSISPDGQFILLEYNYVKQWRHSYTASYDIYDLNKRQLITEERIPNNTQWVTWSPVGHKLVSICLEQ

SEQ ID NO: 4426 - protein, 766 aa, Homo sapiens
MKTPWKVLLGLLGAAALVTIITVPVVLLNKGTDDATADSRKTYTLTDYLKNTYRLKLYSLRWISDHEYLYKQENNILVFNAEYGNSSVFLENSTFDEFGHSINDYSISPDGQFILLEYNYVKQWRHSYTASYDIYDLNKRQLITEERIPNNTQWVTWSPVGHKLAYVWNNDIYVKIEPNLPSYRITWTGKEDIIYNGITDWVYEEEVFSAYSALWWSPNGTFLAYAQFNDTEVPLIEYSFYSDESLQYPKTVRVPYPKAGAVNPTVKFFVVNTDSLSSVTNATSIQITAPASMLIGDHYLCDVTWATQERISLQWLRRIQNYSVMDICDYDESSGRWNCLVARQHIEMSTTGWVGRFRPSEPHFTLDGNSFYKIISNEEGYRHICYFQIDKKDCTFITKGTWEVIGIEALTSDYLYYISNEYKGMPGGRNLYKIQLSDYTKVTCLSCELNPERCQYYSVSFSKEAKYYQLRCSGPGLPLYTLHSSVNDKGLRVLEDNSALDKMLQNVQMPSKKLDFIILNETKFWYQMILPPHFDKSKKYPLLLDVYAGPCSQKADTVFRLNWATYLASTENIIVASFDGRGSGYQGDKIMHAINRRLGTFEVEDQIEAARQFSKMGFVDNKRIAIWGWSYGGYVTSMVLGSGSGVFKCGIAVAPVSRWEYYDSVYTERYMGLPTPEDNLDHYRNSTVMSRAENFKQVEYLLIHGTADDNVHFQQSAQISKALVDVGVDFQAMWYTDEDHGIASSTAHQHIYTHMSHFIKQCFSLP

SEQ ID NO: 4427 - protein, 118 aa, Homo sapiens
MKTPWKVLLGLLGAAALVTIITVPVVLLNKGTDDATADSRKTYTLTDYLKNTYRLKLYSLRWISDHEYLYKQENNILVFNAEYGNSSVFLENSTFHMAKWIFLSFLKCSLPWLLFSLL

SEQ ID NO: 4428 - protein, 118 aa, Homo sapiens; identical to SEQ ID NO: 4427

SEQ ID NO: 4429 - protein, 86 aa, Homo sapiens
  VARIANT 1: note = misc_feature - Xaa can be any naturally occurring amino acid
XDATADSRKTYTLTDYLKNTYRLKLYSLRWISDHEYLYKQENNILVFNAEYGNSSVFLENSTFHMAKWIFLSFLKCSLPWLLFSLL

SEQ ID NO: 4430 - protein, 272 aa, Homo sapiens
APWAPVLLLALGLRGLQAGARRAPDPGFQERFFQQRLDHFNFERFGNKTFPQRFLVSDRFWVRGEGPIFFYTGNEGDVWAFANNSAFVAELAAERGALLVFAEHRYYGKSLPFGAQSTQRGHTELLTVEQALADFAELLRALRRDLGAQDAPAIAFGGRKPSHLSSQPPAQLGCAATLAAFPSESCTRTWPRVGICGSQKCRPPCGTCGPLRRKRGNGVLGAAALTLCPSPSYGGMLSAYLRMKYPHLVAGALAASAPVLAVAGLGDSNQFF

SEQ ID NO: 4431 - protein, 492 aa, Homo sapiens [sequence omitted]

SEQ ID NO: 4432 - protein, 61 aa, Homo sapiens
  VARIANT 1: note = misc_feature - Xaa can be any naturally occurring amino acid
XSGSEHCYDIYRLYHSCADPTGCGTGPDARAWDYQISEPPATSSSPTGTWTPGQGAGFGGT

SEQ ID NO: 4433 - protein, 155 aa, Homo sapiens
  VARIANT 1: note = misc_feature - Xaa can be any naturally occurring amino acid
XTFPQRFLVSDRFWVRGEGPIFFYTGNEGDVWAFANNSAFVAELAAERGALLVFAEHRYYGKSLPFGAQSTQRGHTELLTVEQALADFAELLRALRRDLGAQDAPAIAFGGSLRHGPLGVRHLPAAVRREGPDPALHVRPECLHRAGHDGLPLPH

SEQ ID NO: 4434 - protein, 244 aa, Homo sapiens
  VARIANT 1: note = misc_feature - Xaa can be any naturally occurring amino acid
XTVRWEFGTCQPLSDEKDLTQLFMFARNAFTVLAMMDYPYPTDFLGPLPANPVKVGCDRLLSEAQRITGLRALAGALPPAPDGCADPTGCGTGPDARAWDYQACTEINLTFASNNVTDMFPDLPFTDELRQRYCLDTWGVWPRPDWLLTSFWGGDLRAASNIIFSNGNLDPWAGGGIRRNLSASVIAVTIQGGAHHLDLRASHPEDPASVVEARKLEATIIGEWVKAARREQQPALRGGPRLSL

SEQ ID NO: 4435 - protein, 120 aa, Homo sapiens
  VARIANT 1: note = misc_feature - Xaa can be any naturally occurring amino acid
XVLLLALGLRGLQAGARRAPDPGFQERFFQQRLDHFNFERFGNKTFPQRFLVSGSGSGARGPSSSTLGTRATCGPSPTTRPSSRSWRPSGGLYWSSRSTATTGSRCRSVRSPRSAGTRSC

SEQ ID NO: 4436 - protein, 201 aa, Homo sapiens
MDLSLLWVLLPLVTMAWGQYGDYGYPYQQYHDYSDDGWVNLNRQGFSYQCPQGQVIVAVRSIFSKKEGSDRQWNYACMPTPQSLGEPTECWWEEINRAGMEWYQTCSNNGLVAGFQSRYFESVLDREWQFYCCRYSKRCPYSCWLTTEYPGHYGEEMDMISYNYDYYIRGATTTFSAVERDRQWKFIMCRMTEYDCEFANV

SEQ ID NO: 4437 - protein, 349 aa, Homo sapiens
MAGPAIHTAPMLFLVLLLPLELSLAGALAPGTPARNLPENHIDLPGPALWTPQASHHRRRGPGKKEWGPGLPSQAQDGAVVTATRQASRLPEAEGLLPEQSPAGLLQDKDLLLGLALPYPEKENRPPGWERTRKRSREHKRRRDRLRLHQGRALVRGPSSLMKKAELSEAQVLDAAMEESSTSLAPTMFFLTTFEAAPATEESLILPVTSLRPQQAQPRSDGEVMPTLDMALFDWTDYEDLKPDGWPSAKKKEKHRGKLSSDGNETSPAEGEPCDHHQDCLPGTCCDLREHLCTPHNRGLNNKCFDDCMCVEGLRCYAKFHRNRRVTRRKGRCVEPETANGDQGSFINV

SEQ ID NO: 4438 - protein, 136 aa, Homo sapiens
MRTHTRGAPSVFFIYLLCFVSAYITDENPEVMIPFTNANYDSHPMLYFSRAEVAELQLRAASSHEHIAARLTEAVHTMLSSPLEYLPPWDPKDYSARWNEIFGNNLGALAMFCVLYPENIEARDMAKDYMERMAAQ

SEQ ID NO: 4439 - protein, 139 aa, Homo sapiens
MRTHTRGAPSVFFIYLLCFVSAYITDENPEVMIPFTNANYDSHPMLYFSRAEVAELQLRAASSHEHIAARLTEAVHTMLSSPLEYLPPWDPKDYSARWNEIFGNNLGALAMFCVLYPENIEARDMAKDYMERMAAQPSW

SEQ ID NO: 4440 - protein, 144 aa, Homo sapiens
MRTHTRGAPSVFFIYLLCFVSAYITDENPEVMIPFTNANYDSHPMLYFSRAEVAELQLRAASSHEHIAARLTEAVHTMLSSPLEYLPPWDPKDYSARWNEIFGNNLGALAMFCVLYPENIEARDMAKDYMERMAAQPSWLVKDA

SEQ ID NO: 4441 - protein, 228 aa, Homo sapiens
MRTHTRGAPSVFFIYLLCFVSAYITDENPEVMIPFTNANYDSHPMLYFSRAEVAELQLRAASSHEHIAARLTEAVHTMLSSPLEYLPPWDPKDYSARWNEIFGNNLGALAMFCVLYPENIEARDMAKDYMERMAAQPSWLVKDAPWDEVPLAHSLVGFATAYDFLYNYLSKTQQEKFLEVIANASGYMYETSYRRGWGFQYLHNHQPTNCMALLTGSLVLMNQGMMAA

SEQ ID NO: 4442 - protein, 228 aa, Homo sapiens; identical to SEQ ID NO: 4441

SEQ ID NO: 4443 - protein, 958 aa, Homo sapiens [sequence omitted]

SEQ ID NO: 4444 - protein, 308 aa, Homo sapiens
MRTHTRGAPSVFFIYLLCFVSAYITDENPEVMIPFTNANYDSHPMLYFSRAEVAELQLRAASSHEHIAARLTEAVHTMLSSPLEYLPPWDPKDYSARWNEIFGNNLGALAMFCVLYPENIEARDMAKDYMERMAAQPSWLVKDAPWDEVPLAHSLVGFATAYDFLYNYLSKTQQEKFLEVIANASGYMYETSYRRGWGFQYLHNHQPTNCMALLTGSLVLMNQGYLQEAYLWTKQVLTIMEKSLVLLREVTDGSLYEGVAYGSYTTRSLFQYMFLVQRHFNINHFGHPWLKQHFAFMYRTILPGMMAA

SEQ ID NO: 4445 - protein, 958 aa, Homo sapiens [sequence omitted]

SEQ ID NO: 4446 - protein, 958 aa, Homo sapiens [sequence omitted]

SEQ ID NO: 4447 - protein, 1118 aa, Homo sapiens
MARSPGRAYALLLLLICFNVGSGLHLQVLSTRNENKLLPKHPHLVRQKRAWITAPVALREGEDLSKKNPIAKIHSDLAEERGLKITYKYTGKGITEPPFGIFVFNKDTGELNVTSILDREETPFFLLTGYALDARGNNVEKPLELRIKVLDINDNEPVFTQDVFVGSVEELSAAHTLVMKINATDADEPNTLNSKISYRIVSLEPAYPPVFYLNKDTGEIYTTSVTLDREEHSSYTLTVEARDGNGEVTDKPVKQAQVQIRILDVNDNIPVVENKVLEGMVEENQVNVEVTRIKVFDADEIGSDNWLANFTFASGNEGGYFHIETDAQTNEGIVTLIKEVDYEEMKNLDFSVIVANKAAFHKSIRSKYKPTPIPIKVKVKNVKEGIHFKSSVISIYVSESMDRSSKGQIIGNFQAFDEDTGLPAHARYVKLEDRDNWISVDSVTSEIKLAKLPDFESRYVQNGTYTVKIVAISEDYPRKTITGTVLINVEDINDNCPTLIEPVQTICHDAEYVNVTAEDLDGHPNSGPFSFSVIDKPPGMAEKWKIARQESTSVLLQQSEKKLGRSEIQFLISDNQGFSCPEKQVLTLTVCECLHGSGCREAQHDSYVGLGPAAIALMILAFLLLLLVPLLLLMCHCGKGAKGFTPIPGTIEMLHPWNNEGAPPEDKVVPSFLPVDQGGSLVGRNGVGGMAKEATMKGSSSASIVKGQHEMSEMDGRWEEHRSLLSGRATQFTGATGAIMTTETTKTARATGASRDMAGAQAAAVALNEEFLRNYFTDKAASYTEEDENHTAKDCLLVYSQEETESLNASIGCCSFIEGELDDRFLDDLGLKFKTLAEVCLGQKIDINKEIEQRQKPATETSMNTASHSLCEQTMVNSENTYSSGSSFPVPKSLQEANAEKVTQEIVTERSVSSRQAQKVATPLPDPMASRNVIATETSYVTGSTMPPTTVILGPSQPQSLIVTERVYAPASTLVDQPYANEGTVVVTERVIQPHGGGSNPLEGTQHLQDVPYVMVRERESFLAPSSGVQPTLAMPNIAVGQNVTVTERVLAPASTLQSSYQIPTENSMTARNTTVSGAGVPGPLPDFGLEESGHSNSTITTSSTRVTKHSTVQHSYS

SEQ ID NO: 4448 - protein, 232 aa, Homo sapiens
MARSPGRAYALLLLLICFNVGSGLHLQVLSTRNENKLLPKHPHLVRQKRAWITAPVALREGEDLSKKNPIAKIHSDLAEERGLKITYKYTGKGITEPPFGIFVFNKDTGELNVTSILDREETPFFLLTGYALDARGNNVEKPLELRIKVLDINDNEPVFTQDVFVGSVEELSAAHTLVMKINATDADEPNTLNSKISYRIVSLEPAYPPVFYLNKDTGEIYTTSVTLDREVS

SEQ ID NO: 4449 - protein, 1301 aa, Homo sapiens
MKIITYFCIWAVAWAIPVPQSKPLERHVEKSMNLHLLARSNVSVQDELNASGTIKESGVLVHEGDRGRQENTQDGHKGEGNGSKWAEVGGKSFSTYSTLANEEGNIEGWNGDTGKAETYGHDGIHGKEENITANGIQGQVSIIDNAGATNRSNTNGNTDKNTQNGDVGDAGHNEDVAVVQEDGPQVAGSNNSTDNEDEIIENSCRNEGNTSEITPQINSKRNGTKEAEVTPGTGEDAGLDNSDGSPSGNGADEDEDEGSGDDEDEEAGNGKDSSNNSKGQEGQDHGKEDDHDSSIGQNSDSKEYYDPEGKEDPHNEVDGDKTSKSEENSAGIPEDNGSQRIEDTQKLNHRESKRVENRITKESETHAVGKSQDKGIEIKGPSSGNRNITKEVGKGNEGKEDKGQHGMILGKGNVKTQGEVVNIEGPGQKSEPGNKVGHSNTGSDSNSDGYDSYDFDDKSMQGDDPNSSDESNGNDDANSESDNNSSSRGDASYNSDESKDNGNGSDSKGAEDDDSDSTSDTNNSDSNGNGNNGNDDNDKSDSGKGKSDSSDSDSSDSSNSSDSSDSSDSDSSDSNSSSDSDSSDSDSSDSSDSDSSDSSNSSDSSDSSDSSDSSDSSDSSDSKSDSSKSESDSSDSDSKSDSSDSNSSDSSDNSDSSDSSNSSNSSDSSDSSDSSDSSSSSDSSNSSDSSDSSDSSNSSESSDSSDSSDSDSSDSSDSSNSNSSDSDSSNSSDSSDSSNSSDSSDSSDSSNSSDSSDSSDSSNSSDSSDSSDSSDSSDSSNSSDSNDSSNSSDSSDSSNSSDSSNSSDSSDSSDSSDSDSSNSSDSSNSSDSSDSSNSSDSSDSSDSSDGSDSDSSNRSDSSNSSDSSDSSDSSNSSDSSDSSDSNESSNSSDSSDSSNSSDSDSSDSSNSSDSSDSSNSSDSSESSNSSDNSNSSDSSNSSDSSDSSDSSNSSDSSNSSDSSNSSDSSDSNSSDSSDSSNSSDSSDSSDSSDSSDSSDSSNSSDSSDSSDSSDSSNSSDSSNSSDSSNSSDSSDSSDSSDSSDSSDSSDSSDSSNSSDSSDSSDSSDSSDSSDSSDSSDSSESSDSSDSSNSSDSSDSSDSSDSSDSSDSSDSSDSSDSSNSSDSSDSSDSSDSSDSSNSSDSSDSSESSDSSDSSDSSDSSDSSDSSDSSDSSDSSNSSDSSDSSDSSDSSDSSDSSDSSDSSDSSDSSDSSDSSDSSDSSDSSDSSDSNESSDSSDSSDSSDSSNSSDSSDSSDSSDSTSDSNDESDSQSKSGNGNNNGSDSDSDSEGSDSNHSTSDD

SEQ ID NO: 4450 - protein, 1301 aa, Homo sapiens; identical to SEQ ID NO: 4449

SEQ ID NO: 4451 - protein, 123 aa, Homo sapiens
EMTRKQPDVDKVTKTYKRRAADPSSLQSHIPVLDKGRAGRKRFPASSLYPSGSQTQIETKNPRVNLLVSKWQQVWLLALERRRKLNDALDRLEEVWKFIPSTPHCHLPSFLITHCHCQNLGIF

SEQ ID NO: 4452 - protein, 7461 aa, Homo sapiens
MAGYLSPAAYLYVEEQEYLQAYEDVLERYKDERDKVQKKTFTKWINQHLMKVRKHVNDLYEDLRDGHNLISLLEVLSGDTLPREKGRMRFHRLQNVQIALDYLKRRQVKLVNIRNDDITDGNPKLTLGLIWTIILHFQISDIHVTGESEDMSAKERLLLWTQQATEGYAGIRCENFTTCWRDGKLFNAIIHKYRPDLIDMNTVAVQSNLANLEHAFYVAEKIGVIRLLDPEDVDVSSPDEKSVITYVSSLYDAFPKVPEGGEGIGANDVEVKWIEYQNMVNYLIQWIRHHVTTMSERTFPNNPVELKALYNQYLQFKETEIPPKETEKSKIKRLYKLLEIWIEFGRIKLLQGYHPNDIEKEWGKLIIAMLEREKALRPEVERLEMLQQIANRVQRDSVICEDKLILAGNALQSDSKRLESGVQFQNEAEIAGYILECENLLRQHVIDVQILIDGKYYQADQLVQRVAKLRDEIMALRNECSSVYSKGRILTTEQTKLMISGITQSLNSGFAQTLHPSLTSGLTQSLTPSLTSSSMTSGLSSGMTSRLTPSVTPAYTPGFPSGLVPNFSSGVEPNSLQTLKLMQIRKPLLKSSLLDQNLTEEEINMKFVQDLLNWVDEMQVQLDRTEWGSDLPSVESHLENHKNVHRAIEEFESSLKEAKISEIQMTAPLKLTYAEKLHRLESQYAKLLNTSRNQERHLDTLHNFVSRATNELIWLNEKEEEEVAYDWSERNTNIARKKDYHAELMRELDQKEENIKSVQEIAEQLLLENHPARLTIEAYRAAMQTQWSWILQLCQCVEQHIKENTAYFEFFNDAKEATDYLRNLKDAIQRKYSCDRSSSIHKLEDLVQESMEEKEELLQYKSTIANLMGKAKTIIQLKPRNSDCPLKTSIPIKAICDYRQIEITIYKDDECVLANNSHRAKWKVISPTGNEAMVPSVCFTVPPPNKEAVDLANRIEQQYQNVLTLWHESHINMKSVVSWHYLINEIDRIRASNVASIKTMLPGEHQQVLSNLQSRFEDFLEDSQESQVFSGSDITQLEKEVNVCKQYYQELLKSAEREEQEESVYNLYISEVRNIRLRLENCEDRLIRQIRTPLERDDLHESVFRITEQEKLKKELERLKDDLGTITNKCEEFFSQAAASSSVPTLRSELNVVLQNMNQVYSMSSTYIDKLKTVNLVLKNTQAAEALVKLYETKLCEEEAVIADKNNIENLISTLKQWRSEVDEKRQVFHALEDELQKAKAISDEMFKTYKERDLDFDWHKEKADQLVERWQNVHVQIDNRLRDLEGIGKSLKYYRDTYHPLDDWIQQVETTQRKIQENQPENSKTLATQLNQQKMLVSEIEMKQSKMDECQKYAEQYSATVKDYELQTMTYRAMVDSQQKSPVKRRRMQSSADLIIQEFMDLRTRYTALVTLMTQYIKFAGDSLKRLEEEEKSLEEEKKEHVEKAKELQKWVSNISKTLKDAEKAGKPPFSKQKISSEEISTKKEQLSEALQTIQLFLAKHGDKMTDEERNELEKQVKTLQESYNLLFSESLKQLQESQTSGDVKVEEKLDKVIAGTIDQTTGEVLSVFQAVLRGLIDYDTGIRLLETQLMISGLISPELRKCFDLKDAKSHGLIDEQILCQLKELSKAKEIISAASPTTIPVLDALAQSMITESMAIKVLEILLSTGSLVIPATGEQLTLQKAFQQNLVSSALFSKVLERQNMCKDLIDPCTSEKVSLIDMVQRSTLQENTGMWLLPVRPQEGGRITLKCGRNISILRAAHEGLIDRETMFRLLSAQLLSGGLINSNSGQRMTVEEAVREGVIDRDTASSILTYQVQTGGIIQSNPAKRLTVDEAVQCDLITSSSALLVLEAQRGYVGLIWPHSGEIFPTSSSLQQELITNELAYKILNGRQKIAALYIPESSQVIGLDAAKQLGIIDNNTASILKNITLPDKMPDLGDLEACKNARRWLSFCKFQPSTVHDYRQEEDVFDGEEPVTTQTSEETKKLFLSYLMINSYMDANTGQRLLLYDGDLDEAVGMLLEGCHAEFDGNTAIKECLDVLSSSGVFLNNASGREKDECTATPSSFNKCHCGEPEHEETPENRKCAIDEEFNEMRNTVINSEFSQSGKLASTISIDPKVNSSPSVCVPSLISYLTQTELADISMLRSDSENILTNYENQSRVETNERANECSHSKNIQNFPSDLIENPIMKSKMSKFCGVNETENEDNTNRDSPIFDYSPRLSALLSHDKLMHSQGSFNDTHTPESNGNKCEAPALSFSDKTMLSGQRIGEKFQDQFLGIAAINISLPGEQYGQKSLNMISSNPQVQYHNDKYISNTSGEDEKTHPGFQQMPEDKEDESEIEEYSCAVTPGGDTDNAIVSLTCATPLLDETISASDYETSLLNDQQNNTGTDTDSDDDFYDTPLFEDDDHDSLLLDGDDRDCLHPEDYDTLQEENDETASPADVFYDVSKENENSMVPQGAPVGSLSVKNKAHCLQDFLMDVEKDELDSGEKIHLNPVGSDKVNGQSLETGSERECTNILEGDESDSLTDYDIVGGKESFTASLKFDDSGSWRGRKEEYVTGQEFHSDTDHLDSMQSEESYGDYIYDSNDQDDDDDDGIDEEGGGIRDENGKPRCQNVAEDMDIQLCASILNENSDENENINTMILLDKMHSCSSLEKQQRVNVVQLASPSENNLVTEKSNLPEYTTEIAGKSKENLLNHEMVLKDVLPPIIKDTESEKTFGPASISHDNNNISSTSELGTDLANTKVKLIQGSELPELTDSVKGKDEYFKNMTPKVDSSLDHIICTEPDLIGKPAEESHLSLIASVTDKDPQGNGSDLIKGRDGKSDILIEDETSIQKMYLGEGEVLVEGLVEEENRHLKLLPGKNTRDSFKLINSQFPFPQITNNEELNQKGSLKKATVTLKDEPNNLQIIVSKSPVQFENLEEIFDTSVSKEISDDITSDITSWEGNTHFEESFTDGPEKELDLFTYLKHCAKNIKAKDVAKPNEDVPSHVLITAPPMKEHLQLGVNNTKEKSTSTQKDSPLNDMIQSNDLCSKESISGGGTEISQFTPESIEATLSILSRKHVEDVGKNDFLQSERCANGLGNDNSSNTLNTDYSFLEINNKKERIEQQLPKEQALSPRSQEKEVQIPELSQVFVEDVKDILKSRLKEGHMNPQEVEEPSACADTKILIQNLIKRITTSQLVNEASTVPSDSQMSDSSGVSPMTNSSELKPESRDDPFCIGNLKSELLLNILKQDQHSQKITGVFELMRELTHMEYDLEKRGITSKVLPLQLENIFYKLLADGYSEKIEHVGDFNQKACSTSEMMEEKPHILGDIKSKEGNYYSPNLETVKEIGLESSTVWASTLPRDEKLKDLCNDFPSHLECTSGSKEMASGDSSTEQFSSELQQCLQHTEKMHEYLTLLQDMKPPLDNQESLDNNLEALKNQLRQLETFELGLAPIAVILRKDMKLAEEFLKSLPSDFPRGHVEELSISHQSLKTAFSSLSNVSSERTKQIMLAIDSEMSKLAVSHEEFLHKLKSFSDWVSEKSKSVKDIEIVNVQDSEYVKKRLEFLKNVLKDLGHTKMQLETTAFDVQFFISEYAQDLSPNQSKQLLRLLNTTQKCFLDVQESVTTQVERLETQLHLEQDLDDQKIVAERQQEYKEKLQGICDLLTQTENRLIGHQEAFMIGDGTVELKKYQSKQEELQKDMQGSAQALAEVVKNTENFLKENGEKLSQEDKALIEQKLNEAKIKCEQLNLKAEQSKKELDKVVTTAIKEETEKVAAVKQLEESKTKIENLLDWLSNVDKDSERAGTKHKQVIEQNGTHFQEGDGKSAIGEEDEVNGNLLETDVDGQVGTTQENLNQQYQKVKAQHEKIISQHQAVIIATQSAQVLLEKQGQYLSPEEKEKLQKNMKELKVHYETALAESEKKMKLTHSLQEELEKFDADYTEFEHWLQQSEQELENLEAGADDINGLMTKLKRQKSFSEDVISHKGDLRYITISGNRVLEAAKSCSKRDGGKVDTSATHREVQRKLDHATDRFRSLYSKCNVLGNNLKDLVDKYQHYEDASCGLLAGLQACEATASKHLSEPIAVDPKNLQRQLEETKALQGQISSQQVAVEKLKKTAEVLLDARGSLLPAKNDIQKTLDDIVGRYEDLSKSVNERNEKLQITLTRSLSVQDGLDEMLDWMGNVESSLKEQGQVPLNSTALQDIISKNIMLEQDIAGRQSSINAMNEKVKKFMETTDPSTASSLQAKMKDLSARFSEASHKHKETLAKMEELKTKVELFENLSEKLQTFLETKTQALTEVDVPGKDVTELSQYMQESTSEFLEHKKHLEVLHSLLKEISSHGLPSDKALVLEKTNNLSKKFKEMEDTIKEKKEAVTSCQEQLDAFQVLVKSLKSWIKETTKKVPIVQPSFGAEDLGKSLEDTKKLQEKWSLKTPEIQKVNNSGISLCNLISAVTTPAKAIAAVKSGGAVLNGEGTATNTEEFWANKGLTSIKKDMTDISHGYEDLGLLLKDKIAELNTKLSKLQKAQEESSAMMQWLQKMNKTATKWQQTPAPTDTEAVKTQVEQNKSFEAELKQNVNKVQELKDKLTELLEENPDTPEAPRWKQMLTEIDSKWQELNQLTIDRQQKLEESSNNLTQFQTVEAQLKQWLVEKELMVSVLGPLSIDPNMLNTQRQQVQILLQEFATRKPQYEQLTAAGQGILSRPGEDPSLRGIVKEQLAAVTQKWDSLTGQLSDRCDWIDQAIVKSTQYQSLLRSLSDKLSDLDNKLSSSLAVSTHPDAMNQQLETAQKMKQEIQQEKKQIKVAQALCEDLSALVKEEYLKAELSRQLEGILKSFKDVEQKAENHVQHLQSACASSHQFQQMSRDFQAWLDTKKEEQNKSHPISAKLDVLESLIKDHKDFSKTLTAQSHMYEKTIAEGENLLLKTQGSEKAALQLQLNTIKTNWDTFNKQVKERENKLKESLEKALKYKEQVETLWPWIDKCQNNLEEIKFCLDPAEGENSIAKLKSLQKEMDQHFGMVELLNNTANSLLSVCEIDKEVVTDENKSLIQKVDMVTEQLHSKKFCLENMTQKFKEFQEVSKESKRQLQCAKEQLDIHDSLGSQAYSNKYLTMLQTQQKSLQALKHQVDLAKRLAQDLVVEASDSKGTSDVLLQVETIAQEHSTLSQQVDEKCSFLETKLQGIGHFQNTIREMFSQFAEFDDELDSMAPVGRDAETLQKQKETIKAFLKKLEALMASNDNANKTCKMMLATEETSPDLVGIKRDLEALSKQCNKLLDRAQAREEQVEGTIKRLEEFYSKLKEFSILLQKAEEHEESQGPVGMETETINQQLNMFKVFQKEEIEPLQGKQQDVNWLGQGLIQSAAKSTSTQGLEHDLDDVNARWKTLNKKVAQRAAQLQEALLHCGRFQDALESLLSWMVDTEELVANQKPPSAEFKVVKAQIQEQKLLQRLLDDRKSTVEVIKREGEKIATTAEPADKVKILKQLSLLDSRWEALLNKAETRNRQLEGISVVAQQFHETLEPLNEWLTTIEKRLVNCEPIGTQASKLEEQIAQHKVLQEDILLRKQNVDQALLNGLELLKQTTGDEVLIIQDKLEAIKARYKDITKLSTDVAKTLEQALQLARRLHSTHEELCTWLDKVEVELLSYETQVLKGEEASQAQMRPKELKKEAKNNKALLDSLNEVSSALLELVPWRAREGLEKMVAEDNERYRLVSDTITQKVEEIDAAILRSQQFDQAADAELSWITETEKKLMSLGDIRLEQDQTSAQLQVQKTFTMEILRHKDIIDDLVKSGHKIMTACSEEEKQSMKKKLDKVLKNYDTICQINSERYLQLERAQSLVNQFWETYEELWPWLTETQSIISQLPAPALEYETLRQQQEEHRQLRELIAEHKPHIDKMNKTGPQLLELSPGEGFSIQEKYVAADTLYSQIKEDVKKRAVALDEAISQSTQFHDKIDQILESLERIVERLRQPPSISAEVEKIKEQISENKNVSVDMEKLQPLYETLKQRGEEMIARSGGTDKDISAKAVQDKLDQMVFIWENIHTLVEEREAKLLDVMELAEKFWCDHMSLIVTIKDTQDFIRDLEDPGIDPSVVKQQQEAAETIREEIDGLQEELDIVINLGSELIAACGEPDKPIVKKSIDELNSAWDSLNKAWKDRIDKLEEAMQAAVQYQDGLQAVFDWVDIAGGKLASMSPIGTDLETVKQQIEELKQFKSEAYQQQIEMERLNHQAELLLKKVTEESDKHTVQDPLMELKLIWDSLEERIINRQHKLEGALLALGQFQHALDELLAWLTHTEGLLSEQKPVGGDPKAIEIELAKHHVLQNDVLAHQSTVEAVNKAGNDLIESSAGEEASNLQNKLEVLNQRWQNVLEKTEQRKQQLDGALRQAKGFHGEIEDLQQWLTDTERHLLASKPLGGLPETAKEQLNVHMEVCAAFEAKEETYKSLMQKGQQMLARCPKSAETNIDQDINNLKEKWESVETKLNERKTKLEEALNLAMEFHNSLQDFINWLTQAEQTLNVASRPSLILDTVLFQIDEHKVFANEVNSHREQIIELDKTGTHLKYFSQKQDVVLIKNLLISVQSRWEKVVQRLVERGRSLDDARKRAKQFHEAWSKLMEWLEESEKSLDSELEIANDPDKIKTQLAQHKEFQKSLGAKHSVYDTTNRTGRSLKEKTSLADDNLKLDDMLSELRDKWDTICGKSVERQNKLEEALLFSGQFTDALQALIDWLYRVEPQLAEDQPVHGDIDLVMNLIDNHKAFQKELGKRTSSVQALKRSARELIEGSRDDSSWVKVQMQELSTRWETVCALSISKQTRLEAALRQAEEFHSVVHALLEWLAEAEQTLRFHGVLPDDEDALRTLIDQHKEFMKKLEEKRAELNKATTMGDTVLAICHPDSITTIKHWITIIRARFEEVLAWAKQHQQRLASALAGLIAKQELLEALLAWLQWAETTLTDKDKEVIPQEIEEVKALIAEHQTFMEEMTRKQPDVDKVTKTYKRRAADPSSLQSHIPVLDKGRAGRKRFPASSLYPSGSQTQIETKNPRVNLLVSKWQQVWLLALERRRKLNDALDRLEELREFANFDFDIWRKKYMRWMNHKKSRVMDFFRRIDKDQDGKITRQEFIDGILSSKFPTSRLEMSAVADIFDRDGDGYIDYYEFVAALHPNKDAYKPITDADKIEDEVTRQVAKCKCAKRFQVEQIGDNKYRFFLGNQFGDSQQLRLVRILRSTVMVRVGGGWMALDEFLVKNDPCRVHHHGSKMLRSESNSSITTTQPTIAKGRTNMELREKFILADGASQGMAAFRPRGRRSRPSSRGASPNRSTSVSSQAAQAASPQVPATTTPKGTPIQGSKLRLPGYLSGKGFHSGEDSGLITTAAARVRTQFADSKKTPSRPGSRAGSKAGSRASSRRGSDASDFDISEIQSVCSDVETVPQTHRPTPRAGSRPSTAKPSKIPTPQRKSPASKLDKSSKR

SEQ ID NO: 4453 - protein, 5375 aa, Homo sapiens
MAGYLSPAAYLYVEEQEYLQAYEDVLERYKDERDKVQKKTFTKWINQHLMKVRKHVNDLYEDLRDGHNLISLLEVLSGDTLPREKGRMRFHRLQNVQIALDYLKRRQVKLVNIRNDDITDGNPKLTLGLIWTIILHFQISDIHVTGESEDMSAKERLLLWTQQATEGYAGIRCENFTTCWRDGKLFNAIIHKYRPDLIDMNTVAVQSNLANLEHAFYVAEKIGVIRLLDPEDVDVSSPDEKSVITYVSSLYDAFPKVPEGGEGIGANDVEVKWIEYQNMVNYLIQWIRHHVTTMSERTFPNNPVELKALYNQYLQFKETEIPPKETEKSKIKRLYKLLEIWIEFGRIKLLQGYHPNDIEKEWGKLIIAMLEREKALRPEVERLEMLQQIANRVQRDSVICEDKLILAGNALQSDSKRLESGVQFQNEAEIAGYILECENLLRQHVIDVQILIDGKYYQADQLVQRVAKLRDEIMALRNECSSVYSKGRILTTEQTKLMISGITQSLNSGFAQTLHPSLTSGLTQSLTPSLTSSSMTSGLSSGMTSRLTPSVTPAYTPGFPSGLVPNFSSGVEPNSLQTLKLMQIRKPLLKSSLLDQNLTEEEINMKFVQDLLNWVDEMQVQLDRTEWGSDLPSVESHLENHKNVHRAIEEFESSLKEAKISEIQMTAPLKLTYAEKLHRLESQYAKLLNTSRNQERHLDTLHNFVSRATNELIWLNEKEEEEVAYDWSERNTNIARKKDYHAELMRELDQKEENIKSVQEIAEQLLLENHPARLTIEAYRAAMQTQWSWILQLCQCVEQHIKENTAYFEFFNDAKEATDYLRNLKDAIQRKYSCDRSSSIHKLEDLVQESMEEKEELLQYKSTIANLMGKAKTIIQLKPRNSDCPLKTSIPIKAICDYRQIEITIYKDDECVLANNSHRAKWKVISPTGNEAMVPSVCFTVPPPNKEAVDLANRIEQQYQNVLTLWHESHINMKSVVSWHYLINEIDRIRASNVASIKTMLPGEHQQVLSNLQSRFEDFLEDSQESQVFSGSDITQLEKEVNVCKQYYQELLKSAEREEQEESVYNLYISEVRNIRLRLENCEDRLIRQIRTPLERDDLHESVFRITEQEKLKKELERLKDDLGTITNKCEEFFSQAAASSSVPTLRSELNVVLQNMNQVYSMSSTYIDKLKTVNLVLKNTQAAEALVKLYETKLCEEEAVIADKNNIENLISTLKQWRSEVDEKRQVFHALEDELQKAKAISDEMFKTYKERDLDFDWHKEKADQLVERWQNVHVQIDNRLRDLEGIGKSLKYYRDTYHPLDDWIQQVETTQRKIQENQPENSKTLATQLNQQKMLVSEIEMKQSKMDECQKYAEQYSATVKDYELQTMTYRAMVDSQQKSPVKRRRMQSSADLIIQEFMDLRTRYTALVTLMTQYIKFAGDSLKRLEEEEKSLEEEKKEHVEKAKELQKWVSNISKTLKDAEKAGKPPFSKQKISSEEISTKKEQLSEALQTIQLFLAKHGDKMTDEERNELEKQVKTLQESYNLLFSESLKQLQESQTSGDVKVEEKIVAERQQEYKEKLQGICDLLTQTENRLIGHQEAFMIGDGTVELKKYQSKQEELQKDMQGSAQALAEVVKNTENFLKENGEKLSQEDKALIEQKLNEAKIKCEQLNLKAEQSKKELDKVVTTAIKEETEKVAAVKQLEESKTKIENLLDWLSNVDKDSERAGTKHKQVIEQNGTHFQEGDGKSAIGEEDEVNGNLLETDVDGQVGTTQENLNQQYQKVKAQHEKIISQHQAVIIATQSAQVLLEKQGQYLSPEEKEKLQKNMKELKVHYETALAESEKKMKLTHSLQEELEKFDADYTEFEHWLQQSEQELENLEAGADDINGLMTKLKRQKSFSEDVISHKGDLRYITISGNRVLEAAKSCSKRDGGKVDTSATHREVQRKLDHATDRFRSLYSKCNVLGNNLKDLVDKYQHYEDASCGLLAGLQACEATASKHLSEPIAVDPKNLQRQLEETKALQGQISSQQVAVEKLKKTAEVLLDARGSLLPAKNDIQKTLDDIVGRYEDLSKSVNERNEKLQITLTRSLSVQDGLDEMLDWMGNVESSLKEQGQVPLNSTALQDIISKNIMLEQDIAGRQSSINAMNEKVKKFMETTDPSTASSLQAKMKDLSARFSEASHKHKETLAKMEELKTKVELFENLSEKLQTFLETKTQALTEVDVPGKDVTELSQYMQESTSEFLEHKKHLEVLHSLLKEISSHGLPSDKALVLEKTNNLSKKFKEMEDTIKEKKEAVTSCQEQLDAFQVLVKSLKSWIKETTKKVPIVQPSFGAEDLGKSLEDTKKLQEKWSLKTPEIQKVNNSGISLCNLISAVTTPAKAIAAVKSGGAVLNGEGTATNTEEFWANKGLTSIKKDMTDISHGYEDLGLLLKDKIAELNTKLSKLQKAQEESSAMMQWLQKMNKTATKWQQTPAPTDTEAVKTQVEQNKSFEAELKQNVNKVQELKDKLTELLEENPDTPEAPRWKQMLTEIDSKWQELNQLTIDRQQKLEESSNNLTQFQTVEAQLKQWLVEKELMVSVLGPLSIDPNMLNTQRQQVQILLQEFATRKPQYEQLTAAGQGILSRPGEDPSLRGIVKEQLAAVTQKWDSLTGQLSDRCDWIDQAIVKSTQYQSLLRSLSDKLSDLDNKLSSSLAVSTHPDAMNQQLETAQKMKQEIQQEKKQIKVAQALCEDLSALVKEEYLKAELSRQLEGILKSFKDVEQKAENHVQHLQSACASSHQFQQMSRDFQAWLDTKKEEQNKSHPISAKLDVLESLIKDHKDFSKTLTAQSHMYEKTIAEGENLLLKTQGSEKAALQLQLNTIKTNWDTFNKQVKERENKLKESLEKALKYKEQVETLWPWIDKCQNNLEEIKFCLDPAEGENSIAKLKSLQKEMDQHFGMVELLNNTANSLLSVCEIDKEVVTDENKSLIQKVDMVTEQLHSKKFCLENMTQKFKEFQEVSKESKRQLQCAKEQLDIHDSLGSQAYSNKYLTMLQTQQKSLQALKHQVDLAKRLAQDLVVEASDSKGTSDVLLQVETIAQEHSTLSQQVDEKCSFLETKLQGIGHFQNTIREMFSQFAEFDDELDSMAPVGRDAETLQKQKETIKAFLKKLEALMASNDNANKTCKMMLATEETSPDLVGIKRDLEALSKQCNKLLDRAQAREEQVEGTIKRLEEFYSKLKEFSILLQKAEEHEESQGPVGMETETINQQLNMFKVFQKEEIEPLQGKQQDVNWLGQGLIQSAAKSTSTQGLEHDLDDVNARWKTLNKKVAQRAAQLQEALLHCGRFQDALESLLSWMVDTEELVANQKPPSAEFKVVKAQIQEQKLLQRLLDDRKSTVEVIKREGEKIATTAEPADKVKILKQLSLLDSRWEALLNKAETRNRQLEGISVVAQQFHETLEPLNEWLTTIEKRLVNCEPIGTQASKLEEQIAQHKVLQEDILLRKQNVDQALLNGLELLKQTTGDEVLIIQDKLEAIKARYKDITKLSTDVAKTLEQALQLARRLHSTHEELCTWLDKVEVELLSYETQVLKGEEASQAQMRPKELKKEAKNNKALLDSLNEVSSALLELVPWRAREGLEKMVAEDNERYRLVSDTITQKVEEIDAAILRSQQFDQAADAELSWITETEKKLMSLGDIRLEQDQTSAQLQVQKTFTMEILRHKDIIDDLVKSGHKIMTACSEEEKQSMKKKLDKVLKNYDTICQINSERYLQLERAQSLVNQFWETYEELWPWLTETQSIISQLPAPALEYETLRQQQEEHRQLRELIAEHKPHIDKMNKTGPQLLELSPGEGFSIQEKYVAADTLYSQIKEDVKKRAVALDEAISQSTQFHDKIDQILESLERIVERLRQPPSISAEVEKIKEQISENKNVSVDMEKLQPLYETLKQRGEEMIARSGGTDKDISAKAVQDKLDQMVFIWENIHTLVEEREAKLLDVMELAEKFWCDHMSLIVTIKDTQDFIRDLEDPGIDPSVVKQQQEAAETIREEIDGLQEELDIVINLGSELIAACGEPDKPIVKKSIDELNSAWDSLNKAWKDRIDKLEEAMQAAVQYQDGLQAVFDWVDIAGGKLASMSPIGTDLETVKQQIEELKQFKSEAYQQQIEMERLNHQAELLLKKVTEESDKHTVQDPLMELKLIWDSLEERIINRQHKLEGALLALGQFQHALDELLAWLTHTEGLLSEQKPVGGDPKAIEIELAKHHVLQNDVLAHQSTVEAVNKAGNDLIESSAGEEASNLQNKLEVLNQRWQNVLEKTEQRKQQLDGALRQAKGFHGEIEDLQQWLTDTERHLLASKPLGGLPETAKEQLNVHMEVCAAFEAKEETYKSLMQKGQQMLARCPKSAETNIDQDINNLKEKWESVETKLNERKTKLEEALNLAMEFHNSLQDFINWLTQAEQTLNVASRPSLILDTVLFQIDEHKVFANEVNSHREQIIELDKTGTHLKYFSQKQDVVLIKNLLISVQSRWEKVVQRLVERGRSLDDARKRAKQFHEAWSKLMEWLEESEKSLDSELEIANDPDKIKTQLAQHKEFQKSLGAKHSVYDTTNRTGRSLKEKTSLADDNLKLDDMLSELRDKWDTICGKSVERQNKLEEALLFSGQFTDALQALIDWLYRVEPQLAEDQPVHGDIDLVMNLIDNHKAFQKELGKRTSSVQALKRSARELIEGSRDDSSWVKVQMQELSTRWETVCALSISKQTRLEAALRQAEEFHSVVHALLEWLAEAEQTLRFHGVLPDDEDALRTLIDQHKEFMKKLEEKRAELNKATTMGDTVLAICHPDSITTIKHWITIIRARFEEVLAWAKQHQQRLASALAGLIAKQELLEALLAWLQWAETTLTDKDKEVIPQEIEEVKALIAEHQTFMEEMTRKQPDVDKVTKTYKRRAADPSSLQSHIPVLDKGRAGRKRFPASSLYPSGSQTQIETKNPRVNLLVSKWQQVWLLALERRRKLNDALDRLEELREFANFDFDIWRKKYMRWMNHKKSRVMDFFRRIDKDQDGKITRQEFIDGILSSKFPTSRLEMSAVADIFDRDGDGYIDYYEFVAALHPNKDAYKPITDADKIEDEVTRQVAKCKCAKRFQVEQIGDNKYRFFLGNQFGDSQQLRLVRILRSTVMVRVGGGWMALDEFLVKNDPCRVHHHGSKMLRSESNSSITTTQPTIAKGRTNMELREKFILADGASQGMAAFRPRGRRSRPSSRGASPNRSTSVSSQAAQAASPQVPATTTPKGTPIQGSKLRLPGYLSGKGFHSGEDSGLITTAAARVRTQFADSKKTPSRPGSRAGSKAGSRASSRRGSDASDFDISEIQSVCSDVETVPQTHRPTPRAGSRPSTAKPSKIPTPQRKSPASKLDKSSKR

SEQ ID NO: 4454 - protein, 5497 aa, Homo sapiens
MAGYLSPAAYLYVEEQEYLQAYEDVLERYKDERDKVQKKTFTKWINQHLMKVRKHVNDLYEDLRDGHNLISLLEVLSGDTLPREKGRMRFHRLQNVQIALDYLKRRQVKLVNIRNDDITDGNPKLTLGLIWTIILHFQISDIHVTGESEDMSAKERLLLWTQQATEGYAGIRCENFTTCWRDGKLFNAIIHKYRPDLIDMNTVAVQSNLANLEHAFYVAEKIGVIRLLDPEDVDVSSPDEKSVITYVSSLYDAFPKVPEGGEGIGANDVEVKWIEYQNMVNYLIQWIRHHVTTMSERTFPNNPVELKALYNQYLQFKETEIPPKETEKSKIKRLYKLLEIWIEFGRIKLLQGYHPNDIEKEWGKLIIAMLEREKALRPEVERLEMLQQIANRVQRDSVICEDKLILAGNALQSDSKRLESGVQFQNEAEIAGYILECENLLRQHVIDVQILIDGKYYQADQLVQRVAKLRDEIMALRNECSSVYSKGRILTTEQTKLMISGITQSLNSGFAQTLHPSLTSGLTQSLTPSLTSSSMTSGLSSGMTSRLTPSVTPAYTPGFPSGLVPNFSSGVEPNSLQTLKLMQIRKPLLKSSLLDQNLTEEEINMKFVQDLLNWVDEMQVQLDRTEWGSDLPSVESHLENHKNVHRAIEEFESSLKEAKISEIQMTAPLKLTYAEKLHRLESQYAKLLNTSRNQERHLDTLHNFVSRATNELIWLNEKEEEEVAYDWSERNTNIARKKDYHAELMRELDQKEENIKSVQEIAEQLLLENHPARLTIEAYRAAMQTQWSWILQLCQCVEQHIKENTAYFEFFNDAKEATDYLRNLKDAIQRKYSCDRSSSIHKLEDLVQESMEEKEELLQYKSTIANLMGKAKTIIQLKPRNSDCPLKTSIPIKAICDYRQIEITIYKDDECVLANNSHRAKWKVISPTGNEAMVPSVCFTVPPPNKEAVDLANRIEQQYQNVLTLWHESHINMKSVVSWHYLINEIDRIRASNVASIKTMLPGEHQQVLSNLQSRFEDFLEDSQESQVFSGSDITQLEKEVNVCKQYYQELLKSAEREEQEESVYNLYISEVRNIRLRLENCEDRLIRQIRTPLERDDLHESVFRITEQEKLKKELERLKDDLGTITNKCEEFFSQAAASSSVPTLRSELNVVLQNMNQVYSMSSTYIDKLKTVNLVLKNTQAAEALVKLYETKLCEEEAVIADKNNIENLISTLKQWRSEVDEKRQVFHALEDELQKAKAISDEMFKTYKERDLDFDWHKEKADQLVERWQNVHVQIDNRLRDLEGIGKSLKYYRDTYHPLDDWIQQVETTQRKIQENQPENSKTLATQLNQQKMLVSEIEMKQSKMDECQKYAEQYSATVKDYELQTMTYRAMVDSQQKSPVKRRRMQSSADLIIQEFMDLRTRYTALVTLMTQYIKFAGDSLKRLEEEEKSLEEEKKEHVEKAKELQKWVSNISKTLKDAEKAGKPPFSKQKISSEEISTKKEQLSEALQTIQLFLAKHGDKMTDEERNELEKQVKTLQESYNLLFSESLKQLQESQTSGDVKVEEKIVAERQQEYKEKLQGICDLLTQTENRLIGHQEAFMIGDGTVELKKYQSKQEELQKDMQGSAQALAEVVKNTENFLKENGEKLSQEDKALIEQKLNEAKIKCEQLNLKAEQSKKELDKVVTTAIKEETEKVAAVKQLEESKTKIENLLDWLSNVDKDSERAGTKHKQVIEQNGTHFQEGDGKSAIGEEDEVNGNLLETDVDGQVGTTQENLNQQYQKVKAQHEKIISQHQAVIIATQSAQVLLEKQGQYLSPEEKEKLQKNMKELKVHYETALAESEKKMKLTHSLQEELEKFDADYTEFEHWLQQSEQELENLEAGADDINGLMTKLKRQKSFSEDVISHKGDLRYITISGNRVLEAAKSCSKRDGGKVDTSATHREVQRKLDHATDRFRSLYSKCNVLGNNLKDLVDKYQHYEDASCGLLAGLQACEATASKHLSEPIAVDPKNLQRQLEETKALQGQISSQQVAVEKLKKTAEVLLDARGSLLPAKNDIQKTLDDIVGRYEDLSKSVNERNEKLQITLTRSLSVQDGLDEMLDWMGNVESSLKEQGQVPLNSTALQDIISKNIMLEQDIAGRQSSINAMNEKVKKFMETTDPSTASSLQAKMKDLSARFSEASHKHKETLAKMEELKTKVELFENLSEKLQTFLETKTQALTEVDVPGKDVTELSQYMQESTSEFLEHKKHLEVLHSLLKEISSHGLPSDKALVLEKTNNLSKKFKEMEDTIKEKKEAVTSCQEQLDAFQVLVKSLKSWIKETTKKVPIVQPSFGAEDLGKSLEDTKKLQEKWSLKTPEIQKVNNSGISLCNLISAVTTPAKAIAAVKSGGAVLNGEGTATNTEEFWANKGLTSIKKDMTDISHGYEDLGLLLKDKIAELNTKLSKLQKAQEESSAMMQWLQKMNKTATKWQQTPAPTDTEAVKTQVEQNKSFEAELKQNVNKVQELKDKLTELLEENPDTPEAPRWKQMLTEIDSKWQELNQLTIDRQQKLEESSNNLTQFQTVEAQLKQWLVEKELMVSVLGPLSIDPNMLNTQRQQVQILLQEFATRKPQYEQLTAAGQGILSRPGEDPSLRGIVKEQLAAVTQKWDSLTGQLSDRCDWIDQAIVKSTQYQSLLRSLSDKLSDLDNKLSSSLAVSTHPDAMNQQLETAQKMKQEIQQEKKQIKVAQALCEDLSALVKEEYLKAELSRQLEGILKSFKDVEQKAENHVQHLQSACASSHQFQQMSRDFQAWLDTKKEEQNKSHPISAKLDVLESLIKDHKDFSKTLTAQSHMYEKTIAEGENLLLKTQGSEKAALQLQLNTIKTNWDTFNKQVKERENKLKESLEKALKYKEQVETLWPWIDKCQNNLEEIKFCLDPAEGENSIAKLKSLQKEMDQHFGMVELLNNTANSLLSVCEIDKEVVTDENKSLIQKVDMVTEQLHSKKFCLENMTQKFKEFQEVSKESKRQLQCAKEQLDIHDSLGSQAYSNKYLTMLQTQQKSLQALKHQVDLAKRLAQDLVVEASDSKGTSDVLLQVETIAQEHSTLSQQVDEKCSFLETKLQGIGHFQNTIREMFSQFAEFDDELDSMAPVGRDAETLQKQKETIKAFLKKLEALMASNDNANKTCKMMLATEETSPDLVGIKRDLEALSKQCNKLLDRAQAREEQVEGTIKRLEEFYSKLKEFSILLQKAEEHEESQGPVGMETETINQQLNMFKVFQKEEIEPLQGKQQDVNWLGQGLIQSAAKSTSTQGLEHDLDDVNARWKTLNKKVAQRAAQLQEALLHCGRFQDALESLLSWMVDTEELVANQKPPSAEFKVVKAQIQEQKLLQRLLDDRKSTVEVIKREGEKIATTAEPADKVKILKQLSLLDSRWEALLNKAETRNRQLEGISVVAQQFHETLEPLNEWLTTIEKRLVNCEPIGTQASKLEEQIAQHKALEDDIINHNKHLHQAVSIGQSLKVLSSREDKDMVQSKLDFSQVWYIEIQEKSHSRSELLQQALCNAKIFGEDEVELMNWLNEVHDKLSKLSVQDYSTEGLWKQQSELRVLQEDILLRKQNVDQALLNGLELLKQTTGDEVLIIQDKLEAIKARYKDITKLSTDVAKTLEQALQLARRLHSTHEELCTWLDKVEVELLSYETQVLKGEEASQAQMRPKELKKEAKNNKALLDSLNEVSSALLELVPWRAREGLEKMVAEDNERYRLVSDTITQKVEEIDAAILRSQQFDQAADAELSWITETEKKLMSLGDIRLEQDQTSAQLQVQKTFTMEILRHKDIIDDLVKSGHKIMTACSEEEKQSMKKKLDKVLKNYDTICQINSERYLQLERAQSLVNQFWETYEELWPWLTETQSIISQLPAPALEYETLRQQQEEHRQLRELIAEHKPHIDKMNKTGPQLLELSPGEGFSIQEKYVAADTLYSQIKEDVKKRAVALDEAISQSTQFHDKIDQILESLERIVERLRQPPSISAEVEKIKEQISENKNVSVDMEKLQPLYETLKQRGEEMIARSGGTDKDISAKAVQDKLDQMVFIWENIHTLVEEREAKLLDVMELAEKFWCDHMSLIVTIKDTQDFIRDLEDPGIDPSVVKQQQEAAETIREEIDGLQEELDIVINLGSELIAACGEPDKPIVKKSIDELNSAWDSLNKAWKDRIDKLEEAMQAAVQYQDGLQAVFDWVDIAGGKLASMSPIGTDLETVKQQIEELKQFKSEAYQQQIEMERLNHQAELLLKKVTEESDKHTVQDPLMELKLIWDSLEERIINRQHKLEGALLALGQFQHALDELLAWLTHTEGLLSEQKPVGGDPKAIEIELAKHHVLQNDVLAHQSTVEAVNKAGNDLIESSAGEEASNLQNKLEVLNQRWQNVLEKTEQRKQQLDGALRQAKGFHGEIEDLQQWLTDTERHLLASKPLGGLPETAKEQLNVHMEVCAAFEAKEETYKSLMQKGQQMLARCPKSAETNIDQDINNLKEKWESVETKLNERKTKLEEALNLAMEFHNSLQDFINWLTQAEQTLNVASRPSLILDTVLFQIDEHKVFANEVNSHREQIIELDKTGTHLKYFSQKQDVVLIKNLLISVQSRWEKVVQRLVERGRSLDDARKRAKQFHEAWSKLMEWLEESEKSLDSELEIANDPDKIKTQLAQHKEFQKSLGAKHSVYDTTNRTGRSLKEKTSLADDNLKLDDMLSELRDKWDTICGKSVERQNKLEEALLFSGQFTDALQALIDWLYRVEPQLAEDQPVHGDIDLVMNLIDNHKAFQKELGKRTSSVQALKRSARELIEGSRDDSSWVKVQMQELSTRWETVCALSISKQTRLEAALRQAEEFHSVVHALLEWLAEAEQTLRFHGVLPDDEDALRTLIDQHKEFMKKLEEKRAELNKATTMGDTVLAICHPDSITTIKHWITIIRARFEEVLAWAKQHQQRLASALAGLIAKQELLEALLAWLQWAETTLTDKDKEVIPQEIEEVKALIAEHQTFMEEMTRKQPDVDKVTKTYKRRAADPSSLQSHIPVLDKGRAGRKRFPASSLYPSGSQTQIETKNPRVNLLVSKWQQVWLLALERRRKLNDALDRLEELREFANFDFDIWRKKYMRWMNHKKSRVMDFFRRIDKDQDGKITRQEFIDGILSSKFPTSRLEMSAVADIFDRDGDGYIDYYEFVAALHPNKDAYKPITDADKIEDEVTRQVAKCKCAKRFQVEQIGDNKYRFFLGNQFGDSQQLRLVRILRSTVMVRVGGGWMALDEFLVKNDPCRAKGRTNMELREKFILADGASQGMAAFRPRGRRSRPSSRGASPNRSTSVSSQAAQAASPQVPATTTPKILHPLTRNYGKPWLTNSKMSTPCKAAECSDFPVPSAEGTPIQGSKLRLPGYLSGKGFHSGEDSGLITTAAARVRTQFADSKKTPSRPGSRAGSKAGSRASSRRGSDASDFDISEIQSVCSDVETVPQTHRPTPRAGSRPSTAKPSKIPTPQRKSPASKLDKSSKR

SEQ ID NO: 4455 - protein, 1674 aa, Homo sapiens
MGKPLSRPDCLRQNPPCVGKGEEEEDLNIEDCYVPQRSIYDTVRLNEQIDSGSKGSLSSRHFTDRTLPYSHRTLDVSSLCSNGALTSSSVFELRGREANKLDEKMIFDALKLNSDIIRTTGLPKAKSHAEKKEHRRSWRMFVPANFMDYANKSESSFVEPADMSDAVTKASKCRWGTNSLTSEEDDSGLCSPPAEREEKQGILTGDQSRIKSLSSTEDILVTDQYRPFFSVNSISEQKIPLLSCQSAHPDENFKMILHDVSPLEEAKHVNGQREIHDENCCLQNNLKESPVKCDPLIMPRNRENEHIFNLGEEDETYGPGESQITAQSRELLKDSPQDLDLSHTDLGESDVDCGSTSLVENVTLLTQYDSGECNIASKEEVEAPLSAQESEMLYKKFSLKFVSARKKAAPRKTGAQAGILDTVCNGFQLVQVFQKEEIEPLQGKQQDVNWLGQGLIQSAAKSTSTQGLEHDLDDVNARWKTLNKKVAQRAAQLQEALLHCGRFQDALESLLSWMVDTEELVANQKPPSAEFKVVKAQIQEQKLLQRLLDDRKSTVEVIKREGEKIATTAEPADKVKILKQLSLLDSRWEALLNKAETRNRQLEGISVVAQQFHETLEPLNEWLTTIEKRLVNCEPIGTQASKLEEQIAQHKALEDDIINHNKHLHQAVSIGQSLKVLSSREDKDMVQSKLDFSQVWYIEIQEKSHSRSELLQQALCNAKIFGEDEVELMNWLNEVHDKLSKLSVQDYSTEGLWKQQSELRVLQEDILLRKQNVDQALLNGLELLKQTTGDEVLIIQDKLEAIKARYKDITKLSTDVAKTLEQALQLARRLHSTHEELCTWLDKVEVELLSYETQVLKGEEASQAQMRPKELKKEAKNNKALLDSLNEVSSALLELVPWRAREGLEKMVAEDNERYRLVSDTITQKVEEIDAAILRSQQFDQAADAELSWITETEKKLMSLGDIRLEQDQTSAQLQVQKTFTMEILRHKDIIDDLVKSGHKIMTACSEEEKQSMKKKLDKVLKNYDTICQINSERYLQLERAQSLVNQFWETYEELWPWLTETQSIISQLPAPALEYETLRQQQEEHRQLRELIAEHKPHIDKMNKTGPQLLELSPGEGFSIQEKYVAADTLYSQIKEDVKKRAVALDEAISQSTQFHDKIDQILESLERIVERLRQPPSISAEVEKIKEQISENKNVSVDMEKLQPLYETLKQRGEEMIARSGGTDKDISAKAVQDKLDQMVFIWENIHTLVEEREAKLLDVMELAEKFWCDHMSLIVTIKDTQDFIRDLEDPGIDPSVVKQQQEAAETIREEIDGLQEELDIVINLGSELIAACGEPDKPIVKKSIDELNSAWDSLNKAWKDRIDKLEEAMQAAVQYQDGLQAVFDWVDIAGGKLASMSPIGTDLETVKQQIEELKQFKSEAYQQQIEMERLNHQAELLLKKVTEESDKHTVQDPLMELKLIWDSLEERIINRQHKLEGALLALGQFQHALDELLAWLTHTEGLLSEQKPVGGDPKAIEIELAKHHVLQNDVLAHQSTVEAVNKAGNDLIESSAGEEASNLQNKLEVLNQRWQNVLEKTEQRKQQLDGALRQAKGFHGEIEDLQQWLTDTERHLLASKPLGGLPETAKEQLNVHMEVCAAFEAKEETYKSLMQKGQQMLARCPKSAETNIDQD

SEQ ID NO: 4456 - protein, 304 aa, Homo sapiens
MGNVCGCVRAEKEEQYVDPAKTPLNPEKYSPGRKYFRRKPIKKTGGDKESVGANNENEGKKKSSSQPSKEQPAPLSRGLVQQESVTLNSALGDGIQQKKTEVVADSVKQKLLPSAVSSWSDCVNTSPAKDSETEVKVSELDERISEKDSTPYCAKRKKHLDDVNTSEITFQEKTDVFSFRKAASLSSIPSGIERSLEKSGFPEDPPKSYSSIQEKQNTERFCPHATQHFQFKKKRCHSLYTSMSSVSKDTDGNEISDIHVTGESEDMSAKERLLLWTQQATEGYAGIRCENFTTCWRDGKLFNA

SEQ ID NO: 4457 - protein, 5171 aa, Homo sapiens
MHSSSYSYRSSDSVFSNTTSTRTSLDSNENLLLVHCGPTLINSCISFGSESFDGHRLEMLQQIANRVQRDSVICEDKLILAGNALQSDSKRLESGVQFQNEAEIAGYILECENLLRQHVIDVQILIDGKYYQADQLVQRVAKLRDEIMALRNECSSVYSKGRILTTEQTKLMISGITQSLNSGFAQTLHPSLTSGLTQSLTPSLTSSSMTSGLSSGMTSRLTPSVTPAYTPGFPSGLVPNFSSGVEPNSLQTLKLMQIRKPLLKSSLLDQNLTEEEINMKFVQDLLNWVDEMQVQLDRTEWGSDLPSVESHLENHKNVHRAIEEFESSLKEAKISEIQMTAPLKLTYAEKLHRLESQYAKLLNTSRNQERHLDTLHNFVSRATNELIWLNEKEEEEVAYDWSERNTNIARKKDYHAELMRELDQKEENIKSVQEIAEQLLLENHPARLTIEAYRAAMQTQWSWILQLCQCVEQHIKENTAYFEFFNDAKEATDYLRNLKDAIQRKYSCDRSSSIHKLEDLVQESMEEKEELLQYKSTIANLMGKAKTIIQLKPRNSDCPLKTSIPIKAICDYRQIEITIYKDDECVLANNSHRAKWKVISPTGNEAMVPSVCFTVPPPNKEAVDLANRIEQQYQNVLTLWHESHINMKSVVSWHYLINEIDRIRASNVASIKTMLPGEHQQVLSNLQSRFEDFLEDSQESQVFSGSDITQLEKEVNVCKQYYQELLKSAEREEQEESVYNLYISEVRNIRLRLENCEDRLIRQIRTPLERDDLHESVFRITEQEKLKKELERLKDDLGTITNKCEEFFSQAAASSSVPTLRSELNVVLQNMNQVYSMSSTYIDKLKTVNLVLKNTQAAEALVKLYETKLCEEEAVIADKNNIENLISTLKQWRSEVDEKRQVFHALEDELQKAKAISDEMFKTYKERDLDFDWHKEKADQLVERWQNVHVQIDNRLRDLEGIGKSLKYYRDTYHPLDDWIQQVETTQRKIQENQPENSKTLATQLNQQKMLVSEIEMKQSKMDECQKYAEQYSATVKDYELQTMTYRAMVDSQQKSPVKRRRMQSSADLIIQEFMDLRTRYTALVTLMTQYIKFAGDSLKRLEEEEKSLEEEKKEHVEKAKELQKWVSNISKTLKDAEKAGKPPFSKQKISSEEISTKKEQLSEALQTIQLFLAKHGDKMTDEERNELEKQVKTLQESYNLLFSESLKQLQESQTSGDVKVEEKIVAERQQEYKEKLQGICDLLTQTENRLIGHQEAFMIGDGTVELKKYQSKQEELQKDMQGSAQALAEVVKNTENFLKENGEKLSQEDKALIEQKLNEAKIKCEQLNLKAEQSKKELDKVVTTAIKEETEKVAAVKQLEESKTKIENLLDWLSNVDKDSERAGTKHKQVIEQNGTHFQEGDGKSAIGEEDEVNGNLLETDVDGQVGTTQENLNQQYQKVKAQHEKIISQHQAVIIATQSAQVLLEKQGQYLSPEEKEKLQKNMKELKVHYETALAESEKKMKLTHSLQEELEKFDADYTEFEHWLQQSEQELENLEAGADDINGLMTKLKRQKSFSEDVISHKGDLRYITISGNRVLEAAKSCSKRDGGKVDTSATHREVQRKLDHATDRFRSLYSKCNVLGNNLKDLVDKYQHYEDASCGLLAGLQACEATASKHLSEPIAVDPKNLQRQLEETKALQGQISSQQVAVEKLKKTAEVLLDARGSLLPAKNDIQKTLDDIVGRYEDLSKSVNERNEKLQITLTRSLSVQDGLDEMLDWMGNVESSLKEQGQVPLNSTALQDIISKNIMLEQDIAGRQSSINAMNEKVKKFMETTDPSTASSLQAKMKDLSARFSEASHKHKETLAKMEELKTKVELFENLSEKLQTFLETKTQALTEVDVPGKDVTELSQYMQESTSEFLEHKKHLEVLHSLLKEISSHGLPSDKALVLEKTNNLSKKFKEMEDTIKEKKEAVTSCQEQLDAFQVLVKSLKSWIKETTKKVPIVQPSFGAEDLGKSLEDTKKLQEKWSLKTPEIQKVNNSGISLCNLISAVTTPAKAIAAVKSGGAVLNGEGTATNTEEFWANKGLTSIKKDMTDISHGYEDLGLLLKDKIAELNTKLSKLQKAQEESSAMMQWLQKMNKTATKWQQTPAPTDTEAVKTQVEQNKSFEAELKQNVNKVQELKDKLTELLEENPDTPEAPRWKQMLTEIDSKWQELNQLTIDRQQKLEESSNNLTQFQTVEAQLKQWLVEKELMVSVLGPLSIDPNMLNTQRQQVQILLQEFATRKPQYEQLTAAGQGILSRPGEDPSLRGIVKEQLAAVTQKWDSLTGQLSDRCDWIDQAIVKSTQYQSLLRSLSDKLSDLDNKLSSSLAVSTHPDAMNQQLETAQKMKQEIQQEKKQIKVAQALCEDLSALVKEEYLKAELSRQLEGILKSFKDVEQKAENHVQHLQSACASSHQFQQMSRDFQAWLDTKKEEQNKSHPISAKLDVLESLIKDHKDFSKTLTAQSHMYEKTIAEGENLLLKTQGSEKAALQLQLNTIKTNWDTFNKQVKERENKLKESLEKALKYKEQVETLWPWIDKCQNNLEEIKFCLDPAEGENSIAKLKSLQKEMDQHFGMVELLNNTANSLLSVCEIDKEVVTDENKSLIQKVDMVTEQLHSKKFCLENMTQKFKEFQEVSKESKRQLQCAKEQLDIHDSLGSQAYSNKYLTMLQTQQKSLQALKHQVDLAKRLAQDLVVEASDSKGTSDVLLQVETIAQEHSTLSQQVDEKCSFLETKLQGIGHFQNTIREMFSQFAEFDDELDSMAPVGRDAETLQKQKETIKAFLKKLEALMASNDNANKTCKMMLATEETSPDLVGIKRDLEALSKQCNKLLDRAQAREEQVEGTIKRLEEFYSKLKEFSILLQKAEEHEESQGPVGMETETINQQLNMFKVFQKEEIEPLQGKQQDVNWLGQGLIQSAAKSTSTQGLEHDLDDVNARWKTLNKKVAQRAAQLQEALLHCGRFQDALESLLSWMVDTEELVANQKPPSAEFKVVKAQIQEQKLLQRLLDDRKSTVEVIKREGEKIATTAEPADKVKILKQLSLLDSRWEALLNKAETRNRQLEGISVVAQQFHETLEPLNEWLTTIEKRLVNCEPIGTQASKLEEQIAQHKALEDDIINHNKHLHQAVSIGQSLKVLSSREDKDMVQSKLDFSQVWYIEIQEKSHSRSELLQQALCNAKIFGEDEVELMNWLNEVHDKLSKLSVQDYSTEGLWKQQSELRVLQEDILLRKQNVDQALLNGLELLKQTTGDEVLIIQDKLEAIKARYKDITKLSTDVAKTLEQALQLARRLHSTHEELCTWLDKVEVELLSYETQVLKGEEASQAQMRPKELKKEAKNNKALLDSLNEVSSALLELVPWRAREGLEKMVAEDNERYRLVSDTITQKVEEIDAAILRSQQFDQAADAELSWITETEKKLMSLGDIRLEQDQTSAQLQVQKTFTMEILRHKDIIDDLVKSGHKIMTACSEEEKQSMKKKLDKVLKNYDTICQINSERYLQLERAQSLVNQFWETYEELWPWLTETQSIISQLPAPALEYETLRQQQEEHRQLRELIAEHKPHIDKMNKTGPQLLELSPGEGFSIQEKYVAADTLYSQIKEDVKKRAVALDEAISQSTQFHDKIDQILESLERIVERLRQPPSISAEVEKIKEQISENKNVSVDMEKLQPLYETLKQRGEEMIARSGGTDKDISAKAVQDKLDQMVFIWENIHTLVEEREAKLLDVMELAEKFWCDHMSLIVTIKDTQDFIRDLEDPGIDPSVVKQQQEAAETIREEIDGLQEELDIVINLGSELIAACGEPDKPIVKKSIDELNSAWDSLNKAWKDRIDKLEEAMQAAVQYQDGLQAVFDWVDIAGGKLASMSPIGTDLETVKQQIEELKQFKSEAYQQQIEMERLNHQAELLLKKVTEESDKHTVQDPLMELKLIWDSLEERIINRQHKLEGALLALGQFQHALDELLAWLTHTEGLLSEQKPVGGDPKAIEIELAKHHVLQNDVLAHQSTVEAVNKAGNDLIESSAGEEASNLQNKLEVLNQRWQNVLEKTEQRKQQLDGALRQAKGFHGEIEDLQQWLTDTERHLLASKPLGGLPETAKEQLNVHMEVCAAFEAKEETYKSLMQKGQQMLARCPKSAETNIDQDINNLKEKWESVETKLNERKTKLEEALNLAMEFHNSLQDFINWLTQAEQTLNVASRPSLILDTVLFQIDEHKVFANEVNSHREQIIELDKTGTHLKYFSQKQDVVLIKNLLISVQSRWEKVVQRLVERGRSLDDARKRAKQFHEAWSKLMEWLEESEKSLDSELEIANDPDKIKTQLAQHKEFQKSLGAKHSVYDTTNRTGRSLKEKTSLADDNLKLDDMLSELRDKWDTICGKSVERQNKLEEALLFSGQFTDALQALIDWLYRVEPQLAEDQPVHGDIDLVMNLIDNHKAFQKELGKRTSSVQALKRSARELIEGSRDDSSWVKVQMQELSTRWETVCALSISKQTRLEAALRQAEEFHSVVHALLEWLAEAEQTLRFHGVLPDDEDALRTLIDQHKEFMKKLEEKRAELNKATTMGDTVLAICHPDSITTIKHWITIIRARFEEVLAWAKQHQQRLASALAGLIAKQELLEALLAWLQWAETTLTDKDKEVIPQEIEEVKALIAEHQTFMEEMTRKQPDVDKVTKTYKRRAADPSSLQSHIPVLDKGRAGRKRFPASSLYPSGSQTQIETKNPRVNLLVSKWQQVWLLALERRRKLNDALDRLEELREFANFDFDIWRKKYMRWMNHKKSRVMDFFRRIDKDQDGKITRQEFIDGILSSKFPTSRLEMSAVADIFDRDGDGYIDYYEFVAALHPNKDAYKPITDADKIEDEVTRQVAKCKCAKRFQVEQIGDNKYRFFLGNQFGDSQQLRLVRILRSTVMVRVGGGWMALDEFLVKNDPCRAKGRTNMELREKFILADGASQGMAAFRPRGRRSRPSSRGASPNRSTSVSSQAAQAASPQVPATTTPKILHPLTRNYGKPWLTNSKMSTPCKAAECSDFPVPSAEGTPIQGSKLRLPGYLSGKGFHSGEDSGLITTAAARVRTQFADSKKTPSRPGSRAGSKAGSRASSRRGSDASDFDISEIQSVCSDVETVPQTHRPTPRAGSRPSTAKPSKIPTPQRKSPASKLDKSSKR

SEQ ID NO: 4458 - protein, 2649 aa, Homo sapiens
MHSSSYSYRSSDSVFSNTTSTRTSLDSNENLLLVHCGPTLINSCISFGSESFDGHRLEMLQQIANRVQRDSVICEDKLILAGNALQSDSKRLESGVQFQNEAEIAGYILECENLLRQHVIDVQILIDGKYYQADQLVQRVAKLRDEIMALRNECSSVYSKGRILTTEQTKLMISGITQSLNSGFAQTLHPSLTSGLTQSLTPSLTSSSMTSGLSSGMTSRLTPSVTPAYTPGFPSGLVPNFSSGVEPNSLQTLKLMQIRKPLLKSSLLDQNLTEEEINMKFVQDLLNWVDEMQVQLDRTEWGSDLPSVESHLENHKNVHRAIEEFESSLKEAKISEIQMTAPLKLTYAEKLHRLESQYAKLLNTSRNQERHLDTLHNFVSRATNELIWLNEKEEEEVAYDWSERNTNIARKKDYHAELMRELDQKEENIKSVQEIAEQLLLENHPARLTIEAYRAAMQTQWSWILQLCQCVEQHIKENTAYFEFFNDAKEATDYLRNLKDAIQRKYSCDRSSSIHKLEDLVQESMEEKEELLQYKSTIANLMGKAKTIIQLKPRNSDCPLKTSIPIKAICDYRQIEITIYKDDECVLANNSHRAKWKVISPTGNEAMVPSVCFTVPPPNKEAVDLANRIEQQYQNVLTLWHESHINMKSVVSWHYLINEIDRIRASNVASIKTMLPGEHQQVLSNLQSRFEDFLEDSQESQVFSGSDITQLEKEVNVCKQYYQELLKSAEREEQEESVYNLYISEVRNIRLRLENCEDRLIRQIRTPLERDDLHESVFRITEQEKLKKELERLKDDLGTITNKCEEFFSQAAASSSVPTLRSELNVVLQNMNQVYSMSSTYIDKLKTVNLVLKNTQAAEALVKLYETKLCEEEAVIADKNNIENLISTLKQWRSEVDEKRQVFHALEDELQKAKAISDEMFKTYKERDLDFDWHKEKADQLVERWQNVHVQIDNRLRDLEGIGKSLKYYRDTYHPLDDWIQQVETTQRKIQENQPENSKTLATQLNQQKMLVSEIEMKQSKMDECQKYAEQYSATVKDYELQTMTYRAMVDSQQKSPVKRRRMQSSADLIIQEFMDLRTRYTALVTLMTQYIKFAGDSLKRLEEEEIKRCKETSEHGAYSDLLQRQKATVLENSKLTGKISELERMVAELKKQKSRVEEELPKVREAAENELRKQQRNVEDISLQKIRAESEAKQYRRELETIVREKEAAERELERVRQLTIEAEAKRAAVEENLLNFRNQLEENTFTRRTLEDHLKRKDLSLNDLEQQKNKLMEELRRKRDNEEELLKLIKQMEKDLAFQKQVAEKQLKEKQKIELEARRKITEIQYTCRENALPVCPITQATSCRAVTGLQQEHDKQKAEELKQQVDELTAANRKAEQDMRELTYELNALQLEKTSSEEKARLLKDKLDETNNTLRCLKLELERKDQAEKGYSQQLRELGRQLNQTTGKAEEAMQEASDLKKIKRNYQLELESLNHEKGKLQREVDRITRAHAVAEKNIQHLNSQIHSFRDEKELERLQICQRKSDHLKEQFEKSHEQLLQNIKAEKENNDKIQRLNEELEKSNECAEMLKQKVEELTRQNNETKLMMQRIQAESENIVLEKQTIQQRCEALKIQADGFKDQLRSTNEHLHKQTKTEQDFQRKIKCLEEDLAKSQNLVSEFKQKCDQQNIIIQNTKKEVRNLNAELNASKEEKRRGEQKVQLQQAQVQELNNRLKKVQDELHLKTIEEQMTHRKMVLFQEESGKFKQSAEEFRKKMEKLMESKVITENDISGIRLDFVSLQQENSRAQENAKLCETNIKELERQLQQYREQMQQGQHMEANHYQKCQKLEDELIAQKREVENLKQKMDQQIKEHEHQLVLLQCEIQKKSTAKDCTFKPDFEMTVKECQHSGELSSRNTGHLHPTPRSPLLRWTQEPQPLEEKWQHRVVEQIPKEVQFQPPGAPLEKEKSQQCYSEYFSQTSTELQITFDETNPITRLSEIEKIRDQALNNSRPPVRYQDNACEMELVKVLTPLEIAKNKQYDMHTEVTTLKQEKNPVPSAEEWMLEGCRASGGLKKGDFLKKGLEPETFQNFDGDHACSVRDDEFKFQGLRHTVTARQLVEAKLLDMRTIEQLRLGLKTVEEVQKTLNKFLTKATSIAGLYLESTKEKISFASAAERIIIDKMVALAFLEAQAATGFIIDPISGQTYSVEDAVLKGVVDPEFRIRLLEAEKAAVGYSYSSKTLSVFQAMENRMLDRQKGKHILEAQIASGGVIDPVRGIRVPPEIALQQGLLNNAILQFLHEPSSNTRVFPNPNNKQALYYSELLRMCVFDVESQCFLFPFGERNISNLNVKKTHRISVVDTKTGSELTVYEAFQRNLIEKSIYLELSGQQYQWKEAMFFESYGHSSHMLTDTKTGLHFNINEAIEQGTIDKALVKKYQEGLITLTELADSLLSRLVPKKDLHSPVAGYWLTASGERISVLKASRRNLVDRITALRCLEAQVSTGGIIDPLTGKKYRVAEALHRGLVDEGFAQQLRQCELVITGIGHPITNKMMSVVEAVNANIINKEMGIRCLEFQYLTGGLIEPQVHSRLSIEEALQVGIIDVLIATKLKDQKSYVRNIICPQTKRKLTYKEALEKADFDFHTGLKLLEVSEPLMTGISSLYYSS

SEQ ID NO: 4459 - protein, 3060 aa, Homo sapiens
MHSSSYSYRSSDSVFSNTTSTRTSLDSNENLLLVHCGPTLINSCISFGSESFDGHRLEMLQQIANRVQRDSVICEDKLILAGNALQSDSKRLESGVQFQNEAEIAGYILECENLLRQHVIDVQILIDGKYYQADQLVQRVAKLRDEIMALRNECSSVYSKGRILTTEQTKLMISGITQSLNSGFAQTLHPSLTSGLTQSLTPSLTSSSMTSGLSSGMTSRLTPSVTPAYTPGFPSGLVPNFSSGVEPNSLQTLKLMQIRKPLLKSSLLDQNLTEEEINMKFVQDLLNWVDEMQVQLDRTEWGSDLPSVESHLENHKNVHRAIEEFESSLKEAKISEIQMTAPLKLTYAEKLHRLESQYAKLLNTSRNQERHLDTLHNFVSRATNELIWLNEKEEEEVAYDWSERNTNIARKKDYHAELMRELDQKEENIKSVQEIAEQLLLENHPARLTIEAYRAAMQTQWSWILQLCQCVEQHIKENTAYFEFFNDAKEATDYLRNLKDAIQRKYSCDRSSSIHKLEDLVQESMEEKEELLQYKSTIANLMGKAKTIIQLKPRNSDCPLKTSIPIKAICDYRQIEITIYKDDECVLANNSHRAKWKVISPTGNEAMVPSVCFTVPPPNKEAVDLANRIEQQYQNVLTLWHESHINMKSVVSWHYLINEIDRIRASNVASIKTMLPGEHQQVLSNLQSRFEDFLEDSQESQVFSGSDITQLEKEVNVCKQYYQELLKSAEREEQEESVYNLYISEVRNIRLRLENCEDRLIRQIRTPLERDDLHESVFRITEQEKLKKELERLKDDLGTITNKCEEFFSQAAASSSVPTLRSELNVVLQNMNQVYSMSSTYIDKLKTVNLVLKNTQAAEALVKLYETKLCEEEAVIADKNNIENLISTLKQWRSEVDEKRQVFHALEDELQKAKAISDEMFKTYKERDLDFDWHKEKADQLVERWQNVHVQIDNRLRDLEGIGKSLKYYRDTYHPLDDWIQQVETTQRKIQENQPENSKTLATQLNQQKMLVSEIEMKQSKMDECQKYAEQYSATVKDYELQTMTYRAMVDSQQKSPVKRRRMQSSADLIIQEFMDLRTRYTALVTLMTQYIKFAGDSLKRLEEEEKSLEEEKKEHVEKAKELQKWVSNISKTLKDAEKAGKPPFSKQKISSEEISTKKEQLSEALQTIQLFLAKHGDKMTDEERNELEKQVKTLQESYNLLFSESLKQLQESQTSGDVKVEEKLDKVIAGTIDQTTGEVLSVFQAVLRGLIDYDTGIRLLETQLMISGLISPELRKCFDLKDAKSHGLIDEQILCQLKELSKAKEIISAASPTTIPVLDALAQSMITESMAIKVLEILLSTGSLVIPATGEQLTLQKAFQQNLVSSALFSKVLERQNMCKDLIDPCTSEKVSLIDMVQRSTLQENTGMWLLPVRPQEGGRITLKCGRNISILRAAHEGLIDRETMFRLLSAQLLSGGLINSNSGQRMTVEEAVREGVIDRDTASSILTYQVQTGGIIQSNPAKRLTVDEAVQCDLITSSSALLVLEAQRGYVGLIWPHSGEIFPTSSSLQQELITNELAYKILNGRQKIAALYIPESSQVIGLDAAKQLGIIDNNTASILKNITLPDKMPDLGDLEACKNARRWLSFCKFQPSTVHDYRQEEDVFDGEEPVTTQTSEETKKLFLSYLMINSYMDANTGQRLLLYDGDLDEAVGMLLEGCHAEFDGNTAIKECLDVLSSSGVFLNNASGREKDECTATPSSFNKCHCGEPEHEETPENRKCAIDEEFNEMRNTVINSEFSQSGKLASTISIDPKVNSSPSVCVPSLISYLTQTELADISMLRSDSENILTNYENQSRVETNERANECSHSKNIQNFPSDLIENPIMKSKMSKFCGVNETENEDNTNRDSPIFDYSPRLSALLSHDKLMHSQGSFNDTHTPESNGNKCEAPALSFSDKTMLSGQRIGEKFQDQFLGIAAINISLPGEQYGQKSLNMISSNPQVQYHNDKYISNTSGEDEKTHPGFQQMPEDKEDESEIEEYSCAVTPGGDTDNAIVSLTCATPLLDETISASDYETSLLNDQQNNTGTDTDSDDDFYDTPLFEDDDHDSLLLDGDDRDCLHPEDYDTLQEENDETASPADVFYDVSKENENSMVPQGAPVGSLSVKNKAHCLQDFLMDVEKDELDSGEKIHLNPVGSDKVNGQSLETGSERECTNILEGDESDSLTDYDIVGGKESFTASLKFDDSGSWRGRKEEYVTGQEFHSDTDHLDSMQSEESYGDYIYDSNDQDDDDDDGIDEEGGGIRDENGKPRCQNVAEDMDIQLCASILNENSDENENINTMILLDKMHSCSSLEKQQRVNVVQLASPSENNLVTEKSNLPEYTTEIAGKSKENLLNHEMVLKDVLPPIIKDTESEKTFGPASISHDNNNISSTSELGTDLANTKVKLIQGSELPELTDSVKGKDEYFKNMTPKVDSSLDHIICTEPDLIGKPAEESHLSLIASVTDKDPQGNGSDLIKGRDGKSDILIEDETSIQKMYLGEGEVLVEGLVEEENRHLKLLPGKNTRDSFKLINSQFPFPQITNNEELNQKGSLKKATVTLKDEPNNLQIIVSKSPVQFENLEEIFDTSVSKEISDDITSDITSWEGNTHFEESFTDGPEKELDLFTYLKHCAKNIKAKDVAKPNEDVPSHVLITAPPMKEHLQLGVNNTKEKSTSTQKDSPLNDMIQSNDLCSKESISGGGTEISQFTPESIEATLSILSRKHVEDVGKNDFLQSERCANGLGNDNSSNTLNTDYSFLEINNKKERIEQQLPKEQALSPRSQEKEVQIPELSQVFVEDVKDILKSRLKEGHMNPQEVEEPSACADTKILIQNLIKRITTSQLVNEASTVPSDSQMSDSSGVSPMTNSSELKPESRDDPFCIGNLKSELLLNILKQDQHSQKITGVFELMRELTHMEYDLEKRGITSKVLPLQLENIFYKLLADGYSEKIEHVGDFNQKACSTSEMMEEKPHILGDIKSKEGNYYSPNLETVKEIGLESSTVWASTLPRDEKLKDLCNDFPSHLECTSGSKEMASGDSSTEQ

SEQ ID NO: 4460 - protein, 1143 aa, Homo sapiens
MHSSSYSYRSSDSVFSNTTSTRTSLDSNENLLLVHCGPTLINSCISFGSESFDGHRLEMLQQIANRVQRDSVICEDKLILAGNALQSDSKRLESGVQFQNEAEIAGYILECENLLRQHVIDVQILIDGKYYQADQLVQRVAKLRDEIMALRNECSSVYSKGRILTTEQTKLMISGITQSLNSGFAQTLHPSLTSGLTQSLTPSLTSSSMTSGLSSGMTSRLTPSVTPAYTPGFPSGLVPNFSSGVEPNSLQTLKLMQIRKPLLKSSLLDQNLTEEEINMKFVQDLLNWVDEMQVQLDRTEWGSDLPSVESHLENHKNVHRAIEEFESSLKEAKISEIQMTAPLKLTYAEKLHRLESQYAKLLNTSRNQERHLDTLHNFVSRATNELIWLNEKEEEEVAYDWSERNTNIARKKDYHAELMRELDQKEENIKSVQEIAEQLLLENHPARLTIEAYRAAMQTQWSWILQLCQCVEQHIKENTAYFEFFNDAKEATDYLRNLKDAIQRKYSCDRSSSIHKLEDLVQESMEEKEELLQYKSTIANLMGKAKTIIQLKPRNSDCPLKTSIPIKAICDYRQIEITIYKDDECVLANNSHRAKWKVISPTGNEAMVPSVCFTVPPPNKEAVDLANRIEQQYQNVLTLWHESHINMKSVVSWHYLINEIDRIRASNVASIKTMLPGEHQQVLSNLQSRFEDFLEDSQESQVFSGSDITQLEKEVNVCKQYYQELLKSAEREEQEESVYNLYISEVRNIRLRLENCEDRLIRQIRTPLERDDLHESVFRITEQEKLKKELERLKDDLGTITNKCEEFFSQAAASSSVPTLRSELNVVLQNMNQVYSMSSTYIDKLKTVNLVLKNTQAAEALVKLYETKLCEEEAVIADKNNIENLISTLKQWRSEVDEKRQVFHALEDELQKAKAISDEMFKTYKERDLDFDWHKEKADQLVERWQNVHVQIDNRLRDLEGIGKSLKYYRDTYHPLDDWIQQVETTQRKIQENQPENSKTLATQLNQQKMLVSEIEMKQSKMDECQKYAEQYSATVKDYELQTMTYRAMVDSQQKSPVKRRRMQSSADLIIQEFMDLRTRYTALVTLMTQYIKFAGDSLKRLEEEEVIINSEHPVNIKELEMSSNYSVVWESKTCFMINLCGR

SEQ ID NO: 4461 - protein, 689 aa, Homo sapiens
MIAAAFLVLLRPYSIQCALFLLLLLLGTIATIVFFCCWHRKLQKGRHPMKSVFSGRSRSRDAVLRSHHFRSEGFRASPRHLRRRVAAAAAARLEEVKPVVEVHHQSEQETSVRKRRIKKSSRVQPEFYHSVQGASIRRPSSGNASYRCSMSSSADFSDEDDFSQKSGSASPAPGDTLPWNLPKHERSKRKIQGGSVLDPAERAVLRIADERDKVQKKTFTKWINQHLMKVRKHVNDLYEDLRDGHNLISLLEVLSGDTLPREKGRMRFHRLQNVQIALDYLKRRQVKLVNIRNDDITDGNPKLTLGLIWTIILHFQISDIHVTGESEDMSAKERLLLWTQQATEGYAGIRCENFTTCWRDGKLFNAIIHKYRPDLIDMNTVAVQSNLANLEHAFYVAEKIGVIRLLDPEDVDVSSPDEKSVITYVSSLYDAFPKVPEGGEGIGANDVEVKWIEYQNMVNYLIQWIRHHVTTMSERTFPNNPVELKALYNQYLQFKETEIPPKETEKSKIKRLYKLLEIWIEFGRIKLLQGYHPNDIEKEWGKLIIAMLEREKALRPEVERLEMLQQIANRVQRDSVICEDKLILAGNALQSDSKRLESGVQFQNEAEIAGYILECENLLRQHVIDVQILIDGKYYQADQLVQRVAKLRDEIMALRNECSSVYSKGRILTTEQTKLMISGITQSLNSGFA

SEQ ID NO: 4462 - protein, 133 aa, Homo sapiens
MKVRKHVNDLYEDLRDGHNLISLLEVLSGDTLPREKGRMRFHRLQNVQIALDYLKRRQVKLVNIRNDDITDGNPKLTLGLIWTIILHFQISDIHVTGESEDMSAKERLLLWTQQATEGYAGIRCENFTTCWRD

SEQ ID NO: 4463 - protein, 154 aa, Homo sapiens
MMGQLMKNDQDWNAKLVGLMCCMDERDKVQKKTFTKWINQHLMKVRKHVNDLYEDLRDGHNLISLLEVLSGDTLPREKGRMRFHRLQNVQIALDYLKRRQVKLVNIRNDDITDGNPKLTLGLIWTIILHFQISDIHVTGESEDMSAKERLLLWT

SEQ ID NO: 4464 - protein, 5537 aa, Homo sapiens
MSSGNASYRCSMSSSADFSDEDDFSQKSGSASPAPGDTLPWNLPKHERSKRKIQGGSVLDPAERAVLRIADERDKVQKKTFTKWINQHLMKVRKHVNDLYEDLRDGHNLISLLEVLSGDTLPREKGRMRFHRLQNVQIALDYLKRRQVKLVNIRNDDITDGNPKLTLGLIWTIILHFQISDIHVTGESEDMSAKERLLLWTQQATEGYAGIRCENFTTCWRDGKLFNAIIHKYRPDLIDMNTVAVQSNLANLEHAFYVAEKIGVIRLLDPEDVDVSSPDEKSVITYVSSLYDAFPKVPEGGEGIGANDVEVKWIEYQNMVNYLIQWIRHHVTTMSERTFPNNPVELKALYNQYLQFKETEIPPKETEKSKIKRLYKLLEIWIEFGRIKLLQGYHPNDIEKEWGKLIIAMLEREKALRPEVERLEMLQQIANRVQRDSVICEDKLILAGNALQSDSKRLESGVQFQNEAEIAGYILECENLLRQHVIDVQILIDGKYYQADQLVQRVAKLRDEIMALRNECSSVYSKGRILTTEQTKLMISGITQSLNSGFAQTLHPSLTSGLTQSLTPSLTSSSMTSGLSSGMTSRLTPSVTPAYTPGFPSGLVPNFSSGVEPNSLQTLKLMQIRKPLLKSSLLDQNLTEEEINMKFVQDLLNWVDEMQVQLDRTEWGSDLPSVESHLENHKNVHRAIEEFESSLKEAKISEIQMTAPLKLTYAEKLHRLESQYAKLLNTSRNQERHLDTLHNFVSRATNELIWLNEKEEEEVAYDWSERNTNIARKKDYHAELMRELDQKEENIKSVQEIAEQLLLENHPARLTIEAYRAAMQTQWSWILQLCQCVEQHIKENTAYFEFFNDAKEATDYLRNLKDAIQRKYSCDRSSSIHKLEDLVQESMEEKEELLQYKSTIANLMGKAKTIIQLKPRNSDCPLKTSIPIKAICDYRQIEITIYKDDECVLANNSHRAKWKVISPTGNEAMVPSVCFTVPPPNKEAVDLANRIEQQYQNVLTLWHESHINMKSVVSWHYLINEIDRIRASNVASIKTMLPGEHQQVLSNLQSRFEDFLEDSQESQVFSGSDITQLEKEVNVCKQYYQELLKSAEREEQEESVYNLYISEVRNIRLRLENCEDRLIRQIRTPLERDDLHESVFRITEQEKLKKELERLKDDLGTITNKCEEFFSQAAASSSVPTLRSELNVVLQNMNQVYSMSSTYIDKLKTVNLVLKNTQAAEALVKLYETKLCEEEAVIADKNNIENLISTLKQWRSEVDEKRQVFHALEDELQKAKAISDEMFKTYKERDLDFDWHKEKADQLVERWQNVHVQIDNRLRDLEGIGKSLKYYRDTYHPLDDWIQQVETTQRKIQENQPENSKTLATQLNQQKMLVSEIEMKQSKMDECQKYAEQYSATVKDYELQTMTYRAMVDSQQKSPVKRRRMQSSADLIIQEFMDLRTRYTALVTLMTQYIKFAGDSLKRLEEEEKSLEEEKKEHVEKAKELQKWVSNISKTLKDAEKAGKPPFSKQKISSEEISTKKEQLSEALQTIQLFLAKHGDKMTDEERNELEKQVKTLQESYNLLFSESLKQLQESQTSGDVKVEEKIVAERQQEYKEKLQGICDLLTQTENRLIGHQEAFMIGDGTVELKKYQSKQEELQKDMQGSAQALAEVVKNTENFLKENGEKLSQEDKALIEQKLNEAKIKCEQLNLKAEQSKKELDKVVTTAIKEETEKVAAVKQLEESKTKIENLLDWLSNVDKDSERAGTKHKQVIEQNGTHFQEGDGKSAIGEEDEVNGNLLETDVDGQVGTTQENLNQQYQKVKAQHEKIISQHQAVIIATQSAQVLLEKQGQYLSPEEKEKLQKNMKELKVHYETALAESEKKMKLTHSLQEELEKFDADYTEFEHWLQQSEQELENLEAGADDINGLMTKLKRQKSFSEDVISHKGDLRYITISGNRVLEAAKSCSKRDGGKVDTSATHREVQRKLDHATDRFRSLYSKCNVLGNNLKDLVDKYQHYEDASCGLLAGLQACEATASKHLSEPIAVDPKNLQRQLEETKALQGQISSQQVAVEKLKKTAEVLLDARGSLLPAKNDIQKTLDDIVGRYEDLSKSVNERNEKLQITLTRSLSVQDGLDEMLDWMGNVESSLKEQGQVPLNSTALQDIISKNIMLEQDIAGRQSSINAMNEKVKKFMETTDPSTASSLQAKMKDLSARFSEASHKHKETLAKMEELKTKVELFENLSEKLQTFLETKTQALTEVDVPGKDVTELSQYMQESTSEFLEHKKHLEVLHSLLKEISSHGLPSDKALVLEKTNNLSKKFKEMEDTIKEKKEAVTSCQEQLDAFQVLVKSLKSWIKETTKKVPIVQPSFGAEDLGKSLEDTKKLQEKWSLKTPEIQKVNNSGISLCNLISAVTTPAKAIAAVKSGGAVLNGEGTATNTEEFWANKGLTSIKKDMTDISHGYEDLGLLLKDKIAELNTKLSKLQKAQEESSAMMQWLQKMNKTATKWQQTPAPTDTEAVKTQVEQNKSFEAELKQNVNKVQELKDKLTELLEENPDTPEAPRWKQMLTEIDSKWQELNQLTIDRQQKLEESSNNLTQFQTVEAQLKQWLVEKELMVSVLGPLSIDPNMLNTQRQQVQILLQEFATRKPQYEQLTAAGQGILSRPGEDPSLRGIVKEQLAAVTQKWDSLTGQLSDRCDWIDQAIVKSTQYQSLLRSLSDKLSDLDNKLSSSLAVSTHPDAMNQQLETAQKMKQEIQQEKKQIKVAQALCEDLSALVKEEYLKAELSRQLEGILKSFKDVEQKAENHVQHLQSACASSHQFQQMSRDFQAWLDTKKEEQNKSHPISAKLDVLESLIKDHKDFSKTLTAQSHMYEKTIAEGENLLLKTQGSEKAALQLQLNTIKTNWDTFNKQVKERENKLKESLEKALKYKEQVETLWPWIDKCQNNLEEIKFCLDPAEGENSIAKLKSLQKEMDQHFGMVELLNNTANSLLSVCEIDKEVVTDENKSLIQKVDMVTEQLHSKKFCLENMTQKFKEFQEVSKESKRQLQCAKEQLDIHDSLGSQAYSNKYLTMLQTQQKSLQALKHQVDLAKRLAQDLVVEASDSKGTSDVLLQVETIAQEHSTLSQQVDEKCSFLETKLQGIGHFQNTIREMFSQFAEFDDELDSMAPVGRDAETLQKQKETIKAFLKKLEALMASNDNANKTCKMMLATEETSPDLVGIKRDLEALSKQCNKLLDRAQAREEQVEGTIKRLEEFYSKLKEFSILLQKAEEHEESQGPVGMETETINQQLNMFKVFQKEEIEPLQGKQQDVNWLGQGLIQSAAKSTSTQGLEHDLDDVNARWKTLNKKVAQRAAQLQEALLHCGRFQDALESLLSWMVDTEELVANQKPPSAEFKVVKAQIQEQKLLQRLLDDRKSTVEVIKREGEKIATTAEPADKVKILKQLSLLDSRWEALLNKAETRNRQLEGISVVAQQFHETLEPLNEWLTTIEKRLVNCEPIGTQASKLEEQIAQHKALEDDIINHNKHLHQAVSIGQSLKVLSSREDKDMVQSKLDFSQVWYIEIQEKSHSRSELLQQALCNAKIFGEDEVELMNWLNEVHDKLSKLSVQDYSTEGLWKQQSELRVLQEDILLRKQNVDQALLNGLELLKQTTGDEVLIIQDKLEAIKARYKDITKLSTDVAKTLEQALQLARRLHSTHEELCTWLDKVEVELLSYETQVLKGEEASQAQMRPKELKKEAKNNKALLDSLNEVSSALLELVPWRAREGLEKMVAEDNERYRLVSDTITQKVEEIDAAILRSQQFDQAADAELSWITETEKKLMSLGDIRLEQDQTSAQLQVQKTFTMEILRHKDIIDDLVKSGHKIMTACSEEEKQSMKKKLDKVLKNYDTICQINSERYLQLERAQSLVNQFWETYEELWPWLTETQSIISQLPAPALEYETLRQQQEEHRQLRELIAEHKPHIDKMNKTGPQLLELSPGEGFSIQEKYVAADTLYSQIKEDVKKRAVALDEAISQSTQFHDKIDQILESLERIVERLRQPPSISAEVEKIKEQISENKNVSVDMEKLQPLYETLKQRGEEMIARSGGTDKDISAKAVQDKLDQMVFIWENIHTLVEEREAKLLDVMELAEKFWCDHMSLIVTIKDTQDFIRDLEDPGIDPSVVKQQQEAAETIREEIDGLQEELDIVINLGSELIAACGEPDKPIVKKSIDELNSAWDSLNKAWKDRIDKLEEAMQAAVQYQDGLQAVFDWVDIAGGKLASMSPIGTDLETVKQQIEELKQFKSEAYQQQIEMERLNHQAELLLKKVTEESDKHTVQDPLMELKLIWDSLEERIINRQHKLEGALLALGQFQHALDELLAWLTHTEGLLSEQKPVGGDPKAIEIELAKHHVLQNDVLAHQSTVEAVNKAGNDLIESSAGEEASNLQNKLEVLNQRWQNVLEKTEQRKQQLDGALRQAKGFHGEIEDLQQWLTDTERHLLASKPLGGLPETAKEQLNVHMEVCAAFEAKEETYKSLMQKGQQMLARCPKSAETNIDQDINNLKEKWESVETKLNERKTKLEEALNLAMEFHNSLQDFINWLTQAEQTLNVASRPSLILDTVLFQIDEHKVFANEVNSHREQIIELDKTGTHLKYFSQKQDVVLIKNLLISVQSRWEKVVQRLVERGRSLDDARKRAKQFHEAWSKLMEWLEESEKSLDSELEIANDPDKIKTQLAQHKEFQKSLGAKHSVYDTTNRTGRSLKEKTSLADDNLKLDDMLSELRDKWDTICGKSVERQNKLEEALLFSGQFTDALQALIDWLYRVEPQLAEDQPVHGDIDLVMNLIDNHKAFQKELGKRTSSVQALKRSARELIEGSRDDSSWVKVQMQELSTRWETVCALSISKQTRLEAALRQAEEFHSVVHALLEWLAEAEQTLRFHGVLPDDEDALRTLIDQHKEFMKKLEEKRAELNKATTMGDTVLAICHPDSITTIKHWITIIRARFEEVLAWAKQHQQRLASALAGLIAKQELLEALLAWLQWAETTLTDKDKEVIPQEIEEVKALIAEHQTFMEEMTRKQPDVDKVTKTYKRRAADPSSLQSHIPVLDKGRAGRKRFPASSLYPSGSQTQIETKNPRVNLLVSKWQQVWLLALERRRKLNDALDRLEELREFANFDFDIWRKKYMRWMNHKKSRVMDFFRRIDKDQDGKITRQEFIDGILSSKFPTSRLEMSAVADIFDRDGDGYIDYYEFVAALHPNKDAYKPITDADKIEDEVTRQVAKCKCAKRFQVEQIGDNKYRFFLGNQFGDSQQLRLVRILRSTVMVRVGGGWMALDEFLVKNDPCRAKGRTNMELREKFILADGASQGMAAFRPRGRRSRPSSRGASPNRSTSVSSQAAQAASPQVPATTTPKILHPLTRNYGKPWLTNSKMSTPCKAAECSDFPVPSAEGTPIQGSKLRLPGYLSGKGFHSGEDSGLITTAAARVRTQFADSKKTPSRPGSRAGSKAGSRASSRRGSDASDFDISEIQSVCSDVETVPQTHRPTPRAGSRPSTAKPSKIPTPQRKSPASKLDKSSKR

SEQ ID NO: 4465 - protein, 1479 aa, Homo sapiens
MSSGNASYRCSMSSSADFSDEDDFSQKSGSASPAPGDTLPWNLPKHERSKRKIQGGSVLDPAERAVLRIADERDKVQKKTFTKWINQHLMKVRKHVNDLYEDLRDGHNLISLLEVLSGDTLPREKGRMRFHRLQNVQIALDYLKRRQVKLVNIRNDDITDGNPKLTLGLIWTIILHFQISDIHVTGESEDMSAKERLLLWTQQATEGYAGIRCENFTTCWRDGKLFNAIIHKYRPDLIDMNTVAVQSNLANLEHAFYVAEKIGVIRLLDPEDVDVSSPDEKSVITYVSSLYDAFPKVPEGGEGIGANDVEVKWIEYQNMVNYLIQWIRHHVTTMSERTFPNNPVELKALYNQYLQFKETEIPPKETEKSKIKRLYKLLEIWIEFGRIKLLQGYHPNDIEKEWGKLIIAMLEREKALRPEVERLEMLQQIANRVQRDSVICEDKLILAGNALQSDSKRLESGVQFQNEAEIAGYILECENLLRQHVIDVQILIDGKYYQADQLVQRVAKLRDEIMALRNECSSVYSKGRILTTEQTKLMISGITQSLNSGFAQTLHPSLTSGLTQSLTPSLTSSSMTSGLSSGMTSRLTPSVTPAYTPGFPSGLVPNFSSGVEPNSLQTLKLMQIRKPLLKSSLLDQNLTEEEINMKFVQDLLNWVDEMQVQLDRTEWGSDLPSVESHLENHKNVHRAIEEFESSLKEAKISEIQMTAPLKLTYAEKLHRLESQYAKLLNTSRNQERHLDTLHNFVSRATNELIWLNEKEEEEVAYDWSERNTNIARKKDYHAELMRELDQKEENIKSVQEIAEQLLLENHPARLTIEAYRAAMQTQWSWILQLCQCVEQHIKENTAYFEFFNDAKEATDYLRNLKDAIQRKYSCDRSSSIHKLEDLVQESMEEKEELLQYKSTIANLMGKAKTIIQLKPRNSDCPLKTSIPIKAICDYRQIEITIYKDDECVLANNSHRAKWKVISPTGNEAMVPSVCFTVPPPNKEAVDLANRIEQQYQNVLTLWHESHINMKSVVSWHYLINEIDRIRASNVASIKTMLPGEHQQVLSNLQSRFEDFLEDSQESQVFSGSDITQLEKEVNVCKQYYQELLKSAEREEQEESVYNLYISEVRNIRLRLENCEDRLIRQIRTPLERDDLHESVFRITEQEKLKKELERLKDDLGTITNKCEEFFSQAAASSSVPTLRSELNVVLQNMNQVYSMSSTYIDKLKTVNLVLKNTQAAEALVKLYETKLCEEEAVIADKNNIENLISTLKQWRSEVDEKRQVFHALEDELQKAKAISDEMFKTYKERDLDFDWHKEKADQLVERWQNVHVQIDNRLRDLEGIGKSLKYYRDTYHPLDDWIQQVETTQRKIQENQPENSKTLATQLNQQKMLVSEIEMKQSKMDECQKYAEQYSATVKDYELQTMTYRAMVDSQQKSPVKRRRMQSSADLIIQEFMDLRTRYTALVTLMTQYIKFAGDSLKRLEEEEKSLEEEK

SEQ ID NO: 4466 - protein, 7 aa, Homo sapiens
MVDTEEL

SEQ ID NO: 4467 - protein, 177 aa, Homo sapiens
  VARIANT 1: note = misc_feature - Xaa can be any naturally occurring amino acid
XQLNQQKMLVSEIEMKQSKMDECQKYAEQYSATVKDYELQTMTYRAMVDSQQKSPVKRRRMQSSADLIIQEFMDLRTRYTALVTLMTQYIKFAGDSLKRLEEEEIAKNKQYDMHTEVTTLKQEKNPVPSAEEWMLEGCRASGGLKKGDFLKKGLEPETFQNFDGDHACSVRDDEFKF

SEQ ID NO: 4468 - protein, 259 aa, Homo sapiens
  VARIANT 1: note = misc_feature - Xaa can be any naturally occurring amino acid
XTRQVAKCKCAKRFQVEQIGDNKYRFGDSQQLRLVRILRSTVMVRVGGGWMALDEFLVKNDPCRAKGRTNMELREKFILADGASQGMAAFRPRGRRSRPSSRGASPNRSTSVSSQAAQAASPQVPATTTPKGTPIQGSKLRLPGYLSGKGFHSGEDSGLITTAAARVRTQFADSKKTPSRPGSRAGSKAGSRASSRRGSDASDFDISEIQSVCSDVETVPQTHRPTPRAGSRPSTAKPSKIPTPQRKSPASKLDKSSKR

SEQ ID NO: 4469 - protein, 448 aa, Homo sapiens
  VARIANT 1: note = misc_feature - Xaa can be any naturally occurring amino acid
XVVTTAIKEETEKVAAVKQLEESKTKIENLLDWLSNVDKDSERAGTKHKQVIEQNGTHFQEGDGKSAIGEEDEVNGNLLETDVDGQVGTTQENLNQQYQKVKAQHEKIISQHQAVIIATQSAQVLLEKQGQYLSPEEKEKLQKNMKELKVHYETALAESEKKMKLTHSLQEELEKFDADYTEFEHWLQQSEQELENLEAGADDINGLMTKLKRQKSFSEDVISHKGDLRYITISGNRVLEAAKSCSKRDGGKVDTSATHREVQRKLDHATDRFRSLYSKCNVLGNNLKDLVDKYQHYEDASCGLLAGLQACEATASKHLSEPIAVDPKNLQRQLEETKALQGQISSQQVAVEKLKKTAEVLLDARGSLLPAKNDIQKTLDDIVGRYEDLSKSVNERNEKLQITLTRSLSVQDGLDEMLDWMGNVESSLKEQDVGTGYCRSSEQYKCHE

SEQ ID NO: 4470 - protein, 43 aa, Homo sapiens
MGFCLALAWTLLVGAWTPLGAQNPISWEVQRFDGWYNNLMEHR

SEQ ID NO: 4471 - protein, 1551 aa, Homo sapiens
MGFCLALAWTLLVGAWTPLGAQNPISWEVQRFDGWYNNLMEHRWGSKGSRLQRLVPASYADGVYQPLGEPHLPNPRDLSNTISRGPAGLASLRNRTVLGVFFGYHVLSDLVSVETPGCPAEFLNIRIPPGDPMFDPDQRGDVVLPFQRSRWDPETGRSPSNPRDPANQVTGWLDGSAIYGSSHSWSDALRSFSRGQLASGPDPAFPRDSQNPLLMWAAPDPATGQNGPRGLYAFGAERGNREPFLQALGLLWFRYHNLWAQRLARQHPDWEDEELFQHARKRVIATYQNIAVYEWLPSFLQKTLPEYTGYRPFLDPSISSEFVAASEQFLSTMVPPGVYMRNASCHFQGVINRNSSVSRALRVCNSYWSREHPSLQSAEDVDALLLGMASQIAEREDHVLVEDVRDFWPGPLKFSRTDHLASCLQRGRDLGLPSYTKARAALGLSPITRWQDINPALSRSNDTVLEATAALYNQDLSWLELLPGGLLESHRDPGPLFSTIVLEQFVRLRDGDRYWFENTRNGLFSKKEIEEIRNTTLQDVLVAVINIDPSALQPNVFVWHKGDPCPQPRQLSTEGLPACAPSVVRDYFEGSGFGFGVTIGTLCCFPLVSLLSAWIVARLRMRNFKRLQGQDRQSIVSEKLVGGMEALEWQGHKEPCRPVLVYLQPGQIRVVDGRLTVLRTIQLQPPQKVNFVLSSNRGRRTLLLKIPKEYDLVLLFNLEEERQALVENLRGALKESGLSIQEWELREQELMRAAVTREQRRHLLETFFRHLFSQVLDINQADAGTLPLDSSQKVREALTCELSRAEFAESLGLKPQDMFVESMFSLADKDGNGYLSFREFLDILVVFMKGSPEEKSRLMFRMYDFDGNGLISKDEFIRMLRSFIEISNNCLSKAQLAEVVESMFRESGFQDKEELTWEDFHFMLRDHNSELRFTQLCVKGVEVPEVIKDLCRRASYISQDMICPSPRVSARCSRSDIETELTPQRLQCPMDTDPPQEIRRRFGKKVTSFQPLLFTEAHREKFQRSCLHQTVQQFKRFIENYRRHIGCVAVFYAIAGGLFLERAYYYAFAAHHTGITDTTRVGIILSRGTAASISFMFSYILLTMCRNLITFLRETFLNRYVPFDAAVDFHRLIASTAIVLTVLHSVGHVVNVYLFSISPLSVLSCLFPGLFHDDGSELPQKYYWWFFQTVPGLTGVVLLLILAIMYVFASHHFRRRSFRGFWLTHHLYILLYVLLIIHGSFALIQLPRFHIFFLVPAIIYGGDKLVSLSRKKVEISVVKAELLPSGVTHLRFQRPQGFEYKSGQWVRIACLALGTTEYHPFTLTSAPHEDTLSLHIRAAGPWTTRLREIYSAPTGDRCARYPKLYLDGPFGEGHQEWHKFEVSVLVGGGIGVTPFASILKDLVFKSSVSCQVFCKKIYFIWVTRTQRQFEWLADIIREVEENDHQDLVSVHIYITQLAEKFDLRTTMLYICERHFQKVLNRSLFTGLRSITHFGRPPFEPFFNSLQEVHPQVRKIGVFSCGPPGMTKNVEKACQLINRQDRTHFSHHYENF

SEQ ID NO: 4472 - protein, 1551 aa, Homo sapiens; identical to SEQ ID NO: 4471

SEQ ID NO: 4473 - protein, 444 aa, Homo sapiens
MGFCLALAWTLLVGAWTPLGAQNPISWEVQRFDGWYNNLMEHRWGSKGSRLQRLVPASYADGVYQPLGEPHLPNPRDLSNTISRGPAGLASLRNRTVLGVFFGYHVLSDLVSVETPGCPAEFLNIRIPPGDPMFDPDQRGDVVLPFQRSRWDPETGRSPSNPRDPANQVTGWLDGSAIYGSSHSWSDALRSFSRGQLASGPDPAFPRDSQNPLLMWAAPDPATGQNGPRGLYAFGAERGNREPFLQALGLLWFRYHNLWAQRLARQHPDWEDEELFQHARKRVIATYQNIAVYEWLPSFLQKTLPEYTGYRPFLDPSISSEFVAASEQFLSTMVPPGVYMRNASCHFQGVINRNSSVSRALRVCNSYWSREHPSLQSAEDVDALLLGMASQIAEREDHVLVEDVRGTGGHSCPVQPGLILARAAPWGTPGEPPGPWTSVQHHRP

SEQ ID NO: 4474 - protein, 1197 aa, Homo sapiens
MWMHCCWAWPPRSQSERTMCWLKMCGVSLRLSLQVVNSWPLGRGSAGLPEPDFWPGPLKFSRTDHLASCLQRGRDLGLPSYTKARAALGLSPITRWQDINPALSRSNDTVLEATAALYNQDLSWLELLPGGLLESHRDPGPLFSTIVLEQFVRLRDGDRYWFENTRNGLFSKKEIEEIRNTTLQDVLVAVINIDPSALQPNVFVWHKGDPCPQPRQLSTEGLPACAPSVVRDYFEGSGFGFGVTIGTLCCFPLVSLLSAWIVARLRMRNFKRLQGQDRQSIVSEKLVGGMEALEWQGHKEPCRPVLVYLQPGQIRVVDGRLTVLRTIQLQPPQKVNFVLSSNRGRRTLLLKIPKEYDLVLLFNLEEERQALVENLRGALKESGLSIQEWELREQELMRAAVTREQRRHLLETFFRHLFSQVLDINQADAGTLPLDSSQKVREALTCELSRAEFAESLGLKPQDMFVESMFSLADKDGNGYLSFREFLDILVVFMKGSPEEKSRLMFRMYDFDGNGLISKDEFIRMLRSFIEISNNCLSKAQLAEVVESMFRESGFQDKEELTWEDFHFMLRDHNSELRFTQLCVKGVEVPEVIKDLCRRASYISQDMICPSPRVSARCSRSDIETELTPQRLQCPMDTDPPQEIRRRFGKKVTSFQPLLFTEAHREKFQRSCLHQTVQQFKRFIENYRRHIGCVAVFYAIAGGLFLERAYYYAFAAHHTGITDTTRVGIILSRGTAASISFMFSYILLTMCRNLITFLRETFLNRYVPFDAAVDFHRLIASTAIVLTVLHSVGHVVNVYLFSISPLSVLSCLFPGLFHDDGSELPQKYYWWFFQTVPGLTGVVLLLILAIMYVFASHHFRRRSFRGFWLTHHLYILLYVLLIIHGSFALIQLPRFHIFFLVPAIIYGGDKLVSLSRKKVEISVVKAELLPSGVTHLRFQRPQGFEYKSGQWVRIACLALGTTEYHPFTLTSAPHEDTLSLHIRAAGPWTTRLREIYSAPTGDRCARYPKLYLDGPFGEGHQEWHKFEVSVLVGGGIGVTPFASILKDLVFKSSVSCQVFCKKIYFIWVTRTQRQFEWLADIIREVEENDHQDLVSVHIYITQLAEKFDLRTTMLYICERHFQKVLNRSLFTGLRSITHFGRPPFEPFFNSLQEVHPQVRKIGVFSCGPPGMTKNVEKACQLINRQDRTHFSHHYENF

SEQ ID NO: 4475 - protein, 122 aa, Homo sapiens
MARSLGVLVALPFPLPVGFNAEEAHNIVKECVDGVLGGEDYNHNNINQWTASIVEQSLTHLVKLGKAYKYIVTCAVVQKSAYGFHTASSCFWDTTSDGTCTVRWENRTMNCIVNVFAIAIVL

SEQ ID NO: 4476 - protein, 152 aa, Homo sapiens
MEEYHRHCDEVGFNAEEAHNIVKECVDGVLGGEDYNHNNINQWTASIVEQSLTHLVKLGKAYKYIVTCAVVQKSAYGFHTASSCFWDTTSDGTCTVRWENRTMNCGVLLCRPGWSAVMQFRLTATSASQVQVILLPQPPEYLELQAHAITPG

SEQ ID NO: 4477 - protein, 116 aa, Homo sapiens
MEEYHRHCDEVGFNAEEAHNIVKECVDGVLGGEDYNHNNINQWTASIVEQSLTHLVKLGKAYKYIVTCAVVQKSAYGFHTASSCFWDTTSDGTCTVRWENRTMNCIVNVFAIAIVL

SEQ ID NO: 4478 - protein, 346 aa, Homo sapiens
MAAAEPASSGQQAPAGQGQGQRPPPQPPQAQAPQPPPPPQLGGAGGGSSRHEKSLGLLTTKFVSLLQEAKDGVLDLKAAADTLAVRQKRRIYDITNVLEGIDLIEKKSKNSIQWKGVGAGCNTKEVIDRLRYLKAEIEDLELKERELDQQKLWLQQSIKNVMDDSINNRFSYVTHEDICNCFNGDTLLAIQAPSGTQLEVPIPEMGQNGQKKYQINLKSHSGPIHVLLINKESSSSKPVVFPVPPPDDLTQPSSQSLTPVTPQKSSMATQNLPEQHVSERSQALQQTSATDISSAGSISGDIIDELMSSDVFPLLRLSPTPADDYNFNLDDNEGVCDLFDVQILNY

SEQ ID NO: 4479 - protein, 345 aa, Homo sapiens
MAAAEPASSGQQAPAGQGQGQRPPPQPPQAQAPQPPPPPQLGGAGGGSSRHEKSLGLLTTKFVSLLQEAKDGVLDLKAAADTLAVRQKRRIYDITNVLEGIDLIEKKSKNSIQWKGVGAGCNTKEVIDRLRYLKAEIEDLELKERELDQQKLWLQQSIKNVMDDSINNRFSYVTHEDICNCFNGDTLLAIQAPSGTQLEVPIPEMGQNGQKKYQINLKSHSGPIHVLLINKESSSSKPVVFPVPPPDDLTQPSSQSLTPVTPQKSSMATQNLPEQHVSERSQALQQTSATDISSGSISGDIIDELMSSDVFPLLRLSPTPADDYNFNLDDNEGVCDLFDVQILNY

SEQ ID NO: 4480 - protein, 185 aa, Homo sapiens
MDDSINNRFSYVTHEDICNCFNGDTLLAIQAPSGTQLEVPIPEMGQNGQKKYQINLKSHSGPIHVLLINKESSSSKPVVFPVPPPDDLTQPSSQSLTPVTPQKSSMATQNLPEQHVSERSQALQQTSATDISSAGSISGDIIDELMSSDVFPLLRLSPTPADDYNFNLDDNEGVCDLFDVQILNY

SEQ ID NO: 4481 - protein, 173 aa, Homo sapiens
MKTSVIALMVSDTLLAIQAPSGTQLEVPIPEMGQNGQKKYQINLKSHSGPIHVLLINKESSSSKPVVFPVPPPDDLTQPSSQSLTPVTPQKSSMATQNLPEQHVSERSQALQQTSATDISSAGSISGDIIDELMSSDVFPLLRLSPTPADDYNFNLDDNEGVCDLFDVQILNY

SEQ ID NO: 4482 - protein, 182 aa, Homo sapiens
SYDSTFSYVTHEDICNCFNGDTLLAIQAPSGTQLEVPIPEMGQNGQKKYQINLKSHSGPIHVLLINKESSSSKPVVFPVPPPDDLTQPSSQSLTPVTPQKSSMATQNLPEQHVSERSQALQQTSATDISSAGSISGDIIDELMSSDVFPLLRLSPTPADDYNFNLDDNEGVCDLFDVQILNY

SEQ ID NO: 4483 - protein, 249 aa, Homo sapiens
  VARIANT 1: note = misc_feature - Xaa can be any naturally occurring amino acid
XLLQEAKDGVLDLKAAADTLAVRQKRRIYDITNVLEGIDLIEKKSKNSIQWKGVGAGCNTKEVIDRLRYLKAEIEDLELKERELDQQKLWLQQSIKNVMDDSINNRFSYVTHEDICNCFNGDTLLAIQAPSGTQLEVPIPEMGQNGQKKYQINLKSHSGPIHVLLINKESSSSKPVVFPVPPPDDLTQPSSQSLTPVTPQKSSMATQNLPEQHVSERSQALQQTSATDISSAGSISGDIIDELMSSDGK

SEQ ID NO: 4484 - protein, 130 aa, Homo sapiens
  VARIANT 1: note = misc_feature - Xaa can be any naturally occurring amino acid
XNKESSSSKPVVFPVPPPDDLTQPSSQSLTPVTPQKSSMATQNLPEQHVSERSQALQQTSATDISSAGSISGDIIDELMSSDGGKLKDTTGHQKQVGQGLITCLIFLLPLNCLYFCMSFYPNRRSLPLVK

SEQ ID NO: 4485 - protein, 78 aa, Homo sapiens
MAITQFRLFKFCTCLATVFSFLKRLICRSGRGRKLSGDQITLPTTVDYSSVPKQTDVEEWTSWDEDAPTSVKIEGGNG

SEQ ID NO: 4486 - protein, 197 aa, Homo sapiens
MAITQFRLFKFCTCLATVFSFLKRLICRSGRGRKLSGDQITLPTTVDYSSVPKQTDVEEWTSWDEDAPTSVKIEGGNGNVATQQNSLEQLEPDYFKDMTPTIRKTQKIVIKKREPLNFGIPDGSTGFSSRLAATQDLPFIHQSSELGDLDTWQENTNAWEEEEDAAWQAEEVLRQQKLADREKRAAEQQRKKMEKEA

SEQ ID NO: 4487 - protein, 213 aa, Homo sapiens
MAITQFRLFKFCTCLATVFSFLKRLICRSGRGRKLSGDQITLPTTVDYSSVPKQTDVEEWTSWDEDAPTSVKIEGGNGNVATQQNSLEQLEPDYFKDMTPTIRKTQKIVIKKREPLNFGIPDGSTGFSSRLAATQDLPFIHQSSELGDLDTWQENTNAWEEEEDAAWQAEEVLRQQKLADREKRAAEQQRKKMEKEAQRLMKKEQNKIGVKLS

SEQ ID NO: 4488 - protein, 213 aa, Homo sapiens; identical to SEQ ID NO: 4487

SEQ ID NO: 4489 - protein, 213 aa, Homo sapiens; identical to SEQ ID NO: 4487

SEQ ID NO: 4490 - protein, 258 aa, Homo sapiens
MAITQFRLFKFCTCLATVFSFLKRLICRSGRGRKLSGDQITLPTTVDYSSVPKQTDVEEWTSWDEDAPTSVKIEGGNGNVATQQNSLEQLEPDYFKDMTPTIRKTQKIVIKKREPLNFGIPDGSTGFSSRLAATQDLPFIHQSSELGDLDTWQENTNAWEEEEDAAWQAEEVLRSRTNVCLLCSLLFHHPTPTSTPYINQSVKIERVSLGQWSYGKSKEQQKLADREKRAAEQQRKKMEKEAQRLMKKEQNKIGVKLS

SEQ ID NO: 4491 - protein, 258 aa, Homo sapiens; identical to SEQ ID NO: 4490

SEQ ID NO: 4492 - protein, 153 aa, Homo sapiens
MAITQFRLFKFCTCLATVFSFLKRLICRSGRGRKLSGDQITLPTTVDYSSVPKQTDVEEWTSWDEDAPTSVKIEGGNGNVATQQNSLEQLEPDYFKDMTPTIRKTQKIVIKKREPLNFGIPDGSTGFSSRLAATQDLPFIHQSTSHWVGATII

SEQ ID NO: 4493 - protein, 41 aa, Homo sapiens
MTPTIRKTQKIVIKKREPLNFGIPDGSTGFSSRLAATQDLP

SEQ ID NO: 4494 - protein, 229 aa, Homo sapiens
MTPQLLLALVLWASCPPCSGRKGPPAALTLPRVQCRASRYPIAVDCSWTLPPAPNSTSPVSFIATYRLGMAARGHSWPCLQQTPTSTSCTITDVQLFSMAPYVLNVTAVHPWGSSSSFVPFITEHIIKPDPPEGVRLSPLAERQLQVQWEPPGSWPFPEIFSLKYWIRYKRQGAARFHRVGPIEATSFILRAVRPRARYYVQVAAQDLTDYGELSDWSLPATATMSLGK

SEQ ID NO: 4495 - protein, 83 aa, Homo sapiens
MAKSLLKTASLSGRTKLLHQTGLSLYSTSHGFYEEEVKKTLQQFPGGSIDLQKEDNGIGILTLNNPSRMNAFSEFREISLYQC

SEQ ID NO: 4496 - protein, 125 aa, Homo sapiens
MAKSLLKTASLSGRTKLLHQTGLSLYSTSHGFYEEEVKKTLQQFPGGSIDLQKEDNGIGILTLNNPSRMNAFSGVMMLQLLEKVIELENWTEGKGLIVRGAKNTFSSGSDLNAVKSLGTPEANFL

SEQ ID NO: 4497 - protein, 135 aa, Homo sapiens
MAKSLLKTASLSGRTKLLHQTGLSLYSTSHGFYEEEVKKTLQQFPGGSIDLQKEDNGIGILTLNNPSRMNAFSGVMMLQLLEKVIELENWTEGKGLIVRGAKNTFSSGSDLNAVKSLGTPEDGMAVCMFMQNTLT

SEQ ID NO: 4498 - protein, 139 aa, Homo sapiens
MAKSLLKTASLSGRTKLLHQTGLSLYSTSHGFYEEEVKKTLQQFPGGSIDLQKEDNGIGILTLNNPSRMNAFSGVMMLQLLEKVIELENWTEGKGLIVRGAKNTFSSGSDLNAVKSLGTPEDGMAVCMFMQNTLTRFMR

SEQ ID NO: 4499 - protein, 151 aa, Homo sapiens
MAKSLLKTASLSGRTKLLHQTGLSLYSTSHGFYEEEVKKTLQQFPGGSIDLQKEDNGIGILTLNNPSRMNAFSGVMMLQLLEKVIELENWTEGKGLIVRGAKNTFSSGSDLNAVKSLGTPEDGMAVCMFMQNTLTRFMRLPLISVALVQGW

SEQ ID NO: 4500 - protein, 301 aa, Homo sapiens
MAKSLLKTASLSGRTKLLHQTGLSLYSTSHGFYEEEVKKTLQQFPGGSIDLQKEDNGIGILTLNNPSRMNAFSGVMMLQLLEKVIELENWTEGKGLIVRGAKNTFSSGSDLNAVKSLGTPEDGMAVCMFMQNTLTRFMRLPLISVALVQGWALGGGAEFTTACDFRLMTPESKIRFVHKEMGIIPSWGGTTRLVEIIGSRQALKVLSGALKLDSKNALNIGMVEEVLQSSDETKSLEEAQEWLKQFIQGPPEVIRALKKSVCSGRELYLEEALQNERDLLGTVWGGPANLEAIAKKGKFNK

SEQ ID NO: 4501 - protein, 301 aa, Homo sapiens; identical to SEQ ID NO: 4500

SEQ ID NO: 4502 - protein, 301 aa, Homo sapiens; identical to SEQ ID NO: 4500

SEQ ID NO: 4503 - protein, 179 aa, Homo sapiens
MAKSLLKTASLSGRTKLLHQTGLSLYSTSHGFYEEEVKKTLQQFPGGSIDLQKEDNGIGILTLNNPSRMNAFSGVMMLQLLEKVIELENWTEGKGLIVRGAKNTFSSGSDLNAVKSLGTPEESCRWNTEFLYTLHPVSPFINILYSYGWNGRMHVHAKHLNKIYETSFNKCCAGSRLGI

SEQ ID NO: 4504 - protein, 125 aa, Homo sapiens
MAKSLLKTASLSGRTKLLHQTGLSLYSTSHGFYEEEVKKTLQQFPGGSIDLQKEDNGIGILTLNNPSRMNAFSGVMMLQLLEKVIELENWTEGKGLIVRGAKNTFSSGSDLNAVKSLGTPEGDFL

SEQ ID NO: 4505 - protein, 145 aa, Homo sapiens
MAKSLLKTASLSGRTKLLHQTGLSLYSTSHGFYEEEVKKTLQQFPGGSIDLQKEDNGIGILTLNNPSRMNAFSGVMMLQLLEKVIELENWTEGKGLIVRGAKNTFSSGSDLNAVKSLGTPETSFNKCCAGSRLGIGWRSRIYYSM

SEQ ID NO: 4506 - protein, 145 aa, Homo sapiens; identical to SEQ ID NO: 4505

SEQ ID NO: 4507 - protein, 307 aa, Homo sapiens
MALKQEMAKSLLKTASLSGRTKLLHQTGLSLYSTSHGFYEEEVKKTLQQFPGGSIDLQKEDNGIGILTLNNPSRMNAFSGVMMLQLLEKVIELENWTEGKGLIVRGAKNTFSSGSDLNAVKSLGTPEDGMAVCMFMQNTLTRFMRLPLISVALVQGWALGGGAEFTTACDFRLMTPESKIRFVHKEMGIIPSWGGTTRLVEIIGSRQALKVLSGALKLDSKNALNIGMVEEVLQSSDETKSLEEAQEWLKQFIQGPPEVIRALKKSVCSGRELYLEEALQNERDLLGTVWGGPANLEAIAKKGKFNK

SEQ ID NO: 4508 - protein, 226 aa, Homo sapiens
MMLQLLEKVIELENWTEGKGLIVRGAKNTFSSGSDLNAVKSLGTPEDGMAVCMFMQNTLTRFMRLPLISVALVQGWALGGGAEFTTACDFRLMTPESKIRFVHKEMGIIPSWGGTTRLVEIIGSRQALKVLSGALKLDSKNALNIGMVEEVLQSSDETKSLEEAQEWLKQFIQGPPEVIRALKKSVCSGRELYLEEALQNERDLLGTVWGGPANLEAIAKKGKFNK

SEQ ID NO: 4509 - protein, 70 aa, Homo sapiens
MMLQLLEKVIELENWTEGKGLIVRGAKNTFSSGSDLNAVKSLGTPETSFNKCCAGSRLGIGWRSRIYYSM

SEQ ID NO: 4510 - protein, 34 aa, Homo sapiens
  VARIANT 1: note = misc_feature - Xaa can be any naturally occurring amino acid
XFMRLPLISVALVQGWALGGGAEFTTACDFSFRH

SEQ ID NO: 4511 - protein, 76 aa, Homo sapiens
  VARIANT 1: note = misc_feature - Xaa can be any naturally occurring amino acid
XMLQLLEKVIELENWTEGKGLIVRGAKNTFSSGSDLNAVKSLGTPEDGMAVCMFMQNTLTRFMSRMCGEVVCIQRR

SEQ ID NO: 4512 - protein, 100 aa, Homo sapiens
  VARIANT 1: note = misc_feature - Xaa can be any naturally occurring amino acid
XTPEVKKQRGKILLGLSRLPLISVALVQGWALGGGAEFTTACDFRLMTPESKIRFVHKEMGIIPSWGGTTRLVEIIGSRQALKVLSGALKLDSKNALNIG

SEQ ID NO: 4513 - protein, 255 aa, Homo sapiens
  VARIANT 1: note = misc_feature - Xaa can be any naturally occurring amino acid
XTSHGFYEEEVKKTLQQFPGGSIDLQKEDNGIGILTLNNPSRMNAFSGVMMLQLLEKVIELENWTEGKGLIVRGAKNTFSSGSDLNAVKSLGTPEESCRWNTEFLYTLHPVSPFINILYSYGWNGRMHVHAKHLNKIYEVKKQRGKILLGLSRLPLISVALVQGWALGGGAEFTTACDFRLMTPESKIRFVHKEMGIIPSWGGTTRLVEIIGSRQALKVLSGALKLDSKNALNIGMVEEVLQSSDETKSLEEAQE

SEQ ID NO: 4514 - protein, 567 aa, Homo sapiens
MGTTARAALVLTYLAVASAASEGGFTATGQRQLRPEHFQEVGYAAPPSPPLSRSLPMDHPDSSQHGPPFEGQSGKEGRGPRPHSQPWLGERVGCSHIPPSIVQPPPSQEATPLQQEKLLPAQLPAEKEVGPPLPQEAVPLQKELPSLQHPNEQKEGTPAPFGDQSHPEPESWNAAQHCQQDRSQGGWGHRLDGFPPGRPSPDNLNQICLPNRQHVVYGPWNLPQSSYSHLTRQGETLNFLEIGYSRCCHCRSHTNRLECAKLVWEEAMSRFCEAEFSVKTRPHWCCTRQGEARFSCFQEEAPQPHYQLRACPSHQPDISSGLELPFPPGVPTLDNIKNICHLRRFRSVPRNLPATDPLQRELLALIQLEREFQRCCRQGNNHTCTWKAWEDTLDKYCDREYAVKTHHHLCCRHPPSPTRDECFARRAPYPNYDRDILTIDIGRVTPNLMGHLCGNQRVLTKHKHIPGLIHNMTARCCDLPFPEQACCAEEEKLTFINDLCGPRRNIWRDPALCCYLSPGDEQVNCFNINYLRNVALVSGDTENAKGQGEQGSTGGTNISSTSEPKEE

SEQ ID NO: 4515 - protein, 415 aa, Homo sapiens
MGTTARAALVLTYLAVASAASEGGFTATGQRQLRPEHFQEVGYAAPPSPPLSRSLPMDHPDSSQHGPPFEGQSQVQPPPSQEATPLQQEKLLPAQLPAEKEVGPPLPQEAVPLQKELPSLQHPNEQKEGTPAPFGDQSHPEPESWNAAQHCQQDRSQGGWGHRLDGFPPGRPSPDNLNQICLPNRQHVVYGPWNLPQSSYSHLTRQGETLNFLEIGYSRCCHCRSHTNRLECAKLVWEDTLDKYCDREYAVKTHHHLCCRHPPSPTRDECFARRAPYPNYDRDILTIDIGRVTPNLMGHLCGNQRVLTKHKHIPGLIHNMTARCCDLPFPEQACCAEEEKLTFINDLCGPRRNIWRDPALCCYLSPGDEQVNCFNINYLRNVALVSGDTENAKGQGEQGSTGGTNISSTSEPKEE

SEQ ID NO: 4516 - protein, 540 aa, Homo sapiens
MGTTARAALVLTYLAVASAASEGGFTATGQRQLRPEHFQEVGYAAPPSPPLSRSLPMDHPDSSQHGPPFEGQSQVQPPPSQEATPLQQEKLLPAQLPAEKEVGPPLPQEAVPLQKELPSLQHPNEQKEGTPAPFGDQSHPEPESWNAAQHCQQDRSQGGWGHRLDGFPPGRPSPDNLNQICLPNRQHVVYGPWNLPQSSYSHLTRQGETLNFLEIGYSRCCHCRSHTNRLECAKLVWEEAMSRFCEAEFSVKTRPHWCCTRQGEARFSCFQEEAPQPHYQLRACPSHQPDISSGLELPFPPGVPTLDNIKNICHLRRFRSVPRNLPATDPLQRELLALIQLEREFQRCCRQGNNHTCTWKAWEDTLDKYCDREYAVKTHHHLCCRHPPSPTRDECFARRAPYPNYDRDILTIDIGRVTPNLMGHLCGNQRVLTKHKHIPGLIHNMTARCCDLPFPEQACCAEEEKLTFINDLCGPRRNIWRDPALCCYLSPGDEQVNCFNINYLRNVALVSGDTENAKGQGEQGSTGGTNISSTSEPKEE

SEQ ID NO: 4517 - protein, 160 aa, Homo sapiens
MKIAVLFCFFLLIIFQTDFGKNEEIPRKQRRKIYHRRLRKSSTSHKHRSNRQLGIQQTTVFTPVARLPIVNFDYSMEEKFESFSSFPGVESSYNVLPGKKGHCLVKGITMYNKAVWSPEPCTTCLCSDGRVLCDETMCHPQRCPQTVIPEGECCPVCSAT

SEQ ID NO: 4518 - protein, 643 aa, Homo sapiens
MKIAVLFCFFLLIIFQTDFGKNEEIPRKQRRKIYHRRLRKSSTSHKHRSNRQLGIQQTTVFTPVARLPIVNFDYSMEEKFESFSSFPGVESSYNVLPGKKGHCLVKGITMYNKAVWSPEPCTTCLCSDGRVLCDETMCHPQRCPQTVIPEGECCPVCSATEQREPTNLLHKQLPPPQVGMDRIVRKEALQSEEDEEVKEEDTEQKRETPESRNQGQLYSEGDSRGGDRKQRPGEERRLAHQQQRQGREEEEDEEEEGEEGEEDEEDEEDPVRGDMFRMPSRSPLPAPPRGTLRLPSGCSLSYRTISCINAMLTQIPPLTAPQITSLELTGNSIASIPDEAFNGLPNLERLDLSKNNITSSGIGPKAFKLLKKLMRLNMDGNNLIQIPSQLPSTLEELKVNENNLQAIDEESLSDLNQLVTLELEGNNLSEANVNPLAFKPLKSLAYLRLGKNKFRIIPQGLPGSIEELYLENNQIEEITEICFNHTRKINVIVLRYNKIEENRIAPLAWINQENLESIDLSYNKLYHVPSYLPKSLLHLVLLGNQIERIPGYVFGHMEPGLEYLYLSFNKLADDGMDRVSFYGAYHSLRELFLDHNDLKSIPPGIQEMKALHFLRLNNNKIRCVSDAVLETVTNRSDVAFPLW

SEQ ID NO: 4519 - protein, 164 aa, Homo sapiens
MKIAVLFCFFLLIIFQTDFGKNEEIPRKQRRKIYHRRLRKSSTSHKHRSNRQLGIQQTTVFTPVARLPIVNFDYSMEEKFESFSSFPGVESSYNVLPGKKGHCLVKGITMYNKAVWSPEPCTTCLCSDGRVLCDETMCHPQRCPQTVIPEGECCPVCSATGTEI

SEQ ID NO: 4520 - protein, 699 aa, Homo sapiens
MKIAVLFCFFLLIIFQTDFGKNEEIPRKQRRKIYHRRLRKSSTSHKHRSNRQLGIQQTTVFTPVARLPIVNFDYSMEEKFESFSSFPGVESSYNVLPGKKGHCLVKGITMYNKAVWSPEPCTTCLCSDGRVLCDETMCHPQRCPQTVIPEGECCPVCSATVSYSLLSGIALNDRNEFSGDSSEQREPTNLLHKQLPPPQVGMDRIVRKEALQSEEDEEVKEEDTEQKRETPESRNQGQLYSEGDSRGGDRKQRPGEERRLAHQQQRQGREEEEDEEEEGEEGEEDEEDEEDPVRGDMFRMPSRSPLPAPPRGTLRLPSGCSLSYRTISCINAMLTQIPPLTAPQITSLELTGNSIASIPDEAFNGLPNLERLDLSKNNITSSGIGPKAFKLLKKLMRLNMDGNNLIQIPSQLPSTLEELKVNENNLQAIDEESLSDLNQLVTLELEGNNLSEANVNPLAFKPLKSLAYLRLGKNKFRIIPQGLPGSIEELYLENNQIEEITEICFNHTRKINVIVLRYNKIEENRIAPLAWINQENLESIDLSYNKLYHVPSYLPKSLLHLVLLGNQIERIPGYVFGHMEPGLEYLYLSFNKLADDGMDRVSFYGAYHSLRELFLDHNDLKSIPPGIQEMKALHFLRLNNNKIRNILPEEICNAEEDDDSNLEHLHLENNYIKIREIPSYTFSCIRSYSSIVLKPQNIK

SEQ ID NO: 4521 - protein, 102 aa, Homo sapiens
MREYGVERDLAVYNQLLNIFPKEVFRPRNIIQRIFVHYPRQQECGIAVLEQMENHGVMPNKETEFLLIQIFGRKSYPMLKLVRLKLWFPRFMNVNPFPVPRD

SEQ ID NO: 4522 - protein, 223 aa, Homo sapiens
MREYGVERDLAVYNQLLNIFPKEVFRPRNIIQRIFVHYPRQQECGIAVLEQMENHGVMPNKETEFLLIQIFGRKSYPMLKLVRLKLWFPRFMNVNPFPVPRDLPQDPVELAMFGLRHMEPDLSARVTIYQVPLPKDSTGAADPPQPHIVGIQSPDQQAALARHNPARPVFVEGPFSLWLRNKCVYYHILRADLLPPEEREVEETPEEWNLYYPMQLDLEYVRS

SEQ ID NO: 4523 - protein, 267 aa, Homo sapiens
MREYGVERDLAVYNQLLNIFPKEVFRPRNIIQRIFVHYPRQQECGIAVLEQMENHGVMPNKETEFLLIQIFGRKSYPMLKLVRLKLWFPRFMNVNPFPVPRDLPQDPVELAMFGLRHMEPDLSARVTIYQVPLPKDSTGAADPPQPHIVGKSESMGAAKSLTLPRPCQVLAGPRLGSLGLWAESLAGHRACMSPHQESRVPISRPPWPATIQPGLSLLRAPSPCGSATSVCITTSSELTCCPRRRGKWKRRRRSGTSTTRCSWTWSM

SEQ ID NO: 4524 - protein, 25 aa, Homo sapiens
MSWVQATLLARGLCRAWGGTCGAAL

SEQ ID NO: 4525 - protein, 217 aa, Homo sapiens
MSWVQATLLARGLCRAWGGTCGAALTGTSISQVPLPKDSTGAADPPQPHIVGIQSPDQQAALARHNPARPVFVEGPFSLWLRNKCVYYHILRADLLPPEEREVEETPEEWNLYYPMQLDLEYVRSGWDNYEFDINEVEEGPVFAMCMAGAHDQATMAKWIQGLQETNPTLAQIPVVFRLAGSTRELQTSSAGLEEPPLPEDHQEEDDNLQRQQQGQS

SEQ ID NO: 4526 - protein, 82 aa, Homo sapiens
MSWVQATLLARGLCRAWGGTCGAALTGTSISQVPLPKDSTGAADPPQPHIVGSGRDAGGVEPLLPDAAGPGVCEEWLGQLRV

SEQ ID NO: 4527 - protein, 227 aa, Homo sapiens
MSWVQATLLARGLCRAWGGTCGAALTGTSISQVPRRLPRGLHCSAAAHSSEQSLVPSPPEPRQRPTKALVPFEDLFGQAPGGERDKASFLQTVQKFAEHSVRKRGHIDFIYLALRKMREYGVERDLAVYNQLLNIFPKEVFRPRNIIQRIFVHYPRQQECGIAVLEQMENHGVMPNKETEFLLIQIFGRKSYPMLKLVRLKLWFPRFMNVNPFPVPRDLPQDPVELA

SEQ ID NO: 4528 - protein, 296 aa, Homo sapiens
MSWVQATLLARGLCRAWGGTCGAALTGTSISQVPRRLPRGLHCSAAAHSSEQSLVPSPPEPRQRPTKALVPFEDLFGQAPGGERDKASFLQTVQKFAEHSVRKRGHIDFIYLALRKMREYGVERDLAVYNQLLNIFPKEVFRPRNIIQRIFVHYPRQQECGIAVLEQMENHGVMPNKETEFLLIQIFGRKSYPMLKLVRLKLWFPRFMNVNPFPVPRDLPQDPVELAMFGLRHMEPDLSARVTIYQVPLPKDSTGAADPPQPHIVGSGRDAGGVEPLLPDAAGPGVCEEWLGQLRV

SEQ ID NO: 4529 - protein, 431 aa, Homo sapiens
MSWVQATLLARGLCRAWGGTCGAALTGTSISQVPRRLPRGLHCSAAAHSSEQSLVPSPPEPRQRPTKALVPFEDLFGQAPGGERDKASFLQTVQKFAEHSVRKRGHIDFIYLALRKMREYGVERDLAVYNQLLNIFPKEVFRPRNIIQRIFVHYPRQQECGIAVLEQMENHGVMPNKETEFLLIQIFGRKSYPMLKLVRLKLWFPRFMNVNPFPVPRDLPQDPVELAMFGLRHMEPDLSARVTIYQVPLPKDSTGAADPPQPHIVGIQSPDQQAALARHNPARPVFVEGPFSLWLRNKCVYYHILRADLLPPEEREVEETPEEWNLYYPMQLDLEYVRSGWDNYEFDINEVEEGPVFAMCMAGAHDQATMAKWIQGLQETNPTLAQIPVVFRLAGSTRELQTSSAGLEEPPLPEDHQEEDDNLQRQQQGQS

SEQ ID NO: 4530 - protein, 296 aa, Homo sapiens
MSWVQATLLARGLCRAWGGTCGAALTGTSISQVPRRLPRGLHCSAAAHSSEQSLVPSPPEPRQRPTKALVPFEDLFGQAPGGERDKASFLQTVQKFAEHSVRKRGHIDFIYLALRKMREYGVERDLAVYNQLLNIFPKEVFRPRNIIQRIFVHYPRQQECGIAVLEQMENHGVMPNKETEFLLIQIFGRKSYPMLKLVRLKLWFPRFMNVNPFPVPRDLPQDPVELAMFGLRHMEPDLSARVTIYQVPLPKDSTGAADPPQPHIVELTCCPRRRGKWKRRRRSGTSTTRCSWTWSM

SEQ ID NO: 4531 - protein, 59 aa, Homo sapiens
  VARIANT 1: note = misc_feature - Xaa can be any naturally occurring amino acid
XMREYGVERDLAVYNQLLNIFPKEVFRPRNIIQRIFVHYPRQQECGIAVLEQMENHAQV

SEQ ID NO: 4532 - protein, 71 aa, Homo sapiens
  VARIANT 1: note = misc_feature - Xaa can be any naturally occurring amino acid
XVNPFPVPRDLPQDPVELAMFGLRHMEPDLSARVTIYQAPCAAPDAARLPPQRFLCPKTQQVQQIPPSPTS

SEQ ID NO: 4533 - protein, 147 aa, Homo sapiens
MTSSLKIWGILLALLCILCRLCVYSNNIYWREFIKLHYLSPSREFKEYKCDVLMREKEALKGKSFHMFIYSLWFKIQRACINEKGSDRYRNAYVWAPGALKVLECHWEKYNNRYTESRSFSYIEFHCGVDGYVDNIEDLRIIEPISN

SEQ ID NO: 4534 - protein, 147 aa, Homo sapiens
MASSLKIWGTLLALLCILCTLLVQSKEVSWREFMKQHYLSPSREFREYKCDVLMRENEALKDKSSHMFIYISWYKIEHICTSDNWMDRFRNAYVWVQNPLKVLKCHQENSKNSYTESRSFNYIEFHCSMDGYVDSIEDLKMVEPIGN

SEQ ID NO: 4535 - protein, 578 aa, Homo sapiens
MPFRLLIPLGLLCALLPQHHGAPGPDGSAPDPAHYRERVKAMFYHAYDSYLENAFPFDELRPLTCDGHDTWGSFSLTLIDALDTLLILGNVSEFQRVVEVLQDSVDFDIDVNASVFETNIRVVGGLLSAHLLSKKAGVEVEAGWPCSGPLLRMAEEAARKLLPAFQTPTGMPYGTVNLLHGVNPGETPVTCTAGIGTFIVEFATLSSLTGDPVFEDVARVALMRLWESRSDIGLVGNHIDVLTGKWVAQDAGIGAGVDSYFEYLVKGAILLQDKKLMAMFLEYNKAIRNYTRFDDWYLWVQMYKGTVSMPVFQSLEAYWPGLQSLIGDIDNAMRTFLNYYTVWKQFGGLPEFYNIPQGYTVEKREGYPLRPELIESAMYLYRATGDPTLLELGRDAVESIEKISKVECGFATIKDLRDHKLDNRMESFFLAETVKYLYLLFDPTNFIHNNGSTFDAVITPYGECILGAGGYIFNTEAHPIDPAALHCCQRLKEEQWEVEDLMREFYSLKRSRSKFQKNTVSSGPWEPPARPGTLFSPENHDQARERKPAKQKVPLLSCPSQPFTSKLALLGQVFLDSS

SEQ ID NO: 4536 - protein, 541 aa, Homo sapiens
MPFRLLIPLGLLCALLPQHHGAPGPDGSAPDPAHYSFSLTLIDALDTLLILGNVSEFQRVVEVLQDSVDFDIDVNASVFETNIRVVGGLLSAHLLSKKAGVEVEAGWPCSGPLLRMAEEAARKLLPAFQTPTGMPYGTVNLLHGVNPGETPVTCTAGIGTFIVEFATLSSLTGDPVFEDVARVALMRLWESRSDIGLVGNHIDVLTGKWVAQDAGIGAGVDSYFEYLVKGAILLQDKKLMAMFLEYNKAIRNYTRFDDWYLWVQMYKGTVSMPVFQSLEAYWPGLQSLIGDIDNAMRTFLNYYTVWKQFGGLPEFYNIPQGYTVEKREGYPLRPELIESAMYLYRATGDPTLLELGRDAVESIEKISKVECGFATIKDLRDHKLDNRMESFFLAETVKYLYLLFDPTNFIHNNGSTFDAVITPYGECILGAGGYIFNTEAHPIDPAALHCCQRLKEEQWEVEDLMREFYSLKRSRSKFQKNTVSSGPWEPPARPGTLFSPENHDQARERKPAKQKVPLLSCPSQPFTSKLALLGQVFLDSS

SEQ ID NO: 4537 - protein, 932 aa, Homo sapiens
MSEAGGRGCGSPVPQRARWRLVAATAAFCLVSATSVWTAGAEPMSREEKQKLGNQVLEMFDHAYGNYMEHAYPADELMPLTCRGRVRGQEPSRGDVDDALGKFSLTLIDSLDTLVVLNKTKEFEDAVRKVLRDVNLDNDVVVSVFETNIRVLGGLLGGHSLAIMLKEKGEYMQWYNDELLQMAKQLGYKLLPAFNTTSGLPYPRINLKFGIRKPEARTGTETDTCTACAGTLILEFAALSRFTGATIFEEYARKALDFLWEKRQRSSNLVGVTINIHTGDWVRKDSGVGAGIDSYYEYLLKAYVLLGDDSFLERFNTHYDAIMRYISQPPLLLDVHIHKPMLNARTWMDALLAFFPGLQVLKGDIRPAIETHEMLYQVIKKHNFLPEAFTTDFRVHWAQHPLRPEFAESTYFLYKATGDPYYLEVGKTLIENLNKYARVPCGFAAMKDVRTGSHEDRMDSFFLAEMFKYLYLLFADKEDIIFDIEDYIFTTEAHLLPLWLSTTNQSISKKNTTSEYTELDDSNFDWTCPNTQILFPNDPLYAQSIREPLKNVVDKSCPRGIIRVEESFRSGAKPPLRARDFMATNPEHLEILKKMGVSLIHLKDGRVQLVQHAIQAASSIDAEDGLRFMQEMIELSSQQQKEQQLPPRAVQIVSHPFFGRVVLTAGPAQFGLDLSKHKETRGFVASSKPSNGCSELTNPEAVMGKIALIQRGQCMFAEKARNIQNAGAIGGIVIDDNEGSSSDTAPLFQMAGDGKDTDDIKIPMLFLFSKEGSIILDAIREYEEVEVLLSDKAKDRDPEMENEEQPSSENDSQNQSGEQISSSSQEVDLVDQESSEENSLNSHPESLSLADMDNAASISPSEQTSNPTENHETTNLNGECTDLDNQLQEQSETEEDSNPNVSWGKKVQPIDSILADWNEDIEAFEMMEKDEL

SEQ ID NO: 4538 - protein, 905 aa, Homo sapiens
MSREEKQKLGNQVLEMFDHAYGNYMEHAYPADELMPLTCRGRVRGQEPSRGDVDDALGKFSLTLIDSLDTLVVLNKTKEFEDAVRKVLRDVNLDNDVVVSVFETNIRVLGGLLGGHSLAIMLKEKGEYMQWYNDELLQMAKQLGYKLLPAFNTTSGLPYPRINLKFGIRKPEARTGTETDTCTACAGTLILEFAALSRFTGATIFEEYARKALDFLWEKRQRSSNLVGVTINIHTGDWVRKDSGVGAGIDSYYEYLLKAYVLLGDDSFLERFNTHYDAIMRYISQPPLLLDVHIHKPMLNARTWMDALLAFFPGLQVLKGDIRPAIETHEMLYQVIKKHNFLPEAFTTDFRVHWAQHPLRPEFAESTYFLYKATGDPYYLEVGKTLIENLNKYARVPCGFAAMKDVRTGSHEDRMDSFFLAEMFKYLYLLFADKEDIIFDIEDYIFTTEAHLLPLWLSTTNQSISKKNTTSEYTELDDSNFDWTCPNTQILFPNDPLYAQSIREPLKNVVDKSCPRGIIRVEESFRSGAKPPLRARDFMATNPEHLEILKKMGVSLIHLKDGRVQLVQHAIQAASSIDAEDGLRFMQEMIELSSQQQKEQQLPPRAVQIVSHPFFGRVVLTAGPAQFGLDLSKHKETRGFVASSKPSNGCSELTNPEAVMGKIALIQRGQCMFAEKARNIQNAGAIGGIVIDDNEGSSSDTAPLFQMAGDGKDTDDIKIPMLFLFSKEGSIILDAIREYEEVEVLLSDKAKDRAAILKGKMIPSYIINSNPEMENEEQPSSENDSQNQSGEQISSSSQEVDLVDQESSEENSLNSHPESLSLADMDNAASISPSEQTSNPTENHETTNLNGECTDLDNQLQEQSETEEDSNPNVSWGKKVQPIDSILADWNEDIEAFEMMEKDEL

SEQ ID NO: 4539 - protein, 380 aa, Homo sapiens
VDKSCPRGIIRVEESFRSGAKPPLRARDFMATNPEHLEILKKMGVSLIHLKDGRVQLVQHAIQAASSIDAEDGLRFMQEMIELSSQQQKEQQLPPRAVQIVSHPFFGRVVLTAGPAQFGLDLSKHKETRGFVASSKPSNGCSELTNPEAVMGKIALIQRGQCMFAEKARNIQNAGAIGGIVIDDNEGSSSDTAPLFQMAGDGKDTDDIKIPMLFLFSKEGSIILDAIREYEEVEVLLSDKAKDRDPEMENEEQPSSENDSQNQSGEQISSSSQEVDLVDQESSEENSLNSHPESLSLADMDNAASISPSEQTSNPTENHETTNLNGECTDLDNQLQEQSETEEDSNPNVSWGKKVQPIDSILADWNEDIEAFEMMEKDEL

SEQ ID NO: 4540 - protein, 480 aa, Homo sapiens
MKRSVAVWLLVGLSLGVPQFGKGDICDPNPCENGGICLPGLADGSFSCECPDGFTDPNCSSVVEVASDEEEPTSAGPCTPNPCHNGGTCEISEAYRGDTFIGYVCKCPRGFNGIHCQHNINECEVEPCKNGGICTDLVANYSCECPGEFMGRNCQYKCSGPLGIEGGIISNQQITASSTHRALFGLQKWYPYYARLNKKGLINAWTAAENDRWPWIQINLQRKMRVTGVITQGAKRIGSPEYIKSYKIAYSNDGKTWAMYKVKGTNEDMVFRGNIDNNTPYANSFTPPIKAQYVRLYPQVCRRHCTLRMELLGCELSGCSEPLGMKSGHIQDYQITASSIFRTLNMDMFTWEPRKARLDKQGKVNAWTSGHNDQSQWLQVDLLVPTKVTGIITQGAKDFGHVQFVGSYKLAYSNDGEHWTVYQDEKQRKDKVFQGNFDNDTHRKNVIDPPIYARHIRILPWSWYGRITLRSELLGCTEEE

SEQ ID NO: 4541 - protein, 470 aa, Homo sapiens
MKRSVAVWLLVGLSLGVPQFGKGDICDPNPCENGGICLPGLADGSFSCECPDGFTDPNCSSVVEVGPCTPNPCHNGGTCEISEAYRGDTFIGYVCKCPRGFNGIHCQHNINECEVEPCKNGGICTDLVANYSCECPGEFMGRNCQYKCSGPLGIEGGIISNQQITASSTHRALFGLQKWYPYYARLNKKGLINAWTAAENDRWPWIQINLQRKMRVTGVITQGAKRIGSPEYIKSYKIAYSNDGKTWAMYKVKGTNEDMVFRGNIDNNTPYANSFTPPIKAQYVRLYPQVCRRHCTLRMELLGCELSGCSEPLGMKSGHIQDYQITASSIFRTLNMDMFTWEPRKARLDKQGKVNAWTSGHNDQSQWLQVDLLVPTKVTGIITQGAKDFGHVQFVGSYKLAYSNDGEHWTVYQDEKQRKDKVFQGNFDNDTHRKNVIDPPIYARHIRILPWSWYGRITLRSELLGCTEEE

SEQ ID NO: 4542 - protein, 212 aa, Homo sapiens
MDYLLMIFSLLFVACQGAPETAVLGAELSAVGENGGEKPTPSPPWRLRRSKRCSCSSLMDKECVYFCHLDIIWVNTPEHVVPYGLGSPRSKRALENLLPTKATDRENRCQCASQKDKKCWNFCQAGKELRAEDIMEKDWNNHKKGKDCSKLGKKCIYQQLVRGRKIRRSSEEHLRQTRSETMRNSVKSSFHDPKLKGKPSRERYVTHNRAHW

SEQ ID NO: 4543 - protein, 178 aa, Homo sapiens
MVSVPTTWCSVALALLVALHEGKGQAAATLEQPASSSHAQGTHLRLRRCSCSSWLDKECVYFCHLDIIWVNTPEQTAPYGLGNPPRRRRRSLPRRCQCSSARDPACATFCLRRPWTEAGAVPSRKSPADVFQTGKTGATTGELLQRLRDISTVKSLFAKRQQEAMREPRSTHSRWRKR

SEQ ID NO: 4544 - protein, 192 aa, Homo sapiens
MEPGLWLLFGLTVTSAAGFVPCSQSGDAGRRGVSQAPTAARSEGDCEETVAGPGEETVAGPGEGTVAPTALQGPSPGSPGQEQAAEGAPEHHRSRRCTCFTYKDKECVYYCHLDIIWINTPEQTVPYGLSNYRGSFRGKRSAGPLPGNLQLSHRPHLRCACVGRYDKACLHFCTQTLDVSRLKSRTNKASRL

SEQ ID NO: 4545 - protein, 224 aa, Homo sapiens
MEPGLWLLFGLTVTSAAGFVPCSQSGDAGRRGVSQAPTAARSEGDCEETVAGPGEETVAGPGEGTVAPTALQGPSPGSPGQEQAAEGAPEHHRSRRCTCFTYKDKECVYYCHLDIIWINTPEQTVPYGLSNYRGSFRGKRSAGPLPGNLQLSHRPHLRCACVGRYDKACLHFCTQTLDVSRQVEVKDQQSKQALDLHHPKLMPGSGLALAPSTCPRCLFQEGAP

SEQ ID NO: 4546 - protein, 238 aa, Homo sapiens
MEPGLWLLFGLTVTSAAGFVPCSQSGDAGRRGVSQAPTAARSEGDCEETVAGPGEETVAGPGEGTVAPTALQGPSPGSPGQEQAAEGAPEHHRSRRCTCFTYKDKECVYYCHLDIIWINTPEQTVPYGLSNYRGSFRGKRSAGPLPGNLQLSHRPHLRCACVGRYDKACLHFCTQTLDVSSNSRTAEKTDKEEEGKVEVKDQQSKQALDLHHPKLMPGSGLALAPSTCPRCLFQEGAP

SEQ ID NO: 4547 - protein, 238 aa, Homo sapiens; identical to SEQ ID NO: 4546

SEQ ID NO: 4548 - protein, 219 aa, Homo sapiens
MEPGLWLLFGLTVTSAAGFVPCSQSGDAGRRGVSQAPTAARSEGDCEETVAGPGEETVAGPGEGTVAPTALQGPSPGSPGQEQAAEGAPEHHRSRRCTCFTYKDKECVYYCHLDIIWINTPEQTVPYGLSNYRGSFRGKRSAGPLPGNLQLSHRPHLRCACVGRYDKACLHFCTQTLDVSSNSRTAEKTDKEEEGKVRGANRGLCQRRLKSRTNKASRL

SEQ ID NO: 4549 - protein, 198 aa, Homo sapiens
MEPGLWLLFGLTVTSAAGFVPCSQSGDAGRRGVSQAPTAARSEGDCEETVAGPGEETVAGPGEGTVAPTALQGPSPGSPGQEQAAEGAPEHHRSRRCTCFTYKDKECVYYCHLDIIWINTPEQTVPYGLSNYRGSFRGKRSAGPLPGNLQLSHRPHLRCACVGRYDKACLHFCTQTLDVSSNSRTAEKTDKEEEGKVT

SEQ ID NO: 4550 - protein, 162 aa, Homo sapiens
KLVPFIQKASVGITVLSLCALSIDRYRAVASWSRIKGIGVPKWTAVEIVLIWVVSVVLAVPEAIGFDIITMDYKGSYLRICLLHPVQKTAFMQFYKTAKDWWLFSFYFCLPLAITAFFYTLMTCEMLRKKSGMQIALNDHLKQLSVGIGLYWYQHGFTEFLH

SEQ ID NO: 4551 - protein, 532 aa, Homo sapiens
MNKSTCLMAAETPSKRWRLHCLAFSQRFVRAGPACSSREACSSPRAGWNPAGFRLPGRWSPFVALHLVCQIREALKLRSGHRTPSGAGSSMQPPPSLCGRALVALVLACGLSRIWGEERGFPPDRATPLLQTAEIMTPPTKTLWPKGSNASLARSLAPAEVPKGDRTAGSPPRTISPPPCQGPIEIKETFKYINTVVSCLVFVLGIIGNSTLLRIIYKNKCMRNGPNILIASLALGDLLHIVIDIPINVYKLLAEDWPFGAEMCKLVPFIQKASVGITVLSLCALSIDRYRAVASWSRIKGIGVPKWTAVEIVLIWVVSVVLAVPEAIGFDIITMDYKGSYLRICLLHPVQKTAFMQFYKTAKDWWLFSFYFCLPLAITAFFYTLMTCEMLRKKSGMQIALNDHLKQRREVAKTVFCLVLVFALCWLPLHLSRILKLTLYNQNDPNRCELLSFLLVLDYIGINMASLNSCINPIALYLVSKRFKNCFKSCLCCWCQSFEEKQSLEEKQSCLKFKANDHGYDNFRSSNKYSSS

SEQ ID NO: 4552 - protein, 442 aa, Homo sapiens
MQPPPSLCGRALVALVLACGLSRIWGEERGFPPDRATPLLQTAEIMTPPTKTLWPKGSNASLARSLAPAEVPKGDRTAGSPPRTISPPPCQGPIEIKETFKYINTVVSCLVFVLGIIGNSTLLRIIYKNKCMRNGPNILIASLALGDLLHIVIDIPINVYKLLAEDWPFGAEMCKLVPFIQKASVGITVLSLCALSIDRYRAVASWSRIKGIGVPKWTAVEIVLIWVVSVVLAVPEAIGFDIITMDYKGSYLRICLLHPVQKTAFMQFYKTAKDWWLFSFYFCLPLAITAFFYTLMTCEMLRKKSGMQIALNDHLKQRREVAKTVFCLVLVFALCWLPLHLSRILKLTLYNQNDPNRCELLSFLLVLDYIGINMASLNSCINPIALYLVSKRFKNCFKSCLCCWCQSFEEKQSLEEKQSCLKFKANDHGYDNFRSSNKYSSS

SEQ ID NO: 4553 - protein, 409 aa, Homo sapiens
MQPPPSLCGRALVALVLACGLSRIWGEERGFPPDRATPLLQTAEIMTPPTKTLWPKGSNASLARSLAPAEVPKGDRTAGSPPRTISPPPCQGPIEIKETFKYINTVVSCLVFVLGIIGNSTLLRIIYKNKCMRNGPNILIASLALGDLLHIVIDIPINVYKLLAEDWPFGAEMCKLVPFIQKASVGITVLSLCALSIDRYRAVASWSRIKGIGVPKWTAVEIVLIWVVSVVLAVPEAIGFDIITMDYKGSYLRICLLHPVQKTAFMQFYKTAKDWWLFSFYFCLPLAITAFFYTLMTCEMLRKKSGMQIALNDHLKQRREVAKTVFCLVLVFALCWLPLHLSRILKLTLYNQNDPNRCELLSFLLVLDYIGINMASLNSCINPIALYLVSKRFKNCFKVRDYPKIKSSL

SEQ ID NO: 4554 - protein, 442 aa, Homo sapiens; identical to SEQ ID NO: 4552

SEQ ID NO: 4555 - protein, 436 aa, Homo sapiens
MQPPPSLCGRALVALVLACGLSRIWGEERGFPPDRATPLLQTAEIMTPPTKTLWPKGSNASLARSLAPAEVPKGDRTAGSPPRTISPPPCQGPIEIKETFKYINTVVSCLVFVLGIIGNSTLLRIIYKNKCMRNGPNILIASLALGDLLHIVIDIPINVYKLLAEDWPFGAEMCKLVPFIQKASVGITVLSLCALSIDRYRAVASWSRIKGIGVPKWTAVEIVLIWVVSVVLAVPEAIGFDIITMDYKGSYLRICLLHPVQKTAFMQFYKTAKDWWLFSFYFCLPLAITAFFYTLMTCEMLRKKSGMQIALNDHLKQRREVAKTVFCLVLVFALCWLPLHLSRILKLTLYNQNDPNRCELLSFLLVLDYIGINMASLNSCINPIALYLVSKRFKNCFKAGPHVGNKLVMLFSVNIECDGTVNQNPTMWPERKSNNN

SEQ ID NO: 4556 - protein, 442 aa, Homo sapiens; identical to SEQ ID NO: 4552

SEQ ID NO: 4557 - protein, 442 aa, Homo sapiens; identical to SEQ ID NO: 4552

SEQ ID NO: 4558 - protein, 442 aa, Homo sapiens; identical to SEQ ID NO: 4552

SEQ ID NO: 4559 - protein, 27 aa, Homo sapiens
MLKALFLTMLTLALVKSQDTEETITYT

SEQ ID NO: 4560 - protein, 52 aa, Homo sapiens
MLKALFLTMLTLALVKSQDTEETITYTQCTDGYEWDPVRQQCKDIDECDIVP

SEQ ID NO: 4561 - protein, 62 aa, Homo sapiens
MLKALFLTMLTLALVKSQDTEETITYTQCTDGYEWDPVRQQCKDIDECDIVPDACKGGMKCV

SEQ ID NO: 4562 - protein, 87 aa, Homo sapiens
MLKALFLTMLTLALVKSQDTEETITYTQCTDGYEWDPVRQQCKDIDECDIVPDACKGGMKCVNHYGGYLCLPKTAQIIVNNEQPQQE

SEQ ID NO: 4563 - protein, 106 aa, Homo sapiens
MLKALFLTMLTLALVKSQDTEETITYTQCTDGYEWDPVRQQCKDIDECDIVPDACKGGMKCVNHYGGYLCLPKTAQIIVNNEQPQQETQPAEGTSGATTGVVAASS

SEQ ID NO: 4564 - protein, 119 aa, Homo sapiens
MLKALFLTMLTLALVKSQDTEETITYTQCTDGYEWDPVRQQCKDIDECDIVPDACKGGMKCVNHYGGYLCLPKTAQIIVNNEQPQQETQPAEGTSGATTGVVAASSMATSGVLPGGGFV

SEQ ID NO: 4565 - protein, 172 aa, Homo sapiens
MLKALFLTMLTLALVKSQDTEETITYTQCTDGYEWDPVRQQCKDIDECDIVPDACKGGMKCVNHYGGYLCLPKTAQIIVNNEQPQQETQPAEGTSGATTGVVAASSMATSGVLPGGGFVASAAAVAGPEMQTGRNNFVIRRNPADPQRIPSNPSHRIQCAAGYEQSEHNVCQ

SEQ ID NO: 4566 - protein, 493 aa, Homo sapiens
MLKALFLTMLTLALVKSQDTEETITYTQCTDGYEWDPVRQQCKDIDECDIVPDACKGGMKCVNHYGGYLCLPKTAQIIVNNEQPQQETQPAEGTSGATTGVVAASSMATSGVLPGGGFVASAAAVAGPEMQTGRNNFVIRRNPADPQRIPSNPSHRIQCAAGYEQSEHNVCQDIDECTAGTHNCRADQVCINLRGSFACQCPPGYQKRGEQCVDIDECTIPPYCHQRCVNTPGSFYCQCSPGFQLAANNYTCVDINECDASNQCAQQCYNILGSFICQCNQGYELSSDRLNCEDIDECRTSSYLCQYQCVNEPGKFSCMCPQGYQVVRSRTCQDINECETTNECREDEMCWNYHGGFRCYPRNPCQDPYILTPENRCVCPVSNAMCRELPQSIVYKYMSIRSDRSVPSDIFQIQATTIYANTINTFRIKSGNENGEFYLRQTSPVSAMLVLVKSLSGPREHIVDLEMLTVSSIGTFRTSSVLRLTIIVGPFSF

SEQ ID NO: 4567 - protein, 493 aa, Homo sapiens; identical to SEQ ID NO: 4566

SEQ ID NO: 4568 - protein, 46 aa, Homo sapiens
MLKALFLTMLTLALVKSQDTEETITYTQCTDGYEWDPVRQQCKEDS

(The sequence listing continues in the following parts.)
